United States Patent Application Publication US 2005/0244851 A1 - sequence listing, part 65

SEQ ID NO: 2526838 - DNA, 25 bp, Homo sapien
tagaaatggccgacaagttggggca

SEQ ID NO: 2526839 - DNA, 25 bp, Homo sapien
tggctgcggtgactcccagaatcag

SEQ ID NO: 2526840 - DNA, 25 bp, Homo sapien
gctgcggtgactcccagaatcagaa

SEQ ID NO: 2526841 - DNA, 25 bp, Homo sapien
cttggctgcggtgactcccagaatc

SEQ ID NO: 2526842 - DNA, 25 bp, Homo sapien
aacttggctgcggtgactcccagaa

SEQ ID NO: 2526843 - DNA, 25 bp, Homo sapien
ggcagaagatgccttccaggtagtc

SEQ ID NO: 2526844 - DNA, 25 bp, Homo sapien
gcagtcagggttggtccggatgaag

SEQ ID NO: 2526845 - DNA, 25 bp, Homo sapien
cagggttggtccggatgaagtcaca

SEQ ID NO: 2526846 - DNA, 25 bp, Homo sapien
tcagagacattcaggccacacacct

SEQ ID NO: 2526847 - DNA, 25 bp, Homo sapien
tctccaccagcacggagaacaactg

SEQ ID NO: 2526848 - DNA, 25 bp, Homo sapien
aatcttaccagaggggctctttcta

SEQ ID NO: 2526849 - DNA, 25 bp, Homo sapien
acaggtgcgcatcacacgaggctaa

SEQ ID NO: 2526850 - DNA, 25 bp, Homo sapien
cccaatcttaccagaggggctcttt

SEQ ID NO: 2526851 - DNA, 25 bp, Homo sapien
gtctaccacgggggtctggttcaca

SEQ ID NO: 2526852 - DNA, 25 bp, Homo sapien
tctaccacgggggtctggttcacac

SEQ ID NO: 2526853 - DNA, 25 bp, Homo sapien
cagacactgtctccgccattagcag

SEQ ID NO: 2526854 - DNA, 25 bp, Homo sapien
agtgcccagcgcagattcagccttc

SEQ ID NO: 2526855 - DNA, 25 bp, Homo sapien
ctgaagctggaaactgggggctaat

SEQ ID NO: 2526856 - DNA, 25 bp, Homo sapien
gctaatgtgagctcctgtagacgag

SEQ ID NO: 2526857 - DNA, 25 bp, Homo sapien
tttctgcagtagctcagttccaaac

SEQ ID NO: 2526858 - DNA, 25 bp, Homo sapien
cggggcctggcccttactctccact

SEQ ID NO: 2526859 - DNA, 25 bp, Homo sapien
tctgcagtagctcagttccaaacag

SEQ ID NO: 2526860 - DNA, 25 bp, Homo sapien
ccctttctgcagtagctcagttcca

SEQ ID NO: 2526861 - DNA, 25 bp, Homo sapien
tcatgtgttctacgatgagtatgtc

SEQ ID NO: 2526862 - DNA, 25 bp, Homo sapien
ttgcaatcaggaaaccaaaccccat

SEQ ID NO: 2526863 - DNA, 25 bp, Homo sapien
tacgatgagtatgtcttatttttgc

SEQ ID NO: 2526864 - DNA, 25 bp, Homo sapien
ttctttaagtctgcgcaggtgtttc

SEQ ID NO: 2526865 - DNA, 25 bp, Homo sapien
ctgtccacggaagacacggcccttc

SEQ ID NO: 2526866 - DNA, 25 bp, Homo sapien
tctatggttctcccgaacccctcca

SEQ ID NO: 2526867 - DNA, 25 bp, Homo sapien
ccctccaactggagtccgagttact

SEQ ID NO: 2526868 - DNA, 25 bp, Homo sapien
aagacacggcccttcctcttctatg

SEQ ID NO: 2526869 - DNA, 25 bp, Homo sapien
atggacacaaatgctggccgacgcg

SEQ ID NO: 2526870 - DNA, 25 bp, Homo sapien
gaagatcagcatgcgtctcgtctct

SEQ ID NO: 2526871 - DNA, 25 bp, Homo sapien
gccgacgcggtatacaataagagct

SEQ ID NO: 2526872 - DNA, 25 bp, Homo sapien
taaatgttcgcgtccctgatgtccc

SEQ ID NO: 2526873 - DNA, 25 bp, Homo sapien
ttctgtacgcgtgggccgatgccca

SEQ ID NO: 2526874 - DNA, 25 bp, Homo sapien
atgcccagcgctcggatggtcgccg

SEQ ID NO: 2526875 - DNA, 25 bp, Homo sapien
tattgagcgccttctgtacgcgtgg

SEQ ID NO: 2526876 - DNA, 25 bp, Homo sapien
cgatgcccagcgctcggatggtcgc

SEQ ID NO: 2526877 - DNA, 25 bp, Homo sapien
tcaggaacatctccgtgctccgttt

SEQ ID NO: 2526878 - DNA, 25 bp, Homo sapien
tttcccgtccggacggaggctgaga

SEQ ID NO: 2526879 - DNA, 25 bp, Homo sapien
ctgagaagtcgaactcggggcgccc

SEQ ID NO: 2526880 - DNA, 25 bp, Homo sapien
agacctcaggaacatctccgtgctc

SEQ ID NO: 2526881 - DNA, 25 bp, Homo sapien
ggaccagcaaactccgaacctcgac

SEQ ID NO: 2526882 - DNA, 25 bp, Homo sapien
gaacctcgacctcgcagggcctcgc

SEQ ID NO: 2526883 - DNA, 25 bp, Homo sapien
gccggaccgaccttgcgccagcgaa

SEQ ID NO: 2526884 - DNA, 25 bp, Homo sapien
gcctcgcagccttccaggtccctgg

SEQ ID NO: 2526885 - DNA, 25 bp, Homo sapien
ctgggagcacctcgaagcagcacca

SEQ ID NO: 2526886 - DNA, 25 bp, Homo sapien
agcaccaggccaggttcatccccat

SEQ ID NO: 2526887 - DNA, 25 bp, Homo sapien
aggctgggagcacctcgaagcagca

SEQ ID NO: 2526888 - DNA, 25 bp, Homo sapien
gggagcacctcgaagcagcaccagg

SEQ ID NO: 2526889 - DNA, 25 bp, Homo sapien
tctcagtgctatggaaggcctaggc

SEQ ID NO: 2526890 - DNA, 25 bp, Homo sapien
tgggtaaagctactcttagagttgc

SEQ ID NO: 2526891 - DNA, 25 bp, Homo sapien
catacacatagattgggtggttttc

SEQ ID NO: 2526892 - DNA, 25 bp, Homo sapien
acagtgagaacccactctaccaaaa

SEQ ID NO: 2526893 - DNA, 25 bp, Homo sapien
tggattccccggaaaatgtcaggtg

SEQ ID NO: 2526894 - DNA, 25 bp, Homo sapien
ggtttgcaccattttcctctgtaga

SEQ ID NO: 2526895 - DNA, 25 bp, Homo sapien
tgtgaggtacacacggcaggctgtc

SEQ ID NO: 2526896 - DNA, 25 bp, Homo sapien
ggccactggctaggccatcattgga

SEQ ID NO: 2526897 - DNA, 25 bp, Homo sapien
tccaaatcaagtcaggtggccagcc

SEQ ID NO: 2526898 - DNA, 25 bp, Homo sapien
tccaccatttgctatgaggaactgc

SEQ ID NO: 2526899 - DNA, 25 bp, Homo sapien
atcacatatggcttggatgcaggca

SEQ ID NO: 2526900 - DNA, 25 bp, Homo sapien
gaggaactgcagagtcacatcacat

SEQ ID NO: 2526901 - DNA, 25 bp, Homo sapien
caaacatacgacgaggcgctggata

SEQ ID NO: 2526902 - DNA, 25 bp, Homo sapien
caagttggctaaggatgggcacaga

SEQ ID NO: 2526903 - DNA, 25 bp, Homo sapien
tacttgtgggcacttgtcacgccag

SEQ ID NO: 2526904 - DNA, 25 bp, Homo sapien
tggctgagatggttcctcaaccctg

SEQ ID NO: 2526905 - DNA, 25 bp, Homo sapien
gctgttccttgagcgcccgcagctg

SEQ ID NO: 2526906 - DNA, 25 bp, Homo sapien
tggatcacgtggctatagacagcgg

SEQ ID NO: 2526907 - DNA, 25 bp, Homo sapien
cccgcagacgatgaccacgagggat

SEQ ID NO: 2526908 - DNA, 25 bp, Homo sapien
caacctatttgtcatgcccagctgt

SEQ ID NO: 2526909 - DNA, 25 bp, Homo sapien
caaacgtcccgtcatcggcctgaat

SEQ ID NO: 2526910 - DNA, 25 bp, Homo sapien
cagccgcaggtcctgaaccaaacgt

SEQ ID NO: 2526911 - DNA, 25 bp, Homo sapien
ggacctgggaatactgagccaatca

SEQ ID NO: 2526912 - DNA, 25 bp, Homo sapien
acgtcccgtcatcggcctgaattgg

SEQ ID NO: 2526913 - DNA, 25 bp, Homo sapien
gacagaactgtgaaggaaacttggg

SEQ ID NO: 2526914 - DNA, 25 bp, Homo sapien
ggtgagtgggatccccagtggcata

SEQ ID NO: 2526915 - DNA, 25 bp, Homo sapien
gacagccacttagcgcctgagtcag

SEQ ID NO: 2526916 - DNA, 25 bp, Homo sapien
cagtggcataccaagtggacagcca

SEQ ID NO: 2526917 - DNA, 25 bp, Homo sapien
cacagcctcctggtccgagataact

SEQ ID NO: 2526918 - DNA, 25 bp, Homo sapien
tcctggtccgagataacttcagaga

SEQ ID NO: 2526919 - DNA, 25 bp, Homo sapien
acgaacttctcaatggcggccacag

SEQ ID NO: 2526920 - DNA, 25 bp, Homo sapien
gaaaatggggtgttcctgaaacagc

SEQ ID NO: 2526921 - DNA, 25 bp, Homo sapien
agcgccctgagtacttcttgagaaa

SEQ ID NO: 2526922 - DNA, 25 bp, Homo sapien
ggacccttgttgttccctgctagga

SEQ ID NO: 2526923 - DNA, 25 bp, Homo sapien
ttcaaggctcaggattaaggccacc

SEQ ID NO: 2526924 - DNA, 25 bp, Homo sapien
tagtcctccctgctagtaacaagcg

SEQ ID NO: 2526925 - DNA, 25 bp, Homo sapien
tagctgcacttatgggcacctggtg

SEQ ID NO: 2526926 - DNA, 25 bp, Homo sapien
tcagcagcacgtggtttacagtagg

SEQ ID NO: 2526927 - DNA, 25 bp, Homo sapien
tgtgatagctggcactcaggcaacc

SEQ ID NO: 2526928 - DNA, 25 bp, Homo sapien
gacgtcttcagtccctacagtgtgg

SEQ ID NO: 2526929 - DNA, 25 bp, Homo sapien
tgggtttgagtccaagctgtaccac

SEQ ID NO: 2526930 - DNA, 25 bp, Homo sapien
gatctatctcaaagccagccctaag

SEQ ID NO: 2526931 - DNA, 25 bp, Homo sapien
tgggcaagcgatcaaagcctccatt

SEQ ID NO: 2526932 - DNA, 25 bp, Homo sapien
gggactccccagtgcttgctggaca

SEQ ID NO: 2526933 - DNA, 25 bp, Homo sapien
tcttgggcagggagacaagtttgcc

SEQ ID NO: 2526934 - DNA, 25 bp, Homo sapien
tttcacgatggaagcgtggccttcc

SEQ ID NO: 2526935 - DNA, 25 bp, Homo sapien
aaaagtctccatggcgatgacaggc

SEQ ID NO: 2526936 - DNA, 25 bp, Homo sapien
ttcagctctttcacgatggaagcgt

SEQ ID NO: 2526937 - DNA, 25 bp, Homo sapien
ggccagctcgaaggcttcatccaat

SEQ ID NO: 2526938 - DNA, 25 bp, Homo sapien
ccagctcgaaggcttcatccaataa

SEQ ID NO: 2526939 - DNA, 25 bp, Homo sapien
tcgctagggccttggccagctcgaa

SEQ ID NO: 2526940 - DNA, 25 bp, Homo sapien
cgggttgttcttcgctagggccttg

SEQ ID NO: 2526941 - DNA, 25 bp, Homo sapien
tgctgggcaccacgatggtggcggg

SEQ ID NO: 2526942 - DNA, 25 bp, Homo sapien
actgtggcaccttcattcttgaggc

SEQ ID NO: 2526943 - DNA, 25 bp, Homo sapien
acgccgagttgcctggccgcatatg

SEQ ID NO: 2526944 - DNA, 25 bp, Homo sapien
tcttgaggcgctcaatggtgagagc

SEQ ID NO: 2526945 - DNA, 25 bp, Homo sapien
gggtcgggggtggagagcgtgtcag

SEQ ID NO: 2526946 - DNA, 25 bp, Homo sapien
gggtggagagcgtgtcagtgcggga

SEQ ID NO: 2526947 - DNA, 25 bp, Homo sapien
ggtcgggggtggagagcgtgtcagt

SEQ ID NO: 2526948 - DNA, 25 bp, Homo sapien
ggagagcgtgtcagtgcgggagcat

SEQ ID NO: 2526949 - DNA, 25 bp, Homo sapien
ctgccattgttttcagtggcacatt

SEQ ID NO: 2526950 - DNA, 25 bp, Homo sapien
gccattgttttcagtggcacattgc

SEQ ID NO: 2526951 - DNA, 25 bp, Homo sapien
ccattgttttcagtggcacattgct

SEQ ID NO: 2526952 - DNA, 25 bp, Homo sapien
tgccattgttttcagtggcacattg

SEQ ID NO: 2526953 - DNA, 25 bp, Homo sapien
aatgtgcacagccttgcttggccca

SEQ ID NO: 2526954 - DNA, 25 bp, Homo sapien
acaaaatgtgcacagccttgcttgg

SEQ ID NO: 2526955 - DNA, 25 bp, Homo sapien
gagcagacaaaatgtgcacagcctt

SEQ ID NO: 2526956 - DNA, 25 bp, Homo sapien
gcagacaaaatgtgcacagccttgc

SEQ ID NO: 2526957 - DNA, 25 bp, Homo sapien
actgtccatcttgaggtagacgctg

SEQ ID NO: 2526958 - DNA, 25 bp, Homo sapien
tgccggccattttggacagggccat

SEQ ID NO: 2526959 - DNA, 25 bp, Homo sapien
tgccccggatcttgaaggagccgga

SEQ ID NO: 2526960 - DNA, 25 bp, Homo sapien
tcttcacgtgcaggggttctccaga

SEQ ID NO: 2526961 - DNA, 25 bp, Homo sapien
cagcgagggagggatcaactgagta

SEQ ID NO: 2526962 - DNA, 25 bp, Homo sapien
ctgagcaggagtcagagccaagcca

SEQ ID NO: 2526963 - DNA, 25 bp, Homo sapien
actgagtagatagcccacgaagaga

SEQ ID NO: 2526964 - DNA, 25 bp, Homo sapien
agcaggagtcagagccaagccagcg

SEQ ID NO: 2526965 - DNA, 25 bp, Homo sapien
cctcttctccacgcaattcccttgc

SEQ ID NO: 2526966 - DNA, 25 bp, Homo sapien
ctcttctccacgcaattcccttgcc

SEQ ID NO: 2526967 - DNA, 25 bp, Homo sapien
tcaggcgtcagaggcttcgtccctc

SEQ ID NO: 2526968 - DNA, 25 bp, Homo sapien
gcgtcagaggcttcgtccctcttct

SEQ ID NO: 2526969 - DNA, 25 bp, Homo sapien
gtgccacctttgcaacttttgccat

SEQ ID NO: 2526970 - DNA, 25 bp, Homo sapien
acaggaggagagcatgcatgacggg

SEQ ID NO: 2526971 - DNA, 25 bp, Homo sapien
gccctcatgttttgcggggtgtata

SEQ ID NO: 2526972 - DNA, 25 bp, Homo sapien
ggtgtatatcttggggcaggaggac

SEQ ID NO: 2526973 - DNA, 25 bp, Homo sapien
gcatgacgggggttggagtacgtgt

SEQ ID NO: 2526974 - DNA, 25 bp, Homo sapien
tttggtcccaagaaattgctcgcgg

SEQ ID NO: 2526975 - DNA, 25 bp, Homo sapien
gagcctcaagattggccaccaggga

SEQ ID NO: 2526976 - DNA, 25 bp, Homo sapien
caaaatgccactcggattgcagaga

SEQ ID NO: 2526977 - DNA, 25 bp, Homo sapien
aatattgtacatcctgacggcccag

SEQ ID NO: 2526978 - DNA, 25 bp, Homo sapien
cacacggcggcttcgttgagctcgg

SEQ ID NO: 2526979 - DNA, 25 bp, Homo sapien
gtcgtagttgcttcccggcgcgtag

SEQ ID NO: 2526980 - DNA, 25 bp, Homo sapien
gccgctgaatacctcgccgggcatg

SEQ ID NO: 2526981 - DNA, 25 bp, Homo sapien
tgcgagatcatgtcggtgaacctgg

SEQ ID NO: 2526982 - DNA, 25 bp, Homo sapien
tttctcgcccgctgccggtcgccac

SEQ ID NO: 2526983 - DNA, 25 bp, Homo sapien
gctttgtccgcgctcccacggggag

SEQ ID NO: 2526984 - DNA, 25 bp, Homo sapien
aaagggcacaaaagccgcagctggg

SEQ ID NO: 2526985 - DNA, 25 bp, Homo sapien
cgggatctcccagcgcggattaggc

SEQ ID NO: 2526986 - DNA, 25 bp, Homo sapien
acatgtgtctgtgatcgtgtgtcca

SEQ ID NO: 2526987 - DNA, 25 bp, Homo sapien
gccctgcgtgggtgaatgtgtcact

SEQ ID NO: 2526988 - DNA, 25 bp, Homo sapien
gcatcactgtatgggtgagaccatg

SEQ ID NO: 2526989 - DNA, 25 bp, Homo sapien
actgtatctcgtgtgtgcttctgtg

SEQ ID NO: 2526990 - DNA, 25 bp, Homo sapien
ctagggcgctcagctgtttcatccg

SEQ ID NO: 2526991 - DNA, 25 bp, Homo sapien
ttcatccggcgttctttggaccgtc

SEQ ID NO: 2526992 - DNA, 25 bp, Homo sapien
aagaaggcgtgcctccgggcgccta

SEQ ID NO: 2526993 - DNA, 25 bp, Homo sapien
aacatctcagactcgtccaagcggc

SEQ ID NO: 2526994 - DNA, 25 bp, Homo sapien
gggtcgtcctgcagtgcgtcctgga

SEQ ID NO: 2526995 - DNA, 25 bp, Homo sapien
ggccgtctccttgtccgacgaggtc

SEQ ID NO: 2526996 - DNA, 25 bp, Homo sapien
aaactgcggtccgtacaggatgaca

SEQ ID NO: 2526997 - DNA, 25 bp, Homo sapien
acgaggtcgagttgtccgtctcttt

SEQ ID NO: 2526998 - DNA, 25 bp, Homo sapien
caggtgaaacagttgaggtgaaaga

SEQ ID NO: 2526999 - DNA, 25 bp, Homo sapien
gctggatgagctcaggtagtcgtct

SEQ ID NO: 2527000 - DNA, 25 bp, Homo sapien
tgttctcgtcgatgacgtagagctc

SEQ ID NO: 2527001 - DNA, 25 bp, Homo sapien
cgtctttgcacacgaacttgttctc

SEQ ID NO: 2527002 - DNA, 25 bp, Homo sapien
gccggcgcatttcgtgccaaagcgc

SEQ ID NO: 2527003 - DNA, 25 bp, Homo sapien
gcagccggcgcatttcgtgccaaag

SEQ ID NO: 2527004 - DNA, 25 bp, Homo sapien
gcgcagccggcgcatttcgtgccaa

SEQ ID NO: 2527005 - DNA, 25 bp, Homo sapien
agccggcgcatttcgtgccaaagcg

SEQ ID NO: 2527006 - DNA, 25 bp, Homo sapien
agaggttggttttgcactcgcagca

SEQ ID NO: 2527007 - DNA, 25 bp, Homo sapien
tttgcagtagagcttgccctcgcgc

SEQ ID NO: 2527008 - DNA, 25 bp, Homo sapien
cacatttgatgtgccacgcgcggtc

SEQ ID NO: 2527009 - DNA, 25 bp, Homo sapien
cgcgagaagcacttctccgagaggt

SEQ ID NO: 2527010 - DNA, 25 bp, Homo sapien
cgccccggcggcttcggccgccttg

SEQ ID NO: 2527011 - DNA, 25 bp, Homo sapien
gccccggcggcttcggccgccttgc

SEQ ID NO: 2527012 - DNA, 25 bp, Homo sapien
cgcgccccggcggcttcggccgcct

SEQ ID NO: 2527013 - DNA, 25 bp, Homo sapien
gctgcccttcgcctcttgtctcagc

SEQ ID NO: 2527014 - DNA, 25 bp, Homo sapien
cccttcgcctcttgtctcagcagct

SEQ ID NO: 2527015 - DNA, 25 bp, Homo sapien
tgcccttcgcctcttgtctcagcag

SEQ ID NO: 2527016 - DNA, 25 bp, Homo sapien
ccttcgcctcttgtctcagcagctg

SEQ ID NO: 2527017 - DNA, 25 bp, Homo sapien
tcagccggtccagtccttgggcaat

SEQ ID NO: 2527018 - DNA, 25 bp, Homo sapien
tcatctttgtctggtcgccgcgtaa

SEQ ID NO: 2527019 - DNA, 25 bp, Homo sapien
cactttcaagcggtccggatcctca

SEQ ID NO: 2527020 - DNA, 25 bp, Homo sapien
cagatttggtgacgtggcgctgcac

SEQ ID NO: 2527021 - DNA, 25 bp, Homo sapien
ttctttttgtcatacacggggctgg

SEQ ID NO: 2527022 - DNA, 25 bp, Homo sapien
ctgaagctgcgtcagcgcggttctc

SEQ ID NO: 2527023 - DNA, 25 bp, Homo sapien
tgcgccctgaagctgcgtcagcgcg

SEQ ID NO: 2527024 - DNA, 25 bp, Homo sapien
gccctgaagctgcgtcagcgcggtt

SEQ ID NO: 2527025 - DNA, 25 bp, Homo sapien
cctttcctcgctgcaccttccagat

SEQ ID NO: 2527026 - DNA, 25 bp, Homo sapien
tcctttcctcgctgcaccttccaga

SEQ ID NO: 2527027 - DNA, 25 bp, Homo sapien
ctcctttcctcgctgcaccttccag

SEQ ID NO: 2527028 - DNA, 25 bp, Homo sapien
ccacagtatctaggggaggtgatct

SEQ ID NO: 2527029 - DNA, 25 bp, Homo sapien
ttgtggattcggaggttgagggagc

SEQ ID NO: 2527030 - DNA, 25 bp, Homo sapien
tcccccacagtatctaggggaggtg

SEQ ID NO: 2527031 - DNA, 25 bp, Homo sapien
tttgtggattcggaggttgagggag

SEQ ID NO: 2527032 - DNA, 25 bp, Homo sapien
tttgttctgagaggaaagccctgta

SEQ ID NO: 2527033 - DNA, 25 bp, Homo sapien
ttgttctgagaggaaagccctgtac

SEQ ID NO: 2527034 - DNA, 25 bp, Homo sapien
ttttgttctgagaggaaagccctgt

SEQ ID NO: 2527035 - DNA, 25 bp, Homo sapien
tttttgttctgagaggaaagccctg

SEQ ID NO: 2527036 - DNA, 25 bp, Homo sapien
cccatgggtgaagcttggattccag

SEQ ID NO: 2527037 - DNA, 25 bp, Homo sapien
ccccatgggtgaagcttggattcca

SEQ ID NO: 2527038 - DNA, 25 bp, Homo sapien
tagctccctggatttgaagttgcgg

SEQ ID NO: 2527039 - DNA, 25 bp, Homo sapien
tacgcacccgcgaaacgttcgacat

SEQ ID NO: 2527040 - DNA, 25 bp, Homo sapien
cgtcggaagaaacgctttctaatct

SEQ ID NO: 2527041 - DNA, 25 bp, Homo sapien
acgcggttgcgtcggaagaaacgct

SEQ ID NO: 2527042 - DNA, 25 bp, Homo sapien
ggcttggtagaaagcaccagaaaat

SEQ ID NO: 2527043 - DNA, 25 bp, Homo sapien
ctcttggaggcttggtagaaagcac

SEQ ID NO: 2527044 - DNA, 25 bp, Homo sapien
cttggtagaaagcaccagaaaatca

SEQ ID NO: 2527045 - DNA, 25 bp, Homo sapien
gaggcttggtagaaagcaccagaaa

SEQ ID NO: 2527046 - DNA, 25 bp, Homo sapien
ttaagctgagaccaggatgacatca

SEQ ID NO: 2527047 - DNA, 25 bp, Homo sapien
agtagagtcatcagaacccccagga

SEQ ID NO: 2527048 - DNA, 25 bp, Homo sapien
agagtgtccctgatagaagaaacag

SEQ ID NO: 2527049 - DNA, 25 bp, Homo sapien
catcaaaaagccagccttgggaaga

SEQ ID NO: 2527050 - DNA, 25 bp, Homo sapien
ggaagggccccgccataccactggc

SEQ ID NO: 2527051 - DNA, 25 bp, Homo sapien
gaagggccccgccataccactggcc

SEQ ID NO: 2527052 - DNA, 25 bp, Homo sapien
gataatgtccctcatagcaaactgt

SEQ ID NO: 2527053 - DNA, 25 bp, Homo sapien
catggtggccatttaccgctaagca

SEQ ID NO: 2527054 - DNA, 25 bp, Homo sapien
tcttggtgcctcgtatcaggagcca

SEQ ID NO: 2527055 - DNA, 25 bp, Homo sapien
caaactgtcttgctggattgcacgt

SEQ ID NO: 2527056 - DNA, 25 bp, Homo sapien
ccagactcagaggcgaggtgtgcag

SEQ ID NO: 2527057 - DNA, 25 bp, Homo sapien
agccagactcagaggcgaggtgtgc

SEQ ID NO: 2527058 - DNA, 25 bp, Homo sapien
ctccctccgagcaggggcggtgggc

SEQ ID NO: 2527059 - DNA, 25 bp, Homo sapien
gcccgggcttgctccctccgagcag

SEQ ID NO: 2527060 - DNA, 25 bp, Homo sapien
caggtcctgtgaggataccatccag

SEQ ID NO: 2527061 - DNA, 25 bp, Homo sapien
agacacagggaatcccagaaccagg

SEQ ID NO: 2527062 - DNA, 25 bp, Homo sapien
atcccagaaccagggttccaaggct

SEQ ID NO: 2527063 - DNA, 25 bp, Homo sapien
tctgataaccctgggatcaggaaag

SEQ ID NO: 2527064 - DNA, 25 bp, Homo sapien
tcgaagacaaggattcggtgtcgca

SEQ ID NO: 2527065 - DNA, 25 bp, Homo sapien
cgaagacaaggattcggtgtcgcat

SEQ ID NO: 2527066 - DNA, 25 bp, Homo sapien
gttaaggcatttggggcactgcgaa

SEQ ID NO: 2527067 - DNA, 25 bp, Homo sapien
tggggcactgcgaagagcaacttga

SEQ ID NO: 2527068 - DNA, 25 bp, Homo sapien
ccaggagatgcagcatccgaaggag

SEQ ID NO: 2527069 - DNA, 25 bp, Homo sapien
accttccccattgcggcctgggcgt

SEQ ID NO: 2527070 - DNA, 25 bp, Homo sapien
agccaggtaggtggccggaggagtg

SEQ ID NO: 2527071 - DNA, 25 bp, Homo sapien
agggcagcgagccaggtaggtggcc

SEQ ID NO: 2527072 - DNA, 25 bp, Homo sapien
agtgagggcagcgagccaggtaggt

SEQ ID NO: 2527073 - DNA, 25 bp, Homo sapien
cagcgagccaggtaggtggccggag

SEQ ID NO: 2527074 - DNA, 25 bp, Homo sapien
ctgggtcactgctctcataggtgag

SEQ ID NO: 2527075 - DNA, 25 bp, Homo sapien
tgggtcactgctctcataggtgagt

SEQ ID NO: 2527076 - DNA, 25 bp, Homo sapien
gggtcactgctctcataggtgagtg

SEQ ID NO: 2527077 - DNA, 25 bp, Homo sapien
gctcaggctcagacaactgactgca

SEQ ID NO: 2527078 - DNA, 25 bp, Homo sapien
ctggctggtgaatcagcccaatggc

SEQ ID NO: 2527079 - DNA, 25 bp, Homo sapien
aatattcagctcttcaaaattgctg

SEQ ID NO: 2527080 - DNA, 25 bp, Homo sapien
tcagcccaatggcttccatgagctc

SEQ ID NO: 2527081 - DNA, 25 bp, Homo sapien
agcaagaggaccataggagagggtg

SEQ ID NO: 2527082 - DNA, 25 bp, Homo sapien
tactctctttttgagcccagggagc

SEQ ID NO: 2527083 - DNA, 25 bp, Homo sapien
caagaggaccataggagagggtggc

SEQ ID NO: 2527084 - DNA, 25 bp, Homo sapien
ccccagcagacattactctcttttt

SEQ ID NO: 2527085 - DNA, 25 bp, Homo sapien
agcctctctcgtttccagccgtgtt

SEQ ID NO: 2527086 - DNA, 25 bp, Homo sapien
tactggcgtccggtggacagaagcc

SEQ ID NO: 2527087 - DNA, 25 bp, Homo sapien
taatggtgcttttcccgttgtgcgg

SEQ ID NO: 2527088 - DNA, 25 bp, Homo sapien
cgttgtgcggaagactcagctgttg

SEQ ID NO: 2527089 - DNA, 25 bp, Homo sapien
ggacactggacaatgcctggagaca

SEQ ID NO: 2527090 - DNA, 25 bp, Homo sapien
cacgcttccccatttcagacttaga

SEQ ID NO: 2527091 - DNA, 25 bp, Homo sapien
catttcagacttagatgtgctcagc

SEQ ID NO: 2527092 - DNA, 25 bp, Homo sapien
cagacttagatgtgctcagcaagtg

SEQ ID NO: 2527093 - DNA, 25 bp, Homo sapien
tccccatttcagacttagatgtgct

SEQ ID NO: 2527094 - DNA, 25 bp, Homo sapien
aggtggtgttgaaagtggagatggg

SEQ ID NO: 2527095 - DNA, 25 bp, Homo sapien
ggaggtggtgttgaaagtggagatg

SEQ ID NO: 2527096 - DNA, 25 bp, Homo sapien
ttggggaggtggtgttgaaagtgga

SEQ ID NO: 2527097 - DNA, 25 bp, Homo sapien
ggggaggtggtgttgaaagtggaga

SEQ ID NO: 2527098 - DNA, 25 bp, Homo sapien
tcaaacatctgttccttaatgtcat

SEQ ID NO: 2527099 - DNA, 25 bp, Homo sapien
tgtcatcaaacatctgttccttaat

SEQ ID NO: 2527100 - DNA, 25 bp, Homo sapien
ttccttaatgtcatcactaggaaca

SEQ ID NO: 2527101 - DNA, 25 bp, Homo sapien
cttaatgtcatcactaggaacatgc

SEQ ID NO: 2527102 - DNA, 25 bp, Homo sapien
tccaggcccagcggtaagaattctg

SEQ ID NO: 2527103 - DNA, 25 bp, Homo sapien
caggcccagcggtaagaattctggt

SEQ ID NO: 2527104 - DNA, 25 bp, Homo sapien
ggcccagcggtaagaattctggtaa

SEQ ID NO: 2527105 - DNA, 25 bp, Homo sapien
ttccaggcccagcggtaagaattct

SEQ ID NO: 2527106 - DNA, 25 bp, Homo sapien
gggcgcattggcactggcggcggct

SEQ ID NO: 2527107 - DNA, 25 bp, Homo sapien
cggggcgcattggcactggcggcgg

SEQ ID NO: 2527108 - DNA, 25 bp, Homo sapien
ggcgcattggcactggcggcggctg

SEQ ID NO: 2527109 - DNA, 25 bp, Homo sapien
ggggcgcattggcactggcggcggc

SEQ ID NO: 2527110 - DNA, 25 bp, Homo sapien
tcaagtgaccccctacagtcaaagc

SEQ ID NO: 2527111 - DNA, 25 bp, Homo sapien
ggaaagttgggcccagatgatgcct

SEQ ID NO: 2527112 - DNA, 25 bp, Homo sapien
ctgggtcctcaagtgaccccctaca

SEQ ID NO: 2527113 - DNA, 25 bp, Homo sapien
atggaaagttgggcccagatgatgc

SEQ ID NO: 2527114 - DNA, 25 bp, Homo sapien
aaagtccgtgcaaggagaggataca

SEQ ID NO: 2527115 - DNA, 25 bp, Homo sapien
cagcaaccagggaaaggtttgagac

SEQ ID NO: 2527116 - DNA, 25 bp, Homo sapien
cactgatgccagcacgagcgtgtgg

SEQ ID NO: 2527117 - DNA, 25 bp, Homo sapien
tcctgggtgcattccagcgaagcat

SEQ ID NO: 2527118 - DNA, 25 bp, Homo sapien
tggccccatcacaaataaatcaagg

SEQ ID NO: 2527119 - DNA, 25 bp, Homo sapien
ccatcacaaataaatcaagggttct

SEQ ID NO: 2527120 - DNA, 25 bp, Homo sapien
gccccatcacaaataaatcaagggt

SEQ ID NO: 2527121 - DNA, 25 bp, Homo sapien
acacctggccccatcacaaataaat

SEQ ID NO: 2527122 - DNA, 25 bp, Homo sapien
tgcttcttggggtcaccaaaccaat

SEQ ID NO: 2527123 - DNA, 25 bp, Homo sapien
ttgcttcttggggtcaccaaaccaa

SEQ ID NO: 2527124 - DNA, 25 bp, Homo sapien
gcttcttggggtcaccaaaccaata

SEQ ID NO: 2527125 - DNA, 25 bp, Homo sapien
caggattaacacagcatcctggcag

SEQ ID NO: 2527126 - DNA, 25 bp, Homo sapien
cagaattgagctcctcccttttcac

SEQ ID NO: 2527127 - DNA, 25 bp, Homo sapien
gtaccttcccagaattgagctcctc

SEQ ID NO: 2527128 - DNA, 25 bp, Homo sapien
agtccagccccaggattaacacagc

SEQ ID NO: 2527129 - DNA, 25 bp, Homo sapien
cccggaagatcttctcaagtgctgg

SEQ ID NO: 2527130 - DNA, 25 bp, Homo sapien
ccggaagatcttctcaagtgctgga

SEQ ID NO: 2527131 - DNA, 25 bp, Homo sapien
ggccttcactgtgaccagactccag

SEQ ID NO: 2527132 - DNA, 25 bp, Homo sapien
tcctccgggccttcactgtgaccag

SEQ ID NO: 2527133 - DNA, 25 bp, Homo sapien
tgctaaggttacgtggaccccaggc

SEQ ID NO: 2527134 - DNA, 25 bp, Homo sapien
ctgctaaggttacgtggaccccagg

SEQ ID NO: 2527135 - DNA, 25 bp, Homo sapien
tggggtaggggcgagtgagtggact

SEQ ID NO: 2527136 - DNA, 25 bp, Homo sapien
ggtaggggcgagtgagtggactctc

SEQ ID NO: 2527137 - DNA, 25 bp, Homo sapien
tgtggggaccctcttgcaagctccc

SEQ ID NO: 2527138 - DNA, 25 bp, Homo sapien
tgcaagctccctctggagttccagg

SEQ ID NO: 2527139 - DNA, 25 bp, Homo sapien
gaaatctgtggggaccctcttgcaa

SEQ ID NO: 2527140 - DNA, 25 bp, Homo sapien
accctcttgcaagctccctctggag

SEQ ID NO: 2527141 - DNA, 25 bp, Homo sapien
ctgccagagcccagcatcgaggcat

SEQ ID NO: 2527142 - DNA, 25 bp, Homo sapien
tcctcttccagtgccggcaaattac

SEQ ID NO: 2527143 - DNA, 25 bp, Homo sapien
cttccccaaagacgaggcacagctg

SEQ ID NO: 2527144 - DNA, 25 bp, Homo sapien
aatcctcttccagtgccggcaaatt

SEQ ID NO: 2527145 - DNA, 25 bp, Homo sapien
caaagacgaggcacagctgcatttg

SEQ ID NO: 2527146 - DNA, 25 bp, Homo sapien
gctcatacaggaaagtgccctcagg

SEQ ID NO: 2527147 - DNA, 25 bp, Homo sapien
tttagcctgagtcgctcatacagga

SEQ ID NO: 2527148 - DNA, 25 bp, Homo sapien
ctgcatttagcctgagtcgctcata

SEQ ID NO: 2527149 - DNA, 25 bp, Homo sapien
tgagtcgctcatacaggaaagtgcc

SEQ ID NO: 2527150 - DNA, 25 bp, Homo sapien
tgggtctgcaagagctggttctcag

SEQ ID NO: 2527151 - DNA, 25 bp, Homo sapien
gcccatgggccgtgaattctgaata

SEQ ID NO: 2527152 - DNA, 25 bp, Homo sapien
ccttaggactaagccatgtgtggat

SEQ ID NO: 2527153 - DNA, 25 bp, Homo sapien
gaatattctgcaacctgctcagggc

SEQ ID NO: 2527154 - DNA, 25 bp, Homo sapien
atgctggaaccagcccagaaacttc

SEQ ID NO: 2527155 - DNA, 25 bp, Homo sapien
agccccaatctgaacattctcacag

SEQ ID NO: 2527156 - DNA, 25 bp, Homo sapien
gccccaatctgaacattctcacagt

SEQ ID NO: 2527157 - DNA, 25 bp, Homo sapien
aacttcccagaatagtcctgcagcc

SEQ ID NO: 2527158 - DNA, 25 bp, Homo sapien
caccccaggtaggagatccagcttc

SEQ ID NO: 2527159 - DNA, 25 bp, Homo sapien
gcctctggaagtgggtgggggtctg

SEQ ID NO: 2527160 - DNA, 25 bp, Homo sapien
ggtaggagatccagcttccaactcc

SEQ ID NO: 2527161 - DNA, 25 bp, Homo sapien
gcccatggctgccttgggtaggttt

SEQ ID NO: 2527162 - DNA, 25 bp, Homo sapien
gccagcagctgagatataatgactg

SEQ ID NO: 2527163 - DNA, 25 bp, Homo sapien
tgccttgggtaggttttcaggaaca

SEQ ID NO: 2527164 - DNA, 25 bp, Homo sapien
ccagcagctgagatataatgactgc

SEQ ID NO: 2527165 - DNA, 25 bp, Homo sapien
ccagctggcctttggcggttgccat

SEQ ID NO: 2527166 - DNA, 25 bp, Homo sapien
cgatgtccttggctcagtcgggcca

SEQ ID NO: 2527167 - DNA, 25 bp, Homo sapien
tcagcgtttccgatgtccttggctc

SEQ ID NO: 2527168 - DNA, 25 bp, Homo sapien
ccttggctcagtcgggccatcttgg

SEQ ID NO: 2527169 - DNA, 25 bp, Homo sapien
cagcgtttccgatgtccttggctca

SEQ ID NO: 2527170 - DNA, 25 bp, Homo sapien
tcttcttcctgcttgccaatggcct

SEQ ID NO: 2527171 - DNA, 25 bp, Homo sapien
gtgtgtcctcgctggcaatggtctt

SEQ ID NO: 2527172 - DNA, 25 bp, Homo sapien
cattatcccaaagggtgagctgtgt

SEQ ID NO: 2527173 - DNA, 25 bp, Homo sapien
tggcaatggtctttgtgacccaggc

SEQ ID NO: 2527174 - DNA, 25 bp, Homo sapien
cattccagcccttaggatgatgtgg

SEQ ID NO: 2527175 - DNA, 25 bp, Homo sapien
cgggctgctctgtaatgatccccat

SEQ ID NO: 2527176 - DNA, 25 bp, Homo sapien
gtcacgtgctcatgactggcattcc

SEQ ID NO: 2527177 - DNA, 25 bp, Homo sapien
cctgtgccttcagagtcacgtgctc

SEQ ID NO: 2527178 - DNA, 25 bp, Homo sapien
tggcatgtgtccttcattacagccc

SEQ ID NO: 2527179 - DNA, 25 bp, Homo sapien
ctgtgggaagtttccggtgacctgg

SEQ ID NO: 2527180 - DNA, 25 bp, Homo sapien
gatggggctgcctttattggataat

SEQ ID NO: 2527181 - DNA, 25 bp, Homo sapien
tattccagcgggaaatctgtgggaa

SEQ ID NO: 2527182 - DNA, 25 bp, Homo sapien
tccacccagcgaatgcttgcctttc

SEQ ID NO: 2527183 - DNA, 25 bp, Homo sapien
tgcggtccacccagcgaatgcttgc

SEQ ID NO: 2527184 - DNA, 25 bp, Homo sapien
ggtccacccagcgaatgcttgcctt

SEQ ID NO: 2527185 - DNA, 25 bp, Homo sapien
gcggtccacccagcgaatgcttgcc

SEQ ID NO: 2527186 - DNA, 25 bp, Homo sapien
ggaagcccctccgaagtgtctcatc

SEQ ID NO: 2527187 - DNA, 25 bp, Homo sapien
gattgcgcgtgtgccgccccgatac

SEQ ID NO: 2527188 - DNA, 25 bp, Homo sapien
acgggagatgggctcgtcccagctc

SEQ ID NO: 2527189 - DNA, 25 bp, Homo sapien
aggcagccgccgatcgattgcgcgt

SEQ ID NO: 2527190 - DNA, 25 bp, Homo sapien
tgccagttgccctcatgcccctcca

SEQ ID NO: 2527191 - DNA, 25 bp, Homo sapien
ctgcagctggcgaggacattctgtg

SEQ ID NO: 2527192 - DNA, 25 bp, Homo sapien
gtgagctgccagttgccctcatgcc

SEQ ID NO: 2527193 - DNA, 25 bp, Homo sapien
tgcagctggcgaggacattctgtga

SEQ ID NO: 2527194 - DNA, 25 bp, Homo sapien
tgtgcaattaccctcaagcaagtgg

SEQ ID NO: 2527195 - DNA, 25 bp, Homo sapien
gaagactagaagacgagacaggcct

SEQ ID NO: 2527196 - DNA, 25 bp, Homo sapien
ggactacacgtggagcagcagagat

SEQ ID NO: 2527197 - DNA, 25 bp, Homo sapien
gcgttgctcatgagctcccaggtga

SEQ ID NO: 2527198 - DNA, 25 bp, Homo sapien
gactgatgtgactggcttggtagaa

SEQ ID NO: 2527199 - DNA, 25 bp, Homo sapien
tagtagatccagaacacctgttgca

SEQ ID NO: 2527200 - DNA, 25 bp, Homo sapien
cagcaatgctgtaagataggcacta

SEQ ID NO: 2527201 - DNA, 25 bp, Homo sapien
gatagcaactccaaaactgtaggct

SEQ ID NO: 2527202 - DNA, 25 bp, Homo sapien
tggctactgagaaggacagtgtgta

SEQ ID NO: 2527203 - DNA, 25 bp, Homo sapien
cttggctactgagaaggacagtgtg

SEQ ID NO: 2527204 - DNA, 25 bp, Homo sapien
actctggacgagaaggaagcaaact

SEQ ID NO: 2527205 - DNA, 25 bp, Homo sapien
ctagaagagaactctggacgagaag

SEQ ID NO: 2527206 - DNA, 25 bp, Homo sapien
caggcaggctcttctatcacggatg

SEQ ID NO: 2527207 - DNA, 25 bp, Homo sapien
gagactctggagatggtgcccaaga

SEQ ID NO: 2527208 - DNA, 25 bp, Homo sapien
gcacatattatcagtagcccagcag

SEQ ID NO: 2527209 - DNA, 25 bp, Homo sapien
tatctcaggtgtggtgcttagcagg

SEQ ID NO: 2527210 - DNA, 25 bp, Homo sapien
cagtcagttgaaggctcagctgggc

SEQ ID NO: 2527211 - DNA, 25 bp, Homo sapien
tgatgctggctctctgtcaacaggg

SEQ ID NO: 2527212 - DNA, 25 bp, Homo sapien
caagctcatccagattcaagtaggg

SEQ ID NO: 2527213 - DNA, 25 bp, Homo sapien
agagtggctgcacattacctagcaa

SEQ ID NO: 2527214 - DNA, 25 bp, Homo sapien
tggaagctgcaagccacggtgtaca

SEQ ID NO: 2527215 - DNA, 25 bp, Homo sapien
tgcaggcactggaagctgcaagcca

SEQ ID NO: 2527216 - DNA, 25 bp, Homo sapien
aggcactggaagctgcaagccacgg

SEQ ID NO: 2527217 - DNA, 25 bp, Homo sapien
ggcactggaagctgcaagccacggt

SEQ ID NO: 2527218 - DNA, 25 bp, Homo sapien
tgggctatttcagggccaacttcct

SEQ ID NO: 2527219 - DNA, 25 bp, Homo sapien
tccctgtttgtctcttcgaggggct

SEQ ID NO: 2527220 - DNA, 25 bp, Homo sapien
cctgtttgtctcttcgaggggctgg

SEQ ID NO: 2527221 - DNA, 25 bp, Homo sapien
atcttcacctgcaaggcatttctcc

SEQ ID NO: 2527222 - DNA, 25 bp, Homo sapien
cacaatcttggtggcttatgactca

SEQ ID NO: 2527223 - DNA, 25 bp, Homo sapien
ctcatctgaggagcttggaatgctc

SEQ ID NO: 2527224 - DNA, 25 bp, Homo sapien
atttcaggccggcaggaattcagca

SEQ ID NO: 2527225 - DNA, 25 bp, Homo sapien
tggaatgctccaatttcaggccggc

SEQ ID NO: 2527226 - DNA, 25 bp, Homo sapien
gagctgacgtagaagtcaccttcct

SEQ ID NO: 2527227 - DNA, 25 bp, Homo sapien
ttcctggataattctgacattctcc

SEQ ID NO: 2527228 - DNA, 25 bp, Homo sapien
tgagctgacgtagaagtcaccttcc

SEQ ID NO: 2527229 - DNA, 25 bp, Homo sapien
atttcgagagactcctctttcccag

SEQ ID NO: 2527230 - DNA, 25 bp, Homo sapien
gctgaatttcgagagactcctcttt

SEQ ID NO: 2527231 - DNA, 25 bp, Homo sapien
gaatttcgagagactcctctttccc

SEQ ID NO: 2527232 - DNA, 25 bp, Homo sapien
aatttcgagagactcctctttccca

SEQ ID NO: 2527233 - DNA, 25 bp, Homo sapien
gaaataactggttatcccacagtgt

SEQ ID NO: 2527234 - DNA, 25 bp, Homo sapien
tggctagaactctgtcttggacacc

SEQ ID NO: 2527235 - DNA, 25 bp, Homo sapien
cagtgtctgccgtgtcctgttttca

SEQ ID NO: 2527236 - DNA, 25 bp, Homo sapien
tgagaaatcaagtggaaggcagcac

SEQ ID NO: 2527237 - DNA, 25 bp, Homo sapien
ttgcagacagtcaccagcccgcttg

SEQ ID NO: 2527238 - DNA, 25 bp, Homo sapien
aaggaggctggtttatttatgccgc

SEQ ID NO: 2527239 - DNA, 25 bp, Homo sapien
atttatgccgctttgtttattgtgc

SEQ ID NO: 2527240 - DNA, 25 bp, Homo sapien
agtgaccactcacaaggtacttcgc

SEQ ID NO: 2527241 - DNA, 25 bp, Homo sapien
ccagttgctggcactgattgaaagc

SEQ ID NO: 2527242 - DNA, 25 bp, Homo sapien
tcattccagttgctggcactgattg

SEQ ID NO: 2527243 - DNA, 25 bp, Homo sapien
gttgctggcactgattgaaagcgag

SEQ ID NO: 2527244 - DNA, 25 bp, Homo sapien
tccagttgctggcactgattgaaag

SEQ ID NO: 2527245 - DNA, 25 bp, Homo sapien
agagggggaaggtgttacatgcttt

SEQ ID NO: 2527246 - DNA, 25 bp, Homo sapien
gagccaccacgcacttttaaacaac

SEQ ID NO: 2527247 - DNA, 25 bp, Homo sapien
ttggttcatggttccatgggctata

SEQ ID NO: 2527248 - DNA, 25 bp, Homo sapien
gaaggtgttacatgcttttttctct

SEQ ID NO: 2527249 - DNA, 25 bp, Homo sapien
gagagaacaggtcgggcttcgtggg

SEQ ID NO: 2527250 - DNA, 25 bp, Homo sapien
gaacaggtcgggcttcgtggggtga

SEQ ID NO: 2527251 - DNA, 25 bp, Homo sapien
aacaggtcgggcttcgtggggtgag

SEQ ID NO: 2527252 - DNA, 25 bp, Homo sapien
agggagagaacaggtcgggcttcgt

SEQ ID NO: 2527253 - DNA, 25 bp, Homo sapien
aagggagggctcctgacagtttcca

SEQ ID NO: 2527254 - DNA, 25 bp, Homo sapien
aactgcaggtgtacaaggtggcagc

SEQ ID NO: 2527255 - DNA, 25 bp, Homo sapien
gatgttatcgcctggaatctttttg

SEQ ID NO: 2527256 - DNA, 25 bp, Homo sapien
gtggcagcgatgttatcgcctggaa

SEQ ID NO: 2527257 - DNA, 25 bp, Homo sapien
taccgagtttaaagccagttcctgc

SEQ ID NO: 2527258 - DNA, 25 bp, Homo sapien
tcaacctgagacacgtatcctccgg

SEQ ID NO: 2527259 - DNA, 25 bp, Homo sapien
ggcgctagccttggttgtgcacacc

SEQ ID NO: 2527260 - DNA, 25 bp, Homo sapien
tcttagcagtcaacagcttaccgag

SEQ ID NO: 2527261 - DNA, 25 bp, Homo sapien
gggggtgaggagagagagcccttca

SEQ ID NO: 2527262 - DNA, 25 bp, Homo sapien
gtgaggagagagagcccttcaccca

SEQ ID NO: 2527263 - DNA, 25 bp, Homo sapien
aggagagagagcccttcacccacac

SEQ ID NO: 2527264 - DNA, 25 bp, Homo sapien
tgggggtgaggagagagagcccttc

SEQ ID NO: 2527265 - DNA, 25 bp, Homo sapien
cacacattgggcctgctcttgctgc

SEQ ID NO: 2527266 - DNA, 25 bp, Homo sapien
aggacagggctcgagtcggcacaca

SEQ ID NO: 2527267 - DNA, 25 bp, Homo sapien
ccttgaggataaggctcgagctggc

SEQ ID NO: 2527268 - DNA, 25 bp, Homo sapien
gagctggcacacattgggcctgccc

SEQ ID NO: 2527269 - DNA, 25 bp, Homo sapien
tgtaaagaggagacagcagttcagg

SEQ ID NO: 2527270 - DNA, 25 bp, Homo sapien
gtaaagaggagacagcagttcaggc

SEQ ID NO: 2527271 - DNA, 25 bp, Homo sapien
ctgtaaagaggagacagcagttcag

SEQ ID NO: 2527272 - DNA, 25 bp, Homo sapien
taaagaggagacagcagttcaggcc

SEQ ID NO: 2527273 - DNA, 25 bp, Homo sapien
cctgagaagtgatagcatgctgcgc

SEQ ID NO: 2527274 - DNA, 25 bp, Homo sapien
gatgttgaaaccaagctcggctctg

SEQ ID NO: 2527275 - DNA, 25 bp, Homo sapien
taatcctttcctagacgctgcggag

SEQ ID NO: 2527276 - DNA, 25 bp, Homo sapien
gaatgacctagaggtgctgacccag

SEQ ID NO: 2527277 - DNA, 25 bp, Homo sapien
cagaacgcgtccaccatgagtgaca

SEQ ID NO: 2527278 - DNA, 25 bp, Homo sapien
cataggtgggaattctagctcagca

SEQ ID NO: 2527279 - DNA, 25 bp, Homo sapien
tcgatgcttcatgagccgctgggag

SEQ ID NO: 2527280 - DNA, 25 bp, Homo sapien
gagaaaatgtgaacacgggcgcctg

SEQ ID NO: 2527281 - DNA, 25 bp, Homo sapien
gagggagagcaggaacagggctcag

SEQ ID NO: 2527282 - DNA, 25 bp, Homo sapien
gaacagggctcagcaccatgcccgg

SEQ ID NO: 2527283 - DNA, 25 bp, Homo sapien
gagagcaggaacagggctcagcacc

SEQ ID NO: 2527284 - DNA, 25 bp, Homo sapien
gcaggaacagggctcagcaccatgc

SEQ ID NO: 2527285 - DNA, 25 bp, Homo sapien
agaactagctagcaaggggaaggct

SEQ ID NO: 2527286 - DNA, 25 bp, Homo sapien
tatgaagtaagaactagctagcaag

SEQ ID NO: 2527287 - DNA, 25 bp, Homo sapien
tgaagtaagaactagctagcaaggg

SEQ ID NO: 2527288 - DNA, 25 bp, Homo sapien
taagaactagctagcaaggggaagg

SEQ ID NO: 2527289 - DNA, 25 bp, Homo sapien
ttggactcttccgtgtctgctacag

SEQ ID NO: 2527290 - DNA, 25 bp, Homo sapien
tagctccctgtgtagctgttcccaa

SEQ ID NO: 2527291 - DNA, 25 bp, Homo sapien
tgtctgctagaacgcgtcactggtg

SEQ ID NO: 2527292 - DNA, 25 bp, Homo sapien
tctgctacagagcaggtgcgcagtc

SEQ ID NO: 2527293 - DNA, 25 bp, Homo sapien
cttcctcatcccctgtctcctccga

SEQ ID NO: 2527294 - DNA, 25 bp, Homo sapien
ttcctcatcccctgtctcctccgac

SEQ ID NO: 2527295 - DNA, 25 bp, Homo sapien
agaagctggagcggctgtcccggtc

SEQ ID NO: 2527296 - DNA, 25 bp, Homo sapien
tgcagaagctggagcggctgtcccg

SEQ ID NO: 2527297 - DNA, 25 bp, Homo sapien
ggtgagtgcagaagctggagcggct

SEQ ID NO: 2527298 - DNA, 25 bp, Homo sapien
aagctggagcggctgtcccggtccc

SEQ ID NO: 2527299 - DNA, 25 bp, Homo sapien
aacaccacagaccgctttttcttcg

SEQ ID NO: 2527300 - DNA, 25 bp, Homo sapien
tcgtccaacaccacagaccgctttt

SEQ ID NO: 2527301 - DNA, 25 bp, Homo sapien
ctgctccaggatctcgtccaacacc

SEQ ID NO: 2527302 - DNA, 25 bp, Homo sapien
aggatctcgtccaacaccacagacc

SEQ ID NO: 2527303 - DNA, 25 bp, Homo sapien
atgacggagacacctgcagcacctg

SEQ ID NO: 2527304 - DNA, 25 bp, Homo sapien
gcagcacctgctctgggtcgggcat

SEQ ID NO: 2527305 - DNA, 25 bp, Homo sapien
ctgcagcacctgctctgggtcgggc

SEQ ID NO: 2527306 - DNA, 25 bp, Homo sapien
gacggagacacctgcagcacctgct

SEQ ID NO: 2527307 - DNA, 25 bp, Homo sapien
ctattcgcaaaggctgacgtgggga

SEQ ID NO: 2527308 - DNA, 25 bp, Homo sapien
ggataacgggctctcttggtctcca

SEQ ID NO: 2527309 - DNA, 25 bp, Homo sapien
ttggtctccagtcttttgaaaatgt

SEQ ID NO: 2527310 - DNA, 25 bp, Homo sapien
ctgacgtggggataacgggctctct

SEQ ID NO: 2527311 - DNA, 25 bp, Homo sapien
cccatgaaagcttgcagatagtacc

SEQ ID NO: 2527312 - DNA, 25 bp, Homo sapien
ggattctgcaggactcgttcccatg

SEQ ID NO: 2527313 - DNA, 25 bp, Homo sapien
tgcagatagtacctggccgccaagt

SEQ ID NO: 2527314 - DNA, 25 bp, Homo sapien
caagtaaggcttgacccatgaagat

SEQ ID NO: 2527315 - DNA, 25 bp, Homo sapien
tctactatgacctaggtgctcaggg

SEQ ID NO: 2527316 - DNA, 25 bp, Homo sapien
gccgaatggttaagatgcctgcctg

SEQ ID NO: 2527317 - DNA, 25 bp, Homo sapien
actcaagggtaattcacgctggtgg

SEQ ID NO: 2527318 - DNA, 25 bp, Homo sapien
catcaagggcttcggctggtgccaa

SEQ ID NO: 2527319 - DNA, 25 bp, Homo sapien
tgcttctcagaagcccagtcgtttc

SEQ ID NO: 2527320 - DNA, 25 bp, Homo sapien
gtttcgccctaagcaagaccagtgg

SEQ ID NO: 2527321 - DNA, 25 bp, Homo sapien
ggaaggctcctatctccataagaga

SEQ ID NO: 2527322 - DNA, 25 bp, Homo sapien
ctgctgcattgctgagacgctgctt

SEQ ID NO: 2527323 - DNA, 25 bp, Homo sapien
agggggcccatgagtcagcccaaaa

SEQ ID NO: 2527324 - DNA, 25 bp, Homo sapien
cagcccaaaagaccgtcccgctcct

SEQ ID NO: 2527325 - DNA, 25 bp, Homo sapien
gggggcccatgagtcagcccaaaag

SEQ ID NO: 2527326 - DNA, 25 bp, Homo sapien
agtcagcccaaaagaccgtcccgct

SEQ ID NO: 2527327 - DNA, 25 bp, Homo sapien
tgtgacacagggcgttgaaggctct

SEQ ID NO: 2527328 - DNA, 25 bp, Homo sapien
aagtgagcggccgtcttccgccgca

SEQ ID NO: 2527329 - DNA, 25 bp, Homo sapien
agcctccgcccgtacaagtgggtgc

SEQ ID NO: 2527330 - DNA, 25 bp, Homo sapien
ctgcagggtcacctcggagtcggcc

SEQ ID NO: 2527331 - DNA, 25 bp, Homo sapien
tgtggaggcgcacgtctgtgatcct

SEQ ID NO: 2527332 - DNA, 25 bp, Homo sapien
gaggcgcacgtctgtgatcctagct

SEQ ID NO: 2527333 - DNA, 25 bp, Homo sapien
gaagccgaggcggtgggaatcactt

SEQ ID NO: 2527334 - DNA, 25 bp, Homo sapien
ggaggaaggctgtcaaacttggctg

SEQ ID NO: 2527335 - DNA, 25 bp, Homo sapien
tcttctttggcaggcggaccgtctt

SEQ ID NO: 2527336 - DNA, 25 bp, Homo sapien
ttggcaggcggaccgtcttcaactc

SEQ ID NO: 2527337 - DNA, 25 bp, Homo sapien
cctgcttggtgaggaagtccacaaa

SEQ ID NO: 2527338 - DNA, 25 bp, Homo sapien
aaagccgaagcctctgtgtgtgcct

SEQ ID NO: 2527339 - DNA, 25 bp, Homo sapien
tcaccctgggttcaccaattactcc

SEQ ID NO: 2527340 - DNA, 25 bp, Homo sapien
cttatcaccatcaacgcaatattcc

SEQ ID NO: 2527341 - DNA, 25 bp, Homo sapien
tatcaccatcaacgcaatattccct

SEQ ID NO: 2527342 - DNA, 25 bp, Homo sapien
caccatcaacgcaatattccctttc

SEQ ID NO: 2527343 - DNA, 25 bp, Homo sapien
tcaccatcaacgcaatattcccttt

SEQ ID NO: 2527344 - DNA, 25 bp, Homo sapien
cagggactgtatacagcagggagct

SEQ ID NO: 2527345 - DNA, 25 bp, Homo sapien
ggaagtctagctctgacagtgaggg

SEQ ID NO: 2527346 - DNA, 25 bp, Homo sapien
ggagcttctgcagaggaagtctagc

SEQ ID NO: 2527347 - DNA, 25 bp, Homo sapien
ggctgaatcacagcatcaccaaaag

SEQ ID NO: 2527348 - DNA, 25 bp, Homo sapien
ttgccatgaagatgaagttccagga

SEQ ID NO: 2527349 - DNA, 25 bp, Homo sapien
tgaagatgaagttccaggatcctgg

SEQ ID NO: 2527350 - DNA, 25 bp, Homo sapien
ccctggggttgccatgaagatgaag

SEQ ID NO: 2527351 - DNA, 25 bp, Homo sapien
ctggggttgccatgaagatgaagtt

SEQ ID NO: 2527352 - DNA, 25 bp, Homo sapien
aggcacagtgactattccagcaggc

SEQ ID NO: 2527353 - DNA, 25 bp, Homo sapien
tgaggcacagtgactattccagcag

SEQ ID NO: 2527354 - DNA, 25 bp, Homo sapien
gatggggaagtgtggtcacagcttt

SEQ ID NO: 2527355 - DNA, 25 bp, Homo sapien
ttctgaggcacagtgactattccag

SEQ ID NO: 2527356 - DNA, 25 bp, Homo sapien
cctgcttgccaagtatctatggccc

SEQ ID NO: 2527357 - DNA, 25 bp, Homo sapien
gggtcccgttaccacagaagaagca

SEQ ID NO: 2527358 - DNA, 25 bp, Homo sapien
acttttactgacagtacattgcggg

SEQ ID NO: 2527359 - DNA, 25 bp, Homo sapien
acaggttggaactgtgctgtcccag

SEQ ID NO: 2527360 - DNA, 25 bp, Homo sapien
atcctgccactgcagacagctgaac

SEQ ID NO: 2527361 - DNA, 25 bp, Homo sapien
cagggatcctgccactgcagacagc

SEQ ID NO: 2527362 - DNA, 25 bp, Homo sapien
gatcctgccactgcagacagctgaa

SEQ ID NO: 2527363 - DNA, 25 bp, Homo sapien
gggatcctgccactgcagacagctg

SEQ ID NO: 2527364 - DNA, 25 bp, Homo sapien
ggcatcggccatcgcaggccccaag

SEQ ID NO: 2527365 - DNA, 25 bp, Homo sapien
atcggccatcgcaggccccaagcgg

SEQ ID NO: 2527366 - DNA, 25 bp, Homo sapien
atcgcaggccccaagcgggttcttt

SEQ ID NO: 2527367 - DNA, 25 bp, Homo sapien
ctggcatcggccatcgcaggcccca

SEQ ID NO: 2527368 - DNA, 25 bp, Homo sapien
caggagaagggacaagccaccttac

SEQ ID NO: 2527369 - DNA, 25 bp, Homo sapien
gagaagggacaagccaccttaccac

SEQ ID NO: 2527370 - DNA, 25 bp, Homo sapien
agtgaccaggagaagggacaagcca

SEQ ID NO: 2527371 - DNA, 25 bp, Homo sapien
gggacaagccaccttaccaccctgc

SEQ ID NO: 2527372 - DNA, 25 bp, Homo sapien
gatgcccaatggagggcagtactgt

SEQ ID NO: 2527373 - DNA, 25 bp, Homo sapien
ccagatgcccaatggagggcagtac

SEQ ID NO: 2527374 - DNA, 25 bp, Homo sapien
cccaatggagggcagtactgtgact

SEQ ID NO: 2527375 - DNA, 25 bp, Homo sapien
ccaatggagggcagtactgtgactc

SEQ ID NO: 2527376 - DNA, 25 bp, Homo sapien
gatacggccgttgtggtaatttagc

SEQ ID NO: 2527377 - DNA, 25 bp, Homo sapien
gacaggtacagttgccatgatacgg

SEQ ID NO: 2527378 - DNA, 25 bp, Homo sapien
ttctcgagcgagtttctcggtagct

SEQ ID NO: 2527379 - DNA, 25 bp, Homo sapien
tgtggtaatttagcctcagagctct

SEQ ID NO: 2527380 - DNA, 25 bp, Homo sapien
tcttataacggagcttctgtcctca

SEQ ID NO: 2527381 - DNA, 25 bp, Homo sapien
cccatgggcaagtcacagagtcctg

SEQ ID NO: 2527382 - DNA, 25 bp, Homo sapien
actcggtacagctgggtcctcttat

SEQ ID NO: 2527383 - DNA, 25 bp, Homo sapien
gggagttctgtcagctcatgtgctc

SEQ ID NO: 2527384 - DNA, 25 bp, Homo sapien
tctcagaggaatgcagaaagcctgc

SEQ ID NO: 2527385 - DNA, 25 bp, Homo sapien
ggaagagccacacctacttgttgac

SEQ ID NO: 2527386 - DNA, 25 bp, Homo sapien
tgtacagccatcgaagcaagggtgg

SEQ ID NO: 2527387 - DNA, 25 bp, Homo sapien
agggtttggcaaactgtaccgcctg

SEQ ID NO: 2527388 - DNA, 25 bp, Homo sapien
agcatcctgccataggtgtctgcag

SEQ ID NO: 2527389 - DNA, 25 bp, Homo sapien
caatcggaggcgatggcagccgctt

SEQ ID NO: 2527390 - DNA, 25 bp, Homo sapien
gtcaaaatactctcacaaccggcag

SEQ ID NO: 2527391 - DNA, 25 bp, Homo sapien
gccgcttgcaccttgctgacagttg

SEQ ID NO: 2527392 - DNA, 25 bp, Homo sapien
aagtctctgaaaattgcagagcgca

SEQ ID NO: 2527393 - DNA, 25 bp, Homo sapien
tctgaaaattgcagagcgcacacca

SEQ ID NO: 2527394 - DNA, 25 bp, Homo sapien
attgcagagcgcacaccacatccat

SEQ ID NO: 2527395 - DNA, 25 bp, Homo sapien
gaaaattgcagagcgcacaccacat

SEQ ID NO: 2527396 - DNA, 25 bp, Homo sapien
ctgcagggatgaattaaggtcttaa

SEQ ID NO: 2527397 - DNA, 25 bp, Homo sapien
tctgcagggatgaattaaggtctta

SEQ ID NO: 2527398 - DNA, 25 bp, Homo sapien
agggatgaattaaggtcttaattat

SEQ ID NO: 2527399 - DNA, 25 bp, Homo sapien
gcagggatgaattaaggtcttaatt

SEQ ID NO: 2527400 - DNA, 25 bp, Homo sapien
tgaaggtctgggctaggactcaaag

SEQ ID NO: 2527401 - DNA, 25 bp, Homo sapien
ctttgcagacagtcaagtgggacac

SEQ ID NO: 2527402 - DNA, 25 bp, Homo sapien
ctgaaaagggaataataagctacaa

SEQ ID NO: 2527403 - DNA, 25 bp, Homo sapien
tctgagagcagagtccaagcactgg

SEQ ID NO: 2527404 - DNA, 25 bp, Homo sapien
gtgcgacgacactaaggccacgact

SEQ ID NO: 2527405 - DNA, 25 bp, Homo sapien
ccttgtgcgacgacactaaggccac

SEQ ID NO: 2527406 - DNA, 25 bp, Homo sapien
actaaggccacgactgggacagcca

SEQ ID NO: 2527407 - DNA, 25 bp, Homo sapien
cgacactaaggccacgactgggaca

SEQ ID NO: 2527408 - DNA, 25 bp, Homo sapien
tgatattggacaggggctgtccttc

SEQ ID NO: 2527409 - DNA, 25 bp, Homo sapien
atattggacaggggctgtccttcac

SEQ ID NO: 2527410 - DNA, 25 bp, Homo sapien
ttgatattggacaggggctgtcctt

SEQ ID NO: 2527411 - DNA, 25 bp, Homo sapien
tttgatattggacaggggctgtcct

SEQ ID NO: 2527412 - DNA, 25 bp, Homo sapien
cttctggccagaggacaaggcccat

SEQ ID NO: 2527413 - DNA, 25 bp, Homo sapien
ctgagcaaagcacttccccaagcct

SEQ ID NO: 2527414 - DNA, 25 bp, Homo sapien
ttccccaagcctgctcttctggcca

SEQ ID NO: 2527415 - DNA, 25 bp, Homo sapien
tgctcttctggccagaggacaaggc

SEQ ID NO: 2527416 - DNA, 25 bp, Homo sapien
ggacgtggcacacaatgagaaccac

SEQ ID NO: 2527417 - DNA, 25 bp, Homo sapien
gggacgtggcacacaatgagaacca

SEQ ID NO: 2527418 - DNA, 25 bp, Homo sapien
catgcacagtgatagttgatatttg

SEQ ID NO: 2527419 - DNA, 25 bp, Homo sapien
gggaacttcactcatcaaggcttct

SEQ ID NO: 2527420 - DNA, 25 bp, Homo sapien
agggaacttcactcatcaaggcttc

SEQ ID NO: 2527421 - DNA, 25 bp, Homo sapien
atgcacagtgatagttgatatttgc

SEQ ID NO: 2527422 - DNA, 25 bp, Homo sapien
aagatttcaattacactccatcgag

SEQ ID NO: 2527423 - DNA, 25 bp, Homo sapien
caattacactccatcgagttcccat

SEQ ID NO: 2527424 - DNA, 25 bp, Homo sapien
gatttcaattacactccatcgagtt

SEQ ID NO: 2527425 - DNA, 25 bp, Homo sapien
tcaaagatttcaattacactccatc

SEQ ID NO: 2527426 - DNA, 25 bp, Homo sapien
tctccattaacctgcaaggtggcct

SEQ ID NO: 2527427 - DNA, 25 bp, Homo sapien
tggcctgccaggaagaccaatgcct

SEQ ID NO: 2527428 - DNA, 25 bp, Homo sapien
caatgcctcatcttggttgggcggg

SEQ ID NO: 2527429 - DNA, 25 bp, Homo sapien
catgggtgaaataggcaagattgcc

SEQ ID NO: 2527430 - DNA, 25 bp, Homo sapien
tccacctgactccaatggctggaag

SEQ ID NO: 2527431 - DNA, 25 bp, Homo sapien
tcacaaatgtccacctgactccaat

SEQ ID NO: 2527432 - DNA, 25 bp, Homo sapien
cccaaccaagaaggtaactctctca

SEQ ID NO: 2527433 - DNA, 25 bp, Homo sapien
caagaaggtaactctctcacaaatg

SEQ ID NO: 2527434 - DNA, 25 bp, Homo sapien
catgcctccccgatgcctgtattag

SEQ ID NO: 2527435 - DNA, 25 bp, Homo sapien
tccaccaaacgcttgagctctgcat

SEQ ID NO: 2527436 - DNA, 25 bp, Homo sapien
caggagagccccaagtgtaagcttc

SEQ ID NO: 2527437 - DNA, 25 bp, Homo sapien
atgtatacactcaggcccgatccag

SEQ ID NO: 2527438 - DNA, 25 bp, Homo sapien
ttcttccgagccaatgtcacggctg

SEQ ID NO: 2527439 - DNA, 25 bp, Homo sapien
cttccgagccaatgtcacggctggc

SEQ ID NO: 2527440 - DNA, 25 bp, Homo sapien
tggaaggggatgttccgcaccagga

SEQ ID NO: 2527441 - DNA, 25 bp, Homo sapien
gaaggggatgttccgcaccaggatc

SEQ ID NO: 2527442 - DNA, 25 bp, Homo sapien
cctcacttccagcttgtggccgtcc

SEQ ID NO: 2527443 - DNA, 25 bp, Homo sapien
tggctcgttccgagatcctcacttc

SEQ ID NO: 2527444 - DNA, 25 bp, Homo sapien
ctcacttccagcttgtggccgtcca

SEQ ID NO: 2527445 - DNA, 25 bp, Homo sapien
ttagtggctcgttccgagatcctca

SEQ ID NO: 2527446 - DNA, 25 bp, Homo sapien
tattccacaaatccaaaccccatgg

SEQ ID NO: 2527447 - DNA, 25 bp, Homo sapien
ctggagctgcttgagagctttctgg

SEQ ID NO: 2527448 - DNA, 25 bp, Homo sapien
ctgggcttgctccggcttcctgtat

SEQ ID NO: 2527449 - DNA, 25 bp, Homo sapien
atccaaaccccatggaaaggagcac

SEQ ID NO: 2527450 - DNA, 25 bp, Homo sapien
gcagtcctctgcctccacacgtaat

SEQ ID NO: 2527451 - DNA, 25 bp, Homo sapien
ctgggcagtcctctgcctccacacg

SEQ ID NO: 2527452 - DNA, 25 bp, Homo sapien
agtcctctgcctccacacgtaatgc

SEQ ID NO: 2527453 - DNA, 25 bp, Homo sapien
gggcagtcctctgcctccacacgta

SEQ ID NO: 2527454 - DNA, 25 bp, Homo sapien
ggctgaatactgaacactttccgaa

SEQ ID NO: 2527455 - DNA, 25 bp, Homo sapien
gaagctggagcttcttttggaatcc

SEQ ID NO: 2527456 - DNA, 25 bp, Homo sapien
tctttccggctgaatactgaacact

SEQ ID NO: 2527457 - DNA, 25 bp, Homo sapien
ttttggaatccactctttccggctg

SEQ ID NO: 2527458 - DNA, 25 bp, Homo sapien
cttcttggagatggagcagctcttc

SEQ ID NO: 2527459 - DNA, 25 bp, Homo sapien
tggagatggagcagctcttcactgt

SEQ ID NO: 2527460 - DNA, 25 bp, Homo sapien
tcactgtccccacttttgaaaacac

SEQ ID NO: 2527461 - DNA, 25 bp, Homo sapien
ttcactgtccccacttttgaaaaca

SEQ ID NO: 2527462 - DNA, 25 bp, Homo sapien
tcttctgttgtgtcaaaattgagat

SEQ ID NO: 2527463 - DNA, 25 bp, Homo sapien
tgagattcttaataaacagagtaca

SEQ ID NO: 2527464 - DNA, 25 bp, Homo sapien
ctgttgtgtcaaaattgagattctt

SEQ ID NO: 2527465 - DNA, 25 bp, Homo sapien
cttctcttctgttgtgtcaaaattg

SEQ ID NO: 2527466 - DNA, 25 bp, Homo sapien
ctgggaggctctcttcttcttcttc

SEQ ID NO: 2527467 - DNA, 25 bp, Homo sapien
tcttcttcctcttcctcctcctcct

SEQ ID NO: 2527468 - DNA, 25 bp, Homo sapien
ctttgctgaagagttgtctgctcct

SEQ ID NO: 2527469 - DNA, 25 bp, Homo sapien
gctccttcctctgttggattttcat

SEQ ID NO: 2527470 - DNA, 25 bp, Homo sapien
ggattttcatcttctggggtttcgc

SEQ ID NO: 2527471 - DNA, 25 bp, Homo sapien
tcttctggggtttcgccatcaggca

SEQ ID NO: 2527472 - DNA, 25 bp, Homo sapien
ggccaactgcaaaaagcccactagg

SEQ ID NO: 2527473 - DNA, 25 bp, Homo sapien
atccccaacttgtgctgagcttcag

SEQ ID NO: 2527474 - DNA, 25 bp, Homo sapien
gaaataatgtcaaacccaccagagc

SEQ ID NO: 2527475 - DNA, 25 bp, Homo sapien
cactaggtaaaggggttctgcctct

SEQ ID NO: 2527476 - DNA, 25 bp, Homo sapien
ccagccctcgttgtcctcgtacaac

SEQ ID NO: 2527477 - DNA, 25 bp, Homo sapien
agccctcgttgtcctcgtacaacgg

SEQ ID NO: 2527478 - DNA, 25 bp, Homo sapien
ttgggagcctgagaaaatccagggc

SEQ ID NO: 2527479 - DNA, 25 bp, Homo sapien
tcttccttgggagcctgagaaaatc

SEQ ID NO: 2527480 - DNA, 25 bp, Homo sapien
ggagcaggtgaaaagaacagcaccc

SEQ ID NO: 2527481 - DNA, 25 bp, Homo sapien
ggcttggaattagcacagacacgca

SEQ ID NO: 2527482 - DNA, 25 bp, Homo sapien
ggctgtgcatgtgctgcgtgcagtg

SEQ ID NO: 2527483 - DNA, 25 bp, Homo sapien
tctgtgggaattcaccgatgacgcg

SEQ ID NO: 2527484 - DNA, 25 bp, Homo sapien
catcattaaccccaacgatgtggga

SEQ ID NO: 2527485 - DNA, 25 bp, Homo sapien
tcataaacgagcaggagtcgggctt

SEQ ID NO: 2527486 - DNA, 25 bp, Homo sapien
tctgggtcctcagatcgcaaaggga

SEQ ID NO: 2527487 - DNA, 25 bp, Homo sapien
gcacttcctgaatgccttgcgctgg

SEQ ID NO: 2527488 - DNA, 25 bp, Homo sapien
actggagcccactccagatagaggg

SEQ ID NO: 2527489 - DNA, 25 bp, Homo sapien
cttttccatgggttctgaaggtgtg

SEQ ID NO: 2527490 - DNA, 25 bp, Homo sapien
tgaaggtgtgtcttggagctttttc

SEQ ID NO: 2527491 - DNA, 25 bp, Homo sapien
tgtgctggagaagacgccaactgga

SEQ ID NO: 2527492 - DNA, 25 bp, Homo sapien
ccttctcccggcccggcgcagtggc

SEQ ID NO: 2527493 - DNA, 25 bp, Homo sapien
tcacgcctgtaatcccagcactttg

SEQ ID NO: 2527494 - DNA, 25 bp, Homo sapien
ggtcaggagatcgagaccatcctgg

SEQ ID NO: 2527495 - DNA, 25 bp, Homo sapien
ggaggctgaggcgggcggatcacga

SEQ ID NO: 2527496 - DNA, 25 bp, Homo sapien
atggcagtgattccgccctctggca

SEQ ID NO: 2527497 - DNA, 25 bp, Homo sapien
gccaaaatggccgaaggtctcctgc

SEQ ID NO: 2527498 - DNA, 25 bp, Homo sapien
tccaggaactccacgatggcagtga

SEQ ID NO: 2527499 - DNA, 25 bp, Homo sapien
cctgccgggaggttcttgaccagaa

SEQ ID NO: 2527500 - DNA, 25 bp, Homo sapien
tccttctgtagggtggaagcacagt

SEQ ID NO: 2527501 - DNA, 25 bp, Homo sapien
catgactagctgtgaagtgacttca

SEQ ID NO: 2527502 - DNA, 25 bp, Homo sapien
agagtgctttggtaagtcttaataa

SEQ ID NO: 2527503 - DNA, 25 bp, Homo sapien
gaagcacagtagagctgctttcaca

SEQ ID NO: 2527504 - DNA, 25 bp, Homo sapien
gctgaccccgttgtctatgagaaaa

SEQ ID NO: 2527505 - DNA, 25 bp, Homo sapien
tgtctatgagaaaacgccgcacttc

SEQ ID NO: 2527506 - DNA, 25 bp, Homo sapien
acgccgcacttcctggacgagctgg

SEQ ID NO: 2527507 - DNA, 25 bp, Homo sapien
ctggctgaaggaatccaggctgacc

SEQ ID NO: 2527508 - DNA, 25 bp, Homo sapien
aatattttggacagcccagtggctc

SEQ ID NO: 2527509 - DNA, 25 bp, Homo sapien
gaaatgcaacgcgacacatccaaag

SEQ ID NO: 2527510 - DNA, 25 bp, Homo sapien
taagtgtcacgttgctgaccagccc

SEQ ID NO: 2527511 - DNA, 25 bp, Homo sapien
tcagagcccctcagtatgtgaaatg

SEQ ID NO: 2527512 - DNA, 25 bp, Homo sapien
tggcgttgtacttctgtgcgatggc

SEQ ID NO: 2527513 - DNA, 25 bp, Homo sapien
gaatagtgtgttccagttgtgagag

SEQ ID NO: 2527514 - DNA, 25 bp, Homo sapien
aaacacttgactcttggtggcgttg

SEQ ID NO: 2527515 - DNA, 25 bp, Homo sapien
ggccacggcattcggccccatgaat

SEQ ID NO: 2527516 - DNA, 25 bp, Homo sapien
tcttcttcttgtaggacgacgatcc

SEQ ID NO: 2527517 - DNA, 25 bp, Homo sapien
taggacgacgatcccagggcactgg

SEQ ID NO: 2527518 - DNA, 25 bp, Homo sapien
atggtaacacgtggagcatcctgcc

SEQ ID NO: 2527519 - DNA, 25 bp, Homo sapien
ccttcttgatggtagatggtaacac

SEQ ID NO: 2527520 - DNA, 25 bp, Homo sapien
gaagccttgcctgtaagccctgctt

SEQ ID NO: 2527521 - DNA, 25 bp, Homo sapien
gatgttggcttctgccacgagtaag

SEQ ID NO: 2527522 - DNA, 25 bp, Homo sapien
gaatgacgggaagggagtaaacaga

SEQ ID NO: 2527523 - DNA, 25 bp, Homo sapien
tctgccacgagtaagctggacccag

SEQ ID NO: 2527524 - DNA, 25 bp, Homo sapien
acctccgagtaggccttcacagcgt

SEQ ID NO: 2527525 - DNA, 25 bp, Homo sapien
ccgagtaggccttcacagcgtgctc

SEQ ID NO: 2527526 - DNA, 25 bp, Homo sapien
gagtaggccttcacagcgtgctcag

SEQ ID NO: 2527527 - DNA, 25 bp, Homo sapien
ctcagggaacatgaaggtgatgaat

SEQ ID NO: 2527528 - DNA, 25 bp, Homo sapien
ctgtcgatggggtagtggagctcag

SEQ ID NO: 2527529 - DNA, 25 bp, Homo sapien
tcgatggggtagtggagctcagaca

SEQ ID NO: 2527530 - DNA, 25 bp, Homo sapien
tgtcgatggggtagtggagctcaga

SEQ ID NO: 2527531 - DNA, 25 bp, Homo sapien
cgatggggtagtggagctcagacag

SEQ ID NO: 2527532 - DNA, 25 bp, Homo sapien
acgtcagagtgagagcccggctccc

SEQ ID NO: 2527533 - DNA, 25 bp, Homo sapien
gtcagagtgagagcccggctcccat

SEQ ID NO: 2527534 - DNA, 25 bp, Homo sapien
cgtcagagtgagagcccggctccca

SEQ ID NO: 2527535 - DNA, 25 bp, Homo sapien
cagagtgagagcccggctcccatag

SEQ ID NO: 2527536 - DNA, 25 bp, Homo sapien
ctggtgtagggcaggttccgtacaa

SEQ ID NO: 2527537 - DNA, 25 bp, Homo sapien
agatcctcctcggtgctggtgtagg

SEQ ID NO: 2527538 - DNA, 25 bp, Homo sapien
ccgagtatccggccttgccaggatt

SEQ ID NO: 2527539 - DNA, 25 bp, Homo sapien
aagagccttccggattcggccaggt

SEQ ID NO: 2527540 - DNA, 25 bp, Homo sapien
cctgagttatcccagaccacggtga

SEQ ID NO: 2527541 - DNA, 25 bp, Homo sapien
gaccacggtgatgcattctctaaac

SEQ ID NO: 2527542 - DNA, 25 bp, Homo sapien
cattctctaaactccgggctgtatt

SEQ ID NO: 2527543 - DNA, 25 bp, Homo sapien
aactccgggctgtattctctggcac

SEQ ID NO: 2527544 - DNA, 25 bp, Homo sapien
atgtactcccggttgcatttcagag

SEQ ID NO: 2527545 - DNA, 25 bp, Homo sapien
catgtactcccggttgcatttcaga

SEQ ID NO: 2527546 - DNA, 25 bp, Homo sapien
tgtactcccggttgcatttcagagc

SEQ ID NO: 2527547 - DNA, 25 bp, Homo sapien
ccatgtactcccggttgcatttcag

SEQ ID NO: 2527548 - DNA, 25 bp, Homo sapien
tctcacaattcgaatggccactggt

SEQ ID NO: 2527549 - DNA, 25 bp, Homo sapien
tgagcgtttctcacaattcgaatgg

SEQ ID NO: 2527550 - DNA, 25 bp, Homo sapien
aattcgaatggccactggtttcagg

SEQ ID NO: 2527551 - DNA, 25 bp, Homo sapien
gcgtttctcacaattcgaatggcca

SEQ ID NO: 2527552 - DNA, 25 bp, Homo sapien
gtgacattgaacggggctccccgca

SEQ ID NO: 2527553 - DNA, 25 bp, Homo sapien
tgtgacattgaacggggctccccgc

SEQ ID NO: 2527554 - DNA, 25 bp, Homo sapien
tctgtgacattgaacggggctcccc

SEQ ID NO: 2527555 - DNA, 25 bp, Homo sapien
ctctgtgacattgaacggggctccc

SEQ ID NO: 2527556 - DNA, 25 bp, Homo sapien
gaagtggccacactaacccttcgta

SEQ ID NO: 2527557 - DNA, 25 bp, Homo sapien
agaagtggccacactaacccttcgt

SEQ ID NO: 2527558 - DNA, 25 bp, Homo sapien
caggactggggtggcggaggaatcc

SEQ ID NO: 2527559 - DNA, 25 bp, Homo sapien
tcttggcctgcacccttgctgtctc

SEQ ID NO: 2527560 - DNA, 25 bp, Homo sapien
gggtggcggaggaatcctcttcctc

SEQ ID NO: 2527561 - DNA, 25 bp, Homo sapien
ggcggaggaatcctcttcctcggcc

SEQ ID NO: 2527562 - DNA, 25 bp, Homo sapien
tcacagtgcacggcttcatcttcac

SEQ ID NO: 2527563 - DNA, 25 bp, Homo sapien
acagtgcacggcttcatcttcactt

SEQ ID NO: 2527564 - DNA, 25 bp, Homo sapien
cacagtgcacggcttcatcttcact

SEQ ID NO: 2527565 - DNA, 25 bp, Homo sapien
catcttggatttcaggtaatccatg

SEQ ID NO: 2527566 - DNA, 25 bp, Homo sapien
agctgcctttggttcgaggcttgcc

SEQ ID NO: 2527567 - DNA, 25 bp, Homo sapien
gcctttggttcgaggcttgcctctt

SEQ ID NO: 2527568 - DNA, 25 bp, Homo sapien
ttcaggtaatccatgtccgacagct

SEQ ID NO: 2527569 - DNA, 25 bp, Homo sapien
aaaacagggaagctgggatcagcga

SEQ ID NO: 2527570 - DNA, 25 bp, Homo sapien
acagggaagctgggatcagcgacag

SEQ ID NO: 2527571 - DNA, 25 bp, Homo sapien
gaaaaacagggaagctgggatcagc

SEQ ID NO: 2527572 - DNA, 25 bp, Homo sapien
tggaaaaacagggaagctgggatca

SEQ ID NO: 2527573 - DNA, 25 bp, Homo sapien
tccaggccatcattcgcccaagtgg

SEQ ID NO: 2527574 - DNA, 25 bp, Homo sapien
gaaactcctggaactctgtatcctc

SEQ ID NO: 2527575 - DNA, 25 bp, Homo sapien
tcaggtagtcactggccggcttgct

SEQ ID NO: 2527576 - DNA, 25 bp, Homo sapien
tcctgcccagaatcggagtcgaagt

SEQ ID NO: 2527577 - DNA, 25 bp, Homo sapien
acctgccacctttttcttcttctca

SEQ ID NO: 2527578 - DNA, 25 bp, Homo sapien
ctgccacctttttcttcttctcatc

SEQ ID NO: 2527579 - DNA, 25 bp, Homo sapien
tctccagttgacctgccaccttttt

SEQ ID NO: 2527580 - DNA, 25 bp, Homo sapien
cttctccagttgacctgccaccttt

SEQ ID NO: 2527581 - DNA, 25 bp, Homo sapien
cttaatttctggagtagtagagtct

SEQ ID NO: 2527582 - DNA, 25 bp, Homo sapien
gccgggtccccgaatgacttgcaga

SEQ ID NO: 2527583 - DNA, 25 bp, Homo sapien
ttggccgggtccccgaatgacttgc

SEQ ID NO: 2527584 - DNA, 25 bp, Homo sapien
gagtagtagagtcttttggaggctg

SEQ ID NO: 2527585 - DNA, 25 bp, Homo sapien
tccgggatgtgtcgatgaagctctt

SEQ ID NO: 2527586 - DNA, 25 bp, Homo sapien
gctcttgttgaaatgcttctgtgcc

SEQ ID NO: 2527587 - DNA, 25 bp, Homo sapien
aaacttgcggaacttgccatctttg

SEQ ID NO: 2527588 - DNA, 25 bp, Homo sapien
ggctgcagtctgtcagcgtgccgaa

SEQ ID NO: 2527589 - DNA, 25 bp, Homo sapien
gagattcttcacgatcagtcgcgac

SEQ ID NO: 2527590 - DNA, 25 bp, Homo sapien
gattcttcacgatcagtcgcgacat

SEQ ID NO: 2527591 - DNA, 25 bp, Homo sapien
cccattcgggagattcttcacgatc

SEQ ID NO: 2527592 - DNA, 25 bp, Homo sapien
tcgggagattcttcacgatcagtcg

SEQ ID NO: 2527593 - DNA, 25 bp, Homo sapien
aagtttcacgctaccgccctgggcg

SEQ ID NO: 2527594 - DNA, 25 bp, Homo sapien
cagggtccccgctgttttgattcca

SEQ ID NO: 2527595 - DNA, 25 bp, Homo sapien
tcagcgtcttccaccaagtttcacg

SEQ ID NO: 2527596 - DNA, 25 bp, Homo sapien
gttttgattccaacacgactggtca

SEQ ID NO: 2527597 - DNA, 25 bp, Homo sapien
tcttgaagtaagcagcgtcaccatc

SEQ ID NO: 2527598 - DNA, 25 bp, Homo sapien
caaggtcgtgtccaagtctagtttc

SEQ ID NO: 2527599 - DNA, 25 bp, Homo sapien
cattgttgccatcacaatgactgat

SEQ ID NO: 2527600 - DNA, 25 bp, Homo sapien
tagtttctgctttgaaatgagtgga

SEQ ID NO: 2527601 - DNA, 25 bp, Homo sapien
caaaccaagagaaagtggaaagagg

SEQ ID NO: 2527602 - DNA, 25 bp, Homo sapien
cacttttggcagtttatgtgagagc

SEQ ID NO: 2527603 - DNA, 25 bp, Homo sapien
cagtttgggcggtgaagacaaacca

SEQ ID NO: 2527604 - DNA, 25 bp, Homo sapien
caggtgttagatattttgattgtca

SEQ ID NO: 2527605 - DNA, 25 bp, Homo sapien
aattatgaaagtggtacaaaaatgg

SEQ ID NO: 2527606 - DNA, 25 bp, Homo sapien
tgatgggtaacgagctgtctcaaca

SEQ ID NO: 2527607 - DNA, 25 bp, Homo sapien
tatagcaaaattatgaaagtggtac

SEQ ID NO: 2527608 - DNA, 25 bp, Homo sapien
tctcttatctattgatgggtaacga

SEQ ID NO: 2527609 - DNA, 25 bp, Homo sapien
tattttgcgcatggttttgtgggac

SEQ ID NO: 2527610 - DNA, 25 bp, Homo sapien
tggcgtcttcactcacatatctgga

SEQ ID NO: 2527611 - DNA, 25 bp, Homo sapien
tccactagggcaacaggatccactt

SEQ ID NO: 2527612 - DNA, 25 bp, Homo sapien
tccgaatgaggagattcaagggctc

SEQ ID NO: 2527613 - DNA, 25 bp, Homo sapien
gatggccctggggagttggatgaga

SEQ ID NO: 2527614 - DNA, 25 bp, Homo sapien
gcagggccagagtgattgatgggct

SEQ ID NO: 2527615 - DNA, 25 bp, Homo sapien
agagcagggccagagtgattgatgg

SEQ ID NO: 2527616 - DNA, 25 bp, Homo sapien
atgagagcagggccagagtgattga

SEQ ID NO: 2527617 - DNA, 25 bp, Homo sapien
gttccatcagcagcggctgctcctg

SEQ ID NO: 2527618 - DNA, 25 bp, Homo sapien
tattcgccttcgtgtaagaaacgtg

SEQ ID NO: 2527619 - DNA, 25 bp, Homo sapien
gtaagaaacgtgtgcacagtgctgg

SEQ ID NO: 2527620 - DNA, 25 bp, Homo sapien
tgggtcctggtggtgtttattcgcc

SEQ ID NO: 2527621 - DNA, 25 bp, Homo sapien
tggttttaggggtgtagatctcaaa

SEQ ID NO: 2527622 - DNA, 25 bp, Homo sapien
aagcagtggttttaggggtgtagat

SEQ ID NO: 2527623 - DNA, 25 bp, Homo sapien
cagtggttttaggggtgtagatctc

SEQ ID NO: 2527624 - DNA, 25 bp, Homo sapien
taagcagtggttttaggggtgtaga

SEQ ID NO: 2527625 - DNA, 25 bp, Homo sapien
tgtgaatttagggacgataaaacca

SEQ ID NO: 2527626 - DNA, 25 bp, Homo sapien
gcctggtgtgaatttagggacgata

SEQ ID NO: 2527627 - DNA, 25 bp, Homo sapien
gacgataaaaccatcaaagggcttg

SEQ ID NO: 2527628 - DNA, 25 bp, Homo sapien
gataaaaccatcaaagggcttgtcc

SEQ ID NO: 2527629 - DNA, 25 bp, Homo sapien
ccaagcaagctccttcattccacca

SEQ ID NO: 2527630 - DNA, 25 bp, Homo sapien
caacatcatccaagcaagctccttc

SEQ ID NO: 2527631 - DNA, 25 bp, Homo sapien
aacatcatccaagcaagctccttca

SEQ ID NO: 2527632 - DNA, 25 bp, Homo sapien
ccaacatcatccaagcaagctcctt

SEQ ID NO: 2527633 - DNA, 25 bp, Homo sapien
ttgacttgcaggaccaagtctctga

SEQ ID NO: 2527634 - DNA, 25 bp, Homo sapien
tcttgacaatcttgacttgcaggac

SEQ ID NO: 2527635 - DNA, 25 bp, Homo sapien
gacaatcttgacttgcaggaccaag

SEQ ID NO: 2527636 - DNA, 25 bp, Homo sapien
ggaccaagtctctgaatgcatccag

SEQ ID NO: 2527637 - DNA, 25 bp, Homo sapien
cgttttggggagggtcatcctgaag

SEQ ID NO: 2527638 - DNA, 25 bp, Homo sapien
gttttggggagggtcatcctgaaga

SEQ ID NO: 2527639 - DNA, 25 bp, Homo sapien
gcgttttggggagggtcatcctgaa

SEQ ID NO: 2527640 - DNA, 25 bp, Homo sapien
cacaacggaacatcaacatatccaa

SEQ ID NO: 2527641 - DNA, 25 bp, Homo sapien
cgggctcctgtgagagttctatttg

SEQ ID NO: 2527642 - DNA, 25 bp, Homo sapien
tggagactgctataacgggctcctg

SEQ ID NO: 2527643 - DNA, 25 bp, Homo sapien
gcagaacccagaattcacaacggaa

SEQ ID NO: 2527644 - DNA, 25 bp, Homo sapien
ttagcatttcttataccacaataga

SEQ ID NO: 2527645 - DNA, 25 bp, Homo sapien
agcatttcttataccacaatagaag

SEQ ID NO: 2527646 - DNA, 25 bp, Homo sapien
gcatttcttataccacaatagaagt

SEQ ID NO: 2527647 - DNA, 25 bp, Homo sapien
ggattccatacacttcctgctggga

SEQ ID NO: 2527648 - DNA, 25 bp, Homo sapien
tcacatggccacgttataaaattgt

SEQ ID NO: 2527649 - DNA, 25 bp, Homo sapien
ggtcctgttcacataaatgcccagt

SEQ ID NO: 2527650 - DNA, 25 bp, Homo sapien
tggagtaccaccatctgtagtctgg

SEQ ID NO: 2527651 - DNA, 25 bp, Homo sapien
ttctgccagtagactggcaggagaa

SEQ ID NO: 2527652 - DNA, 25 bp, Homo sapien
agttgttatatcctgagggcatgga

SEQ ID NO: 2527653 - DNA, 25 bp, Homo sapien
cacacccagggagaacgttgaatct

SEQ ID NO: 2527654 - DNA, 25 bp, Homo sapien
tgcaggagtcattgggggcaccact

SEQ ID NO: 2527655 - DNA, 25 bp, Homo sapien
ggcagccaaatctggttatgaggca

SEQ ID NO: 2527656 - DNA, 25 bp, Homo sapien
ccatttagcccgtggctgttcctcc

SEQ ID NO: 2527657 - DNA, 25 bp, Homo sapien
atttagcccgtggctgttcctcctg

SEQ ID NO: 2527658 - DNA, 25 bp, Homo sapien
cagcacagtcgagtaggcaaggtca

SEQ ID NO: 2527659 - DNA, 25 bp, Homo sapien
gacttggacaaggttcggtggatct

SEQ ID NO: 2527660 - DNA, 25 bp, Homo sapien
tctgaagcagaacgcaacacagtcc

SEQ ID NO: 2527661 - DNA, 25 bp, Homo sapien
tcactccccgaaatccacaggtaag

SEQ ID NO: 2527662 - DNA, 25 bp, Homo sapien
ctgttttgtattgaagtgactgttg

SEQ ID NO: 2527663 - DNA, 25 bp, Homo sapien
tacggagacacaggacacttaagca

SEQ ID NO: 2527664 - DNA, 25 bp, Homo sapien
tgccaaaatatagccagatttccag

SEQ ID NO: 2527665 - DNA, 25 bp, Homo sapien
cttaagcagcttgggtgccaaaata

SEQ ID NO: 2527666 - DNA, 25 bp, Homo sapien
gcaaagacctagttccagacctggg

SEQ ID NO: 2527667 - DNA, 25 bp, Homo sapien
tcagcctgatccttttgacaggaat

SEQ ID NO: 2527668 - DNA, 25 bp, Homo sapien
caggaatggttcttctcaggataaa

SEQ ID NO: 2527669 - DNA, 25 bp, Homo sapien
ttctcaggataaaccatgaagtttg

SEQ ID NO: 2527670 - DNA, 25 bp, Homo sapien
ctgtctgctctagacacaggaatac

SEQ ID NO: 2527671 - DNA, 25 bp, Homo sapien
tgagaaaggcacttagatgagacat

SEQ ID NO: 2527672 - DNA, 25 bp, Homo sapien
gcagcttcattagatagtggccctt

SEQ ID NO: 2527673 - DNA, 25 bp, Homo sapien
cttagatgagacatggtagaaggca

SEQ ID NO: 2527674 - DNA, 25 bp, Homo sapien
cttttgccatctagaacaccttcca

SEQ ID NO: 2527675 - DNA, 25 bp, Homo sapien
tggctaaaaggatatccataggcca

SEQ ID NO: 2527676 - DNA, 25 bp, Homo sapien
gggaagttgacaccaaatttgttca

SEQ ID NO: 2527677 - DNA, 25 bp, Homo sapien
cataggccaattggaggcccttgtg

SEQ ID NO: 2527678 - DNA, 25 bp, Homo sapien
tgacactgagtcaatatcagggaag

SEQ ID NO: 2527679 - DNA, 25 bp, Homo sapien
cttctagacctgtagaagtgcttgg

SEQ ID NO: 2527680 - DNA, 25 bp, Homo sapien
tagacctgtagaagtgcttggacat

SEQ ID NO: 2527681 - DNA, 25 bp, Homo sapien
ctgcctgatagccaaggtaatggct

SEQ ID NO: 2527682 - DNA, 25 bp, Homo sapien
tagccaaggtaatggctgagacttc

SEQ ID NO: 2527683 - DNA, 25 bp, Homo sapien
aggtaatggctgagacttctctggc

SEQ ID NO: 2527684 - DNA, 25 bp, Homo sapien
cctgatagccaaggtaatggctgag

SEQ ID NO: 2527685 - DNA, 25 bp, Homo sapien
tctgaagacatgttcaggattttag

SEQ ID NO: 2527686 - DNA, 25 bp, Homo sapien
ttctctgaagacatgttcaggattt

SEQ ID NO: 2527687 - DNA, 25 bp, Homo sapien
caggttcggcattgatagatctgca

SEQ ID NO: 2527688 - DNA, 25 bp, Homo sapien
ttctttgccaggttcggcattgata

SEQ ID NO: 2527689 - DNA, 25 bp, Homo sapien
caatacacaagcacaggtctatacc

SEQ ID NO: 2527690 - DNA, 25 bp, Homo sapien
cacaagcacaggtctatacctggat

SEQ ID NO: 2527691 - DNA, 25 bp, Homo sapien
caagcacaggtctatacctggatca

SEQ ID NO: 2527692 - DNA, 25 bp, Homo sapien
tacacaagcacaggtctatacctgg

SEQ ID NO: 2527693 - DNA, 25 bp, Homo sapien
cagagtcctgaaggttatccaccat

SEQ ID NO: 2527694 - DNA, 25 bp, Homo sapien
agggtcagagtcctgaaggttatcc

SEQ ID NO: 2527695 - DNA, 25 bp, Homo sapien
cagagaggacacccgagagctcctc

SEQ ID NO: 2527696 - DNA, 25 bp, Homo sapien
gacttcttgccaaaaagcattctac

SEQ ID NO: 2527697 - DNA, 25 bp, Homo sapien
gcagttccacctccaaacgtgggta

SEQ ID NO: 2527698 - DNA, 25 bp, Homo sapien
agcagttccacctccaaacgtgggt

SEQ ID NO: 2527699 - DNA, 25 bp, Homo sapien
caaacgtgggtaaagccacaggact

SEQ ID NO: 2527700 - DNA, 25 bp, Homo sapien
cctccaaacgtgggtaaagccacag

SEQ ID NO: 2527701 - DNA, 25 bp, Homo sapien
cccttttggagtatagcaagtatag

SEQ ID NO: 2527702 - DNA, 25 bp, Homo sapien
caggtagagatggacattcaggcat

SEQ ID NO: 2527703 - DNA, 25 bp, Homo sapien
acaccacccttttggagtatagcaa

SEQ ID NO: 2527704 - DNA, 25 bp, Homo sapien
tccacatatactggggactgcttca

SEQ ID NO: 2527705 - DNA, 25 bp, Homo sapien
tgacccaaggccatttatcaggctg

SEQ ID NO: 2527706 - DNA, 25 bp, Homo sapien
ggaccagcgagcacttctgagagtt

SEQ ID NO: 2527707 - DNA, 25 bp, Homo sapien
tctatagcattctcttgacccaagg

SEQ ID NO: 2527708 - DNA, 25 bp, Homo sapien
tccatcaagcttcagggaccagcga

SEQ ID NO: 2527709 - DNA, 25 bp, Homo sapien
cttctcccagatgggtcctaagaaa

SEQ ID NO: 2527710 - DNA, 25 bp, Homo sapien
cagatgggtcctaagaaagctaggt

SEQ ID NO: 2527711 - DNA, 25 bp, Homo sapien
gatgggtcctaagaaagctaggtac

SEQ ID NO: 2527712 - DNA, 25 bp, Homo sapien
tcccagatgggtcctaagaaagcta

SEQ ID NO: 2527713 - DNA, 25 bp, Homo sapien
ctgttccttagatccagggaggtct

SEQ ID NO: 2527714 - DNA, 25 bp, Homo sapien
tgttccttagatccagggaggtctg

SEQ ID NO: 2527715 - DNA, 25 bp, Homo sapien
gggttggcctgcataaggactttca

SEQ ID NO: 2527716 - DNA, 25 bp, Homo sapien
tgggttggcctgcataaggactttc

SEQ ID NO: 2527717 - DNA, 25 bp, Homo sapien
ttggcctgcataaggactttcagag

SEQ ID NO: 2527718 - DNA, 25 bp, Homo sapien
ggttggcctgcataaggactttcag

SEQ ID NO: 2527719 - DNA, 25 bp, Homo sapien
gtacacagtaggaggattctgtaga

SEQ ID NO: 2527720 - DNA, 25 bp, Homo sapien
ggaagtacacagtaggaggattctg

SEQ ID NO: 2527721 - DNA, 25 bp, Homo sapien
gaggattctgtagaccggtacccat

SEQ ID NO: 2527722 - DNA, 25 bp, Homo sapien
aagtacacagtaggaggattctgta

SEQ ID NO: 2527723 - DNA, 25 bp, Homo sapien
cctggaactgagcacataccctgtg

SEQ ID NO: 2527724 - DNA, 25 bp, Homo sapien
taacaattaggtcaggctcctgggc

SEQ ID NO: 2527725 - DNA, 25 bp, Homo sapien
gcacataccctgtgccggttacgtt

SEQ ID NO: 2527726 - DNA, 25 bp, Homo sapien
ccctaacaattaggtcaggctcctg

SEQ ID NO: 2527727 - DNA, 25 bp, Homo sapien
tatcagagcaaagaacatgggtact

SEQ ID NO: 2527728 - DNA, 25 bp, Homo sapien
tgatgcgcatattgggctgacaccc

SEQ ID NO: 2527729 - DNA, 25 bp, Homo sapien
tgaagtgagacagtcctatcagagc

SEQ ID NO: 2527730 - DNA, 25 bp, Homo sapien
gctgacacccattgcagttgtagga

SEQ ID NO: 2527731 - DNA, 25 bp, Homo sapien
ggtggacagttctacaatgcatctg

SEQ ID NO: 2527732 - DNA, 25 bp, Homo sapien
tgggtggacagttctacaatgcatc

SEQ ID NO: 2527733 - DNA, 25 bp, Homo sapien
gacagttctacaatgcatctgtgta

SEQ ID NO: 2527734 - DNA, 25 bp, Homo sapien
ttctacaatgcatctgtgtacttcc

SEQ ID NO: 2527735 - DNA, 25 bp, Homo sapien
ccttgcttgtccaagccatctgcag

SEQ ID NO: 2527736 - DNA, 25 bp, Homo sapien
tgaaatagaccccagatggaaactg

SEQ ID NO: 2527737 - DNA, 25 bp, Homo sapien
gcagttggtcaatcttctcatgccc

SEQ ID NO: 2527738 - DNA, 25 bp, Homo sapien
ttgaggtctgaaatagaccccagat

SEQ ID NO: 2527739 - DNA, 25 bp, Homo sapien
gggctttcatttcgctgaccctggg

SEQ ID NO: 2527740 - DNA, 25 bp, Homo sapien
ttttcagaaggtgaaatatggccac

SEQ ID NO: 2527741 - DNA, 25 bp, Homo sapien
ctggcagacctgttgaatggggctt

SEQ ID NO: 2527742 - DNA, 25 bp, Homo sapien
tctgttttcagaaggtgaaatatgg

SEQ ID NO: 2527743 - DNA, 25 bp, Homo sapien
gagtaagcagcaaccacaggctgac

SEQ ID NO: 2527744 - DNA, 25 bp, Homo sapien
gagctgagtaagcagcaaccacagg

SEQ ID NO: 2527745 - DNA, 25 bp, Homo sapien
agagagctgagtaagcagcaaccac

SEQ ID NO: 2527746 - DNA, 25 bp, Homo sapien
agtaagcagcaaccacaggctgaca

SEQ ID NO: 2527747 - DNA, 25 bp, Homo sapien
acacaggaagaccatgtgacttgtg

SEQ ID NO: 2527748 - DNA, 25 bp, Homo sapien
atctttgcaagatccccatgaggta

SEQ ID NO: 2527749 - DNA, 25 bp, Homo sapien
gaccatgtgacttgtgcaaaagccc

SEQ ID NO: 2527750 - DNA, 25 bp, Homo sapien
ttgatctttgcaagatccccatgag

SEQ ID NO: 2527751 - DNA, 25 bp, Homo sapien
agagccccggatgccgcaggcttcg

SEQ ID NO: 2527752 - DNA, 25 bp, Homo sapien
agctgacctctcaccagagttgtca

SEQ ID NO: 2527753 - DNA, 25 bp, Homo sapien
agtacgatccagagggcacaaggca

SEQ ID NO: 2527754 - DNA, 25 bp, Homo sapien
aggcccaaggtccacggccacaggt

SEQ ID NO: 2527755 - DNA, 25 bp, Homo sapien
ctctaccccggtcctgttcgaggat

SEQ ID NO: 2527756 - DNA, 25 bp, Homo sapien
ctgttcgaggattccctctgtctcc

SEQ ID NO: 2527757 - DNA, 25 bp, Homo sapien
tccctctgtctccagtcgggctgct

SEQ ID NO: 2527758 - DNA, 25 bp, Homo sapien
ccggtcctgttcgaggattccctct

SEQ ID NO: 2527759 - DNA, 25 bp, Homo sapien
cctctcccttgtacactgtaaaatg

SEQ ID NO: 2527760 - DNA, 25 bp, Homo sapien
gcagaatagtcatcagcatcatgca

SEQ ID NO: 2527761 - DNA, 25 bp, Homo sapien
tcccttgtacactgtaaaatgcagt

SEQ ID NO: 2527762 - DNA, 25 bp, Homo sapien
tcagggttgttcttggcagaatagt

SEQ ID NO: 2527763 - DNA, 25 bp, Homo sapien
ctcctcgctacatatatggcagtga

SEQ ID NO: 2527764 - DNA, 25 bp, Homo sapien
tctctgatcttgcttcttcgcatcg

SEQ ID NO: 2527765 - DNA, 25 bp, Homo sapien
gaaacattccctgaataacactttc

SEQ ID NO: 2527766 - DNA, 25 bp, Homo sapien
cttcgcatcgttggttctgaaacat

SEQ ID NO: 2527767 - DNA, 25 bp, Homo sapien
ctttccggggtgattttgcacatgg

SEQ ID NO: 2527768 - DNA, 25 bp, Homo sapien
ttcttggtttatgaggacagcagcc

SEQ ID NO: 2527769 - DNA, 25 bp, Homo sapien
cacatggtttagcagtgtctctggg

SEQ ID NO: 2527770 - DNA, 25 bp, Homo sapien
gccacaacaggcaaaccctttgaca

SEQ ID NO: 2527771 - DNA, 25 bp, Homo sapien
ccagaaatccactgagtctgtgaag

SEQ ID NO: 2527772 - DNA, 25 bp, Homo sapien
ctgagtctgtgaagtatacccacat

SEQ ID NO: 2527773 - DNA, 25 bp, Homo sapien
gagtctgtgaagtatacccacattc

SEQ ID NO: 2527774 - DNA, 25 bp, Homo sapien
ttgagatgctccagaaatccactga

SEQ ID NO: 2527775 - DNA, 25 bp, Homo sapien
tatactttatatacctccagcagct

SEQ ID NO: 2527776 - DNA, 25 bp, Homo sapien
acaaaattcaaaaagcagctgtgtg

SEQ ID NO: 2527777 - DNA, 25 bp, Homo sapien
cagctgtgtgttcaaattggcagac

SEQ ID NO: 2527778 - DNA, 25 bp, Homo sapien
gactttcttgttggtatctcaagcc

SEQ ID NO: 2527779 - DNA, 25 bp, Homo sapien
aagcctcagacgcagttccagtgga

SEQ ID NO: 2527780 - DNA, 25 bp, Homo sapien
caaaaagagccttgagcagaaatgt

SEQ ID NO: 2527781 - DNA, 25 bp, Homo sapien
tgatgtctccatcgctctgcagttg

SEQ ID NO: 2527782 - DNA, 25 bp, Homo sapien
cagatccagggtgcctagagctaga

SEQ ID NO: 2527783 - DNA, 25 bp, Homo sapien
cgtggatgtgtaggtggcaggagga

SEQ ID NO: 2527784 - DNA, 25 bp, Homo sapien
cacggcgtcactaccgacttcaaag

SEQ ID NO: 2527785 - DNA, 25 bp, Homo sapien
ggagggagccgcgagcaggactcca

SEQ ID NO: 2527786 - DNA, 25 bp, Homo sapien
cccttggaagtgactcgtggatgtg

SEQ ID NO: 2527787 - DNA, 25 bp, Homo sapien
taactgcgccaactagaaggctttc

SEQ ID NO: 2527788 - DNA, 25 bp, Homo sapien
gaggctgggagcttagtttcttcct

SEQ ID NO: 2527789 - DNA, 25 bp, Homo sapien
ctgatgcgggaagacacggttctct

SEQ ID NO: 2527790 - DNA, 25 bp, Homo sapien
tgggctggtcaacaaaatctctgca

SEQ ID NO: 2527791 - DNA, 25 bp, Homo sapien
cacgtgcgtgaattaagcacttggc

SEQ ID NO: 2527792 - DNA, 25 bp, Homo sapien
tgaggccgaagccatggacgcagca

SEQ ID NO: 2527793 - DNA, 25 bp, Homo sapien
ctctggatagacgtgagctgaggcc

SEQ ID NO: 2527794 - DNA, 25 bp, Homo sapien
cagatgtgatatttcatgtgggacc

SEQ ID NO: 2527795 - DNA, 25 bp, Homo sapien
agacccccaggatccacagactgta

SEQ ID NO: 2527796 - DNA, 25 bp, Homo sapien
gaacagtttaaagccagatagcttc

SEQ ID NO: 2527797 - DNA, 25 bp, Homo sapien
tcttggttcaaacttgagaccccca

SEQ ID NO: 2527798 - DNA, 25 bp, Homo sapien
cgctaagagcctcctcgtctgggaa

SEQ ID NO: 2527799 - DNA, 25 bp, Homo sapien
gacataatcgcatagggacactcac

SEQ ID NO: 2527800 - DNA, 25 bp, Homo sapien
tggtttacttgaagggaatcccgca

SEQ ID NO: 2527801 - DNA, 25 bp, Homo sapien
ccggaagggaagctataggccacgt

SEQ ID NO: 2527802 - DNA, 25 bp, Homo sapien
taggccacgttttagcgacagacag

SEQ ID NO: 2527803 - DNA, 25 bp, Homo sapien
cgaccttgagtgcagatgtgaacat

SEQ ID NO: 2527804 - DNA, 25 bp, Homo sapien
gacagactccaactacgcactaggg

SEQ ID NO: 2527805 - DNA, 25 bp, Homo sapien
ctagggaaaaacactcaatgaggca

SEQ ID NO: 2527806 - DNA, 25 bp, Homo sapien
tagatcagcatccagcgaccttgag

SEQ ID NO: 2527807 - DNA, 25 bp, Homo sapien
ggactgcaggccagtctgaggccca

SEQ ID NO: 2527808 - DNA, 25 bp, Homo sapien
catgccaactccgtgcacagagtgg

SEQ ID NO: 2527809 - DNA, 25 bp, Homo sapien
tagctattgtcgctccactctggca

SEQ ID NO: 2527810 - DNA, 25 bp, Homo sapien
gggatagagtccttggcacgccatg

SEQ ID NO: 2527811 - DNA, 25 bp, Homo sapien
ctgctgtaggaaggcatgcttggcc

SEQ ID NO: 2527812 - DNA, 25 bp, Homo sapien
ggccacgtgttgcagctgatgtcct

SEQ ID NO: 2527813 - DNA, 25 bp, Homo sapien
gccccgaggtgaagtgagcggagaa

SEQ ID NO: 2527814 - DNA, 25 bp, Homo sapien
agtgctggtagggtagcctgtccat

SEQ ID NO: 2527815 - DNA, 25 bp, Homo sapien
tagggcttcttatagggatggtctg

SEQ ID NO: 2527816 - DNA, 25 bp, Homo sapien
gccctgctgctgtggatagctagag

SEQ ID NO: 2527817 - DNA, 25 bp, Homo sapien
tgtgccgactctgtcctgtaggagg

SEQ ID NO: 2527818 - DNA, 25 bp, Homo sapien
tacatgcaagcttgccgctgtgccg

SEQ ID NO: 2527819 - DNA, 25 bp, Homo sapien
ctgagagactgttagccctaaccgc

SEQ ID NO: 2527820 - DNA, 25 bp, Homo sapien
aagtggagacagttatttggccaaa

SEQ ID NO: 2527821 - DNA, 25 bp, Homo sapien
gagagactgttagccctaaccgcca

SEQ ID NO: 2527822 - DNA, 25 bp, Homo sapien
taaaagtggagacagttatttggcc

SEQ ID NO: 2527823 - DNA, 25 bp, Homo sapien
attgaccaggggtgatcacactcac

SEQ ID NO: 2527824 - DNA, 25 bp, Homo sapien
aattgaccaggggtgatcacactca

SEQ ID NO: 2527825 - DNA, 25 bp, Homo sapien
tcgagactcgctgctgaaaggactg

SEQ ID NO: 2527826 - DNA, 25 bp, Homo sapien
gaggccactttttgcctcacggtgc

SEQ ID NO: 2527827 - DNA, 25 bp, Homo sapien
gggccggaaacaccattctcacact

SEQ ID NO: 2527828 - DNA, 25 bp, Homo sapien
aaaggactgtggttggaggccactt

SEQ ID NO: 2527829 - DNA, 25 bp, Homo sapien
gagataacgcctatcagtgccctga

SEQ ID NO: 2527830 - DNA, 25 bp, Homo sapien
tatcagtgccctgatacagatttcc

SEQ ID NO: 2527831 - DNA, 25 bp, Homo sapien
gaaaagatgggagataacgcctatc

SEQ ID NO: 2527832 - DNA, 25 bp, Homo sapien
gccctgatacagatttcctgagtgg

SEQ ID NO: 2527833 - DNA, 25 bp, Homo sapien
ccctctaaagagcctgaaacatcat

SEQ ID NO: 2527834 - DNA, 25 bp, Homo sapien
catccccaacaccgatcgtgaacat

SEQ ID NO: 2527835 - DNA, 25 bp, Homo sapien
gtttccctctaaagagcctgaaaca

SEQ ID NO: 2527836 - DNA, 25 bp, Homo sapien
ttccctctaaagagcctgaaacatc

SEQ ID NO: 2527837 - DNA, 25 bp, Homo sapien
aatgaatgacgccattgtcgctggg

SEQ ID NO: 2527838 - DNA, 25 bp, Homo sapien
cgtgagcgagtgcaatgaatgacgc

SEQ ID NO: 2527839 - DNA, 25 bp, Homo sapien
tctcatgttctgttccacgtgagcg

SEQ ID NO: 2527840 - DNA, 25 bp, Homo sapien
agctggccttgggtatcagcgccca

SEQ ID NO: 2527841 - DNA, 25 bp, Homo sapien
cagccgactgaattggccttttcat

SEQ ID NO: 2527842 - DNA, 25 bp, Homo sapien
tccagctaatgaacacccgggagaa

SEQ ID NO: 2527843 - DNA, 25 bp, Homo sapien
tattgaaatccacggccaaactgca

SEQ ID NO: 2527844 - DNA, 25 bp, Homo sapien
gaacgttttccactacagccgactg

SEQ ID NO: 2527845 - DNA, 25 bp, Homo sapien
tagctcacggtgacttcaggctcct

SEQ ID NO: 2527846 - DNA, 25 bp, Homo sapien
caacctgggcgtggacatagagcat

SEQ ID NO: 2527847 - DNA, 25 bp, Homo sapien
taacagacattggaggctccgacgg

SEQ ID NO: 2527848 - DNA, 25 bp, Homo sapien
tgttgactcaaccagggctatatga

SEQ ID NO: 2527849 - DNA, 25 bp, Homo sapien
cgaattccttgacactccttctagg

SEQ ID NO: 2527850 - DNA, 25 bp, Homo sapien
gaagagagaacttgtcctcccttct

SEQ ID NO: 2527851 - DNA, 25 bp, Homo sapien
acactccttctaggtagaagagaga

SEQ ID NO: 2527852 - DNA, 25 bp, Homo sapien
gcagttttaaaatgcgtcgacgaat

SEQ ID NO: 2527853 - DNA, 25 bp, Homo sapien
atagctggctgtcatctgtccaatc

SEQ ID NO: 2527854 - DNA, 25 bp, Homo sapien
tcatagctggctgtcatctgtccaa

SEQ ID NO: 2527855 - DNA, 25 bp, Homo sapien
catagctggctgtcatctgtccaat

SEQ ID NO: 2527856 - DNA, 25 bp, Homo sapien
agggattattctcaatctttaattg

SEQ ID NO: 2527857 - DNA, 25 bp, Homo sapien
gattattctcaatctttaattgcgt

SEQ ID NO: 2527858 - DNA, 25 bp, Homo sapien
caaagggattattctcaatctttaa

SEQ ID NO: 2527859 - DNA, 25 bp, Homo sapien
actgccccgaaatcctttggcaaag

SEQ ID NO: 2527860 - DNA, 25 bp, Homo sapien
tctccattggaagggttgaccccat

SEQ ID NO: 2527861 - DNA, 25 bp, Homo sapien
catcaggcagcgtagtcatctccat

SEQ ID NO: 2527862 - DNA, 25 bp, Homo sapien
gcatgttgacatgatcgttgcacat

SEQ ID NO: 2527863 - DNA, 25 bp, Homo sapien
tcatctccattggaagggttgaccc

SEQ ID NO: 2527864 - DNA, 25 bp, Homo sapien
tctatacagcacctgtacactggct

SEQ ID NO: 2527865 - DNA, 25 bp, Homo sapien
cctaaaaattgcgtgtgaactgaat

SEQ ID NO: 2527866 - DNA, 25 bp, Homo sapien
tgacagaaggcaaccatacggagtt

SEQ ID NO: 2527867 - DNA, 25 bp, Homo sapien
tacagtagcagacccaggtgacaga

SEQ ID NO: 2527868 - DNA, 25 bp, Homo sapien
tggaaggatactcggaaaaatcctc

SEQ ID NO: 2527869 - DNA, 25 bp, Homo sapien
tcaaggagacagactcaaattggcc

SEQ ID NO: 2527870 - DNA, 25 bp, Homo sapien
ctttcagggcattcgaccctcggtt

SEQ ID NO: 2527871 - DNA, 25 bp, Homo sapien
gctcttgctggttcaacaggtggaa

SEQ ID NO: 2527872 - DNA, 25 bp, Homo sapien
tgagttttctttccgagggcaggaa

SEQ ID NO: 2527873 - DNA, 25 bp, Homo sapien
aaaggactgtctatcacagcttggc

SEQ ID NO: 2527874 - DNA, 25 bp, Homo sapien
ctcgacctgggttcccagacaggct

SEQ ID NO: 2527875 - DNA, 25 bp, Homo sapien
acctgggttcccagacaggctttgt

SEQ ID NO: 2527876 - DNA, 25 bp, Homo sapien
tcccaagcaatgcaggtctgcctcc

SEQ ID NO: 2527877 - DNA, 25 bp, Homo sapien
ccttctcccaagcaatgcaggtctg

SEQ ID NO: 2527878 - DNA, 25 bp, Homo sapien
tgcagccaccttctcccaagcaatg

SEQ ID NO: 2527879 - DNA, 25 bp, Homo sapien
agcaatgcaggtctgcctcccctca

SEQ ID NO: 2527880 - DNA, 25 bp, Homo sapien
cagcttgggagtgttatcccaagct

SEQ ID NO: 2527881 - DNA, 25 bp, Homo sapien
gcttgggagtgttatcccaagctgc

SEQ ID NO: 2527882 - DNA, 25 bp, Homo sapien
cttgggagtgttatcccaagctgct

SEQ ID NO: 2527883 - DNA, 25 bp, Homo sapien
tccagcttgggagtgttatcccaag

SEQ ID NO: 2527884 - DNA, 25 bp, Homo sapien
tccattattttcatccgctttcacg

SEQ ID NO: 2527885 - DNA, 25 bp, Homo sapien
tcaggaaagacgtgagtgcagaacg

SEQ ID NO: 2527886 - DNA, 25 bp, Homo sapien
cacgatgtgtaatctaggctggtat

SEQ ID NO: 2527887 - DNA, 25 bp, Homo sapien
tcactgctataaacgcagtctcagg

SEQ ID NO: 2527888 - DNA, 25 bp, Homo sapien
gggaagcctcaagggcacttttgga

SEQ ID NO: 2527889 - DNA, 25 bp, Homo sapien
gcaagtctggatcgaggaatccgcg

SEQ ID NO: 2527890 - DNA, 25 bp, Homo sapien
ccccaacgggagctgagcaagtctg

SEQ ID NO: 2527891 - DNA, 25 bp, Homo sapien
cctcaagggcacttttggattgaca

SEQ ID NO: 2527892 - DNA, 25 bp, Homo sapien
ccgcgtttaacagcctgaaaatctg

SEQ ID NO: 2527893 - DNA, 25 bp, Homo sapien
gaactgcggaggttgtctctgtgac

SEQ ID NO: 2527894 - DNA, 25 bp, Homo sapien
ctggcctgctttttcccgggaactg

SEQ ID NO: 2527895 - DNA, 25 bp, Homo sapien
caccgaacttgcgaatcgccgcgtt

SEQ ID NO: 2527896 - DNA, 25 bp, Homo sapien
gccccgatcgagtggaggtagttgg

SEQ ID NO: 2527897 - DNA, 25 bp, Homo sapien
attcttggaccaaccctggagtccg

SEQ ID NO: 2527898 - DNA, 25 bp, Homo sapien
agtccggccccgatcgagtggaggt

SEQ ID NO: 2527899 - DNA, 25 bp, Homo sapien
gggcaagattcttggaccaaccctg

SEQ ID NO: 2527900 - DNA, 25 bp, Homo sapien
cagcccagagatgcatgtggaacct

SEQ ID NO: 2527901 - DNA, 25 bp, Homo sapien
gtgctggtaaggcatctgctgggga

SEQ ID NO: 2527902 - DNA, 25 bp, Homo sapien
gagccagcccagagatgcatgtgga

SEQ ID NO: 2527903 - DNA, 25 bp, Homo sapien
ccagcccagagatgcatgtggaacc

SEQ ID NO: 2527904 - DNA, 25 bp, Homo sapien
gggtcagccaatgcctacacaagct

SEQ ID NO: 2527905 - DNA, 25 bp, Homo sapien
gccaatgcctacacaagctgaattt

SEQ ID NO: 2527906 - DNA, 25 bp, Homo sapien
tgcctacacaagctgaatttacaga

SEQ ID NO: 2527907 - DNA, 25 bp, Homo sapien
gggcgggtcagccaatgcctacaca

SEQ ID NO: 2527908 - DNA, 25 bp, Homo sapien
gagtctgggtgcacgtacaggcggc

SEQ ID NO: 2527909 - DNA, 25 bp, Homo sapien
tcatccaatgcgccccggtggcggg

SEQ ID NO: 2527910 - DNA, 25 bp, Homo sapien
gagacgagctgcctcatccaatgcg

SEQ ID NO: 2527911 - DNA, 25 bp, Homo sapien
gtccaggtggttgttggtgagcttg

SEQ ID NO: 2527912 - DNA, 25 bp, Homo sapien
gtccatgagaagaatgtacttcgtt

SEQ ID NO: 2527913 - DNA, 25 bp, Homo sapien
ccttcactttgtaactgggaaacat

SEQ ID NO: 2527914 - DNA, 25 bp, Homo sapien
gatcgtcggcaggtacaatgtccat

SEQ ID NO: 2527915 - DNA, 25 bp, Homo sapien
tattatctgcgaatttgtatctgtg

SEQ ID NO: 2527916 - DNA, 25 bp, Homo sapien
agagggactcggacgtgtctttcct

SEQ ID NO: 2527917 - DNA, 25 bp, Homo sapien
ccccttcacacactcggtggcttgg

SEQ ID NO: 2527918 - DNA, 25 bp, Homo sapien
cacacactcggtggcttgggcctac

SEQ ID NO: 2527919 - DNA, 25 bp, Homo sapien
ccttcacacactcggtggcttgggc

SEQ ID NO: 2527920 - DNA, 25 bp, Homo sapien
ttcacacactcggtggcttgggcct

SEQ ID NO: 2527921 - DNA, 25 bp, Homo sapien
ttgcgggacgcggaagacccgtcca

SEQ ID NO: 2527922 - DNA, 25 bp, Homo sapien
acccgtccagcacgggtagggatgt

SEQ ID NO: 2527923 - DNA, 25 bp, Homo sapien
gggatgtggccaggacgtccccagg

SEQ ID NO: 2527924 - DNA, 25 bp, Homo sapien
gctttttgctttgcgggacgcggaa

SEQ ID NO: 2527925 - DNA, 25 bp, Homo sapien
ctgggcgcgcgcgtgcacatgctca

SEQ ID NO: 2527926 - DNA, 25 bp, Homo sapien
tgggcgcgcgcgtgcacatgctcac

SEQ ID NO: 2527927 - DNA, 25 bp, Homo sapien
cgaagctgccgtgtttattggtgtc

SEQ ID NO: 2527928 - DNA, 25 bp, Homo sapien
gtctgtatatagagcccggccgagc

SEQ ID NO: 2527929 - DNA, 25 bp, Homo sapien
acactgacatacagagctgcaccac

SEQ ID NO: 2527930 - DNA, 25 bp, Homo sapien
ttctagctaaaactctgcgagcttt

SEQ ID NO: 2527931 - DNA, 25 bp, Homo sapien
tccagccttggttatgatcatttcc

SEQ ID NO: 2527932 - DNA, 25 bp, Homo sapien
ctctttcatggagaaacactttgat

SEQ ID NO: 2527933 - DNA, 25 bp, Homo sapien
tagccacagttctctttcatggaga

SEQ ID NO: 2527934 - DNA, 25 bp, Homo sapien
gcccacttcgtggaattttagccac

SEQ ID NO: 2527935 - DNA, 25 bp, Homo sapien
tctcgggtttcgaatcgcagggcag

SEQ ID NO: 2527936 - DNA, 25 bp, Homo sapien
agggcaggtcttttgcgtcaggctc

SEQ ID NO: 2527937 - DNA, 25 bp, Homo sapien
tcaggctccagaggcgtgtgcgcca

SEQ ID NO: 2527938 - DNA, 25 bp, Homo sapien
aggcgtgtgcgccaggccaaagccc

SEQ ID NO: 2527939 - DNA, 25 bp, Homo sapien
ggtgcgcccagggccctgtgcccgc

SEQ ID NO: 2527940 - DNA, 25 bp, Homo sapien
tgcgcccagggccctgtgcccgcgc

SEQ ID NO: 2527941 - DNA, 25 bp, Homo sapien
cagggccctgtgcccgcgcaaggtt

SEQ ID NO: 2527942 - DNA, 25 bp, Homo sapien
gcccagggccctgtgcccgcgcaag

SEQ ID NO: 2527943 - DNA, 25 bp, Homo sapien
gagagaaaggttggagagcacaatt

SEQ ID NO: 2527944 - DNA, 25 bp, Homo sapien
aacgagagaaaggttggagagcaca

SEQ ID NO: 2527945 - DNA, 25 bp, Homo sapien
agaacgagagaaaggttggagagca

SEQ ID NO: 2527946 - DNA, 25 bp, Homo sapien
cgagagaaaggttggagagcacaat

SEQ ID NO: 2527947 - DNA, 25 bp, Homo sapien
tataagcaggcacaacttcttgcaa

SEQ ID NO: 2527948 - DNA, 25 bp, Homo sapien
tttataagcaggcacaacttcttgc

SEQ ID NO: 2527949 - DNA, 25 bp, Homo sapien
aagcaggcacaacttcttgcaaaag

SEQ ID NO: 2527950 - DNA, 25 bp, Homo sapien
taagcaggcacaacttcttgcaaaa

SEQ ID NO: 2527951 - DNA, 25 bp, Homo sapien
gagaaggtgaggcccgcatctcccc

SEQ ID NO: 2527952 - DNA, 25 bp, Homo sapien
cctgcgcaggctctccgtgataagc

SEQ ID NO: 2527953 - DNA, 25 bp, Homo sapien
aagctgcccgtcaaatttgtctgga

SEQ ID NO: 2527954 - DNA, 25 bp, Homo sapien
cgtgataagcaagctgcccgtcaaa

SEQ ID NO: 2527955 - DNA, 25 bp, Homo sapien
ctgctgtggccagagatctagaaat

SEQ ID NO: 2527956 - DNA, 25 bp, Homo sapien
gctttcttcgcctcgttctcggggc

SEQ ID NO: 2527957 - DNA, 25 bp, Homo sapien
gggcttcagggaggcggcgactgga

SEQ ID NO: 2527958 - DNA, 25 bp, Homo sapien
ctgtggccagagatctagaaatggg

SEQ ID NO: 2527959 - DNA, 25 bp, Homo sapien
gaggcgaacaagatgcggtttgaca

SEQ ID NO: 2527960 - DNA, 25 bp, Homo sapien
cggtttgacagaaccaggccgtgct

SEQ ID NO: 2527961 - DNA, 25 bp, Homo sapien
tccgagccgcgcaaaatctctgcaa

SEQ ID NO: 2527962 - DNA, 25 bp, Homo sapien
tgcttctgcaaacctcaatgccgct

SEQ ID NO: 2527963 - DNA, 25 bp, Homo sapien
gaagccggtgcattcaccacatcct

SEQ ID NO: 2527964 - DNA, 25 bp, Homo sapien
ggtgaagccggtgcattcaccacat

SEQ ID NO: 2527965 - DNA, 25 bp, Homo sapien
tcggtgaagccggtgcattcaccac

SEQ ID NO: 2527966 - DNA, 25 bp, Homo sapien
tgaagccggtgcattcaccacatcc

SEQ ID NO: 2527967 - DNA, 25 bp, Homo sapien
tagggcgcacctaccgctggagcct

SEQ ID NO: 2527968 - DNA, 25 bp, Homo sapien
tactgctgcctactagggcgcacct

SEQ ID NO: 2527969 - DNA, 25 bp, Homo sapien
ggtttactgcttacccagaatagcg

SEQ ID NO: 2527970 - DNA, 25 bp, Homo sapien
cagaatagcggctactgctgcctac

SEQ ID NO: 2527971 - DNA, 25 bp, Homo sapien
gaatggtcgaagtcctttctgagcg

SEQ ID NO: 2527972 - DNA, 25 bp, Homo sapien
taaatacttcccagttggcaagcgc

SEQ ID NO: 2527973 - DNA, 25 bp, Homo sapien
aagttggaagcccagtgaatggtcg

SEQ ID NO: 2527974 - DNA, 25 bp, Homo sapien
tggcaagcgccaaagaacacaaaat

SEQ ID NO: 2527975 - DNA, 25 bp, Homo sapien
tcaggattaaagttcccggattcga

SEQ ID NO: 2527976 - DNA, 25 bp, Homo sapien
ggttgcctcgatgctcacaaagtac

SEQ ID NO: 2527977 - DNA, 25 bp, Homo sapien
tcgaggtaagagtcagtctctctca

SEQ ID NO: 2527978 - DNA, 25 bp, Homo sapien
cacagtgacgttgggttgcctcgat

SEQ ID NO: 2527979 - DNA, 25 bp, Homo sapien
aggagagctgcctgaccccgcctgg

SEQ ID NO: 2527980 - DNA, 25 bp, Homo sapien
cgctgacctcgagaaggagagctgc

SEQ ID NO: 2527981 - DNA, 25 bp, Homo sapien
ctccaacgctgacctcgagaaggag

SEQ ID NO: 2527982 - DNA, 25 bp, Homo sapien
ttgcagacattctctccaacgctga

SEQ ID NO: 2527983 - DNA, 25 bp, Homo sapien
gaaagccagccctcctttgctatgg

SEQ ID NO: 2527984 - DNA, 25 bp, Homo sapien
gcagacccagattgggacaccgaat

SEQ ID NO: 2527985 - DNA, 25 bp, Homo sapien
ttgggcctgcaagtcaaggtctgga

SEQ ID NO: 2527986 - DNA, 25 bp, Homo sapien
gtgactgctctgctaaaatcccagg

SEQ ID NO: 2527987 - DNA, 25 bp, Homo sapien
tggaggcctttaggcttgctggcaa

SEQ ID NO: 2527988 - DNA, 25 bp, Homo sapien
ctttaggcttgctggcaaggcgacc

SEQ ID NO: 2527989 - DNA, 25 bp, Homo sapien
ccaagtcagcttggaggcctttagg

SEQ ID NO: 2527990 - DNA, 25 bp, Homo sapien
cagcttggaggcctttaggcttgct

SEQ ID NO: 2527991 - DNA, 25 bp, Homo sapien
tctgggccaccaagcaaaataggga

SEQ ID NO: 2527992 - DNA, 25 bp, Homo sapien
gaagattcagcaagactaagacggg

SEQ ID NO: 2527993 - DNA, 25 bp, Homo sapien
gccaggtgacacacgaagccattct

SEQ ID NO: 2527994 - DNA, 25 bp, Homo sapien
caaacatggcatcggaagaaggctg

SEQ ID NO: 2527995 - DNA, 25 bp, Homo sapien
tttggagcgcaaaagccaggagtgc

SEQ ID NO: 2527996 - DNA, 25 bp, Homo sapien
aataaagaggcaaccaggcgatagc

SEQ ID NO: 2527997 - DNA, 25 bp, Homo sapien
caaggttggtttgtggtctccgaca

SEQ ID NO: 2527998 - DNA, 25 bp, Homo sapien
gcttgggatgcgataactcagtgcc

SEQ ID NO: 2527999 - DNA, 25 bp, Homo sapien
cgccgaggcacgaggcactctattt

SEQ ID NO: 2528000 - DNA, 25 bp, Homo sapien
cacgacgactattatttttagtctg

SEQ ID NO: 2528001 - DNA, 25 bp, Homo sapien
tttgttttgtaatcacgacgactat

SEQ ID NO: 2528002 - DNA, 25 bp, Homo sapien
tattgtaccagggcccgccgaggca

SEQ ID NO: 2528003 - DNA, 25 bp, Homo sapien
atgggcacaatttctaagcagcgca

SEQ ID NO: 2528004 - DNA, 25 bp, Homo sapien
cagcgcagtggtggatgctcgcaaa

SEQ ID NO: 2528005 - DNA, 25 bp, Homo sapien
cacaatttctaagcagcgcagtggt

SEQ ID NO: 2528006 - DNA, 25 bp, Homo sapien
ggtggatgctcgcaaacttttgcgc

SEQ ID NO: 2528007 - DNA, 25 bp, Homo sapien
cgctggaaacccactaggttgagtt

SEQ ID NO: 2528008 - DNA, 25 bp, Homo sapien
taggttgagttgcaaaacgtaccgc

SEQ ID NO: 2528009 - DNA, 25 bp, Homo sapien
ttgcaaaacgtaccgcgtagacgcc

SEQ ID NO: 2528010 - DNA, 25 bp, Homo sapien
cccactaggttgagttgcaaaacgt

SEQ ID NO: 2528011 - DNA, 25 bp, Homo sapien
cagcttcggggttcgattctgggtt

SEQ ID NO: 2528012 - DNA, 25 bp, Homo sapien
acgtctgaatctggacttgccccca

SEQ ID NO: 2528013 - DNA, 25 bp, Homo sapien
acagagccggagagcgtcgggcctt

SEQ ID NO: 2528014 - DNA, 25 bp, Homo sapien
tcccgagggagctggacgtctgaat

SEQ ID NO: 2528015 - DNA, 25 bp, Homo sapien
tgtgcagggaggcagtcggccggca

SEQ ID NO: 2528016 - DNA, 25 bp, Homo sapien
gcagggaggcagtcggccggcagag

SEQ ID NO: 2528017 - DNA, 25 bp, Homo sapien
caaaatgtgcagggaggcagtcggc

SEQ ID NO: 2528018 - DNA, 25 bp, Homo sapien
aatgtgcagggaggcagtcggccgg

SEQ ID NO: 2528019 - DNA, 25 bp, Homo sapien
ctgcggcgggagccaaggtcaggcc

SEQ ID NO: 2528020 - DNA, 25 bp, Homo sapien
aaggtcaggcccgcggggagagcgg

SEQ ID NO: 2528021 - DNA, 25 bp, Homo sapien
tccagcgccggccacaagctcccag

SEQ ID NO: 2528022 - DNA, 25 bp, Homo sapien
gggagagcgggcagcttccagcgcc

SEQ ID NO: 2528023 - DNA, 25 bp, Homo sapien
aatccgaggctcgtgtttgctccca

SEQ ID NO: 2528024 - DNA, 25 bp, Homo sapien
caaaccctaggtcgacgagatgagt

SEQ ID NO: 2528025 - DNA, 25 bp, Homo sapien
gttcctacttgacctctgagccgag

SEQ ID NO: 2528026 - DNA, 25 bp, Homo sapien
caatcgttcgggcagtaaactccgg

SEQ ID NO: 2528027 - DNA, 25 bp, Homo sapien
tgacgattgtttccgcagggacctt

SEQ ID NO: 2528028 - DNA, 25 bp, Homo sapien
caattggctgcgcagtctgaggcct

SEQ ID NO: 2528029 - DNA, 25 bp, Homo sapien
tccttagtgggttcaacggagcagg

SEQ ID NO: 2528030 - DNA, 25 bp, Homo sapien
gggtaccccgaggacattcgtgcaa

SEQ ID NO: 2528031 - DNA, 25 bp, Homo sapien
tgcccgggtacctgcaagaatcttc

SEQ ID NO: 2528032 - DNA, 25 bp, Homo sapien
ccgggtacctgcaagaatcttccca

SEQ ID NO: 2528033 - DNA, 25 bp, Homo sapien
cccagtgcccgggtacctgcaagaa

SEQ ID NO: 2528034 - DNA, 25 bp, Homo sapien
agtgcccgggtacctgcaagaatct

SEQ ID NO: 2528035 - DNA, 25 bp, Homo sapien
gagctccagcaggtccgtaaaaagg

SEQ ID NO: 2528036 - DNA, 25 bp, Homo sapien
tctactcatttagccgggactgccg

SEQ ID NO: 2528037 - DNA, 25 bp, Homo sapien
cattgaattaggtgtgtcacccgca

SEQ ID NO: 2528038 - DNA, 25 bp, Homo sapien
ggttgttaatctaaggagctccagc

SEQ ID NO: 2528039 - DNA, 25 bp, Homo sapien
catatagtttttaaacacagtttct

SEQ ID NO: 2528040 - DNA, 25 bp, Homo sapien
tcatatagtttttaaacacagtttc

SEQ ID NO: 2528041 - DNA, 25 bp, Homo sapien
ccagggcctgtggaacccgactgga

SEQ ID NO: 2528042 - DNA, 25 bp, Homo sapien
ccaggcagccgcccaagtgacaggt

SEQ ID NO: 2528043 - DNA, 25 bp, Homo sapien
ccgactggagaagttggagtagtca

SEQ ID NO: 2528044 - DNA, 25 bp, Homo sapien
ggcttccaggcagccgcccaagtga

SEQ ID NO: 2528045 - DNA, 25 bp, Homo sapien
taacagccaaggatgttgtctgcct

SEQ ID NO: 2528046 - DNA, 25 bp, Homo sapien
cagccaaggatgttgtctgcctctc

SEQ ID NO: 2528047 - DNA, 25 bp, Homo sapien
agaataacagccaaggatgttgtct

SEQ ID NO: 2528048 - DNA, 25 bp, Homo sapien
ataacagccaaggatgttgtctgcc

SEQ ID NO: 2528049 - DNA, 25 bp, Homo sapien
gtcatttcagcaatgctcactgcat

SEQ ID NO: 2528050 - DNA, 25 bp, Homo sapien
taatgaggaaggcatgtgaaaagca

SEQ ID NO: 2528051 - DNA, 25 bp, Homo sapien
acttctaacgctgtttctcttgctg

SEQ ID NO: 2528052 - DNA, 25 bp, Homo sapien
gaaatccatttcttccaaagtccta

SEQ ID NO: 2528053 - DNA, 25 bp, Homo sapien
tggacaaccaaagccggccactgtt

SEQ ID NO: 2528054 - DNA, 25 bp, Homo sapien
taataacccactgtaggtttcttca

SEQ ID NO: 2528055 - DNA, 25 bp, Homo sapien
aacccactgtaggtttcttcaccat

SEQ ID NO: 2528056 - DNA, 25 bp, Homo sapien
cttggacaaccaaagccggccactg

SEQ ID NO: 2528057 - DNA, 25 bp, Homo sapien
taagtcaggcactccacttttcagt

SEQ ID NO: 2528058 - DNA, 25 bp, Homo sapien
cagttctgtgaacgtaagtcaggca

SEQ ID NO: 2528059 - DNA, 25 bp, Homo sapien
gaacgtaagtcaggcactccacttt

SEQ ID NO: 2528060 - DNA, 25 bp, Homo sapien
cttctaaccagttctgtgaacgtaa

SEQ ID NO: 2528061 - DNA, 25 bp, Homo sapien
atatgagccgggcaaggaagaagct

SEQ ID NO: 2528062 - DNA, 25 bp, Homo sapien
tagagcaggtggcattccctctcca

SEQ ID NO: 2528063 - DNA, 25 bp, Homo sapien
ccaaggcggcttcttctagagcagg

SEQ ID NO: 2528064 - DNA, 25 bp, Homo sapien
tgctctgaagggcaattcgaggtac

SEQ ID NO: 2528065 - DNA, 25 bp, Homo sapien
aaatgagatttaattctgctccctt

SEQ ID NO: 2528066 - DNA, 25 bp, Homo sapien
ttgaatttcctgtaagggccacatt

SEQ ID NO: 2528067 - DNA, 25 bp, Homo sapien
ttttgaatttcctgtaagggccaca

SEQ ID NO: 2528068 - DNA, 25 bp, Homo sapien
gctcccttagccttattccttttga

SEQ ID NO: 2528069 - DNA, 25 bp, Homo sapien
tttgaaaatctaatgggagctatgg

SEQ ID NO: 2528070 - DNA, 25 bp, Homo sapien
ctcctcgtagctctttgaaaatcta

SEQ ID NO: 2528071 - DNA, 25 bp, Homo sapien
gaccgtctgcctggaaaaatgccct

SEQ ID NO: 2528072 - DNA, 25 bp, Homo sapien
taatgggagctatggaccgtctgcc

SEQ ID NO: 2528073 - DNA, 25 bp, Homo sapien
tcccgactggtgcagggagctgcct

SEQ ID NO: 2528074 - DNA, 25 bp, Homo sapien
aaggcatcaacctgggaagagtccc

SEQ ID NO: 2528075 - DNA, 25 bp, Homo sapien
cccgggagatgcagattcgattgat

SEQ ID NO: 2528076 - DNA, 25 bp, Homo sapien
agctgcctgttcaggaagcccggga

SEQ ID NO: 2528077 - DNA, 25 bp, Homo sapien
gagccctggcgcttggagcgagaaa

SEQ ID NO: 2528078 - DNA, 25 bp, Homo sapien
ctcattattaagaggctgttttgaa

SEQ ID NO: 2528079 - DNA, 25 bp, Homo sapien
ggattcatgggaaacctagttctca

SEQ ID NO: 2528080 - DNA, 25 bp, Homo sapien
tgaagcccctctgatggcaaggagc

SEQ ID NO: 2528081 - DNA, 25 bp, Homo sapien
caaagatacggcttgtcaggcaccc

SEQ ID NO: 2528082 - DNA, 25 bp, Homo sapien
aggcacccctgaaaaggtctccctg

SEQ ID NO: 2528083 - DNA, 25 bp, Homo sapien
gaggtgatccctgcatacacttgaa

SEQ ID NO: 2528084 - DNA, 25 bp, Homo sapien
caggccagagtacagctggtgttgt

SEQ ID NO: 2528085 - DNA, 25 bp, Homo sapien
cctaatccaggccactcgggaatcc

SEQ ID NO: 2528086 - DNA, 25 bp, Homo sapien
catcatccacgtttgccccttctga

SEQ ID NO: 2528087 - DNA, 25 bp, Homo sapien
cactcgggaatcctcatcatccacg

SEQ ID NO: 2528088 - DNA, 25 bp, Homo sapien
tcatcttgtcccctaatccaggcca

SEQ ID NO: 2528089 - DNA, 25 bp, Homo sapien
acaaagcctccacggcgtatcataa

SEQ ID NO: 2528090 - DNA, 25 bp, Homo sapien
gcctccacggcgtatcataaaacaa

SEQ ID NO: 2528091 - DNA, 25 bp, Homo sapien
gcctctgggaatttaacaaagcctc

SEQ ID NO: 2528092 - DNA, 25 bp, Homo sapien
ttaacaaagcctccacggcgtatca

SEQ ID NO: 2528093 - DNA, 25 bp, Homo sapien
gaaactgttgccaacacaaggtcct

SEQ ID NO: 2528094 - DNA, 25 bp, Homo sapien
cttctagagggtgttatgaactgca

SEQ ID NO: 2528095 - DNA, 25 bp, Homo sapien
ggtgttatgaactgcatctccgccc

SEQ ID NO: 2528096 - DNA, 25 bp, Homo sapien
tccgccctgtccagttggaaactgt

SEQ ID NO: 2528097 - DNA, 25 bp, Homo sapien
atggaggcagcaaagtcttcccaga

SEQ ID NO: 2528098 - DNA, 25 bp, Homo sapien
ccccgaagtcctctgttctgtcctc

SEQ ID NO: 2528099 - DNA, 25 bp, Homo sapien
cagaggagctggtacccccgaagtc

SEQ ID NO: 2528100 - DNA, 25 bp, Homo sapien
gggaatggaggcagcaaagtcttcc

SEQ ID NO: 2528101 - DNA, 25 bp, Homo sapien
acttgcagagcacggtcactctgaa

SEQ ID NO: 2528102 - DNA, 25 bp, Homo sapien
tgtccaatgcgagtaacttgcagag

SEQ ID NO: 2528103 - DNA, 25 bp, Homo sapien
ttaatccagagcttgtccaatgcga

SEQ ID NO: 2528104 - DNA, 25 bp, Homo sapien
ccagagcttgtccaatgcgagtaac

SEQ ID NO: 2528105 - DNA, 25 bp, Homo sapien
tccagcattccaaactgcagaggct

SEQ ID NO: 2528106 - DNA, 25 bp, Homo sapien
agcattccaaactgcagaggctgac

SEQ ID NO: 2528107 - DNA, 25 bp, Homo sapien
tcctccagcattccaaactgcagag

SEQ ID NO: 2528108 - DNA, 25 bp, Homo sapien
tagacgcccaggcagccctctccac

SEQ ID NO: 2528109 - DNA, 25 bp, Homo sapien
ggcaatccaggtaatgaatggcagg

SEQ ID NO: 2528110 - DNA, 25 bp, Homo sapien
ctccctgtccatatatctgtgcaac

SEQ ID NO: 2528111 - DNA, 25 bp, Homo sapien
gctgacacgccatttcctttagcag

SEQ ID NO: 2528112 - DNA, 25 bp, Homo sapien
tgtgcaacagtatctatttttgacg

SEQ ID NO: 2528113 - DNA, 25 bp, Homo sapien
gctactcctacacccttggctaaga

SEQ ID NO: 2528114 - DNA, 25 bp, Homo sapien
cttctatcggtaaaagtcatcttct

SEQ ID NO: 2528115 - DNA, 25 bp, Homo sapien
gggagagctgctactcctacaccct

SEQ ID NO: 2528116 - DNA, 25 bp, Homo sapien
cttggctaagaacagccctcttcta

SEQ ID NO: 2528117 - DNA, 25 bp, Homo sapien
ggaatgcccattgagtggtgaagga

SEQ ID NO: 2528118 - DNA, 25 bp, Homo sapien
gaaggaatgcccattgagtggtgaa

SEQ ID NO: 2528119 - DNA, 25 bp, Homo sapien
tctactatcagttaaagttgtcttc

SEQ ID NO: 2528120 - DNA, 25 bp, Homo sapien
gtctactatcagttaaagttgtctt

SEQ ID NO: 2528121 - DNA, 25 bp, Homo sapien
cgtagaccattctttgcctgcatgc

SEQ ID NO: 2528122 - DNA, 25 bp, Homo sapien
tagaccattctttgcctgcatgctt

SEQ ID NO: 2528123 - DNA, 25 bp, Homo sapien
gaccattctttgcctgcatgcttcc

SEQ ID NO: 2528124 - DNA, 25 bp, Homo sapien
tgcttccctctggattgtctgttcc

SEQ ID NO: 2528125 - DNA, 25 bp, Homo sapien
atttccggaagtcctatattccaag

SEQ ID NO: 2528126 - DNA, 25 bp, Homo sapien
aagtcctatattccaagtgtgtgcc

SEQ ID NO: 2528127 - DNA, 25 bp, Homo sapien
ccggaagtcctatattccaagtgtg

SEQ ID NO: 2528128 - DNA, 25 bp, Homo sapien
agagcaagatcaagggcttgttttt

SEQ ID NO: 2528129 - DNA, 25 bp, Homo sapien
cagttaaaataagagctgctggaat

SEQ ID NO: 2528130 - DNA, 25 bp, Homo sapien
tatctatgtcataaccagggtctta

SEQ ID NO: 2528131 - DNA, 25 bp, Homo sapien
gaataaattctctgtctcaatcctg

SEQ ID NO: 2528132 - DNA, 25 bp, Homo sapien
caggcaagaccaatatgtgtagcag

SEQ ID NO: 2528133 - DNA, 25 bp, Homo sapien
ttccaccagtcttggtccccaggca

SEQ ID NO: 2528134 - DNA, 25 bp, Homo sapien
caccagtcttggtccccaggcaccc

SEQ ID NO: 2528135 - DNA, 25 bp, Homo sapien
taacaaaggactcaggtaccttctc

SEQ ID NO: 2528136 - DNA, 25 bp, Homo sapien
ataacaaaggactcaggtaccttct

SEQ ID NO: 2528137 - DNA, 25 bp, Homo sapien
aatgtacttctatggaagccttcac

SEQ ID NO: 2528138 - DNA, 25 bp, Homo sapien
ggaagtgtcatcataaatgcgaaga

SEQ ID NO: 2528139 - DNA, 25 bp, Homo sapien
atgcgaagacccagcacggcagtgg

SEQ ID NO: 2528140 - DNA, 25 bp, Homo sapien
gataacataaggcagaggaagtgtc

SEQ ID NO: 2528141 - DNA, 25 bp, Homo sapien
caagctgagttgggccgcaggcact

SEQ ID NO: 2528142 - DNA, 25 bp, Homo sapien
aagctgagttgggccgcaggcactg

SEQ ID NO: 2528143 - DNA, 25 bp, Homo sapien
gcagtgtcaagctgagttgggccgc

SEQ ID NO: 2528144 - DNA, 25 bp, Homo sapien
cagtgtcaagctgagttgggccgca

SEQ ID NO: 2528145 - DNA, 25 bp, Homo sapien
ggagctccttgttgccaaatgcagg

SEQ ID NO: 2528146 - DNA, 25 bp, Homo sapien
ggtagtgagcacaggtcaccctcta

SEQ ID NO: 2528147 - DNA, 25 bp, Homo sapien
accctctatctctgggtgggagctc

SEQ ID NO: 2528148 - DNA, 25 bp, Homo sapien
gtcttggagttgacctgaggtttct

SEQ ID NO: 2528149 - DNA, 25 bp, Homo sapien
gcatcggatgtgaaagagacacttt

SEQ ID NO: 2528150 - DNA, 25 bp, Homo sapien
cctaggctgggttatagctctgtca

SEQ ID NO: 2528151 - DNA, 25 bp, Homo sapien
gaaacagcagtgttatagcctaggc

SEQ ID NO: 2528152 - DNA, 25 bp, Homo sapien
catatgttaaccttgatgcagggca

SEQ ID NO: 2528153 - DNA, 25 bp, Homo sapien
tgaatgcaacatgatctcacgctca

SEQ ID NO: 2528154 - DNA, 25 bp, Homo sapien
tatttccatagctacatgagagagc

SEQ ID NO: 2528155 - DNA, 25 bp, Homo sapien
cagttccaattcagcgacacttggc

SEQ ID NO: 2528156 - DNA, 25 bp, Homo sapien
cttggagggttaacagaaattgctg

SEQ ID NO: 2528157 - DNA, 25 bp, Homo sapien
tggctttgggcatggctaccaatgc

SEQ ID NO: 2528158 - DNA, 25 bp, Homo sapien
ctttgggcatggctaccaatgccca

SEQ ID NO: 2528159 - DNA, 25 bp, Homo sapien
ctggctttgggcatggctaccaatg

SEQ ID NO: 2528160 - DNA, 25 bp, Homo sapien
ggctttgggcatggctaccaatgcc

SEQ ID NO: 2528161 - DNA, 25 bp, Homo sapien
accgattccttaacataaaagcact

SEQ ID NO: 2528162 - DNA, 25 bp, Homo sapien
taccgattccttaacataaaagcac

SEQ ID NO: 2528163 - DNA, 25 bp, Homo sapien
ccgattccttaacataaaagcactt

SEQ ID NO: 2528164 - DNA, 25 bp, Homo sapien
tataccgattccttaacataaaagc

SEQ ID NO: 2528165 - DNA, 25 bp, Homo sapien
gatggtccccgctgaaggataaact

SEQ ID NO: 2528166 - DNA, 25 bp, Homo sapien
agcctcagatggtccccgctgaagg

SEQ ID NO: 2528167 - DNA, 25 bp, Homo sapien
tgcagacctctgcacaaggacagtt

SEQ ID NO: 2528168 - DNA, 25 bp, Homo sapien
agctccacgttgcagcctcagatgg

SEQ ID NO: 2528169 - DNA, 25 bp, Homo sapien
agttccttggtgcatcctgtgctgc

SEQ ID NO: 2528170 - DNA, 25 bp, Homo sapien
agctctgccggcaaaagttccttgg

SEQ ID NO: 2528171 - DNA, 25 bp, Homo sapien
gctccctgggccgtgttgtctctct

SEQ ID NO: 2528172 - DNA, 25 bp, Homo sapien
tgggccgtgttgtctctctaatcct

SEQ ID NO: 2528173 - DNA, 25 bp, Homo sapien
catgaaacaataagctttcatccac

SEQ ID NO: 2528174 - DNA, 25 bp, Homo sapien
taggtgtatatacagtttagtagca

SEQ ID NO: 2528175 - DNA, 25 bp, Homo sapien
ccttctatctctacgagtttgatga

SEQ ID NO: 2528176 - DNA, 25 bp, Homo sapien
gatgactctaggtcccacctataag

SEQ ID NO: 2528177 - DNA, 25 bp, Homo sapien
gagcagacatcccagcacttccgct

SEQ ID NO: 2528178 - DNA, 25 bp, Homo sapien
ggaacccgacaagctgtctccctct

SEQ ID NO: 2528179 - DNA, 25 bp, Homo sapien
agcacttccgctggaacccgacaag

SEQ ID NO: 2528180 - DNA, 25 bp, Homo sapien
aggacactcagccagagagtcactg

SEQ ID NO: 2528181 - DNA, 25 bp, Homo sapien
ctcttgggtctatgggtttagtaat

SEQ ID NO: 2528182 - DNA, 25 bp, Homo sapien
tctcttgggtctatgggtttagtaa

SEQ ID NO: 2528183 - DNA, 25 bp, Homo sapien
tagtaatttccactgggtcacactg

SEQ ID NO: 2528184 - DNA, 25 bp, Homo sapien
tgtctcttgggtctatgggtttagt

SEQ ID NO: 2528185 - DNA, 25 bp, Homo sapien
ttcattccctcaagacatccaagct

SEQ ID NO: 2528186 - DNA, 25 bp, Homo sapien
cattccctcaagacatccaagctcc

SEQ ID NO: 2528187 - DNA, 25 bp, Homo sapien
tcattccctcaagacatccaagctc

SEQ ID NO: 2528188 - DNA, 25 bp, Homo sapien
tcagagccgcacaggctcctctaaa

SEQ ID NO: 2528189 - DNA, 25 bp, Homo sapien
tctgtgacccagttgtccttgctgt

SEQ ID NO: 2528190 - DNA, 25 bp, Homo sapien
ggctcctctaaattggccactgggc

SEQ ID NO: 2528191 - DNA, 25 bp, Homo sapien
tcagggaggctccacgttgatctga

SEQ ID NO: 2528192 - DNA, 25 bp, Homo sapien
tcagggccttctcccagtctagcca

SEQ ID NO: 2528193 - DNA, 25 bp, Homo sapien
ccttctcccagtctagccaaagcag

SEQ ID NO: 2528194 - DNA, 25 bp, Homo sapien
gggccttctcccagtctagccaaag

SEQ ID NO: 2528195 - DNA, 25 bp, Homo sapien
gcagggagggtttagccagggccac

SEQ ID NO: 2528196 - DNA, 25 bp, Homo sapien
cccagagagatagaaaggatacagt

SEQ ID NO: 2528197 - DNA, 25 bp, Homo sapien
ctaacgttctttgccatgttataga

SEQ ID NO: 2528198 - DNA, 25 bp, Homo sapien
ctttgccatgttatagagaggaggg

SEQ ID NO: 2528199 - DNA, 25 bp, Homo sapien
gagggaacccactagtggatccagg

SEQ ID NO: 2528200 - DNA, 25 bp, Homo sapien
ttactcagcacacctaatcataaaa

SEQ ID NO: 2528201 - DNA, 25 bp, Homo sapien
tactcagcacacctaatcataaaac

SEQ ID NO: 2528202 - DNA, 25 bp, Homo sapien
cagtttagtgaatctggcgtgcaaa

SEQ ID NO: 2528203 - DNA, 25 bp, Homo sapien
tgagcaacaacataggattccagtt

SEQ ID NO: 2528204 - DNA, 25 bp, Homo sapien
gttaagattggagaattgcagttcc

SEQ ID NO: 2528205 - DNA, 25 bp, Homo sapien
ctgaattaaccaattgtcgaacaat

SEQ ID NO: 2528206 - DNA, 25 bp, Homo sapien
tggagggccctgacattgcaatgcc

SEQ ID NO: 2528207 - DNA, 25 bp, Homo sapien
gcttttgtcgtctccctggagtcag

SEQ ID NO: 2528208 - DNA, 25 bp, Homo sapien
gacaacaaggcccttattggagggc

SEQ ID NO: 2528209 - DNA, 25 bp, Homo sapien
tcccatggactgatgtcagttccag

SEQ ID NO: 2528210 - DNA, 25 bp, Homo sapien
cccttctgagctcgtaaaatgaatc

SEQ ID NO: 2528211 - DNA, 25 bp, Homo sapien
ggacatgggttgtcccttctgagct

SEQ ID NO: 2528212 - DNA, 25 bp, Homo sapien
aaagtgggtcctggcatttctgacg

SEQ ID NO: 2528213 - DNA, 25 bp, Homo sapien
tgtgggcgccgatcctgccattcaa

SEQ ID NO: 2528214 - DNA, 25 bp, Homo sapien
gaaatattctcacattatgtgcatt

SEQ ID NO: 2528215 - DNA, 25 bp, Homo sapien
ttgagaaatattctcacattatgtg

SEQ ID NO: 2528216 - DNA, 25 bp, Homo sapien
gagaaatattctcacattatgtgca

SEQ ID NO: 2528217 - DNA, 25 bp, Homo sapien
ctttgagaaatattctcacattatg

SEQ ID NO: 2528218 - DNA, 25 bp, Homo sapien
tagaattagaggaccatggagtcat

SEQ ID NO: 2528219 - DNA, 25 bp, Homo sapien
tggccagagatgtagggagataatt

SEQ ID NO: 2528220 - DNA, 25 bp, Homo sapien
gataattagaattagaggaccatgg

SEQ ID NO: 2528221 - DNA, 25 bp, Homo sapien
ttacctgtgcattgggtaggaagat

SEQ ID NO: 2528222 - DNA, 25 bp, Homo sapien
cacgatgattaatacggagattgtc

SEQ ID NO: 2528223 - DNA, 25 bp, Homo sapien
tggggcttcacgatgattaatacgg

SEQ ID NO: 2528224 - DNA, 25 bp, Homo sapien
gcttcacgatgattaatacggagat

SEQ ID NO: 2528225 - DNA, 25 bp, Homo sapien
ttttcagcttggatttggcttctgt

SEQ ID NO: 2528226 - DNA, 25 bp, Homo sapien
gtctggaactgatctgtgaacaatc

SEQ ID NO: 2528227 - DNA, 25 bp, Homo sapien
aaggagttcagtctggaactgatct

SEQ ID NO: 2528228 - DNA, 25 bp, Homo sapien
aggagttcagtctggaactgatctg

SEQ ID NO: 2528229 - DNA, 25 bp, Homo sapien
cattgaaagaggtccaagcctcccc

SEQ ID NO: 2528230 - DNA, 25 bp, Homo sapien
ctgcattgaaagaggtccaagcctc

SEQ ID NO: 2528231 - DNA, 25 bp, Homo sapien
aggtccaagcctcccccttgttcat

SEQ ID NO: 2528232 - DNA, 25 bp, Homo sapien
gaggtccaagcctcccccttgttca

SEQ ID NO: 2528233 - DNA, 25 bp, Homo sapien
tgaacccagaaagagcgaagatctc

SEQ ID NO: 2528234 - DNA, 25 bp, Homo sapien
tgccgggtaaccaggcagcgctttt

SEQ ID NO: 2528235 - DNA, 25 bp, Homo sapien
gaagatctctctgcctgcggcgtct

SEQ ID NO: 2528236 - DNA, 25 bp, Homo sapien
aaaatgtcataggttcctggaagct

SEQ ID NO: 2528237 - DNA, 25 bp, Homo sapien
tcttggctggttgccgtgaggtcac

SEQ ID NO: 2528238 - DNA, 25 bp, Homo sapien
caagcctctcgtagcggcctgaagg

SEQ ID NO: 2528239 - DNA, 25 bp, Homo sapien
tgtcgtgaagcgttgcaagcctctc

SEQ ID NO: 2528240 - DNA, 25 bp, Homo sapien
ggtcacattggaaaccagcgaggca

SEQ ID NO: 2528241 - DNA, 25 bp, Homo sapien
aagaaagagtgggtcccagaacagc

SEQ ID NO: 2528242 - DNA, 25 bp, Homo sapien
aagagtgggtcccagaacagcgcag

SEQ ID NO: 2528243 - DNA, 25 bp, Homo sapien
gagtgggtcccagaacagcgcagat

SEQ ID NO: 2528244 - DNA, 25 bp, Homo sapien
ctgtccccacaaagaaagagtgggt

SEQ ID NO: 2528245 - DNA, 25 bp, Homo sapien
tctacaagtcacgaaggtgctgggc

SEQ ID NO: 2528246 - DNA, 25 bp, Homo sapien
gtagctgaccctcgtagggactgct

SEQ ID NO: 2528247 - DNA, 25 bp, Homo sapien
cttaaatctacaagtcacgaaggtg

SEQ ID NO: 2528248 - DNA, 25 bp, Homo sapien
gctgaccctcgtagggactgctgct

SEQ ID NO: 2528249 - DNA, 25 bp, Homo sapien
tgcgaccggcgccaggtgagtaata

SEQ ID NO: 2528250 - DNA, 25 bp, Homo sapien
ccatcagcgctacaggagttactca

SEQ ID NO: 2528251 - DNA, 25 bp, Homo sapien
tttttccccaattcgggagagcgca

SEQ ID NO: 2528252 - DNA, 25 bp, Homo sapien
accgcgcgttgtcgctggatccaga

SEQ ID NO: 2528253 - DNA, 25 bp, Homo sapien
tcaaaacaccgatactgacaacagt

SEQ ID NO: 2528254 - DNA, 25 bp, Homo sapien
ttaaaaagtcaaaccgcagcctctg

SEQ ID NO: 2528255 - DNA, 25 bp, Homo sapien
gaatatatctctataggcaggcacc

SEQ ID NO: 2528256 - DNA, 25 bp, Homo sapien
cgttttgaggaaatcagagactagc

SEQ ID NO: 2528257 - DNA, 25 bp, Homo sapien
tatatccgacaaagtgcacggcagc

SEQ ID NO: 2528258 - DNA, 25 bp, Homo sapien
tataaaccacgccaagaagacaggg

SEQ ID NO: 2528259 - DNA, 25 bp, Homo sapien
actgtggacatgcaagaagagacct

SEQ ID NO: 2528260 - DNA, 25 bp, Homo sapien
tagcacattctctcgagggagtccg

SEQ ID NO: 2528261 - DNA, 25 bp, Homo sapien
gcttggcttccaagccgctaaccaa

SEQ ID NO: 2528262 - DNA, 25 bp, Homo sapien
ggcttggcttccaagccgctaacca

SEQ ID NO: 2528263 - DNA, 25 bp, Homo sapien
tacggggacgcgctgcgggacctgt

SEQ ID NO: 2528264 - DNA, 25 bp, Homo sapien
tgcgggacctgtccggcttggcttc

SEQ ID NO: 2528265 - DNA, 25 bp, Homo sapien
tttgggcgacaaggacatggagctg

SEQ ID NO: 2528266 - DNA, 25 bp, Homo sapien
tttctccgcgcagagtttgggcgac

SEQ ID NO: 2528267 - DNA, 25 bp, Homo sapien
gctgttgagttcagagcccgagtcc

SEQ ID NO: 2528268 - DNA, 25 bp, Homo sapien
gatgctctgcagttcgctggtggcc

SEQ ID NO: 2528269 - DNA, 25 bp, Homo sapien
agggcggcgactttgccgtccaggg

SEQ ID NO: 2528270 - DNA, 25 bp, Homo sapien
ggcggcgactttgccgtccaggggc

SEQ ID NO: 2528271 - DNA, 25 bp, Homo sapien
cagggcggcgactttgccgtccagg

SEQ ID NO: 2528272 - DNA, 25 bp, Homo sapien
gcggcgactttgccgtccaggggcc

SEQ ID NO: 2528273 - DNA, 25 bp, Homo sapien
gccgcgggcgcatggtgttcagatt

SEQ ID NO: 2528274 - DNA, 25 bp, Homo sapien
cgcatggtgttcagattgaggaagg

SEQ ID NO: 2528275 - DNA, 25 bp, Homo sapien
cgggaccggcaccgggatggagtag

SEQ ID NO: 2528276 - DNA, 25 bp, Homo sapien
tggtgagcagactgctgccgtccgg

SEQ ID NO: 2528277 - DNA, 25 bp, Homo sapien
ccgctgcggccatgtacgtgtaggg

SEQ ID NO: 2528278 - DNA, 25 bp, Homo sapien
cgccgctgcggccatgtacgtgtag

SEQ ID NO: 2528279 - DNA, 25 bp, Homo sapien
tgcggccatgtacgtgtaggggtaa

SEQ ID NO: 2528280 - DNA, 25 bp, Homo sapien
cggccatgtacgtgtaggggtaagg

SEQ ID NO: 2528281 - DNA, 25 bp, Homo sapien
ccgggtgggaggagcttatctcatc

SEQ ID NO: 2528282 - DNA, 25 bp, Homo sapien
ttgggcaagccatgaatccctggta

SEQ ID NO: 2528283 - DNA, 25 bp, Homo sapien
agctgtgtcaccctaggccaagaga

SEQ ID NO: 2528284 - DNA, 25 bp, Homo sapien
gagaagtcaacactcagaaatctct

SEQ ID NO: 2528285 - DNA, 25 bp, Homo sapien
tcaggagtgcactaagctgggaatt

SEQ ID NO: 2528286 - DNA, 25 bp, Homo sapien
ttgagaaatgccagaagccaagcct

SEQ ID NO: 2528287 - DNA, 25 bp, Homo sapien
tctgcatcatgccttgaggtgccct

SEQ ID NO: 2528288 - DNA, 25 bp, Homo sapien
gcatttaagatgcaggcaccctggc

SEQ ID NO: 2528289 - DNA, 25 bp, Homo sapien
ttgaagaactgttggcccgccaggc

SEQ ID NO: 2528290 - DNA, 25 bp, Homo sapien
gccatggccgtggaatccaggcccg

SEQ ID NO: 2528291 - DNA, 25 bp, Homo sapien
tgccagcggccgccatgctggagaa

SEQ ID NO: 2528292 - DNA, 25 bp, Homo sapien
aggccccagaaaccgtggccaggag

SEQ ID NO: 2528293 - DNA, 25 bp, Homo sapien
tgagtcgggcgacgctttgtccagc

SEQ ID NO: 2528294 - DNA, 25 bp, Homo sapien
tccgtctgcaccgtgagcggcgcga

SEQ ID NO: 2528295 - DNA, 25 bp, Homo sapien
ggctgcccttgtcacggcagggctc

SEQ ID NO: 2528296 - DNA, 25 bp, Homo sapien
agcgaaaaggtgagccttgaccgcg

SEQ ID NO: 2528297 - DNA, 25 bp, Homo sapien
tccagttcccaagttggaatcccag

SEQ ID NO: 2528298 - DNA, 25 bp, Homo sapien
ctcgtggcttagtggctgtgtaatc

SEQ ID NO: 2528299 - DNA, 25 bp, Homo sapien
tccagtatgagccaacggaactcca

SEQ ID NO: 2528300 - DNA, 25 bp, Homo sapien
aaaccaaggcagaagggcgttatct

SEQ ID NO: 2528301 - DNA, 25 bp, Homo sapien
tgataatggcagaacggacacctgt

SEQ ID NO: 2528302 - DNA, 25 bp, Homo sapien
tcagttgaaccgtttgtatttgccc

SEQ ID NO: 2528303 - DNA, 25 bp, Homo sapien
caaatttgtgaattactctggaagg

SEQ ID NO: 2528304 - DNA, 25 bp, Homo sapien
gtttggcaagaaccctgacatctga

SEQ ID NO: 2528305 - DNA, 25 bp, Homo sapien
tggaggactcatcagaggtcccatt

SEQ ID NO: 2528306 - DNA, 25 bp, Homo sapien
agaagcctgggcgaagcagttgaaa

SEQ ID NO: 2528307 - DNA, 25 bp, Homo sapien
ttgaaagctgcttgttcactggagg

SEQ ID NO: 2528308 - DNA, 25 bp, Homo sapien
tcgatgtccctacagtggaggcggc

SEQ ID NO: 2528309 - DNA, 25 bp, Homo sapien
tttttctcttcggccatttccagtg

SEQ ID NO: 2528310 - DNA, 25 bp, Homo sapien
tttctcttcggccatttccagtgtc

SEQ ID NO: 2528311 - DNA, 25 bp, Homo sapien
tccagtgtcccggaaaccttttgca

SEQ ID NO: 2528312 - DNA, 25 bp, Homo sapien
cttttttctcttcggccatttccag

SEQ ID NO: 2528313 - DNA, 25 bp, Homo sapien
ccttggtgggaagaagaagttatat

SEQ ID NO: 2528314 - DNA, 25 bp, Homo sapien
gggacccttggttggattcatgttc

SEQ ID NO: 2528315 - DNA, 25 bp, Homo sapien
caatattgacagttacagtactgaa

SEQ ID NO: 2528316 - DNA, 25 bp, Homo sapien
ttcatttatatgctctgccatggcc

SEQ ID NO: 2528317 - DNA, 25 bp, Homo sapien
ctttgaagtccaggattgcagagca

SEQ ID NO: 2528318 - DNA, 25 bp, Homo sapien
tgctaacagccaatctgggaactgg

SEQ ID NO: 2528319 - DNA, 25 bp, Homo sapien
aagaaatttagctggaacatcccca

SEQ ID NO: 2528320 - DNA, 25 bp, Homo sapien
tggtgaatcagcagtaagggtcact

SEQ ID NO: 2528321 - DNA, 25 bp, Homo sapien
tcacagcgatgaattcagtttcggg

SEQ ID NO: 2528322 - DNA, 25 bp, Homo sapien
gggaacaagtatgtccgaaatgtac

SEQ ID NO: 2528323 - DNA, 25 bp, Homo sapien
tactataagggagtttcaagatgtc

SEQ ID NO: 2528324 - DNA, 25 bp, Homo sapien
tcattctggtatgcagtcacagcga

SEQ ID NO: 2528325 - DNA, 25 bp, Homo sapien
ggatcattcataccttgaaccctag

SEQ ID NO: 2528326 - DNA, 25 bp, Homo sapien
gggtacgtttcgctccacagatgtt

SEQ ID NO: 2528327 - DNA, 25 bp, Homo sapien
aggacccctgccaggctgaaatctt

SEQ ID NO: 2528328 - DNA, 25 bp, Homo sapien
caaggatttagcagaacaaacggga

SEQ ID NO: 2528329 - DNA, 25 bp, Homo sapien
taattcccctgccacgtagcgtgat

SEQ ID NO: 2528330 - DNA, 25 bp, Homo sapien
gcgtgatcacttgggaaggccaaag

SEQ ID NO: 2528331 - DNA, 25 bp, Homo sapien
ccctgccacgtagcgtgatcacttg

SEQ ID NO: 2528332 - DNA, 25 bp, Homo sapien
gccacgtagcgtgatcacttgggaa

SEQ ID NO: 2528333 - DNA, 25 bp, Homo sapien
gaacgccaggccttccattatttgg

SEQ ID NO: 2528334 - DNA, 25 bp, Homo sapien
tcatttagggtaagccggactccca

SEQ ID NO: 2528335 - DNA, 25 bp, Homo sapien
catttaaccaacagagtcaaggctc

SEQ ID NO: 2528336 - DNA, 25 bp, Homo sapien
gaattgctatagaacacaagccggt

SEQ ID NO: 2528337 - DNA, 25 bp, Homo sapien
gctgtccgggtgaatgtacatcctc

SEQ ID NO: 2528338 - DNA, 25 bp, Homo sapien
catcagcagctataatgtccatcaa

SEQ ID NO: 2528339 - DNA, 25 bp, Homo sapien
ggcttttttatccagcccagaacat

SEQ ID NO: 2528340 - DNA, 25 bp, Homo sapien
acatccactgttccccagtagcggg

SEQ ID NO: 2528341 - DNA, 25 bp, Homo sapien
tgataaccgatctgcccgtggagct

SEQ ID NO: 2528342 - DNA, 25 bp, Homo sapien
gctgcagaatagcaatcccgctgtg

SEQ ID NO: 2528343 - DNA, 25 bp, Homo sapien
taaagcgcggtcagttaagactaga

SEQ ID NO: 2528344 - DNA, 25 bp, Homo sapien
gaaatgaacgtcaagttgcacccct

SEQ ID NO: 2528345 - DNA, 25 bp, Homo sapien
catgcagatgcccaggtaagctgaa

SEQ ID NO: 2528346 - DNA, 25 bp, Homo sapien
cacgtgaagtagtgtgggcaaacaa

SEQ ID NO: 2528347 - DNA, 25 bp, Homo sapien
tccaggcaggttttggtcaggcaag

SEQ ID NO: 2528348 - DNA, 25 bp, Homo sapien
gcctgctgaactcgcccttgggtta

SEQ ID NO: 2528349 - DNA, 25 bp, Homo sapien
taatgaccatctcggtgccccgctt

SEQ ID NO: 2528350 - DNA, 25 bp, Homo sapien
tgtgaaactgatcccaaagttcttt

SEQ ID NO: 2528351 - DNA, 25 bp, Homo sapien
cttcccgacttggtaatgaccatct

SEQ ID NO: 2528352 - DNA, 25 bp, Homo sapien
tcggtgccccgcttgtgaaactgat

SEQ ID NO: 2528353 - DNA, 25 bp, Homo sapien
ccccagggaggagaacgggatgccg

SEQ ID NO: 2528354 - DNA, 25 bp, Homo sapien
cagggaggagaacgggatgccggtc

SEQ ID NO: 2528355 - DNA, 25 bp, Homo sapien
ggaggagaacgggatgccggtctcg

SEQ ID NO: 2528356 - DNA, 25 bp, Homo sapien
ggagaacgggatgccggtctcggcc

SEQ ID NO: 2528357 - DNA, 25 bp, Homo sapien
atccatgatcggcttggccagggcg

SEQ ID NO: 2528358 - DNA, 25 bp, Homo sapien
gaggtaggaacggatggtaggccat

SEQ ID NO: 2528359 - DNA, 25 bp, Homo sapien
tggtgacccagcaccgcgctcatgg

SEQ ID NO: 2528360 - DNA, 25 bp, Homo sapien
ctcatggcgaagtccggcgcccggt

SEQ ID NO: 2528361 - DNA, 25 bp, Homo sapien
caggaatgaccggatctctcatgga

SEQ ID NO: 2528362 - DNA, 25 bp, Homo sapien
tgtcccaggaatgaccggatctctc

SEQ ID NO: 2528363 - DNA, 25 bp, Homo sapien
gcttgtcccaggaatgaccggatct

SEQ ID NO: 2528364 - DNA, 25 bp, Homo sapien
tgaccggatctctcatggagaggct

SEQ ID NO: 2528365 - DNA, 25 bp, Homo sapien
tctaggtggcttatcgagagatcgc

SEQ ID NO: 2528366 - DNA, 25 bp, Homo sapien
gcagctgtgctagacccggctttaa

SEQ ID NO: 2528367 - DNA, 25 bp, Homo sapien
tgccgctgagctcgaaatagacact

SEQ ID NO: 2528368 - DNA, 25 bp, Homo sapien
aaatcagcaaacatagtcgcgcggg

SEQ ID NO: 2528369 - DNA, 25 bp, Homo sapien
tggtggccactgcattcgggttaaa

SEQ ID NO: 2528370 - DNA, 25 bp, Homo sapien
gggtgataaacccactctggcgccg

SEQ ID NO: 2528371 - DNA, 25 bp, Homo sapien
tcaaaagcgggaaggtgcgaactcc

SEQ ID NO: 2528372 - DNA, 25 bp, Homo sapien
tgcgaacaaacaaaagcggcctggt

SEQ ID NO: 2528373 - DNA, 25 bp, Homo sapien
cacactgtcaggaaggttgacaggc

SEQ ID NO: 2528374 - DNA, 25 bp, Homo sapien
tgctgaactaactctcccctcgtag

SEQ ID NO: 2528375 - DNA, 25 bp, Homo sapien
aaatctgctgaactaactctcccct

SEQ ID NO: 2528376 - DNA, 25 bp, Homo sapien
tgacaggccaaagaaagatcagctc

SEQ ID NO: 2528377 - DNA, 25 bp, Homo sapien
gggaggtcaatacaatcgatgcgga

SEQ ID NO: 2528378 - DNA, 25 bp, Homo sapien
tgcggacctcgacgaaacggaagaa

SEQ ID NO: 2528379 - DNA, 25 bp, Homo sapien
gtgagaagctccttttgccgacgcc

SEQ ID NO: 2528380 - DNA, 25 bp, Homo sapien
cctgcgtgctgggttccactcaaaa

SEQ ID NO: 2528381 - DNA, 25 bp, Homo sapien
tatcgacaacacttacagcctccag

SEQ ID NO: 2528382 - DNA, 25 bp, Homo sapien
ccagaaatgacccttggtgccgact

SEQ ID NO: 2528383 - DNA, 25 bp, Homo sapien
cgacttgtctggaagccatcagggt

SEQ ID NO: 2528384 - DNA, 25 bp, Homo sapien
agctgctatcgacaacacttacagc

SEQ ID NO: 2528385 - DNA, 25 bp, Homo sapien
gctggttactcttaaggtggatgtt

SEQ ID NO: 2528386 - DNA, 25 bp, Homo sapien
tcatatctgaacctatctctcaggt

SEQ ID NO: 2528387 - DNA, 25 bp, Homo sapien
gaagccagagactgtcaggaatgtt

SEQ ID NO: 2528388 - DNA, 25 bp, Homo sapien
tttcccttgactgagggaagccaga

SEQ ID NO: 2528389 - DNA, 25 bp, Homo sapien
aggcccaagaccctcatctgagtgg

SEQ ID NO: 2528390 - DNA, 25 bp, Homo sapien
gctgcatgcaggactcaatggagtt

SEQ ID NO: 2528391 - DNA, 25 bp, Homo sapien
gagcgtggccccagagctatctgga

SEQ ID NO: 2528392 - DNA, 25 bp, Homo sapien
ggtgtaaaatgggagcgccacgtct

SEQ ID NO: 2528393 - DNA, 25 bp, Homo sapien
tggagagaggttctggatccttcag

SEQ ID NO: 2528394 - DNA, 25 bp, Homo sapien
gggtctctccatttgcccaccaagg

SEQ ID NO: 2528395 - DNA, 25 bp, Homo sapien
gtggaatcctccagaatccgaggcc

SEQ ID NO: 2528396 - DNA, 25 bp, Homo sapien
atttgcccaccaaggaccggcaggc

SEQ ID NO: 2528397 - DNA, 25 bp, Homo sapien
gactcagcggtttctgtcccttggg

SEQ ID NO: 2528398 - DNA, 25 bp, Homo sapien
cattaccagcggagagagctgagtc

SEQ ID NO: 2528399 - DNA, 25 bp, Homo sapien
tcttctacgaaggtgattccgccat

SEQ ID NO: 2528400 - DNA, 25 bp, Homo sapien
ttccatctgtctgggtacaggcacg

SEQ ID NO: 2528401 - DNA, 25 bp, Homo sapien
ccgtgaggttaatgcccaggctttt

SEQ ID NO: 2528402 - DNA, 25 bp, Homo sapien
gattcgggagctggcgcggttgatt

SEQ ID NO: 2528403 - DNA, 25 bp, Homo sapien
aatgatccggcgaataaaacgggtg

SEQ ID NO: 2528404 - DNA, 25 bp, Homo sapien
ttctctaaagcgtccgggaatgatc

SEQ ID NO: 2528405 - DNA, 25 bp, Homo sapien
caccgcgtgagcttcatcgatctca

SEQ ID NO: 2528406 - DNA, 25 bp, Homo sapien
cggttctggtggacgcttccccgtg

SEQ ID NO: 2528407 - DNA, 25 bp, Homo sapien
agccgaggtctgcagagcgcaccgc

SEQ ID NO: 2528408 - DNA, 25 bp, Homo sapien
cctaggggtgcgctgggctttccca

SEQ ID NO: 2528409 - DNA, 25 bp, Homo sapien
ctttgggcagttagctggagcacca

SEQ ID NO: 2528410 - DNA, 25 bp, Homo sapien
cttggctttgggcagttagctggag

SEQ ID NO: 2528411 - DNA, 25 bp, Homo sapien
tctccggggtggatagccttggctt

SEQ ID NO: 2528412 - DNA, 25 bp, Homo sapien
gcaccagccggcaagctgagggctg

SEQ ID NO: 2528413 - DNA, 25 bp, Homo sapien
ctcctcttagtccaacggcaaaacg

SEQ ID NO: 2528414 - DNA, 25 bp, Homo sapien
caatctcctcttagtccaacggcaa

SEQ ID NO: 2528415 - DNA, 25 bp, Homo sapien
tagtccaacggcaaaacgggcagtg

SEQ ID NO: 2528416 - DNA, 25 bp, Homo sapien
tccaacggcaaaacgggcagtggag

SEQ ID NO: 2528417 - DNA, 25 bp, Homo sapien
gaagttctatgaaatcgaggctccc

SEQ ID NO: 2528418 - DNA, 25 bp, Homo sapien
aagggcctcttgatcccggcccagg

SEQ ID NO: 2528419 - DNA, 25 bp, Homo sapien
ggttcactgtatctttgaagaagca

SEQ ID NO: 2528420 - DNA, 25 bp, Homo sapien
cccagggataggctacatgtgcttc

SEQ ID NO: 2528421 - DNA, 25 bp, Homo sapien
ctgtctgtggctaggcagggcctca

SEQ ID NO: 2528422 - DNA, 25 bp, Homo sapien
taggacctccccaagatacaagcat

SEQ ID NO: 2528423 - DNA, 25 bp, Homo sapien
cagagtccatgtccagcggtaggga

SEQ ID NO: 2528424 - DNA, 25 bp, Homo sapien
aattttcatcttgccaggtctggag

SEQ ID NO: 2528425 - DNA, 25 bp, Homo sapien
tccaaatagaggactggccccccac

SEQ ID NO: 2528426 - DNA, 25 bp, Homo sapien
ttccaaatagaggactggcccccca

SEQ ID NO: 2528427 - DNA, 25 bp, Homo sapien
tacttccaaatagaggactggcccc

SEQ ID NO: 2528428 - DNA, 25 bp, Homo sapien
ggtcttgcctggagacatggtggtc

SEQ ID NO: 2528429 - DNA, 25 bp, Homo sapien
cacaggtgacattaatcacgtctgc

SEQ ID NO: 2528430 - DNA, 25 bp, Homo sapien
acatggtggtcacaggtgacattaa

SEQ ID NO: 2528431 - DNA, 25 bp, Homo sapien
taatcacgtctgcatcttccgaggg

SEQ ID NO: 2528432 - DNA, 25 bp, Homo sapien
tgaaccatgtttccctggtggctgc

SEQ ID NO: 2528433 - DNA, 25 bp, Homo sapien
catgaaccatgtttccctggtggct

SEQ ID NO: 2528434 - DNA, 25 bp, Homo sapien
aattgttctgtggaatgactgggct

SEQ ID NO: 2528435 - DNA, 25 bp, Homo sapien
tgctaattgttctgtggaatgactg

SEQ ID NO: 2528436 - DNA, 25 bp, Homo sapien
acagcagcaactgggcctcgacact

SEQ ID NO: 2528437 - DNA, 25 bp, Homo sapien
cagcaactgggcctcgacactccct

SEQ ID NO: 2528438 - DNA, 25 bp, Homo sapien
cagacagcagcaactgggcctcgac

SEQ ID NO: 2528439 - DNA, 25 bp, Homo sapien
agcaactgggcctcgacactccctc

SEQ ID NO: 2528440 - DNA, 25 bp, Homo sapien
tttccatggttgtccctctgtgggc

SEQ ID NO: 2528441 - DNA, 25 bp, Homo sapien
agcccctcgagtttcgttttccatg

SEQ ID NO: 2528442 - DNA, 25 bp, Homo sapien
tcgagtttcgttttccatggttgtc

SEQ ID NO: 2528443 - DNA, 25 bp, Homo sapien
tctgtgggccgactttttcaagacc

SEQ ID NO: 2528444 - DNA, 25 bp, Homo sapien
gatttgcagggagatctcttcctcg

SEQ ID NO: 2528445 - DNA, 25 bp, Homo sapien
agacacagatacaccagttcccgct

SEQ ID NO: 2528446 - DNA, 25 bp, Homo sapien
gatccagagccctaaatcactggag

SEQ ID NO: 2528447 - DNA, 25 bp, Homo sapien
cgcagtagagtctttgggttgttga

SEQ ID NO: 2528448 - DNA, 25 bp, Homo sapien
gccacctctgtctgctaaatcgatt

SEQ ID NO: 2528449 - DNA, 25 bp, Homo sapien
ggcattatgtcatcctgtcatcctt

SEQ ID NO: 2528450 - DNA, 25 bp, Homo sapien
taaatcgattgtaaattttcctggc

SEQ ID NO: 2528451 - DNA, 25 bp, Homo sapien
tggagagcccccagactgacagcca

SEQ ID NO: 2528452 - DNA, 25 bp, Homo sapien
caggaacccgtgatggataaggctc

SEQ ID NO: 2528453 - DNA, 25 bp, Homo sapien
tcacagcggcttgcagtaaacttct

SEQ ID NO: 2528454 - DNA, 25 bp, Homo sapien
caagggtgttactggagacctcggc

SEQ ID NO: 2528455 - DNA, 25 bp, Homo sapien
tccaggcgcatgacaaagcagaaac

SEQ ID NO: 2528456 - DNA, 25 bp, Homo sapien
catggtttcctgagcatgtgcgtca

SEQ ID NO: 2528457 - DNA, 25 bp, Homo sapien
cagcccttggagatgtccagcgtaa

SEQ ID NO: 2528458 - DNA, 25 bp, Homo sapien
ctacgataaccttgagagatgactc

SEQ ID NO: 2528459 - DNA, 25 bp, Homo sapien
tccagcgtaagtcaaagcctttgtt

SEQ ID NO: 2528460 - DNA, 25 bp, Homo sapien
cctccacccggatgatcctgaggcc

SEQ ID NO: 2528461 - DNA, 25 bp, Homo sapien
tcgtcctccacccggatgatcctga

SEQ ID NO: 2528462 - DNA, 25 bp, Homo sapien
tcctccacccggatgatcctgaggc

SEQ ID NO: 2528463 - DNA, 25 bp, Homo sapien
gtcctccacccggatgatcctgagg

SEQ ID NO: 2528464 - DNA, 25 bp, Homo sapien
tgcaaaattgtcagggctggcttcc

SEQ ID NO: 2528465 - DNA, 25 bp, Homo sapien
gaacaggtctagcagaatcagctcc

SEQ ID NO: 2528466 - DNA, 25 bp, Homo sapien
tgctccctctggtttgcagttcccc

SEQ ID NO: 2528467 - DNA, 25 bp, Homo sapien
tgagcttgcagcccatcctgggcag

SEQ ID NO: 2528468 - DNA, 25 bp, Homo sapien
gtttgcattgtctctgcctctgggt

SEQ ID NO: 2528469 - DNA, 25 bp, Homo sapien
ctgagcagtttgcattgtctctgcc

SEQ ID NO: 2528470 - DNA, 25 bp, Homo sapien
tgcattgtctctgcctctgggtacc

SEQ ID NO: 2528471 - DNA, 25 bp, Homo sapien
gctgagcagtttgcattgtctctgc

SEQ ID NO: 2528472 - DNA, 25 bp, Homo sapien
caaaccaatattaaaaccagtggct

SEQ ID NO: 2528473 - DNA, 25 bp, Homo sapien
tcagctggtctcatttctcgaagtc

SEQ ID NO: 2528474 - DNA, 25 bp, Homo sapien
ggcagttctttcagtaacaccaaca

SEQ ID NO: 2528475 - DNA, 25 bp, Homo sapien
cagcaccaggaatctttttgcacct

SEQ ID NO: 2528476 - DNA, 25 bp, Homo sapien
aggaaaccgatcctggatgtctctg

SEQ ID NO: 2528477 - DNA, 25 bp, Homo sapien
cagaaaaagatgctcatgtgatgcg

SEQ ID NO: 2528478 - DNA, 25 bp, Homo sapien
tttatgaacagaaatgcagcgatgc

SEQ ID NO: 2528479 - DNA, 25 bp, Homo sapien
catgtgatgcgatgaagtaaggtga

SEQ ID NO: 2528480 - DNA, 25 bp, Homo sapien
ctggcagctcataaagagccttcat

SEQ ID NO: 2528481 - DNA, 25 bp, Homo sapien
agagcacatagcctgttgaggaaag

SEQ ID NO: 2528482 - DNA, 25 bp, Homo sapien
aaagtaacaatgtaagccacagtgc

SEQ ID NO: 2528483 - DNA, 25 bp, Homo sapien
tcacagccaagcataaaatcagagg

SEQ ID NO: 2528484 - DNA, 25 bp, Homo sapien
tcaagtggtagaaagacagaatact

SEQ ID NO: 2528485 - DNA, 25 bp, Homo sapien
caaagagaccaaatcaaaaggagat

SEQ ID NO: 2528486 - DNA, 25 bp, Homo sapien
gtgtcgagccgttgtccttcccaaa

SEQ ID NO: 2528487 - DNA, 25 bp, Homo sapien
ctggatgccccagttaccgtttgca

SEQ ID NO: 2528488 - DNA, 25 bp, Homo sapien
gaaaaagctgttgtagaacttctca

SEQ ID NO: 2528489 - DNA, 25 bp, Homo sapien
agtgtagcaggagaaatatgggagc

SEQ ID NO: 2528490 - DNA, 25 bp, Homo sapien
taagtgtagcaggagaaatatggga

SEQ ID NO: 2528491 - DNA, 25 bp, Homo sapien
tgtagcaggagaaatatgggagccg

SEQ ID NO: 2528492 - DNA, 25 bp, Homo sapien
ctgtaagtgtagcaggagaaatatg

SEQ ID NO: 2528493 - DNA, 25 bp, Homo sapien
taaaagtgcagatctctcttcaaga

SEQ ID NO: 2528494 - DNA, 25 bp, Homo sapien
taatatcacaatttcgttgtccatt

SEQ ID NO: 2528495 - DNA, 25 bp, Homo sapien
caaaacattgtatcatataccataa

SEQ ID NO: 2528496 - DNA, 25 bp, Homo sapien
gcttgatttagactttctacaaggt

SEQ ID NO: 2528497 - DNA, 25 bp, Homo sapien
cagggtctgctaagcatcatccaga

SEQ ID NO: 2528498 - DNA, 25 bp, Homo sapien
tggtaatgcagtgtcccaaggatac

SEQ ID NO: 2528499 - DNA, 25 bp, Homo sapien
ggctcacgattgtctgggctgtaca

SEQ ID NO: 2528500 - DNA, 25 bp, Homo sapien
cagggaactctgacttatggcacaa

SEQ ID NO: 2528501 - DNA, 25 bp, Homo sapien
gacagtgccctgtatgacacatccg

SEQ ID NO: 2528502 - DNA, 25 bp, Homo sapien
aattctggaagctagttaacccctg

SEQ ID NO: 2528503 - DNA, 25 bp, Homo sapien
gacctggtgctactggtgaccctca

SEQ ID NO: 2528504 - DNA, 25 bp, Homo sapien
cacatgattagggtaagacactggc

SEQ ID NO: 2528505 - DNA, 25 bp, Homo sapien
agcaaacacagtactgaggagaaca

SEQ ID NO: 2528506 - DNA, 25 bp, Homo sapien
ggtctatgcagcaatctgaccctgc

SEQ ID NO: 2528507 - DNA, 25 bp, Homo sapien
cagtactgaggagaacaatatcttc

SEQ ID NO: 2528508 - DNA, 25 bp, Homo sapien
atatcttctgagactcctgcaatga

SEQ ID NO: 2528509 - DNA, 25 bp, Homo sapien
catctgaaatgtacgcaaaggtggg

SEQ ID NO: 2528510 - DNA, 25 bp, Homo sapien
catagtttgatgaatgggttccgtc

SEQ ID NO: 2528511 - DNA, 25 bp, Homo sapien
caatgcctgtagtccggaaggagcc

SEQ ID NO: 2528512 - DNA, 25 bp, Homo sapien
catggccattcttcctcgagagtgg

SEQ ID NO: 2528513 - DNA, 25 bp, Homo sapien
atgaatgttcagatgaatgcaccat

SEQ ID NO: 2528514 - DNA, 25 bp, Homo sapien
ctgttatgtgcaggtgtagccttcc

SEQ ID NO: 2528515 - DNA, 25 bp, Homo sapien
tgtgcaggtgtagccttcctgcttg

SEQ ID NO: 2528516 - DNA, 25 bp, Homo sapien
tatgtgcaggtgtagccttcctgct

SEQ ID NO: 2528517 - DNA, 25 bp, Homo sapien
catgcagacaaaagcgcactgtttc

SEQ ID NO: 2528518 - DNA, 25 bp, Homo sapien
gaacaaagaaggcttcatgcagaca

SEQ ID NO: 2528519 - DNA, 25 bp, Homo sapien
ccctcaggatagagtcgcattgttt

SEQ ID NO: 2528520 - DNA, 25 bp, Homo sapien
catccagggatatgaccgcaaggga

SEQ ID NO: 2528521 - DNA, 25 bp, Homo sapien
cttattttggagatcccctgactgg

SEQ ID NO: 2528522 - DNA, 25 bp, Homo sapien
tggccatacttaggaacagcattga

SEQ ID NO: 2528523 - DNA, 25 bp, Homo sapien
tggtttcattagtaaccacttggcc

SEQ ID NO: 2528524 - DNA, 25 bp, Homo sapien
ttggagatcccctgactggtatggt

SEQ ID NO: 2528525 - DNA, 25 bp, Homo sapien
tgcctctgcatctgatggggtgcag

SEQ ID NO: 2528526 - DNA, 25 bp, Homo sapien
tgaccctgcttcctcaaattttgcc

SEQ ID NO: 2528527 - DNA, 25 bp, Homo sapien
ttgcctctgcatctgatggggtgca

SEQ ID NO: 2528528 - DNA, 25 bp, Homo sapien
gaccctgcttcctcaaattttgcct

SEQ ID NO: 2528529 - DNA, 25 bp, Homo sapien
aggctttaaaaggatggtgtctgga

SEQ ID NO: 2528530 - DNA, 25 bp, Homo sapien
tttgtggtggcaatgactgtatcag

SEQ ID NO: 2528531 - DNA, 25 bp, Homo sapien
gtgtctggagattcatagcttttca

SEQ ID NO: 2528532 - DNA, 25 bp, Homo sapien
ggcaatgactgtatcaggctttaaa

SEQ ID NO: 2528533 - DNA, 25 bp, Homo sapien
ggaacctccattatcagggccgtag

SEQ ID NO: 2528534 - DNA, 25 bp, Homo sapien
caatcttatttcctgccataagtgg

SEQ ID NO: 2528535 - DNA, 25 bp, Homo sapien
gccgtagcaaagtctgccccataaa

SEQ ID NO: 2528536 - DNA, 25 bp, Homo sapien
aatggcctgttaccagatactctcc

SEQ ID NO: 2528537 - DNA, 25 bp, Homo sapien
ttacagggcattgggatatgttgaa

SEQ ID NO: 2528538 - DNA, 25 bp, Homo sapien
tgacaaggtcaaaggtgcatgatag

SEQ ID NO: 2528539 - DNA, 25 bp, Homo sapien
aggtgcatgataggcctcatcaggg

SEQ ID NO: 2528540 - DNA, 25 bp, Homo sapien
gcattgggatatgttgaagatgaca

SEQ ID NO: 2528541 - DNA, 25 bp, Homo sapien
tttggatccaccctttaatactatc

SEQ ID NO: 2528542 - DNA, 25 bp, Homo sapien
caattttattagtgtagggactaat

SEQ ID NO: 2528543 - DNA, 25 bp, Homo sapien
ttagtgtagggactaatctttacac

SEQ ID NO: 2528544 - DNA, 25 bp, Homo sapien
ttatagatgcccctcaatttgtgga

SEQ ID NO: 2528545 - DNA, 25 bp, Homo sapien
ggttgcaaagccaatgtctacccag

SEQ ID NO: 2528546 - DNA, 25 bp, Homo sapien
taaaagacggctgccacttagtctc

SEQ ID NO: 2528547 - DNA, 25 bp, Homo sapien
tgctggccctgagccaattgttgcc

SEQ ID NO: 2528548 - DNA, 25 bp, Homo sapien
caaatttgcctcgattaaagacagc

SEQ ID NO: 2528549 - DNA, 25 bp, Homo sapien
ttaacggaaggaagtgcctggaatg

SEQ ID NO: 2528550 - DNA, 25 bp, Homo sapien
tgatgtcccaattaatacgtcccct

SEQ ID NO: 2528551 - DNA, 25 bp, Homo sapien
tacgtcccctaattctatttcctgc

SEQ ID NO: 2528552 - DNA, 25 bp, Homo sapien
gaatgaaatccgacttgatgtccca

SEQ ID NO: 2528553 - DNA, 25 bp, Homo sapien
tctgcaccatcccatatcccactgc

SEQ ID NO: 2528554 - DNA, 25 bp, Homo sapien
tgggggccgctctttgaatttctgc

SEQ ID NO: 2528555 - DNA, 25 bp, Homo sapien
gttcaaatggcgtctccttattaaa

SEQ ID NO: 2528556 - DNA, 25 bp, Homo sapien
gtctaagttcaaatggcgtctcctt

SEQ ID NO: 2528557 - DNA, 25 bp, Homo sapien
tgtcaaggcgatgaagtcttacaaa

SEQ ID NO: 2528558 - DNA, 25 bp, Homo sapien
tacaaagatccatttgcactgaact

SEQ ID NO: 2528559 - DNA, 25 bp, Homo sapien
tcattaggcaggaatggcgttccca

SEQ ID NO: 2528560 - DNA, 25 bp, Homo sapien
ctccgccagcaatcatttcattagg

SEQ ID NO: 2528561 - DNA, 25 bp, Homo sapien
gctgtgcgggctgcgctgtaactca

SEQ ID NO: 2528562 - DNA, 25 bp, Homo sapien
cgggctgcgctgtaactcaggaact

SEQ ID NO: 2528563 - DNA, 25 bp, Homo sapien
cagatagcaggcctgcttcttcccc

SEQ ID NO: 2528564 - DNA, 25 bp, Homo sapien
agatagcaggcctgcttcttccccg

SEQ ID NO: 2528565 - DNA, 25 bp, Homo sapien
atagcaggcctgcttcttccccgcc

SEQ ID NO: 2528566 - DNA, 25 bp, Homo sapien
agcaggcctgcttcttccccgccat

SEQ ID NO: 2528567 - DNA, 25 bp, Homo sapien
tctggcttattctcaagggtattaa

SEQ ID NO: 2528568 - DNA, 25 bp, Homo sapien
catgacacttctctgttggatctac

SEQ ID NO: 2528569 - DNA, 25 bp, Homo sapien
tgcaggtgacagcatatttctggct

SEQ ID NO: 2528570 - DNA, 25 bp, Homo sapien
tggatctacttggaagttcttgcag

SEQ ID NO: 2528571 - DNA, 25 bp, Homo sapien
taggctgccgagagctctcaatttt

SEQ ID NO: 2528572 - DNA, 25 bp, Homo sapien
tttccaagtgtttcaccagatcccc

SEQ ID NO: 2528573 - DNA, 25 bp, Homo sapien
ccttagtgggatccgtaggctgccg

SEQ ID NO: 2528574 - DNA, 25 bp, Homo sapien
ccagtttgccatgggccttagtggg

SEQ ID NO: 2528575 - DNA, 25 bp, Homo sapien
aaagccacgttttaggctttggctg

SEQ ID NO: 2528576 - DNA, 25 bp, Homo sapien
tgaattctccaaagtaaagccacgt

SEQ ID NO: 2528577 - DNA, 25 bp, Homo sapien
aagccacgttttaggctttggctgc

SEQ ID NO: 2528578 - DNA, 25 bp, Homo sapien
ctggagttttggacggcatacatag

SEQ ID NO: 2528579 - DNA, 25 bp, Homo sapien
ttttggacggcatacatagctctca

SEQ ID NO: 2528580 - DNA, 25 bp, Homo sapien
gttttggacggcatacatagctctc

SEQ ID NO: 2528581 - DNA, 25 bp, Homo sapien
gagttttggacggcatacatagctc

SEQ ID NO: 2528582 - DNA, 25 bp, Homo sapien
ctaggaggttaatcaatgaagggcc

SEQ ID NO: 2528583 - DNA, 25 bp, Homo sapien
gaagggccaagctttttctcgctgg

SEQ ID NO: 2528584 - DNA, 25 bp, Homo sapien
tctgatttgaaggtactaggaggtt

SEQ ID NO: 2528585 - DNA, 25 bp, Homo sapien
gggtaaaacttcaagatctcatgaa

SEQ ID NO: 2528586 - DNA, 25 bp, Homo sapien
cttcgagaaaacattgtagatccag

SEQ ID NO: 2528587 - DNA, 25 bp, Homo sapien
taccaggaccataaagtgcctttgt

SEQ ID NO: 2528588 - DNA, 25 bp, Homo sapien
tcgagaaaacattgtagatccaggg

SEQ ID NO: 2528589 - DNA, 25 bp, Homo sapien
tcaggtgcaaccatggataccagga

SEQ ID NO: 2528590 - DNA, 25 bp, Homo sapien
gttggttctcagtccaggaggtgtg

SEQ ID NO: 2528591 - DNA, 25 bp, Homo sapien
acttcactgaggtatcatgcaaact

SEQ ID NO: 2528592 - DNA, 25 bp, Homo sapien
tgagttggttctcagtccaggaggt

SEQ ID NO: 2528593 - DNA, 25 bp, Homo sapien
gacttcactgaggtatcatgcaaac

SEQ ID NO: 2528594 - DNA, 25 bp, Homo sapien
gagtagaggagtgggtttgtggatt

SEQ ID NO: 2528595 - DNA, 25 bp, Homo sapien
agaatcttgaattccccagctggag

SEQ ID NO: 2528596 - DNA, 25 bp, Homo sapien
aaggtggccccactgctgagtagag

SEQ ID NO: 2528597 - DNA, 25 bp, Homo sapien
ctgagaatcttgaattccccagctg

SEQ ID NO: 2528598 - DNA, 25 bp, Homo sapien
ctaacccatcctcaattcttgaaaa

SEQ ID NO: 2528599 - DNA, 25 bp, Homo sapien
taacccatcctcaattcttgaaaag

SEQ ID NO: 2528600 - DNA, 25 bp, Homo sapien
aacccatcctcaattcttgaaaagt

SEQ ID NO: 2528601 - DNA, 25 bp, Homo sapien
acccatcctcaattcttgaaaagtt

SEQ ID NO: 2528602 - DNA, 25 bp, Homo sapien
ggagaacatggaaaccacgacttct

SEQ ID NO: 2528603 - DNA, 25 bp, Homo sapien
tttggtttgctctcagaggtcatct

SEQ ID NO: 2528604 - DNA, 25 bp, Homo sapien
gaaaccacgacttcttggctcaact

SEQ ID NO: 2528605 - DNA, 25 bp, Homo sapien
tctactccaatcctactatgaacca

SEQ ID NO: 2528606 - DNA, 25 bp, Homo sapien
tctaccatgttaagctgggattggc

SEQ ID NO: 2528607 - DNA, 25 bp, Homo sapien
tagtggctggtacataataggtcct

SEQ ID NO: 2528608 - DNA, 25 bp, Homo sapien
tccatgggtcacagggttgtatcct

SEQ ID NO: 2528609 - DNA, 25 bp, Homo sapien
cactcactgagtgcaagaccttaaa

SEQ ID NO: 2528610 - DNA, 25 bp, Homo sapien
gatgccatatatcagactcaatgcc

SEQ ID NO: 2528611 - DNA, 25 bp, Homo sapien
tgacatttgaactaggaattggagg

SEQ ID NO: 2528612 - DNA, 25 bp, Homo sapien
tcttggggatatgtcaacaaaggtc

SEQ ID NO: 2528613 - DNA, 25 bp, Homo sapien
gggctgtagtgacattgtgacattt

SEQ ID NO: 2528614 - DNA, 25 bp, Homo sapien
tgcaggttcctacaagggaccttag

SEQ ID NO: 2528615 - DNA, 25 bp, Homo sapien
catcttggactgcacttccagggaa

SEQ ID NO: 2528616 - DNA, 25 bp, Homo sapien
tcctttttctgatccgagggcttgc

SEQ ID NO: 2528617 - DNA, 25 bp, Homo sapien
gggacattccccaatatcctctcca

SEQ ID NO: 2528618 - DNA, 25 bp, Homo sapien
taattagctgtttggtgacctgaca

SEQ ID NO: 2528619 - DNA, 25 bp, Homo sapien
tccagcgtcggcctgtgaaatacgg

SEQ ID NO: 2528620 - DNA, 25 bp, Homo sapien
tactgttgtccatcaggcagatcca

SEQ ID NO: 2528621 - DNA, 25 bp, Homo sapien
cagtctctttgatgcacgtccagcg

SEQ ID NO: 2528622 - DNA, 25 bp, Homo sapien
gagttgtcacgtttgtcattctagg

SEQ ID NO: 2528623 - DNA, 25 bp, Homo sapien
cagccggtgcagcacgtactttggg

SEQ ID NO: 2528624 - DNA, 25 bp, Homo sapien
tcattctaggataaactttcagccg

SEQ ID NO: 2528625 - DNA, 25 bp, Homo sapien
ggataaactttcagccggtgcagca

SEQ ID NO: 2528626 - DNA, 25 bp, Homo sapien
ggatcttgaactttggaataggcca

SEQ ID NO: 2528627 - DNA, 25 bp, Homo sapien
catagctttccagcgcttgctaggg

SEQ ID NO: 2528628 - DNA, 25 bp, Homo sapien
cctgaaggctgcaagatgtgatggc

SEQ ID NO: 2528629 - DNA, 25 bp, Homo sapien
gacagtggcaattggtcccttgaga

SEQ ID NO: 2528630 - DNA, 25 bp, Homo sapien
accagcattgcagaagcatgacaat

SEQ ID NO: 2528631 - DNA, 25 bp, Homo sapien
attgcagaagcatgacaatatctcc

SEQ ID NO: 2528632 - DNA, 25 bp, Homo sapien
ctaccagcattgcagaagcatgaca

SEQ ID NO: 2528633 - DNA, 25 bp, Homo sapien
agaagcatgacaatatctccagcat

SEQ ID NO: 2528634 - DNA, 25 bp, Homo sapien
gtggagctgagcaactactctgtca

SEQ ID NO: 2528635 - DNA, 25 bp, Homo sapien
tgagcctcgccacttttcctggaag

SEQ ID NO: 2528636 - DNA, 25 bp, Homo sapien
aatccaagggtgtctctccagatgg

SEQ ID NO: 2528637 - DNA, 25 bp, Homo sapien
gtcattgatcatcccctgtggtcca

SEQ ID NO: 2528638 - DNA, 25 bp, Homo sapien
cttcctgcttgggacttctccaaac

SEQ ID NO: 2528639 - DNA, 25 bp, Homo sapien
cttaaaccctggctgactagctccc

SEQ ID NO: 2528640 - DNA, 25 bp, Homo sapien
ctcttttcaatatccgttccctcca

SEQ ID NO: 2528641 - DNA, 25 bp, Homo sapien
tcttttcaatatccgttccctccat

SEQ ID NO: 2528642 - DNA, 25 bp, Homo sapien
tccttaaaccctggctgactagctc

SEQ ID NO: 2528643 - DNA, 25 bp, Homo sapien
tgtgcgttagtccattctcaagctg

SEQ ID NO: 2528644 - DNA, 25 bp, Homo sapien
gatgtccttggatgcagaaaagttt

SEQ ID NO: 2528645 - DNA, 25 bp, Homo sapien
ttattaactcctatgctttgtgcgt

SEQ ID NO: 2528646 - DNA, 25 bp, Homo sapien
gtcttatcttagaagccattgccaa

SEQ ID NO: 2528647 - DNA, 25 bp, Homo sapien
tatgggaacacggttacatggcaat

SEQ ID NO: 2528648 - DNA, 25 bp, Homo sapien
tgttaactattccagagcacagagc

SEQ ID NO: 2528649 - DNA, 25 bp, Homo sapien
tccaggcagcaagacctaagctttt

SEQ ID NO: 2528650 - DNA, 25 bp, Homo sapien
tatagaacattcgatacatgcagac

SEQ ID NO: 2528651 - DNA, 25 bp, Homo sapien
aagctaagtggctgcctcggtcacg

SEQ ID NO: 2528652 - DNA, 25 bp, Homo sapien
ttctcactaaggatgtggcccattg

SEQ ID NO: 2528653 - DNA, 25 bp, Homo sapien
gtcaccatcagcacaaaagcccaat

SEQ ID NO: 2528654 - DNA, 25 bp, Homo sapien
cggtcacgccaggatgtaataaagc

SEQ ID NO: 2528655 - DNA, 25 bp, Homo sapien
cctctgcagtcccagagggggctgc

SEQ ID NO: 2528656 - DNA, 25 bp, Homo sapien
ttggaaaatttgtccctctgcagtc

SEQ ID NO: 2528657 - DNA, 25 bp, Homo sapien
agggggctgccatacctttcctctg

SEQ ID NO: 2528658 - DNA, 25 bp, Homo sapien
gggctgccatacctttcctctgtga

SEQ ID NO: 2528659 - DNA, 25 bp, Homo sapien
tatctttgatcagcaatctcacttc

SEQ ID NO: 2528660 - DNA, 25 bp, Homo sapien
tcattcttatggtagcttcttgtaa

SEQ ID NO: 2528661 - DNA, 25 bp, Homo sapien
ccttccatcgaatgggttgggagga

SEQ ID NO: 2528662 - DNA, 25 bp, Homo sapien
gcaatctcacttccactttctgtgt

SEQ ID NO: 2528663 - DNA, 25 bp, Homo sapien
aagggttttcatccagcgcctggag

SEQ ID NO: 2528664 - DNA, 25 bp, Homo sapien
ggagttctgccttcacttcactcat

SEQ ID NO: 2528665 - DNA, 25 bp, Homo sapien
atccagcgcctggaggagttctgcc

SEQ ID NO: 2528666 - DNA, 25 bp, Homo sapien
cctggaggagttctgccttcacttc

SEQ ID NO: 2528667 - DNA, 25 bp, Homo sapien
gagagaaagcaaggacgaaatcttc

SEQ ID NO: 2528668 - DNA, 25 bp, Homo sapien
agcaaggacgaaatcttcctcctga

SEQ ID NO: 2528669 - DNA, 25 bp, Homo sapien
agaaagcaaggacgaaatcttcctc

SEQ ID NO: 2528670 - DNA, 25 bp, Homo sapien
aggacgaaatcttcctcctgattgc

SEQ ID NO: 2528671 - DNA, 25 bp, Homo sapien
ctgatgaggacacttcccgctgcag

SEQ ID NO: 2528672 - DNA, 25 bp, Homo sapien
caggtggcctataccctgaggccca

SEQ ID NO: 2528673 - DNA, 25 bp, Homo sapien
cctgccagacgcagggaggctgctt

SEQ ID NO: 2528674 - DNA, 25 bp, Homo sapien
gcccagagtcactgtatggctgatg

SEQ ID NO: 2528675 - DNA, 25 bp, Homo sapien
tagcttttttccataagggtcatcc

SEQ ID NO: 2528676 - DNA, 25 bp, Homo sapien
taagggtcatccacacacaatgctg

SEQ ID NO: 2528677 - DNA, 25 bp, Homo sapien
tggttgaagggtcagttgatcctga

SEQ ID NO: 2528678 - DNA, 25 bp, Homo sapien
tcctcactactaagcttatctttcc

SEQ ID NO: 2528679 - DNA, 25 bp, Homo sapien
agtcctctgcatgagtgcaagccat

SEQ ID NO: 2528680 - DNA, 25 bp, Homo sapien
tcagctgtaaatgtaagaggccaag

SEQ ID NO: 2528681 - DNA, 25 bp, Homo sapien
gcactggccgaaggcttcagctgta

SEQ ID NO: 2528682 - DNA, 25 bp, Homo sapien
gaatgaattgccaccctgttgtggg

SEQ ID NO: 2528683 - DNA, 25 bp, Homo sapien
tagggactcagaacgtctaccatgg

SEQ ID NO: 2528684 - DNA, 25 bp, Homo sapien
gagaacagagcggtcagcaacttgg

SEQ ID NO: 2528685 - DNA, 25 bp, Homo sapien
taactgtttccatccccatagctgc

SEQ ID NO: 2528686 - DNA, 25 bp, Homo sapien
gcaactcccatggataactccctgg

SEQ ID NO: 2528687 - DNA, 25 bp, Homo sapien
tgctcagcaggcgaaggccatgtct

SEQ ID NO: 2528688 - DNA, 25 bp, Homo sapien
attggtaggcagtccaagaggcttg

SEQ ID NO: 2528689 - DNA, 25 bp, Homo sapien
ttctcattggtaggcagtccaagag

SEQ ID NO: 2528690 - DNA, 25 bp, Homo sapien
ctcattggtaggcagtccaagaggc

SEQ ID NO: 2528691 - DNA, 25 bp, Homo sapien
cattggtaggcagtccaagaggctt

SEQ ID NO: 2528692 - DNA, 25 bp, Homo sapien
tgtgctcagttatatgcagtgtgca

SEQ ID NO: 2528693 - DNA, 25 bp, Homo sapien
gctcagttatatgcagtgtgcagct

SEQ ID NO: 2528694 - DNA, 25 bp, Homo sapien
aatgtgctcagttatatgcagtgtg

SEQ ID NO: 2528695 - DNA, 25 bp, Homo sapien
tgctcagttatatgcagtgtgcagc

SEQ ID NO: 2528696 - DNA, 25 bp, Homo sapien
tccctctatacagcctgatgtagac

SEQ ID NO: 2528697 - DNA, 25 bp, Homo sapien
tttctctgttgcactctccctctat

SEQ ID NO: 2528698 - DNA, 25 bp, Homo sapien
actctccctctatacagcctgatgt

SEQ ID NO: 2528699 - DNA, 25 bp, Homo sapien
gcctgatgtagacccttggacatac

SEQ ID NO: 2528700 - DNA, 25 bp, Homo sapien
caagtgttgccactgcctgaaactt

SEQ ID NO: 2528701 - DNA, 25 bp, Homo sapien
tctgggtgttttacccaagtgttgc

SEQ ID NO: 2528702 - DNA, 25 bp, Homo sapien
tacccaagtgttgccactgcctgaa

SEQ ID NO: 2528703 - DNA, 25 bp, Homo sapien
gtgttttacccaagtgttgccactg

SEQ ID NO: 2528704 - DNA, 25 bp, Homo sapien
gtaaatcacagggatgcgcttatgt

SEQ ID NO: 2528705 - DNA, 25 bp, Homo sapien
gatgcgcttatgtgcaccaagcttc

SEQ ID NO: 2528706 - DNA, 25 bp, Homo sapien
cagggatgcgcttatgtgcaccaag

SEQ ID NO: 2528707 - DNA, 25 bp, Homo sapien
gcttatgtgcaccaagcttcaactt

SEQ ID NO: 2528708 - DNA, 25 bp, Homo sapien
caatgtacaaccagacaccagggac

SEQ ID NO: 2528709 - DNA, 25 bp, Homo sapien
cgcttatccccgacgacaggtaacg

SEQ ID NO: 2528710 - DNA, 25 bp, Homo sapien
gtaacgttgcttcacgcttatcccc

SEQ ID NO: 2528711 - DNA, 25 bp, Homo sapien
cccgacaagcctgccaaatatttaa

SEQ ID NO: 2528712 - DNA, 25 bp, Homo sapien
ccgacgacaggtaacgttgcttcac

SEQ ID NO: 2528713 - DNA, 25 bp, Homo sapien
gggccatgtcctgaagaaaacttgc

SEQ ID NO: 2528714 - DNA, 25 bp, Homo sapien
caaaaggcggtcagaaggatgctat

SEQ ID NO: 2528715 - DNA, 25 bp, Homo sapien
accttgtagagctggactacatggg

SEQ ID NO: 2528716 - DNA, 25 bp, Homo sapien
gacagtcccgtttcggcatgtagcc

SEQ ID NO: 2528717 - DNA, 25 bp, Homo sapien
gccacagcgagatgggttcccaagt

SEQ ID NO: 2528718 - DNA, 25 bp, Homo sapien
tgggtcatggccaatagcaaaatcc

SEQ ID NO: 2528719 - DNA, 25 bp, Homo sapien
ggtttgaggtccatgtgccacagcg

SEQ ID NO: 2528720 - DNA, 25 bp, Homo sapien
caactcccattgattggtcactgcg

SEQ ID NO: 2528721 - DNA, 25 bp, Homo sapien
aagctttttagtgccgcttttctca

SEQ ID NO: 2528722 - DNA, 25 bp, Homo sapien
ggcacaataccgagaaatgggagca

SEQ ID NO: 2528723 - DNA, 25 bp, Homo sapien
ggagcacactgcctatttgacaaag

SEQ ID NO: 2528724 - DNA, 25 bp, Homo sapien
gattctctggttgattattgatgcc

SEQ ID NO: 2528725 - DNA, 25 bp, Homo sapien
cacagaccttgtgatgtggtgttcc

SEQ ID NO: 2528726 - DNA, 25 bp, Homo sapien
agccaagcatactgtgcactggagg

SEQ ID NO: 2528727 - DNA, 25 bp, Homo sapien
ttcagggagtcagcgagagttttct

SEQ ID NO: 2528728 - DNA, 25 bp, Homo sapien
cactgggactatattcagggagtca

SEQ ID NO: 2528729 - DNA, 25 bp, Homo sapien
gatgagacagcacctcttctgtgtg

SEQ ID NO: 2528730 - DNA, 25 bp, Homo sapien
ttgcaagaagtagcagttatcactg

SEQ ID NO: 2528731 - DNA, 25 bp, Homo sapien
cgaagtcgggtgtgtgttttcccat

SEQ ID NO: 2528732 - DNA, 25 bp, Homo sapien
aagtggagcttgcaaacgctttttt

SEQ ID NO: 2528733 - DNA, 25 bp, Homo sapien
tgcttcctgcttggcgggtattcct

SEQ ID NO: 2528734 - DNA, 25 bp, Homo sapien
tgtaatgcgctatgtagagctgctg

SEQ ID NO: 2528735 - DNA, 25 bp, Homo sapien
ccatgagggtatagcagcaggaacc

SEQ ID NO: 2528736 - DNA, 25 bp, Homo sapien
tagtctggctaggaacttgccatga

SEQ ID NO: 2528737 - DNA, 25 bp, Homo sapien
gataggcaattgattcctgccccag

SEQ ID NO: 2528738 - DNA, 25 bp, Homo sapien
gcaggcatccccagtgataggcaat

SEQ ID NO: 2528739 - DNA, 25 bp, Homo sapien
cagcagccactctggacaatgatct

SEQ ID NO: 2528740 - DNA, 25 bp, Homo sapien
tttctatgtcttggctcgaacctcc

SEQ ID NO: 2528741 - DNA, 25 bp, Homo sapien
gaagttcctacaggttgaggtgatc

SEQ ID NO: 2528742 - DNA, 25 bp, Homo sapien
cctagcaatgtgtttatttgacagc

SEQ ID NO: 2528743 - DNA, 25 bp, Homo sapien
ggttgaggtgatcctcctagcaatg

SEQ ID NO: 2528744 - DNA, 25 bp, Homo sapien
atgcttggtgatgaatgaaccagct

SEQ ID NO: 2528745 - DNA, 25 bp, Homo sapien
tccagctccaccaccctcctcaagg

SEQ ID NO: 2528746 - DNA, 25 bp, Homo sapien
attccagctccaccaccctcctcaa

SEQ ID NO: 2528747 - DNA, 25 bp, Homo sapien
atagagctgggtccaaattccagct

SEQ ID NO: 2528748 - DNA, 25 bp, Homo sapien
cctcctcaaggcccttaatcttcat

SEQ ID NO: 2528749 - DNA, 25 bp, Homo sapien
taggctcgtcttgaactcctgacct

SEQ ID NO: 2528750 - DNA, 25 bp, Homo sapien
ttctcctagctcagcctctgaatag

SEQ ID NO: 2528751 - DNA, 25 bp, Homo sapien
attttctgtagagacagatttcacc

SEQ ID NO: 2528752 - DNA, 25 bp, Homo sapien
gatttcaccatgttgactaggctcg

SEQ ID NO: 2528753 - DNA, 25 bp, Homo sapien
gagagttcatttgcaacttaaagct

SEQ ID NO: 2528754 - DNA, 25 bp, Homo sapien
agcactgatcttggccattggtttt

SEQ ID NO: 2528755 - DNA, 25 bp, Homo sapien
cttaaagcttaagaagcactgatct

SEQ ID NO: 2528756 - DNA, 25 bp, Homo sapien
ttgcaacttaaagcttaagaagcac

SEQ ID NO: 2528757 - DNA, 25 bp, Homo sapien
catgggtagtaaaagcctacgactc

SEQ ID NO: 2528758 - DNA, 25 bp, Homo sapien
tagtaaaagcctacgactcacatgg

SEQ ID NO: 2528759 - DNA, 25 bp, Homo sapien
agaaatcatgggtagtaaaagccta

SEQ ID NO: 2528760 - DNA, 25 bp, Homo sapien
aaaagcctacgactcacatggaggg

SEQ ID NO: 2528761 - DNA, 25 bp, Homo sapien
gaaccgattggtcgggcatgacctc

SEQ ID NO: 2528762 - DNA, 25 bp, Homo sapien
gaaactatttcagggcagaaccgat

SEQ ID NO: 2528763 - DNA, 25 bp, Homo sapien
aatcttcaagtgtcaagactccgac

SEQ ID NO: 2528764 - DNA, 25 bp, Homo sapien
cataatagtatctgggacaatcccc

SEQ ID NO: 2528765 - DNA, 25 bp, Homo sapien
cccatgttacttccagtgaacactt

SEQ ID NO: 2528766 - DNA, 25 bp, Homo sapien
agcaaggaagccaggtggtactttt

SEQ ID NO: 2528767 - DNA, 25 bp, Homo sapien
ctaaaaatattactagcaaggaagc

SEQ ID NO: 2528768 - DNA, 25 bp, Homo sapien
tagcaaggaagccaggtggtacttt

SEQ ID NO: 2528769 - DNA, 25 bp, Homo sapien
aaaaatattactagcaaggaagcca

SEQ ID NO: 2528770 - DNA, 25 bp, Homo sapien
atgattgtgttccagttacttcttc

SEQ ID NO: 2528771 - DNA, 25 bp, Homo sapien
cagatgattgtgttccagttacttc

SEQ ID NO: 2528772 - DNA, 25 bp, Homo sapien
gatgattgtgttccagttacttctt

SEQ ID NO: 2528773 - DNA, 25 bp, Homo sapien
gccagatgattgtgttccagttact

SEQ ID NO: 2528774 - DNA, 25 bp, Homo sapien
gcaacaactaagaagtctctataga

SEQ ID NO: 2528775 - DNA, 25 bp, Homo sapien
tgaactctatcaaatcccagattaa

SEQ ID NO: 2528776 - DNA, 25 bp, Homo sapien
tctctatagaagtttaagtgatgtg

SEQ ID NO: 2528777 - DNA, 25 bp, Homo sapien
ctgcaagaataaggatagtatacac

SEQ ID NO: 2528778 - DNA, 25 bp, Homo sapien
gacactgcctaagacaggtgacact

SEQ ID NO: 2528779 - DNA, 25 bp, Homo sapien
taagagccactatgctggtgcacgt

SEQ ID NO: 2528780 - DNA, 25 bp, Homo sapien
taagttcaggatatgctactagcac

SEQ ID NO: 2528781 - DNA, 25 bp, Homo sapien
acaccaacaggtgggcatgtcagga

SEQ ID NO: 2528782 - DNA, 25 bp, Homo sapien
gatcccgactatgagctgctggata

SEQ ID NO: 2528783 - DNA, 25 bp, Homo sapien
gctgctggatataaggtccagtgtc

SEQ ID NO: 2528784 - DNA, 25 bp, Homo sapien
atgttgatcccgactatgagctgct

SEQ ID NO: 2528785 - DNA, 25 bp, Homo sapien
gctggatataaggtccagtgtcccc

SEQ ID NO: 2528786 - DNA, 25 bp, Homo sapien
agccaccccaagactcaacaagctc

SEQ ID NO: 2528787 - DNA, 25 bp, Homo sapien
ggacagccaactgaagctggagcca

SEQ ID NO: 2528788 - DNA, 25 bp, Homo sapien
caccccaagactcaacaagctctac

SEQ ID NO: 2528789 - DNA, 25 bp, Homo sapien
gccaccccaagactcaacaagctct

SEQ ID NO: 2528790 - DNA, 25 bp, Homo sapien
caatgtcagacaaacaaatgggatc

SEQ ID NO: 2528791 - DNA, 25 bp, Homo sapien
gcgtgcatcatgagaacccaaagcc

SEQ ID NO: 2528792 - DNA, 25 bp, Homo sapien
cactggcggttgctgataaaattca

SEQ ID NO: 2528793 - DNA, 25 bp, Homo sapien
caaagccacctccacgagaggaaat

SEQ ID NO: 2528794 - DNA, 25 bp, Homo sapien
ggtgtcagggtttgtgttcttgcca

SEQ ID NO: 2528795 - DNA, 25 bp, Homo sapien
tctggaggaaaagagcctggctttc

SEQ ID NO: 2528796 - DNA, 25 bp, Homo sapien
cacttcttcgcagaacccgcatgaa

SEQ ID NO: 2528797 - DNA, 25 bp, Homo sapien
gttcaaggcctcaagacccaaatag

SEQ ID NO: 2528798 - DNA, 25 bp, Homo sapien
agcttcgggcctgtgtaaacgtgaa

SEQ ID NO: 2528799 - DNA, 25 bp, Homo sapien
tcatctctagctccccgatgatgtt

SEQ ID NO: 2528800 - DNA, 25 bp, Homo sapien
gatgtttgcaggcaagcttcgggcc

SEQ ID NO: 2528801 - DNA, 25 bp, Homo sapien
taaacgtgaagtaggtcaggccaca

SEQ ID NO: 2528802 - DNA, 25 bp, Homo sapien
tagcaggagaaggataaaattttct

SEQ ID NO: 2528803 - DNA, 25 bp, Homo sapien
agtagcaggagaaggataaaatttt

SEQ ID NO: 2528804 - DNA, 25 bp, Homo sapien
gtagcaggagaaggataaaattttc

SEQ ID NO: 2528805 - DNA, 25 bp, Homo sapien
cagtagcaggagaaggataaaattt

SEQ ID NO: 2528806 - DNA, 25 bp, Homo sapien
tgaggaatcgcaacaaataagaggc

SEQ ID NO: 2528807 - DNA, 25 bp, Homo sapien
ggaccgtcagtccttctcttatggg

SEQ ID NO: 2528808 - DNA, 25 bp, Homo sapien
ctcttatgggtcatgtgtttgctca

SEQ ID NO: 2528809 - DNA, 25 bp, Homo sapien
gcatgcaattctatgggaccgtcag

SEQ ID NO: 2528810 - DNA, 25 bp, Homo sapien
ctctgcacggctcagtcggaggccg

SEQ ID NO: 2528811 - DNA, 25 bp, Homo sapien
cttttgtgctcctcaggtggaggtg

SEQ ID NO: 2528812 - DNA, 25 bp, Homo sapien
gggtcttttgtgctcctcaggtgga

SEQ ID NO: 2528813 - DNA, 25 bp, Homo sapien
agcatgctctgcacggctcagtcgg

SEQ ID NO: 2528814 - DNA, 25 bp, Homo sapien
tcacccgtccctgtgggcttcttca

SEQ ID NO: 2528815 - DNA, 25 bp, Homo sapien
cctgtgggcttcttcaaatgaatcc

SEQ ID NO: 2528816 - DNA, 25 bp, Homo sapien
cgtccctgtgggcttcttcaaatga

SEQ ID NO: 2528817 - DNA, 25 bp, Homo sapien
cacccgtccctgtgggcttcttcaa

SEQ ID NO: 2528818 - DNA, 25 bp, Homo sapien
tttcctgcgctgatgaaggccctgt

SEQ ID NO: 2528819 - DNA, 25 bp, Homo sapien
acacatctattgctgccctggtagg

SEQ ID NO: 2528820 - DNA, 25 bp, Homo sapien
ttgctgccctggtaggccctgcatt

SEQ ID NO: 2528821 - DNA, 25 bp, Homo sapien
ccttttcctgtatctcagccacttc

SEQ ID NO: 2528822 - DNA, 25 bp, Homo sapien
atttggtctgaaacactcgcgtagc

SEQ ID NO: 2528823 - DNA, 25 bp, Homo sapien
tcaggactgcacgtaggatcctgta

SEQ ID NO: 2528824 - DNA, 25 bp, Homo sapien
gcttcaggataaccacactggaacg

SEQ ID NO: 2528825 - DNA, 25 bp, Homo sapien
gcacgtaggatcctgtacagcctgg

SEQ ID NO: 2528826 - DNA, 25 bp, Homo sapien
ctgatttcagaaatgttattatgat

SEQ ID NO: 2528827 - DNA, 25 bp, Homo sapien
tgatttcagaaatgttattatgatg

SEQ ID NO: 2528828 - DNA, 25 bp, Homo sapien
gtcttcataggtggcacatagagcc

SEQ ID NO: 2528829 - DNA, 25 bp, Homo sapien
cttcataggtggcacatagagccat

SEQ ID NO: 2528830 - DNA, 25 bp, Homo sapien
ctgtcttcataggtggcacatagag

SEQ ID NO: 2528831 - DNA, 25 bp, Homo sapien
tgtcttcataggtggcacatagagc

SEQ ID NO: 2528832 - DNA, 25 bp, Homo sapien
ttccctctcactcatctgtttctgt

SEQ ID NO: 2528833 - DNA, 25 bp, Homo sapien
ccctggcatgtaggctttcagagcc

SEQ ID NO: 2528834 - DNA, 25 bp, Homo sapien
aacctctaccggccctggcatgtag

SEQ ID NO: 2528835 - DNA, 25 bp, Homo sapien
taccggccctggcatgtaggctttc

SEQ ID NO: 2528836 - DNA, 25 bp, Homo sapien
cggccctggcatgtaggctttcaga

SEQ ID NO: 2528837 - DNA, 25 bp, Homo sapien
cgatgggagtgactggatttaacag

SEQ ID NO: 2528838 - DNA, 25 bp, Homo sapien
gggcctgcaatttgattgccacatc

SEQ ID NO: 2528839 - DNA, 25 bp, Homo sapien
tataatgctttatactcccatcggg

SEQ ID NO: 2528840 - DNA, 25 bp, Homo sapien
aaatatctgcttgatcgatgggagt

SEQ ID NO: 2528841 - DNA, 25 bp, Homo sapien
attgcttaagggtcagggcacctcc

SEQ ID NO: 2528842 - DNA, 25 bp, Homo sapien
ggaattgcttaagggtcagggcacc

SEQ ID NO: 2528843 - DNA, 25 bp, Homo sapien
agggaattgcttaagggtcagggca

SEQ ID NO: 2528844 - DNA, 25 bp, Homo sapien
aattgcttaagggtcagggcacctc

SEQ ID NO: 2528845 - DNA, 25 bp, Homo sapien
catttcttagaagagctctatggtc

SEQ ID NO: 2528846 - DNA, 25 bp, Homo sapien
caccatttcttagaagagctctatg

SEQ ID NO: 2528847 - DNA, 25 bp, Homo sapien
cttcacaccatttcttagaagagct

SEQ ID NO: 2528848 - DNA, 25 bp, Homo sapien
ttagaagagctctatggtctaggtg

SEQ ID NO: 2528849 - DNA, 25 bp, Homo sapien
gtagcactagttcatcccgaaagtc

SEQ ID NO: 2528850 - DNA, 25 bp, Homo sapien
gttttcagtgtattgaacttggttc

SEQ ID NO: 2528851 - DNA, 25 bp, Homo sapien
atcccgaaagtcctggcatttgcag

SEQ ID NO: 2528852 - DNA, 25 bp, Homo sapien
tggttcttcccagtagcactagttc

SEQ ID NO: 2528853 - DNA, 25 bp, Homo sapien
gacgatcaagaagaagccagggttt

SEQ ID NO: 2528854 - DNA, 25 bp, Homo sapien
atgatgtcaggcgaaggacgatcaa

SEQ ID NO: 2528855 - DNA, 25 bp, Homo sapien
gttttagtagtggttgcaggagcag

SEQ ID NO: 2528856 - DNA, 25 bp, Homo sapien
caagaagaagccagggttttagtag

SEQ ID NO: 2528857 - DNA, 25 bp, Homo sapien
gatgtgaaagctccaagaccgggga

SEQ ID NO: 2528858 - DNA, 25 bp, Homo sapien
cctggtaaagcaagtagggatgtga

SEQ ID NO: 2528859 - DNA, 25 bp, Homo sapien
gcaagtagggatgtgaaagctccaa

SEQ ID NO: 2528860 - DNA, 25 bp, Homo sapien
ccatttgtcaccctggtaaagcaag

SEQ ID NO: 2528861 - DNA, 25 bp, Homo sapien
acatcttcacccttggaactaccca

SEQ ID NO: 2528862 - DNA, 25 bp, Homo sapien
cagtcacatttcacccagccaggat

SEQ ID NO: 2528863 - DNA, 25 bp, Homo sapien
tgtagctctctgcattgacagtcac

SEQ ID NO: 2528864 - DNA, 25 bp, Homo sapien
gatccactggaaagaactcacatct

SEQ ID NO: 2528865 - DNA, 25 bp, Homo sapien
catagtcgggttgaaggcttggctt

SEQ ID NO: 2528866 - DNA, 25 bp, Homo sapien
atttcaacatagtcgggttgaaggc

SEQ ID NO: 2528867 - DNA, 25 bp, Homo sapien
tagtcgggttgaaggcttggcttac

SEQ ID NO: 2528868 - DNA, 25 bp, Homo sapien
caacatagtcgggttgaaggcttgg

SEQ ID NO: 2528869 - DNA, 25 bp, Homo sapien
gtgaaagcatagagacaccagccca

SEQ ID NO: 2528870 - DNA, 25 bp, Homo sapien
tttaacaacaataactcggctccag

SEQ ID NO: 2528871 - DNA, 25 bp, Homo sapien
ggctctatgaaaccccctagctggg

SEQ ID NO: 2528872 - DNA, 25 bp, Homo sapien
cagcccaggcccaatatagtttcag

SEQ ID NO: 2528873 - DNA, 25 bp, Homo sapien
ggaattatcacatcgcccatcgcct

SEQ ID NO: 2528874 - DNA, 25 bp, Homo sapien
gaccccagagtaactaactgggtca

SEQ ID NO: 2528875 - DNA, 25 bp, Homo sapien
cagccctggcacaggaattatcaca

SEQ ID NO: 2528876 - DNA, 25 bp, Homo sapien
taactgggtcaaagttggacctgac

SEQ ID NO: 2528877 - DNA, 25 bp, Homo sapien
tggaggtcaacaggagtgtgcctgt

SEQ ID NO: 2528878 - DNA, 25 bp, Homo sapien
ggaggtcaacaggagtgtgcctgtc

SEQ ID NO: 2528879 - DNA, 25 bp, Homo sapien
gctcggttttgaagggattccttca

SEQ ID NO: 2528880 - DNA, 25 bp, Homo sapien
gttttgaagggattccttcatgggc

SEQ ID NO: 2528881 - DNA, 25 bp, Homo sapien
taggcatactgcatgcaccgtgtgc

SEQ ID NO: 2528882 - DNA, 25 bp, Homo sapien
caccgtgtgcacatctccatgatca

SEQ ID NO: 2528883 - DNA, 25 bp, Homo sapien
ggtatctactctgcaccaataggca

SEQ ID NO: 2528884 - DNA, 25 bp, Homo sapien
gcacgagtacacatcccatataggt

SEQ ID NO: 2528885 - DNA, 25 bp, Homo sapien
caatgtgtgctaaacccgtgcatgc

SEQ ID NO: 2528886 - DNA, 25 bp, Homo sapien
ggcaatgtgtgctaaacccgtgcat

SEQ ID NO: 2528887 - DNA, 25 bp, Homo sapien
gcaatgtgtgctaaacccgtgcatg

SEQ ID NO: 2528888 - DNA, 25 bp, Homo sapien
tggcaatgtgtgctaaacccgtgca

SEQ ID NO: 2528889 - DNA, 25 bp, Homo sapien
tcactcagcaagcacacacaatcga

SEQ ID NO: 2528890 - DNA, 25 bp, Homo sapien
gcacacacaatcgatgggatagaat

SEQ ID NO: 2528891 - DNA, 25 bp, Homo sapien
caatcgatgggatagaatgctggca

SEQ ID NO: 2528892 - DNA, 25 bp, Homo sapien
ctccttcctgttcactcagcaagca

SEQ ID NO: 2528893 - DNA, 25 bp, Homo sapien
ccagttatgaaggaccaaatgcaca

SEQ ID NO: 2528894 - DNA, 25 bp, Homo sapien
tggcaaagccgaggtgtaaactcag

SEQ ID NO: 2528895 - DNA, 25 bp, Homo sapien
gagttgaagtacacaccctgaagag

SEQ ID NO: 2528896 - DNA, 25 bp, Homo sapien
gtctcacttgcgctgggatccacat

SEQ ID NO: 2528897 - DNA, 25 bp, Homo sapien
tacagcaattgcgaggtgagctaaa

SEQ ID NO: 2528898 - DNA, 25 bp, Homo sapien
aaaggcggttattttccctctgctg

SEQ ID NO: 2528899 - DNA, 25 bp, Homo sapien
ctctgctgaaacacgaagattcatt

SEQ ID NO: 2528900 - DNA, 25 bp, Homo sapien
ttggcatgaaaaggtacagcaattg

SEQ ID NO: 2528901 - DNA, 25 bp, Homo sapien
ctgagatgtaaacccaagcagcctg

SEQ ID NO: 2528902 - DNA, 25 bp, Homo sapien
cctgaactaggagagaatacattcc

SEQ ID NO: 2528903 - DNA, 25 bp, Homo sapien
tatctcagtctgtttgtccctcgcc

SEQ ID NO: 2528904 - DNA, 25 bp, Homo sapien
gacatggaactaattctcccctgga

SEQ ID NO: 2528905 - DNA, 25 bp, Homo sapien
tccaatgaccaggaaaggcttcact

SEQ ID NO: 2528906 - DNA, 25 bp, Homo sapien
caaatgggactgaatgctcaacggg

SEQ ID NO: 2528907 - DNA, 25 bp, Homo sapien
tcaacgggacttttcagaggcattc

SEQ ID NO: 2528908 - DNA, 25 bp, Homo sapien
aattagaggcttccccttcagccgg

SEQ ID NO: 2528909 - DNA, 25 bp, Homo sapien
cctaacgcgaaagcccagcaagatt

SEQ ID NO: 2528910 - DNA, 25 bp, Homo sapien
ttgttccaggcccaaacatgctgat

SEQ ID NO: 2528911 - DNA, 25 bp, Homo sapien
tctgcgagagaaaatgactgcttcc

SEQ ID NO: 2528912 - DNA, 25 bp, Homo sapien
cacccagtggatttccctgacacat

SEQ ID NO: 2528913 - DNA, 25 bp, Homo sapien
gggcacattggatagatattgccag

SEQ ID NO: 2528914 - DNA, 25 bp, Homo sapien
ctgggcctgacacaggggcacattg

SEQ ID NO: 2528915 - DNA, 25 bp, Homo sapien
tggatagatattgccaggtctggaa

SEQ ID NO: 2528916 - DNA, 25 bp, Homo sapien
cacattggatagatattgccaggtc

SEQ ID NO: 2528917 - DNA, 25 bp, Homo sapien
gccaatggagggaaggcttaataat

SEQ ID NO: 2528918 - DNA, 25 bp, Homo sapien
gacactgctggtcaggcaggatgcc

SEQ ID NO: 2528919 - DNA, 25 bp, Homo sapien
cagacactgctggtcaggcaggatg

SEQ ID NO: 2528920 - DNA, 25 bp, Homo sapien
caatggagggaaggcttaataatgc

SEQ ID NO: 2528921 - DNA, 25 bp, Homo sapien
cccgtgagggtgttcataaagatct

SEQ ID NO: 2528922 - DNA, 25 bp, Homo sapien
tggtcttgcccgtgagggtgttcat

SEQ ID NO: 2528923 - DNA, 25 bp, Homo sapien
cgtgagggtgttcataaagatctgc

SEQ ID NO: 2528924 - DNA, 25 bp, Homo sapien
tcttgcccgtgagggtgttcataaa

SEQ ID NO: 2528925 - DNA, 25 bp, Homo sapien
aattagtccgaattctccaggaagc

SEQ ID NO: 2528926 - DNA, 25 bp, Homo sapien
gaggtgattgaacctccataagttc

SEQ ID NO: 2528927 - DNA, 25 bp, Homo sapien
taagttcaatgaattagtccgaatt

SEQ ID NO: 2528928 - DNA, 25 bp, Homo sapien
aaaaggaggtgattgaacctccata

SEQ ID NO: 2528929 - DNA, 25 bp, Homo sapien
tactcaatgcaagtgctgcaagtgc

SEQ ID NO: 2528930 - DNA, 25 bp, Homo sapien
gggaggtcattcactgtgggcaata

SEQ ID NO: 2528931 - DNA, 25 bp, Homo sapien
taagtgaggctctgttaggccaaga

SEQ ID NO: 2528932 - DNA, 25 bp, Homo sapien
aattggaggatgctgagctgatgcc

SEQ ID NO: 2528933 - DNA, 25 bp, Homo sapien
ggcatctcccggctcattaggaaag

SEQ ID NO: 2528934 - DNA, 25 bp, Homo sapien
ccttgagctccaacggctgcagaga

SEQ ID NO: 2528935 - DNA, 25 bp, Homo sapien
tcacactagacagcacagttgcgtt

SEQ ID NO: 2528936 - DNA, 25 bp, Homo sapien
taattgtccattggctgccgccgtc

SEQ ID NO: 2528937 - DNA, 25 bp, Homo sapien
taattgtgacatcatgaacgcccta

SEQ ID NO: 2528938 - DNA, 25 bp, Homo sapien
cgcagggcgcaatcagagggccttt

SEQ ID NO: 2528939 - DNA, 25 bp, Homo sapien
tctggagacctaggctgtgtgaccc

SEQ ID NO: 2528940 - DNA, 25 bp, Homo sapien
gagtaattcctggagggattccgca

SEQ ID NO: 2528941 - DNA, 25 bp, Homo sapien
gatgccacttgaaaggaatcagggc

SEQ ID NO: 2528942 - DNA, 25 bp, Homo sapien
gaatcagggcggaatctccagagat

SEQ ID NO: 2528943 - DNA, 25 bp, Homo sapien
caaacctaagagacagagctgatgc

SEQ ID NO: 2528944 - DNA, 25 bp, Homo sapien
caagtggagattaaagcagccgggc

SEQ ID NO: 2528945 - DNA, 25 bp, Homo sapien
ttagatgccgacaacttcaggaaga

SEQ ID NO: 2528946 - DNA, 25 bp, Homo sapien
tccatttgcattaagactcacaatc

SEQ ID NO: 2528947 - DNA, 25 bp, Homo sapien
tgcattaagactcacaatctctcca

SEQ ID NO: 2528948 - DNA, 25 bp, Homo sapien
tcaggaagattaatccatcttccat

SEQ ID NO: 2528949 - DNA, 25 bp, Homo sapien
cccctctggccactttccctttcat

SEQ ID NO: 2528950 - DNA, 25 bp, Homo sapien
tcccctctggccactttccctttca

SEQ ID NO: 2528951 - DNA, 25 bp, Homo sapien
ctctcccctctggccactttccctt

SEQ ID NO: 2528952 - DNA, 25 bp, Homo sapien
ctttgtttgacatataggaaagaat

SEQ ID NO: 2528953 - DNA, 25 bp, Homo sapien
tgtttgacatataggaaagaatcat

SEQ ID NO: 2528954 - DNA, 25 bp, Homo sapien
ttgtttgacatataggaaagaatca

SEQ ID NO: 2528955 - DNA, 25 bp, Homo sapien
gtctttgtttgacatataggaaaga

SEQ ID NO: 2528956 - DNA, 25 bp, Homo sapien
gaggtgttgagtatcattaacttcc

SEQ ID NO: 2528957 - DNA, 25 bp, Homo sapien
aggtgttgagtatcattaacttcca

SEQ ID NO: 2528958 - DNA, 25 bp, Homo sapien
tgttgagtatcattaacttccaaac

SEQ ID NO: 2528959 - DNA, 25 bp, Homo sapien
ggtgttgagtatcattaacttccaa

SEQ ID NO: 2528960 - DNA, 25 bp, Homo sapien
cagtgacttagttcataagagctca

SEQ ID NO: 2528961 - DNA, 25 bp, Homo sapien
aatgcatatgcccacaaaaatactt

SEQ ID NO: 2528962 - DNA, 25 bp, Homo sapien
caaatatccccccacaggagaatgg

SEQ ID NO: 2528963 - DNA, 25 bp, Homo sapien
tgaccctgaaattacatctcatgag

SEQ ID NO: 2528964 - DNA, 25 bp, Homo sapien
tgagtaacaatagagtgagaaaagt

SEQ ID NO: 2528965 - DNA, 25 bp, Homo sapien
gaggccagagaagcgggttttattc

SEQ ID NO: 2528966 - DNA, 25 bp, Homo sapien
cttggcctacaagaagtgagtaaca

SEQ ID NO: 2528967 - DNA, 25 bp, Homo sapien
tattctgggatatattactctctac

SEQ ID NO: 2528968 - DNA, 25 bp, Homo sapien
tccacctacacctcaccatctctgg

SEQ ID NO: 2528969 - DNA, 25 bp, Homo sapien
tgggaattagttctaaactgccttc

SEQ ID NO: 2528970 - DNA, 25 bp, Homo sapien
gaattagttctaaactgccttccac

SEQ ID NO: 2528971 - DNA, 25 bp, Homo sapien
gccttccacctacacctcaccatct

SEQ ID NO: 2528972 - DNA, 25 bp, Homo sapien
ttcatgtctgtcacccctctctgct

SEQ ID NO: 2528973 - DNA, 25 bp, Homo sapien
tcatgtctgtcacccctctctgctg

SEQ ID NO: 2528974 - DNA, 25 bp, Homo sapien
tgtctgtcacccctctctgctgtct

SEQ ID NO: 2528975 - DNA, 25 bp, Homo sapien
acattcatgtctgtcacccctctct

SEQ ID NO: 2528976 - DNA, 25 bp, Homo sapien
gaaatgatgagtacctacttcataa

SEQ ID NO: 2528977 - DNA, 25 bp, Homo sapien
agactgtggaagaaatgatgagtac

SEQ ID NO: 2528978 - DNA, 25 bp, Homo sapien
cttcctcatctagactgtggaagaa

SEQ ID NO: 2528979 - DNA, 25 bp, Homo sapien
gcttgaggctctgaaagtttggaga

SEQ ID NO: 2528980 - DNA, 25 bp, Homo sapien
ttattataattacctgggaatctga

SEQ ID NO: 2528981 - DNA, 25 bp, Homo sapien
gggaatctgatcttccacctacaaa

SEQ ID NO: 2528982 - DNA, 25 bp, Homo sapien
aatgaaaatcaggacattacctgtg

SEQ ID NO: 2528983 - DNA, 25 bp, Homo sapien
catagcatctggcatataataagtg

SEQ ID NO: 2528984 - DNA, 25 bp, Homo sapien
taagccttgacgacggccacaaaag

SEQ ID NO: 2528985 - DNA, 25 bp, Homo sapien
tacaagctgacctgtatatgcgtct

SEQ ID NO: 2528986 - DNA, 25 bp, Homo sapien
gatgtgtgtggaagcctacagccat

SEQ ID NO: 2528987 - DNA, 25 bp, Homo sapien
cgtttgacttgttatggccctgtga

SEQ ID NO: 2528988 - DNA, 25 bp, Homo sapien
cattttgcacccaaagaggttaggg

SEQ ID NO: 2528989 - DNA, 25 bp, Homo sapien
ctgcagggagccgtgtaaatctccc

SEQ ID NO: 2528990 - DNA, 25 bp, Homo sapien
ttactcttggcactaaacccttggc

SEQ ID NO: 2528991 - DNA, 25 bp, Homo sapien
caaggcttaataaatatggtatgca

SEQ ID NO: 2528992 - DNA, 25 bp, Homo sapien
tctgtgacatcaattggaggtgaca

SEQ ID NO: 2528993 - DNA, 25 bp, Homo sapien
ctctgtgacatcaattggaggtgac

SEQ ID NO: 2528994 - DNA, 25 bp, Homo sapien
tcaagaatgggctggcgccttaatt

SEQ ID NO: 2528995 - DNA, 25 bp, Homo sapien
ggctggcgccttaattgcttctctc

SEQ ID NO: 2528996 - DNA, 25 bp, Homo sapien
gcacgtacaactgtgctctgctaac

SEQ ID NO: 2528997 - DNA, 25 bp, Homo sapien
aggcacgtacaactgtgctctgcta

SEQ ID NO: 2528998 - DNA, 25 bp, Homo sapien
ggcacgtacaactgtgctctgctaa

SEQ ID NO: 2528999 - DNA, 25 bp, Homo sapien
taggcacgtacaactgtgctctgct

SEQ ID NO: 2529000 - DNA, 25 bp, Homo sapien
gcaactctgacatgtggcaccttct

SEQ ID NO: 2529001 - DNA, 25 bp, Homo sapien
ccacataggcctcatacccaatcca

SEQ ID NO: 2529002 - DNA, 25 bp, Homo sapien
tattcaccgcaactctgacatgtgg

SEQ ID NO: 2529003 - DNA, 25 bp, Homo sapien
acaccagtattcaccgcaactctga

SEQ ID NO: 2529004 - DNA, 25 bp, Homo sapien
tttctctggggtcacactccttcct

SEQ ID NO: 2529005 - DNA, 25 bp, Homo sapien
accattactccccttatcctgctga

SEQ ID NO: 2529006 - DNA, 25 bp, Homo sapien
tttgtctgcatctcataggtttctc

SEQ ID NO: 2529007 - DNA, 25 bp, Homo sapien
tctcaccattactccccttatcctg

SEQ ID NO: 2529008 - DNA, 25 bp, Homo sapien
catgggaacccaggatttctctcct

SEQ ID NO: 2529009 - DNA, 25 bp, Homo sapien
actgctgggtggaactcccattcag

SEQ ID NO: 2529010 - DNA, 25 bp, Homo sapien
tccaggacatgggaacccaggattt

SEQ ID NO: 2529011 - DNA, 25 bp, Homo sapien
gcaggtttcccaaggttgggcagga

SEQ ID NO: 2529012 - DNA, 25 bp, Homo sapien
cctgtgacggtgtcaaaaggcatgt

SEQ ID NO: 2529013 - DNA, 25 bp, Homo sapien
gcatgtgttcatgtttaattccatc

SEQ ID NO: 2529014 - DNA, 25 bp, Homo sapien
aggcatgtgttcatgtttaattcca

SEQ ID NO: 2529015 - DNA, 25 bp, Homo sapien
ggcatgtgttcatgtttaattccat

SEQ ID NO: 2529016 - DNA, 25 bp, Homo sapien
tggtcacagcggcatcccagctgtc

SEQ ID NO: 2529017 - DNA, 25 bp, Homo sapien
ttggtcacagcggcatcccagctgt

SEQ ID NO: 2529018 - DNA, 25 bp, Homo sapien
gaattatttgggtttgaaatgaaca

SEQ ID NO: 2529019 - DNA, 25 bp, Homo sapien
tgcatgcagatgcattccggcccca

SEQ ID NO: 2529020 - DNA, 25 bp, Homo sapien
aacatattctgctgggcatggagga

SEQ ID NO: 2529021 - DNA, 25 bp, Homo sapien
tcccattaagcttagtagcctgagg

SEQ ID NO: 2529022 - DNA, 25 bp, Homo sapien
tggccagccataaatccattgctcg

SEQ ID NO: 2529023 - DNA, 25 bp, Homo sapien
tgcatggccagccataaatccattg

SEQ ID NO: 2529024 - DNA, 25 bp, Homo sapien
cattgctcggtgagggttcttccca

SEQ ID NO: 2529025 - DNA, 25 bp, Homo sapien
cataaatccattgctcggtgagggt

SEQ ID NO: 2529026 - DNA, 25 bp, Homo sapien
agagcacggagtttattgccctgta

SEQ ID NO: 2529027 - DNA, 25 bp, Homo sapien
cacggagtttattgccctgtaatca

SEQ ID NO: 2529028 - DNA, 25 bp, Homo sapien
tttattgccctgtaatcaaaggact

SEQ ID NO: 2529029 - DNA, 25 bp, Homo sapien
gagtttattgccctgtaatcaaagg

SEQ ID NO: 2529030 - DNA, 25 bp, Homo sapien
caatgagaagatcatccggatgctc

SEQ ID NO: 2529031 - DNA, 25 bp, Homo sapien
gagctggaagtttgagctaccttcc

SEQ ID NO: 2529032 - DNA, 25 bp, Homo sapien
tccttcctacccacacaatgagaag

SEQ ID NO: 2529033 - DNA, 25 bp, Homo sapien
aaacacgggtagatgatgtgacaag

SEQ ID NO: 2529034 - DNA, 25 bp, Homo sapien
ctcatgtagatacaagggcctggca

SEQ ID NO: 2529035 - DNA, 25 bp, Homo sapien
cacagtctgttttgggtccgcccaa

SEQ ID NO: 2529036 - DNA, 25 bp, Homo sapien
tcttttagctccaaccacagtctgt

SEQ ID NO: 2529037 - DNA, 25 bp, Homo sapien
gggtccgcccaagtttctgctcatg

SEQ ID NO: 2529038 - DNA, 25 bp, Homo sapien
cactctgtggtttttgtagatttcc

SEQ ID NO: 2529039 - DNA, 25 bp, Homo sapien
gttgcccactctccatcaagcccat

SEQ ID NO: 2529040 - DNA, 25 bp, Homo sapien
tgtacaatgacatcagcttctgttt

SEQ ID NO: 2529041 - DNA, 25 bp, Homo sapien
gatttccttttcacatgtacaatga

SEQ ID NO: 2529042 - DNA, 25 bp, Homo sapien
ctcccaaagtgctttttgtcgaatt

SEQ ID NO: 2529043 - DNA, 25 bp, Homo sapien
cctcccaaagtgctttttgtcgaat

SEQ ID NO: 2529044 - DNA, 25 bp, Homo sapien
cccagaaggtctggaattgacccta

SEQ ID NO: 2529045 - DNA, 25 bp, Homo sapien
cctaagacatcctgatacacgatgt

SEQ ID NO: 2529046 - DNA, 25 bp, Homo sapien
caatgacacgtaagtttggatgcca

SEQ ID NO: 2529047 - DNA, 25 bp, Homo sapien
tgccagtactttgatatgtcaaggg

SEQ ID NO: 2529048 - DNA, 25 bp, Homo sapien
ttcagaagattgacaactggacatc

SEQ ID NO: 2529049 - DNA, 25 bp, Homo sapien
cttcagaagattgacaactggacat

SEQ ID NO: 2529050 - DNA, 25 bp, Homo sapien
ccagggtctgtccagtcaggaacag

SEQ ID NO: 2529051 - DNA, 25 bp, Homo sapien
gtccagtcaggaacagtttcagaat

SEQ ID NO: 2529052 - DNA, 25 bp, Homo sapien
tacagctcagtccttgtgtggaaat

SEQ ID NO: 2529053 - DNA, 25 bp, Homo sapien
tggctacagctcagtccttgtgtgg

SEQ ID NO: 2529054 - DNA, 25 bp, Homo sapien
gctcagtccttgtgtggaaatttcc

SEQ ID NO: 2529055 - DNA, 25 bp, Homo sapien
gctacagctcagtccttgtgtggaa

SEQ ID NO: 2529056 - DNA, 25 bp, Homo sapien
caatttcatgcggtttgggacgaga

SEQ ID NO: 2529057 - DNA, 25 bp, Homo sapien
tggccatgcttctgattggaatgca

SEQ ID NO: 2529058 - DNA, 25 bp, Homo sapien
tgggacgagacgttgttccttgaaa

SEQ ID NO: 2529059 - DNA, 25 bp, Homo sapien
catttcacaaggtcatcgtcgtcag

SEQ ID NO: 2529060 - DNA, 25 bp, Homo sapien
ctgagaagttaagctttcaagctta

SEQ ID NO: 2529061 - DNA, 25 bp, Homo sapien
tgagaagttaagctttcaagcttag

SEQ ID NO: 2529062 - DNA, 25 bp, Homo sapien
ttttaggcttgttgtctttgtcatc

SEQ ID NO: 2529063 - DNA, 25 bp, Homo sapien
cattttaggcttgttgtctttgtca

SEQ ID NO: 2529064 - DNA, 25 bp, Homo sapien
ttcattttaggcttgttgtctttgt

SEQ ID NO: 2529065 - DNA, 25 bp, Homo sapien
tttaggcttgttgtctttgtcatct

SEQ ID NO: 2529066 - DNA, 25 bp, Homo sapien
cctatgagttatctcccaggcagca

SEQ ID NO: 2529067 - DNA, 25 bp, Homo sapien
tgctcccaagctgtgcatatggcct

SEQ ID NO: 2529068 - DNA, 25 bp, Homo sapien
agcacagccacccaggcggaatgat

SEQ ID NO: 2529069 - DNA, 25 bp, Homo sapien
agttctgtaaaaggacttcctgtgc

SEQ ID NO: 2529070 - DNA, 25 bp, Homo sapien
ccgagtgtttgccaaatttgcctgc

SEQ ID NO: 2529071 - DNA, 25 bp, Homo sapien
ccctcaagctggaccaagggtgtct

SEQ ID NO: 2529072 - DNA, 25 bp, Homo sapien
cgtgatccggtttggtgatctgccc

SEQ ID NO: 2529073 - DNA, 25 bp, Homo sapien
tgcagctccactaaggctattgccg

SEQ ID NO: 2529074 - DNA, 25 bp, Homo sapien
taagatgcccgaaactcatgaccca

SEQ ID NO: 2529075 - DNA, 25 bp, Homo sapien
tataagatgcccgaaactcatgacc

SEQ ID NO: 2529076 - DNA, 25 bp, Homo sapien
ggctcccaggttttctataagatgc

SEQ ID NO: 2529077 - DNA, 25 bp, Homo sapien
ctaatcaggagttctaaaagcacat

SEQ ID NO: 2529078 - DNA, 25 bp, Homo sapien
tggacacatggatttcttagaagcc

SEQ ID NO: 2529079 - DNA, 25 bp, Homo sapien
tcctcatcccctgttctgtttgacc

SEQ ID NO: 2529080 - DNA, 25 bp, Homo sapien
tgtttgacccctcatcctttgccgg

SEQ ID NO: 2529081 - DNA, 25 bp, Homo sapien
ctttgggctgactccttctccgata

SEQ ID NO: 2529082 - DNA, 25 bp, Homo sapien
ctggagattgagcatactgttgtaa

SEQ ID NO: 2529083 - DNA, 25 bp, Homo sapien
tgtttggcaatgttaataatgtatc

SEQ ID NO: 2529084 - DNA, 25 bp, Homo sapien
caaatgtgactccattataaagttt

SEQ ID NO: 2529085 - DNA, 25 bp, Homo sapien
catggtttattaccaaatatgagaa

SEQ ID NO: 2529086 - DNA, 25 bp, Homo sapien
taaaaggataattggggcattggga

SEQ ID NO: 2529087 - DNA, 25 bp, Homo sapien
ggttttgccagatcattttgttacc

SEQ ID NO: 2529088 - DNA, 25 bp, Homo sapien
tcattttgctcatcagaacgtctcc

SEQ ID NO: 2529089 - DNA, 25 bp, Homo sapien
gaagttatgttgtaaatcagggtaa

SEQ ID NO: 2529090 - DNA, 25 bp, Homo sapien
tcactcctggtagatactaaagtca

SEQ ID NO: 2529091 - DNA, 25 bp, Homo sapien
agtcattgattagactgcagatgtc

SEQ ID NO: 2529092 - DNA, 25 bp, Homo sapien
agatgtcatagtgagtcaacaagga

SEQ ID NO: 2529093 - DNA, 25 bp, Homo sapien
atgtcatagtgagtcaacaaggaac

SEQ ID NO: 2529094 - DNA, 25 bp, Homo sapien
tgggaagaactaatcaccgtgaaag

SEQ ID NO: 2529095 - DNA, 25 bp, Homo sapien
tggagatttagagcggccttcctgg

SEQ ID NO: 2529096 - DNA, 25 bp, Homo sapien
agatcccttcatgggaagaactaat

SEQ ID NO: 2529097 - DNA, 25 bp, Homo sapien
tcctggtagaactgtaacaagatcc

SEQ ID NO: 2529098 - DNA, 25 bp, Homo sapien
agctcgggattgacgttactgccat

SEQ ID NO: 2529099 - DNA, 25 bp, Homo sapien
gccagagctcgggattgacgttact

SEQ ID NO: 2529100 - DNA, 25 bp, Homo sapien
cacctcaagaatgccagagctcggg

SEQ ID NO: 2529101 - DNA, 25 bp, Homo sapien
ttctgcacctcaagaatgccagagc

SEQ ID NO: 2529102 - DNA, 25 bp, Homo sapien
aggctggcctgatatagtgggtccc

SEQ ID NO: 2529103 - DNA, 25 bp, Homo sapien
ggtgctgctgaccgcccacgcccgc

SEQ ID NO: 2529104 - DNA, 25 bp, Homo sapien
gctgctgaccgcccacgcccgccgc

SEQ ID NO: 2529105 - DNA, 25 bp, Homo sapien
cccacgcccgccgcccgcctttcat

SEQ ID NO: 2529106 - DNA, 25 bp, Homo sapien
gcccacgcccgccgcccgcctttca

SEQ ID NO: 2529107 - DNA, 25 bp, Homo sapien
cggaccacgccagcgcccgggctct

SEQ ID NO: 2529108 - DNA, 25 bp, Homo sapien
gccagcgcccgggctctcggcttcg

SEQ ID NO: 2529109 - DNA, 25 bp, Homo sapien
gctttcccaattgcccggaccacgc

SEQ ID NO: 2529110 - DNA, 25 bp, Homo sapien
ccaattgcccggaccacgccagcgc

SEQ ID NO: 2529111 - DNA, 25 bp, Homo sapien
ccaagtcactgattgatgaaaccaa

SEQ ID NO: 2529112 - DNA, 25 bp, Homo sapien
gaaggtttactaagcacagaccctg

SEQ ID NO: 2529113 - DNA, 25 bp, Homo sapien
tgcctcagctggaacttgcccggaa

SEQ ID NO: 2529114 - DNA, 25 bp, Homo sapien
tgttccagtattgcagtctcgggct

SEQ ID NO: 2529115 - DNA, 25 bp, Homo sapien
tcacacactggaacgcaaggtgtcc

SEQ ID NO: 2529116 - DNA, 25 bp, Homo sapien
cacacactggaacgcaaggtgtcca

SEQ ID NO: 2529117 - DNA, 25 bp, Homo sapien
acacactggaacgcaaggtgtccac

SEQ ID NO: 2529118 - DNA, 25 bp, Homo sapien
cacagccgtgactgtcatcagtgcc

SEQ ID NO: 2529119 - DNA, 25 bp, Homo sapien
ctgtcatcagtgccaccatgtgcag

SEQ ID NO: 2529120 - DNA, 25 bp, Homo sapien
tgatcagccacagccgtgactgtca

SEQ ID NO: 2529121 - DNA, 25 bp, Homo sapien
ctgtctcctccagtggtgtcctcat

SEQ ID NO: 2529122 - DNA, 25 bp, Homo sapien
gagctcagtggacagtattgctgct

SEQ ID NO: 2529123 - DNA, 25 bp, Homo sapien
tagtaattcgcaaaagcacaggggt

SEQ ID NO: 2529124 - DNA, 25 bp, Homo sapien
ggtgatttagggtcttgagctcagt

SEQ ID NO: 2529125 - DNA, 25 bp, Homo sapien
tagggtcttgagctcagtggacagt

SEQ ID NO: 2529126 - DNA, 25 bp, Homo sapien
ggagctgctcaaccctactgagttg

SEQ ID NO: 2529127 - DNA, 25 bp, Homo sapien
tgtttgcacggcactgtggagctgc

SEQ ID NO: 2529128 - DNA, 25 bp, Homo sapien
aaagaatagtggtgtcagcgactgg

SEQ ID NO: 2529129 - DNA, 25 bp, Homo sapien
gattccattcataggaggtgcctag

SEQ ID NO: 2529130 - DNA, 25 bp, Homo sapien
agtagaaatgatatctccaatgccc

SEQ ID NO: 2529131 - DNA, 25 bp, Homo sapien
gcctaaaatctctgaggctaccagg

SEQ ID NO: 2529132 - DNA, 25 bp, Homo sapien
catttcacatgcaggtccccttctg

SEQ ID NO: 2529133 - DNA, 25 bp, Homo sapien
gctaccaggagccatttcacatgca

SEQ ID NO: 2529134 - DNA, 25 bp, Homo sapien
tctcctttggcctcatgctctgcaa

SEQ ID NO: 2529135 - DNA, 25 bp, Homo sapien
ggcctcatgctctgcaagatccttt

SEQ ID NO: 2529136 - DNA, 25 bp, Homo sapien
aggctacctcgacacactgttccga

SEQ ID NO: 2529137 - DNA, 25 bp, Homo sapien
gatcttccctcttgtagctaagccc

SEQ ID NO: 2529138 - DNA, 25 bp, Homo sapien
ggggcgtctgattctgtgtcctcat

SEQ ID NO: 2529139 - DNA, 25 bp, Homo sapien
cggggcgtctgattctgtgtcctca

SEQ ID NO: 2529140 - DNA, 25 bp, Homo sapien
tcggggcgtctgattctgtgtcctc

SEQ ID NO: 2529141 - DNA, 25 bp, Homo sapien
ctttatgcaccagtaaggaagtaca

SEQ ID NO: 2529142 - DNA, 25 bp, Homo sapien
tgtactggcccataggatcaccact

SEQ ID NO: 2529143 - DNA, 25 bp, Homo sapien
aattttaactcctactgcctgcctg

SEQ ID NO: 2529144 - DNA, 25 bp, Homo sapien
tgaagtacacctgacacaaaatgac

SEQ ID NO: 2529145 - DNA, 25 bp, Homo sapien
taagaatgctacatagttcactgat

SEQ ID NO: 2529146 - DNA, 25 bp, Homo sapien
tctatttatattaggcaacactgcc

SEQ ID NO: 2529147 - DNA, 25 bp, Homo sapien
caacactgcccatgaaataggacac

SEQ ID NO: 2529148 - DNA, 25 bp, Homo sapien
taggacacaccttgttttgaagatt

SEQ ID NO: 2529149 - DNA, 25 bp, Homo sapien
tctttgggctcacggaaaatgacgg

SEQ ID NO: 2529150 - DNA, 25 bp, Homo sapien
gaatttcaagcacactccaggacag

SEQ ID NO: 2529151 - DNA, 25 bp, Homo sapien
gggtaacagcccagacaagtgccat

SEQ ID NO: 2529152 - DNA, 25 bp, Homo sapien
aaagaggtatacactaggcagcagg

SEQ ID NO: 2529153 - DNA, 25 bp, Homo sapien
ttaaaaactcattgacgaactgtac

SEQ ID NO: 2529154 - DNA, 25 bp, Homo sapien
aagatttttagtggttctttgatgc

SEQ ID NO: 2529155 - DNA, 25 bp, Homo sapien
actcattgacgaactgtacttttat

SEQ ID NO: 2529156 - DNA, 25 bp, Homo sapien
tgatgcccagttggtaacaaatacc

SEQ ID NO: 2529157 - DNA, 25 bp, Homo sapien
tagctgcggttgctgaattggtaca

SEQ ID NO: 2529158 - DNA, 25 bp, Homo sapien
caacgtatgagctaagcattgaagc

SEQ ID NO: 2529159 - DNA, 25 bp, Homo sapien
tgaatatagtaccacccaacgtatg

SEQ ID NO: 2529160 - DNA, 25 bp, Homo sapien
tctgggtgatgcaaactgctgaagg

SEQ ID NO: 2529161 - DNA, 25 bp, Homo sapien
gaacatgtggcttttcctagctgat

SEQ ID NO: 2529162 - DNA, 25 bp, Homo sapien
tggacccaagaagggaacagcatgg

SEQ ID NO: 2529163 - DNA, 25 bp, Homo sapien
ccaacagggacttgcgtgtggtgta

SEQ ID NO: 2529164 - DNA, 25 bp, Homo sapien
gaaatataccctcgcaactcctgct

SEQ ID NO: 2529165 - DNA, 25 bp, Homo sapien
ttctcactctgtagcaaatccaggg

SEQ ID NO: 2529166 - DNA, 25 bp, Homo sapien
catacaagcatgctggacaatccca

SEQ ID NO: 2529167 - DNA, 25 bp, Homo sapien
taaaaagtcccaccacaaaggctca

SEQ ID NO: 2529168 - DNA, 25 bp, Homo sapien
gacaccagatgaaaactaccctttg

SEQ ID NO: 2529169 - DNA, 25 bp, Homo sapien
cctgctgagaaggaatcacagtgca

SEQ ID NO: 2529170 - DNA, 25 bp, Homo sapien
cactcatgctaatctggatgggaac

SEQ ID NO: 2529171 - DNA, 25 bp, Homo sapien
tatggagttcaggtaacccacaggc

SEQ ID NO: 2529172 - DNA, 25 bp, Homo sapien
gactcttgtgcaaaaggacactgtc

SEQ ID NO: 2529173 - DNA, 25 bp, Homo sapien
gagccaggacagagcgttgtactgc

SEQ ID NO: 2529174 - DNA, 25 bp, Homo sapien
tattcatgatggcattgtacaactg

SEQ ID NO: 2529175 - DNA, 25 bp, Homo sapien
tgtacaactgagtgagcaccacaaa

SEQ ID NO: 2529176 - DNA, 25 bp, Homo sapien
caccacaaagtggacgggaaggcag

SEQ ID NO: 2529177 - DNA, 25 bp, Homo sapien
ggtgtggaacccgctgagaattcct

SEQ ID NO: 2529178 - DNA, 25 bp, Homo sapien
tggcaggcagaagttcgtctgtctg

SEQ ID NO: 2529179 - DNA, 25 bp, Homo sapien
tttggagtcaagagggtgtggaacc

SEQ ID NO: 2529180 - DNA, 25 bp, Homo sapien
tgtctgtgctactgaaatgtggtga

SEQ ID NO: 2529181 - DNA, 25 bp, Homo sapien
cttctctaatgaagaatgtgaagag

SEQ ID NO: 2529182 - DNA, 25 bp, Homo sapien
ctctaatgaagaatgtgaagagtcc

SEQ ID NO: 2529183 - DNA, 25 bp, Homo sapien
tctctaatgaagaatgtgaagagtc

SEQ ID NO: 2529184 - DNA, 25 bp, Homo sapien
tcttctctaatgaagaatgtgaaga

SEQ ID NO: 2529185 - DNA, 25 bp, Homo sapien
gctgctttagctcctctggtgcttc

SEQ ID NO: 2529186 - DNA, 25 bp, Homo sapien
tctagaaagaagacgctcaccctgg

SEQ ID NO: 2529187 - DNA, 25 bp, Homo sapien
caaaatacccaagggccaggggctg

SEQ ID NO: 2529188 - DNA, 25 bp, Homo sapien
cactggttttgagcctggggacacg

SEQ ID NO: 2529189 - DNA, 25 bp, Homo sapien
gccagtagtgcaagatctgctcaca

SEQ ID NO: 2529190 - DNA, 25 bp, Homo sapien
tgcagcattccccttaataagagac

SEQ ID NO: 2529191 - DNA, 25 bp, Homo sapien
tgctgcacacatagagaagatacca

SEQ ID NO: 2529192 - DNA, 25 bp, Homo sapien
gcagtgagtgatcccctttgtggca

SEQ ID NO: 2529193 - DNA, 25 bp, Homo sapien
ggttcccagtcattaatatgccaat

SEQ ID NO: 2529194 - DNA, 25 bp, Homo sapien
ccgactatgctggaagtgagagccc

SEQ ID NO: 2529195 - DNA, 25 bp, Homo sapien
ttcccagtcattaatatgccaatat

SEQ ID NO: 2529196 - DNA, 25 bp, Homo sapien
gaggttcccagtcattaatatgcca

SEQ ID NO: 2529197 - DNA, 25 bp, Homo sapien
gaatggaaggtcaacaaacatatca

SEQ ID NO: 2529198 - DNA, 25 bp, Homo sapien
aatggaaggtcaacaaacatatcat

SEQ ID NO: 2529199 - DNA, 25 bp, Homo sapien
gggaatggaaggtcaacaaacatat

SEQ ID NO: 2529200 - DNA, 25 bp, Homo sapien
ggaatggaaggtcaacaaacatatc

SEQ ID NO: 2529201 - DNA, 25 bp, Homo sapien
gtgtgtacaagaagcatcttgaggg

SEQ ID NO: 2529202 - DNA, 25 bp, Homo sapien
tgggaacaccaagatgtgtgtacaa

SEQ ID NO: 2529203 - DNA, 25 bp, Homo sapien
agtgcagtacttcggccaaaaacag

SEQ ID NO: 2529204 - DNA, 25 bp, Homo sapien
tggggctaaacccatcttcattggg

SEQ ID NO: 2529205 - DNA, 25 bp, Homo sapien
cggcagagattccacacatccggca

SEQ ID NO: 2529206 - DNA, 25 bp, Homo sapien
ctggcatcactacaaaggacccctg

SEQ ID NO: 2529207 - DNA, 25 bp, Homo sapien
catccggcacacatccttgagcttt

SEQ ID NO: 2529208 - DNA, 25 bp, Homo sapien
gattgtctgtagtgaacattctcca

SEQ ID NO: 2529209 - DNA, 25 bp, Homo sapien
tttggacaatccctatgcaccactc

SEQ ID NO: 2529210 - DNA, 25 bp, Homo sapien
tgtagtccaattttacgtgcagata

SEQ ID NO: 2529211 - DNA, 25 bp, Homo sapien
ttacaactctccagggtagagatgt

SEQ ID NO: 2529212 - DNA, 25 bp, Homo sapien
tgcagatactttactcctccgtgac

SEQ ID NO: 2529213 - DNA, 25 bp, Homo sapien
gacaatagcccacgaagagcacatt

SEQ ID NO: 2529214 - DNA, 25 bp, Homo sapien
aagccagcgctggtcgtgagacaga

SEQ ID NO: 2529215 - DNA, 25 bp, Homo sapien
cacattgtatttctggctcgcctca

SEQ ID NO: 2529216 - DNA, 25 bp, Homo sapien
gcaggtctctaataattccccatgg

SEQ ID NO: 2529217 - DNA, 25 bp, Homo sapien
tgtgccacccagagaatgagaattg

SEQ ID NO: 2529218 - DNA, 25 bp, Homo sapien
ttagcacctaatacagcacctggca

SEQ ID NO: 2529219 - DNA, 25 bp, Homo sapien
tatgtgcatcacaaaacgagggacc

SEQ ID NO: 2529220 - DNA, 25 bp, Homo sapien
catttatatacggaagcactgaggc

SEQ ID NO: 2529221 - DNA, 25 bp, Homo sapien
tcttgagggtcatctcaatgctggc

SEQ ID NO: 2529222 - DNA, 25 bp, Homo sapien
cccgtgagggatttaatgtggatct

SEQ ID NO: 2529223 - DNA, 25 bp, Homo sapien
gcctgcactggcagtacactgaaaa

SEQ ID NO: 2529224 - DNA, 25 bp, Homo sapien
tgtgtaggcagtggtcgcctgcact

SEQ ID NO: 2529225 - DNA, 25 bp, Homo sapien
gatctaacacactaacaagcaagct

SEQ ID NO: 2529226 - DNA, 25 bp, Homo sapien
tacaggtattaccatggccccaaaa

SEQ ID NO: 2529227 - DNA, 25 bp, Homo sapien
gagaggtaacctcagccttaaaata

SEQ ID NO: 2529228 - DNA, 25 bp, Homo sapien
ggaaacggcatgaattccttaccac

SEQ ID NO: 2529229 - DNA, 25 bp, Homo sapien
ctgatgaaaggaaataagtgtaacc

SEQ ID NO: 2529230 - DNA, 25 bp, Homo sapien
tacactataaagctgtcaaaggtgc

SEQ ID NO: 2529231 - DNA, 25 bp, Homo sapien
gaaaataagcatactcattcactga

SEQ ID NO: 2529232 - DNA, 25 bp, Homo sapien
gaaacccaaacatccgaagcattgt

SEQ ID NO: 2529233 - DNA, 25 bp, Homo sapien
cactgcaaaggtctcccattatata

SEQ ID NO: 2529234 - DNA, 25 bp, Homo sapien
tcagacctcatgtgatgtattgcag

SEQ ID NO: 2529235 - DNA, 25 bp, Homo sapien
caagtggaaaattccgttatcagac

SEQ ID NO: 2529236 - DNA, 25 bp, Homo sapien
gaatgccaataaaacgccacaagtg

SEQ ID NO: 2529237 - DNA, 25 bp, Homo sapien
ggtaaattatccagcatttctgtgt

SEQ ID NO: 2529238 - DNA, 25 bp, Homo sapien
tgcagcatacgtgaacgggtccacc

SEQ ID NO: 2529239 - DNA, 25 bp, Homo sapien
aacgggtccaccatgtaaatgacaa

SEQ ID NO: 2529240 - DNA, 25 bp, Homo sapien
tgtgtagcagcgcatcaagctcaac

SEQ ID NO: 2529241 - DNA, 25 bp, Homo sapien
gcagagtcaggctccgtgggaattc

SEQ ID NO: 2529242 - DNA, 25 bp, Homo sapien
ctgcagagtcaggctccgtgggaat

SEQ ID NO: 2529243 - DNA, 25 bp, Homo sapien
ctccgtgggaattcctattctctcc

SEQ ID NO: 2529244 - DNA, 25 bp, Homo sapien
cgtgggaattcctattctctccctt

SEQ ID NO: 2529245 - DNA, 25 bp, Homo sapien
acaaaagggctcaattctagagcac

SEQ ID NO: 2529246 - DNA, 25 bp, Homo sapien
aaaagggctcaattctagagcacac

SEQ ID NO: 2529247 - DNA, 25 bp, Homo sapien
aaatataaattacacgaacatgaaa

SEQ ID NO: 2529248 - DNA, 25 bp, Homo sapien
taaattacacgaacatgaaaaacaa

SEQ ID NO: 2529249 - DNA, 25 bp, Homo sapien
tattcgaggtgggattaaatgcact

SEQ ID NO: 2529250 - DNA, 25 bp, Homo sapien
tctcttgtccatcctgtgagggctg

SEQ ID NO: 2529251 - DNA, 25 bp, Homo sapien
gatccatttggagctaagggcccag

SEQ ID NO: 2529252 - DNA, 25 bp, Homo sapien
taggtggtatcaataggctgctatc

SEQ ID NO: 2529253 - DNA, 25 bp, Homo sapien
gatggcggcaaacttgcgcataaag

SEQ ID NO: 2529254 - DNA, 25 bp, Homo sapien
tgtgccacagtttttcccacgcgca

SEQ ID NO: 2529255 - DNA, 25 bp, Homo sapien
gatcccgtcacgtagcactttgcag

SEQ ID NO: 2529256 - DNA, 25 bp, Homo sapien
tcctcgccgctccaaggctggttaa

SEQ ID NO: 2529257 - DNA, 25 bp, Homo sapien
catatgggtccaacaagagcctctc

SEQ ID NO: 2529258 - DNA, 25 bp, Homo sapien
tcgtatacagcactcaagtccctga

SEQ ID NO: 2529259 - DNA, 25 bp, Homo sapien
gaagaaagttttggctccttcgagc

SEQ ID NO: 2529260 - DNA, 25 bp, Homo sapien
tcccaaaacggcaaggagaatggcg

SEQ ID NO: 2529261 - DNA, 25 bp, Homo sapien
agtggggatgggcaacggctcagga

SEQ ID NO: 2529262 - DNA, 25 bp, Homo sapien
gatgggcaacggctcaggagattct

SEQ ID NO: 2529263 - DNA, 25 bp, Homo sapien
cagagtggggatgggcaacggctca

SEQ ID NO: 2529264 - DNA, 25 bp, Homo sapien
gggatgggcaacggctcaggagatt

SEQ ID NO: 2529265 - DNA, 25 bp, Homo sapien
ggtccctgcacatgctggatgttct

SEQ ID NO: 2529266 - DNA, 25 bp, Homo sapien
gccattttatggaactgctgccaag

SEQ ID NO: 2529267 - DNA, 25 bp, Homo sapien
ggtcctgcccgtgcgcttcttttgg

SEQ ID NO: 2529268 - DNA, 25 bp, Homo sapien
aacagcatacgaaccacatcctggg

SEQ ID NO: 2529269 - DNA, 25 bp, Homo sapien
cgattgttagaggaaatgtagtcca

SEQ ID NO: 2529270 - DNA, 25 bp, Homo sapien
gagcttcgtccacttttccaccagt

SEQ ID NO: 2529271 - DNA, 25 bp, Homo sapien
cgcattaaagcattccgtccagtaa

SEQ ID NO: 2529272 - DNA, 25 bp, Homo sapien
cattattatctgcttgcacccggtc

SEQ ID NO: 2529273 - DNA, 25 bp, Homo sapien
ggaggagaaggcttatgggtggctc

SEQ ID NO: 2529274 - DNA, 25 bp, Homo sapien
aggaggagaaggcttatgggtggct

SEQ ID NO: 2529275 - DNA, 25 bp, Homo sapien
gaggaggagaaggcttatgggtggc

SEQ ID NO: 2529276 - DNA, 25 bp, Homo sapien
gacacatcattaagcgcctctctgc

SEQ ID NO: 2529277 - DNA, 25 bp, Homo sapien
taaacccacaggtacagcggtactg

SEQ ID NO: 2529278 - DNA, 25 bp, Homo sapien
gaattgtagccaagtttgcggttca

SEQ ID NO: 2529279 - DNA, 25 bp, Homo sapien
tcacggaatcggagagaatcagggt

SEQ ID NO: 2529280 - DNA, 25 bp, Homo sapien
tgcccccacctctgggagttcttgg

SEQ ID NO: 2529281 - DNA, 25 bp, Homo sapien
ggtggcgggctccacagagttgagg

SEQ ID NO: 2529282 - DNA, 25 bp, Homo sapien
ggctggtgatccttgatcggtgcta

SEQ ID NO: 2529283 - DNA, 25 bp, Homo sapien
acttaacagacccttgaccactggc

SEQ ID NO: 2529284 - DNA, 25 bp, Homo sapien
gctggggcagcgctgttcaacgtca

SEQ ID NO: 2529285 - DNA, 25 bp, Homo sapien
ggcagcgctgttcaacgtcacgggt

SEQ ID NO: 2529286 - DNA, 25 bp, Homo sapien
tgttcaacgtcacgggtgtgttcat

SEQ ID NO: 2529287 - DNA, 25 bp, Homo sapien
tcctgccccactattgctggctggg

SEQ ID NO: 2529288 - DNA, 25 bp, Homo sapien
agatagtctggatctgctaggctcc

SEQ ID NO: 2529289 - DNA, 25 bp, Homo sapien
tagtctggatctgctaggctcccaa

SEQ ID NO: 2529290 - DNA, 25 bp, Homo sapien
gtggtgtgttcagatagtctggatc

SEQ ID NO: 2529291 - DNA, 25 bp, Homo sapien
tgtggtgtgttcagatagtctggat

SEQ ID NO: 2529292 - DNA, 25 bp, Homo sapien
tgtatcagagtttccagcttccagc

SEQ ID NO: 2529293 - DNA, 25 bp, Homo sapien
atcagagtttccagcttccagcagc

SEQ ID NO: 2529294 - DNA, 25 bp, Homo sapien
gtatcagagtttccagcttccagca

SEQ ID NO: 2529295 - DNA, 25 bp, Homo sapien
agagtttccagcttccagcagcttt

SEQ ID NO: 2529296 - DNA, 25 bp, Homo sapien
ctaaccccttatgcgccaaggtgtt

SEQ ID NO: 2529297 - DNA, 25 bp, Homo sapien
aaggtgttctaggtgtgttgtgcca

SEQ ID NO: 2529298 - DNA, 25 bp, Homo sapien
tgtgccaggatctagctgagtaagc

SEQ ID NO: 2529299 - DNA, 25 bp, Homo sapien
gagtacaatcggagcacagcagcag

SEQ ID NO: 2529300 - DNA, 25 bp, Homo sapien
tcattagtcgttgaagcattgtgga

SEQ ID NO: 2529301 - DNA, 25 bp, Homo sapien
agcacactctttatactgctggtgc

SEQ ID NO: 2529302 - DNA, 25 bp, Homo sapien
cacggtacttctacagtcattagtc

SEQ ID NO: 2529303 - DNA, 25 bp, Homo sapien
caggcgctcagggtgcttttcagca

SEQ ID NO: 2529304 - DNA, 25 bp, Homo sapien
gcaagtgtagcttcctaagtctagg

SEQ ID NO: 2529305 - DNA, 25 bp, Homo sapien
gaggctgaggctggaccacaaattt

SEQ ID NO: 2529306 - DNA, 25 bp, Homo sapien
gaaggtcacaaacttgcagcccaga

SEQ ID NO: 2529307 - DNA, 25 bp, Homo sapien
tatattgcttacctgaccacagcag

SEQ ID NO: 2529308 - DNA, 25 bp, Homo sapien
cttcagaggtagcaaacaatggctc

SEQ ID NO: 2529309 - DNA, 25 bp, Homo sapien
gaggaattgcccatgaaggccgaaa

SEQ ID NO: 2529310 - DNA, 25 bp, Homo sapien
aatggctcggcaacatcttcagtgg

SEQ ID NO: 2529311 - DNA, 25 bp, Homo sapien
tggagcaaacatggaggatcccaca

SEQ ID NO: 2529312 - DNA, 25 bp, Homo sapien
gttgtgttgaaaccatactgaccat

SEQ ID NO: 2529313 - DNA, 25 bp, Homo sapien
cttccattttgaattctgtgagttg

SEQ ID NO: 2529314 - DNA, 25 bp, Homo sapien
ctcgggcttgggacttcctaatcca

SEQ ID NO: 2529315 - DNA, 25 bp, Homo sapien
ccatactgaccatagggctctccat

SEQ ID NO: 2529316 - DNA, 25 bp, Homo sapien
gagctgatcccatctttataattca

SEQ ID NO: 2529317 - DNA, 25 bp, Homo sapien
catgcctaatgctgtcactgtctct

SEQ ID NO: 2529318 - DNA, 25 bp, Homo sapien
gtcactgtctctgagctgatcccat

SEQ ID NO: 2529319 - DNA, 25 bp, Homo sapien
aatgctgtcactgtctctgagctga

SEQ ID NO: 2529320 - DNA, 25 bp, Homo sapien
aaagatggtggagtgggaaacatcc

SEQ ID NO: 2529321 - DNA, 25 bp, Homo sapien
tggtggagtgggaaacatcctttgc

SEQ ID NO: 2529322 - DNA, 25 bp, Homo sapien
aacatcctttgcaagtctgcaactg

SEQ ID NO: 2529323 - DNA, 25 bp, Homo sapien
gtggagtgggaaacatcctttgcaa

SEQ ID NO: 2529324 - DNA, 25 bp, Homo sapien
ccaagaggtcggtcttctgtcccaa

SEQ ID NO: 2529325 - DNA, 25 bp, Homo sapien
catttttgatgagcgcagagcaggt

SEQ ID NO: 2529326 - DNA, 25 bp, Homo sapien
catccttcccaagaggtcggtcttc

SEQ ID NO: 2529327 - DNA, 25 bp, Homo sapien
ggcatttttgatgagcgcagagcag

SEQ ID NO: 2529328 - DNA, 25 bp, Homo sapien
aaaaacaaaccaagtgcattactgg

SEQ ID NO: 2529329 - DNA, 25 bp, Homo sapien
gcattactgggcaagattatcttta

SEQ ID NO: 2529330 - DNA, 25 bp, Homo sapien
ccaagtgcattactgggcaagatta

SEQ ID NO: 2529331 - DNA, 25 bp, Homo sapien
tctctgatctgttattcaaaaacaa

SEQ ID NO: 2529332 - DNA, 25 bp, Homo sapien
caatatattctaaggtaaaccgctc

SEQ ID NO: 2529333 - DNA, 25 bp, Homo sapien
agaataagttcagtggcccagagca

SEQ ID NO: 2529334 - DNA, 25 bp, Homo sapien
tggtcatgaacagatcaggcaggcc

SEQ ID NO: 2529335 - DNA, 25 bp, Homo sapien
taaaccgctcatgtgattaaatgcc

SEQ ID NO: 2529336 - DNA, 25 bp, Homo sapien
cccaagttcgtcgtcatcagaatta

SEQ ID NO: 2529337 - DNA, 25 bp, Homo sapien
tatcaaagatgttgtctaagtcatg

SEQ ID NO: 2529338 - DNA, 25 bp, Homo sapien
tgtgtaaggctactggagccagctc

SEQ ID NO: 2529339 - DNA, 25 bp, Homo sapien
aaggtgccaaatctgttacctgtgt

SEQ ID NO: 2529340 - DNA, 25 bp, Homo sapien
ttcccatcaggcaccggcgtggaat

SEQ ID NO: 2529341 - DNA, 25 bp, Homo sapien
tccttggtaccaaatccatcctctg

SEQ ID NO: 2529342 - DNA, 25 bp, Homo sapien
ctggtgtagtgacatccttggtacc

SEQ ID NO: 2529343 - DNA, 25 bp, Homo sapien
caccggcgtggaatgacctggtgta

SEQ ID NO: 2529344 - DNA, 25 bp, Homo sapien
tgagcacaagtatgataaaccatgg

SEQ ID NO: 2529345 - DNA, 25 bp, Homo sapien
cacaaagaattagagggtagaatgg

SEQ ID NO: 2529346 - DNA, 25 bp, Homo sapien
gaatggaacttgttatgagcacaag

SEQ ID NO: 2529347 - DNA, 25 bp, Homo sapien
acatgaacaccaacccaaagtgtga

SEQ ID NO: 2529348 - DNA, 25 bp, Homo sapien
gcactgtacaagctatagcctggaa

SEQ ID NO: 2529349 - DNA, 25 bp, Homo sapien
ttaaaagaaatagggagcataggcc

SEQ ID NO: 2529350 - DNA, 25 bp, Homo sapien
gaatatataggtacagcgctcagca

SEQ ID NO: 2529351 - DNA, 25 bp, Homo sapien
gcgctcagcacagtaaggataagaa

SEQ ID NO: 2529352 - DNA, 25 bp, Homo sapien
tgttgtactgacatagatagaaacc

SEQ ID NO: 2529353 - DNA, 25 bp, Homo sapien
tgtactgacatagatagaaacccac

SEQ ID NO: 2529354 - DNA, 25 bp, Homo sapien
tagatagaaacccacaccatgctgg

SEQ ID NO: 2529355 - DNA, 25 bp, Homo sapien
tgacatagatagaaacccacaccat

SEQ ID NO: 2529356 - DNA, 25 bp, Homo sapien
ttctccgtcccttgtttgcatttct

SEQ ID NO: 2529357 - DNA, 25 bp, Homo sapien
tatatgggtcattcacttctcccaa

SEQ ID NO: 2529358 - DNA, 25 bp, Homo sapien
cagggaatctttctccgtcccttgt

SEQ ID NO: 2529359 - DNA, 25 bp, Homo sapien
cttcaaaggtatatgggtcattcac

SEQ ID NO: 2529360 - DNA, 25 bp, Homo sapien
ggggctgtttgtcttgccagatttt

SEQ ID NO: 2529361 - DNA, 25 bp, Homo sapien
aaggaagtggagtggctgcaactgg

SEQ ID NO: 2529362 - DNA, 25 bp, Homo sapien
tgttgtgatagaggcaatgggtcaa

SEQ ID NO: 2529363 - DNA, 25 bp, Homo sapien
ccaggttgttgtgatagaggcaatg

SEQ ID NO: 2529364 - DNA, 25 bp, Homo sapien
gtcaaatgacatgtgtgctaaccta

SEQ ID NO: 2529365 - DNA, 25 bp, Homo sapien
tccatatccggagtcaagaaggaca

SEQ ID NO: 2529366 - DNA, 25 bp, Homo sapien
tcatttactaactgcatggccctag

SEQ ID NO: 2529367 - DNA, 25 bp, Homo sapien
tttagaatgggtggctcaaaagagc

SEQ ID NO: 2529368 - DNA, 25 bp, Homo sapien
ctttgcaatgcagtgctctctgagt

SEQ ID NO: 2529369 - DNA, 25 bp, Homo sapien
ctccattttggcatcacatctctca

SEQ ID NO: 2529370 - DNA, 25 bp, Homo sapien
tccattttggcatcacatctctcac

SEQ ID NO: 2529371 - DNA, 25 bp, Homo sapien
tgatggtcctgcactgaaccctggt

SEQ ID NO: 2529372 - DNA, 25 bp, Homo sapien
tcatcactgggtgggagacgataac

SEQ ID NO: 2529373 - DNA, 25 bp, Homo sapien
tgatgactccgggttcgagggccta

SEQ ID NO: 2529374 - DNA, 25 bp, Homo sapien
tgcataattcttcggccacagaggg

SEQ ID NO: 2529375 - DNA, 25 bp, Homo sapien
ggtttgcagggaagcatacatggca

SEQ ID NO: 2529376 - DNA, 25 bp, Homo sapien
catctaacaagtctgtaggctggga

SEQ ID NO: 2529377 - DNA, 25 bp, Homo sapien
ggcagggcccaagcatgtagaaata

SEQ ID NO: 2529378 - DNA, 25 bp, Homo sapien
gacgaagtcggcacactatatgggt

SEQ ID NO: 2529379 - DNA, 25 bp, Homo sapien
taattccaggtagctaataaaaatg

SEQ ID NO: 2529380 - DNA, 25 bp, Homo sapien
taagtgaaaaaatctgggctaagga

SEQ ID NO: 2529381 - DNA, 25 bp, Homo sapien
ttaaatacactacagtttatatcct

SEQ ID NO: 2529382 - DNA, 25 bp, Homo sapien
tatgtatgtgctaaaggcgggcctt

SEQ ID NO: 2529383 - DNA, 25 bp, Homo sapien
gactctttgggttggatccacaaaa

SEQ ID NO: 2529384 - DNA, 25 bp, Homo sapien
gcaggattgctagcaggctcttctt

SEQ ID NO: 2529385 - DNA, 25 bp, Homo sapien
tgctagcaggctcttcttcaagagt

SEQ ID NO: 2529386 - DNA, 25 bp, Homo sapien
gatccacaaaatcccaagtagcagg

SEQ ID NO: 2529387 - DNA, 25 bp, Homo sapien
gactgtgcatcgttatcatccctcc

SEQ ID NO: 2529388 - DNA, 25 bp, Homo sapien
gaatcttccccgatctctttggact

SEQ ID NO: 2529389 - DNA, 25 bp, Homo sapien
agactcgatggaccatatgattgtg

SEQ ID NO: 2529390 - DNA, 25 bp, Homo sapien
attccttccagactcgatggaccat

SEQ ID NO: 2529391 - DNA, 25 bp, Homo sapien
ttacctagtatgtacaacaacacgg

SEQ ID NO: 2529392 - DNA, 25 bp, Homo sapien
tgcctggccttggatgtacttttct

SEQ ID NO: 2529393 - DNA, 25 bp, Homo sapien
tcgaccatggtggagtgcactgatg

SEQ ID NO: 2529394 - DNA, 25 bp, Homo sapien
cagacaatgtgtgctaaacttcgag

SEQ ID NO: 2529395 - DNA, 25 bp, Homo sapien
ggtccttcacactaccaagcccttg

SEQ ID NO: 2529396 - DNA, 25 bp, Homo sapien
ggcaacactctgaggaaccgggatg

SEQ ID NO: 2529397 - DNA, 25 bp, Homo sapien
agaggcatcccacagttacttgggt

SEQ ID NO: 2529398 - DNA, 25 bp, Homo sapien
tgaagggtaaaccatccgaacacca

SEQ ID NO: 2529399 - DNA, 25 bp, Homo sapien
tcatcatcatatcccaactcgtctt

SEQ ID NO: 2529400 - DNA, 25 bp, Homo sapien
tcttttttagcaccatcgggtagaa

SEQ ID NO: 2529401 - DNA, 25 bp, Homo sapien
aacaattacttcaactgccacaggg

SEQ ID NO: 2529402 - DNA, 25 bp, Homo sapien
gaaatactgccattcctcaatcaac

SEQ ID NO: 2529403 - DNA, 25 bp, Homo sapien
gcttggcctgttagcgtcccattta

SEQ ID NO: 2529404 - DNA, 25 bp, Homo sapien
tagcgtcccatttaagccataagga

SEQ ID NO: 2529405 - DNA, 25 bp, Homo sapien
tttaagccataaggacttaccagta

SEQ ID NO: 2529406 - DNA, 25 bp, Homo sapien
gcctgttagcgtcccatttaagcca

SEQ ID NO: 2529407 - DNA, 25 bp, Homo sapien
gaaatggtgcaggtgaagactgagc

SEQ ID NO: 2529408 - DNA, 25 bp, Homo sapien
tgaaatggtgcaggtgaagactgag

SEQ ID NO: 2529409 - DNA, 25 bp, Homo sapien
aaatggtgcaggtgaagactgagcc

SEQ ID NO: 2529410 - DNA, 25 bp, Homo sapien
tgatcaaataaattggctggtgctg

SEQ ID NO: 2529411 - DNA, 25 bp, Homo sapien
gatcaaataaattggctggtgctgg

SEQ ID NO: 2529412 - DNA, 25 bp, Homo sapien
atcaaataaattggctggtgctggg

SEQ ID NO: 2529413 - DNA, 25 bp, Homo sapien
ttgatcaaataaattggctggtgct

SEQ ID NO: 2529414 - DNA, 25 bp, Homo sapien
tcttccatcacgaataatctttatg

SEQ ID NO: 2529415 - DNA, 25 bp, Homo sapien
tgtcttcctcaatttgcttcaggta

SEQ ID NO: 2529416 - DNA, 25 bp, Homo sapien
tcaggtaacccaacgctgaagcacc

SEQ ID NO: 2529417 - DNA, 25 bp, Homo sapien
gaagcacctcctcttgaccatgcta

SEQ ID NO: 2529418 - DNA, 25 bp, Homo sapien
cctttgcttgcaggtatactgagtt

SEQ ID NO: 2529419 - DNA, 25 bp, Homo sapien
ggtcctttgcttgcaggtatactga

SEQ ID NO: 2529420 - DNA, 25 bp, Homo sapien
gactatgttgaggtcctttgcttgc

SEQ ID NO: 2529421 - DNA, 25 bp, Homo sapien
accactcacaaagactatgttgagg

SEQ ID NO: 2529422 - DNA, 25 bp, Homo sapien
gaaagaaacatagggacagacctct

SEQ ID NO: 2529423 - DNA, 25 bp, Homo sapien
tgtgaacaatcaaggatcaactgac

SEQ ID NO: 2529424 - DNA, 25 bp, Homo sapien
gctaaactgaaatggtgtaccttcc

SEQ ID NO: 2529425 - DNA, 25 bp, Homo sapien
gcagtcatggtggaattcttgccag

SEQ ID NO: 2529426 - DNA, 25 bp, Homo sapien
aacatttggcattagcctttcagag

SEQ ID NO: 2529427 - DNA, 25 bp, Homo sapien
tttcagagctagcagctggcactca

SEQ ID NO: 2529428 - DNA, 25 bp, Homo sapien
tcatactcagcactgttgcaaaatg

SEQ ID NO: 2529429 - DNA, 25 bp, Homo sapien
ggcactgcttagcacaaatatagca

SEQ ID NO: 2529430 - DNA, 25 bp, Homo sapien
tacatcagctacatgattccaagtg

SEQ ID NO: 2529431 - DNA, 25 bp, Homo sapien
gaagttttgcccatgttctactgcc

SEQ ID NO: 2529432 - DNA, 25 bp, Homo sapien
gataacggtgtcaggaaacaagccc

SEQ ID NO: 2529433 - DNA, 25 bp, Homo sapien
tgaggtaggtttccagtacagcctt

SEQ ID NO: 2529434 - DNA, 25 bp, Homo sapien
ttctactagacatatgctgacagga

SEQ ID NO: 2529435 - DNA, 25 bp, Homo sapien
gaggcagtgcctaagttacagacag

SEQ ID NO: 2529436 - DNA, 25 bp, Homo sapien
tgttcccaaggaaacagctaatgtc

SEQ ID NO: 2529437 - DNA, 25 bp, Homo sapien
tacagacagccattaccgttattga

SEQ ID NO: 2529438 - DNA, 25 bp, Homo sapien
tacacatggaacaggtatcatcaat

SEQ ID NO: 2529439 - DNA, 25 bp, Homo sapien
gagacactctaataaccagtggcag

SEQ ID NO: 2529440 - DNA, 25 bp, Homo sapien
taaatggttacacaagctctacgta

SEQ ID NO: 2529441 - DNA, 25 bp, Homo sapien
cagtggcaggaagccaagttcggct

SEQ ID NO: 2529442 - DNA, 25 bp, Homo sapien
tctgcaggagatagaacctaaaagc

SEQ ID NO: 2529443 - DNA, 25 bp, Homo sapien
gcctagaagatgctaaccaggtatg

SEQ ID NO: 2529444 - DNA, 25 bp, Homo sapien
caaagacatgaccttacacacagga

SEQ ID NO: 2529445 - DNA, 25 bp, Homo sapien
gaagtgggtctctcgctaggtcaaa

SEQ ID NO: 2529446 - DNA, 25 bp, Homo sapien
gatgccccattgtccagcaagttcc

SEQ ID NO: 2529447 - DNA, 25 bp, Homo sapien
tctgccagccgtgaagtccaagact

SEQ ID NO: 2529448 - DNA, 25 bp, Homo sapien
aaattgtctgccagccgtgaagtcc

SEQ ID NO: 2529449 - DNA, 25 bp, Homo sapien
agtccaagacttatgcaatgatgcc

SEQ ID NO: 2529450 - DNA, 25 bp, Homo sapien
gattaagtactagaattagttccaa

SEQ ID NO: 2529451 - DNA, 25 bp, Homo sapien
gacctcaggcacagagttttgtcat

SEQ ID NO: 2529452 - DNA, 25 bp, Homo sapien
tgtaggaccttagttaagacatgat

SEQ ID NO: 2529453 - DNA, 25 bp, Homo sapien
taaactcaccatctaccttcacttg

SEQ ID NO: 2529454 - DNA, 25 bp, Homo sapien
gctcgaacacaagcccataaaataa

SEQ ID NO: 2529455 - DNA, 25 bp, Homo sapien
tagagtattccaagtagctcgaaca

SEQ ID NO: 2529456 - DNA, 25 bp, Homo sapien
gaataattgtagtagagtattccaa

SEQ ID NO: 2529457 - DNA, 25 bp, Homo sapien
ctgaaggaataattgtagtagagta

SEQ ID NO: 2529458 - DNA, 25 bp, Homo sapien
caacaacagcatagtagagtagacg

SEQ ID NO: 2529459 - DNA, 25 bp, Homo sapien
gtgttcccagaaagagaataccagt

SEQ ID NO: 2529460 - DNA, 25 bp, Homo sapien
gacctttcttgcagagataagttgc

SEQ ID NO: 2529461 - DNA, 25 bp, Homo sapien
gactgactcacgactatatatgtaa

SEQ ID NO: 2529462 - DNA, 25 bp, Homo sapien
gaccagcacacaacatggagtccca

SEQ ID NO: 2529463 - DNA, 25 bp, Homo sapien
ctgtgatccgaccaactcacccggc

SEQ ID NO: 2529464 - DNA, 25 bp, Homo sapien
ttgaccctgtgatccgaccaactca

SEQ ID NO: 2529465 - DNA, 25 bp, Homo sapien
atccgaccaactcacccggcctcag

SEQ ID NO: 2529466 - DNA, 25 bp, Homo sapien
gccttatataaaatggtctgggctg

SEQ ID NO: 2529467 - DNA, 25 bp, Homo sapien
agatgcttaagtgccttatataaaa

SEQ ID NO: 2529468 - DNA, 25 bp, Homo sapien
cttatataaaatggtctgggctggg

SEQ ID NO: 2529469 - DNA, 25 bp, Homo sapien
tatataaaatggtctgggctgggcg

SEQ ID NO: 2529470 - DNA, 25 bp, Homo sapien
tctgaagagggaatcacattaggcc

SEQ ID NO: 2529471 - DNA, 25 bp, Homo sapien
tccctccaaggcaagattacatgta

SEQ ID NO: 2529472 - DNA, 25 bp, Homo sapien
tattgcatggtcagcgaagaggaaa

SEQ ID NO: 2529473 - DNA, 25 bp, Homo sapien
aacacatgtcccaagaggcctaata

SEQ ID NO: 2529474 - DNA, 25 bp, Homo sapien
gatgggcaatcttacctcacaagtc

SEQ ID NO: 2529475 - DNA, 25 bp, Homo sapien
taagcatttactgtgggaaaggtcc

SEQ ID NO: 2529476 - DNA, 25 bp, Homo sapien
tattcacgtgcctgctatgtgctgt

SEQ ID NO: 2529477 - DNA, 25 bp, Homo sapien
tgaactccttgttaagccaccgtgc

SEQ ID NO: 2529478 - DNA, 25 bp, Homo sapien
aatcgttcagtgcattcatcaaaca

SEQ ID NO: 2529479 - DNA, 25 bp, Homo sapien
tcaatcgttcagtgcattcatcaaa

SEQ ID NO: 2529480 - DNA, 25 bp, Homo sapien
caatcgttcagtgcattcatcaaac

SEQ ID NO: 2529481 - DNA, 25 bp, Homo sapien
caggcttgaatgcaacagtgggatc

SEQ ID NO: 2529482 - DNA, 25 bp, Homo sapien
aggcttgaatgcaacagtgggatct

SEQ ID NO: 2529483 - DNA, 25 bp, Homo sapien
ggcttgaatgcaacagtgggatctc

SEQ ID NO: 2529484 - DNA, 25 bp, Homo sapien
agcacactacgaatcaaacaggcag

SEQ ID NO: 2529485 - DNA, 25 bp, Homo sapien
caagttgctacacagatgccacagt

SEQ ID NO: 2529486 - DNA, 25 bp, Homo sapien
aaaattttaccaagtgtgatcacac

SEQ ID NO: 2529487 - DNA, 25 bp, Homo sapien
gaaaggaccccatttactaacagca

SEQ ID NO: 2529488 - DNA, 25 bp, Homo sapien
tcatctacatttccggatgaacggt

SEQ ID NO: 2529489 - DNA, 25 bp, Homo sapien
tacagagcaaagtacctggtacacg

SEQ ID NO: 2529490 - DNA, 25 bp, Homo sapien
tgccaatgttatagtcaccatgact

SEQ ID NO: 2529491 - DNA, 25 bp, Homo sapien
tgtatttaactatcatcacctctgg

SEQ ID NO: 2529492 - DNA, 25 bp, Homo sapien
cacctctggctgaagtggtctttca

SEQ ID NO: 2529493 - DNA, 25 bp, Homo sapien
catggacagatgtactcagaatgat

SEQ ID NO: 2529494 - DNA, 25 bp, Homo sapien
ggataaagcactccatatttaagtc

SEQ ID NO: 2529495 - DNA, 25 bp, Homo sapien
ttaggcatggacagatgtactcaga

SEQ ID NO: 2529496 - DNA, 25 bp, Homo sapien
tcagaatgataaagaaggtcactgg

SEQ ID NO: 2529497 - DNA, 25 bp, Homo sapien
ttcatccttttcgtagggtcggaca

SEQ ID NO: 2529498 - DNA, 25 bp, Homo sapien
caatcctaacgaagttcttatccat

SEQ ID NO: 2529499 - DNA, 25 bp, Homo sapien
tcatccttttcgtagggtcggacaa

SEQ ID NO: 2529500 - DNA, 25 bp, Homo sapien
tcccaatcctaacgaagttcttatc

SEQ ID NO: 2529501 - DNA, 25 bp, Homo sapien
tgccctagtggatacagtctcctct

SEQ ID NO: 2529502 - DNA, 25 bp, Homo sapien
gccaagcaagccctattaatcccat

SEQ ID NO: 2529503 - DNA, 25 bp, Homo sapien
catgcctgtccggttagcctctttt

SEQ ID NO: 2529504 - DNA, 25 bp, Homo sapien
cattactttaggctactactgtgcc

SEQ ID NO: 2529505 - DNA, 25 bp, Homo sapien
tagtctcagggtgaatgtttctttc

SEQ ID NO: 2529506 - DNA, 25 bp, Homo sapien
gccgctgctcccagatcaattttgt

SEQ ID NO: 2529507 - DNA, 25 bp, Homo sapien
gctacacagactgattagtctcagg

SEQ ID NO: 2529508 - DNA, 25 bp, Homo sapien
tgggcttagaggcacaagccgctgc

SEQ ID NO: 2529509 - DNA, 25 bp, Homo sapien
tctaattgtctctcgacaaagaaac

SEQ ID NO: 2529510 - DNA, 25 bp, Homo sapien
tttgacctgacttcaatttccaaca

SEQ ID NO: 2529511 - DNA, 25 bp, Homo sapien
aattctgaattcatgagccataaat

SEQ ID NO: 2529512 - DNA, 25 bp, Homo sapien
tctcgacaaagaaacatgctaccat

SEQ ID NO: 2529513 - DNA, 25 bp, Homo sapien
gacataggagcgagccatcacaaag

SEQ ID NO: 2529514 - DNA, 25 bp, Homo sapien
caactgtagttcaagtgtcctaagc

SEQ ID NO: 2529515 - DNA, 25 bp, Homo sapien
cagagcctggaacatattgctatgc

SEQ ID NO: 2529516 - DNA, 25 bp, Homo sapien
tgctccaacgatgggatcatgtcaa

SEQ ID NO: 2529517 - DNA, 25 bp, Homo sapien
gatcgctttgaagagcagcgtccta

SEQ ID NO: 2529518 - DNA, 25 bp, Homo sapien
gattgtggatcgctttgaagagcag

SEQ ID NO: 2529519 - DNA, 25 bp, Homo sapien
gaagagcagcgtcctacattcatag

SEQ ID NO: 2529520 - DNA, 25 bp, Homo sapien
gcgtcctacattcataggaaaggcc

SEQ ID NO: 2529521 - DNA, 25 bp, Homo sapien
caaatcatattctcagcaaggtctg

SEQ ID NO: 2529522 - DNA, 25 bp, Homo sapien
caggcaatgccagctttaccacaat

SEQ ID NO: 2529523 - DNA, 25 bp, Homo sapien
ggcatgcgctgtggaacactgaaca

SEQ ID NO: 2529524 - DNA, 25 bp, Homo sapien
ccacaattgctgtatagctgacaca

SEQ ID NO: 2529525 - DNA, 25 bp, Homo sapien
gtgagacaggttgataccaaaggga

SEQ ID NO: 2529526 - DNA, 25 bp, Homo sapien
ttcatatgtcattctcgcaaaaggc

SEQ ID NO: 2529527 - DNA, 25 bp, Homo sapien
tactcagactatgtgctgtatgatt

SEQ ID NO: 2529528 - DNA, 25 bp, Homo sapien
aagaagccatactcagactatgtgc

SEQ ID NO: 2529529 - DNA, 25 bp, Homo sapien
gacatgcttggaatctaataacaga

SEQ ID NO: 2529530 - DNA, 25 bp, Homo sapien
ccagaaatacaggagcagcatatgt

SEQ ID NO: 2529531 - DNA, 25 bp, Homo sapien
taggctatgaaattaaggataatgc

SEQ ID NO: 2529532 - DNA, 25 bp, Homo sapien
caaacagaatgtaaatcagaccatc

SEQ ID NO: 2529533 - DNA, 25 bp, Homo sapien
tatttttcctatatgagctgccagc

SEQ ID NO: 2529534 - DNA, 25 bp, Homo sapien
cgcctggagtgataacaatggtgct

SEQ ID NO: 2529535 - DNA, 25 bp, Homo sapien
cacgattcattagacacgcctggag

SEQ ID NO: 2529536 - DNA, 25 bp, Homo sapien
tctacggcgtgaccgagagaacatg

SEQ ID NO: 2529537 - DNA, 25 bp, Homo sapien
acaccgttgttttggatagggcaca

SEQ ID NO: 2529538 - DNA, 25 bp, Homo sapien
aaaggtcagttatttacagtcgcag

SEQ ID NO: 2529539 - DNA, 25 bp, Homo sapien
tatgttctttcgaaatctggctaga

SEQ ID NO: 2529540 - DNA, 25 bp, Homo sapien
cagtcgcagtggtgtgaatgagttc

SEQ ID NO: 2529541 - DNA, 25 bp, Homo sapien
gaagaatgtcagcacgatatgtaca

SEQ ID NO: 2529542 - DNA, 25 bp, Homo sapien
ccttgtgtgcttactatactgcaaa

SEQ ID NO: 2529543 - DNA, 25 bp, Homo sapien
gcttactatactgcaaagaaccttc

SEQ ID NO: 2529544 - DNA, 25 bp, Homo sapien
tatgtacaagggcaatgtcaatcct

SEQ ID NO: 2529545 - DNA, 25 bp, Homo sapien
tttggctgttgttgtgtctcttgat

SEQ ID NO: 2529546 - DNA, 25 bp, Homo sapien
tggctgttgttgtgtctcttgatgt

SEQ ID NO: 2529547 - DNA, 25 bp, Homo sapien
ttggctgttgttgtgtctcttgatg

SEQ ID NO: 2529548 - DNA, 25 bp, Homo sapien
gagaaagaacgatgcattcacgcca

SEQ ID NO: 2529549 - DNA, 25 bp, Homo sapien
tgcgttcaagtaaacatcaggtggc

SEQ ID NO: 2529550 - DNA, 25 bp, Homo sapien
ggaagacttgagtcatcacaccatc

SEQ ID NO: 2529551 - DNA, 25 bp, Homo sapien
tgctatgaacagaaacctgcgttca

SEQ ID NO: 2529552 - DNA, 25 bp, Homo sapien
cccaagcgctggaactaaatctagg

SEQ ID NO: 2529553 - DNA, 25 bp, Homo sapien
tagtctaagcctcatgaagtttaaa

SEQ ID NO: 2529554 - DNA, 25 bp, Homo sapien
gagtcttgctaagtagccttggctg

SEQ ID NO: 2529555 - DNA, 25 bp, Homo sapien
aagcacatttttagtctaagcctca

SEQ ID NO: 2529556 - DNA, 25 bp, Homo sapien
tgctttaatcgtatgttccaggttc

SEQ ID NO: 2529557 - DNA, 25 bp, Homo sapien
catgctttaatcgtatgttccaggt

SEQ ID NO: 2529558 - DNA, 25 bp, Homo sapien
gaggcatgctttaatcgtatgttcc

SEQ ID NO: 2529559 - DNA, 25 bp, Homo sapien
ctttaatcgtatgttccaggttctc

SEQ ID NO: 2529560 - DNA, 25 bp, Homo sapien
tacgtctgtagaactaattggcaaa

SEQ ID NO: 2529561 - DNA, 25 bp, Homo sapien
gcaaagataagtccgatttggtgat

SEQ ID NO: 2529562 - DNA, 25 bp, Homo sapien
cagtagtggagtatatgtctacgtc

SEQ ID NO: 2529563 - DNA, 25 bp, Homo sapien
ttggtgatatttaaacaatacatgg

SEQ ID NO: 2529564 - DNA, 25 bp, Homo sapien
tagttctggctgagaagtacaagac

SEQ ID NO: 2529565 - DNA, 25 bp, Homo sapien
ccaacactattgcaccagggattaa

SEQ ID NO: 2529566 - DNA, 25 bp, Homo sapien
catgaggtctgcatctgataaggga

SEQ ID NO: 2529567 - DNA, 25 bp, Homo sapien
gaagagcaagagacggtgcacactc

SEQ ID NO: 2529568 - DNA, 25 bp, Homo sapien
tgatgaatagaacaaggcctctccc

SEQ ID NO: 2529569 - DNA, 25 bp, Homo sapien
gcagatagatcccaaaacagacgag

SEQ ID NO: 2529570 - DNA, 25 bp, Homo sapien
gaggagctgcttactcaaaccagag

SEQ ID NO: 2529571 - DNA, 25 bp, Homo sapien
gagattctagcctacctgagtcaga

SEQ ID NO: 2529572 - DNA, 25 bp, Homo sapien
ggtccattcacaagttcacgagcta

SEQ ID NO: 2529573 - DNA, 25 bp, Homo sapien
tatgactgggttcaatgcttgctgc

SEQ ID NO: 2529574 - DNA, 25 bp, Homo sapien
taattaactcatgaggtgaccccac

SEQ ID NO: 2529575 - DNA, 25 bp, Homo sapien
gactgatgtgacatgagctgctaca

SEQ ID NO: 2529576 - DNA, 25 bp, Homo sapien
tgtaagttttttgaatcagcttcca

SEQ ID NO: 2529577 - DNA, 25 bp, Homo sapien
tcatgtaagttttttgaatcagctt

SEQ ID NO: 2529578 - DNA, 25 bp, Homo sapien
taagttttttgaatcagcttccaaa

SEQ ID NO: 2529579 - DNA, 25 bp, Homo sapien
gttttttgaatcagcttccaaaagc

SEQ ID NO: 2529580 - DNA, 25 bp, Homo sapien
tagaatgcctatgtccacttttttg

SEQ ID NO: 2529581 - DNA, 25 bp, Homo sapien
tccacttttggcatgcacttctgcc

SEQ ID NO: 2529582 - DNA, 25 bp, Homo sapien
cctggcctgcctatgtccacttttg

SEQ ID NO: 2529583 - DNA, 25 bp, Homo sapien
gacaaactttctgactagaatgcct

SEQ ID NO: 2529584 - DNA, 25 bp, Homo sapien
ataatcatacttgtcttcactgcag

SEQ ID NO: 2529585 - DNA, 25 bp, Homo sapien
tattatctatacagcaccatactgc

SEQ ID NO: 2529586 - DNA, 25 bp, Homo sapien
aatccaaagattgcacagaccaagt

SEQ ID NO: 2529587 - DNA, 25 bp, Homo sapien
tagtggctggcacaaactgagcact

SEQ ID NO: 2529588 - DNA, 25 bp, Homo sapien
catagatagctaagccacatgtgtc

SEQ ID NO: 2529589 - DNA, 25 bp, Homo sapien
cactttatagtgattcgccacatgc

SEQ ID NO: 2529590 - DNA, 25 bp, Homo sapien
tgccatgcagatattccagtgtagt

SEQ ID NO: 2529591 - DNA, 25 bp, Homo sapien
ccagaagtatgaaacaaagagtcac

SEQ ID NO: 2529592 - DNA, 25 bp, Homo sapien
tttcatcacagacattcttaaggaa

SEQ ID NO: 2529593 - DNA, 25 bp, Homo sapien
tgtttgctgttactgccttgattcg

SEQ ID NO: 2529594 - DNA, 25 bp, Homo sapien
ttcaggtaattcttgggcctaagcc

SEQ ID NO: 2529595 - DNA, 25 bp, Homo sapien
gattcgtgctaaggcaccaccagca

SEQ ID NO: 2529596 - DNA, 25 bp, Homo sapien
gtgactaagcagagaaagtaccagt

SEQ ID NO: 2529597 - DNA, 25 bp, Homo sapien
tagaagccgtcacataagatgcaag

SEQ ID NO: 2529598 - DNA, 25 bp, Homo sapien
aggcagtaaccgaaagagacgaagg

SEQ ID NO: 2529599 - DNA, 25 bp, Homo sapien
gacgaaggtttcttagtgactaagc

SEQ ID NO: 2529600 - DNA, 25 bp, Homo sapien
gcctggagtataagatagccattcc

SEQ ID NO: 2529601 - DNA, 25 bp, Homo sapien
gaaacatgatagagccttaaggagc

SEQ ID NO: 2529602 - DNA, 25 bp, Homo sapien
catatgcagaatcgagaactcagcc

SEQ ID NO: 2529603 - DNA, 25 bp, Homo sapien
gggaggcaaccagttaactcaatgg

SEQ ID NO: 2529604 - DNA, 25 bp, Homo sapien
ccgcacccggcaaaatgagttactt

SEQ ID NO: 2529605 - DNA, 25 bp, Homo sapien
taactaatgattgtgagctgcaaca

SEQ ID NO: 2529606 - DNA, 25 bp, Homo sapien
caagaacacacaggacatcgccaaa

SEQ ID NO: 2529607 - DNA, 25 bp, Homo sapien
ccaactggaatctggtactggcaag

SEQ ID NO: 2529608 - DNA, 25 bp, Homo sapien
tatccttgctgttacctgttgccag

SEQ ID NO: 2529609 - DNA, 25 bp, Homo sapien
tacactagagaagatatatccttgc

SEQ ID NO: 2529610 - DNA, 25 bp, Homo sapien
tgctacagcttactgaagaacactg

SEQ ID NO: 2529611 - DNA, 25 bp, Homo sapien
gccagtgccctacacttctgtactg

SEQ ID NO: 2529612 - DNA, 25 bp, Homo sapien
gattgtatgtgtgccaaaacttgag

SEQ ID NO: 2529613 - DNA, 25 bp, Homo sapien
cacagtggttaaagctactctgcag

SEQ ID NO: 2529614 - DNA, 25 bp, Homo sapien
ttcaatgaaattaggtagcactgca

SEQ ID NO: 2529615 - DNA, 25 bp, Homo sapien
ccttacctgagtctaaaatactggg

SEQ ID NO: 2529616 - DNA, 25 bp, Homo sapien
tatcctacttgactgagaaccctgc

SEQ ID NO: 2529617 - DNA, 25 bp, Homo sapien
gagggagggtgacaaaacacctgaa

SEQ ID NO: 2529618 - DNA, 25 bp, Homo sapien
cgggcccagcccatcatatgctttt

SEQ ID NO: 2529619 - DNA, 25 bp, Homo sapien
gaaccctgcaaaccgatcacatctg

SEQ ID NO: 2529620 - DNA, 25 bp, Homo sapien
cacaacaagcagaagtgaaacaagg

SEQ ID NO: 2529621 - DNA, 25 bp, Homo sapien
gtgagccactcttttactctttata

SEQ ID NO: 2529622 - DNA, 25 bp, Homo sapien
aaaaatcacaacaagcagaagtgaa

SEQ ID NO: 2529623 - DNA, 25 bp, Homo sapien
caagcagaagtgaaacaaggctagg

SEQ ID NO: 2529624 - DNA, 25 bp, Homo sapien
cttctgtaaaggcagtagtgccgcc

SEQ ID NO: 2529625 - DNA, 25 bp, Homo sapien
aattctatttcaagcaacccaaggg

SEQ ID NO: 2529626 - DNA, 25 bp, Homo sapien
tagtgccgcctacatttgcaatact

SEQ ID NO: 2529627 - DNA, 25 bp, Homo sapien
cctggtgaaatctaactcttctgta

SEQ ID NO: 2529628 - DNA, 25 bp, Homo sapien
tcatctgcaagaaacactaagtcct

SEQ ID NO: 2529629 - DNA, 25 bp, Homo sapien
tgtcacccttgaggcttatgcaagc

SEQ ID NO: 2529630 - DNA, 25 bp, Homo sapien
tacagtactagtcagtcagagaaac

SEQ ID NO: 2529631 - DNA, 25 bp, Homo sapien
gaaaatactctgatcaaatgcctag

SEQ ID NO: 2529632 - DNA, 25 bp, Homo sapien
ttccaacatttaagaagccaatcaa

SEQ ID NO: 2529633 - DNA, 25 bp, Homo sapien
cactaaagagcatcagtcagaagga

SEQ ID NO: 2529634 - DNA, 25 bp, Homo sapien
tatctgccttaacaccatacttcca

SEQ ID NO: 2529635 - DNA, 25 bp, Homo sapien
caaggttatatgagcattttggacg

SEQ ID NO: 2529636 - DNA, 25 bp, Homo sapien
caggtctaatttgtgaaactttcag

SEQ ID NO: 2529637 - DNA, 25 bp, Homo sapien
aaaagtaataatggccacactgcag

SEQ ID NO: 2529638 - DNA, 25 bp, Homo sapien
cacttactagtgaaataccatttgt

SEQ ID NO: 2529639 - DNA, 25 bp, Homo sapien
tagtgtactatagccacctttctca

SEQ ID NO: 2529640 - DNA, 25 bp, Homo sapien
tgagccaaatccacacaacagcatt

SEQ ID NO: 2529641 - DNA, 25 bp, Homo sapien
caattgtacagagttttaggagcac

SEQ ID NO: 2529642 - DNA, 25 bp, Homo sapien
gagttcagcgtcaatggaatgagcc

SEQ ID NO: 2529643 - DNA, 25 bp, Homo sapien
ggtaacttatgtgcacagtcagcag

SEQ ID NO: 2529644 - DNA, 25 bp, Homo sapien
aaccaacactggaccttttagtctg

SEQ ID NO: 2529645 - DNA, 25 bp, Homo sapien
ttatgcttgcttgccacagaaacca

SEQ ID NO: 2529646 - DNA, 25 bp, Homo sapien
caacactggaccttttagtctgaat

SEQ ID NO: 2529647 - DNA, 25 bp, Homo sapien
tgcttgcttgccacagaaaccaaca

SEQ ID NO: 2529648 - DNA, 25 bp, Homo sapien
taccttaagcacaagctaacaaagc

SEQ ID NO: 2529649 - DNA, 25 bp, Homo sapien
gaagctgtcaaaccataggaacatc

SEQ ID NO: 2529650 - DNA, 25 bp, Homo sapien
tacaaaattagcaagccaaagggct

SEQ ID NO: 2529651 - DNA, 25 bp, Homo sapien
cttccagtgaaggaatgatacttct

SEQ ID NO: 2529652 - DNA, 25 bp, Homo sapien
taagttagtagcaataggaatcctc

SEQ ID NO: 2529653 - DNA, 25 bp, Homo sapien
tcagaggcattaagcgacacattgc

SEQ ID NO: 2529654 - DNA, 25 bp, Homo sapien
tcgtgtcaaaactactcggaggtca

SEQ ID NO: 2529655 - DNA, 25 bp, Homo sapien
tatgttgagcatcagcagtttgggc

SEQ ID NO: 2529656 - DNA, 25 bp, Homo sapien
tggtgcccaaagtggcctttcggac

SEQ ID NO: 2529657 - DNA, 25 bp, Homo sapien
atggtgcccaaagtggcctttcgga

SEQ ID NO: 2529658 - DNA, 25 bp, Homo sapien
cattggactgataaattcaggccac

SEQ ID NO: 2529659 - DNA, 25 bp, Homo sapien
gaatgtaagcctatcaatctggtct

SEQ ID NO: 2529660 - DNA, 25 bp, Homo sapien
tcaggccaccctatttaagaatgta

SEQ ID NO: 2529661 - DNA, 25 bp, Homo sapien
cacagacatgcactttcattggact

SEQ ID NO: 2529662 - DNA, 25 bp, Homo sapien
catacaccattctagtcagttcaaa

SEQ ID NO: 2529663 - DNA, 25 bp, Homo sapien
cagcctataccgaaattcttacaag

SEQ ID NO: 2529664 - DNA, 25 bp, Homo sapien
gaaaagtgtcaacgtaaaatagcca

SEQ ID NO: 2529665 - DNA, 25 bp, Homo sapien
gaggaatactcgtaaacataaagaa

SEQ ID NO: 2529666 - DNA, 25 bp, Homo sapien
caaatcccaatatgaaactgccagg

SEQ ID NO: 2529667 - DNA, 25 bp, Homo sapien
tttataacaaataggtatgtggccc

SEQ ID NO: 2529668 - DNA, 25 bp, Homo sapien
agttcaatcctagatgggcctcaag

SEQ ID NO: 2529669 - DNA, 25 bp, Homo sapien
taagagtgcattttatcaacgtcgg

SEQ ID NO: 2529670 - DNA, 25 bp, Homo sapien
tctcttcaggtagcatccagacagc

SEQ ID NO: 2529671 - DNA, 25 bp, Homo sapien
aatgatattcaatgagaatctcttc

SEQ ID NO: 2529672 - DNA, 25 bp, Homo sapien
tattcaatgagaatctcttcaggta

SEQ ID NO: 2529673 - DNA, 25 bp, Homo sapien
ctcttcaggtagcatccagacagca

SEQ ID NO: 2529674 - DNA, 25 bp, Homo sapien
tcaatatctgggctatgacaacaga

SEQ ID NO: 2529675 - DNA, 25 bp, Homo sapien
ccattctttcgctatttatctctga

SEQ ID NO: 2529676 - DNA, 25 bp, Homo sapien
aggtagccttctgcttcaccaatag

SEQ ID NO: 2529677 - DNA, 25 bp, Homo sapien
tattatactttaagcagatccagag

SEQ ID NO: 2529678 - DNA, 25 bp, Homo sapien
actagtgcttttgagccaagaagcc

SEQ ID NO: 2529679 - DNA, 25 bp, Homo sapien
tcaattctaccaagacggagagagg

SEQ ID NO: 2529680 - DNA, 25 bp, Homo sapien
agccaccatactcccttaagtcaaa

SEQ ID NO: 2529681 - DNA, 25 bp, Homo sapien
gaaagtctgggtggtctgaaagatc

SEQ ID NO: 2529682 - DNA, 25 bp, Homo sapien
ctctattcagaagatcttgctaaga

SEQ ID NO: 2529683 - DNA, 25 bp, Homo sapien
gaggacactcgttcatgacccacta

SEQ ID NO: 2529684 - DNA, 25 bp, Homo sapien
tagttgaaactacaaggcgaacacc

SEQ ID NO: 2529685 - DNA, 25 bp, Homo sapien
ctaagatcattaatgaggtggctac

SEQ ID NO: 2529686 - DNA, 25 bp, Homo sapien
taccagtcacaatgtattaatcata

SEQ ID NO: 2529687 - DNA, 25 bp, Homo sapien
tctatgaaagtacaagcttttgaaa

SEQ ID NO: 2529688 - DNA, 25 bp, Homo sapien
aacagttaatctagtgttaagacaa

SEQ ID NO: 2529689 - DNA, 25 bp, Homo sapien
gttagactaaacacttatctaccag

SEQ ID NO: 2529690 - DNA, 25 bp, Homo sapien
aactacttagacctagctgccattt

SEQ ID NO: 2529691 - DNA, 25 bp, Homo sapien
actacttagacctagctgccattta

SEQ ID NO: 2529692 - DNA, 25 bp, Homo sapien
aaacagaacagtaatgtaattattt

SEQ ID NO: 2529693 - DNA, 25 bp, Homo sapien
aacagaacagtaatgtaattattta

SEQ ID NO: 2529694 - DNA, 25 bp, Homo sapien
tttttaggtatgctaagcaataggg

SEQ ID NO: 2529695 - DNA, 25 bp, Homo sapien
taccatttagttaaggataaccaga

SEQ ID NO: 2529696 - DNA, 25 bp, Homo sapien
caatgtcaacacttctctttttagg

SEQ ID NO: 2529697 - DNA, 25 bp, Homo sapien
taaaatagtcattacttttccagaa

SEQ ID NO: 2529698 - DNA, 25 bp, Homo sapien
aaaaagcatttgttgccaggcccag

SEQ ID NO: 2529699 - DNA, 25 bp, Homo sapien
tctgtactattttgggttttccaga

SEQ ID NO: 2529700 - DNA, 25 bp, Homo sapien
tccagattgcatgtctttcccacca

SEQ ID NO: 2529701 - DNA, 25 bp, Homo sapien
taactaacaggcagtgaattggcga

SEQ ID NO: 2529702 - DNA, 25 bp, Homo sapien
gcagcaatgtaagaaacagtaaaat

SEQ ID NO: 2529703 - DNA, 25 bp, Homo sapien
tacaaataatggtaatctcatgctt

SEQ ID NO: 2529704 - DNA, 25 bp, Homo sapien
aagcctgctaaaaggattctgctac

SEQ ID NO: 2529705 - DNA, 25 bp, Homo sapien
cagccccagtcacccgagtagttgg

SEQ ID NO: 2529706 - DNA, 25 bp, Homo sapien
tcatgactgctatcgtatttcccct

SEQ ID NO: 2529707 - DNA, 25 bp, Homo sapien
accatgctccgcctataatttattt

SEQ ID NO: 2529708 - DNA, 25 bp, Homo sapien
tcatattaaaaagaggagacgcact

SEQ ID NO: 2529709 - DNA, 25 bp, Homo sapien
tccactttgtatggctaccaattaa

SEQ ID NO: 2529710 - DNA, 25 bp, Homo sapien
tgctaactacatagaacaggctttg

SEQ ID NO: 2529711 - DNA, 25 bp, Homo sapien
gagcagaccaaaaagctaaaacgta

SEQ ID NO: 2529712 - DNA, 25 bp, Homo sapien
tatacctctctactacatagggaaa

SEQ ID NO: 2529713 - DNA, 25 bp, Homo sapien
ccctcattagcagttgggtttggtt

SEQ ID NO: 2529714 - DNA, 25 bp, Homo sapien
tcacgacgccatacacaaagcaggt

SEQ ID NO: 2529715 - DNA, 25 bp, Homo sapien
caatctggtttgacatcacgacgcc

SEQ ID NO: 2529716 - DNA, 25 bp, Homo sapien
ctaggttgggttcatctccccacca

SEQ ID NO: 2529717 - DNA, 25 bp, Homo sapien
tcatgatgtattacacccactaggt

SEQ ID NO: 2529718 - DNA, 25 bp, Homo sapien
cctccaaaattgtacctacgccatt

SEQ ID NO: 2529719 - DNA, 25 bp, Homo sapien
ttatgggtccacagtccccatgccc

SEQ ID NO: 2529720 - DNA, 25 bp, Homo sapien
cgccatttgattcccgtgagttcag

SEQ ID NO: 2529721 - DNA, 25 bp, Homo sapien
cagaattggatcatcttgggctggg

SEQ ID NO: 2529722 - DNA, 25 bp, Homo sapien
gcaatcaatcactataatgaccaca

SEQ ID NO: 2529723 - DNA, 25 bp, Homo sapien
tgcaaaaataacatgtaccactagg

SEQ ID NO: 2529724 - DNA, 25 bp, Homo sapien
gaaaacagccatatcttctactaac

SEQ ID NO: 2529725 - DNA, 25 bp, Homo sapien
ggtggcccttgcattgaatccttac

SEQ ID NO: 2529726 - DNA, 25 bp, Homo sapien
cccaggtgcaagccattctcctgcc

SEQ ID NO: 2529727 - DNA, 25 bp, Homo sapien
tgagccattgtgcccagccatactg

SEQ ID NO: 2529728 - DNA, 25 bp, Homo sapien
ggtatgatcttggcaacctccccct

SEQ ID NO: 2529729 - DNA, 25 bp, Homo sapien
tggtatgatcttggcaacctccccc

SEQ ID NO: 2529730 - DNA, 25 bp, Homo sapien
gactgacagacacagctgaagcatt

SEQ ID NO: 2529731 - DNA, 25 bp, Homo sapien
ctgacagacacagctgaagcattgt

SEQ ID NO: 2529732 - DNA, 25 bp, Homo sapien
aggcagaaggacgacttgacctatt

SEQ ID NO: 2529733 - DNA, 25 bp, Homo sapien
gacgacttgacctatttgagaccag

SEQ ID NO: 2529734 - DNA, 25 bp, Homo sapien
aagttccattacaggcagggacaga

SEQ ID NO: 2529735 - DNA, 25 bp, Homo sapien
gtataactgtactacacagcaaaaa

SEQ ID NO: 2529736 - DNA, 25 bp, Homo sapien
gagtaagttccattacaggcaggga

SEQ ID NO: 2529737 - DNA, 25 bp, Homo sapien
tagctatagctttccaattttaatg

SEQ ID NO: 2529738 - DNA, 25 bp, Homo sapien
gatcaccaaagcctgtcaactctac

SEQ ID NO: 2529739 - DNA, 25 bp, Homo sapien
ctatgacaatccatactccacaggg

SEQ ID NO: 2529740 - DNA, 25 bp, Homo sapien
ggcccacatgggttttctctctaaa

SEQ ID NO: 2529741 - DNA, 25 bp, Homo sapien
tactggccctgcgttatttctcaca

SEQ ID NO: 2529742 - DNA, 25 bp, Homo sapien
gcctagaagaggagctatagctccc

SEQ ID NO: 2529743 - DNA, 25 bp, Homo sapien
tggcctagaagaggagctatagctc

SEQ ID NO: 2529744 - DNA, 25 bp, Homo sapien
tagaagaggagctatagctcccgct

SEQ ID NO: 2529745 - DNA, 25 bp, Homo sapien
aagaggagctatagctcccgctctg

SEQ ID NO: 2529746 - DNA, 25 bp, Homo sapien
ccacccagttcgctgccgcagtcat

SEQ ID NO: 2529747 - DNA, 25 bp, Homo sapien
aatcctccaggctcgccccgttcgc

SEQ ID NO: 2529748 - DNA, 25 bp, Homo sapien
gccccgttcgccacccagttcgctg

SEQ ID NO: 2529749 - DNA, 25 bp, Homo sapien
aggctcgccccgttcgccacccagt

SEQ ID NO: 2529750 - DNA, 25 bp, Homo sapien
gggcatgtcggagcgaggcgtccga

SEQ ID NO: 2529751 - DNA, 25 bp, Homo sapien
ggagcgaggcgtccgaggcgaggcc

SEQ ID NO: 2529752 - DNA, 25 bp, Homo sapien
aggcgccgcggcgacgccgcgccgg

SEQ ID NO: 2529753 - DNA, 25 bp, Homo sapien
ccggccgccagagcggggcatgtcg

SEQ ID NO: 2529754 - DNA, 25 bp, Homo sapien
gaagaggagtccagattcgaacccg

SEQ ID NO: 2529755 - DNA, 25 bp, Homo sapien
gattaaatcacttgcccgaggtcgc

SEQ ID NO: 2529756 - DNA, 25 bp, Homo sapien
ggtttcacaggcttcgcccagggat

SEQ ID NO: 2529757 - DNA, 25 bp, Homo sapien
tagacggagcgcttactgtgttcca

SEQ ID NO: 2529758 - DNA, 25 bp, Homo sapien
tacacggtgttacttaggcctgagc

SEQ ID NO: 2529759 - DNA, 25 bp, Homo sapien
tgagcaattcgagggtataatgccc

SEQ ID NO: 2529760 - DNA, 25 bp, Homo sapien
tagttctatcctactcacctggtga

SEQ ID NO: 2529761 - DNA, 25 bp, Homo sapien
gtagaaatagtaataggccaggtgc

SEQ ID NO: 2529762 - DNA, 25 bp, Homo sapien
ctaattgggcccagttcttctggat

SEQ ID NO: 2529763 - DNA, 25 bp, Homo sapien
cagttcttctggatatagctttatc

SEQ ID NO: 2529764 - DNA, 25 bp, Homo sapien
agttcttctggatatagctttatct

SEQ ID NO: 2529765 - DNA, 25 bp, Homo sapien
ttggctgcttagagccagaagaggt

SEQ ID NO: 2529766 - DNA, 25 bp, Homo sapien
acttggctgcttagagccagaagag

SEQ ID NO: 2529767 - DNA, 25 bp, Homo sapien
cttggctgcttagagccagaagagg

SEQ ID NO: 2529768 - DNA, 25 bp, Homo sapien
caagctggcgctgagaatttatgag

SEQ ID NO: 2529769 - DNA, 25 bp, Homo sapien
atttatgagaggaaggcgaaccact

SEQ ID NO: 2529770 - DNA, 25 bp, Homo sapien
tagctccctttcgtgcagccaatca

SEQ ID NO: 2529771 - DNA, 25 bp, Homo sapien
ccactttgaagaaaggcgcccttgt

SEQ ID NO: 2529772 - DNA, 25 bp, Homo sapien
attggattcaggaatttgtctactg

SEQ ID NO: 2529773 - DNA, 25 bp, Homo sapien
ccgtattggattcaggaatttgtct

SEQ ID NO: 2529774 - DNA, 25 bp, Homo sapien
ccctgaaggatgaaaccgtattgga

SEQ ID NO: 2529775 - DNA, 25 bp, Homo sapien
gatgaaaccgtattggattcaggaa

SEQ ID NO: 2529776 - DNA, 25 bp, Homo sapien
cacctctctgaggacataaaaacac

SEQ ID NO: 2529777 - DNA, 25 bp, Homo sapien
gggactggcaaagctaaatggcctg

SEQ ID NO: 2529778 - DNA, 25 bp, Homo sapien
tgcggcaagcggctgccgtgtttac

SEQ ID NO: 2529779 - DNA, 25 bp, Homo sapien
ttaccgaccgtcctgtgactgtggg

SEQ ID NO: 2529780 - DNA, 25 bp, Homo sapien
ccgcacctggttagcaccgttcttt

SEQ ID NO: 2529781 - DNA, 25 bp, Homo sapien
tgcttcgacattggccaagttcaca

SEQ ID NO: 2529782 - DNA, 25 bp, Homo sapien
tctaacttgaatctcatcgttctgc

SEQ ID NO: 2529783 - DNA, 25 bp, Homo sapien
cacatttgccagttgccgagtggat

SEQ ID NO: 2529784 - DNA, 25 bp, Homo sapien
ccgagtggataatggatggtttgta

SEQ ID NO: 2529785 - DNA, 25 bp, Homo sapien
gcaagcataatataagtacaggcag

SEQ ID NO: 2529786 - DNA, 25 bp, Homo sapien
gctgcagatggctgatccttcacca

SEQ ID NO: 2529787 - DNA, 25 bp, Homo sapien
cacggactcagtcacgtatgcttgt

SEQ ID NO: 2529788 - DNA, 25 bp, Homo sapien
tcataagcctttaatgtacacggac

SEQ ID NO: 2529789 - DNA, 25 bp, Homo sapien
tagaaatgatctatggatggccagt

SEQ ID NO: 2529790 - DNA, 25 bp, Homo sapien
gtaggagtccagtgtttatgcatgt

SEQ ID NO: 2529791 - DNA, 25 bp, Homo sapien
aaataataacgtgggatcagctggc

SEQ ID NO: 2529792 - DNA, 25 bp, Homo sapien
gaaatagcttcatctggttcgcaac

SEQ ID NO: 2529793 - DNA, 25 bp, Homo sapien
ggaattcaataaaggctcgcttcaa

SEQ ID NO: 2529794 - DNA, 25 bp, Homo sapien
tgtgatcactgggaattcaataaag

SEQ ID NO: 2529795 - DNA, 25 bp, Homo sapien
ggctcgcttcaacttgaattgactt

SEQ ID NO: 2529796 - DNA, 25 bp, Homo sapien
gaattgacttcttcgattgttgact

SEQ ID NO: 2529797 - DNA, 25 bp, Homo sapien
tagacgctaccatttccatgcatca

SEQ ID NO: 2529798 - DNA, 25 bp, Homo sapien
catctcgtgttgtgttggacttgtc

SEQ ID NO: 2529799 - DNA, 25 bp, Homo sapien
tggaagtaaaggcagcatctcgtgt

SEQ ID NO: 2529800 - DNA, 25 bp, Homo sapien
gagtgatgtgcaaacccgcgttgga

SEQ ID NO: 2529801 - DNA, 25 bp, Homo sapien
ctgttgccgaagacaagcaggagga

SEQ ID NO: 2529802 - DNA, 25 bp, Homo sapien
acaagcaggaggagacccttgagag

SEQ ID NO: 2529803 - DNA, 25 bp, Homo sapien
aagcaggaggagacccttgagaggt

SEQ ID NO: 2529804 - DNA, 25 bp, Homo sapien
gcaggaggagacccttgagaggtcc

SEQ ID NO: 2529805 - DNA, 25 bp, Homo sapien
aaagaggtttctcagtgggatcatt

SEQ ID NO: 2529806 - DNA, 25 bp, Homo sapien
gacttcacatgggaggaaaagccag

SEQ ID NO: 2529807 - DNA, 25 bp, Homo sapien
caaagaggtttctcagtgggatcat

SEQ ID NO: 2529808 - DNA, 25 bp, Homo sapien
caatttctttgagtacatcacccat

SEQ ID NO: 2529809 - DNA, 25 bp, Homo sapien
ctgcctttgctcctcgatgacggtt

SEQ ID NO: 2529810 - DNA, 25 bp, Homo sapien
cctcgatgacggttcacggcaattt

SEQ ID NO: 2529811 - DNA, 25 bp, Homo sapien
tttgctcctcgatgacggttcacgg

SEQ ID NO: 2529812 - DNA, 25 bp, Homo sapien
ccaatggcataggtcccagtctgaa

SEQ ID NO: 2529813 - DNA, 25 bp, Homo sapien
gttccagtccaatgaagcccagagg

SEQ ID NO: 2529814 - DNA, 25 bp, Homo sapien
tctcagtggatgacatgacgctcac

SEQ ID NO: 2529815 - DNA, 25 bp, Homo sapien
gcagacagcaaattcatgcttccta

SEQ ID NO: 2529816 - DNA, 25 bp, Homo sapien
cacacccgttttgtagaggctcaga

SEQ ID NO: 2529817 - DNA, 25 bp, Homo sapien
caaagcctgagaggtgtgctaaaca

SEQ ID NO: 2529818 - DNA, 25 bp, Homo sapien
cccagggactgtgctaggaaccatg

SEQ ID NO: 2529819 - DNA, 25 bp, Homo sapien
aaacctgagttagcgagtttcatac

SEQ ID NO: 2529820 - DNA, 25 bp, Homo sapien
aaagtgagtctctcctcgctgaact

SEQ ID NO: 2529821 - DNA, 25 bp, Homo sapien
aaacggaccagtggttgcaaaagtg

SEQ ID NO: 2529822 - DNA, 25 bp, Homo sapien
cggaccagtggttgcaaaagtgagt

SEQ ID NO: 2529823 - DNA, 25 bp, Homo sapien
tctcctcgctgaactgctctgttgt

SEQ ID NO: 2529824 - DNA, 25 bp, Homo sapien
gcacccttgaaagcaacgtgtccct

SEQ ID NO: 2529825 - DNA, 25 bp, Homo sapien
tgaaagcaacgtgtcccttgggctc

SEQ ID NO: 2529826 - DNA, 25 bp, Homo sapien
aacgtgtcccttgggctccttgatg

SEQ ID NO: 2529827 - DNA, 25 bp, Homo sapien
ttgggctccttgatggacacttccc

SEQ ID NO: 2529828 - DNA, 25 bp, Homo sapien
gagactggggaaacacggccaggaa

SEQ ID NO: 2529829 - DNA, 25 bp, Homo sapien
gcaggtggaagcagaaccctgctgc

SEQ ID NO: 2529830 - DNA, 25 bp, Homo sapien
tattcatactgctggcaggtggaag

SEQ ID NO: 2529831 - DNA, 25 bp, Homo sapien
cccgtgtctgggtgggcgagagact

SEQ ID NO: 2529832 - DNA, 25 bp, Homo sapien
cttttttggctatgatgaaaaatgc

SEQ ID NO: 2529833 - DNA, 25 bp, Homo sapien
cattgtagagatgggccaaattttg

SEQ ID NO: 2529834 - DNA, 25 bp, Homo sapien
taaaatgtggcctaatgctttcaag

SEQ ID NO: 2529835 - DNA, 25 bp, Homo sapien
aaaagcccatacctattagccattg

SEQ ID NO: 2529836 - DNA, 25 bp, Homo sapien
aagctgcttcactgtgattagtctc

SEQ ID NO: 2529837 - DNA, 25 bp, Homo sapien
tcaagctgcttcactgtgattagtc

SEQ ID NO: 2529838 - DNA, 25 bp, Homo sapien
caagctgcttcactgtgattagtct

SEQ ID NO: 2529839 - DNA, 25 bp, Homo sapien
tccagggtgtaaccctgcaggctga

SEQ ID NO: 2529840 - DNA, 25 bp, Homo sapien
ctggtttctgtccagaagtaaattg

SEQ ID NO: 2529841 - DNA, 25 bp, Homo sapien
ttctgtccagaagtaaattgagtct

SEQ ID NO: 2529842 - DNA, 25 bp, Homo sapien
gcacaaggagatcctgctggtttct

SEQ ID NO: 2529843 - DNA, 25 bp, Homo sapien
agggcggcaatgacggggcccgctc

SEQ ID NO: 2529844 - DNA, 25 bp, Homo sapien
gggcccgctcgttagtccccagaga

SEQ ID NO: 2529845 - DNA, 25 bp, Homo sapien
gcccgctcgttagtccccagagaga

SEQ ID NO: 2529846 - DNA, 25 bp, Homo sapien
ccgctcgttagtccccagagagatg

SEQ ID NO: 2529847 - DNA, 25 bp, Homo sapien
ccacacatattcttctgaggaggct

SEQ ID NO: 2529848 - DNA, 25 bp, Homo sapien
gggtttcgcaataagaatccacaca

SEQ ID NO: 2529849 - DNA, 25 bp, Homo sapien
gagctttgggggtttcgcaataaga

SEQ ID NO: 2529850 - DNA, 25 bp, Homo sapien
tcattcccggagtctctgaaggcgg

SEQ ID NO: 2529851 - DNA, 25 bp, Homo sapien
tcactcagacatatccagcagatca

SEQ ID NO: 2529852 - DNA, 25 bp, Homo sapien
tccacatgcatcagctaatcctggc

SEQ ID NO: 2529853 - DNA, 25 bp, Homo sapien
ggctgtctgtccacatgcatcagct

SEQ ID NO: 2529854 - DNA, 25 bp, Homo sapien
cagacatatccagcagatcagcagt

SEQ ID NO: 2529855 - DNA, 25 bp, Homo sapien
tggagccgtcagacttccgaggagc

SEQ ID NO: 2529856 - DNA, 25 bp, Homo sapien
gggcttgtcatggagccgtcagact

SEQ ID NO: 2529857 - DNA, 25 bp, Homo sapien
tgtcatggagccgtcagacttccga

SEQ ID NO: 2529858 - DNA, 25 bp, Homo sapien
catgtctcccgccagtgcgtggggc

SEQ ID NO: 2529859 - DNA, 25 bp, Homo sapien
taatgtccagttcgcagagaatgcc

SEQ ID NO: 2529860 - DNA, 25 bp, Homo sapien
tactgggcagcggaccatggagttt

SEQ ID NO: 2529861 - DNA, 25 bp, Homo sapien
caataatgggaacaatgctcactcg

SEQ ID NO: 2529862 - DNA, 25 bp, Homo sapien
cagttccgtggctgaaatatggcaa

SEQ ID NO: 2529863 - DNA, 25 bp, Homo sapien
tagggccagatctagacacgcagac

SEQ ID NO: 2529864 - DNA, 25 bp, Homo sapien
cacatctgcacgtgtccttgtacag

SEQ ID NO: 2529865 - DNA, 25 bp, Homo sapien
tttagggtctgtctgcttagggcca

SEQ ID NO: 2529866 - DNA, 25 bp, Homo sapien
cagacctcccgcagagcaactggaa

SEQ ID NO: 2529867 - DNA, 25 bp, Homo sapien
tccaaggagctcaaagggtttcact

SEQ ID NO: 2529868 - DNA, 25 bp, Homo sapien
tgtaggtgacgacgtctcggaggag

SEQ ID NO: 2529869 - DNA, 25 bp, Homo sapien
gtgacgacgtctcggaggaggtcag

SEQ ID NO: 2529870 - DNA, 25 bp, Homo sapien
tggcgctgtaggtgacgacgtctcg

SEQ ID NO: 2529871 - DNA, 25 bp, Homo sapien
cgctgtaggtgacgacgtctcggag

SEQ ID NO: 2529872 - DNA, 25 bp, Homo sapien
tcttcttcgaatcccttccacttgg

SEQ ID NO: 2529873 - DNA, 25 bp, Homo sapien
gtgtcctgctcttcttcgaatccct

SEQ ID NO: 2529874 - DNA, 25 bp, Homo sapien
gctcttcttcgaatcccttccactt

SEQ ID NO: 2529875 - DNA, 25 bp, Homo sapien
tgctcttcttcgaatcccttccact

SEQ ID NO: 2529876 - DNA, 25 bp, Homo sapien
caggccggaaggtgcctttgacaac

SEQ ID NO: 2529877 - DNA, 25 bp, Homo sapien
tgggccaaccctgagttccggatct

SEQ ID NO: 2529878 - DNA, 25 bp, Homo sapien
cctgagttccggatctctgggttct

SEQ ID NO: 2529879 - DNA, 25 bp, Homo sapien
gggctggaccatgacaactgggact

SEQ ID NO: 2529880 - DNA, 25 bp, Homo sapien
ggctttattagtctctgggcctcct

SEQ ID NO: 2529881 - DNA, 25 bp, Homo sapien
tgaagcccgcagagccggatgatgt

SEQ ID NO: 2529882 - DNA, 25 bp, Homo sapien
ttcggcatacgagatccacttgagg

SEQ ID NO: 2529883 - DNA, 25 bp, Homo sapien
gagacaattgaaaagcgctccacac

SEQ ID NO: 2529884 - DNA, 25 bp, Homo sapien
cgaacaggactttaacatgtcccac

SEQ ID NO: 2529885 - DNA, 25 bp, Homo sapien
gcttttctccacgaacaggacttta

SEQ ID NO: 2529886 - DNA, 25 bp, Homo sapien
cacgaaagcttttctccacgaacag

SEQ ID NO: 2529887 - DNA, 25 bp, Homo sapien
tcaaccacgaaagcttttctccacg

SEQ ID NO: 2529888 - DNA, 25 bp, Homo sapien
tacaacacgcagaagatcagcacca

SEQ ID NO: 2529889 - DNA, 25 bp, Homo sapien
aagtctccattctccgaaaacatgt

SEQ ID NO: 2529890 - DNA, 25 bp, Homo sapien
tccattctccgaaaacatgtgtcca

SEQ ID NO: 2529891 - DNA, 25 bp, Homo sapien
ctacaacacgcagaagatcagcacc

SEQ ID NO: 2529892 - DNA, 25 bp, Homo sapien
caatctccagcattagcgatggctc

SEQ ID NO: 2529893 - DNA, 25 bp, Homo sapien
ggcaatcgccagctcactgatagta

SEQ ID NO: 2529894 - DNA, 25 bp, Homo sapien
gcagaagcttcttaactgggttaag

SEQ ID NO: 2529895 - DNA, 25 bp, Homo sapien
taccttgcaggagtaaggcaatcgc

SEQ ID NO: 2529896 - DNA, 25 bp, Homo sapien
cttcaaaggctgttccaggtcttca

SEQ ID NO: 2529897 - DNA, 25 bp, Homo sapien
aaaggctgttccaggtcttcaccag

SEQ ID NO: 2529898 - DNA, 25 bp, Homo sapien
cttcaccagccctcacagacgcagg

SEQ ID NO: 2529899 - DNA, 25 bp, Homo sapien
tcttcaccagccctcacagacgcag

SEQ ID NO: 2529900 - DNA, 25 bp, Homo sapien
tgtgagcgagagagcggtgaagcag

SEQ ID NO: 2529901 - DNA, 25 bp, Homo sapien
caaggcaggcattctccaatcctgg

SEQ ID NO: 2529902 - DNA, 25 bp, Homo sapien
cttccgagcaaatgtgtgagcgaga

SEQ ID NO: 2529903 - DNA, 25 bp, Homo sapien
gcgagagagcggtgaagcagtctct

SEQ ID NO: 2529904 - DNA, 25 bp, Homo sapien
tcagtaaccgagctgggaaggacgc

SEQ ID NO: 2529905 - DNA, 25 bp, Homo sapien
ccatgattgagtgaatggctgctca

SEQ ID NO: 2529906 - DNA, 25 bp, Homo sapien
atttcgccccagtgtgcccttctta

SEQ ID NO: 2529907 - DNA, 25 bp, Homo sapien
tactagcaccgagggctgctgagca

SEQ ID NO: 2529908 - DNA, 25 bp, Homo sapien
ctttctccttctttcccggtgcaca

SEQ ID NO: 2529909 - DNA, 25 bp, Homo sapien
ctctttctccttctttcccggtgca

SEQ ID NO: 2529910 - DNA, 25 bp, Homo sapien
tttctccttctttcccggtgcacac

SEQ ID NO: 2529911 - DNA, 25 bp, Homo sapien
tctttctccttctttcccggtgcac

SEQ ID NO: 2529912 - DNA, 25 bp, Homo sapien
tgggcggccccttgatttatgttca

SEQ ID NO: 2529913 - DNA, 25 bp, Homo sapien
gaaatggcctgaggacgctgaataa

SEQ ID NO: 2529914 - DNA, 25 bp, Homo sapien
ttggcaacgtaaaattgaaatggcc

SEQ ID NO: 2529915 - DNA, 25 bp, Homo sapien
ggctctgcgaagtcccacagtgttt

SEQ ID NO: 2529916 - DNA, 25 bp, Homo sapien
taaaacatctccctctccttataag

SEQ ID NO: 2529917 - DNA, 25 bp, Homo sapien
cacatggccttatcctctgtgtgtg

SEQ ID NO: 2529918 - DNA, 25 bp, Homo sapien
gtgtgtgtctgtattcaaatctccc

SEQ ID NO: 2529919 - DNA, 25 bp, Homo sapien
atctttacacagctgtcttccctct

SEQ ID NO: 2529920 - DNA, 25 bp, Homo sapien
tgtgaatctgggcatccgtaaaacc

SEQ ID NO: 2529921 - DNA, 25 bp, Homo sapien
taaatcgatggagaggcactaagct

SEQ ID NO: 2529922 - DNA, 25 bp, Homo sapien
tgtcctaaacaagaagggaagcgtc

SEQ ID NO: 2529923 - DNA, 25 bp, Homo sapien
tctcccgctaataggacagccctgt

SEQ ID NO: 2529924 - DNA, 25 bp, Homo sapien
gtgggaaacttgtaagacagagtcc

SEQ ID NO: 2529925 - DNA, 25 bp, Homo sapien
ccagtgggaaacttgtaagacagag

SEQ ID NO: 2529926 - DNA, 25 bp, Homo sapien
agagtcccagtccatgtgagtggcg

SEQ ID NO: 2529927 - DNA, 25 bp, Homo sapien
tcccagtccatgtgagtggcgagtg

SEQ ID NO: 2529928 - DNA, 25 bp, Homo sapien
tgtccagagacaacgtgcctttagg

SEQ ID NO: 2529929 - DNA, 25 bp, Homo sapien
caccatcatggcacagcaagagctg

SEQ ID NO: 2529930 - DNA, 25 bp, Homo sapien
catttaatccttgtgacgacctcgt

SEQ ID NO: 2529931 - DNA, 25 bp, Homo sapien
tattaaactaatggcttcgggagct

SEQ ID NO: 2529932 - DNA, 25 bp, Homo sapien
gccagggttgaaatagaggcctctt

SEQ ID NO: 2529933 - DNA, 25 bp, Homo sapien
gcctctttctgtttggtcaatcagc

SEQ ID NO: 2529934 - DNA, 25 bp, Homo sapien
aagtcccttgtaaagggcgatagca

SEQ ID NO: 2529935 - DNA, 25 bp, Homo sapien
taaagggcgatagcagaccccatca

SEQ ID NO: 2529936 - DNA, 25 bp, Homo sapien
caaaggatgcgtaggatggagctaa

SEQ ID NO: 2529937 - DNA, 25 bp, Homo sapien
cagatcctgtgccagcgggtaggaa

SEQ ID NO: 2529938 - DNA, 25 bp, Homo sapien
cggcatgcacagaagatggctctcc

SEQ ID NO: 2529939 - DNA, 25 bp, Homo sapien
agccccagggtggaaatcatgacct

SEQ ID NO: 2529940 - DNA, 25 bp, Homo sapien
agaagctgtccagagattgatgctg

SEQ ID NO: 2529941 - DNA, 25 bp, Homo sapien
ccagaagctgtccagagattgatgc

SEQ ID NO: 2529942 - DNA, 25 bp, Homo sapien
cagaagctgtccagagattgatgct

SEQ ID NO: 2529943 - DNA, 25 bp, Homo sapien
aatgatcgacacttgctcaggccaa

SEQ ID NO: 2529944 - DNA, 25 bp, Homo sapien
taaaatgatcgacacttgctcaggc

SEQ ID NO: 2529945 - DNA, 25 bp, Homo sapien
gatcgacacttgctcaggccaatca

SEQ ID NO: 2529946 - DNA, 25 bp, Homo sapien
tgatcataaaatgatcgacacttgc

SEQ ID NO: 2529947 - DNA, 25 bp, Homo sapien
tcagcagatagattgccagaagcag

SEQ ID NO: 2529948 - DNA, 25 bp, Homo sapien
gatagattgccagaagcagcacggg

SEQ ID NO: 2529949 - DNA, 25 bp, Homo sapien
cttcagcagatagattgccagaagc

SEQ ID NO: 2529950 - DNA, 25 bp, Homo sapien
cagatagattgccagaagcagcacg

SEQ ID NO: 2529951 - DNA, 25 bp, Homo sapien
aaagggatgttaccaactgagatcg

SEQ ID NO: 2529952 - DNA, 25 bp, Homo sapien
gaaggcgcttacagctcaatgctaa

SEQ ID NO: 2529953 - DNA, 25 bp, Homo sapien
cgacttattcgagagcagcatccaa

SEQ ID NO: 2529954 - DNA, 25 bp, Homo sapien
tgaacggacacagcatggtcagcgt

SEQ ID NO: 2529955 - DNA, 25 bp, Homo sapien
catgtagccagataagagctatcaa

SEQ ID NO: 2529956 - DNA, 25 bp, Homo sapien
aatgacccatgtttgcccttgataa

SEQ ID NO: 2529957 - DNA, 25 bp, Homo sapien
tgtttgcccttgataagagctgctc

SEQ ID NO: 2529958 - DNA, 25 bp, Homo sapien
gataagagctatcaatgacccatgt

SEQ ID NO: 2529959 - DNA, 25 bp, Homo sapien
caggaactgctttgccaggtaatga

SEQ ID NO: 2529960 - DNA, 25 bp, Homo sapien
gaactgctttgccaggtaatgatgc

SEQ ID NO: 2529961 - DNA, 25 bp, Homo sapien
ctgctttgccaggtaatgatgcttg

SEQ ID NO: 2529962 - DNA, 25 bp, Homo sapien
gctttgccaggtaatgatgcttgca

SEQ ID NO: 2529963 - DNA, 25 bp, Homo sapien
gaataaagctattgtcactgagaat

SEQ ID NO: 2529964 - DNA, 25 bp, Homo sapien
agcttgcagctggattcgctgatgg

SEQ ID NO: 2529965 - DNA, 25 bp, Homo sapien
gattcgctgatgggcgcgatattcc

SEQ ID NO: 2529966 - DNA, 25 bp, Homo sapien
ggcatttgcgtaaattcctgttgga

SEQ ID NO: 2529967 - DNA, 25 bp, Homo sapien
ggacaaatgggcatttgcgtaaatt

SEQ ID NO: 2529968 - DNA, 25 bp, Homo sapien
aaatgggcatttgcgtaaattcctg

SEQ ID NO: 2529969 - DNA, 25 bp, Homo sapien
tgggcatttgcgtaaattcctgttg

SEQ ID NO: 2529970 - DNA, 25 bp, Homo sapien
atggatggttatagtcctggctggc

SEQ ID NO: 2529971 - DNA, 25 bp, Homo sapien
tggctggcaatcaccaactggcgat

SEQ ID NO: 2529972 - DNA, 25 bp, Homo sapien
ggcaatcaccaactggcgattagct

SEQ ID NO: 2529973 - DNA, 25 bp, Homo sapien
gctggcaatcaccaactggcgatta

SEQ ID NO: 2529974 - DNA, 25 bp, Homo sapien
gagcagcgatttttgccatgtgcat

SEQ ID NO: 2529975 - DNA, 25 bp, Homo sapien
tccaacagatacacagagcagcgat

SEQ ID NO: 2529976 - DNA, 25 bp, Homo sapien
acacagagcagcgatttttgccatg

SEQ ID NO: 2529977 - DNA, 25 bp, Homo sapien
gatacacagagcagcgatttttgcc

SEQ ID NO: 2529978 - DNA, 25 bp, Homo sapien
gggacatctgcagtcagtgtcaatg

SEQ ID NO: 2529979 - DNA, 25 bp, Homo sapien
gaccctgctaccctggaactggtga

SEQ ID NO: 2529980 - DNA, 25 bp, Homo sapien
agatgaccctgctaccctggaactg

SEQ ID NO: 2529981 - DNA, 25 bp, Homo sapien
taatctaaagccagagatgtgggac

SEQ ID NO: 2529982 - DNA, 25 bp, Homo sapien
cttctgcaggcgaggagcgcatgag

SEQ ID NO: 2529983 - DNA, 25 bp, Homo sapien
gctccatctgcctgcgtgctttctg

SEQ ID NO: 2529984 - DNA, 25 bp, Homo sapien
gcgcatgagagtcgggctgggtgaa

SEQ ID NO: 2529985 - DNA, 25 bp, Homo sapien
tggggatgtctgaaggtaactttgt

SEQ ID NO: 2529986 - DNA, 25 bp, Homo sapien
ttaaacacaagcatcgtagtcatta

SEQ ID NO: 2529987 - DNA, 25 bp, Homo sapien
tcgtagtcattaaagccaaagcccc

SEQ ID NO: 2529988 - DNA, 25 bp, Homo sapien
aacacaagcatcgtagtcattaaag

SEQ ID NO: 2529989 - DNA, 25 bp, Homo sapien
caagcatcgtagtcattaaagccaa

SEQ ID NO: 2529990 - DNA, 25 bp, Homo sapien
tgaaggtggcctttcatggtttttc

SEQ ID NO: 2529991 - DNA, 25 bp, Homo sapien
ttgtacggatagaaatccaaattcc

SEQ ID NO: 2529992 - DNA, 25 bp, Homo sapien
tccttctctgaaggtggcctttcat

SEQ ID NO: 2529993 - DNA, 25 bp, Homo sapien
gagcatctgttgtacggatagaaat

SEQ ID NO: 2529994 - DNA, 25 bp, Homo sapien
cattaaggctcagaaacgtagtacc

SEQ ID NO: 2529995 - DNA, 25 bp, Homo sapien
ggtgagccccagttgaaatctgcaa

SEQ ID NO: 2529996 - DNA, 25 bp, Homo sapien
tttggatctgcaagatacgctagcc

SEQ ID NO: 2529997 - DNA, 25 bp, Homo sapien
gcagcagtacatgggaagttggtcc

SEQ ID NO: 2529998 - DNA, 25 bp, Homo sapien
aagagccttgcccaacgaacgatag

SEQ ID NO: 2529999 - DNA, 25 bp, Homo sapien
gagtcgtacacaggaagatcactga

SEQ ID NO: 2530000 - DNA, 25 bp, Homo sapien
tagggatgcctgtacacaaaactgc

SEQ ID NO: 2530001 - DNA, 25 bp, Homo sapien
ctgtgacagcagacgaggtaaggca

SEQ ID NO: 2530002 - DNA, 25 bp, Homo sapien
gaagtcagcactcagctaccaggag

SEQ ID NO: 2530003 - DNA, 25 bp, Homo sapien
ttcagggtaatttaatcagcagcac

SEQ ID NO: 2530004 - DNA, 25 bp, Homo sapien
tgcattcggcggagtccaagagtgc

SEQ ID NO: 2530005 - DNA, 25 bp, Homo sapien
gcaccactgccctagatgaactgga

SEQ ID NO: 2530006 - DNA, 25 bp, Homo sapien
ccaaggatgggaaaagctgcactca

SEQ ID NO: 2530007 - DNA, 25 bp, Homo sapien
ttctgcaaaagctgtggagctcacc

SEQ ID NO: 2530008 - DNA, 25 bp, Homo sapien
gaaaccagttaatgtcctcagcagg

SEQ ID NO: 2530009 - DNA, 25 bp, Homo sapien
cgccgctagtaagtggtagttccca

SEQ ID NO: 2530010 - DNA, 25 bp, Homo sapien
cttttgtgatctcctaaactcccaa

SEQ ID NO: 2530011 - DNA, 25 bp, Homo sapien
gtatcacacacttcgctgggctctg

SEQ ID NO: 2530012 - DNA, 25 bp, Homo sapien
caaaacttagacaaggtccctgatt

SEQ ID NO: 2530013 - DNA, 25 bp, Homo sapien
tgggctctgggcaaacaaaacttag

SEQ ID NO: 2530014 - DNA, 25 bp, Homo sapien
gaagaggactagacctggagtcaga

SEQ ID NO: 2530015 - DNA, 25 bp, Homo sapien
aatttgggtgtttatgccgcctcgc

SEQ ID NO: 2530016 - DNA, 25 bp, Homo sapien
ttggatcctccacctaatttgggtg

SEQ ID NO: 2530017 - DNA, 25 bp, Homo sapien
gttcttgtctgggatctgtcactaa

SEQ ID NO: 2530018 - DNA, 25 bp, Homo sapien
catcgtaaggttggagctcctgtct

SEQ ID NO: 2530019 - DNA, 25 bp, Homo sapien
ccatcgtaaggttggagctcctgtc

SEQ ID NO: 2530020 - DNA, 25 bp, Homo sapien
taacaggtcacgttcagggcctatg

SEQ ID NO: 2530021 - DNA, 25 bp, Homo sapien
tatgagcacattcgactaccactgg

SEQ ID NO: 2530022 - DNA, 25 bp, Homo sapien
aaatattctagaccttgagccggag

SEQ ID NO: 2530023 - DNA, 25 bp, Homo sapien
tacacgtcaggatatggctaacagg

SEQ ID NO: 2530024 - DNA, 25 bp, Homo sapien
tcaagcggggaagagctcgggcggg

SEQ ID NO: 2530025 - DNA, 25 bp, Homo sapien
caatactttgctatggggtcccggt

SEQ ID NO: 2530026 - DNA, 25 bp, Homo sapien
agctcgggcgggctttctccatagc

SEQ ID NO: 2530027 - DNA, 25 bp, Homo sapien
gggctttctccatagcaatactttg

SEQ ID NO: 2530028 - DNA, 25 bp, Homo sapien
catcccacagctagagacatcacag

SEQ ID NO: 2530029 - DNA, 25 bp, Homo sapien
atcccacagctagagacatcacagc

SEQ ID NO: 2530030 - DNA, 25 bp, Homo sapien
gttctggaatgccacggctgcccgg

SEQ ID NO: 2530031 - DNA, 25 bp, Homo sapien
ctgcccggttgaggaagcgctccag

SEQ ID NO: 2530032 - DNA, 25 bp, Homo sapien
caaagtgatcttcgactgccatgaa

SEQ ID NO: 2530033 - DNA, 25 bp, Homo sapien
tgcatttggccaggcacaactcaaa

SEQ ID NO: 2530034 - DNA, 25 bp, Homo sapien
aactaagagaatgctgatacaggga

SEQ ID NO: 2530035 - DNA, 25 bp, Homo sapien
cgtgcatgccaaaacaccctgggta

SEQ ID NO: 2530036 - DNA, 25 bp, Homo sapien
cacaaggtgaccttggctatctctc

SEQ ID NO: 2530037 - DNA, 25 bp, Homo sapien
tgtaataaattacctaagccagcac

SEQ ID NO: 2530038 - DNA, 25 bp, Homo sapien
actgcttcgtgctagggacgttgac

SEQ ID NO: 2530039 - DNA, 25 bp, Homo sapien
gctagggacgttgacattacagcag

SEQ ID NO: 2530040 - DNA, 25 bp, Homo sapien
cacagcagtactgcttcgtgctagg

SEQ ID NO: 2530041 - DNA, 25 bp, Homo sapien
acacagtactcataggcgctgcagc

SEQ ID NO: 2530042 - DNA, 25 bp, Homo sapien
gaatgatgagtagggtatagaagac

SEQ ID NO: 2530043 - DNA, 25 bp, Homo sapien
aaaaccctatgaatggcccaaccag

SEQ ID NO: 2530044 - DNA, 25 bp, Homo sapien
tctctgatgttgaagggaaccttga

SEQ ID NO: 2530045 - DNA, 25 bp, Homo sapien
tgtgttgcagaggaatccctattca

SEQ ID NO: 2530046 - DNA, 25 bp, Homo sapien
ccttgaatggagttgcggcactgat

SEQ ID NO: 2530047 - DNA, 25 bp, Homo sapien
cgagttcatccgtgatgaggtgctt

SEQ ID NO: 2530048 - DNA, 25 bp, Homo sapien
ggctgattatggtcatgaacctgga

SEQ ID NO: 2530049 - DNA, 25 bp, Homo sapien
ggacgactgctattgcccaagttaa

SEQ ID NO: 2530050 - DNA, 25 bp, Homo sapien
tgcagaccactgcatgcctatagtg

SEQ ID NO: 2530051 - DNA, 25 bp, Homo sapien
tactcgcagttaactgtggtccaaa

SEQ ID NO: 2530052 - DNA, 25 bp, Homo sapien
taagtagcatggtgcaacctcacgc

SEQ ID NO: 2530053 - DNA, 25 bp, Homo sapien
taatacatagacagggttgcagacc

SEQ ID NO: 2530054 - DNA, 25 bp, Homo sapien
tagacgagcgacagcccgaagacca

SEQ ID NO: 2530055 - DNA, 25 bp, Homo sapien
ctgaggaagtagacgagcgacagcc

SEQ ID NO: 2530056 - DNA, 25 bp, Homo sapien
cgacagcccgaagaccagggcgagc

SEQ ID NO: 2530057 - DNA, 25 bp, Homo sapien
acagcccgaagaccagggcgagcac

SEQ ID NO: 2530058 - DNA, 25 bp, Homo sapien
gcagcccagtctgctcccggcagcc

SEQ ID NO: 2530059 - DNA, 25 bp, Homo sapien
ccgcagcccagtctgctcccggcag

SEQ ID NO: 2530060 - DNA, 25 bp, Homo sapien
cgggcggcatggcccctacgcgccc

SEQ ID NO: 2530061 - DNA, 25 bp, Homo sapien
cccgggcggcatggcccctacgcgc

SEQ ID NO: 2530062 - DNA, 25 bp, Homo sapien
tctaagtgggtgacatcaggccctt

SEQ ID NO: 2530063 - DNA, 25 bp, Homo sapien
gaaggtgagtcactttccgacctag

SEQ ID NO: 2530064 - DNA, 25 bp, Homo sapien
caggcattgctgtgtgcatcgggat

SEQ ID NO: 2530065 - DNA, 25 bp, Homo sapien
gccaactccacgcttcgagaacagg

SEQ ID NO: 2530066 - DNA, 25 bp, Homo sapien
atcattttccttcatgcatttcagg

SEQ ID NO: 2530067 - DNA, 25 bp, Homo sapien
atctcggctctcagagtgcttaatg

SEQ ID NO: 2530068 - DNA, 25 bp, Homo sapien
ccttcatgcatttcaggaagctatc

SEQ ID NO: 2530069 - DNA, 25 bp, Homo sapien
tcaatatgcacattaattctctcgg

SEQ ID NO: 2530070 - DNA, 25 bp, Homo sapien
ggcattcctttttgaacagtaccca

SEQ ID NO: 2530071 - DNA, 25 bp, Homo sapien
tttgccatggtaacacttacggggc

SEQ ID NO: 2530072 - DNA, 25 bp, Homo sapien
gccatggtaacacttacggggcatt

SEQ ID NO: 2530073 - DNA, 25 bp, Homo sapien
gcattcctttttgaacagtacccat

SEQ ID NO: 2530074 - DNA, 25 bp, Homo sapien
ggcttgaaaacctgccccagactat

SEQ ID NO: 2530075 - DNA, 25 bp, Homo sapien
agctcccctgcaaaacgaagggccg

SEQ ID NO: 2530076 - DNA, 25 bp, Homo sapien
agagggtttagttcgtgccgccgct

SEQ ID NO: 2530077 - DNA, 25 bp, Homo sapien
taagtagatgacattcccaggtcac

SEQ ID NO: 2530078 - DNA, 25 bp, Homo sapien
gccagtgaaggtctgagagctatac

SEQ ID NO: 2530079 - DNA, 25 bp, Homo sapien
agagctatactgtcggcttcctggg

SEQ ID NO: 2530080 - DNA, 25 bp, Homo sapien
catcagctgcctcgtcaaggtggac

SEQ ID NO: 2530081 - DNA, 25 bp, Homo sapien
cctggggaccacatatgttgaccag

SEQ ID NO: 2530082 - DNA, 25 bp, Homo sapien
gcaaggcgacacaggttgcagccac

SEQ ID NO: 2530083 - DNA, 25 bp, Homo sapien
tgcaaggcgacacaggttgcagcca

SEQ ID NO: 2530084 - DNA, 25 bp, Homo sapien
ctgcaaggcgacacaggttgcagcc

SEQ ID NO: 2530085 - DNA, 25 bp, Homo sapien
ctgtggtaggcagcatccgccgcac

SEQ ID NO: 2530086 - DNA, 25 bp, Homo sapien
ggtaggcagcatccgccgcacgtgt

SEQ ID NO: 2530087 - DNA, 25 bp, Homo sapien
gtggtaggcagcatccgccgcacgt

SEQ ID NO: 2530088 - DNA, 25 bp, Homo sapien
cgccgcacgtgtcgtgtcctcttac

SEQ ID NO: 2530089 - DNA, 25 bp, Homo sapien
gagaaggtctgattggccccggtca

SEQ ID NO: 2530090 - DNA, 25 bp, Homo sapien
agaaggtctgattggccccggtcat

SEQ ID NO: 2530091 - DNA, 25 bp, Homo sapien
cagttcagctcttgggagaaggtct

SEQ ID NO: 2530092 - DNA, 25 bp, Homo sapien
ccagttcagctcttgggagaaggtc

SEQ ID NO: 2530093 - DNA, 25 bp, Homo sapien
gcagctggccaatgaatgggctgca

SEQ ID NO: 2530094 - DNA, 25 bp, Homo sapien
accagctatttcataggtcagcagc

SEQ ID NO: 2530095 - DNA, 25 bp, Homo sapien
tcagcagctggccaatgaatgggct

SEQ ID NO: 2530096 - DNA, 25 bp, Homo sapien
ttgtgtaccagctatttcataggtc

SEQ ID NO: 2530097 - DNA, 25 bp, Homo sapien
ttccttctccttgaaacggacactg

SEQ ID NO: 2530098 - DNA, 25 bp, Homo sapien
ctagtccttgctggagccatccagt

SEQ ID NO: 2530099 - DNA, 25 bp, Homo sapien
tagtccttgctggagccatccagtg

SEQ ID NO: 2530100 - DNA, 25 bp, Homo sapien
ccatcagaggttgcgtttgaactcg

SEQ ID NO: 2530101 - DNA, 25 bp, Homo sapien
gatatgcaaccagcccctttgggag

SEQ ID NO: 2530102 - DNA, 25 bp, Homo sapien
ccacttcgttgtgaggtttcggcaa

SEQ ID NO: 2530103 - DNA, 25 bp, Homo sapien
gtcagctccagttctcgcaggtaaa

SEQ ID NO: 2530104 - DNA, 25 bp, Homo sapien
ctgggagccatgccaagatggtcag

SEQ ID NO: 2530105 - DNA, 25 bp, Homo sapien
actgggagccatgccaagatggtca

SEQ ID NO: 2530106 - DNA, 25 bp, Homo sapien
gagggtgtatcgtccactgtcaaca

SEQ ID NO: 2530107 - DNA, 25 bp, Homo sapien
taagcgatgggagaaatctgctgct

SEQ ID NO: 2530108 - DNA, 25 bp, Homo sapien
tgagtgagcagtctctaagcgatgg

SEQ ID NO: 2530109 - DNA, 25 bp, Homo sapien
gctttgcccttagtaacaggccctg

SEQ ID NO: 2530110 - DNA, 25 bp, Homo sapien
catcatagagggtaatgggtgccat

SEQ ID NO: 2530111 - DNA, 25 bp, Homo sapien
tgactaccccttggatcaaactggt

SEQ ID NO: 2530112 - DNA, 25 bp, Homo sapien
catcagttactccagggtgtgagga

SEQ ID NO: 2530113 - DNA, 25 bp, Homo sapien
gagaatccagtatggtcttcgcggc

SEQ ID NO: 2530114 - DNA, 25 bp, Homo sapien
tagaagtgcacaatcagttttttaa

SEQ ID NO: 2530115 - DNA, 25 bp, Homo sapien
tcttacaaaagagcacaacgacgtc

SEQ ID NO: 2530116 - DNA, 25 bp, Homo sapien
caacaacgtcagaacccagaacgga

SEQ ID NO: 2530117 - DNA, 25 bp, Homo sapien
aaatatgtacaaagcgtctccaagg

SEQ ID NO: 2530118 - DNA, 25 bp, Homo sapien
gacgacctcatgaagggacccagtg

SEQ ID NO: 2530119 - DNA, 25 bp, Homo sapien
taagaagagtgtctagctggtcccc

SEQ ID NO: 2530120 - DNA, 25 bp, Homo sapien
gaagacgggtaaagcacttcgccca

SEQ ID NO: 2530121 - DNA, 25 bp, Homo sapien
cctttaccagatagcagggctctca

SEQ ID NO: 2530122 - DNA, 25 bp, Homo sapien
tccagccttggagaatgaccgtccg

SEQ ID NO: 2530123 - DNA, 25 bp, Homo sapien
aaggacctggtcatttacagcaaag

SEQ ID NO: 2530124 - DNA, 25 bp, Homo sapien
taccgggtggtgacctgcaaatcca

SEQ ID NO: 2530125 - DNA, 25 bp, Homo sapien
tcttagaactggagcggtgtctgct

SEQ ID NO: 2530126 - DNA, 25 bp, Homo sapien
gatattcgtccccaggtagaagaag

SEQ ID NO: 2530127 - DNA, 25 bp, Homo sapien
tgtgtttctacgatcgctccaggcg

SEQ ID NO: 2530128 - DNA, 25 bp, Homo sapien
tatcaaagttcacatcgcaaggtgc

SEQ ID NO: 2530129 - DNA, 25 bp, Homo sapien
tatccccaggcagttggccgatgct

SEQ ID NO: 2530130 - DNA, 25 bp, Homo sapien
ttcccaaggaagtgaccatataagg

SEQ ID NO: 2530131 - DNA, 25 bp, Homo sapien
aaggatgaggaaaacctttgcgtgt

SEQ ID NO: 2530132 - DNA, 25 bp, Homo sapien
tgaccatataaggaaatcctggttc

SEQ ID NO: 2530133 - DNA, 25 bp, Homo sapien
acctttgcgtgttgacatgggaaga

SEQ ID NO: 2530134 - DNA, 25 bp, Homo sapien
tgatgtgaaagtcggcctgactcca

SEQ ID NO: 2530135 - DNA, 25 bp, Homo sapien
ggtcacacaactggcaaatgcgaga

SEQ ID NO: 2530136 - DNA, 25 bp, Homo sapien
caaggctcagaaggtaatgggatcg

SEQ ID NO: 2530137 - DNA, 25 bp, Homo sapien
gcaaatgcgagatggagaaagtgat

SEQ ID NO: 2530138 - DNA, 25 bp, Homo sapien
tcctgtatctttgagtattgactgg

SEQ ID NO: 2530139 - DNA, 25 bp, Homo sapien
tggttaaatcatacccatcctcctc

SEQ ID NO: 2530140 - DNA, 25 bp, Homo sapien
ctctcctgtatctttgagtattgac

SEQ ID NO: 2530141 - DNA, 25 bp, Homo sapien
cctgtatctttgagtattgactggt

SEQ ID NO: 2530142 - DNA, 25 bp, Homo sapien
agcacaagaaaggccggagcggctg

SEQ ID NO: 2530143 - DNA, 25 bp, Homo sapien
gccggagcggctggtattctgaggt

SEQ ID NO: 2530144 - DNA, 25 bp, Homo sapien
aggccggagcggctggtattctgag

SEQ ID NO: 2530145 - DNA, 25 bp, Homo sapien
caagaaaggccggagcggctggtat

SEQ ID NO: 2530146 - DNA, 25 bp, Homo sapien
caaattccacgctttgggcttcgcg

SEQ ID NO: 2530147 - DNA, 25 bp, Homo sapien
gagagcgtttccaatctcctggacg

SEQ ID NO: 2530148 - DNA, 25 bp, Homo sapien
tggacgacagaaccagagaaagccg

SEQ ID NO: 2530149 - DNA, 25 bp, Homo sapien
agcctggcccctttcagtcgcggga

SEQ ID NO: 2530150 - DNA, 25 bp, Homo sapien
tgggcgctgccaccccccacgctcc

SEQ ID NO: 2530151 - DNA, 25 bp, Homo sapien
gcggtcccggctcacaccccgcgca

SEQ ID NO: 2530152 - DNA, 25 bp, Homo sapien
tgtcgcctgcggtcccggctcacac

SEQ ID NO: 2530153 - DNA, 25 bp, Homo sapien
ctgcggtcccggctcacaccccgcg

SEQ ID NO: 2530154 - DNA, 25 bp, Homo sapien
ctgttgctcgctccggctgggtctc

SEQ ID NO: 2530155 - DNA, 25 bp, Homo sapien
ttgctcgctccggctgggtctcggc

SEQ ID NO: 2530156 - DNA, 25 bp, Homo sapien
tgctcgctccggctgggtctcggct

SEQ ID NO: 2530157 - DNA, 25 bp, Homo sapien
tgttgctcgctccggctgggtctcg

SEQ ID NO: 2530158 - DNA, 25 bp, Homo sapien
ctagcgccttgagccgggcggcggt

SEQ ID NO: 2530159 - DNA, 25 bp, Homo sapien
tgcgctggtgcagctcgtcgcctag

SEQ ID NO: 2530160 - DNA, 25 bp, Homo sapien
cggcggtgagctgcgcggcggacga

SEQ ID NO: 2530161 - DNA, 25 bp, Homo sapien
aggcgacccgcgctgcaggcgcaca

SEQ ID NO: 2530162 - DNA, 25 bp, Homo sapien
gaccgctggcctcgctcccgccccg

SEQ ID NO: 2530163 - DNA, 25 bp, Homo sapien
tcgggccgcccctcgcctcctctcc

SEQ ID NO: 2530164 - DNA, 25 bp, Homo sapien
cctcctctccctccggcctctgcgc

SEQ ID NO: 2530165 - DNA, 25 bp, Homo sapien
tccggcctctgcgcccgctgccgcc

SEQ ID NO: 2530166 - DNA, 25 bp, Homo sapien
tatggagtgagacgccttagggaac

SEQ ID NO: 2530167 - DNA, 25 bp, Homo sapien
tctgttcccaaggacgtgagagcgc

SEQ ID NO: 2530168 - DNA, 25 bp, Homo sapien
tgtgggcctgcgatcaactgatatg

SEQ ID NO: 2530169 - DNA, 25 bp, Homo sapien
aataagtgttggcacagacaggccc

SEQ ID NO: 2530170 - DNA, 25 bp, Homo sapien
tgagctcttatgactccaccgggac

SEQ ID NO: 2530171 - DNA, 25 bp, Homo sapien
taacgatcatgaagttgacaccaag

SEQ ID NO: 2530172 - DNA, 25 bp, Homo sapien
cagtgtctgctgatctcttcgggat

SEQ ID NO: 2530173 - DNA, 25 bp, Homo sapien
gaaagactggccatcgttactcatg

SEQ ID NO: 2530174 - DNA, 25 bp, Homo sapien
cctggttcctggttctgatccctta

SEQ ID NO: 2530175 - DNA, 25 bp, Homo sapien
ggttctgatcccttatcacctccag

SEQ ID NO: 2530176 - DNA, 25 bp, Homo sapien
ggctccatgaagtagcctcattcct

SEQ ID NO: 2530177 - DNA, 25 bp, Homo sapien
cttgggctccatgaagtagcctcat

SEQ ID NO: 2530178 - DNA, 25 bp, Homo sapien
gagtaaaatggtgcgcctcccaaga

SEQ ID NO: 2530179 - DNA, 25 bp, Homo sapien
tcccaagatggaagtgaatgcccag

SEQ ID NO: 2530180 - DNA, 25 bp, Homo sapien
taaatagcttccacgcttggcagca

SEQ ID NO: 2530181 - DNA, 25 bp, Homo sapien
gaaggaagcccatgttaagagcaga

SEQ ID NO: 2530182 - DNA, 25 bp, Homo sapien
tttgagcacgatgcaagaatacagg

SEQ ID NO: 2530183 - DNA, 25 bp, Homo sapien
agccaggacgatgcaaccgtggcca

SEQ ID NO: 2530184 - DNA, 25 bp, Homo sapien
taccctgttcatcgttttgagcacg

SEQ ID NO: 2530185 - DNA, 25 bp, Homo sapien
agaatacaggcactagccctcagcc

SEQ ID NO: 2530186 - DNA, 25 bp, Homo sapien
tatagtgctcccctaaaatggcctg

SEQ ID NO: 2530187 - DNA, 25 bp, Homo sapien
gaaaggttcccacaaaatgctctga

SEQ ID NO: 2530188 - DNA, 25 bp, Homo sapien
tctttggcatatggtcagggcagcg

SEQ ID NO: 2530189 - DNA, 25 bp, Homo sapien
ggtctgtcagaaagccaacacggag

SEQ ID NO: 2530190 - DNA, 25 bp, Homo sapien
caggagacagcagatcacttggata

SEQ ID NO: 2530191 - DNA, 25 bp, Homo sapien
ttttttgcgaatttggagctgaatg

SEQ ID NO: 2530192 - DNA, 25 bp, Homo sapien
ggtggccaaatggaccctgatgacg

SEQ ID NO: 2530193 - DNA, 25 bp, Homo sapien
tttgtagagccttccttaccctctg

SEQ ID NO: 2530194 - DNA, 25 bp, Homo sapien
ttttaattcgttctatttcagtagc

SEQ ID NO: 2530195 - DNA, 25 bp, Homo sapien
gatgaactgtatagtggggaagctt

SEQ ID NO: 2530196 - DNA, 25 bp, Homo sapien
tcagtagctttagaggggtagaaat

SEQ ID NO: 2530197 - DNA, 25 bp, Homo sapien
tacattgtacccagtacccttctga

SEQ ID NO: 2530198 - DNA, 25 bp, Homo sapien
tcaagatagcagttgtgtcaccact

SEQ ID NO: 2530199 - DNA, 25 bp, Homo sapien
gcgagaaacctctggcttagatgct

SEQ ID NO: 2530200 - DNA, 25 bp, Homo sapien
caagtcacttgctttggcatcccca

SEQ ID NO: 2530201 - DNA, 25 bp, Homo sapien
tagatgcttttgaggactggaccat

SEQ ID NO: 2530202 - DNA, 25 bp, Homo sapien
gaaatagatttcagatacatcagaa

SEQ ID NO: 2530203 - DNA, 25 bp, Homo sapien
catatggagttgtgtatccacagag

SEQ ID NO: 2530204 - DNA, 25 bp, Homo sapien
tcagaatcattgacaaaattgcaag

SEQ ID NO: 2530205 - DNA, 25 bp, Homo sapien
tataggtattgacacgtagggaaaa

SEQ ID NO: 2530206 - DNA, 25 bp, Homo sapien
gctggctcatctgcaagcttcctga

SEQ ID NO: 2530207 - DNA, 25 bp, Homo sapien
taagtggcagaacatcttcacggga

SEQ ID NO: 2530208 - DNA, 25 bp, Homo sapien
caccttggcttgaggaattcgctgg

SEQ ID NO: 2530209 - DNA, 25 bp, Homo sapien
tcctgatgctttgcgagctttccca

SEQ ID NO: 2530210 - DNA, 25 bp, Homo sapien
gtatttcagaacacggtggtgtccc

SEQ ID NO: 2530211 - DNA, 25 bp, Homo sapien
taagccatttggtggccgcagttgg

SEQ ID NO: 2530212 - DNA, 25 bp, Homo sapien
tctgaagcaccacgggaaggttttc

SEQ ID NO: 2530213 - DNA, 25 bp, Homo sapien
tcctgccaaacgatgtcaagagtgt

SEQ ID NO: 2530214 - DNA, 25 bp, Homo sapien
tgaggcgggtactcctctgtgccag

SEQ ID NO: 2530215 - DNA, 25 bp, Homo sapien
tgccctgaagagaggtagcatggct

SEQ ID NO: 2530216 - DNA, 25 bp, Homo sapien
gctgtgtctgatccagtgccctgaa

SEQ ID NO: 2530217 - DNA, 25 bp, Homo sapien
ccccaacttagagcaaggaaatgat

SEQ ID NO: 2530218 - DNA, 25 bp, Homo sapien
tcagagtttgcttgcagtgtgaaca

SEQ ID NO: 2530219 - DNA, 25 bp, Homo sapien
tcctaggatctccacacagggacct

SEQ ID NO: 2530220 - DNA, 25 bp, Homo sapien
cagttaggctcaccggaaaccagaa

SEQ ID NO: 2530221 - DNA, 25 bp, Homo sapien
ttttcaggttgagctatacagaggc

SEQ ID NO: 2530222 - DNA, 25 bp, Homo sapien
agtatatattcactgaaggcaacaa

SEQ ID NO: 2530223 - DNA, 25 bp, Homo sapien
gtttattaagcgtttagaatctgta

SEQ ID NO: 2530224 - DNA, 25 bp, Homo sapien
aagtctgcaggaagtaatcacttgt

SEQ ID NO: 2530225 - DNA, 25 bp, Homo sapien
ggaattggggcatttatgagaagct

SEQ ID NO: 2530226 - DNA, 25 bp, Homo sapien
caccctggttaggttcagacggcaa

SEQ ID NO: 2530227 - DNA, 25 bp, Homo sapien
caaactagcttatcttagggttgac

SEQ ID NO: 2530228 - DNA, 25 bp, Homo sapien
tacctcgtggaatatagctacaaca

SEQ ID NO: 2530229 - DNA, 25 bp, Homo sapien
cttttgaacaggcagtcaccctggt

SEQ ID NO: 2530230 - DNA, 25 bp, Homo sapien
tggccagaatcagaacgtcctcctt

SEQ ID NO: 2530231 - DNA, 25 bp, Homo sapien
tgggcttactccgttctggccagaa

SEQ ID NO: 2530232 - DNA, 25 bp, Homo sapien
tgctaagggcaaatgtcaggctgta

SEQ ID NO: 2530233 - DNA, 25 bp, Homo sapien
aactgggttgctaagtcactgagcc

SEQ ID NO: 2530234 - DNA, 25 bp, Homo sapien
acttctggaccaaatttgtgtttgc

SEQ ID NO: 2530235 - DNA, 25 bp, Homo sapien
tgtaaattatggagtataaatattc

SEQ ID NO: 2530236 - DNA, 25 bp, Homo sapien
gctggtatctaaatacaataggaaa

SEQ ID NO: 2530237 - DNA, 25 bp, Homo sapien
aaacagatggcaaactttgaacttc

SEQ ID NO: 2530238 - DNA, 25 bp, Homo sapien
tgagcagcatttgtagcaacggacc

SEQ ID NO: 2530239 - DNA, 25 bp, Homo sapien
tcaaaagcagagtagcctagagggc

SEQ ID NO: 2530240 - DNA, 25 bp, Homo sapien
gaaggcctcccggtcatgaatgaat

SEQ ID NO: 2530241 - DNA, 25 bp, Homo sapien
tgtcagttacatggcctagcaggaa

SEQ ID NO: 2530242 - DNA, 25 bp, Homo sapien
ttaagatacgcagccattccatatt

SEQ ID NO: 2530243 - DNA, 25 bp, Homo sapien
ttgcttaagatacgcagccattcca

SEQ ID NO: 2530244 - DNA, 25 bp, Homo sapien
gattgcttaagatacgcagccattc

SEQ ID NO: 2530245 - DNA, 25 bp, Homo sapien
gcttaagatacgcagccattccata

SEQ ID NO: 2530246 - DNA, 25 bp, Homo sapien
tcaagcacgccaacttcaggcagtg

SEQ ID NO: 2530247 - DNA, 25 bp, Homo sapien
gcagctggcccagtgtaaaaatgtc

SEQ ID NO: 2530248 - DNA, 25 bp, Homo sapien
gagcctgtttctaacgtacctgcca

SEQ ID NO: 2530249 - DNA, 25 bp, Homo sapien
tacctgccattcgtggaagtcgcct

SEQ ID NO: 2530250 - DNA, 25 bp, Homo sapien
ccaccacacgtgttagatggcagac

SEQ ID NO: 2530251 - DNA, 25 bp, Homo sapien
ttcccaccacacgtgttagatggca

SEQ ID NO: 2530252 - DNA, 25 bp, Homo sapien
gcagacactggccgccgcaaaccca

SEQ ID NO: 2530253 - DNA, 25 bp, Homo sapien
ggggctagcgcttcccaccacacgt

SEQ ID NO: 2530254 - DNA, 25 bp, Homo sapien
ttctcgtaacaactgtcccgcggct

SEQ ID NO: 2530255 - DNA, 25 bp, Homo sapien
gcttcccctggtgagggtccagcct

SEQ ID NO: 2530256 - DNA, 25 bp, Homo sapien
tgtttacagttgctgagaaacggct

SEQ ID NO: 2530257 - DNA, 25 bp, Homo sapien
tgacggagccttcgctctgagcagc

SEQ ID NO: 2530258 - DNA, 25 bp, Homo sapien
cggcgctggccggccgggccgaggt

SEQ ID NO: 2530259 - DNA, 25 bp, Homo sapien
tcacggcgctggccggccgggccga

SEQ ID NO: 2530260 - DNA, 25 bp, Homo sapien
ggcgctggccggccgggccgaggtg

SEQ ID NO: 2530261 - DNA, 25 bp, Homo sapien
acggcgctggccggccgggccgagg

SEQ ID NO: 2530262 - DNA, 25 bp, Homo sapien
cacaggccggcccacgtcacccgtg

SEQ ID NO: 2530263 - DNA, 25 bp, Homo sapien
ccgtgcagccgggccagatggttac

SEQ ID NO: 2530264 - DNA, 25 bp, Homo sapien
aggccggcccacgtcacccgtgcag

SEQ ID NO: 2530265 - DNA, 25 bp, Homo sapien
acgtcacccgtgcagccgggccaga

SEQ ID NO: 2530266 - DNA, 25 bp, Homo sapien
caagggctgcctctaatgtgcgatg

SEQ ID NO: 2530267 - DNA, 25 bp, Homo sapien
cctgtggcgacttggacaagggctg

SEQ ID NO: 2530268 - DNA, 25 bp, Homo sapien
tctggcgggtgccatgttgtcccca

SEQ ID NO: 2530269 - DNA, 25 bp, Homo sapien
tgtgcgatggcagattccctcttgc

SEQ ID NO: 2530270 - DNA, 25 bp, Homo sapien
gtgttgatcaaaggccagcagcccc

SEQ ID NO: 2530271 - DNA, 25 bp, Homo sapien
ggatgccacagacaatgccaggagc

SEQ ID NO: 2530272 - DNA, 25 bp, Homo sapien
cacgctctggcggaaatgagcccta

SEQ ID NO: 2530273 - DNA, 25 bp, Homo sapien
ggatcaggtttgcaccaactcatcg

SEQ ID NO: 2530274 - DNA, 25 bp, Homo sapien
tgatgggctgtaccgaatgaactcc

SEQ ID NO: 2530275 - DNA, 25 bp, Homo sapien
acaagtcacggtcccctagaacagt

SEQ ID NO: 2530276 - DNA, 25 bp, Homo sapien
tttgcagccttaagcacaagtcacg

SEQ ID NO: 2530277 - DNA, 25 bp, Homo sapien
caccaggctcaacgctagagtggag

SEQ ID NO: 2530278 - DNA, 25 bp, Homo sapien
tgccgctgcttgctggaaggctgta

SEQ ID NO: 2530279 - DNA, 25 bp, Homo sapien
gcccaggactgccagaaagagccag

SEQ ID NO: 2530280 - DNA, 25 bp, Homo sapien
ccagcttccactgccgctgcttgct

SEQ ID NO: 2530281 - DNA, 25 bp, Homo sapien
tgggccctgcaactggcccaggact

SEQ ID NO: 2530282 - DNA, 25 bp, Homo sapien
cagacgagccttggctatgtaccgg

SEQ ID NO: 2530283 - DNA, 25 bp, Homo sapien
gataaaaacagcgaagtcccacata

SEQ ID NO: 2530284 - DNA, 25 bp, Homo sapien
caaagtgcagtttctccgcggaggt

SEQ ID NO: 2530285 - DNA, 25 bp, Homo sapien
tacaagacacaaggtgcgcagacga

SEQ ID NO: 2530286 - DNA, 25 bp, Homo sapien
cttggtctcaatgtcgatcccctgc

SEQ ID NO: 2530287 - DNA, 25 bp, Homo sapien
aagcggacgtgcatcttggtctcaa

SEQ ID NO: 2530288 - DNA, 25 bp, Homo sapien
tggtctcaatgtcgatcccctgcca

SEQ ID NO: 2530289 - DNA, 25 bp, Homo sapien
ccatgttaaggaagcggacgtgcat

SEQ ID NO: 2530290 - DNA, 25 bp, Homo sapien
ctggaagggacggagcagcgttaag

SEQ ID NO: 2530291 - DNA, 25 bp, Homo sapien
acggagcagcgttaagggcacgttc

SEQ ID NO: 2530292 - DNA, 25 bp, Homo sapien
cagcgttaagggcacgttcccgccg

SEQ ID NO: 2530293 - DNA, 25 bp, Homo sapien
tcccgccgccacctcacacctgacc

SEQ ID NO: 2530294 - DNA, 25 bp, Homo sapien
tacccaaagatcacatggtggcccc

SEQ ID NO: 2530295 - DNA, 25 bp, Homo sapien
cagcctggccagaaccttggagtgg

SEQ ID NO: 2530296 - DNA, 25 bp, Homo sapien
gggatcacgtgcattctagaaagac

SEQ ID NO: 2530297 - DNA, 25 bp, Homo sapien
aaggccatgtatgtaccccagtgct

SEQ ID NO: 2530298 - DNA, 25 bp, Homo sapien
gggcggccgctttacgaaagtgtca

SEQ ID NO: 2530299 - DNA, 25 bp, Homo sapien
tcattttaggacacagcgaggaagg

SEQ ID NO: 2530300 - DNA, 25 bp, Homo sapien
caccatccactagcagaggctggag

SEQ ID NO: 2530301 - DNA, 25 bp, Homo sapien
aggtcttgatttgcaaggccagcac

SEQ ID NO: 2530302 - DNA, 25 bp, Homo sapien
tcctcgaaggtgatcccctcgtaca

SEQ ID NO: 2530303 - DNA, 25 bp, Homo sapien
gtcctcgaaggtgatcccctcgtac

SEQ ID NO: 2530304 - DNA, 25 bp, Homo sapien
gaaggtgatcccctcgtacacctga

SEQ ID NO: 2530305 - DNA, 25 bp, Homo sapien
tgatcccctcgtacacctgatcagg

SEQ ID NO: 2530306 - DNA, 25 bp, Homo sapien
ctgccccatgcacacgctggccgcc

SEQ ID NO: 2530307 - DNA, 25 bp, Homo sapien
cccatgcacacgctggccgcctcca

SEQ ID NO: 2530308 - DNA, 25 bp, Homo sapien
gccccatgcacacgctggccgcctc

SEQ ID NO: 2530309 - DNA, 25 bp, Homo sapien
catctgccccatgcacacgctggcc

SEQ ID NO: 2530310 - DNA, 25 bp, Homo sapien
atggagcgagcggactccttctcga

SEQ ID NO: 2530311 - DNA, 25 bp, Homo sapien
gatgtgagggtttcccgacagcagc

SEQ ID NO: 2530312 - DNA, 25 bp, Homo sapien
ccttctcgatgtgagggtttcccga

SEQ ID NO: 2530313 - DNA, 25 bp, Homo sapien
tcatggccccgtcggcgatggagcg

SEQ ID NO: 2530314 - DNA, 25 bp, Homo sapien
ccccgggcgggccagaggagcatac

SEQ ID NO: 2530315 - DNA, 25 bp, Homo sapien
gccccgggcgggccagaggagcata

SEQ ID NO: 2530316 - DNA, 25 bp, Homo sapien
agccccgggcgggccagaggagcat

SEQ ID NO: 2530317 - DNA, 25 bp, Homo sapien
gagccccgggcgggccagaggagca

SEQ ID NO: 2530318 - DNA, 25 bp, Homo sapien
tccgagtcgtacatgtggaacagaa

SEQ ID NO: 2530319 - DNA, 25 bp, Homo sapien
ggccgtcgctgtccgagtcgtacat

SEQ ID NO: 2530320 - DNA, 25 bp, Homo sapien
ttccagagtgatgcggccgtcgctg

SEQ ID NO: 2530321 - DNA, 25 bp, Homo sapien
tcttccagagtgatgcggccgtcgc

SEQ ID NO: 2530322 - DNA, 25 bp, Homo sapien
tatcacgacagtaagcgttacccgt

SEQ ID NO: 2530323 - DNA, 25 bp, Homo sapien
ggcaactgccccgtgagcatgaata

SEQ ID NO: 2530324 - DNA, 25 bp, Homo sapien
ccatagcaggtcacggtccacagtg

SEQ ID NO: 2530325 - DNA, 25 bp, Homo sapien
tctgggcccgactgatctaacatgg

SEQ ID NO: 2530326 - DNA, 25 bp, Homo sapien
tctgggtcaaggttcaaggtcacat

SEQ ID NO: 2530327 - DNA, 25 bp, Homo sapien
catgatcggcatacccacgttctgg

SEQ ID NO: 2530328 - DNA, 25 bp, Homo sapien
tgaacactgaccagatgcccaggtg

SEQ ID NO: 2530329 - DNA, 25 bp, Homo sapien
gacagactgtcaaagctcacggaag

SEQ ID NO: 2530330 - DNA, 25 bp, Homo sapien
gcagaggcgccttgcgttctgaggt

SEQ ID NO: 2530331 - DNA, 25 bp, Homo sapien
ctccaagcccccaagccaatgcaca

SEQ ID NO: 2530332 - DNA, 25 bp, Homo sapien
tgaaggtgccgggaacgggagacag

SEQ ID NO: 2530333 - DNA, 25 bp, Homo sapien
ctgctgaggaatgtttaggatgaag

SEQ ID NO: 2530334 - DNA, 25 bp, Homo sapien
ggtcaggaagtcctcgaaattgatc

SEQ ID NO: 2530335 - DNA, 25 bp, Homo sapien
tcctcgaaattgatctcatcagcca

SEQ ID NO: 2530336 - DNA, 25 bp, Homo sapien
tcgtccatggtggtgtcgatgggcc

SEQ ID NO: 2530337 - DNA, 25 bp, Homo sapien
gccggaagtaggacatgatggtcag

SEQ ID NO: 2530338 - DNA, 25 bp, Homo sapien
ctgagaaccaggatttaaaaggagg

SEQ ID NO: 2530339 - DNA, 25 bp, Homo sapien
ctgagtcctttctctgagaaccagg

SEQ ID NO: 2530340 - DNA, 25 bp, Homo sapien
caggatttaaaaggaggtgagggca

SEQ ID NO: 2530341 - DNA, 25 bp, Homo sapien
tctctgagaaccaggatttaaaagg

SEQ ID NO: 2530342 - DNA, 25 bp, Homo sapien
gcaaccctgctaggcaagtgctatg

SEQ ID NO: 2530343 - DNA, 25 bp, Homo sapien
agcaaccctgctaggcaagtgctat

SEQ ID NO: 2530344 - DNA, 25 bp, Homo sapien
caaccctgctaggcaagtgctatga

SEQ ID NO: 2530345 - DNA, 25 bp, Homo sapien
ctgttgtcgaagaaggcacgaacaa

SEQ ID NO: 2530346 - DNA, 25 bp, Homo sapien
tccgggacattgttgaagttctcct

SEQ ID NO: 2530347 - DNA, 25 bp, Homo sapien
cacgaacaattttggatcggatggg

SEQ ID NO: 2530348 - DNA, 25 bp, Homo sapien
ctccaggtccgggacattgttgaag

SEQ ID NO: 2530349 - DNA, 25 bp, Homo sapien
tttccaagaaggagagataccggga

SEQ ID NO: 2530350 - DNA, 25 bp, Homo sapien
gatagcagacgtcagctggcatttt

SEQ ID NO: 2530351 - DNA, 25 bp, Homo sapien
gagaataaggaaagatagcagacgt

SEQ ID NO: 2530352 - DNA, 25 bp, Homo sapien
ccaagaaggagagataccgggaaga

SEQ ID NO: 2530353 - DNA, 25 bp, Homo sapien
cattcaaggtcttcacgagcctcct

SEQ ID NO: 2530354 - DNA, 25 bp, Homo sapien
tcataagcacgtgggtccttcgctg

SEQ ID NO: 2530355 - DNA, 25 bp, Homo sapien
attcatctgtatctaaagcctgtgg

SEQ ID NO: 2530356 - DNA, 25 bp, Homo sapien
cacgagcctcctgtgggatcctcat

SEQ ID NO: 2530357 - DNA, 25 bp, Homo sapien
tgtgagtcccacataaagaacacaa

SEQ ID NO: 2530358 - DNA, 25 bp, Homo sapien
gtgtgagtcccacataaagaacaca

SEQ ID NO: 2530359 - DNA, 25 bp, Homo sapien
tagcggctgcagctaccagcgtagg

SEQ ID NO: 2530360 - DNA, 25 bp, Homo sapien
ggctgcagctaccagcgtaggtacc

SEQ ID NO: 2530361 - DNA, 25 bp, Homo sapien
gcggctgcagctaccagcgtaggta

SEQ ID NO: 2530362 - DNA, 25 bp, Homo sapien
ccatagcggctgcagctaccagcgt

SEQ ID NO: 2530363 - DNA, 25 bp, Homo sapien
taaatctccgatggagctgctcgat

SEQ ID NO: 2530364 - DNA, 25 bp, Homo sapien
tccactcagctgcttaaatctccga

SEQ ID NO: 2530365 - DNA, 25 bp, Homo sapien
gaatggtaggctgatctccactcag

SEQ ID NO: 2530366 - DNA, 25 bp, Homo sapien
agctgctcgatctgatccgatgaga

SEQ ID NO: 2530367 - DNA, 25 bp, Homo sapien
gtcatcagttccaactgccttagta

SEQ ID NO: 2530368 - DNA, 25 bp, Homo sapien
gctcctgagacagggcagtcatgaa

SEQ ID NO: 2530369 - DNA, 25 bp, Homo sapien
gcaaaagcgagtgccgggtgaagca

SEQ ID NO: 2530370 - DNA, 25 bp, Homo sapien
actattactaatagctcctgagaca

SEQ ID NO: 2530371 - DNA, 25 bp, Homo sapien
gcagctggacctcattatttctggt

SEQ ID NO: 2530372 - DNA, 25 bp, Homo sapien
ggtcacagttgccatgcggatgatg

SEQ ID NO: 2530373 - DNA, 25 bp, Homo sapien
ggctcctgggttggtagcttttcca

SEQ ID NO: 2530374 - DNA, 25 bp, Homo sapien
taagcacctgatgcatgtctgcctg

SEQ ID NO: 2530375 - DNA, 25 bp, Homo sapien
aaacgtccatcaacaaaggaatggg

SEQ ID NO: 2530376 - DNA, 25 bp, Homo sapien
actgttcataagtgccaagaggtgg

SEQ ID NO: 2530377 - DNA, 25 bp, Homo sapien
taaccaatgttcaaagcagcactgt

SEQ ID NO: 2530378 - DNA, 25 bp, Homo sapien
aatgtggcacatccagatgacagaa

SEQ ID NO: 2530379 - DNA, 25 bp, Homo sapien
gcacctctggtttgctaggtgcttg

SEQ ID NO: 2530380 - DNA, 25 bp, Homo sapien
tgagcacctctggtttgctaggtgc

SEQ ID NO: 2530381 - DNA, 25 bp, Homo sapien
gagcacctctggtttgctaggtgct

SEQ ID NO: 2530382 - DNA, 25 bp, Homo sapien
ctgagcacctctggtttgctaggtg

SEQ ID NO: 2530383 - DNA, 25 bp, Homo sapien
ggacgcagcaacttgcatgcctcct

SEQ ID NO: 2530384 - DNA, 25 bp, Homo sapien
gccaaaacaatgactaaccctgggc

SEQ ID NO: 2530385 - DNA, 25 bp, Homo sapien
cctgcggctacagccaaaacaatga

SEQ ID NO: 2530386 - DNA, 25 bp, Homo sapien
cagggacgcagcaacttgcatgcct

SEQ ID NO: 2530387 - DNA, 25 bp, Homo sapien
ccttcgctcgggcttttcatatgaa

SEQ ID NO: 2530388 - DNA, 25 bp, Homo sapien
caatctagatgtgagccttcttggc

SEQ ID NO: 2530389 - DNA, 25 bp, Homo sapien
aactccaggagcagacacggatggg

SEQ ID NO: 2530390 - DNA, 25 bp, Homo sapien
ccagctcaaggtggtgaaggacaac

SEQ ID NO: 2530391 - DNA, 25 bp, Homo sapien
acccttaaaggtcggatggagagat

SEQ ID NO: 2530392 - DNA, 25 bp, Homo sapien
tgctattgcgggctccaggagcgct

SEQ ID NO: 2530393 - DNA, 25 bp, Homo sapien
gcattcgtttcataaagagacaggg

SEQ ID NO: 2530394 - DNA, 25 bp, Homo sapien
gacaagtataacatggtgtgatgcc

SEQ ID NO: 2530395 - DNA, 25 bp, Homo sapien
ggcagaggaacagcttttgtgcaaa

SEQ ID NO: 2530396 - DNA, 25 bp, Homo sapien
gctcccgtacgtaaacacctgattg

SEQ ID NO: 2530397 - DNA, 25 bp, Homo sapien
acacctgattgtacacatcaaatga

SEQ ID NO: 2530398 - DNA, 25 bp, Homo sapien
gacagagaaaggctcccgtacgtaa

SEQ ID NO: 2530399 - DNA, 25 bp, Homo sapien
ctccgggccgatgcggggcgcgcag

SEQ ID NO: 2530400 - DNA, 25 bp, Homo sapien
agcccggctgaactcgggcagagaa

SEQ ID NO: 2530401 - DNA, 25 bp, Homo sapien
agtccccagcccggctgaactcggg

SEQ ID NO: 2530402 - DNA, 25 bp, Homo sapien
gtcccgggagactcagcgaactcag

SEQ ID NO: 2530403 - DNA, 25 bp, Homo sapien
ccgcacctcctcagacgcggagtgg

SEQ ID NO: 2530404 - DNA, 25 bp, Homo sapien
tcctcagacgcggagtgggcagcgc

SEQ ID NO: 2530405 - DNA, 25 bp, Homo sapien
cgcacctcctcagacgcggagtggg

SEQ ID NO: 2530406 - DNA, 25 bp, Homo sapien
ctcccgcacctcctcagacgcggag

SEQ ID NO: 2530407 - DNA, 25 bp, Homo sapien
cgaaggctcggagccgcgggttccg

SEQ ID NO: 2530408 - DNA, 25 bp, Homo sapien
agcggcgggactggcctcgggtccg

SEQ ID NO: 2530409 - DNA, 25 bp, Homo sapien
ccgcactggcttcggctgcgcagcg

SEQ ID NO: 2530410 - DNA, 25 bp, Homo sapien
gggcgcgcgtccctctcaggccccg

SEQ ID NO: 2530411 - DNA, 25 bp, Homo sapien
gcggcgcgccgcggtcctagcgcac

SEQ ID NO: 2530412 - DNA, 25 bp, Homo sapien
gcggagggcggcgcgccgcggtcct

SEQ ID NO: 2530413 - DNA, 25 bp, Homo sapien
ataacggcggagggcggcgcgccgc

SEQ ID NO: 2530414 - DNA, 25 bp, Homo sapien
agggcggcgcgccgcggtcctagcg

SEQ ID NO: 2530415 - DNA, 25 bp, Homo sapien
ggataagttaatgagatgtccacca

SEQ ID NO: 2530416 - DNA, 25 bp, Homo sapien
taagttaatgagatgtccaccagag

SEQ ID NO: 2530417 - DNA, 25 bp, Homo sapien
gttaatgagatgtccaccagagggc

SEQ ID NO: 2530418 - DNA, 25 bp, Homo sapien
tgactggggccgatgctgttgcctg

SEQ ID NO: 2530419 - DNA, 25 bp, Homo sapien
ggtgggcgctatggaatcttgtccc

SEQ ID NO: 2530420 - DNA, 25 bp, Homo sapien
tggtgggcgctatggaatcttgtcc

SEQ ID NO: 2530421 - DNA, 25 bp, Homo sapien
ctgccctcctctggcaatgatgtgc

SEQ ID NO: 2530422 - DNA, 25 bp, Homo sapien
cctcctctggcaatgatgtgcacac

SEQ ID NO: 2530423 - DNA, 25 bp, Homo sapien
catctgcccgggctctgccctcctc

SEQ ID NO: 2530424 - DNA, 25 bp, Homo sapien
gccctcctctggcaatgatgtgcac

SEQ ID NO: 2530425 - DNA, 25 bp, Homo sapien
cctccacgcaaagccagctgctgcc

SEQ ID NO: 2530426 - DNA, 25 bp, Homo sapien
gcaaggcgccctccacgcaaagcca

SEQ ID NO: 2530427 - DNA, 25 bp, Homo sapien
gctgctgcctgttccgggacgtcat

SEQ ID NO: 2530428 - DNA, 25 bp, Homo sapien
cagctgctgcctgttccgggacgtc

SEQ ID NO: 2530429 - DNA, 25 bp, Homo sapien
tgagttagaaaatcacccctggccc

SEQ ID NO: 2530430 - DNA, 25 bp, Homo sapien
tgactcccagtgagacacatcaatg

SEQ ID NO: 2530431 - DNA, 25 bp, Homo sapien
caggctggctgcctaaaaataggag

SEQ ID NO: 2530432 - DNA, 25 bp, Homo sapien
gtccagctcccagttcttacagaat

SEQ ID NO: 2530433 - DNA, 25 bp, Homo sapien
tcactttacatcgagcctggtaggg

SEQ ID NO: 2530434 - DNA, 25 bp, Homo sapien
accatcactttacatcgagcctggt

SEQ ID NO: 2530435 - DNA, 25 bp, Homo sapien
actttacatcgagcctggtagggga

SEQ ID NO: 2530436 - DNA, 25 bp, Homo sapien
catcactttacatcgagcctggtag

SEQ ID NO: 2530437 - DNA, 25 bp, Homo sapien
gtgggatgtgaacaaaaggcgggag

SEQ ID NO: 2530438 - DNA, 25 bp, Homo sapien
gcaggaaaacaaggagtgggatgtg

SEQ ID NO: 2530439 - DNA, 25 bp, Homo sapien
ttcccagctgccctttaagtagaag

SEQ ID NO: 2530440 - DNA, 25 bp, Homo sapien
gctgccctttaagtagaagcttcat

SEQ ID NO: 2530441 - DNA, 25 bp, Homo sapien
tgccatatggaaggtgcgcagtaac

SEQ ID NO: 2530442 - DNA, 25 bp, Homo sapien
taacagacgagtgtgactctggtca

SEQ ID NO: 2530443 - DNA, 25 bp, Homo sapien
tgaagtgctgccatatggaaggtgc

SEQ ID NO: 2530444 - DNA, 25 bp, Homo sapien
aaggtgcgcagtaacagacgagtgt

SEQ ID NO: 2530445 - DNA, 25 bp, Homo sapien
gtatgcaatggaaaactgagccggc

SEQ ID NO: 2530446 - DNA, 25 bp, Homo sapien
tacagtcattgctacgtggccataa

SEQ ID NO: 2530447 - DNA, 25 bp, Homo sapien
tatatcaagatgacacacccgctgc

SEQ ID NO: 2530448 - DNA, 25 bp, Homo sapien
aagactttattaggccagtgcccgg

SEQ ID NO: 2530449 - DNA, 25 bp, Homo sapien
caaaaaaatcttggcattcatttga

SEQ ID NO: 2530450 - DNA, 25 bp, Homo sapien
taacattgtgaaagttcaacgttta

SEQ ID NO: 2530451 - DNA, 25 bp, Homo sapien
gagaaaagaagttgctatatccaaa

SEQ ID NO: 2530452 - DNA, 25 bp, Homo sapien
tgtgaaagttcaacgtttataacag

SEQ ID NO: 2530453 - DNA, 25 bp, Homo sapien
agaacttcggaaaggagccagtgcc

SEQ ID NO: 2530454 - DNA, 25 bp, Homo sapien
ttagctcgcttgagaactggcaggc

SEQ ID NO: 2530455 - DNA, 25 bp, Homo sapien
taaacttagtaggaggcaaccagca

SEQ ID NO: 2530456 - DNA, 25 bp, Homo sapien
taattcactagtgtaggcggagagc

SEQ ID NO: 2530457 - DNA, 25 bp, Homo sapien
gatcttctggataccggatctccag

SEQ ID NO: 2530458 - DNA, 25 bp, Homo sapien
atctccagctctgcgtttgggatgt

SEQ ID NO: 2530459 - DNA, 25 bp, Homo sapien
cgtttcatagacaaactccagatct

SEQ ID NO: 2530460 - DNA, 25 bp, Homo sapien
gggatgtagtgagtgccagtaaact

SEQ ID NO: 2530461 - DNA, 25 bp, Homo sapien
ctgagaaatagcgtcccacgtcagg

SEQ ID NO: 2530462 - DNA, 25 bp, Homo sapien
gaggctccacgttatattccaagtt

SEQ ID NO: 2530463 - DNA, 25 bp, Homo sapien
cttgaggctccacgttatattccaa

SEQ ID NO: 2530464 - DNA, 25 bp, Homo sapien
gagaaatagcgtcccacgtcagggt

SEQ ID NO: 2530465 - DNA, 25 bp, Homo sapien
attgctgccacacctttcatccaga

SEQ ID NO: 2530466 - DNA, 25 bp, Homo sapien
ttctcattacaatgtccattgctgc

SEQ ID NO: 2530467 - DNA, 25 bp, Homo sapien
gcattctcattacaatgtccattgc

SEQ ID NO: 2530468 - DNA, 25 bp, Homo sapien
tccattgctgccacacctttcatcc

SEQ ID NO: 2530469 - DNA, 25 bp, Homo sapien
tctcttgggaaaaccatgctacctc

SEQ ID NO: 2530470 - DNA, 25 bp, Homo sapien
cagtggctaagtttctgaagctgcc

SEQ ID NO: 2530471 - DNA, 25 bp, Homo sapien
gtggcacgggtgtctcaagagctcc

SEQ ID NO: 2530472 - DNA, 25 bp, Homo sapien
tggtgacaagtctcgtacctgccac

SEQ ID NO: 2530473 - DNA, 25 bp, Homo sapien
gcgtgggctgcccaaggatttaacc

SEQ ID NO: 2530474 - DNA, 25 bp, Homo sapien
agaccccacagcggtgtcacaggca

SEQ ID NO: 2530475 - DNA, 25 bp, Homo sapien
cctgccacgtaaccctggaaggagc

SEQ ID NO: 2530476 - DNA, 25 bp, Homo sapien
ggagcccccttctgctgttgcgtgg

SEQ ID NO: 2530477 - DNA, 25 bp, Homo sapien
gtcattggtaaacaggacataggta

SEQ ID NO: 2530478 - DNA, 25 bp, Homo sapien
ctgtcattggtaaacaggacatagg

SEQ ID NO: 2530479 - DNA, 25 bp, Homo sapien
tcattggtaaacaggacataggtat

SEQ ID NO: 2530480 - DNA, 25 bp, Homo sapien
tgtcattggtaaacaggacataggt

SEQ ID NO: 2530481 - DNA, 25 bp, Homo sapien
tacaagacaaccagtctggattctt

SEQ ID NO: 2530482 - DNA, 25 bp, Homo sapien
aaagtcaaagtcatatgaaaaaggg

SEQ ID NO: 2530483 - DNA, 25 bp, Homo sapien
gacaaccagtctggattcttcaaaa

SEQ ID NO: 2530484 - DNA, 25 bp, Homo sapien
accagtctggattcttcaaaaagtc

SEQ ID NO: 2530485 - DNA, 25 bp, Homo sapien
ccatcacactgagacagggcaagcg

SEQ ID NO: 2530486 - DNA, 25 bp, Homo sapien
atcacactgagacagggcaagcgac

SEQ ID NO: 2530487 - DNA, 25 bp, Homo sapien
ccccatcacactgagacagggcaag

SEQ ID NO: 2530488 - DNA, 25 bp, Homo sapien
atccccatcacactgagacagggca

SEQ ID NO: 2530489 - DNA, 25 bp, Homo sapien
gccacacgagggcatctccggcgtc

SEQ ID NO: 2530490 - DNA, 25 bp, Homo sapien
acgagggcatctccggcgtcagccg

SEQ ID NO: 2530491 - DNA, 25 bp, Homo sapien
acacgagggcatctccggcgtcagc

SEQ ID NO: 2530492 - DNA, 25 bp, Homo sapien
cacacgagggcatctccggcgtcag

SEQ ID NO: 2530493 - DNA, 25 bp, Homo sapien
gttcatgttccggatccactcgtgt

SEQ ID NO: 2530494 - DNA, 25 bp, Homo sapien
tccaccagcacgttatagaaaggct

SEQ ID NO: 2530495 - DNA, 25 bp, Homo sapien
cactcgtgtcccatcatgcaggtgg

SEQ ID NO: 2530496 - DNA, 25 bp, Homo sapien
cagccgtagatcacacagttatagc

SEQ ID NO: 2530497 - DNA, 25 bp, Homo sapien
gaatcatttttcaggacacccctaa

SEQ ID NO: 2530498 - DNA, 25 bp, Homo sapien
ggaactctcattagatactgcatga

SEQ ID NO: 2530499 - DNA, 25 bp, Homo sapien
gttacctgctttactccacggtgaa

SEQ ID NO: 2530500 - DNA, 25 bp, Homo sapien
gattagatgacaactggttacccaa

SEQ ID NO: 2530501 - DNA, 25 bp, Homo sapien
gaagggtcaaacatctaaaggccac

SEQ ID NO: 2530502 - DNA, 25 bp, Homo sapien
cctctggaacggacactgcaggaca

SEQ ID NO: 2530503 - DNA, 25 bp, Homo sapien
agctttctgtcttccccgcggtgcg

SEQ ID NO: 2530504 - DNA, 25 bp, Homo sapien
cactagaagatctctcaggaaagta

SEQ ID NO: 2530505 - DNA, 25 bp, Homo sapien
tgcttctcatcggagcgcagcttca

SEQ ID NO: 2530506 - DNA, 25 bp, Homo sapien
cctttttgcgctcaatgtgctctag

SEQ ID NO: 2530507 - DNA, 25 bp, Homo sapien
tatgcttcataatgagcccgatgga

SEQ ID NO: 2530508 - DNA, 25 bp, Homo sapien
cccgatggagtagcagacatctctg

SEQ ID NO: 2530509 - DNA, 25 bp, Homo sapien
aagataatattttcagctaggcctt

SEQ ID NO: 2530510 - DNA, 25 bp, Homo sapien
tactttcagagtggcataaactgcc

SEQ ID NO: 2530511 - DNA, 25 bp, Homo sapien
aaacaggctttgtgaatctggccca

SEQ ID NO: 2530512 - DNA, 25 bp, Homo sapien
tgggagctcctgctaaaggctactg

SEQ ID NO: 2530513 - DNA, 25 bp, Homo sapien
gcatctgcactcgatggcttcaggt

SEQ ID NO: 2530514 - DNA, 25 bp, Homo sapien
ttgctctgttgcactggctagagtg

SEQ ID NO: 2530515 - DNA, 25 bp, Homo sapien
agagtgaagtggcatggtatcagct

SEQ ID NO: 2530516 - DNA, 25 bp, Homo sapien
gctctgttgcactggctagagtgaa

SEQ ID NO: 2530517 - DNA, 25 bp, Homo sapien
ctagagtgaagtggcatggtatcag

SEQ ID NO: 2530518 - DNA, 25 bp, Homo sapien
gcaccattatacacaacgggcctct

SEQ ID NO: 2530519 - DNA, 25 bp, Homo sapien
gccacacagctcacggaggtaaaca

SEQ ID NO: 2530520 - DNA, 25 bp, Homo sapien
cggaggtaaacaccgcagccttctg

SEQ ID NO: 2530521 - DNA, 25 bp, Homo sapien
agccttctgaaagggcatgctgctg

SEQ ID NO: 2530522 - DNA, 25 bp, Homo sapien
gattcccaggtggaagtaaagcctg

SEQ ID NO: 2530523 - DNA, 25 bp, Homo sapien
ttcccaggtggaagtaaagcctggc

SEQ ID NO: 2530524 - DNA, 25 bp, Homo sapien
ccaggtggaagtaaagcctggcttg

SEQ ID NO: 2530525 - DNA, 25 bp, Homo sapien
tcccaggtggaagtaaagcctggct

SEQ ID NO: 2530526 - DNA, 25 bp, Homo sapien
tggtccgggtacattgccagataga

SEQ ID NO: 2530527 - DNA, 25 bp, Homo sapien
tcaggagctggtatgactggtcgat

SEQ ID NO: 2530528 - DNA, 25 bp, Homo sapien
tgccagatagagatccagcgagtct

SEQ ID NO: 2530529 - DNA, 25 bp, Homo sapien
tctctcaggagctggtatgactggt

SEQ ID NO: 2530530 - DNA, 25 bp, Homo sapien
tcttgacattgaccaccccatacag

SEQ ID NO: 2530531 - DNA, 25 bp, Homo sapien
agtactcgcattctttcactgtcag

SEQ ID NO: 2530532 - DNA, 25 bp, Homo sapien
cgtgctggccgatcaagtactcgca

SEQ ID NO: 2530533 - DNA, 25 bp, Homo sapien
gcttaacaggtttcccaccattctc

SEQ ID NO: 2530534 - DNA, 25 bp, Homo sapien
tatgtagatgtagtcaaagatgtcc

SEQ ID NO: 2530535 - DNA, 25 bp, Homo sapien
ctatgtagatgtagtcaaagatgtc

SEQ ID NO: 2530536 - DNA, 25 bp, Homo sapien
tgtagatgtagtcaaagatgtccag

SEQ ID NO: 2530537 - DNA, 25 bp, Homo sapien
atgtagatgtagtcaaagatgtcca

SEQ ID NO: 2530538 - DNA, 25 bp, Homo sapien
taaaatctgacccctttgtgcaagc

SEQ ID NO: 2530539 - DNA, 25 bp, Homo sapien
aaaatctgacccctttgtgcaagct

SEQ ID NO: 2530540 - DNA, 25 bp, Homo sapien
gaccacagataatgtgtcacggatg

SEQ ID NO: 2530541 - DNA, 25 bp, Homo sapien
caggaccacagataatgtgtcacgg

SEQ ID NO: 2530542 - DNA, 25 bp, Homo sapien
tcaggaccacagataatgtgtcacg

SEQ ID NO: 2530543 - DNA, 25 bp, Homo sapien
cacagataatgtgtcacggatgctc

SEQ ID NO: 2530544 - DNA, 25 bp, Homo sapien
cgagcaattgtcaaatagagcagag

SEQ ID NO: 2530545 - DNA, 25 bp, Homo sapien
gggactcccaactgccgagcaattg

SEQ ID NO: 2530546 - DNA, 25 bp, Homo sapien
agcagagacatgctgattgggattc

SEQ ID NO: 2530547 - DNA, 25 bp, Homo sapien
tgcgccttggcaccaccttaataag

SEQ ID NO: 2530548 - DNA, 25 bp, Homo sapien
gaacttcagttggtcgtaaaggaca

SEQ ID NO: 2530549 - DNA, 25 bp, Homo sapien
taagttgagggcattatagtaatcc

SEQ ID NO: 2530550 - DNA, 25 bp, Homo sapien
gtcgtaaaggacatagttcatggca

SEQ ID NO: 2530551 - DNA, 25 bp, Homo sapien
tagtaatccattcgattccccttga

SEQ ID NO: 2530552 - DNA, 25 bp, Homo sapien
tcataaatacagctggatccaaagc

SEQ ID NO: 2530553 - DNA, 25 bp, Homo sapien
taaatacagctggatccaaagcaat

SEQ ID NO: 2530554 - DNA, 25 bp, Homo sapien
aatacagctggatccaaagcaatgc

SEQ ID NO: 2530555 - DNA, 25 bp, Homo sapien
acagctggatccaaagcaatgccac

SEQ ID NO: 2530556 - DNA, 25 bp, Homo sapien
gggtggcgactgtttatgccccgaa

SEQ ID NO: 2530557 - DNA, 25 bp, Homo sapien
gagagaggattgcagtactggtcaa

SEQ ID NO: 2530558 - DNA, 25 bp, Homo sapien
ctggatgtctttgaggctgatgtcg

SEQ ID NO: 2530559 - DNA, 25 bp, Homo sapien
gttttgcaaacaagctccacgatgc

SEQ ID NO: 2530560 - DNA, 25 bp, Homo sapien
tatttaagatcttctgttgccgcag

SEQ ID NO: 2530561 - DNA, 25 bp, Homo sapien
acgactcatagtcatctggctgctg

SEQ ID NO: 2530562 - DNA, 25 bp, Homo sapien
tgttgccgcaggtagtaaagaattt

SEQ ID NO: 2530563 - DNA, 25 bp, Homo sapien
cttcaagatacgactcatagtcatc

SEQ ID NO: 2530564 - DNA, 25 bp, Homo sapien
gcagcactgctactcaatgtcttga

SEQ ID NO: 2530565 - DNA, 25 bp, Homo sapien
gctgactgtacccacatgatgtagt

SEQ ID NO: 2530566 - DNA, 25 bp, Homo sapien
aaggtagtgcattctcccatcagga

SEQ ID NO: 2530567 - DNA, 25 bp, Homo sapien
gactcagagagacaagcatattcga

SEQ ID NO: 2530568 - DNA, 25 bp, Homo sapien
tgtgcagtctttgtatctggaagtc

SEQ ID NO: 2530569 - DNA, 25 bp, Homo sapien
caggagatctctcaggaaggactga

SEQ ID NO: 2530570 - DNA, 25 bp, Homo sapien
ctaaagtatgtctcagtattggtca

SEQ ID NO: 2530571 - DNA, 25 bp, Homo sapien
tactgacatgtcttacagacgttac

SEQ ID NO: 2530572 - DNA, 25 bp, Homo sapien
gatacacaccagttcatcctcaaaa

SEQ ID NO: 2530573 - DNA, 25 bp, Homo sapien
tatttaggatacacaccagttcatc

SEQ ID NO: 2530574 - DNA, 25 bp, Homo sapien
aatctctggtccttcaaggttctca

SEQ ID NO: 2530575 - DNA, 25 bp, Homo sapien
aaaatctctggtccttcaaggttct

SEQ ID NO: 2530576 - DNA, 25 bp, Homo sapien
cactactgggtagaacctgcaaagc

SEQ ID NO: 2530577 - DNA, 25 bp, Homo sapien
tccgttgaacccatttgagaaataa

SEQ ID NO: 2530578 - DNA, 25 bp, Homo sapien
aaataatgctgatctggactccgtc

SEQ ID NO: 2530579 - DNA, 25 bp, Homo sapien
tgatgattccccaaataacggaggg

SEQ ID NO: 2530580 - DNA, 25 bp, Homo sapien
tgagaacgaggctacaatcttccgc

SEQ ID NO: 2530581 - DNA, 25 bp, Homo sapien
ccaaccaattgacgtagtcggtggg

SEQ ID NO: 2530582 - DNA, 25 bp, Homo sapien
tgaaaagaacctctttgagaacgag

SEQ ID NO: 2530583 - DNA, 25 bp, Homo sapien
cagctttttgccgaactttatactc

SEQ ID NO: 2530584 - DNA, 25 bp, Homo sapien
acaccttcccgctgctctggcacag

SEQ ID NO: 2530585 - DNA, 25 bp, Homo sapien
cgctgctctggcacagctcgcgcag

SEQ ID NO: 2530586 - DNA, 25 bp, Homo sapien
ctcacccggaactgctccttccaca

SEQ ID NO: 2530587 - DNA, 25 bp, Homo sapien
cttccacaccttcccgctgctctgg

SEQ ID NO: 2530588 - DNA, 25 bp, Homo sapien
ggagacacggccgatgtcggcggcc

SEQ ID NO: 2530589 - DNA, 25 bp, Homo sapien
gtgctggagacacggccgatgtcgg

SEQ ID NO: 2530590 - DNA, 25 bp, Homo sapien
acacggccgatgtcggcggccgtca

SEQ ID NO: 2530591 - DNA, 25 bp, Homo sapien
aggtgctggagacacggccgatgtc

SEQ ID NO: 2530592 - DNA, 25 bp, Homo sapien
ccgcagcacaggatgtactccagca

SEQ ID NO: 2530593 - DNA, 25 bp, Homo sapien
gcacaggatgtactccagcacctca

SEQ ID NO: 2530594 - DNA, 25 bp, Homo sapien
gcagcacaggatgtactccagcacc

SEQ ID NO: 2530595 - DNA, 25 bp, Homo sapien
cagcacaggatgtactccagcacct

SEQ ID NO: 2530596 - DNA, 25 bp, Homo sapien
caccacctccatcgcgctgtcgact

SEQ ID NO: 2530597 - DNA, 25 bp, Homo sapien
cggcaccacctccatcgcgctgtcg

SEQ ID NO: 2530598 - DNA, 25 bp, Homo sapien
ctgaggcccgctacctccggcgcgg

SEQ ID NO: 2530599 - DNA, 25 bp, Homo sapien
aggcccgctacctccggcgcggcct

SEQ ID NO: 2530600 - DNA, 25 bp, Homo sapien
cgcgcgcgtgcgagagtgcccgggc

SEQ ID NO: 2530601 - DNA, 25 bp, Homo sapien
gcgcgcgcgcgtgcgagagtgcccg

SEQ ID NO: 2530602 - DNA, 25 bp, Homo sapien
gcgcgcgcgtgcgagagtgcccggg

SEQ ID NO: 2530603 - DNA, 25 bp, Homo sapien
cgcgcgcgcgtgcgagagtgcccgg

SEQ ID NO: 2530604 - DNA, 25 bp, Homo sapien
tctggggccctggctatggatgcag

SEQ ID NO: 2530605 - DNA, 25 bp, Homo sapien
ggccctggctatggatgcagctgtg

SEQ ID NO: 2530606 - DNA, 25 bp, Homo sapien
tggggccctggctatggatgcagct

SEQ ID NO: 2530607 - DNA, 25 bp, Homo sapien
gggccctggctatggatgcagctgt

SEQ ID NO: 2530608 - DNA, 25 bp, Homo sapien
caatgaaaacagtggcggcagagca

SEQ ID NO: 2530609 - DNA, 25 bp, Homo sapien
gaagagcatgcgacaaacacagcct

SEQ ID NO: 2530610 - DNA, 25 bp, Homo sapien
gcaccgctctttgggccttctggaa

SEQ ID NO: 2530611 - DNA, 25 bp, Homo sapien
tggacaacctcgcaaagagcgtggg

SEQ ID NO: 2530612 - DNA, 25 bp, Homo sapien
taatggaaacaaccactgggctagg

SEQ ID NO: 2530613 - DNA, 25 bp, Homo sapien
actttggcagcagataatggaaaca

SEQ ID NO: 2530614 - DNA, 25 bp, Homo sapien
ttgaaagcatactgccctccccatg

SEQ ID NO: 2530615 - DNA, 25 bp, Homo sapien
cccactttggcagcagataatggaa

SEQ ID NO: 2530616 - DNA, 25 bp, Homo sapien
tgcatcgcagcaggaaaactcaagg

SEQ ID NO: 2530617 - DNA, 25 bp, Homo sapien
tctaaaaggtcaagtgagccgccca

SEQ ID NO: 2530618 - DNA, 25 bp, Homo sapien
cacacgagggattaatatgggccag

SEQ ID NO: 2530619 - DNA, 25 bp, Homo sapien
tcttagggaggaattacaccggctc

SEQ ID NO: 2530620 - DNA, 25 bp, Homo sapien
tttgctctcttcaatgaaggcaatg

SEQ ID NO: 2530621 - DNA, 25 bp, Homo sapien
tctcttcaatgaaggcaatggactc

SEQ ID NO: 2530622 - DNA, 25 bp, Homo sapien
actcagatctaaggcggttggtcac

SEQ ID NO: 2530623 - DNA, 25 bp, Homo sapien
ggcaatggactcagatctaaggcgg

SEQ ID NO: 2530624 - DNA, 25 bp, Homo sapien
cgttcgcagggtgactccaaaaata

SEQ ID NO: 2530625 - DNA, 25 bp, Homo sapien
tacgttcgcagggtgactccaaaaa

SEQ ID NO: 2530626 - DNA, 25 bp, Homo sapien
ttcgcagggtgactccaaaaatatc

SEQ ID NO: 2530627 - DNA, 25 bp, Homo sapien
ttcgtacgttcgcagggtgactcca

SEQ ID NO: 2530628 - DNA, 25 bp, Homo sapien
cgagagcttcccctgctgggtcatg

SEQ ID NO: 2530629 - DNA, 25 bp, Homo sapien
tcatgatgcgctggatggctttgag

SEQ ID NO: 2530630 - DNA, 25 bp, Homo sapien
gacgtccccacagacgtatatgtgg

SEQ ID NO: 2530631 - DNA, 25 bp, Homo sapien
tcatccggctgatgaatacgccggc

SEQ ID NO: 2530632 - DNA, 25 bp, Homo sapien
tctggctcccgggagtaagccgtgt

SEQ ID NO: 2530633 - DNA, 25 bp, Homo sapien
tcttccctgtagatatgatctatct

SEQ ID NO: 2530634 - DNA, 25 bp, Homo sapien
gatctatcttggattgccggcaccc

SEQ ID NO: 2530635 - DNA, 25 bp, Homo sapien
taagccgtgtacagctctctgaaga

SEQ ID NO: 2530636 - DNA, 25 bp, Homo sapien
tggatatcaaattgccgctgttgcc

SEQ ID NO: 2530637 - DNA, 25 bp, Homo sapien
gggcaatgccggtgcctggtccaac

SEQ ID NO: 2530638 - DNA, 25 bp, Homo sapien
cggtgcctggtccaacgaggatgca

SEQ ID NO: 2530639 - DNA, 25 bp, Homo sapien
cagaagcttcggaaaggggcaatgc

SEQ ID NO: 2530640 - DNA, 25 bp, Homo sapien
cctctcacgaaacaggggaccagtt

SEQ ID NO: 2530641 - DNA, 25 bp, Homo sapien
gggaccagttcgtcagcctgtatcc

SEQ ID NO: 2530642 - DNA, 25 bp, Homo sapien
cctgtatccggttgagccaggagga

SEQ ID NO: 2530643 - DNA, 25 bp, Homo sapien
tacgccgtggtgaattggtccttct

SEQ ID NO: 2530644 - DNA, 25 bp, Homo sapien
gccacagtgaggtgcacttcatcag

SEQ ID NO: 2530645 - DNA, 25 bp, Homo sapien
ctcgagtgcggtaggaaacgatggc

SEQ ID NO: 2530646 - DNA, 25 bp, Homo sapien
gaggagctgatggaatagtagcggg

SEQ ID NO: 2530647 - DNA, 25 bp, Homo sapien
tgcggtaggaaacgatggccacagt

SEQ ID NO: 2530648 - DNA, 25 bp, Homo sapien
cccatttccattcctcgtactcctg

SEQ ID NO: 2530649 - DNA, 25 bp, Homo sapien
ccaaggagatggacagagacaagct

SEQ ID NO: 2530650 - DNA, 25 bp, Homo sapien
caaggagatggacagagacaagctt

SEQ ID NO: 2530651 - DNA, 25 bp, Homo sapien
gccaaggagatggacagagacaagc

SEQ ID NO: 2530652 - DNA, 25 bp, Homo sapien
tgaggaccagcagacgctgcttctc

SEQ ID NO: 2530653 - DNA, 25 bp, Homo sapien
ctccttctcgctggtagctagggag

SEQ ID NO: 2530654 - DNA, 25 bp, Homo sapien
gctagggaggcaaactgctgcagct

SEQ ID NO: 2530655 - DNA, 25 bp, Homo sapien
gctgcagaggcgttggtggcgtggt

SEQ ID NO: 2530656 - DNA, 25 bp, Homo sapien
cggagctcgtctgtccagttactga

SEQ ID NO: 2530657 - DNA, 25 bp, Homo sapien
gaggcggagctcgtctgtccagtta

SEQ ID NO: 2530658 - DNA, 25 bp, Homo sapien
gggaggcggagctcgtctgtccagt

SEQ ID NO: 2530659 - DNA, 25 bp, Homo sapien
gctcgtctgtccagttactgatgac

SEQ ID NO: 2530660 - DNA, 25 bp, Homo sapien
tcaatatgaatgtcaaggatggaca

SEQ ID NO: 2530661 - DNA, 25 bp, Homo sapien
gagcccacctgtgctcctggatgaa

SEQ ID NO: 2530662 - DNA, 25 bp, Homo sapien
cccatttgcctttgaaagttcttca

SEQ ID NO: 2530663 - DNA, 25 bp, Homo sapien
cctggatgaagcactgagacccatt

SEQ ID NO: 2530664 - DNA, 25 bp, Homo sapien
ctaaagccgtgttccgctcctccag

SEQ ID NO: 2530665 - DNA, 25 bp, Homo sapien
gccgtgttccgctcctccagcagtt

SEQ ID NO: 2530666 - DNA, 25 bp, Homo sapien
aaagccgtgttccgctcctccagca

SEQ ID NO: 2530667 - DNA, 25 bp, Homo sapien
agccgtgttccgctcctccagcagt

SEQ ID NO: 2530668 - DNA, 25 bp, Homo sapien
tcacgaggtcctcgtggttgccagg

SEQ ID NO: 2530669 - DNA, 25 bp, Homo sapien
gagacgcacgaagatagttgaccga

SEQ ID NO: 2530670 - DNA, 25 bp, Homo sapien
tcctggctcccgttggtgtggagac

SEQ ID NO: 2530671 - DNA, 25 bp, Homo sapien
tcagggcattcacgaggtcctcgtg

SEQ ID NO: 2530672 - DNA, 25 bp, Homo sapien
gagactcgctttttgtggacattgg

SEQ ID NO: 2530673 - DNA, 25 bp, Homo sapien
gacggctaaggagccgggcagctga

SEQ ID NO: 2530674 - DNA, 25 bp, Homo sapien
cgggcagctgagactcgctttttgt

SEQ ID NO: 2530675 - DNA, 25 bp, Homo sapien
ctctggaggttttgacggctaagga

SEQ ID NO: 2530676 - DNA, 25 bp, Homo sapien
tccagctgcgatcattgctgatgag

SEQ ID NO: 2530677 - DNA, 25 bp, Homo sapien
gagttctggagcttcggccacaaag

SEQ ID NO: 2530678 - DNA, 25 bp, Homo sapien
acatcatctcccacacagaagacat

SEQ ID NO: 2530679 - DNA, 25 bp, Homo sapien
aaggtgaggcggaacttgtttctct

SEQ ID NO: 2530680 - DNA, 25 bp, Homo sapien
cagcgtgtccgaaggcgcaaaagtg

SEQ ID NO: 2530681 - DNA, 25 bp, Homo sapien
ctcgtgagccgaggccaaaaactga

SEQ ID NO: 2530682 - DNA, 25 bp, Homo sapien
cttgaagaccttcttggcccaggtc

SEQ ID NO: 2530683 - DNA, 25 bp, Homo sapien
aaaagtgagggtatgctcgtgagcc

SEQ ID NO: 2530684 - DNA, 25 bp, Homo sapien
caggggtccagcactctcaaagttg

SEQ ID NO: 2530685 - DNA, 25 bp, Homo sapien
cgcctgatgatttttgggagtcaga

SEQ ID NO: 2530686 - DNA, 25 bp, Homo sapien
gaggagacgctgttgaatcggacct

SEQ ID NO: 2530687 - DNA, 25 bp, Homo sapien
tgaggtcgggcccatcgcctgatga

SEQ ID NO: 2530688 - DNA, 25 bp, Homo sapien
ccagaccgtggacttctgtgtcacc

SEQ ID NO: 2530689 - DNA, 25 bp, Homo sapien
gctgcagccagaccgtggacttctg

SEQ ID NO: 2530690 - DNA, 25 bp, Homo sapien
acgggctgcagccagaccgtggact

SEQ ID NO: 2530691 - DNA, 25 bp, Homo sapien
tgcagccagaccgtggacttctgtg

SEQ ID NO: 2530692 - DNA, 25 bp, Homo sapien
cctttcttcctgcacagagttgggg

SEQ ID NO: 2530693 - DNA, 25 bp, Homo sapien
ccaggtgcacaatgtcatattcttc

SEQ ID NO: 2530694 - DNA, 25 bp, Homo sapien
acaaggaccagagtttcatgttcca

SEQ ID NO: 2530695 - DNA, 25 bp, Homo sapien
tccattgccaaaggtgctggtgacc

SEQ ID NO: 2530696 - DNA, 25 bp, Homo sapien
tctcagggggatctccattgccaaa

SEQ ID NO: 2530697 - DNA, 25 bp, Homo sapien
cataagcttgcgatttgcctgtctc

SEQ ID NO: 2530698 - DNA, 25 bp, Homo sapien
gaagatctcacacaaggtcttggca

SEQ ID NO: 2530699 - DNA, 25 bp, Homo sapien
ggatggtcgctttcaccctcttggc

SEQ ID NO: 2530700 - DNA, 25 bp, Homo sapien
tcagcttggccgagaacttgacagc

SEQ ID NO: 2530701 - DNA, 25 bp, Homo sapien
aagccaatggctcgccgctttgtgg

SEQ ID NO: 2530702 - DNA, 25 bp, Homo sapien
cttgaagccaatggctcgccgcttt

SEQ ID NO: 2530703 - DNA, 25 bp, Homo sapien
cctttccagacatgcgtgttccagg

SEQ ID NO: 2530704 - DNA, 25 bp, Homo sapien
gtgcctttccagacatgcgtgttcc

SEQ ID NO: 2530705 - DNA, 25 bp, Homo sapien
ccggcagcggtactcattctccatg

SEQ ID NO: 2530706 - DNA, 25 bp, Homo sapien
tgtgcttaatgaaggactcggtggc

SEQ ID NO: 2530707 - DNA, 25 bp, Homo sapien
gcggagtgatggtcaacaatggtca

SEQ ID NO: 2530708 - DNA, 25 bp, Homo sapien
ggtgagccggtagttgagcatctcc

SEQ ID NO: 2530709 - DNA, 25 bp, Homo sapien
agaaccgcgatattgatctccacca

SEQ ID NO: 2530710 - DNA, 25 bp, Homo sapien
cttcctcatgtctaagttcatcttc

SEQ ID NO: 2530711 - DNA, 25 bp, Homo sapien
ctggaagctatagagaaccgcgata

SEQ ID NO: 2530712 - DNA, 25 bp, Homo sapien
gtccttccacagggaggacgtcttc

SEQ ID NO: 2530713 - DNA, 25 bp, Homo sapien
tagtcgcggacaccaatctctgtgc

SEQ ID NO: 2530714 - DNA, 25 bp, Homo sapien
caggatattgtagcgggagttgtca

SEQ ID NO: 2530715 - DNA, 25 bp, Homo sapien
actgaagggacaggcgctgaactcc

SEQ ID NO: 2530716 - DNA, 25 bp, Homo sapien
tctctaggagcatgttggacacggc

SEQ ID NO: 2530717 - DNA, 25 bp, Homo sapien
aagagctcagggtcattgccgttgg

SEQ ID NO: 2530718 - DNA, 25 bp, Homo sapien
agcggcaggacatcgaagcggcctc

SEQ ID NO: 2530719 - DNA, 25 bp, Homo sapien
gtcattgccgttggcctgaagcagg

SEQ ID NO: 2530720 - DNA, 25 bp, Homo sapien
ggcctctaggcggtttccagccctg

SEQ ID NO: 2530721 - DNA, 25 bp, Homo sapien
gacccggccaggtaatgccactgta

SEQ ID NO: 2530722 - DNA, 25 bp, Homo sapien
cagacccggccaggtaatgccactg

SEQ ID NO: 2530723 - DNA, 25 bp, Homo sapien
ctgcaagcagacccggccaggtaat

SEQ ID NO: 2530724 - DNA, 25 bp, Homo sapien
agcagacccggccaggtaatgccac

SEQ ID NO: 2530725 - DNA, 25 bp, Homo sapien
ggagttccagactcggaagtcgtgc

SEQ ID NO: 2530726 - DNA, 25 bp, Homo sapien
tgcttgtagccagcgtagcggatga

SEQ ID NO: 2530727 - DNA, 25 bp, Homo sapien
ggagccgtcaggctgcttgtagcca

SEQ ID NO: 2530728 - DNA, 25 bp, Homo sapien
gaagtcgtgcttgccgtctgtcctc

SEQ ID NO: 2530729 - DNA, 25 bp, Homo sapien
tggtgcagtcacgggcatcgaatac

SEQ ID NO: 2530730 - DNA, 25 bp, Homo sapien
gacatggttacagatgtagttgaac

SEQ ID NO: 2530731 - DNA, 25 bp, Homo sapien
tggtggcatacttgacatggttaca

SEQ ID NO: 2530732 - DNA, 25 bp, Homo sapien
tgaacatcccgtgggccgtggtgca

SEQ ID NO: 2530733 - DNA, 25 bp, Homo sapien
acacagcgcgaggcattccgccagg

SEQ ID NO: 2530734 - DNA, 25 bp, Homo sapien
aggcattccgccaggcgtgcttggc

SEQ ID NO: 2530735 - DNA, 25 bp, Homo sapien
cagcgcgaggcattccgccaggcgt

SEQ ID NO: 2530736 - DNA, 25 bp, Homo sapien
tggatcctgcccacacagcgcgagg

SEQ ID NO: 2530737 - DNA, 25 bp, Homo sapien
agtgctagtggtgtcgatctctttg

SEQ ID NO: 2530738 - DNA, 25 bp, Homo sapien
ctggtaagtgctagtggtgtcgatc

SEQ ID NO: 2530739 - DNA, 25 bp, Homo sapien
gctagtggtgtcgatctctttgttc

SEQ ID NO: 2530740 - DNA, 25 bp, Homo sapien
tgtcgatctctttgttcacctcttc

SEQ ID NO: 2530741 - DNA, 25 bp, Homo sapien
ttctctccagcattcgataacttac

SEQ ID NO: 2530742 - DNA, 25 bp, Homo sapien
ctcgggctccccggaattgacacac

SEQ ID NO: 2530743 - DNA, 25 bp, Homo sapien
tgcagatgtactcagtgcatcccgt

SEQ ID NO: 2530744 - DNA, 25 bp, Homo sapien
tccttttgtgcggacgtcttcaggc

SEQ ID NO: 2530745 - DNA, 25 bp, Homo sapien
aactctttggcgagagggaagagct

SEQ ID NO: 2530746 - DNA, 25 bp, Homo sapien
gtattgatcaataaactctttggcg

SEQ ID NO: 2530747 - DNA, 25 bp, Homo sapien
caatgtgctcttaaggtggagggtg

SEQ ID NO: 2530748 - DNA, 25 bp, Homo sapien
ccttgaggaagcgtggacacttgga

SEQ ID NO: 2530749 - DNA, 25 bp, Homo sapien
ttgaccttgaggaagcgtggacact

SEQ ID NO: 2530750 - DNA, 25 bp, Homo sapien
tggagggtgtcagtgagaaccacct

SEQ ID NO: 2530751 - DNA, 25 bp, Homo sapien
tatgtgaccctcgttgagcaccaaa

SEQ ID NO: 2530752 - DNA, 25 bp, Homo sapien
tgtgaccctcgttgagcaccaaaac

SEQ ID NO: 2530753 - DNA, 25 bp, Homo sapien
tggttatgtgaccctcgttgagcac

SEQ ID NO: 2530754 - DNA, 25 bp, Homo sapien
gttatgtgaccctcgttgagcacca

SEQ ID NO: 2530755 - DNA, 25 bp, Homo sapien
ggctggggctggctacacccttttg

SEQ ID NO: 2530756 - DNA, 25 bp, Homo sapien
tagcaggccagttggtgtcatcctg

SEQ ID NO: 2530757 - DNA, 25 bp, Homo sapien
gtagcaggccagttggtgtcatcct

SEQ ID NO: 2530758 - DNA, 25 bp, Homo sapien
gggagtgggatttcgatataacagt

SEQ ID NO: 2530759 - DNA, 25 bp, Homo sapien
cgtccccaggggtgagaaaatgcct

SEQ ID NO: 2530760 - DNA, 25 bp, Homo sapien
cagtgatctctctatctgatcacct

SEQ ID NO: 2530761 - DNA, 25 bp, Homo sapien
gaaatagggaaaatcttctcaacag

SEQ ID NO: 2530762 - DNA, 25 bp, Homo sapien
gactcggtcgttctccacgccgagg

SEQ ID NO: 2530763 - DNA, 25 bp, Homo sapien
tgcccttcccccataggtcattgaa

SEQ ID NO: 2530764 - DNA, 25 bp, Homo sapien
gggttgttgaggacgacaggcacat

SEQ ID NO: 2530765 - DNA, 25 bp, Homo sapien
gtttgtgtgacttgccgtccaaatc

SEQ ID NO: 2530766 - DNA, 25 bp, Homo sapien
cagtccaagctctgagagcacgatc

SEQ ID NO: 2530767 - DNA, 25 bp, Homo sapien
gtccaagctctgagagcacgatccc

SEQ ID NO: 2530768 - DNA, 25 bp, Homo sapien
gcacgatccccagtgacccctccag

SEQ ID NO: 2530769 - DNA, 25 bp, Homo sapien
cacagtccaagctctgagagcacga

SEQ ID NO: 2530770 - DNA, 25 bp, Homo sapien
cagctgtcccttgttcccagatgta

SEQ ID NO: 2530771 - DNA, 25 bp, Homo sapien
gacttatttaccagctgtcccttgt

SEQ ID NO: 2530772 - DNA, 25 bp, Homo sapien
gaggagctcgccttcactaaatggc

SEQ ID NO: 2530773 - DNA, 25 bp, Homo sapien
cccagatgtaattgaggagctcgcc

SEQ ID NO: 2530774 - DNA, 25 bp, Homo sapien
tgaggcttcctaagaaccaggttcc

SEQ ID NO: 2530775 - DNA, 25 bp, Homo sapien
gtcgattggcccgttgctgaccact

SEQ ID NO: 2530776 - DNA, 25 bp, Homo sapien
gctgaccacttatggaccccgagga

SEQ ID NO: 2530777 - DNA, 25 bp, Homo sapien
ccgacctcttgcacggaaggaaaag

SEQ ID NO: 2530778 - DNA, 25 bp, Homo sapien
tgagacctcatagggatggcaacag

SEQ ID NO: 2530779 - DNA, 25 bp, Homo sapien
tagttcctacgatccaggtgtggcc

SEQ ID NO: 2530780 - DNA, 25 bp, Homo sapien
gctttcctaaagtacgtagctggtg

SEQ ID NO: 2530781 - DNA, 25 bp, Homo sapien
gagaaaccttaaggctcacctggtc

SEQ ID NO: 2530782 - DNA, 25 bp, Homo sapien
agccttccaagatgtgggagtacag

SEQ ID NO: 2530783 - DNA, 25 bp, Homo sapien
tctctttagttctagacactcacta

SEQ ID NO: 2530784 - DNA, 25 bp, Homo sapien
tctaggtagaaccaggagagcatcc

SEQ ID NO: 2530785 - DNA, 25 bp, Homo sapien
gacactcactatgaggcttctaggt

SEQ ID NO: 2530786 - DNA, 25 bp, Homo sapien
gacactgatgcctaaagaggtcctt

SEQ ID NO: 2530787 - DNA, 25 bp, Homo sapien
ttgaatcaagccaggactgcccgtc

SEQ ID NO: 2530788 - DNA, 25 bp, Homo sapien
tcacaagagtgaccccgaagaacat

SEQ ID NO: 2530789 - DNA, 25 bp, Homo sapien
tcaccgggaggatgagcattttcca

SEQ ID NO: 2530790 - DNA, 25 bp, Homo sapien
gccgctttcgggcaaaccacctcat

SEQ ID NO: 2530791 - DNA, 25 bp, Homo sapien
ttcgggcaaaccacctcatcacggt

SEQ ID NO: 2530792 - DNA, 25 bp, Homo sapien
tggccgctttcgggcaaaccacctc

SEQ ID NO: 2530793 - DNA, 25 bp, Homo sapien
ctttcgggcaaaccacctcatcacg

SEQ ID NO: 2530794 - DNA, 25 bp, Homo sapien
ggagctagcatcacccactctgttg

SEQ ID NO: 2530795 - DNA, 25 bp, Homo sapien
cccatagaaggagctagcatcaccc

SEQ ID NO: 2530796 - DNA, 25 bp, Homo sapien
tagaaggagctagcatcacccactc

SEQ ID NO: 2530797 - DNA, 25 bp, Homo sapien
aaggagctagcatcacccactctgt

SEQ ID NO: 2530798 - DNA, 25 bp, Homo sapien
tccagggcgctgtcatagctcaggt

SEQ ID NO: 2530799 - DNA, 25 bp, Homo sapien
catcatcgtaggcatgctgaggccc

SEQ ID NO: 2530800 - DNA, 25 bp, Homo sapien
gcaagaatgatgtctccggcctgga

SEQ ID NO: 2530801 - DNA, 25 bp, Homo sapien
cccaactttgcgcttgaagagacga

SEQ ID NO: 2530802 - DNA, 25 bp, Homo sapien
gggtcctgtctgaagacctcacaat

SEQ ID NO: 2530803 - DNA, 25 bp, Homo sapien
gccaagatgatttcaccaggaggat

SEQ ID NO: 2530804 - DNA, 25 bp, Homo sapien
tcacaatgctatcaggccaagatga

SEQ ID NO: 2530805 - DNA, 25 bp, Homo sapien
agatgatttcaccaggaggatccag

SEQ ID NO: 2530806 - DNA, 25 bp, Homo sapien
tctctaaggaagtgatggttgacca

SEQ ID NO: 2530807 - DNA, 25 bp, Homo sapien
tcattgccagcctgttagatgcgga

SEQ ID NO: 2530808 - DNA, 25 bp, Homo sapien
tgatggctgtgtctagaagtgacgc

SEQ ID NO: 2530809 - DNA, 25 bp, Homo sapien
tgaccaggcagacgtcaagagaggc

SEQ ID NO: 2530810 - DNA, 25 bp, Homo sapien
cccgggtgtcaaccggctgagtgtc

SEQ ID NO: 2530811 - DNA, 25 bp, Homo sapien
cgcccgcgtgctgtgtcatttctct

SEQ ID NO: 2530812 - DNA, 25 bp, Homo sapien
tcatgcgtcgcccgcgtgctgtgtc

SEQ ID NO: 2530813 - DNA, 25 bp, Homo sapien
gtgtggcccgggtgtcaaccggctg

SEQ ID NO: 2530814 - DNA, 25 bp, Homo sapien
aaattattcaagatatcagtaccag

SEQ ID NO: 2530815 - DNA, 25 bp, Homo sapien
atccatgtttccacataagcttgga

SEQ ID NO: 2530816 - DNA, 25 bp, Homo sapien
ttattcaagatatcagtaccagtgg

SEQ ID NO: 2530817 - DNA, 25 bp, Homo sapien
tttccacataagcttggagatgcac

SEQ ID NO: 2530818 - DNA, 25 bp, Homo sapien
caatgcaccatagactaggtaagtg

SEQ ID NO: 2530819 - DNA, 25 bp, Homo sapien
ttacaatgcaccatagactaggtaa

SEQ ID NO: 2530820 - DNA, 25 bp, Homo sapien
tagactaggtaagtgcccaggaaat

SEQ ID NO: 2530821 - DNA, 25 bp, Homo sapien
caccatagactaggtaagtgcccag

SEQ ID NO: 2530822 - DNA, 25 bp, Homo sapien
tattgagcatccgtagtgtctggtg

SEQ ID NO: 2530823 - DNA, 25 bp, Homo sapien
gactgtcattggctccttttcggaa

SEQ ID NO: 2530824 - DNA, 25 bp, Homo sapien
tacggacacgtggactggtcctgtc

SEQ ID NO: 2530825 - DNA, 25 bp, Homo sapien
tctcccatgggagtcgatgactgtc

SEQ ID NO: 2530826 - DNA, 25 bp, Homo sapien
cctgggttaaatctactgagagtga

SEQ ID NO: 2530827 - DNA, 25 bp, Homo sapien
tgggttaaatctactgagagtgacg

SEQ ID NO: 2530828 - DNA, 25 bp, Homo sapien
gggttaaatctactgagagtgacgc

SEQ ID NO: 2530829 - DNA, 25 bp, Homo sapien
tccctgggttaaatctactgagagt

SEQ ID NO: 2530830 - DNA, 25 bp, Homo sapien
tataagctgatgtcgcagaggttgg

SEQ ID NO: 2530831 - DNA, 25 bp, Homo sapien
gaacagagctctgcaaataacccct

SEQ ID NO: 2530832 - DNA, 25 bp, Homo sapien
aatcacagaagagaacggtgtcacc

SEQ ID NO: 2530833 - DNA, 25 bp, Homo sapien
gaatgtcatggttcaggatcacagg

SEQ ID NO: 2530834 - DNA, 25 bp, Homo sapien
caggtacaacggtccccagggactg

SEQ ID NO: 2530835 - DNA, 25 bp, Homo sapien
tgcggctcgcagttgcgattcggcc

SEQ ID NO: 2530836 - DNA, 25 bp, Homo sapien
attcggccgcagagtcgggcaccga

SEQ ID NO: 2530837 - DNA, 25 bp, Homo sapien
taaagttgagcttgggcaggtacaa

SEQ ID NO: 2530838 - DNA, 25 bp, Homo sapien
cgcgggagggtagcgagctgtgcca

SEQ ID NO: 2530839 - DNA, 25 bp, Homo sapien
ccgcgggagggtagcgagctgtgcc

SEQ ID NO: 2530840 - DNA, 25 bp, Homo sapien
ctgcccgcgggagggtagcgagctg

SEQ ID NO: 2530841 - DNA, 25 bp, Homo sapien
gcccgcgggagggtagcgagctgtg

SEQ ID NO: 2530842 - DNA, 25 bp, Homo sapien
tggagggcgccggttgcacccactc

SEQ ID NO: 2530843 - DNA, 25 bp, Homo sapien
cactcgcctcctggtaggagccgcg

SEQ ID NO: 2530844 - DNA, 25 bp, Homo sapien
gcgctccgggttctgaatcctccga

SEQ ID NO: 2530845 - DNA, 25 bp, Homo sapien
gccgaggctgcctcttcgcgctgcg

SEQ ID NO: 2530846 - DNA, 25 bp, Homo sapien
tgcgggcttccccggcgcagtgctg

SEQ ID NO: 2530847 - DNA, 25 bp, Homo sapien
gttcgggacggaggctgcgggcttc

SEQ ID NO: 2530848 - DNA, 25 bp, Homo sapien
tcagcctcagcgaacccaagttcgg

SEQ ID NO: 2530849 - DNA, 25 bp, Homo sapien
cagcgaacccaagttcgggacggag

SEQ ID NO: 2530850 - DNA, 25 bp, Homo sapien
cataaatatgtagggactgagccgt

SEQ ID NO: 2530851 - DNA, 25 bp, Homo sapien
cagcggctggaaacgcggcataaat

SEQ ID NO: 2530852 - DNA, 25 bp, Homo sapien
ttagcagtgacgtccaacccgactg

SEQ ID NO: 2530853 - DNA, 25 bp, Homo sapien
gggagacgtcgcaaccctcattaaa

SEQ ID NO: 2530854 - DNA, 25 bp, Homo sapien
tggcccgttggaggtgttggaagac

SEQ ID NO: 2530855 - DNA, 25 bp, Homo sapien
tggaagacccatggggtgcctcctc

SEQ ID NO: 2530856 - DNA, 25 bp, Homo sapien
aagaaatgccccttggtctgcctca

SEQ ID NO: 2530857 - DNA, 25 bp, Homo sapien
catttcccacactacttcatcccca

SEQ ID NO: 2530858 - DNA, 25 bp, Homo sapien
cataccccagggaaatgctgtgtgg

SEQ ID NO: 2530859 - DNA, 25 bp, Homo sapien
ggtgtaatcctaggcttccccatac

SEQ ID NO: 2530860 - DNA, 25 bp, Homo sapien
ccccaggagcttatattttgctgaa

SEQ ID NO: 2530861 - DNA, 25 bp, Homo sapien
aaagtcacgtttctggagccatggt

SEQ ID NO: 2530862 - DNA, 25 bp, Homo sapien
tggactcaacatctgagaatggctc

SEQ ID NO: 2530863 - DNA, 25 bp, Homo sapien
gcattcttccttgattatctccctg

SEQ ID NO: 2530864 - DNA, 25 bp, Homo sapien
ttcacccggttcagaagttgcattc

SEQ ID NO: 2530865 - DNA, 25 bp, Homo sapien
taactaaacgtgactgtggaccaag

SEQ ID NO: 2530866 - DNA, 25 bp, Homo sapien
agggcggcctacacagtccatggta

SEQ ID NO: 2530867 - DNA, 25 bp, Homo sapien
aggaccatggcctgacctttgtgga

SEQ ID NO: 2530868 - DNA, 25 bp, Homo sapien
tccatggtagttgtcccaaggacca

SEQ ID NO: 2530869 - DNA, 25 bp, Homo sapien
gattcaactttccaagtgcagggcg

SEQ ID NO: 2530870 - DNA, 25 bp, Homo sapien
gacttctgagaaaggagccctaaga

SEQ ID NO: 2530871 - DNA, 25 bp, Homo sapien
cagtgttattttgcaccgagggtca

SEQ ID NO: 2530872 - DNA, 25 bp, Homo sapien
cttctggacaagtgtaggctgagac

SEQ ID NO: 2530873 - DNA, 25 bp, Homo sapien
gaagccttttatgcactccagggag

SEQ ID NO: 2530874 - DNA, 25 bp, Homo sapien
ttcatggtatcaggcatgttgtggc

SEQ ID NO: 2530875 - DNA, 25 bp, Homo sapien
agtgatagcttcatggtatcaggca

SEQ ID NO: 2530876 - DNA, 25 bp, Homo sapien
ggtaggcgcagacccccgtgtatct

SEQ ID NO: 2530877 - DNA, 25 bp, Homo sapien
catggtgagtccacgtcctttcttc

SEQ ID NO: 2530878 - DNA, 25 bp, Homo sapien
aaaatgagtcatcattaactgcacg

SEQ ID NO: 2530879 - DNA, 25 bp, Homo sapien
tgcacgccactcttcacttagaatt

SEQ ID NO: 2530880 - DNA, 25 bp, Homo sapien
tgagtcatcattaactgcacgccac

SEQ ID NO: 2530881 - DNA, 25 bp, Homo sapien
taactgcacgccactcttcacttag

SEQ ID NO: 2530882 - DNA, 25 bp, Homo sapien
tctctctctttttttcctcttcaaa

SEQ ID NO: 2530883 - DNA, 25 bp, Homo sapien
cttcacccatcaggtctcctgacac

SEQ ID NO: 2530884 - DNA, 25 bp, Homo sapien
ctgacactgtctggggggagcccct

SEQ ID NO: 2530885 - DNA, 25 bp, Homo sapien
tcaactgtgccgactgatccctcct

SEQ ID NO: 2530886 - DNA, 25 bp, Homo sapien
tgtgccgactgatccctccttcacc

SEQ ID NO: 2530887 - DNA, 25 bp, Homo sapien
ctggcgtggtgcaggccgagcgact

SEQ ID NO: 2530888 - DNA, 25 bp, Homo sapien
cggcactaatcagccgcctggcgtg

SEQ ID NO: 2530889 - DNA, 25 bp, Homo sapien
agaggccagcggcactaatcagccg

SEQ ID NO: 2530890 - DNA, 25 bp, Homo sapien
tccccatctggagaggccagcggca

SEQ ID NO: 2530891 - DNA, 25 bp, Homo sapien
tccttgtttggcttgttagctgctg

SEQ ID NO: 2530892 - DNA, 25 bp, Homo sapien
cttggagcttaaggatgtgtgtttc

SEQ ID NO: 2530893 - DNA, 25 bp, Homo sapien
gatgaagccactgatcttggagctt

SEQ ID NO: 2530894 - DNA, 25 bp, Homo sapien
gccactgatcttggagcttaaggat

SEQ ID NO: 2530895 - DNA, 25 bp, Homo sapien
caggacagatgaggccagttcttcc

SEQ ID NO: 2530896 - DNA, 25 bp, Homo sapien
ggacagatgaggccagttcttccat

SEQ ID NO: 2530897 - DNA, 25 bp, Homo sapien
aggacagatgaggccagttcttcca

SEQ ID NO: 2530898 - DNA, 25 bp, Homo sapien
cattcacacgacgaattcacggacg

SEQ ID NO: 2530899 - DNA, 25 bp, Homo sapien
tgggagttccagtcagatttgccgg

SEQ ID NO: 2530900 - DNA, 25 bp, Homo sapien
tgggcacagatcacatgctcagtgt

SEQ ID NO: 2530901 - DNA, 25 bp, Homo sapien
tcgaatgagttgaatagtcccagcc

SEQ ID NO: 2530902 - DNA, 25 bp, Homo sapien
tgtccaggacgcacttaagctgcca

SEQ ID NO: 2530903 - DNA, 25 bp, Homo sapien
tataccctgggagtctggcggtcag

SEQ ID NO: 2530904 - DNA, 25 bp, Homo sapien
tgataggttaggaccgcagaggccc

SEQ ID NO: 2530905 - DNA, 25 bp, Homo sapien
catcggtccgcgttggtctgtacaa

SEQ ID NO: 2530906 - DNA, 25 bp, Homo sapien
agtgcccgactcgtcctctctgtta

SEQ ID NO: 2530907 - DNA, 25 bp, Homo sapien
ctggtcttttgcagtgcccgactcg

SEQ ID NO: 2530908 - DNA, 25 bp, Homo sapien
caaagcaattttccaagatctggtc

SEQ ID NO: 2530909 - DNA, 25 bp, Homo sapien
ctctctgttacccttcccaatcctg

SEQ ID NO: 2530910 - DNA, 25 bp, Homo sapien
tatgctggaactagaggaccgtggc

SEQ ID NO: 2530911 - DNA, 25 bp, Homo sapien
cacactttggatgtcaactggaggc

SEQ ID NO: 2530912 - DNA, 25 bp, Homo sapien
gaaaaggcccttcactatctgggag

SEQ ID NO: 2530913 - DNA, 25 bp, Homo sapien
tttgaatcctagtcgcgtggcctgg

SEQ ID NO: 2530914 - DNA, 25 bp, Homo sapien
tacatatttgtactccttggaccag

SEQ ID NO: 2530915 - DNA, 25 bp, Homo sapien
tctgtgatcagtgggaaggcatgct

SEQ ID NO: 2530916 - DNA, 25 bp, Homo sapien
taagtggtaactcgaatgccctgaa

SEQ ID NO: 2530917 - DNA, 25 bp, Homo sapien
taagggagggtcactcatatccatc

SEQ ID NO: 2530918 - DNA, 25 bp, Homo sapien
ggacatgaaccccttgacctggagg

SEQ ID NO: 2530919 - DNA, 25 bp, Homo sapien
tcctgggccacctgactcaatgggt

SEQ ID NO: 2530920 - DNA, 25 bp, Homo sapien
tgccccattggaacgagaataagac

SEQ ID NO: 2530921 - DNA, 25 bp, Homo sapien
aatgggtcgcttcatacgtcacaga

SEQ ID NO: 2530922 - DNA, 25 bp, Homo sapien
tccgtgtctactacttcctccgtgt

SEQ ID NO: 2530923 - DNA, 25 bp, Homo sapien
caagataatgattggcctgagctcc

SEQ ID NO: 2530924 - DNA, 25 bp, Homo sapien
gcctgacagccctgggtttagattt

SEQ ID NO: 2530925 - DNA, 25 bp, Homo sapien
tccgtgtacctttgatgatcagctg

SEQ ID NO: 2530926 - DNA, 25 bp, Homo sapien
tcatcggggcatcaatcttcatcag

SEQ ID NO: 2530927 - DNA, 25 bp, Homo sapien
gactcatcggggcatcaatcttcat

SEQ ID NO: 2530928 - DNA, 25 bp, Homo sapien
gatgctcagactcatcggggcatca

SEQ ID NO: 2530929 - DNA, 25 bp, Homo sapien
gctcagactcatcggggcatcaatc

SEQ ID NO: 2530930 - DNA, 25 bp, Homo sapien
aaatgtccagggtgagacaggcgac

SEQ ID NO: 2530931 - DNA, 25 bp, Homo sapien
gacaggcgacggtttcgctttggca

SEQ ID NO: 2530932 - DNA, 25 bp, Homo sapien
ggtgagacaggcgacggtttcgctt

SEQ ID NO: 2530933 - DNA, 25 bp, Homo sapien
gaaatgtccagggtgagacaggcga

SEQ ID NO: 2530934 - DNA, 25 bp, Homo sapien
gcccatttgccagattattgcctct

SEQ ID NO: 2530935 - DNA, 25 bp, Homo sapien
ccatgccaatctggctgaggttggg

SEQ ID NO: 2530936 - DNA, 25 bp, Homo sapien
tgaggttgggtttcatgcctgtgcc

SEQ ID NO: 2530937 - DNA, 25 bp, Homo sapien
cctctgctggttgggtcttgaaagg

SEQ ID NO: 2530938 - DNA, 25 bp, Homo sapien
ctggcgtggagttcataccagattg

SEQ ID NO: 2530939 - DNA, 25 bp, Homo sapien
tggcgtggagttcataccagattgt

SEQ ID NO: 2530940 - DNA, 25 bp, Homo sapien
ggcgtggagttcataccagattgtg

SEQ ID NO: 2530941 - DNA, 25 bp, Homo sapien
gccaggtggcatagccagccattct

SEQ ID NO: 2530942 - DNA, 25 bp, Homo sapien
tatcctcctctgtgtcgggggacag

SEQ ID NO: 2530943 - DNA, 25 bp, Homo sapien
gatgatctctggtgccaggtggcat

SEQ ID NO: 2530944 - DNA, 25 bp, Homo sapien
tctggatgcgcagtttgtcctcccg

SEQ ID NO: 2530945 - DNA, 25 bp, Homo sapien
acattgagcactgcctgaccaccta

SEQ ID NO: 2530946 - DNA, 25 bp, Homo sapien
gaggccgagacccagtagtaggtgc

SEQ ID NO: 2530947 - DNA, 25 bp, Homo sapien
gctctagagaaacactcaggatcca

SEQ ID NO: 2530948 - DNA, 25 bp, Homo sapien
tgaccacctactggaggccgagacc

SEQ ID NO: 2530949 - DNA, 25 bp, Homo sapien
tgcctctgaggcacccaccttcttg

SEQ ID NO: 2530950 - DNA, 25 bp, Homo sapien
ctgaggcacccaccttcttgcccat

SEQ ID NO: 2530951 - DNA, 25 bp, Homo sapien
ctctgaggcacccaccttcttgccc

SEQ ID NO: 2530952 - DNA, 25 bp, Homo sapien
gcctctgaggcacccaccttcttgc

SEQ ID NO: 2530953 - DNA, 25 bp, Homo sapien
catgtggccaactcaatgcggcttg

SEQ ID NO: 2530954 - DNA, 25 bp, Homo sapien
tgtggccaactcaatgcggcttgct

SEQ ID NO: 2530955 - DNA, 25 bp, Homo sapien
tcatgtggccaactcaatgcggctt

SEQ ID NO: 2530956 - DNA, 25 bp, Homo sapien
atgtggccaactcaatgcggcttgc

SEQ ID NO: 2530957 - DNA, 25 bp, Homo sapien
gaaatgctgaagagtccaaagtccg

SEQ ID NO: 2530958 - DNA, 25 bp, Homo sapien
gaagacgttctttgacttgaggtcc

SEQ ID NO: 2530959 - DNA, 25 bp, Homo sapien
aaagtccgtgatgaccactttgccg

SEQ ID NO: 2530960 - DNA, 25 bp, Homo sapien
tgtaggattcccttggcgtggaggt

SEQ ID NO: 2530961 - DNA, 25 bp, Homo sapien
ccccaagacacaaatccactgccac

SEQ ID NO: 2530962 - DNA, 25 bp, Homo sapien
aaggcatggcaagcgggaacaggca

SEQ ID NO: 2530963 - DNA, 25 bp, Homo sapien
cggggaaggcatggcaagcgggaac

SEQ ID NO: 2530964 - DNA, 25 bp, Homo sapien
cccaagacacaaatccactgccact

SEQ ID NO: 2530965 - DNA, 25 bp, Homo sapien
tgttgacatccaaaacgattttggc

SEQ ID NO: 2530966 - DNA, 25 bp, Homo sapien
tttggcatccctcacaacggaatag

SEQ ID NO: 2530967 - DNA, 25 bp, Homo sapien
aatagagcgtccgtcccttacagag

SEQ ID NO: 2530968 - DNA, 25 bp, Homo sapien
aatctgcctggttttgttgacatcc

SEQ ID NO: 2530969 - DNA, 25 bp, Homo sapien
cttttcatcactgttacttctccca

SEQ ID NO: 2530970 - DNA, 25 bp, Homo sapien
ttttcatcactgttacttctcccac

SEQ ID NO: 2530971 - DNA, 25 bp, Homo sapien
ttcatcactgttacttctcccacat

SEQ ID NO: 2530972 - DNA, 25 bp, Homo sapien
tttcatcactgttacttctcccaca

SEQ ID NO: 2530973 - DNA, 25 bp, Homo sapien
tttataaagggaaagcgattcagct

SEQ ID NO: 2530974 - DNA, 25 bp, Homo sapien
acataaaaggaagccgcttccactc

SEQ ID NO: 2530975 - DNA, 25 bp, Homo sapien
ccactcgatgatggggacggaatct

SEQ ID NO: 2530976 - DNA, 25 bp, Homo sapien
tgatggggacggaatcttcatgtgc

SEQ ID NO: 2530977 - DNA, 25 bp, Homo sapien
gtttcaaactgaacgtgcagataag

SEQ ID NO: 2530978 - DNA, 25 bp, Homo sapien
tttggtttcaaactgaacgtgcaga

SEQ ID NO: 2530979 - DNA, 25 bp, Homo sapien
atatttggtttcaaactgaacgtgc

SEQ ID NO: 2530980 - DNA, 25 bp, Homo sapien
caaactgaacgtgcagataagaaac

SEQ ID NO: 2530981 - DNA, 25 bp, Homo sapien
gccgtggtacacttgcccaaagcgg

SEQ ID NO: 2530982 - DNA, 25 bp, Homo sapien
ccaaagcggccctttccaatgagct

SEQ ID NO: 2530983 - DNA, 25 bp, Homo sapien
tcaatgtcaatcagccggatggcca

SEQ ID NO: 2530984 - DNA, 25 bp, Homo sapien
ggacaggttcatctcctcgaagtca

SEQ ID NO: 2530985 - DNA, 25 bp, Homo sapien
tatcagcatgatatctaggggtgct

SEQ ID NO: 2530986 - DNA, 25 bp, Homo sapien
cttatcagcatgatatctaggggtg

SEQ ID NO: 2530987 - DNA, 25 bp, Homo sapien
tgcttgggggcgaattgcctcttgg

SEQ ID NO: 2530988 - DNA, 25 bp, Homo sapien
tgggggcgaattgcctcttggattc

SEQ ID NO: 2530989 - DNA, 25 bp, Homo sapien
cttcaatttgaagtaatggatttcc

SEQ ID NO: 2530990 - DNA, 25 bp, Homo sapien
ttgaagtaatggatttccttccaag

SEQ ID NO: 2530991 - DNA, 25 bp, Homo sapien
ctccgacgttggctccacttcaatt

SEQ ID NO: 2530992 - DNA, 25 bp, Homo sapien
cgttggctccacttcaatttgaagt

SEQ ID NO: 2530993 - DNA, 25 bp, Homo sapien
aggtcaccggatgcaggatgacctg

SEQ ID NO: 2530994 - DNA, 25 bp, Homo sapien
tcgaggtcaccggatgcaggatgac

SEQ ID NO: 2530995 - DNA, 25 bp, Homo sapien
gattcgaggtcaccggatgcaggat

SEQ ID NO: 2530996 - DNA, 25 bp, Homo sapien
attggattcgaggtcaccggatgca

SEQ ID NO: 2530997 - DNA, 25 bp, Homo sapien
actgctgcttgtatttgtagtagtg

SEQ ID NO: 2530998 - DNA, 25 bp, Homo sapien
gctgcttgtatttgtagtagtggga

SEQ ID NO: 2530999 - DNA, 25 bp, Homo sapien
tgcttgtatttgtagtagtgggatg

SEQ ID NO: 2531000 - DNA, 25 bp, Homo sapien
tgctgcttgtatttgtagtagtggg

SEQ ID NO: 2531001 - DNA, 25 bp, Homo sapien
tgtcaggcaacaggacaccagcaaa

SEQ ID NO: 2531002 - DNA, 25 bp, Homo sapien
tctttttgggcaacggagagcagga

SEQ ID NO: 2531003 - DNA, 25 bp, Homo sapien
ccatggaacaactcgttcctggtga

SEQ ID NO: 2531004 - DNA, 25 bp, Homo sapien
tgtgccatggaacaactcgttcctg

SEQ ID NO: 2531005 - DNA, 25 bp, Homo sapien
tgatataagggtaattgcttagggt

SEQ ID NO: 2531006 - DNA, 25 bp, Homo sapien
gataagggtcagtccacatacttcc

SEQ ID NO: 2531007 - DNA, 25 bp, Homo sapien
cattcgctttcctgcagagacttgc

SEQ ID NO: 2531008 - DNA, 25 bp, Homo sapien
tctggtcattgacccattcgctttc

SEQ ID NO: 2531009 - DNA, 25 bp, Homo sapien
ggcgtggaggacgtcgtggaggagg

SEQ ID NO: 2531010 - DNA, 25 bp, Homo sapien
aaggcggcgtggcactaggagggag

SEQ ID NO: 2531011 - DNA, 25 bp, Homo sapien
ggagaaggcggcgtggcactaggag

SEQ ID NO: 2531012 - DNA, 25 bp, Homo sapien
tctggctggtaagggacagggatgt

SEQ ID NO: 2531013 - DNA, 25 bp, Homo sapien
ggttgttgatgtcacacggaacgga

SEQ ID NO: 2531014 - DNA, 25 bp, Homo sapien
gatgtcacacggaacggactctgtc

SEQ ID NO: 2531015 - DNA, 25 bp, Homo sapien
gagcgtctgactgatgtgcaggtct

SEQ ID NO: 2531016 - DNA, 25 bp, Homo sapien
tctgaatagcgaggtggcttccgta

SEQ ID NO: 2531017 - DNA, 25 bp, Homo sapien
cctcggtggatgatcagaagatgac

SEQ ID NO: 2531018 - DNA, 25 bp, Homo sapien
tcggtggatgatcagaagatgacag

SEQ ID NO: 2531019 - DNA, 25 bp, Homo sapien
ctcctcggtggatgatcagaagatg

SEQ ID NO: 2531020 - DNA, 25 bp, Homo sapien
ctcggtggatgatcagaagatgaca

SEQ ID NO: 2531021 - DNA, 25 bp, Homo sapien
tcttccaagaagttggctgattcag

SEQ ID NO: 2531022 - DNA, 25 bp, Homo sapien
ttccaagaagttggctgattcagaa

SEQ ID NO: 2531023 - DNA, 25 bp, Homo sapien
tataacatgtcttccaagaagttgg

SEQ ID NO: 2531024 - DNA, 25 bp, Homo sapien
tgtcttccaagaagttggctgattc

SEQ ID NO: 2531025 - DNA, 25 bp, Homo sapien
tctagagcaggtgtcacccaaatca

SEQ ID NO: 2531026 - DNA, 25 bp, Homo sapien
gcaggtgtcacccaaatcacgttgt

SEQ ID NO: 2531027 - DNA, 25 bp, Homo sapien
ggtgtcacccaaatcacgttgtgca

SEQ ID NO: 2531028 - DNA, 25 bp, Homo sapien
gtcacccaaatcacgttgtgcattt

SEQ ID NO: 2531029 - DNA, 25 bp, Homo sapien
cacgtctgagacatccagtacttgg

SEQ ID NO: 2531030 - DNA, 25 bp, Homo sapien
gagacatccagtacttggtggaaaa

SEQ ID NO: 2531031 - DNA, 25 bp, Homo sapien
ctgtgcacgtctgagacatccagta

SEQ ID NO: 2531032 - DNA, 25 bp, Homo sapien
ttttacacttgaggccaaaaagcat

SEQ ID NO: 2531033 - DNA, 25 bp, Homo sapien
gccgagatctctgcgagggatctgc

SEQ ID NO: 2531034 - DNA, 25 bp, Homo sapien
ggggaccagcgtggcactgacagtg

SEQ ID NO: 2531035 - DNA, 25 bp, Homo sapien
gatggagttgccgagatctctgcga

SEQ ID NO: 2531036 - DNA, 25 bp, Homo sapien
ctgtgcttgatggagttgccgagat

SEQ ID NO: 2531037 - DNA, 25 bp, Homo sapien
gaacagcctgttacacagagggtca

SEQ ID NO: 2531038 - DNA, 25 bp, Homo sapien
aagagaacagcctgttacacagagg

SEQ ID NO: 2531039 - DNA, 25 bp, Homo sapien
acagcctgttacacagagggtcaga

SEQ ID NO: 2531040 - DNA, 25 bp, Homo sapien
gagaacagcctgttacacagagggt

SEQ ID NO: 2531041 - DNA, 25 bp, Homo sapien
acaccatcctcctggcagagcttgc

SEQ ID NO: 2531042 - DNA, 25 bp, Homo sapien
tgcccattgcccacaccatcctcct

SEQ ID NO: 2531043 - DNA, 25 bp, Homo sapien
catcctcctggcagagcttgcaggc

SEQ ID NO: 2531044 - DNA, 25 bp, Homo sapien
ctcctggcagagcttgcaggcccca

SEQ ID NO: 2531045 - DNA, 25 bp, Homo sapien
tgacaccgtcggcagccgtctgaaa

SEQ ID NO: 2531046 - DNA, 25 bp, Homo sapien
tgtctaatgacaccgtcggcagccg

SEQ ID NO: 2531047 - DNA, 25 bp, Homo sapien
gcagccgtctgaaagctgtttccag

SEQ ID NO: 2531048 - DNA, 25 bp, Homo sapien
cctctattctgtctaatgacaccgt

SEQ ID NO: 2531049 - DNA, 25 bp, Homo sapien
gcccttgatggctatggaggcttcc

SEQ ID NO: 2531050 - DNA, 25 bp, Homo sapien
atctggggcccttgatggctatgga

SEQ ID NO: 2531051 - DNA, 25 bp, Homo sapien
ttgaaactggtgagtgcatagacca

SEQ ID NO: 2531052 - DNA, 25 bp, Homo sapien
cccttgaaactggtgagtgcataga

SEQ ID NO: 2531053 - DNA, 25 bp, Homo sapien
gtcatcggggaagaaataaggcaga

SEQ ID NO: 2531054 - DNA, 25 bp, Homo sapien
tcagagccatcggagttgtctgagc

SEQ ID NO: 2531055 - DNA, 25 bp, Homo sapien
ccttgaactgagtttatggatctta

SEQ ID NO: 2531056 - DNA, 25 bp, Homo sapien
taaatcagagccatcggagttgtct

SEQ ID NO: 2531057 - DNA, 25 bp, Homo sapien
agccatcggagttgtctgagctgaa

SEQ ID NO: 2531058 - DNA, 25 bp, Homo sapien
caatgtagtagtggtgtgcagcaga

SEQ ID NO: 2531059 - DNA, 25 bp, Homo sapien
aaatatcatcaatgtagtagtggtg

SEQ ID NO: 2531060 - DNA, 25 bp, Homo sapien
agacagctgaattcttgggccaaag

SEQ ID NO: 2531061 - DNA, 25 bp, Homo sapien
gagacagctgaattcttgggccaaa

SEQ ID NO: 2531062 - DNA, 25 bp, Homo sapien
gcaggcagcaagtacagcctccaag

SEQ ID NO: 2531063 - DNA, 25 bp, Homo sapien
cttggagcaggcagcaagtacagcc

SEQ ID NO: 2531064 - DNA, 25 bp, Homo sapien
aggcagcaagtacagcctccaaggg

SEQ ID NO: 2531065 - DNA, 25 bp, Homo sapien
ggagcaggcagcaagtacagcctcc

SEQ ID NO: 2531066 - DNA, 25 bp, Homo sapien
ctgcagcccggccaacaggaatgga

SEQ ID NO: 2531067 - DNA, 25 bp, Homo sapien
agcccggccaacaggaatggagccc

SEQ ID NO: 2531068 - DNA, 25 bp, Homo sapien
gcagcccggccaacaggaatggagc

SEQ ID NO: 2531069 - DNA, 25 bp, Homo sapien
tgccggtcctcagcactgcagcccg

SEQ ID NO: 2531070 - DNA, 25 bp, Homo sapien
aagaattgattggatttgtttgggc

SEQ ID NO: 2531071 - DNA, 25 bp, Homo sapien
gttcattagctgataaaatgtgaat

SEQ ID NO: 2531072 - DNA, 25 bp, Homo sapien
ttctggaccatatctccctgggtgg

SEQ ID NO: 2531073 - DNA, 25 bp, Homo sapien
gattggatttgtttgggctaaatgg

SEQ ID NO: 2531074 - DNA, 25 bp, Homo sapien
ggagtaaatgatgaatctggttgaa

SEQ ID NO: 2531075 - DNA, 25 bp, Homo sapien
agtaaatgatgaatctggttgaaaa

SEQ ID NO: 2531076 - DNA, 25 bp, Homo sapien
gagtaaatgatgaatctggttgaaa

SEQ ID NO: 2531077 - DNA, 25 bp, Homo sapien
tgtcatacttttgtgcattcagctg

SEQ ID NO: 2531078 - DNA, 25 bp, Homo sapien
tgaatcaacattacaggactgcctt

SEQ ID NO: 2531079 - DNA, 25 bp, Homo sapien
ggaaaatgaatcaacattacaggac

SEQ ID NO: 2531080 - DNA, 25 bp, Homo sapien
gataaaaggggaggccattgacatc

SEQ ID NO: 2531081 - DNA, 25 bp, Homo sapien
tgcaagaagaatgtccaagaatgcc

SEQ ID NO: 2531082 - DNA, 25 bp, Homo sapien
gaatgcttacattaatggtggccta

SEQ ID NO: 2531083 - DNA, 25 bp, Homo sapien
gaggctgccaatgaatctaggacac

SEQ ID NO: 2531084 - DNA, 25 bp, Homo sapien
tgtcctaaatgctcaagtgtgcaag

SEQ ID NO: 2531085 - DNA, 25 bp, Homo sapien
gacatgtacatgtgaggtttcccac

SEQ ID NO: 2531086 - DNA, 25 bp, Homo sapien
aaaaggcagctggttcacgtacatt

SEQ ID NO: 2531087 - DNA, 25 bp, Homo sapien
tcagggctggaactaccatgaggca

SEQ ID NO: 2531088 - DNA, 25 bp, Homo sapien
taaagacgggatttagccctgcacc

SEQ ID NO: 2531089 - DNA, 25 bp, Homo sapien
gtggacagcacgtccagatacccct

SEQ ID NO: 2531090 - DNA, 25 bp, Homo sapien
atacccctccatggcaaacagccgc

SEQ ID NO: 2531091 - DNA, 25 bp, Homo sapien
agatacccctccatggcaaacagcc

SEQ ID NO: 2531092 - DNA, 25 bp, Homo sapien
gtccagatacccctccatggcaaac

SEQ ID NO: 2531093 - DNA, 25 bp, Homo sapien
aggcaacgtggaacctcctgtgtct

SEQ ID NO: 2531094 - DNA, 25 bp, Homo sapien
aatcatctacatcctgcctggcatg

SEQ ID NO: 2531095 - DNA, 25 bp, Homo sapien
gagtttctaaaagatgccaggcaac

SEQ ID NO: 2531096 - DNA, 25 bp, Homo sapien
tatatatttcaatgcctgcaaatca

SEQ ID NO: 2531097 - DNA, 25 bp, Homo sapien
cttcctgcagcttgcaattttggct

SEQ ID NO: 2531098 - DNA, 25 bp, Homo sapien
tgcctggcccctacggggatggcta

SEQ ID NO: 2531099 - DNA, 25 bp, Homo sapien
atgaatgagtcgcaggagcttcctg

SEQ ID NO: 2531100 - DNA, 25 bp, Homo sapien
tcatcttccaccagagatgtccagg

SEQ ID NO: 2531101 - DNA, 25 bp, Homo sapien
aggagcccacgagcttgcaggttgt

SEQ ID NO: 2531102 - DNA, 25 bp, Homo sapien
caggttgttggggtaaagatgatcc

SEQ ID NO: 2531103 - DNA, 25 bp, Homo sapien
aagatgatccactggtgaagagcac

SEQ ID NO: 2531104 - DNA, 25 bp, Homo sapien
gagcccacgagcttgcaggttgttg

SEQ ID NO: 2531105 - DNA, 25 bp, Homo sapien
tctctttgactaccatgcaggccca

SEQ ID NO: 2531106 - DNA, 25 bp, Homo sapien
tgcaggcccaccgtcatgaagggtg

SEQ ID NO: 2531107 - DNA, 25 bp, Homo sapien
tcatgaagggtgctctctctggcag

SEQ ID NO: 2531108 - DNA, 25 bp, Homo sapien
tctggcagtgatttctctggacaaa

SEQ ID NO: 2531109 - DNA, 25 bp, Homo sapien
ggatgttctcgcagctgcctacgct

SEQ ID NO: 2531110 - DNA, 25 bp, Homo sapien
tgcctacgctgctgtggatcttgag

SEQ ID NO: 2531111 - DNA, 25 bp, Homo sapien
gaggttcaagggtttgctcttcttc

SEQ ID NO: 2531112 - DNA, 25 bp, Homo sapien
gaaaggtgcgtgtcccacaaagaag

SEQ ID NO: 2531113 - DNA, 25 bp, Homo sapien
gctggaatcgcagactcacttgcat

SEQ ID NO: 2531114 - DNA, 25 bp, Homo sapien
tcctcgctggaatcgcagactcact

SEQ ID NO: 2531115 - DNA, 25 bp, Homo sapien
tcgctggaatcgcagactcacttgc

SEQ ID NO: 2531116 - DNA, 25 bp, Homo sapien
cacttgcatttggttccatttttgc

SEQ ID NO: 2531117 - DNA, 25 bp, Homo sapien
aaaatgcccagtggtcttacacagg

SEQ ID NO: 2531118 - DNA, 25 bp, Homo sapien
tccaatgacccaagaggaggccttc

SEQ ID NO: 2531119 - DNA, 25 bp, Homo sapien
tcattaactgtgtctggagcatctg

SEQ ID NO: 2531120 - DNA, 25 bp, Homo sapien
gagctgtccctatcaaattggccct

SEQ ID NO: 2531121 - DNA, 25 bp, Homo sapien
tatgggctgaattttgtccccctca

SEQ ID NO: 2531122 - DNA, 25 bp, Homo sapien
attttgtccccctcaagttcctatg

SEQ ID NO: 2531123 - DNA, 25 bp, Homo sapien
ttatgggctgaattttgtccccctc

SEQ ID NO: 2531124 - DNA, 25 bp, Homo sapien
tgggctgaattttgtccccctcaag

SEQ ID NO: 2531125 - DNA, 25 bp, Homo sapien
ccatccgttggcaaatggaagctga

SEQ ID NO: 2531126 - DNA, 25 bp, Homo sapien
agggacaggactgccatccgttggc

SEQ ID NO: 2531127 - DNA, 25 bp, Homo sapien
caaagagagggtcaccaagacccac

SEQ ID NO: 2531128 - DNA, 25 bp, Homo sapien
aagctgaacttgtgcaagtgaaagc

SEQ ID NO: 2531129 - DNA, 25 bp, Homo sapien
ttaagtaatcaaatgcaactttttc

SEQ ID NO: 2531130 - DNA, 25 bp, Homo sapien
tctctgaagggaactttaagtaatc

SEQ ID NO: 2531131 - DNA, 25 bp, Homo sapien
catgtacgcctcttatgctgattct

SEQ ID NO: 2531132 - DNA, 25 bp, Homo sapien
aaatgataaactgcaccgttctctg

SEQ ID NO: 2531133 - DNA, 25 bp, Homo sapien
tatggttaagtaagctcacaaattc

SEQ ID NO: 2531134 - DNA, 25 bp, Homo sapien
ctgtgctcgctatggttaagtaagc

SEQ ID NO: 2531135 - DNA, 25 bp, Homo sapien
ctcaaagcaaattggcccaggcgga

SEQ ID NO: 2531136 - DNA, 25 bp, Homo sapien
agcaaattggcccaggcggacatcc

SEQ ID NO: 2531137 - DNA, 25 bp, Homo sapien
acattaacttctgagaggcccctct

SEQ ID NO: 2531138 - DNA, 25 bp, Homo sapien
gccccacacttcaggaataatcttg

SEQ ID NO: 2531139 - DNA, 25 bp, Homo sapien
ggaacattaacttctgagaggcccc

SEQ ID NO: 2531140 - DNA, 25 bp, Homo sapien
ctggaatggaacattaacttctgag

SEQ ID NO: 2531141 - DNA, 25 bp, Homo sapien
ggaactggtactccataaatgcgag

SEQ ID NO: 2531142 - DNA, 25 bp, Homo sapien
tccttttgcaaaatgcggttagcgg

SEQ ID NO: 2531143 - DNA, 25 bp, Homo sapien
tttgttgtaagagatacacgcatgt

SEQ ID NO: 2531144 - DNA, 25 bp, Homo sapien
tgcggttagcggtacccacttcaaa

SEQ ID NO: 2531145 - DNA, 25 bp, Homo sapien
cagtgtcacgcaaaatgtatcattc

SEQ ID NO: 2531146 - DNA, 25 bp, Homo sapien
caacaggcctgtaggatgacacttc

SEQ ID NO: 2531147 - DNA, 25 bp, Homo sapien
taagatagtcacagaaccgtaaggc

SEQ ID NO: 2531148 - DNA, 25 bp, Homo sapien
tcttggtttgcatcaacaacaggcc

SEQ ID NO: 2531149 - DNA, 25 bp, Homo sapien
aaagactgatggataggccaccgtg

SEQ ID NO: 2531150 - DNA, 25 bp, Homo sapien
tcccaaaaagactgatggataggcc

SEQ ID NO: 2531151 - DNA, 25 bp, Homo sapien
aggccctcacggcagatcttcttgg

SEQ ID NO: 2531152 - DNA, 25 bp, Homo sapien
gataggccaccgtgtctgaggccct

SEQ ID NO: 2531153 - DNA, 25 bp, Homo sapien
cactcctagtgcttctgtcactggt

SEQ ID NO: 2531154 - DNA, 25 bp, Homo sapien
ccaagccagcacacaagctctgcat

SEQ ID NO: 2531155 - DNA, 25 bp, Homo sapien
ttctgtcactggtcccaagccagca

SEQ ID NO: 2531156 - DNA, 25 bp, Homo sapien
cctagtgcttctgtcactggtccca

SEQ ID NO: 2531157 - DNA, 25 bp, Homo sapien
gaagtgggcagccacagtctccaca

SEQ ID NO: 2531158 - DNA, 25 bp, Homo sapien
cagctctgagaagtgggcagccaca

SEQ ID NO: 2531159 - DNA, 25 bp, Homo sapien
gctctgagaagtgggcagccacagt

SEQ ID NO: 2531160 - DNA, 25 bp, Homo sapien
tgagaagtgggcagccacagtctcc

SEQ ID NO: 2531161 - DNA, 25 bp, Homo sapien
tgcttaatgtgggtctcatcacttt

SEQ ID NO: 2531162 - DNA, 25 bp, Homo sapien
cttaatgtgggtctcatcactttgt

SEQ ID NO: 2531163 - DNA, 25 bp, Homo sapien
gcttaatgtgggtctcatcactttg

SEQ ID NO: 2531164 - DNA, 25 bp, Homo sapien
ctgcttaatgtgggtctcatcactt

SEQ ID NO: 2531165 - DNA, 25 bp, Homo sapien
ccatcttgcagattagaagatgatg

SEQ ID NO: 2531166 - DNA, 25 bp, Homo sapien
tggagagtcggctttctgatcaagt

SEQ ID NO: 2531167 - DNA, 25 bp, Homo sapien
tcaagtttcgccttactaagtggtg

SEQ ID NO: 2531168 - DNA, 25 bp, Homo sapien
gctttctgatcaagtttcgccttac

SEQ ID NO: 2531169 - DNA, 25 bp, Homo sapien
tgaatcccgggatcaagtgtatcag

SEQ ID NO: 2531170 - DNA, 25 bp, Homo sapien
ctggtgtgacaatagtgctggacgc

SEQ ID NO: 2531171 - DNA, 25 bp, Homo sapien
gatttgctccgatgcagcgcggtga

SEQ ID NO: 2531172 - DNA, 25 bp, Homo sapien
taggcgtccacggtaagcctgtcca

SEQ ID NO: 2531173 - DNA, 25 bp, Homo sapien
gaagagcagagacaatgggtaagcc

SEQ ID NO: 2531174 - DNA, 25 bp, Homo sapien
agaagagcagagacaatgggtaagc

SEQ ID NO: 2531175 - DNA, 25 bp, Homo sapien
aagagcagagacaatgggtaagcca

SEQ ID NO: 2531176 - DNA, 25 bp, Homo sapien
catcccatgaccctgaattacatgc

SEQ ID NO: 2531177 - DNA, 25 bp, Homo sapien
tgaattacatgctggtaatgcaggt

SEQ ID NO: 2531178 - DNA, 25 bp, Homo sapien
tcccatctgatctctgaatctccag

SEQ ID NO: 2531179 - DNA, 25 bp, Homo sapien
catgaccctgaattacatgctggta

SEQ ID NO: 2531180 - DNA, 25 bp, Homo sapien
attccaccaaagacgcacaagcaca

SEQ ID NO: 2531181 - DNA, 25 bp, Homo sapien
acaagcacacactgacacaacacac

SEQ ID NO: 2531182 - DNA, 25 bp, Homo sapien
cattccaccaaagacgcacaagcac

SEQ ID NO: 2531183 - DNA, 25 bp, Homo sapien
cgcacaagcacacactgacacaaca

SEQ ID NO: 2531184 - DNA, 25 bp, Homo sapien
acgggaacatcgactcgccctcaag

SEQ ID NO: 2531185 - DNA, 25 bp, Homo sapien
catcgactcgccctcaagtttactt

SEQ ID NO: 2531186 - DNA, 25 bp, Homo sapien
tccaccggggccacgggaacatcga

SEQ ID NO: 2531187 - DNA, 25 bp, Homo sapien
ggggccacgggaacatcgactcgcc

SEQ ID NO: 2531188 - DNA, 25 bp, Homo sapien
ggctctgaccccgtaatgcctccca

SEQ ID NO: 2531189 - DNA, 25 bp, Homo sapien
accccgtaatgcctcccacgtcctg

SEQ ID NO: 2531190 - DNA, 25 bp, Homo sapien
cccacgtcctgctctatgagattca

SEQ ID NO: 2531191 - DNA, 25 bp, Homo sapien
ccacgtcctgctctatgagattcat

SEQ ID NO: 2531192 - DNA, 25 bp, Homo sapien
ctaagaaagcaaaggcaccaggggt

SEQ ID NO: 2531193 - DNA, 25 bp, Homo sapien
taagaaagcaaaggcaccaggggtg

SEQ ID NO: 2531194 - DNA, 25 bp, Homo sapien
agaagggcagaagccggaggggtct

SEQ ID NO: 2531195 - DNA, 25 bp, Homo sapien
gcagaagccggaggggtctgctgga

SEQ ID NO: 2531196 - DNA, 25 bp, Homo sapien
gaggaagaagggcagaagccggagg

SEQ ID NO: 2531197 - DNA, 25 bp, Homo sapien
gccggaggggtctgctggacaccat

SEQ ID NO: 2531198 - DNA, 25 bp, Homo sapien
cctgaattatacctcaggaggctat

SEQ ID NO: 2531199 - DNA, 25 bp, Homo sapien
gacaatggataaagagagattcctt

SEQ ID NO: 2531200 - DNA, 25 bp, Homo sapien
taactcttgctatcaatggccccaa

SEQ ID NO: 2531201 - DNA, 25 bp, Homo sapien
atgctatacacaagacctgaattat

SEQ ID NO: 2531202 - DNA, 25 bp, Homo sapien
gatgttctgcctaacgcagatgctg

SEQ ID NO: 2531203 - DNA, 25 bp, Homo sapien
caggacagacctgcggatcgttttc

SEQ ID NO: 2531204 - DNA, 25 bp, Homo sapien
gctccagtgggtcccggaaattcag

SEQ ID NO: 2531205 - DNA, 25 bp, Homo sapien
tcggataaatcactaaatcagatcg

SEQ ID NO: 2531206 - DNA, 25 bp, Homo sapien
aaatgagttcaaaccccgcctctga

SEQ ID NO: 2531207 - DNA, 25 bp, Homo sapien
cacttttttatgtgggaagcctccg

SEQ ID NO: 2531208 - DNA, 25 bp, Homo sapien
ttccaactctgagccagatgcaggg

SEQ ID NO: 2531209 - DNA, 25 bp, Homo sapien
gctgcgtgacttggcccagtaagaa

SEQ ID NO: 2531210 - DNA, 25 bp, Homo sapien
cttcctggggcaagagttcaaatcc

SEQ ID NO: 2531211 - DNA, 25 bp, Homo sapien
tcttcctgcgtttcggatttgcccc

SEQ ID NO: 2531212 - DNA, 25 bp, Homo sapien
ctgcctcttcctgcgtttcggattt

SEQ ID NO: 2531213 - DNA, 25 bp, Homo sapien
cttgctggtgtcttccggcctccaa

SEQ ID NO: 2531214 - DNA, 25 bp, Homo sapien
gatgccgagggaccgcggcagctgt

SEQ ID NO: 2531215 - DNA, 25 bp, Homo sapien
tgcagtggcgggcacgggatgccga

SEQ ID NO: 2531216 - DNA, 25 bp, Homo sapien
tggcgggcacgggatgccgagggac

SEQ ID NO: 2531217 - DNA, 25 bp, Homo sapien
cgggcacgggatgccgagggaccgc

SEQ ID NO: 2531218 - DNA, 25 bp, Homo sapien
ggttggctccgtatttctccacagt

SEQ ID NO: 2531219 - DNA, 25 bp, Homo sapien
aggcgggcacactcctcccggttgg

SEQ ID NO: 2531220 - DNA, 25 bp, Homo sapien
aggcgttgaggcgggcacactcctc

SEQ ID NO: 2531221 - DNA, 25 bp, Homo sapien
cagtctcgcacacctgttcatccgt

SEQ ID NO: 2531222 - DNA, 25 bp, Homo sapien
ggctcagctggccgggggagatttc

SEQ ID NO: 2531223 - DNA, 25 bp, Homo sapien
ctccaggctcagctggccgggggag

SEQ ID NO: 2531224 - DNA, 25 bp, Homo sapien
ctccaagaggtcctccaggctcagc

SEQ ID NO: 2531225 - DNA, 25 bp, Homo sapien
caggctcagctggccgggggagatt

SEQ ID NO: 2531226 - DNA, 25 bp, Homo sapien
aagccgtccagctccgcgttgcgct

SEQ ID NO: 2531227 - DNA, 25 bp, Homo sapien
gattcggaaccagtgccgtagctgg

SEQ ID NO: 2531228 - DNA, 25 bp, Homo sapien
ctccttgcgcacatcgacgattcgg

SEQ ID NO: 2531229 - DNA, 25 bp, Homo sapien
ggctgaagtacttcaccagcttgct

SEQ ID NO: 2531230 - DNA, 25 bp, Homo sapien
ggtgaaaagcccatgatgtgagcag

SEQ ID NO: 2531231 - DNA, 25 bp, Homo sapien
tgtgatgtctgctgggacgcctttg

SEQ ID NO: 2531232 - DNA, 25 bp, Homo sapien
aagcccatgatgtgagcagttctgt

SEQ ID NO: 2531233 - DNA, 25 bp, Homo sapien
tttgtcaacgacaataaagcatttt

SEQ ID NO: 2531234 - DNA, 25 bp, Homo sapien
ggaagtgcaaaagttgggcatcgac

SEQ ID NO: 2531235 - DNA, 25 bp, Homo sapien
agtgcaaaagttgggcatcgacccc

SEQ ID NO: 2531236 - DNA, 25 bp, Homo sapien
aagtgcaaaagttgggcatcgaccc

SEQ ID NO: 2531237 - DNA, 25 bp, Homo sapien
ctggaagtgcaaaagttgggcatcg

SEQ ID NO: 2531238 - DNA, 25 bp, Homo sapien
tgagcagaccccgtgcgggtaatga

SEQ ID NO: 2531239 - DNA, 25 bp, Homo sapien
taaggttctcgggtgagcagacccc

SEQ ID NO: 2531240 - DNA, 25 bp, Homo sapien
gggtaatgaaatcgcggcagccaca

SEQ ID NO: 2531241 - DNA, 25 bp, Homo sapien
cctggttgtgttattaaggttctcg

SEQ ID NO: 2531242 - DNA, 25 bp, Homo sapien
tataattcgtacacccttatggaaa

SEQ ID NO: 2531243 - DNA, 25 bp, Homo sapien
tagaaaagtacagcagacctttgcc

SEQ ID NO: 2531244 - DNA, 25 bp, Homo sapien
cagtaaagaaccgtgttataattcg

SEQ ID NO: 2531245 - DNA, 25 bp, Homo sapien
aagaccatttggaactatagaaaag

SEQ ID NO: 2531246 - DNA, 25 bp, Homo sapien
tcgccttaaggcagtctcgcatgtg

SEQ ID NO: 2531247 - DNA, 25 bp, Homo sapien
cagagattggctacgacatcatgct

SEQ ID NO: 2531248 - DNA, 25 bp, Homo sapien
tcatgcttagcaaaggcaagtgcct

SEQ ID NO: 2531249 - DNA, 25 bp, Homo sapien
tgaggtagacatcgcaaatggagcc

SEQ ID NO: 2531250 - DNA, 25 bp, Homo sapien
tacttctgatgacctgggaattcat

SEQ ID NO: 2531251 - DNA, 25 bp, Homo sapien
ctaggcagccatcgaatacttctga

SEQ ID NO: 2531252 - DNA, 25 bp, Homo sapien
catttttaactatctcagccatttg

SEQ ID NO: 2531253 - DNA, 25 bp, Homo sapien
catcgaatacttctgatgacctggg

SEQ ID NO: 2531254 - DNA, 25 bp, Homo sapien
tcttgagtcaagactgccacagtca

SEQ ID NO: 2531255 - DNA, 25 bp, Homo sapien
tatccaatctcccttgctaaagagg

SEQ ID NO: 2531256 - DNA, 25 bp, Homo sapien
taaagaggtcgtgcccgcctggatg

SEQ ID NO: 2531257 - DNA, 25 bp, Homo sapien
tcaggtcacactcctgtatccaatc

SEQ ID NO: 2531258 - DNA, 25 bp, Homo sapien
caagcagacacagtaaatgctacca

SEQ ID NO: 2531259 - DNA, 25 bp, Homo sapien
tcaagcagacacagtaaatgctacc

SEQ ID NO: 2531260 - DNA, 25 bp, Homo sapien
aagcagacacagtaaatgctaccat

SEQ ID NO: 2531261 - DNA, 25 bp, Homo sapien
gccaccaatcctgaccaaggatcat

SEQ ID NO: 2531262 - DNA, 25 bp, Homo sapien
gatcatcccagtgccttcgtgggtg

SEQ ID NO: 2531263 - DNA, 25 bp, Homo sapien
gtccaagccaccaatcctgaccaag

SEQ ID NO: 2531264 - DNA, 25 bp, Homo sapien
caaggatcatcccagtgccttcgtg

SEQ ID NO: 2531265 - DNA, 25 bp, Homo sapien
tctttcttctcttccaggagatttc

SEQ ID NO: 2531266 - DNA, 25 bp, Homo sapien
tttcttctcttccaggagatttcac

SEQ ID NO: 2531267 - DNA, 25 bp, Homo sapien
cattaacgtctacacttccccttcg

SEQ ID NO: 2531268 - DNA, 25 bp, Homo sapien
cccttcgccctctgtttctcctcat

SEQ ID NO: 2531269 - DNA, 25 bp, Homo sapien
gtctgcggctgccttactcggtcag

SEQ ID NO: 2531270 - DNA, 25 bp, Homo sapien
caggagagcagtaaacctctgtctg

SEQ ID NO: 2531271 - DNA, 25 bp, Homo sapien
ctctgtctgttcctgtgtctgcggc

SEQ ID NO: 2531272 - DNA, 25 bp, Homo sapien
cttactcggtcagtttgggtcaaat

SEQ ID NO: 2531273 - DNA, 25 bp, Homo sapien
cgcaaggtcacgtgggttctctgca

SEQ ID NO: 2531274 - DNA, 25 bp, Homo sapien
aaaaccaccttttgaccacctgcag

SEQ ID NO: 2531275 - DNA, 25 bp, Homo sapien
cacctgcagaatgcgcaaggtcacg

SEQ ID NO: 2531276 - DNA, 25 bp, Homo sapien
gacaggcggccccattctgtgagca

SEQ ID NO: 2531277 - DNA, 25 bp, Homo sapien
gttcgcactgctgtaaggctttttg

SEQ ID NO: 2531278 - DNA, 25 bp, Homo sapien
ggtagcacatttggtcctaagccct

SEQ ID NO: 2531279 - DNA, 25 bp, Homo sapien
ggttggagatgctcaagtctatcat

SEQ ID NO: 2531280 - DNA, 25 bp, Homo sapien
tatcatgttttggaccagttcgcac

SEQ ID NO: 2531281 - DNA, 25 bp, Homo sapien
cacggcatggtccacggtttggagt

SEQ ID NO: 2531282 - DNA, 25 bp, Homo sapien
ccagttgcagggacacggcatggtc

SEQ ID NO: 2531283 - DNA, 25 bp, Homo sapien
ggctggcttgcttttatgtcaaaaa

SEQ ID NO: 2531284 - DNA, 25 bp, Homo sapien
cagggacacggcatggtccacggtt

SEQ ID NO: 2531285 - DNA, 25 bp, Homo sapien
gggtgacggttgctgcaatcgctcc

SEQ ID NO: 2531286 - DNA, 25 bp, Homo sapien
tgcctcgctccacaccgacatcttg

SEQ ID NO: 2531287 - DNA, 25 bp, Homo sapien
cggctactgcggctggctgctgtct

SEQ ID NO: 2531288 - DNA, 25 bp, Homo sapien
gctgtctgcattgctcccgcggctg

SEQ ID NO: 2531289 - DNA, 25 bp, Homo sapien
catgtgggttgtctgcctggtcggt

SEQ ID NO: 2531290 - DNA, 25 bp, Homo sapien
cacagtgttgactcggcttccagca

SEQ ID NO: 2531291 - DNA, 25 bp, Homo sapien
tgtctgcctggtcggtgaaagcaga

SEQ ID NO: 2531292 - DNA, 25 bp, Homo sapien
tgtggcacagtgttgactcggcttc

SEQ ID NO: 2531293 - DNA, 25 bp, Homo sapien
tcatcccaaatttgattgccttctg

SEQ ID NO: 2531294 - DNA, 25 bp, Homo sapien
tgattgccttctgaaaggtacagac

SEQ ID NO: 2531295 - DNA, 25 bp, Homo sapien
aatcatcccaaatttgattgccttc

SEQ ID NO: 2531296 - DNA, 25 bp, Homo sapien
atttgattgccttctgaaaggtaca

SEQ ID NO: 2531297 - DNA, 25 bp, Homo sapien
attaagaactctccccatactccag

SEQ ID NO: 2531298 - DNA, 25 bp, Homo sapien
ctccagtctgacaaaatgaaccgaa

SEQ ID NO: 2531299 - DNA, 25 bp, Homo sapien
aaggtcctttacaaggatcttctgc

SEQ ID NO: 2531300 - DNA, 25 bp, Homo sapien
tttattaagaactctccccatactc

SEQ ID NO: 2531301 - DNA, 25 bp, Homo sapien
atttttgaatgcttccatagtcact

SEQ ID NO: 2531302 - DNA, 25 bp, Homo sapien
caaacaacttcccatattcgccctc

SEQ ID NO: 2531303 - DNA, 25 bp, Homo sapien
tttcaaacaacttcccatattcgcc

SEQ ID NO: 2531304 - DNA, 25 bp, Homo sapien
ttttgaatgcttccatagtcacttt

SEQ ID NO: 2531305 - DNA, 25 bp, Homo sapien
gcagacgccctgttagatgttcgat

SEQ ID NO: 2531306 - DNA, 25 bp, Homo sapien
caaagaccgtaggaggtaggcaccg

SEQ ID NO: 2531307 - DNA, 25 bp, Homo sapien
catattattagattagcagacgccc

SEQ ID NO: 2531308 - DNA, 25 bp, Homo sapien
gaagaaggcggctttcgcacctggt

SEQ ID NO: 2531309 - DNA, 25 bp, Homo sapien
gaaaacgactttgcagagtgcctag

SEQ ID NO: 2531310 - DNA, 25 bp, Homo sapien
cccgcctggaacatgtcgtggaaga

SEQ ID NO: 2531311 - DNA, 25 bp, Homo sapien
tagtcagatgccaagcaagtagccg

SEQ ID NO: 2531312 - DNA, 25 bp, Homo sapien
cactggctggttcgtatgtagagga

SEQ ID NO: 2531313 - DNA, 25 bp, Homo sapien
tctctactagaaggagttacaactc

SEQ ID NO: 2531314 - DNA, 25 bp, Homo sapien
cagttgtgttgggattaaaagcctt

SEQ ID NO: 2531315 - DNA, 25 bp, Homo sapien
aaacgcagttggctttattctctac

SEQ ID NO: 2531316 - DNA, 25 bp, Homo sapien
ggcactgcatgatatcctgacagag

SEQ ID NO: 2531317 - DNA, 25 bp, Homo sapien
tgaggcctcaggactagttcagtgt

SEQ ID NO: 2531318 - DNA, 25 bp, Homo sapien
gcaagtgggaactcagcattcaagt

SEQ ID NO: 2531319 - DNA, 25 bp, Homo sapien
tctggtatctagtgagcaggctgag

SEQ ID NO: 2531320 - DNA, 25 bp, Homo sapien
tcaagttaacttgtagagctaccca

SEQ ID NO: 2531321 - DNA, 25 bp, Homo sapien
aattcacaggtcaagtacagatcag

SEQ ID NO: 2531322 - DNA, 25 bp, Homo sapien
ggctttcacaggcacaaattaggtc

SEQ ID NO: 2531323 - DNA, 25 bp, Homo sapien
cattgggttcaacatagacgtcagc

SEQ ID NO: 2531324 - DNA, 25 bp, Homo sapien
tcacatacggtacaatctagtctgg

SEQ ID NO: 2531325 - DNA, 25 bp, Homo sapien
gacctgattgttgcagaggcctaga

SEQ ID NO: 2531326 - DNA, 25 bp, Homo sapien
tagagccttaaactatgccactggg

SEQ ID NO: 2531327 - DNA, 25 bp, Homo sapien
gatgacagggaattagcctacccca

SEQ ID NO: 2531328 - DNA, 25 bp, Homo sapien
ctagaactgcggaaggactgggact

SEQ ID NO: 2531329 - DNA, 25 bp, Homo sapien
ccatgtcccaggctcgagcagttct

SEQ ID NO: 2531330 - DNA, 25 bp, Homo sapien
aataccgtgacacgatcgtggctcg

SEQ ID NO: 2531331 - DNA, 25 bp, Homo sapien
gcatctgctgtacctggaacttcaa

SEQ ID NO: 2531332 - DNA, 25 bp, Homo sapien
tgaaatgtaaacgttggccaatcca

SEQ ID NO: 2531333 - DNA, 25 bp, Homo sapien
tcaatgcaagaccagatgtttggcc

SEQ ID NO: 2531334 - DNA, 25 bp, Homo sapien
gacgatttaccctgctacaaagaag

SEQ ID NO: 2531335 - DNA, 25 bp, Homo sapien
taactacatgccactgaaggagaac

SEQ ID NO: 2531336 - DNA, 25 bp, Homo sapien
ttggccaacatcgaagcaactctga

SEQ ID NO: 2531337 - DNA, 25 bp, Homo sapien
tttcttggggattggcagtgctagg

SEQ ID NO: 2531338 - DNA, 25 bp, Homo sapien
ctgtatgtgaggaactctttcattt

SEQ ID NO: 2531339 - DNA, 25 bp, Homo sapien
attttcttggggattggcagtgcta

SEQ ID NO: 2531340 - DNA, 25 bp, Homo sapien
tgtatgtgaggaactctttcatttt

SEQ ID NO: 2531341 - DNA, 25 bp, Homo sapien
accctaggagctgtccagaactgga

SEQ ID NO: 2531342 - DNA, 25 bp, Homo sapien
acttcgaagggctttccggcataag

SEQ ID NO: 2531343 - DNA, 25 bp, Homo sapien
agctgtccagaactggacgtggcca

SEQ ID NO: 2531344 - DNA, 25 bp, Homo sapien
gctttccggcataagtgcttcagtg

SEQ ID NO: 2531345 - DNA, 25 bp, Homo sapien
gagttttcagttccagggcccagat

SEQ ID NO: 2531346 - DNA, 25 bp, Homo sapien
gtggcaatgactccaccatgtggaa

SEQ ID NO: 2531347 - DNA, 25 bp, Homo sapien
cagcaaagcccattggtcataggag

SEQ ID NO: 2531348 - DNA, 25 bp, Homo sapien
aaagcccattggtcataggagcaaa

SEQ ID NO: 2531349 - DNA, 25 bp, Homo sapien
tacaagccttctggagagaagcaca

SEQ ID NO: 2531350 - DNA, 25 bp, Homo sapien
cagatctcagtgagctaatgtggac

SEQ ID NO: 2531351 - DNA, 25 bp, Homo sapien
taatgtggacgtcactgtcatccat

SEQ ID NO: 2531352 - DNA, 25 bp, Homo sapien
gaagcacacagatctcagtgagcta

SEQ ID NO: 2531353 - DNA, 25 bp, Homo sapien
gattccgaagaagtacacacagcca

SEQ ID NO: 2531354 - DNA, 25 bp, Homo sapien
gcacagtttcgataagaggctcttt

SEQ ID NO: 2531355 - DNA, 25 bp, Homo sapien
gagggcttaattgacaaggcatcac

SEQ ID NO: 2531356 - DNA, 25 bp, Homo sapien
gagacatgtctaatcccaggcaggt

SEQ ID NO: 2531357 - DNA, 25 bp, Homo sapien
ttcgccggtgtaggggtcccacata

SEQ ID NO: 2531358 - DNA, 25 bp, Homo sapien
tcagcctttcgccggtgtaggggtc

SEQ ID NO: 2531359 - DNA, 25 bp, Homo sapien
cggtgtaggggtcccacataatcac

SEQ ID NO: 2531360 - DNA, 25 bp, Homo sapien
ctcagcctttcgccggtgtaggggt

SEQ ID NO: 2531361 - DNA, 25 bp, Homo sapien
taagaagccgtgacaagcagggcag

SEQ ID NO: 2531362 - DNA, 25 bp, Homo sapien
gccctctagcttccgaattaacgtg

SEQ ID NO: 2531363 - DNA, 25 bp, Homo sapien
agagacaacactgctttgatggccc

SEQ ID NO: 2531364 - DNA, 25 bp, Homo sapien
taggacctcatgctccatagaaaga

SEQ ID NO: 2531365 - DNA, 25 bp, Homo sapien
ctgcagtctggggagatggaacagc

SEQ ID NO: 2531366 - DNA, 25 bp, Homo sapien
catgctgcagtctggggagatggaa

SEQ ID NO: 2531367 - DNA, 25 bp, Homo sapien
cccgataacacttgaatctgtttac

SEQ ID NO: 2531368 - DNA, 25 bp, Homo sapien
cccactgcaggtggcccgataacac

SEQ ID NO: 2531369 - DNA, 25 bp, Homo sapien
ggagttgccgagtagttccttcact

SEQ ID NO: 2531370 - DNA, 25 bp, Homo sapien
gacacacagtatatgttcggtatta

SEQ ID NO: 2531371 - DNA, 25 bp, Homo sapien
ggcaattcaccccaagagggtacaa

SEQ ID NO: 2531372 - DNA, 25 bp, Homo sapien
tacaaagcatagacatgcattcagc

SEQ ID NO: 2531373 - DNA, 25 bp, Homo sapien
ccgtgacgcggagaccaaaatcaaa

SEQ ID NO: 2531374 - DNA, 25 bp, Homo sapien
cgtgtttattcaggtcccagatgcg

SEQ ID NO: 2531375 - DNA, 25 bp, Homo sapien
cacgacatcttggtggccggaaaga

SEQ ID NO: 2531376 - DNA, 25 bp, Homo sapien
atgcgaagagtcttatcccgtgacg

SEQ ID NO: 2531377 - DNA, 25 bp, Homo sapien
gcaagaaccaggcaagagacatcgg

SEQ ID NO: 2531378 - DNA, 25 bp, Homo sapien
tcttgatctgcccatcgttgagtcc

SEQ ID NO: 2531379 - DNA, 25 bp, Homo sapien
caggcaagagacatcgggcacttgg

SEQ ID NO: 2531380 - DNA, 25 bp, Homo sapien
gttgagtcccgtagcaagaaccagg

SEQ ID NO: 2531381 - DNA, 25 bp, Homo sapien
gaccacagtccagcgtcttctcttt

SEQ ID NO: 2531382 - DNA, 25 bp, Homo sapien
gctacttcggcttttggcttcaaac

SEQ ID NO: 2531383 - DNA, 25 bp, Homo sapien
tcatttttgctacttcggcttttgg

SEQ ID NO: 2531384 - DNA, 25 bp, Homo sapien
tgaccacagtccagcgtcttctctt

SEQ ID NO: 2531385 - DNA, 25 bp, Homo sapien
agaaggcgacgctccaggtttcaca

SEQ ID NO: 2531386 - DNA, 25 bp, Homo sapien
cgatgcagtgtccttgagaccaagc

SEQ ID NO: 2531387 - DNA, 25 bp, Homo sapien
gctggacttccaatcaaactggtgg

SEQ ID NO: 2531388 - DNA, 25 bp, Homo sapien
ccgggcttgagttcggccagcagca

SEQ ID NO: 2531389 - DNA, 25 bp, Homo sapien
aagacttgccaaatctaacccctct

SEQ ID NO: 2531390 - DNA, 25 bp, Homo sapien
ccattagcaagttctatcaagtctg

SEQ ID NO: 2531391 - DNA, 25 bp, Homo sapien
cccaaaccaaatccattagcaagtt

SEQ ID NO: 2531392 - DNA, 25 bp, Homo sapien
tctactctcatctatgcagcatcat

SEQ ID NO: 2531393 - DNA, 25 bp, Homo sapien
ttagatattccaccggcctcaaaag

SEQ ID NO: 2531394 - DNA, 25 bp, Homo sapien
agatgaaagctatgaccccagccag

SEQ ID NO: 2531395 - DNA, 25 bp, Homo sapien
gatgtgtttggacaatcaggctgaa

SEQ ID NO: 2531396 - DNA, 25 bp, Homo sapien
tataagcctcttctaggcaaagcag

SEQ ID NO: 2531397 - DNA, 25 bp, Homo sapien
caccctccgaggaaggtactaggat

SEQ ID NO: 2531398 - DNA, 25 bp, Homo sapien
gatctccgttttagggcttggtgcc

SEQ ID NO: 2531399 - DNA, 25 bp, Homo sapien
gaattctacgggtaacactcactga

SEQ ID NO: 2531400 - DNA, 25 bp, Homo sapien
tcatacatgtcaccagggatcagcg

SEQ ID NO: 2531401 - DNA, 25 bp, Homo sapien
ccgggccgcgggccctcatgccgcc

SEQ ID NO: 2531402 - DNA, 25 bp, Homo sapien
ccgcgggccctcatgccgcccccgc

SEQ ID NO: 2531403 - DNA, 25 bp, Homo sapien
ggcatatgataacctcagaactaat

SEQ ID NO: 2531404 - DNA, 25 bp, Homo sapien
cagtgcatgggttattgcaattttc

SEQ ID NO: 2531405 - DNA, 25 bp, Homo sapien
gttcctggccagtcccaacgtgaga

SEQ ID NO: 2531406 - DNA, 25 bp, Homo sapien
atcagttggcacttattgcatcata

SEQ ID NO: 2531407 - DNA, 25 bp, Homo sapien
gatctcatggtctctaagttaacaa

SEQ ID NO: 2531408 - DNA, 25 bp, Homo sapien
tgaagtgtgtatcttcctggtcctg

SEQ ID NO: 2531409 - DNA, 25 bp, Homo sapien
aaaaaagtcagttgcaatggacctg

SEQ ID NO: 2531410 - DNA, 25 bp, Homo sapien
cttgtatgtgcttgtgagaattggg

SEQ ID NO: 2531411 - DNA, 25 bp, Homo sapien
gctgatatttgcaaggtgccgtggc

SEQ ID NO: 2531412 - DNA, 25 bp, Homo sapien
ccagatgagctggtttgcccaagca

SEQ ID NO: 2531413 - DNA, 25 bp, Homo sapien
tatacaaggatctactggaagcatc

SEQ ID NO: 2531414 - DNA, 25 bp, Homo sapien
taaagagtcgtgctctagcccatga

SEQ ID NO: 2531415 - DNA, 25 bp, Homo sapien
tttcagagcaagacaaccatggacc

SEQ ID NO: 2531416 - DNA, 25 bp, Homo sapien
tgctgagacccaaacattgttagtg

SEQ ID NO: 2531417 - DNA, 25 bp, Homo sapien
caggattcacagcagaagtggcacc

SEQ ID NO: 2531418 - DNA, 25 bp, Homo sapien
gctcgtcttcaatgtagctctccaa

SEQ ID NO: 2531419 - DNA, 25 bp, Homo sapien
tcttcttgaacaatgtcactttgct

SEQ ID NO: 2531420 - DNA, 25 bp, Homo sapien
ttcttgaacaatgtcactttgctcc

SEQ ID NO: 2531421 - DNA, 25 bp, Homo sapien
tcttgaacaatgtcactttgctcct

SEQ ID NO: 2531422 - DNA, 25 bp, Homo sapien
ttcttcttgaacaatgtcactttgc

SEQ ID NO: 2531423 - DNA, 25 bp, Homo sapien
aatattgtgcctaccctagaccagg

SEQ ID NO: 2531424 - DNA, 25 bp, Homo sapien
ccaggaccttgataagtgtttgtca

SEQ ID NO: 2531425 - DNA, 25 bp, Homo sapien
cctggcctgaactggtcttgtaaag

SEQ ID NO: 2531426 - DNA, 25 bp, Homo sapien
tcttgtaaagctccctgcatgcaga

SEQ ID NO: 2531427 - DNA, 25 bp, Homo sapien
gaagatcctggaatccatttcccat

SEQ ID NO: 2531428 - DNA, 25 bp, Homo sapien
ctctctctcacgtgctccctcctgt

SEQ ID NO: 2531429 - DNA, 25 bp, Homo sapien
accaaggcggtcactctgtgaatgt

SEQ ID NO: 2531430 - DNA, 25 bp, Homo sapien
tgtggtcctgcttaggtatttcttt

SEQ ID NO: 2531431 - DNA, 25 bp, Homo sapien
gaatccaccaaaaccatgacatcat

SEQ ID NO: 2531432 - DNA, 25 bp, Homo sapien
tctgaatccaccaaaaccatgacat

SEQ ID NO: 2531433 - DNA, 25 bp, Homo sapien
ttctgaatccaccaaaaccatgaca

SEQ ID NO: 2531434 - DNA, 25 bp, Homo sapien
ctcttctgaatccaccaaaaccatg

SEQ ID NO: 2531435 - DNA, 25 bp, Homo sapien
gtgtggtaaccgcagagatgctgcc

SEQ ID NO: 2531436 - DNA, 25 bp, Homo sapien
tcatgtccccttacagcaggtagac

SEQ ID NO: 2531437 - DNA, 25 bp, Homo sapien
tggaagacccaggtaaagtcctctc

SEQ ID NO: 2531438 - DNA, 25 bp, Homo sapien
caggtgaccatattgtcccaggcat

SEQ ID NO: 2531439 - DNA, 25 bp, Homo sapien
ttgtgcccggcctggactgtgcatt

SEQ ID NO: 2531440 - DNA, 25 bp, Homo sapien
ccggcctggactgtgcatttcttct

SEQ ID NO: 2531441 - DNA, 25 bp, Homo sapien
gcccggcctggactgtgcatttctt

SEQ ID NO: 2531442 - DNA, 25 bp, Homo sapien
ccactgttgtgcccggcctggactg

SEQ ID NO: 2531443 - DNA, 25 bp, Homo sapien
caggcatgcgccactacatgcggct

SEQ ID NO: 2531444 - DNA, 25 bp, Homo sapien
acaggcatgcgccactacatgcggc

SEQ ID NO: 2531445 - DNA, 25 bp, Homo sapien
aggcatgcgccactacatgcggcta

SEQ ID NO: 2531446 - DNA, 25 bp, Homo sapien
ggcatgcgccactacatgcggctaa

SEQ ID NO: 2531447 - DNA, 25 bp, Homo sapien
tgactggctcaaaatgtacacattg

SEQ ID NO: 2531448 - DNA, 25 bp, Homo sapien
ggctcaaaatgtacacattgtcttt

SEQ ID NO: 2531449 - DNA, 25 bp, Homo sapien
ctggctcaaaatgtacacattgtct

SEQ ID NO: 2531450 - DNA, 25 bp, Homo sapien
gactggctcaaaatgtacacattgt

SEQ ID NO: 2531451 - DNA, 25 bp, Homo sapien
cagaacacagggctataatgcaaca

SEQ ID NO: 2531452 - DNA, 25 bp, Homo sapien
ccctgagataatggccagtcccagc

SEQ ID NO: 2531453 - DNA, 25 bp, Homo sapien
tataatgcaacagaagccctgagat

SEQ ID NO: 2531454 - DNA, 25 bp, Homo sapien
aagccctgagataatggccagtccc

SEQ ID NO: 2531455 - DNA, 25 bp, Homo sapien
gagttctggccatcctgggtaatga

SEQ ID NO: 2531456 - DNA, 25 bp, Homo sapien
taggctggatgatcacctcgggctg

SEQ ID NO: 2531457 - DNA, 25 bp, Homo sapien
agctcggcagatgtagtagccctca

SEQ ID NO: 2531458 - DNA, 25 bp, Homo sapien
ccagacacctggcatgtaagcgtca

SEQ ID NO: 2531459 - DNA, 25 bp, Homo sapien
gggctcagagagaagggagggaccc

SEQ ID NO: 2531460 - DNA, 25 bp, Homo sapien
ggctcagagagaagggagggacccc

SEQ ID NO: 2531461 - DNA, 25 bp, Homo sapien
ttcttgccatccgacagctgggact

SEQ ID NO: 2531462 - DNA, 25 bp, Homo sapien
agctgggactcgctcagcatttcca

SEQ ID NO: 2531463 - DNA, 25 bp, Homo sapien
ccatcccagcgacaggtaagctgca

SEQ ID NO: 2531464 - DNA, 25 bp, Homo sapien
gactctggcccaactatgtggcttg

SEQ ID NO: 2531465 - DNA, 25 bp, Homo sapien
cactggggagctgatggagggggat

SEQ ID NO: 2531466 - DNA, 25 bp, Homo sapien
tgatgccatctgtgcccagcactgg

SEQ ID NO: 2531467 - DNA, 25 bp, Homo sapien
ctgatgccatctgtgcccagcactg

SEQ ID NO: 2531468 - DNA, 25 bp, Homo sapien
ccagcactggggagctgatggaggg

SEQ ID NO: 2531469 - DNA, 25 bp, Homo sapien
tgaatcacagactctaggatcagcc

SEQ ID NO: 2531470 - DNA, 25 bp, Homo sapien
gaggaaagcatgggctgaatcacag

SEQ ID NO: 2531471 - DNA, 25 bp, Homo sapien
agaggaaagcatgggctgaatcaca

SEQ ID NO: 2531472 - DNA, 25 bp, Homo sapien
aatcacagactctaggatcagccac

SEQ ID NO: 2531473 - DNA, 25 bp, Homo sapien
cgcaaggaacggactattattcagc

SEQ ID NO: 2531474 - DNA, 25 bp, Homo sapien
tctaccgtggttttcgtccaagata

SEQ ID NO: 2531475 - DNA, 25 bp, Homo sapien
tcataacagtgctagagggcccggt

SEQ ID NO: 2531476 - DNA, 25 bp, Homo sapien
taaattgtggtccatccacgcaagg

SEQ ID NO: 2531477 - DNA, 25 bp, Homo sapien
agtagaccaggagctcggtggtcac

SEQ ID NO: 2531478 - DNA, 25 bp, Homo sapien
gctgattcaaggctaaacaggtgta

SEQ ID NO: 2531479 - DNA, 25 bp, Homo sapien
tgctgagctgattcaaggctaaaca

SEQ ID NO: 2531480 - DNA, 25 bp, Homo sapien
cgatgtctcttgctgagctgattca

SEQ ID NO: 2531481 - DNA, 25 bp, Homo sapien
ttcaaggctaaacaggtgtagttcc

SEQ ID NO: 2531482 - DNA, 25 bp, Homo sapien
tggaggtttggcgatatcagtaaca

SEQ ID NO: 2531483 - DNA, 25 bp, Homo sapien
aaggactcgctgctggaattcaggg

SEQ ID NO: 2531484 - DNA, 25 bp, Homo sapien
gaaaaagttgactgtcaggttgtgg

SEQ ID NO: 2531485 - DNA, 25 bp, Homo sapien
tggcgatatcagtaacagtgagaaa

SEQ ID NO: 2531486 - DNA, 25 bp, Homo sapien
tgccggtggccacgatgtggacctc

SEQ ID NO: 2531487 - DNA, 25 bp, Homo sapien
caccattcaaccacgggtggtggcc

SEQ ID NO: 2531488 - DNA, 25 bp, Homo sapien
ccctggctgcgtagagggtgccgtt

SEQ ID NO: 2531489 - DNA, 25 bp, Homo sapien
tggacctcaatctgataggggccgc

SEQ ID NO: 2531490 - DNA, 25 bp, Homo sapien
caacaaccgactttctcttgatctc

SEQ ID NO: 2531491 - DNA, 25 bp, Homo sapien
cctttataggcaaaatcaacaaccg

SEQ ID NO: 2531492 - DNA, 25 bp, Homo sapien
taggcaaaatcaacaaccgactttc

SEQ ID NO: 2531493 - DNA, 25 bp, Homo sapien
tataggcaaaatcaacaaccgactt

SEQ ID NO: 2531494 - DNA, 25 bp, Homo sapien
agttgttccggtaccaggtcacctg

SEQ ID NO: 2531495 - DNA, 25 bp, Homo sapien
catccactagagagaagcgaggctc

SEQ ID NO: 2531496 - DNA, 25 bp, Homo sapien
tgccacagtgcagagtaacattctc

SEQ ID NO: 2531497 - DNA, 25 bp, Homo sapien
cccaggctcagcgattcaatgtgca

SEQ ID NO: 2531498 - DNA, 25 bp, Homo sapien
tgaagcaggtctgggcatcaaaata

SEQ ID NO: 2531499 - DNA, 25 bp, Homo sapien
tagcagtggagataggttccccatg

SEQ ID NO: 2531500 - DNA, 25 bp, Homo sapien
tcaagcgattgtagagaccgtctct

SEQ ID NO: 2531501 - DNA, 25 bp, Homo sapien
tgttcatcgtgcaggaaacactgca

SEQ ID NO: 2531502 - DNA, 25 bp, Homo sapien
ggctcatatgccctagataagagga

SEQ ID NO: 2531503 - DNA, 25 bp, Homo sapien
attaggaactcttggcacttgctgc

SEQ ID NO: 2531504 - DNA, 25 bp, Homo sapien
tagcaaagcagaccatagatgaagc

SEQ ID NO: 2531505 - DNA, 25 bp, Homo sapien
tcacgtccagagatgaccaactagg

SEQ ID NO: 2531506 - DNA, 25 bp, Homo sapien
ttgtcaatcatgtcaagtgtgaggg

SEQ ID NO: 2531507 - DNA, 25 bp, Homo sapien
cgctggtcggcacaggaagacttgc

SEQ ID NO: 2531508 - DNA, 25 bp, Homo sapien
gaagaccccgctttgaaggcgctgg

SEQ ID NO: 2531509 - DNA, 25 bp, Homo sapien
aagacttgcaaaggtgtgtagggaa

SEQ ID NO: 2531510 - DNA, 25 bp, Homo sapien
cgaggcagacgaggacgcggggctc

SEQ ID NO: 2531511 - DNA, 25 bp, Homo sapien
gaggcagacgaggacgcggggctcg

SEQ ID NO: 2531512 - DNA, 25 bp, Homo sapien
aggcagacgaggacgcggggctcgg

SEQ ID NO: 2531513 - DNA, 25 bp, Homo sapien
ctacggcgacccagccggccaggag

SEQ ID NO: 2531514 - DNA, 25 bp, Homo sapien
gatgcttggctgagccgagtgtcca

SEQ ID NO: 2531515 - DNA, 25 bp, Homo sapien
agatcccggctcaggaaacgcaggc

SEQ ID NO: 2531516 - DNA, 25 bp, Homo sapien
tcctcggaacggcagagtggcccca

SEQ ID NO: 2531517 - DNA, 25 bp, Homo sapien
tcctgccggcggaaaacaacaggag

SEQ ID NO: 2531518 - DNA, 25 bp, Homo sapien
gagacagagtcttccttcgtagccc

SEQ ID NO: 2531519 - DNA, 25 bp, Homo sapien
ttgagacagagtcttccttcgtagc

SEQ ID NO: 2531520 - DNA, 25 bp, Homo sapien
acagagtcttccttcgtagcccagg

SEQ ID NO: 2531521 - DNA, 25 bp, Homo sapien
gacagagtcttccttcgtagcccag

SEQ ID NO: 2531522 - DNA, 25 bp, Homo sapien
gaaggtcatgtaccagctaagctca

SEQ ID NO: 2531523 - DNA, 25 bp, Homo sapien
agtgaatccatacgggcctgcagca

SEQ ID NO: 2531524 - DNA, 25 bp, Homo sapien
gtttctggcgtttctatctactggg

SEQ ID NO: 2531525 - DNA, 25 bp, Homo sapien
gccatgaagtgactcagaaactggg

SEQ ID NO: 2531526 - DNA, 25 bp, Homo sapien
tcttagggtcccagtgagacaggaa

SEQ ID NO: 2531527 - DNA, 25 bp, Homo sapien
gctggctaagacagactggacccaa

SEQ ID NO: 2531528 - DNA, 25 bp, Homo sapien
ggacccaacacggtgctggatttga

SEQ ID NO: 2531529 - DNA, 25 bp, Homo sapien
cacatgactagcaaaaggaaacttt

SEQ ID NO: 2531530 - DNA, 25 bp, Homo sapien
tgtcttgagtccacccatactcccc

SEQ ID NO: 2531531 - DNA, 25 bp, Homo sapien
tgacacactcttgaattccttctcc

SEQ ID NO: 2531532 - DNA, 25 bp, Homo sapien
aaccccaagtcccatcggactctgt

SEQ ID NO: 2531533 - DNA, 25 bp, Homo sapien
tctccagatggtgtcaagagcctgg

SEQ ID NO: 2531534 - DNA, 25 bp, Homo sapien
gttacggagattaagaactttctga

SEQ ID NO: 2531535 - DNA, 25 bp, Homo sapien
agaactttctgataagcctgggcaa

SEQ ID NO: 2531536 - DNA, 25 bp, Homo sapien
aagaactttctgataagcctgggca

SEQ ID NO: 2531537 - DNA, 25 bp, Homo sapien
taagaactttctgataagcctgggc

SEQ ID NO: 2531538 - DNA, 25 bp, Homo sapien
ttgttacagaccaggcgcgttggct

SEQ ID NO: 2531539 - DNA, 25 bp, Homo sapien
tgtcagccagggtttgcacaatgag

SEQ ID NO: 2531540 - DNA, 25 bp, Homo sapien
attagctgtgtaggccacgatacgt

SEQ ID NO: 2531541 - DNA, 25 bp, Homo sapien
cattttggtcccttaatgtcagcca

SEQ ID NO: 2531542 - DNA, 25 bp, Homo sapien
ctgaacagaatctgggttccacagc

SEQ ID NO: 2531543 - DNA, 25 bp, Homo sapien
gaatctgggttccacagccaaggtc

SEQ ID NO: 2531544 - DNA, 25 bp, Homo sapien
atctgggttccacagccaaggtcat

SEQ ID NO: 2531545 - DNA, 25 bp, Homo sapien
aacagaatctgggttccacagccaa

SEQ ID NO: 2531546 - DNA, 25 bp, Homo sapien
ttggtcaggtttgtttatgtttctc

SEQ ID NO: 2531547 - DNA, 25 bp, Homo sapien
taattcctccgaggggtgaggcact

SEQ ID NO: 2531548 - DNA, 25 bp, Homo sapien
gttaattcctccgaggggtgaggca

SEQ ID NO: 2531549 - DNA, 25 bp, Homo sapien
cttctattggtcaggtttgtttatg

SEQ ID NO: 2531550 - DNA, 25 bp, Homo sapien
tgaccccagttcattgcaacatccg

SEQ ID NO: 2531551 - DNA, 25 bp, Homo sapien
cacgctcggccgcaaataatttttg

SEQ ID NO: 2531552 - DNA, 25 bp, Homo sapien
tcttttggctaaacattgtgcttcc

SEQ ID NO: 2531553 - DNA, 25 bp, Homo sapien
ccagtggtgtgaccccagttcattg

SEQ ID NO: 2531554 - DNA, 25 bp, Homo sapien
gggcctctgccacacgatggcttgc

SEQ ID NO: 2531555 - DNA, 25 bp, Homo sapien
cgcccttggttccttgccacctggg

SEQ ID NO: 2531556 - DNA, 25 bp, Homo sapien
gggtgttgggctacggtctcaggtc

SEQ ID NO: 2531557 - DNA, 25 bp, Homo sapien
tgggctacggtctcaggtcctcgct

SEQ ID NO: 2531558 - DNA, 25 bp, Homo sapien
gcatgagccaccgcgacaggccatg

SEQ ID NO: 2531559 - DNA, 25 bp, Homo sapien
atgagccaccgcgacaggccatgtt

SEQ ID NO: 2531560 - DNA, 25 bp, Homo sapien
catgagccaccgcgacaggccatgt

SEQ ID NO: 2531561 - DNA, 25 bp, Homo sapien
ccaaaacgcaaccaaggcgaattca

SEQ ID NO: 2531562 - DNA, 25 bp, Homo sapien
caaccaaggcgaattcaattgcatt

SEQ ID NO: 2531563 - DNA, 25 bp, Homo sapien
ttttttcccagcgacactttctgag

SEQ ID NO: 2531564 - DNA, 25 bp, Homo sapien
tttcccagcgacactttctgagaca

SEQ ID NO: 2531565 - DNA, 25 bp, Homo sapien
cacagggagcaggttgcatggaccc

SEQ ID NO: 2531566 - DNA, 25 bp, Homo sapien
tgctctgccagcttcggccaatcag

SEQ ID NO: 2531567 - DNA, 25 bp, Homo sapien
tctcttcggcgaacctattccaggg

SEQ ID NO: 2531568 - DNA, 25 bp, Homo sapien
gctgttcccgagaactcggcagcca

SEQ ID NO: 2531569 - DNA, 25 bp, Homo sapien
tggacctcagcaagtggtccgggcc

SEQ ID NO: 2531570 - DNA, 25 bp, Homo sapien
acccgctgcatgtcacctacgccgg

SEQ ID NO: 2531571 - DNA, 25 bp, Homo sapien
tgcatgtcacctacgccggggcggc

SEQ ID NO: 2531572 - DNA, 25 bp, Homo sapien
ctcgccatgccggtggacctcagca

SEQ ID NO: 2531573 - DNA, 25 bp, Homo sapien
cgtggcaaattcaaggtggcgtcct

SEQ ID NO: 2531574 - DNA, 25 bp, Homo sapien
caggacaggccgctaaagtgtgacg

SEQ ID NO: 2531575 - DNA, 25 bp, Homo sapien
catggcaatctagaccggtagcagc

SEQ ID NO: 2531576 - DNA, 25 bp, Homo sapien
cacgtgttaccaggccgagtgggat

SEQ ID NO: 2531577 - DNA, 25 bp, Homo sapien
caaatataattaaaagctctgacag

SEQ ID NO: 2531578 - DNA, 25 bp, Homo sapien
aatataattaaaagctctgacagtt

SEQ ID NO: 2531579 - DNA, 25 bp, Homo sapien
aaaagctctgacagttatcatgctc

SEQ ID NO: 2531580 - DNA, 25 bp, Homo sapien
gctctgacagttatcatgctcttcc

SEQ ID NO: 2531581 - DNA, 25 bp, Homo sapien
ttttaaagtgcatgcaaaagaagta

SEQ ID NO: 2531582 - DNA, 25 bp, Homo sapien
tttaaagtgcatgcaaaagaagtaa

SEQ ID NO: 2531583 - DNA, 25 bp, Homo sapien
aagtgcatgcaaaagaagtaaagcc

SEQ ID NO: 2531584 - DNA, 25 bp, Homo sapien
taaagtgcatgcaaaagaagtaaag

SEQ ID NO: 2531585 - DNA, 25 bp, Homo sapien
gatctgattgagagacagtgttgaa

SEQ ID NO: 2531586 - DNA, 25 bp, Homo sapien
tatttatgaccaagaaatgggactt

SEQ ID NO: 2531587 - DNA, 25 bp, Homo sapien
gatcaagatgatctgattgagagac

SEQ ID NO: 2531588 - DNA, 25 bp, Homo sapien
tgaccaagaaatgggacttaggaag

SEQ ID NO: 2531589 - DNA, 25 bp, Homo sapien
taaggctgcggatattgtgtctctc

SEQ ID NO: 2531590 - DNA, 25 bp, Homo sapien
tggccagcactgaaagttgacacgg

SEQ ID NO: 2531591 - DNA, 25 bp, Homo sapien
taaacaggcactagtccgacacgat

SEQ ID NO: 2531592 - DNA, 25 bp, Homo sapien
gagagtgagagcaacgcccgttaaa

SEQ ID NO: 2531593 - DNA, 25 bp, Homo sapien
tgtcaaaagtttcaatctctcgctc

SEQ ID NO: 2531594 - DNA, 25 bp, Homo sapien
ctgaggctctccatgtcaaaagttt

SEQ ID NO: 2531595 - DNA, 25 bp, Homo sapien
aaaagtttcaatctctcgctcttgc

SEQ ID NO: 2531596 - DNA, 25 bp, Homo sapien
gaggctctccatgtcaaaagtttca

SEQ ID NO: 2531597 - DNA, 25 bp, Homo sapien
tcgctgcgttccttctgaagggcag

SEQ ID NO: 2531598 - DNA, 25 bp, Homo sapien
tctctcgctgcgttccttctgaagg

SEQ ID NO: 2531599 - DNA, 25 bp, Homo sapien
tattctctcgctgcgttccttctga

SEQ ID NO: 2531600 - DNA, 25 bp, Homo sapien
gttctttattctctcgctgcgttcc

SEQ ID NO: 2531601 - DNA, 25 bp, Homo sapien
aatgccgttctagcaagcccagcgg

SEQ ID NO: 2531602 - DNA, 25 bp, Homo sapien
ttacgttggtctcagggaactactg

SEQ ID NO: 2531603 - DNA, 25 bp, Homo sapien
taatggaaagcatctcctaacaggc

SEQ ID NO: 2531604 - DNA, 25 bp, Homo sapien
cacacacacaggaactacgggagga

SEQ ID NO: 2531605 - DNA, 25 bp, Homo sapien
tcagacatgcgtgccttggtgtttc

SEQ ID NO: 2531606 - DNA, 25 bp, Homo sapien
aacgttgagggtttcctagcagagc

SEQ ID NO: 2531607 - DNA, 25 bp, Homo sapien
tctctaactaaggaaggctgcatat

SEQ ID NO: 2531608 - DNA, 25 bp, Homo sapien
caagggtaccagtagcataaagcag

SEQ ID NO: 2531609 - DNA, 25 bp, Homo sapien
ctgctggagctgtagcctcaaggcc

SEQ ID NO: 2531610 - DNA, 25 bp, Homo sapien
tctctgctctagcttctggagctca

SEQ ID NO: 2531611 - DNA, 25 bp, Homo sapien
gctcacgttcatgttgtgcctctgt

SEQ ID NO: 2531612 - DNA, 25 bp, Homo sapien
tcaaggtgtgctctgcgcagagaca

SEQ ID NO: 2531613 - DNA, 25 bp, Homo sapien
taggctcctgggcttgaattacagc

SEQ ID NO: 2531614 - DNA, 25 bp, Homo sapien
cacagtactgttatgctccaagtag

SEQ ID NO: 2531615 - DNA, 25 bp, Homo sapien
tgcccaatgggctacaataccaaac

SEQ ID NO: 2531616 - DNA, 25 bp, Homo sapien
agcaggcgtcaggaaggctacacct

SEQ ID NO: 2531617 - DNA, 25 bp, Homo sapien
tcctctcagagggtaggtaggcttg

SEQ ID NO: 2531618 - DNA, 25 bp, Homo sapien
caggcccacagtttggctgagaact

SEQ ID NO: 2531619 - DNA, 25 bp, Homo sapien
tacaagatacccagatcctgcgtgg

SEQ ID NO: 2531620 - DNA, 25 bp, Homo sapien
gaaggtttcggaccatcagcaggac

SEQ ID NO: 2531621 - DNA, 25 bp, Homo sapien
tgatctctgcaacatgtgacgctgt

SEQ ID NO: 2531622 - DNA, 25 bp, Homo sapien
tcctcggcctaagaacatgcatgct

SEQ ID NO: 2531623 - DNA, 25 bp, Homo sapien
cagatgcctggtacatcacgtaggc

SEQ ID NO: 2531624 - DNA, 25 bp, Homo sapien
gacgaatccagtgctaggtccaatg

SEQ ID NO: 2531625 - DNA, 25 bp, Homo sapien
accatgttttactattactgcttaa

SEQ ID NO: 2531626 - DNA, 25 bp, Homo sapien
taattatctgaccacctggcttgac

SEQ ID NO: 2531627 - DNA, 25 bp, Homo sapien
tgactgacaaattgtctgtctagct

SEQ ID NO: 2531628 - DNA, 25 bp, Homo sapien
tgaacactgatgcttaataaaagtt

SEQ ID NO: 2531629 - DNA, 25 bp, Homo sapien
catcttgggaacaacaggctggatc

SEQ ID NO: 2531630 - DNA, 25 bp, Homo sapien
gattcccaaagctctcgaagccgtg

SEQ ID NO: 2531631 - DNA, 25 bp, Homo sapien
gacactccagcaagtatccacattg

SEQ ID NO: 2531632 - DNA, 25 bp, Homo sapien
ttgccctcaaagtccctatgtgcca

SEQ ID NO: 2531633 - DNA, 25 bp, Homo sapien
tctttggagtaacttccaactggtg

SEQ ID NO: 2531634 - DNA, 25 bp, Homo sapien
tatactctgttcatactgctctgcc

SEQ ID NO: 2531635 - DNA, 25 bp, Homo sapien
ggtgattcttgagtgctttatactg

SEQ ID NO: 2531636 - DNA, 25 bp, Homo sapien
tctgtactttgcaagtgtcctgaaa

SEQ ID NO: 2531637 - DNA, 25 bp, Homo sapien
tacagaaagccttctaccataatga

SEQ ID NO: 2531638 - DNA, 25 bp, Homo sapien
atacagaaagccttctaccataatg

SEQ ID NO: 2531639 - DNA, 25 bp, Homo sapien
aatacagaaagccttctaccataat

SEQ ID NO: 2531640 - DNA, 25 bp, Homo sapien
tgtgcacttcacgaacactctgagg

SEQ ID NO: 2531641 - DNA, 25 bp, Homo sapien
tcaggttgccccacagtcatgtgtg

SEQ ID NO: 2531642 - DNA, 25 bp, Homo sapien
aatttgactgaagagacgcatagcc

SEQ ID NO: 2531643 - DNA, 25 bp, Homo sapien
cgtcctcccggatatatagcaatgg

SEQ ID NO: 2531644 - DNA, 25 bp, Homo sapien
tgatacaataggtgtggggtgcaga

SEQ ID NO: 2531645 - DNA, 25 bp, Homo sapien
gactctgtgctttgcaactggagat

SEQ ID NO: 2531646 - DNA, 25 bp, Homo sapien
ccgtctggtgctgtaaacggatcag

SEQ ID NO: 2531647 - DNA, 25 bp, Homo sapien
cggatcagatccatgcgtagcttct

SEQ ID NO: 2531648 - DNA, 25 bp, Homo sapien
tggactcgtcgtgccggattagcat

SEQ ID NO: 2531649 - DNA, 25 bp, Homo sapien
tactctagctctcgggtggactcgt

SEQ ID NO: 2531650 - DNA, 25 bp, Homo sapien
ggaagttgctttaccagcgtggctc

SEQ ID NO: 2531651 - DNA, 25 bp, Homo sapien
tcagccttaagtcagccagagttta

SEQ ID NO: 2531652 - DNA, 25 bp, Homo sapien
tgaataaggcataagcacatgaccc

SEQ ID NO: 2531653 - DNA, 25 bp, Homo sapien
cctggagaactgcacatgagccctt

SEQ ID NO: 2531654 - DNA, 25 bp, Homo sapien
acaatttttgtcgtagtacagtctc

SEQ ID NO: 2531655 - DNA, 25 bp, Homo sapien
cgtgccgcttgatcattattttccg

SEQ ID NO: 2531656 - DNA, 25 bp, Homo sapien
ttatgtttggagatccgctcttgct

SEQ ID NO: 2531657 - DNA, 25 bp, Homo sapien
ttattttccgcttgaagaaacgaca

SEQ ID NO: 2531658 - DNA, 25 bp, Homo sapien
caaaatggtggccatagtcataaag

SEQ ID NO: 2531659 - DNA, 25 bp, Homo sapien
caagtctgagtatggtgagccaaaa

SEQ ID NO: 2531660 - DNA, 25 bp, Homo sapien
aattgacgtatgcttgaggactgag

SEQ ID NO: 2531661 - DNA, 25 bp, Homo sapien
taaagtatggcctccagtggatgag

SEQ ID NO: 2531662 - DNA, 25 bp, Homo sapien
taaaggctctagttaggaaaccaga

SEQ ID NO: 2531663 - DNA, 25 bp, Homo sapien
tggctgaggcagttagaaaaggctt

SEQ ID NO: 2531664 - DNA, 25 bp, Homo sapien
gatgtcactgaacgagtaggctagg

SEQ ID NO: 2531665 - DNA, 25 bp, Homo sapien
aaatgtggtccctgaagcagtagca

SEQ ID NO: 2531666 - DNA, 25 bp, Homo sapien
gctggaacttcttctcatctgctgc

SEQ ID NO: 2531667 - DNA, 25 bp, Homo sapien
gttgctggaacttcttctcatctgc

SEQ ID NO: 2531668 - DNA, 25 bp, Homo sapien
gaaagttgtcaaatctttcttctgc

SEQ ID NO: 2531669 - DNA, 25 bp, Homo sapien
agaaagttgtcaaatctttcttctg

SEQ ID NO: 2531670 - DNA, 25 bp, Homo sapien
ttttctatgatagccacttgcttct

SEQ ID NO: 2531671 - DNA, 25 bp, Homo sapien
cttttctatgatagccacttgcttc

SEQ ID NO: 2531672 - DNA, 25 bp, Homo sapien
ccttttctatgatagccacttgctt

SEQ ID NO: 2531673 - DNA, 25 bp, Homo sapien
gcatccgcttataacctgacatctg

SEQ ID NO: 2531674 - DNA, 25 bp, Homo sapien
ccttctgtagcttgaggcggtgctc

SEQ ID NO: 2531675 - DNA, 25 bp, Homo sapien
ctgacatctgttcccgcaactcgtt

SEQ ID NO: 2531676 - DNA, 25 bp, Homo sapien
tcgttctcctgctcatgctcatgga

SEQ ID NO: 2531677 - DNA, 25 bp, Homo sapien
cctcatcccttatgaatacatgatc

SEQ ID NO: 2531678 - DNA, 25 bp, Homo sapien
aactgactgggtaggccgcggctca

SEQ ID NO: 2531679 - DNA, 25 bp, Homo sapien
ggcctggctctgaactgactgggta

SEQ ID NO: 2531680 - DNA, 25 bp, Homo sapien
tgatcgtggcaaagcgctctctgtt

SEQ ID NO: 2531681 - DNA, 25 bp, Homo sapien
tagtttagctctctgctagtccccg

SEQ ID NO: 2531682 - DNA, 25 bp, Homo sapien
gaatgtcagctgatcgctagtggga

SEQ ID NO: 2531683 - DNA, 25 bp, Homo sapien
gcagccttcagttaggaatgtcagc

SEQ ID NO: 2531684 - DNA, 25 bp, Homo sapien
gcagctcccacggtacaaaatgaat

SEQ ID NO: 2531685 - DNA, 25 bp, Homo sapien
tgtacagactccttagaacagtttg

SEQ ID NO: 2531686 - DNA, 25 bp, Homo sapien
gtttgcttaaaacgctgtaaccaga

SEQ ID NO: 2531687 - DNA, 25 bp, Homo sapien
ggtaggatcatcgttctgcctagaa

SEQ ID NO: 2531688 - DNA, 25 bp, Homo sapien
tgtccatgtctagcaaggaggatgc

SEQ ID NO: 2531689 - DNA, 25 bp, Homo sapien
gatcgtacacagttctagcaccttc

SEQ ID NO: 2531690 - DNA, 25 bp, Homo sapien
tgtgctgggaagattcggcagtcac

SEQ ID NO: 2531691 - DNA, 25 bp, Homo sapien
ccaatgtaggcttgtgctgaactgc

SEQ ID NO: 2531692 - DNA, 25 bp, Homo sapien
gtgctgaactgcctctctatcttgt

SEQ ID NO: 2531693 - DNA, 25 bp, Homo sapien
tgactaacaggaagggtcaaataaa

SEQ ID NO: 2531694 - DNA, 25 bp, Homo sapien
gtcaaataaagctttaggagtcagg

SEQ ID NO: 2531695 - DNA, 25 bp, Homo sapien
gggtcaaataaagctttaggagtca

SEQ ID NO: 2531696 - DNA, 25 bp, Homo sapien
aaagaactaacattgactaacagga

SEQ ID NO: 2531697 - DNA, 25 bp, Homo sapien
gctatggctctatacacaatgattt

SEQ ID NO: 2531698 - DNA, 25 bp, Homo sapien
aagggacccttatgactggcgttca

SEQ ID NO: 2531699 - DNA, 25 bp, Homo sapien
taaaagacagactttgctgcttagg

SEQ ID NO: 2531700 - DNA, 25 bp, Homo sapien
cagaagcaggctagatgacaaggaa

SEQ ID NO: 2531701 - DNA, 25 bp, Homo sapien
cattttgggggcttgatctgtggta

SEQ ID NO: 2531702 - DNA, 25 bp, Homo sapien
tctgtggtagaactgtcctgctaaa

SEQ ID NO: 2531703 - DNA, 25 bp, Homo sapien
tttcagtgtcccactttgcattttg

SEQ ID NO: 2531704 - DNA, 25 bp, Homo sapien
tggtagaactgtcctgctaaaatca

SEQ ID NO: 2531705 - DNA, 25 bp, Homo sapien
ggcacaaccaacaggtacactcagg

SEQ ID NO: 2531706 - DNA, 25 bp, Homo sapien
ggtttagtaccacactgcagttgca

SEQ ID NO: 2531707 - DNA, 25 bp, Homo sapien
gctaagtgacttgaactggattcgc

SEQ ID NO: 2531708 - DNA, 25 bp, Homo sapien
gcatacttctaaaagggcacaacca

SEQ ID NO: 2531709 - DNA, 25 bp, Homo sapien
ctctgtggagggtaccaagaaacct

SEQ ID NO: 2531710 - DNA, 25 bp, Homo sapien
tctgtggagggtaccaagaaaccta

SEQ ID NO: 2531711 - DNA, 25 bp, Homo sapien
aagttcggaactgctctcgtccatg

SEQ ID NO: 2531712 - DNA, 25 bp, Homo sapien
tttcgtcatcgtgcatcatgacaag

SEQ ID NO: 2531713 - DNA, 25 bp, Homo sapien
ttcttatgcacgacggaggagctgg

SEQ ID NO: 2531714 - DNA, 25 bp, Homo sapien
ggaattgattgtgctttcgtcatcg

SEQ ID NO: 2531715 - DNA, 25 bp, Homo sapien
ttctggacgtgggtcataaggctcc

SEQ ID NO: 2531716 - DNA, 25 bp, Homo sapien
catcaaggagctagaggaagactgc

SEQ ID NO: 2531717 - DNA, 25 bp, Homo sapien
tctgagtctagaacaccctatgccc

SEQ ID NO: 2531718 - DNA, 25 bp, Homo sapien
tcctggacaggtaattaaagtctgc

SEQ ID NO: 2531719 - DNA, 25 bp, Homo sapien
caagggtccattccgtgtctcttgg

SEQ ID NO: 2531720 - DNA, 25 bp, Homo sapien
cattcaagggtccattccgtgtctc

SEQ ID NO: 2531721 - DNA, 25 bp, Homo sapien
cattccgtgtctcttggaaaagtat

SEQ ID NO: 2531722 - DNA, 25 bp, Homo sapien
cctgtgactcattcaagggtccatt

SEQ ID NO: 2531723 - DNA, 25 bp, Homo sapien
tcggtactgtaggttatctagctca

SEQ ID NO: 2531724 - DNA, 25 bp, Homo sapien
ttttcggtactgtaggttatctagc

SEQ ID NO: 2531725 - DNA, 25 bp, Homo sapien
cggtactgtaggttatctagctcac

SEQ ID NO: 2531726 - DNA, 25 bp, Homo sapien
ttcggtactgtaggttatctagctc

SEQ ID NO: 2531727 - DNA, 25 bp, Homo sapien
ggccggtctcgtcgaacaaagtcat

SEQ ID NO: 2531728 - DNA, 25 bp, Homo sapien
acgtagtggccggtctcgtcgaaca

SEQ ID NO: 2531729 - DNA, 25 bp, Homo sapien
aggacacgtagtggccggtctcgtc

SEQ ID NO: 2531730 - DNA, 25 bp, Homo sapien
tcaatgaggacacgtagtggccggt

SEQ ID NO: 2531731 - DNA, 25 bp, Homo sapien
aataaactgataatgaagaaatgtc

SEQ ID NO: 2531732 - DNA, 25 bp, Homo sapien
aaaaataaactgataatgaagaaat

SEQ ID NO: 2531733 - DNA, 25 bp, Homo sapien
gaaaaaataaactgataatgaagaa

SEQ ID NO: 2531734 - DNA, 25 bp, Homo sapien
ggaaaaaataaactgataatgaaga

SEQ ID NO: 2531735 - DNA, 25 bp, Homo sapien
cttgagtcatggcaatgtagcagcc

SEQ ID NO: 2531736 - DNA, 25 bp, Homo sapien
taaagtgtagccttttacagccagg

SEQ ID NO: 2531737 - DNA, 25 bp, Homo sapien
gaaagagcttgggtcgatgacgaca

SEQ ID NO: 2531738 - DNA, 25 bp, Homo sapien
tagagctttggactgcttacgccac

SEQ ID NO: 2531739 - DNA, 25 bp, Homo sapien
ccaggttgtaccttctactgtattt

SEQ ID NO: 2531740 - DNA, 25 bp, Homo sapien
acatacagcttctttagccatgcaa

SEQ ID NO: 2531741 - DNA, 25 bp, Homo sapien
gccccaggttgtaccttctactgta

SEQ ID NO: 2531742 - DNA, 25 bp, Homo sapien
aaaatgaagaacatacagcttcttt

SEQ ID NO: 2531743 - DNA, 25 bp, Homo sapien
gaaagcgccgaaaggttgcattgcc

SEQ ID NO: 2531744 - DNA, 25 bp, Homo sapien
tcctagagttcagggacttcaccag

SEQ ID NO: 2531745 - DNA, 25 bp, Homo sapien
gactgttcctgaagaggtaggtctg

SEQ ID NO: 2531746 - DNA, 25 bp, Homo sapien
tcccttagaactctgcaaacactgt

SEQ ID NO: 2531747 - DNA, 25 bp, Homo sapien
tactacactgatattgatgcaacac

SEQ ID NO: 2531748 - DNA, 25 bp, Homo sapien
ttgaggcaatacaactcttctgagt

SEQ ID NO: 2531749 - DNA, 25 bp, Homo sapien
taaaacatgtaagggctccacaaca

SEQ ID NO: 2531750 - DNA, 25 bp, Homo sapien
tgtggcctaccgctcacaagaagta

SEQ ID NO: 2531751 - DNA, 25 bp, Homo sapien
gcctgaggatttggcaacaacctaa

SEQ ID NO: 2531752 - DNA, 25 bp, Homo sapien
atgtttatgcagatgttaggcccag

SEQ ID NO: 2531753 - DNA, 25 bp, Homo sapien
ttaggcccaggaacatcacaatgat

SEQ ID NO: 2531754 - DNA, 25 bp, Homo sapien
gagaccactggattaatgtttatgc

SEQ ID NO: 2531755 - DNA, 25 bp, Homo sapien
tcaacaaatctcctaaaggagtctg

SEQ ID NO: 2531756 - DNA, 25 bp, Homo sapien
tgatgttggcctttcctgaggtatt

SEQ ID NO: 2531757 - DNA, 25 bp, Homo sapien
atcaacaaatctcctaaaggagtct

SEQ ID NO: 2531758 - DNA, 25 bp, Homo sapien
aacaaatctcctaaaggagtctgtc

SEQ ID NO: 2531759 - DNA, 25 bp, Homo sapien
aacgttggggagtcattctgggcaa

SEQ ID NO: 2531760 - DNA, 25 bp, Homo sapien
tcatgttgaaaaggggcggcttccg

SEQ ID NO: 2531761 - DNA, 25 bp, Homo sapien
cattgcattcatgttgaaaaggggc

SEQ ID NO: 2531762 - DNA, 25 bp, Homo sapien
attcattagactgtaacgttgggga

SEQ ID NO: 2531763 - DNA, 25 bp, Homo sapien
tttcataactggcatcaaaccatcc

SEQ ID NO: 2531764 - DNA, 25 bp, Homo sapien
gttgcacccttgtacacattttcca

SEQ ID NO: 2531765 - DNA, 25 bp, Homo sapien
gctactataaaaacagttgcaccct

SEQ ID NO: 2531766 - DNA, 25 bp, Homo sapien
tccagtgtgtatgcatacggagttc

SEQ ID NO: 2531767 - DNA, 25 bp, Homo sapien
gtgatgccaagtgaccaaatatcaa

SEQ ID NO: 2531768 - DNA, 25 bp, Homo sapien
tagctaagatcacctctggagccat

SEQ ID NO: 2531769 - DNA, 25 bp, Homo sapien
tgatgccaagtgaccaaatatcaac

SEQ ID NO: 2531770 - DNA, 25 bp, Homo sapien
ccatagctaagatcacctctggagc

SEQ ID NO: 2531771 - DNA, 25 bp, Homo sapien
aagaatatttcctgctttaatatcc

SEQ ID NO: 2531772 - DNA, 25 bp, Homo sapien
aatcagctagttttacctgacctgg

SEQ ID NO: 2531773 - DNA, 25 bp, Homo sapien
gctagttttacctgacctggctctg

SEQ ID NO: 2531774 - DNA, 25 bp, Homo sapien
tccaaaatcagctagttttacctga

SEQ ID NO: 2531775 - DNA, 25 bp, Homo sapien
gagcctaaacaaacctgcaatgatt

SEQ ID NO: 2531776 - DNA, 25 bp, Homo sapien
catggtgacattaggcattggcaga

SEQ ID NO: 2531777 - DNA, 25 bp, Homo sapien
gcagacatggcgaacaagaaaacct

SEQ ID NO: 2531778 - DNA, 25 bp, Homo sapien
tattactacaaagaattgcacgtgg

SEQ ID NO: 2531779 - DNA, 25 bp, Homo sapien
ggttcctggaatagacagtcctgca

SEQ ID NO: 2531780 - DNA, 25 bp, Homo sapien
caacctaaaaattggagcatgcact

SEQ ID NO: 2531781 - DNA, 25 bp, Homo sapien
aatttccctgcaacatttagcctgg

SEQ ID NO: 2531782 - DNA, 25 bp, Homo sapien
tgcactaattttcaaggttcctgga

SEQ ID NO: 2531783 - DNA, 25 bp, Homo sapien
ccacttcctgaagtggttttttatg

SEQ ID NO: 2531784 - DNA, 25 bp, Homo sapien
tagtccatgcaaggctccatgagta

SEQ ID NO: 2531785 - DNA, 25 bp, Homo sapien
taatggcagcgatctccacttcctg

SEQ ID NO: 2531786 - DNA, 25 bp, Homo sapien
tcaatgcatgagaatgtaggtaggc

SEQ ID NO: 2531787 - DNA, 25 bp, Homo sapien
gagcctaagcaatattccatcacca

SEQ ID NO: 2531788 - DNA, 25 bp, Homo sapien
agcctaagcaatattccatcaccaa

SEQ ID NO: 2531789 - DNA, 25 bp, Homo sapien
tttgtactcaatagtattaggatgc

SEQ ID NO: 2531790 - DNA, 25 bp, Homo sapien
caagtaacagcctttgtactcaata

SEQ ID NO: 2531791 - DNA, 25 bp, Homo sapien
ctcaatagtattaggatgcttcaat

SEQ ID NO: 2531792 - DNA, 25 bp, Homo sapien
ctttcaagtaacagcctttgtactc

SEQ ID NO: 2531793 - DNA, 25 bp, Homo sapien
atgggtctgcttcccactataggac

SEQ ID NO: 2531794 - DNA, 25 bp, Homo sapien
catgggtctgcttcccactatagga

SEQ ID NO: 2531795 - DNA, 25 bp, Homo sapien
ctcatgggtctgcttcccactatag

SEQ ID NO: 2531796 - DNA, 25 bp, Homo sapien
gggtctgcttcccactataggacat

SEQ ID NO: 2531797 - DNA, 25 bp, Homo sapien
acctcactggtgtgagcatttgtag

SEQ ID NO: 2531798 - DNA, 25 bp, Homo sapien
cctcactggtgtgagcatttgtagc

SEQ ID NO: 2531799 - DNA, 25 bp, Homo sapien
agctgctcatgatggctggtatcga

SEQ ID NO: 2531800 - DNA, 25 bp, Homo sapien
ggctggtatcgatgactgctacacc

SEQ ID NO: 2531801 - DNA, 25 bp, Homo sapien
catgatggctggtatcgatgactgc

SEQ ID NO: 2531802 - DNA, 25 bp, Homo sapien
gctcatgatggctggtatcgatgac

SEQ ID NO: 2531803 - DNA, 25 bp, Homo sapien
gaccaataaagctatcgcagtggtt

SEQ ID NO: 2531804 - DNA, 25 bp, Homo sapien
tcattgtggaccaataaagctatcg

SEQ ID NO: 2531805 - DNA, 25 bp, Homo sapien
tggaccaataaagctatcgcagtgg

SEQ ID NO: 2531806 - DNA, 25 bp, Homo sapien
ttgtggaccaataaagctatcgcag

SEQ ID NO: 2531807 - DNA, 25 bp, Homo sapien
actatttgctttaggtgggttatgg

SEQ ID NO: 2531808 - DNA, 25 bp, Homo sapien
ccacgcccaaccaatgatgcaaatt

SEQ ID NO: 2531809 - DNA, 25 bp, Homo sapien
tgatctagaaacctacaaactttag

SEQ ID NO: 2531810 - DNA, 25 bp, Homo sapien
tatactgagttcaacaaaggtgatc

SEQ ID NO: 2531811 - DNA, 25 bp, Homo sapien
gatggcagaacataaaggaccactt

SEQ ID NO: 2531812 - DNA, 25 bp, Homo sapien
tgagcatagacgcagtggttgagaa

SEQ ID NO: 2531813 - DNA, 25 bp, Homo sapien
gataagccctatccagatggcagaa

SEQ ID NO: 2531814 - DNA, 25 bp, Homo sapien
tttggaaggacaactaaagataagc

SEQ ID NO: 2531815 - DNA, 25 bp, Homo sapien
tatactactttaataagtgagtcaa

SEQ ID NO: 2531816 - DNA, 25 bp, Homo sapien
atactactttaataagtgagtcaat

SEQ ID NO: 2531817 - DNA, 25 bp, Homo sapien
ttatactactttaataagtgagtca

SEQ ID NO: 2531818 - DNA, 25 bp, Homo sapien
ctggcttttcagcaatgactatttg

SEQ ID NO: 2531819 - DNA, 25 bp, Homo sapien
tggcttttcagcaatgactatttgc

SEQ ID NO: 2531820 - DNA, 25 bp, Homo sapien
gcttttcagcaatgactatttgcct

SEQ ID NO: 2531821 - DNA, 25 bp, Homo sapien
ggcttttcagcaatgactatttgcc

SEQ ID NO: 2531822 - DNA, 25 bp, Homo sapien
gatcggcaatctctgggtccttcag

SEQ ID NO: 2531823 - DNA, 25 bp, Homo sapien
aactgctccaaaacttccatgtcca

SEQ ID NO: 2531824 - DNA, 25 bp, Homo sapien
gatcatctttgtagaatagatcggc

SEQ ID NO: 2531825 - DNA, 25 bp, Homo sapien
atgtccaatttcatgcaaaccaata

SEQ ID NO: 2531826 - DNA, 25 bp, Homo sapien
tctgctttttgatatcagttagctt

SEQ ID NO: 2531827 - DNA, 25 bp, Homo sapien
atggccagtagagcaggctctgctt

SEQ ID NO: 2531828 - DNA, 25 bp, Homo sapien
ggccagtagagcaggctctgctttt

SEQ ID NO: 2531829 - DNA, 25 bp, Homo sapien
gagcaggctctgctttttgatatca

SEQ ID NO: 2531830 - DNA, 25 bp, Homo sapien
tctcttttataacttcagtcctttg

SEQ ID NO: 2531831 - DNA, 25 bp, Homo sapien
tcagtcctttgtatttatgatgcaa

SEQ ID NO: 2531832 - DNA, 25 bp, Homo sapien
taacttcagtcctttgtatttatga

SEQ ID NO: 2531833 - DNA, 25 bp, Homo sapien
cttcagtcctttgtatttatgatgc

SEQ ID NO: 2531834 - DNA, 25 bp, Homo sapien
aaatggcacctcacatgaatctgaa

SEQ ID NO: 2531835 - DNA, 25 bp, Homo sapien
gaccagtataagaatggtggtgatg

SEQ ID NO: 2531836 - DNA, 25 bp, Homo sapien
gaaatcaattatgcatctacttcag

SEQ ID NO: 2531837 - DNA, 25 bp, Homo sapien
gatactttgatatgaggccagcaac

SEQ ID NO: 2531838 - DNA, 25 bp, Homo sapien
gagagacagggtattatattactct

SEQ ID NO: 2531839 - DNA, 25 bp, Homo sapien
tcagagtgaccggaaaaatggaact

SEQ ID NO: 2531840 - DNA, 25 bp, Homo sapien
cattgttgtaccatagatactggat

SEQ ID NO: 2531841 - DNA, 25 bp, Homo sapien
gatgattcctcaaggcttttggtca

SEQ ID NO: 2531842 - DNA, 25 bp, Homo sapien
gatactggatttgtggacggactag

SEQ ID NO: 2531843 - DNA, 25 bp, Homo sapien
tgatttgactgccttcaggcgggac

SEQ ID NO: 2531844 - DNA, 25 bp, Homo sapien
tatctctccggtcctgagtttgctg

SEQ ID NO: 2531845 - DNA, 25 bp, Homo sapien
tcagtcatatcagaagagatcaagg

SEQ ID NO: 2531846 - DNA, 25 bp, Homo sapien
aaaggatggatataggcctcagtca

SEQ ID NO: 2531847 - DNA, 25 bp, Homo sapien
tttaaagtatatgcatcacctgagc

SEQ ID NO: 2531848 - DNA, 25 bp, Homo sapien
cctagtttcaataggtctgagacca

SEQ ID NO: 2531849 - DNA, 25 bp, Homo sapien
caataatgaagactataagcacgca

SEQ ID NO: 2531850 - DNA, 25 bp, Homo sapien
tgctggtccacggactatactgaat

SEQ ID NO: 2531851 - DNA, 25 bp, Homo sapien
taggtctagaatatcagcagggaaa

SEQ ID NO: 2531852 - DNA, 25 bp, Homo sapien
gagggtaccaattgcttctgtgcta

SEQ ID NO: 2531853 - DNA, 25 bp, Homo sapien
taaagcagaattactgggcaagagc

SEQ ID NO: 2531854 - DNA, 25 bp, Homo sapien
caagagccattttcacgagggtacc

SEQ ID NO: 2531855 - DNA, 25 bp, Homo sapien
ttgtatactctcagacacttgtcca

SEQ ID NO: 2531856 - DNA, 25 bp, Homo sapien
taagtggagaaagtacagcatgcat

SEQ ID NO: 2531857 - DNA, 25 bp, Homo sapien
tctcctcaggctattcctctttaac

SEQ ID NO: 2531858 - DNA, 25 bp, Homo sapien
tcaaggaaggaaatcagggtgacct

SEQ ID NO: 2531859 - DNA, 25 bp, Homo sapien
cactcaagacatgttggataaatga

SEQ ID NO: 2531860 - DNA, 25 bp, Homo sapien
aagaagagatctttgctggagagag

SEQ ID NO: 2531861 - DNA, 25 bp, Homo sapien
gagacaggacagctaatagtcactg

SEQ ID NO: 2531862 - DNA, 25 bp, Homo sapien
gcagggtcaggtacaagtttttgta

SEQ ID NO: 2531863 - DNA, 25 bp, Homo sapien
cacagcagggatgtaagagttaatg

SEQ ID NO: 2531864 - DNA, 25 bp, Homo sapien
aagttgtcatatagcaatggatgct

SEQ ID NO: 2531865 - DNA, 25 bp, Homo sapien
ctgtgtcagaacatactgccaataa

SEQ ID NO: 2531866 - DNA, 25 bp, Homo sapien
gttatataaaacaggagctcacagc

SEQ ID NO: 2531867 - DNA, 25 bp, Homo sapien
ggaacacagtcgtgtaccaccctgc

SEQ ID NO: 2531868 - DNA, 25 bp, Homo sapien
gcagcatacctgctactcataagag

SEQ ID NO: 2531869 - DNA, 25 bp, Homo sapien
taagagtctggttaaatatactagc

SEQ ID NO: 2531870 - DNA, 25 bp, Homo sapien
tactgtcctactgaaagagctccta

SEQ ID NO: 2531871 - DNA, 25 bp, Homo sapien
gaaaaggcatgatagcccattctac

SEQ ID NO: 2531872 - DNA, 25 bp, Homo sapien
cacaactgacagactggataagaga

SEQ ID NO: 2531873 - DNA, 25 bp, Homo sapien
tagatgtttggacctttaaactcgc

SEQ ID NO: 2531874 - DNA, 25 bp, Homo sapien
aaagcctagagacacagttcatgac

SEQ ID NO: 2531875 - DNA, 25 bp, Homo sapien
cttcaaaactactctcctgaacggt

SEQ ID NO: 2531876 - DNA, 25 bp, Homo sapien
taacattgttatctttaaatctgtg

SEQ ID NO: 2531877 - DNA, 25 bp, Homo sapien
ctcctgaacggtttataacattgtt

SEQ ID NO: 2531878 - DNA, 25 bp, Homo sapien
ctgaacggtttataacattgttatc

SEQ ID NO: 2531879 - DNA, 25 bp, Homo sapien
ggccaggatagtcccgcctcggctt

SEQ ID NO: 2531880 - DNA, 25 bp, Homo sapien
gccaggatagtcccgcctcggcttc

SEQ ID NO: 2531881 - DNA, 25 bp, Homo sapien
tggccaggatagtcccgcctcggct

SEQ ID NO: 2531882 - DNA, 25 bp, Homo sapien
aactgtggcgtctttaggatgcagc

SEQ ID NO: 2531883 - DNA, 25 bp, Homo sapien
caaatctaggtttcagccaagtcac

SEQ ID NO: 2531884 - DNA, 25 bp, Homo sapien
aacagttattagtttcatgccccaa

SEQ ID NO: 2531885 - DNA, 25 bp, Homo sapien
taatgccttacaaagtcactgtgag

SEQ ID NO: 2531886 - DNA, 25 bp, Homo sapien
taggtgtcctataagcttcttggca

SEQ ID NO: 2531887 - DNA, 25 bp, Homo sapien
catgggtctctgtagcattgctgta

SEQ ID NO: 2531888 - DNA, 25 bp, Homo sapien
caaagagtatggtgttactggctgc

SEQ ID NO: 2531889 - DNA, 25 bp, Homo sapien
tattcagcactagtccaaggcctga

SEQ ID NO: 2531890 - DNA, 25 bp, Homo sapien
taagacacagtcctaactttatctg

SEQ ID NO: 2531891 - DNA, 25 bp, Homo sapien
gctgatctaaaatcttaagacacag

SEQ ID NO: 2531892 - DNA, 25 bp, Homo sapien
tagtatttttagaccacagttcacc

SEQ ID NO: 2531893 - DNA, 25 bp, Homo sapien
aactttatctgagtggtgtactcag

SEQ ID NO: 2531894 - DNA, 25 bp, Homo sapien
gcataactattcttgcacactgagc

SEQ ID NO: 2531895 - DNA, 25 bp, Homo sapien
ggttaagggatttgtgcaaagtcac

SEQ ID NO: 2531896 - DNA, 25 bp, Homo sapien
cataatgccatgtgttgttgtatct

SEQ ID NO: 2531897 - DNA, 25 bp, Homo sapien
caaagctagtaggtggcagacatgt

SEQ ID NO: 2531898 - DNA, 25 bp, Homo sapien
gagcaacttgcataactcctaccag

SEQ ID NO: 2531899 - DNA, 25 bp, Homo sapien
ccctccttatgcatctgggcagaga

SEQ ID NO: 2531900 - DNA, 25 bp, Homo sapien
gcaagctactacttagatcagccag

SEQ ID NO: 2531901 - DNA, 25 bp, Homo sapien
taatagaatatccagtgacccgagc

SEQ ID NO: 2531902 - DNA, 25 bp, Homo sapien
ggcaggcagccatataatctgcaat

SEQ ID NO: 2531903 - DNA, 25 bp, Homo sapien
ccatccaagctatgactgggatatt

SEQ ID NO: 2531904 - DNA, 25 bp, Homo sapien
taatctgtcatcacgaagcaccacc

SEQ ID NO: 2531905 - DNA, 25 bp, Homo sapien
tcaacgagtgtcattttggcaggca

SEQ ID NO: 2531906 - DNA, 25 bp, Homo sapien
taaaataaaataccaatgacactta

SEQ ID NO: 2531907 - DNA, 25 bp, Homo sapien
aaaccatatttataatcaacattaa

SEQ ID NO: 2531908 - DNA, 25 bp, Homo sapien
acacaaaccatatttataatcaaca

SEQ ID NO: 2531909 - DNA, 25 bp, Homo sapien
tgtaaaataaaataccaatgacact

SEQ ID NO: 2531910 - DNA, 25 bp, Homo sapien
gcttaaagagagtacttcctggtca

SEQ ID NO: 2531911 - DNA, 25 bp, Homo sapien
tggtcagacagctaacgtcaacagc

SEQ ID NO: 2531912 - DNA, 25 bp, Homo sapien
cagtagatctcaaacgcatgtccta

SEQ ID NO: 2531913 - DNA, 25 bp, Homo sapien
taagttataagaacaccccaggcta

SEQ ID NO: 2531914 - DNA, 25 bp, Homo sapien
cacacattactatcagtattgcaag

SEQ ID NO: 2531915 - DNA, 25 bp, Homo sapien
gtacaatactaaaaaggaactgcag

SEQ ID NO: 2531916 - DNA, 25 bp, Homo sapien
ggaggacaactcaccatctcttgat

SEQ ID NO: 2531917 - DNA, 25 bp, Homo sapien
aacagcgtgatctgggtgccacaca

SEQ ID NO: 2531918 - DNA, 25 bp, Homo sapien
aaataggtgcctagatctttcccag

SEQ ID NO: 2531919 - DNA, 25 bp, Homo sapien
gagaattgagagctttaatcaagac

SEQ ID NO: 2531920 - DNA, 25 bp, Homo sapien
caagactttagtaactgcccagggt

SEQ ID NO: 2531921 - DNA, 25 bp, Homo sapien
tattcctttcacagatcccaagagg

SEQ ID NO: 2531922 - DNA, 25 bp, Homo sapien
tacataccctgaaactaaaagctaa

SEQ ID NO: 2531923 - DNA, 25 bp, Homo sapien
gaatagaaaattggccatgggctgg

SEQ ID NO: 2531924 - DNA, 25 bp, Homo sapien
tctgtcctcacaagctagtaaataa

SEQ ID NO: 2531925 - DNA, 25 bp, Homo sapien
taacacgtgttaacaggaaactgct

SEQ ID NO: 2531926 - DNA, 25 bp, Homo sapien
tgcgagggcgctattttggatcact

SEQ ID NO: 2531927 - DNA, 25 bp, Homo sapien
acaaatatgaataccggccggcaat

SEQ ID NO: 2531928 - DNA, 25 bp, Homo sapien
gtttgcctgtatacgactccagtag

SEQ ID NO: 2531929 - DNA, 25 bp, Homo sapien
gaccttgcaatgtgtggctgctgta

SEQ ID NO: 2531930 - DNA, 25 bp, Homo sapien
tgccggatccggctgtgcgcagcct

SEQ ID NO: 2531931 - DNA, 25 bp, Homo sapien
tccttgggtccggtcgctgagtgcc

SEQ ID NO: 2531932 - DNA, 25 bp, Homo sapien
ctgtggcttgttccccggcggatcc

SEQ ID NO: 2531933 - DNA, 25 bp, Homo sapien
tcctgagtcgctctcctgtggcttg

SEQ ID NO: 2531934 - DNA, 25 bp, Homo sapien
gctgtccgaggtgcggctcctgcca

SEQ ID NO: 2531935 - DNA, 25 bp, Homo sapien
ctgctgtccgaggtgcggctcctgc

SEQ ID NO: 2531936 - DNA, 25 bp, Homo sapien
tccgaggtgcggctcctgccagggg

SEQ ID NO: 2531937 - DNA, 25 bp, Homo sapien
tgctgctgtccgaggtgcggctcct

SEQ ID NO: 2531938 - DNA, 25 bp, Homo sapien
ttgtgctgctctccggtcaaagttc

SEQ ID NO: 2531939 - DNA, 25 bp, Homo sapien
cagtcttgtttgtgctgctctccgg

SEQ ID NO: 2531940 - DNA, 25 bp, Homo sapien
gcctggggtgcggtcagtcttgttt

SEQ ID NO: 2531941 - DNA, 25 bp, Homo sapien
tgtttgtgctgctctccggtcaaag

SEQ ID NO: 2531942 - DNA, 25 bp, Homo sapien
tgtggccggatgcttccaactttgt

SEQ ID NO: 2531943 - DNA, 25 bp, Homo sapien
cttggaaatggagagcactgcagtg

SEQ ID NO: 2531944 - DNA, 25 bp, Homo sapien
tcacgtagctactttccctgtcgcg

SEQ ID NO: 2531945 - DNA, 25 bp, Homo sapien
tactgggaatagctactcagccttg

SEQ ID NO: 2531946 - DNA, 25 bp, Homo sapien
ttttcatgtagtgccctgcgatgga

SEQ ID NO: 2531947 - DNA, 25 bp, Homo sapien
aatgacgctgttatcaaaagttgcc

SEQ ID NO: 2531948 - DNA, 25 bp, Homo sapien
gaggattgtattgataaccactggg

SEQ ID NO: 2531949 - DNA, 25 bp, Homo sapien
gatgtttactacagtgaacccagcc

SEQ ID NO: 2531950 - DNA, 25 bp, Homo sapien
tcatagtctcgactccgccattgcc

SEQ ID NO: 2531951 - DNA, 25 bp, Homo sapien
gcgtcctcacaactcttaattgggc

SEQ ID NO: 2531952 - DNA, 25 bp, Homo sapien
atagtctcgactccgccattgcctt

SEQ ID NO: 2531953 - DNA, 25 bp, Homo sapien
ctcggcgtcctcacaactcttaatt

SEQ ID NO: 2531954 - DNA, 25 bp, Homo sapien
tgaaatctcggtgcttactgttaca

SEQ ID NO: 2531955 - DNA, 25 bp, Homo sapien
cagaatgatgtcaggctaatactca

SEQ ID NO: 2531956 - DNA, 25 bp, Homo sapien
tgcagccatttcaagcaggtgatgg

SEQ ID NO: 2531957 - DNA, 25 bp, Homo sapien
gccagaacatggtaaatttgcagcc

SEQ ID NO: 2531958 - DNA, 25 bp, Homo sapien
catggcatgccctcctgtagaggca

SEQ ID NO: 2531959 - DNA, 25 bp, Homo sapien
taaaaatgtcggtatggagttgggc

SEQ ID NO: 2531960 - DNA, 25 bp, Homo sapien
actggacctttccatggcatgccct

SEQ ID NO: 2531961 - DNA, 25 bp, Homo sapien
agcatcttgatgctctgatgtcact

SEQ ID NO: 2531962 - DNA, 25 bp, Homo sapien
ttccctttctcctactttgatcagt

SEQ ID NO: 2531963 - DNA, 25 bp, Homo sapien
ctttctcctactttgatcagtcctc

SEQ ID NO: 2531964 - DNA, 25 bp, Homo sapien
cctactttgatcagtcctcttctct

SEQ ID NO: 2531965 - DNA, 25 bp, Homo sapien
gattccctttctcctactttgatca

SEQ ID NO: 2531966 - DNA, 25 bp, Homo sapien
tgatgctctcgggttgggctgcctt

SEQ ID NO: 2531967 - DNA, 25 bp, Homo sapien
ggctgccttgctttcttatgagcat

SEQ ID NO: 2531968 - DNA, 25 bp, Homo sapien
ctgtgagctgcaatctgcagactcc

SEQ ID NO: 2531969 - DNA, 25 bp, Homo sapien
tactccctatttcgtcttgcaaaga

SEQ ID NO: 2531970 - DNA, 25 bp, Homo sapien
gcttctgagaaccattcaagttaca

SEQ ID NO: 2531971 - DNA, 25 bp, Homo sapien
cattcaagttacaaagatgggctct

SEQ ID NO: 2531972 - DNA, 25 bp, Homo sapien
gaaatctctgacaggtcccatagct

SEQ ID NO: 2531973 - DNA, 25 bp, Homo sapien
tttttagcaaccacaaagctgggtc

SEQ ID NO: 2531974 - DNA, 25 bp, Homo sapien
cagtttaacgataccttggcatgtc

SEQ ID NO: 2531975 - DNA, 25 bp, Homo sapien
aatccagtttaacgataccttggca

SEQ ID NO: 2531976 - DNA, 25 bp, Homo sapien
aatgccttgccaatccagtttaacg

SEQ ID NO: 2531977 - DNA, 25 bp, Homo sapien
gtgagattggctaatgccttgccaa

SEQ ID NO: 2531978 - DNA, 25 bp, Homo sapien
tagccttggtgaggcattcgctgac

SEQ ID NO: 2531979 - DNA, 25 bp, Homo sapien
ttcgctgaccccactgactgcttta

SEQ ID NO: 2531980 - DNA, 25 bp, Homo sapien
attcgctgaccccactgactgcttt

SEQ ID NO: 2531981 - DNA, 25 bp, Homo sapien
tcatcgcaatttagccttggtgagg

SEQ ID NO: 2531982 - DNA, 25 bp, Homo sapien
agcgtgttccctgaatatgttcaca

SEQ ID NO: 2531983 - DNA, 25 bp, Homo sapien
gtagcgtgttccctgaatatgttca

SEQ ID NO: 2531984 - DNA, 25 bp, Homo sapien
atatgttcacatgaagtgtttggct

SEQ ID NO: 2531985 - DNA, 25 bp, Homo sapien
agcacaaagttgtagcgtgttccct

SEQ ID NO: 2531986 - DNA, 25 bp, Homo sapien
ctgtctctttgtagtaggagtcaaa

SEQ ID NO: 2531987 - DNA, 25 bp, Homo sapien
gacttttatgggctcaggacctact

SEQ ID NO: 2531988 - DNA, 25 bp, Homo sapien
ttttcgctccgttgatttcagtgtg

SEQ ID NO: 2531989 - DNA, 25 bp, Homo sapien
tggctttggccttccatagagccaa

SEQ ID NO: 2531990 - DNA, 25 bp, Homo sapien
gccagcttctgaaccagcattattg

SEQ ID NO: 2531991 - DNA, 25 bp, Homo sapien
tcaaggaatgtgcaagcagccgggc

SEQ ID NO: 2531992 - DNA, 25 bp, Homo sapien
ctagcaagggttggctccaagtgcc

SEQ ID NO: 2531993 - DNA, 25 bp, Homo sapien
ctgtggctcaagcgagagctgtgct

SEQ ID NO: 2531994 - DNA, 25 bp, Homo sapien
tgttgctacgaaggtcagcctactg

SEQ ID NO: 2531995 - DNA, 25 bp, Homo sapien
cgaaggtcagcctactgaatcccat

SEQ ID NO: 2531996 - DNA, 25 bp, Homo sapien
cagatgttgctacgaaggtcagcct

SEQ ID NO: 2531997 - DNA, 25 bp, Homo sapien
tcccaagcagatgttgctacgaagg

SEQ ID NO: 2531998 - DNA, 25 bp, Homo sapien
actgctaacaatacccgtcatcaca

SEQ ID NO: 2531999 - DNA, 25 bp, Homo sapien
tccaccacaccactgctaacaatac

SEQ ID NO: 2532000 - DNA, 25 bp, Homo sapien
acaccactgctaacaatacccgtca

SEQ ID NO: 2532001 - DNA, 25 bp, Homo sapien
aacaatacccgtcatcacagtgtcc

SEQ ID NO: 2532002 - DNA, 25 bp, Homo sapien
gggacccatgttctgcaatgatgga

SEQ ID NO: 2532003 - DNA, 25 bp, Homo sapien
tggatttagctaaggagagttcccg

SEQ ID NO: 2532004 - DNA, 25 bp, Homo sapien
agtttaacaccagtattgcctatgg

SEQ ID NO: 2532005 - DNA, 25 bp, Homo sapien
aaataaacctaatggcctagtggat

SEQ ID NO: 2532006 - DNA, 25 bp, Homo sapien
cagggctgctggtttcacgacacag

SEQ ID NO: 2532007 - DNA, 25 bp, Homo sapien
tctgcacattgtctaccagggctgc

SEQ ID NO: 2532008 - DNA, 25 bp, Homo sapien
cacaggttgtgtgtacagtgtcgct

SEQ ID NO: 2532009 - DNA, 25 bp, Homo sapien
ttgtttatgcttctggtcccttgca

SEQ ID NO: 2532010 - DNA, 25 bp, Homo sapien
caactgacggctgagagaaaacact

SEQ ID NO: 2532011 - DNA, 25 bp, Homo sapien
atatgaatctttttgggagacagct

SEQ ID NO: 2532012 - DNA, 25 bp, Homo sapien
tggagacaactgacggctgagagaa

SEQ ID NO: 2532013 - DNA, 25 bp, Homo sapien
aatctttttgggagacagcttgctg

SEQ ID NO: 2532014 - DNA, 25 bp, Homo sapien
ggtggtaggacgatgtcaaagctga

SEQ ID NO: 2532015 - DNA, 25 bp, Homo sapien
gtggtaggacgatgtcaaagctgaa

SEQ ID NO: 2532016 - DNA, 25 bp, Homo sapien
gagcacaaagcatctccgagctccg

SEQ ID NO: 2532017 - DNA, 25 bp, Homo sapien
ggctacaacctgcagttttgatgtg

SEQ ID NO: 2532018 - DNA, 25 bp, Homo sapien
tgatgtgagttggaactcagtgcag

SEQ ID NO: 2532019 - DNA, 25 bp, Homo sapien
cgagctccgttttccattggccaag

SEQ ID NO: 2532020 - DNA, 25 bp, Homo sapien
caccacttgaagtatagagatccaa

SEQ ID NO: 2532021 - DNA, 25 bp, Homo sapien
agtgtgcttgttgcacctccttgag

SEQ ID NO: 2532022 - DNA, 25 bp, Homo sapien
ttcaatggggacagagctacggatc

SEQ ID NO: 2532023 - DNA, 25 bp, Homo sapien
cgctgatcatcagcagccttgctct

SEQ ID NO: 2532024 - DNA, 25 bp, Homo sapien
agtcggagaataggccccaggtcat

SEQ ID NO: 2532025 - DNA, 25 bp, Homo sapien
ggcctctggacaagtcggagaatag

SEQ ID NO: 2532026 - DNA, 25 bp, Homo sapien
agaataggccccaggtcatttctcc

SEQ ID NO: 2532027 - DNA, 25 bp, Homo sapien
tggcccaggcagtagtctggcctct

SEQ ID NO: 2532028 - DNA, 25 bp, Homo sapien
gggcctggtggaaacttgcttctcc

SEQ ID NO: 2532029 - DNA, 25 bp, Homo sapien
gaggggcctggtggaaacttgcttc

SEQ ID NO: 2532030 - DNA, 25 bp, Homo sapien
ggcctggtggaaacttgcttctccc

SEQ ID NO: 2532031 - DNA, 25 bp, Homo sapien
cctggtggaaacttgcttctccctg

SEQ ID NO: 2532032 - DNA, 25 bp, Homo sapien
tggtacctctgcctgattaatgaca

SEQ ID NO: 2532033 - DNA, 25 bp, Homo sapien
tcaacttggctctgtatgcctttca

SEQ ID NO: 2532034 - DNA, 25 bp, Homo sapien
gccttctcgcagtgctgcttggtga

SEQ ID NO: 2532035 - DNA, 25 bp, Homo sapien
ttttgttgagcagatactcccttgg

SEQ ID NO: 2532036 - DNA, 25 bp, Homo sapien
ctatatgcaaactcatcattcggaa

SEQ ID NO: 2532037 - DNA, 25 bp, Homo sapien
gcataagtattgactgtacagaagt

SEQ ID NO: 2532038 - DNA, 25 bp, Homo sapien
tgtcttgtgtagcataagtattgac

SEQ ID NO: 2532039 - DNA, 25 bp, Homo sapien
tcggaatggtgcaagctttcagttg

SEQ ID NO: 2532040 - DNA, 25 bp, Homo sapien
gataggccctgaggatacatctgta

SEQ ID NO: 2532041 - DNA, 25 bp, Homo sapien
gcagagttgactccctggctcatgt

SEQ ID NO: 2532042 - DNA, 25 bp, Homo sapien
catcaacgtatgaaagctccagttc

SEQ ID NO: 2532043 - DNA, 25 bp, Homo sapien
catatttgggactgtgataggccct

SEQ ID NO: 2532044 - DNA, 25 bp, Homo sapien
tgctgggtactaacaacatattggt

SEQ ID NO: 2532045 - DNA, 25 bp, Homo sapien
ggtgagcaagtcatggtctctgccc

SEQ ID NO: 2532046 - DNA, 25 bp, Homo sapien
gtttagggcatcacgtaatgtgggt

SEQ ID NO: 2532047 - DNA, 25 bp, Homo sapien
gccatatatgaatactaccagtggg

SEQ ID NO: 2532048 - DNA, 25 bp, Homo sapien
tattcagagctatgtactacctgcc

SEQ ID NO: 2532049 - DNA, 25 bp, Homo sapien
ccctctgaggaagattgccatattt

SEQ ID NO: 2532050 - DNA, 25 bp, Homo sapien
aaatgccatcccgtggatctcaggg

SEQ ID NO: 2532051 - DNA, 25 bp, Homo sapien
aaattattttctcacgccagcccat

SEQ ID NO: 2532052 - DNA, 25 bp, Homo sapien
tcttgcggggattgagcatctgcac

SEQ ID NO: 2532053 - DNA, 25 bp, Homo sapien
catttccctagactgttaaggagag

SEQ ID NO: 2532054 - DNA, 25 bp, Homo sapien
ggaaatagtcatccagattggaata

SEQ ID NO: 2532055 - DNA, 25 bp, Homo sapien
agattggaataccaccctccagcag

SEQ ID NO: 2532056 - DNA, 25 bp, Homo sapien
gtggactggggttgcctgattcctt

SEQ ID NO: 2532057 - DNA, 25 bp, Homo sapien
tggactggggttgcctgattccttg

SEQ ID NO: 2532058 - DNA, 25 bp, Homo sapien
ggttcgccctgtgtctcctcaccat

SEQ ID NO: 2532059 - DNA, 25 bp, Homo sapien
tttcatatctcaggttcgccctgtg

SEQ ID NO: 2532060 - DNA, 25 bp, Homo sapien
catatctcaggttcgccctgtgtct

SEQ ID NO: 2532061 - DNA, 25 bp, Homo sapien
ttttttcatatctcaggttcgccct

SEQ ID NO: 2532062 - DNA, 25 bp, Homo sapien
gctctccagggcacttttgccttct

SEQ ID NO: 2532063 - DNA, 25 bp, Homo sapien
tttgccttctaatatggtgtcaagc

SEQ ID NO: 2532064 - DNA, 25 bp, Homo sapien
gtgtcaagctcagcagtgatgaaac

SEQ ID NO: 2532065 - DNA, 25 bp, Homo sapien
cctggcaatgctggggtctttgttc

SEQ ID NO: 2532066 - DNA, 25 bp, Homo sapien
cctgcaccaattgtatcctctcctt

SEQ ID NO: 2532067 - DNA, 25 bp, Homo sapien
gatgaaggtgaatccctgcaccaat

SEQ ID NO: 2532068 - DNA, 25 bp, Homo sapien
atccctgcaccaattgtatcctctc

SEQ ID NO: 2532069 - DNA, 25 bp, Homo sapien
ggatgaaggtgaatccctgcaccaa

SEQ ID NO: 2532070 - DNA, 25 bp, Homo sapien
ggatccaagtgtcatctattcccat

SEQ ID NO: 2532071 - DNA, 25 bp, Homo sapien
gggatccaagtgtcatctattccca

SEQ ID NO: 2532072 - DNA, 25 bp, Homo sapien
tagggatccaagtgtcatctattcc

SEQ ID NO: 2532073 - DNA, 25 bp, Homo sapien
ttagggatccaagtgtcatctattc

SEQ ID NO: 2532074 - DNA, 25 bp, Homo sapien
tatccataaatgcaaagtgaaccca

SEQ ID NO: 2532075 - DNA, 25 bp, Homo sapien
tccacaataggcagcatatccataa

SEQ ID NO: 2532076 - DNA, 25 bp, Homo sapien
cataaatgcaaagtgaacccagagc

SEQ ID NO: 2532077 - DNA, 25 bp, Homo sapien
cctggcaatgcccagggtactgtcc

SEQ ID NO: 2532078 - DNA, 25 bp, Homo sapien
agctctttaaatctggccgtgcatt

SEQ ID NO: 2532079 - DNA, 25 bp, Homo sapien
gctctttaaatctggccgtgcattt

SEQ ID NO: 2532080 - DNA, 25 bp, Homo sapien
ctctttaaatctggccgtgcatttt

SEQ ID NO: 2532081 - DNA, 25 bp, Homo sapien
ccctcagttcaacatgactctgcat

SEQ ID NO: 2532082 - DNA, 25 bp, Homo sapien
gagtctacatctaaatccctcagtt

SEQ ID NO: 2532083 - DNA, 25 bp, Homo sapien
catctaaatccctcagttcaacatg

SEQ ID NO: 2532084 - DNA, 25 bp, Homo sapien
taaatccctcagttcaacatgactc

SEQ ID NO: 2532085 - DNA, 25 bp, Homo sapien
ccaggcagttccacgctgttcttaa

SEQ ID NO: 2532086 - DNA, 25 bp, Homo sapien
gtttggcctgggcatacccacaacg

SEQ ID NO: 2532087 - DNA, 25 bp, Homo sapien
tgatttgtatggttttgtgcagttt

SEQ ID NO: 2532088 - DNA, 25 bp, Homo sapien
tttgggctactgtccctgtgtccaa

SEQ ID NO: 2532089 - DNA, 25 bp, Homo sapien
ctataggttcttctattccataggt

SEQ ID NO: 2532090 - DNA, 25 bp, Homo sapien
tataggttcttctattccgtaggtc

SEQ ID NO: 2532091 - DNA, 25 bp, Homo sapien
atttggaaaaggctattgcgtctct

SEQ ID NO: 2532092 - DNA, 25 bp, Homo sapien
gcctcctataggtcctcctattcta

SEQ ID NO: 2532093 - DNA, 25 bp, Homo sapien
cagagcggctcttggcgtgtaatta

SEQ ID NO: 2532094 - DNA, 25 bp, Homo sapien
tactaatcagatgtaggcaatcaag

SEQ ID NO: 2532095 - DNA, 25 bp, Homo sapien
agttcagattagcatcaacagcggg

SEQ ID NO: 2532096 - DNA, 25 bp, Homo sapien
tgaaggatacaataatctgcctacc

SEQ ID NO: 2532097 - DNA, 25 bp, Homo sapien
cggataattaggagtagagacaaat

SEQ ID NO: 2532098 - DNA, 25 bp, Homo sapien
tagagacaaattcttcttgttccca

SEQ ID NO: 2532099 - DNA, 25 bp, Homo sapien
gataattaggagtagagacaaattc

SEQ ID NO: 2532100 - DNA, 25 bp, Homo sapien
tcttcttgttcccagactaagggca

SEQ ID NO: 2532101 - DNA, 25 bp, Homo sapien
tagaaactctgcctcgatggttaag

SEQ ID NO: 2532102 - DNA, 25 bp, Homo sapien
taagatcgcggtgtctggagtcaga

SEQ ID NO: 2532103 - DNA, 25 bp, Homo sapien
agtcactttactttggtgaacttcg

SEQ ID NO: 2532104 - DNA, 25 bp, Homo sapien
tctacttgatagctgtgaggtcttg

SEQ ID NO: 2532105 - DNA, 25 bp, Homo sapien
ggtaggaaaatagcatcctctctgc

SEQ ID NO: 2532106 - DNA, 25 bp, Homo sapien
ctctttaaagagctcctctggcaga

SEQ ID NO: 2532107 - DNA, 25 bp, Homo sapien
ctggtaggaaaatagcatcctctct

SEQ ID NO: 2532108 - DNA, 25 bp, Homo sapien
gatgtgcgcacagctgttccacctc

SEQ ID NO: 2532109 - DNA, 25 bp, Homo sapien
ggcagactaggccagatggaatttg

SEQ ID NO: 2532110 - DNA, 25 bp, Homo sapien
aggcagactaggccagatggaattt

SEQ ID NO: 2532111 - DNA, 25 bp, Homo sapien
tgctggtctgtattctggagcttgg

SEQ ID NO: 2532112 - DNA, 25 bp, Homo sapien
gccactttgttccaccatccatctg

SEQ ID NO: 2532113 - DNA, 25 bp, Homo sapien
gactcctcttggcgtccagacatct

SEQ ID NO: 2532114 - DNA, 25 bp, Homo sapien
agtcgggctgcccagccgctggact

SEQ ID NO: 2532115 - DNA, 25 bp, Homo sapien
gccttacacacatcctgactgccaa

SEQ ID NO: 2532116 - DNA, 25 bp, Homo sapien
aagatcctcccctggagtcttcaga

SEQ ID NO: 2532117 - DNA, 25 bp, Homo sapien
ggccttacacacatcctgactgcca

SEQ ID NO: 2532118 - DNA, 25 bp, Homo sapien
aaggaaagatcctcccctggagtct

SEQ ID NO: 2532119 - DNA, 25 bp, Homo sapien
ccgggaggaggcacaaaatcgcttt

SEQ ID NO: 2532120 - DNA, 25 bp, Homo sapien
tgtttgtccttgaacgcggcaggga

SEQ ID NO: 2532121 - DNA, 25 bp, Homo sapien
tcatctgttacaggagccgctggaa

SEQ ID NO: 2532122 - DNA, 25 bp, Homo sapien
gattgtagacgtggaaagcacagct

SEQ ID NO: 2532123 - DNA, 25 bp, Homo sapien
ggagcgtccatgtgcgcgggcgctg

SEQ ID NO: 2532124 - DNA, 25 bp, Homo sapien
aattggagcgtccatgtgcgcgggc

SEQ ID NO: 2532125 - DNA, 25 bp, Homo sapien
tgtaattggagcgtccatgtgcgcg

SEQ ID NO: 2532126 - DNA, 25 bp, Homo sapien
ctgtaattggagcgtccatgtgcgc

SEQ ID NO: 2532127 - DNA, 25 bp, Homo sapien
tgacctaagaactcagagacccaga

SEQ ID NO: 2532128 - DNA, 25 bp, Homo sapien
cagggctattagcaagagagacacc

SEQ ID NO: 2532129 - DNA, 25 bp, Homo sapien
gccagaggtagatgcttccctgcct

SEQ ID NO: 2532130 - DNA, 25 bp, Homo sapien
gagagacaccatccctgacctaaga

SEQ ID NO: 2532131 - DNA, 25 bp, Homo sapien
ggtgaccaacttgcaggcattaact

SEQ ID NO: 2532132 - DNA, 25 bp, Homo sapien
tccatggtgaccaacttgcaggcat

SEQ ID NO: 2532133 - DNA, 25 bp, Homo sapien
ccaacttgcaggcattaactgctgg

SEQ ID NO: 2532134 - DNA, 25 bp, Homo sapien
agtggagggagattttcttgtgttg

SEQ ID NO: 2532135 - DNA, 25 bp, Homo sapien
ctgtgtaggagctctcttgggtttc

SEQ ID NO: 2532136 - DNA, 25 bp, Homo sapien
tcttgggtttcataggagcttttct

SEQ ID NO: 2532137 - DNA, 25 bp, Homo sapien
ctctgtgtaggagctctcttgggtt

SEQ ID NO: 2532138 - DNA, 25 bp, Homo sapien
ctcttgggtttcataggagcttttc

SEQ ID NO: 2532139 - DNA, 25 bp, Homo sapien
tcactttattcaagtctcacattcg

SEQ ID NO: 2532140 - DNA, 25 bp, Homo sapien
ctgtgctagtgggaaacctttctgc

SEQ ID NO: 2532141 - DNA, 25 bp, Homo sapien
tgtgctagtgggaaacctttctgct

SEQ ID NO: 2532142 - DNA, 25 bp, Homo sapien
tattcaagtctcacattcggctccc

SEQ ID NO: 2532143 - DNA, 25 bp, Homo sapien
tcggtctcattcacttccccatagg

SEQ ID NO: 2532144 - DNA, 25 bp, Homo sapien
taatctttgtcctcggtctcattca

SEQ ID NO: 2532145 - DNA, 25 bp, Homo sapien
agccatggattcacagtggtgtagc

SEQ ID NO: 2532146 - DNA, 25 bp, Homo sapien
tcagaagcataagaatgagccatgg

SEQ ID NO: 2532147 - DNA, 25 bp, Homo sapien
tttgacggaagacagcagaaatctc

SEQ ID NO: 2532148 - DNA, 25 bp, Homo sapien
ctgaggaggtgatttgacggaagac

SEQ ID NO: 2532149 - DNA, 25 bp, Homo sapien
aggtgatttgacggaagacagcaga

SEQ ID NO: 2532150 - DNA, 25 bp, Homo sapien
aggaggtgatttgacggaagacagc

SEQ ID NO: 2532151 - DNA, 25 bp, Homo sapien
tgtgagcgtattgcctgtcctgcca

SEQ ID NO: 2532152 - DNA, 25 bp, Homo sapien
cctgtgatgagaaagctggccccag

SEQ ID NO: 2532153 - DNA, 25 bp, Homo sapien
gtccctccaattcttacatgtccaa

SEQ ID NO: 2532154 - DNA, 25 bp, Homo sapien
ctatgtggcatggttgatgttgagc

SEQ ID NO: 2532155 - DNA, 25 bp, Homo sapien
caaggaattatagacatgcctttgt

SEQ ID NO: 2532156 - DNA, 25 bp, Homo sapien
ggacgctgtctttagtgccatcatt

SEQ ID NO: 2532157 - DNA, 25 bp, Homo sapien
tagtaagagacaaattcgtggacgc

SEQ ID NO: 2532158 - DNA, 25 bp, Homo sapien
tgaatactgttcttgatacgtggca

SEQ ID NO: 2532159 - DNA, 25 bp, Homo sapien
catcattgctgagcgcctttggtct

SEQ ID NO: 2532160 - DNA, 25 bp, Homo sapien
tcctgcatggcactcattcttgagt

SEQ ID NO: 2532161 - DNA, 25 bp, Homo sapien
catggcactcattcttgagtgggcc

SEQ ID NO: 2532162 - DNA, 25 bp, Homo sapien
gtcctgcatggcactcattcttgag

SEQ ID NO: 2532163 - DNA, 25 bp, Homo sapien
ctgcatggcactcattcttgagtgg

SEQ ID NO: 2532164 - DNA, 25 bp, Homo sapien
tctgtaagatccaacttgtgcctat

SEQ ID NO: 2532165 - DNA, 25 bp, Homo sapien
gatccaacttgtgcctatgggtcat

SEQ ID NO: 2532166 - DNA, 25 bp, Homo sapien
ccatctgtaagatccaacttgtgcc

SEQ ID NO: 2532167 - DNA, 25 bp, Homo sapien
taagatccaacttgtgcctatgggt

SEQ ID NO: 2532168 - DNA, 25 bp, Homo sapien
ccaatggtgcattgactggctttga

SEQ ID NO: 2532169 - DNA, 25 bp, Homo sapien
tcatttctgtcatctaagccaatgg

SEQ ID NO: 2532170 - DNA, 25 bp, Homo sapien
tgcattgactggctttgatgcacag

SEQ ID NO: 2532171 - DNA, 25 bp, Homo sapien
gggtgtgtgaatgtcattgacccag

SEQ ID NO: 2532172 - DNA, 25 bp, Homo sapien
ttctagggctagaaaggtcactcat

SEQ ID NO: 2532173 - DNA, 25 bp, Homo sapien
ctgggcttttattctagggctagaa

SEQ ID NO: 2532174 - DNA, 25 bp, Homo sapien
ccatgaagttgtcttgggtatcagg

SEQ ID NO: 2532175 - DNA, 25 bp, Homo sapien
tctccatgtcgtttgtgacattggg

SEQ ID NO: 2532176 - DNA, 25 bp, Homo sapien
ggccattggaaagccatgggatttt

SEQ ID NO: 2532177 - DNA, 25 bp, Homo sapien
gtttcctgacttatgggccattgga

SEQ ID NO: 2532178 - DNA, 25 bp, Homo sapien
tgcaatatctgtgaggtttcctctc

SEQ ID NO: 2532179 - DNA, 25 bp, Homo sapien
cttctgctaagcactctccagggtg

SEQ ID NO: 2532180 - DNA, 25 bp, Homo sapien
acacctcagctgggctctttttcat

SEQ ID NO: 2532181 - DNA, 25 bp, Homo sapien
gaaacacctcagctgggctcttttt

SEQ ID NO: 2532182 - DNA, 25 bp, Homo sapien
ctccagggtgctgaaacacctcagc

SEQ ID NO: 2532183 - DNA, 25 bp, Homo sapien
aagactgacatccagttctcaaagg

SEQ ID NO: 2532184 - DNA, 25 bp, Homo sapien
ggaagaataattgtattgaaagact

SEQ ID NO: 2532185 - DNA, 25 bp, Homo sapien
tccagttctcaaaggggtcacagcc

SEQ ID NO: 2532186 - DNA, 25 bp, Homo sapien
caaggaagaataattgtattgaaag

SEQ ID NO: 2532187 - DNA, 25 bp, Homo sapien
cagcatccataaggtttgaagaaag

SEQ ID NO: 2532188 - DNA, 25 bp, Homo sapien
acagcagcatccataaggtttgaag

SEQ ID NO: 2532189 - DNA, 25 bp, Homo sapien
gataacctgtgattgaggagtcaac

SEQ ID NO: 2532190 - DNA, 25 bp, Homo sapien
aacactagctccacggttccttatc

SEQ ID NO: 2532191 - DNA, 25 bp, Homo sapien
ccttggagagtctgatgaaaacgca

SEQ ID NO: 2532192 - DNA, 25 bp, Homo sapien
cgaagtacaaatgcattagtgggac

SEQ ID NO: 2532193 - DNA, 25 bp, Homo sapien
tgggacattcaagccccttgtactt

SEQ ID NO: 2532194 - DNA, 25 bp, Homo sapien
tattccaggataatgcacatagaca

SEQ ID NO: 2532195 - DNA, 25 bp, Homo sapien
tagcccattgattatgctcaccgta

SEQ ID NO: 2532196 - DNA, 25 bp, Homo sapien
ctgcctcctcattaaatagcccatt

SEQ ID NO: 2532197 - DNA, 25 bp, Homo sapien
gcctcctcattaaatagcccattga

SEQ ID NO: 2532198 - DNA, 25 bp, Homo sapien
cattaaatagcccattgattatgct

SEQ ID NO: 2532199 - DNA, 25 bp, Homo sapien
gtgatggaacttgccgaatatgcca

SEQ ID NO: 2532200 - DNA, 25 bp, Homo sapien
tctcctccaggtaatgggagccttg

SEQ ID NO: 2532201 - DNA, 25 bp, Homo sapien
gatggtgatggaacttgccgaatat

SEQ ID NO: 2532202 - DNA, 25 bp, Homo sapien
tggtgatggaacttgccgaatatgc

SEQ ID NO: 2532203 - DNA, 25 bp, Homo sapien
tgctggctgttaatctgagacctcc

SEQ ID NO: 2532204 - DNA, 25 bp, Homo sapien
tccatggatcaggttaagctggttc

SEQ ID NO: 2532205 - DNA, 25 bp, Homo sapien
tcaaggtttctcttagggctccaac

SEQ ID NO: 2532206 - DNA, 25 bp, Homo sapien
gttccttgccaagtgggctccttca

SEQ ID NO: 2532207 - DNA, 25 bp, Homo sapien
tgtgatgcccatatatgccttatga

SEQ ID NO: 2532208 - DNA, 25 bp, Homo sapien
caagtgttctgtgatgcccatatat

SEQ ID NO: 2532209 - DNA, 25 bp, Homo sapien
ccaagtgttctgtgatgcccatata

SEQ ID NO: 2532210 - DNA, 25 bp, Homo sapien
tatgatgatgttaagggtgctcttc

SEQ ID NO: 2532211 - DNA, 25 bp, Homo sapien
gactcgtgcttcagggatatgatga

SEQ ID NO: 2532212 - DNA, 25 bp, Homo sapien
caccccgactcgtgcttcagggata

SEQ ID NO: 2532213 - DNA, 25 bp, Homo sapien
tgatgttaagggtgctcttccgggt

SEQ ID NO: 2532214 - DNA, 25 bp, Homo sapien
attctcttcgtttcagccactcacg

SEQ ID NO: 2532215 - DNA, 25 bp, Homo sapien
ccattctcttcgtttcagccactca

SEQ ID NO: 2532216 - DNA, 25 bp, Homo sapien
gtccattctcttcgtttcagccact

SEQ ID NO: 2532217 - DNA, 25 bp, Homo sapien
ctcttcgtttcagccactcacgctt

SEQ ID NO: 2532218 - DNA, 25 bp, Homo sapien
cctctcgggagtctatttggatcag

SEQ ID NO: 2532219 - DNA, 25 bp, Homo sapien
atcagatgcaatgcgcccaattcat

SEQ ID NO: 2532220 - DNA, 25 bp, Homo sapien
tgaatcagatgcaatgcgcccaatt

SEQ ID NO: 2532221 - DNA, 25 bp, Homo sapien
gatgcaatgcgcccaattcatctgc

SEQ ID NO: 2532222 - DNA, 25 bp, Homo sapien
catcactattgtgacccagcctggg

SEQ ID NO: 2532223 - DNA, 25 bp, Homo sapien
atcactattgtgacccagcctggga

SEQ ID NO: 2532224 - DNA, 25 bp, Homo sapien
atcatcactattgtgacccagcctg

SEQ ID NO: 2532225 - DNA, 25 bp, Homo sapien
atcatcatcactattgtgacccagc

SEQ ID NO: 2532226 - DNA, 25 bp, Homo sapien
tgtaaatccgtgctcttgcttcttg

SEQ ID NO: 2532227 - DNA, 25 bp, Homo sapien
ggagcaccctcagccaatgagatgt

SEQ ID NO: 2532228 - DNA, 25 bp, Homo sapien
tgagaaattcctggagcaccctcag

SEQ ID NO: 2532229 - DNA, 25 bp, Homo sapien
attcctggagcaccctcagccaatg

SEQ ID NO: 2532230 - DNA, 25 bp, Homo sapien
cttccattagatgtaaagccacccc

SEQ ID NO: 2532231 - DNA, 25 bp, Homo sapien
tcagcctcattattcggcaggagtt

SEQ ID NO: 2532232 - DNA, 25 bp, Homo sapien
aatttgggaaaatgtggacctgtag

SEQ ID NO: 2532233 - DNA, 25 bp, Homo sapien
ggctcagccgctcctttgaacaaga

SEQ ID NO: 2532234 - DNA, 25 bp, Homo sapien
gagcctccttctgaaatgtgtcttc

SEQ ID NO: 2532235 - DNA, 25 bp, Homo sapien
cctcttcttgtggagtgaatggaga

SEQ ID NO: 2532236 - DNA, 25 bp, Homo sapien
tcttcttgtggagtgaatggagagc

SEQ ID NO: 2532237 - DNA, 25 bp, Homo sapien
ctcctcttcttgtggagtgaatgga

SEQ ID NO: 2532238 - DNA, 25 bp, Homo sapien
tcaattgtatcttctttcctcctct

SEQ ID NO: 2532239 - DNA, 25 bp, Homo sapien
gctcccatagtagcagagagtggaa

SEQ ID NO: 2532240 - DNA, 25 bp, Homo sapien
tgttgagaatctgtgcagagcctct

SEQ ID NO: 2532241 - DNA, 25 bp, Homo sapien
ggttttgcaggtcggaaacttctca

SEQ ID NO: 2532242 - DNA, 25 bp, Homo sapien
catctttgaacttgagctcccatag

SEQ ID NO: 2532243 - DNA, 25 bp, Homo sapien
tccgcaaagacatgagagaatttat

SEQ ID NO: 2532244 - DNA, 25 bp, Homo sapien
tacctactaaaggaggagttcttgc

SEQ ID NO: 2532245 - DNA, 25 bp, Homo sapien
tattagaagccactcaagagcctta

SEQ ID NO: 2532246 - DNA, 25 bp, Homo sapien
tgcttggtaagtggatataatccgc

SEQ ID NO: 2532247 - DNA, 25 bp, Homo sapien
gcttgagcaagagccgggagctcaa

SEQ ID NO: 2532248 - DNA, 25 bp, Homo sapien
ctcgcgaggacgttcccaggagtac

SEQ ID NO: 2532249 - DNA, 25 bp, Homo sapien
gtggcaacacctctgattcagggaa

SEQ ID NO: 2532250 - DNA, 25 bp, Homo sapien
ccaggagtacgactcaggaaatgac

SEQ ID NO: 2532251 - DNA, 25 bp, Homo sapien
aaattcaaaatgttggcctgaggcc

SEQ ID NO: 2532252 - DNA, 25 bp, Homo sapien
cccgctatggaagtgcactggatga

SEQ ID NO: 2532253 - DNA, 25 bp, Homo sapien
gcaaagttcgacctctgttaagtgg

SEQ ID NO: 2532254 - DNA, 25 bp, Homo sapien
gcttgttgaggcactggtaaccctg

SEQ ID NO: 2532255 - DNA, 25 bp, Homo sapien
cagaaatggaggcttcagtcacaca

SEQ ID NO: 2532256 - DNA, 25 bp, Homo sapien
gagaaggaccacctctttccctgaa

SEQ ID NO: 2532257 - DNA, 25 bp, Homo sapien
tgcccaggtaaggagtgctagaatc

SEQ ID NO: 2532258 - DNA, 25 bp, Homo sapien
tattgagaattggtccatctcccag

SEQ ID NO: 2532259 - DNA, 25 bp, Homo sapien
tttcatggagccgagtatgctggga

SEQ ID NO: 2532260 - DNA, 25 bp, Homo sapien
gaggcctgggcttaaagttcagaca

SEQ ID NO: 2532261 - DNA, 25 bp, Homo sapien
tgggcttctacagtgcagcaggctc

SEQ ID NO: 2532262 - DNA, 25 bp, Homo sapien
gttcagaatccataagctggtggcc

SEQ ID NO: 2532263 - DNA, 25 bp, Homo sapien
ggtttctccggtgcgtcatgcggct

SEQ ID NO: 2532264 - DNA, 25 bp, Homo sapien
gtttctccggtgcgtcatgcggctt

SEQ ID NO: 2532265 - DNA, 25 bp, Homo sapien
gcaggatacgacacgctctagggaa

SEQ ID NO: 2532266 - DNA, 25 bp, Homo sapien
tcttaggttagctgagcccgaatcc

SEQ ID NO: 2532267 - DNA, 25 bp, Homo sapien
cattgaggctctaggagcttggcca

SEQ ID NO: 2532268 - DNA, 25 bp, Homo sapien
taagtctgtttagtagcaaccaccc

SEQ ID NO: 2532269 - DNA, 25 bp, Homo sapien
gaagaataagctagcccagccacac

SEQ ID NO: 2532270 - DNA, 25 bp, Homo sapien
tgtgacaggagacgcttgcaaaacc

SEQ ID NO: 2532271 - DNA, 25 bp, Homo sapien
aagaagtttctaggcgcgcgtgccc

SEQ ID NO: 2532272 - DNA, 25 bp, Homo sapien
cgtgccctgggtttattaagctcct

SEQ ID NO: 2532273 - DNA, 25 bp, Homo sapien
ggagccctggaaagtgtgtgtgaat

SEQ ID NO: 2532274 - DNA, 25 bp, Homo sapien
gagccctggaaagtgtgtgtgaatg

SEQ ID NO: 2532275 - DNA, 25 bp, Homo sapien
ttttgccgaggttgaggacactccc

SEQ ID NO: 2532276 - DNA, 25 bp, Homo sapien
ttgccgaggttgaggacactcccat

SEQ ID NO: 2532277 - DNA, 25 bp, Homo sapien
tttgccgaggttgaggacactccca

SEQ ID NO: 2532278 - DNA, 25 bp, Homo sapien
cagtttatgatctgacctaggtccc

SEQ ID NO: 2532279 - DNA, 25 bp, Homo sapien
cctaaaatgggtgatatacaggtct

SEQ ID NO: 2532280 - DNA, 25 bp, Homo sapien
tctgtcccctgtgtttaagtcggga

SEQ ID NO: 2532281 - DNA, 25 bp, Homo sapien
cattagcactccctaaggacgctgg

SEQ ID NO: 2532282 - DNA, 25 bp, Homo sapien
tcctttggatcttaaagagccagtc

SEQ ID NO: 2532283 - DNA, 25 bp, Homo sapien
tttggatcttaaagagccagtcctg

SEQ ID NO: 2532284 - DNA, 25 bp, Homo sapien
agccggggactggtcaggaatacct

SEQ ID NO: 2532285 - DNA, 25 bp, Homo sapien
ttggatcttaaagagccagtcctga

SEQ ID NO: 2532286 - DNA, 25 bp, Homo sapien
cacaaaatgatctctatctcagagt

SEQ ID NO: 2532287 - DNA, 25 bp, Homo sapien
ggcacagatccaagtgtcttacttc

SEQ ID NO: 2532288 - DNA, 25 bp, Homo sapien
attcttttaggcacagatccaagtg

SEQ ID NO: 2532289 - DNA, 25 bp, Homo sapien
agagcacctcccaataagcttccca

SEQ ID NO: 2532290 - DNA, 25 bp, Homo sapien
gattagactgcaagtttgtccaacc

SEQ ID NO: 2532291 - DNA, 25 bp, Homo sapien
tacactgattagactgcaagtttgt

SEQ ID NO: 2532292 - DNA, 25 bp, Homo sapien
cactgattagactgcaagtttgtcc

SEQ ID NO: 2532293 - DNA, 25 bp, Homo sapien
aaaatacactgattagactgcaagt

SEQ ID NO: 2532294 - DNA, 25 bp, Homo sapien
cattggccaaaaagccttggaaatc

SEQ ID NO: 2532295 - DNA, 25 bp, Homo sapien
ttctggaaatttgttgcagatgttg

SEQ ID NO: 2532296 - DNA, 25 bp, Homo sapien
gatgttgacaaacacattggccaaa

SEQ ID NO: 2532297 - DNA, 25 bp, Homo sapien
tgcagatgttgacaaacacattggc

SEQ ID NO: 2532298 - DNA, 25 bp, Homo sapien
gtgctgcagttatcagcagtgacct

SEQ ID NO: 2532299 - DNA, 25 bp, Homo sapien
caggagtcagcagagttcagtgctt

SEQ ID NO: 2532300 - DNA, 25 bp, Homo sapien
gagttcagtgcttcaaatcccagtg

SEQ ID NO: 2532301 - DNA, 25 bp, Homo sapien
gtgaccttggacaatctacttaacc

SEQ ID NO: 2532302 - DNA, 25 bp, Homo sapien
gacaacaatcgcacatcaagggcac

SEQ ID NO: 2532303 - DNA, 25 bp, Homo sapien
ttattaccaagaggacccctgctgg

SEQ ID NO: 2532304 - DNA, 25 bp, Homo sapien
tcctggatatgagtgacgggcgaca

SEQ ID NO: 2532305 - DNA, 25 bp, Homo sapien
tttcaatcaacagaagcaccggcat

SEQ ID NO: 2532306 - DNA, 25 bp, Homo sapien
gctctcatcacctcggaaacagtgg

SEQ ID NO: 2532307 - DNA, 25 bp, Homo sapien
tggaagaactttggtacacggccca

SEQ ID NO: 2532308 - DNA, 25 bp, Homo sapien
tcagaggctctcatcacctcggaaa

SEQ ID NO: 2532309 - DNA, 25 bp, Homo sapien
tggtacacggcccatagctcagagg

SEQ ID NO: 2532310 - DNA, 25 bp, Homo sapien
acgatgcccggccttggagggaatt

SEQ ID NO: 2532311 - DNA, 25 bp, Homo sapien
cacgatgcccggccttggagggaat

SEQ ID NO: 2532312 - DNA, 25 bp, Homo sapien
acgggttaatcagaagctaacatgg

SEQ ID NO: 2532313 - DNA, 25 bp, Homo sapien
tacacgacgaacaacagataaactg

SEQ ID NO: 2532314 - DNA, 25 bp, Homo sapien
cagagaataggtaggaaattgccct

SEQ ID NO: 2532315 - DNA, 25 bp, Homo sapien
tatactctaggggagaggcatacat

SEQ ID NO: 2532316 - DNA, 25 bp, Homo sapien
gcagatgcatagaccttcagctgat

SEQ ID NO: 2532317 - DNA, 25 bp, Homo sapien
gctcagcagatgcatagaccttcag

SEQ ID NO: 2532318 - DNA, 25 bp, Homo sapien
catagaccttcagctgattagcctc

SEQ ID NO: 2532319 - DNA, 25 bp, Homo sapien
gaccttcagctgattagcctcagag

SEQ ID NO: 2532320 - DNA, 25 bp, Homo sapien
cacaggtttattcacaggacagcag

SEQ ID NO: 2532321 - DNA, 25 bp, Homo sapien
gggcagttctgatcacctgagctga

SEQ ID NO: 2532322 - DNA, 25 bp, Homo sapien
cccaggctcagaaaaggtataatgt

SEQ ID NO: 2532323 - DNA, 25 bp, Homo sapien
tctgggacaactgagctgattctgc

SEQ ID NO: 2532324 - DNA, 25 bp, Homo sapien
tctgactcttggtccaacggccatc

SEQ ID NO: 2532325 - DNA, 25 bp, Homo sapien
ttttctgactcttggtccaacggcc

SEQ ID NO: 2532326 - DNA, 25 bp, Homo sapien
ctcttggtccaacggccatctctga

SEQ ID NO: 2532327 - DNA, 25 bp, Homo sapien
tccaaccttgcaaagggtctaaatg

SEQ ID NO: 2532328 - DNA, 25 bp, Homo sapien
gagaaagtagtccagtatgaagtta

SEQ ID NO: 2532329 - DNA, 25 bp, Homo sapien
ggagagaggcaatgactcctgacca

SEQ ID NO: 2532330 - DNA, 25 bp, Homo sapien
agaggaacttacaggaaatatctct

SEQ ID NO: 2532331 - DNA, 25 bp, Homo sapien
gtctcagtccccttggaagaggaga

SEQ ID NO: 2532332 - DNA, 25 bp, Homo sapien
ggtgccaaggatgcatgagcttccc

SEQ ID NO: 2532333 - DNA, 25 bp, Homo sapien
actggaatggaggtgtcttagaagc

SEQ ID NO: 2532334 - DNA, 25 bp, Homo sapien
ccatgagtcaagcagatgtgcagaa

SEQ ID NO: 2532335 - DNA, 25 bp, Homo sapien
aatggaggtgtcttagaagcatccc

SEQ ID NO: 2532336 - DNA, 25 bp, Homo sapien
gatcacttgccaaacctgaaggaag

SEQ ID NO: 2532337 - DNA, 25 bp, Homo sapien
gggcctttggctagcaatcagagaa

SEQ ID NO: 2532338 - DNA, 25 bp, Homo sapien
cacctggcatgggatctgggaaaga

SEQ ID NO: 2532339 - DNA, 25 bp, Homo sapien
ggtgaccagggctattgctaaccca

SEQ ID NO: 2532340 - DNA, 25 bp, Homo sapien
gagcaggcgctgcaattcatctggc

SEQ ID NO: 2532341 - DNA, 25 bp, Homo sapien
catctggcattatgaggcattgaat

SEQ ID NO: 2532342 - DNA, 25 bp, Homo sapien
taattgaattagcatccatggagac

SEQ ID NO: 2532343 - DNA, 25 bp, Homo sapien
gagactgtctcccagacatcggcaa

SEQ ID NO: 2532344 - DNA, 25 bp, Homo sapien
tcaatttggcaagcaactgcacttc

SEQ ID NO: 2532345 - DNA, 25 bp, Homo sapien
caagcaactgcacttccaccaaagg

SEQ ID NO: 2532346 - DNA, 25 bp, Homo sapien
tctaaggggcccagggatagctgaa

SEQ ID NO: 2532347 - DNA, 25 bp, Homo sapien
gggatagctgaagagggcttcaatt

SEQ ID NO: 2532348 - DNA, 25 bp, Homo sapien
aatgaagtcagaggcgtgaccctcc

SEQ ID NO: 2532349 - DNA, 25 bp, Homo sapien
actggactggacacattaatcactg

SEQ ID NO: 2532350 - DNA, 25 bp, Homo sapien
gtcagaggcgtgaccctccactgga

SEQ ID NO: 2532351 - DNA, 25 bp, Homo sapien
accctccactggactggacacatta

SEQ ID NO: 2532352 - DNA, 25 bp, Homo sapien
ggaaaactgcgtatgttgtgatcat

SEQ ID NO: 2532353 - DNA, 25 bp, Homo sapien
agtggagcatgaggggcccctccac

SEQ ID NO: 2532354 - DNA, 25 bp, Homo sapien
cacaggaaaactgcgtatgttgtga

SEQ ID NO: 2532355 - DNA, 25 bp, Homo sapien
agccacaggaaaactgcgtatgttg

SEQ ID NO: 2532356 - DNA, 25 bp, Homo sapien
tcatccataaaattcaggctactgt

SEQ ID NO: 2532357 - DNA, 25 bp, Homo sapien
aacaagcaattcttgagagtattaa

SEQ ID NO: 2532358 - DNA, 25 bp, Homo sapien
ctactgtgcctgtaacaagcaattc

SEQ ID NO: 2532359 - DNA, 25 bp, Homo sapien
tcatccataaagaaacgggtctcca

SEQ ID NO: 2532360 - DNA, 25 bp, Homo sapien
gctcttttgagacaatgcaggaagg

SEQ ID NO: 2532361 - DNA, 25 bp, Homo sapien
tcttttgagacaatgcaggaaggct

SEQ ID NO: 2532362 - DNA, 25 bp, Homo sapien
tcattggccaattacaggcatctcc

SEQ ID NO: 2532363 - DNA, 25 bp, Homo sapien
ctcttttgagacaatgcaggaaggc

SEQ ID NO: 2532364 - DNA, 25 bp, Homo sapien
gcctctaggtcattggcttctttct

SEQ ID NO: 2532365 - DNA, 25 bp, Homo sapien
gtgacaggcaagatggatctgcgga

SEQ ID NO: 2532366 - DNA, 25 bp, Homo sapien
agccgcgcctcgtgggaaatgtgag

SEQ ID NO: 2532367 - DNA, 25 bp, Homo sapien
cggtccagagagcgcagctggctac

SEQ ID NO: 2532368 - DNA, 25 bp, Homo sapien
aaggaggggagctgaagcgcggaga

SEQ ID NO: 2532369 - DNA, 25 bp, Homo sapien
cagttgaacaagctgtcggacagtc

SEQ ID NO: 2532370 - DNA, 25 bp, Homo sapien
aagctgtcggacagtcataaactgg

SEQ ID NO: 2532371 - DNA, 25 bp, Homo sapien
tcggacagtcataaactggaactcc

SEQ ID NO: 2532372 - DNA, 25 bp, Homo sapien
agaagccagttgaacaagctgtcgg

SEQ ID NO: 2532373 - DNA, 25 bp, Homo sapien
ctatctcccaaacatgattcccttt

SEQ ID NO: 2532374 - DNA, 25 bp, Homo sapien
gattgcttaatgctgcccacaaaag

SEQ ID NO: 2532375 - DNA, 25 bp, Homo sapien
cgattgcttaatgctgcccacaaaa

SEQ ID NO: 2532376 - DNA, 25 bp, Homo sapien
tgcttaatgctgcccacaaaagaag

SEQ ID NO: 2532377 - DNA, 25 bp, Homo sapien
attgcttaatgctgcccacaaaaga

SEQ ID NO: 2532378 - DNA, 25 bp, Homo sapien
tactcttcagaaggaaaccgctttg

SEQ ID NO: 2532379 - DNA, 25 bp, Homo sapien
gatttttaagatgaccaaggttcca

SEQ ID NO: 2532380 - DNA, 25 bp, Homo sapien
tccggcccttttatgcctcggagaa

SEQ ID NO: 2532381 - DNA, 25 bp, Homo sapien
ggcacaggctaaaacctgaaggatt

SEQ ID NO: 2532382 - DNA, 25 bp, Homo sapien
tctcagagatctgctggtctccaga

SEQ ID NO: 2532383 - DNA, 25 bp, Homo sapien
gagatctgctggtctccagaaacag

SEQ ID NO: 2532384 - DNA, 25 bp, Homo sapien
cagagatctgctggtctccagaaac

SEQ ID NO: 2532385 - DNA, 25 bp, Homo sapien
agatctgctggtctccagaaacagg

SEQ ID NO: 2532386 - DNA, 25 bp, Homo sapien
aagatccccagggtctagttctctg

SEQ ID NO: 2532387 - DNA, 25 bp, Homo sapien
tggggcttgaagatccccagggtct

SEQ ID NO: 2532388 - DNA, 25 bp, Homo sapien
gggcttgaagatccccagggtctag

SEQ ID NO: 2532389 - DNA, 25 bp, Homo sapien
cttgaagatccccagggtctagttc

SEQ ID NO: 2532390 - DNA, 25 bp, Homo sapien
gagaagagcgatcggcactcttcat

SEQ ID NO: 2532391 - DNA, 25 bp, Homo sapien
tcctgacacgagaagagcgatcggc

SEQ ID NO: 2532392 - DNA, 25 bp, Homo sapien
ggctatttgtcccatctgcaaggag

SEQ ID NO: 2532393 - DNA, 25 bp, Homo sapien
caaaatgaagcaggctatttgtccc

SEQ ID NO: 2532394 - DNA, 25 bp, Homo sapien
tcccagcctgcgtctgttctctgga

SEQ ID NO: 2532395 - DNA, 25 bp, Homo sapien
cccagcctgcgtctgttctctggat

SEQ ID NO: 2532396 - DNA, 25 bp, Homo sapien
cagctcttgagcaatcccaatggtg

SEQ ID NO: 2532397 - DNA, 25 bp, Homo sapien
gagcaatcccaatggtggcctctcc

SEQ ID NO: 2532398 - DNA, 25 bp, Homo sapien
tatgctggtgataacctgatcgttt

SEQ ID NO: 2532399 - DNA, 25 bp, Homo sapien
tctttctatgctggtgataacctga

SEQ ID NO: 2532400 - DNA, 25 bp, Homo sapien
ttctctttctatgctggtgataacc

SEQ ID NO: 2532401 - DNA, 25 bp, Homo sapien
gataacctgatcgtttcgtagttct

SEQ ID NO: 2532402 - DNA, 25 bp, Homo sapien
gaaaagggtgaacactgcaagtgga

SEQ ID NO: 2532403 - DNA, 25 bp, Homo sapien
ccaggcctgagaagtagccatattt

SEQ ID NO: 2532404 - DNA, 25 bp, Homo sapien
gagagaaagacgctcgcaatgtagg

SEQ ID NO: 2532405 - DNA, 25 bp, Homo sapien
gatttacaaggcacaaagcaccaag

SEQ ID NO: 2532406 - DNA, 25 bp, Homo sapien
tacatgcctctgagtgtaggaccat

SEQ ID NO: 2532407 - DNA, 25 bp, Homo sapien
tccccttggccaggattgagctgca

SEQ ID NO: 2532408 - DNA, 25 bp, Homo sapien
tcagcagtccttggatccccttggc

SEQ ID NO: 2532409 - DNA, 25 bp, Homo sapien
gaactctgaaggttagagcagcaca

SEQ ID NO: 2532410 - DNA, 25 bp, Homo sapien
caaaggtggttaattcatcggctca

SEQ ID NO: 2532411 - DNA, 25 bp, Homo sapien
gaggaatgagatgaccgtgactgtc

SEQ ID NO: 2532412 - DNA, 25 bp, Homo sapien
catggaccaattgtgattccttctc

SEQ ID NO: 2532413 - DNA, 25 bp, Homo sapien
cgtgactgtcatggaccaattgtga

SEQ ID NO: 2532414 - DNA, 25 bp, Homo sapien
tgagatgaccgtgactgtcatggac

SEQ ID NO: 2532415 - DNA, 25 bp, Homo sapien
tacctacctgattgtcaagattgag

SEQ ID NO: 2532416 - DNA, 25 bp, Homo sapien
gaatatccaagtaccagttacttcg

SEQ ID NO: 2532417 - DNA, 25 bp, Homo sapien
taagtttctgccagtgtgatgggca

SEQ ID NO: 2532418 - DNA, 25 bp, Homo sapien
tgtaccaaatcacagcctacttgaa

SEQ ID NO: 2532419 - DNA, 25 bp, Homo sapien
tgctgggtgacatgttggaaggaga

SEQ ID NO: 2532420 - DNA, 25 bp, Homo sapien
aggagaggatcgtgtattcttgtcc

SEQ ID NO: 2532421 - DNA, 25 bp, Homo sapien
ttggaaggagaggatcgtgtattct

SEQ ID NO: 2532422 - DNA, 25 bp, Homo sapien
ggatcgtgtattcttgtcctgagtc

SEQ ID NO: 2532423 - DNA, 25 bp, Homo sapien
gggaatagctttcatactgacacag

SEQ ID NO: 2532424 - DNA, 25 bp, Homo sapien
gcgagcagtccctgccatcaatcag

SEQ ID NO: 2532425 - DNA, 25 bp, Homo sapien
ttgcaactgcattgcgcctcagacc

SEQ ID NO: 2532426 - DNA, 25 bp, Homo sapien
aggcagaagaacaccgatcgaacca

SEQ ID NO: 2532427 - DNA, 25 bp, Homo sapien
ggcagaagaacaccgatcgaaccat

SEQ ID NO: 2532428 - DNA, 25 bp, Homo sapien
accatcctggtcatgtgcaaagcaa

SEQ ID NO: 2532429 - DNA, 25 bp, Homo sapien
tgtgcaaagcaagaaagttgtacca

SEQ ID NO: 2532430 - DNA, 25 bp, Homo sapien
ccatcctggtcatgtgcaaagcaag

SEQ ID NO: 2532431 - DNA, 25 bp, Homo sapien
gaaagttgtaccagaaggcattcat

SEQ ID NO: 2532432 - DNA, 25 bp, Homo sapien
gaaatggaagccacgacagataccc

SEQ ID NO: 2532433 - DNA, 25 bp, Homo sapien
gcttcttataaacaagggtcctgtc

SEQ ID NO: 2532434 - DNA, 25 bp, Homo sapien
ccacagttgagagccgttaggctaa

SEQ ID NO: 2532435 - DNA, 25 bp, Homo sapien
taagttcccctaagcgaatccagtg

SEQ ID NO: 2532436 - DNA, 25 bp, Homo sapien
caaaaagcttagaggcacattctca

SEQ ID NO: 2532437 - DNA, 25 bp, Homo sapien
tcccactggtgaagagaggacaccc

SEQ ID NO: 2532438 - DNA, 25 bp, Homo sapien
catgccatgagaagtcagccttaag

SEQ ID NO: 2532439 - DNA, 25 bp, Homo sapien
taacaagcctagacccctgtcattg

SEQ ID NO: 2532440 - DNA, 25 bp, Homo sapien
tcagatggtaatacatttagtcttc

SEQ ID NO: 2532441 - DNA, 25 bp, Homo sapien
acagcagacaggtgaacaggctggc

SEQ ID NO: 2532442 - DNA, 25 bp, Homo sapien
aggaagtgggtcagatggtaataca

SEQ ID NO: 2532443 - DNA, 25 bp, Homo sapien
aacagcagacaggtgaacaggctgg

SEQ ID NO: 2532444 - DNA, 25 bp, Homo sapien
gaatttgcctagcatcccttgcctg

SEQ ID NO: 2532445 - DNA, 25 bp, Homo sapien
gcctgggcatcccaagtcactatca

SEQ ID NO: 2532446 - DNA, 25 bp, Homo sapien
tagccctcaggttaaacagaatttg

SEQ ID NO: 2532447 - DNA, 25 bp, Homo sapien
caattctgccatcgtagcgtagacc

SEQ ID NO: 2532448 - DNA, 25 bp, Homo sapien
tcataccccgagcatgcaggctcta

SEQ ID NO: 2532449 - DNA, 25 bp, Homo sapien
gccaccctagcgagcgcagtaagct

SEQ ID NO: 2532450 - DNA, 25 bp, Homo sapien
tactcagagccctgatcaagcttcc

SEQ ID NO: 2532451 - DNA, 25 bp, Homo sapien
tgcactcctcgtggtactcagagcc

SEQ ID NO: 2532452 - DNA, 25 bp, Homo sapien
gtgggaagatcacttcagccaggga

SEQ ID NO: 2532453 - DNA, 25 bp, Homo sapien
gggaagatcacttcagccagggaag

SEQ ID NO: 2532454 - DNA, 25 bp, Homo sapien
ggaagatcacttcagccagggaagt

SEQ ID NO: 2532455 - DNA, 25 bp, Homo sapien
aagatcacttcagccagggaagttg

SEQ ID NO: 2532456 - DNA, 25 bp, Homo sapien
cacggaccagtaccatggtacgtta

SEQ ID NO: 2532457 - DNA, 25 bp, Homo sapien
taccatggtacgttaggaaccaggc

SEQ ID NO: 2532458 - DNA, 25 bp, Homo sapien
taggtgagcaagtaaggcttcatct

SEQ ID NO: 2532459 - DNA, 25 bp, Homo sapien
agcagtaggtgagcaagtaaggctt

SEQ ID NO: 2532460 - DNA, 25 bp, Homo sapien
ttgcgttcttgccgcggcttgcctg

SEQ ID NO: 2532461 - DNA, 25 bp, Homo sapien
tcggtttatcttcgcgccccttgcg

SEQ ID NO: 2532462 - DNA, 25 bp, Homo sapien
ttgcctgggcaggtaaagcgcgatt

SEQ ID NO: 2532463 - DNA, 25 bp, Homo sapien
ggaaagtgtcggtttatcttcgcgc

SEQ ID NO: 2532464 - DNA, 25 bp, Homo sapien
aaaacagattccgttcgttgacagg

SEQ ID NO: 2532465 - DNA, 25 bp, Homo sapien
ggaaccatagcttgatctcgtgcca

SEQ ID NO: 2532466 - DNA, 25 bp, Homo sapien
ggcagaatatctggcgccctaagaa

SEQ ID NO: 2532467 - DNA, 25 bp, Homo sapien
tagcaccttgtcagaatccctttgg

SEQ ID NO: 2532468 - DNA, 25 bp, Homo sapien
aacagattgtctctcggctccaggg

SEQ ID NO: 2532469 - DNA, 25 bp, Homo sapien
ttgtccctgttgaggcctggctatg

SEQ ID NO: 2532470 - DNA, 25 bp, Homo sapien
ccagggaggtgtcatttctatagaa

SEQ ID NO: 2532471 - DNA, 25 bp, Homo sapien
tgcagcgcctcggtctgtgacagtc

SEQ ID NO: 2532472 - DNA, 25 bp, Homo sapien
tttcaacctgctgccggatttctcc

SEQ ID NO: 2532473 - DNA, 25 bp, Homo sapien
tcctcaggactgaccagttagctgg

SEQ ID NO: 2532474 - DNA, 25 bp, Homo sapien
cagtgttaaccgtgaaaacttgaga

SEQ ID NO: 2532475 - DNA, 25 bp, Homo sapien
gcaggttgtccagctttttattcca

SEQ ID NO: 2532476 - DNA, 25 bp, Homo sapien
gcccctagttagcaagactgcagca

SEQ ID NO: 2532477 - DNA, 25 bp, Homo sapien
tttatacgcagctcagtttcccggg

SEQ ID NO: 2532478 - DNA, 25 bp, Homo sapien
tttcccgggagtcgccacagatgta

SEQ ID NO: 2532479 - DNA, 25 bp, Homo sapien
tgtgagtcagcggaagctcccgtta

SEQ ID NO: 2532480 - DNA, 25 bp, Homo sapien
gtggaccaagagacaaaacttcagc

SEQ ID NO: 2532481 - DNA, 25 bp, Homo sapien
aacaaagttcattcctctcaaggtg

SEQ ID NO: 2532482 - DNA, 25 bp, Homo sapien
catcttggtggtcacacggagctcc

SEQ ID NO: 2532483 - DNA, 25 bp, Homo sapien
cgtgttacggtatatcctgctggca

SEQ ID NO: 2532484 - DNA, 25 bp, Homo sapien
gcctaagagtcgtggaggacccaaa

SEQ ID NO: 2532485 - DNA, 25 bp, Homo sapien
tactctaataggagggtccgcagac

SEQ ID NO: 2532486 - DNA, 25 bp, Homo sapien
taaggccgcgagttagcttgccaac

SEQ ID NO: 2532487 - DNA, 25 bp, Homo sapien
taaaacgccacagcaggacatttgc

SEQ ID NO: 2532488 - DNA, 25 bp, Homo sapien
gaaatccttctctggtcgtaaggct

SEQ ID NO: 2532489 - DNA, 25 bp, Homo sapien
tagtcggcaagtcgtcagagggtct

SEQ ID NO: 2532490 - DNA, 25 bp, Homo sapien
tcagtgctacagactgcagcttgtg

SEQ ID NO: 2532491 - DNA, 25 bp, Homo sapien
aaccgcgctggattgggtgtgaaca

SEQ ID NO: 2532492 - DNA, 25 bp, Homo sapien
ggaagtcgtcaaggccataaaaggc

SEQ ID NO: 2532493 - DNA, 25 bp, Homo sapien
gactgttctacactatgcctcggtg

SEQ ID NO: 2532494 - DNA, 25 bp, Homo sapien
tattaatacattggcagagcaaccc

SEQ ID NO: 2532495 - DNA, 25 bp, Homo sapien
ggaaagcgtctcgaggtcccttggc

SEQ ID NO: 2532496 - DNA, 25 bp, Homo sapien
gtgggcgcttgggtccccatcagca

SEQ ID NO: 2532497 - DNA, 25 bp, Homo sapien
tggctgagcacgtgggcgcttgggt

SEQ ID NO: 2532498 - DNA, 25 bp, Homo sapien
agtgtgtttggtgttttcctgcaga

SEQ ID NO: 2532499 - DNA, 25 bp, Homo sapien
tcctgcagatcaagatgaggagttg

SEQ ID NO: 2532500 - DNA, 25 bp, Homo sapien
tgctgtcttcaaacagcctcccggg

SEQ ID NO: 2532501 - DNA, 25 bp, Homo sapien
atccggccgggggacttctctcgct

SEQ ID NO: 2532502 - DNA, 25 bp, Homo sapien
gggaccgctctctccgcgtgctgag

SEQ ID NO: 2532503 - DNA, 25 bp, Homo sapien
cttggtgatgtgctcgttgtacgtg

SEQ ID NO: 2532504 - DNA, 25 bp, Homo sapien
ctggcgacacaagaggaacgtaggg

SEQ ID NO: 2532505 - DNA, 25 bp, Homo sapien
ggcgacacaagaggaacgtagggag

SEQ ID NO: 2532506 - DNA, 25 bp, Homo sapien
tggcgacacaagaggaacgtaggga

SEQ ID NO: 2532507 - DNA, 25 bp, Homo sapien
ccactagagggagcagatcaggatt

SEQ ID NO: 2532508 - DNA, 25 bp, Homo sapien
gcctagcgacgctccgtggaaaaga

SEQ ID NO: 2532509 - DNA, 25 bp, Homo sapien
gaaaagacccattctcagggcagtg

SEQ ID NO: 2532510 - DNA, 25 bp, Homo sapien
gaaaaccagcagtctagtagccact

SEQ ID NO: 2532511 - DNA, 25 bp, Homo sapien
tttatcctggtatgaggacgccaag

SEQ ID NO: 2532512 - DNA, 25 bp, Homo sapien
agtgccggactccttcacgaggttt

SEQ ID NO: 2532513 - DNA, 25 bp, Homo sapien
cacgaggtttcccttgcagcaaatg

SEQ ID NO: 2532514 - DNA, 25 bp, Homo sapien
caagtaaatcgctcctgaggaaatg

SEQ ID NO: 2532515 - DNA, 25 bp, Homo sapien
gagttgaagtgggtcacaaacagat

SEQ ID NO: 2532516 - DNA, 25 bp, Homo sapien
tgaggagcgtgcctggatctcaatt

SEQ ID NO: 2532517 - DNA, 25 bp, Homo sapien
caattacttcgagtgagttgaagtg

SEQ ID NO: 2532518 - DNA, 25 bp, Homo sapien
agtgggtcacaaacagatagggttc

SEQ ID NO: 2532519 - DNA, 25 bp, Homo sapien
gtaagaatccacgaacactccaaat

SEQ ID NO: 2532520 - DNA, 25 bp, Homo sapien
aaggccaaaggtaagcgactccact

SEQ ID NO: 2532521 - DNA, 25 bp, Homo sapien
tgtgcggctacgtcttccgtaagaa

SEQ ID NO: 2532522 - DNA, 25 bp, Homo sapien
cacttgagatcgtctgtgcggctac

SEQ ID NO: 2532523 - DNA, 25 bp, Homo sapien
gcaggtgccaaggaatggtcattct

SEQ ID NO: 2532524 - DNA, 25 bp, Homo sapien
gctgttggaagaggcggcaaacaca

SEQ ID NO: 2532525 - DNA, 25 bp, Homo sapien
gaaacacagcaagtactcctctcgc

SEQ ID NO: 2532526 - DNA, 25 bp, Homo sapien
tgcgctgttcacctgcacgattgag

SEQ ID NO: 2532527 - DNA, 25 bp, Homo sapien
tgtcgatttcgtagaatttattggt

SEQ ID NO: 2532528 - DNA, 25 bp, Homo sapien
caatgaggatactgtaattggtgaa

SEQ ID NO: 2532529 - DNA, 25 bp, Homo sapien
tactgcttcatgtcgatttcgtaga

SEQ ID NO: 2532530 - DNA, 25 bp, Homo sapien
cctcgagcgtgtactgcttcatgtc

SEQ ID NO: 2532531 - DNA, 25 bp, Homo sapien
cattgtcaccaagcttgttcacgtt

SEQ ID NO: 2532532 - DNA, 25 bp, Homo sapien
cacgttgtcatagagagccattcat

SEQ ID NO: 2532533 - DNA, 25 bp, Homo sapien
cagcatctagccaagccctggagaa

SEQ ID NO: 2532534 - DNA, 25 bp, Homo sapien
aaggatgtgagaggtaacacagggc

SEQ ID NO: 2532535 - DNA, 25 bp, Homo sapien
ggttttcgttgtagcggagaatgac

SEQ ID NO: 2532536 - DNA, 25 bp, Homo sapien
cagtatttgctgaggttttcgttgt

SEQ ID NO: 2532537 - DNA, 25 bp, Homo sapien
ctgaggttttcgttgtagcggagaa

SEQ ID NO: 2532538 - DNA, 25 bp, Homo sapien
tttccggatgcagtatttgctgagg

SEQ ID NO: 2532539 - DNA, 25 bp, Homo sapien
cacagatgcagagcccgttctcaat

SEQ ID NO: 2532540 - DNA, 25 bp, Homo sapien
tgcacagatgcagagcccgttctca

SEQ ID NO: 2532541 - DNA, 25 bp, Homo sapien
gctgcacagatgcagagcccgttct

SEQ ID NO: 2532542 - DNA, 25 bp, Homo sapien
gactttgctgggcatggctgcacag

SEQ ID NO: 2532543 - DNA, 25 bp, Homo sapien
ctttcttcacgtccacaagacacag

SEQ ID NO: 2532544 - DNA, 25 bp, Homo sapien
acaagacacagtgcccgctcttctc

SEQ ID NO: 2532545 - DNA, 25 bp, Homo sapien
ttgggtgagatgtcgggctgggcag

SEQ ID NO: 2532546 - DNA, 25 bp, Homo sapien
acagcttcaaaaatgttgggtgaga

SEQ ID NO: 2532547 - DNA, 25 bp, Homo sapien
tctgggacattatagaagccacagg

SEQ ID NO: 2532548 - DNA, 25 bp, Homo sapien
ggtaaaatccaattatgggcagcat

SEQ ID NO: 2532549 - DNA, 25 bp, Homo sapien
caaatatgtggatgtcaggagagac

SEQ ID NO: 2532550 - DNA, 25 bp, Homo sapien
ggcagcatagcggatacttgtatta

SEQ ID NO: 2532551 - DNA, 25 bp, Homo sapien
gtagagcccttcctcggtgcccacc

SEQ ID NO: 2532552 - DNA, 25 bp, Homo sapien
tcaagacattcagggcgtagagccc

SEQ ID NO: 2532553 - DNA, 25 bp, Homo sapien
acattcagggcgtagagcccttcct

SEQ ID NO: 2532554 - DNA, 25 bp, Homo sapien
agcccttcctcggtgcccaccaaca

SEQ ID NO: 2532555 - DNA, 25 bp, Homo sapien
gtgcagttcatgtctagacggtcat

SEQ ID NO: 2532556 - DNA, 25 bp, Homo sapien
tgtctagacggtcatcaccttccag

SEQ ID NO: 2532557 - DNA, 25 bp, Homo sapien
ccagtttcagcagggagtttccaag

SEQ ID NO: 2532558 - DNA, 25 bp, Homo sapien
gacggtcatcaccttccagtttcag

SEQ ID NO: 2532559 - DNA, 25 bp, Homo sapien
aaaacagaagacatcgtgaggctga

SEQ ID NO: 2532560 - DNA, 25 bp, Homo sapien
aaacagaagacatcgtgaggctgat

SEQ ID NO: 2532561 - DNA, 25 bp, Homo sapien
agctcgtaagaaacacagtcgcggg

SEQ ID NO: 2532562 - DNA, 25 bp, Homo sapien
gctcgtaagaaacacagtcgcgggc

SEQ ID NO: 2532563 - DNA, 25 bp, Homo sapien
tttctaacagcttaaggataagtag

SEQ ID NO: 2532564 - DNA, 25 bp, Homo sapien
gtttctaacagcttaaggataagta

SEQ ID NO: 2532565 - DNA, 25 bp, Homo sapien
aggataagtaggactccaaacctgc

SEQ ID NO: 2532566 - DNA, 25 bp, Homo sapien
ttctaacagcttaaggataagtagg

SEQ ID NO: 2532567 - DNA, 25 bp, Homo sapien
gagccaccgcatccctgattcccac

SEQ ID NO: 2532568 - DNA, 25 bp, Homo sapien
ttctaaatggatcatgatgccacac

SEQ ID NO: 2532569 - DNA, 25 bp, Homo sapien
tgattcccacattctaaatggatca

SEQ ID NO: 2532570 - DNA, 25 bp, Homo sapien
gcatccctgattcccacattctaaa

SEQ ID NO: 2532571 - DNA, 25 bp, Homo sapien
tcagccctcagagagagagcctgag

SEQ ID NO: 2532572 - DNA, 25 bp, Homo sapien
caaaatggccaatgggattctcgtc

SEQ ID NO: 2532573 - DNA, 25 bp, Homo sapien
tcctggccatgacacagtctagagc

SEQ ID NO: 2532574 - DNA, 25 bp, Homo sapien
ttaacaccagttaccaagtcagccc

SEQ ID NO: 2532575 - DNA, 25 bp, Homo sapien
ctccagggcccgctttcatactcac

SEQ ID NO: 2532576 - DNA, 25 bp, Homo sapien
aacctccagggcccgctttcatact

SEQ ID NO: 2532577 - DNA, 25 bp, Homo sapien
tacaaagacaacctccagggcccgc

SEQ ID NO: 2532578 - DNA, 25 bp, Homo sapien
agacaacctccagggcccgctttca

SEQ ID NO: 2532579 - DNA, 25 bp, Homo sapien
tgctttttccctagaaactctccca

SEQ ID NO: 2532580 - DNA, 25 bp, Homo sapien
ctgcgacaactgattctaaggcggt

SEQ ID NO: 2532581 - DNA, 25 bp, Homo sapien
attctaaggcggtgacccagcgctg

SEQ ID NO: 2532582 - DNA, 25 bp, Homo sapien
tgacccagcgctgtttgtcagggaa

SEQ ID NO: 2532583 - DNA, 25 bp, Homo sapien
caactgattctaaggcggtgaccca

SEQ ID NO: 2532584 - DNA, 25 bp, Homo sapien
gcaagtagagggttctcccgggcca

SEQ ID NO: 2532585 - DNA, 25 bp, Homo sapien
caggtggtgtgcgggtgagattcca

SEQ ID NO: 2532586 - DNA, 25 bp, Homo sapien
ctagcaagtagagggttctcccggg

SEQ ID NO: 2532587 - DNA, 25 bp, Homo sapien
tccatcttcagtatgtatgggacat

SEQ ID NO: 2532588 - DNA, 25 bp, Homo sapien
ctccagggcggggctcctccggctc

SEQ ID NO: 2532589 - DNA, 25 bp, Homo sapien
aagcaccaacggcaccatgaataga

SEQ ID NO: 2532590 - DNA, 25 bp, Homo sapien
ggcaccatgaatagatacatccccg

SEQ ID NO: 2532591 - DNA, 25 bp, Homo sapien
ccgtcgggaaggcacagctcaaatt

SEQ ID NO: 2532592 - DNA, 25 bp, Homo sapien
tatttgcgagttcggaagcaccaac

SEQ ID NO: 2532593 - DNA, 25 bp, Homo sapien
taaatgaggacttttgatccctcca

SEQ ID NO: 2532594 - DNA, 25 bp, Homo sapien
tgatccctccaggacaatgtacttc

SEQ ID NO: 2532595 - DNA, 25 bp, Homo sapien
ccaggacaatgtacttcctgtccca

SEQ ID NO: 2532596 - DNA, 25 bp, Homo sapien
gacttttgatccctccaggacaatg

SEQ ID NO: 2532597 - DNA, 25 bp, Homo sapien
ttttgtcacggcagaaggcctcggt

SEQ ID NO: 2532598 - DNA, 25 bp, Homo sapien
caagccgcaggtggctggcaagcac

SEQ ID NO: 2532599 - DNA, 25 bp, Homo sapien
ggcatattcagcaggcaagccgcag

SEQ ID NO: 2532600 - DNA, 25 bp, Homo sapien
cctcggtgaagtgtgtggcatattc

SEQ ID NO: 2532601 - DNA, 25 bp, Homo sapien
gcctggcgtccaaagtgcacggtat

SEQ ID NO: 2532602 - DNA, 25 bp, Homo sapien
ggtgcatgcgttccttaagacgccg

SEQ ID NO: 2532603 - DNA, 25 bp, Homo sapien
gacacacagcacactttgtggctcg

SEQ ID NO: 2532604 - DNA, 25 bp, Homo sapien
tgtggctcgcatgttcagtcctacg

SEQ ID NO: 2532605 - DNA, 25 bp, Homo sapien
ctcgcggtggctggcgtggatgggt

SEQ ID NO: 2532606 - DNA, 25 bp, Homo sapien
tggtccgttgctttgcggtgggcag

SEQ ID NO: 2532607 - DNA, 25 bp, Homo sapien
acgatggcggacatggcgatctgct

SEQ ID NO: 2532608 - DNA, 25 bp, Homo sapien
actcctttctgcggctggatggcgg

SEQ ID NO: 2532609 - DNA, 25 bp, Homo sapien
ccggagctcgatgcgggtcttctga

SEQ ID NO: 2532610 - DNA, 25 bp, Homo sapien
cggaccggagctcgatgcgggtctt

SEQ ID NO: 2532611 - DNA, 25 bp, Homo sapien
ctcccgggcggaccggagctcgatg

SEQ ID NO: 2532612 - DNA, 25 bp, Homo sapien
gggcggaccggagctcgatgcgggt

SEQ ID NO: 2532613 - DNA, 25 bp, Homo sapien
ctgtgtgggtaaagcagggtcctct

SEQ ID NO: 2532614 - DNA, 25 bp, Homo sapien
tgtgtgggtaaagcagggtcctctt

SEQ ID NO: 2532615 - DNA, 25 bp, Homo sapien
tggtttgttgagaaatagtgccttc

SEQ ID NO: 2532616 - DNA, 25 bp, Homo sapien
tgttgagaaatagtgccttccattt

SEQ ID NO: 2532617 - DNA, 25 bp, Homo sapien
gaaatagtgccttccattttcacct

SEQ ID NO: 2532618 - DNA, 25 bp, Homo sapien
aatcaatgagtttggtttgttgaga

SEQ ID NO: 2532619 - DNA, 25 bp, Homo sapien
tttccagctgatactccaagtcact

SEQ ID NO: 2532620 - DNA, 25 bp, Homo sapien
ttgagtcagacggaaaatgtgattt

SEQ ID NO: 2532621 - DNA, 25 bp, Homo sapien
aatgtgatttttctgcaggtccatc

SEQ ID NO: 2532622 - DNA, 25 bp, Homo sapien
ctgtcttcagtagatcagcccgatc

SEQ ID NO: 2532623 - DNA, 25 bp, Homo sapien
tcagtgattcaacacacagggctct

SEQ ID NO: 2532624 - DNA, 25 bp, Homo sapien
caggagctatgggtatcacgtgaca

SEQ ID NO: 2532625 - DNA, 25 bp, Homo sapien
aaaggtaccagccatcacgtaaggg

SEQ ID NO: 2532626 - DNA, 25 bp, Homo sapien
tctatcagcaaagtgcctcaggagc

SEQ ID NO: 2532627 - DNA, 25 bp, Homo sapien
tctgtttgagctctcgttcagtctc

SEQ ID NO: 2532628 - DNA, 25 bp, Homo sapien
gctctcgttcagtctccagcttctg

SEQ ID NO: 2532629 - DNA, 25 bp, Homo sapien
gtaagcttcgggcattcatttcaag

SEQ ID NO: 2532630 - DNA, 25 bp, Homo sapien
ttcatttcaagcatagcatgcttct

SEQ ID NO: 2532631 - DNA, 25 bp, Homo sapien
gagactcggtgatccgctgatcggc

SEQ ID NO: 2532632 - DNA, 25 bp, Homo sapien
ggtgatccgctgatcggctctcgcc

SEQ ID NO: 2532633 - DNA, 25 bp, Homo sapien
cctggcgagactcggtgatccgctg

SEQ ID NO: 2532634 - DNA, 25 bp, Homo sapien
cagagaggctctcggccttcagctt

SEQ ID NO: 2532635 - DNA, 25 bp, Homo sapien
cagctcatcgtttagggcctccaaa

SEQ ID NO: 2532636 - DNA, 25 bp, Homo sapien
tcaaactgggatttctcatcaccca

SEQ ID NO: 2532637 - DNA, 25 bp, Homo sapien
tttttctagcagctcatcgtttagg

SEQ ID NO: 2532638 - DNA, 25 bp, Homo sapien
tctcgaacccgacactcaaactggg

SEQ ID NO: 2532639 - DNA, 25 bp, Homo sapien
tacaatctcgtcgttggcgccagaa

SEQ ID NO: 2532640 - DNA, 25 bp, Homo sapien
ggtaagctgcatctctcgttccgtg

SEQ ID NO: 2532641 - DNA, 25 bp, Homo sapien
gagttcagcgttgtcctcggtcagc

SEQ ID NO: 2532642 - DNA, 25 bp, Homo sapien
ggagatggtccacttcacttcgcag

SEQ ID NO: 2532643 - DNA, 25 bp, Homo sapien
catgttattttaatcgtctttgggt

SEQ ID NO: 2532644 - DNA, 25 bp, Homo sapien
tcatgttattttaatcgtctttggg

SEQ ID NO: 2532645 - DNA, 25 bp, Homo sapien
gagcatcaaatttgcgctggatttc

SEQ ID NO: 2532646 - DNA, 25 bp, Homo sapien
tgttacgaagagcatcaaatttgcg

SEQ ID NO: 2532647 - DNA, 25 bp, Homo sapien
agtacagctgttacgaagagcatca

SEQ ID NO: 2532648 - DNA, 25 bp, Homo sapien
caaatttgcgctggatttcatctct

SEQ ID NO: 2532649 - DNA, 25 bp, Homo sapien
ttcgcctggcgaagctggctctcca

SEQ ID NO: 2532650 - DNA, 25 bp, Homo sapien
tccagctctgtcttcgcctggcgaa

SEQ ID NO: 2532651 - DNA, 25 bp, Homo sapien
gcctgcagggctgtcaactgtgact

SEQ ID NO: 2532652 - DNA, 25 bp, Homo sapien
gctctgtgagctggcgcttgagctc

SEQ ID NO: 2532653 - DNA, 25 bp, Homo sapien
gttccagcagccgattcttgtcact

SEQ ID NO: 2532654 - DNA, 25 bp, Homo sapien
tccagcagccgattcttgtcactgt

SEQ ID NO: 2532655 - DNA, 25 bp, Homo sapien
agttccagcagccgattcttgtcac

SEQ ID NO: 2532656 - DNA, 25 bp, Homo sapien
ccagcagccgattcttgtcactgtg

SEQ ID NO: 2532657 - DNA, 25 bp, Homo sapien
tattggcttcagacagttccacaat

SEQ ID NO: 2532658 - DNA, 25 bp, Homo sapien
agttccacaatcctctgttccaggg

SEQ ID NO: 2532659 - DNA, 25 bp, Homo sapien
gggatctgatcttggaatccatagc

SEQ ID NO: 2532660 - DNA, 25 bp, Homo sapien
aaaaagactgctatttgctgcaagt

SEQ ID NO: 2532661 - DNA, 25 bp, Homo sapien
catgggcctcctcctcgtgtctctg

SEQ ID NO: 2532662 - DNA, 25 bp, Homo sapien
gagaattttgcccttctcatgggcc

SEQ ID NO: 2532663 - DNA, 25 bp, Homo sapien
tctcatgggcctcctcctcgtgtct

SEQ ID NO: 2532664 - DNA, 25 bp, Homo sapien
tctgttcgctgagaattttgccctt

SEQ ID NO: 2532665 - DNA, 25 bp, Homo sapien
ggaagacagcaagaatagctaatgc

SEQ ID NO: 2532666 - DNA, 25 bp, Homo sapien
aaaatgtggtatacggacacatggc

SEQ ID NO: 2532667 - DNA, 25 bp, Homo sapien
ggaacaacacaaaccctgtcagcgg

SEQ ID NO: 2532668 - DNA, 25 bp, Homo sapien
ccatgtttgctgcagtactatttac

SEQ ID NO: 2532669 - DNA, 25 bp, Homo sapien
tgtttcaggtgcacttctaggtgct

SEQ ID NO: 2532670 - DNA, 25 bp, Homo sapien
agacttgggcctcccgatgtttctc

SEQ ID NO: 2532671 - DNA, 25 bp, Homo sapien
ctttctgtttcaggtgcacttctag

SEQ ID NO: 2532672 - DNA, 25 bp, Homo sapien
gggcctcccgatgtttctcttcgag

SEQ ID NO: 2532673 - DNA, 25 bp, Homo sapien
tgctcacgaccttgcctccttaggg

SEQ ID NO: 2532674 - DNA, 25 bp, Homo sapien
tagccaagagaaactttgatgacgg

SEQ ID NO: 2532675 - DNA, 25 bp, Homo sapien
ggtgactcatttcccagaagtgatg

SEQ ID NO: 2532676 - DNA, 25 bp, Homo sapien
tataagttggccactatggaattcc

SEQ ID NO: 2532677 - DNA, 25 bp, Homo sapien
ggatctgttgggattttgtctggat

SEQ ID NO: 2532678 - DNA, 25 bp, Homo sapien
agtctgttttctctacgctccatgg

SEQ ID NO: 2532679 - DNA, 25 bp, Homo sapien
tctgttgggattttgtctggatgtc

SEQ ID NO: 2532680 - DNA, 25 bp, Homo sapien
ttgggattttgtctggatgtcatcc

SEQ ID NO: 2532681 - DNA, 25 bp, Homo sapien
ggtggcctccgtgctggcttttaca

SEQ ID NO: 2532682 - DNA, 25 bp, Homo sapien
tcggtggcctccgtgctggctttta

SEQ ID NO: 2532683 - DNA, 25 bp, Homo sapien
cagaagaatcctctcggttctgcag

SEQ ID NO: 2532684 - DNA, 25 bp, Homo sapien
tggcctccgtgctggcttttacagc

SEQ ID NO: 2532685 - DNA, 25 bp, Homo sapien
gagctcctgaattttgagctgctgc

SEQ ID NO: 2532686 - DNA, 25 bp, Homo sapien
ggagctcctgaattttgagctgctg

SEQ ID NO: 2532687 - DNA, 25 bp, Homo sapien
cctgaattttgagctgctgctcagc

SEQ ID NO: 2532688 - DNA, 25 bp, Homo sapien
ttggagctcctgaattttgagctgc

SEQ ID NO: 2532689 - DNA, 25 bp, Homo sapien
gcctcgaagagaggtctctattcat

SEQ ID NO: 2532690 - DNA, 25 bp, Homo sapien
tgtggtcacccaaaggtggactatc

SEQ ID NO: 2532691 - DNA, 25 bp, Homo sapien
gagccataaagtcatatgtggtcac

SEQ ID NO: 2532692 - DNA, 25 bp, Homo sapien
ggtggactatcaaaataagcctcga

SEQ ID NO: 2532693 - DNA, 25 bp, Homo sapien
cttcaggcttcccttgatccttagc

SEQ ID NO: 2532694 - DNA, 25 bp, Homo sapien
gacattctgtcgctttccgcttgaa

SEQ ID NO: 2532695 - DNA, 25 bp, Homo sapien
gagatcactccgtcttcttgctgag

SEQ ID NO: 2532696 - DNA, 25 bp, Homo sapien
gcaagccgagactctctcagctcag

SEQ ID NO: 2532697 - DNA, 25 bp, Homo sapien
gatcctcttccaactgattcatcat

SEQ ID NO: 2532698 - DNA, 25 bp, Homo sapien
aagacgtgtctttgaactcggccac

SEQ ID NO: 2532699 - DNA, 25 bp, Homo sapien
cccacaatggaacttttagcagtca

SEQ ID NO: 2532700 - DNA, 25 bp, Homo sapien
taaatctaagactccacatgcatgc

SEQ ID NO: 2532701 - DNA, 25 bp, Homo sapien
tgccaactgtggtatgaatcataaa

SEQ ID NO: 2532702 - DNA, 25 bp, Homo sapien
caaacacgcctctcctgaaattaga

SEQ ID NO: 2532703 - DNA, 25 bp, Homo sapien
tcaaaaggagctggaacaagcattc

SEQ ID NO: 2532704 - DNA, 25 bp, Homo sapien
tgaaattagaggtccaagcaagccg

SEQ ID NO: 2532705 - DNA, 25 bp, Homo sapien
ccatagaaaataggtgttggaccag

SEQ ID NO: 2532706 - DNA, 25 bp, Homo sapien
gatttcttggagcttccggctctgc

SEQ ID NO: 2532707 - DNA, 25 bp, Homo sapien
cggctctgctctctgatatcatgga

SEQ ID NO: 2532708 - DNA, 25 bp, Homo sapien
gcttgctccaaacttcgctttaagc

SEQ ID NO: 2532709 - DNA, 25 bp, Homo sapien
gagaagctgcagtgctttgtcatcc

SEQ ID NO: 2532710 - DNA, 25 bp, Homo sapien
tgaccttagggatccagccggaaac

SEQ ID NO: 2532711 - DNA, 25 bp, Homo sapien
aacttccagttggttgccgactccg

SEQ ID NO: 2532712 - DNA, 25 bp, Homo sapien
cactacactggttctggccaatgga

SEQ ID NO: 2532713 - DNA, 25 bp, Homo sapien
caggacagtttcgagtgacggacca

SEQ ID NO: 2532714 - DNA, 25 bp, Homo sapien
tgatgtaggtagcaaggtcctgctc

SEQ ID NO: 2532715 - DNA, 25 bp, Homo sapien
tccttctgactaagcacagcctcca

SEQ ID NO: 2532716 - DNA, 25 bp, Homo sapien
tgtgatgtaggtagcaaggtcctgc

SEQ ID NO: 2532717 - DNA, 25 bp, Homo sapien
tctgtgatgtaggtagcaaggtcct

SEQ ID NO: 2532718 - DNA, 25 bp, Homo sapien
tctccgatgtaaccgggtcatttcc

SEQ ID NO: 2532719 - DNA, 25 bp, Homo sapien
gatgtaaccgggtcatttcctgctc

SEQ ID NO: 2532720 - DNA, 25 bp, Homo sapien
cactctccgatgtaaccgggtcatt

SEQ ID NO: 2532721 - DNA, 25 bp, Homo sapien
ctgacactctccgatgtaaccgggt

SEQ ID NO: 2532722 - DNA, 25 bp, Homo sapien
catctccttgcaaagatctagagga

SEQ ID NO: 2532723 - DNA, 25 bp, Homo sapien
gcccaggagcgcacagttcttcgtt

SEQ ID NO: 2532724 - DNA, 25 bp, Homo sapien
gacttattagtttccagagcgttgc

SEQ ID NO: 2532725 - DNA, 25 bp, Homo sapien
gttcttcgttaaggacagtcaccaa

SEQ ID NO: 2532726 - DNA, 25 bp, Homo sapien
cagtggccgcagtgacataagcagg

SEQ ID NO: 2532727 - DNA, 25 bp, Homo sapien
cactcaaagcagatgggatgtatct

SEQ ID NO: 2532728 - DNA, 25 bp, Homo sapien
aaagactaggaagagagacttcgca

SEQ ID NO: 2532729 - DNA, 25 bp, Homo sapien
ttgagcgtaatcaacacagtggccg

SEQ ID NO: 2532730 - DNA, 25 bp, Homo sapien
ctgccggaagaagcagacatctggc

SEQ ID NO: 2532731 - DNA, 25 bp, Homo sapien
tgccggaagaagcagacatctggct

SEQ ID NO: 2532732 - DNA, 25 bp, Homo sapien
gaagaagcagacatctggctgggtc

SEQ ID NO: 2532733 - DNA, 25 bp, Homo sapien
gaagcagacatctggctgggtcatg

SEQ ID NO: 2532734 - DNA, 25 bp, Homo sapien
cagcaacagcaaggcccgaattcat

SEQ ID NO: 2532735 - DNA, 25 bp, Homo sapien
gacttcagcgaaggcaggagcgcct

SEQ ID NO: 2532736 - DNA, 25 bp, Homo sapien
ctgagaaacggactgtttaaatcca

SEQ ID NO: 2532737 - DNA, 25 bp, Homo sapien
gatttaaaggatttacagcaacagc

SEQ ID NO: 2532738 - DNA, 25 bp, Homo sapien
cggatcccttggcatatacggacgg

SEQ ID NO: 2532739 - DNA, 25 bp, Homo sapien
tggcatatacggacgggaggatcct

SEQ ID NO: 2532740 - DNA, 25 bp, Homo sapien
ggaggccggctgcggaaataaatac

SEQ ID NO: 2532741 - DNA, 25 bp, Homo sapien
ccttggcatatacggacgggaggat

SEQ ID NO: 2532742 - DNA, 25 bp, Homo sapien
ttgtgacacttgtcctgagagtctt

SEQ ID NO: 2532743 - DNA, 25 bp, Homo sapien
cacttgtcctgagagtcttgtagct

SEQ ID NO: 2532744 - DNA, 25 bp, Homo sapien
gggagtccagacccgacacaacaga

SEQ ID NO: 2532745 - DNA, 25 bp, Homo sapien
catggagctagtcttggcaggggag

SEQ ID NO: 2532746 - DNA, 25 bp, Homo sapien
gcagttaattatgggcagagatgag

SEQ ID NO: 2532747 - DNA, 25 bp, Homo sapien
tcatctatgtaactcatgcactgtg

SEQ ID NO: 2532748 - DNA, 25 bp, Homo sapien
gaagcagttaattatgggcagagat

SEQ ID NO: 2532749 - DNA, 25 bp, Homo sapien
gacagctgccctcagtggttggtac

SEQ ID NO: 2532750 - DNA, 25 bp, Homo sapien
tgttgtgttttccattactacccat

SEQ ID NO: 2532751 - DNA, 25 bp, Homo sapien
ggttcgatcaaagactggcctcaga

SEQ ID NO: 2532752 - DNA, 25 bp, Homo sapien
tggtctcaaattatcccgaaaagta

SEQ ID NO: 2532753 - DNA, 25 bp, Homo sapien
gagtcaccagttacaccaaatatta

SEQ ID NO: 2532754 - DNA, 25 bp, Homo sapien
aatcatagcttgagaggttcgatca

SEQ ID NO: 2532755 - DNA, 25 bp, Homo sapien
gttcttcacccgagaagcctgaggg

SEQ ID NO: 2532756 - DNA, 25 bp, Homo sapien
ctggcacggagaggatgaaacccac

SEQ ID NO: 2532757 - DNA, 25 bp, Homo sapien
agtgccttgctgtacgaaaacccca

SEQ ID NO: 2532758 - DNA, 25 bp, Homo sapien
catcaaaattggaggtgtcatcgtc

SEQ ID NO: 2532759 - DNA, 25 bp, Homo sapien
ttcaacactgttgcggagaagatcg

SEQ ID NO: 2532760 - DNA, 25 bp, Homo sapien
aaatttcagccggattcaacactgt

SEQ ID NO: 2532761 - DNA, 25 bp, Homo sapien
tgttgcggagaagatcgtcttactc

SEQ ID NO: 2532762 - DNA, 25 bp, Homo sapien
gccggattcaacactgttgcggaga

SEQ ID NO: 2532763 - DNA, 25 bp, Homo sapien
taccatggttgcaagctgaggcgtc

SEQ ID NO: 2532764 - DNA, 25 bp, Homo sapien
tgcacggatggacatatgcggctcc

SEQ ID NO: 2532765 - DNA, 25 bp, Homo sapien
aagttcctaccggtgatctacagca

SEQ ID NO: 2532766 - DNA, 25 bp, Homo sapien
tactaagcgctctcggtctgggagg

SEQ ID NO: 2532767 - DNA, 25 bp, Homo sapien
ccaaagttccccgatgacaacaaca

SEQ ID NO: 2532768 - DNA, 25 bp, Homo sapien
agatgtaaaatgtgcactaccagaa

SEQ ID NO: 2532769 - DNA, 25 bp, Homo sapien
aattatttaacacctccagtctctc

SEQ ID NO: 2532770 - DNA, 25 bp, Homo sapien
cttccctgttagtgtcagaatctac

SEQ ID NO: 2532771 - DNA, 25 bp, Homo sapien
tactgagcctcgtaaaactcctaag

SEQ ID NO: 2532772 - DNA, 25 bp, Homo sapien
catcaccatggattgcagaaatggg

SEQ ID NO: 2532773 - DNA, 25 bp, Homo sapien
gatatgcttcagagtacccaatgta

SEQ ID NO: 2532774 - DNA, 25 bp, Homo sapien
taacacctcaaacaatacctggctg

SEQ ID NO: 2532775 - DNA, 25 bp, Homo sapien
taggatgggcaaatttaccagagcc

SEQ ID NO: 2532776 - DNA, 25 bp, Homo sapien
catcagagcttactgggtgcttgcc

SEQ ID NO: 2532777 - DNA, 25 bp, Homo sapien
tatgtcttgaaagtaagggccaaac

SEQ ID NO: 2532778 - DNA, 25 bp, Homo sapien
gaaggaggttatctggctcatgaaa

SEQ ID NO: 2532779 - DNA, 25 bp, Homo sapien
aaagtcactgctcactttggggtca

SEQ ID NO: 2532780 - DNA, 25 bp, Homo sapien
ttgaatcagatcaagaaagtcactg

SEQ ID NO: 2532781 - DNA, 25 bp, Homo sapien
agttacgaatgttgttccagtcaat

SEQ ID NO: 2532782 - DNA, 25 bp, Homo sapien
agtctctctttctggccgcacaaca

SEQ ID NO: 2532783 - DNA, 25 bp, Homo sapien
taaatcatctcataggcaatcacgc

SEQ ID NO: 2532784 - DNA, 25 bp, Homo sapien
gagccatgtaatctggggtcccaat

SEQ ID NO: 2532785 - DNA, 25 bp, Homo sapien
agtcacagtccaggccgtaggtgcc

SEQ ID NO: 2532786 - DNA, 25 bp, Homo sapien
tcccaatcgggagtttggcattcac

SEQ ID NO: 2532787 - DNA, 25 bp, Homo sapien
ggtcaacgagaatgttctcaggctt

SEQ ID NO: 2532788 - DNA, 25 bp, Homo sapien
aatccaccagcttgatgtgtcctgt

SEQ ID NO: 2532789 - DNA, 25 bp, Homo sapien
cattttcgcggcagatccaaaatcc

SEQ ID NO: 2532790 - DNA, 25 bp, Homo sapien
tgtttgaattcattttcgcggcaga

SEQ ID NO: 2532791 - DNA, 25 bp, Homo sapien
tggtcctcatatctattcaaaagtg

SEQ ID NO: 2532792 - DNA, 25 bp, Homo sapien
gaacgctgtgaacagccaaaatcag

SEQ ID NO: 2532793 - DNA, 25 bp, Homo sapien
cgatgcacgtatcccatcagatgaa

SEQ ID NO: 2532794 - DNA, 25 bp, Homo sapien
ctcagctaggtaaaactgtatcagg

SEQ ID NO: 2532795 - DNA, 25 bp, Homo sapien
gaagcctcctacatctgggagcctg

SEQ ID NO: 2532796 - DNA, 25 bp, Homo sapien
gagatcattggggaagcctcctaca

SEQ ID NO: 2532797 - DNA, 25 bp, Homo sapien
ggaaaagctgagtagaagctaagga

SEQ ID NO: 2532798 - DNA, 25 bp, Homo sapien
gagtagaagctaaggatgccgatgc

SEQ ID NO: 2532799 - DNA, 25 bp, Homo sapien
ttcgagataatatgttccgctcttc

SEQ ID NO: 2532800 - DNA, 25 bp, Homo sapien
gatttttgtcctgaaaggcatactg

SEQ ID NO: 2532801 - DNA, 25 bp, Homo sapien
ggatccacgggcttgtgcttcgaga

SEQ ID NO: 2532802 - DNA, 25 bp, Homo sapien
gcatactgtaattgggggatccacg

SEQ ID NO: 2532803 - DNA, 25 bp, Homo sapien
tctgacttcgaagtcctttgccgaa

SEQ ID NO: 2532804 - DNA, 25 bp, Homo sapien
actttcatagcatagatgtccccgg

SEQ ID NO: 2532805 - DNA, 25 bp, Homo sapien
ctgtaactcagctatggtgtcggaa

SEQ ID NO: 2532806 - DNA, 25 bp, Homo sapien
tgctcctgggccaataaagccttct

SEQ ID NO: 2532807 - DNA, 25 bp, Homo sapien
catcagagcaggctgactgcattct

SEQ ID NO: 2532808 - DNA, 25 bp, Homo sapien
acttccggacaaagttgctcacgtg

SEQ ID NO: 2532809 - DNA, 25 bp, Homo sapien
ccttctcgggaaagaggagacatct

SEQ ID NO: 2532810 - DNA, 25 bp, Homo sapien
gggcatctaatatcccttctcggga

SEQ ID NO: 2532811 - DNA, 25 bp, Homo sapien
tgttgagtcataaagggtggtttcc

SEQ ID NO: 2532812 - DNA, 25 bp, Homo sapien
ctgttgagtcataaagggtggtttc

SEQ ID NO: 2532813 - DNA, 25 bp, Homo sapien
gtgagtgacaaggagattccaagga

SEQ ID NO: 2532814 - DNA, 25 bp, Homo sapien
acacacaggtgagcaaagttggcag

SEQ ID NO: 2532815 - DNA, 25 bp, Homo sapien
gacacacacaggtgagcaaagttgg

SEQ ID NO: 2532816 - DNA, 25 bp, Homo sapien
agcaaaggtgagtgacaaggagatt

SEQ ID NO: 2532817 - DNA, 25 bp, Homo sapien
cccggctggcaatgggttcagcagc

SEQ ID NO: 2532818 - DNA, 25 bp, Homo sapien
accagcatccaaaggattccgcgct

SEQ ID NO: 2532819 - DNA, 25 bp, Homo sapien
ggctggcaatgggttcagcagcacc

SEQ ID NO: 2532820 - DNA, 25 bp, Homo sapien
tccgcgctccatatttgaacttcaa

SEQ ID NO: 2532821 - DNA, 25 bp, Homo sapien
taagtaaatggctaagttcacgcag

SEQ ID NO: 2532822 - DNA, 25 bp, Homo sapien
tgaagcgaatgaccagcaagccatg

SEQ ID NO: 2532823 - DNA, 25 bp, Homo sapien
cctatgttttgagcaggaagggcct

SEQ ID NO: 2532824 - DNA, 25 bp, Homo sapien
gcagataataaggaaccggccgact

SEQ ID NO: 2532825 - DNA, 25 bp, Homo sapien
aggtctgcgatctgttccgccccgc

SEQ ID NO: 2532826 - DNA, 25 bp, Homo sapien
caggtctgcgatctgttccgccccg

SEQ ID NO: 2532827 - DNA, 25 bp, Homo sapien
ccaggtctgcgatctgttccgcccc

SEQ ID NO: 2532828 - DNA, 25 bp, Homo sapien
ctgggattataggcaagagccactg

SEQ ID NO: 2532829 - DNA, 25 bp, Homo sapien
gggattataggcaagagccactgtg

SEQ ID NO: 2532830 - DNA, 25 bp, Homo sapien
tgctgggattataggcaagagccac

SEQ ID NO: 2532831 - DNA, 25 bp, Homo sapien
ttacaggtgtgcactactatgccca

SEQ ID NO: 2532832 - DNA, 25 bp, Homo sapien
gaagcgctatctagtggcccaatag

SEQ ID NO: 2532833 - DNA, 25 bp, Homo sapien
tctagtggcccaatagagtagctgc

SEQ ID NO: 2532834 - DNA, 25 bp, Homo sapien
tagtggcccaatagagtagctgcag

SEQ ID NO: 2532835 - DNA, 25 bp, Homo sapien
tcctcgaagcagaagcgctatctag

SEQ ID NO: 2532836 - DNA, 25 bp, Homo sapien
tgatctggcagtgccatgaaagtcg

SEQ ID NO: 2532837 - DNA, 25 bp, Homo sapien
gtcgacatccaagtctgactcagag

SEQ ID NO: 2532838 - DNA, 25 bp, Homo sapien
cagtgccatgaaagtcgacatccaa

SEQ ID NO: 2532839 - DNA, 25 bp, Homo sapien
ttagtaacaaggtccttgatatgct

SEQ ID NO: 2532840 - DNA, 25 bp, Homo sapien
gaggtgcgtccatctctagaaatgt

SEQ ID NO: 2532841 - DNA, 25 bp, Homo sapien
actgtgtacatggagatccccacca

SEQ ID NO: 2532842 - DNA, 25 bp, Homo sapien
tctagaaatgtaactgtgtacatgg

SEQ ID NO: 2532843 - DNA, 25 bp, Homo sapien
ttcccagtggaggtgcgtccatctc

SEQ ID NO: 2532844 - DNA, 25 bp, Homo sapien
tatagtgatacagtgcagggacctc

SEQ ID NO: 2532845 - DNA, 25 bp, Homo sapien
tgaggaacacctcagcttgtgggag

SEQ ID NO: 2532846 - DNA, 25 bp, Homo sapien
tgctgagctcttaaatcgcctttgt

SEQ ID NO: 2532847 - DNA, 25 bp, Homo sapien
gcaagggcactcatatttgatgctc

SEQ ID NO: 2532848 - DNA, 25 bp, Homo sapien
ctgcagcccccgcctacctagttca

SEQ ID NO: 2532849 - DNA, 25 bp, Homo sapien
tgcagcccccgcctacctagttcaa

SEQ ID NO: 2532850 - DNA, 25 bp, Homo sapien
agattgttgggtttgtcacacttcg

SEQ ID NO: 2532851 - DNA, 25 bp, Homo sapien
tgttccacatgattagcacgtttgg

SEQ ID NO: 2532852 - DNA, 25 bp, Homo sapien
tcggagcaggttgtgattctgtaat

SEQ ID NO: 2532853 - DNA, 25 bp, Homo sapien
ctactgttccacatgattagcacgt

SEQ ID NO: 2532854 - DNA, 25 bp, Homo sapien
tgaataagagcaatttgcccttttc

SEQ ID NO: 2532855 - DNA, 25 bp, Homo sapien
caagagataaagatccacaccagcc

SEQ ID NO: 2532856 - DNA, 25 bp, Homo sapien
gaataagagcaatttgcccttttct

SEQ ID NO: 2532857 - DNA, 25 bp, Homo sapien
gagataaagatccacaccagccctt

SEQ ID NO: 2532858 - DNA, 25 bp, Homo sapien
aggacttctaaaaggcaaatatgtc

SEQ ID NO: 2532859 - DNA, 25 bp, Homo sapien
gagtctttcagagggctaccaagaa

SEQ ID NO: 2532860 - DNA, 25 bp, Homo sapien
ggtgcaccggctcctaaaggtccta

SEQ ID NO: 2532861 - DNA, 25 bp, Homo sapien
cactgataccttagcatgagtcaag

SEQ ID NO: 2532862 - DNA, 25 bp, Homo sapien
aagcaatggtaggtaacaccactga

SEQ ID NO: 2532863 - DNA, 25 bp, Homo sapien
agcaggaagcgtcgcggcgacagcg

SEQ ID NO: 2532864 - DNA, 25 bp, Homo sapien
gcagcggcaacagggcggctgagaa

SEQ ID NO: 2532865 - DNA, 25 bp, Homo sapien
gcggcggcgttcctcctcgcttcct

SEQ ID NO: 2532866 - DNA, 25 bp, Homo sapien
gcttcgccgaccctcagtctctgtt

SEQ ID NO: 2532867 - DNA, 25 bp, Homo sapien
ctccggggagctagaactggcgtta

SEQ ID NO: 2532868 - DNA, 25 bp, Homo sapien
tgctgcatggagctgcccgccgcgg

SEQ ID NO: 2532869 - DNA, 25 bp, Homo sapien
ggagctagaactggcgttagaggag

SEQ ID NO: 2532870 - DNA, 25 bp, Homo sapien
aactggcgttagaggaggagctggc

SEQ ID NO: 2532871 - DNA, 25 bp, Homo sapien
taggtctgccagtcgatgaactcct

SEQ ID NO: 2532872 - DNA, 25 bp, Homo sapien
aaaaaggaaacctgtgagtgccctg

SEQ ID NO: 2532873 - DNA, 25 bp, Homo sapien
cctataggtagactgccaaaaagca

SEQ ID NO: 2532874 - DNA, 25 bp, Homo sapien
gacagctgacttgaaaggagcaccg

SEQ ID NO: 2532875 - DNA, 25 bp, Homo sapien
cagttgctaggttacggcttttcac

SEQ ID NO: 2532876 - DNA, 25 bp, Homo sapien
gctaggttacggcttttcacattgt

SEQ ID NO: 2532877 - DNA, 25 bp, Homo sapien
gttgctaggttacggcttttcacat

SEQ ID NO: 2532878 - DNA, 25 bp, Homo sapien
tcagttgctaggttacggcttttca

SEQ ID NO: 2532879 - DNA, 25 bp, Homo sapien
gcattcactaacttggctcttccga

SEQ ID NO: 2532880 - DNA, 25 bp, Homo sapien
tattctggcctcctagcatttgcga

SEQ ID NO: 2532881 - DNA, 25 bp, Homo sapien
taaaggaagtgcactgctacccaca

SEQ ID NO: 2532882 - DNA, 25 bp, Homo sapien
catttctacaatgtgttctgagcca

SEQ ID NO: 2532883 - DNA, 25 bp, Homo sapien
agcaaaaagttcttctgaagtttca

SEQ ID NO: 2532884 - DNA, 25 bp, Homo sapien
catctggagcatattaaatgttggc

SEQ ID NO: 2532885 - DNA, 25 bp, Homo sapien
tggtaggctgtaactcgaccaggtt

SEQ ID NO: 2532886 - DNA, 25 bp, Homo sapien
ctaaggcacatgtctggtaggctgt

SEQ ID NO: 2532887 - DNA, 25 bp, Homo sapien
aacaactggttaacatggaggccca

SEQ ID NO: 2532888 - DNA, 25 bp, Homo sapien
ggatgcttttgagcgacagtgccca

SEQ ID NO: 2532889 - DNA, 25 bp, Homo sapien
gatgtctctgaacagccagttgctg

SEQ ID NO: 2532890 - DNA, 25 bp, Homo sapien
tgaaaattcacagcgggatgcggct

SEQ ID NO: 2532891 - DNA, 25 bp, Homo sapien
acaggaatttcacatcaggtccact

SEQ ID NO: 2532892 - DNA, 25 bp, Homo sapien
taggacgtcggtccagccctgagtc

SEQ ID NO: 2532893 - DNA, 25 bp, Homo sapien
tgcgtgtaacagtgggacaggcaca

SEQ ID NO: 2532894 - DNA, 25 bp, Homo sapien
ccattcatgcgtgtaacagtgggac

SEQ ID NO: 2532895 - DNA, 25 bp, Homo sapien
gcttgaatttgcaagcacaccctcg

SEQ ID NO: 2532896 - DNA, 25 bp, Homo sapien
tggccaaccaggacagtcccaagga

SEQ ID NO: 2532897 - DNA, 25 bp, Homo sapien
ggctccaaagtgaaggcctgtccca

SEQ ID NO: 2532898 - DNA, 25 bp, Homo sapien
tgtcccagaatcaccagcttttggc

SEQ ID NO: 2532899 - DNA, 25 bp, Homo sapien
gctgtgccaatcaaacctcagggaa

SEQ ID NO: 2532900 - DNA, 25 bp, Homo sapien
tctccctggaaatcgcctaggaaag

SEQ ID NO: 2532901 - DNA, 25 bp, Homo sapien
gattgtccaatcagggctctccctg

SEQ ID NO: 2532902 - DNA, 25 bp, Homo sapien
tgacaaaggttaggacagtgaccag

SEQ ID NO: 2532903 - DNA, 25 bp, Homo sapien
caacctgtcggagagaatgagcaac

SEQ ID NO: 2532904 - DNA, 25 bp, Homo sapien
caacaccttcttggcactcgaggag

SEQ ID NO: 2532905 - DNA, 25 bp, Homo sapien
tgcggccgggtagagcaatatacac

SEQ ID NO: 2532906 - DNA, 25 bp, Homo sapien
taacggcacgaaactgagactgtcc

SEQ ID NO: 2532907 - DNA, 25 bp, Homo sapien
tagcagcagcgtttctttcgtttac

SEQ ID NO: 2532908 - DNA, 25 bp, Homo sapien
ccagctccgtgatgcagttgaacat

SEQ ID NO: 2532909 - DNA, 25 bp, Homo sapien
tttgctcggaggaccagctccgtga

SEQ ID NO: 2532910 - DNA, 25 bp, Homo sapien
tcgtgagcttcaccacatcgttctg

SEQ ID NO: 2532911 - DNA, 25 bp, Homo sapien
cttccgctcagggtcgtcattctta

SEQ ID NO: 2532912 - DNA, 25 bp, Homo sapien
tctccttggcgctggtctcgaacaa

SEQ ID NO: 2532913 - DNA, 25 bp, Homo sapien
ccggcgaatttgtaggcatcttccg

SEQ ID NO: 2532914 - DNA, 25 bp, Homo sapien
ggatgcccatctgcccggcgaattt

SEQ ID NO: 2532915 - DNA, 25 bp, Homo sapien
agttctggttgatttcgtgaagcca

SEQ ID NO: 2532916 - DNA, 25 bp, Homo sapien
gactcggcactggtgacgtcgtaaa

SEQ ID NO: 2532917 - DNA, 25 bp, Homo sapien
cgtcgtaaaccacaatgaccccgtg

SEQ ID NO: 2532918 - DNA, 25 bp, Homo sapien
gaagccaccgcttgacgttgacaaa

SEQ ID NO: 2532919 - DNA, 25 bp, Homo sapien
aggacgacatcaatccccggaggag

SEQ ID NO: 2532920 - DNA, 25 bp, Homo sapien
tcatgacgccctggcaaagtctgtg

SEQ ID NO: 2532921 - DNA, 25 bp, Homo sapien
gcttccccgagagctgtcgaagagc

SEQ ID NO: 2532922 - DNA, 25 bp, Homo sapien
aggaaaagcatggaagccacacaag

SEQ ID NO: 2532923 - DNA, 25 bp, Homo sapien
ccatgggggcgctgcaccccacact

SEQ ID NO: 2532924 - DNA, 25 bp, Homo sapien
gccatccatgggggcgctgcacccc

SEQ ID NO: 2532925 - DNA, 25 bp, Homo sapien
ggagatgccgaggggcccgggggca

SEQ ID NO: 2532926 - DNA, 25 bp, Homo sapien
cagcctggggagtgccgggctttca

SEQ ID NO: 2532927 - DNA, 25 bp, Homo sapien
actccgatcgtggtgatgtagctgc

SEQ ID NO: 2532928 - DNA, 25 bp, Homo sapien
tccacggtccggatcttgaaatcca

SEQ ID NO: 2532929 - DNA, 25 bp, Homo sapien
gaaatccactccgatcgtggtgatg

SEQ ID NO: 2532930 - DNA, 25 bp, Homo sapien
gatcttgaaatccactccgatcgtg

SEQ ID NO: 2532931 - DNA, 25 bp, Homo sapien
ggtgggaagagattgcaacaacaag

SEQ ID NO: 2532932 - DNA, 25 bp, Homo sapien
aagagattgcaacaacaagccctcc

SEQ ID NO: 2532933 - DNA, 25 bp, Homo sapien
gagatgctggtcgtagaaatggaaa

SEQ ID NO: 2532934 - DNA, 25 bp, Homo sapien
taggggttgccgtaatgcttccagg

SEQ ID NO: 2532935 - DNA, 25 bp, Homo sapien
ttgtctgcaaaacgcaacagtaaac

SEQ ID NO: 2532936 - DNA, 25 bp, Homo sapien
gtgttgtctgcaaaacgcaacagta

SEQ ID NO: 2532937 - DNA, 25 bp, Homo sapien
agaaagtgttgtctgcaaaacgcaa

SEQ ID NO: 2532938 - DNA, 25 bp, Homo sapien
aagtgttgtctgcaaaacgcaacag

SEQ ID NO: 2532939 - DNA, 25 bp, Homo sapien
ctttccacctccctgagcggccaca

SEQ ID NO: 2532940 - DNA, 25 bp, Homo sapien
ctctttccacctccctgagcggcca

SEQ ID NO: 2532941 - DNA, 25 bp, Homo sapien
gctctttccacctccctgagcggcc

SEQ ID NO: 2532942 - DNA, 25 bp, Homo sapien
tccacctccctgagcggccacacac

SEQ ID NO: 2532943 - DNA, 25 bp, Homo sapien
acatctcttccactcgatccctgac

SEQ ID NO: 2532944 - DNA, 25 bp, Homo sapien
tccttgtgtaagacaagctgctccc

SEQ ID NO: 2532945 - DNA, 25 bp, Homo sapien
tgtgtaagacaagctgctcccaaat

SEQ ID NO: 2532946 - DNA, 25 bp, Homo sapien
ttttccttcgtccttgtgtaagaca

SEQ ID NO: 2532947 - DNA, 25 bp, Homo sapien
ccttcgtccttgtgtaagacaagct

SEQ ID NO: 2532948 - DNA, 25 bp, Homo sapien
tgaggccagccaagttaattgacca

SEQ ID NO: 2532949 - DNA, 25 bp, Homo sapien
tcacagtgctttcagcctgccaagt

SEQ ID NO: 2532950 - DNA, 25 bp, Homo sapien
tgtggtgagcccttggatgcctctt

SEQ ID NO: 2532951 - DNA, 25 bp, Homo sapien
gccggcctaagtgcctctgtgagca

SEQ ID NO: 2532952 - DNA, 25 bp, Homo sapien
cccgaggctgcccaagggcacatca

SEQ ID NO: 2532953 - DNA, 25 bp, Homo sapien
acagccacccccgaggctgcccaag

SEQ ID NO: 2532954 - DNA, 25 bp, Homo sapien
gaggctgcccaagggcacatcagca

SEQ ID NO: 2532955 - DNA, 25 bp, Homo sapien
ttcaccacagccacccccgaggctg

SEQ ID NO: 2532956 - DNA, 25 bp, Homo sapien
cagttgtgtgatcctaactccctgt

SEQ ID NO: 2532957 - DNA, 25 bp, Homo sapien
gtcttgcagagggataaaggctcct

SEQ ID NO: 2532958 - DNA, 25 bp, Homo sapien
acggcgggctgtcactccaaaaaga

SEQ ID NO: 2532959 - DNA, 25 bp, Homo sapien
tatcaacgcagaggtccagatgtct

SEQ ID NO: 2532960 - DNA, 25 bp, Homo sapien
ggaagaagcctcaagaccctgaaga

SEQ ID NO: 2532961 - DNA, 25 bp, Homo sapien
agaggtggtcgtagtcccgggccat

SEQ ID NO: 2532962 - DNA, 25 bp, Homo sapien
tccacttcccgaacaaacagccgga

SEQ ID NO: 2532963 - DNA, 25 bp, Homo sapien
tcggtactggcctcgcgatccgcag

SEQ ID NO: 2532964 - DNA, 25 bp, Homo sapien
ggcggatccacttcccgaacaaaca

SEQ ID NO: 2532965 - DNA, 25 bp, Homo sapien
atccgcagctcccttcgggctgctc

SEQ ID NO: 2532966 - DNA, 25 bp, Homo sapien
cgccgctaccaccgcctccctcctt

SEQ ID NO: 2532967 - DNA, 25 bp, Homo sapien
gcccggtcgtggacgttgttgctcc

SEQ ID NO: 2532968 - DNA, 25 bp, Homo sapien
ctgtcgagtcccagcggaaagaagc

SEQ ID NO: 2532969 - DNA, 25 bp, Homo sapien
gaaagaagcccaaggtgccggagaa

SEQ ID NO: 2532970 - DNA, 25 bp, Homo sapien
aggcgcagcgtctggcaccgccttg

SEQ ID NO: 2532971 - DNA, 25 bp, Homo sapien
ggccgtagaaggcagagtcgcgcgg

SEQ ID NO: 2532972 - DNA, 25 bp, Homo sapien
gggctcgcacgagctccgggtttcc

SEQ ID NO: 2532973 - DNA, 25 bp, Homo sapien
aaatgacaggcacgccgcgaccgtg

SEQ ID NO: 2532974 - DNA, 25 bp, Homo sapien
agaggaaatgacaggcacgccgcga

SEQ ID NO: 2532975 - DNA, 25 bp, Homo sapien
ggcctgtggagtggacgccgagggc

SEQ ID NO: 2532976 - DNA, 25 bp, Homo sapien
cggcgggcggcttccgagttggaca

SEQ ID NO: 2532977 - DNA, 25 bp, Homo sapien
ttccgagttggacagaacgggagct

SEQ ID NO: 2532978 - DNA, 25 bp, Homo sapien
ggtcgaaatcccatcccagcgctgt

SEQ ID NO: 2532979 - DNA, 25 bp, Homo sapien
tccctctgatggaagtggaaacggg

SEQ ID NO: 2532980 - DNA, 25 bp, Homo sapien
cactcagcatactggtccaagaggg

SEQ ID NO: 2532981 - DNA, 25 bp, Homo sapien
gaacgtgtgctgtgatcatccagga

SEQ ID NO: 2532982 - DNA, 25 bp, Homo sapien
gcctgatgccacaccaagagacttg

SEQ ID NO: 2532983 - DNA, 25 bp, Homo sapien
ttcctgatgcaggaagcttcatgtt

SEQ ID NO: 2532984 - DNA, 25 bp, Homo sapien
cctgatgcaggaagcttcatgttta

SEQ ID NO: 2532985 - DNA, 25 bp, Homo sapien
tcctgatgcaggaagcttcatgttt

SEQ ID NO: 2532986 - DNA, 25 bp, Homo sapien
tctgtgccccactcgggatatagga

SEQ ID NO: 2532987 - DNA, 25 bp, Homo sapien
caaagatgtggagcggcaatgctgc

SEQ ID NO: 2532988 - DNA, 25 bp, Homo sapien
tatagttccagacctagccatgcta

SEQ ID NO: 2532989 - DNA, 25 bp, Homo sapien
tataggaaaaaggttggtagcgcca

SEQ ID NO: 2532990 - DNA, 25 bp, Homo sapien
ccgtggagtcggcctggctggccag

SEQ ID NO: 2532991 - DNA, 25 bp, Homo sapien
aggatggtgtcgtccacctgctccg

SEQ ID NO: 2532992 - DNA, 25 bp, Homo sapien
gaccttcggttaacctcgttcagca

SEQ ID NO: 2532993 - DNA, 25 bp, Homo sapien
tgtcaggatggtgtcgtccacctgc

SEQ ID NO: 2532994 - DNA, 25 bp, Homo sapien
tagtcagaacatacggctgccacgt

SEQ ID NO: 2532995 - DNA, 25 bp, Homo sapien
cagaactagagacactgaggtggac

SEQ ID NO: 2532996 - DNA, 25 bp, Homo sapien
tggactctggcaaaataagggaatc

SEQ ID NO: 2532997 - DNA, 25 bp, Homo sapien
gcttttgggctttcaaggctgctgg

SEQ ID NO: 2532998 - DNA, 25 bp, Homo sapien
cctgatgtcgctggatgggttctgc

SEQ ID NO: 2532999 - DNA, 25 bp, Homo sapien
gacaattgcctggtcgctgtaggcc

SEQ ID NO: 2533000 - DNA, 25 bp, Homo sapien
ttcaccctgccgcatcttgaggagg

SEQ ID NO: 2533001 - DNA, 25 bp, Homo sapien
tgtaggccctgaccacggtgttctt

SEQ ID NO: 2533002 - DNA, 25 bp, Homo sapien
taacgaacaggctggaaagtttggc

SEQ ID NO: 2533003 - DNA, 25 bp, Homo sapien
cctgtctcgatgtggtgtctcatga

SEQ ID NO: 2533004 - DNA, 25 bp, Homo sapien
tgtctcatgagaaagcccatgcccc

SEQ ID NO: 2533005 - DNA, 25 bp, Homo sapien
tgccctccgcctgtctcgatgtggt

SEQ ID NO: 2533006 - DNA, 25 bp, Homo sapien
tatatctgccggcacaaagtctgcc

SEQ ID NO: 2533007 - DNA, 25 bp, Homo sapien
cgcccgtgccgaaccatccagtcaa

SEQ ID NO: 2533008 - DNA, 25 bp, Homo sapien
atccagtcaatgccggacacgtccg

SEQ ID NO: 2533009 - DNA, 25 bp, Homo sapien
acatcactgctatatctgccggcac

SEQ ID NO: 2533010 - DNA, 25 bp, Homo sapien
tgtagaacggcactaagctcctctt

SEQ ID NO: 2533011 - DNA, 25 bp, Homo sapien
aaaaggcacacagttcccctaggca

SEQ ID NO: 2533012 - DNA, 25 bp, Homo sapien
cacccggctgaggagatgcgagtgt

SEQ ID NO: 2533013 - DNA, 25 bp, Homo sapien
agcaagcactgctgtagaacggcac

SEQ ID NO: 2533014 - DNA, 25 bp, Homo sapien
tcatcgtgtcccagcatgctcagca

SEQ ID NO: 2533015 - DNA, 25 bp, Homo sapien
cagcaggagtgagacgatgtttttc

SEQ ID NO: 2533016 - DNA, 25 bp, Homo sapien
tccggatgacggcatccactttggc

SEQ ID NO: 2533017 - DNA, 25 bp, Homo sapien
tgagacgatgtttttccggatgacg

SEQ ID NO: 2533018 - DNA, 25 bp, Homo sapien
agagcatctgcggccttcaggcgca

SEQ ID NO: 2533019 - DNA, 25 bp, Homo sapien
gctttggtgaaagtggtctgcagct

SEQ ID NO: 2533020 - DNA, 25 bp, Homo sapien
cttaatgtggatggaaatgagcttc

SEQ ID NO: 2533021 - DNA, 25 bp, Homo sapien
catggcgcggatgccattgagcagc

SEQ ID NO: 2533022 - DNA, 25 bp, Homo sapien
caagcagggcagactatcggcagta

SEQ ID NO: 2533023 - DNA, 25 bp, Homo sapien
cttttgatacaatacaggtgggtcc

SEQ ID NO: 2533024 - DNA, 25 bp, Homo sapien
tcagtgtataattgcagagcccatc

SEQ ID NO: 2533025 - DNA, 25 bp, Homo sapien
gagacctgtccatatcgataagtga

SEQ ID NO: 2533026 - DNA, 25 bp, Homo sapien
ccttcccgcaacactggaaggatgg

SEQ ID NO: 2533027 - DNA, 25 bp, Homo sapien
cgaggtcaggcggattaccaagcct

SEQ ID NO: 2533028 - DNA, 25 bp, Homo sapien
tgagtgtctcgagcagagccgcctt

SEQ ID NO: 2533029 - DNA, 25 bp, Homo sapien
gatcagagggccagtgatgctgacc

SEQ ID NO: 2533030 - DNA, 25 bp, Homo sapien
gcacatgctcgcctttgctctcgtt

SEQ ID NO: 2533031 - DNA, 25 bp, Homo sapien
tgctctcgttccctatgagccggat

SEQ ID NO: 2533032 - DNA, 25 bp, Homo sapien
tatgagccggatttccttgtgcagc

SEQ ID NO: 2533033 - DNA, 25 bp, Homo sapien
tcttcaatgagtgccaactggttgc

SEQ ID NO: 2533034 - DNA, 25 bp, Homo sapien
gaggatcacagcctgacaattggcc

SEQ ID NO: 2533035 - DNA, 25 bp, Homo sapien
tagtcagcctttgagcgggaacagt

SEQ ID NO: 2533036 - DNA, 25 bp, Homo sapien
gatgatgatccggtgccctgtgtca

SEQ ID NO: 2533037 - DNA, 25 bp, Homo sapien
cctccagcagatactcgatgatgat

SEQ ID NO: 2533038 - DNA, 25 bp, Homo sapien
aggatcacgccaagatgacgggtga

SEQ ID NO: 2533039 - DNA, 25 bp, Homo sapien
gccactgacgaaaggaaagccagca

SEQ ID NO: 2533040 - DNA, 25 bp, Homo sapien
aaagccagcacccgggtgttgacag

SEQ ID NO: 2533041 - DNA, 25 bp, Homo sapien
cagcatgaccgctgggaggatcacg

SEQ ID NO: 2533042 - DNA, 25 bp, Homo sapien
agggcagcaccacacgactcttaat

SEQ ID NO: 2533043 - DNA, 25 bp, Homo sapien
gcaccacacgactcttaatagccat

SEQ ID NO: 2533044 - DNA, 25 bp, Homo sapien
cacaaggtagggcagcaccacacga

SEQ ID NO: 2533045 - DNA, 25 bp, Homo sapien
aggtagggcagcaccacacgactct

SEQ ID NO: 2533046 - DNA, 25 bp, Homo sapien
gaatgcagctgctcgaaagtcttgg

SEQ ID NO: 2533047 - DNA, 25 bp, Homo sapien
cgagggattcagagaaatacagcac

SEQ ID NO: 2533048 - DNA, 25 bp, Homo sapien
tggtggccgatggtggaatgcagct

SEQ ID NO: 2533049 - DNA, 25 bp, Homo sapien
aaagccttccttgccgtgggcacga

SEQ ID NO: 2533050 - DNA, 25 bp, Homo sapien
ttctcccctaacttccgcacaagat

SEQ ID NO: 2533051 - DNA, 25 bp, Homo sapien
acacaccctgcctctcatcgctctt

SEQ ID NO: 2533052 - DNA, 25 bp, Homo sapien
gcatcccggctggtggacttcatga

SEQ ID NO: 2533053 - DNA, 25 bp, Homo sapien
gctggtggacttcatgatctcactt

SEQ ID NO: 2533054 - DNA, 25 bp, Homo sapien
gagccagcagcaccttacacatgta

SEQ ID NO: 2533055 - DNA, 25 bp, Homo sapien
tctgagacctcatgcaaacccttct

SEQ ID NO: 2533056 - DNA, 25 bp, Homo sapien
gagatgggcagaaatgatcaccagc

SEQ ID NO: 2533057 - DNA, 25 bp, Homo sapien
ccttaacactgtgctatggctgagc

SEQ ID NO: 2533058 - DNA, 25 bp, Homo sapien
gacaacaatcttccagacatgcagg

SEQ ID NO: 2533059 - DNA, 25 bp, Homo sapien
ctgggtgtctgagcggcccatgtac

SEQ ID NO: 2533060 - DNA, 25 bp, Homo sapien
cccaaagagagtgggtaggatctca

SEQ ID NO: 2533061 - DNA, 25 bp, Homo sapien
gttctcttatctgcacacgtgctgg

SEQ ID NO: 2533062 - DNA, 25 bp, Homo sapien
catcagcaggggcaggaaagccact

SEQ ID NO: 2533063 - DNA, 25 bp, Homo sapien
gcaggggcaggaaagccactgcagg

SEQ ID NO: 2533064 - DNA, 25 bp, Homo sapien
tcagcaggggcaggaaagccactgc

SEQ ID NO: 2533065 - DNA, 25 bp, Homo sapien
cagcaggggcaggaaagccactgca

SEQ ID NO: 2533066 - DNA, 25 bp, Homo sapien
ggactgggcagttccaaagttatca

SEQ ID NO: 2533067 - DNA, 25 bp, Homo sapien
ctcctgagatgtgaaacaggagatc

SEQ ID NO: 2533068 - DNA, 25 bp, Homo sapien
tgttggactgggcagttccaaagtt

SEQ ID NO: 2533069 - DNA, 25 bp, Homo sapien
tgagatgtgaaacaggagatcccca

SEQ ID NO: 2533070 - DNA, 25 bp, Homo sapien
ggtcatcaaagaggccttgctctag

SEQ ID NO: 2533071 - DNA, 25 bp, Homo sapien
ggcggtgtcacgcacaaactcattc

SEQ ID NO: 2533072 - DNA, 25 bp, Homo sapien
gtacatggagataacccgctggccc

SEQ ID NO: 2533073 - DNA, 25 bp, Homo sapien
cagggcgatggctgtctcagcgtac

SEQ ID NO: 2533074 - DNA, 25 bp, Homo sapien
gatgatgggccccacataaggagta

SEQ ID NO: 2533075 - DNA, 25 bp, Homo sapien
aaacttgtctccaaaggtgatgggc

SEQ ID NO: 2533076 - DNA, 25 bp, Homo sapien
ggtgatgggcaggtagttaaacatc

SEQ ID NO: 2533077 - DNA, 25 bp, Homo sapien
aaacatcataatgtagccatctcgg

SEQ ID NO: 2533078 - DNA, 25 bp, Homo sapien
atcagccacggcagcaagtcctcaa

SEQ ID NO: 2533079 - DNA, 25 bp, Homo sapien
ccatggccccaagggcctttgcaga

SEQ ID NO: 2533080 - DNA, 25 bp, Homo sapien
cctgagcgatccacagagctctgct

SEQ ID NO: 2533081 - DNA, 25 bp, Homo sapien
ctgctcataggtcagtgtctccatc

SEQ ID NO: 2533082 - DNA, 25 bp, Homo sapien
caggcacagggtccaaaagcgatgc

SEQ ID NO: 2533083 - DNA, 25 bp, Homo sapien
ttcaggccaggcgtcacgctgggca

SEQ ID NO: 2533084 - DNA, 25 bp, Homo sapien
caaaagcgatgctttcaggccaggc

SEQ ID NO: 2533085 - DNA, 25 bp, Homo sapien
tcacgctgggcaggtacggagccaa

SEQ ID NO: 2533086 - DNA, 25 bp, Homo sapien
tatcacggcggtattatcacggctc

SEQ ID NO: 2533087 - DNA, 25 bp, Homo sapien
cacacatgtgagctcctaaggcaga

SEQ ID NO: 2533088 - DNA, 25 bp, Homo sapien
taagaaggacttgaaccactgcgct

SEQ ID NO: 2533089 - DNA, 25 bp, Homo sapien
gagatcacacatgcaagctcttggg

SEQ ID NO: 2533090 - DNA, 25 bp, Homo sapien
gggtctgcaagcacttctgggtctt

SEQ ID NO: 2533091 - DNA, 25 bp, Homo sapien
tgttgccaataatctgggctgccat

SEQ ID NO: 2533092 - DNA, 25 bp, Homo sapien
tccgcgtgtccgtggaacggtcctg

SEQ ID NO: 2533093 - DNA, 25 bp, Homo sapien
tggtctgtcagggagtacatgttgc

SEQ ID NO: 2533094 - DNA, 25 bp, Homo sapien
gagctggatgatatacatctatgca

SEQ ID NO: 2533095 - DNA, 25 bp, Homo sapien
atctatgcagctgcaaggcccctgg

SEQ ID NO: 2533096 - DNA, 25 bp, Homo sapien
agaagagagctggatgatatacatc

SEQ ID NO: 2533097 - DNA, 25 bp, Homo sapien
gatatacatctatgcagctgcaagg

SEQ ID NO: 2533098 - DNA, 25 bp, Homo sapien
tgacatgggagtcggtcagcacctc

SEQ ID NO: 2533099 - DNA, 25 bp, Homo sapien
ttaggagcacagtacgccattgccc

SEQ ID NO: 2533100 - DNA, 25 bp, Homo sapien
caggatgacagctgcttaggagcac

SEQ ID NO: 2533101 - DNA, 25 bp, Homo sapien
gcacctccgtaagcttgggcacaat

SEQ ID NO: 2533102 - DNA, 25 bp, Homo sapien
tcaccccgtgagcactcaagttgct

SEQ ID NO: 2533103 - DNA, 25 bp, Homo sapien
ccccgtgagcactcaagttgctcat

SEQ ID NO: 2533104 - DNA, 25 bp, Homo sapien
gctttggtccgccacgattcctcct

SEQ ID NO: 2533105 - DNA, 25 bp, Homo sapien
agcttcaccccgtgagcactcaagt

SEQ ID NO: 2533106 - DNA, 25 bp, Homo sapien
catacggctcaaaaagtttccccag

SEQ ID NO: 2533107 - DNA, 25 bp, Homo sapien
catggtgcagagcatctcgaaggca

SEQ ID NO: 2533108 - DNA, 25 bp, Homo sapien
catactggtttccatccccaaagca

SEQ ID NO: 2533109 - DNA, 25 bp, Homo sapien
ggcagcacgtgaaccacatacggct

SEQ ID NO: 2533110 - DNA, 25 bp, Homo sapien
tctcgccggcggaagttcttcttat

SEQ ID NO: 2533111 - DNA, 25 bp, Homo sapien
tgttgcttcagcgagaggatgccca

SEQ ID NO: 2533112 - DNA, 25 bp, Homo sapien
tgcgctctgcgtacttgtctgactc

SEQ ID NO: 2533113 - DNA, 25 bp, Homo sapien
ataggcggcccctttgcgctctgcg

SEQ ID NO: 2533114 - DNA, 25 bp, Homo sapien
tggtggggggtctgaccattctaca

SEQ ID NO: 2533115 - DNA, 25 bp, Homo sapien
cacctgtcaatgctgtggctccgct

SEQ ID NO: 2533116 - DNA, 25 bp, Homo sapien
agcacccaccactagatgtcccaag

SEQ ID NO: 2533117 - DNA, 25 bp, Homo sapien
cgctgcagccgtttcatggttggtg

SEQ ID NO: 2533118 - DNA, 25 bp, Homo sapien
gagtgttcctgactataaaccaggc

SEQ ID NO: 2533119 - DNA, 25 bp, Homo sapien
ggtgaatccttaacaagaactgggc

SEQ ID NO: 2533120 - DNA, 25 bp, Homo sapien
gaaactatctgggaggtctactaga

SEQ ID NO: 2533121 - DNA, 25 bp, Homo sapien
tctaaccgacatgtgggtcccaggc

SEQ ID NO: 2533122 - DNA, 25 bp, Homo sapien
atcattgggcgcgttcttcaggaac

SEQ ID NO: 2533123 - DNA, 25 bp, Homo sapien
catcatagctggcatcattgggcgc

SEQ ID NO: 2533124 - DNA, 25 bp, Homo sapien
ttcaggaactcctcgaatactggca

SEQ ID NO: 2533125 - DNA, 25 bp, Homo sapien
gcttggcaacaatgggcttcacttt

SEQ ID NO: 2533126 - DNA, 25 bp, Homo sapien
cttcccgtgggtgttccctggctgg

SEQ ID NO: 2533127 - DNA, 25 bp, Homo sapien
tcccgtgggtgttccctggctggga

SEQ ID NO: 2533128 - DNA, 25 bp, Homo sapien
catgcacttccggacatctgggtgt

SEQ ID NO: 2533129 - DNA, 25 bp, Homo sapien
tcattgagggcatcagggacaaaaa

SEQ ID NO: 2533130 - DNA, 25 bp, Homo sapien
tcacctgagagctgtccaaatactg

SEQ ID NO: 2533131 - DNA, 25 bp, Homo sapien
gagagcttgttgagggccaacgcca

SEQ ID NO: 2533132 - DNA, 25 bp, Homo sapien
ggagacttgccatctgccctgattt

SEQ ID NO: 2533133 - DNA, 25 bp, Homo sapien
cccagagaggaatgtgagtgcaatg

SEQ ID NO: 2533134 - DNA, 25 bp, Homo sapien
aacccacttgtcatatggagacttg

SEQ ID NO: 2533135 - DNA, 25 bp, Homo sapien
tgccctgattttacctcctactggg

SEQ ID NO: 2533136 - DNA, 25 bp, Homo sapien
ctccaagggcaaagtgttgttactc

SEQ ID NO: 2533137 - DNA, 25 bp, Homo sapien
gaatctgtgtcctatccctggctga

SEQ ID NO: 2533138 - DNA, 25 bp, Homo sapien
tgtaagagaacacagaggtaaaaga

SEQ ID NO: 2533139 - DNA, 25 bp, Homo sapien
tgtagaggcctgtggaagtgaacac

SEQ ID NO: 2533140 - DNA, 25 bp, Homo sapien
atacaccaccctacactgacacaca

SEQ ID NO: 2533141 - DNA, 25 bp, Homo sapien
accaccctacactgacacacaaggc

SEQ ID NO: 2533142 - DNA, 25 bp, Homo sapien
ccaggatgggcccatacaccaccct

SEQ ID NO: 2533143 - DNA, 25 bp, Homo sapien
acacaaggcctcacgggagtggaca

SEQ ID NO: 2533144 - DNA, 25 bp, Homo sapien
cttcccactgatctggaggagattc

SEQ ID NO: 2533145 - DNA, 25 bp, Homo sapien
gcttcccactgatctggaggagatt

SEQ ID NO: 2533146 - DNA, 25 bp, Homo sapien
gaaataactcgtcccaaagcatcca

SEQ ID NO: 2533147 - DNA, 25 bp, Homo sapien
tcgtcccaaagcatccagcactggg

SEQ ID NO: 2533148 - DNA, 25 bp, Homo sapien
aatgctttgcaacgggcagatcaat

SEQ ID NO: 2533149 - DNA, 25 bp, Homo sapien
caacagacaagttggtaaatgcttt

SEQ ID NO: 2533150 - DNA, 25 bp, Homo sapien
cagacaagttggtaaatgctttgca

SEQ ID NO: 2533151 - DNA, 25 bp, Homo sapien
gacaagttggtaaatgctttgcaac

SEQ ID NO: 2533152 - DNA, 25 bp, Homo sapien
ggaaactagccgcagctaccctgag

SEQ ID NO: 2533153 - DNA, 25 bp, Homo sapien
accgtgagccccgagattcctgtct

SEQ ID NO: 2533154 - DNA, 25 bp, Homo sapien
agccccgagattcctgtctggagca

SEQ ID NO: 2533155 - DNA, 25 bp, Homo sapien
gattgtgaggcaggaaactagccgc

SEQ ID NO: 2533156 - DNA, 25 bp, Homo sapien
gactgcatcagggctgcacaggtca

SEQ ID NO: 2533157 - DNA, 25 bp, Homo sapien
actgcatcagggctgcacaggtcac

SEQ ID NO: 2533158 - DNA, 25 bp, Homo sapien
ccagactgcatcagggctgcacagg

SEQ ID NO: 2533159 - DNA, 25 bp, Homo sapien
cagactgcatcagggctgcacaggt

SEQ ID NO: 2533160 - DNA, 25 bp, Homo sapien
cgctggtaacgtgccactgcttggg

SEQ ID NO: 2533161 - DNA, 25 bp, Homo sapien
ctgcaggtctaggcccatcattgac

SEQ ID NO: 2533162 - DNA, 25 bp, Homo sapien
gatagatcacgtcgtcaatcagcaa

SEQ ID NO: 2533163 - DNA, 25 bp, Homo sapien
ccttacagccgcctcatgatagatc

SEQ ID NO: 2533164 - DNA, 25 bp, Homo sapien
caggccattcttctcatcagtatca

SEQ ID NO: 2533165 - DNA, 25 bp, Homo sapien
gcaataccatgtggagttccatcag

SEQ ID NO: 2533166 - DNA, 25 bp, Homo sapien
agtatcaggtgctggcaataccatg

SEQ ID NO: 2533167 - DNA, 25 bp, Homo sapien
gagtctccgcagaaggttcaggcca

SEQ ID NO: 2533168 - DNA, 25 bp, Homo sapien
cacggtttcccgcacgctggcacac

SEQ ID NO: 2533169 - DNA, 25 bp, Homo sapien
ctggcacacggggactgcaaggcac

SEQ ID NO: 2533170 - DNA, 25 bp, Homo sapien
ggagcacggtttcccgcacgctggc

SEQ ID NO: 2533171 - DNA, 25 bp, Homo sapien
ccggagcacggtttcccgcacgctg

SEQ ID NO: 2533172 - DNA, 25 bp, Homo sapien
atggccacgcgaggcagcaactccg

SEQ ID NO: 2533173 - DNA, 25 bp, Homo sapien
gtaagcgaggcgagcccgtcccgat

SEQ ID NO: 2533174 - DNA, 25 bp, Homo sapien
tgtaagcgaggcgagcccgtcccga

SEQ ID NO: 2533175 - DNA, 25 bp, Homo sapien
cccaagtcagaagacgcagcatggc

SEQ ID NO: 2533176 - DNA, 25 bp, Homo sapien
ggaggtctgtaacccaggcggccaa

SEQ ID NO: 2533177 - DNA, 25 bp, Homo sapien
cggccaacggcagggcatcctctca

SEQ ID NO: 2533178 - DNA, 25 bp, Homo sapien
ggagagaacggcaggtaagtcgaga

SEQ ID NO: 2533179 - DNA, 25 bp, Homo sapien
gggcatcctctcacccacgggggaa

SEQ ID NO: 2533180 - DNA, 25 bp, Homo sapien
tggacagtgaggatctgaagaatct

SEQ ID NO: 2533181 - DNA, 25 bp, Homo sapien
tcagaaacgggaagactaaggagaa

SEQ ID NO: 2533182 - DNA, 25 bp, Homo sapien
ggtggggcatctccgtcagcaccat

SEQ ID NO: 2533183 - DNA, 25 bp, Homo sapien
ctaaggagaaggctggcgcggacaa

SEQ ID NO: 2533184 - DNA, 25 bp, Homo sapien
ggacttatccaggacacactctggc

SEQ ID NO: 2533185 - DNA, 25 bp, Homo sapien
tctggcttcagcaggcgcagggtca

SEQ ID NO: 2533186 - DNA, 25 bp, Homo sapien
agggtcacgtggctcaccaaagtgc

SEQ ID NO: 2533187 - DNA, 25 bp, Homo sapien
tcttcctggcaccaggacttatcca

SEQ ID NO: 2533188 - DNA, 25 bp, Homo sapien
gccggacgggttcttggccaggatg

SEQ ID NO: 2533189 - DNA, 25 bp, Homo sapien
gatgtactgggtcaggccggacggg

SEQ ID NO: 2533190 - DNA, 25 bp, Homo sapien
gggttcttgatcctgggagcagcca

SEQ ID NO: 2533191 - DNA, 25 bp, Homo sapien
aaaagagtcgaccaaaacagggatg

SEQ ID NO: 2533192 - DNA, 25 bp, Homo sapien
ctgcttgctggtcagctgcacctcc

SEQ ID NO: 2533193 - DNA, 25 bp, Homo sapien
tgcttgctggtcagctgcacctcct

SEQ ID NO: 2533194 - DNA, 25 bp, Homo sapien
cggacctgcgcctccctgtctagct

SEQ ID NO: 2533195 - DNA, 25 bp, Homo sapien
agaagtcccactgtaccaggcgctg

SEQ ID NO: 2533196 - DNA, 25 bp, Homo sapien
gagctcacaatctagcaggcgaaga

SEQ ID NO: 2533197 - DNA, 25 bp, Homo sapien
tatcaggagtctagatgggtcccag

SEQ ID NO: 2533198 - DNA, 25 bp, Homo sapien
tctactttggatagggtggacaagc

SEQ ID NO: 2533199 - DNA, 25 bp, Homo sapien
ttggccttttttatgctgtcctgct

SEQ ID NO: 2533200 - DNA, 25 bp, Homo sapien
ctgctctttgaaggaataagctttg

SEQ ID NO: 2533201 - DNA, 25 bp, Homo sapien
ctctttgaaggaataagctttgttc

SEQ ID NO: 2533202 - DNA, 25 bp, Homo sapien
tcatgttggccttttttatgctgtc

SEQ ID NO: 2533203 - DNA, 25 bp, Homo sapien
gggtctgcataatggcaaactcctc

SEQ ID NO: 2533204 - DNA, 25 bp, Homo sapien
gttctgcacggaggcagtgatggtg

SEQ ID NO: 2533205 - DNA, 25 bp, Homo sapien
caggcgcagtgcagggttctgcacg

SEQ ID NO: 2533206 - DNA, 25 bp, Homo sapien
tccggcgacaggacggaaagggagc

SEQ ID NO: 2533207 - DNA, 25 bp, Homo sapien
gacaaacgcagacatggtcagtgtg

SEQ ID NO: 2533208 - DNA, 25 bp, Homo sapien
tgaatgcccctagcactggctcccc

SEQ ID NO: 2533209 - DNA, 25 bp, Homo sapien
ccagacaaacgcagacatggtcagt

SEQ ID NO: 2533210 - DNA, 25 bp, Homo sapien
tgggcaatgcccatcacagtggccg

SEQ ID NO: 2533211 - DNA, 25 bp, Homo sapien
gcatggcacccaagtcagattaatc

SEQ ID NO: 2533212 - DNA, 25 bp, Homo sapien
gctcttgtgctaccagaaagggaaa

SEQ ID NO: 2533213 - DNA, 25 bp, Homo sapien
aatatgcaagctattcccctaggag

SEQ ID NO: 2533214 - DNA, 25 bp, Homo sapien
tcaatctccgtggttcaggtggagc

SEQ ID NO: 2533215 - DNA, 25 bp, Homo sapien
ttaggggactctgtgtggtcatcct

SEQ ID NO: 2533216 - DNA, 25 bp, Homo sapien
taaaggcttcaggatcgatcttcat

SEQ ID NO: 2533217 - DNA, 25 bp, Homo sapien
aggtgcctggtgataaaggcttcag

SEQ ID NO: 2533218 - DNA, 25 bp, Homo sapien
gaatgatctgatccaggtgcctggt

SEQ ID NO: 2533219 - DNA, 25 bp, Homo sapien
tggccaaagtccagactgcacggca

SEQ ID NO: 2533220 - DNA, 25 bp, Homo sapien
ctggccaaagtccagactgcacggc

SEQ ID NO: 2533221 - DNA, 25 bp, Homo sapien
ggccaaagtccagactgcacggcaa

SEQ ID NO: 2533222 - DNA, 25 bp, Homo sapien
cagtgtcggtgacatcacccttgag

SEQ ID NO: 2533223 - DNA, 25 bp, Homo sapien
tcaccaaagcctctaagggcagcac

SEQ ID NO: 2533224 - DNA, 25 bp, Homo sapien
ctggcacaccggagatgacacacag

SEQ ID NO: 2533225 - DNA, 25 bp, Homo sapien
tcctgggccagttgttcagtgtcgg

SEQ ID NO: 2533226 - DNA, 25 bp, Homo sapien
aactggtccaggagacccagcctgt

SEQ ID NO: 2533227 - DNA, 25 bp, Homo sapien
aggaactggtccaggagacccagcc

SEQ ID NO: 2533228 - DNA, 25 bp, Homo sapien
tcactggcccacattcctcaacagg

SEQ ID NO: 2533229 - DNA, 25 bp, Homo sapien
tggtccaggagacccagcctgtggt

SEQ ID NO: 2533230 - DNA, 25 bp, Homo sapien
caggtgcggctcaggagcaccgcca

SEQ ID NO: 2533231 - DNA, 25 bp, Homo sapien
gaggacagcagcttccgaactgtct

SEQ ID NO: 2533232 - DNA, 25 bp, Homo sapien
ttcagctcctccaagagtccgtgcg

SEQ ID NO: 2533233 - DNA, 25 bp, Homo sapien
ctgagcctgcctgcggacgtgccag

SEQ ID NO: 2533234 - DNA, 25 bp, Homo sapien
tatgcgggtggtcaaggaaaagtct

SEQ ID NO: 2533235 - DNA, 25 bp, Homo sapien
atgcgggtggtcaaggaaaagtctc

SEQ ID NO: 2533236 - DNA, 25 bp, Homo sapien
tgcgggtggtcaaggaaaagtctct

SEQ ID NO: 2533237 - DNA, 25 bp, Homo sapien
ctatgcgggtggtcaaggaaaagtc

SEQ ID NO: 2533238 - DNA, 25 bp, Homo sapien
gtcagatgcaacacagtacacaggg

SEQ ID NO: 2533239 - DNA, 25 bp, Homo sapien
tgtcagatgcaacacagtacacagg

SEQ ID NO: 2533240 - DNA, 25 bp, Homo sapien
ctgtcagatgcaacacagtacacag

SEQ ID NO: 2533241 - DNA, 25 bp, Homo sapien
atttctcagaagtgaaaacctgctt

SEQ ID NO: 2533242 - DNA, 25 bp, Homo sapien
tctgaagccatgaccaggaatttct

SEQ ID NO: 2533243 - DNA, 25 bp, Homo sapien
aatttctcagaagtgaaaacctgct

SEQ ID NO: 2533244 - DNA, 25 bp, Homo sapien
cctctgaagccatgaccaggaattt

SEQ ID NO: 2533245 - DNA, 25 bp, Homo sapien
cagatgacaagcaaacctgtggctg

SEQ ID NO: 2533246 - DNA, 25 bp, Homo sapien
tacaagcctgtgtagcactggagca

SEQ ID NO: 2533247 - DNA, 25 bp, Homo sapien
tgtggtcaggaccaagctaatcctg

SEQ ID NO: 2533248 - DNA, 25 bp, Homo sapien
ggtccatctaggtatcatctacaag

SEQ ID NO: 2533249 - DNA, 25 bp, Homo sapien
ccactgtctggatgagcaagggcag

SEQ ID NO: 2533250 - DNA, 25 bp, Homo sapien
caagggcagtaagtccagggcctgc

SEQ ID NO: 2533251 - DNA, 25 bp, Homo sapien
acaaggctgcggcaaccccttcagt

SEQ ID NO: 2533252 - DNA, 25 bp, Homo sapien
actttaagagcaacaaggctgcggc

SEQ ID NO: 2533253 - DNA, 25 bp, Homo sapien
ctatagtgacaagttctggttctgg

SEQ ID NO: 2533254 - DNA, 25 bp, Homo sapien
tagtgacaagttctggttctggtcc

SEQ ID NO: 2533255 - DNA, 25 bp, Homo sapien
cttaaaccagtcttatctgagtcat

SEQ ID NO: 2533256 - DNA, 25 bp, Homo sapien
atgatttcagatactatagtgacaa

SEQ ID NO: 2533257 - DNA, 25 bp, Homo sapien
agtgaatcggttacaccagagagcc

SEQ ID NO: 2533258 - DNA, 25 bp, Homo sapien
ccggtaagaggccaacatgcactgc

SEQ ID NO: 2533259 - DNA, 25 bp, Homo sapien
gtaggcatgcctcaccgcagatgtg

SEQ ID NO: 2533260 - DNA, 25 bp, Homo sapien
tgagacagcgtgtaccaaggtccct

SEQ ID NO: 2533261 - DNA, 25 bp, Homo sapien
cacgtgatgactgacgctcccaatc

SEQ ID NO: 2533262 - DNA, 25 bp, Homo sapien
tcctgctgaaggaacgggatgaaca

SEQ ID NO: 2533263 - DNA, 25 bp, Homo sapien
gaaggtccagacaccacgtgatgac

SEQ ID NO: 2533264 - DNA, 25 bp, Homo sapien
agccacgatcccattcaggacctga

SEQ ID NO: 2533265 - DNA, 25 bp, Homo sapien
tcatcttctgggctacaacagttag

SEQ ID NO: 2533266 - DNA, 25 bp, Homo sapien
tcttctgggctacaacagttagttt

SEQ ID NO: 2533267 - DNA, 25 bp, Homo sapien
tctgggctacaacagttagttttcc

SEQ ID NO: 2533268 - DNA, 25 bp, Homo sapien
ctgagaggacgctcatcttctgggc

SEQ ID NO: 2533269 - DNA, 25 bp, Homo sapien
tggcgtgccaggttccgcagtgcca

SEQ ID NO: 2533270 - DNA, 25 bp, Homo sapien
acagcttcatccatcaggcggggac

SEQ ID NO: 2533271 - DNA, 25 bp, Homo sapien
aataggtgcttggtcagggattcca

SEQ ID NO: 2533272 - DNA, 25 bp, Homo sapien
agtcactgcactggcgtgccaggtt

SEQ ID NO: 2533273 - DNA, 25 bp, Homo sapien
tcactgatgccagcagactagaaat

SEQ ID NO: 2533274 - DNA, 25 bp, Homo sapien
ccatggcatactggctgaggtcaag

SEQ ID NO: 2533275 - DNA, 25 bp, Homo sapien
tgaggtcaagcgtcactgatgccag

SEQ ID NO: 2533276 - DNA, 25 bp, Homo sapien
cagccagtcctttcacgatgtccat

SEQ ID NO: 2533277 - DNA, 25 bp, Homo sapien
taaggacttctgtatggtgggcagt

SEQ ID NO: 2533278 - DNA, 25 bp, Homo sapien
gacttctgtatggtgggcagtatca

SEQ ID NO: 2533279 - DNA, 25 bp, Homo sapien
cttctgtatggtgggcagtatcaga

SEQ ID NO: 2533280 - DNA, 25 bp, Homo sapien
aaggacttctgtatggtgggcagta

SEQ ID NO: 2533281 - DNA, 25 bp, Homo sapien
tgagtgggacaggtatcggagcaga

SEQ ID NO: 2533282 - DNA, 25 bp, Homo sapien
ctgagtgggacaggtatcggagcag

SEQ ID NO: 2533283 - DNA, 25 bp, Homo sapien
ttgtccaggtgagtaacgtccacct

SEQ ID NO: 2533284 - DNA, 25 bp, Homo sapien
tcagcatcccagaattgaaaatggg

SEQ ID NO: 2533285 - DNA, 25 bp, Homo sapien
gaataaggcacctagccctcatggg

SEQ ID NO: 2533286 - DNA, 25 bp, Homo sapien
catgggaacggaccaagaagcaaaa

SEQ ID NO: 2533287 - DNA, 25 bp, Homo sapien
caggtacttcggaggcttgactttg

SEQ ID NO: 2533288 - DNA, 25 bp, Homo sapien
caacaggtacttcggaggcttgact

SEQ ID NO: 2533289 - DNA, 25 bp, Homo sapien
cttcatgtaaaagtccagtagggcg

SEQ ID NO: 2533290 - DNA, 25 bp, Homo sapien
tttgctcatcaggatgttcttcatg

SEQ ID NO: 2533291 - DNA, 25 bp, Homo sapien
ggctgagaatggctgacaagtactg

SEQ ID NO: 2533292 - DNA, 25 bp, Homo sapien
cagcatagttctggttgggctctag

SEQ ID NO: 2533293 - DNA, 25 bp, Homo sapien
tctccttgtgactcgtgcagaactg

SEQ ID NO: 2533294 - DNA, 25 bp, Homo sapien
cccagcatgccagcatagttctggt

SEQ ID NO: 2533295 - DNA, 25 bp, Homo sapien
tctttccacagcttcgtgagtttct

SEQ ID NO: 2533296 - DNA, 25 bp, Homo sapien
ccatccacggcgtgcttgtgggagc

SEQ ID NO: 2533297 - DNA, 25 bp, Homo sapien
acagcaccatccacggcgtgcttgt

SEQ ID NO: 2533298 - DNA, 25 bp, Homo sapien
ctctttccacagcttcgtgagtttc

SEQ ID NO: 2533299 - DNA, 25 bp, Homo sapien
tccttgtcgcttggctctcgatgga

SEQ ID NO: 2533300 - DNA, 25 bp, Homo sapien
ttccagatgtctccttgtcgcttgg

SEQ ID NO: 2533301 - DNA, 25 bp, Homo sapien
aaagacaatgcgcaccaggaggcag

SEQ ID NO: 2533302 - DNA, 25 bp, Homo sapien
cgcttggctctcgatggaaagacaa

SEQ ID NO: 2533303 - DNA, 25 bp, Homo sapien
tgctttggagcctataccagaagac

SEQ ID NO: 2533304 - DNA, 25 bp, Homo sapien
agtgtagaaggttcttagcagtggc

SEQ ID NO: 2533305 - DNA, 25 bp, Homo sapien
tgtagaaggttcttagcagtggctt

SEQ ID NO: 2533306 - DNA, 25 bp, Homo sapien
tggagcctataccagaagactgcag

SEQ ID NO: 2533307 - DNA, 25 bp, Homo sapien
tcgatgcagagtcaagcagaacaat

SEQ ID NO: 2533308 - DNA, 25 bp, Homo sapien
ctatatcgatgcagagtcaagcaga

SEQ ID NO: 2533309 - DNA, 25 bp, Homo sapien
tgcagagtcaagcagaacaatttgc

SEQ ID NO: 2533310 - DNA, 25 bp, Homo sapien
cagagtcaagcagaacaatttgcag

SEQ ID NO: 2533311 - DNA, 25 bp, Homo sapien
gcaaaacgctttagtgtctcggaaa

SEQ ID NO: 2533312 - DNA, 25 bp, Homo sapien
tggctgttgtcaccttccctgcaaa

SEQ ID NO: 2533313 - DNA, 25 bp, Homo sapien
tttacactggctgttgtcaccttcc

SEQ ID NO: 2533314 - DNA, 25 bp, Homo sapien
accttccctgcaaaacgctttagtg

SEQ ID NO: 2533315 - DNA, 25 bp, Homo sapien
ccagtccctggccgcgttggccccg

SEQ ID NO: 2533316 - DNA, 25 bp, Homo sapien
gcttccggaacgcttccgggtcaca

SEQ ID NO: 2533317 - DNA, 25 bp, Homo sapien
ggctgactccggaaccgcttccgga

SEQ ID NO: 2533318 - DNA, 25 bp, Homo sapien
gctgactccggaaccgcttccggaa

SEQ ID NO: 2533319 - DNA, 25 bp, Homo sapien
aacgcttccgggtcacagcgtggcc

SEQ ID NO: 2533320 - DNA, 25 bp, Homo sapien
aataaaactggctaagttggttgct

SEQ ID NO: 2533321 - DNA, 25 bp, Homo sapien
ggctaagttggttgctttttggtga

SEQ ID NO: 2533322 - DNA, 25 bp, Homo sapien
aactggctaagttggttgctttttg

SEQ ID NO: 2533323 - DNA, 25 bp, Homo sapien
ataaaactggctaagttggttgctt

SEQ ID NO: 2533324 - DNA, 25 bp, Homo sapien
tagtcaaagagaccaaatcccatat

SEQ ID NO: 2533325 - DNA, 25 bp, Homo sapien
ttagtcaaagagaccaaatcccata

SEQ ID NO: 2533326 - DNA, 25 bp, Homo sapien
agtcaaagagaccaaatcccatatc

SEQ ID NO: 2533327 - DNA, 25 bp, Homo sapien
cttccttggcttcaaccttagctgg

SEQ ID NO: 2533328 - DNA, 25 bp, Homo sapien
ttccttggcttcaaccttagctggg

SEQ ID NO: 2533329 - DNA, 25 bp, Homo sapien
cttggcttcaaccttagctggggct

SEQ ID NO: 2533330 - DNA, 25 bp, Homo sapien
ggcttcaaccttagctggggctgca

SEQ ID NO: 2533331 - DNA, 25 bp, Homo sapien
cagcagccacaaaggcagatggatc

SEQ ID NO: 2533332 - DNA, 25 bp, Homo sapien
ccacaaaggcagatggatcagccaa

SEQ ID NO: 2533333 - DNA, 25 bp, Homo sapien
aaaggcagatggatcagccaagaag

SEQ ID NO: 2533334 - DNA, 25 bp, Homo sapien
ggcagatggatcagccaagaaggcc

SEQ ID NO: 2533335 - DNA, 25 bp, Homo sapien
agcaggacagcttgggtatggccta

SEQ ID NO: 2533336 - DNA, 25 bp, Homo sapien
gtagaaggccacatcaccctgctaa

SEQ ID NO: 2533337 - DNA, 25 bp, Homo sapien
tctcaagtgagaaacgccttccctg

SEQ ID NO: 2533338 - DNA, 25 bp, Homo sapien
tatggcctagtgaggcagggttcct

SEQ ID NO: 2533339 - DNA, 25 bp, Homo sapien
gacagacactggcaacattgcggac

SEQ ID NO: 2533340 - DNA, 25 bp, Homo sapien
caaggccaggactcgtttgtacccg

SEQ ID NO: 2533341 - DNA, 25 bp, Homo sapien
caagtgggaaggtgtaatccgtctc

SEQ ID NO: 2533342 - DNA, 25 bp, Homo sapien
agttgggtagccaatctgcagacag

SEQ ID NO: 2533343 - DNA, 25 bp, Homo sapien
aagatttcattttacgtgagattcc

SEQ ID NO: 2533344 - DNA, 25 bp, Homo sapien
gagggaagatttcattttacgtgag

SEQ ID NO: 2533345 - DNA, 25 bp, Homo sapien
ggagggaagatttcattttacgtga

SEQ ID NO: 2533346 - DNA, 25 bp, Homo sapien
gggaagatttcattttacgtgagat

SEQ ID NO: 2533347 - DNA, 25 bp, Homo sapien
aattcattaaatcctttggccaggc

SEQ ID NO: 2533348 - DNA, 25 bp, Homo sapien
tcaatgcaggccctagaataacagc

SEQ ID NO: 2533349 - DNA, 25 bp, Homo sapien
ccaggttggcagctcagtctcaaga

SEQ ID NO: 2533350 - DNA, 25 bp, Homo sapien
taacgtagccattgagttccatgaa

SEQ ID NO: 2533351 - DNA, 25 bp, Homo sapien
gaagcgagaatgcagagtttcctct

SEQ ID NO: 2533352 - DNA, 25 bp, Homo sapien
ctccaggaagcgagaatgcagagtt

SEQ ID NO: 2533353 - DNA, 25 bp, Homo sapien
atgcagagtttcctctgtgatatca

SEQ ID NO: 2533354 - DNA, 25 bp, Homo sapien
agaatgcagagtttcctctgtgata

SEQ ID NO: 2533355 - DNA, 25 bp, Homo sapien
gagaagggggagatgttgagcatgt

SEQ ID NO: 2533356 - DNA, 25 bp, Homo sapien
gaagggggagatgttgagcatgttc

SEQ ID NO: 2533357 - DNA, 25 bp, Homo sapien
atgttgagcatgttcagcagcgtgg

SEQ ID NO: 2533358 - DNA, 25 bp, Homo sapien
agatgttgagcatgttcagcagcgt

SEQ ID NO: 2533359 - DNA, 25 bp, Homo sapien
ctgaaccagataatagtggggcagt

SEQ ID NO: 2533360 - DNA, 25 bp, Homo sapien
gaaccagataatagtggggcagtaa

SEQ ID NO: 2533361 - DNA, 25 bp, Homo sapien
tgaaccagataatagtggggcagta

SEQ ID NO: 2533362 - DNA, 25 bp, Homo sapien
ctgttggacaaccagcagatccatg

SEQ ID NO: 2533363 - DNA, 25 bp, Homo sapien
tgttggacaaccagcagatccatgg

SEQ ID NO: 2533364 - DNA, 25 bp, Homo sapien
tggacaaccagcagatccatggcca

SEQ ID NO: 2533365 - DNA, 25 bp, Homo sapien
gttggacaaccagcagatccatggc

SEQ ID NO: 2533366 - DNA, 25 bp, Homo sapien
ctggttagcacaggcaaaccaggtc

SEQ ID NO: 2533367 - DNA, 25 bp, Homo sapien
tccccatttgcctggttagcacagg

SEQ ID NO: 2533368 - DNA, 25 bp, Homo sapien
tgcctggttagcacaggcaaaccag

SEQ ID NO: 2533369 - DNA, 25 bp, Homo sapien
aaagcagctccccatttgcctggtt

SEQ ID NO: 2533370 - DNA, 25 bp, Homo sapien
tgcccctggagattttagtggtgat

SEQ ID NO: 2533371 - DNA, 25 bp, Homo sapien
ggtgcccctggagattttagtggtg

SEQ ID NO: 2533372 - DNA, 25 bp, Homo sapien
cccctggagattttagtggtgatac

SEQ ID NO: 2533373 - DNA, 25 bp, Homo sapien
caggatttcaatggtgcccctggag

SEQ ID NO: 2533374 - DNA, 25 bp, Homo sapien
gtcttctcgggcccgagaccagtgt

SEQ ID NO: 2533375 - DNA, 25 bp, Homo sapien
agcctggaaaaaggaggtcttctcg

SEQ ID NO: 2533376 - DNA, 25 bp, Homo sapien
ggcaatggcaccagcacgggcagca

SEQ ID NO: 2533377 - DNA, 25 bp, Homo sapien
tggggcaatggcaccagcacgggca

SEQ ID NO: 2533378 - DNA, 25 bp, Homo sapien
cacacaacctgagaatggtccattt

SEQ ID NO: 2533379 - DNA, 25 bp, Homo sapien
aaagtctctttagccaacccaattg

SEQ ID NO: 2533380 - DNA, 25 bp, Homo sapien
caacaaagtctctttagccaaccca

SEQ ID NO: 2533381 - DNA, 25 bp, Homo sapien
cctgagaatggtccattttgcttta

SEQ ID NO: 2533382 - DNA, 25 bp, Homo sapien
tattggccagcaacatgtccctgat

SEQ ID NO: 2533383 - DNA, 25 bp, Homo sapien
ttggccagcaacatgtccctgatct

SEQ ID NO: 2533384 - DNA, 25 bp, Homo sapien
cttattggccagcaacatgtccctg

SEQ ID NO: 2533385 - DNA, 25 bp, Homo sapien
tggccagcaacatgtccctgatctc

SEQ ID NO: 2533386 - DNA, 25 bp, Homo sapien
attcccccggatatgaggcagcagt

SEQ ID NO: 2533387 - DNA, 25 bp, Homo sapien
aagcccacattcccccggatatgag

SEQ ID NO: 2533388 - DNA, 25 bp, Homo sapien
acattcccccggatatgaggcagca

SEQ ID NO: 2533389 - DNA, 25 bp, Homo sapien
ccacattcccccggatatgaggcag

SEQ ID NO: 2533390 - DNA, 25 bp, Homo sapien
gcaaagagaagtttatgggagacaa

SEQ ID NO: 2533391 - DNA, 25 bp, Homo sapien
accattctccaggaagagggagacg

SEQ ID NO: 2533392 - DNA, 25 bp, Homo sapien
tatgggagacaatcacctttcagca

SEQ ID NO: 2533393 - DNA, 25 bp, Homo sapien
gacaatcacctttcagcaccattct

SEQ ID NO: 2533394 - DNA, 25 bp, Homo sapien
ccgcgaagggacatgcggatctgct

SEQ ID NO: 2533395 - DNA, 25 bp, Homo sapien
gccttcccgcgaagggacatgcgga

SEQ ID NO: 2533396 - DNA, 25 bp, Homo sapien
caccacagccttcccgcgaagggac

SEQ ID NO: 2533397 - DNA, 25 bp, Homo sapien
cacagccttcccgcgaagggacatg

SEQ ID NO: 2533398 - DNA, 25 bp, Homo sapien
gaaacatttcggataatcatccaat

SEQ ID NO: 2533399 - DNA, 25 bp, Homo sapien
gcccacattgtctgctcccacaatg

SEQ ID NO: 2533400 - DNA, 25 bp, Homo sapien
atttcggataatcatccaatagttg

SEQ ID NO: 2533401 - DNA, 25 bp, Homo sapien
acattgtctgctcccacaatgaaac

SEQ ID NO: 2533402 - DNA, 25 bp, Homo sapien
ggcaacatgaagagcagaggcgacc

SEQ ID NO: 2533403 - DNA, 25 bp, Homo sapien
tcagtagccggtgtgagtagaccct

SEQ ID NO: 2533404 - DNA, 25 bp, Homo sapien
taaagcgcgctcttttagaagccag

SEQ ID NO: 2533405 - DNA, 25 bp, Homo sapien
tgagcccgtttatctgcaacagaag

SEQ ID NO: 2533406 - DNA, 25 bp, Homo sapien
aggtcgccctgtcttccctgggcat

SEQ ID NO: 2533407 - DNA, 25 bp, Homo sapien
ggacttccaggtcgccctgtcttcc

SEQ ID NO: 2533408 - DNA, 25 bp, Homo sapien
agtagttggacttccaggtcgccct

SEQ ID NO: 2533409 - DNA, 25 bp, Homo sapien
tgatcttaaggaagtagttggactt

SEQ ID NO: 2533410 - DNA, 25 bp, Homo sapien
ggattgccacgcagggtttaaagac

SEQ ID NO: 2533411 - DNA, 25 bp, Homo sapien
gggattgccacgcagggtttaaaga

SEQ ID NO: 2533412 - DNA, 25 bp, Homo sapien
ctcaggcctggtcacgccgacaccc

SEQ ID NO: 2533413 - DNA, 25 bp, Homo sapien
gtcacgccgacacccatcccgcggt

SEQ ID NO: 2533414 - DNA, 25 bp, Homo sapien
tggtcacgccgacacccatcccgcg

SEQ ID NO: 2533415 - DNA, 25 bp, Homo sapien
cctggtcacgccgacacccatcccg

SEQ ID NO: 2533416 - DNA, 25 bp, Homo sapien
agaggagcaggacacgcgcaatcgc

SEQ ID NO: 2533417 - DNA, 25 bp, Homo sapien
aacagaataggactccatgttccca

SEQ ID NO: 2533418 - DNA, 25 bp, Homo sapien
ctgcctagggcagcggccgtcatct

SEQ ID NO: 2533419 - DNA, 25 bp, Homo sapien
accgaggccccaggcggaacagaat

SEQ ID NO: 2533420 - DNA, 25 bp, Homo sapien
gcgcccgcgcgtgccttttataatg

SEQ ID NO: 2533421 - DNA, 25 bp, Homo sapien
caaagtagccaatcagaaaccgcgg

SEQ ID NO: 2533422 - DNA, 25 bp, Homo sapien
gatagcgctcctgtctattggctgc

SEQ ID NO: 2533423 - DNA, 25 bp, Homo sapien
tattggctgcgccatcgcccgtcag

SEQ ID NO: 2533424 - DNA, 25 bp, Homo sapien
gaagatctagggtgggtcactataa

SEQ ID NO: 2533425 - DNA, 25 bp, Homo sapien
tggactgtcaccattagaccccggt

SEQ ID NO: 2533426 - DNA, 25 bp, Homo sapien
tcactataaacagagcggtaaggcc

SEQ ID NO: 2533427 - DNA, 25 bp, Homo sapien
gccagcttggaagtttacagagaaa

SEQ ID NO: 2533428 - DNA, 25 bp, Homo sapien
gagacgtcagagtcctgatggccaa

SEQ ID NO: 2533429 - DNA, 25 bp, Homo sapien
gcttactcagacaggaagcagcccc

SEQ ID NO: 2533430 - DNA, 25 bp, Homo sapien
tctaggcccaaaagggtgcaacacc

SEQ ID NO: 2533431 - DNA, 25 bp, Homo sapien
tgatggccaaaatcagacaccagct

SEQ ID NO: 2533432 - DNA, 25 bp, Homo sapien
ggcgatatgaattcaaacctcagtg

SEQ ID NO: 2533433 - DNA, 25 bp, Homo sapien
tatcaaagtcggtacagtgtccagg

SEQ ID NO: 2533434 - DNA, 25 bp, Homo sapien
cagtcctggtgagctatgaagtgaa

SEQ ID NO: 2533435 - DNA, 25 bp, Homo sapien
ttttctcagtagaacaagagcaggt

SEQ ID NO: 2533436 - DNA, 25 bp, Homo sapien
agtcgccaggcctagggcactggaa

SEQ ID NO: 2533437 - DNA, 25 bp, Homo sapien
gggcagtcgccaggcctagggcact

SEQ ID NO: 2533438 - DNA, 25 bp, Homo sapien
aggggcagtcgccaggcctagggca

SEQ ID NO: 2533439 - DNA, 25 bp, Homo sapien
gcagtcgccaggcctagggcactgg

SEQ ID NO: 2533440 - DNA, 25 bp, Homo sapien
ccaggccagttcgtggggacgtaca

SEQ ID NO: 2533441 - DNA, 25 bp, Homo sapien
acagaacaaagacaattaggtcggg

SEQ ID NO: 2533442 - DNA, 25 bp, Homo sapien
tggatggatggatttatgctggcat

SEQ ID NO: 2533443 - DNA, 25 bp, Homo sapien
ccgggtgtcccccaataatcacaga

SEQ ID NO: 2533444 - DNA, 25 bp, Homo sapien
ccccgggtgaagtctctaggtcaca

SEQ ID NO: 2533445 - DNA, 25 bp, Homo sapien
tctctaggtcacagtcgcagttggg

SEQ ID NO: 2533446 - DNA, 25 bp, Homo sapien
gcctagggagagctacaggagggag

SEQ ID NO: 2533447 - DNA, 25 bp, Homo sapien
ccgcaccagcggaggacaagggttc

SEQ ID NO: 2533448 - DNA, 25 bp, Homo sapien
ggcagaaggcacagacgaagtgctc

SEQ ID NO: 2533449 - DNA, 25 bp, Homo sapien
gaagcagttctgacagtaaggcttg

SEQ ID NO: 2533450 - DNA, 25 bp, Homo sapien
gacagtaaggcttgtcgttctgctc

SEQ ID NO: 2533451 - DNA, 25 bp, Homo sapien
cagttctgacagtaaggcttgtcgt

SEQ ID NO: 2533452 - DNA, 25 bp, Homo sapien
cgtggtagtgcacctcacagtaggg

SEQ ID NO: 2533453 - DNA, 25 bp, Homo sapien
agccgcgccgctcgtggtagtgcac

SEQ ID NO: 2533454 - DNA, 25 bp, Homo sapien
tagggctgcccgtcgtgctcgaaga

SEQ ID NO: 2533455 - DNA, 25 bp, Homo sapien
gaagaagctgccgttcacgaatggc

SEQ ID NO: 2533456 - DNA, 25 bp, Homo sapien
gagaggggctcagggagctgcccct

SEQ ID NO: 2533457 - DNA, 25 bp, Homo sapien
ctgccaggcggagagaggggctcag

SEQ ID NO: 2533458 - DNA, 25 bp, Homo sapien
ggggctcagggagctgcccctcggg

SEQ ID NO: 2533459 - DNA, 25 bp, Homo sapien
gaggggctcagggagctgcccctcg

SEQ ID NO: 2533460 - DNA, 25 bp, Homo sapien
tcccatgtgccgtgttgtcctaaac

SEQ ID NO: 2533461 - DNA, 25 bp, Homo sapien
tacttgctaggcgtttcccatgtgc

SEQ ID NO: 2533462 - DNA, 25 bp, Homo sapien
gaaacacaggtgtgacactggtctg

SEQ ID NO: 2533463 - DNA, 25 bp, Homo sapien
gcatagtcggcacgctcggagtgac

SEQ ID NO: 2533464 - DNA, 25 bp, Homo sapien
gcctcagtacaaaccctggcccagg

SEQ ID NO: 2533465 - DNA, 25 bp, Homo sapien
aatgaggcctctgagttggatccag

SEQ ID NO: 2533466 - DNA, 25 bp, Homo sapien
ttggatccagacagcacaatgagga

SEQ ID NO: 2533467 - DNA, 25 bp, Homo sapien
catgtctaccttgctcctggtttgt

SEQ ID NO: 2533468 - DNA, 25 bp, Homo sapien
gtagtccttgcgacagtaggccttg

SEQ ID NO: 2533469 - DNA, 25 bp, Homo sapien
ccacagcgtgttgagggctgagata

SEQ ID NO: 2533470 - DNA, 25 bp, Homo sapien
gaacatgtcgaagtagtccttgcga

SEQ ID NO: 2533471 - DNA, 25 bp, Homo sapien
cgcagccgccacacttgggtgcgaa

SEQ ID NO: 2533472 - DNA, 25 bp, Homo sapien
tgccacgtccggtcaagggctgtca

SEQ ID NO: 2533473 - DNA, 25 bp, Homo sapien
tccggtcaagggctgtcaccacttt

SEQ ID NO: 2533474 - DNA, 25 bp, Homo sapien
cacagaagaagtgttcagggtgcca

SEQ ID NO: 2533475 - DNA, 25 bp, Homo sapien
aagtgttcagggtgccacgtccggt

SEQ ID NO: 2533476 - DNA, 25 bp, Homo sapien
ttcacagtagggctgtccatcccgc

SEQ ID NO: 2533477 - DNA, 25 bp, Homo sapien
gcagtgggtgcagacgaagtgctcg

SEQ ID NO: 2533478 - DNA, 25 bp, Homo sapien
gaagttccgggatccgatctcctcc

SEQ ID NO: 2533479 - DNA, 25 bp, Homo sapien
cgctcgaagaagttccgggatccga

SEQ ID NO: 2533480 - DNA, 25 bp, Homo sapien
actcctttggcgactgtggcgaccc

SEQ ID NO: 2533481 - DNA, 25 bp, Homo sapien
aggccccgcagactcctttggcgac

SEQ ID NO: 2533482 - DNA, 25 bp, Homo sapien
cccgcagactcctttggcgactgtg

SEQ ID NO: 2533483 - DNA, 25 bp, Homo sapien
gcagactcctttggcgactgtggcg

SEQ ID NO: 2533484 - DNA, 25 bp, Homo sapien
agacaagaagtacaacctcctccag

SEQ ID NO: 2533485 - DNA, 25 bp, Homo sapien
tgagctgatggagacaagaagtaca

SEQ ID NO: 2533486 - DNA, 25 bp, Homo sapien
gacagatgagctgatggagacaaga

SEQ ID NO: 2533487 - DNA, 25 bp, Homo sapien
gctgatggagacaagaagtacaacc

SEQ ID NO: 2533488 - DNA, 25 bp, Homo sapien
gcccagggagagcacgacacgcagg

SEQ ID NO: 2533489 - DNA, 25 bp, Homo sapien
gactcctggtggtcggaggggccca

SEQ ID NO: 2533490 - DNA, 25 bp, Homo sapien
cagggagagcacgacacgcaggaca

SEQ ID NO: 2533491 - DNA, 25 bp, Homo sapien
caccagggtcggaaaggctgagggc

SEQ ID NO: 2533492 - DNA, 25 bp, Homo sapien
gcccgccgtcccgaggccagccggc

SEQ ID NO: 2533493 - DNA, 25 bp, Homo sapien
agcaccgctccccatccgctctttg

SEQ ID NO: 2533494 - DNA, 25 bp, Homo sapien
agccggccgcccagcaccgctcccc

SEQ ID NO: 2533495 - DNA, 25 bp, Homo sapien
tccgctctttgctccaggccctgga

SEQ ID NO: 2533496 - DNA, 25 bp, Homo sapien
gaaagaatacaagaccttgtcactg

SEQ ID NO: 2533497 - DNA, 25 bp, Homo sapien
taaaagggaatctaggatgagatct

SEQ ID NO: 2533498 - DNA, 25 bp, Homo sapien
gaccttgtcactggactaaaaggga

SEQ ID NO: 2533499 - DNA, 25 bp, Homo sapien
ttgtcactggactaaaagggaatct

SEQ ID NO: 2533500 - DNA, 25 bp, Homo sapien
aaaaatctggagaaaaagagccctg

SEQ ID NO: 2533501 - DNA, 25 bp, Homo sapien
ctggagaaaaagagccctgagagag

SEQ ID NO: 2533502 - DNA, 25 bp, Homo sapien
ggagaaaaagagccctgagagagag

SEQ ID NO: 2533503 - DNA, 25 bp, Homo sapien
agaaaaagagccctgagagagaggc

SEQ ID NO: 2533504 - DNA, 25 bp, Homo sapien
cttctttcctcgatgggagcccggg

SEQ ID NO: 2533505 - DNA, 25 bp, Homo sapien
aaggagcagacatgggtggacccac

SEQ ID NO: 2533506 - DNA, 25 bp, Homo sapien
agaaaagcaagagggcagcggacct

SEQ ID NO: 2533507 - DNA, 25 bp, Homo sapien
gcagtactgaggaccagtcgaggaa

SEQ ID NO: 2533508 - DNA, 25 bp, Homo sapien
gagggatggagggtatctgtgtatg

SEQ ID NO: 2533509 - DNA, 25 bp, Homo sapien
gggatggctcaggcattaggacagg

SEQ ID NO: 2533510 - DNA, 25 bp, Homo sapien
ctcaggcattaggacaggggacaga

SEQ ID NO: 2533511 - DNA, 25 bp, Homo sapien
caaggtttacggcaggactgtggtt

SEQ ID NO: 2533512 - DNA, 25 bp, Homo sapien
catcggggggaagagcgggtcctca

SEQ ID NO: 2533513 - DNA, 25 bp, Homo sapien
ctgcatcggggggaagagcgggtcc

SEQ ID NO: 2533514 - DNA, 25 bp, Homo sapien
agcgggtcctcatcagtctggcagc

SEQ ID NO: 2533515 - DNA, 25 bp, Homo sapien
cacggacctcatggtgtggggtgca

SEQ ID NO: 2533516 - DNA, 25 bp, Homo sapien
cccagaagaaccacaggtataagct

SEQ ID NO: 2533517 - DNA, 25 bp, Homo sapien
gaagaaccacaggtataagctgagg

SEQ ID NO: 2533518 - DNA, 25 bp, Homo sapien
ctggaccccagaagaaccacaggta

SEQ ID NO: 2533519 - DNA, 25 bp, Homo sapien
ccacaggtataagctgagggcccca

SEQ ID NO: 2533520 - DNA, 25 bp, Homo sapien
tggttcttctcaggggaatgggaga

SEQ ID NO: 2533521 - DNA, 25 bp, Homo sapien
ttcttctcaggggaatgggagagcc

SEQ ID NO: 2533522 - DNA, 25 bp, Homo sapien
agaagccaggacagagatggttctt

SEQ ID NO: 2533523 - DNA, 25 bp, Homo sapien
agccaggacagagatggttcttctc

SEQ ID NO: 2533524 - DNA, 25 bp, Homo sapien
gagggagagcgatgaggaagaaatc

SEQ ID NO: 2533525 - DNA, 25 bp, Homo sapien
atgaggaagaaatcgccagctcagc

SEQ ID NO: 2533526 - DNA, 25 bp, Homo sapien
aggaagaaatcgccagctcagccca

SEQ ID NO: 2533527 - DNA, 25 bp, Homo sapien
gaagaaatcgccagctcagcccaca

SEQ ID NO: 2533528 - DNA, 25 bp, Homo sapien
ctgcagctccgcgatgagctgttcc

SEQ ID NO: 2533529 - DNA, 25 bp, Homo sapien
atgatgacgccctcggtcagccagt

SEQ ID NO: 2533530 - DNA, 25 bp, Homo sapien
ggctgcacagtgatgatgacgccct

SEQ ID NO: 2533531 - DNA, 25 bp, Homo sapien
ggcccgcttcccacgtggctgcaca

SEQ ID NO: 2533532 - DNA, 25 bp, Homo sapien
cagctcctcctgatcacagatcgga

SEQ ID NO: 2533533 - DNA, 25 bp, Homo sapien
cccagctcctcctgatcacagatcg

SEQ ID NO: 2533534 - DNA, 25 bp, Homo sapien
gtgtgcgtggccagactcccagctc

SEQ ID NO: 2533535 - DNA, 25 bp, Homo sapien
ggggtgtgcgtggccagactcccag

SEQ ID NO: 2533536 - DNA, 25 bp, Homo sapien
tttggggggggacagagtctcgctc

SEQ ID NO: 2533537 - DNA, 25 bp, Homo sapien
catcatgttggttcggctggtctca

SEQ ID NO: 2533538 - DNA, 25 bp, Homo sapien
ggaatacaggtgtgagccaccgtgc

SEQ ID NO: 2533539 - DNA, 25 bp, Homo sapien
atacaggtgtgagccaccgtgctca

SEQ ID NO: 2533540 - DNA, 25 bp, Homo sapien
gcctcaacaaggcaagaggtgggtt

SEQ ID NO: 2533541 - DNA, 25 bp, Homo sapien
gacaatcttgatggaaattctcccc

SEQ ID NO: 2533542 - DNA, 25 bp, Homo sapien
taataaaagtactgtcagccacggc

SEQ ID NO: 2533543 - DNA, 25 bp, Homo sapien
ggcctattgagggaccacatgctgt

SEQ ID NO: 2533544 - DNA, 25 bp, Homo sapien
ccaagcagacatgcgcagagtggga

SEQ ID NO: 2533545 - DNA, 25 bp, Homo sapien
tcaggtccggccacagtgtctcagc

SEQ ID NO: 2533546 - DNA, 25 bp, Homo sapien
atgcagttagcgaggagcggcccac

SEQ ID NO: 2533547 - DNA, 25 bp, Homo sapien
tttctgcccaagcagacatgcgcag

SEQ ID NO: 2533548 - DNA, 25 bp, Homo sapien
catgcccagcagccatgcgagctgg

SEQ ID NO: 2533549 - DNA, 25 bp, Homo sapien
gcccagcagccatgcgagctggtgc

SEQ ID NO: 2533550 - DNA, 25 bp, Homo sapien
actcagacccgccaatggccatgcc

SEQ ID NO: 2533551 - DNA, 25 bp, Homo sapien
tcagacccgccaatggccatgccca

SEQ ID NO: 2533552 - DNA, 25 bp, Homo sapien
gaggtggaaatcctctccgtggtgc

SEQ ID NO: 2533553 - DNA, 25 bp, Homo sapien
gtaggccatgttcctccgtgagagt

SEQ ID NO: 2533554 - DNA, 25 bp, Homo sapien
tggcagcttccgtggtgccctctgg

SEQ ID NO: 2533555 - DNA, 25 bp, Homo sapien
ctagctgctccgtggtaactgaggc

SEQ ID NO: 2533556 - DNA, 25 bp, Homo sapien
tgggaagatggcctgccggtccact

SEQ ID NO: 2533557 - DNA, 25 bp, Homo sapien
tatctgggaagatggcctgccggtc

SEQ ID NO: 2533558 - DNA, 25 bp, Homo sapien
ccaggtatctgggaagatggcctgc

SEQ ID NO: 2533559 - DNA, 25 bp, Homo sapien
tgccggtccactgccactacagctg

SEQ ID NO: 2533560 - DNA, 25 bp, Homo sapien
tggtcggcaggtgcctccaatctcg

SEQ ID NO: 2533561 - DNA, 25 bp, Homo sapien
aatacctccgaagcccatggctgct

SEQ ID NO: 2533562 - DNA, 25 bp, Homo sapien
ccagagagctcacttgtgatggtcg

SEQ ID NO: 2533563 - DNA, 25 bp, Homo sapien
ctctgggcacgaagggctggctggt

SEQ ID NO: 2533564 - DNA, 25 bp, Homo sapien
gaggtagaaggcctcgtccactctg

SEQ ID NO: 2533565 - DNA, 25 bp, Homo sapien
caagaccagccaaatcaagccagct

SEQ ID NO: 2533566 - DNA, 25 bp, Homo sapien
gagcagtatgaggacggagcagagc

SEQ ID NO: 2533567 - DNA, 25 bp, Homo sapien
tacaagggaactccggagtgtggcc

SEQ ID NO: 2533568 - DNA, 25 bp, Homo sapien
gggatctgactaaaaccactgctgc

SEQ ID NO: 2533569 - DNA, 25 bp, Homo sapien
acccacgtggaagtatgaagtcagc

SEQ ID NO: 2533570 - DNA, 25 bp, Homo sapien
gaaggaatgtcccagctgagcactt

SEQ ID NO: 2533571 - DNA, 25 bp, Homo sapien
cacaggctgtctgagaaaacggcag

SEQ ID NO: 2533572 - DNA, 25 bp, Homo sapien
tcgccctggttcacagtgatggcag

SEQ ID NO: 2533573 - DNA, 25 bp, Homo sapien
cttgaaatccgacagcgaagccatc

SEQ ID NO: 2533574 - DNA, 25 bp, Homo sapien
gcagaggaggccgagatgcgtgtct

SEQ ID NO: 2533575 - DNA, 25 bp, Homo sapien
tgcgggctgctcatctcgccctggt

SEQ ID NO: 2533576 - DNA, 25 bp, Homo sapien
tccagttcatccaagagactctcca

SEQ ID NO: 2533577 - DNA, 25 bp, Homo sapien
aagagactctccacactgggccgca

SEQ ID NO: 2533578 - DNA, 25 bp, Homo sapien
tcatccaagagactctccacactgg

SEQ ID NO: 2533579 - DNA, 25 bp, Homo sapien
tgggcacggagctctccagttcatc

SEQ ID NO: 2533580 - DNA, 25 bp, Homo sapien
gacaccatagagggggctcagggcc

SEQ ID NO: 2533581 - DNA, 25 bp, Homo sapien
ctgggacaccatagagggggctcag

SEQ ID NO: 2533582 - DNA, 25 bp, Homo sapien
ggacaccatagagggggctcagggc

SEQ ID NO: 2533583 - DNA, 25 bp, Homo sapien
gggacaccatagagggggctcaggg

SEQ ID NO: 2533584 - DNA, 25 bp, Homo sapien
gaagcctggcgggttatgctgtaca

SEQ ID NO: 2533585 - DNA, 25 bp, Homo sapien
tcgagttcagaaaggttgctgccca

SEQ ID NO: 2533586 - DNA, 25 bp, Homo sapien
tgtacagcgttcagttccagcagca

SEQ ID NO: 2533587 - DNA, 25 bp, Homo sapien
tgcccagggacgtgctcattacggt

SEQ ID NO: 2533588 - DNA, 25 bp, Homo sapien
ggcactggagccgtacacaggtgat

SEQ ID NO: 2533589 - DNA, 25 bp, Homo sapien
tggagacactggaagttttggcact

SEQ ID NO: 2533590 - DNA, 25 bp, Homo sapien
agcacggagagccaacactgtcctg

SEQ ID NO: 2533591 - DNA, 25 bp, Homo sapien
tcacccactcgggagcacggagagc

SEQ ID NO: 2533592 - DNA, 25 bp, Homo sapien
gggtctcctccgacaagaacacagg

SEQ ID NO: 2533593 - DNA, 25 bp, Homo sapien
gggtggcacggcaatctcctggtat

SEQ ID NO: 2533594 - DNA, 25 bp, Homo sapien
caaggattgtgccattgagggcctc

SEQ ID NO: 2533595 - DNA, 25 bp, Homo sapien
gaggtggtagactccaagtccgcca

SEQ ID NO: 2533596 - DNA, 25 bp, Homo sapien
tggcactgcgttccctcctgacagg

SEQ ID NO: 2533597 - DNA, 25 bp, Homo sapien
ccgcgcagccgcgagtgaagtgcct

SEQ ID NO: 2533598 - DNA, 25 bp, Homo sapien
ctgacagggccgcgcagccgcgagt

SEQ ID NO: 2533599 - DNA, 25 bp, Homo sapien
cagccgcgagtgaagtgcctgtctg

SEQ ID NO: 2533600 - DNA, 25 bp, Homo sapien
ttgctctcagctccccggtaacctg

SEQ ID NO: 2533601 - DNA, 25 bp, Homo sapien
tcagctccccggtaacctgctgggt

SEQ ID NO: 2533602 - DNA, 25 bp, Homo sapien
acagcttgatccctagccctcagga

SEQ ID NO: 2533603 - DNA, 25 bp, Homo sapien
ctgccccgttcacaacttgcttgct

SEQ ID NO: 2533604 - DNA, 25 bp, Homo sapien
agaggggatgtctgttccaaggccc

SEQ ID NO: 2533605 - DNA, 25 bp, Homo sapien
gaggggatgtctgttccaaggccca

SEQ ID NO: 2533606 - DNA, 25 bp, Homo sapien
caggaccccgggtctggtcgcctga

SEQ ID NO: 2533607 - DNA, 25 bp, Homo sapien
ccaggaccccgggtctggtcgcctg

SEQ ID NO: 2533608 - DNA, 25 bp, Homo sapien
ttataagggctagcaggtacactgg

SEQ ID NO: 2533609 - DNA, 25 bp, Homo sapien
ccaaggctggatgaagtgacaatgc

SEQ ID NO: 2533610 - DNA, 25 bp, Homo sapien
cacaatgtgattctaagcctgggct

SEQ ID NO: 2533611 - DNA, 25 bp, Homo sapien
ggaggaagctccatagcacattgga

SEQ ID NO: 2533612 - DNA, 25 bp, Homo sapien
cgtggtccctgcccacctttgccat

SEQ ID NO: 2533613 - DNA, 25 bp, Homo sapien
gccagggccccgtggtccctgccca

SEQ ID NO: 2533614 - DNA, 25 bp, Homo sapien
ccgtggtccctgcccacctttgcca

SEQ ID NO: 2533615 - DNA, 25 bp, Homo sapien
ccagcgccagggccccgtggtccct

SEQ ID NO: 2533616 - DNA, 25 bp, Homo sapien
cctgcattcgtggtgtgggaagctc

SEQ ID NO: 2533617 - DNA, 25 bp, Homo sapien
gacgcaagtgccaagaaaggagtcc

SEQ ID NO: 2533618 - DNA, 25 bp, Homo sapien
cacctgttaagacactgggaccaga

SEQ ID NO: 2533619 - DNA, 25 bp, Homo sapien
gaactacgtggtttcaggtccagct

SEQ ID NO: 2533620 - DNA, 25 bp, Homo sapien
ttcacaaacacatagtgtgcacggg

SEQ ID NO: 2533621 - DNA, 25 bp, Homo sapien
gatggctccaatcgcgttcacaaac

SEQ ID NO: 2533622 - DNA, 25 bp, Homo sapien
ctttactagtgatggctccaatcgc

SEQ ID NO: 2533623 - DNA, 25 bp, Homo sapien
caaacacatagtgtgcacgggcact

SEQ ID NO: 2533624 - DNA, 25 bp, Homo sapien
cagagagactttgcacagataaagc

SEQ ID NO: 2533625 - DNA, 25 bp, Homo sapien
ttcctgccacatgagcatgcggctc

SEQ ID NO: 2533626 - DNA, 25 bp, Homo sapien
caaaccctcatggaaatgcccttca

SEQ ID NO: 2533627 - DNA, 25 bp, Homo sapien
gggtcagcctaagcaggttatcaga

SEQ ID NO: 2533628 - DNA, 25 bp, Homo sapien
ctcaaagacgcattgtgcctgatga

SEQ ID NO: 2533629 - DNA, 25 bp, Homo sapien
gagggctgccaagtcgtgtctctga

SEQ ID NO: 2533630 - DNA, 25 bp, Homo sapien
catccactgcttgggacagaggacc

SEQ ID NO: 2533631 - DNA, 25 bp, Homo sapien
agtgatgagaaactgccttagccgg

SEQ ID NO: 2533632 - DNA, 25 bp, Homo sapien
cgccggctcagggtcgcgctagctg

SEQ ID NO: 2533633 - DNA, 25 bp, Homo sapien
agggtcgcgctagctgcccgtcccg

SEQ ID NO: 2533634 - DNA, 25 bp, Homo sapien
gggccgctcgtctatgccccgcaac

SEQ ID NO: 2533635 - DNA, 25 bp, Homo sapien
cttttccgccgcgagcctcggcccg

SEQ ID NO: 2533636 - DNA, 25 bp, Homo sapien
ccgggtagaggcactcctcccagat

SEQ ID NO: 2533637 - DNA, 25 bp, Homo sapien
ggccgggtagaggcactcctcccag

SEQ ID NO: 2533638 - DNA, 25 bp, Homo sapien
cagaggcgcccacttcacagacggg

SEQ ID NO: 2533639 - DNA, 25 bp, Homo sapien
ggcagaggcgcccacttcacagacg

SEQ ID NO: 2533640 - DNA, 25 bp, Homo sapien
ccgggcagaggctgtaatcttagca

SEQ ID NO: 2533641 - DNA, 25 bp, Homo sapien
atcccagacagggtggcggccaggc

SEQ ID NO: 2533642 - DNA, 25 bp, Homo sapien
cctcgcctcccagacagggtggcag

SEQ ID NO: 2533643 - DNA, 25 bp, Homo sapien
tcgcctcccagacagggtggcagcc

SEQ ID NO: 2533644 - DNA, 25 bp, Homo sapien
gcccagtcaacagggcgaaaccgtg

SEQ ID NO: 2533645 - DNA, 25 bp, Homo sapien
atcaactttattgggctaagtgcag

SEQ ID NO: 2533646 - DNA, 25 bp, Homo sapien
cgaaaccgtgtctcctccaaatata

SEQ ID NO: 2533647 - DNA, 25 bp, Homo sapien
caacagaaggagaccgaagaaagaa

SEQ ID NO: 2533648 - DNA, 25 bp, Homo sapien
cataacactgaacgatgtaggtaac

SEQ ID NO: 2533649 - DNA, 25 bp, Homo sapien
caacggaaaattatgtagccacaga

SEQ ID NO: 2533650 - DNA, 25 bp, Homo sapien
gctcaaatgtactgaaacgaaacag

SEQ ID NO: 2533651 - DNA, 25 bp, Homo sapien
taagatacttatacaggccggcgcg

SEQ ID NO: 2533652 - DNA, 25 bp, Homo sapien
gaggtgaagaatgcagtgtgccact

SEQ ID NO: 2533653 - DNA, 25 bp, Homo sapien
aagaatgcagtgtgccactatactc

SEQ ID NO: 2533654 - DNA, 25 bp, Homo sapien
aggaggtgaagaatgcagtgtgcca

SEQ ID NO: 2533655 - DNA, 25 bp, Homo sapien
ggtgaagaatgcagtgtgccactat

SEQ ID NO: 2533656 - DNA, 25 bp, Homo sapien
tgtcactactggacgggtgtggtgg

SEQ ID NO: 2533657 - DNA, 25 bp, Homo sapien
atgtcactactggacgggtgtggtg

SEQ ID NO: 2533658 - DNA, 25 bp, Homo sapien
aatgtcactactggacgggtgtggt

SEQ ID NO: 2533659 - DNA, 25 bp, Homo sapien
aaatgtcactactggacgggtgtgg

SEQ ID NO: 2533660 - DNA, 25 bp, Homo sapien
ggaccacggccaacctcgagcgcac

SEQ ID NO: 2533661 - DNA, 25 bp, Homo sapien
gagcaagtccttgttccaaaaaaga

SEQ ID NO: 2533662 - DNA, 25 bp, Homo sapien
agaaagagaggagcgcagcactgcc

SEQ ID NO: 2533663 - DNA, 25 bp, Homo sapien
gagcgcagcactgccgcctggcccc

SEQ ID NO: 2533664 - DNA, 25 bp, Homo sapien
tcatcaagcgcttcgagcagaaggg

SEQ ID NO: 2533665 - DNA, 25 bp, Homo sapien
gcctggtgggcaagatcatcaagcg

SEQ ID NO: 2533666 - DNA, 25 bp, Homo sapien
aagtacatgaactcagggccggtcg

SEQ ID NO: 2533667 - DNA, 25 bp, Homo sapien
tgaacgtcgtgaagacaggccgagt

SEQ ID NO: 2533668 - DNA, 25 bp, Homo sapien
gcagcagtctccttcagcacggtgt

SEQ ID NO: 2533669 - DNA, 25 bp, Homo sapien
gaggcaacaggattgatcattcttt

SEQ ID NO: 2533670 - DNA, 25 bp, Homo sapien
gaaatcagcctacggtttaagcctg

SEQ ID NO: 2533671 - DNA, 25 bp, Homo sapien
cattctactgacttagaggcaacag

SEQ ID NO: 2533672 - DNA, 25 bp, Homo sapien
actaaactacaaaagtagctgggcg

SEQ ID NO: 2533673 - DNA, 25 bp, Homo sapien
gggtgacagactgaaactccagctc

SEQ ID NO: 2533674 - DNA, 25 bp, Homo sapien
tgggtgacagactgaaactccagct

SEQ ID NO: 2533675 - DNA, 25 bp, Homo sapien
tctctactaaactacaaaagtagct

SEQ ID NO: 2533676 - DNA, 25 bp, Homo sapien
aatctctggccggtcgtggtggctc

SEQ ID NO: 2533677 - DNA, 25 bp, Homo sapien
atgcctgtaatcccagcactttggg

SEQ ID NO: 2533678 - DNA, 25 bp, Homo sapien
caggtggatcaggaggtcagatcaa

SEQ ID NO: 2533679 - DNA, 25 bp, Homo sapien
gaccatcctggctaacacggtgaaa

SEQ ID NO: 2533680 - DNA, 25 bp, Homo sapien
aatgccgactatatttcaagtcgtc

SEQ ID NO: 2533681 - DNA, 25 bp, Homo sapien
gactatatttcaagtcgtcatggcg

SEQ ID NO: 2533682 - DNA, 25 bp, Homo sapien
gccgactatatttcaagtcgtcatg

SEQ ID NO: 2533683 - DNA, 25 bp, Homo sapien
tatatttcaagtcgtcatggcgggg

SEQ ID NO: 2533684 - DNA, 25 bp, Homo sapien
ttgcaagtcgtcacggcggggtatt

SEQ ID NO: 2533685 - DNA, 25 bp, Homo sapien
tattgcaagtcgtcacggcggggta

SEQ ID NO: 2533686 - DNA, 25 bp, Homo sapien
ctatattgcaagtcgtcacggcggg

SEQ ID NO: 2533687 - DNA, 25 bp, Homo sapien
gactatattgcaagtcgtcacggcg

SEQ ID NO: 2533688 - DNA, 25 bp, Homo sapien
ttgcacaggggtcatactaacctct

SEQ ID NO: 2533689 - DNA, 25 bp, Homo sapien
tgcacaggggtcatactaacctctg

SEQ ID NO: 2533690 - DNA, 25 bp, Homo sapien
tcttgcacaggggtcatactaacct

SEQ ID NO: 2533691 - DNA, 25 bp, Homo sapien
cacaggggtcatactaacctctgta

SEQ ID NO: 2533692 - DNA, 25 bp, Homo sapien
tgctgactttataggcacgagctac

SEQ ID NO: 2533693 - DNA, 25 bp, Homo sapien
agtgctgactttataggcacgagct

SEQ ID NO: 2533694 - DNA, 25 bp, Homo sapien
ctgactttataggcacgagctacca

SEQ ID NO: 2533695 - DNA, 25 bp, Homo sapien
gctgactttataggcacgagctacc

SEQ ID NO: 2533696 - DNA, 25 bp, Homo sapien
cacaaccctatgataagagcactat

SEQ ID NO: 2533697 - DNA, 25 bp, Homo sapien
tggacacttaattcccacaacccta

SEQ ID NO: 2533698 - DNA, 25 bp, Homo sapien
caagcacttaggaagcatttacaca

SEQ ID NO: 2533699 - DNA, 25 bp, Homo sapien
gagcactattatttcgggtaacctg

SEQ ID NO: 2533700 - DNA, 25 bp, Homo sapien
tattggagagtacagtgtgagatga

SEQ ID NO: 2533701 - DNA, 25 bp, Homo sapien
gatagaggtgatgcttttgagaggt

SEQ ID NO: 2533702 - DNA, 25 bp, Homo sapien
acaaggtgctttattggagagtaca

SEQ ID NO: 2533703 - DNA, 25 bp, Homo sapien
aggcagatagaggtgatgcttttga

SEQ ID NO: 2533704 - DNA, 25 bp, Homo sapien
cagatggcagcgttgcggtcgcagt

SEQ ID NO: 2533705 - DNA, 25 bp, Homo sapien
aaaagcagatggcagcgttgcggtc

SEQ ID NO: 2533706 - DNA, 25 bp, Homo sapien
gcggtcgcagttgcaaatgaaggcc

SEQ ID NO: 2533707 - DNA, 25 bp, Homo sapien
ttgcggtcgcagttgcaaatgaagg

SEQ ID NO: 2533708 - DNA, 25 bp, Homo sapien
gcaggtttcttgtcttagttgcaaa

SEQ ID NO: 2533709 - DNA, 25 bp, Homo sapien
gaggatgtataagcaaattaagcca

SEQ ID NO: 2533710 - DNA, 25 bp, Homo sapien
tgaacaaacatcctctaatgcaggt

SEQ ID NO: 2533711 - DNA, 25 bp, Homo sapien
tggacttccaaagtactgtggttac

SEQ ID NO: 2533712 - DNA, 25 bp, Homo sapien
gaaaatagacagtaatcggccaggc

SEQ ID NO: 2533713 - DNA, 25 bp, Homo sapien
aatagacagtaatcggccaggcaca

SEQ ID NO: 2533714 - DNA, 25 bp, Homo sapien
aaatagacagtaatcggccaggcac

SEQ ID NO: 2533715 - DNA, 25 bp, Homo sapien
aagaaaatagacagtaatcggccag

SEQ ID NO: 2533716 - DNA, 25 bp, Homo sapien
gccagagcacgagtatgaataggtg

SEQ ID NO: 2533717 - DNA, 25 bp, Homo sapien
gcctggtcatagcagttgtcatgtg

SEQ ID NO: 2533718 - DNA, 25 bp, Homo sapien
taggtgtgggtgtacgggttgtcca

SEQ ID NO: 2533719 - DNA, 25 bp, Homo sapien
tgctacaggtgattgccgagccaga

SEQ ID NO: 2533720 - DNA, 25 bp, Homo sapien
tattcagaaggtgcagtgacaacca

SEQ ID NO: 2533721 - DNA, 25 bp, Homo sapien
tcgtgagatccttggcgtgtgcccc

SEQ ID NO: 2533722 - DNA, 25 bp, Homo sapien
aagtcccctttgtatgcctcgtgag

SEQ ID NO: 2533723 - DNA, 25 bp, Homo sapien
ggtgcgttcgctacagggtcctctt

SEQ ID NO: 2533724 - DNA, 25 bp, Homo sapien
cagccgtagttgttgtattccaaga

SEQ ID NO: 2533725 - DNA, 25 bp, Homo sapien
ccgagggctgatgccgctgtcggcg

SEQ ID NO: 2533726 - DNA, 25 bp, Homo sapien
tgtccagttcatccacgggggtgcc

SEQ ID NO: 2533727 - DNA, 25 bp, Homo sapien
cgcacttgatcattttgcggaactg

SEQ ID NO: 2533728 - DNA, 25 bp, Homo sapien
agttcaaatcggtctgccagcaccc

SEQ ID NO: 2533729 - DNA, 25 bp, Homo sapien
gccagagttcaaatcggtctgccag

SEQ ID NO: 2533730 - DNA, 25 bp, Homo sapien
ctgcaagaagacatagccagagttc

SEQ ID NO: 2533731 - DNA, 25 bp, Homo sapien
gcaagaagacatagccagagttcaa

SEQ ID NO: 2533732 - DNA, 25 bp, Homo sapien
gcagcacagctagcacaaggagttt

SEQ ID NO: 2533733 - DNA, 25 bp, Homo sapien
ctgtgagcagcacagctagcacaag

SEQ ID NO: 2533734 - DNA, 25 bp, Homo sapien
gagcagcacagctagcacaaggagt

SEQ ID NO: 2533735 - DNA, 25 bp, Homo sapien
tgagcagcacagctagcacaaggag

SEQ ID NO: 2533736 - DNA, 25 bp, Homo sapien
aggtgagaaaagaactgagatgacc

SEQ ID NO: 2533737 - DNA, 25 bp, Homo sapien
cttgcagtcaaggtgagaaaagaac

SEQ ID NO: 2533738 - DNA, 25 bp, Homo sapien
ggtgagaaaagaactgagatgacca

SEQ ID NO: 2533739 - DNA, 25 bp, Homo sapien
gcagtcaaggtgagaaaagaactga

SEQ ID NO: 2533740 - DNA, 25 bp, Homo sapien
tgggcaggtccaaccaaggccttga

SEQ ID NO: 2533741 - DNA, 25 bp, Homo sapien
cactgttcatgaaggtccaacgctc

SEQ ID NO: 2533742 - DNA, 25 bp, Homo sapien
catgaagccccaacctaggtaggga

SEQ ID NO: 2533743 - DNA, 25 bp, Homo sapien
tgtccagcagtgtcgctgggcaagc

SEQ ID NO: 2533744 - DNA, 25 bp, Homo sapien
gcctgagagagcgggcctgccgtgg

SEQ ID NO: 2533745 - DNA, 25 bp, Homo sapien
gagagagcgggcctgccgtggccac

SEQ ID NO: 2533746 - DNA, 25 bp, Homo sapien
ctgagagagcgggcctgccgtggcc

SEQ ID NO: 2533747 - DNA, 25 bp, Homo sapien
ggcctgagagagcgggcctgccgtg

SEQ ID NO: 2533748 - DNA, 25 bp, Homo sapien
gccttcactccagctatgcacaaat

SEQ ID NO: 2533749 - DNA, 25 bp, Homo sapien
gggcccacacccagatagacacttt

SEQ ID NO: 2533750 - DNA, 25 bp, Homo sapien
tatgatacaggacgggatggttcca

SEQ ID NO: 2533751 - DNA, 25 bp, Homo sapien
ggcacatcacctcacagtatttaca

SEQ ID NO: 2533752 - DNA, 25 bp, Homo sapien
tacccattggtgaaggctgtggcaa

SEQ ID NO: 2533753 - DNA, 25 bp, Homo sapien
tgaaggctgtggcaatcaaagggcc

SEQ ID NO: 2533754 - DNA, 25 bp, Homo sapien
cattggtgaaggctgtggcaatcaa

SEQ ID NO: 2533755 - DNA, 25 bp, Homo sapien
agtggtacccattggtgaaggctgt

SEQ ID NO: 2533756 - DNA, 25 bp, Homo sapien
tgaaaaggaaagaatttgactccta

SEQ ID NO: 2533757 - DNA, 25 bp, Homo sapien
aggaaagaatttgactcctagattc

SEQ ID NO: 2533758 - DNA, 25 bp, Homo sapien
aaaggaaagaatttgactcctagat

SEQ ID NO: 2533759 - DNA, 25 bp, Homo sapien
ctgaaaaggaaagaatttgactcct

SEQ ID NO: 2533760 - DNA, 25 bp, Homo sapien
tgatgtaactgctgacccccgagtc

SEQ ID NO: 2533761 - DNA, 25 bp, Homo sapien
cgagtcctggttggccgccccgtag

SEQ ID NO: 2533762 - DNA, 25 bp, Homo sapien
gactgtggccgaagccggtgctggg

SEQ ID NO: 2533763 - DNA, 25 bp, Homo sapien
ccaggaagccccctgtgcggctggg

SEQ ID NO: 2533764 - DNA, 25 bp, Homo sapien
tgccgccgccattggtccgtaggca

SEQ ID NO: 2533765 - DNA, 25 bp, Homo sapien
ccgccgccattggtccgtaggcagt

SEQ ID NO: 2533766 - DNA, 25 bp, Homo sapien
gccgccattggtccgtaggcagtga

SEQ ID NO: 2533767 - DNA, 25 bp, Homo sapien
cgccattggtccgtaggcagtgaga

SEQ ID NO: 2533768 - DNA, 25 bp, Homo sapien
ttgggccacaccatctgtgtcctga

SEQ ID NO: 2533769 - DNA, 25 bp, Homo sapien
tgggccacaccatctgtgtcctgac

SEQ ID NO: 2533770 - DNA, 25 bp, Homo sapien
cttgggccacaccatctgtgtcctg

SEQ ID NO: 2533771 - DNA, 25 bp, Homo sapien
agaagctgcgaaggttgcccgcagc

SEQ ID NO: 2533772 - DNA, 25 bp, Homo sapien
gctgcgaaggttgcccgcagctgcc

SEQ ID NO: 2533773 - DNA, 25 bp, Homo sapien
gatgcccttggcaaaacagggatca

SEQ ID NO: 2533774 - DNA, 25 bp, Homo sapien
ggcaaaacagggatcacttggccca

SEQ ID NO: 2533775 - DNA, 25 bp, Homo sapien
tccacacatggccaggttgagggga

SEQ ID NO: 2533776 - DNA, 25 bp, Homo sapien
cacacatggccaggttgaggggaga

SEQ ID NO: 2533777 - DNA, 25 bp, Homo sapien
cttccacacatggccaggttgaggg

SEQ ID NO: 2533778 - DNA, 25 bp, Homo sapien
gtcttccacacatggccaggttgag

SEQ ID NO: 2533779 - DNA, 25 bp, Homo sapien
ctcgggagaggggtccgctctacac

SEQ ID NO: 2533780 - DNA, 25 bp, Homo sapien
gggcgctcgggagaggggtccgctc

SEQ ID NO: 2533781 - DNA, 25 bp, Homo sapien
agaggggtccgctctacacggaatt

SEQ ID NO: 2533782 - DNA, 25 bp, Homo sapien
tcggggaggactggggcgctcggga

SEQ ID NO: 2533783 - DNA, 25 bp, Homo sapien
tataactccggctggcgtaggttgt

SEQ ID NO: 2533784 - DNA, 25 bp, Homo sapien
gcctgtataactccggctggcgtag

SEQ ID NO: 2533785 - DNA, 25 bp, Homo sapien
gggcgaggcctgtataactccggct

SEQ ID NO: 2533786 - DNA, 25 bp, Homo sapien
tggcgtaggttgtggcttggaaacc

SEQ ID NO: 2533787 - DNA, 25 bp, Homo sapien
tccgtagggcatgactcgagacctc

SEQ ID NO: 2533788 - DNA, 25 bp, Homo sapien
ttggcgacatcacctcctttggctg

SEQ ID NO: 2533789 - DNA, 25 bp, Homo sapien
tgaaggcgtccattccgtagggcat

SEQ ID NO: 2533790 - DNA, 25 bp, Homo sapien
cgggctgagcccgttggcgacatca

SEQ ID NO: 2533791 - DNA, 25 bp, Homo sapien
acactttctccacgatgtcctcact

SEQ ID NO: 2533792 - DNA, 25 bp, Homo sapien
gatttcatgaaaatgaatttcacac

SEQ ID NO: 2533793 - DNA, 25 bp, Homo sapien
tttcacacactttctccacgatgtc

SEQ ID NO: 2533794 - DNA, 25 bp, Homo sapien
ttgttgttgatttcatgaaaatgaa

SEQ ID NO: 2533795 - DNA, 25 bp, Homo sapien
caaacatcagcatggcgtcgtccac

SEQ ID NO: 2533796 - DNA, 25 bp, Homo sapien
cccaaactgctcaaaatattgcttc

SEQ ID NO: 2533797 - DNA, 25 bp, Homo sapien
caaaatattgcttcacgtcctccac

SEQ ID NO: 2533798 - DNA, 25 bp, Homo sapien
tccaccgtggtgttcaccgacagcc

SEQ ID NO: 2533799 - DNA, 25 bp, Homo sapien
cgtcctccaccgtggtgttcaccga

SEQ ID NO: 2533800 - DNA, 25 bp, Homo sapien
gagagcattgagaaagcagccacag

SEQ ID NO: 2533801 - DNA, 25 bp, Homo sapien
agaactcgccagagcagcagggtaa

SEQ ID NO: 2533802 - DNA, 25 bp, Homo sapien
agagcattgagaaagcagccacaga

SEQ ID NO: 2533803 - DNA, 25 bp, Homo sapien
gagcagcagggtaagagagcattga

SEQ ID NO: 2533804 - DNA, 25 bp, Homo sapien
tgctcgccgagggaaggccacctta

SEQ ID NO: 2533805 - DNA, 25 bp, Homo sapien
ctcgccgagggaaggccaccttagg

SEQ ID NO: 2533806 - DNA, 25 bp, Homo sapien
ctgtgctcgccgagggaaggccacc

SEQ ID NO: 2533807 - DNA, 25 bp, Homo sapien
cttgggctgtgctcgccgagggaag

SEQ ID NO: 2533808 - DNA, 25 bp, Homo sapien
caagatgcatctgggtgtactcctg

SEQ ID NO: 2533809 - DNA, 25 bp, Homo sapien
aagatgcatctgggtgtactcctgg

SEQ ID NO: 2533810 - DNA, 25 bp, Homo sapien
atcaagatgcatctgggtgtactcc

SEQ ID NO: 2533811 - DNA, 25 bp, Homo sapien
aaatcaagatgcatctgggtgtact

SEQ ID NO: 2533812 - DNA, 25 bp, Homo sapien
tcttcccctttatcaatcttccact

SEQ ID NO: 2533813 - DNA, 25 bp, Homo sapien
tcccctttatcaatcttccactcct

SEQ ID NO: 2533814 - DNA, 25 bp, Homo sapien
ctcttcccctttatcaatcttccac

SEQ ID NO: 2533815 - DNA, 25 bp, Homo sapien
ccctttatcaatcttccactcctcc

SEQ ID NO: 2533816 - DNA, 25 bp, Homo sapien
cctggtccatgaaagtgacgaagcc

SEQ ID NO: 2533817 - DNA, 25 bp, Homo sapien
gcgattgcgccagcactttatccac

SEQ ID NO: 2533818 - DNA, 25 bp, Homo sapien
agtcgagctcgtgccgcgattgcgc

SEQ ID NO: 2533819 - DNA, 25 bp, Homo sapien
catgaaagtgacgaagccgaaaccc

SEQ ID NO: 2533820 - DNA, 25 bp, Homo sapien
cccgaactggccgaagtattcgcgc

SEQ ID NO: 2533821 - DNA, 25 bp, Homo sapien
tggccgaagtattcgcgcagccctt

SEQ ID NO: 2533822 - DNA, 25 bp, Homo sapien
agacactccttcacctccccgaact

SEQ ID NO: 2533823 - DNA, 25 bp, Homo sapien
cacctccccgaactggccgaagtat

SEQ ID NO: 2533824 - DNA, 25 bp, Homo sapien
actgagtcccccgatgaacatcttg

SEQ ID NO: 2533825 - DNA, 25 bp, Homo sapien
tgccaactgagtcccccgatgaaca

SEQ ID NO: 2533826 - DNA, 25 bp, Homo sapien
gccaactgagtcccccgatgaacat

SEQ ID NO: 2533827 - DNA, 25 bp, Homo sapien
caactgagtcccccgatgaacatct

SEQ ID NO: 2533828 - DNA, 25 bp, Homo sapien
cgtgcggcgagtccggggaggcgag

SEQ ID NO: 2533829 - DNA, 25 bp, Homo sapien
ggtcgtgcggcgagtccggggaggc

SEQ ID NO: 2533830 - DNA, 25 bp, Homo sapien
caggggtcgtgcggcgagtccgggg

SEQ ID NO: 2533831 - DNA, 25 bp, Homo sapien
cgggctggggcgcgtcagtctccat

SEQ ID NO: 2533832 - DNA, 25 bp, Homo sapien
cgggagccgcgggcggcgcgggcag

SEQ ID NO: 2533833 - DNA, 25 bp, Homo sapien
cgcgggcggcgcgggcagcggagcg

SEQ ID NO: 2533834 - DNA, 25 bp, Homo sapien
ggcggcgcgggcagcggagcggcgg

SEQ ID NO: 2533835 - DNA, 25 bp, Homo sapien
gggagccgcgggcggcgcgggcagc

SEQ ID NO: 2533836 - DNA, 25 bp, Homo sapien
tatccaagccttaggacccttcact

SEQ ID NO: 2533837 - DNA, 25 bp, Homo sapien
ctgggggtctcagtgccacacaagc

SEQ ID NO: 2533838 - DNA, 25 bp, Homo sapien
tattcccacctctccatatccaagc

SEQ ID NO: 2533839 - DNA, 25 bp, Homo sapien
gggtctcagtgccacacaagcccct

SEQ ID NO: 2533840 - DNA, 25 bp, Homo sapien
catccggtgtaatccagtgacaacc

SEQ ID NO: 2533841 - DNA, 25 bp, Homo sapien
ttaatccatccggtgtaatccagtg

SEQ ID NO: 2533842 - DNA, 25 bp, Homo sapien
tccatccggtgtaatccagtgacaa

SEQ ID NO: 2533843 - DNA, 25 bp, Homo sapien
ccggtgtaatccagtgacaacccat

SEQ ID NO: 2533844 - DNA, 25 bp, Homo sapien
gccctgggtcggtggccacctgctt

SEQ ID NO: 2533845 - DNA, 25 bp, Homo sapien
tcacgtgatctttcgggaagaaaag

SEQ ID NO: 2533846 - DNA, 25 bp, Homo sapien
gtcggtggccacctgcttttgggta

SEQ ID NO: 2533847 - DNA, 25 bp, Homo sapien
cacgtgatctttcgggaagaaaagg

SEQ ID NO: 2533848 - DNA, 25 bp, Homo sapien
cacaagggcattgacaggatggcag

SEQ ID NO: 2533849 - DNA, 25 bp, Homo sapien
gagaacaagcactgagcgggtgcat

SEQ ID NO: 2533850 - DNA, 25 bp, Homo sapien
ggatggcagagagaacaagcactga

SEQ ID NO: 2533851 - DNA, 25 bp, Homo sapien
ctcacaagggcattgacaggatggc

SEQ ID NO: 2533852 - DNA, 25 bp, Homo sapien
actgctcagggacgccagggaacct

SEQ ID NO: 2533853 - DNA, 25 bp, Homo sapien
tacgattccactgatacgaagttca

SEQ ID NO: 2533854 - DNA, 25 bp, Homo sapien
taatactgagcgaaagaagctagac

SEQ ID NO: 2533855 - DNA, 25 bp, Homo sapien
ggtggatactgctcaactgctcagg

SEQ ID NO: 2533856 - DNA, 25 bp, Homo sapien
ccaactggctacgaagatgaataaa

SEQ ID NO: 2533857 - DNA, 25 bp, Homo sapien
aagagaatctggaccactacccggg

SEQ ID NO: 2533858 - DNA, 25 bp, Homo sapien
ggtttggaccgttactctgcacatg

SEQ ID NO: 2533859 - DNA, 25 bp, Homo sapien
aagtatatgggaccttaagctcacc

SEQ ID NO: 2533860 - DNA, 25 bp, Homo sapien
taattcctgaactgcacactgagag

SEQ ID NO: 2533861 - DNA, 25 bp, Homo sapien
taatctgacacctcttgtgaaggca

SEQ ID NO: 2533862 - DNA, 25 bp, Homo sapien
gattacagacattacagggcaggat

SEQ ID NO: 2533863 - DNA, 25 bp, Homo sapien
tatgtaaagctgattccacgccaag

SEQ ID NO: 2533864 - DNA, 25 bp, Homo sapien
tccttcaataggaatctctttctcc

SEQ ID NO: 2533865 - DNA, 25 bp, Homo sapien
gagtttagggtgaacaccaaatgaa

SEQ ID NO: 2533866 - DNA, 25 bp, Homo sapien
ctgccccaatatttgtcattcggag

SEQ ID NO: 2533867 - DNA, 25 bp, Homo sapien
cttgcgagtttagggtgaacaccaa

SEQ ID NO: 2533868 - DNA, 25 bp, Homo sapien
tcattcggagagacacccaagtggc

SEQ ID NO: 2533869 - DNA, 25 bp, Homo sapien
gcgattgaagcactggtcgtactcg

SEQ ID NO: 2533870 - DNA, 25 bp, Homo sapien
ggagctgtcccccttgagaaatttc

SEQ ID NO: 2533871 - DNA, 25 bp, Homo sapien
tctcggcgaaccagcgattgaagca

SEQ ID NO: 2533872 - DNA, 25 bp, Homo sapien
ccttgagaaatttctcggcgaacca

SEQ ID NO: 2533873 - DNA, 25 bp, Homo sapien
ccgtgcatgcctcccccacactgtt

SEQ ID NO: 2533874 - DNA, 25 bp, Homo sapien
gtgcatgcctcccccacactgttca

SEQ ID NO: 2533875 - DNA, 25 bp, Homo sapien
tgcatgcctcccccacactgttcat

SEQ ID NO: 2533876 - DNA, 25 bp, Homo sapien
gtccgtgcatgcctcccccacactg

SEQ ID NO: 2533877 - DNA, 25 bp, Homo sapien
tggtggcggcggcgacgacggcgca

SEQ ID NO: 2533878 - DNA, 25 bp, Homo sapien
ggcgacagtggtggcggcggcgacg

SEQ ID NO: 2533879 - DNA, 25 bp, Homo sapien
gtggcggcggcgacgacggcgcact

SEQ ID NO: 2533880 - DNA, 25 bp, Homo sapien
agtggtggcggcggcgacgacggcg

SEQ ID NO: 2533881 - DNA, 25 bp, Homo sapien
aatttccggtctctttaagagcctg

SEQ ID NO: 2533882 - DNA, 25 bp, Homo sapien
attgcaaatttccggtctctttaag

SEQ ID NO: 2533883 - DNA, 25 bp, Homo sapien
cattgcaaatttccggtctctttaa

SEQ ID NO: 2533884 - DNA, 25 bp, Homo sapien
atttccggtctctttaagagcctga

SEQ ID NO: 2533885 - DNA, 25 bp, Homo sapien
ggtcctgtaacagacttcaactttc

SEQ ID NO: 2533886 - DNA, 25 bp, Homo sapien
ttgttgtgtctagctttgggctggg

SEQ ID NO: 2533887 - DNA, 25 bp, Homo sapien
tgccaggtcctgtaacagacttcaa

SEQ ID NO: 2533888 - DNA, 25 bp, Homo sapien
aaaagatcatacttgttcaaggcca

SEQ ID NO: 2533889 - DNA, 25 bp, Homo sapien
catccttgaacagtgacatcagcta

SEQ ID NO: 2533890 - DNA, 25 bp, Homo sapien
gattcatgctgctatacgtgccagg

SEQ ID NO: 2533891 - DNA, 25 bp, Homo sapien
tcggtcaatctataaactgtaggct

SEQ ID NO: 2533892 - DNA, 25 bp, Homo sapien
gatgtgctactcacgcaggctggac

SEQ ID NO: 2533893 - DNA, 25 bp, Homo sapien
gacaacttagttatcatgtgtggcc

SEQ ID NO: 2533894 - DNA, 25 bp, Homo sapien
tgacatgattcaaacgccattaggg

SEQ ID NO: 2533895 - DNA, 25 bp, Homo sapien
tctgtgcccattcaaagcaggagga

SEQ ID NO: 2533896 - DNA, 25 bp, Homo sapien
gccattagggtctgccctcagtctg

SEQ ID NO: 2533897 - DNA, 25 bp, Homo sapien
gtcttgaactggtgatctacccgcc

SEQ ID NO: 2533898 - DNA, 25 bp, Homo sapien
tagtcttgaactggtgatctacccg

SEQ ID NO: 2533899 - DNA, 25 bp, Homo sapien
agtcttgaactggtgatctacccgc

SEQ ID NO: 2533900 - DNA, 25 bp, Homo sapien
gctgagtagctcattctggaaaggg

SEQ ID NO: 2533901 - DNA, 25 bp, Homo sapien
tactgtgaatactaatgttcctgct

SEQ ID NO: 2533902 - DNA, 25 bp, Homo sapien
tgtgaacatgtggaagcataatgac

SEQ ID NO: 2533903 - DNA, 25 bp, Homo sapien
tgccaaagctggatgaacaagagcc

SEQ ID NO: 2533904 - DNA, 25 bp, Homo sapien
aaaaaagtgatagaatcagagagtt

SEQ ID NO: 2533905 - DNA, 25 bp, Homo sapien
gtgatagaatcagagagtttttcct

SEQ ID NO: 2533906 - DNA, 25 bp, Homo sapien
caaactgccaaagttggttttggct

SEQ ID NO: 2533907 - DNA, 25 bp, Homo sapien
tggctaagaatttcccaataatatt

SEQ ID NO: 2533908 - DNA, 25 bp, Homo sapien
taactgggactacatatgtgcatca

SEQ ID NO: 2533909 - DNA, 25 bp, Homo sapien
actacatatgtgcatcaccacgtcc

SEQ ID NO: 2533910 - DNA, 25 bp, Homo sapien
aagtaactgggactacatatgtgca

SEQ ID NO: 2533911 - DNA, 25 bp, Homo sapien
gactacatatgtgcatcaccacgtc

SEQ ID NO: 2533912 - DNA, 25 bp, Homo sapien
tccaagagcgggttctgggttctct

SEQ ID NO: 2533913 - DNA, 25 bp, Homo sapien
cacagatttcaccaaataggcacac

SEQ ID NO: 2533914 - DNA, 25 bp, Homo sapien
aacttgtacccagttaggagcaggg

SEQ ID NO: 2533915 - DNA, 25 bp, Homo sapien
gggatagacagttgctctgatgttg

SEQ ID NO: 2533916 - DNA, 25 bp, Homo sapien
tggtttgagaacgtaaactccaaga

SEQ ID NO: 2533917 - DNA, 25 bp, Homo sapien
gagttgtagtcataacttgtaccca

SEQ ID NO: 2533918 - DNA, 25 bp, Homo sapien
tggagtttacgttctcaaaccaaca

SEQ ID NO: 2533919 - DNA, 25 bp, Homo sapien
agagaacccagaacccgctcttgga

SEQ ID NO: 2533920 - DNA, 25 bp, Homo sapien
cagagcaactgtctatccccatata

SEQ ID NO: 2533921 - DNA, 25 bp, Homo sapien
ggtacaagttatgactacaactcag

SEQ ID NO: 2533922 - DNA, 25 bp, Homo sapien
ccctgctcctaactgggtacaagtt

SEQ ID NO: 2533923 - DNA, 25 bp, Homo sapien
aatcaaggacaaccacacatgtcaa

SEQ ID NO: 2533924 - DNA, 25 bp, Homo sapien
tctaccagggccatattagcagtga

SEQ ID NO: 2533925 - DNA, 25 bp, Homo sapien
taccagggccatattagcagtgaaa

SEQ ID NO: 2533926 - DNA, 25 bp, Homo sapien
tttttaggttaactgagctgctttg

SEQ ID NO: 2533927 - DNA, 25 bp, Homo sapien
gccatattagcagtgaaacatttta

SEQ ID NO: 2533928 - DNA, 25 bp, Homo sapien
gggccatattagcagtgaaacattt

SEQ ID NO: 2533929 - DNA, 25 bp, Homo sapien
ccagggccatattagcagtgaaaca

SEQ ID NO: 2533930 - DNA, 25 bp, Homo sapien
caaagcagctcagttaacctaaaaa

SEQ ID NO: 2533931 - DNA, 25 bp, Homo sapien
aaatgtttcactgctaatatggccc

SEQ ID NO: 2533932 - DNA, 25 bp, Homo sapien
tcactgctaatatggccctggtaga

SEQ ID NO: 2533933 - DNA, 25 bp, Homo sapien
taaaatgtttcactgctaatatggc

SEQ ID NO: 2533934 - DNA, 25 bp, Homo sapien
acaaagcagctcagttaacctaaaa

SEQ ID NO: 2533935 - DNA, 25 bp, Homo sapien
tgtttcactgctaatatggccctgg

SEQ ID NO: 2533936 - DNA, 25 bp, Homo sapien
tacatccgagtttatcctgagagaa

SEQ ID NO: 2533937 - DNA, 25 bp, Homo sapien
cgtgactctccataccaaagcaggg

SEQ ID NO: 2533938 - DNA, 25 bp, Homo sapien
gaagcaccagctatggctactcacg

SEQ ID NO: 2533939 - DNA, 25 bp, Homo sapien
caaagcaggggttccccacactact

SEQ ID NO: 2533940 - DNA, 25 bp, Homo sapien
ctcacggtctcggtctgggtcaagg

SEQ ID NO: 2533941 - DNA, 25 bp, Homo sapien
tatggctactcacggtctcggtctg

SEQ ID NO: 2533942 - DNA, 25 bp, Homo sapien
ccgagaccgtgagtagccatagctg

SEQ ID NO: 2533943 - DNA, 25 bp, Homo sapien
tctctcaggataaactcggatgtag

SEQ ID NO: 2533944 - DNA, 25 bp, Homo sapien
gggaacccctgctttggtatggaga

SEQ ID NO: 2533945 - DNA, 25 bp, Homo sapien
ttgacccagaccgagaccgtgagta

SEQ ID NO: 2533946 - DNA, 25 bp, Homo sapien
ctttggtatggagagtcacggcccc

SEQ ID NO: 2533947 - DNA, 25 bp, Homo sapien
taaactcggatgtaggaagtttcac

SEQ ID NO: 2533948 - DNA, 25 bp, Homo sapien
tatgacccctgagatcctttccagt

SEQ ID NO: 2533949 - DNA, 25 bp, Homo sapien
ggtttaatgagatagcctcatgcca

SEQ ID NO: 2533950 - DNA, 25 bp, Homo sapien
ttgaaatgggatagtaagagtacct

SEQ ID NO: 2533951 - DNA, 25 bp, Homo sapien
ggattaaactatatgacccctgaga

SEQ ID NO: 2533952 - DNA, 25 bp, Homo sapien
tgagtatcaacatgtcaaattggca

SEQ ID NO: 2533953 - DNA, 25 bp, Homo sapien
tcatgccaggcacagagtacacagt

SEQ ID NO: 2533954 - DNA, 25 bp, Homo sapien
gacttaagttatatcatttgcccaa

SEQ ID NO: 2533955 - DNA, 25 bp, Homo sapien
atatatctgaattactgccattgac

SEQ ID NO: 2533956 - DNA, 25 bp, Homo sapien
tggcatgaggctatctcattaaacc

SEQ ID NO: 2533957 - DNA, 25 bp, Homo sapien
gccaatttgacatgttgatactcaa

SEQ ID NO: 2533958 - DNA, 25 bp, Homo sapien
aggtaacacaataaatgccaatttg

SEQ ID NO: 2533959 - DNA, 25 bp, Homo sapien
actgtgtactctgtgcctggcatga

SEQ ID NO: 2533960 - DNA, 25 bp, Homo sapien
cctgccttactatgagatttacgga

SEQ ID NO: 2533961 - DNA, 25 bp, Homo sapien
aagcatccggcttctttccccttgg

SEQ ID NO: 2533962 - DNA, 25 bp, Homo sapien
aagcagggcctcagaaagggtaact

SEQ ID NO: 2533963 - DNA, 25 bp, Homo sapien
gggtaactccaattactgactttca

SEQ ID NO: 2533964 - DNA, 25 bp, Homo sapien
tcctcagttatactgcaaagcaggg

SEQ ID NO: 2533965 - DNA, 25 bp, Homo sapien
taaggtgaaaaagcatccggcttct

SEQ ID NO: 2533966 - DNA, 25 bp, Homo sapien
ccctgctttgcagtataactgagga

SEQ ID NO: 2533967 - DNA, 25 bp, Homo sapien
tgaaagtcagtaattggagttaccc

SEQ ID NO: 2533968 - DNA, 25 bp, Homo sapien
caaaagcatcattaaaccagggaag

SEQ ID NO: 2533969 - DNA, 25 bp, Homo sapien
agaagccggatgctttttcacctta

SEQ ID NO: 2533970 - DNA, 25 bp, Homo sapien
caaattcaagtcctagaggacagtc

SEQ ID NO: 2533971 - DNA, 25 bp, Homo sapien
tccgtaaatctcatagtaaggcagg

SEQ ID NO: 2533972 - DNA, 25 bp, Homo sapien
tcacagtaccataagagatctatct

SEQ ID NO: 2533973 - DNA, 25 bp, Homo sapien
tatcttaggtggacaaagccatgga

SEQ ID NO: 2533974 - DNA, 25 bp, Homo sapien
catgccatttggtaacctcacagta

SEQ ID NO: 2533975 - DNA, 25 bp, Homo sapien
cttgccttctgttgaggagcttgta

SEQ ID NO: 2533976 - DNA, 25 bp, Homo sapien
ttgaacctgacctagcagaggtagc

SEQ ID NO: 2533977 - DNA, 25 bp, Homo sapien
gagcttgtactcaaatcactccact

SEQ ID NO: 2533978 - DNA, 25 bp, Homo sapien
tccatggctttgtccacctaagata

SEQ ID NO: 2533979 - DNA, 25 bp, Homo sapien
gatagatctcttatggtactgtgag

SEQ ID NO: 2533980 - DNA, 25 bp, Homo sapien
tactgtgaggttaccaaatggcatg

SEQ ID NO: 2533981 - DNA, 25 bp, Homo sapien
tacaagctcctcaacagaaggcaag

SEQ ID NO: 2533982 - DNA, 25 bp, Homo sapien
gctacctctgctaggtcaggttcaa

SEQ ID NO: 2533983 - DNA, 25 bp, Homo sapien
agtggagtgatttgagtacaagctc

SEQ ID NO: 2533984 - DNA, 25 bp, Homo sapien
tgacaccaaattccgctctcatgag

SEQ ID NO: 2533985 - DNA, 25 bp, Homo sapien
ccctgcgtaaactggatgacaccaa

SEQ ID NO: 2533986 - DNA, 25 bp, Homo sapien
ctggatgacaccaaattccgctctc

SEQ ID NO: 2533987 - DNA, 25 bp, Homo sapien
ttggtgtcatccagtttacgcaggg

SEQ ID NO: 2533988 - DNA, 25 bp, Homo sapien
ctcatgagagcggaatttggtgtca

SEQ ID NO: 2533989 - DNA, 25 bp, Homo sapien
gagagcggaatttggtgtcatccag

SEQ ID NO: 2533990 - DNA, 25 bp, Homo sapien
gaaaaggcctggtctctggaagatg

SEQ ID NO: 2533991 - DNA, 25 bp, Homo sapien
gatgtgggctttcttatgttctcca

SEQ ID NO: 2533992 - DNA, 25 bp, Homo sapien
tattgctggctcttaacagggcagt

SEQ ID NO: 2533993 - DNA, 25 bp, Homo sapien
cttaaaaccagcttctcaaggtggt

SEQ ID NO: 2533994 - DNA, 25 bp, Homo sapien
tactaaacctgtaatgggatggact

SEQ ID NO: 2533995 - DNA, 25 bp, Homo sapien
gggaccctcaggatttaagtgatca

SEQ ID NO: 2533996 - DNA, 25 bp, Homo sapien
tgatcacttaaatcctgagggtccc

SEQ ID NO: 2533997 - DNA, 25 bp, Homo sapien
catggagaacataagaaagcccaca

SEQ ID NO: 2533998 - DNA, 25 bp, Homo sapien
gcaagaagtccatcccattacaggt

SEQ ID NO: 2533999 - DNA, 25 bp, Homo sapien
tgttaagagccagcaatacctatgg

SEQ ID NO: 2534000 - DNA, 25 bp, Homo sapien
tcatcttccagagaccaggcctttt

SEQ ID NO: 2534001 - DNA, 25 bp, Homo sapien
ggtaaatgaaccaccttgagaagct

SEQ ID NO: 2534002 - DNA, 25 bp, Homo sapien
tcctgagctgtgagcggtaaacaca

SEQ ID NO: 2534003 - DNA, 25 bp, Homo sapien
tcccatgtgcttaagagtgatactc

SEQ ID NO: 2534004 - DNA, 25 bp, Homo sapien
catcaggtagggttgtatgactccc

SEQ ID NO: 2534005 - DNA, 25 bp, Homo sapien
gggccttctgcatattgcatgggag

SEQ ID NO: 2534006 - DNA, 25 bp, Homo sapien
gaaataaatcgaggagcctggcacc

SEQ ID NO: 2534007 - DNA, 25 bp, Homo sapien
gtatgactcccgactagttttagca

SEQ ID NO: 2534008 - DNA, 25 bp, Homo sapien
ccatgcaatatgcagaaggccccag

SEQ ID NO: 2534009 - DNA, 25 bp, Homo sapien
gagtatcactcttaagcacatggga

SEQ ID NO: 2534010 - DNA, 25 bp, Homo sapien
gggagtcatacaaccctacctgatg

SEQ ID NO: 2534011 - DNA, 25 bp, Homo sapien
tgtgtttaccgctcacagctcagga

SEQ ID NO: 2534012 - DNA, 25 bp, Homo sapien
ttttgaagatagataaacctcccag

SEQ ID NO: 2534013 - DNA, 25 bp, Homo sapien
taatgtatgacatcctgaaggaggg

SEQ ID NO: 2534014 - DNA, 25 bp, Homo sapien
tgtgtgaagccttgccctggattgc

SEQ ID NO: 2534015 - DNA, 25 bp, Homo sapien
tatacttggcatcagacatggtaga

SEQ ID NO: 2534016 - DNA, 25 bp, Homo sapien
cctgcaaatgaaattgcgctgggag

SEQ ID NO: 2534017 - DNA, 25 bp, Homo sapien
gatgatgggaaaacttgagctacaa

SEQ ID NO: 2534018 - DNA, 25 bp, Homo sapien
ggagtgcagccttggaagaacataa

SEQ ID NO: 2534019 - DNA, 25 bp, Homo sapien
gatttgaacaacttacccagccttg

SEQ ID NO: 2534020 - DNA, 25 bp, Homo sapien
gaattgtagctcaagttttcccatc

SEQ ID NO: 2534021 - DNA, 25 bp, Homo sapien
tcccatgcactgaagaataacagct

SEQ ID NO: 2534022 - DNA, 25 bp, Homo sapien
gcaatccagggcaaggcttcacaca

SEQ ID NO: 2534023 - DNA, 25 bp, Homo sapien
tctaccatgtctgatgccaagtata

SEQ ID NO: 2534024 - DNA, 25 bp, Homo sapien
tcttcaggatccaaggctgggtaag

SEQ ID NO: 2534025 - DNA, 25 bp, Homo sapien
ttatgttcttccaaggctgcactcc

SEQ ID NO: 2534026 - DNA, 25 bp, Homo sapien
ggcctcctacaagaagatctgattt

SEQ ID NO: 2534027 - DNA, 25 bp, Homo sapien
tacaagaagatctgatttccgagtt

SEQ ID NO: 2534028 - DNA, 25 bp, Homo sapien
tcctacaagaagatctgatttccga

SEQ ID NO: 2534029 - DNA, 25 bp, Homo sapien
tgggcctcctacaagaagatctgat

SEQ ID NO: 2534030 - DNA, 25 bp, Homo sapien
gaatgggcctcctacaagaagatct

SEQ ID NO: 2534031 - DNA, 25 bp, Homo sapien
gaggaatgggcctcctacaagaaga

SEQ ID NO: 2534032 - DNA, 25 bp, Homo sapien
aactcggaaatcagatcttcttgta

SEQ ID NO: 2534033 - DNA, 25 bp, Homo sapien
gatcttcttgtaggaggcccattcc

SEQ ID NO: 2534034 - DNA, 25 bp, Homo sapien
cggaaatcagatcttcttgtaggag

SEQ ID NO: 2534035 - DNA, 25 bp, Homo sapien
aaatcagatcttcttgtaggaggcc

SEQ ID NO: 2534036 - DNA, 25 bp, Homo sapien
tcagatcttcttgtaggaggcccat

SEQ ID NO: 2534037 - DNA, 25 bp, Homo sapien
tcttcttgtaggaggcccattcctc

SEQ ID NO: 2534038 - DNA, 25 bp, Homo sapien
ccagtgtcggcttcgtgtggagttc

SEQ ID NO: 2534039 - DNA, 25 bp, Homo sapien
tatgattatggccagtgtcggcttc

SEQ ID NO: 2534040 - DNA, 25 bp, Homo sapien
atgattatggccagtgtcggcttcg

SEQ ID NO: 2534041 - DNA, 25 bp, Homo sapien
tgattatggccagtgtcggcttcgt

SEQ ID NO: 2534042 - DNA, 25 bp, Homo sapien
ttatggccagtgtcggcttcgtgtg

SEQ ID NO: 2534043 - DNA, 25 bp, Homo sapien
gattatggccagtgtcggcttcgtg

SEQ ID NO: 2534044 - DNA, 25 bp, Homo sapien
cgaagccgacactggccataatcat

SEQ ID NO: 2534045 - DNA, 25 bp, Homo sapien
cacgaagccgacactggccataatc

SEQ ID NO: 2534046 - DNA, 25 bp, Homo sapien
cacacgaagccgacactggccataa

SEQ ID NO: 2534047 - DNA, 25 bp, Homo sapien
gaagccgacactggccataatcata

SEQ ID NO: 2534048 - DNA, 25 bp, Homo sapien
acacgaagccgacactggccataat

SEQ ID NO: 2534049 - DNA, 25 bp, Homo sapien
gaactccacacgaagccgacactgg

SEQ ID NO: 2534050 - DNA, 25 bp, Homo sapien
gctgaaaaggtacacttagagttcc

SEQ ID NO: 2534051 - DNA, 25 bp, Homo sapien
acttagagttccaaggccaggcgca

SEQ ID NO: 2534052 - DNA, 25 bp, Homo sapien
tacacttagagttccaaggccaggc

SEQ ID NO: 2534053 - DNA, 25 bp, Homo sapien
gactctcctagagtcctaggaaaga

SEQ ID NO: 2534054 - DNA, 25 bp, Homo sapien
ccatgctgaaaaggtacacttagag

SEQ ID NO: 2534055 - DNA, 25 bp, Homo sapien
ggtacacttagagttccaaggccag

SEQ ID NO: 2534056 - DNA, 25 bp, Homo sapien
tgcgcctggccttggaactctaagt

SEQ ID NO: 2534057 - DNA, 25 bp, Homo sapien
gcctggccttggaactctaagtgta

SEQ ID NO: 2534058 - DNA, 25 bp, Homo sapien
tctaagtgtaccttttcagcatggt

SEQ ID NO: 2534059 - DNA, 25 bp, Homo sapien
gaactctaagtgtaccttttcagca

SEQ ID NO: 2534060 - DNA, 25 bp, Homo sapien
tctttcctaggactctaggagagtc

SEQ ID NO: 2534061 - DNA, 25 bp, Homo sapien
tggccttggaactctaagtgtacct

SEQ ID NO: 2534062 - DNA, 25 bp, Homo sapien
ccctcttctgtttttcgaatgcaaa

SEQ ID NO: 2534063 - DNA, 25 bp, Homo sapien
acgccaggccgggatcaatggattt

SEQ ID NO: 2534064 - DNA, 25 bp, Homo sapien
gccaggccgggatcaatggatttga

SEQ ID NO: 2534065 - DNA, 25 bp, Homo sapien
tttcgaatgcaaacttactatatga

SEQ ID NO: 2534066 - DNA, 25 bp, Homo sapien
ctatatgatacgctacattgtcatc

SEQ ID NO: 2534067 - DNA, 25 bp, Homo sapien
tactatatgatacgctacattgtca

SEQ ID NO: 2534068 - DNA, 25 bp, Homo sapien
aaatccattgatcccggcctggcgt

SEQ ID NO: 2534069 - DNA, 25 bp, Homo sapien
caatgtagcgtatcatatagtaagt

SEQ ID NO: 2534070 - DNA, 25 bp, Homo sapien
tttgcattcgaaaaacagaagaggg

SEQ ID NO: 2534071 - DNA, 25 bp, Homo sapien
tcaaatccattgatcccggcctggc

SEQ ID NO: 2534072 - DNA, 25 bp, Homo sapien
gatgacaatgtagcgtatcatatag

SEQ ID NO: 2534073 - DNA, 25 bp, Homo sapien
catatagtaagtttgcattcgaaaa

SEQ ID NO: 2534074 - DNA, 25 bp, Homo sapien
ttcgcgccgtcgtcacttcctttat

SEQ ID NO: 2534075 - DNA, 25 bp, Homo sapien
cccctcacgggtggaggatgaggca

SEQ ID NO: 2534076 - DNA, 25 bp, Homo sapien
caggcccgggccgtccttcgcgccg

SEQ ID NO: 2534077 - DNA, 25 bp, Homo sapien
ctctcctcctcggtgcctgaggccc

SEQ ID NO: 2534078 - DNA, 25 bp, Homo sapien
tcgcgccgtcgtcacttcctttatt

SEQ ID NO: 2534079 - DNA, 25 bp, Homo sapien
ccctcacgggtggaggatgaggcag

SEQ ID NO: 2534080 - DNA, 25 bp, Homo sapien
aataaaggaagtgacgacggcgcga

SEQ ID NO: 2534081 - DNA, 25 bp, Homo sapien
gggcctcaggcaccgaggaggagag

SEQ ID NO: 2534082 - DNA, 25 bp, Homo sapien
tgagggggcgccgtgaggggtctgc

SEQ ID NO: 2534083 - DNA, 25 bp, Homo sapien
cggcgcgaaggacggcccgggcctg

SEQ ID NO: 2534084 - DNA, 25 bp, Homo sapien
ctgcctcatcctccacccgtgaggg

SEQ ID NO: 2534085 - DNA, 25 bp, Homo sapien
ataaaggaagtgacgacggcgcgaa

SEQ ID NO: 2534086 - DNA, 25 bp, Homo sapien
cacggcctcgtgcccttcgccttcg

SEQ ID NO: 2534087 - DNA, 25 bp, Homo sapien
gcacggcctcgtgcccttcgccttc

SEQ ID NO: 2534088 - DNA, 25 bp, Homo sapien
cgaaggcgaagggcacgaggccgtg

SEQ ID NO: 2534089 - DNA, 25 bp, Homo sapien
gaaggcgaagggcacgaggccgtgc

SEQ ID NO: 2534090 - DNA, 25 bp, Homo sapien
gttctacaagtacggccgcatccgc

SEQ ID NO: 2534091 - DNA, 25 bp, Homo sapien
ttggaggacctgttctacaagtacg

SEQ ID NO: 2534092 - DNA, 25 bp, Homo sapien
ccttcgccttcgtgcgcttcgagga

SEQ ID NO: 2534093 - DNA, 25 bp, Homo sapien
cgagatcgagctcaagaaccggcac

SEQ ID NO: 2534094 - DNA, 25 bp, Homo sapien
gcacggcctcgtgcccttcgccttc

SEQ ID NO: 2534095 - DNA, 25 bp, Homo sapien
gcatccgcgagatcgagctcaagaa

SEQ ID NO: 2534096 - DNA, 25 bp, Homo sapien
aggccgtgccggttcttgagctcga

SEQ ID NO: 2534097 - DNA, 25 bp, Homo sapien
gtcctcgaagcgcacgaaggcgaag

SEQ ID NO: 2534098 - DNA, 25 bp, Homo sapien
cgatctcgcggatgcggccgtactt

SEQ ID NO: 2534099 - DNA, 25 bp, Homo sapien
cgtacttgtagaacaggtcctccaa

SEQ ID NO: 2534100 - DNA, 25 bp, Homo sapien
gaaggcgaagggcacgaggccgtgc

SEQ ID NO: 2534101 - DNA, 25 bp, Homo sapien
cggttcttgagctcgatctcgcgga

SEQ ID NO: 2534102 - DNA, 25 bp, Homo sapien
gctgggcggacgagcgcggcggcga

SEQ ID NO: 2534103 - DNA, 25 bp, Homo sapien
tcgggctgggcggacgagcgcggcg

SEQ ID NO: 2534104 - DNA, 25 bp, Homo sapien
cgggcgcatctacgtggggaacctt

SEQ ID NO: 2534105 - DNA, 25 bp, Homo sapien
ggaaccttccgaccgacgtgcgcga

SEQ ID NO: 2534106 - DNA, 25 bp, Homo sapien
gcgcatctacgtggggaaccttccg

SEQ ID NO: 2534107 - DNA, 25 bp, Homo sapien
gcggcgagggcgacgggcgcatcta

SEQ ID NO: 2534108 - DNA, 25 bp, Homo sapien
ggaaggttccccacgtagatgcgcc

SEQ ID NO: 2534109 - DNA, 25 bp, Homo sapien
aaggttccccacgtagatgcgcccg

SEQ ID NO: 2534110 - DNA, 25 bp, Homo sapien
cggaaggttccccacgtagatgcgc

SEQ ID NO: 2534111 - DNA, 25 bp, Homo sapien
tcgccgccgcgctcgtccgcccagc

SEQ ID NO: 2534112 - DNA, 25 bp, Homo sapien
aggttccccacgtagatgcgcccgt

SEQ ID NO: 2534113 - DNA, 25 bp, Homo sapien
tcgcgcacgtcggtcggaaggttcc

SEQ ID NO: 2534114 - DNA, 25 bp, Homo sapien
ggggacccgtgctgaggcggcggcg

SEQ ID NO: 2534115 - DNA, 25 bp, Homo sapien
cgggcccgcggcgtcgggcggtgcg

SEQ ID NO: 2534116 - DNA, 25 bp, Homo sapien
acgctgcggggggacccgtgctgag

SEQ ID NO: 2534117 - DNA, 25 bp, Homo sapien
ggctgagcgcctcggagcccgcggg

SEQ ID NO: 2534118 - DNA, 25 bp, Homo sapien
cggcgacgtgggctgcggcgggccc

SEQ ID NO: 2534119 - DNA, 25 bp, Homo sapien
gcgacgtgggctgcggcgggcccgc

SEQ ID NO: 2534120 - DNA, 25 bp, Homo sapien
ctcagcacgggtccccccgcagcgt

SEQ ID NO: 2534121 - DNA, 25 bp, Homo sapien
cgcaccgcccgacgccgcgggcccg

SEQ ID NO: 2534122 - DNA, 25 bp, Homo sapien
cgccgccgcctcagcacgggtcccc

SEQ ID NO: 2534123 - DNA, 25 bp, Homo sapien
ccgcagcgtccccgcgggctccgag

SEQ ID NO: 2534124 - DNA, 25 bp, Homo sapien
tccccgcgggctccgaggcgctcag

SEQ ID NO: 2534125 - DNA, 25 bp, Homo sapien
gggcccgccgcagcccacgtcgccg

SEQ ID NO: 2534126 - DNA, 25 bp, Homo sapien
tcgcagccgcgttctctttaagagg

SEQ ID NO: 2534127 - DNA, 25 bp, Homo sapien
gcacgcgcaatggtcgcagccgcgt

SEQ ID NO: 2534128 - DNA, 25 bp, Homo sapien
ggtcgcagccgcgttctctttaaga

SEQ ID NO: 2534129 - DNA, 25 bp, Homo sapien
gcgcaatggtcgcagccgcgttctc

SEQ ID NO: 2534130 - DNA, 25 bp, Homo sapien
gaggactccttttgcctccgccgac

SEQ ID NO: 2534131 - DNA, 25 bp, Homo sapien
gcaatggtcgcagccgcgttctctt

SEQ ID NO: 2534132 - DNA, 25 bp, Homo sapien
agagaacgcggctgcgaccattgcg

SEQ ID NO: 2534133 - DNA, 25 bp, Homo sapien
aacgcggctgcgaccattgcgcgtg

SEQ ID NO: 2534134 - DNA, 25 bp, Homo sapien
gtcggcggaggcaaaaggagtcctc

SEQ ID NO: 2534135 - DNA, 25 bp, Homo sapien
ctcttaaagagaacgcggctgcgac

SEQ ID NO: 2534136 - DNA, 25 bp, Homo sapien
tcttaaagagaacgcggctgcgacc

SEQ ID NO: 2534137 - DNA, 25 bp, Homo sapien
cctcttaaagagaacgcggctgcga

SEQ ID NO: 2534138 - DNA, 25 bp, Homo sapien
tatcctataggcatccgaaagtcca

SEQ ID NO: 2534139 - DNA, 25 bp, Homo sapien
atatcctataggcatccgaaagtcc

SEQ ID NO: 2534140 - DNA, 25 bp, Homo sapien
tcctataggcatccgaaagtccaga

SEQ ID NO: 2534141 - DNA, 25 bp, Homo sapien
tataggcatccgaaagtccagatgc

SEQ ID NO: 2534142 - DNA, 25 bp, Homo sapien
tctggaagcctgtgtccctttcctt

SEQ ID NO: 2534143 - DNA, 25 bp, Homo sapien
ggccttcaggatgtgcctgaagcag

SEQ ID NO: 2534144 - DNA, 25 bp, Homo sapien
tgtctggaagcctgtgtccctttcc

SEQ ID NO: 2534145 - DNA, 25 bp, Homo sapien
tcaggatgtgcctgaagcagcttct

SEQ ID NO: 2534146 - DNA, 25 bp, Homo sapien
ggatagtctttctggtgaactccca

SEQ ID NO: 2534147 - DNA, 25 bp, Homo sapien
cgtctgtttaattcacaggtcccca

SEQ ID NO: 2534148 - DNA, 25 bp, Homo sapien
caaccaaatggaagcgatgcatagg

SEQ ID NO: 2534149 - DNA, 25 bp, Homo sapien
tcctgttcaagagtgtttggagccc

SEQ ID NO: 2534150 - DNA, 25 bp, Homo sapien
accgcccctggccgcatgggctata

SEQ ID NO: 2534151 - DNA, 25 bp, Homo sapien
ccaccgcccctggccgcatgggcta

SEQ ID NO: 2534152 - DNA, 25 bp, Homo sapien
ccctggccgcatgggctataaagaa

SEQ ID NO: 2534153 - DNA, 25 bp, Homo sapien
cgcccctggccgcatgggctataaa

SEQ ID NO: 2534154 - DNA, 25 bp, Homo sapien
attacacatgtgcagtatttactgg

SEQ ID NO: 2534155 - DNA, 25 bp, Homo sapien
tacacatgtgcagtatttactgggt

SEQ ID NO: 2534156 - DNA, 25 bp, Homo sapien
ttacacatgtgcagtatttactggg

SEQ ID NO: 2534157 - DNA, 25 bp, Homo sapien
tggccgcagaagacagtccacgtgt

SEQ ID NO: 2534158 - DNA, 25 bp, Homo sapien
cgttatctaggtttgcccaggcaca

SEQ ID NO: 2534159 - DNA, 25 bp, Homo sapien
gacaaactcaggattgcacgtgacc

SEQ ID NO: 2534160 - DNA, 25 bp, Homo sapien
gacttacaagactccaaaggtctgg

SEQ ID NO: 2534161 - DNA, 25 bp, Homo sapien
ggactgctgcaatagcctctaactg

SEQ ID NO: 2534162 - DNA, 25 bp, Homo sapien
ctcaaatggtgccttctcagagagg

SEQ ID NO: 2534163 - DNA, 25 bp, Homo sapien
tgcagtagccaggtcatcaagtctt

SEQ ID NO: 2534164 - DNA, 25 bp, Homo sapien
tactccgccctcagtggtgatctca

SEQ ID NO: 2534165 - DNA, 25 bp, Homo sapien
ctacaggtgcacgctgccacgccca

SEQ ID NO: 2534166 - DNA, 25 bp, Homo sapien
acaggtgcacgctgccacgcccagc

SEQ ID NO: 2534167 - DNA, 25 bp, Homo sapien
caatctgcccgccttggcctcccaa

SEQ ID NO: 2534168 - DNA, 25 bp, Homo sapien
aatctgcccgccttggcctcccaaa

SEQ ID NO: 2534169 - DNA, 25 bp, Homo sapien
tgaggtcacctactgagtcacagag

SEQ ID NO: 2534170 - DNA, 25 bp, Homo sapien
tcttagtctacaccggagctagccg

SEQ ID NO: 2534171 - DNA, 25 bp, Homo sapien
cccaaaaggtgaatagtgccaaggt

SEQ ID NO: 2534172 - DNA, 25 bp, Homo sapien
agaggccttgttagctcctagagca

SEQ ID NO: 2534173 - DNA, 25 bp, Homo sapien
tgcagtacagtccttggctccaaag

SEQ ID NO: 2534174 - DNA, 25 bp, Homo sapien
gaagcttccggattcagacctaggc

SEQ ID NO: 2534175 - DNA, 25 bp, Homo sapien
catggcttagtagggacagatgcac

SEQ ID NO: 2534176 - DNA, 25 bp, Homo sapien
ggttccagaaagctagacaagtgat

SEQ ID NO: 2534177 - DNA, 25 bp, Homo sapien
agacagctgggtggtcctcgtaacc

SEQ ID NO: 2534178 - DNA, 25 bp, Homo sapien
gacagctgggtggtcctcgtaaccc

SEQ ID NO: 2534179 - DNA, 25 bp, Homo sapien
ccagacagctgggtggtcctcgtaa

SEQ ID NO: 2534180 - DNA, 25 bp, Homo sapien
cagctgggtggtcctcgtaacccgg

SEQ ID NO: 2534181 - DNA, 25 bp, Homo sapien
gcaaccgacgccgtgagcggtgcat

SEQ ID NO: 2534182 - DNA, 25 bp, Homo sapien
ggcctcgtagcgtgcggcccattgc

SEQ ID NO: 2534183 - DNA, 25 bp, Homo sapien
gggtgtgtgggcctcgtagcgtgcg

SEQ ID NO: 2534184 - DNA, 25 bp, Homo sapien
attgcccgggcaaccgacgccgtga

SEQ ID NO: 2534185 - DNA, 25 bp, Homo sapien
cccaggagaccgttgcagtcggcca

SEQ ID NO: 2534186 - DNA, 25 bp, Homo sapien
cgttgcagtcggccagcccccttct

SEQ ID NO: 2534187 - DNA, 25 bp, Homo sapien
ggagaccgttgcagtcggccagccc

SEQ ID NO: 2534188 - DNA, 25 bp, Homo sapien
caggagaccgttgcagtcggccagc

SEQ ID NO: 2534189 - DNA, 25 bp, Homo sapien
tcaggcgctggagaaatacaacata

SEQ ID NO: 2534190 - DNA, 25 bp, Homo sapien
gacattgcggctcatatcaagaagg

SEQ ID NO: 2534191 - DNA, 25 bp, Homo sapien
caacaggactcggtggagtgcgcta

SEQ ID NO: 2534192 - DNA, 25 bp, Homo sapien
tgtgcgaccgaaaggccgtgatcaa

SEQ ID NO: 2534193 - DNA, 25 bp, Homo sapien
gaacatctcgatgtttgaacctttg

SEQ ID NO: 2534194 - DNA, 25 bp, Homo sapien
cctttgttgtgttttgtacagggca

SEQ ID NO: 2534195 - DNA, 25 bp, Homo sapien
gggcattctctgtactagtttgtcg

SEQ ID NO: 2534196 - DNA, 25 bp, Homo sapien
ttttcagccttgctaagggaacatc

SEQ ID NO: 2534197 - DNA, 25 bp, Homo sapien
taaatgatccttactgtgctgggtc

SEQ ID NO: 2534198 - DNA, 25 bp, Homo sapien
tagaagctttttagtgacagggcaa

SEQ ID NO: 2534199 - DNA, 25 bp, Homo sapien
caagatcttgtaagtgaaggcacgt

SEQ ID NO: 2534200 - DNA, 25 bp, Homo sapien
caggaagcagcgtatctgaagccct

SEQ ID NO: 2534201 - DNA, 25 bp, Homo sapien
cgtcctaggctgaaaggttgattca

SEQ ID NO: 2534202 - DNA, 25 bp, Homo sapien
tgacttgggcctagacttcgtccta

SEQ ID NO: 2534203 - DNA, 25 bp, Homo sapien
caaggcacgtatccttaagaggaga

SEQ ID NO: 2534204 - DNA, 25 bp, Homo sapien
gattcaaacatgagtccaaggcacg

SEQ ID NO: 2534205 - DNA, 25 bp, Homo sapien
aagtcaccttgtgaaagcctgcatc

SEQ ID NO: 2534206 - DNA, 25 bp, Homo sapien
ggccacaatgcctgatgttagactt

SEQ ID NO: 2534207 - DNA, 25 bp, Homo sapien
tgatgttagactttcgtaagtcacc

SEQ ID NO: 2534208 - DNA, 25 bp, Homo sapien
tagactttcgtaagtcaccttgtga

SEQ ID NO: 2534209 - DNA, 25 bp, Homo sapien
caaggtactgataggacttccagtc

SEQ ID NO: 2534210 - DNA, 25 bp, Homo sapien
tctacaaggtactgataggacttcc

SEQ ID NO: 2534211 - DNA, 25 bp, Homo sapien
ggatactctctacaaggtactgata

SEQ ID NO: 2534212 - DNA, 25 bp, Homo sapien
aaaccttcggatactctctacaagg

SEQ ID NO: 2534213 - DNA, 25 bp, Homo sapien
caaatttatcagaggggggttgagt

SEQ ID NO: 2534214 - DNA, 25 bp, Homo sapien
tagcaacgttattgccactaataag

SEQ ID NO: 2534215 - DNA, 25 bp, Homo sapien
gggttgagtagcaacgttattgcca

SEQ ID NO: 2534216 - DNA, 25 bp, Homo sapien
cgttattgccactaataagttctga

SEQ ID NO: 2534217 - DNA, 25 bp, Homo sapien
ttccagacagagaaaccgtcctcct

SEQ ID NO: 2534218 - DNA, 25 bp, Homo sapien
cagcacccgatgagcttcctggagt

SEQ ID NO: 2534219 - DNA, 25 bp, Homo sapien
ttgttcacttggctaaattccagac

SEQ ID NO: 2534220 - DNA, 25 bp, Homo sapien
gtttcagcacccgatgagcttcctg

SEQ ID NO: 2534221 - DNA, 25 bp, Homo sapien
tgtagctctacaacagaggtaattt

SEQ ID NO: 2534222 - DNA, 25 bp, Homo sapien
gtagctctacaacagaggtaatttc

SEQ ID NO: 2534223 - DNA, 25 bp, Homo sapien
tgacattccggatcccaaaggcaat

SEQ ID NO: 2534224 - DNA, 25 bp, Homo sapien
gcatctcctaatacccatgcaagtc

SEQ ID NO: 2534225 - DNA, 25 bp, Homo sapien
atgtgtgtgacattccggatcccaa

SEQ ID NO: 2534226 - DNA, 25 bp, Homo sapien
ttcagcatctcctaatacccatgca

SEQ ID NO: 2534227 - DNA, 25 bp, Homo sapien
ggctttctgctttccaacctttagc

SEQ ID NO: 2534228 - DNA, 25 bp, Homo sapien
cttgagccaaggctttctgctttcc

SEQ ID NO: 2534229 - DNA, 25 bp, Homo sapien
ctttagcatctccttgttgatgtca

SEQ ID NO: 2534230 - DNA, 25 bp, Homo sapien
ccaaggctttctgctttccaacctt

SEQ ID NO: 2534231 - DNA, 25 bp, Homo sapien
acaccacgacacgagacccgcccaa

SEQ ID NO: 2534232 - DNA, 25 bp, Homo sapien
acgacacgagacccgcccaaggaat

SEQ ID NO: 2534233 - DNA, 25 bp, Homo sapien
cacgacacgagacccgcccaaggaa

SEQ ID NO: 2534234 - DNA, 25 bp, Homo sapien
accacgacacgagacccgcccaagg

SEQ ID NO: 2534235 - DNA, 25 bp, Homo sapien
ttaaggaaccggaatgcaatgtcac

SEQ ID NO: 2534236 - DNA, 25 bp, Homo sapien
attctggtactctttggcaatttct

SEQ ID NO: 2534237 - DNA, 25 bp, Homo sapien
gttgggcccttaactgcctcttctg

SEQ ID NO: 2534238 - DNA, 25 bp, Homo sapien
ctctgatgctgggactgaacataat

SEQ ID NO: 2534239 - DNA, 25 bp, Homo sapien
ccaggaagcgggtgcatcttccaga

SEQ ID NO: 2534240 - DNA, 25 bp, Homo sapien
gcaacatcaagcagctgggtcccag

SEQ ID NO: 2534241 - DNA, 25 bp, Homo sapien
accaagactcatcatatcattcatc

SEQ ID NO: 2534242 - DNA, 25 bp, Homo sapien
gcaaatccttccaaacacgatggat

SEQ ID NO: 2534243 - DNA, 25 bp, Homo sapien
tgaccgacatagcttgagccccttg

SEQ ID NO: 2534244 - DNA, 25 bp, Homo sapien
gaagccttcgtaggtgtccgggcac

SEQ ID NO: 2534245 - DNA, 25 bp, Homo sapien
gagcacatttcccaagcctgggggt

SEQ ID NO: 2534246 - DNA, 25 bp, Homo sapien
ggccttggcctttgaccgacatagc

SEQ ID NO: 2534247 - DNA, 25 bp, Homo sapien
atctcgggcttaacctccttgggct

SEQ ID NO: 2534248 - DNA, 25 bp, Homo sapien
gatctcgggcttaacctccttgggc

SEQ ID NO: 2534249 - DNA, 25 bp, Homo sapien
tgggatctcgggcttaacctccttg

SEQ ID NO: 2534250 - DNA, 25 bp, Homo sapien
tagcgtcagcacgtgcactcgtggc

SEQ ID NO: 2534251 - DNA, 25 bp, Homo sapien
aagggccttgatagcgtcagcacgt

SEQ ID NO: 2534252 - DNA, 25 bp, Homo sapien
gtcagcacgtgcactcgtggccctg

SEQ ID NO: 2534253 - DNA, 25 bp, Homo sapien
tgatagcgtcagcacgtgcactcgt

SEQ ID NO: 2534254 - DNA, 25 bp, Homo sapien
aaaaaaaataggattcatatctttg

SEQ ID NO: 2534255 - DNA, 25 bp, Homo sapien
ctgtgccatttcgggactggctgtg

SEQ ID NO: 2534256 - DNA, 25 bp, Homo sapien
gccatttcgggactggctgtgtgtg

SEQ ID NO: 2534257 - DNA, 25 bp, Homo sapien
aaaaaataggattcatatctttgtg

SEQ ID NO: 2534258 - DNA, 25 bp, Homo sapien
cccactcggtataaatagtcctcct

SEQ ID NO: 2534259 - DNA, 25 bp, Homo sapien
tgtctgggggacactaaggctaacc

SEQ ID NO: 2534260 - DNA, 25 bp, Homo sapien
gtataaatagtcctccttgctggca

SEQ ID NO: 2534261 - DNA, 25 bp, Homo sapien
cactaaggctaaccccactcggtat

SEQ ID NO: 2534262 - DNA, 25 bp, Homo sapien
caaaaaggttgaagatgtcccagaa

SEQ ID NO: 2534263 - DNA, 25 bp, Homo sapien
cagaagaagtgatgccagcaaaaac

SEQ ID NO: 2534264 - DNA, 25 bp, Homo sapien
gtcccagaagaagtgatgccagcaa

SEQ ID NO: 2534265 - DNA, 25 bp, Homo sapien
catgaacaagaaatggagctgtgac

SEQ ID NO: 2534266 - DNA, 25 bp, Homo sapien
gaggtatttcataacattgaaagca

SEQ ID NO: 2534267 - DNA, 25 bp, Homo sapien
ggtatttcataacattgaaagcaca

SEQ ID NO: 2534268 - DNA, 25 bp, Homo sapien
ggaggtatttcataacattgaaagc

SEQ ID NO: 2534269 - DNA, 25 bp, Homo sapien
ttggaggtatttcataacattgaaa

SEQ ID NO: 2534270 - DNA, 25 bp, Homo sapien
gacacagtctcaaacccaaagtgcg

SEQ ID NO: 2534271 - DNA, 25 bp, Homo sapien
tcttgggacaagagccgagcactta

SEQ ID NO: 2534272 - DNA, 25 bp, Homo sapien
aagagctacgaagcccgaggagctg

SEQ ID NO: 2534273 - DNA, 25 bp, Homo sapien
acggccgcaatagctccatagagca

SEQ ID NO: 2534274 - DNA, 25 bp, Homo sapien
aggaagtccattctgcttaaacctt

SEQ ID NO: 2534275 - DNA, 25 bp, Homo sapien
tggtcagttttaccccacataagga

SEQ ID NO: 2534276 - DNA, 25 bp, Homo sapien
tgagcttcagcacagtagaccaaac

SEQ ID NO: 2534277 - DNA, 25 bp, Homo sapien
tgaatttctacccaaccacgcctaa

SEQ ID NO: 2534278 - DNA, 25 bp, Homo sapien
cccaggggcgagtatccgttgctgt

SEQ ID NO: 2534279 - DNA, 25 bp, Homo sapien
ggagacactagtccccgacaccgag

SEQ ID NO: 2534280 - DNA, 25 bp, Homo sapien
tgctgtgtcggagacactagtcccc

SEQ ID NO: 2534281 - DNA, 25 bp, Homo sapien
cgagtatccgttgctgtgtcggaga

SEQ ID NO: 2534282 - DNA, 25 bp, Homo sapien
agagtcgttgctctcatcggctggg

SEQ ID NO: 2534283 - DNA, 25 bp, Homo sapien
tcacagcaggccttaagacttggtt

SEQ ID NO: 2534284 - DNA, 25 bp, Homo sapien
tatgatgagaaagggtaaggtcacc

SEQ ID NO: 2534285 - DNA, 25 bp, Homo sapien
ttacattaatgagcgctgtgctgcg

SEQ ID NO: 2534286 - DNA, 25 bp, Homo sapien
tctagtgggtgctcttgacaggaac

SEQ ID NO: 2534287 - DNA, 25 bp, Homo sapien
tgttaagagtgatttgtccaagtaa

SEQ ID NO: 2534288 - DNA, 25 bp, Homo sapien
ggattccttggtttatatggcttca

SEQ ID NO: 2534289 - DNA, 25 bp, Homo sapien
tcagccactatggtaggcattttac

SEQ ID NO: 2534290 - DNA, 25 bp, Homo sapien
gcttaagagatccttgaactcttga

SEQ ID NO: 2534291 - DNA, 25 bp, Homo sapien
cttaagagatccttgaactcttgaa

SEQ ID NO: 2534292 - DNA, 25 bp, Homo sapien
gcgattttcttactccagcctccct

SEQ ID NO: 2534293 - DNA, 25 bp, Homo sapien
gattttcttactccagcctccctag

SEQ ID NO: 2534294 - DNA, 25 bp, Homo sapien
gagccactgcgctggtccaccattt

SEQ ID NO: 2534295 - DNA, 25 bp, Homo sapien
actgcgctggtccaccatttcttta

SEQ ID NO: 2534296 - DNA, 25 bp, Homo sapien
gatggatggacagcttgacatgtgc

SEQ ID NO: 2534297 - DNA, 25 bp, Homo sapien
gaacgataggctagtgaggcttgct

SEQ ID NO: 2534298 - DNA, 25 bp, Homo sapien
taaacttctttgaggctagtgcaga

SEQ ID NO: 2534299 - DNA, 25 bp, Homo sapien
ggttatactgcacctagccaaagca

SEQ ID NO: 2534300 - DNA, 25 bp, Homo sapien
tgccaaagaaagtgggatattcgcc

SEQ ID NO: 2534301 - DNA, 25 bp, Homo sapien
gaatcctgttactccctgcatttag

SEQ ID NO: 2534302 - DNA, 25 bp, Homo sapien
gatattcgcctatagaaccacagtg

SEQ ID NO: 2534303 - DNA, 25 bp, Homo sapien
ttagagaaattccactgccacagta

SEQ ID NO: 2534304 - DNA, 25 bp, Homo sapien
caccaagtgacactactggcccagg

SEQ ID NO: 2534305 - DNA, 25 bp, Homo sapien
aagtaagattgagtcccctttgaga

SEQ ID NO: 2534306 - DNA, 25 bp, Homo sapien
tattgacacaagagatctcttcctg

SEQ ID NO: 2534307 - DNA, 25 bp, Homo sapien
gagatgcattagagcagtccaaccc

SEQ ID NO: 2534308 - DNA, 25 bp, Homo sapien
tgacctctaggtgcattagaatgcg

SEQ ID NO: 2534309 - DNA, 25 bp, Homo sapien
taaggaaagctgtaactcacgaagc

SEQ ID NO: 2534310 - DNA, 25 bp, Homo sapien
tgagacctgctacccctaagatcga

SEQ ID NO: 2534311 - DNA, 25 bp, Homo sapien
cagggccatctgaagcggtagcatt

SEQ ID NO: 2534312 - DNA, 25 bp, Homo sapien
tttaactagtaccacatagggagtc

SEQ ID NO: 2534313 - DNA, 25 bp, Homo sapien
gccaagcatggactccataagccct

SEQ ID NO: 2534314 - DNA, 25 bp, Homo sapien
agtttaactagtaccacatagggag

SEQ ID NO: 2534315 - DNA, 25 bp, Homo sapien
gacttggccaagcatggactccata

SEQ ID NO: 2534316 - DNA, 25 bp, Homo sapien
caacacttcaccagggaatgctagg

SEQ ID NO: 2534317 - DNA, 25 bp, Homo sapien
gaatgctaggtaaaggcaacttcag

SEQ ID NO: 2534318 - DNA, 25 bp, Homo sapien
taaatctactcttagccaagcaata

SEQ ID NO: 2534319 - DNA, 25 bp, Homo sapien
gtctgctggttggcagctatccagt

SEQ ID NO: 2534320 - DNA, 25 bp, Homo sapien
gttgctacccagattgttctgttca

SEQ ID NO: 2534321 - DNA, 25 bp, Homo sapien
tgttcaacaagtgggcctgaagcct

SEQ ID NO: 2534322 - DNA, 25 bp, Homo sapien
ttgctacccagattgttctgttcaa

SEQ ID NO: 2534323 - DNA, 25 bp, Homo sapien
tcactccattgcttctgcagcctcc

SEQ ID NO: 2534324 - DNA, 25 bp, Homo sapien
cactccattgcttctgcagcctcct

SEQ ID NO: 2534325 - DNA, 25 bp, Homo sapien
tccattgcttctgcagcctcctcac

SEQ ID NO: 2534326 - DNA, 25 bp, Homo sapien
ctccattgcttctgcagcctcctca

SEQ ID NO: 2534327 - DNA, 25 bp, Homo sapien
gacttctggatagcttcccgctctc

SEQ ID NO: 2534328 - DNA, 25 bp, Homo sapien
tcttgtcacagacttctggatagct

SEQ ID NO: 2534329 - DNA, 25 bp, Homo sapien
taataagcagcttcttgtcacagac

SEQ ID NO: 2534330 - DNA, 25 bp, Homo sapien
tcctcctctaataagcagcttcttg

SEQ ID NO: 2534331 - DNA, 25 bp, Homo sapien
gaaagatatctttgggagtgatttc

SEQ ID NO: 2534332 - DNA, 25 bp, Homo sapien
cagggatgaaagatatctttgggag

SEQ ID NO: 2534333 - DNA, 25 bp, Homo sapien
gcagataacagggatgaaagatatc

SEQ ID NO: 2534334 - DNA, 25 bp, Homo sapien
tgggcactgggctagtgttgcttac

SEQ ID NO: 2534335 - DNA, 25 bp, Homo sapien
gctgtctcctgttgtactgaattag

SEQ ID NO: 2534336 - DNA, 25 bp, Homo sapien
gcagttctgcaacaagatcaacagc

SEQ ID NO: 2534337 - DNA, 25 bp, Homo sapien
cagtgcagttctgcaacaagatcaa

SEQ ID NO: 2534338 - DNA, 25 bp, Homo sapien
ctgaattaggaacttctgacatgtt

SEQ ID NO: 2534339 - DNA, 25 bp, Homo sapien
cagcttgtgaaagatctcgacctta

SEQ ID NO: 2534340 - DNA, 25 bp, Homo sapien
tactgtggtcaacagcttgtgaaag

SEQ ID NO: 2534341 - DNA, 25 bp, Homo sapien
ggcatatgagttactgtggtcaaca

SEQ ID NO: 2534342 - DNA, 25 bp, Homo sapien
ttgtgaaagatctcgaccttacaga

SEQ ID NO: 2534343 - DNA, 25 bp, Homo sapien
aagacccacccaccagtttagactg

SEQ ID NO: 2534344 - DNA, 25 bp, Homo sapien
tagactgaactgtgaacgtgtcacc

SEQ ID NO: 2534345 - DNA, 25 bp, Homo sapien
aagtgtcttgttagcgggacagcag

SEQ ID NO: 2534346 - DNA, 25 bp, Homo sapien
ctgtgaacgtgtcaccaattgaaaa

SEQ ID NO: 2534347 - DNA, 25 bp, Homo sapien
gctgaccacacaagctgatagaatt

SEQ ID NO: 2534348 - DNA, 25 bp, Homo sapien
ctcccacatgtaatgtgttgaaaaa

SEQ ID NO: 2534349 - DNA, 25 bp, Homo sapien
cctttgttctccaagtatgtgatga

SEQ ID NO: 2534350 - DNA, 25 bp, Homo sapien
aaagcatgggtaacggtgtcctttg

SEQ ID NO: 2534351 - DNA, 25 bp, Homo sapien
ttccagtataggcattgagatatcg

SEQ ID NO: 2534352 - DNA, 25 bp, Homo sapien
ctattccagtataggcattgagata

SEQ ID NO: 2534353 - DNA, 25 bp, Homo sapien
ccagtataggcattgagatatcgaa

SEQ ID NO: 2534354 - DNA, 25 bp, Homo sapien
tattccagtataggcattgagatat

SEQ ID NO: 2534355 - DNA, 25 bp, Homo sapien
actttggagtaacagagcctactat

SEQ ID NO: 2534356 - DNA, 25 bp, Homo sapien
tgacccccgatctcgctgctgcact

SEQ ID NO: 2534357 - DNA, 25 bp, Homo sapien
ggcagcaatgacccccgatctcgct

SEQ ID NO: 2534358 - DNA, 25 bp, Homo sapien
aaactttggagtaacagagcctact

SEQ ID NO: 2534359 - DNA, 25 bp, Homo sapien
tgctaatttcggactctcgcttggg

SEQ ID NO: 2534360 - DNA, 25 bp, Homo sapien
gggtcccaggcgcttaaagagatac

SEQ ID NO: 2534361 - DNA, 25 bp, Homo sapien
ggtaaaaagaggcttctagctcaaa

SEQ ID NO: 2534362 - DNA, 25 bp, Homo sapien
agtggtgtgaaagaagggcccctct

SEQ ID NO: 2534363 - DNA, 25 bp, Homo sapien
cttctttcttcctccggcgcctgcc

SEQ ID NO: 2534364 - DNA, 25 bp, Homo sapien
ctccacatcccgccatcctcccggg

SEQ ID NO: 2534365 - DNA, 25 bp, Homo sapien
ttctttcttcctccggcgcctgccc

SEQ ID NO: 2534366 - DNA, 25 bp, Homo sapien
cacatcccgccatcctcccgggttc

SEQ ID NO: 2534367 - DNA, 25 bp, Homo sapien
tggcgatcgtgtcccgtacgaggct

SEQ ID NO: 2534368 - DNA, 25 bp, Homo sapien
gttccgtgcaccctggcgatcgtgt

SEQ ID NO: 2534369 - DNA, 25 bp, Homo sapien
agcaggcggctgcgccgaaagttcc

SEQ ID NO: 2534370 - DNA, 25 bp, Homo sapien
gcggctgcgccgaaagttccgtgca

SEQ ID NO: 2534371 - DNA, 25 bp, Homo sapien
ctcggtcatcgaggcttaggcggca

SEQ ID NO: 2534372 - DNA, 25 bp, Homo sapien
cagacaccagttcgcagagcaggta

SEQ ID NO: 2534373 - DNA, 25 bp, Homo sapien
tcagaactcggtcatcgaggcttag

SEQ ID NO: 2534374 - DNA, 25 bp, Homo sapien
cagcgggggtcgtcagacaccagtt

SEQ ID NO: 2534375 - DNA, 25 bp, Homo sapien
ggacactagcggggccgcgaggacc

SEQ ID NO: 2534376 - DNA, 25 bp, Homo sapien
gcgagaggaaggtggacactagcgg

SEQ ID NO: 2534377 - DNA, 25 bp, Homo sapien
gaaggtggacactagcggggccgcg

SEQ ID NO: 2534378 - DNA, 25 bp, Homo sapien
cgagaggaaggtggacactagcggg

SEQ ID NO: 2534379 - DNA, 25 bp, Homo sapien
ccggtccggcgtgcaaaccggatgt

SEQ ID NO: 2534380 - DNA, 25 bp, Homo sapien
ggaagcttgcttccgcagcctttca

SEQ ID NO: 2534381 - DNA, 25 bp, Homo sapien
caaaccggatgtgaattctgtccgc

SEQ ID NO: 2534382 - DNA, 25 bp, Homo sapien
tccgctgccaatgggaagcttgctt

SEQ ID NO: 2534383 - DNA, 25 bp, Homo sapien
ctgcgtttgtaagcgcgcatgcgtc

SEQ ID NO: 2534384 - DNA, 25 bp, Homo sapien
ggagacaggatattagggcggagct

SEQ ID NO: 2534385 - DNA, 25 bp, Homo sapien
tagaaagttgagaggccgaagtctg

SEQ ID NO: 2534386 - DNA, 25 bp, Homo sapien
agccccgcccaactgcgtttgtaag

SEQ ID NO: 2534387 - DNA, 25 bp, Homo sapien
gcgagtatattctctccccaaggtg

SEQ ID NO: 2534388 - DNA, 25 bp, Homo sapien
gggaaccttgcaccacagttatgta

SEQ ID NO: 2534389 - DNA, 25 bp, Homo sapien
ggcattgacaaacgggaaatcggac

SEQ ID NO: 2534390 - DNA, 25 bp, Homo sapien
gtggagcttttgagggcaagaccct

SEQ ID NO: 2534391 - DNA, 25 bp, Homo sapien
tagtgtaataagatggagagacgac

SEQ ID NO: 2534392 - DNA, 25 bp, Homo sapien
gtgtaataagatggagagacgacag

SEQ ID NO: 2534393 - DNA, 25 bp, Homo sapien
ttagtgtaataagatggagagacga

SEQ ID NO: 2534394 - DNA, 25 bp, Homo sapien
gtaataagatggagagacgacagat

SEQ ID NO: 2534395 - DNA, 25 bp, Homo sapien
tgtgatgccgaaacccggcctactc

SEQ ID NO: 2534396 - DNA, 25 bp, Homo sapien
cacttctgttggagccagtgcatgg

SEQ ID NO: 2534397 - DNA, 25 bp, Homo sapien
ccatacctctagacccttctccagg

SEQ ID NO: 2534398 - DNA, 25 bp, Homo sapien
ttgcaaggaagcatgatcccatcac

SEQ ID NO: 2534399 - DNA, 25 bp, Homo sapien
gatgtcaaacaatatgacagtgtat

SEQ ID NO: 2534400 - DNA, 25 bp, Homo sapien
tatgcagcggacagcattttcggct

SEQ ID NO: 2534401 - DNA, 25 bp, Homo sapien
ttggaaaacacagggtccgggctgc

SEQ ID NO: 2534402 - DNA, 25 bp, Homo sapien
aatatgacagtgtatctggctttgg

SEQ ID NO: 2534403 - DNA, 25 bp, Homo sapien
aacacagatgtcgaggcagagcttg

SEQ ID NO: 2534404 - DNA, 25 bp, Homo sapien
tctccccaacacagatgtcgaggca

SEQ ID NO: 2534405 - DNA, 25 bp, Homo sapien
cagagcttgtgaatgcaaagttccc

SEQ ID NO: 2534406 - DNA, 25 bp, Homo sapien
tgtgaatgcaaagttcccacgtggg

SEQ ID NO: 2534407 - DNA, 25 bp, Homo sapien
ttccttagcccctctagttcatcgg

SEQ ID NO: 2534408 - DNA, 25 bp, Homo sapien
tctccctgtgcttcgaatcctcctt

SEQ ID NO: 2534409 - DNA, 25 bp, Homo sapien
cctctagttcatcgggctgtgccgg

SEQ ID NO: 2534410 - DNA, 25 bp, Homo sapien
tcaatgtagcaaagcccggacttgg

SEQ ID NO: 2534411 - DNA, 25 bp, Homo sapien
aggggagtaaggagcaggatgtcgg

SEQ ID NO: 2534412 - DNA, 25 bp, Homo sapien
tagggcgaggggagtaaggagcagg

SEQ ID NO: 2534413 - DNA, 25 bp, Homo sapien
ggagaaggccgtggctgaccctcct

SEQ ID NO: 2534414 - DNA, 25 bp, Homo sapien
caaggagaaggccgtggctgaccct

SEQ ID NO: 2534415 - DNA, 25 bp, Homo sapien
gcttcaatggggatgccaagcccat

SEQ ID NO: 2534416 - DNA, 25 bp, Homo sapien
tgcaggagaactgcaggcttcaatg

SEQ ID NO: 2534417 - DNA, 25 bp, Homo sapien
tccaacaagggaagcctgcaggaga

SEQ ID NO: 2534418 - DNA, 25 bp, Homo sapien
aactgcaggcttcaatggggatgcc

SEQ ID NO: 2534419 - DNA, 25 bp, Homo sapien
gagagagcctgctgaataatcgccc

SEQ ID NO: 2534420 - DNA, 25 bp, Homo sapien
agccccactgctgcaccgttgcctg

SEQ ID NO: 2534421 - DNA, 25 bp, Homo sapien
tgaataatcgccctgcgcatgcgca

SEQ ID NO: 2534422 - DNA, 25 bp, Homo sapien
cgttgcctgccctcgcaattttggg

SEQ ID NO: 2534423 - DNA, 25 bp, Homo sapien
ccctttaggttgtagctggatggac

SEQ ID NO: 2534424 - DNA, 25 bp, Homo sapien
ccctggatcggttggctctttagca

SEQ ID NO: 2534425 - DNA, 25 bp, Homo sapien
tggcctccggctctgaatcttatgg

SEQ ID NO: 2534426 - DNA, 25 bp, Homo sapien
catggtaacaggagagttgctcaca

SEQ ID NO: 2534427 - DNA, 25 bp, Homo sapien
tctgtagtcctcattgccaaagttg

SEQ ID NO: 2534428 - DNA, 25 bp, Homo sapien
gcattccggcccctgcgtttgtagg

SEQ ID NO: 2534429 - DNA, 25 bp, Homo sapien
tgtggctgacttaccagggtcgtcc

SEQ ID NO: 2534430 - DNA, 25 bp, Homo sapien
tccaggcgtgataaagagcgctgcc

SEQ ID NO: 2534431 - DNA, 25 bp, Homo sapien
cagcgcccccagatctgcaccgcca

SEQ ID NO: 2534432 - DNA, 25 bp, Homo sapien
gcagcgcccccagatctgcaccgcc

SEQ ID NO: 2534433 - DNA, 25 bp, Homo sapien
ggcagcgcccccagatctgcaccgc

SEQ ID NO: 2534434 - DNA, 25 bp, Homo sapien
tcctgcccggcgacgccgcagtcgt

SEQ ID NO: 2534435 - DNA, 25 bp, Homo sapien
gcgtcccgaccttcgccgtcgtcgc

SEQ ID NO: 2534436 - DNA, 25 bp, Homo sapien
gcggacccgttcctccaccggctgc

SEQ ID NO: 2534437 - DNA, 25 bp, Homo sapien
gtgtgctcccccaggcgcactgcag

SEQ ID NO: 2534438 - DNA, 25 bp, Homo sapien
cgtgcgctgtccacgctccgggcct

SEQ ID NO: 2534439 - DNA, 25 bp, Homo sapien
gctgtccacgctccgggcctcttgg

SEQ ID NO: 2534440 - DNA, 25 bp, Homo sapien
tcctccccgtgcctgattcagcacc

SEQ ID NO: 2534441 - DNA, 25 bp, Homo sapien
attcagcaccccgtgcgctgtccac

SEQ ID NO: 2534442 - DNA, 25 bp, Homo sapien
ctcagtttgcagctgatctgactca

SEQ ID NO: 2534443 - DNA, 25 bp, Homo sapien
tggcctagaatcatacactttctgg

SEQ ID NO: 2534444 - DNA, 25 bp, Homo sapien
tttggaagggtaggtcattggccta

SEQ ID NO: 2534445 - DNA, 25 bp, Homo sapien
ggtcattggcctagaatcatacact

SEQ ID NO: 2534446 - DNA, 25 bp, Homo sapien
cactggctgcaggttagaattacct

SEQ ID NO: 2534447 - DNA, 25 bp, Homo sapien
agtactaagcaacaccaatgcccag

SEQ ID NO: 2534448 - DNA, 25 bp, Homo sapien
tacatcagtgcttcccaacactggc

SEQ ID NO: 2534449 - DNA, 25 bp, Homo sapien
caagctcttagcctctacatcagtg

SEQ ID NO: 2534450 - DNA, 25 bp, Homo sapien
gtccaggagttatccagggacctcc

SEQ ID NO: 2534451 - DNA, 25 bp, Homo sapien
gaaaggaggctctccgggctgaaaa

SEQ ID NO: 2534452 - DNA, 25 bp, Homo sapien
ctaggagtgagcaccctctgggcag

SEQ ID NO: 2534453 - DNA, 25 bp, Homo sapien
actgagctagcgtgcaagaatgggc

SEQ ID NO: 2534454 - DNA, 25 bp, Homo sapien
gagcttgctatccttcccaggggtt

SEQ ID NO: 2534455 - DNA, 25 bp, Homo sapien
ctcctattgccgttttctgtgtccc

SEQ ID NO: 2534456 - DNA, 25 bp, Homo sapien
cctcctattgccgttttctgtgtcc

SEQ ID NO: 2534457 - DNA, 25 bp, Homo sapien
tcctattgccgttttctgtgtccca

SEQ ID NO: 2534458 - DNA, 25 bp, Homo sapien
gtgatggtcccacctttagtgtttg

SEQ ID NO: 2534459 - DNA, 25 bp, Homo sapien
gcatgtgccagttatagactgtcca

SEQ ID NO: 2534460 - DNA, 25 bp, Homo sapien
gttatgtcgggtcctcagatcgcct

SEQ ID NO: 2534461 - DNA, 25 bp, Homo sapien
catccaagacgtttcggttatgtcg

SEQ ID NO: 2534462 - DNA, 25 bp, Homo sapien
tgtgtcacagttcagccagttttgg

SEQ ID NO: 2534463 - DNA, 25 bp, Homo sapien
ctaattagctatataggcccagcga

SEQ ID NO: 2534464 - DNA, 25 bp, Homo sapien
tttctctatccaagtagcagtcagg

SEQ ID NO: 2534465 - DNA, 25 bp, Homo sapien
ggtttatgcctagagctacttcaag

SEQ ID NO: 2534466 - DNA, 25 bp, Homo sapien
gagcccagctgactgaaaacaagga

SEQ ID NO: 2534467 - DNA, 25 bp, Homo sapien
gaggagaggctgctcaatcgacacc

SEQ ID NO: 2534468 - DNA, 25 bp, Homo sapien
tgctaggactgagaggctgcaccat

SEQ ID NO: 2534469 - DNA, 25 bp, Homo sapien
acattgtgccaagaaactctgtggg

SEQ ID NO: 2534470 - DNA, 25 bp, Homo sapien
tgatagtacacggaagcagaaccgg

SEQ ID NO: 2534471 - DNA, 25 bp, Homo sapien
taattaacgatcaaagagctctaag

SEQ ID NO: 2534472 - DNA, 25 bp, Homo sapien
tgttatgagactagattggtaccag

SEQ ID NO: 2534473 - DNA, 25 bp, Homo sapien
tcaagctttagaaagatcagagcaa

SEQ ID NO: 2534474 - DNA, 25 bp, Homo sapien
caacatgcattgacagcggcacagt

SEQ ID NO: 2534475 - DNA, 25 bp, Homo sapien
gggcagcctcttcaaccattattgg

SEQ ID NO: 2534476 - DNA, 25 bp, Homo sapien
gaagtgcgctttccgtcctttcaaa

SEQ ID NO: 2534477 - DNA, 25 bp, Homo sapien
tcctttcaaaggacaactgtcggga

SEQ ID NO: 2534478 - DNA, 25 bp, Homo sapien
atattacaaatctctgtgcatgcag

SEQ ID NO: 2534479 - DNA, 25 bp, Homo sapien
tctctgtgcatgcaggtagggtaaa

SEQ ID NO: 2534480 - DNA, 25 bp, Homo sapien
caaatctctgtgcatgcaggtaggg

SEQ ID NO: 2534481 - DNA, 25 bp, Homo sapien
tgtgcatgcaggtagggtaaattcc

SEQ ID NO: 2534482 - DNA, 25 bp, Homo sapien
ctcagccgggtcaccgagagtgagt

SEQ ID NO: 2534483 - DNA, 25 bp, Homo sapien
gatgagcgggtctaacccgaaggct

SEQ ID NO: 2534484 - DNA, 25 bp, Homo sapien
gggctggaccgcattcctgtgagtc

SEQ ID NO: 2534485 - DNA, 25 bp, Homo sapien
tgtgagtccggccacgctaggatgc

SEQ ID NO: 2534486 - DNA, 25 bp, Homo sapien
ttcctccgccctggccccatggcag

SEQ ID NO: 2534487 - DNA, 25 bp, Homo sapien
tcggctttcttacactgacagttgg

SEQ ID NO: 2534488 - DNA, 25 bp, Homo sapien
tgggcctaatgtcttcaccggcaga

SEQ ID NO: 2534489 - DNA, 25 bp, Homo sapien
gacagttggcaaactaacgttggca

SEQ ID NO: 2534490 - DNA, 25 bp, Homo sapien
caatttgcggctcatgttctagtca

SEQ ID NO: 2534491 - DNA, 25 bp, Homo sapien
tcaccccagtgcacgaggattcctg

SEQ ID NO: 2534492 - DNA, 25 bp, Homo sapien
ctgtacctggtgtaggagcctaatc

SEQ ID NO: 2534493 - DNA, 25 bp, Homo sapien
gagtcctgccttagtgtgtcctgcc

SEQ ID NO: 2534494 - DNA, 25 bp, Homo sapien
gtctaatgtacaaactgggtgagtc

SEQ ID NO: 2534495 - DNA, 25 bp, Homo sapien
ttgtgtgtgtgtgatggagtctcgc

SEQ ID NO: 2534496 - DNA, 25 bp, Homo sapien
gtgcgcaccaccacacccggctaat

SEQ ID NO: 2534497 - DNA, 25 bp, Homo sapien
tgcgcaccaccacacccggctaatt

SEQ ID NO: 2534498 - DNA, 25 bp, Homo sapien
tttttgtgtgtgtgtgatggagtct

SEQ ID NO: 2534499 - DNA, 25 bp, Homo sapien
gcaggcagagacactcctcacctcc

SEQ ID NO: 2534500 - DNA, 25 bp, Homo sapien
cggggtggcggtcgggcagagacac

SEQ ID NO: 2534501 - DNA, 25 bp, Homo sapien
tcctcacttctcggggcgggcaggc

SEQ ID NO: 2534502 - DNA, 25 bp, Homo sapien
acatcccagacggggcagtggggca

SEQ ID NO: 2534503 - DNA, 25 bp, Homo sapien
agtgagcagagatggcggcagtaca

SEQ ID NO: 2534504 - DNA, 25 bp, Homo sapien
tgagcagagatggcggcagtacagt

SEQ ID NO: 2534505 - DNA, 25 bp, Homo sapien
agcagagatggcggcagtacagtcc

SEQ ID NO: 2534506 - DNA, 25 bp, Homo sapien
cagagatggcggcagtacagtccag

SEQ ID NO: 2534507 - DNA, 25 bp, Homo sapien
gccagccagtgcgggggcttgccct

SEQ ID NO: 2534508 - DNA, 25 bp, Homo sapien
tggccagccagtgcgggggcttgcc

SEQ ID NO: 2534509 - DNA, 25 bp, Homo sapien
ggccagccagtgcgggggcttgccc

SEQ ID NO: 2534510 - DNA, 25 bp, Homo sapien
ctggccagccagtgcgggggcttgc

SEQ ID NO: 2534511 - DNA, 25 bp, Homo sapien
aaccctctgggccagtgtcgatctc

SEQ ID NO: 2534512 - DNA, 25 bp, Homo sapien
tctgggccagtgtcgatctcagcag

SEQ ID NO: 2534513 - DNA, 25 bp, Homo sapien
tcttaaccctctgggccagtgtcga

SEQ ID NO: 2534514 - DNA, 25 bp, Homo sapien
aagctcttaaccctctgggccagtg

SEQ ID NO: 2534515 - DNA, 25 bp, Homo sapien
gcaagccaaaggtagcagagcagag

SEQ ID NO: 2534516 - DNA, 25 bp, Homo sapien
gtaagtgccgcagggtcttggctcc

SEQ ID NO: 2534517 - DNA, 25 bp, Homo sapien
taagtgccgcctgcagaagtttggg

SEQ ID NO: 2534518 - DNA, 25 bp, Homo sapien
cttccagaagcagcgcatttgagcc

SEQ ID NO: 2534519 - DNA, 25 bp, Homo sapien
cattgcatgtagctgagaggccacc

SEQ ID NO: 2534520 - DNA, 25 bp, Homo sapien
cagctggcacggtgtctgcgaagtc

SEQ ID NO: 2534521 - DNA, 25 bp, Homo sapien
tccactcggattgtgccagctggca

SEQ ID NO: 2534522 - DNA, 25 bp, Homo sapien
tctgcgaagtcagctcttctcaagg

SEQ ID NO: 2534523 - DNA, 25 bp, Homo sapien
ttttctggggtggagatcatttcta

SEQ ID NO: 2534524 - DNA, 25 bp, Homo sapien
ttctggggtggagatcatttctaat

SEQ ID NO: 2534525 - DNA, 25 bp, Homo sapien
ctgtattttctggggtggagatcat

SEQ ID NO: 2534526 - DNA, 25 bp, Homo sapien
tattttctggggtggagatcatttc

SEQ ID NO: 2534527 - DNA, 25 bp, Homo sapien
ccagtattcctaatgatgaaccggg

SEQ ID NO: 2534528 - DNA, 25 bp, Homo sapien
gggatgcgcatgacaaatgccttca

SEQ ID NO: 2534529 - DNA, 25 bp, Homo sapien
cagtaaaccagaagagcgcctcata

SEQ ID NO: 2534530 - DNA, 25 bp, Homo sapien
taatgacagcgtacagatctaatga

SEQ ID NO: 2534531 - DNA, 25 bp, Homo sapien
catccaatctggtagcaagttctgt

SEQ ID NO: 2534532 - DNA, 25 bp, Homo sapien
caaggccacgactcatccgtgcgat

SEQ ID NO: 2534533 - DNA, 25 bp, Homo sapien
agttctgttcttcgcatcaccctag

SEQ ID NO: 2534534 - DNA, 25 bp, Homo sapien
ggcagaacgcctacactcaacaggg

SEQ ID NO: 2534535 - DNA, 25 bp, Homo sapien
tcttgaacgcactgtggcatccctg

SEQ ID NO: 2534536 - DNA, 25 bp, Homo sapien
tagaaagcaccctatacattgcagg

SEQ ID NO: 2534537 - DNA, 25 bp, Homo sapien
gcatgagacagttggaatctgaacc

SEQ ID NO: 2534538 - DNA, 25 bp, Homo sapien
tgcctctaacggacaggaaagggct

SEQ ID NO: 2534539 - DNA, 25 bp, Homo sapien
tctgcagtgcttcagctgacacgtg

SEQ ID NO: 2534540 - DNA, 25 bp, Homo sapien
ttagcagccattgtcctagaaatga

SEQ ID NO: 2534541 - DNA, 25 bp, Homo sapien
tggtttatcccttccaataagagga

SEQ ID NO: 2534542 - DNA, 25 bp, Homo sapien
cttgagttggatgactcgatctgca

SEQ ID NO: 2534543 - DNA, 25 bp, Homo sapien
aaagcgggagttctagtaacacaca

SEQ ID NO: 2534544 - DNA, 25 bp, Homo sapien
gaacacactaggctttggacagact

SEQ ID NO: 2534545 - DNA, 25 bp, Homo sapien
taattcagacagtagcttagtccca

SEQ ID NO: 2534546 - DNA, 25 bp, Homo sapien
tgattggcaaaatggaactcccttc

SEQ ID NO: 2534547 - DNA, 25 bp, Homo sapien
tgggagctctgtttggtaccaacaa

SEQ ID NO: 2534548 - DNA, 25 bp, Homo sapien
tagtcttcacccaatgcagaggcag

SEQ ID NO: 2534549 - DNA, 25 bp, Homo sapien
ttaatccgagtcattttggagcccc

SEQ ID NO: 2534550 - DNA, 25 bp, Homo sapien
tagctatatgcatcctcgagggctg

SEQ ID NO: 2534551 - DNA, 25 bp, Homo sapien
gaggaatccaacaccctgactgctt

SEQ ID NO: 2534552 - DNA, 25 bp, Homo sapien
gaacaccctgcgagggagaagccta

SEQ ID NO: 2534553 - DNA, 25 bp, Homo sapien
taaactgctcgacatgctcaaaacg

SEQ ID NO: 2534554 - DNA, 25 bp, Homo sapien
cattggctcgagaagaaactacgga

SEQ ID NO: 2534555 - DNA, 25 bp, Homo sapien
tgtataaaaaccgtgcccttgttca

SEQ ID NO: 2534556 - DNA, 25 bp, Homo sapien
caaattcttatgtggatgttgtaag

SEQ ID NO: 2534557 - DNA, 25 bp, Homo sapien
ggatgttgtaagaagtcactcaatg

SEQ ID NO: 2534558 - DNA, 25 bp, Homo sapien
cgtatgtataaaaaccgtgcccttg

SEQ ID NO: 2534559 - DNA, 25 bp, Homo sapien
cagttctctgaaactgagtccccta

SEQ ID NO: 2534560 - DNA, 25 bp, Homo sapien
ggaaagaagaatataacgacagaag

SEQ ID NO: 2534561 - DNA, 25 bp, Homo sapien
tgagtcccctataggaaactggtcc

SEQ ID NO: 2534562 - DNA, 25 bp, Homo sapien
agttctagaaagactcctcgctgtt

SEQ ID NO: 2534563 - DNA, 25 bp, Homo sapien
ctctacatccgcaggaagagaagga

SEQ ID NO: 2534564 - DNA, 25 bp, Homo sapien
gaaggtaacagtctggtgcagatcc

SEQ ID NO: 2534565 - DNA, 25 bp, Homo sapien
tgcagatccataaaaacgtgggagg

SEQ ID NO: 2534566 - DNA, 25 bp, Homo sapien
ggagaggcctgtccctcttggaagg

SEQ ID NO: 2534567 - DNA, 25 bp, Homo sapien
cagtcacacggcagttccttaaaca

SEQ ID NO: 2534568 - DNA, 25 bp, Homo sapien
tgccaaatccagtcacacggcagtt

SEQ ID NO: 2534569 - DNA, 25 bp, Homo sapien
ttaaatgccaaatccagtcacacgg

SEQ ID NO: 2534570 - DNA, 25 bp, Homo sapien
aatccagtcacacggcagttcctta

SEQ ID NO: 2534571 - DNA, 25 bp, Homo sapien
agagaaaaggactatgacggccatc

SEQ ID NO: 2534572 - DNA, 25 bp, Homo sapien
aaaggactatgacggccatctggtc

SEQ ID NO: 2534573 - DNA, 25 bp, Homo sapien
tatgacggccatctggtcactttcc

SEQ ID NO: 2534574 - DNA, 25 bp, Homo sapien
gagttgagagaaaaggactatgacg

SEQ ID NO: 2534575 - DNA, 25 bp, Homo sapien
cttggagtggaaaggctcagaccac

SEQ ID NO: 2534576 - DNA, 25 bp, Homo sapien
gacttggagtggaaaggctcagacc

SEQ ID NO: 2534577 - DNA, 25 bp, Homo sapien
ctggacttggagtggaaaggctcag

SEQ ID NO: 2534578 - DNA, 25 bp, Homo sapien
tggagtggaaaggctcagaccacat

SEQ ID NO: 2534579 - DNA, 25 bp, Homo sapien
ggcccctttctgatgcttgatctga

SEQ ID NO: 2534580 - DNA, 25 bp, Homo sapien
ggtgcttttaggctccctgagcaag

SEQ ID NO: 2534581 - DNA, 25 bp, Homo sapien
tgggaaataatgtgctcttgaactc

SEQ ID NO: 2534582 - DNA, 25 bp, Homo sapien
tggtcctgaactcttaacccgcctg

SEQ ID NO: 2534583 - DNA, 25 bp, Homo sapien
tcacaggtttataactgctgctctc

SEQ ID NO: 2534584 - DNA, 25 bp, Homo sapien
cacaggtttataactgctgctctca

SEQ ID NO: 2534585 - DNA, 25 bp, Homo sapien
acaggtttataactgctgctctcac

SEQ ID NO: 2534586 - DNA, 25 bp, Homo sapien
ctttaaataggccatcgtgaggagt

SEQ ID NO: 2534587 - DNA, 25 bp, Homo sapien
gtggcaataaagtaaatggcaccaa

SEQ ID NO: 2534588 - DNA, 25 bp, Homo sapien
ccggtgaatgcgagacgccacagta

SEQ ID NO: 2534589 - DNA, 25 bp, Homo sapien
gcaccaaatagagaagggcgggctg

SEQ ID NO: 2534590 - DNA, 25 bp, Homo sapien
tttttgtagttgtcatagcgaagga

SEQ ID NO: 2534591 - DNA, 25 bp, Homo sapien
cgaaggacaaagcatagtaggagac

SEQ ID NO: 2534592 - DNA, 25 bp, Homo sapien
caaagcatagtaggagaccaggcat

SEQ ID NO: 2534593 - DNA, 25 bp, Homo sapien
tcatagcgaaggacaaagcatagta

SEQ ID NO: 2534594 - DNA, 25 bp, Homo sapien
cagagacaggcgaggaacatcacgc

SEQ ID NO: 2534595 - DNA, 25 bp, Homo sapien
gcagagacaggcgaggaacatcacg

SEQ ID NO: 2534596 - DNA, 25 bp, Homo sapien
caggcgaggaacatcacgcccaaca

SEQ ID NO: 2534597 - DNA, 25 bp, Homo sapien
agacaggcgaggaacatcacgccca

SEQ ID NO: 2534598 - DNA, 25 bp, Homo sapien
gacgttgctattgaagatgtaggct

SEQ ID NO: 2534599 - DNA, 25 bp, Homo sapien
gccgagttggagagatgcctttaac

SEQ ID NO: 2534600 - DNA, 25 bp, Homo sapien
gagagatgcctttaacagagggagt

SEQ ID NO: 2534601 - DNA, 25 bp, Homo sapien
agatgcctttaacagagggagttgg

SEQ ID NO: 2534602 - DNA, 25 bp, Homo sapien
cgagttggagagatgcctttaacag

SEQ ID NO: 2534603 - DNA, 25 bp, Homo sapien
tcggcaggcggacaaaggcgatcat

SEQ ID NO: 2534604 - DNA, 25 bp, Homo sapien
gagagaagcaggcaggagaccttga

SEQ ID NO: 2534605 - DNA, 25 bp, Homo sapien
agaagcaggcaggagaccttgaggc

SEQ ID NO: 2534606 - DNA, 25 bp, Homo sapien
ccaaaagacatcatagatgagaagc

SEQ ID NO: 2534607 - DNA, 25 bp, Homo sapien
ggcgacacagaggcccatggccagt

SEQ ID NO: 2534608 - DNA, 25 bp, Homo sapien
gcgacacagaggcccatggccagtg

SEQ ID NO: 2534609 - DNA, 25 bp, Homo sapien
aggctcatcctctttccacaagcta

SEQ ID NO: 2534610 - DNA, 25 bp, Homo sapien
gagacagggtacagcagacagcagt

SEQ ID NO: 2534611 - DNA, 25 bp, Homo sapien
ttccacaagctatggcccttcacag

SEQ ID NO: 2534612 - DNA, 25 bp, Homo sapien
acagcagtcagtgtggactccaggc

SEQ ID NO: 2534613 - DNA, 25 bp, Homo sapien
aaagtgaactcacaccctagatagc

SEQ ID NO: 2534614 - DNA, 25 bp, Homo sapien
acttttcagagattaccactgttca

SEQ ID NO: 2534615 - DNA, 25 bp, Homo sapien
aggcatcatcccagcaattcattaa

SEQ ID NO: 2534616 - DNA, 25 bp, Homo sapien
tgcgttatagaaaactagagaatac

SEQ ID NO: 2534617 - DNA, 25 bp, Homo sapien
tatatacttggctgtctagttggcc

SEQ ID NO: 2534618 - DNA, 25 bp, Homo sapien
cattgctagacacagtaatcgacct

SEQ ID NO: 2534619 - DNA, 25 bp, Homo sapien
gagtgctcgatcacttccagcaggg

SEQ ID NO: 2534620 - DNA, 25 bp, Homo sapien
catacatcctgtggcctaagagaca

SEQ ID NO: 2534621 - DNA, 25 bp, Homo sapien
tcacagttcttcacgcaagtactag

SEQ ID NO: 2534622 - DNA, 25 bp, Homo sapien
tactagcttctcaatgacaggtgga

SEQ ID NO: 2534623 - DNA, 25 bp, Homo sapien
gcagcttcttaaaccctaaggcagg

SEQ ID NO: 2534624 - DNA, 25 bp, Homo sapien
gacaaggtcctgctgtgacggtgac

SEQ ID NO: 2534625 - DNA, 25 bp, Homo sapien
ccttgtagtctaggccagggcctgg

SEQ ID NO: 2534626 - DNA, 25 bp, Homo sapien
tgaaggttccccgagagcatggctc

SEQ ID NO: 2534627 - DNA, 25 bp, Homo sapien
ggatgaatgtccaactccctggcca

SEQ ID NO: 2534628 - DNA, 25 bp, Homo sapien
aagccctcaacacgcattcctgtgg

SEQ ID NO: 2534629 - DNA, 25 bp, Homo sapien
gtcaataaccaggacattaccaggg

SEQ ID NO: 2534630 - DNA, 25 bp, Homo sapien
aataaccaggacattaccagggagc

SEQ ID NO: 2534631 - DNA, 25 bp, Homo sapien
taaccaggacattaccagggagcag

SEQ ID NO: 2534632 - DNA, 25 bp, Homo sapien
gagtcaataaccaggacattaccag

SEQ ID NO: 2534633 - DNA, 25 bp, Homo sapien
caaggcatcaagggcacgaagaaag

SEQ ID NO: 2534634 - DNA, 25 bp, Homo sapien
gcaaggcatcaagggcacgaagaaa

SEQ ID NO: 2534635 - DNA, 25 bp, Homo sapien
aatacatggaatgcaaggcatcaag

SEQ ID NO: 2534636 - DNA, 25 bp, Homo sapien
atacatggaatgcaaggcatcaagg

SEQ ID NO: 2534637 - DNA, 25 bp, Homo sapien
tctgcagaagtacaacgaataaaat

SEQ ID NO: 2534638 - DNA, 25 bp, Homo sapien
ccagacctgtctgcagaagtacaac

SEQ ID NO: 2534639 - DNA, 25 bp, Homo sapien
aattctcccgacttgctctaaagtg

SEQ ID NO: 2534640 - DNA, 25 bp, Homo sapien
cctttagtgagtctgataaacccat

SEQ ID NO: 2534641 - DNA, 25 bp, Homo sapien
cagagctaagggtagaaagaccaca

SEQ ID NO: 2534642 - DNA, 25 bp, Homo sapien
tcttttttgggtcagcggcttacta

SEQ ID NO: 2534643 - DNA, 25 bp, Homo sapien
tctctgcaatgctaagataggacag

SEQ ID NO: 2534644 - DNA, 25 bp, Homo sapien
ggttcacagtcatccaaacagccaa

SEQ ID NO: 2534645 - DNA, 25 bp, Homo sapien
caatggccagtgagaacccagatga

SEQ ID NO: 2534646 - DNA, 25 bp, Homo sapien
cagatgaggacgagcatgacagaca

SEQ ID NO: 2534647 - DNA, 25 bp, Homo sapien
ccagatgaggacgagcatgacagac

SEQ ID NO: 2534648 - DNA, 25 bp, Homo sapien
gcagcagtgaaacgtccacagcaac

SEQ ID NO: 2534649 - DNA, 25 bp, Homo sapien
cttctgcaccaactgataatgtctt

SEQ ID NO: 2534650 - DNA, 25 bp, Homo sapien
ttttgggaccaattatcaacatggg

SEQ ID NO: 2534651 - DNA, 25 bp, Homo sapien
taataccaagatagctggaaatcca

SEQ ID NO: 2534652 - DNA, 25 bp, Homo sapien
gaaagctcacaggaatatacttctg

SEQ ID NO: 2534653 - DNA, 25 bp, Homo sapien
ccaatgactggtttcctaagtgcgt

SEQ ID NO: 2534654 - DNA, 25 bp, Homo sapien
aattttgtttccgtgcagcaatgac

SEQ ID NO: 2534655 - DNA, 25 bp, Homo sapien
gattaaacgcaagtaggtagcatat

SEQ ID NO: 2534656 - DNA, 25 bp, Homo sapien
taagtgcgttcagcatctccattag

SEQ ID NO: 2534657 - DNA, 25 bp, Homo sapien
ctggcacatcgggaggagaagaaaa

SEQ ID NO: 2534658 - DNA, 25 bp, Homo sapien
aaagcaaaagctatcgttgcaagaa

SEQ ID NO: 2534659 - DNA, 25 bp, Homo sapien
ggtgagcagggtcttgttaaatact

SEQ ID NO: 2534660 - DNA, 25 bp, Homo sapien
tcttgttaaatactggcacatcggg

SEQ ID NO: 2534661 - DNA, 25 bp, Homo sapien
ggcctctatgccaagctcaaccttc

SEQ ID NO: 2534662 - DNA, 25 bp, Homo sapien
cctctatgccaagctcaaccttctg

SEQ ID NO: 2534663 - DNA, 25 bp, Homo sapien
ctgcaagaacgtgggtagaggctga

SEQ ID NO: 2534664 - DNA, 25 bp, Homo sapien
aagaacgtgggtagaggctgacaat

SEQ ID NO: 2534665 - DNA, 25 bp, Homo sapien
aggaaaaacttacatgacatggtat

SEQ ID NO: 2534666 - DNA, 25 bp, Homo sapien
gattgtgtgggcaggtctcaacaga

SEQ ID NO: 2534667 - DNA, 25 bp, Homo sapien
ggcgaagccaagatttataaggaaa

SEQ ID NO: 2534668 - DNA, 25 bp, Homo sapien
tgacgtggatcaagaggttcaagga

SEQ ID NO: 2534669 - DNA, 25 bp, Homo sapien
tgtaaaaactacttgaactgagtca

SEQ ID NO: 2534670 - DNA, 25 bp, Homo sapien
gagcctgggtagagtcaattgtttg

SEQ ID NO: 2534671 - DNA, 25 bp, Homo sapien
gaagaagaacattactaaaagagag

SEQ ID NO: 2534672 - DNA, 25 bp, Homo sapien
gagagacagatgctccaattggaag

SEQ ID NO: 2534673 - DNA, 25 bp, Homo sapien
aaccaccaccgagaacattaagagg

SEQ ID NO: 2534674 - DNA, 25 bp, Homo sapien
tgttgaagtgaactactacctcctg

SEQ ID NO: 2534675 - DNA, 25 bp, Homo sapien
catggattatccaggccctatgagt

SEQ ID NO: 2534676 - DNA, 25 bp, Homo sapien
tgcagacagttctacggattatacg

SEQ ID NO: 2534677 - DNA, 25 bp, Homo sapien
gttgctaatagttgagaactgactt

SEQ ID NO: 2534678 - DNA, 25 bp, Homo sapien
tgctaatagttgagaactgacttgg

SEQ ID NO: 2534679 - DNA, 25 bp, Homo sapien
tgttgctaatagttgagaactgact

SEQ ID NO: 2534680 - DNA, 25 bp, Homo sapien
ttgctaatagttgagaactgacttg

SEQ ID NO: 2534681 - DNA, 25 bp, Homo sapien
aggacaacaagtcatagctgaaaac

SEQ ID NO: 2534682 - DNA, 25 bp, Homo sapien
ggaggacaacaagtcatagctgaaa

SEQ ID NO: 2534683 - DNA, 25 bp, Homo sapien
aaggaggacaacaagtcatagctga

SEQ ID NO: 2534684 - DNA, 25 bp, Homo sapien
aggaggacaacaagtcatagctgaa

SEQ ID NO: 2534685 - DNA, 25 bp, Homo sapien
tacttaaatgaaggactgatgtgcc

SEQ ID NO: 2534686 - DNA, 25 bp, Homo sapien
agaggacctggagggaactcttgcc

SEQ ID NO: 2534687 - DNA, 25 bp, Homo sapien
tctactaaagatgaggatcccaact

SEQ ID NO: 2534688 - DNA, 25 bp, Homo sapien
cattcaatgaacatggctacaggct

SEQ ID NO: 2534689 - DNA, 25 bp, Homo sapien
tgcccactttggcactgccagggac

SEQ ID NO: 2534690 - DNA, 25 bp, Homo sapien
ctttatcatgcccactttggcactg

SEQ ID NO: 2534691 - DNA, 25 bp, Homo sapien
cactgccagggacaatgaaacccat

SEQ ID NO: 2534692 - DNA, 25 bp, Homo sapien
ttggcactgccagggacaatgaaac

SEQ ID NO: 2534693 - DNA, 25 bp, Homo sapien
ccagaagaactattactgtctttct

SEQ ID NO: 2534694 - DNA, 25 bp, Homo sapien
cagaagaactattactgtctttctc

SEQ ID NO: 2534695 - DNA, 25 bp, Homo sapien
tgaaagcatcccaatgcagctgaat

SEQ ID NO: 2534696 - DNA, 25 bp, Homo sapien
tgccaaggaattaggaaagaaggtc

SEQ ID NO: 2534697 - DNA, 25 bp, Homo sapien
caactgttcgcaaaaaggctgcatc

SEQ ID NO: 2534698 - DNA, 25 bp, Homo sapien
caatgtgtcagttcaagagttttcc

SEQ ID NO: 2534699 - DNA, 25 bp, Homo sapien
caatgtgcaggacctaaactctagg

SEQ ID NO: 2534700 - DNA, 25 bp, Homo sapien
aactctagggttggtgatgcattta

SEQ ID NO: 2534701 - DNA, 25 bp, Homo sapien
tttaatgggaacgtctctggagtca

SEQ ID NO: 2534702 - DNA, 25 bp, Homo sapien
tgttttcgcacagcagagctaacaa

SEQ ID NO: 2534703 - DNA, 25 bp, Homo sapien
tacccttggggctacacagattgcc

SEQ ID NO: 2534704 - DNA, 25 bp, Homo sapien
tgttggcattatatcgctattctgg

SEQ ID NO: 2534705 - DNA, 25 bp, Homo sapien
tctggattggaaggttgccagtcat

SEQ ID NO: 2534706 - DNA, 25 bp, Homo sapien
acagattgccagcttctcttacttt

SEQ ID NO: 2534707 - DNA, 25 bp, Homo sapien
taggcacagctgctacggagcctct

SEQ ID NO: 2534708 - DNA, 25 bp, Homo sapien
ggacaggatgaagggttatataact

SEQ ID NO: 2534709 - DNA, 25 bp, Homo sapien
gttgagaactatttataactccatc

SEQ ID NO: 2534710 - DNA, 25 bp, Homo sapien
agtgagaataggtgctgagaacccc

SEQ ID NO: 2534711 - DNA, 25 bp, Homo sapien
cagagaaatattaagaccagcaggc

SEQ ID NO: 2534712 - DNA, 25 bp, Homo sapien
cagtggatttttcagcgaggattca

SEQ ID NO: 2534713 - DNA, 25 bp, Homo sapien
tggccctgttacaccaagtaatggg

SEQ ID NO: 2534714 - DNA, 25 bp, Homo sapien
agtaatgggctcactgcttgacgcg

SEQ ID NO: 2534715 - DNA, 25 bp, Homo sapien
catgctctgaaatcgggcagtgaag

SEQ ID NO: 2534716 - DNA, 25 bp, Homo sapien
gaagggcatcacaatcatatcaagt

SEQ ID NO: 2534717 - DNA, 25 bp, Homo sapien
aacttgtctacacacgctgcaatgg

SEQ ID NO: 2534718 - DNA, 25 bp, Homo sapien
ggtatacgtaaatgaactgccctca

SEQ ID NO: 2534719 - DNA, 25 bp, Homo sapien
cagaaagcccttacctgtcaccgaa

SEQ ID NO: 2534720 - DNA, 25 bp, Homo sapien
tacctgtcaccgaagggtacactaa

SEQ ID NO: 2534721 - DNA, 25 bp, Homo sapien
aaagacaatgcgtttcagaaagccc

SEQ ID NO: 2534722 - DNA, 25 bp, Homo sapien
caacatcccaatatcagggaaatac

SEQ ID NO: 2534723 - DNA, 25 bp, Homo sapien
catagcttattgtatcctcaatctc

SEQ ID NO: 2534724 - DNA, 25 bp, Homo sapien
tagcttattgtatcctcaatctcct

SEQ ID NO: 2534725 - DNA, 25 bp, Homo sapien
gatcatagcttattgtatcctcaat

SEQ ID NO: 2534726 - DNA, 25 bp, Homo sapien
agcttattgtatcctcaatctcctg

SEQ ID NO: 2534727 - DNA, 25 bp, Homo sapien
ttaggtgattaatttcagaaccagc

SEQ ID NO: 2534728 - DNA, 25 bp, Homo sapien
gaagaagtgtttaacagcagccaat

SEQ ID NO: 2534729 - DNA, 25 bp, Homo sapien
gaactctctattctgagtcaaatcc

SEQ ID NO: 2534730 - DNA, 25 bp, Homo sapien
tcaaatcctgccgaagtcctgtttt

SEQ ID NO: 2534731 - DNA, 25 bp, Homo sapien
aatgtagacacttgactggaatcca

SEQ ID NO: 2534732 - DNA, 25 bp, Homo sapien
tgaaactaccatagactataagaag

SEQ ID NO: 2534733 - DNA, 25 bp, Homo sapien
actggaatccaccagggaataggcc

SEQ ID NO: 2534734 - DNA, 25 bp, Homo sapien
gacacttgactggaatccaccaggg

SEQ ID NO: 2534735 - DNA, 25 bp, Homo sapien
tattgggcccagactaggaatagtc

SEQ ID NO: 2534736 - DNA, 25 bp, Homo sapien
tgaattggtgaggaatacacgtact

SEQ ID NO: 2534737 - DNA, 25 bp, Homo sapien
tgttcaatggaacatagattccaga

SEQ ID NO: 2534738 - DNA, 25 bp, Homo sapien
tgaatttctaacaaaagttccaaga

SEQ ID NO: 2534739 - DNA, 25 bp, Homo sapien
acgaaggaagcttaacattttatag

SEQ ID NO: 2534740 - DNA, 25 bp, Homo sapien
aagatctatcctctgacccactgtg

SEQ ID NO: 2534741 - DNA, 25 bp, Homo sapien
gatgatcaagaattctgacgatgaa

SEQ ID NO: 2534742 - DNA, 25 bp, Homo sapien
cactcttacaacaaaacgaaggaag

SEQ ID NO: 2534743 - DNA, 25 bp, Homo sapien
atgaagggatgaattttacggtccg

SEQ ID NO: 2534744 - DNA, 25 bp, Homo sapien
taaccatagaattctatattatgaa

SEQ ID NO: 2534745 - DNA, 25 bp, Homo sapien
taaataaccatagaattctatatta

SEQ ID NO: 2534746 - DNA, 25 bp, Homo sapien
tatgaagggatgaattttacggtcc

SEQ ID NO: 2534747 - DNA, 25 bp, Homo sapien
tccggagcggactagacagccagcc

SEQ ID NO: 2534748 - DNA, 25 bp, Homo sapien
cattcacggcattggagaggtcctg

SEQ ID NO: 2534749 - DNA, 25 bp, Homo sapien
tccctgctgcattcacggcattgga

SEQ ID NO: 2534750 - DNA, 25 bp, Homo sapien
gtggcaaagggagtgcagtcccagc

SEQ ID NO: 2534751 - DNA, 25 bp, Homo sapien
acagtatcccagagctcgtcctcgg

SEQ ID NO: 2534752 - DNA, 25 bp, Homo sapien
gaactcctcgcaggcctcaatcata

SEQ ID NO: 2534753 - DNA, 25 bp, Homo sapien
agcatcctcatgaactcctcgcagg

SEQ ID NO: 2534754 - DNA, 25 bp, Homo sapien
cccaggaggacagtatcccagagct

SEQ ID NO: 2534755 - DNA, 25 bp, Homo sapien
gaggccggatcttgtccgagccgcc

SEQ ID NO: 2534756 - DNA, 25 bp, Homo sapien
cagaggccggatcttgtccgagccg

SEQ ID NO: 2534757 - DNA, 25 bp, Homo sapien
ggatcttgtccgagccgcccacgcc

SEQ ID NO: 2534758 - DNA, 25 bp, Homo sapien
cacagaggccggatcttgtccgagc

SEQ ID NO: 2534759 - DNA, 25 bp, Homo sapien
gtactggactgtggtcttccctgca

SEQ ID NO: 2534760 - DNA, 25 bp, Homo sapien
tgtactggactgtggtcttccctgc

SEQ ID NO: 2534761 - DNA, 25 bp, Homo sapien
taagcttgtactggactgtggtctt

SEQ ID NO: 2534762 - DNA, 25 bp, Homo sapien
cagcttaagcttgtactggactgtg

SEQ ID NO: 2534763 - DNA, 25 bp, Homo sapien
tggtttaaagtaaccactgaactgc

SEQ ID NO: 2534764 - DNA, 25 bp, Homo sapien
ctgcctttgaatctagtaaaaaggg

SEQ ID NO: 2534765 - DNA, 25 bp, Homo sapien
ctttgaatctagtaaaaagggagct

SEQ ID NO: 2534766 - DNA, 25 bp, Homo sapien
aaaatgccacattgaatctgaaccg

SEQ ID NO: 2534767 - DNA, 25 bp, Homo sapien
tgaatctgaaccgtgctcattttaa

SEQ ID NO: 2534768 - DNA, 25 bp, Homo sapien
tgtgtcccctggctttcaaaatgcc

SEQ ID NO: 2534769 - DNA, 25 bp, Homo sapien
gagtaccataatcaccctgggtgtg

SEQ ID NO: 2534770 - DNA, 25 bp, Homo sapien
ggagataatcacaagtttggggaga

SEQ ID NO: 2534771 - DNA, 25 bp, Homo sapien
gtgatttttataagtggctgaatgt

SEQ ID NO: 2534772 - DNA, 25 bp, Homo sapien
aaggagataatcacaagtttgggga

SEQ ID NO: 2534773 - DNA, 25 bp, Homo sapien
agaaaggagataatcacaagtttgg

SEQ ID NO: 2534774 - DNA, 25 bp, Homo sapien
agcttctgatgaactcagcagccga

SEQ ID NO: 2534775 - DNA, 25 bp, Homo sapien
gcttctgatgaactcagcagccgaa

SEQ ID NO: 2534776 - DNA, 25 bp, Homo sapien
cttctgatgaactcagcagccgaat

SEQ ID NO: 2534777 - DNA, 25 bp, Homo sapien
cagcttctgatgaactcagcagccg

SEQ ID NO: 2534778 - DNA, 25 bp, Homo sapien
ggcgcaaacacgactgactggagcc

SEQ ID NO: 2534779 - DNA, 25 bp, Homo sapien
cccgggtcaggtgatactcccagct

SEQ ID NO: 2534780 - DNA, 25 bp, Homo sapien
gcaaacacgactgactggagccttg

SEQ ID NO: 2534781 - DNA, 25 bp, Homo sapien
agtggcgcaaacacgactgactgga

SEQ ID NO: 2534782 - DNA, 25 bp, Homo sapien
taattgatgaacaagagcctgaggt

SEQ ID NO: 2534783 - DNA, 25 bp, Homo sapien
gcctgaggtgctatcaaagccaaat

SEQ ID NO: 2534784 - DNA, 25 bp, Homo sapien
tgactgtcaattgggtctaaaattc

SEQ ID NO: 2534785 - DNA, 25 bp, Homo sapien
tccttttgcaacagctacacctata

SEQ ID NO: 2534786 - DNA, 25 bp, Homo sapien
cataggccctggctatttagcacta

SEQ ID NO: 2534787 - DNA, 25 bp, Homo sapien
aagtacatcccctcagtataacaga

SEQ ID NO: 2534788 - DNA, 25 bp, Homo sapien
tgtttcatgatgaccctccacaagg

SEQ ID NO: 2534789 - DNA, 25 bp, Homo sapien
ggcattttccaactacccaattaga

SEQ ID NO: 2534790 - DNA, 25 bp, Homo sapien
caatggaggtccatctacatcactt

SEQ ID NO: 2534791 - DNA, 25 bp, Homo sapien
ggtccatctacatcactttcagtgt

SEQ ID NO: 2534792 - DNA, 25 bp, Homo sapien
ggaggtccatctacatcactttcag

SEQ ID NO: 2534793 - DNA, 25 bp, Homo sapien
tctacatcactttcagtgtgcatca

SEQ ID NO: 2534794 - DNA, 25 bp, Homo sapien
tactgtcaactacaatgccctgaag

SEQ ID NO: 2534795 - DNA, 25 bp, Homo sapien
taaacaggctgtggtagatccttgc

SEQ ID NO: 2534796 - DNA, 25 bp, Homo sapien
tcattgaaacgcatcctagcagcgg

SEQ ID NO: 2534797 - DNA, 25 bp, Homo sapien
gatttctgagataccaaaaggagag

SEQ ID NO: 2534798 - DNA, 25 bp, Homo sapien
ttcaggtgccggtatcaagtccagg

SEQ ID NO: 2534799 - DNA, 25 bp, Homo sapien
tattacccaaaggtgtcacaggccc

SEQ ID NO: 2534800 - DNA, 25 bp, Homo sapien
cctgcatgttaagggctaggtctca

SEQ ID NO: 2534801 - DNA, 25 bp, Homo sapien
tcaggactcttgttgaggaccccaa

SEQ ID NO: 2534802 - DNA, 25 bp, Homo sapien
cataattctgtacatcatgcactgg

SEQ ID NO: 2534803 - DNA, 25 bp, Homo sapien
taaaggttagctccaatgtaaaatc

SEQ ID NO: 2534804 - DNA, 25 bp, Homo sapien
caaggtgctgagatcccgggcatga

SEQ ID NO: 2534805 - DNA, 25 bp, Homo sapien
ccagcctagatggtagtttcctaaa

SEQ ID NO: 2534806 - DNA, 25 bp, Homo sapien
gacacctccacacatggcaaagttt

SEQ ID NO: 2534807 - DNA, 25 bp, Homo sapien
acctccacacatggcaaagtttatc

SEQ ID NO: 2534808 - DNA, 25 bp, Homo sapien
cttgaaaagacacctccacacatgg

SEQ ID NO: 2534809 - DNA, 25 bp, Homo sapien
agacacctccacacatggcaaagtt

SEQ ID NO: 2534810 - DNA, 25 bp, Homo sapien
gacatctgcgacagcacttggtgaa

SEQ ID NO: 2534811 - DNA, 25 bp, Homo sapien
cattaagaactacaaaggaccatca

SEQ ID NO: 2534812 - DNA, 25 bp, Homo sapien
cagccatgtgtaatgttgtcagtgc

SEQ ID NO: 2534813 - DNA, 25 bp, Homo sapien
aatatttaatggtgtagctgggcgc

SEQ ID NO: 2534814 - DNA, 25 bp, Homo sapien
tgtggaggtgccatagcgactgcta

SEQ ID NO: 2534815 - DNA, 25 bp, Homo sapien
aaaactcgagcaccaatacactagg

SEQ ID NO: 2534816 - DNA, 25 bp, Homo sapien
catgcccggccaatggtgtggtaat

SEQ ID NO: 2534817 - DNA, 25 bp, Homo sapien
tacgataccatgaggagtactgctg

SEQ ID NO: 2534818 - DNA, 25 bp, Homo sapien
tcacactagcatgttgtccaaaatg

SEQ ID NO: 2534819 - DNA, 25 bp, Homo sapien
caaatacacagctgagaatccaaaa

SEQ ID NO: 2534820 - DNA, 25 bp, Homo sapien
tgactttgtagctgcaattcaccat

SEQ ID NO: 2534821 - DNA, 25 bp, Homo sapien
gcattttcgctactacacagtatga

SEQ ID NO: 2534822 - DNA, 25 bp, Homo sapien
ggcttcatacttcagggacagaaca

SEQ ID NO: 2534823 - DNA, 25 bp, Homo sapien
aaatccaagggtctcaatgcactga

SEQ ID NO: 2534824 - DNA, 25 bp, Homo sapien
cactctgaccatgaaaaaagcacgg

SEQ ID NO: 2534825 - DNA, 25 bp, Homo sapien
caatctactggaaagcaatagggcc

SEQ ID NO: 2534826 - DNA, 25 bp, Homo sapien
cattcctcggtttaacaatcctact

SEQ ID NO: 2534827 - DNA, 25 bp, Homo sapien
gagccatgttcaaaagctttcctac

SEQ ID NO: 2534828 - DNA, 25 bp, Homo sapien
cctcggtttaacaatcctacttgat

SEQ ID NO: 2534829 - DNA, 25 bp, Homo sapien
ttttaactgttagtgaagggagcca

SEQ ID NO: 2534830 - DNA, 25 bp, Homo sapien
ttgactcacaccactcaacaggcta

SEQ ID NO: 2534831 - DNA, 25 bp, Homo sapien
tattgactcacaccactcaacaggc

SEQ ID NO: 2534832 - DNA, 25 bp, Homo sapien
atattgactcacaccactcaacagg

SEQ ID NO: 2534833 - DNA, 25 bp, Homo sapien
attgactcacaccactcaacaggct

SEQ ID NO: 2534834 - DNA, 25 bp, Homo sapien
gaaaaaagccagataacgaatctca

SEQ ID NO: 2534835 - DNA, 25 bp, Homo sapien
aaaagccagataacgaatctcagcg

SEQ ID NO: 2534836 - DNA, 25 bp, Homo sapien
aagccagataacgaatctcagcgta

SEQ ID NO: 2534837 - DNA, 25 bp, Homo sapien
agccagataacgaatctcagcgtat

SEQ ID NO: 2534838 - DNA, 25 bp, Homo sapien
gactgcactcagttgggaacaaaca

SEQ ID NO: 2534839 - DNA, 25 bp, Homo sapien
tggagcttaatcactgcagactgca

SEQ ID NO: 2534840 - DNA, 25 bp, Homo sapien
tgttaccaaagaggtctaaaccaga

SEQ ID NO: 2534841 - DNA, 25 bp, Homo sapien
gaaagatctctctgtgttggtagaa

SEQ ID NO: 2534842 - DNA, 25 bp, Homo sapien
aattccataattgtgcacgggacct

SEQ ID NO: 2534843 - DNA, 25 bp, Homo sapien
ccataattgtgcacgggacctacaa

SEQ ID NO: 2534844 - DNA, 25 bp, Homo sapien
gtgcacgggacctacaacacataag

SEQ ID NO: 2534845 - DNA, 25 bp, Homo sapien
aattgtgcacgggacctacaacaca

SEQ ID NO: 2534846 - DNA, 25 bp, Homo sapien
cattttcattttccccatttcttga

SEQ ID NO: 2534847 - DNA, 25 bp, Homo sapien
acattttcattttccccatttcttg

SEQ ID NO: 2534848 - DNA, 25 bp, Homo sapien
ctctccctgcgctccctgtcccaga

SEQ ID NO: 2534849 - DNA, 25 bp, Homo sapien
ccaactctccctgcgctccctgtcc

SEQ ID NO: 2534850 - DNA, 25 bp, Homo sapien
actctccctgcgctccctgtcccag

SEQ ID NO: 2534851 - DNA, 25 bp, Homo sapien
ctcaccaactctccctgcgctccct

SEQ ID NO: 2534852 - DNA, 25 bp, Homo sapien
tggctcgctggctgcacggcgggcc

SEQ ID NO: 2534853 - DNA, 25 bp, Homo sapien
tcgctcgggccgtagctgaaggcgc

SEQ ID NO: 2534854 - DNA, 25 bp, Homo sapien
gcgatgaggcgaggccactcgatca

SEQ ID NO: 2534855 - DNA, 25 bp, Homo sapien
tgcagctccaaacccaacatggcgg

SEQ ID NO: 2534856 - DNA, 25 bp, Homo sapien
gaagtagatgaaaccagtgctgaag

SEQ ID NO: 2534857 - DNA, 25 bp, Homo sapien
aagaagtagatgaaaccagtgctga

SEQ ID NO: 2534858 - DNA, 25 bp, Homo sapien
aagtagatgaaaccagtgctgaaga

SEQ ID NO: 2534859 - DNA, 25 bp, Homo sapien
gtagatgaaaccagtgctgaagatg

SEQ ID NO: 2534860 - DNA, 25 bp, Homo sapien
caaagctacacatagtacaggtggt

SEQ ID NO: 2534861 - DNA, 25 bp, Homo sapien
ctgactgcaacctgttgccaaagct

SEQ ID NO: 2534862 - DNA, 25 bp, Homo sapien
ggaacgcgtcagcacttgagcaatg

SEQ ID NO: 2534863 - DNA, 25 bp, Homo sapien
aggccttcccgggaacgcgtcagca

SEQ ID NO: 2534864 - DNA, 25 bp, Homo sapien
aaatggccagtggacagggaatcct

SEQ ID NO: 2534865 - DNA, 25 bp, Homo sapien
gcctatgagcaaggggccaatgccc

SEQ ID NO: 2534866 - DNA, 25 bp, Homo sapien
gatgatgaagagatccagctcgcct

SEQ ID NO: 2534867 - DNA, 25 bp, Homo sapien
tattgcaacccaatggacacactcc

SEQ ID NO: 2534868 - DNA, 25 bp, Homo sapien
acgccgccaaagttcaaccccaatg

SEQ ID NO: 2534869 - DNA, 25 bp, Homo sapien
cacgccgccaaagttcaaccccaat

SEQ ID NO: 2534870 - DNA, 25 bp, Homo sapien
gccgccaaagttcaaccccaatgag

SEQ ID NO: 2534871 - DNA, 25 bp, Homo sapien
cgccaaagttcaaccccaatgagat

SEQ ID NO: 2534872 - DNA, 25 bp, Homo sapien
ccatctccacagctatcgggggcat

SEQ ID NO: 2534873 - DNA, 25 bp, Homo sapien
ccttgatttcatagacccacatgca

SEQ ID NO: 2534874 - DNA, 25 bp, Homo sapien
ttccttgatttcatagacccacatg

SEQ ID NO: 2534875 - DNA, 25 bp, Homo sapien
tccttccttgatttcatagacccac

SEQ ID NO: 2534876 - DNA, 25 bp, Homo sapien
ttgatttcatagacccacatgcagc

SEQ ID NO: 2534877 - DNA, 25 bp, Homo sapien
cagtggacgctgggattgggttcct

SEQ ID NO: 2534878 - DNA, 25 bp, Homo sapien
ggttcctttgcataataaggctcca

SEQ ID NO: 2534879 - DNA, 25 bp, Homo sapien
ggactctgggcagatgttcccggga

SEQ ID NO: 2534880 - DNA, 25 bp, Homo sapien
cctttgcataataaggctccaccat

SEQ ID NO: 2534881 - DNA, 25 bp, Homo sapien
accatgaggggaatcagccttcaca

SEQ ID NO: 2534882 - DNA, 25 bp, Homo sapien
actttgtgaccatgaggggaatcag

SEQ ID NO: 2534883 - DNA, 25 bp, Homo sapien
tgaccatgaggggaatcagccttca

SEQ ID NO: 2534884 - DNA, 25 bp, Homo sapien
ttgtgaccatgaggggaatcagcct

SEQ ID NO: 2534885 - DNA, 25 bp, Homo sapien
tttgactcaaacaatgtagaggatg

SEQ ID NO: 2534886 - DNA, 25 bp, Homo sapien
aaagtgaggtgtcaaggataaagcc

SEQ ID NO: 2534887 - DNA, 25 bp, Homo sapien
tatttctagaccaattgactatggg

SEQ ID NO: 2534888 - DNA, 25 bp, Homo sapien
agcttacttgaggaaggctgtggtc

SEQ ID NO: 2534889 - DNA, 25 bp, Homo sapien
tcattcctataagggccaaatgcaa

SEQ ID NO: 2534890 - DNA, 25 bp, Homo sapien
tatcccactcattcctataagggcc

SEQ ID NO: 2534891 - DNA, 25 bp, Homo sapien
cactcattcctataagggccaaatg

SEQ ID NO: 2534892 - DNA, 25 bp, Homo sapien
ccatatcccactcattcctataagg

SEQ ID NO: 2534893 - DNA, 25 bp, Homo sapien
tggagtgaagatgcaaatgactgtg

SEQ ID NO: 2534894 - DNA, 25 bp, Homo sapien
agatgcaaatgactgtgatgatcca

SEQ ID NO: 2534895 - DNA, 25 bp, Homo sapien
atgactgtgatgatccaaaccctgg

SEQ ID NO: 2534896 - DNA, 25 bp, Homo sapien
gcaggaaggtggcagccccgtaggg

SEQ ID NO: 2534897 - DNA, 25 bp, Homo sapien
gggatcagaggtaactccactgtgt

SEQ ID NO: 2534898 - DNA, 25 bp, Homo sapien
tgtgtgtgccctccgctgtgtgtgc

SEQ ID NO: 2534899 - DNA, 25 bp, Homo sapien
tgtgtctgtcctccgctgtgtgtgc

SEQ ID NO: 2534900 - DNA, 25 bp, Homo sapien
tgtgccttccgctgtgtgtgccctc

SEQ ID NO: 2534901 - DNA, 25 bp, Homo sapien
tgtgaaaaagcaccctgaaagagca

SEQ ID NO: 2534902 - DNA, 25 bp, Homo sapien
tgttcagatgtatcacgaagggctc

SEQ ID NO: 2534903 - DNA, 25 bp, Homo sapien
gaaagagcaaatacagtgcagggat

SEQ ID NO: 2534904 - DNA, 25 bp, Homo sapien
ggaagaggagatgcatacaccctca

SEQ ID NO: 2534905 - DNA, 25 bp, Homo sapien
ccagcctatgtacttattttgagac

SEQ ID NO: 2534906 - DNA, 25 bp, Homo sapien
gaccactggcatgtgccaacactcc

SEQ ID NO: 2534907 - DNA, 25 bp, Homo sapien
tggcatgtgccaacactccctgctg

SEQ ID NO: 2534908 - DNA, 25 bp, Homo sapien
cctcgcccagcctatgtacttattt

SEQ ID NO: 2534909 - DNA, 25 bp, Homo sapien
cacaacgctgtgagttaggcccaca

SEQ ID NO: 2534910 - DNA, 25 bp, Homo sapien
gatgcccagtaatagacggaccttg

SEQ ID NO: 2534911 - DNA, 25 bp, Homo sapien
taaatgttagctcagggctcggccg

SEQ ID NO: 2534912 - DNA, 25 bp, Homo sapien
ccattctacagatgcggaaacggag

SEQ ID NO: 2534913 - DNA, 25 bp, Homo sapien
cattctgatgccgtagctctgctcc

SEQ ID NO: 2534914 - DNA, 25 bp, Homo sapien
cagtgaaggctcacattgctgtggg

SEQ ID NO: 2534915 - DNA, 25 bp, Homo sapien
ttcatgttacaaggttcagggctca

SEQ ID NO: 2534916 - DNA, 25 bp, Homo sapien
tgaccaggtagatcttgaagacagc

SEQ ID NO: 2534917 - DNA, 25 bp, Homo sapien
gtgctaggctaaagcatcaaaatgt

SEQ ID NO: 2534918 - DNA, 25 bp, Homo sapien
aaaatgtactcttgcctctggcatt

SEQ ID NO: 2534919 - DNA, 25 bp, Homo sapien
tctggagatggcaaatagagtgggt

SEQ ID NO: 2534920 - DNA, 25 bp, Homo sapien
tatttgcaaaatagtggtacacgag

SEQ ID NO: 2534921 - DNA, 25 bp, Homo sapien
tggccctagcctcaagtggtcttga

SEQ ID NO: 2534922 - DNA, 25 bp, Homo sapien
ccatgttggccctagcctcaagtgg

SEQ ID NO: 2534923 - DNA, 25 bp, Homo sapien
gttggccctagcctcaagtggtctt

SEQ ID NO: 2534924 - DNA, 25 bp, Homo sapien
atgttggccctagcctcaagtggtc

SEQ ID NO: 2534925 - DNA, 25 bp, Homo sapien
caatgcgaggtgtttcaggtagaag

SEQ ID NO: 2534926 - DNA, 25 bp, Homo sapien
gaaaataatatgcaggtgataccag

SEQ ID NO: 2534927 - DNA, 25 bp, Homo sapien
ttaaaaaagtgagttgacaggagca

SEQ ID NO: 2534928 - DNA, 25 bp, Homo sapien
tctttagagctcaccggcaatgcga

SEQ ID NO: 2534929 - DNA, 25 bp, Homo sapien
gctgggccgaactgacatcactgaa

SEQ ID NO: 2534930 - DNA, 25 bp, Homo sapien
tagtaaacggcagaacgaggctcaa

SEQ ID NO: 2534931 - DNA, 25 bp, Homo sapien
tgacaaggccaacgagcagagggtt

SEQ ID NO: 2534932 - DNA, 25 bp, Homo sapien
tgatgtgagtacctccagctgggcc

SEQ ID NO: 2534933 - DNA, 25 bp, Homo sapien
gaattgccaaagagctctgagactg

SEQ ID NO: 2534934 - DNA, 25 bp, Homo sapien
ccgggacacagcagactattttaga

SEQ ID NO: 2534935 - DNA, 25 bp, Homo sapien
gaagggacactcgtcttgtgctagc

SEQ ID NO: 2534936 - DNA, 25 bp, Homo sapien
aatatctactatgccccgggacaca

SEQ ID NO: 2534937 - DNA, 25 bp, Homo sapien
agttatcttggcctacctactgcac

SEQ ID NO: 2534938 - DNA, 25 bp, Homo sapien
aggcacaggcctcccgttagtacat

SEQ ID NO: 2534939 - DNA, 25 bp, Homo sapien
ttataggtgcccactgacaagcctg

SEQ ID NO: 2534940 - DNA, 25 bp, Homo sapien
tgttggacaccttgcaaactaccag

SEQ ID NO: 2534941 - DNA, 25 bp, Homo sapien
ctctgagggactctgagcagtcatt

SEQ ID NO: 2534942 - DNA, 25 bp, Homo sapien
cctaattcatgagttgttcttggag

SEQ ID NO: 2534943 - DNA, 25 bp, Homo sapien
agagggtaccactctccttaaggcg

SEQ ID NO: 2534944 - DNA, 25 bp, Homo sapien
tgcctcaggtggacttaaagcccag

SEQ ID NO: 2534945 - DNA, 25 bp, Homo sapien
gagctatgatcatgccagcctgggt

SEQ ID NO: 2534946 - DNA, 25 bp, Homo sapien
tgaagccaggagttctaggctgaag

SEQ ID NO: 2534947 - DNA, 25 bp, Homo sapien
gctatgatcatgccagcctgggtga

SEQ ID NO: 2534948 - DNA, 25 bp, Homo sapien
tgggtgacagagtaagaatctggct

SEQ ID NO: 2534949 - DNA, 25 bp, Homo sapien
atcatcctaaagaaacccagcacca

SEQ ID NO: 2534950 - DNA, 25 bp, Homo sapien
atcagaattgcacacatgaaatggg

SEQ ID NO: 2534951 - DNA, 25 bp, Homo sapien
tttacataccatcaaactcgccctt

SEQ ID NO: 2534952 - DNA, 25 bp, Homo sapien
taaagtcacagagttgtccgatatc

SEQ ID NO: 2534953 - DNA, 25 bp, Homo sapien
cccgggaggcggaggttgcagtgag

SEQ ID NO: 2534954 - DNA, 25 bp, Homo sapien
gttccagatactcgggaggctcagg

SEQ ID NO: 2534955 - DNA, 25 bp, Homo sapien
caggagaattgcttgaacccgggag

SEQ ID NO: 2534956 - DNA, 25 bp, Homo sapien
ccaagattgcaccactgcactccag

SEQ ID NO: 2534957 - DNA, 25 bp, Homo sapien
gctcacagttggtagcagaatgcaa

SEQ ID NO: 2534958 - DNA, 25 bp, Homo sapien
agtgaattcgccctcacagagccag

SEQ ID NO: 2534959 - DNA, 25 bp, Homo sapien
tgccttgctggctgtatgaccctgg

SEQ ID NO: 2534960 - DNA, 25 bp, Homo sapien
tctgcccttgagaagagctagccca

SEQ ID NO: 2534961 - DNA, 25 bp, Homo sapien
accagcaggcgccattagaggctgc

SEQ ID NO: 2534962 - DNA, 25 bp, Homo sapien
gccattagaggctgcccgttctaca

SEQ ID NO: 2534963 - DNA, 25 bp, Homo sapien
cctttcctgtatggccacaggcacc

SEQ ID NO: 2534964 - DNA, 25 bp, Homo sapien
caggcgccattagaggctgcccgtt

SEQ ID NO: 2534965 - DNA, 25 bp, Homo sapien
cttgtaggaatggtggcctggaaag

SEQ ID NO: 2534966 - DNA, 25 bp, Homo sapien
aaggctctgataaggtctgtgatca

SEQ ID NO: 2534967 - DNA, 25 bp, Homo sapien
ctggaaagatctgggccaacccacc

SEQ ID NO: 2534968 - DNA, 25 bp, Homo sapien
aaaaggctctgataaggtctgtgat

SEQ ID NO: 2534969 - DNA, 25 bp, Homo sapien
agtgagctctctcggtcagcagccc

SEQ ID NO: 2534970 - DNA, 25 bp, Homo sapien
gagtgagctctctcggtcagcagcc

SEQ ID NO: 2534971 - DNA, 25 bp, Homo sapien
tgagtgagctctctcggtcagcagc

SEQ ID NO: 2534972 - DNA, 25 bp, Homo sapien
gattagtgtttgactcagcctagcc

SEQ ID NO: 2534973 - DNA, 25 bp, Homo sapien
ggagtgaattctgcagccttgaggc

SEQ ID NO: 2534974 - DNA, 25 bp, Homo sapien
gctggcaggcctgaaatctgttgct

SEQ ID NO: 2534975 - DNA, 25 bp, Homo sapien
tgagtacccctagggacaggcaggt

SEQ ID NO: 2534976 - DNA, 25 bp, Homo sapien
gaaatgcggtggaaacttcttgctt

SEQ ID NO: 2534977 - DNA, 25 bp, Homo sapien
caaaggagcctgtgaacccaggaca

SEQ ID NO: 2534978 - DNA, 25 bp, Homo sapien
ggacaagcatggtcccacatccctg

SEQ ID NO: 2534979 - DNA, 25 bp, Homo sapien
agtgtaccgcgtctaccctgggatt

SEQ ID NO: 2534980 - DNA, 25 bp, Homo sapien
ccatccctggccatgagcttctact

SEQ ID NO: 2534981 - DNA, 25 bp, Homo sapien
ggccatgagcttctacttcttttct

SEQ ID NO: 2534982 - DNA, 25 bp, Homo sapien
gattacgggcgtgtgtcaacatgct

SEQ ID NO: 2534983 - DNA, 25 bp, Homo sapien
ttgctccattgcttaggctagagtg

SEQ ID NO: 2534984 - DNA, 25 bp, Homo sapien
catcagggtctcatgggcagtctgg

SEQ ID NO: 2534985 - DNA, 25 bp, Homo sapien
tgtcccatgaaacctagtccacgag

SEQ ID NO: 2534986 - DNA, 25 bp, Homo sapien
ccataatctggtcggctcagagaca

SEQ ID NO: 2534987 - DNA, 25 bp, Homo sapien
gtttctcacaccaggctaaggaggt

SEQ ID NO: 2534988 - DNA, 25 bp, Homo sapien
tagctgtagcactctttgctggtgg

SEQ ID NO: 2534989 - DNA, 25 bp, Homo sapien
gcagcgacagccgagtcgacactgg

SEQ ID NO: 2534990 - DNA, 25 bp, Homo sapien
gactcctgtaggatgtcggacgccg

SEQ ID NO: 2534991 - DNA, 25 bp, Homo sapien
ggtccccgttgagctcacctgactt

SEQ ID NO: 2534992 - DNA, 25 bp, Homo sapien
atgtcggacgccgacacagctgcct

SEQ ID NO: 2534993 - DNA, 25 bp, Homo sapien
gctggagggctgtcgctttcggcgg

SEQ ID NO: 2534994 - DNA, 25 bp, Homo sapien
agggctgtcgctttcggcggggttg

SEQ ID NO: 2534995 - DNA, 25 bp, Homo sapien
agctggagggctgtcgctttcggcg

SEQ ID NO: 2534996 - DNA, 25 bp, Homo sapien
tggagggctgtcgctttcggcgggg

SEQ ID NO: 2534997 - DNA, 25 bp, Homo sapien
ctccagggacagatgtgaagaaaag

SEQ ID NO: 2534998 - DNA, 25 bp, Homo sapien
acagatgtgaagaaaaggcggaaac

SEQ ID NO: 2534999 - DNA, 25 bp, Homo sapien
gggacagatgtgaagaaaaggcgga

SEQ ID NO: 2535000 - DNA, 25 bp, Homo sapien
cagggacagatgtgaagaaaaggcg

SEQ ID NO: 2535001 - DNA, 25 bp, Homo sapien
catcatcctccaaagcgactttctg

SEQ ID NO: 2535002 - DNA, 25 bp, Homo sapien
caaagcgactttctgtaccttagct

SEQ ID NO: 2535003 - DNA, 25 bp, Homo sapien
tgtaccttagcttttgctggctcct

SEQ ID NO: 2535004 - DNA, 25 bp, Homo sapien
tcctccaaagcgactttctgtacct

SEQ ID NO: 2535005 - DNA, 25 bp, Homo sapien
ggtggtctgaagctcgttgccatct

SEQ ID NO: 2535006 - DNA, 25 bp, Homo sapien
gggctcccagcttcttggctacgtg

SEQ ID NO: 2535007 - DNA, 25 bp, Homo sapien
gggtggtctgaagctcgttgccatc

SEQ ID NO: 2535008 - DNA, 25 bp, Homo sapien
ggctacgtgggctcggaattcaggg

SEQ ID NO: 2535009 - DNA, 25 bp, Homo sapien
tcggttgggaggttgacaactggct

SEQ ID NO: 2535010 - DNA, 25 bp, Homo sapien
ttgggaggttgacaactggctattt

SEQ ID NO: 2535011 - DNA, 25 bp, Homo sapien
aggctcggttgggaggttgacaact

SEQ ID NO: 2535012 - DNA, 25 bp, Homo sapien
ctgaggctcggttgggaggttgaca

SEQ ID NO: 2535013 - DNA, 25 bp, Homo sapien
aggggaagatcccacgcccctcagc

SEQ ID NO: 2535014 - DNA, 25 bp, Homo sapien
gatcccacgcccctcagccagtctc

SEQ ID NO: 2535015 - DNA, 25 bp, Homo sapien
tccaggggaagatcccacgcccctc

SEQ ID NO: 2535016 - DNA, 25 bp, Homo sapien
gggaagatcccacgcccctcagcca

SEQ ID NO: 2535017 - DNA, 25 bp, Homo sapien
ggcattgccgcctcgcggcaccgct

SEQ ID NO: 2535018 - DNA, 25 bp, Homo sapien
tgcgggcgttgctccaagccccaag

SEQ ID NO: 2535019 - DNA, 25 bp, Homo sapien
tccgaatcgctcactgtgccactgg

SEQ ID NO: 2535020 - DNA, 25 bp, Homo sapien
gctgttactactttccgaatcgctc

SEQ ID NO: 2535021 - DNA, 25 bp, Homo sapien
gagaacaccgccgttatcaagcctc

SEQ ID NO: 2535022 - DNA, 25 bp, Homo sapien
accgcaaaggattgtggagaacacc

SEQ ID NO: 2535023 - DNA, 25 bp, Homo sapien
gattgtggagaacaccgccgttatc

SEQ ID NO: 2535024 - DNA, 25 bp, Homo sapien
cttgaaccaccgcaaaggattgtgg

SEQ ID NO: 2535025 - DNA, 25 bp, Homo sapien
cacctacaatgtgggctgtgctggg

SEQ ID NO: 2535026 - DNA, 25 bp, Homo sapien
tggagtaaacctgatcacatgacgt

SEQ ID NO: 2535027 - DNA, 25 bp, Homo sapien
gagtagcccaccagaaaactaggca

SEQ ID NO: 2535028 - DNA, 25 bp, Homo sapien
tgttgataaccaattgcagtgtgca

SEQ ID NO: 2535029 - DNA, 25 bp, Homo sapien
gagatgctgccagttatcgcccaag

SEQ ID NO: 2535030 - DNA, 25 bp, Homo sapien
ccgaattctgttgctgtgcgtcatg

SEQ ID NO: 2535031 - DNA, 25 bp, Homo sapien
gcagaaggctgtgggtccgaattct

SEQ ID NO: 2535032 - DNA, 25 bp, Homo sapien
tggaagtgcactcaccagaagtggg

SEQ ID NO: 2535033 - DNA, 25 bp, Homo sapien
ccacgtctggcctgggataactcat

SEQ ID NO: 2535034 - DNA, 25 bp, Homo sapien
attgacaggatgagttctggagtac

SEQ ID NO: 2535035 - DNA, 25 bp, Homo sapien
tgggacagagtgattgacaggatga

SEQ ID NO: 2535036 - DNA, 25 bp, Homo sapien
tgggaccttcccagtagacaatggg

SEQ ID NO: 2535037 - DNA, 25 bp, Homo sapien
tcttcttcgagaggatgagagtgtc

SEQ ID NO: 2535038 - DNA, 25 bp, Homo sapien
gtcactgtcttggatgccatagatc

SEQ ID NO: 2535039 - DNA, 25 bp, Homo sapien
tcttcgagaggatgagagtgtcact

SEQ ID NO: 2535040 - DNA, 25 bp, Homo sapien
ctttcttcttcgagaggatgagagt

SEQ ID NO: 2535041 - DNA, 25 bp, Homo sapien
gttgatggcataggcgtagctccca

SEQ ID NO: 2535042 - DNA, 25 bp, Homo sapien
tatgggctcataagggttcacgatg

SEQ ID NO: 2535043 - DNA, 25 bp, Homo sapien
tcacgaagacctggatctcggaggg

SEQ ID NO: 2535044 - DNA, 25 bp, Homo sapien
actgtcaagtggatgtctcgtgccc

SEQ ID NO: 2535045 - DNA, 25 bp, Homo sapien
aggagaggtgttaagtccacacttc

SEQ ID NO: 2535046 - DNA, 25 bp, Homo sapien
agaaggagaggtgttaagtccacac

SEQ ID NO: 2535047 - DNA, 25 bp, Homo sapien
gagaaggagaggtgttaagtccaca

SEQ ID NO: 2535048 - DNA, 25 bp, Homo sapien
gaaggagaggtgttaagtccacact

SEQ ID NO: 2535049 - DNA, 25 bp, Homo sapien
ctctgagagccaaagaatttgtcca

SEQ ID NO: 2535050 - DNA, 25 bp, Homo sapien
tttgtccaagttcacggagcccatg

SEQ ID NO: 2535051 - DNA, 25 bp, Homo sapien
aggtaagaaacccaaggctctgaga

SEQ ID NO: 2535052 - DNA, 25 bp, Homo sapien
cttaaacggtgactctaaagttctg

SEQ ID NO: 2535053 - DNA, 25 bp, Homo sapien
tcaagcccttgacagcccagagagg

SEQ ID NO: 2535054 - DNA, 25 bp, Homo sapien
acgttccagctggagatggggttct

SEQ ID NO: 2535055 - DNA, 25 bp, Homo sapien
cgttccagctggagatggggttctc

SEQ ID NO: 2535056 - DNA, 25 bp, Homo sapien
cttcacgttccagctggagatgggg

SEQ ID NO: 2535057 - DNA, 25 bp, Homo sapien
tccagctggagatggggttctccct

SEQ ID NO: 2535058 - DNA, 25 bp, Homo sapien
catagcaacagtcctgtttcaggca

SEQ ID NO: 2535059 - DNA, 25 bp, Homo sapien
acgatgtcccatctgtacccttctg

SEQ ID NO: 2535060 - DNA, 25 bp, Homo sapien
gggaggccctctgagcaacgatgtc

SEQ ID NO: 2535061 - DNA, 25 bp, Homo sapien
tacccttctgccacgttgagggtgg

SEQ ID NO: 2535062 - DNA, 25 bp, Homo sapien
ccaggcatagatggttagaagttca

SEQ ID NO: 2535063 - DNA, 25 bp, Homo sapien
tcacagtggtgaagccttcgtccaa

SEQ ID NO: 2535064 - DNA, 25 bp, Homo sapien
gagtgtgtagtacttggtccagtag

SEQ ID NO: 2535065 - DNA, 25 bp, Homo sapien
agctgttttctgacacaatcctcaa

SEQ ID NO: 2535066 - DNA, 25 bp, Homo sapien
ggtaccagtgtttcaccaggcgcag

SEQ ID NO: 2535067 - DNA, 25 bp, Homo sapien
gcttagttggccgatgtttcacgaa

SEQ ID NO: 2535068 - DNA, 25 bp, Homo sapien
cgcaggccttgatcaggctcacata

SEQ ID NO: 2535069 - DNA, 25 bp, Homo sapien
agaaatttccaggaccaccgcaggc

SEQ ID NO: 2535070 - DNA, 25 bp, Homo sapien
gggtggctgggagttgggaagagaa

SEQ ID NO: 2535071 - DNA, 25 bp, Homo sapien
tggctgggagttgggaagagaaggc

SEQ ID NO: 2535072 - DNA, 25 bp, Homo sapien
ctcagggggtggctgggagttggga

SEQ ID NO: 2535073 - DNA, 25 bp, Homo sapien
cagggggtggctgggagttgggaag

SEQ ID NO: 2535074 - DNA, 25 bp, Homo sapien
aaacagctcagaaacgccaccagct

SEQ ID NO: 2535075 - DNA, 25 bp, Homo sapien
tctctggtgctcctgagaaccgtgc

SEQ ID NO: 2535076 - DNA, 25 bp, Homo sapien
ccagggctctgtaggcaggcacaat

SEQ ID NO: 2535077 - DNA, 25 bp, Homo sapien
tcaggtcctcgagcccgaggtccag

SEQ ID NO: 2535078 - DNA, 25 bp, Homo sapien
gtccgcacagcgtctagcacctctt

SEQ ID NO: 2535079 - DNA, 25 bp, Homo sapien
tatacagttcctgcatcagtgccat

SEQ ID NO: 2535080 - DNA, 25 bp, Homo sapien
agaaactcctccacggtccgcacag

SEQ ID NO: 2535081 - DNA, 25 bp, Homo sapien
actgagccacgaaggagtccagcct

SEQ ID NO: 2535082 - DNA, 25 bp, Homo sapien
ctctgtcccgagagtaccgctgctg

SEQ ID NO: 2535083 - DNA, 25 bp, Homo sapien
gggcagatatatagccaggctccta

SEQ ID NO: 2535084 - DNA, 25 bp, Homo sapien
ccgctgctgggcagatatatagcca

SEQ ID NO: 2535085 - DNA, 25 bp, Homo sapien
gtgtgacgggctgactccaggtccc

SEQ ID NO: 2535086 - DNA, 25 bp, Homo sapien
taaaataccacccagttgagcaggc

SEQ ID NO: 2535087 - DNA, 25 bp, Homo sapien
aaaataccacccagttgagcaggca

SEQ ID NO: 2535088 - DNA, 25 bp, Homo sapien
aaataccacccagttgagcaggcat

SEQ ID NO: 2535089 - DNA, 25 bp, Homo sapien
ttaaaataccacccagttgagcagg

SEQ ID NO: 2535090 - DNA, 25 bp, Homo sapien
ggagcaccacggaataaagctgcat

SEQ ID NO: 2535091 - DNA, 25 bp, Homo sapien
tatctggagcaccacggaataaagc

SEQ ID NO: 2535092 - DNA, 25 bp, Homo sapien
tctggagcaccacggaataaagctg

SEQ ID NO: 2535093 - DNA, 25 bp, Homo sapien
agcaccacggaataaagctgcatcc

SEQ ID NO: 2535094 - DNA, 25 bp, Homo sapien
aaagcggccctgactagtttctctg

SEQ ID NO: 2535095 - DNA, 25 bp, Homo sapien
ggcaaagcggccctgactagtttct

SEQ ID NO: 2535096 - DNA, 25 bp, Homo sapien
caaagcggccctgactagtttctct

SEQ ID NO: 2535097 - DNA, 25 bp, Homo sapien
gcaaagcggccctgactagtttctc

SEQ ID NO: 2535098 - DNA, 25 bp, Homo sapien
catccaaatgactccgctgctcttc

SEQ ID NO: 2535099 - DNA, 25 bp, Homo sapien
cagagcatcgaaagccgggagctta

SEQ ID NO: 2535100 - DNA, 25 bp, Homo sapien
tttacccagagcatcgaaagccggg

SEQ ID NO: 2535101 - DNA, 25 bp, Homo sapien
tcgaaagccgggagcttatccatcc

SEQ ID NO: 2535102 - DNA, 25 bp, Homo sapien
gatactgtctcgcagctgtgcctgg

SEQ ID NO: 2535103 - DNA, 25 bp, Homo sapien
cacagtgatattgtaggccaggctc

SEQ ID NO: 2535104 - DNA, 25 bp, Homo sapien
gctcttgctacagtgaaccaattct

SEQ ID NO: 2535105 - DNA, 25 bp, Homo sapien
gaagagaatcaggtccaggtcagag

SEQ ID NO: 2535106 - DNA, 25 bp, Homo sapien
acccaggttaggctgttcacccagg

SEQ ID NO: 2535107 - DNA, 25 bp, Homo sapien
gtcacctctgctgagatctgatgct

SEQ ID NO: 2535108 - DNA, 25 bp, Homo sapien
ggttaggctgttcacccaggtccca

SEQ ID NO: 2535109 - DNA, 25 bp, Homo sapien
gacatgggtgagtgtcacctctgct

SEQ ID NO: 2535110 - DNA, 25 bp, Homo sapien
gctcagggtttgctagtaacactcc

SEQ ID NO: 2535111 - DNA, 25 bp, Homo sapien
cacatgcagatgtgtggacgagcca

SEQ ID NO: 2535112 - DNA, 25 bp, Homo sapien
gcagcagagggaccttagggcacat

SEQ ID NO: 2535113 - DNA, 25 bp, Homo sapien
ctttttaagcaaccatggaagctcg

SEQ ID NO: 2535114 - DNA, 25 bp, Homo sapien
ttcttcatcaaccacgtgcagtcca

SEQ ID NO: 2535115 - DNA, 25 bp, Homo sapien
aaatctctgtatattgcagtctggc

SEQ ID NO: 2535116 - DNA, 25 bp, Homo sapien
cactgacgggtccatcaaaggcctt

SEQ ID NO: 2535117 - DNA, 25 bp, Homo sapien
cattttctcaggttcacggatttct

SEQ ID NO: 2535118 - DNA, 25 bp, Homo sapien
tcaaagggaacctgcttgacgctag

SEQ ID NO: 2535119 - DNA, 25 bp, Homo sapien
tacaggatgtaataggaaatagcac

SEQ ID NO: 2535120 - DNA, 25 bp, Homo sapien
aactgcattacaacaaactttgcca

SEQ ID NO: 2535121 - DNA, 25 bp, Homo sapien
ccaggagtatacctaattgggcagt

SEQ ID NO: 2535122 - DNA, 25 bp, Homo sapien
gatccggttttgatgctgctgaaca

SEQ ID NO: 2535123 - DNA, 25 bp, Homo sapien
taacctcgttctttagccagatccg

SEQ ID NO: 2535124 - DNA, 25 bp, Homo sapien
caatgattaaattcccgcaggcact

SEQ ID NO: 2535125 - DNA, 25 bp, Homo sapien
tgatgcactaaactgcaacaattgc

SEQ ID NO: 2535126 - DNA, 25 bp, Homo sapien
ctttcaatgaaaaagcggcctgctg

SEQ ID NO: 2535127 - DNA, 25 bp, Homo sapien
gctgggcagtgcagattctttcaat

SEQ ID NO: 2535128 - DNA, 25 bp, Homo sapien
tgaagccggcaagctgccagggtct

SEQ ID NO: 2535129 - DNA, 25 bp, Homo sapien
tcagattcaccttcaactgaccaaa

SEQ ID NO: 2535130 - DNA, 25 bp, Homo sapien
caggtccaggacgccttcagtggag

SEQ ID NO: 2535131 - DNA, 25 bp, Homo sapien
cctttgcccagatgccgacgggatg

SEQ ID NO: 2535132 - DNA, 25 bp, Homo sapien
caatctcctgatagcttcaggtcca

SEQ ID NO: 2535133 - DNA, 25 bp, Homo sapien
tgaatcttccatgatctgttcttgt

SEQ ID NO: 2535134 - DNA, 25 bp, Homo sapien
gttttcatgagaccttcatgtggcc

SEQ ID NO: 2535135 - DNA, 25 bp, Homo sapien
cgttcagtgagaaggtccaacaggc

SEQ ID NO: 2535136 - DNA, 25 bp, Homo sapien
ctgaacagtgtgaggagggaacctt

SEQ ID NO: 2535137 - DNA, 25 bp, Homo sapien
tttgcccactcgagctagagcccag

SEQ ID NO: 2535138 - DNA, 25 bp, Homo sapien
tcgctgagtgcatggaagatccttc

SEQ ID NO: 2535139 - DNA, 25 bp, Homo sapien
gagaaggtcgctgagtgcatggaag

SEQ ID NO: 2535140 - DNA, 25 bp, Homo sapien
gagtgcatggaagatccttctttcc

SEQ ID NO: 2535141 - DNA, 25 bp, Homo sapien
aaggtcgctgagtgcatggaagatc

SEQ ID NO: 2535142 - DNA, 25 bp, Homo sapien
gcagtggctgcagggttactgggaa

SEQ ID NO: 2535143 - DNA, 25 bp, Homo sapien
atttcaaacttggggtggagccaca

SEQ ID NO: 2535144 - DNA, 25 bp, Homo sapien
tgtccctggtccaggccttgctgac

SEQ ID NO: 2535145 - DNA, 25 bp, Homo sapien
tgcagggttactgggaaatttcaaa

SEQ ID NO: 2535146 - DNA, 25 bp, Homo sapien
taagaatccacctgaatccgagtag

SEQ ID NO: 2535147 - DNA, 25 bp, Homo sapien
aatccacctgaatccgagtagggct

SEQ ID NO: 2535148 - DNA, 25 bp, Homo sapien
tcaccatctgcataagaatccacct

SEQ ID NO: 2535149 - DNA, 25 bp, Homo sapien
tctgcataagaatccacctgaatcc

SEQ ID NO: 2535150 - DNA, 25 bp, Homo sapien
tgtgcacatttgcacgaaccgtggg

SEQ ID NO: 2535151 - DNA, 25 bp, Homo sapien
caccgagtgtgcacatttgcacgaa

SEQ ID NO: 2535152 - DNA, 25 bp, Homo sapien
gggatctgctgcaccgagtgtgcac

SEQ ID NO: 2535153 - DNA, 25 bp, Homo sapien
accgtgggggcgtctgcggctgtgg

SEQ ID NO: 2535154 - DNA, 25 bp, Homo sapien
cactgaccctctggctctccggtca

SEQ ID NO: 2535155 - DNA, 25 bp, Homo sapien
gagcaggaccactgaccctctggct

SEQ ID NO: 2535156 - DNA, 25 bp, Homo sapien
ggaccactgaccctctggctctccg

SEQ ID NO: 2535157 - DNA, 25 bp, Homo sapien
tcagagcaggaccactgaccctctg

SEQ ID NO: 2535158 - DNA, 25 bp, Homo sapien
gtccatccgccttgaacccagagaa

SEQ ID NO: 2535159 - DNA, 25 bp, Homo sapien
gtggctcatctgagatgggtgtggg

SEQ ID NO: 2535160 - DNA, 25 bp, Homo sapien
atcatgtccatccgccttgaaccca

SEQ ID NO: 2535161 - DNA, 25 bp, Homo sapien
aagtggctcatctgagatgggtgtg

SEQ ID NO: 2535162 - DNA, 25 bp, Homo sapien
ctaagcaggtctgtgtcagccagga

SEQ ID NO: 2535163 - DNA, 25 bp, Homo sapien
gcggaaattaaccaagaggctgttc

SEQ ID NO: 2535164 - DNA, 25 bp, Homo sapien
gacagggcctcggttattgaaaatg

SEQ ID NO: 2535165 - DNA, 25 bp, Homo sapien
aaaatgggatacaaagcagggactg

SEQ ID NO: 2535166 - DNA, 25 bp, Homo sapien
tgatgtccctcctggagaacgtcct

SEQ ID NO: 2535167 - DNA, 25 bp, Homo sapien
tctgtggttctacgatgctttgacc

SEQ ID NO: 2535168 - DNA, 25 bp, Homo sapien
ggttggaaagcctggtcaaagccta

SEQ ID NO: 2535169 - DNA, 25 bp, Homo sapien
tctcgcccgggttgagttaatgatg

SEQ ID NO: 2535170 - DNA, 25 bp, Homo sapien
cccactaggtttgctgtatccattt

SEQ ID NO: 2535171 - DNA, 25 bp, Homo sapien
gctttgcccactaggtttgctgtat

SEQ ID NO: 2535172 - DNA, 25 bp, Homo sapien
gtttcgggggatgtgccgcacactt

SEQ ID NO: 2535173 - DNA, 25 bp, Homo sapien
gaatgctttgcccactaggtttgct

SEQ ID NO: 2535174 - DNA, 25 bp, Homo sapien
tagtgcttatacctggcccacatca

SEQ ID NO: 2535175 - DNA, 25 bp, Homo sapien
tatcagtggtcctatttagaaaggg

SEQ ID NO: 2535176 - DNA, 25 bp, Homo sapien
tgtccccgccactccttagtgctta

SEQ ID NO: 2535177 - DNA, 25 bp, Homo sapien
tggttcatcactgtccccgccactc

SEQ ID NO: 2535178 - DNA, 25 bp, Homo sapien
ctgtaatacagctactgggaggctg

SEQ ID NO: 2535179 - DNA, 25 bp, Homo sapien
gtgacaggtgcctgtaatacagcta

SEQ ID NO: 2535180 - DNA, 25 bp, Homo sapien
tgcctgtaatacagctactgggagg

SEQ ID NO: 2535181 - DNA, 25 bp, Homo sapien
tggtgacaggtgcctgtaatacagc

SEQ ID NO: 2535182 - DNA, 25 bp, Homo sapien
taatgaggccgcagatggagtcaga

SEQ ID NO: 2535183 - DNA, 25 bp, Homo sapien
tacttaactagtgaatgcgggagga

SEQ ID NO: 2535184 - DNA, 25 bp, Homo sapien
ttttagcctggcaatgtaagtgtcc

SEQ ID NO: 2535185 - DNA, 25 bp, Homo sapien
tgagttacggttggacaagcaggca

SEQ ID NO: 2535186 - DNA, 25 bp, Homo sapien
aaactggtgccgaatgcctgacctc

SEQ ID NO: 2535187 - DNA, 25 bp, Homo sapien
gatcactatgatcgctgtgtggaaa

SEQ ID NO: 2535188 - DNA, 25 bp, Homo sapien
ctactccatgaaacatttgcgctat

SEQ ID NO: 2535189 - DNA, 25 bp, Homo sapien
tgcgctatatatgcggccaaatgga

SEQ ID NO: 2535190 - DNA, 25 bp, Homo sapien
tatcgctgctcttagtattggtggc

SEQ ID NO: 2535191 - DNA, 25 bp, Homo sapien
taaccaaatgacaccctaaggcaca

SEQ ID NO: 2535192 - DNA, 25 bp, Homo sapien
tctatgtgccagataagcgagtctt

SEQ ID NO: 2535193 - DNA, 25 bp, Homo sapien
tctgactggccttttgcggctcaag

SEQ ID NO: 2535194 - DNA, 25 bp, Homo sapien
tgtttcatacttttgcttctgcaga

SEQ ID NO: 2535195 - DNA, 25 bp, Homo sapien
agcttctccatgcatacgatggtta

SEQ ID NO: 2535196 - DNA, 25 bp, Homo sapien
gcccggctgtttcatacttttgctt

SEQ ID NO: 2535197 - DNA, 25 bp, Homo sapien
tttgcccggctgtttcatacttttg

SEQ ID NO: 2535198 - DNA, 25 bp, Homo sapien
tgtctgtttatttcaactgtacaga

SEQ ID NO: 2535199 - DNA, 25 bp, Homo sapien
gctgtctgtttatttcaactgtaca

SEQ ID NO: 2535200 - DNA, 25 bp, Homo sapien
ttgctgtctgtttatttcaactgta

SEQ ID NO: 2535201 - DNA, 25 bp, Homo sapien
cattttgctgtctgtttatttcaac

SEQ ID NO: 2535202 - DNA, 25 bp, Homo sapien
caaagagatttaccagagctcggtc

SEQ ID NO: 2535203 - DNA, 25 bp, Homo sapien
cagtcttctctaaaagggtgcccca

SEQ ID NO: 2535204 - DNA, 25 bp, Homo sapien
tacatggaagcataggatttcaccc

SEQ ID NO: 2535205 - DNA, 25 bp, Homo sapien
taatatatatacaggcgggcatagg

SEQ ID NO: 2535206 - DNA, 25 bp, Homo sapien
catggcctcagaccgccggagtttt

SEQ ID NO: 2535207 - DNA, 25 bp, Homo sapien
gccacggtcgacgtcatggagtcaa

SEQ ID NO: 2535208 - DNA, 25 bp, Homo sapien
gggtttgggtctgcaactcctcaca

SEQ ID NO: 2535209 - DNA, 25 bp, Homo sapien
cggtttgcactaggagccacatcta

SEQ ID NO: 2535210 - DNA, 25 bp, Homo sapien
gaggctctacacacgtgctgggttt

SEQ ID NO: 2535211 - DNA, 25 bp, Homo sapien
catgctgctatggaaacgcggtgca

SEQ ID NO: 2535212 - DNA, 25 bp, Homo sapien
tgggtttccgtaggacatgctgcta

SEQ ID NO: 2535213 - DNA, 25 bp, Homo sapien
aacaaataaccagagatgacgatcg

SEQ ID NO: 2535214 - DNA, 25 bp, Homo sapien
caactttccacgcagggactgcctc

SEQ ID NO: 2535215 - DNA, 25 bp, Homo sapien
cagtggatgcatgcgtgcgggggag

SEQ ID NO: 2535216 - DNA, 25 bp, Homo sapien
ctcctccggccgcagtggatgcatg

SEQ ID NO: 2535217 - DNA, 25 bp, Homo sapien
gcaactttccacgcagggactgcct

SEQ ID NO: 2535218 - DNA, 25 bp, Homo sapien
tggaggttgtcttcgctgccttgct

SEQ ID NO: 2535219 - DNA, 25 bp, Homo sapien
cgggtcggtgccctggaggttgtct

SEQ ID NO: 2535220 - DNA, 25 bp, Homo sapien
gccctggaggttgtcttcgctgcct

SEQ ID NO: 2535221 - DNA, 25 bp, Homo sapien
gcgggtcggtgccctggaggttgtc

SEQ ID NO: 2535222 - DNA, 25 bp, Homo sapien
ctgctcaccgaacagaaaaccaaca

SEQ ID NO: 2535223 - DNA, 25 bp, Homo sapien
gcacaaatcccaagtagaaggcacc

SEQ ID NO: 2535224 - DNA, 25 bp, Homo sapien
ccttacagggaagggactgtgacgc

SEQ ID NO: 2535225 - DNA, 25 bp, Homo sapien
tgatctacgtaacccagtctttgag

SEQ ID NO: 2535226 - DNA, 25 bp, Homo sapien
tagcaaggacccgtacaacagttcc

SEQ ID NO: 2535227 - DNA, 25 bp, Homo sapien
gaggagcacctcagacagaagagga

SEQ ID NO: 2535228 - DNA, 25 bp, Homo sapien
cgtggatggcgtgacaggtgcgagg

SEQ ID NO: 2535229 - DNA, 25 bp, Homo sapien
agccgccggtgtgacagcgtggatg

SEQ ID NO: 2535230 - DNA, 25 bp, Homo sapien
tgcgaggggaatccccgagcctatc

SEQ ID NO: 2535231 - DNA, 25 bp, Homo sapien
acgccatttatacgaaacgtccaga

SEQ ID NO: 2535232 - DNA, 25 bp, Homo sapien
gatgaaaatgtcgtaaagttgacgg

SEQ ID NO: 2535233 - DNA, 25 bp, Homo sapien
ggcaaatccatacctattctgagtg

SEQ ID NO: 2535234 - DNA, 25 bp, Homo sapien
tcgtaaagttgacggtggtaatggc

SEQ ID NO: 2535235 - DNA, 25 bp, Homo sapien
gagggaactcttacgttactttgca

SEQ ID NO: 2535236 - DNA, 25 bp, Homo sapien
gttctcccagtctcataaggacaca

SEQ ID NO: 2535237 - DNA, 25 bp, Homo sapien
tgaatcatacacttcccgtgggtga

SEQ ID NO: 2535238 - DNA, 25 bp, Homo sapien
cccaccaagtcaggtagccatgatg

SEQ ID NO: 2535239 - DNA, 25 bp, Homo sapien
gacagggactcacattccctggttg

SEQ ID NO: 2535240 - DNA, 25 bp, Homo sapien
agctcagacagggactcacattccc

SEQ ID NO: 2535241 - DNA, 25 bp, Homo sapien
tcagacagggactcacattccctgg

SEQ ID NO: 2535242 - DNA, 25 bp, Homo sapien
cagggactcacattccctggttggt

SEQ ID NO: 2535243 - DNA, 25 bp, Homo sapien
cggctgccctcgaatgggttcccaa

SEQ ID NO: 2535244 - DNA, 25 bp, Homo sapien
tcccaaaggagcgtttacgtatcat

SEQ ID NO: 2535245 - DNA, 25 bp, Homo sapien
tgagcaagtttccaggcgctgacag

SEQ ID NO: 2535246 - DNA, 25 bp, Homo sapien
gcgctgacagtgagcgttcctcccg

SEQ ID NO: 2535247 - DNA, 25 bp, Homo sapien
tgggtgcagagtccgacgccagctg

SEQ ID NO: 2535248 - DNA, 25 bp, Homo sapien
tgcagagtccgacgccagctgtctc

SEQ ID NO: 2535249 - DNA, 25 bp, Homo sapien
ggtgcagagtccgacgccagctgtc

SEQ ID NO: 2535250 - DNA, 25 bp, Homo sapien
ggtgggtgcagagtccgacgccagc

SEQ ID NO: 2535251 - DNA, 25 bp, Homo sapien
agttctcatcctccgacggcaacgg

SEQ ID NO: 2535252 - DNA, 25 bp, Homo sapien
ccaagctgggaatgtgtttgactga

SEQ ID NO: 2535253 - DNA, 25 bp, Homo sapien
tcttcagtcacttcgaccagcgtgc

SEQ ID NO: 2535254 - DNA, 25 bp, Homo sapien
gactgagttctcgacctcctcttca

SEQ ID NO: 2535255 - DNA, 25 bp, Homo sapien
ggccctggggcataggagaacagcg

SEQ ID NO: 2535256 - DNA, 25 bp, Homo sapien
gaggccctggggcataggagaacag

SEQ ID NO: 2535257 - DNA, 25 bp, Homo sapien
aggccctggggcataggagaacagc

SEQ ID NO: 2535258 - DNA, 25 bp, Homo sapien
ttgatttccggcaccacgatcctcg

SEQ ID NO: 2535259 - DNA, 25 bp, Homo sapien
ttcttgtccagcatacgggtgatca

SEQ ID NO: 2535260 - DNA, 25 bp, Homo sapien
tcgactcggggttcttgtccagcat

SEQ ID NO: 2535261 - DNA, 25 bp, Homo sapien
tacgggtgatcaggtccttcaagtc

SEQ ID NO: 2535262 - DNA, 25 bp, Homo sapien
gggcctgactcttgatcttactgtg

SEQ ID NO: 2535263 - DNA, 25 bp, Homo sapien
tggtctggaaattccagggcctgac

SEQ ID NO: 2535264 - DNA, 25 bp, Homo sapien
tcttactgtgtaaacacatgatccg

SEQ ID NO: 2535265 - DNA, 25 bp, Homo sapien
tgatccgctcgtccatgaatgggca

SEQ ID NO: 2535266 - DNA, 25 bp, Homo sapien
ggccaaagacaaagcagtatagtgt

SEQ ID NO: 2535267 - DNA, 25 bp, Homo sapien
gtatagtgtcacacccatggcccaa

SEQ ID NO: 2535268 - DNA, 25 bp, Homo sapien
aagcagtatagtgtcacacccatgg

SEQ ID NO: 2535269 - DNA, 25 bp, Homo sapien
ctggccaaagacaaagcagtatagt

SEQ ID NO: 2535270 - DNA, 25 bp, Homo sapien
gaggagcgcgtcactgcccttgaat

SEQ ID NO: 2535271 - DNA, 25 bp, Homo sapien
catcttctccgaccaggaggttgga

SEQ ID NO: 2535272 - DNA, 25 bp, Homo sapien
cagagagcgactcgggtgccatgaa

SEQ ID NO: 2535273 - DNA, 25 bp, Homo sapien
agatcttgcgggtctcagagagcga

SEQ ID NO: 2535274 - DNA, 25 bp, Homo sapien
gggaggcgtagacagcaggtgggag

SEQ ID NO: 2535275 - DNA, 25 bp, Homo sapien
aacctcgtgagcacctctatgcggc

SEQ ID NO: 2535276 - DNA, 25 bp, Homo sapien
tgagcacctctatgcggccacatgg

SEQ ID NO: 2535277 - DNA, 25 bp, Homo sapien
ggaaaacctcgtgagcacctctatg

SEQ ID NO: 2535278 - DNA, 25 bp, Homo sapien
cacaggcatggcacccctctgatgc

SEQ ID NO: 2535279 - DNA, 25 bp, Homo sapien
caggcatggcacccctctgatgcct

SEQ ID NO: 2535280 - DNA, 25 bp, Homo sapien
aggcatggcacccctctgatgcctt

SEQ ID NO: 2535281 - DNA, 25 bp, Homo sapien
acaggcatggcacccctctgatgcc

SEQ ID NO: 2535282 - DNA, 25 bp, Homo sapien
gggtgagagccctcccgcaggccct

SEQ ID NO: 2535283 - DNA, 25 bp, Homo sapien
ccactgggtgagagccctcccgcag

SEQ ID NO: 2535284 - DNA, 25 bp, Homo sapien
actgggtgagagccctcccgcaggc

SEQ ID NO: 2535285 - DNA, 25 bp, Homo sapien
tgggtgagagccctcccgcaggccc

SEQ ID NO: 2535286 - DNA, 25 bp, Homo sapien
agagtggtttgagggtgggcacttc

SEQ ID NO: 2535287 - DNA, 25 bp, Homo sapien
gaagtagaaacgggcctggtcttca

SEQ ID NO: 2535288 - DNA, 25 bp, Homo sapien
agtagaaacgggcctggtcttcaga

SEQ ID NO: 2535289 - DNA, 25 bp, Homo sapien
ctggaagtagaaacgggcctggtct

SEQ ID NO: 2535290 - DNA, 25 bp, Homo sapien
tgtacagatggtcctcattggggtc

SEQ ID NO: 2535291 - DNA, 25 bp, Homo sapien
atgtacagatggtcctcattggggt

SEQ ID NO: 2535292 - DNA, 25 bp, Homo sapien
ggcacagccacatggaataggcagg

SEQ ID NO: 2535293 - DNA, 25 bp, Homo sapien
cttggcacagccacatggaataggc

SEQ ID NO: 2535294 - DNA, 25 bp, Homo sapien
aagagagaatagatatgagcaggga

SEQ ID NO: 2535295 - DNA, 25 bp, Homo sapien
aaagagagaatagatatgagcaggg

SEQ ID NO: 2535296 - DNA, 25 bp, Homo sapien
agatagggaaaacccccagagtgtg

SEQ ID NO: 2535297 - DNA, 25 bp, Homo sapien
cgtttgccaacaggagggctgcatt

SEQ ID NO: 2535298 - DNA, 25 bp, Homo sapien
gctgcatttggcagcgtgtttccca

SEQ ID NO: 2535299 - DNA, 25 bp, Homo sapien
cccagttaagatggaagatagggaa

SEQ ID NO: 2535300 - DNA, 25 bp, Homo sapien
tccaggagctggccgggtgcctcgg

SEQ ID NO: 2535301 - DNA, 25 bp, Homo sapien
cacattggggtggtccagcttcttg

SEQ ID NO: 2535302 - DNA, 25 bp, Homo sapien
ttcctggtacacctgctcaatgggg

SEQ ID NO: 2535303 - DNA, 25 bp, Homo sapien
tgaggatggcaatttcctggtacac

SEQ ID NO: 2535304 - DNA, 25 bp, Homo sapien
gccggcctgccggatcagcttcttt

SEQ ID NO: 2535305 - DNA, 25 bp, Homo sapien
gaaagccggcctgccggatcagctt

SEQ ID NO: 2535306 - DNA, 25 bp, Homo sapien
tggaaagccggcctgccggatcagc

SEQ ID NO: 2535307 - DNA, 25 bp, Homo sapien
ggcctgccggatcagcttctttttg

SEQ ID NO: 2535308 - DNA, 25 bp, Homo sapien
ctgcaggaaaatgaaggacagcacc

SEQ ID NO: 2535309 - DNA, 25 bp, Homo sapien
gaaggacagcacctttagccaggtc

SEQ ID NO: 2535310 - DNA, 25 bp, Homo sapien
caggaaaatgaaggacagcaccttt

SEQ ID NO: 2535311 - DNA, 25 bp, Homo sapien
aaaatgaaggacagcacctttagcc

SEQ ID NO: 2535312 - DNA, 25 bp, Homo sapien
gctcacggtcgcctctctcagctgg

SEQ ID NO: 2535313 - DNA, 25 bp, Homo sapien
tgggaaaccacgagcctcaggactt

SEQ ID NO: 2535314 - DNA, 25 bp, Homo sapien
gagagggtcaagcagccatggggtt

SEQ ID NO: 2535315 - DNA, 25 bp, Homo sapien
ttcctgaggctcacggtcgcctctc

SEQ ID NO: 2535316 - DNA, 25 bp, Homo sapien
taggccaacttgacgacaccatagg

SEQ ID NO: 2535317 - DNA, 25 bp, Homo sapien
ccaacttgacgacaccataggagcc

SEQ ID NO: 2535318 - DNA, 25 bp, Homo sapien
cattgtaggccaacttgacgacacc

SEQ ID NO: 2535319 - DNA, 25 bp, Homo sapien
attttcattgtaggccaacttgacg

SEQ ID NO: 2535320 - DNA, 25 bp, Homo sapien
ccttcagggtatactgattcagctg

SEQ ID NO: 2535321 - DNA, 25 bp, Homo sapien
tttcatccttcagggtatactgatt

SEQ ID NO: 2535322 - DNA, 25 bp, Homo sapien
gggtatactgattcagctgcacaca

SEQ ID NO: 2535323 - DNA, 25 bp, Homo sapien
cagggtatactgattcagctgcaca

SEQ ID NO: 2535324 - DNA, 25 bp, Homo sapien
gggagctgacgggtgagtagggcag

SEQ ID NO: 2535325 - DNA, 25 bp, Homo sapien
cgaggcgaggactgcggggagctga

SEQ ID NO: 2535326 - DNA, 25 bp, Homo sapien
acgggcagatgcagcgtccgttcat

SEQ ID NO: 2535327 - DNA, 25 bp, Homo sapien
gtggtgagactccactgtcggccgc

SEQ ID NO: 2535328 - DNA, 25 bp, Homo sapien
tcacagggcttctggctttcgctgc

SEQ ID NO: 2535329 - DNA, 25 bp, Homo sapien
tgaccacaatgaaggactccatgcc

SEQ ID NO: 2535330 - DNA, 25 bp, Homo sapien
tggatgctcaaggatgagaggcccc

SEQ ID NO: 2535331 - DNA, 25 bp, Homo sapien
cctgggaccgctcttgcagagacag

SEQ ID NO: 2535332 - DNA, 25 bp, Homo sapien
gcacactggggcactcccatccggc

SEQ ID NO: 2535333 - DNA, 25 bp, Homo sapien
ggtgcatgcgccagcttcatccagc

SEQ ID NO: 2535334 - DNA, 25 bp, Homo sapien
gtgcatgcgccagcttcatccagca

SEQ ID NO: 2535335 - DNA, 25 bp, Homo sapien
cactcccatccggcagcggagccac

SEQ ID NO: 2535336 - DNA, 25 bp, Homo sapien
aggtaccactggaattcagggagta

SEQ ID NO: 2535337 - DNA, 25 bp, Homo sapien
cactggaattcagggagtacatttg

SEQ ID NO: 2535338 - DNA, 25 bp, Homo sapien
cagggagtacatttgtggacagaca

SEQ ID NO: 2535339 - DNA, 25 bp, Homo sapien
gcttaacgtgtttgacaaattctgc

SEQ ID NO: 2535340 - DNA, 25 bp, Homo sapien
acgtagagttgccatataaccagca

SEQ ID NO: 2535341 - DNA, 25 bp, Homo sapien
taagagaacgccaaagagtccaatc

SEQ ID NO: 2535342 - DNA, 25 bp, Homo sapien
caatcatgcggcaagatgttcaacc

SEQ ID NO: 2535343 - DNA, 25 bp, Homo sapien
ttcaaactacaatcaggcagcctgg

SEQ ID NO: 2535344 - DNA, 25 bp, Homo sapien
ccaggaagctgagtggcgcaggcct

SEQ ID NO: 2535345 - DNA, 25 bp, Homo sapien
aggaaacaccttctcatttcctagg

SEQ ID NO: 2535346 - DNA, 25 bp, Homo sapien
ggcagctcatcacgagccaccagag

SEQ ID NO: 2535347 - DNA, 25 bp, Homo sapien
gccaggatgagggaaacgctccttc

SEQ ID NO: 2535348 - DNA, 25 bp, Homo sapien
cacggaggcggtgctggaatatttc

SEQ ID NO: 2535349 - DNA, 25 bp, Homo sapien
caactgagtccgcaaaaacaaaggc

SEQ ID NO: 2535350 - DNA, 25 bp, Homo sapien
cccaaagctctagcgggagacctga

SEQ ID NO: 2535351 - DNA, 25 bp, Homo sapien
cagactctgaggcatttcccaaagc

SEQ ID NO: 2535352 - DNA, 25 bp, Homo sapien
caccttgacaggcaacttgacttcc

SEQ ID NO: 2535353 - DNA, 25 bp, Homo sapien
ggcaacttgacttccaacactgctt

SEQ ID NO: 2535354 - DNA, 25 bp, Homo sapien
agggctctcatccaggccaaactgc

SEQ ID NO: 2535355 - DNA, 25 bp, Homo sapien
cagggctctcatccaggccaaactg

SEQ ID NO: 2535356 - DNA, 25 bp, Homo sapien
gctaaatctagctgcaagcctcctc

SEQ ID NO: 2535357 - DNA, 25 bp, Homo sapien
ttggacatcatgctaaatctagctg

SEQ ID NO: 2535358 - DNA, 25 bp, Homo sapien
cttttggacatcatgctaaatctag

SEQ ID NO: 2535359 - DNA, 25 bp, Homo sapien
taaatctagctgcaagcctcctcag

SEQ ID NO: 2535360 - DNA, 25 bp, Homo sapien
actgtactctggctcgggcaacaag

SEQ ID NO: 2535361 - DNA, 25 bp, Homo sapien
tcacaccactgtactctggctcggg

SEQ ID NO: 2535362 - DNA, 25 bp, Homo sapien
ctgtactctggctcgggcaacaaga

SEQ ID NO: 2535363 - DNA, 25 bp, Homo sapien
caccactgtactctggctcgggcaa

SEQ ID NO: 2535364 - DNA, 25 bp, Homo sapien
ttatggggacataaagccatcctct

SEQ ID NO: 2535365 - DNA, 25 bp, Homo sapien
atggggacataaagccatcctcttc

SEQ ID NO: 2535366 - DNA, 25 bp, Homo sapien
tatggggacataaagccatcctctt

SEQ ID NO: 2535367 - DNA, 25 bp, Homo sapien
tgtcaaacgcgaggggctgggccta

SEQ ID NO: 2535368 - DNA, 25 bp, Homo sapien
gggctgggcctaggccgcctccacg

SEQ ID NO: 2535369 - DNA, 25 bp, Homo sapien
ctgggcctaggccgcctccacgaac

SEQ ID NO: 2535370 - DNA, 25 bp, Homo sapien
ctgtcaaacgcgaggggctgggcct

SEQ ID NO: 2535371 - DNA, 25 bp, Homo sapien
acagggcgcggcccagccgaggagg

SEQ ID NO: 2535372 - DNA, 25 bp, Homo sapien
gacagggcgcggcccagccgaggag

SEQ ID NO: 2535373 - DNA, 25 bp, Homo sapien
ggacagggcgcggcccagccgagga

SEQ ID NO: 2535374 - DNA, 25 bp, Homo sapien
ccagcctccgggctttgtgtgccat

SEQ ID NO: 2535375 - DNA, 25 bp, Homo sapien
tccctccgtgttgggagccccaggc

SEQ ID NO: 2535376 - DNA, 25 bp, Homo sapien
ggccagcctccgggctttgtgtgcc

SEQ ID NO: 2535377 - DNA, 25 bp, Homo sapien
cccaggccagcctccgggctttgtg

SEQ ID NO: 2535378 - DNA, 25 bp, Homo sapien
tcggctcagcttgctctgcgcggcc

SEQ ID NO: 2535379 - DNA, 25 bp, Homo sapien
ggctcggctcggctcagcttgctct

SEQ ID NO: 2535380 - DNA, 25 bp, Homo sapien
ggctcggctcagcttgctctgcgcg

SEQ ID NO: 2535381 - DNA, 25 bp, Homo sapien
tcagcttgctctgcgcggccgcgcg

SEQ ID NO: 2535382 - DNA, 25 bp, Homo sapien
agccttaagtgtgcgttggatcccc

SEQ ID NO: 2535383 - DNA, 25 bp, Homo sapien
gagaaacgaagacctggagggctcc

SEQ ID NO: 2535384 - DNA, 25 bp, Homo sapien
tatttctaggccgtagggacactca

SEQ ID NO: 2535385 - DNA, 25 bp, Homo sapien
ggtggatttccagcccgttccgatg

SEQ ID NO: 2535386 - DNA, 25 bp, Homo sapien
tcttcccttttggtagcaaaggaca

SEQ ID NO: 2535387 - DNA, 25 bp, Homo sapien
tttgttgctagtaactacgtatttg

SEQ ID NO: 2535388 - DNA, 25 bp, Homo sapien
ttgttgctagtaactacgtatttgt

SEQ ID NO: 2535389 - DNA, 25 bp, Homo sapien
tgtcctttgctaccaaaagggaaga

SEQ ID NO: 2535390 - DNA, 25 bp, Homo sapien
caaatacgtagttactagcaacaaa

SEQ ID NO: 2535391 - DNA, 25 bp, Homo sapien
acaaatacgtagttactagcaacaa

SEQ ID NO: 2535392 - DNA, 25 bp, Homo sapien
tcttcccttttggtagcaaaggaca

SEQ ID NO: 2535393 - DNA, 25 bp, Homo sapien
tttgttgctagtaactacgtatttg

SEQ ID NO: 2535394 - DNA, 25 bp, Homo sapien
tgctagtaactacgtatttgtttta

SEQ ID NO: 2535395 - DNA, 25 bp, Homo sapien
cttttggtagcaaaggacaccaact

SEQ ID NO: 2535396 - DNA, 25 bp, Homo sapien
ttgttgctagtaactacgtatttgt

SEQ ID NO: 2535397 - DNA, 25 bp, Homo sapien
tcccttttggtagcaaaggacacca

SEQ ID NO: 2535398 - DNA, 25 bp, Homo sapien
ctataaatgatgtatttgtgacacc

SEQ ID NO: 2535399 - DNA, 25 bp, Homo sapien
ccctataaatgatgtatttgtgaca

SEQ ID NO: 2535400 - DNA, 25 bp, Homo sapien
tctccctataaatgatgtatttgtg

SEQ ID NO: 2535401 - DNA, 25 bp, Homo sapien
taaatgatgtatttgtgacacccta

SEQ ID NO: 2535402 - DNA, 25 bp, Homo sapien
tccctataaatgatgtatttgtgac

SEQ ID NO: 2535403 - DNA, 25 bp, Homo sapien
cctataaatgatgtatttgtgacac

SEQ ID NO: 2535404 - DNA, 25 bp, Homo sapien
gtcacaaatacatcatttataggga

SEQ ID NO: 2535405 - DNA, 25 bp, Homo sapien
tcacaaatacatcatttatagggag

SEQ ID NO: 2535406 - DNA, 25 bp, Homo sapien
tgtcacaaatacatcatttataggg

SEQ ID NO: 2535407 - DNA, 25 bp, Homo sapien
gtgtcacaaatacatcatttatagg

SEQ ID NO: 2535408 - DNA, 25 bp, Homo sapien
cacaaatacatcatttatagggaga

SEQ ID NO: 2535409 - DNA, 25 bp, Homo sapien
tagggtgtcacaaatacatcattta

SEQ ID NO: 2535410 - DNA, 25 bp, Homo sapien
tgctgtgcagagtataagattttgg

SEQ ID NO: 2535411 - DNA, 25 bp, Homo sapien
ccaaaatcttatactctgcacagca

SEQ ID NO: 2535412 - DNA, 25 bp, Homo sapien
tgctgtgcagagtataagattttgg

SEQ ID NO: 2535413 - DNA, 25 bp, Homo sapien
agaggacatccctgctgggctgctg

SEQ ID NO: 2535414 - DNA, 25 bp, Homo sapien
ctgtgcagagtataagattttggac

SEQ ID NO: 2535415 - DNA, 25 bp, Homo sapien
gattttggacttgttcatgtcccct

SEQ ID NO: 2535416 - DNA, 25 bp, Homo sapien
tgggctgctgtgcagagtataagat

SEQ ID NO: 2535417 - DNA, 25 bp, Homo sapien
attttggacttgttcatgtcccctc

SEQ ID NO: 2535418 - DNA, 25 bp, Homo sapien
cagcagcccagcagggatgtcctct

SEQ ID NO: 2535419 - DNA, 25 bp, Homo sapien
gtccaaaatcttatactctgcacag

SEQ ID NO: 2535420 - DNA, 25 bp, Homo sapien
gggacatgaacaagtccaaaatctt

SEQ ID NO: 2535421 - DNA, 25 bp, Homo sapien
tcttatactctgcacagcagcccag

SEQ ID NO: 2535422 - DNA, 25 bp, Homo sapien
caagtccaaaatcttatactctgca

SEQ ID NO: 2535423 - DNA, 25 bp, Homo sapien
ccaaaatcttatactctgcacagca

SEQ ID NO: 2535424 - DNA, 25 bp, Homo sapien
gaggaaccggtgtgcgatgctcttc

SEQ ID NO: 2535425 - DNA, 25 bp, Homo sapien
tggaggctgccatcgagaacctcaa

SEQ ID NO: 2535426 - DNA, 25 bp, Homo sapien
gagcgcatcagggacgtcgtttact

SEQ ID NO: 2535427 - DNA, 25 bp, Homo sapien
caaaggttgactgcaaagagcgcat

SEQ ID NO: 2535428 - DNA, 25 bp, Homo sapien
aggccagactctaccataccctggg

SEQ ID NO: 2535429 - DNA, 25 bp, Homo sapien
tgcatcaggagctgccctctcatgg

SEQ ID NO: 2535430 - DNA, 25 bp, Homo sapien
tcattgaggttctcgatggcagcct

SEQ ID NO: 2535431 - DNA, 25 bp, Homo sapien
gacgtccctgatgcgctctttgcag

SEQ ID NO: 2535432 - DNA, 25 bp, Homo sapien
gcctggaagtaaacgacgtccctga

SEQ ID NO: 2535433 - DNA, 25 bp, Homo sapien
tccccagggtatggtagagtctggc

SEQ ID NO: 2535434 - DNA, 25 bp, Homo sapien
ccatgagagggcagctcctgatgca

SEQ ID NO: 2535435 - DNA, 25 bp, Homo sapien
ggaagagcatcgcacaccggttcct

SEQ ID NO: 2535436 - DNA, 25 bp, Homo sapien
gccaggtggcttcagcagcttccta

SEQ ID NO: 2535437 - DNA, 25 bp, Homo sapien
gctatcctggacaaaggtcgtgcca

SEQ ID NO: 2535438 - DNA, 25 bp, Homo sapien
attcttggaatcccagaacaggcct

SEQ ID NO: 2535439 - DNA, 25 bp, Homo sapien
ctacgatcagccgaagaaagcagaa

SEQ ID NO: 2535440 - DNA, 25 bp, Homo sapien
ccatcttggctgacggggctatcct

SEQ ID NO: 2535441 - DNA, 25 bp, Homo sapien
gcagcttcctacgatcagccgaaga

SEQ ID NO: 2535442 - DNA, 25 bp, Homo sapien
tggcacgacctttgtccaggatagc

SEQ ID NO: 2535443 - DNA, 25 bp, Homo sapien
gatagccccgtcagccaagatgggc

SEQ ID NO: 2535444 - DNA, 25 bp, Homo sapien
ttctgctttcttcggctgatcgtag

SEQ ID NO: 2535445 - DNA, 25 bp, Homo sapien
taggaagctgctgaagccacctggc

SEQ ID NO: 2535446 - DNA, 25 bp, Homo sapien
tcttcggctgatcgtaggaagctgc

SEQ ID NO: 2535447 - DNA, 25 bp, Homo sapien
gacctttgtccaggatagccccgtc

SEQ ID NO: 2535448 - DNA, 25 bp, Homo sapien
tgccagaaatgaaacgcttcctggt

SEQ ID NO: 2535449 - DNA, 25 bp, Homo sapien
actgccagaaatgaaacgcttcctg

SEQ ID NO: 2535450 - DNA, 25 bp, Homo sapien
tttgggtatgtacagtgccatgatg

SEQ ID NO: 2535451 - DNA, 25 bp, Homo sapien
ggtttgggtatgtacagtgccatga

SEQ ID NO: 2535452 - DNA, 25 bp, Homo sapien
gggtatgtacagtgccatgatgttt

SEQ ID NO: 2535453 - DNA, 25 bp, Homo sapien
tgggtttgggtatgtacagtgccat

SEQ ID NO: 2535454 - DNA, 25 bp, Homo sapien
tcatggcactgtacatacccaaacc

SEQ ID NO: 2535455 - DNA, 25 bp, Homo sapien
caggaagcgtttcatttctggcagt

SEQ ID NO: 2535456 - DNA, 25 bp, Homo sapien
accaggaagcgtttcatttctggca

SEQ ID NO: 2535457 - DNA, 25 bp, Homo sapien
catcatggcactgtacatacccaaa

SEQ ID NO: 2535458 - DNA, 25 bp, Homo sapien
atggcactgtacatacccaaaccca

SEQ ID NO: 2535459 - DNA, 25 bp, Homo sapien
aaacatcatggcactgtacataccc

SEQ ID NO: 2535460 - DNA, 25 bp, Homo sapien
cctgttttaacgtagtacatgtcag

SEQ ID NO: 2535461 - DNA, 25 bp, Homo sapien
ttttaacgtagtacatgtcaggtaa

SEQ ID NO: 2535462 - DNA, 25 bp, Homo sapien
taacgtagtacatgtcaggtaaaag

SEQ ID NO: 2535463 - DNA, 25 bp, Homo sapien
tgttttaacgtagtacatgtcaggt

SEQ ID NO: 2535464 - DNA, 25 bp, Homo sapien
tcctgttttaacgtagtacatgtca

SEQ ID NO: 2535465 - DNA, 25 bp, Homo sapien
gttttaacgtagtacatgtcaggta

SEQ ID NO: 2535466 - DNA, 25 bp, Homo sapien
ctgacatgtactacgttaaaacagg

SEQ ID NO: 2535467 - DNA, 25 bp, Homo sapien
ttacctgacatgtactacgttaaaa

SEQ ID NO: 2535468 - DNA, 25 bp, Homo sapien
tacctgacatgtactacgttaaaac

SEQ ID NO: 2535469 - DNA, 25 bp, Homo sapien
tgacatgtactacgttaaaacagga

SEQ ID NO: 2535470 - DNA, 25 bp, Homo sapien
gacatgtactacgttaaaacaggaa

SEQ ID NO: 2535471 - DNA, 25 bp, Homo sapien
cttttacctgacatgtactacgtta

SEQ ID NO: 2535472 - DNA, 25 bp, Homo sapien
cctgctatatttgtcatagtctgaa

SEQ ID NO: 2535473 - DNA, 25 bp, Homo sapien
tagtgtgaataaccgccccctgcta

SEQ ID NO: 2535474 - DNA, 25 bp, Homo sapien
gctaaaggatattaatgctggatct

SEQ ID NO: 2535475 - DNA, 25 bp, Homo sapien
ttttcatagtgtgaataaccgcccc

SEQ ID NO: 2535476 - DNA, 25 bp, Homo sapien
aatgctggatctttttgtaaagaca

SEQ ID NO: 2535477 - DNA, 25 bp, Homo sapien
tcagattgtcacatgttgtgttttc

SEQ ID NO: 2535478 - DNA, 25 bp, Homo sapien
tgtctttacaaaaagatccagcatt

SEQ ID NO: 2535479 - DNA, 25 bp, Homo sapien
tcagactatgacaaatatagcaggg

SEQ ID NO: 2535480 - DNA, 25 bp, Homo sapien
gatccagcattaatatcctttagct

SEQ ID NO: 2535481 - DNA, 25 bp, Homo sapien
gggcggttattcacactatgaaaag

SEQ ID NO: 2535482 - DNA, 25 bp, Homo sapien
gaaaacacaacatgtgacaatctga

SEQ ID NO: 2535483 - DNA, 25 bp, Homo sapien
tagcagggggcggttattcacacta

SEQ ID NO: 2535484 - DNA, 25 bp, Homo sapien
tctgatgtatcattgggtggcatgc

SEQ ID NO: 2535485 - DNA, 25 bp, Homo sapien
tagggccagttcatttgtagtgtca

SEQ ID NO: 2535486 - DNA, 25 bp, Homo sapien
gaaaggtgggatattgagctcccca

SEQ ID NO: 2535487 - DNA, 25 bp, Homo sapien
ggtgtgccttaccataaccagctaa

SEQ ID NO: 2535488 - DNA, 25 bp, Homo sapien
ttctatctgcgattgaaaggtggga

SEQ ID NO: 2535489 - DNA, 25 bp, Homo sapien
tatgatactcatataggcactccag

SEQ ID NO: 2535490 - DNA, 25 bp, Homo sapien
gaatgacactacaaatgaactggcc

SEQ ID NO: 2535491 - DNA, 25 bp, Homo sapien
acagtgttccaaagcatatgaagca

SEQ ID NO: 2535492 - DNA, 25 bp, Homo sapien
ttagctggttatggtaaggcacacc

SEQ ID NO: 2535493 - DNA, 25 bp, Homo sapien
caatatcccacctttcaatcgcaga

SEQ ID NO: 2535494 - DNA, 25 bp, Homo sapien
gctggagtgcctatatgagtatcat

SEQ ID NO: 2535495 - DNA, 25 bp, Homo sapien
taaagcatgccacccaatgatacat

SEQ ID NO: 2535496 - DNA, 25 bp, Homo sapien
tttgtaatgtaggcctttacagtta

SEQ ID NO: 2535497 - DNA, 25 bp, Homo sapien
ttaaggtggaagattcgcttattga

SEQ ID NO: 2535498 - DNA, 25 bp, Homo sapien
ttgtaatgtaggcctttacagttat

SEQ ID NO: 2535499 - DNA, 25 bp, Homo sapien
tgtaatgtaggcctttacagttata

SEQ ID NO: 2535500 - DNA, 25 bp, Homo sapien
tcaataagcgaatcttccaccttaa

SEQ ID NO: 2535501 - DNA, 25 bp, Homo sapien
ataactgtaaaggcctacattacaa

SEQ ID NO: 2535502 - DNA, 25 bp, Homo sapien
taactgtaaaggcctacattacaaa

SEQ ID NO: 2535503 - DNA, 25 bp, Homo sapien
tataactgtaaaggcctacattaca

SEQ ID NO: 2535504 - DNA, 25 bp, Homo sapien
cccacaaatttcataaatgagagtc

SEQ ID NO: 2535505 - DNA, 25 bp, Homo sapien
tagtttcttaaggtggaagattcgc

SEQ ID NO: 2535506 - DNA, 25 bp, Homo sapien
tacagttataaatttccttgagaac

SEQ ID NO: 2535507 - DNA, 25 bp, Homo sapien
gaagattcgcttattgatttgagat

SEQ ID NO: 2535508 - DNA, 25 bp, Homo sapien
tcttctttcttttgtaatgtaggcc

SEQ ID NO: 2535509 - DNA, 25 bp, Homo sapien
tgtaatgtaggcctttacagttata

SEQ ID NO: 2535510 - DNA, 25 bp, Homo sapien
tacattacaaaagaaagaagatctc

SEQ ID NO: 2535511 - DNA, 25 bp, Homo sapien
tatgaaatttgtgggataaactaca

SEQ ID NO: 2535512 - DNA, 25 bp, Homo sapien
tcaataagcgaatcttccaccttaa

SEQ ID NO: 2535513 - DNA, 25 bp, Homo sapien
gaatcttccaccttaagaaactaga

SEQ ID NO: 2535514 - DNA, 25 bp, Homo sapien
tataactgtaaaggcctacattaca

SEQ ID NO: 2535515 - DNA, 25 bp, Homo sapien
gaagatctcaaatcaataagcgaat

SEQ ID NO: 2535516 - DNA, 25 bp, Homo sapien
ggcctcatgatccacccacctctgc

SEQ ID NO: 2535517 - DNA, 25 bp, Homo sapien
gtgcaccaccatgcccaagtaattt

SEQ ID NO: 2535518 - DNA, 25 bp, Homo sapien
gtgtgcaccaccatgcccaagtaat

SEQ ID NO: 2535519 - DNA, 25 bp, Homo sapien
aggtgtgcaccaccatgcccaagta

SEQ ID NO: 2535520 - DNA, 25 bp, Homo sapien
tgtgcaccaccatgcccaagtaatt

SEQ ID NO: 2535521 - DNA, 25 bp, Homo sapien
tctctaactcctggcctcatgatcc

SEQ ID NO: 2535522 - DNA, 25 bp, Homo sapien
tacttgggcatggtggtgcacacct

SEQ ID NO: 2535523 - DNA, 25 bp, Homo sapien
aattacttgggcatggtggtgcaca

SEQ ID NO: 2535524 - DNA, 25 bp, Homo sapien
aaattacttgggcatggtggtgcac

SEQ ID NO: 2535525 - DNA, 25 bp, Homo sapien
ttacttgggcatggtggtgcacacc

SEQ ID NO: 2535526 - DNA, 25 bp, Homo sapien
ggatcatgaggccaggagttagaga

SEQ ID NO: 2535527 - DNA, 25 bp, Homo sapien
gcagaggtgggtggatcatgaggcc

SEQ ID NO: 2535528 - DNA, 25 bp, Homo sapien
tactgacaaatctaatgtcatgaag

SEQ ID NO: 2535529 - DNA, 25 bp, Homo sapien
tacggatataggttattctagcacc

SEQ ID NO: 2535530 - DNA, 25 bp, Homo sapien
gagaaacgtctattccgatccttta

SEQ ID NO: 2535531 - DNA, 25 bp, Homo sapien
gtatcatgtctaagatactgacaaa

SEQ ID NO: 2535532 - DNA, 25 bp, Homo sapien
tcttgcccacccttgttattttcca

SEQ ID NO: 2535533 - DNA, 25 bp, Homo sapien
gtttcaacctgcaatgtatgagggt

SEQ ID NO: 2535534 - DNA, 25 bp, Homo sapien
gaataacctatatccgtatgcagaa

SEQ ID NO: 2535535 - DNA, 25 bp, Homo sapien
taaaggatcggaatagacgtttctc

SEQ ID NO: 2535536 - DNA, 25 bp, Homo sapien
tggaaaataacaagggtgggcaaga

SEQ ID NO: 2535537 - DNA, 25 bp, Homo sapien
ggtgctagaataacctatatccgta

SEQ ID NO: 2535538 - DNA, 25 bp, Homo sapien
tgtatatcaaaagacactaacaaga

SEQ ID NO: 2535539 - DNA, 25 bp, Homo sapien
accctcatacattgcaggttgaaac

SEQ ID NO: 2535540 - DNA, 25 bp, Homo sapien
tgtattcagtaaggaggactcgcct

SEQ ID NO: 2535541 - DNA, 25 bp, Homo sapien
ggtgacaaactgacactttccagtg

SEQ ID NO: 2535542 - DNA, 25 bp, Homo sapien
aaactgacactttccagtggcactg

SEQ ID NO: 2535543 - DNA, 25 bp, Homo sapien
gaacacctgcatcatattaatgatt

SEQ ID NO: 2535544 - DNA, 25 bp, Homo sapien
tattaatgattagctgacacagagt

SEQ ID NO: 2535545 - DNA, 25 bp, Homo sapien
tagctgacacagagtgatgcttgat

SEQ ID NO: 2535546 - DNA, 25 bp, Homo sapien
tcaagcatcactctgtgtcagctaa

SEQ ID NO: 2535547 - DNA, 25 bp, Homo sapien
gctaatcattaatatgatgcaggtg

SEQ ID NO: 2535548 - DNA, 25 bp, Homo sapien
cactggaaagtgtcagtttgtcacc

SEQ ID NO: 2535549 - DNA, 25 bp, Homo sapien
cagtgccactggaaagtgtcagttt

SEQ ID NO: 2535550 - DNA, 25 bp, Homo sapien
gaggcgagtcctccttactgaatac

SEQ ID NO: 2535551 - DNA, 25 bp, Homo sapien
acatccccttgttgctaaatcaagc

SEQ ID NO: 2535552 - DNA, 25 bp, Homo sapien
agtgctgaacttggcttttgcgcag

SEQ ID NO: 2535553 - DNA, 25 bp, Homo sapien
taccggttacagtacttggcctctg

SEQ ID NO: 2535554 - DNA, 25 bp, Homo sapien
cctctccaaggagtaccggttacag

SEQ ID NO: 2535555 - DNA, 25 bp, Homo sapien
cggttacagtacttggcctctgaaa

SEQ ID NO: 2535556 - DNA, 25 bp, Homo sapien
tctccaaggagtaccggttacagta

SEQ ID NO: 2535557 - DNA, 25 bp, Homo sapien
acagtgctgaacttggcttttgcgc

SEQ ID NO: 2535558 - DNA, 25 bp, Homo sapien
aggagcatgggcagcgcgatggtag

SEQ ID NO: 2535559 - DNA, 25 bp, Homo sapien
tttcagaggccaagtactgtaaccg

SEQ ID NO: 2535560 - DNA, 25 bp, Homo sapien
ctgcgcaaaagccaagttcagcact

SEQ ID NO: 2535561 - DNA, 25 bp, Homo sapien
tactgtaaccggtactccttggaga

SEQ ID NO: 2535562 - DNA, 25 bp, Homo sapien
cagaggccaagtactgtaaccggta

SEQ ID NO: 2535563 - DNA, 25 bp, Homo sapien
gcgcaaaagccaagttcagcactgt

SEQ ID NO: 2535564 - DNA, 25 bp, Homo sapien
tcttgtacatctcacggagatgtgg

SEQ ID NO: 2535565 - DNA, 25 bp, Homo sapien
ctcttgtacatctcacggagatgtg

SEQ ID NO: 2535566 - DNA, 25 bp, Homo sapien
cacatctccgtgagatgtacaagag

SEQ ID NO: 2535567 - DNA, 25 bp, Homo sapien
ccacatctccgtgagatgtacaaga

SEQ ID NO: 2535568 - DNA, 25 bp, Homo sapien
tacatctcacggagatgtggtggtg

SEQ ID NO: 2535569 - DNA, 25 bp, Homo sapien
tggtggtggatcttctcatcctgtg

SEQ ID NO: 2535570 - DNA, 25 bp, Homo sapien
cctgtgttttcctctttacggtcag

SEQ ID NO: 2535571 - DNA, 25 bp, Homo sapien
gggtctcttgtacatctcacggaga

SEQ ID NO: 2535572 - DNA, 25 bp, Homo sapien
tcttgtacatctcacggagatgtgg

SEQ ID NO: 2535573 - DNA, 25 bp, Homo sapien
ggtggatcttctcatcctgtgtttt

SEQ ID NO: 2535574 - DNA, 25 bp, Homo sapien
caccaccacatctccgtgagatgta

SEQ ID NO: 2535575 - DNA, 25 bp, Homo sapien
cacaggatgagaagatccaccacca

SEQ ID NO: 2535576 - DNA, 25 bp, Homo sapien
aaaacacaggatgagaagatccacc

SEQ ID NO: 2535577 - DNA, 25 bp, Homo sapien
tgaccgtaaagaggaaaacacagga

SEQ ID NO: 2535578 - DNA, 25 bp, Homo sapien
cacatctccgtgagatgtacaagag

SEQ ID NO: 2535579 - DNA, 25 bp, Homo sapien
tccgtgagatgtacaagagacccct

SEQ ID NO: 2535580 - DNA, 25 bp, Homo sapien
gttgtattacaagctcagaaccaaa

SEQ ID NO: 2535581 - DNA, 25 bp, Homo sapien
gaggcacataagcttttacaaaaat

SEQ ID NO: 2535582 - DNA, 25 bp, Homo sapien
aattgttggttcattgtcagaaact

SEQ ID NO: 2535583 - DNA, 25 bp, Homo sapien
caaaaattgttggttcattgtcaga

SEQ ID NO: 2535584 - DNA, 25 bp, Homo sapien
gaaagcggttgtattacaagctcag

SEQ ID NO: 2535585 - DNA, 25 bp, Homo sapien
tgtcagaggcacataagcttttaca

SEQ ID NO: 2535586 - DNA, 25 bp, Homo sapien
tttggttctgagcttgtaatacaac

SEQ ID NO: 2535587 - DNA, 25 bp, Homo sapien
tgtaaaagcttatgtgcctctgaca

SEQ ID NO: 2535588 - DNA, 25 bp, Homo sapien
tctgagcttgtaatacaaccgcttt

SEQ ID NO: 2535589 - DNA, 25 bp, Homo sapien
agtttctgacaatgaaccaacaatt

SEQ ID NO: 2535590 - DNA, 25 bp, Homo sapien
tctgacaatgaaccaacaatttttg

SEQ ID NO: 2535591 - DNA, 25 bp, Homo sapien
caatttttgtaaaagcttatgtgcc

SEQ ID NO: 2535592 - DNA, 25 bp, Homo sapien
gcaaatatcatttggctgattcact

SEQ ID NO: 2535593 - DNA, 25 bp, Homo sapien
ttgttacaggaatcacagctctcaa

SEQ ID NO: 2535594 - DNA, 25 bp, Homo sapien
tggctgattcacttgttacaggaat

SEQ ID NO: 2535595 - DNA, 25 bp, Homo sapien
tatggatgctatgtgatcaaaaaat

SEQ ID NO: 2535596 - DNA, 25 bp, Homo sapien
gatggcaaatatcatttggctgatt

SEQ ID NO: 2535597 - DNA, 25 bp, Homo sapien
tcacttgttacaggaatcacagctc

SEQ ID NO: 2535598 - DNA, 25 bp, Homo sapien
ttcctgtaacaagtgaatcagccaa

SEQ ID NO: 2535599 - DNA, 25 bp, Homo sapien
gaatcagccaaatgatatttgccat

SEQ ID NO: 2535600 - DNA, 25 bp, Homo sapien
ttgagagctgtgattcctgtaacaa

SEQ ID NO: 2535601 - DNA, 25 bp, Homo sapien
gagctgtgattcctgtaacaagtga

SEQ ID NO: 2535602 - DNA, 25 bp, Homo sapien
ttttttgatcacatagcatccataa

SEQ ID NO: 2535603 - DNA, 25 bp, Homo sapien
agtgaatcagccaaatgatatttgc

SEQ ID NO: 2535604 - DNA, 25 bp, Homo sapien
gtgttaaagcacttgaaggaacgat

SEQ ID NO: 2535605 - DNA, 25 bp, Homo sapien
aacgatttccgcctaatagtcagca

SEQ ID NO: 2535606 - DNA, 25 bp, Homo sapien
atttccgcctaatagtcagcacgcc

SEQ ID NO: 2535607 - DNA, 25 bp, Homo sapien
ttaaagcacttgaaggaacgatttc

SEQ ID NO: 2535608 - DNA, 25 bp, Homo sapien
tccgcctaatagtcagcacgcccag

SEQ ID NO: 2535609 - DNA, 25 bp, Homo sapien
gatttccgcctaatagtcagcacgc

SEQ ID NO: 2535610 - DNA, 25 bp, Homo sapien
cgtgctgactattaggcggaaatcg

SEQ ID NO: 2535611 - DNA, 25 bp, Homo sapien
ggcgtgctgactattaggcggaaat

SEQ ID NO: 2535612 - DNA, 25 bp, Homo sapien
gaaatcgttccttcaagtgctttaa

SEQ ID NO: 2535613 - DNA, 25 bp, Homo sapien
ctgggcgtgctgactattaggcgga

SEQ ID NO: 2535614 - DNA, 25 bp, Homo sapien
tcgttccttcaagtgctttaacact

SEQ ID NO: 2535615 - DNA, 25 bp, Homo sapien
tgctgactattaggcggaaatcgtt

SEQ ID NO: 2535616 - DNA, 25 bp, Homo sapien
gaacgggaacaggtgaatctgtcac

SEQ ID NO: 2535617 - DNA, 25 bp, Homo sapien
caacacaggttatgctgatcaaatt

SEQ ID NO: 2535618 - DNA, 25 bp, Homo sapien
ccatctgtgcatggtacagcaggtg

SEQ ID NO: 2535619 - DNA, 25 bp, Homo sapien
tacagcaggtgtggattcaacacag

SEQ ID NO: 2535620 - DNA, 25 bp, Homo sapien
ggttgctgcatcaagaacgggaaca

SEQ ID NO: 2535621 - DNA, 25 bp, Homo sapien
tgtggattcaacacaggttatgctg

SEQ ID NO: 2535622 - DNA, 25 bp, Homo sapien
tgtgttgaatccacacctgctgtac

SEQ ID NO: 2535623 - DNA, 25 bp, Homo sapien
caatttgatcagcataacctgtgtt

SEQ ID NO: 2535624 - DNA, 25 bp, Homo sapien
tgttcccgttcttgatgcagcaacc

SEQ ID NO: 2535625 - DNA, 25 bp, Homo sapien
gtgacagattcacctgttcccgttc

SEQ ID NO: 2535626 - DNA, 25 bp, Homo sapien
cagcataacctgtgttgaatccaca

SEQ ID NO: 2535627 - DNA, 25 bp, Homo sapien
tgctgtaccatgcacagatggtgac

SEQ ID NO: 2535628 - DNA, 25 bp, Homo sapien
gtgggggctaagacatcagaattgc

SEQ ID NO: 2535629 - DNA, 25 bp, Homo sapien
aggtgggggctaagacatcagaatt

SEQ ID NO: 2535630 - DNA, 25 bp, Homo sapien
gggctaagacatcagaattgctaga

SEQ ID NO: 2535631 - DNA, 25 bp, Homo sapien
tgggggctaagacatcagaattgct

SEQ ID NO: 2535632 - DNA, 25 bp, Homo sapien
ggtgggggctaagacatcagaattg

SEQ ID NO: 2535633 - DNA, 25 bp, Homo sapien
gggggctaagacatcagaattgcta

SEQ ID NO: 2535634 - DNA, 25 bp, Homo sapien
tctagcaattctgatgtcttagccc

SEQ ID NO: 2535635 - DNA, 25 bp, Homo sapien
aattctgatgtcttagcccccacct

SEQ ID NO: 2535636 - DNA, 25 bp, Homo sapien
ctagcaattctgatgtcttagcccc

SEQ ID NO: 2535637 - DNA, 25 bp, Homo sapien
gcaattctgatgtcttagcccccac

SEQ ID NO: 2535638 - DNA, 25 bp, Homo sapien
tagcaattctgatgtcttagccccc

SEQ ID NO: 2535639 - DNA, 25 bp, Homo sapien
agcaattctgatgtcttagccccca

SEQ ID NO: 2535640 - DNA, 25 bp, Homo sapien
gacatcagaattgctagaacccagg

SEQ ID NO: 2535641 - DNA, 25 bp, Homo sapien
catcagaattgctagaacccaggag

SEQ ID NO: 2535642 - DNA, 25 bp, Homo sapien
gggctaagacatcagaattgctaga

SEQ ID NO: 2535643 - DNA, 25 bp, Homo sapien
gagctgagatcaaaccattgctgca

SEQ ID NO: 2535644 - DNA, 25 bp, Homo sapien
attttgtatagccaggtgtgtggtg

SEQ ID NO: 2535645 - DNA, 25 bp, Homo sapien
aaaaaggattttgtatagccaggtg

SEQ ID NO: 2535646 - DNA, 25 bp, Homo sapien
cctgggttctagcaattctgatgtc

SEQ ID NO: 2535647 - DNA, 25 bp, Homo sapien
cacctggctatacaaaatccttttt

SEQ ID NO: 2535648 - DNA, 25 bp, Homo sapien
ctcctgggttctagcaattctgatg

SEQ ID NO: 2535649 - DNA, 25 bp, Homo sapien
ctagcaattctgatgtcttagcccc

SEQ ID NO: 2535650 - DNA, 25 bp, Homo sapien
aatgcagcaatggtttgatctcagc

SEQ ID NO: 2535651 - DNA, 25 bp, Homo sapien
caccacacacctggctatacaaaat

SEQ ID NO: 2535652 - DNA, 25 bp, Homo sapien
tcgggatcaataagataaacctccc

SEQ ID NO: 2535653 - DNA, 25 bp, Homo sapien
cacatgtggcctgagcgtctatgta

SEQ ID NO: 2535654 - DNA, 25 bp, Homo sapien
tagacaaaaagtgcattacctcatg

SEQ ID NO: 2535655 - DNA, 25 bp, Homo sapien
gcctgagcgtctatgtagacaaaaa

SEQ ID NO: 2535656 - DNA, 25 bp, Homo sapien
tacctcatgaaaggattgagacaaa

SEQ ID NO: 2535657 - DNA, 25 bp, Homo sapien
agataaacctcccagttgggtgctg

SEQ ID NO: 2535658 - DNA, 25 bp, Homo sapien
catgaggtaatgcactttttgtcta

SEQ ID NO: 2535659 - DNA, 25 bp, Homo sapien
aatttgtctcaatcctttcatgagg

SEQ ID NO: 2535660 - DNA, 25 bp, Homo sapien
tacatagacgctcaggccacatgtg

SEQ ID NO: 2535661 - DNA, 25 bp, Homo sapien
gggaggtttatcttattgatcccga

SEQ ID NO: 2535662 - DNA, 25 bp, Homo sapien
cagcacccaactgggaggtttatct

SEQ ID NO: 2535663 - DNA, 25 bp, Homo sapien
ttttgtctacatagacgctcaggcc

SEQ ID NO: 2535664 - DNA, 25 bp, Homo sapien
gagattctctttataagggatcaat

SEQ ID NO: 2535665 - DNA, 25 bp, Homo sapien
cgagattctctttataagggatcaa

SEQ ID NO: 2535666 - DNA, 25 bp, Homo sapien
gggatcaattaaagtatctcttctg

SEQ ID NO: 2535667 - DNA, 25 bp, Homo sapien
agattctctttataagggatcaatt

SEQ ID NO: 2535668 - DNA, 25 bp, Homo sapien
taagggatcaattaaagtatctctt

SEQ ID NO: 2535669 - DNA, 25 bp, Homo sapien
ttgacgagattctctttataaggga

SEQ ID NO: 2535670 - DNA, 25 bp, Homo sapien
ttgatcccttataaagagaatctcg

SEQ ID NO: 2535671 - DNA, 25 bp, Homo sapien
tcccttataaagagaatctcgtcaa

SEQ ID NO: 2535672 - DNA, 25 bp, Homo sapien
gaagagatactttaattgatccctt

SEQ ID NO: 2535673 - DNA, 25 bp, Homo sapien
aattgatcccttataaagagaatct

SEQ ID NO: 2535674 - DNA, 25 bp, Homo sapien
cagaagagatactttaattgatccc

SEQ ID NO: 2535675 - DNA, 25 bp, Homo sapien
tataaagagaatctcgtcaaattac

SEQ ID NO: 2535676 - DNA, 25 bp, Homo sapien
gggagctaaatcctgtatccaacac

SEQ ID NO: 2535677 - DNA, 25 bp, Homo sapien
aacctggttgactccaaagaagagc

SEQ ID NO: 2535678 - DNA, 25 bp, Homo sapien
tccaacacctgtaaatgtcagaggc

SEQ ID NO: 2535679 - DNA, 25 bp, Homo sapien
atgtcagaggcaggtctccaaccga

SEQ ID NO: 2535680 - DNA, 25 bp, Homo sapien
tctccaaccgaaacctggttgactc

SEQ ID NO: 2535681 - DNA, 25 bp, Homo sapien
gggacataatcttgatgacttacag

SEQ ID NO: 2535682 - DNA, 25 bp, Homo sapien
gctcttctttggagtcaaccaggtt

SEQ ID NO: 2535683 - DNA, 25 bp, Homo sapien
gtgttggatacaggatttagctccc

SEQ ID NO: 2535684 - DNA, 25 bp, Homo sapien
tgtaagtcatcaagattatgtccca

SEQ ID NO: 2535685 - DNA, 25 bp, Homo sapien
gcctctgacatttacaggtgttgga

SEQ ID NO: 2535686 - DNA, 25 bp, Homo sapien
gagtcaaccaggtttcggttggaga

SEQ ID NO: 2535687 - DNA, 25 bp, Homo sapien
tcggttggagacctgcctctgacat

SEQ ID NO: 2535688 - DNA, 25 bp, Homo sapien
gaacagcctggaggcggtgaatgcg

SEQ ID NO: 2535689 - DNA, 25 bp, Homo sapien
ttgctgagcatgaacagcctggagg

SEQ ID NO: 2535690 - DNA, 25 bp, Homo sapien
tgaatgcgggcgtgcagcagaacaa

SEQ ID NO: 2535691 - DNA, 25 bp, Homo sapien
cagatgttgctgagcatgaacagcc

SEQ ID NO: 2535692 - DNA, 25 bp, Homo sapien
agtcctttgctgtcgcactctgcca

SEQ ID NO: 2535693 - DNA, 25 bp, Homo sapien
tgccacctcgcagagctacacgcgg

SEQ ID NO: 2535694 - DNA, 25 bp, Homo sapien
tccaggctgttcatgctcagcaaca

SEQ ID NO: 2535695 - DNA, 25 bp, Homo sapien
cctccaggctgttcatgctcagcaa

SEQ ID NO: 2535696 - DNA, 25 bp, Homo sapien
tggcagagtgcgacagcaaaggact

SEQ ID NO: 2535697 - DNA, 25 bp, Homo sapien
gctgttcatgctcagcaacatctgg

SEQ ID NO: 2535698 - DNA, 25 bp, Homo sapien
tccgcgtgtagctctgcgaggtggc

SEQ ID NO: 2535699 - DNA, 25 bp, Homo sapien
gttgttctgctgcacgcccgcattc

SEQ ID NO: 2535700 - DNA, 25 bp, Homo sapien
tctacccgcgatcgcaaacgcagtt

SEQ ID NO: 2535701 - DNA, 25 bp, Homo sapien
tggcacggtgtgctctgaaacagct

SEQ ID NO: 2535702 - DNA, 25 bp, Homo sapien
tagttgagtgtcacctgaaccccaa

SEQ ID NO: 2535703 - DNA, 25 bp, Homo sapien
tatcctgagggcaaggttgctggca

SEQ ID NO: 2535704 - DNA, 25 bp, Homo sapien
ccactcaagatagctgacgggcatg

SEQ ID NO: 2535705 - DNA, 25 bp, Homo sapien
gagaaaggactcaaacccacgtcat

SEQ ID NO: 2535706 - DNA, 25 bp, Homo sapien
agtctaaaacatagtcccctgcagg

SEQ ID NO: 2535707 - DNA, 25 bp, Homo sapien
tcaactagagcaaccatggatcatg

SEQ ID NO: 2535708 - DNA, 25 bp, Homo sapien
catgcccgtcagctatcttgagtgg

SEQ ID NO: 2535709 - DNA, 25 bp, Homo sapien
gaacaacatctatccaaggcaggta

SEQ ID NO: 2535710 - DNA, 25 bp, Homo sapien
tgttaactgcgtttgcgatcgcggg

SEQ ID NO: 2535711 - DNA, 25 bp, Homo sapien
aagtcatacacctcacaggctctgg

SEQ ID NO: 2535712 - DNA, 25 bp, Homo sapien
caaacaagctgatggatgccctaaa

SEQ ID NO: 2535713 - DNA, 25 bp, Homo sapien
gcctgtcagagctcatcgatatcag

SEQ ID NO: 2535714 - DNA, 25 bp, Homo sapien
ttgctgggaagacggcaaacaagct

SEQ ID NO: 2535715 - DNA, 25 bp, Homo sapien
tatcagcatcgcacagaaaacggcc

SEQ ID NO: 2535716 - DNA, 25 bp, Homo sapien
tggatgccctaaaggactccgacct

SEQ ID NO: 2535717 - DNA, 25 bp, Homo sapien
gaaaacggccatctggaggctgtat

SEQ ID NO: 2535718 - DNA, 25 bp, Homo sapien
tttccagtgcaggaggtcggagtcc

SEQ ID NO: 2535719 - DNA, 25 bp, Homo sapien
tgatatcgatgagctctgacaggct

SEQ ID NO: 2535720 - DNA, 25 bp, Homo sapien
ggccgttttctgtgcgatgctgata

SEQ ID NO: 2535721 - DNA, 25 bp, Homo sapien
agcttgtttgccgtcttcccagcaa

SEQ ID NO: 2535722 - DNA, 25 bp, Homo sapien
gtcctttagggcatccatcagcttg

SEQ ID NO: 2535723 - DNA, 25 bp, Homo sapien
tacagcctccagatggccgttttct

SEQ ID NO: 2535724 - DNA, 25 bp, Homo sapien
ttagctaagaagctaagtgactggc

SEQ ID NO: 2535725 - DNA, 25 bp, Homo sapien
tagctaagaagctaagtgactggcc

SEQ ID NO: 2535726 - DNA, 25 bp, Homo sapien
ggcttagctaagaagctaagtgact

SEQ ID NO: 2535727 - DNA, 25 bp, Homo sapien
gaggcttagctaagaagctaagtga

SEQ ID NO: 2535728 - DNA, 25 bp, Homo sapien
gcttagctaagaagctaagtgactg

SEQ ID NO: 2535729 - DNA, 25 bp, Homo sapien
agctaagaagctaagtgactggccc

SEQ ID NO: 2535730 - DNA, 25 bp, Homo sapien
cagtcacttagcttcttagctaagc

SEQ ID NO: 2535731 - DNA, 25 bp, Homo sapien
gtcacttagcttcttagctaagcct

SEQ ID NO: 2535732 - DNA, 25 bp, Homo sapien
gccagtcacttagcttcttagctaa

SEQ ID NO: 2535733 - DNA, 25 bp, Homo sapien
ggccagtcacttagcttcttagcta

SEQ ID NO: 2535734 - DNA, 25 bp, Homo sapien
gggccagtcacttagcttcttagct

SEQ ID NO: 2535735 - DNA, 25 bp, Homo sapien
tcacttagcttcttagctaagcctc

SEQ ID NO: 2535736 - DNA, 25 bp, Homo sapien
cagtcacttagcttcttagctaagc

SEQ ID NO: 2535737 - DNA, 25 bp, Homo sapien
gccagtcacttagcttcttagctaa

SEQ ID NO: 2535738 - DNA, 25 bp, Homo sapien
tgacttagggccagtcacttagctt

SEQ ID NO: 2535739 - DNA, 25 bp, Homo sapien
tcacttagcttcttagctaagcctc

SEQ ID NO: 2535740 - DNA, 25 bp, Homo sapien
gggccagtcacttagcttcttagct

SEQ ID NO: 2535741 - DNA, 25 bp, Homo sapien
ggccagtcacttagcttcttagcta

SEQ ID NO: 2535742 - DNA, 25 bp, Homo sapien
tagggaaggccgtgaattatagtcc

SEQ ID NO: 2535743 - DNA, 25 bp, Homo sapien
gcctgaccgttatggtaaaagctcg

SEQ ID NO: 2535744 - DNA, 25 bp, Homo sapien
tggctccttgaagtaagcgcaggct

SEQ ID NO: 2535745 - DNA, 25 bp, Homo sapien
cattgaaaaggcttatctggctggg

SEQ ID NO: 2535746 - DNA, 25 bp, Homo sapien
ggaaccagtaaacctgacaggcaga

SEQ ID NO: 2535747 - DNA, 25 bp, Homo sapien
tacactttaaaatcggcctggcgtg

SEQ ID NO: 2535748 - DNA, 25 bp, Homo sapien
agcctgcgcttacttcaaggagcca

SEQ ID NO: 2535749 - DNA, 25 bp, Homo sapien
cacgccaggccgattttaaagtgta

SEQ ID NO: 2535750 - DNA, 25 bp, Homo sapien
ctttcccaggtgtgaatcaatggac

SEQ ID NO: 2535751 - DNA, 25 bp, Homo sapien
tcattgaggactataattcacggcc

SEQ ID NO: 2535752 - DNA, 25 bp, Homo sapien
cagataagccttttcaatgcccctc

SEQ ID NO: 2535753 - DNA, 25 bp, Homo sapien
tagagacgagcttttaccataacgg

SEQ ID NO: 2535754 - DNA, 25 bp, Homo sapien
taatcagaccactaaattctgtgtg

SEQ ID NO: 2535755 - DNA, 25 bp, Homo sapien
cagcgatagatttagaatgggtttc

SEQ ID NO: 2535756 - DNA, 25 bp, Homo sapien
gagcaacattaatttagcacatagt

SEQ ID NO: 2535757 - DNA, 25 bp, Homo sapien
cctgtatcctaataacatctgtgga

SEQ ID NO: 2535758 - DNA, 25 bp, Homo sapien
tgtcattaaccagcgatagatttag

SEQ ID NO: 2535759 - DNA, 25 bp, Homo sapien
cataaatggtcgagcctttgtctct

SEQ ID NO: 2535760 - DNA, 25 bp, Homo sapien
gagacaaaggctcgaccatttatgg

SEQ ID NO: 2535761 - DNA, 25 bp, Homo sapien
tattaggatacagggaacagagaga

SEQ ID NO: 2535762 - DNA, 25 bp, Homo sapien
taaatctatcgctggttaatgacag

SEQ ID NO: 2535763 - DNA, 25 bp, Homo sapien
tccacagatgttattaggatacagg

SEQ ID NO: 2535764 - DNA, 25 bp, Homo sapien
gaaacccattctaaatctatcgctg

SEQ ID NO: 2535765 - DNA, 25 bp, Homo sapien
gcctgaagcccctaagtaggcagaa

SEQ ID NO: 2535766 - DNA, 25 bp, Homo sapien
gctatgttctgctggagcattctgt

SEQ ID NO: 2535767 - DNA, 25 bp, Homo sapien
tgctggagcattctgtgaagaaggc

SEQ ID NO: 2535768 - DNA, 25 bp, Homo sapien
agcattctgtgaagaaggcagtaca

SEQ ID NO: 2535769 - DNA, 25 bp, Homo sapien
tgttctgctggagcattctgtgaag

SEQ ID NO: 2535770 - DNA, 25 bp, Homo sapien
tggagcattctgtgaagaaggcagt

SEQ ID NO: 2535771 - DNA, 25 bp, Homo sapien
ggcagaagagatccgatagctatgt

SEQ ID NO: 2535772 - DNA, 25 bp, Homo sapien
acagaatgctccagcagaacatagc

SEQ ID NO: 2535773 - DNA, 25 bp, Homo sapien
catagctatcggatctcttctgccc

SEQ ID NO: 2535774 - DNA, 25 bp, Homo sapien
acatagctatcggatctcttctgcc

SEQ ID NO: 2535775 - DNA, 25 bp, Homo sapien
tgtactgccttcttcacagaatgct

SEQ ID NO: 2535776 - DNA, 25 bp, Homo sapien
gccttcttcacagaatgctccagca

SEQ ID NO: 2535777 - DNA, 25 bp, Homo sapien
tcttcacagaatgctccagcagaac

SEQ ID NO: 2535778 - DNA, 25 bp, Homo sapien
actgttatgatatattttgatgatt

SEQ ID NO: 2535779 - DNA, 25 bp, Homo sapien
aatcatcaaaatatatcataacagt

SEQ ID NO: 2535780 - DNA, 25 bp, Homo sapien
gccattgccactgttatgatatatt

SEQ ID NO: 2535781 - DNA, 25 bp, Homo sapien
acatcagccattgccactgttatga

SEQ ID NO: 2535782 - DNA, 25 bp, Homo sapien
aacatcagccattgccactgttatg

SEQ ID NO: 2535783 - DNA, 25 bp, Homo sapien
cagccattgccactgttatgatata

SEQ ID NO: 2535784 - DNA, 25 bp, Homo sapien
gccactgttatgatatattttgatg

SEQ ID NO: 2535785 - DNA, 25 bp, Homo sapien
atattttgatgatttctcttgccag

SEQ ID NO: 2535786 - DNA, 25 bp, Homo sapien
aatcatcaaaatatatcataacagt

SEQ ID NO: 2535787 - DNA, 25 bp, Homo sapien
tatatcataacagtggcaatggctg

SEQ ID NO: 2535788 - DNA, 25 bp, Homo sapien
cataacagtggcaatggctgatgtt

SEQ ID NO: 2535789 - DNA, 25 bp, Homo sapien
catcaaaatatatcataacagtggc

SEQ ID NO: 2535790 - DNA, 25 bp, Homo sapien
aatatatcataacagtggcaatggc

SEQ ID NO: 2535791 - DNA, 25 bp, Homo sapien
ctggcaagagaaatcatcaaaatat

SEQ ID NO: 2535792 - DNA, 25 bp, Homo sapien
ctacacttagtaactgggtgagatg

SEQ ID NO: 2535793 - DNA, 25 bp, Homo sapien
gaatcttatttctcaattgaaggcc

SEQ ID NO: 2535794 - DNA, 25 bp, Homo sapien
gaagctacttgacaagcacctgaga

SEQ ID NO: 2535795 - DNA, 25 bp, Homo sapien
ggtgagatgttgtcctgtaatagca

SEQ ID NO: 2535796 - DNA, 25 bp, Homo sapien
tgaaggccatatgggagcttcatgc

SEQ ID NO: 2535797 - DNA, 25 bp, Homo sapien
acctttatcacatttagcactggca

SEQ ID NO: 2535798 - DNA, 25 bp, Homo sapien
tctcaggtgcttgtcaagtagcttc

SEQ ID NO: 2535799 - DNA, 25 bp, Homo sapien
gcatgaagctcccatatggccttca

SEQ ID NO: 2535800 - DNA, 25 bp, Homo sapien
tgctattacaggacaacatctcacc

SEQ ID NO: 2535801 - DNA, 25 bp, Homo sapien
catctcacccagttactaagtgtag

SEQ ID NO: 2535802 - DNA, 25 bp, Homo sapien
tgagacctgtcaaacatatcaacat

SEQ ID NO: 2535803 - DNA, 25 bp, Homo sapien
tgccagtgctaaatgtgataaaggt

SEQ ID NO: 2535804 - DNA, 25 bp, Homo sapien
ggccatcctctggtcttgggagttt

SEQ ID NO: 2535805 - DNA, 25 bp, Homo sapien
catcctctggtcttgggagttttgt

SEQ ID NO: 2535806 - DNA, 25 bp, Homo sapien
ttcacgggttgaattggccttcaca

SEQ ID NO: 2535807 - DNA, 25 bp, Homo sapien
cacgggttgaattggccttcacaag

SEQ ID NO: 2535808 - DNA, 25 bp, Homo sapien
tgttcacgggttgaattggccttca

SEQ ID NO: 2535809 - DNA, 25 bp, Homo sapien
tgaggccatcctctggtcttgggag

SEQ ID NO: 2535810 - DNA, 25 bp, Homo sapien
tgtgaaggccaattcaacccgtgaa

SEQ ID NO: 2535811 - DNA, 25 bp, Homo sapien
aaactcccaagaccagaggatggcc

SEQ ID NO: 2535812 - DNA, 25 bp, Homo sapien
cttgtgaaggccaattcaacccgtg

SEQ ID NO: 2535813 - DNA, 25 bp, Homo sapien
tcccaagaccagaggatggcctcac

SEQ ID NO: 2535814 - DNA, 25 bp, Homo sapien
acaaaactcccaagaccagaggatg

SEQ ID NO: 2535815 - DNA, 25 bp, Homo sapien
gaaggccaattcaacccgtgaacaa

SEQ ID NO: 2535816 - DNA, 25 bp, Homo sapien
cccaggagtccaacgatcacgtgtg

SEQ ID NO: 2535817 - DNA, 25 bp, Homo sapien
ttgcccaggagtccaacgatcacgt

SEQ ID NO: 2535818 - DNA, 25 bp, Homo sapien
caggagtccaacgatcacgtgtgtc

SEQ ID NO: 2535819 - DNA, 25 bp, Homo sapien
attgcccaggagtccaacgatcacg

SEQ ID NO: 2535820 - DNA, 25 bp, Homo sapien
ggagtccaacgatcacgtgtgtctc

SEQ ID NO: 2535821 - DNA, 25 bp, Homo sapien
tgcccaggagtccaacgatcacgtg

SEQ ID NO: 2535822 - DNA, 25 bp, Homo sapien
gagacacacgtgatcgttggactcc

SEQ ID NO: 2535823 - DNA, 25 bp, Homo sapien
gacacacgtgatcgttggactcctg

SEQ ID NO: 2535824 - DNA, 25 bp, Homo sapien
acacgtgatcgttggactcctgggc

SEQ ID NO: 2535825 - DNA, 25 bp, Homo sapien
cgtgatcgttggactcctgggcaat

SEQ ID NO: 2535826 - DNA, 25 bp, Homo sapien
cacacgtgatcgttggactcctggg

SEQ ID NO: 2535827 - DNA, 25 bp, Homo sapien
cacgtgatcgttggactcctgggca

SEQ ID NO: 2535828 - DNA, 25 bp, Homo sapien
gcctgagtccaggaattcaaggctg

SEQ ID NO: 2535829 - DNA, 25 bp, Homo sapien
aaattagccgaccaagcatggtggt

SEQ ID NO: 2535830 - DNA, 25 bp, Homo sapien
gaggctgaggtccatcgcctgagtc

SEQ ID NO: 2535831 - DNA, 25 bp, Homo sapien
gaggtccatcgcctgagtccaggaa

SEQ ID NO: 2535832 - DNA, 25 bp, Homo sapien
ggtgagtgccttagtcccagctact

SEQ ID NO: 2535833 - DNA, 25 bp, Homo sapien
ccaagcatggtggtgagtgccttag

SEQ ID NO: 2535834 - DNA, 25 bp, Homo sapien
accaccatgcttggtcggctaattt

SEQ ID NO: 2535835 - DNA, 25 bp, Homo sapien
taaggcactcaccaccatgcttggt

SEQ ID NO: 2535836 - DNA, 25 bp, Homo sapien
ggactcaggcgatggacctcagcct

SEQ ID NO: 2535837 - DNA, 25 bp, Homo sapien
gaattcctggactcaggcgatggac

SEQ ID NO: 2535838 - DNA, 25 bp, Homo sapien
cagccttgaattcctggactcaggc

SEQ ID NO: 2535839 - DNA, 25 bp, Homo sapien
agtagctgggactaaggcactcacc

SEQ ID NO: 2535840 - DNA, 25 bp, Homo sapien
gaagtgctcttgttttcctgagtaa

SEQ ID NO: 2535841 - DNA, 25 bp, Homo sapien
aattcctgatttactcaggcccagg

SEQ ID NO: 2535842 - DNA, 25 bp, Homo sapien
ggtagacagctaattgcacagaata

SEQ ID NO: 2535843 - DNA, 25 bp, Homo sapien
tgtttctggtcttggatctatgggc

SEQ ID NO: 2535844 - DNA, 25 bp, Homo sapien
gggaataaacaacgctaagcatagt

SEQ ID NO: 2535845 - DNA, 25 bp, Homo sapien
tatctcagatagtgatagaccagga

SEQ ID NO: 2535846 - DNA, 25 bp, Homo sapien
tatcctggtctatcactatctgaga

SEQ ID NO: 2535847 - DNA, 25 bp, Homo sapien
tatccctagtacctacaatagtgcc

SEQ ID NO: 2535848 - DNA, 25 bp, Homo sapien
tattctgtgcaattagctgtctacc

SEQ ID NO: 2535849 - DNA, 25 bp, Homo sapien
caaattgaaggagttgagtgacctg

SEQ ID NO: 2535850 - DNA, 25 bp, Homo sapien
aagatttacacaggcccatagatcc

SEQ ID NO: 2535851 - DNA, 25 bp, Homo sapien
tgttactcaggaaaacaagagcact

SEQ ID NO: 2535852 - DNA, 25 bp, Homo sapien
ctgaggcctagaccaaagatgttat

SEQ ID NO: 2535853 - DNA, 25 bp, Homo sapien
actatagcgtgtattaatgggagca

SEQ ID NO: 2535854 - DNA, 25 bp, Homo sapien
tgtcaggcagcacctagggaattct

SEQ ID NO: 2535855 - DNA, 25 bp, Homo sapien
gaagtgtggtctttgctacaggcat

SEQ ID NO: 2535856 - DNA, 25 bp, Homo sapien
ccctgtggctttttaccagttgaga

SEQ ID NO: 2535857 - DNA, 25 bp, Homo sapien
gggccaacccagttgtgaggcttta

SEQ ID NO: 2535858 - DNA, 25 bp, Homo sapien
tctcaactggtaaaaagccacaggg

SEQ ID NO: 2535859 - DNA, 25 bp, Homo sapien
taaagcctcacaactgggttggccc

SEQ ID NO: 2535860 - DNA, 25 bp, Homo sapien
aaaagaattccctaggtgctgcctg

SEQ ID NO: 2535861 - DNA, 25 bp, Homo sapien
tagaaggatgcctgtagcaaagacc

SEQ ID NO: 2535862 - DNA, 25 bp, Homo sapien
tattgaactgtgaacactatgctcc

SEQ ID NO: 2535863 - DNA, 25 bp, Homo sapien
taataacatctttggtctaggcctc

SEQ ID NO: 2535864 - DNA, 25 bp, Homo sapien
agacctttgtccttgcgcaaattga

SEQ ID NO: 2535865 - DNA, 25 bp, Homo sapien
taagtttatagacctttgtccttgc

SEQ ID NO: 2535866 - DNA, 25 bp, Homo sapien
ttatagacctttgtccttgcgcaaa

SEQ ID NO: 2535867 - DNA, 25 bp, Homo sapien
gtttatagacctttgtccttgcgca

SEQ ID NO: 2535868 - DNA, 25 bp, Homo sapien
tagacctttgtccttgcgcaaattg

SEQ ID NO: 2535869 - DNA, 25 bp, Homo sapien
tatagacctttgtccttgcgcaaat

SEQ ID NO: 2535870 - DNA, 25 bp, Homo sapien
gcaaggacaaaggtctataaactta

SEQ ID NO: 2535871 - DNA, 25 bp, Homo sapien
tttgcgcaaggacaaaggtctataa

SEQ ID NO: 2535872 - DNA, 25 bp, Homo sapien
tcaatttgcgcaaggacaaaggtct

SEQ ID NO: 2535873 - DNA, 25 bp, Homo sapien
caatttgcgcaaggacaaaggtcta

SEQ ID NO: 2535874 - DNA, 25 bp, Homo sapien
tgcgcaaggacaaaggtctataaac

SEQ ID NO: 2535875 - DNA, 25 bp, Homo sapien
gcgcaaggacaaaggtctataaact

SEQ ID NO: 2535876 - DNA, 25 bp, Homo sapien
gatgttttcagttcaacacacagtc

SEQ ID NO: 2535877 - DNA, 25 bp, Homo sapien
gattcttaccggagccgaaagcaaa

SEQ ID NO: 2535878 - DNA, 25 bp, Homo sapien
acacacagtctcctccattattttg

SEQ ID NO: 2535879 - DNA, 25 bp, Homo sapien
cgtctgattcttaccggagccgaaa

SEQ ID NO: 2535880 - DNA, 25 bp, Homo sapien
tcagctacttaaacaacctccgtgt

SEQ ID NO: 2535881 - DNA, 25 bp, Homo sapien
tgatcgtctgattcttaccggagcc

SEQ ID NO: 2535882 - DNA, 25 bp, Homo sapien
tgagatacgccgctctgaatcttgc

SEQ ID NO: 2535883 - DNA, 25 bp, Homo sapien
ggagcttgagatacgccgctctgaa

SEQ ID NO: 2535884 - DNA, 25 bp, Homo sapien
gatacgccgctctgaatcttgccgc

SEQ ID NO: 2535885 - DNA, 25 bp, Homo sapien
tatggccggagcttgagatacgccg

SEQ ID NO: 2535886 - DNA, 25 bp, Homo sapien
gctatggccggagcttgagatacgc

SEQ ID NO: 2535887 - DNA, 25 bp, Homo sapien
tggccggagcttgagatacgccgct

SEQ ID NO: 2535888 - DNA, 25 bp, Homo sapien
gcaagattcagagcggcgtatctca

SEQ ID NO: 2535889 - DNA, 25 bp, Homo sapien
cagagcggcgtatctcaagctccgg

SEQ ID NO: 2535890 - DNA, 25 bp, Homo sapien
gcagggcggcaagattcagagcggc

SEQ ID NO: 2535891 - DNA, 25 bp, Homo sapien
ggcgtatctcaagctccggccatag

SEQ ID NO: 2535892 - DNA, 25 bp, Homo sapien
ttcagagcggcgtatctcaagctcc

SEQ ID NO: 2535893 - DNA, 25 bp, Homo sapien
gcggcaagattcagagcggcgtatc

SEQ ID NO: 2535894 - DNA, 25 bp, Homo sapien
agaatcagacgatcaaaataatgga

SEQ ID NO: 2535895 - DNA, 25 bp, Homo sapien
tttcggctccggtaagaatcagacg

SEQ ID NO: 2535896 - DNA, 25 bp, Homo sapien
tttgctttcggctccggtaagaatc

SEQ ID NO: 2535897 - DNA, 25 bp, Homo sapien
cacggaggttgtttaagtagctgag

SEQ ID NO: 2535898 - DNA, 25 bp, Homo sapien
caaaataatggaggagactgtgtgt

SEQ ID NO: 2535899 - DNA, 25 bp, Homo sapien
gactgtgtgttgaactgaaaacatc

SEQ ID NO: 2535900 - DNA, 25 bp, Homo sapien
aatgatgagactaaggccctcactc

SEQ ID NO: 2535901 - DNA, 25 bp, Homo sapien
agaatgatgagactaaggccctcac

SEQ ID NO: 2535902 - DNA, 25 bp, Homo sapien
tgatgagactaaggccctcactcca

SEQ ID NO: 2535903 - DNA, 25 bp, Homo sapien
atgatgagactaaggccctcactcc

SEQ ID NO: 2535904 - DNA, 25 bp, Homo sapien
gaatgatgagactaaggccctcact

SEQ ID NO: 2535905 - DNA, 25 bp, Homo sapien
gtgagggccttagtctcatcattct

SEQ ID NO: 2535906 - DNA, 25 bp, Homo sapien
gagtgagggccttagtctcatcatt

SEQ ID NO: 2535907 - DNA, 25 bp, Homo sapien
agtgagggccttagtctcatcattc

SEQ ID NO: 2535908 - DNA, 25 bp, Homo sapien
ggagtgagggccttagtctcatcat

SEQ ID NO: 2535909 - DNA, 25 bp, Homo sapien
tggagtgagggccttagtctcatca

SEQ ID NO: 2535910 - DNA, 25 bp, Homo sapien
gagtgagggccttagtctcatcatt

SEQ ID NO: 2535911 - DNA, 25 bp, Homo sapien
tctcatcattctttagcaaagaagc

SEQ ID NO: 2535912 - DNA, 25 bp, Homo sapien
cgcttcagcaaaatcaggattaaat

SEQ ID NO: 2535913 - DNA, 25 bp, Homo sapien
ccttctgcaaggaagctggagtgag

SEQ ID NO: 2535914 - DNA, 25 bp, Homo sapien
aaattgtttaattccttctgcaagg

SEQ ID NO: 2535915 - DNA, 25 bp, Homo sapien
tggagtgagggccttagtctcatca

SEQ ID NO: 2535916 - DNA, 25 bp, Homo sapien
cttgcagtgggcctctgtcccaaaa

SEQ ID NO: 2535917 - DNA, 25 bp, Homo sapien
ttttgggacagaggcccactgcaag

SEQ ID NO: 2535918 - DNA, 25 bp, Homo sapien
ggtatcttgcagtgggcctctgtcc

SEQ ID NO: 2535919 - DNA, 25 bp, Homo sapien
cttgcagtgggcctctgtcccaaaa

SEQ ID NO: 2535920 - DNA, 25 bp, Homo sapien
ctgtcccaaaaacaagcagaatttt

SEQ ID NO: 2535921 - DNA, 25 bp, Homo sapien
gaggtatcttgcagtgggcctctgt

SEQ ID NO: 2535922 - DNA, 25 bp, Homo sapien
tgcagtgggcctctgtcccaaaaac

SEQ ID NO: 2535923 - DNA, 25 bp, Homo sapien
gcagtgggcctctgtcccaaaaaca

SEQ ID NO: 2535924 - DNA, 25 bp, Homo sapien
ttttgggacagaggcccactgcaag

SEQ ID NO: 2535925 - DNA, 25 bp, Homo sapien
aaaattctgcttgtttttgggacag

SEQ ID NO: 2535926 - DNA, 25 bp, Homo sapien
gtttttgggacagaggcccactgca

SEQ ID NO: 2535927 - DNA, 25 bp, Homo sapien
tgtttttgggacagaggcccactgc

SEQ ID NO: 2535928 - DNA, 25 bp, Homo sapien
ctgttgagaaagaaaaaattctgct

SEQ ID NO: 2535929 - DNA, 25 bp, Homo sapien
gacagaggcccactgcaagatacct

SEQ ID NO: 2535930 - DNA, 25 bp, Homo sapien
atggaactgaccagtagagatgagg

SEQ ID NO: 2535931 - DNA, 25 bp, Homo sapien
gctgatatggaactgaccagtagag

SEQ ID NO: 2535932 - DNA, 25 bp, Homo sapien
tcagccaagtgtttaaactgtacac

SEQ ID NO: 2535933 - DNA, 25 bp, Homo sapien
tcttggcctacagtaagctttcttt

SEQ ID NO: 2535934 - DNA, 25 bp, Homo sapien
ttctttcagccaagtgtttaaactg

SEQ ID NO: 2535935 - DNA, 25 bp, Homo sapien
gatatggaactgaccagtagagatg

SEQ ID NO: 2535936 - DNA, 25 bp, Homo sapien
aaagaaagcttactgtaggccaaga

SEQ ID NO: 2535937 - DNA, 25 bp, Homo sapien
tctctactggtcagttccatatcag

SEQ ID NO: 2535938 - DNA, 25 bp, Homo sapien
cctcatctctactggtcagttccat

SEQ ID NO: 2535939 - DNA, 25 bp, Homo sapien
cagtttaaacacttggctgaaagaa

SEQ ID NO: 2535940 - DNA, 25 bp, Homo sapien
agtgtacagtttaaacacttggctg

SEQ ID NO: 2535941 - DNA, 25 bp, Homo sapien
tacagtttaaacacttggctgaaag

SEQ ID NO: 2535942 - DNA, 25 bp, Homo sapien
caggctctggacgtgtaagatagac

SEQ ID NO: 2535943 - DNA, 25 bp, Homo sapien
ccagcccagacttatgaagagaggt

SEQ ID NO: 2535944 - DNA, 25 bp, Homo sapien
tacaatagtaagagtcagagcctgg

SEQ ID NO: 2535945 - DNA, 25 bp, Homo sapien
tgccattgcgtagcctggatgtcag

SEQ ID NO: 2535946 - DNA, 25 bp, Homo sapien
gaattccagcagacagtcattgcca

SEQ ID NO: 2535947 - DNA, 25 bp, Homo sapien
catggtccatctgtaagtgagggtc

SEQ ID NO: 2535948 - DNA, 25 bp, Homo sapien
gaccctcacttacagatggaccatg

SEQ ID NO: 2535949 - DNA, 25 bp, Homo sapien
tatcttacacgtccagagcctggca

SEQ ID NO: 2535950 - DNA, 25 bp, Homo sapien
tcttcttatacagggcacaatctac

SEQ ID NO: 2535951 - DNA, 25 bp, Homo sapien
catgcaggcaagtgatccagaggac

SEQ ID NO: 2535952 - DNA, 25 bp, Homo sapien
gacatccaggctacgcaatggcaac

SEQ ID NO: 2535953 - DNA, 25 bp, Homo sapien
taagaaagagacacttgcagttgcc

SEQ ID NO: 2535954 - DNA, 25 bp, Homo sapien
aactgatggctgaaggcgagttgaa

SEQ ID NO: 2535955 - DNA, 25 bp, Homo sapien
caaactgatggctgaaggcgagttg

SEQ ID NO: 2535956 - DNA, 25 bp, Homo sapien
gaactgaaccagaggttcacaaaac

SEQ ID NO: 2535957 - DNA, 25 bp, Homo sapien
ctgatggctgaaggcgagttgaagg

SEQ ID NO: 2535958 - DNA, 25 bp, Homo sapien
ctgaaccagaggttcacaaaacaag

SEQ ID NO: 2535959 - DNA, 25 bp, Homo sapien
tcagattctttctctggaactgaac

SEQ ID NO: 2535960 - DNA, 25 bp, Homo sapien
gttttgtgaacctctggttcagttc

SEQ ID NO: 2535961 - DNA, 25 bp, Homo sapien
gttcagttccagagaaagaatctga

SEQ ID NO: 2535962 - DNA, 25 bp, Homo sapien
caactcgccttcagccatcagtttg

SEQ ID NO: 2535963 - DNA, 25 bp, Homo sapien
ccttcaactcgccttcagccatcag

SEQ ID NO: 2535964 - DNA, 25 bp, Homo sapien
cttgttttgtgaacctctggttcag

SEQ ID NO: 2535965 - DNA, 25 bp, Homo sapien
ttcaactcgccttcagccatcagtt

SEQ ID NO: 2535966 - DNA, 25 bp, Homo sapien
cttatggatccatcttactcttttt

SEQ ID NO: 2535967 - DNA, 25 bp, Homo sapien
tcaagcaatccctccgcttccacct

SEQ ID NO: 2535968 - DNA, 25 bp, Homo sapien
ttttattattccttatggatccatc

SEQ ID NO: 2535969 - DNA, 25 bp, Homo sapien
aaaaagagtaagatggatccataag

SEQ ID NO: 2535970 - DNA, 25 bp, Homo sapien
gatggatccataaggaataataaaa

SEQ ID NO: 2535971 - DNA, 25 bp, Homo sapien
aggtggaagcggagggattgcttga

SEQ ID NO: 2535972 - DNA, 25 bp, Homo sapien
gcacctggctgaaaaatgggtaaca

SEQ ID NO: 2535973 - DNA, 25 bp, Homo sapien
tactctttttagtcattgcagataa

SEQ ID NO: 2535974 - DNA, 25 bp, Homo sapien
cttatggatccatcttactcttttt

SEQ ID NO: 2535975 - DNA, 25 bp, Homo sapien
aatgggtaacattaagcatactgtt

SEQ ID NO: 2535976 - DNA, 25 bp, Homo sapien
gtgagcaaccgcacctggctgaaaa

SEQ ID NO: 2535977 - DNA, 25 bp, Homo sapien
ttttattattccttatggatccatc

SEQ ID NO: 2535978 - DNA, 25 bp, Homo sapien
gatggatccataaggaataataaaa

SEQ ID NO: 2535979 - DNA, 25 bp, Homo sapien
aaaaagagtaagatggatccataag

SEQ ID NO: 2535980 - DNA, 25 bp, Homo sapien
tcaattatctgcaatgactaaaaag

SEQ ID NO: 2535981 - DNA, 25 bp, Homo sapien
tgttacccatttttcagccaggtgc

SEQ ID NO: 2535982 - DNA, 25 bp, Homo sapien
aaaacagtatgcttaatgttaccca

SEQ ID NO: 2535983 - DNA, 25 bp, Homo sapien
tatcacatcaaccaataaacattca

SEQ ID NO: 2535984 - DNA, 25 bp, Homo sapien
agttaattgaagagtcttgtccaca

SEQ ID NO: 2535985 - DNA, 25 bp, Homo sapien
aattgaagagtcttgtccacagctg

SEQ ID NO: 2535986 - DNA, 25 bp, Homo sapien
ttaattgaagagtcttgtccacagc

SEQ ID NO: 2535987 - DNA, 25 bp, Homo sapien
actttacaagttaattgaagagtct

SEQ ID NO: 2535988 - DNA, 25 bp, Homo sapien
taattgaagagtcttgtccacagct

SEQ ID NO: 2535989 - DNA, 25 bp, Homo sapien
caagttaattgaagagtcttgtcca

SEQ ID NO: 2535990 - DNA, 25 bp, Homo sapien
ctgtggacaagactcttcaattaac

SEQ ID NO: 2535991 - DNA, 25 bp, Homo sapien
tgtggacaagactcttcaattaact

SEQ ID NO: 2535992 - DNA, 25 bp, Homo sapien
gctgtggacaagactcttcaattaa

SEQ ID NO: 2535993 - DNA, 25 bp, Homo sapien
aagactcttcaattaacttgtaaag

SEQ ID NO: 2535994 - DNA, 25 bp, Homo sapien
cagctgtggacaagactcttcaatt

SEQ ID NO: 2535995 - DNA, 25 bp, Homo sapien
tggacaagactcttcaattaacttg

SEQ ID NO: 2535996 - DNA, 25 bp, Homo sapien
ctcccgtctggtctcccagagtatt

SEQ ID NO: 2535997 - DNA, 25 bp, Homo sapien
tcccgtctggtctcccagagtattg

SEQ ID NO: 2535998 - DNA, 25 bp, Homo sapien
tgcgcccggccgtcatgtgttattt

SEQ ID NO: 2535999 - DNA, 25 bp, Homo sapien
cccgtctggtctcccagagtattgg

SEQ ID NO: 2536000 - DNA, 25 bp, Homo sapien
cctcccgtctggtctcccagagtat

SEQ ID NO: 2536001 - DNA, 25 bp, Homo sapien
gcgcccggccgtcatgtgttatttc

SEQ ID NO: 2536002 - DNA, 25 bp, Homo sapien
gaaataacacatgacggccgggcgc

SEQ ID NO: 2536003 - DNA, 25 bp, Homo sapien
atactctgggagaccagacgggagg

SEQ ID NO: 2536004 - DNA, 25 bp, Homo sapien
aaataacacatgacggccgggcgca

SEQ ID NO: 2536005 - DNA, 25 bp, Homo sapien
aatactctgggagaccagacgggag

SEQ ID NO: 2536006 - DNA, 25 bp, Homo sapien
ccaatactctgggagaccagacggg

SEQ ID NO: 2536007 - DNA, 25 bp, Homo sapien
caatactctgggagaccagacggga

SEQ ID NO: 2536008 - DNA, 25 bp, Homo sapien
ctgggtgacgccgtacaagatcgcg

SEQ ID NO: 2536009 - DNA, 25 bp, Homo sapien
acgccaatgtgttcggcatcaagga

SEQ ID NO: 2536010 - DNA, 25 bp, Homo sapien
ggttgtgcacgccaatgtgttcggc

SEQ ID NO: 2536011 - DNA, 25 bp, Homo sapien
cgtcagcctcatggagcggcggagg

SEQ ID NO: 2536012 - DNA, 25 bp, Homo sapien
tgctgaacgagatgagccgcacagg

SEQ ID NO: 2536013 - DNA, 25 bp, Homo sapien
ttcggcatcaaggactgggtgacgc

SEQ ID NO: 2536014 - DNA, 25 bp, Homo sapien
cgcgatcttgtacggcgtcacccag

SEQ ID NO: 2536015 - DNA, 25 bp, Homo sapien
acattggcgtgcacaaccccattgg

SEQ ID NO: 2536016 - DNA, 25 bp, Homo sapien
cctgtgcggctcatctcgttcagca

SEQ ID NO: 2536017 - DNA, 25 bp, Homo sapien
gcgtcacccagtccttgatgccgaa

SEQ ID NO: 2536018 - DNA, 25 bp, Homo sapien
tggcgtgcacaaccccattggtcat

SEQ ID NO: 2536019 - DNA, 25 bp, Homo sapien
tccttgatgccgaacacattggcgt

SEQ ID NO: 2536020 - DNA, 25 bp, Homo sapien
atggccagcgtccacgagagcctct

SEQ ID NO: 2536021 - DNA, 25 bp, Homo sapien
cagcgtccacgagagcctctacttc

SEQ ID NO: 2536022 - DNA, 25 bp, Homo sapien
gtccacgagagcctctacttcaatc

SEQ ID NO: 2536023 - DNA, 25 bp, Homo sapien
ccacgagagcctctacttcaatccc

SEQ ID NO: 2536024 - DNA, 25 bp, Homo sapien
gccagcgtccacgagagcctctact

SEQ ID NO: 2536025 - DNA, 25 bp, Homo sapien
tggccagcgtccacgagagcctcta

SEQ ID NO: 2536026 - DNA, 25 bp, Homo sapien
agtagaggctctcgtggacgctggc

SEQ ID NO: 2536027 - DNA, 25 bp, Homo sapien
aagtagaggctctcgtggacgctgg

SEQ ID NO: 2536028 - DNA, 25 bp, Homo sapien
tagaggctctcgtggacgctggcca

SEQ ID NO: 2536029 - DNA, 25 bp, Homo sapien
gggattgaagtagaggctctcgtgg

SEQ ID NO: 2536030 - DNA, 25 bp, Homo sapien
agaggctctcgtggacgctggccat

SEQ ID NO: 2536031 - DNA, 25 bp, Homo sapien
gattgaagtagaggctctcgtggac

SEQ ID NO: 2536032 - DNA, 25 bp, Homo sapien
atggccagcgtccacgagagcctct

SEQ ID NO: 2536033 - DNA, 25 bp, Homo sapien
gtccacgagagcctctacttcaatc

SEQ ID NO: 2536034 - DNA, 25 bp, Homo sapien
ccacgagagcctctacttcaatccc

SEQ ID NO: 2536035 - DNA, 25 bp, Homo sapien
gcgtccacgagagcctctacttcaa

SEQ ID NO: 2536036 - DNA, 25 bp, Homo sapien
agcgtccacgagagcctctacttca

SEQ ID NO: 2536037 - DNA, 25 bp, Homo sapien
tggccagcgtccacgagagcctcta

SEQ ID NO: 2536038 - DNA, 25 bp, Homo sapien
gatgtagacccggtagtgttgtgcc

SEQ ID NO: 2536039 - DNA, 25 bp, Homo sapien
acccggtagtgttgtgccttgtggt

SEQ ID NO: 2536040 - DNA, 25 bp, Homo sapien
tgagggcgggcggagatgtagaccc

SEQ ID NO: 2536041 - DNA, 25 bp, Homo sapien
tagacccggtagtgttgtgccttgt

SEQ ID NO: 2536042 - DNA, 25 bp, Homo sapien
ccttgtggtgacaactggcggcagc

SEQ ID NO: 2536043 - DNA, 25 bp, Homo sapien
ccgcgggcccgagacttagtctcgg

SEQ ID NO: 2536044 - DNA, 25 bp, Homo sapien
acaaggcacaacactaccgggtcta

SEQ ID NO: 2536045 - DNA, 25 bp, Homo sapien
gctgccgccagttgtcaccacaagg

SEQ ID NO: 2536046 - DNA, 25 bp, Homo sapien
tgccgccagttgtcaccacaaggca

SEQ ID NO: 2536047 - DNA, 25 bp, Homo sapien
ggcacaacactaccgggtctacatc

SEQ ID NO: 2536048 - DNA, 25 bp, Homo sapien
ccgagactaagtctcgggcccgcgg

SEQ ID NO: 2536049 - DNA, 25 bp, Homo sapien
accacaaggcacaacactaccgggt

SEQ ID NO: 2536050 - DNA, 25 bp, Homo sapien
tgcttattaactctggaggtagacc

SEQ ID NO: 2536051 - DNA, 25 bp, Homo sapien
ggcgcacagcggtatccatggattt

SEQ ID NO: 2536052 - DNA, 25 bp, Homo sapien
cagctgcgtcctacatcgtgaatga

SEQ ID NO: 2536053 - DNA, 25 bp, Homo sapien
tttctaatgagggacaaccatggct

SEQ ID NO: 2536054 - DNA, 25 bp, Homo sapien
aattgtgctaatctgggttcttcca

SEQ ID NO: 2536055 - DNA, 25 bp, Homo sapien
tccaagctcaaaatgagatatcaag

SEQ ID NO: 2536056 - DNA, 25 bp, Homo sapien
tgggttcttccaagctcaaaatgag

SEQ ID NO: 2536057 - DNA, 25 bp, Homo sapien
tattgatctcaccattaattgtgct

SEQ ID NO: 2536058 - DNA, 25 bp, Homo sapien
gaaagtacaggaagatgaaacatac

SEQ ID NO: 2536059 - DNA, 25 bp, Homo sapien
agatgaaacatactaaaggagagcc

SEQ ID NO: 2536060 - DNA, 25 bp, Homo sapien
ggcttggaaggatttatcttctgga

SEQ ID NO: 2536061 - DNA, 25 bp, Homo sapien
tacaggaagatgaaacatactaaag

SEQ ID NO: 2536062 - DNA, 25 bp, Homo sapien
tcagaacgtctcctagtcgtcaagc

SEQ ID NO: 2536063 - DNA, 25 bp, Homo sapien
ggcacagctgacttacatacccctt

SEQ ID NO: 2536064 - DNA, 25 bp, Homo sapien
tacactaacgtgatgtacggcttcg

SEQ ID NO: 2536065 - DNA, 25 bp, Homo sapien
taaattagataagtccaagccagga

SEQ ID NO: 2536066 - DNA, 25 bp, Homo sapien
tttcagaggtcgtaggctgctggct

SEQ ID NO: 2536067 - DNA, 25 bp, Homo sapien
aagcttgaattcctgttctgttcca

SEQ ID NO: 2536068 - DNA, 25 bp, Homo sapien
atgattccctttgatctcctctgac

SEQ ID NO: 2536069 - DNA, 25 bp, Homo sapien
ttctgttccaactattcatgattcc

SEQ ID NO: 2536070 - DNA, 25 bp, Homo sapien
tcatgattccctttgatctcctctg

SEQ ID NO: 2536071 - DNA, 25 bp, Homo sapien
ttgcctttcagatggcgagcggctg

SEQ ID NO: 2536072 - DNA, 25 bp, Homo sapien
tgaagccgaggccttagctctctgt

SEQ ID NO: 2536073 - DNA, 25 bp, Homo sapien
ttgggattatttcttgtacaacact

SEQ ID NO: 2536074 - DNA, 25 bp, Homo sapien
aaaccctgaggtatagcttttatca

SEQ ID NO: 2536075 - DNA, 25 bp, Homo sapien
aagacgacagcctgtgtcgcatctg

SEQ ID NO: 2536076 - DNA, 25 bp, Homo sapien
catctgcatggatgccgtcatcgac

SEQ ID NO: 2536077 - DNA, 25 bp, Homo sapien
gccgtcatcgactgtgtcctactgg

SEQ ID NO: 2536078 - DNA, 25 bp, Homo sapien
cggcaagcgcatgagtgagtgtccc

SEQ ID NO: 2536079 - DNA, 25 bp, Homo sapien
cacaagtggccgacatggaacatgc

SEQ ID NO: 2536080 - DNA, 25 bp, Homo sapien
gaatttgaacctagctctgatgcca

SEQ ID NO: 2536081 - DNA, 25 bp, Homo sapien
gacattctctagtcgactgccaggg

SEQ ID NO: 2536082 - DNA, 25 bp, Homo sapien
gaaacattggtccatgccgtgagcc

SEQ ID NO: 2536083 - DNA, 25 bp, Homo sapien
ggtgcatactacactcccagctaat

SEQ ID NO: 2536084 - DNA, 25 bp, Homo sapien
acagaaatgtttagtgtaacaggct

SEQ ID NO: 2536085 - DNA, 25 bp, Homo sapien
tgatacttggaaattggcttgtttg

SEQ ID NO: 2536086 - DNA, 25 bp, Homo sapien
tggcttgtttggcagagggcaagca

SEQ ID NO: 2536087 - DNA, 25 bp, Homo sapien
cagtggaatacagtgaagtctcttt

SEQ ID NO: 2536088 - DNA, 25 bp, Homo sapien
tttttaaataggtcatgtcatatgg

SEQ ID NO: 2536089 - DNA, 25 bp, Homo sapien
tcatgtcatatggataagtctgcag

SEQ ID NO: 2536090 - DNA, 25 bp, Homo sapien
tatggataagtctgcagtggaatac

SEQ ID NO: 2536091 - DNA, 25 bp, Homo sapien
tgaatatgacatcgccagcagggtc

SEQ ID NO: 2536092 - DNA, 25 bp, Homo sapien
tttgaaatgcggtctcgcggtcgcc

SEQ ID NO: 2536093 - DNA, 25 bp, Homo sapien
tactaatgagtgactacgggatccg

SEQ ID NO: 2536094 - DNA, 25 bp, Homo sapien
aaagtgctggatccactccacgtgg

SEQ ID NO: 2536095 - DNA, 25 bp, Homo sapien
cgtggccgttgtcagagtatagctc

SEQ ID NO: 2536096 - DNA, 25 bp, Homo sapien
ctacgcgtggccgttgtcagagtat

SEQ ID NO: 2536097 - DNA, 25 bp, Homo sapien
ttgtcagagtatagctctttcccgt

SEQ ID NO: 2536098 - DNA, 25 bp, Homo sapien
ctttactagccagaaacagcttgct

SEQ ID NO: 2536099 - DNA, 25 bp, Homo sapien
caacaaaggtaaaatcgcatcaggg

SEQ ID NO: 2536100 - DNA, 25 bp, Homo sapien
catcagggaaggtctaggaaacacc

SEQ ID NO: 2536101 - DNA, 25 bp, Homo sapien
actgactctgggcttaaacttctag

SEQ ID NO: 2536102 - DNA, 25 bp, Homo sapien
ggaaacaccaccttacaacaatggc

SEQ ID NO: 2536103 - DNA, 25 bp, Homo sapien
gaatgtcttcttgtaaaggccgcct

SEQ ID NO: 2536104 - DNA, 25 bp, Homo sapien
taagtacaagagctcatgctggagc

SEQ ID NO: 2536105 - DNA, 25 bp, Homo sapien
tatgtcaacacccaaaacctcggtg

SEQ ID NO: 2536106 - DNA, 25 bp, Homo sapien
ccaaaggaaagtgtcggctcactca

SEQ ID NO: 2536107 - DNA, 25 bp, Homo sapien
cttgcaaaatggaattgcgttgtgg

SEQ ID NO: 2536108 - DNA, 25 bp, Homo sapien
ttgcaaaatggaattgcgttgtggt

SEQ ID NO: 2536109 - DNA, 25 bp, Homo sapien
tgtcccacgttccaaatggaaaata

SEQ ID NO: 2536110 - DNA, 25 bp, Homo sapien
tgttgtcccacgttccaaatggaaa

SEQ ID NO: 2536111 - DNA, 25 bp, Homo sapien
ctgttgtcccacgttccaaatggaa

SEQ ID NO: 2536112 - DNA, 25 bp, Homo sapien
ctacttgcccaaactggacactcac

SEQ ID NO: 2536113 - DNA, 25 bp, Homo sapien
cttctacttgcccaaactggacact

SEQ ID NO: 2536114 - DNA, 25 bp, Homo sapien
tctacttgcccaaactggacactca

SEQ ID NO: 2536115 - DNA, 25 bp, Homo sapien
ttcttctacttgcccaaactggaca

SEQ ID NO: 2536116 - DNA, 25 bp, Homo sapien
gatgtttccacagcgtttgaagaag

SEQ ID NO: 2536117 - DNA, 25 bp, Homo sapien
cagtacctcaggtcaatatgacaga

SEQ ID NO: 2536118 - DNA, 25 bp, Homo sapien
tcggctatgaactgctcacagcctt

SEQ ID NO: 2536119 - DNA, 25 bp, Homo sapien
tgaagaaggacaggcactgatcagt

SEQ ID NO: 2536120 - DNA, 25 bp, Homo sapien
tctcacccgccaggtataaaggtta

SEQ ID NO: 2536121 - DNA, 25 bp, Homo sapien
acagctgcctctatacgtgcgtatg

SEQ ID NO: 2536122 - DNA, 25 bp, Homo sapien
tcaaaagcattcagataaccacgtg

SEQ ID NO: 2536123 - DNA, 25 bp, Homo sapien
ggttcacacaccatgtcaagtagct

SEQ ID NO: 2536124 - DNA, 25 bp, Homo sapien
tgagttgtctttgggtactaatttg

SEQ ID NO: 2536125 - DNA, 25 bp, Homo sapien
ctgtcggtggtaaggcagcacttgg

SEQ ID NO: 2536126 - DNA, 25 bp, Homo sapien
ggcttgtggttcacatattccccaa

SEQ ID NO: 2536127 - DNA, 25 bp, Homo sapien
cacttggtgtgaagtgagacctgga

SEQ ID NO: 2536128 - DNA, 25 bp, Homo sapien
gacacacgaatcgttttccacaaat

SEQ ID NO: 2536129 - DNA, 25 bp, Homo sapien
tctgtctcagtaaacgagacaccta

SEQ ID NO: 2536130 - DNA, 25 bp, Homo sapien
gaccacatagctgtagacacacgaa

SEQ ID NO: 2536131 - DNA, 25 bp, Homo sapien
gagacacctagcactgtgaccacat

SEQ ID NO: 2536132 - DNA, 25 bp, Homo sapien
tggttacagtaactgaggtggagct

SEQ ID NO: 2536133 - DNA, 25 bp, Homo sapien
gagcttgctccgattgtccatctga

SEQ ID NO: 2536134 - DNA, 25 bp, Homo sapien
cagacaggttgatctcggttaagga

SEQ ID NO: 2536135 - DNA, 25 bp, Homo sapien
tagactggtcggtgacgtggttaca

SEQ ID NO: 2536136 - DNA, 25 bp, Homo sapien
accgaggaggcctggtcatgctgac

SEQ ID NO: 2536137 - DNA, 25 bp, Homo sapien
ccaaaatcataattccaacagtgaa

SEQ ID NO: 2536138 - DNA, 25 bp, Homo sapien
gacatgacactctaaaaggcccacc

SEQ ID NO: 2536139 - DNA, 25 bp, Homo sapien
gggcaacccgtcaatctgaccgagg

SEQ ID NO: 2536140 - DNA, 25 bp, Homo sapien
ggaagcctttgcacaaccacactga

SEQ ID NO: 2536141 - DNA, 25 bp, Homo sapien
tccgatccccatggcttggcgagaa

SEQ ID NO: 2536142 - DNA, 25 bp, Homo sapien
cacactgatcccgatggcagtggag

SEQ ID NO: 2536143 - DNA, 25 bp, Homo sapien
agaagcacggacctaggcagtccag

SEQ ID NO: 2536144 - DNA, 25 bp, Homo sapien
cagatcccctctgtgcctgaagcaa

SEQ ID NO: 2536145 - DNA, 25 bp, Homo sapien
aagaagtgagatgcacgcagagccc

SEQ ID NO: 2536146 - DNA, 25 bp, Homo sapien
cctgaagcaaactgagaacatggca

SEQ ID NO: 2536147 - DNA, 25 bp, Homo sapien
caggagcgagtctcacgtgtgcaca

SEQ ID NO: 2536148 - DNA, 25 bp, Homo sapien
ggagatcccgcatctgggcatcctt

SEQ ID NO: 2536149 - DNA, 25 bp, Homo sapien
acccactggacatccagggtccgga

SEQ ID NO: 2536150 - DNA, 25 bp, Homo sapien
tccggagcagcggacaactggagct

SEQ ID NO: 2536151 - DNA, 25 bp, Homo sapien
gcaaagggccgagaccgcgatccat

SEQ ID NO: 2536152 - DNA, 25 bp, Homo sapien
ggctgtcgccggatgatgccactca

SEQ ID NO: 2536153 - DNA, 25 bp, Homo sapien
gagatattggtccagctgaggtcga

SEQ ID NO: 2536154 - DNA, 25 bp, Homo sapien
tagacttgcagtggttcaggtcaat

SEQ ID NO: 2536155 - DNA, 25 bp, Homo sapien
ctgaggtcgagggagacgggctgtc

SEQ ID NO: 2536156 - DNA, 25 bp, Homo sapien
ccccatcgtccaggggtagcgagtc

SEQ ID NO: 2536157 - DNA, 25 bp, Homo sapien
ctccatctggatacacttgggcggg

SEQ ID NO: 2536158 - DNA, 25 bp, Homo sapien
cctgtgcatgacgtgggctgcccca

SEQ ID NO: 2536159 - DNA, 25 bp, Homo sapien
gtggccggatcacatggcgctccat

SEQ ID NO: 2536160 - DNA, 25 bp, Homo sapien
tcaggctccgacttgatgggctgct

SEQ ID NO: 2536161 - DNA, 25 bp, Homo sapien
tctcaggctccgacttgatgggctg

SEQ ID NO: 2536162 - DNA, 25 bp, Homo sapien
ctccgacttgatgggctgctggttc

SEQ ID NO: 2536163 - DNA, 25 bp, Homo sapien
ctcgctctcaggctccgacttgatg

SEQ ID NO: 2536164 - DNA, 25 bp, Homo sapien
ccttgttgggaagccgccgcttccg

SEQ ID NO: 2536165 - DNA, 25 bp, Homo sapien
ctccttgttgggaagccgccgcttc

SEQ ID NO: 2536166 - DNA, 25 bp, Homo sapien
gctccttgttgggaagccgccgctt

SEQ ID NO: 2536167 - DNA, 25 bp, Homo sapien
cagctccttgttgggaagccgccgc

SEQ ID NO: 2536168 - DNA, 25 bp, Homo sapien
cccttcggtgctgggtcccgcggtg

SEQ ID NO: 2536169 - DNA, 25 bp, Homo sapien
gcggtcctcggcgttcttccaggac

SEQ ID NO: 2536170 - DNA, 25 bp, Homo sapien
cgggcagttcgtcctcgggttcctg

SEQ ID NO: 2536171 - DNA, 25 bp, Homo sapien
gagtggtcgctctccctggtcttgg

SEQ ID NO: 2536172 - DNA, 25 bp, Homo sapien
gtgcagctctaaccgctcaggcctg

SEQ ID NO: 2536173 - DNA, 25 bp, Homo sapien
cagggagctgcggtgcagctctaac

SEQ ID NO: 2536174 - DNA, 25 bp, Homo sapien
cgagagcggagacgcgtcagcctct

SEQ ID NO: 2536175 - DNA, 25 bp, Homo sapien
ctgagggcgagagcggagacgcgtc

SEQ ID NO: 2536176 - DNA, 25 bp, Homo sapien
aaagcttatcttctttgccaggttt

SEQ ID NO: 2536177 - DNA, 25 bp, Homo sapien
ctgaaaagcttatcttctttgccag

SEQ ID NO: 2536178 - DNA, 25 bp, Homo sapien
gaaaagcttatcttctttgccaggt

SEQ ID NO: 2536179 - DNA, 25 bp, Homo sapien
ctttttcctgaaaagcttatcttct

SEQ ID NO: 2536180 - DNA, 25 bp, Homo sapien
ttgctccccgggctcgtgggatttg

SEQ ID NO: 2536181 - DNA, 25 bp, Homo sapien
tctccacgtctgaccgacagacggg

SEQ ID NO: 2536182 - DNA, 25 bp, Homo sapien
ggaagtaggagtacagttgaactgt

SEQ ID NO: 2536183 - DNA, 25 bp, Homo sapien
cacgagtccacagtctccagaggag

SEQ ID NO: 2536184 - DNA, 25 bp, Homo sapien
tcaaatcatcctcggctctgggagc

SEQ ID NO: 2536185 - DNA, 25 bp, Homo sapien
cctggagatgtgcagccgcccattc

SEQ ID NO: 2536186 - DNA, 25 bp, Homo sapien
tgtgcagccgcccattcaaatcatc

SEQ ID NO: 2536187 - DNA, 25 bp, Homo sapien
cattcaaatcatcctcggctctggg

SEQ ID NO: 2536188 - DNA, 25 bp, Homo sapien
gccagaaccacgagccagagatctg

SEQ ID NO: 2536189 - DNA, 25 bp, Homo sapien
gctggtgacagcacggcccgtgggt

SEQ ID NO: 2536190 - DNA, 25 bp, Homo sapien
cagaggttccctggactcacagctt

SEQ ID NO: 2536191 - DNA, 25 bp, Homo sapien
agaggctctaggcacagacagcttc

SEQ ID NO: 2536192 - DNA, 25 bp, Homo sapien
gggcctcggcgagaggtgagaggag

SEQ ID NO: 2536193 - DNA, 25 bp, Homo sapien
gctgctgcctagagggggcctcggc

SEQ ID NO: 2536194 - DNA, 25 bp, Homo sapien
ctgctgctggaagtaagtgagactg

SEQ ID NO: 2536195 - DNA, 25 bp, Homo sapien
accgggggacgtttgaagcgatgag

SEQ ID NO: 2536196 - DNA, 25 bp, Homo sapien
ggtgcacgtcgtcagactttctgcg

SEQ ID NO: 2536197 - DNA, 25 bp, Homo sapien
actttctgcgcagaaggccgtccgg

SEQ ID NO: 2536198 - DNA, 25 bp, Homo sapien
tccggcggcaccttcttcgagtgct

SEQ ID NO: 2536199 - DNA, 25 bp, Homo sapien
gagtgctcatccgacctgcgccggg

SEQ ID NO: 2536200 - DNA, 25 bp, Homo sapien
ggtcttgccggcgtggttacacttc

SEQ ID NO: 2536201 - DNA, 25 bp, Homo sapien
gcagtttggaagctcgtcgttgacc

SEQ ID NO: 2536202 - DNA, 25 bp, Homo sapien
ttggaagctcgtcgttgaccacacc

SEQ ID NO: 2536203 - DNA, 25 bp, Homo sapien
tacacttcggacactcccagcagtt

SEQ ID NO: 2536204 - DNA, 25 bp, Homo sapien
ggtaaagccatgagctcagcgcctg

SEQ ID NO: 2536205 - DNA, 25 bp, Homo sapien
gtgccctcggccataaaagttagtg

SEQ ID NO: 2536206 - DNA, 25 bp, Homo sapien
tcagcgcctggcatgcagaaaggac

SEQ ID NO: 2536207 - DNA, 25 bp, Homo sapien
tctggttctgacatcctgggaggtg

SEQ ID NO: 2536208 - DNA, 25 bp, Homo sapien
cagagcgtcagcaccacctgtcccc

SEQ ID NO: 2536209 - DNA, 25 bp, Homo sapien
cccagagcgtcagcaccacctgtcc

SEQ ID NO: 2536210 - DNA, 25 bp, Homo sapien
gccccagagcgtcagcaccacctgt

SEQ ID NO: 2536211 - DNA, 25 bp, Homo sapien
ctgccccagagcgtcagcaccacct

SEQ ID NO: 2536212 - DNA, 25 bp, Homo sapien
tccatgagcatgaggttaaacttgc

SEQ ID NO: 2536213 - DNA, 25 bp, Homo sapien
ggcatccagggtggatgatttcatt

SEQ ID NO: 2536214 - DNA, 25 bp, Homo sapien
aaggcatccagggtggatgatttca

SEQ ID NO: 2536215 - DNA, 25 bp, Homo sapien
aggcatccagggtggatgatttcat

SEQ ID NO: 2536216 - DNA, 25 bp, Homo sapien
gaggaagcacgcagccaacctttat

SEQ ID NO: 2536217 - DNA, 25 bp, Homo sapien
tgtgagaacttgatgcacccggctg

SEQ ID NO: 2536218 - DNA, 25 bp, Homo sapien
tgctcagaggagcttcaagcaggct

SEQ ID NO: 2536219 - DNA, 25 bp, Homo sapien
caagcaggctgggatatacacgcca

SEQ ID NO: 2536220 - DNA, 25 bp, Homo sapien
ctgggcctgcggggcatcgacagcc

SEQ ID NO: 2536221 - DNA, 25 bp, Homo sapien
caagaaatatgcgtggaaggagatg

SEQ ID NO: 2536222 - DNA, 25 bp, Homo sapien
acaagaaatatgcgtggaaggagat

SEQ ID NO: 2536223 - DNA, 25 bp, Homo sapien
cctgcggggcatcgacagccaagga

SEQ ID NO: 2536224 - DNA, 25 bp, Homo sapien
ccaggctgggcctgcagatgagcgc

SEQ ID NO: 2536225 - DNA, 25 bp, Homo sapien
tgccaggctgggcctgcagatgagc

SEQ ID NO: 2536226 - DNA, 25 bp, Homo sapien
aggctgggcctgcagatgagcgcac

SEQ ID NO: 2536227 - DNA, 25 bp, Homo sapien
cctatgccaggctgggcctgcagat

SEQ ID NO: 2536228 - DNA, 25 bp, Homo sapien
ctgggagatgactcctccacaggga

SEQ ID NO: 2536229 - DNA, 25 bp, Homo sapien
gggactgggagatgactcctccaca

SEQ ID NO: 2536230 - DNA, 25 bp, Homo sapien
acggggactgggagatgactcctcc

SEQ ID NO: 2536231 - DNA, 25 bp, Homo sapien
ggactgggagatgactcctccacag

SEQ ID NO: 2536232 - DNA, 25 bp, Homo sapien
ccccgttgcgaagtccatgtccact

SEQ ID NO: 2536233 - DNA, 25 bp, Homo sapien
tgtacaagggaattcaagggcaaac

SEQ ID NO: 2536234 - DNA, 25 bp, Homo sapien
gtaccataaatcactccttgttggg

SEQ ID NO: 2536235 - DNA, 25 bp, Homo sapien
ggcgcggctcctcagtaccataaat

SEQ ID NO: 2536236 - DNA, 25 bp, Homo sapien
caacggggtcacagacaggacaggc

SEQ ID NO: 2536237 - DNA, 25 bp, Homo sapien
agaaccgtcacccagaaccgtaatg

SEQ ID NO: 2536238 - DNA, 25 bp, Homo sapien
ccagaaccgtaatgttggcaacggg

SEQ ID NO: 2536239 - DNA, 25 bp, Homo sapien
cgtcacccagaaccgtaatgttggc

SEQ ID NO: 2536240 - DNA, 25 bp, Homo sapien
gaggcctgagcctgcgaagcggcca

SEQ ID NO: 2536241 - DNA, 25 bp, Homo sapien
gcttctctgtgtgcggaggggcggc

SEQ ID NO: 2536242 - DNA, 25 bp, Homo sapien
gcggccagagcgagcagcggtcaga

SEQ ID NO: 2536243 - DNA, 25 bp, Homo sapien
agcggtcagacacgcgggccggcac

SEQ ID NO: 2536244 - DNA, 25 bp, Homo sapien
tgtccttgcagaagtggcactctcc

SEQ ID NO: 2536245 - DNA, 25 bp, Homo sapien
tgcactgccgcatgatgcagctctg

SEQ ID NO: 2536246 - DNA, 25 bp, Homo sapien
aggcctcgcacttgcggcatcgcgt

SEQ ID NO: 2536247 - DNA, 25 bp, Homo sapien
cgagctcctgccgttgtccggttgg

SEQ ID NO: 2536248 - DNA, 25 bp, Homo sapien
tcccacagcattcaaggagcttcca

SEQ ID NO: 2536249 - DNA, 25 bp, Homo sapien
cccacagcattcaaggagcttccag

SEQ ID NO: 2536250 - DNA, 25 bp, Homo sapien
ttcccacagcattcaaggagcttcc

SEQ ID NO: 2536251 - DNA, 25 bp, Homo sapien
gccagaaaggccagacaagcagtag

SEQ ID NO: 2536252 - DNA, 25 bp, Homo sapien
tgaaaacattcaaccggcaggtgag

SEQ ID NO: 2536253 - DNA, 25 bp, Homo sapien
gaaccagagctaaggtacacacctg

SEQ ID NO: 2536254 - DNA, 25 bp, Homo sapien
tgggaaccgacactgcataggtgct

SEQ ID NO: 2536255 - DNA, 25 bp, Homo sapien
gtccggctccgattcatagtcgtcg

SEQ ID NO: 2536256 - DNA, 25 bp, Homo sapien
ctggtccggctccgattcatagtcg

SEQ ID NO: 2536257 - DNA, 25 bp, Homo sapien
ccggctccgattcatagtcgtcgtc

SEQ ID NO: 2536258 - DNA, 25 bp, Homo sapien
tggtccggctccgattcatagtcgt

SEQ ID NO: 2536259 - DNA, 25 bp, Homo sapien
ctcgcgcgcgctgacatggctggag

SEQ ID NO: 2536260 - DNA, 25 bp, Homo sapien
cccgcccggagcaggctcggctcgc

SEQ ID NO: 2536261 - DNA, 25 bp, Homo sapien
caggctcgcgcgcgctgacatggct

SEQ ID NO: 2536262 - DNA, 25 bp, Homo sapien
ggctcccgctgccgcgaggagggag

SEQ ID NO: 2536263 - DNA, 25 bp, Homo sapien
tgcaatggccatctgttagtcacgt

SEQ ID NO: 2536264 - DNA, 25 bp, Homo sapien
cagagtcggcaaaagtgaataagca

SEQ ID NO: 2536265 - DNA, 25 bp, Homo sapien
tgaaatcaggtgatcagctctgcaa

SEQ ID NO: 2536266 - DNA, 25 bp, Homo sapien
gaaaaaatcccagtcgacttgctct

SEQ ID NO: 2536267 - DNA, 25 bp, Homo sapien
gccactccggtagtaagcacaacaa

SEQ ID NO: 2536268 - DNA, 25 bp, Homo sapien
taatgttttttgatcctcgccctct

SEQ ID NO: 2536269 - DNA, 25 bp, Homo sapien
tatataggtaaatggtgtgtcgaag

SEQ ID NO: 2536270 - DNA, 25 bp, Homo sapien
tgtacagatcatttcgccactccgg

SEQ ID NO: 2536271 - DNA, 25 bp, Homo sapien
tctgggcacagacccttacacaggg

SEQ ID NO: 2536272 - DNA, 25 bp, Homo sapien
ggcacagacccttacacagggaaga

SEQ ID NO: 2536273 - DNA, 25 bp, Homo sapien
atatgttgaaatccgagcccctagc

SEQ ID NO: 2536274 - DNA, 25 bp, Homo sapien
gagcccctagcacccatatgattgt

SEQ ID NO: 2536275 - DNA, 25 bp, Homo sapien
tccaaagagcctaggactcctcccg

SEQ ID NO: 2536276 - DNA, 25 bp, Homo sapien
cctccaaagagcctaggactcctcc

SEQ ID NO: 2536277 - DNA, 25 bp, Homo sapien
ccaaagagcctaggactcctcccgt

SEQ ID NO: 2536278 - DNA, 25 bp, Homo sapien
cccctccaaagagcctaggactcct

SEQ ID NO: 2536279 - DNA, 25 bp, Homo sapien
gtggaggtccagacaacaaactgct

SEQ ID NO: 2536280 - DNA, 25 bp, Homo sapien
tacttggctgtcctaacgggtgact

SEQ ID NO: 2536281 - DNA, 25 bp, Homo sapien
tagagtgcactaacctcaggtcagc

SEQ ID NO: 2536282 - DNA, 25 bp, Homo sapien
tgtccaaggaagtagtgaagctgcg

SEQ ID NO: 2536283 - DNA, 25 bp, Homo sapien
tacccaaaaagtcgcggctgttcac

SEQ ID NO: 2536284 - DNA, 25 bp, Homo sapien
ctacccaaaaagtcgcggctgttca

SEQ ID NO: 2536285 - DNA, 25 bp, Homo sapien
ggccagactagggtcatcatctgcg

SEQ ID NO: 2536286 - DNA, 25 bp, Homo sapien
ggaccccagtgatggccagactagg

SEQ ID NO: 2536287 - DNA, 25 bp, Homo sapien
ctttggccaagtcaccacagggacc

SEQ ID NO: 2536288 - DNA, 25 bp, Homo sapien
tagggtcatcatctgcgtgctcctt

SEQ ID NO: 2536289 - DNA, 25 bp, Homo sapien
taaccctgctgtgtgacgacgtgta

SEQ ID NO: 2536290 - DNA, 25 bp, Homo sapien
gatctcccacgaggcacactgtgtt

SEQ ID NO: 2536291 - DNA, 25 bp, Homo sapien
aatttaactacgtactcagcgaagc

SEQ ID NO: 2536292 - DNA, 25 bp, Homo sapien
gcggtggcactacggatcctctaat

SEQ ID NO: 2536293 - DNA, 25 bp, Homo sapien
ggtaagtgcttcagaatggccataa

SEQ ID NO: 2536294 - DNA, 25 bp, Homo sapien
taattcagtgacacaggtccctgct

SEQ ID NO: 2536295 - DNA, 25 bp, Homo sapien
cccatatcatagtgaggacactgca

SEQ ID NO: 2536296 - DNA, 25 bp, Homo sapien
aaacagcaatctttaacttggaggg

SEQ ID NO: 2536297 - DNA, 25 bp, Homo sapien
cagagccatcgtgagctgagctgca

SEQ ID NO: 2536298 - DNA, 25 bp, Homo sapien
gagccatcgtgagctgagctgcacg

SEQ ID NO: 2536299 - DNA, 25 bp, Homo sapien
tctgcacagagccatcgtgagctga

SEQ ID NO: 2536300 - DNA, 25 bp, Homo sapien
acgtgtcacactgaacgggacctgc

SEQ ID NO: 2536301 - DNA, 25 bp, Homo sapien
caaactcagtgagatgggtccattt

SEQ ID NO: 2536302 - DNA, 25 bp, Homo sapien
gatgccctcggggacacacttcttg

SEQ ID NO: 2536303 - DNA, 25 bp, Homo sapien
tttggcagagacctccgtggcggga

SEQ ID NO: 2536304 - DNA, 25 bp, Homo sapien
tctccgggagggattccagtttctc

SEQ ID NO: 2536305 - DNA, 25 bp, Homo sapien
tccttttgaggaatcgcagggcagg

SEQ ID NO: 2536306 - DNA, 25 bp, Homo sapien
gactcattagacaaagtccttttga

SEQ ID NO: 2536307 - DNA, 25 bp, Homo sapien
gccaatgtggtggacttcacacttt

SEQ ID NO: 2536308 - DNA, 25 bp, Homo sapien
ggtggacttcacactttcctccgac

SEQ ID NO: 2536309 - DNA, 25 bp, Homo sapien
catcggtgggcggtttgggtgccct

SEQ ID NO: 2536310 - DNA, 25 bp, Homo sapien
gtggagccatcggtgggcggtttgg

SEQ ID NO: 2536311 - DNA, 25 bp, Homo sapien
gagccatcggtgggcggtttgggtg

SEQ ID NO: 2536312 - DNA, 25 bp, Homo sapien
gccatcggtgggcggtttgggtgcc

SEQ ID NO: 2536313 - DNA, 25 bp, Homo sapien
aagccgtctatgctgggcttcctcg

SEQ ID NO: 2536314 - DNA, 25 bp, Homo sapien
cgaagagaagccgtctatgctgggc

SEQ ID NO: 2536315 - DNA, 25 bp, Homo sapien
tccagccaggaatccgaagagaagc

SEQ ID NO: 2536316 - DNA, 25 bp, Homo sapien
gaatccgaagagaagccgtctatgc

SEQ ID NO: 2536317 - DNA, 25 bp, Homo sapien
ttgccccttctcattggcagatgga

SEQ ID NO: 2536318 - DNA, 25 bp, Homo sapien
tgggagcgctgggtcacacagtaca

SEQ ID NO: 2536319 - DNA, 25 bp, Homo sapien
acagtacacgtatctctccaggaca

SEQ ID NO: 2536320 - DNA, 25 bp, Homo sapien
tctggtattcctgagtgaggtggga

SEQ ID NO: 2536321 - DNA, 25 bp, Homo sapien
caataagcatcgactccctctggta

SEQ ID NO: 2536322 - DNA, 25 bp, Homo sapien
ctcatagtagaaggggtaacggaat

SEQ ID NO: 2536323 - DNA, 25 bp, Homo sapien
tccctctgacagaggtcccaggtat

SEQ ID NO: 2536324 - DNA, 25 bp, Homo sapien
ccctctgacagaggtcccaggtatg

SEQ ID NO: 2536325 - DNA, 25 bp, Homo sapien
tcctccccacacccgtctggcactg

SEQ ID NO: 2536326 - DNA, 25 bp, Homo sapien
ggctccctctgacagaggtcccagg

SEQ ID NO: 2536327 - DNA, 25 bp, Homo sapien
caagagaggactgcgggaaacaaaa

SEQ ID NO: 2536328 - DNA, 25 bp, Homo sapien
atttgttgacagactcggagcctca

SEQ ID NO: 2536329 - DNA, 25 bp, Homo sapien
tgcaggtcatccgtctaccagagga

SEQ ID NO: 2536330 - DNA, 25 bp, Homo sapien
tacaaacaggttgtcgccttccacc

SEQ ID NO: 2536331 - DNA, 25 bp, Homo sapien
gggaaggctgctttcactagagcca

SEQ ID NO: 2536332 - DNA, 25 bp, Homo sapien
cttttctgggaaggctgctttcact

SEQ ID NO: 2536333 - DNA, 25 bp, Homo sapien
tctgggaaggctgctttcactagag

SEQ ID NO: 2536334 - DNA, 25 bp, Homo sapien
tttctgggaaggctgctttcactag

SEQ ID NO: 2536335 - DNA, 25 bp, Homo sapien
ccagcaccctgccagtcgtcatggg

SEQ ID NO: 2536336 - DNA, 25 bp, Homo sapien
tgatattccacgtaagctcagtgtg

SEQ ID NO: 2536337 - DNA, 25 bp, Homo sapien
cgtaagctcagtgtgatgctcaggg

SEQ ID NO: 2536338 - DNA, 25 bp, Homo sapien
ctgccattctcaacgaggacgtgat

SEQ ID NO: 2536339 - DNA, 25 bp, Homo sapien
ctcactacacaatattagccggttg

SEQ ID NO: 2536340 - DNA, 25 bp, Homo sapien
ccgtctcactacacaatattagccg

SEQ ID NO: 2536341 - DNA, 25 bp, Homo sapien
ggagaccccgtctcactacacaata

SEQ ID NO: 2536342 - DNA, 25 bp, Homo sapien
actacacaatattagccggttgtgg

SEQ ID NO: 2536343 - DNA, 25 bp, Homo sapien
cccagcctagttttattatttgtag

SEQ ID NO: 2536344 - DNA, 25 bp, Homo sapien
gcccagcctagttttattatttgta

SEQ ID NO: 2536345 - DNA, 25 bp, Homo sapien
atgcccagcctagttttattatttg

SEQ ID NO: 2536346 - DNA, 25 bp, Homo sapien
ccatgcccagcctagttttattatt

SEQ ID NO: 2536347 - DNA, 25 bp, Homo sapien
cgccagggaccgtgggcggtgccgt

SEQ ID NO: 2536348 - DNA, 25 bp, Homo sapien
gcagcgggcacttcttcgacctcgt

SEQ ID NO: 2536349 - DNA, 25 bp, Homo sapien
acaacaacgcccacttcttggtggg

SEQ ID NO: 2536350 - DNA, 25 bp, Homo sapien
cagaggtgacctcaggcggcccgac

SEQ ID NO: 2536351 - DNA, 25 bp, Homo sapien
tgcctccggcggaggtgcctcgcgg

SEQ ID NO: 2536352 - DNA, 25 bp, Homo sapien
cccgcgcctcggcggcgtgctccat

SEQ ID NO: 2536353 - DNA, 25 bp, Homo sapien
tgaggccgggcccgcgtagggggca

SEQ ID NO: 2536354 - DNA, 25 bp, Homo sapien
cgtagggggcagtcggcggctgcct

SEQ ID NO: 2536355 - DNA, 25 bp, Homo sapien
ttgagccgcgccaagcttaaagcct

SEQ ID NO: 2536356 - DNA, 25 bp, Homo sapien
cggctctgctctccggcttcgccat

SEQ ID NO: 2536357 - DNA, 25 bp, Homo sapien
agcctccagccggacctcggctctg

SEQ ID NO: 2536358 - DNA, 25 bp, Homo sapien
agcttaaagcctccagccggacctc

SEQ ID NO: 2536359 - DNA, 25 bp, Homo sapien
ggtcatgagtttatagctgccccag

SEQ ID NO: 2536360 - DNA, 25 bp, Homo sapien
ggagggagctaccagttgtcagctt

SEQ ID NO: 2536361 - DNA, 25 bp, Homo sapien
tcctgaggggtgagatccagatgaa

SEQ ID NO: 2536362 - DNA, 25 bp, Homo sapien
ccctgcagcgcttggtatttaagat

SEQ ID NO: 2536363 - DNA, 25 bp, Homo sapien
gaagacaggcctcatggtcaaatgt

SEQ ID NO: 2536364 - DNA, 25 bp, Homo sapien
tcgaagacaggcctcatggtcaaat

SEQ ID NO: 2536365 - DNA, 25 bp, Homo sapien
tttcgaagacaggcctcatggtcaa

SEQ ID NO: 2536366 - DNA, 25 bp, Homo sapien
acaggcctcatggtcaaatgtcacc

SEQ ID NO: 2536367 - DNA, 25 bp, Homo sapien
tactgatggaatccccaaagttctg

SEQ ID NO: 2536368 - DNA, 25 bp, Homo sapien
taaaaacagtgtggggaagtcagga

SEQ ID NO: 2536369 - DNA, 25 bp, Homo sapien
ggcactactgatggaatccccaaag

SEQ ID NO: 2536370 - DNA, 25 bp, Homo sapien
cttcctggcactactgatggaatcc

SEQ ID NO: 2536371 - DNA, 25 bp, Homo sapien
tggtggagttaggacttgagaaagc

SEQ ID NO: 2536372 - DNA, 25 bp, Homo sapien
tggttcttgccgagccttgagtgtg

SEQ ID NO: 2536373 - DNA, 25 bp, Homo sapien
taagggttaactgagaagaatctgg

SEQ ID NO: 2536374 - DNA, 25 bp, Homo sapien
tgtgttagggctgctaagggttaac

SEQ ID NO: 2536375 - DNA, 25 bp, Homo sapien
tggcaggaacagttaaagaagagaa

SEQ ID NO: 2536376 - DNA, 25 bp, Homo sapien
ttcaagtcaaaggaaatggcaggaa

SEQ ID NO: 2536377 - DNA, 25 bp, Homo sapien
aggaaatggcaggaacagttaaaga

SEQ ID NO: 2536378 - DNA, 25 bp, Homo sapien
gaaatggcaggaacagttaaagaag

SEQ ID NO: 2536379 - DNA, 25 bp, Homo sapien
cagacagctccgggtgaccctgcat

SEQ ID NO: 2536380 - DNA, 25 bp, Homo sapien
ccagagcaggaagtatcctggaaaa

SEQ ID NO: 2536381 - DNA, 25 bp, Homo sapien
tccagagcaggaagtatcctggaaa

SEQ ID NO: 2536382 - DNA, 25 bp, Homo sapien
tgtgaagctgcgtgcgatctgatct

SEQ ID NO: 2536383 - DNA, 25 bp, Homo sapien
tctgatctgatccaatcttgctggg

SEQ ID NO: 2536384 - DNA, 25 bp, Homo sapien
gggactataggcacgcattaccacg

SEQ ID NO: 2536385 - DNA, 25 bp, Homo sapien
ggactataggcacgcattaccacgc

SEQ ID NO: 2536386 - DNA, 25 bp, Homo sapien
actataggcacgcattaccacgccc

SEQ ID NO: 2536387 - DNA, 25 bp, Homo sapien
ctataggcacgcattaccacgccca

SEQ ID NO: 2536388 - DNA, 25 bp, Homo sapien
tccagtgctttggccttacgccctt

SEQ ID NO: 2536389 - DNA, 25 bp, Homo sapien
tccctcccgtccagcattgagtgtg

SEQ ID NO: 2536390 - DNA, 25 bp, Homo sapien
ccctgtgccagtgccacctgggtgc

SEQ ID NO: 2536391 - DNA, 25 bp, Homo sapien
gcactttgaaactgtcctctaagag

SEQ ID NO: 2536392 - DNA, 25 bp, Homo sapien
taaatctagcgacattttgtacata

SEQ ID NO: 2536393 - DNA, 25 bp, Homo sapien
cagagacaaccatctttgccagttt

SEQ ID NO: 2536394 - DNA, 25 bp, Homo sapien
tgtacataaacaagcacaccctctt

SEQ ID NO: 2536395 - DNA, 25 bp, Homo sapien
tcacatggttccaaacacaacactg

SEQ ID NO: 2536396 - DNA, 25 bp, Homo sapien
gctgagggaggacaaaatcctaccc

SEQ ID NO: 2536397 - DNA, 25 bp, Homo sapien
gagattcacgcccaggcactgtgac

SEQ ID NO: 2536398 - DNA, 25 bp, Homo sapien
cagagctcacctgcccattatgcaa

SEQ ID NO: 2536399 - DNA, 25 bp, Homo sapien
ccatattgcaagtgaggagaccaac

SEQ ID NO: 2536400 - DNA, 25 bp, Homo sapien
ctgtgaatctctgggcatgggacct

SEQ ID NO: 2536401 - DNA, 25 bp, Homo sapien
aacctgtgaatctctgggcatggga

SEQ ID NO: 2536402 - DNA, 25 bp, Homo sapien
gaacctgtgaatctctgggcatggg

SEQ ID NO: 2536403 - DNA, 25 bp, Homo sapien
ttgcaaagtttccatgggatttcaa

SEQ ID NO: 2536404 - DNA, 25 bp, Homo sapien
cctcgagtgccccatccttatccca

SEQ ID NO: 2536405 - DNA, 25 bp, Homo sapien
gcacccggcctaagacctgccctta

SEQ ID NO: 2536406 - DNA, 25 bp, Homo sapien
tgctgagccccctcgagtgccccat

SEQ ID NO: 2536407 - DNA, 25 bp, Homo sapien
gagtgccccatccttatcccatagg

SEQ ID NO: 2536408 - DNA, 25 bp, Homo sapien
tctcatgcattccaggatgagatca

SEQ ID NO: 2536409 - DNA, 25 bp, Homo sapien
attctcatgcattccaggatgagat

SEQ ID NO: 2536410 - DNA, 25 bp, Homo sapien
tcatgcattccaggatgagatcaga

SEQ ID NO: 2536411 - DNA, 25 bp, Homo sapien
ctcatgcattccaggatgagatcag

SEQ ID NO: 2536412 - DNA, 25 bp, Homo sapien
tggcaagaaatgacccagtgctggg

SEQ ID NO: 2536413 - DNA, 25 bp, Homo sapien
agcaccagccttcctattggcaaga

SEQ ID NO: 2536414 - DNA, 25 bp, Homo sapien
ccttcctattggcaagaaatgaccc

SEQ ID NO: 2536415 - DNA, 25 bp, Homo sapien
aatgaagagggtcccgaggacagcc

SEQ ID NO: 2536416 - DNA, 25 bp, Homo sapien
gcactggtctgagcgatcgggtgac

SEQ ID NO: 2536417 - DNA, 25 bp, Homo sapien
ctggtctgagcgatcgggtgacaca

SEQ ID NO: 2536418 - DNA, 25 bp, Homo sapien
ctgagcgatcgggtgacacaggctt

SEQ ID NO: 2536419 - DNA, 25 bp, Homo sapien
tctgagcgatcgggtgacacaggct

SEQ ID NO: 2536420 - DNA, 25 bp, Homo sapien
gaggcaagaagcctgccctcgatgg

SEQ ID NO: 2536421 - DNA, 25 bp, Homo sapien
tgaagaggaagcgtcaaaaaggaca

SEQ ID NO: 2536422 - DNA, 25 bp, Homo sapien
caggagatctgtgcattgttctggg

SEQ ID NO: 2536423 - DNA, 25 bp, Homo sapien
gatctgtgcattgttctgggccctg

SEQ ID NO: 2536424 - DNA, 25 bp, Homo sapien
cctctgtcttcctgaacatggccaa

SEQ ID NO: 2536425 - DNA, 25 bp, Homo sapien
tctgtcttcctgaacatggccaagg

SEQ ID NO: 2536426 - DNA, 25 bp, Homo sapien
tcttcctgaacatggccaaggcctc

SEQ ID NO: 2536427 - DNA, 25 bp, Homo sapien
tgtcttcctgaacatggccaaggcc

SEQ ID NO: 2536428 - DNA, 25 bp, Homo sapien
agcagccctcgtagcggttcccgtt

SEQ ID NO: 2536429 - DNA, 25 bp, Homo sapien
ttggccatattgtccacccagaagc

SEQ ID NO: 2536430 - DNA, 25 bp, Homo sapien
ggtccagatggaagaaacgccccgc

SEQ ID NO: 2536431 - DNA, 25 bp, Homo sapien
tcgtcacggccaaagtcgatcatcg

SEQ ID NO: 2536432 - DNA, 25 bp, Homo sapien
tgtccctcgtagatgtcgccgttgc

SEQ ID NO: 2536433 - DNA, 25 bp, Homo sapien
cgttgctgtaatacatgcggcccca

SEQ ID NO: 2536434 - DNA, 25 bp, Homo sapien
tcataatactccttgggtccgaaaa

SEQ ID NO: 2536435 - DNA, 25 bp, Homo sapien
gttctcccactgtccctcgtagatg

SEQ ID NO: 2536436 - DNA, 25 bp, Homo sapien
gtagccgtctcgcttcccaaacttc

SEQ ID NO: 2536437 - DNA, 25 bp, Homo sapien
gagggtgccgtagccgtctcgcttc

SEQ ID NO: 2536438 - DNA, 25 bp, Homo sapien
gctgagggtgccgtagccgtctcgc

SEQ ID NO: 2536439 - DNA, 25 bp, Homo sapien
aaggctgagggtgccgtagccgtct

SEQ ID NO: 2536440 - DNA, 25 bp, Homo sapien
tgtttgcgtttgtcctgcccctcac

SEQ ID NO: 2536441 - DNA, 25 bp, Homo sapien
caaccacattgtaggggctgttggg

SEQ ID NO: 2536442 - DNA, 25 bp, Homo sapien
caaatcatgggagcctttgttatta

SEQ ID NO: 2536443 - DNA, 25 bp, Homo sapien
gctgttgggttgtttgcgtttgtcc

SEQ ID NO: 2536444 - DNA, 25 bp, Homo sapien
tacgtgctcatttctgtgaccaagg

SEQ ID NO: 2536445 - DNA, 25 bp, Homo sapien
tttgcccagttggattacgtgctca

SEQ ID NO: 2536446 - DNA, 25 bp, Homo sapien
caattttttgatttgcccagttgga

SEQ ID NO: 2536447 - DNA, 25 bp, Homo sapien
gttggattacgtgctcatttctgtg

SEQ ID NO: 2536448 - DNA, 25 bp, Homo sapien
gtccagacgacccaacagaaaccat

SEQ ID NO: 2536449 - DNA, 25 bp, Homo sapien
gtgatgctggttgtcggaacactga

SEQ ID NO: 2536450 - DNA, 25 bp, Homo sapien
gctggttgtcggaacactgaagacc

SEQ ID NO: 2536451 - DNA, 25 bp, Homo sapien
acagaaaccatactgcactgtcttc

SEQ ID NO: 2536452 - DNA, 25 bp, Homo sapien
agaaaaaaggccagccagggagaag

SEQ ID NO: 2536453 - DNA, 25 bp, Homo sapien
gctggcagccatgtgtatcatgcag

SEQ ID NO: 2536454 - DNA, 25 bp, Homo sapien
catgcagaggtatacttgcaggagg

SEQ ID NO: 2536455 - DNA, 25 bp, Homo sapien
tcctgtcactaagatgctggcagcc

SEQ ID NO: 2536456 - DNA, 25 bp, Homo sapien
actcgcccacatagtagtcgccatt

SEQ ID NO: 2536457 - DNA, 25 bp, Homo sapien
tttttgggcacttagagactggcat

SEQ ID NO: 2536458 - DNA, 25 bp, Homo sapien
acagcgtatacctggctccgcaggc

SEQ ID NO: 2536459 - DNA, 25 bp, Homo sapien
tccgacttttttgggcacttagaga

SEQ ID NO: 2536460 - DNA, 25 bp, Homo sapien
gtggctgcttctgcaaggctggagg

SEQ ID NO: 2536461 - DNA, 25 bp, Homo sapien
ggtggctgcttctgcaaggctggag

SEQ ID NO: 2536462 - DNA, 25 bp, Homo sapien
gccccgtgtaatgccgggatcctga

SEQ ID NO: 2536463 - DNA, 25 bp, Homo sapien
cagcgcgccccgtgtaatgccggga

SEQ ID NO: 2536464 - DNA, 25 bp, Homo sapien
gtcatgtgtgttctgagtccctggg

SEQ ID NO: 2536465 - DNA, 25 bp, Homo sapien
ggagagtcatgtgtgttctgagtcc

SEQ ID NO: 2536466 - DNA, 25 bp, Homo sapien
ctcaatgtccgtcagctgcgcgcgc

SEQ ID NO: 2536467 - DNA, 25 bp, Homo sapien
catccagcctcaatgtccgtcagct

SEQ ID NO: 2536468 - DNA, 25 bp, Homo sapien
agcctcaatgtccgtcagctgcgcg

SEQ ID NO: 2536469 - DNA, 25 bp, Homo sapien
atccagcctcaatgtccgtcagctg

SEQ ID NO: 2536470 - DNA, 25 bp, Homo sapien
aagtgggcgggatcgcgttgcaacg

SEQ ID NO: 2536471 - DNA, 25 bp, Homo sapien
ctctggacgctcctgccggaagtgg

SEQ ID NO: 2536472 - DNA, 25 bp, Homo sapien
tgcaacgcggcaagggcgatgagag

SEQ ID NO: 2536473 - DNA, 25 bp, Homo sapien
cccaatgctccgcagcaaggttact

SEQ ID NO: 2536474 - DNA, 25 bp, Homo sapien
tctaacacgagatgtggtgatggtt

SEQ ID NO: 2536475 - DNA, 25 bp, Homo sapien
tggagagtgactgcgaagagacacc

SEQ ID NO: 2536476 - DNA, 25 bp, Homo sapien
tggttgtacaacctggtaaatgtat

SEQ ID NO: 2536477 - DNA, 25 bp, Homo sapien
gatcttattgggtgatagaaggttc

SEQ ID NO: 2536478 - DNA, 25 bp, Homo sapien
cccaagacaagcattttagtgccag

SEQ ID NO: 2536479 - DNA, 25 bp, Homo sapien
gctcaatactgctagggaatgaggg

SEQ ID NO: 2536480 - DNA, 25 bp, Homo sapien
caagaaagcattatcctgtgggtag

SEQ ID NO: 2536481 - DNA, 25 bp, Homo sapien
tatccaccatttgctatcagttggg

SEQ ID NO: 2536482 - DNA, 25 bp, Homo sapien
tctccccttggtggtctgaggcagg

SEQ ID NO: 2536483 - DNA, 25 bp, Homo sapien
tctgggcccaaatagatgcattatc

SEQ ID NO: 2536484 - DNA, 25 bp, Homo sapien
catctgttggagatttagcctccgc

SEQ ID NO: 2536485 - DNA, 25 bp, Homo sapien
gcaggtgggctaaatccgagtgact

SEQ ID NO: 2536486 - DNA, 25 bp, Homo sapien
tgcttggttctttaccagggagtag

SEQ ID NO: 2536487 - DNA, 25 bp, Homo sapien
gcttggttctttaccagggagtagc

SEQ ID NO: 2536488 - DNA, 25 bp, Homo sapien
ctgcttggttctttaccagggagta

SEQ ID NO: 2536489 - DNA, 25 bp, Homo sapien
ggtgagactgggatgaactctagtt

SEQ ID NO: 2536490 - DNA, 25 bp, Homo sapien
aactctagtttctcatccctgaagc

SEQ ID NO: 2536491 - DNA, 25 bp, Homo sapien
gtttctcatccctgaagcatccact

SEQ ID NO: 2536492 - DNA, 25 bp, Homo sapien
tggaggcggtgggaggtgagactgg

SEQ ID NO: 2536493 - DNA, 25 bp, Homo sapien
caagttctgcgtgaggaagggtcct

SEQ ID NO: 2536494 - DNA, 25 bp, Homo sapien
gaagtgacccaaacccaagttctgc

SEQ ID NO: 2536495 - DNA, 25 bp, Homo sapien
acagtctttgccgaagtgacccaaa

SEQ ID NO: 2536496 - DNA, 25 bp, Homo sapien
aacaccccacagtctttgccgaagt

SEQ ID NO: 2536497 - DNA, 25 bp, Homo sapien
ccaccttcctgcagtgtcgtggcag

SEQ ID NO: 2536498 - DNA, 25 bp, Homo sapien
tgtgagaagattcgccaccagaggg

SEQ ID NO: 2536499 - DNA, 25 bp, Homo sapien
gggacaaggacgttcccgtctgtgc

SEQ ID NO: 2536500 - DNA, 25 bp, Homo sapien
cctgagtcaggctgtgagaagattc

SEQ ID NO: 2536501 - DNA, 25 bp, Homo sapien
tgagattctgcattcgacgggaggc

SEQ ID NO: 2536502 - DNA, 25 bp, Homo sapien
ccattcatatatgggcctcagctcc

SEQ ID NO: 2536503 - DNA, 25 bp, Homo sapien
ggtttggctgagtgctctgccccac

SEQ ID NO: 2536504 - DNA, 25 bp, Homo sapien
tctgccccaccattcatatatgggc

SEQ ID NO: 2536505 - DNA, 25 bp, Homo sapien
ccacaggcatgccttgtttagccct

SEQ ID NO: 2536506 - DNA, 25 bp, Homo sapien
caggcatgccttgtttagccctcct

SEQ ID NO: 2536507 - DNA, 25 bp, Homo sapien
cttgtttagccctcctcaaggaatt

SEQ ID NO: 2536508 - DNA, 25 bp, Homo sapien
catgccttgtttagccctcctcaag

SEQ ID NO: 2536509 - DNA, 25 bp, Homo sapien
tagaaaaacggacctggcaacattc

SEQ ID NO: 2536510 - DNA, 25 bp, Homo sapien
gcacctgcgtttgccctagattagg

SEQ ID NO: 2536511 - DNA, 25 bp, Homo sapien
ggtttgtggcagctactcttcacct

SEQ ID NO: 2536512 - DNA, 25 bp, Homo sapien
tagattaggagtcagctagctgtct

SEQ ID NO: 2536513 - DNA, 25 bp, Homo sapien
gttctgagaaactgtcccgcgtgga

SEQ ID NO: 2536514 - DNA, 25 bp, Homo sapien
tacagtggtgcctatctcgggagcc

SEQ ID NO: 2536515 - DNA, 25 bp, Homo sapien
gaatgttccaagagtctagccgcag

SEQ ID NO: 2536516 - DNA, 25 bp, Homo sapien
taccgtagaccatcatgaggcctgg

SEQ ID NO: 2536517 - DNA, 25 bp, Homo sapien
gccttcttcagagcgctgagagcca

SEQ ID NO: 2536518 - DNA, 25 bp, Homo sapien
tcttctgccgttgcgccttcttcag

SEQ ID NO: 2536519 - DNA, 25 bp, Homo sapien
cgaaacttggcggaacattccaggt

SEQ ID NO: 2536520 - DNA, 25 bp, Homo sapien
agacgtcctccacattctcccgaaa

SEQ ID NO: 2536521 - DNA, 25 bp, Homo sapien
cggatctgttcgcaggcgctcaggc

SEQ ID NO: 2536522 - DNA, 25 bp, Homo sapien
ggatctgttcgcaggcgctcaggcc

SEQ ID NO: 2536523 - DNA, 25 bp, Homo sapien
cttattaatggttatttcttgtgaa

SEQ ID NO: 2536524 - DNA, 25 bp, Homo sapien
attaatggttatttcttgtgaaagt

SEQ ID NO: 2536525 - DNA, 25 bp, Homo sapien
ttattaatggttatttcttgtgaaa

SEQ ID NO: 2536526 - DNA, 25 bp, Homo sapien
tattaatggttatttcttgtgaaag

SEQ ID NO: 2536527 - DNA, 25 bp, Homo sapien
actttggattgcagtggatgggacc

SEQ ID NO: 2536528 - DNA, 25 bp, Homo sapien
gcctgcctccgagtcctaaggattg

SEQ ID NO: 2536529 - DNA, 25 bp, Homo sapien
caaagagttgcacggtcaattggcc

SEQ ID NO: 2536530 - DNA, 25 bp, Homo sapien
gcggctcatagcacagactttggat

SEQ ID NO: 2536531 - DNA, 25 bp, Homo sapien
acggctgtgccccagggtcttggcc

SEQ ID NO: 2536532 - DNA, 25 bp, Homo sapien
tgtgccccagggtcttggccccggc

SEQ ID NO: 2536533 - DNA, 25 bp, Homo sapien
agccacggctgtgccccagggtctt

SEQ ID NO: 2536534 - DNA, 25 bp, Homo sapien
tcacagccacggctgtgccccaggg

SEQ ID NO: 2536535 - DNA, 25 bp, Homo sapien
gggcggcccggagcttccgcagctg

SEQ ID NO: 2536536 - DNA, 25 bp, Homo sapien
ggcagaaatgcgtgacctcagggaa

SEQ ID NO: 2536537 - DNA, 25 bp, Homo sapien
tctgtcttgcagccgatgagcacca

SEQ ID NO: 2536538 - DNA, 25 bp, Homo sapien
ggatcccgcggcagaaatgcgtgac

SEQ ID NO: 2536539 - DNA, 25 bp, Homo sapien
gcacgaggtgggtgttctggtagga

SEQ ID NO: 2536540 - DNA, 25 bp, Homo sapien
cttgatgaggacgttgtcgtagctg

SEQ ID NO: 2536541 - DNA, 25 bp, Homo sapien
tcatgacgtcatagcagatgagcac

SEQ ID NO: 2536542 - DNA, 25 bp, Homo sapien
ctggtgggattcatgacgtcatagc

SEQ ID NO: 2536543 - DNA, 25 bp, Homo sapien
ggctcatagtgtccccaagtcctga

SEQ ID NO: 2536544 - DNA, 25 bp, Homo sapien
gagacgagctgaatccaaatacgga

SEQ ID NO: 2536545 - DNA, 25 bp, Homo sapien
tactttaatccggaggccgtgacgc

SEQ ID NO: 2536546 - DNA, 25 bp, Homo sapien
gagatgatgccgatagccagtgtga

SEQ ID NO: 2536547 - DNA, 25 bp, Homo sapien
ctctcaggacaagtggcctctccac

SEQ ID NO: 2536548 - DNA, 25 bp, Homo sapien
aggacaagtggcctctccacggagt

SEQ ID NO: 2536549 - DNA, 25 bp, Homo sapien
caagtggcctctccacggagtacca

SEQ ID NO: 2536550 - DNA, 25 bp, Homo sapien
tctccacggagtaccaccaggccat

SEQ ID NO: 2536551 - DNA, 25 bp, Homo sapien
caactgcaagccgtggaatcctggg

SEQ ID NO: 2536552 - DNA, 25 bp, Homo sapien
gctgcagacacagaactcgcatcca

SEQ ID NO: 2536553 - DNA, 25 bp, Homo sapien
gcacagaagtaattgtagccacgca

SEQ ID NO: 2536554 - DNA, 25 bp, Homo sapien
aggcaatccgagcaccaagggactc

SEQ ID NO: 2536555 - DNA, 25 bp, Homo sapien
ctgcagagaccacagcaggtagcgc

SEQ ID NO: 2536556 - DNA, 25 bp, Homo sapien
tgcagagaccacagcaggtagcgca

SEQ ID NO: 2536557 - DNA, 25 bp, Homo sapien
tggaaccatgggaggcccaagagca

SEQ ID NO: 2536558 - DNA, 25 bp, Homo sapien
gggaggcccaagagcagcccactgc

SEQ ID NO: 2536559 - DNA, 25 bp, Homo sapien
aggcccaagagcagcccactgcttt

SEQ ID NO: 2536560 - DNA, 25 bp, Homo sapien
ctggaaccatgggaggcccaagagc

SEQ ID NO: 2536561 - DNA, 25 bp, Homo sapien
ctccaggagtgaagagccggccaag

SEQ ID NO: 2536562 - DNA, 25 bp, Homo sapien
atagggcttggcctctagggccccg

SEQ ID NO: 2536563 - DNA, 25 bp, Homo sapien
agccagcgcccctgagcggcctcca

SEQ ID NO: 2536564 - DNA, 25 bp, Homo sapien
ttggcctctagggccccgcagccag

SEQ ID NO: 2536565 - DNA, 25 bp, Homo sapien
cgtgtcgtagaggttcagggtcacc

SEQ ID NO: 2536566 - DNA, 25 bp, Homo sapien
cgtgtacttctcgaacaccgatggg

SEQ ID NO: 2536567 - DNA, 25 bp, Homo sapien
tcacgctggccgtgtacttctcgaa

SEQ ID NO: 2536568 - DNA, 25 bp, Homo sapien
ttgctgccaacggtcacgctggccg

SEQ ID NO: 2536569 - DNA, 25 bp, Homo sapien
atgagcagcgaggtcttgccgcagc

SEQ ID NO: 2536570 - DNA, 25 bp, Homo sapien
gccgccgtcgcccacgatcacgatc

SEQ ID NO: 2536571 - DNA, 25 bp, Homo sapien
cccacgatcacgatcttcagctcct

SEQ ID NO: 2536572 - DNA, 25 bp, Homo sapien
ggaaggagccctggctgtacaccat

SEQ ID NO: 2536573 - DNA, 25 bp, Homo sapien
cagccccgcccactcggagcagcgc

SEQ ID NO: 2536574 - DNA, 25 bp, Homo sapien
tgtgggtattcagctctcagtccca

SEQ ID NO: 2536575 - DNA, 25 bp, Homo sapien
ccctgggtgtgggtattcagctctc

SEQ ID NO: 2536576 - DNA, 25 bp, Homo sapien
tgggtgtgggtattcagctctcagt

SEQ ID NO: 2536577 - DNA, 25 bp, Homo sapien
gaagagcccctcaactttgcactgc

SEQ ID NO: 2536578 - DNA, 25 bp, Homo sapien
agcttccccacaggaggtagcggcg

SEQ ID NO: 2536579 - DNA, 25 bp, Homo sapien
gccccagcggtgtggcttggcacat

SEQ ID NO: 2536580 - DNA, 25 bp, Homo sapien
tgattagcaggctccgccttcggca

SEQ ID NO: 2536581 - DNA, 25 bp, Homo sapien
ggccagggacgccagcgtgcacgcg

SEQ ID NO: 2536582 - DNA, 25 bp, Homo sapien
agggacgccagcgtgcacgcgggtt

SEQ ID NO: 2536583 - DNA, 25 bp, Homo sapien
tgcacgcgggttcggggtgagggac

SEQ ID NO: 2536584 - DNA, 25 bp, Homo sapien
acgccagcgtgcacgcgggttcggg

SEQ ID NO: 2536585 - DNA, 25 bp, Homo sapien
tgaaccacgcaagacgtcgtcaggg

SEQ ID NO: 2536586 - DNA, 25 bp, Homo sapien
tggagtagctctagttgaagtcaac

SEQ ID NO: 2536587 - DNA, 25 bp, Homo sapien
ctgctggctgaattacccgtaaccc

SEQ ID NO: 2536588 - DNA, 25 bp, Homo sapien
tactgtaggcagtgctatcagggct

SEQ ID NO: 2536589 - DNA, 25 bp, Homo sapien
aatgcacggcagctagaaaacctct

SEQ ID NO: 2536590 - DNA, 25 bp, Homo sapien
tattgagaggcagttgtgctccagc

SEQ ID NO: 2536591 - DNA, 25 bp, Homo sapien
ggaaccctttactgaaggctgagcg

SEQ ID NO: 2536592 - DNA, 25 bp, Homo sapien
ggtcagatcatggagttgcctgcca

SEQ ID NO: 2536593 - DNA, 25 bp, Homo sapien
cagaagctggtgagtgcatcactgg

SEQ ID NO: 2536594 - DNA, 25 bp, Homo sapien
tgcatcactggagcccataggaggg

SEQ ID NO: 2536595 - DNA, 25 bp, Homo sapien
taggagggctcctgactgtcctcaa

SEQ ID NO: 2536596 - DNA, 25 bp, Homo sapien
ccataggagggctcctgactgtcct

SEQ ID NO: 2536597 - DNA, 25 bp, Homo sapien
cacaagcttgcacagaagtggaggc

SEQ ID NO: 2536598 - DNA, 25 bp, Homo sapien
tgcctggagcgcgtttgatttggac

SEQ ID NO: 2536599 - DNA, 25 bp, Homo sapien
ggatctgtagctaaaaatacctcgg

SEQ ID NO: 2536600 - DNA, 25 bp, Homo sapien
tgctcagagcttcctcggaggctgg

SEQ ID NO: 2536601 - DNA, 25 bp, Homo sapien
gagtcactcccccttccagtcacca

SEQ ID NO: 2536602 - DNA, 25 bp, Homo sapien
ctgctagaggttgagggcctgagtc

SEQ ID NO: 2536603 - DNA, 25 bp, Homo sapien
tcccccttccagtcaccaggaattc

SEQ ID NO: 2536604 - DNA, 25 bp, Homo sapien
gggcctgagtcactcccccttccag

SEQ ID NO: 2536605 - DNA, 25 bp, Homo sapien
ctatgccatagtgcggccaacaggg

SEQ ID NO: 2536606 - DNA, 25 bp, Homo sapien
gacacaacagctgttaggccactga

SEQ ID NO: 2536607 - DNA, 25 bp, Homo sapien
gattctttaagctggttcctgacac

SEQ ID NO: 2536608 - DNA, 25 bp, Homo sapien
tggatgcctgagaaccctgcagagg

SEQ ID NO: 2536609 - DNA, 25 bp, Homo sapien
aaaacattattgtccggccaggcgc

SEQ ID NO: 2536610 - DNA, 25 bp, Homo sapien
tgagtgctaaaagttcccgtcacaa

SEQ ID NO: 2536611 - DNA, 25 bp, Homo sapien
tcacaaaagccagactcagcaacag

SEQ ID NO: 2536612 - DNA, 25 bp, Homo sapien
gatgaagctactccctgaggtccca

SEQ ID NO: 2536613 - DNA, 25 bp, Homo sapien
ttctgcgtcaaaaccccaggtgtta

SEQ ID NO: 2536614 - DNA, 25 bp, Homo sapien
ttcaatacatgaagtcggctagcgt

SEQ ID NO: 2536615 - DNA, 25 bp, Homo sapien
ccaagcgtggaacgtggcacttctg

SEQ ID NO: 2536616 - DNA, 25 bp, Homo sapien
cagctgtggagcttcttagacactg

SEQ ID NO: 2536617 - DNA, 25 bp, Homo sapien
agagtcaaactaggcctgcccctgc

SEQ ID NO: 2536618 - DNA, 25 bp, Homo sapien
ggaggactgtcagagtcaaactagg

SEQ ID NO: 2536619 - DNA, 25 bp, Homo sapien
cctgcccctgccgttgacagaagga

SEQ ID NO: 2536620 - DNA, 25 bp, Homo sapien
aggcctgcccctgccgttgacagaa

SEQ ID NO: 2536621 - DNA, 25 bp, Homo sapien
gcccaacggggcgtctgcggccacc

SEQ ID NO: 2536622 - DNA, 25 bp, Homo sapien
caacggggcgtctgcggccaccccg

SEQ ID NO: 2536623 - DNA, 25 bp, Homo sapien
ctgggctggagggctgcccaacggg

SEQ ID NO: 2536624 - DNA, 25 bp, Homo sapien
ggagggctgcccaacggggcgtctg

SEQ ID NO: 2536625 - DNA, 25 bp, Homo sapien
cgcggcttccggaggagccggtggg

SEQ ID NO: 2536626 - DNA, 25 bp, Homo sapien
gcggcttccggaggagccggtggga

SEQ ID NO: 2536627 - DNA, 25 bp, Homo sapien
cggtccgcggcttccggaggagccg

SEQ ID NO: 2536628 - DNA, 25 bp, Homo sapien
gcgcccggctgaggcgagcgcggga

SEQ ID NO: 2536629 - DNA, 25 bp, Homo sapien
ccgacacccggtcgccagcgctgcg

SEQ ID NO: 2536630 - DNA, 25 bp, Homo sapien
agcgcgcgaaatggcgcccatcagg

SEQ ID NO: 2536631 - DNA, 25 bp, Homo sapien
cgggcagcgcgcgaaatggcgccca

SEQ ID NO: 2536632 - DNA, 25 bp, Homo sapien
gaaagagagccgccgccattagcaa

SEQ ID NO: 2536633 - DNA, 25 bp, Homo sapien
aagagagccgccgccattagcaaag

SEQ ID NO: 2536634 - DNA, 25 bp, Homo sapien
gagccgccgccattagcaaagcagc

SEQ ID NO: 2536635 - DNA, 25 bp, Homo sapien
gagagccgccgccattagcaaagca

SEQ ID NO: 2536636 - DNA, 25 bp, Homo sapien
agccgcgacgggctcgaagcctgta

SEQ ID NO: 2536637 - DNA, 25 bp, Homo sapien
gggctgcgggcggagatgctgcgtc

SEQ ID NO: 2536638 - DNA, 25 bp, Homo sapien
gacgggctcgaagcctgtaaagaaa

SEQ ID NO: 2536639 - DNA, 25 bp, Homo sapien
gctgcgggcggagatgctgcgtcat

SEQ ID NO: 2536640 - DNA, 25 bp, Homo sapien
cacgatcgaaaggaaagtgggccca

SEQ ID NO: 2536641 - DNA, 25 bp, Homo sapien
tgccaacatggacgccggccttttg

SEQ ID NO: 2536642 - DNA, 25 bp, Homo sapien
ttttgtcctccttcgcgttgccagc

SEQ ID NO: 2536643 - DNA, 25 bp, Homo sapien
gatgaggctccctagtgttttaagc

SEQ ID NO: 2536644 - DNA, 25 bp, Homo sapien
ccggtgccatggagtctagaagatc

SEQ ID NO: 2536645 - DNA, 25 bp, Homo sapien
cggtgccatggagtctagaagatca

SEQ ID NO: 2536646 - DNA, 25 bp, Homo sapien
gtgccatggagtctagaagatcaag

SEQ ID NO: 2536647 - DNA, 25 bp, Homo sapien
cccggtgccatggagtctagaagat

SEQ ID NO: 2536648 - DNA, 25 bp, Homo sapien
taagttacaccctcacgttctgctc

SEQ ID NO: 2536649 - DNA, 25 bp, Homo sapien
aggcaaaaaggcggcttcgctgagg

SEQ ID NO: 2536650 - DNA, 25 bp, Homo sapien
caaaaaggcggcttcgctgaggact

SEQ ID NO: 2536651 - DNA, 25 bp, Homo sapien
tgtaagttacaccctcacgttctgc

SEQ ID NO: 2536652 - DNA, 25 bp, Homo sapien
tcggaaaattaaggacatctcagca

SEQ ID NO: 2536653 - DNA, 25 bp, Homo sapien
ccaaagacgagaaaaacagggctgt

SEQ ID NO: 2536654 - DNA, 25 bp, Homo sapien
catacatgcagatgaaggttcggaa

SEQ ID NO: 2536655 - DNA, 25 bp, Homo sapien
tgtactgcgtcaggacagaatggat

SEQ ID NO: 2536656 - DNA, 25 bp, Homo sapien
cacccacccatagaacaaaaagagg

SEQ ID NO: 2536657 - DNA, 25 bp, Homo sapien
tacagattaagacagctccaagctc

SEQ ID NO: 2536658 - DNA, 25 bp, Homo sapien
gtttaatagaggaaactagatatat

SEQ ID NO: 2536659 - DNA, 25 bp, Homo sapien
tattgttcagtcaagagaatacaga

SEQ ID NO: 2536660 - DNA, 25 bp, Homo sapien
gattccaagtcataaggaaaaatcc

SEQ ID NO: 2536661 - DNA, 25 bp, Homo sapien
tgctatgacctagttatacaagaca

SEQ ID NO: 2536662 - DNA, 25 bp, Homo sapien
tacaagacaaagatggattccaagt

SEQ ID NO: 2536663 - DNA, 25 bp, Homo sapien
aactgttaactgctgacatgaatgg

SEQ ID NO: 2536664 - DNA, 25 bp, Homo sapien
gaactggatggtagagtcaaaggaa

SEQ ID NO: 2536665 - DNA, 25 bp, Homo sapien
cctgaactggatggtagagtcaaag

SEQ ID NO: 2536666 - DNA, 25 bp, Homo sapien
gttaaacacactgagacgtcctgaa

SEQ ID NO: 2536667 - DNA, 25 bp, Homo sapien
acacactgagacgtcctgaactgga

SEQ ID NO: 2536668 - DNA, 25 bp, Homo sapien
cagaagaaggcgtctatcgcccagg

SEQ ID NO: 2536669 - DNA, 25 bp, Homo sapien
gatcagcgtctaataactcaagccc

SEQ ID NO: 2536670 - DNA, 25 bp, Homo sapien
tgttcaggacaattacagggcgctc

SEQ ID NO: 2536671 - DNA, 25 bp, Homo sapien
gaatgcgaatgctaacgtggtgaac

SEQ ID NO: 2536672 - DNA, 25 bp, Homo sapien
tataaatatcgataacccctgggcc

SEQ ID NO: 2536673 - DNA, 25 bp, Homo sapien
tactagagcgtgttgcaaactctgc

SEQ ID NO: 2536674 - DNA, 25 bp, Homo sapien
tactgcaagcccctgggtattgagc

SEQ ID NO: 2536675 - DNA, 25 bp, Homo sapien
ccagtaaagtgtagctccaggaacg

SEQ ID NO: 2536676 - DNA, 25 bp, Homo sapien
ataaatgtgcaaattaacttaaatg

SEQ ID NO: 2536677 - DNA, 25 bp, Homo sapien
tgagcagtatagcaagagcccatct

SEQ ID NO: 2536678 - DNA, 25 bp, Homo sapien
atcagcctgagcagtatagcaagag

SEQ ID NO: 2536679 - DNA, 25 bp, Homo sapien
taaatgtgcaaattaacttaaatga

SEQ ID NO: 2536680 - DNA, 25 bp, Homo sapien
tacacaggatagctggtgcagactg

SEQ ID NO: 2536681 - DNA, 25 bp, Homo sapien
cttttacacggagccctgtcttgga

SEQ ID NO: 2536682 - DNA, 25 bp, Homo sapien
gctgcgactccctttgaacttgact

SEQ ID NO: 2536683 - DNA, 25 bp, Homo sapien
ttgcagacagctcacagctgcgact

SEQ ID NO: 2536684 - DNA, 25 bp, Homo sapien
cgctgagaacgcgggcagccactct

SEQ ID NO: 2536685 - DNA, 25 bp, Homo sapien
agaacgcgggcagccactctcttct

SEQ ID NO: 2536686 - DNA, 25 bp, Homo sapien
ccagcaacgcgggagcctctcggag

SEQ ID NO: 2536687 - DNA, 25 bp, Homo sapien
gggcgctgagaacgcgggcagccac

SEQ ID NO: 2536688 - DNA, 25 bp, Homo sapien
acttctgtatatagaggctgccgca

SEQ ID NO: 2536689 - DNA, 25 bp, Homo sapien
tcttgtagaaacatgcgggaagaca

SEQ ID NO: 2536690 - DNA, 25 bp, Homo sapien
aaacatgcgggaagacattttttgc

SEQ ID NO: 2536691 - DNA, 25 bp, Homo sapien
tgtatatagaggctgccgcaaagga

SEQ ID NO: 2536692 - DNA, 25 bp, Homo sapien
gaaagtgactgttgtgacccggagt

SEQ ID NO: 2536693 - DNA, 25 bp, Homo sapien
gcagaggaggcgtgtaaataatttc

SEQ ID NO: 2536694 - DNA, 25 bp, Homo sapien
gagtcctcatcaagatgagcgcgct

SEQ ID NO: 2536695 - DNA, 25 bp, Homo sapien
tcatcaagatgagcgcgctccatga

SEQ ID NO: 2536696 - DNA, 25 bp, Homo sapien
tggtatctcagcttgtgtcaagctt

SEQ ID NO: 2536697 - DNA, 25 bp, Homo sapien
tgtgtcaagcttgttatcatgtaaa

SEQ ID NO: 2536698 - DNA, 25 bp, Homo sapien
caggcggccggagcctctggtatct

SEQ ID NO: 2536699 - DNA, 25 bp, Homo sapien
ggcggccggagcctctggtatctca

SEQ ID NO: 2536700 - DNA, 25 bp, Homo sapien
agttccagaatcagggggcgtggct

SEQ ID NO: 2536701 - DNA, 25 bp, Homo sapien
tgggcggagccttgggggccgagtc

SEQ ID NO: 2536702 - DNA, 25 bp, Homo sapien
cagtagggaagttgggcgagttcca

SEQ ID NO: 2536703 - DNA, 25 bp, Homo sapien
gggccgagtccgctggtgggcggga

SEQ ID NO: 2536704 - DNA, 25 bp, Homo sapien
aagccttgaacagtgagttgaagtt

SEQ ID NO: 2536705 - DNA, 25 bp, Homo sapien
acagtgagttgaagttgccggctcc

SEQ ID NO: 2536706 - DNA, 25 bp, Homo sapien
gaggttaccccgcaggttctgctcc

SEQ ID NO: 2536707 - DNA, 25 bp, Homo sapien
gggcaccaccccattggtctccatg

SEQ ID NO: 2536708 - DNA, 25 bp, Homo sapien
gatctgcaggaggtagcctttctcg

SEQ ID NO: 2536709 - DNA, 25 bp, Homo sapien
caccggtttggtgaagatctgcagg

SEQ ID NO: 2536710 - DNA, 25 bp, Homo sapien
tcgtagtccaccaggattttcagct

SEQ ID NO: 2536711 - DNA, 25 bp, Homo sapien
gctggatgacttccaggaagagcgt

SEQ ID NO: 2536712 - DNA, 25 bp, Homo sapien
cttgatcttggccgtcttcagcttc

SEQ ID NO: 2536713 - DNA, 25 bp, Homo sapien
tccagggcatcaatgttctccttca

SEQ ID NO: 2536714 - DNA, 25 bp, Homo sapien
cagataagaactccaggcctctctc

SEQ ID NO: 2536715 - DNA, 25 bp, Homo sapien
cccgcagttgtttgtagtacgtgga

SEQ ID NO: 2536716 - DNA, 25 bp, Homo sapien
tcttcggtcttgagagcgatgtgct

SEQ ID NO: 2536717 - DNA, 25 bp, Homo sapien
agagcgatgtgctggaccccagcgc

SEQ ID NO: 2536718 - DNA, 25 bp, Homo sapien
tgtgatgatgtcttcggtcttgaga

SEQ ID NO: 2536719 - DNA, 25 bp, Homo sapien
gcgcccccgttatagtccacatatt

SEQ ID NO: 2536720 - DNA, 25 bp, Homo sapien
caccacaatggatcgcagagagcta

SEQ ID NO: 2536721 - DNA, 25 bp, Homo sapien
tgtcatccacggaccagaagcggtg

SEQ ID NO: 2536722 - DNA, 25 bp, Homo sapien
cagagagctatattccgtgtgcacc

SEQ ID NO: 2536723 - DNA, 25 bp, Homo sapien
ccaggcgctggctcattgatgggca

SEQ ID NO: 2536724 - DNA, 25 bp, Homo sapien
caatgtggtcgatcatctccagact

SEQ ID NO: 2536725 - DNA, 25 bp, Homo sapien
ggtttcccacaatgtggtcgatcat

SEQ ID NO: 2536726 - DNA, 25 bp, Homo sapien
tcccacaatgtggtcgatcatctcc

SEQ ID NO: 2536727 - DNA, 25 bp, Homo sapien
gctggtttcccacaatgtggtcgat

SEQ ID NO: 2536728 - DNA, 25 bp, Homo sapien
ggtccatgaacgctggggcctcata

SEQ ID NO: 2536729 - DNA, 25 bp, Homo sapien
agaattggccgatgtagttcatctt

SEQ ID NO: 2536730 - DNA, 25 bp, Homo sapien
aagtagggggtccatgaacgctggg

SEQ ID NO: 2536731 - DNA, 25 bp, Homo sapien
aggcaagaattggccgatgtagttc

SEQ ID NO: 2536732 - DNA, 25 bp, Homo sapien
tcccgcatgattttggcgccccgtt

SEQ ID NO: 2536733 - DNA, 25 bp, Homo sapien
acttgtcttgctctacccagggctc

SEQ ID NO: 2536734 - DNA, 25 bp, Homo sapien
aaacttgtcttgctctacccagggc

SEQ ID NO: 2536735 - DNA, 25 bp, Homo sapien
cagggctcccgcatgattttggcgc

SEQ ID NO: 2536736 - DNA, 25 bp, Homo sapien
tccgtcaccgtgtttcaccaggtga

SEQ ID NO: 2536737 - DNA, 25 bp, Homo sapien
tcgaacgcaatgtccttcactccgt

SEQ ID NO: 2536738 - DNA, 25 bp, Homo sapien
tgtttcaccaggtgatcgcccatct

SEQ ID NO: 2536739 - DNA, 25 bp, Homo sapien
tgcacgatgtagtcacaatcttcca

SEQ ID NO: 2536740 - DNA, 25 bp, Homo sapien
ttccaggggttgagcgctgaggaga

SEQ ID NO: 2536741 - DNA, 25 bp, Homo sapien
gttgagcgctgaggagaggacaaac

SEQ ID NO: 2536742 - DNA, 25 bp, Homo sapien
ggggttgagcgctgaggagaggaca

SEQ ID NO: 2536743 - DNA, 25 bp, Homo sapien
ttgttccaggggttgagcgctgagg

SEQ ID NO: 2536744 - DNA, 25 bp, Homo sapien
atcttgctgcagtagaatgacgtgg

SEQ ID NO: 2536745 - DNA, 25 bp, Homo sapien
tcttgctgcagtagaatgacgtggc

SEQ ID NO: 2536746 - DNA, 25 bp, Homo sapien
tggaagtggaggaatcggcctctct

SEQ ID NO: 2536747 - DNA, 25 bp, Homo sapien
gttgccaacccagaaggtcacagag

SEQ ID NO: 2536748 - DNA, 25 bp, Homo sapien
agagtggaagtggaggaatcggcct

SEQ ID NO: 2536749 - DNA, 25 bp, Homo sapien
ctgcttggcgttgccaacccagaag

SEQ ID NO: 2536750 - DNA, 25 bp, Homo sapien
ttgcccctttgtcactgtaagtcgt

SEQ ID NO: 2536751 - DNA, 25 bp, Homo sapien
ctttgcccctttgtcactgtaagtc

SEQ ID NO: 2536752 - DNA, 25 bp, Homo sapien
tttgcccctttgtcactgtaagtcg

SEQ ID NO: 2536753 - DNA, 25 bp, Homo sapien
gagtgctgggccggagtatttaacc

SEQ ID NO: 2536754 - DNA, 25 bp, Homo sapien
tgatcttagtcaaacctcctactgg

SEQ ID NO: 2536755 - DNA, 25 bp, Homo sapien
tagtcaaacctcctactgggactag

SEQ ID NO: 2536756 - DNA, 25 bp, Homo sapien
tgctgggccggagtatttaacccca

SEQ ID NO: 2536757 - DNA, 25 bp, Homo sapien
cgctgggaatgtgaccattactgcc

SEQ ID NO: 2536758 - DNA, 25 bp, Homo sapien
cagccgcagcctcattgaacaggat

SEQ ID NO: 2536759 - DNA, 25 bp, Homo sapien
gaagccaagggcaagcttttccagg

SEQ ID NO: 2536760 - DNA, 25 bp, Homo sapien
gaacaggatggtgttgccaggccca

SEQ ID NO: 2536761 - DNA, 25 bp, Homo sapien
tagtaaggctgtctgttaaatgcaa

SEQ ID NO: 2536762 - DNA, 25 bp, Homo sapien
taaggctgtctgttaaatgcaactg

SEQ ID NO: 2536763 - DNA, 25 bp, Homo sapien
gctgtctgttaaatgcaactgtccc

SEQ ID NO: 2536764 - DNA, 25 bp, Homo sapien
aggctgtctgttaaatgcaactgtc

SEQ ID NO: 2536765 - DNA, 25 bp, Homo sapien
ctagacaacccaacgcatgacagct

SEQ ID NO: 2536766 - DNA, 25 bp, Homo sapien
tagacaacccaacgcatgacagctc

SEQ ID NO: 2536767 - DNA, 25 bp, Homo sapien
ccaacgcatgacagctcccttatga

SEQ ID NO: 2536768 - DNA, 25 bp, Homo sapien
catgacagctcccttatgacttgta

SEQ ID NO: 2536769 - DNA, 25 bp, Homo sapien
ctgtgtcctcatcatccaaagtccc

SEQ ID NO: 2536770 - DNA, 25 bp, Homo sapien
tgtcctcatcatccaaagtccccat

SEQ ID NO: 2536771 - DNA, 25 bp, Homo sapien
tgtgtcctcatcatccaaagtcccc

SEQ ID NO: 2536772 - DNA, 25 bp, Homo sapien
gtgtcctcatcatccaaagtcccca

SEQ ID NO: 2536773 - DNA, 25 bp, Homo sapien
gatctcccagagatataggactaca

SEQ ID NO: 2536774 - DNA, 25 bp, Homo sapien
tctcccagagatataggactacaga

SEQ ID NO: 2536775 - DNA, 25 bp, Homo sapien
tcccagagatataggactacagaca

SEQ ID NO: 2536776 - DNA, 25 bp, Homo sapien
ccttgatctcccagagatataggac

SEQ ID NO: 2536777 - DNA, 25 bp, Homo sapien
aaaaccacagtgaaagtatcaaaat

SEQ ID NO: 2536778 - DNA, 25 bp, Homo sapien
tgaaagtaaattgcctctcttaacc

SEQ ID NO: 2536779 - DNA, 25 bp, Homo sapien
aaaccacagtgaaagtatcaaaatc

SEQ ID NO: 2536780 - DNA, 25 bp, Homo sapien
ccatttgaaagtaaattgcctctct

SEQ ID NO: 2536781 - DNA, 25 bp, Homo sapien
tgaagaactgaattggagcgccacg

SEQ ID NO: 2536782 - DNA, 25 bp, Homo sapien
cgagatcatcccctagcgttggtgt

SEQ ID NO: 2536783 - DNA, 25 bp, Homo sapien
gcagcggttctctggcgtacagtat

SEQ ID NO: 2536784 - DNA, 25 bp, Homo sapien
aaatgtctgctgcacgaatgagaaa

SEQ ID NO: 2536785 - DNA, 25 bp, Homo sapien
tatgttgtaaatagtcgttcgttcc

SEQ ID NO: 2536786 - DNA, 25 bp, Homo sapien
ggaatcttgcttagccacctaggct

SEQ ID NO: 2536787 - DNA, 25 bp, Homo sapien
cgcgcccagctaacagcttatgtta

SEQ ID NO: 2536788 - DNA, 25 bp, Homo sapien
gcttatgttaatatggtacgtttgt

SEQ ID NO: 2536789 - DNA, 25 bp, Homo sapien
gaaaagccttgcagacctgaagtaa

SEQ ID NO: 2536790 - DNA, 25 bp, Homo sapien
cacagccacttctgggataggtcct

SEQ ID NO: 2536791 - DNA, 25 bp, Homo sapien
taagttacacagaagctccctatca

SEQ ID NO: 2536792 - DNA, 25 bp, Homo sapien
gctattacgaagcatgttgctgcga

SEQ ID NO: 2536793 - DNA, 25 bp, Homo sapien
caggagtgaaaccctgtctcaaaaa

SEQ ID NO: 2536794 - DNA, 25 bp, Homo sapien
tgagctaagggattgcatcactaca

SEQ ID NO: 2536795 - DNA, 25 bp, Homo sapien
ctccagcctgggcaacaggagtgaa

SEQ ID NO: 2536796 - DNA, 25 bp, Homo sapien
attcaagtcctttgctcattttctt

SEQ ID NO: 2536797 - DNA, 25 bp, Homo sapien
tttcacaaattaggccacggcccta

SEQ ID NO: 2536798 - DNA, 25 bp, Homo sapien
ctggacttgggtctagggatttcca

SEQ ID NO: 2536799 - DNA, 25 bp, Homo sapien
tctggaagaggcttgtaacctgaac

SEQ ID NO: 2536800 - DNA, 25 bp, Homo sapien
caagtgggcggaagttattctggca

SEQ ID NO: 2536801 - DNA, 25 bp, Homo sapien
aaaaattggcagtattggccgctgc

SEQ ID NO: 2536802 - DNA, 25 bp, Homo sapien
tggaattgtctgcaacacgcggtgc

SEQ ID NO: 2536803 - DNA, 25 bp, Homo sapien
tagatatagccagaccggttttgcg

SEQ ID NO: 2536804 - DNA, 25 bp, Homo sapien
gaaacgctttgtgctgagaaccgca

SEQ ID NO: 2536805 - DNA, 25 bp, Homo sapien
ccatggatacatgccactgagcctg

SEQ ID NO: 2536806 - DNA, 25 bp, Homo sapien
accatggatacatgccactgagcct

SEQ ID NO: 2536807 - DNA, 25 bp, Homo sapien
aaaagaaccatgtgacccgcattcc

SEQ ID NO: 2536808 - DNA, 25 bp, Homo sapien
gtcttgctaccacctacttttcatt

SEQ ID NO: 2536809 - DNA, 25 bp, Homo sapien
ttccagtgggaatcagcagacctcc

SEQ ID NO: 2536810 - DNA, 25 bp, Homo sapien
gcattcctggtttaagtcttgctac

SEQ ID NO: 2536811 - DNA, 25 bp, Homo sapien
ctgtctgccttggcctcccaaagtg

SEQ ID NO: 2536812 - DNA, 25 bp, Homo sapien
tggctcaccgcaagctttgcctcct

SEQ ID NO: 2536813 - DNA, 25 bp, Homo sapien
tcctgcctcaaccacctgagtagct

SEQ ID NO: 2536814 - DNA, 25 bp, Homo sapien
tttgcctcctgggttcacgccattc

SEQ ID NO: 2536815 - DNA, 25 bp, Homo sapien
agggctggtgaagcgattctctcca

SEQ ID NO: 2536816 - DNA, 25 bp, Homo sapien
taaagtggctagtgtcccattgcca

SEQ ID NO: 2536817 - DNA, 25 bp, Homo sapien
cccatttgggatggatccaaggact

SEQ ID NO: 2536818 - DNA, 25 bp, Homo sapien
gccttctgccgtgatgactggacag

SEQ ID NO: 2536819 - DNA, 25 bp, Homo sapien
tcaacattatacagaggatgcgtgt

SEQ ID NO: 2536820 - DNA, 25 bp, Homo sapien
ggaccactctccagttgatagccgt

SEQ ID NO: 2536821 - DNA, 25 bp, Homo sapien
catatgtatcgacattctcagtaac

SEQ ID NO: 2536822 - DNA, 25 bp, Homo sapien
gctgcaaacttaattggaccactct

SEQ ID NO: 2536823 - DNA, 25 bp, Homo sapien
caggtactgttgtaagctcctctaa

SEQ ID NO: 2536824 - DNA, 25 bp, Homo sapien
cccttctgagtcttgaacgaggacc

SEQ ID NO: 2536825 - DNA, 25 bp, Homo sapien
actgttgtaagctcctctaaaggtc

SEQ ID NO: 2536826 - DNA, 25 bp, Homo sapien
ttgaacgaggaccttaaaatcacca

SEQ ID NO: 2536827 - DNA, 25 bp, Homo sapien
ttcagctaggactgtctctttcaga

SEQ ID NO: 2536828 - DNA, 25 bp, Homo sapien
ctgtctctttcagacctttgaaaac

SEQ ID NO: 2536829 - DNA, 25 bp, Homo sapien
tcattcagctaggactgtctctttc

SEQ ID NO: 2536830 - DNA, 25 bp, Homo sapien
gactgtctctttcagacctttgaaa

SEQ ID NO: 2536831 - DNA, 25 bp, Homo sapien
tgagactgcgtccagagggcagaac

SEQ ID NO: 2536832 - DNA, 25 bp, Homo sapien
ggaaaaagaggcagtcgccatccag

SEQ ID NO: 2536833 - DNA, 25 bp, Homo sapien
ctgagactgcgtccagagggcagaa

SEQ ID NO: 2536834 - DNA, 25 bp, Homo sapien
ggcagtcgccatccagatctagttc

SEQ ID NO: 2536835 - DNA, 25 bp, Homo sapien
ctggccaaacccttcatggctctgc

SEQ ID NO: 2536836 - DNA, 25 bp, Homo sapien
tactggccaaacccttcatggctct

SEQ ID NO: 2536837 - DNA, 25 bp, Homo sapien
ctactggccaaacccttcatggctc

SEQ ID NO: 2536838 - DNA, 25 bp, Homo sapien
actggccaaacccttcatggctctg

SEQ ID NO: 2536839 - DNA, 25 bp, Homo sapien
ctcctccaacctttgatgatgttct

SEQ ID NO: 2536840 - DNA, 25 bp, Homo sapien
gctcctccaacctttgatgatgttc

SEQ ID NO: 2536841 - DNA, 25 bp, Homo sapien
gagctcctccaacctttgatgatgt

SEQ ID NO: 2536842 - DNA, 25 bp, Homo sapien
gaagccttcccgaagcccacctggc

SEQ ID NO: 2536843 - DNA, 25 bp, Homo sapien
atcttctagagccacggtagccaac

SEQ ID NO: 2536844 - DNA, 25 bp, Homo sapien
gaatcttctagagccacggtagcca

SEQ ID NO: 2536845 - DNA, 25 bp, Homo sapien
ctgaatcttctagagccacggtagc

SEQ ID NO: 2536846 - DNA, 25 bp, Homo sapien
tgaatcttctagagccacggtagcc

SEQ ID NO: 2536847 - DNA, 25 bp, Homo sapien
tgccaactccgtgcttgttgagtag

SEQ ID NO: 2536848 - DNA, 25 bp, Homo sapien
tgcgaagtcggctcaggaaggaaat

SEQ ID NO: 2536849 - DNA, 25 bp, Homo sapien
ttttcaacgaacacttgcgaagtcg

SEQ ID NO: 2536850 - DNA, 25 bp, Homo sapien
tcagtgatgccgaagctgccaactc

SEQ ID NO: 2536851 - DNA, 25 bp, Homo sapien
cgtgaatgcaaaggcgtacgccaca

SEQ ID NO: 2536852 - DNA, 25 bp, Homo sapien
ctgagatggcaaggtgtgagtcacc

SEQ ID NO: 2536853 - DNA, 25 bp, Homo sapien
tgtgatgaaccacatagagcagtga

SEQ ID NO: 2536854 - DNA, 25 bp, Homo sapien
tgttagggatccacgcgcatgtgat

SEQ ID NO: 2536855 - DNA, 25 bp, Homo sapien
gcttgtggccggctgactcttacat

SEQ ID NO: 2536856 - DNA, 25 bp, Homo sapien
tggatcaggaaccaccaagagcctc

SEQ ID NO: 2536857 - DNA, 25 bp, Homo sapien
tacatcccggtttgtgagttctgga

SEQ ID NO: 2536858 - DNA, 25 bp, Homo sapien
gatgctcctttgcagaaagattcct

SEQ ID NO: 2536859 - DNA, 25 bp, Homo sapien
cacagaaaagaatgcccgtggctgc

SEQ ID NO: 2536860 - DNA, 25 bp, Homo sapien
cacagaccagaagagacggaaccat

SEQ ID NO: 2536861 - DNA, 25 bp, Homo sapien
aggcagcagcctagatttgtcccac

SEQ ID NO: 2536862 - DNA, 25 bp, Homo sapien
ttagctcggagacctgcaaacacag

SEQ ID NO: 2536863 - DNA, 25 bp, Homo sapien
cccaggaaagtcgtccagcactggc

SEQ ID NO: 2536864 - DNA, 25 bp, Homo sapien
cacatttatcagtgcccaggcgtga

SEQ ID NO: 2536865 - DNA, 25 bp, Homo sapien
tctcggtgccccgaagctggtgttc

SEQ ID NO: 2536866 - DNA, 25 bp, Homo sapien
tcccgagtgcactgatgccaaggcg

SEQ ID NO: 2536867 - DNA, 25 bp, Homo sapien
gtgagcacttcacgccacctggatg

SEQ ID NO: 2536868 - DNA, 25 bp, Homo sapien
agaaggcttagtgggtagtcccctg

SEQ ID NO: 2536869 - DNA, 25 bp, Homo sapien
tcctttataatctgagcgagatggg

SEQ ID NO: 2536870 - DNA, 25 bp, Homo sapien
gcatatctttaaagctggtggagtt

SEQ ID NO: 2536871 - DNA, 25 bp, Homo sapien
gctatgagtgcactggtgacccaga

SEQ ID NO: 2536872 - DNA, 25 bp, Homo sapien
gccagacaggtaacacaaatgagta

SEQ ID NO: 2536873 - DNA, 25 bp, Homo sapien
tctgctctagccgatgggtgccatg

SEQ ID NO: 2536874 - DNA, 25 bp, Homo sapien
gcagatctgctggttctagagaagc

SEQ ID NO: 2536875 - DNA, 25 bp, Homo sapien
gcctagttgtagatatctcccgcaa

SEQ ID NO: 2536876 - DNA, 25 bp, Homo sapien
gaactttcctatcactccgaaagga

SEQ ID NO: 2536877 - DNA, 25 bp, Homo sapien
tgtctttatggattcgcctagttgt

SEQ ID NO: 2536878 - DNA, 25 bp, Homo sapien
aaggaaaccccacatccgttagcag

SEQ ID NO: 2536879 - DNA, 25 bp, Homo sapien
gtggatagacacatttatctgttcc

SEQ ID NO: 2536880 - DNA, 25 bp, Homo sapien
tctcggaacgattctctgaagtcct

SEQ ID NO: 2536881 - DNA, 25 bp, Homo sapien
gagatctgttttatgacctgctgtt

SEQ ID NO: 2536882 - DNA, 25 bp, Homo sapien
tttaaagtttcatgtggcccaaagc

SEQ ID NO: 2536883 - DNA, 25 bp, Homo sapien
tgagtaacaacttaaggctgcaacc

SEQ ID NO: 2536884 - DNA, 25 bp, Homo sapien
gacatttgggccactctcggtctcc

SEQ ID NO: 2536885 - DNA, 25 bp, Homo sapien
taggaaaaggcctgcggtctctcca

SEQ ID NO: 2536886 - DNA, 25 bp, Homo sapien
cacgtcaggagactgcgtttcagaa

SEQ ID NO: 2536887 - DNA, 25 bp, Homo sapien
ttagctctggtccggccggttccgc

SEQ ID NO: 2536888 - DNA, 25 bp, Homo sapien
agctgaacagcaagatgcggcaccc

SEQ ID NO: 2536889 - DNA, 25 bp, Homo sapien
gtccggccggttccgctgcagctga

SEQ ID NO: 2536890 - DNA, 25 bp, Homo sapien
gcggcacccaggttaccctgatcat

SEQ ID NO: 2536891 - DNA, 25 bp, Homo sapien
ggtcctctggtgaagctcagcgaag

SEQ ID NO: 2536892 - DNA, 25 bp, Homo sapien
ggcttaaggtgaaatcgtggtcctc

SEQ ID NO: 2536893 - DNA, 25 bp, Homo sapien
gaggaagagtccctgttacgatgct

SEQ ID NO: 2536894 - DNA, 25 bp, Homo sapien
aaagtgctccttgtagatgggacca

SEQ ID NO: 2536895 - DNA, 25 bp, Homo sapien
gcgagtgagtgagcggcgggcgggc

SEQ ID NO: 2536896 - DNA, 25 bp, Homo sapien
tgcgtgtgagagtgcgagtgtctgt

SEQ ID NO: 2536897 - DNA, 25 bp, Homo sapien
ggcgggcgcgagtgtggccgccgcg

SEQ ID NO: 2536898 - DNA, 25 bp, Homo sapien
gtgtctgtgcgcgagtgagtgagcg

SEQ ID NO: 2536899 - DNA, 25 bp, Homo sapien
caaagttgagatccaagtcgtcggt

SEQ ID NO: 2536900 - DNA, 25 bp, Homo sapien
gaccctttatttcgagcctggaagc

SEQ ID NO: 2536901 - DNA, 25 bp, Homo sapien
ccggtgcccgactggagccatttaa

SEQ ID NO: 2536902 - DNA, 25 bp, Homo sapien
caagcagatcgccaggttgggtcag

SEQ ID NO: 2536903 - DNA, 25 bp, Homo sapien
gattgaggtcatgcctccgagagca

SEQ ID NO: 2536904 - DNA, 25 bp, Homo sapien
acttctctaaccatggtgacccggg

SEQ ID NO: 2536905 - DNA, 25 bp, Homo sapien
gggaaacaacacatcgtgtcctctg

SEQ ID NO: 2536906 - DNA, 25 bp, Homo sapien
gcttccagttcacttcgttgccgcg

SEQ ID NO: 2536907 - DNA, 25 bp, Homo sapien
tctgtaaaaagggtgacaatcgtcc

SEQ ID NO: 2536908 - DNA, 25 bp, Homo sapien
gctagtggtataacctctctgggca

SEQ ID NO: 2536909 - DNA, 25 bp, Homo sapien
taccctggcgctcctttagaatgat

SEQ ID NO: 2536910 - DNA, 25 bp, Homo sapien
tctgtgagaccccaagctagtggta

SEQ ID NO: 2536911 - DNA, 25 bp, Homo sapien
ccagcccaactgtaaatgccattgc

SEQ ID NO: 2536912 - DNA, 25 bp, Homo sapien
taaaaaatacacagctagtggccgg

SEQ ID NO: 2536913 - DNA, 25 bp, Homo sapien
gaacacggtgccacatttgtctcat

SEQ ID NO: 2536914 - DNA, 25 bp, Homo sapien
cagtagagagaggaatacgatcccc

SEQ ID NO: 2536915 - DNA, 25 bp, Homo sapien
tgatgagcagaattcacagtcctcg

SEQ ID NO: 2536916 - DNA, 25 bp, Homo sapien
tgaaaaatcaacaggagactcccca

SEQ ID NO: 2536917 - DNA, 25 bp, Homo sapien
ccgtgtgtgacctggctgctggaaa

SEQ ID NO: 2536918 - DNA, 25 bp, Homo sapien
tcagagaaagtagatcggcagccgt

SEQ ID NO: 2536919 - DNA, 25 bp, Homo sapien
aaaacacttagcatggagcggacac

SEQ ID NO: 2536920 - DNA, 25 bp, Homo sapien
caccgtgaggattcgatgggagaac

SEQ ID NO: 2536921 - DNA, 25 bp, Homo sapien
cagagtcgggcccaagtttgaatcc

SEQ ID NO: 2536922 - DNA, 25 bp, Homo sapien
caagatgcagaggtgtcattggcca

SEQ ID NO: 2536923 - DNA, 25 bp, Homo sapien
cagtggtcttgcagaaatggtcaga

SEQ ID NO: 2536924 - DNA, 25 bp, Homo sapien
cagatgctttctggcggtgcttccc

SEQ ID NO: 2536925 - DNA, 25 bp, Homo sapien
gaatggagcataatccaagttagac

SEQ ID NO: 2536926 - DNA, 25 bp, Homo sapien
tggtcagaacatgtttctggtctgc

SEQ ID NO: 2536927 - DNA, 25 bp, Homo sapien
gatatcattttgttgggtatggcaa

SEQ ID NO: 2536928 - DNA, 25 bp, Homo sapien
caggaagtgtctagaggaatatata

SEQ ID NO: 2536929 - DNA, 25 bp, Homo sapien
taatctggtattagacagtatcaag

SEQ ID NO: 2536930 - DNA, 25 bp, Homo sapien
catgtctcactgttaacgataaagg

SEQ ID NO: 2536931 - DNA, 25 bp, Homo sapien
cctgatgaccagttgacacgtgaaa

SEQ ID NO: 2536932 - DNA, 25 bp, Homo sapien
gaaacaagatattcccaggctgcta

SEQ ID NO: 2536933 - DNA, 25 bp, Homo sapien
ggctccgggaagaattgctactgca

SEQ ID NO: 2536934 - DNA, 25 bp, Homo sapien
taacctggcaccatcttcaaacggg

SEQ ID NO: 2536935 - DNA, 25 bp, Homo sapien
tgtgaacacacctcccggactgagg

SEQ ID NO: 2536936 - DNA, 25 bp, Homo sapien
ggagtcaacaaagcgccgtctgtca

SEQ ID NO: 2536937 - DNA, 25 bp, Homo sapien
gactgaggacccgtttatccagccc

SEQ ID NO: 2536938 - DNA, 25 bp, Homo sapien
gtgttaccattagttcctcctcctg

SEQ ID NO: 2536939 - DNA, 25 bp, Homo sapien
gacaggctttggagagtaaggactc

SEQ ID NO: 2536940 - DNA, 25 bp, Homo sapien
caaacaaaggcatggtgtagctgct

SEQ ID NO: 2536941 - DNA, 25 bp, Homo sapien
ggtctccggagtctcagaacacaga

SEQ ID NO: 2536942 - DNA, 25 bp, Homo sapien
gaggttagggccaaccattgccttg

SEQ ID NO: 2536943 - DNA, 25 bp, Homo sapien
gcaaagaatctacccagatctgggc

SEQ ID NO: 2536944 - DNA, 25 bp, Homo sapien
gagctgtttctaggcatctctcaga

SEQ ID NO: 2536945 - DNA, 25 bp, Homo sapien
actcaaaagtctgtcccgtcttgtg

SEQ ID NO: 2536946 - DNA, 25 bp, Homo sapien
ccaggacagttctcggaccaaagat

SEQ ID NO: 2536947 - DNA, 25 bp, Homo sapien
aaatgctgacgctttggagagtaag

SEQ ID NO: 2536948 - DNA, 25 bp, Homo sapien
ttacactcattttcaccctgattct

SEQ ID NO: 2536949 - DNA, 25 bp, Homo sapien
tgctgacgctttggagagtaagaaa

SEQ ID NO: 2536950 - DNA, 25 bp, Homo sapien
cactcattttcaccctgattcttgc

SEQ ID NO: 2536951 - DNA, 25 bp, Homo sapien
agaaggcctgctggcgtataaatcc

SEQ ID NO: 2536952 - DNA, 25 bp, Homo sapien
accagaaggcctgctggcgtataaa

SEQ ID NO: 2536953 - DNA, 25 bp, Homo sapien
aaaccagaaggcctgctggcgtata

SEQ ID NO: 2536954 - DNA, 25 bp, Homo sapien
aggcctgctggcgtataaatccctg

SEQ ID NO: 2536955 - DNA, 25 bp, Homo sapien
gaagcaatagcagcgctggccattg

SEQ ID NO: 2536956 - DNA, 25 bp, Homo sapien
accgcaggaagcaatagcagcgctg

SEQ ID NO: 2536957 - DNA, 25 bp, Homo sapien
aggaagcaatagcagcgctggccat

SEQ ID NO: 2536958 - DNA, 25 bp, Homo sapien
gcaggaagcaatagcagcgctggcc

SEQ ID NO: 2536959 - DNA, 25 bp, Homo sapien
ccccagtgctgcgcatggtcccgga

SEQ ID NO: 2536960 - DNA, 25 bp, Homo sapien
cccagtgctgcgcatggtcccggag

SEQ ID NO: 2536961 - DNA, 25 bp, Homo sapien
tcatctccgtgcacagccatgactg

SEQ ID NO: 2536962 - DNA, 25 bp, Homo sapien
tctctctcatagaggggagctgcag

SEQ ID NO: 2536963 - DNA, 25 bp, Homo sapien
gggtgcaggtaagggtctctctcat

SEQ ID NO: 2536964 - DNA, 25 bp, Homo sapien
ctgcagctgagaactggcgaggccc

SEQ ID NO: 2536965 - DNA, 25 bp, Homo sapien
tggacagcactgatccgggcaggca

SEQ ID NO: 2536966 - DNA, 25 bp, Homo sapien
cgggccctcgacatctctgctttgg

SEQ ID NO: 2536967 - DNA, 25 bp, Homo sapien
gatgtggtgtgtggctccgggccct

SEQ ID NO: 2536968 - DNA, 25 bp, Homo sapien
tcagcttggcccagcgtttccttgg

SEQ ID NO: 2536969 - DNA, 25 bp, Homo sapien
gaaattcccctccaatcgtgtcaga

SEQ ID NO: 2536970 - DNA, 25 bp, Homo sapien
cgcgtgtgcgtgttgacttcatgga

SEQ ID NO: 2536971 - DNA, 25 bp, Homo sapien
ggcttgcaaaaaccaaccttcgaga

SEQ ID NO: 2536972 - DNA, 25 bp, Homo sapien
gctgattttgttcacggcggaagca

SEQ ID NO: 2536973 - DNA, 25 bp, Homo sapien
ttcagtttgttgtgtaaatggcggt

SEQ ID NO: 2536974 - DNA, 25 bp, Homo sapien
gctcctttgaagagatggttccacc

SEQ ID NO: 2536975 - DNA, 25 bp, Homo sapien
ttttctggtgtgagctttggtgatg

SEQ ID NO: 2536976 - DNA, 25 bp, Homo sapien
aatggcggttttttctggtgtgagc

SEQ ID NO: 2536977 - DNA, 25 bp, Homo sapien
gctgtattcaacactacaatgcatt

SEQ ID NO: 2536978 - DNA, 25 bp, Homo sapien
gtcaccctgagtacacccctctgat

SEQ ID NO: 2536979 - DNA, 25 bp, Homo sapien
ctgctgtcaagaagcacgtttccac

SEQ ID NO: 2536980 - DNA, 25 bp, Homo sapien
gcacgtttccaccagctgtattcaa

SEQ ID NO: 2536981 - DNA, 25 bp, Homo sapien
agattctgagcccaccaggacgagg

SEQ ID NO: 2536982 - DNA, 25 bp, Homo sapien
caggacgagggcctggtgccgtacc

SEQ ID NO: 2536983 - DNA, 25 bp, Homo sapien
acgagggcctggtgccgtacctcgc

SEQ ID NO: 2536984 - DNA, 25 bp, Homo sapien
ggcctggtgccgtacctcgcacaga

SEQ ID NO: 2536985 - DNA, 25 bp, Homo sapien
gcagatatcgagacagcctgtggat

SEQ ID NO: 2536986 - DNA, 25 bp, Homo sapien
gacagcctgtggatgaactctcctg

SEQ ID NO: 2536987 - DNA, 25 bp, Homo sapien
caggaagcagatatcgagacagcct

SEQ ID NO: 2536988 - DNA, 25 bp, Homo sapien
tgtggatgaactctcctggagccca

SEQ ID NO: 2536989 - DNA, 25 bp, Homo sapien
cgaggaggcagaagcgacctcccat

SEQ ID NO: 2536990 - DNA, 25 bp, Homo sapien
tatttggcttctgagccaggactga

SEQ ID NO: 2536991 - DNA, 25 bp, Homo sapien
ctgtgataggttgtggtatttggct

SEQ ID NO: 2536992 - DNA, 25 bp, Homo sapien
agagatggaccagcaaaggggttgg

SEQ ID NO: 2536993 - DNA, 25 bp, Homo sapien
taagtaagacttaagcctgcagaag

SEQ ID NO: 2536994 - DNA, 25 bp, Homo sapien
ctcccgggactagcccatatgaggg

SEQ ID NO: 2536995 - DNA, 25 bp, Homo sapien
ccctcacgagggtataataagtaag

SEQ ID NO: 2536996 - DNA, 25 bp, Homo sapien
tattaaatagattccgagggctccc

SEQ ID NO: 2536997 - DNA, 25 bp, Homo sapien
ggcagagttcccacacttagctgtc

SEQ ID NO: 2536998 - DNA, 25 bp, Homo sapien
ttcccacacttagctgtcggtcatc

SEQ ID NO: 2536999 - DNA, 25 bp, Homo sapien
cacggcagagttcccacacttagct

SEQ ID NO: 2537000 - DNA, 25 bp, Homo sapien
cagagttcccacacttagctgtcgg

SEQ ID NO: 2537001 - DNA, 25 bp, Homo sapien
aggtcaatgattttagtgcgaggtc

SEQ ID NO: 2537002 - DNA, 25 bp, Homo sapien
aagagatggccttaagtggtggcct

SEQ ID NO: 2537003 - DNA, 25 bp, Homo sapien
tgcgaggtccatgcactctgaaaac

SEQ ID NO: 2537004 - DNA, 25 bp, Homo sapien
tgagaaatagtcaggatgaagcgtt

SEQ ID NO: 2537005 - DNA, 25 bp, Homo sapien
gtaattctgggacacgagcacgccc

SEQ ID NO: 2537006 - DNA, 25 bp, Homo sapien
tgtcttgagatatgcccggatggct

SEQ ID NO: 2537007 - DNA, 25 bp, Homo sapien
cgaggtgctctatgatctcatcaat

SEQ ID NO: 2537008 - DNA, 25 bp, Homo sapien
gaaatatgagtttgtcgaggtgctc

SEQ ID NO: 2537009 - DNA, 25 bp, Homo sapien
gtggtgggaattgcagcacatctgg

SEQ ID NO: 2537010 - DNA, 25 bp, Homo sapien
ttcaaaagcatcttcgagagggact

SEQ ID NO: 2537011 - DNA, 25 bp, Homo sapien
taattcctcgactattttctgtaca

SEQ ID NO: 2537012 - DNA, 25 bp, Homo sapien
catcacttggtcgtagtaaacggac

SEQ ID NO: 2537013 - DNA, 25 bp, Homo sapien
acagaaagagcacagacgtcgaggg

SEQ ID NO: 2537014 - DNA, 25 bp, Homo sapien
cctgggggtagtgcttccagaatct

SEQ ID NO: 2537015 - DNA, 25 bp, Homo sapien
atgcccaagactccggaagcaccag

SEQ ID NO: 2537016 - DNA, 25 bp, Homo sapien
ctgagccaaccctgggggtagtgct

SEQ ID NO: 2537017 - DNA, 25 bp, Homo sapien
agatgatgcccaagactccggaagc

SEQ ID NO: 2537018 - DNA, 25 bp, Homo sapien
gccagatgtgttcgccatggctgcc

SEQ ID NO: 2537019 - DNA, 25 bp, Homo sapien
gctgcctggaggtatataaagggcc

SEQ ID NO: 2537020 - DNA, 25 bp, Homo sapien
tctggagccagatgtgttcgccatg

SEQ ID NO: 2537021 - DNA, 25 bp, Homo sapien
tggagccagatgtgttcgccatggc

SEQ ID NO: 2537022 - DNA, 25 bp, Homo sapien
gaccataccaccaaggagcgggtga

SEQ ID NO: 2537023 - DNA, 25 bp, Homo sapien
gatgtgcagaatgcggtatctctgg

SEQ ID NO: 2537024 - DNA, 25 bp, Homo sapien
gaaatttctgcagcatatgcccacg

SEQ ID NO: 2537025 - DNA, 25 bp, Homo sapien
cagggttgacagacacgaccatacc

SEQ ID NO: 2537026 - DNA, 25 bp, Homo sapien
tagaaaggtctttgcgtattggaaa

SEQ ID NO: 2537027 - DNA, 25 bp, Homo sapien
gttaacagacttatgcagatattcc

SEQ ID NO: 2537028 - DNA, 25 bp, Homo sapien
catggtggcagatacaatgttgtct

SEQ ID NO: 2537029 - DNA, 25 bp, Homo sapien
tatcaccacccacatcattagaaag

SEQ ID NO: 2537030 - DNA, 25 bp, Homo sapien
ccagcatatgttgaatgggagccaa

SEQ ID NO: 2537031 - DNA, 25 bp, Homo sapien
ttaagggcatgacaaaaaggactcc

SEQ ID NO: 2537032 - DNA, 25 bp, Homo sapien
tcaagacatttggaatccggcggcc

SEQ ID NO: 2537033 - DNA, 25 bp, Homo sapien
tcttctcggtgcacagacagtcatg

SEQ ID NO: 2537034 - DNA, 25 bp, Homo sapien
ttctgccagcttggtttctgctttc

SEQ ID NO: 2537035 - DNA, 25 bp, Homo sapien
cgggagagctggtgcacctcttcca

SEQ ID NO: 2537036 - DNA, 25 bp, Homo sapien
tgttttctgacggagctcttctatc

SEQ ID NO: 2537037 - DNA, 25 bp, Homo sapien
aatcctcacgcaggtaggcctcctg

SEQ ID NO: 2537038 - DNA, 25 bp, Homo sapien
ctgaatgtgattcctggcggttata

SEQ ID NO: 2537039 - DNA, 25 bp, Homo sapien
aatgtgattcctggcggttatagag

SEQ ID NO: 2537040 - DNA, 25 bp, Homo sapien
cagctgaatgtgattcctggcggtt

SEQ ID NO: 2537041 - DNA, 25 bp, Homo sapien
ccagctgaatgtgattcctggcggt

SEQ ID NO: 2537042 - DNA, 25 bp, Homo sapien
tctatgttcaggtctggatttaact

SEQ ID NO: 2537043 - DNA, 25 bp, Homo sapien
tgttcaggtctggatttaactgaca

SEQ ID NO: 2537044 - DNA, 25 bp, Homo sapien
cacctctatgttcaggtctggattt

SEQ ID NO: 2537045 - DNA, 25 bp, Homo sapien
ttcaggtctggatttaactgacact

SEQ ID NO: 2537046 - DNA, 25 bp, Homo sapien
tttaaaggtaaaggaatgcatagaa

SEQ ID NO: 2537047 - DNA, 25 bp, Homo sapien
gcttttagtacagacctttgattaa

SEQ ID NO: 2537048 - DNA, 25 bp, Homo sapien
catcaccttgactaatctttaaagg

SEQ ID NO: 2537049 - DNA, 25 bp, Homo sapien
taaaattgtcaaagatccctttcat

SEQ ID NO: 2537050 - DNA, 25 bp, Homo sapien
tgctgctagttagtgtatttcacca

SEQ ID NO: 2537051 - DNA, 25 bp, Homo sapien
gacaatgttgacaggtagtggagaa

SEQ ID NO: 2537052 - DNA, 25 bp, Homo sapien
cattttatcaattcgtctgtagaac

SEQ ID NO: 2537053 - DNA, 25 bp, Homo sapien
tgtagaacattttgatcttactgca

SEQ ID NO: 2537054 - DNA, 25 bp, Homo sapien
ttttggaacacaatctaaacgtgtc

SEQ ID NO: 2537055 - DNA, 25 bp, Homo sapien
tgtgaactactgcacgtggcccaat

SEQ ID NO: 2537056 - DNA, 25 bp, Homo sapien
tgcctcaactggagctaccaagttt

SEQ ID NO: 2537057 - DNA, 25 bp, Homo sapien
tcttagtagcttctctcaaaactga

SEQ ID NO: 2537058 - DNA, 25 bp, Homo sapien
aggatgttctatgatgggcaccttg

SEQ ID NO: 2537059 - DNA, 25 bp, Homo sapien
caccttggggcaccacggtgcaaag

SEQ ID NO: 2537060 - DNA, 25 bp, Homo sapien
aaaggacaaagcactggctgctggg

SEQ ID NO: 2537061 - DNA, 25 bp, Homo sapien
aggtaggatgttctatgatgggcac

SEQ ID NO: 2537062 - DNA, 25 bp, Homo sapien
cagtttgatatgcagcttctgctgc

SEQ ID NO: 2537063 - DNA, 25 bp, Homo sapien
ttccagcttcaagtactcttggtgt

SEQ ID NO: 2537064 - DNA, 25 bp, Homo sapien
aagcaaagtgcttcagacagcataa

SEQ ID NO: 2537065 - DNA, 25 bp, Homo sapien
gcaaagtgcttcagacagcataaga

SEQ ID NO: 2537066 - DNA, 25 bp, Homo sapien
agcaaagtgcttcagacagcataag

SEQ ID NO: 2537067 - DNA, 25 bp, Homo sapien
tcaataatttagataccacatgagg

SEQ ID NO: 2537068 - DNA, 25 bp, Homo sapien
caataatttagataccacatgaggt

SEQ ID NO: 2537069 - DNA, 25 bp, Homo sapien
aataatttagataccacatgaggta

SEQ ID NO: 2537070 - DNA, 25 bp, Homo sapien
taatttagataccacatgaggtagg

SEQ ID NO: 2537071 - DNA, 25 bp, Homo sapien
agctctggctcctatgatcacctgc

SEQ ID NO: 2537072 - DNA, 25 bp, Homo sapien
tcagctctggctcctatgatcacct

SEQ ID NO: 2537073 - DNA, 25 bp, Homo sapien
tctggctcctatgatcacctgccac

SEQ ID NO: 2537074 - DNA, 25 bp, Homo sapien
tggctcctatgatcacctgccacac

SEQ ID NO: 2537075 - DNA, 25 bp, Homo sapien
atattgtcggtaaagagaagttaag

SEQ ID NO: 2537076 - DNA, 25 bp, Homo sapien
acttgtatattgtcggtaaagagaa

SEQ ID NO: 2537077 - DNA, 25 bp, Homo sapien
caagtaaacttgtatattgtcggta

SEQ ID NO: 2537078 - DNA, 25 bp, Homo sapien
tcccaagtaaacttgtatattgtcg

SEQ ID NO: 2537079 - DNA, 25 bp, Homo sapien
cctatgaagtaaaggtatcaggaca

SEQ ID NO: 2537080 - DNA, 25 bp, Homo sapien
taagtcccattacagcaaactggct

SEQ ID NO: 2537081 - DNA, 25 bp, Homo sapien
ggacattagtatctccatctgtaaa

SEQ ID NO: 2537082 - DNA, 25 bp, Homo sapien
tccacctcaaggaaattaagtccca

SEQ ID NO: 2537083 - DNA, 25 bp, Homo sapien
atattcagtaatagcttcaatcaac

SEQ ID NO: 2537084 - DNA, 25 bp, Homo sapien
attcagtaatagcttcaatcaacgc

SEQ ID NO: 2537085 - DNA, 25 bp, Homo sapien
cttagtatattcagtaatagcttca

SEQ ID NO: 2537086 - DNA, 25 bp, Homo sapien
gtatattcagtaatagcttcaatca

SEQ ID NO: 2537087 - DNA, 25 bp, Homo sapien
tgctatctgttaccaaagacactgc

SEQ ID NO: 2537088 - DNA, 25 bp, Homo sapien
agagaaaggtagaggtgctatctgt

SEQ ID NO: 2537089 - DNA, 25 bp, Homo sapien
tcatcaatgcttcactactaaggga

SEQ ID NO: 2537090 - DNA, 25 bp, Homo sapien
tgctctcctcatcaatgcttcacta

SEQ ID NO: 2537091 - DNA, 25 bp, Homo sapien
actttttcaccaataggcaagcaaa

SEQ ID NO: 2537092 - DNA, 25 bp, Homo sapien
ttaggctgaaactgcactatatttc

SEQ ID NO: 2537093 - DNA, 25 bp, Homo sapien
aaaacgtaattgtcatgctgcttag

SEQ ID NO: 2537094 - DNA, 25 bp, Homo sapien
tgtcactcaacctctaaagctcaaa

SEQ ID NO: 2537095 - DNA, 25 bp, Homo sapien
gcacacagggttactccaaagccaa

SEQ ID NO: 2537096 - DNA, 25 bp, Homo sapien
gccatggtcttatcaattctgagaa

SEQ ID NO: 2537097 - DNA, 25 bp, Homo sapien
taaagttagccacaacaggaacaca

SEQ ID NO: 2537098 - DNA, 25 bp, Homo sapien
tgtgcaataggaaccgcacacaggg

SEQ ID NO: 2537099 - DNA, 25 bp, Homo sapien
caggctcttggatttacttgcaggg

SEQ ID NO: 2537100 - DNA, 25 bp, Homo sapien
cttgcaggggctgtaaactcaaact

SEQ ID NO: 2537101 - DNA, 25 bp, Homo sapien
taaactcaaactcgagccaagcagg

SEQ ID NO: 2537102 - DNA, 25 bp, Homo sapien
ggcacgaccgccaatctgtaacagg

SEQ ID NO: 2537103 - DNA, 25 bp, Homo sapien
cctgcagcgctaggtagagagccct

SEQ ID NO: 2537104 - DNA, 25 bp, Homo sapien
tgccagttgtgtgtgacggtcccgc

SEQ ID NO: 2537105 - DNA, 25 bp, Homo sapien
tctcctcagggacttcgagtggctg

SEQ ID NO: 2537106 - DNA, 25 bp, Homo sapien
caataaccgctcctgcaggcagaat

SEQ ID NO: 2537107 - DNA, 25 bp, Homo sapien
cggggctgtcctcagtcctcccgac

SEQ ID NO: 2537108 - DNA, 25 bp, Homo sapien
gcggggctgtcctcagtcctcccga

SEQ ID NO: 2537109 - DNA, 25 bp, Homo sapien
gaggcggggctgtcctcagtcctcc

SEQ ID NO: 2537110 - DNA, 25 bp, Homo sapien
ggcggaggcggggctgtcctcagtc

SEQ ID NO: 2537111 - DNA, 25 bp, Homo sapien
gagacgccgcgacccagctgggcgg

SEQ ID NO: 2537112 - DNA, 25 bp, Homo sapien
agcgagacgccgcgacccagctggg

SEQ ID NO: 2537113 - DNA, 25 bp, Homo sapien
gagcgagacgccgcgacccagctgg

SEQ ID NO: 2537114 - DNA, 25 bp, Homo sapien
cggagcgagacgccgcgacccagct

SEQ ID NO: 2537115 - DNA, 25 bp, Homo sapien
gggccacagcgctgtccgcgtcggt

SEQ ID NO: 2537116 - DNA, 25 bp, Homo sapien
tcccctctacgcggccgcagcggta

SEQ ID NO: 2537117 - DNA, 25 bp, Homo sapien
ctgtccgcgtcggtccctccctctg

SEQ ID NO: 2537118 - DNA, 25 bp, Homo sapien
tgagcgcgtaaggaaggcgggcgcc

SEQ ID NO: 2537119 - DNA, 25 bp, Homo sapien
ctgaagaatgaagttacgctgcgcg

SEQ ID NO: 2537120 - DNA, 25 bp, Homo sapien
ttacgctgcgcgacagccaactctt

SEQ ID NO: 2537121 - DNA, 25 bp, Homo sapien
tgaagttacgctgcgcgacagccaa

SEQ ID NO: 2537122 - DNA, 25 bp, Homo sapien
gaagaatgaagttacgctgcgcgac

SEQ ID NO: 2537123 - DNA, 25 bp, Homo sapien
ccggaagtgacgcagcttcgtgagc

SEQ ID NO: 2537124 - DNA, 25 bp, Homo sapien
gcttagggcaaaggctgtaacggcc

SEQ ID NO: 2537125 - DNA, 25 bp, Homo sapien
gtaacggccgcgcaaggcaaccaac

SEQ ID NO: 2537126 - DNA, 25 bp, Homo sapien
acgccagacgcacacgccggaagtg

SEQ ID NO: 2537127 - DNA, 25 bp, Homo sapien
actcagttcgggccagggcttgaag

SEQ ID NO: 2537128 - DNA, 25 bp, Homo sapien
ctgagggcgcggaggtgggtccggc

SEQ ID NO: 2537129 - DNA, 25 bp, Homo sapien
gcggagctgagtcgggcgccgtgac

SEQ ID NO: 2537130 - DNA, 25 bp, Homo sapien
tgggcggggactcagttcgggccag

SEQ ID NO: 2537131 - DNA, 25 bp, Homo sapien
gaagtaagtggtccagccggccagc

SEQ ID NO: 2537132 - DNA, 25 bp, Homo sapien
atgagcaccgtgtagctgaggagca

SEQ ID NO: 2537133 - DNA, 25 bp, Homo sapien
gagcacgaaggcgagcagctcccgc

SEQ ID NO: 2537134 - DNA, 25 bp, Homo sapien
gcagcacgtggacggtggacgaggc

SEQ ID NO: 2537135 - DNA, 25 bp, Homo sapien
ccccaggacggtcggcggcctgccg

SEQ ID NO: 2537136 - DNA, 25 bp, Homo sapien
agccccaggacggtcggcggcctgc

SEQ ID NO: 2537137 - DNA, 25 bp, Homo sapien
cgggctggcgccgtcccagaggggc

SEQ ID NO: 2537138 - DNA, 25 bp, Homo sapien
cggcctgccgggctggcgccgtccc

SEQ ID NO: 2537139 - DNA, 25 bp, Homo sapien
gacgctcgcttctcggttacactgg

SEQ ID NO: 2537140 - DNA, 25 bp, Homo sapien
gccgctaatgcgctggtggagtaaa

SEQ ID NO: 2537141 - DNA, 25 bp, Homo sapien
tcttttcccgtcactcaagctgcag

SEQ ID NO: 2537142 - DNA, 25 bp, Homo sapien
cagctgcatgagttttcctccctgg

SEQ ID NO: 2537143 - DNA, 25 bp, Homo sapien
gcagagctggaggatctttgctttg

SEQ ID NO: 2537144 - DNA, 25 bp, Homo sapien
gccccaaggcttgccagcagcagag

SEQ ID NO: 2537145 - DNA, 25 bp, Homo sapien
tgaagctccgcggttctgtctgctc

SEQ ID NO: 2537146 - DNA, 25 bp, Homo sapien
ctctggtgcccaaaggtagcttgtg

SEQ ID NO: 2537147 - DNA, 25 bp, Homo sapien
gcttgtgtgtattctgcgatctcgg

SEQ ID NO: 2537148 - DNA, 25 bp, Homo sapien
ttggcaaagtttccacgaatcttcc

SEQ ID NO: 2537149 - DNA, 25 bp, Homo sapien
tgtctgctttagacatccagttcat

SEQ ID NO: 2537150 - DNA, 25 bp, Homo sapien
catagtccctcttactgtctgcttt

SEQ ID NO: 2537151 - DNA, 25 bp, Homo sapien
atagtccctcttactgtctgcttta

SEQ ID NO: 2537152 - DNA, 25 bp, Homo sapien
gagtgcagacacatgagactacaac

SEQ ID NO: 2537153 - DNA, 25 bp, Homo sapien
taatatttaccgtgcccatcagaac

SEQ ID NO: 2537154 - DNA, 25 bp, Homo sapien
cagaactccactaatgggccgggca

SEQ ID NO: 2537155 - DNA, 25 bp, Homo sapien
gacttgaattgagccccaggaacca

SEQ ID NO: 2537156 - DNA, 25 bp, Homo sapien
gaaaaacaatgtgtggttactaatc

SEQ ID NO: 2537157 - DNA, 25 bp, Homo sapien
ccttggtgccttaactcctccagaa

SEQ ID NO: 2537158 - DNA, 25 bp, Homo sapien
ccaacctgacttggtgcccttggtg

SEQ ID NO: 2537159 - DNA, 25 bp, Homo sapien
gaccagctagttttgctggaggctt

SEQ ID NO: 2537160 - DNA, 25 bp, Homo sapien
tctccaagatcatcaagagatacac

SEQ ID NO: 2537161 - DNA, 25 bp, Homo sapien
tgctggtctccaagatcatcaagag

SEQ ID NO: 2537162 - DNA, 25 bp, Homo sapien
acagcctgacagtctcctgcaggag

SEQ ID NO: 2537163 - DNA, 25 bp, Homo sapien
cctgacagtctcctgcaggagtagc

SEQ ID NO: 2537164 - DNA, 25 bp, Homo sapien
tgtttctgggcaagaagctccccta

SEQ ID NO: 2537165 - DNA, 25 bp, Homo sapien
gaccagttggatgttgggcccttga

SEQ ID NO: 2537166 - DNA, 25 bp, Homo sapien
tttcagctgagtacggagtggccac

SEQ ID NO: 2537167 - DNA, 25 bp, Homo sapien
tgaagaagcaagagttgcccctgct

SEQ ID NO: 2537168 - DNA, 25 bp, Homo sapien
ccagtgctgcttttactcaggttga

SEQ ID NO: 2537169 - DNA, 25 bp, Homo sapien
gaagctgaccccagaatatattctg

SEQ ID NO: 2537170 - DNA, 25 bp, Homo sapien
gagctggccccgtttgtctggctga

SEQ ID NO: 2537171 - DNA, 25 bp, Homo sapien
tctctaatgaagaccctgagcttag

SEQ ID NO: 2537172 - DNA, 25 bp, Homo sapien
ctctatccaactggttccattcatt

SEQ ID NO: 2537173 - DNA, 25 bp, Homo sapien
ttccatcagagcctctatccaactg

SEQ ID NO: 2537174 - DNA, 25 bp, Homo sapien
tagtggtggcaatgacatattctgt

SEQ ID NO: 2537175 - DNA, 25 bp, Homo sapien
tccattcattagtttagtggtggca

SEQ ID NO: 2537176 - DNA, 25 bp, Homo sapien
cagagtcactcggttttctcccggt

SEQ ID NO: 2537177 - DNA, 25 bp, Homo sapien
tcagcgaaggttacgcccccaagga

SEQ ID NO: 2537178 - DNA, 25 bp, Homo sapien
agaaatcgcagggcagcaatttcag

SEQ ID NO: 2537179 - DNA, 25 bp, Homo sapien
caactgggagagaaatcgcagggca

SEQ ID NO: 2537180 - DNA, 25 bp, Homo sapien
cactgagcggggcatacccactgta

SEQ ID NO: 2537181 - DNA, 25 bp, Homo sapien
tgtacacatacgatatgtccgtggg

SEQ ID NO: 2537182 - DNA, 25 bp, Homo sapien
ccactgtacacatacgatatgtccg

SEQ ID NO: 2537183 - DNA, 25 bp, Homo sapien
tgcggaggacctcctcgatgctccg

SEQ ID NO: 2537184 - DNA, 25 bp, Homo sapien
tatgagtgctggacatctccactga

SEQ ID NO: 2537185 - DNA, 25 bp, Homo sapien
tgcccggagatggacctgtgcgtcc

SEQ ID NO: 2537186 - DNA, 25 bp, Homo sapien
gatgacgttgtcactggccagcttc

SEQ ID NO: 2537187 - DNA, 25 bp, Homo sapien
tgaccaagacaaagcaccagagtga

SEQ ID NO: 2537188 - DNA, 25 bp, Homo sapien
gtaattgtttctgccccccgtctgc

SEQ ID NO: 2537189 - DNA, 25 bp, Homo sapien
ccggccttctccaggttgtgtaagg

SEQ ID NO: 2537190 - DNA, 25 bp, Homo sapien
ccagaggcgtaatgttttccgtata

SEQ ID NO: 2537191 - DNA, 25 bp, Homo sapien
cattaacatcatccatccagaggcg

SEQ ID NO: 2537192 - DNA, 25 bp, Homo sapien
tgggcgatacaatcctcaatgtaat

SEQ ID NO: 2537193 - DNA, 25 bp, Homo sapien
cacacggattggaggcaaactagtc

SEQ ID NO: 2537194 - DNA, 25 bp, Homo sapien
cttaacaccttgatcaacgagtgct

SEQ ID NO: 2537195 - DNA, 25 bp, Homo sapien
gtttgagcccactattacacacgga

SEQ ID NO: 2537196 - DNA, 25 bp, Homo sapien
tccagacataaactcctgttccacg

SEQ ID NO: 2537197 - DNA, 25 bp, Homo sapien
tcctgttccacggttaatttatcaa

SEQ ID NO: 2537198 - DNA, 25 bp, Homo sapien
cttatcagtgtctattccagacata

SEQ ID NO: 2537199 - DNA, 25 bp, Homo sapien
ttccagacataaactcctgttccac

SEQ ID NO: 2537200 - DNA, 25 bp, Homo sapien
tatggtttgcaagcgagccccttgc

SEQ ID NO: 2537201 - DNA, 25 bp, Homo sapien
gacatctttgatcaattctgcaatt

SEQ ID NO: 2537202 - DNA, 25 bp, Homo sapien
caattgaggtatggtttgcaagcga

SEQ ID NO: 2537203 - DNA, 25 bp, Homo sapien
tgatctcccccacggtcttagcatt

SEQ ID NO: 2537204 - DNA, 25 bp, Homo sapien
cacagagccaactgcgttgaagttc

SEQ ID NO: 2537205 - DNA, 25 bp, Homo sapien
tctcggatctcagcatagagctcct

SEQ ID NO: 2537206 - DNA, 25 bp, Homo sapien
gagccaactgcgttgaagttcttat

SEQ ID NO: 2537207 - DNA, 25 bp, Homo sapien
ttgaagttcttatctcggatctcag

SEQ ID NO: 2537208 - DNA, 25 bp, Homo sapien
cgccctgtttcttaggtgcaaattt

SEQ ID NO: 2537209 - DNA, 25 bp, Homo sapien
ccctgtttcttaggtgcaaatttct

SEQ ID NO: 2537210 - DNA, 25 bp, Homo sapien
cttaccaccatcgccctgtttctta

SEQ ID NO: 2537211 - DNA, 25 bp, Homo sapien
gccctgtttcttaggtgcaaatttc

SEQ ID NO: 2537212 - DNA, 25 bp, Homo sapien
tgtacaccctgatctagaataagct

SEQ ID NO: 2537213 - DNA, 25 bp, Homo sapien
cacatggccacagctattctttttg

SEQ ID NO: 2537214 - DNA, 25 bp, Homo sapien
tgacaatgacagagacaaggaggtt

SEQ ID NO: 2537215 - DNA, 25 bp, Homo sapien
aggaggttcctctgtatgacctgca

SEQ ID NO: 2537216 - DNA, 25 bp, Homo sapien
tacttgtgatctacctaatcaccca

SEQ ID NO: 2537217 - DNA, 25 bp, Homo sapien
tgatctacctaatcacccaccaagg

SEQ ID NO: 2537218 - DNA, 25 bp, Homo sapien
aaccaaacatacttgtgatctacct

SEQ ID NO: 2537219 - DNA, 25 bp, Homo sapien
aaatatcatgtgggccaaaaccagc

SEQ ID NO: 2537220 - DNA, 25 bp, Homo sapien
gactctgtgtatgatgccgactgcc

SEQ ID NO: 2537221 - DNA, 25 bp, Homo sapien
tgtgcgtcgcaaatgccagtgccct

SEQ ID NO: 2537222 - DNA, 25 bp, Homo sapien
gagtggcctcgaccttctgtaccag

SEQ ID NO: 2537223 - DNA, 25 bp, Homo sapien
aaccacgttgcttggctcgtcatga

SEQ ID NO: 2537224 - DNA, 25 bp, Homo sapien
ttctggccaactcttgtgtcaccga

SEQ ID NO: 2537225 - DNA, 25 bp, Homo sapien
gcctgggcactaaaattctggccaa

SEQ ID NO: 2537226 - DNA, 25 bp, Homo sapien
gaccggcctgggcactaaaattctg

SEQ ID NO: 2537227 - DNA, 25 bp, Homo sapien
tgtcaccgacaactgcaatttgctc

SEQ ID NO: 2537228 - DNA, 25 bp, Homo sapien
gaatcattaaaatcggatctctgac

SEQ ID NO: 2537229 - DNA, 25 bp, Homo sapien
gctaaattgcttacaaaaaggtctg

SEQ ID NO: 2537230 - DNA, 25 bp, Homo sapien
gattcctcaaggcacattcttaggc

SEQ ID NO: 2537231 - DNA, 25 bp, Homo sapien
gcttaagtgtgcaatatacaaacag

SEQ ID NO: 2537232 - DNA, 25 bp, Homo sapien
agtggcaagaggtgttaataaatcc

SEQ ID NO: 2537233 - DNA, 25 bp, Homo sapien
cattccgatcaagcaacaagagatt

SEQ ID NO: 2537234 - DNA, 25 bp, Homo sapien
ccttcatatgtcagctgagtggcaa

SEQ ID NO: 2537235 - DNA, 25 bp, Homo sapien
gaattctggcttcctgtaaactctc

SEQ ID NO: 2537236 - DNA, 25 bp, Homo sapien
aaataattaagatcaactgaatttg

SEQ ID NO: 2537237 - DNA, 25 bp, Homo sapien
gtaggcaaattcatgagtacagtat

SEQ ID NO: 2537238 - DNA, 25 bp, Homo sapien
cagtaggcaaattcatgagtacagt

SEQ ID NO: 2537239 - DNA, 25 bp, Homo sapien
tgaatttgtttgtaaggagcttccc

SEQ ID NO: 2537240 - DNA, 25 bp, Homo sapien
ccttggctgcgtggtacaggctcgt

SEQ ID NO: 2537241 - DNA, 25 bp, Homo sapien
cgtggtacaggctcgtctggtcacc

SEQ ID NO: 2537242 - DNA, 25 bp, Homo sapien
gatctgggggatcgttccatacaga

SEQ ID NO: 2537243 - DNA, 25 bp, Homo sapien
gttccatacagagcttgcagggtca

SEQ ID NO: 2537244 - DNA, 25 bp, Homo sapien
cactcataagtcaatatggtacatt

SEQ ID NO: 2537245 - DNA, 25 bp, Homo sapien
tggtacattttatcaattccctcca

SEQ ID NO: 2537246 - DNA, 25 bp, Homo sapien
tatggtacattttatcaattccctc

SEQ ID NO: 2537247 - DNA, 25 bp, Homo sapien
aaccattatccactcataagtcaat

SEQ ID NO: 2537248 - DNA, 25 bp, Homo sapien
caacccaacatgtccctgctgtcca

SEQ ID NO: 2537249 - DNA, 25 bp, Homo sapien
tgctgtccacagccagaactgaggg

SEQ ID NO: 2537250 - DNA, 25 bp, Homo sapien
cctgctgtccacagccagaactgag

SEQ ID NO: 2537251 - DNA, 25 bp, Homo sapien
ctgtccacagccagaactgaggggg

SEQ ID NO: 2537252 - DNA, 25 bp, Homo sapien
gttattattgagagtgtcgccggac

SEQ ID NO: 2537253 - DNA, 25 bp, Homo sapien
cagatcagatgaacgttcaagggca

SEQ ID NO: 2537254 - DNA, 25 bp, Homo sapien
tatggcagaccatcgagaatatgtc

SEQ ID NO: 2537255 - DNA, 25 bp, Homo sapien
ggttgtcacttgtcaggccctctgc

SEQ ID NO: 2537256 - DNA, 25 bp, Homo sapien
gagagtttgcttcggctgctaccaa

SEQ ID NO: 2537257 - DNA, 25 bp, Homo sapien
taagtggtggatagacaggtgttca

SEQ ID NO: 2537258 - DNA, 25 bp, Homo sapien
ggaaatctatattaccatcaggtag

SEQ ID NO: 2537259 - DNA, 25 bp, Homo sapien
tcgtgtaagcaaaccactagggaac

SEQ ID NO: 2537260 - DNA, 25 bp, Homo sapien
aaattcgttcaagcctaggaggtca

SEQ ID NO: 2537261 - DNA, 25 bp, Homo sapien
aatgtgccatacttagagagtggag

SEQ ID NO: 2537262 - DNA, 25 bp, Homo sapien
catacagactgaactagattagtgg

SEQ ID NO: 2537263 - DNA, 25 bp, Homo sapien
ggaaggaaagatagcgacagactgc

SEQ ID NO: 2537264 - DNA, 25 bp, Homo sapien
ccatcgaatggaatgagatctaagc

SEQ ID NO: 2537265 - DNA, 25 bp, Homo sapien
gctgttcgcacaacaggctacggcg

SEQ ID NO: 2537266 - DNA, 25 bp, Homo sapien
gattccatggataagagatccccat

SEQ ID NO: 2537267 - DNA, 25 bp, Homo sapien
tatgaaaatctctcgttgggcctcg

SEQ ID NO: 2537268 - DNA, 25 bp, Homo sapien
gattatatccatcaactctagcctg

SEQ ID NO: 2537269 - DNA, 25 bp, Homo sapien
gctgccggcaaacgatttcctttaa

SEQ ID NO: 2537270 - DNA, 25 bp, Homo sapien
atcagctgccggcaaacgatttcct

SEQ ID NO: 2537271 - DNA, 25 bp, Homo sapien
ctgagcacgttttcagcgattatat

SEQ ID NO: 2537272 - DNA, 25 bp, Homo sapien
tactgtgcaatcaggccaaagggtc

SEQ ID NO: 2537273 - DNA, 25 bp, Homo sapien
caaagggtccagttaggtattcatc

SEQ ID NO: 2537274 - DNA, 25 bp, Homo sapien
gtgaatactgtgcaatcaggccaaa

SEQ ID NO: 2537275 - DNA, 25 bp, Homo sapien
gccaaagggtccagttaggtattca

SEQ ID NO: 2537276 - DNA, 25 bp, Homo sapien
tctgctctcacaaaacagtcgcggt

SEQ ID NO: 2537277 - DNA, 25 bp, Homo sapien
ctcaggcggtcagggaacggattaa

SEQ ID NO: 2537278 - DNA, 25 bp, Homo sapien
cagctgccgggctatcacagtggct

SEQ ID NO: 2537279 - DNA, 25 bp, Homo sapien
gcagcggaggaaacacctgacgtaa

SEQ ID NO: 2537280 - DNA, 25 bp, Homo sapien
ttgcttcctgcgcacttgtccagga

SEQ ID NO: 2537281 - DNA, 25 bp, Homo sapien
accgcctcgcgcaacacgtttaggt

SEQ ID NO: 2537282 - DNA, 25 bp, Homo sapien
aggaactcgcgcagctcgcgacgca

SEQ ID NO: 2537283 - DNA, 25 bp, Homo sapien
tttaggttcactcggccgtaggaca

SEQ ID NO: 2537284 - DNA, 25 bp, Homo sapien
gccccacaacgccaaccgagtccgc

SEQ ID NO: 2537285 - DNA, 25 bp, Homo sapien
ctgccccacaacgccaaccgagtcc

SEQ ID NO: 2537286 - DNA, 25 bp, Homo sapien
cccacaacgccaaccgagtccgccg

SEQ ID NO: 2537287 - DNA, 25 bp, Homo sapien
cacaacgccaaccgagtccgccggt

SEQ ID NO: 2537288 - DNA, 25 bp, Homo sapien
tatgaatttcatcgtgcagtccacg

SEQ ID NO: 2537289 - DNA, 25 bp, Homo sapien
tctgagttgtagtgaggatcaatga

SEQ ID NO: 2537290 - DNA, 25 bp, Homo sapien
cacgtgagaggcttaactgggtgcc

SEQ ID NO: 2537291 - DNA, 25 bp, Homo sapien
gtaaaattccatgttacctctgagt

SEQ ID NO: 2537292 - DNA, 25 bp, Homo sapien
aggttggcctcaagctcttgggttc

SEQ ID NO: 2537293 - DNA, 25 bp, Homo sapien
ggttccagctatcatctggcctcag

SEQ ID NO: 2537294 - DNA, 25 bp, Homo sapien
caagctcttgggttccagctatcat

SEQ ID NO: 2537295 - DNA, 25 bp, Homo sapien
acagatgcctgctactgctcctggc

SEQ ID NO: 2537296 - DNA, 25 bp, Homo sapien
ccatttattaaagtagatacagaac

SEQ ID NO: 2537297 - DNA, 25 bp, Homo sapien
taaccatttattaaagtagatacag

SEQ ID NO: 2537298 - DNA, 25 bp, Homo sapien
agaataaccatttattaaagtagat

SEQ ID NO: 2537299 - DNA, 25 bp, Homo sapien
ataaccatttattaaagtagataca

SEQ ID NO: 2537300 - DNA, 25 bp, Homo sapien
caaactggtcgataaactgttcagg

SEQ ID NO: 2537301 - DNA, 25 bp, Homo sapien
caatgcgagtgcgtctgagcaagcc

SEQ ID NO: 2537302 - DNA, 25 bp, Homo sapien
taaaatgtccccacagcagtttggg

SEQ ID NO: 2537303 - DNA, 25 bp, Homo sapien
tggttgcaaagccacaagatgctat

SEQ ID NO: 2537304 - DNA, 25 bp, Homo sapien
ccccgactgccatggtgtgtggaat

SEQ ID NO: 2537305 - DNA, 25 bp, Homo sapien
cgtcgtcattgcagttggtggccca

SEQ ID NO: 2537306 - DNA, 25 bp, Homo sapien
atttcacagtatgggcgttcctcac

SEQ ID NO: 2537307 - DNA, 25 bp, Homo sapien
caatcctctgtgtcgtggagatcaa

SEQ ID NO: 2537308 - DNA, 25 bp, Homo sapien
cataattgtttaggtcatccccgtt

SEQ ID NO: 2537309 - DNA, 25 bp, Homo sapien
ttcatcttgaggtcttgattcttcc

SEQ ID NO: 2537310 - DNA, 25 bp, Homo sapien
tcagggctgcttctgacatcatctc

SEQ ID NO: 2537311 - DNA, 25 bp, Homo sapien
ctgtcataattgtttaggtcatccc

SEQ ID NO: 2537312 - DNA, 25 bp, Homo sapien
catgtctaggtggtaaggctatggc

SEQ ID NO: 2537313 - DNA, 25 bp, Homo sapien
taaagagctgaacttaaatgaggcc

SEQ ID NO: 2537314 - DNA, 25 bp, Homo sapien
catgcttttcactctcccggaggac

SEQ ID NO: 2537315 - DNA, 25 bp, Homo sapien
tatacctttaagctctggcggcaaa

SEQ ID NO: 2537316 - DNA, 25 bp, Homo sapien
tctgttcggcagatttgaaaaagtc

SEQ ID NO: 2537317 - DNA, 25 bp, Homo sapien
cttccattaaactctacaatccatc

SEQ ID NO: 2537318 - DNA, 25 bp, Homo sapien
taaactctacaatccatccaggact

SEQ ID NO: 2537319 - DNA, 25 bp, Homo sapien
gttcggcagatttgaaaaagtcaca

SEQ ID NO: 2537320 - DNA, 25 bp, Homo sapien
gtttggactagaggaatgcattacc

SEQ ID NO: 2537321 - DNA, 25 bp, Homo sapien
tattagtgctggcttgtatacacac

SEQ ID NO: 2537322 - DNA, 25 bp, Homo sapien
gatctcaaacagtccgcttgccaca

SEQ ID NO: 2537323 - DNA, 25 bp, Homo sapien
gctttgtcagtcaggcctaagtgcg

SEQ ID NO: 2537324 - DNA, 25 bp, Homo sapien
tttcatcctcgtctgcctgagtgtc

SEQ ID NO: 2537325 - DNA, 25 bp, Homo sapien
tcatcctcgtctgcctgagtgtctg

SEQ ID NO: 2537326 - DNA, 25 bp, Homo sapien
ttcatcctcgtctgcctgagtgtct

SEQ ID NO: 2537327 - DNA, 25 bp, Homo sapien
caagttctttaccttgagctcgagc

SEQ ID NO: 2537328 - DNA, 25 bp, Homo sapien
tttctttgagttgaagctccaagtt

SEQ ID NO: 2537329 - DNA, 25 bp, Homo sapien
caactgaatgcaaggacttggcaga

SEQ ID NO: 2537330 - DNA, 25 bp, Homo sapien
gcttcaccttatcagactctagagt

SEQ ID NO: 2537331 - DNA, 25 bp, Homo sapien
tccttttctgtgagtaaggcactag

SEQ ID NO: 2537332 - DNA, 25 bp, Homo sapien
actagttatactgatggatttctgc

SEQ ID NO: 2537333 - DNA, 25 bp, Homo sapien
catctgcgtcttttatgaacttgga

SEQ ID NO: 2537334 - DNA, 25 bp, Homo sapien
tcatctgcgtcttttatgaacttgg

SEQ ID NO: 2537335 - DNA, 25 bp, Homo sapien
gcccaaagagcaggctagcatgtgt

SEQ ID NO: 2537336 - DNA, 25 bp, Homo sapien
tacagatgtcatgcagagcagcttt

SEQ ID NO: 2537337 - DNA, 25 bp, Homo sapien
caaatcaaccgaaagactggtcagt

SEQ ID NO: 2537338 - DNA, 25 bp, Homo sapien
agagcgcctggtttatgttctcggc

SEQ ID NO: 2537339 - DNA, 25 bp, Homo sapien
tatgacaactaactgcaaggcggga

SEQ ID NO: 2537340 - DNA, 25 bp, Homo sapien
gaaggtctgtgagaactggatgcac

SEQ ID NO: 2537341 - DNA, 25 bp, Homo sapien
cgtgagccggccatactgaaagttt

SEQ ID NO: 2537342 - DNA, 25 bp, Homo sapien
tatgctgctcatgggagtttctcag

SEQ ID NO: 2537343 - DNA, 25 bp, Homo sapien
tataacgtggatagactttctttag

SEQ ID NO: 2537344 - DNA, 25 bp, Homo sapien
tttattataacgtggatagactttc

SEQ ID NO: 2537345 - DNA, 25 bp, Homo sapien
tttatttattataacgtggatagac

SEQ ID NO: 2537346 - DNA, 25 bp, Homo sapien
tattataacgtggatagactttctt

SEQ ID NO: 2537347 - DNA, 25 bp, Homo sapien
gatgagctgaagtagcacgggacct

SEQ ID NO: 2537348 - DNA, 25 bp, Homo sapien
cactggcactgacaggatgaattct

SEQ ID NO: 2537349 - DNA, 25 bp, Homo sapien
gcacgggacctcctcagaatttggg

SEQ ID NO: 2537350 - DNA, 25 bp, Homo sapien
catgcctcgcgcctttggctttgga

SEQ ID NO: 2537351 - DNA, 25 bp, Homo sapien
tgaaaagcgtcccatgcctaaccat

SEQ ID NO: 2537352 - DNA, 25 bp, Homo sapien
catgaaaagcgtcccatgcctaacc

SEQ ID NO: 2537353 - DNA, 25 bp, Homo sapien
gccatgaaaagcgtcccatgcctaa

SEQ ID NO: 2537354 - DNA, 25 bp, Homo sapien
aaagcgtcccatgcctaaccatatt

SEQ ID NO: 2537355 - DNA, 25 bp, Homo sapien
tttcatttctaacaactgattattg

SEQ ID NO: 2537356 - DNA, 25 bp, Homo sapien
ccaatctaggagatagcaagctgca

SEQ ID NO: 2537357 - DNA, 25 bp, Homo sapien
tatagactctttgatgtcctagccc

SEQ ID NO: 2537358 - DNA, 25 bp, Homo sapien
caaagagcatggcagacaattcaca

SEQ ID NO: 2537359 - DNA, 25 bp, Homo sapien
tatgtaatggcttccaacagcctag

SEQ ID NO: 2537360 - DNA, 25 bp, Homo sapien
tgttacttctaagccctgtcagtgg

SEQ ID NO: 2537361 - DNA, 25 bp, Homo sapien
tctagaacgtcagtttggattcgtc

SEQ ID NO: 2537362 - DNA, 25 bp, Homo sapien
caagctctaggcattagttgtgctc

SEQ ID NO: 2537363 - DNA, 25 bp, Homo sapien
gatatcaggaggtacacactgttga

SEQ ID NO: 2537364 - DNA, 25 bp, Homo sapien
gtatatacacgaggaacaccaagga

SEQ ID NO: 2537365 - DNA, 25 bp, Homo sapien
ccaactatacacctatgaagggtaa

SEQ ID NO: 2537366 - DNA, 25 bp, Homo sapien
gaccttaataaacatgactttgaga

SEQ ID NO: 2537367 - DNA, 25 bp, Homo sapien
aaaatccattctgctagtctctgcc

SEQ ID NO: 2537368 - DNA, 25 bp, Homo sapien
aaacggaagaggaagcctcagtcat

SEQ ID NO: 2537369 - DNA, 25 bp, Homo sapien
gaagtgcagaaggtaatgggaaaaa

SEQ ID NO: 2537370 - DNA, 25 bp, Homo sapien
cttctgctcctggaagtgcagaagg

SEQ ID NO: 2537371 - DNA, 25 bp, Homo sapien
aaaacggaagaggaagcctcagtca

SEQ ID NO: 2537372 - DNA, 25 bp, Homo sapien
tgttgtatcgaggttaaactccctg

SEQ ID NO: 2537373 - DNA, 25 bp, Homo sapien
tatcatcaggaagaagcatcagaca

SEQ ID NO: 2537374 - DNA, 25 bp, Homo sapien
ggaacatcacatgcctcctggcagg

SEQ ID NO: 2537375 - DNA, 25 bp, Homo sapien
tgactaaagagacacgacaactcag

SEQ ID NO: 2537376 - DNA, 25 bp, Homo sapien
tactgggtttccatacaacccactc

SEQ ID NO: 2537377 - DNA, 25 bp, Homo sapien
ttctttttgcggattcagttcttcc

SEQ ID NO: 2537378 - DNA, 25 bp, Homo sapien
tattctcccatgtcagtatccaagt

SEQ ID NO: 2537379 - DNA, 25 bp, Homo sapien
cttatcgtatctcctaatacttaca

SEQ ID NO: 2537380 - DNA, 25 bp, Homo sapien
ctactgcggacttattatcacttga

SEQ ID NO: 2537381 - DNA, 25 bp, Homo sapien
gcagtttgttggctggactagctac

SEQ ID NO: 2537382 - DNA, 25 bp, Homo sapien
tgcggacttattatcacttgagaaa

SEQ ID NO: 2537383 - DNA, 25 bp, Homo sapien
gactagctacagaaaatgaccactg

SEQ ID NO: 2537384 - DNA, 25 bp, Homo sapien
cagacatatcaaaagtgactaccta

SEQ ID NO: 2537385 - DNA, 25 bp, Homo sapien
gtttggaaatgataaatcagacata

SEQ ID NO: 2537386 - DNA, 25 bp, Homo sapien
tcaaaagtgactacctaaggtgact

SEQ ID NO: 2537387 - DNA, 25 bp, Homo sapien
gataaatcagacatatcaaaagtga

SEQ ID NO: 2537388 - DNA, 25 bp, Homo sapien
tctgcaacaaaagctactgcgatgg

SEQ ID NO: 2537389 - DNA, 25 bp, Homo sapien
tcttaaactatatgaccttgcctga

SEQ ID NO: 2537390 - DNA, 25 bp, Homo sapien
gagcaaatgccccactaagttggtg

SEQ ID NO: 2537391 - DNA, 25 bp, Homo sapien
aggtgggcacaacgtaatcagctgc

SEQ ID NO: 2537392 - DNA, 25 bp, Homo sapien
caacgctgaaagctgctgggacttc

SEQ ID NO: 2537393 - DNA, 25 bp, Homo sapien
acgttctcttcttgcaacgctgaaa

SEQ ID NO: 2537394 - DNA, 25 bp, Homo sapien
cctcagcaagtttaacgttctcttc

SEQ ID NO: 2537395 - DNA, 25 bp, Homo sapien
tttgatgacttgtgacttcgtccct

SEQ ID NO: 2537396 - DNA, 25 bp, Homo sapien
ggacagtgagtgcagggttaccata

SEQ ID NO: 2537397 - DNA, 25 bp, Homo sapien
acagtgagtgcagggttaccataga

SEQ ID NO: 2537398 - DNA, 25 bp, Homo sapien
gacagtgagtgcagggttaccatag

SEQ ID NO: 2537399 - DNA, 25 bp, Homo sapien
cgtgcctggtctattactcttaaaa

SEQ ID NO: 2537400 - DNA, 25 bp, Homo sapien
gtgcctggtctattactcttaaaat

SEQ ID NO: 2537401 - DNA, 25 bp, Homo sapien
tgcctggtctattactcttaaaatt

SEQ ID NO: 2537402 - DNA, 25 bp, Homo sapien
ttttttgattctctacagtcaggag

SEQ ID NO: 2537403 - DNA, 25 bp, Homo sapien
tttttgattctctacagtcaggagt

SEQ ID NO: 2537404 - DNA, 25 bp, Homo sapien
ttttgattctctacagtcaggagtt

SEQ ID NO: 2537405 - DNA, 25 bp, Homo sapien
tttgattctctacagtcaggagttc

SEQ ID NO: 2537406 - DNA, 25 bp, Homo sapien
ggagctatctccttttgccatgcca

SEQ ID NO: 2537407 - DNA, 25 bp, Homo sapien
gaaaatatggttcatccaaccctga

SEQ ID NO: 2537408 - DNA, 25 bp, Homo sapien
gacaccaagggatctgttatagaac

SEQ ID NO: 2537409 - DNA, 25 bp, Homo sapien
tatcacaatgggtccgaaaatatgg

SEQ ID NO: 2537410 - DNA, 25 bp, Homo sapien
tccattatctgcatggcatcttccg

SEQ ID NO: 2537411 - DNA, 25 bp, Homo sapien
tttgcttggtgtcctccaaggaggc

SEQ ID NO: 2537412 - DNA, 25 bp, Homo sapien
tggcatcttccgctgtttgagcagc

SEQ ID NO: 2537413 - DNA, 25 bp, Homo sapien
tctgcatggcatcttccgctgtttg

SEQ ID NO: 2537414 - DNA, 25 bp, Homo sapien
gaagtagaatatgcagaccctttcc

SEQ ID NO: 2537415 - DNA, 25 bp, Homo sapien
tccagtgctgaaacagacggaccag

SEQ ID NO: 2537416 - DNA, 25 bp, Homo sapien
gtgaatcagtcacaatccagtgctg

SEQ ID NO: 2537417 - DNA, 25 bp, Homo sapien
caacaccgttaggtgaggatcgggc

SEQ ID NO: 2537418 - DNA, 25 bp, Homo sapien
aaagagaggtcgcacttgctggcca

SEQ ID NO: 2537419 - DNA, 25 bp, Homo sapien
tgttttcgtacaaggatgactcgct

SEQ ID NO: 2537420 - DNA, 25 bp, Homo sapien
caaagtatctttgctgagctggagc

SEQ ID NO: 2537421 - DNA, 25 bp, Homo sapien
cagagcatcaatattaccgaggagt

SEQ ID NO: 2537422 - DNA, 25 bp, Homo sapien
caacttgtgaaattattcccagtag

SEQ ID NO: 2537423 - DNA, 25 bp, Homo sapien
tagaaactatctgaataacaaggga

SEQ ID NO: 2537424 - DNA, 25 bp, Homo sapien
tgcaaagtgcttctgtatctgttag

SEQ ID NO: 2537425 - DNA, 25 bp, Homo sapien
cagacaaatgcaagcccaaataact

SEQ ID NO: 2537426 - DNA, 25 bp, Homo sapien
ccttgtcaataagctcacagtacct

SEQ ID NO: 2537427 - DNA, 25 bp, Homo sapien
gaatccagcttccttgtcaataagc

SEQ ID NO: 2537428 - DNA, 25 bp, Homo sapien
cttcctggggacacataaagccctc

SEQ ID NO: 2537429 - DNA, 25 bp, Homo sapien
ctactaacaaggtgtttcctccctg

SEQ ID NO: 2537430 - DNA, 25 bp, Homo sapien
caaggaaattctctcgcgtcacgta

SEQ ID NO: 2537431 - DNA, 25 bp, Homo sapien
ttcctgcctcgacacagagctcagg

SEQ ID NO: 2537432 - DNA, 25 bp, Homo sapien
aaggaaattctctcgcgtcacgtac

SEQ ID NO: 2537433 - DNA, 25 bp, Homo sapien
tcagaagtggctctctcatacctgg

SEQ ID NO: 2537434 - DNA, 25 bp, Homo sapien
gtggctctctcatacctggctttca

SEQ ID NO: 2537435 - DNA, 25 bp, Homo sapien
tttttgtctcagaagtggctctctc

SEQ ID NO: 2537436 - DNA, 25 bp, Homo sapien
tcccgtgcgcccttcagcttgtcct

SEQ ID NO: 2537437 - DNA, 25 bp, Homo sapien
tcagctttgacagtcatgtcctcaa

SEQ ID NO: 2537438 - DNA, 25 bp, Homo sapien
tgcattttcattagcctttgtaagt

SEQ ID NO: 2537439 - DNA, 25 bp, Homo sapien
tagcctttgtaagttttagctgtaa

SEQ ID NO: 2537440 - DNA, 25 bp, Homo sapien
gctctgttcagctttgacagtcatg

SEQ ID NO: 2537441 - DNA, 25 bp, Homo sapien
cgtaattcatcgttcatttttgtca

SEQ ID NO: 2537442 - DNA, 25 bp, Homo sapien
ttcctttgcctttatcagctgctct

SEQ ID NO: 2537443 - DNA, 25 bp, Homo sapien
tcatcgttcatttttgtcagctgag

SEQ ID NO: 2537444 - DNA, 25 bp, Homo sapien
ctttctttcagacgtaattcatcgt

SEQ ID NO: 2537445 - DNA, 25 bp, Homo sapien
tctccaagtcagaagacagcatgtt

SEQ ID NO: 2537446 - DNA, 25 bp, Homo sapien
gacagcatgttaaactgttcctcct

SEQ ID NO: 2537447 - DNA, 25 bp, Homo sapien
cagaagacagcatgttaaactgttc

SEQ ID NO: 2537448 - DNA, 25 bp, Homo sapien
caagtcagaagacagcatgttaaac

SEQ ID NO: 2537449 - DNA, 25 bp, Homo sapien
attttaatacagaacaagccttaag

SEQ ID NO: 2537450 - DNA, 25 bp, Homo sapien
tctgaacagagactgcctcctctga

SEQ ID NO: 2537451 - DNA, 25 bp, Homo sapien
ttcctgaaggttagtaagctttagc

SEQ ID NO: 2537452 - DNA, 25 bp, Homo sapien
cctggagctctctggtaatgctact

SEQ ID NO: 2537453 - DNA, 25 bp, Homo sapien
tgaaggttagtaagctttagctctc

SEQ ID NO: 2537454 - DNA, 25 bp, Homo sapien
ggagctctctggtaatgctactagc

SEQ ID NO: 2537455 - DNA, 25 bp, Homo sapien
ttgggtgagccgagaccagaccact

SEQ ID NO: 2537456 - DNA, 25 bp, Homo sapien
ggttgggtgagccgagaccagacca

SEQ ID NO: 2537457 - DNA, 25 bp, Homo sapien
gttgggtgagccgagaccagaccac

SEQ ID NO: 2537458 - DNA, 25 bp, Homo sapien
tgggtgagccgagaccagaccactg

SEQ ID NO: 2537459 - DNA, 25 bp, Homo sapien
gaagtcacagcatagcccagagata

SEQ ID NO: 2537460 - DNA, 25 bp, Homo sapien
gatcaggtacccagataacaggcaa

SEQ ID NO: 2537461 - DNA, 25 bp, Homo sapien
caccatagtgttagggcattcttta

SEQ ID NO: 2537462 - DNA, 25 bp, Homo sapien
gcgcctggccgatcttttgagtttc

SEQ ID NO: 2537463 - DNA, 25 bp, Homo sapien
gctgcctcaagctgctgtctaagtt

SEQ ID NO: 2537464 - DNA, 25 bp, Homo sapien
gatgtaaaattatcaataaccttgg

SEQ ID NO: 2537465 - DNA, 25 bp, Homo sapien
catttggcttgcagtacctctagct

SEQ ID NO: 2537466 - DNA, 25 bp, Homo sapien
gctactttcagcattcttttcaatc

SEQ ID NO: 2537467 - DNA, 25 bp, Homo sapien
gaaagtgacatgtccacatccccag

SEQ ID NO: 2537468 - DNA, 25 bp, Homo sapien
tttccgtggcggtatacagagcctt

SEQ ID NO: 2537469 - DNA, 25 bp, Homo sapien
aaattctgccgtctctgttccaagc

SEQ ID NO: 2537470 - DNA, 25 bp, Homo sapien
gatgagtttcttcccgggctccaaa

SEQ ID NO: 2537471 - DNA, 25 bp, Homo sapien
aaatgtcctagatgcaaatcctgcc

SEQ ID NO: 2537472 - DNA, 25 bp, Homo sapien
taaaacctgagtaatgtcctggctc

SEQ ID NO: 2537473 - DNA, 25 bp, Homo sapien
taatagacggactccatcctgtggt

SEQ ID NO: 2537474 - DNA, 25 bp, Homo sapien
taagcacaatgagctcagggcagga

SEQ ID NO: 2537475 - DNA, 25 bp, Homo sapien
ctgatcctgatttggttgggttacc

SEQ ID NO: 2537476 - DNA, 25 bp, Homo sapien
ttgaaccactgggtcaaggctcagg

SEQ ID NO: 2537477 - DNA, 25 bp, Homo sapien
tataaagcatgtcacctgaggtgtc

SEQ ID NO: 2537478 - DNA, 25 bp, Homo sapien
taccaagaccaaactcaggttgaac

SEQ ID NO: 2537479 - DNA, 25 bp, Homo sapien
gagcaggctctgttcaagctcctta

SEQ ID NO: 2537480 - DNA, 25 bp, Homo sapien
gggcatgctccagtttggtctgcgt

SEQ ID NO: 2537481 - DNA, 25 bp, Homo sapien
aagctccttaatgcgggcatgctcc

SEQ ID NO: 2537482 - DNA, 25 bp, Homo sapien
tagtgtcttctaactccctctggag

SEQ ID NO: 2537483 - DNA, 25 bp, Homo sapien
ccttctgccaaagggtgaaccaaag

SEQ ID NO: 2537484 - DNA, 25 bp, Homo sapien
aagagaacacaacagtgccaccatg

SEQ ID NO: 2537485 - DNA, 25 bp, Homo sapien
acatgccagcacgagaggagagaca

SEQ ID NO: 2537486 - DNA, 25 bp, Homo sapien
gggcatgggctagtctgttcagaaa

SEQ ID NO: 2537487 - DNA, 25 bp, Homo sapien
tcaataagcattttaatctgtgatc

SEQ ID NO: 2537488 - DNA, 25 bp, Homo sapien
atctgtgatcaatctttgttaacaa

SEQ ID NO: 2537489 - DNA, 25 bp, Homo sapien
aatatccacacagttaagtgccctc

SEQ ID NO: 2537490 - DNA, 25 bp, Homo sapien
taatctgtgatcaatctttgttaac

SEQ ID NO: 2537491 - DNA, 25 bp, Homo sapien
tcaggatcttcagaaatctggctct

SEQ ID NO: 2537492 - DNA, 25 bp, Homo sapien
caggatcttcagaaatctggctctt

SEQ ID NO: 2537493 - DNA, 25 bp, Homo sapien
attctcaggatcttcagaaatctgg

SEQ ID NO: 2537494 - DNA, 25 bp, Homo sapien
gatcttcagaaatctggctcttttg

SEQ ID NO: 2537495 - DNA, 25 bp, Homo sapien
gacagactatacaacccagtgctga

SEQ ID NO: 2537496 - DNA, 25 bp, Homo sapien
tgggcagccagcagactctaaaatt

SEQ ID NO: 2537497 - DNA, 25 bp, Homo sapien
agttgctgtttggaagggcccctca

SEQ ID NO: 2537498 - DNA, 25 bp, Homo sapien
taatgaaccattaaattctgggccc

SEQ ID NO: 2537499 - DNA, 25 bp, Homo sapien
gcctgttatggactactatgacaaa

SEQ ID NO: 2537500 - DNA, 25 bp, Homo sapien
gtctcgacccatcccccaagctgga

SEQ ID NO: 2537501 - DNA, 25 bp, Homo sapien
cacccggcctgttatggactactat

SEQ ID NO: 2537502 - DNA, 25 bp, Homo sapien
cccggcctgttatggactactatga

SEQ ID NO: 2537503 - DNA, 25 bp, Homo sapien
tgttctggccgctcatttcaattgg

SEQ ID NO: 2537504 - DNA, 25 bp, Homo sapien
tttcgcccgtgttctgaatactgat

SEQ ID NO: 2537505 - DNA, 25 bp, Homo sapien
tttcaattggtgcattatttcgccc

SEQ ID NO: 2537506 - DNA, 25 bp, Homo sapien
aatactgatacccataaaagctgta

SEQ ID NO: 2537507 - DNA, 25 bp, Homo sapien
gattcttcttcaacccggaactgaa

SEQ ID NO: 2537508 - DNA, 25 bp, Homo sapien
tcaagatcacctttggtaattgatt

SEQ ID NO: 2537509 - DNA, 25 bp, Homo sapien
cacctttggtaattgattcttcttc

SEQ ID NO: 2537510 - DNA, 25 bp, Homo sapien
ttgattcttcttcaacccggaactg

SEQ ID NO: 2537511 - DNA, 25 bp, Homo sapien
cattgttcgcagctggtccattttg

SEQ ID NO: 2537512 - DNA, 25 bp, Homo sapien
tgttcgcagctggtccattttggct

SEQ ID NO: 2537513 - DNA, 25 bp, Homo sapien
ccaccattgttcgcagctggtccat

SEQ ID NO: 2537514 - DNA, 25 bp, Homo sapien
caccattgttcgcagctggtccatt

SEQ ID NO: 2537515 - DNA, 25 bp, Homo sapien
gcacagcaaagaaatgtacacccat

SEQ ID NO: 2537516 - DNA, 25 bp, Homo sapien
tcaagtctagctcctcggtgccaag

SEQ ID NO: 2537517 - DNA, 25 bp, Homo sapien
tctccgcaacaaggtccagacttca

SEQ ID NO: 2537518 - DNA, 25 bp, Homo sapien
catggaaactggcaccccagactgt

SEQ ID NO: 2537519 - DNA, 25 bp, Homo sapien
agagctagctcctgctctatctccc

SEQ ID NO: 2537520 - DNA, 25 bp, Homo sapien
agggcagtggtaccggagatcttcc

SEQ ID NO: 2537521 - DNA, 25 bp, Homo sapien
ctggtcatgtccgtcccgggccaga

SEQ ID NO: 2537522 - DNA, 25 bp, Homo sapien
cggagatcttcctggcgtaacggga

SEQ ID NO: 2537523 - DNA, 25 bp, Homo sapien
tgctgtcagaaaagcgagggaggcg

SEQ ID NO: 2537524 - DNA, 25 bp, Homo sapien
aaatgaagggcgatgatgctgtcag

SEQ ID NO: 2537525 - DNA, 25 bp, Homo sapien
gaaatgaagggcgatgatgctgtca

SEQ ID NO: 2537526 - DNA, 25 bp, Homo sapien
cgcgatgcatgcatggcgggcatct

SEQ ID NO: 2537527 - DNA, 25 bp, Homo sapien
aatctgaaagggactattaaaagca

SEQ ID NO: 2537528 - DNA, 25 bp, Homo sapien
gcaaaagctgtgagcaacattcagc

SEQ ID NO: 2537529 - DNA, 25 bp, Homo sapien
acagcaaaagctgtgagcaacattc

SEQ ID NO: 2537530 - DNA, 25 bp, Homo sapien
cagcaaaagctgtgagcaacattca

SEQ ID NO: 2537531 - DNA, 25 bp, Homo sapien
aaaagctgtgagcaacattcagcac

SEQ ID NO: 2537532 - DNA, 25 bp, Homo sapien
aggcaggtagtgagaaaggggcctt

SEQ ID NO: 2537533 - DNA, 25 bp, Homo sapien
tcctgtccgactgggcctgctgctc

SEQ ID NO: 2537534 - DNA, 25 bp, Homo sapien
agtcctgtccgactgggcctgctgc

SEQ ID NO: 2537535 - DNA, 25 bp, Homo sapien
tagtcctgtccgactgggcctgctg

SEQ ID NO: 2537536 - DNA, 25 bp, Homo sapien
ctgtccgactgggcctgctgctcac

SEQ ID NO: 2537537 - DNA, 25 bp, Homo sapien
tggcggacgtggtcgccatcactcg

SEQ ID NO: 2537538 - DNA, 25 bp, Homo sapien
tcgcctcactgcgttggccttggct

SEQ ID NO: 2537539 - DNA, 25 bp, Homo sapien
tagtggaagggaagccaatcttggt

SEQ ID NO: 2537540 - DNA, 25 bp, Homo sapien
gtaactttgtggacaggagcgaaca

SEQ ID NO: 2537541 - DNA, 25 bp, Homo sapien
tggattcctggaaattctacagcta

SEQ ID NO: 2537542 - DNA, 25 bp, Homo sapien
ggttggattcctggaaattctacag

SEQ ID NO: 2537543 - DNA, 25 bp, Homo sapien
gattcctggaaattctacagctaag

SEQ ID NO: 2537544 - DNA, 25 bp, Homo sapien
gttggattcctggaaattctacagc

SEQ ID NO: 2537545 - DNA, 25 bp, Homo sapien
aagatgttgcacaacgccaaacaaa

SEQ ID NO: 2537546 - DNA, 25 bp, Homo sapien
agatgttgcacaacgccaaacaaac

SEQ ID NO: 2537547 - DNA, 25 bp, Homo sapien
caagatgttgcacaacgccaaacaa

SEQ ID NO: 2537548 - DNA, 25 bp, Homo sapien
gttccagcaacagcgccatcattct

SEQ ID NO: 2537549 - DNA, 25 bp, Homo sapien
caagaaaccggactacaccagcctt

SEQ ID NO: 2537550 - DNA, 25 bp, Homo sapien
gctcatctaactccacgccacacca

SEQ ID NO: 2537551 - DNA, 25 bp, Homo sapien
aaccggactacaccagccttagtgc

SEQ ID NO: 2537552 - DNA, 25 bp, Homo sapien
ttcctgcttcgcctttcggccggaa

SEQ ID NO: 2537553 - DNA, 25 bp, Homo sapien
gaaaaaatggagttgctcctttggc

SEQ ID NO: 2537554 - DNA, 25 bp, Homo sapien
ctcctttggccacatatatgcaaat

SEQ ID NO: 2537555 - DNA, 25 bp, Homo sapien
ttgctcctttggccacatatatgca

SEQ ID NO: 2537556 - DNA, 25 bp, Homo sapien
cgccaaaatgacgaacacaaagcga

SEQ ID NO: 2537557 - DNA, 25 bp, Homo sapien
cactggcctggtgcaaactgggttt

SEQ ID NO: 2537558 - DNA, 25 bp, Homo sapien
aagtgcacagcggtgaagtagctcg

SEQ ID NO: 2537559 - DNA, 25 bp, Homo sapien
tcggaggcgtagctgaaggttcctt

SEQ ID NO: 2537560 - DNA, 25 bp, Homo sapien
tgccctttaaaggttcacactggaa

SEQ ID NO: 2537561 - DNA, 25 bp, Homo sapien
tccgcaaactggtagttgaggttta

SEQ ID NO: 2537562 - DNA, 25 bp, Homo sapien
taaactccgcaaactggtagttgag

SEQ ID NO: 2537563 - DNA, 25 bp, Homo sapien
aatgctgctaaactccgcaaactgg

SEQ ID NO: 2537564 - DNA, 25 bp, Homo sapien
catcttcaatgctgctaaactccgc

SEQ ID NO: 2537565 - DNA, 25 bp, Homo sapien
gatcttggtgggggccttaagccca

SEQ ID NO: 2537566 - DNA, 25 bp, Homo sapien
ggccttaagcccacttggctttagc

SEQ ID NO: 2537567 - DNA, 25 bp, Homo sapien
ccttaagcccacttggctttagcat

SEQ ID NO: 2537568 - DNA, 25 bp, Homo sapien
aggcttcaggatcttggtgggggcc

SEQ ID NO: 2537569 - DNA, 25 bp, Homo sapien
caactgtgggttctatagtgaagtc

SEQ ID NO: 2537570 - DNA, 25 bp, Homo sapien
tgtgggttctatagtgaagtcagtc

SEQ ID NO: 2537571 - DNA, 25 bp, Homo sapien
tgggttctatagtgaagtcagtctc

SEQ ID NO: 2537572 - DNA, 25 bp, Homo sapien
tacaactgtgggttctatagtgaag

SEQ ID NO: 2537573 - DNA, 25 bp, Homo sapien
gacatgaaggcaaagtagcgctgac

SEQ ID NO: 2537574 - DNA, 25 bp, Homo sapien
tgctgcagcgacgacactggatgct

SEQ ID NO: 2537575 - DNA, 25 bp, Homo sapien
gcaaatctccccaggatcttgtgaa

SEQ ID NO: 2537576 - DNA, 25 bp, Homo sapien
cgcacacggccgatggtaattttta

SEQ ID NO: 2537577 - DNA, 25 bp, Homo sapien
tttccaagtcttgtggtcttcaggt

SEQ ID NO: 2537578 - DNA, 25 bp, Homo sapien
tggacataaatcacctacacaactg

SEQ ID NO: 2537579 - DNA, 25 bp, Homo sapien
gaggttcaacttctcaatgatatgg

SEQ ID NO: 2537580 - DNA, 25 bp, Homo sapien
tcaggtgctgaaacttggctcaagg

SEQ ID NO: 2537581 - DNA, 25 bp, Homo sapien
ccacactagaaatctctcaagggaa

SEQ ID NO: 2537582 - DNA, 25 bp, Homo sapien
ctatatgacagacatctaagcccaa

SEQ ID NO: 2537583 - DNA, 25 bp, Homo sapien
cagctggtgcttgctacagatgaca

SEQ ID NO: 2537584 - DNA, 25 bp, Homo sapien
gaggtatatccaataccaaaccaaa

SEQ ID NO: 2537585 - DNA, 25 bp, Homo sapien
catggtgtctgtagaatcggggcag

SEQ ID NO: 2537586 - DNA, 25 bp, Homo sapien
tcatggtgtctgtagaatcggggca

SEQ ID NO: 2537587 - DNA, 25 bp, Homo sapien
ctcatggtgtctgtagaatcggggc

SEQ ID NO: 2537588 - DNA, 25 bp, Homo sapien
agctgcactcgcagacttcggagcc

SEQ ID NO: 2537589 - DNA, 25 bp, Homo sapien
ttctaaaatgctgtatgtccatgaa

SEQ ID NO: 2537590 - DNA, 25 bp, Homo sapien
gctgcactcgcagacttcggagccc

SEQ ID NO: 2537591 - DNA, 25 bp, Homo sapien
gagcccccacctaattctaaaatgc

SEQ ID NO: 2537592 - DNA, 25 bp, Homo sapien
caagtcaaacttgagagagaaattc

SEQ ID NO: 2537593 - DNA, 25 bp, Homo sapien
taataacagaaggtcaggggagaga

SEQ ID NO: 2537594 - DNA, 25 bp, Homo sapien
gagagacgttctgagagcaacggaa

SEQ ID NO: 2537595 - DNA, 25 bp, Homo sapien
gagagcaacggaaatctatcttaag

SEQ ID NO: 2537596 - DNA, 25 bp, Homo sapien
aaaatgtaatcaagggctgggcacg

SEQ ID NO: 2537597 - DNA, 25 bp, Homo sapien
tcatgcctgcccaagtggaaggatc

SEQ ID NO: 2537598 - DNA, 25 bp, Homo sapien
tggctcatgcctgcccaagtggaag

SEQ ID NO: 2537599 - DNA, 25 bp, Homo sapien
ttcaaaatgtaatcaagggctgggc

SEQ ID NO: 2537600 - DNA, 25 bp, Homo sapien
tatattcctactacttagcacgcag

SEQ ID NO: 2537601 - DNA, 25 bp, Homo sapien
tttgcacagctcagtctgagtgcag

SEQ ID NO: 2537602 - DNA, 25 bp, Homo sapien
gcaactgcctgcaattatgaatgcc

SEQ ID NO: 2537603 - DNA, 25 bp, Homo sapien
gaactctgagctctgatgcaactgc

SEQ ID NO: 2537604 - DNA, 25 bp, Homo sapien
cagtctaggactaaaaccccaatct

SEQ ID NO: 2537605 - DNA, 25 bp, Homo sapien
tctaggactaaaaccccaatctcca

SEQ ID NO: 2537606 - DNA, 25 bp, Homo sapien
aagtctaaataggtcccttcctgct

SEQ ID NO: 2537607 - DNA, 25 bp, Homo sapien
tttggatgatttgcacaccctgaac

SEQ ID NO: 2537608 - DNA, 25 bp, Homo sapien
caagctacgtatccctttcaacaga

SEQ ID NO: 2537609 - DNA, 25 bp, Homo sapien
ggtttcatgtaataaagacacccac

SEQ ID NO: 2537610 - DNA, 25 bp, Homo sapien
aaggctatagtgagttataattgtg

SEQ ID NO: 2537611 - DNA, 25 bp, Homo sapien
caaggctatagtgagttataattgt

SEQ ID NO: 2537612 - DNA, 25 bp, Homo sapien
aggctatagtgagttataattgtgc

SEQ ID NO: 2537613 - DNA, 25 bp, Homo sapien
gtaataacgaagaaccaggtgccca

SEQ ID NO: 2537614 - DNA, 25 bp, Homo sapien
aaaactagcccggtgccgtggtgtg

SEQ ID NO: 2537615 - DNA, 25 bp, Homo sapien
tgtgaaaggttcaaaggtgcctacc

SEQ ID NO: 2537616 - DNA, 25 bp, Homo sapien
tggctttcgaatcccagcagacagc

SEQ ID NO: 2537617 - DNA, 25 bp, Homo sapien
ggaggccgggccagggtgccctcca

SEQ ID NO: 2537618 - DNA, 25 bp, Homo sapien
tgagaggaaaacaaaagccggggca

SEQ ID NO: 2537619 - DNA, 25 bp, Homo sapien
gaggccgggccagggtgccctccat

SEQ ID NO: 2537620 - DNA, 25 bp, Homo sapien
cagcgggggaggccgggccagggtg

SEQ ID NO: 2537621 - DNA, 25 bp, Homo sapien
ctcctcggacgccgccggtcgccgc

SEQ ID NO: 2537622 - DNA, 25 bp, Homo sapien
tcctcggacgccgccggtcgccgcc

SEQ ID NO: 2537623 - DNA, 25 bp, Homo sapien
gacctaaaccacagtttcagctcta

SEQ ID NO: 2537624 - DNA, 25 bp, Homo sapien
gatgtaatggcattccacagaaaga

SEQ ID NO: 2537625 - DNA, 25 bp, Homo sapien
ttatacaaaggctagctgcatgcca

SEQ ID NO: 2537626 - DNA, 25 bp, Homo sapien
gataacactgcctgagactaacaat

SEQ ID NO: 2537627 - DNA, 25 bp, Homo sapien
tgattttacctgtgaatcacttttt

SEQ ID NO: 2537628 - DNA, 25 bp, Homo sapien
actgattttacctgtgaatcacttt

SEQ ID NO: 2537629 - DNA, 25 bp, Homo sapien
tgtgaatcacttttttgtattcaaa

SEQ ID NO: 2537630 - DNA, 25 bp, Homo sapien
gaatcacttttttgtattcaaagtc

SEQ ID NO: 2537631 - DNA, 25 bp, Homo sapien
catcactctcgacggatagtcacaa

SEQ ID NO: 2537632 - DNA, 25 bp, Homo sapien
tggaacatgaaccttggatagattt

SEQ ID NO: 2537633 - DNA, 25 bp, Homo sapien
tagctctcagtgctaagtcaagcca

SEQ ID NO: 2537634 - DNA, 25 bp, Homo sapien
taaaatatactgaactagtgagctc

SEQ ID NO: 2537635 - DNA, 25 bp, Homo sapien
ccagtagattctgccatattctcaa

SEQ ID NO: 2537636 - DNA, 25 bp, Homo sapien
tatcctgaggtacattccagtagat

SEQ ID NO: 2537637 - DNA, 25 bp, Homo sapien
gagttctttaacaagcttcttatcc

SEQ ID NO: 2537638 - DNA, 25 bp, Homo sapien
tcaaattcaaatggcgtgattccag

SEQ ID NO: 2537639 - DNA, 25 bp, Homo sapien
gtcacagtttggtacgacactgcca

SEQ ID NO: 2537640 - DNA, 25 bp, Homo sapien
caccttcagtgtttaccggagccaa

SEQ ID NO: 2537641 - DNA, 25 bp, Homo sapien
gatgtcacctcagagtctggactgg

SEQ ID NO: 2537642 - DNA, 25 bp, Homo sapien
aaaaatctctggtacctcaggctca

SEQ ID NO: 2537643 - DNA, 25 bp, Homo sapien
tgtgtccacaggaacgtcggagtcg

SEQ ID NO: 2537644 - DNA, 25 bp, Homo sapien
catttggacaaggtgatgaggcaac

SEQ ID NO: 2537645 - DNA, 25 bp, Homo sapien
gaattgccagttaaaggtgtgtcca

SEQ ID NO: 2537646 - DNA, 25 bp, Homo sapien
tgtttacgctctcggcctgctcaag

SEQ ID NO: 2537647 - DNA, 25 bp, Homo sapien
gagtgtcaggaggtaatggtggttg

SEQ ID NO: 2537648 - DNA, 25 bp, Homo sapien
tttcgctgctctgagaaccatgtgg

SEQ ID NO: 2537649 - DNA, 25 bp, Homo sapien
gctctgagaaccatgtggtacctcc

SEQ ID NO: 2537650 - DNA, 25 bp, Homo sapien
aactgaaaactttcgctgctctgag

SEQ ID NO: 2537651 - DNA, 25 bp, Homo sapien
aagacctcttgttgccagacttcac

SEQ ID NO: 2537652 - DNA, 25 bp, Homo sapien
ggagatcccgctgagttgctttcat

SEQ ID NO: 2537653 - DNA, 25 bp, Homo sapien
tgaatcgagctccatgtcggcggga

SEQ ID NO: 2537654 - DNA, 25 bp, Homo sapien
ctttggactacctgggctagagtga

SEQ ID NO: 2537655 - DNA, 25 bp, Homo sapien
cacaatctcgcagacacaacaacat

SEQ ID NO: 2537656 - DNA, 25 bp, Homo sapien
ttatagagcacacccttaaaatcta

SEQ ID NO: 2537657 - DNA, 25 bp, Homo sapien
gcaagaaaaggctgtaagacgctaa

SEQ ID NO: 2537658 - DNA, 25 bp, Homo sapien
aataaattacacaatctcgcagaca

SEQ ID NO: 2537659 - DNA, 25 bp, Homo sapien
caaacacatccttctgctgacatgc

SEQ ID NO: 2537660 - DNA, 25 bp, Homo sapien
cattggtatggaaccaaagatcctc

SEQ ID NO: 2537661 - DNA, 25 bp, Homo sapien
gaagttagaagtaaggtaattggca

SEQ ID NO: 2537662 - DNA, 25 bp, Homo sapien
ctgcattggtatggaaccaaagatc

SEQ ID NO: 2537663 - DNA, 25 bp, Homo sapien
gactacctgacacaatcacttggcc

SEQ ID NO: 2537664 - DNA, 25 bp, Homo sapien
caaaggaggtacagtggagatctca

SEQ ID NO: 2537665 - DNA, 25 bp, Homo sapien
gactgaatactaaaagactacctga

SEQ ID NO: 2537666 - DNA, 25 bp, Homo sapien
gcctgcaaaataattaagactgaat

SEQ ID NO: 2537667 - DNA, 25 bp, Homo sapien
gccaacaagttaatattttgaccaa

SEQ ID NO: 2537668 - DNA, 25 bp, Homo sapien
tctttaacataataatatcacatca

SEQ ID NO: 2537669 - DNA, 25 bp, Homo sapien
tatcacatcacatgataatttaaaa

SEQ ID NO: 2537670 - DNA, 25 bp, Homo sapien
ccactatgcctagccaacaagttaa

SEQ ID NO: 2537671 - DNA, 25 bp, Homo sapien
ccaggatagttgaccaattttgaga

SEQ ID NO: 2537672 - DNA, 25 bp, Homo sapien
agtagatatattaaaaccaggatag

SEQ ID NO: 2537673 - DNA, 25 bp, Homo sapien
tgaccaattttgagagatcgtaagt

SEQ ID NO: 2537674 - DNA, 25 bp, Homo sapien
tgagagatcgtaagtgacactttta

SEQ ID NO: 2537675 - DNA, 25 bp, Homo sapien
agctggtactacatgaacgcacaac

SEQ ID NO: 2537676 - DNA, 25 bp, Homo sapien
ttcatgtatgttgcagggagtccac

SEQ ID NO: 2537677 - DNA, 25 bp, Homo sapien
gcacaaccacaccagggtaggctgt

SEQ ID NO: 2537678 - DNA, 25 bp, Homo sapien
ctgtgcccggctgaaacctgctttt

SEQ ID NO: 2537679 - DNA, 25 bp, Homo sapien
ccgatagataaaaggtggaagactc

SEQ ID NO: 2537680 - DNA, 25 bp, Homo sapien
ccctagctggcgcatccgatagata

SEQ ID NO: 2537681 - DNA, 25 bp, Homo sapien
tttccatcatagagtgcaagccccg

SEQ ID NO: 2537682 - DNA, 25 bp, Homo sapien
gcctctttgagccaccctggtgggt

SEQ ID NO: 2537683 - DNA, 25 bp, Homo sapien
gtatcgctgctggaaattctgattg

SEQ ID NO: 2537684 - DNA, 25 bp, Homo sapien
tacttcttctgcgtggtatcgctgc

SEQ ID NO: 2537685 - DNA, 25 bp, Homo sapien
cacaggcatccatatactcttttct

SEQ ID NO: 2537686 - DNA, 25 bp, Homo sapien
cacttattcgagcagcattccgagg

SEQ ID NO: 2537687 - DNA, 25 bp, Homo sapien
agttttaatgtataacgaacaagtg

SEQ ID NO: 2537688 - DNA, 25 bp, Homo sapien
tttaatgtataacgaacaagtgtaa

SEQ ID NO: 2537689 - DNA, 25 bp, Homo sapien
cctattatcataaattaaatcaagt

SEQ ID NO: 2537690 - DNA, 25 bp, Homo sapien
gataaactctacaatttaattctca

SEQ ID NO: 2537691 - DNA, 25 bp, Homo sapien
cattgggcaatctttcatttggtgt

SEQ ID NO: 2537692 - DNA, 25 bp, Homo sapien
tcttcagaaccacaattgaaacagt

SEQ ID NO: 2537693 - DNA, 25 bp, Homo sapien
ctttcatttggtgttcttcagaacc

SEQ ID NO: 2537694 - DNA, 25 bp, Homo sapien
cacaattgaaacagtgaggctttgg

SEQ ID NO: 2537695 - DNA, 25 bp, Homo sapien
gtatttcttgcccttctagagaaac

SEQ ID NO: 2537696 - DNA, 25 bp, Homo sapien
ttgcccttctagagaaacaatgtgg

SEQ ID NO: 2537697 - DNA, 25 bp, Homo sapien
ttcttgcccttctagagaaacaatg

SEQ ID NO: 2537698 - DNA, 25 bp, Homo sapien
ttgtatttcttgcccttctagagaa

SEQ ID NO: 2537699 - DNA, 25 bp, Homo sapien
ggtgaacttagtggcaagatgcata

SEQ ID NO: 2537700 - DNA, 25 bp, Homo sapien
ttattaaggaatagttatcatggtc

SEQ ID NO: 2537701 - DNA, 25 bp, Homo sapien
aaggaatagttatcatggtctgcaa

SEQ ID NO: 2537702 - DNA, 25 bp, Homo sapien
acttagtggcaagatgcataaaaga

SEQ ID NO: 2537703 - DNA, 25 bp, Homo sapien
ttttcatttagaagcggttgcccca

SEQ ID NO: 2537704 - DNA, 25 bp, Homo sapien
gtatttcccatccttcggaaagctg

SEQ ID NO: 2537705 - DNA, 25 bp, Homo sapien
attagtaaaatacaggacacttcct

SEQ ID NO: 2537706 - DNA, 25 bp, Homo sapien
catccttcggaaagctgagggtttt

SEQ ID NO: 2537707 - DNA, 25 bp, Homo sapien
taagtagaaactacatcgtcagttc

SEQ ID NO: 2537708 - DNA, 25 bp, Homo sapien
tattggatcatgactatcagctgca

SEQ ID NO: 2537709 - DNA, 25 bp, Homo sapien
acagacaagttggaaaagtggtaca

SEQ ID NO: 2537710 - DNA, 25 bp, Homo sapien
gcaagacatgcagaccctttagtta

SEQ ID NO: 2537711 - DNA, 25 bp, Homo sapien
cagtctcagtaccagtttctctcac

SEQ ID NO: 2537712 - DNA, 25 bp, Homo sapien
tccacgttctaagcacttctcagca

SEQ ID NO: 2537713 - DNA, 25 bp, Homo sapien
gacgacattcttactggcactcggg

SEQ ID NO: 2537714 - DNA, 25 bp, Homo sapien
gactcttttgctctcatattctgcg

SEQ ID NO: 2537715 - DNA, 25 bp, Homo sapien
gagatgcgacatcctttgtaaattt

SEQ ID NO: 2537716 - DNA, 25 bp, Homo sapien
aacaacctttatcctatttgtagag

SEQ ID NO: 2537717 - DNA, 25 bp, Homo sapien
tgaactttctaaaggttgagttgaa

SEQ ID NO: 2537718 - DNA, 25 bp, Homo sapien
ctgccacttggcactttaaagggtg

SEQ ID NO: 2537719 - DNA, 25 bp, Homo sapien
tcaaagcaatttccgtgactcagtc

SEQ ID NO: 2537720 - DNA, 25 bp, Homo sapien
ggttcaaagcaatttccgtgactca

SEQ ID NO: 2537721 - DNA, 25 bp, Homo sapien
aaagcaatttccgtgactcagtctc

SEQ ID NO: 2537722 - DNA, 25 bp, Homo sapien
gcaatttccgtgactcagtctcccg

SEQ ID NO: 2537723 - DNA, 25 bp, Homo sapien
ggcacaggactcttccactttgtgg

SEQ ID NO: 2537724 - DNA, 25 bp, Homo sapien
acaggactcttccactttgtggtcc

SEQ ID NO: 2537725 - DNA, 25 bp, Homo sapien
ttccactttgtggtcctcctctagc

SEQ ID NO: 2537726 - DNA, 25 bp, Homo sapien
ggactcttccactttgtggtcctcc

SEQ ID NO: 2537727 - DNA, 25 bp, Homo sapien
tacaaattcctctatttcttgatga

SEQ ID NO: 2537728 - DNA, 25 bp, Homo sapien
gctgttcctcaaatctttttactaa

SEQ ID NO: 2537729 - DNA, 25 bp, Homo sapien
ttttctgctgttcctcaaatctttt

SEQ ID NO: 2537730 - DNA, 25 bp, Homo sapien
ttactaaatttgatacaaattcctc

SEQ ID NO: 2537731 - DNA, 25 bp, Homo sapien
tgaatagaatctgtaatataggtcc

SEQ ID NO: 2537732 - DNA, 25 bp, Homo sapien
tctgtaatataggtccatctaactt

SEQ ID NO: 2537733 - DNA, 25 bp, Homo sapien
tagaatctgtaatataggtccatct

SEQ ID NO: 2537734 - DNA, 25 bp, Homo sapien
gtaatataggtccatctaacttagt

SEQ ID NO: 2537735 - DNA, 25 bp, Homo sapien
ctcggtcgagtcagaatgttcaatt

SEQ ID NO: 2537736 - DNA, 25 bp, Homo sapien
cggtcgagtcagaatgttcaatttt

SEQ ID NO: 2537737 - DNA, 25 bp, Homo sapien
tcggtcgagtcagaatgttcaattt

SEQ ID NO: 2537738 - DNA, 25 bp, Homo sapien
taaagagaatgcagtataacgagct

SEQ ID NO: 2537739 - DNA, 25 bp, Homo sapien
aaactgatatactgactgggcgccg

SEQ ID NO: 2537740 - DNA, 25 bp, Homo sapien
cacggatattttgaggatgacacac

SEQ ID NO: 2537741 - DNA, 25 bp, Homo sapien
tatattctaagacacgatcctgaag

SEQ ID NO: 2537742 - DNA, 25 bp, Homo sapien
cgtggctgcgaaatatgaaacctca

SEQ ID NO: 2537743 - DNA, 25 bp, Homo sapien
ttcagcacagaagcgagctccgagt

SEQ ID NO: 2537744 - DNA, 25 bp, Homo sapien
tacaatctgtcaggtgagcagccta

SEQ ID NO: 2537745 - DNA, 25 bp, Homo sapien
gaccactagcgtttgccccggtata

SEQ ID NO: 2537746 - DNA, 25 bp, Homo sapien
tgacagggcccagcgagaggaaagg

SEQ ID NO: 2537747 - DNA, 25 bp, Homo sapien
ggtgacagggcccagcgagaggaaa

SEQ ID NO: 2537748 - DNA, 25 bp, Homo sapien
ccgggtgacagggcccagcgagagg

SEQ ID NO: 2537749 - DNA, 25 bp, Homo sapien
acagggcccagcgagaggaaaggat

SEQ ID NO: 2537750 - DNA, 25 bp, Homo sapien
ccgtcgtcgtccttgaagcgagtgt

SEQ ID NO: 2537751 - DNA, 25 bp, Homo sapien
gatggtctcctcgcactgccgaagc

SEQ ID NO: 2537752 - DNA, 25 bp, Homo sapien
cgtcgtccttgaagcgagtgtgaac

SEQ ID NO: 2537753 - DNA, 25 bp, Homo sapien
tgccgaagccgctcccgtagctccg

SEQ ID NO: 2537754 - DNA, 25 bp, Homo sapien
gctctagatcgccaaaatacacctc

SEQ ID NO: 2537755 - DNA, 25 bp, Homo sapien
gactcctctgggtggtcgaacggct

SEQ ID NO: 2537756 - DNA, 25 bp, Homo sapien
ggtcgaacggctcgaagagctctag

SEQ ID NO: 2537757 - DNA, 25 bp, Homo sapien
gggcttcggaatcgactcctctggg

SEQ ID NO: 2537758 - DNA, 25 bp, Homo sapien
tctctagagctctggccgcacggag

SEQ ID NO: 2537759 - DNA, 25 bp, Homo sapien
gagccacccgctagggttttctcca

SEQ ID NO: 2537760 - DNA, 25 bp, Homo sapien
tggaaggcggcaccactctctagag

SEQ ID NO: 2537761 - DNA, 25 bp, Homo sapien
ggaagaaggttggaaggcggcacca

SEQ ID NO: 2537762 - DNA, 25 bp, Homo sapien
tctagatgagcaaagtacaggctgt

SEQ ID NO: 2537763 - DNA, 25 bp, Homo sapien
acaggaagcttttgcgtccacactg

SEQ ID NO: 2537764 - DNA, 25 bp, Homo sapien
caatctggctaggtgaagtggatca

SEQ ID NO: 2537765 - DNA, 25 bp, Homo sapien
cactgaaacacggtgaaaagccatt

SEQ ID NO: 2537766 - DNA, 25 bp, Homo sapien
gaagacttcaaagggataatgagca

SEQ ID NO: 2537767 - DNA, 25 bp, Homo sapien
tcaaagggataatgagcaaaaagca

SEQ ID NO: 2537768 - DNA, 25 bp, Homo sapien
tattttatagtctatgctggagaag

SEQ ID NO: 2537769 - DNA, 25 bp, Homo sapien
tagtctatgctggagaagacttcaa

SEQ ID NO: 2537770 - DNA, 25 bp, Homo sapien
taccaagtctgtcccttataatagg

SEQ ID NO: 2537771 - DNA, 25 bp, Homo sapien
tttttgctcaccacggtattgactg

SEQ ID NO: 2537772 - DNA, 25 bp, Homo sapien
taatgcattaatctatctcctgaat

SEQ ID NO: 2537773 - DNA, 25 bp, Homo sapien
gactgtagtatagttaactggcctt

SEQ ID NO: 2537774 - DNA, 25 bp, Homo sapien
aagtacacaagacagcggacacgaa

SEQ ID NO: 2537775 - DNA, 25 bp, Homo sapien
ccacctgcagcttttatatatttga

SEQ ID NO: 2537776 - DNA, 25 bp, Homo sapien
aatattatccttctatagtcctgtc

SEQ ID NO: 2537777 - DNA, 25 bp, Homo sapien
cattaccacccagcttatctgtgct

SEQ ID NO: 2537778 - DNA, 25 bp, Homo sapien
ctagagtgctagctgtttggtgaac

SEQ ID NO: 2537779 - DNA, 25 bp, Homo sapien
tgattacaacactaacaccagtatc

SEQ ID NO: 2537780 - DNA, 25 bp, Homo sapien
attaaagtcaatgcaacacccatgc

SEQ ID NO: 2537781 - DNA, 25 bp, Homo sapien
gacgtgacatcagaacaagaagtct

SEQ ID NO: 2537782 - DNA, 25 bp, Homo sapien
ttcctcgcattgaagatgtgaaacc

SEQ ID NO: 2537783 - DNA, 25 bp, Homo sapien
ttcatactgagcatctaaatttcga

SEQ ID NO: 2537784 - DNA, 25 bp, Homo sapien
actgagcatctaaatttcgaaatac

SEQ ID NO: 2537785 - DNA, 25 bp, Homo sapien
aactgcatccattcctcgcattgaa

SEQ ID NO: 2537786 - DNA, 25 bp, Homo sapien
cttcatcaactgagctacatccagc

SEQ ID NO: 2537787 - DNA, 25 bp, Homo sapien
gcttcagagtcttgtaactttcttc

SEQ ID NO: 2537788 - DNA, 25 bp, Homo sapien
aatacccatcaatttcctaaatttg

SEQ ID NO: 2537789 - DNA, 25 bp, Homo sapien
cttaatacccatcaatttcctaaat

SEQ ID NO: 2537790 - DNA, 25 bp, Homo sapien
gctgccatggctatctgaggtgtta

SEQ ID NO: 2537791 - DNA, 25 bp, Homo sapien
ttcattggattaacagcggctgggt

SEQ ID NO: 2537792 - DNA, 25 bp, Homo sapien
tcttgttcagcaaatttcattggat

SEQ ID NO: 2537793 - DNA, 25 bp, Homo sapien
ctgggttatagtagctaggaacagc

SEQ ID NO: 2537794 - DNA, 25 bp, Homo sapien
gcagcaacattgagaacagaacctc

SEQ ID NO: 2537795 - DNA, 25 bp, Homo sapien
gggcagcaacattgagaacagaacc

SEQ ID NO: 2537796 - DNA, 25 bp, Homo sapien
cagggcagcaacattgagaacagaa

SEQ ID NO: 2537797 - DNA, 25 bp, Homo sapien
caacagggcagcaacattgagaaca

SEQ ID NO: 2537798 - DNA, 25 bp, Homo sapien
ctgcagctatttcttgttgtttttg

SEQ ID NO: 2537799 - DNA, 25 bp, Homo sapien
tctcgctgttcttgtaatttctttg

SEQ ID NO: 2537800 - DNA, 25 bp, Homo sapien
ttccttttctcgctgttcttgtaat

SEQ ID NO: 2537801 - DNA, 25 bp, Homo sapien
ttcaaccatttccttttctcgctgt

SEQ ID NO: 2537802 - DNA, 25 bp, Homo sapien
tataaaaccattatgtatatatctc

SEQ ID NO: 2537803 - DNA, 25 bp, Homo sapien
catgtacagagacaagccaacttcc

SEQ ID NO: 2537804 - DNA, 25 bp, Homo sapien
cagagacaagccaacttccataaaa

SEQ ID NO: 2537805 - DNA, 25 bp, Homo sapien
tatatctctctatatgtgcatgtac

SEQ ID NO: 2537806 - DNA, 25 bp, Homo sapien
gaagcacatcaggttacactgtgtt

SEQ ID NO: 2537807 - DNA, 25 bp, Homo sapien
gggaagcacatcaggttacactgtg

SEQ ID NO: 2537808 - DNA, 25 bp, Homo sapien
ggttacactgtgttaccagcctggg

SEQ ID NO: 2537809 - DNA, 25 bp, Homo sapien
agggaagcacatcaggttacactgt

SEQ ID NO: 2537810 - DNA, 25 bp, Homo sapien
tatctgttaattgccatcttcaaaa

SEQ ID NO: 2537811 - DNA, 25 bp, Homo sapien
gtgtgaccgattgcacccggccgaa

SEQ ID NO: 2537812 - DNA, 25 bp, Homo sapien
cacccggccgaaacagcagaaaatt

SEQ ID NO: 2537813 - DNA, 25 bp, Homo sapien
aagttctcccatagttaccaggaat

SEQ ID NO: 2537814 - DNA, 25 bp, Homo sapien
catcttatccacacaattgagcatt

SEQ ID NO: 2537815 - DNA, 25 bp, Homo sapien
tatgccaccatattactaaagtatg

SEQ ID NO: 2537816 - DNA, 25 bp, Homo sapien
aaaacagaaattgtagacatctcaa

SEQ ID NO: 2537817 - DNA, 25 bp, Homo sapien
tagttgtgcaaatgtttaggatgag

SEQ ID NO: 2537818 - DNA, 25 bp, Homo sapien
tagctaaagcttcctgtgcatccat

SEQ ID NO: 2537819 - DNA, 25 bp, Homo sapien
cttctagctaaagcttcctgtgcat

SEQ ID NO: 2537820 - DNA, 25 bp, Homo sapien
tctagctaaagcttcctgtgcatcc

SEQ ID NO: 2537821 - DNA, 25 bp, Homo sapien
ctagctaaagcttcctgtgcatcca

SEQ ID NO: 2537822 - DNA, 25 bp, Homo sapien
tccggcttaaacttctgctaaatct

SEQ ID NO: 2537823 - DNA, 25 bp, Homo sapien
cttggagtccggcttaaacttctgc

SEQ ID NO: 2537824 - DNA, 25 bp, Homo sapien
aacttctgctaaatcttctcggctt

SEQ ID NO: 2537825 - DNA, 25 bp, Homo sapien
aatcttctcggcttttcaattctct

SEQ ID NO: 2537826 - DNA, 25 bp, Homo sapien
gtacacaggtctacaagcatgcccc

SEQ ID NO: 2537827 - DNA, 25 bp, Homo sapien
catatgtcaaattatggccaagtca

SEQ ID NO: 2537828 - DNA, 25 bp, Homo sapien
cagtgttacagctgaactcattgga

SEQ ID NO: 2537829 - DNA, 25 bp, Homo sapien
ggccaagtcataactattttgttaa

SEQ ID NO: 2537830 - DNA, 25 bp, Homo sapien
tcctgcttctagtcctatgcctgtg

SEQ ID NO: 2537831 - DNA, 25 bp, Homo sapien
tgatccgccgttttctttccctgct

SEQ ID NO: 2537832 - DNA, 25 bp, Homo sapien
gctccctgcttctactacgatggcg

SEQ ID NO: 2537833 - DNA, 25 bp, Homo sapien
tcttgagcgggaacgagacctgatc

SEQ ID NO: 2537834 - DNA, 25 bp, Homo sapien
tctttgcgtttgtgcctgtcctcac

SEQ ID NO: 2537835 - DNA, 25 bp, Homo sapien
ctttcacgagacctagatcttgagt

SEQ ID NO: 2537836 - DNA, 25 bp, Homo sapien
gacttctgcctcttgatgactttct

SEQ ID NO: 2537837 - DNA, 25 bp, Homo sapien
cgagacctagatcttgagtgacttc

SEQ ID NO: 2537838 - DNA, 25 bp, Homo sapien
tcagatgaatttagtcgctctcttc

SEQ ID NO: 2537839 - DNA, 25 bp, Homo sapien
cagacttatgtttcttagaggattt

SEQ ID NO: 2537840 - DNA, 25 bp, Homo sapien
gatgaatttagtcgctctcttcctt

SEQ ID NO: 2537841 - DNA, 25 bp, Homo sapien
ctttgtcattatgttcctcagactt

SEQ ID NO: 2537842 - DNA, 25 bp, Homo sapien
taaccttaggagtgtgtggcaaata

SEQ ID NO: 2537843 - DNA, 25 bp, Homo sapien
gtgatgcaacattagtaaccttagg

SEQ ID NO: 2537844 - DNA, 25 bp, Homo sapien
aaaagatctagtttcacatcaccca

SEQ ID NO: 2537845 - DNA, 25 bp, Homo sapien
catcacccaaatgttgcagatgtaa

SEQ ID NO: 2537846 - DNA, 25 bp, Homo sapien
tgcagtatcccaataggcttagagg

SEQ ID NO: 2537847 - DNA, 25 bp, Homo sapien
ccttttacagttatactgcctgcta

SEQ ID NO: 2537848 - DNA, 25 bp, Homo sapien
ggcttagaggagtattacacttcat

SEQ ID NO: 2537849 - DNA, 25 bp, Homo sapien
tacatcctctaaaagacagctcttg

SEQ ID NO: 2537850 - DNA, 25 bp, Homo sapien
aactaggtataacaatccacatgcc

SEQ ID NO: 2537851 - DNA, 25 bp, Homo sapien
tacatgggtgagctgaaccttcccc

SEQ ID NO: 2537852 - DNA, 25 bp, Homo sapien
tacatactacagttccctacaggaa

SEQ ID NO: 2537853 - DNA, 25 bp, Homo sapien
tcccaaaaggccatagcatgtttct

SEQ ID NO: 2537854 - DNA, 25 bp, Homo sapien
ttttggaacatgcatgatgatttat

SEQ ID NO: 2537855 - DNA, 25 bp, Homo sapien
attttggaacatgcatgatgattta

SEQ ID NO: 2537856 - DNA, 25 bp, Homo sapien
tggttttgctataacgaggcagact

SEQ ID NO: 2537857 - DNA, 25 bp, Homo sapien
ctgaaaatgatcatagtacataatt

SEQ ID NO: 2537858 - DNA, 25 bp, Homo sapien
tcaaaccagtttttcaaacataaca

SEQ ID NO: 2537859 - DNA, 25 bp, Homo sapien
gccagttctctataggagcttagaa

SEQ ID NO: 2537860 - DNA, 25 bp, Homo sapien
tctgcagcgtcttcagttcagtctc

SEQ ID NO: 2537861 - DNA, 25 bp, Homo sapien
gctatctgagtctgcagcgtcttca

SEQ ID NO: 2537862 - DNA, 25 bp, Homo sapien
ggcttattattttgctatctgagtc

SEQ ID NO: 2537863 - DNA, 25 bp, Homo sapien
agttcagtctcttcgcgcataagca

SEQ ID NO: 2537864 - DNA, 25 bp, Homo sapien
gactcgggacctcagattaatggaa

SEQ ID NO: 2537865 - DNA, 25 bp, Homo sapien
tatcgttcataaggaaaaagcagcg

SEQ ID NO: 2537866 - DNA, 25 bp, Homo sapien
caggtgggtgaacaagtaactcctt

SEQ ID NO: 2537867 - DNA, 25 bp, Homo sapien
aaaagcagcgcacagatatctaggg

SEQ ID NO: 2537868 - DNA, 25 bp, Homo sapien
ctaccagacactttataagtatttt

SEQ ID NO: 2537869 - DNA, 25 bp, Homo sapien
cttgacaacgtcttatattcataca

SEQ ID NO: 2537870 - DNA, 25 bp, Homo sapien
gcttctgctccggctcctgtgtttt

SEQ ID NO: 2537871 - DNA, 25 bp, Homo sapien
ctctttgcttctgctccggctcctg

SEQ ID NO: 2537872 - DNA, 25 bp, Homo sapien
ttctgctccggctcctgtgttttct

SEQ ID NO: 2537873 - DNA, 25 bp, Homo sapien
tttgcttctgctccggctcctgtgt

SEQ ID NO: 2537874 - DNA, 25 bp, Homo sapien
gggctagtccatctcgctctgtatc

SEQ ID NO: 2537875 - DNA, 25 bp, Homo sapien
tcttatctctatctggtgatgtctt

SEQ ID NO: 2537876 - DNA, 25 bp, Homo sapien
gatacttctgactgctcttttttct

SEQ ID NO: 2537877 - DNA, 25 bp, Homo sapien
cttgaccttgatcgtgatcttgaat

SEQ ID NO: 2537878 - DNA, 25 bp, Homo sapien
cacaatcaataaatcagaatgcctg

SEQ ID NO: 2537879 - DNA, 25 bp, Homo sapien
ccacaatcaataaatcagaatgcct

SEQ ID NO: 2537880 - DNA, 25 bp, Homo sapien
tgctgctgcaaaatatggtctgcct

SEQ ID NO: 2537881 - DNA, 25 bp, Homo sapien
tgtcattaaccctctttaatgaaaa

SEQ ID NO: 2537882 - DNA, 25 bp, Homo sapien
tgcaaaatatggtctgcctctcctc

SEQ ID NO: 2537883 - DNA, 25 bp, Homo sapien
cttggcacagtgctgctgcaaaata

SEQ ID NO: 2537884 - DNA, 25 bp, Homo sapien
gggaatcgatagtcttcagcaggag

SEQ ID NO: 2537885 - DNA, 25 bp, Homo sapien
ttttcacgtataacatcaaacggaa

SEQ ID NO: 2537886 - DNA, 25 bp, Homo sapien
gaatcacattagagaacttcctcct

SEQ ID NO: 2537887 - DNA, 25 bp, Homo sapien
taggaaagttagtccagaaaatgaa

SEQ ID NO: 2537888 - DNA, 25 bp, Homo sapien
gagacagaattccttaactagtggc

SEQ ID NO: 2537889 - DNA, 25 bp, Homo sapien
aaccttctcatggaaaatctagtgc

SEQ ID NO: 2537890 - DNA, 25 bp, Homo sapien
tcagttgcacgacacttttgccaga

SEQ ID NO: 2537891 - DNA, 25 bp, Homo sapien
aaagctggacaacagagaaacctcc

SEQ ID NO: 2537892 - DNA, 25 bp, Homo sapien
tcaaattgattacatcacgggccac

SEQ ID NO: 2537893 - DNA, 25 bp, Homo sapien
tcggaaaccgcgcatcagtcagaat

SEQ ID NO: 2537894 - DNA, 25 bp, Homo sapien
cagtcagaattggtagttccacaac

SEQ ID NO: 2537895 - DNA, 25 bp, Homo sapien
taacgcttctcggacttcaaattga

SEQ ID NO: 2537896 - DNA, 25 bp, Homo sapien
cagccatgatggcgggcgcagaaga

SEQ ID NO: 2537897 - DNA, 25 bp, Homo sapien
gcagccatgatggcgggcgcagaag

SEQ ID NO: 2537898 - DNA, 25 bp, Homo sapien
agccatgatggcgggcgcagaagaa

SEQ ID NO: 2537899 - DNA, 25 bp, Homo sapien
ttgtcgctttcaacagtaccggccg

SEQ ID NO: 2537900 - DNA, 25 bp, Homo sapien
gagcggcgcctccacttgtcgcttt

SEQ ID NO: 2537901 - DNA, 25 bp, Homo sapien
gctccgaagcttcgcctcagactaa

SEQ ID NO: 2537902 - DNA, 25 bp, Homo sapien
gactaaatcgctcgcgcgagagacc

SEQ ID NO: 2537903 - DNA, 25 bp, Homo sapien
cactgtgcctgatttgtaccgcttt

SEQ ID NO: 2537904 - DNA, 25 bp, Homo sapien
ttgtaccgctttaaatgtaccatga

SEQ ID NO: 2537905 - DNA, 25 bp, Homo sapien
agtataatccaacaataagataatt

SEQ ID NO: 2537906 - DNA, 25 bp, Homo sapien
taccatgaatcatgttaaaggcagt

SEQ ID NO: 2537907 - DNA, 25 bp, Homo sapien
tcggttgggcagtttaaggagcatt

SEQ ID NO: 2537908 - DNA, 25 bp, Homo sapien
tccctagaagatatagtgccgttcc

SEQ ID NO: 2537909 - DNA, 25 bp, Homo sapien
taagaaactatgtgtgagcccggtg

SEQ ID NO: 2537910 - DNA, 25 bp, Homo sapien
gagaacagtctagagagaagagtct

SEQ ID NO: 2537911 - DNA, 25 bp, Homo sapien
gccaccatgccgggttaattatttg

SEQ ID NO: 2537912 - DNA, 25 bp, Homo sapien
tgccaccatgccgggttaattattt

SEQ ID NO: 2537913 - DNA, 25 bp, Homo sapien
atgccaccatgccgggttaattatt

SEQ ID NO: 2537914 - DNA, 25 bp, Homo sapien
catgccaccatgccgggttaattat

SEQ ID NO: 2537915 - DNA, 25 bp, Homo sapien
tcaccctggcaagtgcaatggcaca

SEQ ID NO: 2537916 - DNA, 25 bp, Homo sapien
gtcaccctggcaagtgcaatggcac

SEQ ID NO: 2537917 - DNA, 25 bp, Homo sapien
catggcttactgcagactcgaattc

SEQ ID NO: 2537918 - DNA, 25 bp, Homo sapien
ggcttactgcagactcgaattccta

SEQ ID NO: 2537919 - DNA, 25 bp, Homo sapien
aaacaaatatgagtagacccatcag

SEQ ID NO: 2537920 - DNA, 25 bp, Homo sapien
tatgagtagacccatcagttaagca

SEQ ID NO: 2537921 - DNA, 25 bp, Homo sapien
acttagaattgtgtctatcatatag

SEQ ID NO: 2537922 - DNA, 25 bp, Homo sapien
ttactcaggcaatctatatacttag

SEQ ID NO: 2537923 - DNA, 25 bp, Homo sapien
tgcatgtcccttgcaaaaggtcgca

SEQ ID NO: 2537924 - DNA, 25 bp, Homo sapien
acttggacaggcagatgactatgga

SEQ ID NO: 2537925 - DNA, 25 bp, Homo sapien
gatcttgacctgatcggagtcgcca

SEQ ID NO: 2537926 - DNA, 25 bp, Homo sapien
cacatgattcctctgggctgccaag

SEQ ID NO: 2537927 - DNA, 25 bp, Homo sapien
agggaggataaggcaggagaatctc

SEQ ID NO: 2537928 - DNA, 25 bp, Homo sapien
ccgggaggcagaggttgcagtgagc

SEQ ID NO: 2537929 - DNA, 25 bp, Homo sapien
gcagtgagccgagatcgcaccattg

SEQ ID NO: 2537930 - DNA, 25 bp, Homo sapien
ttcaacccgggaggcagaggttgca

SEQ ID NO: 2537931 - DNA, 25 bp, Homo sapien
ctaagaacgtcctgctattgaggct

SEQ ID NO: 2537932 - DNA, 25 bp, Homo sapien
ttgaggctagttgtggcaggaatat

SEQ ID NO: 2537933 - DNA, 25 bp, Homo sapien
tcctgctattgaggctagttgtggc

SEQ ID NO: 2537934 - DNA, 25 bp, Homo sapien
aacgtcctgctattgaggctagttg

SEQ ID NO: 2537935 - DNA, 25 bp, Homo sapien
tagacggcttagcaagaagtcaggg

SEQ ID NO: 2537936 - DNA, 25 bp, Homo sapien
ggaagtgcaaaatcagattggactc

SEQ ID NO: 2537937 - DNA, 25 bp, Homo sapien
actcttggtcgagggattttccctg

SEQ ID NO: 2537938 - DNA, 25 bp, Homo sapien
ctcctggtgtagacggcttagcaag

SEQ ID NO: 2537939 - DNA, 25 bp, Homo sapien
taagacccgctgaatgtgaacttcc

SEQ ID NO: 2537940 - DNA, 25 bp, Homo sapien
agataagacccgctgaatgtgaact

SEQ ID NO: 2537941 - DNA, 25 bp, Homo sapien
ttctagataagacccgctgaatgtg

SEQ ID NO: 2537942 - DNA, 25 bp, Homo sapien
ctctttctagataagacccgctgaa

SEQ ID NO: 2537943 - DNA, 25 bp, Homo sapien
gatgctgggagtgtatttcaagacc

SEQ ID NO: 2537944 - DNA, 25 bp, Homo sapien
cttgtaacgcccttgcagagatgct

SEQ ID NO: 2537945 - DNA, 25 bp, Homo sapien
caaggctgcatttacactgtgggaa

SEQ ID NO: 2537946 - DNA, 25 bp, Homo sapien
cataggagacaaagccccatgtgaa

SEQ ID NO: 2537947 - DNA, 25 bp, Homo sapien
aacaagcaggctaaaaccagttggg

SEQ ID NO: 2537948 - DNA, 25 bp, Homo sapien
agtcactaagtctggcctgcattca

SEQ ID NO: 2537949 - DNA, 25 bp, Homo sapien
ggttggctacaataatttttgcagt

SEQ ID NO: 2537950 - DNA, 25 bp, Homo sapien
tctgggttggctacaataatttttg

SEQ ID NO: 2537951 - DNA, 25 bp, Homo sapien
taacagataatattgaggagagttt

SEQ ID NO: 2537952 - DNA, 25 bp, Homo sapien
cagataatattgaggagagtttttt

SEQ ID NO: 2537953 - DNA, 25 bp, Homo sapien
taacttggccgatagcggttcagaa

SEQ ID NO: 2537954 - DNA, 25 bp, Homo sapien
taaggataacttggccgatagcggt

SEQ ID NO: 2537955 - DNA, 25 bp, Homo sapien
acttggccgatagcggttcagaaag

SEQ ID NO: 2537956 - DNA, 25 bp, Homo sapien
gataacttggccgatagcggttcag

SEQ ID NO: 2537957 - DNA, 25 bp, Homo sapien
cctccaaacaagtcccctattcttg

SEQ ID NO: 2537958 - DNA, 25 bp, Homo sapien
cctattcttgatccagttagagcag

SEQ ID NO: 2537959 - DNA, 25 bp, Homo sapien
tgttggaagcacctagaatactcac

SEQ ID NO: 2537960 - DNA, 25 bp, Homo sapien
gaggttgttggaagcacctagaata

SEQ ID NO: 2537961 - DNA, 25 bp, Homo sapien
ccccaggactgtttattgcatttga

SEQ ID NO: 2537962 - DNA, 25 bp, Homo sapien
ccatgcaccatgagttggcaacacc

SEQ ID NO: 2537963 - DNA, 25 bp, Homo sapien
acaggagcgggacatctccccagga

SEQ ID NO: 2537964 - DNA, 25 bp, Homo sapien
tttgaatccatgcaccatgagttgg

SEQ ID NO: 2537965 - DNA, 25 bp, Homo sapien
ttacacccaccggaaacacagatat

SEQ ID NO: 2537966 - DNA, 25 bp, Homo sapien
cacccaccggaaacacagatattaa

SEQ ID NO: 2537967 - DNA, 25 bp, Homo sapien
caggaggaacgtgcacccctctaac

SEQ ID NO: 2537968 - DNA, 25 bp, Homo sapien
tctatcctgaagccgttttaactgc

SEQ ID NO: 2537969 - DNA, 25 bp, Homo sapien
tgaaagatgaattggtccacggaag

SEQ ID NO: 2537970 - DNA, 25 bp, Homo sapien
ctgaaagatgaattggtccacggaa

SEQ ID NO: 2537971 - DNA, 25 bp, Homo sapien
gaaggccaacaagtcacaagtagat

SEQ ID NO: 2537972 - DNA, 25 bp, Homo sapien
ttatccctgctagagctcacaagca

SEQ ID NO: 2537973 - DNA, 25 bp, Homo sapien
cacaagcaggctagatatcacccca

SEQ ID NO: 2537974 - DNA, 25 bp, Homo sapien
ccaggtgacctactggcttgtttaa

SEQ ID NO: 2537975 - DNA, 25 bp, Homo sapien
ctgcgagcgtcagagatgaagcaaa

SEQ ID NO: 2537976 - DNA, 25 bp, Homo sapien
atctgccaccgtttccctaaatcgc

SEQ ID NO: 2537977 - DNA, 25 bp, Homo sapien
accgtttccctaaatcgcattctct

SEQ ID NO: 2537978 - DNA, 25 bp, Homo sapien
gagcgtcagagatgaagcaaaagtt

SEQ ID NO: 2537979 - DNA, 25 bp, Homo sapien
tcttggtgacaatgtcccttcttgg

SEQ ID NO: 2537980 - DNA, 25 bp, Homo sapien
tactcgatgcaacagcccaactgtt

SEQ ID NO: 2537981 - DNA, 25 bp, Homo sapien
ttactcgatgcaacagcccaactgt

SEQ ID NO: 2537982 - DNA, 25 bp, Homo sapien
gaggttgggcccagataagaggggc

SEQ ID NO: 2537983 - DNA, 25 bp, Homo sapien
aggttgggcccagataagaggggct

SEQ ID NO: 2537984 - DNA, 25 bp, Homo sapien
ggttgggcccagataagaggggctc

SEQ ID NO: 2537985 - DNA, 25 bp, Homo sapien
gatgatcagtagaaagtcagccact

SEQ ID NO: 2537986 - DNA, 25 bp, Homo sapien
ccggcggcaacaccttgacaatgaa

SEQ ID NO: 2537987 - DNA, 25 bp, Homo sapien
aatttgcaccgccattctggatcgg

SEQ ID NO: 2537988 - DNA, 25 bp, Homo sapien
tgatgctgccctggcggttcatagc

SEQ ID NO: 2537989 - DNA, 25 bp, Homo sapien
gagcgcctcgcctagtgaatgctcc

SEQ ID NO: 2537990 - DNA, 25 bp, Homo sapien
ccgatggagcgcctcgcctagtgaa

SEQ ID NO: 2537991 - DNA, 25 bp, Homo sapien
gtgagtccgatggagcgcctcgcct

SEQ ID NO: 2537992 - DNA, 25 bp, Homo sapien
gctagtgagtccgatggagcgcctc

SEQ ID NO: 2537993 - DNA, 25 bp, Homo sapien
cgggctaggcctctatacatgatga

SEQ ID NO: 2537994 - DNA, 25 bp, Homo sapien
attaatcagtttcctagtcctggga

SEQ ID NO: 2537995 - DNA, 25 bp, Homo sapien
tgcacctatagtcagccaggaagga

SEQ ID NO: 2537996 - DNA, 25 bp, Homo sapien
cagctgtttcccatatcaggaggtg

SEQ ID NO: 2537997 - DNA, 25 bp, Homo sapien
ccccaggactgtttattgcatttga

SEQ ID NO: 2537998 - DNA, 25 bp, Homo sapien
cctattcttgatccagttagagcag

SEQ ID NO: 2537999 - DNA, 25 bp, Homo sapien
tgttggaagcacctagaatactcac

SEQ ID NO: 2538000 - DNA, 25 bp, Homo sapien
tccatgcaccatgagttggcaacac

SEQ ID NO: 2538001 - DNA, 25 bp, Homo sapien
tagtcggttgagttctggttcccaa

SEQ ID NO: 2538002 - DNA, 25 bp, Homo sapien
tcactatagtcggttgagttctggt

SEQ ID NO: 2538003 - DNA, 25 bp, Homo sapien
acattgttcctcactatagtcggtt

SEQ ID NO: 2538004 - DNA, 25 bp, Homo sapien
tatggcaggccccacgctcatcgtg

SEQ ID NO: 2538005 - DNA, 25 bp, Homo sapien
tgattccctttttaatgcacaaata

SEQ ID NO: 2538006 - DNA, 25 bp, Homo sapien
gtaagtgctcttgcaatcctatctg

SEQ ID NO: 2538007 - DNA, 25 bp, Homo sapien
ctgtactatccttccaaattatttt

SEQ ID NO: 2538008 - DNA, 25 bp, Homo sapien
acaaatatgaagagcaatattcacc

SEQ ID NO: 2538009 - DNA, 25 bp, Homo sapien
tttgcagtgtggagtagttttctac

SEQ ID NO: 2538010 - DNA, 25 bp, Homo sapien
agacacaggtgtaatttctgcttag

SEQ ID NO: 2538011 - DNA, 25 bp, Homo sapien
agttaacaacccataaaggtctctg

SEQ ID NO: 2538012 - DNA, 25 bp, Homo sapien
tgtgtctctttcttactttgcagtg

SEQ ID NO: 2538013 - DNA, 25 bp, Homo sapien
taacccagatatagcaacgccagac

SEQ ID NO: 2538014 - DNA, 25 bp, Homo sapien
cataacccagatatagcaacgccag

SEQ ID NO: 2538015 - DNA, 25 bp, Homo sapien
ccataacccagatatagcaacgcca

SEQ ID NO: 2538016 - DNA, 25 bp, Homo sapien
ataacccagatatagcaacgccaga

SEQ ID NO: 2538017 - DNA, 25 bp, Homo sapien
ttctatcctgaagccgttttaactg

SEQ ID NO: 2538018 - DNA, 25 bp, Homo sapien
gtacagaaacacaagcgaaggaacc

SEQ ID NO: 2538019 - DNA, 25 bp, Homo sapien
tattgaaatggtagatttttggtaa

SEQ ID NO: 2538020 - DNA, 25 bp, Homo sapien
gaaacacaagcgaaggaaccaggag

SEQ ID NO: 2538021 - DNA, 25 bp, Homo sapien
acacccaccggaaacacagatacta

SEQ ID NO: 2538022 - DNA, 25 bp, Homo sapien
tacacccaccggaaacacagatact

SEQ ID NO: 2538023 - DNA, 25 bp, Homo sapien
cacccaccggaaacacagatactaa

SEQ ID NO: 2538024 - DNA, 25 bp, Homo sapien
ttacacccaccggaaacacagatac

SEQ ID NO: 2538025 - DNA, 25 bp, Homo sapien
ttatccctgctagagctcacaagca

SEQ ID NO: 2538026 - DNA, 25 bp, Homo sapien
ggaagaaggccaacaagtcacaagt

SEQ ID NO: 2538027 - DNA, 25 bp, Homo sapien
aattggtccacggaagccaggtgac

SEQ ID NO: 2538028 - DNA, 25 bp, Homo sapien
cacaagcaggctagatatcacccca

SEQ ID NO: 2538029 - DNA, 25 bp, Homo sapien
gcgagcgtcagagatgaagcaagtt

SEQ ID NO: 2538030 - DNA, 25 bp, Homo sapien
agatgcctagaagctttactctctg

SEQ ID NO: 2538031 - DNA, 25 bp, Homo sapien
tagaagctttactctctgttcctcc

SEQ ID NO: 2538032 - DNA, 25 bp, Homo sapien
ctgcgagcgtcagagatgaagcaag

SEQ ID NO: 2538033 - DNA, 25 bp, Homo sapien
cttggtgacaatgtcccttcttgga

SEQ ID NO: 2538034 - DNA, 25 bp, Homo sapien
ccttcttggaatggttatttgaggt

SEQ ID NO: 2538035 - DNA, 25 bp, Homo sapien
ttggtgacaatgtcccttcttggaa

SEQ ID NO: 2538036 - DNA, 25 bp, Homo sapien
tcttggaatggttatttgaggttgg

SEQ ID NO: 2538037 - DNA, 25 bp, Homo sapien
tcttcaggaggtggactgttaggcc

SEQ ID NO: 2538038 - DNA, 25 bp, Homo sapien
tctgaacgccgcacatagtagtcca

SEQ ID NO: 2538039 - DNA, 25 bp, Homo sapien
tttgcagtgccattctggatcagca

SEQ ID NO: 2538040 - DNA, 25 bp, Homo sapien
ggcaaacatgaagagcaccagccgg

SEQ ID NO: 2538041 - DNA, 25 bp, Homo sapien
gagcgcctcgcctagtgaatgctcc

SEQ ID NO: 2538042 - DNA, 25 bp, Homo sapien
ccgatggagcgcctcgcctagtgaa

SEQ ID NO: 2538043 - DNA, 25 bp, Homo sapien
gtgagtccgatggagcgcctcgcct

SEQ ID NO: 2538044 - DNA, 25 bp, Homo sapien
gctagtgagtccgatggagcgcctc

SEQ ID NO: 2538045 - DNA, 25 bp, Homo sapien
tactgccaggcgctatgcttaatgc

SEQ ID NO: 2538046 - DNA, 25 bp, Homo sapien
actaatgctggtaagaattcttgcc

SEQ ID NO: 2538047 - DNA, 25 bp, Homo sapien
taaactgcccaatgacacactgagg

SEQ ID NO: 2538048 - DNA, 25 bp, Homo sapien
gataacagaggaacaacttaagcgc

SEQ ID NO: 2538049 - DNA, 25 bp, Homo sapien
gccccatagcccctaagagagtgaa

SEQ ID NO: 2538050 - DNA, 25 bp, Homo sapien
cataagagttgactaatgaccctcc

SEQ ID NO: 2538051 - DNA, 25 bp, Homo sapien
cttgagaaaggagctagagttggcc

SEQ ID NO: 2538052 - DNA, 25 bp, Homo sapien
cttaagtgggtagagtatcctgggc

SEQ ID NO: 2538053 - DNA, 25 bp, Homo sapien
tgtgatcagataagaaaatgcagcc

SEQ ID NO: 2538054 - DNA, 25 bp, Homo sapien
cacaagggctgtgcagttcctagcc

SEQ ID NO: 2538055 - DNA, 25 bp, Homo sapien
caacgaaaattacacaagggctgtg

SEQ ID NO: 2538056 - DNA, 25 bp, Homo sapien
atgctccactccatgcacattctgt

SEQ ID NO: 2538057 - DNA, 25 bp, Homo sapien
tttccgacagaatgagaaggatgca

SEQ ID NO: 2538058 - DNA, 25 bp, Homo sapien
gaccccttagcacgagttaattcta

SEQ ID NO: 2538059 - DNA, 25 bp, Homo sapien
gaagccgtcttgcaataagaaaggg

SEQ ID NO: 2538060 - DNA, 25 bp, Homo sapien
gaaggatgcagttcatgtgcgagaa

SEQ ID NO: 2538061 - DNA, 25 bp, Homo sapien
agtgccactcaacaatgtggggatc

SEQ ID NO: 2538062 - DNA, 25 bp, Homo sapien
tcagtgccactcaacaatgtgggga

SEQ ID NO: 2538063 - DNA, 25 bp, Homo sapien
cagtgccactcaacaatgtggggat

SEQ ID NO: 2538064 - DNA, 25 bp, Homo sapien
tgatgcaactcctgcgaccgaggtt

SEQ ID NO: 2538065 - DNA, 25 bp, Homo sapien
tagtctgtccgaaaaggcaggcaga

SEQ ID NO: 2538066 - DNA, 25 bp, Homo sapien
tgttcatggccaacgtgaagagccc

SEQ ID NO: 2538067 - DNA, 25 bp, Homo sapien
cactttgaaatacctgtccgcagcc

SEQ ID NO: 2538068 - DNA, 25 bp, Homo sapien
cctggagccggatgaagcttggaaa

SEQ ID NO: 2538069 - DNA, 25 bp, Homo sapien
cgattgggtccagcgccagagtaat

SEQ ID NO: 2538070 - DNA, 25 bp, Homo sapien
tccgatgagattgatgccgtagagg

SEQ ID NO: 2538071 - DNA, 25 bp, Homo sapien
tatctgagcgttagcactcacccag

SEQ ID NO: 2538072 - DNA, 25 bp, Homo sapien
agctattccagaggccgagtcacaa

SEQ ID NO: 2538073 - DNA, 25 bp, Homo sapien
ttccagaggccgagtcacaagaatc

SEQ ID NO: 2538074 - DNA, 25 bp, Homo sapien
gctattccagaggccgagtcacaag

SEQ ID NO: 2538075 - DNA, 25 bp, Homo sapien
tattccagaggccgagtcacaagaa

SEQ ID NO: 2538076 - DNA, 25 bp, Homo sapien
ggcaggagaattgctagaagcttgg

SEQ ID NO: 2538077 - DNA, 25 bp, Homo sapien
aaaaaacaaaactggccaggcagtg

SEQ ID NO: 2538078 - DNA, 25 bp, Homo sapien
gagaattgctagaagcttggaggcg

SEQ ID NO: 2538079 - DNA, 25 bp, Homo sapien
aaaaacaaaactggccaggcagtgg

SEQ ID NO: 2538080 - DNA, 25 bp, Homo sapien
tcatgaaaatgaggcacttatgtgc

SEQ ID NO: 2538081 - DNA, 25 bp, Homo sapien
taagtccagctctatgagcaagtca

SEQ ID NO: 2538082 - DNA, 25 bp, Homo sapien
tcctgtggataagaagtcagatggg

SEQ ID NO: 2538083 - DNA, 25 bp, Homo sapien
gggacatatcgtggttgaatacaga

SEQ ID NO: 2538084 - DNA, 25 bp, Homo sapien
ccggtagactttttgtggggagcat

SEQ ID NO: 2538085 - DNA, 25 bp, Homo sapien
ttagaagaaataatcagccttgcat

SEQ ID NO: 2538086 - DNA, 25 bp, Homo sapien
gctgtgttgttatgaagtccaccct

SEQ ID NO: 2538087 - DNA, 25 bp, Homo sapien
catgtatgtgcgctgtttgaacccg

SEQ ID NO: 2538088 - DNA, 25 bp, Homo sapien
cccatgctcaatatatagtcctgga

SEQ ID NO: 2538089 - DNA, 25 bp, Homo sapien
ctggaaatagcaattgaaacatgtc

SEQ ID NO: 2538090 - DNA, 25 bp, Homo sapien
ttaaaagtactgtacacccatgctc

SEQ ID NO: 2538091 - DNA, 25 bp, Homo sapien
tgagtaaaattgtgctaaccagtta

SEQ ID NO: 2538092 - DNA, 25 bp, Homo sapien
gaaactcttgaaaatatgcacccag

SEQ ID NO: 2538093 - DNA, 25 bp, Homo sapien
gcacccagatgcatgtaaaaaggcc

SEQ ID NO: 2538094 - DNA, 25 bp, Homo sapien
tgtttatcatagctgcaaagtggaa

SEQ ID NO: 2538095 - DNA, 25 bp, Homo sapien
gaaataagctttggtaggccaggta

SEQ ID NO: 2538096 - DNA, 25 bp, Homo sapien
caaagtcctcactttgtcatccagg

SEQ ID NO: 2538097 - DNA, 25 bp, Homo sapien
gttggccaggccagtctcgaactct

SEQ ID NO: 2538098 - DNA, 25 bp, Homo sapien
tagctggaccacaggcaggcaccac

SEQ ID NO: 2538099 - DNA, 25 bp, Homo sapien
caccacacccggctaaatttgtatt

SEQ ID NO: 2538100 - DNA, 25 bp, Homo sapien
tgcatccccgcatggataacagctg

SEQ ID NO: 2538101 - DNA, 25 bp, Homo sapien
cagctgcagctatgtcagaattgca

SEQ ID NO: 2538102 - DNA, 25 bp, Homo sapien
ctggcggcatctcctcggtgtactt

SEQ ID NO: 2538103 - DNA, 25 bp, Homo sapien
gccggcggcgtctctggaaatgcat

SEQ ID NO: 2538104 - DNA, 25 bp, Homo sapien
tataggagtgatttgcccgcagcat

SEQ ID NO: 2538105 - DNA, 25 bp, Homo sapien
ggaaggtccgagtcatctttgtacc

SEQ ID NO: 2538106 - DNA, 25 bp, Homo sapien
taccgtgccggacaatgcaagtgtt

SEQ ID NO: 2538107 - DNA, 25 bp, Homo sapien
tgttcctgggcatgcgcactgctgt

SEQ ID NO: 2538108 - DNA, 25 bp, Homo sapien
tcagtgccctgaagtcgtccagtac

SEQ ID NO: 2538109 - DNA, 25 bp, Homo sapien
tgaagtcgtccagtacttgtctttg

SEQ ID NO: 2538110 - DNA, 25 bp, Homo sapien
ttgcccagtggggatttgctgacag

SEQ ID NO: 2538111 - DNA, 25 bp, Homo sapien
gtccttcgagtgttcacccttccat

SEQ ID NO: 2538112 - DNA, 25 bp, Homo sapien
ggaggggcctgaggggctccatctc

SEQ ID NO: 2538113 - DNA, 25 bp, Homo sapien
aactgtgaaggccatgcagcccagg

SEQ ID NO: 2538114 - DNA, 25 bp, Homo sapien
cctgaactgtgaaggccatgcagcc

SEQ ID NO: 2538115 - DNA, 25 bp, Homo sapien
tgaactgtgaaggccatgcagccca

SEQ ID NO: 2538116 - DNA, 25 bp, Homo sapien
ggttccttgagatgggaccgcagct

SEQ ID NO: 2538117 - DNA, 25 bp, Homo sapien
ggctgggcactcaggatccttatca

SEQ ID NO: 2538118 - DNA, 25 bp, Homo sapien
aatgggttagtcaccacttccctgg

SEQ ID NO: 2538119 - DNA, 25 bp, Homo sapien
tatcatcatagctgctgtcgtgagc

SEQ ID NO: 2538120 - DNA, 25 bp, Homo sapien
gccacagcctgggtctgccaagagc

SEQ ID NO: 2538121 - DNA, 25 bp, Homo sapien
tctgccaagagcagggtccagcgtg

SEQ ID NO: 2538122 - DNA, 25 bp, Homo sapien
acagcctgggtctgccaagagcagg

SEQ ID NO: 2538123 - DNA, 25 bp, Homo sapien
gtctgccaagagcagggtccagcgt

SEQ ID NO: 2538124 - DNA, 25 bp, Homo sapien
gggccccctggttcggtggctgctg

SEQ ID NO: 2538125 - DNA, 25 bp, Homo sapien
ggggccctggttcagtggccgctgg

SEQ ID NO: 2538126 - DNA, 25 bp, Homo sapien
gggggccctggttcagtggccgctg

SEQ ID NO: 2538127 - DNA, 25 bp, Homo sapien
gagccctggttcggtggccgccagg

SEQ ID NO: 2538128 - DNA, 25 bp, Homo sapien
ggagccctggttcggtggccgccag

SEQ ID NO: 2538129 - DNA, 25 bp, Homo sapien
agccctggttcggtggccgccaggt

SEQ ID NO: 2538130 - DNA, 25 bp, Homo sapien
acagatgaggtactggagaaggcag

SEQ ID NO: 2538131 - DNA, 25 bp, Homo sapien
ggtgacagatgaggtactggagaag

SEQ ID NO: 2538132 - DNA, 25 bp, Homo sapien
tgacagatgaggtactggagaaggc

SEQ ID NO: 2538133 - DNA, 25 bp, Homo sapien
aggtgacagatgaggtactggagaa

SEQ ID NO: 2538134 - DNA, 25 bp, Homo sapien
gctttgttggttgatgctcacgctc

SEQ ID NO: 2538135 - DNA, 25 bp, Homo sapien
acttgaaggactgtcgtcctggcag

SEQ ID NO: 2538136 - DNA, 25 bp, Homo sapien
tggttgatgctcacgctcccaggga

SEQ ID NO: 2538137 - DNA, 25 bp, Homo sapien
tcctggcagaggcacgctgtctcac

SEQ ID NO: 2538138 - DNA, 25 bp, Homo sapien
gggcgtctcaggacgagtgggtggg

SEQ ID NO: 2538139 - DNA, 25 bp, Homo sapien
gggggcgtctcaggacgagtgggtg

SEQ ID NO: 2538140 - DNA, 25 bp, Homo sapien
tggagggggcgtctcaggacgagtg

SEQ ID NO: 2538141 - DNA, 25 bp, Homo sapien
gagggggcgtctcaggacgagtggg

SEQ ID NO: 2538142 - DNA, 25 bp, Homo sapien
gggccgctttgcaacttcaatgcca

SEQ ID NO: 2538143 - DNA, 25 bp, Homo sapien
acagcaccggacacggccctggaca

SEQ ID NO: 2538144 - DNA, 25 bp, Homo sapien
ctcacgtctggctgcgaccgtggca

SEQ ID NO: 2538145 - DNA, 25 bp, Homo sapien
acttcaatgccaagctcacgtctgg

SEQ ID NO: 2538146 - DNA, 25 bp, Homo sapien
catggcacgtgaagatgaggtccca

SEQ ID NO: 2538147 - DNA, 25 bp, Homo sapien
ggtggcaccgctcactcgagattca

SEQ ID NO: 2538148 - DNA, 25 bp, Homo sapien
gaaggtccactggtaagcacctcgg

SEQ ID NO: 2538149 - DNA, 25 bp, Homo sapien
tacagtagagttcaagtccgagagc

SEQ ID NO: 2538150 - DNA, 25 bp, Homo sapien
gcaaactttgcttgtggctctgaag

SEQ ID NO: 2538151 - DNA, 25 bp, Homo sapien
agattcagtgagcaacaacgcagcc

SEQ ID NO: 2538152 - DNA, 25 bp, Homo sapien
tcaggcggtgactatggtgacctct

SEQ ID NO: 2538153 - DNA, 25 bp, Homo sapien
ttcatagaaaccttcagggccggct

SEQ ID NO: 2538154 - DNA, 25 bp, Homo sapien
tcactggaggatgaaacccggctgg

SEQ ID NO: 2538155 - DNA, 25 bp, Homo sapien
cacgaactgcgaagagaatccttgc

SEQ ID NO: 2538156 - DNA, 25 bp, Homo sapien
tgtaatcctgggtacggcacggcct

SEQ ID NO: 2538157 - DNA, 25 bp, Homo sapien
gagtctctgcccctttaggaccatc

SEQ ID NO: 2538158 - DNA, 25 bp, Homo sapien
tgggccagtttccgtttgctctgat

SEQ ID NO: 2538159 - DNA, 25 bp, Homo sapien
caatgaaggaatccagaggaagttc

SEQ ID NO: 2538160 - DNA, 25 bp, Homo sapien
aatgaaggaatccagaggaagttct

SEQ ID NO: 2538161 - DNA, 25 bp, Homo sapien
atgtgggccagtttccgtttgctct

SEQ ID NO: 2538162 - DNA, 25 bp, Homo sapien
gctgcctgctggtatacagcccgta

SEQ ID NO: 2538163 - DNA, 25 bp, Homo sapien
ggcactttccccagcacacaggcca

SEQ ID NO: 2538164 - DNA, 25 bp, Homo sapien
gcctgctggtatacagcccgtacac

SEQ ID NO: 2538165 - DNA, 25 bp, Homo sapien
aggctgcctgctggtatacagcccg

SEQ ID NO: 2538166 - DNA, 25 bp, Homo sapien
caccactcctggccgtggcggtgtg

SEQ ID NO: 2538167 - DNA, 25 bp, Homo sapien
ggcaccactcctggccgtggcggtg

SEQ ID NO: 2538168 - DNA, 25 bp, Homo sapien
gcaccactcctggccgtggcggtgt

SEQ ID NO: 2538169 - DNA, 25 bp, Homo sapien
accactcctggccgtggcggtgtgg

SEQ ID NO: 2538170 - DNA, 25 bp, Homo sapien
ggactgcccaaagcgccccaaggat

SEQ ID NO: 2538171 - DNA, 25 bp, Homo sapien
aggcagcgggcccacggactgccca

SEQ ID NO: 2538172 - DNA, 25 bp, Homo sapien
acggactgcccaaagcgccccaagg

SEQ ID NO: 2538173 - DNA, 25 bp, Homo sapien
gggcccacggactgcccaaagcgcc

SEQ ID NO: 2538174 - DNA, 25 bp, Homo sapien
tctccaaggaagcactgctagactg

SEQ ID NO: 2538175 - DNA, 25 bp, Homo sapien
cctgaagaagtgctaacagggtctc

SEQ ID NO: 2538176 - DNA, 25 bp, Homo sapien
ctccaaggaagcactgctagactgt

SEQ ID NO: 2538177 - DNA, 25 bp, Homo sapien
gcctgaagaagtgctaacagggtct

SEQ ID NO: 2538178 - DNA, 25 bp, Homo sapien
ttccaggaagctgaatgtgaaaggc

SEQ ID NO: 2538179 - DNA, 25 bp, Homo sapien
aggaagctgaatgtgaaaggcttga

SEQ ID NO: 2538180 - DNA, 25 bp, Homo sapien
aagctgaatgtgaaaggcttgaaaa

SEQ ID NO: 2538181 - DNA, 25 bp, Homo sapien
tccaggaagctgaatgtgaaaggct

SEQ ID NO: 2538182 - DNA, 25 bp, Homo sapien
actcctaccagcaagatgcacggca

SEQ ID NO: 2538183 - DNA, 25 bp, Homo sapien
tgctgtgcagcgcatacacactctt

SEQ ID NO: 2538184 - DNA, 25 bp, Homo sapien
ctagcaggtgctacccaacagcctt

SEQ ID NO: 2538185 - DNA, 25 bp, Homo sapien
agatgacccatggacactcctacca

SEQ ID NO: 2538186 - DNA, 25 bp, Homo sapien
caaacgggcaaacgtcataagacat

SEQ ID NO: 2538187 - DNA, 25 bp, Homo sapien
taacaaacagcataagacaaacggg

SEQ ID NO: 2538188 - DNA, 25 bp, Homo sapien
tgttcattgcagtagagtcgctatc

SEQ ID NO: 2538189 - DNA, 25 bp, Homo sapien
taaactggtgactgctaaactggct

SEQ ID NO: 2538190 - DNA, 25 bp, Homo sapien
caagcgtgctttcaacgtgtccagc

SEQ ID NO: 2538191 - DNA, 25 bp, Homo sapien
cagctggggctggtacaaaaggttt

SEQ ID NO: 2538192 - DNA, 25 bp, Homo sapien
gtcaagcgtgctttcaacgtgtcca

SEQ ID NO: 2538193 - DNA, 25 bp, Homo sapien
cgtgctttcaacgtgtccagctggg

SEQ ID NO: 2538194 - DNA, 25 bp, Homo sapien
tgatgagaaccaaaagtatatcagc

SEQ ID NO: 2538195 - DNA, 25 bp, Homo sapien
ccctgaggtccccacgcacacccca

SEQ ID NO: 2538196 - DNA, 25 bp, Homo sapien
taaacccctgaggtccccacgcaca

SEQ ID NO: 2538197 - DNA, 25 bp, Homo sapien
ccacagctggcaccgcatgccaggc

SEQ ID NO: 2538198 - DNA, 25 bp, Homo sapien
tcctgtgactccatgcagagccttc

SEQ ID NO: 2538199 - DNA, 25 bp, Homo sapien
gagctgctgcccgtcgtaaagaatg

SEQ ID NO: 2538200 - DNA, 25 bp, Homo sapien
gccaagccccttggtttctcatttg

SEQ ID NO: 2538201 - DNA, 25 bp, Homo sapien
acggctgcgctgtgacttgaattcc

SEQ ID NO: 2538202 - DNA, 25 bp, Homo sapien
cataagcaggctaagaggtccaacc

SEQ ID NO: 2538203 - DNA, 25 bp, Homo sapien
tgagcaaagccgaccaaaagctggg

SEQ ID NO: 2538204 - DNA, 25 bp, Homo sapien
ggaatcacttatcagcaggagacca

SEQ ID NO: 2538205 - DNA, 25 bp, Homo sapien
ccctggtaggtagagaagaagccac

SEQ ID NO: 2538206 - DNA, 25 bp, Homo sapien
tttaagcagctcttcttcaacgcca

SEQ ID NO: 2538207 - DNA, 25 bp, Homo sapien
gcagctcttcttcaacgccacccca

SEQ ID NO: 2538208 - DNA, 25 bp, Homo sapien
gctcttcttcaacgccaccccagtc

SEQ ID NO: 2538209 - DNA, 25 bp, Homo sapien
ttaagcagctcttcttcaacgccac

SEQ ID NO: 2538210 - DNA, 25 bp, Homo sapien
tcagttctgagaaaggaggtcccta

SEQ ID NO: 2538211 - DNA, 25 bp, Homo sapien
tcatagttcctggtgcgctcacacg

SEQ ID NO: 2538212 - DNA, 25 bp, Homo sapien
taacaactaaaatctggacgcagcc

SEQ ID NO: 2538213 - DNA, 25 bp, Homo sapien
gagaacgctctagggaatcacactg

SEQ ID NO: 2538214 - DNA, 25 bp, Homo sapien
cagcagcagcccgagtggtatgatt

SEQ ID NO: 2538215 - DNA, 25 bp, Homo sapien
tacagcatttgtagtaggacctggc

SEQ ID NO: 2538216 - DNA, 25 bp, Homo sapien
taaattctaagtggccacccagaga

SEQ ID NO: 2538217 - DNA, 25 bp, Homo sapien
gaaaacagtgatgccaacctcttga

SEQ ID NO: 2538218 - DNA, 25 bp, Homo sapien
caggaggctgaggcaagagaatcgc

SEQ ID NO: 2538219 - DNA, 25 bp, Homo sapien
ttagctgggcagggtggtgcccgcc

SEQ ID NO: 2538220 - DNA, 25 bp, Homo sapien
tcccagctactcaggaggctgaggc

SEQ ID NO: 2538221 - DNA, 25 bp, Homo sapien
tgggcagggtggtgcccgcctgtag

SEQ ID NO: 2538222 - DNA, 25 bp, Homo sapien
caatgtactccaaaaaaaacttgct

SEQ ID NO: 2538223 - DNA, 25 bp, Homo sapien
aaaatcctgctaagcttttttgaag

SEQ ID NO: 2538224 - DNA, 25 bp, Homo sapien
aaccataagaatcttcataattggg

SEQ ID NO: 2538225 - DNA, 25 bp, Homo sapien
gacactatctgtcagtcattgtgaa

SEQ ID NO: 2538226 - DNA, 25 bp, Homo sapien
gcattactgtcatgagagcctcgaa

SEQ ID NO: 2538227 - DNA, 25 bp, Homo sapien
cagtaacgtcatgggttgatacaac

SEQ ID NO: 2538228 - DNA, 25 bp, Homo sapien
tttacacaccggtgcagtagctcac

SEQ ID NO: 2538229 - DNA, 25 bp, Homo sapien
tgatggctggaaagcgaagctaccc

SEQ ID NO: 2538230 - DNA, 25 bp, Homo sapien
gcactgagcgttgtgcactgcccaa

SEQ ID NO: 2538231 - DNA, 25 bp, Homo sapien
gacaagttactggtgctgatctgaa

SEQ ID NO: 2538232 - DNA, 25 bp, Homo sapien
cattcacttcgtactgcagcactgc

SEQ ID NO: 2538233 - DNA, 25 bp, Homo sapien
tgagcatagctagcatgtgccacct

SEQ ID NO: 2538234 - DNA, 25 bp, Homo sapien
tgtaacccaagcctacgatggccct

SEQ ID NO: 2538235 - DNA, 25 bp, Homo sapien
ggctacagcccactcaggaaggaaa

SEQ ID NO: 2538236 - DNA, 25 bp, Homo sapien
aaaaattggtacgtgtgagtgcagc

SEQ ID NO: 2538237 - DNA, 25 bp, Homo sapien
gatcccctccatatgtagctgacgt

SEQ ID NO: 2538238 - DNA, 25 bp, Homo sapien
tggacaccggataagcaatcagggc

SEQ ID NO: 2538239 - DNA, 25 bp, Homo sapien
gatcagaagacaagatgggacaccc

SEQ ID NO: 2538240 - DNA, 25 bp, Homo sapien
aattagaatctcagcagtaaaggcc

SEQ ID NO: 2538241 - DNA, 25 bp, Homo sapien
cagaataactggagaccttggagga

SEQ ID NO: 2538242 - DNA, 25 bp, Homo sapien
tgcctagaggatcaagcccaagctc

SEQ ID NO: 2538243 - DNA, 25 bp, Homo sapien
cctggctgccaaaacgatctacata

SEQ ID NO: 2538244 - DNA, 25 bp, Homo sapien
taaatggcgagtgtgaccaaccgca

SEQ ID NO: 2538245 - DNA, 25 bp, Homo sapien
taaccacgatgcttcaacagtcaac

SEQ ID NO: 2538246 - DNA, 25 bp, Homo sapien
tactatcctagacactgggctgcag

SEQ ID NO: 2538247 - DNA, 25 bp, Homo sapien
taatggactacgttcctcacaatcc

SEQ ID NO: 2538248 - DNA, 25 bp, Homo sapien
gaaacattagctgtaacgctgcttg

SEQ ID NO: 2538249 - DNA, 25 bp, Homo sapien
gcagatgtaacctcgaggtgccatt

SEQ ID NO: 2538250 - DNA, 25 bp, Homo sapien
tgcttttgtatcattgggtaagaca

SEQ ID NO: 2538251 - DNA, 25 bp, Homo sapien
ttgtatcattgggtaagacatcatt

SEQ ID NO: 2538252 - DNA, 25 bp, Homo sapien
cttttgtatcattgggtaagacatc

SEQ ID NO: 2538253 - DNA, 25 bp, Homo sapien
gtatcattgggtaagacatcatttc

SEQ ID NO: 2538254 - DNA, 25 bp, Homo sapien
aataaaccaacgagaactcttgtct

SEQ ID NO: 2538255 - DNA, 25 bp, Homo sapien
cagcatgttctgagcgccagtgatt

SEQ ID NO: 2538256 - DNA, 25 bp, Homo sapien
ggctggcacacggtcttctagatca

SEQ ID NO: 2538257 - DNA, 25 bp, Homo sapien
tgattacctacgagtggctggcaca

SEQ ID NO: 2538258 - DNA, 25 bp, Homo sapien
tggcatgaatctccatagcaacatt

SEQ ID NO: 2538259 - DNA, 25 bp, Homo sapien
gcaacattctgctacaaatactgta

SEQ ID NO: 2538260 - DNA, 25 bp, Homo sapien
attcctcagctcaagaacacaacca

SEQ ID NO: 2538261 - DNA, 25 bp, Homo sapien
caaacaggcaacaaggccggcattc

SEQ ID NO: 2538262 - DNA, 25 bp, Homo sapien
ttccagccagtctctaacaggatgt

SEQ ID NO: 2538263 - DNA, 25 bp, Homo sapien
gagggtcaaacagtgcagtctactt

SEQ ID NO: 2538264 - DNA, 25 bp, Homo sapien
tgcatacgaccgaccggtgagggtc

SEQ ID NO: 2538265 - DNA, 25 bp, Homo sapien
ccagccagtctctaacaggatgtta

SEQ ID NO: 2538266 - DNA, 25 bp, Homo sapien
cctcggctgggtagcaggtagacaa

SEQ ID NO: 2538267 - DNA, 25 bp, Homo sapien
caagtacatgccatctggccaaagt

SEQ ID NO: 2538268 - DNA, 25 bp, Homo sapien
cgccggttggcagtgtttacttcct

SEQ ID NO: 2538269 - DNA, 25 bp, Homo sapien
gccaaagtagacgagaactcgctcg

SEQ ID NO: 2538270 - DNA, 25 bp, Homo sapien
gaggaccgtagctccgaaatcatgt

SEQ ID NO: 2538271 - DNA, 25 bp, Homo sapien
caggaattcaagaggcaacatagca

SEQ ID NO: 2538272 - DNA, 25 bp, Homo sapien
taagtgacgcataatgaacagctgc

SEQ ID NO: 2538273 - DNA, 25 bp, Homo sapien
tagttgcctaatcccctaagcgaca

SEQ ID NO: 2538274 - DNA, 25 bp, Homo sapien
tgagaggctcagcactgtaggcgtg

SEQ ID NO: 2538275 - DNA, 25 bp, Homo sapien
gctggcttggtgctgaacaatccct

SEQ ID NO: 2538276 - DNA, 25 bp, Homo sapien
ctcagcactgtaggcgtgggaaggc

SEQ ID NO: 2538277 - DNA, 25 bp, Homo sapien
gctgaacaatccctcttcggaaaga

SEQ ID NO: 2538278 - DNA, 25 bp, Homo sapien
cagcccggcgaaccgggcttcgctc

SEQ ID NO: 2538279 - DNA, 25 bp, Homo sapien
gctgcaccagcgacagcccggcgaa

SEQ ID NO: 2538280 - DNA, 25 bp, Homo sapien
ctcgttgagctgcaccagcgacagc

SEQ ID NO: 2538281 - DNA, 25 bp, Homo sapien
gcgaaccgggcttcgctcccggcgc

SEQ ID NO: 2538282 - DNA, 25 bp, Homo sapien
cggccaccaggctccgccgaccgga

SEQ ID NO: 2538283 - DNA, 25 bp, Homo sapien
aggctccgccgaccggaagcgccgc

SEQ ID NO: 2538284 - DNA, 25 bp, Homo sapien
ccccacgtctcggccgtcgtcgcca

SEQ ID NO: 2538285 - DNA, 25 bp, Homo sapien
cacgtctcggccgtcgtcgccaccg

SEQ ID NO: 2538286 - DNA, 25 bp, Homo sapien
tgacgtaagtgtcgcggctcgcttg

SEQ ID NO: 2538287 - DNA, 25 bp, Homo sapien
gagagcgcgccatgaggtcataaga

SEQ ID NO: 2538288 - DNA, 25 bp, Homo sapien
cctatgattgggctgtgacgcgtga

SEQ ID NO: 2538289 - DNA, 25 bp, Homo sapien
tcctccaggaagagagataccgcga

SEQ ID NO: 2538290 - DNA, 25 bp, Homo sapien
caaggctcaaaaagcacctagtcca

SEQ ID NO: 2538291 - DNA, 25 bp, Homo sapien
ggtcagcgatatccctcaatggtta

SEQ ID NO: 2538292 - DNA, 25 bp, Homo sapien
ggttaagtgacttgcgcatgttcta

SEQ ID NO: 2538293 - DNA, 25 bp, Homo sapien
caacaccgtgaatgagaatggctta

SEQ ID NO: 2538294 - DNA, 25 bp, Homo sapien
tccatctcggttctgatatctgcag

SEQ ID NO: 2538295 - DNA, 25 bp, Homo sapien
tcatcatcatcaatccatctcggtt

SEQ ID NO: 2538296 - DNA, 25 bp, Homo sapien
aatgttttatacctgaatggttatc

SEQ ID NO: 2538297 - DNA, 25 bp, Homo sapien
tacctgaatggttatcattgtcatc

SEQ ID NO: 2538298 - DNA, 25 bp, Homo sapien
gagtaaactaagtcctggcgccagg

SEQ ID NO: 2538299 - DNA, 25 bp, Homo sapien
aagccctcgactgcaattactttct

SEQ ID NO: 2538300 - DNA, 25 bp, Homo sapien
tggcgccaggactaagccagccctg

SEQ ID NO: 2538301 - DNA, 25 bp, Homo sapien
tggccaactgtgctgttcccaaagc

SEQ ID NO: 2538302 - DNA, 25 bp, Homo sapien
tattgaccgggttctctcaacatgt

SEQ ID NO: 2538303 - DNA, 25 bp, Homo sapien
acatgttgcaacctctggcaaagcc

SEQ ID NO: 2538304 - DNA, 25 bp, Homo sapien
catcccatccaccaaagacagaaga

SEQ ID NO: 2538305 - DNA, 25 bp, Homo sapien
gacagaagagaatgcatctcatgaa

SEQ ID NO: 2538306 - DNA, 25 bp, Homo sapien
caggctactaaggaagggccattca

SEQ ID NO: 2538307 - DNA, 25 bp, Homo sapien
tcgtctttcagtgctgcaggcctgg

SEQ ID NO: 2538308 - DNA, 25 bp, Homo sapien
caggaagcggtgatccatgggacat

SEQ ID NO: 2538309 - DNA, 25 bp, Homo sapien
catgggacatggcaggtcgtctttc

SEQ ID NO: 2538310 - DNA, 25 bp, Homo sapien
gctgcaccagcttggcgtagaggcc

SEQ ID NO: 2538311 - DNA, 25 bp, Homo sapien
gatgagtaccgtgtgcttctgcagg

SEQ ID NO: 2538312 - DNA, 25 bp, Homo sapien
gctacaggctcgttgtggccagctg

SEQ ID NO: 2538313 - DNA, 25 bp, Homo sapien
cagccggtgcgcgatgatgagtacc

SEQ ID NO: 2538314 - DNA, 25 bp, Homo sapien
atgccttctcttgccccacaccata

SEQ ID NO: 2538315 - DNA, 25 bp, Homo sapien
cagcatccatctgctgggcgatggg

SEQ ID NO: 2538316 - DNA, 25 bp, Homo sapien
caggaggctgatagtctgggagagc

SEQ ID NO: 2538317 - DNA, 25 bp, Homo sapien
ctgatagtctgggagagctcctggg

SEQ ID NO: 2538318 - DNA, 25 bp, Homo sapien
ccgcaccagagcccgggccatggcc

SEQ ID NO: 2538319 - DNA, 25 bp, Homo sapien
atactcgctctcggcatccaaagcg

SEQ ID NO: 2538320 - DNA, 25 bp, Homo sapien
gatgaggactggggggttccgcacc

SEQ ID NO: 2538321 - DNA, 25 bp, Homo sapien
acagctgggcgcccttctcccctgt

SEQ ID NO: 2538322 - DNA, 25 bp, Homo sapien
agttccatgatgaagccgtgggcat

SEQ ID NO: 2538323 - DNA, 25 bp, Homo sapien
caccaccatctcgaaaggcacagtg

SEQ ID NO: 2538324 - DNA, 25 bp, Homo sapien
tgggcattggccttctgtgcggcct

SEQ ID NO: 2538325 - DNA, 25 bp, Homo sapien
caggccgtaggagatgttatccgtg

SEQ ID NO: 2538326 - DNA, 25 bp, Homo sapien
ttctataaagataggaaacacattg

SEQ ID NO: 2538327 - DNA, 25 bp, Homo sapien
ccatgtggtggaattcaaaaggtaa

SEQ ID NO: 2538328 - DNA, 25 bp, Homo sapien
taaacgtgtaccttcatatattgat

SEQ ID NO: 2538329 - DNA, 25 bp, Homo sapien
tggttaaatagtgacagtgcatcct

SEQ ID NO: 2538330 - DNA, 25 bp, Homo sapien
accacgtctggacaagaatgttctg

SEQ ID NO: 2538331 - DNA, 25 bp, Homo sapien
catttatctctagtgccctcttccg

SEQ ID NO: 2538332 - DNA, 25 bp, Homo sapien
tctctaggagggcattgtaattggt

SEQ ID NO: 2538333 - DNA, 25 bp, Homo sapien
ctgttacagctcacaagaaagacgg

SEQ ID NO: 2538334 - DNA, 25 bp, Homo sapien
aagggcggagaagtgtggcccaggc

SEQ ID NO: 2538335 - DNA, 25 bp, Homo sapien
cagaaagggcggagaagtgtggccc

SEQ ID NO: 2538336 - DNA, 25 bp, Homo sapien
agaaagggcggagaagtgtggccca

SEQ ID NO: 2538337 - DNA, 25 bp, Homo sapien
gaaagggcggagaagtgtggcccag

SEQ ID NO: 2538338 - DNA, 25 bp, Homo sapien
gctgatgggcttgccgtccagcagc

SEQ ID NO: 2538339 - DNA, 25 bp, Homo sapien
taggcgctgatgggcttgccgtcca

SEQ ID NO: 2538340 - DNA, 25 bp, Homo sapien
tgcaagtacttgtggtcgtaggcgc

SEQ ID NO: 2538341 - DNA, 25 bp, Homo sapien
aagtacttgtggtcgtaggcgctga

SEQ ID NO: 2538342 - DNA, 25 bp, Homo sapien
gtcggctgccggtcgatgaactcga

SEQ ID NO: 2538343 - DNA, 25 bp, Homo sapien
atcaggccactgtagacggagccca

SEQ ID NO: 2538344 - DNA, 25 bp, Homo sapien
tgccatcgtgcaccatggtcggctg

SEQ ID NO: 2538345 - DNA, 25 bp, Homo sapien
ggtcacattctcaaagtccacccgg

SEQ ID NO: 2538346 - DNA, 25 bp, Homo sapien
tgaggttgccgctggtcatctggcc

SEQ ID NO: 2538347 - DNA, 25 bp, Homo sapien
tctggcctgagatgacaaggtggcc

SEQ ID NO: 2538348 - DNA, 25 bp, Homo sapien
tctcccaggacaaactcgtagatga

SEQ ID NO: 2538349 - DNA, 25 bp, Homo sapien
gtagaggatgctgacctggaccacc

SEQ ID NO: 2538350 - DNA, 25 bp, Homo sapien
acaaactgaaatgccggccgttggc

SEQ ID NO: 2538351 - DNA, 25 bp, Homo sapien
ccacaaactgaaatgccggccgttg

SEQ ID NO: 2538352 - DNA, 25 bp, Homo sapien
gccacaaactgaaatgccggccgtt

SEQ ID NO: 2538353 - DNA, 25 bp, Homo sapien
aactgaaatgccggccgttggcagg

SEQ ID NO: 2538354 - DNA, 25 bp, Homo sapien
gaagctccggacagtcttcatggca

SEQ ID NO: 2538355 - DNA, 25 bp, Homo sapien
gacgtagtacatgtaggcagctgcc

SEQ ID NO: 2538356 - DNA, 25 bp, Homo sapien
gtgttgctcgctctggccagggcat

SEQ ID NO: 2538357 - DNA, 25 bp, Homo sapien
tgcagcttccgcaggtacacctctg

SEQ ID NO: 2538358 - DNA, 25 bp, Homo sapien
agtacttgccgtagatgttggacac

SEQ ID NO: 2538359 - DNA, 25 bp, Homo sapien
tacttgccgtagatgttggacacca

SEQ ID NO: 2538360 - DNA, 25 bp, Homo sapien
gtagtacttgccgtagatgttggac

SEQ ID NO: 2538361 - DNA, 25 bp, Homo sapien
cttgtagtacttgccgtagatgttg

SEQ ID NO: 2538362 - DNA, 25 bp, Homo sapien
tgtccgaggtcaggcgggagatgag

SEQ ID NO: 2538363 - DNA, 25 bp, Homo sapien
ctgggagaccaggtcgctgaccatg

SEQ ID NO: 2538364 - DNA, 25 bp, Homo sapien
tgtgttccgcaggaagacattgatg

SEQ ID NO: 2538365 - DNA, 25 bp, Homo sapien
accttgactgtgttccgcaggaaga

SEQ ID NO: 2538366 - DNA, 25 bp, Homo sapien
tttcgaaggcgaatgttcagtctgg

SEQ ID NO: 2538367 - DNA, 25 bp, Homo sapien
ctcctgggacaccagtgagcggaag

SEQ ID NO: 2538368 - DNA, 25 bp, Homo sapien
tctggcaaatatgagggtaaaaatg

SEQ ID NO: 2538369 - DNA, 25 bp, Homo sapien
cagtgagcggaagagacagtttcga

SEQ ID NO: 2538370 - DNA, 25 bp, Homo sapien
gctgaactgatccatgcttttctgg

SEQ ID NO: 2538371 - DNA, 25 bp, Homo sapien
ggccagcaggcacacgatgacgaca

SEQ ID NO: 2538372 - DNA, 25 bp, Homo sapien
gatgccatcaatggcgcggcccgtg

SEQ ID NO: 2538373 - DNA, 25 bp, Homo sapien
gcttttctggatgacgatgccatca

SEQ ID NO: 2538374 - DNA, 25 bp, Homo sapien
tagtggctaccaggcatcgagccag

SEQ ID NO: 2538375 - DNA, 25 bp, Homo sapien
cctcctcagagaacaggggagcact

SEQ ID NO: 2538376 - DNA, 25 bp, Homo sapien
gggctcctgcaggatgcttcattct

SEQ ID NO: 2538377 - DNA, 25 bp, Homo sapien
agcactgggccttgcatccacacag

SEQ ID NO: 2538378 - DNA, 25 bp, Homo sapien
gacgaggtttcgctaggttgcccag

SEQ ID NO: 2538379 - DNA, 25 bp, Homo sapien
tgtagagacgaggtttcgctaggtt

SEQ ID NO: 2538380 - DNA, 25 bp, Homo sapien
gagacgaggtttcgctaggttgccc

SEQ ID NO: 2538381 - DNA, 25 bp, Homo sapien
tagagacgaggtttcgctaggttgc

SEQ ID NO: 2538382 - DNA, 25 bp, Homo sapien
cgtccggctgaaagtgaagttgaat

SEQ ID NO: 2538383 - DNA, 25 bp, Homo sapien
gacgccaaagttgatttcattcttc

SEQ ID NO: 2538384 - DNA, 25 bp, Homo sapien
gttgaatgagatgactcgtccaggc

SEQ ID NO: 2538385 - DNA, 25 bp, Homo sapien
aatcagtggctgattgacgccaaag

SEQ ID NO: 2538386 - DNA, 25 bp, Homo sapien
ggtgctttcttacccgcttgcctta

SEQ ID NO: 2538387 - DNA, 25 bp, Homo sapien
tctggaacctcagaagacgttgcta

SEQ ID NO: 2538388 - DNA, 25 bp, Homo sapien
cacagaggctgaggaatttactcca

SEQ ID NO: 2538389 - DNA, 25 bp, Homo sapien
ggactcaaacctaaactggctttca

SEQ ID NO: 2538390 - DNA, 25 bp, Homo sapien
gtcagtgaatgaaccccgggcaggt

SEQ ID NO: 2538391 - DNA, 25 bp, Homo sapien
tgtgcaaagcatgccggcaaactct

SEQ ID NO: 2538392 - DNA, 25 bp, Homo sapien
ggaatgtccactctcctcttaagga

SEQ ID NO: 2538393 - DNA, 25 bp, Homo sapien
tttacaatagcccacaaggacctgc

SEQ ID NO: 2538394 - DNA, 25 bp, Homo sapien
cctcacacctgctagtattactggg

SEQ ID NO: 2538395 - DNA, 25 bp, Homo sapien
gcagacaaagttaccacagttggca

SEQ ID NO: 2538396 - DNA, 25 bp, Homo sapien
ttttgggccgcccagcatgagccag

SEQ ID NO: 2538397 - DNA, 25 bp, Homo sapien
cgtacccagcctgaacatatgattt

SEQ ID NO: 2538398 - DNA, 25 bp, Homo sapien
attgtcacctctctaggctctgtct

SEQ ID NO: 2538399 - DNA, 25 bp, Homo sapien
ggctctgtctctgtcagttaacatt

SEQ ID NO: 2538400 - DNA, 25 bp, Homo sapien
ctctaggctctgtctctgtcagtta

SEQ ID NO: 2538401 - DNA, 25 bp, Homo sapien
taggctctgtctctgtcagttaaca

SEQ ID NO: 2538402 - DNA, 25 bp, Homo sapien
ggctggagaacttacgcagggccac

SEQ ID NO: 2538403 - DNA, 25 bp, Homo sapien
gactccaacaatccttgttgcacag

SEQ ID NO: 2538404 - DNA, 25 bp, Homo sapien
aacaatccttgttgcacagaggagg

SEQ ID NO: 2538405 - DNA, 25 bp, Homo sapien
aaaggctggagaacttacgcagggc

SEQ ID NO: 2538406 - DNA, 25 bp, Homo sapien
tgtctgaaccacgtaagtaaaatct

SEQ ID NO: 2538407 - DNA, 25 bp, Homo sapien
ccttttcatatcaatttgatgtctg

SEQ ID NO: 2538408 - DNA, 25 bp, Homo sapien
tttaaaatctaaggcagtcatatcc

SEQ ID NO: 2538409 - DNA, 25 bp, Homo sapien
tgatgtctgaaccacgtaagtaaaa

SEQ ID NO: 2538410 - DNA, 25 bp, Homo sapien
ttgaagtggcggatgtcctccagga

SEQ ID NO: 2538411 - DNA, 25 bp, Homo sapien
gatgcgccgagtgaaatgtacgtcc

SEQ ID NO: 2538412 - DNA, 25 bp, Homo sapien
gaagacatagatggccgtggtcacg

SEQ ID NO: 2538413 - DNA, 25 bp, Homo sapien
ccacgaagaggcacacgagggtgat

SEQ ID NO: 2538414 - DNA, 25 bp, Homo sapien
gctggttggaggtgggcgggtgctg

SEQ ID NO: 2538415 - DNA, 25 bp, Homo sapien
gccatcatcatccacagggcgaggc

SEQ ID NO: 2538416 - DNA, 25 bp, Homo sapien
aaggccatcatcatccacagggcga

SEQ ID NO: 2538417 - DNA, 25 bp, Homo sapien
atcatcatccacagggcgaggccag

SEQ ID NO: 2538418 - DNA, 25 bp, Homo sapien
tcatcatccacagggcgaggccagg

SEQ ID NO: 2538419 - DNA, 25 bp, Homo sapien
tcctcccgtgggccttttgttgtca

SEQ ID NO: 2538420 - DNA, 25 bp, Homo sapien
gctgctcattgaagactgcgccgga

SEQ ID NO: 2538421 - DNA, 25 bp, Homo sapien
gctgagactggcgtgcgttgagaca

SEQ ID NO: 2538422 - DNA, 25 bp, Homo sapien
gcagtttccgcgctgctcattgaag

SEQ ID NO: 2538423 - DNA, 25 bp, Homo sapien
aagactgcgccggacgcggtcctcg

SEQ ID NO: 2538424 - DNA, 25 bp, Homo sapien
ggccctccacactgcgtgctggcct

SEQ ID NO: 2538425 - DNA, 25 bp, Homo sapien
gcaatctgaaaaagctccctactgt

SEQ ID NO: 2538426 - DNA, 25 bp, Homo sapien
tgtggtacacccagacaacagaata

SEQ ID NO: 2538427 - DNA, 25 bp, Homo sapien
ttcaatgcacattcctaagagaagg

SEQ ID NO: 2538428 - DNA, 25 bp, Homo sapien
tacaaagatcagtgtttgccaaggg

SEQ ID NO: 2538429 - DNA, 25 bp, Homo sapien
gtgagaccacgccccgtcgccctcc

SEQ ID NO: 2538430 - DNA, 25 bp, Homo sapien
tgagaccacgccccgtcgccctccc

SEQ ID NO: 2538431 - DNA, 25 bp, Homo sapien
gagaccacgccccgtcgccctccca

SEQ ID NO: 2538432 - DNA, 25 bp, Homo sapien
gaccacgccccgtcgccctcccaca

SEQ ID NO: 2538433 - DNA, 25 bp, Homo sapien
ggagcgttttggtggagacactcac

SEQ ID NO: 2538434 - DNA, 25 bp, Homo sapien
gcgtccattgggaacgccaccggaa

SEQ ID NO: 2538435 - DNA, 25 bp, Homo sapien
gaagtaatgcgagacggagcgtttt

SEQ ID NO: 2538436 - DNA, 25 bp, Homo sapien
ttgggaacgccaccggaagtaatgc

SEQ ID NO: 2538437 - DNA, 25 bp, Homo sapien
tccaaactgaaacgtacagggctgg

SEQ ID NO: 2538438 - DNA, 25 bp, Homo sapien
tgtgaaggcacgacccagttcagct

SEQ ID NO: 2538439 - DNA, 25 bp, Homo sapien
cttgggaacttagagcggccccttg

SEQ ID NO: 2538440 - DNA, 25 bp, Homo sapien
taaagtggagccattagtccctgcc

SEQ ID NO: 2538441 - DNA, 25 bp, Homo sapien
caggaaagacacctcgaggaactgc

SEQ ID NO: 2538442 - DNA, 25 bp, Homo sapien
tctggaaagcccctcaggaagcgct

SEQ ID NO: 2538443 - DNA, 25 bp, Homo sapien
aggaagcgctcaccctgtagccggt

SEQ ID NO: 2538444 - DNA, 25 bp, Homo sapien
agtcatgcctctgtgcagccgggcc

SEQ ID NO: 2538445 - DNA, 25 bp, Homo sapien
agaaggcccggaggagaacaagatc

SEQ ID NO: 2538446 - DNA, 25 bp, Homo sapien
cttcctccagtgatggccggaagaa

SEQ ID NO: 2538447 - DNA, 25 bp, Homo sapien
ctcgctggaccagtggcaccgatca

SEQ ID NO: 2538448 - DNA, 25 bp, Homo sapien
tcctccagtgatggccggaagaagc

SEQ ID NO: 2538449 - DNA, 25 bp, Homo sapien
aaggcctgtggacgacgctggcggc

SEQ ID NO: 2538450 - DNA, 25 bp, Homo sapien
ctggtggcctttcccccgtggattg

SEQ ID NO: 2538451 - DNA, 25 bp, Homo sapien
tggaggttggggtcaccggcctgct

SEQ ID NO: 2538452 - DNA, 25 bp, Homo sapien
cggcctgcttggcacccccatctga

SEQ ID NO: 2538453 - DNA, 25 bp, Homo sapien
cgagttaacaagatgcaggctggac

SEQ ID NO: 2538454 - DNA, 25 bp, Homo sapien
gattgtcgggccaagcaacttcctg

SEQ ID NO: 2538455 - DNA, 25 bp, Homo sapien
gaacatttacacgaccctttggctg

SEQ ID NO: 2538456 - DNA, 25 bp, Homo sapien
gggtctccgctctcaaaaatcagtg

SEQ ID NO: 2538457 - DNA, 25 bp, Homo sapien
tgcccttgcgcagcgccatgcgggt

SEQ ID NO: 2538458 - DNA, 25 bp, Homo sapien
ctgtacttcagctgcgccaggtggg

SEQ ID NO: 2538459 - DNA, 25 bp, Homo sapien
gggccgcgtagccatccgtgatgaa

SEQ ID NO: 2538460 - DNA, 25 bp, Homo sapien
ttccgggagcgcagaaagtcgccct

SEQ ID NO: 2538461 - DNA, 25 bp, Homo sapien
ccataggccgcgtgcacgcgcaggt

SEQ ID NO: 2538462 - DNA, 25 bp, Homo sapien
gctgtacaccgccacgtccttggtg

SEQ ID NO: 2538463 - DNA, 25 bp, Homo sapien
tacaccgccacgtccttggtggagc

SEQ ID NO: 2538464 - DNA, 25 bp, Homo sapien
cggcccacgatgtagatctgcatgg

SEQ ID NO: 2538465 - DNA, 25 bp, Homo sapien
tggcatgggcacaggcaccatggtc

SEQ ID NO: 2538466 - DNA, 25 bp, Homo sapien
gggagactggcatgggcacaggcac

SEQ ID NO: 2538467 - DNA, 25 bp, Homo sapien
atgggcacaggcaccatggtccctc

SEQ ID NO: 2538468 - DNA, 25 bp, Homo sapien
ctgtggggagactggcatgggcaca

SEQ ID NO: 2538469 - DNA, 25 bp, Homo sapien
tcgggccggcccgtcacgtagatga

SEQ ID NO: 2538470 - DNA, 25 bp, Homo sapien
cgggtcatgcaccaggccgtcacag

SEQ ID NO: 2538471 - DNA, 25 bp, Homo sapien
cgtagatgatgaggtagcccaggtc

SEQ ID NO: 2538472 - DNA, 25 bp, Homo sapien
atgcaccaggccgtcacagaaggac

SEQ ID NO: 2538473 - DNA, 25 bp, Homo sapien
gatggacacgctagcggcaaaggaa

SEQ ID NO: 2538474 - DNA, 25 bp, Homo sapien
cgctagcggcaaaggaaccgtcgat

SEQ ID NO: 2538475 - DNA, 25 bp, Homo sapien
ggcaaaggaaccgtcgatgctgaag

SEQ ID NO: 2538476 - DNA, 25 bp, Homo sapien
gcccatgatggacacgctagcggca

SEQ ID NO: 2538477 - DNA, 25 bp, Homo sapien
tgatgtagctgtcggcaaacgtgtg

SEQ ID NO: 2538478 - DNA, 25 bp, Homo sapien
tgtagctgtcggcaaacgtgtggtc

SEQ ID NO: 2538479 - DNA, 25 bp, Homo sapien
cggtgatgtagctgtcggcaaacgt

SEQ ID NO: 2538480 - DNA, 25 bp, Homo sapien
gctgtcggcaaacgtgtggtctccc

SEQ ID NO: 2538481 - DNA, 25 bp, Homo sapien
cagagcctcgccctgcctatcccgc

SEQ ID NO: 2538482 - DNA, 25 bp, Homo sapien
tcagaaccacccagagcctcgccct

SEQ ID NO: 2538483 - DNA, 25 bp, Homo sapien
gcctatcccgccctcccagtgcagg

SEQ ID NO: 2538484 - DNA, 25 bp, Homo sapien
ctatcccgccctcccagtgcaggca

SEQ ID NO: 2538485 - DNA, 25 bp, Homo sapien
catcttgatagggtagacacccacg

SEQ ID NO: 2538486 - DNA, 25 bp, Homo sapien
ttgttggtcaccagcgtatccaggt

SEQ ID NO: 2538487 - DNA, 25 bp, Homo sapien
caccagcgtatccaggtagagccac

SEQ ID NO: 2538488 - DNA, 25 bp, Homo sapien
ggatggtgtaggagacacgcccact

SEQ ID NO: 2538489 - DNA, 25 bp, Homo sapien
atgaacctgcccgtcagaacctggg

SEQ ID NO: 2538490 - DNA, 25 bp, Homo sapien
cattggcaagggcatcattgatccg

SEQ ID NO: 2538491 - DNA, 25 bp, Homo sapien
cattgatccggtggttggccgtcac

SEQ ID NO: 2538492 - DNA, 25 bp, Homo sapien
aacctgggggccgtcctcattggca

SEQ ID NO: 2538493 - DNA, 25 bp, Homo sapien
tgctggagttgtcatgcctcatgac

SEQ ID NO: 2538494 - DNA, 25 bp, Homo sapien
ccagctccaagatgctggagttgtc

SEQ ID NO: 2538495 - DNA, 25 bp, Homo sapien
gcttcacgtgggtccgcttgcgctg

SEQ ID NO: 2538496 - DNA, 25 bp, Homo sapien
ggtgaacaccgacacttccttgcca

SEQ ID NO: 2538497 - DNA, 25 bp, Homo sapien
gggaagaggggacagtgcaggctgt

SEQ ID NO: 2538498 - DNA, 25 bp, Homo sapien
tgtggggcagatgccacccgggggc

SEQ ID NO: 2538499 - DNA, 25 bp, Homo sapien
gcagatgccacccgggggcttcctg

SEQ ID NO: 2538500 - DNA, 25 bp, Homo sapien
gaagaggggacagtgcaggctgtgg

SEQ ID NO: 2538501 - DNA, 25 bp, Homo sapien
agaccacgtctgttgactcccagta

SEQ ID NO: 2538502 - DNA, 25 bp, Homo sapien
ctgtctcagcagaaaggagaccacg

SEQ ID NO: 2538503 - DNA, 25 bp, Homo sapien
tacagggcgtagtcgatccgcttct

SEQ ID NO: 2538504 - DNA, 25 bp, Homo sapien
ggcgtagtcgatccgcttctggccc

SEQ ID NO: 2538505 - DNA, 25 bp, Homo sapien
ccaggaggggccgtgactgggctgg

SEQ ID NO: 2538506 - DNA, 25 bp, Homo sapien
ctgccaggaggggccgtgactgggc

SEQ ID NO: 2538507 - DNA, 25 bp, Homo sapien
tgccaggaggggccgtgactgggct

SEQ ID NO: 2538508 - DNA, 25 bp, Homo sapien
aggaggggccgtgactgggctgggg

SEQ ID NO: 2538509 - DNA, 25 bp, Homo sapien
ctgggggtatggctgagcgcatcgg

SEQ ID NO: 2538510 - DNA, 25 bp, Homo sapien
agggacagacgcctgacgctggggg

SEQ ID NO: 2538511 - DNA, 25 bp, Homo sapien
gacgcctgacgctgggggtatggct

SEQ ID NO: 2538512 - DNA, 25 bp, Homo sapien
gggtatggctgagcgcatcgggggc

SEQ ID NO: 2538513 - DNA, 25 bp, Homo sapien
cacctggctggcgatgctgatctca

SEQ ID NO: 2538514 - DNA, 25 bp, Homo sapien
gcgatgctggatgccgtgtagctct

SEQ ID NO: 2538515 - DNA, 25 bp, Homo sapien
gatctcactggctcggcggaagcca

SEQ ID NO: 2538516 - DNA, 25 bp, Homo sapien
tgccgtgtagctctcagccatgcct

SEQ ID NO: 2538517 - DNA, 25 bp, Homo sapien
cccaggtttgcagggcgctgacaac

SEQ ID NO: 2538518 - DNA, 25 bp, Homo sapien
tttgcagggcgctgacaacaggtgc

SEQ ID NO: 2538519 - DNA, 25 bp, Homo sapien
cagggcgctgacaacaggtgccatg

SEQ ID NO: 2538520 - DNA, 25 bp, Homo sapien
tccacccaggtttgcagggcgctga

SEQ ID NO: 2538521 - DNA, 25 bp, Homo sapien
ggaccaggtcaaccaacgaagcaga

SEQ ID NO: 2538522 - DNA, 25 bp, Homo sapien
tcccacgaactgtgagtggccaagg

SEQ ID NO: 2538523 - DNA, 25 bp, Homo sapien
cacccaggtcccacgaactgtgagt

SEQ ID NO: 2538524 - DNA, 25 bp, Homo sapien
acgaagcagacgtcaccacgagcag

SEQ ID NO: 2538525 - DNA, 25 bp, Homo sapien
cggggcccgtcttgccaggtgggcg

SEQ ID NO: 2538526 - DNA, 25 bp, Homo sapien
gggcccgtcttgccaggtgggcgcg

SEQ ID NO: 2538527 - DNA, 25 bp, Homo sapien
gcggggcccgtcttgccaggtgggc

SEQ ID NO: 2538528 - DNA, 25 bp, Homo sapien
ggggcccgtcttgccaggtgggcgc

SEQ ID NO: 2538529 - DNA, 25 bp, Homo sapien
gctcagggtttctctgcacggtctc

SEQ ID NO: 2538530 - DNA, 25 bp, Homo sapien
tcagggtttctctgcacggtctcga

SEQ ID NO: 2538531 - DNA, 25 bp, Homo sapien
ccaggaccagctcagggtttctctg

SEQ ID NO: 2538532 - DNA, 25 bp, Homo sapien
cctccaggaccagctcagggtttct

SEQ ID NO: 2538533 - DNA, 25 bp, Homo sapien
tcccccagcgggtagcgttggtagc

SEQ ID NO: 2538534 - DNA, 25 bp, Homo sapien
ctccaggcgtgaagctgacgggtcc

SEQ ID NO: 2538535 - DNA, 25 bp, Homo sapien
cagggcgtgaaagcgccgttccagc

SEQ ID NO: 2538536 - DNA, 25 bp, Homo sapien
gggacgctgaaaggcggcagggcgt

SEQ ID NO: 2538537 - DNA, 25 bp, Homo sapien
ggtgggggtgttggctgcagagctg

SEQ ID NO: 2538538 - DNA, 25 bp, Homo sapien
tgggggtgggggtgttggctgcaga

SEQ ID NO: 2538539 - DNA, 25 bp, Homo sapien
gttggctgcagagctggggctggcc

SEQ ID NO: 2538540 - DNA, 25 bp, Homo sapien
ggggtgggggtgttggctgcagagc

SEQ ID NO: 2538541 - DNA, 25 bp, Homo sapien
ggaagaggtcggtgatctcaaagtc

SEQ ID NO: 2538542 - DNA, 25 bp, Homo sapien
ggtcggtgatctcaaagtcaaacct

SEQ ID NO: 2538543 - DNA, 25 bp, Homo sapien
aagaggaagaggtcggtgatctcaa

SEQ ID NO: 2538544 - DNA, 25 bp, Homo sapien
ccccagcgggcacccgaagaggaag

SEQ ID NO: 2538545 - DNA, 25 bp, Homo sapien
cagtcctcagcacgctggcatggag

SEQ ID NO: 2538546 - DNA, 25 bp, Homo sapien
gctcagtcctcagcacgctggcatg

SEQ ID NO: 2538547 - DNA, 25 bp, Homo sapien
gggctcagtcctcagcacgctggca

SEQ ID NO: 2538548 - DNA, 25 bp, Homo sapien
tcagtcctcagcacgctggcatgga

SEQ ID NO: 2538549 - DNA, 25 bp, Homo sapien
gggcagttgccttttggggtcctca

SEQ ID NO: 2538550 - DNA, 25 bp, Homo sapien
gctgctggatggtatccagctcgta

SEQ ID NO: 2538551 - DNA, 25 bp, Homo sapien
ccagctcgtaggtggatgagtcgct

SEQ ID NO: 2538552 - DNA, 25 bp, Homo sapien
aggtggatgagtcgctcctcttgcg

SEQ ID NO: 2538553 - DNA, 25 bp, Homo sapien
tgcttcggctcaggtgccgactgct

SEQ ID NO: 2538554 - DNA, 25 bp, Homo sapien
tcgacgttgcttcggctcaggtgcc

SEQ ID NO: 2538555 - DNA, 25 bp, Homo sapien
gggatgtcgacgttgcttcggctca

SEQ ID NO: 2538556 - DNA, 25 bp, Homo sapien
gctcaggtgccgactgctctccagg

SEQ ID NO: 2538557 - DNA, 25 bp, Homo sapien
ccaccaccgcagcagtgtgctgcat

SEQ ID NO: 2538558 - DNA, 25 bp, Homo sapien
accaccgcagcagtgtgctgcattc

SEQ ID NO: 2538559 - DNA, 25 bp, Homo sapien
tgctgcattcatcaggatgcccggg

SEQ ID NO: 2538560 - DNA, 25 bp, Homo sapien
attcatcaggatgcccggggacagc

SEQ ID NO: 2538561 - DNA, 25 bp, Homo sapien
tcattggtctacaggccgttttcca

SEQ ID NO: 2538562 - DNA, 25 bp, Homo sapien
ctcattggtctacaggccgttttcc

SEQ ID NO: 2538563 - DNA, 25 bp, Homo sapien
tcagacaccggctggttactgtagc

SEQ ID NO: 2538564 - DNA, 25 bp, Homo sapien
tagcacagggcatcaaatgccagga

SEQ ID NO: 2538565 - DNA, 25 bp, Homo sapien
ctgcatgctgaccacgctgccccgg

SEQ ID NO: 2538566 - DNA, 25 bp, Homo sapien
gcggctgctgctctgactctcagac

SEQ ID NO: 2538567 - DNA, 25 bp, Homo sapien
gatgaagtccccataggcaaggttg

SEQ ID NO: 2538568 - DNA, 25 bp, Homo sapien
aggttggctcgctgaatcactgtgg

SEQ ID NO: 2538569 - DNA, 25 bp, Homo sapien
tcctgactgctggacagacagcctt

SEQ ID NO: 2538570 - DNA, 25 bp, Homo sapien
cctgggacttgatgaagtccccata

SEQ ID NO: 2538571 - DNA, 25 bp, Homo sapien
ttagcatcgcccttcttggagctgg

SEQ ID NO: 2538572 - DNA, 25 bp, Homo sapien
tagtgcacgcgcatgacggtgtcga

SEQ ID NO: 2538573 - DNA, 25 bp, Homo sapien
cagtagcagcacgtggatcttggag

SEQ ID NO: 2538574 - DNA, 25 bp, Homo sapien
acacgttggcgatggtgttagcatc

SEQ ID NO: 2538575 - DNA, 25 bp, Homo sapien
cacatcacttctgcctagacgactg

SEQ ID NO: 2538576 - DNA, 25 bp, Homo sapien
agacgactgtcgcttcctccctttt

SEQ ID NO: 2538577 - DNA, 25 bp, Homo sapien
gttttattggacacactgagctccg

SEQ ID NO: 2538578 - DNA, 25 bp, Homo sapien
acaaggtgaagatcttatttttgat

SEQ ID NO: 2538579 - DNA, 25 bp, Homo sapien
cagctgctccacactggaggccacc

SEQ ID NO: 2538580 - DNA, 25 bp, Homo sapien
tctatgatgttcagctgctccacac

SEQ ID NO: 2538581 - DNA, 25 bp, Homo sapien
ctctatgatgttcagctgctccaca

SEQ ID NO: 2538582 - DNA, 25 bp, Homo sapien
gttcagctgctccacactggaggcc

SEQ ID NO: 2538583 - DNA, 25 bp, Homo sapien
ggggcaccctggcggtacagaccat

SEQ ID NO: 2538584 - DNA, 25 bp, Homo sapien
tcaggggcaccctggcggtacagac

SEQ ID NO: 2538585 - DNA, 25 bp, Homo sapien
caggggcaccctggcggtacagacc

SEQ ID NO: 2538586 - DNA, 25 bp, Homo sapien
aggggcaccctggcggtacagacca

SEQ ID NO: 2538587 - DNA, 25 bp, Homo sapien
ggctctgggctctcgatcttgtcca

SEQ ID NO: 2538588 - DNA, 25 bp, Homo sapien
gtcattggagctccacttggtgatg

SEQ ID NO: 2538589 - DNA, 25 bp, Homo sapien
gatcttgtccatgaggtcattggag

SEQ ID NO: 2538590 - DNA, 25 bp, Homo sapien
ccatgaggtcattggagctccactt

SEQ ID NO: 2538591 - DNA, 25 bp, Homo sapien
ttggggaacatttcctctgtgtcgg

SEQ ID NO: 2538592 - DNA, 25 bp, Homo sapien
catttcctctgtgtcggacaggtcc

SEQ ID NO: 2538593 - DNA, 25 bp, Homo sapien
ggggaacatttcctctgtgtcggac

SEQ ID NO: 2538594 - DNA, 25 bp, Homo sapien
gaacatttcctctgtgtcggacagg

SEQ ID NO: 2538595 - DNA, 25 bp, Homo sapien
ctcatccgagtccctggcaatactc

SEQ ID NO: 2538596 - DNA, 25 bp, Homo sapien
cgcatcgaagaactcatcatctgag

SEQ ID NO: 2538597 - DNA, 25 bp, Homo sapien
tctgagatgctgtggcgggaaggac

SEQ ID NO: 2538598 - DNA, 25 bp, Homo sapien
cgtgcgcatcgaagaactcatcatc

SEQ ID NO: 2538599 - DNA, 25 bp, Homo sapien
acgaccgagacgacttggaggatgt

SEQ ID NO: 2538600 - DNA, 25 bp, Homo sapien
cccgcttggacgaccgagacgactt

SEQ ID NO: 2538601 - DNA, 25 bp, Homo sapien
cttggaggatgtggaccactgtttc

SEQ ID NO: 2538602 - DNA, 25 bp, Homo sapien
tgtttcttgaggccgcgccccacta

SEQ ID NO: 2538603 - DNA, 25 bp, Homo sapien
tccgagacggcttcgtgcttgacga

SEQ ID NO: 2538604 - DNA, 25 bp, Homo sapien
gacggcttcgtgcttgacgagctca

SEQ ID NO: 2538605 - DNA, 25 bp, Homo sapien
cgagacggcttcgtgcttgacgagc

SEQ ID NO: 2538606 - DNA, 25 bp, Homo sapien
ctggtccgagacggcttcgtgcttg

SEQ ID NO: 2538607 - DNA, 25 bp, Homo sapien
tgggccatcttacgggaaagcatga

SEQ ID NO: 2538608 - DNA, 25 bp, Homo sapien
aggcctgccggtgagcccgcaccat

SEQ ID NO: 2538609 - DNA, 25 bp, Homo sapien
gcccataccactcgtcctgccagca

SEQ ID NO: 2538610 - DNA, 25 bp, Homo sapien
tgctcagcccataccactcgtcctg

SEQ ID NO: 2538611 - DNA, 25 bp, Homo sapien
tattatgcacgtgagatatataaga

SEQ ID NO: 2538612 - DNA, 25 bp, Homo sapien
ttatgcacgtgagatatataagaat

SEQ ID NO: 2538613 - DNA, 25 bp, Homo sapien
tatgcacgtgagatatataagaata

SEQ ID NO: 2538614 - DNA, 25 bp, Homo sapien
tatattatgcacgtgagatatataa

SEQ ID NO: 2538615 - DNA, 25 bp, Homo sapien
gaacctctcgatcttggactgcatg

SEQ ID NO: 2538616 - DNA, 25 bp, Homo sapien
tgtactcctcgatccagttctcgga

SEQ ID NO: 2538617 - DNA, 25 bp, Homo sapien
tcttggttgactggaacagcttggg

SEQ ID NO: 2538618 - DNA, 25 bp, Homo sapien
caccttgcagagcttgtatgcgcac

SEQ ID NO: 2538619 - DNA, 25 bp, Homo sapien
gaacacgtcggggttttctccagca

SEQ ID NO: 2538620 - DNA, 25 bp, Homo sapien
tttccacaggagagaggttgaacac

SEQ ID NO: 2538621 - DNA, 25 bp, Homo sapien
ttataaaaggtttcaatgtcgatgg

SEQ ID NO: 2538622 - DNA, 25 bp, Homo sapien
ttcaatgtcgatggagaatttctcc

SEQ ID NO: 2538623 - DNA, 25 bp, Homo sapien
gggtaggcattccaagactcctcca

SEQ ID NO: 2538624 - DNA, 25 bp, Homo sapien
gtgtacggccggttctccaggatct

SEQ ID NO: 2538625 - DNA, 25 bp, Homo sapien
gctgccttcgccatatgtctcgtta

SEQ ID NO: 2538626 - DNA, 25 bp, Homo sapien
cctgggccatctgtgtacggccggt

SEQ ID NO: 2538627 - DNA, 25 bp, Homo sapien
ggcaggggtggacaggacagatatg

SEQ ID NO: 2538628 - DNA, 25 bp, Homo sapien
aggcaggggtggacaggacagatat

SEQ ID NO: 2538629 - DNA, 25 bp, Homo sapien
caggcaggggtggacaggacagata

SEQ ID NO: 2538630 - DNA, 25 bp, Homo sapien
ctttatgaacatgaaatcttggtag

SEQ ID NO: 2538631 - DNA, 25 bp, Homo sapien
gtaggccaggtacttagcggcttta

SEQ ID NO: 2538632 - DNA, 25 bp, Homo sapien
tacttagcggctttatgaacatgaa

SEQ ID NO: 2538633 - DNA, 25 bp, Homo sapien
gtttagataggaggtgaggccccca

SEQ ID NO: 2538634 - DNA, 25 bp, Homo sapien
gtttctaaatcaagccccactgcgg

SEQ ID NO: 2538635 - DNA, 25 bp, Homo sapien
cagaatgtcagtgcgcaggcgtgca

SEQ ID NO: 2538636 - DNA, 25 bp, Homo sapien
ttcatttccggtgctcagaggctcc

SEQ ID NO: 2538637 - DNA, 25 bp, Homo sapien
gaccccagggtagaaatgtgtctcc

SEQ ID NO: 2538638 - DNA, 25 bp, Homo sapien
aactcctccaatgcaacaacagaga

SEQ ID NO: 2538639 - DNA, 25 bp, Homo sapien
aacaacagagaaacaacaaccccat

SEQ ID NO: 2538640 - DNA, 25 bp, Homo sapien
tacaatatatcttatagtaacttat

SEQ ID NO: 2538641 - DNA, 25 bp, Homo sapien
tagctactccagaggtgaagttggc

SEQ ID NO: 2538642 - DNA, 25 bp, Homo sapien
tatggtgactcttcatgctgactcc

SEQ ID NO: 2538643 - DNA, 25 bp, Homo sapien
gaccctgtgctatgtgtagctctga

SEQ ID NO: 2538644 - DNA, 25 bp, Homo sapien
cagacagggtggagagcatgtaacc

SEQ ID NO: 2538645 - DNA, 25 bp, Homo sapien
gggacactagtcattcattcaggga

SEQ ID NO: 2538646 - DNA, 25 bp, Homo sapien
ctttaacacggtgtatattgagtgc

SEQ ID NO: 2538647 - DNA, 25 bp, Homo sapien
tgtatattgagtgctgctccagcag

SEQ ID NO: 2538648 - DNA, 25 bp, Homo sapien
gtgccaggtactttgacgcgcgagc

SEQ ID NO: 2538649 - DNA, 25 bp, Homo sapien
caggtactttgacgcgcgagcccag

SEQ ID NO: 2538650 - DNA, 25 bp, Homo sapien
tgcagagaggaaggcctattcctag

SEQ ID NO: 2538651 - DNA, 25 bp, Homo sapien
cttgcagagaggaaggcctattcct

SEQ ID NO: 2538652 - DNA, 25 bp, Homo sapien
cagagaggaaggcctattcctagct

SEQ ID NO: 2538653 - DNA, 25 bp, Homo sapien
gagaggaaggcctattcctagctgc

SEQ ID NO: 2538654 - DNA, 25 bp, Homo sapien
aattaaggggttgtacagcaagaag

SEQ ID NO: 2538655 - DNA, 25 bp, Homo sapien
cgactcagtctgatgctgtaattaa

SEQ ID NO: 2538656 - DNA, 25 bp, Homo sapien
cacaccaacgactcagtctgatgct

SEQ ID NO: 2538657 - DNA, 25 bp, Homo sapien
tgggagcccaataggcgaagccagt

SEQ ID NO: 2538658 - DNA, 25 bp, Homo sapien
aagcaatctgatgccgtgcgcccat

SEQ ID NO: 2538659 - DNA, 25 bp, Homo sapien
cgcctggcatcgtgcctagaggcca

SEQ ID NO: 2538660 - DNA, 25 bp, Homo sapien
ccacatgtggtgtctgtgcgctggc

SEQ ID NO: 2538661 - DNA, 25 bp, Homo sapien
atggtgtgctctgtgcgcctggcat

SEQ ID NO: 2538662 - DNA, 25 bp, Homo sapien
tgtatcatgtacagctgggcgatgc

SEQ ID NO: 2538663 - DNA, 25 bp, Homo sapien
acggtcattggcagaggaatccgat

SEQ ID NO: 2538664 - DNA, 25 bp, Homo sapien
tgggcgatgcggtactcctccacgg

SEQ ID NO: 2538665 - DNA, 25 bp, Homo sapien
gaggaatccgatattcctttataat

SEQ ID NO: 2538666 - DNA, 25 bp, Homo sapien
ttggagtccaagccttcccgtcgat

SEQ ID NO: 2538667 - DNA, 25 bp, Homo sapien
gagtccaagccttcccgtcgatggg

SEQ ID NO: 2538668 - DNA, 25 bp, Homo sapien
tggagtccaagccttcccgtcgatg

SEQ ID NO: 2538669 - DNA, 25 bp, Homo sapien
tccaagccttcccgtcgatggggaa

SEQ ID NO: 2538670 - DNA, 25 bp, Homo sapien
gcaaggttccttaaataaccatgac

SEQ ID NO: 2538671 - DNA, 25 bp, Homo sapien
ggcaaggttccttaaataaccatga

SEQ ID NO: 2538672 - DNA, 25 bp, Homo sapien
caaggttccttaaataaccatgaca

SEQ ID NO: 2538673 - DNA, 25 bp, Homo sapien
aggcaaggttccttaaataaccatg

SEQ ID NO: 2538674 - DNA, 25 bp, Homo sapien
caggcactagcaaggtaggaccccc

SEQ ID NO: 2538675 - DNA, 25 bp, Homo sapien
tagcaaggtaggaccccctgagcca

SEQ ID NO: 2538676 - DNA, 25 bp, Homo sapien
ctgagccagattcataatgttcctt

SEQ ID NO: 2538677 - DNA, 25 bp, Homo sapien
gagccagattcataatgttccttaa

SEQ ID NO: 2538678 - DNA, 25 bp, Homo sapien
cagagagggctatatttgctccagc

SEQ ID NO: 2538679 - DNA, 25 bp, Homo sapien
accagcaggtcatgtaagttcatct

SEQ ID NO: 2538680 - DNA, 25 bp, Homo sapien
cctgagttaacacccatctgcgatc

SEQ ID NO: 2538681 - DNA, 25 bp, Homo sapien
tgcgatcactctaaattctcaggta

SEQ ID NO: 2538682 - DNA, 25 bp, Homo sapien
gtataccaggtctccgtctccaatg

SEQ ID NO: 2538683 - DNA, 25 bp, Homo sapien
tgtcggaaggataaaccaaggccag

SEQ ID NO: 2538684 - DNA, 25 bp, Homo sapien
gacaattcagccaaggttgtagggc

SEQ ID NO: 2538685 - DNA, 25 bp, Homo sapien
tgggcattttgtcggaaggataaac

SEQ ID NO: 2538686 - DNA, 25 bp, Homo sapien
gggaggcccctccttggcactgcag

SEQ ID NO: 2538687 - DNA, 25 bp, Homo sapien
cttggcactgcagccatatccaagt

SEQ ID NO: 2538688 - DNA, 25 bp, Homo sapien
tcaagcataacttccagcccctgct

SEQ ID NO: 2538689 - DNA, 25 bp, Homo sapien
agcccctgctctttctgggtccagg

SEQ ID NO: 2538690 - DNA, 25 bp, Homo sapien
ccatgaaatatggagctgctcatct

SEQ ID NO: 2538691 - DNA, 25 bp, Homo sapien
tcatcttttccctgtgctccccata

SEQ ID NO: 2538692 - DNA, 25 bp, Homo sapien
cacactgctgaccacgtgttgtgct

SEQ ID NO: 2538693 - DNA, 25 bp, Homo sapien
tgtgctccccataagccacactgct

SEQ ID NO: 2538694 - DNA, 25 bp, Homo sapien
agccaatgaggtgattattccaatt

SEQ ID NO: 2538695 - DNA, 25 bp, Homo sapien
tggaacgagctttccacactttcac

SEQ ID NO: 2538696 - DNA, 25 bp, Homo sapien
aatgaggtgattattccaattttcc

SEQ ID NO: 2538697 - DNA, 25 bp, Homo sapien
ttcctggaacgagctttccacactt

SEQ ID NO: 2538698 - DNA, 25 bp, Homo sapien
gagcaggctctgtccacagcctagc

SEQ ID NO: 2538699 - DNA, 25 bp, Homo sapien
agcaggctctgtccacagcctagct

SEQ ID NO: 2538700 - DNA, 25 bp, Homo sapien
tctgtccacagcctagctccagagg

SEQ ID NO: 2538701 - DNA, 25 bp, Homo sapien
aggctctgtccacagcctagctcca

SEQ ID NO: 2538702 - DNA, 25 bp, Homo sapien
tgtcacccagagcatataggagcct

SEQ ID NO: 2538703 - DNA, 25 bp, Homo sapien
gatacacaggtagcccgattcagta

SEQ ID NO: 2538704 - DNA, 25 bp, Homo sapien
tcatgatatagagaagaccttggcc

SEQ ID NO: 2538705 - DNA, 25 bp, Homo sapien
gacattatgactcccagatgggcca

SEQ ID NO: 2538706 - DNA, 25 bp, Homo sapien
gacaggccccacttggatgctacag

SEQ ID NO: 2538707 - DNA, 25 bp, Homo sapien
tccctggagtaaggtggcccagcag

SEQ ID NO: 2538708 - DNA, 25 bp, Homo sapien
agcgttctgcacctacacactggag

SEQ ID NO: 2538709 - DNA, 25 bp, Homo sapien
taaaaggactccagtctggcaccat

SEQ ID NO: 2538710 - DNA, 25 bp, Homo sapien
gcctcaaacaggattactaaatcgc

SEQ ID NO: 2538711 - DNA, 25 bp, Homo sapien
ttactaaatcgctgtttgaaaagac

SEQ ID NO: 2538712 - DNA, 25 bp, Homo sapien
tctggaaagcattgccacactgcag

SEQ ID NO: 2538713 - DNA, 25 bp, Homo sapien
caggattactaaatcgctgtttgaa

SEQ ID NO: 2538714 - DNA, 25 bp, Homo sapien
tggctccccaggttcggcctgcgga

SEQ ID NO: 2538715 - DNA, 25 bp, Homo sapien
catgccctctcctaacccatcctag

SEQ ID NO: 2538716 - DNA, 25 bp, Homo sapien
ccatcctaggtctccgaaagagtga

SEQ ID NO: 2538717 - DNA, 25 bp, Homo sapien
acctctgcctttgccatgccctctc

SEQ ID NO: 2538718 - DNA, 25 bp, Homo sapien
gcagtgcgtccacattagggtggct

SEQ ID NO: 2538719 - DNA, 25 bp, Homo sapien
gggctcacagcacggcagtgcgtcc

SEQ ID NO: 2538720 - DNA, 25 bp, Homo sapien
tagccaagcttgctggacagtcgcc

SEQ ID NO: 2538721 - DNA, 25 bp, Homo sapien
aacttctgggcttcgtggcgcactg

SEQ ID NO: 2538722 - DNA, 25 bp, Homo sapien
gggatgagcgctggcccacaggctc

SEQ ID NO: 2538723 - DNA, 25 bp, Homo sapien
tgtacaacggaatcatgggcccatt

SEQ ID NO: 2538724 - DNA, 25 bp, Homo sapien
tgagcgctggcccacaggctctggg

SEQ ID NO: 2538725 - DNA, 25 bp, Homo sapien
ggagatgctctcaagggaacaagga

SEQ ID NO: 2538726 - DNA, 25 bp, Homo sapien
cacaagctcctggtctgaacatcat

SEQ ID NO: 2538727 - DNA, 25 bp, Homo sapien
cccacaagctcctggtctgaacatc

SEQ ID NO: 2538728 - DNA, 25 bp, Homo sapien
acaagctcctggtctgaacatcatc

SEQ ID NO: 2538729 - DNA, 25 bp, Homo sapien
ccacaagctcctggtctgaacatca

SEQ ID NO: 2538730 - DNA, 25 bp, Homo sapien
taaagcacaattcggatcctgaccc

SEQ ID NO: 2538731 - DNA, 25 bp, Homo sapien
caggagggccagaagtttttaacat

SEQ ID NO: 2538732 - DNA, 25 bp, Homo sapien
aaatacgtgtggaatgaatcgctgc

SEQ ID NO: 2538733 - DNA, 25 bp, Homo sapien
ttccgaagcttcaggtcactcagag

SEQ ID NO: 2538734 - DNA, 25 bp, Homo sapien
aaatttagaggaaaggagctgtttg

SEQ ID NO: 2538735 - DNA, 25 bp, Homo sapien
aggaaggagaggctaatgcggaccc

SEQ ID NO: 2538736 - DNA, 25 bp, Homo sapien
atgatgccaagaattctgaggtcca

SEQ ID NO: 2538737 - DNA, 25 bp, Homo sapien
cagtatgccgtgacagcacagaggg

SEQ ID NO: 2538738 - DNA, 25 bp, Homo sapien
gccctgcctcgacttggcagccaag

SEQ ID NO: 2538739 - DNA, 25 bp, Homo sapien
cctgcctcgacttggcagccaagac

SEQ ID NO: 2538740 - DNA, 25 bp, Homo sapien
cgggccctgcctcgacttggcagcc

SEQ ID NO: 2538741 - DNA, 25 bp, Homo sapien
ggccctgcctcgacttggcagccaa

SEQ ID NO: 2538742 - DNA, 25 bp, Homo sapien
ggtctgagaaggctccactgatgtc

SEQ ID NO: 2538743 - DNA, 25 bp, Homo sapien
gtctgagaaggctccactgatgtcc

SEQ ID NO: 2538744 - DNA, 25 bp, Homo sapien
ctgtgggtctgagaaggctccactg

SEQ ID NO: 2538745 - DNA, 25 bp, Homo sapien
tgggtctgagaaggctccactgatg

SEQ ID NO: 2538746 - DNA, 25 bp, Homo sapien
aggaccaggacacacgtgccagcat

SEQ ID NO: 2538747 - DNA, 25 bp, Homo sapien
tccctaggctcacagaaggttgttg

SEQ ID NO: 2538748 - DNA, 25 bp, Homo sapien
tgggtccctaggctcacagaaggtt

SEQ ID NO: 2538749 - DNA, 25 bp, Homo sapien
gaggagaaatgggtccctaggctca

SEQ ID NO: 2538750 - DNA, 25 bp, Homo sapien
ccccacagaattagatccacagggg

SEQ ID NO: 2538751 - DNA, 25 bp, Homo sapien
accccacagaattagatccacaggg

SEQ ID NO: 2538752 - DNA, 25 bp, Homo sapien
tattgtcgaacacatggcccttccg

SEQ ID NO: 2538753 - DNA, 25 bp, Homo sapien
gacatggtaagtattgtcgaacaca

SEQ ID NO: 2538754 - DNA, 25 bp, Homo sapien
gcccttccgcaaatactgtgcctta

SEQ ID NO: 2538755 - DNA, 25 bp, Homo sapien
ctactggacatggtaagtattgtcg

SEQ ID NO: 2538756 - DNA, 25 bp, Homo sapien
tgtcaagagtgccataggagttcct

SEQ ID NO: 2538757 - DNA, 25 bp, Homo sapien
tacagtctgggatgatgacctttgc

SEQ ID NO: 2538758 - DNA, 25 bp, Homo sapien
tctgcaagtagagtgatgaccacag

SEQ ID NO: 2538759 - DNA, 25 bp, Homo sapien
tggtacaacacctagcaccttaggg

SEQ ID NO: 2538760 - DNA, 25 bp, Homo sapien
ctttttgcaaaagttatctgagccc

SEQ ID NO: 2538761 - DNA, 25 bp, Homo sapien
gctctttttgcaaaagttatctgag

SEQ ID NO: 2538762 - DNA, 25 bp, Homo sapien
ctgctctttttgcaaaagttatctg

SEQ ID NO: 2538763 - DNA, 25 bp, Homo sapien
tctttttgcaaaagttatctgagcc

SEQ ID NO: 2538764 - DNA, 25 bp, Homo sapien
tgagaacatggctaatgggccaagc

SEQ ID NO: 2538765 - DNA, 25 bp, Homo sapien
ggaaaagcataacgaagaccacacc

SEQ ID NO: 2538766 - DNA, 25 bp, Homo sapien
ggccaagctgttcaaagagctccag

SEQ ID NO: 2538767 - DNA, 25 bp, Homo sapien
ggccaagctctcaccggttcaagga

SEQ ID NO: 2538768 - DNA, 25 bp, Homo sapien
ttctcagatactcggtggtaaacaa

SEQ ID NO: 2538769 - DNA, 25 bp, Homo sapien
cctccctgaaggttagcttctggtg

SEQ ID NO: 2538770 - DNA, 25 bp, Homo sapien
gataggcctcctggtcacatctgag

SEQ ID NO: 2538771 - DNA, 25 bp, Homo sapien
tgggaaatccaagtcgcaagcctgt

SEQ ID NO: 2538772 - DNA, 25 bp, Homo sapien
tgaactgtccgggtgttactcttgt

SEQ ID NO: 2538773 - DNA, 25 bp, Homo sapien
cctgaactgtccgggtgttactctt

SEQ ID NO: 2538774 - DNA, 25 bp, Homo sapien
ctgaactgtccgggtgttactcttg

SEQ ID NO: 2538775 - DNA, 25 bp, Homo sapien
cgcctcacggggagcgcccgccccg

SEQ ID NO: 2538776 - DNA, 25 bp, Homo sapien
gccgcctcacggggagcgcccgccc

SEQ ID NO: 2538777 - DNA, 25 bp, Homo sapien
cctcacggggagcgcccgccccgcg

SEQ ID NO: 2538778 - DNA, 25 bp, Homo sapien
tcacggggagcgcccgccccgcggc

SEQ ID NO: 2538779 - DNA, 25 bp, Homo sapien
cagaacccaactgaacgggccagga

SEQ ID NO: 2538780 - DNA, 25 bp, Homo sapien
ccaactgaacgggccaggaaggcca

SEQ ID NO: 2538781 - DNA, 25 bp, Homo sapien
cggcagaacccaactgaacgggcca

SEQ ID NO: 2538782 - DNA, 25 bp, Homo sapien
cacggcagaacccaactgaacgggc

SEQ ID NO: 2538783 - DNA, 25 bp, Homo sapien
gcacatttatggcttgattcctcac

SEQ ID NO: 2538784 - DNA, 25 bp, Homo sapien
tacagcttcacgactccagcatctg

SEQ ID NO: 2538785 - DNA, 25 bp, Homo sapien
tgagtgcctgtagtgcaagaaagag

SEQ ID NO: 2538786 - DNA, 25 bp, Homo sapien
tgctcccgcggagcttacagcttca

SEQ ID NO: 2538787 - DNA, 25 bp, Homo sapien
gaaagtatgctacctcaaggctggg

SEQ ID NO: 2538788 - DNA, 25 bp, Homo sapien
cagtccaaggcagtttttaggtcaa

SEQ ID NO: 2538789 - DNA, 25 bp, Homo sapien
tcagatttcaagtagcgtccagcaa

SEQ ID NO: 2538790 - DNA, 25 bp, Homo sapien
tttgcaaagcgtgaagagaacatct

SEQ ID NO: 2538791 - DNA, 25 bp, Homo sapien
tcatcttatagctgagaaaggcagg

SEQ ID NO: 2538792 - DNA, 25 bp, Homo sapien
catacctcaggagtagctcctgcaa

SEQ ID NO: 2538793 - DNA, 25 bp, Homo sapien
gggagagttcactttctatttgcat

SEQ ID NO: 2538794 - DNA, 25 bp, Homo sapien
agcacggccactttagctacatctg

SEQ ID NO: 2538795 - DNA, 25 bp, Homo sapien
tagctgctatttagaattgccatct

SEQ ID NO: 2538796 - DNA, 25 bp, Homo sapien
tcataagataagcattaccgaagag

SEQ ID NO: 2538797 - DNA, 25 bp, Homo sapien
tttaaactattaatacctgcagcaa

SEQ ID NO: 2538798 - DNA, 25 bp, Homo sapien
ctttcctgcttttaggtggagtgtt

SEQ ID NO: 2538799 - DNA, 25 bp, Homo sapien
tccttggcaagataaaactatcatc

SEQ ID NO: 2538800 - DNA, 25 bp, Homo sapien
ttcttaagaatgtagtagattttac

SEQ ID NO: 2538801 - DNA, 25 bp, Homo sapien
gccaatataggctactaagaagata

SEQ ID NO: 2538802 - DNA, 25 bp, Homo sapien
gactgatagctccaatctattacac

SEQ ID NO: 2538803 - DNA, 25 bp, Homo sapien
cagaacaatgggcagagagctactc

SEQ ID NO: 2538804 - DNA, 25 bp, Homo sapien
gaccagccaggtgaagggtgctcaa

SEQ ID NO: 2538805 - DNA, 25 bp, Homo sapien
caactatgacggacagctgaagcca

SEQ ID NO: 2538806 - DNA, 25 bp, Homo sapien
tgagagcctgcttggaataactggg

SEQ ID NO: 2538807 - DNA, 25 bp, Homo sapien
tgtttagaaacaagctgcttcctct

SEQ ID NO: 2538808 - DNA, 25 bp, Homo sapien
tacaagagattcctgagcataacaa

SEQ ID NO: 2538809 - DNA, 25 bp, Homo sapien
gcaagtgtaagaatagcatgattgt

SEQ ID NO: 2538810 - DNA, 25 bp, Homo sapien
aatatgtggccatttgaagtataaa

SEQ ID NO: 2538811 - DNA, 25 bp, Homo sapien
tagcgtcatgcgaactgaacccagt

SEQ ID NO: 2538812 - DNA, 25 bp, Homo sapien
caaaacatggaatttctttagcgtc

SEQ ID NO: 2538813 - DNA, 25 bp, Homo sapien
tgaacccagttctcgattaatcctt

SEQ ID NO: 2538814 - DNA, 25 bp, Homo sapien
aaagatttgcagaggtgcgcaaaac

SEQ ID NO: 2538815 - DNA, 25 bp, Homo sapien
ttattcagtattaattccaatggtg

SEQ ID NO: 2538816 - DNA, 25 bp, Homo sapien
tataaaaggattatagaacacttag

SEQ ID NO: 2538817 - DNA, 25 bp, Homo sapien
tattaattccaatggtgtcctgaaa

SEQ ID NO: 2538818 - DNA, 25 bp, Homo sapien
ggattatagaacacttagaatatag

SEQ ID NO: 2538819 - DNA, 25 bp, Homo sapien
tcctgactgcaggtgatctgatctg

SEQ ID NO: 2538820 - DNA, 25 bp, Homo sapien
tgcacccagccgtgtatcattttta

SEQ ID NO: 2538821 - DNA, 25 bp, Homo sapien
gactgcaggtgatctgatctgccca

SEQ ID NO: 2538822 - DNA, 25 bp, Homo sapien
actgcacccagccgtgtatcatttt

SEQ ID NO: 2538823 - DNA, 25 bp, Homo sapien
tatttctgggaatgactcctaaggc

SEQ ID NO: 2538824 - DNA, 25 bp, Homo sapien
tgacatatatccaaatccttagaaa

SEQ ID NO: 2538825 - DNA, 25 bp, Homo sapien
gcttatcttcatacacggcaggtag

SEQ ID NO: 2538826 - DNA, 25 bp, Homo sapien
aaacatcctgggttacaacttgaca

SEQ ID NO: 2538827 - DNA, 25 bp, Homo sapien
ggttaaatacgttactgctgatgga

SEQ ID NO: 2538828 - DNA, 25 bp, Homo sapien
gcctctaaagcagattcaagctaag

SEQ ID NO: 2538829 - DNA, 25 bp, Homo sapien
tgctataatcaaacacttcccgtaa

SEQ ID NO: 2538830 - DNA, 25 bp, Homo sapien
ggctcactttttgaacctctacagc

SEQ ID NO: 2538831 - DNA, 25 bp, Homo sapien
gcatcctgcttagtgctgcctcaat

SEQ ID NO: 2538832 - DNA, 25 bp, Homo sapien
ttcgtcctccaggagaaggcatcct

SEQ ID NO: 2538833 - DNA, 25 bp, Homo sapien
gaaggcatcctgcttagtgctgcct

SEQ ID NO: 2538834 - DNA, 25 bp, Homo sapien
ttgtctgtaaagtgattcgtcctcc

SEQ ID NO: 2538835 - DNA, 25 bp, Homo sapien
aaaatcattcccctgtggagtgact

SEQ ID NO: 2538836 - DNA, 25 bp, Homo sapien
caaaaaatcgttctgtttcagctag

SEQ ID NO: 2538837 - DNA, 25 bp, Homo sapien
tggagtgactgaaaccggcttacac

SEQ ID NO: 2538838 - DNA, 25 bp, Homo sapien
gcttacactgttcgtagctaactga

SEQ ID NO: 2538839 - DNA, 25 bp, Homo sapien
tatgtggcccaaaaaagtaatgaaa

SEQ ID NO: 2538840 - DNA, 25 bp, Homo sapien
gccctctgtttgacaatctttgcaa

SEQ ID NO: 2538841 - DNA, 25 bp, Homo sapien
tctggatatagctgctatgtggccc

SEQ ID NO: 2538842 - DNA, 25 bp, Homo sapien
caatttttcgtgtaggttgcatata

SEQ ID NO: 2538843 - DNA, 25 bp, Homo sapien
ctaaatcatccaaaagtatatcaaa

SEQ ID NO: 2538844 - DNA, 25 bp, Homo sapien
ttgctttcttggattggtacgttgt

SEQ ID NO: 2538845 - DNA, 25 bp, Homo sapien
gacacaggaacagtatctaaatcat

SEQ ID NO: 2538846 - DNA, 25 bp, Homo sapien
gattggtacgttgtaatgtagacac

SEQ ID NO: 2538847 - DNA, 25 bp, Homo sapien
gaatgaagcaagttacttgtgagaa

SEQ ID NO: 2538848 - DNA, 25 bp, Homo sapien
aatgaagcaagttacttgtgagaaa

SEQ ID NO: 2538849 - DNA, 25 bp, Homo sapien
tgaatgaagcaagttacttgtgaga

SEQ ID NO: 2538850 - DNA, 25 bp, Homo sapien
gatcgctttggactataagccacag

SEQ ID NO: 2538851 - DNA, 25 bp, Homo sapien
gctaagcagatgactaaatcctggg

SEQ ID NO: 2538852 - DNA, 25 bp, Homo sapien
ggtgttagcataatctctctttttg

SEQ ID NO: 2538853 - DNA, 25 bp, Homo sapien
agtcactggtgttagcataatctct

SEQ ID NO: 2538854 - DNA, 25 bp, Homo sapien
taatcctaacacctagaggtaacca

SEQ ID NO: 2538855 - DNA, 25 bp, Homo sapien
ccttctatatgtatcagcataacag

SEQ ID NO: 2538856 - DNA, 25 bp, Homo sapien
ggtaaccactgtaacactgtagtat

SEQ ID NO: 2538857 - DNA, 25 bp, Homo sapien
cagacagtactttcagcactctgac

SEQ ID NO: 2538858 - DNA, 25 bp, Homo sapien
aatagatttgactcagagatcacgc

SEQ ID NO: 2538859 - DNA, 25 bp, Homo sapien
agagatgtacacatctaactcttac

SEQ ID NO: 2538860 - DNA, 25 bp, Homo sapien
cagagtactctactaggtgctgagg

SEQ ID NO: 2538861 - DNA, 25 bp, Homo sapien
gagatcacgcttttgaacccaagag

SEQ ID NO: 2538862 - DNA, 25 bp, Homo sapien
cttgatttacgatttgaaggtggta

SEQ ID NO: 2538863 - DNA, 25 bp, Homo sapien
aagatgatgatctctgtgaggccga

SEQ ID NO: 2538864 - DNA, 25 bp, Homo sapien
tctgtgaggccgaattaagtctctt

SEQ ID NO: 2538865 - DNA, 25 bp, Homo sapien
acacttttctggagaacgacttgca

SEQ ID NO: 2538866 - DNA, 25 bp, Homo sapien
gaagtttcagtttgccgaggattta

SEQ ID NO: 2538867 - DNA, 25 bp, Homo sapien
aagctctcatgatcggcgtgtctga

SEQ ID NO: 2538868 - DNA, 25 bp, Homo sapien
ggcgtgtctgaagtctctctttgct

SEQ ID NO: 2538869 - DNA, 25 bp, Homo sapien
tcaagttcttttaaagctctcatga

SEQ ID NO: 2538870 - DNA, 25 bp, Homo sapien
ctctgtctgtgtcccccaattttta

SEQ ID NO: 2538871 - DNA, 25 bp, Homo sapien
tggactaaatgtctgtatcttgccc

SEQ ID NO: 2538872 - DNA, 25 bp, Homo sapien
tatggactaaatgtctgtatcttgc

SEQ ID NO: 2538873 - DNA, 25 bp, Homo sapien
ggactaaatgtctgtatcttgcccc

SEQ ID NO: 2538874 - DNA, 25 bp, Homo sapien
gctatggactaaatgtctgtatctt

SEQ ID NO: 2538875 - DNA, 25 bp, Homo sapien
tatccacgttactgtcctgggtgtc

SEQ ID NO: 2538876 - DNA, 25 bp, Homo sapien
taaagatggaatactctgcacctgg

SEQ ID NO: 2538877 - DNA, 25 bp, Homo sapien
cagctggttatccacgttactgtcc

SEQ ID NO: 2538878 - DNA, 25 bp, Homo sapien
ttccgcctgctgacgtctgaagttg

SEQ ID NO: 2538879 - DNA, 25 bp, Homo sapien
tgcattcactcgagtaccctctgaa

SEQ ID NO: 2538880 - DNA, 25 bp, Homo sapien
ctctgaatgggcttctactgttatc

SEQ ID NO: 2538881 - DNA, 25 bp, Homo sapien
ctaagcattagcctccagcttgcaa

SEQ ID NO: 2538882 - DNA, 25 bp, Homo sapien
tccagactgttcactaagcattagc

SEQ ID NO: 2538883 - DNA, 25 bp, Homo sapien
aaatgcccaaaaggacagggctcca

SEQ ID NO: 2538884 - DNA, 25 bp, Homo sapien
gccttgctgggtttagatcacatcc

SEQ ID NO: 2538885 - DNA, 25 bp, Homo sapien
tcttgttcgaatcagagagggtcct

SEQ ID NO: 2538886 - DNA, 25 bp, Homo sapien
gcttctggagagctgaacaagagct

SEQ ID NO: 2538887 - DNA, 25 bp, Homo sapien
tctagaattatgacgaaggcttaac

SEQ ID NO: 2538888 - DNA, 25 bp, Homo sapien
cgagggtctcacgtgaattctagaa

SEQ ID NO: 2538889 - DNA, 25 bp, Homo sapien
gacctgagcttcaagttttgaaatc

SEQ ID NO: 2538890 - DNA, 25 bp, Homo sapien
catgttctacttgcttgacctgagc

SEQ ID NO: 2538891 - DNA, 25 bp, Homo sapien
tgagtatatgcatcaagcaatttgt

SEQ ID NO: 2538892 - DNA, 25 bp, Homo sapien
tctgagtatatgcatcaagcaattt

SEQ ID NO: 2538893 - DNA, 25 bp, Homo sapien
gaaatctgagtatatgcatcaagca

SEQ ID NO: 2538894 - DNA, 25 bp, Homo sapien
aatcagaaatctgagtatatgcatc

SEQ ID NO: 2538895 - DNA, 25 bp, Homo sapien
tttccaagggactcatactctccta

SEQ ID NO: 2538896 - DNA, 25 bp, Homo sapien
caagggactcatactctcctaaaag

SEQ ID NO: 2538897 - DNA, 25 bp, Homo sapien
tccaagggactcatactctcctaaa

SEQ ID NO: 2538898 - DNA, 25 bp, Homo sapien
tcttttccaagggactcatactctc

SEQ ID NO: 2538899 - DNA, 25 bp, Homo sapien
aaaaaatagctgaacatggggatat

SEQ ID NO: 2538900 - DNA, 25 bp, Homo sapien
aaatagctgaacatggggatatatg

SEQ ID NO: 2538901 - DNA, 25 bp, Homo sapien
cagtgagcttgtagtgaggcttgca

SEQ ID NO: 2538902 - DNA, 25 bp, Homo sapien
gactgcagtgagcttgtagtgaggc

SEQ ID NO: 2538903 - DNA, 25 bp, Homo sapien
caattcgttcctgcaaaattttgga

SEQ ID NO: 2538904 - DNA, 25 bp, Homo sapien
gcttcttctaaatcttgcagtctag

SEQ ID NO: 2538905 - DNA, 25 bp, Homo sapien
gcagtctagattttagtcgaatgat

SEQ ID NO: 2538906 - DNA, 25 bp, Homo sapien
ggctgcactgaagcgttctctcaaa

SEQ ID NO: 2538907 - DNA, 25 bp, Homo sapien
tcaagtgttctcacgcgactagtag

SEQ ID NO: 2538908 - DNA, 25 bp, Homo sapien
gcaaagcactatctaattggccaca

SEQ ID NO: 2538909 - DNA, 25 bp, Homo sapien
cacttcaatttccagtaagttattc

SEQ ID NO: 2538910 - DNA, 25 bp, Homo sapien
gactagtagcttcatgcaaagcact

SEQ ID NO: 2538911 - DNA, 25 bp, Homo sapien
tttctgattcataataagctcgaag

SEQ ID NO: 2538912 - DNA, 25 bp, Homo sapien
ctgtctacaagaatttgattggtta

SEQ ID NO: 2538913 - DNA, 25 bp, Homo sapien
taataagctcgaagatctgctatgt

SEQ ID NO: 2538914 - DNA, 25 bp, Homo sapien
gctatgtgtcgagcatgcttttcct

SEQ ID NO: 2538915 - DNA, 25 bp, Homo sapien
tctaagactttatgcaatactgaag

SEQ ID NO: 2538916 - DNA, 25 bp, Homo sapien
aatctattaacattacaagccattc

SEQ ID NO: 2538917 - DNA, 25 bp, Homo sapien
ttaacattacaagccattcactgaa

SEQ ID NO: 2538918 - DNA, 25 bp, Homo sapien
agactttatgcaatactgaagttca

SEQ ID NO: 2538919 - DNA, 25 bp, Homo sapien
gcattctgggacactgttggctgta

SEQ ID NO: 2538920 - DNA, 25 bp, Homo sapien
cattctgggacactgttggctgtac

SEQ ID NO: 2538921 - DNA, 25 bp, Homo sapien
ttagacaatatcacaggatcttcca

SEQ ID NO: 2538922 - DNA, 25 bp, Homo sapien
tattctgtcatcaagggcattcgga

SEQ ID NO: 2538923 - DNA, 25 bp, Homo sapien
tgaggccgaagcaaccatgacagtg

SEQ ID NO: 2538924 - DNA, 25 bp, Homo sapien
tatactgacggaaacgtggaactgg

SEQ ID NO: 2538925 - DNA, 25 bp, Homo sapien
tgatttttccaagagtccaccggag

SEQ ID NO: 2538926 - DNA, 25 bp, Homo sapien
gaggtaaaagttagagtcaggaagc

SEQ ID NO: 2538927 - DNA, 25 bp, Homo sapien
ttcactcggcagaatgtggacaact

SEQ ID NO: 2538928 - DNA, 25 bp, Homo sapien
gaagcattgttcacgttcactcggc

SEQ ID NO: 2538929 - DNA, 25 bp, Homo sapien
atctcctagggaaaatgaagcttga

SEQ ID NO: 2538930 - DNA, 25 bp, Homo sapien
aagcagaagtgagattcctctcagg

SEQ ID NO: 2538931 - DNA, 25 bp, Homo sapien
gcttcatctcattactagtattaga

SEQ ID NO: 2538932 - DNA, 25 bp, Homo sapien
atatccttcagtgacggtagcttca

SEQ ID NO: 2538933 - DNA, 25 bp, Homo sapien
tggatgatttgggttggaagcagaa

SEQ ID NO: 2538934 - DNA, 25 bp, Homo sapien
aaaagaatacagcaaattaagttgc

SEQ ID NO: 2538935 - DNA, 25 bp, Homo sapien
gaatacagcaaattaagttgctcat

SEQ ID NO: 2538936 - DNA, 25 bp, Homo sapien
tcttactcaaagaaaatccagcaaa

SEQ ID NO: 2538937 - DNA, 25 bp, Homo sapien
aaaatccagcaaattggccgggcgc

SEQ ID NO: 2538938 - DNA, 25 bp, Homo sapien
tttcctctagtttccagtaagtcaa

SEQ ID NO: 2538939 - DNA, 25 bp, Homo sapien
tgtggaagacaatgatatgaacgtc

SEQ ID NO: 2538940 - DNA, 25 bp, Homo sapien
taaagtttcaggcaaagagtggtgc

SEQ ID NO: 2538941 - DNA, 25 bp, Homo sapien
gatatgaacgtcttctctaaagttt

SEQ ID NO: 2538942 - DNA, 25 bp, Homo sapien
aggttacaggaatgcaccatcacgc

SEQ ID NO: 2538943 - DNA, 25 bp, Homo sapien
gctgaggttacaggaatgcaccatc

SEQ ID NO: 2538944 - DNA, 25 bp, Homo sapien
tgaggttacaggaatgcaccatcac

SEQ ID NO: 2538945 - DNA, 25 bp, Homo sapien
tagctgaggttacaggaatgcacca

SEQ ID NO: 2538946 - DNA, 25 bp, Homo sapien
ccagagaacatcacaacacataaca

SEQ ID NO: 2538947 - DNA, 25 bp, Homo sapien
tgggcatggtgacaccgcctgttgt

SEQ ID NO: 2538948 - DNA, 25 bp, Homo sapien
caaaaccatactactatacagtatc

SEQ ID NO: 2538949 - DNA, 25 bp, Homo sapien
caaacaaaggtaaggctgctaccag

SEQ ID NO: 2538950 - DNA, 25 bp, Homo sapien
tttactgaggtaaaaagcacgagga

SEQ ID NO: 2538951 - DNA, 25 bp, Homo sapien
aaaaagcacgaggatgtgtagcagc

SEQ ID NO: 2538952 - DNA, 25 bp, Homo sapien
ggtaaaaagcacgaggatgtgtagc

SEQ ID NO: 2538953 - DNA, 25 bp, Homo sapien
ctgaggtaaaaagcacgaggatgtg

SEQ ID NO: 2538954 - DNA, 25 bp, Homo sapien
gatttccccatggttacaagaatgc

SEQ ID NO: 2538955 - DNA, 25 bp, Homo sapien
gggcaggtattatttcgtgagttca

SEQ ID NO: 2538956 - DNA, 25 bp, Homo sapien
tacaagaatgctaactgataggaat

SEQ ID NO: 2538957 - DNA, 25 bp, Homo sapien
tttatttcggttctctgtggagctg

SEQ ID NO: 2538958 - DNA, 25 bp, Homo sapien
cttcacttccctcctcttcaatata

SEQ ID NO: 2538959 - DNA, 25 bp, Homo sapien
tcacttccctcctcttcaatataaa

SEQ ID NO: 2538960 - DNA, 25 bp, Homo sapien
cacttccctcctcttcaatataaat

SEQ ID NO: 2538961 - DNA, 25 bp, Homo sapien
ttcacttccctcctcttcaatataa

SEQ ID NO: 2538962 - DNA, 25 bp, Homo sapien
gcagggaaagtgactagtcacctac

SEQ ID NO: 2538963 - DNA, 25 bp, Homo sapien
gagcccgcagggaaagtgactagtc

SEQ ID NO: 2538964 - DNA, 25 bp, Homo sapien
tactggagcccgcagggaaagtgac

SEQ ID NO: 2538965 - DNA, 25 bp, Homo sapien
atcatcagtactggagcccgcaggg

SEQ ID NO: 2538966 - DNA, 25 bp, Homo sapien
tttctcaattggtgtcttcttactt

SEQ ID NO: 2538967 - DNA, 25 bp, Homo sapien
gtttttgtgcccatgatgttatagc

SEQ ID NO: 2538968 - DNA, 25 bp, Homo sapien
tgtgctctctttggttggttctgct

SEQ ID NO: 2538969 - DNA, 25 bp, Homo sapien
ttccttgtttagatcttgaacctcc

SEQ ID NO: 2538970 - DNA, 25 bp, Homo sapien
gcaccgcaggtgctacatactgtcc

SEQ ID NO: 2538971 - DNA, 25 bp, Homo sapien
cattgcagtctggttgtgacgtgga

SEQ ID NO: 2538972 - DNA, 25 bp, Homo sapien
tgctccatgaactccttagggtctt

SEQ ID NO: 2538973 - DNA, 25 bp, Homo sapien
tgttcaaattcaccaggagaaatgg

SEQ ID NO: 2538974 - DNA, 25 bp, Homo sapien
gtggattcaggataatggataacag

SEQ ID NO: 2538975 - DNA, 25 bp, Homo sapien
ctgtggattcaggataatggataac

SEQ ID NO: 2538976 - DNA, 25 bp, Homo sapien
tgtggattcaggataatggataaca

SEQ ID NO: 2538977 - DNA, 25 bp, Homo sapien
ctagtctgtaatttgactaaatttt

SEQ ID NO: 2538978 - DNA, 25 bp, Homo sapien
ttgactttccgaagatacttgtttg

SEQ ID NO: 2538979 - DNA, 25 bp, Homo sapien
gaagctaaggaagcactactagtct

SEQ ID NO: 2538980 - DNA, 25 bp, Homo sapien
cgaagatacttgtttgtttgaagaa

SEQ ID NO: 2538981 - DNA, 25 bp, Homo sapien
cctgctgggcaactatctgttcttg

SEQ ID NO: 2538982 - DNA, 25 bp, Homo sapien
ttgaatttggttgtggaactgctcc

SEQ ID NO: 2538983 - DNA, 25 bp, Homo sapien
ggttgtggaactgctcctgctgggc

SEQ ID NO: 2538984 - DNA, 25 bp, Homo sapien
ctgggcaactatctgttcttggcat

SEQ ID NO: 2538985 - DNA, 25 bp, Homo sapien
tgtttttccaccaaattgaatagct

SEQ ID NO: 2538986 - DNA, 25 bp, Homo sapien
gtttttccaccaaattgaatagctg

SEQ ID NO: 2538987 - DNA, 25 bp, Homo sapien
ggtaatctttcatttcgcttactct

SEQ ID NO: 2538988 - DNA, 25 bp, Homo sapien
tatcgaattcttaaaccaggtaatc

SEQ ID NO: 2538989 - DNA, 25 bp, Homo sapien
ttagcagttgctgctatcgaattct

SEQ ID NO: 2538990 - DNA, 25 bp, Homo sapien
aatctttcatttcgcttactctaca

SEQ ID NO: 2538991 - DNA, 25 bp, Homo sapien
caaagttccgaatcagtctttccac

SEQ ID NO: 2538992 - DNA, 25 bp, Homo sapien
tgaattacagatggtctggtcttcc

SEQ ID NO: 2538993 - DNA, 25 bp, Homo sapien
agttaggacttcaactgtaccttga

SEQ ID NO: 2538994 - DNA, 25 bp, Homo sapien
ctgttttgtagctcttgcattaaag

SEQ ID NO: 2538995 - DNA, 25 bp, Homo sapien
aagaggataccccatttgtactaag

SEQ ID NO: 2538996 - DNA, 25 bp, Homo sapien
agaggataccccatttgtactaagg

SEQ ID NO: 2538997 - DNA, 25 bp, Homo sapien
ctgagaaagaggataccccatttgt

SEQ ID NO: 2538998 - DNA, 25 bp, Homo sapien
agaaagaggataccccatttgtact

SEQ ID NO: 2538999 - DNA, 25 bp, Homo sapien
tcagtatttaagttcagtccaagag

SEQ ID NO: 2539000 - DNA, 25 bp, Homo sapien
atcagtatttaagttcagtccaaga

SEQ ID NO: 2539001 - DNA, 25 bp, Homo sapien
cagtatttaagttcagtccaagaga

SEQ ID NO: 2539002 - DNA, 25 bp, Homo sapien
tacagaagatgaagttttgtgtaag

SEQ ID NO: 2539003 - DNA, 25 bp, Homo sapien
gtcaaactcttccatagtgtacaga

SEQ ID NO: 2539004 - DNA, 25 bp, Homo sapien
gaactgtgaaatatcctaaacttcc

SEQ ID NO: 2539005 - DNA, 25 bp, Homo sapien
tgaatccgtgtcatcttcagaggct

SEQ ID NO: 2539006 - DNA, 25 bp, Homo sapien
gctcccgctgccgatgtcagggtca

SEQ ID NO: 2539007 - DNA, 25 bp, Homo sapien
gatgtcagggtcatgcaagcggcct

SEQ ID NO: 2539008 - DNA, 25 bp, Homo sapien
ctcgcgaccgttacccgagggagcg

SEQ ID NO: 2539009 - DNA, 25 bp, Homo sapien
atgcaagcggcctctcgcgaccgtt

SEQ ID NO: 2539010 - DNA, 25 bp, Homo sapien
aaatataggctttgagacttttgga

SEQ ID NO: 2539011 - DNA, 25 bp, Homo sapien
tataaagttcccgttagatgccata

SEQ ID NO: 2539012 - DNA, 25 bp, Homo sapien
acaaacacaaggcatcgttaataga

SEQ ID NO: 2539013 - DNA, 25 bp, Homo sapien
cccgttagatgccataaatagaaca

SEQ ID NO: 2539014 - DNA, 25 bp, Homo sapien
ggcaggtccagagattgacatctca

SEQ ID NO: 2539015 - DNA, 25 bp, Homo sapien
tagctaaggtaaactagtgctttac

SEQ ID NO: 2539016 - DNA, 25 bp, Homo sapien
tataccatgaaagttgtagctaagg

SEQ ID NO: 2539017 - DNA, 25 bp, Homo sapien
ttttagataaatggcgtccagaagg

SEQ ID NO: 2539018 - DNA, 25 bp, Homo sapien
ccttttcagagacacgaaatgaaag

SEQ ID NO: 2539019 - DNA, 25 bp, Homo sapien
ctcctacatctaggcttttatttgg

SEQ ID NO: 2539020 - DNA, 25 bp, Homo sapien
gttgatgacacagcatcacctccta

SEQ ID NO: 2539021 - DNA, 25 bp, Homo sapien
atatcctttaaccttttcagagaca

SEQ ID NO: 2539022 - DNA, 25 bp, Homo sapien
agagtctcgctccttcagtcttcgc

SEQ ID NO: 2539023 - DNA, 25 bp, Homo sapien
cagagtctcgctccttcagtcttcg

SEQ ID NO: 2539024 - DNA, 25 bp, Homo sapien
agtctcgctccttcagtcttcgccc

SEQ ID NO: 2539025 - DNA, 25 bp, Homo sapien
gagtctcgctccttcagtcttcgcc

SEQ ID NO: 2539026 - DNA, 25 bp, Homo sapien
tgaacaccggagaccttcttgaact

SEQ ID NO: 2539027 - DNA, 25 bp, Homo sapien
caaacagtggactggtgacaaagca

SEQ ID NO: 2539028 - DNA, 25 bp, Homo sapien
gctccaggagatactaaaagtgtct

SEQ ID NO: 2539029 - DNA, 25 bp, Homo sapien
ggagtctcgccttgccttggaatca

SEQ ID NO: 2539030 - DNA, 25 bp, Homo sapien
gaaagcaacgcctgatcccatgtct

SEQ ID NO: 2539031 - DNA, 25 bp, Homo sapien
tatctggatctcacagtgggctcaa

SEQ ID NO: 2539032 - DNA, 25 bp, Homo sapien
cctcagtgggtatctatctggatct

SEQ ID NO: 2539033 - DNA, 25 bp, Homo sapien
catatttacaagaaagcaacgcctg

SEQ ID NO: 2539034 - DNA, 25 bp, Homo sapien
cgctcacgcctaatttcaattttct

SEQ ID NO: 2539035 - DNA, 25 bp, Homo sapien
agccaccgctcacgcctaatttcaa

SEQ ID NO: 2539036 - DNA, 25 bp, Homo sapien
accgctcacgcctaatttcaatttt

SEQ ID NO: 2539037 - DNA, 25 bp, Homo sapien
ccaccgctcacgcctaatttcaatt

SEQ ID NO: 2539038 - DNA, 25 bp, Homo sapien
cccctgcttgtttatggtgtcattt

SEQ ID NO: 2539039 - DNA, 25 bp, Homo sapien
ctacccctgcttgtttatggtgtca

SEQ ID NO: 2539040 - DNA, 25 bp, Homo sapien
tgtttatggtgtcatttgcatgaca

SEQ ID NO: 2539041 - DNA, 25 bp, Homo sapien
taggattgtgatattatcctgtgac

SEQ ID NO: 2539042 - DNA, 25 bp, Homo sapien
caggagtccagctagctttgcctac

SEQ ID NO: 2539043 - DNA, 25 bp, Homo sapien
tttgcctactggatcccatgctggg

SEQ ID NO: 2539044 - DNA, 25 bp, Homo sapien
tgagggctactagcacattgtcacc

SEQ ID NO: 2539045 - DNA, 25 bp, Homo sapien
tgacaatatgcctagatgaagatct

SEQ ID NO: 2539046 - DNA, 25 bp, Homo sapien
cagggtttgttcatttgggtaggct

SEQ ID NO: 2539047 - DNA, 25 bp, Homo sapien
catggctaccagtgcctgttcggtg

SEQ ID NO: 2539048 - DNA, 25 bp, Homo sapien
gtcgtgtacctaggagagttatggc

SEQ ID NO: 2539049 - DNA, 25 bp, Homo sapien
tactggaggttatctgcagagtcct

SEQ ID NO: 2539050 - DNA, 25 bp, Homo sapien
taccagttggaccacgttgttggca

SEQ ID NO: 2539051 - DNA, 25 bp, Homo sapien
gatgtaggcagagagtctaggccca

SEQ ID NO: 2539052 - DNA, 25 bp, Homo sapien
gtagttccaacgatgagtaccagtt

SEQ ID NO: 2539053 - DNA, 25 bp, Homo sapien
taactaacctgtaagctccaagaag

SEQ ID NO: 2539054 - DNA, 25 bp, Homo sapien
cacaaagtggttgttaactggccac

SEQ ID NO: 2539055 - DNA, 25 bp, Homo sapien
aggtttgtccctctctataaagcga

SEQ ID NO: 2539056 - DNA, 25 bp, Homo sapien
tggccacaagctagatacatcagtt

SEQ ID NO: 2539057 - DNA, 25 bp, Homo sapien
tgaaagccacataatacagcaaggg

SEQ ID NO: 2539058 - DNA, 25 bp, Homo sapien
tcagtactatacaagaataatggct

SEQ ID NO: 2539059 - DNA, 25 bp, Homo sapien
aatggctacttctagagggaaggag

SEQ ID NO: 2539060 - DNA, 25 bp, Homo sapien
cttcacctgggtggtagttagaagg

SEQ ID NO: 2539061 - DNA, 25 bp, Homo sapien
gttcaagtgcaatgacacacgccta

SEQ ID NO: 2539062 - DNA, 25 bp, Homo sapien
tttcgctagagcctgttcctgctgg

SEQ ID NO: 2539063 - DNA, 25 bp, Homo sapien
cttgtcatggctgagaattcgcctc

SEQ ID NO: 2539064 - DNA, 25 bp, Homo sapien
ggacacagcacccatttcgctagag

SEQ ID NO: 2539065 - DNA, 25 bp, Homo sapien
tcatggctgagaattcgcctcatgc

SEQ ID NO: 2539066 - DNA, 25 bp, Homo sapien
tttgttctcttctgccttcgcctct

SEQ ID NO: 2539067 - DNA, 25 bp, Homo sapien
tcttctgccttcgcctcttttaaaa

SEQ ID NO: 2539068 - DNA, 25 bp, Homo sapien
ttttaagttgcttcccaatcaggac

SEQ ID NO: 2539069 - DNA, 25 bp, Homo sapien
aagttttaagttgcttcccaatcag

SEQ ID NO: 2539070 - DNA, 25 bp, Homo sapien
tcaaggaacccacattttaatacaa

SEQ ID NO: 2539071 - DNA, 25 bp, Homo sapien
ttcaaggaacccacattttaataca

SEQ ID NO: 2539072 - DNA, 25 bp, Homo sapien
tctttgagactgtaggttcagagcc

SEQ ID NO: 2539073 - DNA, 25 bp, Homo sapien
taagcagaacctacattgtatggca

SEQ ID NO: 2539074 - DNA, 25 bp, Homo sapien
taaagcgtgctgtcaatatgcgttc

SEQ ID NO: 2539075 - DNA, 25 bp, Homo sapien
tatggcaaatgggaaccggctacta

SEQ ID NO: 2539076 - DNA, 25 bp, Homo sapien
accagtcctctagcgtgaatgatgc

SEQ ID NO: 2539077 - DNA, 25 bp, Homo sapien
caagcactcccgaaccagtcctcta

SEQ ID NO: 2539078 - DNA, 25 bp, Homo sapien
ccgaaccagtcctctagcgtgaatg

SEQ ID NO: 2539079 - DNA, 25 bp, Homo sapien
gaaccagtcctctagcgtgaatgat

SEQ ID NO: 2539080 - DNA, 25 bp, Homo sapien
tgcgtacgtgggtctgatctccttc

SEQ ID NO: 2539081 - DNA, 25 bp, Homo sapien
tgctccctgcgtacgtgggtctgat

SEQ ID NO: 2539082 - DNA, 25 bp, Homo sapien
ggcactcttgctccctgcgtacgtg

SEQ ID NO: 2539083 - DNA, 25 bp, Homo sapien
cactcttgctccctgcgtacgtggg

SEQ ID NO: 2539084 - DNA, 25 bp, Homo sapien
agccgcccacttggcgaggaacagg

SEQ ID NO: 2539085 - DNA, 25 bp, Homo sapien
ggagccgcccacttggcgaggaaca

SEQ ID NO: 2539086 - DNA, 25 bp, Homo sapien
cgcccacttggcgaggaacaggctc

SEQ ID NO: 2539087 - DNA, 25 bp, Homo sapien
ccacttggcgaggaacaggctccat

SEQ ID NO: 2539088 - DNA, 25 bp, Homo sapien
agggagagcatcttcccgctgggac

SEQ ID NO: 2539089 - DNA, 25 bp, Homo sapien
agctgagatggtggcggccccattc

SEQ ID NO: 2539090 - DNA, 25 bp, Homo sapien
tccccggggcggctcatcccttgga

SEQ ID NO: 2539091 - DNA, 25 bp, Homo sapien
tcatcccttggagatgtagggtgca

SEQ ID NO: 2539092 - DNA, 25 bp, Homo sapien
cagctggcggtactgtgaagacgtt

SEQ ID NO: 2539093 - DNA, 25 bp, Homo sapien
tgtagcctagggacggtggcccgta

SEQ ID NO: 2539094 - DNA, 25 bp, Homo sapien
ggtggcccgtagtcactgagcagct

SEQ ID NO: 2539095 - DNA, 25 bp, Homo sapien
gcggtactgtgaagacgttgccatg

SEQ ID NO: 2539096 - DNA, 25 bp, Homo sapien
ctggtggaaggcgagtggacactcc

SEQ ID NO: 2539097 - DNA, 25 bp, Homo sapien
tggtggaaggcgagtggacactccc

SEQ ID NO: 2539098 - DNA, 25 bp, Homo sapien
ggtggaaggcgagtggacactccca

SEQ ID NO: 2539099 - DNA, 25 bp, Homo sapien
gtggaaggcgagtggacactcccag

SEQ ID NO: 2539100 - DNA, 25 bp, Homo sapien
tgctctccacctccggtttgaccag

SEQ ID NO: 2539101 - DNA, 25 bp, Homo sapien
caccaactgtagcaggatggagaac

SEQ ID NO: 2539102 - DNA, 25 bp, Homo sapien
caaggcaaggactccgggtcctgca

SEQ ID NO: 2539103 - DNA, 25 bp, Homo sapien
ccggtttgaccagcatataagatgg

SEQ ID NO: 2539104 - DNA, 25 bp, Homo sapien
gccgctggtcctcacagagctccat

SEQ ID NO: 2539105 - DNA, 25 bp, Homo sapien
agcagccgctggtcctcacagagct

SEQ ID NO: 2539106 - DNA, 25 bp, Homo sapien
tgcagcagccgctggtcctcacaga

SEQ ID NO: 2539107 - DNA, 25 bp, Homo sapien
cagccgctggtcctcacagagctcc

SEQ ID NO: 2539108 - DNA, 25 bp, Homo sapien
tctgtgtgccccagataaagcccct

SEQ ID NO: 2539109 - DNA, 25 bp, Homo sapien
tccagagctgcagtcagtgaccaag

SEQ ID NO: 2539110 - DNA, 25 bp, Homo sapien
gacaggcacgctggacatcaaatca

SEQ ID NO: 2539111 - DNA, 25 bp, Homo sapien
tcttagcagtctatgccccaagggc

SEQ ID NO: 2539112 - DNA, 25 bp, Homo sapien
cacacagtgggcgccgcagacttgg

SEQ ID NO: 2539113 - DNA, 25 bp, Homo sapien
gcccccagagccacacggtctctct

SEQ ID NO: 2539114 - DNA, 25 bp, Homo sapien
cagtgggcgccgcagacttggcctc

SEQ ID NO: 2539115 - DNA, 25 bp, Homo sapien
acagtgggcgccgcagacttggcct

SEQ ID NO: 2539116 - DNA, 25 bp, Homo sapien
gaagggctccgagttccactcctgg

SEQ ID NO: 2539117 - DNA, 25 bp, Homo sapien
agagagatggcggaagggctccgag

SEQ ID NO: 2539118 - DNA, 25 bp, Homo sapien
atggcggaagggctccgagttccac

SEQ ID NO: 2539119 - DNA, 25 bp, Homo sapien
caggccactcccttgttcgggggcg

SEQ ID NO: 2539120 - DNA, 25 bp, Homo sapien
ctccgagtacgctgcccgccggcga

SEQ ID NO: 2539121 - DNA, 25 bp, Homo sapien
gcccccgggcctccgagtacgctgc

SEQ ID NO: 2539122 - DNA, 25 bp, Homo sapien
tccccgcgtgaccgcatggggtagc

SEQ ID NO: 2539123 - DNA, 25 bp, Homo sapien
acgggggtccccgcgtgaccgcatg

SEQ ID NO: 2539124 - DNA, 25 bp, Homo sapien
cagagaactttcgcggcgcgggctc

SEQ ID NO: 2539125 - DNA, 25 bp, Homo sapien
cggcgttgagggcggcggcgggcat

SEQ ID NO: 2539126 - DNA, 25 bp, Homo sapien
gcggccaagttcggtttgtaagaca

SEQ ID NO: 2539127 - DNA, 25 bp, Homo sapien
gtgcgcggccaagttcggtttgtaa

SEQ ID NO: 2539128 - DNA, 25 bp, Homo sapien
cggccaagttcggtttgtaagacat

SEQ ID NO: 2539129 - DNA, 25 bp, Homo sapien
gcgcggccaagttcggtttgtaaga

SEQ ID NO: 2539130 - DNA, 25 bp, Homo sapien
ggccgcgccggcaaatatggccgtc

SEQ ID NO: 2539131 - DNA, 25 bp, Homo sapien
gaaccggaatccgaagagcactttc

SEQ ID NO: 2539132 - DNA, 25 bp, Homo sapien
cactttttgttgtcggcggctcggg

SEQ ID NO: 2539133 - DNA, 25 bp, Homo sapien
tcggcgcccgcaacttgccaaagtt

SEQ ID NO: 2539134 - DNA, 25 bp, Homo sapien
aggtctggccaagccccaggattag

SEQ ID NO: 2539135 - DNA, 25 bp, Homo sapien
taagcacgtagatcattccagacgc

SEQ ID NO: 2539136 - DNA, 25 bp, Homo sapien
ggcgagtggtgtatttaagcacgta

SEQ ID NO: 2539137 - DNA, 25 bp, Homo sapien
tagaataaccgatgcttgacattga

SEQ ID NO: 2539138 - DNA, 25 bp, Homo sapien
tagcctatggcacctagtatcccga

SEQ ID NO: 2539139 - DNA, 25 bp, Homo sapien
tactaaccaagcctcgcactgctta

SEQ ID NO: 2539140 - DNA, 25 bp, Homo sapien
caaggacgttcagggaaatatggcc

SEQ ID NO: 2539141 - DNA, 25 bp, Homo sapien
caagatcagctgagaccaaggacgt

SEQ ID NO: 2539142 - DNA, 25 bp, Homo sapien
acttacaggcacccaccaccacgcc

SEQ ID NO: 2539143 - DNA, 25 bp, Homo sapien
ctgggattaaagggctcaagggatt

SEQ ID NO: 2539144 - DNA, 25 bp, Homo sapien
cttacaggcacccaccaccacgccc

SEQ ID NO: 2539145 - DNA, 25 bp, Homo sapien
agctgggattaaagggctcaaggga

SEQ ID NO: 2539146 - DNA, 25 bp, Homo sapien
aatcaattccggacgcttggtaccg

SEQ ID NO: 2539147 - DNA, 25 bp, Homo sapien
tgatagcggtgagactgcaatgtgc

SEQ ID NO: 2539148 - DNA, 25 bp, Homo sapien
tgatggacacgctacaacaggagcg

SEQ ID NO: 2539149 - DNA, 25 bp, Homo sapien
taccgtgctcccacgaaaggctgga

SEQ ID NO: 2539150 - DNA, 25 bp, Homo sapien
agcaaaaaggccttcagtgtctgct

SEQ ID NO: 2539151 - DNA, 25 bp, Homo sapien
aaaaggccttcagtgtctgctggcc

SEQ ID NO: 2539152 - DNA, 25 bp, Homo sapien
caaaaaggccttcagtgtctgctgg

SEQ ID NO: 2539153 - DNA, 25 bp, Homo sapien
aaaaaggccttcagtgtctgctggc

SEQ ID NO: 2539154 - DNA, 25 bp, Homo sapien
tattaaaaacgcctcgatcccgctc

SEQ ID NO: 2539155 - DNA, 25 bp, Homo sapien
gtacatgaatgaaaaggccccaaag

SEQ ID NO: 2539156 - DNA, 25 bp, Homo sapien
cactggaggcaatctgtgacaggcc

SEQ ID NO: 2539157 - DNA, 25 bp, Homo sapien
cactctggaggacgcctgaattaca

SEQ ID NO: 2539158 - DNA, 25 bp, Homo sapien
tgcctcctgcctgctataaatatcc

SEQ ID NO: 2539159 - DNA, 25 bp, Homo sapien
tgtcaataacacactaggcctgcct

SEQ ID NO: 2539160 - DNA, 25 bp, Homo sapien
cacccggccaatgtacattctctaa

SEQ ID NO: 2539161 - DNA, 25 bp, Homo sapien
tctctaaagtcacctgtcaataaca

SEQ ID NO: 2539162 - DNA, 25 bp, Homo sapien
caacaggttataaacagcagcaggc

SEQ ID NO: 2539163 - DNA, 25 bp, Homo sapien
aattactcatcatttgtaggttaaa

SEQ ID NO: 2539164 - DNA, 25 bp, Homo sapien
gcataggcccgacttcttaaataaa

SEQ ID NO: 2539165 - DNA, 25 bp, Homo sapien
aataaacatagggaatttgctgcag

SEQ ID NO: 2539166 - DNA, 25 bp, Homo sapien
cattgcaagtaaattactcatcatt

SEQ ID NO: 2539167 - DNA, 25 bp, Homo sapien
aaagtcataagatgccccatatggg

SEQ ID NO: 2539168 - DNA, 25 bp, Homo sapien
cgagcatcagcagtcatacaatgac

SEQ ID NO: 2539169 - DNA, 25 bp, Homo sapien
caggtgggcagagtcccaatttaca

SEQ ID NO: 2539170 - DNA, 25 bp, Homo sapien
gctaagtttgatcccaaatgcactg

SEQ ID NO: 2539171 - DNA, 25 bp, Homo sapien
tacttctgaaggtcaccagtgaggg

SEQ ID NO: 2539172 - DNA, 25 bp, Homo sapien
cagtgagggcctaaacaagagtcca

SEQ ID NO: 2539173 - DNA, 25 bp, Homo sapien
tcaagatggctagtccagagcaaac

SEQ ID NO: 2539174 - DNA, 25 bp, Homo sapien
ccacagtgtaaaggtcggatgtcca

SEQ ID NO: 2539175 - DNA, 25 bp, Homo sapien
tggatgtactgcgttaaccctgagc

SEQ ID NO: 2539176 - DNA, 25 bp, Homo sapien
cattaccttgaccagaaacccaggg

SEQ ID NO: 2539177 - DNA, 25 bp, Homo sapien
gatttttcaatagtgcaacctgtgg

SEQ ID NO: 2539178 - DNA, 25 bp, Homo sapien
tagactcaaaacacatgcatccggg

SEQ ID NO: 2539179 - DNA, 25 bp, Homo sapien
ttggaccgcaagctgttgagactgg

SEQ ID NO: 2539180 - DNA, 25 bp, Homo sapien
catagctgtttctgttggaccgcaa

SEQ ID NO: 2539181 - DNA, 25 bp, Homo sapien
catgcgttgctcaagttggtgatgc

SEQ ID NO: 2539182 - DNA, 25 bp, Homo sapien
ctgagggtgatgctgttgccatagc

SEQ ID NO: 2539183 - DNA, 25 bp, Homo sapien
gacacacaatttgccggaatgatca

SEQ ID NO: 2539184 - DNA, 25 bp, Homo sapien
ataggagatttacaagaggagacac

SEQ ID NO: 2539185 - DNA, 25 bp, Homo sapien
agacacacaatttgccggaatgatc

SEQ ID NO: 2539186 - DNA, 25 bp, Homo sapien
ctgaagttgataggagatttacaag

SEQ ID NO: 2539187 - DNA, 25 bp, Homo sapien
atccgttgcccatcttccgttctta

SEQ ID NO: 2539188 - DNA, 25 bp, Homo sapien
cttccgttcttagccgcacgatctg

SEQ ID NO: 2539189 - DNA, 25 bp, Homo sapien
tacaatccgttgcccatcttccgtt

SEQ ID NO: 2539190 - DNA, 25 bp, Homo sapien
catcttccgttcttagccgcacgat

SEQ ID NO: 2539191 - DNA, 25 bp, Homo sapien
taatatgtacggcaacgaagaccta

SEQ ID NO: 2539192 - DNA, 25 bp, Homo sapien
gaagacctatttcacaaactagccc

SEQ ID NO: 2539193 - DNA, 25 bp, Homo sapien
aactagccccaagcttgcttttttg

SEQ ID NO: 2539194 - DNA, 25 bp, Homo sapien
gacagatgctagaacaccctcaact

SEQ ID NO: 2539195 - DNA, 25 bp, Homo sapien
ggagtattgttcgagttcaggagtt

SEQ ID NO: 2539196 - DNA, 25 bp, Homo sapien
ggagggagtattgttcgagttcagg

SEQ ID NO: 2539197 - DNA, 25 bp, Homo sapien
actgcaatattgctactttataaaa

SEQ ID NO: 2539198 - DNA, 25 bp, Homo sapien
aatgatcttgctagccgggcagggt

SEQ ID NO: 2539199 - DNA, 25 bp, Homo sapien
ggtcatgctgccagacaacagttgg

SEQ ID NO: 2539200 - DNA, 25 bp, Homo sapien
ttaaggtcatgctgccagacaacag

SEQ ID NO: 2539201 - DNA, 25 bp, Homo sapien
taatatgaaggataactgttaaggt

SEQ ID NO: 2539202 - DNA, 25 bp, Homo sapien
atatgaaggataactgttaaggtca

SEQ ID NO: 2539203 - DNA, 25 bp, Homo sapien
cagatgaattatactgatctaacca

SEQ ID NO: 2539204 - DNA, 25 bp, Homo sapien
tatctgcagatgaattatactgatc

SEQ ID NO: 2539205 - DNA, 25 bp, Homo sapien
agtacaagtatctgcagatgaatta

SEQ ID NO: 2539206 - DNA, 25 bp, Homo sapien
actgatctaaccagtgcatcagggc

SEQ ID NO: 2539207 - DNA, 25 bp, Homo sapien
ttaggattcacttctttaactaaga

SEQ ID NO: 2539208 - DNA, 25 bp, Homo sapien
ccagtatttggtcgataaactaaga

SEQ ID NO: 2539209 - DNA, 25 bp, Homo sapien
ttctttaactaagatggcagttttc

SEQ ID NO: 2539210 - DNA, 25 bp, Homo sapien
agctgcttcccagtatttggtcgat

SEQ ID NO: 2539211 - DNA, 25 bp, Homo sapien
aaagccatcgtctggtcctgtcagc

SEQ ID NO: 2539212 - DNA, 25 bp, Homo sapien
cagctcagcccaaatcttggtagct

SEQ ID NO: 2539213 - DNA, 25 bp, Homo sapien
gcaatgacaagtaaaagccatcgtc

SEQ ID NO: 2539214 - DNA, 25 bp, Homo sapien
ccaaatcttggtagcttcctcccat

SEQ ID NO: 2539215 - DNA, 25 bp, Homo sapien
acatcacttttccgcactttttcat

SEQ ID NO: 2539216 - DNA, 25 bp, Homo sapien
gtggccagaggttgaatatcctgga

SEQ ID NO: 2539217 - DNA, 25 bp, Homo sapien
taacatcacttttccgcactttttc

SEQ ID NO: 2539218 - DNA, 25 bp, Homo sapien
cgtggccagaggttgaatatcctgg

SEQ ID NO: 2539219 - DNA, 25 bp, Homo sapien
taacgcattctgctgatgcacctcc

SEQ ID NO: 2539220 - DNA, 25 bp, Homo sapien
gaacaactgcagtaagtgtgtccgc

SEQ ID NO: 2539221 - DNA, 25 bp, Homo sapien
taagattcccatatcatatcttcca

SEQ ID NO: 2539222 - DNA, 25 bp, Homo sapien
taagtgtgtccgcaaaatactgaaa

SEQ ID NO: 2539223 - DNA, 25 bp, Homo sapien
ctacatttatcaggccaacgcctat

SEQ ID NO: 2539224 - DNA, 25 bp, Homo sapien
gaattcccgagcgatcttctacatt

SEQ ID NO: 2539225 - DNA, 25 bp, Homo sapien
cgagagtaagaattcccgagcgatc

SEQ ID NO: 2539226 - DNA, 25 bp, Homo sapien
aacgcctatcagtccttgtcgaaca

SEQ ID NO: 2539227 - DNA, 25 bp, Homo sapien
gggactacaggctaagtttcatatt

SEQ ID NO: 2539228 - DNA, 25 bp, Homo sapien
gcccagctgcaagattactgtcatt

SEQ ID NO: 2539229 - DNA, 25 bp, Homo sapien
tgcgcccagctgcaagattactgtc

SEQ ID NO: 2539230 - DNA, 25 bp, Homo sapien
actgtcattacttataataaacaag

SEQ ID NO: 2539231 - DNA, 25 bp, Homo sapien
gctgcaagattactgtcattactta

SEQ ID NO: 2539232 - DNA, 25 bp, Homo sapien
aggacatttccaaatacacgaaaga

SEQ ID NO: 2539233 - DNA, 25 bp, Homo sapien
gacatttccaaatacacgaaagaaa

SEQ ID NO: 2539234 - DNA, 25 bp, Homo sapien
ggacatttccaaatacacgaaagaa

SEQ ID NO: 2539235 - DNA, 25 bp, Homo sapien
ccaagtttacaatggatttcatgac

SEQ ID NO: 2539236 - DNA, 25 bp, Homo sapien
taggagaatccaagtttacaatgga

SEQ ID NO: 2539237 - DNA, 25 bp, Homo sapien
ggtggtgataccataggagaatcca

SEQ ID NO: 2539238 - DNA, 25 bp, Homo sapien
gatagtctggaggtggtgataccat

SEQ ID NO: 2539239 - DNA, 25 bp, Homo sapien
ttctatcaccatgtgtaagtgcccc

SEQ ID NO: 2539240 - DNA, 25 bp, Homo sapien
tattatcaaagttgaacctgctcag

SEQ ID NO: 2539241 - DNA, 25 bp, Homo sapien
gatctctagattctgttgcccttct

SEQ ID NO: 2539242 - DNA, 25 bp, Homo sapien
tcaaagttgaacctgctcagatctc

SEQ ID NO: 2539243 - DNA, 25 bp, Homo sapien
caagtcttttagcaacaatagatgc

SEQ ID NO: 2539244 - DNA, 25 bp, Homo sapien
tatcagaaagacatactcaggagca

SEQ ID NO: 2539245 - DNA, 25 bp, Homo sapien
acttggtttgatctatgagtacgtc

SEQ ID NO: 2539246 - DNA, 25 bp, Homo sapien
tcctgccagttcagatatcagaaag

SEQ ID NO: 2539247 - DNA, 25 bp, Homo sapien
cagcgctccaaggtaattctaaagt

SEQ ID NO: 2539248 - DNA, 25 bp, Homo sapien
gttgaattgctctatcagcgctcca

SEQ ID NO: 2539249 - DNA, 25 bp, Homo sapien
ggcagcttctgagatgatagcaata

SEQ ID NO: 2539250 - DNA, 25 bp, Homo sapien
cttgtaatgaaatacccgagctggc

SEQ ID NO: 2539251 - DNA, 25 bp, Homo sapien
tggacatgacttatattaaaaggaa

SEQ ID NO: 2539252 - DNA, 25 bp, Homo sapien
aacacgtacaatattcagtatgtac

SEQ ID NO: 2539253 - DNA, 25 bp, Homo sapien
aatatacaggcattgttcttttcac

SEQ ID NO: 2539254 - DNA, 25 bp, Homo sapien
acaatactcaatggacatgacttat

SEQ ID NO: 2539255 - DNA, 25 bp, Homo sapien
tcttgactcataagatatgcttcca

SEQ ID NO: 2539256 - DNA, 25 bp, Homo sapien
cttatctccatccataaatcgttgt

SEQ ID NO: 2539257 - DNA, 25 bp, Homo sapien
caacccgtcccttgcggccagtcat

SEQ ID NO: 2539258 - DNA, 25 bp, Homo sapien
tatgcttccatcatcattgctcaca

SEQ ID NO: 2539259 - DNA, 25 bp, Homo sapien
cacagcatcctgacttgttataagg

SEQ ID NO: 2539260 - DNA, 25 bp, Homo sapien
tagcttatcaagcaggtctttcttc

SEQ ID NO: 2539261 - DNA, 25 bp, Homo sapien
aggctactgttactgttggtgttac

SEQ ID NO: 2539262 - DNA, 25 bp, Homo sapien
tcagggccaccaagttcatcgataa

SEQ ID NO: 2539263 - DNA, 25 bp, Homo sapien
gagataactggtgtagatgaaaaac

SEQ ID NO: 2539264 - DNA, 25 bp, Homo sapien
actaggtcgttttgatccaagacct

SEQ ID NO: 2539265 - DNA, 25 bp, Homo sapien
gacctgatgctaataaggcactttg

SEQ ID NO: 2539266 - DNA, 25 bp, Homo sapien
ggcactttgaatagaatctggatct

SEQ ID NO: 2539267 - DNA, 25 bp, Homo sapien
ctaaaaatgggttgaaatcgtcatc

SEQ ID NO: 2539268 - DNA, 25 bp, Homo sapien
cagtaaggccacctacttttcgtgc

SEQ ID NO: 2539269 - DNA, 25 bp, Homo sapien
ctttcttcattatcagaggcatcag

SEQ ID NO: 2539270 - DNA, 25 bp, Homo sapien
tcgtcagaactgctaccagtaaggc

SEQ ID NO: 2539271 - DNA, 25 bp, Homo sapien
catcacatttagttcatgaattaat

SEQ ID NO: 2539272 - DNA, 25 bp, Homo sapien
cagtacatcacatttagttcatgaa

SEQ ID NO: 2539273 - DNA, 25 bp, Homo sapien
tttcttaagatccagtacatcacat

SEQ ID NO: 2539274 - DNA, 25 bp, Homo sapien
atgtttcttaagatccagtacatca

SEQ ID NO: 2539275 - DNA, 25 bp, Homo sapien
ccctgccgccagtcctggctaagtt

SEQ ID NO: 2539276 - DNA, 25 bp, Homo sapien
cgcctgtttcaactcccaaaaagct

SEQ ID NO: 2539277 - DNA, 25 bp, Homo sapien
gggattataaggcgcccctgccgcc

SEQ ID NO: 2539278 - DNA, 25 bp, Homo sapien
gagctgtcaaatcgattcctagtaa

SEQ ID NO: 2539279 - DNA, 25 bp, Homo sapien
ctataaagttttttcctgtctggag

SEQ ID NO: 2539280 - DNA, 25 bp, Homo sapien
gaactgttgttacttggagctgtca

SEQ ID NO: 2539281 - DNA, 25 bp, Homo sapien
ctttacaaggactatctcttggcga

SEQ ID NO: 2539282 - DNA, 25 bp, Homo sapien
ccgaggcacaaaatagtagagcagc

SEQ ID NO: 2539283 - DNA, 25 bp, Homo sapien
gcatctgaatgcatcccgaggcaca

SEQ ID NO: 2539284 - DNA, 25 bp, Homo sapien
tattttgctcagtttactaccagag

SEQ ID NO: 2539285 - DNA, 25 bp, Homo sapien
ggcgtgagccccatgtattgctttt

SEQ ID NO: 2539286 - DNA, 25 bp, Homo sapien
tctcctgtagactgcagaccaatta

SEQ ID NO: 2539287 - DNA, 25 bp, Homo sapien
taatgttctagcttctcctgtagac

SEQ ID NO: 2539288 - DNA, 25 bp, Homo sapien
tagcttctcctgtagactgcagacc

SEQ ID NO: 2539289 - DNA, 25 bp, Homo sapien
gcttctaatgttctagcttctcctg

SEQ ID NO: 2539290 - DNA, 25 bp, Homo sapien
gattacagacagtagtaagcatgag

SEQ ID NO: 2539291 - DNA, 25 bp, Homo sapien
gaagcccctgcccttgtacagttta

SEQ ID NO: 2539292 - DNA, 25 bp, Homo sapien
ctctaaattctctaagcaggcattg

SEQ ID NO: 2539293 - DNA, 25 bp, Homo sapien
cagtgctaccagctatggatgacca

SEQ ID NO: 2539294 - DNA, 25 bp, Homo sapien
gctgaaaccgctctctggcgatgac

SEQ ID NO: 2539295 - DNA, 25 bp, Homo sapien
gatttcctctcgagctagttgcaca

SEQ ID NO: 2539296 - DNA, 25 bp, Homo sapien
caatcagatctgcagcttgctgaaa

SEQ ID NO: 2539297 - DNA, 25 bp, Homo sapien
ggacttcttcattcgttgctcagca

SEQ ID NO: 2539298 - DNA, 25 bp, Homo sapien
tcatctttgagtctagttatttaaa

SEQ ID NO: 2539299 - DNA, 25 bp, Homo sapien
tcagacacttcatctttgagtctag

SEQ ID NO: 2539300 - DNA, 25 bp, Homo sapien
aacatttcagacacttcatctttga

SEQ ID NO: 2539301 - DNA, 25 bp, Homo sapien
gaagatacataatcaacatttcaga

SEQ ID NO: 2539302 - DNA, 25 bp, Homo sapien
tatacattttaacgtagctctgaga

SEQ ID NO: 2539303 - DNA, 25 bp, Homo sapien
tcactccagtaaagctcagttgtcg

SEQ ID NO: 2539304 - DNA, 25 bp, Homo sapien
tctaagcttcatatccatagcaact

SEQ ID NO: 2539305 - DNA, 25 bp, Homo sapien
tcagttgtcgagcaatgtacattcc

SEQ ID NO: 2539306 - DNA, 25 bp, Homo sapien
caccccatatgccaagacggttcat

SEQ ID NO: 2539307 - DNA, 25 bp, Homo sapien
gccatgttgcgtggttcagaagcac

SEQ ID NO: 2539308 - DNA, 25 bp, Homo sapien
ccaagacggttcatataggccatgt

SEQ ID NO: 2539309 - DNA, 25 bp, Homo sapien
ctgaattctctaaatggagtaccct

SEQ ID NO: 2539310 - DNA, 25 bp, Homo sapien
gttgcactagcataaacaactctgg

SEQ ID NO: 2539311 - DNA, 25 bp, Homo sapien
ggcaatttgttctgaagctctaaaa

SEQ ID NO: 2539312 - DNA, 25 bp, Homo sapien
gtttttggctttatgacactcatca

SEQ ID NO: 2539313 - DNA, 25 bp, Homo sapien
aaactgctaagcctgtcttggttgg

SEQ ID NO: 2539314 - DNA, 25 bp, Homo sapien
aatacaaaggaagtcctatgggcct

SEQ ID NO: 2539315 - DNA, 25 bp, Homo sapien
gaacccactgcagcaagaagttgtt

SEQ ID NO: 2539316 - DNA, 25 bp, Homo sapien
cctcatgcaggacagttaaaagata

SEQ ID NO: 2539317 - DNA, 25 bp, Homo sapien
cacttagtcttctcgggtattctgc

SEQ ID NO: 2539318 - DNA, 25 bp, Homo sapien
aaatagaaaaatatttgccataaag

SEQ ID NO: 2539319 - DNA, 25 bp, Homo sapien
gaaaaatatttgccataaaggatac

SEQ ID NO: 2539320 - DNA, 25 bp, Homo sapien
tagaaaaatatttgccataaaggat

SEQ ID NO: 2539321 - DNA, 25 bp, Homo sapien
atagaaaaatatttgccataaagga

SEQ ID NO: 2539322 - DNA, 25 bp, Homo sapien
tacttgccgccagactggctttcac

SEQ ID NO: 2539323 - DNA, 25 bp, Homo sapien
agttttatacttgccgccagactgg

SEQ ID NO: 2539324 - DNA, 25 bp, Homo sapien
tgaagagtaagtagcaaaaataaca

SEQ ID NO: 2539325 - DNA, 25 bp, Homo sapien
taacctagttttatacttgccgcca

SEQ ID NO: 2539326 - DNA, 25 bp, Homo sapien
gaattcaacttaggactcacatggg

SEQ ID NO: 2539327 - DNA, 25 bp, Homo sapien
cactgtttagggcaacactgaattc

SEQ ID NO: 2539328 - DNA, 25 bp, Homo sapien
caattggtgcatgcatagtaagtca

SEQ ID NO: 2539329 - DNA, 25 bp, Homo sapien
ttaaccttatagcaccaacaattgg

SEQ ID NO: 2539330 - DNA, 25 bp, Homo sapien
ctttcagcatcatactttaagtcat

SEQ ID NO: 2539331 - DNA, 25 bp, Homo sapien
caaaatgttttttgctccaatatcc

SEQ ID NO: 2539332 - DNA, 25 bp, Homo sapien
cttatttaacgaatgaaccaaaatg

SEQ ID NO: 2539333 - DNA, 25 bp, Homo sapien
atcccttaaatctctttcagcatca

SEQ ID NO: 2539334 - DNA, 25 bp, Homo sapien
accggcaccatcacctattaagaag

SEQ ID NO: 2539335 - DNA, 25 bp, Homo sapien
gatgattcctgctatcgtccttcct

SEQ ID NO: 2539336 - DNA, 25 bp, Homo sapien
tattaagaagccagcacgatctcca

SEQ ID NO: 2539337 - DNA, 25 bp, Homo sapien
cacaatgctcgttttctactcaaca

SEQ ID NO: 2539338 - DNA, 25 bp, Homo sapien
gcgcccagctcaatgtgaatacttt

SEQ ID NO: 2539339 - DNA, 25 bp, Homo sapien
cttccatgcaccaggtaatgaaagt

SEQ ID NO: 2539340 - DNA, 25 bp, Homo sapien
tgcaccaggtaatgaaagttaacaa

SEQ ID NO: 2539341 - DNA, 25 bp, Homo sapien
tattatctcctgctactcttccatg

SEQ ID NO: 2539342 - DNA, 25 bp, Homo sapien
caagctgcaatgctgataaccagcc

SEQ ID NO: 2539343 - DNA, 25 bp, Homo sapien
gagtaacactggataaagagctggt

SEQ ID NO: 2539344 - DNA, 25 bp, Homo sapien
gcatatgtaattgcctcaagctgca

SEQ ID NO: 2539345 - DNA, 25 bp, Homo sapien
cactacagcatctggatgacgtagg

SEQ ID NO: 2539346 - DNA, 25 bp, Homo sapien
tcatcttcttttacaacaggaacct

SEQ ID NO: 2539347 - DNA, 25 bp, Homo sapien
ggcatgtattctgcataggtttctg

SEQ ID NO: 2539348 - DNA, 25 bp, Homo sapien
tctgcataggtttctgcatgaccca

SEQ ID NO: 2539349 - DNA, 25 bp, Homo sapien
catcttcttttacaacaggaacctt

SEQ ID NO: 2539350 - DNA, 25 bp, Homo sapien
cagctacagtttgctgcactgtctc

SEQ ID NO: 2539351 - DNA, 25 bp, Homo sapien
cgccagtagcactattgttctcctg

SEQ ID NO: 2539352 - DNA, 25 bp, Homo sapien
tggttcccattcaaaacctcagcta

SEQ ID NO: 2539353 - DNA, 25 bp, Homo sapien
ccagtagcactattgttctcctggt

SEQ ID NO: 2539354 - DNA, 25 bp, Homo sapien
catggttggggaaaaactcctcatc

SEQ ID NO: 2539355 - DNA, 25 bp, Homo sapien
gctccttctttattagaagactctt

SEQ ID NO: 2539356 - DNA, 25 bp, Homo sapien
tttactgtaccattgcttacatcag

SEQ ID NO: 2539357 - DNA, 25 bp, Homo sapien
tattagaagactctttctttactgt

SEQ ID NO: 2539358 - DNA, 25 bp, Homo sapien
tatagcaataaaatctcagaatcca

SEQ ID NO: 2539359 - DNA, 25 bp, Homo sapien
tcaatcagcagagctacttgactga

SEQ ID NO: 2539360 - DNA, 25 bp, Homo sapien
tccacttatcaatcagcagagctac

SEQ ID NO: 2539361 - DNA, 25 bp, Homo sapien
atctcagaatccacttatcaatcag

SEQ ID NO: 2539362 - DNA, 25 bp, Homo sapien
cttgagatagaggtgcggaaatcac

SEQ ID NO: 2539363 - DNA, 25 bp, Homo sapien
tgagatagaggtgcggaaatcactg

SEQ ID NO: 2539364 - DNA, 25 bp, Homo sapien
tcttgagatagaggtgcggaaatca

SEQ ID NO: 2539365 - DNA, 25 bp, Homo sapien
gagatagaggtgcggaaatcactgc

SEQ ID NO: 2539366 - DNA, 25 bp, Homo sapien
tgaagagtatttgggaggactatca

SEQ ID NO: 2539367 - DNA, 25 bp, Homo sapien
tagactccaaaacgagtacaactaa

SEQ ID NO: 2539368 - DNA, 25 bp, Homo sapien
tgctaacatcaggagagctgatcag

SEQ ID NO: 2539369 - DNA, 25 bp, Homo sapien
catctattctagcaaaagatgaaga

SEQ ID NO: 2539370 - DNA, 25 bp, Homo sapien
gctcctagttttaagaccagagaaa

SEQ ID NO: 2539371 - DNA, 25 bp, Homo sapien
agagaaattgtgacaggttagaacc

SEQ ID NO: 2539372 - DNA, 25 bp, Homo sapien
tcagctcctagttttaagaccagag

SEQ ID NO: 2539373 - DNA, 25 bp, Homo sapien
gatcagctcctagttttaagaccag

SEQ ID NO: 2539374 - DNA, 25 bp, Homo sapien
gatggtttgcctgttggttgttaca

SEQ ID NO: 2539375 - DNA, 25 bp, Homo sapien
tcatggcatttcgtactgttggtgc

SEQ ID NO: 2539376 - DNA, 25 bp, Homo sapien
tggctgagcaatattagcaggtggc

SEQ ID NO: 2539377 - DNA, 25 bp, Homo sapien
ttacaattgtagatcccaagggtgg

SEQ ID NO: 2539378 - DNA, 25 bp, Homo sapien
agttctaatgcactaagtggcactg

SEQ ID NO: 2539379 - DNA, 25 bp, Homo sapien
ggtctccaaacctagttctaatgca

SEQ ID NO: 2539380 - DNA, 25 bp, Homo sapien
ccaaacctagttctaatgcactaag

SEQ ID NO: 2539381 - DNA, 25 bp, Homo sapien
ctgcttcggtctccaaacctagttc

SEQ ID NO: 2539382 - DNA, 25 bp, Homo sapien
gaagcagtcggagtagaggagaaac

SEQ ID NO: 2539383 - DNA, 25 bp, Homo sapien
aagcagtcggagtagaggagaaaca

SEQ ID NO: 2539384 - DNA, 25 bp, Homo sapien
ggtgaagcagtcggagtagaggaga

SEQ ID NO: 2539385 - DNA, 25 bp, Homo sapien
cagtcggagtagaggagaaacaaag

SEQ ID NO: 2539386 - DNA, 25 bp, Homo sapien
caaagaggtcattcggactaattcc

SEQ ID NO: 2539387 - DNA, 25 bp, Homo sapien
gcattggagttgcaagccctgcatc

SEQ ID NO: 2539388 - DNA, 25 bp, Homo sapien
agcagcaagcagtaaatcttgccct

SEQ ID NO: 2539389 - DNA, 25 bp, Homo sapien
atctccaccatcaatatcaaagagg

SEQ ID NO: 2539390 - DNA, 25 bp, Homo sapien
ggatcctctcgactatgcattcaaa

SEQ ID NO: 2539391 - DNA, 25 bp, Homo sapien
gattgaggactacctgacacggcag

SEQ ID NO: 2539392 - DNA, 25 bp, Homo sapien
tcacttgctcttgtgggaaacaggg

SEQ ID NO: 2539393 - DNA, 25 bp, Homo sapien
tacaccatgctggagagttcacttg

SEQ ID NO: 2539394 - DNA, 25 bp, Homo sapien
atttcaaaataaacgccagattgag

SEQ ID NO: 2539395 - DNA, 25 bp, Homo sapien
gatgttggtaaactacgatgtttca

SEQ ID NO: 2539396 - DNA, 25 bp, Homo sapien
tctttccaatgagtagataaagttg

SEQ ID NO: 2539397 - DNA, 25 bp, Homo sapien
taaagtattagacagcaagatataa

SEQ ID NO: 2539398 - DNA, 25 bp, Homo sapien
cataggaccttgcttggtaaagtaa

SEQ ID NO: 2539399 - DNA, 25 bp, Homo sapien
cggagcccgaaagccccacgagcgg

SEQ ID NO: 2539400 - DNA, 25 bp, Homo sapien
aaagccccacgagcggcgacagcgg

SEQ ID NO: 2539401 - DNA, 25 bp, Homo sapien
cgcggtccaagaggggtgcctccgg

SEQ ID NO: 2539402 - DNA, 25 bp, Homo sapien
tgccccgcggtccaagaggggtgcc

SEQ ID NO: 2539403 - DNA, 25 bp, Homo sapien
cgaacagaggaagcgagtacaacgg

SEQ ID NO: 2539404 - DNA, 25 bp, Homo sapien
ctgacgaacagaggaagcgagtaca

SEQ ID NO: 2539405 - DNA, 25 bp, Homo sapien
aagcgagtacaacggagccgccgtc

SEQ ID NO: 2539406 - DNA, 25 bp, Homo sapien
acagaggaagcgagtacaacggagc

SEQ ID NO: 2539407 - DNA, 25 bp, Homo sapien
cctccctcctaggtgaaggaagatg

SEQ ID NO: 2539408 - DNA, 25 bp, Homo sapien
tcctcccgggaggtgtgagtttgaa

SEQ ID NO: 2539409 - DNA, 25 bp, Homo sapien
gcacgcagcgccctcacgtgacttc

SEQ ID NO: 2539410 - DNA, 25 bp, Homo sapien
gggcaacggatgaggcgccgcgcgc

SEQ ID NO: 2539411 - DNA, 25 bp, Homo sapien
tagctgggatcacaaaatcgcttga

SEQ ID NO: 2539412 - DNA, 25 bp, Homo sapien
caaaacccatggacgatttttatgt

SEQ ID NO: 2539413 - DNA, 25 bp, Homo sapien
gagatcatgccaccaggcaacagag

SEQ ID NO: 2539414 - DNA, 25 bp, Homo sapien
gtttttataatggaaacattgctgt

SEQ ID NO: 2539415 - DNA, 25 bp, Homo sapien
gaggcgaaggcgcagatcgataacc

SEQ ID NO: 2539416 - DNA, 25 bp, Homo sapien
aaaggaggtgatcccgaggcgaagg

SEQ ID NO: 2539417 - DNA, 25 bp, Homo sapien
tcagctctgcgccgctggagcgaag

SEQ ID NO: 2539418 - DNA, 25 bp, Homo sapien
tccccacgtcctgagtcagctctgc

SEQ ID NO: 2539419 - DNA, 25 bp, Homo sapien
cttaagttactctggtgaatttgtc

SEQ ID NO: 2539420 - DNA, 25 bp, Homo sapien
gtcacagctaagtaacaaccaacat

SEQ ID NO: 2539421 - DNA, 25 bp, Homo sapien
acattggtatattactgttggttga

SEQ ID NO: 2539422 - DNA, 25 bp, Homo sapien
ttacccatcttctctcacttaagtt

SEQ ID NO: 2539423 - DNA, 25 bp, Homo sapien
tacaggtgaatctcagcgatcccaa

SEQ ID NO: 2539424 - DNA, 25 bp, Homo sapien
gccacactggtttggagcttccgat

SEQ ID NO: 2539425 - DNA, 25 bp, Homo sapien
cattttttaacgtgctgcatgggca

SEQ ID NO: 2539426 - DNA, 25 bp, Homo sapien
atcaagctacgcacgatgggcctag

SEQ ID NO: 2539427 - DNA, 25 bp, Homo sapien
gcatcagggcgtgaaatcaaactag

SEQ ID NO: 2539428 - DNA, 25 bp, Homo sapien
taacgtctcaacaggcgctcactga

SEQ ID NO: 2539429 - DNA, 25 bp, Homo sapien
tctgggcaccttgaagcatcagggc

SEQ ID NO: 2539430 - DNA, 25 bp, Homo sapien
tgtgcttcccgtgcatgcagtcaaa

SEQ ID NO: 2539431 - DNA, 25 bp, Homo sapien
caaggacgcaactgtgagctgaggt

SEQ ID NO: 2539432 - DNA, 25 bp, Homo sapien
tcctcctgcaaggacgcaactgtga

SEQ ID NO: 2539433 - DNA, 25 bp, Homo sapien
cctgcaaggacgcaactgtgagctg

SEQ ID NO: 2539434 - DNA, 25 bp, Homo sapien
gtgtcctcctgcaaggacgcaactg

SEQ ID NO: 2539435 - DNA, 25 bp, Homo sapien
gcaggaggaataggtgactgcttcc

SEQ ID NO: 2539436 - DNA, 25 bp, Homo sapien
tcaccttaactgtgaaggcaggagg

SEQ ID NO: 2539437 - DNA, 25 bp, Homo sapien
ctgtcccttcagtccagggggccgg

SEQ ID NO: 2539438 - DNA, 25 bp, Homo sapien
tcaaggatagggctaaggttttcac

SEQ ID NO: 2539439 - DNA, 25 bp, Homo sapien
tcagcaaattggaagaggatccgat

SEQ ID NO: 2539440 - DNA, 25 bp, Homo sapien
tccgatgggagtgtaaatgtgagac

SEQ ID NO: 2539441 - DNA, 25 bp, Homo sapien
ggcctcacgacggtgctacctaaga

SEQ ID NO: 2539442 - DNA, 25 bp, Homo sapien
gaggctgtcctcgtctttgattccc

SEQ ID NO: 2539443 - DNA, 25 bp, Homo sapien
agtgcctccaagttctgatatgtag

SEQ ID NO: 2539444 - DNA, 25 bp, Homo sapien
tcagtgtttacaagtactcaggact

SEQ ID NO: 2539445 - DNA, 25 bp, Homo sapien
gactaatagctaataagtgcctcca

SEQ ID NO: 2539446 - DNA, 25 bp, Homo sapien
gccttgcacatagccttcagtaatc

SEQ ID NO: 2539447 - DNA, 25 bp, Homo sapien
ttgtaaaagatgactgctggccagg

SEQ ID NO: 2539448 - DNA, 25 bp, Homo sapien
gtaaaagatgactgctggccaggca

SEQ ID NO: 2539449 - DNA, 25 bp, Homo sapien
aaataaaagatgattgctacagcaa

SEQ ID NO: 2539450 - DNA, 25 bp, Homo sapien
cgcccagccctatttgttcattgta

SEQ ID NO: 2539451 - DNA, 25 bp, Homo sapien
ttctagggattaggagccctgatct

SEQ ID NO: 2539452 - DNA, 25 bp, Homo sapien
gagccctgatctaatgatgctgttg

SEQ ID NO: 2539453 - DNA, 25 bp, Homo sapien
ggttgcagtgttacacagggttcta

SEQ ID NO: 2539454 - DNA, 25 bp, Homo sapien
gcctggccagggttgcagtgttaca

SEQ ID NO: 2539455 - DNA, 25 bp, Homo sapien
acaatgcggaaaggaacccgagcgg

SEQ ID NO: 2539456 - DNA, 25 bp, Homo sapien
cgttgatgggactggacaccatgga

SEQ ID NO: 2539457 - DNA, 25 bp, Homo sapien
agcttccacaatgcggaaaggaacc

SEQ ID NO: 2539458 - DNA, 25 bp, Homo sapien
tgcactcctcaacccttgggtcgtt

SEQ ID NO: 2539459 - DNA, 25 bp, Homo sapien
tgtgtaccatcgtaactaagagacc

SEQ ID NO: 2539460 - DNA, 25 bp, Homo sapien
gcatcgcttagactgaatgaatgca

SEQ ID NO: 2539461 - DNA, 25 bp, Homo sapien
tcatagtgacaccagataatcgtgc

SEQ ID NO: 2539462 - DNA, 25 bp, Homo sapien
cctaaaatcgatagcttcttaacat

SEQ ID NO: 2539463 - DNA, 25 bp, Homo sapien
gccatagccttacttgtggccttgg

SEQ ID NO: 2539464 - DNA, 25 bp, Homo sapien
caagggtgtctagttctgcagccag

SEQ ID NO: 2539465 - DNA, 25 bp, Homo sapien
tcttctagaatcagagccatagcct

SEQ ID NO: 2539466 - DNA, 25 bp, Homo sapien
ccaggcatcttggaaggttgtcttc

SEQ ID NO: 2539467 - DNA, 25 bp, Homo sapien
tagtaaccacagcatctttttctct

SEQ ID NO: 2539468 - DNA, 25 bp, Homo sapien
gcttttttatgattgtcttctcctc

SEQ ID NO: 2539469 - DNA, 25 bp, Homo sapien
gggccttctcttggtggaatcaggc

SEQ ID NO: 2539470 - DNA, 25 bp, Homo sapien
cctgccagcatttttggcactagta

SEQ ID NO: 2539471 - DNA, 25 bp, Homo sapien
atgaaccactgagcctggcttttat

SEQ ID NO: 2539472 - DNA, 25 bp, Homo sapien
cactgagcctggcttttattacaga

SEQ ID NO: 2539473 - DNA, 25 bp, Homo sapien
gaaccactgagcctggcttttatta

SEQ ID NO: 2539474 - DNA, 25 bp, Homo sapien
accactgagcctggcttttattaca

SEQ ID NO: 2539475 - DNA, 25 bp, Homo sapien
gatgattatggtaatattacggttg

SEQ ID NO: 2539476 - DNA, 25 bp, Homo sapien
tatggtaatattacggttgaaagca

SEQ ID NO: 2539477 - DNA, 25 bp, Homo sapien
tgaaaataaagggtcttaatgatga

SEQ ID NO: 2539478 - DNA, 25 bp, Homo sapien
agctctgaaaataaagggtcttaat

SEQ ID NO: 2539479 - DNA, 25 bp, Homo sapien
ccaatgtgatgcctcgtttcttttt

SEQ ID NO: 2539480 - DNA, 25 bp, Homo sapien
tctgccccccggggctcacgccatc

SEQ ID NO: 2539481 - DNA, 25 bp, Homo sapien
ctgccccccggggctcacgccatcc

SEQ ID NO: 2539482 - DNA, 25 bp, Homo sapien
tgccccccggggctcacgccatcct

SEQ ID NO: 2539483 - DNA, 25 bp, Homo sapien
tgttctcacagtcaaagcaagtcac

SEQ ID NO: 2539484 - DNA, 25 bp, Homo sapien
cagagccagcctacatgcaaagaga

SEQ ID NO: 2539485 - DNA, 25 bp, Homo sapien
cacagaatgctggtctcaaggaagc

SEQ ID NO: 2539486 - DNA, 25 bp, Homo sapien
tgtggtccacctgctagcctgagct

SEQ ID NO: 2539487 - DNA, 25 bp, Homo sapien
caaccaccattttgtttgggcccag

SEQ ID NO: 2539488 - DNA, 25 bp, Homo sapien
tgggatctgtcaggtcaaccaccat

SEQ ID NO: 2539489 - DNA, 25 bp, Homo sapien
gacttgagtttgttgcgttcctgca

SEQ ID NO: 2539490 - DNA, 25 bp, Homo sapien
cttagctcctgcagagtgaagcggg

SEQ ID NO: 2539491 - DNA, 25 bp, Homo sapien
ctccccgctggccggagggctctgt

SEQ ID NO: 2539492 - DNA, 25 bp, Homo sapien
cccgctggccggagggctctgtctc

SEQ ID NO: 2539493 - DNA, 25 bp, Homo sapien
gctggccggagggctctgtctccgc

SEQ ID NO: 2539494 - DNA, 25 bp, Homo sapien
ctggccggagggctctgtctccgca

SEQ ID NO: 2539495 - DNA, 25 bp, Homo sapien
gacgcggacgactttgaactgcagc

SEQ ID NO: 2539496 - DNA, 25 bp, Homo sapien
agggccataagctcgcggcccaaca

SEQ ID NO: 2539497 - DNA, 25 bp, Homo sapien
cccaacaggtaggagatgtcataca

SEQ ID NO: 2539498 - DNA, 25 bp, Homo sapien
tccttcctgaggtggtccctctcca

SEQ ID NO: 2539499 - DNA, 25 bp, Homo sapien
cctcttctcgcacagggggctcctc

SEQ ID NO: 2539500 - DNA, 25 bp, Homo sapien
ctcttctcgcacagggggctcctcc

SEQ ID NO: 2539501 - DNA, 25 bp, Homo sapien
tcttctcgcacagggggctcctcca

SEQ ID NO: 2539502 - DNA, 25 bp, Homo sapien
cttggagtctcccaaaggttagact

SEQ ID NO: 2539503 - DNA, 25 bp, Homo sapien
tggagtctcccaaaggttagacttc

SEQ ID NO: 2539504 - DNA, 25 bp, Homo sapien
caaaactttccgctgggcagagtcc

SEQ ID NO: 2539505 - DNA, 25 bp, Homo sapien
cacccaaaactttccgctgggcaga

SEQ ID NO: 2539506 - DNA, 25 bp, Homo sapien
ggaagttcaggggtgacggcaatcg

SEQ ID NO: 2539507 - DNA, 25 bp, Homo sapien
cgagaagaggaacggggaagttcag

SEQ ID NO: 2539508 - DNA, 25 bp, Homo sapien
gttcaggggtgacggcaatcgcccc

SEQ ID NO: 2539509 - DNA, 25 bp, Homo sapien
caggggtgacggcaatcgccccagc

SEQ ID NO: 2539510 - DNA, 25 bp, Homo sapien
ccgtagaatttgcatcgtaggtgat

SEQ ID NO: 2539511 - DNA, 25 bp, Homo sapien
tgcatcgtaggtgatggaagatccg

SEQ ID NO: 2539512 - DNA, 25 bp, Homo sapien
aagatccgggtgtctctttgagggt

SEQ ID NO: 2539513 - DNA, 25 bp, Homo sapien
cctcgtgctttccagccgtagaatt

SEQ ID NO: 2539514 - DNA, 25 bp, Homo sapien
gacagagtccccgaggcttgaggat

SEQ ID NO: 2539515 - DNA, 25 bp, Homo sapien
gcgcgacagagtccccgaggcttga

SEQ ID NO: 2539516 - DNA, 25 bp, Homo sapien
ctgctgggggcagcgcgacagagtc

SEQ ID NO: 2539517 - DNA, 25 bp, Homo sapien
gcagcgcgacagagtccccgaggct

SEQ ID NO: 2539518 - DNA, 25 bp, Homo sapien
ttgattctgcagagaggtcaccaca

SEQ ID NO: 2539519 - DNA, 25 bp, Homo sapien
gattctgcagagaggtcaccacaca

SEQ ID NO: 2539520 - DNA, 25 bp, Homo sapien
tgattctgcagagaggtcaccacac

SEQ ID NO: 2539521 - DNA, 25 bp, Homo sapien
ttctgcagagaggtcaccacacatt

SEQ ID NO: 2539522 - DNA, 25 bp, Homo sapien
ccccgttccatcaaacatgaggaag

SEQ ID NO: 2539523 - DNA, 25 bp, Homo sapien
gtccgtccccgttccatcaaacatg

SEQ ID NO: 2539524 - DNA, 25 bp, Homo sapien
catgtggggagctaaggagtttctc

SEQ ID NO: 2539525 - DNA, 25 bp, Homo sapien
tctcagaagtattgactctgagctt

SEQ ID NO: 2539526 - DNA, 25 bp, Homo sapien
cgtccaggggtggtggcgacaatcg

SEQ ID NO: 2539527 - DNA, 25 bp, Homo sapien
tcagcgtccaggggtggtggcgaca

SEQ ID NO: 2539528 - DNA, 25 bp, Homo sapien
gcgtccaggggtggtggcgacaatc

SEQ ID NO: 2539529 - DNA, 25 bp, Homo sapien
cagcgtccaggggtggtggcgacaa

SEQ ID NO: 2539530 - DNA, 25 bp, Homo sapien
gctgggcgatctgggagaggaggtc

SEQ ID NO: 2539531 - DNA, 25 bp, Homo sapien
gcctcccctcgccacacatcctcca

SEQ ID NO: 2539532 - DNA, 25 bp, Homo sapien
gaaattgacatccttgtgggagagg

SEQ ID NO: 2539533 - DNA, 25 bp, Homo sapien
aattgacatccttgtgggagaggtt

SEQ ID NO: 2539534 - DNA, 25 bp, Homo sapien
gggtcttcaaccactgactcgatca

SEQ ID NO: 2539535 - DNA, 25 bp, Homo sapien
caactccagtccttggatcggctca

SEQ ID NO: 2539536 - DNA, 25 bp, Homo sapien
tcagtttccctcagtggtggaacca

SEQ ID NO: 2539537 - DNA, 25 bp, Homo sapien
ccaaaacaaaggctcacgaagtgaa

SEQ ID NO: 2539538 - DNA, 25 bp, Homo sapien
cttggtaaaaccgtaagctagctca

SEQ ID NO: 2539539 - DNA, 25 bp, Homo sapien
gggttgctgttgtctgtataaaaca

SEQ ID NO: 2539540 - DNA, 25 bp, Homo sapien
gctcacaaagcagggttgctgttgt

SEQ ID NO: 2539541 - DNA, 25 bp, Homo sapien
agctagctcacaaagcagggttgct

SEQ ID NO: 2539542 - DNA, 25 bp, Homo sapien
gattctcgcctctgagttgaccact

SEQ ID NO: 2539543 - DNA, 25 bp, Homo sapien
cagcccagtggttctccggagaagt

SEQ ID NO: 2539544 - DNA, 25 bp, Homo sapien
tgccaagtgcattcctacctcagga

SEQ ID NO: 2539545 - DNA, 25 bp, Homo sapien
gactgccccatctgttagactacca

SEQ ID NO: 2539546 - DNA, 25 bp, Homo sapien
aaaattacagtgtgcctgtagtctt

SEQ ID NO: 2539547 - DNA, 25 bp, Homo sapien
gatgacagagtacgtccctgactca

SEQ ID NO: 2539548 - DNA, 25 bp, Homo sapien
aaaaatctctatctcttcctcatgc

SEQ ID NO: 2539549 - DNA, 25 bp, Homo sapien
gcagggagccgtgatgccatcattg

SEQ ID NO: 2539550 - DNA, 25 bp, Homo sapien
tggcccacaagcgacgcgatgtcgt

SEQ ID NO: 2539551 - DNA, 25 bp, Homo sapien
gcgatgtcgtacacgtccatgacgg

SEQ ID NO: 2539552 - DNA, 25 bp, Homo sapien
acgcgcacgaccttgggcatgaggc

SEQ ID NO: 2539553 - DNA, 25 bp, Homo sapien
gcctcgcagccgtgctggtcaatga

SEQ ID NO: 2539554 - DNA, 25 bp, Homo sapien
cattgggcacacttgctgaatttca

SEQ ID NO: 2539555 - DNA, 25 bp, Homo sapien
tgggcacacttgctgaatttcaatg

SEQ ID NO: 2539556 - DNA, 25 bp, Homo sapien
cacttgctgaatttcaatgtctgct

SEQ ID NO: 2539557 - DNA, 25 bp, Homo sapien
ctgcattgggcacacttgctgaatt

SEQ ID NO: 2539558 - DNA, 25 bp, Homo sapien
cgccgctgagacgaaagcccagagc

SEQ ID NO: 2539559 - DNA, 25 bp, Homo sapien
ccgctgagacgaaagcccagagcat

SEQ ID NO: 2539560 - DNA, 25 bp, Homo sapien
gccgctgagacgaaagcccagagca

SEQ ID NO: 2539561 - DNA, 25 bp, Homo sapien
tttgggagcaacatgtctgagcagt

SEQ ID NO: 2539562 - DNA, 25 bp, Homo sapien
gacatgatagctagtttcccagaga

SEQ ID NO: 2539563 - DNA, 25 bp, Homo sapien
tcttgcatggctgttggtgagaatc

SEQ ID NO: 2539564 - DNA, 25 bp, Homo sapien
tcaaaacatagtgacctaaaacagc

SEQ ID NO: 2539565 - DNA, 25 bp, Homo sapien
cgggaaaacttcatcactgcagctg

SEQ ID NO: 2539566 - DNA, 25 bp, Homo sapien
tcttgaaacctgaagcgggaaactg

SEQ ID NO: 2539567 - DNA, 25 bp, Homo sapien
tcaactgtacactgtcatagtcggg

SEQ ID NO: 2539568 - DNA, 25 bp, Homo sapien
tgcaaaagtggagtaacaacccagg

SEQ ID NO: 2539569 - DNA, 25 bp, Homo sapien
ctaaaaaccagtgggcttcgcgcct

SEQ ID NO: 2539570 - DNA, 25 bp, Homo sapien
aaaccagtgggcttcgcgcctgtaa

SEQ ID NO: 2539571 - DNA, 25 bp, Homo sapien
cttcaggcctggcgcggtagcttac

SEQ ID NO: 2539572 - DNA, 25 bp, Homo sapien
aaaacccatggcttcaggcctggcg

SEQ ID NO: 2539573 - DNA, 25 bp, Homo sapien
catcttcttggacaatcctaagagg

SEQ ID NO: 2539574 - DNA, 25 bp, Homo sapien
cctaagagggcattgcagaggcttc

SEQ ID NO: 2539575 - DNA, 25 bp, Homo sapien
tgcctgcaaatgtttcgccatcttc

SEQ ID NO: 2539576 - DNA, 25 bp, Homo sapien
caactcctatcgctgcctgcaaatg

SEQ ID NO: 2539577 - DNA, 25 bp, Homo sapien
gtccaccatgactccaaaaatagtg

SEQ ID NO: 2539578 - DNA, 25 bp, Homo sapien
tcttgcctccagattacaggaccag

SEQ ID NO: 2539579 - DNA, 25 bp, Homo sapien
tgcccagccatattcttggtgaatt

SEQ ID NO: 2539580 - DNA, 25 bp, Homo sapien
ttttagtaaccggatgtccaccatg

SEQ ID NO: 2539581 - DNA, 25 bp, Homo sapien
atttttctgcaaatagccaacatta

SEQ ID NO: 2539582 - DNA, 25 bp, Homo sapien
taatgttggctatttgcagaaaaat

SEQ ID NO: 2539583 - DNA, 25 bp, Homo sapien
gacaggaggactgcttttgctcagg

SEQ ID NO: 2539584 - DNA, 25 bp, Homo sapien
atttttctgcaaatagccaacatta

SEQ ID NO: 2539585 - DNA, 25 bp, Homo sapien
ggcaatatggagaaacccagtctct

SEQ ID NO: 2539586 - DNA, 25 bp, Homo sapien
tttgctcaggagtcagaggccaacc

SEQ ID NO: 2539587 - DNA, 25 bp, Homo sapien
cagaggccaaccctgggcaatatgg

SEQ ID NO: 2539588 - DNA, 25 bp, Homo sapien
aacaattacactataatcccaggac

SEQ ID NO: 2539589 - DNA, 25 bp, Homo sapien
ccatattgcccagggttggcctctg

SEQ ID NO: 2539590 - DNA, 25 bp, Homo sapien
taatgttggctatttgcagaaaaat

SEQ ID NO: 2539591 - DNA, 25 bp, Homo sapien
gagactgggtttctccatattgccc

SEQ ID NO: 2539592 - DNA, 25 bp, Homo sapien
ggttggcctctgactcctgagcaaa

SEQ ID NO: 2539593 - DNA, 25 bp, Homo sapien
tgcagaaaaataaaacactacatag

SEQ ID NO: 2539594 - DNA, 25 bp, Homo sapien
tcctgagcaaaagcagtcctcctgt

SEQ ID NO: 2539595 - DNA, 25 bp, Homo sapien
tactgctgtttctcataaggactca

SEQ ID NO: 2539596 - DNA, 25 bp, Homo sapien
tgatggtcagtaccctgaacagtgg

SEQ ID NO: 2539597 - DNA, 25 bp, Homo sapien
gaagctttaaccctttggcatcaga

SEQ ID NO: 2539598 - DNA, 25 bp, Homo sapien
tggcagcatacacccaagtcagaga

SEQ ID NO: 2539599 - DNA, 25 bp, Homo sapien
aaagtatgaaagtacccagcctggc

SEQ ID NO: 2539600 - DNA, 25 bp, Homo sapien
gaaaccgtcaagattcatactgctg

SEQ ID NO: 2539601 - DNA, 25 bp, Homo sapien
tgagtccttatgagaaacagcagta

SEQ ID NO: 2539602 - DNA, 25 bp, Homo sapien
tatgaatcttgacggtttctgcccg

SEQ ID NO: 2539603 - DNA, 25 bp, Homo sapien
tctgatgccaaagggttaaagcttc

SEQ ID NO: 2539604 - DNA, 25 bp, Homo sapien
tctctgacttgggtgtatgctgcca

SEQ ID NO: 2539605 - DNA, 25 bp, Homo sapien
tgcaagggcaaaactacaagtaacg

SEQ ID NO: 2539606 - DNA, 25 bp, Homo sapien
tgttcaggaaatcagcacaaagcct

SEQ ID NO: 2539607 - DNA, 25 bp, Homo sapien
acgggatttcaccgtctggtctcga

SEQ ID NO: 2539608 - DNA, 25 bp, Homo sapien
gggaatacaggcgcacgctgccaca

SEQ ID NO: 2539609 - DNA, 25 bp, Homo sapien
gaatacaggcgcacgctgccacatc

SEQ ID NO: 2539610 - DNA, 25 bp, Homo sapien
gggatttcaccgtctggtctcgaac

SEQ ID NO: 2539611 - DNA, 25 bp, Homo sapien
catcggaccgcaacattcaggacgt

SEQ ID NO: 2539612 - DNA, 25 bp, Homo sapien
tgtatgtggacatgaatggcccagg

SEQ ID NO: 2539613 - DNA, 25 bp, Homo sapien
ttttgcagggctgctaacccgggtc

SEQ ID NO: 2539614 - DNA, 25 bp, Homo sapien
gcagtgaaccgttatagcgcccagc

SEQ ID NO: 2539615 - DNA, 25 bp, Homo sapien
gtaaaaagtcgtccaaaggcaggca

SEQ ID NO: 2539616 - DNA, 25 bp, Homo sapien
ttttcttcgcaatcataagcaggag

SEQ ID NO: 2539617 - DNA, 25 bp, Homo sapien
ccatctagcatggttctctccggaa

SEQ ID NO: 2539618 - DNA, 25 bp, Homo sapien
cagaatgtgcaggtgcatgcggcct

SEQ ID NO: 2539619 - DNA, 25 bp, Homo sapien
tcattgaaggtagcagctctcctgc

SEQ ID NO: 2539620 - DNA, 25 bp, Homo sapien
ccttgggaatcctgctaattgggaa

SEQ ID NO: 2539621 - DNA, 25 bp, Homo sapien
ggaatactatgggaaggctctggaa

SEQ ID NO: 2539622 - DNA, 25 bp, Homo sapien
tagtagcctgtgctgtccgcatgtg

SEQ ID NO: 2539623 - DNA, 25 bp, Homo sapien
ggttttgcagtatgaccctcccagc

SEQ ID NO: 2539624 - DNA, 25 bp, Homo sapien
caaggtatggtacgaggctgccacc

SEQ ID NO: 2539625 - DNA, 25 bp, Homo sapien
cctgtgtgtcactgtcatcgagatc

SEQ ID NO: 2539626 - DNA, 25 bp, Homo sapien
gatgaagatggtggcctccttactc

SEQ ID NO: 2539627 - DNA, 25 bp, Homo sapien
catctcgcgtgctttaggcagatca

SEQ ID NO: 2539628 - DNA, 25 bp, Homo sapien
gccagatgcagattcagcaagtgtt

SEQ ID NO: 2539629 - DNA, 25 bp, Homo sapien
tgtaacgtcctgaccagctgttggt

SEQ ID NO: 2539630 - DNA, 25 bp, Homo sapien
tcttacaaggcaccgcgtgtaacgt

SEQ ID NO: 2539631 - DNA, 25 bp, Homo sapien
ctttcatcagttaagtagccaatta

SEQ ID NO: 2539632 - DNA, 25 bp, Homo sapien
caattatctaacttgtatttctgga

SEQ ID NO: 2539633 - DNA, 25 bp, Homo sapien
gttaagtagccaattatctaacttg

SEQ ID NO: 2539634 - DNA, 25 bp, Homo sapien
gccaattatctaacttgtatttctg

SEQ ID NO: 2539635 - DNA, 25 bp, Homo sapien
cacatctcagttttggcctgactca

SEQ ID NO: 2539636 - DNA, 25 bp, Homo sapien
actggggtgtcaagcagctactcac

SEQ ID NO: 2539637 - DNA, 25 bp, Homo sapien
taagtccttactccataaatcttca

SEQ ID NO: 2539638 - DNA, 25 bp, Homo sapien
ttttagatgggactgaaatgagtaa

SEQ ID NO: 2539639 - DNA, 25 bp, Homo sapien
tcaactacgtaagctgcaccttggc

SEQ ID NO: 2539640 - DNA, 25 bp, Homo sapien
gcctcaactacgtaagctgcacctt

SEQ ID NO: 2539641 - DNA, 25 bp, Homo sapien
ctcaactacgtaagctgcaccttgg

SEQ ID NO: 2539642 - DNA, 25 bp, Homo sapien
cctgcctcaactacgtaagctgcac

SEQ ID NO: 2539643 - DNA, 25 bp, Homo sapien
gcacgcccaggtctgtaaacagcag

SEQ ID NO: 2539644 - DNA, 25 bp, Homo sapien
cagtgtagtcgacccacggatgctc

SEQ ID NO: 2539645 - DNA, 25 bp, Homo sapien
atgagctcatcgctgactgctgagg

SEQ ID NO: 2539646 - DNA, 25 bp, Homo sapien
tccagtctgcgcgaccttgagagtg

SEQ ID NO: 2539647 - DNA, 25 bp, Homo sapien
atttagtgctctgacctggtagggc

SEQ ID NO: 2539648 - DNA, 25 bp, Homo sapien
gaagtacacattagtcggcactgaa

SEQ ID NO: 2539649 - DNA, 25 bp, Homo sapien
ctgaggagagaagtacacattagtc

SEQ ID NO: 2539650 - DNA, 25 bp, Homo sapien
cagtgtgctacttcctgagactgct

SEQ ID NO: 2539651 - DNA, 25 bp, Homo sapien
tgggagaaactaagctatgcaggac

SEQ ID NO: 2539652 - DNA, 25 bp, Homo sapien
caatagagagcttgcagcgtgccag

SEQ ID NO: 2539653 - DNA, 25 bp, Homo sapien
tccagacctctcaagggaagatcga

SEQ ID NO: 2539654 - DNA, 25 bp, Homo sapien
tatgcaggacactagagacgagggc

SEQ ID NO: 2539655 - DNA, 25 bp, Homo sapien
tagtggaaagagccggacaaacttg

SEQ ID NO: 2539656 - DNA, 25 bp, Homo sapien
gtggaaagagccggacaaacttgaa

SEQ ID NO: 2539657 - DNA, 25 bp, Homo sapien
agtggaaagagccggacaaacttga

SEQ ID NO: 2539658 - DNA, 25 bp, Homo sapien
gtcttgctggtttagtggaaagagc

SEQ ID NO: 2539659 - DNA, 25 bp, Homo sapien
atagaaaggtttgttctgtgctttg

SEQ ID NO: 2539660 - DNA, 25 bp, Homo sapien
acacagccatctggttggttccaat

SEQ ID NO: 2539661 - DNA, 25 bp, Homo sapien
gaaaggtttgttctgtgctttggca

SEQ ID NO: 2539662 - DNA, 25 bp, Homo sapien
cacacacagccatctggttggttcc

SEQ ID NO: 2539663 - DNA, 25 bp, Homo sapien
ctcgtctcaattacaataaaggaac

SEQ ID NO: 2539664 - DNA, 25 bp, Homo sapien
aacagccactagaggctggatgtgg

SEQ ID NO: 2539665 - DNA, 25 bp, Homo sapien
tttctcaaaggatatagaaacagcc

SEQ ID NO: 2539666 - DNA, 25 bp, Homo sapien
tggaatggatgagctctagagtgca

SEQ ID NO: 2539667 - DNA, 25 bp, Homo sapien
ccaattcaagccaattttgtataaa

SEQ ID NO: 2539668 - DNA, 25 bp, Homo sapien
agagtgaatgtgtctctattttaaa

SEQ ID NO: 2539669 - DNA, 25 bp, Homo sapien
gacaaaccccaattccaattcaagc

SEQ ID NO: 2539670 - DNA, 25 bp, Homo sapien
gaagtggaaagattgcttcaggcta

SEQ ID NO: 2539671 - DNA, 25 bp, Homo sapien
tatgacttacgggaaatgggcaaca

SEQ ID NO: 2539672 - DNA, 25 bp, Homo sapien
tagaaggaaccataatcaacactgc

SEQ ID NO: 2539673 - DNA, 25 bp, Homo sapien
gatttgactgaaactggactgccca

SEQ ID NO: 2539674 - DNA, 25 bp, Homo sapien
ggtataaggcatcacacctgaccaa

SEQ ID NO: 2539675 - DNA, 25 bp, Homo sapien
cagcaccaactatgacaagatctgc

SEQ ID NO: 2539676 - DNA, 25 bp, Homo sapien
aactccttcagcaccaactatgaca

SEQ ID NO: 2539677 - DNA, 25 bp, Homo sapien
ccttcagcaccaactatgacaagat

SEQ ID NO: 2539678 - DNA, 25 bp, Homo sapien
aacaactccttcagcaccaactatg

SEQ ID NO: 2539679 - DNA, 25 bp, Homo sapien
ttaaagcgcacttaacacgcgatag

SEQ ID NO: 2539680 - DNA, 25 bp, Homo sapien
cgcgatagacccctggcattgttac

SEQ ID NO: 2539681 - DNA, 25 bp, Homo sapien
ccggcgcatgcacacgtacatatgt

SEQ ID NO: 2539682 - DNA, 25 bp, Homo sapien
tcttggctctaacgagtagcatcat

SEQ ID NO: 2539683 - DNA, 25 bp, Homo sapien
tgtgcccaaccttaagaatctttct

SEQ ID NO: 2539684 - DNA, 25 bp, Homo sapien
tcattccaagagatcactactcttg

SEQ ID NO: 2539685 - DNA, 25 bp, Homo sapien
gaatctttctggtaggatgaaggcc

SEQ ID NO: 2539686 - DNA, 25 bp, Homo sapien
cattccaagagatcactactcttgt

SEQ ID NO: 2539687 - DNA, 25 bp, Homo sapien
taacaagcttgctggtttagggcag

SEQ ID NO: 2539688 - DNA, 25 bp, Homo sapien
aagtaggacgctacctggtgtggct

SEQ ID NO: 2539689 - DNA, 25 bp, Homo sapien
taaagctatagacacaactcccact

SEQ ID NO: 2539690 - DNA, 25 bp, Homo sapien
tgtggctttatgaacgggactcaaa

SEQ ID NO: 2539691 - DNA, 25 bp, Homo sapien
gtgacagggacgttgaggtggcaga

SEQ ID NO: 2539692 - DNA, 25 bp, Homo sapien
tgacagggacgttgaggtggcagag

SEQ ID NO: 2539693 - DNA, 25 bp, Homo sapien
accacagtgacagggacgttgaggt

SEQ ID NO: 2539694 - DNA, 25 bp, Homo sapien
cagtgacagggacgttgaggtggca

SEQ ID NO: 2539695 - DNA, 25 bp, Homo sapien
gaaagtacaagacagtaccacagtg

SEQ ID NO: 2539696 - DNA, 25 bp, Homo sapien
tgttggactgtaatccgcagtttgc

SEQ ID NO: 2539697 - DNA, 25 bp, Homo sapien
tatactgcggcctgctgcaaattca

SEQ ID NO: 2539698 - DNA, 25 bp, Homo sapien
gaaacccctagatcatatactgcgg

SEQ ID NO: 2539699 - DNA, 25 bp, Homo sapien
ggactctcaggaccactctggagta

SEQ ID NO: 2539700 - DNA, 25 bp, Homo sapien
tctggagtaggcgtgagtcaatatt

SEQ ID NO: 2539701 - DNA, 25 bp, Homo sapien
gtgacgtatacactaaatcgcttct

SEQ ID NO: 2539702 - DNA, 25 bp, Homo sapien
tctgtgacgtatacactaaatcgct

SEQ ID NO: 2539703 - DNA, 25 bp, Homo sapien
cgcacaatactgacggcacagcagg

SEQ ID NO: 2539704 - DNA, 25 bp, Homo sapien
gaaacccgcacaatactgacggcac

SEQ ID NO: 2539705 - DNA, 25 bp, Homo sapien
gagcaaacgaaacccgcacaatact

SEQ ID NO: 2539706 - DNA, 25 bp, Homo sapien
ctacactagagcaaacgaaacccgc

SEQ ID NO: 2539707 - DNA, 25 bp, Homo sapien
gcaattttgtttcttgacagtgata

SEQ ID NO: 2539708 - DNA, 25 bp, Homo sapien
acagtgatattctcctgagaaaaag

SEQ ID NO: 2539709 - DNA, 25 bp, Homo sapien
cgctccatctttgatgaaagtatgg

SEQ ID NO: 2539710 - DNA, 25 bp, Homo sapien
agaaaaagttctccccgctcaatca

SEQ ID NO: 2539711 - DNA, 25 bp, Homo sapien
gaggcaagactgatgaagcggagga

SEQ ID NO: 2539712 - DNA, 25 bp, Homo sapien
caagactgatgaagcggaggaagag

SEQ ID NO: 2539713 - DNA, 25 bp, Homo sapien
gggaggcaagactgatgaagcggag

SEQ ID NO: 2539714 - DNA, 25 bp, Homo sapien
ggcaagactgatgaagcggaggaag

SEQ ID NO: 2539715 - DNA, 25 bp, Homo sapien
tctatggcactggtgagattcgccc

SEQ ID NO: 2539716 - DNA, 25 bp, Homo sapien
acacagggtttctatggcactggtg

SEQ ID NO: 2539717 - DNA, 25 bp, Homo sapien
gattcgccctcagaccctggattgt

SEQ ID NO: 2539718 - DNA, 25 bp, Homo sapien
ggcactggtgagattcgccctcaga

SEQ ID NO: 2539719 - DNA, 25 bp, Homo sapien
tcaagaactccagcaacgtccggat

SEQ ID NO: 2539720 - DNA, 25 bp, Homo sapien
cagcaacgtccggatggcagccact

SEQ ID NO: 2539721 - DNA, 25 bp, Homo sapien
caacgtccggatggcagccactgct

SEQ ID NO: 2539722 - DNA, 25 bp, Homo sapien
actccagcaacgtccggatggcagc

SEQ ID NO: 2539723 - DNA, 25 bp, Homo sapien
tgtctcgaacgggtccgccggccgc

SEQ ID NO: 2539724 - DNA, 25 bp, Homo sapien
ttgtcgtccatggcgtcctcctgct

SEQ ID NO: 2539725 - DNA, 25 bp, Homo sapien
cgccgcctgcgagccagtctgacag

SEQ ID NO: 2539726 - DNA, 25 bp, Homo sapien
tctgacagcgcgctgcacacctccg

SEQ ID NO: 2539727 - DNA, 25 bp, Homo sapien
gacagtcggcagagtttgtgaacca

SEQ ID NO: 2539728 - DNA, 25 bp, Homo sapien
tactgttggatcactctggcccacg

SEQ ID NO: 2539729 - DNA, 25 bp, Homo sapien
gatgtgtgctctaactacctcctaa

SEQ ID NO: 2539730 - DNA, 25 bp, Homo sapien
cctcctaagtttggtgacagtcggc

SEQ ID NO: 2539731 - DNA, 25 bp, Homo sapien
ttgttgtagtcttgtatgcttctct

SEQ ID NO: 2539732 - DNA, 25 bp, Homo sapien
gttgtagtcttgtatgcttctctat

SEQ ID NO: 2539733 - DNA, 25 bp, Homo sapien
tgtagtcttgtatgcttctctataa

SEQ ID NO: 2539734 - DNA, 25 bp, Homo sapien
tagtcttgtatgcttctctataaaa

SEQ ID NO: 2539735 - DNA, 25 bp, Homo sapien
ttccggagcgagaccatgtgcctgg

SEQ ID NO: 2539736 - DNA, 25 bp, Homo sapien
tcgggcacggcctacgagtgcctca

SEQ ID NO: 2539737 - DNA, 25 bp, Homo sapien
agttccgagacgtgagtgtcgcccg

SEQ ID NO: 2539738 - DNA, 25 bp, Homo sapien
atgtgcctggcgcagctcttcctgc

SEQ ID NO: 2539739 - DNA, 25 bp, Homo sapien
caaggactgtcaacctctgagagta

SEQ ID NO: 2539740 - DNA, 25 bp, Homo sapien
tccttggcagtcattggcatcgata

SEQ ID NO: 2539741 - DNA, 25 bp, Homo sapien
gactgcccgctatgttcaggcactg

SEQ ID NO: 2539742 - DNA, 25 bp, Homo sapien
agtaccttaacgcagtccttggcag

SEQ ID NO: 2539743 - DNA, 25 bp, Homo sapien
tgaattgaaatccactcaggcgaac

SEQ ID NO: 2539744 - DNA, 25 bp, Homo sapien
gactgaattgaaatccactcaggcg

SEQ ID NO: 2539745 - DNA, 25 bp, Homo sapien
gaaatccactcaggcgaacatttta

SEQ ID NO: 2539746 - DNA, 25 bp, Homo sapien
ccactcaggcgaacattttatttcc

SEQ ID NO: 2539747 - DNA, 25 bp, Homo sapien
catgtcaagttgtatcttaactgtt

SEQ ID NO: 2539748 - DNA, 25 bp, Homo sapien
actgtttcttgagagtgcccagtac

SEQ ID NO: 2539749 - DNA, 25 bp, Homo sapien
tttcttgagagtgcccagtacaaat

SEQ ID NO: 2539750 - DNA, 25 bp, Homo sapien
cagtttcatgtcaagttgtatctta

SEQ ID NO: 2539751 - DNA, 25 bp, Homo sapien
tgccagtcttgttccactctttgaa

SEQ ID NO: 2539752 - DNA, 25 bp, Homo sapien
ccactgggccttgcatttaagagca

SEQ ID NO: 2539753 - DNA, 25 bp, Homo sapien
cactgggccttgcatttaagagcag

SEQ ID NO: 2539754 - DNA, 25 bp, Homo sapien
tcccactgggccttgcatttaagag

SEQ ID NO: 2539755 - DNA, 25 bp, Homo sapien
tttcatgttgtctaatgcttttctg

SEQ ID NO: 2539756 - DNA, 25 bp, Homo sapien
aaaactatggaagatggtgatctct

SEQ ID NO: 2539757 - DNA, 25 bp, Homo sapien
atttcatgttgtctaatgcttttct

SEQ ID NO: 2539758 - DNA, 25 bp, Homo sapien
tatttcatgttgtctaatgcttttc

SEQ ID NO: 2539759 - DNA, 25 bp, Homo sapien
gtgctgcttattagcatcctcggtg

SEQ ID NO: 2539760 - DNA, 25 bp, Homo sapien
tagcatcctcggtgaattcgttcct

SEQ ID NO: 2539761 - DNA, 25 bp, Homo sapien
ctgtgctgcttattagcatcctcgg

SEQ ID NO: 2539762 - DNA, 25 bp, Homo sapien
ggtgaattcgttcctcaccctgtga

SEQ ID NO: 2539763 - DNA, 25 bp, Homo sapien
tactggtgataactggtggctcagg

SEQ ID NO: 2539764 - DNA, 25 bp, Homo sapien
tgccgcatacctgagagtgtgcttt

SEQ ID NO: 2539765 - DNA, 25 bp, Homo sapien
cagccccaggaggtaggtgtgtcat

SEQ ID NO: 2539766 - DNA, 25 bp, Homo sapien
gtgtgtcatcccctgttactggtga

SEQ ID NO: 2539767 - DNA, 25 bp, Homo sapien
gagggacccactgtacataagcgag

SEQ ID NO: 2539768 - DNA, 25 bp, Homo sapien
gcctctgatatttttggagcaccag

SEQ ID NO: 2539769 - DNA, 25 bp, Homo sapien
tccagttgatccctcagtggcagaa

SEQ ID NO: 2539770 - DNA, 25 bp, Homo sapien
tttgagaccgtctcggagctgactg

SEQ ID NO: 2539771 - DNA, 25 bp, Homo sapien
cctagaaaggtgtcatgtcgggcac

SEQ ID NO: 2539772 - DNA, 25 bp, Homo sapien
tctctataaagcgatgggctccagt

SEQ ID NO: 2539773 - DNA, 25 bp, Homo sapien
tgtttcgaggtagagagcttggcac

SEQ ID NO: 2539774 - DNA, 25 bp, Homo sapien
taactctgggaaagcgctctctgga

SEQ ID NO: 2539775 - DNA, 25 bp, Homo sapien
gaaacagctagaaggagactgggac

SEQ ID NO: 2539776 - DNA, 25 bp, Homo sapien
ggcaggacaactcgcttcagaaaca

SEQ ID NO: 2539777 - DNA, 25 bp, Homo sapien
tactctctgataggccagggacact

SEQ ID NO: 2539778 - DNA, 25 bp, Homo sapien
ttgcagggcctctcactgggttcgg

SEQ ID NO: 2539779 - DNA, 25 bp, Homo sapien
ggctgtggtggcacacttctatagt

SEQ ID NO: 2539780 - DNA, 25 bp, Homo sapien
taaaagcacctaaggctgggcgcag

SEQ ID NO: 2539781 - DNA, 25 bp, Homo sapien
caaaactaaaaaatttagctggctg

SEQ ID NO: 2539782 - DNA, 25 bp, Homo sapien
gctggctgtggtggcacacttctat

SEQ ID NO: 2539783 - DNA, 25 bp, Homo sapien
tgtcaatggcatcatacggtgtgtg

SEQ ID NO: 2539784 - DNA, 25 bp, Homo sapien
gctatcactactctctggctccgga

SEQ ID NO: 2539785 - DNA, 25 bp, Homo sapien
ttccatgtatggacagaccgcactg

SEQ ID NO: 2539786 - DNA, 25 bp, Homo sapien
catccgtgttgctgcgtgtgtcagc

SEQ ID NO: 2539787 - DNA, 25 bp, Homo sapien
tcacctggcaatgattagctctgga

SEQ ID NO: 2539788 - DNA, 25 bp, Homo sapien
gaaggctaagtgatttctgccacaa

SEQ ID NO: 2539789 - DNA, 25 bp, Homo sapien
gaatagtgtcgtgatcgtctgcaca

SEQ ID NO: 2539790 - DNA, 25 bp, Homo sapien
tatggaagtgaatggccatggctgt

SEQ ID NO: 2539791 - DNA, 25 bp, Homo sapien
tttccatgcaccagcgtttggtgta

SEQ ID NO: 2539792 - DNA, 25 bp, Homo sapien
tcgcgccactgcacaaaaacaacaa

SEQ ID NO: 2539793 - DNA, 25 bp, Homo sapien
tcagaatggccatttttaaccaggg

SEQ ID NO: 2539794 - DNA, 25 bp, Homo sapien
tggtgtattagtttgccatgcctgc

SEQ ID NO: 2539795 - DNA, 25 bp, Homo sapien
gattttacctcctgtagacatggcc

SEQ ID NO: 2539796 - DNA, 25 bp, Homo sapien
caacctgccttcagtggagagggct

SEQ ID NO: 2539797 - DNA, 25 bp, Homo sapien
catggagtcaggcaaacaacctgcc

SEQ ID NO: 2539798 - DNA, 25 bp, Homo sapien
gacatggccatttccgttacataca

SEQ ID NO: 2539799 - DNA, 25 bp, Homo sapien
cattttaagtgctgtgcctcacggc

SEQ ID NO: 2539800 - DNA, 25 bp, Homo sapien
ggctggatcctctgactctgaaaga

SEQ ID NO: 2539801 - DNA, 25 bp, Homo sapien
gctgcagctcagatgtgcccttgta

SEQ ID NO: 2539802 - DNA, 25 bp, Homo sapien
cgcactggacaatgtagctctagca

SEQ ID NO: 2539803 - DNA, 25 bp, Homo sapien
tgggagacgtgcatagaaactagaa

SEQ ID NO: 2539804 - DNA, 25 bp, Homo sapien
tctttcaccaggtatgtgcagcccc

SEQ ID NO: 2539805 - DNA, 25 bp, Homo sapien
tgaagctatttttgagcagagcact

SEQ ID NO: 2539806 - DNA, 25 bp, Homo sapien
tgcaacgagctatcccagaggagtg

SEQ ID NO: 2539807 - DNA, 25 bp, Homo sapien
gatcaattgtgtgaacagtggcccg

SEQ ID NO: 2539808 - DNA, 25 bp, Homo sapien
gatctctcacgaaatgctggaccag

SEQ ID NO: 2539809 - DNA, 25 bp, Homo sapien
tgaagatcttacagtggccaggaca

SEQ ID NO: 2539810 - DNA, 25 bp, Homo sapien
cctgggccctggacaagagacttta

SEQ ID NO: 2539811 - DNA, 25 bp, Homo sapien
aagatgaacatacggctggactggg

SEQ ID NO: 2539812 - DNA, 25 bp, Homo sapien
gggagaccatacatttcaaccggct

SEQ ID NO: 2539813 - DNA, 25 bp, Homo sapien
tggtaaataaatcaggttccacctg

SEQ ID NO: 2539814 - DNA, 25 bp, Homo sapien
taagcctgttaggtggctcggcaga

SEQ ID NO: 2539815 - DNA, 25 bp, Homo sapien
ttttctcagacaggcggccagttgt

SEQ ID NO: 2539816 - DNA, 25 bp, Homo sapien
cagttgtgccaacgccatcttttgc

SEQ ID NO: 2539817 - DNA, 25 bp, Homo sapien
tgatctacctggaatgtggcagtcc

SEQ ID NO: 2539818 - DNA, 25 bp, Homo sapien
gagatgtggcccagtacttttgtgg

SEQ ID NO: 2539819 - DNA, 25 bp, Homo sapien
cagagcagcatggactaacttggtt

SEQ ID NO: 2539820 - DNA, 25 bp, Homo sapien
caaggtaccgtcagctcgttaggga

SEQ ID NO: 2539821 - DNA, 25 bp, Homo sapien
caactcaaagggacaggcatagcgt

SEQ ID NO: 2539822 - DNA, 25 bp, Homo sapien
tggcaagtgggctcctaggtcagaa

SEQ ID NO: 2539823 - DNA, 25 bp, Homo sapien
tcttggagccgtgataaaagctacg

SEQ ID NO: 2539824 - DNA, 25 bp, Homo sapien
tgtgtgtgcgcctgatagagccact

SEQ ID NO: 2539825 - DNA, 25 bp, Homo sapien
tggttgtggacctgccgatcctgaa

SEQ ID NO: 2539826 - DNA, 25 bp, Homo sapien
cattctgactctgggaccatgcatc

SEQ ID NO: 2539827 - DNA, 25 bp, Homo sapien
aggtgtgttttcgatgatccaggtc

SEQ ID NO: 2539828 - DNA, 25 bp, Homo sapien
cctggcatacatagcattggcacaa

SEQ ID NO: 2539829 - DNA, 25 bp, Homo sapien
caggtaaggacacagaacctccagg

SEQ ID NO: 2539830 - DNA, 25 bp, Homo sapien
tctgacctgctacggcgactgtgaa

SEQ ID NO: 2539831 - DNA, 25 bp, Homo sapien
aacatcagtagtgacgcagccgtgg

SEQ ID NO: 2539832 - DNA, 25 bp, Homo sapien
tagttccttgagatacacgcacggc

SEQ ID NO: 2539833 - DNA, 25 bp, Homo sapien
cattctaaggactagctctgggccg

SEQ ID NO: 2539834 - DNA, 25 bp, Homo sapien
cacttaggttacacggagcgggatc

SEQ ID NO: 2539835 - DNA, 25 bp, Homo sapien
tccagctcgctagacagcagggtca

SEQ ID NO: 2539836 - DNA, 25 bp, Homo sapien
tgatcatcgcgtttttctgctccag

SEQ ID NO: 2539837 - DNA, 25 bp, Homo sapien
gggtcgggcatagcatccactggtt

SEQ ID NO: 2539838 - DNA, 25 bp, Homo sapien
tgaggtcccgctggagctcatgagc

SEQ ID NO: 2539839 - DNA, 25 bp, Homo sapien
ctgtctggtgggggccctgtctagg

SEQ ID NO: 2539840 - DNA, 25 bp, Homo sapien
ctttcatgaggtttcttcttttgcc

SEQ ID NO: 2539841 - DNA, 25 bp, Homo sapien
atgaggtttcttcttttgccaaaag

SEQ ID NO: 2539842 - DNA, 25 bp, Homo sapien
ttcatgaggtttcttcttttgccaa

SEQ ID NO: 2539843 - DNA, 25 bp, Homo sapien
tcttttgccaaaaggaaaatagatc

SEQ ID NO: 2539844 - DNA, 25 bp, Homo sapien
ggcattgggcctggtacccgctgtc

SEQ ID NO: 2539845 - DNA, 25 bp, Homo sapien
acggcattgggcctggtacccgctg

SEQ ID NO: 2539846 - DNA, 25 bp, Homo sapien
attgggcctggtacccgctgtcctt

SEQ ID NO: 2539847 - DNA, 25 bp, Homo sapien
tgggcacggcattgggcctggtacc

SEQ ID NO: 2539848 - DNA, 25 bp, Homo sapien
ggtctccaaacgctgcactgctgag

SEQ ID NO: 2539849 - DNA, 25 bp, Homo sapien
tggtgcacactgagctgacagcagc

SEQ ID NO: 2539850 - DNA, 25 bp, Homo sapien
ctgagcctgcccgagcgtcagggca

SEQ ID NO: 2539851 - DNA, 25 bp, Homo sapien
cgtcagggcactgcaacgcttctaa

SEQ ID NO: 2539852 - DNA, 25 bp, Homo sapien
gaaggcctgggtttctgtctcttct

SEQ ID NO: 2539853 - DNA, 25 bp, Homo sapien
tgtctcttctctggcggccagcagg

SEQ ID NO: 2539854 - DNA, 25 bp, Homo sapien
aggtcctggaggattctggtttggg

SEQ ID NO: 2539855 - DNA, 25 bp, Homo sapien
cctgttttagggagcaggctctttg

SEQ ID NO: 2539856 - DNA, 25 bp, Homo sapien
gtctgttccgaacttttgactgtca

SEQ ID NO: 2539857 - DNA, 25 bp, Homo sapien
tgtctgttccgaacttttgactgtc

SEQ ID NO: 2539858 - DNA, 25 bp, Homo sapien
ctgtctgttccgaacttttgactgt

SEQ ID NO: 2539859 - DNA, 25 bp, Homo sapien
agtgcagccccttgagcgtgctggc

SEQ ID NO: 2539860 - DNA, 25 bp, Homo sapien
gaggttcttctgtgcgctgtgcagc

SEQ ID NO: 2539861 - DNA, 25 bp, Homo sapien
tgctgcagccgcctgatctcggagt

SEQ ID NO: 2539862 - DNA, 25 bp, Homo sapien
catgctcccgctgaaggaacaggag

SEQ ID NO: 2539863 - DNA, 25 bp, Homo sapien
tgaggcccactccagagtacaaagt

SEQ ID NO: 2539864 - DNA, 25 bp, Homo sapien
gggctacattcccatcactgcaggg

SEQ ID NO: 2539865 - DNA, 25 bp, Homo sapien
gatcaagagaggcagattcgcgagc

SEQ ID NO: 2539866 - DNA, 25 bp, Homo sapien
aaaccacggctcctgaagggcaggg

SEQ ID NO: 2539867 - DNA, 25 bp, Homo sapien
ctgacagcttcctcatgggaaaagc

SEQ ID NO: 2539868 - DNA, 25 bp, Homo sapien
agcactgacagcttcctcatgggaa

SEQ ID NO: 2539869 - DNA, 25 bp, Homo sapien
ttcctcatgggaaaagctggcacct

SEQ ID NO: 2539870 - DNA, 25 bp, Homo sapien
catgggaaaagctggcacctgggaa

SEQ ID NO: 2539871 - DNA, 25 bp, Homo sapien
cacttcacagcactgagaggagcca

SEQ ID NO: 2539872 - DNA, 25 bp, Homo sapien
ggagtctgtccccaatgcttggccc

SEQ ID NO: 2539873 - DNA, 25 bp, Homo sapien
aaggtctgagaacgtatctcatggg

SEQ ID NO: 2539874 - DNA, 25 bp, Homo sapien
ggaaggtctgagaacgtatctcatg

SEQ ID NO: 2539875 - DNA, 25 bp, Homo sapien
tcgtaactcgagaaatgtggtgaag

SEQ ID NO: 2539876 - DNA, 25 bp, Homo sapien
cttcatcgtaactcgagaaatgtgg

SEQ ID NO: 2539877 - DNA, 25 bp, Homo sapien
catcgtaactcgagaaatgtggtga

SEQ ID NO: 2539878 - DNA, 25 bp, Homo sapien
taactcgagaaatgtggtgaagtca

SEQ ID NO: 2539879 - DNA, 25 bp, Homo sapien
gagtaattcaagacgcttgtacagc

SEQ ID NO: 2539880 - DNA, 25 bp, Homo sapien
tctggaaaagctaccagagtaattc

SEQ ID NO: 2539881 - DNA, 25 bp, Homo sapien
accagagtaattcaagacgcttgta

SEQ ID NO: 2539882 - DNA, 25 bp, Homo sapien
attcaagacgcttgtacagcactga

SEQ ID NO: 2539883 - DNA, 25 bp, Homo sapien
tctggagctaggacgagttcataac

SEQ ID NO: 2539884 - DNA, 25 bp, Homo sapien
gcttcagacgacaccaattgctcat

SEQ ID NO: 2539885 - DNA, 25 bp, Homo sapien
tcccaggacgcagcccatttgtagg

SEQ ID NO: 2539886 - DNA, 25 bp, Homo sapien
gaaccgttttggagacactgacaca

SEQ ID NO: 2539887 - DNA, 25 bp, Homo sapien
ctgctccggtggaaagccacagact

SEQ ID NO: 2539888 - DNA, 25 bp, Homo sapien
cgctgctccggtggaaagccacaga

SEQ ID NO: 2539889 - DNA, 25 bp, Homo sapien
ggcgctgctccggtggaaagccaca

SEQ ID NO: 2539890 - DNA, 25 bp, Homo sapien
gccacagactccactccgagggcaa

SEQ ID NO: 2539891 - DNA, 25 bp, Homo sapien
gaaataaaacacgacggagctcacg

SEQ ID NO: 2539892 - DNA, 25 bp, Homo sapien
tcagtggagccgtgagcagcattcc

SEQ ID NO: 2539893 - DNA, 25 bp, Homo sapien
aacttaaggcgaccatttctaggca

SEQ ID NO: 2539894 - DNA, 25 bp, Homo sapien
aaggcaggttcagcgtgtggcacac

SEQ ID NO: 2539895 - DNA, 25 bp, Homo sapien
tttcaaaggacagactcaaatccag

SEQ ID NO: 2539896 - DNA, 25 bp, Homo sapien
tggaagtgggaactctagcagagat

SEQ ID NO: 2539897 - DNA, 25 bp, Homo sapien
tgctttcaaaggacagactcaaatc

SEQ ID NO: 2539898 - DNA, 25 bp, Homo sapien
tttggaagtgggaactctagcagag

SEQ ID NO: 2539899 - DNA, 25 bp, Homo sapien
ggatatactaaaacatcccgaaatg

SEQ ID NO: 2539900 - DNA, 25 bp, Homo sapien
ctaaaacatcccgaaatgagatgac

SEQ ID NO: 2539901 - DNA, 25 bp, Homo sapien
aaaacatcccgaaatgagatgacca

SEQ ID NO: 2539902 - DNA, 25 bp, Homo sapien
tatactaaaacatcccgaaatgaga

SEQ ID NO: 2539903 - DNA, 25 bp, Homo sapien
ttcctctcagggcattaatgtaaca

SEQ ID NO: 2539904 - DNA, 25 bp, Homo sapien
gacttgcccgagcacagtgttcttt

SEQ ID NO: 2539905 - DNA, 25 bp, Homo sapien
taattctatccatggaccacctgac

SEQ ID NO: 2539906 - DNA, 25 bp, Homo sapien
cactatcccatgaaaagagagaaca

SEQ ID NO: 2539907 - DNA, 25 bp, Homo sapien
ctatcctccattttcactggagaag

SEQ ID NO: 2539908 - DNA, 25 bp, Homo sapien
tcctccattttcactggagaagagc

SEQ ID NO: 2539909 - DNA, 25 bp, Homo sapien
tatcctccattttcactggagaaga

SEQ ID NO: 2539910 - DNA, 25 bp, Homo sapien
ctccattttcactggagaagagcca

SEQ ID NO: 2539911 - DNA, 25 bp, Homo sapien
ggtaatatgtctatgataggttaag

SEQ ID NO: 2539912 - DNA, 25 bp, Homo sapien
gtagatctatatttaccgacaaggt

SEQ ID NO: 2539913 - DNA, 25 bp, Homo sapien
tttgatatgtgtagaaggatataca

SEQ ID NO: 2539914 - DNA, 25 bp, Homo sapien
tatgataggttaagtttgtaaacag

SEQ ID NO: 2539915 - DNA, 25 bp, Homo sapien
ctgtgtcgtgtggtgccttctggga

SEQ ID NO: 2539916 - DNA, 25 bp, Homo sapien
gtgtcgtgtggtgccttctgggagt

SEQ ID NO: 2539917 - DNA, 25 bp, Homo sapien
catctgtgtcgtgtggtgccttctg

SEQ ID NO: 2539918 - DNA, 25 bp, Homo sapien
gcctcatggaagtttgggttcctaa

SEQ ID NO: 2539919 - DNA, 25 bp, Homo sapien
gccagcgggcggcagaccccacccc

SEQ ID NO: 2539920 - DNA, 25 bp, Homo sapien
ttattcagttcaagcgtcctctccg

SEQ ID NO: 2539921 - DNA, 25 bp, Homo sapien
gagagctccagcgtggattattcag

SEQ ID NO: 2539922 - DNA, 25 bp, Homo sapien
gactttccatctagtgatctgagag

SEQ ID NO: 2539923 - DNA, 25 bp, Homo sapien
tcagcacgtccatgtaagggtgttt

SEQ ID NO: 2539924 - DNA, 25 bp, Homo sapien
gaggcacgcttactgacggcattta

SEQ ID NO: 2539925 - DNA, 25 bp, Homo sapien
ctgcgtagaataggtgaggcacgct

SEQ ID NO: 2539926 - DNA, 25 bp, Homo sapien
ggaaatcacgcattaagttccaggg

SEQ ID NO: 2539927 - DNA, 25 bp, Homo sapien
gaattcccagaatcgtatgtttcag

SEQ ID NO: 2539928 - DNA, 25 bp, Homo sapien
taggtgccaggcttatagatgatca

SEQ ID NO: 2539929 - DNA, 25 bp, Homo sapien
tctgtagctgttgcggccacatgta

SEQ ID NO: 2539930 - DNA, 25 bp, Homo sapien
gctagtgtctaccatgttgggcagc

SEQ ID NO: 2539931 - DNA, 25 bp, Homo sapien
actgtccccatgaggctagtgtcta

SEQ ID NO: 2539932 - DNA, 25 bp, Homo sapien
tagccactctaatcaccaggacgtt

SEQ ID NO: 2539933 - DNA, 25 bp, Homo sapien
tcagtggcactcagcagctcagaaa

SEQ ID NO: 2539934 - DNA, 25 bp, Homo sapien
agggaacacctgtcatgagcttgga

SEQ ID NO: 2539935 - DNA, 25 bp, Homo sapien
gaattccaaagcctagtcgcctagc

SEQ ID NO: 2539936 - DNA, 25 bp, Homo sapien
gaatcaccttttactgagggctcag

SEQ ID NO: 2539937 - DNA, 25 bp, Homo sapien
gccaggcgccatgctacgtacttga

SEQ ID NO: 2539938 - DNA, 25 bp, Homo sapien
cacttaagggagtttagtccggcag

SEQ ID NO: 2539939 - DNA, 25 bp, Homo sapien
gacacagcctttagcttcagaggag

SEQ ID NO: 2539940 - DNA, 25 bp, Homo sapien
gatgctgcgattcagaaggcggaac

SEQ ID NO: 2539941 - DNA, 25 bp, Homo sapien
tgctgagaacaccatctacacggtg

SEQ ID NO: 2539942 - DNA, 25 bp, Homo sapien
tggcgactctgtgtgagacataaca

SEQ ID NO: 2539943 - DNA, 25 bp, Homo sapien
tctggcagtggcaacagtaatcttc

SEQ ID NO: 2539944 - DNA, 25 bp, Homo sapien
tttgatcaagttggagcagtggttc

SEQ ID NO: 2539945 - DNA, 25 bp, Homo sapien
tatgaggcaaactgtaagcagtcgg

SEQ ID NO: 2539946 - DNA, 25 bp, Homo sapien
gctaaacagaccataacgcacagga

SEQ ID NO: 2539947 - DNA, 25 bp, Homo sapien
caagagagttttggctgagaaaccc

SEQ ID NO: 2539948 - DNA, 25 bp, Homo sapien
ctcccgtaccagacagctgctaact

SEQ ID NO: 2539949 - DNA, 25 bp, Homo sapien
gggatggctagtaaacgcagcgtat

SEQ ID NO: 2539950 - DNA, 25 bp, Homo sapien
aacgcagcgtatggcacttttggga

SEQ ID NO: 2539951 - DNA, 25 bp, Homo sapien
ttgggagggcaaactctcaccacat

SEQ ID NO: 2539952 - DNA, 25 bp, Homo sapien
tctatgaacgctaaagtgacctgag

SEQ ID NO: 2539953 - DNA, 25 bp, Homo sapien
tatcttacacgctcagcgaggcagg

SEQ ID NO: 2539954 - DNA, 25 bp, Homo sapien
cagctgagctaggtgtgcagtttcc

SEQ ID NO: 2539955 - DNA, 25 bp, Homo sapien
gagtactctatctaatgcaggcagg

SEQ ID NO: 2539956 - DNA, 25 bp, Homo sapien
gaggcttctggttacatccccaatg

SEQ ID NO: 2539957 - DNA, 25 bp, Homo sapien
cactgatggaaagcactgatgaggg

SEQ ID NO: 2539958 - DNA, 25 bp, Homo sapien
tagctaagtcttgcacactgatgga

SEQ ID NO: 2539959 - DNA, 25 bp, Homo sapien
tgggatcttcacctaaaaaactgag

SEQ ID NO: 2539960 - DNA, 25 bp, Homo sapien
aggattcccagtttcttcagtagga

SEQ ID NO: 2539961 - DNA, 25 bp, Homo sapien
gattcccagtttcttcagtaggaac

SEQ ID NO: 2539962 - DNA, 25 bp, Homo sapien
ctgccgaggattcccagtttcttca

SEQ ID NO: 2539963 - DNA, 25 bp, Homo sapien
gccgaggattcccagtttcttcagt

SEQ ID NO: 2539964 - DNA, 25 bp, Homo sapien
tcagctaatgggtaagagacacaaa

SEQ ID NO: 2539965 - DNA, 25 bp, Homo sapien
tattagattgacactcagtagccga

SEQ ID NO: 2539966 - DNA, 25 bp, Homo sapien
catgaaagtattgatctcggtcggc

SEQ ID NO: 2539967 - DNA, 25 bp, Homo sapien
tataagcagcttactcaggcttgct

SEQ ID NO: 2539968 - DNA, 25 bp, Homo sapien
gatgactggcaccatcccatttttt

SEQ ID NO: 2539969 - DNA, 25 bp, Homo sapien
tggctctccaaaggatgactggcac

SEQ ID NO: 2539970 - DNA, 25 bp, Homo sapien
tgttttcagccaagtaaaagaacga

SEQ ID NO: 2539971 - DNA, 25 bp, Homo sapien
aacgattcaccttcataatttgctg

SEQ ID NO: 2539972 - DNA, 25 bp, Homo sapien
ctaatagccattcacgccaagtggg

SEQ ID NO: 2539973 - DNA, 25 bp, Homo sapien
tagttgccatcggaatacccaggag

SEQ ID NO: 2539974 - DNA, 25 bp, Homo sapien
cagaagtcctcgaatatagttgcca

SEQ ID NO: 2539975 - DNA, 25 bp, Homo sapien
catcttcgatagcaggtgggtcttt

SEQ ID NO: 2539976 - DNA, 25 bp, Homo sapien
tgcaacctaagctacagagcgcggt

SEQ ID NO: 2539977 - DNA, 25 bp, Homo sapien
aagtattacagcgtggtagcttgca

SEQ ID NO: 2539978 - DNA, 25 bp, Homo sapien
ccttagtggactagatcgtactgct

SEQ ID NO: 2539979 - DNA, 25 bp, Homo sapien
gaaacaatacaggtcagcatgaaaa

SEQ ID NO: 2539980 - DNA, 25 bp, Homo sapien
cgtttcacgaatcacaggcaaatcg

SEQ ID NO: 2539981 - DNA, 25 bp, Homo sapien
cctggagctctgctgcgtttgtgca

SEQ ID NO: 2539982 - DNA, 25 bp, Homo sapien
taaagccgcatcaaagcttcaggaa

SEQ ID NO: 2539983 - DNA, 25 bp, Homo sapien
ttactcagagtaaactaaagccgca

SEQ ID NO: 2539984 - DNA, 25 bp, Homo sapien
ctaccaggacgggaggcgatacaac

SEQ ID NO: 2539985 - DNA, 25 bp, Homo sapien
acgggaggcgatacaacttgtcagg

SEQ ID NO: 2539986 - DNA, 25 bp, Homo sapien
cgatgtggattcagacggcctcctc

SEQ ID NO: 2539987 - DNA, 25 bp, Homo sapien
cacagcatcccagacaaagccgggc

SEQ ID NO: 2539988 - DNA, 25 bp, Homo sapien
cgccgccgtcgcgttccttcaggcg

SEQ ID NO: 2539989 - DNA, 25 bp, Homo sapien
tgcgggcgccgccgtcgcgttcctt

SEQ ID NO: 2539990 - DNA, 25 bp, Homo sapien
gggcgccgccgtcgcgttccttcag

SEQ ID NO: 2539991 - DNA, 25 bp, Homo sapien
gccgccgtcgcgttccttcaggcgg

SEQ ID NO: 2539992 - DNA, 25 bp, Homo sapien
cggcgggcctgtgtctgccgggctg

SEQ ID NO: 2539993 - DNA, 25 bp, Homo sapien
gctcccaccccagcgctagccgcgg

SEQ ID NO: 2539994 - DNA, 25 bp, Homo sapien
tgcctgggctcgggcgctgcccggg

SEQ ID NO: 2539995 - DNA, 25 bp, Homo sapien
agggaggtcagtgggcaccgcccgc

SEQ ID NO: 2539996 - DNA, 25 bp, Homo sapien
ctttcatccatgtgtgagtgcccac

SEQ ID NO: 2539997 - DNA, 25 bp, Homo sapien
actggtcccttccacgtaggggcag

SEQ ID NO: 2539998 - DNA, 25 bp, Homo sapien
gtgccctttcatccatgtgtgagtg

SEQ ID NO: 2539999 - DNA, 25 bp, Homo sapien
caggccaggaaataggcagagtggt

SEQ ID NO: 2540000 - DNA, 25 bp, Homo sapien
ctggctgttaatagtatggctggag

SEQ ID NO: 2540001 - DNA, 25 bp, Homo sapien
ggctgttaatagtatggctggagca

SEQ ID NO: 2540002 - DNA, 25 bp, Homo sapien
gctgttaatagtatggctggagcat

SEQ ID NO: 2540003 - DNA, 25 bp, Homo sapien
tgttaatagtatggctggagcatgg

SEQ ID NO: 2540004 - DNA, 25 bp, Homo sapien
aggacaagtggagaaaaggtagcgg

SEQ ID NO: 2540005 - DNA, 25 bp, Homo sapien
tggagaaaaggtagcggagaaagtg

SEQ ID NO: 2540006 - DNA, 25 bp, Homo sapien
ggagaaaaggtagcggagaaagtgc

SEQ ID NO: 2540007 - DNA, 25 bp, Homo sapien
caagtggagaaaaggtagcggagaa

SEQ ID NO: 2540008 - DNA, 25 bp, Homo sapien
accttccttactctaaagatgtcag

SEQ ID NO: 2540009 - DNA, 25 bp, Homo sapien
ctctcgcctttatctggcattggat

SEQ ID NO: 2540010 - DNA, 25 bp, Homo sapien
gattccccagatcttggaccacctt

SEQ ID NO: 2540011 - DNA, 25 bp, Homo sapien
tggcattggattccccagatcttgg

SEQ ID NO: 2540012 - DNA, 25 bp, Homo sapien
aggccttacatggattctagatctc

SEQ ID NO: 2540013 - DNA, 25 bp, Homo sapien
ggccttacatggattctagatctca

SEQ ID NO: 2540014 - DNA, 25 bp, Homo sapien
gaggccttacatggattctagatct

SEQ ID NO: 2540015 - DNA, 25 bp, Homo sapien
gccttacatggattctagatctcat

SEQ ID NO: 2540016 - DNA, 25 bp, Homo sapien
attttttgggtgtgtgccaaggcct

SEQ ID NO: 2540017 - DNA, 25 bp, Homo sapien
atttattttttgggtgtgtgccaag

SEQ ID NO: 2540018 - DNA, 25 bp, Homo sapien
ttgggtgtgtgccaaggcctgtaga

SEQ ID NO: 2540019 - DNA, 25 bp, Homo sapien
tttgggtgtgtgccaaggcctgtag

SEQ ID NO: 2540020 - DNA, 25 bp, Homo sapien
cccatgatgtcagcgaggacagtgt

SEQ ID NO: 2540021 - DNA, 25 bp, Homo sapien
gaataccttagtgaattgtgccaga

SEQ ID NO: 2540022 - DNA, 25 bp, Homo sapien
cagtgtcagatagatgcacagccca

SEQ ID NO: 2540023 - DNA, 25 bp, Homo sapien
taagctggagggcacatactttctc

SEQ ID NO: 2540024 - DNA, 25 bp, Homo sapien
gagcaacacagacgaggcacttggc

SEQ ID NO: 2540025 - DNA, 25 bp, Homo sapien
ctctgcagttcttgcacggaggtca

SEQ ID NO: 2540026 - DNA, 25 bp, Homo sapien
cacggaggtcatagccttgcgcaga

SEQ ID NO: 2540027 - DNA, 25 bp, Homo sapien
cctcctgcttagtagtcggcatctg

SEQ ID NO: 2540028 - DNA, 25 bp, Homo sapien
gagagccccttggaatgttgacaac

SEQ ID NO: 2540029 - DNA, 25 bp, Homo sapien
tagagcaagcctgagatagactgcc

SEQ ID NO: 2540030 - DNA, 25 bp, Homo sapien
gcagggaaaagcttaggctgacctt

SEQ ID NO: 2540031 - DNA, 25 bp, Homo sapien
gaaaccttccgtagaaagacaggca

SEQ ID NO: 2540032 - DNA, 25 bp, Homo sapien
cagacgtcgcttcctgggattccag

SEQ ID NO: 2540033 - DNA, 25 bp, Homo sapien
taaatgttacgagtgtggcaaagcc

SEQ ID NO: 2540034 - DNA, 25 bp, Homo sapien
tgatgagtgcggaaaggccttcagt

SEQ ID NO: 2540035 - DNA, 25 bp, Homo sapien
gaaatatttacgcaatccctagcag

SEQ ID NO: 2540036 - DNA, 25 bp, Homo sapien
tccgagtttccagctagtcctagag

SEQ ID NO: 2540037 - DNA, 25 bp, Homo sapien
ggcctgaattccacaagtacgattt

SEQ ID NO: 2540038 - DNA, 25 bp, Homo sapien
tactattaggtatgtgagcttgggc

SEQ ID NO: 2540039 - DNA, 25 bp, Homo sapien
tctttcatgtcacaatagcgtggag

SEQ ID NO: 2540040 - DNA, 25 bp, Homo sapien
gagcagcaagccctacttcctggag

SEQ ID NO: 2540041 - DNA, 25 bp, Homo sapien
tttctgagataaggtcaagacccac

SEQ ID NO: 2540042 - DNA, 25 bp, Homo sapien
gttatagttgaaacaggcagtgtct

SEQ ID NO: 2540043 - DNA, 25 bp, Homo sapien
tgcttgcctcacttgatccagtaaa

SEQ ID NO: 2540044 - DNA, 25 bp, Homo sapien
tgaaggtgacaacagctgagcctgc

SEQ ID NO: 2540045 - DNA, 25 bp, Homo sapien
tctggcagacctggctgtagctgga

SEQ ID NO: 2540046 - DNA, 25 bp, Homo sapien
cccaggaagtggcagtggtcccaag

SEQ ID NO: 2540047 - DNA, 25 bp, Homo sapien
agtgttgtgatcttgcagaaaggct

SEQ ID NO: 2540048 - DNA, 25 bp, Homo sapien
cccaagagccccgtgtttgaaggca

SEQ ID NO: 2540049 - DNA, 25 bp, Homo sapien
caagagccccgtgtttgaaggcact

SEQ ID NO: 2540050 - DNA, 25 bp, Homo sapien
ctgcccaagagccccgtgtttgaag

SEQ ID NO: 2540051 - DNA, 25 bp, Homo sapien
cccgtgtttgaaggcactgggaggt

SEQ ID NO: 2540052 - DNA, 25 bp, Homo sapien
tgctcaggtagattttgcagggagc

SEQ ID NO: 2540053 - DNA, 25 bp, Homo sapien
ctgctcaggtagattttgcagggag

SEQ ID NO: 2540054 - DNA, 25 bp, Homo sapien
gcgtctggggaactgtaactacctc

SEQ ID NO: 2540055 - DNA, 25 bp, Homo sapien
gtcacagcctgcgtctggggaactg

SEQ ID NO: 2540056 - DNA, 25 bp, Homo sapien
tgtaactacctcgttgttgctggaa

SEQ ID NO: 2540057 - DNA, 25 bp, Homo sapien
cctcgttgttgctggaatttgaatt

SEQ ID NO: 2540058 - DNA, 25 bp, Homo sapien
tggttgacgttgtcttcgacccaag

SEQ ID NO: 2540059 - DNA, 25 bp, Homo sapien
tctggttgacgttgtcttcgaccca

SEQ ID NO: 2540060 - DNA, 25 bp, Homo sapien
tgtttctggttgacgttgtcttcga

SEQ ID NO: 2540061 - DNA, 25 bp, Homo sapien
tgatgtttctggttgacgttgtctt

SEQ ID NO: 2540062 - DNA, 25 bp, Homo sapien
cggtgctcacggcagtaacgtgcat

SEQ ID NO: 2540063 - DNA, 25 bp, Homo sapien
ccacattcttggcggtgctcacggc

SEQ ID NO: 2540064 - DNA, 25 bp, Homo sapien
tgtccacattcttggcggtgctcac

SEQ ID NO: 2540065 - DNA, 25 bp, Homo sapien
gcggtgctcacggcagtaacgtgca

SEQ ID NO: 2540066 - DNA, 25 bp, Homo sapien
gtgcggggctgcctggctccgtcat

SEQ ID NO: 2540067 - DNA, 25 bp, Homo sapien
ctgtgcggggctgcctggctccgtc

SEQ ID NO: 2540068 - DNA, 25 bp, Homo sapien
ttcctgtgcggggctgcctggctcc

SEQ ID NO: 2540069 - DNA, 25 bp, Homo sapien
tcctgtgcggggctgcctggctccg

SEQ ID NO: 2540070 - DNA, 25 bp, Homo sapien
acagcacctcagaaagccacgtggc

SEQ ID NO: 2540071 - DNA, 25 bp, Homo sapien
gcacctcagaaagccacgtggctgc

SEQ ID NO: 2540072 - DNA, 25 bp, Homo sapien
acacagcacctcagaaagccacgtg

SEQ ID NO: 2540073 - DNA, 25 bp, Homo sapien
ggacacagcacctcagaaagccacg

SEQ ID NO: 2540074 - DNA, 25 bp, Homo sapien
caatgcttgctgacactgagctgct

SEQ ID NO: 2540075 - DNA, 25 bp, Homo sapien
gatccgctgggtttctgctcggagc

SEQ ID NO: 2540076 - DNA, 25 bp, Homo sapien
gaagaatttggagctgccgttaggc

SEQ ID NO: 2540077 - DNA, 25 bp, Homo sapien
tgaaggctgcttggaccaagtccat

SEQ ID NO: 2540078 - DNA, 25 bp, Homo sapien
ccagccttggggtcttgggggtgag

SEQ ID NO: 2540079 - DNA, 25 bp, Homo sapien
tcctccgtggcttccccagccttgg

SEQ ID NO: 2540080 - DNA, 25 bp, Homo sapien
cagaggcacctggagaaacagatcc

SEQ ID NO: 2540081 - DNA, 25 bp, Homo sapien
ggtcagaggcacctggagaaacaga

SEQ ID NO: 2540082 - DNA, 25 bp, Homo sapien
ctcttcattgctgggtgtcagcact

SEQ ID NO: 2540083 - DNA, 25 bp, Homo sapien
agcccagtgaccaaactggcagcca

SEQ ID NO: 2540084 - DNA, 25 bp, Homo sapien
caaactggcagccaatgcgtagggt

SEQ ID NO: 2540085 - DNA, 25 bp, Homo sapien
gcagccaatgcgtagggtgctccag

SEQ ID NO: 2540086 - DNA, 25 bp, Homo sapien
gcgtagggtgctccaggtgttttat

SEQ ID NO: 2540087 - DNA, 25 bp, Homo sapien
tagattaggtcgctccacatatggc

SEQ ID NO: 2540088 - DNA, 25 bp, Homo sapien
cacatatggcaacaagacttgatgg

SEQ ID NO: 2540089 - DNA, 25 bp, Homo sapien
agccggcctttctgatggtcatatc

SEQ ID NO: 2540090 - DNA, 25 bp, Homo sapien
gctgcttcctgagccggttctgcag

SEQ ID NO: 2540091 - DNA, 25 bp, Homo sapien
tgagtgtcctctaactgggagcagc

SEQ ID NO: 2540092 - DNA, 25 bp, Homo sapien
tcttgcctggagcagttgagtgtcc

SEQ ID NO: 2540093 - DNA, 25 bp, Homo sapien
tccctggagccgtctatgtccctgg

SEQ ID NO: 2540094 - DNA, 25 bp, Homo sapien
tctgcaatgcttgagggatgtcccc

SEQ ID NO: 2540095 - DNA, 25 bp, Homo sapien
ctccgagtgtttgaaggagccacaa

SEQ ID NO: 2540096 - DNA, 25 bp, Homo sapien
ggccttgccgccctaaaagcttcag

SEQ ID NO: 2540097 - DNA, 25 bp, Homo sapien
aatgttgcctccgagtgtttgaagg

SEQ ID NO: 2540098 - DNA, 25 bp, Homo sapien
ccacgctcggaggtgctttctggct

SEQ ID NO: 2540099 - DNA, 25 bp, Homo sapien
cttcctggcagaacctgataggtct

SEQ ID NO: 2540100 - DNA, 25 bp, Homo sapien
tgtctggtcggcagtcgcaggaata

SEQ ID NO: 2540101 - DNA, 25 bp, Homo sapien
ggtctgtttctgttgttatatctgg

SEQ ID NO: 2540102 - DNA, 25 bp, Homo sapien
tgagtttatgtctggtcggcagtcg

SEQ ID NO: 2540103 - DNA, 25 bp, Homo sapien
actgcttcctgagccagagagtgta

SEQ ID NO: 2540104 - DNA, 25 bp, Homo sapien
gattttctgcttatgagtgcacccc

SEQ ID NO: 2540105 - DNA, 25 bp, Homo sapien
ggaaagaattcgctcttctctgctg

SEQ ID NO: 2540106 - DNA, 25 bp, Homo sapien
caaacatccagaactccgtgggcct

SEQ ID NO: 2540107 - DNA, 25 bp, Homo sapien
ccttgaagagcacttagggctggag

SEQ ID NO: 2540108 - DNA, 25 bp, Homo sapien
tgtgtgtccgggtgaataagcctca

SEQ ID NO: 2540109 - DNA, 25 bp, Homo sapien
tgagagtcttcacggaccacagtgt

SEQ ID NO: 2540110 - DNA, 25 bp, Homo sapien
cttgatgcccgttgttaggaacaga

SEQ ID NO: 2540111 - DNA, 25 bp, Homo sapien
gactttggtgtccacgactgccttt

SEQ ID NO: 2540112 - DNA, 25 bp, Homo sapien
gatgatatttgaaccaactaccact

SEQ ID NO: 2540113 - DNA, 25 bp, Homo sapien
taaccgaggacatgtgactttggtg

SEQ ID NO: 2540114 - DNA, 25 bp, Homo sapien
tcacttggttgagtgctttgtaacc

SEQ ID NO: 2540115 - DNA, 25 bp, Homo sapien
tgaggcctgaatggctgtggcacat

SEQ ID NO: 2540116 - DNA, 25 bp, Homo sapien
agtgaggcctgaatggctgtggcac

SEQ ID NO: 2540117 - DNA, 25 bp, Homo sapien
gtgaggcctgaatggctgtggcaca

SEQ ID NO: 2540118 - DNA, 25 bp, Homo sapien
cagtgaggcctgaatggctgtggca

SEQ ID NO: 2540119 - DNA, 25 bp, Homo sapien
gacacgggcgtgctgtccttctggt

SEQ ID NO: 2540120 - DNA, 25 bp, Homo sapien
tgagaagggcactgccaagaagtac

SEQ ID NO: 2540121 - DNA, 25 bp, Homo sapien
gacaatgagagccatccgagggcca

SEQ ID NO: 2540122 - DNA, 25 bp, Homo sapien
gaccgaaggagatacttccagctgc

SEQ ID NO: 2540123 - DNA, 25 bp, Homo sapien
ctttccatagacagtcggggactct

SEQ ID NO: 2540124 - DNA, 25 bp, Homo sapien
ggtggtggtcatcggtcattgcttt

SEQ ID NO: 2540125 - DNA, 25 bp, Homo sapien
ccagcaatgaacctgggccgaggtg

SEQ ID NO: 2540126 - DNA, 25 bp, Homo sapien
gggactctaataatccccagcaatg

SEQ ID NO: 2540127 - DNA, 25 bp, Homo sapien
tgagatccaaaaccagccctctcgt

SEQ ID NO: 2540128 - DNA, 25 bp, Homo sapien
ccgtaataacggtggcagacacact

SEQ ID NO: 2540129 - DNA, 25 bp, Homo sapien
tgaggctgggattcacctgtgagat

SEQ ID NO: 2540130 - DNA, 25 bp, Homo sapien
ccctctcgttgctgcgtgttcatcg

SEQ ID NO: 2540131 - DNA, 25 bp, Homo sapien
cctggaacataggagacgctcctgg

SEQ ID NO: 2540132 - DNA, 25 bp, Homo sapien
tccactagtgcctgcgttgaattct

SEQ ID NO: 2540133 - DNA, 25 bp, Homo sapien
tgctaattcatgagtagggctgact

SEQ ID NO: 2540134 - DNA, 25 bp, Homo sapien
aaaactattgggtcatcgtggagga

SEQ ID NO: 2540135 - DNA, 25 bp, Homo sapien
gatgttgaattaccagatctaagcc

SEQ ID NO: 2540136 - DNA, 25 bp, Homo sapien
gctgaggagggtttatggggatgtt

SEQ ID NO: 2540137 - DNA, 25 bp, Homo sapien
gggatgttgaattaccagatctaag

SEQ ID NO: 2540138 - DNA, 25 bp, Homo sapien
tgttgaattaccagatctaagccca

SEQ ID NO: 2540139 - DNA, 25 bp, Homo sapien
gggacctgcacttttcctaatgctc

SEQ ID NO: 2540140 - DNA, 25 bp, Homo sapien
tgtgggacctgcacttttcctaatg

SEQ ID NO: 2540141 - DNA, 25 bp, Homo sapien
ctgtgggacctgcacttttcctaat

SEQ ID NO: 2540142 - DNA, 25 bp, Homo sapien
gtgggacctgcacttttcctaatgc

SEQ ID NO: 2540143 - DNA, 25 bp, Homo sapien
tgctttgtggttttgttcggcacca

SEQ ID NO: 2540144 - DNA, 25 bp, Homo sapien
tggttttgttcggcaccagcagggc

SEQ ID NO: 2540145 - DNA, 25 bp, Homo sapien
gatggtctgcgggagatgctttgtg

SEQ ID NO: 2540146 - DNA, 25 bp, Homo sapien
tctgcgggagatgctttgtggtttt

SEQ ID NO: 2540147 - DNA, 25 bp, Homo sapien
tatccccgcccctaatgctcacagg

SEQ ID NO: 2540148 - DNA, 25 bp, Homo sapien
gcaccagtaaaccttgaacattttc

SEQ ID NO: 2540149 - DNA, 25 bp, Homo sapien
ccctgcaccagtaaaccttgaacat

SEQ ID NO: 2540150 - DNA, 25 bp, Homo sapien
ggattcagacttctcctgaatcccc

SEQ ID NO: 2540151 - DNA, 25 bp, Homo sapien
caccggcagcctgagtggccttttc

SEQ ID NO: 2540152 - DNA, 25 bp, Homo sapien
cagcgaacgtacatagccgtgggag

SEQ ID NO: 2540153 - DNA, 25 bp, Homo sapien
gctcgttagaggacacagtgacagg

SEQ ID NO: 2540154 - DNA, 25 bp, Homo sapien
ttcttgcaaaggctcgttagaggac

SEQ ID NO: 2540155 - DNA, 25 bp, Homo sapien
gctcgagcttgcctgcctgtgaggt

SEQ ID NO: 2540156 - DNA, 25 bp, Homo sapien
cacagcccgggtaatgacattccag

SEQ ID NO: 2540157 - DNA, 25 bp, Homo sapien
tttctctgcccctatccagcggtgg

SEQ ID NO: 2540158 - DNA, 25 bp, Homo sapien
caacggcactggtttggctgcccag

SEQ ID NO: 2540159 - DNA, 25 bp, Homo sapien
acatcatagcctgtcaccagcagta

SEQ ID NO: 2540160 - DNA, 25 bp, Homo sapien
gccagggtgggcacgcgtcctgggt

SEQ ID NO: 2540161 - DNA, 25 bp, Homo sapien
tccttccagcgagggctcacatcat

SEQ ID NO: 2540162 - DNA, 25 bp, Homo sapien
ccagggtgggcacgcgtcctgggtc

SEQ ID NO: 2540163 - DNA, 25 bp, Homo sapien
tcagtcgggagctgacagatacttc

SEQ ID NO: 2540164 - DNA, 25 bp, Homo sapien
ccgctcaattgttctggtgtctcct

SEQ ID NO: 2540165 - DNA, 25 bp, Homo sapien
tgacagatacttctggccagagcgg

SEQ ID NO: 2540166 - DNA, 25 bp, Homo sapien
tggccagagcggctgttgacaccgc

SEQ ID NO: 2540167 - DNA, 25 bp, Homo sapien
tcctgacttcaacgcctgtaacagc

SEQ ID NO: 2540168 - DNA, 25 bp, Homo sapien
tgtggtccatcagctgcacccctgg

SEQ ID NO: 2540169 - DNA, 25 bp, Homo sapien
acgcctgtaacagctgagatctctc

SEQ ID NO: 2540170 - DNA, 25 bp, Homo sapien
gctctgcagaaacaatggggtgttt

SEQ ID NO: 2540171 - DNA, 25 bp, Homo sapien
tgtctttgccccagacatccgccaa

SEQ ID NO: 2540172 - DNA, 25 bp, Homo sapien
ttgccccagacatccgccaaccaca

SEQ ID NO: 2540173 - DNA, 25 bp, Homo sapien
agacatccgccaaccacactgggct

SEQ ID NO: 2540174 - DNA, 25 bp, Homo sapien
ccagacatccgccaaccacactggg

SEQ ID NO: 2540175 - DNA, 25 bp, Homo sapien
gtctcattagggaacacctgagtgc

SEQ ID NO: 2540176 - DNA, 25 bp, Homo sapien
tgaaactgcttcgtctcattaggga

SEQ ID NO: 2540177 - DNA, 25 bp, Homo sapien
gaatgccacggttcccctgtgaaac

SEQ ID NO: 2540178 - DNA, 25 bp, Homo sapien
gctttcttgtgccagcgagggtgac

SEQ ID NO: 2540179 - DNA, 25 bp, Homo sapien
atgctcagtgcatctcgctcaaggc

SEQ ID NO: 2540180 - DNA, 25 bp, Homo sapien
ctttctgtaaaaggcggggcagcac

SEQ ID NO: 2540181 - DNA, 25 bp, Homo sapien
tgaaggagtgggcaccatttttctc

SEQ ID NO: 2540182 - DNA, 25 bp, Homo sapien
cagatgctcagtgcatctcgctcaa

SEQ ID NO: 2540183 - DNA, 25 bp, Homo sapien
cataaaaccgacttctagctgtttc

SEQ ID NO: 2540184 - DNA, 25 bp, Homo sapien
tgaacaacataaaaccgacttctag

SEQ ID NO: 2540185 - DNA, 25 bp, Homo sapien
gctgtttctttccgcaaacccttca

SEQ ID NO: 2540186 - DNA, 25 bp, Homo sapien
gggaatcgaattccctgaacaacat

SEQ ID NO: 2540187 - DNA, 25 bp, Homo sapien
gctgaaacaacgaggacccttgtct

SEQ ID NO: 2540188 - DNA, 25 bp, Homo sapien
ttgtcttccacgttggcccctggga

SEQ ID NO: 2540189 - DNA, 25 bp, Homo sapien
caacgaggacccttgtcttccacgt

SEQ ID NO: 2540190 - DNA, 25 bp, Homo sapien
caatgggggctgaaacaacgaggac

SEQ ID NO: 2540191 - DNA, 25 bp, Homo sapien
cactggagtgagtctgtaagaggaa

SEQ ID NO: 2540192 - DNA, 25 bp, Homo sapien
aggaaatccctcctgttcaagcagg

SEQ ID NO: 2540193 - DNA, 25 bp, Homo sapien
tcaagcaggataccttccaccggag

SEQ ID NO: 2540194 - DNA, 25 bp, Homo sapien
ggagtgagtctgtaagaggaaatcc

SEQ ID NO: 2540195 - DNA, 25 bp, Homo sapien
gctgccgctctgatcttcccccgag

SEQ ID NO: 2540196 - DNA, 25 bp, Homo sapien
cgagaaccgggtctgtttcccagca

SEQ ID NO: 2540197 - DNA, 25 bp, Homo sapien
gtttcccagcacagcgatcagatcc

SEQ ID NO: 2540198 - DNA, 25 bp, Homo sapien
cgctctgatcttcccccgagaaccg

SEQ ID NO: 2540199 - DNA, 25 bp, Homo sapien
cgggcgcatggaatatgatccaaac

SEQ ID NO: 2540200 - DNA, 25 bp, Homo sapien
gctgaacaacctttgcccagtactg

SEQ ID NO: 2540201 - DNA, 25 bp, Homo sapien
catttggagccacgggcgcatggaa

SEQ ID NO: 2540202 - DNA, 25 bp, Homo sapien
tgaggctgaacaacctttgcccagt

SEQ ID NO: 2540203 - DNA, 25 bp, Homo sapien
agaactggttcacaacaaggctccc

SEQ ID NO: 2540204 - DNA, 25 bp, Homo sapien
tgccccagaccgagcagaactggtt

SEQ ID NO: 2540205 - DNA, 25 bp, Homo sapien
gcagaactggttcacaacaaggctc

SEQ ID NO: 2540206 - DNA, 25 bp, Homo sapien
atgtgctgccccagaccgagcagaa

SEQ ID NO: 2540207 - DNA, 25 bp, Homo sapien
gaaagtcctgaaggtcctcccaagc

SEQ ID NO: 2540208 - DNA, 25 bp, Homo sapien
atgagaaagtcctgaaggtcctccc

SEQ ID NO: 2540209 - DNA, 25 bp, Homo sapien
aaactctcatgagaaagtcctgaag

SEQ ID NO: 2540210 - DNA, 25 bp, Homo sapien
agcaaaaactctcatgagaaagtcc

SEQ ID NO: 2540211 - DNA, 25 bp, Homo sapien
ggagctctcggggtccatgctaata

SEQ ID NO: 2540212 - DNA, 25 bp, Homo sapien
gtccatgctaatatgggtagaaaag

SEQ ID NO: 2540213 - DNA, 25 bp, Homo sapien
tgctgagcctctctctcgctggtgc

SEQ ID NO: 2540214 - DNA, 25 bp, Homo sapien
gttcagcatccccttaccacccaac

SEQ ID NO: 2540215 - DNA, 25 bp, Homo sapien
gctaaattgtggttgtcgctcggaa

SEQ ID NO: 2540216 - DNA, 25 bp, Homo sapien
agcacagccgatggcagatgcagcc

SEQ ID NO: 2540217 - DNA, 25 bp, Homo sapien
ggttgtcgctcggaaaatcgtctcc

SEQ ID NO: 2540218 - DNA, 25 bp, Homo sapien
tggttgtgctccatttgctaaattg

SEQ ID NO: 2540219 - DNA, 25 bp, Homo sapien
ttgagaggagcccaacggggcacgg

SEQ ID NO: 2540220 - DNA, 25 bp, Homo sapien
gtgtgagtcctgtcagcgtggatcc

SEQ ID NO: 2540221 - DNA, 25 bp, Homo sapien
cagccagtgtgagtcctgtcagcgt

SEQ ID NO: 2540222 - DNA, 25 bp, Homo sapien
tctctgcagaaacggggtaaaacat

SEQ ID NO: 2540223 - DNA, 25 bp, Homo sapien
accgcccctcagtggtttcccagca

SEQ ID NO: 2540224 - DNA, 25 bp, Homo sapien
ctgacaagggctggggaagctcacc

SEQ ID NO: 2540225 - DNA, 25 bp, Homo sapien
cttctccccaaggaggactgacaag

SEQ ID NO: 2540226 - DNA, 25 bp, Homo sapien
cagccaatgggttctggggcattcc

SEQ ID NO: 2540227 - DNA, 25 bp, Homo sapien
gggagaacagtctggtaaaccatga

SEQ ID NO: 2540228 - DNA, 25 bp, Homo sapien
gaaaggtctctaatggtatgtcaca

SEQ ID NO: 2540229 - DNA, 25 bp, Homo sapien
gctgatgccaacctgctgaaaggtc

SEQ ID NO: 2540230 - DNA, 25 bp, Homo sapien
tacacgagtgatacagagaggaatt

SEQ ID NO: 2540231 - DNA, 25 bp, Homo sapien
caggtaaaatctcatccaccgtgga

SEQ ID NO: 2540232 - DNA, 25 bp, Homo sapien
ggtgaataacacaggtaaaatctca

SEQ ID NO: 2540233 - DNA, 25 bp, Homo sapien
aaaatctcatccaccgtggagttgc

SEQ ID NO: 2540234 - DNA, 25 bp, Homo sapien
tgggaacgggttggtgaataacaca

SEQ ID NO: 2540235 - DNA, 25 bp, Homo sapien
agtgggcccctggaaactgtgcttc

SEQ ID NO: 2540236 - DNA, 25 bp, Homo sapien
ctgtggcatttcgggggccagtggg

SEQ ID NO: 2540237 - DNA, 25 bp, Homo sapien
gtggcatttcgggggccagtgggcc

SEQ ID NO: 2540238 - DNA, 25 bp, Homo sapien
ggccagtgggcccctggaaactgtg

SEQ ID NO: 2540239 - DNA, 25 bp, Homo sapien
tgatgattactcgtatgtcttggga

SEQ ID NO: 2540240 - DNA, 25 bp, Homo sapien
tgagatggagaaaacctccaagagc

SEQ ID NO: 2540241 - DNA, 25 bp, Homo sapien
tattgggacttcaaatgagatggag

SEQ ID NO: 2540242 - DNA, 25 bp, Homo sapien
ccaagagcaccacgaaataggatga

SEQ ID NO: 2540243 - DNA, 25 bp, Homo sapien
tcgatgttcgaatagccctgcagcc

SEQ ID NO: 2540244 - DNA, 25 bp, Homo sapien
tccgggttgacccaagagagatgcc

SEQ ID NO: 2540245 - DNA, 25 bp, Homo sapien
tatcggtctgggctttcacggcttc

SEQ ID NO: 2540246 - DNA, 25 bp, Homo sapien
tcagcgggaccctttggcaaatggt

SEQ ID NO: 2540247 - DNA, 25 bp, Homo sapien
ctgccacagcacaaaggctttgcct

SEQ ID NO: 2540248 - DNA, 25 bp, Homo sapien
cagaggcccgagtgggaatccttga

SEQ ID NO: 2540249 - DNA, 25 bp, Homo sapien
aggcagcctcgggtcacagacaagg

SEQ ID NO: 2540250 - DNA, 25 bp, Homo sapien
cagcccaagcgagaagcagccagtg

SEQ ID NO: 2540251 - DNA, 25 bp, Homo sapien
acagacaaggggccgagacaggaac

SEQ ID NO: 2540252 - DNA, 25 bp, Homo sapien
gtttttggtgtccatgcgttgaccc

SEQ ID NO: 2540253 - DNA, 25 bp, Homo sapien
tgtccatgcgttgaccctcgctgct

SEQ ID NO: 2540254 - DNA, 25 bp, Homo sapien
ctccaggacttctgggtccatctca

SEQ ID NO: 2540255 - DNA, 25 bp, Homo sapien
tggtgtccatgcgttgaccctcgct

SEQ ID NO: 2540256 - DNA, 25 bp, Homo sapien
accgctgcggcaacgatgtgtgaaa

SEQ ID NO: 2540257 - DNA, 25 bp, Homo sapien
tttagacaggcaaggatgccggctc

SEQ ID NO: 2540258 - DNA, 25 bp, Homo sapien
catctgtccagagcgctaagcggga

SEQ ID NO: 2540259 - DNA, 25 bp, Homo sapien
cacacgcctcttgaacggtaagcag

SEQ ID NO: 2540260 - DNA, 25 bp, Homo sapien
cggagagtgtctcgtactgcgagca

SEQ ID NO: 2540261 - DNA, 25 bp, Homo sapien
cactcgctgtcggagagtgtctcgt

SEQ ID NO: 2540262 - DNA, 25 bp, Homo sapien
gggaagccatgacacccgcctgcag

SEQ ID NO: 2540263 - DNA, 25 bp, Homo sapien
cctgcagccgcatgatcagggggtt

SEQ ID NO: 2540264 - DNA, 25 bp, Homo sapien
gagggtggccggtccccagatgcca

SEQ ID NO: 2540265 - DNA, 25 bp, Homo sapien
ccctccgagtgcactgaggagacag

SEQ ID NO: 2540266 - DNA, 25 bp, Homo sapien
ggcgtccggcggttgcagtctccct

SEQ ID NO: 2540267 - DNA, 25 bp, Homo sapien
cccacacgcggttggtgagcggcgt

SEQ ID NO: 2540268 - DNA, 25 bp, Homo sapien
gggcggggcgggggtggcctgcaga

SEQ ID NO: 2540269 - DNA, 25 bp, Homo sapien
ggcggggcgggggtggcctgcagac

SEQ ID NO: 2540270 - DNA, 25 bp, Homo sapien
gttaaaagcattggcgctgagcggc

SEQ ID NO: 2540271 - DNA, 25 bp, Homo sapien
agtgtgtggtcactccgtccgtcag

SEQ ID NO: 2540272 - DNA, 25 bp, Homo sapien
cgtccgtcagcagcggttatgggca

SEQ ID NO: 2540273 - DNA, 25 bp, Homo sapien
ggcattcagagggttaaaagcattg

SEQ ID NO: 2540274 - DNA, 25 bp, Homo sapien
ctttctaattatggcctccagcccc

SEQ ID NO: 2540275 - DNA, 25 bp, Homo sapien
gcctttctaattatggcctccagcc

SEQ ID NO: 2540276 - DNA, 25 bp, Homo sapien
cctttctaattatggcctccagccc

SEQ ID NO: 2540277 - DNA, 25 bp, Homo sapien
gcaccgcctggcttctataggtcat

SEQ ID NO: 2540278 - DNA, 25 bp, Homo sapien
accgcctggcttctataggtcataa

SEQ ID NO: 2540279 - DNA, 25 bp, Homo sapien
ctgcaccgcctggcttctataggtc

SEQ ID NO: 2540280 - DNA, 25 bp, Homo sapien
caccgcctggcttctataggtcata

SEQ ID NO: 2540281 - DNA, 25 bp, Homo sapien
aagaggtgcagagacggacgctgag

SEQ ID NO: 2540282 - DNA, 25 bp, Homo sapien
tagaaaattggctcaagccagagct

SEQ ID NO: 2540283 - DNA, 25 bp, Homo sapien
gagatgggagggctaccctgtttgg

SEQ ID NO: 2540284 - DNA, 25 bp, Homo sapien
aggagccatgaggagaaagaggtgc

SEQ ID NO: 2540285 - DNA, 25 bp, Homo sapien
gagctggctccaggcttaacgatct

SEQ ID NO: 2540286 - DNA, 25 bp, Homo sapien
taaaccaaaccgaggcttccatgag

SEQ ID NO: 2540287 - DNA, 25 bp, Homo sapien
cacgagtccgtgacctgatggagct

SEQ ID NO: 2540288 - DNA, 25 bp, Homo sapien
ctgaaatcacagcagcgcgactggg

SEQ ID NO: 2540289 - DNA, 25 bp, Homo sapien
tgggaggatcctcagcttgaggaca

SEQ ID NO: 2540290 - DNA, 25 bp, Homo sapien
aaacaaaaatcagtcgaggtgggag

SEQ ID NO: 2540291 - DNA, 25 bp, Homo sapien
aagataaaaaattactcgggtgcag

SEQ ID NO: 2540292 - DNA, 25 bp, Homo sapien
acaaaaatcagtcgaggtgggagga

SEQ ID NO: 2540293 - DNA, 25 bp, Homo sapien
cccggtgtctagtcactgggcaggt

SEQ ID NO: 2540294 - DNA, 25 bp, Homo sapien
ggaggtgtcctagttgggactccca

SEQ ID NO: 2540295 - DNA, 25 bp, Homo sapien
gactcccatttggaggcctcgctga

SEQ ID NO: 2540296 - DNA, 25 bp, Homo sapien
gtgtgtctagcacctacttcaagat

SEQ ID NO: 2540297 - DNA, 25 bp, Homo sapien
aatgagggggtacacccagactagc

SEQ ID NO: 2540298 - DNA, 25 bp, Homo sapien
tacacccagactagcgaaggctcct

SEQ ID NO: 2540299 - DNA, 25 bp, Homo sapien
catcccagaatgagggggtacaccc

SEQ ID NO: 2540300 - DNA, 25 bp, Homo sapien
gggtacacccagactagcgaaggct

SEQ ID NO: 2540301 - DNA, 25 bp, Homo sapien
ctgttccggtgatggcgggcatatt

SEQ ID NO: 2540302 - DNA, 25 bp, Homo sapien
tattgaagatctccgtcccaggctg

SEQ ID NO: 2540303 - DNA, 25 bp, Homo sapien
tgatggcgggcatattgaagatctc

SEQ ID NO: 2540304 - DNA, 25 bp, Homo sapien
atattgaagatctccgtcccaggct

SEQ ID NO: 2540305 - DNA, 25 bp, Homo sapien
ttccctggtggatctgctaactgcc

SEQ ID NO: 2540306 - DNA, 25 bp, Homo sapien
gaaggtgcaccgtgggtttctgcca

SEQ ID NO: 2540307 - DNA, 25 bp, Homo sapien
ccacgtcaatgggtgcaaagccaca

SEQ ID NO: 2540308 - DNA, 25 bp, Homo sapien
tccccaaatgtgaggcaaagggcct

SEQ ID NO: 2540309 - DNA, 25 bp, Homo sapien
tgtattcaggctcattccggttgtg

SEQ ID NO: 2540310 - DNA, 25 bp, Homo sapien
gttgatctcttgcttcttggacttg

SEQ ID NO: 2540311 - DNA, 25 bp, Homo sapien
gagttgctctcggtcagcttgctga

SEQ ID NO: 2540312 - DNA, 25 bp, Homo sapien
ttggacttgaccatggcggagttgc

SEQ ID NO: 2540313 - DNA, 25 bp, Homo sapien
gaggatcaaacacctcacatcagct

SEQ ID NO: 2540314 - DNA, 25 bp, Homo sapien
tgtgaggatcaaacacctcacatca

SEQ ID NO: 2540315 - DNA, 25 bp, Homo sapien
ccgagcttgcatgcctttgatgatg

SEQ ID NO: 2540316 - DNA, 25 bp, Homo sapien
catcagctcacttggtgccgagctt

SEQ ID NO: 2540317 - DNA, 25 bp, Homo sapien
ccaaggatgggcaagggataccaga

SEQ ID NO: 2540318 - DNA, 25 bp, Homo sapien
ggcagcgcatgtgcccacagaagta

SEQ ID NO: 2540319 - DNA, 25 bp, Homo sapien
gcaagggataccagagcatcccggg

SEQ ID NO: 2540320 - DNA, 25 bp, Homo sapien
tctccacatggcaccacggtggact

SEQ ID NO: 2540321 - DNA, 25 bp, Homo sapien
cgggtacacagcactccgggagtgc

SEQ ID NO: 2540322 - DNA, 25 bp, Homo sapien
ccatcccggtacagcagcgggtaca

SEQ ID NO: 2540323 - DNA, 25 bp, Homo sapien
ggacacaggttcaataccgtcctca

SEQ ID NO: 2540324 - DNA, 25 bp, Homo sapien
aagaccgacgtcttgtttggctctg

SEQ ID NO: 2540325 - DNA, 25 bp, Homo sapien
agggcccgggctagatctggcccat

SEQ ID NO: 2540326 - DNA, 25 bp, Homo sapien
cccaaagatgtcctgctgtcttgcc

SEQ ID NO: 2540327 - DNA, 25 bp, Homo sapien
tgaattctggttgtaccccagtgcc

SEQ ID NO: 2540328 - DNA, 25 bp, Homo sapien
tgggccacagtttattgacccctgc

SEQ ID NO: 2540329 - DNA, 25 bp, Homo sapien
tcactgggtgggcggcggaggtcca

SEQ ID NO: 2540330 - DNA, 25 bp, Homo sapien
gggtggtgccgggtgtagtcctgtg

SEQ ID NO: 2540331 - DNA, 25 bp, Homo sapien
ggcggcggaggtccaggacggggca

SEQ ID NO: 2540332 - DNA, 25 bp, Homo sapien
gccgggtgtagtcctgtgtgatgac

SEQ ID NO: 2540333 - DNA, 25 bp, Homo sapien
gatgccatcggctcgcatcacaggc

SEQ ID NO: 2540334 - DNA, 25 bp, Homo sapien
aggaaggcctcattgcccgtgaaga

SEQ ID NO: 2540335 - DNA, 25 bp, Homo sapien
tagttggcagatggctgatgagacc

SEQ ID NO: 2540336 - DNA, 25 bp, Homo sapien
accagcccatgacactgagaaacct

SEQ ID NO: 2540337 - DNA, 25 bp, Homo sapien
gcagcagcagagaacgcgtagttac

SEQ ID NO: 2540338 - DNA, 25 bp, Homo sapien
accccgccaggacagaagggctgtg

SEQ ID NO: 2540339 - DNA, 25 bp, Homo sapien
caagcagcagcagagaacgcgtagt

SEQ ID NO: 2540340 - DNA, 25 bp, Homo sapien
ctggtgcccccaggtgcaaaggtga

SEQ ID NO: 2540341 - DNA, 25 bp, Homo sapien
tgaccacccgctggtgacctttgac

SEQ ID NO: 2540342 - DNA, 25 bp, Homo sapien
cagcgggctggacgagggctggctc

SEQ ID NO: 2540343 - DNA, 25 bp, Homo sapien
gctgggccagggtgaccacccgctg

SEQ ID NO: 2540344 - DNA, 25 bp, Homo sapien
cgggctggacgagggctggctctca

SEQ ID NO: 2540345 - DNA, 25 bp, Homo sapien
tccttggcctttaggcacctctgtt

SEQ ID NO: 2540346 - DNA, 25 bp, Homo sapien
cctctgttttcctatctgcatgatg

SEQ ID NO: 2540347 - DNA, 25 bp, Homo sapien
ttaggcacctctgttttcctatctg

SEQ ID NO: 2540348 - DNA, 25 bp, Homo sapien
tggcctttaggcacctctgttttcc

SEQ ID NO: 2540349 - DNA, 25 bp, Homo sapien
gagctcacagggctgacgggctcca

SEQ ID NO: 2540350 - DNA, 25 bp, Homo sapien
agctcacagggctgacgggctccac

SEQ ID NO: 2540351 - DNA, 25 bp, Homo sapien
agggctgacgggctccaccccttcg

SEQ ID NO: 2540352 - DNA, 25 bp, Homo sapien
tcacagggctgacgggctccacccc

SEQ ID NO: 2540353 - DNA, 25 bp, Homo sapien
gagaggagccatgaactagggccaa

SEQ ID NO: 2540354 - DNA, 25 bp, Homo sapien
ggcgcagtcgaagtcagaatcacag

SEQ ID NO: 2540355 - DNA, 25 bp, Homo sapien
tgggctcccaaagacagtaaggcag

SEQ ID NO: 2540356 - DNA, 25 bp, Homo sapien
cagggcaagatgcaagagccagacc

SEQ ID NO: 2540357 - DNA, 25 bp, Homo sapien
cctttatcgtgagcaatttgacgca

SEQ ID NO: 2540358 - DNA, 25 bp, Homo sapien
tgataatcgcgtctatgaaggtggc

SEQ ID NO: 2540359 - DNA, 25 bp, Homo sapien
ttctcgcgcccctttatcgtgagca

SEQ ID NO: 2540360 - DNA, 25 bp, Homo sapien
agcaatttgacgcatgataatcgcg

SEQ ID NO: 2540361 - DNA, 25 bp, Homo sapien
tggcagccgggcgaacgggtgagga

SEQ ID NO: 2540362 - DNA, 25 bp, Homo sapien
tagggtagaccccatcgagggtgcc

SEQ ID NO: 2540363 - DNA, 25 bp, Homo sapien
gagaacggagttccagttcctggat

SEQ ID NO: 2540364 - DNA, 25 bp, Homo sapien
aaggcatggccggtgtctgctcggg

SEQ ID NO: 2540365 - DNA, 25 bp, Homo sapien
ggtgatgatacccttcatgcctgtg

SEQ ID NO: 2540366 - DNA, 25 bp, Homo sapien
ggctccacagcggtgatgataccct

SEQ ID NO: 2540367 - DNA, 25 bp, Homo sapien
tccacagcggtgatgatacccttca

SEQ ID NO: 2540368 - DNA, 25 bp, Homo sapien
cagcggtgatgatacccttcatgcc

SEQ ID NO: 2540369 - DNA, 25 bp, Homo sapien
ggtgggcatgggagtgggaggcggg

SEQ ID NO: 2540370 - DNA, 25 bp, Homo sapien
tgggcatgggagtgggaggcggggc

SEQ ID NO: 2540371 - DNA, 25 bp, Homo sapien
ctggtgggcatgggagtgggaggcg

SEQ ID NO: 2540372 - DNA, 25 bp, Homo sapien
ggcatgggagtgggaggcggggcgg

SEQ ID NO: 2540373 - DNA, 25 bp, Homo sapien
cgccgctgctgccgctgctctgctc

SEQ ID NO: 2540374 - DNA, 25 bp, Homo sapien
gccgctgctgccgctgctctgctct

SEQ ID NO: 2540375 - DNA, 25 bp, Homo sapien
gctgcccccacccccgccgctgctg

SEQ ID NO: 2540376 - DNA, 25 bp, Homo sapien
ctgctgctgcccccacccccgccgc

SEQ ID NO: 2540377 - DNA, 25 bp, Homo sapien
cggcccacaaggagtcccggagcgg

SEQ ID NO: 2540378 - DNA, 25 bp, Homo sapien
gggaggcctcttgcggcccacaagg

SEQ ID NO: 2540379 - DNA, 25 bp, Homo sapien
ggaggcctcttgcggcccacaagga

SEQ ID NO: 2540380 - DNA, 25 bp, Homo sapien
gcggcccacaaggagtcccggagcg

SEQ ID NO: 2540381 - DNA, 25 bp, Homo sapien
aggtctccagatgggtgcgtgctcc

SEQ ID NO: 2540382 - DNA, 25 bp, Homo sapien
ggtctccagatgggtgcgtgctcca

SEQ ID NO: 2540383 - DNA, 25 bp, Homo sapien
ccggtcccgctctcgatcccggtct

SEQ ID NO: 2540384 - DNA, 25 bp, Homo sapien
ccgctcggacgaggacgtggtggtt

SEQ ID NO: 2540385 - DNA, 25 bp, Homo sapien
ggacgtgaggatggacttttcccgc

SEQ ID NO: 2540386 - DNA, 25 bp, Homo sapien
ggttttgtcaagtgtgttggacctc

SEQ ID NO: 2540387 - DNA, 25 bp, Homo sapien
ggcacttgggacaggtcgatgatgc

SEQ ID NO: 2540388 - DNA, 25 bp, Homo sapien
gggaggtaggcaaggcggtccatgg

SEQ ID NO: 2540389 - DNA, 25 bp, Homo sapien
ggcaaggcggtccatggcggtggct

SEQ ID NO: 2540390 - DNA, 25 bp, Homo sapien
aggcaggtgtggcacttgggacagg

SEQ ID NO: 2540391 - DNA, 25 bp, Homo sapien
tagttgagtgccagcgaggactcgc

SEQ ID NO: 2540392 - DNA, 25 bp, Homo sapien
gatgatggtctgccggttctccagc

SEQ ID NO: 2540393 - DNA, 25 bp, Homo sapien
tcagcatatcagctcgctgggccat

SEQ ID NO: 2540394 - DNA, 25 bp, Homo sapien
catctgctgcgaggtgatgtagtca

SEQ ID NO: 2540395 - DNA, 25 bp, Homo sapien
ggatgtggctgcgatacaggtccac

SEQ ID NO: 2540396 - DNA, 25 bp, Homo sapien
tcacgccccgaagcaggtgctcata

SEQ ID NO: 2540397 - DNA, 25 bp, Homo sapien
cccgaagcaggtgctcatagggcga

SEQ ID NO: 2540398 - DNA, 25 bp, Homo sapien
tggctgcgatacaggtccacgccac

SEQ ID NO: 2540399 - DNA, 25 bp, Homo sapien
cgacgtcagctttcggtcctgggat

SEQ ID NO: 2540400 - DNA, 25 bp, Homo sapien
ctcacgaggcgtcgacgtcagcttt

SEQ ID NO: 2540401 - DNA, 25 bp, Homo sapien
ctgtgcggggacttggcgatctcac

SEQ ID NO: 2540402 - DNA, 25 bp, Homo sapien
gatgccttgctggacgaaaggctgc

SEQ ID NO: 2540403 - DNA, 25 bp, Homo sapien
ctgaattgaccgagctaagcatggc

SEQ ID NO: 2540404 - DNA, 25 bp, Homo sapien
aagtatccgggtagctgtttgcaga

SEQ ID NO: 2540405 - DNA, 25 bp, Homo sapien
aaggaatccggctgaatgagaggca

SEQ ID NO: 2540406 - DNA, 25 bp, Homo sapien
ggttagaagcctccccaaggatgta

SEQ ID NO: 2540407 - DNA, 25 bp, Homo sapien
tgccccgtggtcctcataggtcagg

SEQ ID NO: 2540408 - DNA, 25 bp, Homo sapien
tgagggagcgtacgtcgtgcttttt

SEQ ID NO: 2540409 - DNA, 25 bp, Homo sapien
tagcaggcacgttccagtgcccggg

SEQ ID NO: 2540410 - DNA, 25 bp, Homo sapien
agtgcccgggcgtcggccatcacat

SEQ ID NO: 2540411 - DNA, 25 bp, Homo sapien
cctcgcgcgggatctcatggatgga

SEQ ID NO: 2540412 - DNA, 25 bp, Homo sapien
tggagccctccttgagcggccgcgg

SEQ ID NO: 2540413 - DNA, 25 bp, Homo sapien
atggatggagcggcccgcctccttc

SEQ ID NO: 2540414 - DNA, 25 bp, Homo sapien
agctcgggcgtgtgccgcagctcct

SEQ ID NO: 2540415 - DNA, 25 bp, Homo sapien
tgtgcctccacgtaggaccgaggga

SEQ ID NO: 2540416 - DNA, 25 bp, Homo sapien
ggaggcgtgccctcccgctttagga

SEQ ID NO: 2540417 - DNA, 25 bp, Homo sapien
gacgcaggtagtcctcctgtgcctc

SEQ ID NO: 2540418 - DNA, 25 bp, Homo sapien
cagggcctgcgtcttgtaggcctcg

SEQ ID NO: 2540419 - DNA, 25 bp, Homo sapien
gtcgggaacactatgaaatcatgaa

SEQ ID NO: 2540420 - DNA, 25 bp, Homo sapien
gaaatcatgaagctaaaaccacagg

SEQ ID NO: 2540421 - DNA, 25 bp, Homo sapien
taactgaaccacctcagcaagtcgg

SEQ ID NO: 2540422 - DNA, 25 bp, Homo sapien
ggttctggagctagtctgcctgagt

SEQ ID NO: 2540423 - DNA, 25 bp, Homo sapien
ggcgggatggcacggcccatgagac

SEQ ID NO: 2540424 - DNA, 25 bp, Homo sapien
gggctgtgtcgctccggcgggatgg

SEQ ID NO: 2540425 - DNA, 25 bp, Homo sapien
ccgcggatgtggtgctgctctttga

SEQ ID NO: 2540426 - DNA, 25 bp, Homo sapien
cttgtgtgatggacccgcggatgtg

SEQ ID NO: 2540427 - DNA, 25 bp, Homo sapien
ctccttggagcactgggtcacagac

SEQ ID NO: 2540428 - DNA, 25 bp, Homo sapien
ctgaggagatggctctgcccacgcg

SEQ ID NO: 2540429 - DNA, 25 bp, Homo sapien
acgcggccctccatcatgtcatagg

SEQ ID NO: 2540430 - DNA, 25 bp, Homo sapien
catgggggggtcctgagctgcttct

SEQ ID NO: 2540431 - DNA, 25 bp, Homo sapien
ccctgtgaagctacctcagtgggcc

SEQ ID NO: 2540432 - DNA, 25 bp, Homo sapien
ccacctatcagattgtgctttctga

SEQ ID NO: 2540433 - DNA, 25 bp, Homo sapien
tgcctccctgtgaagctacctcagt

SEQ ID NO: 2540434 - DNA, 25 bp, Homo sapien
tgtgaagctacctcagtgggccaag

SEQ ID NO: 2540435 - DNA, 25 bp, Homo sapien
cgcggtccaagcgactcgggctgtc

SEQ ID NO: 2540436 - DNA, 25 bp, Homo sapien
tcgtagatgacgtggcccttgggca

SEQ ID NO: 2540437 - DNA, 25 bp, Homo sapien
tgtcctcgccgatgatcctggtgat

SEQ ID NO: 2540438 - DNA, 25 bp, Homo sapien
tcataggacaagacgtggcccttct

SEQ ID NO: 2540439 - DNA, 25 bp, Homo sapien
cttgtacaggacgtcagctggcgtg

SEQ ID NO: 2540440 - DNA, 25 bp, Homo sapien
ttgtacaggacgtcagctggcgtgc

SEQ ID NO: 2540441 - DNA, 25 bp, Homo sapien
tgtacaggacgtcagctggcgtgcc

SEQ ID NO: 2540442 - DNA, 25 bp, Homo sapien
caggcaaagacgtgcttaaaagccc

SEQ ID NO: 2540443 - DNA, 25 bp, Homo sapien
ttaaaagcccatgtgcccaccgatg

SEQ ID NO: 2540444 - DNA, 25 bp, Homo sapien
taagagtttgcatggaacaaaaccc

SEQ ID NO: 2540445 - DNA, 25 bp, Homo sapien
cttcccatgagtggacgctgttctg

SEQ ID NO: 2540446 - DNA, 25 bp, Homo sapien
tgtgctgtacccgtgaccacgtcat

SEQ ID NO: 2540447 - DNA, 25 bp, Homo sapien
tgctcctgtgctgtacccgtgacca

SEQ ID NO: 2540448 - DNA, 25 bp, Homo sapien
tgaccacgtcatgcactttggtttc

SEQ ID NO: 2540449 - DNA, 25 bp, Homo sapien
tgtacccgtgaccacgtcatgcact

SEQ ID NO: 2540450 - DNA, 25 bp, Homo sapien
ccattaacagggaagcttctgtttg

SEQ ID NO: 2540451 - DNA, 25 bp, Homo sapien
tgtttgcataacgtctgcttccagg

SEQ ID NO: 2540452 - DNA, 25 bp, Homo sapien
aaccacgtggtccctgcctatggca

SEQ ID NO: 2540453 - DNA, 25 bp, Homo sapien
tactcccaagatgggcaggaagtcc

SEQ ID NO: 2540454 - DNA, 25 bp, Homo sapien
atggagccgcggtatgtgatggcgc

SEQ ID NO: 2540455 - DNA, 25 bp, Homo sapien
gaatgcctttggtgatgcttccgcc

SEQ ID NO: 2540456 - DNA, 25 bp, Homo sapien
tttggtgatgcttccgcccggaact

SEQ ID NO: 2540457 - DNA, 25 bp, Homo sapien
tgcctttggtgatgcttccgcccgg

SEQ ID NO: 2540458 - DNA, 25 bp, Homo sapien
ctcagcacggacgcctcctgggctg

SEQ ID NO: 2540459 - DNA, 25 bp, Homo sapien
tctcagcacggacgcctcctgggct

SEQ ID NO: 2540460 - DNA, 25 bp, Homo sapien
tcagcacggacgcctcctgggctgt

SEQ ID NO: 2540461 - DNA, 25 bp, Homo sapien
agggcccaccggggccttggcatgc

SEQ ID NO: 2540462 - DNA, 25 bp, Homo sapien
agccccatggtgacagggcccaccg

SEQ ID NO: 2540463 - DNA, 25 bp, Homo sapien
gggcccaccggggccttggcatgct

SEQ ID NO: 2540464 - DNA, 25 bp, Homo sapien
cccatggtgacagggcccaccgggg

SEQ ID NO: 2540465 - DNA, 25 bp, Homo sapien
ggacgtggagctggaccgacattcc

SEQ ID NO: 2540466 - DNA, 25 bp, Homo sapien
cgggacgtggagctggaccgacatt

SEQ ID NO: 2540467 - DNA, 25 bp, Homo sapien
agtacgggacgtggagctggaccga

SEQ ID NO: 2540468 - DNA, 25 bp, Homo sapien
ctgagtacgggacgtggagctggac

SEQ ID NO: 2540469 - DNA, 25 bp, Homo sapien
cagaccccagatgcctgagtggaga

SEQ ID NO: 2540470 - DNA, 25 bp, Homo sapien
catttgcccttccatttcgcagtgg

SEQ ID NO: 2540471 - DNA, 25 bp, Homo sapien
cccttgactgcaatacagagtgacc

SEQ ID NO: 2540472 - DNA, 25 bp, Homo sapien
tggttcctgagccatgcccttgact

SEQ ID NO: 2540473 - DNA, 25 bp, Homo sapien
gaggcgggttggagatggtgggtgg

SEQ ID NO: 2540474 - DNA, 25 bp, Homo sapien
gtgggcgcggcaggacgggccgggc

SEQ ID NO: 2540475 - DNA, 25 bp, Homo sapien
acgggccgggcagtgtcatggaggc

SEQ ID NO: 2540476 - DNA, 25 bp, Homo sapien
cctatttgcctctcgaggacgctgg

SEQ ID NO: 2540477 - DNA, 25 bp, Homo sapien
cagcccccggctgtgctgctttaca

SEQ ID NO: 2540478 - DNA, 25 bp, Homo sapien
ctttacagctggtgaggcccagcag

SEQ ID NO: 2540479 - DNA, 25 bp, Homo sapien
gtgctgctttacagctggtgaggcc

SEQ ID NO: 2540480 - DNA, 25 bp, Homo sapien
ccggctgtgctgctttacagctggt

SEQ ID NO: 2540481 - DNA, 25 bp, Homo sapien
gggcaggccggaagtccagcaaggg

SEQ ID NO: 2540482 - DNA, 25 bp, Homo sapien
ccttgatcacctcacgggggggcac

SEQ ID NO: 2540483 - DNA, 25 bp, Homo sapien
atgcggggaggccttgatcacctca

SEQ ID NO: 2540484 - DNA, 25 bp, Homo sapien
aagggcaggccggaagtccagcaag

SEQ ID NO: 2540485 - DNA, 25 bp, Homo sapien
gaggtaacctgtgatgtgtgtgcac

SEQ ID NO: 2540486 - DNA, 25 bp, Homo sapien
ggacgtaacctgtgatgtgtgtatg

SEQ ID NO: 2540487 - DNA, 25 bp, Homo sapien
tacacaatgttgaaggaggtaacct

SEQ ID NO: 2540488 - DNA, 25 bp, Homo sapien
tgtatgtgcctgtacacaatgttga

SEQ ID NO: 2540489 - DNA, 25 bp, Homo sapien
gctgcaggttttgcggtggcggtgg

SEQ ID NO: 2540490 - DNA, 25 bp, Homo sapien
ttggtgggagctgcgtcctcccggg

SEQ ID NO: 2540491 - DNA, 25 bp, Homo sapien
ccgggggggctcatggactttggtg

SEQ ID NO: 2540492 - DNA, 25 bp, Homo sapien
ggctgcaggttttgcggtggcggtg

SEQ ID NO: 2540493 - DNA, 25 bp, Homo sapien
gatgggggggatggcagccgctcgc

SEQ ID NO: 2540494 - DNA, 25 bp, Homo sapien
tctggggtgaggcattggcccgggg

SEQ ID NO: 2540495 - DNA, 25 bp, Homo sapien
gggtcgccagtcggggtgaggaggc

SEQ ID NO: 2540496 - DNA, 25 bp, Homo sapien
gtcgccagtcggggtgaggaggctg

SEQ ID NO: 2540497 - DNA, 25 bp, Homo sapien
tgcccagaagctctcagcaggtacc

SEQ ID NO: 2540498 - DNA, 25 bp, Homo sapien
ggtgtgggcagtcagattggcaggg

SEQ ID NO: 2540499 - DNA, 25 bp, Homo sapien
tgctgcccagaagctctcagcaggt

SEQ ID NO: 2540500 - DNA, 25 bp, Homo sapien
ctagtagggtgtgggcagtcagatt

SEQ ID NO: 2540501 - DNA, 25 bp, Homo sapien
cctgcgcagtcgtggccggcagagg

SEQ ID NO: 2540502 - DNA, 25 bp, Homo sapien
cagggcctactctgacgcatctcgt

SEQ ID NO: 2540503 - DNA, 25 bp, Homo sapien
ctgccggccaggacgaggtcagcag

SEQ ID NO: 2540504 - DNA, 25 bp, Homo sapien
tccgcccggccctgcgcagtcgtgg

SEQ ID NO: 2540505 - DNA, 25 bp, Homo sapien
caggtagcactggagtcgctgtcct

SEQ ID NO: 2540506 - DNA, 25 bp, Homo sapien
cacctcgtctgcactgcaggtagca

SEQ ID NO: 2540507 - DNA, 25 bp, Homo sapien
gtgcactcgctcttgacgggctcct

SEQ ID NO: 2540508 - DNA, 25 bp, Homo sapien
ggcttcctccgtgcactcgctcttg

SEQ ID NO: 2540509 - DNA, 25 bp, Homo sapien
cggtgtctgagctgttgttgacagt

SEQ ID NO: 2540510 - DNA, 25 bp, Homo sapien
tgtgtccttggcggcctcagtgtga

SEQ ID NO: 2540511 - DNA, 25 bp, Homo sapien
ctctcggtgtctgagctgttgttga

SEQ ID NO: 2540512 - DNA, 25 bp, Homo sapien
gatgctctcggtgtctgagctgttg

SEQ ID NO: 2540513 - DNA, 25 bp, Homo sapien
ggaagaggggatgagcagggtctgg

SEQ ID NO: 2540514 - DNA, 25 bp, Homo sapien
gggtctggcggggcctccagaagag

SEQ ID NO: 2540515 - DNA, 25 bp, Homo sapien
ctgtgcagggcgagaaggaagaggg

SEQ ID NO: 2540516 - DNA, 25 bp, Homo sapien
gaggggatgagcagggtctggcggg

SEQ ID NO: 2540517 - DNA, 25 bp, Homo sapien
ggcacagcccacaccaacggcctca

SEQ ID NO: 2540518 - DNA, 25 bp, Homo sapien
ccgggcacggtggacaacgaggcca

SEQ ID NO: 2540519 - DNA, 25 bp, Homo sapien
acaccaacggcctcagcatgggttt

SEQ ID NO: 2540520 - DNA, 25 bp, Homo sapien
cgggcacagtggacaatcacgaggc

SEQ ID NO: 2540521 - DNA, 25 bp, Homo sapien
acctcattcccagaggcatgtaagg

SEQ ID NO: 2540522 - DNA, 25 bp, Homo sapien
tctgggcacctcattcccagaggca

SEQ ID NO: 2540523 - DNA, 25 bp, Homo sapien
ctgggccactgcattcccctctggg

SEQ ID NO: 2540524 - DNA, 25 bp, Homo sapien
gcacctcattcccagaggcatgtaa

SEQ ID NO: 2540525 - DNA, 25 bp, Homo sapien
tccaccacgggcgggaatgcagcct

SEQ ID NO: 2540526 - DNA, 25 bp, Homo sapien
tcatttccgctcacgcccgacgcct

SEQ ID NO: 2540527 - DNA, 25 bp, Homo sapien
acgggcgggaatgcagcctcctcgc

SEQ ID NO: 2540528 - DNA, 25 bp, Homo sapien
tcatcctccaccacgggcgggaatg

SEQ ID NO: 2540529 - DNA, 25 bp, Homo sapien
gcagcatctcgaagtgactggggac

SEQ ID NO: 2540530 - DNA, 25 bp, Homo sapien
acttgctgagcaactgtgaaaggcc

SEQ ID NO: 2540531 - DNA, 25 bp, Homo sapien
tcgtgggcttgaacgcatagacagc

SEQ ID NO: 2540532 - DNA, 25 bp, Homo sapien
cagaggctcagaaagcgtttgttga

SEQ ID NO: 2540533 - DNA, 25 bp, Homo sapien
actgcgacacagtcttggagcccac

SEQ ID NO: 2540534 - DNA, 25 bp, Homo sapien
caagatctcatcgaggttctgcctc

SEQ ID NO: 2540535 - DNA, 25 bp, Homo sapien
catccgggcgatggccgaccagttg

SEQ ID NO: 2540536 - DNA, 25 bp, Homo sapien
aagtagaagttcttacactgcgaca

SEQ ID NO: 2540537 - DNA, 25 bp, Homo sapien
acagtgatgggccacgtgtccccta

SEQ ID NO: 2540538 - DNA, 25 bp, Homo sapien
gggaaggtactagagggtggcagtc

SEQ ID NO: 2540539 - DNA, 25 bp, Homo sapien
tgatgggccacgtgtcccctagcgg

SEQ ID NO: 2540540 - DNA, 25 bp, Homo sapien
agtgatgggccacgtgtcccctagc

SEQ ID NO: 2540541 - DNA, 25 bp, Homo sapien
gcatacgacctggcgctgtctcgcc

SEQ ID NO: 2540542 - DNA, 25 bp, Homo sapien
atacgacctggcgctgtctcgccta

SEQ ID NO: 2540543 - DNA, 25 bp, Homo sapien
tacgacctggcgctgtctcgcctac

SEQ ID NO: 2540544 - DNA, 25 bp, Homo sapien
ctgcatacgacctggcgctgtctcg

SEQ ID NO: 2540545 - DNA, 25 bp, Homo sapien
ggaagtgccacgttacacctttcaa

SEQ ID NO: 2540546 - DNA, 25 bp, Homo sapien
catttccggaagtgccacgttacac

SEQ ID NO: 2540547 - DNA, 25 bp, Homo sapien
gaagtgccacgttacacctttcaat

SEQ ID NO: 2540548 - DNA, 25 bp, Homo sapien
cggaagtgccacgttacacctttca

SEQ ID NO: 2540549 - DNA, 25 bp, Homo sapien
tccctggagattgggaaggactggc

SEQ ID NO: 2540550 - DNA, 25 bp, Homo sapien
aggcgggccagagccaactcccggt

SEQ ID NO: 2540551 - DNA, 25 bp, Homo sapien
gaaggactggcagcccggaggcggg

SEQ ID NO: 2540552 - DNA, 25 bp, Homo sapien
ttggccgctccctggagattgggaa

SEQ ID NO: 2540553 - DNA, 25 bp, Homo sapien
cagcagagcctcgggcctctcgcac

SEQ ID NO: 2540554 - DNA, 25 bp, Homo sapien
tgtgacaatggtgtgaccgggagcc

SEQ ID NO: 2540555 - DNA, 25 bp, Homo sapien
acaatggtgtgaccgggagcctccc

SEQ ID NO: 2540556 - DNA, 25 bp, Homo sapien
tgggtcaggcttccaagccaggcca

SEQ ID NO: 2540557 - DNA, 25 bp, Homo sapien
cgaccccctatggaggagttgctgg

SEQ ID NO: 2540558 - DNA, 25 bp, Homo sapien
gcgggggctccagaacgttcctagc

SEQ ID NO: 2540559 - DNA, 25 bp, Homo sapien
cccgaccccctatggaggagttgct

SEQ ID NO: 2540560 - DNA, 25 bp, Homo sapien
gaccccctatggaggagttgctggg

SEQ ID NO: 2540561 - DNA, 25 bp, Homo sapien
tccctcctgccatcgcctggaacac

SEQ ID NO: 2540562 - DNA, 25 bp, Homo sapien
cctcctgccatcgcctggaacacac

SEQ ID NO: 2540563 - DNA, 25 bp, Homo sapien
ccctcctgccatcgcctggaacaca

SEQ ID NO: 2540564 - DNA, 25 bp, Homo sapien
cacggcagacgaacatgctgctgct

SEQ ID NO: 2540565 - DNA, 25 bp, Homo sapien
gccaccctgagcagtaattgtccag

SEQ ID NO: 2540566 - DNA, 25 bp, Homo sapien
ttgtccagattgctgtaattcacgg

SEQ ID NO: 2540567 - DNA, 25 bp, Homo sapien
gctgctgctcacgacattattacaa

SEQ ID NO: 2540568 - DNA, 25 bp, Homo sapien
cacgggctcctctccgccggtgagt

SEQ ID NO: 2540569 - DNA, 25 bp, Homo sapien
ttgagatggtgggacacgggctcct

SEQ ID NO: 2540570 - DNA, 25 bp, Homo sapien
ctctccgccggtgagtcatccccag

SEQ ID NO: 2540571 - DNA, 25 bp, Homo sapien
ccggtgagtcatccccagccgtcct

SEQ ID NO: 2540572 - DNA, 25 bp, Homo sapien
ccgacaaaatgtggtccgtgcaggt

SEQ ID NO: 2540573 - DNA, 25 bp, Homo sapien
gaatgctgagcttcgtgccatgtgt

SEQ ID NO: 2540574 - DNA, 25 bp, Homo sapien
gacagagagtgcattagtggctgcc

SEQ ID NO: 2540575 - DNA, 25 bp, Homo sapien
tgacaacacgagacacgagaaggga

SEQ ID NO: 2540576 - DNA, 25 bp, Homo sapien
ttcctgaatggtgcgagggtctctc

SEQ ID NO: 2540577 - DNA, 25 bp, Homo sapien
ccttcctgaatggtgcgagggtctc

SEQ ID NO: 2540578 - DNA, 25 bp, Homo sapien
cggagggcagactgcccccggagga

SEQ ID NO: 2540579 - DNA, 25 bp, Homo sapien
gggcggagggcagactgcccccgga

SEQ ID NO: 2540580 - DNA, 25 bp, Homo sapien
cagcgagaactctcattcagctcca

SEQ ID NO: 2540581 - DNA, 25 bp, Homo sapien
cttctgtccagcgagaactctcatt

SEQ ID NO: 2540582 - DNA, 25 bp, Homo sapien
gcgagaactctcattcagctccatg

SEQ ID NO: 2540583 - DNA, 25 bp, Homo sapien
tgtccagcgagaactctcattcagc

SEQ ID NO: 2540584 - DNA, 25 bp, Homo sapien
tgatgcggcctttgcgtcttccctg

SEQ ID NO: 2540585 - DNA, 25 bp, Homo sapien
gcctcattagccattgagcgggtga

SEQ ID NO: 2540586 - DNA, 25 bp, Homo sapien
ggcctcctcgctgttggcctcatta

SEQ ID NO: 2540587 - DNA, 25 bp, Homo sapien
tgttggcagttttgcggcctttgga

SEQ ID NO: 2540588 - DNA, 25 bp, Homo sapien
tgccagccatggcactaatcggacg

SEQ ID NO: 2540589 - DNA, 25 bp, Homo sapien
ggcaggcacaggaggctgtcacggc

SEQ ID NO: 2540590 - DNA, 25 bp, Homo sapien
tggcgctaagtcgtgccgcccccct

SEQ ID NO: 2540591 - DNA, 25 bp, Homo sapien
cccgcggtgaggctgtgccttgatc

SEQ ID NO: 2540592 - DNA, 25 bp, Homo sapien
gatctgcaagaactcacactgccat

SEQ ID NO: 2540593 - DNA, 25 bp, Homo sapien
aggaggtcttccttgtcgttctcca

SEQ ID NO: 2540594 - DNA, 25 bp, Homo sapien
ggaggtcttccttgtcgttctccac

SEQ ID NO: 2540595 - DNA, 25 bp, Homo sapien
gtggcgtccctcccgatgggagcag

SEQ ID NO: 2540596 - DNA, 25 bp, Homo sapien
ctgtggcgtccctcccgatgggagc

SEQ ID NO: 2540597 - DNA, 25 bp, Homo sapien
tgtggcgtccctcccgatgggagca

SEQ ID NO: 2540598 - DNA, 25 bp, Homo sapien
gaacatgcatatactgtgcatccga

SEQ ID NO: 2540599 - DNA, 25 bp, Homo sapien
taaggtcggattcgcatctgaaggt

SEQ ID NO: 2540600 - DNA, 25 bp, Homo sapien
tctgaaggtagagtctgacaaccct

SEQ ID NO: 2540601 - DNA, 25 bp, Homo sapien
cactgaataaatgcccccggatgaa

SEQ ID NO: 2540602 - DNA, 25 bp, Homo sapien
tgacatggagcctcatcatgagccc

SEQ ID NO: 2540603 - DNA, 25 bp, Homo sapien
aggcctgtcctacctggcggatcag

SEQ ID NO: 2540604 - DNA, 25 bp, Homo sapien
gaaggctggctttatggccagtgtg

SEQ ID NO: 2540605 - DNA, 25 bp, Homo sapien
cctggcggatcagggctggcttcca

SEQ ID NO: 2540606 - DNA, 25 bp, Homo sapien
acagagacgctcagctggcggcagt

SEQ ID NO: 2540607 - DNA, 25 bp, Homo sapien
tcagtggctccacaaatacagccac

SEQ ID NO: 2540608 - DNA, 25 bp, Homo sapien
agacgctcagctggcggcagtcact

SEQ ID NO: 2540609 - DNA, 25 bp, Homo sapien
tccacaaatacagccacagacagag

SEQ ID NO: 2540610 - DNA, 25 bp, Homo sapien
gcctgaagctgccgctgattttcct

SEQ ID NO: 2540611 - DNA, 25 bp, Homo sapien
gagcctgaagctgccgctgattttc

SEQ ID NO: 2540612 - DNA, 25 bp, Homo sapien
tgagcctgaagctgccgctgatttt

SEQ ID NO: 2540613 - DNA, 25 bp, Homo sapien
ctgaagctgccgctgattttccttg

SEQ ID NO: 2540614 - DNA, 25 bp, Homo sapien
taccacggctaaaccaggacatctc

SEQ ID NO: 2540615 - DNA, 25 bp, Homo sapien
ccgcagataccacggctaaaccagg

SEQ ID NO: 2540616 - DNA, 25 bp, Homo sapien
caggcaccgcagataccacggctaa

SEQ ID NO: 2540617 - DNA, 25 bp, Homo sapien
aaccaggacatctccggtgtaaaga

SEQ ID NO: 2540618 - DNA, 25 bp, Homo sapien
gatagctccgtctcaccaggctctt

SEQ ID NO: 2540619 - DNA, 25 bp, Homo sapien
ggtagtaatagaggacgcactcagc

SEQ ID NO: 2540620 - DNA, 25 bp, Homo sapien
gtctcaccaggctcttatagttctc

SEQ ID NO: 2540621 - DNA, 25 bp, Homo sapien
cattcttcttagtcaggtagtaata

SEQ ID NO: 2540622 - DNA, 25 bp, Homo sapien
tgcgatcaggccaaagttcttggga

SEQ ID NO: 2540623 - DNA, 25 bp, Homo sapien
aatgatgcgatcaggccaaagttct

SEQ ID NO: 2540624 - DNA, 25 bp, Homo sapien
caggaatgatgcgatcaggccaaag

SEQ ID NO: 2540625 - DNA, 25 bp, Homo sapien
tctccaggaatgatgcgatcaggcc

SEQ ID NO: 2540626 - DNA, 25 bp, Homo sapien
tgatttgacgtagaaagatcgtgcc

SEQ ID NO: 2540627 - DNA, 25 bp, Homo sapien
gaaccaagcgctgtttcctgtgaag

SEQ ID NO: 2540628 - DNA, 25 bp, Homo sapien
aagtaaccgagtattcctgctcagg

SEQ ID NO: 2540629 - DNA, 25 bp, Homo sapien
gaaggaccactcactcggtgctgtg

SEQ ID NO: 2540630 - DNA, 25 bp, Homo sapien
ctcttgtccggaggcagggtcttcc

SEQ ID NO: 2540631 - DNA, 25 bp, Homo sapien
tacgtgcaagtgattagagcaagct

SEQ ID NO: 2540632 - DNA, 25 bp, Homo sapien
gtgaacgtcgggcagtgacaaagtc

SEQ ID NO: 2540633 - DNA, 25 bp, Homo sapien
tgctctatgtcctgggcagggaacc

SEQ ID NO: 2540634 - DNA, 25 bp, Homo sapien
tatagcacactgtccctaaggcgtg

SEQ ID NO: 2540635 - DNA, 25 bp, Homo sapien
gcttttgagagaactcgactcccgt

SEQ ID NO: 2540636 - DNA, 25 bp, Homo sapien
gagcctccgtgtcatcagctgtgta

SEQ ID NO: 2540637 - DNA, 25 bp, Homo sapien
cctggctgagctgtcataagggaca

SEQ ID NO: 2540638 - DNA, 25 bp, Homo sapien
ggcggtctttgtacaccttcatggg

SEQ ID NO: 2540639 - DNA, 25 bp, Homo sapien
gggtcggccataagcccgttcatgt

SEQ ID NO: 2540640 - DNA, 25 bp, Homo sapien
cgtcgtacagcatgggcgggatcac

SEQ ID NO: 2540641 - DNA, 25 bp, Homo sapien
tgatgaacttgatgcgctgctggtc

SEQ ID NO: 2540642 - DNA, 25 bp, Homo sapien
tgactattaagaggctctgagccgc

SEQ ID NO: 2540643 - DNA, 25 bp, Homo sapien
cctgatacggaacggcgaccttcct

SEQ ID NO: 2540644 - DNA, 25 bp, Homo sapien
taattacccatctccggaggtaggc

SEQ ID NO: 2540645 - DNA, 25 bp, Homo sapien
ccaaggtcagccagttcaaacgatc

SEQ ID NO: 2540646 - DNA, 25 bp, Homo sapien
gatgtgtcagatgcaaccgaggaac

SEQ ID NO: 2540647 - DNA, 25 bp, Homo sapien
cagggcagcgcgttctgttgtccaa

SEQ ID NO: 2540648 - DNA, 25 bp, Homo sapien
taatctgagcatcagcatcgcaggg

SEQ ID NO: 2540649 - DNA, 25 bp, Homo sapien
tggctgggtaaaaatgcggattcct

SEQ ID NO: 2540650 - DNA, 25 bp, Homo sapien
tggcaaagcccctcgacgtaaacca

SEQ ID NO: 2540651 - DNA, 25 bp, Homo sapien
ttccacccgcgcttcggtggcaaag

SEQ ID NO: 2540652 - DNA, 25 bp, Homo sapien
gcaggcctgggacgggtacctcaat

SEQ ID NO: 2540653 - DNA, 25 bp, Homo sapien
tggtttctggctagggcctctgcac

SEQ ID NO: 2540654 - DNA, 25 bp, Homo sapien
cgggcggccgacatggacagcccac

SEQ ID NO: 2540655 - DNA, 25 bp, Homo sapien
gatctctgacacctcgtgctcgctg

SEQ ID NO: 2540656 - DNA, 25 bp, Homo sapien
ctctgagaggccatcgatgatctct

SEQ ID NO: 2540657 - DNA, 25 bp, Homo sapien
tgacacctcgtgctcgctgcgggcg

SEQ ID NO: 2540658 - DNA, 25 bp, Homo sapien
tgagctggtcatagcgctggcagaa

SEQ ID NO: 2540659 - DNA, 25 bp, Homo sapien
cagggaactgcttctcgtagtactc

SEQ ID NO: 2540660 - DNA, 25 bp, Homo sapien
cgctgcttgcggatctcagggaact

SEQ ID NO: 2540661 - DNA, 25 bp, Homo sapien
gggttgttctcgatgcgctccacct

SEQ ID NO: 2540662 - DNA, 25 bp, Homo sapien
tcagtttgtcaatgttctaacataa

SEQ ID NO: 2540663 - DNA, 25 bp, Homo sapien
gtcaatgttctaacataaggagttg

SEQ ID NO: 2540664 - DNA, 25 bp, Homo sapien
caatgttctaacataaggagttgaa

SEQ ID NO: 2540665 - DNA, 25 bp, Homo sapien
tttgtcaatgttctaacataaggag

SEQ ID NO: 2540666 - DNA, 25 bp, Homo sapien
tgtttccgagcgtgattcctcctct

SEQ ID NO: 2540667 - DNA, 25 bp, Homo sapien
gattcctcctcttgaagtacaagat

SEQ ID NO: 2540668 - DNA, 25 bp, Homo sapien
aagtacaagattagcttcttccgca

SEQ ID NO: 2540669 - DNA, 25 bp, Homo sapien
ccattgtttccgagcgtgattcctc

SEQ ID NO: 2540670 - DNA, 25 bp, Homo sapien
gcaggagggaagcggcagacaggtc

SEQ ID NO: 2540671 - DNA, 25 bp, Homo sapien
agggaagcggcagacaggtcagccc

SEQ ID NO: 2540672 - DNA, 25 bp, Homo sapien
ggagggaagcggcagacaggtcagc

SEQ ID NO: 2540673 - DNA, 25 bp, Homo sapien
ggaagcggcagacaggtcagcccgg

SEQ ID NO: 2540674 - DNA, 25 bp, Homo sapien
ttccatcagtctggccgccgccccc

SEQ ID NO: 2540675 - DNA, 25 bp, Homo sapien
agtctggccgccgccccccggccag

SEQ ID NO: 2540676 - DNA, 25 bp, Homo sapien
cttccatcagtctggccgccgcccc

SEQ ID NO: 2540677 - DNA, 25 bp, Homo sapien
aaggaaacctagtcttgccatctgc

SEQ ID NO: 2540678 - DNA, 25 bp, Homo sapien
tttcttccctcctagcaccggtctg

SEQ ID NO: 2540679 - DNA, 25 bp, Homo sapien
cggtctgggaaaaggcccccatcat

SEQ ID NO: 2540680 - DNA, 25 bp, Homo sapien
tgtaccccgcttgaagatacaatgc

SEQ ID NO: 2540681 - DNA, 25 bp, Homo sapien
tgtgcagacaccaggtgattcccaa

SEQ ID NO: 2540682 - DNA, 25 bp, Homo sapien
gatgttctcatgatactgccgggtg

SEQ ID NO: 2540683 - DNA, 25 bp, Homo sapien
tgatactgccgggtgtcggagggct

SEQ ID NO: 2540684 - DNA, 25 bp, Homo sapien
tctcatgatactgccgggtgtcgga

SEQ ID NO: 2540685 - DNA, 25 bp, Homo sapien
gatactgccgggtgtcggagggctg

SEQ ID NO: 2540686 - DNA, 25 bp, Homo sapien
gccatggcaacaggctgaggacagc

SEQ ID NO: 2540687 - DNA, 25 bp, Homo sapien
agctgcctggaatgccgtgcaccgc

SEQ ID NO: 2540688 - DNA, 25 bp, Homo sapien
cctggaatgccgtgcaccgccatgg

SEQ ID NO: 2540689 - DNA, 25 bp, Homo sapien
gaatgccgtgcaccgccatggcaac

SEQ ID NO: 2540690 - DNA, 25 bp, Homo sapien
gtccctggttccaaagcttctgaca

SEQ ID NO: 2540691 - DNA, 25 bp, Homo sapien
gggtccctggttccaaagcttctga

SEQ ID NO: 2540692 - DNA, 25 bp, Homo sapien
ggtccctggttccaaagcttctgac

SEQ ID NO: 2540693 - DNA, 25 bp, Homo sapien
agactcccacggacaggggcttcct

SEQ ID NO: 2540694 - DNA, 25 bp, Homo sapien
ggcttcctcgcctgtgttcctcggg

SEQ ID NO: 2540695 - DNA, 25 bp, Homo sapien
ccaatcaggaaacgggagcgggagg

SEQ ID NO: 2540696 - DNA, 25 bp, Homo sapien
gacccggaaatctggaaatgcttgg

SEQ ID NO: 2540697 - DNA, 25 bp, Homo sapien
tttattcacaataccccaaatatgc

SEQ ID NO: 2540698 - DNA, 25 bp, Homo sapien
gaacgaaggaccgacccacgctcga

SEQ ID NO: 2540699 - DNA, 25 bp, Homo sapien
cacggatgaacctcgaaaacatgat

SEQ ID NO: 2540700 - DNA, 25 bp, Homo sapien
tgagtgggtaaacaacacgtgacct

SEQ ID NO: 2540701 - DNA, 25 bp, Homo sapien
gacctacccctacagtgaaatatga

SEQ ID NO: 2540702 - DNA, 25 bp, Homo sapien
cacccagatcgcccaggcccgagga

SEQ ID NO: 2540703 - DNA, 25 bp, Homo sapien
agatcgcccaggcccgaggatgtgc

SEQ ID NO: 2540704 - DNA, 25 bp, Homo sapien
acccagatcgcccaggcccgaggat

SEQ ID NO: 2540705 - DNA, 25 bp, Homo sapien
ccagatcgcccaggcccgaggatgt

SEQ ID NO: 2540706 - DNA, 25 bp, Homo sapien
catccatgctgaccagctcagtggg

SEQ ID NO: 2540707 - DNA, 25 bp, Homo sapien
gcccaccacggccatccatgctgac

SEQ ID NO: 2540708 - DNA, 25 bp, Homo sapien
ctgaccagctcagtgggcacagatg

SEQ ID NO: 2540709 - DNA, 25 bp, Homo sapien
accacggccatccatgctgaccagc

SEQ ID NO: 2540710 - DNA, 25 bp, Homo sapien
agcggccgggcttcacggtatgcac

SEQ ID NO: 2540711 - DNA, 25 bp, Homo sapien
cggaggcgctcgctgccaagactcc

SEQ ID NO: 2540712 - DNA, 25 bp, Homo sapien
tcacggtatgcacaggagtgcgcag

SEQ ID NO: 2540713 - DNA, 25 bp, Homo sapien
cggcctacggatgtgtgactctcct

SEQ ID NO: 2540714 - DNA, 25 bp, Homo sapien
ttccagaatccgatgtgcagcttca

SEQ ID NO: 2540715 - DNA, 25 bp, Homo sapien
cagaatccgatgtgcagcttcagcc

SEQ ID NO: 2540716 - DNA, 25 bp, Homo sapien
aatccgatgtgcagcttcagccttc

SEQ ID NO: 2540717 - DNA, 25 bp, Homo sapien
aggccttccagaatccgatgtgcag

SEQ ID NO: 2540718 - DNA, 25 bp, Homo sapien
gggctgaaacggacaatctgaaaga

SEQ ID NO: 2540719 - DNA, 25 bp, Homo sapien
atgcccatgagccccgtgcagagct

SEQ ID NO: 2540720 - DNA, 25 bp, Homo sapien
gcaggtcagaggacgcgtgcagcag

SEQ ID NO: 2540721 - DNA, 25 bp, Homo sapien
tgacgagcaggaaaagcggcaggtc

SEQ ID NO: 2540722 - DNA, 25 bp, Homo sapien
gggcagttttgatgaccaggtggcc

SEQ ID NO: 2540723 - DNA, 25 bp, Homo sapien
cagttttgatgaccaggtggccggg

SEQ ID NO: 2540724 - DNA, 25 bp, Homo sapien
gttttgatgaccaggtggccgggca

SEQ ID NO: 2540725 - DNA, 25 bp, Homo sapien
ttttgatgaccaggtggccgggcat

SEQ ID NO: 2540726 - DNA, 25 bp, Homo sapien
cagtccacacccatctgagtgtctg

SEQ ID NO: 2540727 - DNA, 25 bp, Homo sapien
catctgagtgtctgagcagaacagc

SEQ ID NO: 2540728 - DNA, 25 bp, Homo sapien
ccacccactcataaaccctgcgtct

SEQ ID NO: 2540729 - DNA, 25 bp, Homo sapien
ggatggctttccaccggtcaccttc

SEQ ID NO: 2540730 - DNA, 25 bp, Homo sapien
tcatggtgccccctgtgaagcgcct

SEQ ID NO: 2540731 - DNA, 25 bp, Homo sapien
ctcatggccagcaccggggggcagc

SEQ ID NO: 2540732 - DNA, 25 bp, Homo sapien
ggtgccccctgtgaagcgcctcatg

SEQ ID NO: 2540733 - DNA, 25 bp, Homo sapien
acactgaggcctgattcatggtgcc

SEQ ID NO: 2540734 - DNA, 25 bp, Homo sapien
ggctcgggcggcttggcagcctcct

SEQ ID NO: 2540735 - DNA, 25 bp, Homo sapien
caggctgcggtgcttcgactcgatg

SEQ ID NO: 2540736 - DNA, 25 bp, Homo sapien
atgggcggcggtgacacgggcttct

SEQ ID NO: 2540737 - DNA, 25 bp, Homo sapien
ggttctcgtcgtagatgatctgcac

SEQ ID NO: 2540738 - DNA, 25 bp, Homo sapien
tcctcatcaccctcttcaccctcat

SEQ ID NO: 2540739 - DNA, 25 bp, Homo sapien
tcctcatcaccatcaccctcatcct

SEQ ID NO: 2540740 - DNA, 25 bp, Homo sapien
tcctcatcaccctcatccttatcac

SEQ ID NO: 2540741 - DNA, 25 bp, Homo sapien
ctcatcctcatcaccccttcatcct

SEQ ID NO: 2540742 - DNA, 25 bp, Homo sapien
ttggacagccgtggcggcaccagct

SEQ ID NO: 2540743 - DNA, 25 bp, Homo sapien
tcggtccacgcggtccatgttctgg

SEQ ID NO: 2540744 - DNA, 25 bp, Homo sapien
tccagcttgcccgtcaggctacggt

SEQ ID NO: 2540745 - DNA, 25 bp, Homo sapien
gatctgctgctctaccatggtgatc

SEQ ID NO: 2540746 - DNA, 25 bp, Homo sapien
gatgcccctggtgtaaaacttcaag

SEQ ID NO: 2540747 - DNA, 25 bp, Homo sapien
caccaagaccctgtgaaagatggca

SEQ ID NO: 2540748 - DNA, 25 bp, Homo sapien
tactccggccacaatgacaggttct

SEQ ID NO: 2540749 - DNA, 25 bp, Homo sapien
gttacctgaagctaaccaatgctgg

SEQ ID NO: 2540750 - DNA, 25 bp, Homo sapien
gggcgcttgctttcaatgaactcca

SEQ ID NO: 2540751 - DNA, 25 bp, Homo sapien
cagctctagccgagggcgcttgctt

SEQ ID NO: 2540752 - DNA, 25 bp, Homo sapien
cttggtgaggtcttcagatcccgca

SEQ ID NO: 2540753 - DNA, 25 bp, Homo sapien
ctcgggcaggtatgagtgggactct

SEQ ID NO: 2540754 - DNA, 25 bp, Homo sapien
gctggtactccaggagcccgacgtc

SEQ ID NO: 2540755 - DNA, 25 bp, Homo sapien
cattcccgggctggaactcagacag

SEQ ID NO: 2540756 - DNA, 25 bp, Homo sapien
atggagccgggcgacaggtgggagg

SEQ ID NO: 2540757 - DNA, 25 bp, Homo sapien
catagtcgcgggagtggtgctggta

SEQ ID NO: 2540758 - DNA, 25 bp, Homo sapien
gaaatcagggccaccaataaattac

SEQ ID NO: 2540759 - DNA, 25 bp, Homo sapien
agctggaaatcagggccaccaataa

SEQ ID NO: 2540760 - DNA, 25 bp, Homo sapien
gaccatggcacctctgaagctggaa

SEQ ID NO: 2540761 - DNA, 25 bp, Homo sapien
tggcctcagagggttctccctgacc

SEQ ID NO: 2540762 - DNA, 25 bp, Homo sapien
gcagcccgcagatgacgccagggca

SEQ ID NO: 2540763 - DNA, 25 bp, Homo sapien
ggcctgcaccattccaccgccagct

SEQ ID NO: 2540764 - DNA, 25 bp, Homo sapien
ggcttccacggcctgcaccattcca

SEQ ID NO: 2540765 - DNA, 25 bp, Homo sapien
ccattccaccgccagctcggcatcc

SEQ ID NO: 2540766 - DNA, 25 bp, Homo sapien
ccggggggatctgtctttctgtggc

SEQ ID NO: 2540767 - DNA, 25 bp, Homo sapien
agtatctttcgaactgggtcttgcc

SEQ ID NO: 2540768 - DNA, 25 bp, Homo sapien
aggagctcaggaagggggtagtatc

SEQ ID NO: 2540769 - DNA, 25 bp, Homo sapien
gtagtatctttcgaactgggtcttg

SEQ ID NO: 2540770 - DNA, 25 bp, Homo sapien
ggagctccacattcgcgtgccaatc

SEQ ID NO: 2540771 - DNA, 25 bp, Homo sapien
caatcccactaccagtccagagagg

SEQ ID NO: 2540772 - DNA, 25 bp, Homo sapien
gcaggagctccacattcgcgtgcca

SEQ ID NO: 2540773 - DNA, 25 bp, Homo sapien
gtgccaatcccactaccagtccaga

SEQ ID NO: 2540774 - DNA, 25 bp, Homo sapien
cgtgtgcgtccgggcgatctgcact

SEQ ID NO: 2540775 - DNA, 25 bp, Homo sapien
tgcgtccgggcgatctgcactgggt

SEQ ID NO: 2540776 - DNA, 25 bp, Homo sapien
tgtgcgtccgggcgatctgcactgg

SEQ ID NO: 2540777 - DNA, 25 bp, Homo sapien
gtgcgtccgggcgatctgcactggg

SEQ ID NO: 2540778 - DNA, 25 bp, Homo sapien
ggattaaaagccagtcctcgtcatc

SEQ ID NO: 2540779 - DNA, 25 bp, Homo sapien
aaagccagtcctcgtcatcagctca

SEQ ID NO: 2540780 - DNA, 25 bp, Homo sapien
caaggattaaaagccagtcctcgtc

SEQ ID NO: 2540781 - DNA, 25 bp, Homo sapien
ccaccaaggattaaaagccagtcct

SEQ ID NO: 2540782 - DNA, 25 bp, Homo sapien
gcatgacctgggcaaggctatgacc

SEQ ID NO: 2540783 - DNA, 25 bp, Homo sapien
acaggccacagcatgacctgggcaa

SEQ ID NO: 2540784 - DNA, 25 bp, Homo sapien
cgctgtcccgggcagcagggaccag

SEQ ID NO: 2540785 - DNA, 25 bp, Homo sapien
cagggccagctcaggcgggccacgg

SEQ ID NO: 2540786 - DNA, 25 bp, Homo sapien
accgtcctaaagtgccccgcagctg

SEQ ID NO: 2540787 - DNA, 25 bp, Homo sapien
gtcctaaagtgccccgcagctggct

SEQ ID NO: 2540788 - DNA, 25 bp, Homo sapien
gagggtgacaccgtcctaaagtgcc

SEQ ID NO: 2540789 - DNA, 25 bp, Homo sapien
cagggagggtgacaccgtcctaaag

SEQ ID NO: 2540790 - DNA, 25 bp, Homo sapien
acaccgagacacattccatagattt

SEQ ID NO: 2540791 - DNA, 25 bp, Homo sapien
tctgtgtcttgagcggcctggttca

SEQ ID NO: 2540792 - DNA, 25 bp, Homo sapien
aggatgaggccacaccgagacacat

SEQ ID NO: 2540793 - DNA, 25 bp, Homo sapien
gggcagaggcgcctttccgggaggc

SEQ ID NO: 2540794 - DNA, 25 bp, Homo sapien
agttctgggatgtgcgcacaagacg

SEQ ID NO: 2540795 - DNA, 25 bp, Homo sapien
gctccacgggtcgagctgttgacac

SEQ ID NO: 2540796 - DNA, 25 bp, Homo sapien
gagcgccagctccacgggtcgagct

SEQ ID NO: 2540797 - DNA, 25 bp, Homo sapien
gcacaagacgctgcggagcgccagc

SEQ ID NO: 2540798 - DNA, 25 bp, Homo sapien
ggactcctggcgcagaacggatgct

SEQ ID NO: 2540799 - DNA, 25 bp, Homo sapien
tgggtgtttactttctggcgtgcag

SEQ ID NO: 2540800 - DNA, 25 bp, Homo sapien
ggaactggccaagtatctgatggcc

SEQ ID NO: 2540801 - DNA, 25 bp, Homo sapien
aacggatgctcaggaatccagctct

SEQ ID NO: 2540802 - DNA, 25 bp, Homo sapien
ctgtttaccgctgtctcccccacca

SEQ ID NO: 2540803 - DNA, 25 bp, Homo sapien
tcctcctcggcagttttagccgcac

SEQ ID NO: 2540804 - DNA, 25 bp, Homo sapien
gctcctcctcggcagttttagccgc

SEQ ID NO: 2540805 - DNA, 25 bp, Homo sapien
ctcctcctcggcagttttagccgca

SEQ ID NO: 2540806 - DNA, 25 bp, Homo sapien
ctgtaggagcaggagctatggaggc

SEQ ID NO: 2540807 - DNA, 25 bp, Homo sapien
gagctatggaggctgtgggctgcac

SEQ ID NO: 2540808 - DNA, 25 bp, Homo sapien
gcaggagctatggaggctgtgggct

SEQ ID NO: 2540809 - DNA, 25 bp, Homo sapien
aggagctatggaggctgtgggctgc

SEQ ID NO: 2540810 - DNA, 25 bp, Homo sapien
agccctgcacggggagcggccctcc

SEQ ID NO: 2540811 - DNA, 25 bp, Homo sapien
ccgagaagccctgcacggggagcgg

SEQ ID NO: 2540812 - DNA, 25 bp, Homo sapien
gagaagccctgcacggggagcggcc

SEQ ID NO: 2540813 - DNA, 25 bp, Homo sapien
cctgcacggggagcggccctcccca

SEQ ID NO: 2540814 - DNA, 25 bp, Homo sapien
ggacgtgttttccattagacccatc

SEQ ID NO: 2540815 - DNA, 25 bp, Homo sapien
tcattaagttccgggcgccccagga

SEQ ID NO: 2540816 - DNA, 25 bp, Homo sapien
aacattacgcctggttctgccgcct

SEQ ID NO: 2540817 - DNA, 25 bp, Homo sapien
cgtacttcacaaacattacgcctgg

SEQ ID NO: 2540818 - DNA, 25 bp, Homo sapien
ctcaggaccccatgacggccacagg

SEQ ID NO: 2540819 - DNA, 25 bp, Homo sapien
tcaggaccccatgacggccacaggg

SEQ ID NO: 2540820 - DNA, 25 bp, Homo sapien
caggaccccatgacggccacagggc

SEQ ID NO: 2540821 - DNA, 25 bp, Homo sapien
ccggccaacgacagcaatttattct

SEQ ID NO: 2540822 - DNA, 25 bp, Homo sapien
aggcgtcagcaggaccctactccct

SEQ ID NO: 2540823 - DNA, 25 bp, Homo sapien
tcgcccggccaacgacagcaattta

SEQ ID NO: 2540824 - DNA, 25 bp, Homo sapien
gcccggccaacgacagcaatttatt

SEQ ID NO: 2540825 - DNA, 25 bp, Homo sapien
ctcttctaaggacactggtctttgg

SEQ ID NO: 2540826 - DNA, 25 bp, Homo sapien
aaggacactggtctttggattcagg

SEQ ID NO: 2540827 - DNA, 25 bp, Homo sapien
tctaaggacactggtctttggattc

SEQ ID NO: 2540828 - DNA, 25 bp, Homo sapien
ttgtcttcctgtagttcatgtagtc

SEQ ID NO: 2540829 - DNA, 25 bp, Homo sapien
aatcagcgcccctgcatagagcctg

SEQ ID NO: 2540830 - DNA, 25 bp, Homo sapien
gctcagggccgacaacactgcgctg

SEQ ID NO: 2540831 - DNA, 25 bp, Homo sapien
ctccgagcgctcttttccgtgactg

SEQ ID NO: 2540832 - DNA, 25 bp, Homo sapien
tccgtgactgcagcaacttcgtccg

SEQ ID NO: 2540833 - DNA, 25 bp, Homo sapien
gaccccacggctgggccgtgaacga

SEQ ID NO: 2540834 - DNA, 25 bp, Homo sapien
caaacacaacttgaagtaactctct

SEQ ID NO: 2540835 - DNA, 25 bp, Homo sapien
cctccaggatgacacccgcagaggg

SEQ ID NO: 2540836 - DNA, 25 bp, Homo sapien
acatgaccaacctcgctcacgtcag

SEQ ID NO: 2540837 - DNA, 25 bp, Homo sapien
ctcaggccggggcatttaactgatg

SEQ ID NO: 2540838 - DNA, 25 bp, Homo sapien
agcagggacaaaaggatggggccct

SEQ ID NO: 2540839 - DNA, 25 bp, Homo sapien
tgctgtccggacaggacacggttcc

SEQ ID NO: 2540840 - DNA, 25 bp, Homo sapien
ccggacaggacacggttcctgggct

SEQ ID NO: 2540841 - DNA, 25 bp, Homo sapien
cctggtgtagccgacggttcccagg

SEQ ID NO: 2540842 - DNA, 25 bp, Homo sapien
cacaggcagctagaacccagtggta

SEQ ID NO: 2540843 - DNA, 25 bp, Homo sapien
ggtacactaggtatccaaacacaga

SEQ ID NO: 2540844 - DNA, 25 bp, Homo sapien
cacctgtacggcgtgtggctggact

SEQ ID NO: 2540845 - DNA, 25 bp, Homo sapien
agaaactgcctccagcgaggctgtg

SEQ ID NO: 2540846 - DNA, 25 bp, Homo sapien
aactgcctccagcgaggctgtgtcc

SEQ ID NO: 2540847 - DNA, 25 bp, Homo sapien
cagaaactgcctccagcgaggctgt

SEQ ID NO: 2540848 - DNA, 25 bp, Homo sapien
gaaactgcctccagcgaggctgtgt

SEQ ID NO: 2540849 - DNA, 25 bp, Homo sapien
gccaagctccgagaggccagccctc

SEQ ID NO: 2540850 - DNA, 25 bp, Homo sapien
acagggggacaagccagccacttct

SEQ ID NO: 2540851 - DNA, 25 bp, Homo sapien
agctcacagggggacaagccagcca

SEQ ID NO: 2540852 - DNA, 25 bp, Homo sapien
taagcgtttttttcactatgatgcc

SEQ ID NO: 2540853 - DNA, 25 bp, Homo sapien
gcctgcaatccccaacagacagagt

SEQ ID NO: 2540854 - DNA, 25 bp, Homo sapien
agacagctgggagatcagaccccat

SEQ ID NO: 2540855 - DNA, 25 bp, Homo sapien
gctcccggaagcctcggtggccagc

SEQ ID NO: 2540856 - DNA, 25 bp, Homo sapien
cccgtcacaggctagggcagagcca

SEQ ID NO: 2540857 - DNA, 25 bp, Homo sapien
tcaaggccgcagtcgcacttgctca

SEQ ID NO: 2540858 - DNA, 25 bp, Homo sapien
cactcgtgcacacccggttcacact

SEQ ID NO: 2540859 - DNA, 25 bp, Homo sapien
ctcattcacactcgtgcacacccgg

SEQ ID NO: 2540860 - DNA, 25 bp, Homo sapien
actcactcgctcaaggccgcagtcg

SEQ ID NO: 2540861 - DNA, 25 bp, Homo sapien
tacccgacggttggggcaccgcaca

SEQ ID NO: 2540862 - DNA, 25 bp, Homo sapien
gacggttggggcaccgcacagattt

SEQ ID NO: 2540863 - DNA, 25 bp, Homo sapien
ttgttaattctgtgtcgagtctagt

SEQ ID NO: 2540864 - DNA, 25 bp, Homo sapien
tgttgttaattctgtgtcgagtcta

SEQ ID NO: 2540865 - DNA, 25 bp, Homo sapien
gcaccgcgagcacagaggcggcctg

SEQ ID NO: 2540866 - DNA, 25 bp, Homo sapien
agcaccgcgagcacagaggcggcct

SEQ ID NO: 2540867 - DNA, 25 bp, Homo sapien
atgcgcagcacgcttccaccttcca

SEQ ID NO: 2540868 - DNA, 25 bp, Homo sapien
agggccgcacagttccgggaggtgc

SEQ ID NO: 2540869 - DNA, 25 bp, Homo sapien
ccgatgcgcagcacgcttccacctt

SEQ ID NO: 2540870 - DNA, 25 bp, Homo sapien
ggccgcacagttccgggaggtgccg

SEQ ID NO: 2540871 - DNA, 25 bp, Homo sapien
ccgccgctacagctgctatttatag

SEQ ID NO: 2540872 - DNA, 25 bp, Homo sapien
tgccgggagatgcagcttcctgccc

SEQ ID NO: 2540873 - DNA, 25 bp, Homo sapien
tcctgcccgccgctacagctgctat

SEQ ID NO: 2540874 - DNA, 25 bp, Homo sapien
cccaggtgccgggagatgcagcttc

SEQ ID NO: 2540875 - DNA, 25 bp, Homo sapien
gatccgaggtccctttgggacatcc

SEQ ID NO: 2540876 - DNA, 25 bp, Homo sapien
gtcagtgccgtgggcccacgagtca

SEQ ID NO: 2540877 - DNA, 25 bp, Homo sapien
gggtcaatgatccacttttgcatag

SEQ ID NO: 2540878 - DNA, 25 bp, Homo sapien
ccacgagtcacagtcaggagggaga

SEQ ID NO: 2540879 - DNA, 25 bp, Homo sapien
tccaggttggaaccagatggcccag

SEQ ID NO: 2540880 - DNA, 25 bp, Homo sapien
ggtctccgggtaccacagtgctgag

SEQ ID NO: 2540881 - DNA, 25 bp, Homo sapien
tttccagatgcaaagaaaggccagc

SEQ ID NO: 2540882 - DNA, 25 bp, Homo sapien
ggtcccttggcttcagacgcacttg

SEQ ID NO: 2540883 - DNA, 25 bp, Homo sapien
acttttcaagtgctcccgagtgaca

SEQ ID NO: 2540884 - DNA, 25 bp, Homo sapien
tgccctcgggttaagtagccattag

SEQ ID NO: 2540885 - DNA, 25 bp, Homo sapien
tgctccgaaacacagaatatgactt

SEQ ID NO: 2540886 - DNA, 25 bp, Homo sapien
tgctcagtggcagggacccactttt

SEQ ID NO: 2540887 - DNA, 25 bp, Homo sapien
gctccggtgcggcccggcctgcccg

SEQ ID NO: 2540888 - DNA, 25 bp, Homo sapien
ctccggtgcggcccggcctgcccgc

SEQ ID NO: 2540889 - DNA, 25 bp, Homo sapien
tccggtgcggcccggcctgcccgcg

SEQ ID NO: 2540890 - DNA, 25 bp, Homo sapien
agctccctggtagcccaggcctgtg

SEQ ID NO: 2540891 - DNA, 25 bp, Homo sapien
gggcagcagctccctggtagcccag

SEQ ID NO: 2540892 - DNA, 25 bp, Homo sapien
cagcagctccctggtagcccaggcc

SEQ ID NO: 2540893 - DNA, 25 bp, Homo sapien
ccaggcctgtgacatcgctgagcat

SEQ ID NO: 2540894 - DNA, 25 bp, Homo sapien
tctcaggccggaagaagccgagggc

SEQ ID NO: 2540895 - DNA, 25 bp, Homo sapien
caagtgtcacgatgtggtggctgac

SEQ ID NO: 2540896 - DNA, 25 bp, Homo sapien
tcactcttccgagacaagtgtcacg

SEQ ID NO: 2540897 - DNA, 25 bp, Homo sapien
tccgagacaagtgtcacgatgtggt

SEQ ID NO: 2540898 - DNA, 25 bp, Homo sapien
ggcttgctgtgacccggtatgacct

SEQ ID NO: 2540899 - DNA, 25 bp, Homo sapien
ccacagggcttgctgtgacccggta

SEQ ID NO: 2540900 - DNA, 25 bp, Homo sapien
tgtgacccggtatgacctccttttc

SEQ ID NO: 2540901 - DNA, 25 bp, Homo sapien
gaagcccctcagaggatgggaagtg

SEQ ID NO: 2540902 - DNA, 25 bp, Homo sapien
tctgtctccactgatgagcagccag

SEQ ID NO: 2540903 - DNA, 25 bp, Homo sapien
gccccagaggatgagggcgtgtctt

SEQ ID NO: 2540904 - DNA, 25 bp, Homo sapien
cccagaggatgagggcgtgtcttcc

SEQ ID NO: 2540905 - DNA, 25 bp, Homo sapien
ggatgagggcgtgtcttcccagtgc

SEQ ID NO: 2540906 - DNA, 25 bp, Homo sapien
cgcagcactgttccctgccttggcc

SEQ ID NO: 2540907 - DNA, 25 bp, Homo sapien
catcagggccggtccttttactgta

SEQ ID NO: 2540908 - DNA, 25 bp, Homo sapien
gagggcctcattcccgcagcactgt

SEQ ID NO: 2540909 - DNA, 25 bp, Homo sapien
gggctgtggtcttcctggtacaatt

SEQ ID NO: 2540910 - DNA, 25 bp, Homo sapien
tcttgttggcatctcacaggtggga

SEQ ID NO: 2540911 - DNA, 25 bp, Homo sapien
tcccagttagagtgcagtgccaagt

SEQ ID NO: 2540912 - DNA, 25 bp, Homo sapien
gctctttggtcggatatcatacccc

SEQ ID NO: 2540913 - DNA, 25 bp, Homo sapien
catctaatttgtgtgctcagcctcc

SEQ ID NO: 2540914 - DNA, 25 bp, Homo sapien
ttgcctgtgcggtcctccccttcac

SEQ ID NO: 2540915 - DNA, 25 bp, Homo sapien
cgtttgcctgtgcggtcctcccctt

SEQ ID NO: 2540916 - DNA, 25 bp, Homo sapien
ctgtgcggtcctccccttcactcgg

SEQ ID NO: 2540917 - DNA, 25 bp, Homo sapien
cccttcactcggcctggggtgctgt

SEQ ID NO: 2540918 - DNA, 25 bp, Homo sapien
tcagggccttggcacgtacgggtcc

SEQ ID NO: 2540919 - DNA, 25 bp, Homo sapien
ctcagggccttggcacgtacgggtc

SEQ ID NO: 2540920 - DNA, 25 bp, Homo sapien
acggtgaatcaacggcctgctgcgg

SEQ ID NO: 2540921 - DNA, 25 bp, Homo sapien
gcttttgctggggaacggtgaatca

SEQ ID NO: 2540922 - DNA, 25 bp, Homo sapien
agctgactgatgcagaggccgcaga

SEQ ID NO: 2540923 - DNA, 25 bp, Homo sapien
cagctgactgatgcagaggccgcag

SEQ ID NO: 2540924 - DNA, 25 bp, Homo sapien
aggtgcccactaccctcaggaatcg

SEQ ID NO: 2540925 - DNA, 25 bp, Homo sapien
gacaagacaaccttgctggtggcca

SEQ ID NO: 2540926 - DNA, 25 bp, Homo sapien
tcacattagtaaggctgagctcatc

SEQ ID NO: 2540927 - DNA, 25 bp, Homo sapien
gggttggcaacttcgatcacattag

SEQ ID NO: 2540928 - DNA, 25 bp, Homo sapien
tggctccttggcaagatggcaaagc

SEQ ID NO: 2540929 - DNA, 25 bp, Homo sapien
atcttggaggcagtcgcagcgcccc

SEQ ID NO: 2540930 - DNA, 25 bp, Homo sapien
cagaagtgggaagtcccagtggcct

SEQ ID NO: 2540931 - DNA, 25 bp, Homo sapien
cagtggcctgctccgtggaatcagg

SEQ ID NO: 2540932 - DNA, 25 bp, Homo sapien
tcagacatgcctgctcgggtcctgc

SEQ ID NO: 2540933 - DNA, 25 bp, Homo sapien
gggttaatcacagcaacacgcatgg

SEQ ID NO: 2540934 - DNA, 25 bp, Homo sapien
tcagttcacagagttcacgtcgcct

SEQ ID NO: 2540935 - DNA, 25 bp, Homo sapien
acgtcgcctctcactgcctgggatg

SEQ ID NO: 2540936 - DNA, 25 bp, Homo sapien
cctgtgccgggaactcccgtttctg

SEQ ID NO: 2540937 - DNA, 25 bp, Homo sapien
gggaggctcgccgatggccctgtgc

SEQ ID NO: 2540938 - DNA, 25 bp, Homo sapien
actcccgtttctgagccggtacagc

SEQ ID NO: 2540939 - DNA, 25 bp, Homo sapien
gcagcaaactctgtagcggtgctcc

SEQ ID NO: 2540940 - DNA, 25 bp, Homo sapien
ctgccaggtgcaggcaggagctgca

SEQ ID NO: 2540941 - DNA, 25 bp, Homo sapien
aggcaggagctgcagggacgcttct

SEQ ID NO: 2540942 - DNA, 25 bp, Homo sapien
gtgcaggcaggagctgcagggacgc

SEQ ID NO: 2540943 - DNA, 25 bp, Homo sapien
gcaggcaggagctgcagggacgctt

SEQ ID NO: 2540944 - DNA, 25 bp, Homo sapien
ggaacaaacaagatgagcaggcagg

SEQ ID NO: 2540945 - DNA, 25 bp, Homo sapien
gggctccggcatcagccccccagca

SEQ ID NO: 2540946 - DNA, 25 bp, Homo sapien
ttgacataattggaacaaacaagat

SEQ ID NO: 2540947 - DNA, 25 bp, Homo sapien
cagcaccttgccagcctgggggcag

SEQ ID NO: 2540948 - DNA, 25 bp, Homo sapien
tgactggctgggcgtccagtgagtt

SEQ ID NO: 2540949 - DNA, 25 bp, Homo sapien
tgcctgactggctgggcgtccagtg

SEQ ID NO: 2540950 - DNA, 25 bp, Homo sapien
ctggctgggcgtccagtgagttgga

SEQ ID NO: 2540951 - DNA, 25 bp, Homo sapien
gcctgactggctgggcgtccagtga

SEQ ID NO: 2540952 - DNA, 25 bp, Homo sapien
tacaaaatggctgttgccaattcga

SEQ ID NO: 2540953 - DNA, 25 bp, Homo sapien
ccgtggttacaaaatggctgttgcc

SEQ ID NO: 2540954 - DNA, 25 bp, Homo sapien
caaaatggctgttgccaattcgaca

SEQ ID NO: 2540955 - DNA, 25 bp, Homo sapien
ctgtgtcccgtggttacaaaatggc

SEQ ID NO: 2540956 - DNA, 25 bp, Homo sapien
cagctgcctattaaaggcagggcca

SEQ ID NO: 2540957 - DNA, 25 bp, Homo sapien
gtcagagttctgacgcccctgggag

SEQ ID NO: 2540958 - DNA, 25 bp, Homo sapien
gcctctctgtgccagcatgagcgga

SEQ ID NO: 2540959 - DNA, 25 bp, Homo sapien
tggatgagcccttacacagcagctg

SEQ ID NO: 2540960 - DNA, 25 bp, Homo sapien
atgctgcgtgcacaggttatgcttt

SEQ ID NO: 2540961 - DNA, 25 bp, Homo sapien
tatgctttgactgctcctctagcat

SEQ ID NO: 2540962 - DNA, 25 bp, Homo sapien
tgctgcgtgcacaggttatgctttg

SEQ ID NO: 2540963 - DNA, 25 bp, Homo sapien
agagacccagaggtgctcgatgctg

SEQ ID NO: 2540964 - DNA, 25 bp, Homo sapien
tttcccgtctgttgccccgtcgtca

SEQ ID NO: 2540965 - DNA, 25 bp, Homo sapien
gtctgttgccccgtcgtcacccaga

SEQ ID NO: 2540966 - DNA, 25 bp, Homo sapien
cccagagacccagaggtgctcgatg

SEQ ID NO: 2540967 - DNA, 25 bp, Homo sapien
cagggagacgactgcaaatgtgcag

SEQ ID NO: 2540968 - DNA, 25 bp, Homo sapien
ggcctcttcacacacgagtctgaaa

SEQ ID NO: 2540969 - DNA, 25 bp, Homo sapien
taaatgaaggcagccggagtacagg

SEQ ID NO: 2540970 - DNA, 25 bp, Homo sapien
agctgcgactgttccctctgcaagg

SEQ ID NO: 2540971 - DNA, 25 bp, Homo sapien
tatgatcgggagtcttgagggcact

SEQ ID NO: 2540972 - DNA, 25 bp, Homo sapien
ttatgatcgggagtcttgagggcac

SEQ ID NO: 2540973 - DNA, 25 bp, Homo sapien
atgatcgggagtcttgagggcactt

SEQ ID NO: 2540974 - DNA, 25 bp, Homo sapien
agacctctctccacttcaggcagtg

SEQ ID NO: 2540975 - DNA, 25 bp, Homo sapien
gagcagacgaagagaagccagacct

SEQ ID NO: 2540976 - DNA, 25 bp, Homo sapien
agtctcccccgagcagacgaagaga

SEQ ID NO: 2540977 - DNA, 25 bp, Homo sapien
cacttcaggcagtggatgctttttg

SEQ ID NO: 2540978 - DNA, 25 bp, Homo sapien
ttgttccgagtgtcaaaatctgcag

SEQ ID NO: 2540979 - DNA, 25 bp, Homo sapien
tccaggatttgggtcttatccagct

SEQ ID NO: 2540980 - DNA, 25 bp, Homo sapien
taaatgagccaaaacactcctgcat

SEQ ID NO: 2540981 - DNA, 25 bp, Homo sapien
cagtgaaaaccagaatattgttccg

SEQ ID NO: 2540982 - DNA, 25 bp, Homo sapien
cagacagcagcctagccgcttcctt

SEQ ID NO: 2540983 - DNA, 25 bp, Homo sapien
cagcctagccgcttccttctccagg

SEQ ID NO: 2540984 - DNA, 25 bp, Homo sapien
caggaggtcagcagacagcagccta

SEQ ID NO: 2540985 - DNA, 25 bp, Homo sapien
gaggcacccaggaggtcagcagaca

SEQ ID NO: 2540986 - DNA, 25 bp, Homo sapien
gggcacttggctgtctgcagaatgg

SEQ ID NO: 2540987 - DNA, 25 bp, Homo sapien
gccaggggcacttggctgtctgcag

SEQ ID NO: 2540988 - DNA, 25 bp, Homo sapien
atcagctgggggctgtcatggccca

SEQ ID NO: 2540989 - DNA, 25 bp, Homo sapien
ggctgtcatggcccacggcagtttc

SEQ ID NO: 2540990 - DNA, 25 bp, Homo sapien
tgtcatggcccacggcagtttccat

SEQ ID NO: 2540991 - DNA, 25 bp, Homo sapien
tcccctccaggtacaggatcagctg

SEQ ID NO: 2540992 - DNA, 25 bp, Homo sapien
ggttagaggcagaagcctcttttgc

SEQ ID NO: 2540993 - DNA, 25 bp, Homo sapien
ctcttttgcagggaccttcagaagt

SEQ ID NO: 2540994 - DNA, 25 bp, Homo sapien
gaccgaggtacagagaggagctttg

SEQ ID NO: 2540995 - DNA, 25 bp, Homo sapien
cacaattgtacagggtgatggcaca

SEQ ID NO: 2540996 - DNA, 25 bp, Homo sapien
cctgacattttgttgacaagttgac

SEQ ID NO: 2540997 - DNA, 25 bp, Homo sapien
gactgcaacgtagagcatctcctgg

SEQ ID NO: 2540998 - DNA, 25 bp, Homo sapien
tagacagcgacagaacctgacattt

SEQ ID NO: 2540999 - DNA, 25 bp, Homo sapien
gaggatctgcttttacggcgtagcg

SEQ ID NO: 2541000 - DNA, 25 bp, Homo sapien
tcttcctcttgttagcctattttgc

SEQ ID NO: 2541001 - DNA, 25 bp, Homo sapien
tcttgttagcctattttgcaaaggc

SEQ ID NO: 2541002 - DNA, 25 bp, Homo sapien
cctcttgttagcctattttgcaaag

SEQ ID NO: 2541003 - DNA, 25 bp, Homo sapien
ttcctcttgttagcctattttgcaa

SEQ ID NO: 2541004 - DNA, 25 bp, Homo sapien
gacccattgcttggctcgatagtaa

SEQ ID NO: 2541005 - DNA, 25 bp, Homo sapien
gacggcttgctgctatccacatctg

SEQ ID NO: 2541006 - DNA, 25 bp, Homo sapien
taaaataatgctgacccgaaagatc

SEQ ID NO: 2541007 - DNA, 25 bp, Homo sapien
gagaatgccagaactagactatagc

SEQ ID NO: 2541008 - DNA, 25 bp, Homo sapien
gccaggccccggctgtttcccgctg

SEQ ID NO: 2541009 - DNA, 25 bp, Homo sapien
tgctcaggaccacatgctggccagg

SEQ ID NO: 2541010 - DNA, 25 bp, Homo sapien
aggcccctgctcaggaccacatgct

SEQ ID NO: 2541011 - DNA, 25 bp, Homo sapien
acatgctggccaggccccggctgtt

SEQ ID NO: 2541012 - DNA, 25 bp, Homo sapien
ttttccacagccgaagagctcggcg

SEQ ID NO: 2541013 - DNA, 25 bp, Homo sapien
tcattttccacagccgaagagctcg

SEQ ID NO: 2541014 - DNA, 25 bp, Homo sapien
acagccgaagagctcggcggccatg

SEQ ID NO: 2541015 - DNA, 25 bp, Homo sapien
ttccacagccgaagagctcggcggc

SEQ ID NO: 2541016 - DNA, 25 bp, Homo sapien
gctctggagctcccgcagacgccac

SEQ ID NO: 2541017 - DNA, 25 bp, Homo sapien
ctgggcacccgctgggggtgcagct

SEQ ID NO: 2541018 - DNA, 25 bp, Homo sapien
caggcccagtgctctggagctcccg

SEQ ID NO: 2541019 - DNA, 25 bp, Homo sapien
ccctgggcacccgctgggggtgcag

SEQ ID NO: 2541020 - DNA, 25 bp, Homo sapien
taattcgcagagttgggtgtctctg

SEQ ID NO: 2541021 - DNA, 25 bp, Homo sapien
ttcctggtttcagtgtaattcgcag

SEQ ID NO: 2541022 - DNA, 25 bp, Homo sapien
ggtgtctctgttcccgaacaatttg

SEQ ID NO: 2541023 - DNA, 25 bp, Homo sapien
ggtaaatgctcagggggccccatgc

SEQ ID NO: 2541024 - DNA, 25 bp, Homo sapien
tgttggatgcctcatgtgcgcccag

SEQ ID NO: 2541025 - DNA, 25 bp, Homo sapien
ttggatgcctcatgtgcgcccagct

SEQ ID NO: 2541026 - DNA, 25 bp, Homo sapien
ggcctgttggatgcctcatgtgcgc

SEQ ID NO: 2541027 - DNA, 25 bp, Homo sapien
caaagggcctgttggatgcctcatg

SEQ ID NO: 2541028 - DNA, 25 bp, Homo sapien
cacacgaaaatctcgctccctctct

SEQ ID NO: 2541029 - DNA, 25 bp, Homo sapien
ctccagagcattgcggcagaaccag

SEQ ID NO: 2541030 - DNA, 25 bp, Homo sapien
gaaccagcaacagctttcctcgcaa

SEQ ID NO: 2541031 - DNA, 25 bp, Homo sapien
gtcaccaggcctgcctcactacctg

SEQ ID NO: 2541032 - DNA, 25 bp, Homo sapien
gcttttaaatatccagtgggaatga

SEQ ID NO: 2541033 - DNA, 25 bp, Homo sapien
ggcttttaaatatccagtgggaatg

SEQ ID NO: 2541034 - DNA, 25 bp, Homo sapien
cttttaaatatccagtgggaatgaa

SEQ ID NO: 2541035 - DNA, 25 bp, Homo sapien
ctggcactggccgtgtttgcacacc

SEQ ID NO: 2541036 - DNA, 25 bp, Homo sapien
gcactggccgtgtttgcacacccat

SEQ ID NO: 2541037 - DNA, 25 bp, Homo sapien
ttcgggtgagggttgtcacatctgg

SEQ ID NO: 2541038 - DNA, 25 bp, Homo sapien
cagtgccaggggtccggttcgggtg

SEQ ID NO: 2541039 - DNA, 25 bp, Homo sapien
tccatgccaagttgttccagtccat

SEQ ID NO: 2541040 - DNA, 25 bp, Homo sapien
catcatggccaatgttgctcaaaca

SEQ ID NO: 2541041 - DNA, 25 bp, Homo sapien
tctggtttgcagaaacatgtgcatc

SEQ ID NO: 2541042 - DNA, 25 bp, Homo sapien
gaagctgaggaggtaagtgagatct

SEQ ID NO: 2541043 - DNA, 25 bp, Homo sapien
tctcctagttagatcccagcgggca

SEQ ID NO: 2541044 - DNA, 25 bp, Homo sapien
taaacaagggcgtactcatgcagta

SEQ ID NO: 2541045 - DNA, 25 bp, Homo sapien
aagcaaaggcctagaacaacacggg

SEQ ID NO: 2541046 - DNA, 25 bp, Homo sapien
gaaatgttcggcagtgaataccctc

SEQ ID NO: 2541047 - DNA, 25 bp, Homo sapien
ctgcggccacttcggccagagagtg

SEQ ID NO: 2541048 - DNA, 25 bp, Homo sapien
tattccagtagaaaagggtcacagg

SEQ ID NO: 2541049 - DNA, 25 bp, Homo sapien
tgggcacctataatctgagggaccc

SEQ ID NO: 2541050 - DNA, 25 bp, Homo sapien
gagtggccggctcagtccataggat

SEQ ID NO: 2541051 - DNA, 25 bp, Homo sapien
tcactccattgttttccgaggcctg

SEQ ID NO: 2541052 - DNA, 25 bp, Homo sapien
gacaacccgatgcagtgcctgtgaa

SEQ ID NO: 2541053 - DNA, 25 bp, Homo sapien
ggcctgtgtaaaggcgctttgcctg

SEQ ID NO: 2541054 - DNA, 25 bp, Homo sapien
ggtgggcggagaccctcgggcagct

SEQ ID NO: 2541055 - DNA, 25 bp, Homo sapien
gtagaccaaggccaaagctcgtggc

SEQ ID NO: 2541056 - DNA, 25 bp, Homo sapien
caggtagaccaaggccaaagctcgt

SEQ ID NO: 2541057 - DNA, 25 bp, Homo sapien
tagaccaaggccaaagctcgtggcc

SEQ ID NO: 2541058 - DNA, 25 bp, Homo sapien
accaaggccaaagctcgtggccagg

SEQ ID NO: 2541059 - DNA, 25 bp, Homo sapien
ccaacggctgaacgggacaggccag

SEQ ID NO: 2541060 - DNA, 25 bp, Homo sapien
actgaatttggcacaggaaggcggc

SEQ ID NO: 2541061 - DNA, 25 bp, Homo sapien
caccacaccgggactgcagtgtttc

SEQ ID NO: 2541062 - DNA, 25 bp, Homo sapien
ggaagcctgggcccaacggctgaac

SEQ ID NO: 2541063 - DNA, 25 bp, Homo sapien
tgttgacgagcctctccctacaagt

SEQ ID NO: 2541064 - DNA, 25 bp, Homo sapien
gtctgcacaagcctgcacgcatgtg

SEQ ID NO: 2541065 - DNA, 25 bp, Homo sapien
tgtgtgtatgtgtgccagggcgtgt

SEQ ID NO: 2541066 - DNA, 25 bp, Homo sapien
cagaacagtgcttgttgacgagcct

SEQ ID NO: 2541067 - DNA, 25 bp, Homo sapien
gggctgtccgctgggagagtccggg

SEQ ID NO: 2541068 - DNA, 25 bp, Homo sapien
ctggggggccggtcaggcccagcgg

SEQ ID NO: 2541069 - DNA, 25 bp, Homo sapien
caggcctggctggctcacggtgtcc

SEQ ID NO: 2541070 - DNA, 25 bp, Homo sapien
agagtccgggagaagcggggtgtag

SEQ ID NO: 2541071 - DNA, 25 bp, Homo sapien
tagaccttagccatgtgggcccaaa

SEQ ID NO: 2541072 - DNA, 25 bp, Homo sapien
gcacagtcaacatggaacaaccggg

SEQ ID NO: 2541073 - DNA, 25 bp, Homo sapien
ccaagtggccgggacaatgacacgt

SEQ ID NO: 2541074 - DNA, 25 bp, Homo sapien
gatgcagcttcggtcacattcaaaa

SEQ ID NO: 2541075 - DNA, 25 bp, Homo sapien
tccccatacccaggtacagggcaaa

SEQ ID NO: 2541076 - DNA, 25 bp, Homo sapien
tcctggttatgtccagggaggtgca

SEQ ID NO: 2541077 - DNA, 25 bp, Homo sapien
gggccctggccactctatctatgct

SEQ ID NO: 2541078 - DNA, 25 bp, Homo sapien
cattccccgtttcacatgcctaggg

SEQ ID NO: 2541079 - DNA, 25 bp, Homo sapien
gggccaaaccgtgcacagcactacg

SEQ ID NO: 2541080 - DNA, 25 bp, Homo sapien
cgtgcacagcactacggtgtcctgg

SEQ ID NO: 2541081 - DNA, 25 bp, Homo sapien
cgatggggccaaaccgtgcacagca

SEQ ID NO: 2541082 - DNA, 25 bp, Homo sapien
caaaccgtgcacagcactacggtgt

SEQ ID NO: 2541083 - DNA, 25 bp, Homo sapien
cacaatgtggctccctggaaagcta

SEQ ID NO: 2541084 - DNA, 25 bp, Homo sapien
aaccccaagttgtagggcctgcagc

SEQ ID NO: 2541085 - DNA, 25 bp, Homo sapien
tgagttagagacagccaagtggccc

SEQ ID NO: 2541086 - DNA, 25 bp, Homo sapien
tattttcacccaagtaggcctagcc

SEQ ID NO: 2541087 - DNA, 25 bp, Homo sapien
taatgtgaccttgcaaataggcacc

SEQ ID NO: 2541088 - DNA, 25 bp, Homo sapien
ttccagaaggctagaaggctgccca

SEQ ID NO: 2541089 - DNA, 25 bp, Homo sapien
ttcactcagaacataggaagggcag

SEQ ID NO: 2541090 - DNA, 25 bp, Homo sapien
gcatttctagcagacttccccaggg

SEQ ID NO: 2541091 - DNA, 25 bp, Homo sapien
tgtcatcagggattcagaataggcc

SEQ ID NO: 2541092 - DNA, 25 bp, Homo sapien
gaataggcctgaatggcctccttat

SEQ ID NO: 2541093 - DNA, 25 bp, Homo sapien
agcccttgggagctgatgtcatcag

SEQ ID NO: 2541094 - DNA, 25 bp, Homo sapien
tacagttttgcttcctgcagcacag

SEQ ID NO: 2541095 - DNA, 25 bp, Homo sapien
taaccaagctaatttatagttgacg

SEQ ID NO: 2541096 - DNA, 25 bp, Homo sapien
ctagaagataaccaagctaatttat

SEQ ID NO: 2541097 - DNA, 25 bp, Homo sapien
ctaatttatagttgacgttgaagcc

SEQ ID NO: 2541098 - DNA, 25 bp, Homo sapien
tagttgacgttgaagccacataaaa

SEQ ID NO: 2541099 - DNA, 25 bp, Homo sapien
gctgaaaagggctcgtccacttgaa

SEQ ID NO: 2541100 - DNA, 25 bp, Homo sapien
catggagaccgacaaccagtggact

SEQ ID NO: 2541101 - DNA, 25 bp, Homo sapien
caaccctcaacgattgcaggtggct

SEQ ID NO: 2541102 - DNA, 25 bp, Homo sapien
gaaaatttaagccagcgaggaagca

SEQ ID NO: 2541103 - DNA, 25 bp, Homo sapien
gccgatcgtagcattcttactggat

SEQ ID NO: 2541104 - DNA, 25 bp, Homo sapien
atttgagggtgggatgctgatttgg

SEQ ID NO: 2541105 - DNA, 25 bp, Homo sapien
gggagccacactgccgatcgtagca

SEQ ID NO: 2541106 - DNA, 25 bp, Homo sapien
tagcattcttactggatttgagggt

SEQ ID NO: 2541107 - DNA, 25 bp, Homo sapien
taaactgaaaacctcacacgtggct

SEQ ID NO: 2541108 - DNA, 25 bp, Homo sapien
tacctgaccgtccaatgtgccttgc

SEQ ID NO: 2541109 - DNA, 25 bp, Homo sapien
gctgcacatgtatcgtacacacagg

SEQ ID NO: 2541110 - DNA, 25 bp, Homo sapien
catccccgggtgctgacttgatgaa

SEQ ID NO: 2541111 - DNA, 25 bp, Homo sapien
caggcaagcgaatggctgtcagccc

SEQ ID NO: 2541112 - DNA, 25 bp, Homo sapien
tggcaacgcggcatgcaaaagacgc

SEQ ID NO: 2541113 - DNA, 25 bp, Homo sapien
caaaagacgcaagcgtgctgcgcag

SEQ ID NO: 2541114 - DNA, 25 bp, Homo sapien
ctccggcagagacgcaggactgctg

SEQ ID NO: 2541115 - DNA, 25 bp, Homo sapien
cagcgccaggaggacgtactgggca

SEQ ID NO: 2541116 - DNA, 25 bp, Homo sapien
ttggctccggatttggcagatgaca

SEQ ID NO: 2541117 - DNA, 25 bp, Homo sapien
tagtgcatcaccttgggcatcaaca

SEQ ID NO: 2541118 - DNA, 25 bp, Homo sapien
agtgtagaatgtgtgaagagtctcc

SEQ ID NO: 2541119 - DNA, 25 bp, Homo sapien
ctctgcaaaccagagcagcggcagg

SEQ ID NO: 2541120 - DNA, 25 bp, Homo sapien
ggaatctcccctggcaaagagcttg

SEQ ID NO: 2541121 - DNA, 25 bp, Homo sapien
gatgtgctgccagaaggaatctccc

SEQ ID NO: 2541122 - DNA, 25 bp, Homo sapien
taaaaactcacatctcctacagggc

SEQ ID NO: 2541123 - DNA, 25 bp, Homo sapien
ggttcagtactatccccagcttcag

SEQ ID NO: 2541124 - DNA, 25 bp, Homo sapien
ggtaggccccagagaatcacaaaag

SEQ ID NO: 2541125 - DNA, 25 bp, Homo sapien
gaagaccaatgcgacacctgggaaa

SEQ ID NO: 2541126 - DNA, 25 bp, Homo sapien
ggctatcaaggtcgacatcaacagt

SEQ ID NO: 2541127 - DNA, 25 bp, Homo sapien
tgatactgcagaaacgtcacaggca

SEQ ID NO: 2541128 - DNA, 25 bp, Homo sapien
cgacagatttcatgtagaggctcag

SEQ ID NO: 2541129 - DNA, 25 bp, Homo sapien
ccaatgcctgcgacagatttcatgt

SEQ ID NO: 2541130 - DNA, 25 bp, Homo sapien
tgcagtttcacagagcagttcatgg

SEQ ID NO: 2541131 - DNA, 25 bp, Homo sapien
cagctgcagtttcacagagcagttc

SEQ ID NO: 2541132 - DNA, 25 bp, Homo sapien
taaggtatgcaagatagccacacgc

SEQ ID NO: 2541133 - DNA, 25 bp, Homo sapien
actgatgagagtagttcactgggcc

SEQ ID NO: 2541134 - DNA, 25 bp, Homo sapien
gatcacccgtgagtagaacagagtt

SEQ ID NO: 2541135 - DNA, 25 bp, Homo sapien
tccaggcccctgtggcaaagaagag

SEQ ID NO: 2541136 - DNA, 25 bp, Homo sapien
ttagggtgcaggccagtcaccgctt

SEQ ID NO: 2541137 - DNA, 25 bp, Homo sapien
gtgcctcctggttagggtgcaggcc

SEQ ID NO: 2541138 - DNA, 25 bp, Homo sapien
gagtgtgcctcctggttagggtgca

SEQ ID NO: 2541139 - DNA, 25 bp, Homo sapien
aacaaggagtgtgcctcctggttag

SEQ ID NO: 2541140 - DNA, 25 bp, Homo sapien
ccagaaccgggtcagcgttgaggaa

SEQ ID NO: 2541141 - DNA, 25 bp, Homo sapien
ctgccagaaccgggtcagcgttgag

SEQ ID NO: 2541142 - DNA, 25 bp, Homo sapien
ggtcagcgttgaggaagtgaggatg

SEQ ID NO: 2541143 - DNA, 25 bp, Homo sapien
gggtcagcgttgaggaagtgaggat

SEQ ID NO: 2541144 - DNA, 25 bp, Homo sapien
tccacaatctggaaaacgctgcctc

SEQ ID NO: 2541145 - DNA, 25 bp, Homo sapien
ctctcgtgcctcctccgtggaggag

SEQ ID NO: 2541146 - DNA, 25 bp, Homo sapien
gcagggacagtgtcctccacaatct

SEQ ID NO: 2541147 - DNA, 25 bp, Homo sapien
cacggagccgaactctggaggaatc

SEQ ID NO: 2541148 - DNA, 25 bp, Homo sapien
cactgcggaacgagaagatgttacg

SEQ ID NO: 2541149 - DNA, 25 bp, Homo sapien
caacactgcattgagggatgggcta

SEQ ID NO: 2541150 - DNA, 25 bp, Homo sapien
gatcaccaggaaggacgtgtccgtg

SEQ ID NO: 2541151 - DNA, 25 bp, Homo sapien
cccgagggtccaaactgagcaactt

SEQ ID NO: 2541152 - DNA, 25 bp, Homo sapien
tgggtagatggacccgttggcaaac

SEQ ID NO: 2541153 - DNA, 25 bp, Homo sapien
ttttgggagccacgaagcgataggt

SEQ ID NO: 2541154 - DNA, 25 bp, Homo sapien
gcaggtgctgacgttctgaattcca

SEQ ID NO: 2541155 - DNA, 25 bp, Homo sapien
gggatgccttcaaacacccctgact

SEQ ID NO: 2541156 - DNA, 25 bp, Homo sapien
cgggctgtagaactccagcgaggac

SEQ ID NO: 2541157 - DNA, 25 bp, Homo sapien
aggagtcatgaagggcggccacatt

SEQ ID NO: 2541158 - DNA, 25 bp, Homo sapien
gcactgatcggaatgccagaagtca

SEQ ID NO: 2541159 - DNA, 25 bp, Homo sapien
tccattgatcatgttgcactgatcg

SEQ ID NO: 2541160 - DNA, 25 bp, Homo sapien
gtccacgaggtggatcctgctgatg

SEQ ID NO: 2541161 - DNA, 25 bp, Homo sapien
gcccgttccacttgtccacgaggtg

SEQ ID NO: 2541162 - DNA, 25 bp, Homo sapien
tgaagagcccagagtcggagttgtt

SEQ ID NO: 2541163 - DNA, 25 bp, Homo sapien
ctgatgttctggacccccgtgaaca

SEQ ID NO: 2541164 - DNA, 25 bp, Homo sapien
cacatgatctcacccacagtgcggt

SEQ ID NO: 2541165 - DNA, 25 bp, Homo sapien
tcatgaaggcacgttcgccgagggt

SEQ ID NO: 2541166 - DNA, 25 bp, Homo sapien
aataatccgaacttgtccttgaagg

SEQ ID NO: 2541167 - DNA, 25 bp, Homo sapien
gggaacatgcctggaaagtacttgt

SEQ ID NO: 2541168 - DNA, 25 bp, Homo sapien
tgacgatgtagtcgctctccgagcc

SEQ ID NO: 2541169 - DNA, 25 bp, Homo sapien
tactcgaggaaggacacggtgtcgt

SEQ ID NO: 2541170 - DNA, 25 bp, Homo sapien
tctccgagccgtgggacttggaggg

SEQ ID NO: 2541171 - DNA, 25 bp, Homo sapien
tggaactggaaggtgcggtactcga

SEQ ID NO: 2541172 - DNA, 25 bp, Homo sapien
tctcgcccttcaggatctcgctggg

SEQ ID NO: 2541173 - DNA, 25 bp, Homo sapien
ggttcatgacgtcaaagaagtagac

SEQ ID NO: 2541174 - DNA, 25 bp, Homo sapien
cacatgttgaaggacaggctactgg

SEQ ID NO: 2541175 - DNA, 25 bp, Homo sapien
aaggggatagggatctccttccaca

SEQ ID NO: 2541176 - DNA, 25 bp, Homo sapien
tgttcaggtagcgaaacacttccac

SEQ ID NO: 2541177 - DNA, 25 bp, Homo sapien
aatcgtctggacgatctgcccggcc

SEQ ID NO: 2541178 - DNA, 25 bp, Homo sapien
gctcatctcatcgaagcagacactg

SEQ ID NO: 2541179 - DNA, 25 bp, Homo sapien
agagagtaccgcctgtttaggccgg

SEQ ID NO: 2541180 - DNA, 25 bp, Homo sapien
tatcttaaaccagcaggtaaattcc

SEQ ID NO: 2541181 - DNA, 25 bp, Homo sapien
cccaaagagctggattacgaacgtg

SEQ ID NO: 2541182 - DNA, 25 bp, Homo sapien
tcttttgggaacctgggtgatgtcc

SEQ ID NO: 2541183 - DNA, 25 bp, Homo sapien
ttcctgaaacagatgccacaaactg

SEQ ID NO: 2541184 - DNA, 25 bp, Homo sapien
caaggtcttgtaaaatagggcaacg

SEQ ID NO: 2541185 - DNA, 25 bp, Homo sapien
tgagatgacccaggacatgtgtctg

SEQ ID NO: 2541186 - DNA, 25 bp, Homo sapien
gagggcacccggctataaacatgcc

SEQ ID NO: 2541187 - DNA, 25 bp, Homo sapien
tcaagaacacgtcatgaagccagcc

SEQ ID NO: 2541188 - DNA, 25 bp, Homo sapien
tactctagggagctcatgcaaatgg

SEQ ID NO: 2541189 - DNA, 25 bp, Homo sapien
tctctgtggatctggctactctagg

SEQ ID NO: 2541190 - DNA, 25 bp, Homo sapien
tattccaacgtgtggatgggcccca

SEQ ID NO: 2541191 - DNA, 25 bp, Homo sapien
tgaacagcgctgcaatgaacgcggt

SEQ ID NO: 2541192 - DNA, 25 bp, Homo sapien
gacacactcaggtttacagacgcag

SEQ ID NO: 2541193 - DNA, 25 bp, Homo sapien
acagaggcgcggaaaaacagcatgc

SEQ ID NO: 2541194 - DNA, 25 bp, Homo sapien
agaagccaagcgagttcccgaacat

SEQ ID NO: 2541195 - DNA, 25 bp, Homo sapien
cacctgcaggctccggaatctagga

SEQ ID NO: 2541196 - DNA, 25 bp, Homo sapien
tcgtgagaacggcagaacgagccgt

SEQ ID NO: 2541197 - DNA, 25 bp, Homo sapien
tggatgcctccctcgtgagaacggc

SEQ ID NO: 2541198 - DNA, 25 bp, Homo sapien
acggcagaacgagccgtggtacatc

SEQ ID NO: 2541199 - DNA, 25 bp, Homo sapien
ttattttacaagctggatgcctccc

SEQ ID NO: 2541200 - DNA, 25 bp, Homo sapien
acaagcagaatggacctcggtctcc

SEQ ID NO: 2541201 - DNA, 25 bp, Homo sapien
attcctgcacggagcaaaatcacaa

SEQ ID NO: 2541202 - DNA, 25 bp, Homo sapien
gcaaaatcacaagcagaatggacct

SEQ ID NO: 2541203 - DNA, 25 bp, Homo sapien
ttcctgcacggagcaaaatcacaag

SEQ ID NO: 2541204 - DNA, 25 bp, Homo sapien
tggaaccaggcagaagtcattgaaa

SEQ ID NO: 2541205 - DNA, 25 bp, Homo sapien
taagactcaggcctacaatctgtgg

SEQ ID NO: 2541206 - DNA, 25 bp, Homo sapien
taatgtaataatggcgcccggccta

SEQ ID NO: 2541207 - DNA, 25 bp, Homo sapien
tgaaccttggcttaaatgctcaggg

SEQ ID NO: 2541208 - DNA, 25 bp, Homo sapien
ccagggagtaagttgaagctgtctc

SEQ ID NO: 2541209 - DNA, 25 bp, Homo sapien
cgccagggagtaagttgaagctgtc

SEQ ID NO: 2541210 - DNA, 25 bp, Homo sapien
tcagccgtcgccagggagtaagttg

SEQ ID NO: 2541211 - DNA, 25 bp, Homo sapien
ccgtcgccagggagtaagttgaagc

SEQ ID NO: 2541212 - DNA, 25 bp, Homo sapien
gtgatcagttctagggctttgcccc

SEQ ID NO: 2541213 - DNA, 25 bp, Homo sapien
ccacatgtccaaacaagggggtcct

SEQ ID NO: 2541214 - DNA, 25 bp, Homo sapien
ccaggttccgcaggggggctgataa

SEQ ID NO: 2541215 - DNA, 25 bp, Homo sapien
caggggggctgataaaggcgcagag

SEQ ID NO: 2541216 - DNA, 25 bp, Homo sapien
tgcacacagactcatgtagccaaag

SEQ ID NO: 2541217 - DNA, 25 bp, Homo sapien
gcctcccattcaagttgcacacaga

SEQ ID NO: 2541218 - DNA, 25 bp, Homo sapien
tgtagggacttctgttgttaaccaa

SEQ ID NO: 2541219 - DNA, 25 bp, Homo sapien
gggcagtccctgcttatgcgtgtgt

SEQ ID NO: 2541220 - DNA, 25 bp, Homo sapien
ttccagaagtggccgtcttgggctg

SEQ ID NO: 2541221 - DNA, 25 bp, Homo sapien
catgctaaggcacttggccgctgct

SEQ ID NO: 2541222 - DNA, 25 bp, Homo sapien
ggctctcttcttccatgctaaggca

SEQ ID NO: 2541223 - DNA, 25 bp, Homo sapien
tgggcgtgtcttcctgccttcacac

SEQ ID NO: 2541224 - DNA, 25 bp, Homo sapien
cacacacatcctactgacatactta

SEQ ID NO: 2541225 - DNA, 25 bp, Homo sapien
gacaattgaggacaatgtggttttc

SEQ ID NO: 2541226 - DNA, 25 bp, Homo sapien
cctgttcaactttaagccagatgct

SEQ ID NO: 2541227 - DNA, 25 bp, Homo sapien
tgaaataagcccccgaataactgag

SEQ ID NO: 2541228 - DNA, 25 bp, Homo sapien
ggcaccatcacgatcatgacagcgc

SEQ ID NO: 2541229 - DNA, 25 bp, Homo sapien
gacctgctgcttgatgagcgacggc

SEQ ID NO: 2541230 - DNA, 25 bp, Homo sapien
cttaaggacctgctgcttgatgagc

SEQ ID NO: 2541231 - DNA, 25 bp, Homo sapien
gcttgatgagcgacggcaccatcac

SEQ ID NO: 2541232 - DNA, 25 bp, Homo sapien
cggtggatccgggacggcagcgcac

SEQ ID NO: 2541233 - DNA, 25 bp, Homo sapien
cagtggttttatgccccatcgccgg

SEQ ID NO: 2541234 - DNA, 25 bp, Homo sapien
aggccgcagaggcacggtggatccg

SEQ ID NO: 2541235 - DNA, 25 bp, Homo sapien
ggactccgggcacgcaggccgcaga

SEQ ID NO: 2541236 - DNA, 25 bp, Homo sapien
gatgggacacgtgagccaccttggc

SEQ ID NO: 2541237 - DNA, 25 bp, Homo sapien
cgccatgctgtcactcgagagagaa

SEQ ID NO: 2541238 - DNA, 25 bp, Homo sapien
tggagagccctcatgtcacgccatg

SEQ ID NO: 2541239 - DNA, 25 bp, Homo sapien
atgtcacgccatgctgtcactcgag

SEQ ID NO: 2541240 - DNA, 25 bp, Homo sapien
cccaacggtgggagcaacccgagtg

SEQ ID NO: 2541241 - DNA, 25 bp, Homo sapien
tccgctgatgggtggtgggtaagaa

SEQ ID NO: 2541242 - DNA, 25 bp, Homo sapien
agcaacccgagtgtccgctgatggg

SEQ ID NO: 2541243 - DNA, 25 bp, Homo sapien
catccacacggtggaataggattca

SEQ ID NO: 2541244 - DNA, 25 bp, Homo sapien
cctgagggggaactgttcttaggct

SEQ ID NO: 2541245 - DNA, 25 bp, Homo sapien
aacgcagaaccacaaagctgtcagt

SEQ ID NO: 2541246 - DNA, 25 bp, Homo sapien
tcaacgcagaaccacaaagctgtca

SEQ ID NO: 2541247 - DNA, 25 bp, Homo sapien
cttcaacgcagaaccacaaagctgt

SEQ ID NO: 2541248 - DNA, 25 bp, Homo sapien
ctgcaatcccaggtcttggggaggc

SEQ ID NO: 2541249 - DNA, 25 bp, Homo sapien
cctgggcaacatggcgaaaccttgt

SEQ ID NO: 2541250 - DNA, 25 bp, Homo sapien
aggagttcgagagcagcctgggcaa

SEQ ID NO: 2541251 - DNA, 25 bp, Homo sapien
cgaggcagaaggatcacttgagtcc

SEQ ID NO: 2541252 - DNA, 25 bp, Homo sapien
aaaattttatgatgggcagcagttc

SEQ ID NO: 2541253 - DNA, 25 bp, Homo sapien
tggcacactgtagacacaaattgca

SEQ ID NO: 2541254 - DNA, 25 bp, Homo sapien
tggaaaaattttatgatgggcagca

SEQ ID NO: 2541255 - DNA, 25 bp, Homo sapien
tgcagatggaaaaattttatgatgg

SEQ ID NO: 2541256 - DNA, 25 bp, Homo sapien
ccccctcaagcgcaggaccaagtgc

SEQ ID NO: 2541257 - DNA, 25 bp, Homo sapien
ttagacaccccccctcaagcgcagg

SEQ ID NO: 2541258 - DNA, 25 bp, Homo sapien
tagacaccccccctcaagcgcagga

SEQ ID NO: 2541259 - DNA, 25 bp, Homo sapien
accccccctcaagcgcaggaccaag

SEQ ID NO: 2541260 - DNA, 25 bp, Homo sapien
gttgtagtcagacagggtgcgtcca

SEQ ID NO: 2541261 - DNA, 25 bp, Homo sapien
tagtcagacagggtgcgtccatctt

SEQ ID NO: 2541262 - DNA, 25 bp, Homo sapien
gacagggtgcgtccatcttccagct

SEQ ID NO: 2541263 - DNA, 25 bp, Homo sapien
cagacagggtgcgtccatcttccag

SEQ ID NO: 2541264 - DNA, 25 bp, Homo sapien
ccttatcttggatctttgccttgac

SEQ ID NO: 2541265 - DNA, 25 bp, Homo sapien
ttccttatcttggatctttgccttg

SEQ ID NO: 2541266 - DNA, 25 bp, Homo sapien
cttccttatcttggatctttgcctt

SEQ ID NO: 2541267 - DNA, 25 bp, Homo sapien
tccttatcttggatctttgccttga

SEQ ID NO: 2541268 - DNA, 25 bp, Homo sapien
tcagggtcttcacgaagatttgcat

SEQ ID NO: 2541269 - DNA, 25 bp, Homo sapien
gtcttcacgaagatttgcatcccac

SEQ ID NO: 2541270 - DNA, 25 bp, Homo sapien
cagggtcttcacgaagatttgcatc

SEQ ID NO: 2541271 - DNA, 25 bp, Homo sapien
gggtcttcacgaagatttgcatccc

SEQ ID NO: 2541272 - DNA, 25 bp, Homo sapien
gttgtagtcagacagggtgcgtcca

SEQ ID NO: 2541273 - DNA, 25 bp, Homo sapien
ctctgagacggagcaccaggtgcag

SEQ ID NO: 2541274 - DNA, 25 bp, Homo sapien
cagctgtttcccagcaaagatcaac

SEQ ID NO: 2541275 - DNA, 25 bp, Homo sapien
agggtgcgtccatcttccagctgtt

SEQ ID NO: 2541276 - DNA, 25 bp, Homo sapien
ctggtcaggagggatgccttccttg

SEQ ID NO: 2541277 - DNA, 25 bp, Homo sapien
gccttccttgtcttggatctttgcc

SEQ ID NO: 2541278 - DNA, 25 bp, Homo sapien
ttctcaatggtgtcactcggctcca

SEQ ID NO: 2541279 - DNA, 25 bp, Homo sapien
gatctttgccttgacattctcaatg

SEQ ID NO: 2541280 - DNA, 25 bp, Homo sapien
gagagtgatggtcttaccagtcagg

SEQ ID NO: 2541281 - DNA, 25 bp, Homo sapien
ttcgagagtgatggtcttaccagtc

SEQ ID NO: 2541282 - DNA, 25 bp, Homo sapien
tcgagagtgatggtcttaccagtca

SEQ ID NO: 2541283 - DNA, 25 bp, Homo sapien
cgagagtgatggtcttaccagtcag

SEQ ID NO: 2541284 - DNA, 25 bp, Homo sapien
ctctaagacggagcaccaggtgcag

SEQ ID NO: 2541285 - DNA, 25 bp, Homo sapien
tctaagacggagcaccaggtgcagg

SEQ ID NO: 2541286 - DNA, 25 bp, Homo sapien
tggactctttctggatgttgtagtc

SEQ ID NO: 2541287 - DNA, 25 bp, Homo sapien
gtggactctttctggatgttgtagt

SEQ ID NO: 2541288 - DNA, 25 bp, Homo sapien
ggactctttctggatgttgtagtca

SEQ ID NO: 2541289 - DNA, 25 bp, Homo sapien
gacagggtgcgtccatcttccagct

SEQ ID NO: 2541290 - DNA, 25 bp, Homo sapien
cagctgtttcccagcaaagatcaac

SEQ ID NO: 2541291 - DNA, 25 bp, Homo sapien
ccagctgtttcccagcaaagatcaa

SEQ ID NO: 2541292 - DNA, 25 bp, Homo sapien
agggtgcgtccatcttccagctgtt

SEQ ID NO: 2541293 - DNA, 25 bp, Homo sapien
ctggtcaggagggatgccttccttg

SEQ ID NO: 2541294 - DNA, 25 bp, Homo sapien
gccttccttgtcttggatctttgcc

SEQ ID NO: 2541295 - DNA, 25 bp, Homo sapien
tggtcaggagggatgccttccttgt

SEQ ID NO: 2541296 - DNA, 25 bp, Homo sapien
gatctttgccttgacattctcaatg

SEQ ID NO: 2541297 - DNA, 25 bp, Homo sapien
ttcgagagtgatggtcttaccagtc

SEQ ID NO: 2541298 - DNA, 25 bp, Homo sapien
tcgagagtgatggtcttaccagtca

SEQ ID NO: 2541299 - DNA, 25 bp, Homo sapien
gagagtgatggtcttaccagtcagg

SEQ ID NO: 2541300 - DNA, 25 bp, Homo sapien
cgagagtgatggtcttaccagtcag

SEQ ID NO: 2541301 - DNA, 25 bp, Homo sapien
tctaagacggagcaccaggtgcagg

SEQ ID NO: 2541302 - DNA, 25 bp, Homo sapien
agggtgcgtccatcttccagctgtt

SEQ ID NO: 2541303 - DNA, 25 bp, Homo sapien
gttgtagtcagacagggtgcgtcca

SEQ ID NO: 2541304 - DNA, 25 bp, Homo sapien
ctctaagacggagcaccaggtgcag

SEQ ID NO: 2541305 - DNA, 25 bp, Homo sapien
tcgagagtgatggtcttaccagtca

SEQ ID NO: 2541306 - DNA, 25 bp, Homo sapien
gagagtgatggtcttaccagtcagg

SEQ ID NO: 2541307 - DNA, 25 bp, Homo sapien
cgagagtgatggtcttaccagtcag

SEQ ID NO: 2541308 - DNA, 25 bp, Homo sapien
ctctgagacggagcaccaggtgcaa

SEQ ID NO: 2541309 - DNA, 25 bp, Homo sapien
tctgagacggagcaccaggtgcaag

SEQ ID NO: 2541310 - DNA, 25 bp, Homo sapien
cttccagctgttttccggcaaagat

SEQ ID NO: 2541311 - DNA, 25 bp, Homo sapien
gacagggtacgaccatcttccagct

SEQ ID NO: 2541312 - DNA, 25 bp, Homo sapien
agacagggtacgaccatcttccagc

SEQ ID NO: 2541313 - DNA, 25 bp, Homo sapien
ttccagctgttttccggcaaagatc

SEQ ID NO: 2541314 - DNA, 25 bp, Homo sapien
ctcaatggtgtcactcggctccact

SEQ ID NO: 2541315 - DNA, 25 bp, Homo sapien
ctggtcaggagggatgccttccttg

SEQ ID NO: 2541316 - DNA, 25 bp, Homo sapien
gccttccttgtcttggatctttgcc

SEQ ID NO: 2541317 - DNA, 25 bp, Homo sapien
gatctttgccttgacattctcaatg

SEQ ID NO: 2541318 - DNA, 25 bp, Homo sapien
gagagtgatggtcttaccagtcagg

SEQ ID NO: 2541319 - DNA, 25 bp, Homo sapien
tcgagagtgatggtcttaccagtca

SEQ ID NO: 2541320 - DNA, 25 bp, Homo sapien
cgagagtgatggtcttaccagtcag

SEQ ID NO: 2541321 - DNA, 25 bp, Homo sapien
ggtgcagggtagactctttctggat

SEQ ID NO: 2541322 - DNA, 25 bp, Homo sapien
ctctgagacggagcaccaggtgcag

SEQ ID NO: 2541323 - DNA, 25 bp, Homo sapien
caggtgcagggtagactctttctgg

SEQ ID NO: 2541324 - DNA, 25 bp, Homo sapien
accaggtgcagggtagactctttct

SEQ ID NO: 2541325 - DNA, 25 bp, Homo sapien
cagctgctttccggcaaagatcaac

SEQ ID NO: 2541326 - DNA, 25 bp, Homo sapien
ccagctgctttccggcaaagatcaa

SEQ ID NO: 2541327 - DNA, 25 bp, Homo sapien
ctttgctttgacgttctcgatagtg

SEQ ID NO: 2541328 - DNA, 25 bp, Homo sapien
gatctttgctttgacgttctcgata

SEQ ID NO: 2541329 - DNA, 25 bp, Homo sapien
gctttgacgttctcgatagtgtcac

SEQ ID NO: 2541330 - DNA, 25 bp, Homo sapien
ttgctttgacgttctcgatagtgtc

SEQ ID NO: 2541331 - DNA, 25 bp, Homo sapien
ctgttttccggcaaagatcaacctc

SEQ ID NO: 2541332 - DNA, 25 bp, Homo sapien
cctctgctgatcagaaggaatgcct

SEQ ID NO: 2541333 - DNA, 25 bp, Homo sapien
ttccttatcttggatctttgccttg

SEQ ID NO: 2541334 - DNA, 25 bp, Homo sapien
aagatcaacctctgctgatcagaag

SEQ ID NO: 2541335 - DNA, 25 bp, Homo sapien
tcgagggtgatggtcttaccagtca

SEQ ID NO: 2541336 - DNA, 25 bp, Homo sapien
gagggtgatggtcttaccagtcagg

SEQ ID NO: 2541337 - DNA, 25 bp, Homo sapien
gtcttcacgaagatctgcatcccac

SEQ ID NO: 2541338 - DNA, 25 bp, Homo sapien
accagtcagggtcttcacgaagatc

SEQ ID NO: 2541339 - DNA, 25 bp, Homo sapien
ctctgagacggagcaccaggtgcag

SEQ ID NO: 2541340 - DNA, 25 bp, Homo sapien
gtcagacagggtgcgcccatcttcc

SEQ ID NO: 2541341 - DNA, 25 bp, Homo sapien
tagtcagacagggtgcgcccatctt

SEQ ID NO: 2541342 - DNA, 25 bp, Homo sapien
gttgtagtcagacagggtgcgccca

SEQ ID NO: 2541343 - DNA, 25 bp, Homo sapien
tggatctttgctttgacgttctcga

SEQ ID NO: 2541344 - DNA, 25 bp, Homo sapien
ggatctttgctttgacgttctcgat

SEQ ID NO: 2541345 - DNA, 25 bp, Homo sapien
aagggtgatggtcttgccagtgagt

SEQ ID NO: 2541346 - DNA, 25 bp, Homo sapien
ctcgacctcaagggtgatggtcttg

SEQ ID NO: 2541347 - DNA, 25 bp, Homo sapien
gggtgatggtcttgccagtgagtgt

SEQ ID NO: 2541348 - DNA, 25 bp, Homo sapien
cctcaagggtgatggtcttgccagt

SEQ ID NO: 2541349 - DNA, 25 bp, Homo sapien
ctctgagacggagcaccaggtgcag

SEQ ID NO: 2541350 - DNA, 25 bp, Homo sapien
gacggagcaccaggtgcagggtgga

SEQ ID NO: 2541351 - DNA, 25 bp, Homo sapien
tgagacggagcaccaggtgcagggt

SEQ ID NO: 2541352 - DNA, 25 bp, Homo sapien
tctgagacggagcaccaggtgcagg

SEQ ID NO: 2541353 - DNA, 25 bp, Homo sapien
tagtcagacagggtgcgcccatctt

SEQ ID NO: 2541354 - DNA, 25 bp, Homo sapien
gttgtagtcagacagggtgcgccca

SEQ ID NO: 2541355 - DNA, 25 bp, Homo sapien
gtcagacagggtgcgcccatcttcc

SEQ ID NO: 2541356 - DNA, 25 bp, Homo sapien
agacagggtgcgcccatcttccagc

SEQ ID NO: 2541357 - DNA, 25 bp, Homo sapien
tgttttccagcaaagatcagcctct

SEQ ID NO: 2541358 - DNA, 25 bp, Homo sapien
tcagcctctgctggtcaggagggat

SEQ ID NO: 2541359 - DNA, 25 bp, Homo sapien
gatcagcctctgctggtcaggaggg

SEQ ID NO: 2541360 - DNA, 25 bp, Homo sapien
agcctctgctggtcaggagggatgc

SEQ ID NO: 2541361 - DNA, 25 bp, Homo sapien
tttgccttgacattctcgatggtgt

SEQ ID NO: 2541362 - DNA, 25 bp, Homo sapien
tgccttgacattctcgatggtgtca

SEQ ID NO: 2541363 - DNA, 25 bp, Homo sapien
gatctttgccttgacattctcgatg

SEQ ID NO: 2541364 - DNA, 25 bp, Homo sapien
tctttgccttgacattctcgatggt

SEQ ID NO: 2541365 - DNA, 25 bp, Homo sapien
accagagaaactgacgcctcactta

SEQ ID NO: 2541366 - DNA, 25 bp, Homo sapien
catagttcaaaaccggagcttcagc

SEQ ID NO: 2541367 - DNA, 25 bp, Homo sapien
gataggtacataaaaccgaccagag

SEQ ID NO: 2541368 - DNA, 25 bp, Homo sapien
aaacggccagaatttagcggacaat

SEQ ID NO: 2541369 - DNA, 25 bp, Homo sapien
tccggcgcctgtcgattcaggagag

SEQ ID NO: 2541370 - DNA, 25 bp, Homo sapien
aggtccggcgcctgtcgattcagga

SEQ ID NO: 2541371 - DNA, 25 bp, Homo sapien
cagaggtccggcgcctgtcgattca

SEQ ID NO: 2541372 - DNA, 25 bp, Homo sapien
gcgcctgtcgattcaggagagccta

SEQ ID NO: 2541373 - DNA, 25 bp, Homo sapien
caacagaacgggtgacgtcacgaca

SEQ ID NO: 2541374 - DNA, 25 bp, Homo sapien
tcctgcgacggagaaaagcctaccg

SEQ ID NO: 2541375 - DNA, 25 bp, Homo sapien
tgacgtcacgacacgacgagggcgc

SEQ ID NO: 2541376 - DNA, 25 bp, Homo sapien
ccaccctgcattataagccaacaga

SEQ ID NO: 2541377 - DNA, 25 bp, Homo sapien
cgcattagcgaaggcctcaagacct

SEQ ID NO: 2541378 - DNA, 25 bp, Homo sapien
aaccgagttctccagtcagtgacaa

SEQ ID NO: 2541379 - DNA, 25 bp, Homo sapien
tgacaaacttcacgtcagggtcccc

SEQ ID NO: 2541380 - DNA, 25 bp, Homo sapien
cccgcaacagacgacaaaccgagtt

SEQ ID NO: 2541381 - DNA, 25 bp, Homo sapien
agttcagggcaaccttgctcgcgga

SEQ ID NO: 2541382 - DNA, 25 bp, Homo sapien
cagactacagcccttggcggtctct

SEQ ID NO: 2541383 - DNA, 25 bp, Homo sapien
tccattcaagactcgggaacagccg

SEQ ID NO: 2541384 - DNA, 25 bp, Homo sapien
ggaacagccgccattttgctgcgct

SEQ ID NO: 2541385 - DNA, 25 bp, Homo sapien
caagtgacgatcacagcgatccaca

SEQ ID NO: 2541386 - DNA, 25 bp, Homo sapien
caaacaagaactgcgacccaaatcc

SEQ ID NO: 2541387 - DNA, 25 bp, Homo sapien
agcgatccacaaacaagaactgcga

SEQ ID NO: 2541388 - DNA, 25 bp, Homo sapien
gatcacagcgatccacaaacaagaa

SEQ ID NO: 2541389 - DNA, 25 bp, Homo sapien
taaggccgagtcttatgagcagcgg

SEQ ID NO: 2541390 - DNA, 25 bp, Homo sapien
cagaatcgccgagaagggactactt

SEQ ID NO: 2541391 - DNA, 25 bp, Homo sapien
ctgcgacggaactagctgtgccaca

SEQ ID NO: 2541392 - DNA, 25 bp, Homo sapien
cacccggcgcgtccttatataatca

SEQ ID NO: 2541393 - DNA, 25 bp, Homo sapien
tttaatgataaagaaccacggacca

SEQ ID NO: 2541394 - DNA, 25 bp, Homo sapien
caagtagtgcctggaatcacaatgc

SEQ ID NO: 2541395 - DNA, 25 bp, Homo sapien
gtggtttcagtcatcaagtcaggtt

SEQ ID NO: 2541396 - DNA, 25 bp, Homo sapien
cacacctggtgtgagaatctgagct

SEQ ID NO: 2541397 - DNA, 25 bp, Homo sapien
ccggggcctcatacatgcaaagcat

SEQ ID NO: 2541398 - DNA, 25 bp, Homo sapien
atggagatgccggggatcgaacccg

SEQ ID NO: 2541399 - DNA, 25 bp, Homo sapien
gcctcatacatgcaaagcatgcgct

SEQ ID NO: 2541400 - DNA, 25 bp, Homo sapien
cgaacccggggcctcatacatgcaa

SEQ ID NO: 2541401 - DNA, 25 bp, Homo sapien
tttggacgcataacaattgtgcaca

SEQ ID NO: 2541402 - DNA, 25 bp, Homo sapien
cacatttatgaggtgtggtgtgatg

SEQ ID NO: 2541403 - DNA, 25 bp, Homo sapien
ggtgtgatgttgtgatctatgtaca

SEQ ID NO: 2541404 - DNA, 25 bp, Homo sapien
gctatactctattcttaaaggcgtt

SEQ ID NO: 2541405 - DNA, 25 bp, Homo sapien
tcccgcgtgacaggcggggatactc

SEQ ID NO: 2541406 - DNA, 25 bp, Homo sapien
tcgaaccccggtctcccgcgtgaca

SEQ ID NO: 2541407 - DNA, 25 bp, Homo sapien
gatactcaccactatactaacgagg

SEQ ID NO: 2541408 - DNA, 25 bp, Homo sapien
gggatactcaccactatactaacga

SEQ ID NO: 2541409 - DNA, 25 bp, Homo sapien
cagggacctttagatcttcagtcta

SEQ ID NO: 2541410 - DNA, 25 bp, Homo sapien
aacgctctcccaactgagctatttc

SEQ ID NO: 2541411 - DNA, 25 bp, Homo sapien
gatcgaaccagggacctttagatct

SEQ ID NO: 2541412 - DNA, 25 bp, Homo sapien
cgctctcccaactgagctatttcgg

SEQ ID NO: 2541413 - DNA, 25 bp, Homo sapien
taacgtaattcgtaactctgtttgc

SEQ ID NO: 2541414 - DNA, 25 bp, Homo sapien
aactacgcgcaaccaatcatgtaga

SEQ ID NO: 2541415 - DNA, 25 bp, Homo sapien
gcaactacgcgcaaccaatcatgta

SEQ ID NO: 2541416 - DNA, 25 bp, Homo sapien
tacgcgcaaccaatcatgtagatta

SEQ ID NO: 2541417 - DNA, 25 bp, Homo sapien
gaaaagggcagcttggatgtcacgc

SEQ ID NO: 2541418 - DNA, 25 bp, Homo sapien
aaagggcagcttggatgtcacgctg

SEQ ID NO: 2541419 - DNA, 25 bp, Homo sapien
cagcttggatgtcacgctggtcttg

SEQ ID NO: 2541420 - DNA, 25 bp, Homo sapien
tggaaaagggcagcttggatgtcac

SEQ ID NO: 2541421 - DNA, 25 bp, Homo sapien
cggggtgggtgcgatcaagagtgaa

SEQ ID NO: 2541422 - DNA, 25 bp, Homo sapien
tacggggtgggtgcgatcaagagtg

SEQ ID NO: 2541423 - DNA, 25 bp, Homo sapien
acggggtgggtgcgatcaagagtga

SEQ ID NO: 2541424 - DNA, 25 bp, Homo sapien
ctacggggtgggtgcgatcaagagt

SEQ ID NO: 2541425 - DNA, 25 bp, Homo sapien
tcgaaccccggtctcccgcgtgaca

SEQ ID NO: 2541426 - DNA, 25 bp, Homo sapien
tcccgcgtgacaggcggggatactc

SEQ ID NO: 2541427 - DNA, 25 bp, Homo sapien
gatactcaccactatactaacgagg

SEQ ID NO: 2541428 - DNA, 25 bp, Homo sapien
gggatactcaccactatactaacga

SEQ ID NO: 2541429 - DNA, 25 bp, Homo sapien
gacaaatgctggacgtggttgcata

SEQ ID NO: 2541430 - DNA, 25 bp, Homo sapien
gaactttatcttcgaagacactgga

SEQ ID NO: 2541431 - DNA, 25 bp, Homo sapien
gaacgcgaccagattcaggtttgaa

SEQ ID NO: 2541432 - DNA, 25 bp, Homo sapien
gttgcatagtatttcctaacggagg

SEQ ID NO: 2541433 - DNA, 25 bp, Homo sapien
ggcctccttaaagcagacagcagtg

SEQ ID NO: 2541434 - DNA, 25 bp, Homo sapien
gcgggtcaagcgaaacgtgtctgca

SEQ ID NO: 2541435 - DNA, 25 bp, Homo sapien
tcagaattgctagcccatgtgcggt

SEQ ID NO: 2541436 - DNA, 25 bp, Homo sapien
aatcaggtcatggtaacggttgcac

SEQ ID NO: 2541437 - DNA, 25 bp, Homo sapien
agatgagatgcccactccctgttgc

SEQ ID NO: 2541438 - DNA, 25 bp, Homo sapien
ctaacatctgggacggctgtgaggc

SEQ ID NO: 2541439 - DNA, 25 bp, Homo sapien
taacacaggaaaggcgttggcggcc

SEQ ID NO: 2541440 - DNA, 25 bp, Homo sapien
caacataatagtcgtgtggccccag

SEQ ID NO: 2541441 - DNA, 25 bp, Homo sapien
acgggatcgagctctcatggatgag

SEQ ID NO: 2541442 - DNA, 25 bp, Homo sapien
ccttcatacgggatcgagctctcat

SEQ ID NO: 2541443 - DNA, 25 bp, Homo sapien
cgggccagatggcacgggcggcagc

SEQ ID NO: 2541444 - DNA, 25 bp, Homo sapien
cagcacccttcatacgggatcgagc

SEQ ID NO: 2541445 - DNA, 25 bp, Homo sapien
caggtggtcacggtcgcacggtgac

SEQ ID NO: 2541446 - DNA, 25 bp, Homo sapien
cacggtcgcacggtgacaggctgct

SEQ ID NO: 2541447 - DNA, 25 bp, Homo sapien
tggtcacggtcgcacggtgacaggc

SEQ ID NO: 2541448 - DNA, 25 bp, Homo sapien
tcacggtcgcacggtgacaggctgc

SEQ ID NO: 2541449 - DNA, 25 bp, Homo sapien
gggggccaggctttctcgatatcgg

SEQ ID NO: 2541450 - DNA, 25 bp, Homo sapien
ctgtggaagccactcacagtactca

SEQ ID NO: 2541451 - DNA, 25 bp, Homo sapien
caggctttctcgatatcggggtgca

SEQ ID NO: 2541452 - DNA, 25 bp, Homo sapien
ctcgatatcggggtgcatggcctgt

SEQ ID NO: 2541453 - DNA, 25 bp, Homo sapien
cgtggggccagatccttctgccaag

SEQ ID NO: 2541454 - DNA, 25 bp, Homo sapien
ctcctcaggtggcaaaaagctggcc

SEQ ID NO: 2541455 - DNA, 25 bp, Homo sapien
gccaagccagggctgaccgtgcaca

SEQ ID NO: 2541456 - DNA, 25 bp, Homo sapien
ggctgaccgtgcacaaagcacaaag

SEQ ID NO: 2541457 - DNA, 25 bp, Homo sapien
tctctgcaaccagggctcgcagaag

SEQ ID NO: 2541458 - DNA, 25 bp, Homo sapien
agaaggctctccgtacggggctgca

SEQ ID NO: 2541459 - DNA, 25 bp, Homo sapien
tgcaaccagggctcgcagaaggctc

SEQ ID NO: 2541460 - DNA, 25 bp, Homo sapien
agccttctctgcaaccagggctcgc

SEQ ID NO: 2541461 - DNA, 25 bp, Homo sapien
aatgcacgttggtggcaggcagcca

SEQ ID NO: 2541462 - DNA, 25 bp, Homo sapien
gcaggaatgcacgttggtggcaggc

SEQ ID NO: 2541463 - DNA, 25 bp, Homo sapien
ggaatgcacgttggtggcaggcagc

SEQ ID NO: 2541464 - DNA, 25 bp, Homo sapien
gcaggcatcaccaccccaccagccc

SEQ ID NO: 2541465 - DNA, 25 bp, Homo sapien
agcagacagctccggtatgaggcca

SEQ ID NO: 2541466 - DNA, 25 bp, Homo sapien
agctccggtatgaggccagcttgcg

SEQ ID NO: 2541467 - DNA, 25 bp, Homo sapien
gacagctccggtatgaggccagctt

SEQ ID NO: 2541468 - DNA, 25 bp, Homo sapien
cagacagctccggtatgaggccagc

SEQ ID NO: 2541469 - DNA, 25 bp, Homo sapien
aggaaccgggcaaagtgcttgtagc

SEQ ID NO: 2541470 - DNA, 25 bp, Homo sapien
ttgtagcggtcaatcccctctggaa

SEQ ID NO: 2541471 - DNA, 25 bp, Homo sapien
cgggcaaagtgcttgtagcggtcaa

SEQ ID NO: 2541472 - DNA, 25 bp, Homo sapien
aaagtgcttgtagcggtcaatcccc

SEQ ID NO: 2541473 - DNA, 25 bp, Homo sapien
ccgtgtgtccgagaagcccacggct

SEQ ID NO: 2541474 - DNA, 25 bp, Homo sapien
aggaccgtgtgtccgagaagcccac

SEQ ID NO: 2541475 - DNA, 25 bp, Homo sapien
gacaggaccgtgtgtccgagaagcc

SEQ ID NO: 2541476 - DNA, 25 bp, Homo sapien
ccgagacacacacgtccgggggcag

SEQ ID NO: 2541477 - DNA, 25 bp, Homo sapien
ccgctcggggcagtatgtaggggct

SEQ ID NO: 2541478 - DNA, 25 bp, Homo sapien
agggccgggatccactggacctcca

SEQ ID NO: 2541479 - DNA, 25 bp, Homo sapien
gatccactggacctccacgctagag

SEQ ID NO: 2541480 - DNA, 25 bp, Homo sapien
cagcagggccgggatccactggacc

SEQ ID NO: 2541481 - DNA, 25 bp, Homo sapien
gaggaagctggggttacagcggcac

SEQ ID NO: 2541482 - DNA, 25 bp, Homo sapien
ggacaaggggctgtccgcaggcctc

SEQ ID NO: 2541483 - DNA, 25 bp, Homo sapien
attagcgtcaccatcgggggacaag

SEQ ID NO: 2541484 - DNA, 25 bp, Homo sapien
ggttacagcggcaccctccgtggga

SEQ ID NO: 2541485 - DNA, 25 bp, Homo sapien
agctctttgaaaaggacggagctgg

SEQ ID NO: 2541486 - DNA, 25 bp, Homo sapien
gatgaagacagggtcgtcgaggaga

SEQ ID NO: 2541487 - DNA, 25 bp, Homo sapien
ttagtggtctccacgatttcctggt

SEQ ID NO: 2541488 - DNA, 25 bp, Homo sapien
caaactcggggagctctttgaaaag

SEQ ID NO: 2541489 - DNA, 25 bp, Homo sapien
aggcctgccgtcacgatctgtcgca

SEQ ID NO: 2541490 - DNA, 25 bp, Homo sapien
tgtcgcaggtaggtcacctggctct

SEQ ID NO: 2541491 - DNA, 25 bp, Homo sapien
tcgctctggaccctgcgggccaagt

SEQ ID NO: 2541492 - DNA, 25 bp, Homo sapien
ttgtaggcgttcctccacttgtcct

SEQ ID NO: 2541493 - DNA, 25 bp, Homo sapien
cgttcaatacgggaacaggacagcc

SEQ ID NO: 2541494 - DNA, 25 bp, Homo sapien
ccttgggtgcaagaacgtggcctgc

SEQ ID NO: 2541495 - DNA, 25 bp, Homo sapien
caaaccttgggatctgcttaaatgg

SEQ ID NO: 2541496 - DNA, 25 bp, Homo sapien
tagaaagtcccaaccatgctcagtg

SEQ ID NO: 2541497 - DNA, 25 bp, Homo sapien
agcccgttggcttcgcaaaactggg

SEQ ID NO: 2541498 - DNA, 25 bp, Homo sapien
gctttgtaccgcagcccgttggctt

SEQ ID NO: 2541499 - DNA, 25 bp, Homo sapien
agctggcatactcacaggctcccac

SEQ ID NO: 2541500 - DNA, 25 bp, Homo sapien
catcatggctttgtaccgcagcccg

SEQ ID NO: 2541501 - DNA, 25 bp, Homo sapien
ttcatctgggccacccgggcccgct

SEQ ID NO: 2541502 - DNA, 25 bp, Homo sapien
gcagcaccatgaggtcgccgagctt

SEQ ID NO: 2541503 - DNA, 25 bp, Homo sapien
gagctcctcgtcactggccgctggt

SEQ ID NO: 2541504 - DNA, 25 bp, Homo sapien
ctggtgagctcctcgtcactggccg

SEQ ID NO: 2541505 - DNA, 25 bp, Homo sapien
tggtccaaacacaggcagattgacc

SEQ ID NO: 2541506 - DNA, 25 bp, Homo sapien
agatggtccaaacacaggcagattg

SEQ ID NO: 2541507 - DNA, 25 bp, Homo sapien
gatggtccaaacacaggcagattga

SEQ ID NO: 2541508 - DNA, 25 bp, Homo sapien
aagatggtccaaacacaggcagatt

SEQ ID NO: 2541509 - DNA, 25 bp, Homo sapien
tcacagtggacgagagatggtggca

SEQ ID NO: 2541510 - DNA, 25 bp, Homo sapien
ttcacagtggacgagagatggtggc

SEQ ID NO: 2541511 - DNA, 25 bp, Homo sapien
acagtggacgagagatggtggcagc

SEQ ID NO: 2541512 - DNA, 25 bp, Homo sapien
cattcacagtggacgagagatggtg

SEQ ID NO: 2541513 - DNA, 25 bp, Homo sapien
tttatcattaagctgccaaaggcag

SEQ ID NO: 2541514 - DNA, 25 bp, Homo sapien
caagcccttgagaaactcaagttgc

SEQ ID NO: 2541515 - DNA, 25 bp, Homo sapien
cttttatcattaagctgccaaaggc

SEQ ID NO: 2541516 - DNA, 25 bp, Homo sapien
cccttttatcattaagctgccaaag

SEQ ID NO: 2541517 - DNA, 25 bp, Homo sapien
ccacgatggtgatggcatagggcag

SEQ ID NO: 2541518 - DNA, 25 bp, Homo sapien
cagccgtgttgtcggctcagtgcca

SEQ ID NO: 2541519 - DNA, 25 bp, Homo sapien
aatgtggccattgtccggcccagcg

SEQ ID NO: 2541520 - DNA, 25 bp, Homo sapien
catcttagcgtagcggggtgccacg

SEQ ID NO: 2541521 - DNA, 25 bp, Homo sapien
gcagggcacccagtgcgatcaacag

SEQ ID NO: 2541522 - DNA, 25 bp, Homo sapien
cagtgcgatcaacagctcctcggcg

SEQ ID NO: 2541523 - DNA, 25 bp, Homo sapien
agggcacccagtgcgatcaacagct

SEQ ID NO: 2541524 - DNA, 25 bp, Homo sapien
ctttctggggcggttgcagggcacc

SEQ ID NO: 2541525 - DNA, 25 bp, Homo sapien
acaggcctccgggtgatttctggag

SEQ ID NO: 2541526 - DNA, 25 bp, Homo sapien
aactgctcgaagtcaccaaaaaccg

SEQ ID NO: 2541527 - DNA, 25 bp, Homo sapien
accaaaaaccgcagatgaatacagc

SEQ ID NO: 2541528 - DNA, 25 bp, Homo sapien
aaggattaagtcttcaacaggcctc

SEQ ID NO: 2541529 - DNA, 25 bp, Homo sapien
tgccagggatggtaagcgacgtctc

SEQ ID NO: 2541530 - DNA, 25 bp, Homo sapien
ccaccacgtacttgatgccagggat

SEQ ID NO: 2541531 - DNA, 25 bp, Homo sapien
tgacacggaaggaggatacgccagt

SEQ ID NO: 2541532 - DNA, 25 bp, Homo sapien
gtcgtagtagcgtttcttgaccttc

SEQ ID NO: 2541533 - DNA, 25 bp, Homo sapien
ggggccagcagagagtacagcggga

SEQ ID NO: 2541534 - DNA, 25 bp, Homo sapien
ccagcagagagtacagcgggagcac

SEQ ID NO: 2541535 - DNA, 25 bp, Homo sapien
gcagagagtacagcgggagcacgtg

SEQ ID NO: 2541536 - DNA, 25 bp, Homo sapien
gggccagcagagagtacagcgggag

SEQ ID NO: 2541537 - DNA, 25 bp, Homo sapien
agatcgaggtcggagtccagggccc

SEQ ID NO: 2541538 - DNA, 25 bp, Homo sapien
atcccccaggtccagatcgaggtcg

SEQ ID NO: 2541539 - DNA, 25 bp, Homo sapien
cttcgcctgccggtaacaccgagta

SEQ ID NO: 2541540 - DNA, 25 bp, Homo sapien
taacaccgagtaatgatccaagttg

SEQ ID NO: 2541541 - DNA, 25 bp, Homo sapien
tcctccaccgagtctttctgatcgt

SEQ ID NO: 2541542 - DNA, 25 bp, Homo sapien
gcatttcctccaccgagtctttctg

SEQ ID NO: 2541543 - DNA, 25 bp, Homo sapien
gagtctttctgatcgtcgtcctttt

SEQ ID NO: 2541544 - DNA, 25 bp, Homo sapien
caccgagtctttctgatcgtcgtcc

SEQ ID NO: 2541545 - DNA, 25 bp, Homo sapien
ttcctgagcctgcggcacagcgcat

SEQ ID NO: 2541546 - DNA, 25 bp, Homo sapien
ggcacagcgcatgcacctcagcctg

SEQ ID NO: 2541547 - DNA, 25 bp, Homo sapien
ctcagcctgccccgtcaggaacacc

SEQ ID NO: 2541548 - DNA, 25 bp, Homo sapien
gagggtgggaaagccttcctgagcc

SEQ ID NO: 2541549 - DNA, 25 bp, Homo sapien
ccgcttgttgaaatgcacagtcact

SEQ ID NO: 2541550 - DNA, 25 bp, Homo sapien
cactgtagtcttccagcggtgtccg

SEQ ID NO: 2541551 - DNA, 25 bp, Homo sapien
ttccggaagcactcgccactgtagt

SEQ ID NO: 2541552 - DNA, 25 bp, Homo sapien
gcatccggtggatcttgcagacctt

SEQ ID NO: 2541553 - DNA, 25 bp, Homo sapien
cggcggcttggcgaagagccgtggg

SEQ ID NO: 2541554 - DNA, 25 bp, Homo sapien
cacccgcagcgtggccgacatgatg

SEQ ID NO: 2541555 - DNA, 25 bp, Homo sapien
agccgtgggttctgggtgaagtcct

SEQ ID NO: 2541556 - DNA, 25 bp, Homo sapien
cagcgtggccgacatgatgagcagc

SEQ ID NO: 2541557 - DNA, 25 bp, Homo sapien
aaggaagcccaagcctctgacagag

SEQ ID NO: 2541558 - DNA, 25 bp, Homo sapien
acagagctggggggggcctagggct

SEQ ID NO: 2541559 - DNA, 25 bp, Homo sapien
tgctcatggcagcagcccagggtac

SEQ ID NO: 2541560 - DNA, 25 bp, Homo sapien
cagcagcccagggtacaacggggaa

SEQ ID NO: 2541561 - DNA, 25 bp, Homo sapien
aggccgatgaggatgtccgtgtaca

SEQ ID NO: 2541562 - DNA, 25 bp, Homo sapien
cttagcccggagagtcacaatgcgg

SEQ ID NO: 2541563 - DNA, 25 bp, Homo sapien
accttgtaccgcagcagcaggaagt

SEQ ID NO: 2541564 - DNA, 25 bp, Homo sapien
tccgtgtacacgctcctctcgtggg

SEQ ID NO: 2541565 - DNA, 25 bp, Homo sapien
tccgtcatgaacttgattctggtct

SEQ ID NO: 2541566 - DNA, 25 bp, Homo sapien
gcacaccatccgtcatgaacttgat

SEQ ID NO: 2541567 - DNA, 25 bp, Homo sapien
ggatttctttaagcagcacaccatc

SEQ ID NO: 2541568 - DNA, 25 bp, Homo sapien
gcagcacaccatccgtcatgaactt

SEQ ID NO: 2541569 - DNA, 25 bp, Homo sapien
cgtgacaccgatgatgctgtcttca

SEQ ID NO: 2541570 - DNA, 25 bp, Homo sapien
atggccacggcggccactcggcggg

SEQ ID NO: 2541571 - DNA, 25 bp, Homo sapien
ctcggcggggctccgtgacaccgat

SEQ ID NO: 2541572 - DNA, 25 bp, Homo sapien
gggctccgtgacaccgatgatgctg

SEQ ID NO: 2541573 - DNA, 25 bp, Homo sapien
ctgtgtggtcttcccgctgccggtc

SEQ ID NO: 2541574 - DNA, 25 bp, Homo sapien
ggtctcaccacacacgatgacgatg

SEQ ID NO: 2541575 - DNA, 25 bp, Homo sapien
catgattacttgttcttcggagaga

SEQ ID NO: 2541576 - DNA, 25 bp, Homo sapien
gaattgggagcttcagccgttcctc

SEQ ID NO: 2541577 - DNA, 25 bp, Homo sapien
tgacacatgggtgctgaacagatgt

SEQ ID NO: 2541578 - DNA, 25 bp, Homo sapien
tgggtgctgaacagatgtgcctgct

SEQ ID NO: 2541579 - DNA, 25 bp, Homo sapien
cacatgggtgctgaacagatgtgcc

SEQ ID NO: 2541580 - DNA, 25 bp, Homo sapien
acagatgtgcctgctggggaacaga

SEQ ID NO: 2541581 - DNA, 25 bp, Homo sapien
taatcacaaacacggggtggcgaac

SEQ ID NO: 2541582 - DNA, 25 bp, Homo sapien
ctagattcttaatcacaaacacggg

SEQ ID NO: 2541583 - DNA, 25 bp, Homo sapien
tcttaatcacaaacacggggtggcg

SEQ ID NO: 2541584 - DNA, 25 bp, Homo sapien
attcttaatcacaaacacggggtgg

SEQ ID NO: 2541585 - DNA, 25 bp, Homo sapien
gggagcggttcacggggatgaagac

SEQ ID NO: 2541586 - DNA, 25 bp, Homo sapien
gaagacggcgggcttagccagggcc

SEQ ID NO: 2541587 - DNA, 25 bp, Homo sapien
ggatgaagacggcgggcttagccag

SEQ ID NO: 2541588 - DNA, 25 bp, Homo sapien
ctgcatttccggggagcggttcacg

SEQ ID NO: 2541589 - DNA, 25 bp, Homo sapien
cagctggaggaggaggaacagtcat

SEQ ID NO: 2541590 - DNA, 25 bp, Homo sapien
gctgcagctggaggaggaggaacag

SEQ ID NO: 2541591 - DNA, 25 bp, Homo sapien
tgcagctggaggaggaggaacagtc

SEQ ID NO: 2541592 - DNA, 25 bp, Homo sapien
ctgggcagtggtggggctgcagctg

SEQ ID NO: 2541593 - DNA, 25 bp, Homo sapien
cagcggcgacgcttccggtgggcac

SEQ ID NO: 2541594 - DNA, 25 bp, Homo sapien
cggcacgggctgactgctgggtgct

SEQ ID NO: 2541595 - DNA, 25 bp, Homo sapien
ctcctcagctgagggccagcggcga

SEQ ID NO: 2541596 - DNA, 25 bp, Homo sapien
agaggtgccacggtggtccccacac

SEQ ID NO: 2541597 - DNA, 25 bp, Homo sapien
ggcccggggctaccacctcgtcagc

SEQ ID NO: 2541598 - DNA, 25 bp, Homo sapien
tggcccggggctaccacctcgtcag

SEQ ID NO: 2541599 - DNA, 25 bp, Homo sapien
cccggggctaccacctcgtcagcct

SEQ ID NO: 2541600 - DNA, 25 bp, Homo sapien
ctggcccggggctaccacctcgtca

SEQ ID NO: 2541601 - DNA, 25 bp, Homo sapien
gatacatgcggttcccagtgcctag

SEQ ID NO: 2541602 - DNA, 25 bp, Homo sapien
tttggtgtgatacatgcggttccca

SEQ ID NO: 2541603 - DNA, 25 bp, Homo sapien
ctcagcttcggaagcctggacttca

SEQ ID NO: 2541604 - DNA, 25 bp, Homo sapien
ggtgtgatacatgcggttcccagtg

SEQ ID NO: 2541605 - DNA, 25 bp, Homo sapien
aagggtgaggagtatccatgaaaca

SEQ ID NO: 2541606 - DNA, 25 bp, Homo sapien
acaacaggaaatttaaccacttgct

SEQ ID NO: 2541607 - DNA, 25 bp, Homo sapien
aggaaatttaaccacttgctagatg

SEQ ID NO: 2541608 - DNA, 25 bp, Homo sapien
taaaagtctctacttatagagatac

SEQ ID NO: 2541609 - DNA, 25 bp, Homo sapien
tcttcttccccggtagaacgagcgc

SEQ ID NO: 2541610 - DNA, 25 bp, Homo sapien
taagattttctgcagcactttcttc

SEQ ID NO: 2541611 - DNA, 25 bp, Homo sapien
tcaactcccttcaacgtgtccttgt

SEQ ID NO: 2541612 - DNA, 25 bp, Homo sapien
gaacgagcgcgttgcttgcatcaac

SEQ ID NO: 2541613 - DNA, 25 bp, Homo sapien
gccccttgatgttgtagcgccggcg

SEQ ID NO: 2541614 - DNA, 25 bp, Homo sapien
gctggcgccccttgatgttgtagcg

SEQ ID NO: 2541615 - DNA, 25 bp, Homo sapien
cttgatgttgtagcgccggcgcagc

SEQ ID NO: 2541616 - DNA, 25 bp, Homo sapien
ctgctggcgccccttgatgttgtag

SEQ ID NO: 2541617 - DNA, 25 bp, Homo sapien
cacgtgggttcccagaccaccaact

SEQ ID NO: 2541618 - DNA, 25 bp, Homo sapien
agggtgggcgctccagcggccggac

SEQ ID NO: 2541619 - DNA, 25 bp, Homo sapien
ccggaccagcagagcaatccgaaac

SEQ ID NO: 2541620 - DNA, 25 bp, Homo sapien
caatccgaaacccagcccacgtggg

SEQ ID NO: 2541621 - DNA, 25 bp, Homo sapien
caaggaatagctgcaaacatctccc

SEQ ID NO: 2541622 - DNA, 25 bp, Homo sapien
tgcaaacacatccgatagacacata

SEQ ID NO: 2541623 - DNA, 25 bp, Homo sapien
tctgcaaacacatccgatagacaca

SEQ ID NO: 2541624 - DNA, 25 bp, Homo sapien
ctgcaaacacatccgatagacacat

SEQ ID NO: 2541625 - DNA, 25 bp, Homo sapien
ggttcatccatactgcaggatcaat

SEQ ID NO: 2541626 - DNA, 25 bp, Homo sapien
tgggcttttcataggagtggagtcc

SEQ ID NO: 2541627 - DNA, 25 bp, Homo sapien
tcctgtacagtctggccttttgtgt

SEQ ID NO: 2541628 - DNA, 25 bp, Homo sapien
cattgaaagctcagcggtttgtagt

SEQ ID NO: 2541629 - DNA, 25 bp, Homo sapien
gacatcgccatttctagaagacctg

SEQ ID NO: 2541630 - DNA, 25 bp, Homo sapien
gaaatatttacgatacacaggtgct

SEQ ID NO: 2541631 - DNA, 25 bp, Homo sapien
tatacaaaagctatacccttgaggg

SEQ ID NO: 2541632 - DNA, 25 bp, Homo sapien
tccttttaggcagtctctgtgggca

SEQ ID NO: 2541633 - DNA, 25 bp, Homo sapien
tagcacaaggtataaataactcggg

SEQ ID NO: 2541634 - DNA, 25 bp, Homo sapien
cgcgctgggcctagatcaaatcttt

SEQ ID NO: 2541635 - DNA, 25 bp, Homo sapien
gcaaagctaatgatcgccagccctg

SEQ ID NO: 2541636 - DNA, 25 bp, Homo sapien
catggcattctgtgcgcaaagctaa

SEQ ID NO: 2541637 - DNA, 25 bp, Homo sapien
tccttgacaccctagcaaagatgct

SEQ ID NO: 2541638 - DNA, 25 bp, Homo sapien
tccactctggctaagtgtaggctct

SEQ ID NO: 2541639 - DNA, 25 bp, Homo sapien
gcttttgtggagtgcaaacctttca

SEQ ID NO: 2541640 - DNA, 25 bp, Homo sapien
ccattccatggaaccttgtagggtg

SEQ ID NO: 2541641 - DNA, 25 bp, Homo sapien
gtggtggcttaaaacgctgattgcc

SEQ ID NO: 2541642 - DNA, 25 bp, Homo sapien
tagcacacactaaaaacccaatgaa

SEQ ID NO: 2541643 - DNA, 25 bp, Homo sapien
agctgtggcagcgagtggtattatt

SEQ ID NO: 2541644 - DNA, 25 bp, Homo sapien
gatatgtaggaggtgcaccagtacc

SEQ ID NO: 2541645 - DNA, 25 bp, Homo sapien
ccttctgcccgctgccaatcccgct

SEQ ID NO: 2541646 - DNA, 25 bp, Homo sapien
ccccttctgcccgctgccaatcccg

SEQ ID NO: 2541647 - DNA, 25 bp, Homo sapien
cttctgcccgctgccaatcccgctg

SEQ ID NO: 2541648 - DNA, 25 bp, Homo sapien
ctgccccttctgcccgctgccaatc

SEQ ID NO: 2541649 - DNA, 25 bp, Homo sapien
gctagccatctttcattaaacaagg

SEQ ID NO: 2541650 - DNA, 25 bp, Homo sapien
agccagtatgcccggcctgtcaggt

SEQ ID NO: 2541651 - DNA, 25 bp, Homo sapien
atgcttcagtatcccacctaagtgg

SEQ ID NO: 2541652 - DNA, 25 bp, Homo sapien
cggcctgtcaggtgtggtcttaact

SEQ ID NO: 2541653 - DNA, 25 bp, Homo sapien
tctacctggctacactcctggctga

SEQ ID NO: 2541654 - DNA, 25 bp, Homo sapien
cagacgcaatactgtagcttaagcc

SEQ ID NO: 2541655 - DNA, 25 bp, Homo sapien
tctcaggacaacagcgaggatcagc

SEQ ID NO: 2541656 - DNA, 25 bp, Homo sapien
gccctgaggctaatctcccacattg

SEQ ID NO: 2541657 - DNA, 25 bp, Homo sapien
cctgacttgttccttacccagctgg

SEQ ID NO: 2541658 - DNA, 25 bp, Homo sapien
gctcactcaggcgttctcagcaaaa

SEQ ID NO: 2541659 - DNA, 25 bp, Homo sapien
ttaagcaagggcctaagcagccgat

SEQ ID NO: 2541660 - DNA, 25 bp, Homo sapien
tctctcctatgggtaatccccgtcg

SEQ ID NO: 2541661 - DNA, 25 bp, Homo sapien
gcacccgaatctgttctgctgtttt

SEQ ID NO: 2541662 - DNA, 25 bp, Homo sapien
ttcctcctgattcagtctgctgcag

SEQ ID NO: 2541663 - DNA, 25 bp, Homo sapien
gagatgctgactccagcggctttct

SEQ ID NO: 2541664 - DNA, 25 bp, Homo sapien
tctgttccatgtacggtattagtgt

SEQ ID NO: 2541665 - DNA, 25 bp, Homo sapien
gggctggagggagccaggtgcaggg

SEQ ID NO: 2541666 - DNA, 25 bp, Homo sapien
tttgcataaggggtggctggggctg

SEQ ID NO: 2541667 - DNA, 25 bp, Homo sapien
ggctggggctggagggagccaggtg

SEQ ID NO: 2541668 - DNA, 25 bp, Homo sapien
ctggggctggagggagccaggtgca

SEQ ID NO: 2541669 - DNA, 25 bp, Homo sapien
gaccatggccttagagtaggttgaa

SEQ ID NO: 2541670 - DNA, 25 bp, Homo sapien
tggccttagagtaggttgaatgtgt

SEQ ID NO: 2541671 - DNA, 25 bp, Homo sapien
gggccatgtggccaggaaagggagg

SEQ ID NO: 2541672 - DNA, 25 bp, Homo sapien
ccttagagtaggttgaatgtgttac

SEQ ID NO: 2541673 - DNA, 25 bp, Homo sapien
tagagagcgtcagaagtaaacagag

SEQ ID NO: 2541674 - DNA, 25 bp, Homo sapien
catgaaagagtctgagaaatcgctg

SEQ ID NO: 2541675 - DNA, 25 bp, Homo sapien
agtggacgtggtgtctttccaggaa

SEQ ID NO: 2541676 - DNA, 25 bp, Homo sapien
taaacagagggacacccaagtccca

SEQ ID NO: 2541677 - DNA, 25 bp, Homo sapien
tgcctgcagactcggcctgttgctg

SEQ ID NO: 2541678 - DNA, 25 bp, Homo sapien
ctgcctgcagactcggcctgttgct

SEQ ID NO: 2541679 - DNA, 25 bp, Homo sapien
tgcagactcggcctgttgctgctgg

SEQ ID NO: 2541680 - DNA, 25 bp, Homo sapien
gactcggcctgttgctgctggactc

SEQ ID NO: 2541681 - DNA, 25 bp, Homo sapien
caccaaggacgtcactgaggaaggg

SEQ ID NO: 2541682 - DNA, 25 bp, Homo sapien
gcagaagaagaagtagtaggaaata

SEQ ID NO: 2541683 - DNA, 25 bp, Homo sapien
gaagaagaagtagtaggaaatagtc

SEQ ID NO: 2541684 - DNA, 25 bp, Homo sapien
cacctctgtgtagcagtttagagca

SEQ ID NO: 2541685 - DNA, 25 bp, Homo sapien
tgtgaccccggctaggcactgccat

SEQ ID NO: 2541686 - DNA, 25 bp, Homo sapien
tcatacgtttgattgagcggttcct

SEQ ID NO: 2541687 - DNA, 25 bp, Homo sapien
tcgtagtagcttccgaccagtctca

SEQ ID NO: 2541688 - DNA, 25 bp, Homo sapien
catctctcacgcgtgccgtcgtagt

SEQ ID NO: 2541689 - DNA, 25 bp, Homo sapien
ttctttattggctacgggtgctggg

SEQ ID NO: 2541690 - DNA, 25 bp, Homo sapien
cagtggtcctattggctactgaagg

SEQ ID NO: 2541691 - DNA, 25 bp, Homo sapien
ccggcctcatcgactttctttattg

SEQ ID NO: 2541692 - DNA, 25 bp, Homo sapien
ctttctctcccgtgaaatgcagtgg

SEQ ID NO: 2541693 - DNA, 25 bp, Homo sapien
accacgctcagttatgtttttttat

SEQ ID NO: 2541694 - DNA, 25 bp, Homo sapien
aaacatactctcaaagcacctcttt

SEQ ID NO: 2541695 - DNA, 25 bp, Homo sapien
gcacctctttaagaggtgctattta

SEQ ID NO: 2541696 - DNA, 25 bp, Homo sapien
ctcaaagcacctctttaagaggtgc

SEQ ID NO: 2541697 - DNA, 25 bp, Homo sapien
tttacttagcggatcctctggcagg

SEQ ID NO: 2541698 - DNA, 25 bp, Homo sapien
gaatttcagcatgaccacaggaggt

SEQ ID NO: 2541699 - DNA, 25 bp, Homo sapien
cattgcttgcaggaggcaccgacat

SEQ ID NO: 2541700 - DNA, 25 bp, Homo sapien
ggaaggctcggctaaaacgtcaatc

SEQ ID NO: 2541701 - DNA, 25 bp, Homo sapien
tgagctcaagtaatcaacccacttc

SEQ ID NO: 2541702 - DNA, 25 bp, Homo sapien
ttttgggaggccgacagggtctcac

SEQ ID NO: 2541703 - DNA, 25 bp, Homo sapien
agctcaagtaatcaacccacttcgg

SEQ ID NO: 2541704 - DNA, 25 bp, Homo sapien
tgtgcccggccacctgcctcctttt

SEQ ID NO: 2541705 - DNA, 25 bp, Homo sapien
cttcattcggagtaggtgcgcatgc

SEQ ID NO: 2541706 - DNA, 25 bp, Homo sapien
atctgtgacacgaggagaggagccc

SEQ ID NO: 2541707 - DNA, 25 bp, Homo sapien
gactttgggcaacgcagcatccaag

SEQ ID NO: 2541708 - DNA, 25 bp, Homo sapien
tctgtgtggagagacactgccgctt

SEQ ID NO: 2541709 - DNA, 25 bp, Homo sapien
cctttgctcgggtcatggctgggat

SEQ ID NO: 2541710 - DNA, 25 bp, Homo sapien
ctggtgaggcgggacaaacttgtct

SEQ ID NO: 2541711 - DNA, 25 bp, Homo sapien
gagacgtttgcatctcacagcggga

SEQ ID NO: 2541712 - DNA, 25 bp, Homo sapien
tcctggcatttgagggcttcccgac

SEQ ID NO: 2541713 - DNA, 25 bp, Homo sapien
catggatgcaatgcaggccctggag

SEQ ID NO: 2541714 - DNA, 25 bp, Homo sapien
tccctcagggtccagtatgcctttg

SEQ ID NO: 2541715 - DNA, 25 bp, Homo sapien
ggttcttgtcgagatcatgtcatca

SEQ ID NO: 2541716 - DNA, 25 bp, Homo sapien
caagtcacgggtttccatagccagg

SEQ ID NO: 2541717 - DNA, 25 bp, Homo sapien
tttgcaccatagagggtatgcctcg

SEQ ID NO: 2541718 - DNA, 25 bp, Homo sapien
tgatcaccagggtagttgagctctt

SEQ ID NO: 2541719 - DNA, 25 bp, Homo sapien
agaacactgaccaactgcggctgct

SEQ ID NO: 2541720 - DNA, 25 bp, Homo sapien
cagtggttctcagttcagtgacagc

SEQ ID NO: 2541721 - DNA, 25 bp, Homo sapien
gaagacaaaccaaaggcagcggctg

SEQ ID NO: 2541722 - DNA, 25 bp, Homo sapien
cgttgtctttgctggcgtatttttc

SEQ ID NO: 2541723 - DNA, 25 bp, Homo sapien
tatagaacgttgtctttgctggcgt

SEQ ID NO: 2541724 - DNA, 25 bp, Homo sapien
tccaagctgtgcggggtgtaaagaa

SEQ ID NO: 2541725 - DNA, 25 bp, Homo sapien
ctcgctgtgatagctgccgtcagat

SEQ ID NO: 2541726 - DNA, 25 bp, Homo sapien
tgatagctgccgtcagattcatgtc

SEQ ID NO: 2541727 - DNA, 25 bp, Homo sapien
gctgtgatagctgccgtcagattca

SEQ ID NO: 2541728 - DNA, 25 bp, Homo sapien
tagctgccgtcagattcatgtcagg

SEQ ID NO: 2541729 - DNA, 25 bp, Homo sapien
tctggccatgggtcttcagttgtgc

SEQ ID NO: 2541730 - DNA, 25 bp, Homo sapien
tgggagcgctcttcttctggccatg

SEQ ID NO: 2541731 - DNA, 25 bp, Homo sapien
cacacctgcttgttggtggctacaa

SEQ ID NO: 2541732 - DNA, 25 bp, Homo sapien
ttttgtcttacggttgctgggagcg

SEQ ID NO: 2541733 - DNA, 25 bp, Homo sapien
atccgattctgttcctgaggttcca

SEQ ID NO: 2541734 - DNA, 25 bp, Homo sapien
tgtgggccacaccatggatacagct

SEQ ID NO: 2541735 - DNA, 25 bp, Homo sapien
cataatactcagtggtgaacaacgg

SEQ ID NO: 2541736 - DNA, 25 bp, Homo sapien
taatagcctggttgttattccctgt

SEQ ID NO: 2541737 - DNA, 25 bp, Homo sapien
atggcaatgttgctcttcgccggta

SEQ ID NO: 2541738 - DNA, 25 bp, Homo sapien
ccagtttcagccacgagatggcaat

SEQ ID NO: 2541739 - DNA, 25 bp, Homo sapien
aatgttgctcttcgccggtagcccg

SEQ ID NO: 2541740 - DNA, 25 bp, Homo sapien
ttcagccacgagatggcaatgttgc

SEQ ID NO: 2541741 - DNA, 25 bp, Homo sapien
cgagcccaggagagcgcgcagaggc

SEQ ID NO: 2541742 - DNA, 25 bp, Homo sapien
ccggcgcatgcgtctggggaggagc

SEQ ID NO: 2541743 - DNA, 25 bp, Homo sapien
gagcggcgcgctgggagcgagccat

SEQ ID NO: 2541744 - DNA, 25 bp, Homo sapien
agaggcgcagccgaggaagcgccgc

SEQ ID NO: 2541745 - DNA, 25 bp, Homo sapien
acatgaaaatactgccgtggctgca

SEQ ID NO: 2541746 - DNA, 25 bp, Homo sapien
tctgctttgtgtcctgaatgcctcc

SEQ ID NO: 2541747 - DNA, 25 bp, Homo sapien
gagtctgcggctctttgtttgctgg

SEQ ID NO: 2541748 - DNA, 25 bp, Homo sapien
ccgtgttgtgtactctgccgacgta

SEQ ID NO: 2541749 - DNA, 25 bp, Homo sapien
tggcgagcagagggggccaggtcag

SEQ ID NO: 2541750 - DNA, 25 bp, Homo sapien
cagagggggccaggtcagtggggtt

SEQ ID NO: 2541751 - DNA, 25 bp, Homo sapien
gagcagagggggccaggtcagtggg

SEQ ID NO: 2541752 - DNA, 25 bp, Homo sapien
gcgagcagagggggccaggtcagtg

SEQ ID NO: 2541753 - DNA, 25 bp, Homo sapien
ggtgtaactagtatcagttaggcaa

SEQ ID NO: 2541754 - DNA, 25 bp, Homo sapien
agggatggcagtagacagagttggg

SEQ ID NO: 2541755 - DNA, 25 bp, Homo sapien
tggcatgtctggtgtaactagtatc

SEQ ID NO: 2541756 - DNA, 25 bp, Homo sapien
catgtctggtgtaactagtatcagt

SEQ ID NO: 2541757 - DNA, 25 bp, Homo sapien
aaaggagtcagtgattccttttctg

SEQ ID NO: 2541758 - DNA, 25 bp, Homo sapien
ctggccggaggcatcgagcagctcc

SEQ ID NO: 2541759 - DNA, 25 bp, Homo sapien
gggagtgcagccgtggggacttgga

SEQ ID NO: 2541760 - DNA, 25 bp, Homo sapien
caggggctcgggtgggtccacggag

SEQ ID NO: 2541761 - DNA, 25 bp, Homo sapien
aaacgcccacgacatggcattctgg

SEQ ID NO: 2541762 - DNA, 25 bp, Homo sapien
cacgacatggcattctggggtagga

SEQ ID NO: 2541763 - DNA, 25 bp, Homo sapien
aacgcccacgacatggcattctggg

SEQ ID NO: 2541764 - DNA, 25 bp, Homo sapien
gcccacgacatggcattctggggta

SEQ ID NO: 2541765 - DNA, 25 bp, Homo sapien
catcagctcctttgattgggccacc

SEQ ID NO: 2541766 - DNA, 25 bp, Homo sapien
gactcggatttggttgtggatcaag

SEQ ID NO: 2541767 - DNA, 25 bp, Homo sapien
tctgcattgtcggttgtgactcgga

SEQ ID NO: 2541768 - DNA, 25 bp, Homo sapien
ccatgaacttgaggctgataaattc

SEQ ID NO: 2541769 - DNA, 25 bp, Homo sapien
gaagtcgatgaaagtgatattggca

SEQ ID NO: 2541770 - DNA, 25 bp, Homo sapien
gatttcaggaagtcgatgaaagtga

SEQ ID NO: 2541771 - DNA, 25 bp, Homo sapien
tattggcaaattgccagaaccacag

SEQ ID NO: 2541772 - DNA, 25 bp, Homo sapien
gcaaatcttgcaagaaatgtaggat

SEQ ID NO: 2541773 - DNA, 25 bp, Homo sapien
ctctttgtgggctagtttcaagtat

SEQ ID NO: 2541774 - DNA, 25 bp, Homo sapien
gctagtttcaagtatacctgtttgg

SEQ ID NO: 2541775 - DNA, 25 bp, Homo sapien
ccatccatgtagtagcttgctctca

SEQ ID NO: 2541776 - DNA, 25 bp, Homo sapien
gcatcaactccccatccatgtagta

SEQ ID NO: 2541777 - DNA, 25 bp, Homo sapien
ccacgattgacacctgtgagtttca

SEQ ID NO: 2541778 - DNA, 25 bp, Homo sapien
cacctgtgagtttcaatgtggccat

SEQ ID NO: 2541779 - DNA, 25 bp, Homo sapien
ccagcattccacgattgacacctgt

SEQ ID NO: 2541780 - DNA, 25 bp, Homo sapien
tgtgcaggtccagcattccacgatt

SEQ ID NO: 2541781 - DNA, 25 bp, Homo sapien
cagagctgctctggttgtgtgtagg

SEQ ID NO: 2541782 - DNA, 25 bp, Homo sapien
agagctgctctggttgtgtgtaggg

SEQ ID NO: 2541783 - DNA, 25 bp, Homo sapien
tttggtccacacaggagtatttgag

SEQ ID NO: 2541784 - DNA, 25 bp, Homo sapien
ttggtccacacaggagtatttgagc

SEQ ID NO: 2541785 - DNA, 25 bp, Homo sapien
tggtccacacaggagtatttgagca

SEQ ID NO: 2541786 - DNA, 25 bp, Homo sapien
ggtccacacaggagtatttgagcat

SEQ ID NO: 2541787 - DNA, 25 bp, Homo sapien
cctggcagtgactggcgctgcctct

SEQ ID NO: 2541788 - DNA, 25 bp, Homo sapien
ctggctttccgcttcatgacagtga

SEQ ID NO: 2541789 - DNA, 25 bp, Homo sapien
cagtattgactggactggaggtcgc

SEQ ID NO: 2541790 - DNA, 25 bp, Homo sapien
gacagtgatagctctcagtattgac

SEQ ID NO: 2541791 - DNA, 25 bp, Homo sapien
gaaaggcattcctcgatgattcttc

SEQ ID NO: 2541792 - DNA, 25 bp, Homo sapien
aaggcattcctcgatgattcttcag

SEQ ID NO: 2541793 - DNA, 25 bp, Homo sapien
tgttgaaaggcattcctcgatgatt

SEQ ID NO: 2541794 - DNA, 25 bp, Homo sapien
cctgttgaaaggcattcctcgatga

SEQ ID NO: 2541795 - DNA, 25 bp, Homo sapien
taactttactatgagatggcgatga

SEQ ID NO: 2541796 - DNA, 25 bp, Homo sapien
tgcggtgggacatagaatcctctcc

SEQ ID NO: 2541797 - DNA, 25 bp, Homo sapien
tcactgaaattcataccaagatggt

SEQ ID NO: 2541798 - DNA, 25 bp, Homo sapien
taattactggcaatgtcaggcaggt

SEQ ID NO: 2541799 - DNA, 25 bp, Homo sapien
gactgattagatgaagggatctgta

SEQ ID NO: 2541800 - DNA, 25 bp, Homo sapien
tgacagttgtcatcaagctatcatc

SEQ ID NO: 2541801 - DNA, 25 bp, Homo sapien
gctatcatcaagcactgggtgactg

SEQ ID NO: 2541802 - DNA, 25 bp, Homo sapien
aagggatctgtaagaccctttcaga

SEQ ID NO: 2541803 - DNA, 25 bp, Homo sapien
caggaatccgctgcactttcttctc

SEQ ID NO: 2541804 - DNA, 25 bp, Homo sapien
aggaatccgctgcactttcttctct

SEQ ID NO: 2541805 - DNA, 25 bp, Homo sapien
agctgaaaatgattagcttctgctg

SEQ ID NO: 2541806 - DNA, 25 bp, Homo sapien
aaaatgattagcttctgctggaaag

SEQ ID NO: 2541807 - DNA, 25 bp, Homo sapien
tttctaccgttggtcagtgcaggga

SEQ ID NO: 2541808 - DNA, 25 bp, Homo sapien
cgtgctgttgaatctctgctgttgc

SEQ ID NO: 2541809 - DNA, 25 bp, Homo sapien
tggaggctccctgtttctaccgttg

SEQ ID NO: 2541810 - DNA, 25 bp, Homo sapien
aacagattctgcgtttctggttctg

SEQ ID NO: 2541811 - DNA, 25 bp, Homo sapien
gaaacttgcaacttccacccacttg

SEQ ID NO: 2541812 - DNA, 25 bp, Homo sapien
cacccacttgtcttcccggtgagaa

SEQ ID NO: 2541813 - DNA, 25 bp, Homo sapien
ctggtccaggtattttagggcaaag

SEQ ID NO: 2541814 - DNA, 25 bp, Homo sapien
tttctggtccaggtattttagggca

SEQ ID NO: 2541815 - DNA, 25 bp, Homo sapien
gactgttttcagtgcccattttttc

SEQ ID NO: 2541816 - DNA, 25 bp, Homo sapien
cctgtcttaaattctgtgactgttt

SEQ ID NO: 2541817 - DNA, 25 bp, Homo sapien
ctgtgactgttttcagtgcccattt

SEQ ID NO: 2541818 - DNA, 25 bp, Homo sapien
ttctgtgactgttttcagtgcccat

SEQ ID NO: 2541819 - DNA, 25 bp, Homo sapien
caaccagatgtagaaagtcacaacc

SEQ ID NO: 2541820 - DNA, 25 bp, Homo sapien
tgtggagtaggtttggcccagacat

SEQ ID NO: 2541821 - DNA, 25 bp, Homo sapien
tccaaaccggaagtcagatgtgcag

SEQ ID NO: 2541822 - DNA, 25 bp, Homo sapien
cagacatagtcctgggtactggctg

SEQ ID NO: 2541823 - DNA, 25 bp, Homo sapien
ttcaccttcctcctgcggcaccagg

SEQ ID NO: 2541824 - DNA, 25 bp, Homo sapien
ttgccagtgactcgggccaggtgct

SEQ ID NO: 2541825 - DNA, 25 bp, Homo sapien
cctgagcattgccagtgactcgggc

SEQ ID NO: 2541826 - DNA, 25 bp, Homo sapien
gcattgccagtgactcgggccaggt

SEQ ID NO: 2541827 - DNA, 25 bp, Homo sapien
gcagaaagcagggtgacaaatgcag

SEQ ID NO: 2541828 - DNA, 25 bp, Homo sapien
agaggtgctgtttaaatgacatttt

SEQ ID NO: 2541829 - DNA, 25 bp, Homo sapien
gctctttacctgtgtcctgaggatt

SEQ ID NO: 2541830 - DNA, 25 bp, Homo sapien
agctgccttgggactcgagcctggt

SEQ ID NO: 2541831 - DNA, 25 bp, Homo sapien
cgagcctggtaattagctctttacc

SEQ ID NO: 2541832 - DNA, 25 bp, Homo sapien
tgggactcgagcctggtaattagct

SEQ ID NO: 2541833 - DNA, 25 bp, Homo sapien
gagaaagcttctgtgtctaccttgc

SEQ ID NO: 2541834 - DNA, 25 bp, Homo sapien
aagcttctgtgtctaccttgcccaa

SEQ ID NO: 2541835 - DNA, 25 bp, Homo sapien
ttctgtgtctaccttgcccaacagg

SEQ ID NO: 2541836 - DNA, 25 bp, Homo sapien
cactgagaaagcttctgtgtctacc

SEQ ID NO: 2541837 - DNA, 25 bp, Homo sapien
tagtacaactcttcggtcagcagca

SEQ ID NO: 2541838 - DNA, 25 bp, Homo sapien
cgtcctcagggcagatagtacaact

SEQ ID NO: 2541839 - DNA, 25 bp, Homo sapien
aatctgagtgtccatcgcacctggc

SEQ ID NO: 2541840 - DNA, 25 bp, Homo sapien
cctgactccagactttgcgggaaga

SEQ ID NO: 2541841 - DNA, 25 bp, Homo sapien
tgaagcttggtgagagtgtgctcca

SEQ ID NO: 2541842 - DNA, 25 bp, Homo sapien
cctgtcacggacatggaagtggtgc

SEQ ID NO: 2541843 - DNA, 25 bp, Homo sapien
attgcttattggtgcctgtcacgga

SEQ ID NO: 2541844 - DNA, 25 bp, Homo sapien
aaagagagacttttgaagcttggtg

SEQ ID NO: 2541845 - DNA, 25 bp, Homo sapien
ggcagatgctcagctgtccttgata

SEQ ID NO: 2541846 - DNA, 25 bp, Homo sapien
ctcgctggcggtcctggcagatgct

SEQ ID NO: 2541847 - DNA, 25 bp, Homo sapien
tgtccttgataaaggaacaggagtg

SEQ ID NO: 2541848 - DNA, 25 bp, Homo sapien
ttctgttcctgctgtgtacccgact

SEQ ID NO: 2541849 - DNA, 25 bp, Homo sapien
ccagggggcaaagcgtttcccagca

SEQ ID NO: 2541850 - DNA, 25 bp, Homo sapien
cagatccctggtagcaacatgaggg

SEQ ID NO: 2541851 - DNA, 25 bp, Homo sapien
gcgtttcccagcaattgagcagggc

SEQ ID NO: 2541852 - DNA, 25 bp, Homo sapien
gatccctggtagcaacatgagggag

SEQ ID NO: 2541853 - DNA, 25 bp, Homo sapien
gaacaaaatgaaagccgtccgtgaa

SEQ ID NO: 2541854 - DNA, 25 bp, Homo sapien
cattagagcctacaaagtcggtatg

SEQ ID NO: 2541855 - DNA, 25 bp, Homo sapien
aagaggaagcctggatatgccgtgt

SEQ ID NO: 2541856 - DNA, 25 bp, Homo sapien
cgtccgtgaatcttggctgagtttg

SEQ ID NO: 2541857 - DNA, 25 bp, Homo sapien
tccctaacaggtctgcacgagcagc

SEQ ID NO: 2541858 - DNA, 25 bp, Homo sapien
gaagatgcatgcttgtccctaacag

SEQ ID NO: 2541859 - DNA, 25 bp, Homo sapien
tctcttaaccgtgcacaggaggcct

SEQ ID NO: 2541860 - DNA, 25 bp, Homo sapien
cagctgtgagtgagctcgtccatcc

SEQ ID NO: 2541861 - DNA, 25 bp, Homo sapien
ttctcggtgacttctgaggatgggt

SEQ ID NO: 2541862 - DNA, 25 bp, Homo sapien
gatgacagctttctcggtgacttct

SEQ ID NO: 2541863 - DNA, 25 bp, Homo sapien
cagctttctcggtgacttctgagga

SEQ ID NO: 2541864 - DNA, 25 bp, Homo sapien
ctcggtgacttctgaggatgggttc

SEQ ID NO: 2541865 - DNA, 25 bp, Homo sapien
agtggctgcttcctctggtaggcct

SEQ ID NO: 2541866 - DNA, 25 bp, Homo sapien
ctgcttcctctggtaggcctctggt

SEQ ID NO: 2541867 - DNA, 25 bp, Homo sapien
tggctgcttcctctggtaggcctct

SEQ ID NO: 2541868 - DNA, 25 bp, Homo sapien
cttcctctggtaggcctctggttac

SEQ ID NO: 2541869 - DNA, 25 bp, Homo sapien
tggcaaccgtagccagccacgcaga

SEQ ID NO: 2541870 - DNA, 25 bp, Homo sapien
caacaacacccccacggtagttctg

SEQ ID NO: 2541871 - DNA, 25 bp, Homo sapien
catggcaaccgtagccagccacgca

SEQ ID NO: 2541872 - DNA, 25 bp, Homo sapien
ccagccacgcagagaaacactttga

SEQ ID NO: 2541873 - DNA, 25 bp, Homo sapien
tgggctctgtatactgtggccattt

SEQ ID NO: 2541874 - DNA, 25 bp, Homo sapien
cagtgggctctgtatactgtggcca

SEQ ID NO: 2541875 - DNA, 25 bp, Homo sapien
cacagtgggctctgtatactgtggc

SEQ ID NO: 2541876 - DNA, 25 bp, Homo sapien
agtgggctctgtatactgtggccat

SEQ ID NO: 2541877 - DNA, 25 bp, Homo sapien
attggaggttttgccgagattcggt

SEQ ID NO: 2541878 - DNA, 25 bp, Homo sapien
taattggaggttttgccgagattcg

SEQ ID NO: 2541879 - DNA, 25 bp, Homo sapien
gaggttttgccgagattcggtacca

SEQ ID NO: 2541880 - DNA, 25 bp, Homo sapien
cagagtaattggaggttttgccgag

SEQ ID NO: 2541881 - DNA, 25 bp, Homo sapien
gaagcctggtttgcaaggtaacgct

SEQ ID NO: 2541882 - DNA, 25 bp, Homo sapien
tttgcaaggtaacgctgccttctgc

SEQ ID NO: 2541883 - DNA, 25 bp, Homo sapien
gcagatgggaggctctttctttcct

SEQ ID NO: 2541884 - DNA, 25 bp, Homo sapien
ttgctcagaagcctggtttgcaagg

SEQ ID NO: 2541885 - DNA, 25 bp, Homo sapien
gggctcccgatcaaaggatagtgcc

SEQ ID NO: 2541886 - DNA, 25 bp, Homo sapien
gatagtgccgccttcccaacttggg

SEQ ID NO: 2541887 - DNA, 25 bp, Homo sapien
tcctggcagggtggtgagagggctg

SEQ ID NO: 2541888 - DNA, 25 bp, Homo sapien
gacagaaccccttgttatcccgatc

SEQ ID NO: 2541889 - DNA, 25 bp, Homo sapien
tccactgagatagctgataacaagg

SEQ ID NO: 2541890 - DNA, 25 bp, Homo sapien
gcctgaggcaccagttccattgtgt

SEQ ID NO: 2541891 - DNA, 25 bp, Homo sapien
tgcctgcaacgcaaaacagagagct

SEQ ID NO: 2541892 - DNA, 25 bp, Homo sapien
gcattgtttccactgagatagctga

SEQ ID NO: 2541893 - DNA, 25 bp, Homo sapien
aatgcgacagatacaggcaaaaatc

SEQ ID NO: 2541894 - DNA, 25 bp, Homo sapien
ttcaatgcagtagccctgctggcag

SEQ ID NO: 2541895 - DNA, 25 bp, Homo sapien
tcttcactggaaggaatgcgacaga

SEQ ID NO: 2541896 - DNA, 25 bp, Homo sapien
tttctcagggtgacggaagtggaca

SEQ ID NO: 2541897 - DNA, 25 bp, Homo sapien
tcctatggaaacaatagacaaatga

SEQ ID NO: 2541898 - DNA, 25 bp, Homo sapien
cataaaaacttctattgctcaagaa

SEQ ID NO: 2541899 - DNA, 25 bp, Homo sapien
ctatggaaacaatagacaaatgaca

SEQ ID NO: 2541900 - DNA, 25 bp, Homo sapien
catgcataaaaacttctattgctca

SEQ ID NO: 2541901 - DNA, 25 bp, Homo sapien
taataaagcccctaataggatttgc

SEQ ID NO: 2541902 - DNA, 25 bp, Homo sapien
cataagatcagatacaacatttcca

SEQ ID NO: 2541903 - DNA, 25 bp, Homo sapien
atcactgagcagcttaataaagccc

SEQ ID NO: 2541904 - DNA, 25 bp, Homo sapien
cacagctgaaatccataagatcaga

SEQ ID NO: 2541905 - DNA, 25 bp, Homo sapien
gaggtgaagtagaggttgggtagca

SEQ ID NO: 2541906 - DNA, 25 bp, Homo sapien
aactttggattgtgggctggactgg

SEQ ID NO: 2541907 - DNA, 25 bp, Homo sapien
cagggaactttggattgtgggctgg

SEQ ID NO: 2541908 - DNA, 25 bp, Homo sapien
tgaagtagaggttgggtagcaagac

SEQ ID NO: 2541909 - DNA, 25 bp, Homo sapien
acttcagggactgggaagttggcat

SEQ ID NO: 2541910 - DNA, 25 bp, Homo sapien
acttctgacttcagggactgggaag

SEQ ID NO: 2541911 - DNA, 25 bp, Homo sapien
tctgacttcagggactgggaagttg

SEQ ID NO: 2541912 - DNA, 25 bp, Homo sapien
tgacttcagggactgggaagttggc

SEQ ID NO: 2541913 - DNA, 25 bp, Homo sapien
tatccatgatcttgattgacccaga

SEQ ID NO: 2541914 - DNA, 25 bp, Homo sapien
gatccccggcagcattatccatgat

SEQ ID NO: 2541915 - DNA, 25 bp, Homo sapien
ttctgaagatccccggcagcattat

SEQ ID NO: 2541916 - DNA, 25 bp, Homo sapien
gatcttgattgacccagacagaaag

SEQ ID NO: 2541917 - DNA, 25 bp, Homo sapien
gggccccgtgatccgatgccagctt

SEQ ID NO: 2541918 - DNA, 25 bp, Homo sapien
caacaccaagttttactggagaccg

SEQ ID NO: 2541919 - DNA, 25 bp, Homo sapien
tagtgctgttcctcctgagtgatgg

SEQ ID NO: 2541920 - DNA, 25 bp, Homo sapien
cacatttgcaacaagggctccaaca

SEQ ID NO: 2541921 - DNA, 25 bp, Homo sapien
ccacaggtgtacatgtccaggtgag

SEQ ID NO: 2541922 - DNA, 25 bp, Homo sapien
tgttgtcagggtgactcacgtggac

SEQ ID NO: 2541923 - DNA, 25 bp, Homo sapien
cagcgtccgtgtcccctgcctctga

SEQ ID NO: 2541924 - DNA, 25 bp, Homo sapien
gggtggtgttgtcagggtgactcac

SEQ ID NO: 2541925 - DNA, 25 bp, Homo sapien
agggtgactcacgtggacactcagc

SEQ ID NO: 2541926 - DNA, 25 bp, Homo sapien
gaggacaaatgagagtagatgttgg

SEQ ID NO: 2541927 - DNA, 25 bp, Homo sapien
aggacaaatgagagtagatgttggg

SEQ ID NO: 2541928 - DNA, 25 bp, Homo sapien
ggacaaatgagagtagatgttgggg

SEQ ID NO: 2541929 - DNA, 25 bp, Homo sapien
cagccgggagctggccggcgcccat

SEQ ID NO: 2541930 - DNA, 25 bp, Homo sapien
gggacagccgggagctggccggcgc

SEQ ID NO: 2541931 - DNA, 25 bp, Homo sapien
ctcaacaacttcccttgcagccctg

SEQ ID NO: 2541932 - DNA, 25 bp, Homo sapien
aacaacttcccttgcagccctggga

SEQ ID NO: 2541933 - DNA, 25 bp, Homo sapien
cctttctggtgtgagggccatgggc

SEQ ID NO: 2541934 - DNA, 25 bp, Homo sapien
agtcccatgcgggacagagtccttt

SEQ ID NO: 2541935 - DNA, 25 bp, Homo sapien
ggtgtggtcatatgtatgggggaca

SEQ ID NO: 2541936 - DNA, 25 bp, Homo sapien
atatgtatgggggacaggatgtgtc

SEQ ID NO: 2541937 - DNA, 25 bp, Homo sapien
tcttcagagtgaatgccagctgctc

SEQ ID NO: 2541938 - DNA, 25 bp, Homo sapien
gtcttcagagtgaatgccagctgct

SEQ ID NO: 2541939 - DNA, 25 bp, Homo sapien
agataaagtgaataatacccgtcat

SEQ ID NO: 2541940 - DNA, 25 bp, Homo sapien
tgaataatacccgtcatctgtcttc

SEQ ID NO: 2541941 - DNA, 25 bp, Homo sapien
cacgtgctccagagactgaggaatt

SEQ ID NO: 2541942 - DNA, 25 bp, Homo sapien
taaactgaccagctttaatgagcag

SEQ ID NO: 2541943 - DNA, 25 bp, Homo sapien
cttttgtgcttttacctgaggccac

SEQ ID NO: 2541944 - DNA, 25 bp, Homo sapien
gtttgtttgattccacccagccgtg

SEQ ID NO: 2541945 - DNA, 25 bp, Homo sapien
ccctgggtgaggaggctacggcagc

SEQ ID NO: 2541946 - DNA, 25 bp, Homo sapien
gaggctacggcagcctcgggtccca

SEQ ID NO: 2541947 - DNA, 25 bp, Homo sapien
gtgaggaggctacggcagcctcggg

SEQ ID NO: 2541948 - DNA, 25 bp, Homo sapien
agcttcctgcacagggcggacagga

SEQ ID NO: 2541949 - DNA, 25 bp, Homo sapien
tgggggtggttcataccaatccatg

SEQ ID NO: 2541950 - DNA, 25 bp, Homo sapien
tccctgggaatggccgtgtccctcc

SEQ ID NO: 2541951 - DNA, 25 bp, Homo sapien
ccgtcctccctggaaatggccgcat

SEQ ID NO: 2541952 - DNA, 25 bp, Homo sapien
ctcctccctgggaatggccgtgtcc

SEQ ID NO: 2541953 - DNA, 25 bp, Homo sapien
ctgggaatggccgtgtccctcctct

SEQ ID NO: 2541954 - DNA, 25 bp, Homo sapien
tccctggaaatggatgcgtccctcc

SEQ ID NO: 2541955 - DNA, 25 bp, Homo sapien
tccccgtcctccctggaaatggatg

SEQ ID NO: 2541956 - DNA, 25 bp, Homo sapien
cctccctggaaatggatgcgtccct

SEQ ID NO: 2541957 - DNA, 25 bp, Homo sapien
ctggaaatggatgcgtccctcctcc

SEQ ID NO: 2541958 - DNA, 25 bp, Homo sapien
gggctacatctgagatcagggtcat

SEQ ID NO: 2541959 - DNA, 25 bp, Homo sapien
ggatccatgtccagatactctagaa

SEQ ID NO: 2541960 - DNA, 25 bp, Homo sapien
gttacgttcatagtcaagctcaggg

SEQ ID NO: 2541961 - DNA, 25 bp, Homo sapien
gattccacggagacagtaagtccat

SEQ ID NO: 2541962 - DNA, 25 bp, Homo sapien
cagctgaagaagctgctggattctt

SEQ ID NO: 2541963 - DNA, 25 bp, Homo sapien
agctgaagaagctgctggattcttt

SEQ ID NO: 2541964 - DNA, 25 bp, Homo sapien
tcagctgaagaagctgctggattct

SEQ ID NO: 2541965 - DNA, 25 bp, Homo sapien
gctgaagaagctgctggattctttt

SEQ ID NO: 2541966 - DNA, 25 bp, Homo sapien
ggagcttgcagatagagtaaatttc

SEQ ID NO: 2541967 - DNA, 25 bp, Homo sapien
gcacaggtgatggttgtaaggtccc

SEQ ID NO: 2541968 - DNA, 25 bp, Homo sapien
aaaatgtccactttgcacaggtgat

SEQ ID NO: 2541969 - DNA, 25 bp, Homo sapien
gatggttgtaaggtcccacactctt

SEQ ID NO: 2541970 - DNA, 25 bp, Homo sapien
tggccccaaccttgctgttcctctg

SEQ ID NO: 2541971 - DNA, 25 bp, Homo sapien
tcagctggccccaaccttgctgttc

SEQ ID NO: 2541972 - DNA, 25 bp, Homo sapien
agctggccccaaccttgctgttcct

SEQ ID NO: 2541973 - DNA, 25 bp, Homo sapien
gccccaaccttgctgttcctctgac

SEQ ID NO: 2541974 - DNA, 25 bp, Homo sapien
ttccttgcaaggtggtgacagactg

SEQ ID NO: 2541975 - DNA, 25 bp, Homo sapien
cgcacatagtttccttgcaaggtgg

SEQ ID NO: 2541976 - DNA, 25 bp, Homo sapien
ggctgaatccgcacatagtttcctt

SEQ ID NO: 2541977 - DNA, 25 bp, Homo sapien
ctttgctctgcaaggtgtggctgaa

SEQ ID NO: 2541978 - DNA, 25 bp, Homo sapien
ggcggacatccattcttgacaatgg

SEQ ID NO: 2541979 - DNA, 25 bp, Homo sapien
gggcggacatccattcttgacaatg

SEQ ID NO: 2541980 - DNA, 25 bp, Homo sapien
ctggggcggacatccattcttgaca

SEQ ID NO: 2541981 - DNA, 25 bp, Homo sapien
ggacatccattcttgacaatggctg

SEQ ID NO: 2541982 - DNA, 25 bp, Homo sapien
gaaggaggacgtgtgttcgagagat

SEQ ID NO: 2541983 - DNA, 25 bp, Homo sapien
acgtgtgttcgagagatattgattg

SEQ ID NO: 2541984 - DNA, 25 bp, Homo sapien
gagaggaaggaggacgtgtgttcga

SEQ ID NO: 2541985 - DNA, 25 bp, Homo sapien
aggacgtgtgttcgagagatattga

SEQ ID NO: 2541986 - DNA, 25 bp, Homo sapien
aagttggatagttcacattgggtgg

SEQ ID NO: 2541987 - DNA, 25 bp, Homo sapien
ctggaagttggatagttcacattgg

SEQ ID NO: 2541988 - DNA, 25 bp, Homo sapien
gctctgaagttcgatgaggatcatg

SEQ ID NO: 2541989 - DNA, 25 bp, Homo sapien
gaagttggatagttcacattgggtg

SEQ ID NO: 2541990 - DNA, 25 bp, Homo sapien
ctcatctcctcagttaactgatttt

SEQ ID NO: 2541991 - DNA, 25 bp, Homo sapien
actcatctcctcagttaactgattt

SEQ ID NO: 2541992 - DNA, 25 bp, Homo sapien
cactcatctcctcagttaactgatt

SEQ ID NO: 2541993 - DNA, 25 bp, Homo sapien
ccagatgccacagttgatagggctg

SEQ ID NO: 2541994 - DNA, 25 bp, Homo sapien
gggctggctcaatcagttttagaga

SEQ ID NO: 2541995 - DNA, 25 bp, Homo sapien
ccacagttgatagggctggattgga

SEQ ID NO: 2541996 - DNA, 25 bp, Homo sapien
ggctggattggaatggcaggtccca

SEQ ID NO: 2541997 - DNA, 25 bp, Homo sapien
ggcactggataaagctcatccccaa

SEQ ID NO: 2541998 - DNA, 25 bp, Homo sapien
actggataaagctcatccccaacag

SEQ ID NO: 2541999 - DNA, 25 bp, Homo sapien
ctgggcactggataaagctcatccc

SEQ ID NO: 2542000 - DNA, 25 bp, Homo sapien
ggataaagctcatccccaacagcct

SEQ ID NO: 2542001 - DNA, 25 bp, Homo sapien
tgaggagtggtatgagcctttctac

SEQ ID NO: 2542002 - DNA, 25 bp, Homo sapien
cacatgaaatgccaggacatatggc

SEQ ID NO: 2542003 - DNA, 25 bp, Homo sapien
tgatgttcccaacacatgaaatgcc

SEQ ID NO: 2542004 - DNA, 25 bp, Homo sapien
ggtgttgaagatgccctgtattata

SEQ ID NO: 2542005 - DNA, 25 bp, Homo sapien
agctaaatgtgtacttgctggataa

SEQ ID NO: 2542006 - DNA, 25 bp, Homo sapien
agcagcacttggattggtactcgga

SEQ ID NO: 2542007 - DNA, 25 bp, Homo sapien
gcacttggattggtactcggaatct

SEQ ID NO: 2542008 - DNA, 25 bp, Homo sapien
ttatgttgccccaatgattttcttc

SEQ ID NO: 2542009 - DNA, 25 bp, Homo sapien
acaattattagaatattgtaagcat

SEQ ID NO: 2542010 - DNA, 25 bp, Homo sapien
acacaattattagaatattgtaagc

SEQ ID NO: 2542011 - DNA, 25 bp, Homo sapien
cacaattattagaatattgtaagca

SEQ ID NO: 2542012 - DNA, 25 bp, Homo sapien
caattattagaatattgtaagcatt

SEQ ID NO: 2542013 - DNA, 25 bp, Homo sapien
ctttcctgtgctggaaaggactcac

SEQ ID NO: 2542014 - DNA, 25 bp, Homo sapien
gtgtagatcctgcagactgcgtgga

SEQ ID NO: 2542015 - DNA, 25 bp, Homo sapien
aaggtgtagatcctgcagactgcgt

SEQ ID NO: 2542016 - DNA, 25 bp, Homo sapien
ggtgtagatcctgcagactgcgtgg

SEQ ID NO: 2542017 - DNA, 25 bp, Homo sapien
aggtgtagatcctgcagactgcgtg

SEQ ID NO: 2542018 - DNA, 25 bp, Homo sapien
tcttgtataacactgggacaaaggg

SEQ ID NO: 2542019 - DNA, 25 bp, Homo sapien
ccttgagctctgtttgatttacaca

SEQ ID NO: 2542020 - DNA, 25 bp, Homo sapien
taatatacagtgagggagggccatc

SEQ ID NO: 2542021 - DNA, 25 bp, Homo sapien
ctgggtctccatgcaggatgtcagg

SEQ ID NO: 2542022 - DNA, 25 bp, Homo sapien
tatgtcttcaggttcttgatggcag

SEQ ID NO: 2542023 - DNA, 25 bp, Homo sapien
gaggtagatatttagatgtccttaa

SEQ ID NO: 2542024 - DNA, 25 bp, Homo sapien
tagaggaagctatgtcttcaggttc

SEQ ID NO: 2542025 - DNA, 25 bp, Homo sapien
ccttaagtctggcatagaggaagct

SEQ ID NO: 2542026 - DNA, 25 bp, Homo sapien
ggtgtatagccccactctattgttt

SEQ ID NO: 2542027 - DNA, 25 bp, Homo sapien
tatagccccactctattgtttttgg

SEQ ID NO: 2542028 - DNA, 25 bp, Homo sapien
tcaggtggtgtatagccccactcta

SEQ ID NO: 2542029 - DNA, 25 bp, Homo sapien
aggtggtgtatagccccactctatt

SEQ ID NO: 2542030 - DNA, 25 bp, Homo sapien
catgagaacagcagatctcagactg

SEQ ID NO: 2542031 - DNA, 25 bp, Homo sapien
tcagactgaatcttcagcctatgtc

SEQ ID NO: 2542032 - DNA, 25 bp, Homo sapien
ccatgagaacagcagatctcagact

SEQ ID NO: 2542033 - DNA, 25 bp, Homo sapien
tgagaacagcagatctcagactgaa

SEQ ID NO: 2542034 - DNA, 25 bp, Homo sapien
tgcgacgttgcactggtcatgatgc

SEQ ID NO: 2542035 - DNA, 25 bp, Homo sapien
gctgctgctggtttgctttgcgacg

SEQ ID NO: 2542036 - DNA, 25 bp, Homo sapien
ttattcagcggtcccagggtcctcc

SEQ ID NO: 2542037 - DNA, 25 bp, Homo sapien
tccctggccgtgaagacgtgctgaa

SEQ ID NO: 2542038 - DNA, 25 bp, Homo sapien
tcctgttgagaaagcgcaggccctg

SEQ ID NO: 2542039 - DNA, 25 bp, Homo sapien
attttccaggagcaaatgtatcatc

SEQ ID NO: 2542040 - DNA, 25 bp, Homo sapien
actcttagttagcacggtgacccca

SEQ ID NO: 2542041 - DNA, 25 bp, Homo sapien
tcatcagtctgggtgttagttcgga

SEQ ID NO: 2542042 - DNA, 25 bp, Homo sapien
gacagactaacacatcacccttatg

SEQ ID NO: 2542043 - DNA, 25 bp, Homo sapien
taggtattcctttatggcaacaaag

SEQ ID NO: 2542044 - DNA, 25 bp, Homo sapien
catgtcatgcactggccaccagttc

SEQ ID NO: 2542045 - DNA, 25 bp, Homo sapien
ttgctccttgtctcgccatgtcatg

SEQ ID NO: 2542046 - DNA, 25 bp, Homo sapien
tggcctttaccaaaaggggctcata

SEQ ID NO: 2542047 - DNA, 25 bp, Homo sapien
caaaaggggctcatacacaacttct

SEQ ID NO: 2542048 - DNA, 25 bp, Homo sapien
gcctttaccaaaaggggctcataca

SEQ ID NO: 2542049 - DNA, 25 bp, Homo sapien
taccaaaaggggctcatacacaact

SEQ ID NO: 2542050 - DNA, 25 bp, Homo sapien
gaaaagatgctttctctttacccat

SEQ ID NO: 2542051 - DNA, 25 bp, Homo sapien
gagtttggaaaagatgctttctctt

SEQ ID NO: 2542052 - DNA, 25 bp, Homo sapien
tatttgagtttggaaaagatgcttt

SEQ ID NO: 2542053 - DNA, 25 bp, Homo sapien
cttttgcttcataatggatatttga

SEQ ID NO: 2542054 - DNA, 25 bp, Homo sapien
gaaggtcacctgtcaatccccaaat

SEQ ID NO: 2542055 - DNA, 25 bp, Homo sapien
gttctctgtgagactatgaaggtca

SEQ ID NO: 2542056 - DNA, 25 bp, Homo sapien
tcaacacgaacaggcagatgtcatc

SEQ ID NO: 2542057 - DNA, 25 bp, Homo sapien
caatctgacagggactcaacacgaa

SEQ ID NO: 2542058 - DNA, 25 bp, Homo sapien
agacaattgcaggggatttccccat

SEQ ID NO: 2542059 - DNA, 25 bp, Homo sapien
gcagagacaattgcaggggatttcc

SEQ ID NO: 2542060 - DNA, 25 bp, Homo sapien
ctggagcagagacaattgcagggga

SEQ ID NO: 2542061 - DNA, 25 bp, Homo sapien
gagacaattgcaggggatttcccca

SEQ ID NO: 2542062 - DNA, 25 bp, Homo sapien
tttaacatatttccctccgatctca

SEQ ID NO: 2542063 - DNA, 25 bp, Homo sapien
acatatttccctccgatctcattat

SEQ ID NO: 2542064 - DNA, 25 bp, Homo sapien
tatttccctccgatctcattattga

SEQ ID NO: 2542065 - DNA, 25 bp, Homo sapien
tccctccgatctcattattgatcag

SEQ ID NO: 2542066 - DNA, 25 bp, Homo sapien
tgcgagcagcaattagagggactca

SEQ ID NO: 2542067 - DNA, 25 bp, Homo sapien
caggcccttgtgtcttgtggctttt

SEQ ID NO: 2542068 - DNA, 25 bp, Homo sapien
tgttccagatcacatggtggctctc

SEQ ID NO: 2542069 - DNA, 25 bp, Homo sapien
tttttcgacaaatcccaaatgcttg

SEQ ID NO: 2542070 - DNA, 25 bp, Homo sapien
cagctgtcttgatgtggctactgct

SEQ ID NO: 2542071 - DNA, 25 bp, Homo sapien
agctgtcttgatgtggctactgctt

SEQ ID NO: 2542072 - DNA, 25 bp, Homo sapien
ttgcccttcagcctcttgggttacc

SEQ ID NO: 2542073 - DNA, 25 bp, Homo sapien
gcccttcagcctcttgggttaccat

SEQ ID NO: 2542074 - DNA, 25 bp, Homo sapien
gacttgcccttcagcctcttgggtt

SEQ ID NO: 2542075 - DNA, 25 bp, Homo sapien
acttgcccttcagcctcttgggtta

SEQ ID NO: 2542076 - DNA, 25 bp, Homo sapien
taaggctctcttggagtatcctgcc

SEQ ID NO: 2542077 - DNA, 25 bp, Homo sapien
cagacgaccagcgatgctgaagccc

SEQ ID NO: 2542078 - DNA, 25 bp, Homo sapien
tatactgcctgggtggttccgctga

SEQ ID NO: 2542079 - DNA, 25 bp, Homo sapien
cactctgactcagcatatactgcct

SEQ ID NO: 2542080 - DNA, 25 bp, Homo sapien
gataggtccatttcctgtggtaggg

SEQ ID NO: 2542081 - DNA, 25 bp, Homo sapien
tagaggataactcatcataactcgc

SEQ ID NO: 2542082 - DNA, 25 bp, Homo sapien
gaagggtttgttctagcgaactgag

SEQ ID NO: 2542083 - DNA, 25 bp, Homo sapien
ccagtctcctagtgcaatgttgatt

SEQ ID NO: 2542084 - DNA, 25 bp, Homo sapien
ttctgggtctgaatccggtgagcgc

SEQ ID NO: 2542085 - DNA, 25 bp, Homo sapien
cgggccgcgggtttctggaatccat

SEQ ID NO: 2542086 - DNA, 25 bp, Homo sapien
tttcttgccgggatgcctggaggaa

SEQ ID NO: 2542087 - DNA, 25 bp, Homo sapien
gaggaacggatcctgcatcctgagc

SEQ ID NO: 2542088 - DNA, 25 bp, Homo sapien
cagttggagggagcgggtcaaagcc

SEQ ID NO: 2542089 - DNA, 25 bp, Homo sapien
tggagggagcgggtcaaagcctggc

SEQ ID NO: 2542090 - DNA, 25 bp, Homo sapien
gtgcagttggagggagcgggtcaaa

SEQ ID NO: 2542091 - DNA, 25 bp, Homo sapien
gagggagcgggtcaaagcctggcag

SEQ ID NO: 2542092 - DNA, 25 bp, Homo sapien
agttccaggaattcctgtgaccaga

SEQ ID NO: 2542093 - DNA, 25 bp, Homo sapien
gtctctggcagcaattccactaata

SEQ ID NO: 2542094 - DNA, 25 bp, Homo sapien
tcactcagtgccactgtctctggca

SEQ ID NO: 2542095 - DNA, 25 bp, Homo sapien
caattccactaatattaatagttcc

SEQ ID NO: 2542096 - DNA, 25 bp, Homo sapien
tatgccaccgtgtgagactcaaagg

SEQ ID NO: 2542097 - DNA, 25 bp, Homo sapien
tctgcttcgctggaaattacgacta

SEQ ID NO: 2542098 - DNA, 25 bp, Homo sapien
gttaaggtcagcgttctgttctgga

SEQ ID NO: 2542099 - DNA, 25 bp, Homo sapien
aacaacaggcaatgaactttccagg

SEQ ID NO: 2542100 - DNA, 25 bp, Homo sapien
cggacctggaacacagatccagagt

SEQ ID NO: 2542101 - DNA, 25 bp, Homo sapien
ttgaaggcgcttatgttgccggacc

SEQ ID NO: 2542102 - DNA, 25 bp, Homo sapien
tcttatgtgatagaagcaaagtgtc

SEQ ID NO: 2542103 - DNA, 25 bp, Homo sapien
gcaaagtgtcatttccacggaggag

SEQ ID NO: 2542104 - DNA, 25 bp, Homo sapien
tccacggtggccgtatcagatccag

SEQ ID NO: 2542105 - DNA, 25 bp, Homo sapien
taaaagccctaatgtgggcagtcag

SEQ ID NO: 2542106 - DNA, 25 bp, Homo sapien
gaggtcacctcaaggtccacggtgg

SEQ ID NO: 2542107 - DNA, 25 bp, Homo sapien
gggctgcaaggagatctgtcttaca

SEQ ID NO: 2542108 - DNA, 25 bp, Homo sapien
agttctgtacattcacgaacccaag

SEQ ID NO: 2542109 - DNA, 25 bp, Homo sapien
ataaagttctgtacattcacgaacc

SEQ ID NO: 2542110 - DNA, 25 bp, Homo sapien
ttctgtacattcacgaacccaagga

SEQ ID NO: 2542111 - DNA, 25 bp, Homo sapien
aaagttctgtacattcacgaaccca

SEQ ID NO: 2542112 - DNA, 25 bp, Homo sapien
gatgcattctaatgcggctgtcaca

SEQ ID NO: 2542113 - DNA, 25 bp, Homo sapien
gacaacacccactctagaatttcac

SEQ ID NO: 2542114 - DNA, 25 bp, Homo sapien
gaaggatagaccagtgtattagtcc

SEQ ID NO: 2542115 - DNA, 25 bp, Homo sapien
gcctgagacaaggactgcagtgcag

SEQ ID NO: 2542116 - DNA, 25 bp, Homo sapien
acggagtaggctgatgaagcaagtc

SEQ ID NO: 2542117 - DNA, 25 bp, Homo sapien
aagagtgagcaagaatagggaaaac

SEQ ID NO: 2542118 - DNA, 25 bp, Homo sapien
ccatatcaaccagaaacggagtagg

SEQ ID NO: 2542119 - DNA, 25 bp, Homo sapien
caagtctagaaagtgtaggcaaaca

SEQ ID NO: 2542120 - DNA, 25 bp, Homo sapien
aggttgcgatggccaggatcgcgcc

SEQ ID NO: 2542121 - DNA, 25 bp, Homo sapien
cggaggttgcgatggccaggatcgc

SEQ ID NO: 2542122 - DNA, 25 bp, Homo sapien
ggttgcgatggccaggatcgcgcca

SEQ ID NO: 2542123 - DNA, 25 bp, Homo sapien
gcggaggttgcgatggccaggatcg

SEQ ID NO: 2542124 - DNA, 25 bp, Homo sapien
tcaatgcctgcaaacatggtgagca

SEQ ID NO: 2542125 - DNA, 25 bp, Homo sapien
tttcagataaggacatgcacgtgct

SEQ ID NO: 2542126 - DNA, 25 bp, Homo sapien
aactcggaggatagcaaggagccca

SEQ ID NO: 2542127 - DNA, 25 bp, Homo sapien
caatgtcagccattaccacgggcaa

SEQ ID NO: 2542128 - DNA, 25 bp, Homo sapien
tcttggtgcagaccacaagtgctgc

SEQ ID NO: 2542129 - DNA, 25 bp, Homo sapien
catcacgtatttccggtaagctagg

SEQ ID NO: 2542130 - DNA, 25 bp, Homo sapien
ggcagacttgagcttaaaccttgga

SEQ ID NO: 2542131 - DNA, 25 bp, Homo sapien
ggtagtaacactcgctgtacaaggt

SEQ ID NO: 2542132 - DNA, 25 bp, Homo sapien
cccggagactcggaaaagcatttat

SEQ ID NO: 2542133 - DNA, 25 bp, Homo sapien
cctgtcaggaaacatggtacgtgga

SEQ ID NO: 2542134 - DNA, 25 bp, Homo sapien
gagagctggactagggcagaccatc

SEQ ID NO: 2542135 - DNA, 25 bp, Homo sapien
taattaaaccacgatgacggagctg

SEQ ID NO: 2542136 - DNA, 25 bp, Homo sapien
gtttgcctcaagaatgcctgccagg

SEQ ID NO: 2542137 - DNA, 25 bp, Homo sapien
tttcccgtttgcctcaagaatgcct

SEQ ID NO: 2542138 - DNA, 25 bp, Homo sapien
cccatttcccgtttgcctcaagaat

SEQ ID NO: 2542139 - DNA, 25 bp, Homo sapien
ccgtttgcctcaagaatgcctgcca

SEQ ID NO: 2542140 - DNA, 25 bp, Homo sapien
ttggagccataagatgcagggagcc

SEQ ID NO: 2542141 - DNA, 25 bp, Homo sapien
caatgtgcaggcgacgatgagatcc

SEQ ID NO: 2542142 - DNA, 25 bp, Homo sapien
ccttccctgtgtatggcaatgtgca

SEQ ID NO: 2542143 - DNA, 25 bp, Homo sapien
gagcctgggctgtagatttactgcc

SEQ ID NO: 2542144 - DNA, 25 bp, Homo sapien
cccagagaggctgctacagtttcct

SEQ ID NO: 2542145 - DNA, 25 bp, Homo sapien
agcagattcaggctgagaacctcca

SEQ ID NO: 2542146 - DNA, 25 bp, Homo sapien
caagccactggaatagcagattcag

SEQ ID NO: 2542147 - DNA, 25 bp, Homo sapien
tggaatagcagattcaggctgagaa

SEQ ID NO: 2542148 - DNA, 25 bp, Homo sapien
cacacaagaggagaatgcaccatta

SEQ ID NO: 2542149 - DNA, 25 bp, Homo sapien
tttgcaggtgcagaatcattacagg

SEQ ID NO: 2542150 - DNA, 25 bp, Homo sapien
tataactggatattgtggcatctcc

SEQ ID NO: 2542151 - DNA, 25 bp, Homo sapien
tgcgaatcttgttcctgcagagaca

SEQ ID NO: 2542152 - DNA, 25 bp, Homo sapien
gaactattgacaatccctgggagac

SEQ ID NO: 2542153 - DNA, 25 bp, Homo sapien
ctgtgatgagtgagcgaggtggcca

SEQ ID NO: 2542154 - DNA, 25 bp, Homo sapien
ggagttcctgaacgccctgagtgcg

SEQ ID NO: 2542155 - DNA, 25 bp, Homo sapien
tccaggtctgagacagaacggccct

SEQ ID NO: 2542156 - DNA, 25 bp, Homo sapien
cacgaagcggcgctgatactttggg

SEQ ID NO: 2542157 - DNA, 25 bp, Homo sapien
gaagtgtgttctttaccgtcctcca

SEQ ID NO: 2542158 - DNA, 25 bp, Homo sapien
gaagatcaaggtaactggacaactc

SEQ ID NO: 2542159 - DNA, 25 bp, Homo sapien
agtcgccaggctccacgaagcggcg

SEQ ID NO: 2542160 - DNA, 25 bp, Homo sapien
tgcctagttcgggccgggcaggtcc

SEQ ID NO: 2542161 - DNA, 25 bp, Homo sapien
ttgcctagttcgggccgggcaggtc

SEQ ID NO: 2542162 - DNA, 25 bp, Homo sapien
ctttgcctagttcgggccgggcagg

SEQ ID NO: 2542163 - DNA, 25 bp, Homo sapien
gactttgcctagttcgggccgggca

SEQ ID NO: 2542164 - DNA, 25 bp, Homo sapien
tgagtactccttctctatcctgatg

SEQ ID NO: 2542165 - DNA, 25 bp, Homo sapien
gaacgtattcccatgactattgtca

SEQ ID NO: 2542166 - DNA, 25 bp, Homo sapien
gacattaggtgcacatctgaggaaa

SEQ ID NO: 2542167 - DNA, 25 bp, Homo sapien
cctgatgactgtgaaggcatttgca

SEQ ID NO: 2542168 - DNA, 25 bp, Homo sapien
gacagagccctggtattttcttcca

SEQ ID NO: 2542169 - DNA, 25 bp, Homo sapien
tcatggcaccatctggccacctgtg

SEQ ID NO: 2542170 - DNA, 25 bp, Homo sapien
tgctttggagattgctgccagtggt

SEQ ID NO: 2542171 - DNA, 25 bp, Homo sapien
ggccacctgtggatcttttgagtgt

SEQ ID NO: 2542172 - DNA, 25 bp, Homo sapien
atttcaagtgctggttttaggagcc

SEQ ID NO: 2542173 - DNA, 25 bp, Homo sapien
agtatttcaagtgctggttttagga

SEQ ID NO: 2542174 - DNA, 25 bp, Homo sapien
gaagtatttcaagtgctggttttag

SEQ ID NO: 2542175 - DNA, 25 bp, Homo sapien
ctggaagtatttcaagtgctggttt

SEQ ID NO: 2542176 - DNA, 25 bp, Homo sapien
ccgagcggggatgccagaagaacaa

SEQ ID NO: 2542177 - DNA, 25 bp, Homo sapien
gaaacacatgcctcataaaaccaaa

SEQ ID NO: 2542178 - DNA, 25 bp, Homo sapien
aacaagtgtgatcgccaatttcggg

SEQ ID NO: 2542179 - DNA, 25 bp, Homo sapien
ggcaacttggcagatgcatcgccga

SEQ ID NO: 2542180 - DNA, 25 bp, Homo sapien
tcaatctacacctactgtaacaatt

SEQ ID NO: 2542181 - DNA, 25 bp, Homo sapien
tacacctactgtaacaattgttgat

SEQ ID NO: 2542182 - DNA, 25 bp, Homo sapien
tctacacctactgtaacaattgttg

SEQ ID NO: 2542183 - DNA, 25 bp, Homo sapien
acaattgttgatttctctaaaggat

SEQ ID NO: 2542184 - DNA, 25 bp, Homo sapien
tccgtattgtaattcagaggcagag

SEQ ID NO: 2542185 - DNA, 25 bp, Homo sapien
ctgcacagggaaattcagcggtagt

SEQ ID NO: 2542186 - DNA, 25 bp, Homo sapien
gaaagaattccgtattgtaattcag

SEQ ID NO: 2542187 - DNA, 25 bp, Homo sapien
ggaaattcagcggtagtagaaagaa

SEQ ID NO: 2542188 - DNA, 25 bp, Homo sapien
gatccgtccaagctctcagatgtga

SEQ ID NO: 2542189 - DNA, 25 bp, Homo sapien
ggatccgtccaagctctcagatgtg

SEQ ID NO: 2542190 - DNA, 25 bp, Homo sapien
gggatccgtccaagctctcagatgt

SEQ ID NO: 2542191 - DNA, 25 bp, Homo sapien
tgggatccgtccaagctctcagatg

SEQ ID NO: 2542192 - DNA, 25 bp, Homo sapien
tccagacgacatgagattaacctga

SEQ ID NO: 2542193 - DNA, 25 bp, Homo sapien
acagctgctgtccaaggtagataca

SEQ ID NO: 2542194 - DNA, 25 bp, Homo sapien
caggcgatgagatgtatatggaatc

SEQ ID NO: 2542195 - DNA, 25 bp, Homo sapien
ggtcttaaggtttccagacgacatg

SEQ ID NO: 2542196 - DNA, 25 bp, Homo sapien
tctgtctcccatgccagtaaaaggc

SEQ ID NO: 2542197 - DNA, 25 bp, Homo sapien
taggaagtgaagcttagaaaatttg

SEQ ID NO: 2542198 - DNA, 25 bp, Homo sapien
atttggatcattggcagatctgtct

SEQ ID NO: 2542199 - DNA, 25 bp, Homo sapien
tgtctcccatgccagtaaaaggcca

SEQ ID NO: 2542200 - DNA, 25 bp, Homo sapien
gtgggagtccctgccttttgttgtc

SEQ ID NO: 2542201 - DNA, 25 bp, Homo sapien
cagtgggagtccctgccttttgttg

SEQ ID NO: 2542202 - DNA, 25 bp, Homo sapien
ccttttgttgtccagtttgcattct

SEQ ID NO: 2542203 - DNA, 25 bp, Homo sapien
gccttttgttgtccagtttgcattc

SEQ ID NO: 2542204 - DNA, 25 bp, Homo sapien
ggctctcgacacgagtggaaaggaa

SEQ ID NO: 2542205 - DNA, 25 bp, Homo sapien
catttttgcttgtccacccatgtag

SEQ ID NO: 2542206 - DNA, 25 bp, Homo sapien
gaatcaggtcatctttagggctctc

SEQ ID NO: 2542207 - DNA, 25 bp, Homo sapien
tgaaggcagggactgacatttttgc

SEQ ID NO: 2542208 - DNA, 25 bp, Homo sapien
caagatcccctttatcagtcactgg

SEQ ID NO: 2542209 - DNA, 25 bp, Homo sapien
aaaatcatggccatcaagatcccct

SEQ ID NO: 2542210 - DNA, 25 bp, Homo sapien
cacagcccacgcacagaacatagat

SEQ ID NO: 2542211 - DNA, 25 bp, Homo sapien
gattggccacagatgaaaatcatgg

SEQ ID NO: 2542212 - DNA, 25 bp, Homo sapien
gtcacttctttatctcgagttgcta

SEQ ID NO: 2542213 - DNA, 25 bp, Homo sapien
tgctagcacaatctctttagagggt

SEQ ID NO: 2542214 - DNA, 25 bp, Homo sapien
tatctcgagttgctagcacaatctc

SEQ ID NO: 2542215 - DNA, 25 bp, Homo sapien
cacaatctctttagagggtcggcat

SEQ ID NO: 2542216 - DNA, 25 bp, Homo sapien
tctgcccacacattaaagtctcagg

SEQ ID NO: 2542217 - DNA, 25 bp, Homo sapien
gtctcaggtgccttaaattcacttt

SEQ ID NO: 2542218 - DNA, 25 bp, Homo sapien
cacacattaaagtctcaggtgcctt

SEQ ID NO: 2542219 - DNA, 25 bp, Homo sapien
tgtgaaaagttacttccgtggcttg

SEQ ID NO: 2542220 - DNA, 25 bp, Homo sapien
gcaggactacccatgagacgtttta

SEQ ID NO: 2542221 - DNA, 25 bp, Homo sapien
tgttgatgggtgagtagatccacca

SEQ ID NO: 2542222 - DNA, 25 bp, Homo sapien
agacgttttataggtcaggctggga

SEQ ID NO: 2542223 - DNA, 25 bp, Homo sapien
gatttgcagcaacaaagcatgcagg

SEQ ID NO: 2542224 - DNA, 25 bp, Homo sapien
tctcagttaagtcctagtccctctg

SEQ ID NO: 2542225 - DNA, 25 bp, Homo sapien
ctcagttaagtcctagtccctctgc

SEQ ID NO: 2542226 - DNA, 25 bp, Homo sapien
cacacaggactgtcgtgggcacata

SEQ ID NO: 2542227 - DNA, 25 bp, Homo sapien
gagatttgccacatatccataatgg

SEQ ID NO: 2542228 - DNA, 25 bp, Homo sapien
tgctgctggctcaaaagactgtttg

SEQ ID NO: 2542229 - DNA, 25 bp, Homo sapien
cataatggtgcaccctgaacccagt

SEQ ID NO: 2542230 - DNA, 25 bp, Homo sapien
agcatggcccctccgggacagaaga

SEQ ID NO: 2542231 - DNA, 25 bp, Homo sapien
acttcagcatggcccctccgggaca

SEQ ID NO: 2542232 - DNA, 25 bp, Homo sapien
tcagcatggcccctccgggacagaa

SEQ ID NO: 2542233 - DNA, 25 bp, Homo sapien
atggcccctccgggacagaagatgg

SEQ ID NO: 2542234 - DNA, 25 bp, Homo sapien
gactggcacctgagtcaaactttca

SEQ ID NO: 2542235 - DNA, 25 bp, Homo sapien
taattaggtgggttctccatgaccc

SEQ ID NO: 2542236 - DNA, 25 bp, Homo sapien
tcagatctacacagtgcagggcctt

SEQ ID NO: 2542237 - DNA, 25 bp, Homo sapien
tatatatatagtccatgccattcag

SEQ ID NO: 2542238 - DNA, 25 bp, Homo sapien
aatcagggtatttcgggtctccatc

SEQ ID NO: 2542239 - DNA, 25 bp, Homo sapien
aatgagaacacgcacaatttgtcgc

SEQ ID NO: 2542240 - DNA, 25 bp, Homo sapien
tatagttgccctactctgctacaga

SEQ ID NO: 2542241 - DNA, 25 bp, Homo sapien
gctacagaacactaggactcattaa

SEQ ID NO: 2542242 - DNA, 25 bp, Homo sapien
tcagccaactaataagcatagtctc

SEQ ID NO: 2542243 - DNA, 25 bp, Homo sapien
caactaataagcatagtctctgata

SEQ ID NO: 2542244 - DNA, 25 bp, Homo sapien
tcatctgttatgcaagacacaatat

SEQ ID NO: 2542245 - DNA, 25 bp, Homo sapien
taggttcaggggcagatttgttata

SEQ ID NO: 2542246 - DNA, 25 bp, Homo sapien
cttgagaggatgaccagctgcccat

SEQ ID NO: 2542247 - DNA, 25 bp, Homo sapien
cagaagcctggtgattttacctggg

SEQ ID NO: 2542248 - DNA, 25 bp, Homo sapien
ccagggttgctgtggctctcagaag

SEQ ID NO: 2542249 - DNA, 25 bp, Homo sapien
tgataccgcactatgcttgagagga

SEQ ID NO: 2542250 - DNA, 25 bp, Homo sapien
ggctactttcacattataagagaat

SEQ ID NO: 2542251 - DNA, 25 bp, Homo sapien
gaggaatgatttcgacatctcttta

SEQ ID NO: 2542252 - DNA, 25 bp, Homo sapien
acttctggattagagaaacagcttt

SEQ ID NO: 2542253 - DNA, 25 bp, Homo sapien
tatataactctttacagaagatgtc

SEQ ID NO: 2542254 - DNA, 25 bp, Homo sapien
actttaagagaaacccactcctgag

SEQ ID NO: 2542255 - DNA, 25 bp, Homo sapien
gcagagtgagagagtgcaagagagg

SEQ ID NO: 2542256 - DNA, 25 bp, Homo sapien
gcaagagagggacaaacttacttta

SEQ ID NO: 2542257 - DNA, 25 bp, Homo sapien
gaaacccactcctgagctaggacat

SEQ ID NO: 2542258 - DNA, 25 bp, Homo sapien
tgggtcccctcatgaacttagcagc

SEQ ID NO: 2542259 - DNA, 25 bp, Homo sapien
cagcagttaaagcccgtagctgggt

SEQ ID NO: 2542260 - DNA, 25 bp, Homo sapien
cctcatgaacttagcagctatgtgg

SEQ ID NO: 2542261 - DNA, 25 bp, Homo sapien
cagctatgtggatgaaaagtgacta

SEQ ID NO: 2542262 - DNA, 25 bp, Homo sapien
ggtcacttctggaggtcagctgcag

SEQ ID NO: 2542263 - DNA, 25 bp, Homo sapien
tgctgccctggtcacttctggaggt

SEQ ID NO: 2542264 - DNA, 25 bp, Homo sapien
gccctggtcacttctggaggtcagc

SEQ ID NO: 2542265 - DNA, 25 bp, Homo sapien
ggatgctgccctggtcacttctgga

SEQ ID NO: 2542266 - DNA, 25 bp, Homo sapien
ggagagtcctagagacgcagcagag

SEQ ID NO: 2542267 - DNA, 25 bp, Homo sapien
agagtcctagagacgcagcagagga

SEQ ID NO: 2542268 - DNA, 25 bp, Homo sapien
gagattatcttggatgatccaggag

SEQ ID NO: 2542269 - DNA, 25 bp, Homo sapien
aataaagagattatcttggatgatc

SEQ ID NO: 2542270 - DNA, 25 bp, Homo sapien
agtcagagaagtgggatcatcaccc

SEQ ID NO: 2542271 - DNA, 25 bp, Homo sapien
ccatcctgtacatgggaggtaagaa

SEQ ID NO: 2542272 - DNA, 25 bp, Homo sapien
gttcctaacttctgggtgagagtca

SEQ ID NO: 2542273 - DNA, 25 bp, Homo sapien
tgaaagaatcctgtctgagactgtg

SEQ ID NO: 2542274 - DNA, 25 bp, Homo sapien
agagaagcggcgaggagaaaccaag

SEQ ID NO: 2542275 - DNA, 25 bp, Homo sapien
gagagagaagcggcgaggagaaacc

SEQ ID NO: 2542276 - DNA, 25 bp, Homo sapien
gaagcggcgaggagaaaccaagaaa

SEQ ID NO: 2542277 - DNA, 25 bp, Homo sapien
agaagcggcgaggagaaaccaagaa

SEQ ID NO: 2542278 - DNA, 25 bp, Homo sapien
cacttgcaaccagaagagacatctg

SEQ ID NO: 2542279 - DNA, 25 bp, Homo sapien
catctgttgaactcaaaggatgaga

SEQ ID NO: 2542280 - DNA, 25 bp, Homo sapien
gtttcaggagcccataaatttctct

SEQ ID NO: 2542281 - DNA, 25 bp, Homo sapien
tcaggagcccataaatttctctttg

SEQ ID NO: 2542282 - DNA, 25 bp, Homo sapien
ccttatgaaacaggccgggaaggct

SEQ ID NO: 2542283 - DNA, 25 bp, Homo sapien
tcagacttgggtcacagaagccagt

SEQ ID NO: 2542284 - DNA, 25 bp, Homo sapien
cacagacttcaaacacctgcagggt

SEQ ID NO: 2542285 - DNA, 25 bp, Homo sapien
taagcacaaccataggtctgcagga

SEQ ID NO: 2542286 - DNA, 25 bp, Homo sapien
gcagcaacattttgggcattgattt

SEQ ID NO: 2542287 - DNA, 25 bp, Homo sapien
atgagttagcagctcctttgcaggc

SEQ ID NO: 2542288 - DNA, 25 bp, Homo sapien
tgttttctcgtgaaggcttaattaa

SEQ ID NO: 2542289 - DNA, 25 bp, Homo sapien
tgtagcttcagcacatgagttagca

SEQ ID NO: 2542290 - DNA, 25 bp, Homo sapien
gggcagtcacgtaatagaatcagta

SEQ ID NO: 2542291 - DNA, 25 bp, Homo sapien
aatcagtaaattcgccgcagtctct

SEQ ID NO: 2542292 - DNA, 25 bp, Homo sapien
tcctgttggatgcacattcattgaa

SEQ ID NO: 2542293 - DNA, 25 bp, Homo sapien
cccaggtgctcctgttggatgcaca

SEQ ID NO: 2542294 - DNA, 25 bp, Homo sapien
atgagtcaccagttaaatgcttaaa

SEQ ID NO: 2542295 - DNA, 25 bp, Homo sapien
tgagtcaccagttaaatgcttaaaa

SEQ ID NO: 2542296 - DNA, 25 bp, Homo sapien
gagtcaccagttaaatgcttaaaaa

SEQ ID NO: 2542297 - DNA, 25 bp, Homo sapien
ggtgggatcctccctgatgggcagt

SEQ ID NO: 2542298 - DNA, 25 bp, Homo sapien
cctccctgatgggcagtcttacaga

SEQ ID NO: 2542299 - DNA, 25 bp, Homo sapien
tccctgatgggcagtcttacagagc

SEQ ID NO: 2542300 - DNA, 25 bp, Homo sapien
tgggatcctccctgatgggcagtct

SEQ ID NO: 2542301 - DNA, 25 bp, Homo sapien
ttggtgggaactaaccacatggccc

SEQ ID NO: 2542302 - DNA, 25 bp, Homo sapien
ttttggtgggaactaaccacatggc

SEQ ID NO: 2542303 - DNA, 25 bp, Homo sapien
agcccttggacggtcagtgacgacc

SEQ ID NO: 2542304 - DNA, 25 bp, Homo sapien
ggtctgcaaatgaagcccttggacg

SEQ ID NO: 2542305 - DNA, 25 bp, Homo sapien
agggaatacacacagcttcatgtcc

SEQ ID NO: 2542306 - DNA, 25 bp, Homo sapien
tccttatagaattcaggggtcccag

SEQ ID NO: 2542307 - DNA, 25 bp, Homo sapien
ccagggatggcattctgggttggcc

SEQ ID NO: 2542308 - DNA, 25 bp, Homo sapien
tctgggttggccacatggcatccat

SEQ ID NO: 2542309 - DNA, 25 bp, Homo sapien
tggtctctcttcttagggtggctcc

SEQ ID NO: 2542310 - DNA, 25 bp, Homo sapien
tctctcttcttagggtggctcctct

SEQ ID NO: 2542311 - DNA, 25 bp, Homo sapien
tctgcctcttgtcctagcccagcat

SEQ ID NO: 2542312 - DNA, 25 bp, Homo sapien
ctctgcctcttgtcctagcccagca

SEQ ID NO: 2542313 - DNA, 25 bp, Homo sapien
ccttcacatgaatggcatgaactga

SEQ ID NO: 2542314 - DNA, 25 bp, Homo sapien
gggtgtgaatctcatgttccttcac

SEQ ID NO: 2542315 - DNA, 25 bp, Homo sapien
tggcatgaactgaaggcctctctct

SEQ ID NO: 2542316 - DNA, 25 bp, Homo sapien
tgagctgtccgtgacattaagcaca

SEQ ID NO: 2542317 - DNA, 25 bp, Homo sapien
gagaggccagctgcgagtcgtgaaa

SEQ ID NO: 2542318 - DNA, 25 bp, Homo sapien
tgtatttttggtccaggacttgtgt

SEQ ID NO: 2542319 - DNA, 25 bp, Homo sapien
ggagaggccagctgcgagtcgtgaa

SEQ ID NO: 2542320 - DNA, 25 bp, Homo sapien
atttttggtccaggacttgtgtttg

SEQ ID NO: 2542321 - DNA, 25 bp, Homo sapien
cagacccggccagcaaccaggtagg

SEQ ID NO: 2542322 - DNA, 25 bp, Homo sapien
agacccggccagcaaccaggtagga

SEQ ID NO: 2542323 - DNA, 25 bp, Homo sapien
caggtaggagagtgggggcaaatgt

SEQ ID NO: 2542324 - DNA, 25 bp, Homo sapien
gcaaccaggtaggagagtgggggca

SEQ ID NO: 2542325 - DNA, 25 bp, Homo sapien
gactcctcctaagtgccagattcag

SEQ ID NO: 2542326 - DNA, 25 bp, Homo sapien
gattcagtccggtgtgatttggagt

SEQ ID NO: 2542327 - DNA, 25 bp, Homo sapien
ttggcagaaatctgcgactcctcct

SEQ ID NO: 2542328 - DNA, 25 bp, Homo sapien
tggagctcagagacgctggtgtctg

SEQ ID NO: 2542329 - DNA, 25 bp, Homo sapien
ggatcgcaagagtttgaagtggaaa

SEQ ID NO: 2542330 - DNA, 25 bp, Homo sapien
tcgatggccccagggttaagaggcc

SEQ ID NO: 2542331 - DNA, 25 bp, Homo sapien
gacagagactggattggcagacaga

SEQ ID NO: 2542332 - DNA, 25 bp, Homo sapien
ttaatggatcccagctcgatggccc

SEQ ID NO: 2542333 - DNA, 25 bp, Homo sapien
taacatacacttattcacaacctta

SEQ ID NO: 2542334 - DNA, 25 bp, Homo sapien
tcttaacatacacttattcacaacc

SEQ ID NO: 2542335 - DNA, 25 bp, Homo sapien
aacatacacttattcacaaccttac

SEQ ID NO: 2542336 - DNA, 25 bp, Homo sapien
ttaacatacacttattcacaacctt

SEQ ID NO: 2542337 - DNA, 25 bp, Homo sapien
taagctgtccttcatgagtaagaaa

SEQ ID NO: 2542338 - DNA, 25 bp, Homo sapien
ttgttctaagctgtccttcatgagt

SEQ ID NO: 2542339 - DNA, 25 bp, Homo sapien
tctaagctgtccttcatgagtaaga

SEQ ID NO: 2542340 - DNA, 25 bp, Homo sapien
tgtccttcatgagtaagaaaaatgc

SEQ ID NO: 2542341 - DNA, 25 bp, Homo sapien
gaactcctcactttatgcgtgcttg

SEQ ID NO: 2542342 - DNA, 25 bp, Homo sapien
ggatattaggtgatgagactctact

SEQ ID NO: 2542343 - DNA, 25 bp, Homo sapien
tcctcactttatgcgtgcttgctgt

SEQ ID NO: 2542344 - DNA, 25 bp, Homo sapien
caggagataactggatattaggtga

SEQ ID NO: 2542345 - DNA, 25 bp, Homo sapien
tataatggttaatcagaagtacatc

SEQ ID NO: 2542346 - DNA, 25 bp, Homo sapien
tgggctcacaggaggaatacaaggc

SEQ ID NO: 2542347 - DNA, 25 bp, Homo sapien
cacaggaggaatacaaggctccctc

SEQ ID NO: 2542348 - DNA, 25 bp, Homo sapien
tggttaatcagaagtacatctgtgt

SEQ ID NO: 2542349 - DNA, 25 bp, Homo sapien
tccaatttgcttgggtgcaggatgg

SEQ ID NO: 2542350 - DNA, 25 bp, Homo sapien
actgttttcctgcagcgtggcattc

SEQ ID NO: 2542351 - DNA, 25 bp, Homo sapien
cttccaatttgcttgggtgcaggat

SEQ ID NO: 2542352 - DNA, 25 bp, Homo sapien
ttcctgcagcgtggcattcatttgg

SEQ ID NO: 2542353 - DNA, 25 bp, Homo sapien
gggcatttctcactgttccataggc

SEQ ID NO: 2542354 - DNA, 25 bp, Homo sapien
ggcatttctcactgttccataggcc

SEQ ID NO: 2542355 - DNA, 25 bp, Homo sapien
gcatttctcactgttccataggcct

SEQ ID NO: 2542356 - DNA, 25 bp, Homo sapien
tgggcatttctcactgttccatagg

SEQ ID NO: 2542357 - DNA, 25 bp, Homo sapien
tccacagcatcgcagcaggtcctga

SEQ ID NO: 2542358 - DNA, 25 bp, Homo sapien
atccacagcatcgcagcaggtcctg

SEQ ID NO: 2542359 - DNA, 25 bp, Homo sapien
ccccagttccctttgggaattgctg

SEQ ID NO: 2542360 - DNA, 25 bp, Homo sapien
ccttcaaactatggagagggaagca

SEQ ID NO: 2542361 - DNA, 25 bp, Homo sapien
ggaatgggacattatgaaacttctt

SEQ ID NO: 2542362 - DNA, 25 bp, Homo sapien
cttggttggtttattacacatttgc

SEQ ID NO: 2542363 - DNA, 25 bp, Homo sapien
ctgttatgccacattcatagataca

SEQ ID NO: 2542364 - DNA, 25 bp, Homo sapien
gttatgccacattcatagatacaca

SEQ ID NO: 2542365 - DNA, 25 bp, Homo sapien
tatgccacattcatagatacacaca

SEQ ID NO: 2542366 - DNA, 25 bp, Homo sapien
gccacattcatagatacacacactg

SEQ ID NO: 2542367 - DNA, 25 bp, Homo sapien
ttgattgtggactttgcaagttgca

SEQ ID NO: 2542368 - DNA, 25 bp, Homo sapien
caagttgcatgtgaacaaaagccat

SEQ ID NO: 2542369 - DNA, 25 bp, Homo sapien
gcaagttgcatgtgaacaaaagcca

SEQ ID NO: 2542370 - DNA, 25 bp, Homo sapien
ataggttgattgtggactttgcaag

SEQ ID NO: 2542371 - DNA, 25 bp, Homo sapien
tgccccgtttaagtccaggttcaca

SEQ ID NO: 2542372 - DNA, 25 bp, Homo sapien
gaacttagctctctgacgggtttga

SEQ ID NO: 2542373 - DNA, 25 bp, Homo sapien
aacatggtgtttggtctagctttcc

SEQ ID NO: 2542374 - DNA, 25 bp, Homo sapien
tagctttccatcaccgtaaagtgag

SEQ ID NO: 2542375 - DNA, 25 bp, Homo sapien
tttcaggagtgaactcagtagggct

SEQ ID NO: 2542376 - DNA, 25 bp, Homo sapien
gttgagcagcactgagctgcgtctc

SEQ ID NO: 2542377 - DNA, 25 bp, Homo sapien
gcttgcaaccagagcttcgggctca

SEQ ID NO: 2542378 - DNA, 25 bp, Homo sapien
ttcgggctcatggacaacaaggctg

SEQ ID NO: 2542379 - DNA, 25 bp, Homo sapien
tgaaagactgatagagactctggga

SEQ ID NO: 2542380 - DNA, 25 bp, Homo sapien
tctgggatcagtaggacacagcagc

SEQ ID NO: 2542381 - DNA, 25 bp, Homo sapien
gccagaatggcctcactaaggagtg

SEQ ID NO: 2542382 - DNA, 25 bp, Homo sapien
tattgcccagggtcttattctgact

SEQ ID NO: 2542383 - DNA, 25 bp, Homo sapien
gggccgaaacaactgttctctccta

SEQ ID NO: 2542384 - DNA, 25 bp, Homo sapien
tactaatgctaagaaaatctgcaga

SEQ ID NO: 2542385 - DNA, 25 bp, Homo sapien
ttattttgccgtagctaatactggg

SEQ ID NO: 2542386 - DNA, 25 bp, Homo sapien
cctggtgaggttctaatactaatgc

SEQ ID NO: 2542387 - DNA, 25 bp, Homo sapien
gagacaggaatctacgtgtgttctg

SEQ ID NO: 2542388 - DNA, 25 bp, Homo sapien
ttgaagaagatatcccttcaggttg

SEQ ID NO: 2542389 - DNA, 25 bp, Homo sapien
gacaggaatctacgtgtgttctgca

SEQ ID NO: 2542390 - DNA, 25 bp, Homo sapien
tatcccttcaggttgatgagacagg

SEQ ID NO: 2542391 - DNA, 25 bp, Homo sapien
tgtgcccactcctgtgtataaccat

SEQ ID NO: 2542392 - DNA, 25 bp, Homo sapien
cactcctgtgtataaccatccctga

SEQ ID NO: 2542393 - DNA, 25 bp, Homo sapien
ccgttggcgtgttctgttgggtcct

SEQ ID NO: 2542394 - DNA, 25 bp, Homo sapien
gggctgtactgaagccgttggcgtg

SEQ ID NO: 2542395 - DNA, 25 bp, Homo sapien
aaatgattgctatgattttgagttg

SEQ ID NO: 2542396 - DNA, 25 bp, Homo sapien
cgtgtaatggggcaaatggcctctt

SEQ ID NO: 2542397 - DNA, 25 bp, Homo sapien
caaatggcctcttgtggcaggggac

SEQ ID NO: 2542398 - DNA, 25 bp, Homo sapien
tgggcgtaggcgtccatttattaaa

SEQ ID NO: 2542399 - DNA, 25 bp, Homo sapien
ggttcagtcccattcaccacggttg

SEQ ID NO: 2542400 - DNA, 25 bp, Homo sapien
tcccattcaccacggttgatggcat

SEQ ID NO: 2542401 - DNA, 25 bp, Homo sapien
ggcaatgcccacatccatctgatca

SEQ ID NO: 2542402 - DNA, 25 bp, Homo sapien
ccacatccatctgatcagtagctgt

SEQ ID NO: 2542403 - DNA, 25 bp, Homo sapien
gaacttggaggtgaacaagagttag

SEQ ID NO: 2542404 - DNA, 25 bp, Homo sapien
aatgtcctcaaacgaagaagtgttg

SEQ ID NO: 2542405 - DNA, 25 bp, Homo sapien
tttccaacgctggttctgatcatgg

SEQ ID NO: 2542406 - DNA, 25 bp, Homo sapien
gagatactgtaattaaacactcttc

SEQ ID NO: 2542407 - DNA, 25 bp, Homo sapien
gggtgagcggtctctctaatgggat

SEQ ID NO: 2542408 - DNA, 25 bp, Homo sapien
gagcggtctctctaatgggatgtcc

SEQ ID NO: 2542409 - DNA, 25 bp, Homo sapien
gtgagcggtctctctaatgggatgt

SEQ ID NO: 2542410 - DNA, 25 bp, Homo sapien
gaggggtgagcggtctctctaatgg

SEQ ID NO: 2542411 - DNA, 25 bp, Homo sapien
aatggtcgactattccattttcagc

SEQ ID NO: 2542412 - DNA, 25 bp, Homo sapien
gcttggcattgtgtcagcatctgca

SEQ ID NO: 2542413 - DNA, 25 bp, Homo sapien
cttgaaactcctgttatcattttct

SEQ ID NO: 2542414 - DNA, 25 bp, Homo sapien
tttcactgtaacaagaaaatggtcg

SEQ ID NO: 2542415 - DNA, 25 bp, Homo sapien
cagtgcctgggcaactgtcctggtc

SEQ ID NO: 2542416 - DNA, 25 bp, Homo sapien
gatgtttgcggttcttcagtgcctg

SEQ ID NO: 2542417 - DNA, 25 bp, Homo sapien
tatctctatcgtaaacacttgaagg

SEQ ID NO: 2542418 - DNA, 25 bp, Homo sapien
ggtgagacagctttgcgtagagatc

SEQ ID NO: 2542419 - DNA, 25 bp, Homo sapien
tgaggtcttccaggtcaggatatgt

SEQ ID NO: 2542420 - DNA, 25 bp, Homo sapien
ggtcaagacgaagtttcctggtgac

SEQ ID NO: 2542421 - DNA, 25 bp, Homo sapien
tatgttatgaccacaggtggactca

SEQ ID NO: 2542422 - DNA, 25 bp, Homo sapien
ccccagcctcaagagggtcaagacg

SEQ ID NO: 2542423 - DNA, 25 bp, Homo sapien
gcattgtcttggcaatgcagactct

SEQ ID NO: 2542424 - DNA, 25 bp, Homo sapien
tcttggcaatgcagactcttttatg

SEQ ID NO: 2542425 - DNA, 25 bp, Homo sapien
tgtcttggcaatgcagactctttta

SEQ ID NO: 2542426 - DNA, 25 bp, Homo sapien
ttggtaccagtaccagtacatgctg

SEQ ID NO: 2542427 - DNA, 25 bp, Homo sapien
gcctgtgttcatcaccctgactaca

SEQ ID NO: 2542428 - DNA, 25 bp, Homo sapien
gccctcctagggaaggatcttgtct

SEQ ID NO: 2542429 - DNA, 25 bp, Homo sapien
ggtcctctgaatgcccactcacgag

SEQ ID NO: 2542430 - DNA, 25 bp, Homo sapien
tccttgtagagtcatattcatattc

SEQ ID NO: 2542431 - DNA, 25 bp, Homo sapien
tgtcccacgcagtgaggcaggcaca

SEQ ID NO: 2542432 - DNA, 25 bp, Homo sapien
cgactcacattgagaaggcgagaaa

SEQ ID NO: 2542433 - DNA, 25 bp, Homo sapien
ggccacgtgtcccacgcagtgaggc

SEQ ID NO: 2542434 - DNA, 25 bp, Homo sapien
caggtgcccgactcacattgagaag

SEQ ID NO: 2542435 - DNA, 25 bp, Homo sapien
tcgtccaaatataattgcagatgtg

SEQ ID NO: 2542436 - DNA, 25 bp, Homo sapien
gcctgatccatgagtaagctgctga

SEQ ID NO: 2542437 - DNA, 25 bp, Homo sapien
ctgatgctgggacggaaattgcatg

SEQ ID NO: 2542438 - DNA, 25 bp, Homo sapien
gcagtgaaactggacatgttcagca

SEQ ID NO: 2542439 - DNA, 25 bp, Homo sapien
tgcacagaagcccagatccccagca

SEQ ID NO: 2542440 - DNA, 25 bp, Homo sapien
aagcacaggagagtccatgcacaga

SEQ ID NO: 2542441 - DNA, 25 bp, Homo sapien
agcacaggagagtccatgcacagaa

SEQ ID NO: 2542442 - DNA, 25 bp, Homo sapien
aagcccagatccccagcagcctcat

SEQ ID NO: 2542443 - DNA, 25 bp, Homo sapien
cttgagcaaaacttttcttctccat

SEQ ID NO: 2542444 - DNA, 25 bp, Homo sapien
ccttgagcaaaacttttcttctcca

SEQ ID NO: 2542445 - DNA, 25 bp, Homo sapien
tcccttgagcaaaacttttcttctc

SEQ ID NO: 2542446 - DNA, 25 bp, Homo sapien
taggtcatgcagtcatcagcagtca

SEQ ID NO: 2542447 - DNA, 25 bp, Homo sapien
ccaagaaaggattgaggacatgtgt

SEQ ID NO: 2542448 - DNA, 25 bp, Homo sapien
gcagtcactggagcttaaatgtgga

SEQ ID NO: 2542449 - DNA, 25 bp, Homo sapien
gggtagcttcccagagttccatagg

SEQ ID NO: 2542450 - DNA, 25 bp, Homo sapien
tgctgcgggattgcaggcaaagcca

SEQ ID NO: 2542451 - DNA, 25 bp, Homo sapien
aatgtagtattattcaggagagagg

SEQ ID NO: 2542452 - DNA, 25 bp, Homo sapien
cttgtggaacccagtggagaatgta

SEQ ID NO: 2542453 - DNA, 25 bp, Homo sapien
ctcgaaacttgtggaacccagtgga

SEQ ID NO: 2542454 - DNA, 25 bp, Homo sapien
caagtcatgtaatgtcttgttaact

SEQ ID NO: 2542455 - DNA, 25 bp, Homo sapien
tttgcatacatgcaatattatcaag

SEQ ID NO: 2542456 - DNA, 25 bp, Homo sapien
tgatctccactttctttcaggagaa

SEQ ID NO: 2542457 - DNA, 25 bp, Homo sapien
gaaaaacaagtggtcgctagaacac

SEQ ID NO: 2542458 - DNA, 25 bp, Homo sapien
gatgtatctttttgatggtcgtttc

SEQ ID NO: 2542459 - DNA, 25 bp, Homo sapien
gtcgtttctaacagagatgaagagc

SEQ ID NO: 2542460 - DNA, 25 bp, Homo sapien
ttttgatggtcgtttctaacagaga

SEQ ID NO: 2542461 - DNA, 25 bp, Homo sapien
tgattctaatgaattgatgtatctt

SEQ ID NO: 2542462 - DNA, 25 bp, Homo sapien
acatgatggtgcctgaatcagaggc

SEQ ID NO: 2542463 - DNA, 25 bp, Homo sapien
tttctggggaccacatgatggtgcc

SEQ ID NO: 2542464 - DNA, 25 bp, Homo sapien
tggtgcctgaatcagaggcagccac

SEQ ID NO: 2542465 - DNA, 25 bp, Homo sapien
atatgcttttgtgagtttctggaag

SEQ ID NO: 2542466 - DNA, 25 bp, Homo sapien
gagtttctggaagagcattatgcaa

SEQ ID NO: 2542467 - DNA, 25 bp, Homo sapien
gcttttgtgagtttctggaagagca

SEQ ID NO: 2542468 - DNA, 25 bp, Homo sapien
tctcttgttatatgcttttgtgagt

SEQ ID NO: 2542469 - DNA, 25 bp, Homo sapien
caaattgtcggcactgttgtgagta

SEQ ID NO: 2542470 - DNA, 25 bp, Homo sapien
cttcatttcattttcgcagagcaaa

SEQ ID NO: 2542471 - DNA, 25 bp, Homo sapien
gacttcctattgacactgatctctt

SEQ ID NO: 2542472 - DNA, 25 bp, Homo sapien
cccatgctcctgtgaagatgcttag

SEQ ID NO: 2542473 - DNA, 25 bp, Homo sapien
tttccccgaccaccttggatgctgg

SEQ ID NO: 2542474 - DNA, 25 bp, Homo sapien
tctttccccgaccaccttggatgct

SEQ ID NO: 2542475 - DNA, 25 bp, Homo sapien
ctctgccgtggctgtctctcttctt

SEQ ID NO: 2542476 - DNA, 25 bp, Homo sapien
cttctttccccgaccaccttggatg

SEQ ID NO: 2542477 - DNA, 25 bp, Homo sapien
tgggcttgccacagataaaactgaa

SEQ ID NO: 2542478 - DNA, 25 bp, Homo sapien
gatgttaggttagcagccagttgaa

SEQ ID NO: 2542479 - DNA, 25 bp, Homo sapien
cctgcttgatcagtggcctgggctt

SEQ ID NO: 2542480 - DNA, 25 bp, Homo sapien
gccagttgaatgtagggccctccag

SEQ ID NO: 2542481 - DNA, 25 bp, Homo sapien
cgttgacatccccactaaaatttct

SEQ ID NO: 2542482 - DNA, 25 bp, Homo sapien
ctattggtttcggagcaacgcgttg

SEQ ID NO: 2542483 - DNA, 25 bp, Homo sapien
aacgcgttgacatccccactaaaat

SEQ ID NO: 2542484 - DNA, 25 bp, Homo sapien
tcggagcaacgcgttgacatcccca

SEQ ID NO: 2542485 - DNA, 25 bp, Homo sapien
tcgtctcctgcctctacgcactcac

SEQ ID NO: 2542486 - DNA, 25 bp, Homo sapien
ctcgtctcctgcctctacgcactca

SEQ ID NO: 2542487 - DNA, 25 bp, Homo sapien
caaagccttgttggcagtgtccagt

SEQ ID NO: 2542488 - DNA, 25 bp, Homo sapien
gactccatggaagctgatagtaaga

SEQ ID NO: 2542489 - DNA, 25 bp, Homo sapien
taagagcaaagccttgttggcagtg

SEQ ID NO: 2542490 - DNA, 25 bp, Homo sapien
gctgatagtaagagcaaagccttgt

SEQ ID NO: 2542491 - DNA, 25 bp, Homo sapien
cggcctcttttccgctctagcctgc

SEQ ID NO: 2542492 - DNA, 25 bp, Homo sapien
tacgagaagcaacggcctcttttcc

SEQ ID NO: 2542493 - DNA, 25 bp, Homo sapien
cctcttttccgctctagcctgctgg

SEQ ID NO: 2542494 - DNA, 25 bp, Homo sapien
ctacgagaagcaacggcctcttttc

SEQ ID NO: 2542495 - DNA, 25 bp, Homo sapien
gctgtctacaaagacgtttgagaaa

SEQ ID NO: 2542496 - DNA, 25 bp, Homo sapien
gcctgggtttgttttgtacttcatc

SEQ ID NO: 2542497 - DNA, 25 bp, Homo sapien
gctgatatgctaattcctgcttact

SEQ ID NO: 2542498 - DNA, 25 bp, Homo sapien
ccctgttgctatgtgtctgaagaga

SEQ ID NO: 2542499 - DNA, 25 bp, Homo sapien
aaagagaacacagtagtgtcttact

SEQ ID NO: 2542500 - DNA, 25 bp, Homo sapien
gtagtgtcttactgtgggcttttga

SEQ ID NO: 2542501 - DNA, 25 bp, Homo sapien
tctgtagagagcagatgttgcccgc

SEQ ID NO: 2542502 - DNA, 25 bp, Homo sapien
gttgcccgcagcctttgggactcca

SEQ ID NO: 2542503 - DNA, 25 bp, Homo sapien
aagaggcaaacgattaatacatgta

SEQ ID NO: 2542504 - DNA, 25 bp, Homo sapien
gatgggttacttttgcaattagaaa

SEQ ID NO: 2542505 - DNA, 25 bp, Homo sapien
agacaaaagaggcaaacgattaata

SEQ ID NO: 2542506 - DNA, 25 bp, Homo sapien
ccttggctcaacaaagatgggttac

SEQ ID NO: 2542507 - DNA, 25 bp, Homo sapien
ctttgcaattctgcaaacttagttc

SEQ ID NO: 2542508 - DNA, 25 bp, Homo sapien
tttgcaattctgcaaacttagttct

SEQ ID NO: 2542509 - DNA, 25 bp, Homo sapien
ttgcaattctgcaaacttagttctg

SEQ ID NO: 2542510 - DNA, 25 bp, Homo sapien
tgtaatggtctctcaggctgcaata

SEQ ID NO: 2542511 - DNA, 25 bp, Homo sapien
tattatcaataggaacacagcggtc

SEQ ID NO: 2542512 - DNA, 25 bp, Homo sapien
tgtaaactgtacgatacccagatcc

SEQ ID NO: 2542513 - DNA, 25 bp, Homo sapien
gcaataacaaaatgacacagcctgg

SEQ ID NO: 2542514 - DNA, 25 bp, Homo sapien
tcactgtgcgtatctctcatgtctc

SEQ ID NO: 2542515 - DNA, 25 bp, Homo sapien
gctggaggtcaaagacgaaggtggg

SEQ ID NO: 2542516 - DNA, 25 bp, Homo sapien
cagatgccaccttcgtactgtgtcc

SEQ ID NO: 2542517 - DNA, 25 bp, Homo sapien
tctgaggtccctctgcttggcgtgc

SEQ ID NO: 2542518 - DNA, 25 bp, Homo sapien
gggaatttgatacccattctgagaa

SEQ ID NO: 2542519 - DNA, 25 bp, Homo sapien
taggtctttaaattgaacaatggtg

SEQ ID NO: 2542520 - DNA, 25 bp, Homo sapien
ctctttttatgtggattatggaccc

SEQ ID NO: 2542521 - DNA, 25 bp, Homo sapien
tgtaaaattgagtaattccaattag

SEQ ID NO: 2542522 - DNA, 25 bp, Homo sapien
taataccatgctggaccagacattt

SEQ ID NO: 2542523 - DNA, 25 bp, Homo sapien
gacattttgtcattcaaggatgaat

SEQ ID NO: 2542524 - DNA, 25 bp, Homo sapien
catgctggaccagacattttgtcat

SEQ ID NO: 2542525 - DNA, 25 bp, Homo sapien
gaccagacattttgtcattcaagga

SEQ ID NO: 2542526 - DNA, 25 bp, Homo sapien
tcattattaatgctcccatagatac

SEQ ID NO: 2542527 - DNA, 25 bp, Homo sapien
gctgtcaagccagcacttagacatt

SEQ ID NO: 2542528 - DNA, 25 bp, Homo sapien
taaggccaaggtaagttctgtgcct

SEQ ID NO: 2542529 - DNA, 25 bp, Homo sapien
tgtgccttaggatcaggcattgcca

SEQ ID NO: 2542530 - DNA, 25 bp, Homo sapien
tattcaccaagttgagccccttttc

SEQ ID NO: 2542531 - DNA, 25 bp, Homo sapien
gatccagcagcgttcttttcaatgc

SEQ ID NO: 2542532 - DNA, 25 bp, Homo sapien
aaaaagtattcgaaactgacttgca

SEQ ID NO: 2542533 - DNA, 25 bp, Homo sapien
ctaggatgtggatccagcagcgttc

SEQ ID NO: 2542534 - DNA, 25 bp, Homo sapien
cattctgtgtagaccttcatgggct

SEQ ID NO: 2542535 - DNA, 25 bp, Homo sapien
ggaagtttcagtctgattcattctg

SEQ ID NO: 2542536 - DNA, 25 bp, Homo sapien
ctctggtctggtggaagtttcagtc

SEQ ID NO: 2542537 - DNA, 25 bp, Homo sapien
gcttgaggtctctggtctggtggaa

SEQ ID NO: 2542538 - DNA, 25 bp, Homo sapien
gagcccaggtcccttctaggattag

SEQ ID NO: 2542539 - DNA, 25 bp, Homo sapien
tttctggtgcacaggacatgaagcc

SEQ ID NO: 2542540 - DNA, 25 bp, Homo sapien
ttctggtgcacaggacatgaagcct

SEQ ID NO: 2542541 - DNA, 25 bp, Homo sapien
ttctaggattagaagcacttcccag

SEQ ID NO: 2542542 - DNA, 25 bp, Homo sapien
ccagacctttctgagcctcacacat

SEQ ID NO: 2542543 - DNA, 25 bp, Homo sapien
cagaaaaccagacctttctgagcct

SEQ ID NO: 2542544 - DNA, 25 bp, Homo sapien
agaaaaccagacctttctgagcctc

SEQ ID NO: 2542545 - DNA, 25 bp, Homo sapien
ctacagaaaaccagacctttctgag

SEQ ID NO: 2542546 - DNA, 25 bp, Homo sapien
gaggctccttgggtttctgagctga

SEQ ID NO: 2542547 - DNA, 25 bp, Homo sapien
gcaatgtccattaggagtttttgga

SEQ ID NO: 2542548 - DNA, 25 bp, Homo sapien
tcaatgggcaatgtccattaggagt

SEQ ID NO: 2542549 - DNA, 25 bp, Homo sapien
caaggcagcccatgtctgggcttca

SEQ ID NO: 2542550 - DNA, 25 bp, Homo sapien
ctgctttgctatcgggctgcactgt

SEQ ID NO: 2542551 - DNA, 25 bp, Homo sapien
ggctgctttgctatcgggctgcact

SEQ ID NO: 2542552 - DNA, 25 bp, Homo sapien
gctttgctatcgggctgcactgtct

SEQ ID NO: 2542553 - DNA, 25 bp, Homo sapien
tttgctatcgggctgcactgtctca

SEQ ID NO: 2542554 - DNA, 25 bp, Homo sapien
cgtcggaggaccacaaagctgcaag

SEQ ID NO: 2542555 - DNA, 25 bp, Homo sapien
aagctgcaagtggctttcctgcggc

SEQ ID NO: 2542556 - DNA, 25 bp, Homo sapien
ccgtcggaggaccacaaagctgcaa

SEQ ID NO: 2542557 - DNA, 25 bp, Homo sapien
gtaaaggtgtactttctatgtgcca

SEQ ID NO: 2542558 - DNA, 25 bp, Homo sapien
aaggtgtactttctatgtgccacca

SEQ ID NO: 2542559 - DNA, 25 bp, Homo sapien
tactttctatgtgccaccaagaaac

SEQ ID NO: 2542560 - DNA, 25 bp, Homo sapien
ggtgtactttctatgtgccaccaag

SEQ ID NO: 2542561 - DNA, 25 bp, Homo sapien
tctgcaatgcttttaagcttcaggg

SEQ ID NO: 2542562 - DNA, 25 bp, Homo sapien
cttggttatgctgagctctgcaatg

SEQ ID NO: 2542563 - DNA, 25 bp, Homo sapien
gctctgcaatgcttttaagcttcag

SEQ ID NO: 2542564 - DNA, 25 bp, Homo sapien
ttttcttattctgcttggttatgct

SEQ ID NO: 2542565 - DNA, 25 bp, Homo sapien
agaatattccatagagatatttggt

SEQ ID NO: 2542566 - DNA, 25 bp, Homo sapien
ctgtcttagaaagaatattccatag

SEQ ID NO: 2542567 - DNA, 25 bp, Homo sapien
tcttagaaagaatattccatagaga

SEQ ID NO: 2542568 - DNA, 25 bp, Homo sapien
ttccatagagatatttggttactac

SEQ ID NO: 2542569 - DNA, 25 bp, Homo sapien
agaattgacttctctataggaaggt

SEQ ID NO: 2542570 - DNA, 25 bp, Homo sapien
aattgacttctctataggaaggtcc

SEQ ID NO: 2542571 - DNA, 25 bp, Homo sapien
gaattgacttctctataggaaggtc

SEQ ID NO: 2542572 - DNA, 25 bp, Homo sapien
ttgacttctctataggaaggtccat

SEQ ID NO: 2542573 - DNA, 25 bp, Homo sapien
cgtaagcagctatggctagttccac

SEQ ID NO: 2542574 - DNA, 25 bp, Homo sapien
tagagcagccacttgtaggaacaat

SEQ ID NO: 2542575 - DNA, 25 bp, Homo sapien
caaggcaatagaacagggcacctgt

SEQ ID NO: 2542576 - DNA, 25 bp, Homo sapien
ggcacctgtgttggccagtaataaa

SEQ ID NO: 2542577 - DNA, 25 bp, Homo sapien
tgagctaaatcgcaggaagaaaaac

SEQ ID NO: 2542578 - DNA, 25 bp, Homo sapien
ttcccacatggaagctcgtatcttc

SEQ ID NO: 2542579 - DNA, 25 bp, Homo sapien
tatcttctgagctaaatcgcaggaa

SEQ ID NO: 2542580 - DNA, 25 bp, Homo sapien
ggaagctcgtatcttctgagctaaa

SEQ ID NO: 2542581 - DNA, 25 bp, Homo sapien
tttcccatgactaataatggcctca

SEQ ID NO: 2542582 - DNA, 25 bp, Homo sapien
gcactgatagaagccccaggagagt

SEQ ID NO: 2542583 - DNA, 25 bp, Homo sapien
gggcactgatagaagccccaggaga

SEQ ID NO: 2542584 - DNA, 25 bp, Homo sapien
catgactaataatggcctcatcagg

SEQ ID NO: 2542585 - DNA, 25 bp, Homo sapien
ccatgtgaattctgtttccagagcc

SEQ ID NO: 2542586 - DNA, 25 bp, Homo sapien
ctcctgcggcccacacaggtgggag

SEQ ID NO: 2542587 - DNA, 25 bp, Homo sapien
gcactagcacctcctgcggcccaca

SEQ ID NO: 2542588 - DNA, 25 bp, Homo sapien
tcactgtgttccatgtgaattctgt

SEQ ID NO: 2542589 - DNA, 25 bp, Homo sapien
ggaaggctgtggccaactttgccat

SEQ ID NO: 2542590 - DNA, 25 bp, Homo sapien
tgggggcagaggacttgggaagaaa

SEQ ID NO: 2542591 - DNA, 25 bp, Homo sapien
ctgggggcagaggacttgggaagaa

SEQ ID NO: 2542592 - DNA, 25 bp, Homo sapien
gaaaggaaggctgtggccaactttg

SEQ ID NO: 2542593 - DNA, 25 bp, Homo sapien
cagagtgtggaagggtgttgtagga

SEQ ID NO: 2542594 - DNA, 25 bp, Homo sapien
gagtgtggaagggtgttgtaggacg

SEQ ID NO: 2542595 - DNA, 25 bp, Homo sapien
gtgtggaagggtgttgtaggacgtg

SEQ ID NO: 2542596 - DNA, 25 bp, Homo sapien
agtgtggaagggtgttgtaggacgt

SEQ ID NO: 2542597 - DNA, 25 bp, Homo sapien
ctccagactgggtgtcaaaatatga

SEQ ID NO: 2542598 - DNA, 25 bp, Homo sapien
gactgggtgtcaaaatatgataatt

SEQ ID NO: 2542599 - DNA, 25 bp, Homo sapien
gctccagactgggtgtcaaaatatg

SEQ ID NO: 2542600 - DNA, 25 bp, Homo sapien
ccagactgggtgtcaaaatatgata

SEQ ID NO: 2542601 - DNA, 25 bp, Homo sapien
ctgaataccgttgcagagcttccag

SEQ ID NO: 2542602 - DNA, 25 bp, Homo sapien
ttagtatgggaaggatgtaaccagc

SEQ ID NO: 2542603 - DNA, 25 bp, Homo sapien
tgggaaggatgtaaccagcattttc

SEQ ID NO: 2542604 - DNA, 25 bp, Homo sapien
gaaggatgtaaccagcattttcggg

SEQ ID NO: 2542605 - DNA, 25 bp, Homo sapien
gatgtaaccagcattttcggggtat

SEQ ID NO: 2542606 - DNA, 25 bp, Homo sapien
acattttcggggtatgggctcgatg

SEQ ID NO: 2542607 - DNA, 25 bp, Homo sapien
ccaacattttcggggtatgggctcg

SEQ ID NO: 2542608 - DNA, 25 bp, Homo sapien
aacattttcggggtatgggctcgat

SEQ ID NO: 2542609 - DNA, 25 bp, Homo sapien
attttcggggtatgggctcgatggc

SEQ ID NO: 2542610 - DNA, 25 bp, Homo sapien
gggaaggatgtaaccagcattttcg

SEQ ID NO: 2542611 - DNA, 25 bp, Homo sapien
gaaggatgtaaccagcattttcggg

SEQ ID NO: 2542612 - DNA, 25 bp, Homo sapien
attttcggggtatggactcgatggc

SEQ ID NO: 2542613 - DNA, 25 bp, Homo sapien
gatgtaaccagcattttcggggtat

SEQ ID NO: 2542614 - DNA, 25 bp, Homo sapien
gggaaggatgtaaccagcattttcg

SEQ ID NO: 2542615 - DNA, 25 bp, Homo sapien
aaggatgtaaccagcattttcgggg

SEQ ID NO: 2542616 - DNA, 25 bp, Homo sapien
gaaggatgtaaccagcattttcggg

SEQ ID NO: 2542617 - DNA, 25 bp, Homo sapien
gatgtaaccagcattttcggggtat

SEQ ID NO: 2542618 - DNA, 25 bp, Homo sapien
acattttcggggtatgggctcgatg

SEQ ID NO: 2542619 - DNA, 25 bp, Homo sapien
ccaacattttcggggtatgggctcg

SEQ ID NO: 2542620 - DNA, 25 bp, Homo sapien
attttcggggtatgggctcgatggc

SEQ ID NO: 2542621 - DNA, 25 bp, Homo sapien
aacattttcggggtatgggctcgat

SEQ ID NO: 2542622 - DNA, 25 bp, Homo sapien
aacattttcggggtatgggctcgat

SEQ ID NO: 2542623 - DNA, 25 bp, Homo sapien
acattttcggggtatgggctcgatg

SEQ ID NO: 2542624 - DNA, 25 bp, Homo sapien
ccaacattttcggggtatgggctcg

SEQ ID NO: 2542625 - DNA, 25 bp, Homo sapien
attttcggggtatgggctcgatggc

SEQ ID NO: 2542626 - DNA, 25 bp, Homo sapien
gggaaggatgtaaccagcattttcg

SEQ ID NO: 2542627 - DNA, 25 bp, Homo sapien
gatgtaaccagcattttcggggtat

SEQ ID NO: 2542628 - DNA, 25 bp, Homo sapien
gaaggatgtaaccagcattttcggg

SEQ ID NO: 2542629 - DNA, 25 bp, Homo sapien
aaggatgtaaccagcattttcgggg

SEQ ID NO: 2542630 - DNA, 25 bp, Homo sapien
aaggatgtaaccagcattttcgggg

SEQ ID NO: 2542631 - DNA, 25 bp, Homo sapien
gggaaggatgtaaccagcattttcg

SEQ ID NO: 2542632 - DNA, 25 bp, Homo sapien
gaaggatgtaaccagcattttcggg

SEQ ID NO: 2542633 - DNA, 25 bp, Homo sapien
gatgtaaccagcattttcggggtat

SEQ ID NO: 2542634 - DNA, 25 bp, Homo sapien
aaggatgtaaccagcattttcgggg

SEQ ID NO: 2542635 - DNA, 25 bp, Homo sapien
gaaggatgtaaccagcattttcggg

SEQ ID NO: 2542636 - DNA, 25 bp, Homo sapien
gggaaggatgtaaccagcattttcg

SEQ ID NO: 2542637 - DNA, 25 bp, Homo sapien
gatgtaaccagcattttcggggtat

SEQ ID NO: 2542638 - DNA, 25 bp, Homo sapien
gaaggatgtaaccagcattttcggg

SEQ ID NO: 2542639 - DNA, 25 bp, Homo sapien
aaggatgtaaccagcattttcgggg

SEQ ID NO: 2542640 - DNA, 25 bp, Homo sapien
gggaaggatgtaaccagcattttcg

SEQ ID NO: 2542641 - DNA, 25 bp, Homo sapien
gatgtaaccagcattttcggggtat

SEQ ID NO: 2542642 - DNA, 25 bp, Homo sapien
aaggatgtaaccagcattttcgggg

SEQ ID NO: 2542643 - DNA, 25 bp, Homo sapien
gatgtaaccagcattttcggggtat

SEQ ID NO: 2542644 - DNA, 25 bp, Homo sapien
gaaggatgtaaccagcattttcggg

SEQ ID NO: 2542645 - DNA, 25 bp, Homo sapien
gggaaggatgtaaccagcattttcg

SEQ ID NO: 2542646 - DNA, 25 bp, Homo sapien
gggaaggatgtaaccagcattttcg

SEQ ID NO: 2542647 - DNA, 25 bp, Homo sapien
aaggatgtaaccagcattttcgggg

SEQ ID NO: 2542648 - DNA, 25 bp, Homo sapien
gaaggatgtaaccagcattttcggg

SEQ ID NO: 2542649 - DNA, 25 bp, Homo sapien
gatgtaaccagcattttcggggtat

SEQ ID NO: 2542650 - DNA, 25 bp, Homo sapien
gaaggatgtaaccagcattttcggg

SEQ ID NO: 2542651 - DNA, 25 bp, Homo sapien
gatgtaaccagcattttcggggtat

SEQ ID NO: 2542652 - DNA, 25 bp, Homo sapien
gggaaggatgtaaccagcattttcg

SEQ ID NO: 2542653 - DNA, 25 bp, Homo sapien
aaggatgtaaccagcattttcgggg

SEQ ID NO: 2542654 - DNA, 25 bp, Homo sapien
aaggatgtaaccagcattttcgggg

SEQ ID NO: 2542655 - DNA, 25 bp, Homo sapien
gatgtaaccagcattttcggggtat

SEQ ID NO: 2542656 - DNA, 25 bp, Homo sapien
gggaaggatgtaaccagcattttcg

SEQ ID NO: 2542657 - DNA, 25 bp, Homo sapien
gaaggatgtaaccagcattttcggg

SEQ ID NO: 2542658 - DNA, 25 bp, Homo sapien
gggaaggatgtaaccagcattttcg

SEQ ID NO: 2542659 - DNA, 25 bp, Homo sapien
aaggatgtaaccagcattttcgggg

SEQ ID NO: 2542660 - DNA, 25 bp, Homo sapien
gaaggatgtaaccagcattttcggg

SEQ ID NO: 2542661 - DNA, 25 bp, Homo sapien
gatgtaaccagcattttcggggtat

SEQ ID NO: 2542662 - DNA, 25 bp, Homo sapien
gggaaggatgtaaccagcattttcg

SEQ ID NO: 2542663 - DNA, 25 bp, Homo sapien
aaggatgtaaccagcattttcgggg

SEQ ID NO: 2542664 - DNA, 25 bp, Homo sapien
gatgtaaccagcattttcggggtat

SEQ ID NO: 2542665 - DNA, 25 bp, Homo sapien
gaaggatgtaaccagcattttcggg

SEQ ID NO: 2542666 - DNA, 25 bp, Homo sapien
gggaaggatgtaaccagcattttcg

SEQ ID NO: 2542667 - DNA, 25 bp, Homo sapien
aaggatgtaaccagcattttcgggg

SEQ ID NO: 2542668 - DNA, 25 bp, Homo sapien
gaaggatgtaaccagcattttcggg

SEQ ID NO: 2542669 - DNA, 25 bp, Homo sapien
gatgtaaccagcattttcggggtat

SEQ ID NO: 2542670 - DNA, 25 bp, Homo sapien
gggaaggatgtaaccagcattttcg

SEQ ID NO: 2542671 - DNA, 25 bp, Homo sapien
aaggatgtaaccagcattttcgggg

SEQ ID NO: 2542672 - DNA, 25 bp, Homo sapien
gaaggatgtaaccagcattttcggg

SEQ ID NO: 2542673 - DNA, 25 bp, Homo sapien
gatgtaaccagcattttcggggtat

SEQ ID NO: 2542674 - DNA, 25 bp, Homo sapien
aaggatgtaaccagcattttcgggg

SEQ ID NO: 2542675 - DNA, 25 bp, Homo sapien
gaaggatgtaaccagcattttcggg

SEQ ID NO: 2542676 - DNA, 25 bp, Homo sapien
gatgtaaccagcattttcggggtat

SEQ ID NO: 2542677 - DNA, 25 bp, Homo sapien
gggaaggatgtaaccagcattttcg

SEQ ID NO: 2542678 - DNA, 25 bp, Homo sapien
gggaaggatgtaaccagcattttcg

SEQ ID NO: 2542679 - DNA, 25 bp, Homo sapien
aaggatgtaaccagcattttcgggg

SEQ ID NO: 2542680 - DNA, 25 bp, Homo sapien
gaaggatgtaaccagcattttcggg

SEQ ID NO: 2542681 - DNA, 25 bp, Homo sapien
gatgtaaccagcattttcggggtat

SEQ ID NO: 2542682 - DNA, 25 bp, Homo sapien
gggaaggatgtaaccagcattttcg

SEQ ID NO: 2542683 - DNA, 25 bp, Homo sapien
aaggatgtaaccagcattttcgggg

SEQ ID NO: 2542684 - DNA, 25 bp, Homo sapien
gaaggatgtaaccagcattttcggg

SEQ ID NO: 2542685 - DNA, 25 bp, Homo sapien
gatgtaaccagcattttcggggtat

SEQ ID NO: 2542686 - DNA, 25 bp, Homo sapien
gctcgatagcttatttagccgacct

SEQ ID NO: 2542687 - DNA, 25 bp, Homo sapien
atgggctcgatagcttatttagccg

SEQ ID NO: 2542688 - DNA, 25 bp, Homo sapien
gggctcgatagcttatttagccgac

SEQ ID NO: 2542689 - DNA, 25 bp, Homo sapien
cgatagcttatttagccgaccttat

SEQ ID NO: 2542690 - DNA, 25 bp, Homo sapien
taaaatagatgaaggcagaatctcc

SEQ ID NO: 2542691 - DNA, 25 bp, Homo sapien
tccttgtagtcatggtcagagctta

SEQ ID NO: 2542692 - DNA, 25 bp, Homo sapien
tcagtagaacacattacatggccac

SEQ ID NO: 2542693 - DNA, 25 bp, Homo sapien
aatgctgatatcaagaaggtcatcc

SEQ ID NO: 2542694 - DNA, 25 bp, Homo sapien
attattgatatctaccacaaaccaa

SEQ ID NO: 2542695 - DNA, 25 bp, Homo sapien
tctgaagtgttgtgttgggaacgtc

SEQ ID NO: 2542696 - DNA, 25 bp, Homo sapien
accacaaaccaatacctgtgagttg

SEQ ID NO: 2542697 - DNA, 25 bp, Homo sapien
acccagatatggcaaatggatttaa

SEQ ID NO: 2542698 - DNA, 25 bp, Homo sapien
gaattgcaaacttccatcacgtttc

SEQ ID NO: 2542699 - DNA, 25 bp, Homo sapien
ccatcacgtttctcgtaattatcag

SEQ ID NO: 2542700 - DNA, 25 bp, Homo sapien
acttctggaattgcaaacttccatc

SEQ ID NO: 2542701 - DNA, 25 bp, Homo sapien
tcacgtttctcgtaattatcagata

SEQ ID NO: 2542702 - DNA, 25 bp, Homo sapien
gtccaggatgttgtttctatctgta

SEQ ID NO: 2542703 - DNA, 25 bp, Homo sapien
ttgtccaggatgttgtttctatctg

SEQ ID NO: 2542704 - DNA, 25 bp, Homo sapien
ttcacattccctttcaatcccaaac

SEQ ID NO: 2542705 - DNA, 25 bp, Homo sapien
tccaggatgttgtttctatctgtat

SEQ ID NO: 2542706 - DNA, 25 bp, Homo sapien
tgacacccccggcatctgggttccc

SEQ ID NO: 2542707 - DNA, 25 bp, Homo sapien
ttttggagctgtggtgatgagcagg

SEQ ID NO: 2542708 - DNA, 25 bp, Homo sapien
gcaggcctcacactgttttttggag

SEQ ID NO: 2542709 - DNA, 25 bp, Homo sapien
cctcacactgttttttggagctgtg

SEQ ID NO: 2542710 - DNA, 25 bp, Homo sapien
ttcttctcatatgggggttgagtgg

SEQ ID NO: 2542711 - DNA, 25 bp, Homo sapien
ggtggggtgctactgccagtcattc

SEQ ID NO: 2542712 - DNA, 25 bp, Homo sapien
tgggaattgtgggcccacagtgtct

SEQ ID NO: 2542713 - DNA, 25 bp, Homo sapien
cacagtgtctggtgaaagaagagga

SEQ ID NO: 2542714 - DNA, 25 bp, Homo sapien
tcggggatgcagatgtccaggtgtc

SEQ ID NO: 2542715 - DNA, 25 bp, Homo sapien
gatgtccaggtgtccaataccagtt

SEQ ID NO: 2542716 - DNA, 25 bp, Homo sapien
gctttctttcaggctcaagtcactt

SEQ ID NO: 2542717 - DNA, 25 bp, Homo sapien
ctttcaggctcaagtcactttggag

SEQ ID NO: 2542718 - DNA, 25 bp, Homo sapien
tttctttcaggctcaagtcactttg

SEQ ID NO: 2542719 - DNA, 25 bp, Homo sapien
tctttcaggctcaagtcactttgga

SEQ ID NO: 2542720 - DNA, 25 bp, Homo sapien
ataataaatgttagtggatatactg

SEQ ID NO: 2542721 - DNA, 25 bp, Homo sapien
ataaatgttagtggatatactggct

SEQ ID NO: 2542722 - DNA, 25 bp, Homo sapien
ggatatactggctgaaagattatct

SEQ ID NO: 2542723 - DNA, 25 bp, Homo sapien
aataaatgttagtggatatactggc

SEQ ID NO: 2542724 - DNA, 25 bp, Homo sapien
tggttgatttcaatgggccttcccc

SEQ ID NO: 2542725 - DNA, 25 bp, Homo sapien
catcccaatataggcgtgcttctgt

SEQ ID NO: 2542726 - DNA, 25 bp, Homo sapien
ttttgggaagcagccagttccaacc

SEQ ID NO: 2542727 - DNA, 25 bp, Homo sapien
gctgcaggaccgtaaacttttggga

SEQ ID NO: 2542728 - DNA, 25 bp, Homo sapien
gattgttattccagcccctggcttg

SEQ ID NO: 2542729 - DNA, 25 bp, Homo sapien
gaatcctgggattgttattccagcc

SEQ ID NO: 2542730 - DNA, 25 bp, Homo sapien
gtccactggaatcctgggattgtta

SEQ ID NO: 2542731 - DNA, 25 bp, Homo sapien
gtttcagatgatgcagtcagcagcg

SEQ ID NO: 2542732 - DNA, 25 bp, Homo sapien
aaaatacttatcatgaggtctaccc

SEQ ID NO: 2542733 - DNA, 25 bp, Homo sapien
ttaacaagtttttatctgtgcaaca

SEQ ID NO: 2542734 - DNA, 25 bp, Homo sapien
atgaacacaatcgaggtaataaaca

SEQ ID NO: 2542735 - DNA, 25 bp, Homo sapien
acacaatcgaggtaataaacatatc

SEQ ID NO: 2542736 - DNA, 25 bp, Homo sapien
tattcaaagtcagagcacaagacca

SEQ ID NO: 2542737 - DNA, 25 bp, Homo sapien
gttcacctccgcatatgttcgctgg

SEQ ID NO: 2542738 - DNA, 25 bp, Homo sapien
gcagaaaatttaggcgaagcttctc

SEQ ID NO: 2542739 - DNA, 25 bp, Homo sapien
tccttggactcctcctgaatgaaag

SEQ ID NO: 2542740 - DNA, 25 bp, Homo sapien
taaaaattagtcatcttgcttcggt

SEQ ID NO: 2542741 - DNA, 25 bp, Homo sapien
tcatggcttgccagtgaagtggcag

SEQ ID NO: 2542742 - DNA, 25 bp, Homo sapien
gcttcggtctactggtgttcttcaa

SEQ ID NO: 2542743 - DNA, 25 bp, Homo sapien
agtggcaggttttgcatactttggc

SEQ ID NO: 2542744 - DNA, 25 bp, Homo sapien
gagcctcacctgcataaaatccaga

SEQ ID NO: 2542745 - DNA, 25 bp, Homo sapien
gcctcacctgcataaaatccagagc

SEQ ID NO: 2542746 - DNA, 25 bp, Homo sapien
ctcacctgcataaaatccagagctc

SEQ ID NO: 2542747 - DNA, 25 bp, Homo sapien
ggagcctcacctgcataaaatccag

SEQ ID NO: 2542748 - DNA, 25 bp, Homo sapien
tactgcgactgccacagttttcagg

SEQ ID NO: 2542749 - DNA, 25 bp, Homo sapien
ttcccacagttactgcgactgccac

SEQ ID NO: 2542750 - DNA, 25 bp, Homo sapien
tgcgactgccacagttttcagggtt

SEQ ID NO: 2542751 - DNA, 25 bp, Homo sapien
cacagttactgcgactgccacagtt

SEQ ID NO: 2542752 - DNA, 25 bp, Homo sapien
cagacctgtgcccttgagaggagat

SEQ ID NO: 2542753 - DNA, 25 bp, Homo sapien
cagtttgcacctatgagtccgatgg

SEQ ID NO: 2542754 - DNA, 25 bp, Homo sapien
tgagtcatgcctgttctagccagtt

SEQ ID NO: 2542755 - DNA, 25 bp, Homo sapien
gatatatgccagttcacgtctctcc

SEQ ID NO: 2542756 - DNA, 25 bp, Homo sapien
tgccaattacacttcagttcatgtg

SEQ ID NO: 2542757 - DNA, 25 bp, Homo sapien
aaatccatgccccttccacgaagaa

SEQ ID NO: 2542758 - DNA, 25 bp, Homo sapien
aatgatttcattgcccagagatgtg

SEQ ID NO: 2542759 - DNA, 25 bp, Homo sapien
cagttcatgtgtcaggtcccaaaag

SEQ ID NO: 2542760 - DNA, 25 bp, Homo sapien
tcttcccgatagtcattgttttttc

SEQ ID NO: 2542761 - DNA, 25 bp, Homo sapien
tctggaacatttgccttggcagcaa

SEQ ID NO: 2542762 - DNA, 25 bp, Homo sapien
tctttatggctaaattgcttttgtc

SEQ ID NO: 2542763 - DNA, 25 bp, Homo sapien
tttgtccagacagtaatttgcccag

SEQ ID NO: 2542764 - DNA, 25 bp, Homo sapien
tgtgatcctggagcacgaagtgaca

SEQ ID NO: 2542765 - DNA, 25 bp, Homo sapien
gaagagatgatcagttcagaaggcc

SEQ ID NO: 2542766 - DNA, 25 bp, Homo sapien
tcagaaggcccgagaaaagacaagg

SEQ ID NO: 2542767 - DNA, 25 bp, Homo sapien
tcaaggcaccgacgtagaaagggtc

SEQ ID NO: 2542768 - DNA, 25 bp, Homo sapien
caaactcctgatgttttcctgggca

SEQ ID NO: 2542769 - DNA, 25 bp, Homo sapien
cagagtcctgaagctgaccatgtgg

SEQ ID NO: 2542770 - DNA, 25 bp, Homo sapien
tcacccagaataaggactgcctttg

SEQ ID NO: 2542771 - DNA, 25 bp, Homo sapien
tgtggctctgtgactgggtcctaag

SEQ ID NO: 2542772 - DNA, 25 bp, Homo sapien
cagctgaggttatggcaggtatcca

SEQ ID NO: 2542773 - DNA, 25 bp, Homo sapien
actcattctgctgctatgagcgagg

SEQ ID NO: 2542774 - DNA, 25 bp, Homo sapien
gcttggaccaggtggccatggtgga

SEQ ID NO: 2542775 - DNA, 25 bp, Homo sapien
ctgctatgagcgaggagactgggcc

SEQ ID NO: 2542776 - DNA, 25 bp, Homo sapien
tcctccgaagcaattgttaaagact

SEQ ID NO: 2542777 - DNA, 25 bp, Homo sapien
ccagggtgtacagattatggctctt

SEQ ID NO: 2542778 - DNA, 25 bp, Homo sapien
tcccagtgaataagtttgacacctg

SEQ ID NO: 2542779 - DNA, 25 bp, Homo sapien
ccccatgtttccagtagtttagtga

SEQ ID NO: 2542780 - DNA, 25 bp, Homo sapien
attacatgtttctcattgtccataa

SEQ ID NO: 2542781 - DNA, 25 bp, Homo sapien
tacatgtttctcattgtccataaga

SEQ ID NO: 2542782 - DNA, 25 bp, Homo sapien
ttacatgtttctcattgtccataag

SEQ ID NO: 2542783 - DNA, 25 bp, Homo sapien
catgaaggtgttcccgccattgaga

SEQ ID NO: 2542784 - DNA, 25 bp, Homo sapien
gccatgaaggtgttcccgccattga

SEQ ID NO: 2542785 - DNA, 25 bp, Homo sapien
tataaaggggccatgaaggtgttcc

SEQ ID NO: 2542786 - DNA, 25 bp, Homo sapien
gggccatgaaggtgttcccgccatt

SEQ ID NO: 2542787 - DNA, 25 bp, Homo sapien
tattcccagagagattggaaacata

SEQ ID NO: 2542788 - DNA, 25 bp, Homo sapien
tcccagagagattggaaacataatc

SEQ ID NO: 2542789 - DNA, 25 bp, Homo sapien
ccagagagattggaaacataatcac

SEQ ID NO: 2542790 - DNA, 25 bp, Homo sapien
cttattcccagagagattggaaaca

SEQ ID NO: 2542791 - DNA, 25 bp, Homo sapien
atgccttcaatctgcagctctggag

SEQ ID NO: 2542792 - DNA, 25 bp, Homo sapien
tatgccttcaatctgcagctctgga

SEQ ID NO: 2542793 - DNA, 25 bp, Homo sapien
aatatgccttcaatctgcagctctg

SEQ ID NO: 2542794 - DNA, 25 bp, Homo sapien
gaaaatatgccttcaatctgcagct

SEQ ID NO: 2542795 - DNA, 25 bp, Homo sapien
tactgagtggattccggatatccgg

SEQ ID NO: 2542796 - DNA, 25 bp, Homo sapien
tccctctcttaaggtagatgcttct

SEQ ID NO: 2542797 - DNA, 25 bp, Homo sapien
cattatctcgtctgtagttggtcaa

SEQ ID NO: 2542798 - DNA, 25 bp, Homo sapien
actgaatggaaggactactggtgta

SEQ ID NO: 2542799 - DNA, 25 bp, Homo sapien
cattgtgaaatgtagaccagggaag

SEQ ID NO: 2542800 - DNA, 25 bp, Homo sapien
ccactgcagtcgtccaagggtgggt

SEQ ID NO: 2542801 - DNA, 25 bp, Homo sapien
aaagtctatagatcgctggcacaag

SEQ ID NO: 2542802 - DNA, 25 bp, Homo sapien
gggtgccagcttttgcatcctatgg

SEQ ID NO: 2542803 - DNA, 25 bp, Homo sapien
tgactggttagttccctcgaggcct

SEQ ID NO: 2542804 - DNA, 25 bp, Homo sapien
tgccaccatgacacggaacagcttt

SEQ ID NO: 2542805 - DNA, 25 bp, Homo sapien
taaattcgatggttgcttctgactg

SEQ ID NO: 2542806 - DNA, 25 bp, Homo sapien
aatactgatgccctttgtaaagctc

SEQ ID NO: 2542807 - DNA, 25 bp, Homo sapien
tatcttcagggctattctttcaggg

SEQ ID NO: 2542808 - DNA, 25 bp, Homo sapien
agaagacgttcccacaatgaggcag

SEQ ID NO: 2542809 - DNA, 25 bp, Homo sapien
cacacatagagcgagagggcggctc

SEQ ID NO: 2542810 - DNA, 25 bp, Homo sapien
gattaacaggtctcagtcttgggct

SEQ ID NO: 2542811 - DNA, 25 bp, Homo sapien
tcaacatcttcagatacctagaagg

SEQ ID NO: 2542812 - DNA, 25 bp, Homo sapien
tcaggctctcctaatggctatgtgt

SEQ ID NO: 2542813 - DNA, 25 bp, Homo sapien
ttgcccctcagtgggaagaaagctt

SEQ ID NO: 2542814 - DNA, 25 bp, Homo sapien
ggcatttacctctgctgttccagga

SEQ ID NO: 2542815 - DNA, 25 bp, Homo sapien
gattggcagatgacagagggcctct

SEQ ID NO: 2542816 - DNA, 25 bp, Homo sapien
gacaaaccggcagttgacagcgtag

SEQ ID NO: 2542817 - DNA, 25 bp, Homo sapien
tggactagaagcgagaacaagaact

SEQ ID NO: 2542818 - DNA, 25 bp, Homo sapien
tctatgggaaagtcatggtggtatc

SEQ ID NO: 2542819 - DNA, 25 bp, Homo sapien
catatcgaatgcagagcagcccttc

SEQ ID NO: 2542820 - DNA, 25 bp, Homo sapien
tacggaagctgctaaggaactcagt

SEQ ID NO: 2542821 - DNA, 25 bp, Homo sapien
caaaggacctcctacggaagctgct

SEQ ID NO: 2542822 - DNA, 25 bp, Homo sapien
ttttttgtgcggttgcagagagtca

SEQ ID NO: 2542823 - DNA, 25 bp, Homo sapien
gtgtaaacactgaactgagacctgc

SEQ ID NO: 2542824 - DNA, 25 bp, Homo sapien
ctgcgtggagccatgtgtaaacact

SEQ ID NO: 2542825 - DNA, 25 bp, Homo sapien
gccatgtgtaaacactgaactgaga

SEQ ID NO: 2542826 - DNA, 25 bp, Homo sapien
tgcgtggagccatgtgtaaacactg

SEQ ID NO: 2542827 - DNA, 25 bp, Homo sapien
aagatggaacagatgtgtccaaccc

SEQ ID NO: 2542828 - DNA, 25 bp, Homo sapien
atggaacagatgtgtccaacccggg

SEQ ID NO: 2542829 - DNA, 25 bp, Homo sapien
ctggaagtcccatgagttgttagtg

SEQ ID NO: 2542830 - DNA, 25 bp, Homo sapien
gtcccatgagttgttagtggtgaag

SEQ ID NO: 2542831 - DNA, 25 bp, Homo sapien
gccctggtcctaggtcatagttgtt

SEQ ID NO: 2542832 - DNA, 25 bp, Homo sapien
ccctggtcctaggtcatagttgttc

SEQ ID NO: 2542833 - DNA, 25 bp, Homo sapien
tcaagttaggggtgaagattcctga

SEQ ID NO: 2542834 - DNA, 25 bp, Homo sapien
ctctccagtgttatgaagttcaagt

SEQ ID NO: 2542835 - DNA, 25 bp, Homo sapien
cagagcttaattttccgttgtgttt

SEQ ID NO: 2542836 - DNA, 25 bp, Homo sapien
tccgttgtgttttagagttctgttg

SEQ ID NO: 2542837 - DNA, 25 bp, Homo sapien
gttttgtagaatctttccacagcat

SEQ ID NO: 2542838 - DNA, 25 bp, Homo sapien
gcatttatgctccttttcatagaag

SEQ ID NO: 2542839 - DNA, 25 bp, Homo sapien
ctccttttcatagaagcggctcaat

SEQ ID NO: 2542840 - DNA, 25 bp, Homo sapien
ggttttagtcatgttgttttgtaga

SEQ ID NO: 2542841 - DNA, 25 bp, Homo sapien
ctcagccaggtgttgatggaggaca

SEQ ID NO: 2542842 - DNA, 25 bp, Homo sapien
ggacagaggattaagaggaagcctt

SEQ ID NO: 2542843 - DNA, 25 bp, Homo sapien
tgtggattcagatctgggcgatacc

SEQ ID NO: 2542844 - DNA, 25 bp, Homo sapien
gagttacagggaccgaagcagctgc

SEQ ID NO: 2542845 - DNA, 25 bp, Homo sapien
tctctctgtcttataggcaaatgag

SEQ ID NO: 2542846 - DNA, 25 bp, Homo sapien
ccgggtcaatacatgacgggattaa

SEQ ID NO: 2542847 - DNA, 25 bp, Homo sapien
tgtttccgggtcaatacatgacggg

SEQ ID NO: 2542848 - DNA, 25 bp, Homo sapien
aatgagatgatgtttccgggtcaat

SEQ ID NO: 2542849 - DNA, 25 bp, Homo sapien
gacgtggtttcatcttgcaattcga

SEQ ID NO: 2542850 - DNA, 25 bp, Homo sapien
ataatgagtgaacaaaaaaggattc

SEQ ID NO: 2542851 - DNA, 25 bp, Homo sapien
aatgaggtgaggttgaccctttgca

SEQ ID NO: 2542852 - DNA, 25 bp, Homo sapien
tctttcacagaccaataataataac

SEQ ID NO: 2542853 - DNA, 25 bp, Homo sapien
ttatagaatgatccaagtaacagaa

SEQ ID NO: 2542854 - DNA, 25 bp, Homo sapien
tcctgcccgctaacagagagagcca

SEQ ID NO: 2542855 - DNA, 25 bp, Homo sapien
gtaacagaaggtcctgcccgctaac

SEQ ID NO: 2542856 - DNA, 25 bp, Homo sapien
tttattccactgcttctaaatgttg

SEQ ID NO: 2542857 - DNA, 25 bp, Homo sapien
gacaaatgaagcatgaagctttctg

SEQ ID NO: 2542858 - DNA, 25 bp, Homo sapien
taagcagtcatagggacctctcatt

SEQ ID NO: 2542859 - DNA, 25 bp, Homo sapien
tctaagcagtcatagggacctctca

SEQ ID NO: 2542860 - DNA, 25 bp, Homo sapien
aagcagtcatagggacctctcattt

SEQ ID NO: 2542861 - DNA, 25 bp, Homo sapien
catctaagcagtcatagggacctct

SEQ ID NO: 2542862 - DNA, 25 bp, Homo sapien
aacaggacaaaagtgcctagataag

SEQ ID NO: 2542863 - DNA, 25 bp, Homo sapien
caggacaaaagtgcctagataagtc

SEQ ID NO: 2542864 - DNA, 25 bp, Homo sapien
cttgaaacaggacaaaagtgcctag

SEQ ID NO: 2542865 - DNA, 25 bp, Homo sapien
ggacaaaagtgcctagataagtcat

SEQ ID NO: 2542866 - DNA, 25 bp, Homo sapien
caaaatgttatctatgctatgagct

SEQ ID NO: 2542867 - DNA, 25 bp, Homo sapien
ggatccttcttgacttgagcagagg

SEQ ID NO: 2542868 - DNA, 25 bp, Homo sapien
taggaaaatgttccaccttatgtac

SEQ ID NO: 2542869 - DNA, 25 bp, Homo sapien
tctgtcaattggtaacatgtcttct

SEQ ID NO: 2542870 - DNA, 25 bp, Homo sapien
gattatagggatggacaatcagccg

SEQ ID NO: 2542871 - DNA, 25 bp, Homo sapien
gtctcattacaattaggcctaaaca

SEQ ID NO: 2542872 - DNA, 25 bp, Homo sapien
gggtgtggtgaaacataagaattac

SEQ ID NO: 2542873 - DNA, 25 bp, Homo sapien
tgtttcctggaatgcttagccgggc

SEQ ID NO: 2542874 - DNA, 25 bp, Homo sapien
tggatgaagccccttagtcctcaat

SEQ ID NO: 2542875 - DNA, 25 bp, Homo sapien
tgcagtgcttcagtcaaggtgatca

SEQ ID NO: 2542876 - DNA, 25 bp, Homo sapien
gatgaagccccttagtcctcaatct

SEQ ID NO: 2542877 - DNA, 25 bp, Homo sapien
gcatcaggctgtctttatcttgtct

SEQ ID NO: 2542878 - DNA, 25 bp, Homo sapien
ccaaatcatatcagataccctttca

SEQ ID NO: 2542879 - DNA, 25 bp, Homo sapien
tcctatcctaaccaatcaatgaccc

SEQ ID NO: 2542880 - DNA, 25 bp, Homo sapien
gtcctgatggtttatccctcctatc

SEQ ID NO: 2542881 - DNA, 25 bp, Homo sapien
gaaactactaactcagctggtctga

SEQ ID NO: 2542882 - DNA, 25 bp, Homo sapien
gtgggcatggcagcctgctgtgttc

SEQ ID NO: 2542883 - DNA, 25 bp, Homo sapien
tcttcaatggggttatgctgggtac

SEQ ID NO: 2542884 - DNA, 25 bp, Homo sapien
tcccagggaacagctcttcaatggg

SEQ ID NO: 2542885 - DNA, 25 bp, Homo sapien
aggtcccagggaacagctcttcaat

SEQ ID NO: 2542886 - DNA, 25 bp, Homo sapien
tagagaggttctgttcattatgatc

SEQ ID NO: 2542887 - DNA, 25 bp, Homo sapien
aatgaaaaccactgtattgaatact

SEQ ID NO: 2542888 - DNA, 25 bp, Homo sapien
cctcagtggtttgaaacaataaggt

SEQ ID NO: 2542889 - DNA, 25 bp, Homo sapien
ataggttcttcagtgatcagtagag

SEQ ID NO: 2542890 - DNA, 25 bp, Homo sapien
cctgatgtgcgtctagtctaggctg

SEQ ID NO: 2542891 - DNA, 25 bp, Homo sapien
ctcgattagagagtgtgctgcggca

SEQ ID NO: 2542892 - DNA, 25 bp, Homo sapien
cgaaggttcttctcaatcgaagggt

SEQ ID NO: 2542893 - DNA, 25 bp, Homo sapien
cgagaagtcttcttccgaccgaagg

SEQ ID NO: 2542894 - DNA, 25 bp, Homo sapien
aatgattaacacatctccaggagga

SEQ ID NO: 2542895 - DNA, 25 bp, Homo sapien
gttttcatgtcagtgcagatctcgc

SEQ ID NO: 2542896 - DNA, 25 bp, Homo sapien
gatcccatagagtgtggctttgcca

SEQ ID NO: 2542897 - DNA, 25 bp, Homo sapien
taaatgtggcattggctctaagggc

SEQ ID NO: 2542898 - DNA, 25 bp, Homo sapien
atggagcggcccaggcactgtgttc

SEQ ID NO: 2542899 - DNA, 25 bp, Homo sapien
cacagcggcatttgcagtgaggtca

SEQ ID NO: 2542900 - DNA, 25 bp, Homo sapien
agtgaggtcaggatgccaatcagtg

SEQ ID NO: 2542901 - DNA, 25 bp, Homo sapien
tcagtgtgatcatctgtgtgtctac

SEQ ID NO: 2542902 - DNA, 25 bp, Homo sapien
ggttcccattatggcctctatccac

SEQ ID NO: 2542903 - DNA, 25 bp, Homo sapien
cagtgcaaaactttagtgaagaatc

SEQ ID NO: 2542904 - DNA, 25 bp, Homo sapien
tcgttcccacatccgatccctgaca

SEQ ID NO: 2542905 - DNA, 25 bp, Homo sapien
tctctccagtgcaaaactttagtga

SEQ ID NO: 2542906 - DNA, 25 bp, Homo sapien
gtggtgtgatcccaactcaatgcaa

SEQ ID NO: 2542907 - DNA, 25 bp, Homo sapien
ctcaattgatcttgctcaccttggc

SEQ ID NO: 2542908 - DNA, 25 bp, Homo sapien
tgacctcaattgatcttgctcacct

SEQ ID NO: 2542909 - DNA, 25 bp, Homo sapien
gacctcaattgatcttgctcacctt

SEQ ID NO: 2542910 - DNA, 25 bp, Homo sapien
tgcagggacgtgagtccattctggt

SEQ ID NO: 2542911 - DNA, 25 bp, Homo sapien
cagggacgtgagtccattctggtag

SEQ ID NO: 2542912 - DNA, 25 bp, Homo sapien
ctttctgtctgctagctgtgtgtca

SEQ ID NO: 2542913 - DNA, 25 bp, Homo sapien
ttctgcagggacgtgagtccattct

SEQ ID NO: 2542914 - DNA, 25 bp, Homo sapien
gggccggccctgctccagtggtcct

SEQ ID NO: 2542915 - DNA, 25 bp, Homo sapien
ggccggccctgctccagtggtcctc

SEQ ID NO: 2542916 - DNA, 25 bp, Homo sapien
ctgaggccacctggacacctgtggg

SEQ ID NO: 2542917 - DNA, 25 bp, Homo sapien
ccacctggacacctgtgggccggcc

SEQ ID NO: 2542918 - DNA, 25 bp, Homo sapien
gcctcaagttcagttactccatcac

SEQ ID NO: 2542919 - DNA, 25 bp, Homo sapien
tagcaggtgcattgccagcatgagc

SEQ ID NO: 2542920 - DNA, 25 bp, Homo sapien
ttaatacttagcaggtgcattgcca

SEQ ID NO: 2542921 - DNA, 25 bp, Homo sapien
agttcagttactccatcactggctg

SEQ ID NO: 2542922 - DNA, 25 bp, Homo sapien
gagagaggcaactctatgtcctgtg

SEQ ID NO: 2542923 - DNA, 25 bp, Homo sapien
gggagttcaggcttctcggcatttg

SEQ ID NO: 2542924 - DNA, 25 bp, Homo sapien
cccaggggagttcaggcttctcggc

SEQ ID NO: 2542925 - DNA, 25 bp, Homo sapien
aggcttctcggcatttgcaggctgg

SEQ ID NO: 2542926 - DNA, 25 bp, Homo sapien
tcatagtggcagtaaaattcagagc

SEQ ID NO: 2542927 - DNA, 25 bp, Homo sapien
agggtagcaggatctttttacttgc

SEQ ID NO: 2542928 - DNA, 25 bp, Homo sapien
aagcaggcgagggtagcaggatctt

SEQ ID NO: 2542929 - DNA, 25 bp, Homo sapien
ggcgagggtagcaggatctttttac

SEQ ID NO: 2542930 - DNA, 25 bp, Homo sapien
ccttctcaggagtggtctctgacct

SEQ ID NO: 2542931 - DNA, 25 bp, Homo sapien
cacactaggaggttgtagccttctc

SEQ ID NO: 2542932 - DNA, 25 bp, Homo sapien
cttgtgtgttccgtgagtcacacta

SEQ ID NO: 2542933 - DNA, 25 bp, Homo sapien
tgttccgtgagtcacactaggaggt

SEQ ID NO: 2542934 - DNA, 25 bp, Homo sapien
gctgctttggttcctctcgatgttg

SEQ ID NO: 2542935 - DNA, 25 bp, Homo sapien
aaagttttgttcacggccattgtca

SEQ ID NO: 2542936 - DNA, 25 bp, Homo sapien
catccaatggctcgtaatagtctct

SEQ ID NO: 2542937 - DNA, 25 bp, Homo sapien
gcagcatggtagctgagttagtcac

SEQ ID NO: 2542938 - DNA, 25 bp, Homo sapien
ctggcctgtcttctcggccatttct

SEQ ID NO: 2542939 - DNA, 25 bp, Homo sapien
ggcctgtcttctcggccatttctgt

SEQ ID NO: 2542940 - DNA, 25 bp, Homo sapien
ctgtcttctcggccatttctgtggc

SEQ ID NO: 2542941 - DNA, 25 bp, Homo sapien
cctgtcttctcggccatttctgtgg

SEQ ID NO: 2542942 - DNA, 25 bp, Homo sapien
taagagaggaatccacgcatccagg

SEQ ID NO: 2542943 - DNA, 25 bp, Homo sapien
gaagagttggatgcccactgacaaa

SEQ ID NO: 2542944 - DNA, 25 bp, Homo sapien
gctcagggtactgcatgcaaaggtg

SEQ ID NO: 2542945 - DNA, 25 bp, Homo sapien
ctatggcctgcgatatgtaaactga

SEQ ID NO: 2542946 - DNA, 25 bp, Homo sapien
atagtgagatggatgttacgtctta

SEQ ID NO: 2542947 - DNA, 25 bp, Homo sapien
tctgcattgtctgtaggaataagcc

SEQ ID NO: 2542948 - DNA, 25 bp, Homo sapien
cactctttatatgatgcaattctct

SEQ ID NO: 2542949 - DNA, 25 bp, Homo sapien
ggatgttacgtcttaatttcttgtc

SEQ ID NO: 2542950 - DNA, 25 bp, Homo sapien
cccagggtccagtgtagtcttgtgt

SEQ ID NO: 2542951 - DNA, 25 bp, Homo sapien
tgccagtgtgaaacccggtgctgtc

SEQ ID NO: 2542952 - DNA, 25 bp, Homo sapien
tccccgggtggaatgcaagagaatg

SEQ ID NO: 2542953 - DNA, 25 bp, Homo sapien
tgctggtcgttctggcagcacacag

SEQ ID NO: 2542954 - DNA, 25 bp, Homo sapien
cacaaagaaccttgagagggtcatc

SEQ ID NO: 2542955 - DNA, 25 bp, Homo sapien
gaacgatatgttgattcacctccaa

SEQ ID NO: 2542956 - DNA, 25 bp, Homo sapien
agctctacccattcacatctgatgg

SEQ ID NO: 2542957 - DNA, 25 bp, Homo sapien
catggacattagatgagaacgatat

SEQ ID NO: 2542958 - DNA, 25 bp, Homo sapien
aaatccagcttccaaacatagaata

SEQ ID NO: 2542959 - DNA, 25 bp, Homo sapien
cattttgatagtcctcttcaattgc

SEQ ID NO: 2542960 - DNA, 25 bp, Homo sapien
caaatccagcttccaaacatagaat

SEQ ID NO: 2542961 - DNA, 25 bp, Homo sapien
attttgatagtcctcttcaattgca

SEQ ID NO: 2542962 - DNA, 25 bp, Homo sapien
agtatggacgctcatttccagccag

SEQ ID NO: 2542963 - DNA, 25 bp, Homo sapien
agccaggccggagactttctctttg

SEQ ID NO: 2542964 - DNA, 25 bp, Homo sapien
catttccagccaggccggagacttt

SEQ ID NO: 2542965 - DNA, 25 bp, Homo sapien
tcagtatggacgctcatttccagcc

SEQ ID NO: 2542966 - DNA, 25 bp, Homo sapien
gaagataatttattggatgcacact

SEQ ID NO: 2542967 - DNA, 25 bp, Homo sapien
aagataatttattggatgcacacta

SEQ ID NO: 2542968 - DNA, 25 bp, Homo sapien
atccacggcagtcccgaaaggcagg

SEQ ID NO: 2542969 - DNA, 25 bp, Homo sapien
gtagctggattttgacccatcaatg

SEQ ID NO: 2542970 - DNA, 25 bp, Homo sapien
cccatcaatgggcaatccacggcag

SEQ ID NO: 2542971 - DNA, 25 bp, Homo sapien
gctggattttgacccatcaatgggc

SEQ ID NO: 2542972 - DNA, 25 bp, Homo sapien
ttctcttggtattctcatttccaat

SEQ ID NO: 2542973 - DNA, 25 bp, Homo sapien
catttccaatgtgaatattctgtga

SEQ ID NO: 2542974 - DNA, 25 bp, Homo sapien
gaatattctgtgagactaacttacc

SEQ ID NO: 2542975 - DNA, 25 bp, Homo sapien
ttattctcttggtattctcatttcc

SEQ ID NO: 2542976 - DNA, 25 bp, Homo sapien
gtgtctgtctccattcaaacccttg

SEQ ID NO: 2542977 - DNA, 25 bp, Homo sapien
tcaaacccttggaacactgtgctca

SEQ ID NO: 2542978 - DNA, 25 bp, Homo sapien
actgtgctcatgtgtttctcgtggt

SEQ ID NO: 2542979 - DNA, 25 bp, Homo sapien
cccatgtatcctctgtggaccatga

SEQ ID NO: 2542980 - DNA, 25 bp, Homo sapien
cagccccaggggtgaaatttaggct

SEQ ID NO: 2542981 - DNA, 25 bp, Homo sapien
gctctccatctctaaggcaatgttg

SEQ ID NO: 2542982 - DNA, 25 bp, Homo sapien
tgaagcaatgctctccatctctaag

SEQ ID NO: 2542983 - DNA, 25 bp, Homo sapien
atgctctccatctctaaggcaatgt

SEQ ID NO: 2542984 - DNA, 25 bp, Homo sapien
tcagaggcctggacagccagtttgc

SEQ ID NO: 2542985 - DNA, 25 bp, Homo sapien
ccctacatccaagggagcctgggag

SEQ ID NO: 2542986 - DNA, 25 bp, Homo sapien
tcatgaggtgtgtagatgtggctca

SEQ ID NO: 2542987 - DNA, 25 bp, Homo sapien
tggctttgtctccaagtgaagcttt

SEQ ID NO: 2542988 - DNA, 25 bp, Homo sapien
cttcttaggtgtatggtagtctcag

SEQ ID NO: 2542989 - DNA, 25 bp, Homo sapien
tgtgactggcaatcttatggtgcag

SEQ ID NO: 2542990 - DNA, 25 bp, Homo sapien
tcttgtgtttgcacttccccttgaa

SEQ ID NO: 2542991 - DNA, 25 bp, Homo sapien
cactgtagccgtgctgttgtgactg

SEQ ID NO: 2542992 - DNA, 25 bp, Homo sapien
tcaagaataattaacgttctgtgtt

SEQ ID NO: 2542993 - DNA, 25 bp, Homo sapien
tctgtgtttcactctatattagtta

SEQ ID NO: 2542994 - DNA, 25 bp, Homo sapien
gatgtttcttgtttccgtagataga

SEQ ID NO: 2542995 - DNA, 25 bp, Homo sapien
gaccgggctagaaatggctgcagaa

SEQ ID NO: 2542996 - DNA, 25 bp, Homo sapien
taacaccacccggtaacatcatcgg

SEQ ID NO: 2542997 - DNA, 25 bp, Homo sapien
cacccggtaacatcatcgggtaaca

SEQ ID NO: 2542998 - DNA, 25 bp, Homo sapien
aacaccacccggtaacatcatcggg

SEQ ID NO: 2542999 - DNA, 25 bp, Homo sapien
caccacccggtaacatcatcgggta

SEQ ID NO: 2543000 - DNA, 25 bp, Homo sapien
cactggagcataagaggctggcaga

SEQ ID NO: 2543001 - DNA, 25 bp, Homo sapien
ggctggcagacgtgtcacatatttt

SEQ ID NO: 2543002 - DNA, 25 bp, Homo sapien
gcattcagatcccttctggagcact

SEQ ID NO: 2543003 - DNA, 25 bp, Homo sapien
cactgccgaaagtcagtctatggcc

SEQ ID NO: 2543004 - DNA, 25 bp, Homo sapien
aagacatagttgaaaggtcttggat

SEQ ID NO: 2543005 - DNA, 25 bp, Homo sapien
ggatctggaaatccacagttgcttt

SEQ ID NO: 2543006 - DNA, 25 bp, Homo sapien
acttcccagaattagaggatctgga

SEQ ID NO: 2543007 - DNA, 25 bp, Homo sapien
gttgctttcaaataagacatagttg

SEQ ID NO: 2543008 - DNA, 25 bp, Homo sapien
tgtgaaaaatcacacaatggcttat

SEQ ID NO: 2543009 - DNA, 25 bp, Homo sapien
ctgtgaaaaatcacacaatggctta

SEQ ID NO: 2543010 - DNA, 25 bp, Homo sapien
aaaaatcacacaatggcttataaag

SEQ ID NO: 2543011 - DNA, 25 bp, Homo sapien
tgaaaaatcacacaatggcttataa

SEQ ID NO: 2543012 - DNA, 25 bp, Homo sapien
aagagcatggaccaatactccaggg

SEQ ID NO: 2543013 - DNA, 25 bp, Homo sapien
tggcaccagggatgtaaatctgaca

SEQ ID NO: 2543014 - DNA, 25 bp, Homo sapien
cagaggggggaccatttgcactgca

SEQ ID NO: 2543015 - DNA, 25 bp, Homo sapien
tccagggagaggagttgcacagtgg

SEQ ID NO: 2543016 - DNA, 25 bp, Homo sapien
agggtctgaggctgatctgcatgac

SEQ ID NO: 2543017 - DNA, 25 bp, Homo sapien
gcatgacttatttcaaccctggagt

SEQ ID NO: 2543018 - DNA, 25 bp, Homo sapien
tttgtgtcaggattattccaaagca

SEQ ID NO: 2543019 - DNA, 25 bp, Homo sapien
agcttgtttaggttcagggtctgag

SEQ ID NO: 2543020 - DNA, 25 bp, Homo sapien
cctgtgtggtgggacaaaggatctt

SEQ ID NO: 2543021 - DNA, 25 bp, Homo sapien
tctccaggatgcatctttggtttcc

SEQ ID NO: 2543022 - DNA, 25 bp, Homo sapien
ctaaatctccaggatgcatctttgg

SEQ ID NO: 2543023 - DNA, 25 bp, Homo sapien
tttcctgtgtggtgggacaaaggat

SEQ ID NO: 2543024 - DNA, 25 bp, Homo sapien
tccctgtgtttggtgaacagcaccc

SEQ ID NO: 2543025 - DNA, 25 bp, Homo sapien
cacccatgagagcaatgctatcctg

SEQ ID NO: 2543026 - DNA, 25 bp, Homo sapien
tagcccatgaggtgaagagtccctg

SEQ ID NO: 2543027 - DNA, 25 bp, Homo sapien
tgctatcctgcgcacaagcagaaga

SEQ ID NO: 2543028 - DNA, 25 bp, Homo sapien
ctatgacaagctgcaaatttcagat

SEQ ID NO: 2543029 - DNA, 25 bp, Homo sapien
agatctcttcttttactcatactga

SEQ ID NO: 2543030 - DNA, 25 bp, Homo sapien
tcttttcagcttctactgggcagtg

SEQ ID NO: 2543031 - DNA, 25 bp, Homo sapien
tttactcatactgaatcttttcagc

SEQ ID NO: 2543032 - DNA, 25 bp, Homo sapien
gtattagatggaaagaaacgctgca

SEQ ID NO: 2543033 - DNA, 25 bp, Homo sapien
cgtggtattgatggacctttcagtc

SEQ ID NO: 2543034 - DNA, 25 bp, Homo sapien
caagagaggactaagtgcactgcgg

SEQ ID NO: 2543035 - DNA, 25 bp, Homo sapien
tgcactgcggtggattgtccttcgt

SEQ ID NO: 2543036 - DNA, 25 bp, Homo sapien
tccttgtgaaatggcctgaggttcc

SEQ ID NO: 2543037 - DNA, 25 bp, Homo sapien
gtccttgtgaaatggcctgaggttc

SEQ ID NO: 2543038 - DNA, 25 bp, Homo sapien
ctggacacttgtgcagcggcatggt

SEQ ID NO: 2543039 - DNA, 25 bp, Homo sapien
tgaggttccctggacacttgtgcag

SEQ ID NO: 2543040 - DNA, 25 bp, Homo sapien
cttccttccataagtcactctcgag

SEQ ID NO: 2543041 - DNA, 25 bp, Homo sapien
cccttccttccataagtcactctcg

SEQ ID NO: 2543042 - DNA, 25 bp, Homo sapien
ccttccttccataagtcactctcga

SEQ ID NO: 2543043 - DNA, 25 bp, Homo sapien
gcccttccttccataagtcactctc

SEQ ID NO: 2543044 - DNA, 25 bp, Homo sapien
gagtggcaagaacaagaaagcttcc

SEQ ID NO: 2543045 - DNA, 25 bp, Homo sapien
ggtcagcaatttgaaccagccccag

SEQ ID NO: 2543046 - DNA, 25 bp, Homo sapien
cattagacattagatccatgctggg

SEQ ID NO: 2543047 - DNA, 25 bp, Homo sapien
tgaagagattctgcagccataaagg

SEQ ID NO: 2543048 - DNA, 25 bp, Homo sapien
tgtcccagggattcttgccaaaaaa

SEQ ID NO: 2543049 - DNA, 25 bp, Homo sapien
caataataagtgagaagaaattctt

SEQ ID NO: 2543050 - DNA, 25 bp, Homo sapien
cttgcaagacatgagaacattctca

SEQ ID NO: 2543051 - DNA, 25 bp, Homo sapien
acatgagaacattctcaataataag

SEQ ID NO: 2543052 - DNA, 25 bp, Homo sapien
cctaaaggagcatcgcagcagaggc

SEQ ID NO: 2543053 - DNA, 25 bp, Homo sapien
gagacagcgggacctaaaggagcat

SEQ ID NO: 2543054 - DNA, 25 bp, Homo sapien
acctaaaggagcatcgcagcagagg

SEQ ID NO: 2543055 - DNA, 25 bp, Homo sapien
tcaaacagagacagcgggacctaaa

SEQ ID NO: 2543056 - DNA, 25 bp, Homo sapien
ggatccgaggtagaagcaccctgct

SEQ ID NO: 2543057 - DNA, 25 bp, Homo sapien
ctgctgcgctccgtaaccattcttt

SEQ ID NO: 2543058 - DNA, 25 bp, Homo sapien
gaggtagaagcaccctgctgcgctc

SEQ ID NO: 2543059 - DNA, 25 bp, Homo sapien
catcccaataggatccgaggtagaa

SEQ ID NO: 2543060 - DNA, 25 bp, Homo sapien
tacggagtgattgaggaacctccca

SEQ ID NO: 2543061 - DNA, 25 bp, Homo sapien
tgtgtctactaagggaaggccgttc

SEQ ID NO: 2543062 - DNA, 25 bp, Homo sapien
gccggttactcaaagggactgtgga

SEQ ID NO: 2543063 - DNA, 25 bp, Homo sapien
cattagtgtttgcacgccacagccc

SEQ ID NO: 2543064 - DNA, 25 bp, Homo sapien
tgacagctctatcattcacaaaacc

SEQ ID NO: 2543065 - DNA, 25 bp, Homo sapien
ttggtccatgacagctctatcattc

SEQ ID NO: 2543066 - DNA, 25 bp, Homo sapien
tatagtggccaatgcagcttttggc

SEQ ID NO: 2543067 - DNA, 25 bp, Homo sapien
cattcacaaaaccactatagtggcc

SEQ ID NO: 2543068 - DNA, 25 bp, Homo sapien
aataacaggacaaaggctgcgtctt

SEQ ID NO: 2543069 - DNA, 25 bp, Homo sapien
caaaggctgcgtcttggtcaaattt

SEQ ID NO: 2543070 - DNA, 25 bp, Homo sapien
gccgtgtcctcccttggaggttata

SEQ ID NO: 2543071 - DNA, 25 bp, Homo sapien
acaggcgccgtgtcctcccttggag

SEQ ID NO: 2543072 - DNA, 25 bp, Homo sapien
catcctggccagttgttgacgatta

SEQ ID NO: 2543073 - DNA, 25 bp, Homo sapien
cgttgtcaggatcctgcgttccaga

SEQ ID NO: 2543074 - DNA, 25 bp, Homo sapien
cagaatccctcctatgtgaagccaa

SEQ ID NO: 2543075 - DNA, 25 bp, Homo sapien
ttgacgattaaccatggaaagcagt

SEQ ID NO: 2543076 - DNA, 25 bp, Homo sapien
cactgaggtgccttagtgcacactg

SEQ ID NO: 2543077 - DNA, 25 bp, Homo sapien
tgaacagatgcacacggtcaaaagc

SEQ ID NO: 2543078 - DNA, 25 bp, Homo sapien
tcaggagatatgcactcggaggaga

SEQ ID NO: 2543079 - DNA, 25 bp, Homo sapien
ggtcaaaagcacaacagtaacctgt

SEQ ID NO: 2543080 - DNA, 25 bp, Homo sapien
gacagggatcatctcgccctgatcc

SEQ ID NO: 2543081 - DNA, 25 bp, Homo sapien
aggacaccatttgcacgtggaactc

SEQ ID NO: 2543082 - DNA, 25 bp, Homo sapien
aatgtatccagacagggatcatctc

SEQ ID NO: 2543083 - DNA, 25 bp, Homo sapien
tatccagacagggatcatctcgccc

SEQ ID NO: 2543084 - DNA, 25 bp, Homo sapien
tgcccctgcaacagtgagggagctg

SEQ ID NO: 2543085 - DNA, 25 bp, Homo sapien
atgcccctgcaacagtgagggagct

SEQ ID NO: 2543086 - DNA, 25 bp, Homo sapien
catttgcttaacgggaaagatgccc

SEQ ID NO: 2543087 - DNA, 25 bp, Homo sapien
tcatttgcttaacgggaaagatgcc

SEQ ID NO: 2543088 - DNA, 25 bp, Homo sapien
aggaaggctcaaatgcactattgtc

SEQ ID NO: 2543089 - DNA, 25 bp, Homo sapien
ggaaggctcaaatgcactattgtcc

SEQ ID NO: 2543090 - DNA, 25 bp, Homo sapien
aaaggaaggctcaaatgcactattg

SEQ ID NO: 2543091 - DNA, 25 bp, Homo sapien
aaggaaggctcaaatgcactattgt

SEQ ID NO: 2543092 - DNA, 25 bp, Homo sapien
ggaaaccggcagtgctttcttgtgg

SEQ ID NO: 2543093 - DNA, 25 bp, Homo sapien
ttgggctctaagctggaggaaaccg

SEQ ID NO: 2543094 - DNA, 25 bp, Homo sapien
gaaaccggcagtgctttcttgtggg

SEQ ID NO: 2543095 - DNA, 25 bp, Homo sapien
cacagccttgggctctaagctggag

SEQ ID NO: 2543096 - DNA, 25 bp, Homo sapien
agctcagccctttccctgtccacct

SEQ ID NO: 2543097 - DNA, 25 bp, Homo sapien
tgaaactcgccagttttgatttctg

SEQ ID NO: 2543098 - DNA, 25 bp, Homo sapien
ctgactgacccaccgtcagctcagc

SEQ ID NO: 2543099 - DNA, 25 bp, Homo sapien
gtctggccaccctcatgaaactcgc

SEQ ID NO: 2543100 - DNA, 25 bp, Homo sapien
cagtatttacacatcagcagccgat

SEQ ID NO: 2543101 - DNA, 25 bp, Homo sapien
tttgactgtgataattaccactacc

SEQ ID NO: 2543102 - DNA, 25 bp, Homo sapien
tttcctaagtgctctcgcctacttt

SEQ ID NO: 2543103 - DNA, 25 bp, Homo sapien
agcagccgatctccgcacagttttc

SEQ ID NO: 2543104 - DNA, 25 bp, Homo sapien
gacaacttgagtcctaaagccaata

SEQ ID NO: 2543105 - DNA, 25 bp, Homo sapien
tagaggggactgaagtcctccgcac

SEQ ID NO: 2543106 - DNA, 25 bp, Homo sapien
tcctaaagccaatatacagtagagg

SEQ ID NO: 2543107 - DNA, 25 bp, Homo sapien
tttcagggacaacttgagtcctaaa

SEQ ID NO: 2543108 - DNA, 25 bp, Homo sapien
gaggagctgcatgcggccatttcca

SEQ ID NO: 2543109 - DNA, 25 bp, Homo sapien
ctagtggataattcctgctggccat

SEQ ID NO: 2543110 - DNA, 25 bp, Homo sapien
tgtgctcattccgctgagccccgag

SEQ ID NO: 2543111 - DNA, 25 bp, Homo sapien
agggagaggagctgcatgcggccat

SEQ ID NO: 2543112 - DNA, 25 bp, Homo sapien
ggtttagacaccaaatagccaattg

SEQ ID NO: 2543113 - DNA, 25 bp, Homo sapien
gatttgggcaggtatttctacactg

SEQ ID NO: 2543114 - DNA, 25 bp, Homo sapien
cctatgtgtatagaacatgagcttc

SEQ ID NO: 2543115 - DNA, 25 bp, Homo sapien
catgagcttcatgagattggctact

SEQ ID NO: 2543116 - DNA, 25 bp, Homo sapien
ttaaaccagggcctagtgaaaggca

SEQ ID NO: 2543117 - DNA, 25 bp, Homo sapien
ttcttcagtgattaacattagcatt

SEQ ID NO: 2543118 - DNA, 25 bp, Homo sapien
gaaacatttcattggcatctaaagt

SEQ ID NO: 2543119 - DNA, 25 bp, Homo sapien
accagggcctagtgaaaggcaggaa

SEQ ID NO: 2543120 - DNA, 25 bp, Homo sapien
caccagcccatccactattagtcat

SEQ ID NO: 2543121 - DNA, 25 bp, Homo sapien
tcttctctcatatcctgtgcttaca

SEQ ID NO: 2543122 - DNA, 25 bp, Homo sapien
tacagcagacgtttccaatcacttg

SEQ ID NO: 2543123 - DNA, 25 bp, Homo sapien
tacattacagcagacgtttccaatc

SEQ ID NO: 2543124 - DNA, 25 bp, Homo sapien
tgctaagcgagtctcttctctcata

SEQ ID NO: 2543125 - DNA, 25 bp, Homo sapien
aaacaggcttctcttttgcagctgt

SEQ ID NO: 2543126 - DNA, 25 bp, Homo sapien
gccagtcacttggcaaacaggcttc

SEQ ID NO: 2543127 - DNA, 25 bp, Homo sapien
tcagccagtcacttggcaaacaggc

SEQ ID NO: 2543128 - DNA, 25 bp, Homo sapien
agtcacttggcaaacaggcttctct

SEQ ID NO: 2543129 - DNA, 25 bp, Homo sapien
agaagacataggacaatgctttttg

SEQ ID NO: 2543130 - DNA, 25 bp, Homo sapien
gaagaagacataggacaatgctttt

SEQ ID NO: 2543131 - DNA, 25 bp, Homo sapien
aagaagacataggacaatgcttttt

SEQ ID NO: 2543132 - DNA, 25 bp, Homo sapien
ctcgccaacttggtgagacatgccc

SEQ ID NO: 2543133 - DNA, 25 bp, Homo sapien
gtgagacatgcccttccctggatgg

SEQ ID NO: 2543134 - DNA, 25 bp, Homo sapien
ggccactgacatccagtcacacaac

SEQ ID NO: 2543135 - DNA, 25 bp, Homo sapien
cctgcagggctcgccaacttggtga

SEQ ID NO: 2543136 - DNA, 25 bp, Homo sapien
tgaaacaagcagcacaaccttgggt

SEQ ID NO: 2543137 - DNA, 25 bp, Homo sapien
attaagcacctattacatgacaggc

SEQ ID NO: 2543138 - DNA, 25 bp, Homo sapien
gatgagttatcgtcaatctctgcca

SEQ ID NO: 2543139 - DNA, 25 bp, Homo sapien
ggcacatagtaaagaccaagatgga

SEQ ID NO: 2543140 - DNA, 25 bp, Homo sapien
actatttagcaggtgacagccacac

SEQ ID NO: 2543141 - DNA, 25 bp, Homo sapien
aaactatttagcaggtgacagccac

SEQ ID NO: 2543142 - DNA, 25 bp, Homo sapien
ttcaaactatttagcaggtgacagc

SEQ ID NO: 2543143 - DNA, 25 bp, Homo sapien
caaactatttagcaggtgacagcca

SEQ ID NO: 2543144 - DNA, 25 bp, Homo sapien
ggtgctcagagtgccccaaaactaa

SEQ ID NO: 2543145 - DNA, 25 bp, Homo sapien
cctgggtgctcagagtgccccaaaa

SEQ ID NO: 2543146 - DNA, 25 bp, Homo sapien
tctgtgaggagagacctgggtgctc

SEQ ID NO: 2543147 - DNA, 25 bp, Homo sapien
gacctgggtgctcagagtgccccaa

SEQ ID NO: 2543148 - DNA, 25 bp, Homo sapien
taacactctatgcagacctctattg

SEQ ID NO: 2543149 - DNA, 25 bp, Homo sapien
ttgtgaacctctttgctggctaagt

SEQ ID NO: 2543150 - DNA, 25 bp, Homo sapien
tctgtgtttcctaacactctatgca

SEQ ID NO: 2543151 - DNA, 25 bp, Homo sapien
ttgctggctaagtccacctcttctg

SEQ ID NO: 2543152 - DNA, 25 bp, Homo sapien
gatagaatgcgctctgtgacttggg

SEQ ID NO: 2543153 - DNA, 25 bp, Homo sapien
aggctctggctcagaaatcctattt

SEQ ID NO: 2543154 - DNA, 25 bp, Homo sapien
cttggggaaagtcagtacgaggcat

SEQ ID NO: 2543155 - DNA, 25 bp, Homo sapien
cctgcacacttttcatgcctgtatt

SEQ ID NO: 2543156 - DNA, 25 bp, Homo sapien
tagagtggttttacaattgtcaaca

SEQ ID NO: 2543157 - DNA, 25 bp, Homo sapien
tgtcaacatcaacccatgtgaaaaa

SEQ ID NO: 2543158 - DNA, 25 bp, Homo sapien
cagtatgtaatgttgctctttagca

SEQ ID NO: 2543159 - DNA, 25 bp, Homo sapien
cctgtgatttcctgcactcctaata

SEQ ID NO: 2543160 - DNA, 25 bp, Homo sapien
gcttcttcatgttgggttagaacat

SEQ ID NO: 2543161 - DNA, 25 bp, Homo sapien
cttcttcatgttgggttagaacatg

SEQ ID NO: 2543162 - DNA, 25 bp, Homo sapien
ctagttatcaattcctctaatgttt

SEQ ID NO: 2543163 - DNA, 25 bp, Homo sapien
tagttatcaattcctctaatgtttt

SEQ ID NO: 2543164 - DNA, 25 bp, Homo sapien
gaatagtatattgtcctctctaggc

SEQ ID NO: 2543165 - DNA, 25 bp, Homo sapien
taggactgctcatacatattctggc

SEQ ID NO: 2543166 - DNA, 25 bp, Homo sapien
cacatggtgggattctacattctct

SEQ ID NO: 2543167 - DNA, 25 bp, Homo sapien
tgcttaggatgctatcttggtgccc

SEQ ID NO: 2543168 - DNA, 25 bp, Homo sapien
gagttgggcgcgtccctggaacctc

SEQ ID NO: 2543169 - DNA, 25 bp, Homo sapien
ccaatcaggcgtagtgtggagacag

SEQ ID NO: 2543170 - DNA, 25 bp, Homo sapien
cgtcctgagggagaactggccccta

SEQ ID NO: 2543171 - DNA, 25 bp, Homo sapien
gtagacccgcagcacgacacggtgg

SEQ ID NO: 2543172 - DNA, 25 bp, Homo sapien
aaataaggcagccacctaggcgagg

SEQ ID NO: 2543173 - DNA, 25 bp, Homo sapien
taacaagactatgcccaaataaggc

SEQ ID NO: 2543174 - DNA, 25 bp, Homo sapien
tatggatgaatctacgacacaggat

SEQ ID NO: 2543175 - DNA, 25 bp, Homo sapien
taggcgaggccaatcaggtaacttt

SEQ ID NO: 2543176 - DNA, 25 bp, Homo sapien
gagtgtggacctaaacttctctaag

SEQ ID NO: 2543177 - DNA, 25 bp, Homo sapien
ccacaggataagcaacagggctctt

SEQ ID NO: 2543178 - DNA, 25 bp, Homo sapien
caggctctcctgatagggcagccaa

SEQ ID NO: 2543179 - DNA, 25 bp, Homo sapien
cagccctttgcactaaaacatgtgg

SEQ ID NO: 2543180 - DNA, 25 bp, Homo sapien
caggaccccgtatctgaccagtttc

SEQ ID NO: 2543181 - DNA, 25 bp, Homo sapien
tttcaggaccccgtatctgaccagt

SEQ ID NO: 2543182 - DNA, 25 bp, Homo sapien
tggtccatgtttcaggaccccgtat

SEQ ID NO: 2543183 - DNA, 25 bp, Homo sapien
catgtttcaggaccccgtatctgac

SEQ ID NO: 2543184 - DNA, 25 bp, Homo sapien
taccactctccctggatgggccaat

SEQ ID NO: 2543185 - DNA, 25 bp, Homo sapien
caatggtctgccctttagctttcac

SEQ ID NO: 2543186 - DNA, 25 bp, Homo sapien
tttttcagactggtagcatcacagc

SEQ ID NO: 2543187 - DNA, 25 bp, Homo sapien
tgcactagactatgagtgacctggg

SEQ ID NO: 2543188 - DNA, 25 bp, Homo sapien
ttttgattactgtcaggtgcctggc

SEQ ID NO: 2543189 - DNA, 25 bp, Homo sapien
attttgattactgtcaggtgcctgg

SEQ ID NO: 2543190 - DNA, 25 bp, Homo sapien
tttgattactgtcaggtgcctggct

SEQ ID NO: 2543191 - DNA, 25 bp, Homo sapien
caccaagctcatgcagtcctgttgc

SEQ ID NO: 2543192 - DNA, 25 bp, Homo sapien
tgttcattaggacatgggctcagcc

SEQ ID NO: 2543193 - DNA, 25 bp, Homo sapien
aggacatgggctcagccacaccaag

SEQ ID NO: 2543194 - DNA, 25 bp, Homo sapien
ttgcttcaggggatgttcagcatca

SEQ ID NO: 2543195 - DNA, 25 bp, Homo sapien
tgccctttacttcaatgtgcttgtg

SEQ ID NO: 2543196 - DNA, 25 bp, Homo sapien
cctggcattggaatcctgcaaacat

SEQ ID NO: 2543197 - DNA, 25 bp, Homo sapien
gacatccggcagaaaatgtttcctg

SEQ ID NO: 2543198 - DNA, 25 bp, Homo sapien
gagggaaatattgagatacagacat

SEQ ID NO: 2543199 - DNA, 25 bp, Homo sapien
gagagaagggaaagaccatcatggt

SEQ ID NO: 2543200 - DNA, 25 bp, Homo sapien
gggtcagagcgtggaagtgagagaa

SEQ ID NO: 2543201 - DNA, 25 bp, Homo sapien
ccatcatggtctgctgtggtcaggg

SEQ ID NO: 2543202 - DNA, 25 bp, Homo sapien
gaaagaccatcatggtctgctgtgg

SEQ ID NO: 2543203 - DNA, 25 bp, Homo sapien
gggtcactacctttaaagcatctgt

SEQ ID NO: 2543204 - DNA, 25 bp, Homo sapien
cctggagggatggggtcactacctt

SEQ ID NO: 2543205 - DNA, 25 bp, Homo sapien
tggagggatggggtcactaccttta

SEQ ID NO: 2543206 - DNA, 25 bp, Homo sapien
ctacctttaaagcatctgtcagcca

SEQ ID NO: 2543207 - DNA, 25 bp, Homo sapien
gaagcaagtcgtctacgaatggttt

SEQ ID NO: 2543208 - DNA, 25 bp, Homo sapien
tccccacgaacgtgcgttgcgtgac

SEQ ID NO: 2543209 - DNA, 25 bp, Homo sapien
tacaaacccttgtgtggagatctga

SEQ ID NO: 2543210 - DNA, 25 bp, Homo sapien
caaacccttgtgtggagatctgact

SEQ ID NO: 2543211 - DNA, 25 bp, Homo sapien
gcgagagggcggccgcctttccggc

SEQ ID NO: 2543212 - DNA, 25 bp, Homo sapien
ctgccgtatcgttccgcctgggcgg

SEQ ID NO: 2543213 - DNA, 25 bp, Homo sapien
tatccgaggtatccgaggccatccg

SEQ ID NO: 2543214 - DNA, 25 bp, Homo sapien
cggggctgccgtatcgttccgcctg

SEQ ID NO: 2543215 - DNA, 25 bp, Homo sapien
ccgaggccaaccgagccgaccgagg

SEQ ID NO: 2543216 - DNA, 25 bp, Homo sapien
catgaccattagtgcgtaagtggct

SEQ ID NO: 2543217 - DNA, 25 bp, Homo sapien
aaacacctttggcatgaccattagt

SEQ ID NO: 2543218 - DNA, 25 bp, Homo sapien
cattagtgcgtaagtggctgacatc

SEQ ID NO: 2543219 - DNA, 25 bp, Homo sapien
gtaagtggctgacatcttcagtagg

SEQ ID NO: 2543220 - DNA, 25 bp, Homo sapien
tattgctcatctgattatttccata

SEQ ID NO: 2543221 - DNA, 25 bp, Homo sapien
gctcatctgattatttccataaaac

SEQ ID NO: 2543222 - DNA, 25 bp, Homo sapien
ccaaatccccggcagaaaaccatgt

SEQ ID NO: 2543223 - DNA, 25 bp, Homo sapien
tgtgtaagacactaatctaatcata

SEQ ID NO: 2543224 - DNA, 25 bp, Homo sapien
cacagaagcacatgtatgagaagtt

SEQ ID NO: 2543225 - DNA, 25 bp, Homo sapien
tataagttcatagtagagtcgaata

SEQ ID NO: 2543226 - DNA, 25 bp, Homo sapien
agggcagacgtaaggcacagaagca

SEQ ID NO: 2543227 - DNA, 25 bp, Homo sapien
gagaagttataagttcatagtagag

SEQ ID NO: 2543228 - DNA, 25 bp, Homo sapien
gaaaggataacttgtggagtgctga

SEQ ID NO: 2543229 - DNA, 25 bp, Homo sapien
tcagatccaacataaggctccaaaa

SEQ ID NO: 2543230 - DNA, 25 bp, Homo sapien
tgctgagactttctcagatccaaca

SEQ ID NO: 2543231 - DNA, 25 bp, Homo sapien
caaaaaccgtgaacatgtcccagaa

SEQ ID NO: 2543232 - DNA, 25 bp, Homo sapien
aggctaaatcaataccaacatctct

SEQ ID NO: 2543233 - DNA, 25 bp, Homo sapien
tataggctaaatcaataccaacatc

SEQ ID NO: 2543234 - DNA, 25 bp, Homo sapien
ctataggctaaatcaataccaacat

SEQ ID NO: 2543235 - DNA, 25 bp, Homo sapien
taggctaaatcaataccaacatctc

SEQ ID NO: 2543236 - DNA, 25 bp, Homo sapien
ttttctttaactgctcaagaccaag

SEQ ID NO: 2543237 - DNA, 25 bp, Homo sapien
ggaaatagaagcagatagcgatgct

SEQ ID NO: 2543238 - DNA, 25 bp, Homo sapien
tcaagaccaagcatccctaaggaaa

SEQ ID NO: 2543239 - DNA, 25 bp, Homo sapien
agcagatagcgatgcttgcagttct

SEQ ID NO: 2543240 - DNA, 25 bp, Homo sapien
ctaatgtgaccacagagagctttgt

SEQ ID NO: 2543241 - DNA, 25 bp, Homo sapien
taatgtcttcacgaagagagcccat

SEQ ID NO: 2543242 - DNA, 25 bp, Homo sapien
agctttgtctggcccaattcatgtt

SEQ ID NO: 2543243 - DNA, 25 bp, Homo sapien
ctggactaatgtgaccacagagagc

SEQ ID NO: 2543244 - DNA, 25 bp, Homo sapien
cgttggccgctttggtatcatctat

SEQ ID NO: 2543245 - DNA, 25 bp, Homo sapien
taaactcgttggccgctttggtatc

SEQ ID NO: 2543246 - DNA, 25 bp, Homo sapien
actcgttggccgctttggtatcatc

SEQ ID NO: 2543247 - DNA, 25 bp, Homo sapien
tcgttggccgctttggtatcatcta

SEQ ID NO: 2543248 - DNA, 25 bp, Homo sapien
tgcctgcaaacgagctgccatccgt

SEQ ID NO: 2543249 - DNA, 25 bp, Homo sapien
tcttaatgcagattctcagcttgtg

SEQ ID NO: 2543250 - DNA, 25 bp, Homo sapien
cacaatctctcccagactcttaatg

SEQ ID NO: 2543251 - DNA, 25 bp, Homo sapien
gcttgtgcctgcaaacgagctgcca

SEQ ID NO: 2543252 - DNA, 25 bp, Homo sapien
tgtcctcttctctgactagtgcctg

SEQ ID NO: 2543253 - DNA, 25 bp, Homo sapien
gactagtgcctgctgagggcaaaat

SEQ ID NO: 2543254 - DNA, 25 bp, Homo sapien
gcttgtcagtcgttctaccggccat

SEQ ID NO: 2543255 - DNA, 25 bp, Homo sapien
ggacatcatttgtgttgtgctgggc

SEQ ID NO: 2543256 - DNA, 25 bp, Homo sapien
tcctcacaggcagtacaggatttcc

SEQ ID NO: 2543257 - DNA, 25 bp, Homo sapien
ggcttctgactttataccatgtgaa

SEQ ID NO: 2543258 - DNA, 25 bp, Homo sapien
taattttctgaagaccggcttctga

SEQ ID NO: 2543259 - DNA, 25 bp, Homo sapien
tgtgaacgggcaagttccacctgtc

SEQ ID NO: 2543260 - DNA, 25 bp, Homo sapien
caataactctggtaatggtcgctgc

SEQ ID NO: 2543261 - DNA, 25 bp, Homo sapien
cagagaaatagtcagtgcaaatggg

SEQ ID NO: 2543262 - DNA, 25 bp, Homo sapien
caaatggggtgggtctctggcacac

SEQ ID NO: 2543263 - DNA, 25 bp, Homo sapien
gggacatgctggcttaaaccaataa

SEQ ID NO: 2543264 - DNA, 25 bp, Homo sapien
tggaaaatcagagccgtccaggagt

SEQ ID NO: 2543265 - DNA, 25 bp, Homo sapien
gagtcccacgatctgaaagccgttg

SEQ ID NO: 2543266 - DNA, 25 bp, Homo sapien
ttaagataataggatggaggagaca

SEQ ID NO: 2543267 - DNA, 25 bp, Homo sapien
gaaagccgttgacccagagttctgg

SEQ ID NO: 2543268 - DNA, 25 bp, Homo sapien
tttttctgagatttcattagcttct

SEQ ID NO: 2543269 - DNA, 25 bp, Homo sapien
tctttacgatacagcattccccata

SEQ ID NO: 2543270 - DNA, 25 bp, Homo sapien
gaggatggctcgtctcacatttacc

SEQ ID NO: 2543271 - DNA, 25 bp, Homo sapien
ccctcagattggtggcaagcagcct

SEQ ID NO: 2543272 - DNA, 25 bp, Homo sapien
tctggttaccagaaattgcctttga

SEQ ID NO: 2543273 - DNA, 25 bp, Homo sapien
tctctctggttaccagaaattgcct

SEQ ID NO: 2543274 - DNA, 25 bp, Homo sapien
tctctggttaccagaaattgccttt

SEQ ID NO: 2543275 - DNA, 25 bp, Homo sapien
tcatctctctggttaccagaaattg

SEQ ID NO: 2543276 - DNA, 25 bp, Homo sapien
gaaggctgttgtaatataatcataa

SEQ ID NO: 2543277 - DNA, 25 bp, Homo sapien
caaggaatataacctgtagatctgt

SEQ ID NO: 2543278 - DNA, 25 bp, Homo sapien
taatataatcataattggctctttc

SEQ ID NO: 2543279 - DNA, 25 bp, Homo sapien
tcaaggaatataacctgtagatctg

SEQ ID NO: 2543280 - DNA, 25 bp, Homo sapien
cgggaattgatgagaatcgtggcct

SEQ ID NO: 2543281 - DNA, 25 bp, Homo sapien
cctctgggaattaacgggaattgat

SEQ ID NO: 2543282 - DNA, 25 bp, Homo sapien
cacacagcaccatgtaaacctctgg

SEQ ID NO: 2543283 - DNA, 25 bp, Homo sapien
cttggtgagatttagagacattggg

SEQ ID NO: 2543284 - DNA, 25 bp, Homo sapien
tgcattattctgtttgtcacctaga

SEQ ID NO: 2543285 - DNA, 25 bp, Homo sapien
catattcgtgatgtgaacttgagaa

SEQ ID NO: 2543286 - DNA, 25 bp, Homo sapien
tctactctggtcatattcgtgatgt

SEQ ID NO: 2543287 - DNA, 25 bp, Homo sapien
tgtttgtcacctagataaagtctac

SEQ ID NO: 2543288 - DNA, 25 bp, Homo sapien
gggaacattggggatatccctgctg

SEQ ID NO: 2543289 - DNA, 25 bp, Homo sapien
cagtgctcagggaacattggggata

SEQ ID NO: 2543290 - DNA, 25 bp, Homo sapien
ataatacattcaggatcattggtcc

SEQ ID NO: 2543291 - DNA, 25 bp, Homo sapien
ggatcattggtccatagatgatggg

SEQ ID NO: 2543292 - DNA, 25 bp, Homo sapien
ctttctggaagcaactggttctctt

SEQ ID NO: 2543293 - DNA, 25 bp, Homo sapien
cacatgggcatgaaaggtgcccttg

SEQ ID NO: 2543294 - DNA, 25 bp, Homo sapien
gattggaccgggagtgaacacctca

SEQ ID NO: 2543295 - DNA, 25 bp, Homo sapien
gaagtgtgaaagagtccatggtcca

SEQ ID NO: 2543296 - DNA, 25 bp, Homo sapien
aaggtgcccttgacctcgtcatgca

SEQ ID NO: 2543297 - DNA, 25 bp, Homo sapien
ttgctgatttgctaacagtcttcat

SEQ ID NO: 2543298 - DNA, 25 bp, Homo sapien
caggaatgtttgctgatttgctaac

SEQ ID NO: 2543299 - DNA, 25 bp, Homo sapien
gtttgctgatttgctaacagtcttc

SEQ ID NO: 2543300 - DNA, 25 bp, Homo sapien
aatgtttgctgatttgctaacagtc

SEQ ID NO: 2543301 - DNA, 25 bp, Homo sapien
taaatgctgatcacataccagctgc

SEQ ID NO: 2543302 - DNA, 25 bp, Homo sapien
gatttccagtgaccgtggctcatta

SEQ ID NO: 2543303 - DNA, 25 bp, Homo sapien
gggaaattctcatgctcattaacag

SEQ ID NO: 2543304 - DNA, 25 bp, Homo sapien
cattaacagagagcatatcatcatc

SEQ ID NO: 2543305 - DNA, 25 bp, Homo sapien
ttgctctagcagatgtctcctctct

SEQ ID NO: 2543306 - DNA, 25 bp, Homo sapien
tctgggacataaggtgaaggtccag

SEQ ID NO: 2543307 - DNA, 25 bp, Homo sapien
cccaggtggtgatgcgtgtgctcca

SEQ ID NO: 2543308 - DNA, 25 bp, Homo sapien
tgaggccgtcctaacccaggtggtg

SEQ ID NO: 2543309 - DNA, 25 bp, Homo sapien
gaaggagaggcagattccctgatat

SEQ ID NO: 2543310 - DNA, 25 bp, Homo sapien
tattttcgctcattgttctgtgcag

SEQ ID NO: 2543311 - DNA, 25 bp, Homo sapien
gtgcagttttcagagaaggagaggc

SEQ ID NO: 2543312 - DNA, 25 bp, Homo sapien
ctgatattcttctggaaccactcac

SEQ ID NO: 2543313 - DNA, 25 bp, Homo sapien
ggcagatgtggtctcagccctcagg

SEQ ID NO: 2543314 - DNA, 25 bp, Homo sapien
gtttgccggagtaatgttcatcagc

SEQ ID NO: 2543315 - DNA, 25 bp, Homo sapien
gctactcttcgaagagccagtgttg

SEQ ID NO: 2543316 - DNA, 25 bp, Homo sapien
gttcatcagctgctactcttcgaag

SEQ ID NO: 2543317 - DNA, 25 bp, Homo sapien
accattgtccactggctagaacgca

SEQ ID NO: 2543318 - DNA, 25 bp, Homo sapien
tggctagaacgcagtcacatgacaa

SEQ ID NO: 2543319 - DNA, 25 bp, Homo sapien
agtcacatgacaacacctagccaca

SEQ ID NO: 2543320 - DNA, 25 bp, Homo sapien
tgtccactggctagaacgcagtcac

SEQ ID NO: 2543321 - DNA, 25 bp, Homo sapien
gatgcggggagatacatgactagat

SEQ ID NO: 2543322 - DNA, 25 bp, Homo sapien
tgcggggagatacatgactagattg

SEQ ID NO: 2543323 - DNA, 25 bp, Homo sapien
tgcagggaggatgcggggagataca

SEQ ID NO: 2543324 - DNA, 25 bp, Homo sapien
gggagatacatgactagattgagct

SEQ ID NO: 2543325 - DNA, 25 bp, Homo sapien
aggattctgtgcatatgtctacgtc

SEQ ID NO: 2543326 - DNA, 25 bp, Homo sapien
ggattctgtgcatatgtctacgtca

SEQ ID NO: 2543327 - DNA, 25 bp, Homo sapien
gattctgtgcatatgtctacgtcac

SEQ ID NO: 2543328 - DNA, 25 bp, Homo sapien
ataggattctgtgcatatgtctacg

SEQ ID NO: 2543329 - DNA, 25 bp, Homo sapien
cacttttgatgttgtctccgaggga

SEQ ID NO: 2543330 - DNA, 25 bp, Homo sapien
tacagggattcacgcagatgaggca

SEQ ID NO: 2543331 - DNA, 25 bp, Homo sapien
taagagcaactcttgctagagaccg

SEQ ID NO: 2543332 - DNA, 25 bp, Homo sapien
gggagcctacaagtccactaacagt

SEQ ID NO: 2543333 - DNA, 25 bp, Homo sapien
cacatattttgacatctgattttgg

SEQ ID NO: 2543334 - DNA, 25 bp, Homo sapien
ctgattttggcaattctttacttat

SEQ ID NO: 2543335 - DNA, 25 bp, Homo sapien
ttttggcaattctttacttatttga

SEQ ID NO: 2543336 - DNA, 25 bp, Homo sapien
tggcaattctttacttatttgaagg

SEQ ID NO: 2543337 - DNA, 25 bp, Homo sapien
actctgtccttgtctcactgtgtgg

SEQ ID NO: 2543338 - DNA, 25 bp, Homo sapien
tatgtggaatttacaccccgtgcca

SEQ ID NO: 2543339 - DNA, 25 bp, Homo sapien
tcttgggtgtgccatgttctgaggc

SEQ ID NO: 2543340 - DNA, 25 bp, Homo sapien
cccgtgccactgaatttaagcccat

SEQ ID NO: 2543341 - DNA, 25 bp, Homo sapien
gtgtgacttggcctatgcttgtgga

SEQ ID NO: 2543342 - DNA, 25 bp, Homo sapien
ttacgtatcctagtccaagtcaccc

SEQ ID NO: 2543343 - DNA, 25 bp, Homo sapien
ccaggttgtctcttttccggattca

SEQ ID NO: 2543344 - DNA, 25 bp, Homo sapien
gccaggcgagggtgtcagacttccc

SEQ ID NO: 2543345 - DNA, 25 bp, Homo sapien
gctgaagtgaagaagccggcagcca

SEQ ID NO: 2543346 - DNA, 25 bp, Homo sapien
ttgcttaaatcttcaggcaccacca

SEQ ID NO: 2543347 - DNA, 25 bp, Homo sapien
tcatctccccatgaaacccagcatg

SEQ ID NO: 2543348 - DNA, 25 bp, Homo sapien
cctgctcaggcagaacacttggtgt

SEQ ID NO: 2543349 - DNA, 25 bp, Homo sapien
gatgctctgtagctgagatcaccca

SEQ ID NO: 2543350 - DNA, 25 bp, Homo sapien
caagagcctacaaagttcacaggaa

SEQ ID NO: 2543351 - DNA, 25 bp, Homo sapien
tcttgaattgcatgtgagccccatg

SEQ ID NO: 2543352 - DNA, 25 bp, Homo sapien
ccaagcctttgtctgagtaatgtac

SEQ ID NO: 2543353 - DNA, 25 bp, Homo sapien
tgctccaaagcgcacctgaagtgag

SEQ ID NO: 2543354 - DNA, 25 bp, Homo sapien
cctgggactgtgaatccacagagaa

SEQ ID NO: 2543355 - DNA, 25 bp, Homo sapien
tcaccaggtcctcttcgtggtcacg

SEQ ID NO: 2543356 - DNA, 25 bp, Homo sapien
ttcgtggtcacgagcctgggactgt

SEQ ID NO: 2543357 - DNA, 25 bp, Homo sapien
ctggtagcaggtgggacagaagagg

SEQ ID NO: 2543358 - DNA, 25 bp, Homo sapien
ggtagcaggtgggacagaagaggaa

SEQ ID NO: 2543359 - DNA, 25 bp, Homo sapien
tagcaggtgggacagaagaggaaac

SEQ ID NO: 2543360 - DNA, 25 bp, Homo sapien
agcaggtgggacagaagaggaaaca

SEQ ID NO: 2543361 - DNA, 25 bp, Homo sapien
gaggctcagggcttctaagggaagt

SEQ ID NO: 2543362 - DNA, 25 bp, Homo sapien
tgagaggtgaccataaaggaggctc

SEQ ID NO: 2543363 - DNA, 25 bp, Homo sapien
cagtgactgcgtcaccttgggaggc

SEQ ID NO: 2543364 - DNA, 25 bp, Homo sapien
agccgcagccgtctacacacttgtg

SEQ ID NO: 2543365 - DNA, 25 bp, Homo sapien
atgaatgaccacatccaaagtccat

SEQ ID NO: 2543366 - DNA, 25 bp, Homo sapien
cactgccatcgaggttataggcaaa

SEQ ID NO: 2543367 - DNA, 25 bp, Homo sapien
cagaggtgcgtttgctgacagctgt

SEQ ID NO: 2543368 - DNA, 25 bp, Homo sapien
gggcgaccatcaaactctatcatca

SEQ ID NO: 2543369 - DNA, 25 bp, Homo sapien
ggccattgaggaatgctcctgccat

SEQ ID NO: 2543370 - DNA, 25 bp, Homo sapien
ccaacagggtacagccttgtccggc

SEQ ID NO: 2543371 - DNA, 25 bp, Homo sapien
gccttgtccggccattgaggaatgc

SEQ ID NO: 2543372 - DNA, 25 bp, Homo sapien
ggtctctggacccatccactgctga

SEQ ID NO: 2543373 - DNA, 25 bp, Homo sapien
gatgtgctaactgagagagaagtca

SEQ ID NO: 2543374 - DNA, 25 bp, Homo sapien
gtcctgctctccttcgcaggatgtg

SEQ ID NO: 2543375 - DNA, 25 bp, Homo sapien
ccttcgcaggatgtgctaactgaga

SEQ ID NO: 2543376 - DNA, 25 bp, Homo sapien
agaagtcatctccactgaccaggga

SEQ ID NO: 2543377 - DNA, 25 bp, Homo sapien
gcagtggctgtggagactatggccc

SEQ ID NO: 2543378 - DNA, 25 bp, Homo sapien
agtggctgtggagactatggccctt

SEQ ID NO: 2543379 - DNA, 25 bp, Homo sapien
tgctgtggggaatgaagaacatcca

SEQ ID NO: 2543380 - DNA, 25 bp, Homo sapien
tggctgtggagactatggccctttt

SEQ ID NO: 2543381 - DNA, 25 bp, Homo sapien
cagctagacgtttttgactgtacag

SEQ ID NO: 2543382 - DNA, 25 bp, Homo sapien
ggactctttagatcaggaaacttaa

SEQ ID NO: 2543383 - DNA, 25 bp, Homo sapien
tactcttcagtgacgcttactggca

SEQ ID NO: 2543384 - DNA, 25 bp, Homo sapien
gaaaacctgtcatcctgtaatcagt

SEQ ID NO: 2543385 - DNA, 25 bp, Homo sapien
gtttcccaggacatctcctttctaa

SEQ ID NO: 2543386 - DNA, 25 bp, Homo sapien
ttctaacaggacacaattagattgc

SEQ ID NO: 2543387 - DNA, 25 bp, Homo sapien
cacaattagattgcacaagtacaga

SEQ ID NO: 2543388 - DNA, 25 bp, Homo sapien
tgagtttcccaggacatctcctttc

SEQ ID NO: 2543389 - DNA, 25 bp, Homo sapien
tctgactcattaacaagtcccaatt

SEQ ID NO: 2543390 - DNA, 25 bp, Homo sapien
aaacatcaatgagagtcaccttctc

SEQ ID NO: 2543391 - DNA, 25 bp, Homo sapien
acaagtcccaattccacaaagcagt

SEQ ID NO: 2543392 - DNA, 25 bp, Homo sapien
gccccaaaacatcaatgagagtcac

SEQ ID NO: 2543393 - DNA, 25 bp, Homo sapien
ggtttctttggaagcccatagaaga

SEQ ID NO: 2543394 - DNA, 25 bp, Homo sapien
gctgagcctctagcttctattttgt

SEQ ID NO: 2543395 - DNA, 25 bp, Homo sapien
taagccagtgcaaagagtctgttct

SEQ ID NO: 2543396 - DNA, 25 bp, Homo sapien
gataagccagtgcaaagagtctgtt

SEQ ID NO: 2543397 - DNA, 25 bp, Homo sapien
ctgagcctctagcttctattttgtt

SEQ ID NO: 2543398 - DNA, 25 bp, Homo sapien
ggcatcaggctatacactctcactt

SEQ ID NO: 2543399 - DNA, 25 bp, Homo sapien
ccttcaggcaattctactgtgattt

SEQ ID NO: 2543400 - DNA, 25 bp, Homo sapien
caggcaattctactgtgatttgatt

SEQ ID NO: 2543401 - DNA, 25 bp, Homo sapien
caggctttttcttctcggcatcagg

SEQ ID NO: 2543402 - DNA, 25 bp, Homo sapien
ggctccacaccaggctctctggaga

SEQ ID NO: 2543403 - DNA, 25 bp, Homo sapien
ctccacaccaggctctctggagagg

SEQ ID NO: 2543404 - DNA, 25 bp, Homo sapien
cttgtggggctccacaccaggctct

SEQ ID NO: 2543405 - DNA, 25 bp, Homo sapien
ccacaccaggctctctggagaggac

SEQ ID NO: 2543406 - DNA, 25 bp, Homo sapien
tctctaaacaccacaattcttggct

SEQ ID NO: 2543407 - DNA, 25 bp, Homo sapien
ttgtttggtccatagtagcatcagc

SEQ ID NO: 2543408 - DNA, 25 bp, Homo sapien
gcatcagcctgcagatacagtcttt

SEQ ID NO: 2543409 - DNA, 25 bp, Homo sapien
gcagaggcaagtcatttgtttggtc

SEQ ID NO: 2543410 - DNA, 25 bp, Homo sapien
cacgactttgacaggaactgaaaca

SEQ ID NO: 2543411 - DNA, 25 bp, Homo sapien
ggggcaagagggagaggggtgtcca

SEQ ID NO: 2543412 - DNA, 25 bp, Homo sapien
agaggggtgtccaccaagctcccta

SEQ ID NO: 2543413 - DNA, 25 bp, Homo sapien
gtgtccaccaagctccctactgcct

SEQ ID NO: 2543414 - DNA, 25 bp, Homo sapien
caccggggcaagagggagaggggtg

SEQ ID NO: 2543415 - DNA, 25 bp, Homo sapien
acagttgtccagagggatgaagcca

SEQ ID NO: 2543416 - DNA, 25 bp, Homo sapien
ggaatgtcttctcagtacccaggtg

SEQ ID NO: 2543417 - DNA, 25 bp, Homo sapien
tgaagccacgaagcacacacaaaat

SEQ ID NO: 2543418 - DNA, 25 bp, Homo sapien
gatggcattccatcccagactgaga

SEQ ID NO: 2543419 - DNA, 25 bp, Homo sapien
tgccaggccatccacgatgttggga

SEQ ID NO: 2543420 - DNA, 25 bp, Homo sapien
caatttataacaccctgccaggcca

SEQ ID NO: 2543421 - DNA, 25 bp, Homo sapien
ctctccaatccaatgctgtcaaagg

SEQ ID NO: 2543422 - DNA, 25 bp, Homo sapien
aaagggattgatggtccgagacagc

SEQ ID NO: 2543423 - DNA, 25 bp, Homo sapien
gggcatcattctctaatccagctat

SEQ ID NO: 2543424 - DNA, 25 bp, Homo sapien
ttcctcataaatgggcagttccagg

SEQ ID NO: 2543425 - DNA, 25 bp, Homo sapien
ggcttcctcataaatgggcagttcc

SEQ ID NO: 2543426 - DNA, 25 bp, Homo sapien
tgatgagggcatcattctctaatcc

SEQ ID NO: 2543427 - DNA, 25 bp, Homo sapien
tttctgttggccctcgtgtgcttct

SEQ ID NO: 2543428 - DNA, 25 bp, Homo sapien
ggccctcgtgtgcttctgtcatcat

SEQ ID NO: 2543429 - DNA, 25 bp, Homo sapien
tgttggccctcgtgtgcttctgtca

SEQ ID NO: 2543430 - DNA, 25 bp, Homo sapien
tggccctcgtgtgcttctgtcatca

SEQ ID NO: 2543431 - DNA, 25 bp, Homo sapien
agacatgtggcacgagccaccccag

SEQ ID NO: 2543432 - DNA, 25 bp, Homo sapien
catgagacatgtggcacgagccacc

SEQ ID NO: 2543433 - DNA, 25 bp, Homo sapien
gacatgagacatgtggcacgagcca

SEQ ID NO: 2543434 - DNA, 25 bp, Homo sapien
gagaaggacatgagacatgtggcac

SEQ ID NO: 2543435 - DNA, 25 bp, Homo sapien
gaacagtaattgagactttcagaga

SEQ ID NO: 2543436 - DNA, 25 bp, Homo sapien
ttaatgatgccatctagagaacagt

SEQ ID NO: 2543437 - DNA, 25 bp, Homo sapien
aatgatgccatctagagaacagtaa

SEQ ID NO: 2543438 - DNA, 25 bp, Homo sapien
tgatgccatctagagaacagtaatt

SEQ ID NO: 2543439 - DNA, 25 bp, Homo sapien
aagttcctgacgcagtataaagtgc

SEQ ID NO: 2543440 - DNA, 25 bp, Homo sapien
ttaactcgccttgggcagcaagcca

SEQ ID NO: 2543441 - DNA, 25 bp, Homo sapien
tgcaatagtctttgagtcacttcat

SEQ ID NO: 2543442 - DNA, 25 bp, Homo sapien
tcatttataccatcattaactcgcc

SEQ ID NO: 2543443 - DNA, 25 bp, Homo sapien
ccttgtgattatggcgcccgcacag

SEQ ID NO: 2543444 - DNA, 25 bp, Homo sapien
tattcagcatttgatagtgcctctc

SEQ ID NO: 2543445 - DNA, 25 bp, Homo sapien
ggtccttgccacaatacagcagtct

SEQ ID NO: 2543446 - DNA, 25 bp, Homo sapien
caccttatatatgccaacactgagc

SEQ ID NO: 2543447 - DNA, 25 bp, Homo sapien
attttggctgaagcaggttgccagg

SEQ ID NO: 2543448 - DNA, 25 bp, Homo sapien
ttgctcacactcaggtggaaaccgg

SEQ ID NO: 2543449 - DNA, 25 bp, Homo sapien
cacactcaggtggaaaccgggaagg

SEQ ID NO: 2543450 - DNA, 25 bp, Homo sapien
aggagggaggcttcatttgctcaca

SEQ ID NO: 2543451 - DNA, 25 bp, Homo sapien
tgaggacgcggcgagttcacggaga

SEQ ID NO: 2543452 - DNA, 25 bp, Homo sapien
aggacgcggcgagttcacggagagg

SEQ ID NO: 2543453 - DNA, 25 bp, Homo sapien
ctgaggacgcggcgagttcacggag

SEQ ID NO: 2543454 - DNA, 25 bp, Homo sapien
gacgcggcgagttcacggagaggac

SEQ ID NO: 2543455 - DNA, 25 bp, Homo sapien
ggtcatttgaacagcgtattcactg

SEQ ID NO: 2543456 - DNA, 25 bp, Homo sapien
tccactgagcggtaactgcatacag

SEQ ID NO: 2543457 - DNA, 25 bp, Homo sapien
catagaaaagctgcggtccactgag

SEQ ID NO: 2543458 - DNA, 25 bp, Homo sapien
tgcatacagcgacatttacaaagtg

SEQ ID NO: 2543459 - DNA, 25 bp, Homo sapien
tgttacacaggctgcgtttctctga

SEQ ID NO: 2543460 - DNA, 25 bp, Homo sapien
atgaaccacatccatttgtggtttc

SEQ ID NO: 2543461 - DNA, 25 bp, Homo sapien
gacaggagctgatatttactcggag

SEQ ID NO: 2543462 - DNA, 25 bp, Homo sapien
gggaggtcagctttgttcgtgttac

SEQ ID NO: 2543463 - DNA, 25 bp, Homo sapien
taccagcttaaggtggtcagttccc

SEQ ID NO: 2543464 - DNA, 25 bp, Homo sapien
cacaggcagttttgtagatgccggg

SEQ ID NO: 2543465 - DNA, 25 bp, Homo sapien
aaccttgtctctgaccctgttctca

SEQ ID NO: 2543466 - DNA, 25 bp, Homo sapien
tcctggtcatgcatagagcttcagc

SEQ ID NO: 2543467 - DNA, 25 bp, Homo sapien
tccccagccaggtaatttgccgggc

SEQ ID NO: 2543468 - DNA, 25 bp, Homo sapien
ggttgtctggctgatgaagatctca

SEQ ID NO: 2543469 - DNA, 25 bp, Homo sapien
cagagacgaccagctcactcgtgga

SEQ ID NO: 2543470 - DNA, 25 bp, Homo sapien
gagtcctcagtcagggactccccag

SEQ ID NO: 2543471 - DNA, 25 bp, Homo sapien
aaccacaattatctgcttctttgca

SEQ ID NO: 2543472 - DNA, 25 bp, Homo sapien
ctgtaggaatgtgggtgaggaaacc

SEQ ID NO: 2543473 - DNA, 25 bp, Homo sapien
gatgcctgttgcttgtctaacgaaa

SEQ ID NO: 2543474 - DNA, 25 bp, Homo sapien
ccctgcactgggacttctgtaggaa

SEQ ID NO: 2543475 - DNA, 25 bp, Homo sapien
ggattggtcatatccaacttttttc

SEQ ID NO: 2543476 - DNA, 25 bp, Homo sapien
tatagccatggcattgacaaaacca

SEQ ID NO: 2543477 - DNA, 25 bp, Homo sapien
ccccaattgagctatgttagacttc

SEQ ID NO: 2543478 - DNA, 25 bp, Homo sapien
ccaaaatgcactgtcctgcctaata

SEQ ID NO: 2543479 - DNA, 25 bp, Homo sapien
gctgagctttgaggactgggctaga

SEQ ID NO: 2543480 - DNA, 25 bp, Homo sapien
ctgagtctccaacaacactggtgtc

SEQ ID NO: 2543481 - DNA, 25 bp, Homo sapien
tgggctagatgacaggcagctgcca

SEQ ID NO: 2543482 - DNA, 25 bp, Homo sapien
cactgcgtggggtcccctcatcacc

SEQ ID NO: 2543483 - DNA, 25 bp, Homo sapien
gttaaagtcttaaaggcagctcctg

SEQ ID NO: 2543484 - DNA, 25 bp, Homo sapien
ttaaagtcttaaaggcagctcctgt

SEQ ID NO: 2543485 - DNA, 25 bp, Homo sapien
aaagtcttaaaggcagctcctgttt

SEQ ID NO: 2543486 - DNA, 25 bp, Homo sapien
gcccgggtcgtttcaactgaactca

SEQ ID NO: 2543487 - DNA, 25 bp, Homo sapien
cgggtcgtttcaactgaactcagaa

SEQ ID NO: 2543488 - DNA, 25 bp, Homo sapien
ccttcgaaatggaatcgttaagagc

SEQ ID NO: 2543489 - DNA, 25 bp, Homo sapien
ctcagaaacctcagtgtaagaaatg

SEQ ID NO: 2543490 - DNA, 25 bp, Homo sapien
tccttctaagagtattctggctggc

SEQ ID NO: 2543491 - DNA, 25 bp, Homo sapien
gtgctcctccttctaagagtattct

SEQ ID NO: 2543492 - DNA, 25 bp, Homo sapien
ctaagagtattctggctggcccctc

SEQ ID NO: 2543493 - DNA, 25 bp, Homo sapien
tctgcctttgaatggaaacaagtca

SEQ ID NO: 2543494 - DNA, 25 bp, Homo sapien
agaggtccaaactcagtctgaattc

SEQ ID NO: 2543495 - DNA, 25 bp, Homo sapien
tgactttattcgtagagggaagagg

SEQ ID NO: 2543496 - DNA, 25 bp, Homo sapien
tcaagttataccaacagagatgact

SEQ ID NO: 2543497 - DNA, 25 bp, Homo sapien
caaactcagtctgaattccactatc

SEQ ID NO: 2543498 - DNA, 25 bp, Homo sapien
atctgtgtaattctatttcttccag

SEQ ID NO: 2543499 - DNA, 25 bp, Homo sapien
cagcaatgagaaacttgacgtaggt

SEQ ID NO: 2543500 - DNA, 25 bp, Homo sapien
caatgagaaacttgacgtaggtcat

SEQ ID NO: 2543501 - DNA, 25 bp, Homo sapien
catctgtgtaattctatttcttcca

SEQ ID NO: 2543502 - DNA, 25 bp, Homo sapien
aatggttccccatatgaagcagagg

SEQ ID NO: 2543503 - DNA, 25 bp, Homo sapien
gaacaaagaccaccagatctaggga

SEQ ID NO: 2543504 - DNA, 25 bp, Homo sapien
tccagagagacttgcgccaatgaca

SEQ ID NO: 2543505 - DNA, 25 bp, Homo sapien
tgttgagaccacatagacatggcca

SEQ ID NO: 2543506 - DNA, 25 bp, Homo sapien
ttgtgctccagtgatgagtgtccac

SEQ ID NO: 2543507 - DNA, 25 bp, Homo sapien
ctccagtgatgagtgtccacgtggg

SEQ ID NO: 2543508 - DNA, 25 bp, Homo sapien
tgctccagtgatgagtgtccacgtg

SEQ ID NO: 2543509 - DNA, 25 bp, Homo sapien
tgtgctccagtgatgagtgtccacg

SEQ ID NO: 2543510 - DNA, 25 bp, Homo sapien
attggcttcccagtccgggctgtcc

SEQ ID NO: 2543511 - DNA, 25 bp, Homo sapien
ctacgctggccagtgtgacagcagt

SEQ ID NO: 2543512 - DNA, 25 bp, Homo sapien
cagatgcgagggacactgctccata

SEQ ID NO: 2543513 - DNA, 25 bp, Homo sapien
tgggtctcatttccggggatcctga

SEQ ID NO: 2543514 - DNA, 25 bp, Homo sapien
tgtgcatcaagcacacctgaatgtg

SEQ ID NO: 2543515 - DNA, 25 bp, Homo sapien
catcaagcacacctgaatgtgcata

SEQ ID NO: 2543516 - DNA, 25 bp, Homo sapien
acctgcgggtctgtgcatcaagcac

SEQ ID NO: 2543517 - DNA, 25 bp, Homo sapien
gggtctgtgcatcaagcacacctga

SEQ ID NO: 2543518 - DNA, 25 bp, Homo sapien
ctgcagacctttgcatcatgcgtac

SEQ ID NO: 2543519 - DNA, 25 bp, Homo sapien
ctggacgtgcacacctgtgggtctt

SEQ ID NO: 2543520 - DNA, 25 bp, Homo sapien
catcaagatgacctgaatgtgcaca

SEQ ID NO: 2543521 - DNA, 25 bp, Homo sapien
ggacgtgcacacctgtgggtctttg

SEQ ID NO: 2543522 - DNA, 25 bp, Homo sapien
cacattcacagggacgtgcacacct

SEQ ID NO: 2543523 - DNA, 25 bp, Homo sapien
gtggtctgagcctttgtcaaagcga

SEQ ID NO: 2543524 - DNA, 25 bp, Homo sapien
gcctttgtcaaagcgactgcttaat

SEQ ID NO: 2543525 - DNA, 25 bp, Homo sapien
tcaaagcgactgcttaatttattgt

SEQ ID NO: 2543526 - DNA, 25 bp, Homo sapien
actgaaggcttactctgttgtggtc

SEQ ID NO: 2543527 - DNA, 25 bp, Homo sapien
tgatctgatcctgaggccaactgca

SEQ ID NO: 2543528 - DNA, 25 bp, Homo sapien
gaacgcgggatgtggttgtcccact

SEQ ID NO: 2543529 - DNA, 25 bp, Homo sapien
gaatccatggcggagctgcttcctg

SEQ ID NO: 2543530 - DNA, 25 bp, Homo sapien
ctctgtaggagagtcctatgaatcc

SEQ ID NO: 2543531 - DNA, 25 bp, Homo sapien
gagagctcttcagattgacttccaa

SEQ ID NO: 2543532 - DNA, 25 bp, Homo sapien
ggactctgagactttccttgtgagg

SEQ ID NO: 2543533 - DNA, 25 bp, Homo sapien
gagacccctgcatcagtaacctgaa

SEQ ID NO: 2543534 - DNA, 25 bp, Homo sapien
caagagttggcttttgatctgcggc

SEQ ID NO: 2543535 - DNA, 25 bp, Homo sapien
tggaaggacagaagagaagacagag

SEQ ID NO: 2543536 - DNA, 25 bp, Homo sapien
ctggaaggacagaagagaagacaga

SEQ ID NO: 2543537 - DNA, 25 bp, Homo sapien
ctcaggtgttcccagcaatcaagac

SEQ ID NO: 2543538 - DNA, 25 bp, Homo sapien
cagagcagggtgtgtcccacatagg

SEQ ID NO: 2543539 - DNA, 25 bp, Homo sapien
tgggggttggagagtgctgcccccc

SEQ ID NO: 2543540 - DNA, 25 bp, Homo sapien
ccgcagggcctcgggagggtgaagg

SEQ ID NO: 2543541 - DNA, 25 bp, Homo sapien
agcagggtgtgtcccacataggctg

SEQ ID NO: 2543542 - DNA, 25 bp, Homo sapien
tgccacacgggtcctggaaggatcc

SEQ ID NO: 2543543 - DNA, 25 bp, Homo sapien
gattcgtctggagacgccgccttct

SEQ ID NO: 2543544 - DNA, 25 bp, Homo sapien
tggccacatcgaagtttctcaacgg

SEQ ID NO: 2543545 - DNA, 25 bp, Homo sapien
tctcaacgggaggagcggattcgtc

SEQ ID NO: 2543546 - DNA, 25 bp, Homo sapien
agatctagagggggcgcaggtgcac

SEQ ID NO: 2543547 - DNA, 25 bp, Homo sapien
ggcggagggagctgaccctggagtt

SEQ ID NO: 2543548 - DNA, 25 bp, Homo sapien
ccctggagtttggagatctagaggg

SEQ ID NO: 2543549 - DNA, 25 bp, Homo sapien
ctgaccctggagtttggagatctag

SEQ ID NO: 2543550 - DNA, 25 bp, Homo sapien
cccgctgggagtggcggcgcctttg

SEQ ID NO: 2543551 - DNA, 25 bp, Homo sapien
ggtcccgctgggagtggcggcgcct

SEQ ID NO: 2543552 - DNA, 25 bp, Homo sapien
tgcagggctcctccgctccgatggg

SEQ ID NO: 2543553 - DNA, 25 bp, Homo sapien
ctccgctccgatgggcgggtcccgc

SEQ ID NO: 2543554 - DNA, 25 bp, Homo sapien
tgaatggactttgtttagaaccagg

SEQ ID NO: 2543555 - DNA, 25 bp, Homo sapien
gacaatgtcccgtatatagacccct

SEQ ID NO: 2543556 - DNA, 25 bp, Homo sapien
ttcaggatgtcagggcaaacaggat

SEQ ID NO: 2543557 - DNA, 25 bp, Homo sapien
caggatagtggataggatctctcac

SEQ ID NO: 2543558 - DNA, 25 bp, Homo sapien
ctgaaacaaatatcagagcgtggac

SEQ ID NO: 2543559 - DNA, 25 bp, Homo sapien
tgtacatctgaaacaaatatcagag

SEQ ID NO: 2543560 - DNA, 25 bp, Homo sapien
catctgaaacaaatatcagagcgtg

SEQ ID NO: 2543561 - DNA, 25 bp, Homo sapien
aaacaaatatcagagcgtggacacc

SEQ ID NO: 2543562 - DNA, 25 bp, Homo sapien
tctcttgctgatggtttgcatctta

SEQ ID NO: 2543563 - DNA, 25 bp, Homo sapien
gcatcttacactgtttgctggaaag

SEQ ID NO: 2543564 - DNA, 25 bp, Homo sapien
gttttgatacttcagtggtatttag

SEQ ID NO: 2543565 - DNA, 25 bp, Homo sapien
agtatttgttttgatacttcagtgg

SEQ ID NO: 2543566 - DNA, 25 bp, Homo sapien
ctctgcaggcgtgcaggtgagtcca

SEQ ID NO: 2543567 - DNA, 25 bp, Homo sapien
cacgctgtgcgtcttgttctggaat

SEQ ID NO: 2543568 - DNA, 25 bp, Homo sapien
gtctctcctggtgtcattaatcaca

SEQ ID NO: 2543569 - DNA, 25 bp, Homo sapien
gagaatgtggtttgctgaagaatcc

SEQ ID NO: 2543570 - DNA, 25 bp, Homo sapien
tgaaagtgcgtcagttcccggggct

SEQ ID NO: 2543571 - DNA, 25 bp, Homo sapien
aaagtgcgtcagttcccggggctgg

SEQ ID NO: 2543572 - DNA, 25 bp, Homo sapien
ctgaaagtgcgtcagttcccggggc

SEQ ID NO: 2543573 - DNA, 25 bp, Homo sapien
agtgcgtcagttcccggggctgggg

SEQ ID NO: 2543574 - DNA, 25 bp, Homo sapien
agttcaatgtttccaggataccctg

SEQ ID NO: 2543575 - DNA, 25 bp, Homo sapien
caaaacagggatgcccacctgggtt

SEQ ID NO: 2543576 - DNA, 25 bp, Homo sapien
caatgtttccaggataccctgaaac

SEQ ID NO: 2543577 - DNA, 25 bp, Homo sapien
cctcctccatcatagacaagttcaa

SEQ ID NO: 2543578 - DNA, 25 bp, Homo sapien
cgtgggtattccacagccctgccat

SEQ ID NO: 2543579 - DNA, 25 bp, Homo sapien
acagcattggggcaggtcctcaggc

SEQ ID NO: 2543580 - DNA, 25 bp, Homo sapien
attaaggcacagcaagccgtgggta

SEQ ID NO: 2543581 - DNA, 25 bp, Homo sapien
gacttccatataattaaggcacagc

SEQ ID NO: 2543582 - DNA, 25 bp, Homo sapien
tgtgctcagcatgtgcccgcttcct

SEQ ID NO: 2543583 - DNA, 25 bp, Homo sapien
ctgacaaaggatgtgcggcgtcccc

SEQ ID NO: 2543584 - DNA, 25 bp, Homo sapien
tcatagcccctgaactgacaaagga

SEQ ID NO: 2543585 - DNA, 25 bp, Homo sapien
tcctctgactgtcatagcccctgaa

SEQ ID NO: 2543586 - DNA, 25 bp, Homo sapien
tgcaagatccctgtcaacaccaggt

SEQ ID NO: 2543587 - DNA, 25 bp, Homo sapien
aggatgcaagatccctgtcaacacc

SEQ ID NO: 2543588 - DNA, 25 bp, Homo sapien
tcggtgcttccggtgtaataggaga

SEQ ID NO: 2543589 - DNA, 25 bp, Homo sapien
gtgtctgttctgggaaatcggtgct

SEQ ID NO: 2543590 - DNA, 25 bp, Homo sapien
cctttgagtggcatgcgtcttgcat

SEQ ID NO: 2543591 - DNA, 25 bp, Homo sapien
tgatgacattgattgaaatgggtga

SEQ ID NO: 2543592 - DNA, 25 bp, Homo sapien
tgatgacgaagaagctaaactgcat

SEQ ID NO: 2543593 - DNA, 25 bp, Homo sapien
tgaaatgggtgatgacgaagaagct

SEQ ID NO: 2543594 - DNA, 25 bp, Homo sapien
tctctgtataaggtgatgacattga

SEQ ID NO: 2543595 - DNA, 25 bp, Homo sapien
tttctctgcaaagacgggatccctt

SEQ ID NO: 2543596 - DNA, 25 bp, Homo sapien
cgggatcccttgaaattgaacttga

SEQ ID NO: 2543597 - DNA, 25 bp, Homo sapien
aaaaatcagtgacctgcaccaatca

SEQ ID NO: 2543598 - DNA, 25 bp, Homo sapien
gaacttgaatcaatagatggccact

SEQ ID NO: 2543599 - DNA, 25 bp, Homo sapien
tagactagtcaagtggagtagtgga

SEQ ID NO: 2543600 - DNA, 25 bp, Homo sapien
ctagtcaagtggagtagtggaagaa

SEQ ID NO: 2543601 - DNA, 25 bp, Homo sapien
cgattgagataactcgctaccttag

SEQ ID NO: 2543602 - DNA, 25 bp, Homo sapien
tcaagtggagtagtggaagaaggga

SEQ ID NO: 2543603 - DNA, 25 bp, Homo sapien
cacttctagttacccagctgcttgg

SEQ ID NO: 2543604 - DNA, 25 bp, Homo sapien
cagtggttgcatgcaggctttcgga

SEQ ID NO: 2543605 - DNA, 25 bp, Homo sapien
cacattatgatatgggacagagccc

SEQ ID NO: 2543606 - DNA, 25 bp, Homo sapien
tgtgcgggtggtagcaaacatctct

SEQ ID NO: 2543607 - DNA, 25 bp, Homo sapien
cgggcagcccatgagtaaatggagt

SEQ ID NO: 2543608 - DNA, 25 bp, Homo sapien
taaatggagtagtgcgtctctgtgc

SEQ ID NO: 2543609 - DNA, 25 bp, Homo sapien
cgtctctgtgcagctaagcctgtgg

SEQ ID NO: 2543610 - DNA, 25 bp, Homo sapien
taagcctgtggagcagcgtgcttgc

SEQ ID NO: 2543611 - DNA, 25 bp, Homo sapien
aaacaaattgaaggaccagcattcc

SEQ ID NO: 2543612 - DNA, 25 bp, Homo sapien
tctgtgttggttgctcctgtgccca

SEQ ID NO: 2543613 - DNA, 25 bp, Homo sapien
gatgatgatgttctaggcaagcctc

SEQ ID NO: 2543614 - DNA, 25 bp, Homo sapien
ggaagtgctccctcttagcataggt

SEQ ID NO: 2543615 - DNA, 25 bp, Homo sapien
taaggcgtctgcatgaacgcagcaa

SEQ ID NO: 2543616 - DNA, 25 bp, Homo sapien
ttcccaggagactgataaggcgtct

SEQ ID NO: 2543617 - DNA, 25 bp, Homo sapien
tctgggcttctagaataggtttgag

SEQ ID NO: 2543618 - DNA, 25 bp, Homo sapien
gctacagtctattgtctcagagcaa

SEQ ID NO: 2543619 - DNA, 25 bp, Homo sapien
ctgctctctttcacaccagaggctc

SEQ ID NO: 2543620 - DNA, 25 bp, Homo sapien
tctttcacaccagaggctcccagaa

SEQ ID NO: 2543621 - DNA, 25 bp, Homo sapien
aggctcccagaaagaggccggccaa

SEQ ID NO: 2543622 - DNA, 25 bp, Homo sapien
ggctcccagaaagaggccggccaag

SEQ ID NO: 2543623 - DNA, 25 bp, Homo sapien
tctgtatctgggacagtgagactgt

SEQ ID NO: 2543624 - DNA, 25 bp, Homo sapien
gacatagtttggatctgtatctggg

SEQ ID NO: 2543625 - DNA, 25 bp, Homo sapien
gaaagtctgcagttaaatcaaggac

SEQ ID NO: 2543626 - DNA, 25 bp, Homo sapien
ggacagtgagactgtgttcattaac

SEQ ID NO: 2543627 - DNA, 25 bp, Homo sapien
ggaggatgacatcacctggctcaga

SEQ ID NO: 2543628 - DNA, 25 bp, Homo sapien
taaaggtcctccaatcactcaagac

SEQ ID NO: 2543629 - DNA, 25 bp, Homo sapien
catcaggcgtgaaaaataaaggtcc

SEQ ID NO: 2543630 - DNA, 25 bp, Homo sapien
acatttcaagactttagtggttatt

SEQ ID NO: 2543631 - DNA, 25 bp, Homo sapien
catttatttaagacgtacaccaagt

SEQ ID NO: 2543632 - DNA, 25 bp, Homo sapien
ggctttgtttgtacgttgtgtccaa

SEQ ID NO: 2543633 - DNA, 25 bp, Homo sapien
tgtgacaggaaatgtcatctccata

SEQ ID NO: 2543634 - DNA, 25 bp, Homo sapien
aaaattctgtaacggtgccctgagc

SEQ ID NO: 2543635 - DNA, 25 bp, Homo sapien
gaaggccatgccggtagatgtgtct

SEQ ID NO: 2543636 - DNA, 25 bp, Homo sapien
tctgtcccgcagagctttccacaag

SEQ ID NO: 2543637 - DNA, 25 bp, Homo sapien
ggccatgccggtagatgtgtctgtc

SEQ ID NO: 2543638 - DNA, 25 bp, Homo sapien
ctggaaggccatgccggtagatgtg

SEQ ID NO: 2543639 - DNA, 25 bp, Homo sapien
cattcgctcaaatgtgatgggccaa

SEQ ID NO: 2543640 - DNA, 25 bp, Homo sapien
gggccaaggccttcagacatgacca

SEQ ID NO: 2543641 - DNA, 25 bp, Homo sapien
taaccacattcgctcaaatgtgatg

SEQ ID NO: 2543642 - DNA, 25 bp, Homo sapien
tcagacatgaccaggtaactatagg

SEQ ID NO: 2543643 - DNA, 25 bp, Homo sapien
tgggattcattgttcgttttttgct

SEQ ID NO: 2543644 - DNA, 25 bp, Homo sapien
cactcaaaacacagagagggcccct

SEQ ID NO: 2543645 - DNA, 25 bp, Homo sapien
cagcagcaggggcttgggattcatt

SEQ ID NO: 2543646 - DNA, 25 bp, Homo sapien
tctaatgtctggtagggcaggactc

SEQ ID NO: 2543647 - DNA, 25 bp, Homo sapien
gttgagaagtccaagtctttggatg

SEQ ID NO: 2543648 - DNA, 25 bp, Homo sapien
gaggggcttccttcggcctgagttc

SEQ ID NO: 2543649 - DNA, 25 bp, Homo sapien
ttgagaagtccaagtctttggatgg

SEQ ID NO: 2543650 - DNA, 25 bp, Homo sapien
atttgcacatcccatcgacctttca

SEQ ID NO: 2543651 - DNA, 25 bp, Homo sapien
tatttgcacatcccatcgacctttc

SEQ ID NO: 2543652 - DNA, 25 bp, Homo sapien
gcacatcccatcgacctttcaatcc

SEQ ID NO: 2543653 - DNA, 25 bp, Homo sapien
ttgcacatcccatcgacctttcaat

SEQ ID NO: 2543654 - DNA, 25 bp, Homo sapien
ctgagacactccatgggcacaacag

SEQ ID NO: 2543655 - DNA, 25 bp, Homo sapien
gatacctttccctacatcctacatg

SEQ ID NO: 2543656 - DNA, 25 bp, Homo sapien
gagacactccatgggcacaacaggt

SEQ ID NO: 2543657 - DNA, 25 bp, Homo sapien
tacctttccctacatcctacatgtg

SEQ ID NO: 2543658 - DNA, 25 bp, Homo sapien
gtcatgggacagtatttgaacacca

SEQ ID NO: 2543659 - DNA, 25 bp, Homo sapien
cagcctgtttaggagacttgatgag

SEQ ID NO: 2543660 - DNA, 25 bp, Homo sapien
cagaaggtgtgcattcctcaggtct

SEQ ID NO: 2543661 - DNA, 25 bp, Homo sapien
tgttctcatagctgtggctccaggg

SEQ ID NO: 2543662 - DNA, 25 bp, Homo sapien
atgaccttcgctccaccctcccatt

SEQ ID NO: 2543663 - DNA, 25 bp, Homo sapien
ctccatgaccttcgctccaccctcc

SEQ ID NO: 2543664 - DNA, 25 bp, Homo sapien
tcctccatgaccttcgctccaccct

SEQ ID NO: 2543665 - DNA, 25 bp, Homo sapien
cttcctccatgaccttcgctccacc

SEQ ID NO: 2543666 - DNA, 25 bp, Homo sapien
catagaggtaaccagcaataatggt

SEQ ID NO: 2543667 - DNA, 25 bp, Homo sapien
cagcaataatggttgaggataaatc

SEQ ID NO: 2543668 - DNA, 25 bp, Homo sapien
cctaacatagaggtaaccagcaata

SEQ ID NO: 2543669 - DNA, 25 bp, Homo sapien
tcagcacctaacatagaggtaacca

SEQ ID NO: 2543670 - DNA, 25 bp, Homo sapien
cagatgtaactgtgtgttctatttt

SEQ ID NO: 2543671 - DNA, 25 bp, Homo sapien
atgtaactgtgtgttctattttgga

SEQ ID NO: 2543672 - DNA, 25 bp, Homo sapien
acacagatgtaactgtgtgttctat

SEQ ID NO: 2543673 - DNA, 25 bp, Homo sapien
cacagatgtaactgtgtgttctatt

SEQ ID NO: 2543674 - DNA, 25 bp, Homo sapien
aaggaagacccacaagcttgcagag

SEQ ID NO: 2543675 - DNA, 25 bp, Homo sapien
tatctgggatcgtcactggcttttc

SEQ ID NO: 2543676 - DNA, 25 bp, Homo sapien
tctagggacactgcatagggacaat

SEQ ID NO: 2543677 - DNA, 25 bp, Homo sapien
gaagagatggccacgtagacaagga

SEQ ID NO: 2543678 - DNA, 25 bp, Homo sapien
ggcatgggctcttacttggagttga

SEQ ID NO: 2543679 - DNA, 25 bp, Homo sapien
gctcttacttggagttgagttctga

SEQ ID NO: 2543680 - DNA, 25 bp, Homo sapien
tacttggagttgagttctgaatctc

SEQ ID NO: 2543681 - DNA, 25 bp, Homo sapien
ggagttgagttctgaatctccctca

SEQ ID NO: 2543682 - DNA, 25 bp, Homo sapien
cttgcttttcacgaactccacttcg

SEQ ID NO: 2543683 - DNA, 25 bp, Homo sapien
tgaggatgaggtcctctccatgcct

SEQ ID NO: 2543684 - DNA, 25 bp, Homo sapien
gtggttgtcttaaaatccttctctc

SEQ ID NO: 2543685 - DNA, 25 bp, Homo sapien
tctctgagtggttgtcttaaaatcc

SEQ ID NO: 2543686 - DNA, 25 bp, Homo sapien
atccgagtctcctctcgcagacacc

SEQ ID NO: 2543687 - DNA, 25 bp, Homo sapien
cgagtctcctctcgcagacaccaca

SEQ ID NO: 2543688 - DNA, 25 bp, Homo sapien
tccgagtctcctctcgcagacacca

SEQ ID NO: 2543689 - DNA, 25 bp, Homo sapien
gtctcctctcgcagacaccacaacc

SEQ ID NO: 2543690 - DNA, 25 bp, Homo sapien
ccctttgcttcccatacatcttggg

SEQ ID NO: 2543691 - DNA, 25 bp, Homo sapien
atctcagagctgcaactgcatcctc

SEQ ID NO: 2543692 - DNA, 25 bp, Homo sapien
tggcaggaattatagccccaataac

SEQ ID NO: 2543693 - DNA, 25 bp, Homo sapien
cttagaagagggacatttgtggcag

SEQ ID NO: 2543694 - DNA, 25 bp, Homo sapien
ccaataactgtagttgatctcagag

SEQ ID NO: 2543695 - DNA, 25 bp, Homo sapien
gtggagaagtcgctgcatcctcaca

SEQ ID NO: 2543696 - DNA, 25 bp, Homo sapien
agcaatgatagggtccctgtggaga

SEQ ID NO: 2543697 - DNA, 25 bp, Homo sapien
gagagatgctgcgtctggagtctcc

SEQ ID NO: 2543698 - DNA, 25 bp, Homo sapien
cttggcattggagcaatgatagggt

SEQ ID NO: 2543699 - DNA, 25 bp, Homo sapien
ggtgatgaacttgctgtactgccag

SEQ ID NO: 2543700 - DNA, 25 bp, Homo sapien
gatgaacttgctgtactgccagtca

SEQ ID NO: 2543701 - DNA, 25 bp, Homo sapien
tgtactgccagtcatttgacagcat

SEQ ID NO: 2543702 - DNA, 25 bp, Homo sapien
tgatgaacttgctgtactgccagtc

SEQ ID NO: 2543703 - DNA, 25 bp, Homo sapien
ctatgctgcagtcttgctcaggaac

SEQ ID NO: 2543704 - DNA, 25 bp, Homo sapien
caggtcacttgaagcaatctcagag

SEQ ID NO: 2543705 - DNA, 25 bp, Homo sapien
gaagggctttgaatgtcctgctaag

SEQ ID NO: 2543706 - DNA, 25 bp, Homo sapien
gaacctgcagttgtaaccacaccac

SEQ ID NO: 2543707 - DNA, 25 bp, Homo sapien
catacgaagtagcttctggttccca

SEQ ID NO: 2543708 - DNA, 25 bp, Homo sapien
caaaccatacgaagtagcttctggt

SEQ ID NO: 2543709 - DNA, 25 bp, Homo sapien
cacagtcaaaccatacgaagtagct

SEQ ID NO: 2543710 - DNA, 25 bp, Homo sapien
ttctggttcccaggggcagattcag

SEQ ID NO: 2543711 - DNA, 25 bp, Homo sapien
acattaatcatgtttaagaatggaa

SEQ ID NO: 2543712 - DNA, 25 bp, Homo sapien
aagaatggaaagactcaagcagaat

SEQ ID NO: 2543713 - DNA, 25 bp, Homo sapien
agaatggaaagactcaagcagaatc

SEQ ID NO: 2543714 - DNA, 25 bp, Homo sapien
tttgtatatttcgtacattaatcat

SEQ ID NO: 2543715 - DNA, 25 bp, Homo sapien
tatagtatggtcataaaagagcatc

SEQ ID NO: 2543716 - DNA, 25 bp, Homo sapien
atagaaagccatcggtatttgcacc

SEQ ID NO: 2543717 - DNA, 25 bp, Homo sapien
cacacaggagacgtttcagggaaga

SEQ ID NO: 2543718 - DNA, 25 bp, Homo sapien
aatctgtggagatcctttgttcttc

SEQ ID NO: 2543719 - DNA, 25 bp, Homo sapien
tctccactaatttcaaagcggtctc

SEQ ID NO: 2543720 - DNA, 25 bp, Homo sapien
tgaagatcatccaagagcatttaac

SEQ ID NO: 2543721 - DNA, 25 bp, Homo sapien
taacctgaataagagacctgctgat

SEQ ID NO: 2543722 - DNA, 25 bp, Homo sapien
aattctgaggagtgaagatcatcca

SEQ ID NO: 2543723 - DNA, 25 bp, Homo sapien
ttcctgggcattttcacttgagttt

SEQ ID NO: 2543724 - DNA, 25 bp, Homo sapien
gctgattccctcaatgtctctgcag

SEQ ID NO: 2543725 - DNA, 25 bp, Homo sapien
cacatcttcattaagacagctgcct

SEQ ID NO: 2543726 - DNA, 25 bp, Homo sapien
gaacctcattgccagattcgctgat

SEQ ID NO: 2543727 - DNA, 25 bp, Homo sapien
tggaaaggaagagcgagattgattt

SEQ ID NO: 2543728 - DNA, 25 bp, Homo sapien
cagaggtctgagtctaggtcactga

SEQ ID NO: 2543729 - DNA, 25 bp, Homo sapien
caggtttgtatctcaccagagggac

SEQ ID NO: 2543730 - DNA, 25 bp, Homo sapien
ggtggctcttcgcaattcaggatgc

SEQ ID NO: 2543731 - DNA, 25 bp, Homo sapien
ctggatgaattccatttgcattagg

SEQ ID NO: 2543732 - DNA, 25 bp, Homo sapien
tatccattcgtgtaattgctgcaca

SEQ ID NO: 2543733 - DNA, 25 bp, Homo sapien
aaagcttatatcctgggaatgtggg

SEQ ID NO: 2543734 - DNA, 25 bp, Homo sapien
gggagactcttcatgacgttttcag

SEQ ID NO: 2543735 - DNA, 25 bp, Homo sapien
aggaagatgtttcagttcttcaccc

SEQ ID NO: 2543736 - DNA, 25 bp, Homo sapien
aagagtgggtaggtatgttatatag

SEQ ID NO: 2543737 - DNA, 25 bp, Homo sapien
gagaagatgatttccctgaccaaga

SEQ ID NO: 2543738 - DNA, 25 bp, Homo sapien
ctgggtaagacacttgggtataaag

SEQ ID NO: 2543739 - DNA, 25 bp, Homo sapien
tcaggaatcaggcttggcaagttag

SEQ ID NO: 2543740 - DNA, 25 bp, Homo sapien
gcggtttctgtacccaacagacaga

SEQ ID NO: 2543741 - DNA, 25 bp, Homo sapien
ttccattttattgtcctgaaaggcg

SEQ ID NO: 2543742 - DNA, 25 bp, Homo sapien
tattgtcctgaaaggcggtttctgt

SEQ ID NO: 2543743 - DNA, 25 bp, Homo sapien
tgaaaggcggtttctgtacccaaca

SEQ ID NO: 2543744 - DNA, 25 bp, Homo sapien
tttttcttcgggctgtgatataccc

SEQ ID NO: 2543745 - DNA, 25 bp, Homo sapien
cttccgaccagcttttccatgttta

SEQ ID NO: 2543746 - DNA, 25 bp, Homo sapien
ttccgaccagcttttccatgtttat

SEQ ID NO: 2543747 - DNA, 25 bp, Homo sapien
tcttcgggctgtgatatacccttga

SEQ ID NO: 2543748 - DNA, 25 bp, Homo sapien
tgagtagctcatagaggtcatctga

SEQ ID NO: 2543749 - DNA, 25 bp, Homo sapien
ctgatgcttcagagatctcacaggg

SEQ ID NO: 2543750 - DNA, 25 bp, Homo sapien
tactctccattgtttcatgccaaga

SEQ ID NO: 2543751 - DNA, 25 bp, Homo sapien
tgccaagagtcagaaatgagtagct

SEQ ID NO: 2543752 - DNA, 25 bp, Homo sapien
cctttactcagttcctctgaaacac

SEQ ID NO: 2543753 - DNA, 25 bp, Homo sapien
aaacagactgccgtttttccaaatg

SEQ ID NO: 2543754 - DNA, 25 bp, Homo sapien
acagactgccgtttttccaaatgcc

SEQ ID NO: 2543755 - DNA, 25 bp, Homo sapien
agactgccgtttttccaaatgccac

SEQ ID NO: 2543756 - DNA, 25 bp, Homo sapien
tgcctcctgcagatctcagtgggtg

SEQ ID NO: 2543757 - DNA, 25 bp, Homo sapien
tgctgagggttccaccggcttgggt

SEQ ID NO: 2543758 - DNA, 25 bp, Homo sapien
tccttgcaattgtaatgcctcctgc

SEQ ID NO: 2543759 - DNA, 25 bp, Homo sapien
ggagttaaggtgaaaatgatcctca

SEQ ID NO: 2543760 - DNA, 25 bp, Homo sapien
tttctcttaagatcaatgatctaac

SEQ ID NO: 2543761 - DNA, 25 bp, Homo sapien
ttttctcttaagatcaatgatctaa

SEQ ID NO: 2543762 - DNA, 25 bp, Homo sapien
ctgtgcgctgatccttgctgccctt

SEQ ID NO: 2543763 - DNA, 25 bp, Homo sapien
tgttaggagcgtgttactagatttc

SEQ ID NO: 2543764 - DNA, 25 bp, Homo sapien
ttttcctgtgcgctgatccttgctg

SEQ ID NO: 2543765 - DNA, 25 bp, Homo sapien
ttctgtgtgttaggagcgtgttact

SEQ ID NO: 2543766 - DNA, 25 bp, Homo sapien
gaggccaatagcagggaaacatgca

SEQ ID NO: 2543767 - DNA, 25 bp, Homo sapien
tgaaacaggcttgatgaatagatct

SEQ ID NO: 2543768 - DNA, 25 bp, Homo sapien
taatgtgttatcatcggcactgcca

SEQ ID NO: 2543769 - DNA, 25 bp, Homo sapien
agccgacgtaacaagccgggcagct

SEQ ID NO: 2543770 - DNA, 25 bp, Homo sapien
tgctactgatgataaagaatggctc

SEQ ID NO: 2543771 - DNA, 25 bp, Homo sapien
agcccacgtcccatctgtgttatga

SEQ ID NO: 2543772 - DNA, 25 bp, Homo sapien
gataagtggctttagttgtgcaagt

SEQ ID NO: 2543773 - DNA, 25 bp, Homo sapien
gggccgtttgtcatcggcaccagcc

SEQ ID NO: 2543774 - DNA, 25 bp, Homo sapien
cttacatggacaagaaagcatgtgc

SEQ ID NO: 2543775 - DNA, 25 bp, Homo sapien
acatcaccagaacagcgcgggaaag

SEQ ID NO: 2543776 - DNA, 25 bp, Homo sapien
aaaaccatgagttctcgcatgactt

SEQ ID NO: 2543777 - DNA, 25 bp, Homo sapien
gcaagtcttacatggacaagaaagc

SEQ ID NO: 2543778 - DNA, 25 bp, Homo sapien
gaccttcaaaggttgaaatcgggca

SEQ ID NO: 2543779 - DNA, 25 bp, Homo sapien
tgaaatgacaccgaccttcaaaggt

SEQ ID NO: 2543780 - DNA, 25 bp, Homo sapien
gccgctctgaaatgacaccgacctt

SEQ ID NO: 2543781 - DNA, 25 bp, Homo sapien
tgacaccgaccttcaaaggttgaaa

SEQ ID NO: 2543782 - DNA, 25 bp, Homo sapien
taaacatgcatgattggaaaactca

SEQ ID NO: 2543783 - DNA, 25 bp, Homo sapien
tattttacccatatgatctttgtca

SEQ ID NO: 2543784 - DNA, 25 bp, Homo sapien
ttgccctcagacaaacaagaaggtt

SEQ ID NO: 2543785 - DNA, 25 bp, Homo sapien
ttgtttgccttttagccatacaaaa

SEQ ID NO: 2543786 - DNA, 25 bp, Homo sapien
tagaaatatgatgtgagggagttca

SEQ ID NO: 2543787 - DNA, 25 bp, Homo sapien
gaaacaagaaagctaggccaattag

SEQ ID NO: 2543788 - DNA, 25 bp, Homo sapien
ctaggccaattaggtcctgcttggg

SEQ ID NO: 2543789 - DNA, 25 bp, Homo sapien
gaaagctaggccaattaggtcctgc

SEQ ID NO: 2543790 - DNA, 25 bp, Homo sapien
gcacgggtctctgctcatttgtgtt

SEQ ID NO: 2543791 - DNA, 25 bp, Homo sapien
caggctgactggagccaatacaccc

SEQ ID NO: 2543792 - DNA, 25 bp, Homo sapien
tgtgtttctgtgacactcacctgca

SEQ ID NO: 2543793 - DNA, 25 bp, Homo sapien
aaaacgttctcgagcagcacgggtc

SEQ ID NO: 2543794 - DNA, 25 bp, Homo sapien
caaacgtcaacgtctggtgatccaa

SEQ ID NO: 2543795 - DNA, 25 bp, Homo sapien
gacaaagcaacagtcagccttcagg

SEQ ID NO: 2543796 - DNA, 25 bp, Homo sapien
tcagggttactcactggagacaaag

SEQ ID NO: 2543797 - DNA, 25 bp, Homo sapien
tcaacatccattgcaccgggaacaa

SEQ ID NO: 2543798 - DNA, 25 bp, Homo sapien
accgagttgtgacgctcctgagcca

SEQ ID NO: 2543799 - DNA, 25 bp, Homo sapien
gctgccagcgcacgtggcataagag

SEQ ID NO: 2543800 - DNA, 25 bp, Homo sapien
ggtccaaaatcctagctaagcacac

SEQ ID NO: 2543801 - DNA, 25 bp, Homo sapien
tttcaggaagacacgtgtgggtcac

SEQ ID NO: 2543802 - DNA, 25 bp, Homo sapien
atgaaagatgctcccgtgcctccgc

SEQ ID NO: 2543803 - DNA, 25 bp, Homo sapien
gcagcaggacgttgatgttgatgaa

SEQ ID NO: 2543804 - DNA, 25 bp, Homo sapien
aggtgacacggacgctgctccctgg

SEQ ID NO: 2543805 - DNA, 25 bp, Homo sapien
gatgttgatgaagcagcaagcatgg

SEQ ID NO: 2543806 - DNA, 25 bp, Homo sapien
agactgcctgccgtgagtgtcttac

SEQ ID NO: 2543807 - DNA, 25 bp, Homo sapien
tcaagaatcctcagaggggaacttg

SEQ ID NO: 2543808 - DNA, 25 bp, Homo sapien
gacgatgatggtaacaaatagagac

SEQ ID NO: 2543809 - DNA, 25 bp, Homo sapien
ttggtcctcattaggatcatgagcc

SEQ ID NO: 2543810 - DNA, 25 bp, Homo sapien
gtagttcaatcaccggttgcaggtc

SEQ ID NO: 2543811 - DNA, 25 bp, Homo sapien
aactggtagttcaatcaccggttgc

SEQ ID NO: 2543812 - DNA, 25 bp, Homo sapien
ggtggccttcagaaactggtagttc

SEQ ID NO: 2543813 - DNA, 25 bp, Homo sapien
tcagaaactggtagttcaatcaccg

SEQ ID NO: 2543814 - DNA, 25 bp, Homo sapien
tgagtcaagcagcaaccctggtgca

SEQ ID NO: 2543815 - DNA, 25 bp, Homo sapien
ctgaaaccactgctgaacccacagg

SEQ ID NO: 2543816 - DNA, 25 bp, Homo sapien
cctggtgcagtagctacaaccgtat

SEQ ID NO: 2543817 - DNA, 25 bp, Homo sapien
agtgttttctctcgtagggttgtct

SEQ ID NO: 2543818 - DNA, 25 bp, Homo sapien
aaaaggtttgaacatcgttgcattc

SEQ ID NO: 2543819 - DNA, 25 bp, Homo sapien
ctggcaagcgtacaaatgtctccaa

SEQ ID NO: 2543820 - DNA, 25 bp, Homo sapien
cgttgcattcaattgtctctacaga

SEQ ID NO: 2543821 - DNA, 25 bp, Homo sapien
tacagaatgaataataccaactgcc

SEQ ID NO: 2543822 - DNA, 25 bp, Homo sapien
cctagatggagcagatacccaagtc

SEQ ID NO: 2543823 - DNA, 25 bp, Homo sapien
tcccctagatggagcagatacccaa

SEQ ID NO: 2543824 - DNA, 25 bp, Homo sapien
accaatgtcccctagatggagcaga

SEQ ID NO: 2543825 - DNA, 25 bp, Homo sapien
tagatggagcagatacccaagtctg

SEQ ID NO: 2543826 - DNA, 25 bp, Homo sapien
aacagctctcccgttcatgccttgg

SEQ ID NO: 2543827 - DNA, 25 bp, Homo sapien
tagcctgcattagcttgatccaagt

SEQ ID NO: 2543828 - DNA, 25 bp, Homo sapien
gaagaccaccttcgacctggctttc

SEQ ID NO: 2543829 - DNA, 25 bp, Homo sapien
cccgtggcatggacgtagcctgcat

SEQ ID NO: 2543830 - DNA, 25 bp, Homo sapien
gccagaggtcacaagtcaaactctc

SEQ ID NO: 2543831 - DNA, 25 bp, Homo sapien
ctcagcaagtctagtctatccacat

SEQ ID NO: 2543832 - DNA, 25 bp, Homo sapien
tggggaatatgtccaccttctgcct

SEQ ID NO: 2543833 - DNA, 25 bp, Homo sapien
gtctcttcatagtggaccatcaggg

SEQ ID NO: 2543834 - DNA, 25 bp, Homo sapien
agacagcccagtgaccgtggcccca

SEQ ID NO: 2543835 - DNA, 25 bp, Homo sapien
tcaggggaacatgagtagacagccc

SEQ ID NO: 2543836 - DNA, 25 bp, Homo sapien
tccaatgtttggcttctgttctaac

SEQ ID NO: 2543837 - DNA, 25 bp, Homo sapien
gagacaatttctgtctcgattctgc

SEQ ID NO: 2543838 - DNA, 25 bp, Homo sapien
aatttctgtctcgattctgccaggc

SEQ ID NO: 2543839 - DNA, 25 bp, Homo sapien
taacttcagaatgcaactcccctct

SEQ ID NO: 2543840 - DNA, 25 bp, Homo sapien
gctgcttttgggtagccgtgtgctc

SEQ ID NO: 2543841 - DNA, 25 bp, Homo sapien
gagctgagtctaagttccttctaag

SEQ ID NO: 2543842 - DNA, 25 bp, Homo sapien
gttctatgtcccttgcaccacttgg

SEQ ID NO: 2543843 - DNA, 25 bp, Homo sapien
ttggttcatggtagtgctcagtcac

SEQ ID NO: 2543844 - DNA, 25 bp, Homo sapien
tgatttggatctttgtcgcgagata

SEQ ID NO: 2543845 - DNA, 25 bp, Homo sapien
tgtttcatacatgcgatgttagcca

SEQ ID NO: 2543846 - DNA, 25 bp, Homo sapien
tcaagtcctgaccctctgatttgga

SEQ ID NO: 2543847 - DNA, 25 bp, Homo sapien
ctttgtcgcgagatatgtttcatac

SEQ ID NO: 2543848 - DNA, 25 bp, Homo sapien
tgaccattttcttcacgggaaaaca

SEQ ID NO: 2543849 - DNA, 25 bp, Homo sapien
tttcatatccaacactcactcactt

SEQ ID NO: 2543850 - DNA, 25 bp, Homo sapien
acttggacacagattgggaggagaa

SEQ ID NO: 2543851 - DNA, 25 bp, Homo sapien
agattacagggaaaagtgaccattt

SEQ ID NO: 2543852 - DNA, 25 bp, Homo sapien
cgagtcaaggttccatgggccaatt

SEQ ID NO: 2543853 - DNA, 25 bp, Homo sapien
tcgagttactcgagtcaaggttcca

SEQ ID NO: 2543854 - DNA, 25 bp, Homo sapien
gagattttggatttcgagttactcg

SEQ ID NO: 2543855 - DNA, 25 bp, Homo sapien
catgggccaattgcagaggctctgt

SEQ ID NO: 2543856 - DNA, 25 bp, Homo sapien
actttcaaggtgacctttagcatca

SEQ ID NO: 2543857 - DNA, 25 bp, Homo sapien
tcaactttcaaggtgacctttagca

SEQ ID NO: 2543858 - DNA, 25 bp, Homo sapien
aagtatttctcaattgtgtagctca

SEQ ID NO: 2543859 - DNA, 25 bp, Homo sapien
tttcaaggtgacctttagcatcaac

SEQ ID NO: 2543860 - DNA, 25 bp, Homo sapien
gcaaaacttctaagcaccctgcaga

SEQ ID NO: 2543861 - DNA, 25 bp, Homo sapien
gagctcaggtcaaggtgcactatat

SEQ ID NO: 2543862 - DNA, 25 bp, Homo sapien
ctaaaggtcgtcaggaacccaggct

SEQ ID NO: 2543863 - DNA, 25 bp, Homo sapien
ggtgcatgacgggacattttcagca

SEQ ID NO: 2543864 - DNA, 25 bp, Homo sapien
ggaagccaaggcaggcggaccacct

SEQ ID NO: 2543865 - DNA, 25 bp, Homo sapien
cagtctctactaaaaatacaaaaat

SEQ ID NO: 2543866 - DNA, 25 bp, Homo sapien
gccaatatggtaaaacccagtctct

SEQ ID NO: 2543867 - DNA, 25 bp, Homo sapien
aggtcaggagttcgagaccagtctg

SEQ ID NO: 2543868 - DNA, 25 bp, Homo sapien
tcactgggtgtcataaatgaaatgt

SEQ ID NO: 2543869 - DNA, 25 bp, Homo sapien
aatcactgggtgtcataaatgaaat

SEQ ID NO: 2543870 - DNA, 25 bp, Homo sapien
cactgggtgtcataaatgaaatgtg

SEQ ID NO: 2543871 - DNA, 25 bp, Homo sapien
ttaatcactgggtgtcataaatgaa

SEQ ID NO: 2543872 - DNA, 25 bp, Homo sapien
gttttcttggacagcgtcgggccca

SEQ ID NO: 2543873 - DNA, 25 bp, Homo sapien
catacactctgaggggagcctgagt

SEQ ID NO: 2543874 - DNA, 25 bp, Homo sapien
gaatccagcacaatttccctggctg

SEQ ID NO: 2543875 - DNA, 25 bp, Homo sapien
tgagggttggcagtcgtgggttttc

SEQ ID NO: 2543876 - DNA, 25 bp, Homo sapien
gggatgctaaatgtctttacgagcc

SEQ ID NO: 2543877 - DNA, 25 bp, Homo sapien
ctaccgtgaaaagatgcgagtgcaa

SEQ ID NO: 2543878 - DNA, 25 bp, Homo sapien
ttcagggtcaaaagagtcagtgttc

SEQ ID NO: 2543879 - DNA, 25 bp, Homo sapien
tctttacgagcctaggaaacctgtg

SEQ ID NO: 2543880 - DNA, 25 bp, Homo sapien
tgtgctcctggtctgtacactgcat

SEQ ID NO: 2543881 - DNA, 25 bp, Homo sapien
tctcccacggaattcagtccggagc

SEQ ID NO: 2543882 - DNA, 25 bp, Homo sapien
gccagtgtgctcctggtctgtacac

SEQ ID NO: 2543883 - DNA, 25 bp, Homo sapien
cacaggccagctgtttattgttact

SEQ ID NO: 2543884 - DNA, 25 bp, Homo sapien
ctcatctttcttgatacgtggttgg

SEQ ID NO: 2543885 - DNA, 25 bp, Homo sapien
ggcatcattgtgtgcatctgtttct

SEQ ID NO: 2543886 - DNA, 25 bp, Homo sapien
ttcttgatacgtggttggaacctga

SEQ ID NO: 2543887 - DNA, 25 bp, Homo sapien
cctgagtttggcatcattgtgtgca

SEQ ID NO: 2543888 - DNA, 25 bp, Homo sapien
tgggaacgggggagtgcagactgtg

SEQ ID NO: 2543889 - DNA, 25 bp, Homo sapien
ctgggaacgggggagtgcagactgt

SEQ ID NO: 2543890 - DNA, 25 bp, Homo sapien
ggactcacaagccctgtgtccactg

SEQ ID NO: 2543891 - DNA, 25 bp, Homo sapien
gggcagtccatcgtatatgatctca

SEQ ID NO: 2543892 - DNA, 25 bp, Homo sapien
gggacctgtcaaatccagggcagta

SEQ ID NO: 2543893 - DNA, 25 bp, Homo sapien
ctgtctgatcctcagggcagtccat

SEQ ID NO: 2543894 - DNA, 25 bp, Homo sapien
tccgcaattcatgaaattaggagca

SEQ ID NO: 2543895 - DNA, 25 bp, Homo sapien
tatttttgtttgtctccgcaattca

SEQ ID NO: 2543896 - DNA, 25 bp, Homo sapien
tcttattgggaaacgcctgaaacat

SEQ ID NO: 2543897 - DNA, 25 bp, Homo sapien
tttgggctgcgatttggctgtatgc

SEQ ID NO: 2543898 - DNA, 25 bp, Homo sapien
gacgggacaggtctgcttgaccctg

SEQ ID NO: 2543899 - DNA, 25 bp, Homo sapien
tgcttgaccctggagtattctagtt

SEQ ID NO: 2543900 - DNA, 25 bp, Homo sapien
catcacagccttggacgggacaggt

SEQ ID NO: 2543901 - DNA, 25 bp, Homo sapien
accctggagtattctagttcccttg

SEQ ID NO: 2543902 - DNA, 25 bp, Homo sapien
taacaagaagtcaagtaggaatggc

SEQ ID NO: 2543903 - DNA, 25 bp, Homo sapien
ttgtcctcacaagggctgcaaatgg

SEQ ID NO: 2543904 - DNA, 25 bp, Homo sapien
gcaaatggctgtagcaatcccaagt

SEQ ID NO: 2543905 - DNA, 25 bp, Homo sapien
tctcattcagacgtaatagcaggca

SEQ ID NO: 2543906 - DNA, 25 bp, Homo sapien
gtcacgtgaccaccactcatgctcc

SEQ ID NO: 2543907 - DNA, 25 bp, Homo sapien
ggggcagctgtcctcaaactgctcc

SEQ ID NO: 2543908 - DNA, 25 bp, Homo sapien
aaactgctccacgccatagacctgt

SEQ ID NO: 2543909 - DNA, 25 bp, Homo sapien
gctccaactcattaccatgctcagg

SEQ ID NO: 2543910 - DNA, 25 bp, Homo sapien
tgaaaggccattttcctgaacatgt

SEQ ID NO: 2543911 - DNA, 25 bp, Homo sapien
ctgaaaggccattttcctgaacatg

SEQ ID NO: 2543912 - DNA, 25 bp, Homo sapien
gctgagctttttgcataaaatgttg

SEQ ID NO: 2543913 - DNA, 25 bp, Homo sapien
cttcaaatgtgaaccatgcaaaaga

SEQ ID NO: 2543914 - DNA, 25 bp, Homo sapien
gctcaagagcgcaacctctttgctg

SEQ ID NO: 2543915 - DNA, 25 bp, Homo sapien
ttacagggatgtaataatacttcgg

SEQ ID NO: 2543916 - DNA, 25 bp, Homo sapien
ggtgaagatggctgtttcggtgcat

SEQ ID NO: 2543917 - DNA, 25 bp, Homo sapien
tccagccatgttcacgaggagaagc

SEQ ID NO: 2543918 - DNA, 25 bp, Homo sapien
gggcttcccagtacttcctccagcc

SEQ ID NO: 2543919 - DNA, 25 bp, Homo sapien
ttcacgaggagaagctggtgaagat

SEQ ID NO: 2543920 - DNA, 25 bp, Homo sapien
tccacttgtaacttgatagtgttct

SEQ ID NO: 2543921 - DNA, 25 bp, Homo sapien
catcgtgccgtaggatcattggctt

SEQ ID NO: 2543922 - DNA, 25 bp, Homo sapien
cttgatagtgttcttctcctctgac

SEQ ID NO: 2543923 - DNA, 25 bp, Homo sapien
gggaaatatcctgtggctcttattc

SEQ ID NO: 2543924 - DNA, 25 bp, Homo sapien
aattcccacggccaccatccctgcc

SEQ ID NO: 2543925 - DNA, 25 bp, Homo sapien
attcccacggccaccatccctgcca

SEQ ID NO: 2543926 - DNA, 25 bp, Homo sapien
cctctcgatggctacattaattccc

SEQ ID NO: 2543927 - DNA, 25 bp, Homo sapien
tctccctctcgatggctacattaat

SEQ ID NO: 2543928 - DNA, 25 bp, Homo sapien
cacaacattgcctgtagccaacaca

SEQ ID NO: 2543929 - DNA, 25 bp, Homo sapien
cgtgcactgtcaccgtgtgttttgt

SEQ ID NO: 2543930 - DNA, 25 bp, Homo sapien
tcaaggtgtgtaagtcatggtaagt

SEQ ID NO: 2543931 - DNA, 25 bp, Homo sapien
agtcctggtcacgtgcactgtcacc

SEQ ID NO: 2543932 - DNA, 25 bp, Homo sapien
aatgtacactcctctgtctggctgc

SEQ ID NO: 2543933 - DNA, 25 bp, Homo sapien
ggctgcaggtctcctcatgaaccag

SEQ ID NO: 2543934 - DNA, 25 bp, Homo sapien
tgtatcatagccctccacccttaga

SEQ ID NO: 2543935 - DNA, 25 bp, Homo sapien
gccctccacccttagaatgaaatgt

SEQ ID NO: 2543936 - DNA, 25 bp, Homo sapien
ttaccataatgagacagcagaccca

SEQ ID NO: 2543937 - DNA, 25 bp, Homo sapien
tgaggatgctctcggtaatggacaa

SEQ ID NO: 2543938 - DNA, 25 bp, Homo sapien
gcactgatccttcggccttgaaaaa

SEQ ID NO: 2543939 - DNA, 25 bp, Homo sapien
tcaaagagtatgtctgagggtttcc

SEQ ID NO: 2543940 - DNA, 25 bp, Homo sapien
ggatttcgcagatgacagtggccaa

SEQ ID NO: 2543941 - DNA, 25 bp, Homo sapien
gagaaagttgtaactggatttcgca

SEQ ID NO: 2543942 - DNA, 25 bp, Homo sapien
gaatacggttcatgaagccctcata

SEQ ID NO: 2543943 - DNA, 25 bp, Homo sapien
aaagtagggtggaatacggttcatg

SEQ ID NO: 2543944 - DNA, 25 bp, Homo sapien
gaaaatctcttttactgcaaatccg

SEQ ID NO: 2543945 - DNA, 25 bp, Homo sapien
tgcgcaaataaagaccacaacactg

SEQ ID NO: 2543946 - DNA, 25 bp, Homo sapien
gagaccatccatcaccgcagtgtga

SEQ ID NO: 2543947 - DNA, 25 bp, Homo sapien
tcatccaaggctcataagcaggagc

SEQ ID NO: 2543948 - DNA, 25 bp, Homo sapien
ctaacacatcctgtttttgtcagca

SEQ ID NO: 2543949 - DNA, 25 bp, Homo sapien
gctcaaatgaaatccccgatctaac

SEQ ID NO: 2543950 - DNA, 25 bp, Homo sapien
cttgtgagtactgggagaggcactc

SEQ ID NO: 2543951 - DNA, 25 bp, Homo sapien
tctataatccgtccctttttccagc

SEQ ID NO: 2543952 - DNA, 25 bp, Homo sapien
gggtcacactgagcatggccgcagc

SEQ ID NO: 2543953 - DNA, 25 bp, Homo sapien
agcatggccgcagcagacacgtcct

SEQ ID NO: 2543954 - DNA, 25 bp, Homo sapien
gcagcagacacgtcctcaccctctt

SEQ ID NO: 2543955 - DNA, 25 bp, Homo sapien
cacactgagcatggccgcagcagac

SEQ ID NO: 2543956 - DNA, 25 bp, Homo sapien
cacgaaccctgcatattcagtcaag

SEQ ID NO: 2543957 - DNA, 25 bp, Homo sapien
taaagccagttaatagcacaaattc

SEQ ID NO: 2543958 - DNA, 25 bp, Homo sapien
tctccaggcaggtggaaaccttaag

SEQ ID NO: 2543959 - DNA, 25 bp, Homo sapien
cagtcaagtttagatcatgcagtaa

SEQ ID NO: 2543960 - DNA, 25 bp, Homo sapien
ggaggcttttctcagtagcgtcttt

SEQ ID NO: 2543961 - DNA, 25 bp, Homo sapien
ttttctcagtagcgtctttctttac

SEQ ID NO: 2543962 - DNA, 25 bp, Homo sapien
tacaggaggcttttctcagtagcgt

SEQ ID NO: 2543963 - DNA, 25 bp, Homo sapien
ggcttttctcagtagcgtctttctt

SEQ ID NO: 2543964 - DNA, 25 bp, Homo sapien
tgagcaggtgaactgcaggacgtgg

SEQ ID NO: 2543965 - DNA, 25 bp, Homo sapien
agcaggtgaactgcaggacgtggca

SEQ ID NO: 2543966 - DNA, 25 bp, Homo sapien
ctgagcaggtgaactgcaggacgtg

SEQ ID NO: 2543967 - DNA, 25 bp, Homo sapien
gcaggtgaactgcaggacgtggcac

SEQ ID NO: 2543968 - DNA, 25 bp, Homo sapien
agagggcacaatcttgctgaagctc

SEQ ID NO: 2543969 - DNA, 25 bp, Homo sapien
ttgctgaagctcaggaaacccatca

SEQ ID NO: 2543970 - DNA, 25 bp, Homo sapien
aagagggcacaatcttgctgaagct

SEQ ID NO: 2543971 - DNA, 25 bp, Homo sapien
cttgctgaagctcaggaaacccatc

SEQ ID NO: 2543972 - DNA, 25 bp, Homo sapien
gcctgcccacaaggagactgtggca

SEQ ID NO: 2543973 - DNA, 25 bp, Homo sapien
agtggccggtctggatccctccttc

SEQ ID NO: 2543974 - DNA, 25 bp, Homo sapien
cccctggatcccatcagcgacaggg

SEQ ID NO: 2543975 - DNA, 25 bp, Homo sapien
tcccatcagcgacagggtctgtgct

SEQ ID NO: 2543976 - DNA, 25 bp, Homo sapien
agtcctgttcgtccccacgcagcac

SEQ ID NO: 2543977 - DNA, 25 bp, Homo sapien
tcccctctgagctacgcagctgcat

SEQ ID NO: 2543978 - DNA, 25 bp, Homo sapien
tccaggctcaccagtcctgttcgtc

SEQ ID NO: 2543979 - DNA, 25 bp, Homo sapien
cacagaggccggtgtgcacggtccc

SEQ ID NO: 2543980 - DNA, 25 bp, Homo sapien
cttcgacgggccgaaattggtggct

SEQ ID NO: 2543981 - DNA, 25 bp, Homo sapien
gggccgaaattggtggctgaacaaa

SEQ ID NO: 2543982 - DNA, 25 bp, Homo sapien
ctgggattttctcttcgacgggccg

SEQ ID NO: 2543983 - DNA, 25 bp, Homo sapien
ccaagcaaattgggagccaccatct

SEQ ID NO: 2543984 - DNA, 25 bp, Homo sapien
ggagtggttgttctcaccacttcac

SEQ ID NO: 2543985 - DNA, 25 bp, Homo sapien
gagtggttgttctcaccacttcact

SEQ ID NO: 2543986 - DNA, 25 bp, Homo sapien
tggttgttctcaccacttcactcac

SEQ ID NO: 2543987 - DNA, 25 bp, Homo sapien
ctggagtggttgttctcaccacttc

SEQ ID NO: 2543988 - DNA, 25 bp, Homo sapien
caagtccacaccctccaatccgcct

SEQ ID NO: 2543989 - DNA, 25 bp, Homo sapien
tgtccacgggaggggcctccaagtc

SEQ ID NO: 2543990 - DNA, 25 bp, Homo sapien
tccacaccctccaatccgcctgctt

SEQ ID NO: 2543991 - DNA, 25 bp, Homo sapien
aagtccacaccctccaatccgcctg

SEQ ID NO: 2543992 - DNA, 25 bp, Homo sapien
ggctaactcctatgactcggctttg

SEQ ID NO: 2543993 - DNA, 25 bp, Homo sapien
aatatgttgagtttcaagggcatgg

SEQ ID NO: 2543994 - DNA, 25 bp, Homo sapien
tgactcggctttgcgtgatcagcat

SEQ ID NO: 2543995 - DNA, 25 bp, Homo sapien
tagagtagcttttcccgtggctaac

SEQ ID NO: 2543996 - DNA, 25 bp, Homo sapien
tgctgacatggagatgtgggactct

SEQ ID NO: 2543997 - DNA, 25 bp, Homo sapien
cccaggagtgctatgggctggaaaa

SEQ ID NO: 2543998 - DNA, 25 bp, Homo sapien
agacaccgaccctcagaaaagaagg

SEQ ID NO: 2543999 - DNA, 25 bp, Homo sapien
ggagatgtgggactctaacttccag

SEQ ID NO: 2544000 - DNA, 25 bp, Homo sapien
ggtgatgaaatctgggatggttaac

SEQ ID NO: 2544001 - DNA, 25 bp, Homo sapien
gaaatctgggatggttaactttagc

SEQ ID NO: 2544002 - DNA, 25 bp, Homo sapien
gcctcagtaaattgtcttctctccc

SEQ ID NO: 2544003 - DNA, 25 bp, Homo sapien
ggatggttaactttagcctcagtaa

SEQ ID NO: 2544004 - DNA, 25 bp, Homo sapien
gagccgatggctgaaagatttggat

SEQ ID NO: 2544005 - DNA, 25 bp, Homo sapien
tcactaggggatgcctgttcatgcc

SEQ ID NO: 2544006 - DNA, 25 bp, Homo sapien
gaggcatatccaggagccgatggct

SEQ ID NO: 2544007 - DNA, 25 bp, Homo sapien
tcagagcagccgtggaggcatatcc

SEQ ID NO: 2544008 - DNA, 25 bp, Homo sapien
acagggagggacgacgaccacaggc

SEQ ID NO: 2544009 - DNA, 25 bp, Homo sapien
agggagggacgacgaccacaggcac

SEQ ID NO: 2544010 - DNA, 25 bp, Homo sapien
gcgacagggagggacgacgaccaca

SEQ ID NO: 2544011 - DNA, 25 bp, Homo sapien
gcaggcgacagggagggacgacgac

SEQ ID NO: 2544012 - DNA, 25 bp, Homo sapien
gtgacccaaaatcaacctgaagttc

SEQ ID NO: 2544013 - DNA, 25 bp, Homo sapien
gactcctcgattttctggccccatg

SEQ ID NO: 2544014 - DNA, 25 bp, Homo sapien
tcctggaaattcacctgcagagggt

SEQ ID NO: 2544015 - DNA, 25 bp, Homo sapien
acctgcagagggtcaacagctgccc

SEQ ID NO: 2544016 - DNA, 25 bp, Homo sapien
gaaggtgtgatggttggggctgcag

SEQ ID NO: 2544017 - DNA, 25 bp, Homo sapien
cagcagctgtattgcaaccatgaag

SEQ ID NO: 2544018 - DNA, 25 bp, Homo sapien
gagtgccgcgcatgactgtcacgtt

SEQ ID NO: 2544019 - DNA, 25 bp, Homo sapien
tgttggagaatggaaagcgcttttc

SEQ ID NO: 2544020 - DNA, 25 bp, Homo sapien
tctgttcttggcacgggacgcttct

SEQ ID NO: 2544021 - DNA, 25 bp, Homo sapien
gcttcctgcagcgtccataacattt

SEQ ID NO: 2544022 - DNA, 25 bp, Homo sapien
accctggtgcacattgggagtgacg

SEQ ID NO: 2544023 - DNA, 25 bp, Homo sapien
gacagcaccctggtgcacattggga

SEQ ID NO: 2544024 - DNA, 25 bp, Homo sapien
aggacagcaccctggtgcacattgg

SEQ ID NO: 2544025 - DNA, 25 bp, Homo sapien
gggagtgacggtgcatggtaatgaa

SEQ ID NO: 2544026 - DNA, 25 bp, Homo sapien
tgttgggcaaattctgagcaggtcc

SEQ ID NO: 2544027 - DNA, 25 bp, Homo sapien
gagaatttagcgtaggccagttgga

SEQ ID NO: 2544028 - DNA, 25 bp, Homo sapien
tatgttcttccaggcgtcgtgtcag

SEQ ID NO: 2544029 - DNA, 25 bp, Homo sapien
gccagttggaattagcagacctcag

SEQ ID NO: 2544030 - DNA, 25 bp, Homo sapien
tgggtgaggaagactcctcgacgac

SEQ ID NO: 2544031 - DNA, 25 bp, Homo sapien
tccttccaacactccctctgaaaag

SEQ ID NO: 2544032 - DNA, 25 bp, Homo sapien
gaaaagccttcctgacgggagcctg

SEQ ID NO: 2544033 - DNA, 25 bp, Homo sapien
tgaggaagactcctcgacgactcct

SEQ ID NO: 2544034 - DNA, 25 bp, Homo sapien
tcccagaatcatgtaaaatgctgac

SEQ ID NO: 2544035 - DNA, 25 bp, Homo sapien
ctcccagaatcatgtaaaatgctga

SEQ ID NO: 2544036 - DNA, 25 bp, Homo sapien
ccctcccagaatcatgtaaaatgct

SEQ ID NO: 2544037 - DNA, 25 bp, Homo sapien
cctcccagaatcatgtaaaatgctg

SEQ ID NO: 2544038 - DNA, 25 bp, Homo sapien
gcatttgcttctaaagtggaaaccc

SEQ ID NO: 2544039 - DNA, 25 bp, Homo sapien
gaggtcactgtgagatacatcagag

SEQ ID NO: 2544040 - DNA, 25 bp, Homo sapien
gccagggcaatgttgaaggcaggca

SEQ ID NO: 2544041 - DNA, 25 bp, Homo sapien
aggaatgaagtgtccctgaggtcac

SEQ ID NO: 2544042 - DNA, 25 bp, Homo sapien
tagtctaagccattccatcacactg

SEQ ID NO: 2544043 - DNA, 25 bp, Homo sapien
tccgaataagctgcagtcttttccc

SEQ ID NO: 2544044 - DNA, 25 bp, Homo sapien
ggaacatggcactatctcctcgcct

SEQ ID NO: 2544045 - DNA, 25 bp, Homo sapien
tcctcgcctctgaatatgaatgcga

SEQ ID NO: 2544046 - DNA, 25 bp, Homo sapien
gaggccctcagaggcactggcgtct

SEQ ID NO: 2544047 - DNA, 25 bp, Homo sapien
tctgcaagctctgtcagaaaaagga

SEQ ID NO: 2544048 - DNA, 25 bp, Homo sapien
tctgtgaccatccatttcatgtctg

SEQ ID NO: 2544049 - DNA, 25 bp, Homo sapien
agcacgcagaacagctccctgcaga

SEQ ID NO: 2544050 - DNA, 25 bp, Homo sapien
tgaattaatgaggaagttccttcct

SEQ ID NO: 2544051 - DNA, 25 bp, Homo sapien
taatgaggaagttccttcctctccc

SEQ ID NO: 2544052 - DNA, 25 bp, Homo sapien
aattaatgaggaagttccttcctct

SEQ ID NO: 2544053 - DNA, 25 bp, Homo sapien
ttaatgaggaagttccttcctctcc

SEQ ID NO: 2544054 - DNA, 25 bp, Homo sapien
ctcataacagtgtacgtctttctct

SEQ ID NO: 2544055 - DNA, 25 bp, Homo sapien
tagcaaccactagatcatatacaca

SEQ ID NO: 2544056 - DNA, 25 bp, Homo sapien
gatcatatacacagggagtgcaggg

SEQ ID NO: 2544057 - DNA, 25 bp, Homo sapien
tgcagtctgcagcagtaatttccgg

SEQ ID NO: 2544058 - DNA, 25 bp, Homo sapien
cttcagctgcctgtaaggttggtgg

SEQ ID NO: 2544059 - DNA, 25 bp, Homo sapien
cctgctaattaacctgttagcaaac

SEQ ID NO: 2544060 - DNA, 25 bp, Homo sapien
gccctgctcctcggtttgctaaggg

SEQ ID NO: 2544061 - DNA, 25 bp, Homo sapien
ggtacgtgtcctgctaattaacctg

SEQ ID NO: 2544062 - DNA, 25 bp, Homo sapien
acaggatgtttcatcgcaggctgca

SEQ ID NO: 2544063 - DNA, 25 bp, Homo sapien
tgggagaaacaggatgtttcatcgc

SEQ ID NO: 2544064 - DNA, 25 bp, Homo sapien
gtcctgttatttggcccagagtgag

SEQ ID NO: 2544065 - DNA, 25 bp, Homo sapien
catcgcaggctgcaatcagtcctgt

SEQ ID NO: 2544066 - DNA, 25 bp, Homo sapien
cggtgccgtattcccacagggctgg

SEQ ID NO: 2544067 - DNA, 25 bp, Homo sapien
ttcgtcatcatcgacatcatcgtca

SEQ ID NO: 2544068 - DNA, 25 bp, Homo sapien
accagcagggtacacgttatttgac

SEQ ID NO: 2544069 - DNA, 25 bp, Homo sapien
ccacaggcagatgcggtgccgtatt

SEQ ID NO: 2544070 - DNA, 25 bp, Homo sapien
aggatgacacggcagttaggagctt

SEQ ID NO: 2544071 - DNA, 25 bp, Homo sapien
cacggcagttaggagcttctctggg

SEQ ID NO: 2544072 - DNA, 25 bp, Homo sapien
gaaaggcaggatgacacggcagtta

SEQ ID NO: 2544073 - DNA, 25 bp, Homo sapien
tgacacggcagttaggagcttctct

SEQ ID NO: 2544074 - DNA, 25 bp, Homo sapien
tcacatccaccctctgcgaaggcat

SEQ ID NO: 2544075 - DNA, 25 bp, Homo sapien
catccaccctctgcgaaggcataaa

SEQ ID NO: 2544076 - DNA, 25 bp, Homo sapien
accctctgcgaaggcataaatagta

SEQ ID NO: 2544077 - DNA, 25 bp, Homo sapien
tccaccctctgcgaaggcataaata

SEQ ID NO: 2544078 - DNA, 25 bp, Homo sapien
tgctacccctaggtgaatgttccgg

SEQ ID NO: 2544079 - DNA, 25 bp, Homo sapien
gattctccccagctaacaagggcca

SEQ ID NO: 2544080 - DNA, 25 bp, Homo sapien
gacattagtgtctccggttccaacc

SEQ ID NO: 2544081 - DNA, 25 bp, Homo sapien
tcgggtagacccttgagtcatcaga

SEQ ID NO: 2544082 - DNA, 25 bp, Homo sapien
ttctcagcacaatagacagctctcc

SEQ ID NO: 2544083 - DNA, 25 bp, Homo sapien
tcagcacaatagacagctctccggt

SEQ ID NO: 2544084 - DNA, 25 bp, Homo sapien
tacagggcagccatgcatttggaca

SEQ ID NO: 2544085 - DNA, 25 bp, Homo sapien
gacagctctccggttacagggcagc

SEQ ID NO: 2544086 - DNA, 25 bp, Homo sapien
gtccctggacagcacttccagtaag

SEQ ID NO: 2544087 - DNA, 25 bp, Homo sapien
gtaagtccagactgccaaattccac

SEQ ID NO: 2544088 - DNA, 25 bp, Homo sapien
ggtatgttcctacacctacatagac

SEQ ID NO: 2544089 - DNA, 25 bp, Homo sapien
tcccatccatccaggtatgttccta

SEQ ID NO: 2544090 - DNA, 25 bp, Homo sapien
tctggtgtccagttggccagtggcc

SEQ ID NO: 2544091 - DNA, 25 bp, Homo sapien
tgtgtgaacaacctctaacaatgtt

SEQ ID NO: 2544092 - DNA, 25 bp, Homo sapien
gtaaagatcggatttcacagagaga

SEQ ID NO: 2544093 - DNA, 25 bp, Homo sapien
cgcgttttgtgctatttccccagga

SEQ ID NO: 2544094 - DNA, 25 bp, Homo sapien
tgcccaagagtagcagccatgatag

SEQ ID NO: 2544095 - DNA, 25 bp, Homo sapien
tatctctgattggaccctgtggacc

SEQ ID NO: 2544096 - DNA, 25 bp, Homo sapien
gacccgagggttcgtctgttctgct

SEQ ID NO: 2544097 - DNA, 25 bp, Homo sapien
tgtggacctaggacagagtgcccaa

SEQ ID NO: 2544098 - DNA, 25 bp, Homo sapien
aagaaaggagcatacatgacatcaa

SEQ ID NO: 2544099 - DNA, 25 bp, Homo sapien
gattttcgcatctcaggaaagaaag

SEQ ID NO: 2544100 - DNA, 25 bp, Homo sapien
ctcagaccacttttgtgaagatgtt

SEQ ID NO: 2544101 - DNA, 25 bp, Homo sapien
acatgacatcaacagccctcagacc

SEQ ID NO: 2544102 - DNA, 25 bp, Homo sapien
tgctgttaccgagtctgcaggaatt

SEQ ID NO: 2544103 - DNA, 25 bp, Homo sapien
ctgctgttaccgagtctgcaggaat

SEQ ID NO: 2544104 - DNA, 25 bp, Homo sapien
tctgctgttaccgagtctgcaggaa

SEQ ID NO: 2544105 - DNA, 25 bp, Homo sapien
tcctctctgctgttaccgagtctgc

SEQ ID NO: 2544106 - DNA, 25 bp, Homo sapien
cttcctgtgacttataagactctgg

SEQ ID NO: 2544107 - DNA, 25 bp, Homo sapien
tgtgacttataagactctggggttt

SEQ ID NO: 2544108 - DNA, 25 bp, Homo sapien
aaatttgggatgctggcaccaccac

SEQ ID NO: 2544109 - DNA, 25 bp, Homo sapien
cccaaatttgggatgctggcaccac

SEQ ID NO: 2544110 - DNA, 25 bp, Homo sapien
cttccaccagctggagttcagactc

SEQ ID NO: 2544111 - DNA, 25 bp, Homo sapien
ttccaccagctggagttcagactcc

SEQ ID NO: 2544112 - DNA, 25 bp, Homo sapien
ccaccagctggagttcagactccat

SEQ ID NO: 2544113 - DNA, 25 bp, Homo sapien
tccaccagctggagttcagactcca

SEQ ID NO: 2544114 - DNA, 25 bp, Homo sapien
gaagataatgaggttggtgaaggaa

SEQ ID NO: 2544115 - DNA, 25 bp, Homo sapien
gaggttggtgaaggaagttaagctc

SEQ ID NO: 2544116 - DNA, 25 bp, Homo sapien
tcaaggtggtgacccagtaatgaga

SEQ ID NO: 2544117 - DNA, 25 bp, Homo sapien
gtgacccagtaatgagatcaggaag

SEQ ID NO: 2544118 - DNA, 25 bp, Homo sapien
gtttcattgagattaaaggcagcgt

SEQ ID NO: 2544119 - DNA, 25 bp, Homo sapien
cagtggtttcattgagattaaaggc

SEQ ID NO: 2544120 - DNA, 25 bp, Homo sapien
cattgagattaaaggcagcgtccat

SEQ ID NO: 2544121 - DNA, 25 bp, Homo sapien
tctgagcagtggtttcattgagatt

SEQ ID NO: 2544122 - DNA, 25 bp, Homo sapien
tccgcgtcgatgtgggctgacatac

SEQ ID NO: 2544123 - DNA, 25 bp, Homo sapien
gacaatctgttggtttccagctgtg

SEQ ID NO: 2544124 - DNA, 25 bp, Homo sapien
gaatgactggaacagggcagaatcc

SEQ ID NO: 2544125 - DNA, 25 bp, Homo sapien
taagcattgcctttggacagagatc

SEQ ID NO: 2544126 - DNA, 25 bp, Homo sapien
gtttccacagtagagttaatctcac

SEQ ID NO: 2544127 - DNA, 25 bp, Homo sapien
tccacagtagagttaatctcactca

SEQ ID NO: 2544128 - DNA, 25 bp, Homo sapien
tggtttccacagtagagttaatctc

SEQ ID NO: 2544129 - DNA, 25 bp, Homo sapien
tcctggtttccacagtagagttaat

SEQ ID NO: 2544130 - DNA, 25 bp, Homo sapien
taaatcgagtccttgcaatctgaag

SEQ ID NO: 2544131 - DNA, 25 bp, Homo sapien
tgataagcatcttgcctctgcagac

SEQ ID NO: 2544132 - DNA, 25 bp, Homo sapien
ggtctccttgaatctcggcctgtag

SEQ ID NO: 2544133 - DNA, 25 bp, Homo sapien
tccgagtgggtgatgagcgataaac

SEQ ID NO: 2544134 - DNA, 25 bp, Homo sapien
ccttggatggccctgattaaagaga

SEQ ID NO: 2544135 - DNA, 25 bp, Homo sapien
cacagttttgctgtaagctccagca

SEQ ID NO: 2544136 - DNA, 25 bp, Homo sapien
cctgattccaggtgcttagcctctg

SEQ ID NO: 2544137 - DNA, 25 bp, Homo sapien
cagtgcactgagaagcatggacctc

SEQ ID NO: 2544138 - DNA, 25 bp, Homo sapien
ggcataagatgaaatggcagcgaaa

SEQ ID NO: 2544139 - DNA, 25 bp, Homo sapien
tgttaccatatgaactgggttctcc

SEQ ID NO: 2544140 - DNA, 25 bp, Homo sapien
tgataacacgttggcataagatgaa

SEQ ID NO: 2544141 - DNA, 25 bp, Homo sapien
cctgcctaatattttgataacacgt

SEQ ID NO: 2544142 - DNA, 25 bp, Homo sapien
taccgcagatgatcaaagaagacgc

SEQ ID NO: 2544143 - DNA, 25 bp, Homo sapien
caacgtgagcacagacaatgggaga

SEQ ID NO: 2544144 - DNA, 25 bp, Homo sapien
gagcctggccttactgacactttga

SEQ ID NO: 2544145 - DNA, 25 bp, Homo sapien
gaggcattcacgtgacccttgtgga

SEQ ID NO: 2544146 - DNA, 25 bp, Homo sapien
gagccgtgttctgacatcctggcag

SEQ ID NO: 2544147 - DNA, 25 bp, Homo sapien
gatctccttccaggcaagcaagtgg

SEQ ID NO: 2544148 - DNA, 25 bp, Homo sapien
ggtagttgcgccatcttcacctcgg

SEQ ID NO: 2544149 - DNA, 25 bp, Homo sapien
cttgaacccaatcagtgacaactgg

SEQ ID NO: 2544150 - DNA, 25 bp, Homo sapien
gtttattctaaaggtgttggttgca

SEQ ID NO: 2544151 - DNA, 25 bp, Homo sapien
aatgttagaagctggttatgctgca

SEQ ID NO: 2544152 - DNA, 25 bp, Homo sapien
ccaagcacaggtgggtttattctaa

SEQ ID NO: 2544153 - DNA, 25 bp, Homo sapien
ggttatgctgcagcctttgaaggtt

SEQ ID NO: 2544154 - DNA, 25 bp, Homo sapien
acatctaagagcacaagacgaaagt

SEQ ID NO: 2544155 - DNA, 25 bp, Homo sapien
agacgaaagtgcgtaaattccgcgg

SEQ ID NO: 2544156 - DNA, 25 bp, Homo sapien
gagcacaagacgaaagtgcgtaaat

SEQ ID NO: 2544157 - DNA, 25 bp, Homo sapien
tctaagagcacaagacgaaagtgcg

SEQ ID NO: 2544158 - DNA, 25 bp, Homo sapien
gtaattgtacgacaccaagccctgg

SEQ ID NO: 2544159 - DNA, 25 bp, Homo sapien
ggcgggcccgagtctttctgagtaa

SEQ ID NO: 2544160 - DNA, 25 bp, Homo sapien
taatattgtcccaagccacagacca

SEQ ID NO: 2544161 - DNA, 25 bp, Homo sapien
gtttctcaggcccaatcaccattgt

SEQ ID NO: 2544162 - DNA, 25 bp, Homo sapien
tgatgaaatattgatggaggaggaa

SEQ ID NO: 2544163 - DNA, 25 bp, Homo sapien
tttaaagcacggtcagtaaaagctg

SEQ ID NO: 2544164 - DNA, 25 bp, Homo sapien
caacttggaactatttccaccagca

SEQ ID NO: 2544165 - DNA, 25 bp, Homo sapien
ggcaagcccacaccaacagatgcgt

SEQ ID NO: 2544166 - DNA, 25 bp, Homo sapien
tcaagtcttgtccaggagctattgg

SEQ ID NO: 2544167 - DNA, 25 bp, Homo sapien
gtccaggagctattggaggctttcc

SEQ ID NO: 2544168 - DNA, 25 bp, Homo sapien
gaacgtcaagtcttgtccaggagct

SEQ ID NO: 2544169 - DNA, 25 bp, Homo sapien
ggagggtgaacgtcaagtcttgtcc

SEQ ID NO: 2544170 - DNA, 25 bp, Homo sapien
tggtaggagggaccaaatggaatat

SEQ ID NO: 2544171 - DNA, 25 bp, Homo sapien
gaatatggggaaggcatatccagtg

SEQ ID NO: 2544172 - DNA, 25 bp, Homo sapien
ttggtaggagggaccaaatggaata

SEQ ID NO: 2544173 - DNA, 25 bp, Homo sapien
aaggcatatccagtgcctagaaggg

SEQ ID NO: 2544174 - DNA, 25 bp, Homo sapien
aatggtaatgctcttcactgttaat

SEQ ID NO: 2544175 - DNA, 25 bp, Homo sapien
cactgttaatagtgatatagttgtt

SEQ ID NO: 2544176 - DNA, 25 bp, Homo sapien
tgctcttcactgttaatagtgatat

SEQ ID NO: 2544177 - DNA, 25 bp, Homo sapien
atagttgtttgcaaaactttccatt

SEQ ID NO: 2544178 - DNA, 25 bp, Homo sapien
tggtcttgaagaacggaacgatccg

SEQ ID NO: 2544179 - DNA, 25 bp, Homo sapien
gactttcaagcactcacagggacca

SEQ ID NO: 2544180 - DNA, 25 bp, Homo sapien
gaacaggtgccttctggtgagtgaa

SEQ ID NO: 2544181 - DNA, 25 bp, Homo sapien
gaaacgctgctggtctgagagtgaa

SEQ ID NO: 2544182 - DNA, 25 bp, Homo sapien
taccgcagaggacagaagtcactct

SEQ ID NO: 2544183 - DNA, 25 bp, Homo sapien
gcttcttgtagatgccatggctctc

SEQ ID NO: 2544184 - DNA, 25 bp, Homo sapien
ttagaagtaccgcagaggacagaag

SEQ ID NO: 2544185 - DNA, 25 bp, Homo sapien
ggctctctcggagtcttaggcacca

SEQ ID NO: 2544186 - DNA, 25 bp, Homo sapien
aaatgcgcaagcatgaacataagcc

SEQ ID NO: 2544187 - DNA, 25 bp, Homo sapien
ttcaaatgcgcaagcatgaacataa

SEQ ID NO: 2544188 - DNA, 25 bp, Homo sapien
tgcgcaagcatgaacataagcctgc

SEQ ID NO: 2544189 - DNA, 25 bp, Homo sapien
caagcatgaacataagcctgcttga

SEQ ID NO: 2544190 - DNA, 25 bp, Homo sapien
aggcaccgaaactcatcacctctgt

SEQ ID NO: 2544191 - DNA, 25 bp, Homo sapien
aacatccaaaggcaccgaaactcat

SEQ ID NO: 2544192 - DNA, 25 bp, Homo sapien
catccaaaggcaccgaaactcatca

SEQ ID NO: 2544193 - DNA, 25 bp, Homo sapien
cttggtcagaaggtgaggttttctc

SEQ ID NO: 2544194 - DNA, 25 bp, Homo sapien
ggcatagagagtggaagtgcttccc

SEQ ID NO: 2544195 - DNA, 25 bp, Homo sapien
aacgggaccagaactgggcatctct

SEQ ID NO: 2544196 - DNA, 25 bp, Homo sapien
catggaggagtcattcaaacgggac

SEQ ID NO: 2544197 - DNA, 25 bp, Homo sapien
tcattcaaacgggaccagaactggg

SEQ ID NO: 2544198 - DNA, 25 bp, Homo sapien
tgggtgaccagctcagtgtaggctc

SEQ ID NO: 2544199 - DNA, 25 bp, Homo sapien
gaccagctcagtgtaggctctgctg

SEQ ID NO: 2544200 - DNA, 25 bp, Homo sapien
acatctttcagaagggtcatcaggg

SEQ ID NO: 2544201 - DNA, 25 bp, Homo sapien
tgggcatgagctggcacatctttca

SEQ ID NO: 2544202 - DNA, 25 bp, Homo sapien
tttttgcacctccttcttccttctg

SEQ ID NO: 2544203 - DNA, 25 bp, Homo sapien
ttttgcacctccttcttccttctgc

SEQ ID NO: 2544204 - DNA, 25 bp, Homo sapien
catggtcaggggaaactccttctcc

SEQ ID NO: 2544205 - DNA, 25 bp, Homo sapien
ggcgcacatggtcaggggaaactcc

SEQ ID NO: 2544206 - DNA, 25 bp, Homo sapien
tcagcccacatcctcttgtctcctc

SEQ ID NO: 2544207 - DNA, 25 bp, Homo sapien
cgcacatggtcaggggaaactcctt

SEQ ID NO: 2544208 - DNA, 25 bp, Homo sapien
cgtgactggatcattaaaagctccc

SEQ ID NO: 2544209 - DNA, 25 bp, Homo sapien
cacttatgtgatattgccgctctgg

SEQ ID NO: 2544210 - DNA, 25 bp, Homo sapien
tctggtaacggagagttgaggaaaa

SEQ ID NO: 2544211 - DNA, 25 bp, Homo sapien
tgaggaaaagctgaacccgtgactg

SEQ ID NO: 2544212 - DNA, 25 bp, Homo sapien
aaggatatctaatcagcagggccac

SEQ ID NO: 2544213 - DNA, 25 bp, Homo sapien
gagcaaggatatctaatcagcaggg

SEQ ID NO: 2544214 - DNA, 25 bp, Homo sapien
gcaaggatatctaatcagcagggcc

SEQ ID NO: 2544215 - DNA, 25 bp, Homo sapien
cttgagcaaggatatctaatcagca

SEQ ID NO: 2544216 - DNA, 25 bp, Homo sapien
tagagttttagcttcccaatctcac

SEQ ID NO: 2544217 - DNA, 25 bp, Homo sapien
agtggaaggaatcaaacagtgtcag

SEQ ID NO: 2544218 - DNA, 25 bp, Homo sapien
aggaatcaaacagtgtcagcatact

SEQ ID NO: 2544219 - DNA, 25 bp, Homo sapien
ggagagtctagggaatagagtttta

SEQ ID NO: 2544220 - DNA, 25 bp, Homo sapien
gcacagctttaagtaggcatcacta

SEQ ID NO: 2544221 - DNA, 25 bp, Homo sapien
gctgtaatctcttggatgctccata

SEQ ID NO: 2544222 - DNA, 25 bp, Homo sapien
aagatcaaacggctgtctcctgagc

SEQ ID NO: 2544223 - DNA, 25 bp, Homo sapien
ctgagctgtatcgagggcacagctt

SEQ ID NO: 2544224 - DNA, 25 bp, Homo sapien
agtcagaggtaaagaagccagtagt

SEQ ID NO: 2544225 - DNA, 25 bp, Homo sapien
aagtcagaggtaaagaagccagtag

SEQ ID NO: 2544226 - DNA, 25 bp, Homo sapien
aggtaaagaagccagtagtgaccat

SEQ ID NO: 2544227 - DNA, 25 bp, Homo sapien
cagaggtaaagaagccagtagtgac

SEQ ID NO: 2544228 - DNA, 25 bp, Homo sapien
acattcattagtgtgaaatgctgct

SEQ ID NO: 2544229 - DNA, 25 bp, Homo sapien
tgtttgccacttagacccccaaatc

SEQ ID NO: 2544230 - DNA, 25 bp, Homo sapien
tagacccccaaatctgagcttttct

SEQ ID NO: 2544231 - DNA, 25 bp, Homo sapien
aagacattcattagtgtgaaatgct

SEQ ID NO: 2544232 - DNA, 25 bp, Homo sapien
tgcaggacgaattctccagtctcaa

SEQ ID NO: 2544233 - DNA, 25 bp, Homo sapien
gtgaggagtgtgcattaaatagcca

SEQ ID NO: 2544234 - DNA, 25 bp, Homo sapien
ccaaatactgggttcggtgaggagt

SEQ ID NO: 2544235 - DNA, 25 bp, Homo sapien
gccattattaactgactgcaggacg

SEQ ID NO: 2544236 - DNA, 25 bp, Homo sapien
gacattgtcccctcatggagttgac

SEQ ID NO: 2544237 - DNA, 25 bp, Homo sapien
gaatctttatccacacggagagagg

SEQ ID NO: 2544238 - DNA, 25 bp, Homo sapien
gaacaagggcagacagcgaatggcc

SEQ ID NO: 2544239 - DNA, 25 bp, Homo sapien
tgacatatggcttacggttcgtacc

SEQ ID NO: 2544240 - DNA, 25 bp, Homo sapien
gtgacgaccaccaggtcccgcagtg

SEQ ID NO: 2544241 - DNA, 25 bp, Homo sapien
tccgccttgagcgtcgggtccctgg

SEQ ID NO: 2544242 - DNA, 25 bp, Homo sapien
caggagtctgcgaacgctgagtttc

SEQ ID NO: 2544243 - DNA, 25 bp, Homo sapien
agaaggagtccagctccgccttgag

SEQ ID NO: 2544244 - DNA, 25 bp, Homo sapien
tttccgcaaccgctagggtctctgt

SEQ ID NO: 2544245 - DNA, 25 bp, Homo sapien
ccatccacagcttcggcactgtggg

SEQ ID NO: 2544246 - DNA, 25 bp, Homo sapien
agaggtgctccgctctgtgcgctcc

SEQ ID NO: 2544247 - DNA, 25 bp, Homo sapien
gtctctgtgcgggccctagaggaac

SEQ ID NO: 2544248 - DNA, 25 bp, Homo sapien
gggagcaaggcctaggctctgccag

SEQ ID NO: 2544249 - DNA, 25 bp, Homo sapien
tgtgcggccgagtggccgcgcggat

SEQ ID NO: 2544250 - DNA, 25 bp, Homo sapien
agcaaggcctaggctctgccagggc

SEQ ID NO: 2544251 - DNA, 25 bp, Homo sapien
tttttattatgtgcgtgtgcggccg

SEQ ID NO: 2544252 - DNA, 25 bp, Homo sapien
cgcgcccagggcgtagaaaaaggag

SEQ ID NO: 2544253 - DNA, 25 bp, Homo sapien
aggagagcgtcgctttcctgctccc

SEQ ID NO: 2544254 - DNA, 25 bp, Homo sapien
tagaaaaaggagagcgtcgctttcc

SEQ ID NO: 2544255 - DNA, 25 bp, Homo sapien
cgcccagggcgtagaaaaaggagag

SEQ ID NO: 2544256 - DNA, 25 bp, Homo sapien
ttgcccttgagagaatttaaccagg

SEQ ID NO: 2544257 - DNA, 25 bp, Homo sapien
tgctaattgagcagggcgtgaccga

SEQ ID NO: 2544258 - DNA, 25 bp, Homo sapien
actttgcagaggaaggcggtgctaa

SEQ ID NO: 2544259 - DNA, 25 bp, Homo sapien
tttaaccaggcgaactggatgttcc

SEQ ID NO: 2544260 - DNA, 25 bp, Homo sapien
agcttaatcaccagggtggctacag

SEQ ID NO: 2544261 - DNA, 25 bp, Homo sapien
gttcacagttagcttaatcaccagg

SEQ ID NO: 2544262 - DNA, 25 bp, Homo sapien
ccttaagcagttgagttttgcttca

SEQ ID NO: 2544263 - DNA, 25 bp, Homo sapien
ccttcccttaagcagttgagttttg

SEQ ID NO: 2544264 - DNA, 25 bp, Homo sapien
actttctgaacggtgagggacaaca

SEQ ID NO: 2544265 - DNA, 25 bp, Homo sapien
tctgggctgtcctgttctggcgtga

SEQ ID NO: 2544266 - DNA, 25 bp, Homo sapien
tatctagtagagttctgccactgag

SEQ ID NO: 2544267 - DNA, 25 bp, Homo sapien
tctgagtaggacaccctcctctcct

SEQ ID NO: 2544268 - DNA, 25 bp, Homo sapien
agccagctgcaaggcgatcccagaa

SEQ ID NO: 2544269 - DNA, 25 bp, Homo sapien
ggtcctgcagctcttaggcctctaa

SEQ ID NO: 2544270 - DNA, 25 bp, Homo sapien
ccaaattctcgagggacattcttat

SEQ ID NO: 2544271 - DNA, 25 bp, Homo sapien
cactgaactggagcgtgctgtaggt

SEQ ID NO: 2544272 - DNA, 25 bp, Homo sapien
ccatatcttcaggttgtaatgggat

SEQ ID NO: 2544273 - DNA, 25 bp, Homo sapien
ttgtaatgggatattcaacacataa

SEQ ID NO: 2544274 - DNA, 25 bp, Homo sapien
tcaggttgtaatgggatattcaaca

SEQ ID NO: 2544275 - DNA, 25 bp, Homo sapien
tcttcaggttgtaatgggatattca

SEQ ID NO: 2544276 - DNA, 25 bp, Homo sapien
gagaaaccgctgtgatgaaagactg

SEQ ID NO: 2544277 - DNA, 25 bp, Homo sapien
acagagtgttggctcaggttccagc

SEQ ID NO: 2544278 - DNA, 25 bp, Homo sapien
tgagcctgggaccttcctgaaaagc

SEQ ID NO: 2544279 - DNA, 25 bp, Homo sapien
ataagcgtaagccaaagtctgcggg

SEQ ID NO: 2544280 - DNA, 25 bp, Homo sapien
tccacagcagtaagatagacccaac

SEQ ID NO: 2544281 - DNA, 25 bp, Homo sapien
gacttcactgaggatttgtagttga

SEQ ID NO: 2544282 - DNA, 25 bp, Homo sapien
acagtcaggcggctccaagtgtgtg

SEQ ID NO: 2544283 - DNA, 25 bp, Homo sapien
gtcccacatgggctacacatcttag

SEQ ID NO: 2544284 - DNA, 25 bp, Homo sapien
cttgcaggggatcctttcttatcat

SEQ ID NO: 2544285 - DNA, 25 bp, Homo sapien
catcagtggaagattggccttgagc

SEQ ID NO: 2544286 - DNA, 25 bp, Homo sapien
tcaggtccatcagtggaagattggc

SEQ ID NO: 2544287 - DNA, 25 bp, Homo sapien
gacgtggaagacaaagtgtcaggtc

SEQ ID NO: 2544288 - DNA, 25 bp, Homo sapien
caaagtgtcaggtccatcagtggaa

SEQ ID NO: 2544289 - DNA, 25 bp, Homo sapien
tcttggagatgttttcatggtagca

SEQ ID NO: 2544290 - DNA, 25 bp, Homo sapien
cagtgtcttggagatgttttcatgg

SEQ ID NO: 2544291 - DNA, 25 bp, Homo sapien
tcagtgtcttggagatgttttcatg

SEQ ID NO: 2544292 - DNA, 25 bp, Homo sapien
gtgtcttggagatgttttcatggta

SEQ ID NO: 2544293 - DNA, 25 bp, Homo sapien
ctgaaggatatcgtggctgtttcca

SEQ ID NO: 2544294 - DNA, 25 bp, Homo sapien
cttttacatcgcttggccatgactt

SEQ ID NO: 2544295 - DNA, 25 bp, Homo sapien
tgctgaaggatatcgtggctgtttc

SEQ ID NO: 2544296 - DNA, 25 bp, Homo sapien
tatgcttttacatcgcttggccatg

SEQ ID NO: 2544297 - DNA, 25 bp, Homo sapien
gctcccccagttggatcctgctgtt

SEQ ID NO: 2544298 - DNA, 25 bp, Homo sapien
tgctcccccagttggatcctgctgt

SEQ ID NO: 2544299 - DNA, 25 bp, Homo sapien
tcaggacatggccagtattcacaca

SEQ ID NO: 2544300 - DNA, 25 bp, Homo sapien
tgtggtccctcgttgcacacgtgcg

SEQ ID NO: 2544301 - DNA, 25 bp, Homo sapien
cacacgtgcggaggttgtacttggt

SEQ ID NO: 2544302 - DNA, 25 bp, Homo sapien
catcgcagtgcggttgttggacagc

SEQ ID NO: 2544303 - DNA, 25 bp, Homo sapien
taaaatacggctgcgaggaagttcg

SEQ ID NO: 2544304 - DNA, 25 bp, Homo sapien
tgctgtccctatggcacgaagcgct

SEQ ID NO: 2544305 - DNA, 25 bp, Homo sapien
tctatttgcctgtaggcgagggcct

SEQ ID NO: 2544306 - DNA, 25 bp, Homo sapien
ggaagttcgtgacagcctcggtgct

SEQ ID NO: 2544307 - DNA, 25 bp, Homo sapien
cgtaggctcctgcagcaactctttg

SEQ ID NO: 2544308 - DNA, 25 bp, Homo sapien
tcctgcagcaactctttggtgcacc

SEQ ID NO: 2544309 - DNA, 25 bp, Homo sapien
agccgtaggctcctgcagcaactct

SEQ ID NO: 2544310 - DNA, 25 bp, Homo sapien
gcagcaactctttggtgcacctgtc

SEQ ID NO: 2544311 - DNA, 25 bp, Homo sapien
gtgtccactgtggacctgagtgggt

SEQ ID NO: 2544312 - DNA, 25 bp, Homo sapien
ttcatggatgggcctcccctggtgt

SEQ ID NO: 2544313 - DNA, 25 bp, Homo sapien
tgtgtccactgtggacctgagtggg

SEQ ID NO: 2544314 - DNA, 25 bp, Homo sapien
ctggccttcatggatgggcctcccc

SEQ ID NO: 2544315 - DNA, 25 bp, Homo sapien
tagttctaaatagttggagatttcc

SEQ ID NO: 2544316 - DNA, 25 bp, Homo sapien
gctgagagtcttacatgtatcatag

SEQ ID NO: 2544317 - DNA, 25 bp, Homo sapien
tcatcaaccctctttagaagacgtt

SEQ ID NO: 2544318 - DNA, 25 bp, Homo sapien
tctcagtgcactcatactttattag

SEQ ID NO: 2544319 - DNA, 25 bp, Homo sapien
gttgagggggtcttcatctcattca

SEQ ID NO: 2544320 - DNA, 25 bp, Homo sapien
aagtagccttgggtggttgtctctg

SEQ ID NO: 2544321 - DNA, 25 bp, Homo sapien
taggaagtagccttgggtggttgtc

SEQ ID NO: 2544322 - DNA, 25 bp, Homo sapien
acagctgcgttgagggggtcttcat

SEQ ID NO: 2544323 - DNA, 25 bp, Homo sapien
gactgcacagtgcagaggttgctga

SEQ ID NO: 2544324 - DNA, 25 bp, Homo sapien
aggttgctgatggaggtccattctt

SEQ ID NO: 2544325 - DNA, 25 bp, Homo sapien
ttctgaacatcctttgatcgtgcaa

SEQ ID NO: 2544326 - DNA, 25 bp, Homo sapien
gcctgtgcggtgcatttgcattgac

SEQ ID NO: 2544327 - DNA, 25 bp, Homo sapien
cagacattatcaccaggtagcctga

SEQ ID NO: 2544328 - DNA, 25 bp, Homo sapien
cagaacactgagaccggagctatag

SEQ ID NO: 2544329 - DNA, 25 bp, Homo sapien
attgatgggtctgggtgagatcccc

SEQ ID NO: 2544330 - DNA, 25 bp, Homo sapien
gcagacattatgtgatctgtgcgtc

SEQ ID NO: 2544331 - DNA, 25 bp, Homo sapien
cctggcttaggtttgcagcccttct

SEQ ID NO: 2544332 - DNA, 25 bp, Homo sapien
ctgccactttctcaccaacaggacc

SEQ ID NO: 2544333 - DNA, 25 bp, Homo sapien
atcccgtcctatccctggcttaggt

SEQ ID NO: 2544334 - DNA, 25 bp, Homo sapien
caccaacaggaccaagggaattcat

SEQ ID NO: 2544335 - DNA, 25 bp, Homo sapien
ctgctcaggggccaggagtgtcctt

SEQ ID NO: 2544336 - DNA, 25 bp, Homo sapien
cccgggggttttgtgtcggcatcat

SEQ ID NO: 2544337 - DNA, 25 bp, Homo sapien
caggggccaggagtgtccttggtcc

SEQ ID NO: 2544338 - DNA, 25 bp, Homo sapien
ccaccctgctcaggggccaggagtg

SEQ ID NO: 2544339 - DNA, 25 bp, Homo sapien
tatgttgcgggtttcagatcaaccc

SEQ ID NO: 2544340 - DNA, 25 bp, Homo sapien
ccttaacaaccagtgatggagggac

SEQ ID NO: 2544341 - DNA, 25 bp, Homo sapien
gcatcctgagttgaaacaagctcca

SEQ ID NO: 2544342 - DNA, 25 bp, Homo sapien
gccacactgtcgtaatcctctcttg

SEQ ID NO: 2544343 - DNA, 25 bp, Homo sapien
tggatctccggtggccatctgacct

SEQ ID NO: 2544344 - DNA, 25 bp, Homo sapien
atggaaatggcccttgtctcccacc

SEQ ID NO: 2544345 - DNA, 25 bp, Homo sapien
tcctcagctggacgcggcttcttat

SEQ ID NO: 2544346 - DNA, 25 bp, Homo sapien
cgcggcttcttatagccccggatca

SEQ ID NO: 2544347 - DNA, 25 bp, Homo sapien
gaagcttcagtcctgttgtgcacac

SEQ ID NO: 2544348 - DNA, 25 bp, Homo sapien
actgacaacgccttgaagctgtggc

SEQ ID NO: 2544349 - DNA, 25 bp, Homo sapien
agctgtggcttgtttcatcgaggcg

SEQ ID NO: 2544350 - DNA, 25 bp, Homo sapien
tcatcgaggcgtgctgccatggaag

SEQ ID NO: 2544351 - DNA, 25 bp, Homo sapien
gaatttctctgttgagccactccat

SEQ ID NO: 2544352 - DNA, 25 bp, Homo sapien
tagtgggatgttcagtggaccgtgg

SEQ ID NO: 2544353 - DNA, 25 bp, Homo sapien
tagcgtagtgggatgttcagtggac

SEQ ID NO: 2544354 - DNA, 25 bp, Homo sapien
ctctcccatgcgtagcgtagtggga

SEQ ID NO: 2544355 - DNA, 25 bp, Homo sapien
ctcccatgcgtagcgtagtgggatg

SEQ ID NO: 2544356 - DNA, 25 bp, Homo sapien
gactgctgacatccagctctggaaa

SEQ ID NO: 2544357 - DNA, 25 bp, Homo sapien
agcattgctgctatggcgtggaccc

SEQ ID NO: 2544358 - DNA, 25 bp, Homo sapien
tgagcttttcatagagtgggtttac

SEQ ID NO: 2544359 - DNA, 25 bp, Homo sapien
tactgtgggaagataagcattgctg

SEQ ID NO: 2544360 - DNA, 25 bp, Homo sapien
cgttgaagacccttcgcaacactcc

SEQ ID NO: 2544361 - DNA, 25 bp, Homo sapien
tttgtcccgttgaagacccttcgca

SEQ ID NO: 2544362 - DNA, 25 bp, Homo sapien
gtcccgttgaagacccttcgcaaca

SEQ ID NO: 2544363 - DNA, 25 bp, Homo sapien
gttgaagacccttcgcaacactcct

SEQ ID NO: 2544364 - DNA, 25 bp, Homo sapien
tggaaacacgctccgggtgctaagg

SEQ ID NO: 2544365 - DNA, 25 bp, Homo sapien
gatgcttgagccgtttcccatggtg

SEQ ID NO: 2544366 - DNA, 25 bp, Homo sapien
gaaatcaacttcacgtggaaacacg

SEQ ID NO: 2544367 - DNA, 25 bp, Homo sapien
tttcagctttcgcaatggccaaccg

SEQ ID NO: 2544368 - DNA, 25 bp, Homo sapien
cttttatggcctttggtgaggccac

SEQ ID NO: 2544369 - DNA, 25 bp, Homo sapien
tgtgttggggactccattcctaggc

SEQ ID NO: 2544370 - DNA, 25 bp, Homo sapien
aagcaaagcaagcccgtgatggtgg

SEQ ID NO: 2544371 - DNA, 25 bp, Homo sapien
tgggtcggatggctcttttatggcc

SEQ ID NO: 2544372 - DNA, 25 bp, Homo sapien
ctggagcaccaggcttgggaaacct

SEQ ID NO: 2544373 - DNA, 25 bp, Homo sapien
ggagcaccaggcttgggaaacctgt

SEQ ID NO: 2544374 - DNA, 25 bp, Homo sapien
tggagcaccaggcttgggaaacctg

SEQ ID NO: 2544375 - DNA, 25 bp, Homo sapien
ttgagtaactgagttccattgtaga

SEQ ID NO: 2544376 - DNA, 25 bp, Homo sapien
tgagttccattgtagactcctccgg

SEQ ID NO: 2544377 - DNA, 25 bp, Homo sapien
taactgagttccattgtagactcct

SEQ ID NO: 2544378 - DNA, 25 bp, Homo sapien
tccattgtagactcctccggcaatt

SEQ ID NO: 2544379 - DNA, 25 bp, Homo sapien
cagaagaccgtgacagtttgtattt

SEQ ID NO: 2544380 - DNA, 25 bp, Homo sapien
agtctgtgcgggcaacagaagaccg

SEQ ID NO: 2544381 - DNA, 25 bp, Homo sapien
gggcaacagaagaccgtgacagttt

SEQ ID NO: 2544382 - DNA, 25 bp, Homo sapien
tgtgcgggcaacagaagaccgtgac

SEQ ID NO: 2544383 - DNA, 25 bp, Homo sapien
ggctggatgggtagcagctttgtcg

SEQ ID NO: 2544384 - DNA, 25 bp, Homo sapien
ctaatacagacattttgcccttaat

SEQ ID NO: 2544385 - DNA, 25 bp, Homo sapien
tttgtcgtggtcataggcatgaagc

SEQ ID NO: 2544386 - DNA, 25 bp, Homo sapien
tagcagctttgtcgtggtcataggc

SEQ ID NO: 2544387 - DNA, 25 bp, Homo sapien
ttctagtagttgggctcaggacatc

SEQ ID NO: 2544388 - DNA, 25 bp, Homo sapien
gggctcaggacatctctctgccact

SEQ ID NO: 2544389 - DNA, 25 bp, Homo sapien
gttgggctcaggacatctctctgcc

SEQ ID NO: 2544390 - DNA, 25 bp, Homo sapien
agtagttgggctcaggacatctctc

SEQ ID NO: 2544391 - DNA, 25 bp, Homo sapien
tgtgagtttgcaaaggaaggtgcat

SEQ ID NO: 2544392 - DNA, 25 bp, Homo sapien
gggccatagggtttgcttaacctga

SEQ ID NO: 2544393 - DNA, 25 bp, Homo sapien
gccgtgtgtcttctaacatggtcca

SEQ ID NO: 2544394 - DNA, 25 bp, Homo sapien
tctggttagggcttcgccgtgtgtc

SEQ ID NO: 2544395 - DNA, 25 bp, Homo sapien
ctttctttccacgatgctagctgta

SEQ ID NO: 2544396 - DNA, 25 bp, Homo sapien
ttccacgatgctagctgtacatacg

SEQ ID NO: 2544397 - DNA, 25 bp, Homo sapien
gctgtacatacgtgcaagctggcat

SEQ ID NO: 2544398 - DNA, 25 bp, Homo sapien
cgatgctagctgtacatacgtgcaa

SEQ ID NO: 2544399 - DNA, 25 bp, Homo sapien
ctctctctccgcagggaaaaatgga

SEQ ID NO: 2544400 - DNA, 25 bp, Homo sapien
gcaacctttgtgtctaccaaggact

SEQ ID NO: 2544401 - DNA, 25 bp, Homo sapien
tgacactctctctccgcagggaaaa

SEQ ID NO: 2544402 - DNA, 25 bp, Homo sapien
ctctagactgacctgggcatcagcc

SEQ ID NO: 2544403 - DNA, 25 bp, Homo sapien
ttaaagggtactgcttggtgccgtg

SEQ ID NO: 2544404 - DNA, 25 bp, Homo sapien
tcacattaaagggtactgcttggtg

SEQ ID NO: 2544405 - DNA, 25 bp, Homo sapien
agcgcagcagccgtattccctccct

SEQ ID NO: 2544406 - DNA, 25 bp, Homo sapien
cgtattccctcccttccgatctttg

SEQ ID NO: 2544407 - DNA, 25 bp, Homo sapien
taagctagataacatccgagaggcc

SEQ ID NO: 2544408 - DNA, 25 bp, Homo sapien
tatccaaccatgaccatttgccagg

SEQ ID NO: 2544409 - DNA, 25 bp, Homo sapien
tcgcaggcccctagatacgttgtgt

SEQ ID NO: 2544410 - DNA, 25 bp, Homo sapien
caataggtatttgggcaccgtctgc

SEQ ID NO: 2544411 - DNA, 25 bp, Homo sapien
taactacacgttgaacattgagcca

SEQ ID NO: 2544412 - DNA, 25 bp, Homo sapien
taggtggccacatgttttgctttgc

SEQ ID NO: 2544413 - DNA, 25 bp, Homo sapien
cagatggtttttccattaggtggcc

SEQ ID NO: 2544414 - DNA, 25 bp, Homo sapien
gaccagtcaacttcaatcagatatg

SEQ ID NO: 2544415 - DNA, 25 bp, Homo sapien
tatctgaggatatgagaaaccctcg

SEQ ID NO: 2544416 - DNA, 25 bp, Homo sapien
agaaaccctcgaaggcattgtccac

SEQ ID NO: 2544417 - DNA, 25 bp, Homo sapien
tatgagaaaccctcgaaggcattgt

SEQ ID NO: 2544418 - DNA, 25 bp, Homo sapien
gaggatatgagaaaccctcgaaggc

SEQ ID NO: 2544419 - DNA, 25 bp, Homo sapien
ctggcttgccctgcatgatcgttgg

SEQ ID NO: 2544420 - DNA, 25 bp, Homo sapien
tgggcataataaatctgcaggatcg

SEQ ID NO: 2544421 - DNA, 25 bp, Homo sapien
tcgagtggattcctcaggagcaagc

SEQ ID NO: 2544422 - DNA, 25 bp, Homo sapien
ggagcaagctgactgttcccagact

SEQ ID NO: 2544423 - DNA, 25 bp, Homo sapien
tcttgcttccacgttctttagccca

SEQ ID NO: 2544424 - DNA, 25 bp, Homo sapien
ttttcgagttctccaaatcacagct

SEQ ID NO: 2544425 - DNA, 25 bp, Homo sapien
gcttccacgttctttagcccattta

SEQ ID NO: 2544426 - DNA, 25 bp, Homo sapien
agcccatttaagtgtcgtcttagtt

SEQ ID NO: 2544427 - DNA, 25 bp, Homo sapien
tgttcctcgaaaataccagtgccca

SEQ ID NO: 2544428 - DNA, 25 bp, Homo sapien
tgcccattgtcattttgctctgata

SEQ ID NO: 2544429 - DNA, 25 bp, Homo sapien
gctctgatattgcaagcactgcgga

SEQ ID NO: 2544430 - DNA, 25 bp, Homo sapien
cactgcggacatgctttcttgatga

SEQ ID NO: 2544431 - DNA, 25 bp, Homo sapien
caggatgggacctgtcggtcccaag

SEQ ID NO: 2544432 - DNA, 25 bp, Homo sapien
tcccaagagccagagtgctggctcc

SEQ ID NO: 2544433 - DNA, 25 bp, Homo sapien
tatcctattgggcttccagacaatc

SEQ ID NO: 2544434 - DNA, 25 bp, Homo sapien
ctgctgcttgggctatcctattggg

SEQ ID NO: 2544435 - DNA, 25 bp, Homo sapien
aagagtgtcacaccttcattatgat

SEQ ID NO: 2544436 - DNA, 25 bp, Homo sapien
agaaagagtgtcacaccttcattat

SEQ ID NO: 2544437 - DNA, 25 bp, Homo sapien
aacacactggcagaaagagtgtcac

SEQ ID NO: 2544438 - DNA, 25 bp, Homo sapien
ataacacactggcagaaagagtgtc

SEQ ID NO: 2544439 - DNA, 25 bp, Homo sapien
tgcctgtccacggtgggagacaagc

SEQ ID NO: 2544440 - DNA, 25 bp, Homo sapien
cacggtgggagacaagcttcttcct

SEQ ID NO: 2544441 - DNA, 25 bp, Homo sapien
ctattggaggtgctatatcttggtc

SEQ ID NO: 2544442 - DNA, 25 bp, Homo sapien
tggaggtgctatatcttggtcctgg

SEQ ID NO: 2544443 - DNA, 25 bp, Homo sapien
gtaactgtccataatagagtaaatg

SEQ ID NO: 2544444 - DNA, 25 bp, Homo sapien
gggacttcacgctgcttctagaatg

SEQ ID NO: 2544445 - DNA, 25 bp, Homo sapien
tctgcggggaataagagtaactgtc

SEQ ID NO: 2544446 - DNA, 25 bp, Homo sapien
tgctgaaaagtctgcggggaataag

SEQ ID NO: 2544447 - DNA, 25 bp, Homo sapien
acaacttcatcatgcggcattttcc

SEQ ID NO: 2544448 - DNA, 25 bp, Homo sapien
caacttcatcatgcggcattttcct

SEQ ID NO: 2544449 - DNA, 25 bp, Homo sapien
cttcatcatgcggcattttccttta

SEQ ID NO: 2544450 - DNA, 25 bp, Homo sapien
aacttcatcatgcggcattttcctt

SEQ ID NO: 2544451 - DNA, 25 bp, Homo sapien
tctctctgaagaaggcagttgatcc

SEQ ID NO: 2544452 - DNA, 25 bp, Homo sapien
aaattggccgagaggcatagagcag

SEQ ID NO: 2544453 - DNA, 25 bp, Homo sapien
ggcagttgatcctgtcccctgttaa

SEQ ID NO: 2544454 - DNA, 25 bp, Homo sapien
ctgaggacgggttgtcacagagaca

SEQ ID NO: 2544455 - DNA, 25 bp, Homo sapien
cccagcagcaaggagaggaagttca

SEQ ID NO: 2544456 - DNA, 25 bp, Homo sapien
agcccgggggtagattggctcctgt

SEQ ID NO: 2544457 - DNA, 25 bp, Homo sapien
tcctgtgagctcagactgtggcccc

SEQ ID NO: 2544458 - DNA, 25 bp, Homo sapien
gtggccccagcagcaaggagaggaa

SEQ ID NO: 2544459 - DNA, 25 bp, Homo sapien
agtttagggttgtgtaatcacttcg

SEQ ID NO: 2544460 - DNA, 25 bp, Homo sapien
tgtgtaatcacttcgtggtgctggg

SEQ ID NO: 2544461 - DNA, 25 bp, Homo sapien
tgctggggacgcaggattcctctca

SEQ ID NO: 2544462 - DNA, 25 bp, Homo sapien
gggttgtgtaatcacttcgtggtgc

SEQ ID NO: 2544463 - DNA, 25 bp, Homo sapien
ccctttgcccggtgactaccaccag

SEQ ID NO: 2544464 - DNA, 25 bp, Homo sapien
gtaggagccaattttccaaccattg

SEQ ID NO: 2544465 - DNA, 25 bp, Homo sapien
tattcctagaccagttttcagtgtg

SEQ ID NO: 2544466 - DNA, 25 bp, Homo sapien
caaagaggcatttgtcgcgtgtcct

SEQ ID NO: 2544467 - DNA, 25 bp, Homo sapien
tacctctcggtcttggtaggagcca

SEQ ID NO: 2544468 - DNA, 25 bp, Homo sapien
ttctgaaccaaatggaaggaggttg

SEQ ID NO: 2544469 - DNA, 25 bp, Homo sapien
gaaggaggttgtcaagctctgcccc

SEQ ID NO: 2544470 - DNA, 25 bp, Homo sapien
atggaaggaggttgtcaagctctgc

SEQ ID NO: 2544471 - DNA, 25 bp, Homo sapien
tctgcccctggccctaggcatagct

SEQ ID NO: 2544472 - DNA, 25 bp, Homo sapien
atcttcactccagccactatcttca

SEQ ID NO: 2544473 - DNA, 25 bp, Homo sapien
ctccagcctccatctttgtccttac

SEQ ID NO: 2544474 - DNA, 25 bp, Homo sapien
cttcatcttcactccagccactatc

SEQ ID NO: 2544475 - DNA, 25 bp, Homo sapien
catcttcactccagcctccatcttc

SEQ ID NO: 2544476 - DNA, 25 bp, Homo sapien
atctttatcctcacgccagcctctg

SEQ ID NO: 2544477 - DNA, 25 bp, Homo sapien
tatctttatcctcacgccagcctct

SEQ ID NO: 2544478 - DNA, 25 bp, Homo sapien
tctatcttcatcctcactccagcct

SEQ ID NO: 2544479 - DNA, 25 bp, Homo sapien
gcctccattttaattctcactccag

SEQ ID NO: 2544480 - DNA, 25 bp, Homo sapien
ccattttaattctcactccagcttc

SEQ ID NO: 2544481 - DNA, 25 bp, Homo sapien
attttaattctcactccagcttcta

SEQ ID NO: 2544482 - DNA, 25 bp, Homo sapien
aatccagtgccgaggctacatgtgg

SEQ ID NO: 2544483 - DNA, 25 bp, Homo sapien
ctacatgtggaagggaacgaggcag

SEQ ID NO: 2544484 - DNA, 25 bp, Homo sapien
gaggatgtggcaacaattctgcaga

SEQ ID NO: 2544485 - DNA, 25 bp, Homo sapien
ccgcagagcacagaatccagtgccg

SEQ ID NO: 2544486 - DNA, 25 bp, Homo sapien
gagcccctgggtaatcatttgtgag

SEQ ID NO: 2544487 - DNA, 25 bp, Homo sapien
acaagacaagcagccgaaggggcca

SEQ ID NO: 2544488 - DNA, 25 bp, Homo sapien
cccctgggtaatcatttgtgagtca

SEQ ID NO: 2544489 - DNA, 25 bp, Homo sapien
ccatggagcccctgggtaatcattt

SEQ ID NO: 2544490 - DNA, 25 bp, Homo sapien
ttaagcggattgctcttcccccttc

SEQ ID NO: 2544491 - DNA, 25 bp, Homo sapien
ccagccatcccactggatgcaaata

SEQ ID NO: 2544492 - DNA, 25 bp, Homo sapien
caaatattgagctgacggagggcgc

SEQ ID NO: 2544493 - DNA, 25 bp, Homo sapien
cggagggcgcggaggtttctgaggg

SEQ ID NO: 2544494 - DNA, 25 bp, Homo sapien
agactttgaggtgtagagtccataa

SEQ ID NO: 2544495 - DNA, 25 bp, Homo sapien
tcaaagttagactttgaggtgtaga

SEQ ID NO: 2544496 - DNA, 25 bp, Homo sapien
agttagactttgaggtgtagagtcc

SEQ ID NO: 2544497 - DNA, 25 bp, Homo sapien
tagactttgaggtgtagagtccata

SEQ ID NO: 2544498 - DNA, 25 bp, Homo sapien
ggcttttgtcgtaggagctttcctg

SEQ ID NO: 2544499 - DNA, 25 bp, Homo sapien
ctggcttttgtcgtaggagctttcc

SEQ ID NO: 2544500 - DNA, 25 bp, Homo sapien
tcgccttgccctggaagagatcacc

SEQ ID NO: 2544501 - DNA, 25 bp, Homo sapien
accacgatggctcccagacaatgtg

SEQ ID NO: 2544502 - DNA, 25 bp, Homo sapien
tcaactggatcctgctcctactctg

SEQ ID NO: 2544503 - DNA, 25 bp, Homo sapien
caactggatcctgctcctactctgt

SEQ ID NO: 2544504 - DNA, 25 bp, Homo sapien
atgcctctgccaggggcttgcggac

SEQ ID NO: 2544505 - DNA, 25 bp, Homo sapien
catgcctctgccaggggcttgcgga

SEQ ID NO: 2544506 - DNA, 25 bp, Homo sapien
ccatgcctctgccaggggcttgcgg

SEQ ID NO: 2544507 - DNA, 25 bp, Homo sapien
ctccatgcctctgccaggggcttgc

SEQ ID NO: 2544508 - DNA, 25 bp, Homo sapien
gctgacccacggcattcctctttgg

SEQ ID NO: 2544509 - DNA, 25 bp, Homo sapien
tctcaaggacgaggttgtaccggct

SEQ ID NO: 2544510 - DNA, 25 bp, Homo sapien
caacttcaggttgcctccaggagtc

SEQ ID NO: 2544511 - DNA, 25 bp, Homo sapien
gtaccggctctcaactgcaccagtt

SEQ ID NO: 2544512 - DNA, 25 bp, Homo sapien
gggtacagcaacaccgctgtccgtg

SEQ ID NO: 2544513 - DNA, 25 bp, Homo sapien
cacgtgacactgtttggatggatga

SEQ ID NO: 2544514 - DNA, 25 bp, Homo sapien
gatggatgatatgccgggagggaga

SEQ ID NO: 2544515 - DNA, 25 bp, Homo sapien
cgtgtaaagctgaccttccggtggg

SEQ ID NO: 2544516 - DNA, 25 bp, Homo sapien
agcagaaacatcctgaagtgggaag

SEQ ID NO: 2544517 - DNA, 25 bp, Homo sapien
catcaagcagaaacatcctgaagtg

SEQ ID NO: 2544518 - DNA, 25 bp, Homo sapien
tgcttcgggcacatcaagcagaaac

SEQ ID NO: 2544519 - DNA, 25 bp, Homo sapien
gggaaggactgcttcgggcacatca

SEQ ID NO: 2544520 - DNA, 25 bp, Homo sapien
atcacaatccaagttggcggcaccc

SEQ ID NO: 2544521 - DNA, 25 bp, Homo sapien
taactcgatccctagcatattggac

SEQ ID NO: 2544522 - DNA, 25 bp, Homo sapien
ccctagcatattggacaagttcctg

SEQ ID NO: 2544523 - DNA, 25 bp, Homo sapien
catggagataactcgatccctagca

SEQ ID NO: 2544524 - DNA, 25 bp, Homo sapien
tcgatccctagcatattggacaagt

SEQ ID NO: 2544525 - DNA, 25 bp, Homo sapien
tgatgatggtcttgcaatactgtgc

SEQ ID NO: 2544526 - DNA, 25 bp, Homo sapien
cccaggagtttgaatggtgttgcca

SEQ ID NO: 2544527 - DNA, 25 bp, Homo sapien
aatactgtgccgatgcttaatgcca

SEQ ID NO: 2544528 - DNA, 25 bp, Homo sapien
gagatgtctccagtagtcgaattca

SEQ ID NO: 2544529 - DNA, 25 bp, Homo sapien
cgaacgttgcaccttgatctgataa

SEQ ID NO: 2544530 - DNA, 25 bp, Homo sapien
cagagaggatcgagcatgaagcaaa

SEQ ID NO: 2544531 - DNA, 25 bp, Homo sapien
caacaatttaccagagtgcacgtcg

SEQ ID NO: 2544532 - DNA, 25 bp, Homo sapien
cgtatttacagggtgcgaggccaac

SEQ ID NO: 2544533 - DNA, 25 bp, Homo sapien
agtcctctgaagtagaggaacttct

SEQ ID NO: 2544534 - DNA, 25 bp, Homo sapien
aaggaggtcatctggacagcaaggt

SEQ ID NO: 2544535 - DNA, 25 bp, Homo sapien
tcctctgaagtagaggaacttctgg

SEQ ID NO: 2544536 - DNA, 25 bp, Homo sapien
tggaaggaggtcatctggacagcaa

SEQ ID NO: 2544537 - DNA, 25 bp, Homo sapien
caagccagcatgagattcaagtaca

SEQ ID NO: 2544538 - DNA, 25 bp, Homo sapien
cccgcaagccagcatgagattcaag

SEQ ID NO: 2544539 - DNA, 25 bp, Homo sapien
tgaggagaggcttcagccatcacag

SEQ ID NO: 2544540 - DNA, 25 bp, Homo sapien
agtgccccgcaagccagcatgagat

SEQ ID NO: 2544541 - DNA, 25 bp, Homo sapien
gctacaatgcctgtctctgaacaag

SEQ ID NO: 2544542 - DNA, 25 bp, Homo sapien
gattcgatttgctaagcctgtgcca

SEQ ID NO: 2544543 - DNA, 25 bp, Homo sapien
tttccaagctcgagtccagcagggc

SEQ ID NO: 2544544 - DNA, 25 bp, Homo sapien
cacgtggcaggatgataggcatatc

SEQ ID NO: 2544545 - DNA, 25 bp, Homo sapien
caaacgcttttcatggtgcccctta

SEQ ID NO: 2544546 - DNA, 25 bp, Homo sapien
gcttttcatggtgccccttaatgat

SEQ ID NO: 2544547 - DNA, 25 bp, Homo sapien
agaccaaacgcttttcatggtgccc

SEQ ID NO: 2544548 - DNA, 25 bp, Homo sapien
ttcatggtgccccttaatgatgaag

SEQ ID NO: 2544549 - DNA, 25 bp, Homo sapien
cagcaaggatgcattctcctggctt

SEQ ID NO: 2544550 - DNA, 25 bp, Homo sapien
ggcttcactccaacagctttattat

SEQ ID NO: 2544551 - DNA, 25 bp, Homo sapien
gatgcattctcctggcttcactcca

SEQ ID NO: 2544552 - DNA, 25 bp, Homo sapien
tttcatagcagcaaggatgcattct

SEQ ID NO: 2544553 - DNA, 25 bp, Homo sapien
gatagagccctgatcgcattccatc

SEQ ID NO: 2544554 - DNA, 25 bp, Homo sapien
gagccctgatcgcattccatctttt

SEQ ID NO: 2544555 - DNA, 25 bp, Homo sapien
tcagatagagccctgatcgcattcc

SEQ ID NO: 2544556 - DNA, 25 bp, Homo sapien
gatcgcattccatcttttgccaaaa

SEQ ID NO: 2544557 - DNA, 25 bp, Homo sapien
gaaaagatgcaagacgcattctgac

SEQ ID NO: 2544558 - DNA, 25 bp, Homo sapien
ccaagtaattcacaacacgtgagtg

SEQ ID NO: 2544559 - DNA, 25 bp, Homo sapien
ctgtggtcacattgagaaaagatgc

SEQ ID NO: 2544560 - DNA, 25 bp, Homo sapien
tgacacttaggtgaagcacagccac

SEQ ID NO: 2544561 - DNA, 25 bp, Homo sapien
atctgtgcagctggcgaatgggtgt

SEQ ID NO: 2544562 - DNA, 25 bp, Homo sapien
ctgggtgctccactgggcgagggcc

SEQ ID NO: 2544563 - DNA, 25 bp, Homo sapien
gggtccagaaagtccacatggcccc

SEQ ID NO: 2544564 - DNA, 25 bp, Homo sapien
gtgtcagctattgtcagctgggtgc

SEQ ID NO: 2544565 - DNA, 25 bp, Homo sapien
tgcatttcaagccagaccaccttgg

SEQ ID NO: 2544566 - DNA, 25 bp, Homo sapien
caccgccatcggtgaagctggaagg

SEQ ID NO: 2544567 - DNA, 25 bp, Homo sapien
aacgagcttcggtggtgactgcatc

SEQ ID NO: 2544568 - DNA, 25 bp, Homo sapien
tccctcacatccgaggagggtgaga

SEQ ID NO: 2544569 - DNA, 25 bp, Homo sapien
acccgtggcactgacaaatgcagcc

SEQ ID NO: 2544570 - DNA, 25 bp, Homo sapien
catcacccgtggcactgacaaatgc

SEQ ID NO: 2544571 - DNA, 25 bp, Homo sapien
tcacccgtggcactgacaaatgcag

SEQ ID NO: 2544572 - DNA, 25 bp, Homo sapien
cagcatcacccgtggcactgacaaa

SEQ ID NO: 2544573 - DNA, 25 bp, Homo sapien
aatgggaaagaggaatcagccgctt

SEQ ID NO: 2544574 - DNA, 25 bp, Homo sapien
gggaaagaggaatcagccgcttcag

SEQ ID NO: 2544575 - DNA, 25 bp, Homo sapien
tgggaaagaggaatcagccgcttca

SEQ ID NO: 2544576 - DNA, 25 bp, Homo sapien
agaatgggaaagaggaatcagccgc

SEQ ID NO: 2544577 - DNA, 25 bp, Homo sapien
agggcttcactgatcccgttttctg

SEQ ID NO: 2544578 - DNA, 25 bp, Homo sapien
gggcttcactgatcccgttttctgt

SEQ ID NO: 2544579 - DNA, 25 bp, Homo sapien
ggcttcactgatcccgttttctgtc

SEQ ID NO: 2544580 - DNA, 25 bp, Homo sapien
gaggtggcacggcttgactgatccc

SEQ ID NO: 2544581 - DNA, 25 bp, Homo sapien
gggcttgactgatcctgtgttctct

SEQ ID NO: 2544582 - DNA, 25 bp, Homo sapien
gggctgcccctttcgcaggtcctgg

SEQ ID NO: 2544583 - DNA, 25 bp, Homo sapien
ggctgcccctttcgcaggtcctggt

SEQ ID NO: 2544584 - DNA, 25 bp, Homo sapien
gggcttgactgatcccgtgttttct

SEQ ID NO: 2544585 - DNA, 25 bp, Homo sapien
gggcttcactgatcccatgtcctct

SEQ ID NO: 2544586 - DNA, 25 bp, Homo sapien
ttgcaggtcctggtacagaggcacc

SEQ ID NO: 2544587 - DNA, 25 bp, Homo sapien
tacagaggcggcagggcttcactga

SEQ ID NO: 2544588 - DNA, 25 bp, Homo sapien
tgttctgtccatcgcactgggctgc

SEQ ID NO: 2544589 - DNA, 25 bp, Homo sapien
gggcttcactgatccctgttctgtc

SEQ ID NO: 2544590 - DNA, 25 bp, Homo sapien
gatccctgttctgtccatcacactg

SEQ ID NO: 2544591 - DNA, 25 bp, Homo sapien
ctgttctgtccatcacactgggctg

SEQ ID NO: 2544592 - DNA, 25 bp, Homo sapien
actgatccctgttctgtccatcaca

SEQ ID NO: 2544593 - DNA, 25 bp, Homo sapien
cagaaataggatctccatatttgaa

SEQ ID NO: 2544594 - DNA, 25 bp, Homo sapien
tctgacatgttgctccggaggagac

SEQ ID NO: 2544595 - DNA, 25 bp, Homo sapien
actttcatacagaaataggatctcc

SEQ ID NO: 2544596 - DNA, 25 bp, Homo sapien
tgaccgagcccttccaggtactggg

SEQ ID NO: 2544597 - DNA, 25 bp, Homo sapien
ccttggagcgtgtctttcctggaag

SEQ ID NO: 2544598 - DNA, 25 bp, Homo sapien
ccagtttctgtcgtctgtgatattt

SEQ ID NO: 2544599 - DNA, 25 bp, Homo sapien
aatccagtttctgtcgtctgtgata

SEQ ID NO: 2544600 - DNA, 25 bp, Homo sapien
agttttaggagtggaccttggagcg

SEQ ID NO: 2544601 - DNA, 25 bp, Homo sapien
tttccaatctacaagctccagcgtg

SEQ ID NO: 2544602 - DNA, 25 bp, Homo sapien
cccacattctatctggtggcagaaa

SEQ ID NO: 2544603 - DNA, 25 bp, Homo sapien
gcaaaacaatctgtgcagccctatt

SEQ ID NO: 2544604 - DNA, 25 bp, Homo sapien
tccaggtctgataaggaatttccag

SEQ ID NO: 2544605 - DNA, 25 bp, Homo sapien
caccacgtgggacaagggatttcag

SEQ ID NO: 2544606 - DNA, 25 bp, Homo sapien
tccaatatgtcagtaacaccacgtg

SEQ ID NO: 2544607 - DNA, 25 bp, Homo sapien
ttcaggaccggattaccgcttgtgc

SEQ ID NO: 2544608 - DNA, 25 bp, Homo sapien
gatgtggacctcacgttctggcgga

SEQ ID NO: 2544609 - DNA, 25 bp, Homo sapien
gacaatgcctccacgtgcctataag

SEQ ID NO: 2544610 - DNA, 25 bp, Homo sapien
caggattcacagaagacagaggaca

SEQ ID NO: 2544611 - DNA, 25 bp, Homo sapien
gaacgtttacagctcggaacacaga

SEQ ID NO: 2544612 - DNA, 25 bp, Homo sapien
tgcctataagtggagcgtgctccgg

SEQ ID NO: 2544613 - DNA, 25 bp, Homo sapien
tgttgtcatcagcaacgcattttac

SEQ ID NO: 2544614 - DNA, 25 bp, Homo sapien
atctaaggcagtcgcagaggaaatg

SEQ ID NO: 2544615 - DNA, 25 bp, Homo sapien
cagcaacgcattttactttcggcat

SEQ ID NO: 2544616 - DNA, 25 bp, Homo sapien
cgaatctaaggcagtcgcagaggaa

SEQ ID NO: 2544617 - DNA, 25 bp, Homo sapien
gatgtttccccaaccaactgcgctt

SEQ ID NO: 2544618 - DNA, 25 bp, Homo sapien
cagaacctgccacgtgagcggtgtg

SEQ ID NO: 2544619 - DNA, 25 bp, Homo sapien
tagaacctgccacatgagctatctc

SEQ ID NO: 2544620 - DNA, 25 bp, Homo sapien
gagctggaccctcttttctgggttc

SEQ ID NO: 2544621 - DNA, 25 bp, Homo sapien
tatggtaatgttatctgctatggtt

SEQ ID NO: 2544622 - DNA, 25 bp, Homo sapien
tgagatagaggaagacatgatcttt

SEQ ID NO: 2544623 - DNA, 25 bp, Homo sapien
gggcctcttgctattcaagtgttta

SEQ ID NO: 2544624 - DNA, 25 bp, Homo sapien
tttcctttggagcaggcagtatggt

SEQ ID NO: 2544625 - DNA, 25 bp, Homo sapien
cagctgtgggtagagatagatcatt

SEQ ID NO: 2544626 - DNA, 25 bp, Homo sapien
gcagacgtctggtctctgagccacg

SEQ ID NO: 2544627 - DNA, 25 bp, Homo sapien
tgttcttagtcccatgtccagggtc

SEQ ID NO: 2544628 - DNA, 25 bp, Homo sapien
gggagcccagaatcgaaagccggat

SEQ ID NO: 2544629 - DNA, 25 bp, Homo sapien
cactggacagcacacatatgggaca

SEQ ID NO: 2544630 - DNA, 25 bp, Homo sapien
gacagctgctaaccatgtgtgacta

SEQ ID NO: 2544631 - DNA, 25 bp, Homo sapien
aaagccgcacagctgattagtagca

SEQ ID NO: 2544632 - DNA, 25 bp, Homo sapien
taagatttacccatagctgcgctgc

SEQ ID NO: 2544633 - DNA, 25 bp, Homo sapien
gaacagcataattgtgtagcagcac

SEQ ID NO: 2544634 - DNA, 25 bp, Homo sapien
tgaaataagccccttcgtgatcacc

SEQ ID NO: 2544635 - DNA, 25 bp, Homo sapien
cattcatccaaagcgacacatgtgg

SEQ ID NO: 2544636 - DNA, 25 bp, Homo sapien
cgtagaccacgccagtgaaataagc

SEQ ID NO: 2544637 - DNA, 25 bp, Homo sapien
gcaacactgttctaggtccaggtca

SEQ ID NO: 2544638 - DNA, 25 bp, Homo sapien
caccttgttgagctacagaatacca

SEQ ID NO: 2544639 - DNA, 25 bp, Homo sapien
tctccccagggatgcgtctgagttc

SEQ ID NO: 2544640 - DNA, 25 bp, Homo sapien
gaataccacgtgacatgacctaaga

SEQ ID NO: 2544641 - DNA, 25 bp, Homo sapien
tgctcctgtgtggatcagaatccat

SEQ ID NO: 2544642 - DNA, 25 bp, Homo sapien
gctgctcctgtgtggatcagaatcc

SEQ ID NO: 2544643 - DNA, 25 bp, Homo sapien
ctgctcctgtgtggatcagaatcca

SEQ ID NO: 2544644 - DNA, 25 bp, Homo sapien
ctgaaatctgcatttactaggttga

SEQ ID NO: 2544645 - DNA, 25 bp, Homo sapien
tttactgaaatctgcatttactagg

SEQ ID NO: 2544646 - DNA, 25 bp, Homo sapien
tttttaccctgagggtcattagtca

SEQ ID NO: 2544647 - DNA, 25 bp, Homo sapien
ctgagtttactgaaatctgcattta

SEQ ID NO: 2544648 - DNA, 25 bp, Homo sapien
atgaaatgtggtgggtgcttctagc

SEQ ID NO: 2544649 - DNA, 25 bp, Homo sapien
catgaaatgtggtgggtgcttctag

SEQ ID NO: 2544650 - DNA, 25 bp, Homo sapien
tgaaatgtggtgggtgcttctagca

SEQ ID NO: 2544651 - DNA, 25 bp, Homo sapien
tcatgaaatgtggtgggtgcttcta

SEQ ID NO: 2544652 - DNA, 25 bp, Homo sapien
ttagaaggccacttatcacaaggac

SEQ ID NO: 2544653 - DNA, 25 bp, Homo sapien
cagctgcagggcagttctgcacggc

SEQ ID NO: 2544654 - DNA, 25 bp, Homo sapien
ccagtgcaatctgtagtgggggtct

SEQ ID NO: 2544655 - DNA, 25 bp, Homo sapien
tcatccagccttgactctgtgcagc

SEQ ID NO: 2544656 - DNA, 25 bp, Homo sapien
tgataaagcctcgagatgatgaatt

SEQ ID NO: 2544657 - DNA, 25 bp, Homo sapien
ccttgataaagcctcgagatgatga

SEQ ID NO: 2544658 - DNA, 25 bp, Homo sapien
tgtaaccttgataaagcctcgagat

SEQ ID NO: 2544659 - DNA, 25 bp, Homo sapien
taaagcctcgagatgatgaattctg

SEQ ID NO: 2544660 - DNA, 25 bp, Homo sapien
cttattaaactttgtgtgatcaacc

SEQ ID NO: 2544661 - DNA, 25 bp, Homo sapien
caatgtatatttaagcagagagttt

SEQ ID NO: 2544662 - DNA, 25 bp, Homo sapien
tgtgatcaacccaaaggtaagctgc

SEQ ID NO: 2544663 - DNA, 25 bp, Homo sapien
tagaatcaatgtatatttaagcaga

SEQ ID NO: 2544664 - DNA, 25 bp, Homo sapien
tctgctggaccgattttcacttcgc

SEQ ID NO: 2544665 - DNA, 25 bp, Homo sapien
catgtgtctgctggaccgattttca

SEQ ID NO: 2544666 - DNA, 25 bp, Homo sapien
ctgaccggtgcagattgacaagtta

SEQ ID NO: 2544667 - DNA, 25 bp, Homo sapien
ttgacaagttaagcatgtgtctgct

SEQ ID NO: 2544668 - DNA, 25 bp, Homo sapien
aatcgacggttcactgatgtttcca

SEQ ID NO: 2544669 - DNA, 25 bp, Homo sapien
ggaaaatcgacggttcactgatgtt

SEQ ID NO: 2544670 - DNA, 25 bp, Homo sapien
caaaggaaaatcgacggttcactga

SEQ ID NO: 2544671 - DNA, 25 bp, Homo sapien
ctgcaaaggaaaatcgacggttcac

SEQ ID NO: 2544672 - DNA, 25 bp, Homo sapien
ttgctgcaaggatagcgtcccctga

SEQ ID NO: 2544673 - DNA, 25 bp, Homo sapien
caaggatagcgtcccctgatactga

SEQ ID NO: 2544674 - DNA, 25 bp, Homo sapien
gatagcgtcccctgatactgagcac

SEQ ID NO: 2544675 - DNA, 25 bp, Homo sapien
agcgtcccctgatactgagcactgt

SEQ ID NO: 2544676 - DNA, 25 bp, Homo sapien
acgaggactggttcgttggccgcgc

SEQ ID NO: 2544677 - DNA, 25 bp, Homo sapien
gcgaactccacagggacgaggactg

SEQ ID NO: 2544678 - DNA, 25 bp, Homo sapien
ttggccgcgcgctaccacaggcctg

SEQ ID NO: 2544679 - DNA, 25 bp, Homo sapien
ctgcgaactccacagggacgaggac

SEQ ID NO: 2544680 - DNA, 25 bp, Homo sapien
gtgacaaacgccttgctctgattcc

SEQ ID NO: 2544681 - DNA, 25 bp, Homo sapien
cacattgacattggggcctagttcc

SEQ ID NO: 2544682 - DNA, 25 bp, Homo sapien
tgtgagtgacaaacgccttgctctg

SEQ ID NO: 2544683 - DNA, 25 bp, Homo sapien
cctgtaccctgtgagtgacaaacgc

SEQ ID NO: 2544684 - DNA, 25 bp, Homo sapien
tacagaatggcttggcgagtcacag

SEQ ID NO: 2544685 - DNA, 25 bp, Homo sapien
gcaaattattactctccccaacgtg

SEQ ID NO: 2544686 - DNA, 25 bp, Homo sapien
gcaccacgtgcatccattacagaat

SEQ ID NO: 2544687 - DNA, 25 bp, Homo sapien
caccgaatggttctccagaggtctg

SEQ ID NO: 2544688 - DNA, 25 bp, Homo sapien
tagtttggataggactaccccttgc

SEQ ID NO: 2544689 - DNA, 25 bp, Homo sapien
cccagggcctcagcgttagtttgga

SEQ ID NO: 2544690 - DNA, 25 bp, Homo sapien
ccattacccagacaaaatgttgcca

SEQ ID NO: 2544691 - DNA, 25 bp, Homo sapien
ctgagaacgtgccacgggctgtcac

SEQ ID NO: 2544692 - DNA, 25 bp, Homo sapien
tgtcctctaggaaactgtggcaggc

SEQ ID NO: 2544693 - DNA, 25 bp, Homo sapien
gtcctctaggaaactgtggcaggcc

SEQ ID NO: 2544694 - DNA, 25 bp, Homo sapien
cctgtcctctaggaaactgtggcag

SEQ ID NO: 2544695 - DNA, 25 bp, Homo sapien
tcctctaggaaactgtggcaggcca

SEQ ID NO: 2544696 - DNA, 25 bp, Homo sapien
tgacagctcgtgactgcttttcctt

SEQ ID NO: 2544697 - DNA, 25 bp, Homo sapien
tggagatagattccttcagcttcgt

SEQ ID NO: 2544698 - DNA, 25 bp, Homo sapien
cttcagcttcgtagggcaattaatg

SEQ ID NO: 2544699 - DNA, 25 bp, Homo sapien
tcgtagggcaattaatgacagctcg

SEQ ID NO: 2544700 - DNA, 25 bp, Homo sapien
gcttctaatgtaaggatgtctaact

SEQ ID NO: 2544701 - DNA, 25 bp, Homo sapien
ggatgtctaactccgggacagaaag

SEQ ID NO: 2544702 - DNA, 25 bp, Homo sapien
tttgtcgaatacaaacagttcggct

SEQ ID NO: 2544703 - DNA, 25 bp, Homo sapien
cagttcggcttttgcaagacagaca

SEQ ID NO: 2544704 - DNA, 25 bp, Homo sapien
cggaggactcccctgcggctgcttg

SEQ ID NO: 2544705 - DNA, 25 bp, Homo sapien
ctgcttgggtaaatgggtctgagct

SEQ ID NO: 2544706 - DNA, 25 bp, Homo sapien
tctgagctgcagagccgtactactc

SEQ ID NO: 2544707 - DNA, 25 bp, Homo sapien
agagccgtactactctgacgagggt

SEQ ID NO: 2544708 - DNA, 25 bp, Homo sapien
taggctagacgaaaacaaaatacaa

SEQ ID NO: 2544709 - DNA, 25 bp, Homo sapien
gagtcaatatttaggctagacgaaa

SEQ ID NO: 2544710 - DNA, 25 bp, Homo sapien
caatatttaggctagacgaaaacaa

SEQ ID NO: 2544711 - DNA, 25 bp, Homo sapien
ctagagagagtcaatatttaggcta

SEQ ID NO: 2544712 - DNA, 25 bp, Homo sapien
gagagggaacatcgctttgctggac

SEQ ID NO: 2544713 - DNA, 25 bp, Homo sapien
tcgctttgctggaccgaaacattct

SEQ ID NO: 2544714 - DNA, 25 bp, Homo sapien
aagtcgctggcaggaactttaaggc

SEQ ID NO: 2544715 - DNA, 25 bp, Homo sapien
agaggcaagtcgctggcaggaactt

SEQ ID NO: 2544716 - DNA, 25 bp, Homo sapien
gcccaggacctgcagtcaaagtctt

SEQ ID NO: 2544717 - DNA, 25 bp, Homo sapien
agcccaggacctgcagtcaaagtct

SEQ ID NO: 2544718 - DNA, 25 bp, Homo sapien
caggacctgcagtcaaagtcttggc

SEQ ID NO: 2544719 - DNA, 25 bp, Homo sapien
ctgaagcagcccaggacctgcagtc

SEQ ID NO: 2544720 - DNA, 25 bp, Homo sapien
ccggcgagtgcctgttggtgatctc

SEQ ID NO: 2544721 - DNA, 25 bp, Homo sapien
gcgagtgcctgttggtgatctcggc

SEQ ID NO: 2544722 - DNA, 25 bp, Homo sapien
cggcgagtgcctgttggtgatctcg

SEQ ID NO: 2544723 - DNA, 25 bp, Homo sapien
ggccggcgagtgcctgttggtgatc

SEQ ID NO: 2544724 - DNA, 25 bp, Homo sapien
caagcagctttggaaacgccggctc

SEQ ID NO: 2544725 - DNA, 25 bp, Homo sapien
ctcaggatgaaaatctcctccagca

SEQ ID NO: 2544726 - DNA, 25 bp, Homo sapien
tcaggatgaaaatctcctccagcac

SEQ ID NO: 2544727 - DNA, 25 bp, Homo sapien
cagctttggaaacgccggctcctgg

SEQ ID NO: 2544728 - DNA, 25 bp, Homo sapien
tgtgcaaggcgtctgtccaggtcag

SEQ ID NO: 2544729 - DNA, 25 bp, Homo sapien
aagtgccccattggcggttcccaga

SEQ ID NO: 2544730 - DNA, 25 bp, Homo sapien
ggagggtgtctggatccaacgctct

SEQ ID NO: 2544731 - DNA, 25 bp, Homo sapien
aaaaattccagcgtgtgtgcaaggc

SEQ ID NO: 2544732 - DNA, 25 bp, Homo sapien
ggcaaaaaacgccagaggcgagtcc

SEQ ID NO: 2544733 - DNA, 25 bp, Homo sapien
ctctcagtgggtgacaaatccgcca

SEQ ID NO: 2544734 - DNA, 25 bp, Homo sapien
aggctgctggcaaaaaacgccagag

SEQ ID NO: 2544735 - DNA, 25 bp, Homo sapien
tccgccaaattgaatgctgacagca

SEQ ID NO: 2544736 - DNA, 25 bp, Homo sapien
gaggcaagttgtgcccatcccacgc

SEQ ID NO: 2544737 - DNA, 25 bp, Homo sapien
aagttgtgcccatcccacgcacact

SEQ ID NO: 2544738 - DNA, 25 bp, Homo sapien
gcaagttgtgcccatcccacgcaca

SEQ ID NO: 2544739 - DNA, 25 bp, Homo sapien
aggcaagttgtgcccatcccacgca

SEQ ID NO: 2544740 - DNA, 25 bp, Homo sapien
tcttcccgcctactgtaggtttctg

SEQ ID NO: 2544741 - DNA, 25 bp, Homo sapien
tccagaaaggactctcggtccaaat

SEQ ID NO: 2544742 - DNA, 25 bp, Homo sapien
actgtaggtttctgtgtagaaggcc

SEQ ID NO: 2544743 - DNA, 25 bp, Homo sapien
tgagtgacagctccgagtgcctctt

SEQ ID NO: 2544744 - DNA, 25 bp, Homo sapien
gtacccatgaagtaaatttgtgcag

SEQ ID NO: 2544745 - DNA, 25 bp, Homo sapien
tgtccgtatctgtacccatgaagta

SEQ ID NO: 2544746 - DNA, 25 bp, Homo sapien
cccatgaagtaaatttgtgcagtaa

SEQ ID NO: 2544747 - DNA, 25 bp, Homo sapien
aattttgttcatgtccgtatctgta

SEQ ID NO: 2544748 - DNA, 25 bp, Homo sapien
tgattgacgatgagcttctcctgtg

SEQ ID NO: 2544749 - DNA, 25 bp, Homo sapien
gttgattgacgatgagcttctcctg

SEQ ID NO: 2544750 - DNA, 25 bp, Homo sapien
ttgttgattgacgatgagcttctcc

SEQ ID NO: 2544751 - DNA, 25 bp, Homo sapien
gcattgttgattgacgatgagcttc

SEQ ID NO: 2544752 - DNA, 25 bp, Homo sapien
taacagtgtgtatcactctgcggca

SEQ ID NO: 2544753 - DNA, 25 bp, Homo sapien
gaatccccattaacatatgtggccc

SEQ ID NO: 2544754 - DNA, 25 bp, Homo sapien
gacttcattgtttgagaatccccat

SEQ ID NO: 2544755 - DNA, 25 bp, Homo sapien
tatgtggcccgtgttaataacagtg

SEQ ID NO: 2544756 - DNA, 25 bp, Homo sapien
cctccgggaagcagcatctcggccc

SEQ ID NO: 2544757 - DNA, 25 bp, Homo sapien
ggctgttgggaagtgtgatgtgatg

SEQ ID NO: 2544758 - DNA, 25 bp, Homo sapien
gtgcgctctccaatcctccgggaag

SEQ ID NO: 2544759 - DNA, 25 bp, Homo sapien
tgatgtgatgtggtactgtgcgctc

SEQ ID NO: 2544760 - DNA, 25 bp, Homo sapien
cagcccgtccgcaaattcaggcagg

SEQ ID NO: 2544761 - DNA, 25 bp, Homo sapien
ggaccctgtacttgtacagcccgtc

SEQ ID NO: 2544762 - DNA, 25 bp, Homo sapien
gcaggacatgcggtcgcagtctcac

SEQ ID NO: 2544763 - DNA, 25 bp, Homo sapien
ccccagggaccctgtacttgtacag

SEQ ID NO: 2544764 - DNA, 25 bp, Homo sapien
cctgtcagtcttaagaactttttct

SEQ ID NO: 2544765 - DNA, 25 bp, Homo sapien
ctgtcagtcttaagaactttttctc

SEQ ID NO: 2544766 - DNA, 25 bp, Homo sapien
tgtcagtcttaagaactttttctcc

SEQ ID NO: 2544767 - DNA, 25 bp, Homo sapien
gaaaagccagttacacacacaccga

SEQ ID NO: 2544768 - DNA, 25 bp, Homo sapien
gacgtttgcttcatgaggccaagaa

SEQ ID NO: 2544769 - DNA, 25 bp, Homo sapien
cagcttccccgaaaagaaagtctgg

SEQ ID NO: 2544770 - DNA, 25 bp, Homo sapien
tcacatggagcgagaagacgtttgc

SEQ ID NO: 2544771 - DNA, 25 bp, Homo sapien
gggcatcaagggcacaacgcaccgg

SEQ ID NO: 2544772 - DNA, 25 bp, Homo sapien
aggaaggatccgagagctctcccga

SEQ ID NO: 2544773 - DNA, 25 bp, Homo sapien
acaacgcaccggaggaaggatccga

SEQ ID NO: 2544774 - DNA, 25 bp, Homo sapien
gtgcaaaggccttatgaagaaaatc

SEQ ID NO: 2544775 - DNA, 25 bp, Homo sapien
tgggacacatggtctcaaatgactc

SEQ ID NO: 2544776 - DNA, 25 bp, Homo sapien
aaaatccttgcagcatctgaccatg

SEQ ID NO: 2544777 - DNA, 25 bp, Homo sapien
gaagccccagatacacgtacagtaa

SEQ ID NO: 2544778 - DNA, 25 bp, Homo sapien
tgaagtaccccgtgagttgctctgt

SEQ ID NO: 2544779 - DNA, 25 bp, Homo sapien
gaacccagctagaggattcacagag

SEQ ID NO: 2544780 - DNA, 25 bp, Homo sapien
actgggatgccaactaacacgtgga

SEQ ID NO: 2544781 - DNA, 25 bp, Homo sapien
gcgacatactcgaaatctgcagctc

SEQ ID NO: 2544782 - DNA, 25 bp, Homo sapien
cgtggagttccccaagactttgcaa

SEQ ID NO: 2544783 - DNA, 25 bp, Homo sapien
tcagcctcagaaaccgcacatggcc

SEQ ID NO: 2544784 - DNA, 25 bp, Homo sapien
tcaatccaggcaacatgcaagtttc

SEQ ID NO: 2544785 - DNA, 25 bp, Homo sapien
gaatttaaagtcttgcctgttctca

SEQ ID NO: 2544786 - DNA, 25 bp, Homo sapien
tcagtgcaccccagtcagttactga

SEQ ID NO: 2544787 - DNA, 25 bp, Homo sapien
ggctcttgatcgctgatggtctcga

SEQ ID NO: 2544788 - DNA, 25 bp, Homo sapien
atagttcaaatagcagccgttaata

SEQ ID NO: 2544789 - DNA, 25 bp, Homo sapien
cacgccattggctcttgatcgctga

SEQ ID NO: 2544790 - DNA, 25 bp, Homo sapien
cgctgatggtctcgatgatggtcat

SEQ ID NO: 2544791 - DNA, 25 bp, Homo sapien
aggaaaatccctgcgtggcctgcag

SEQ ID NO: 2544792 - DNA, 25 bp, Homo sapien
ggtagctccccagtactcaggaaaa

SEQ ID NO: 2544793 - DNA, 25 bp, Homo sapien
taagctgcgctgctacaggtatttt

SEQ ID NO: 2544794 - DNA, 25 bp, Homo sapien
ctgaagtcagatacatcgccaccgg

SEQ ID NO: 2544795 - DNA, 25 bp, Homo sapien
gggacagtgtcgacggagagtgtgc

SEQ ID NO: 2544796 - DNA, 25 bp, Homo sapien
cagtgtcgacggagagtgtgcctaa

SEQ ID NO: 2544797 - DNA, 25 bp, Homo sapien
gagagtgtgcctaaggccgcacgac

SEQ ID NO: 2544798 - DNA, 25 bp, Homo sapien
gagtgtgcctaaggccgcacgacaa

SEQ ID NO: 2544799 - DNA, 25 bp, Homo sapien
gaggcagtgttcctctcctcaacta

SEQ ID NO: 2544800 - DNA, 25 bp, Homo sapien
ttgccaccagaaacaagtgttagcc

SEQ ID NO: 2544801 - DNA, 25 bp, Homo sapien
atagttatgattggcctggaactgc

SEQ ID NO: 2544802 - DNA, 25 bp, Homo sapien
tagccggtctggtgttatttccttc

SEQ ID NO: 2544803 - DNA, 25 bp, Homo sapien
tcctgccaccatggcgtccctctgt

SEQ ID NO: 2544804 - DNA, 25 bp, Homo sapien
acggctgctcctgccaccatggcgt

SEQ ID NO: 2544805 - DNA, 25 bp, Homo sapien
gctgctcctgccaccatggcgtccc

SEQ ID NO: 2544806 - DNA, 25 bp, Homo sapien
accacggctgctcctgccaccatgg

SEQ ID NO: 2544807 - DNA, 25 bp, Homo sapien
ctgcacgtttctgcacgaggtcgca

SEQ ID NO: 2544808 - DNA, 25 bp, Homo sapien
caggtgcgtgtggccggcaacatca

SEQ ID NO: 2544809 - DNA, 25 bp, Homo sapien
gggagcgagtgctctggaatcaagt

SEQ ID NO: 2544810 - DNA, 25 bp, Homo sapien
cgtgtggccggcaacatcacgaggg

SEQ ID NO: 2544811 - DNA, 25 bp, Homo sapien
tttaaagctgggttattctggcact

SEQ ID NO: 2544812 - DNA, 25 bp, Homo sapien
ttaaagctgggttattctggcactt

SEQ ID NO: 2544813 - DNA, 25 bp, Homo sapien
aaagctgggttattctggcacttcc

SEQ ID NO: 2544814 - DNA, 25 bp, Homo sapien
taaagctgggttattctggcacttc

SEQ ID NO: 2544815 - DNA, 25 bp, Homo sapien
ccaaggccacacaaattcagggaga

SEQ ID NO: 2544816 - DNA, 25 bp, Homo sapien
gaaagctatttcctgtgtcggtcac

SEQ ID NO: 2544817 - DNA, 25 bp, Homo sapien
ccagggataagggtggcacagacac

SEQ ID NO: 2544818 - DNA, 25 bp, Homo sapien
gagaactctctctgaggagcgggct

SEQ ID NO: 2544819 - DNA, 25 bp, Homo sapien
cgccaagggctgctcgacagatgag

SEQ ID NO: 2544820 - DNA, 25 bp, Homo sapien
gacgccaagggctgctcgacagatg

SEQ ID NO: 2544821 - DNA, 25 bp, Homo sapien
gctgctcgacagatgagctccaact

SEQ ID NO: 2544822 - DNA, 25 bp, Homo sapien
caagggctgctcgacagatgagctc

SEQ ID NO: 2544823 - DNA, 25 bp, Homo sapien
tggtgtgaaccaaggaggctgccat

SEQ ID NO: 2544824 - DNA, 25 bp, Homo sapien
aatgcaggggaagtccacaaacaac

SEQ ID NO: 2544825 - DNA, 25 bp, Homo sapien
agcaccaatgcaggggaagtccaca

SEQ ID NO: 2544826 - DNA, 25 bp, Homo sapien
acgccctgagagcaccaatgcaggg

SEQ ID NO: 2544827 - DNA, 25 bp, Homo sapien
catcagtgacaagtgtccatgggac

SEQ ID NO: 2544828 - DNA, 25 bp, Homo sapien
gttctgggctttacattaggactcc

SEQ ID NO: 2544829 - DNA, 25 bp, Homo sapien
tggctaagtactaccggaccagagc

SEQ ID NO: 2544830 - DNA, 25 bp, Homo sapien
cacaggcctatactcatggaagggc

SEQ ID NO: 2544831 - DNA, 25 bp, Homo sapien
tcacaagtaatatgtttatttttaa

SEQ ID NO: 2544832 - DNA, 25 bp, Homo sapien
gatcacaagtaatatgtttattttt

SEQ ID NO: 2544833 - DNA, 25 bp, Homo sapien
tgtctttttcgtatcagaaaaggtg

SEQ ID NO: 2544834 - DNA, 25 bp, Homo sapien
tttttcgtatcagaaaaggtgctgt

SEQ ID NO: 2544835 - DNA, 25 bp, Homo sapien
tcttgtctttttcgtatcagaaaag

SEQ ID NO: 2544836 - DNA, 25 bp, Homo sapien
tatcttgtctttttcgtatcagaaa

SEQ ID NO: 2544837 - DNA, 25 bp, Homo sapien
aggtgcttgtctgtcaaggacgtcc

SEQ ID NO: 2544838 - DNA, 25 bp, Homo sapien
ctggacgggcgtggagaaggtgctt

SEQ ID NO: 2544839 - DNA, 25 bp, Homo sapien
ccgtaaggagcggtggctgcagcag

SEQ ID NO: 2544840 - DNA, 25 bp, Homo sapien
gaagactgagctggacgggcgtgga

SEQ ID NO: 2544841 - DNA, 25 bp, Homo sapien
ggatgagaagagaggcctgcttgtc

SEQ ID NO: 2544842 - DNA, 25 bp, Homo sapien
ctgggatgagaagagaggcctgctt

SEQ ID NO: 2544843 - DNA, 25 bp, Homo sapien
tgggatgagaagagaggcctgcttg

SEQ ID NO: 2544844 - DNA, 25 bp, Homo sapien
atgagaagagaggcctgcttgtctc

SEQ ID NO: 2544845 - DNA, 25 bp, Homo sapien
ctgaaaaccgttcatgatgtaagga

SEQ ID NO: 2544846 - DNA, 25 bp, Homo sapien
tggaaggagcggtggacaggcagct

SEQ ID NO: 2544847 - DNA, 25 bp, Homo sapien
gcagctcgggacaggccatccacgt

SEQ ID NO: 2544848 - DNA, 25 bp, Homo sapien
cgtgaaaacacctccgctcactcag

SEQ ID NO: 2544849 - DNA, 25 bp, Homo sapien
gggacaggccatccacgtgaaaaca

SEQ ID NO: 2544850 - DNA, 25 bp, Homo sapien
caaaagggacaggatgctggctctt

SEQ ID NO: 2544851 - DNA, 25 bp, Homo sapien
tggctattttcaaaagggacaggat

SEQ ID NO: 2544852 - DNA, 25 bp, Homo sapien
gctattttcaaaagggacaggatgc

SEQ ID NO: 2544853 - DNA, 25 bp, Homo sapien
aaagggacaggatgctggctcttac

SEQ ID NO: 2544854 - DNA, 25 bp, Homo sapien
tgtgtgactgctcatccatccgatg

SEQ ID NO: 2544855 - DNA, 25 bp, Homo sapien
ttatggcactctgcatggacttggg

SEQ ID NO: 2544856 - DNA, 25 bp, Homo sapien
tccgatggctttgatagacaccagt

SEQ ID NO: 2544857 - DNA, 25 bp, Homo sapien
gcagctgagtatgcaaattccaggc

SEQ ID NO: 2544858 - DNA, 25 bp, Homo sapien
cacagcgacagatcggcagcatggt

SEQ ID NO: 2544859 - DNA, 25 bp, Homo sapien
tgatcccaatcagcaagtactgcgg

SEQ ID NO: 2544860 - DNA, 25 bp, Homo sapien
gatacttgcaaagatctcgctgatc

SEQ ID NO: 2544861 - DNA, 25 bp, Homo sapien
gtagacgacgttgccgatggtctga

SEQ ID NO: 2544862 - DNA, 25 bp, Homo sapien
catggcatagcacacctatttcact

SEQ ID NO: 2544863 - DNA, 25 bp, Homo sapien
ttcacttcggctttttacagcatct

SEQ ID NO: 2544864 - DNA, 25 bp, Homo sapien
aggactaataggcccccagccttca

SEQ ID NO: 2544865 - DNA, 25 bp, Homo sapien
tggaggtcatggcatagcacaccta

SEQ ID NO: 2544866 - DNA, 25 bp, Homo sapien
aaaagtcctactgtagaattaacag

SEQ ID NO: 2544867 - DNA, 25 bp, Homo sapien
agaattaacagtagtgctattttac

SEQ ID NO: 2544868 - DNA, 25 bp, Homo sapien
ctcgtttgtctcttacaaaggggag

SEQ ID NO: 2544869 - DNA, 25 bp, Homo sapien
cctactgtagaattaacagtagtgc

SEQ ID NO: 2544870 - DNA, 25 bp, Homo sapien
ccaacagcaggtaatactgagatgt

SEQ ID NO: 2544871 - DNA, 25 bp, Homo sapien
caacagcaggtaatactgagatgtt

SEQ ID NO: 2544872 - DNA, 25 bp, Homo sapien
gcaaggacagcaaactatttagagc

SEQ ID NO: 2544873 - DNA, 25 bp, Homo sapien
cctccacgggagaaacataaacgca

SEQ ID NO: 2544874 - DNA, 25 bp, Homo sapien
agagcccttagttgttctggaaagg

SEQ ID NO: 2544875 - DNA, 25 bp, Homo sapien
aaacataaacgcagacccaggcaag

SEQ ID NO: 2544876 - DNA, 25 bp, Homo sapien
taaataggcctgattattggtgagg

SEQ ID NO: 2544877 - DNA, 25 bp, Homo sapien
ctgattattggtgaggctgttggca

SEQ ID NO: 2544878 - DNA, 25 bp, Homo sapien
tgttggcagagagatgagcagcggc

SEQ ID NO: 2544879 - DNA, 25 bp, Homo sapien
acagactctgaagactaaggatgaa

SEQ ID NO: 2544880 - DNA, 25 bp, Homo sapien
gacttggagacaactggcagagctg

SEQ ID NO: 2544881 - DNA, 25 bp, Homo sapien
ccgggacgacacgacgaattggaca

SEQ ID NO: 2544882 - DNA, 25 bp, Homo sapien
tcttgaggcctacaacatgtccggg

SEQ ID NO: 2544883 - DNA, 25 bp, Homo sapien
gctctcaacgatgccacatgcgcta

SEQ ID NO: 2544884 - DNA, 25 bp, Homo sapien
gtctggcacttgtatcctgcacaaa

SEQ ID NO: 2544885 - DNA, 25 bp, Homo sapien
ggcctgctagcgctttttaaagaca

SEQ ID NO: 2544886 - DNA, 25 bp, Homo sapien
taaagacagaactgacggagtgcaa

SEQ ID NO: 2544887 - DNA, 25 bp, Homo sapien
acacatatcgaaaccaccagaatgg

SEQ ID NO: 2544888 - DNA, 25 bp, Homo sapien
taaaggattagtgctgtaaaataac

SEQ ID NO: 2544889 - DNA, 25 bp, Homo sapien
gacatgcacttcctgaacaacctgg

SEQ ID NO: 2544890 - DNA, 25 bp, Homo sapien
gtaaaataactgatacacatcctct

SEQ ID NO: 2544891 - DNA, 25 bp, Homo sapien
gcacgactgcgtgtgagcactatat

SEQ ID NO: 2544892 - DNA, 25 bp, Homo sapien
caaaggccgagcacatgacaaagaa

SEQ ID NO: 2544893 - DNA, 25 bp, Homo sapien
aaagaacatgcccacggcgatcctc

SEQ ID NO: 2544894 - DNA, 25 bp, Homo sapien
gtcttctcaaaatgggatcgaccag

SEQ ID NO: 2544895 - DNA, 25 bp, Homo sapien
tttgtccttcagagggatgagcagg

SEQ ID NO: 2544896 - DNA, 25 bp, Homo sapien
ctgggaaaagatttctttccaaatg

SEQ ID NO: 2544897 - DNA, 25 bp, Homo sapien
tccaaatgaatctgcatttgctttt

SEQ ID NO: 2544898 - DNA, 25 bp, Homo sapien
tgggaaaagatttctttccaaatga

SEQ ID NO: 2544899 - DNA, 25 bp, Homo sapien
gatttctttccaaatgaatctgcat

SEQ ID NO: 2544900 - DNA, 25 bp, Homo sapien
atttgaaatttctggaatcctcaaa

SEQ ID NO: 2544901 - DNA, 25 bp, Homo sapien
tctgtaaaacatatgttgtctgcat

SEQ ID NO: 2544902 - DNA, 25 bp, Homo sapien
ctctgtaaaacatatgttgtctgca

SEQ ID NO: 2544903 - DNA, 25 bp, Homo sapien
actctgtaaaacatatgttgtctgc

SEQ ID NO: 2544904 - DNA, 25 bp, Homo sapien
taagctagactcagatgcgacacac

SEQ ID NO: 2544905 - DNA, 25 bp, Homo sapien
tatatgtggaccaactgtgctctca

SEQ ID NO: 2544906 - DNA, 25 bp, Homo sapien
gaatggccagttatccaaaggagaa

SEQ ID NO: 2544907 - DNA, 25 bp, Homo sapien
cagacaggtcaatgatttggtcatc

SEQ ID NO: 2544908 - DNA, 25 bp, Homo sapien
ttggaaatacactgtccagtaaggt

SEQ ID NO: 2544909 - DNA, 25 bp, Homo sapien
gccaagaaaacagggacaatcttga

SEQ ID NO: 2544910 - DNA, 25 bp, Homo sapien
ccagtaaggtatcaaagccaagaaa

SEQ ID NO: 2544911 - DNA, 25 bp, Homo sapien
gggacaatcttgaccagagctttca

SEQ ID NO: 2544912 - DNA, 25 bp, Homo sapien
ctgtaaatggcccaccatgagacat

SEQ ID NO: 2544913 - DNA, 25 bp, Homo sapien
cagactttgtttagaagattgctga

SEQ ID NO: 2544914 - DNA, 25 bp, Homo sapien
caaacagactttgtttagaagattg

SEQ ID NO: 2544915 - DNA, 25 bp, Homo sapien
gactttgtttagaagattgctgaaa

SEQ ID NO: 2544916 - DNA, 25 bp, Homo sapien
gaatcaaacagactttgtttagaag

SEQ ID NO: 2544917 - DNA, 25 bp, Homo sapien
gaaaagagtccactggttctcacgg

SEQ ID NO: 2544918 - DNA, 25 bp, Homo sapien
gagctccagtttcaggacgcctgtg

SEQ ID NO: 2544919 - DNA, 25 bp, Homo sapien
cccacacaagttgacgagctccagt

SEQ ID NO: 2544920 - DNA, 25 bp, Homo sapien
cacgaagccacggtcacaagtgaca

SEQ ID NO: 2544921 - DNA, 25 bp, Homo sapien
cagggcccttatcatgtacctggca

SEQ ID NO: 2544922 - DNA, 25 bp, Homo sapien
gatgaatccatctccgctgtaaaaa

SEQ ID NO: 2544923 - DNA, 25 bp, Homo sapien
gaaagctgggcttcgcaagatcagt

SEQ ID NO: 2544924 - DNA, 25 bp, Homo sapien
ttttaaggcaccctcgtcacagtgg

SEQ ID NO: 2544925 - DNA, 25 bp, Homo sapien
gaagtttcaatctaccacgtggaag

SEQ ID NO: 2544926 - DNA, 25 bp, Homo sapien
gagtgggcccgcagaagaatgtcca

SEQ ID NO: 2544927 - DNA, 25 bp, Homo sapien
tattagacacattcgctacggctcc

SEQ ID NO: 2544928 - DNA, 25 bp, Homo sapien
tcatgggactttggtgctaacactg

SEQ ID NO: 2544929 - DNA, 25 bp, Homo sapien
cctgaccgccgtatgatggacctga

SEQ ID NO: 2544930 - DNA, 25 bp, Homo sapien
gacctgaccgccgtatgatggacct

SEQ ID NO: 2544931 - DNA, 25 bp, Homo sapien
acctgaccgccgtatgatggacctg

SEQ ID NO: 2544932 - DNA, 25 bp, Homo sapien
ctgaccgccgtatgatggacctgac

SEQ ID NO: 2544933 - DNA, 25 bp, Homo sapien
ctgaccgctgtatgatggagcccat

SEQ ID NO: 2544934 - DNA, 25 bp, Homo sapien
acctgaccgctgtatgatggagccc

SEQ ID NO: 2544935 - DNA, 25 bp, Homo sapien
cctgaccgctgtatgatggagccca

SEQ ID NO: 2544936 - DNA, 25 bp, Homo sapien
taagatgggataataagaccgcacc

SEQ ID NO: 2544937 - DNA, 25 bp, Homo sapien
ggtactgacagcataagcaactgct

SEQ ID NO: 2544938 - DNA, 25 bp, Homo sapien
gagcttccgtctacactagcagtga

SEQ ID NO: 2544939 - DNA, 25 bp, Homo sapien
taatctggcaccaaaggagcttccg

SEQ ID NO: 2544940 - DNA, 25 bp, Homo sapien
gatcgctcccaggttaatgctccaa

SEQ ID NO: 2544941 - DNA, 25 bp, Homo sapien
tgaacatgtcggtgaaggcactgcc

SEQ ID NO: 2544942 - DNA, 25 bp, Homo sapien
gcttggtgatgaaaacgctctggcc

SEQ ID NO: 2544943 - DNA, 25 bp, Homo sapien
taggcaatgccacctaacgacagga

SEQ ID NO: 2544944 - DNA, 25 bp, Homo sapien
gtttacagaaacattcacggatctc

SEQ ID NO: 2544945 - DNA, 25 bp, Homo sapien
cagttgctaggtaggtttcacttaa

SEQ ID NO: 2544946 - DNA, 25 bp, Homo sapien
caaggatgaaaaccatatacggtca

SEQ ID NO: 2544947 - DNA, 25 bp, Homo sapien
tcacaacctttaagaagcgcaacac

SEQ ID NO: 2544948 - DNA, 25 bp, Homo sapien
ctcctatcagaatgtttcccagagg

SEQ ID NO: 2544949 - DNA, 25 bp, Homo sapien
tgtctctcctatcagaatgtttccc

SEQ ID NO: 2544950 - DNA, 25 bp, Homo sapien
tcagaatgtttcccagaggctctac

SEQ ID NO: 2544951 - DNA, 25 bp, Homo sapien
tcaccccattgtctctcctatcaga

SEQ ID NO: 2544952 - DNA, 25 bp, Homo sapien
tataatacttggtggccacgtcctt

SEQ ID NO: 2544953 - DNA, 25 bp, Homo sapien
tgctattgctcttaaaggcggccta

SEQ ID NO: 2544954 - DNA, 25 bp, Homo sapien
tattttctgaaacgatctgactttg

SEQ ID NO: 2544955 - DNA, 25 bp, Homo sapien
taaaggcggcctattctgcatataa

SEQ ID NO: 2544956 - DNA, 25 bp, Homo sapien
ttcatctgagctttccgacccaacc

SEQ ID NO: 2544957 - DNA, 25 bp, Homo sapien
tcttggcagttacagttgcagggga

SEQ ID NO: 2544958 - DNA, 25 bp, Homo sapien
gggagcagcttgatgctaacttgat

SEQ ID NO: 2544959 - DNA, 25 bp, Homo sapien
atctgagctttccgacccaacctag

SEQ ID NO: 2544960 - DNA, 25 bp, Homo sapien
cgttcaggaatagcaccaggttgga

SEQ ID NO: 2544961 - DNA, 25 bp, Homo sapien
ctccgaacggcgagcccaggtaggt

SEQ ID NO: 2544962 - DNA, 25 bp, Homo sapien
ccaggttggacgtgatgccgtagaa

SEQ ID NO: 2544963 - DNA, 25 bp, Homo sapien
ccaggtaggtgaggcccatgaagag

SEQ ID NO: 2544964 - DNA, 25 bp, Homo sapien
gcgcgccggcccgcgaacgccccag

SEQ ID NO: 2544965 - DNA, 25 bp, Homo sapien
cggcccgcgaacgccccagccgccg

SEQ ID NO: 2544966 - DNA, 25 bp, Homo sapien
gccgggtcacctgtcccagaaccca

SEQ ID NO: 2544967 - DNA, 25 bp, Homo sapien
tgcctcgccccgccgccgggtcacc

SEQ ID NO: 2544968 - DNA, 25 bp, Homo sapien
gacgccgccagctgcctcgccccgc

SEQ ID NO: 2544969 - DNA, 25 bp, Homo sapien
gcgacgccgccagctgcctcgcccc

SEQ ID NO: 2544970 - DNA, 25 bp, Homo sapien
tcattagccatagtacagccacagg

SEQ ID NO: 2544971 - DNA, 25 bp, Homo sapien
agatccctagggagggactcggata

SEQ ID NO: 2544972 - DNA, 25 bp, Homo sapien
ggagggactcggataggccccctca

SEQ ID NO: 2544973 - DNA, 25 bp, Homo sapien
cacctttgtgcatcaggccatagca

SEQ ID NO: 2544974 - DNA, 25 bp, Homo sapien
tgtctcctttgcagggacgaccgtc

SEQ ID NO: 2544975 - DNA, 25 bp, Homo sapien
acgaccgtctttgggatgagcggct

SEQ ID NO: 2544976 - DNA, 25 bp, Homo sapien
tgccatgcactgttaagctcactgt

SEQ ID NO: 2544977 - DNA, 25 bp, Homo sapien
taaacctctgatccttacggctgtg

SEQ ID NO: 2544978 - DNA, 25 bp, Homo sapien
tgcaaagttaagaattgggtctgca

SEQ ID NO: 2544979 - DNA, 25 bp, Homo sapien
ctgcaaagttaagaattgggtctgc

SEQ ID NO: 2544980 - DNA, 25 bp, Homo sapien
tgtagtggtgctcactggtagtccc

SEQ ID NO: 2544981 - DNA, 25 bp, Homo sapien
tgagggcagagctctaatagcctaa

SEQ ID NO: 2544982 - DNA, 25 bp, Homo sapien
gaagccaaaagatgcaactaacagg

SEQ ID NO: 2544983 - DNA, 25 bp, Homo sapien
catcagttttagagaggacaccatc

SEQ ID NO: 2544984 - DNA, 25 bp, Homo sapien
cttccagagccggaggaagggccac

SEQ ID NO: 2544985 - DNA, 25 bp, Homo sapien
tcccagatgtctgtcttccagagcc

SEQ ID NO: 2544986 - DNA, 25 bp, Homo sapien
ttccagagccggaggaagggccact

SEQ ID NO: 2544987 - DNA, 25 bp, Homo sapien
atgtctgtcttccagagccggagga

SEQ ID NO: 2544988 - DNA, 25 bp, Homo sapien
cactctgtgacaccgcgagcccaga

SEQ ID NO: 2544989 - DNA, 25 bp, Homo sapien
ctgacaccgcgagcccggacgtctg

SEQ ID NO: 2544990 - DNA, 25 bp, Homo sapien
tgacaccgcgagcccggacgtctgt

SEQ ID NO: 2544991 - DNA, 25 bp, Homo sapien
tgtgacaccgcgagcccggacgtct

SEQ ID NO: 2544992 - DNA, 25 bp, Homo sapien
acactgcgatcccagacgtctgtgc

SEQ ID NO: 2544993 - DNA, 25 bp, Homo sapien
gacactgcgatcccagacgtctgtg

SEQ ID NO: 2544994 - DNA, 25 bp, Homo sapien
catctgtcttccagagcttccgtgg

SEQ ID NO: 2544995 - DNA, 25 bp, Homo sapien
acaccgggagcccagacatctgtct

SEQ ID NO: 2544996 - DNA, 25 bp, Homo sapien
gagcttccgtggcttaggccacaga

SEQ ID NO: 2544997 - DNA, 25 bp, Homo sapien
tcttccagagcttccgtggcttagg

SEQ ID NO: 2544998 - DNA, 25 bp, Homo sapien
tgcaaggtgttaaaacttctgggcc

SEQ ID NO: 2544999 - DNA, 25 bp, Homo sapien
tggttcaaccactcataagctgtag

SEQ ID NO: 2545000 - DNA, 25 bp, Homo sapien
cagggatgtcctatacgttgcaagg

SEQ ID NO: 2545001 - DNA, 25 bp, Homo sapien
ggcctagttgtgaaatattgacgac

SEQ ID NO: 2545002 - DNA, 25 bp, Homo sapien
caggatggacttttatatcttgata

SEQ ID NO: 2545003 - DNA, 25 bp, Homo sapien
gccctccaggatggacttttatatc

SEQ ID NO: 2545004 - DNA, 25 bp, Homo sapien
ctgcggagccgaatgtgccctccag

SEQ ID NO: 2545005 - DNA, 25 bp, Homo sapien
gaagcctgcggagccgaatgtgccc

SEQ ID NO: 2545006 - DNA, 25 bp, Homo sapien
cactgacggtggttatcccatgtca

SEQ ID NO: 2545007 - DNA, 25 bp, Homo sapien
tgccactgacggtggttatcccatg

SEQ ID NO: 2545008 - DNA, 25 bp, Homo sapien
acctgccactgacggtggttatccc

SEQ ID NO: 2545009 - DNA, 25 bp, Homo sapien
catgctgcgtagggaggccggagac

SEQ ID NO: 2545010 - DNA, 25 bp, Homo sapien
gcagccaacccggtgttccgtgaag

SEQ ID NO: 2545011 - DNA, 25 bp, Homo sapien
gtgaagccctgatttcccaatgaag

SEQ ID NO: 2545012 - DNA, 25 bp, Homo sapien
ctgtgggacggaacccgaggtctct

SEQ ID NO: 2545013 - DNA, 25 bp, Homo sapien
catcactggtttccatgggagcgga

SEQ ID NO: 2545014 - DNA, 25 bp, Homo sapien
aaaatctctgccaaagaccccggag

SEQ ID NO: 2545015 - DNA, 25 bp, Homo sapien
ggatgttctcctccaaaatctctgc

SEQ ID NO: 2545016 - DNA, 25 bp, Homo sapien
gagcagtgaggactggatgttctcc

SEQ ID NO: 2545017 - DNA, 25 bp, Homo sapien
gaccccggagaccaccttcaactga

SEQ ID NO: 2545018 - DNA, 25 bp, Homo sapien
gacacttggtgaaggagttccccaa

SEQ ID NO: 2545019 - DNA, 25 bp, Homo sapien
aaatacgtaaatctggagttcccat

SEQ ID NO: 2545020 - DNA, 25 bp, Homo sapien
caaatacgtaaatctggagttccca

SEQ ID NO: 2545021 - DNA, 25 bp, Homo sapien
cctggacacttggtgaaggagttcc

SEQ ID NO: 2545022 - DNA, 25 bp, Homo sapien
tgctgactgcgaggtgcctgtcaga

SEQ ID NO: 2545023 - DNA, 25 bp, Homo sapien
gggcctggcttgtgccgctgtgtgc

SEQ ID NO: 2545024 - DNA, 25 bp, Homo sapien
gcacgtggaatgctggctgatgcca

SEQ ID NO: 2545025 - DNA, 25 bp, Homo sapien
tgtcagacgacacactgtaagtttt

SEQ ID NO: 2545026 - DNA, 25 bp, Homo sapien
tgtgggatgaagtttgcttagtcct

SEQ ID NO: 2545027 - DNA, 25 bp, Homo sapien
ctgagtgtgggatgaagtttgctta

SEQ ID NO: 2545028 - DNA, 25 bp, Homo sapien
gggatgaagtttgcttagtcctgca

SEQ ID NO: 2545029 - DNA, 25 bp, Homo sapien
agtgtgggatgaagtttgcttagtc

SEQ ID NO: 2545030 - DNA, 25 bp, Homo sapien
tcttgttccgcaggagtagtggcag

SEQ ID NO: 2545031 - DNA, 25 bp, Homo sapien
ccagaagtccttttgcgatgagcag

SEQ ID NO: 2545032 - DNA, 25 bp, Homo sapien
ccttctaaggggctcgggcatattt

SEQ ID NO: 2545033 - DNA, 25 bp, Homo sapien
gagatggagacggtgaatgtgtgcc

SEQ ID NO: 2545034 - DNA, 25 bp, Homo sapien
gcacttgacggtgtgcctgtcttgc

SEQ ID NO: 2545035 - DNA, 25 bp, Homo sapien
ttgacggtgtgcctgtcttgcagct

SEQ ID NO: 2545036 - DNA, 25 bp, Homo sapien
acttgacggtgtgcctgtcttgcag

SEQ ID NO: 2545037 - DNA, 25 bp, Homo sapien
gggcacttgacggtgtgcctgtctt

SEQ ID NO: 2545038 - DNA, 25 bp, Homo sapien
agatgctcacacgcttactacagaa

SEQ ID NO: 2545039 - DNA, 25 bp, Homo sapien
tgctcacacgcttactacagaaaga

SEQ ID NO: 2545040 - DNA, 25 bp, Homo sapien
cagggctggcgttgttccagatgct

SEQ ID NO: 2545041 - DNA, 25 bp, Homo sapien
ggtcccccagcaggcgccagtgcct

SEQ ID NO: 2545042 - DNA, 25 bp, Homo sapien
gcgtcccctcctgttcggtgcagag

SEQ ID NO: 2545043 - DNA, 25 bp, Homo sapien
ctgcagatgggcgtcccctcctgtt

SEQ ID NO: 2545044 - DNA, 25 bp, Homo sapien
actatgggggcctgaccctgcagat

SEQ ID NO: 2545045 - DNA, 25 bp, Homo sapien
ccctcctgttcggtgcagagctcat

SEQ ID NO: 2545046 - DNA, 25 bp, Homo sapien
tgggctctgtatggtggctggcgtt

SEQ ID NO: 2545047 - DNA, 25 bp, Homo sapien
agactggcagctcagctaggtgctg

SEQ ID NO: 2545048 - DNA, 25 bp, Homo sapien
ctacccaaggcggaagactggcagc

SEQ ID NO: 2545049 - DNA, 25 bp, Homo sapien
acccaaggcggaagactggcagctc

SEQ ID NO: 2545050 - DNA, 25 bp, Homo sapien
ttttttttatgcacgataacagatt

SEQ ID NO: 2545051 - DNA, 25 bp, Homo sapien
agtgtttgccattgtgtgcactgat

SEQ ID NO: 2545052 - DNA, 25 bp, Homo sapien
ctcagtgtttgccattgtgtgcact

SEQ ID NO: 2545053 - DNA, 25 bp, Homo sapien
ccattgtgtgcactgatgagctaat

SEQ ID NO: 2545054 - DNA, 25 bp, Homo sapien
gccattgtgtgcactgatgagctaa

SEQ ID NO: 2545055 - DNA, 25 bp, Homo sapien
ggagaggcaagacttctggaggctt

SEQ ID NO: 2545056 - DNA, 25 bp, Homo sapien
agaggcaagacttctggaggcttga

SEQ ID NO: 2545057 - DNA, 25 bp, Homo sapien
gagaggcaagacttctggaggcttg

SEQ ID NO: 2545058 - DNA, 25 bp, Homo sapien
ctgtagtgaaatacaaaatgcgatg

SEQ ID NO: 2545059 - DNA, 25 bp, Homo sapien
ggctgaacttcagtaatgtctccac

SEQ ID NO: 2545060 - DNA, 25 bp, Homo sapien
tggaagcagtcttcccctcagggat

SEQ ID NO: 2545061 - DNA, 25 bp, Homo sapien
tggtttcccaacatattggcagctc

SEQ ID NO: 2545062 - DNA, 25 bp, Homo sapien
aaattgcaaaattgcattaggcctc

SEQ ID NO: 2545063 - DNA, 25 bp, Homo sapien
gtcctggaagtctctgtcattctct

SEQ ID NO: 2545064 - DNA, 25 bp, Homo sapien
tcttcaaggacggggtccaggacag

SEQ ID NO: 2545065 - DNA, 25 bp, Homo sapien
gtcattctcttcaaggacggggtcc

SEQ ID NO: 2545066 - DNA, 25 bp, Homo sapien
tgtcattctcttcaaggacggggtc

SEQ ID NO: 2545067 - DNA, 25 bp, Homo sapien
agattacttcccttaagcctaggag

SEQ ID NO: 2545068 - DNA, 25 bp, Homo sapien
gagcatgacagcttaatgactttcc

SEQ ID NO: 2545069 - DNA, 25 bp, Homo sapien
ccgtttcaacgaagcatatggtctc

SEQ ID NO: 2545070 - DNA, 25 bp, Homo sapien
tgcttgcaggcgatcatatgtgggt

SEQ ID NO: 2545071 - DNA, 25 bp, Homo sapien
tgaggccaggttgttgcacaagacg

SEQ ID NO: 2545072 - DNA, 25 bp, Homo sapien
caggttgttgcacaagacgagatca

SEQ ID NO: 2545073 - DNA, 25 bp, Homo sapien
gaggccaggttgttgcacaagacga

SEQ ID NO: 2545074 - DNA, 25 bp, Homo sapien
ggccaggttgttgcacaagacgaga

SEQ ID NO: 2545075 - DNA, 25 bp, Homo sapien
aaggattccaacctattctgcctga

SEQ ID NO: 2545076 - DNA, 25 bp, Homo sapien
taaggattccaacctattctgcctg

SEQ ID NO: 2545077 - DNA, 25 bp, Homo sapien
aggattccaacctattctgcctgaa

SEQ ID NO: 2545078 - DNA, 25 bp, Homo sapien
ggattccaacctattctgcctgaat

SEQ ID NO: 2545079 - DNA, 25 bp, Homo sapien
agcaggccctgtgaaggaccaagga

SEQ ID NO: 2545080 - DNA, 25 bp, Homo sapien
ttattagaacacagtcattcagaag

SEQ ID NO: 2545081 - DNA, 25 bp, Homo sapien
cactgagacatcaggcagcaggaag

SEQ ID NO: 2545082 - DNA, 25 bp, Homo sapien
ccactgttttaaggtcatttattag

SEQ ID NO: 2545083 - DNA, 25 bp, Homo sapien
cctggcttgtttgaggaacgtcagt

SEQ ID NO: 2545084 - DNA, 25 bp, Homo sapien
gcttgtttgaggaacgtcagtttgg

SEQ ID NO: 2545085 - DNA, 25 bp, Homo sapien
ttgaggaacgtcagtttggaggaaa

SEQ ID NO: 2545086 - DNA, 25 bp, Homo sapien
aagcttcctggcttgtttgaggaac

SEQ ID NO: 2545087 - DNA, 25 bp, Homo sapien
gacttggccattggtgagatgaatc

SEQ ID NO: 2545088 - DNA, 25 bp, Homo sapien
tccaatgttgtagacttggccattg

SEQ ID NO: 2545089 - DNA, 25 bp, Homo sapien
gtgagatgaatccagtgagcagtaa

SEQ ID NO: 2545090 - DNA, 25 bp, Homo sapien
tgagatgaatccagtgagcagtaag

SEQ ID NO: 2545091 - DNA, 25 bp, Homo sapien
ggtctgatcagctttatctagggct

SEQ ID NO: 2545092 - DNA, 25 bp, Homo sapien
cactgtgtcggtctgatcagcttta

SEQ ID NO: 2545093 - DNA, 25 bp, Homo sapien
ggttaatcactgtgtcggtctgatc

SEQ ID NO: 2545094 - DNA, 25 bp, Homo sapien
tgtcggtctgatcagctttatctag

SEQ ID NO: 2545095 - DNA, 25 bp, Homo sapien
ggaaaggtgctttagctcgaagtat

SEQ ID NO: 2545096 - DNA, 25 bp, Homo sapien
gaagtattgagtgatacgcgacgac

SEQ ID NO: 2545097 - DNA, 25 bp, Homo sapien
tagctcgaagtattgagtgatacgc

SEQ ID NO: 2545098 - DNA, 25 bp, Homo sapien
gagtgatacgcgacgacacagtgcc

SEQ ID NO: 2545099 - DNA, 25 bp, Homo sapien
gaggacacccccgtggccgcagacc

SEQ ID NO: 2545100 - DNA, 25 bp, Homo sapien
agccgcgaggacacccccgtggccg

SEQ ID NO: 2545101 - DNA, 25 bp, Homo sapien
ggacacccccgtggccgcagaccga

SEQ ID NO: 2545102 - DNA, 25 bp, Homo sapien
cccgtggccgcagaccgaggcccac

SEQ ID NO: 2545103 - DNA, 25 bp, Homo sapien
ttggcctggcccgtgctggccggct

SEQ ID NO: 2545104 - DNA, 25 bp, Homo sapien
tgaaaaggtaagagttggtggagac

SEQ ID NO: 2545105 - DNA, 25 bp, Homo sapien
ttcaggtcgatccagtgtttacaag

SEQ ID NO: 2545106 - DNA, 25 bp, Homo sapien
ggcggcgaccgctgacatttatctt

SEQ ID NO: 2545107 - DNA, 25 bp, Homo sapien
gacctcgtcatcagagccctttaaa

SEQ ID NO: 2545108 - DNA, 25 bp, Homo sapien
tatgaactgtgtgggcctgacctcg

SEQ ID NO: 2545109 - DNA, 25 bp, Homo sapien
tgtgtgaggttcaaggaagacccca

SEQ ID NO: 2545110 - DNA, 25 bp, Homo sapien
caaactttgatctcaggctcgtggg

SEQ ID NO: 2545111 - DNA, 25 bp, Homo sapien
gaatcagctccgaaggccgtttctg

SEQ ID NO: 2545112 - DNA, 25 bp, Homo sapien
tctgaggccttgcacagcttgcgct

SEQ ID NO: 2545113 - DNA, 25 bp, Homo sapien
caaagtccgcttctatccactgcag

SEQ ID NO: 2545114 - DNA, 25 bp, Homo sapien
tggaaggacttttcgtggccaccca

SEQ ID NO: 2545115 - DNA, 25 bp, Homo sapien
cctctgtccccgcacctgtgtctgt

SEQ ID NO: 2545116 - DNA, 25 bp, Homo sapien
ctctgtccccgcacctgtgtctgtg

SEQ ID NO: 2545117 - DNA, 25 bp, Homo sapien
gagggcagcattgggagacattatt

SEQ ID NO: 2545118 - DNA, 25 bp, Homo sapien
ggcagctgctctaatgggccccatc

SEQ ID NO: 2545119 - DNA, 25 bp, Homo sapien
cagggtcgctgccacatgtctgaat

SEQ ID NO: 2545120 - DNA, 25 bp, Homo sapien
atgagacgaccagggtgccaacagg

SEQ ID NO: 2545121 - DNA, 25 bp, Homo sapien
ggctgtcagccaatcggcttttccg

SEQ ID NO: 2545122 - DNA, 25 bp, Homo sapien
tcagccaatcggcttttccgcagct

SEQ ID NO: 2545123 - DNA, 25 bp, Homo sapien
gaaacctgtgtgaaacctgcagcac

SEQ ID NO: 2545124 - DNA, 25 bp, Homo sapien
gtgtggctgtcagccaatcggcttt

SEQ ID NO: 2545125 - DNA, 25 bp, Homo sapien
gctgatgtccggcatggcatgtcag

SEQ ID NO: 2545126 - DNA, 25 bp, Homo sapien
tccagtgcatttgataaggtgcccg

SEQ ID NO: 2545127 - DNA, 25 bp, Homo sapien
tcagggacactcaggtctgcaagtc

SEQ ID NO: 2545128 - DNA, 25 bp, Homo sapien
tcagattccagagccatggctgatg

SEQ ID NO: 2545129 - DNA, 25 bp, Homo sapien
agctctgggtgcacactcagagaca

SEQ ID NO: 2545130 - DNA, 25 bp, Homo sapien
cacagctctgggtgcacactcagag

SEQ ID NO: 2545131 - DNA, 25 bp, Homo sapien
cccgcctcatcagacacctgctctc

SEQ ID NO: 2545132 - DNA, 25 bp, Homo sapien
gagggccccgcctcatcagacacct

SEQ ID NO: 2545133 - DNA, 25 bp, Homo sapien
cagcctttggcaggatggagcttgg

SEQ ID NO: 2545134 - DNA, 25 bp, Homo sapien
agccacacagcgaggtcagtccggg

SEQ ID NO: 2545135 - DNA, 25 bp, Homo sapien
catcatggtaatggtggcctcgccc

SEQ ID NO: 2545136 - DNA, 25 bp, Homo sapien
atggatgtcggaagggtcaccagcc

SEQ ID NO: 2545137 - DNA, 25 bp, Homo sapien
cactgccagagcctcacgtgcctgt

SEQ ID NO: 2545138 - DNA, 25 bp, Homo sapien
tctccaacatcgatttcaccaattt

SEQ ID NO: 2545139 - DNA, 25 bp, Homo sapien
taattctccaacatcgatttcacca

SEQ ID NO: 2545140 - DNA, 25 bp, Homo sapien
caacatcgatttcaccaatttcagc

SEQ ID NO: 2545141 - DNA, 25 bp, Homo sapien
aggctgcagtcaagggaggtcttct

SEQ ID NO: 2545142 - DNA, 25 bp, Homo sapien
tgcagagagacgtgggcaggaatag

SEQ ID NO: 2545143 - DNA, 25 bp, Homo sapien
ggtgccgttcatgaggtgggcaagt

SEQ ID NO: 2545144 - DNA, 25 bp, Homo sapien
gtgtggaaaattggtgcatcctgct

SEQ ID NO: 2545145 - DNA, 25 bp, Homo sapien
acgtctcgggggtagggtagcagcg

SEQ ID NO: 2545146 - DNA, 25 bp, Homo sapien
ggtacttgagttctcaactcctcct

SEQ ID NO: 2545147 - DNA, 25 bp, Homo sapien
gcattgtgaatctaccccagtaaaa

SEQ ID NO: 2545148 - DNA, 25 bp, Homo sapien
cacttctctgttgaggtcccccata

SEQ ID NO: 2545149 - DNA, 25 bp, Homo sapien
tagcaggaactatccctgaggccat

SEQ ID NO: 2545150 - DNA, 25 bp, Homo sapien
tctctccttggtagaaaatcccgaa

SEQ ID NO: 2545151 - DNA, 25 bp, Homo sapien
ttctgagcctgtatggcactagcct

SEQ ID NO: 2545152 - DNA, 25 bp, Homo sapien
cagccacctgtgtgagacattgaag

SEQ ID NO: 2545153 - DNA, 25 bp, Homo sapien
caacatgcaagatagaagagctgat

SEQ ID NO: 2545154 - DNA, 25 bp, Homo sapien
cctgaagtagtcttctcacaaaggc

SEQ ID NO: 2545155 - DNA, 25 bp, Homo sapien
tgaagtagtcttctcacaaaggctt

SEQ ID NO: 2545156 - DNA, 25 bp, Homo sapien
aagtagtcttctcacaaaggctttc

SEQ ID NO: 2545157 - DNA, 25 bp, Homo sapien
tgtgctcctctgatggggagcaccc

SEQ ID NO: 2545158 - DNA, 25 bp, Homo sapien
gcctaaagccgctcttccctggaag

SEQ ID NO: 2545159 - DNA, 25 bp, Homo sapien
tttgcattcacataggaccagaagc

SEQ ID NO: 2545160 - DNA, 25 bp, Homo sapien
tgagcaatgacagccaactgtatca

SEQ ID NO: 2545161 - DNA, 25 bp, Homo sapien
aattgtatcctcctttggatctggg

SEQ ID NO: 2545162 - DNA, 25 bp, Homo sapien
gacacagtgctcatattcttcctct

SEQ ID NO: 2545163 - DNA, 25 bp, Homo sapien
ttcttgctgcccctcgacagtgcat

SEQ ID NO: 2545164 - DNA, 25 bp, Homo sapien
gacagctgggtgttctgctttcctg

SEQ ID NO: 2545165 - DNA, 25 bp, Homo sapien
tgttaaggtaacgtgctctctctgg

SEQ ID NO: 2545166 - DNA, 25 bp, Homo sapien
atgagtccactcttcccgtaaatcc

SEQ ID NO: 2545167 - DNA, 25 bp, Homo sapien
tgacctccagcgctccacggttagc

SEQ ID NO: 2545168 - DNA, 25 bp, Homo sapien
gtaaatcctagtcgccttccagctc

SEQ ID NO: 2545169 - DNA, 25 bp, Homo sapien
cagcttgcaagcgagatgagtccac

SEQ ID NO: 2545170 - DNA, 25 bp, Homo sapien
gatggttgtagcctttccgcgcaca

SEQ ID NO: 2545171 - DNA, 25 bp, Homo sapien
tttccgcgcacacgcaatttacagt

SEQ ID NO: 2545172 - DNA, 25 bp, Homo sapien
aacagccgaatgatggttgtagcct

SEQ ID NO: 2545173 - DNA, 25 bp, Homo sapien
cgcaatttacagttcctgcaggaac

SEQ ID NO: 2545174 - DNA, 25 bp, Homo sapien
tctgggctgccgatggctatgaagc

SEQ ID NO: 2545175 - DNA, 25 bp, Homo sapien
tgccgatggctatgaagctttctac

SEQ ID NO: 2545176 - DNA, 25 bp, Homo sapien
tgcagagcaattaggatgaaaaagc

SEQ ID NO: 2545177 - DNA, 25 bp, Homo sapien
tgaaaaagcgtctgggctgccgatg

SEQ ID NO: 2545178 - DNA, 25 bp, Homo sapien
ttggcttgttgcaaaggcagataaa

SEQ ID NO: 2545179 - DNA, 25 bp, Homo sapien
tggcttgttgcaaaggcagataaat

SEQ ID NO: 2545180 - DNA, 25 bp, Homo sapien
ggcttgttgcaaaggcagataaatg

SEQ ID NO: 2545181 - DNA, 25 bp, Homo sapien
cttggcttgttgcaaaggcagataa

SEQ ID NO: 2545182 - DNA, 25 bp, Homo sapien
tagtggaggaaactaaagcatcctg

SEQ ID NO: 2545183 - DNA, 25 bp, Homo sapien
gatatcctttagtggaggaaactaa

SEQ ID NO: 2545184 - DNA, 25 bp, Homo sapien
aactaaagcatcctggttgagagct

SEQ ID NO: 2545185 - DNA, 25 bp, Homo sapien
caaggagatatcctttagtggagga

SEQ ID NO: 2545186 - DNA, 25 bp, Homo sapien
aaaggtggaaaagttgctgacagca

SEQ ID NO: 2545187 - DNA, 25 bp, Homo sapien
cccctgttggtgtacgcgagctgaa

SEQ ID NO: 2545188 - DNA, 25 bp, Homo sapien
tggaactggccgtaaacatctggga

SEQ ID NO: 2545189 - DNA, 25 bp, Homo sapien
cctcttggttgacagagggattgca

SEQ ID NO: 2545190 - DNA, 25 bp, Homo sapien
taatcatgtctcacttccgcctcaa

SEQ ID NO: 2545191 - DNA, 25 bp, Homo sapien
cacttcagacacctaaattacaggc

SEQ ID NO: 2545192 - DNA, 25 bp, Homo sapien
tgtaattaatgtcctcctgaccaga

SEQ ID NO: 2545193 - DNA, 25 bp, Homo sapien
gacctatataatcctttgctgacag

SEQ ID NO: 2545194 - DNA, 25 bp, Homo sapien
ggagacaacgttgccatccagattc

SEQ ID NO: 2545195 - DNA, 25 bp, Homo sapien
tttgccatgtatcaccactggtgta

SEQ ID NO: 2545196 - DNA, 25 bp, Homo sapien
gatgacactgacttcccttgtaaac

SEQ ID NO: 2545197 - DNA, 25 bp, Homo sapien
acagtatggagacaacgttgccatc

SEQ ID NO: 2545198 - DNA, 25 bp, Homo sapien
tctggaggctcattcgtcatcggtg

SEQ ID NO: 2545199 - DNA, 25 bp, Homo sapien
cccagtgcatgaagaggagtgccaa

SEQ ID NO: 2545200 - DNA, 25 bp, Homo sapien
tatctgcatgcaggctccgtacagg

SEQ ID NO: 2545201 - DNA, 25 bp, Homo sapien
tgctttaaatccaatcgccgctgaa

SEQ ID NO: 2545202 - DNA, 25 bp, Homo sapien
ctaagaggagaaccattgatcggga

SEQ ID NO: 2545203 - DNA, 25 bp, Homo sapien
tggcctggatgtcacactgggacaa

SEQ ID NO: 2545204 - DNA, 25 bp, Homo sapien
gcatcagagattccccagctgactg

SEQ ID NO: 2545205 - DNA, 25 bp, Homo sapien
gacgtccttttcttatcaggcagca

SEQ ID NO: 2545206 - DNA, 25 bp, Homo sapien
cttatcaaaatgtagggcatcagag

SEQ ID NO: 2545207 - DNA, 25 bp, Homo sapien
agggtccctccaggctcagtgacta

SEQ ID NO: 2545208 - DNA, 25 bp, Homo sapien
gtgcctgagctctgcgccagggtcc

SEQ ID NO: 2545209 - DNA, 25 bp, Homo sapien
ccagggtccctccaggctcagtgac

SEQ ID NO: 2545210 - DNA, 25 bp, Homo sapien
tggtgcctgagctctgcgccagggt

SEQ ID NO: 2545211 - DNA, 25 bp, Homo sapien
atttagcttaatctggtgacttgag

SEQ ID NO: 2545212 - DNA, 25 bp, Homo sapien
agggaaattatgcactgagatattt

SEQ ID NO: 2545213 - DNA, 25 bp, Homo sapien
ctgagatatttagcttaatctggtg

SEQ ID NO: 2545214 - DNA, 25 bp, Homo sapien
cctgaaggtggacagggatggttct

SEQ ID NO: 2545215 - DNA, 25 bp, Homo sapien
tgccacataacacagtctcagggac

SEQ ID NO: 2545216 - DNA, 25 bp, Homo sapien
tgagtgtttgtttgaacagctcttc

SEQ ID NO: 2545217 - DNA, 25 bp, Homo sapien
ccaaggtagagttggctcctagcca

SEQ ID NO: 2545218 - DNA, 25 bp, Homo sapien
tcagggacccttgtgtccaattcaa

SEQ ID NO: 2545219 - DNA, 25 bp, Homo sapien
gcagagccaccggtatgttgtgaaa

SEQ ID NO: 2545220 - DNA, 25 bp, Homo sapien
tgctctagcaaaggcttggcacagg

SEQ ID NO: 2545221 - DNA, 25 bp, Homo sapien
cagtaaccgccaacaaaagcacagg

SEQ ID NO: 2545222 - DNA, 25 bp, Homo sapien
gggtgcacagtccaagtgacattct

SEQ ID NO: 2545223 - DNA, 25 bp, Homo sapien
aggctcagggacaagagtggcttgt

SEQ ID NO: 2545224 - DNA, 25 bp, Homo sapien
ggctgtattacggaatcaactctta

SEQ ID NO: 2545225 - DNA, 25 bp, Homo sapien
ctcagggacaagagtggcttgtgtt

SEQ ID NO: 2545226 - DNA, 25 bp, Homo sapien
gtttcctggctgtattacggaatca

SEQ ID NO: 2545227 - DNA, 25 bp, Homo sapien
cttcaaaaacgaacggggagcacag

SEQ ID NO: 2545228 - DNA, 25 bp, Homo sapien
caggagccgttgggcagcctccact

SEQ ID NO: 2545229 - DNA, 25 bp, Homo sapien
agcacaggagccgttgggcagcctc

SEQ ID NO: 2545230 - DNA, 25 bp, Homo sapien
gagccgttgggcagcctccactttt

SEQ ID NO: 2545231 - DNA, 25 bp, Homo sapien
aaatcacaatgaggcctcgggaggc

SEQ ID NO: 2545232 - DNA, 25 bp, Homo sapien
tggcctgaatccaaccctcgccttt

SEQ ID NO: 2545233 - DNA, 25 bp, Homo sapien
ttcccaccaagttcccgcttccaca

SEQ ID NO: 2545234 - DNA, 25 bp, Homo sapien
gtttggcctgaatccaaccctcgcc

SEQ ID NO: 2545235 - DNA, 25 bp, Homo sapien
ggctcagaggatgccagtctccact

SEQ ID NO: 2545236 - DNA, 25 bp, Homo sapien
acagtaatcactggctcagaggatg

SEQ ID NO: 2545237 - DNA, 25 bp, Homo sapien
atccacagtaatcactggctcagag

SEQ ID NO: 2545238 - DNA, 25 bp, Homo sapien
ccgtcttcctgccagagcatcattt

SEQ ID NO: 2545239 - DNA, 25 bp, Homo sapien
ctgtagccggagtccagggagggaa

SEQ ID NO: 2545240 - DNA, 25 bp, Homo sapien
agatgctgatgaggccggcagcctt

SEQ ID NO: 2545241 - DNA, 25 bp, Homo sapien
gggacaggcccccaacggagatgct

SEQ ID NO: 2545242 - DNA, 25 bp, Homo sapien
gggaactgagaagccgcgagggaca

SEQ ID NO: 2545243 - DNA, 25 bp, Homo sapien
gaatgatcttgaaaacacacggctc

SEQ ID NO: 2545244 - DNA, 25 bp, Homo sapien
tctgggtccagaagacatcgtgggt

SEQ ID NO: 2545245 - DNA, 25 bp, Homo sapien
tctgggcacatagatcgcatgacgg

SEQ ID NO: 2545246 - DNA, 25 bp, Homo sapien
tattcacactcgaaaagacacctcg

SEQ ID NO: 2545247 - DNA, 25 bp, Homo sapien
tcttcaaagacggacggcgtgggac

SEQ ID NO: 2545248 - DNA, 25 bp, Homo sapien
aatgtgtgcgtcgatgcggactcca

SEQ ID NO: 2545249 - DNA, 25 bp, Homo sapien
ggcaccgttgctacacatcctggaa

SEQ ID NO: 2545250 - DNA, 25 bp, Homo sapien
tcacttgggagttgacacaaaaccc

SEQ ID NO: 2545251 - DNA, 25 bp, Homo sapien
tcccaaaggtttgaacagctgccca

SEQ ID NO: 2545252 - DNA, 25 bp, Homo sapien
tgtttccgcagcaatgataggccac

SEQ ID NO: 2545253 - DNA, 25 bp, Homo sapien
catcgtaaatatccaagggcgtgac

SEQ ID NO: 2545254 - DNA, 25 bp, Homo sapien
gaactggacccagcaactgatggct

SEQ ID NO: 2545255 - DNA, 25 bp, Homo sapien
caggcagatcattggagataacctc

SEQ ID NO: 2545256 - DNA, 25 bp, Homo sapien
tggcctcaggccatagtcttggctt

SEQ ID NO: 2545257 - DNA, 25 bp, Homo sapien
gcatcttgattggagagtcttcatc

SEQ ID NO: 2545258 - DNA, 25 bp, Homo sapien
cacccaacccaactggaggaaactg

SEQ ID NO: 2545259 - DNA, 25 bp, Homo sapien
tgcagaagttcctgagccactgcag

SEQ ID NO: 2545260 - DNA, 25 bp, Homo sapien
aaagatggccctgttgcttcctggg

SEQ ID NO: 2545261 - DNA, 25 bp, Homo sapien
gctgcaccccgaggtctgtgatggt

SEQ ID NO: 2545262 - DNA, 25 bp, Homo sapien
gccactgcagtggcaaagatggccc

SEQ ID NO: 2545263 - DNA, 25 bp, Homo sapien
tggagggcagaagcgacatgacaag

SEQ ID NO: 2545264 - DNA, 25 bp, Homo sapien
agggcagaagcgacatgacaaggaa

SEQ ID NO: 2545265 - DNA, 25 bp, Homo sapien
gagggcagaagcgacatgacaagga

SEQ ID NO: 2545266 - DNA, 25 bp, Homo sapien
ggagggcagaagcgacatgacaagg

SEQ ID NO: 2545267 - DNA, 25 bp, Homo sapien
ttgcagcttggcgatcctgggctcc

SEQ ID NO: 2545268 - DNA, 25 bp, Homo sapien
gtcaggacccgcaccatggcgtgct

SEQ ID NO: 2545269 - DNA, 25 bp, Homo sapien
ccgtgatgtccacttgccagtctga

SEQ ID NO: 2545270 - DNA, 25 bp, Homo sapien
gaatggtggtcatcccaagctcctg

SEQ ID NO: 2545271 - DNA, 25 bp, Homo sapien
ctctgtaaggggccgtgtgtggagc

SEQ ID NO: 2545272 - DNA, 25 bp, Homo sapien
tgatctgattgagctcggtgtcgga

SEQ ID NO: 2545273 - DNA, 25 bp, Homo sapien
ggagacgatgggcactctccaaccc

SEQ ID NO: 2545274 - DNA, 25 bp, Homo sapien
ttctttcccattgacaaagacgtag

SEQ ID NO: 2545275 - DNA, 25 bp, Homo sapien
gaagttcaccaccacgttgaccttg

SEQ ID NO: 2545276 - DNA, 25 bp, Homo sapien
ttctacctggtgcaagagggctcct

SEQ ID NO: 2545277 - DNA, 25 bp, Homo sapien
gagaacgtcctcaacagggcatgtg

SEQ ID NO: 2545278 - DNA, 25 bp, Homo sapien
gaaaggtgctctctgagtacccagg

SEQ ID NO: 2545279 - DNA, 25 bp, Homo sapien
gagccaggatttagccccagaagtc

SEQ ID NO: 2545280 - DNA, 25 bp, Homo sapien
gtgtcctccctgaccgggtgtcctc

SEQ ID NO: 2545281 - DNA, 25 bp, Homo sapien
gggtgtcctccatgaccgggtgtcc

SEQ ID NO: 2545282 - DNA, 25 bp, Homo sapien
ggtgtcctctatgaccgggtgtcct

SEQ ID NO: 2545283 - DNA, 25 bp, Homo sapien
ggtgtcctccatgaccgggtgtcct

SEQ ID NO: 2545284 - DNA, 25 bp, Homo sapien
ggtgtcctccatgaccgggtgtcct

SEQ ID NO: 2545285 - DNA, 25 bp, Homo sapien
gggtgtcctccatgaccgggtgtcc

SEQ ID NO: 2545286 - DNA, 25 bp, Homo sapien
tccatgaccggggtgtcctctatga

SEQ ID NO: 2545287 - DNA, 25 bp, Homo sapien
tgaccggggtgtcctctatgactgg

SEQ ID NO: 2545288 - DNA, 25 bp, Homo sapien
gggtgtcctctatgactgggtgtcc

SEQ ID NO: 2545289 - DNA, 25 bp, Homo sapien
tcctctatgactgggtgtcctccct

SEQ ID NO: 2545290 - DNA, 25 bp, Homo sapien
ccctgaccggggtgtcctctatgac

SEQ ID NO: 2545291 - DNA, 25 bp, Homo sapien
tgtcctccctgaccggggtgtcctc

SEQ ID NO: 2545292 - DNA, 25 bp, Homo sapien
gggtgtcctccatgaccgggtgtcc

SEQ ID NO: 2545293 - DNA, 25 bp, Homo sapien
ggtgtcctccatgaccgggtgtcct

SEQ ID NO: 2545294 - DNA, 25 bp, Homo sapien
gtgtcctccatgaccggggtgtcct

SEQ ID NO: 2545295 - DNA, 25 bp, Homo sapien
tgtcctccatgaccggggtgtcctc

SEQ ID NO: 2545296 - DNA, 25 bp, Homo sapien
catgaccggggtgtcctccatgacc

SEQ ID NO: 2545297 - DNA, 25 bp, Homo sapien
tgaccggggtgtcctccatgaccgg

SEQ ID NO: 2545298 - DNA, 25 bp, Homo sapien
gggtgtcctccatgaccgggatgtc

SEQ ID NO: 2545299 - DNA, 25 bp, Homo sapien
ggtgtcctccatgaccgggatgtcc

SEQ ID NO: 2545300 - DNA, 25 bp, Homo sapien
ggtgtcctccatgaccgggtgtcct

SEQ ID NO: 2545301 - DNA, 25 bp, Homo sapien
ggtgtcctctatgaccgggtgtcct

SEQ ID NO: 2545302 - DNA, 25 bp, Homo sapien
gggtgtcctccatgaccgggatgtc

SEQ ID NO: 2545303 - DNA, 25 bp, Homo sapien
gtgtcctccctgaccgggtgtcctc

SEQ ID NO: 2545304 - DNA, 25 bp, Homo sapien
ggtgtcctccatgaccgggatgtcc

SEQ ID NO: 2545305 - DNA, 25 bp, Homo sapien
ggtgtcctccatgaccgggtgtcct

SEQ ID NO: 2545306 - DNA, 25 bp, Homo sapien
gggtgtcctccatgaccgggtgtcc

SEQ ID NO: 2545307 - DNA, 25 bp, Homo sapien
gggtgtcctccatgaccgggatgtc

SEQ ID NO: 2545308 - DNA, 25 bp, Homo sapien
ggtgtcctccatgaccgggtgtcct

SEQ ID NO: 2545309 - DNA, 25 bp, Homo sapien
ggtgtcctctatgaccgggtgtcct

SEQ ID NO: 2545310 - DNA, 25 bp, Homo sapien
ggtgtcctccctgaccgggatgtcc

SEQ ID NO: 2545311 - DNA, 25 bp, Homo sapien
gggtgtcctccatgaccgggatgtc

SEQ ID NO: 2545312 - DNA, 25 bp, Homo sapien
ggtgtcctccatgaccgggtgtcct

SEQ ID NO: 2545313 - DNA, 25 bp, Homo sapien
tccatgaccggggtgtcctctatga

SEQ ID NO: 2545314 - DNA, 25 bp, Homo sapien
gggtgtcctctatgaccgggatgtc

SEQ ID NO: 2545315 - DNA, 25 bp, Homo sapien
gggtgtcctccatgaccgggatgtc

SEQ ID NO: 2545316 - DNA, 25 bp, Homo sapien
gggtgtcctctatgaccgggtgtcc

SEQ ID NO: 2545317 - DNA, 25 bp, Homo sapien
ggtgtcctctatgaccgggtgtcct

SEQ ID NO: 2545318 - DNA, 25 bp, Homo sapien
gggtgtcctctatgaccgggatgtc

SEQ ID NO: 2545319 - DNA, 25 bp, Homo sapien
gggtgtcctccatgaccgggatgtc

SEQ ID NO: 2545320 - DNA, 25 bp, Homo sapien
ggtgtcctccatgaccgggtgtcct

SEQ ID NO: 2545321 - DNA, 25 bp, Homo sapien
ggtgtcctctatgaccgggtgtcct

SEQ ID NO: 2545322 - DNA, 25 bp, Homo sapien
gactgaggtgtcttccctgaccggg

SEQ ID NO: 2545323 - DNA, 25 bp, Homo sapien
ctgaggtgtcttccctgaccggggt

SEQ ID NO: 2545324 - DNA, 25 bp, Homo sapien
tgaggtgtcttccctgaccggggtg

SEQ ID NO: 2545325 - DNA, 25 bp, Homo sapien
actgaggtgtcttccctgaccgggg

SEQ ID NO: 2545326 - DNA, 25 bp, Homo sapien
aactgctgttcacacgggtggccgt

SEQ ID NO: 2545327 - DNA, 25 bp, Homo sapien
ggtggccgtgttgaacatcagcaca

SEQ ID NO: 2545328 - DNA, 25 bp, Homo sapien
cacaggaattctcagcagatgcagg

SEQ ID NO: 2545329 - DNA, 25 bp, Homo sapien
agacggctctatgcagtctgcagga

SEQ ID NO: 2545330 - DNA, 25 bp, Homo sapien
ccaccttggcagaaatctgcaacat

SEQ ID NO: 2545331 - DNA, 25 bp, Homo sapien
gtcccaccttggcagaaatctgcaa

SEQ ID NO: 2545332 - DNA, 25 bp, Homo sapien
gttcagtcccaccttggcagaaatc

SEQ ID NO: 2545333 - DNA, 25 bp, Homo sapien
cagtcccaccttggcagaaatctgc

SEQ ID NO: 2545334 - DNA, 25 bp, Homo sapien
tccagttactggagtccccaccatt

SEQ ID NO: 2545335 - DNA, 25 bp, Homo sapien
ccaccatggcttttggtagctggta

SEQ ID NO: 2545336 - DNA, 25 bp, Homo sapien
gaaactcctcacagtcagagctaca

SEQ ID NO: 2545337 - DNA, 25 bp, Homo sapien
gagctacactctacgtttcccgagg

SEQ ID NO: 2545338 - DNA, 25 bp, Homo sapien
taaaatattctcgaccctgaaccag

SEQ ID NO: 2545339 - DNA, 25 bp, Homo sapien
ttctctaagcctaatactccttgga

SEQ ID NO: 2545340 - DNA, 25 bp, Homo sapien
aactttctctaagcctaatactcct

SEQ ID NO: 2545341 - DNA, 25 bp, Homo sapien
atcataaaatattctcgaccctgaa

SEQ ID NO: 2545342 - DNA, 25 bp, Homo sapien
ggtagtagacgacatacttgcagac

SEQ ID NO: 2545343 - DNA, 25 bp, Homo sapien
agtcctgggtagtagacgacatact

SEQ ID NO: 2545344 - DNA, 25 bp, Homo sapien
cgacatacttgcagacgatgtccct

SEQ ID NO: 2545345 - DNA, 25 bp, Homo sapien
acttgcagacgatgtccctggtcct

SEQ ID NO: 2545346 - DNA, 25 bp, Homo sapien
ggtctatgcggcagcgttgggtggc

SEQ ID NO: 2545347 - DNA, 25 bp, Homo sapien
aggtctatgcggcagcgttgggtgg

SEQ ID NO: 2545348 - DNA, 25 bp, Homo sapien
gcgggtgtagtctgatgaggtctat

SEQ ID NO: 2545349 - DNA, 25 bp, Homo sapien
gtagtctgatgaggtctatgcggca

SEQ ID NO: 2545350 - DNA, 25 bp, Homo sapien
taatgcgtgtatccagtaagggtac

SEQ ID NO: 2545351 - DNA, 25 bp, Homo sapien
acggaggtcttgaccagcagtcagg

SEQ ID NO: 2545352 - DNA, 25 bp, Homo sapien
taccatccctggtggcacggaggtc

SEQ ID NO: 2545353 - DNA, 25 bp, Homo sapien
tatccagtaagggtaccatccctgg

SEQ ID NO: 2545354 - DNA, 25 bp, Homo sapien
tgcccccggaacagccttctcaaga

SEQ ID NO: 2545355 - DNA, 25 bp, Homo sapien
gagaggggcaatgacatctacgctg

SEQ ID NO: 2545356 - DNA, 25 bp, Homo sapien
atctacgctgcccttgccttttaag

SEQ ID NO: 2545357 - DNA, 25 bp, Homo sapien
ggcaatgacatctacgctgcccttg

SEQ ID NO: 2545358 - DNA, 25 bp, Homo sapien
gtttcatgagaggaggtggatacca

SEQ ID NO: 2545359 - DNA, 25 bp, Homo sapien
actgctcatctctgggcatattgtg

SEQ ID NO: 2545360 - DNA, 25 bp, Homo sapien
tctctgggcatattgtgcacaccag

SEQ ID NO: 2545361 - DNA, 25 bp, Homo sapien
ccttccagagctgaatgtgtactgc

SEQ ID NO: 2545362 - DNA, 25 bp, Homo sapien
gctgaatgtgtactgctcatctctg

SEQ ID NO: 2545363 - DNA, 25 bp, Homo sapien
ggtaaagagcagcacgtcttcagtg

SEQ ID NO: 2545364 - DNA, 25 bp, Homo sapien
cccagaggggtaaagagcagcacgt

SEQ ID NO: 2545365 - DNA, 25 bp, Homo sapien
gaggggtaaagagcagcacgtcttc

SEQ ID NO: 2545366 - DNA, 25 bp, Homo sapien
tgcccagaggggtaaagagcagcac

SEQ ID NO: 2545367 - DNA, 25 bp, Homo sapien
aaaccataccaacgggatacatgtg

SEQ ID NO: 2545368 - DNA, 25 bp, Homo sapien
ggtatattgcatgtggtagggcttc

SEQ ID NO: 2545369 - DNA, 25 bp, Homo sapien
cagaggcaaaccataccaacgggat

SEQ ID NO: 2545370 - DNA, 25 bp, Homo sapien
tattgcatgtggtagggcttctagt

SEQ ID NO: 2545371 - DNA, 25 bp, Homo sapien
ccctactggttttctggtatgtaat

SEQ ID NO: 2545372 - DNA, 25 bp, Homo sapien
ttgtcactagagcttccctactggt

SEQ ID NO: 2545373 - DNA, 25 bp, Homo sapien
tcaattgtcagatccatttctacca

SEQ ID NO: 2545374 - DNA, 25 bp, Homo sapien
tatgtaatttcaattgtcagatcca

SEQ ID NO: 2545375 - DNA, 25 bp, Homo sapien
ggctcaggtgtgcatcagtgacaga

SEQ ID NO: 2545376 - DNA, 25 bp, Homo sapien
ggtggcttttcatagaaccccaagc

SEQ ID NO: 2545377 - DNA, 25 bp, Homo sapien
ttggggtgcctccagcagtagggcc

SEQ ID NO: 2545378 - DNA, 25 bp, Homo sapien
tcagtggtttggggtgcctccagca

SEQ ID NO: 2545379 - DNA, 25 bp, Homo sapien
catttcccggctctggaaagtttct

SEQ ID NO: 2545380 - DNA, 25 bp, Homo sapien
tttcggctgggaatcatttcccggc

SEQ ID NO: 2545381 - DNA, 25 bp, Homo sapien
tgtcctggatgactctgctctcatt

SEQ ID NO: 2545382 - DNA, 25 bp, Homo sapien
gtttctccagaagcgcactgatcag

SEQ ID NO: 2545383 - DNA, 25 bp, Homo sapien
caagggtgatggagtaattctctcc

SEQ ID NO: 2545384 - DNA, 25 bp, Homo sapien
caaagcgacagctgtaaggagattc

SEQ ID NO: 2545385 - DNA, 25 bp, Homo sapien
ccactaaggctggtaggcagttcaa

SEQ ID NO: 2545386 - DNA, 25 bp, Homo sapien
tctcttctgtgggagacaagggtga

SEQ ID NO: 2545387 - DNA, 25 bp, Homo sapien
gttgtctccgaaacaaaggtgcctg

SEQ ID NO: 2545388 - DNA, 25 bp, Homo sapien
cattgcagtaatgctgtggcttcct

SEQ ID NO: 2545389 - DNA, 25 bp, Homo sapien
gcttcctttcagaaggggcaaatct

SEQ ID NO: 2545390 - DNA, 25 bp, Homo sapien
tctccgaaacaaaggtgcctgtcca

SEQ ID NO: 2545391 - DNA, 25 bp, Homo sapien
aagacaacatctgatctaggccagg

SEQ ID NO: 2545392 - DNA, 25 bp, Homo sapien
gggagtctcttcttactcatgctct

SEQ ID NO: 2545393 - DNA, 25 bp, Homo sapien
caagtctgcagtttccgttaagaca

SEQ ID NO: 2545394 - DNA, 25 bp, Homo sapien
gaaatcggtcaccttccaagagggc

SEQ ID NO: 2545395 - DNA, 25 bp, Homo sapien
tctatgggactagcccagaagggct

SEQ ID NO: 2545396 - DNA, 25 bp, Homo sapien
gtcgctccagggcacatttcatggg

SEQ ID NO: 2545397 - DNA, 25 bp, Homo sapien
tcatgggattcccatactctatggg

SEQ ID NO: 2545398 - DNA, 25 bp, Homo sapien
tttctgggccgtctggctgatctca

SEQ ID NO: 2545399 - DNA, 25 bp, Homo sapien
caccctggaaaacctctagtttgag

SEQ ID NO: 2545400 - DNA, 25 bp, Homo sapien
ggagtgcatatagaacttctgatac

SEQ ID NO: 2545401 - DNA, 25 bp, Homo sapien
gattctgccagacccttccattagg

SEQ ID NO: 2545402 - DNA, 25 bp, Homo sapien
taggagcctctgactgttccgctgc

SEQ ID NO: 2545403 - DNA, 25 bp, Homo sapien
atggtaagtcattctgtggcactgg

SEQ ID NO: 2545404 - DNA, 25 bp, Homo sapien
taagaaatggtaagtcattctgtgg

SEQ ID NO: 2545405 - DNA, 25 bp, Homo sapien
aatggtaagtcattctgtggcactg

SEQ ID NO: 2545406 - DNA, 25 bp, Homo sapien
gaaatggtaagtcattctgtggcac

SEQ ID NO: 2545407 - DNA, 25 bp, Homo sapien
tcagacgatctacactccacagact

SEQ ID NO: 2545408 - DNA, 25 bp, Homo sapien
cttaatcacgtcttcatcagacgat

SEQ ID NO: 2545409 - DNA, 25 bp, Homo sapien
gagaccactttcaccgggacggcca

SEQ ID NO: 2545410 - DNA, 25 bp, Homo sapien
tccacggagaccactttcaccggga

SEQ ID NO: 2545411 - DNA, 25 bp, Homo sapien
gatggctgtgttcaggatttctgcc

SEQ ID NO: 2545412 - DNA, 25 bp, Homo sapien
tccccgtgaggatggctgtgttcag

SEQ ID NO: 2545413 - DNA, 25 bp, Homo sapien
tggctgtgttcaggatttctgcctc

SEQ ID NO: 2545414 - DNA, 25 bp, Homo sapien
cttccccgtgaggatggctgtgttc

SEQ ID NO: 2545415 - DNA, 25 bp, Homo sapien
cagtccctgggagtatgccgcctgc

SEQ ID NO: 2545416 - DNA, 25 bp, Homo sapien
gagtatgccgcctgcctttcctcag

SEQ ID NO: 2545417 - DNA, 25 bp, Homo sapien
gccatgagataatgttctgtcctca

SEQ ID NO: 2545418 - DNA, 25 bp, Homo sapien
gcaggctcagaaatcctggcagtcc

SEQ ID NO: 2545419 - DNA, 25 bp, Homo sapien
ccaaacatgcgttttgctgtaaacc

SEQ ID NO: 2545420 - DNA, 25 bp, Homo sapien
caaacatgcgttttgctgtaaaccc

SEQ ID NO: 2545421 - DNA, 25 bp, Homo sapien
gcaagcgcttcctggcatgccagac

SEQ ID NO: 2545422 - DNA, 25 bp, Homo sapien
caaagcctagggctaagttcaggca

SEQ ID NO: 2545423 - DNA, 25 bp, Homo sapien
catgccagactcaaacgtgtccttg

SEQ ID NO: 2545424 - DNA, 25 bp, Homo sapien
tagcattcgtcactctcagaaatcc

SEQ ID NO: 2545425 - DNA, 25 bp, Homo sapien
gagacaagacgttgctacaaatcat

SEQ ID NO: 2545426 - DNA, 25 bp, Homo sapien
gacaggagacaagacgttgctacaa

SEQ ID NO: 2545427 - DNA, 25 bp, Homo sapien
aaagacaggagacaagacgttgcta

SEQ ID NO: 2545428 - DNA, 25 bp, Homo sapien
caggagacaagacgttgctacaaat

SEQ ID NO: 2545429 - DNA, 25 bp, Homo sapien
aactctaaagtgttcctgtttgcct

SEQ ID NO: 2545430 - DNA, 25 bp, Homo sapien
ctgctgtgggcagcgagttaatacc

SEQ ID NO: 2545431 - DNA, 25 bp, Homo sapien
ctctgctgtgggcagcgagttaata

SEQ ID NO: 2545432 - DNA, 25 bp, Homo sapien
tgggcagcgagttaataccaccaaa

SEQ ID NO: 2545433 - DNA, 25 bp, Homo sapien
gcgagttaataccaccaaaccacat

SEQ ID NO: 2545434 - DNA, 25 bp, Homo sapien
ccctctccattgccctgggggtaag

SEQ ID NO: 2545435 - DNA, 25 bp, Homo sapien
tctccattgccctgggggtaagccc

SEQ ID NO: 2545436 - DNA, 25 bp, Homo sapien
caccctctccattgccctgggggta

SEQ ID NO: 2545437 - DNA, 25 bp, Homo sapien
ccacaccctctccattgccctgggg

SEQ ID NO: 2545438 - DNA, 25 bp, Homo sapien
gcaatgcacacagcgaagctcgagc

SEQ ID NO: 2545439 - DNA, 25 bp, Homo sapien
agccccttggccaaagcaatgcaca

SEQ ID NO: 2545440 - DNA, 25 bp, Homo sapien
taagcacgtgttcagtgtcacctcc

SEQ ID NO: 2545441 - DNA, 25 bp, Homo sapien
cagcaggccactggagcgtattttt

SEQ ID NO: 2545442 - DNA, 25 bp, Homo sapien
tgctaattcaaacctggagatttct

SEQ ID NO: 2545443 - DNA, 25 bp, Homo sapien
gaaaataccacagctgaaccctctg

SEQ ID NO: 2545444 - DNA, 25 bp, Homo sapien
aatccaaccaagtgacagtgactgg

SEQ ID NO: 2545445 - DNA, 25 bp, Homo sapien
gagagaaactcgagcaccctatgaa

SEQ ID NO: 2545446 - DNA, 25 bp, Homo sapien
gccgacaccgccatctcattataaa

SEQ ID NO: 2545447 - DNA, 25 bp, Homo sapien
tcattataaatcacctctggagagg

SEQ ID NO: 2545448 - DNA, 25 bp, Homo sapien
agcattgaagttcagccgacaccgc

SEQ ID NO: 2545449 - DNA, 25 bp, Homo sapien
ggatggttcattagggaacatcaga

SEQ ID NO: 2545450 - DNA, 25 bp, Homo sapien
gagaaacgccgagtgtggagtgtgg

SEQ ID NO: 2545451 - DNA, 25 bp, Homo sapien
tcttgtgggactgaggactcgtata

SEQ ID NO: 2545452 - DNA, 25 bp, Homo sapien
tacatgtagcatagcaagaacaggt

SEQ ID NO: 2545453 - DNA, 25 bp, Homo sapien
tcgtataggccatgaggaacgatgg

SEQ ID NO: 2545454 - DNA, 25 bp, Homo sapien
cgatctgcatgacctcgtaggaggc

SEQ ID NO: 2545455 - DNA, 25 bp, Homo sapien
tgggctcacatagatcttggacact

SEQ ID NO: 2545456 - DNA, 25 bp, Homo sapien
gccagcggcacaactccaatcaagt

SEQ ID NO: 2545457 - DNA, 25 bp, Homo sapien
ccaagtcagacgtgatctctccggg

SEQ ID NO: 2545458 - DNA, 25 bp, Homo sapien
cagaaacaagagtcccatcctgcca

SEQ ID NO: 2545459 - DNA, 25 bp, Homo sapien
ctccacatcgctgagtcaaataggt

SEQ ID NO: 2545460 - DNA, 25 bp, Homo sapien
caaataggtagctatcagggtgaac

SEQ ID NO: 2545461 - DNA, 25 bp, Homo sapien
catcacttccgaacagtttggattc

SEQ ID NO: 2545462 - DNA, 25 bp, Homo sapien
agactttgcagttagctttgccttt

SEQ ID NO: 2545463 - DNA, 25 bp, Homo sapien
ttgcagttagctttgcctttaaaat

SEQ ID NO: 2545464 - DNA, 25 bp, Homo sapien
ctaccaactctttaagtccgatact

SEQ ID NO: 2545465 - DNA, 25 bp, Homo sapien
tctaccaactctttaagtccgatac

SEQ ID NO: 2545466 - DNA, 25 bp, Homo sapien
ctgaggtctggtaaccagagtcatt

SEQ ID NO: 2545467 - DNA, 25 bp, Homo sapien
tgcagcgggaatgctctctagatca

SEQ ID NO: 2545468 - DNA, 25 bp, Homo sapien
ggtttgcagcgggaatgctctctag

SEQ ID NO: 2545469 - DNA, 25 bp, Homo sapien
ctgagtgggtttgcagcgggaatgc

SEQ ID NO: 2545470 - DNA, 25 bp, Homo sapien
gaatgctctctagatcagtccatgg

SEQ ID NO: 2545471 - DNA, 25 bp, Homo sapien
gcttgttgagcctgtgtcgcgacac

SEQ ID NO: 2545472 - DNA, 25 bp, Homo sapien
tccttgtgtaggctcactgctgggc

SEQ ID NO: 2545473 - DNA, 25 bp, Homo sapien
tctcccactgtgcaatggcggcttt

SEQ ID NO: 2545474 - DNA, 25 bp, Homo sapien
tttttcctgccttgccctgatgacg

SEQ ID NO: 2545475 - DNA, 25 bp, Homo sapien
ctcactttgtctggcattggattct

SEQ ID NO: 2545476 - DNA, 25 bp, Homo sapien
actttgtctggcattggattctgac

SEQ ID NO: 2545477 - DNA, 25 bp, Homo sapien
cactttgtctggcattggattctga

SEQ ID NO: 2545478 - DNA, 25 bp, Homo sapien
tttgtctggcattggattctgacat

SEQ ID NO: 2545479 - DNA, 25 bp, Homo sapien
tctgaaacagtcccattcacctcaa

SEQ ID NO: 2545480 - DNA, 25 bp, Homo sapien
aacatccctgaatccacagttttgt

SEQ ID NO: 2545481 - DNA, 25 bp, Homo sapien
tgaaacagtcccattcacctcaaat

SEQ ID NO: 2545482 - DNA, 25 bp, Homo sapien
aaaacatccctgaatccacagtttt

SEQ ID NO: 2545483 - DNA, 25 bp, Homo sapien
ggttcctgtgagaggtagaataaag

SEQ ID NO: 2545484 - DNA, 25 bp, Homo sapien
tgagttcttagaaacgattgtgagg

SEQ ID NO: 2545485 - DNA, 25 bp, Homo sapien
gaaacgattgtgaggttcctgtgag

SEQ ID NO: 2545486 - DNA, 25 bp, Homo sapien
tccgggcctgcgtgagttcttagaa

SEQ ID NO: 2545487 - DNA, 25 bp, Homo sapien
aatctgctgtcggaacttgatgttg

SEQ ID NO: 2545488 - DNA, 25 bp, Homo sapien
ctcgataatctgctgtcggaacttg

SEQ ID NO: 2545489 - DNA, 25 bp, Homo sapien
gataatctgctgtcggaacttgatg

SEQ ID NO: 2545490 - DNA, 25 bp, Homo sapien
atctgctgtcggaacttgatgttgc

SEQ ID NO: 2545491 - DNA, 25 bp, Homo sapien
cttgatcttggggagcttacactca

SEQ ID NO: 2545492 - DNA, 25 bp, Homo sapien
gatcttggggagcttacactcaatt

SEQ ID NO: 2545493 - DNA, 25 bp, Homo sapien
ttgatcttggggagcttacactcaa

SEQ ID NO: 2545494 - DNA, 25 bp, Homo sapien
tgatcttggggagcttacactcaat

SEQ ID NO: 2545495 - DNA, 25 bp, Homo sapien
caagagccaaatctggatgatttgt

SEQ ID NO: 2545496 - DNA, 25 bp, Homo sapien
caaatctggatgatttgtaggggat

SEQ ID NO: 2545497 - DNA, 25 bp, Homo sapien
gagccaaatctggatgatttgtagg

SEQ ID NO: 2545498 - DNA, 25 bp, Homo sapien
tcaagagccaaatctggatgatttg

SEQ ID NO: 2545499 - DNA, 25 bp, Homo sapien
agcccaagatgctgttcaggtaggc

SEQ ID NO: 2545500 - DNA, 25 bp, Homo sapien
tagcccaagatgctgttcaggtagg

SEQ ID NO: 2545501 - DNA, 25 bp, Homo sapien
ctagcccaagatgctgttcaggtag

SEQ ID NO: 2545502 - DNA, 25 bp, Homo sapien
ccaagatgctgttcaggtaggcatt

SEQ ID NO: 2545503 - DNA, 25 bp, Homo sapien
cttgcaggatgctttctgttttcaa

SEQ ID NO: 2545504 - DNA, 25 bp, Homo sapien
ggatgctttctgttttcaaagacat

SEQ ID NO: 2545505 - DNA, 25 bp, Homo sapien
caggatgctttctgttttcaaagac

SEQ ID NO: 2545506 - DNA, 25 bp, Homo sapien
tgcaggatgctttctgttttcaaag

SEQ ID NO: 2545507 - DNA, 25 bp, Homo sapien
aatacactttgtctgcttagagcca

SEQ ID NO: 2545508 - DNA, 25 bp, Homo sapien
gggcatggccagtggttaattctac

SEQ ID NO: 2545509 - DNA, 25 bp, Homo sapien
taacagcctatttaagcacaatgcc

SEQ ID NO: 2545510 - DNA, 25 bp, Homo sapien
gaggttaagtatgaatgaacgggca

SEQ ID NO: 2545511 - DNA, 25 bp, Homo sapien
tgggtaagattggatatagcctaaa

SEQ ID NO: 2545512 - DNA, 25 bp, Homo sapien
cagaaaggagtcaaatacatctcat

SEQ ID NO: 2545513 - DNA, 25 bp, Homo sapien
cagagtccttcaaacgccttatgtg

SEQ ID NO: 2545514 - DNA, 25 bp, Homo sapien
tatgtgtattcatcttggtgtctgc

SEQ ID NO: 2545515 - DNA, 25 bp, Homo sapien
aagtctatcggctccttattcccag

SEQ ID NO: 2545516 - DNA, 25 bp, Homo sapien
gaactgtgcccataagatgaagaac

SEQ ID NO: 2545517 - DNA, 25 bp, Homo sapien
gaaaccagttactgaccctacaatg

SEQ ID NO: 2545518 - DNA, 25 bp, Homo sapien
cgacagtagtgaaatgaaaccagtt

SEQ ID NO: 2545519 - DNA, 25 bp, Homo sapien
tcgtcccttcgcgttgacagctgaa

SEQ ID NO: 2545520 - DNA, 25 bp, Homo sapien
ctgaatatcccattgacgtggatgc

SEQ ID NO: 2545521 - DNA, 25 bp, Homo sapien
catcattaacttataggctacagcg

SEQ ID NO: 2545522 - DNA, 25 bp, Homo sapien
tcagaagttgacaagacccagtgac

SEQ ID NO: 2545523 - DNA, 25 bp, Homo sapien
tctacatgttcagtctgcccactca

SEQ ID NO: 2545524 - DNA, 25 bp, Homo sapien
gctgaatcatgggagggctctacat

SEQ ID NO: 2545525 - DNA, 25 bp, Homo sapien
gtgagggctgaatcatgggagggct

SEQ ID NO: 2545526 - DNA, 25 bp, Homo sapien
ggagggctctacatgttcagtctgc

SEQ ID NO: 2545527 - DNA, 25 bp, Homo sapien
tctgatcatgatgccagcagatatt

SEQ ID NO: 2545528 - DNA, 25 bp, Homo sapien
tctctgatcatgatgccagcagata

SEQ ID NO: 2545529 - DNA, 25 bp, Homo sapien
gtctctgatcatgatgccagcagat

SEQ ID NO: 2545530 - DNA, 25 bp, Homo sapien
ctctgatcatgatgccagcagatat

SEQ ID NO: 2545531 - DNA, 25 bp, Homo sapien
ataaggcgcgctttctccacctcga

SEQ ID NO: 2545532 - DNA, 25 bp, Homo sapien
gagcctgccaagttgaaataccata

SEQ ID NO: 2545533 - DNA, 25 bp, Homo sapien
gttgaaataccataaggcgcgcttt

SEQ ID NO: 2545534 - DNA, 25 bp, Homo sapien
tgagcctgccaagttgaaataccat

SEQ ID NO: 2545535 - DNA, 25 bp, Homo sapien
tctgcatgtctgatagaatctggcc

SEQ ID NO: 2545536 - DNA, 25 bp, Homo sapien
taatactgtggttctcaccttgggc

SEQ ID NO: 2545537 - DNA, 25 bp, Homo sapien
tgaaaaagtacagacgcttgggccc

SEQ ID NO: 2545538 - DNA, 25 bp, Homo sapien
tgagtaacacgcattctcgaggaac

SEQ ID NO: 2545539 - DNA, 25 bp, Homo sapien
ggtgaaaagtgagcatccacgaaca

SEQ ID NO: 2545540 - DNA, 25 bp, Homo sapien
gcctcacattcctggggagtggaga

SEQ ID NO: 2545541 - DNA, 25 bp, Homo sapien
aagtgagcatccacgaacacacgct

SEQ ID NO: 2545542 - DNA, 25 bp, Homo sapien
aacacacgctcatccaacaagcctg

SEQ ID NO: 2545543 - DNA, 25 bp, Homo sapien
gtgttgagggaagcccggtgagtta

SEQ ID NO: 2545544 - DNA, 25 bp, Homo sapien
tctctgtgccagaaacataggctgc

SEQ ID NO: 2545545 - DNA, 25 bp, Homo sapien
aagcccggtgagttagggctgacaa

SEQ ID NO: 2545546 - DNA, 25 bp, Homo sapien
gcttggtgttgagggaagcccggtg

SEQ ID NO: 2545547 - DNA, 25 bp, Homo sapien
cgtggtctttgcatttgtaaaacca

SEQ ID NO: 2545548 - DNA, 25 bp, Homo sapien
gtggtctttgcatttgtaaaaccaa

SEQ ID NO: 2545549 - DNA, 25 bp, Homo sapien
tggtctttgcatttgtaaaaccaac

SEQ ID NO: 2545550 - DNA, 25 bp, Homo sapien
ggaagaacattaactcttgcatctc

SEQ ID NO: 2545551 - DNA, 25 bp, Homo sapien
aaagcctgctagcataaactgctgc

SEQ ID NO: 2545552 - DNA, 25 bp, Homo sapien
ccaatcaatatttgctccgtaagca

SEQ ID NO: 2545553 - DNA, 25 bp, Homo sapien
cagagccccagttcagcatatttcc

SEQ ID NO: 2545554 - DNA, 25 bp, Homo sapien
taacgctacccctgattagaatggc

SEQ ID NO: 2545555 - DNA, 25 bp, Homo sapien
gaatatcagcggaatcatcaacgtg

SEQ ID NO: 2545556 - DNA, 25 bp, Homo sapien
cagctggcagacatttgggtgattc

SEQ ID NO: 2545557 - DNA, 25 bp, Homo sapien
ggttatttatccctcaccagctggc

SEQ ID NO: 2545558 - DNA, 25 bp, Homo sapien
aaatggctgtcgcaaagaacactcc

SEQ ID NO: 2545559 - DNA, 25 bp, Homo sapien
cagtgactgcaaatgttcatgatcc

SEQ ID NO: 2545560 - DNA, 25 bp, Homo sapien
tgcggcccacacagttaagtcatca

SEQ ID NO: 2545561 - DNA, 25 bp, Homo sapien
tgttgacaatgaacacccatcagaa

SEQ ID NO: 2545562 - DNA, 25 bp, Homo sapien
tgattaagttcttatcagtgagatg

SEQ ID NO: 2545563 - DNA, 25 bp, Homo sapien
cttatcagtgagatgcaagagagag

SEQ ID NO: 2545564 - DNA, 25 bp, Homo sapien
gagcttccaggaaggttgcctaaaa

SEQ ID NO: 2545565 - DNA, 25 bp, Homo sapien
tgggcacactgctggtaataaatca

SEQ ID NO: 2545566 - DNA, 25 bp, Homo sapien
caaacgatgacagctggtgcatact

SEQ ID NO: 2545567 - DNA, 25 bp, Homo sapien
cttgacatcccaaatggaagggctg

SEQ ID NO: 2545568 - DNA, 25 bp, Homo sapien
tgctggctcgcacgccgatgatgtt

SEQ ID NO: 2545569 - DNA, 25 bp, Homo sapien
ccagtataatccgtgcgctccttga

SEQ ID NO: 2545570 - DNA, 25 bp, Homo sapien
gaagtgttcttaatatgcaacctga

SEQ ID NO: 2545571 - DNA, 25 bp, Homo sapien
gtggaagtgttcttaatatgcaacc

SEQ ID NO: 2545572 - DNA, 25 bp, Homo sapien
tgttcttaatatgcaacctgaatac

SEQ ID NO: 2545573 - DNA, 25 bp, Homo sapien
taatatgcaacctgaatacaggcat

SEQ ID NO: 2545574 - DNA, 25 bp, Homo sapien
cgcaccagcgacctcaggatagctt

SEQ ID NO: 2545575 - DNA, 25 bp, Homo sapien
tgtggtttgcgttcatagtatccat

SEQ ID NO: 2545576 - DNA, 25 bp, Homo sapien
agccgcatccctaagtgacttgtgg

SEQ ID NO: 2545577 - DNA, 25 bp, Homo sapien
tcggtagttctctgagactatgata

SEQ ID NO: 2545578 - DNA, 25 bp, Homo sapien
ggtccaagctgagcgcaaatcctag

SEQ ID NO: 2545579 - DNA, 25 bp, Homo sapien
tgacacctggatcggcaccgagcag

SEQ ID NO: 2545580 - DNA, 25 bp, Homo sapien
gcaggtcccgaagactctgctccat

SEQ ID NO: 2545581 - DNA, 25 bp, Homo sapien
agcagaggcaggtcccgaagactct

SEQ ID NO: 2545582 - DNA, 25 bp, Homo sapien
ctcgccagaacactggttcttatca

SEQ ID NO: 2545583 - DNA, 25 bp, Homo sapien
tcgccagaacactggttcttatcat

SEQ ID NO: 2545584 - DNA, 25 bp, Homo sapien
tgagctcacccagttagtaagtggg

SEQ ID NO: 2545585 - DNA, 25 bp, Homo sapien
tctagagtccaaattctccaatgag

SEQ ID NO: 2545586 - DNA, 25 bp, Homo sapien
accatgcatctcactcagggtgacc

SEQ ID NO: 2545587 - DNA, 25 bp, Homo sapien
taagtgggagaggtagaatttgccc

SEQ ID NO: 2545588 - DNA, 25 bp, Homo sapien
aataggacgcagaattgtgcttcca

SEQ ID NO: 2545589 - DNA, 25 bp, Homo sapien
taagaatctggcaacatgtccaatg

SEQ ID NO: 2545590 - DNA, 25 bp, Homo sapien
catgtccaatgaataggacgcagaa

SEQ ID NO: 2545591 - DNA, 25 bp, Homo sapien
ggatcttgtaagaatctggcaacat

SEQ ID NO: 2545592 - DNA, 25 bp, Homo sapien
tttccattgaacggaccaccagcat

SEQ ID NO: 2545593 - DNA, 25 bp, Homo sapien
tccattgaacggaccaccagcatct

SEQ ID NO: 2545594 - DNA, 25 bp, Homo sapien
atttccattgaacggaccaccagca

SEQ ID NO: 2545595 - DNA, 25 bp, Homo sapien
ttccattgaacggaccaccagcatc

SEQ ID NO: 2545596 - DNA, 25 bp, Homo sapien
gggcaattgttgatcgagccggtcc

SEQ ID NO: 2545597 - DNA, 25 bp, Homo sapien
gaaattgacaaaagatacatgaggg

SEQ ID NO: 2545598 - DNA, 25 bp, Homo sapien
ttgatcgagccggtccacagactcc

SEQ ID NO: 2545599 - DNA, 25 bp, Homo sapien
ttccatccactctagttcagaaagc

SEQ ID NO: 2545600 - DNA, 25 bp, Homo sapien
ggcctttctccgtctgtcatgctta

SEQ ID NO: 2545601 - DNA, 25 bp, Homo sapien
tcatgcttagcatcctcatttcttc

SEQ ID NO: 2545602 - DNA, 25 bp, Homo sapien
tgaagccatcagctccggcctttct

SEQ ID NO: 2545603 - DNA, 25 bp, Homo sapien
tccgtagaaaagcaggtagcctctt

SEQ ID NO: 2545604 - DNA, 25 bp, Homo sapien
agaagttgcggtagccttcagccat

SEQ ID NO: 2545605 - DNA, 25 bp, Homo sapien
gaagaagttgcggtagccttcagcc

SEQ ID NO: 2545606 - DNA, 25 bp, Homo sapien
aagaagttgcggtagccttcagcca

SEQ ID NO: 2545607 - DNA, 25 bp, Homo sapien
ttattaatttggtctgtttggtctg

SEQ ID NO: 2545608 - DNA, 25 bp, Homo sapien
taaattacggctcaggagtcctgca

SEQ ID NO: 2545609 - DNA, 25 bp, Homo sapien
aaagatctgccctaaccgatttgcc

SEQ ID NO: 2545610 - DNA, 25 bp, Homo sapien
tccctgtttggagaccagaccgctt

SEQ ID NO: 2545611 - DNA, 25 bp, Homo sapien
aatcagctctatcagggcaatgggc

SEQ ID NO: 2545612 - DNA, 25 bp, Homo sapien
tgagctgctatctgttgaaccggaa

SEQ ID NO: 2545613 - DNA, 25 bp, Homo sapien
caaggctacttccaggcgtcaacgt

SEQ ID NO: 2545614 - DNA, 25 bp, Homo sapien
gaacttatcttccagcagcttggga

SEQ ID NO: 2545615 - DNA, 25 bp, Homo sapien
tgtaatccccagcttagactcacgg

SEQ ID NO: 2545616 - DNA, 25 bp, Homo sapien
aggtccccagcttggttgatgggga

SEQ ID NO: 2545617 - DNA, 25 bp, Homo sapien
tgcaactcatacaacagcagtgatt

SEQ ID NO: 2545618 - DNA, 25 bp, Homo sapien
tacaacagcagtgattctccaagga

SEQ ID NO: 2545619 - DNA, 25 bp, Homo sapien
acagcagtgattctccaaggaaagc

SEQ ID NO: 2545620 - DNA, 25 bp, Homo sapien
actcatacaacagcagtgattctcc

SEQ ID NO: 2545621 - DNA, 25 bp, Homo sapien
tcttgcaagagacagtgaggagaca

SEQ ID NO: 2545622 - DNA, 25 bp, Homo sapien
aatggagcaatctgcaatgtcctgc

SEQ ID NO: 2545623 - DNA, 25 bp, Homo sapien
cttgcaagagacagtgaggagacag

SEQ ID NO: 2545624 - DNA, 25 bp, Homo sapien
acacttccagtgtctaatggagcaa

SEQ ID NO: 2545625 - DNA, 25 bp, Homo sapien
gctcagttgggagattcttctgcta

SEQ ID NO: 2545626 - DNA, 25 bp, Homo sapien
cacttggtggtattgagttgctgga

SEQ ID NO: 2545627 - DNA, 25 bp, Homo sapien
tacacatggagcttgacggaggtca

SEQ ID NO: 2545628 - DNA, 25 bp, Homo sapien
tggtttaaaggatcaaagacagtct

SEQ ID NO: 2545629 - DNA, 25 bp, Homo sapien
taagttggcaccttgtccctccaat

SEQ ID NO: 2545630 - DNA, 25 bp, Homo sapien
ggcagcgtgctttattcactggtaa

SEQ ID NO: 2545631 - DNA, 25 bp, Homo sapien
tcagaagcgctgacttaagttggca

SEQ ID NO: 2545632 - DNA, 25 bp, Homo sapien
tcacttgatccgctctcagaagcgc

SEQ ID NO: 2545633 - DNA, 25 bp, Homo sapien
gggcgaattaaactctgatgactga

SEQ ID NO: 2545634 - DNA, 25 bp, Homo sapien
gcagaccagaattcataccagccat

SEQ ID NO: 2545635 - DNA, 25 bp, Homo sapien
attaaactctgatgactgagactga

SEQ ID NO: 2545636 - DNA, 25 bp, Homo sapien
tatccttgcccactcgaatctgcag

SEQ ID NO: 2545637 - DNA, 25 bp, Homo sapien
cccggctgactgttgtgggctgtta

SEQ ID NO: 2545638 - DNA, 25 bp, Homo sapien
ttaggtaaccaagggaatgctacac

SEQ ID NO: 2545639 - DNA, 25 bp, Homo sapien
ttccattcggatctgaagaccagag

SEQ ID NO: 2545640 - DNA, 25 bp, Homo sapien
tgggttccagccttccattcggatc

SEQ ID NO: 2545641 - DNA, 25 bp, Homo sapien
agatgctcccgatcctctgcaaggg

SEQ ID NO: 2545642 - DNA, 25 bp, Homo sapien
cagacgcagttctctcagggagggt

SEQ ID NO: 2545643 - DNA, 25 bp, Homo sapien
ctcgatggagaaaggcccgtagctg

SEQ ID NO: 2545644 - DNA, 25 bp, Homo sapien
tagctggcattgaggacaggcagcc

SEQ ID NO: 2545645 - DNA, 25 bp, Homo sapien
aaatcacatggacagtggacacccg

SEQ ID NO: 2545646 - DNA, 25 bp, Homo sapien
gcatatacgcacatgtccaatggga

SEQ ID NO: 2545647 - DNA, 25 bp, Homo sapien
cagacaagctaccatcgacagagag

SEQ ID NO: 2545648 - DNA, 25 bp, Homo sapien
gccgggcgtacaaagcaatgctcca

SEQ ID NO: 2545649 - DNA, 25 bp, Homo sapien
tacgccgtcaccaacgaacaaaatc

SEQ ID NO: 2545650 - DNA, 25 bp, Homo sapien
cactgaacgtatctctccctcaggg

SEQ ID NO: 2545651 - DNA, 25 bp, Homo sapien
ggaagggcagcacctcgcttccatg

SEQ ID NO: 2545652 - DNA, 25 bp, Homo sapien
attgttcatttttccgcactgaacg

SEQ ID NO: 2545653 - DNA, 25 bp, Homo sapien
gcaattgcataatccaaagaaccaa

SEQ ID NO: 2545654 - DNA, 25 bp, Homo sapien
tgactttctaggcaaagctccacaa

SEQ ID NO: 2545655 - DNA, 25 bp, Homo sapien
tgcaggcagagcaattgcataatcc

SEQ ID NO: 2545656 - DNA, 25 bp, Homo sapien
aatgtaaactattggctgggaacac

SEQ ID NO: 2545657 - DNA, 25 bp, Homo sapien
tcctgctcccggctttgtgagacga

SEQ ID NO: 2545658 - DNA, 25 bp, Homo sapien
cagcagctgagagagccaagagctc

SEQ ID NO: 2545659 - DNA, 25 bp, Homo sapien
ggtcactgaccctcgttgtttccca

SEQ ID NO: 2545660 - DNA, 25 bp, Homo sapien
tcttggcagtcatccgccagcagct

SEQ ID NO: 2545661 - DNA, 25 bp, Homo sapien
ttgaaggagagtgacatgttcgcat

SEQ ID NO: 2545662 - DNA, 25 bp, Homo sapien
tgggaggcaaccagctttgccatca

SEQ ID NO: 2545663 - DNA, 25 bp, Homo sapien
catcaaggcgtcttgctgatgctgt

SEQ ID NO: 2545664 - DNA, 25 bp, Homo sapien
cgcgctgcacagaaagccctaaaac

SEQ ID NO: 2545665 - DNA, 25 bp, Homo sapien
tcagctgaatcagagacccaagcat

SEQ ID NO: 2545666 - DNA, 25 bp, Homo sapien
cttggagcaagggatctcccctgct

SEQ ID NO: 2545667 - DNA, 25 bp, Homo sapien
gcaccttggagcaagggatctcccc

SEQ ID NO: 2545668 - DNA, 25 bp, Homo sapien
accttggagcaagggatctcccctg

SEQ ID NO: 2545669 - DNA, 25 bp, Homo sapien
aggcaccttggagcaagggatctcc

SEQ ID NO: 2545670 - DNA, 25 bp, Homo sapien
cagctgcactgatgaactcagctgg

SEQ ID NO: 2545671 - DNA, 25 bp, Homo sapien
ctgcactgatgaactcagctggtaa

SEQ ID NO: 2545672 - DNA, 25 bp, Homo sapien
acagctgcactgatgaactcagctg

SEQ ID NO: 2545673 - DNA, 25 bp, Homo sapien
gctgcactgatgaactcagctggta

SEQ ID NO: 2545674 - DNA, 25 bp, Homo sapien
gaacatagatggatttagtggcacc

SEQ ID NO: 2545675 - DNA, 25 bp, Homo sapien
tggatttagtggcacctttgggacc

SEQ ID NO: 2545676 - DNA, 25 bp, Homo sapien
gggaccccaggtaaggtgatagaca

SEQ ID NO: 2545677 - DNA, 25 bp, Homo sapien
caaagtccacgggaggaagcacctc

SEQ ID NO: 2545678 - DNA, 25 bp, Homo sapien
tctccctgagccttcccgttgatct

SEQ ID NO: 2545679 - DNA, 25 bp, Homo sapien
tgagccttcccgttgatctcctctg

SEQ ID NO: 2545680 - DNA, 25 bp, Homo sapien
ttcccgttgatctcctctgagaacc

SEQ ID NO: 2545681 - DNA, 25 bp, Homo sapien
gccttcccgttgatctcctctgaga

SEQ ID NO: 2545682 - DNA, 25 bp, Homo sapien
ttcccaaatcgaaccccagcactgg

SEQ ID NO: 2545683 - DNA, 25 bp, Homo sapien
tgtgaaattcccacggctttcccaa

SEQ ID NO: 2545684 - DNA, 25 bp, Homo sapien
cccgtcacatcggtgtgaaattccc

SEQ ID NO: 2545685 - DNA, 25 bp, Homo sapien
caagcccccgtcacatcggtgtgaa

SEQ ID NO: 2545686 - DNA, 25 bp, Homo sapien
cgttctgggactggttttcagtgac

SEQ ID NO: 2545687 - DNA, 25 bp, Homo sapien
tgcgttctgggactggttttcagtg

SEQ ID NO: 2545688 - DNA, 25 bp, Homo sapien
ctctgcgttctgggactggttttca

SEQ ID NO: 2545689 - DNA, 25 bp, Homo sapien
tctgggactggttttcagtgaccat

SEQ ID NO: 2545690 - DNA, 25 bp, Homo sapien
tcttttctgatcaccggctgtatcc

SEQ ID NO: 2545691 - DNA, 25 bp, Homo sapien
acgttcttttctgatcaccggctgt

SEQ ID NO: 2545692 - DNA, 25 bp, Homo sapien
tcaccggctgtatccagcttttctc

SEQ ID NO: 2545693 - DNA, 25 bp, Homo sapien
tctgatcaccggctgtatccagctt

SEQ ID NO: 2545694 - DNA, 25 bp, Homo sapien
catatcgttgtaatcagccccatca

SEQ ID NO: 2545695 - DNA, 25 bp, Homo sapien
tcttcaatcaccccttggaagatgt

SEQ ID NO: 2545696 - DNA, 25 bp, Homo sapien
atcgttgtaatcagccccatcatca

SEQ ID NO: 2545697 - DNA, 25 bp, Homo sapien
ttcaatcaccccttggaagatgttg

SEQ ID NO: 2545698 - DNA, 25 bp, Homo sapien
gtgattctcctacttcagtctcccc

SEQ ID NO: 2545699 - DNA, 25 bp, Homo sapien
ggattacaggtgtgcatcatcatgc

SEQ ID NO: 2545700 - DNA, 25 bp, Homo sapien
tgggattacaggtgtgcatcatcat

SEQ ID NO: 2545701 - DNA, 25 bp, Homo sapien
attacaggtgtgcatcatcatgcct

SEQ ID NO: 2545702 - DNA, 25 bp, Homo sapien
caataagagcacgtcactggatgga

SEQ ID NO: 2545703 - DNA, 25 bp, Homo sapien
gaggctgccacgtgtcatgaagaca

SEQ ID NO: 2545704 - DNA, 25 bp, Homo sapien
caggattaactagaccaaggcagca

SEQ ID NO: 2545705 - DNA, 25 bp, Homo sapien
tttccaccgctaaagatgctcagag

SEQ ID NO: 2545706 - DNA, 25 bp, Homo sapien
ggatacgtggattgacatctcaggg

SEQ ID NO: 2545707 - DNA, 25 bp, Homo sapien
atttctcaagggtgacgttgtgagg

SEQ ID NO: 2545708 - DNA, 25 bp, Homo sapien
gggggatacgtggattgacatctca

SEQ ID NO: 2545709 - DNA, 25 bp, Homo sapien
ttatttctcaagggtgacgttgtga

SEQ ID NO: 2545710 - DNA, 25 bp, Homo sapien
gaataatttccctcgttccactgta

SEQ ID NO: 2545711 - DNA, 25 bp, Homo sapien
cactgtatagcagtttttccttgaa

SEQ ID NO: 2545712 - DNA, 25 bp, Homo sapien
caacatatgccatgtaacgttcata

SEQ ID NO: 2545713 - DNA, 25 bp, Homo sapien
gttttagttgcaaacgatacaacat

SEQ ID NO: 2545714 - DNA, 25 bp, Homo sapien
gagctgcaggttttcctcgtctcca

SEQ ID NO: 2545715 - DNA, 25 bp, Homo sapien
tgttttgtgtcagctgccctgggtc

SEQ ID NO: 2545716 - DNA, 25 bp, Homo sapien
gtcggtctctcacacttgcgcactt

SEQ ID NO: 2545717 - DNA, 25 bp, Homo sapien
gtctccaccgagcatgtgacccata

SEQ ID NO: 2545718 - DNA, 25 bp, Homo sapien
ccgtagctgtgcagatgatgtcttt

SEQ ID NO: 2545719 - DNA, 25 bp, Homo sapien
tgctcagcgtcagacacagtgggct

SEQ ID NO: 2545720 - DNA, 25 bp, Homo sapien
cctgctcagcgtcagacacagtggg

SEQ ID NO: 2545721 - DNA, 25 bp, Homo sapien
cttttccgtagctgtgcagatgatg

SEQ ID NO: 2545722 - DNA, 25 bp, Homo sapien
caagctccttaccttccgcatggaa

SEQ ID NO: 2545723 - DNA, 25 bp, Homo sapien
aaagcaagctccttaccttccgcat

SEQ ID NO: 2545724 - DNA, 25 bp, Homo sapien
gctccttaccttccgcatggaagtt

SEQ ID NO: 2545725 - DNA, 25 bp, Homo sapien
ccttaccttccgcatggaagttctc

SEQ ID NO: 2545726 - DNA, 25 bp, Homo sapien
aaatctccccgcttagtttgagtca

SEQ ID NO: 2545727 - DNA, 25 bp, Homo sapien
caaaagctaactggtcaccccgtga

SEQ ID NO: 2545728 - DNA, 25 bp, Homo sapien
caggcaacgcggtagccattgcata

SEQ ID NO: 2545729 - DNA, 25 bp, Homo sapien
tctactcgagttatgtgaacacagc

SEQ ID NO: 2545730 - DNA, 25 bp, Homo sapien
acttcaaaaagggaacgacatctca

SEQ ID NO: 2545731 - DNA, 25 bp, Homo sapien
tagcacagatgtagccaggtagatg

SEQ ID NO: 2545732 - DNA, 25 bp, Homo sapien
cagttattggtgtgtgttgatcaga

SEQ ID NO: 2545733 - DNA, 25 bp, Homo sapien
caggtagatgttcctatccataggg

SEQ ID NO: 2545734 - DNA, 25 bp, Homo sapien
gaatgtcgtggtgtcctaaatcccc

SEQ ID NO: 2545735 - DNA, 25 bp, Homo sapien
ggcagagattcccatggcagtcaga

SEQ ID NO: 2545736 - DNA, 25 bp, Homo sapien
tattgaccaggaacaagaggccgtt

SEQ ID NO: 2545737 - DNA, 25 bp, Homo sapien
tagtcggcaattatcagtgggtccc

SEQ ID NO: 2545738 - DNA, 25 bp, Homo sapien
cagtaacgtggactgtgtgccagct

SEQ ID NO: 2545739 - DNA, 25 bp, Homo sapien
gatctgagccgagccatctggctgg

SEQ ID NO: 2545740 - DNA, 25 bp, Homo sapien
tgctgccttactgaaacagcctcgg

SEQ ID NO: 2545741 - DNA, 25 bp, Homo sapien
gaactctctggatcgttgatactca

SEQ ID NO: 2545742 - DNA, 25 bp, Homo sapien
tgggtgcccttgtaacagagtccgg

SEQ ID NO: 2545743 - DNA, 25 bp, Homo sapien
gatgggtgcccttgtaacggagtcc

SEQ ID NO: 2545744 - DNA, 25 bp, Homo sapien
gatggctgcccttgtaacggagtcc

SEQ ID NO: 2545745 - DNA, 25 bp, Homo sapien
gatgggtgcccttgtaacagagtcc

SEQ ID NO: 2545746 - DNA, 25 bp, Homo sapien
gagtccaggggaacgggatgggtgc

SEQ ID NO: 2545747 - DNA, 25 bp, Homo sapien
cgggggagcgggatgggtgtaacag

SEQ ID NO: 2545748 - DNA, 25 bp, Homo sapien
ggagcgggatgggtgtaacagagtc

SEQ ID NO: 2545749 - DNA, 25 bp, Homo sapien
gggggagcgggatgggtgtaacaga

SEQ ID NO: 2545750 - DNA, 25 bp, Homo sapien
agagtccgggggagcgggatgggtg

SEQ ID NO: 2545751 - DNA, 25 bp, Homo sapien
gatgggtgcccttgtaacggagtcc

SEQ ID NO: 2545752 - DNA, 25 bp, Homo sapien
tgggtgcccttgtaacagagtccgg

SEQ ID NO: 2545753 - DNA, 25 bp, Homo sapien
gatgggtgcccttgtaacagagtcc

SEQ ID NO: 2545754 - DNA, 25 bp, Homo sapien
ggatgggtgcccttataacagagtc

SEQ ID NO: 2545755 - DNA, 25 bp, Homo sapien
ggatgggtgcccttataacagagtc

SEQ ID NO: 2545756 - DNA, 25 bp, Homo sapien
tgggtgcccttgtaacagagtccgg

SEQ ID NO: 2545757 - DNA, 25 bp, Homo sapien
gatgggtgcccttgtaacggagtcc

SEQ ID NO: 2545758 - DNA, 25 bp, Homo sapien
gatgggtgcccttgtaacagagtcc

SEQ ID NO: 2545759 - DNA, 25 bp, Homo sapien
tgggtgcccttgtaacagagtccgg

SEQ ID NO: 2545760 - DNA, 25 bp, Homo sapien
gatgggtgcccttgtaacggagtcc

SEQ ID NO: 2545761 - DNA, 25 bp, Homo sapien
gatgggtgcccttgtaacagagtcc

SEQ ID NO: 2545762 - DNA, 25 bp, Homo sapien
gatggctgcccttgtaacggagtcc

SEQ ID NO: 2545763 - DNA, 25 bp, Homo sapien
tgagggctggacctgctagttcact

SEQ ID NO: 2545764 - DNA, 25 bp, Homo sapien
taatatagcctcatcagtcggcaga

SEQ ID NO: 2545765 - DNA, 25 bp, Homo sapien
tgcgctaccactagcaccagtgagg

SEQ ID NO: 2545766 - DNA, 25 bp, Homo sapien
aaagtgtgagcccaattgcgctacc

SEQ ID NO: 2545767 - DNA, 25 bp, Homo sapien
cagaactggctttctagggccggga

SEQ ID NO: 2545768 - DNA, 25 bp, Homo sapien
ggtgtttcaaaagtgtgggactgca

SEQ ID NO: 2545769 - DNA, 25 bp, Homo sapien
ttggctaccatgcagcagaaggagc

SEQ ID NO: 2545770 - DNA, 25 bp, Homo sapien
ttgcgatgcaaggaacgcggcctct

SEQ ID NO: 2545771 - DNA, 25 bp, Homo sapien
caggccattggctgcactcagctgg

SEQ ID NO: 2545772 - DNA, 25 bp, Homo sapien
tgttgcaggtctctcagcgtctgct

SEQ ID NO: 2545773 - DNA, 25 bp, Homo sapien
cagccccgctcgcaatgttgcaggt

SEQ ID NO: 2545774 - DNA, 25 bp, Homo sapien
taggcacagggagcacgacactgcc

SEQ ID NO: 2545775 - DNA, 25 bp, Homo sapien
tgaaactccacgtgcaccctgcggg

SEQ ID NO: 2545776 - DNA, 25 bp, Homo sapien
ggctccgctgggaaaattcgggtca

SEQ ID NO: 2545777 - DNA, 25 bp, Homo sapien
cgctgggaaaattcgggtcacaact

SEQ ID NO: 2545778 - DNA, 25 bp, Homo sapien
aattcgggtcacaacttgtagctga

SEQ ID NO: 2545779 - DNA, 25 bp, Homo sapien
ctttggaaaacagggcggccaggct

SEQ ID NO: 2545780 - DNA, 25 bp, Homo sapien
ccaggctgatgagtaccggcgacca

SEQ ID NO: 2545781 - DNA, 25 bp, Homo sapien
ctgatgagtaccggcgaccagtggt

SEQ ID NO: 2545782 - DNA, 25 bp, Homo sapien
aggctgatgagtaccggcgaccagt

SEQ ID NO: 2545783 - DNA, 25 bp, Homo sapien
acgaccgcgcgggctcctgagttgc

SEQ ID NO: 2545784 - DNA, 25 bp, Homo sapien
tggagacccggagcgcagatcctcc

SEQ ID NO: 2545785 - DNA, 25 bp, Homo sapien
cggcgccgtccaggcgaacaagaga

SEQ ID NO: 2545786 - DNA, 25 bp, Homo sapien
gaacaagagaccgtctcagtcccct

SEQ ID NO: 2545787 - DNA, 25 bp, Homo sapien
taaaattcctaagagtcgacgctgc

SEQ ID NO: 2545788 - DNA, 25 bp, Homo sapien
tcaaggtgggacttccgatctccgt

SEQ ID NO: 2545789 - DNA, 25 bp, Homo sapien
gtgtcaaaattgatgcccgcactga

SEQ ID NO: 2545790 - DNA, 25 bp, Homo sapien
catccttaacgctacagtgggtctg

SEQ ID NO: 2545791 - DNA, 25 bp, Homo sapien
taaaatgtagcatgccagactccca

SEQ ID NO: 2545792 - DNA, 25 bp, Homo sapien
gtaccaatagtaccacagaggcagg

SEQ ID NO: 2545793 - DNA, 25 bp, Homo sapien
gctgcaggaacaatcgcaggcccag

SEQ ID NO: 2545794 - DNA, 25 bp, Homo sapien
ggagcccattcacattttcggaaga

SEQ ID NO: 2545795 - DNA, 25 bp, Homo sapien
tcgtctcttccagcaacatgaatct

SEQ ID NO: 2545796 - DNA, 25 bp, Homo sapien
ggctgctgggtcgtctcttccagca

SEQ ID NO: 2545797 - DNA, 25 bp, Homo sapien
tgctgggtcgtctcttccagcaaca

SEQ ID NO: 2545798 - DNA, 25 bp, Homo sapien
tgggtcgtctcttccagcaacatga

SEQ ID NO: 2545799 - DNA, 25 bp, Homo sapien
tcaagtgccagagaagagaaccaaa

SEQ ID NO: 2545800 - DNA, 25 bp, Homo sapien
cagagaagagaaccaaagatggcag

SEQ ID NO: 2545801 - DNA, 25 bp, Homo sapien
agagaaccaaagatggcagcttgcc

SEQ ID NO: 2545802 - DNA, 25 bp, Homo sapien
gagaagagaaccaaagatggcagct

SEQ ID NO: 2545803 - DNA, 25 bp, Homo sapien
tgtccataaagaagggtgtgccagg

SEQ ID NO: 2545804 - DNA, 25 bp, Homo sapien
gaccagcgggaagactgggcacatc

SEQ ID NO: 2545805 - DNA, 25 bp, Homo sapien
ggcacatcgtatggacagtcacccc

SEQ ID NO: 2545806 - DNA, 25 bp, Homo sapien
gagagtacactgagtccggggaaca

SEQ ID NO: 2545807 - DNA, 25 bp, Homo sapien
aatgaatgaacgttggcctctcttg

SEQ ID NO: 2545808 - DNA, 25 bp, Homo sapien
tgaatgaacgttggcctctcttggt

SEQ ID NO: 2545809 - DNA, 25 bp, Homo sapien
ggtctttttatcaaagagttcagga

SEQ ID NO: 2545810 - DNA, 25 bp, Homo sapien
tcttggtctttttatcaaagagttc

SEQ ID NO: 2545811 - DNA, 25 bp, Homo sapien
tagcacggtgttttcacaagaagcg

SEQ ID NO: 2545812 - DNA, 25 bp, Homo sapien
ttgaaatcggacttgaaaggcagct

SEQ ID NO: 2545813 - DNA, 25 bp, Homo sapien
agagagaaacttagaccccagacct

SEQ ID NO: 2545814 - DNA, 25 bp, Homo sapien
aggtttccaaactgcacgctgcagg

SEQ ID NO: 2545815 - DNA, 25 bp, Homo sapien
tgtccagcccagtggatatctatgc

SEQ ID NO: 2545816 - DNA, 25 bp, Homo sapien
taatggctcccgattgttaagaccc

SEQ ID NO: 2545817 - DNA, 25 bp, Homo sapien
tcaggtctaagatagtaatggctcc

SEQ ID NO: 2545818 - DNA, 25 bp, Homo sapien
tctcagtctatgtcagggtgcaagc

SEQ ID NO: 2545819 - DNA, 25 bp, Homo sapien
tccaagttcccttgagttgccagtg

SEQ ID NO: 2545820 - DNA, 25 bp, Homo sapien
ctctggtccaagttcccttgagttg

SEQ ID NO: 2545821 - DNA, 25 bp, Homo sapien
tcagtaggtctttggtagccagatc

SEQ ID NO: 2545822 - DNA, 25 bp, Homo sapien
aggtctttggtagccagatctgctg

SEQ ID NO: 2545823 - DNA, 25 bp, Homo sapien
ttcggttcttacgagcgggctctga

SEQ ID NO: 2545824 - DNA, 25 bp, Homo sapien
gactgctgcgcagtagaacctgttt

SEQ ID NO: 2545825 - DNA, 25 bp, Homo sapien
agtatgatctccacgccaagactcg

SEQ ID NO: 2545826 - DNA, 25 bp, Homo sapien
caagactcgcccaaaactcatcggg

SEQ ID NO: 2545827 - DNA, 25 bp, Homo sapien
aatgctggtgaagccaagcgtcgcg

SEQ ID NO: 2545828 - DNA, 25 bp, Homo sapien
tcctgagagctcatcggaataccga

SEQ ID NO: 2545829 - DNA, 25 bp, Homo sapien
tccctggcatcaccgggagtcctga

SEQ ID NO: 2545830 - DNA, 25 bp, Homo sapien
gctgttgctcaggacggctccctgg

SEQ ID NO: 2545831 - DNA, 25 bp, Homo sapien
cacagatgatgaaagatcgattcag

SEQ ID NO: 2545832 - DNA, 25 bp, Homo sapien
taactagcagattagagcatacaag

SEQ ID NO: 2545833 - DNA, 25 bp, Homo sapien
tgacaagggactctaataaaatgct

SEQ ID NO: 2545834 - DNA, 25 bp, Homo sapien
tgcttggcaacacaataagccattt

SEQ ID NO: 2545835 - DNA, 25 bp, Homo sapien
taaatcggatcagtaggctgagcct

SEQ ID NO: 2545836 - DNA, 25 bp, Homo sapien
agttctaacctaatgctccaggcag

SEQ ID NO: 2545837 - DNA, 25 bp, Homo sapien
caaggtgagatctgggtgtccctgc

SEQ ID NO: 2545838 - DNA, 25 bp, Homo sapien
gagccatcgctgttgcttgtcctaa

SEQ ID NO: 2545839 - DNA, 25 bp, Homo sapien
taggtttccgagacccacgtcatct

SEQ ID NO: 2545840 - DNA, 25 bp, Homo sapien
aagtagttctggcttcaggcatcgc

SEQ ID NO: 2545841 - DNA, 25 bp, Homo sapien
aaggacgtttccgtggtcagcggca

SEQ ID NO: 2545842 - DNA, 25 bp, Homo sapien
cacagtcactggcatggctagcact

SEQ ID NO: 2545843 - DNA, 25 bp, Homo sapien
tcttcacattggaactatttactca

SEQ ID NO: 2545844 - DNA, 25 bp, Homo sapien
ggtcagcacctcactccgtggcttc

SEQ ID NO: 2545845 - DNA, 25 bp, Homo sapien
gtggcttcgcgcttcgcagacacag

SEQ ID NO: 2545846 - DNA, 25 bp, Homo sapien
ctatttactcatggtatgtttgtgg

SEQ ID NO: 2545847 - DNA, 25 bp, Homo sapien
gattgggcatcttgtcgaacaccag

SEQ ID NO: 2545848 - DNA, 25 bp, Homo sapien
ctgtcatcggatgaattgattgggc

SEQ ID NO: 2545849 - DNA, 25 bp, Homo sapien
cgaacaccagcacgggttgtgctaa

SEQ ID NO: 2545850 - DNA, 25 bp, Homo sapien
cacgggttgtgctaatgattcttag

SEQ ID NO: 2545851 - DNA, 25 bp, Homo sapien
cctggtgccgaagaagtgtagagat

SEQ ID NO: 2545852 - DNA, 25 bp, Homo sapien
caaggtccagtgtgaagcgcaagtc

SEQ ID NO: 2545853 - DNA, 25 bp, Homo sapien
cctgagaatgcaccgggaacatgct

SEQ ID NO: 2545854 - DNA, 25 bp, Homo sapien
taaaagaatgcacgagaccctgaga

SEQ ID NO: 2545855 - DNA, 25 bp, Homo sapien
aaatccacaaaggtgcacacagatg

SEQ ID NO: 2545856 - DNA, 25 bp, Homo sapien
ggctctggcttggtcgcctgcgtcc

SEQ ID NO: 2545857 - DNA, 25 bp, Homo sapien
gatgtgggtcgctgccttcccaaca

SEQ ID NO: 2545858 - DNA, 25 bp, Homo sapien
gcctgcgtccggaacctgaaatcca

SEQ ID NO: 2545859 - DNA, 25 bp, Homo sapien
ctagcatttccaggagccgtgcggc

SEQ ID NO: 2545860 - DNA, 25 bp, Homo sapien
accacgagggcagcgaggttgtcct

SEQ ID NO: 2545861 - DNA, 25 bp, Homo sapien
taatcgcagagcacgttatcatggg

SEQ ID NO: 2545862 - DNA, 25 bp, Homo sapien
gcctggtgtcctcaaataggtggca

SEQ ID NO: 2545863 - DNA, 25 bp, Homo sapien
actgctgaacagttcagaggccacg

SEQ ID NO: 2545864 - DNA, 25 bp, Homo sapien
cagaggccacggtgtcaagtgctac

SEQ ID NO: 2545865 - DNA, 25 bp, Homo sapien
gaacagttcagaggccacggtgtca

SEQ ID NO: 2545866 - DNA, 25 bp, Homo sapien
cagttcagaggccacggtgtcaagt

SEQ ID NO: 2545867 - DNA, 25 bp, Homo sapien
tccacttcatgaggaccctggtggt

SEQ ID NO: 2545868 - DNA, 25 bp, Homo sapien
tgctgttttccacttcatgaggacc

SEQ ID NO: 2545869 - DNA, 25 bp, Homo sapien
tccagtgctgttttccacttcatga

SEQ ID NO: 2545870 - DNA, 25 bp, Homo sapien
gttttccacttcatgaggaccctgg

SEQ ID NO: 2545871 - DNA, 25 bp, Homo sapien
cactgggcattgtgaggattcctgg

SEQ ID NO: 2545872 - DNA, 25 bp, Homo sapien
ggctggaaaccagtatgcgtgtcag

SEQ ID NO: 2545873 - DNA, 25 bp, Homo sapien
cattcacgtagtgcaaagtggccca

SEQ ID NO: 2545874 - DNA, 25 bp, Homo sapien
tgggaacccacattcacgtagtgca

SEQ ID NO: 2545875 - DNA, 25 bp, Homo sapien
ctgctcacgatctggtgtttgttgt

SEQ ID NO: 2545876 - DNA, 25 bp, Homo sapien
tcacgatctggtgtttgttgttcca

SEQ ID NO: 2545877 - DNA, 25 bp, Homo sapien
cgtcctgctcacgatctggtgtttg

SEQ ID NO: 2545878 - DNA, 25 bp, Homo sapien
cacgatctggtgtttgttgttccat

SEQ ID NO: 2545879 - DNA, 25 bp, Homo sapien
cttgctacccaagattgggagctct

SEQ ID NO: 2545880 - DNA, 25 bp, Homo sapien
gacacaactccaatattgtccagct

SEQ ID NO: 2545881 - DNA, 25 bp, Homo sapien
tagcagcagcgaacctataagtggg

SEQ ID NO: 2545882 - DNA, 25 bp, Homo sapien
gcagctgtgatggacacaactccaa

SEQ ID NO: 2545883 - DNA, 25 bp, Homo sapien
gcattgcttaactatgaggagacac

SEQ ID NO: 2545884 - DNA, 25 bp, Homo sapien
cacctgggctgtatagtgtggccta

SEQ ID NO: 2545885 - DNA, 25 bp, Homo sapien
cgattttgtggttgtgtgaacgtca

SEQ ID NO: 2545886 - DNA, 25 bp, Homo sapien
gaacgtcatagactggatttaccca

SEQ ID NO: 2545887 - DNA, 25 bp, Homo sapien
agtgagctgaggtcgtgccttgcac

SEQ ID NO: 2545888 - DNA, 25 bp, Homo sapien
tccagctgggcgacagggtgaagct

SEQ ID NO: 2545889 - DNA, 25 bp, Homo sapien
agctgaggtcgtgccttgcactcca

SEQ ID NO: 2545890 - DNA, 25 bp, Homo sapien
aggtcgtgccttgcactccagctgg

SEQ ID NO: 2545891 - DNA, 25 bp, Homo sapien
gctcttgccgtgtgatgcactggct

SEQ ID NO: 2545892 - DNA, 25 bp, Homo sapien
gctcctgctcttgccgtgtgatgca

SEQ ID NO: 2545893 - DNA, 25 bp, Homo sapien
agaagcagatggcagtagatggcat

SEQ ID NO: 2545894 - DNA, 25 bp, Homo sapien
gccgtgtgatgcactggctcccctt

SEQ ID NO: 2545895 - DNA, 25 bp, Homo sapien
tttccacggtgaggctttggtgttc

SEQ ID NO: 2545896 - DNA, 25 bp, Homo sapien
ttcatgtgtttccacggtgaggctt

SEQ ID NO: 2545897 - DNA, 25 bp, Homo sapien
tgtgtttccacggtgaggctttggt

SEQ ID NO: 2545898 - DNA, 25 bp, Homo sapien
tccacggtgaggctttggtgttctc

SEQ ID NO: 2545899 - DNA, 25 bp, Homo sapien
ttggtgcccagaaggtttggcgaaa

SEQ ID NO: 2545900 - DNA, 25 bp, Homo sapien
tttggcgaaagcaacaggatgccct

SEQ ID NO: 2545901 - DNA, 25 bp, Homo sapien
cccagaaggtttggcgaaagcaaca

SEQ ID NO: 2545902 - DNA, 25 bp, Homo sapien
gaaggtttggcgaaagcaacaggat

SEQ ID NO: 2545903 - DNA, 25 bp, Homo sapien
agttcagcagcatattaataaccac

SEQ ID NO: 2545904 - DNA, 25 bp, Homo sapien
cagttcagcagcatattaataacca

SEQ ID NO: 2545905 - DNA, 25 bp, Homo sapien
tcagttcagcagcatattaataacc

SEQ ID NO: 2545906 - DNA, 25 bp, Homo sapien
aatttgtccgatttggggagctgga

SEQ ID NO: 2545907 - DNA, 25 bp, Homo sapien
aaagtaccatgcttcgtgtagttca

SEQ ID NO: 2545908 - DNA, 25 bp, Homo sapien
aagaatttgtccgatttggggagct

SEQ ID NO: 2545909 - DNA, 25 bp, Homo sapien
accatgcttcgtgtagttcattgtg

SEQ ID NO: 2545910 - DNA, 25 bp, Homo sapien
tagcaggtcacatgtaacccaggta

SEQ ID NO: 2545911 - DNA, 25 bp, Homo sapien
tcacatgtaacccaggtagatgaac

SEQ ID NO: 2545912 - DNA, 25 bp, Homo sapien
gcaggtcacatgtaacccaggtaga

SEQ ID NO: 2545913 - DNA, 25 bp, Homo sapien
ctgtagcaggtcacatgtaacccag

SEQ ID NO: 2545914 - DNA, 25 bp, Homo sapien
ctgtgtatttaaaatgcccgaaaat

SEQ ID NO: 2545915 - DNA, 25 bp, Homo sapien
cttgtgtgataagaactcaaaggga

SEQ ID NO: 2545916 - DNA, 25 bp, Homo sapien
tgtgtgataagaactcaaagggagc

SEQ ID NO: 2545917 - DNA, 25 bp, Homo sapien
tgcccgaaaatgaacagtccagccc

SEQ ID NO: 2545918 - DNA, 25 bp, Homo sapien
agccctgatgactcagcaccaacat

SEQ ID NO: 2545919 - DNA, 25 bp, Homo sapien
caccaacattggagaattccccgtt

SEQ ID NO: 2545920 - DNA, 25 bp, Homo sapien
gatgactcagcaccaacattggaga

SEQ ID NO: 2545921 - DNA, 25 bp, Homo sapien
gactcagcaccaacattggagaatt

SEQ ID NO: 2545922 - DNA, 25 bp, Homo sapien
ggttttcactttgacaatgagagga

SEQ ID NO: 2545923 - DNA, 25 bp, Homo sapien
actttgacaatgagaggagggtgcc

SEQ ID NO: 2545924 - DNA, 25 bp, Homo sapien
ctgtgccgggttttcactttgacaa

SEQ ID NO: 2545925 - DNA, 25 bp, Homo sapien
gagggtgccttggaggtgattggaa

SEQ ID NO: 2545926 - DNA, 25 bp, Homo sapien
aagcagataagaccgcccgacgtga

SEQ ID NO: 2545927 - DNA, 25 bp, Homo sapien
gggatgacgaccagcacacaaggaa

SEQ ID NO: 2545928 - DNA, 25 bp, Homo sapien
cacacaaggaagcagataagaccgc

SEQ ID NO: 2545929 - DNA, 25 bp, Homo sapien
ataagaccgcccgacgtgatgggtg

SEQ ID NO: 2545930 - DNA, 25 bp, Homo sapien
ttcctgggccgcctcctgtctttca

SEQ ID NO: 2545931 - DNA, 25 bp, Homo sapien
ctgtgtatcacctgcctgcttcctg

SEQ ID NO: 2545932 - DNA, 25 bp, Homo sapien
tgggccgcctcctgtctttcactgt

SEQ ID NO: 2545933 - DNA, 25 bp, Homo sapien
cctgggccgcctcctgtctttcact

SEQ ID NO: 2545934 - DNA, 25 bp, Homo sapien
ggtgtgaaaagtcagcgctcgcagg

SEQ ID NO: 2545935 - DNA, 25 bp, Homo sapien
gacagcgtcttctgacgggtcctgg

SEQ ID NO: 2545936 - DNA, 25 bp, Homo sapien
ccctggcaggggtcaaagtcgctag

SEQ ID NO: 2545937 - DNA, 25 bp, Homo sapien
caaagtcgctaggaggtgggtcact

SEQ ID NO: 2545938 - DNA, 25 bp, Homo sapien
catagaagcctgcgtggatgcggca

SEQ ID NO: 2545939 - DNA, 25 bp, Homo sapien
tctgtttcgtttgcctgagaaagca

SEQ ID NO: 2545940 - DNA, 25 bp, Homo sapien
attcctgggcagctgcgcacaacgc

SEQ ID NO: 2545941 - DNA, 25 bp, Homo sapien
cctggaggagtctgtttcgtttgcc

SEQ ID NO: 2545942 - DNA, 25 bp, Homo sapien
cccagcctttctccagagctgcagg

SEQ ID NO: 2545943 - DNA, 25 bp, Homo sapien
cagggttgaggctgtggcttcaaag

SEQ ID NO: 2545944 - DNA, 25 bp, Homo sapien
gctgcagggttgaggctgtggcttc

SEQ ID NO: 2545945 - DNA, 25 bp, Homo sapien
aggctgtggcttcaaagagcaggga

SEQ ID NO: 2545946 - DNA, 25 bp, Homo sapien
cggctccctctcctttgtgttggat

SEQ ID NO: 2545947 - DNA, 25 bp, Homo sapien
gacgacggcgggtttggcttcatcc

SEQ ID NO: 2545948 - DNA, 25 bp, Homo sapien
gccctcctcagtgacgacggcgggt

SEQ ID NO: 2545949 - DNA, 25 bp, Homo sapien
ttccatgaagatgagcgcggctccc

SEQ ID NO: 2545950 - DNA, 25 bp, Homo sapien
agatccattccttatcttccagcga

SEQ ID NO: 2545951 - DNA, 25 bp, Homo sapien
catgctgccaacagaagatccattc

SEQ ID NO: 2545952 - DNA, 25 bp, Homo sapien
tcttccagcgatgcgctgtacttct

SEQ ID NO: 2545953 - DNA, 25 bp, Homo sapien
gatgcgctgtacttctgaacagctt

SEQ ID NO: 2545954 - DNA, 25 bp, Homo sapien
aaggatctggatggtgtagccttgg

SEQ ID NO: 2545955 - DNA, 25 bp, Homo sapien
gatctggatggtgtagccttggagg

SEQ ID NO: 2545956 - DNA, 25 bp, Homo sapien
tctggatggtgtagccttggagggc

SEQ ID NO: 2545957 - DNA, 25 bp, Homo sapien
atctggatggtgtagccttggaggg

SEQ ID NO: 2545958 - DNA, 25 bp, Homo sapien
gggtgtagtcatggaaggcatgcat

SEQ ID NO: 2545959 - DNA, 25 bp, Homo sapien
gggggtgtagtcatggaaggcatgc

SEQ ID NO: 2545960 - DNA, 25 bp, Homo sapien
caggggggtgtagtcatggaaggca

SEQ ID NO: 2545961 - DNA, 25 bp, Homo sapien
gccaggggggtgtagtcatggaagg

SEQ ID NO: 2545962 - DNA, 25 bp, Homo sapien
gattccgtgtgggagagaacgacct

SEQ ID NO: 2545963 - DNA, 25 bp, Homo sapien
aagatggtcaccttcacaacccgtt

SEQ ID NO: 2545964 - DNA, 25 bp, Homo sapien
tgggagaggacttcaccagggcgca

SEQ ID NO: 2545965 - DNA, 25 bp, Homo sapien
gacctggatggtgtaaacttggaag

SEQ ID NO: 2545966 - DNA, 25 bp, Homo sapien
cctcgtgataggagatgactttcca

SEQ ID NO: 2545967 - DNA, 25 bp, Homo sapien
ttcaccagcttcctcgtgataggag

SEQ ID NO: 2545968 - DNA, 25 bp, Homo sapien
cagcttcctcgtgataggagatgac

SEQ ID NO: 2545969 - DNA, 25 bp, Homo sapien
atggaatttcaccagcttcctcgtg

SEQ ID NO: 2545970 - DNA, 25 bp, Homo sapien
gagccggtgatgactgtcttggaaa

SEQ ID NO: 2545971 - DNA, 25 bp, Homo sapien
caaagcagtccgctggctgtaggca

SEQ ID NO: 2545972 - DNA, 25 bp, Homo sapien
cacaggtccctaggacggagagcct

SEQ ID NO: 2545973 - DNA, 25 bp, Homo sapien
gtaggcatcgcccatgacatgagca

SEQ ID NO: 2545974 - DNA, 25 bp, Homo sapien
tcagaagaattgagtcagaaaggtg

SEQ ID NO: 2545975 - DNA, 25 bp, Homo sapien
caggtctccagaaatttgttgcatg

SEQ ID NO: 2545976 - DNA, 25 bp, Homo sapien
gaaaggtgttttctgtgggtgattc

SEQ ID NO: 2545977 - DNA, 25 bp, Homo sapien
agaataagtaggctcgggctcggac

SEQ ID NO: 2545978 - DNA, 25 bp, Homo sapien
aatggaacgtcgacgagccaccaca

SEQ ID NO: 2545979 - DNA, 25 bp, Homo sapien
tgacccaatggaacgtcgacgagcc

SEQ ID NO: 2545980 - DNA, 25 bp, Homo sapien
cattaaaaattctgacccaatggaa

SEQ ID NO: 2545981 - DNA, 25 bp, Homo sapien
tctaaatgtccagtaacattggggg

SEQ ID NO: 2545982 - DNA, 25 bp, Homo sapien
tctatccgtgcaaatcccgcgacta

SEQ ID NO: 2545983 - DNA, 25 bp, Homo sapien
ctgtaatgtcctccacggtaagaaa

SEQ ID NO: 2545984 - DNA, 25 bp, Homo sapien
tgtcaaggcgctgtctgctgcaggt

SEQ ID NO: 2545985 - DNA, 25 bp, Homo sapien
tcggtcccctgtcaaggcgctgtct

SEQ ID NO: 2545986 - DNA, 25 bp, Homo sapien
ggagaactcgctgattagtgggggt

SEQ ID NO: 2545987 - DNA, 25 bp, Homo sapien
ccatgctgggagaactcgctgatta

SEQ ID NO: 2545988 - DNA, 25 bp, Homo sapien
tgctgggagaactcgctgattagtg

SEQ ID NO: 2545989 - DNA, 25 bp, Homo sapien
gggagaactcgctgattagtggggg

SEQ ID NO: 2545990 - DNA, 25 bp, Homo sapien
gcccgactggattgatgcatctttt

SEQ ID NO: 2545991 - DNA, 25 bp, Homo sapien
caatagaggcacagaccagccaaca

SEQ ID NO: 2545992 - DNA, 25 bp, Homo sapien
acagaccagccaacacaaacagggc

SEQ ID NO: 2545993 - DNA, 25 bp, Homo sapien
ggctggcccgactggattgatgcat

SEQ ID NO: 2545994 - DNA, 25 bp, Homo sapien
cagtgtaatctttgggacccgcatc

SEQ ID NO: 2545995 - DNA, 25 bp, Homo sapien
gttaatattctagcgccatgacggg

SEQ ID NO: 2545996 - DNA, 25 bp, Homo sapien
tacctctgaggtctacgtgaactgc

SEQ ID NO: 2545997 - DNA, 25 bp, Homo sapien
gcttcctgggtgagtgcatcgacaa

SEQ ID NO: 2545998 - DNA, 25 bp, Homo sapien
gcattctaatctacagagagcccac

SEQ ID NO: 2545999 - DNA, 25 bp, Homo sapien
tccttctagaaaatgatacatccct

SEQ ID NO: 2546000 - DNA, 25 bp, Homo sapien
aagaaatgaatccagagcctcgatg

SEQ ID NO: 2546001 - DNA, 25 bp, Homo sapien
tggaaccgtcccagctgcagaattt

SEQ ID NO: 2546002 - DNA, 25 bp, Homo sapien
caagcacagccggataattcagggt

SEQ ID NO: 2546003 - DNA, 25 bp, Homo sapien
gaaagactatggcacaagcccggga

SEQ ID NO: 2546004 - DNA, 25 bp, Homo sapien
tgtaaataggtcaggagccagctcc

SEQ ID NO: 2546005 - DNA, 25 bp, Homo sapien
gatccactgagcatgttaaggccgt

SEQ ID NO: 2546006 - DNA, 25 bp, Homo sapien
tcccaggatcaggacgtgaacaggt

SEQ ID NO: 2546007 - DNA, 25 bp, Homo sapien
tttgggcgaacaccatttaactcgc

SEQ ID NO: 2546008 - DNA, 25 bp, Homo sapien
tttaactcgctagaagcactcagcg

SEQ ID NO: 2546009 - DNA, 25 bp, Homo sapien
tctcttagggaaaactgtaggatgg

SEQ ID NO: 2546010 - DNA, 25 bp, Homo sapien
aagggagggagcagaacaactattc

SEQ ID NO: 2546011 - DNA, 25 bp, Homo sapien
tcctcctactggaaggtgaactcca

SEQ ID NO: 2546012 - DNA, 25 bp, Homo sapien
ttttaaccatctggcaaagcaagca

SEQ ID NO: 2546013 - DNA, 25 bp, Homo sapien
gctgtagcacgcacatgtgcagacc

SEQ ID NO: 2546014 - DNA, 25 bp, Homo sapien
ttattcctaaagttggtttctcagc

SEQ ID NO: 2546015 - DNA, 25 bp, Homo sapien
ttcctaaagttggtttctcagctgc

SEQ ID NO: 2546016 - DNA, 25 bp, Homo sapien
aaagttggtttctcagctgcaaggg

SEQ ID NO: 2546017 - DNA, 25 bp, Homo sapien
cctaaagttggtttctcagctgcaa

SEQ ID NO: 2546018 - DNA, 25 bp, Homo sapien
catgctatcacatgaggctggagcc

SEQ ID NO: 2546019 - DNA, 25 bp, Homo sapien
cgctgattcagcaaaggacttgtcc

SEQ ID NO: 2546020 - DNA, 25 bp, Homo sapien
ttctcatagggaagaagctgtccac

SEQ ID NO: 2546021 - DNA, 25 bp, Homo sapien
gcattcagggatagcaaaacgatct

SEQ ID NO: 2546022 - DNA, 25 bp, Homo sapien
taaaagccaatactctccgaggaag

SEQ ID NO: 2546023 - DNA, 25 bp, Homo sapien
cactttccaggaaaaccgagcggcg

SEQ ID NO: 2546024 - DNA, 25 bp, Homo sapien
actttggaagatcgtgacccggaga

SEQ ID NO: 2546025 - DNA, 25 bp, Homo sapien
tggaactatcctcaaacgggcaggg

SEQ ID NO: 2546026 - DNA, 25 bp, Homo sapien
gcggagaggatagcgagaggcaaag

SEQ ID NO: 2546027 - DNA, 25 bp, Homo sapien
ccggcggagaggatagcgagaggca

SEQ ID NO: 2546028 - DNA, 25 bp, Homo sapien
gcgccggcggagaggatagcgagag

SEQ ID NO: 2546029 - DNA, 25 bp, Homo sapien
gaggatagcgagaggcaaagttgga

SEQ ID NO: 2546030 - DNA, 25 bp, Homo sapien
cacaccccagtggatttggagttgc

SEQ ID NO: 2546031 - DNA, 25 bp, Homo sapien
tcccctgggttaacaaatgagccat

SEQ ID NO: 2546032 - DNA, 25 bp, Homo sapien
tgcttaaaatagactccggccttca

SEQ ID NO: 2546033 - DNA, 25 bp, Homo sapien
tacaaataagaggacagataactgc

SEQ ID NO: 2546034 - DNA, 25 bp, Homo sapien
tatacattgtttggtaccaggctgc

SEQ ID NO: 2546035 - DNA, 25 bp, Homo sapien
tttaggcagaactacaaagtgatcg

SEQ ID NO: 2546036 - DNA, 25 bp, Homo sapien
tctgtagatgggatgggatgttccc

SEQ ID NO: 2546037 - DNA, 25 bp, Homo sapien
caggtggtctcttgcaacagatgtc

SEQ ID NO: 2546038 - DNA, 25 bp, Homo sapien
gatacgctctgtaaatctaaagcca

SEQ ID NO: 2546039 - DNA, 25 bp, Homo sapien
tctaaagccagacggctcttctcac

SEQ ID NO: 2546040 - DNA, 25 bp, Homo sapien
ttagtcattgatggatacgctctgt

SEQ ID NO: 2546041 - DNA, 25 bp, Homo sapien
taaatctaaagccagacggctcttc

SEQ ID NO: 2546042 - DNA, 25 bp, Homo sapien
atctcacatgtaggagctttctggg

SEQ ID NO: 2546043 - DNA, 25 bp, Homo sapien
gctttctgggggctgtggctcccgg

SEQ ID NO: 2546044 - DNA, 25 bp, Homo sapien
cagcatctcacatgtaggagctttc

SEQ ID NO: 2546045 - DNA, 25 bp, Homo sapien
gcatctcacatgtaggagctttctg

SEQ ID NO: 2546046 - DNA, 25 bp, Homo sapien
ttatcgttgaaatagttcccaaatc

SEQ ID NO: 2546047 - DNA, 25 bp, Homo sapien
cttatcgttgaaatagttcccaaat

SEQ ID NO: 2546048 - DNA, 25 bp, Homo sapien
gcaaaccataacagcttaatgaatt

SEQ ID NO: 2546049 - DNA, 25 bp, Homo sapien
aatgcgactgtgaggagagatgcca

SEQ ID NO: 2546050 - DNA, 25 bp, Homo sapien
tgaagaagtgagagtgaatgcgact

SEQ ID NO: 2546051 - DNA, 25 bp, Homo sapien
gagaacattctggtatgcgtcacac

SEQ ID NO: 2546052 - DNA, 25 bp, Homo sapien
tccccagtgatagacaacgagcatg

SEQ ID NO: 2546053 - DNA, 25 bp, Homo sapien
acatgggtacccccactacttgaag

SEQ ID NO: 2546054 - DNA, 25 bp, Homo sapien
catgggtacccccactacttgaagg

SEQ ID NO: 2546055 - DNA, 25 bp, Homo sapien
tgacatgggtacccccactacttga

SEQ ID NO: 2546056 - DNA, 25 bp, Homo sapien
gacatgggtacccccactacttgaa

SEQ ID NO: 2546057 - DNA, 25 bp, Homo sapien
tcagtccttctggtatggaaggtac

SEQ ID NO: 2546058 - DNA, 25 bp, Homo sapien
aggtaccttgcatggaaggccccag

SEQ ID NO: 2546059 - DNA, 25 bp, Homo sapien
aactggacgacagtgtggaacatgc

SEQ ID NO: 2546060 - DNA, 25 bp, Homo sapien
gccccaggcaactggacgacagtgt

SEQ ID NO: 2546061 - DNA, 25 bp, Homo sapien
tctgggggagcaccagagttagagc

SEQ ID NO: 2546062 - DNA, 25 bp, Homo sapien
gcaccagagttagagctcagagtgt

SEQ ID NO: 2546063 - DNA, 25 bp, Homo sapien
gagcaccagagttagagctcagagt

SEQ ID NO: 2546064 - DNA, 25 bp, Homo sapien
gggagcaccagagttagagctcaga

SEQ ID NO: 2546065 - DNA, 25 bp, Homo sapien
gagtccccaccagtagaatcagtgg

SEQ ID NO: 2546066 - DNA, 25 bp, Homo sapien
tttgtggtttcagccgggccttcca

SEQ ID NO: 2546067 - DNA, 25 bp, Homo sapien
caaaggagtccccaccagtagaatc

SEQ ID NO: 2546068 - DNA, 25 bp, Homo sapien
tccagtgaacctgggcattaaccca

SEQ ID NO: 2546069 - DNA, 25 bp, Homo sapien
ttgcagccatgatccggaagagaag

SEQ ID NO: 2546070 - DNA, 25 bp, Homo sapien
gcagccatgatccggaagagaagct

SEQ ID NO: 2546071 - DNA, 25 bp, Homo sapien
agccatgatccggaagagaagcttc

SEQ ID NO: 2546072 - DNA, 25 bp, Homo sapien
gccatgatccggaagagaagcttca

SEQ ID NO: 2546073 - DNA, 25 bp, Homo sapien
aatggggggataaagagttctgcgc

SEQ ID NO: 2546074 - DNA, 25 bp, Homo sapien
cgaatggggggataaagagttctgc

SEQ ID NO: 2546075 - DNA, 25 bp, Homo sapien
gggataaagagttctgcgctctggg

SEQ ID NO: 2546076 - DNA, 25 bp, Homo sapien
ataaagagttctgcgctctgggagg

SEQ ID NO: 2546077 - DNA, 25 bp, Homo sapien
cgttgcatgattttgcatagcaccg

SEQ ID NO: 2546078 - DNA, 25 bp, Homo sapien
tgcatagcaccgacattctcaggtg

SEQ ID NO: 2546079 - DNA, 25 bp, Homo sapien
cagccctgtgatttgcgttgcatga

SEQ ID NO: 2546080 - DNA, 25 bp, Homo sapien
caccgacattctcaggtgcgcacat

SEQ ID NO: 2546081 - DNA, 25 bp, Homo sapien
gcagggtgttgaccaccagccgctt

SEQ ID NO: 2546082 - DNA, 25 bp, Homo sapien
cacaaatccaagtaaatggagagga

SEQ ID NO: 2546083 - DNA, 25 bp, Homo sapien
caccagccgcttgggaagaagacct

SEQ ID NO: 2546084 - DNA, 25 bp, Homo sapien
gacgattgctctctatggacacatt

SEQ ID NO: 2546085 - DNA, 25 bp, Homo sapien
taagctgggtacgaatcttggtgga

SEQ ID NO: 2546086 - DNA, 25 bp, Homo sapien
ctttctggctggatgataagatcta

SEQ ID NO: 2546087 - DNA, 25 bp, Homo sapien
ttgcagtattgtaagctgggtacga

SEQ ID NO: 2546088 - DNA, 25 bp, Homo sapien
ggctggatgataagatctatattgc

SEQ ID NO: 2546089 - DNA, 25 bp, Homo sapien
aacagacggagcctttgctctcttt

SEQ ID NO: 2546090 - DNA, 25 bp, Homo sapien
atgactacccaaagagtccacagtt

SEQ ID NO: 2546091 - DNA, 25 bp, Homo sapien
gtcatgactacccaaagagtccaca

SEQ ID NO: 2546092 - DNA, 25 bp, Homo sapien
attcccaggtcatgactacccaaag

SEQ ID NO: 2546093 - DNA, 25 bp, Homo sapien
ttcccaggtcatgactacccaaaga

SEQ ID NO: 2546094 - DNA, 25 bp, Homo sapien
tggttcctaagatcaacagatgact

SEQ ID NO: 2546095 - DNA, 25 bp, Homo sapien
tttggttcctaagatcaacagatga

SEQ ID NO: 2546096 - DNA, 25 bp, Homo sapien
ttcctaagatcaacagatgactcta

SEQ ID NO: 2546097 - DNA, 25 bp, Homo sapien
ggttcctaagatcaacagatgactc

SEQ ID NO: 2546098 - DNA, 25 bp, Homo sapien
agttagcagttcttccatgctttct

SEQ ID NO: 2546099 - DNA, 25 bp, Homo sapien
cccatgttgttaggcatgggggcat

SEQ ID NO: 2546100 - DNA, 25 bp, Homo sapien
tgagaaacccatgttgttaggcatg

SEQ ID NO: 2546101 - DNA, 25 bp, Homo sapien
gagttagcagttcttccatgctttc

SEQ ID NO: 2546102 - DNA, 25 bp, Homo sapien
aagttgcaggcttctattattagat

SEQ ID NO: 2546103 - DNA, 25 bp, Homo sapien
ggtagataagaagttgcaggcttct

SEQ ID NO: 2546104 - DNA, 25 bp, Homo sapien
atctaatgttttggttacactatat

SEQ ID NO: 2546105 - DNA, 25 bp, Homo sapien
ttagatccacaatctaatgttttgg

SEQ ID NO: 2546106 - DNA, 25 bp, Homo sapien
ttgccagtacgcccacaagctggct

SEQ ID NO: 2546107 - DNA, 25 bp, Homo sapien
tgtcactgtcaaaccgcctttacta

SEQ ID NO: 2546108 - DNA, 25 bp, Homo sapien
tttcttgttggccagagtattcaca

SEQ ID NO: 2546109 - DNA, 25 bp, Homo sapien
caaatctgtcactgtcaaaccgcct

SEQ ID NO: 2546110 - DNA, 25 bp, Homo sapien
ttgctattcaccggcttccttattt

SEQ ID NO: 2546111 - DNA, 25 bp, Homo sapien
cattgctattcaccggcttccttat

SEQ ID NO: 2546112 - DNA, 25 bp, Homo sapien
attgctattcaccggcttccttatt

SEQ ID NO: 2546113 - DNA, 25 bp, Homo sapien
gcattgctattcaccggcttcctta

SEQ ID NO: 2546114 - DNA, 25 bp, Homo sapien
ggattgtgaagtgcggaatggtcac

SEQ ID NO: 2546115 - DNA, 25 bp, Homo sapien
aaatggaatagggattgtgaagtgc

SEQ ID NO: 2546116 - DNA, 25 bp, Homo sapien
tgtgaagtgcggaatggtcacgagg

SEQ ID NO: 2546117 - DNA, 25 bp, Homo sapien
taactaaatggaatagggattgtga

SEQ ID NO: 2546118 - DNA, 25 bp, Homo sapien
agtgaagttgggcattttgtgtttg

SEQ ID NO: 2546119 - DNA, 25 bp, Homo sapien
ctagtgaagttgggcattttgtgtt

SEQ ID NO: 2546120 - DNA, 25 bp, Homo sapien
tgggcattttgtgtttgctgtatgt

SEQ ID NO: 2546121 - DNA, 25 bp, Homo sapien
ggcattttgtgtttgctgtatgtat

SEQ ID NO: 2546122 - DNA, 25 bp, Homo sapien
acggattccttattgacgtctttgg

SEQ ID NO: 2546123 - DNA, 25 bp, Homo sapien
cggattccttattgacgtctttggg

SEQ ID NO: 2546124 - DNA, 25 bp, Homo sapien
tacggattccttattgacgtctttg

SEQ ID NO: 2546125 - DNA, 25 bp, Homo sapien
atgcatgtgggtggaaagcctgtac

SEQ ID NO: 2546126 - DNA, 25 bp, Homo sapien
catgcatgtgggtggaaagcctgta

SEQ ID NO: 2546127 - DNA, 25 bp, Homo sapien
tgttgttctaccataagctccatat

SEQ ID NO: 2546128 - DNA, 25 bp, Homo sapien
cgtattcttaatttcactttgacac

SEQ ID NO: 2546129 - DNA, 25 bp, Homo sapien
actgtttggtagtcccaggcatcag

SEQ ID NO: 2546130 - DNA, 25 bp, Homo sapien
ctccatggagtatttccacataggg

SEQ ID NO: 2546131 - DNA, 25 bp, Homo sapien
attttacactaactgtgcacatgca

SEQ ID NO: 2546132 - DNA, 25 bp, Homo sapien
tattttacactaactgtgcacatgc

SEQ ID NO: 2546133 - DNA, 25 bp, Homo sapien
tgaccccgaatggagatggactgtg

SEQ ID NO: 2546134 - DNA, 25 bp, Homo sapien
tgaagaccactgaatgcacgacaca

SEQ ID NO: 2546135 - DNA, 25 bp, Homo sapien
catagatttggcagttgtccggaag

SEQ ID NO: 2546136 - DNA, 25 bp, Homo sapien
ccatagatgacgtaggtgaccccga

SEQ ID NO: 2546137 - DNA, 25 bp, Homo sapien
tactctaatacgctgcaggacgact

SEQ ID NO: 2546138 - DNA, 25 bp, Homo sapien
gatagtaaagttggccgagtaccca

SEQ ID NO: 2546139 - DNA, 25 bp, Homo sapien
tatgccatgagaagcaaaggtcctc

SEQ ID NO: 2546140 - DNA, 25 bp, Homo sapien
tattgagtgtgtgagcgccaacaac

SEQ ID NO: 2546141 - DNA, 25 bp, Homo sapien
gaagcccttggatccttgtgaagag

SEQ ID NO: 2546142 - DNA, 25 bp, Homo sapien
tgtatttacgcttttcggcccaaga

SEQ ID NO: 2546143 - DNA, 25 bp, Homo sapien
gagactaaagtcctaacagagggca

SEQ ID NO: 2546144 - DNA, 25 bp, Homo sapien
cacatatggcagaacgggacagaga

SEQ ID NO: 2546145 - DNA, 25 bp, Homo sapien
tacgtcatcaggcacttcttccaag

SEQ ID NO: 2546146 - DNA, 25 bp, Homo sapien
ctttttgcctttgagcgcattggcg

SEQ ID NO: 2546147 - DNA, 25 bp, Homo sapien
gcgcattggcgtatcttgagagtag

SEQ ID NO: 2546148 - DNA, 25 bp, Homo sapien
gggatggagcatcagaaagatagac

SEQ ID NO: 2546149 - DNA, 25 bp, Homo sapien
caagttcaaaattggctggctctgg

SEQ ID NO: 2546150 - DNA, 25 bp, Homo sapien
caaaaatgagattcaggtggccagc

SEQ ID NO: 2546151 - DNA, 25 bp, Homo sapien
ctggctctgggcaacacggaatcct

SEQ ID NO: 2546152 - DNA, 25 bp, Homo sapien
gagcctactacatcaaaacacctgt

SEQ ID NO: 2546153 - DNA, 25 bp, Homo sapien
tcctttttactgtgcatgtgcccct

SEQ ID NO: 2546154 - DNA, 25 bp, Homo sapien
tcctgttcagcaacgctgccaggtg

SEQ ID NO: 2546155 - DNA, 25 bp, Homo sapien
cctactcttatttacctgtgactgc

SEQ ID NO: 2546156 - DNA, 25 bp, Homo sapien
tgtgcccctggcgatttcttcctat

SEQ ID NO: 2546157 - DNA, 25 bp, Homo sapien
tccaggatgtcatcagttcttgccg

SEQ ID NO: 2546158 - DNA, 25 bp, Homo sapien
cgtccaggatgtcatcagttcttgc

SEQ ID NO: 2546159 - DNA, 25 bp, Homo sapien
caggatgtcatcagttcttgccgat

SEQ ID NO: 2546160 - DNA, 25 bp, Homo sapien
aggatgtcatcagttcttgccgatt

SEQ ID NO: 2546161 - DNA, 25 bp, Homo sapien
gtaataatatctcctgtgcaaaatg

SEQ ID NO: 2546162 - DNA, 25 bp, Homo sapien
tttcaccaaaaactgtaataatatc

SEQ ID NO: 2546163 - DNA, 25 bp, Homo sapien
ctcctgtgcaaaatgtaagttcggc

SEQ ID NO: 2546164 - DNA, 25 bp, Homo sapien
aatatctcctgtgcaaaatgtaagt

SEQ ID NO: 2546165 - DNA, 25 bp, Homo sapien
tggggtcgtagtcatacagggccac

SEQ ID NO: 2546166 - DNA, 25 bp, Homo sapien
ctcgacatcgacgttgggcgagctt

SEQ ID NO: 2546167 - DNA, 25 bp, Homo sapien
gggtcgtagtcatacagggccacca

SEQ ID NO: 2546168 - DNA, 25 bp, Homo sapien
tcgacgttgggcgagctttctctgg

SEQ ID NO: 2546169 - DNA, 25 bp, Homo sapien
gtcgataccgaatgacgcctgccac

SEQ ID NO: 2546170 - DNA, 25 bp, Homo sapien
tccgcgtcgataccgaatgacgcct

SEQ ID NO: 2546171 - DNA, 25 bp, Homo sapien
gataccgaatgacgcctgccacttc

SEQ ID NO: 2546172 - DNA, 25 bp, Homo sapien
tctccgcgtcgataccgaatgacgc

SEQ ID NO: 2546173 - DNA, 25 bp, Homo sapien
ctctctgagcggcaggtgttttgtg

SEQ ID NO: 2546174 - DNA, 25 bp, Homo sapien
ggtctcctcatcaccgcctgcctct

SEQ ID NO: 2546175 - DNA, 25 bp, Homo sapien
aaatgcacagggaaggtcgaatagg

SEQ ID NO: 2546176 - DNA, 25 bp, Homo sapien
ggataaaatgcacagggaaggtcga

SEQ ID NO: 2546177 - DNA, 25 bp, Homo sapien
tacaaggaataaggccaagccgggc

SEQ ID NO: 2546178 - DNA, 25 bp, Homo sapien
ggtttccccacggtagaatccatca

SEQ ID NO: 2546179 - DNA, 25 bp, Homo sapien
tatctcagagaccatgttacaagga

SEQ ID NO: 2546180 - DNA, 25 bp, Homo sapien
ccacaggtgtattcagagggagaaa

SEQ ID NO: 2546181 - DNA, 25 bp, Homo sapien
acatggtgagcgggtcgtagtcaaa

SEQ ID NO: 2546182 - DNA, 25 bp, Homo sapien
gagccacaaagatccgggccgggag

SEQ ID NO: 2546183 - DNA, 25 bp, Homo sapien
cgggtcgtagtcaaagagagccaca

SEQ ID NO: 2546184 - DNA, 25 bp, Homo sapien
ccgggccgggagctcttcggcacca

SEQ ID NO: 2546185 - DNA, 25 bp, Homo sapien
cacgggaggcatttaggcagacacc

SEQ ID NO: 2546186 - DNA, 25 bp, Homo sapien
aaatcagcgtatgcggtgactccac

SEQ ID NO: 2546187 - DNA, 25 bp, Homo sapien
tatgagcaccaaacctcgacaggga

SEQ ID NO: 2546188 - DNA, 25 bp, Homo sapien
gaagccttcaccttaagaactggag

SEQ ID NO: 2546189 - DNA, 25 bp, Homo sapien
tggacgcctgggtgggctcccaaat

SEQ ID NO: 2546190 - DNA, 25 bp, Homo sapien
gctcccaaatccactggtgccataa

SEQ ID NO: 2546191 - DNA, 25 bp, Homo sapien
gtgtgggagatcagggctcatgcct

SEQ ID NO: 2546192 - DNA, 25 bp, Homo sapien
aagggtgtgcatatcgtgtgggaga

SEQ ID NO: 2546193 - DNA, 25 bp, Homo sapien
ctcactgctactgtccgttgtaatt

SEQ ID NO: 2546194 - DNA, 25 bp, Homo sapien
tcactgctactgtccgttgtaattt

SEQ ID NO: 2546195 - DNA, 25 bp, Homo sapien
gcccagaccgactgccctcactgct

SEQ ID NO: 2546196 - DNA, 25 bp, Homo sapien
ctggcccagaccgactgccctcact

SEQ ID NO: 2546197 - DNA, 25 bp, Homo sapien
ttattgcagggaaacctgaagaaaa

SEQ ID NO: 2546198 - DNA, 25 bp, Homo sapien
tattgcagggaaacctgaagaaaag

SEQ ID NO: 2546199 - DNA, 25 bp, Homo sapien
attgcagggaaacctgaagaaaaga

SEQ ID NO: 2546200 - DNA, 25 bp, Homo sapien
aatcctcttgaacgtggtgcttcgg

SEQ ID NO: 2546201 - DNA, 25 bp, Homo sapien
tggacacaaagaaaacacgctggac

SEQ ID NO: 2546202 - DNA, 25 bp, Homo sapien
tttagaagagtgaagctacaggcct

SEQ ID NO: 2546203 - DNA, 25 bp, Homo sapien
tcactttgtaggctcagtagccaaa

SEQ ID NO: 2546204 - DNA, 25 bp, Homo sapien
tcctcctcaggtgggtgataagcac

SEQ ID NO: 2546205 - DNA, 25 bp, Homo sapien
gcaacaagacaacccaggacagtag

SEQ ID NO: 2546206 - DNA, 25 bp, Homo sapien
tgtcccggcttgctacatgataaga

SEQ ID NO: 2546207 - DNA, 25 bp, Homo sapien
tgaaattaagacacgcatgcagcct

SEQ ID NO: 2546208 - DNA, 25 bp, Homo sapien
taagctccatagtccctccagaggg

SEQ ID NO: 2546209 - DNA, 25 bp, Homo sapien
tagaatacccgaaaggaatctgggc

SEQ ID NO: 2546210 - DNA, 25 bp, Homo sapien
tccagagggaacgacacacgaattg

SEQ ID NO: 2546211 - DNA, 25 bp, Homo sapien
tatttcaacgagattccaggtggct

SEQ ID NO: 2546212 - DNA, 25 bp, Homo sapien
aaacctccggcccatgtgatccacc

SEQ ID NO: 2546213 - DNA, 25 bp, Homo sapien
cgatggatgggactgtcacgggccg

SEQ ID NO: 2546214 - DNA, 25 bp, Homo sapien
atgggactgtcacgggccgggacct

SEQ ID NO: 2546215 - DNA, 25 bp, Homo sapien
cgggacctctgaggaccagcgctgc

SEQ ID NO: 2546216 - DNA, 25 bp, Homo sapien
agcatgacaggagcaaatgttccga

SEQ ID NO: 2546217 - DNA, 25 bp, Homo sapien
gaggacacaatatagagatgaatga

SEQ ID NO: 2546218 - DNA, 25 bp, Homo sapien
ggagcaaatgttccgaaaagaggac

SEQ ID NO: 2546219 - DNA, 25 bp, Homo sapien
gatgaatgaagccttcaatgaatcc

SEQ ID NO: 2546220 - DNA, 25 bp, Homo sapien
gggccttgtgcgactctgggaggtg

SEQ ID NO: 2546221 - DNA, 25 bp, Homo sapien
actctgggaggtggctttgcgtggg

SEQ ID NO: 2546222 - DNA, 25 bp, Homo sapien
tgcgactctgggaggtggctttgcg

SEQ ID NO: 2546223 - DNA, 25 bp, Homo sapien
ccttgtgcgactctgggaggtggct

SEQ ID NO: 2546224 - DNA, 25 bp, Homo sapien
gactcgtcctcttcactcccacagt

SEQ ID NO: 2546225 - DNA, 25 bp, Homo sapien
tggccgagcggctgaaccgacagcc

SEQ ID NO: 2546226 - DNA, 25 bp, Homo sapien
tccagacaccccgaaaatcttggtg

SEQ ID NO: 2546227 - DNA, 25 bp, Homo sapien
tgtttccgaagccaaaccgcgactc

SEQ ID NO: 2546228 - DNA, 25 bp, Homo sapien
tcttccgctacttcggggatactga

SEQ ID NO: 2546229 - DNA, 25 bp, Homo sapien
gggaaactcgggctgctcccagaaa

SEQ ID NO: 2546230 - DNA, 25 bp, Homo sapien
gcttgtgtagcagcccacagcactc

SEQ ID NO: 2546231 - DNA, 25 bp, Homo sapien
atactgaaaagtctcttcctgtggg

SEQ ID NO: 2546232 - DNA, 25 bp, Homo sapien
catgggcactttttcggagctcctg

SEQ ID NO: 2546233 - DNA, 25 bp, Homo sapien
tgggcactttttcggagctcctggc

SEQ ID NO: 2546234 - DNA, 25 bp, Homo sapien
ctcatgggcactttttcggagctcc

SEQ ID NO: 2546235 - DNA, 25 bp, Homo sapien
gggcactttttcggagctcctggct

SEQ ID NO: 2546236 - DNA, 25 bp, Homo sapien
gtcagactggaccactccgcaaagg

SEQ ID NO: 2546237 - DNA, 25 bp, Homo sapien
tccgcaaaggccagtgtgaatctgc

SEQ ID NO: 2546238 - DNA, 25 bp, Homo sapien
tggaccactccgcaaaggccagtgt

SEQ ID NO: 2546239 - DNA, 25 bp, Homo sapien
agtgtgaatctgctccgtggtgtca

SEQ ID NO: 2546240 - DNA, 25 bp, Homo sapien
gcattgtgggacgtgccgctgggcc

SEQ ID NO: 2546241 - DNA, 25 bp, Homo sapien
ccccggctgctctctgtgtggtact

SEQ ID NO: 2546242 - DNA, 25 bp, Homo sapien
tctgtgtggtactcgtctccatggc

SEQ ID NO: 2546243 - DNA, 25 bp, Homo sapien
tactcgtctccatggcaacagtgcg

SEQ ID NO: 2546244 - DNA, 25 bp, Homo sapien
gcacagatgggatcagcgcaggtct

SEQ ID NO: 2546245 - DNA, 25 bp, Homo sapien
gggatcagcgcaggtctctcagctc

SEQ ID NO: 2546246 - DNA, 25 bp, Homo sapien
cactctctctgttgaagtggcacag

SEQ ID NO: 2546247 - DNA, 25 bp, Homo sapien
tctctgttgaagtggcacagatggg

SEQ ID NO: 2546248 - DNA, 25 bp, Homo sapien
gaatggaggtgattttttcagagca

SEQ ID NO: 2546249 - DNA, 25 bp, Homo sapien
tccacccactagaacatcggtgtct

SEQ ID NO: 2546250 - DNA, 25 bp, Homo sapien
tcttggagcagatgggatagcgcca

SEQ ID NO: 2546251 - DNA, 25 bp, Homo sapien
ccgtagtcaactaaaagtggaggct

SEQ ID NO: 2546252 - DNA, 25 bp, Homo sapien
cctcggaagtgcagagctgtgtttc

SEQ ID NO: 2546253 - DNA, 25 bp, Homo sapien
tgtggtcatccagagctgggcgtca

SEQ ID NO: 2546254 - DNA, 25 bp, Homo sapien
gggtccttcacccagagaacaagtg

SEQ ID NO: 2546255 - DNA, 25 bp, Homo sapien
gacagcgctgaatgccgatctcaaa

SEQ ID NO: 2546256 - DNA, 25 bp, Homo sapien
gcgtaatcatggacaaaaattctca

SEQ ID NO: 2546257 - DNA, 25 bp, Homo sapien
aaattctcaattctgtgggcctcag

SEQ ID NO: 2546258 - DNA, 25 bp, Homo sapien
ctgcgtaatcatggacaaaaattct

SEQ ID NO: 2546259 - DNA, 25 bp, Homo sapien
ggacaaaaattctcaattctgtggg

SEQ ID NO: 2546260 - DNA, 25 bp, Homo sapien
tcttgaagtctggagagtcataggc

SEQ ID NO: 2546261 - DNA, 25 bp, Homo sapien
tcgtctgaggcggcgtactgccccg

SEQ ID NO: 2546262 - DNA, 25 bp, Homo sapien
gcttctctctaggaagacgctcctt

SEQ ID NO: 2546263 - DNA, 25 bp, Homo sapien
gagtcataggcgtcctcctcgtctg

SEQ ID NO: 2546264 - DNA, 25 bp, Homo sapien
gcagagtccacggactcgccctggg

SEQ ID NO: 2546265 - DNA, 25 bp, Homo sapien
ggaacggcagcaactgcagagtcca

SEQ ID NO: 2546266 - DNA, 25 bp, Homo sapien
gaacttgctaatggctttgattggg

SEQ ID NO: 2546267 - DNA, 25 bp, Homo sapien
agagggtccgcacggtcacgccctt

SEQ ID NO: 2546268 - DNA, 25 bp, Homo sapien
tctgccctttggcatacacgccgta

SEQ ID NO: 2546269 - DNA, 25 bp, Homo sapien
cagcctggacggtaacatcttgtgg

SEQ ID NO: 2546270 - DNA, 25 bp, Homo sapien
catacacgccgtagccggtaacgtt

SEQ ID NO: 2546271 - DNA, 25 bp, Homo sapien
gtttgcgccattggacagcccggtg

SEQ ID NO: 2546272 - DNA, 25 bp, Homo sapien
agggtgacatcctggcgttctctcc

SEQ ID NO: 2546273 - DNA, 25 bp, Homo sapien
gcagggtgacatcctggcgttctct

SEQ ID NO: 2546274 - DNA, 25 bp, Homo sapien
cctccccactagcagggtgacatcc

SEQ ID NO: 2546275 - DNA, 25 bp, Homo sapien
cttccctccccactagcagggtgac

SEQ ID NO: 2546276 - DNA, 25 bp, Homo sapien
tttagttctgctccccagcgtgagg

SEQ ID NO: 2546277 - DNA, 25 bp, Homo sapien
gagatctgcgtgatgttgtccaccc

SEQ ID NO: 2546278 - DNA, 25 bp, Homo sapien
acctggcggccttgacgatgtcgaa

SEQ ID NO: 2546279 - DNA, 25 bp, Homo sapien
tcgtcgatgttcacgtccagggtcc

SEQ ID NO: 2546280 - DNA, 25 bp, Homo sapien
gggctcctccgctgttcccaggagt

SEQ ID NO: 2546281 - DNA, 25 bp, Homo sapien
tacaaggacagagttatcacccagc

SEQ ID NO: 2546282 - DNA, 25 bp, Homo sapien
aggcagagcaacagggttgccctgg

SEQ ID NO: 2546283 - DNA, 25 bp, Homo sapien
ccaccaggaccataaggcagagcaa

SEQ ID NO: 2546284 - DNA, 25 bp, Homo sapien
gcagggaccacacgactattgaatg

SEQ ID NO: 2546285 - DNA, 25 bp, Homo sapien
caacacgaacaacactcagggacag

SEQ ID NO: 2546286 - DNA, 25 bp, Homo sapien
tgatacttatcgcaacctgaaacca

SEQ ID NO: 2546287 - DNA, 25 bp, Homo sapien
gatttgttagaaggacgagtcagtc

SEQ ID NO: 2546288 - DNA, 25 bp, Homo sapien
aggagagacacttttggaagcagag

SEQ ID NO: 2546289 - DNA, 25 bp, Homo sapien
agatgatttcaaatttggagaggag

SEQ ID NO: 2546290 - DNA, 25 bp, Homo sapien
gtttattctcaagctaaaaaggcaa

SEQ ID NO: 2546291 - DNA, 25 bp, Homo sapien
gtctgcaaatagctgccaaaagctc

SEQ ID NO: 2546292 - DNA, 25 bp, Homo sapien
agcttagagctgaatactggaaacc

SEQ ID NO: 2546293 - DNA, 25 bp, Homo sapien
tcagcttagagctgaatactggaaa

SEQ ID NO: 2546294 - DNA, 25 bp, Homo sapien
gcttagagctgaatactggaaaccc

SEQ ID NO: 2546295 - DNA, 25 bp, Homo sapien
cagcttagagctgaatactggaaac

SEQ ID NO: 2546296 - DNA, 25 bp, Homo sapien
tttccagtcgtcaaagagggcaaac

SEQ ID NO: 2546297 - DNA, 25 bp, Homo sapien
tccagtcgtcaaagagggcaaacct

SEQ ID NO: 2546298 - DNA, 25 bp, Homo sapien
agtcgtcaaagagggcaaacctggt

SEQ ID NO: 2546299 - DNA, 25 bp, Homo sapien
tttctttccagtcgtcaaagagggc

SEQ ID NO: 2546300 - DNA, 25 bp, Homo sapien
tgcggggtggactggcccagcctac

SEQ ID NO: 2546301 - DNA, 25 bp, Homo sapien
ggtctgcggggtggactggcccagc

SEQ ID NO: 2546302 - DNA, 25 bp, Homo sapien
gtctgcggggtggactggcccagcc

SEQ ID NO: 2546303 - DNA, 25 bp, Homo sapien
tctgcggggtggactggcccagcct

SEQ ID NO: 2546304 - DNA, 25 bp, Homo sapien
cgccacagccatgttccaacagaga

SEQ ID NO: 2546305 - DNA, 25 bp, Homo sapien
gccacagccatgttccaacagagac

SEQ ID NO: 2546306 - DNA, 25 bp, Homo sapien
gtccgccacagccatgttccaacag

SEQ ID NO: 2546307 - DNA, 25 bp, Homo sapien
tccgccacagccatgttccaacaga

SEQ ID NO: 2546308 - DNA, 25 bp, Homo sapien
ggcagctcagcttcggggttctcgt

SEQ ID NO: 2546309 - DNA, 25 bp, Homo sapien
ctcgttcggtccatcgaaggggttg

SEQ ID NO: 2546310 - DNA, 25 bp, Homo sapien
tcggggttctcgttcggtccatcga

SEQ ID NO: 2546311 - DNA, 25 bp, Homo sapien
cgtagaggtattttcccgccgtgag

SEQ ID NO: 2546312 - DNA, 25 bp, Homo sapien
gagaaaacacagttccttcattaga

SEQ ID NO: 2546313 - DNA, 25 bp, Homo sapien
ctgcagagaaaacacagttccttca

SEQ ID NO: 2546314 - DNA, 25 bp, Homo sapien
aaacacagttccttcattagaggct

SEQ ID NO: 2546315 - DNA, 25 bp, Homo sapien
gaaaacacagttccttcattagagg

SEQ ID NO: 2546316 - DNA, 25 bp, Homo sapien
cagggagcaggtagggaagacacac

SEQ ID NO: 2546317 - DNA, 25 bp, Homo sapien
ccagggagcaggtagggaagacaca

SEQ ID NO: 2546318 - DNA, 25 bp, Homo sapien
gtgaacaccgagaagggtggaagaa

SEQ ID NO: 2546319 - DNA, 25 bp, Homo sapien
gggaagccgcggaggccaagaggga

SEQ ID NO: 2546320 - DNA, 25 bp, Homo sapien
gagcttgagagggaagccgcggagg

SEQ ID NO: 2546321 - DNA, 25 bp, Homo sapien
aggtgaacaccgagaagggtggaag

SEQ ID NO: 2546322 - DNA, 25 bp, Homo sapien
tgtcgtgacaacctcgtcggtgctc

SEQ ID NO: 2546323 - DNA, 25 bp, Homo sapien
gagatcctacggctgtcgtgacaac

SEQ ID NO: 2546324 - DNA, 25 bp, Homo sapien
tacggctgtcgtgacaacctcgtcg

SEQ ID NO: 2546325 - DNA, 25 bp, Homo sapien
acctcgtcggtgctcctgcgtgtgg

SEQ ID NO: 2546326 - DNA, 25 bp, Homo sapien
tcaggtagtgcagtcctgggggacc

SEQ ID NO: 2546327 - DNA, 25 bp, Homo sapien
cgcctctgcggaagctcccgtggag

SEQ ID NO: 2546328 - DNA, 25 bp, Homo sapien
gggggacctctcatccttgcccacg

SEQ ID NO: 2546329 - DNA, 25 bp, Homo sapien
atccttgcccacgtccgcctctgcg

SEQ ID NO: 2546330 - DNA, 25 bp, Homo sapien
acagaggtggaccttccccgagtat

SEQ ID NO: 2546331 - DNA, 25 bp, Homo sapien
ggtattggaattccgttcattctcc

SEQ ID NO: 2546332 - DNA, 25 bp, Homo sapien
gtatctctgcttggaggtattggaa

SEQ ID NO: 2546333 - DNA, 25 bp, Homo sapien
ctatagcgggcaacacagaggtgga

SEQ ID NO: 2546334 - DNA, 25 bp, Homo sapien
ctaccggatctcgacaggaaggtgg

SEQ ID NO: 2546335 - DNA, 25 bp, Homo sapien
tatattcaccgatcgcagagctgcc

SEQ ID NO: 2546336 - DNA, 25 bp, Homo sapien
tcagatctgcatcttgcgctaccgg

SEQ ID NO: 2546337 - DNA, 25 bp, Homo sapien
gagctgcctccaatagcgctctcct

SEQ ID NO: 2546338 - DNA, 25 bp, Homo sapien
tttgccgagggaggtggctaggcca

SEQ ID NO: 2546339 - DNA, 25 bp, Homo sapien
tgccgagggaggtggctaggccatt

SEQ ID NO: 2546340 - DNA, 25 bp, Homo sapien
ctttgccgagggaggtggctaggcc

SEQ ID NO: 2546341 - DNA, 25 bp, Homo sapien
cgagggaggtggctaggccattcat

SEQ ID NO: 2546342 - DNA, 25 bp, Homo sapien
ctttgagtccggcatttctcttcca

SEQ ID NO: 2546343 - DNA, 25 bp, Homo sapien
ggtcaatcttgccagcgtgctgccg

SEQ ID NO: 2546344 - DNA, 25 bp, Homo sapien
ttgccagcgtgctgccggaacttct

SEQ ID NO: 2546345 - DNA, 25 bp, Homo sapien
ggacagcaggttgaactgctcactt

SEQ ID NO: 2546346 - DNA, 25 bp, Homo sapien
caaagcggcgctcgcaggagcagcc

SEQ ID NO: 2546347 - DNA, 25 bp, Homo sapien
gtgttcatcagggccgggttccctc

SEQ ID NO: 2546348 - DNA, 25 bp, Homo sapien
cctcggtaggctggaagtgccgtca

SEQ ID NO: 2546349 - DNA, 25 bp, Homo sapien
cagccgtaatcatggtggcagtatt

SEQ ID NO: 2546350 - DNA, 25 bp, Homo sapien
tgctccgtaaatgcttgtctgatgg

SEQ ID NO: 2546351 - DNA, 25 bp, Homo sapien
gctccgtaaatgcttgtctgatggg

SEQ ID NO: 2546352 - DNA, 25 bp, Homo sapien
cctgctggggctaagagcttccaat

SEQ ID NO: 2546353 - DNA, 25 bp, Homo sapien
tctcgtgactgccaggggggtccct

SEQ ID NO: 2546354 - DNA, 25 bp, Homo sapien
cagcagggaaggctctcgtgactgc

SEQ ID NO: 2546355 - DNA, 25 bp, Homo sapien
tccctgctggggctaagagcttcca

SEQ ID NO: 2546356 - DNA, 25 bp, Homo sapien
gccagcagcagccgcttccaaagca

SEQ ID NO: 2546357 - DNA, 25 bp, Homo sapien
cagcagcagccgcttccaaagcatg

SEQ ID NO: 2546358 - DNA, 25 bp, Homo sapien
attgccagcagcagccgcttccaaa

SEQ ID NO: 2546359 - DNA, 25 bp, Homo sapien
ctatggggaggaattgccagcagca

SEQ ID NO: 2546360 - DNA, 25 bp, Homo sapien
ctgctcctccccatcccgaggccac

SEQ ID NO: 2546361 - DNA, 25 bp, Homo sapien
ggtgctgctcctccccatcccgagg

SEQ ID NO: 2546362 - DNA, 25 bp, Homo sapien
ccagccccatggtgctgctcctccc

SEQ ID NO: 2546363 - DNA, 25 bp, Homo sapien
gctgctcctccccatcccgaggcca

SEQ ID NO: 2546364 - DNA, 25 bp, Homo sapien
catcaggcaagtcaactgtaattgg

SEQ ID NO: 2546365 - DNA, 25 bp, Homo sapien
gaacagatggcagagtcatcaggca

SEQ ID NO: 2546366 - DNA, 25 bp, Homo sapien
aacaaacagcagaggctcgcaaatg

SEQ ID NO: 2546367 - DNA, 25 bp, Homo sapien
tcagaagcaactgagtccggaccag

SEQ ID NO: 2546368 - DNA, 25 bp, Homo sapien
gaataccagcgggtgaagatggccc

SEQ ID NO: 2546369 - DNA, 25 bp, Homo sapien
gatgtctcgatgtctctcctatgca

SEQ ID NO: 2546370 - DNA, 25 bp, Homo sapien
tgttcaggaaaaatagccgggctcc

SEQ ID NO: 2546371 - DNA, 25 bp, Homo sapien
tgataggacgctaagtgccaaagga

SEQ ID NO: 2546372 - DNA, 25 bp, Homo sapien
ggcagggaagatgctattctctaga

SEQ ID NO: 2546373 - DNA, 25 bp, Homo sapien
tgcgtcagaagctgcagttcaggaa

SEQ ID NO: 2546374 - DNA, 25 bp, Homo sapien
atggccgcgtccactcacgggaaaa

SEQ ID NO: 2546375 - DNA, 25 bp, Homo sapien
aagcatcgccaagcacgccgggcag

SEQ ID NO: 2546376 - DNA, 25 bp, Homo sapien
actgcgccttcatgctccttcttag

SEQ ID NO: 2546377 - DNA, 25 bp, Homo sapien
tcctgggaagaacctctggactggc

SEQ ID NO: 2546378 - DNA, 25 bp, Homo sapien
tctgaaccctcagcgactggtgacc

SEQ ID NO: 2546379 - DNA, 25 bp, Homo sapien
gatttgagccctggatctagccatg

SEQ ID NO: 2546380 - DNA, 25 bp, Homo sapien
gtctccacagggaaaccaaggctga

SEQ ID NO: 2546381 - DNA, 25 bp, Homo sapien
accatgatccttttcgctgacatca

SEQ ID NO: 2546382 - DNA, 25 bp, Homo sapien
gacagcagaatcaaaccaccatgat

SEQ ID NO: 2546383 - DNA, 25 bp, Homo sapien
aaaccaccatgatccttttcgctga

SEQ ID NO: 2546384 - DNA, 25 bp, Homo sapien
agacagcagaatcaaaccaccatga

SEQ ID NO: 2546385 - DNA, 25 bp, Homo sapien
tggatggaccatggtgcacacagcc

SEQ ID NO: 2546386 - DNA, 25 bp, Homo sapien
cttaggtgggcatcaattgggtcca

SEQ ID NO: 2546387 - DNA, 25 bp, Homo sapien
gtgtggatggaccatggtgcacaca

SEQ ID NO: 2546388 - DNA, 25 bp, Homo sapien
acagccatcacccttaggtgggcat

SEQ ID NO: 2546389 - DNA, 25 bp, Homo sapien
gccgccgttcagccgcctctcgcat

SEQ ID NO: 2546390 - DNA, 25 bp, Homo sapien
ccagggcctggtcatgctccaactg

SEQ ID NO: 2546391 - DNA, 25 bp, Homo sapien
agggcctggtcatgctccaactgca

SEQ ID NO: 2546392 - DNA, 25 bp, Homo sapien
ggcctggtcatgctccaactgcagc

SEQ ID NO: 2546393 - DNA, 25 bp, Homo sapien
cagtgaccagccacgaaccctggca

SEQ ID NO: 2546394 - DNA, 25 bp, Homo sapien
agtgaccagccacgaaccctggcag

SEQ ID NO: 2546395 - DNA, 25 bp, Homo sapien
gcagtgaccagccacgaaccctggc

SEQ ID NO: 2546396 - DNA, 25 bp, Homo sapien
caaactgccgccttcatggcctctt

SEQ ID NO: 2546397 - DNA, 25 bp, Homo sapien
cctcttggagctcagtcccactgct

SEQ ID NO: 2546398 - DNA, 25 bp, Homo sapien
agctctccacgctgcccacatcagg

SEQ ID NO: 2546399 - DNA, 25 bp, Homo sapien
tgccgccttcatggcctcttggagc

SEQ ID NO: 2546400 - DNA, 25 bp, Homo sapien
cttggagcactacgggggccagggc

SEQ ID NO: 2546401 - DNA, 25 bp, Homo sapien
agaagcagctttcgacttcctcgcg

SEQ ID NO: 2546402 - DNA, 25 bp, Homo sapien
agagaagcagctttcgacttcctcg

SEQ ID NO: 2546403 - DNA, 25 bp, Homo sapien
aagcagctttcgacttcctcgcggc

SEQ ID NO: 2546404 - DNA, 25 bp, Homo sapien
tgggtggccgattgtgcagctgctt

SEQ ID NO: 2546405 - DNA, 25 bp, Homo sapien
gattgtgcagctgcttaattctgcc

SEQ ID NO: 2546406 - DNA, 25 bp, Homo sapien
ccgattgtgcagctgcttaattctg

SEQ ID NO: 2546407 - DNA, 25 bp, Homo sapien
tggccgattgtgcagctgcttaatt

SEQ ID NO: 2546408 - DNA, 25 bp, Homo sapien
tccacaggactaaaagagaggccaa

SEQ ID NO: 2546409 - DNA, 25 bp, Homo sapien
gagaggccaaatgccaactcacccc

SEQ ID NO: 2546410 - DNA, 25 bp, Homo sapien
ctcagccacaccataaaagagggag

SEQ ID NO: 2546411 - DNA, 25 bp, Homo sapien
agcgaagtgggaagcggtctacaca

SEQ ID NO: 2546412 - DNA, 25 bp, Homo sapien
gaggagatgccggaaatcaccaact

SEQ ID NO: 2546413 - DNA, 25 bp, Homo sapien
tcggttcagcgaggcaatctgtcaa

SEQ ID NO: 2546414 - DNA, 25 bp, Homo sapien
tatacagtcacctgtgagccccaga

SEQ ID NO: 2546415 - DNA, 25 bp, Homo sapien
gaggactgactctgggttaaatgca

SEQ ID NO: 2546416 - DNA, 25 bp, Homo sapien
tgatttaaagagtatttgcggatgc

SEQ ID NO: 2546417 - DNA, 25 bp, Homo sapien
agctccaaacgcttccccaaagagg

SEQ ID NO: 2546418 - DNA, 25 bp, Homo sapien
tgcggatgcagcctaatcctgtttt

SEQ ID NO: 2546419 - DNA, 25 bp, Homo sapien
cgcttccccaaagaggctacagatg

SEQ ID NO: 2546420 - DNA, 25 bp, Homo sapien
gtttgaaacccactgtagccacctc

SEQ ID NO: 2546421 - DNA, 25 bp, Homo sapien
ggtcattaaacgtctgaggagcagc

SEQ ID NO: 2546422 - DNA, 25 bp, Homo sapien
aacccactggctaaatattgaagga

SEQ ID NO: 2546423 - DNA, 25 bp, Homo sapien
catttccattcaggagcggtgtgcc

SEQ ID NO: 2546424 - DNA, 25 bp, Homo sapien
cgacctcacaaagagcagaagcggt

SEQ ID NO: 2546425 - DNA, 25 bp, Homo sapien
ttcctcacaccgacctcacaaagag

SEQ ID NO: 2546426 - DNA, 25 bp, Homo sapien
ctccttcctcacaccgacctcacaa

SEQ ID NO: 2546427 - DNA, 25 bp, Homo sapien
gagcagaagcggtcccaaatgcaga

SEQ ID NO: 2546428 - DNA, 25 bp, Homo sapien
aaatcgcgctctctggtcacgaggg

SEQ ID NO: 2546429 - DNA, 25 bp, Homo sapien
tcacgagggtgagcggatggttgag

SEQ ID NO: 2546430 - DNA, 25 bp, Homo sapien
gagcggatggttgagatgcacatac

SEQ ID NO: 2546431 - DNA, 25 bp, Homo sapien
cctgttctaggttctccagcttggc

SEQ ID NO: 2546432 - DNA, 25 bp, Homo sapien
gttggtatccgttgcttcctcttta

SEQ ID NO: 2546433 - DNA, 25 bp, Homo sapien
aaatcttcaatttcctcctagagaa

SEQ ID NO: 2546434 - DNA, 25 bp, Homo sapien
caacatgcctaagagttggtatccg

SEQ ID NO: 2546435 - DNA, 25 bp, Homo sapien
gacaaggaggttatcacaacatgcc

SEQ ID NO: 2546436 - DNA, 25 bp, Homo sapien
ggccaccttcacactgatgttcagt

SEQ ID NO: 2546437 - DNA, 25 bp, Homo sapien
tcaggccaccttcacactgatgttc

SEQ ID NO: 2546438 - DNA, 25 bp, Homo sapien
gccccagatggtctgtggacagtgg

SEQ ID NO: 2546439 - DNA, 25 bp, Homo sapien
caccttcacactgatgttcagtgat

SEQ ID NO: 2546440 - DNA, 25 bp, Homo sapien
ctgcatgatgggatctcaggagata

SEQ ID NO: 2546441 - DNA, 25 bp, Homo sapien
ggatctcaggagatactctccctgg

SEQ ID NO: 2546442 - DNA, 25 bp, Homo sapien
cctgggtggcatccttcagttcatt

SEQ ID NO: 2546443 - DNA, 25 bp, Homo sapien
cccttgtgggaaggcctgcatgatg

SEQ ID NO: 2546444 - DNA, 25 bp, Homo sapien
catggggacgtgtggttccacaagc

SEQ ID NO: 2546445 - DNA, 25 bp, Homo sapien
cagttatatgagcaactgaaactgg

SEQ ID NO: 2546446 - DNA, 25 bp, Homo sapien
gttatatgagcaactgaaactggtg

SEQ ID NO: 2546447 - DNA, 25 bp, Homo sapien
gagcaaggccacattcagttatatg

SEQ ID NO: 2546448 - DNA, 25 bp, Homo sapien
ggccacattcagttatatgagcaac

SEQ ID NO: 2546449 - DNA, 25 bp, Homo sapien
ggtaacatgaccgaggaacgagccc

SEQ ID NO: 2546450 - DNA, 25 bp, Homo sapien
ccccagccggggtaacatgaccgag

SEQ ID NO: 2546451 - DNA, 25 bp, Homo sapien
cagccggggtaacatgaccgaggaa

SEQ ID NO: 2546452 - DNA, 25 bp, Homo sapien
aacatgaccgaggaacgagcccagt

SEQ ID NO: 2546453 - DNA, 25 bp, Homo sapien
tcagagccgccgtcgagtgtcacgt

SEQ ID NO: 2546454 - DNA, 25 bp, Homo sapien
tgcctctacaccagaagcacgtgag

SEQ ID NO: 2546455 - DNA, 25 bp, Homo sapien
acgtgagaacgtgtgggtcccattt

SEQ ID NO: 2546456 - DNA, 25 bp, Homo sapien
ggacttagtttcattctcagcgcag

SEQ ID NO: 2546457 - DNA, 25 bp, Homo sapien
caaagccacaggatttagggctcat

SEQ ID NO: 2546458 - DNA, 25 bp, Homo sapien
ggcttgttccactcgggccatgaag

SEQ ID NO: 2546459 - DNA, 25 bp, Homo sapien
gatccaaagaccatcaaagaccaaa

SEQ ID NO: 2546460 - DNA, 25 bp, Homo sapien
ggccatgaagttaagaatgtgaaca

SEQ ID NO: 2546461 - DNA, 25 bp, Homo sapien
catgaacaggagtgacggaagacaa

SEQ ID NO: 2546462 - DNA, 25 bp, Homo sapien
cagcacaaagggtgatatgaaaaac

SEQ ID NO: 2546463 - DNA, 25 bp, Homo sapien
gcagcacaaagggtgatatgaaaaa

SEQ ID NO: 2546464 - DNA, 25 bp, Homo sapien
agcagcacaaagggtgatatgaaaa

SEQ ID NO: 2546465 - DNA, 25 bp, Homo sapien
gcactgctctggggaacgctggcac

SEQ ID NO: 2546466 - DNA, 25 bp, Homo sapien
ctgctctggggaacgctggcacaca

SEQ ID NO: 2546467 - DNA, 25 bp, Homo sapien
gggcactgctctggggaacgctggc

SEQ ID NO: 2546468 - DNA, 25 bp, Homo sapien
tgtgcagcaggacgacctgtatgca

SEQ ID NO: 2546469 - DNA, 25 bp, Homo sapien
gtcctcagtgacaggggtagccaag

SEQ ID NO: 2546470 - DNA, 25 bp, Homo sapien
tgggggggtgatggctgtgtctggt

SEQ ID NO: 2546471 - DNA, 25 bp, Homo sapien
ggtcctcagtgacaggggtagccaa

SEQ ID NO: 2546472 - DNA, 25 bp, Homo sapien
tcctcagtgacaggggtagccaagg

SEQ ID NO: 2546473 - DNA, 25 bp, Homo sapien
gtgggcagctggcaggtggccagct

SEQ ID NO: 2546474 - DNA, 25 bp, Homo sapien
gcagctggcaggtggccagctgcat

SEQ ID NO: 2546475 - DNA, 25 bp, Homo sapien
tgggcagctggcaggtggccagctg

SEQ ID NO: 2546476 - DNA, 25 bp, Homo sapien
ccgtgggcagctggcaggtggccag

SEQ ID NO: 2546477 - DNA, 25 bp, Homo sapien
gacaatgtacagcactggatatatc

SEQ ID NO: 2546478 - DNA, 25 bp, Homo sapien
ctggtccaaggagcgagccccacag

SEQ ID NO: 2546479 - DNA, 25 bp, Homo sapien
taggatcttcatctcactccatggg

SEQ ID NO: 2546480 - DNA, 25 bp, Homo sapien
ggagcgagccccacagcggatccta

SEQ ID NO: 2546481 - DNA, 25 bp, Homo sapien
ggtggacagccggtcaaaacacgta

SEQ ID NO: 2546482 - DNA, 25 bp, Homo sapien
gtctgtggatatctatcagcggcaa

SEQ ID NO: 2546483 - DNA, 25 bp, Homo sapien
tatcagcggcaaatgcttctgttgc

SEQ ID NO: 2546484 - DNA, 25 bp, Homo sapien
ggttactcttggagactgcacaggc

SEQ ID NO: 2546485 - DNA, 25 bp, Homo sapien
tctgatcgaatgtggcctcagcacc

SEQ ID NO: 2546486 - DNA, 25 bp, Homo sapien
tctgctgagttcctggtctcaggag

SEQ ID NO: 2546487 - DNA, 25 bp, Homo sapien
agcggtctcccaaagcttgggtctg

SEQ ID NO: 2546488 - DNA, 25 bp, Homo sapien
gcttcaggtgtggcgggtcatttcc

SEQ ID NO: 2546489 - DNA, 25 bp, Homo sapien
tgcgggaagaagtagacacaatctt

SEQ ID NO: 2546490 - DNA, 25 bp, Homo sapien
ctgcgggaagaagtagacacaatct

SEQ ID NO: 2546491 - DNA, 25 bp, Homo sapien
gattagtggtctagtggaccagaca

SEQ ID NO: 2546492 - DNA, 25 bp, Homo sapien
ccggagattagtggtctagtggacc

SEQ ID NO: 2546493 - DNA, 25 bp, Homo sapien
attagtggtctagtggaccagacag

SEQ ID NO: 2546494 - DNA, 25 bp, Homo sapien
gagattagtggtctagtggaccaga

SEQ ID NO: 2546495 - DNA, 25 bp, Homo sapien
gttgggcaggagaaaccgcagtctt

SEQ ID NO: 2546496 - DNA, 25 bp, Homo sapien
taatgtcggcgtcacagccgtcctg

SEQ ID NO: 2546497 - DNA, 25 bp, Homo sapien
taactgattctaacacgtgccttgg

SEQ ID NO: 2546498 - DNA, 25 bp, Homo sapien
tggcactcagcgctgtttctgtggt

SEQ ID NO: 2546499 - DNA, 25 bp, Homo sapien
ttcttcattgctcttgctgctgtct

SEQ ID NO: 2546500 - DNA, 25 bp, Homo sapien
ttattttcttcattgctcttgctgc

SEQ ID NO: 2546501 - DNA, 25 bp, Homo sapien
tttcttcattgctcttgctgctgtc

SEQ ID NO: 2546502 - DNA, 25 bp, Homo sapien
attttcttcattgctcttgctgctg

SEQ ID NO: 2546503 - DNA, 25 bp, Homo sapien
gcctgatgcattgtaactattcaaa

SEQ ID NO: 2546504 - DNA, 25 bp, Homo sapien
tatcttgcctgatgcattgtaacta

SEQ ID NO: 2546505 - DNA, 25 bp, Homo sapien
actctgtaaggaccttatttatctt

SEQ ID NO: 2546506 - DNA, 25 bp, Homo sapien
tatttatcttgcctgatgcattgta

SEQ ID NO: 2546507 - DNA, 25 bp, Homo sapien
cataactaaactgatagagcttggg

SEQ ID NO: 2546508 - DNA, 25 bp, Homo sapien
attctcataactaaactgatagagc

SEQ ID NO: 2546509 - DNA, 25 bp, Homo sapien
aagacagagaaagatccatcgtcga

SEQ ID NO: 2546510 - DNA, 25 bp, Homo sapien
tcgtcgaagcaatgcagcggcatcc

SEQ ID NO: 2546511 - DNA, 25 bp, Homo sapien
aatcggtgcgaacactcacagtctc

SEQ ID NO: 2546512 - DNA, 25 bp, Homo sapien
ttctgggcaagaacacgaatctgtc

SEQ ID NO: 2546513 - DNA, 25 bp, Homo sapien
cactcgtgtatttgcaatcggtgcg

SEQ ID NO: 2546514 - DNA, 25 bp, Homo sapien
tctgtcatttgcactcgtgtatttg

SEQ ID NO: 2546515 - DNA, 25 bp, Homo sapien
cgtcttcaagtgtccgtacttggga

SEQ ID NO: 2546516 - DNA, 25 bp, Homo sapien
gaagtaacaagcaccgtcttcaagt

SEQ ID NO: 2546517 - DNA, 25 bp, Homo sapien
ctaagcagtgtagccactgacggtg

SEQ ID NO: 2546518 - DNA, 25 bp, Homo sapien
ctgacggtgaaaaccacccaagaag

SEQ ID NO: 2546519 - DNA, 25 bp, Homo sapien
ggcatggagaagcggatcttcccgg

SEQ ID NO: 2546520 - DNA, 25 bp, Homo sapien
catggagaagcggatcttcccggca

SEQ ID NO: 2546521 - DNA, 25 bp, Homo sapien
ccggcagccaccagcgtgtgagcat

SEQ ID NO: 2546522 - DNA, 25 bp, Homo sapien
gagaagcggatcttcccggcagcca

SEQ ID NO: 2546523 - DNA, 25 bp, Homo sapien
gccacgcgcacatggccagggcgtt

SEQ ID NO: 2546524 - DNA, 25 bp, Homo sapien
agcaaacgctggcacagccgtgctg

SEQ ID NO: 2546525 - DNA, 25 bp, Homo sapien
agggcgtttagcactcgggcctccg

SEQ ID NO: 2546526 - DNA, 25 bp, Homo sapien
acttgatggtgaagcaaacgctggc

SEQ ID NO: 2546527 - DNA, 25 bp, Homo sapien
ccttgtggtcagggcgggtctgctg

SEQ ID NO: 2546528 - DNA, 25 bp, Homo sapien
cttgtggtcagggcgggtctgctgc

SEQ ID NO: 2546529 - DNA, 25 bp, Homo sapien
tatattgggagtgcgtttgaaacgg

SEQ ID NO: 2546530 - DNA, 25 bp, Homo sapien
ggcttctccacgtcttaaataagat

SEQ ID NO: 2546531 - DNA, 25 bp, Homo sapien
aataagattcagttgtcatgtgtag

SEQ ID NO: 2546532 - DNA, 25 bp, Homo sapien
ggtcgggtggcttctccacgtctta

SEQ ID NO: 2546533 - DNA, 25 bp, Homo sapien
tccggaggttcacctcggagacaac

SEQ ID NO: 2546534 - DNA, 25 bp, Homo sapien
caaggctccggaggttcacctcgga

SEQ ID NO: 2546535 - DNA, 25 bp, Homo sapien
cacctcggagacaactgcagtgtac

SEQ ID NO: 2546536 - DNA, 25 bp, Homo sapien
gctgtgccaaggctccggaggttca

SEQ ID NO: 2546537 - DNA, 25 bp, Homo sapien
tctgggtgtctgtccagactggcat

SEQ ID NO: 2546538 - DNA, 25 bp, Homo sapien
tcactgttcacctccagtagactga

SEQ ID NO: 2546539 - DNA, 25 bp, Homo sapien
agagggcatcgccctctccctggtg

SEQ ID NO: 2546540 - DNA, 25 bp, Homo sapien
gatttggtggagagaacccttgcag

SEQ ID NO: 2546541 - DNA, 25 bp, Homo sapien
ttaagcaaccatcaccaaaatccag

SEQ ID NO: 2546542 - DNA, 25 bp, Homo sapien
tggatggcttttagtaaacgtataa

SEQ ID NO: 2546543 - DNA, 25 bp, Homo sapien
tttgtctctaccgttttgcctctcc

SEQ ID NO: 2546544 - DNA, 25 bp, Homo sapien
ttctaaggcagccacatcagtccag

SEQ ID NO: 2546545 - DNA, 25 bp, Homo sapien
ctcatggttcgggttttacagcttt

SEQ ID NO: 2546546 - DNA, 25 bp, Homo sapien
aaacccaaatatcaaggtgaacatg

SEQ ID NO: 2546547 - DNA, 25 bp, Homo sapien
aatatcaaggtgaacatggcacatc

SEQ ID NO: 2546548 - DNA, 25 bp, Homo sapien
cccaaatatcaaggtgaacatggca

SEQ ID NO: 2546549 - DNA, 25 bp, Homo sapien
caggacaggcgttttcatttaccca

SEQ ID NO: 2546550 - DNA, 25 bp, Homo sapien
ccaagctaactgctgaagccgagag

SEQ ID NO: 2546551 - DNA, 25 bp, Homo sapien
gcgcgcagtgtgaaaacctccagta

SEQ ID NO: 2546552 - DNA, 25 bp, Homo sapien
gaatcgctgacgtcttcacgggtcg

SEQ ID NO: 2546553 - DNA, 25 bp, Homo sapien
tgcaataaaatatctccccaaaatc

SEQ ID NO: 2546554 - DNA, 25 bp, Homo sapien
tttccagaaatgacaaggcaggaaa

SEQ ID NO: 2546555 - DNA, 25 bp, Homo sapien
taatatgcaataaaatatctcccca

SEQ ID NO: 2546556 - DNA, 25 bp, Homo sapien
aaatctttccagaaatgacaaggca

SEQ ID NO: 2546557 - DNA, 25 bp, Homo sapien
tgaccaccagcgagtgatccaatgg

SEQ ID NO: 2546558 - DNA, 25 bp, Homo sapien
ggaataatttcctcgagtcccgaga

SEQ ID NO: 2546559 - DNA, 25 bp, Homo sapien
tcttaattagcacaaactagctggg

SEQ ID NO: 2546560 - DNA, 25 bp, Homo sapien
taaacaactgtacaaaggtggctcc

SEQ ID NO: 2546561 - DNA, 25 bp, Homo sapien
tacggcgctgtcactgaacaagacg

SEQ ID NO: 2546562 - DNA, 25 bp, Homo sapien
caagacgttcggttgtgcttcttcc

SEQ ID NO: 2546563 - DNA, 25 bp, Homo sapien
cgatgccgggttacagcgtctgaga

SEQ ID NO: 2546564 - DNA, 25 bp, Homo sapien
ttacaaggtcagcactcgatgccgg

SEQ ID NO: 2546565 - DNA, 25 bp, Homo sapien
tgttgttgctaggataattccaagg

SEQ ID NO: 2546566 - DNA, 25 bp, Homo sapien
ctaggacaatgttgttgctaggata

SEQ ID NO: 2546567 - DNA, 25 bp, Homo sapien
ctaggataattccaaggatcacaag

SEQ ID NO: 2546568 - DNA, 25 bp, Homo sapien
caaggatcacaagcaaaacaattac

SEQ ID NO: 2546569 - DNA, 25 bp, Homo sapien
ctgcaaacacatcctcctggactca

SEQ ID NO: 2546570 - DNA, 25 bp, Homo sapien
aaggcaaagcgagaccacctttggc

SEQ ID NO: 2546571 - DNA, 25 bp, Homo sapien
caaggcaaagcgagaccacctttgg

SEQ ID NO: 2546572 - DNA, 25 bp, Homo sapien
ccacctttggcttaataaatggagt

SEQ ID NO: 2546573 - DNA, 25 bp, Homo sapien
gaccacctttggcttaataaatgga

SEQ ID NO: 2546574 - DNA, 25 bp, Homo sapien
tctccttaaagcagcccatcccacc

SEQ ID NO: 2546575 - DNA, 25 bp, Homo sapien
atacctgtaagactccacctgtctc

SEQ ID NO: 2546576 - DNA, 25 bp, Homo sapien
tcccacccatgctccggggtgacag

SEQ ID NO: 2546577 - DNA, 25 bp, Homo sapien
cgaatacctgtaagactccacctgt

SEQ ID NO: 2546578 - DNA, 25 bp, Homo sapien
gcaaggatggctcccaatgcagaag

SEQ ID NO: 2546579 - DNA, 25 bp, Homo sapien
cattgccacttcagggccagtgcaa

SEQ ID NO: 2546580 - DNA, 25 bp, Homo sapien
tagtgagacttaaccatgctcgtga

SEQ ID NO: 2546581 - DNA, 25 bp, Homo sapien
tagacacctgggaacagttcacaac

SEQ ID NO: 2546582 - DNA, 25 bp, Homo sapien
cagagaggcatgcacactgacgtta

SEQ ID NO: 2546583 - DNA, 25 bp, Homo sapien
agagaggcatgcacactgacgttat

SEQ ID NO: 2546584 - DNA, 25 bp, Homo sapien
gcagagaggcatgcacactgacgtt

SEQ ID NO: 2546585 - DNA, 25 bp, Homo sapien
caaccagaaccactgacacagcaat

SEQ ID NO: 2546586 - DNA, 25 bp, Homo sapien
aactgacaagccaataattagagcg

SEQ ID NO: 2546587 - DNA, 25 bp, Homo sapien
accagaaccactgacacagcaataa

SEQ ID NO: 2546588 - DNA, 25 bp, Homo sapien
aattagagcgattatggcaaccaga

SEQ ID NO: 2546589 - DNA, 25 bp, Homo sapien
caggaaaagcggagggtgtgccctg

SEQ ID NO: 2546590 - DNA, 25 bp, Homo sapien
ccaggaaaagcggagggtgtgccct

SEQ ID NO: 2546591 - DNA, 25 bp, Homo sapien
gcagcccgggggtgtgagtgagggt

SEQ ID NO: 2546592 - DNA, 25 bp, Homo sapien
ctgcagcccgggggtgtgagtgagg

SEQ ID NO: 2546593 - DNA, 25 bp, Homo sapien
gcccgggggtgcgtctcagggccat

SEQ ID NO: 2546594 - DNA, 25 bp, Homo sapien
cgggggtgcgtctcagggccatcgc

SEQ ID NO: 2546595 - DNA, 25 bp, Homo sapien
tgcagcccgggggtgcgtctcaggg

SEQ ID NO: 2546596 - DNA, 25 bp, Homo sapien
gcagcccgggggtgcgtctcagggc

SEQ ID NO: 2546597 - DNA, 25 bp, Homo sapien
tattacaacttgaaaccaaatgaag

SEQ ID NO: 2546598 - DNA, 25 bp, Homo sapien
gcttaattcttcgaagccaaactca

SEQ ID NO: 2546599 - DNA, 25 bp, Homo sapien
tgaagagaaaaacgcagcttaattc

SEQ ID NO: 2546600 - DNA, 25 bp, Homo sapien
cttggaataccttttaggcaggctt

SEQ ID NO: 2546601 - DNA, 25 bp, Homo sapien
tctttagcgtgttctacatagtctg

SEQ ID NO: 2546602 - DNA, 25 bp, Homo sapien
tgtttcttctttagcgtgttctaca

SEQ ID NO: 2546603 - DNA, 25 bp, Homo sapien
gcgtgttctacatagtctgtggcat

SEQ ID NO: 2546604 - DNA, 25 bp, Homo sapien
taacatttctttctatgttgttgat

SEQ ID NO: 2546605 - DNA, 25 bp, Homo sapien
cacaaacatagccatgtccatgaac

SEQ ID NO: 2546606 - DNA, 25 bp, Homo sapien
tgaacatctcatgcaactctcggat

SEQ ID NO: 2546607 - DNA, 25 bp, Homo sapien
gacgtgactcgatttcattgagagc

SEQ ID NO: 2546608 - DNA, 25 bp, Homo sapien
tcatgatgtccttgtgacgtgactc

SEQ ID NO: 2546609 - DNA, 25 bp, Homo sapien
ctagctcgtcgtctgtggtggttct

SEQ ID NO: 2546610 - DNA, 25 bp, Homo sapien
aagatggatggcttcccgctctcca

SEQ ID NO: 2546611 - DNA, 25 bp, Homo sapien
cagcatctcttctagctcgtcgtct

SEQ ID NO: 2546612 - DNA, 25 bp, Homo sapien
tcggaagtgaagatggatggcttcc

SEQ ID NO: 2546613 - DNA, 25 bp, Homo sapien
agtcagtcacagaacacatagtgta

SEQ ID NO: 2546614 - DNA, 25 bp, Homo sapien
tgcccaccccatggtgaaaccttgg

SEQ ID NO: 2546615 - DNA, 25 bp, Homo sapien
aaaatctatttgagagcacacatgg

SEQ ID NO: 2546616 - DNA, 25 bp, Homo sapien
cactgaattaattgtatgctccaaa

SEQ ID NO: 2546617 - DNA, 25 bp, Homo sapien
tgctcgactcgtgcatgccaagctg

SEQ ID NO: 2546618 - DNA, 25 bp, Homo sapien
caatgagcggcaaaatctgacctaa

SEQ ID NO: 2546619 - DNA, 25 bp, Homo sapien
aaaccaccgtgatgaccgatgctcg

SEQ ID NO: 2546620 - DNA, 25 bp, Homo sapien
gaccactgtatgaagacagcccgct

SEQ ID NO: 2546621 - DNA, 25 bp, Homo sapien
ctttgctccgctcccgaaacagagt

SEQ ID NO: 2546622 - DNA, 25 bp, Homo sapien
caaacttccgagacagcaccgaatg

SEQ ID NO: 2546623 - DNA, 25 bp, Homo sapien
gcctcattgtactccgccatggctt

SEQ ID NO: 2546624 - DNA, 25 bp, Homo sapien
gaaacagagtctgtgcctcattgta

SEQ ID NO: 2546625 - DNA, 25 bp, Homo sapien
ggcggaccccagagcccgcgtgctt

SEQ ID NO: 2546626 - DNA, 25 bp, Homo sapien
agagcccgcgtgcttcatcgccttg

SEQ ID NO: 2546627 - DNA, 25 bp, Homo sapien
cctgcgtgcttcatcgccttgtgcc

SEQ ID NO: 2546628 - DNA, 25 bp, Homo sapien
aggcggaccccagagcctgcgtgct

SEQ ID NO: 2546629 - DNA, 25 bp, Homo sapien
gaagatccactgaagtccggttccc

SEQ ID NO: 2546630 - DNA, 25 bp, Homo sapien
ctgggttcttcgtatccgaagatcc

SEQ ID NO: 2546631 - DNA, 25 bp, Homo sapien
actgaagtccggttcccactctcat

SEQ ID NO: 2546632 - DNA, 25 bp, Homo sapien
ttcgtatccgaagatccactgaagt

SEQ ID NO: 2546633 - DNA, 25 bp, Homo sapien
aatttgattatctagcccagtggga

SEQ ID NO: 2546634 - DNA, 25 bp, Homo sapien
aacccagtaatttgtagctggacac

SEQ ID NO: 2546635 - DNA, 25 bp, Homo sapien
acctttaagtaatcatactcttgac

SEQ ID NO: 2546636 - DNA, 25 bp, Homo sapien
cccagtgggatatacctatagacaa

SEQ ID NO: 2546637 - DNA, 25 bp, Homo sapien
gcttgtggtcgcctctctctgcttc

SEQ ID NO: 2546638 - DNA, 25 bp, Homo sapien
cgggtgggagctcatggagaactgt

SEQ ID NO: 2546639 - DNA, 25 bp, Homo sapien
ctggggggtcggcttgtggtcgcct

SEQ ID NO: 2546640 - DNA, 25 bp, Homo sapien
gggtcggcttgtggtcgcctctctc

SEQ ID NO: 2546641 - DNA, 25 bp, Homo sapien
ttaacttggctcgaattttattcgc

SEQ ID NO: 2546642 - DNA, 25 bp, Homo sapien
aacttggctcgaattttattcgcag

SEQ ID NO: 2546643 - DNA, 25 bp, Homo sapien
taacttggctcgaattttattcgca

SEQ ID NO: 2546644 - DNA, 25 bp, Homo sapien
cttggctcgaattttattcgcagtt

SEQ ID NO: 2546645 - DNA, 25 bp, Homo sapien
tctccatgagtctgatttcccgcgg

SEQ ID NO: 2546646 - DNA, 25 bp, Homo sapien
agacgctgccccagcgcattcggag

SEQ ID NO: 2546647 - DNA, 25 bp, Homo sapien
aaagcacagaatgcacgggagcagg

SEQ ID NO: 2546648 - DNA, 25 bp, Homo sapien
tttcccgcggaaaagcacagaatgc

SEQ ID NO: 2546649 - DNA, 25 bp, Homo sapien
gagacggcggctccagaaacatttt

SEQ ID NO: 2546650 - DNA, 25 bp, Homo sapien
atgagacggcggctccagaaacatt

SEQ ID NO: 2546651 - DNA, 25 bp, Homo sapien
acggcggctccagaaacattttggg

SEQ ID NO: 2546652 - DNA, 25 bp, Homo sapien
tcatgagacggcggctccagaaaca

SEQ ID NO: 2546653 - DNA, 25 bp, Homo sapien
caatactgtttctaatctcctccac

SEQ ID NO: 2546654 - DNA, 25 bp, Homo sapien
tccttccgggtttggtgcagaaaga

SEQ ID NO: 2546655 - DNA, 25 bp, Homo sapien
tacttcttcaacatattgagttatt

SEQ ID NO: 2546656 - DNA, 25 bp, Homo sapien
gtgcagaaagaatgatgctgtggtt

SEQ ID NO: 2546657 - DNA, 25 bp, Homo sapien
tcgttctgagacactgccagtcttg

SEQ ID NO: 2546658 - DNA, 25 bp, Homo sapien
tgctgccggaaccaccacttcctga

SEQ ID NO: 2546659 - DNA, 25 bp, Homo sapien
aaaactctcttaaggggcgccgcag

SEQ ID NO: 2546660 - DNA, 25 bp, Homo sapien
aaccaaggaggcctcgttctgagac

SEQ ID NO: 2546661 - DNA, 25 bp, Homo sapien
ttctcaaccacaacaactgtgtctc

SEQ ID NO: 2546662 - DNA, 25 bp, Homo sapien
gatctttctcaaccacaacaactgt

SEQ ID NO: 2546663 - DNA, 25 bp, Homo sapien
catgaaatgatctttctcaaccaca

SEQ ID NO: 2546664 - DNA, 25 bp, Homo sapien
ctgatggaagaaatcatccatgaaa

SEQ ID NO: 2546665 - DNA, 25 bp, Homo sapien
gctgcacccatctcaatgctcccca

SEQ ID NO: 2546666 - DNA, 25 bp, Homo sapien
ctccccagcgccacgcttccctgtg

SEQ ID NO: 2546667 - DNA, 25 bp, Homo sapien
tgctttcccatggtgaccgtcccat

SEQ ID NO: 2546668 - DNA, 25 bp, Homo sapien
gctgctttcccatggtgaccgtccc

SEQ ID NO: 2546669 - DNA, 25 bp, Homo sapien
tcaggtctggcagccggtcccgcat

SEQ ID NO: 2546670 - DNA, 25 bp, Homo sapien
cgccgtcaggtctggcagccggtcc

SEQ ID NO: 2546671 - DNA, 25 bp, Homo sapien
gccgtcaggtctggcagccggtccc

SEQ ID NO: 2546672 - DNA, 25 bp, Homo sapien
cgtcaggtctggcagccggtcccgc

SEQ ID NO: 2546673 - DNA, 25 bp, Homo sapien
cgggctctccggtctccgcctcagg

SEQ ID NO: 2546674 - DNA, 25 bp, Homo sapien
cgggcctcgggctctccggtctccg

SEQ ID NO: 2546675 - DNA, 25 bp, Homo sapien
gccccgccgctcaagcctgtcccga

SEQ ID NO: 2546676 - DNA, 25 bp, Homo sapien
gccgctcaagcctgtcccgagctgc

SEQ ID NO: 2546677 - DNA, 25 bp, Homo sapien
ggtatacgtgctgccaaagtgacca

SEQ ID NO: 2546678 - DNA, 25 bp, Homo sapien
tggtatacgtgctgccaaagtgacc

SEQ ID NO: 2546679 - DNA, 25 bp, Homo sapien
ttggtatacgtgctgccaaagtgac

SEQ ID NO: 2546680 - DNA, 25 bp, Homo sapien
ctttccagcctcagtcggacgggcg

SEQ ID NO: 2546681 - DNA, 25 bp, Homo sapien
gtttgaattgcgcttccgccatctt

SEQ ID NO: 2546682 - DNA, 25 bp, Homo sapien
ttccagcctcagtcggacgggcgcg

SEQ ID NO: 2546683 - DNA, 25 bp, Homo sapien
acgggcgcggagacgcttctggaag

SEQ ID NO: 2546684 - DNA, 25 bp, Homo sapien
cgatggctgcgcagggagagcccca

SEQ ID NO: 2546685 - DNA, 25 bp, Homo sapien
cagggagagccccaggtccagttca

SEQ ID NO: 2546686 - DNA, 25 bp, Homo sapien
gaacgccgcgatggctgcgcaggga

SEQ ID NO: 2546687 - DNA, 25 bp, Homo sapien
gggagagccccaggtccagttcaaa

SEQ ID NO: 2546688 - DNA, 25 bp, Homo sapien
ctggtgaatttgagaagaagtatgt

SEQ ID NO: 2546689 - DNA, 25 bp, Homo sapien
tgatggtggtactggaaaaacgacc

SEQ ID NO: 2546690 - DNA, 25 bp, Homo sapien
tcgtgaaacgtcatttgactggtga

SEQ ID NO: 2546691 - DNA, 25 bp, Homo sapien
aacgaccttcgtgaaacgtcatttg

SEQ ID NO: 2546692 - DNA, 25 bp, Homo sapien
tagtgttccacaccaacagaggacc

SEQ ID NO: 2546693 - DNA, 25 bp, Homo sapien
ccaccttgggtgttgaggttcatcc

SEQ ID NO: 2546694 - DNA, 25 bp, Homo sapien
aaattcggtggactgagagatggct

SEQ ID NO: 2546695 - DNA, 25 bp, Homo sapien
ttcaatgtatgggacacagccggcc

SEQ ID NO: 2546696 - DNA, 25 bp, Homo sapien
tacgagtgtgtgaaaacatccccat

SEQ ID NO: 2546697 - DNA, 25 bp, Homo sapien
caacaaagtggatattaaggacagg

SEQ ID NO: 2546698 - DNA, 25 bp, Homo sapien
cttacaagaatgtgcctaactggca

SEQ ID NO: 2546699 - DNA, 25 bp, Homo sapien
catccccattgtgttgtgtggcaac

SEQ ID NO: 2546700 - DNA, 25 bp, Homo sapien
ttgtcatggacccagctttggcagc

SEQ ID NO: 2546701 - DNA, 25 bp, Homo sapien
gaatttgttgccatgcctgctctcg

SEQ ID NO: 2546702 - DNA, 25 bp, Homo sapien
cttgctaggaagctcattggagacc

SEQ ID NO: 2546703 - DNA, 25 bp, Homo sapien
ctttggcagcacagtatgagcacga

SEQ ID NO: 2546704 - DNA, 25 bp, Homo sapien
tatctaagcaagtgaactcatccct

SEQ ID NO: 2546705 - DNA, 25 bp, Homo sapien
tagtgcagttaagctaaagcagtgt

SEQ ID NO: 2546706 - DNA, 25 bp, Homo sapien
gacaggtcagcagtattctatttgg

SEQ ID NO: 2546707 - DNA, 25 bp, Homo sapien
tacatttgagccatgtcacacaaac

SEQ ID NO: 2546708 - DNA, 25 bp, Homo sapien
tagggtcacctagggaagcacttgc

SEQ ID NO: 2546709 - DNA, 25 bp, Homo sapien
caggatggaacatcagtggatggca

SEQ ID NO: 2546710 - DNA, 25 bp, Homo sapien
tccatgtttacccacagttttcagg

SEQ ID NO: 2546711 - DNA, 25 bp, Homo sapien
taatgtagaacctcaaacaggatgg

SEQ ID NO: 2546712 - DNA, 25 bp, Homo sapien
ttaggtctattaggataattaggag

SEQ ID NO: 2546713 - DNA, 25 bp, Homo sapien
ccatcaacactattcttgtagcagt

SEQ ID NO: 2546714 - DNA, 25 bp, Homo sapien
gaattaggtctattaggataattag

SEQ ID NO: 2546715 - DNA, 25 bp, Homo sapien
agtttgatcccatcaacactattct

SEQ ID NO: 2546716 - DNA, 25 bp, Homo sapien
ttttctcatacgattactatagtcc

SEQ ID NO: 2546717 - DNA, 25 bp, Homo sapien
catacgattactatagtccagttta

SEQ ID NO: 2546718 - DNA, 25 bp, Homo sapien
ttctcatacgattactatagtccag

SEQ ID NO: 2546719 - DNA, 25 bp, Homo sapien
gattactatagtccagtttaccaaa

SEQ ID NO: 2546720 - DNA, 25 bp, Homo sapien
tacctgtctaacgtggtgtgggaga

SEQ ID NO: 2546721 - DNA, 25 bp, Homo sapien
tacttactgtattaactggcaacag

SEQ ID NO: 2546722 - DNA, 25 bp, Homo sapien
cccataattgggatgaaacctttca

SEQ ID NO: 2546723 - DNA, 25 bp, Homo sapien
tatgttacgctgtattcagaaccag

SEQ ID NO: 2546724 - DNA, 25 bp, Homo sapien
tgagttggatgtccgactacagaca

SEQ ID NO: 2546725 - DNA, 25 bp, Homo sapien
gatagcgactttcccttcctagact

SEQ ID NO: 2546726 - DNA, 25 bp, Homo sapien
ttgccttcagccctagtcagcatgg

SEQ ID NO: 2546727 - DNA, 25 bp, Homo sapien
tcctagactaattgccacgagggcg

SEQ ID NO: 2546728 - DNA, 25 bp, Homo sapien
gagtccttctgtcaagtcagctgtg

SEQ ID NO: 2546729 - DNA, 25 bp, Homo sapien
cctcagtcttcggtaatgtggacag

SEQ ID NO: 2546730 - DNA, 25 bp, Homo sapien
gagatacaccgtgcgatgctgcagt

SEQ ID NO: 2546731 - DNA, 25 bp, Homo sapien
gaaaccattccgtatacctcagtct

SEQ ID NO: 2546732 - DNA, 25 bp, Homo sapien
ctgaggctttgggagcatcgcaggg

SEQ ID NO: 2546733 - DNA, 25 bp, Homo sapien
taggtactcccgagagtgcctcctc

SEQ ID NO: 2546734 - DNA, 25 bp, Homo sapien
ctcacctctaggtactcccgagagt

SEQ ID NO: 2546735 - DNA, 25 bp, Homo sapien
tcacctctaggtactcccgagagtg

SEQ ID NO: 2546736 - DNA, 25 bp, Homo sapien
cctctaggtactcccgagagtgcct

SEQ ID NO: 2546737 - DNA, 25 bp, Homo sapien
ctgcgtggtctccatcactgatctc

SEQ ID NO: 2546738 - DNA, 25 bp, Homo sapien
ctctaggtactcctgagaactcctc

SEQ ID NO: 2546739 - DNA, 25 bp, Homo sapien
ggatctgcgtggtctccatcactga

SEQ ID NO: 2546740 - DNA, 25 bp, Homo sapien
tgtggatctgcgtggtctccatcac

SEQ ID NO: 2546741 - DNA, 25 bp, Homo sapien
tcactgtggatctgcgtagccggca

SEQ ID NO: 2546742 - DNA, 25 bp, Homo sapien
cactgtggatctgcgtagcccgcat

SEQ ID NO: 2546743 - DNA, 25 bp, Homo sapien
tggatctgcgtagccggcatcactg

SEQ ID NO: 2546744 - DNA, 25 bp, Homo sapien
ctgcgtggtctccatcactgatctt

SEQ ID NO: 2546745 - DNA, 25 bp, Homo sapien
tgtattgctatctggtgtgaccgtg

SEQ ID NO: 2546746 - DNA, 25 bp, Homo sapien
aaaaatgtattgctatctggtgtga

SEQ ID NO: 2546747 - DNA, 25 bp, Homo sapien
aatgtattgctatctggtgtgaccg

SEQ ID NO: 2546748 - DNA, 25 bp, Homo sapien
gtattgctatctggtgtgaccgtga

SEQ ID NO: 2546749 - DNA, 25 bp, Homo sapien
ctgtgacaccattaggcccagcgct

SEQ ID NO: 2546750 - DNA, 25 bp, Homo sapien
gcctctgtgacaccattaggcccag

SEQ ID NO: 2546751 - DNA, 25 bp, Homo sapien
tgtgacaccattaggcccagcgctg

SEQ ID NO: 2546752 - DNA, 25 bp, Homo sapien
ctctgtgacaccattaggcccagcg

SEQ ID NO: 2546753 - DNA, 25 bp, Homo sapien
cacagcccacgaagtgctgacaggc

SEQ ID NO: 2546754 - DNA, 25 bp, Homo sapien
acactggtgggaagtctctccccat

SEQ ID NO: 2546755 - DNA, 25 bp, Homo sapien
gatccacagcccacgaagtgctgac

SEQ ID NO: 2546756 - DNA, 25 bp, Homo sapien
tccacagcccacgaagtgctgacag

SEQ ID NO: 2546757 - DNA, 25 bp, Homo sapien
gcacgggctgatccacatgggctct

SEQ ID NO: 2546758 - DNA, 25 bp, Homo sapien
cacgggctgatccacatgggctctg

SEQ ID NO: 2546759 - DNA, 25 bp, Homo sapien
acgggctgaaccacccgggatctgg

SEQ ID NO: 2546760 - DNA, 25 bp, Homo sapien
acgggctgatccacatgggctctgg

SEQ ID NO: 2546761 - DNA, 25 bp, Homo sapien
cagtacggatttgtaacttattacg

SEQ ID NO: 2546762 - DNA, 25 bp, Homo sapien
tcatgattaatgatcgcagtacgga

SEQ ID NO: 2546763 - DNA, 25 bp, Homo sapien
gatcgcagtacggatttgtaactta

SEQ ID NO: 2546764 - DNA, 25 bp, Homo sapien
caaaaaggggacgtggatgaggctc

SEQ ID NO: 2546765 - DNA, 25 bp, Homo sapien
catgttgaaatcatatttccctatg

SEQ ID NO: 2546766 - DNA, 25 bp, Homo sapien
ttgaaatcatatttccccatgttga

SEQ ID NO: 2546767 - DNA, 25 bp, Homo sapien
catattcccccatgttgaagtcata

SEQ ID NO: 2546768 - DNA, 25 bp, Homo sapien
tgaaatcatatttccccatgttgaa

SEQ ID NO: 2546769 - DNA, 25 bp, Homo sapien
gctttgacctccgagagagccatgg

SEQ ID NO: 2546770 - DNA, 25 bp, Homo sapien
ttttgagacgaggaagaaacaccca

SEQ ID NO: 2546771 - DNA, 25 bp, Homo sapien
cctgactgagacaaacggaggctct

SEQ ID NO: 2546772 - DNA, 25 bp, Homo sapien
caggaatttcacttggctccgagct

SEQ ID NO: 2546773 - DNA, 25 bp, Homo sapien
ggacatggccacacaagtaggtaga

SEQ ID NO: 2546774 - DNA, 25 bp, Homo sapien
ttcctgatacaaaggcacagtgctg

SEQ ID NO: 2546775 - DNA, 25 bp, Homo sapien
tgggcaggactcacattggctcaca

SEQ ID NO: 2546776 - DNA, 25 bp, Homo sapien
ttaccactggaatggacagcagctc

SEQ ID NO: 2546777 - DNA, 25 bp, Homo sapien
ctgtccactagcagctggacgggaa

SEQ ID NO: 2546778 - DNA, 25 bp, Homo sapien
cactagcagctggacgggaaaatgg

SEQ ID NO: 2546779 - DNA, 25 bp, Homo sapien
ctagcagctggacgggaaaatggca

SEQ ID NO: 2546780 - DNA, 25 bp, Homo sapien
tccactagcagctggacgggaaaat

SEQ ID NO: 2546781 - DNA, 25 bp, Homo sapien
gaatcgatgaccctggtttgctcca

SEQ ID NO: 2546782 - DNA, 25 bp, Homo sapien
gagaatcgatgaccctggtttgctc

SEQ ID NO: 2546783 - DNA, 25 bp, Homo sapien
ctgagaatcgatgaccctggtttgc

SEQ ID NO: 2546784 - DNA, 25 bp, Homo sapien
tgagaatcgatgaccctggtttgct

SEQ ID NO: 2546785 - DNA, 25 bp, Homo sapien
tcattgctggtgtcgttccctgtgc

SEQ ID NO: 2546786 - DNA, 25 bp, Homo sapien
ggactcaaggttccctgcaggagaa

SEQ ID NO: 2546787 - DNA, 25 bp, Homo sapien
gaatttacactctgggcctgtcggc

SEQ ID NO: 2546788 - DNA, 25 bp, Homo sapien
tattcaaagaccttctgggactcaa

SEQ ID NO: 2546789 - DNA, 25 bp, Homo sapien
gcaggaccctgagctccgtccaggg

SEQ ID NO: 2546790 - DNA, 25 bp, Homo sapien
gcaagaccctgagctccggccaggg

SEQ ID NO: 2546791 - DNA, 25 bp, Homo sapien
agtgtaatgagggtgttccagggag

SEQ ID NO: 2546792 - DNA, 25 bp, Homo sapien
caaattctggaagggactgagtgta

SEQ ID NO: 2546793 - DNA, 25 bp, Homo sapien
ctcacacgcagtggggcactggtga

SEQ ID NO: 2546794 - DNA, 25 bp, Homo sapien
gcctaatagcaccccagggctgagg

SEQ ID NO: 2546795 - DNA, 25 bp, Homo sapien
cctaatagcaccccagggctgaggt

SEQ ID NO: 2546796 - DNA, 25 bp, Homo sapien
ttccccaggctcacacgcagtgggg

SEQ ID NO: 2546797 - DNA, 25 bp, Homo sapien
ctggacatttatccgaggcccctgg

SEQ ID NO: 2546798 - DNA, 25 bp, Homo sapien
tgctctgaaatgttggccatgccca

SEQ ID NO: 2546799 - DNA, 25 bp, Homo sapien
ccaggtctgaacgaggcagttgccc

SEQ ID NO: 2546800 - DNA, 25 bp, Homo sapien
cagttgcccgagctgtggatgccct

SEQ ID NO: 2546801 - DNA, 25 bp, Homo sapien
gattctgttgctcccgttgtcgcgg

SEQ ID NO: 2546802 - DNA, 25 bp, Homo sapien
cctgattaggccgatgctgtgcgtc

SEQ ID NO: 2546803 - DNA, 25 bp, Homo sapien
gaatgctcattgttgccggtaacgc

SEQ ID NO: 2546804 - DNA, 25 bp, Homo sapien
tactggtcacgttggattagggcct

SEQ ID NO: 2546805 - DNA, 25 bp, Homo sapien
tgcctgatggctagctcctcagtgt

SEQ ID NO: 2546806 - DNA, 25 bp, Homo sapien
ggttctctgtgacgtcagggtcaga

SEQ ID NO: 2546807 - DNA, 25 bp, Homo sapien
gtgctggtgcctgatggctagctcc

SEQ ID NO: 2546808 - DNA, 25 bp, Homo sapien
gctggccgggtcactggggttctct

SEQ ID NO: 2546809 - DNA, 25 bp, Homo sapien
cattcagtacagtagtgggcacagt

SEQ ID NO: 2546810 - DNA, 25 bp, Homo sapien
agacccaaccgagcatcctgtgtgt

SEQ ID NO: 2546811 - DNA, 25 bp, Homo sapien
catttcagtcatgttccggtcagtg

SEQ ID NO: 2546812 - DNA, 25 bp, Homo sapien
gatagattgcgtataccacagtggt

SEQ ID NO: 2546813 - DNA, 25 bp, Homo sapien
gtggcctgggggaaccgtctctgca

SEQ ID NO: 2546814 - DNA, 25 bp, Homo sapien
catggtggcctgggggaaccgtctc

SEQ ID NO: 2546815 - DNA, 25 bp, Homo sapien
gaaccgtctctgcaggcacttctca

SEQ ID NO: 2546816 - DNA, 25 bp, Homo sapien
tgctggctgtggcccgagggcaggg

SEQ ID NO: 2546817 - DNA, 25 bp, Homo sapien
gggcttgatgccgtggatggaagtt

SEQ ID NO: 2546818 - DNA, 25 bp, Homo sapien
ctcccggctccagtgaattacaggc

SEQ ID NO: 2546819 - DNA, 25 bp, Homo sapien
tccagtgaattacaggccctgtggg

SEQ ID NO: 2546820 - DNA, 25 bp, Homo sapien
tggatggaagttttgtagaaggcca

SEQ ID NO: 2546821 - DNA, 25 bp, Homo sapien
tgccggatgttctagtgagcgcgtt

SEQ ID NO: 2546822 - DNA, 25 bp, Homo sapien
ttccagacgccagcagaacagagct

SEQ ID NO: 2546823 - DNA, 25 bp, Homo sapien
tataacatgcctgcagaaaagcacg

SEQ ID NO: 2546824 - DNA, 25 bp, Homo sapien
aatcacccctcaggtcaagaagcag

SEQ ID NO: 2546825 - DNA, 25 bp, Homo sapien
gttgtgggactctcgtacggtgaca

SEQ ID NO: 2546826 - DNA, 25 bp, Homo sapien
tacatgtggctaatccaggatcacc

SEQ ID NO: 2546827 - DNA, 25 bp, Homo sapien
gagagctctcgatgtagttccaacg

SEQ ID NO: 2546828 - DNA, 25 bp, Homo sapien
cttgaacctgcagtgcgaatccgtt

SEQ ID NO: 2546829 - DNA, 25 bp, Homo sapien
gacccgtcgtaggtgacattcccag

SEQ ID NO: 2546830 - DNA, 25 bp, Homo sapien
gttgtggacccgtcgtaggtgacat

SEQ ID NO: 2546831 - DNA, 25 bp, Homo sapien
tgtggacccctcgttcggtgacatt

SEQ ID NO: 2546832 - DNA, 25 bp, Homo sapien
gttgtggacccctcgttcggtgaca

SEQ ID NO: 2546833 - DNA, 25 bp, Homo sapien
cctcttaacggtgacattcccaggc

SEQ ID NO: 2546834 - DNA, 25 bp, Homo sapien
ccctcttaacggtgacattcccagg

SEQ ID NO: 2546835 - DNA, 25 bp, Homo sapien
ctcttaacggtgacattcccaggct

SEQ ID NO: 2546836 - DNA, 25 bp, Homo sapien
tgtggacccctcttatggtaacatt

SEQ ID NO: 2546837 - DNA, 25 bp, Homo sapien
gttgtggacccttcatacggtgaca

SEQ ID NO: 2546838 - DNA, 25 bp, Homo sapien
cagactgtgccgctgaaattgttgg

SEQ ID NO: 2546839 - DNA, 25 bp, Homo sapien
gaatgcagctagatctcagaatgca

SEQ ID NO: 2546840 - DNA, 25 bp, Homo sapien
cagtggctctatctccgagaatgca

SEQ ID NO: 2546841 - DNA, 25 bp, Homo sapien
tctgctccagttgatgtggcagaca

SEQ ID NO: 2546842 - DNA, 25 bp, Homo sapien
tgctccagttgatgtggcagacaca

SEQ ID NO: 2546843 - DNA, 25 bp, Homo sapien
ctccagttgatgtggcagacacagg

SEQ ID NO: 2546844 - DNA, 25 bp, Homo sapien
gctccagttgatgtggcagacacag

SEQ ID NO: 2546845 - DNA, 25 bp, Homo sapien
tcccgtggcctttggcatctgtagc

SEQ ID NO: 2546846 - DNA, 25 bp, Homo sapien
catctgtagcgtggatgccatggag

SEQ ID NO: 2546847 - DNA, 25 bp, Homo sapien
ggcgcgtgacacctcaatgtggcac

SEQ ID NO: 2546848 - DNA, 25 bp, Homo sapien
gaatggcgaactcgctttcccgtgg

SEQ ID NO: 2546849 - DNA, 25 bp, Homo sapien
agaggtgtcattgcctcgtccccgc

SEQ ID NO: 2546850 - DNA, 25 bp, Homo sapien
cctcgtccccgcacatgccaggtgc

SEQ ID NO: 2546851 - DNA, 25 bp, Homo sapien
ttctgccaacactcggaaaccctga

SEQ ID NO: 2546852 - DNA, 25 bp, Homo sapien
aaacatccgggtcacttctgccaac

SEQ ID NO: 2546853 - DNA, 25 bp, Homo sapien
tgtgtggccttttccccgagtgttc

SEQ ID NO: 2546854 - DNA, 25 bp, Homo sapien
acatgcgatgcctccgctgacacgt

SEQ ID NO: 2546855 - DNA, 25 bp, Homo sapien
tttggtaccctggaagtacatgcga

SEQ ID NO: 2546856 - DNA, 25 bp, Homo sapien
ccgagtgttcttgctgcaggcccgg

SEQ ID NO: 2546857 - DNA, 25 bp, Homo sapien
agctccacgtggttgctcactgtgc

SEQ ID NO: 2546858 - DNA, 25 bp, Homo sapien
gcgccatgcgttgtgcttgtcctga

SEQ ID NO: 2546859 - DNA, 25 bp, Homo sapien
gctcctggtcgtcgtcctgtctcag

SEQ ID NO: 2546860 - DNA, 25 bp, Homo sapien
tgcacggcgtgtgccacacagtagg

SEQ ID NO: 2546861 - DNA, 25 bp, Homo sapien
tagagtgcacaattgcctctcccag

SEQ ID NO: 2546862 - DNA, 25 bp, Homo sapien
gcatcagaattgctagcttcttcct

SEQ ID NO: 2546863 - DNA, 25 bp, Homo sapien
acttctcgcggtgcaggtctgacct

SEQ ID NO: 2546864 - DNA, 25 bp, Homo sapien
gaaacctgaacttctcgcggtgcag

SEQ ID NO: 2546865 - DNA, 25 bp, Homo sapien
agcatcagaattgctagcttcttcc

SEQ ID NO: 2546866 - DNA, 25 bp, Homo sapien
ggcccccccggagtttgccatcatc

SEQ ID NO: 2546867 - DNA, 25 bp, Homo sapien
gcccccccggagtttgccatcatcc

SEQ ID NO: 2546868 - DNA, 25 bp, Homo sapien
cccccggagtttgccatcatcccca

SEQ ID NO: 2546869 - DNA, 25 bp, Homo sapien
aaatcgggggtcttggtgctggcca

SEQ ID NO: 2546870 - DNA, 25 bp, Homo sapien
actgagcacagaaaatcgggggtct

SEQ ID NO: 2546871 - DNA, 25 bp, Homo sapien
tgatcttgtggagccggagggtgtg

SEQ ID NO: 2546872 - DNA, 25 bp, Homo sapien
cgcagagaatgtggggaggcaccca

SEQ ID NO: 2546873 - DNA, 25 bp, Homo sapien
cccagctcagatgtttggtttctaa

SEQ ID NO: 2546874 - DNA, 25 bp, Homo sapien
tctcccagctcagatgtttggtttc

SEQ ID NO: 2546875 - DNA, 25 bp, Homo sapien
tcccagctcagatgtttggtttcta

SEQ ID NO: 2546876 - DNA, 25 bp, Homo sapien
ccagctcagatgtttggtttctaaa

SEQ ID NO: 2546877 - DNA, 25 bp, Homo sapien
tgcggctctgtctgtcgcagcccag

SEQ ID NO: 2546878 - DNA, 25 bp, Homo sapien
ctcccagctccgtgttcggtcccgg

SEQ ID NO: 2546879 - DNA, 25 bp, Homo sapien
ggtcacaggcgctgcggctctgtct

SEQ ID NO: 2546880 - DNA, 25 bp, Homo sapien
ccagctccgtgttcggtcccggtgg

SEQ ID NO: 2546881 - DNA, 25 bp, Homo sapien
gtcttctcccgaaacctggtgccat

SEQ ID NO: 2546882 - DNA, 25 bp, Homo sapien
actgcttcatgtggacgccgtaggc

SEQ ID NO: 2546883 - DNA, 25 bp, Homo sapien
cgcattgggcatgccgaaatccggg

SEQ ID NO: 2546884 - DNA, 25 bp, Homo sapien
tcttgttcctcgtgcgtggtgctcg

SEQ ID NO: 2546885 - DNA, 25 bp, Homo sapien
cccttttgcaccccttccgcagcca

SEQ ID NO: 2546886 - DNA, 25 bp, Homo sapien
gagcctggacaatggggggacagct

SEQ ID NO: 2546887 - DNA, 25 bp, Homo sapien
ttttgcaccccttccgcagccatcc

SEQ ID NO: 2546888 - DNA, 25 bp, Homo sapien
tggagcctggacaatggggggacag

SEQ ID NO: 2546889 - DNA, 25 bp, Homo sapien
ggctggggctgggactctcctccat

SEQ ID NO: 2546890 - DNA, 25 bp, Homo sapien
gccgggctggggctgggactctcct

SEQ ID NO: 2546891 - DNA, 25 bp, Homo sapien
gtggggacacttcctctgccgggct

SEQ ID NO: 2546892 - DNA, 25 bp, Homo sapien
cgggctggggctgggactctcctcc

SEQ ID NO: 2546893 - DNA, 25 bp, Homo sapien
ttcctccactcgatgtggagaaacg

SEQ ID NO: 2546894 - DNA, 25 bp, Homo sapien
cactcgatgtggagaaacgtctttt

SEQ ID NO: 2546895 - DNA, 25 bp, Homo sapien
cgatgtggagaaacgtcttttcgat

SEQ ID NO: 2546896 - DNA, 25 bp, Homo sapien
ggagaaacgtcttttcgatctccat

SEQ ID NO: 2546897 - DNA, 25 bp, Homo sapien
tggaccatggaacctgacacagggc

SEQ ID NO: 2546898 - DNA, 25 bp, Homo sapien
tagcgtggaccacacaagagatcct

SEQ ID NO: 2546899 - DNA, 25 bp, Homo sapien
aaagcacacgcttctggatgcaagc

SEQ ID NO: 2546900 - DNA, 25 bp, Homo sapien
gactcacgtgtgttgacattcgaca

SEQ ID NO: 2546901 - DNA, 25 bp, Homo sapien
ggtttgatttctgaacaagagtgaa

SEQ ID NO: 2546902 - DNA, 25 bp, Homo sapien
tctgaacaagagtgaaccttgtctg

SEQ ID NO: 2546903 - DNA, 25 bp, Homo sapien
atttctgaacaagagtgaaccttgt

SEQ ID NO: 2546904 - DNA, 25 bp, Homo sapien
tttgatttctgaacaagagtgaacc

SEQ ID NO: 2546905 - DNA, 25 bp, Homo sapien
ttcctacccttgtgggcgcagagcg

SEQ ID NO: 2546906 - DNA, 25 bp, Homo sapien
gaagtaacggctctgcttccctccg

SEQ ID NO: 2546907 - DNA, 25 bp, Homo sapien
tacttttggatgaaggtacgctggc

SEQ ID NO: 2546908 - DNA, 25 bp, Homo sapien
tccgcagttgctggctgtcgttggc

SEQ ID NO: 2546909 - DNA, 25 bp, Homo sapien
gcactggcatgaggctcgtccctca

SEQ ID NO: 2546910 - DNA, 25 bp, Homo sapien
cactggcatgaggctcgtccctcat

SEQ ID NO: 2546911 - DNA, 25 bp, Homo sapien
ctgcactggcatgaggctcgtccct

SEQ ID NO: 2546912 - DNA, 25 bp, Homo sapien
tgcactggcatgaggctcgtccctc

SEQ ID NO: 2546913 - DNA, 25 bp, Homo sapien
cccactccttgttgtcagtggccat

SEQ ID NO: 2546914 - DNA, 25 bp, Homo sapien
tgcaattgaaatccccactcgaagt

SEQ ID NO: 2546915 - DNA, 25 bp, Homo sapien
tcgtcgttacacagtgaggttggct

SEQ ID NO: 2546916 - DNA, 25 bp, Homo sapien
caactaaggtgcatccgactgtcag

SEQ ID NO: 2546917 - DNA, 25 bp, Homo sapien
gaatctcagtaagagcaggcagggt

SEQ ID NO: 2546918 - DNA, 25 bp, Homo sapien
tgagttttctatggagcctgtggcc

SEQ ID NO: 2546919 - DNA, 25 bp, Homo sapien
taagacaccaccgagatacgggctg

SEQ ID NO: 2546920 - DNA, 25 bp, Homo sapien
gagtggaccactcatctgcaggcct

SEQ ID NO: 2546921 - DNA, 25 bp, Homo sapien
ccacctggtggcttcttaatgtaac

SEQ ID NO: 2546922 - DNA, 25 bp, Homo sapien
gttaatagtctccattcatgcttct

SEQ ID NO: 2546923 - DNA, 25 bp, Homo sapien
cattgtgatatcagaggcctgggga

SEQ ID NO: 2546924 - DNA, 25 bp, Homo sapien
ccgcgtctgtgaagtaggttttatc

SEQ ID NO: 2546925 - DNA, 25 bp, Homo sapien
gggaagatccagatgatgagttaat

SEQ ID NO: 2546926 - DNA, 25 bp, Homo sapien
ctgcaggctgcagagtatcatccat

SEQ ID NO: 2546927 - DNA, 25 bp, Homo sapien
cagtgacaagctcctgaaccgtgga

SEQ ID NO: 2546928 - DNA, 25 bp, Homo sapien
tcaggagcagtgacaagctcctgaa

SEQ ID NO: 2546929 - DNA, 25 bp, Homo sapien
cctgaaccgtggaaatgagtctggt

SEQ ID NO: 2546930 - DNA, 25 bp, Homo sapien
caagctcctgaaccgtggaaatgag

SEQ ID NO: 2546931 - DNA, 25 bp, Homo sapien
ccatgtgtggacatcagcgcagcct

SEQ ID NO: 2546932 - DNA, 25 bp, Homo sapien
caccagctctcactcgggtattgct

SEQ ID NO: 2546933 - DNA, 25 bp, Homo sapien
ctcccacgtggttgggattgcccgg

SEQ ID NO: 2546934 - DNA, 25 bp, Homo sapien
cagttcggattgtgggacttcagtc

SEQ ID NO: 2546935 - DNA, 25 bp, Homo sapien
cctggttggacaccgcgtgctcagg

SEQ ID NO: 2546936 - DNA, 25 bp, Homo sapien
tcaggcacgtcatggggccccacgg

SEQ ID NO: 2546937 - DNA, 25 bp, Homo sapien
agctgtatctggcccgggaacggcc

SEQ ID NO: 2546938 - DNA, 25 bp, Homo sapien
gggaacggccacgtggtgtgagctc

SEQ ID NO: 2546939 - DNA, 25 bp, Homo sapien
gatgctccaggtagagcccctgtta

SEQ ID NO: 2546940 - DNA, 25 bp, Homo sapien
ggtcccattggcgagttttcagatg

SEQ ID NO: 2546941 - DNA, 25 bp, Homo sapien
tcccattggcgagttttcagatgaa

SEQ ID NO: 2546942 - DNA, 25 bp, Homo sapien
gagcccctgttactccaggcagagc

SEQ ID NO: 2546943 - DNA, 25 bp, Homo sapien
tcccaatgccctggggtgcgatcag

SEQ ID NO: 2546944 - DNA, 25 bp, Homo sapien
cacttctgctgttgacaggtgggag

SEQ ID NO: 2546945 - DNA, 25 bp, Homo sapien
ggcaactcccttgtgcacagagcag

SEQ ID NO: 2546946 - DNA, 25 bp, Homo sapien
gccaaaatcaggtcaaaggcaactc

SEQ ID NO: 2546947 - DNA, 25 bp, Homo sapien
cagcacggaagccagatgtcaccat

SEQ ID NO: 2546948 - DNA, 25 bp, Homo sapien
agggccatgcgtgcatcccccactc

SEQ ID NO: 2546949 - DNA, 25 bp, Homo sapien
ggccatgcgtgcatcccccactctg

SEQ ID NO: 2546950 - DNA, 25 bp, Homo sapien
gcagggccatgcgtgcatcccccac

SEQ ID NO: 2546951 - DNA, 25 bp, Homo sapien
gtccctagagcagccgtgcagggca

SEQ ID NO: 2546952 - DNA, 25 bp, Homo sapien
tgatagggctgatgcggggaagccg

SEQ ID NO: 2546953 - DNA, 25 bp, Homo sapien
gagcttatgcagggctgatagggct

SEQ ID NO: 2546954 - DNA, 25 bp, Homo sapien
cttatgcagggctgatagggctgat

SEQ ID NO: 2546955 - DNA, 25 bp, Homo sapien
aggtctgcccggtgaccacctttgc

SEQ ID NO: 2546956 - DNA, 25 bp, Homo sapien
tggacaccagctggcaagaagtcga

SEQ ID NO: 2546957 - DNA, 25 bp, Homo sapien
tgaaaggctgaacactaccggccgt

SEQ ID NO: 2546958 - DNA, 25 bp, Homo sapien
tgggaaggtctcacgtccatgagga

SEQ ID NO: 2546959 - DNA, 25 bp, Homo sapien
gagggaacgccaagaaacactggat

SEQ ID NO: 2546960 - DNA, 25 bp, Homo sapien
caggtggatcggagacaggatgggc

SEQ ID NO: 2546961 - DNA, 25 bp, Homo sapien
ctggatgctgaaatccatgggtgcg

SEQ ID NO: 2546962 - DNA, 25 bp, Homo sapien
gaggatccaggatgcggcgtgcagg

SEQ ID NO: 2546963 - DNA, 25 bp, Homo sapien
cacggccctctgcttggcgtaaagt

SEQ ID NO: 2546964 - DNA, 25 bp, Homo sapien
acactggcaggctcgcagtctccag

SEQ ID NO: 2546965 - DNA, 25 bp, Homo sapien
tctgcttggcgtaaagtagggtcca

SEQ ID NO: 2546966 - DNA, 25 bp, Homo sapien
ggccctctgcttggcgtaaagtagg

SEQ ID NO: 2546967 - DNA, 25 bp, Homo sapien
tcagctgcaggagcccctgaaattt

SEQ ID NO: 2546968 - DNA, 25 bp, Homo sapien
tctcagctgcaggagcccctgaaat

SEQ ID NO: 2546969 - DNA, 25 bp, Homo sapien
gctgcaggagcccctgaaatttgag

SEQ ID NO: 2546970 - DNA, 25 bp, Homo sapien
gtctcagctgcaggagcccctgaaa

SEQ ID NO: 2546971 - DNA, 25 bp, Homo sapien
gaaaagaagtggcaaatgaacagca

SEQ ID NO: 2546972 - DNA, 25 bp, Homo sapien
ccccacggagtaagcccagaatagc

SEQ ID NO: 2546973 - DNA, 25 bp, Homo sapien
caagcatggttaacgagtctgtgaa

SEQ ID NO: 2546974 - DNA, 25 bp, Homo sapien
ccctgacccctgtgaatgatcctga

SEQ ID NO: 2546975 - DNA, 25 bp, Homo sapien
cactggcgtcagcagtgatgactca

SEQ ID NO: 2546976 - DNA, 25 bp, Homo sapien
cctgagggcgcccaaatgaggagca

SEQ ID NO: 2546977 - DNA, 25 bp, Homo sapien
aaatgttcctgggttttgcgaagca

SEQ ID NO: 2546978 - DNA, 25 bp, Homo sapien
catggaatccagcaagtgaaagggc

SEQ ID NO: 2546979 - DNA, 25 bp, Homo sapien
cccacccgtgtgctctggaagtcaa

SEQ ID NO: 2546980 - DNA, 25 bp, Homo sapien
tcacccacccgtgtgctctggaagt

SEQ ID NO: 2546981 - DNA, 25 bp, Homo sapien
ttaaatggccacgtaaaagtcacag

SEQ ID NO: 2546982 - DNA, 25 bp, Homo sapien
tcacagccgtcgctgggaaggacag

SEQ ID NO: 2546983 - DNA, 25 bp, Homo sapien
acccagcatgtgagagcacccagca

SEQ ID NO: 2546984 - DNA, 25 bp, Homo sapien
ggtcactcggtgtactgccacccag

SEQ ID NO: 2546985 - DNA, 25 bp, Homo sapien
catgtgagagcacccgtgcaccctg

SEQ ID NO: 2546986 - DNA, 25 bp, Homo sapien
cacccagcatgtgagagcacccgtg

SEQ ID NO: 2546987 - DNA, 25 bp, Homo sapien
ccagcatgtgagagcacccgtgcac

SEQ ID NO: 2546988 - DNA, 25 bp, Homo sapien
agcatgtgagagcacccgtgcaccc

SEQ ID NO: 2546989 - DNA, 25 bp, Homo sapien
aggggccacgctgtgtctagcaggg

SEQ ID NO: 2546990 - DNA, 25 bp, Homo sapien
acctgctggggtgcgctgcacttca

SEQ ID NO: 2546991 - DNA, 25 bp, Homo sapien
ccaatgagggtagcaaaggtgctcc

SEQ ID NO: 2546992 - DNA, 25 bp, Homo sapien
gagggtagcaaaggtgctcccacca

SEQ ID NO: 2546993 - DNA, 25 bp, Homo sapien
ggcctcagcatcagggacacagact

SEQ ID NO: 2546994 - DNA, 25 bp, Homo sapien
catcagggacacagactctgtgctt

SEQ ID NO: 2546995 - DNA, 25 bp, Homo sapien
agggacacagactctgtgcttaaat

SEQ ID NO: 2546996 - DNA, 25 bp, Homo sapien
tgtggcctcagcatcagggacacag

SEQ ID NO: 2546997 - DNA, 25 bp, Homo sapien
gtgctgaatcccagtcgggccctct

SEQ ID NO: 2546998 - DNA, 25 bp, Homo sapien
ttccgccatgaattttcagggtgac

SEQ ID NO: 2546999 - DNA, 25 bp, Homo sapien
gacttgcatggaatgtccattggta

SEQ ID NO: 2547000 - DNA, 25 bp, Homo sapien
atgtccattggtagaaatggagatt

SEQ ID NO: 2547001 - DNA, 25 bp, Homo sapien
ttccgtggcacccgttcccttctga

SEQ ID NO: 2547002 - DNA, 25 bp, Homo sapien
caacggtgtcagcagtgtttccgtg

SEQ ID NO: 2547003 - DNA, 25 bp, Homo sapien
cgtggcacccgttcccttctgaggc

SEQ ID NO: 2547004 - DNA, 25 bp, Homo sapien
aacggtgtcagcagtgtttccgtgg

SEQ ID NO: 2547005 - DNA, 25 bp, Homo sapien
caactgacacagctccgtggggtcc

SEQ ID NO: 2547006 - DNA, 25 bp, Homo sapien
tgctggagcctcgaagtctggagtc

SEQ ID NO: 2547007 - DNA, 25 bp, Homo sapien
agcctcgaagtctggagtcctcgtc

SEQ ID NO: 2547008 - DNA, 25 bp, Homo sapien
gtcccccgggttgctggagcctcga

SEQ ID NO: 2547009 - DNA, 25 bp, Homo sapien
ataggctttctcttcaactcttcca

SEQ ID NO: 2547010 - DNA, 25 bp, Homo sapien
gctttctcttcaactcttccaagac

SEQ ID NO: 2547011 - DNA, 25 bp, Homo sapien
atgcaataggctttctcttcaactc

SEQ ID NO: 2547012 - DNA, 25 bp, Homo sapien
aggctttctcttcaactcttccaag

SEQ ID NO: 2547013 - DNA, 25 bp, Homo sapien
gggcattgattattctcgtctgcag

SEQ ID NO: 2547014 - DNA, 25 bp, Homo sapien
gattattctcgtctgcaggctgaag

SEQ ID NO: 2547015 - DNA, 25 bp, Homo sapien
ctgggcattgattattctcgtctgc

SEQ ID NO: 2547016 - DNA, 25 bp, Homo sapien
cattgattattctcgtctgcaggct

SEQ ID NO: 2547017 - DNA, 25 bp, Homo sapien
ggagcggagatgcagaaatcgagga

SEQ ID NO: 2547018 - DNA, 25 bp, Homo sapien
gacccatcgatgtaggagagaagct

SEQ ID NO: 2547019 - DNA, 25 bp, Homo sapien
gagcggagatgcagaaatcgaggag

SEQ ID NO: 2547020 - DNA, 25 bp, Homo sapien
aggaggcggccgctgacccatcgat

SEQ ID NO: 2547021 - DNA, 25 bp, Homo sapien
gtcccgctgaagactggcacagact

SEQ ID NO: 2547022 - DNA, 25 bp, Homo sapien
ccgctgaagactggcacagacttgg

SEQ ID NO: 2547023 - DNA, 25 bp, Homo sapien
cctaagggtggtcccgctgaagact

SEQ ID NO: 2547024 - DNA, 25 bp, Homo sapien
ggtggtcccgctgaagactggcaca

SEQ ID NO: 2547025 - DNA, 25 bp, Homo sapien
gagcccagcactagagccaggttcg

SEQ ID NO: 2547026 - DNA, 25 bp, Homo sapien
cccggagaagacgacaaggacgtgt

SEQ ID NO: 2547027 - DNA, 25 bp, Homo sapien
gtgagcacgtgctcacggcagcgcc

SEQ ID NO: 2547028 - DNA, 25 bp, Homo sapien
ataagtcagggctctccccggagaa

SEQ ID NO: 2547029 - DNA, 25 bp, Homo sapien
ctgtgacttcaggtcggatgagcgt

SEQ ID NO: 2547030 - DNA, 25 bp, Homo sapien
cctgtgacttcaggtcggatgagcg

SEQ ID NO: 2547031 - DNA, 25 bp, Homo sapien
cagcacctgtgacttcaggtcggat

SEQ ID NO: 2547032 - DNA, 25 bp, Homo sapien
cacctgtgacttcaggtcggatgag

SEQ ID NO: 2547033 - DNA, 25 bp, Homo sapien
gggccccacggagctcacagtcgcc

SEQ ID NO: 2547034 - DNA, 25 bp, Homo sapien
tgggccccacggagctcacagtcgc

SEQ ID NO: 2547035 - DNA, 25 bp, Homo sapien
ctgggccccacggagctcacagtcg

SEQ ID NO: 2547036 - DNA, 25 bp, Homo sapien
catgggaaggcttgtttgtcgttcc

SEQ ID NO: 2547037 - DNA, 25 bp, Homo sapien
cctgcttcatgggaaggcttgtttg

SEQ ID NO: 2547038 - DNA, 25 bp, Homo sapien
tgcttcatgggaaggcttgtttgtc

SEQ ID NO: 2547039 - DNA, 25 bp, Homo sapien
cttcatgggaaggcttgtttgtcgt

SEQ ID NO: 2547040 - DNA, 25 bp, Homo sapien
atgcttcacgagagcatcagcagca

SEQ ID NO: 2547041 - DNA, 25 bp, Homo sapien
catgcttcacgagagcatcagcagc

SEQ ID NO: 2547042 - DNA, 25 bp, Homo sapien
ccttccatgcttcacgagagcatca

SEQ ID NO: 2547043 - DNA, 25 bp, Homo sapien
tccatgcttcacgagagcatcagca

SEQ ID NO: 2547044 - DNA, 25 bp, Homo sapien
caaactacgaagtttgtgttcatcg

SEQ ID NO: 2547045 - DNA, 25 bp, Homo sapien
tgtggccacaggcatctcatacaaa

SEQ ID NO: 2547046 - DNA, 25 bp, Homo sapien
tgcaatgagcttctggcagccagcg

SEQ ID NO: 2547047 - DNA, 25 bp, Homo sapien
gtgttcatcgtccactgcaatgagc

SEQ ID NO: 2547048 - DNA, 25 bp, Homo sapien
ggtgcagtagcccaggttgcgcact

SEQ ID NO: 2547049 - DNA, 25 bp, Homo sapien
tctcagtgacaattagagctctggg

SEQ ID NO: 2547050 - DNA, 25 bp, Homo sapien
tagatggccgcactgtgtctcagga

SEQ ID NO: 2547051 - DNA, 25 bp, Homo sapien
gaagggcccattgccgctttgtcca

SEQ ID NO: 2547052 - DNA, 25 bp, Homo sapien
tcatgacggtgaccgtcccctgctg

SEQ ID NO: 2547053 - DNA, 25 bp, Homo sapien
aggcccagggttcatgcacagggtt

SEQ ID NO: 2547054 - DNA, 25 bp, Homo sapien
caggcccagggttcatgcacagggt

SEQ ID NO: 2547055 - DNA, 25 bp, Homo sapien
ggcccagggttcatgcacagggtta

SEQ ID NO: 2547056 - DNA, 25 bp, Homo sapien
ccaggcccagggttcatgcacaggg

SEQ ID NO: 2547057 - DNA, 25 bp, Homo sapien
caggcagcaggacaaaggcaagtgg

SEQ ID NO: 2547058 - DNA, 25 bp, Homo sapien
tcaggcagcaggacaaaggcaagtg

SEQ ID NO: 2547059 - DNA, 25 bp, Homo sapien
ctcaggcagcaggacaaaggcaagt

SEQ ID NO: 2547060 - DNA, 25 bp, Homo sapien
ggcagcaggacaaaggcaagtggaa

SEQ ID NO: 2547061 - DNA, 25 bp, Homo sapien
tctcaagagtggcacctggtgaagg

SEQ ID NO: 2547062 - DNA, 25 bp, Homo sapien
tccagtctcaagagtggcacctggt

SEQ ID NO: 2547063 - DNA, 25 bp, Homo sapien
tccagggggcttcagtccagtctca

SEQ ID NO: 2547064 - DNA, 25 bp, Homo sapien
tcagtccagtctcaagagtggcacc

SEQ ID NO: 2547065 - DNA, 25 bp, Homo sapien
gggccccgtgatgagtgcgacccta

SEQ ID NO: 2547066 - DNA, 25 bp, Homo sapien
aaggccccgcagatgtcagtcgtgg

SEQ ID NO: 2547067 - DNA, 25 bp, Homo sapien
ggaagctgaaactcgaagcctagcg

SEQ ID NO: 2547068 - DNA, 25 bp, Homo sapien
gcgaaggccccgcagatgtcagtcg

SEQ ID NO: 2547069 - DNA, 25 bp, Homo sapien
gccggcatcgcctccggggacgggc

SEQ ID NO: 2547070 - DNA, 25 bp, Homo sapien
catcgcctccggggacgggcccgct

SEQ ID NO: 2547071 - DNA, 25 bp, Homo sapien
gcatcgcctccggggacgggcccgc

SEQ ID NO: 2547072 - DNA, 25 bp, Homo sapien
ttcgtgcattcggaagccgccggtc

SEQ ID NO: 2547073 - DNA, 25 bp, Homo sapien
tggacttcgtgcattcggaagccgc

SEQ ID NO: 2547074 - DNA, 25 bp, Homo sapien
caggagcgtggacttcgtgcattcg

SEQ ID NO: 2547075 - DNA, 25 bp, Homo sapien
gccgccggtcgaggctcggtggctg

SEQ ID NO: 2547076 - DNA, 25 bp, Homo sapien
aggcgttcggggggcatggccgtag

SEQ ID NO: 2547077 - DNA, 25 bp, Homo sapien
agatcagatgagctcgtaggcgttc

SEQ ID NO: 2547078 - DNA, 25 bp, Homo sapien
atcagatgagctcgtaggcgttcgg

SEQ ID NO: 2547079 - DNA, 25 bp, Homo sapien
ggcgttcggggggcatggccgtaga

SEQ ID NO: 2547080 - DNA, 25 bp, Homo sapien
gaagttttctataggggacctcagc

SEQ ID NO: 2547081 - DNA, 25 bp, Homo sapien
catgctctatggagggcgtgctgct

SEQ ID NO: 2547082 - DNA, 25 bp, Homo sapien
gggaagtttacatgctctatggagg

SEQ ID NO: 2547083 - DNA, 25 bp, Homo sapien
tgctgctgagggcaataccagaagg

SEQ ID NO: 2547084 - DNA, 25 bp, Homo sapien
ccggctatcggcaggacattgcgca

SEQ ID NO: 2547085 - DNA, 25 bp, Homo sapien
tgcgcaccaggtatcttcaagctgc

SEQ ID NO: 2547086 - DNA, 25 bp, Homo sapien
ccagcctgcagacgcctgaatggat

SEQ ID NO: 2547087 - DNA, 25 bp, Homo sapien
tgctgagccgggtgatgatcccacg

SEQ ID NO: 2547088 - DNA, 25 bp, Homo sapien
cctcagtgttaagggagcagctcag

SEQ ID NO: 2547089 - DNA, 25 bp, Homo sapien
tcagtgttaagggagcagctcagga

SEQ ID NO: 2547090 - DNA, 25 bp, Homo sapien
agcgggaggaacttgactcagagca

SEQ ID NO: 2547091 - DNA, 25 bp, Homo sapien
gaatgaagtcagcaggtgagcggga

SEQ ID NO: 2547092 - DNA, 25 bp, Homo sapien
ggacagcgtggctgcggtcaaatcc

SEQ ID NO: 2547093 - DNA, 25 bp, Homo sapien
tggctgcggtcaaatccatccacgg

SEQ ID NO: 2547094 - DNA, 25 bp, Homo sapien
cagggacaagggaagtctcctcctt

SEQ ID NO: 2547095 - DNA, 25 bp, Homo sapien
atccacggggcagattttccccacg

SEQ ID NO: 2547096 - DNA, 25 bp, Homo sapien
tcatcagtcacaggcagttacaggg

SEQ ID NO: 2547097 - DNA, 25 bp, Homo sapien
gatctcctgccttatgtgggcgaag

SEQ ID NO: 2547098 - DNA, 25 bp, Homo sapien
caccatcagggaggtccgtttactg

SEQ ID NO: 2547099 - DNA, 25 bp, Homo sapien
gagtaaatgatgtccgaggctccat

SEQ ID NO: 2547100 - DNA, 25 bp, Homo sapien
cagtagcagtagaaggtgtttgagt

SEQ ID NO: 2547101 - DNA, 25 bp, Homo sapien
cagtagaaggtgtttgagtcacagg

SEQ ID NO: 2547102 - DNA, 25 bp, Homo sapien
tcagtagcagtagaaggtgtttgag

SEQ ID NO: 2547103 - DNA, 25 bp, Homo sapien
tagcagtagaaggtgtttgagtcac

SEQ ID NO: 2547104 - DNA, 25 bp, Homo sapien
ctacccctcaatgataaactgcaaa

SEQ ID NO: 2547105 - DNA, 25 bp, Homo sapien
gagcacaaatgctagcttggaagcc

SEQ ID NO: 2547106 - DNA, 25 bp, Homo sapien
tacaaatgaattcaccccagactac

SEQ ID NO: 2547107 - DNA, 25 bp, Homo sapien
gcttgtcctggagtcgaccccagat

SEQ ID NO: 2547108 - DNA, 25 bp, Homo sapien
tgtgtctgtaagtatcagcttgtcc

SEQ ID NO: 2547109 - DNA, 25 bp, Homo sapien
ttcaactcggtagaacagagtgggt

SEQ ID NO: 2547110 - DNA, 25 bp, Homo sapien
tcaactcggtagaacagagtgggtg

SEQ ID NO: 2547111 - DNA, 25 bp, Homo sapien
cttcaactcggtagaacagagtggg

SEQ ID NO: 2547112 - DNA, 25 bp, Homo sapien
ggccggccagcggcctgaccagcag

SEQ ID NO: 2547113 - DNA, 25 bp, Homo sapien
gccggccagcggcctgaccagcagc

SEQ ID NO: 2547114 - DNA, 25 bp, Homo sapien
gatgtggtcacatggctgcgttctc

SEQ ID NO: 2547115 - DNA, 25 bp, Homo sapien
tgatggtctggcaccacaagtgggt

SEQ ID NO: 2547116 - DNA, 25 bp, Homo sapien
gaaacagattccactcgtcaccgat

SEQ ID NO: 2547117 - DNA, 25 bp, Homo sapien
ccttccttggtacgtggtgaagcca

SEQ ID NO: 2547118 - DNA, 25 bp, Homo sapien
ccgcctttatgatgtcttgtccatt

SEQ ID NO: 2547119 - DNA, 25 bp, Homo sapien
cgcctttatgatgtcttgtccattc

SEQ ID NO: 2547120 - DNA, 25 bp, Homo sapien
tgttgttcatctaccccaacgttcc

SEQ ID NO: 2547121 - DNA, 25 bp, Homo sapien
aaggtgtttcttgatgaactcagga

SEQ ID NO: 2547122 - DNA, 25 bp, Homo sapien
accccaacgttccaagcaaggctgg

SEQ ID NO: 2547123 - DNA, 25 bp, Homo sapien
gctggatcaaggtgtttcttgatga

SEQ ID NO: 2547124 - DNA, 25 bp, Homo sapien
tgctgcaaccactcggggtgactca

SEQ ID NO: 2547125 - DNA, 25 bp, Homo sapien
ctgcataagcaataagggtgcaccc

SEQ ID NO: 2547126 - DNA, 25 bp, Homo sapien
aagcaataagggtgcacccagggag

SEQ ID NO: 2547127 - DNA, 25 bp, Homo sapien
cataagcaataagggtgcacccagg

SEQ ID NO: 2547128 - DNA, 25 bp, Homo sapien
cagcagcgccagtgtgttctcagga

SEQ ID NO: 2547129 - DNA, 25 bp, Homo sapien
gcgcagcagcgccagtgtgttctca

SEQ ID NO: 2547130 - DNA, 25 bp, Homo sapien
gagcagcagtcctgtggagcgcagc

SEQ ID NO: 2547131 - DNA, 25 bp, Homo sapien
gcagtcctgtggagcgcagcagcgc

SEQ ID NO: 2547132 - DNA, 25 bp, Homo sapien
cagttagtgttgcaggcgtggtcta

SEQ ID NO: 2547133 - DNA, 25 bp, Homo sapien
tcacagggaggaaatgtaatgcaga

SEQ ID NO: 2547134 - DNA, 25 bp, Homo sapien
gcgtggagcagtccagaatttagca

SEQ ID NO: 2547135 - DNA, 25 bp, Homo sapien
gaatttagcaacagcaggaatccag

SEQ ID NO: 2547136 - DNA, 25 bp, Homo sapien
gaagggatcggctccgcaagctgtc

SEQ ID NO: 2547137 - DNA, 25 bp, Homo sapien
gaagcttgtgatctccgtggtgatc

SEQ ID NO: 2547138 - DNA, 25 bp, Homo sapien
tggtgatcgcggtggaggtgggaag

SEQ ID NO: 2547139 - DNA, 25 bp, Homo sapien
tccagggtggagacgtagaagcttg

SEQ ID NO: 2547140 - DNA, 25 bp, Homo sapien
tatataaagcctcgcaccagactgc

SEQ ID NO: 2547141 - DNA, 25 bp, Homo sapien
cttgctgattgagtgagaacggaca

SEQ ID NO: 2547142 - DNA, 25 bp, Homo sapien
cagactgcatctcgggaaacactgt

SEQ ID NO: 2547143 - DNA, 25 bp, Homo sapien
tgaggcaaaactcctgtggacccac

SEQ ID NO: 2547144 - DNA, 25 bp, Homo sapien
gctcgggcgtcgttggaagaaccca

SEQ ID NO: 2547145 - DNA, 25 bp, Homo sapien
agccagggagggcaccgcattcaca

SEQ ID NO: 2547146 - DNA, 25 bp, Homo sapien
gggcaccgcattcacacaaatgctg

SEQ ID NO: 2547147 - DNA, 25 bp, Homo sapien
gggagggcaccgcattcacacaaat

SEQ ID NO: 2547148 - DNA, 25 bp, Homo sapien
gctcagcagggactcctggacatcc

SEQ ID NO: 2547149 - DNA, 25 bp, Homo sapien
agggactcctggacatcctctgcgc

SEQ ID NO: 2547150 - DNA, 25 bp, Homo sapien
tcagcagggactcctggacatcctc

SEQ ID NO: 2547151 - DNA, 25 bp, Homo sapien
agcagggactcctggacatcctctg

SEQ ID NO: 2547152 - DNA, 25 bp, Homo sapien
cctgagctaagtccgtacagggcat

SEQ ID NO: 2547153 - DNA, 25 bp, Homo sapien
agggcatctcttacaccacactcca

SEQ ID NO: 2547154 - DNA, 25 bp, Homo sapien
ggtcctgagctaagtccgtacaggg

SEQ ID NO: 2547155 - DNA, 25 bp, Homo sapien
ggcatctcttacaccacactccaca

SEQ ID NO: 2547156 - DNA, 25 bp, Homo sapien
gggagtttcactgaagtaccaggaa

SEQ ID NO: 2547157 - DNA, 25 bp, Homo sapien
ttcccgtggggtcagagcagccgcc

SEQ ID NO: 2547158 - DNA, 25 bp, Homo sapien
tgcgggtttgcacccttggagcacg

SEQ ID NO: 2547159 - DNA, 25 bp, Homo sapien
gaagacgtgttctgagctgaatcct

SEQ ID NO: 2547160 - DNA, 25 bp, Homo sapien
cccaaccttaggcagaggctcctaa

SEQ ID NO: 2547161 - DNA, 25 bp, Homo sapien
aggcagaggctcctaaagggcagca

SEQ ID NO: 2547162 - DNA, 25 bp, Homo sapien
cttaggcagaggctcctaaagggca

SEQ ID NO: 2547163 - DNA, 25 bp, Homo sapien
ctgcaaattggaagtgcagccccca

SEQ ID NO: 2547164 - DNA, 25 bp, Homo sapien
ctgcagagcggttgacatggggctc

SEQ ID NO: 2547165 - DNA, 25 bp, Homo sapien
gaccacgggagtcttagcgctgtgt

SEQ ID NO: 2547166 - DNA, 25 bp, Homo sapien
cgttttctcaggctgcgtggcccag

SEQ ID NO: 2547167 - DNA, 25 bp, Homo sapien
gtgccgccacggtgcagtgctcgtt

SEQ ID NO: 2547168 - DNA, 25 bp, Homo sapien
cacgggagtcttagcgctgtgtcct

SEQ ID NO: 2547169 - DNA, 25 bp, Homo sapien
aggcgaagcattgcagcgtcctgga

SEQ ID NO: 2547170 - DNA, 25 bp, Homo sapien
gggaggcgaagcattgcagcgtcct

SEQ ID NO: 2547171 - DNA, 25 bp, Homo sapien
gatttccagttgggaccaccctctc

SEQ ID NO: 2547172 - DNA, 25 bp, Homo sapien
aagcattgcagcgtcctggacctgg

SEQ ID NO: 2547173 - DNA, 25 bp, Homo sapien
gggggttagggaggcatacaggcca

SEQ ID NO: 2547174 - DNA, 25 bp, Homo sapien
gttagggaggcatacaggccagtgt

SEQ ID NO: 2547175 - DNA, 25 bp, Homo sapien
gggttagggaggcatacaggccagt

SEQ ID NO: 2547176 - DNA, 25 bp, Homo sapien
ttagggaggcatacaggccagtgta

SEQ ID NO: 2547177 - DNA, 25 bp, Homo sapien
tggggactagggaggcaaccaggtc

SEQ ID NO: 2547178 - DNA, 25 bp, Homo sapien
ggactagggaggcaaccaggtcagt

SEQ ID NO: 2547179 - DNA, 25 bp, Homo sapien
ctagggaggcaaccaggtcagtgta

SEQ ID NO: 2547180 - DNA, 25 bp, Homo sapien
ctggggactagggaggcaaccaggt

SEQ ID NO: 2547181 - DNA, 25 bp, Homo sapien
gggctagggagacatgcaggccagt

SEQ ID NO: 2547182 - DNA, 25 bp, Homo sapien
gctagggagacatgcaggccagtgt

SEQ ID NO: 2547183 - DNA, 25 bp, Homo sapien
ctagggagacatgcaggccagtgta

SEQ ID NO: 2547184 - DNA, 25 bp, Homo sapien
gaggggctagggagacatgcaggcc

SEQ ID NO: 2547185 - DNA, 25 bp, Homo sapien
aagacatccaggttggtgtagaaac

SEQ ID NO: 2547186 - DNA, 25 bp, Homo sapien
gacatccaggttggtgtagaaacac

SEQ ID NO: 2547187 - DNA, 25 bp, Homo sapien
ggaagacatccaggttggtgtagaa

SEQ ID NO: 2547188 - DNA, 25 bp, Homo sapien
ctgggggttaggaagacatccaggt

SEQ ID NO: 2547189 - DNA, 25 bp, Homo sapien
ttgcagaccacctgccttagaaaca

SEQ ID NO: 2547190 - DNA, 25 bp, Homo sapien
gggtggcttgcagaccacctgcctt

SEQ ID NO: 2547191 - DNA, 25 bp, Homo sapien
atccctgtccagagccggacgctga

SEQ ID NO: 2547192 - DNA, 25 bp, Homo sapien
tttgttcatccctgtccagagccgg

SEQ ID NO: 2547193 - DNA, 25 bp, Homo sapien
gggactcgggtctgccctgtccctg

SEQ ID NO: 2547194 - DNA, 25 bp, Homo sapien
gtgtccgtgtcttgccgctttggga

SEQ ID NO: 2547195 - DNA, 25 bp, Homo sapien
tgagctgtgcccttgctactgtgag

SEQ ID NO: 2547196 - DNA, 25 bp, Homo sapien
ctttgggaacctccaatgcagggca

SEQ ID NO: 2547197 - DNA, 25 bp, Homo sapien
tgagatgcagacaggacatagcttt

SEQ ID NO: 2547198 - DNA, 25 bp, Homo sapien
ccttggggatgcaggaccgatgaga

SEQ ID NO: 2547199 - DNA, 25 bp, Homo sapien
aggccatgaatcctcctggagactg

SEQ ID NO: 2547200 - DNA, 25 bp, Homo sapien
gagactgtgctcatcatccttgggg

SEQ ID NO: 2547201 - DNA, 25 bp, Homo sapien
ctcccacagtgggacacttctgatt

SEQ ID NO: 2547202 - DNA, 25 bp, Homo sapien
cacagtgggacacttctgattcttc

SEQ ID NO: 2547203 - DNA, 25 bp, Homo sapien
agccagatggtgtccctcccacagt

SEQ ID NO: 2547204 - DNA, 25 bp, Homo sapien
tgtagccagatggtgtccctcccac

SEQ ID NO: 2547205 - DNA, 25 bp, Homo sapien
tacgaatattaaggtctgctcccca

SEQ ID NO: 2547206 - DNA, 25 bp, Homo sapien
ggtagaataagcgtaaggttgcctg

SEQ ID NO: 2547207 - DNA, 25 bp, Homo sapien
gagttttccacctgggagcgctgag

SEQ ID NO: 2547208 - DNA, 25 bp, Homo sapien
gaatttctctgccacgtgcctcttg

SEQ ID NO: 2547209 - DNA, 25 bp, Homo sapien
gcccattgagctgctctgagatcca

SEQ ID NO: 2547210 - DNA, 25 bp, Homo sapien
taattgcccattgagctgctctgag

SEQ ID NO: 2547211 - DNA, 25 bp, Homo sapien
attttaattgcccattgagctgctc

SEQ ID NO: 2547212 - DNA, 25 bp, Homo sapien
tcagcacacacttgatgcctcacat

SEQ ID NO: 2547213 - DNA, 25 bp, Homo sapien
catccgggactgcgtctgagtcttt

SEQ ID NO: 2547214 - DNA, 25 bp, Homo sapien
cgggactgcgtctgagtcttttatc

SEQ ID NO: 2547215 - DNA, 25 bp, Homo sapien
tccgggactgcgtctgagtctttta

SEQ ID NO: 2547216 - DNA, 25 bp, Homo sapien
ccgggactgcgtctgagtcttttat

SEQ ID NO: 2547217 - DNA, 25 bp, Homo sapien
ggagacgcagcccaattactggttg

SEQ ID NO: 2547218 - DNA, 25 bp, Homo sapien
cgcagcccaattactggttggagac

SEQ ID NO: 2547219 - DNA, 25 bp, Homo sapien
tcgggagacgcagcccaattactgg

SEQ ID NO: 2547220 - DNA, 25 bp, Homo sapien
ccaattactggttggagactcagcc

SEQ ID NO: 2547221 - DNA, 25 bp, Homo sapien
tcccggagtcccatgcgggcagcgg

SEQ ID NO: 2547222 - DNA, 25 bp, Homo sapien
cagcggctgccgctttctgaaggta

SEQ ID NO: 2547223 - DNA, 25 bp, Homo sapien
gaaggtaccctcagccacacttggg

SEQ ID NO: 2547224 - DNA, 25 bp, Homo sapien
agcctcccggagtcccatgcgggca

SEQ ID NO: 2547225 - DNA, 25 bp, Homo sapien
gctcctcatgtggccgccagctggc

SEQ ID NO: 2547226 - DNA, 25 bp, Homo sapien
caagcgccggcattcctcatggaga

SEQ ID NO: 2547227 - DNA, 25 bp, Homo sapien
ttcccttcctgaggtccgggtctgc

SEQ ID NO: 2547228 - DNA, 25 bp, Homo sapien
ttcccgaatgcgctgctgtggtcac

SEQ ID NO: 2547229 - DNA, 25 bp, Homo sapien
gtctgcaaacatgcgggccctcgca

SEQ ID NO: 2547230 - DNA, 25 bp, Homo sapien
ttcaagggctgcctcccgagcacag

SEQ ID NO: 2547231 - DNA, 25 bp, Homo sapien
tggctccctttcaagggctgcctcc

SEQ ID NO: 2547232 - DNA, 25 bp, Homo sapien
tcgcccggatttgggcacaggtgcc

SEQ ID NO: 2547233 - DNA, 25 bp, Homo sapien
aatttctggatcatcgcccggattt

SEQ ID NO: 2547234 - DNA, 25 bp, Homo sapien
ctgcagacgcaccaacacaggttca

SEQ ID NO: 2547235 - DNA, 25 bp, Homo sapien
agagaaagcctcagcactggaaaca

SEQ ID NO: 2547236 - DNA, 25 bp, Homo sapien
cagacgcaccaacacaggttcagag

SEQ ID NO: 2547237 - DNA, 25 bp, Homo sapien
gagaaagcctcagcactggaaacat

SEQ ID NO: 2547238 - DNA, 25 bp, Homo sapien
agaataacaacagctttcagcatgc

SEQ ID NO: 2547239 - DNA, 25 bp, Homo sapien
gccccgtgtcaacagttagaataac

SEQ ID NO: 2547240 - DNA, 25 bp, Homo sapien
ctggttcagtgatggtgccacagac

SEQ ID NO: 2547241 - DNA, 25 bp, Homo sapien
agctgccccgtgtcaacagttagaa

SEQ ID NO: 2547242 - DNA, 25 bp, Homo sapien
gtctattccagacttatgctgtgtc

SEQ ID NO: 2547243 - DNA, 25 bp, Homo sapien
gatgcagtttaagagactgcttcct

SEQ ID NO: 2547244 - DNA, 25 bp, Homo sapien
ttcatcatcacgatgcagtttaaga

SEQ ID NO: 2547245 - DNA, 25 bp, Homo sapien
actgtctattccagacttatgctgt

SEQ ID NO: 2547246 - DNA, 25 bp, Homo sapien
aggacagcccggcagtgccaggaat

SEQ ID NO: 2547247 - DNA, 25 bp, Homo sapien
acagcccggcagtgccaggaatcgg

SEQ ID NO: 2547248 - DNA, 25 bp, Homo sapien
caggaatcgggaagctcatggggac

SEQ ID NO: 2547249 - DNA, 25 bp, Homo sapien
aatcgggaagctcatggggaccgca

SEQ ID NO: 2547250 - DNA, 25 bp, Homo sapien
tcagtcagcgaggtcaggtgcacgt

SEQ ID NO: 2547251 - DNA, 25 bp, Homo sapien
agcgaggtcaggtgcacgtccagac

SEQ ID NO: 2547252 - DNA, 25 bp, Homo sapien
agtcagcgaggtcaggtgcacgtcc

SEQ ID NO: 2547253 - DNA, 25 bp, Homo sapien
tcagcgaggtcaggtgcacgtccag

SEQ ID NO: 2547254 - DNA, 25 bp, Homo sapien
ctgatggacgctccttcacagggac

SEQ ID NO: 2547255 - DNA, 25 bp, Homo sapien
gcaaacaggactccatggagagcag

SEQ ID NO: 2547256 - DNA, 25 bp, Homo sapien
actgtcactgaggatgcacggtcct

SEQ ID NO: 2547257 - DNA, 25 bp, Homo sapien
taaagcatggtgaggcaccactgtc

SEQ ID NO: 2547258 - DNA, 25 bp, Homo sapien
ccagtatttgggtcttggagcagtg

SEQ ID NO: 2547259 - DNA, 25 bp, Homo sapien
ttaagtccctgaacagcggagccct

SEQ ID NO: 2547260 - DNA, 25 bp, Homo sapien
gcaggaagctagatgcggagcaggc

SEQ ID NO: 2547261 - DNA, 25 bp, Homo sapien
atccacagccccagtatttgggtct

SEQ ID NO: 2547262 - DNA, 25 bp, Homo sapien
cctcataaaaatagctgactcttga

SEQ ID NO: 2547263 - DNA, 25 bp, Homo sapien
aaactggtgggggtgccacttatat

SEQ ID NO: 2547264 - DNA, 25 bp, Homo sapien
ttgaaaaactcgcagctgaaacaca

SEQ ID NO: 2547265 - DNA, 25 bp, Homo sapien
aaaactcgcagctgaaacacataac

SEQ ID NO: 2547266 - DNA, 25 bp, Homo sapien
taaagttaggcataccatgaataca

SEQ ID NO: 2547267 - DNA, 25 bp, Homo sapien
tgcagtgtgatgctaatcacctccc

SEQ ID NO: 2547268 - DNA, 25 bp, Homo sapien
tgtagtacgtcacataccactgtca

SEQ ID NO: 2547269 - DNA, 25 bp, Homo sapien
gagacctacgagaagtgccactagt

SEQ ID NO: 2547270 - DNA, 25 bp, Homo sapien
tcttgtacaacatggaggtctggac

SEQ ID NO: 2547271 - DNA, 25 bp, Homo sapien
gaagccgttgctgcagctataccag

SEQ ID NO: 2547272 - DNA, 25 bp, Homo sapien
gaattactacgagaaaggcatactg

SEQ ID NO: 2547273 - DNA, 25 bp, Homo sapien
tactctaggtcaaggtctgcagctg

SEQ ID NO: 2547274 - DNA, 25 bp, Homo sapien
aattccagtcggcagaaagactctg

SEQ ID NO: 2547275 - DNA, 25 bp, Homo sapien
tccatgcggtcattcaggggcccag

SEQ ID NO: 2547276 - DNA, 25 bp, Homo sapien
tatgttgggccagggttagctgtgt

SEQ ID NO: 2547277 - DNA, 25 bp, Homo sapien
gaatgtggagtggtaattccagtcg

SEQ ID NO: 2547278 - DNA, 25 bp, Homo sapien
aggcatgtccccctgtgctgatggc

SEQ ID NO: 2547279 - DNA, 25 bp, Homo sapien
ttgattggagcaggatattccacac

SEQ ID NO: 2547280 - DNA, 25 bp, Homo sapien
gccaggcatgtccccctgtgctgat

SEQ ID NO: 2547281 - DNA, 25 bp, Homo sapien
cactggacaacgcaggtgacatggc

SEQ ID NO: 2547282 - DNA, 25 bp, Homo sapien
tcagcccagtgactgtttcaaaggc

SEQ ID NO: 2547283 - DNA, 25 bp, Homo sapien
tcgaccccatgctctggtcactttt

SEQ ID NO: 2547284 - DNA, 25 bp, Homo sapien
aactcatcttcacagctcgacccca

SEQ ID NO: 2547285 - DNA, 25 bp, Homo sapien
cacaaccagggccaactcatcttca

SEQ ID NO: 2547286 - DNA, 25 bp, Homo sapien
gatgtgtggccaaaaccagaccttt

SEQ ID NO: 2547287 - DNA, 25 bp, Homo sapien
tgcctgaagctgacatacctatgga

SEQ ID NO: 2547288 - DNA, 25 bp, Homo sapien
gaaggtatcttgacaccacagtgag

SEQ ID NO: 2547289 - DNA, 25 bp, Homo sapien
aatgctctggctgtgatattggacc

SEQ ID NO: 2547290 - DNA, 25 bp, Homo sapien
atgtttctatggtggggactccaga

SEQ ID NO: 2547291 - DNA, 25 bp, Homo sapien
gatgtttctatggtggggactccag

SEQ ID NO: 2547292 - DNA, 25 bp, Homo sapien
tgtttctatggtggggactccagac

SEQ ID NO: 2547293 - DNA, 25 bp, Homo sapien
cctggtgaggggcatgtctgcacca

SEQ ID NO: 2547294 - DNA, 25 bp, Homo sapien
catgtctgcaccacggtccaaggaa

SEQ ID NO: 2547295 - DNA, 25 bp, Homo sapien
tgcaccacggtccaaggaaagaggg

SEQ ID NO: 2547296 - DNA, 25 bp, Homo sapien
tgaggggcatgtctgcaccacggtc

SEQ ID NO: 2547297 - DNA, 25 bp, Homo sapien
aagggacaatgcagggatttgcatg

SEQ ID NO: 2547298 - DNA, 25 bp, Homo sapien
tgaagggacaatgcagggatttgca

SEQ ID NO: 2547299 - DNA, 25 bp, Homo sapien
gacaatgcagggatttgcatggaaa

SEQ ID NO: 2547300 - DNA, 25 bp, Homo sapien
ccatgaagggacaatgcagggattt

SEQ ID NO: 2547301 - DNA, 25 bp, Homo sapien
gcaaaaggcagcttgtgaggtgagg

SEQ ID NO: 2547302 - DNA, 25 bp, Homo sapien
tgagacagtcggctcttagagaagc

SEQ ID NO: 2547303 - DNA, 25 bp, Homo sapien
tggatcacgggcacaggctgatgtc

SEQ ID NO: 2547304 - DNA, 25 bp, Homo sapien
tattcgtggatagatttggcctggg

SEQ ID NO: 2547305 - DNA, 25 bp, Homo sapien
caccacgcttcaggaatgagacagt

SEQ ID NO: 2547306 - DNA, 25 bp, Homo sapien
caatgtcctgtcgagggcaaaagtg

SEQ ID NO: 2547307 - DNA, 25 bp, Homo sapien
cagcaggtagcctgcccgcaatgtc

SEQ ID NO: 2547308 - DNA, 25 bp, Homo sapien
cctgcccgcaatgtcctgtcgaggg

SEQ ID NO: 2547309 - DNA, 25 bp, Homo sapien
gagggcaaaagtgcctccagcaaac

SEQ ID NO: 2547310 - DNA, 25 bp, Homo sapien
cctgcactgggctctagcagcccca

SEQ ID NO: 2547311 - DNA, 25 bp, Homo sapien
ctgcactgggctctagcagccccag

SEQ ID NO: 2547312 - DNA, 25 bp, Homo sapien
ggtcctgcactgggctctagcagcc

SEQ ID NO: 2547313 - DNA, 25 bp, Homo sapien
tcctgcactgggctctagcagcccc

SEQ ID NO: 2547314 - DNA, 25 bp, Homo sapien
ttgagccacatggatctgcggccct

SEQ ID NO: 2547315 - DNA, 25 bp, Homo sapien
accctcccggacagaggctggaacg

SEQ ID NO: 2547316 - DNA, 25 bp, Homo sapien
agcaagtgggccgagtgaccctccc

SEQ ID NO: 2547317 - DNA, 25 bp, Homo sapien
attagcatttgagccacatggatct

SEQ ID NO: 2547318 - DNA, 25 bp, Homo sapien
cattacaggacccattctccagaac

SEQ ID NO: 2547319 - DNA, 25 bp, Homo sapien
caaggtcacgggcttgtggatattc

SEQ ID NO: 2547320 - DNA, 25 bp, Homo sapien
attctccagaaccccaaggtcacgg

SEQ ID NO: 2547321 - DNA, 25 bp, Homo sapien
gagccatgacactcattacaggacc

SEQ ID NO: 2547322 - DNA, 25 bp, Homo sapien
tgataaaatgcagaccccgactcag

SEQ ID NO: 2547323 - DNA, 25 bp, Homo sapien
atttccaacaagacccagaggcagc

SEQ ID NO: 2547324 - DNA, 25 bp, Homo sapien
tgagggaccaaagtcaggcaggctc

SEQ ID NO: 2547325 - DNA, 25 bp, Homo sapien
tgttttctctggatacgtgctggcc

SEQ ID NO: 2547326 - DNA, 25 bp, Homo sapien
gaggggacatcaaccttcttccttc

SEQ ID NO: 2547327 - DNA, 25 bp, Homo sapien
tcccactcccgctgagtccaccagc

SEQ ID NO: 2547328 - DNA, 25 bp, Homo sapien
ccactcccgctgagtccaccagccc

SEQ ID NO: 2547329 - DNA, 25 bp, Homo sapien
ttcccactcccgctgagtccaccag

SEQ ID NO: 2547330 - DNA, 25 bp, Homo sapien
gaagaagcgttctggagatcaagct

SEQ ID NO: 2547331 - DNA, 25 bp, Homo sapien
aagggcgctcacagggaccattaga

SEQ ID NO: 2547332 - DNA, 25 bp, Homo sapien
tgtggtcagtgttcttggccccagc

SEQ ID NO: 2547333 - DNA, 25 bp, Homo sapien
tatgatacccaaatccaaggctgcg

SEQ ID NO: 2547334 - DNA, 25 bp, Homo sapien
ctaccgctaccctgcatcactgtcc

SEQ ID NO: 2547335 - DNA, 25 bp, Homo sapien
tgtgtccatgattctgttacttgct

SEQ ID NO: 2547336 - DNA, 25 bp, Homo sapien
tcagcctctgcccctataacattaa

SEQ ID NO: 2547337 - DNA, 25 bp, Homo sapien
ccacctggaatcattgtgtccatga

SEQ ID NO: 2547338 - DNA, 25 bp, Homo sapien
ctaatccttgcagaagaggttgtca

SEQ ID NO: 2547339 - DNA, 25 bp, Homo sapien
catagggaataaagatgacagctct

SEQ ID NO: 2547340 - DNA, 25 bp, Homo sapien
cttgcagaagaggttgtcataggga

SEQ ID NO: 2547341 - DNA, 25 bp, Homo sapien
cagaagaggttgtcatagggaataa

SEQ ID NO: 2547342 - DNA, 25 bp, Homo sapien
ggaggcacacggaggtctgggttct

SEQ ID NO: 2547343 - DNA, 25 bp, Homo sapien
gcccagcctcggctgtttctggagg

SEQ ID NO: 2547344 - DNA, 25 bp, Homo sapien
cgctccttgactgccgatatggatc

SEQ ID NO: 2547345 - DNA, 25 bp, Homo sapien
tccttgactgccgatatggatcccc

SEQ ID NO: 2547346 - DNA, 25 bp, Homo sapien
gacagcagagccgtggggtctgagc

SEQ ID NO: 2547347 - DNA, 25 bp, Homo sapien
ggacagcagagccgtggggtctgag

SEQ ID NO: 2547348 - DNA, 25 bp, Homo sapien
tggacagcagagccgtggggtctga

SEQ ID NO: 2547349 - DNA, 25 bp, Homo sapien
gtggacagcagagccgtggggtctg

SEQ ID NO: 2547350 - DNA, 25 bp, Homo sapien
aggatccagaacccggatctcgcct

SEQ ID NO: 2547351 - DNA, 25 bp, Homo sapien
tccagaacccggatctcgcctcttc

SEQ ID NO: 2547352 - DNA, 25 bp, Homo sapien
gaaaggagccgggaaagcgcgggca

SEQ ID NO: 2547353 - DNA, 25 bp, Homo sapien
aaagcgcgggcatcaggagcacgag

SEQ ID NO: 2547354 - DNA, 25 bp, Homo sapien
cactgcactcgctacctgggcagta

SEQ ID NO: 2547355 - DNA, 25 bp, Homo sapien
ctgggccaaccgagcctcgatgcca

SEQ ID NO: 2547356 - DNA, 25 bp, Homo sapien
cgacgtcccctggttggagggcgag

SEQ ID NO: 2547357 - DNA, 25 bp, Homo sapien
tccccttgtatgtcggcggcagaca

SEQ ID NO: 2547358 - DNA, 25 bp, Homo sapien
caatccacttggctttagtgcttgg

SEQ ID NO: 2547359 - DNA, 25 bp, Homo sapien
aagggcaatccacttggctttagtg

SEQ ID NO: 2547360 - DNA, 25 bp, Homo sapien
ggcaatccacttggctttagtgctt

SEQ ID NO: 2547361 - DNA, 25 bp, Homo sapien
atccacttggctttagtgcttggtc

SEQ ID NO: 2547362 - DNA, 25 bp, Homo sapien
ctttaaagtgacttgggaatgctct

SEQ ID NO: 2547363 - DNA, 25 bp, Homo sapien
ttaaagtgacttgggaatgctctcc

SEQ ID NO: 2547364 - DNA, 25 bp, Homo sapien
gctgcgggtccacacttgtgaagcc

SEQ ID NO: 2547365 - DNA, 25 bp, Homo sapien
gtgaagccgtggataattcatcaag

SEQ ID NO: 2547366 - DNA, 25 bp, Homo sapien
actgtccctggtgtcttctgccagg

SEQ ID NO: 2547367 - DNA, 25 bp, Homo sapien
ctgtcagggacagaagacactgtcc

SEQ ID NO: 2547368 - DNA, 25 bp, Homo sapien
tcagggacagaagacactgtccctg

SEQ ID NO: 2547369 - DNA, 25 bp, Homo sapien
gtccctggtgtcttctgccaggacg

SEQ ID NO: 2547370 - DNA, 25 bp, Homo sapien
aagaccagaacccaaaagcttgagg

SEQ ID NO: 2547371 - DNA, 25 bp, Homo sapien
tatgatgttcataggctggttgtga

SEQ ID NO: 2547372 - DNA, 25 bp, Homo sapien
ggttataccccaattacagccatgc

SEQ ID NO: 2547373 - DNA, 25 bp, Homo sapien
tatagtgattgaaagcaggatagca

SEQ ID NO: 2547374 - DNA, 25 bp, Homo sapien
ggcggcctccaggactcacaatcat

SEQ ID NO: 2547375 - DNA, 25 bp, Homo sapien
gggcggcctccaggactcacaatca

SEQ ID NO: 2547376 - DNA, 25 bp, Homo sapien
ttacttgcacctgaagagtcacggg

SEQ ID NO: 2547377 - DNA, 25 bp, Homo sapien
ctgttacttgcacctgaagagtcac

SEQ ID NO: 2547378 - DNA, 25 bp, Homo sapien
cctaatagaagcagaggagtctcca

SEQ ID NO: 2547379 - DNA, 25 bp, Homo sapien
caattatgttagcaggctgggcagg

SEQ ID NO: 2547380 - DNA, 25 bp, Homo sapien
tcaaaacccaggagatctgcaggac

SEQ ID NO: 2547381 - DNA, 25 bp, Homo sapien
gaaggcgctgtttgcaatctcactg

SEQ ID NO: 2547382 - DNA, 25 bp, Homo sapien
ggagttccgagtgaccttgtacaaa

SEQ ID NO: 2547383 - DNA, 25 bp, Homo sapien
tgtacaaacacggtctgaactggac

SEQ ID NO: 2547384 - DNA, 25 bp, Homo sapien
ctcaggagttccgagtgaccttgta

SEQ ID NO: 2547385 - DNA, 25 bp, Homo sapien
tgaccttgtacaaacacggtctgaa

SEQ ID NO: 2547386 - DNA, 25 bp, Homo sapien
cctcaagccccgctgagttgtgaat

SEQ ID NO: 2547387 - DNA, 25 bp, Homo sapien
tgaatccctgacacggtgcagctgg

SEQ ID NO: 2547388 - DNA, 25 bp, Homo sapien
tcttctcctccatacacctggggga

SEQ ID NO: 2547389 - DNA, 25 bp, Homo sapien
tttgagtgactggagaaggcgtccc

SEQ ID NO: 2547390 - DNA, 25 bp, Homo sapien
gagactcctaaacaggtttctggaa

SEQ ID NO: 2547391 - DNA, 25 bp, Homo sapien
tctcagagactcctaaacaggtttc

SEQ ID NO: 2547392 - DNA, 25 bp, Homo sapien
gggagcttctcagagactcctaaac

SEQ ID NO: 2547393 - DNA, 25 bp, Homo sapien
gcttctcagagactcctaaacaggt

SEQ ID NO: 2547394 - DNA, 25 bp, Homo sapien
tctgcaaaggtgcgattcaaaccag

SEQ ID NO: 2547395 - DNA, 25 bp, Homo sapien
ctgcaaaggtgcgattcaaaccagg

SEQ ID NO: 2547396 - DNA, 25 bp, Homo sapien
ctctgcaaaggtgcgattcaaacca

SEQ ID NO: 2547397 - DNA, 25 bp, Homo sapien
agatgatattgaaatgatacagact

SEQ ID NO: 2547398 - DNA, 25 bp, Homo sapien
ctaattgcctctctgtagcagatga

SEQ ID NO: 2547399 - DNA, 25 bp, Homo sapien
aatgatacagactgaaagatgagaa

SEQ ID NO: 2547400 - DNA, 25 bp, Homo sapien
gcctctctgtagcagatgatattga

SEQ ID NO: 2547401 - DNA, 25 bp, Homo sapien
cggtccctgaagtccgttgtgaaca

SEQ ID NO: 2547402 - DNA, 25 bp, Homo sapien
tgaagtccgttgtgaacacactcca

SEQ ID NO: 2547403 - DNA, 25 bp, Homo sapien
ctgttcttggagaacccggtccctg

SEQ ID NO: 2547404 - DNA, 25 bp, Homo sapien
tgttcttggagaacccggtccctga

SEQ ID NO: 2547405 - DNA, 25 bp, Homo sapien
atcacatggtaagtgttgacatctg

SEQ ID NO: 2547406 - DNA, 25 bp, Homo sapien
agtgttgacatctggtccaggttct

SEQ ID NO: 2547407 - DNA, 25 bp, Homo sapien
gtgttgacatctggtccaggttctt

SEQ ID NO: 2547408 - DNA, 25 bp, Homo sapien
gagaaatcacatggtaagtgttgac

SEQ ID NO: 2547409 - DNA, 25 bp, Homo sapien
tctgcaagcagtcggcctctctgga

SEQ ID NO: 2547410 - DNA, 25 bp, Homo sapien
aaagactgaatctgcaagcagtcgg

SEQ ID NO: 2547411 - DNA, 25 bp, Homo sapien
gaaggatttctgtaacgggctccag

SEQ ID NO: 2547412 - DNA, 25 bp, Homo sapien
ctccttttgctctctcccgtccact

SEQ ID NO: 2547413 - DNA, 25 bp, Homo sapien
aaaattctgctccgtccacctgcag

SEQ ID NO: 2547414 - DNA, 25 bp, Homo sapien
ctaaaattctgctccgtccacctgc

SEQ ID NO: 2547415 - DNA, 25 bp, Homo sapien
taaaattctgctccgtccacctgca

SEQ ID NO: 2547416 - DNA, 25 bp, Homo sapien
ctgtttacagaagttcttcccacct

SEQ ID NO: 2547417 - DNA, 25 bp, Homo sapien
tgtttacagaagttcttcccaccta

SEQ ID NO: 2547418 - DNA, 25 bp, Homo sapien
gaggtgagaccagggtagacaggcc

SEQ ID NO: 2547419 - DNA, 25 bp, Homo sapien
gatgtgcctctgtatcaccctgaag

SEQ ID NO: 2547420 - DNA, 25 bp, Homo sapien
caggaaatctccaagaggcctctgt

SEQ ID NO: 2547421 - DNA, 25 bp, Homo sapien
tctcttgctacatctggggaggggc

SEQ ID NO: 2547422 - DNA, 25 bp, Homo sapien
aggccaacgctcagtcaacatgtcg

SEQ ID NO: 2547423 - DNA, 25 bp, Homo sapien
gtcaacatgtcgcattcttgcttat

SEQ ID NO: 2547424 - DNA, 25 bp, Homo sapien
ctgttcggacacaggccaacgctca

SEQ ID NO: 2547425 - DNA, 25 bp, Homo sapien
tcctgaagcctgttcggacacaggc

SEQ ID NO: 2547426 - DNA, 25 bp, Homo sapien
accacggcctttcctcaggcgggca

SEQ ID NO: 2547427 - DNA, 25 bp, Homo sapien
caggcgggcaggggcaaagccaggg

SEQ ID NO: 2547428 - DNA, 25 bp, Homo sapien
cacggcctttcctcaggcgggcagg

SEQ ID NO: 2547429 - DNA, 25 bp, Homo sapien
ggcgggcaggggcaaagccagggac

SEQ ID NO: 2547430 - DNA, 25 bp, Homo sapien
tgtctctgacactatctggtttgat

SEQ ID NO: 2547431 - DNA, 25 bp, Homo sapien
gggttgaaaggagcaagccccatga

SEQ ID NO: 2547432 - DNA, 25 bp, Homo sapien
tgaaaggagcaagccccatgaatag

SEQ ID NO: 2547433 - DNA, 25 bp, Homo sapien
tagctccatcagaggacataagatg

SEQ ID NO: 2547434 - DNA, 25 bp, Homo sapien
aaagccagcgatggcggccacatca

SEQ ID NO: 2547435 - DNA, 25 bp, Homo sapien
ctgaagaattggcaaagccagcgat

SEQ ID NO: 2547436 - DNA, 25 bp, Homo sapien
tcactgtccatctggtgggtgcatc

SEQ ID NO: 2547437 - DNA, 25 bp, Homo sapien
tctggtgggtgcatcgtgccctgcc

SEQ ID NO: 2547438 - DNA, 25 bp, Homo sapien
acaacacgccaacgtcgagatccag

SEQ ID NO: 2547439 - DNA, 25 bp, Homo sapien
gacaccaggccggtgagtgaccatg

SEQ ID NO: 2547440 - DNA, 25 bp, Homo sapien
tctacacagagaaaggatccgatcc

SEQ ID NO: 2547441 - DNA, 25 bp, Homo sapien
gagatccagcagtctgtgtctacac

SEQ ID NO: 2547442 - DNA, 25 bp, Homo sapien
tgccttcctaaaggtcacagccgaa

SEQ ID NO: 2547443 - DNA, 25 bp, Homo sapien
agatggatgccttcctaaaggtcac

SEQ ID NO: 2547444 - DNA, 25 bp, Homo sapien
cctaaaggtcacagccgaatggaat

SEQ ID NO: 2547445 - DNA, 25 bp, Homo sapien
gatggatgccttcctaaaggtcaca

SEQ ID NO: 2547446 - DNA, 25 bp, Homo sapien
ggcatgtgcaggtacaacacagtca

SEQ ID NO: 2547447 - DNA, 25 bp, Homo sapien
tctgtctgttcatcgtcaatgtggg

SEQ ID NO: 2547448 - DNA, 25 bp, Homo sapien
ttctgtctgttcatcgtcaatgtgg

SEQ ID NO: 2547449 - DNA, 25 bp, Homo sapien
gctcggtttatgcacaggtgccagc

SEQ ID NO: 2547450 - DNA, 25 bp, Homo sapien
ggcagcttgccccgaaactgaacag

SEQ ID NO: 2547451 - DNA, 25 bp, Homo sapien
tggcatttagcagctgcgatgtctc

SEQ ID NO: 2547452 - DNA, 25 bp, Homo sapien
tctcagtggaaagcgcggcacacga

SEQ ID NO: 2547453 - DNA, 25 bp, Homo sapien
aggtagcacccagtcacgcggctct

SEQ ID NO: 2547454 - DNA, 25 bp, Homo sapien
atttggcatttagcagctgcgatgt

SEQ ID NO: 2547455 - DNA, 25 bp, Homo sapien
ggtcaacttctaaagcgcgtctcag

SEQ ID NO: 2547456 - DNA, 25 bp, Homo sapien
gagcagcaggtcaacttctaaagcg

SEQ ID NO: 2547457 - DNA, 25 bp, Homo sapien
ttctaaagcgcgtctcagaccgcct

SEQ ID NO: 2547458 - DNA, 25 bp, Homo sapien
ctggatgacgcagcagcctccactc

SEQ ID NO: 2547459 - DNA, 25 bp, Homo sapien
agccggcgcctcgttttcctcctga

SEQ ID NO: 2547460 - DNA, 25 bp, Homo sapien
aagccggcgcctcgttttcctcctg

SEQ ID NO: 2547461 - DNA, 25 bp, Homo sapien
aaacctccgcattggatcgtcgtgg

SEQ ID NO: 2547462 - DNA, 25 bp, Homo sapien
tggaaatagaaacctccgcattgga

SEQ ID NO: 2547463 - DNA, 25 bp, Homo sapien
tagaaacctccgcattggatcgtcg

SEQ ID NO: 2547464 - DNA, 25 bp, Homo sapien
ggatgagtgacactctcaattgtct

SEQ ID NO: 2547465 - DNA, 25 bp, Homo sapien
gatggaatttttctagaatggccac

SEQ ID NO: 2547466 - DNA, 25 bp, Homo sapien
tcagcacaggtgagttacactgatc

SEQ ID NO: 2547467 - DNA, 25 bp, Homo sapien
ctggtacatcatggactcgtagtgc

SEQ ID NO: 2547468 - DNA, 25 bp, Homo sapien
atggactcgtagtgcatggccctgc

SEQ ID NO: 2547469 - DNA, 25 bp, Homo sapien
gctgtgcccggaatgaacacgtttt

SEQ ID NO: 2547470 - DNA, 25 bp, Homo sapien
gggacgatccacaggaatccacgag

SEQ ID NO: 2547471 - DNA, 25 bp, Homo sapien
agaaaatccatacagctgctgtgcc

SEQ ID NO: 2547472 - DNA, 25 bp, Homo sapien
gaagagcaatctcccctatctcagg

SEQ ID NO: 2547473 - DNA, 25 bp, Homo sapien
cagtgacaggcaagggcctgtctct

SEQ ID NO: 2547474 - DNA, 25 bp, Homo sapien
tgagatccgtacaagggaagctgcc

SEQ ID NO: 2547475 - DNA, 25 bp, Homo sapien
ctgagatccgtacaagggaagctgc

SEQ ID NO: 2547476 - DNA, 25 bp, Homo sapien
tgcagcacacggagccaggagtcca

SEQ ID NO: 2547477 - DNA, 25 bp, Homo sapien
agcctcaatcagcggctgcagcaca

SEQ ID NO: 2547478 - DNA, 25 bp, Homo sapien
atggagcacatctgaacggcccttc

SEQ ID NO: 2547479 - DNA, 25 bp, Homo sapien
acatggagcacatctgaacggccct

SEQ ID NO: 2547480 - DNA, 25 bp, Homo sapien
agcaggcctgtccaccggcacacca

SEQ ID NO: 2547481 - DNA, 25 bp, Homo sapien
gcaggcctgtccaccggcacaccag

SEQ ID NO: 2547482 - DNA, 25 bp, Homo sapien
cttcctcctccaagcactctcccgc

SEQ ID NO: 2547483 - DNA, 25 bp, Homo sapien
tcctccaagcactctcccgcccagg

SEQ ID NO: 2547484 - DNA, 25 bp, Homo sapien
cctcctccaagcactctcccgccca

SEQ ID NO: 2547485 - DNA, 25 bp, Homo sapien
cctccaagcactctcccgcccaggt

SEQ ID NO: 2547486 - DNA, 25 bp, Homo sapien
cagcccacggaaaggtattcagcat

SEQ ID NO: 2547487 - DNA, 25 bp, Homo sapien
tgagaaaacagacacgagcagacgt

SEQ ID NO: 2547488 - DNA, 25 bp, Homo sapien
aaccacatatgctaccagaggactg

SEQ ID NO: 2547489 - DNA, 25 bp, Homo sapien
gctaccgaccagcatgtgagcagtg

SEQ ID NO: 2547490 - DNA, 25 bp, Homo sapien
acagatcaagaagacgaaagacctc

SEQ ID NO: 2547491 - DNA, 25 bp, Homo sapien
ccttatcaccaatagtggggcttct

SEQ ID NO: 2547492 - DNA, 25 bp, Homo sapien
aatgctaataccctgagaccagccc

SEQ ID NO: 2547493 - DNA, 25 bp, Homo sapien
aatagtggggcttctttgccacaga

SEQ ID NO: 2547494 - DNA, 25 bp, Homo sapien
ttgaggcccagcaggaaggcacagg

SEQ ID NO: 2547495 - DNA, 25 bp, Homo sapien
ctagttgaggcccagcaggaaggca

SEQ ID NO: 2547496 - DNA, 25 bp, Homo sapien
aggcccagcaggaaggcacaggcag

SEQ ID NO: 2547497 - DNA, 25 bp, Homo sapien
agttgaggcccagcaggaaggcaca

SEQ ID NO: 2547498 - DNA, 25 bp, Homo sapien
cgacaccagggagacgcgttttctg

SEQ ID NO: 2547499 - DNA, 25 bp, Homo sapien
gttttctgcactgactcctacgctc

SEQ ID NO: 2547500 - DNA, 25 bp, Homo sapien
gactcctacgctcccgcgtggacat

SEQ ID NO: 2547501 - DNA, 25 bp, Homo sapien
gctgagccgctaaggagccggtcta

SEQ ID NO: 2547502 - DNA, 25 bp, Homo sapien
tgaagttcattaggacacagctctt

SEQ ID NO: 2547503 - DNA, 25 bp, Homo sapien
gaagttcattaggacacagctcttg

SEQ ID NO: 2547504 - DNA, 25 bp, Homo sapien
cgttatcataatgctgggtccagtc

SEQ ID NO: 2547505 - DNA, 25 bp, Homo sapien
tagactcgcagacccttcttggatg

SEQ ID NO: 2547506 - DNA, 25 bp, Homo sapien
catcacaagattgacatcagggtcc

SEQ ID NO: 2547507 - DNA, 25 bp, Homo sapien
cagaggtagggccatccctggatgt

SEQ ID NO: 2547508 - DNA, 25 bp, Homo sapien
cagcgagcttggctgttactcttct

SEQ ID NO: 2547509 - DNA, 25 bp, Homo sapien
gcgagcttggctgttactcttctgt

SEQ ID NO: 2547510 - DNA, 25 bp, Homo sapien
catcagcgagcttggctgttactct

SEQ ID NO: 2547511 - DNA, 25 bp, Homo sapien
tccatcagcgagcttggctgttact

SEQ ID NO: 2547512 - DNA, 25 bp, Homo sapien
agaggaatgaacgtccatctgactt

SEQ ID NO: 2547513 - DNA, 25 bp, Homo sapien
aggaatgaacgtccatctgacttcc

SEQ ID NO: 2547514 - DNA, 25 bp, Homo sapien
gaggaatgaacgtccatctgacttc

SEQ ID NO: 2547515 - DNA, 25 bp, Homo sapien
caacagaggaatgaacgtccatctg

SEQ ID NO: 2547516 - DNA, 25 bp, Homo sapien
tctttgatatggagcaggtgttggc

SEQ ID NO: 2547517 - DNA, 25 bp, Homo sapien
tgttggcgaatgcagcaacatcact

SEQ ID NO: 2547518 - DNA, 25 bp, Homo sapien
ccatagacaacgcagatattttgct

SEQ ID NO: 2547519 - DNA, 25 bp, Homo sapien
cactaaggcaagttccaccatagac

SEQ ID NO: 2547520 - DNA, 25 bp, Homo sapien
catcccagggaagcggctggtgacg

SEQ ID NO: 2547521 - DNA, 25 bp, Homo sapien
tgcagcaaaccatgagagactctgg

SEQ ID NO: 2547522 - DNA, 25 bp, Homo sapien
atgagagactctggggacctcgctg

SEQ ID NO: 2547523 - DNA, 25 bp, Homo sapien
aggcggccccaagccatccctggct

SEQ ID NO: 2547524 - DNA, 25 bp, Homo sapien
cctccctgcagccatgccacatgat

SEQ ID NO: 2547525 - DNA, 25 bp, Homo sapien
gtcctccctgcagccatgccacatg

SEQ ID NO: 2547526 - DNA, 25 bp, Homo sapien
ccctgcagccatgccacatgatcca

SEQ ID NO: 2547527 - DNA, 25 bp, Homo sapien
ctgcacaagaaggcccaggctccct

SEQ ID NO: 2547528 - DNA, 25 bp, Homo sapien
gctggcacctcaagagactcagtga

SEQ ID NO: 2547529 - DNA, 25 bp, Homo sapien
ggactccctcagatacaagctgtct

SEQ ID NO: 2547530 - DNA, 25 bp, Homo sapien
catcttggcataaacagcctcggtc

SEQ ID NO: 2547531 - DNA, 25 bp, Homo sapien
tggacaaacgatgcttcaactgcgc

SEQ ID NO: 2547532 - DNA, 25 bp, Homo sapien
cttttgctccccgatgcatttcagt

SEQ ID NO: 2547533 - DNA, 25 bp, Homo sapien
ctcccttttgctccccgatgcattt

SEQ ID NO: 2547534 - DNA, 25 bp, Homo sapien
catttcagtgcaggcctggtgtgct

SEQ ID NO: 2547535 - DNA, 25 bp, Homo sapien
ttgctccccgatgcatttcagtgca

SEQ ID NO: 2547536 - DNA, 25 bp, Homo sapien
ctctgctctccgcttgcctggcccc

SEQ ID NO: 2547537 - DNA, 25 bp, Homo sapien
tcggtgacaaagagtcagctctaaa

SEQ ID NO: 2547538 - DNA, 25 bp, Homo sapien
gctgtgctctcggtgacaaagagtc

SEQ ID NO: 2547539 - DNA, 25 bp, Homo sapien
gggtcagcaacaaggatgattcctc

SEQ ID NO: 2547540 - DNA, 25 bp, Homo sapien
agcccaaatccgcatttacagatga

SEQ ID NO: 2547541 - DNA, 25 bp, Homo sapien
agcaccatgtcactgtcctcagggt

SEQ ID NO: 2547542 - DNA, 25 bp, Homo sapien
attcagcaccatgtcactgtcctca

SEQ ID NO: 2547543 - DNA, 25 bp, Homo sapien
cctgtcttgcgggatttgccacctg

SEQ ID NO: 2547544 - DNA, 25 bp, Homo sapien
gctcctgtcttgcgggatttgccac

SEQ ID NO: 2547545 - DNA, 25 bp, Homo sapien
tcctgtcttgcgggatttgccacct

SEQ ID NO: 2547546 - DNA, 25 bp, Homo sapien
ctgctcctgtcttgcgggatttgcc

SEQ ID NO: 2547547 - DNA, 25 bp, Homo sapien
agatgagtacttctcactggtcctc

SEQ ID NO: 2547548 - DNA, 25 bp, Homo sapien
ccaggagctgacagtgtagtctggg

SEQ ID NO: 2547549 - DNA, 25 bp, Homo sapien
tgtaaaagatgagtacttctcactg

SEQ ID NO: 2547550 - DNA, 25 bp, Homo sapien
cattgtaaaagatgagtacttctca

SEQ ID NO: 2547551 - DNA, 25 bp, Homo sapien
gtggtgctgggcatatttgctgtct

SEQ ID NO: 2547552 - DNA, 25 bp, Homo sapien
cgtggtgctgggcatatttgctgtc

SEQ ID NO: 2547553 - DNA, 25 bp, Homo sapien
catgagatgtgcagaggccaagagc

SEQ ID NO: 2547554 - DNA, 25 bp, Homo sapien
gggtaaatgttactgccgcgcccta

SEQ ID NO: 2547555 - DNA, 25 bp, Homo sapien
tcaggaggatgtgcagtggagccgg

SEQ ID NO: 2547556 - DNA, 25 bp, Homo sapien
gaaacatgaaatgagagcgcgcacg

SEQ ID NO: 2547557 - DNA, 25 bp, Homo sapien
tcccttaacactgaggagcttgacc

SEQ ID NO: 2547558 - DNA, 25 bp, Homo sapien
acactgaggagcttgaccagccaca

SEQ ID NO: 2547559 - DNA, 25 bp, Homo sapien
attcctggtcccctcatcgtcctgg

SEQ ID NO: 2547560 - DNA, 25 bp, Homo sapien
ctgagctgctcccttaacactgagg

SEQ ID NO: 2547561 - DNA, 25 bp, Homo sapien
gaccccgtggcagaactacagttgt

SEQ ID NO: 2547562 - DNA, 25 bp, Homo sapien
ccagccagaagcagcttgaagatac

SEQ ID NO: 2547563 - DNA, 25 bp, Homo sapien
cagcttgaagatacctggtgcgcaa

SEQ ID NO: 2547564 - DNA, 25 bp, Homo sapien
gtgcgcaatgtcctgccgatagccg

SEQ ID NO: 2547565 - DNA, 25 bp, Homo sapien
cagaatccattcaggcgtctgcagg

SEQ ID NO: 2547566 - DNA, 25 bp, Homo sapien
agaatccattcaggcgtctgcaggc

SEQ ID NO: 2547567 - DNA, 25 bp, Homo sapien
ctctccagaatccattcaggcgtct

SEQ ID NO: 2547568 - DNA, 25 bp, Homo sapien
tccagaatccattcaggcgtctgca

SEQ ID NO: 2547569 - DNA, 25 bp, Homo sapien
accactgtctgcatagccaggtcct

SEQ ID NO: 2547570 - DNA, 25 bp, Homo sapien
ccggagggccacaagtgactgcttc

SEQ ID NO: 2547571 - DNA, 25 bp, Homo sapien
taaatgactgggatgtccaccgacc

SEQ ID NO: 2547572 - DNA, 25 bp, Homo sapien
gccaagtggttggtattaaatgact

SEQ ID NO: 2547573 - DNA, 25 bp, Homo sapien
ctgtagaatgaaaatcatgtgtgtc

SEQ ID NO: 2547574 - DNA, 25 bp, Homo sapien
catggtgtatccgtctcctgctctg

SEQ ID NO: 2547575 - DNA, 25 bp, Homo sapien
tggtgtatccgtctcctgctctgta

SEQ ID NO: 2547576 - DNA, 25 bp, Homo sapien
ctgctctgtagaatgaaaatcatgt

SEQ ID NO: 2547577 - DNA, 25 bp, Homo sapien
gattgggaatcacggcgtgtctgtt

SEQ ID NO: 2547578 - DNA, 25 bp, Homo sapien
ctgcggattgggaatcacggcgtgt

SEQ ID NO: 2547579 - DNA, 25 bp, Homo sapien
tgcggattgggaatcacggcgtgtc

SEQ ID NO: 2547580 - DNA, 25 bp, Homo sapien
cggattgggaatcacggcgtgtctg

SEQ ID NO: 2547581 - DNA, 25 bp, Homo sapien
gaatgggaatcacgcgtgtccgttt

SEQ ID NO: 2547582 - DNA, 25 bp, Homo sapien
tgcagaatgggaatcacgcgtgtcc

SEQ ID NO: 2547583 - DNA, 25 bp, Homo sapien
tgggaatcacgcgtgtccgtttcct

SEQ ID NO: 2547584 - DNA, 25 bp, Homo sapien
ggaatcacgcgtgtccgtttcctgc

SEQ ID NO: 2547585 - DNA, 25 bp, Homo sapien
gggaatcacgtgtgtccgtttcctg

SEQ ID NO: 2547586 - DNA, 25 bp, Homo sapien
tgggaatcacgtgtgtccgtttcct

SEQ ID NO: 2547587 - DNA, 25 bp, Homo sapien
agaatgggaatcacgtgtgtccgtt

SEQ ID NO: 2547588 - DNA, 25 bp, Homo sapien
aatgggaatcacgtgtgtccgtttc

SEQ ID NO: 2547589 - DNA, 25 bp, Homo sapien
ctgtagaatgggaatcatggcgtgt

SEQ ID NO: 2547590 - DNA, 25 bp, Homo sapien
tgtagaatgggaatcatggcgtgtc

SEQ ID NO: 2547591 - DNA, 25 bp, Homo sapien
tgcagaatgggaatcacgcgtgtcc

SEQ ID NO: 2547592 - DNA, 25 bp, Homo sapien
gaatgggaatcacgcgtgtccgttt

SEQ ID NO: 2547593 - DNA, 25 bp, Homo sapien
tgggaatcacgcgtgtccgtttcct

SEQ ID NO: 2547594 - DNA, 25 bp, Homo sapien
ggaatcacgcgtgtccgtttcctgc

SEQ ID NO: 2547595 - DNA, 25 bp, Homo sapien
ctgtagaatgggaatcacgtgtgtc

SEQ ID NO: 2547596 - DNA, 25 bp, Homo sapien
tgtagaatgggaatcacgtgtgtcc

SEQ ID NO: 2547597 - DNA, 25 bp, Homo sapien
cctccaggggcacagatgcatctgc

SEQ ID NO: 2547598 - DNA, 25 bp, Homo sapien
ctccaggggcacagatgcatctgca

SEQ ID NO: 2547599 - DNA, 25 bp, Homo sapien
tccaggggcacagatgcatctgcat

SEQ ID NO: 2547600 - DNA, 25 bp, Homo sapien
tgggaagcagcaccgccttcacgat

SEQ ID NO: 2547601 - DNA, 25 bp, Homo sapien
tgagttggacccaagactcgcagct

SEQ ID NO: 2547602 - DNA, 25 bp, Homo sapien
agctcaggcccttgtgagtctcctc

SEQ ID NO: 2547603 - DNA, 25 bp, Homo sapien
ttcacgattccaccaacggctttca

SEQ ID NO: 2547604 - DNA, 25 bp, Homo sapien
acagcagctgaatcccagggtctat

SEQ ID NO: 2547605 - DNA, 25 bp, Homo sapien
caggcacagcagctgaatcccaggg

SEQ ID NO: 2547606 - DNA, 25 bp, Homo sapien
ggcacagcagctgaatcccagggtc

SEQ ID NO: 2547607 - DNA, 25 bp, Homo sapien
gctgaatcccagggtctatgacgtg

SEQ ID NO: 2547608 - DNA, 25 bp, Homo sapien
gattttaatagacacttcgccacag

SEQ ID NO: 2547609 - DNA, 25 bp, Homo sapien
gaatggctgtacacaaaaggactgc

SEQ ID NO: 2547610 - DNA, 25 bp, Homo sapien
cagtgcctcagaagcttcagcatgg

SEQ ID NO: 2547611 - DNA, 25 bp, Homo sapien
gctaatgaccatagggcaagatcct

SEQ ID NO: 2547612 - DNA, 25 bp, Homo sapien
tccgtgctgtgctcaagcgtgctgt

SEQ ID NO: 2547613 - DNA, 25 bp, Homo sapien
catagccctggagcatgactgtagg

SEQ ID NO: 2547614 - DNA, 25 bp, Homo sapien
gagggccgcggaatcagatcatgtc

SEQ ID NO: 2547615 - DNA, 25 bp, Homo sapien
taaaactggattcttcatagccctg

SEQ ID NO: 2547616 - DNA, 25 bp, Homo sapien
tgacctttctgagtacgatgctgag

SEQ ID NO: 2547617 - DNA, 25 bp, Homo sapien
caaggcaaggtactgctcaagacaa

SEQ ID NO: 2547618 - DNA, 25 bp, Homo sapien
gatatgatggacgtggtcacctgca

SEQ ID NO: 2547619 - DNA, 25 bp, Homo sapien
cgatgctgagtattccacgtggaac

SEQ ID NO: 2547620 - DNA, 25 bp, Homo sapien
aagtcaaatgctggtaagaacaggg

SEQ ID NO: 2547621 - DNA, 25 bp, Homo sapien
tccgttaaacacgttgctgccctaa

SEQ ID NO: 2547622 - DNA, 25 bp, Homo sapien
ttacctctcagtggctagtgtcctg

SEQ ID NO: 2547623 - DNA, 25 bp, Homo sapien
aaatatccacccaagccatagctag

SEQ ID NO: 2547624 - DNA, 25 bp, Homo sapien
catactaaaaccgcatcttgacaaa

SEQ ID NO: 2547625 - DNA, 25 bp, Homo sapien
caacatactaaaaccgcatcttgac

SEQ ID NO: 2547626 - DNA, 25 bp, Homo sapien
tactaaaaccgcatcttgacaaaaa

SEQ ID NO: 2547627 - DNA, 25 bp, Homo sapien
aacatactaaaaccgcatcttgaca

SEQ ID NO: 2547628 - DNA, 25 bp, Homo sapien
tagcactggcacatactaaacgttt

SEQ ID NO: 2547629 - DNA, 25 bp, Homo sapien
gaatgaggaagctttagcagagccg

SEQ ID NO: 2547630 - DNA, 25 bp, Homo sapien
tccttcagttcagccggagatgaat

SEQ ID NO: 2547631 - DNA, 25 bp, Homo sapien
ggttccagcgtcaggtctttctgta

SEQ ID NO: 2547632 - DNA, 25 bp, Homo sapien
tttccaagcctgtcgttgagtttgc

SEQ ID NO: 2547633 - DNA, 25 bp, Homo sapien
attgtccgtgcacgtccaccagatc

SEQ ID NO: 2547634 - DNA, 25 bp, Homo sapien
gaaccaaatgcattgtccgtgcacg

SEQ ID NO: 2547635 - DNA, 25 bp, Homo sapien
tcgttgagtttgcttgaaccaaatg

SEQ ID NO: 2547636 - DNA, 25 bp, Homo sapien
tgctaatcactggtggaagaacagc

SEQ ID NO: 2547637 - DNA, 25 bp, Homo sapien
tggagccggctggtagtggccgttc

SEQ ID NO: 2547638 - DNA, 25 bp, Homo sapien
ctggtagtggccgttctgtgacaca

SEQ ID NO: 2547639 - DNA, 25 bp, Homo sapien
tagtggccgttctgtgacacacagc

SEQ ID NO: 2547640 - DNA, 25 bp, Homo sapien
gggtcagagccctcctatgagcctc

SEQ ID NO: 2547641 - DNA, 25 bp, Homo sapien
atgagcctcctcgctgagcacagca

SEQ ID NO: 2547642 - DNA, 25 bp, Homo sapien
ataggggtcagagccctcctatgag

SEQ ID NO: 2547643 - DNA, 25 bp, Homo sapien
gagcctcctcgctgagcacagcact

SEQ ID NO: 2547644 - DNA, 25 bp, Homo sapien
tcttcctctgctaccctttgagtac

SEQ ID NO: 2547645 - DNA, 25 bp, Homo sapien
tgccgtcttcctctgctaccctttg

SEQ ID NO: 2547646 - DNA, 25 bp, Homo sapien
tgcctgccgtcttcctctgctaccc

SEQ ID NO: 2547647 - DNA, 25 bp, Homo sapien
cctgcctgccgtcttcctctgctac

SEQ ID NO: 2547648 - DNA, 25 bp, Homo sapien
ggtgaaagtccctcatgacctcgtc

SEQ ID NO: 2547649 - DNA, 25 bp, Homo sapien
cctgtgtggcaggttgttggcagtt

SEQ ID NO: 2547650 - DNA, 25 bp, Homo sapien
tgctgttgaagtttcgtgggtgaaa

SEQ ID NO: 2547651 - DNA, 25 bp, Homo sapien
gaagttgttgcagaatttggggtcc

SEQ ID NO: 2547652 - DNA, 25 bp, Homo sapien
tttgggagactctcagttggggcaa

SEQ ID NO: 2547653 - DNA, 25 bp, Homo sapien
acattttgggagactctcagttggg

SEQ ID NO: 2547654 - DNA, 25 bp, Homo sapien
taacattttgggagactctcagttg

SEQ ID NO: 2547655 - DNA, 25 bp, Homo sapien
tgggagactctcagttggggcaaac

SEQ ID NO: 2547656 - DNA, 25 bp, Homo sapien
tctggaaaagggcggggctagtgtc

SEQ ID NO: 2547657 - DNA, 25 bp, Homo sapien
tagtgtccttggagcacgtcagctt

SEQ ID NO: 2547658 - DNA, 25 bp, Homo sapien
ccctgtgagaactttcgtatgtgtg

SEQ ID NO: 2547659 - DNA, 25 bp, Homo sapien
gtatcgtcaggagctcctcaccctg

SEQ ID NO: 2547660 - DNA, 25 bp, Homo sapien
cctgccctgtgagaactttcgtatg

SEQ ID NO: 2547661 - DNA, 25 bp, Homo sapien
tgggcaggtgcgtatcgtcaggagc

SEQ ID NO: 2547662 - DNA, 25 bp, Homo sapien
cacgatcataaagcacggcatgcat

SEQ ID NO: 2547663 - DNA, 25 bp, Homo sapien
tgcagggagcggcagtttgtcattt

SEQ ID NO: 2547664 - DNA, 25 bp, Homo sapien
ggaggaaatttcacgatcataaagc

SEQ ID NO: 2547665 - DNA, 25 bp, Homo sapien
cggcatgcatcctgagagccaggca

SEQ ID NO: 2547666 - DNA, 25 bp, Homo sapien
gggctcaccgactgcagccgtattc

SEQ ID NO: 2547667 - DNA, 25 bp, Homo sapien
cagctccatgttctcgggggatttc

SEQ ID NO: 2547668 - DNA, 25 bp, Homo sapien
tggaggtgggcgcagctccatgttc

SEQ ID NO: 2547669 - DNA, 25 bp, Homo sapien
gtttcttgggggctcaccgactgca

SEQ ID NO: 2547670 - DNA, 25 bp, Homo sapien
gcaggcattggaacatgacggagct

SEQ ID NO: 2547671 - DNA, 25 bp, Homo sapien
cgactgtccgtgaaggtgacgctca

SEQ ID NO: 2547672 - DNA, 25 bp, Homo sapien
agatgaacgagctctccctgcgtgc

SEQ ID NO: 2547673 - DNA, 25 bp, Homo sapien
gcagataccatctcagccggcatgg

SEQ ID NO: 2547674 - DNA, 25 bp, Homo sapien
tgttgtcaccctgtactagtccaga

SEQ ID NO: 2547675 - DNA, 25 bp, Homo sapien
gaagtagcctcgctataagcccagg

SEQ ID NO: 2547676 - DNA, 25 bp, Homo sapien
gtttgtagactacagcccagcttgt

SEQ ID NO: 2547677 - DNA, 25 bp, Homo sapien
agaatcccggcatgtcgtggcagcc

SEQ ID NO: 2547678 - DNA, 25 bp, Homo sapien
tgatgcggttaagccactggagcga

SEQ ID NO: 2547679 - DNA, 25 bp, Homo sapien
ttagccaggaacctcgtggagcagc

SEQ ID NO: 2547680 - DNA, 25 bp, Homo sapien
ggccagcacatctgacaggctttag

SEQ ID NO: 2547681 - DNA, 25 bp, Homo sapien
gcaagactttgatgtcacaggacag

SEQ ID NO: 2547682 - DNA, 25 bp, Homo sapien
cagagaagtacccttgagactcagg

SEQ ID NO: 2547683 - DNA, 25 bp, Homo sapien
aggggagtcgactgtcagccacaga

SEQ ID NO: 2547684 - DNA, 25 bp, Homo sapien
ctggagcttgcagagaagtaccctt

SEQ ID NO: 2547685 - DNA, 25 bp, Homo sapien
actccaggggagtcgactgtcagcc

SEQ ID NO: 2547686 - DNA, 25 bp, Homo sapien
agcaccccaggcgattgcatgcgcg

SEQ ID NO: 2547687 - DNA, 25 bp, Homo sapien
accccaggcgattgcatgcgcgtgc

SEQ ID NO: 2547688 - DNA, 25 bp, Homo sapien
caggcgattgcatgcgcgtgctcgc

SEQ ID NO: 2547689 - DNA, 25 bp, Homo sapien
cccaggcgattgcatgcgcgtgctc

SEQ ID NO: 2547690 - DNA, 25 bp, Homo sapien
tgccctgaatactgcagctgcattt

SEQ ID NO: 2547691 - DNA, 25 bp, Homo sapien
tgtgcgcacgttgacccacgcgtgc

SEQ ID NO: 2547692 - DNA, 25 bp, Homo sapien
gcgtgctcgccctctctgagagtcg

SEQ ID NO: 2547693 - DNA, 25 bp, Homo sapien
tcatctatatgtgcgcacgttgacc

SEQ ID NO: 2547694 - DNA, 25 bp, Homo sapien
tgtttgcaggcattggtttttgaat

SEQ ID NO: 2547695 - DNA, 25 bp, Homo sapien
cctgtttgcaggcattggtttttga

SEQ ID NO: 2547696 - DNA, 25 bp, Homo sapien
tctcctgtttgcaggcattggtttt

SEQ ID NO: 2547697 - DNA, 25 bp, Homo sapien
ctctcctgtttgcaggcattggttt

SEQ ID NO: 2547698 - DNA, 25 bp, Homo sapien
tcccttagcctgggcccatgtttct

SEQ ID NO: 2547699 - DNA, 25 bp, Homo sapien
ctgctgccttttgaactggctttcc

SEQ ID NO: 2547700 - DNA, 25 bp, Homo sapien
tgctgccttttgaactggctttccc

SEQ ID NO: 2547701 - DNA, 25 bp, Homo sapien
gtttcttggcattgtctgctgcctt

SEQ ID NO: 2547702 - DNA, 25 bp, Homo sapien
ttcccatttgtactcgatctttctg

SEQ ID NO: 2547703 - DNA, 25 bp, Homo sapien
agagccttctttacaacgtgctgaa

SEQ ID NO: 2547704 - DNA, 25 bp, Homo sapien
ttacaacgtgctgaattcccatttg

SEQ ID NO: 2547705 - DNA, 25 bp, Homo sapien
ttgtactcgatctttctgcatccat

SEQ ID NO: 2547706 - DNA, 25 bp, Homo sapien
aacagggatagttgtcactttgggc

SEQ ID NO: 2547707 - DNA, 25 bp, Homo sapien
gcggtcatttacatagtagcaacag

SEQ ID NO: 2547708 - DNA, 25 bp, Homo sapien
tgaagccctcaccagtatttccctg

SEQ ID NO: 2547709 - DNA, 25 bp, Homo sapien
tgtgtgttcgtaatccaggatgaag

SEQ ID NO: 2547710 - DNA, 25 bp, Homo sapien
ccacgagggccaaagacccacaagt

SEQ ID NO: 2547711 - DNA, 25 bp, Homo sapien
gaatgacaatgggaggccagttgtg

SEQ ID NO: 2547712 - DNA, 25 bp, Homo sapien
cacaagtggtaaaggacaggtggcc

SEQ ID NO: 2547713 - DNA, 25 bp, Homo sapien
aagacccacaagtggtaaaggacag

SEQ ID NO: 2547714 - DNA, 25 bp, Homo sapien
gaccgacaggatgagagccgcattt

SEQ ID NO: 2547715 - DNA, 25 bp, Homo sapien
ctgggacgccagaataagtgagcac

SEQ ID NO: 2547716 - DNA, 25 bp, Homo sapien
gaataagtgagcacgagagaccgac

SEQ ID NO: 2547717 - DNA, 25 bp, Homo sapien
ccgcatttccgctgagacagtgtgg

SEQ ID NO: 2547718 - DNA, 25 bp, Homo sapien
ccgggccttgttgaaaggacctgca

SEQ ID NO: 2547719 - DNA, 25 bp, Homo sapien
agcagctctgacttcccgaacactc

SEQ ID NO: 2547720 - DNA, 25 bp, Homo sapien
ccttgttgaaaggacctgcagcagc

SEQ ID NO: 2547721 - DNA, 25 bp, Homo sapien
cagctctgacttcccgaacactcac

SEQ ID NO: 2547722 - DNA, 25 bp, Homo sapien
tgaggttcccaatggcgtctttcag

SEQ ID NO: 2547723 - DNA, 25 bp, Homo sapien
ccggcttgctttctgcgcagcgtgt

SEQ ID NO: 2547724 - DNA, 25 bp, Homo sapien
ggcttgctttctgcgcagcgtgtgc

SEQ ID NO: 2547725 - DNA, 25 bp, Homo sapien
caatggcgtctttcagcccctgggc

SEQ ID NO: 2547726 - DNA, 25 bp, Homo sapien
acgattctgtccgttaaagggcagc

SEQ ID NO: 2547727 - DNA, 25 bp, Homo sapien
tctgtccgttaaagggcagccactc

SEQ ID NO: 2547728 - DNA, 25 bp, Homo sapien
gattctgtccgttaaagggcagcca

SEQ ID NO: 2547729 - DNA, 25 bp, Homo sapien
atcaaaacgattctgtccgttaaag

SEQ ID NO: 2547730 - DNA, 25 bp, Homo sapien
aagcggacccgctccaggtaggcca

SEQ ID NO: 2547731 - DNA, 25 bp, Homo sapien
gccactgggtgtgcacgcaggtgct

SEQ ID NO: 2547732 - DNA, 25 bp, Homo sapien
ggccagtaggaagcggacccgctcc

SEQ ID NO: 2547733 - DNA, 25 bp, Homo sapien
tctgaaggtcgggtatctgtgagca

SEQ ID NO: 2547734 - DNA, 25 bp, Homo sapien
tggcttcgtgtccagctttccactg

SEQ ID NO: 2547735 - DNA, 25 bp, Homo sapien
actgtgctggtacctcggctgggtc

SEQ ID NO: 2547736 - DNA, 25 bp, Homo sapien
ggcttcgtgtccagctttccactgt

SEQ ID NO: 2547737 - DNA, 25 bp, Homo sapien
ggtacctcggctgggtccacatgca

SEQ ID NO: 2547738 - DNA, 25 bp, Homo sapien
ctcttgaccactaaggagagcctgt

SEQ ID NO: 2547739 - DNA, 25 bp, Homo sapien
cacaaggagcttgttttgtgtcccc

SEQ ID NO: 2547740 - DNA, 25 bp, Homo sapien
ttgcgtggggcagccgtgcatttcc

SEQ ID NO: 2547741 - DNA, 25 bp, Homo sapien
ccttgcgtggggcagccgtgcattt

SEQ ID NO: 2547742 - DNA, 25 bp, Homo sapien
actgatgtcaccacccagtgccttg

SEQ ID NO: 2547743 - DNA, 25 bp, Homo sapien
tggaccgtgtctgcgtctggagcta

SEQ ID NO: 2547744 - DNA, 25 bp, Homo sapien
ccttgagcttcataacacggcactg

SEQ ID NO: 2547745 - DNA, 25 bp, Homo sapien
gtggagttcgtgcagcctcctggct

SEQ ID NO: 2547746 - DNA, 25 bp, Homo sapien
gagcattgcacatcgtagccttgag

SEQ ID NO: 2547747 - DNA, 25 bp, Homo sapien
tttctggtgcgggattgccagtttg

SEQ ID NO: 2547748 - DNA, 25 bp, Homo sapien
catttctggtgcgggattgccagtt

SEQ ID NO: 2547749 - DNA, 25 bp, Homo sapien
tgcgggattgccagtttggtgacgt

SEQ ID NO: 2547750 - DNA, 25 bp, Homo sapien
gattgccagtttggtgacgtggact

SEQ ID NO: 2547751 - DNA, 25 bp, Homo sapien
ggagcaggtcctgtactggggagac

SEQ ID NO: 2547752 - DNA, 25 bp, Homo sapien
ttctcacaatccatgagcgctcaga

SEQ ID NO: 2547753 - DNA, 25 bp, Homo sapien
tcacaatccatgagcgctcagagga

SEQ ID NO: 2547754 - DNA, 25 bp, Homo sapien
ggcttctcacaatccatgagcgctc

SEQ ID NO: 2547755 - DNA, 25 bp, Homo sapien
atgaccagtagaccgggaactgtca

SEQ ID NO: 2547756 - DNA, 25 bp, Homo sapien
aatgaccagtagaccgggaactgtc

SEQ ID NO: 2547757 - DNA, 25 bp, Homo sapien
gcaatgaccagtagaccgggaactg

SEQ ID NO: 2547758 - DNA, 25 bp, Homo sapien
caatgaccagtagaccgggaactgt

SEQ ID NO: 2547759 - DNA, 25 bp, Homo sapien
ggtcttgaccaccaactcgttgatg

SEQ ID NO: 2547760 - DNA, 25 bp, Homo sapien
gcacaggatctcatggccaaagtca

SEQ ID NO: 2547761 - DNA, 25 bp, Homo sapien
ccacgtgggttgtctggccaggtct

SEQ ID NO: 2547762 - DNA, 25 bp, Homo sapien
caaagtcagagcgatgcttgcagct

SEQ ID NO: 2547763 - DNA, 25 bp, Homo sapien
aggccgtcagctccccgtgggcatg

SEQ ID NO: 2547764 - DNA, 25 bp, Homo sapien
gtcagctccccgtgggcatgtgtcc

SEQ ID NO: 2547765 - DNA, 25 bp, Homo sapien
acccatgctgcaactgccggacagg

SEQ ID NO: 2547766 - DNA, 25 bp, Homo sapien
gcatgtgtccctgccggcacccatg

SEQ ID NO: 2547767 - DNA, 25 bp, Homo sapien
tgtgtgtagctgagggtccggccac

SEQ ID NO: 2547768 - DNA, 25 bp, Homo sapien
tttcctgacgtgcagatgcccggga

SEQ ID NO: 2547769 - DNA, 25 bp, Homo sapien
ccccagtggaaacacaatttgtgtg

SEQ ID NO: 2547770 - DNA, 25 bp, Homo sapien
gctgagcaccgcatgttgccttgag

SEQ ID NO: 2547771 - DNA, 25 bp, Homo sapien
ctgtggtgaccgtcctcgggcagat

SEQ ID NO: 2547772 - DNA, 25 bp, Homo sapien
acgtgaagccgtctccaggaagaca

SEQ ID NO: 2547773 - DNA, 25 bp, Homo sapien
cactgcggttcagtgcagggctccc

SEQ ID NO: 2547774 - DNA, 25 bp, Homo sapien
ggtggcctttgctgccgggtcagtg

SEQ ID NO: 2547775 - DNA, 25 bp, Homo sapien
gcacctgatactcccagttggtctc

SEQ ID NO: 2547776 - DNA, 25 bp, Homo sapien
gcttagcctccgcaatcagatgcaa

SEQ ID NO: 2547777 - DNA, 25 bp, Homo sapien
accgggcccgttcaggcatggctgt

SEQ ID NO: 2547778 - DNA, 25 bp, Homo sapien
aaaagcctcgagcacctgatactcc

SEQ ID NO: 2547779 - DNA, 25 bp, Homo sapien
cgtggcccgtgtttgctgtggctgt

SEQ ID NO: 2547780 - DNA, 25 bp, Homo sapien
tgctgtggctgttcgtgtttgccgt

SEQ ID NO: 2547781 - DNA, 25 bp, Homo sapien
ttgctgtggctgttcgtgtttgccg

SEQ ID NO: 2547782 - DNA, 25 bp, Homo sapien
caagtggacgtttatgccggcggca

SEQ ID NO: 2547783 - DNA, 25 bp, Homo sapien
acagacttggccagcgtctggaaca

SEQ ID NO: 2547784 - DNA, 25 bp, Homo sapien
tgagggacctaccacgccctgatat

SEQ ID NO: 2547785 - DNA, 25 bp, Homo sapien
cgtcggagagggcaacacagacttg

SEQ ID NO: 2547786 - DNA, 25 bp, Homo sapien
ttaggcccctttcccgtgagcagca

SEQ ID NO: 2547787 - DNA, 25 bp, Homo sapien
tcctgccttaaccacgggaatcacc

SEQ ID NO: 2547788 - DNA, 25 bp, Homo sapien
atcaccgccaggcagcgggcggttc

SEQ ID NO: 2547789 - DNA, 25 bp, Homo sapien
gcccctttcccgtgagcagcagaag

SEQ ID NO: 2547790 - DNA, 25 bp, Homo sapien
accccgtaggggctcagcatgcatg

SEQ ID NO: 2547791 - DNA, 25 bp, Homo sapien
tgcatgcggatgaagtgccctctgg

SEQ ID NO: 2547792 - DNA, 25 bp, Homo sapien
tgttctcttcggagattggccccag

SEQ ID NO: 2547793 - DNA, 25 bp, Homo sapien
tctcttcggagattggccccagctt

SEQ ID NO: 2547794 - DNA, 25 bp, Homo sapien
ttttagtgtctgtgctgccccagcc

SEQ ID NO: 2547795 - DNA, 25 bp, Homo sapien
atccttgcgcaagggccctgctgac

SEQ ID NO: 2547796 - DNA, 25 bp, Homo sapien
tgctgactcctctgtgtcactccaa

SEQ ID NO: 2547797 - DNA, 25 bp, Homo sapien
ggaagtcttcacgaatttgtatgtc

SEQ ID NO: 2547798 - DNA, 25 bp, Homo sapien
ggattcgaaagagcgtttgtcaaac

SEQ ID NO: 2547799 - DNA, 25 bp, Homo sapien
cttgacttttctggattcgaaagag

SEQ ID NO: 2547800 - DNA, 25 bp, Homo sapien
gacttttctggattcgaaagagcgt

SEQ ID NO: 2547801 - DNA, 25 bp, Homo sapien
tttctggattcgaaagagcgtttgt

SEQ ID NO: 2547802 - DNA, 25 bp, Homo sapien
gaccacaggcgcgcaccactatgcc

SEQ ID NO: 2547803 - DNA, 25 bp, Homo sapien
accacaggcgcgcaccactatgcct

SEQ ID NO: 2547804 - DNA, 25 bp, Homo sapien
gagatccactcgccttggcctccca

SEQ ID NO: 2547805 - DNA, 25 bp, Homo sapien
tgcctggccaatttttgtagtttta

SEQ ID NO: 2547806 - DNA, 25 bp, Homo sapien
aaaagtcaacaacgaggggctgagg

SEQ ID NO: 2547807 - DNA, 25 bp, Homo sapien
ttaaaagtcaacaacgaggggctga

SEQ ID NO: 2547808 - DNA, 25 bp, Homo sapien
aagtcaacaacgaggggctgaggac

SEQ ID NO: 2547809 - DNA, 25 bp, Homo sapien
taaaagtcaacaacgaggggctgag

SEQ ID NO: 2547810 - DNA, 25 bp, Homo sapien
tggtgttcgtggcagcagggaagcc

SEQ ID NO: 2547811 - DNA, 25 bp, Homo sapien
gaagccaggtaccagtgcatgagga

SEQ ID NO: 2547812 - DNA, 25 bp, Homo sapien
gaaccaggacttcgaagacgctggg

SEQ ID NO: 2547813 - DNA, 25 bp, Homo sapien
aggacttggaaccaggacttcgaag

SEQ ID NO: 2547814 - DNA, 25 bp, Homo sapien
cggagcccgggtcgccggcttgcag

SEQ ID NO: 2547815 - DNA, 25 bp, Homo sapien
ccggagcccgggtcgccggcttgca

SEQ ID NO: 2547816 - DNA, 25 bp, Homo sapien
ggagcccgggtcgccggcttgcagc

SEQ ID NO: 2547817 - DNA, 25 bp, Homo sapien
gagcccgggtcgccggcttgcagca

SEQ ID NO: 2547818 - DNA, 25 bp, Homo sapien
ccttgagcccccgagtttgctcggt

SEQ ID NO: 2547819 - DNA, 25 bp, Homo sapien
acgcacccacaaagcgaggaagggc

SEQ ID NO: 2547820 - DNA, 25 bp, Homo sapien
cgagtttgctcggttgagggtgttg

SEQ ID NO: 2547821 - DNA, 25 bp, Homo sapien
cacccacaaagcgaggaagggcagg

SEQ ID NO: 2547822 - DNA, 25 bp, Homo sapien
ctgcgcctcggtctctcctggcacc

SEQ ID NO: 2547823 - DNA, 25 bp, Homo sapien
cctgcgacagcaccgagcggaggat

SEQ ID NO: 2547824 - DNA, 25 bp, Homo sapien
accgagcggaggatgtggctcccca

SEQ ID NO: 2547825 - DNA, 25 bp, Homo sapien
gcgccctgcgacagcaccgagcgga

SEQ ID NO: 2547826 - DNA, 25 bp, Homo sapien
cagttgtgtggtggcagattttgac

SEQ ID NO: 2547827 - DNA, 25 bp, Homo sapien
tgacaagctgctctaaagtttctgc

SEQ ID NO: 2547828 - DNA, 25 bp, Homo sapien
aacttcccggactcgcggcgagagt

SEQ ID NO: 2547829 - DNA, 25 bp, Homo sapien
ctcccttgatcttctgtaggaggtg

SEQ ID NO: 2547830 - DNA, 25 bp, Homo sapien
caaaactatctcagatgggccctgg

SEQ ID NO: 2547831 - DNA, 25 bp, Homo sapien
agtgaactactggaaccgccgtgag

SEQ ID NO: 2547832 - DNA, 25 bp, Homo sapien
gaatttggcgggacactatgtgacc

SEQ ID NO: 2547833 - DNA, 25 bp, Homo sapien
gtgaaccgagagagccccttcagtg

SEQ ID NO: 2547834 - DNA, 25 bp, Homo sapien
agaaaaggttatcagccgctccatg

SEQ ID NO: 2547835 - DNA, 25 bp, Homo sapien
agccgctccatgaatggtacaaaga

SEQ ID NO: 2547836 - DNA, 25 bp, Homo sapien
tgggcctcaggtcatccgaccgaca

SEQ ID NO: 2547837 - DNA, 25 bp, Homo sapien
gtgtggccttatgcagaaaaggtta

SEQ ID NO: 2547838 - DNA, 25 bp, Homo sapien
ttgccacaggccgtctcacccctgc

SEQ ID NO: 2547839 - DNA, 25 bp, Homo sapien
ctggttccctaccaggcgcatctgt

SEQ ID NO: 2547840 - DNA, 25 bp, Homo sapien
taccaggcgcatctgtcctggttcc

SEQ ID NO: 2547841 - DNA, 25 bp, Homo sapien
gggcccattggtcctcccatcatct

SEQ ID NO: 2547842 - DNA, 25 bp, Homo sapien
gacaggtactgggtgttcaaggaca

SEQ ID NO: 2547843 - DNA, 25 bp, Homo sapien
tcaaggacaataacgtagaggaagg

SEQ ID NO: 2547844 - DNA, 25 bp, Homo sapien
tgattgcagtgtggccgctgtccca

SEQ ID NO: 2547845 - DNA, 25 bp, Homo sapien
taataggatggcatgtcgtgggcct

SEQ ID NO: 2547846 - DNA, 25 bp, Homo sapien
agtcctctggtctctgcggcacaga

SEQ ID NO: 2547847 - DNA, 25 bp, Homo sapien
gattcactcccacatagcaggaagt

SEQ ID NO: 2547848 - DNA, 25 bp, Homo sapien
gtgccccctcaaacgtgactcagtg

SEQ ID NO: 2547849 - DNA, 25 bp, Homo sapien
ggtgcagccgatgccactctgcagg

SEQ ID NO: 2547850 - DNA, 25 bp, Homo sapien
tctcacgttggcagggctcactgcg

SEQ ID NO: 2547851 - DNA, 25 bp, Homo sapien
gctcactgcggttttgaagtccaaa

SEQ ID NO: 2547852 - DNA, 25 bp, Homo sapien
gtgccccagtgcaaagccggctgtg

SEQ ID NO: 2547853 - DNA, 25 bp, Homo sapien
ccttgtctgctgagtcgggctctca

SEQ ID NO: 2547854 - DNA, 25 bp, Homo sapien
gatgggattttccacgacaagtgtg

SEQ ID NO: 2547855 - DNA, 25 bp, Homo sapien
cgtttgccgtttttgcctgcgggag

SEQ ID NO: 2547856 - DNA, 25 bp, Homo sapien
tttcttagacttcacatgatgctcc

SEQ ID NO: 2547857 - DNA, 25 bp, Homo sapien
ggtgatggcctggtgattcccacgt

SEQ ID NO: 2547858 - DNA, 25 bp, Homo sapien
caaaacaaacgcaagctagctggat

SEQ ID NO: 2547859 - DNA, 25 bp, Homo sapien
caccgcacccgactgagagtctatg

SEQ ID NO: 2547860 - DNA, 25 bp, Homo sapien
gactccctgtgtgtaaagtaacgaa

SEQ ID NO: 2547861 - DNA, 25 bp, Homo sapien
tggccatctaaaggctgtaagagct

SEQ ID NO: 2547862 - DNA, 25 bp, Homo sapien
tgcatgcctttgacggcaacccctg

SEQ ID NO: 2547863 - DNA, 25 bp, Homo sapien
ccggcctgttagcacctgcatgcct

SEQ ID NO: 2547864 - DNA, 25 bp, Homo sapien
ctgggcctcacagctattggcggag

SEQ ID NO: 2547865 - DNA, 25 bp, Homo sapien
tggcggagcgcctactctgttccag

SEQ ID NO: 2547866 - DNA, 25 bp, Homo sapien
tgtccttgatttgtgctgccgtccc

SEQ ID NO: 2547867 - DNA, 25 bp, Homo sapien
ctctgcgccttctaaaccctcgctc

SEQ ID NO: 2547868 - DNA, 25 bp, Homo sapien
gccttcctgtgttgaaggtttagcc

SEQ ID NO: 2547869 - DNA, 25 bp, Homo sapien
gcggccactgtccttgatttgtgct

SEQ ID NO: 2547870 - DNA, 25 bp, Homo sapien
ccttgagagggcgtgttctccagtg

SEQ ID NO: 2547871 - DNA, 25 bp, Homo sapien
caaagagcctgtcagtgcaaaggcc

SEQ ID NO: 2547872 - DNA, 25 bp, Homo sapien
atcagggagagccttgagagggcgt

SEQ ID NO: 2547873 - DNA, 25 bp, Homo sapien
cagcacttgactagggggcatcagg

SEQ ID NO: 2547874 - DNA, 25 bp, Homo sapien
tgccctcgtacccaagctcggggtc

SEQ ID NO: 2547875 - DNA, 25 bp, Homo sapien
cgtgcctgtgccctcgtacccaagc

SEQ ID NO: 2547876 - DNA, 25 bp, Homo sapien
ctgtgccctcgtacccaagctcggg

SEQ ID NO: 2547877 - DNA, 25 bp, Homo sapien
cgtacccaagctcggggtccggcag

SEQ ID NO: 2547878 - DNA, 25 bp, Homo sapien
gtaacatgtgcaaaagctccccgtc

SEQ ID NO: 2547879 - DNA, 25 bp, Homo sapien
tcagtagatacttgaacgagtcccc

SEQ ID NO: 2547880 - DNA, 25 bp, Homo sapien
gtgaggctgctttgcacacctgtgt

SEQ ID NO: 2547881 - DNA, 25 bp, Homo sapien
gattagccctgcctgaatcagtaga

SEQ ID NO: 2547882 - DNA, 25 bp, Homo sapien
cacgtggagctgtgtgttaacttcc

SEQ ID NO: 2547883 - DNA, 25 bp, Homo sapien
tccaagaagcaacacggttcgttca

SEQ ID NO: 2547884 - DNA, 25 bp, Homo sapien
gcatcacaggtacttggcggccatt

SEQ ID NO: 2547885 - DNA, 25 bp, Homo sapien
gccttggtatagctttgggcacctg

SEQ ID NO: 2547886 - DNA, 25 bp, Homo sapien
tacaggttctgtcatagtacccgaa

SEQ ID NO: 2547887 - DNA, 25 bp, Homo sapien
cactcgatgtacactgggctttgca

SEQ ID NO: 2547888 - DNA, 25 bp, Homo sapien
gtaggacgtacagagagatctgccc

SEQ ID NO: 2547889 - DNA, 25 bp, Homo sapien
tgctaaccgcagtaagaagtgaaag

SEQ ID NO: 2547890 - DNA, 25 bp, Homo sapien
gggcctgccaccacatcctgctaat

SEQ ID NO: 2547891 - DNA, 25 bp, Homo sapien
tacaggggcctgccaccacatcctg

SEQ ID NO: 2547892 - DNA, 25 bp, Homo sapien
caggggcctgccaccacatcctgct

SEQ ID NO: 2547893 - DNA, 25 bp, Homo sapien
ggggcctgccaccacatcctgctaa

SEQ ID NO: 2547894 - DNA, 25 bp, Homo sapien
tcctggctcttgcactgccaggaac

SEQ ID NO: 2547895 - DNA, 25 bp, Homo sapien
tagttggttgaattgtggccccaga

SEQ ID NO: 2547896 - DNA, 25 bp, Homo sapien
tgcgcgggcccaggatcatatgagt

SEQ ID NO: 2547897 - DNA, 25 bp, Homo sapien
ccatggctcattccccaaattcaag

SEQ ID NO: 2547898 - DNA, 25 bp, Homo sapien
tctcccgaattagttttgtccgcgc

SEQ ID NO: 2547899 - DNA, 25 bp, Homo sapien
aagtcagaggttaacctgggcgtca

SEQ ID NO: 2547900 - DNA, 25 bp, Homo sapien
gtgcagtcggtcgttccacttccgc

SEQ ID NO: 2547901 - DNA, 25 bp, Homo sapien
cgttggagttgatccgtcagggtcc

SEQ ID NO: 2547902 - DNA, 25 bp, Homo sapien
gaggcgtggtctccctttgtggtcc

SEQ ID NO: 2547903 - DNA, 25 bp, Homo sapien
tttaggatgggagtgctcacagcac

SEQ ID NO: 2547904 - DNA, 25 bp, Homo sapien
gaagagcctgctgtcgtgagcgtta

SEQ ID NO: 2547905 - DNA, 25 bp, Homo sapien
taggtgtactgacgctcggtgctga

SEQ ID NO: 2547906 - DNA, 25 bp, Homo sapien
cacttgtatgatgcaacattctctt

SEQ ID NO: 2547907 - DNA, 25 bp, Homo sapien
caggaaacagatcatggcggcaggt

SEQ ID NO: 2547908 - DNA, 25 bp, Homo sapien
gatgtaattgtgtggctgcaaaggc

SEQ ID NO: 2547909 - DNA, 25 bp, Homo sapien
ggcagagagccacacttgtatgatg

SEQ ID NO: 2547910 - DNA, 25 bp, Homo sapien
ctcttgaatacagaagacgaaggtg

SEQ ID NO: 2547911 - DNA, 25 bp, Homo sapien
gagaatctcttgaatacagaagacg

SEQ ID NO: 2547912 - DNA, 25 bp, Homo sapien
gggagtcgaggttgcgtcactgagc

SEQ ID NO: 2547913 - DNA, 25 bp, Homo sapien
agtcgaggttgcgtcactgagctcc

SEQ ID NO: 2547914 - DNA, 25 bp, Homo sapien
gccagtgtaacatctcaacagttta

SEQ ID NO: 2547915 - DNA, 25 bp, Homo sapien
tctgccacgttccatgtgtggatct

SEQ ID NO: 2547916 - DNA, 25 bp, Homo sapien
catctcgtttcattctgccacgttc

SEQ ID NO: 2547917 - DNA, 25 bp, Homo sapien
ggatctggccagtgtaacatctcaa

SEQ ID NO: 2547918 - DNA, 25 bp, Homo sapien
ggtcagagcggcgccgcggaagcgc

SEQ ID NO: 2547919 - DNA, 25 bp, Homo sapien
gtcagagcggcgccgcggaagcgca

SEQ ID NO: 2547920 - DNA, 25 bp, Homo sapien
cgccctcgcgcggtcagagcggcgc

SEQ ID NO: 2547921 - DNA, 25 bp, Homo sapien
cgcgcggtcagagcggcgccgcgga

SEQ ID NO: 2547922 - DNA, 25 bp, Homo sapien
gtcacggacgcgacgctgagatgcg

SEQ ID NO: 2547923 - DNA, 25 bp, Homo sapien
ggatgggacgtccagaaccactttc

SEQ ID NO: 2547924 - DNA, 25 bp, Homo sapien
ggtctttcgagtcgtagcgcccgtc

SEQ ID NO: 2547925 - DNA, 25 bp, Homo sapien
ttgctcctggcgcttgcgtgggctt

SEQ ID NO: 2547926 - DNA, 25 bp, Homo sapien
tctcggcgtagacctgcccggtcct

SEQ ID NO: 2547927 - DNA, 25 bp, Homo sapien
agtgaggtccgaatccgctccttct

SEQ ID NO: 2547928 - DNA, 25 bp, Homo sapien
tcctccacggcggagccttagtaat

SEQ ID NO: 2547929 - DNA, 25 bp, Homo sapien
gagccttagtaattgccgctgcctc

SEQ ID NO: 2547930 - DNA, 25 bp, Homo sapien
ctgcggcccacgggcttctgctcag

SEQ ID NO: 2547931 - DNA, 25 bp, Homo sapien
gaacactagtatacctgccacttag

SEQ ID NO: 2547932 - DNA, 25 bp, Homo sapien
tagtatacctgccacttagtttcca

SEQ ID NO: 2547933 - DNA, 25 bp, Homo sapien
cctgccacttagtttccattaaaca

SEQ ID NO: 2547934 - DNA, 25 bp, Homo sapien
cggtgaacactagtatacctgccac

SEQ ID NO: 2547935 - DNA, 25 bp, Homo sapien
cttccactccaggacttggtgtcat

SEQ ID NO: 2547936 - DNA, 25 bp, Homo sapien
ccaaagctcaggagtggtgcgatag

SEQ ID NO: 2547937 - DNA, 25 bp, Homo sapien
tataaaccttgtagaggcggacacc

SEQ ID NO: 2547938 - DNA, 25 bp, Homo sapien
cggacaccgtcgtgttttatgacaa

SEQ ID NO: 2547939 - DNA, 25 bp, Homo sapien
atccacatatacaggtgagggcctg

SEQ ID NO: 2547940 - DNA, 25 bp, Homo sapien
gtaaggccacgtggatcacatggcc

SEQ ID NO: 2547941 - DNA, 25 bp, Homo sapien
ggtaaggccacgtggatcacatggc

SEQ ID NO: 2547942 - DNA, 25 bp, Homo sapien
taaggccacgtggatcacatggcca

SEQ ID NO: 2547943 - DNA, 25 bp, Homo sapien
tccctgcatccttctctaagagcgg

SEQ ID NO: 2547944 - DNA, 25 bp, Homo sapien
gctggtcttccaccctcctggagtt

SEQ ID NO: 2547945 - DNA, 25 bp, Homo sapien
tcccagagcttatggagttacctcc

SEQ ID NO: 2547946 - DNA, 25 bp, Homo sapien
cctggtgtctttgggagaactgagt

SEQ ID NO: 2547947 - DNA, 25 bp, Homo sapien
gatgctaccgttgacctgagttaaa

SEQ ID NO: 2547948 - DNA, 25 bp, Homo sapien
aattaagtacgcgttcaggaagctg

SEQ ID NO: 2547949 - DNA, 25 bp, Homo sapien
gaacacagactataaaggcagcagc

SEQ ID NO: 2547950 - DNA, 25 bp, Homo sapien
taggccttccccttgtgaatctggg

SEQ ID NO: 2547951 - DNA, 25 bp, Homo sapien
tttaaagggcattgatagcatacca

SEQ ID NO: 2547952 - DNA, 25 bp, Homo sapien
tgtaaatactttgtaaacatcagca

SEQ ID NO: 2547953 - DNA, 25 bp, Homo sapien
ttgatagcataccaaacaaaaggca

SEQ ID NO: 2547954 - DNA, 25 bp, Homo sapien
ctgttgtaaccagttagctgttgtg

SEQ ID NO: 2547955 - DNA, 25 bp, Homo sapien
ctatggcgggcttatctggcctgga

SEQ ID NO: 2547956 - DNA, 25 bp, Homo sapien
tactcccaacgaagaggactgcagg

SEQ ID NO: 2547957 - DNA, 25 bp, Homo sapien
taccatcacgtctttgccaagtgtg

SEQ ID NO: 2547958 - DNA, 25 bp, Homo sapien
gaggatccagtccaatgttgggtgc

SEQ ID NO: 2547959 - DNA, 25 bp, Homo sapien
tacatactatgtggcagtttagaca

SEQ ID NO: 2547960 - DNA, 25 bp, Homo sapien
tactggtttattcagctgtttataa

SEQ ID NO: 2547961 - DNA, 25 bp, Homo sapien
gggttgcatcctagcaggtcagata

SEQ ID NO: 2547962 - DNA, 25 bp, Homo sapien
tggtaagtgatacgggtttcactct

SEQ ID NO: 2547963 - DNA, 25 bp, Homo sapien
atccgcgccgggagcccttggctgc

SEQ ID NO: 2547964 - DNA, 25 bp, Homo sapien
tgacggcccgcgtatccgctgccgg

SEQ ID NO: 2547965 - DNA, 25 bp, Homo sapien
gcccttggctgcgtcgcccggcagc

SEQ ID NO: 2547966 - DNA, 25 bp, Homo sapien
ccggcagccgcggtgagtgacggcc

SEQ ID NO: 2547967 - DNA, 25 bp, Homo sapien
ccgtgtgctgcacttcgtggactgg

SEQ ID NO: 2547968 - DNA, 25 bp, Homo sapien
cacttcgtggactggcccattggca

SEQ ID NO: 2547969 - DNA, 25 bp, Homo sapien
tgcctgttgaatgggtgctgccatg

SEQ ID NO: 2547970 - DNA, 25 bp, Homo sapien
tgctggcgccgtgtgctgcacttcg

SEQ ID NO: 2547971 - DNA, 25 bp, Homo sapien
ttgtttcacgcagaaccttcctcag

SEQ ID NO: 2547972 - DNA, 25 bp, Homo sapien
gtttcacgcagaaccttcctcagcg

SEQ ID NO: 2547973 - DNA, 25 bp, Homo sapien
tcacgcagaaccttcctcagcgggt

SEQ ID NO: 2547974 - DNA, 25 bp, Homo sapien
cggggtccccgccagttgcaggctt

SEQ ID NO: 2547975 - DNA, 25 bp, Homo sapien
tccagcacgcgttctgattgttgct

SEQ ID NO: 2547976 - DNA, 25 bp, Homo sapien
cactaagttcactctaatacgacga

SEQ ID NO: 2547977 - DNA, 25 bp, Homo sapien
cgacgaatacggatgaactgctggt

SEQ ID NO: 2547978 - DNA, 25 bp, Homo sapien
cccgttttctagttccaggcctgcg

SEQ ID NO: 2547979 - DNA, 25 bp, Homo sapien
gagttccagtttggccgtgtgttga

SEQ ID NO: 2547980 - DNA, 25 bp, Homo sapien
cagtttggccgtgtgttgactgccc

SEQ ID NO: 2547981 - DNA, 25 bp, Homo sapien
gagactgcagaaacctgtggtgggg

SEQ ID NO: 2547982 - DNA, 25 bp, Homo sapien
ttggccgtgtgttgactgccctcat

SEQ ID NO: 2547983 - DNA, 25 bp, Homo sapien
tggtccacttaggactcttgcccac

SEQ ID NO: 2547984 - DNA, 25 bp, Homo sapien
tgtggtccacttaggactcttgccc

SEQ ID NO: 2547985 - DNA, 25 bp, Homo sapien
cttctgtggtccacttaggactctt

SEQ ID NO: 2547986 - DNA, 25 bp, Homo sapien
tctgtggtccacttaggactcttgc

SEQ ID NO: 2547987 - DNA, 25 bp, Homo sapien
ccttcattaaaaaacacgtggcagt

SEQ ID NO: 2547988 - DNA, 25 bp, Homo sapien
aaaatgcatttgtctgtaatacatg

SEQ ID NO: 2547989 - DNA, 25 bp, Homo sapien
aaaagacatcaggtctaagctgtcc

SEQ ID NO: 2547990 - DNA, 25 bp, Homo sapien
tgtagtgggtggtatctttgcagct

SEQ ID NO: 2547991 - DNA, 25 bp, Homo sapien
caggtaaaggttgtggccagaaagc

SEQ ID NO: 2547992 - DNA, 25 bp, Homo sapien
gaaacgtctttgtgaaggctcttag

SEQ ID NO: 2547993 - DNA, 25 bp, Homo sapien
caggcggtgatcaactttgcaaagc

SEQ ID NO: 2547994 - DNA, 25 bp, Homo sapien
caggtactttctgatggctccacag

SEQ ID NO: 2547995 - DNA, 25 bp, Homo sapien
ctcacctacaagtgggccatcctgg

SEQ ID NO: 2547996 - DNA, 25 bp, Homo sapien
atcctgggatgggtttacagcacct

SEQ ID NO: 2547997 - DNA, 25 bp, Homo sapien
cctgggatgggtttacagcacctgg

SEQ ID NO: 2547998 - DNA, 25 bp, Homo sapien
tctccagcagttaatgccaacagca

SEQ ID NO: 2547999 - DNA, 25 bp, Homo sapien
gctttcagtgcagccgttatgggaa

SEQ ID NO: 2548000 - DNA, 25 bp, Homo sapien
ttgcagtaaacatgcgagcgcaggt

SEQ ID NO: 2548001 - DNA, 25 bp, Homo sapien
catggacatacttcgtggtggcaaa

SEQ ID NO: 2548002 - DNA, 25 bp, Homo sapien
gaataatgtaatcacacccactgag

SEQ ID NO: 2548003 - DNA, 25 bp, Homo sapien
ccccggcgcccgccctgcgccgtca

SEQ ID NO: 2548004 - DNA, 25 bp, Homo sapien
cgccccggcgcccgccctgcgccgt

SEQ ID NO: 2548005 - DNA, 25 bp, Homo sapien
tggagaggcctttgccgccccggcg

SEQ ID NO: 2548006 - DNA, 25 bp, Homo sapien
cttggagaggcctttgccgccccgg

SEQ ID NO: 2548007 - DNA, 25 bp, Homo sapien
cagaggctgcgccacgtgcacgccc

SEQ ID NO: 2548008 - DNA, 25 bp, Homo sapien
aggtggtcgtcgaggccttcaggct

SEQ ID NO: 2548009 - DNA, 25 bp, Homo sapien
gtgcacgccccgaggcaggtggtcg

SEQ ID NO: 2548010 - DNA, 25 bp, Homo sapien
gcccgcctgaggagggttggtggca

SEQ ID NO: 2548011 - DNA, 25 bp, Homo sapien
cagtgcttccatcaacgcaacggga

SEQ ID NO: 2548012 - DNA, 25 bp, Homo sapien
acgggatcagtgttgtgataaggca

SEQ ID NO: 2548013 - DNA, 25 bp, Homo sapien
taccagatggcccaggttgctgtgg

SEQ ID NO: 2548014 - DNA, 25 bp, Homo sapien
ggcccaagactgacgtcagcgctga

SEQ ID NO: 2548015 - DNA, 25 bp, Homo sapien
ggaaacaaaacgtgccacagaggca

SEQ ID NO: 2548016 - DNA, 25 bp, Homo sapien
agtctataagacaggaaattcgata

SEQ ID NO: 2548017 - DNA, 25 bp, Homo sapien
ggaggaccgcaaagggttgccatat

SEQ ID NO: 2548018 - DNA, 25 bp, Homo sapien
tgcgacgcttgctccacacagcatt

SEQ ID NO: 2548019 - DNA, 25 bp, Homo sapien
caaacacagtcacgaggccttagga

SEQ ID NO: 2548020 - DNA, 25 bp, Homo sapien
ggccttaggaacgtctccagagctt

SEQ ID NO: 2548021 - DNA, 25 bp, Homo sapien
tgagctgcacagatgcaaacacctt

SEQ ID NO: 2548022 - DNA, 25 bp, Homo sapien
tccagagcttccgtcatcatccggg

SEQ ID NO: 2548023 - DNA, 25 bp, Homo sapien
agcgctgtgacctggaccaggagct

SEQ ID NO: 2548024 - DNA, 25 bp, Homo sapien
ctgtgacctggaccaggagctgtag

SEQ ID NO: 2548025 - DNA, 25 bp, Homo sapien
gaagcgctgtgacctggaccaggag

SEQ ID NO: 2548026 - DNA, 25 bp, Homo sapien
cgctgtgacctggaccaggagctgt

SEQ ID NO: 2548027 - DNA, 25 bp, Homo sapien
caagaagagaactgcgagcagcagc

SEQ ID NO: 2548028 - DNA, 25 bp, Homo sapien
cttgagcgggagcaagacctccttt

SEQ ID NO: 2548029 - DNA, 25 bp, Homo sapien
cagcaggtgcattttagaaggttcc

SEQ ID NO: 2548030 - DNA, 25 bp, Homo sapien
catttttgctgatggtagagtctcc

SEQ ID NO: 2548031 - DNA, 25 bp, Homo sapien
agtgggcgcctggtgttgcctccca

SEQ ID NO: 2548032 - DNA, 25 bp, Homo sapien
ggctggactgcagtaaggacgcctc

SEQ ID NO: 2548033 - DNA, 25 bp, Homo sapien
ctcgtgggatgtgccaaaccgctgc

SEQ ID NO: 2548034 - DNA, 25 bp, Homo sapien
tctggatcttggtgcaactggcgtg

SEQ ID NO: 2548035 - DNA, 25 bp, Homo sapien
gagtgactctgtgtttaacgcccca

SEQ ID NO: 2548036 - DNA, 25 bp, Homo sapien
catcagctgacggacatgtggtttc

SEQ ID NO: 2548037 - DNA, 25 bp, Homo sapien
taaaaggtttatagaggtgagcagc

SEQ ID NO: 2548038 - DNA, 25 bp, Homo sapien
tcagttagcgtcaggttccgggttc

SEQ ID NO: 2548039 - DNA, 25 bp, Homo sapien
gcgtccgtctgggagtacttttcac

SEQ ID NO: 2548040 - DNA, 25 bp, Homo sapien
taacattagctcaaggttaatgccc

SEQ ID NO: 2548041 - DNA, 25 bp, Homo sapien
tcagcaaaagcatgacgggtgcccg

SEQ ID NO: 2548042 - DNA, 25 bp, Homo sapien
taaggcttcattgcccgcagccatc

SEQ ID NO: 2548043 - DNA, 25 bp, Homo sapien
ggtgcttgagctctgacgcccgggc

SEQ ID NO: 2548044 - DNA, 25 bp, Homo sapien
tctgaaagtgacaagccctgaagtc

SEQ ID NO: 2548045 - DNA, 25 bp, Homo sapien
tcacatacaggatccagtgatcagc

SEQ ID NO: 2548046 - DNA, 25 bp, Homo sapien
ccactgggggattcctttcctcaca

SEQ ID NO: 2548047 - DNA, 25 bp, Homo sapien
agcgttcagtccctccggccctctg

SEQ ID NO: 2548048 - DNA, 25 bp, Homo sapien
gcgttcagtccctccggccctctga

SEQ ID NO: 2548049 - DNA, 25 bp, Homo sapien
ggtgagcgttcagtccctccggccc

SEQ ID NO: 2548050 - DNA, 25 bp, Homo sapien
tgagcgttcagtccctccggccctc

SEQ ID NO: 2548051 - DNA, 25 bp, Homo sapien
aggccgccctctgcttgcgctcttc

SEQ ID NO: 2548052 - DNA, 25 bp, Homo sapien
taggccgccctctgcttgcgctctt

SEQ ID NO: 2548053 - DNA, 25 bp, Homo sapien
ctaggccgccctctgcttgcgctct

SEQ ID NO: 2548054 - DNA, 25 bp, Homo sapien
tcctcgtaccgaggaaccagcggct

SEQ ID NO: 2548055 - DNA, 25 bp, Homo sapien
agctcgtgccgctgcaactcaggtg

SEQ ID NO: 2548056 - DNA, 25 bp, Homo sapien
cccagcttcagttagcattcggagg

SEQ ID NO: 2548057 - DNA, 25 bp, Homo sapien
tgctggagagctcgtgccgctgcaa

SEQ ID NO: 2548058 - DNA, 25 bp, Homo sapien
agcagaaactcccaagaccctcgca

SEQ ID NO: 2548059 - DNA, 25 bp, Homo sapien
agaaactcccaagaccctcgcagcc

SEQ ID NO: 2548060 - DNA, 25 bp, Homo sapien
actcccaagaccctcgcagcctcac

SEQ ID NO: 2548061 - DNA, 25 bp, Homo sapien
caacagcagaaactcccaagaccct

SEQ ID NO: 2548062 - DNA, 25 bp, Homo sapien
caggagcagtgtgaaggcctgtcca

SEQ ID NO: 2548063 - DNA, 25 bp, Homo sapien
gtgtgaaggcctgtccagttttccc

SEQ ID NO: 2548064 - DNA, 25 bp, Homo sapien
actttcaggagcagtgtgaaggcct

SEQ ID NO: 2548065 - DNA, 25 bp, Homo sapien
gagcagtgtgaaggcctgtccagtt

SEQ ID NO: 2548066 - DNA, 25 bp, Homo sapien
ctgcacgtcgatgcctcgcgcggtg

SEQ ID NO: 2548067 - DNA, 25 bp, Homo sapien
gcgcggtggcgtccgtgctgatgag

SEQ ID NO: 2548068 - DNA, 25 bp, Homo sapien
tactggggggcgtcgtagttcacca

SEQ ID NO: 2548069 - DNA, 25 bp, Homo sapien
tgcacgtaggttctcaggtactggg

SEQ ID NO: 2548070 - DNA, 25 bp, Homo sapien
ctggccaggcccgtagcgcgaggag

SEQ ID NO: 2548071 - DNA, 25 bp, Homo sapien
ccaggcccgtagcgcgaggagaact

SEQ ID NO: 2548072 - DNA, 25 bp, Homo sapien
ggcccgtagcgcgaggagaactcag

SEQ ID NO: 2548073 - DNA, 25 bp, Homo sapien
acacccccaaaagcttgcaccagca

SEQ ID NO: 2548074 - DNA, 25 bp, Homo sapien
gagttctctcgggagttagtgaagc

SEQ ID NO: 2548075 - DNA, 25 bp, Homo sapien
tagtgaagcagagaaccctcgagaa

SEQ ID NO: 2548076 - DNA, 25 bp, Homo sapien
acgaccagcggcttagagctgaggc

SEQ ID NO: 2548077 - DNA, 25 bp, Homo sapien
ccaggtgcaggacgaccagcggctt

SEQ ID NO: 2548078 - DNA, 25 bp, Homo sapien
ttaggggccccaggttcccagtgca

SEQ ID NO: 2548079 - DNA, 25 bp, Homo sapien
tccccgtccccatctgtatcttcca

SEQ ID NO: 2548080 - DNA, 25 bp, Homo sapien
ccaacaggaaaggcatacttccccg

SEQ ID NO: 2548081 - DNA, 25 bp, Homo sapien
cccgaatccccgtccccatctgtat

SEQ ID NO: 2548082 - DNA, 25 bp, Homo sapien
caggaaaggcatacttccccgaatc

SEQ ID NO: 2548083 - DNA, 25 bp, Homo sapien
agggttctgggtcagagtagctgag

SEQ ID NO: 2548084 - DNA, 25 bp, Homo sapien
tcagggttctgggtcagagtagctg

SEQ ID NO: 2548085 - DNA, 25 bp, Homo sapien
cagggttctgggtcagagtagctga

SEQ ID NO: 2548086 - DNA, 25 bp, Homo sapien
ctgtggagaaaagccggggctggtg

SEQ ID NO: 2548087 - DNA, 25 bp, Homo sapien
tgcggttctgtgcaccagagctcaa

SEQ ID NO: 2548088 - DNA, 25 bp, Homo sapien
gttctgtgcaccagagctcaagcca

SEQ ID NO: 2548089 - DNA, 25 bp, Homo sapien
gtgggtccagctcacgtgacagtac

SEQ ID NO: 2548090 - DNA, 25 bp, Homo sapien
cacgtgacagtacgatgcggttctg

SEQ ID NO: 2548091 - DNA, 25 bp, Homo sapien
ggagagctgtgtgcagaggactctg

SEQ ID NO: 2548092 - DNA, 25 bp, Homo sapien
agcacctgggcgtgctgctggatac

SEQ ID NO: 2548093 - DNA, 25 bp, Homo sapien
gaggactctgctcaggggaggccag

SEQ ID NO: 2548094 - DNA, 25 bp, Homo sapien
ctgggcattaaggaaggagagctgt

SEQ ID NO: 2548095 - DNA, 25 bp, Homo sapien
gcagccaggactgatgcatgctgtc

SEQ ID NO: 2548096 - DNA, 25 bp, Homo sapien
aatcatccggtcagcctcgtcgata

SEQ ID NO: 2548097 - DNA, 25 bp, Homo sapien
gggtcctcgctctggaaggcggccg

SEQ ID NO: 2548098 - DNA, 25 bp, Homo sapien
ctgccttcgctggagcagggcacag

SEQ ID NO: 2548099 - DNA, 25 bp, Homo sapien
ccgggactgggtggcgcggccctga

SEQ ID NO: 2548100 - DNA, 25 bp, Homo sapien
cgcggccctgagctcaaagcccagg

SEQ ID NO: 2548101 - DNA, 25 bp, Homo sapien
gtggcgcggccctgagctcaaagcc

SEQ ID NO: 2548102 - DNA, 25 bp, Homo sapien
cagggagcccgggactgggtggcgc

SEQ ID NO: 2548103 - DNA, 25 bp, Homo sapien
tcctggggtctggtcgatgtggtcc

SEQ ID NO: 2548104 - DNA, 25 bp, Homo sapien
gcggccgggggtggctaccacgatg

SEQ ID NO: 2548105 - DNA, 25 bp, Homo sapien
gggtggctaccacgatgtcagccaa

SEQ ID NO: 2548106 - DNA, 25 bp, Homo sapien
tggctaccacgatgtcagccaagca

SEQ ID NO: 2548107 - DNA, 25 bp, Homo sapien
ctgaaaaacccgcaccctgacacaa

SEQ ID NO: 2548108 - DNA, 25 bp, Homo sapien
tttctcaagggcttccggatagcaa

SEQ ID NO: 2548109 - DNA, 25 bp, Homo sapien
gcttccggatagcaagacgctgcct

SEQ ID NO: 2548110 - DNA, 25 bp, Homo sapien
agcagctcgagagaaggaagctttc

SEQ ID NO: 2548111 - DNA, 25 bp, Homo sapien
taaccagggagactctcagaggtgt

SEQ ID NO: 2548112 - DNA, 25 bp, Homo sapien
gtggcatctgtgtagatgttgaaaa

SEQ ID NO: 2548113 - DNA, 25 bp, Homo sapien
catctgtgtagatgttgaaaacttt

SEQ ID NO: 2548114 - DNA, 25 bp, Homo sapien
aaccagggagactctcagaggtgtg

SEQ ID NO: 2548115 - DNA, 25 bp, Homo sapien
cgggcggtgccacgctccaggtcta

SEQ ID NO: 2548116 - DNA, 25 bp, Homo sapien
acgctccaggtctagggtccacata

SEQ ID NO: 2548117 - DNA, 25 bp, Homo sapien
caaaaaggaccccagatctaatctg

SEQ ID NO: 2548118 - DNA, 25 bp, Homo sapien
tgatcgctgtgcactcagcagggaa

SEQ ID NO: 2548119 - DNA, 25 bp, Homo sapien
gatgtggcagaccactctcgaaagc

SEQ ID NO: 2548120 - DNA, 25 bp, Homo sapien
ggcagcacaaccagggcacggatgt

SEQ ID NO: 2548121 - DNA, 25 bp, Homo sapien
agggcacggatgtggcagaccactc

SEQ ID NO: 2548122 - DNA, 25 bp, Homo sapien
tggcagaccactctcgaaagcaggg

SEQ ID NO: 2548123 - DNA, 25 bp, Homo sapien
gcctgcgtcagcaaggctgttacct

SEQ ID NO: 2548124 - DNA, 25 bp, Homo sapien
gcgtcagcaaggctgttacctgtcc

SEQ ID NO: 2548125 - DNA, 25 bp, Homo sapien
gagcgcctgcgtcagcaaggctgtt

SEQ ID NO: 2548126 - DNA, 25 bp, Homo sapien
agcgcctgcgtcagcaaggctgtta

SEQ ID NO: 2548127 - DNA, 25 bp, Homo sapien
tgcaccacagggatgacgaaggcca

SEQ ID NO: 2548128 - DNA, 25 bp, Homo sapien
ctgcaccacagggatgacgaaggcc

SEQ ID NO: 2548129 - DNA, 25 bp, Homo sapien
cagaggtcgctaggccggtagccac

SEQ ID NO: 2548130 - DNA, 25 bp, Homo sapien
gtcgctaggccggtagccacctctg

SEQ ID NO: 2548131 - DNA, 25 bp, Homo sapien
gaaacacagaggtcgctaggccggt

SEQ ID NO: 2548132 - DNA, 25 bp, Homo sapien
acacagaggtcgctaggccggtagc

SEQ ID NO: 2548133 - DNA, 25 bp, Homo sapien
tcgataggaaccaggtcttcggtga

SEQ ID NO: 2548134 - DNA, 25 bp, Homo sapien
tcaggatggacgtcagggatgtcct

SEQ ID NO: 2548135 - DNA, 25 bp, Homo sapien
aaagtaggacgagatgccgtgtgcc

SEQ ID NO: 2548136 - DNA, 25 bp, Homo sapien
ttcggtgacattccttctgacacag

SEQ ID NO: 2548137 - DNA, 25 bp, Homo sapien
tcccctggcgcctcctcgttgcttt

SEQ ID NO: 2548138 - DNA, 25 bp, Homo sapien
tcagcaccgagtcgccggcgcccca

SEQ ID NO: 2548139 - DNA, 25 bp, Homo sapien
acacccacccggcagcgcgtcagca

SEQ ID NO: 2548140 - DNA, 25 bp, Homo sapien
ccccagagggagcccgctcgccccg

SEQ ID NO: 2548141 - DNA, 25 bp, Homo sapien
cgcgtcagcaccgagtcgccggcgc

SEQ ID NO: 2548142 - DNA, 25 bp, Homo sapien
ttccgtcgctttccctgcggcgcct

SEQ ID NO: 2548143 - DNA, 25 bp, Homo sapien
tcggtcgatgcagccgcctcggtct

SEQ ID NO: 2548144 - DNA, 25 bp, Homo sapien
cctggtcgccggctcggtcgatgca

SEQ ID NO: 2548145 - DNA, 25 bp, Homo sapien
ccggctccgcgtcgttcacccgccg

SEQ ID NO: 2548146 - DNA, 25 bp, Homo sapien
ccagccgcacgcctgggactcgggc

SEQ ID NO: 2548147 - DNA, 25 bp, Homo sapien
agccgcacgcctgggactcgggcgt

SEQ ID NO: 2548148 - DNA, 25 bp, Homo sapien
cagccgcacgcctgggactcgggcg

SEQ ID NO: 2548149 - DNA, 25 bp, Homo sapien
gcggctgccggacagtgaagtcaca

SEQ ID NO: 2548150 - DNA, 25 bp, Homo sapien
gagaatcagcagtcgtttcccgagc

SEQ ID NO: 2548151 - DNA, 25 bp, Homo sapien
gaagtcacagctacatccgtaatga

SEQ ID NO: 2548152 - DNA, 25 bp, Homo sapien
aattggcgttgaggaaatcagctgc

SEQ ID NO: 2548153 - DNA, 25 bp, Homo sapien
ggtctccaacggcgcgggctccact

SEQ ID NO: 2548154 - DNA, 25 bp, Homo sapien
gccggtctccaacggcgcgggctcc

SEQ ID NO: 2548155 - DNA, 25 bp, Homo sapien
ccggtctccaacggcgcgggctcca

SEQ ID NO: 2548156 - DNA, 25 bp, Homo sapien
cggtctccaacggcgcgggctccac

SEQ ID NO: 2548157 - DNA, 25 bp, Homo sapien
gcacggccccaggcctcagttgtcc

SEQ ID NO: 2548158 - DNA, 25 bp, Homo sapien
ctgggagggtggcacggccccaggc

SEQ ID NO: 2548159 - DNA, 25 bp, Homo sapien
gtggcacggccccaggcctcagttg

SEQ ID NO: 2548160 - DNA, 25 bp, Homo sapien
cggccccaggcctcagttgtcccat

SEQ ID NO: 2548161 - DNA, 25 bp, Homo sapien
tctgggggctcgtggtccgagttct

SEQ ID NO: 2548162 - DNA, 25 bp, Homo sapien
acctcgggaagctccccgttcgctg

SEQ ID NO: 2548163 - DNA, 25 bp, Homo sapien
gtctgtctcgatggcgcccctcgaa

SEQ ID NO: 2548164 - DNA, 25 bp, Homo sapien
gggaagctccccgttcgctgtggcc

SEQ ID NO: 2548165 - DNA, 25 bp, Homo sapien
agactcgttgctgacttctttgggc

SEQ ID NO: 2548166 - DNA, 25 bp, Homo sapien
gaagactcgttgctgacttctttgg

SEQ ID NO: 2548167 - DNA, 25 bp, Homo sapien
gttctgggaagactcgttgctgact

SEQ ID NO: 2548168 - DNA, 25 bp, Homo sapien
ttctgggaagactcgttgctgactt

SEQ ID NO: 2548169 - DNA, 25 bp, Homo sapien
cgtgggtgtctaggcagccgcccat

SEQ ID NO: 2548170 - DNA, 25 bp, Homo sapien
ccagagcttgggcagtgctcacgtg

SEQ ID NO: 2548171 - DNA, 25 bp, Homo sapien
cagtgctcacgtgggtgtctaggca

SEQ ID NO: 2548172 - DNA, 25 bp, Homo sapien
tttcattcgtttccccagagcttgg

SEQ ID NO: 2548173 - DNA, 25 bp, Homo sapien
ttgttctcgccagatgtgcacgccc

SEQ ID NO: 2548174 - DNA, 25 bp, Homo sapien
caagggttgcccacgatggctttgt

SEQ ID NO: 2548175 - DNA, 25 bp, Homo sapien
cacgtgcggtttccgaggtgaatca

SEQ ID NO: 2548176 - DNA, 25 bp, Homo sapien
gtgaatcagcatttctggaaacctg

SEQ ID NO: 2548177 - DNA, 25 bp, Homo sapien
tggacgagggtccccaggaacgctg

SEQ ID NO: 2548178 - DNA, 25 bp, Homo sapien
ggacgagggtccccaggaacgctgc

SEQ ID NO: 2548179 - DNA, 25 bp, Homo sapien
gctggacgagggtccccaggaacgc

SEQ ID NO: 2548180 - DNA, 25 bp, Homo sapien
ctggacgagggtccccaggaacgct

SEQ ID NO: 2548181 - DNA, 25 bp, Homo sapien
caaaccccggatgtcggccaggacg

SEQ ID NO: 2548182 - DNA, 25 bp, Homo sapien
gtgagactggcaggtggccccaaac

SEQ ID NO: 2548183 - DNA, 25 bp, Homo sapien
gaatcacgtgtccagcacgggcagt

SEQ ID NO: 2548184 - DNA, 25 bp, Homo sapien
ggccaggacgtctgcggcataacct

SEQ ID NO: 2548185 - DNA, 25 bp, Homo sapien
tgagtggggcgtgggcttgaggggc

SEQ ID NO: 2548186 - DNA, 25 bp, Homo sapien
agtggggcgtgggcttgaggggcat

SEQ ID NO: 2548187 - DNA, 25 bp, Homo sapien
ctgagtggggcgtgggcttgagggg

SEQ ID NO: 2548188 - DNA, 25 bp, Homo sapien
gagtggggcgtgggcttgaggggca

SEQ ID NO: 2548189 - DNA, 25 bp, Homo sapien
tctgggcctgtagccaagaggcccc

SEQ ID NO: 2548190 - DNA, 25 bp, Homo sapien
ggagctcggagccacccgggccctc

SEQ ID NO: 2548191 - DNA, 25 bp, Homo sapien
cgttctgggcctgtagccaagaggc

SEQ ID NO: 2548192 - DNA, 25 bp, Homo sapien
gccgttctgggcctgtagccaagag

SEQ ID NO: 2548193 - DNA, 25 bp, Homo sapien
gagcccgccattcccgctgcccgtg

SEQ ID NO: 2548194 - DNA, 25 bp, Homo sapien
cgccattcccgctgcccgtgagccc

SEQ ID NO: 2548195 - DNA, 25 bp, Homo sapien
ccgccattcccgctgcccgtgagcc

SEQ ID NO: 2548196 - DNA, 25 bp, Homo sapien
cccggagcccgccattcccgctgcc

SEQ ID NO: 2548197 - DNA, 25 bp, Homo sapien
actgtcttcaacaatccagaaacct

SEQ ID NO: 2548198 - DNA, 25 bp, Homo sapien
tcttcaacaatccagaaacctccag

SEQ ID NO: 2548199 - DNA, 25 bp, Homo sapien
ctactcctggatgcgcatgtccacc

SEQ ID NO: 2548200 - DNA, 25 bp, Homo sapien
ctcctggatgcgcatgtccacccca

SEQ ID NO: 2548201 - DNA, 25 bp, Homo sapien
tttgttgcctagaatgtgaaagtaa

SEQ ID NO: 2548202 - DNA, 25 bp, Homo sapien
gagagatggcggctttctcctcctt

SEQ ID NO: 2548203 - DNA, 25 bp, Homo sapien
gaggggccatgggagagaaacaggg

SEQ ID NO: 2548204 - DNA, 25 bp, Homo sapien
ctttttgttgcctagaatgtgaaag

SEQ ID NO: 2548205 - DNA, 25 bp, Homo sapien
gagtggcactgcagggtcgtggggt

SEQ ID NO: 2548206 - DNA, 25 bp, Homo sapien
tttgagtggcactgcagggtcgtgg

SEQ ID NO: 2548207 - DNA, 25 bp, Homo sapien
ttgagtggcactgcagggtcgtggg

SEQ ID NO: 2548208 - DNA, 25 bp, Homo sapien
ctttgagtggcactgcagggtcgtg

SEQ ID NO: 2548209 - DNA, 25 bp, Homo sapien
ggaggctgcacgccgggtctatttc

SEQ ID NO: 2548210 - DNA, 25 bp, Homo sapien
ctgcacgccgggtctatttccagag

SEQ ID NO: 2548211 - DNA, 25 bp, Homo sapien
cgtggggaggctgcacgccgggtct

SEQ ID NO: 2548212 - DNA, 25 bp, Homo sapien
tgggctgatgggttgctgggctccg

SEQ ID NO: 2548213 - DNA, 25 bp, Homo sapien
agacagcagcgttcacgcccaggac

SEQ ID NO: 2548214 - DNA, 25 bp, Homo sapien
acagcagcgttcacgcccaggacca

SEQ ID NO: 2548215 - DNA, 25 bp, Homo sapien
cagacagcagcgttcacgcccagga

SEQ ID NO: 2548216 - DNA, 25 bp, Homo sapien
cagcagcgttcacgcccaggaccat

SEQ ID NO: 2548217 - DNA, 25 bp, Homo sapien
tgcctctcctgcattccgtgtctgg

SEQ ID NO: 2548218 - DNA, 25 bp, Homo sapien
ttgtgcgtaaatgccgttctcagag

SEQ ID NO: 2548219 - DNA, 25 bp, Homo sapien
ccgtgtctggcatcttgtgtcgttg

SEQ ID NO: 2548220 - DNA, 25 bp, Homo sapien
tctctctcagcgagtgtcctccgtg

SEQ ID NO: 2548221 - DNA, 25 bp, Homo sapien
gagggcctgtgggtctcggggtgta

SEQ ID NO: 2548222 - DNA, 25 bp, Homo sapien
tctcggggtgtacactcgttccggc

SEQ ID NO: 2548223 - DNA, 25 bp, Homo sapien
cctgtgggtctcggggtgtacactc

SEQ ID NO: 2548224 - DNA, 25 bp, Homo sapien
tgggtctcggggtgtacactcgttc

SEQ ID NO: 2548225 - DNA, 25 bp, Homo sapien
gggtgcacgtggacaccacggccct

SEQ ID NO: 2548226 - DNA, 25 bp, Homo sapien
cctgaaaggtctcgtgttgggcact

SEQ ID NO: 2548227 - DNA, 25 bp, Homo sapien
acaccacggccctgaaaggtctcgt

SEQ ID NO: 2548228 - DNA, 25 bp, Homo sapien
aggtctcgtgttgggcacttccagg

SEQ ID NO: 2548229 - DNA, 25 bp, Homo sapien
agcccctgcatagcggccgccttgg

SEQ ID NO: 2548230 - DNA, 25 bp, Homo sapien
tggaggcgggcggtgagcgctgggt

SEQ ID NO: 2548231 - DNA, 25 bp, Homo sapien
cttccaagcccctgcatagcggccg

SEQ ID NO: 2548232 - DNA, 25 bp, Homo sapien
aggcgggcggtgagcgctgggtgct

SEQ ID NO: 2548233 - DNA, 25 bp, Homo sapien
ctctgagcactcccaggtgcacagg

SEQ ID NO: 2548234 - DNA, 25 bp, Homo sapien
cccaggtgcacaggttccgcagggt

SEQ ID NO: 2548235 - DNA, 25 bp, Homo sapien
ggagggggaaagccttgactctgag

SEQ ID NO: 2548236 - DNA, 25 bp, Homo sapien
caagtatgggcgtctcctatggaaa

SEQ ID NO: 2548237 - DNA, 25 bp, Homo sapien
cttatctacaggacaagcaccgcgg

SEQ ID NO: 2548238 - DNA, 25 bp, Homo sapien
tttgtccccgagcaggtaactgtgc

SEQ ID NO: 2548239 - DNA, 25 bp, Homo sapien
cagtttaattaactttggccgccag

SEQ ID NO: 2548240 - DNA, 25 bp, Homo sapien
gatgggtctgtgtccctaggccctg

SEQ ID NO: 2548241 - DNA, 25 bp, Homo sapien
aggaaccggcctgacctacaggaag

SEQ ID NO: 2548242 - DNA, 25 bp, Homo sapien
ccctgtgtccatgcactggtgggac

SEQ ID NO: 2548243 - DNA, 25 bp, Homo sapien
ccctgggtctcggtggcctttgatt

SEQ ID NO: 2548244 - DNA, 25 bp, Homo sapien
tgctgagcctgcatgaagacgcgtg

SEQ ID NO: 2548245 - DNA, 25 bp, Homo sapien
tccacggggttctgtcatcctgact

SEQ ID NO: 2548246 - DNA, 25 bp, Homo sapien
tggcccatttgaccggctcggctca

SEQ ID NO: 2548247 - DNA, 25 bp, Homo sapien
caggccggcgtctgcagtgtagaca

SEQ ID NO: 2548248 - DNA, 25 bp, Homo sapien
ctcctgcggagtccacggagctcgg

SEQ ID NO: 2548249 - DNA, 25 bp, Homo sapien
tgtgctgtgccggtgttgcgctgtg

SEQ ID NO: 2548250 - DNA, 25 bp, Homo sapien
gtgtccggtgcaggcgccgtcctct

SEQ ID NO: 2548251 - DNA, 25 bp, Homo sapien
tgtgcagcgtcgacgctgtcccggc

SEQ ID NO: 2548252 - DNA, 25 bp, Homo sapien
ggctgcttgcggctctggactattg

SEQ ID NO: 2548253 - DNA, 25 bp, Homo sapien
taaggccggtgtgagtattttactg

SEQ ID NO: 2548254 - DNA, 25 bp, Homo sapien
gctgcccctgacttgagggctcacg

SEQ ID NO: 2548255 - DNA, 25 bp, Homo sapien
ggactattgtgaataaggccggtgt

SEQ ID NO: 2548256 - DNA, 25 bp, Homo sapien
acccatggtggctccaagtgcccgt

SEQ ID NO: 2548257 - DNA, 25 bp, Homo sapien
cccgtgctgcccgtgggtgcttcag

SEQ ID NO: 2548258 - DNA, 25 bp, Homo sapien
tccgtgtgctcgttggccacgcaca

SEQ ID NO: 2548259 - DNA, 25 bp, Homo sapien
tgcctgctggcgtcgtgcctttccg

SEQ ID NO: 2548260 - DNA, 25 bp, Homo sapien
aggggctcggggatagcacgtgtcc

SEQ ID NO: 2548261 - DNA, 25 bp, Homo sapien
tagcacgtgtccagcggggcaggtc

SEQ ID NO: 2548262 - DNA, 25 bp, Homo sapien
agctctgcacctcggaggactcggg

SEQ ID NO: 2548263 - DNA, 25 bp, Homo sapien
ggccgttctgacgatggactgaggg

SEQ ID NO: 2548264 - DNA, 25 bp, Homo sapien
gaagcaggcctgctattaagtttta

SEQ ID NO: 2548265 - DNA, 25 bp, Homo sapien
ctgtgatgcgtgtgtcttgtatgga

SEQ ID NO: 2548266 - DNA, 25 bp, Homo sapien
cacaggagtgctcagtactacttaa

SEQ ID NO: 2548267 - DNA, 25 bp, Homo sapien
caggcagggttgaaggtcgcaggtt

SEQ ID NO: 2548268 - DNA, 25 bp, Homo sapien
ggctgggcgccaataaaactgtatt

SEQ ID NO: 2548269 - DNA, 25 bp, Homo sapien
gctgcctaatcctctctttatttgg

SEQ ID NO: 2548270 - DNA, 25 bp, Homo sapien
tatttggtctctgctgaagcagtcg

SEQ ID NO: 2548271 - DNA, 25 bp, Homo sapien
agtcgtgccagcctcctagacacgg

SEQ ID NO: 2548272 - DNA, 25 bp, Homo sapien
gacttaggtcttggttggagggctg

SEQ ID NO: 2548273 - DNA, 25 bp, Homo sapien
ctgcattatgatgtgtgacttaggt

SEQ ID NO: 2548274 - DNA, 25 bp, Homo sapien
tatgatgtgtgacttaggtcttggt

SEQ ID NO: 2548275 - DNA, 25 bp, Homo sapien
agggctgagcggccgcaagtgctgg

SEQ ID NO: 2548276 - DNA, 25 bp, Homo sapien
aaggcacgtgtttgagttggcatca

SEQ ID NO: 2548277 - DNA, 25 bp, Homo sapien
gtcctggccgcacatagagccctgt

SEQ ID NO: 2548278 - DNA, 25 bp, Homo sapien
cctggccaggagataccgtggagaa

SEQ ID NO: 2548279 - DNA, 25 bp, Homo sapien
gtagagccgcctgtcctaggagaag

SEQ ID NO: 2548280 - DNA, 25 bp, Homo sapien
tgccgtgcgtgtttgatccagtttc

SEQ ID NO: 2548281 - DNA, 25 bp, Homo sapien
tcagtgccgtgcgtgtttgatccag

SEQ ID NO: 2548282 - DNA, 25 bp, Homo sapien
agtgccgtgcgtgtttgatccagtt

SEQ ID NO: 2548283 - DNA, 25 bp, Homo sapien
cgtgcgtgtttgatccagtttctga

SEQ ID NO: 2548284 - DNA, 25 bp, Homo sapien
agcggcccgtggcccggctcacaat

SEQ ID NO: 2548285 - DNA, 25 bp, Homo sapien
atctttggacatctccacctccagg

SEQ ID NO: 2548286 - DNA, 25 bp, Homo sapien
tggcccggctcacaatggggccact

SEQ ID NO: 2548287 - DNA, 25 bp, Homo sapien
gagcccaaagttggcatctttggac

SEQ ID NO: 2548288 - DNA, 25 bp, Homo sapien
tgaagtcccacagccgctgtgttgg

SEQ ID NO: 2548289 - DNA, 25 bp, Homo sapien
agcagtccatcagcgctgtaccgca

SEQ ID NO: 2548290 - DNA, 25 bp, Homo sapien
cttggagtcaggcaagaaggctgtg

SEQ ID NO: 2548291 - DNA, 25 bp, Homo sapien
acttcttcagggtgggcatgcggcc

SEQ ID NO: 2548292 - DNA, 25 bp, Homo sapien
gacggcgcccaaatgctccgcaggg

SEQ ID NO: 2548293 - DNA, 25 bp, Homo sapien
ccacgtggggatgcgggctggacgg

SEQ ID NO: 2548294 - DNA, 25 bp, Homo sapien
gggctggacggcgcccaaatgctcc

SEQ ID NO: 2548295 - DNA, 25 bp, Homo sapien
ggacgctgttgcgggcgggagagga

SEQ ID NO: 2548296 - DNA, 25 bp, Homo sapien
cctccgctccctggtccagacagta

SEQ ID NO: 2548297 - DNA, 25 bp, Homo sapien
ctgggaggacatcccgtggcagggg

SEQ ID NO: 2548298 - DNA, 25 bp, Homo sapien
gtggcaggggtagaggatcgcccgg

SEQ ID NO: 2548299 - DNA, 25 bp, Homo sapien
tagaggatcgcccggtcgccgtcct

SEQ ID NO: 2548300 - DNA, 25 bp, Homo sapien
taccacttgaagctgcgacacttca

SEQ ID NO: 2548301 - DNA, 25 bp, Homo sapien
tgttgttgtagaccctcatctccgg

SEQ ID NO: 2548302 - DNA, 25 bp, Homo sapien
ctctccgtacgtgagggtgttgttg

SEQ ID NO: 2548303 - DNA, 25 bp, Homo sapien
atctccgggtacacgttctccaggt

SEQ ID NO: 2548304 - DNA, 25 bp, Homo sapien
cttcctggtgcgctcgatgtgggcc

SEQ ID NO: 2548305 - DNA, 25 bp, Homo sapien
cgcgcagggcgttgcgcttggcata

SEQ ID NO: 2548306 - DNA, 25 bp, Homo sapien
tcaatgtcgttgttgtagggcttcc

SEQ ID NO: 2548307 - DNA, 25 bp, Homo sapien
atgttccaggccatgtacacgtggg

SEQ ID NO: 2548308 - DNA, 25 bp, Homo sapien
tcctcgccgagatgaccacacagca

SEQ ID NO: 2548309 - DNA, 25 bp, Homo sapien
gcacgcagctaacgccaggctccct

SEQ ID NO: 2548310 - DNA, 25 bp, Homo sapien
ccacacagcacgcagctaacgccag

SEQ ID NO: 2548311 - DNA, 25 bp, Homo sapien
ccgcccaccgcaggacagatccaga

SEQ ID NO: 2548312 - DNA, 25 bp, Homo sapien
gcatcaggttcacatcgtggcaggt

SEQ ID NO: 2548313 - DNA, 25 bp, Homo sapien
gagcgaaccgcgtttctgcatcagg

SEQ ID NO: 2548314 - DNA, 25 bp, Homo sapien
cttccccgggatggtggagtccgcg

SEQ ID NO: 2548315 - DNA, 25 bp, Homo sapien
tggcctttgcatcccgagggagcga

SEQ ID NO: 2548316 - DNA, 25 bp, Homo sapien
tccagccccctgagccggggcttcc

SEQ ID NO: 2548317 - DNA, 25 bp, Homo sapien
tgagaaaagcctggggttttccagc

SEQ ID NO: 2548318 - DNA, 25 bp, Homo sapien
ttccagccccctgagccggggcttc

SEQ ID NO: 2548319 - DNA, 25 bp, Homo sapien
ctgcctgagaaaagcctggggtttt

SEQ ID NO: 2548320 - DNA, 25 bp, Homo sapien
gggacagagcctcgtcctccatcgt

SEQ ID NO: 2548321 - DNA, 25 bp, Homo sapien
gggccggaacgaaggaagctctgca

SEQ ID NO: 2548322 - DNA, 25 bp, Homo sapien
ggcgggacagagcctcgtcctccat

SEQ ID NO: 2548323 - DNA, 25 bp, Homo sapien
cggagccctgcccttcgctggaagg

SEQ ID NO: 2548324 - DNA, 25 bp, Homo sapien
ccctgggttcgaagcaccttggcct

SEQ ID NO: 2548325 - DNA, 25 bp, Homo sapien
cttggcacaggtggtgcccacgccg

SEQ ID NO: 2548326 - DNA, 25 bp, Homo sapien
agcacccccacgtgcacccctcagg

SEQ ID NO: 2548327 - DNA, 25 bp, Homo sapien
cttcccaggtctctgcatgctccac

SEQ ID NO: 2548328 - DNA, 25 bp, Homo sapien
ccggggccttctgtggcgctggggc

SEQ ID NO: 2548329 - DNA, 25 bp, Homo sapien
ggaccgaagctacgggagaggcgag

SEQ ID NO: 2548330 - DNA, 25 bp, Homo sapien
ctagaaggaccgaagctacgggaga

SEQ ID NO: 2548331 - DNA, 25 bp, Homo sapien
ggcggtgggagtcggccaacttcca

SEQ ID NO: 2548332 - DNA, 25 bp, Homo sapien
gcggtgggagtcggccaacttccat

SEQ ID NO: 2548333 - DNA, 25 bp, Homo sapien
gctccccgctgcctgaatgcacggc

SEQ ID NO: 2548334 - DNA, 25 bp, Homo sapien
tgcctgaatgcacggccttcatggc

SEQ ID NO: 2548335 - DNA, 25 bp, Homo sapien
cgctgcctgaatgcacggccttcat

SEQ ID NO: 2548336 - DNA, 25 bp, Homo sapien
ccccgctgcctgaatgcacggcctt

SEQ ID NO: 2548337 - DNA, 25 bp, Homo sapien
gcttcccccgcgggtgtggcaggct

SEQ ID NO: 2548338 - DNA, 25 bp, Homo sapien
ggcaggtgcttcccccgcgggtgtg

SEQ ID NO: 2548339 - DNA, 25 bp, Homo sapien
ttcccccgcgggtgtggcaggctgg

SEQ ID NO: 2548340 - DNA, 25 bp, Homo sapien
aggtgcttcccccgcgggtgtggca

SEQ ID NO: 2548341 - DNA, 25 bp, Homo sapien
tgaggttgaggtcatcgaggacacc

SEQ ID NO: 2548342 - DNA, 25 bp, Homo sapien
tgcaaggatgggctatgatcacccg

SEQ ID NO: 2548343 - DNA, 25 bp, Homo sapien
caagcactagcaagagtcaggagat

SEQ ID NO: 2548344 - DNA, 25 bp, Homo sapien
cacaggccctagagtagagctggga

SEQ ID NO: 2548345 - DNA, 25 bp, Homo sapien
gctgcatgctccggtagttagaaca

SEQ ID NO: 2548346 - DNA, 25 bp, Homo sapien
catgctccggtagttagaacagaac

SEQ ID NO: 2548347 - DNA, 25 bp, Homo sapien
cccaggacacggcgccgggctgtct

SEQ ID NO: 2548348 - DNA, 25 bp, Homo sapien
tctttaactacgaggcccaggacac

SEQ ID NO: 2548349 - DNA, 25 bp, Homo sapien
catgtgtccaggttcagtgccacgg

SEQ ID NO: 2548350 - DNA, 25 bp, Homo sapien
ccatgtgtccaggttcagtgccacg

SEQ ID NO: 2548351 - DNA, 25 bp, Homo sapien
tcagccatccgtctgagtccagtgc

SEQ ID NO: 2548352 - DNA, 25 bp, Homo sapien
gtgtccaggttcagtgccacgggtc

SEQ ID NO: 2548353 - DNA, 25 bp, Homo sapien
cctcggtggaatcccggctgttcgc

SEQ ID NO: 2548354 - DNA, 25 bp, Homo sapien
caggtgcagcctcctgcgttggctc

SEQ ID NO: 2548355 - DNA, 25 bp, Homo sapien
tcgcagccgcactggatgaagctct

SEQ ID NO: 2548356 - DNA, 25 bp, Homo sapien
cctcacaggtgtcggtggacttcgg

SEQ ID NO: 2548357 - DNA, 25 bp, Homo sapien
caggaaggcgatgcccccggcccca

SEQ ID NO: 2548358 - DNA, 25 bp, Homo sapien
cactctgcccgcgttcctctgcact

SEQ ID NO: 2548359 - DNA, 25 bp, Homo sapien
ggcacacactctgcccgcgttcctc

SEQ ID NO: 2548360 - DNA, 25 bp, Homo sapien
acacactctgcccgcgttcctctgc

SEQ ID NO: 2548361 - DNA, 25 bp, Homo sapien
cacgaagccccacttgctttgtggc

SEQ ID NO: 2548362 - DNA, 25 bp, Homo sapien
agtggacacgaagccccacttgctt

SEQ ID NO: 2548363 - DNA, 25 bp, Homo sapien
ctcggagaagtggacacgaagcccc

SEQ ID NO: 2548364 - DNA, 25 bp, Homo sapien
ggagaagtggacacgaagccccact

SEQ ID NO: 2548365 - DNA, 25 bp, Homo sapien
gggctccgcgtctgtcgtcccacat

SEQ ID NO: 2548366 - DNA, 25 bp, Homo sapien
tctgtcgtcccacatctgcgctgct

SEQ ID NO: 2548367 - DNA, 25 bp, Homo sapien
ggctgttccgggggctccgcgtctg

SEQ ID NO: 2548368 - DNA, 25 bp, Homo sapien
ccgcgtctgtcgtcccacatctgcg

SEQ ID NO: 2548369 - DNA, 25 bp, Homo sapien
gcgggtccgctcaccactgctcttt

SEQ ID NO: 2548370 - DNA, 25 bp, Homo sapien
cgcccgtgccccacagcgggtccgc

SEQ ID NO: 2548371 - DNA, 25 bp, Homo sapien
gcccgtgccccacagcgggtccgct

SEQ ID NO: 2548372 - DNA, 25 bp, Homo sapien
ccccacagcgggtccgctcaccact

SEQ ID NO: 2548373 - DNA, 25 bp, Homo sapien
ccatggtcggctcttcttcagggac

SEQ ID NO: 2548374 - DNA, 25 bp, Homo sapien
gagcgtgtgttttcctccggtgacc

SEQ ID NO: 2548375 - DNA, 25 bp, Homo sapien
gttcactcgcgttgctcctcaggag

SEQ ID NO: 2548376 - DNA, 25 bp, Homo sapien
tcttacgacgctgcccttgcgtggg

SEQ ID NO: 2548377 - DNA, 25 bp, Homo sapien
aaggagacaagagcttgccccagcg

SEQ ID NO: 2548378 - DNA, 25 bp, Homo sapien
gctcggtgtggaaacaggcctcttt

SEQ ID NO: 2548379 - DNA, 25 bp, Homo sapien
ggtgtgggttaactcagtcacgccc

SEQ ID NO: 2548380 - DNA, 25 bp, Homo sapien
cagagagctctgttgtggaagtgcc

SEQ ID NO: 2548381 - DNA, 25 bp, Homo sapien
cagggagaagcgcttttctgccagc

SEQ ID NO: 2548382 - DNA, 25 bp, Homo sapien
agggagaagcgcttttctgccagca

SEQ ID NO: 2548383 - DNA, 25 bp, Homo sapien
cttgcggggtgagctgagccggcag

SEQ ID NO: 2548384 - DNA, 25 bp, Homo sapien
tgcttgcggggtgagctgagccggc

SEQ ID NO: 2548385 - DNA, 25 bp, Homo sapien
gggtgagctgagccggcagggccca

SEQ ID NO: 2548386 - DNA, 25 bp, Homo sapien
gcggggtgagctgagccggcagggc

SEQ ID NO: 2548387 - DNA, 25 bp, Homo sapien
cacacacagtaaaatcctccaaaat

SEQ ID NO: 2548388 - DNA, 25 bp, Homo sapien
tccaggagagtcgcacacacagtaa

SEQ ID NO: 2548389 - DNA, 25 bp, Homo sapien
taatcatctggtggtctggtgcctg

SEQ ID NO: 2548390 - DNA, 25 bp, Homo sapien
ccaggctgcgctgacttcctttctg

SEQ ID NO: 2548391 - DNA, 25 bp, Homo sapien
acttcctttctgtggcgcgggtgac

SEQ ID NO: 2548392 - DNA, 25 bp, Homo sapien
cgccgggtgttccctgaccctggag

SEQ ID NO: 2548393 - DNA, 25 bp, Homo sapien
cgcgggtgacacagacggcgactct

SEQ ID NO: 2548394 - DNA, 25 bp, Homo sapien
agccacaggaaggcggagggtcggg

SEQ ID NO: 2548395 - DNA, 25 bp, Homo sapien
cagccacaggaaggcggagggtcgg

SEQ ID NO: 2548396 - DNA, 25 bp, Homo sapien
cccaagccagggctcgtctccggtt

SEQ ID NO: 2548397 - DNA, 25 bp, Homo sapien
tgcctcctgcccagactgcaacccc

SEQ ID NO: 2548398 - DNA, 25 bp, Homo sapien
tccggttcacggctgtgtcccacat

SEQ ID NO: 2548399 - DNA, 25 bp, Homo sapien
ggctcgtctccggttcacggctgtg

SEQ ID NO: 2548400 - DNA, 25 bp, Homo sapien
ggtgctgtagggcacgtttccatat

SEQ ID NO: 2548401 - DNA, 25 bp, Homo sapien
tgctgtagggcacgtttccatattt

SEQ ID NO: 2548402 - DNA, 25 bp, Homo sapien
acgtttccatatttcacgccgcctg

SEQ ID NO: 2548403 - DNA, 25 bp, Homo sapien
ttccatatttcacgccgcctgggaa

SEQ ID NO: 2548404 - DNA, 25 bp, Homo sapien
aataagcgaatagcagaagcaaccc

SEQ ID NO: 2548405 - DNA, 25 bp, Homo sapien
gtaaaaaggaatgatggccgggcac

SEQ ID NO: 2548406 - DNA, 25 bp, Homo sapien
gtggattcacacagcagactattag

SEQ ID NO: 2548407 - DNA, 25 bp, Homo sapien
agagtgcacaggaacgtttattcca

SEQ ID NO: 2548408 - DNA, 25 bp, Homo sapien
aggcacagaagactgcacgcaggtg

SEQ ID NO: 2548409 - DNA, 25 bp, Homo sapien
cacgcaggtgtgtgaaatgtccaca

SEQ ID NO: 2548410 - DNA, 25 bp, Homo sapien
aacatcacagcgagtgaaagaggca

SEQ ID NO: 2548411 - DNA, 25 bp, Homo sapien
gtccacaaccggcagatccacagag

SEQ ID NO: 2548412 - DNA, 25 bp, Homo sapien
tctgccggccgcctgcagttctggg

SEQ ID NO: 2548413 - DNA, 25 bp, Homo sapien
gccagggaaggtgcggcaggagatc

SEQ ID NO: 2548414 - DNA, 25 bp, Homo sapien
tacacaaaggcacgatgtgggccgg

SEQ ID NO: 2548415 - DNA, 25 bp, Homo sapien
gctgcgcaccgaggcgccatcatgg

SEQ ID NO: 2548416 - DNA, 25 bp, Homo sapien
gaggacgtgggcagctcgtgaaccc

SEQ ID NO: 2548417 - DNA, 25 bp, Homo sapien
aggacgtgggcagctcgtgaacccg

SEQ ID NO: 2548418 - DNA, 25 bp, Homo sapien
tcccttcctggagacgacgtgggca

SEQ ID NO: 2548419 - DNA, 25 bp, Homo sapien
gacgtgggcagctcgtgaacccggt

SEQ ID NO: 2548420 - DNA, 25 bp, Homo sapien
gacgtgggcagctcgtgaacccggg

SEQ ID NO: 2548421 - DNA, 25 bp, Homo sapien
gaggacgtgggcagctcgtgaaccc

SEQ ID NO: 2548422 - DNA, 25 bp, Homo sapien
ctcgtgaacccggtgtcccctcctg

SEQ ID NO: 2548423 - DNA, 25 bp, Homo sapien
gggcgtgggcagctcgtgaacccgg

SEQ ID NO: 2548424 - DNA, 25 bp, Homo sapien
gacgtgggcagctcgtgaacccggg

SEQ ID NO: 2548425 - DNA, 25 bp, Homo sapien
gaggacgtgggcagctcgtgaaccc

SEQ ID NO: 2548426 - DNA, 25 bp, Homo sapien
aggacgtgggcagctcgtgaacccg

SEQ ID NO: 2548427 - DNA, 25 bp, Homo sapien
ggacgtgggcagctcgtgaacccgg

SEQ ID NO: 2548428 - DNA, 25 bp, Homo sapien
aggacgtgggcagctcgtgaacccg

SEQ ID NO: 2548429 - DNA, 25 bp, Homo sapien
tcccttcctggagacgacgtgggca

SEQ ID NO: 2548430 - DNA, 25 bp, Homo sapien
gtcccttcctggagacgacgtgggc

SEQ ID NO: 2548431 - DNA, 25 bp, Homo sapien
ggacgtgggcagctcgtgaacccgg

SEQ ID NO: 2548432 - DNA, 25 bp, Homo sapien
gcagctcgtgaacccggtgtcccct

SEQ ID NO: 2548433 - DNA, 25 bp, Homo sapien
gaggacgtgggcagctcgtgaaccc

SEQ ID NO: 2548434 - DNA, 25 bp, Homo sapien
gacgtgggcagctcgtgaacccggt

SEQ ID NO: 2548435 - DNA, 25 bp, Homo sapien
ggcagctcgtgaacccggtgtcccc

SEQ ID NO: 2548436 - DNA, 25 bp, Homo sapien
tgggcagctcgtggtggacgtgcac

SEQ ID NO: 2548437 - DNA, 25 bp, Homo sapien
tggtggacgtgcactggttccgtca

SEQ ID NO: 2548438 - DNA, 25 bp, Homo sapien
gaggacgtgggcagctcgtggtgga

SEQ ID NO: 2548439 - DNA, 25 bp, Homo sapien
actggttccgtcagggctggcatca

SEQ ID NO: 2548440 - DNA, 25 bp, Homo sapien
tcaaccttcaaagctcaaaaggctc

SEQ ID NO: 2548441 - DNA, 25 bp, Homo sapien
aaccttcaaagctcaaaaggctcac

SEQ ID NO: 2548442 - DNA, 25 bp, Homo sapien
ctcaaccttcaaagctcaaaaggct

SEQ ID NO: 2548443 - DNA, 25 bp, Homo sapien
caaccttcaaagctcaaaaggctca

SEQ ID NO: 2548444 - DNA, 25 bp, Homo sapien
tgtccctctagaaacgaacaggccc

SEQ ID NO: 2548445 - DNA, 25 bp, Homo sapien
acgtggtatctgcatccgggtggcc

SEQ ID NO: 2548446 - DNA, 25 bp, Homo sapien
catccgtgaggacgtggtatctgca

SEQ ID NO: 2548447 - DNA, 25 bp, Homo sapien
taagcaacgtgtgcgcatccgtgag

SEQ ID NO: 2548448 - DNA, 25 bp, Homo sapien
atcatgggccggtcatcacgagcca

SEQ ID NO: 2548449 - DNA, 25 bp, Homo sapien
tatcacgggccagtcatcatgggcc

SEQ ID NO: 2548450 - DNA, 25 bp, Homo sapien
tcttccttgtccttcacgggctggt

SEQ ID NO: 2548451 - DNA, 25 bp, Homo sapien
cttcacgggctggtcatcacgagcc

SEQ ID NO: 2548452 - DNA, 25 bp, Homo sapien
tctaatgaaactcccggctctcagc

SEQ ID NO: 2548453 - DNA, 25 bp, Homo sapien
gccgcagcgagccttttccgtaaca

SEQ ID NO: 2548454 - DNA, 25 bp, Homo sapien
tttctaatgttctatcgcagatggg

SEQ ID NO: 2548455 - DNA, 25 bp, Homo sapien
gtttgcgctcaaggatgccgccgca

SEQ ID NO: 2548456 - DNA, 25 bp, Homo sapien
tgcaacgtccctttctggtgtgagc

SEQ ID NO: 2548457 - DNA, 25 bp, Homo sapien
ctgcaacgtccctttctggtgtgag

SEQ ID NO: 2548458 - DNA, 25 bp, Homo sapien
actctcacactgcacacggagcatg

SEQ ID NO: 2548459 - DNA, 25 bp, Homo sapien
tctcacactgcacacggagcatggc

SEQ ID NO: 2548460 - DNA, 25 bp, Homo sapien
agcatggccagctgaaacactctcc

SEQ ID NO: 2548461 - DNA, 25 bp, Homo sapien
gcactctcacactgcacacggagca

SEQ ID NO: 2548462 - DNA, 25 bp, Homo sapien
gagcccagaactccagagacggcgg

SEQ ID NO: 2548463 - DNA, 25 bp, Homo sapien
agcccagaactccagagacggcggc

SEQ ID NO: 2548464 - DNA, 25 bp, Homo sapien
tgagcccagaactccagagacggcg

SEQ ID NO: 2548465 - DNA, 25 bp, Homo sapien
cagagatggcggctggtccctggtt

SEQ ID NO: 2548466 - DNA, 25 bp, Homo sapien
gctggtccctggttggccatctgga

SEQ ID NO: 2548467 - DNA, 25 bp, Homo sapien
tgagcccagaactccagcatcggcg

SEQ ID NO: 2548468 - DNA, 25 bp, Homo sapien
cagaactccagcatcggcggctggt

SEQ ID NO: 2548469 - DNA, 25 bp, Homo sapien
gcctcccgcttggagagcgccgccc

SEQ ID NO: 2548470 - DNA, 25 bp, Homo sapien
cccgcagaggagggcggcgctgccc

SEQ ID NO: 2548471 - DNA, 25 bp, Homo sapien
ccgcctcccgcttggagagcgccgc

SEQ ID NO: 2548472 - DNA, 25 bp, Homo sapien
ctcccgcttggagagcgccgcccgc

SEQ ID NO: 2548473 - DNA, 25 bp, Homo sapien
atgcgtgtgtcaggaatctgagtga

SEQ ID NO: 2548474 - DNA, 25 bp, Homo sapien
ccgggaagagctcgatgtgtagaaa

SEQ ID NO: 2548475 - DNA, 25 bp, Homo sapien
tcaggagatccagggccaatcccag

SEQ ID NO: 2548476 - DNA, 25 bp, Homo sapien
aggcccacgtgttttgcccgcagcg

SEQ ID NO: 2548477 - DNA, 25 bp, Homo sapien
tgtccgtgaactccggacgtggccc

SEQ ID NO: 2548478 - DNA, 25 bp, Homo sapien
tctcatttcgggttgtttgccgacg

SEQ ID NO: 2548479 - DNA, 25 bp, Homo sapien
gttagtctggtagtcttgcttccgc

SEQ ID NO: 2548480 - DNA, 25 bp, Homo sapien
tcctgtgttgctgtcaggctgtccg

SEQ ID NO: 2548481 - DNA, 25 bp, Homo sapien
gtcccactcagtgtgttgaccacca

SEQ ID NO: 2548482 - DNA, 25 bp, Homo sapien
ccgggtctgagtgatgcgtcccact

SEQ ID NO: 2548483 - DNA, 25 bp, Homo sapien
tgaagaggtgacctcccgggtctga

SEQ ID NO: 2548484 - DNA, 25 bp, Homo sapien
cagagagtgcatggacgggacatat

SEQ ID NO: 2548485 - DNA, 25 bp, Homo sapien
gtccctattggatctggtgccggcc

SEQ ID NO: 2548486 - DNA, 25 bp, Homo sapien
caaggccgcattgcccttcgggctg

SEQ ID NO: 2548487 - DNA, 25 bp, Homo sapien
gatgctttgccggactagcctgagg

SEQ ID NO: 2548488 - DNA, 25 bp, Homo sapien
ccttgtctagacagggctgagctgt

SEQ ID NO: 2548489 - DNA, 25 bp, Homo sapien
tgacctacatgtggtcgggcacacc

SEQ ID NO: 2548490 - DNA, 25 bp, Homo sapien
cccatctggtgggtcaggacctgca

SEQ ID NO: 2548491 - DNA, 25 bp, Homo sapien
cactgaagggttgcctgcagggtct

SEQ ID NO: 2548492 - DNA, 25 bp, Homo sapien
agttcctgcagagtggcccagtggc

SEQ ID NO: 2548493 - DNA, 25 bp, Homo sapien
cgctagaggcttatctttgtcccgg

SEQ ID NO: 2548494 - DNA, 25 bp, Homo sapien
ttgaggcccagacgctagaggctta

SEQ ID NO: 2548495 - DNA, 25 bp, Homo sapien
tgtcccggttgccaggcaagggtcc

SEQ ID NO: 2548496 - DNA, 25 bp, Homo sapien
atctttgtcccggttgccaggcaag

SEQ ID NO: 2548497 - DNA, 25 bp, Homo sapien
cttagacactgggcctgggcctgcc

SEQ ID NO: 2548498 - DNA, 25 bp, Homo sapien
tagacactgggcctgggcctgccac

SEQ ID NO: 2548499 - DNA, 25 bp, Homo sapien
gccttagacactgggcctgggcctg

SEQ ID NO: 2548500 - DNA, 25 bp, Homo sapien
tcagtgccttagacactgggcctgg

SEQ ID NO: 2548501 - DNA, 25 bp, Homo sapien
agcaggatgcagtcgctggtgtcac

SEQ ID NO: 2548502 - DNA, 25 bp, Homo sapien
tgaaggcagggcgtagcatctgcct

SEQ ID NO: 2548503 - DNA, 25 bp, Homo sapien
ctgccctccaaacgcccgagggtgg

SEQ ID NO: 2548504 - DNA, 25 bp, Homo sapien
ctgtgggtgcggcatcggctcctcc

SEQ ID NO: 2548505 - DNA, 25 bp, Homo sapien
gcaggttcgggacagaggggcccca

SEQ ID NO: 2548506 - DNA, 25 bp, Homo sapien
gccccagagtcgggctctgctcttg

SEQ ID NO: 2548507 - DNA, 25 bp, Homo sapien
catccatggctcaaccaggcctggg

SEQ ID NO: 2548508 - DNA, 25 bp, Homo sapien
tgtgaggggcccatagtcatcatcc

SEQ ID NO: 2548509 - DNA, 25 bp, Homo sapien
gtcatcatccatggctcaaccaggc

SEQ ID NO: 2548510 - DNA, 25 bp, Homo sapien
tgaggggcccatagtcatcatccat

SEQ ID NO: 2548511 - DNA, 25 bp, Homo sapien
ttactgccagaaccctcagggcccc

SEQ ID NO: 2548512 - DNA, 25 bp, Homo sapien
ggttactgccagaaccctcagggcc

SEQ ID NO: 2548513 - DNA, 25 bp, Homo sapien
gttactgccagaaccctcagggccc

SEQ ID NO: 2548514 - DNA, 25 bp, Homo sapien
tactgccagaaccctcagggcccca

SEQ ID NO: 2548515 - DNA, 25 bp, Homo sapien
tggtttggatactgacgtcacagaa

SEQ ID NO: 2548516 - DNA, 25 bp, Homo sapien
taaactgttagtggcttccatcagc

SEQ ID NO: 2548517 - DNA, 25 bp, Homo sapien
tcacagaaactgacaggcgctccat

SEQ ID NO: 2548518 - DNA, 25 bp, Homo sapien
ggttcaggaaatttgaagccggctg

SEQ ID NO: 2548519 - DNA, 25 bp, Homo sapien
gatgtccctgcccaacacacctctc

SEQ ID NO: 2548520 - DNA, 25 bp, Homo sapien
tcgcccgtccgcagatggacactgt

SEQ ID NO: 2548521 - DNA, 25 bp, Homo sapien
agaggccgcaccgtcgccgcggcct

SEQ ID NO: 2548522 - DNA, 25 bp, Homo sapien
cccgtccgcagatggacactgttgg

SEQ ID NO: 2548523 - DNA, 25 bp, Homo sapien
caggtccacgtggagtcggcgatgc

SEQ ID NO: 2548524 - DNA, 25 bp, Homo sapien
caagggtaacgccagcctccgagac

SEQ ID NO: 2548525 - DNA, 25 bp, Homo sapien
ccccatgtccagcaaccaagggtaa

SEQ ID NO: 2548526 - DNA, 25 bp, Homo sapien
tccgagacccaaacgatgtctgtgc

SEQ ID NO: 2548527 - DNA, 25 bp, Homo sapien
gagtctgcacactggggcgtttatt

SEQ ID NO: 2548528 - DNA, 25 bp, Homo sapien
cacactggggcgtttatttctgaga

SEQ ID NO: 2548529 - DNA, 25 bp, Homo sapien
ggctgaaagagggttctagaatggg

SEQ ID NO: 2548530 - DNA, 25 bp, Homo sapien
ttatttctgagacgcccaagcagcc

SEQ ID NO: 2548531 - DNA, 25 bp, Homo sapien
ggcggtgtcggggaggctgagtcca

SEQ ID NO: 2548532 - DNA, 25 bp, Homo sapien
cagctctgggcggtgtcggggaggc

SEQ ID NO: 2548533 - DNA, 25 bp, Homo sapien
gggaggctgagtccagtccagggct

SEQ ID NO: 2548534 - DNA, 25 bp, Homo sapien
gaggctgagtccagtccagggctct

SEQ ID NO: 2548535 - DNA, 25 bp, Homo sapien
gagtttggcattcctgcacacggag

SEQ ID NO: 2548536 - DNA, 25 bp, Homo sapien
tttggcattcctgcacacggagggt

SEQ ID NO: 2548537 - DNA, 25 bp, Homo sapien
cagggcgagtttggcattccgtgcc

SEQ ID NO: 2548538 - DNA, 25 bp, Homo sapien
cgagtttggcattccgtgccgttgg

SEQ ID NO: 2548539 - DNA, 25 bp, Homo sapien
ctggctgctcccggtgggcagaaga

SEQ ID NO: 2548540 - DNA, 25 bp, Homo sapien
ggctgctcccggtgggcagaagatg

SEQ ID NO: 2548541 - DNA, 25 bp, Homo sapien
aagccacagacagcgtcctgcgtgg

SEQ ID NO: 2548542 - DNA, 25 bp, Homo sapien
acccagcagccgtgcagggaacagc

SEQ ID NO: 2548543 - DNA, 25 bp, Homo sapien
ggcaggtggcagtgcaccccgagga

SEQ ID NO: 2548544 - DNA, 25 bp, Homo sapien
ccgcagaagcggatgccggggcagg

SEQ ID NO: 2548545 - DNA, 25 bp, Homo sapien
tggcagtgcaccccgaggaagcctt

SEQ ID NO: 2548546 - DNA, 25 bp, Homo sapien
aggtggcagtgcaccccgaggaagc

SEQ ID NO: 2548547 - DNA, 25 bp, Homo sapien
gtctggcccgtctgtggaagcccat

SEQ ID NO: 2548548 - DNA, 25 bp, Homo sapien
tgaagagcgatatgggactccatag

SEQ ID NO: 2548549 - DNA, 25 bp, Homo sapien
gctgtctggcccgtctgtggaagcc

SEQ ID NO: 2548550 - DNA, 25 bp, Homo sapien
ggtggtggcctcgctcctcctgctg

SEQ ID NO: 2548551 - DNA, 25 bp, Homo sapien
gctgtgcccgactgggtcctctctg

SEQ ID NO: 2548552 - DNA, 25 bp, Homo sapien
ggcgctgtgcccgactgggtcctct

SEQ ID NO: 2548553 - DNA, 25 bp, Homo sapien
ccttcttccagtggggcgctgtgcc

SEQ ID NO: 2548554 - DNA, 25 bp, Homo sapien
gtgcccgactgggtcctctctgaac

SEQ ID NO: 2548555 - DNA, 25 bp, Homo sapien
cactgaagttcgtaggttcttgttc

SEQ ID NO: 2548556 - DNA, 25 bp, Homo sapien
acggacggacggctggacaggctgg

SEQ ID NO: 2548557 - DNA, 25 bp, Homo sapien
gaactgtgagttcaggcactaccag

SEQ ID NO: 2548558 - DNA, 25 bp, Homo sapien
taccagcacgacagccagagggacg

SEQ ID NO: 2548559 - DNA, 25 bp, Homo sapien
gcttcaccagccaaattcctaagtc

SEQ ID NO: 2548560 - DNA, 25 bp, Homo sapien
tcacaggtcgtgttacagatcaggg

SEQ ID NO: 2548561 - DNA, 25 bp, Homo sapien
ctgtgggtctcgcacgcttcaccag

SEQ ID NO: 2548562 - DNA, 25 bp, Homo sapien
atcgttttaaccctaagagtcacag

SEQ ID NO: 2548563 - DNA, 25 bp, Homo sapien
cctctcccagtgcgggcatttgagg

SEQ ID NO: 2548564 - DNA, 25 bp, Homo sapien
tggccctgtctagcttgatctggtg

SEQ ID NO: 2548565 - DNA, 25 bp, Homo sapien
tcccagtgcgggcatttgaggcagt

SEQ ID NO: 2548566 - DNA, 25 bp, Homo sapien
ctgtgtgtcgctcacttttctggcc

SEQ ID NO: 2548567 - DNA, 25 bp, Homo sapien
ggatttgcagtttaatggcctcaga

SEQ ID NO: 2548568 - DNA, 25 bp, Homo sapien
cttcgttttcggttgggatttgcag

SEQ ID NO: 2548569 - DNA, 25 bp, Homo sapien
aaaaccggtcactttgtccagcgca

SEQ ID NO: 2548570 - DNA, 25 bp, Homo sapien
tgtcggcttttctgagggtgatctt

SEQ ID NO: 2548571 - DNA, 25 bp, Homo sapien
ttcaactatgcaagcgcttcccggc

SEQ ID NO: 2548572 - DNA, 25 bp, Homo sapien
caaacgaaacgtgtaaatagtctgt

SEQ ID NO: 2548573 - DNA, 25 bp, Homo sapien
gctccagccgcaagggcgatgctgt

SEQ ID NO: 2548574 - DNA, 25 bp, Homo sapien
ctggttgtttgtctaacatggtcac

SEQ ID NO: 2548575 - DNA, 25 bp, Homo sapien
tgtgtgttttcttccgcctgaggca

SEQ ID NO: 2548576 - DNA, 25 bp, Homo sapien
tgggttttgccctcacccacatgag

SEQ ID NO: 2548577 - DNA, 25 bp, Homo sapien
ggtcagccgtcgagccacttgcttt

SEQ ID NO: 2548578 - DNA, 25 bp, Homo sapien
gccttttgtgttccccgatgtctgg

SEQ ID NO: 2548579 - DNA, 25 bp, Homo sapien
tcaatcagtgacgataaatacagcc

SEQ ID NO: 2548580 - DNA, 25 bp, Homo sapien
ttgatttggatgaaactgtggtcgc

SEQ ID NO: 2548581 - DNA, 25 bp, Homo sapien
cagtgacgataaatacagccttgat

SEQ ID NO: 2548582 - DNA, 25 bp, Homo sapien
tttggatgaaactgtggtcgcgtgt

SEQ ID NO: 2548583 - DNA, 25 bp, Homo sapien
tgacccctgcagccgtgcgtccctc

SEQ ID NO: 2548584 - DNA, 25 bp, Homo sapien
acccctgcagccgtgcgtccctcct

SEQ ID NO: 2548585 - DNA, 25 bp, Homo sapien
ccctgcagccgtgcgtccctcctgc

SEQ ID NO: 2548586 - DNA, 25 bp, Homo sapien
cccctgcagccgtgcgtccctcctg

SEQ ID NO: 2548587 - DNA, 25 bp, Homo sapien
ccagagagttctggccccgcaggga

SEQ ID NO: 2548588 - DNA, 25 bp, Homo sapien
gccatcgccccggaagtgaagcaca

SEQ ID NO: 2548589 - DNA, 25 bp, Homo sapien
tagttcccgcctttgtgccagagag

SEQ ID NO: 2548590 - DNA, 25 bp, Homo sapien
tggctctgccggatgccccattgtg

SEQ ID NO: 2548591 - DNA, 25 bp, Homo sapien
ctgtaaagcgcagctggaaggtggt

SEQ ID NO: 2548592 - DNA, 25 bp, Homo sapien
aaagatgcggtcaggcaaatggaag

SEQ ID NO: 2548593 - DNA, 25 bp, Homo sapien
gatgcggtcaggcaaatggaagtac

SEQ ID NO: 2548594 - DNA, 25 bp, Homo sapien
tgcggtcaggcaaatggaagtacat

SEQ ID NO: 2548595 - DNA, 25 bp, Homo sapien
aagatgcggtcaggcaaatggaagt

SEQ ID NO: 2548596 - DNA, 25 bp, Homo sapien
gatctggcacccctgctcatcaagt

SEQ ID NO: 2548597 - DNA, 25 bp, Homo sapien
gcaactcaactgttgggatttccct

SEQ ID NO: 2548598 - DNA, 25 bp, Homo sapien
tgacactcacggctcctgtttctgc

SEQ ID NO: 2548599 - DNA, 25 bp, Homo sapien
agttcaacgtgtaaatggaaacagc

SEQ ID NO: 2548600 - DNA, 25 bp, Homo sapien
ctgtgctgtggaaccgtccgaggga

SEQ ID NO: 2548601 - DNA, 25 bp, Homo sapien
gctccaggaagaaccgcgggtgctc

SEQ ID NO: 2548602 - DNA, 25 bp, Homo sapien
ctccaggaagaaccgcgggtgctcc

SEQ ID NO: 2548603 - DNA, 25 bp, Homo sapien
aaccgtccgagggagctggactcct

SEQ ID NO: 2548604 - DNA, 25 bp, Homo sapien
taagtcttgtctatcaaactgcacc

SEQ ID NO: 2548605 - DNA, 25 bp, Homo sapien
cgtggattaagtcttgtctatcaaa

SEQ ID NO: 2548606 - DNA, 25 bp, Homo sapien
tggctgtgtccggttcgtggattaa

SEQ ID NO: 2548607 - DNA, 25 bp, Homo sapien
ccggttcgtggattaagtcttgtct

SEQ ID NO: 2548608 - DNA, 25 bp, Homo sapien
caaacattttttgtgggatttgatt

SEQ ID NO: 2548609 - DNA, 25 bp, Homo sapien
tgggatttgattctccaacgtggaa

SEQ ID NO: 2548610 - DNA, 25 bp, Homo sapien
tgtgggatttgattctccaacgtgg

SEQ ID NO: 2548611 - DNA, 25 bp, Homo sapien
tttgtgggatttgattctccaacgt

SEQ ID NO: 2548612 - DNA, 25 bp, Homo sapien
tacgtagaattgctggggatcctcg

SEQ ID NO: 2548613 - DNA, 25 bp, Homo sapien
gcattggagtggaaatacgtagaat

SEQ ID NO: 2548614 - DNA, 25 bp, Homo sapien
ctggggatcctcgaagccgccggca

SEQ ID NO: 2548615 - DNA, 25 bp, Homo sapien
ggcattggagtggaaatacgtagaa

SEQ ID NO: 2548616 - DNA, 25 bp, Homo sapien
ttggtcccgacctgcactcagccac

SEQ ID NO: 2548617 - DNA, 25 bp, Homo sapien
caggcgttggtcccgacctgcactc

SEQ ID NO: 2548618 - DNA, 25 bp, Homo sapien
cgttggtcccgacctgcactcagcc

SEQ ID NO: 2548619 - DNA, 25 bp, Homo sapien
ggcgttggtcccgacctgcactcag

SEQ ID NO: 2548620 - DNA, 25 bp, Homo sapien
tgcccccggttttgtaattgagcat

SEQ ID NO: 2548621 - DNA, 25 bp, Homo sapien
ctgcccccggttttgtaattgagca

SEQ ID NO: 2548622 - DNA, 25 bp, Homo sapien
caccccaagccggcgcagggtccat

SEQ ID NO: 2548623 - DNA, 25 bp, Homo sapien
gatcgtttgtggacacctgagcagc

SEQ ID NO: 2548624 - DNA, 25 bp, Homo sapien
agttcacagtcacactcgagccgtg

SEQ ID NO: 2548625 - DNA, 25 bp, Homo sapien
tgggcctgcatagaaacggaagctc

SEQ ID NO: 2548626 - DNA, 25 bp, Homo sapien
catttgcgatgttgagtgaccctca

SEQ ID NO: 2548627 - DNA, 25 bp, Homo sapien
actgtgcgtccagccctcatggctg

SEQ ID NO: 2548628 - DNA, 25 bp, Homo sapien
acaccgcgagcacacgcaggactgt

SEQ ID NO: 2548629 - DNA, 25 bp, Homo sapien
ctgttctggttacaggcccgttggg

SEQ ID NO: 2548630 - DNA, 25 bp, Homo sapien
gggagcgtgcgctgccttgggcccg

SEQ ID NO: 2548631 - DNA, 25 bp, Homo sapien
agagcctctcgtgttctctgacaca

SEQ ID NO: 2548632 - DNA, 25 bp, Homo sapien
gagcctctcgtgttctctgacacag

SEQ ID NO: 2548633 - DNA, 25 bp, Homo sapien
agcctctcgtgttctctgacacagc

SEQ ID NO: 2548634 - DNA, 25 bp, Homo sapien
gcctctcgtgttctctgacacagca

SEQ ID NO: 2548635 - DNA, 25 bp, Homo sapien
cgttggacggcaagggcgtgtggct

SEQ ID NO: 2548636 - DNA, 25 bp, Homo sapien
tcggtgaggaagatagagcagggcg

SEQ ID NO: 2548637 - DNA, 25 bp, Homo sapien
ccgaggggcacacgttggacggcaa

SEQ ID NO: 2548638 - DNA, 25 bp, Homo sapien
ctcggtgaggaagatagagcagggc

SEQ ID NO: 2548639 - DNA, 25 bp, Homo sapien
cttttcagacaagttcctgctctgt

SEQ ID NO: 2548640 - DNA, 25 bp, Homo sapien
ttcagacaagttcctgctctgttgc

SEQ ID NO: 2548641 - DNA, 25 bp, Homo sapien
cctttcttttcagacaagttcctgc

SEQ ID NO: 2548642 - DNA, 25 bp, Homo sapien
ttcttttcagacaagttcctgctct

SEQ ID NO: 2548643 - DNA, 25 bp, Homo sapien
caacaaacaggattcgaggggtttg

SEQ ID NO: 2548644 - DNA, 25 bp, Homo sapien
gatcatcggtatcctggggccggca

SEQ ID NO: 2548645 - DNA, 25 bp, Homo sapien
ctggggccggcagcctcacactgat

SEQ ID NO: 2548646 - DNA, 25 bp, Homo sapien
cactgatagatggttctggaactgc

SEQ ID NO: 2548647 - DNA, 25 bp, Homo sapien
cggcccccgtgtgcttccggtatct

SEQ ID NO: 2548648 - DNA, 25 bp, Homo sapien
gggaggaggagcgccaagcagccgg

SEQ ID NO: 2548649 - DNA, 25 bp, Homo sapien
aggaggagcgccaagcagccgggag

SEQ ID NO: 2548650 - DNA, 25 bp, Homo sapien
gaggagcgccaagcagccgggagct

SEQ ID NO: 2548651 - DNA, 25 bp, Homo sapien
ggagcgccaagcagccgggagctac

SEQ ID NO: 2548652 - DNA, 25 bp, Homo sapien
ggaaggtgagttgaggaagcttttc

SEQ ID NO: 2548653 - DNA, 25 bp, Homo sapien
cgcgccatggctcacttccatgggg

SEQ ID NO: 2548654 - DNA, 25 bp, Homo sapien
ccgagccctggctcgcccccgtggg

SEQ ID NO: 2548655 - DNA, 25 bp, Homo sapien
ccccgagccctggctcgcccccgtg

SEQ ID NO: 2548656 - DNA, 25 bp, Homo sapien
cacttccatggggacggcccccatt

SEQ ID NO: 2548657 - DNA, 25 bp, Homo sapien
tggtgtctccgacgtgtcctgctgg

SEQ ID NO: 2548658 - DNA, 25 bp, Homo sapien
gagcctgatggtgtctccgacgtgt

SEQ ID NO: 2548659 - DNA, 25 bp, Homo sapien
cctgtttgaagattccggatctaga

SEQ ID NO: 2548660 - DNA, 25 bp, Homo sapien
ttgggcaatcctgtttgaagattcc

SEQ ID NO: 2548661 - DNA, 25 bp, Homo sapien
taagggaagcttccgctggaaccag

SEQ ID NO: 2548662 - DNA, 25 bp, Homo sapien
gtttaacaatcaggctacaccccag

SEQ ID NO: 2548663 - DNA, 25 bp, Homo sapien
aaacagcagcacaaaccgtaaggga

SEQ ID NO: 2548664 - DNA, 25 bp, Homo sapien
cccacagattttcagagccccagaa

SEQ ID NO: 2548665 - DNA, 25 bp, Homo sapien
gcatctcccggcaccagcctcgtgg

SEQ ID NO: 2548666 - DNA, 25 bp, Homo sapien
aacgtgcaggggacgggcctcgaag

SEQ ID NO: 2548667 - DNA, 25 bp, Homo sapien
acccagaggccgacgcccacgctca

SEQ ID NO: 2548668 - DNA, 25 bp, Homo sapien
ccacgctcagctcgcgagagggacg

SEQ ID NO: 2548669 - DNA, 25 bp, Homo sapien
tggtacccgagggctgtgaacaaac

SEQ ID NO: 2548670 - DNA, 25 bp, Homo sapien
tgtcccatggatttcccgtcaggaa

SEQ ID NO: 2548671 - DNA, 25 bp, Homo sapien
ctttcaccccagacgggagctctgg

SEQ ID NO: 2548672 - DNA, 25 bp, Homo sapien
tcagcagagcgggagcctgcaccga

SEQ ID NO: 2548673 - DNA, 25 bp, Homo sapien
ttatgagatgggcggtgaagcgccg

SEQ ID NO: 2548674 - DNA, 25 bp, Homo sapien
agatgggcggtgaagcgccggcctc

SEQ ID NO: 2548675 - DNA, 25 bp, Homo sapien
atgggcggtgaagcgccggcctctc

SEQ ID NO: 2548676 - DNA, 25 bp, Homo sapien
tgagatgggcggtgaagcgccggcc

SEQ ID NO: 2548677 - DNA, 25 bp, Homo sapien
gccgcggtcccggtccagttgctgt

SEQ ID NO: 2548678 - DNA, 25 bp, Homo sapien
cgcggtcccggtccagttgctgtgt

SEQ ID NO: 2548679 - DNA, 25 bp, Homo sapien
cggtcccggtccagttgctgtgttt

SEQ ID NO: 2548680 - DNA, 25 bp, Homo sapien
gcggtcccggtccagttgctgtgtt

SEQ ID NO: 2548681 - DNA, 25 bp, Homo sapien
tactccctcagctggatgcagcact

SEQ ID NO: 2548682 - DNA, 25 bp, Homo sapien
cagcggaaggggctgtactccctca

SEQ ID NO: 2548683 - DNA, 25 bp, Homo sapien
atggctgctgcagaagtcgccgttg

SEQ ID NO: 2548684 - DNA, 25 bp, Homo sapien
gcactggctgtgacactcctgatgg

SEQ ID NO: 2548685 - DNA, 25 bp, Homo sapien
cgtgcgagcatctgtacccattggg

SEQ ID NO: 2548686 - DNA, 25 bp, Homo sapien
gcgtgcacaactcctgcgggctgtt

SEQ ID NO: 2548687 - DNA, 25 bp, Homo sapien
tgctctggcactctgagtcgtgcga

SEQ ID NO: 2548688 - DNA, 25 bp, Homo sapien
ttgttgcggacgcagcagctgctct

SEQ ID NO: 2548689 - DNA, 25 bp, Homo sapien
ggcactcctcgtgtctcctgcatgg

SEQ ID NO: 2548690 - DNA, 25 bp, Homo sapien
cagcagttgctctggcactcctcgt

SEQ ID NO: 2548691 - DNA, 25 bp, Homo sapien
caggcactgcaggaagatggtctta

SEQ ID NO: 2548692 - DNA, 25 bp, Homo sapien
gccaggctgttgatggtacagcagt

SEQ ID NO: 2548693 - DNA, 25 bp, Homo sapien
ggcctgcagactcagcactcaggaa

SEQ ID NO: 2548694 - DNA, 25 bp, Homo sapien
cagactcagcactcaggaaaggcct

SEQ ID NO: 2548695 - DNA, 25 bp, Homo sapien
agactcagcactcaggaaaggcctg

SEQ ID NO: 2548696 - DNA, 25 bp, Homo sapien
ggcagggcctgcagactcagcactc

SEQ ID NO: 2548697 - DNA, 25 bp, Homo sapien
agtagcagcagcgtccaccccgggc

SEQ ID NO: 2548698 - DNA, 25 bp, Homo sapien
ataccctgccatggaccccagcagc

SEQ ID NO: 2548699 - DNA, 25 bp, Homo sapien
gacaggttcaacttcttctgtggcc

SEQ ID NO: 2548700 - DNA, 25 bp, Homo sapien
ttctgtggcccataccctgccatgg

SEQ ID NO: 2548701 - DNA, 25 bp, Homo sapien
cccctctgtgtagaggtgagacagg

SEQ ID NO: 2548702 - DNA, 25 bp, Homo sapien
ctttttccgtcaggcgccagcagcc

SEQ ID NO: 2548703 - DNA, 25 bp, Homo sapien
agcagcccctctgtgtagaggtgag

SEQ ID NO: 2548704 - DNA, 25 bp, Homo sapien
agcccctctgtgtagaggtgagaca

SEQ ID NO: 2548705 - DNA, 25 bp, Homo sapien
gcctgggggtaatctggttactgca

SEQ ID NO: 2548706 - DNA, 25 bp, Homo sapien
gatgctgcagtggttagactggtgc

SEQ ID NO: 2548707 - DNA, 25 bp, Homo sapien
gtaatctggttactgcatcctcaga

SEQ ID NO: 2548708 - DNA, 25 bp, Homo sapien
cattcctactccatgggagggggca

SEQ ID NO: 2548709 - DNA, 25 bp, Homo sapien
tcatcccagcgctgtgttcaggtgg

SEQ ID NO: 2548710 - DNA, 25 bp, Homo sapien
atttcccttgactgtggcctcccag

SEQ ID NO: 2548711 - DNA, 25 bp, Homo sapien
ggtctgaccctaaagcctgagtttg

SEQ ID NO: 2548712 - DNA, 25 bp, Homo sapien
ttcaggtggcgagaacatgtcttcc

SEQ ID NO: 2548713 - DNA, 25 bp, Homo sapien
aaaacaaagtgtagcagcgatggcc

SEQ ID NO: 2548714 - DNA, 25 bp, Homo sapien
ccctgtgaaattggcctttcttctt

SEQ ID NO: 2548715 - DNA, 25 bp, Homo sapien
gatggcctcagacagtagatggcag

SEQ ID NO: 2548716 - DNA, 25 bp, Homo sapien
gaaacttcagtatgaaatacaaata

SEQ ID NO: 2548717 - DNA, 25 bp, Homo sapien
tctcacgggttagggtctggattcc

SEQ ID NO: 2548718 - DNA, 25 bp, Homo sapien
tcctgaggctgatagagggttccct

SEQ ID NO: 2548719 - DNA, 25 bp, Homo sapien
attcactgcgtgagaaacggcgccc

SEQ ID NO: 2548720 - DNA, 25 bp, Homo sapien
tagacccggctccaaataagcaggg

SEQ ID NO: 2548721 - DNA, 25 bp, Homo sapien
tcagggtggtcagtggtctggtcac

SEQ ID NO: 2548722 - DNA, 25 bp, Homo sapien
tcttcaggtgctctggcgaggccag

SEQ ID NO: 2548723 - DNA, 25 bp, Homo sapien
tcacaggtttggacagtcagggtgg

SEQ ID NO: 2548724 - DNA, 25 bp, Homo sapien
ctcctgtgacgtctgagctccctga

SEQ ID NO: 2548725 - DNA, 25 bp, Homo sapien
gcacggacgcagaggcacccggggc

SEQ ID NO: 2548726 - DNA, 25 bp, Homo sapien
ggcacggacgcagaggcacccgggg

SEQ ID NO: 2548727 - DNA, 25 bp, Homo sapien
cacggacgcagaggcacccggggcc

SEQ ID NO: 2548728 - DNA, 25 bp, Homo sapien
tggcccagctgtgggttcttctgca

SEQ ID NO: 2548729 - DNA, 25 bp, Homo sapien
gcccagctgtgggttcttctgcagc

SEQ ID NO: 2548730 - DNA, 25 bp, Homo sapien
ctaatggcccagctgtgggttcttc

SEQ ID NO: 2548731 - DNA, 25 bp, Homo sapien
ccagctgtgggttcttctgcagcag

SEQ ID NO: 2548732 - DNA, 25 bp, Homo sapien
cgtagtgctgggcaatgttccggaa

SEQ ID NO: 2548733 - DNA, 25 bp, Homo sapien
tctccaggaggtacgacatgccgta

SEQ ID NO: 2548734 - DNA, 25 bp, Homo sapien
tacgacatgccgtagtgctgggcaa

SEQ ID NO: 2548735 - DNA, 25 bp, Homo sapien
ggaatattccgatctgttccatgaa

SEQ ID NO: 2548736 - DNA, 25 bp, Homo sapien
ttcaccccgcggcacttcaggcaga

SEQ ID NO: 2548737 - DNA, 25 bp, Homo sapien
agtacacaggcatgctggtctcctt

SEQ ID NO: 2548738 - DNA, 25 bp, Homo sapien
atggtgagggcgaagtctcccgcgc

SEQ ID NO: 2548739 - DNA, 25 bp, Homo sapien
tctcccgcgcagctgcagtacacag

SEQ ID NO: 2548740 - DNA, 25 bp, Homo sapien
tcttcacaggctcgcgagacacatt

SEQ ID NO: 2548741 - DNA, 25 bp, Homo sapien
ccagccctcggttatgagtaaaatg

SEQ ID NO: 2548742 - DNA, 25 bp, Homo sapien
atcagtaagcctcgagcccctgctg

SEQ ID NO: 2548743 - DNA, 25 bp, Homo sapien
gagacacattcgtgggcccatcagt

SEQ ID NO: 2548744 - DNA, 25 bp, Homo sapien
caccacacggcagcttggcgcgtcc

SEQ ID NO: 2548745 - DNA, 25 bp, Homo sapien
accaccacacggcagcttggcgcgt

SEQ ID NO: 2548746 - DNA, 25 bp, Homo sapien
tggccgagctgtgcaactccctctt

SEQ ID NO: 2548747 - DNA, 25 bp, Homo sapien
atcctgcaggcctgaacgccgtgca

SEQ ID NO: 2548748 - DNA, 25 bp, Homo sapien
tgctcaaccagtgtggacagaacag

SEQ ID NO: 2548749 - DNA, 25 bp, Homo sapien
ttggaagacaccagggcgtgcctca

SEQ ID NO: 2548750 - DNA, 25 bp, Homo sapien
gacagaacagtccatcaggctcagg

SEQ ID NO: 2548751 - DNA, 25 bp, Homo sapien
tagaacgaagcacccacaaggccag

SEQ ID NO: 2548752 - DNA, 25 bp, Homo sapien
catctcgatggcagaggagtcgtag

SEQ ID NO: 2548753 - DNA, 25 bp, Homo sapien
ttcttctgtagaacttccaccagcg

SEQ ID NO: 2548754 - DNA, 25 bp, Homo sapien
gcgcctgacagttggagcagagcca

SEQ ID NO: 2548755 - DNA, 25 bp, Homo sapien
caccagcgtcatctcgatggcagag

SEQ ID NO: 2548756 - DNA, 25 bp, Homo sapien
tgacgggcgagtctcctgagtgcag

SEQ ID NO: 2548757 - DNA, 25 bp, Homo sapien
ccacagtgccatgggcaggatctca

SEQ ID NO: 2548758 - DNA, 25 bp, Homo sapien
aagagtgcgagaggtcaccagccca

SEQ ID NO: 2548759 - DNA, 25 bp, Homo sapien
tgagtgcagctgcacgcactctggc

SEQ ID NO: 2548760 - DNA, 25 bp, Homo sapien
cctaggacaacattccgaacatggt

SEQ ID NO: 2548761 - DNA, 25 bp, Homo sapien
gggaaggggcctgttgccaatccat

SEQ ID NO: 2548762 - DNA, 25 bp, Homo sapien
acttgagcccttcctaggacaacat

SEQ ID NO: 2548763 - DNA, 25 bp, Homo sapien
tgccaatccatgtgagtcagagggg

SEQ ID NO: 2548764 - DNA, 25 bp, Homo sapien
tgaagggcccgctggagctcagccg

SEQ ID NO: 2548765 - DNA, 25 bp, Homo sapien
tcaagacaccgcagtgccctcggat

SEQ ID NO: 2548766 - DNA, 25 bp, Homo sapien
cagtgccctcggatgttctgctcca

SEQ ID NO: 2548767 - DNA, 25 bp, Homo sapien
gctccacagtgaagggcccgctgga

SEQ ID NO: 2548768 - DNA, 25 bp, Homo sapien
tccaggtcgcggcagaagttacagc

SEQ ID NO: 2548769 - DNA, 25 bp, Homo sapien
gcaggtctcggttcagcttattcac

SEQ ID NO: 2548770 - DNA, 25 bp, Homo sapien
aggaagagtctttacacaggtccag

SEQ ID NO: 2548771 - DNA, 25 bp, Homo sapien
tgacctcaggaagcacgtaggagcg

SEQ ID NO: 2548772 - DNA, 25 bp, Homo sapien
ccctgatactagaaccaaagaccgt

SEQ ID NO: 2548773 - DNA, 25 bp, Homo sapien
cagacacaaaaatgcgcaacgagat

SEQ ID NO: 2548774 - DNA, 25 bp, Homo sapien
tacagaccaataacagcctgagcac

SEQ ID NO: 2548775 - DNA, 25 bp, Homo sapien
gatatggcaagttcggtttcaaacc

SEQ ID NO: 2548776 - DNA, 25 bp, Homo sapien
ctttatgtaaagtgagagacgtgtg

SEQ ID NO: 2548777 - DNA, 25 bp, Homo sapien
gaggccattgcagggctattaactt

SEQ ID NO: 2548778 - DNA, 25 bp, Homo sapien
aactggtgtgagaggcctagctttc

SEQ ID NO: 2548779 - DNA, 25 bp, Homo sapien
ctttgcagttgacttggctaactgg

SEQ ID NO: 2548780 - DNA, 25 bp, Homo sapien
tctatgcgcacggttcatggcgccc

SEQ ID NO: 2548781 - DNA, 25 bp, Homo sapien
tatagtgttgtgtcaccgggactgg

SEQ ID NO: 2548782 - DNA, 25 bp, Homo sapien
aatggcccgtgagtggagcaatcag

SEQ ID NO: 2548783 - DNA, 25 bp, Homo sapien
cacacaacattgatgaagctcattg

SEQ ID NO: 2548784 - DNA, 25 bp, Homo sapien
cgtatttgatgaactccagggcagg

SEQ ID NO: 2548785 - DNA, 25 bp, Homo sapien
catttgcgacataatcctgagagaa

SEQ ID NO: 2548786 - DNA, 25 bp, Homo sapien
cagtggagttccgagagcctgtgac

SEQ ID NO: 2548787 - DNA, 25 bp, Homo sapien
ccagggcagggttattgagcagcaa

SEQ ID NO: 2548788 - DNA, 25 bp, Homo sapien
ctgagggaggggtctgggacctgtc

SEQ ID NO: 2548789 - DNA, 25 bp, Homo sapien
tgctgagggaggggtctgggacctg

SEQ ID NO: 2548790 - DNA, 25 bp, Homo sapien
gctgagggaggggtctgggacctgt

SEQ ID NO: 2548791 - DNA, 25 bp, Homo sapien
tgcagtggtacacggccacgatgta

SEQ ID NO: 2548792 - DNA, 25 bp, Homo sapien
tccttcatgcagtggtacacggcca

SEQ ID NO: 2548793 - DNA, 25 bp, Homo sapien
gcgcctcagcccgtccttcatgcag

SEQ ID NO: 2548794 - DNA, 25 bp, Homo sapien
gctccctggagcactgcgcctcagc

SEQ ID NO: 2548795 - DNA, 25 bp, Homo sapien
atagcttgatttgcaaactctaagc

SEQ ID NO: 2548796 - DNA, 25 bp, Homo sapien
gcatagcttgatttgcaaactctaa

SEQ ID NO: 2548797 - DNA, 25 bp, Homo sapien
catagcttgatttgcaaactctaag

SEQ ID NO: 2548798 - DNA, 25 bp, Homo sapien
gaggaagtagttctggcaggaggct

SEQ ID NO: 2548799 - DNA, 25 bp, Homo sapien
ggaagtagttctggcaggaggctgc

SEQ ID NO: 2548800 - DNA, 25 bp, Homo sapien
aggaagtagttctggcaggaggctg

SEQ ID NO: 2548801 - DNA, 25 bp, Homo sapien
tggcaaaaactgcaaaatgttccag

SEQ ID NO: 2548802 - DNA, 25 bp, Homo sapien
ctgtggcaaaaactgcaaaatgttc

SEQ ID NO: 2548803 - DNA, 25 bp, Homo sapien
gcaaaatgttccagttgttttccag

SEQ ID NO: 2548804 - DNA, 25 bp, Homo sapien
tgcaaaatgttccagttgttttcca

SEQ ID NO: 2548805 - DNA, 25 bp, Homo sapien
tccacgttggattcctccgcctctt

SEQ ID NO: 2548806 - DNA, 25 bp, Homo sapien
ccacgttggattcctccgcctcttc

SEQ ID NO: 2548807 - DNA, 25 bp, Homo sapien
tgcctgcatctgcaaccactgctcc

SEQ ID NO: 2548808 - DNA, 25 bp, Homo sapien
gcctgcatctgcaaccactgctcca

SEQ ID NO: 2548809 - DNA, 25 bp, Homo sapien
cacaactatggtgcacttcatcagc

SEQ ID NO: 2548810 - DNA, 25 bp, Homo sapien
tgtccatccgctggaggcgccttat

SEQ ID NO: 2548811 - DNA, 25 bp, Homo sapien
cacactgacgtgcttgtctgcgcat

SEQ ID NO: 2548812 - DNA, 25 bp, Homo sapien
tgttgcccacggcaagccttgccat

SEQ ID NO: 2548813 - DNA, 25 bp, Homo sapien
aggatgcgggtgcagtgtctgctgc

SEQ ID NO: 2548814 - DNA, 25 bp, Homo sapien
gagggcaggatgcgggtgcagtgtc

SEQ ID NO: 2548815 - DNA, 25 bp, Homo sapien
caggatgcgggtgcagtgtctgctg

SEQ ID NO: 2548816 - DNA, 25 bp, Homo sapien
ggcaggatgcgggtgcagtgtctgc

SEQ ID NO: 2548817 - DNA, 25 bp, Homo sapien
cagtccacagtgaatacgagatgaa

SEQ ID NO: 2548818 - DNA, 25 bp, Homo sapien
cagtgaatacgagatgaaacttttc

SEQ ID NO: 2548819 - DNA, 25 bp, Homo sapien
ttccgccatagttagatggatccat

SEQ ID NO: 2548820 - DNA, 25 bp, Homo sapien
tgaaacttttcctttgattccgcca

SEQ ID NO: 2548821 - DNA, 25 bp, Homo sapien
cagagaatggaaggtctcctttgaa

SEQ ID NO: 2548822 - DNA, 25 bp, Homo sapien
aattcccagcatcgagagaaagaaa

SEQ ID NO: 2548823 - DNA, 25 bp, Homo sapien
agaatggaaggtctcctttgaatgg

SEQ ID NO: 2548824 - DNA, 25 bp, Homo sapien
agagaagaaattcccagcatcgaga

SEQ ID NO: 2548825 - DNA, 25 bp, Homo sapien
ccctctcaaagccacagtgctgcgt

SEQ ID NO: 2548826 - DNA, 25 bp, Homo sapien
ggtcattttagcatccctctcaaag

SEQ ID NO: 2548827 - DNA, 25 bp, Homo sapien
atccctctcaaagccacagtgctgc

SEQ ID NO: 2548828 - DNA, 25 bp, Homo sapien
tcagggggtcattttagcatccctc

SEQ ID NO: 2548829 - DNA, 25 bp, Homo sapien
gatgtactccacgtaagcgatggca

SEQ ID NO: 2548830 - DNA, 25 bp, Homo sapien
tacagaggatgatgcggttgaagtt

SEQ ID NO: 2548831 - DNA, 25 bp, Homo sapien
ccacacggcgcttctttgtacagag

SEQ ID NO: 2548832 - DNA, 25 bp, Homo sapien
agatgactgatgaccccaggcgctt

SEQ ID NO: 2548833 - DNA, 25 bp, Homo sapien
caagttgagagtccgtggtggagac

SEQ ID NO: 2548834 - DNA, 25 bp, Homo sapien
gagcaagttgagagtccgtggtgga

SEQ ID NO: 2548835 - DNA, 25 bp, Homo sapien
ctgtggagcaagttgagagtccgtg

SEQ ID NO: 2548836 - DNA, 25 bp, Homo sapien
gttgagagtccgtggtggagacgcc

SEQ ID NO: 2548837 - DNA, 25 bp, Homo sapien
ggtagaagtgcatcacctggttgtc

SEQ ID NO: 2548838 - DNA, 25 bp, Homo sapien
tctgcatagatgttgtggtactggg

SEQ ID NO: 2548839 - DNA, 25 bp, Homo sapien
tcatgaagcagagaggatggcgacc

SEQ ID NO: 2548840 - DNA, 25 bp, Homo sapien
atggcgaccgaagccagcggtagaa

SEQ ID NO: 2548841 - DNA, 25 bp, Homo sapien
tggccctggttagaaagactctgtg

SEQ ID NO: 2548842 - DNA, 25 bp, Homo sapien
gacggctcctgacacctaagtgctg

SEQ ID NO: 2548843 - DNA, 25 bp, Homo sapien
ccattaagactaagggaagcccaat

SEQ ID NO: 2548844 - DNA, 25 bp, Homo sapien
gactctgtgtgaagtacctctggcc

SEQ ID NO: 2548845 - DNA, 25 bp, Homo sapien
gtgttgacggccaggttctgaaggt

SEQ ID NO: 2548846 - DNA, 25 bp, Homo sapien
ggcctgctggatcacgtcgaagctg

SEQ ID NO: 2548847 - DNA, 25 bp, Homo sapien
cgttgacatggtgagactggagaat

SEQ ID NO: 2548848 - DNA, 25 bp, Homo sapien
gcagcctgaccacccgtgatcatgt

SEQ ID NO: 2548849 - DNA, 25 bp, Homo sapien
agtggcttggtcatcgaactccatg

SEQ ID NO: 2548850 - DNA, 25 bp, Homo sapien
caaagaagaggtcggagccgaatgt

SEQ ID NO: 2548851 - DNA, 25 bp, Homo sapien
tgtggagtaacagcctgaactgttg

SEQ ID NO: 2548852 - DNA, 25 bp, Homo sapien
gagatgtcctctggtaggttcccaa

SEQ ID NO: 2548853 - DNA, 25 bp, Homo sapien
ttgaggtagtgacggatcatgcgcc

SEQ ID NO: 2548854 - DNA, 25 bp, Homo sapien
ctgctcatctcgaaggcctgcgaca

SEQ ID NO: 2548855 - DNA, 25 bp, Homo sapien
gataggcaccagtgggaattcctcc

SEQ ID NO: 2548856 - DNA, 25 bp, Homo sapien
gccagtccaggaccccatagttgat

SEQ ID NO: 2548857 - DNA, 25 bp, Homo sapien
aggaggccgtgctctgctgagtaca

SEQ ID NO: 2548858 - DNA, 25 bp, Homo sapien
tcttcaggtcagtttctgcccgaac

SEQ ID NO: 2548859 - DNA, 25 bp, Homo sapien
tgcccgaacttcgaaggtgtgtttg

SEQ ID NO: 2548860 - DNA, 25 bp, Homo sapien
tgtaggcgagcaggaatcgctggat

SEQ ID NO: 2548861 - DNA, 25 bp, Homo sapien
tacaggtagatatggcggatactcc

SEQ ID NO: 2548862 - DNA, 25 bp, Homo sapien
acaaagacggatgccctgcgctgtg

SEQ ID NO: 2548863 - DNA, 25 bp, Homo sapien
tccagcacaaagacggatgccctgc

SEQ ID NO: 2548864 - DNA, 25 bp, Homo sapien
aagatcccgaagagcgctttgtggg

SEQ ID NO: 2548865 - DNA, 25 bp, Homo sapien
caccagctgtttattgaccacacac

SEQ ID NO: 2548866 - DNA, 25 bp, Homo sapien
gggaacgagtccactgtcgctgctg

SEQ ID NO: 2548867 - DNA, 25 bp, Homo sapien
gcctcccccagttcagtcgagggtg

SEQ ID NO: 2548868 - DNA, 25 bp, Homo sapien
tgtgggaacgagtccactgtcgctg

SEQ ID NO: 2548869 - DNA, 25 bp, Homo sapien
cagcccacaccctgggcgggtttct

SEQ ID NO: 2548870 - DNA, 25 bp, Homo sapien
gttgatctcgttgatgtgttcctgg

SEQ ID NO: 2548871 - DNA, 25 bp, Homo sapien
tgacagctcagcgttgatctcgttg

SEQ ID NO: 2548872 - DNA, 25 bp, Homo sapien
ttgtagaccatgttggagcgaggaa

SEQ ID NO: 2548873 - DNA, 25 bp, Homo sapien
catatacgccctcgatgtctggcgc

SEQ ID NO: 2548874 - DNA, 25 bp, Homo sapien
cctctgagaatagacaagagctgtc

SEQ ID NO: 2548875 - DNA, 25 bp, Homo sapien
tgaaaagcaacctgcagcctctgag

SEQ ID NO: 2548876 - DNA, 25 bp, Homo sapien
catgggtttaacctgagggtgtaga

SEQ ID NO: 2548877 - DNA, 25 bp, Homo sapien
tagtcagagaaacggaaagagagcc

SEQ ID NO: 2548878 - DNA, 25 bp, Homo sapien
aaatgtccaggttgcaataaagcgt

SEQ ID NO: 2548879 - DNA, 25 bp, Homo sapien
gatgaaatgataccccttgagctct

SEQ ID NO: 2548880 - DNA, 25 bp, Homo sapien
ggagcaccctagcttcatgcatgaa

SEQ ID NO: 2548881 - DNA, 25 bp, Homo sapien
tacgagctgcacttgcacaggtgac

SEQ ID NO: 2548882 - DNA, 25 bp, Homo sapien
ccattttgccatgccctaccttgaa

SEQ ID NO: 2548883 - DNA, 25 bp, Homo sapien
caacaacataaagtgagggcctacc

SEQ ID NO: 2548884 - DNA, 25 bp, Homo sapien
ccttaacatacctaacgtgtgtgtg

SEQ ID NO: 2548885 - DNA, 25 bp, Homo sapien
taaaacattaaacactgaggcagga

SEQ ID NO: 2548886 - DNA, 25 bp, Homo sapien
ccaaagagcctacggagacagagtt

SEQ ID NO: 2548887 - DNA, 25 bp, Homo sapien
cacacacgttgttttgaggaattcc

SEQ ID NO: 2548888 - DNA, 25 bp, Homo sapien
agaacatccccataaggtactgagg

SEQ ID NO: 2548889 - DNA, 25 bp, Homo sapien
caagctcatcgtgacaaggacacca

SEQ ID NO: 2548890 - DNA, 25 bp, Homo sapien
tcctccgctttagcgactcgctggt

SEQ ID NO: 2548891 - DNA, 25 bp, Homo sapien
agtgcaagtcactgccaacgagcgc

SEQ ID NO: 2548892 - DNA, 25 bp, Homo sapien
cgctggttcacgtagaacacacggg

SEQ ID NO: 2548893 - DNA, 25 bp, Homo sapien
tgctcagcctgatgcagtgcaagtc

SEQ ID NO: 2548894 - DNA, 25 bp, Homo sapien
cttcttgtggaaccggagccagaca

SEQ ID NO: 2548895 - DNA, 25 bp, Homo sapien
tgcctcttcctgcgggcgaggcgct

SEQ ID NO: 2548896 - DNA, 25 bp, Homo sapien
gatgctgcgggcagttcttcgcaag

SEQ ID NO: 2548897 - DNA, 25 bp, Homo sapien
tgcacaatctgccacggaaggtcca

SEQ ID NO: 2548898 - DNA, 25 bp, Homo sapien
tgaggcagctttacgaggccgaagt

SEQ ID NO: 2548899 - DNA, 25 bp, Homo sapien
cacagtcggcgtgaggtcctgggac

SEQ ID NO: 2548900 - DNA, 25 bp, Homo sapien
tcctggctctcccaaagaactcgct

SEQ ID NO: 2548901 - DNA, 25 bp, Homo sapien
acttggcctcggactgtcttctgag

SEQ ID NO: 2548902 - DNA, 25 bp, Homo sapien
cataacttgaggatactgtccgttc

SEQ ID NO: 2548903 - DNA, 25 bp, Homo sapien
tacttcttaggtcagtgcataactt

SEQ ID NO: 2548904 - DNA, 25 bp, Homo sapien
ttttattacttcttaggtcagtgca

SEQ ID NO: 2548905 - DNA, 25 bp, Homo sapien
ggtcagtgcataacttgaggatact

SEQ ID NO: 2548906 - DNA, 25 bp, Homo sapien
tatataaatgcgtatacaagtcctg

SEQ ID NO: 2548907 - DNA, 25 bp, Homo sapien
tcagttccaagtattgtctaagttc

SEQ ID NO: 2548908 - DNA, 25 bp, Homo sapien
tctttcttgagttgggttctccctg

SEQ ID NO: 2548909 - DNA, 25 bp, Homo sapien
taagttatctagaattggttgcagc

SEQ ID NO: 2548910 - DNA, 25 bp, Homo sapien
cagccagtcggggtgtttgacacgt

SEQ ID NO: 2548911 - DNA, 25 bp, Homo sapien
tgtttgacacgtggcactgggttct

SEQ ID NO: 2548912 - DNA, 25 bp, Homo sapien
ctccagcagttttttgtgcagccag

SEQ ID NO: 2548913 - DNA, 25 bp, Homo sapien
ttctgcttgtagacatcattcttct

SEQ ID NO: 2548914 - DNA, 25 bp, Homo sapien
gcttcccagccgctcaatgtagtag

SEQ ID NO: 2548915 - DNA, 25 bp, Homo sapien
tcaatgtagtagtcccaatccagaa

SEQ ID NO: 2548916 - DNA, 25 bp, Homo sapien
ttctggatggcgcttcccagccgct

SEQ ID NO: 2548917 - DNA, 25 bp, Homo sapien
gccgctcaatgtagtagtcccaatc

SEQ ID NO: 2548918 - DNA, 25 bp, Homo sapien
taaagggccccaggcacttcatgtt

SEQ ID NO: 2548919 - DNA, 25 bp, Homo sapien
gaaactctatgatgaaaggtgccca

SEQ ID NO: 2548920 - DNA, 25 bp, Homo sapien
tagtaggtggctgagccaacacccc

SEQ ID NO: 2548921 - DNA, 25 bp, Homo sapien
ggccttagtccatccaatagaacag

SEQ ID NO: 2548922 - DNA, 25 bp, Homo sapien
tccggagaaagtgcttcctcaccgt

SEQ ID NO: 2548923 - DNA, 25 bp, Homo sapien
ctcttgagccatttccggagaaagt

SEQ ID NO: 2548924 - DNA, 25 bp, Homo sapien
agaaagtgcttcctcaccgtgggct

SEQ ID NO: 2548925 - DNA, 25 bp, Homo sapien
gagccatttccggagaaagtgcttc

SEQ ID NO: 2548926 - DNA, 25 bp, Homo sapien
ggtgttcatcaaccccatgcaggca

SEQ ID NO: 2548927 - DNA, 25 bp, Homo sapien
tgagacgattagagtgaagccctgt

SEQ ID NO: 2548928 - DNA, 25 bp, Homo sapien
tagcaaagcaactggcaaccgtcag

SEQ ID NO: 2548929 - DNA, 25 bp, Homo sapien
tcctcacagcgtaaccatgggcatg

SEQ ID NO: 2548930 - DNA, 25 bp, Homo sapien
cgggagatgatgtagcggcaactca

SEQ ID NO: 2548931 - DNA, 25 bp, Homo sapien
gctcgaatagctcagagtcaggcat

SEQ ID NO: 2548932 - DNA, 25 bp, Homo sapien
ttccgagacatggaacggttctcag

SEQ ID NO: 2548933 - DNA, 25 bp, Homo sapien
tgctgatggacgtagacttctgctc

SEQ ID NO: 2548934 - DNA, 25 bp, Homo sapien
tagtcagccaccttggctacagagc

SEQ ID NO: 2548935 - DNA, 25 bp, Homo sapien
gtacagcacgtccagccagtagtca

SEQ ID NO: 2548936 - DNA, 25 bp, Homo sapien
cagagaaccgtcttcattgaacaca

SEQ ID NO: 2548937 - DNA, 25 bp, Homo sapien
ggcgtttgacctcaaagcccttgag

SEQ ID NO: 2548938 - DNA, 25 bp, Homo sapien
tcaaaaaagatgctgttctctgagc

SEQ ID NO: 2548939 - DNA, 25 bp, Homo sapien
aggctggaagaatcatggcaaggta

SEQ ID NO: 2548940 - DNA, 25 bp, Homo sapien
tgctgttctctgagcgggtgacgta

SEQ ID NO: 2548941 - DNA, 25 bp, Homo sapien
ggtgagtgaggacggctcagccagc

SEQ ID NO: 2548942 - DNA, 25 bp, Homo sapien
tgggcaggacgcaccatataccatc

SEQ ID NO: 2548943 - DNA, 25 bp, Homo sapien
tcaacatggcgcctgggtaggagat

SEQ ID NO: 2548944 - DNA, 25 bp, Homo sapien
tgaccatgatgttcaacatggcgcc

SEQ ID NO: 2548945 - DNA, 25 bp, Homo sapien
ttcacattggtcgtcttgaagacaa

SEQ ID NO: 2548946 - DNA, 25 bp, Homo sapien
gtgatgatgttggcccctgtgaagc

SEQ ID NO: 2548947 - DNA, 25 bp, Homo sapien
tgatgatgttggcccctgtgaagca

SEQ ID NO: 2548948 - DNA, 25 bp, Homo sapien
cccctgtgaagcagacgatgccagc

SEQ ID NO: 2548949 - DNA, 25 bp, Homo sapien
gcgcatgacatagccatagaaggag

SEQ ID NO: 2548950 - DNA, 25 bp, Homo sapien
gagttcaggatgcacttgtgggcca

SEQ ID NO: 2548951 - DNA, 25 bp, Homo sapien
atgttcttgcagcgcttcacctcag

SEQ ID NO: 2548952 - DNA, 25 bp, Homo sapien
cagctgcagcgagtcatacagcacc

SEQ ID NO: 2548953 - DNA, 25 bp, Homo sapien
tgtcccggaaggcacgcacggtgtc

SEQ ID NO: 2548954 - DNA, 25 bp, Homo sapien
ttgaactcgtaacgcctgtcccgga

SEQ ID NO: 2548955 - DNA, 25 bp, Homo sapien
ttcttgtaggctttccggcagtaat

SEQ ID NO: 2548956 - DNA, 25 bp, Homo sapien
tagaaggagttttcccgctggcaga

SEQ ID NO: 2548957 - DNA, 25 bp, Homo sapien
cgagctggcccctctgggaacaagg

SEQ ID NO: 2548958 - DNA, 25 bp, Homo sapien
cagttcatgaaaggcccgagctggc

SEQ ID NO: 2548959 - DNA, 25 bp, Homo sapien
gctggtgctggatccgatggtattc

SEQ ID NO: 2548960 - DNA, 25 bp, Homo sapien
cgtatttcgcctgttcctcgcggga

SEQ ID NO: 2548961 - DNA, 25 bp, Homo sapien
agacacaccggcttcccaccaagtg

SEQ ID NO: 2548962 - DNA, 25 bp, Homo sapien
ccaagtggagaaaggcggccgacac

SEQ ID NO: 2548963 - DNA, 25 bp, Homo sapien
gcaagttcaaaaggaggcacagaca

SEQ ID NO: 2548964 - DNA, 25 bp, Homo sapien
agttcaaaaggaggcacagacacac

SEQ ID NO: 2548965 - DNA, 25 bp, Homo sapien
agtgcccacccaggcggccgacact

SEQ ID NO: 2548966 - DNA, 25 bp, Homo sapien
gtgcccacccaggcggccgacactc

SEQ ID NO: 2548967 - DNA, 25 bp, Homo sapien
cgtttcccaccgagtgcccacccag

SEQ ID NO: 2548968 - DNA, 25 bp, Homo sapien
tttcccaccgagtgcccacccaggc

SEQ ID NO: 2548969 - DNA, 25 bp, Homo sapien
gctccaggcttattgaagtcacagg

SEQ ID NO: 2548970 - DNA, 25 bp, Homo sapien
tgctccaggcttattgaagtcacag

SEQ ID NO: 2548971 - DNA, 25 bp, Homo sapien
tccaggcttattgaagtcacaggca

SEQ ID NO: 2548972 - DNA, 25 bp, Homo sapien
gtttgctccaggcttattgaagtca

SEQ ID NO: 2548973 - DNA, 25 bp, Homo sapien
actctgacacgggaagtaaagtctc

SEQ ID NO: 2548974 - DNA, 25 bp, Homo sapien
ccgactctgacacgggaagtaaagt

SEQ ID NO: 2548975 - DNA, 25 bp, Homo sapien
tctgacacgggaagtaaagtctcac

SEQ ID NO: 2548976 - DNA, 25 bp, Homo sapien
gctccgactctgacacgggaagtaa

SEQ ID NO: 2548977 - DNA, 25 bp, Homo sapien
cttcagggaggcaagcttgctctta

SEQ ID NO: 2548978 - DNA, 25 bp, Homo sapien
tgcaggcggttggtcaggatgatgt

SEQ ID NO: 2548979 - DNA, 25 bp, Homo sapien
tagatgagtggacactcgatgcggc

SEQ ID NO: 2548980 - DNA, 25 bp, Homo sapien
cgatgcggctgggaacgtccttcag

SEQ ID NO: 2548981 - DNA, 25 bp, Homo sapien
agggagcctggcgtcctcacatcta

SEQ ID NO: 2548982 - DNA, 25 bp, Homo sapien
gggagcctggcgtcctcacatctac

SEQ ID NO: 2548983 - DNA, 25 bp, Homo sapien
cagggagcctggcgtcctcacatct

SEQ ID NO: 2548984 - DNA, 25 bp, Homo sapien
tcacacgtcacaaccatgactgccc

SEQ ID NO: 2548985 - DNA, 25 bp, Homo sapien
cacacgtcacaaccatgactgccct

SEQ ID NO: 2548986 - DNA, 25 bp, Homo sapien
tgtgtcatccgtccacagcaccaca

SEQ ID NO: 2548987 - DNA, 25 bp, Homo sapien
gcaggtgcacaataaacgtgctgct

SEQ ID NO: 2548988 - DNA, 25 bp, Homo sapien
agcaccacacgcagcaggtgcacaa

SEQ ID NO: 2548989 - DNA, 25 bp, Homo sapien
taaacgtgctgctgaaagacgtggt

SEQ ID NO: 2548990 - DNA, 25 bp, Homo sapien
tgaagaaggcgccaaacacagactg

SEQ ID NO: 2548991 - DNA, 25 bp, Homo sapien
gaaggcgccaaacacagactggctc

SEQ ID NO: 2548992 - DNA, 25 bp, Homo sapien
aagaaggcgccaaacacagactggc

SEQ ID NO: 2548993 - DNA, 25 bp, Homo sapien
tgtgaagaaggcgccaaacacagac

SEQ ID NO: 2548994 - DNA, 25 bp, Homo sapien
gcaggaagtcaaaggcggcaggatt

SEQ ID NO: 2548995 - DNA, 25 bp, Homo sapien
tggtgacttgctccacaggcacttt

SEQ ID NO: 2548996 - DNA, 25 bp, Homo sapien
tcctcttcctcaagggcgtggcgca

SEQ ID NO: 2548997 - DNA, 25 bp, Homo sapien
tcttctcaacccgctgcagcaggaa

SEQ ID NO: 2548998 - DNA, 25 bp, Homo sapien
tgggaagaatctgaatcccagggaa

SEQ ID NO: 2548999 - DNA, 25 bp, Homo sapien
caagagtgggaagaatctgaatccc

SEQ ID NO: 2549000 - DNA, 25 bp, Homo sapien
cacaagagtgggaagaatctgaatc

SEQ ID NO: 2549001 - DNA, 25 bp, Homo sapien
cacagcacaagagtgggaagaatct

SEQ ID NO: 2549002 - DNA, 25 bp, Homo sapien
ccccgacgtaggtctcagagtccag

SEQ ID NO: 2549003 - DNA, 25 bp, Homo sapien
tcctaaaccggcaagggatatcgct

SEQ ID NO: 2549004 - DNA, 25 bp, Homo sapien
atatcgctgcggaaaaccccagact

SEQ ID NO: 2549005 - DNA, 25 bp, Homo sapien
tgtccgtcgtccgtcagcttattga

SEQ ID NO: 2549006 - DNA, 25 bp, Homo sapien
aagatgaatgggtggacgtacttca

SEQ ID NO: 2549007 - DNA, 25 bp, Homo sapien
ctcgtcgggctccatgggaataatg

SEQ ID NO: 2549008 - DNA, 25 bp, Homo sapien
taatggtgcacagagcaaagatgaa

SEQ ID NO: 2549009 - DNA, 25 bp, Homo sapien
cgtacttcatgtacaggtagtaagt

SEQ ID NO: 2549010 - DNA, 25 bp, Homo sapien
ctgacacagaatacgtggccagagt

SEQ ID NO: 2549011 - DNA, 25 bp, Homo sapien
gcgtgcacacggcagcagggggagc

SEQ ID NO: 2549012 - DNA, 25 bp, Homo sapien
agcagggggagccgggatgtggctc

SEQ ID NO: 2549013 - DNA, 25 bp, Homo sapien
atgcgtgcacacggcagcaggggga

SEQ ID NO: 2549014 - DNA, 25 bp, Homo sapien
cagggggagccgggatgtggctcac

SEQ ID NO: 2549015 - DNA, 25 bp, Homo sapien
gcaggggcagccgggatgtggctta

SEQ ID NO: 2549016 - DNA, 25 bp, Homo sapien
ccatctggatgcgtgcacacggcag

SEQ ID NO: 2549017 - DNA, 25 bp, Homo sapien
tctggatgcgtgcacacggcagcag

SEQ ID NO: 2549018 - DNA, 25 bp, Homo sapien
caggggcagccgggatgtggcttac

SEQ ID NO: 2549019 - DNA, 25 bp, Homo sapien
gcggccgccttgagattatgactgc

SEQ ID NO: 2549020 - DNA, 25 bp, Homo sapien
atagcctagcttggccttggcggcc

SEQ ID NO: 2549021 - DNA, 25 bp, Homo sapien
tccggcacatgtcctccgggtctag

SEQ ID NO: 2549022 - DNA, 25 bp, Homo sapien
ccgggtctagctccacgggatcata

SEQ ID NO: 2549023 - DNA, 25 bp, Homo sapien
tgcatgctcagaccgtggactgctg

SEQ ID NO: 2549024 - DNA, 25 bp, Homo sapien
tcagaccgtggactgctgcccgggc

SEQ ID NO: 2549025 - DNA, 25 bp, Homo sapien
ctgaggcagtccatgtggatgcact

SEQ ID NO: 2549026 - DNA, 25 bp, Homo sapien
cctgctgcatgctcagaccgtggac

SEQ ID NO: 2549027 - DNA, 25 bp, Homo sapien
tctcctggacgtgttcaaaccacct

SEQ ID NO: 2549028 - DNA, 25 bp, Homo sapien
tgaccatgatggtgggtttggtctc

SEQ ID NO: 2549029 - DNA, 25 bp, Homo sapien
tggacgtgttcaaaccacctttgga

SEQ ID NO: 2549030 - DNA, 25 bp, Homo sapien
gtttggtctcctggacgtgttcaaa

SEQ ID NO: 2549031 - DNA, 25 bp, Homo sapien
atcgggttcattgaagacacaaaag

SEQ ID NO: 2549032 - DNA, 25 bp, Homo sapien
tgaagacacaaaaggggccttcata

SEQ ID NO: 2549033 - DNA, 25 bp, Homo sapien
ctcatcgggttcattgaagacacaa

SEQ ID NO: 2549034 - DNA, 25 bp, Homo sapien
gcttgggggtgaactcaaaatcttc

SEQ ID NO: 2549035 - DNA, 25 bp, Homo sapien
gtttggtcgtctcaatgtcaaatgc

SEQ ID NO: 2549036 - DNA, 25 bp, Homo sapien
atcatcataatctggtctgtctcag

SEQ ID NO: 2549037 - DNA, 25 bp, Homo sapien
ctggccatcgatcatgtaggaaatc

SEQ ID NO: 2549038 - DNA, 25 bp, Homo sapien
gggcagtttggtcgtctcaatgtca

SEQ ID NO: 2549039 - DNA, 25 bp, Homo sapien
cagcactgaagaatattctctccag

SEQ ID NO: 2549040 - DNA, 25 bp, Homo sapien
agcaaacatatctttgagtcagatt

SEQ ID NO: 2549041 - DNA, 25 bp, Homo sapien
aaacatatctttgagtcagattcac

SEQ ID NO: 2549042 - DNA, 25 bp, Homo sapien
gaaattttaggatgaaggtaacaca

SEQ ID NO: 2549043 - DNA, 25 bp, Homo sapien
cgggtgatttctaccggaaaagcat

SEQ ID NO: 2549044 - DNA, 25 bp, Homo sapien
aggtcgttcaacaaggtcatctcgg

SEQ ID NO: 2549045 - DNA, 25 bp, Homo sapien
ggtatctgacattgtaccaatgagc

SEQ ID NO: 2549046 - DNA, 25 bp, Homo sapien
gcatttcctcggtatctgacattgt

SEQ ID NO: 2549047 - DNA, 25 bp, Homo sapien
gtactcgcgcatgtccacaatgttg

SEQ ID NO: 2549048 - DNA, 25 bp, Homo sapien
gtggtagggaacatcgtactcgcgc

SEQ ID NO: 2549049 - DNA, 25 bp, Homo sapien
tcttcaggtcaatggagaggcggat

SEQ ID NO: 2549050 - DNA, 25 bp, Homo sapien
ggtcagctatcttcttagaggtttc

SEQ ID NO: 2549051 - DNA, 25 bp, Homo sapien
gcttcaaacccaccaagtgatttgg

SEQ ID NO: 2549052 - DNA, 25 bp, Homo sapien
cagtgtggaaggacagcctgatgta

SEQ ID NO: 2549053 - DNA, 25 bp, Homo sapien
ctttgacaagatcctccacagtgtg

SEQ ID NO: 2549054 - DNA, 25 bp, Homo sapien
aaagcagagctgtgtacgcgtcgct

SEQ ID NO: 2549055 - DNA, 25 bp, Homo sapien
aagatgaaacttctcgctcacaacc

SEQ ID NO: 2549056 - DNA, 25 bp, Homo sapien
agaaaagatgaaacttctcgctcac

SEQ ID NO: 2549057 - DNA, 25 bp, Homo sapien
gaaaagatgaaacttctcgctcaca

SEQ ID NO: 2549058 - DNA, 25 bp, Homo sapien
aaagatgaaacttctcgctcacaac

SEQ ID NO: 2549059 - DNA, 25 bp, Homo sapien
cgcaatgtagaaatacggtttatag

SEQ ID NO: 2549060 - DNA, 25 bp, Homo sapien
caatgtagaaatacggtttataggg

SEQ ID NO: 2549061 - DNA, 25 bp, Homo sapien
tcgcaatgtagaaatacggtttata

SEQ ID NO: 2549062 - DNA, 25 bp, Homo sapien
tgtagaaatacggtttatagggcaa

SEQ ID NO: 2549063 - DNA, 25 bp, Homo sapien
catgaacacccataaaagtgggttt

SEQ ID NO: 2549064 - DNA, 25 bp, Homo sapien
gagctacatgaacacccataaaagt

SEQ ID NO: 2549065 - DNA, 25 bp, Homo sapien
taaaagtgggttttagcttgtcgca

SEQ ID NO: 2549066 - DNA, 25 bp, Homo sapien
tagcttgtcgcagtcaggggcttac

SEQ ID NO: 2549067 - DNA, 25 bp, Homo sapien
cactgcactgcctaagcgcttatct

SEQ ID NO: 2549068 - DNA, 25 bp, Homo sapien
gaataaagtagtaatccactgcact

SEQ ID NO: 2549069 - DNA, 25 bp, Homo sapien
gcttccgtcatcttgaataaagtag

SEQ ID NO: 2549070 - DNA, 25 bp, Homo sapien
gcctaagcgcttatcttcatctaaa

SEQ ID NO: 2549071 - DNA, 25 bp, Homo sapien
agggttgcagccatattcctgggtg

SEQ ID NO: 2549072 - DNA, 25 bp, Homo sapien
taaggaccacgctatgaccagaagg

SEQ ID NO: 2549073 - DNA, 25 bp, Homo sapien
ccccactctttagataaggaccacg

SEQ ID NO: 2549074 - DNA, 25 bp, Homo sapien
ggtgggagaaggacctagtgcttac

SEQ ID NO: 2549075 - DNA, 25 bp, Homo sapien
actgactccgttccaggcgcttgag

SEQ ID NO: 2549076 - DNA, 25 bp, Homo sapien
gcaaatccatcttatccgtccactg

SEQ ID NO: 2549077 - DNA, 25 bp, Homo sapien
gctcaaaaccaaaccgcaaatccat

SEQ ID NO: 2549078 - DNA, 25 bp, Homo sapien
tgcatgttaatgagccagcctgtct

SEQ ID NO: 2549079 - DNA, 25 bp, Homo sapien
gcctggcccgggtcccgccgctctc

SEQ ID NO: 2549080 - DNA, 25 bp, Homo sapien
ctggcccgggtcccgccgctctcat

SEQ ID NO: 2549081 - DNA, 25 bp, Homo sapien
cctggcccgggtcccgccgctctca

SEQ ID NO: 2549082 - DNA, 25 bp, Homo sapien
tggcctcgccatccgcgcctgggtc

SEQ ID NO: 2549083 - DNA, 25 bp, Homo sapien
ctggcctcgccatccgcgcctgggt

SEQ ID NO: 2549084 - DNA, 25 bp, Homo sapien
ctcgccatccgcgcctgggtccgcg

SEQ ID NO: 2549085 - DNA, 25 bp, Homo sapien
gcctcgccatccgcgcctgggtccg

SEQ ID NO: 2549086 - DNA, 25 bp, Homo sapien
ggagccgttggctaccacctctgct

SEQ ID NO: 2549087 - DNA, 25 bp, Homo sapien
agccgttggctaccacctctgcttc

SEQ ID NO: 2549088 - DNA, 25 bp, Homo sapien
gagccgttggctaccacctctgctt

SEQ ID NO: 2549089 - DNA, 25 bp, Homo sapien
gccgttggctaccacctctgcttca

SEQ ID NO: 2549090 - DNA, 25 bp, Homo sapien
catgttgttcttcctcatcatgaac

SEQ ID NO: 2549091 - DNA, 25 bp, Homo sapien
ttgcaccggccttcctcatgttgtt

SEQ ID NO: 2549092 - DNA, 25 bp, Homo sapien
tggaacattggatccctcctgaggt

SEQ ID NO: 2549093 - DNA, 25 bp, Homo sapien
ctggaccgcctcgtctttgcaccgg

SEQ ID NO: 2549094 - DNA, 25 bp, Homo sapien
tccgtggtgtatttatggcactttt

SEQ ID NO: 2549095 - DNA, 25 bp, Homo sapien
tgttccgtggtgtatttatggcact

SEQ ID NO: 2549096 - DNA, 25 bp, Homo sapien
ttgtggatagcgctgtgataaacac

SEQ ID NO: 2549097 - DNA, 25 bp, Homo sapien
cacacgagggcagggattgtttgat

SEQ ID NO: 2549098 - DNA, 25 bp, Homo sapien
tccagttgtccgcaaggagttttgg

SEQ ID NO: 2549099 - DNA, 25 bp, Homo sapien
tagagccgcagtgctgagtacacat

SEQ ID NO: 2549100 - DNA, 25 bp, Homo sapien
taaaaaccatcacgatagggtctgg

SEQ ID NO: 2549101 - DNA, 25 bp, Homo sapien
tttgggaggaattgacagcgtagct

SEQ ID NO: 2549102 - DNA, 25 bp, Homo sapien
ggtgtggacgccactacagttcatc

SEQ ID NO: 2549103 - DNA, 25 bp, Homo sapien
tcagccttcgccgccaagatgaggg

SEQ ID NO: 2549104 - DNA, 25 bp, Homo sapien
tttgcaggggaaagacgcctcagcc

SEQ ID NO: 2549105 - DNA, 25 bp, Homo sapien
ttctggccggcgctgaggatgaact

SEQ ID NO: 2549106 - DNA, 25 bp, Homo sapien
tagtcgaggcagtttcaattgttac

SEQ ID NO: 2549107 - DNA, 25 bp, Homo sapien
cagtcgctgccttcaggtggtgctg

SEQ ID NO: 2549108 - DNA, 25 bp, Homo sapien
ttactgtggaccgaattaggatcac

SEQ ID NO: 2549109 - DNA, 25 bp, Homo sapien
taaatcaggtgattcaagatgccca

SEQ ID NO: 2549110 - DNA, 25 bp, Homo sapien
ccaatctgagctatgcttggtgtcc

SEQ ID NO: 2549111 - DNA, 25 bp, Homo sapien
cagggaatgagcctagtggccaaca

SEQ ID NO: 2549112 - DNA, 25 bp, Homo sapien
tttattactgcatccccaatctgag

SEQ ID NO: 2549113 - DNA, 25 bp, Homo sapien
gaatcctttagttcttgtcagggca

SEQ ID NO: 2549114 - DNA, 25 bp, Homo sapien
acaggttcaagaaagcctgtttaag

SEQ ID NO: 2549115 - DNA, 25 bp, Homo sapien
ccaactggaagcgtacaggttcaag

SEQ ID NO: 2549116 - DNA, 25 bp, Homo sapien
agcagcagacccaactggaagcgta

SEQ ID NO: 2549117 - DNA, 25 bp, Homo sapien
tctgtggaaccattcagttttttta

SEQ ID NO: 2549118 - DNA, 25 bp, Homo sapien
tgaaagagagatctgcacgcagcac

SEQ ID NO: 2549119 - DNA, 25 bp, Homo sapien
tagaaagactgtcccgcaggagagg

SEQ ID NO: 2549120 - DNA, 25 bp, Homo sapien
tcccacttctgggtacagacgcaaa

SEQ ID NO: 2549121 - DNA, 25 bp, Homo sapien
ttcacgctagcgaggagatggcaac

SEQ ID NO: 2549122 - DNA, 25 bp, Homo sapien
gccaggcacgtgcacctggacacga

SEQ ID NO: 2549123 - DNA, 25 bp, Homo sapien
tgcacctggacacgagaatatggct

SEQ ID NO: 2549124 - DNA, 25 bp, Homo sapien
gacacgagaatatggctgtgctgtt

SEQ ID NO: 2549125 - DNA, 25 bp, Homo sapien
gagaatatggctgtgctgttccggc

SEQ ID NO: 2549126 - DNA, 25 bp, Homo sapien
tacccagatatgctgttaatttagg

SEQ ID NO: 2549127 - DNA, 25 bp, Homo sapien
caaacatgttgtgtgtacccagata

SEQ ID NO: 2549128 - DNA, 25 bp, Homo sapien
aaacagtacaatttctatgaagtgg

SEQ ID NO: 2549129 - DNA, 25 bp, Homo sapien
tagtcaatacagttgggatatctga

SEQ ID NO: 2549130 - DNA, 25 bp, Homo sapien
taaccaggccctgcttatctgccaa

SEQ ID NO: 2549131 - DNA, 25 bp, Homo sapien
agtctacagcccttggtattcccag

SEQ ID NO: 2549132 - DNA, 25 bp, Homo sapien
tatctgccaagatcagagagactgg

SEQ ID NO: 2549133 - DNA, 25 bp, Homo sapien
gtgctcggggtagtatgcccataga

SEQ ID NO: 2549134 - DNA, 25 bp, Homo sapien
tctgcatacaggagatcccaactga

SEQ ID NO: 2549135 - DNA, 25 bp, Homo sapien
gagaatgcctccgttgggactggaa

SEQ ID NO: 2549136 - DNA, 25 bp, Homo sapien
cagtggtccacatacaaaatcaggg

SEQ ID NO: 2549137 - DNA, 25 bp, Homo sapien
tcagcacggcaagaaaccaagatgg

SEQ ID NO: 2549138 - DNA, 25 bp, Homo sapien
tgtctgaaccatgagacccacgggc

SEQ ID NO: 2549139 - DNA, 25 bp, Homo sapien
tatcaaagggacatcggtgctcacg

SEQ ID NO: 2549140 - DNA, 25 bp, Homo sapien
tacagggtaagtacagggctgcctg

SEQ ID NO: 2549141 - DNA, 25 bp, Homo sapien
gacagggcggcaaatagttcatctt

SEQ ID NO: 2549142 - DNA, 25 bp, Homo sapien
tttttgacagtttagcaataaacat

SEQ ID NO: 2549143 - DNA, 25 bp, Homo sapien
ctttttgacagtttagcaataaaca

SEQ ID NO: 2549144 - DNA, 25 bp, Homo sapien
ttttgacagtttagcaataaacata

SEQ ID NO: 2549145 - DNA, 25 bp, Homo sapien
agccaggcgcgccatcctgcggagc

SEQ ID NO: 2549146 - DNA, 25 bp, Homo sapien
ctacagggcggcaagctcagccagg

SEQ ID NO: 2549147 - DNA, 25 bp, Homo sapien
ctgtttctccccggactgtagctgt

SEQ ID NO: 2549148 - DNA, 25 bp, Homo sapien
atcctgcggagctggctcccgtgca

SEQ ID NO: 2549149 - DNA, 25 bp, Homo sapien
acagcctggctgacgggcctgccag

SEQ ID NO: 2549150 - DNA, 25 bp, Homo sapien
cctgccagcgttgggaaaagccact

SEQ ID NO: 2549151 - DNA, 25 bp, Homo sapien
ctgccctgcgggtgacaggctgtcc

SEQ ID NO: 2549152 - DNA, 25 bp, Homo sapien
taggttcgcatgaagtggaactgga

SEQ ID NO: 2549153 - DNA, 25 bp, Homo sapien
cgtctgcacattcaagagcggccaa

SEQ ID NO: 2549154 - DNA, 25 bp, Homo sapien
ttccatctgtgcacggccgggaact

SEQ ID NO: 2549155 - DNA, 25 bp, Homo sapien
cctgatcgagttttgatggctcctc

SEQ ID NO: 2549156 - DNA, 25 bp, Homo sapien
gagcggccaaaacatcctgatcgag

SEQ ID NO: 2549157 - DNA, 25 bp, Homo sapien
gaagagccgcctggccggttccctg

SEQ ID NO: 2549158 - DNA, 25 bp, Homo sapien
cctcgagctgatcctcgtgcctggg

SEQ ID NO: 2549159 - DNA, 25 bp, Homo sapien
cggttccctggtgacctcgagctga

SEQ ID NO: 2549160 - DNA, 25 bp, Homo sapien
ggacattttagcgatcctggctgac

SEQ ID NO: 2549161 - DNA, 25 bp, Homo sapien
ccagggtcctgctgtgattcagagg

SEQ ID NO: 2549162 - DNA, 25 bp, Homo sapien
tggtctgcgggagaaggctctaaca

SEQ ID NO: 2549163 - DNA, 25 bp, Homo sapien
gaaacgctacgtcctatattttgca

SEQ ID NO: 2549164 - DNA, 25 bp, Homo sapien
tcctgtggccattcccgagttggtc

SEQ ID NO: 2549165 - DNA, 25 bp, Homo sapien
ggcgggctgttatttcgagctgcat

SEQ ID NO: 2549166 - DNA, 25 bp, Homo sapien
tcgtatgtccaaaagcaccgactgt

SEQ ID NO: 2549167 - DNA, 25 bp, Homo sapien
aacgccctcacggaaatggaattgc

SEQ ID NO: 2549168 - DNA, 25 bp, Homo sapien
cgagctgcattttgccgatttttta

SEQ ID NO: 2549169 - DNA, 25 bp, Homo sapien
cagcaactcttatacccaaaacctc

SEQ ID NO: 2549170 - DNA, 25 bp, Homo sapien
ctccatccgcgaccaactgccgtga

SEQ ID NO: 2549171 - DNA, 25 bp, Homo sapien
gcaacagcaactcttgcatccaaaa

SEQ ID NO: 2549172 - DNA, 25 bp, Homo sapien
agtgatgggaacgacaggaagccac

SEQ ID NO: 2549173 - DNA, 25 bp, Homo sapien
tgattcctgtataacgacggcactg

SEQ ID NO: 2549174 - DNA, 25 bp, Homo sapien
tgagaccctatttcagacgaggagg

SEQ ID NO: 2549175 - DNA, 25 bp, Homo sapien
cagggacatgaaaacgccaagggca

SEQ ID NO: 2549176 - DNA, 25 bp, Homo sapien
caggaggatccagaacacttgagct

SEQ ID NO: 2549177 - DNA, 25 bp, Homo sapien
aagcgctctgcgtcctggtgtctga

SEQ ID NO: 2549178 - DNA, 25 bp, Homo sapien
cgtgtgaagcgctctgcgtcctggt

SEQ ID NO: 2549179 - DNA, 25 bp, Homo sapien
ctgatatacaccgtgtgaagcgctc

SEQ ID NO: 2549180 - DNA, 25 bp, Homo sapien
tgaagcgctctgcgtcctggtgtct

SEQ ID NO: 2549181 - DNA, 25 bp, Homo sapien
tgtgaagcgctctgcatcctggtgt

SEQ ID NO: 2549182 - DNA, 25 bp, Homo sapien
tgtctgatacgcaccgtgtgaagcg

SEQ ID NO: 2549183 - DNA, 25 bp, Homo sapien
aagcgctctgcgtcctggtgtctga

SEQ ID NO: 2549184 - DNA, 25 bp, Homo sapien
tggtgtctgatacgcaccgtgtgaa

SEQ ID NO: 2549185 - DNA, 25 bp, Homo sapien
ggtgtctgatatacaccagtattct

SEQ ID NO: 2549186 - DNA, 25 bp, Homo sapien
caaggcgcttcgtgccctggtgtct

SEQ ID NO: 2549187 - DNA, 25 bp, Homo sapien
tggtgtctgatacgcaccgtgcaag

SEQ ID NO: 2549188 - DNA, 25 bp, Homo sapien
cagtattctgatgtgcactcgtctt

SEQ ID NO: 2549189 - DNA, 25 bp, Homo sapien
tccccgacacacaacccatttaaca

SEQ ID NO: 2549190 - DNA, 25 bp, Homo sapien
cgacacacaacccatttaacattaa

SEQ ID NO: 2549191 - DNA, 25 bp, Homo sapien
tatttttcatgtaccctccccgaca

SEQ ID NO: 2549192 - DNA, 25 bp, Homo sapien
tcccagcactctagtggatcacgag

SEQ ID NO: 2549193 - DNA, 25 bp, Homo sapien
cctgtttcttgttgagcctttttgc

SEQ ID NO: 2549194 - DNA, 25 bp, Homo sapien
tgcctatttcctgctgtgtgagata

SEQ ID NO: 2549195 - DNA, 25 bp, Homo sapien
agaaattcccagtattcaacccagg

SEQ ID NO: 2549196 - DNA, 25 bp, Homo sapien
cagacgtggtggctttatctcggca

SEQ ID NO: 2549197 - DNA, 25 bp, Homo sapien
taagctagaattccacaacatccac

SEQ ID NO: 2549198 - DNA, 25 bp, Homo sapien
taatcaaaatgcaaccaactgtgtg

SEQ ID NO: 2549199 - DNA, 25 bp, Homo sapien
gaagctgtgatttgaccttctgtca

SEQ ID NO: 2549200 - DNA, 25 bp, Homo sapien
tccacaaggaattagaccttcacga

SEQ ID NO: 2549201 - DNA, 25 bp, Homo sapien
tccagagcttgcgaaaatcttctgc

SEQ ID NO: 2549202 - DNA, 25 bp, Homo sapien
ccgggtccgacttcttgacgtggtg

SEQ ID NO: 2549203 - DNA, 25 bp, Homo sapien
cttcttgacgtggtgaaggaagcct

SEQ ID NO: 2549204 - DNA, 25 bp, Homo sapien
gaagcctgctttctctcgaggtgga

SEQ ID NO: 2549205 - DNA, 25 bp, Homo sapien
cacagctccccgatgactggagaag

SEQ ID NO: 2549206 - DNA, 25 bp, Homo sapien
tccgctctcaggaggggcacgtagt

SEQ ID NO: 2549207 - DNA, 25 bp, Homo sapien
catagcggctgacgtgagaggcctc

SEQ ID NO: 2549208 - DNA, 25 bp, Homo sapien
tctcagggtcagtaccgggtctctg

SEQ ID NO: 2549209 - DNA, 25 bp, Homo sapien
ccacaggatattaagaacaagatca

SEQ ID NO: 2549210 - DNA, 25 bp, Homo sapien
ggccatgaccctaagggaactgaca

SEQ ID NO: 2549211 - DNA, 25 bp, Homo sapien
ctggaggccatgaccctaagggaac

SEQ ID NO: 2549212 - DNA, 25 bp, Homo sapien
gtcctctgaagtaacatggctggag

SEQ ID NO: 2549213 - DNA, 25 bp, Homo sapien
cagacttcgagctaagatggcaaag

SEQ ID NO: 2549214 - DNA, 25 bp, Homo sapien
gcggaccctgctttaaatagagaca

SEQ ID NO: 2549215 - DNA, 25 bp, Homo sapien
tagaagctgctgactagaagagggc

SEQ ID NO: 2549216 - DNA, 25 bp, Homo sapien
gaaaccagccgttttcacatgcctg

SEQ ID NO: 2549217 - DNA, 25 bp, Homo sapien
aatactctctgatccgctccttcag

SEQ ID NO: 2549218 - DNA, 25 bp, Homo sapien
taaatactctctgatccgctccttc

SEQ ID NO: 2549219 - DNA, 25 bp, Homo sapien
tactctctgatccgctccttcagtt

SEQ ID NO: 2549220 - DNA, 25 bp, Homo sapien
aaatactctctgatccgctccttca

SEQ ID NO: 2549221 - DNA, 25 bp, Homo sapien
gatcgcaacatttccttatcattac

SEQ ID NO: 2549222 - DNA, 25 bp, Homo sapien
taaagtagaatagtatcttaatgct

SEQ ID NO: 2549223 - DNA, 25 bp, Homo sapien
aaactcagtaaagtagaatagtatc

SEQ ID NO: 2549224 - DNA, 25 bp, Homo sapien
aaaaagtgtgtctaaatcttatttg

SEQ ID NO: 2549225 - DNA, 25 bp, Homo sapien
atacacaaactttttgttgtgaggc

SEQ ID NO: 2549226 - DNA, 25 bp, Homo sapien
tcatacacaaactttttgttgtgag

SEQ ID NO: 2549227 - DNA, 25 bp, Homo sapien
cacaaactttttgttgtgaggctgg

SEQ ID NO: 2549228 - DNA, 25 bp, Homo sapien
gtgaggctgggtcaaggtggagctc

SEQ ID NO: 2549229 - DNA, 25 bp, Homo sapien
tctatggcaagtggatgtatagctt

SEQ ID NO: 2549230 - DNA, 25 bp, Homo sapien
tctaaagggctgctagacaagggac

SEQ ID NO: 2549231 - DNA, 25 bp, Homo sapien
ctgccaccagaagatccttatagct

SEQ ID NO: 2549232 - DNA, 25 bp, Homo sapien
tctttcagttctcagaaggtccaga

SEQ ID NO: 2549233 - DNA, 25 bp, Homo sapien
caaaatgcaacggtgtgtcatagcc

SEQ ID NO: 2549234 - DNA, 25 bp, Homo sapien
tccaaacttacaagcaaaatgcaac

SEQ ID NO: 2549235 - DNA, 25 bp, Homo sapien
ttttttacaatcaaatggtgtgacg

SEQ ID NO: 2549236 - DNA, 25 bp, Homo sapien
cgaaagcacgttgactacatctgca

SEQ ID NO: 2549237 - DNA, 25 bp, Homo sapien
tagcacatacccacttcgtgccaag

SEQ ID NO: 2549238 - DNA, 25 bp, Homo sapien
taaaagactctgcttttataatgga

SEQ ID NO: 2549239 - DNA, 25 bp, Homo sapien
caaggcttgagcttagcatactgac

SEQ ID NO: 2549240 - DNA, 25 bp, Homo sapien
ggaaaaataattggcattctagcac

SEQ ID NO: 2549241 - DNA, 25 bp, Homo sapien
tctccataaacagtgaacagcagct

SEQ ID NO: 2549242 - DNA, 25 bp, Homo sapien
ttcagggcccagtacaatgtcatgt

SEQ ID NO: 2549243 - DNA, 25 bp, Homo sapien
tacacagatgaggaccacaaccaga

SEQ ID NO: 2549244 - DNA, 25 bp, Homo sapien
tctgtactcaaagaagtctctgcgg

SEQ ID NO: 2549245 - DNA, 25 bp, Homo sapien
tccttccccggatggtgtcacaggt

SEQ ID NO: 2549246 - DNA, 25 bp, Homo sapien
tcaactgtggcctacagaccagcgg

SEQ ID NO: 2549247 - DNA, 25 bp, Homo sapien
ggtctccgtccatgacgctgcgtca

SEQ ID NO: 2549248 - DNA, 25 bp, Homo sapien
tttcactgctgacgatgctgcatcg

SEQ ID NO: 2549249 - DNA, 25 bp, Homo sapien
acgccgccagccaagatgtcaaccc

SEQ ID NO: 2549250 - DNA, 25 bp, Homo sapien
cgccagccaagatgtcaacccgaat

SEQ ID NO: 2549251 - DNA, 25 bp, Homo sapien
agatgtcaacccgaattctcctcac

SEQ ID NO: 2549252 - DNA, 25 bp, Homo sapien
gccaagatgtcaacccgaattctcc

SEQ ID NO: 2549253 - DNA, 25 bp, Homo sapien
cgtccaactccatgaccaatgtccc

SEQ ID NO: 2549254 - DNA, 25 bp, Homo sapien
caactccatgaccaatgtccctgtt

SEQ ID NO: 2549255 - DNA, 25 bp, Homo sapien
tccaactccatgaccaatgtccctg

SEQ ID NO: 2549256 - DNA, 25 bp, Homo sapien
actccatgaccaatgtccctgttga

SEQ ID NO: 2549257 - DNA, 25 bp, Homo sapien
tgaggaggaagagctcagggcccag

SEQ ID NO: 2549258 - DNA, 25 bp, Homo sapien
ctgaggaggaagagctcagggccca

SEQ ID NO: 2549259 - DNA, 25 bp, Homo sapien
tctgccatcagtaggaagctcggag

SEQ ID NO: 2549260 - DNA, 25 bp, Homo sapien
cttggaggctgaaacggaaccctct

SEQ ID NO: 2549261 - DNA, 25 bp, Homo sapien
gctcggagacgtaaggaaatttgca

SEQ ID NO: 2549262 - DNA, 25 bp, Homo sapien
ggaaccctctctaacgcctatgtga

SEQ ID NO: 2549263 - DNA, 25 bp, Homo sapien
cttttctccggagctaccaagatcg

SEQ ID NO: 2549264 - DNA, 25 bp, Homo sapien
cggagctaccaagatcgttcctgtt

SEQ ID NO: 2549265 - DNA, 25 bp, Homo sapien
cgttcctgtttctaagcagtcgcac

SEQ ID NO: 2549266 - DNA, 25 bp, Homo sapien
gatcgttcctgtttctaagcagtcg

SEQ ID NO: 2549267 - DNA, 25 bp, Homo sapien
ctccacagccctgcgtgtcaggcag

SEQ ID NO: 2549268 - DNA, 25 bp, Homo sapien
tctccacagccctgcgtgtcaggca

SEQ ID NO: 2549269 - DNA, 25 bp, Homo sapien
tgcgtgtcaggcagcctctctctca

SEQ ID NO: 2549270 - DNA, 25 bp, Homo sapien
cacagccctgcgtgtcaggcagcat

SEQ ID NO: 2549271 - DNA, 25 bp, Homo sapien
cagggttctccaggacgtccagagt

SEQ ID NO: 2549272 - DNA, 25 bp, Homo sapien
tcgtcgtcatcagggtacatcagcc

SEQ ID NO: 2549273 - DNA, 25 bp, Homo sapien
tacatcagcctcatgaagtcagggt

SEQ ID NO: 2549274 - DNA, 25 bp, Homo sapien
gtaacggatacgcttctgcagcatg

SEQ ID NO: 2549275 - DNA, 25 bp, Homo sapien
gaaagagaaccgcatgctctgagct

SEQ ID NO: 2549276 - DNA, 25 bp, Homo sapien
cgatggaacggccgggaccgcacac

SEQ ID NO: 2549277 - DNA, 25 bp, Homo sapien
tgatgtgtggacacgccctgtgcga

SEQ ID NO: 2549278 - DNA, 25 bp, Homo sapien
ccctgtgcgagtgctgcgatggaac

SEQ ID NO: 2549279 - DNA, 25 bp, Homo sapien
tttccgaagcttggcggtgaggtcc

SEQ ID NO: 2549280 - DNA, 25 bp, Homo sapien
tgttcgctcgctctttgttgactgt

SEQ ID NO: 2549281 - DNA, 25 bp, Homo sapien
tctcctgagcctatcagataccggg

SEQ ID NO: 2549282 - DNA, 25 bp, Homo sapien
tctgattccgacaagcacaaaccat

SEQ ID NO: 2549283 - DNA, 25 bp, Homo sapien
tgtaattacagggacgagtcaccac

SEQ ID NO: 2549284 - DNA, 25 bp, Homo sapien
gtaattacagggacgagtcaccaca

SEQ ID NO: 2549285 - DNA, 25 bp, Homo sapien
gttgtaattacagggacgagtcacc

SEQ ID NO: 2549286 - DNA, 25 bp, Homo sapien
ttgtaattacagggacgagtcacca

SEQ ID NO: 2549287 - DNA, 25 bp, Homo sapien
gagacagtggtaaggacgttttgct

SEQ ID NO: 2549288 - DNA, 25 bp, Homo sapien
gatcatcttgacagcttgcaatgct

SEQ ID NO: 2549289 - DNA, 25 bp, Homo sapien
aaatcgggaccctttgatcatcttg

SEQ ID NO: 2549290 - DNA, 25 bp, Homo sapien
tgtcattgctaaagagtggagctgt

SEQ ID NO: 2549291 - DNA, 25 bp, Homo sapien
gggcctaagctagccaaaatagaac

SEQ ID NO: 2549292 - DNA, 25 bp, Homo sapien
cacaattttgaacagggaacgcctt

SEQ ID NO: 2549293 - DNA, 25 bp, Homo sapien
caattaacaagctcgacagtgtgca

SEQ ID NO: 2549294 - DNA, 25 bp, Homo sapien
tctgctacccagtcgcctggcttag

SEQ ID NO: 2549295 - DNA, 25 bp, Homo sapien
aaaaggcggagatgactaatcaaca

SEQ ID NO: 2549296 - DNA, 25 bp, Homo sapien
acaaagttcctaaccaacagcagca

SEQ ID NO: 2549297 - DNA, 25 bp, Homo sapien
gcccctccgcgtatgtgctatctgt

SEQ ID NO: 2549298 - DNA, 25 bp, Homo sapien
gaggaaatcctacacacggtcccat

SEQ ID NO: 2549299 - DNA, 25 bp, Homo sapien
gattcaggcccacactgtaaccaaa

SEQ ID NO: 2549300 - DNA, 25 bp, Homo sapien
cagctctgtaggtgtcggtgtcact

SEQ ID NO: 2549301 - DNA, 25 bp, Homo sapien
caccgagcaggtcttggatgtcaca

SEQ ID NO: 2549302 - DNA, 25 bp, Homo sapien
tcgctgggacgtcctcatacactgg

SEQ ID NO: 2549303 - DNA, 25 bp, Homo sapien
tcgagccaacagagcatccattgtc

SEQ ID NO: 2549304 - DNA, 25 bp, Homo sapien
aaaatcctttgtgggtcctggctga

SEQ ID NO: 2549305 - DNA, 25 bp, Homo sapien
gaaaaaccagcctgatcagttgggt

SEQ ID NO: 2549306 - DNA, 25 bp, Homo sapien
gattcagaagtttcaatcgagccaa

SEQ ID NO: 2549307 - DNA, 25 bp, Homo sapien
gctcacgcctgtaatcgcagcactt

SEQ ID NO: 2549308 - DNA, 25 bp, Homo sapien
gaggtcagcagttcgagaccagcct

SEQ ID NO: 2549309 - DNA, 25 bp, Homo sapien
tgggagaccgaggtgggtggatcac

SEQ ID NO: 2549310 - DNA, 25 bp, Homo sapien
caaataagtaaagccgggtgcggtg

SEQ ID NO: 2549311 - DNA, 25 bp, Homo sapien
cacaggctgggtgtcgtctgtcatc

SEQ ID NO: 2549312 - DNA, 25 bp, Homo sapien
tctccgcagtgactaacagtctgac

SEQ ID NO: 2549313 - DNA, 25 bp, Homo sapien
aatcacgcaggtcgtcagttctgca

SEQ ID NO: 2549314 - DNA, 25 bp, Homo sapien
gtcttgcaacatgcttcggacacca

SEQ ID NO: 2549315 - DNA, 25 bp, Homo sapien
acatcacccagacccgacagtctac

SEQ ID NO: 2549316 - DNA, 25 bp, Homo sapien
agtctaccgcaaagcaataaatggc

SEQ ID NO: 2549317 - DNA, 25 bp, Homo sapien
tctgatctccacatcacccagaccc

SEQ ID NO: 2549318 - DNA, 25 bp, Homo sapien
agacccgacagtctaccgcaaagca

SEQ ID NO: 2549319 - DNA, 25 bp, Homo sapien
cggaggaactggggtcccgctgcgg

SEQ ID NO: 2549320 - DNA, 25 bp, Homo sapien
gaggaactggggtcccgctgcggcc

SEQ ID NO: 2549321 - DNA, 25 bp, Homo sapien
ctggggtcccgctgcggcccagacc

SEQ ID NO: 2549322 - DNA, 25 bp, Homo sapien
gaactggggtcccgctgcggcccag

SEQ ID NO: 2549323 - DNA, 25 bp, Homo sapien
aggccagcgccgcccactcggccgc

SEQ ID NO: 2549324 - DNA, 25 bp, Homo sapien
agccaccgcacagcgatcagcagca

SEQ ID NO: 2549325 - DNA, 25 bp, Homo sapien
cagccaccgcacagcgatcagcagc

SEQ ID NO: 2549326 - DNA, 25 bp, Homo sapien
gggccgcagccgccgagaagcccgc

SEQ ID NO: 2549327 - DNA, 25 bp, Homo sapien
cgcagccgccgagaagcccgcgccc

SEQ ID NO: 2549328 - DNA, 25 bp, Homo sapien
cagccgccgagaagcccgcgccccg

SEQ ID NO: 2549329 - DNA, 25 bp, Homo sapien
gccgcagccgccgagaagcccgcgc

SEQ ID NO: 2549330 - DNA, 25 bp, Homo sapien
gcgagacgctgtctgtgctaaaaat

SEQ ID NO: 2549331 - DNA, 25 bp, Homo sapien
ggcgagacgctgtctgtgctaaaaa

SEQ ID NO: 2549332 - DNA, 25 bp, Homo sapien
ggtggcacacgccttgaggagggag

SEQ ID NO: 2549333 - DNA, 25 bp, Homo sapien
cgctcacctcagagcgggacggaag

SEQ ID NO: 2549334 - DNA, 25 bp, Homo sapien
tgaggctgtcctggtcaatcctgtt

SEQ ID NO: 2549335 - DNA, 25 bp, Homo sapien
catgcttgagggtctctggtgcagc

SEQ ID NO: 2549336 - DNA, 25 bp, Homo sapien
ggaaggcactttcgttctcggcacc

SEQ ID NO: 2549337 - DNA, 25 bp, Homo sapien
tcaggggagctacggccgtgaccat

SEQ ID NO: 2549338 - DNA, 25 bp, Homo sapien
ccagaacctggtgggacctgggctg

SEQ ID NO: 2549339 - DNA, 25 bp, Homo sapien
tgaggggtttcaggggagctacggc

SEQ ID NO: 2549340 - DNA, 25 bp, Homo sapien
agctacggccgtgaccatcagacgc

SEQ ID NO: 2549341 - DNA, 25 bp, Homo sapien
tacgcctggttaactcttaatgacc

SEQ ID NO: 2549342 - DNA, 25 bp, Homo sapien
aaaagacgagaatctgggaagtcac

SEQ ID NO: 2549343 - DNA, 25 bp, Homo sapien
aaccggcaggacagtagaattctct

SEQ ID NO: 2549344 - DNA, 25 bp, Homo sapien
gagtcatgactccactgtcaccggg

SEQ ID NO: 2549345 - DNA, 25 bp, Homo sapien
aggaattcccaagcacacttacatt

SEQ ID NO: 2549346 - DNA, 25 bp, Homo sapien
ttgtcagacacggtgacccctttcc

SEQ ID NO: 2549347 - DNA, 25 bp, Homo sapien
acactttgtcagacacggtgacccc

SEQ ID NO: 2549348 - DNA, 25 bp, Homo sapien
atttaaggaattcccaagcacactt

SEQ ID NO: 2549349 - DNA, 25 bp, Homo sapien
tgacgagattcacctggaccttccg

SEQ ID NO: 2549350 - DNA, 25 bp, Homo sapien
aagacctcagggaactagaactcgg

SEQ ID NO: 2549351 - DNA, 25 bp, Homo sapien
ttgtgggaaccctgcaccaaggaga

SEQ ID NO: 2549352 - DNA, 25 bp, Homo sapien
caagtagtgacatcgtgaagtgccc

SEQ ID NO: 2549353 - DNA, 25 bp, Homo sapien
catggtggaactccacccctctaaa

SEQ ID NO: 2549354 - DNA, 25 bp, Homo sapien
cgcttgaacccagatggcggagctt

SEQ ID NO: 2549355 - DNA, 25 bp, Homo sapien
aacatggtggaactccacccctcta

SEQ ID NO: 2549356 - DNA, 25 bp, Homo sapien
ccaacatggtggaactccacccctc

SEQ ID NO: 2549357 - DNA, 25 bp, Homo sapien
tcccataagcaaggagaagtcgctc

SEQ ID NO: 2549358 - DNA, 25 bp, Homo sapien
taaggaaggaagtgtccgcgtgaac

SEQ ID NO: 2549359 - DNA, 25 bp, Homo sapien
tcagatccagaagcacaagccgtgc

SEQ ID NO: 2549360 - DNA, 25 bp, Homo sapien
cgcgtgaacacgagaggcctcagat

SEQ ID NO: 2549361 - DNA, 25 bp, Homo sapien
caggcgctcccacagacaatggtaa

SEQ ID NO: 2549362 - DNA, 25 bp, Homo sapien
gaagatctcacacatgtcgtgctga

SEQ ID NO: 2549363 - DNA, 25 bp, Homo sapien
gccacatgatgctggtgtaaccaca

SEQ ID NO: 2549364 - DNA, 25 bp, Homo sapien
tgactgcagaagtacaggtgctcct

SEQ ID NO: 2549365 - DNA, 25 bp, Homo sapien
aggcctgaccaagggtccaagctgc

SEQ ID NO: 2549366 - DNA, 25 bp, Homo sapien
ccgtcaggcctgaccaagggtccaa

SEQ ID NO: 2549367 - DNA, 25 bp, Homo sapien
tcagtgtccttgtgcctcctgatgg

SEQ ID NO: 2549368 - DNA, 25 bp, Homo sapien
tgtgcctcctgatggccgtcaggcc

SEQ ID NO: 2549369 - DNA, 25 bp, Homo sapien
ttcttaaagactgggtgacaggccg

SEQ ID NO: 2549370 - DNA, 25 bp, Homo sapien
aaccagaacaacagaggacctttct

SEQ ID NO: 2549371 - DNA, 25 bp, Homo sapien
tcttcaataacatgagcatatgctt

SEQ ID NO: 2549372 - DNA, 25 bp, Homo sapien
aggaaagatcctcagcaacaaagta

SEQ ID NO: 2549373 - DNA, 25 bp, Homo sapien
cctgtaatcccagctactcgagagg

SEQ ID NO: 2549374 - DNA, 25 bp, Homo sapien
tactcgagaggctgaggcaggagaa

SEQ ID NO: 2549375 - DNA, 25 bp, Homo sapien
cattagcctggcatagtggcgcacg

SEQ ID NO: 2549376 - DNA, 25 bp, Homo sapien
tcgcatgaacctgggaggcggagct

SEQ ID NO: 2549377 - DNA, 25 bp, Homo sapien
tctatgtacacatcctatggtggga

SEQ ID NO: 2549378 - DNA, 25 bp, Homo sapien
tcagaagccacgacctacaagtaac

SEQ ID NO: 2549379 - DNA, 25 bp, Homo sapien
ttcagacacgttcaaagctcctcgc

SEQ ID NO: 2549380 - DNA, 25 bp, Homo sapien
agagagcagcatcggtggccgctca

SEQ ID NO: 2549381 - DNA, 25 bp, Homo sapien
gaaaaacatcgaccacacaatcaaa

SEQ ID NO: 2549382 - DNA, 25 bp, Homo sapien
ataaataacattgataagagccttc

SEQ ID NO: 2549383 - DNA, 25 bp, Homo sapien
gtcttagaaaaacatcgaccacaca

SEQ ID NO: 2549384 - DNA, 25 bp, Homo sapien
ataacattgataagagccttctggg

SEQ ID NO: 2549385 - DNA, 25 bp, Homo sapien
tcactctcccggcccttctttggaa

SEQ ID NO: 2549386 - DNA, 25 bp, Homo sapien
ccggcccttctttggaagccctgct

SEQ ID NO: 2549387 - DNA, 25 bp, Homo sapien
cactctcccggcccttctttggaag

SEQ ID NO: 2549388 - DNA, 25 bp, Homo sapien
ggcccttctttggaagccctgctct

SEQ ID NO: 2549389 - DNA, 25 bp, Homo sapien
gggtcgccgcgtgggccggcgtgac

SEQ ID NO: 2549390 - DNA, 25 bp, Homo sapien
gtctctgtgggtcgccgcgtgggcc

SEQ ID NO: 2549391 - DNA, 25 bp, Homo sapien
gtgggtcgccgcgtgggccggcgtg

SEQ ID NO: 2549392 - DNA, 25 bp, Homo sapien
ctgtgggtcgccgcgtgggccggcg

SEQ ID NO: 2549393 - DNA, 25 bp, Homo sapien
acagagactcgtgcaccgtcagggc

SEQ ID NO: 2549394 - DNA, 25 bp, Homo sapien
tccagcggcgtccacgaggacagag

SEQ ID NO: 2549395 - DNA, 25 bp, Homo sapien
ggcgtccacgaggacagagactcgt

SEQ ID NO: 2549396 - DNA, 25 bp, Homo sapien
agtggctggctccagcggcgtccac

SEQ ID NO: 2549397 - DNA, 25 bp, Homo sapien
agtgcagcacggaatacggtcgtac

SEQ ID NO: 2549398 - DNA, 25 bp, Homo sapien
tgaagtgcagcacggaatacggtcg

SEQ ID NO: 2549399 - DNA, 25 bp, Homo sapien
ttaagactagctgaagtgcagcacg

SEQ ID NO: 2549400 - DNA, 25 bp, Homo sapien
tagctgaagtgcagcacggaatacg

SEQ ID NO: 2549401 - DNA, 25 bp, Homo sapien
gaactgggcagtccgggatcttgat

SEQ ID NO: 2549402 - DNA, 25 bp, Homo sapien
gaagagctggcctcgcctttcggct

SEQ ID NO: 2549403 - DNA, 25 bp, Homo sapien
tcacggcgggcggtggtctcagcag

SEQ ID NO: 2549404 - DNA, 25 bp, Homo sapien
ctccagcagcgaggcgggaactggg

SEQ ID NO: 2549405 - DNA, 25 bp, Homo sapien
cgggcctccccaactggtggacgtg

SEQ ID NO: 2549406 - DNA, 25 bp, Homo sapien
tagcacagcttgtggcaaacgggcc

SEQ ID NO: 2549407 - DNA, 25 bp, Homo sapien
cgtggcagcccagcacgacagtccc

SEQ ID NO: 2549408 - DNA, 25 bp, Homo sapien
cagcacgacagtccccggagctcca

SEQ ID NO: 2549409 - DNA, 25 bp, Homo sapien
gaaaacatggatgtggaccgagcac

SEQ ID NO: 2549410 - DNA, 25 bp, Homo sapien
cagtgtgggctcaacaaatccgttt

SEQ ID NO: 2549411 - DNA, 25 bp, Homo sapien
gataagcacacgacgctaaacggcc

SEQ ID NO: 2549412 - DNA, 25 bp, Homo sapien
tgaatgactaacacgtctgccagcc

SEQ ID NO: 2549413 - DNA, 25 bp, Homo sapien
ccgcgccgcggcgtaggtccagctt

SEQ ID NO: 2549414 - DNA, 25 bp, Homo sapien
gcgccgcggcgtaggtccagcttga

SEQ ID NO: 2549415 - DNA, 25 bp, Homo sapien
ccgcggcgtaggtccagcttgagct

SEQ ID NO: 2549416 - DNA, 25 bp, Homo sapien
gccgcggcgtaggtccagcttgagc

SEQ ID NO: 2549417 - DNA, 25 bp, Homo sapien
ggagcataaatttatccttctgggt

SEQ ID NO: 2549418 - DNA, 25 bp, Homo sapien
cctggagcataaatttatccttctg

SEQ ID NO: 2549419 - DNA, 25 bp, Homo sapien
ggacaggtcttcctgggccatctcc

SEQ ID NO: 2549420 - DNA, 25 bp, Homo sapien
ttgcctggagcataaatttatcctt

SEQ ID NO: 2549421 - DNA, 25 bp, Homo sapien
tcccgcctgtgtccagcacctcata

SEQ ID NO: 2549422 - DNA, 25 bp, Homo sapien
tgtgcccagcgcctcagatacaggt

SEQ ID NO: 2549423 - DNA, 25 bp, Homo sapien
gtgcccagcgcctcagatacaggta

SEQ ID NO: 2549424 - DNA, 25 bp, Homo sapien
agcacctcatacacaggtacctgca

SEQ ID NO: 2549425 - DNA, 25 bp, Homo sapien
ctgcagcagctgctgtagcccctcc

SEQ ID NO: 2549426 - DNA, 25 bp, Homo sapien
gcagcagctgctgtagcccctccag

SEQ ID NO: 2549427 - DNA, 25 bp, Homo sapien
gcagctgctgtagcccctccagctc

SEQ ID NO: 2549428 - DNA, 25 bp, Homo sapien
agcagctgctgtagcccctccagct

SEQ ID NO: 2549429 - DNA, 25 bp, Homo sapien
ctcacacaggtacccgcagcagctg

SEQ ID NO: 2549430 - DNA, 25 bp, Homo sapien
ctgctgctcccgcctgtacccagcg

SEQ ID NO: 2549431 - DNA, 25 bp, Homo sapien
tgtacccagagcctcacacaggtac

SEQ ID NO: 2549432 - DNA, 25 bp, Homo sapien
cacacacaggtacccgcagcagctg

SEQ ID NO: 2549433 - DNA, 25 bp, Homo sapien
ctgatccacctcccatttgagattt

SEQ ID NO: 2549434 - DNA, 25 bp, Homo sapien
gatccacctcccatttgagattttc

SEQ ID NO: 2549435 - DNA, 25 bp, Homo sapien
atccacctcccatttgagattttcc

SEQ ID NO: 2549436 - DNA, 25 bp, Homo sapien
tgatccacctcccatttgagatttt

SEQ ID NO: 2549437 - DNA, 25 bp, Homo sapien
cttggtttcccacgggctgtttgct

SEQ ID NO: 2549438 - DNA, 25 bp, Homo sapien
tggtttcccacgggctgtttgctga

SEQ ID NO: 2549439 - DNA, 25 bp, Homo sapien
ttggtttcccacgggctgtttgctg

SEQ ID NO: 2549440 - DNA, 25 bp, Homo sapien
ccgagaccacagtgcatgggaccca

SEQ ID NO: 2549441 - DNA, 25 bp, Homo sapien
atcccagagagtgccggccccgaga

SEQ ID NO: 2549442 - DNA, 25 bp, Homo sapien
tcactttgccggcacccctcacaga

SEQ ID NO: 2549443 - DNA, 25 bp, Homo sapien
cctgaagctaagtactcctgctggg

SEQ ID NO: 2549444 - DNA, 25 bp, Homo sapien
aaggaggccgccttgaagtggcggc

SEQ ID NO: 2549445 - DNA, 25 bp, Homo sapien
aaggtcgtcggcctcggcctgcagc

SEQ ID NO: 2549446 - DNA, 25 bp, Homo sapien
ggttatgcccggcttccaccttggc

SEQ ID NO: 2549447 - DNA, 25 bp, Homo sapien
ccgccttgaagtggcggcggttatg

SEQ ID NO: 2549448 - DNA, 25 bp, Homo sapien
cagcagcgttctaacagaggagcag

SEQ ID NO: 2549449 - DNA, 25 bp, Homo sapien
gccagcaagcagcagcgttctaaca

SEQ ID NO: 2549450 - DNA, 25 bp, Homo sapien
gcaagcagcagcgttctaacagagg

SEQ ID NO: 2549451 - DNA, 25 bp, Homo sapien
ccaggtatggcggaggtagccagca

SEQ ID NO: 2549452 - DNA, 25 bp, Homo sapien
tctgctggcgacgtgaccaacgtgt

SEQ ID NO: 2549453 - DNA, 25 bp, Homo sapien
gacgtgaccaacgtgtcagtgaaca

SEQ ID NO: 2549454 - DNA, 25 bp, Homo sapien
tgctggcgacgtgaccaacgtgtca

SEQ ID NO: 2549455 - DNA, 25 bp, Homo sapien
tggcgacgtgaccaacgtgtcagtg

SEQ ID NO: 2549456 - DNA, 25 bp, Homo sapien
gggccagccacgaaaagacagctct

SEQ ID NO: 2549457 - DNA, 25 bp, Homo sapien
gcaggggccagccacgaaaagacag

SEQ ID NO: 2549458 - DNA, 25 bp, Homo sapien
ggggccagccacgaaaagacagctc

SEQ ID NO: 2549459 - DNA, 25 bp, Homo sapien
aggggccagccacgaaaagacagct

SEQ ID NO: 2549460 - DNA, 25 bp, Homo sapien
gatgcttcatctggcgatcctcctc

SEQ ID NO: 2549461 - DNA, 25 bp, Homo sapien
tggacaagatgcttcatctggcgat

SEQ ID NO: 2549462 - DNA, 25 bp, Homo sapien
tcttctttgcgctgcaaaactgcct

SEQ ID NO: 2549463 - DNA, 25 bp, Homo sapien
cttctttgcgctgcaaaactgcctg

SEQ ID NO: 2549464 - DNA, 25 bp, Homo sapien
ttgctggcgtgagtttgacgagttt

SEQ ID NO: 2549465 - DNA, 25 bp, Homo sapien
cgttgctggcgtgagtttgacgagt

SEQ ID NO: 2549466 - DNA, 25 bp, Homo sapien
ggcgtgagtttgacgagtttgaata

SEQ ID NO: 2549467 - DNA, 25 bp, Homo sapien
ctggcgtgagtttgacgagtttgaa

SEQ ID NO: 2549468 - DNA, 25 bp, Homo sapien
ccctttctcgtgctctaattcaaga

SEQ ID NO: 2549469 - DNA, 25 bp, Homo sapien
cgcagagctgcgttggactgaccga

SEQ ID NO: 2549470 - DNA, 25 bp, Homo sapien
acttcttgtttgactcctcaaggcg

SEQ ID NO: 2549471 - DNA, 25 bp, Homo sapien
gaaggttcaactggactaggtctgc

SEQ ID NO: 2549472 - DNA, 25 bp, Homo sapien
tgacctgccccacgctgccgccaca

SEQ ID NO: 2549473 - DNA, 25 bp, Homo sapien
tgccgccacagcagatggccaggcc

SEQ ID NO: 2549474 - DNA, 25 bp, Homo sapien
gtgacctgccccacgctgccgccac

SEQ ID NO: 2549475 - DNA, 25 bp, Homo sapien
cccacgctgccgccacagcagatgg

SEQ ID NO: 2549476 - DNA, 25 bp, Homo sapien
gtcttgctatgactgacagcctgca

SEQ ID NO: 2549477 - DNA, 25 bp, Homo sapien
cagcagcgtcttgctatgactgaca

SEQ ID NO: 2549478 - DNA, 25 bp, Homo sapien
tcagcgctatgacctcctgcagttc

SEQ ID NO: 2549479 - DNA, 25 bp, Homo sapien
agctcctggctggtcagcgctatga

SEQ ID NO: 2549480 - DNA, 25 bp, Homo sapien
cttatgtttggtcttcatctccttc

SEQ ID NO: 2549481 - DNA, 25 bp, Homo sapien
tctgggcgctggtcaagtctgagcc

SEQ ID NO: 2549482 - DNA, 25 bp, Homo sapien
tgaggatgcccacggcgttctcgta

SEQ ID NO: 2549483 - DNA, 25 bp, Homo sapien
tccttggccgcgagggcctcctgca

SEQ ID NO: 2549484 - DNA, 25 bp, Homo sapien
gggcctcttgctgcaactcttcgat

SEQ ID NO: 2549485 - DNA, 25 bp, Homo sapien
gtgaccgcgaccatctgctccttat

SEQ ID NO: 2549486 - DNA, 25 bp, Homo sapien
tcttcagcgcctcattggcctctgt

SEQ ID NO: 2549487 - DNA, 25 bp, Homo sapien
actcttcgatttgtttcttcagcgc

SEQ ID NO: 2549488 - DNA, 25 bp, Homo sapien
cggccacaaaccactcattactgag

SEQ ID NO: 2549489 - DNA, 25 bp, Homo sapien
aacaggacatgactggttcatagga

SEQ ID NO: 2549490 - DNA, 25 bp, Homo sapien
gaccaacaagcgtttccaaacactg

SEQ ID NO: 2549491 - DNA, 25 bp, Homo sapien
caaggcctaggacccctcctcaagg

SEQ ID NO: 2549492 - DNA, 25 bp, Homo sapien
tgctctgctacctgcagccgagaaa

SEQ ID NO: 2549493 - DNA, 25 bp, Homo sapien
gaaactgtcaccagcatctcggaca

SEQ ID NO: 2549494 - DNA, 25 bp, Homo sapien
gcagccgagaaactgtcaccagcat

SEQ ID NO: 2549495 - DNA, 25 bp, Homo sapien
ctgctacctgcagccgagaaactgt

SEQ ID NO: 2549496 - DNA, 25 bp, Homo sapien
cacctctctgtgcaggcgcgagagc

SEQ ID NO: 2549497 - DNA, 25 bp, Homo sapien
gcaagtgtgtttccatctcgtctcg

SEQ ID NO: 2549498 - DNA, 25 bp, Homo sapien
gagatgcccttcaaggtccgccatg

SEQ ID NO: 2549499 - DNA, 25 bp, Homo sapien
tccgccatgtgctgacggacctggg

SEQ ID NO: 2549500 - DNA, 25 bp, Homo sapien
ttgctttttcagagcagcagtctcc

SEQ ID NO: 2549501 - DNA, 25 bp, Homo sapien
ctttttcagagcagcagtctcctgc

SEQ ID NO: 2549502 - DNA, 25 bp, Homo sapien
gctttttcagagcagcagtctcctg

SEQ ID NO: 2549503 - DNA, 25 bp, Homo sapien
atttgctttttcagagcagcagtct

SEQ ID NO: 2549504 - DNA, 25 bp, Homo sapien
tgtgggagacatgtgcacagacatt

SEQ ID NO: 2549505 - DNA, 25 bp, Homo sapien
gacattacactgacggctccaggag

SEQ ID NO: 2549506 - DNA, 25 bp, Homo sapien
ccaggaggggaacacatctgcacaa

SEQ ID NO: 2549507 - DNA, 25 bp, Homo sapien
ttgttacactgaggactataggagg

SEQ ID NO: 2549508 - DNA, 25 bp, Homo sapien
tgtctagatgcctagggaatgcagt

SEQ ID NO: 2549509 - DNA, 25 bp, Homo sapien
ccctgcgaaggatcaaagtgctggt

SEQ ID NO: 2549510 - DNA, 25 bp, Homo sapien
cctacaatatggagggcggtccctc

SEQ ID NO: 2549511 - DNA, 25 bp, Homo sapien
gttccgatgatcctcacgtcacctg

SEQ ID NO: 2549512 - DNA, 25 bp, Homo sapien
caaggtgagctgtttcatcaggtcc

SEQ ID NO: 2549513 - DNA, 25 bp, Homo sapien
tgcaaagccgcctccaagatgatct

SEQ ID NO: 2549514 - DNA, 25 bp, Homo sapien
gatgatcttctcgttctgcaggagg

SEQ ID NO: 2549515 - DNA, 25 bp, Homo sapien
caagctgctggtctcgctggagtaa

SEQ ID NO: 2549516 - DNA, 25 bp, Homo sapien
tccagggatgccgccgagtccgcca

SEQ ID NO: 2549517 - DNA, 25 bp, Homo sapien
ccagggatgccgccgagtccgccat

SEQ ID NO: 2549518 - DNA, 25 bp, Homo sapien
cagggatgccgccgagtccgccatc

SEQ ID NO: 2549519 - DNA, 25 bp, Homo sapien
tcctccaccatcgtctttgcctcct

SEQ ID NO: 2549520 - DNA, 25 bp, Homo sapien
caccatcgtctttgcctcctgaatc

SEQ ID NO: 2549521 - DNA, 25 bp, Homo sapien
accatcgtctttgcctcctgaatct

SEQ ID NO: 2549522 - DNA, 25 bp, Homo sapien
ctgagtttccgtcagctgctgggac

SEQ ID NO: 2549523 - DNA, 25 bp, Homo sapien
tgctgggacagggacacattctcga

SEQ ID NO: 2549524 - DNA, 25 bp, Homo sapien
agctgtgccgcgatgcgccccttct

SEQ ID NO: 2549525 - DNA, 25 bp, Homo sapien
ctccttcatggacctgtgctgagtt

SEQ ID NO: 2549526 - DNA, 25 bp, Homo sapien
gtcccgagacccaggcaaatgagga

SEQ ID NO: 2549527 - DNA, 25 bp, Homo sapien
gggacacgtcctgcatacgacacgt

SEQ ID NO: 2549528 - DNA, 25 bp, Homo sapien
caggcacgcaacactgtgccgagtc

SEQ ID NO: 2549529 - DNA, 25 bp, Homo sapien
aatgaggattcaccggcatgtgtca

SEQ ID NO: 2549530 - DNA, 25 bp, Homo sapien
tctgcagggacgagatctccgcctg

SEQ ID NO: 2549531 - DNA, 25 bp, Homo sapien
tggtcagcgtcgtccgctccagctg

SEQ ID NO: 2549532 - DNA, 25 bp, Homo sapien
gcctgcgacgccttcagcttgctgg

SEQ ID NO: 2549533 - DNA, 25 bp, Homo sapien
gtaccactgccggacactctgcagg

SEQ ID NO: 2549534 - DNA, 25 bp, Homo sapien
tgccagacggacagtcaaggagctg

SEQ ID NO: 2549535 - DNA, 25 bp, Homo sapien
tccagggagaaaaggttgccagacg

SEQ ID NO: 2549536 - DNA, 25 bp, Homo sapien
ttgaggcaggatcaccgcagatact

SEQ ID NO: 2549537 - DNA, 25 bp, Homo sapien
gcagatactccagggtccaaggtca

SEQ ID NO: 2549538 - DNA, 25 bp, Homo sapien
agggcgtggcgaggaccagtcaggg

SEQ ID NO: 2549539 - DNA, 25 bp, Homo sapien
gaaaagcagcctccttatgtgtaaa

SEQ ID NO: 2549540 - DNA, 25 bp, Homo sapien
tataaaccaatgcaaccctcacagg

SEQ ID NO: 2549541 - DNA, 25 bp, Homo sapien
caggcacagtcacatgccgacagag

SEQ ID NO: 2549542 - DNA, 25 bp, Homo sapien
tctaccttggccataagcctctggt

SEQ ID NO: 2549543 - DNA, 25 bp, Homo sapien
cagcacgactgcttcagggtgtcca

SEQ ID NO: 2549544 - DNA, 25 bp, Homo sapien
tcggccacctgcaagtcgttgttgg

SEQ ID NO: 2549545 - DNA, 25 bp, Homo sapien
tctgcaggtcagtcatggctcgctc

SEQ ID NO: 2549546 - DNA, 25 bp, Homo sapien
tctaaggctgacaagtagacaaaaa

SEQ ID NO: 2549547 - DNA, 25 bp, Homo sapien
ggctgattcccaaccacatctgtga

SEQ ID NO: 2549548 - DNA, 25 bp, Homo sapien
taaagatgcagaaccctcggctgcc

SEQ ID NO: 2549549 - DNA, 25 bp, Homo sapien
aacctcgtacccaacagaggagcca

SEQ ID NO: 2549550 - DNA, 25 bp, Homo sapien
gagatgtcagtcgaacgtccgttac

SEQ ID NO: 2549551 - DNA, 25 bp, Homo sapien
tgagatgtcagtcgaacgtccgtta

SEQ ID NO: 2549552 - DNA, 25 bp, Homo sapien
ctgagatgtcagtcgaacgtccgtt

SEQ ID NO: 2549553 - DNA, 25 bp, Homo sapien
cttcgagtcgcattttctctttgag

SEQ ID NO: 2549554 - DNA, 25 bp, Homo sapien
tccttcgagtcgcattttctctttg

SEQ ID NO: 2549555 - DNA, 25 bp, Homo sapien
gctgtccttcgagtcgcattttctc

SEQ ID NO: 2549556 - DNA, 25 bp, Homo sapien
ttctctttgagcacctgcagcatct

SEQ ID NO: 2549557 - DNA, 25 bp, Homo sapien
gaggtgttctccagacggtcgtcag

SEQ ID NO: 2549558 - DNA, 25 bp, Homo sapien
taacatgagctcaggatcaagcgtg

SEQ ID NO: 2549559 - DNA, 25 bp, Homo sapien
tggcccagggtatccgcaggaatct

SEQ ID NO: 2549560 - DNA, 25 bp, Homo sapien
tcttcgacagaatgccataggtccc

SEQ ID NO: 2549561 - DNA, 25 bp, Homo sapien
gttatgtgggaccaacagttgtctc

SEQ ID NO: 2549562 - DNA, 25 bp, Homo sapien
tttccatgagcttgttcgggagagg

SEQ ID NO: 2549563 - DNA, 25 bp, Homo sapien
cctctgaggtcacccgtgtttgctt

SEQ ID NO: 2549564 - DNA, 25 bp, Homo sapien
tacatttttgtggtggtccagaact

SEQ ID NO: 2549565 - DNA, 25 bp, Homo sapien
cgagcctgaagtcggacctgctcct

SEQ ID NO: 2549566 - DNA, 25 bp, Homo sapien
gctggcgcttcaccctgtactgttt

SEQ ID NO: 2549567 - DNA, 25 bp, Homo sapien
cagccacttccgagcctgaagtcgg

SEQ ID NO: 2549568 - DNA, 25 bp, Homo sapien
ctgctggcgcttcaccctgtactgt

SEQ ID NO: 2549569 - DNA, 25 bp, Homo sapien
agaacaatcaggcacaagaacttgg

SEQ ID NO: 2549570 - DNA, 25 bp, Homo sapien
cagaacaatcaggcacaagaacttg

SEQ ID NO: 2549571 - DNA, 25 bp, Homo sapien
acaggagctcagccgtcgtggggtc

SEQ ID NO: 2549572 - DNA, 25 bp, Homo sapien
ctcagccgtcgtggggtcacgagac

SEQ ID NO: 2549573 - DNA, 25 bp, Homo sapien
tcgtggggtcacgagaccccgagtg

SEQ ID NO: 2549574 - DNA, 25 bp, Homo sapien
tggggtcacgagaccccgagtgcat

SEQ ID NO: 2549575 - DNA, 25 bp, Homo sapien
caagcacctgggtgacacaggacat

SEQ ID NO: 2549576 - DNA, 25 bp, Homo sapien
tcttttctaacactgccctcagcac

SEQ ID NO: 2549577 - DNA, 25 bp, Homo sapien
tcttgcataggaagactgagtctga

SEQ ID NO: 2549578 - DNA, 25 bp, Homo sapien
gagacttccttaggttgtcatggaa

SEQ ID NO: 2549579 - DNA, 25 bp, Homo sapien
cctcagcactagttccctgagactt

SEQ ID NO: 2549580 - DNA, 25 bp, Homo sapien
cgagagacgacggagggtctgggaa

SEQ ID NO: 2549581 - DNA, 25 bp, Homo sapien
tggtgggatcgagagacgacggagg

SEQ ID NO: 2549582 - DNA, 25 bp, Homo sapien
ggcttgtggtgggatcgagagacga

SEQ ID NO: 2549583 - DNA, 25 bp, Homo sapien
tgggatcgagagacgacggagggtc

SEQ ID NO: 2549584 - DNA, 25 bp, Homo sapien
tccccttccgtggatgctctgttta

SEQ ID NO: 2549585 - DNA, 25 bp, Homo sapien
ctttccccttccgtggatgctctgt

SEQ ID NO: 2549586 - DNA, 25 bp, Homo sapien
cgggctttccccttccgtggatgct

SEQ ID NO: 2549587 - DNA, 25 bp, Homo sapien
ccccttccgtggatgctctgtttac

SEQ ID NO: 2549588 - DNA, 25 bp, Homo sapien
actggactttgtcctgctggtcagg

SEQ ID NO: 2549589 - DNA, 25 bp, Homo sapien
ggaggccatcttgctcggccgacgc

SEQ ID NO: 2549590 - DNA, 25 bp, Homo sapien
gaggccatcttgctcggccgacgcg

SEQ ID NO: 2549591 - DNA, 25 bp, Homo sapien
ttgtcctgctggtcaggtggcacca

SEQ ID NO: 2549592 - DNA, 25 bp, Homo sapien
gaagatctgatgactcacaaatgac

SEQ ID NO: 2549593 - DNA, 25 bp, Homo sapien
gacttgatgtcaaaccagctaatat

SEQ ID NO: 2549594 - DNA, 25 bp, Homo sapien
gggccctactgtgtctcccattttc

SEQ ID NO: 2549595 - DNA, 25 bp, Homo sapien
tacaagtgaaccttggacaagcttg

SEQ ID NO: 2549596 - DNA, 25 bp, Homo sapien
actgagcgtgcctaccaaaagcagc

SEQ ID NO: 2549597 - DNA, 25 bp, Homo sapien
agcagccgaccatctttcaaaacaa

SEQ ID NO: 2549598 - DNA, 25 bp, Homo sapien
ggagaaactggcaaggagaagctcc

SEQ ID NO: 2549599 - DNA, 25 bp, Homo sapien
tggcggacattcagactgagcgtgc

SEQ ID NO: 2549600 - DNA, 25 bp, Homo sapien
ctgggcttcaagacacccaaagagg

SEQ ID NO: 2549601 - DNA, 25 bp, Homo sapien
ggcttcaagacacccaaagaggcta

SEQ ID NO: 2549602 - DNA, 25 bp, Homo sapien
caagaacattggtctgggcttcaag

SEQ ID NO: 2549603 - DNA, 25 bp, Homo sapien
ctacaagaacattggtctgggcttc

SEQ ID NO: 2549604 - DNA, 25 bp, Homo sapien
tcgagggcggatcctctctggcgtg

SEQ ID NO: 2549605 - DNA, 25 bp, Homo sapien
aagacagtgcacctcaacgtgctcc

SEQ ID NO: 2549606 - DNA, 25 bp, Homo sapien
tgtacacctgttcccctgcttcagg

SEQ ID NO: 2549607 - DNA, 25 bp, Homo sapien
tcccctgcttcagggacgtccagat

SEQ ID NO: 2549608 - DNA, 25 bp, Homo sapien
gaaagtatgctacttcttaaggcaa

SEQ ID NO: 2549609 - DNA, 25 bp, Homo sapien
ttgggaaagtatgctacttcttaag

SEQ ID NO: 2549610 - DNA, 25 bp, Homo sapien
tatgctacttcttaaggcaatcggg

SEQ ID NO: 2549611 - DNA, 25 bp, Homo sapien
cttcttgccatttaaggtatactgc

SEQ ID NO: 2549612 - DNA, 25 bp, Homo sapien
tgggcaatacagcaacacacccagt

SEQ ID NO: 2549613 - DNA, 25 bp, Homo sapien
gggcaatacagcaacacacccagtc

SEQ ID NO: 2549614 - DNA, 25 bp, Homo sapien
ggcaatacagcaacacacccagtct

SEQ ID NO: 2549615 - DNA, 25 bp, Homo sapien
ccatgtcacgcctttcagctgcaaa

SEQ ID NO: 2549616 - DNA, 25 bp, Homo sapien
tcggccagcgacaaagacaaacaag

SEQ ID NO: 2549617 - DNA, 25 bp, Homo sapien
tggaatgaagacaagtcggccagcg

SEQ ID NO: 2549618 - DNA, 25 bp, Homo sapien
ctaaagcaagcactgcccgagtggt

SEQ ID NO: 2549619 - DNA, 25 bp, Homo sapien
gatgctccggcggagacgtggccgt

SEQ ID NO: 2549620 - DNA, 25 bp, Homo sapien
tcttcaagtggccaccctagggccg

SEQ ID NO: 2549621 - DNA, 25 bp, Homo sapien
ggaaacagcctgcacgcgctacttt

SEQ ID NO: 2549622 - DNA, 25 bp, Homo sapien
tccggaacagagaacgtcctcctct

SEQ ID NO: 2549623 - DNA, 25 bp, Homo sapien
atgaggccgccttcagaaagtgacc

SEQ ID NO: 2549624 - DNA, 25 bp, Homo sapien
tgtgatgaggccgccttcagaaagt

SEQ ID NO: 2549625 - DNA, 25 bp, Homo sapien
actgtgatgaggccgccttcagaaa

SEQ ID NO: 2549626 - DNA, 25 bp, Homo sapien
tgatgaggccgccttcagaaagtga

SEQ ID NO: 2549627 - DNA, 25 bp, Homo sapien
cagtgtgggaaaaatgctaatctaa

SEQ ID NO: 2549628 - DNA, 25 bp, Homo sapien
catatactaagttgatggcacagtg

SEQ ID NO: 2549629 - DNA, 25 bp, Homo sapien
gaaacaatgaatctaatcatatact

SEQ ID NO: 2549630 - DNA, 25 bp, Homo sapien
tgcaataaaatatacccgtgttgtg

SEQ ID NO: 2549631 - DNA, 25 bp, Homo sapien
tgtcatgcctgcacgtgggccatgc

SEQ ID NO: 2549632 - DNA, 25 bp, Homo sapien
gaatttgggtgtcatgcctgcacgt

SEQ ID NO: 2549633 - DNA, 25 bp, Homo sapien
atttgggtgtcatgcctgcacgtgg

SEQ ID NO: 2549634 - DNA, 25 bp, Homo sapien
atgcctgcacgtgggccatgctaat

SEQ ID NO: 2549635 - DNA, 25 bp, Homo sapien
gccttcaagggccatgatatggtta

SEQ ID NO: 2549636 - DNA, 25 bp, Homo sapien
gggtcatacatgctgggccttcaag

SEQ ID NO: 2549637 - DNA, 25 bp, Homo sapien
ccaactgagctgagtgggtaaggct

SEQ ID NO: 2549638 - DNA, 25 bp, Homo sapien
cctttccgatagtgacaggtgctgg

SEQ ID NO: 2549639 - DNA, 25 bp, Homo sapien
agggccagcattgctccactctccc

SEQ ID NO: 2549640 - DNA, 25 bp, Homo sapien
ggggctgtcaccaggaaacccttgc

SEQ ID NO: 2549641 - DNA, 25 bp, Homo sapien
cttgctggcggaagccccttccaaa

SEQ ID NO: 2549642 - DNA, 25 bp, Homo sapien
cctcagggccagcattgctccactc

SEQ ID NO: 2549643 - DNA, 25 bp, Homo sapien
cctgccctgggtttgtcccaaggct

SEQ ID NO: 2549644 - DNA, 25 bp, Homo sapien
cgtggggagacggtctgtggggcca

SEQ ID NO: 2549645 - DNA, 25 bp, Homo sapien
tgccctgggtttgtcccaaggctgg

SEQ ID NO: 2549646 - DNA, 25 bp, Homo sapien
gccgcagatgaggagtgcgtgggga

SEQ ID NO: 2549647 - DNA, 25 bp, Homo sapien
aaacccaagctgttccgactgctcc

SEQ ID NO: 2549648 - DNA, 25 bp, Homo sapien
tagaaatcctcttcacagtgggcca

SEQ ID NO: 2549649 - DNA, 25 bp, Homo sapien
cacagtgggccaggagttggacttc

SEQ ID NO: 2549650 - DNA, 25 bp, Homo sapien
cacgctgggaggataactgccctgc

SEQ ID NO: 2549651 - DNA, 25 bp, Homo sapien
gaaaactgtattcctgagaagaagc

SEQ ID NO: 2549652 - DNA, 25 bp, Homo sapien
ccctcaggctctgtagggtcttgga

SEQ ID NO: 2549653 - DNA, 25 bp, Homo sapien
tggcaaagctagcacaggcggaagc

SEQ ID NO: 2549654 - DNA, 25 bp, Homo sapien
caaacaaggataacaggtgatttca

SEQ ID NO: 2549655 - DNA, 25 bp, Homo sapien
caaggagcgactaacttggcggcca

SEQ ID NO: 2549656 - DNA, 25 bp, Homo sapien
ccagcagcaggatattgtgtacgtc

SEQ ID NO: 2549657 - DNA, 25 bp, Homo sapien
gaaaggcttcgtctctgctgctgat

SEQ ID NO: 2549658 - DNA, 25 bp, Homo sapien
tcactcaccggttagcaaggagcga

SEQ ID NO: 2549659 - DNA, 25 bp, Homo sapien
tgtctgttcacagatatgattgaat

SEQ ID NO: 2549660 - DNA, 25 bp, Homo sapien
ctgttcacagatatgattgaatttc

SEQ ID NO: 2549661 - DNA, 25 bp, Homo sapien
gtctgttcacagatatgattgaatt

SEQ ID NO: 2549662 - DNA, 25 bp, Homo sapien
cttgtctgttcacagatatgattga

SEQ ID NO: 2549663 - DNA, 25 bp, Homo sapien
tacacaagagagcattggagaggca

SEQ ID NO: 2549664 - DNA, 25 bp, Homo sapien
ataaattacacaacagagcatcaga

SEQ ID NO: 2549665 - DNA, 25 bp, Homo sapien
ggcattcaaataaacgcattcggaa

SEQ ID NO: 2549666 - DNA, 25 bp, Homo sapien
ttcggaaaccatacacagaaagagc

SEQ ID NO: 2549667 - DNA, 25 bp, Homo sapien
agataaagctactccagccaggaag

SEQ ID NO: 2549668 - DNA, 25 bp, Homo sapien
acagaagtggaagacggagataaaa

SEQ ID NO: 2549669 - DNA, 25 bp, Homo sapien
cagataaagctactccagccaggaa

SEQ ID NO: 2549670 - DNA, 25 bp, Homo sapien
gcaggatttctaaatgaagataccg

SEQ ID NO: 2549671 - DNA, 25 bp, Homo sapien
gataccggttcctaaaggatgcaac

SEQ ID NO: 2549672 - DNA, 25 bp, Homo sapien
ctgcatgaaacgaagggataaagga

SEQ ID NO: 2549673 - DNA, 25 bp, Homo sapien
gggataaaggaagagcaggatttct

SEQ ID NO: 2549674 - DNA, 25 bp, Homo sapien
cagtcaggacgggatgttacggcca

SEQ ID NO: 2549675 - DNA, 25 bp, Homo sapien
gccccagtagcagtcaggacgggat

SEQ ID NO: 2549676 - DNA, 25 bp, Homo sapien
agttacggccccagtagcagtcagg

SEQ ID NO: 2549677 - DNA, 25 bp, Homo sapien
ctgagtgcggcagttacggccccag

SEQ ID NO: 2549678 - DNA, 25 bp, Homo sapien
tcctcggaccgttctgagatttcag

SEQ ID NO: 2549679 - DNA, 25 bp, Homo sapien
ggcctctggtccctccataactagt

SEQ ID NO: 2549680 - DNA, 25 bp, Homo sapien
tctatgagatgtattgcacgcaccc

SEQ ID NO: 2549681 - DNA, 25 bp, Homo sapien
aaacccaactgagggtcaggtacag

SEQ ID NO: 2549682 - DNA, 25 bp, Homo sapien
taacacagaacggtgtctcccgtga

SEQ ID NO: 2549683 - DNA, 25 bp, Homo sapien
aatgttctgccgatactgataggtc

SEQ ID NO: 2549684 - DNA, 25 bp, Homo sapien
actcggaagcaggaatgttctgccg

SEQ ID NO: 2549685 - DNA, 25 bp, Homo sapien
gataggtcagctcacggaagctgcg

SEQ ID NO: 2549686 - DNA, 25 bp, Homo sapien
tcggtcaacatgtttttccatgtca

SEQ ID NO: 2549687 - DNA, 25 bp, Homo sapien
cagcagaaacactccccgctggaga

SEQ ID NO: 2549688 - DNA, 25 bp, Homo sapien
agagccacgaggctctcggtcaaca

SEQ ID NO: 2549689 - DNA, 25 bp, Homo sapien
agacagcagaaacactccccgctgg

SEQ ID NO: 2549690 - DNA, 25 bp, Homo sapien
ggcctgcagcacgagaagtcttgtc

SEQ ID NO: 2549691 - DNA, 25 bp, Homo sapien
taaagggcggcaccttcaagaagcc

SEQ ID NO: 2549692 - DNA, 25 bp, Homo sapien
ccgaggtagcttcctagacgtggga

SEQ ID NO: 2549693 - DNA, 25 bp, Homo sapien
agcccaggctgttgcacaagaaaag

SEQ ID NO: 2549694 - DNA, 25 bp, Homo sapien
gatgtctgactcgtagctgttgttg

SEQ ID NO: 2549695 - DNA, 25 bp, Homo sapien
cttcaggatgtctgactcgtagctg

SEQ ID NO: 2549696 - DNA, 25 bp, Homo sapien
cgtagctgttgttgttcagcacgcc

SEQ ID NO: 2549697 - DNA, 25 bp, Homo sapien
ttcagcacgccgtccagacacttgt

SEQ ID NO: 2549698 - DNA, 25 bp, Homo sapien
ctgccgagatgaaggggcaatgtta

SEQ ID NO: 2549699 - DNA, 25 bp, Homo sapien
tgccgagatgaaggggcaatgttac

SEQ ID NO: 2549700 - DNA, 25 bp, Homo sapien
ctgtttataatgatgtcgcaggaaa

SEQ ID NO: 2549701 - DNA, 25 bp, Homo sapien
cgcaggaaagcactgtctgcccgac

SEQ ID NO: 2549702 - DNA, 25 bp, Homo sapien
gcaggaaagcactgtctgcccgaca

SEQ ID NO: 2549703 - DNA, 25 bp, Homo sapien
ttataatgatgtcgcaggaaagcac

SEQ ID NO: 2549704 - DNA, 25 bp, Homo sapien
aacatatttcttttcattacagatt

SEQ ID NO: 2549705 - DNA, 25 bp, Homo sapien
taaacatatttcttttcattacaga

SEQ ID NO: 2549706 - DNA, 25 bp, Homo sapien
ctgaggataaacatatttcttttca

SEQ ID NO: 2549707 - DNA, 25 bp, Homo sapien
gataaacatatttcttttcattaca

SEQ ID NO: 2549708 - DNA, 25 bp, Homo sapien
ggtatcgtaacagcagaaccccgct

SEQ ID NO: 2549709 - DNA, 25 bp, Homo sapien
taaggcttgattttgagctaacacg

SEQ ID NO: 2549710 - DNA, 25 bp, Homo sapien
tccttaaaaagatcagctctccgag

SEQ ID NO: 2549711 - DNA, 25 bp, Homo sapien
acatgcaaaggtcaaagcaactggg

SEQ ID NO: 2549712 - DNA, 25 bp, Homo sapien
tccgggtgcagccccagtacaggtg

SEQ ID NO: 2549713 - DNA, 25 bp, Homo sapien
cagccgtagcagccggtccgggtgc

SEQ ID NO: 2549714 - DNA, 25 bp, Homo sapien
gtggagagaggacactcgttacacg

SEQ ID NO: 2549715 - DNA, 25 bp, Homo sapien
ctcgttacacgcactcagcgctgag

SEQ ID NO: 2549716 - DNA, 25 bp, Homo sapien
tccaacacaattcgtcagcaccagg

SEQ ID NO: 2549717 - DNA, 25 bp, Homo sapien
aattcgtcagcaccaggctcaggag

SEQ ID NO: 2549718 - DNA, 25 bp, Homo sapien
ccctaacacggcttcgatgggcttc

SEQ ID NO: 2549719 - DNA, 25 bp, Homo sapien
aaagaaatctcacctgctccaccac

SEQ ID NO: 2549720 - DNA, 25 bp, Homo sapien
aaacagtgagagacacaaaagaaag

SEQ ID NO: 2549721 - DNA, 25 bp, Homo sapien
accaccctaacacggcttcgatggg

SEQ ID NO: 2549722 - DNA, 25 bp, Homo sapien
gtgcacagggcgtggcttccttgca

SEQ ID NO: 2549723 - DNA, 25 bp, Homo sapien
gcgtggcttccttgcagagggcaca

SEQ ID NO: 2549724 - DNA, 25 bp, Homo sapien
tccgctctccggtcgggcatgggct

SEQ ID NO: 2549725 - DNA, 25 bp, Homo sapien
tgcagagggcacacgtaatcctgga

SEQ ID NO: 2549726 - DNA, 25 bp, Homo sapien
cgtgcccggccgatctgttgaaggt

SEQ ID NO: 2549727 - DNA, 25 bp, Homo sapien
tatttcctataaagagaggacaagc

SEQ ID NO: 2549728 - DNA, 25 bp, Homo sapien
tgtgttcaatttccgctcaggtgag

SEQ ID NO: 2549729 - DNA, 25 bp, Homo sapien
agaggacaagcccatagaacctatg

SEQ ID NO: 2549730 - DNA, 25 bp, Homo sapien
ctttgggtctggcaaacccactggg

SEQ ID NO: 2549731 - DNA, 25 bp, Homo sapien
agaggccaagtattaaggtcagggt

SEQ ID NO: 2549732 - DNA, 25 bp, Homo sapien
gggctacgaatgaacagttacttat

SEQ ID NO: 2549733 - DNA, 25 bp, Homo sapien
aaatcagtcacgaaaagcaaccaac

SEQ ID NO: 2549734 - DNA, 25 bp, Homo sapien
ctgccggcacacgacgtatggctgg

SEQ ID NO: 2549735 - DNA, 25 bp, Homo sapien
tgcgccgcctgccttctgtactcag

SEQ ID NO: 2549736 - DNA, 25 bp, Homo sapien
caggctgacggacgtggagggtgca

SEQ ID NO: 2549737 - DNA, 25 bp, Homo sapien
tctgtactcaggacactgccggcac

SEQ ID NO: 2549738 - DNA, 25 bp, Homo sapien
tctcccgttaaaagcagagcgcggt

SEQ ID NO: 2549739 - DNA, 25 bp, Homo sapien
tcactaggtccccactgacgtgtgc

SEQ ID NO: 2549740 - DNA, 25 bp, Homo sapien
cagcaccccagtgttagagagggac

SEQ ID NO: 2549741 - DNA, 25 bp, Homo sapien
cagaacgagtcgaagggcaaggaca

SEQ ID NO: 2549742 - DNA, 25 bp, Homo sapien
ccgatcggtgtctggataacaaact

SEQ ID NO: 2549743 - DNA, 25 bp, Homo sapien
cattaccgagctgtacatgcagccg

SEQ ID NO: 2549744 - DNA, 25 bp, Homo sapien
tgcgcatgtgcacaaatacggatgg

SEQ ID NO: 2549745 - DNA, 25 bp, Homo sapien
ttaggtgcaccctttccgatcggtg

SEQ ID NO: 2549746 - DNA, 25 bp, Homo sapien
aggaggtggtgatttcagtgagctg

SEQ ID NO: 2549747 - DNA, 25 bp, Homo sapien
agcctggcagcagagcgacactcca

SEQ ID NO: 2549748 - DNA, 25 bp, Homo sapien
gaacccaggaggtggtgatttcagt

SEQ ID NO: 2549749 - DNA, 25 bp, Homo sapien
gagatcgtgtcactgcactccagcc

SEQ ID NO: 2549750 - DNA, 25 bp, Homo sapien
gcaggtcctctgaactcccttcttc

SEQ ID NO: 2549751 - DNA, 25 bp, Homo sapien
tcttcatcagaaaaagaccgcctga

SEQ ID NO: 2549752 - DNA, 25 bp, Homo sapien
cagcatgtcttgagtgattttattt

SEQ ID NO: 2549753 - DNA, 25 bp, Homo sapien
catactttgcacatcttcttcactg

SEQ ID NO: 2549754 - DNA, 25 bp, Homo sapien
gccattcaccggcagtgagacatgg

SEQ ID NO: 2549755 - DNA, 25 bp, Homo sapien
caccggcagtgagacatggcaggca

SEQ ID NO: 2549756 - DNA, 25 bp, Homo sapien
acagcgccattcaccggcagtgaga

SEQ ID NO: 2549757 - DNA, 25 bp, Homo sapien
aggacacagcgccattcaccggcag

SEQ ID NO: 2549758 - DNA, 25 bp, Homo sapien
gctggtgtggatgccctcacgtgcc

SEQ ID NO: 2549759 - DNA, 25 bp, Homo sapien
tggagggacagccctcacgtgcccg

SEQ ID NO: 2549760 - DNA, 25 bp, Homo sapien
ggtggagggacagccctcacgtgcc

SEQ ID NO: 2549761 - DNA, 25 bp, Homo sapien
tggtggagggacagccctcacgtgc

SEQ ID NO: 2549762 - DNA, 25 bp, Homo sapien
agggacagccctcacgtgcccgggt

SEQ ID NO: 2549763 - DNA, 25 bp, Homo sapien
gctggtgtggatgccctcacgtgcc

SEQ ID NO: 2549764 - DNA, 25 bp, Homo sapien
ggatgctggatgaggtatgcttcca

SEQ ID NO: 2549765 - DNA, 25 bp, Homo sapien
tggatgctggatgaggtatgcttcc

SEQ ID NO: 2549766 - DNA, 25 bp, Homo sapien
gatgctggatgaggtatgcttccac

SEQ ID NO: 2549767 - DNA, 25 bp, Homo sapien
aagccgcgcagaacgtgtgcatgca

SEQ ID NO: 2549768 - DNA, 25 bp, Homo sapien
gaggatgtggtttttacagatccgc

SEQ ID NO: 2549769 - DNA, 25 bp, Homo sapien
taggacacagggacgagcgctccat

SEQ ID NO: 2549770 - DNA, 25 bp, Homo sapien
ccgctccacgggacagcggcaggta

SEQ ID NO: 2549771 - DNA, 25 bp, Homo sapien
gttccgtgagccaagggtgaacacg

SEQ ID NO: 2549772 - DNA, 25 bp, Homo sapien
tgagccaagggtgaacacggtcgca

SEQ ID NO: 2549773 - DNA, 25 bp, Homo sapien
tgcagtgccatgttccgtgagccaa

SEQ ID NO: 2549774 - DNA, 25 bp, Homo sapien
ggacgaagaacctgcagtgccatgt

SEQ ID NO: 2549775 - DNA, 25 bp, Homo sapien
agccgctgctctgacgtcctcgtgg

SEQ ID NO: 2549776 - DNA, 25 bp, Homo sapien
caactgcccgttcaggtcaaggtcc

SEQ ID NO: 2549777 - DNA, 25 bp, Homo sapien
catttctacgcggttgtgcgaccaa

SEQ ID NO: 2549778 - DNA, 25 bp, Homo sapien
cgtcctcgtggacggtttgggcatt

SEQ ID NO: 2549779 - DNA, 25 bp, Homo sapien
acttgccacagagggaccacttcct

SEQ ID NO: 2549780 - DNA, 25 bp, Homo sapien
ttccaacgacgaaaaggacgcagtc

SEQ ID NO: 2549781 - DNA, 25 bp, Homo sapien
gtctgggagagctgaggcaaagctg

SEQ ID NO: 2549782 - DNA, 25 bp, Homo sapien
ttcttcttcacgggctccaaatcct

SEQ ID NO: 2549783 - DNA, 25 bp, Homo sapien
cccgtgctcagccaacgtggagagg

SEQ ID NO: 2549784 - DNA, 25 bp, Homo sapien
ccccgtgctcagccaacgtggagag

SEQ ID NO: 2549785 - DNA, 25 bp, Homo sapien
aagatacgatgaagggtacacagcc

SEQ ID NO: 2549786 - DNA, 25 bp, Homo sapien
tctgaagagggtctagtagccacaa

SEQ ID NO: 2549787 - DNA, 25 bp, Homo sapien
catggtatagttcatctaggcagac

SEQ ID NO: 2549788 - DNA, 25 bp, Homo sapien
aaatgcacatgggacttggccctag

SEQ ID NO: 2549789 - DNA, 25 bp, Homo sapien
gctggagtgcagtgacgcggtatcg

SEQ ID NO: 2549790 - DNA, 25 bp, Homo sapien
gagtgcagtgacgcggtatcggctc

SEQ ID NO: 2549791 - DNA, 25 bp, Homo sapien
ggagtgcagtgacgcggtatcggct

SEQ ID NO: 2549792 - DNA, 25 bp, Homo sapien
gcagtgacgcggtatcggctcactg

SEQ ID NO: 2549793 - DNA, 25 bp, Homo sapien
cctcctctctcaggtgaaactcctg

SEQ ID NO: 2549794 - DNA, 25 bp, Homo sapien
tgatcctcctctctcaggtgaaact

SEQ ID NO: 2549795 - DNA, 25 bp, Homo sapien
tcctctctcaggtgaaactcctgtc

SEQ ID NO: 2549796 - DNA, 25 bp, Homo sapien
atcctcctctctcaggtgaaactcc

SEQ ID NO: 2549797 - DNA, 25 bp, Homo sapien
gaaatctcactactgagaacctcat

SEQ ID NO: 2549798 - DNA, 25 bp, Homo sapien
cagaaatctcactactgagaacctc

SEQ ID NO: 2549799 - DNA, 25 bp, Homo sapien
acagaaatctcactactgagaacct

SEQ ID NO: 2549800 - DNA, 25 bp, Homo sapien
aaatctcactactgagaacctcatg

SEQ ID NO: 2549801 - DNA, 25 bp, Homo sapien
aactggaggaacgctctcgccctgc

SEQ ID NO: 2549802 - DNA, 25 bp, Homo sapien
cacaactggaggaacgctctcgccc

SEQ ID NO: 2549803 - DNA, 25 bp, Homo sapien
gaggaacgctctcgccctgcaggag

SEQ ID NO: 2549804 - DNA, 25 bp, Homo sapien
acaactggaggaacgctctcgccct

SEQ ID NO: 2549805 - DNA, 25 bp, Homo sapien
aggtctgacgtcgatgttgatggct

SEQ ID NO: 2549806 - DNA, 25 bp, Homo sapien
aagaggtctgacgtcgatgttgatg

SEQ ID NO: 2549807 - DNA, 25 bp, Homo sapien
tggggaagaggtctgacgtcgatgt

SEQ ID NO: 2549808 - DNA, 25 bp, Homo sapien
gggaagaggtctgacgtcgatgttg

SEQ ID NO: 2549809 - DNA, 25 bp, Homo sapien
tgagtggcgggcgacgacggaggga

SEQ ID NO: 2549810 - DNA, 25 bp, Homo sapien
gagtggcgggcgacgacggagggac

SEQ ID NO: 2549811 - DNA, 25 bp, Homo sapien
ctgagtggcgggcgacgacggaggg

SEQ ID NO: 2549812 - DNA, 25 bp, Homo sapien
atggaacacattttccttgttagct

SEQ ID NO: 2549813 - DNA, 25 bp, Homo sapien
cccatggaacacattttccttgtta

SEQ ID NO: 2549814 - DNA, 25 bp, Homo sapien
tttggtcccatggaacacattttcc

SEQ ID NO: 2549815 - DNA, 25 bp, Homo sapien
ctttggtcccatggaacacattttc

SEQ ID NO: 2549816 - DNA, 25 bp, Homo sapien
acttaaagattcatagaggtatgcc

SEQ ID NO: 2549817 - DNA, 25 bp, Homo sapien
taaagattcatagaggtatgccacg

SEQ ID NO: 2549818 - DNA, 25 bp, Homo sapien
ggattcttgtgtcatgccttgcttt

SEQ ID NO: 2549819 - DNA, 25 bp, Homo sapien
caaaggattcttgtgtcatgccttg

SEQ ID NO: 2549820 - DNA, 25 bp, Homo sapien
ttgatgtttcttgtaaggtctccaa

SEQ ID NO: 2549821 - DNA, 25 bp, Homo sapien
ttctcctgtagaacccaaaccatcc

SEQ ID NO: 2549822 - DNA, 25 bp, Homo sapien
tattccccataactcaagttcttct

SEQ ID NO: 2549823 - DNA, 25 bp, Homo sapien
cagaaccatcaatggcctccagacc

SEQ ID NO: 2549824 - DNA, 25 bp, Homo sapien
gccaggaggaacgttcagagagcgc

SEQ ID NO: 2549825 - DNA, 25 bp, Homo sapien
tgtagccaggaggaacgttcagaga

SEQ ID NO: 2549826 - DNA, 25 bp, Homo sapien
ggaggaacgttcagagagcgccctc

SEQ ID NO: 2549827 - DNA, 25 bp, Homo sapien
ccaggaggaacgttcagagagcgcc

SEQ ID NO: 2549828 - DNA, 25 bp, Homo sapien
gtgcgggtctgaccccggcaagcct

SEQ ID NO: 2549829 - DNA, 25 bp, Homo sapien
cccgtgcgggtctgaccccggcaag

SEQ ID NO: 2549830 - DNA, 25 bp, Homo sapien
ggtctgaccccggcaagccttcctc

SEQ ID NO: 2549831 - DNA, 25 bp, Homo sapien
gtctgaccccggcaagccttcctct

SEQ ID NO: 2549832 - DNA, 25 bp, Homo sapien
caagtagatgacatccccagtctgt

SEQ ID NO: 2549833 - DNA, 25 bp, Homo sapien
gggcatgtctgcttcttaacaacct

SEQ ID NO: 2549834 - DNA, 25 bp, Homo sapien
caaccttcagcttgttaatcactgt

SEQ ID NO: 2549835 - DNA, 25 bp, Homo sapien
tccccagtctgtaaagggcatgtct

SEQ ID NO: 2549836 - DNA, 25 bp, Homo sapien
ggagtgcacacggacttgggtgcat

SEQ ID NO: 2549837 - DNA, 25 bp, Homo sapien
tgcacacggacttgggtgcatgcag

SEQ ID NO: 2549838 - DNA, 25 bp, Homo sapien
cgctggagctggactgactttctgt

SEQ ID NO: 2549839 - DNA, 25 bp, Homo sapien
ggcgctggagctggactgactttct

SEQ ID NO: 2549840 - DNA, 25 bp, Homo sapien
agcctgagccacagagcgagactcc

SEQ ID NO: 2549841 - DNA, 25 bp, Homo sapien
tcagcctgagccacagagcgagact

SEQ ID NO: 2549842 - DNA, 25 bp, Homo sapien
agcacttcagcctgagccacagagc

SEQ ID NO: 2549843 - DNA, 25 bp, Homo sapien
cctgagccacagagcgagactccgt

SEQ ID NO: 2549844 - DNA, 25 bp, Homo sapien
ctccagagaccagtttattgctggg

SEQ ID NO: 2549845 - DNA, 25 bp, Homo sapien
tctacagtgatctccagagaccagt

SEQ ID NO: 2549846 - DNA, 25 bp, Homo sapien
tcatccactacaattctacagtgat

SEQ ID NO: 2549847 - DNA, 25 bp, Homo sapien
tacaattctacagtgatctccagag

SEQ ID NO: 2549848 - DNA, 25 bp, Homo sapien
tgagccaccgtgcctggcctgaata

SEQ ID NO: 2549849 - DNA, 25 bp, Homo sapien
caagagatcctcctgttttggcctc

SEQ ID NO: 2549850 - DNA, 25 bp, Homo sapien
acaggcatgagccaccgtgcctggc

SEQ ID NO: 2549851 - DNA, 25 bp, Homo sapien
tttggcctcccaaactgctgggatt

SEQ ID NO: 2549852 - DNA, 25 bp, Homo sapien
gaatcatgcgcaagaatcggtgggc

SEQ ID NO: 2549853 - DNA, 25 bp, Homo sapien
cggaaaaatctggagcgcacactgc

SEQ ID NO: 2549854 - DNA, 25 bp, Homo sapien
tactctgtacggcaacgaacgtgac

SEQ ID NO: 2549855 - DNA, 25 bp, Homo sapien
gggcagaacaccgaataaataccag

SEQ ID NO: 2549856 - DNA, 25 bp, Homo sapien
tcgtctccgcccgatggtccactcc

SEQ ID NO: 2549857 - DNA, 25 bp, Homo sapien
aggacgtgcggctcgccctcctccg

SEQ ID NO: 2549858 - DNA, 25 bp, Homo sapien
gcccagacgcaggagccgtccccag

SEQ ID NO: 2549859 - DNA, 25 bp, Homo sapien
cgatggtccactcccgcttcctcag

SEQ ID NO: 2549860 - DNA, 25 bp, Homo sapien
gcgccgaacccggaaccggctgcgc

SEQ ID NO: 2549861 - DNA, 25 bp, Homo sapien
cgccgccgctgtcaagagacattgc

SEQ ID NO: 2549862 - DNA, 25 bp, Homo sapien
ccgccgctgtcaagagacattgcgg

SEQ ID NO: 2549863 - DNA, 25 bp, Homo sapien
ccgctgtcaagagacattgcggctc

SEQ ID NO: 2549864 - DNA, 25 bp, Homo sapien
gggcgctcggccatctttgatcctg

SEQ ID NO: 2549865 - DNA, 25 bp, Homo sapien
caagagcggcagctaaagcggagcc

SEQ ID NO: 2549866 - DNA, 25 bp, Homo sapien
gagtggcccgcgagagtaggcgcgt

SEQ ID NO: 2549867 - DNA, 25 bp, Homo sapien
tttgatcctgaccaggcgacttcgt

SEQ ID NO: 2549868 - DNA, 25 bp, Homo sapien
gggcccacggtgcacctcatttact

SEQ ID NO: 2549869 - DNA, 25 bp, Homo sapien
caaaatcggtaggatgatggagaac

SEQ ID NO: 2549870 - DNA, 25 bp, Homo sapien
tcagaagcgatgtcattgttacagg

SEQ ID NO: 2549871 - DNA, 25 bp, Homo sapien
tgttacaggaaaaagaggagttcca

SEQ ID NO: 2549872 - DNA, 25 bp, Homo sapien
cgcggccctaggagtgccgagctca

SEQ ID NO: 2549873 - DNA, 25 bp, Homo sapien
catgactgaggccaatgtgaatctg

SEQ ID NO: 2549874 - DNA, 25 bp, Homo sapien
aatgtgaatctgaaggcctagcccc

SEQ ID NO: 2549875 - DNA, 25 bp, Homo sapien
gctcacggaaccacagccatgactg

SEQ ID NO: 2549876 - DNA, 25 bp, Homo sapien
cagcttcagaaaagagccaacgagg

SEQ ID NO: 2549877 - DNA, 25 bp, Homo sapien
cttcagaaaagagccaacgaggcca

SEQ ID NO: 2549878 - DNA, 25 bp, Homo sapien
tcgtgtaactacaagcagcttcaga

SEQ ID NO: 2549879 - DNA, 25 bp, Homo sapien
aaccactggagttcattcagtagtc

SEQ ID NO: 2549880 - DNA, 25 bp, Homo sapien
agccacaggagatcattccgcacct

SEQ ID NO: 2549881 - DNA, 25 bp, Homo sapien
tgcagacaccgagccacaggagatc

SEQ ID NO: 2549882 - DNA, 25 bp, Homo sapien
agacaccgagccacaggagatcatt

SEQ ID NO: 2549883 - DNA, 25 bp, Homo sapien
caccgagccacaggagatcattccg

SEQ ID NO: 2549884 - DNA, 25 bp, Homo sapien
tatttgtgcgctccaagcaggccct

SEQ ID NO: 2549885 - DNA, 25 bp, Homo sapien
aatttttgtattctggtctcgaact

SEQ ID NO: 2549886 - DNA, 25 bp, Homo sapien
ggcagagcagcctatattttccttt

SEQ ID NO: 2549887 - DNA, 25 bp, Homo sapien
cagagtgctaggattttcctttttt

SEQ ID NO: 2549888 - DNA, 25 bp, Homo sapien
gaaacaaaagaatagctactccaca

SEQ ID NO: 2549889 - DNA, 25 bp, Homo sapien
agaataacgcatgggaacattccag

SEQ ID NO: 2549890 - DNA, 25 bp, Homo sapien
tgggccacgcacttctctggacttg

SEQ ID NO: 2549891 - DNA, 25 bp, Homo sapien
ctgattaaggaaacaccaggtgctc

SEQ ID NO: 2549892 - DNA, 25 bp, Homo sapien
tgcctaaaacagatctcactccgag

SEQ ID NO: 2549893 - DNA, 25 bp, Homo sapien
gcgacgccgcgggcggaatgcgcat

SEQ ID NO: 2549894 - DNA, 25 bp, Homo sapien
tggcgacgccgcgggcggaatgcgc

SEQ ID NO: 2549895 - DNA, 25 bp, Homo sapien
tgtggcgacgccgcgggcggaatgc

SEQ ID NO: 2549896 - DNA, 25 bp, Homo sapien
cctgtggcgacgccgcgggcggaat

SEQ ID NO: 2549897 - DNA, 25 bp, Homo sapien
tggacacggccgtcaggaagctcag

SEQ ID NO: 2549898 - DNA, 25 bp, Homo sapien
gaagctgagcgcactgaagtgagcc

SEQ ID NO: 2549899 - DNA, 25 bp, Homo sapien
cagagcgtcgtttgtcttcccaagc

SEQ ID NO: 2549900 - DNA, 25 bp, Homo sapien
gaggctgcagcaccgcttctgcgtt

SEQ ID NO: 2549901 - DNA, 25 bp, Homo sapien
cccgaggcgtcagagatgggcggtc

SEQ ID NO: 2549902 - DNA, 25 bp, Homo sapien
ccccggatgtttgcgatgggacggc

SEQ ID NO: 2549903 - DNA, 25 bp, Homo sapien
tttggaggtgcgagccccattgggc

SEQ ID NO: 2549904 - DNA, 25 bp, Homo sapien
tgggcggtcgttaggcgcagtggcg

SEQ ID NO: 2549905 - DNA, 25 bp, Homo sapien
tttaaagcataatgcgacattctgc

SEQ ID NO: 2549906 - DNA, 25 bp, Homo sapien
ggaaaccccttgtcaaatcaccaga

SEQ ID NO: 2549907 - DNA, 25 bp, Homo sapien
tgttacccaattaatgtttgccagg

SEQ ID NO: 2549908 - DNA, 25 bp, Homo sapien
tgtcctatatcagttaaacccaccg

SEQ ID NO: 2549909 - DNA, 25 bp, Homo sapien
gctggaatttccattgggatcgcaa

SEQ ID NO: 2549910 - DNA, 25 bp, Homo sapien
aaccttatgggactgatttcttgca

SEQ ID NO: 2549911 - DNA, 25 bp, Homo sapien
tcagggagtgcgagtcttccagctc

SEQ ID NO: 2549912 - DNA, 25 bp, Homo sapien
cagtaagtttcgaagtcagggagtg

SEQ ID NO: 2549913 - DNA, 25 bp, Homo sapien
ctgggttcatgtgatttgcccacct

SEQ ID NO: 2549914 - DNA, 25 bp, Homo sapien
tgggtttacaggtgctccaccacac

SEQ ID NO: 2549915 - DNA, 25 bp, Homo sapien
caactcctgggttcatgtgatttgc

SEQ ID NO: 2549916 - DNA, 25 bp, Homo sapien
gagccatcgcacctggccagcctta

SEQ ID NO: 2549917 - DNA, 25 bp, Homo sapien
ccttgtaatgaagcagtgaagtaca

SEQ ID NO: 2549918 - DNA, 25 bp, Homo sapien
tgaagtacagctggcccacatctca

SEQ ID NO: 2549919 - DNA, 25 bp, Homo sapien
taatgaagcagtgaagtacagctgg

SEQ ID NO: 2549920 - DNA, 25 bp, Homo sapien
gcagtgaagtacagctggcccacat

SEQ ID NO: 2549921 - DNA, 25 bp, Homo sapien
gagctgcctggcaaataccatggtt

SEQ ID NO: 2549922 - DNA, 25 bp, Homo sapien
gacgaatctacactagacctgcctg

SEQ ID NO: 2549923 - DNA, 25 bp, Homo sapien
cacaacaggacacaatgcacatgcc

SEQ ID NO: 2549924 - DNA, 25 bp, Homo sapien
gcacatgccttgttcataccctcag

SEQ ID NO: 2549925 - DNA, 25 bp, Homo sapien
tgagaacttcaagttataaatgtcc

SEQ ID NO: 2549926 - DNA, 25 bp, Homo sapien
aacagtgaatgcctcgatagctaca

SEQ ID NO: 2549927 - DNA, 25 bp, Homo sapien
tgctgtgcacatttcgagatttagg

SEQ ID NO: 2549928 - DNA, 25 bp, Homo sapien
taggtatcactaaataagtttggtg

SEQ ID NO: 2549929 - DNA, 25 bp, Homo sapien
tattctcatacacaggttattacag

SEQ ID NO: 2549930 - DNA, 25 bp, Homo sapien
tacagcacaattaggaagagacaat

SEQ ID NO: 2549931 - DNA, 25 bp, Homo sapien
tcaaattatgccaaagtcccaacat

SEQ ID NO: 2549932 - DNA, 25 bp, Homo sapien
ttcatttgcaagttaattcctaaaa

SEQ ID NO: 2549933 - DNA, 25 bp, Homo sapien
gcctcctggcattgtcggaaataga

SEQ ID NO: 2549934 - DNA, 25 bp, Homo sapien
tgaattatccacaacgaatggtagc

SEQ ID NO: 2549935 - DNA, 25 bp, Homo sapien
gcactactgtgaagcctaacggcaa

SEQ ID NO: 2549936 - DNA, 25 bp, Homo sapien
tgcccacaggttagagattacatga

SEQ ID NO: 2549937 - DNA, 25 bp, Homo sapien
tgcaacctaggaactgccatgcggg

SEQ ID NO: 2549938 - DNA, 25 bp, Homo sapien
cagaagctaccatggtccaggcagg

SEQ ID NO: 2549939 - DNA, 25 bp, Homo sapien
gagccctgtatctagaaggatccca

SEQ ID NO: 2549940 - DNA, 25 bp, Homo sapien
catttcagcctatgcactatgcggc

SEQ ID NO: 2549941 - DNA, 25 bp, Homo sapien
cacactcattgcatccatagtattt

SEQ ID NO: 2549942 - DNA, 25 bp, Homo sapien
taagctgcgacttcctgttgaaggt

SEQ ID NO: 2549943 - DNA, 25 bp, Homo sapien
tttctctgatgtatcataagctgcg

SEQ ID NO: 2549944 - DNA, 25 bp, Homo sapien
aaggtgtgactttcttgtgaaagat

SEQ ID NO: 2549945 - DNA, 25 bp, Homo sapien
aaagcttttgcacaatcgctgcatc

SEQ ID NO: 2549946 - DNA, 25 bp, Homo sapien
tttgatgcttaatgagctgcacttt

SEQ ID NO: 2549947 - DNA, 25 bp, Homo sapien
tgatgcttaatgagctgcactttct

SEQ ID NO: 2549948 - DNA, 25 bp, Homo sapien
acaatcgctgcatccataggttttc

SEQ ID NO: 2549949 - DNA, 25 bp, Homo sapien
ctgatgcctaagaagctgtggcttc

SEQ ID NO: 2549950 - DNA, 25 bp, Homo sapien
tgatgcctaagaagctgtggcttcc

SEQ ID NO: 2549951 - DNA, 25 bp, Homo sapien
tctgatgcctaagaagctgtggctt

SEQ ID NO: 2549952 - DNA, 25 bp, Homo sapien
gatgcctaagaagctgtggcttcca

SEQ ID NO: 2549953 - DNA, 25 bp, Homo sapien
ctctgatgtgatatcaggcttgact

SEQ ID NO: 2549954 - DNA, 25 bp, Homo sapien
gtgatatcaggcttgacttctgggt

SEQ ID NO: 2549955 - DNA, 25 bp, Homo sapien
tgatgtgatatcaggcttgacttct

SEQ ID NO: 2549956 - DNA, 25 bp, Homo sapien
gttctctgatgtgatatcaggcttg

SEQ ID NO: 2549957 - DNA, 25 bp, Homo sapien
ctgtgatgcgttaggagctgggact

SEQ ID NO: 2549958 - DNA, 25 bp, Homo sapien
cttcttaaagaaggcctcctcacaa

SEQ ID NO: 2549959 - DNA, 25 bp, Homo sapien
cccacattgaatgcatccatatggt

SEQ ID NO: 2549960 - DNA, 25 bp, Homo sapien
cacaatcactgcatcgatagttctt

SEQ ID NO: 2549961 - DNA, 25 bp, Homo sapien
tgagccatggctcttcgttgctgga

SEQ ID NO: 2549962 - DNA, 25 bp, Homo sapien
ctttgatgaaccgtgagcagtgact

SEQ ID NO: 2549963 - DNA, 25 bp, Homo sapien
gacattcgctgcacccatgcggttt

SEQ ID NO: 2549964 - DNA, 25 bp, Homo sapien
tcagctgcgacttccaaaagaaggc

SEQ ID NO: 2549965 - DNA, 25 bp, Homo sapien
acatcatatttatggcctctctcca

SEQ ID NO: 2549966 - DNA, 25 bp, Homo sapien
gattatctcggagccacattttggg

SEQ ID NO: 2549967 - DNA, 25 bp, Homo sapien
cacatttatgggatcgcagtcctac

SEQ ID NO: 2549968 - DNA, 25 bp, Homo sapien
acattttgggattatctagccagac

SEQ ID NO: 2549969 - DNA, 25 bp, Homo sapien
gttgaagaaaagagctcaaagtgaa

SEQ ID NO: 2549970 - DNA, 25 bp, Homo sapien
gaagaaaagagctcaaagtgaagtc

SEQ ID NO: 2549971 - DNA, 25 bp, Homo sapien
gaaaagagctcaaagtgaagtctac

SEQ ID NO: 2549972 - DNA, 25 bp, Homo sapien
tcaaggaacattcactgaagttgaa

SEQ ID NO: 2549973 - DNA, 25 bp, Homo sapien
agttctgatttaggatttcttgacc

SEQ ID NO: 2549974 - DNA, 25 bp, Homo sapien
aaaagttctgatttaggatttcttg

SEQ ID NO: 2549975 - DNA, 25 bp, Homo sapien
acattgcatcaggtttgagaatttg

SEQ ID NO: 2549976 - DNA, 25 bp, Homo sapien
cttgttgttccagtttgaacattgc

SEQ ID NO: 2549977 - DNA, 25 bp, Homo sapien
tctgagtaggattaagtagctgcca

SEQ ID NO: 2549978 - DNA, 25 bp, Homo sapien
agtaggattaagtagctgccattcc

SEQ ID NO: 2549979 - DNA, 25 bp, Homo sapien
cttctgagtaggattaagtagctgc

SEQ ID NO: 2549980 - DNA, 25 bp, Homo sapien
taggattaagtagctgccattcctc

SEQ ID NO: 2549981 - DNA, 25 bp, Homo sapien
ctgttaaacctgaagtggttctcat

SEQ ID NO: 2549982 - DNA, 25 bp, Homo sapien
cctgttaaacctgaagtggttctca

SEQ ID NO: 2549983 - DNA, 25 bp, Homo sapien
attactacatgggacacacaggtaa

SEQ ID NO: 2549984 - DNA, 25 bp, Homo sapien
tgattactacatgggacacacaggt

SEQ ID NO: 2549985 - DNA, 25 bp, Homo sapien
tttgattactacatgggacacacag

SEQ ID NO: 2549986 - DNA, 25 bp, Homo sapien
gttttgattactacatgggacacac

SEQ ID NO: 2549987 - DNA, 25 bp, Homo sapien
cagagactgtccacacttgataagg

SEQ ID NO: 2549988 - DNA, 25 bp, Homo sapien
cctggttattgtcacggcccgtcaa

SEQ ID NO: 2549989 - DNA, 25 bp, Homo sapien
ccatcctgcttggagtggcgtcata

SEQ ID NO: 2549990 - DNA, 25 bp, Homo sapien
tgaagtcaaggcctaaacccaatga

SEQ ID NO: 2549991 - DNA, 25 bp, Homo sapien
ttaaatacctgtagtgcggccgggc

SEQ ID NO: 2549992 - DNA, 25 bp, Homo sapien
atacctgtagtgcggccgggcacgg

SEQ ID NO: 2549993 - DNA, 25 bp, Homo sapien
aaatacctgtagtgcggccgggcac

SEQ ID NO: 2549994 - DNA, 25 bp, Homo sapien
taaatacctgtagtgcggccgggca

SEQ ID NO: 2549995 - DNA, 25 bp, Homo sapien
gtatttagacccttctgtgtgttgc

SEQ ID NO: 2549996 - DNA, 25 bp, Homo sapien
tgatctcttccaactttaagacttt

SEQ ID NO: 2549997 - DNA, 25 bp, Homo sapien
agcctcataacacccacaaaacaga

SEQ ID NO: 2549998 - DNA, 25 bp, Homo sapien
tgcttctccagagtaatttgtctgc

SEQ ID NO: 2549999 - DNA, 25 bp, Homo sapien
tgaaacagaggataaaccgataacc

SEQ ID NO: 2550000 - DNA, 25 bp, Homo sapien
aaccgataacccacctgtgactgga

SEQ ID NO: 2550001 - DNA, 25 bp, Homo sapien
catgaaacagaggataaaccgataa

SEQ ID NO: 2550002 - DNA, 25 bp, Homo sapien
cgataacccacctgtgactggatca

SEQ ID NO: 2550003 - DNA, 25 bp, Homo sapien
tgaaacagaggataaaccgataacc

SEQ ID NO: 2550004 - DNA, 25 bp, Homo sapien
atgaaacagaggataaaccgataac

SEQ ID NO: 2550005 - DNA, 25 bp, Homo sapien
catgaaacagaggataaaccgataa

SEQ ID NO: 2550006 - DNA, 25 bp, Homo sapien
tgtgacttctcttagtcctgacacc

SEQ ID NO: 2550007 - DNA, 25 bp, Homo sapien
aactgagaatacatccttggtcttg

SEQ ID NO: 2550008 - DNA, 25 bp, Homo sapien
catccttggtcttgtgggctcttct

SEQ ID NO: 2550009 - DNA, 25 bp, Homo sapien
agtggcctctggtcagtggtctgta

SEQ ID NO: 2550010 - DNA, 25 bp, Homo sapien
ttatctcacatgaattgtcttgttc

SEQ ID NO: 2550011 - DNA, 25 bp, Homo sapien
ttgtcttgttccagagggctattgc

SEQ ID NO: 2550012 - DNA, 25 bp, Homo sapien
aattgtcttgttccagagggctatt

SEQ ID NO: 2550013 - DNA, 25 bp, Homo sapien
tctcacatgaattgtcttgttccag

SEQ ID NO: 2550014 - DNA, 25 bp, Homo sapien
catttcttcactgcccatggaccag

SEQ ID NO: 2550015 - DNA, 25 bp, Homo sapien
gaactgaaggacacgcagctgcaca

SEQ ID NO: 2550016 - DNA, 25 bp, Homo sapien
aagaactgaaggacacgcagctgca

SEQ ID NO: 2550017 - DNA, 25 bp, Homo sapien
cacggaatcagagccaaagaactga

SEQ ID NO: 2550018 - DNA, 25 bp, Homo sapien
ttagatgaagccagacacggaatca

SEQ ID NO: 2550019 - DNA, 25 bp, Homo sapien
ggttgtcgagcagctctgaagctcc

SEQ ID NO: 2550020 - DNA, 25 bp, Homo sapien
cctaggaatggttgtcgagcagctc

SEQ ID NO: 2550021 - DNA, 25 bp, Homo sapien
catctacacctgtggagcgaggcca

SEQ ID NO: 2550022 - DNA, 25 bp, Homo sapien
gcgaggccacgtggcctaggaatgg

SEQ ID NO: 2550023 - DNA, 25 bp, Homo sapien
actcctctgcgcggtctcccacgta

SEQ ID NO: 2550024 - DNA, 25 bp, Homo sapien
ctcctctgcgcggtctcccacgtac

SEQ ID NO: 2550025 - DNA, 25 bp, Homo sapien
gttcccaggtgaccccacgctcagg

SEQ ID NO: 2550026 - DNA, 25 bp, Homo sapien
gctgaggattggagaattagacaag

SEQ ID NO: 2550027 - DNA, 25 bp, Homo sapien
attagacaagggtcgttcccaggtg

SEQ ID NO: 2550028 - DNA, 25 bp, Homo sapien
aggctgaggattggagaattagaca

SEQ ID NO: 2550029 - DNA, 25 bp, Homo sapien
ggggaccagtgtagctcacgcctgg

SEQ ID NO: 2550030 - DNA, 25 bp, Homo sapien
gaggcggggaccagtgtagctcacg

SEQ ID NO: 2550031 - DNA, 25 bp, Homo sapien
gaccagtgtagctcacgcctggcac

SEQ ID NO: 2550032 - DNA, 25 bp, Homo sapien
gcggggaccagtgtagctcacgcct

SEQ ID NO: 2550033 - DNA, 25 bp, Homo sapien
ctgcggaagcagacatcagcgtagc

SEQ ID NO: 2550034 - DNA, 25 bp, Homo sapien
agacatcagcgtagctcacgcctgg

SEQ ID NO: 2550035 - DNA, 25 bp, Homo sapien
cggaagcagacatcagcgtagctca

SEQ ID NO: 2550036 - DNA, 25 bp, Homo sapien
gaagcagacatcagcgtagctcacg

SEQ ID NO: 2550037 - DNA, 25 bp, Homo sapien
ggaggaaagccttcttatcgccgtg

SEQ ID NO: 2550038 - DNA, 25 bp, Homo sapien
tagctcacgcctgcttggtatctgt

SEQ ID NO: 2550039 - DNA, 25 bp, Homo sapien
caggctctgagtgagttgctccatc

SEQ ID NO: 2550040 - DNA, 25 bp, Homo sapien
agcactggaagccagacgtgcaggc

SEQ ID NO: 2550041 - DNA, 25 bp, Homo sapien
ccaaaccgtggtgaatggcagagca

SEQ ID NO: 2550042 - DNA, 25 bp, Homo sapien
aaggacactgaggtaggaggaattc

SEQ ID NO: 2550043 - DNA, 25 bp, Homo sapien
gcagagcaaggacactgaggtagga

SEQ ID NO: 2550044 - DNA, 25 bp, Homo sapien
aaaccgtggtgaatggcagagcaag

SEQ ID NO: 2550045 - DNA, 25 bp, Homo sapien
cattcaacgatgtacactggaccct

SEQ ID NO: 2550046 - DNA, 25 bp, Homo sapien
aacaccctcaaataacaaagccaat

SEQ ID NO: 2550047 - DNA, 25 bp, Homo sapien
aagccaatgccagggcacgagccaa

SEQ ID NO: 2550048 - DNA, 25 bp, Homo sapien
ggcacgagccaataaaactgtcccc

SEQ ID NO: 2550049 - DNA, 25 bp, Homo sapien
taatgcttccatcataagatcccca

SEQ ID NO: 2550050 - DNA, 25 bp, Homo sapien
aaaccccagccactcgccagcatag

SEQ ID NO: 2550051 - DNA, 25 bp, Homo sapien
ataggccaccccatactcgcctccg

SEQ ID NO: 2550052 - DNA, 25 bp, Homo sapien
tacacagcgccattcctaatgcttc

SEQ ID NO: 2550053 - DNA, 25 bp, Homo sapien
tcattcatcagcagagtcctaatcg

SEQ ID NO: 2550054 - DNA, 25 bp, Homo sapien
aaggcatccaaatcattcatcagca

SEQ ID NO: 2550055 - DNA, 25 bp, Homo sapien
aaatcattcatcagcagagtcctaa

SEQ ID NO: 2550056 - DNA, 25 bp, Homo sapien
tccaaatcattcatcagcagagtcc

SEQ ID NO: 2550057 - DNA, 25 bp, Homo sapien
aagtctacagcgacctccataggcc

SEQ ID NO: 2550058 - DNA, 25 bp, Homo sapien
ataggcccccagtgaatcgcccagc

SEQ ID NO: 2550059 - DNA, 25 bp, Homo sapien
cagtgaatcgcccagctgaccccaa

SEQ ID NO: 2550060 - DNA, 25 bp, Homo sapien
caagggcaacctcgcgtccccttgc

SEQ ID NO: 2550061 - DNA, 25 bp, Homo sapien
ggcccgatcggggacgtgaacgcgc

SEQ ID NO: 2550062 - DNA, 25 bp, Homo sapien
tcgcgctggaactacacttcccggg

SEQ ID NO: 2550063 - DNA, 25 bp, Homo sapien
tcccgctcgcgctggaactacactt

SEQ ID NO: 2550064 - DNA, 25 bp, Homo sapien
cgtgaacgcgcagaactacatttcc

SEQ ID NO: 2550065 - DNA, 25 bp, Homo sapien
tgatatcaaaacctcagcacgcctg

SEQ ID NO: 2550066 - DNA, 25 bp, Homo sapien
ggctccgaggatggtactgaacctg

SEQ ID NO: 2550067 - DNA, 25 bp, Homo sapien
catcttgacagccaaaggcgcgcag

SEQ ID NO: 2550068 - DNA, 25 bp, Homo sapien
tgagtcagttctacaggccctggga

SEQ ID NO: 2550069 - DNA, 25 bp, Homo sapien
actcccggccttagtcgggtgcgcg

SEQ ID NO: 2550070 - DNA, 25 bp, Homo sapien
aagccaggcctgtaacgagggagcc

SEQ ID NO: 2550071 - DNA, 25 bp, Homo sapien
ggctgtttccggcttagactcagtg

SEQ ID NO: 2550072 - DNA, 25 bp, Homo sapien
gagatgtagtttttccggcgccttc

SEQ ID NO: 2550073 - DNA, 25 bp, Homo sapien
aaaccaaagcgcctctgaagctcgc

SEQ ID NO: 2550074 - DNA, 25 bp, Homo sapien
ctgcgggccctgaagtctgaggatc

SEQ ID NO: 2550075 - DNA, 25 bp, Homo sapien
ttatactgcacttcatggccagctg

SEQ ID NO: 2550076 - DNA, 25 bp, Homo sapien
ggtattctgtgacgggcagttatac

SEQ ID NO: 2550077 - DNA, 25 bp, Homo sapien
acagtaacacaaccccacgagaagg

SEQ ID NO: 2550078 - DNA, 25 bp, Homo sapien
tcaccatgcgctcactggacagtaa

SEQ ID NO: 2550079 - DNA, 25 bp, Homo sapien
caccaccatagttgatgtgggtgtg

SEQ ID NO: 2550080 - DNA, 25 bp, Homo sapien
cacttttcaaaaaattgcaccacca

SEQ ID NO: 2550081 - DNA, 25 bp, Homo sapien
cgtatcaagcttaaagaaatagtaa

SEQ ID NO: 2550082 - DNA, 25 bp, Homo sapien
tggtctacccgctgctcctggtcta

SEQ ID NO: 2550083 - DNA, 25 bp, Homo sapien
ttcattcgtatcaagcttaaagaaa

SEQ ID NO: 2550084 - DNA, 25 bp, Homo sapien
aaatagacaataagcctcctggtct

SEQ ID NO: 2550085 - DNA, 25 bp, Homo sapien
ttcgtcttctgctgtcgacctccag

SEQ ID NO: 2550086 - DNA, 25 bp, Homo sapien
tcaacgtaataagggcacagtagtg

SEQ ID NO: 2550087 - DNA, 25 bp, Homo sapien
cagcttgataagcacctcaacgtaa

SEQ ID NO: 2550088 - DNA, 25 bp, Homo sapien
cagcttctaatatggtcacatcgaa

SEQ ID NO: 2550089 - DNA, 25 bp, Homo sapien
tcaagtgtcaagttcgggaatcttc

SEQ ID NO: 2550090 - DNA, 25 bp, Homo sapien
agcctgctaatgagctcaagtgtca

SEQ ID NO: 2550091 - DNA, 25 bp, Homo sapien
caagttcgggaatcttctgggtgtt

SEQ ID NO: 2550092 - DNA, 25 bp, Homo sapien
ctgaggaggagcctgctaatgagct

SEQ ID NO: 2550093 - DNA, 25 bp, Homo sapien
tcacgtgttcttagcaaggtcactt

SEQ ID NO: 2550094 - DNA, 25 bp, Homo sapien
catcttccgtcattcatggaccagt

SEQ ID NO: 2550095 - DNA, 25 bp, Homo sapien
tcttagagcccctcctgtttgagag

SEQ ID NO: 2550096 - DNA, 25 bp, Homo sapien
agaggatggatacccgcttcccttt

SEQ ID NO: 2550097 - DNA, 25 bp, Homo sapien
aattcagggcttcgtatacatcgga

SEQ ID NO: 2550098 - DNA, 25 bp, Homo sapien
ggaggccctaaaattacactcatgt

SEQ ID NO: 2550099 - DNA, 25 bp, Homo sapien
actgatgttcaggagacttcggata

SEQ ID NO: 2550100 - DNA, 25 bp, Homo sapien
gatacaccagaaaactcattcggga

SEQ ID NO: 2550101 - DNA, 25 bp, Homo sapien
tactaaggataaccatacgccagtc

SEQ ID NO: 2550102 - DNA, 25 bp, Homo sapien
gatggatgtccaataaaattttagc

SEQ ID NO: 2550103 - DNA, 25 bp, Homo sapien
ccaaatcaggatagagacagtagaa

SEQ ID NO: 2550104 - DNA, 25 bp, Homo sapien
ggagtatcaaaagcttccctcagtg

SEQ ID NO: 2550105 - DNA, 25 bp, Homo sapien
cgttgagctggagtcctaaccaatg

SEQ ID NO: 2550106 - DNA, 25 bp, Homo sapien
caagcagaaccttacgaacagtata

SEQ ID NO: 2550107 - DNA, 25 bp, Homo sapien
cctcagcaaacatacttcaagcaga

SEQ ID NO: 2550108 - DNA, 25 bp, Homo sapien
tgaggaaccgctgagatcactgctc

SEQ ID NO: 2550109 - DNA, 25 bp, Homo sapien
aaatgagctttgaggttctacgtgc

SEQ ID NO: 2550110 - DNA, 25 bp, Homo sapien
tgaaaactctagacaccaagactgg

SEQ ID NO: 2550111 - DNA, 25 bp, Homo sapien
gctgggcagcaagactaactctgga

SEQ ID NO: 2550112 - DNA, 25 bp, Homo sapien
gactggcctcagaaatagatacctt

SEQ ID NO: 2550113 - DNA, 25 bp, Homo sapien
gtgatagactcagtactcagccact

SEQ ID NO: 2550114 - DNA, 25 bp, Homo sapien
caagtagtgatagactcagtactca

SEQ ID NO: 2550115 - DNA, 25 bp, Homo sapien
gtagtgatagactcagtactcagcc

SEQ ID NO: 2550116 - DNA, 25 bp, Homo sapien
tcatccaagtagtgatagactcagt

SEQ ID NO: 2550117 - DNA, 25 bp, Homo sapien
tatatattggtggattcggtttccc

SEQ ID NO: 2550118 - DNA, 25 bp, Homo sapien
gagacgccgtctcaagaaaatatat

SEQ ID NO: 2550119 - DNA, 25 bp, Homo sapien
tgagcccgtttggagtcactccgtc

SEQ ID NO: 2550120 - DNA, 25 bp, Homo sapien
aactgaagtcaaaccaattgagtat

SEQ ID NO: 2550121 - DNA, 25 bp, Homo sapien
tccgagaacggacgagactgggcgc

SEQ ID NO: 2550122 - DNA, 25 bp, Homo sapien
acggacgagactgggcgcgttgagg

SEQ ID NO: 2550123 - DNA, 25 bp, Homo sapien
gaacggacgagactgggcgcgttga

SEQ ID NO: 2550124 - DNA, 25 bp, Homo sapien
gagaacggacgagactgggcgcgtt

SEQ ID NO: 2550125 - DNA, 25 bp, Homo sapien
ttatatgagccaaatactaactact

SEQ ID NO: 2550126 - DNA, 25 bp, Homo sapien
aaactcttaggtattaagcatacaa

SEQ ID NO: 2550127 - DNA, 25 bp, Homo sapien
ttaaactcttaggtattaagcatac

SEQ ID NO: 2550128 - DNA, 25 bp, Homo sapien
ctttaaactcttaggtattaagcat

SEQ ID NO: 2550129 - DNA, 25 bp, Homo sapien
ttgagatagcatactaaaggaggcc

SEQ ID NO: 2550130 - DNA, 25 bp, Homo sapien
tctgacatcattacctatgggtcca

SEQ ID NO: 2550131 - DNA, 25 bp, Homo sapien
gatactttggtttcgggaacatcac

SEQ ID NO: 2550132 - DNA, 25 bp, Homo sapien
taaaatgcacccacagaatgccgta

SEQ ID NO: 2550133 - DNA, 25 bp, Homo sapien
gtggctgttttctgccacatggaga

SEQ ID NO: 2550134 - DNA, 25 bp, Homo sapien
ttaaatgtgggtgcagtgagtggct

SEQ ID NO: 2550135 - DNA, 25 bp, Homo sapien
tttctgccacatggagaaacatggt

SEQ ID NO: 2550136 - DNA, 25 bp, Homo sapien
taaatgtgggtgcagtgagtggctg

SEQ ID NO: 2550137 - DNA, 25 bp, Homo sapien
tgttacatttgggaagctgctgctc

SEQ ID NO: 2550138 - DNA, 25 bp, Homo sapien
gttacatttgggaagctgctgctct

SEQ ID NO: 2550139 - DNA, 25 bp, Homo sapien
acatttgggaagctgctgctctagg

SEQ ID NO: 2550140 - DNA, 25 bp, Homo sapien
tacatttgggaagctgctgctctag

SEQ ID NO: 2550141 - DNA, 25 bp, Homo sapien
ctgctgatgatcagtgtcaatgccc

SEQ ID NO: 2550142 - DNA, 25 bp, Homo sapien
ttggacacaagggtacaaagttcca

SEQ ID NO: 2550143 - DNA, 25 bp, Homo sapien
tggtccttggacacaagggtacaaa

SEQ ID NO: 2550144 - DNA, 25 bp, Homo sapien
gctggtccttggacacaagggtaca

SEQ ID NO: 2550145 - DNA, 25 bp, Homo sapien
tggacacaagggtacaaagttccat

SEQ ID NO: 2550146 - DNA, 25 bp, Homo sapien
gaagtactgactccacagtcgttgt

SEQ ID NO: 2550147 - DNA, 25 bp, Homo sapien
gactccacagtcgttgttaagaatc

SEQ ID NO: 2550148 - DNA, 25 bp, Homo sapien
ggtcttagactgaagtactgactcc

SEQ ID NO: 2550149 - DNA, 25 bp, Homo sapien
aaaggtcttagactgaagtactgac

SEQ ID NO: 2550150 - DNA, 25 bp, Homo sapien
ttaatagaggcggtcttgggctctt

SEQ ID NO: 2550151 - DNA, 25 bp, Homo sapien
ctagttgtttaatagaggcggtctt

SEQ ID NO: 2550152 - DNA, 25 bp, Homo sapien
aatagaggcggtcttgggctcttgc

SEQ ID NO: 2550153 - DNA, 25 bp, Homo sapien
ttgtttaatagaggcggtcttgggc

SEQ ID NO: 2550154 - DNA, 25 bp, Homo sapien
tgtgggagtcgtagtaggggaggaa

SEQ ID NO: 2550155 - DNA, 25 bp, Homo sapien
ctgtgggagtcgtagtaggggagga

SEQ ID NO: 2550156 - DNA, 25 bp, Homo sapien
tgtcttccggctttgggcgtggcca

SEQ ID NO: 2550157 - DNA, 25 bp, Homo sapien
tttcgatgatgtgcgcttggcctca

SEQ ID NO: 2550158 - DNA, 25 bp, Homo sapien
tggccacgatgcactctgggagtcg

SEQ ID NO: 2550159 - DNA, 25 bp, Homo sapien
gaatgtagtcgccagagctctgcgt

SEQ ID NO: 2550160 - DNA, 25 bp, Homo sapien
gctgtaggcaacgaaaggagccctc

SEQ ID NO: 2550161 - DNA, 25 bp, Homo sapien
ggaattgtagttgtcgcaggccctc

SEQ ID NO: 2550162 - DNA, 25 bp, Homo sapien
tccagtaggaacgaaaagcccttgc

SEQ ID NO: 2550163 - DNA, 25 bp, Homo sapien
ggcttctgaagacgcaattcctgcg

SEQ ID NO: 2550164 - DNA, 25 bp, Homo sapien
aattcagaggttctctgagttttgc

SEQ ID NO: 2550165 - DNA, 25 bp, Homo sapien
gggaatccaatttccacctctgctg

SEQ ID NO: 2550166 - DNA, 25 bp, Homo sapien
cagaggttctctgagttttgctggg

SEQ ID NO: 2550167 - DNA, 25 bp, Homo sapien
ctctccaaattcagaggttctctga

SEQ ID NO: 2550168 - DNA, 25 bp, Homo sapien
tgcgtgctggtcatgcaaatatctg

SEQ ID NO: 2550169 - DNA, 25 bp, Homo sapien
gttggagaactatggccatctggtc

SEQ ID NO: 2550170 - DNA, 25 bp, Homo sapien
tctggtctcactgggtaagtattct

SEQ ID NO: 2550171 - DNA, 25 bp, Homo sapien
acattgcctaacctccacagtgaga

SEQ ID NO: 2550172 - DNA, 25 bp, Homo sapien
cttaggattcaatgactgatcttga

SEQ ID NO: 2550173 - DNA, 25 bp, Homo sapien
gcaagcaggtctttccatttctaag

SEQ ID NO: 2550174 - DNA, 25 bp, Homo sapien
gacatttcctttgtggcccctctta

SEQ ID NO: 2550175 - DNA, 25 bp, Homo sapien
tgcaagcaggtctttccatttctaa

SEQ ID NO: 2550176 - DNA, 25 bp, Homo sapien
taacagctgacatagtcgaccagtt

SEQ ID NO: 2550177 - DNA, 25 bp, Homo sapien
tagtcgaccagttctcaccttatac

SEQ ID NO: 2550178 - DNA, 25 bp, Homo sapien
gaccagttctcaccttatactttct

SEQ ID NO: 2550179 - DNA, 25 bp, Homo sapien
gacatagtcgaccagttctcacctt

SEQ ID NO: 2550180 - DNA, 25 bp, Homo sapien
gtaataactatcaaggaattcatgg

SEQ ID NO: 2550181 - DNA, 25 bp, Homo sapien
atttccagttgtcgttttaggcttg

SEQ ID NO: 2550182 - DNA, 25 bp, Homo sapien
taagtgctacagagactagagagtg

SEQ ID NO: 2550183 - DNA, 25 bp, Homo sapien
catggcctagtgatgtgtctaaata

SEQ ID NO: 2550184 - DNA, 25 bp, Homo sapien
tctataactagttgttatcaatgac

SEQ ID NO: 2550185 - DNA, 25 bp, Homo sapien
gacttataaactccactgcattcag

SEQ ID NO: 2550186 - DNA, 25 bp, Homo sapien
tgttatcaatgacttataaactcca

SEQ ID NO: 2550187 - DNA, 25 bp, Homo sapien
tcaatgacttataaactccactgca

SEQ ID NO: 2550188 - DNA, 25 bp, Homo sapien
ccgtttctgtcgtctggaagagatt

SEQ ID NO: 2550189 - DNA, 25 bp, Homo sapien
acttgggcatggagtataattccct

SEQ ID NO: 2550190 - DNA, 25 bp, Homo sapien
cacgattggttgttggattttgcta

SEQ ID NO: 2550191 - DNA, 25 bp, Homo sapien
ttttgatactaggtcagtgctggcc

SEQ ID NO: 2550192 - DNA, 25 bp, Homo sapien
gtctctccggagctgttgtatacac

SEQ ID NO: 2550193 - DNA, 25 bp, Homo sapien
ggcacatgcacactaaggattttta

SEQ ID NO: 2550194 - DNA, 25 bp, Homo sapien
ttgaagtccccaagtgtaatagtgc

SEQ ID NO: 2550195 - DNA, 25 bp, Homo sapien
tcaggctctgcctaatgtattttga

SEQ ID NO: 2550196 - DNA, 25 bp, Homo sapien
cgtctatcttcgtgaatgtcttggg

SEQ ID NO: 2550197 - DNA, 25 bp, Homo sapien
caagagaacacctgagcttattctt

SEQ ID NO: 2550198 - DNA, 25 bp, Homo sapien
gctataatcaccttaccatgcaaga

SEQ ID NO: 2550199 - DNA, 25 bp, Homo sapien
gctagaagtacagatgcacagtacc

SEQ ID NO: 2550200 - DNA, 25 bp, Homo sapien
tctatgtgataagagcattcaaaac

SEQ ID NO: 2550201 - DNA, 25 bp, Homo sapien
gaacttgctcttgtgtcttatatca

SEQ ID NO: 2550202 - DNA, 25 bp, Homo sapien
tacagaattggtttaaagaagaggc

SEQ ID NO: 2550203 - DNA, 25 bp, Homo sapien
ccctatttatattctcagttcctga

SEQ ID NO: 2550204 - DNA, 25 bp, Homo sapien
taggtactcagtagatacagaattg

SEQ ID NO: 2550205 - DNA, 25 bp, Homo sapien
tcataggcaagttttcagagaaacc

SEQ ID NO: 2550206 - DNA, 25 bp, Homo sapien
gcataatgcccaatagtcaggtttt

SEQ ID NO: 2550207 - DNA, 25 bp, Homo sapien
tgtgcaatctgacgaacacttagtg

SEQ ID NO: 2550208 - DNA, 25 bp, Homo sapien
ggtgaagaagactagcaacctatcc

SEQ ID NO: 2550209 - DNA, 25 bp, Homo sapien
tatcagtactgtggagaggccctat

SEQ ID NO: 2550210 - DNA, 25 bp, Homo sapien
gaattctaagtcaaggccctgtgta

SEQ ID NO: 2550211 - DNA, 25 bp, Homo sapien
gaaagaaaccccatgagtgtaagga

SEQ ID NO: 2550212 - DNA, 25 bp, Homo sapien
gaaaggcctttagccgtgcctccaa

SEQ ID NO: 2550213 - DNA, 25 bp, Homo sapien
tatcagaggtcatcaagctacagcc

SEQ ID NO: 2550214 - DNA, 25 bp, Homo sapien
taaaactgttctggcattaccacct

SEQ ID NO: 2550215 - DNA, 25 bp, Homo sapien
tgacaaaggtcacaccatcagggtt

SEQ ID NO: 2550216 - DNA, 25 bp, Homo sapien
tgactcgaatacaagcagcatgcct

SEQ ID NO: 2550217 - DNA, 25 bp, Homo sapien
gtctatggaccaaatcaaggccttt

SEQ ID NO: 2550218 - DNA, 25 bp, Homo sapien
tgcaaaacctagaatattggccggg

SEQ ID NO: 2550219 - DNA, 25 bp, Homo sapien
tatttactctcaggaccttcagaca

SEQ ID NO: 2550220 - DNA, 25 bp, Homo sapien
tgcaacagttaccatatatggcctg

SEQ ID NO: 2550221 - DNA, 25 bp, Homo sapien
cttacagtgtagagggcacaataca

SEQ ID NO: 2550222 - DNA, 25 bp, Homo sapien
tttaactgaacacctacactgggcc

SEQ ID NO: 2550223 - DNA, 25 bp, Homo sapien
taaagcaagtatacgacacacccac

SEQ ID NO: 2550224 - DNA, 25 bp, Homo sapien
gatgaaggacacaatacctaaagga

SEQ ID NO: 2550225 - DNA, 25 bp, Homo sapien
gcagttgggacgattttcttgagac

SEQ ID NO: 2550226 - DNA, 25 bp, Homo sapien
ttttaataggataccatggcagctg

SEQ ID NO: 2550227 - DNA, 25 bp, Homo sapien
ttaagatgatctcacccaaggacca

SEQ ID NO: 2550228 - DNA, 25 bp, Homo sapien
tcacatcggcgcacaaggtttcagg

SEQ ID NO: 2550229 - DNA, 25 bp, Homo sapien
tatgtcttcagggtaggtggcagac

SEQ ID NO: 2550230 - DNA, 25 bp, Homo sapien
aattggtaacttcccctctgtctga

SEQ ID NO: 2550231 - DNA, 25 bp, Homo sapien
tgaataactacaacagcagctactg

SEQ ID NO: 2550232 - DNA, 25 bp, Homo sapien
agcataaaagctcggtcaacattcc

SEQ ID NO: 2550233 - DNA, 25 bp, Homo sapien
acaaagactgagacaaggagcttgg

SEQ ID NO: 2550234 - DNA, 25 bp, Homo sapien
aagagccatttgtaaccttaaatcg

SEQ ID NO: 2550235 - DNA, 25 bp, Homo sapien
gagacaaggagcttggaatccacct

SEQ ID NO: 2550236 - DNA, 25 bp, Homo sapien
gcttggaatccaccttaagacaatg

SEQ ID NO: 2550237 - DNA, 25 bp, Homo sapien
tatgcattctaagggatgagacccc

SEQ ID NO: 2550238 - DNA, 25 bp, Homo sapien
tgaactttaaggtgagagctcgtgt

SEQ ID NO: 2550239 - DNA, 25 bp, Homo sapien
tgtataataagtgaagagctctgac

SEQ ID NO: 2550240 - DNA, 25 bp, Homo sapien
tgaattctcacatgcctcctaaggg

SEQ ID NO: 2550241 - DNA, 25 bp, Homo sapien
tttcagtatgagtttgtccttgttt

SEQ ID NO: 2550242 - DNA, 25 bp, Homo sapien
gtgagttctcatgtgagccttaagg

SEQ ID NO: 2550243 - DNA, 25 bp, Homo sapien
catgtctccttaaggttgaggaatc

SEQ ID NO: 2550244 - DNA, 25 bp, Homo sapien
tctcatgtgagccttaagggatgtt

SEQ ID NO: 2550245 - DNA, 25 bp, Homo sapien
gaaaatgccatagagttgtatcaca

SEQ ID NO: 2550246 - DNA, 25 bp, Homo sapien
cattcatgactttcatagagcttct

SEQ ID NO: 2550247 - DNA, 25 bp, Homo sapien
gacacagcgtttcatctttattaca

SEQ ID NO: 2550248 - DNA, 25 bp, Homo sapien
catatgcaaattgttaggtacagga

SEQ ID NO: 2550249 - DNA, 25 bp, Homo sapien
cagagtcctgtttagttaaagccca

SEQ ID NO: 2550250 - DNA, 25 bp, Homo sapien
gatagtcacggaatagctcctgagg

SEQ ID NO: 2550251 - DNA, 25 bp, Homo sapien
tgtacaactgatattccacggaggt

SEQ ID NO: 2550252 - DNA, 25 bp, Homo sapien
tgtttactggtgaaaatgctctgtg

SEQ ID NO: 2550253 - DNA, 25 bp, Homo sapien
cctgcacagtagagtagagagatca

SEQ ID NO: 2550254 - DNA, 25 bp, Homo sapien
tcaggatgtttctgttcttgtgtct

SEQ ID NO: 2550255 - DNA, 25 bp, Homo sapien
cacagtagagtagagagatcaggat

SEQ ID NO: 2550256 - DNA, 25 bp, Homo sapien
tttatgagtacataagcctgcacag

SEQ ID NO: 2550257 - DNA, 25 bp, Homo sapien
ccttgacactagatatatatacgcc

SEQ ID NO: 2550258 - DNA, 25 bp, Homo sapien
cagaatgccagccaacaagtgttat

SEQ ID NO: 2550259 - DNA, 25 bp, Homo sapien
caagatttcgtacgtagatcccacc

SEQ ID NO: 2550260 - DNA, 25 bp, Homo sapien
gatcccacccaaagtgtatgcagaa

SEQ ID NO: 2550261 - DNA, 25 bp, Homo sapien
tactaggcaattcttactagaagaa

SEQ ID NO: 2550262 - DNA, 25 bp, Homo sapien
aatttgtagtaaagtgactgaaaag

SEQ ID NO: 2550263 - DNA, 25 bp, Homo sapien
gaataaaggatgagtaagaataaaa

SEQ ID NO: 2550264 - DNA, 25 bp, Homo sapien
gattgccgtcctcaacaagttagca

SEQ ID NO: 2550265 - DNA, 25 bp, Homo sapien
taatgaacatgtactccatgtcccc

SEQ ID NO: 2550266 - DNA, 25 bp, Homo sapien
tccatgtccccaagtgaaatgcggt

SEQ ID NO: 2550267 - DNA, 25 bp, Homo sapien
gaggttgtacctgtcaatgtgagtg

SEQ ID NO: 2550268 - DNA, 25 bp, Homo sapien
tgcggttcctgacgaggttgtacct

SEQ ID NO: 2550269 - DNA, 25 bp, Homo sapien
ctctctgagatagtgggaaggcgtc

SEQ ID NO: 2550270 - DNA, 25 bp, Homo sapien
catagccttcttgccgatacttgga

SEQ ID NO: 2550271 - DNA, 25 bp, Homo sapien
gaaggcgtcacagcatagatggcat

SEQ ID NO: 2550272 - DNA, 25 bp, Homo sapien
ggaactgcgtgtgcctcaaatagta

SEQ ID NO: 2550273 - DNA, 25 bp, Homo sapien
ggaagttttgcagatttccccagcc

SEQ ID NO: 2550274 - DNA, 25 bp, Homo sapien
cttttctcatcgttgttccagtttt

SEQ ID NO: 2550275 - DNA, 25 bp, Homo sapien
ttgaggccacaataacctccctggg

SEQ ID NO: 2550276 - DNA, 25 bp, Homo sapien
tcttagcccctaggatagtacttgg

SEQ ID NO: 2550277 - DNA, 25 bp, Homo sapien
aagggatgaataaaggaaccgtctg

SEQ ID NO: 2550278 - DNA, 25 bp, Homo sapien
ccgaggataggatgtgcaaatgtgt

SEQ ID NO: 2550279 - DNA, 25 bp, Homo sapien
tgttcctgtatattgtttgctctgt

SEQ ID NO: 2550280 - DNA, 25 bp, Homo sapien
tggcttctgtaagagagcatcttac

SEQ ID NO: 2550281 - DNA, 25 bp, Homo sapien
catggtcccataagtaaaagcaata

SEQ ID NO: 2550282 - DNA, 25 bp, Homo sapien
tcgtattccatctcggctggaagca

SEQ ID NO: 2550283 - DNA, 25 bp, Homo sapien
caagggaatcgaatgtaggaactca

SEQ ID NO: 2550284 - DNA, 25 bp, Homo sapien
tacatgacctaagtagaacaggcaa

SEQ ID NO: 2550285 - DNA, 25 bp, Homo sapien
cagctgtttcagtcctaggtgtata

SEQ ID NO: 2550286 - DNA, 25 bp, Homo sapien
tgaaaagagtgaggttctgatacat

SEQ ID NO: 2550287 - DNA, 25 bp, Homo sapien
caagtctttctttgggaccatggga

SEQ ID NO: 2550288 - DNA, 25 bp, Homo sapien
tatgattcctcattaagtattggcc

SEQ ID NO: 2550289 - DNA, 25 bp, Homo sapien
taacaattattaactggacccagca

SEQ ID NO: 2550290 - DNA, 25 bp, Homo sapien
gagttttacagaatctacaaggctg

SEQ ID NO: 2550291 - DNA, 25 bp, Homo sapien
tatatagggactgaccatgattctc

SEQ ID NO: 2550292 - DNA, 25 bp, Homo sapien
gcgtagacttgagctagactaccca

SEQ ID NO: 2550293 - DNA, 25 bp, Homo sapien
gcttctctgtgccaaacttactgat

SEQ ID NO: 2550294 - DNA, 25 bp, Homo sapien
tccattctatggagaggatcccagt

SEQ ID NO: 2550295 - DNA, 25 bp, Homo sapien
acatttaaacaactcctacaactca

SEQ ID NO: 2550296 - DNA, 25 bp, Homo sapien
aggatgtgctaatggccactaaaca

SEQ ID NO: 2550297 - DNA, 25 bp, Homo sapien
tgcaaatcatgtaagagtttaatat

SEQ ID NO: 2550298 - DNA, 25 bp, Homo sapien
catgtaagagtttaatatcaggaac

SEQ ID NO: 2550299 - DNA, 25 bp, Homo sapien
tcagggacctggccaggaaggcctg

SEQ ID NO: 2550300 - DNA, 25 bp, Homo sapien
tggccaggaaggcctgagcttccgg

SEQ ID NO: 2550301 - DNA, 25 bp, Homo sapien
ggccaggaaggcctgagcttccggg

SEQ ID NO: 2550302 - DNA, 25 bp, Homo sapien
gggacctggccaggaaggcctgagc

SEQ ID NO: 2550303 - DNA, 25 bp, Homo sapien
tgttcctcagatagcgttcatcgcc

SEQ ID NO: 2550304 - DNA, 25 bp, Homo sapien
ttcctgtgcgacatacgtagcggcc

SEQ ID NO: 2550305 - DNA, 25 bp, Homo sapien
cgccgatggcgagatccttgttcct

SEQ ID NO: 2550306 - DNA, 25 bp, Homo sapien
cgagtctggagtggttgcgaaccct

SEQ ID NO: 2550307 - DNA, 25 bp, Homo sapien
gaggcagtaccctggactctattct

SEQ ID NO: 2550308 - DNA, 25 bp, Homo sapien
agggtccggacagcttctatttggg

SEQ ID NO: 2550309 - DNA, 25 bp, Homo sapien
caccagggtccggacagcttctatt

SEQ ID NO: 2550310 - DNA, 25 bp, Homo sapien
tcattcttgaaaagctctccctgaa

SEQ ID NO: 2550311 - DNA, 25 bp, Homo sapien
tgaatgccaacgtgtgcgcactcca

SEQ ID NO: 2550312 - DNA, 25 bp, Homo sapien
tgccgccttctaggtcgttggcgct

SEQ ID NO: 2550313 - DNA, 25 bp, Homo sapien
cgccttctaggtcgttggcgctttt

SEQ ID NO: 2550314 - DNA, 25 bp, Homo sapien
ctgtgccgccttctaggtcgttggc

SEQ ID NO: 2550315 - DNA, 25 bp, Homo sapien
tgtgccgccttctaggtcgttggcg

SEQ ID NO: 2550316 - DNA, 25 bp, Homo sapien
tctcttatttcctcatactcaattt

SEQ ID NO: 2550317 - DNA, 25 bp, Homo sapien
ttccattcggaagattgaagctctt

SEQ ID NO: 2550318 - DNA, 25 bp, Homo sapien
cctggcctcgttttcagaaactgga

SEQ ID NO: 2550319 - DNA, 25 bp, Homo sapien
ttcatgagggcacaacttaatcttc

SEQ ID NO: 2550320 - DNA, 25 bp, Homo sapien
gcaaaaaaggcctaagatcattccc

SEQ ID NO: 2550321 - DNA, 25 bp, Homo sapien
ggatgggtgtgttaccagcaccaga

SEQ ID NO: 2550322 - DNA, 25 bp, Homo sapien
taggatggcttcagtatccatgaac

SEQ ID NO: 2550323 - DNA, 25 bp, Homo sapien
aaagcagagatacaggaaccgagca

SEQ ID NO: 2550324 - DNA, 25 bp, Homo sapien
gaattctttgaactctaccttgagg

SEQ ID NO: 2550325 - DNA, 25 bp, Homo sapien
tacttttcgtcatgtcatatagttt

SEQ ID NO: 2550326 - DNA, 25 bp, Homo sapien
ttacttttcgtcatgtcatatagtt

SEQ ID NO: 2550327 - DNA, 25 bp, Homo sapien
ttcagccctggctgacacagggctg

SEQ ID NO: 2550328 - DNA, 25 bp, Homo sapien
ggttcagccctggctgacacagggc

SEQ ID NO: 2550329 - DNA, 25 bp, Homo sapien
tgggggttcagccctggctgacaca

SEQ ID NO: 2550330 - DNA, 25 bp, Homo sapien
ctgtgggggttcagccctggctgac

SEQ ID NO: 2550331 - DNA, 25 bp, Homo sapien
gcccatagcagtgtcctgttgtgtc

SEQ ID NO: 2550332 - DNA, 25 bp, Homo sapien
acactgagactgcccatagcagtgt

SEQ ID NO: 2550333 - DNA, 25 bp, Homo sapien
gtagtagttacaacactgagactgc

SEQ ID NO: 2550334 - DNA, 25 bp, Homo sapien
agactgcccatagcagtgtcctgtt

SEQ ID NO: 2550335 - DNA, 25 bp, Homo sapien
cagtccataggcttctggttgtaaa

SEQ ID NO: 2550336 - DNA, 25 bp, Homo sapien
gtccaacagggcgataatagaagca

SEQ ID NO: 2550337 - DNA, 25 bp, Homo sapien
tctgtgagtccaacagggcgataat

SEQ ID NO: 2550338 - DNA, 25 bp, Homo sapien
caacagggcgataatagaagcaact

SEQ ID NO: 2550339 - DNA, 25 bp, Homo sapien
gaaactctgtgagtccaacagggcg

SEQ ID NO: 2550340 - DNA, 25 bp, Homo sapien
accaaaatgaccataggcggtaatt

SEQ ID NO: 2550341 - DNA, 25 bp, Homo sapien
ggtaattccccaggccgtgtgatct

SEQ ID NO: 2550342 - DNA, 25 bp, Homo sapien
tctcagtctggcattctcggatctc

SEQ ID NO: 2550343 - DNA, 25 bp, Homo sapien
ctggcattctcggatctccaaggca

SEQ ID NO: 2550344 - DNA, 25 bp, Homo sapien
ggcgatggagtaccaggagaacacg

SEQ ID NO: 2550345 - DNA, 25 bp, Homo sapien
agaacacggccgcagagtgaccttc

SEQ ID NO: 2550346 - DNA, 25 bp, Homo sapien
caggagaacacggccgcagagtgac

SEQ ID NO: 2550347 - DNA, 25 bp, Homo sapien
cgatggagtaccaggagaacacggc

SEQ ID NO: 2550348 - DNA, 25 bp, Homo sapien
gccaccggatgtggtacttgtctga

SEQ ID NO: 2550349 - DNA, 25 bp, Homo sapien
tgtggtacttgtctgatttgttggg

SEQ ID NO: 2550350 - DNA, 25 bp, Homo sapien
accggatgtggtacttgtctgattt

SEQ ID NO: 2550351 - DNA, 25 bp, Homo sapien
cggatgtggtacttgtctgatttgt

SEQ ID NO: 2550352 - DNA, 25 bp, Homo sapien
gaaggccaggttgtatttctgcatc

SEQ ID NO: 2550353 - DNA, 25 bp, Homo sapien
ctggaaggccaggttgtatttctgc

SEQ ID NO: 2550354 - DNA, 25 bp, Homo sapien
cagcatctggctgacggtccggtta

SEQ ID NO: 2550355 - DNA, 25 bp, Homo sapien
gctgacggtccggttatcctggttg

SEQ ID NO: 2550356 - DNA, 25 bp, Homo sapien
cggcagcagggctgcccacgggtca

SEQ ID NO: 2550357 - DNA, 25 bp, Homo sapien
gtgggcggcagcagggctgcccacg

SEQ ID NO: 2550358 - DNA, 25 bp, Homo sapien
gcagggctgcccacgggtcacctcc

SEQ ID NO: 2550359 - DNA, 25 bp, Homo sapien
gcccacgggtcacctccctcaccag

SEQ ID NO: 2550360 - DNA, 25 bp, Homo sapien
ctcttcgtcactcgctatgacctcg

SEQ ID NO: 2550361 - DNA, 25 bp, Homo sapien
ttcgtcactcgctatgacctcgctg

SEQ ID NO: 2550362 - DNA, 25 bp, Homo sapien
tgctcttcgtcactcgctatgacct

SEQ ID NO: 2550363 - DNA, 25 bp, Homo sapien
tgtgctcttcgtcactcgctatgac

SEQ ID NO: 2550364 - DNA, 25 bp, Homo sapien
aggtcgcccacactttcaggtctct

SEQ ID NO: 2550365 - DNA, 25 bp, Homo sapien
gaaacaggccaccttggaaggcgtc

SEQ ID NO: 2550366 - DNA, 25 bp, Homo sapien
cctgatgactgaggagcctggtagc

SEQ ID NO: 2550367 - DNA, 25 bp, Homo sapien
aggtctcttgcaccagaaggtggca

SEQ ID NO: 2550368 - DNA, 25 bp, Homo sapien
ctgagcctgtcctcggcttctccac

SEQ ID NO: 2550369 - DNA, 25 bp, Homo sapien
ggccggcactggtccagggtacgtg

SEQ ID NO: 2550370 - DNA, 25 bp, Homo sapien
ccggcactggtccagggtacgtgca

SEQ ID NO: 2550371 - DNA, 25 bp, Homo sapien
cagggccggcactggtccagggtac

SEQ ID NO: 2550372 - DNA, 25 bp, Homo sapien
gaggatgtgtgcatagtgggcctgg

SEQ ID NO: 2550373 - DNA, 25 bp, Homo sapien
cttggaggggaggatgtgtgcatag

SEQ ID NO: 2550374 - DNA, 25 bp, Homo sapien
ggatgtgtgcatagtgggcctggag

SEQ ID NO: 2550375 - DNA, 25 bp, Homo sapien
gggaggatgtgtgcatagtgggcct

SEQ ID NO: 2550376 - DNA, 25 bp, Homo sapien
ccagggcagcgtcaagagtctgagc

SEQ ID NO: 2550377 - DNA, 25 bp, Homo sapien
gccagggcagcgtcaagagtctgag

SEQ ID NO: 2550378 - DNA, 25 bp, Homo sapien
agaagatcatgcagtcatcagtccc

SEQ ID NO: 2550379 - DNA, 25 bp, Homo sapien
gaagatcatgcagtcatcagtccca

SEQ ID NO: 2550380 - DNA, 25 bp, Homo sapien
ggtgtccccttccaaccaggctgtc

SEQ ID NO: 2550381 - DNA, 25 bp, Homo sapien
tagttatggagacccccaggtgttg

SEQ ID NO: 2550382 - DNA, 25 bp, Homo sapien
ctgcctgtggtagttatggagaccc

SEQ ID NO: 2550383 - DNA, 25 bp, Homo sapien
caaccaggctgtcaaggccccaact

SEQ ID NO: 2550384 - DNA, 25 bp, Homo sapien
aaggtcccacaattcatggtatgta

SEQ ID NO: 2550385 - DNA, 25 bp, Homo sapien
cggaggagggaaactgcccagcttt

SEQ ID NO: 2550386 - DNA, 25 bp, Homo sapien
cccacaattcatggtatgtacaggg

SEQ ID NO: 2550387 - DNA, 25 bp, Homo sapien
gaaactgcccagctttcccccggca

SEQ ID NO: 2550388 - DNA, 25 bp, Homo sapien
gtagccccagcaggagctattttcc

SEQ ID NO: 2550389 - DNA, 25 bp, Homo sapien
ccctagtccacaggcgcctccctgt

SEQ ID NO: 2550390 - DNA, 25 bp, Homo sapien
ctccatcttgtagccccagcaggag

SEQ ID NO: 2550391 - DNA, 25 bp, Homo sapien
caggagctattttccgaaaagtgaa

SEQ ID NO: 2550392 - DNA, 25 bp, Homo sapien
aatgaaaaatatcgcccacgatcaa

SEQ ID NO: 2550393 - DNA, 25 bp, Homo sapien
tatcgcccacgatcaacgtgttctg

SEQ ID NO: 2550394 - DNA, 25 bp, Homo sapien
gcacaatgaaaaatatcgcccacga

SEQ ID NO: 2550395 - DNA, 25 bp, Homo sapien
atatcgcccacgatcaacgtgttct

SEQ ID NO: 2550396 - DNA, 25 bp, Homo sapien
ggtgcaaaacttcctcgagtcagcc

SEQ ID NO: 2550397 - DNA, 25 bp, Homo sapien
gcaaaacttcctcgagtcagcctct

SEQ ID NO: 2550398 - DNA, 25 bp, Homo sapien
tgcaaaacttcctcgagtcagcctc

SEQ ID NO: 2550399 - DNA, 25 bp, Homo sapien
caggtgcaaaacttcctcgagtcag

SEQ ID NO: 2550400 - DNA, 25 bp, Homo sapien
tcaacatgtagaatgctttcctaat

SEQ ID NO: 2550401 - DNA, 25 bp, Homo sapien
ctgcattttccttacttttattgtc

SEQ ID NO: 2550402 - DNA, 25 bp, Homo sapien
gtgttctgcattttccttactttta

SEQ ID NO: 2550403 - DNA, 25 bp, Homo sapien
ctattcaacatgtagaatgctttcc

SEQ ID NO: 2550404 - DNA, 25 bp, Homo sapien
tcatgtcacgacatactgccgctgc

SEQ ID NO: 2550405 - DNA, 25 bp, Homo sapien
tgtcatgtcacgacatactgccgct

SEQ ID NO: 2550406 - DNA, 25 bp, Homo sapien
gtatgtcatgtcacgacatactgcc

SEQ ID NO: 2550407 - DNA, 25 bp, Homo sapien
gtcacgacatactgccgctgcacga

SEQ ID NO: 2550408 - DNA, 25 bp, Homo sapien
attcccactttgctgacataagtta

SEQ ID NO: 2550409 - DNA, 25 bp, Homo sapien
cacacactgtacaatattcccactt

SEQ ID NO: 2550410 - DNA, 25 bp, Homo sapien
aacacacactgtacaatattcccac

SEQ ID NO: 2550411 - DNA, 25 bp, Homo sapien
aatattcccactttgctgacataag

SEQ ID NO: 2550412 - DNA, 25 bp, Homo sapien
ggactgtaggtatacatgatgatac

SEQ ID NO: 2550413 - DNA, 25 bp, Homo sapien
tgggactgtaggtatacatgatgat

SEQ ID NO: 2550414 - DNA, 25 bp, Homo sapien
ctctccaggccctgaacattctcag

SEQ ID NO: 2550415 - DNA, 25 bp, Homo sapien
gactgtaggtatacatgatgatact

SEQ ID NO: 2550416 - DNA, 25 bp, Homo sapien
gatgctggtgatttccagtaggtga

SEQ ID NO: 2550417 - DNA, 25 bp, Homo sapien
tggtgatttccagtaggtgacctca

SEQ ID NO: 2550418 - DNA, 25 bp, Homo sapien
tgatttccagtaggtgacctcacag

SEQ ID NO: 2550419 - DNA, 25 bp, Homo sapien
tccagtaggtgacctcacagtgact

SEQ ID NO: 2550420 - DNA, 25 bp, Homo sapien
taataactggtgtggtgttgtgcac

SEQ ID NO: 2550421 - DNA, 25 bp, Homo sapien
tggtgttgtgcacctagagttccaa

SEQ ID NO: 2550422 - DNA, 25 bp, Homo sapien
ctgagatgagaggataccttgagct

SEQ ID NO: 2550423 - DNA, 25 bp, Homo sapien
tagagttccaactactagggaagct

SEQ ID NO: 2550424 - DNA, 25 bp, Homo sapien
aggctggccacaaattcctggtctc

SEQ ID NO: 2550425 - DNA, 25 bp, Homo sapien
acatctggctagtttcttttatttt

SEQ ID NO: 2550426 - DNA, 25 bp, Homo sapien
accacatctggctagtttcttttat

SEQ ID NO: 2550427 - DNA, 25 bp, Homo sapien
atagatggggtcttgttgtgttggc

SEQ ID NO: 2550428 - DNA, 25 bp, Homo sapien
ggtgaaggagttttcctgttgctcc

SEQ ID NO: 2550429 - DNA, 25 bp, Homo sapien
ttcctgattgcttcatcagcgagga

SEQ ID NO: 2550430 - DNA, 25 bp, Homo sapien
ctgattgcttcatcagcgaggagct

SEQ ID NO: 2550431 - DNA, 25 bp, Homo sapien
ttagctcaactcgagccatttcctg

SEQ ID NO: 2550432 - DNA, 25 bp, Homo sapien
tgctaagagcaagactgcatttctt

SEQ ID NO: 2550433 - DNA, 25 bp, Homo sapien
tgagctacacgttgcagtgcacacc

SEQ ID NO: 2550434 - DNA, 25 bp, Homo sapien
ctttgctaagagcaagactgcattt

SEQ ID NO: 2550435 - DNA, 25 bp, Homo sapien
aaaaaatgagctacacgttgcagtg

SEQ ID NO: 2550436 - DNA, 25 bp, Homo sapien
gtggaccccgagaggtctgtttctc

SEQ ID NO: 2550437 - DNA, 25 bp, Homo sapien
ggacgatatgccttgtggagctcca

SEQ ID NO: 2550438 - DNA, 25 bp, Homo sapien
cccagaggggtatggattctgcatt

SEQ ID NO: 2550439 - DNA, 25 bp, Homo sapien
gactgggtcttggtggaccccgaga

SEQ ID NO: 2550440 - DNA, 25 bp, Homo sapien
ttcccgcctcgactcctgatatcaa

SEQ ID NO: 2550441 - DNA, 25 bp, Homo sapien
gaaggctttctactaatggaattcc

SEQ ID NO: 2550442 - DNA, 25 bp, Homo sapien
aatggcgcaaccttgctggtcactg

SEQ ID NO: 2550443 - DNA, 25 bp, Homo sapien
ttctactaatggaattcctggcctt

SEQ ID NO: 2550444 - DNA, 25 bp, Homo sapien
tgatcccatacccttttttccagtc

SEQ ID NO: 2550445 - DNA, 25 bp, Homo sapien
tatagctcgagctgtaaaagccaaa

SEQ ID NO: 2550446 - DNA, 25 bp, Homo sapien
ccaaaggtccggtgatgatcccata

SEQ ID NO: 2550447 - DNA, 25 bp, Homo sapien
tttgttcttatagctcgagctgtaa

SEQ ID NO: 2550448 - DNA, 25 bp, Homo sapien
tgagtaaaaagctcctgtccacggc

SEQ ID NO: 2550449 - DNA, 25 bp, Homo sapien
attggtgagtaaaaagctcctgtcc

SEQ ID NO: 2550450 - DNA, 25 bp, Homo sapien
ggtgagtaaaaagctcctgtccacg

SEQ ID NO: 2550451 - DNA, 25 bp, Homo sapien
gagtaaaaagctcctgtccacggcc

SEQ ID NO: 2550452 - DNA, 25 bp, Homo sapien
agatgcagaacagggtgagggccac

SEQ ID NO: 2550453 - DNA, 25 bp, Homo sapien
cagatgcagaacagggtgagggcca

SEQ ID NO: 2550454 - DNA, 25 bp, Homo sapien
tgctgccttggcatcttcgttgaca

SEQ ID NO: 2550455 - DNA, 25 bp, Homo sapien
gaccagctccgccttgtgcattggc

SEQ ID NO: 2550456 - DNA, 25 bp, Homo sapien
gggtccccaccagtagtgtttgcag

SEQ ID NO: 2550457 - DNA, 25 bp, Homo sapien
cgttgacattgtacttgcccaaggt

SEQ ID NO: 2550458 - DNA, 25 bp, Homo sapien
ctgagctggctgatgcgggtgcaat

SEQ ID NO: 2550459 - DNA, 25 bp, Homo sapien
tggggaggaggtctatggagtctgg

SEQ ID NO: 2550460 - DNA, 25 bp, Homo sapien
cacctgagctggctgatgcgggtgc

SEQ ID NO: 2550461 - DNA, 25 bp, Homo sapien
gagctggctgatgcgggtgcaatgt

SEQ ID NO: 2550462 - DNA, 25 bp, Homo sapien
aggcaccgtcctgactgcccagcac

SEQ ID NO: 2550463 - DNA, 25 bp, Homo sapien
taggcaccgtcctgactgcccagca

SEQ ID NO: 2550464 - DNA, 25 bp, Homo sapien
ttaggcaccgtcctgactgcccagc

SEQ ID NO: 2550465 - DNA, 25 bp, Homo sapien
gcgttgtgtccacggctgcttgtgt

SEQ ID NO: 2550466 - DNA, 25 bp, Homo sapien
tgtggcaggtcctatggctgagcca

SEQ ID NO: 2550467 - DNA, 25 bp, Homo sapien
tatggctgagccatgtctgaggtcc

SEQ ID NO: 2550468 - DNA, 25 bp, Homo sapien
taaacggtttgaggatacatttcca

SEQ ID NO: 2550469 - DNA, 25 bp, Homo sapien
ccccatgtcctcctcaccaggtccc

SEQ ID NO: 2550470 - DNA, 25 bp, Homo sapien
ccatgtcctcctcaccaggtcccct

SEQ ID NO: 2550471 - DNA, 25 bp, Homo sapien
atgtcctcctcaccaggtcccctca

SEQ ID NO: 2550472 - DNA, 25 bp, Homo sapien
ctcaccaaggtcccccccatgtcct

SEQ ID NO: 2550473 - DNA, 25 bp, Homo sapien
ttcccgcaaaaggagcatggagaga

SEQ ID NO: 2550474 - DNA, 25 bp, Homo sapien
cactgttctcggctctaagggagcc

SEQ ID NO: 2550475 - DNA, 25 bp, Homo sapien
ctgggccggtttctcctacttggag

SEQ ID NO: 2550476 - DNA, 25 bp, Homo sapien
actcagagcagcctagagacccatc

SEQ ID NO: 2550477 - DNA, 25 bp, Homo sapien
tgcggaacctgctgcagcatcagtg

SEQ ID NO: 2550478 - DNA, 25 bp, Homo sapien
taacccagagttgctgtccatgctg

SEQ ID NO: 2550479 - DNA, 25 bp, Homo sapien
ctgtccgtaagtgagagggttacca

SEQ ID NO: 2550480 - DNA, 25 bp, Homo sapien
cactgaagggtaagacctgcggaac

SEQ ID NO: 2550481 - DNA, 25 bp, Homo sapien
tggaatcaggtacttgggtccaggg

SEQ ID NO: 2550482 - DNA, 25 bp, Homo sapien
gttgttggtggaatcaggtacttgg

SEQ ID NO: 2550483 - DNA, 25 bp, Homo sapien
tgttgttggtggaatcaggtacttg

SEQ ID NO: 2550484 - DNA, 25 bp, Homo sapien
ctgttgttggtggaatcaggtactt

SEQ ID NO: 2550485 - DNA, 25 bp, Homo sapien
cccacggaagctgtaggccggtgca

SEQ ID NO: 2550486 - DNA, 25 bp, Homo sapien
ttggtgggcgtgtgcttcatgaagc

SEQ ID NO: 2550487 - DNA, 25 bp, Homo sapien
gagcagttctctgccaggagcatgg

SEQ ID NO: 2550488 - DNA, 25 bp, Homo sapien
gtcttggtttggtagcgccccagga

SEQ ID NO: 2550489 - DNA, 25 bp, Homo sapien
ggtgtccaggatggaaatgctgact

SEQ ID NO: 2550490 - DNA, 25 bp, Homo sapien
cacaggtggtgaccaagtcgggtca

SEQ ID NO: 2550491 - DNA, 25 bp, Homo sapien
caacacaggtggtgaccaagtcggg

SEQ ID NO: 2550492 - DNA, 25 bp, Homo sapien
cccaacattctaggcgtggggcctc

SEQ ID NO: 2550493 - DNA, 25 bp, Homo sapien
ggagtggctgggtgctgagtcgaac

SEQ ID NO: 2550494 - DNA, 25 bp, Homo sapien
gaatgcctttgtccgggcagagatg

SEQ ID NO: 2550495 - DNA, 25 bp, Homo sapien
cactcggaatgcctttgtccgggca

SEQ ID NO: 2550496 - DNA, 25 bp, Homo sapien
gagtcgaacacgtacttggtggatt

SEQ ID NO: 2550497 - DNA, 25 bp, Homo sapien
tttggctgaggatggttggggctgc

SEQ ID NO: 2550498 - DNA, 25 bp, Homo sapien
ccaggatccccaggtccatttggct

SEQ ID NO: 2550499 - DNA, 25 bp, Homo sapien
ggatccccaggtccatttggctgag

SEQ ID NO: 2550500 - DNA, 25 bp, Homo sapien
gctgaggatggttggggctgctgcg

SEQ ID NO: 2550501 - DNA, 25 bp, Homo sapien
tcaggccggaacagggcccactgct

SEQ ID NO: 2550502 - DNA, 25 bp, Homo sapien
aactctggagatcagccgtcgggct

SEQ ID NO: 2550503 - DNA, 25 bp, Homo sapien
ggtggacgtggagcctcaggccgga

SEQ ID NO: 2550504 - DNA, 25 bp, Homo sapien
ctctggagatcagccgtcgggctgc

SEQ ID NO: 2550505 - DNA, 25 bp, Homo sapien
atgggcagcatgtacgcagcggggc

SEQ ID NO: 2550506 - DNA, 25 bp, Homo sapien
catgggcagcatgtacgcagcgggg

SEQ ID NO: 2550507 - DNA, 25 bp, Homo sapien
gctgaagccgcccagcttgctgcgg

SEQ ID NO: 2550508 - DNA, 25 bp, Homo sapien
tgccgacggtattgggccccattac

SEQ ID NO: 2550509 - DNA, 25 bp, Homo sapien
gctgggaggccttgccgacggtatt

SEQ ID NO: 2550510 - DNA, 25 bp, Homo sapien
cttgtgtaggtcgtcgctgaagccg

SEQ ID NO: 2550511 - DNA, 25 bp, Homo sapien
tggttgggggtgattctctgttctc

SEQ ID NO: 2550512 - DNA, 25 bp, Homo sapien
ccccaaatagctcatggtttatttt

SEQ ID NO: 2550513 - DNA, 25 bp, Homo sapien
ttgtcctcagcacggtccatgctgg

SEQ ID NO: 2550514 - DNA, 25 bp, Homo sapien
tccatgctaccctatctaagattgc

SEQ ID NO: 2550515 - DNA, 25 bp, Homo sapien
actgcagtgtaaccccagcacgtgg

SEQ ID NO: 2550516 - DNA, 25 bp, Homo sapien
ggaacatcgctgagcgtgtgtgaga

SEQ ID NO: 2550517 - DNA, 25 bp, Homo sapien
caaaatcaacatggacgagggctgt

SEQ ID NO: 2550518 - DNA, 25 bp, Homo sapien
cagtgtgtgccagtcctgggaacat

SEQ ID NO: 2550519 - DNA, 25 bp, Homo sapien
tgttgggtgccatgatgctgcttcc

SEQ ID NO: 2550520 - DNA, 25 bp, Homo sapien
gagatcacaccccactgcttgtggg

SEQ ID NO: 2550521 - DNA, 25 bp, Homo sapien
agttggtgcccgtgcatcaaggtcc

SEQ ID NO: 2550522 - DNA, 25 bp, Homo sapien
ttctgtcttctgtcacactgtggag

SEQ ID NO: 2550523 - DNA, 25 bp, Homo sapien
acagggtcagctacaagttggtgcc

SEQ ID NO: 2550524 - DNA, 25 bp, Homo sapien
ggaggctcagaccaactcggcctac

SEQ ID NO: 2550525 - DNA, 25 bp, Homo sapien
aggaggctcagaccaactcggccta

SEQ ID NO: 2550526 - DNA, 25 bp, Homo sapien
tgtgggcgcctggtcctggcttgag

SEQ ID NO: 2550527 - DNA, 25 bp, Homo sapien
cagccatggtgtactgcggagcctt

SEQ ID NO: 2550528 - DNA, 25 bp, Homo sapien
tgaacttggtcacccgcacatcagt

SEQ ID NO: 2550529 - DNA, 25 bp, Homo sapien
gcacatcagtttggcggtaggctgc

SEQ ID NO: 2550530 - DNA, 25 bp, Homo sapien
ccctctgagctgtgctcttcctgga

SEQ ID NO: 2550531 - DNA, 25 bp, Homo sapien
cctctgagctgtgctcttcctggac

SEQ ID NO: 2550532 - DNA, 25 bp, Homo sapien
cctgaagggttacctgtgggcctag

SEQ ID NO: 2550533 - DNA, 25 bp, Homo sapien
cacagagcactcagcagtagtagct

SEQ ID NO: 2550534 - DNA, 25 bp, Homo sapien
tgctggaaatgtacagggtcctcag

SEQ ID NO: 2550535 - DNA, 25 bp, Homo sapien
aaggtggccagaagctatgctccca

SEQ ID NO: 2550536 - DNA, 25 bp, Homo sapien
cagagtgtttgatgccgaaggtgac

SEQ ID NO: 2550537 - DNA, 25 bp, Homo sapien
gtttgatgccgaaggtgacaactgg

SEQ ID NO: 2550538 - DNA, 25 bp, Homo sapien
tccacatcaaccagcaggggagtca

SEQ ID NO: 2550539 - DNA, 25 bp, Homo sapien
gggagtcatgtaatcagagtgtttg

SEQ ID NO: 2550540 - DNA, 25 bp, Homo sapien
agtaactgattacaattgcccaaac

SEQ ID NO: 2550541 - DNA, 25 bp, Homo sapien
gcccggcggatcttgtgtagatgcc

SEQ ID NO: 2550542 - DNA, 25 bp, Homo sapien
tctgtggcccggcggatcttgtgta

SEQ ID NO: 2550543 - DNA, 25 bp, Homo sapien
acaattgcccaaacaagcgtgctct

SEQ ID NO: 2550544 - DNA, 25 bp, Homo sapien
gacaaactgctaggctgtatcccat

SEQ ID NO: 2550545 - DNA, 25 bp, Homo sapien
tacacctgaccctgtaaatgagtgg

SEQ ID NO: 2550546 - DNA, 25 bp, Homo sapien
gcatctcggagtggctttcgctgga

SEQ ID NO: 2550547 - DNA, 25 bp, Homo sapien
tgtgccagaccagagtttcctgagg

SEQ ID NO: 2550548 - DNA, 25 bp, Homo sapien
gcaaggttgactcatctgcctccat

SEQ ID NO: 2550549 - DNA, 25 bp, Homo sapien
gctgttgccctgaaacctagctggg

SEQ ID NO: 2550550 - DNA, 25 bp, Homo sapien
gttcctccggcaccagtgtccttgg

SEQ ID NO: 2550551 - DNA, 25 bp, Homo sapien
gacctggaccctccattgtacctgg

SEQ ID NO: 2550552 - DNA, 25 bp, Homo sapien
tcttctaacaagtgcccgggagcaa

SEQ ID NO: 2550553 - DNA, 25 bp, Homo sapien
tctgtacggctgtattcgacgcggc

SEQ ID NO: 2550554 - DNA, 25 bp, Homo sapien
gattcagtgacgcacaggaagcgcg

SEQ ID NO: 2550555 - DNA, 25 bp, Homo sapien
tgtttttgctgacaccggacggtgg

SEQ ID NO: 2550556 - DNA, 25 bp, Homo sapien
ctcctggttgtatgaccgcagagct

SEQ ID NO: 2550557 - DNA, 25 bp, Homo sapien
cgcagagcttccataatcacatcct

SEQ ID NO: 2550558 - DNA, 25 bp, Homo sapien
tcacccgtctccacggcttctgcaa

SEQ ID NO: 2550559 - DNA, 25 bp, Homo sapien
gttgtatgaccgcagagcttccata

SEQ ID NO: 2550560 - DNA, 25 bp, Homo sapien
atccctacacgcctgccacccaacg

SEQ ID NO: 2550561 - DNA, 25 bp, Homo sapien
gctcagaacggatggcagggtcggc

SEQ ID NO: 2550562 - DNA, 25 bp, Homo sapien
agggtcggcactcgcccccatccct

SEQ ID NO: 2550563 - DNA, 25 bp, Homo sapien
acacgcctgccacccaacgggtgca

SEQ ID NO: 2550564 - DNA, 25 bp, Homo sapien
cacagaggggtaggatccgcgtccg

SEQ ID NO: 2550565 - DNA, 25 bp, Homo sapien
tggcctctaactcaggcagcagcca

SEQ ID NO: 2550566 - DNA, 25 bp, Homo sapien
ggcctattggcctctaactcaggca

SEQ ID NO: 2550567 - DNA, 25 bp, Homo sapien
gatgcgggcggcctattggcctcta

SEQ ID NO: 2550568 - DNA, 25 bp, Homo sapien
cttccggtcctcctgttgggcatca

SEQ ID NO: 2550569 - DNA, 25 bp, Homo sapien
catcaaacgtgaagctctgggagtg

SEQ ID NO: 2550570 - DNA, 25 bp, Homo sapien
cctgttgggcatcatcaaacgtgaa

SEQ ID NO: 2550571 - DNA, 25 bp, Homo sapien
tgggcatcatcaaacgtgaagctct

SEQ ID NO: 2550572 - DNA, 25 bp, Homo sapien
tgcccctttaccccttgggccagca

SEQ ID NO: 2550573 - DNA, 25 bp, Homo sapien
agaagagcggctccaccaggccctt

SEQ ID NO: 2550574 - DNA, 25 bp, Homo sapien
ggcagggagaagagcggctccacca

SEQ ID NO: 2550575 - DNA, 25 bp, Homo sapien
ggagaagagcggctccaccaggccc

SEQ ID NO: 2550576 - DNA, 25 bp, Homo sapien
gacggacccctcagagacagagatg

SEQ ID NO: 2550577 - DNA, 25 bp, Homo sapien
gtctgcggactctgggacggacccc

SEQ ID NO: 2550578 - DNA, 25 bp, Homo sapien
tcccgggacaggattcggacactct

SEQ ID NO: 2550579 - DNA, 25 bp, Homo sapien
tgtcagcatagcaggctagtgcctg

SEQ ID NO: 2550580 - DNA, 25 bp, Homo sapien
catggcccgctcagtctcttgggaa

SEQ ID NO: 2550581 - DNA, 25 bp, Homo sapien
ttgcacaggcacttgagggactcca

SEQ ID NO: 2550582 - DNA, 25 bp, Homo sapien
gtgtgtcagttagcaggcgcactcc

SEQ ID NO: 2550583 - DNA, 25 bp, Homo sapien
gaggagccgcaagtcaaagaactgg

SEQ ID NO: 2550584 - DNA, 25 bp, Homo sapien
gtcttcctaggtgactctgggtagt

SEQ ID NO: 2550585 - DNA, 25 bp, Homo sapien
tcttcctaggtgactctgggtagtg

SEQ ID NO: 2550586 - DNA, 25 bp, Homo sapien
ggtcttcctaggtgactctgggtag

SEQ ID NO: 2550587 - DNA, 25 bp, Homo sapien
cgatcatcacacagtgccggagaag

SEQ ID NO: 2550588 - DNA, 25 bp, Homo sapien
tccccaggtgtcggtaaagggcagc

SEQ ID NO: 2550589 - DNA, 25 bp, Homo sapien
tcctctgtgcggtctccagcagtag

SEQ ID NO: 2550590 - DNA, 25 bp, Homo sapien
cagcagtagcgatcatcacacagtg

SEQ ID NO: 2550591 - DNA, 25 bp, Homo sapien
gaatcacatccatattcactcccat

SEQ ID NO: 2550592 - DNA, 25 bp, Homo sapien
gatgaggagggcacgaatcacatcc

SEQ ID NO: 2550593 - DNA, 25 bp, Homo sapien
acttgaggggcaagttccccaggag

SEQ ID NO: 2550594 - DNA, 25 bp, Homo sapien
gaactccgtggagtctccatgtggc

SEQ ID NO: 2550595 - DNA, 25 bp, Homo sapien
aacatacacaacagctggtcctggc

SEQ ID NO: 2550596 - DNA, 25 bp, Homo sapien
cagaggtactcgtaagctttgtgac

SEQ ID NO: 2550597 - DNA, 25 bp, Homo sapien
tgcagttagtcagcagaaggccaag

SEQ ID NO: 2550598 - DNA, 25 bp, Homo sapien
aaaggacagggatagagcgtaactc

SEQ ID NO: 2550599 - DNA, 25 bp, Homo sapien
gtcagcacgctcagcacgggagcta

SEQ ID NO: 2550600 - DNA, 25 bp, Homo sapien
gcacgggagctacactctccttcag

SEQ ID NO: 2550601 - DNA, 25 bp, Homo sapien
gcacattcagtcagcacgctcagca

SEQ ID NO: 2550602 - DNA, 25 bp, Homo sapien
ctgggcggtgcatccgggcacattc

SEQ ID NO: 2550603 - DNA, 25 bp, Homo sapien
tagagcagccaagggtctgtgatca

SEQ ID NO: 2550604 - DNA, 25 bp, Homo sapien
ctaagcttgggcttagagcagccaa

SEQ ID NO: 2550605 - DNA, 25 bp, Homo sapien
gtgatcagggccgaaaccacatccc

SEQ ID NO: 2550606 - DNA, 25 bp, Homo sapien
tctgtgatcagggccgaaaccacat

SEQ ID NO: 2550607 - DNA, 25 bp, Homo sapien
gtgtcctcacatcccgcagaggggg

SEQ ID NO: 2550608 - DNA, 25 bp, Homo sapien
tgtcatgaggcggacaagcttgttc

SEQ ID NO: 2550609 - DNA, 25 bp, Homo sapien
ctcagagcacaggacaaacaagaac

SEQ ID NO: 2550610 - DNA, 25 bp, Homo sapien
gacaagcttgttccgcagcatctcc

SEQ ID NO: 2550611 - DNA, 25 bp, Homo sapien
ctgggacctgggtctccataactca

SEQ ID NO: 2550612 - DNA, 25 bp, Homo sapien
gggcaaggcagaggtcagtgtgcaa

SEQ ID NO: 2550613 - DNA, 25 bp, Homo sapien
cagtgtgcaagcctggctgaggtgg

SEQ ID NO: 2550614 - DNA, 25 bp, Homo sapien
tgggacctgggtctccataactcac

SEQ ID NO: 2550615 - DNA, 25 bp, Homo sapien
tagcctgtgtacttgatgaatcggg

SEQ ID NO: 2550616 - DNA, 25 bp, Homo sapien
catagcctgtgtacttgatgaatcg

SEQ ID NO: 2550617 - DNA, 25 bp, Homo sapien
cctcgggccggcctcctgccatgag

SEQ ID NO: 2550618 - DNA, 25 bp, Homo sapien
gggccggcctcctgccatgaggccc

SEQ ID NO: 2550619 - DNA, 25 bp, Homo sapien
caccctcccggtcacagggtttatg

SEQ ID NO: 2550620 - DNA, 25 bp, Homo sapien
tgtcatgccctccatagggttaggc

SEQ ID NO: 2550621 - DNA, 25 bp, Homo sapien
tcaaacatggtcaccagcttcatgg

SEQ ID NO: 2550622 - DNA, 25 bp, Homo sapien
ctccatagggttaggcggcttctcc

SEQ ID NO: 2550623 - DNA, 25 bp, Homo sapien
catccccattggctggatgactctg

SEQ ID NO: 2550624 - DNA, 25 bp, Homo sapien
ggactcatccccattggctggatga

SEQ ID NO: 2550625 - DNA, 25 bp, Homo sapien
tccccattggctggatgactctgtt

SEQ ID NO: 2550626 - DNA, 25 bp, Homo sapien
ctgcagggacgtaagatgaccccgg

SEQ ID NO: 2550627 - DNA, 25 bp, Homo sapien
gggtccgagtcagggtccgaggaga

SEQ ID NO: 2550628 - DNA, 25 bp, Homo sapien
gtccgagtcagggtccgaggagagc

SEQ ID NO: 2550629 - DNA, 25 bp, Homo sapien
tccgagtcagggtccgaggagagct

SEQ ID NO: 2550630 - DNA, 25 bp, Homo sapien
cgagtcagggtccgaggagagctgc

SEQ ID NO: 2550631 - DNA, 25 bp, Homo sapien
agtgggatgtggcttccccaggttg

SEQ ID NO: 2550632 - DNA, 25 bp, Homo sapien
caggttgcaaccccaaggaagtctc

SEQ ID NO: 2550633 - DNA, 25 bp, Homo sapien
atgtggcttccccaggttgcaaccc

SEQ ID NO: 2550634 - DNA, 25 bp, Homo sapien
tggaagcagcaccagtcctgatggg

SEQ ID NO: 2550635 - DNA, 25 bp, Homo sapien
tctccctgggaagtgcagcacatac

SEQ ID NO: 2550636 - DNA, 25 bp, Homo sapien
acagagcatacataccttggaaggg

SEQ ID NO: 2550637 - DNA, 25 bp, Homo sapien
gagcctgagttctagcacaagaaga

SEQ ID NO: 2550638 - DNA, 25 bp, Homo sapien
caagaagaccgttgcagtccagaga

SEQ ID NO: 2550639 - DNA, 25 bp, Homo sapien
gagaatgtctaagaggcctccagcc

SEQ ID NO: 2550640 - DNA, 25 bp, Homo sapien
ttgccaaaaccagcgagaactcggg

SEQ ID NO: 2550641 - DNA, 25 bp, Homo sapien
gaactcgggcactgtggatactaca

SEQ ID NO: 2550642 - DNA, 25 bp, Homo sapien
tactacagtgggcagctgaacgagg

SEQ ID NO: 2550643 - DNA, 25 bp, Homo sapien
tggcccctttatttgataatttaca

SEQ ID NO: 2550644 - DNA, 25 bp, Homo sapien
cccctttatttgataatttacacat

SEQ ID NO: 2550645 - DNA, 25 bp, Homo sapien
ctttatttgataatttacacataca

SEQ ID NO: 2550646 - DNA, 25 bp, Homo sapien
gcccctttatttgataatttacaca

SEQ ID NO: 2550647 - DNA, 25 bp, Homo sapien
tgagctgacggcaatagatttaatg

SEQ ID NO: 2550648 - DNA, 25 bp, Homo sapien
ggtcctgtgactttgcgccttaata

SEQ ID NO: 2550649 - DNA, 25 bp, Homo sapien
ttggtgacctaggaaaactgttgaa

SEQ ID NO: 2550650 - DNA, 25 bp, Homo sapien
tgaaccttgcctaccctgggctgag

SEQ ID NO: 2550651 - DNA, 25 bp, Homo sapien
agccctgatggctcaccctgtcagg

SEQ ID NO: 2550652 - DNA, 25 bp, Homo sapien
gcccagccctgatggctcaccctgt

SEQ ID NO: 2550653 - DNA, 25 bp, Homo sapien
cactgaactgctacttctgcacagg

SEQ ID NO: 2550654 - DNA, 25 bp, Homo sapien
ttctcctggggctgtacccaggccc

SEQ ID NO: 2550655 - DNA, 25 bp, Homo sapien
gacagggaaggcattactcacttaa

SEQ ID NO: 2550656 - DNA, 25 bp, Homo sapien
cagggaaggcattactcacttaaaa

SEQ ID NO: 2550657 - DNA, 25 bp, Homo sapien
ggcttcctctagtgacactgttaga

SEQ ID NO: 2550658 - DNA, 25 bp, Homo sapien
gacactgttagagctaatctctgag

SEQ ID NO: 2550659 - DNA, 25 bp, Homo sapien
gtggcgtcccctctattggaacagt

SEQ ID NO: 2550660 - DNA, 25 bp, Homo sapien
tggatttattggagacggcccagct

SEQ ID NO: 2550661 - DNA, 25 bp, Homo sapien
tcctcaaagggactgcaggtgttga

SEQ ID NO: 2550662 - DNA, 25 bp, Homo sapien
acatgagttggaaagggaaccctgg

SEQ ID NO: 2550663 - DNA, 25 bp, Homo sapien
acggatatgaggtcccaactgagaa

SEQ ID NO: 2550664 - DNA, 25 bp, Homo sapien
gatatgaggtcccaactgagaaacc

SEQ ID NO: 2550665 - DNA, 25 bp, Homo sapien
atgaggtcccaactgagaaacccat

SEQ ID NO: 2550666 - DNA, 25 bp, Homo sapien
tatgaggtcccaactgagaaaccca

SEQ ID NO: 2550667 - DNA, 25 bp, Homo sapien
cttgctgcatgtggttgatttcccc

SEQ ID NO: 2550668 - DNA, 25 bp, Homo sapien
gacctccctggaggtttgtcagcag

SEQ ID NO: 2550669 - DNA, 25 bp, Homo sapien
tccaggctgacgtgatggcagacag

SEQ ID NO: 2550670 - DNA, 25 bp, Homo sapien
tctgcaccggcgttgtgaagcccga

SEQ ID NO: 2550671 - DNA, 25 bp, Homo sapien
tgaaaaccaggcttgaggacatcac

SEQ ID NO: 2550672 - DNA, 25 bp, Homo sapien
ttggccttgcgtgctcatctcggag

SEQ ID NO: 2550673 - DNA, 25 bp, Homo sapien
cccagaagttgtgctcttggccttg

SEQ ID NO: 2550674 - DNA, 25 bp, Homo sapien
gaggcggcagcaacacttcgctttg

SEQ ID NO: 2550675 - DNA, 25 bp, Homo sapien
gatcttcccagtagtgttttgcgag

SEQ ID NO: 2550676 - DNA, 25 bp, Homo sapien
tggtcgaacccgctacggactagct

SEQ ID NO: 2550677 - DNA, 25 bp, Homo sapien
tgcctgaccatagtaaaagcgctca

SEQ ID NO: 2550678 - DNA, 25 bp, Homo sapien
gtattaactatcaccgccatccggg

SEQ ID NO: 2550679 - DNA, 25 bp, Homo sapien
ggcacagaagaacaaccgggatgtc

SEQ ID NO: 2550680 - DNA, 25 bp, Homo sapien
gaagacccccggcacagaagaacaa

SEQ ID NO: 2550681 - DNA, 25 bp, Homo sapien
acaaccgggatgtcagcaccgcggg

SEQ ID NO: 2550682 - DNA, 25 bp, Homo sapien
caccgcggggatggctgccggaaat

SEQ ID NO: 2550683 - DNA, 25 bp, Homo sapien
agagctcctccagacggtgccacac

SEQ ID NO: 2550684 - DNA, 25 bp, Homo sapien
cggagttctggctctgctgtaggaa

SEQ ID NO: 2550685 - DNA, 25 bp, Homo sapien
acggtgccacacagcgggctgcccg

SEQ ID NO: 2550686 - DNA, 25 bp, Homo sapien
tgtaggaagcccggtacgtccttca

SEQ ID NO: 2550687 - DNA, 25 bp, Homo sapien
gcaaagcacggatcctgcacaaaat

SEQ ID NO: 2550688 - DNA, 25 bp, Homo sapien
aaatcaagcacctgaagtgtcagct

SEQ ID NO: 2550689 - DNA, 25 bp, Homo sapien
ctccttgggcaaagcacggatcctg

SEQ ID NO: 2550690 - DNA, 25 bp, Homo sapien
acctgaagtgtcagctgatgccaca

SEQ ID NO: 2550691 - DNA, 25 bp, Homo sapien
tctctgtccagagtgcaaggccgaa

SEQ ID NO: 2550692 - DNA, 25 bp, Homo sapien
tgtagaagtggcaatactgagtttc

SEQ ID NO: 2550693 - DNA, 25 bp, Homo sapien
ctgagggacacagactaggaagcac

SEQ ID NO: 2550694 - DNA, 25 bp, Homo sapien
gacaatacagtgagtttaagagcaa

SEQ ID NO: 2550695 - DNA, 25 bp, Homo sapien
tcaaattcactgataaagttttcat

SEQ ID NO: 2550696 - DNA, 25 bp, Homo sapien
ctgtgttcaaattcactgataaagt

SEQ ID NO: 2550697 - DNA, 25 bp, Homo sapien
gttcaaattcactgataaagttttc

SEQ ID NO: 2550698 - DNA, 25 bp, Homo sapien
gtgttcaaattcactgataaagttt

SEQ ID NO: 2550699 - DNA, 25 bp, Homo sapien
agcatcaatgcactcattttcaaag

SEQ ID NO: 2550700 - DNA, 25 bp, Homo sapien
caaagtgaaaaacggatgagaggct

SEQ ID NO: 2550701 - DNA, 25 bp, Homo sapien
agcctttgagcaccgccgagcatca

SEQ ID NO: 2550702 - DNA, 25 bp, Homo sapien
tttcaaagtgaaaaacggatgagag

SEQ ID NO: 2550703 - DNA, 25 bp, Homo sapien
gtctaactacatgaagaatgatttc

SEQ ID NO: 2550704 - DNA, 25 bp, Homo sapien
cagtcatctgtctaactacatgaag

SEQ ID NO: 2550705 - DNA, 25 bp, Homo sapien
tgaagaatgatttccacgagggaca

SEQ ID NO: 2550706 - DNA, 25 bp, Homo sapien
tacatgaagaatgatttccacgagg

SEQ ID NO: 2550707 - DNA, 25 bp, Homo sapien
agaaaagtaagagccacattaggat

SEQ ID NO: 2550708 - DNA, 25 bp, Homo sapien
aattttagagctccaattgctgttt

SEQ ID NO: 2550709 - DNA, 25 bp, Homo sapien
ttttagagctccaattgctgtttta

SEQ ID NO: 2550710 - DNA, 25 bp, Homo sapien
taattttagagctccaattgctgtt

SEQ ID NO: 2550711 - DNA, 25 bp, Homo sapien
ttaattttagagctccaattgctgt

SEQ ID NO: 2550712 - DNA, 25 bp, Homo sapien
tactggagagatcatagaaacgact

SEQ ID NO: 2550713 - DNA, 25 bp, Homo sapien
gacgcgtggtttccgattgtttgat

SEQ ID NO: 2550714 - DNA, 25 bp, Homo sapien
gatgtcaacacagcccaaaaaccgc

SEQ ID NO: 2550715 - DNA, 25 bp, Homo sapien
gcatctttgtagtaggacgcgtggt

SEQ ID NO: 2550716 - DNA, 25 bp, Homo sapien
tcacagatgctaagtttggagaata

SEQ ID NO: 2550717 - DNA, 25 bp, Homo sapien
gccccaccttagtaatttctgagaa

SEQ ID NO: 2550718 - DNA, 25 bp, Homo sapien
tgtcacctcaagcaactcacagatg

SEQ ID NO: 2550719 - DNA, 25 bp, Homo sapien
cctgtgtgacatggatttaatggcc

SEQ ID NO: 2550720 - DNA, 25 bp, Homo sapien
gctggtctccttagcttcaacagtg

SEQ ID NO: 2550721 - DNA, 25 bp, Homo sapien
cactttttccaaaactcacaggtca

SEQ ID NO: 2550722 - DNA, 25 bp, Homo sapien
ttctgttcctagacagcaagtctat

SEQ ID NO: 2550723 - DNA, 25 bp, Homo sapien
tacctaacctagcttcttttcagac

SEQ ID NO: 2550724 - DNA, 25 bp, Homo sapien
gctagccccagcgtgaaggctctct

SEQ ID NO: 2550725 - DNA, 25 bp, Homo sapien
tcctgctagccccagcgtgaaggct

SEQ ID NO: 2550726 - DNA, 25 bp, Homo sapien
actccctcgccgagaagtcctgcta

SEQ ID NO: 2550727 - DNA, 25 bp, Homo sapien
cgagaagtcctgctagccccagcgt

SEQ ID NO: 2550728 - DNA, 25 bp, Homo sapien
gctagtaacactttagtctctctcg

SEQ ID NO: 2550729 - DNA, 25 bp, Homo sapien
ctttagtctctctcgttaaggaagc

SEQ ID NO: 2550730 - DNA, 25 bp, Homo sapien
ggtcagctagtaacactttagtctc

SEQ ID NO: 2550731 - DNA, 25 bp, Homo sapien
atggagatggtcagctagtaacact

SEQ ID NO: 2550732 - DNA, 25 bp, Homo sapien
actgccggtcagtattcctcaggga

SEQ ID NO: 2550733 - DNA, 25 bp, Homo sapien
gaaccgctctacgttgccactgttg

SEQ ID NO: 2550734 - DNA, 25 bp, Homo sapien
cactgttgaaggcatagagggtgtc

SEQ ID NO: 2550735 - DNA, 25 bp, Homo sapien
tgtcaatcagccactgccggtcagt

SEQ ID NO: 2550736 - DNA, 25 bp, Homo sapien
taccctgctccactatgcatgaatt

SEQ ID NO: 2550737 - DNA, 25 bp, Homo sapien
accacagttaggtctggctgcatct

SEQ ID NO: 2550738 - DNA, 25 bp, Homo sapien
gtgccttcatctatatctaccctgc

SEQ ID NO: 2550739 - DNA, 25 bp, Homo sapien
cttatcattaaagctcaagcccttg

SEQ ID NO: 2550740 - DNA, 25 bp, Homo sapien
cagggtacgggcatttcgagaagac

SEQ ID NO: 2550741 - DNA, 25 bp, Homo sapien
tgctgttgggaaggatacaccctac

SEQ ID NO: 2550742 - DNA, 25 bp, Homo sapien
gctacagacaccattaggcagggcc

SEQ ID NO: 2550743 - DNA, 25 bp, Homo sapien
gaaagagtcgcacctaactgggaca

SEQ ID NO: 2550744 - DNA, 25 bp, Homo sapien
tcctcagaagctgggcttcattagc

SEQ ID NO: 2550745 - DNA, 25 bp, Homo sapien
ctccatgaggcacaacaactgaatt

SEQ ID NO: 2550746 - DNA, 25 bp, Homo sapien
gggcttcattagctgctaaatcagg

SEQ ID NO: 2550747 - DNA, 25 bp, Homo sapien
catgaggcacaacaactgaattttc

SEQ ID NO: 2550748 - DNA, 25 bp, Homo sapien
tagaagagcaagtggtagcaaagga

SEQ ID NO: 2550749 - DNA, 25 bp, Homo sapien
aaccacagacaaagtggctcctggg

SEQ ID NO: 2550750 - DNA, 25 bp, Homo sapien
gggtgtcgtctgagctaagagccaa

SEQ ID NO: 2550751 - DNA, 25 bp, Homo sapien
gcagcaccactgaaagctcacactg

SEQ ID NO: 2550752 - DNA, 25 bp, Homo sapien
gacagatgtgcgtgtacacaagaag

SEQ ID NO: 2550753 - DNA, 25 bp, Homo sapien
aaagacagatgtgcgtgtacacaag

SEQ ID NO: 2550754 - DNA, 25 bp, Homo sapien
gatgtgcgtgtacacaagaagcgac

SEQ ID NO: 2550755 - DNA, 25 bp, Homo sapien
gggaaagacagatgtgcgtgtacac

SEQ ID NO: 2550756 - DNA, 25 bp, Homo sapien
gtacttgaggccacaatttgccagg

SEQ ID NO: 2550757 - DNA, 25 bp, Homo sapien
tctaagggccacttcctgacgaagc

SEQ ID NO: 2550758 - DNA, 25 bp, Homo sapien
tcaatccccgaacaagtacttgagg

SEQ ID NO: 2550759 - DNA, 25 bp, Homo sapien
caggggtgaccacggcaaaccagaa

SEQ ID NO: 2550760 - DNA, 25 bp, Homo sapien
gtttcctaatattagacatatatct

SEQ ID NO: 2550761 - DNA, 25 bp, Homo sapien
gagaactgataaggatgttttgtca

SEQ ID NO: 2550762 - DNA, 25 bp, Homo sapien
tagagatcttattagtaccccacat

SEQ ID NO: 2550763 - DNA, 25 bp, Homo sapien
gttttgtcaatattggctctgaaaa

SEQ ID NO: 2550764 - DNA, 25 bp, Homo sapien
gattggcaggtcgtgtgaaagtcat

SEQ ID NO: 2550765 - DNA, 25 bp, Homo sapien
tgtgattggcaggtcgtgtgaaagt

SEQ ID NO: 2550766 - DNA, 25 bp, Homo sapien
tgattggcaggtcgtgtgaaagtca

SEQ ID NO: 2550767 - DNA, 25 bp, Homo sapien
tctgtgattggcaggtcgtgtgaaa

SEQ ID NO: 2550768 - DNA, 25 bp, Homo sapien
ttttactgtctagggagcacagcgc

SEQ ID NO: 2550769 - DNA, 25 bp, Homo sapien
taagacaagatagcctgacacaccc

SEQ ID NO: 2550770 - DNA, 25 bp, Homo sapien
tgctctaacaccctgagcctaggga

SEQ ID NO: 2550771 - DNA, 25 bp, Homo sapien
cccagatggcttgtgagaagcagat

SEQ ID NO: 2550772 - DNA, 25 bp, Homo sapien
gactcgtttgtccacctcgtctata

SEQ ID NO: 2550773 - DNA, 25 bp, Homo sapien
caccgaaagggccttcatcaccaga

SEQ ID NO: 2550774 - DNA, 25 bp, Homo sapien
tgtccacctcgtctatactgccttt

SEQ ID NO: 2550775 - DNA, 25 bp, Homo sapien
ggtcatgtggactcgtttgtccacc

SEQ ID NO: 2550776 - DNA, 25 bp, Homo sapien
tgaaatggaaatccggacacaaggg

SEQ ID NO: 2550777 - DNA, 25 bp, Homo sapien
gttaagacacgcaggagacacaggc

SEQ ID NO: 2550778 - DNA, 25 bp, Homo sapien
tacatctccagctaactctctaggg

SEQ ID NO: 2550779 - DNA, 25 bp, Homo sapien
tagtaaaaaggacctctgagctggg

SEQ ID NO: 2550780 - DNA, 25 bp, Homo sapien
atccgtgcaccagaactccaggcgg

SEQ ID NO: 2550781 - DNA, 25 bp, Homo sapien
ttcacatccgtgcaccagaactcca

SEQ ID NO: 2550782 - DNA, 25 bp, Homo sapien
ctaggtgaggatgtcatgggcctgg

SEQ ID NO: 2550783 - DNA, 25 bp, Homo sapien
tccaggcggtccttcattcccttga

SEQ ID NO: 2550784 - DNA, 25 bp, Homo sapien
tcaatgtcgaccgtctgagcagcca

SEQ ID NO: 2550785 - DNA, 25 bp, Homo sapien
ggatggagatccacctcggagtaca

SEQ ID NO: 2550786 - DNA, 25 bp, Homo sapien
cattggctgcaaacgcctctctcag

SEQ ID NO: 2550787 - DNA, 25 bp, Homo sapien
ggaacattctcaaaccgcaacggaa

SEQ ID NO: 2550788 - DNA, 25 bp, Homo sapien
ggctgggtctcacccgacctggaga

SEQ ID NO: 2550789 - DNA, 25 bp, Homo sapien
tgggtctcacccgacctggagagct

SEQ ID NO: 2550790 - DNA, 25 bp, Homo sapien
gaggctgggtctcacccgacctgga

SEQ ID NO: 2550791 - DNA, 25 bp, Homo sapien
tggaggctgggtctcacccgacctg

SEQ ID NO: 2550792 - DNA, 25 bp, Homo sapien
acaggtgtccaccggactttccagg

SEQ ID NO: 2550793 - DNA, 25 bp, Homo sapien
tctgattcgaagagctccatggaag

SEQ ID NO: 2550794 - DNA, 25 bp, Homo sapien
tgtccaccggactttccaggtggtc

SEQ ID NO: 2550795 - DNA, 25 bp, Homo sapien
ttctgggtctctgattcgaagagct

SEQ ID NO: 2550796 - DNA, 25 bp, Homo sapien
gatgctgttgggcaccgtggcacac

SEQ ID NO: 2550797 - DNA, 25 bp, Homo sapien
cgcagctcagctggcacgagatgct

SEQ ID NO: 2550798 - DNA, 25 bp, Homo sapien
ctggcacgagatgctgttgggcacc

SEQ ID NO: 2550799 - DNA, 25 bp, Homo sapien
gggcaccgtggcacacgcagagcat

SEQ ID NO: 2550800 - DNA, 25 bp, Homo sapien
ggagcagggggcctctggctggtcc

SEQ ID NO: 2550801 - DNA, 25 bp, Homo sapien
agcagggggcctctggctggtccat

SEQ ID NO: 2550802 - DNA, 25 bp, Homo sapien
ctggagcagggggcctctggctggt

SEQ ID NO: 2550803 - DNA, 25 bp, Homo sapien
gagcagggggcctctggctggtcca

SEQ ID NO: 2550804 - DNA, 25 bp, Homo sapien
tcttgagggtcttgcgggccacctc

SEQ ID NO: 2550805 - DNA, 25 bp, Homo sapien
ggcggaagcgcttcagctgctcttg

SEQ ID NO: 2550806 - DNA, 25 bp, Homo sapien
ccacgtcgcgcagcttgtggcggaa

SEQ ID NO: 2550807 - DNA, 25 bp, Homo sapien
acgggatgctgcgtccgtccgggcc

SEQ ID NO: 2550808 - DNA, 25 bp, Homo sapien
ggacacggagagcagcgtcccggag

SEQ ID NO: 2550809 - DNA, 25 bp, Homo sapien
acacggagagcagcgtcccggagcc

SEQ ID NO: 2550810 - DNA, 25 bp, Homo sapien
acggagagcagcgtcccggagccga

SEQ ID NO: 2550811 - DNA, 25 bp, Homo sapien
cggacacggagagcagcgtcccgga

SEQ ID NO: 2550812 - DNA, 25 bp, Homo sapien
atgaagaaggcgaagtccacctggc

SEQ ID NO: 2550813 - DNA, 25 bp, Homo sapien
ttgtccttgtcggagaagccgcgca

SEQ ID NO: 2550814 - DNA, 25 bp, Homo sapien
gaagcgcttggtgatcttcacggag

SEQ ID NO: 2550815 - DNA, 25 bp, Homo sapien
tctccttcacgaagcggtaggcgcg

SEQ ID NO: 2550816 - DNA, 25 bp, Homo sapien
ctcagaacgctggtgatgaaaagca

SEQ ID NO: 2550817 - DNA, 25 bp, Homo sapien
gcccgtcggctaccggagccgagct

SEQ ID NO: 2550818 - DNA, 25 bp, Homo sapien
taccggagccgagctcagaacgctg

SEQ ID NO: 2550819 - DNA, 25 bp, Homo sapien
gagccgagctcagaacgctggtgat

SEQ ID NO: 2550820 - DNA, 25 bp, Homo sapien
tcagcagtccgaagaggaagcgcgt

SEQ ID NO: 2550821 - DNA, 25 bp, Homo sapien
tgaaaccatgcagccgaagtggcgc

SEQ ID NO: 2550822 - DNA, 25 bp, Homo sapien
gaagctctggtcgatgaactggtag

SEQ ID NO: 2550823 - DNA, 25 bp, Homo sapien
aaacagcgtctgcactttggagcca

SEQ ID NO: 2550824 - DNA, 25 bp, Homo sapien
tcgagccctttggccccctcggtca

SEQ ID NO: 2550825 - DNA, 25 bp, Homo sapien
ccccctcggtcacctctggtgccac

SEQ ID NO: 2550826 - DNA, 25 bp, Homo sapien
tcctgcgtctcgtacaggcagtaca

SEQ ID NO: 2550827 - DNA, 25 bp, Homo sapien
cacctcacgcagtagctcagaacag

SEQ ID NO: 2550828 - DNA, 25 bp, Homo sapien
tctgcagctgatcagccgcagtgcc

SEQ ID NO: 2550829 - DNA, 25 bp, Homo sapien
ggcagtacagcaactccagtgggta

SEQ ID NO: 2550830 - DNA, 25 bp, Homo sapien
gcaggggctgaattggagctatatt

SEQ ID NO: 2550831 - DNA, 25 bp, Homo sapien
cagggtggtcgaaagggtacttctg

SEQ ID NO: 2550832 - DNA, 25 bp, Homo sapien
caggggctgaattggagctatattc

SEQ ID NO: 2550833 - DNA, 25 bp, Homo sapien
gtcgaaagggtacttctggagccag

SEQ ID NO: 2550834 - DNA, 25 bp, Homo sapien
tcctctacatgggtctttgggtccc

SEQ ID NO: 2550835 - DNA, 25 bp, Homo sapien
atcctctacatgggtctttgggtcc

SEQ ID NO: 2550836 - DNA, 25 bp, Homo sapien
cagttgttttgtggtgccttgagaa

SEQ ID NO: 2550837 - DNA, 25 bp, Homo sapien
gcagttgttttgtggtgccttgaga

SEQ ID NO: 2550838 - DNA, 25 bp, Homo sapien
ggctgctcagatggcacagtgggtc

SEQ ID NO: 2550839 - DNA, 25 bp, Homo sapien
tcagatggcacagtgggtcagtcat

SEQ ID NO: 2550840 - DNA, 25 bp, Homo sapien
agatggcacagtgggtcagtcattg

SEQ ID NO: 2550841 - DNA, 25 bp, Homo sapien
gaggctgctcagatggcacagtggg

SEQ ID NO: 2550842 - DNA, 25 bp, Homo sapien
taggccctcactcagcatacgcagt

SEQ ID NO: 2550843 - DNA, 25 bp, Homo sapien
aaaggtctcggcagaccgcgtcagg

SEQ ID NO: 2550844 - DNA, 25 bp, Homo sapien
agggcctcagaaaggtctcggcaga

SEQ ID NO: 2550845 - DNA, 25 bp, Homo sapien
ccgcctcactgagcctgttgtggag

SEQ ID NO: 2550846 - DNA, 25 bp, Homo sapien
ggtctgcaggccgcatccctggtgc

SEQ ID NO: 2550847 - DNA, 25 bp, Homo sapien
ggtgctgcaggactgcacacaggta

SEQ ID NO: 2550848 - DNA, 25 bp, Homo sapien
gaagcatacccaccaggtactggag

SEQ ID NO: 2550849 - DNA, 25 bp, Homo sapien
gggcagggctctgccgaagcatacc

SEQ ID NO: 2550850 - DNA, 25 bp, Homo sapien
tgggtggccgtccagcgctgggtgt

SEQ ID NO: 2550851 - DNA, 25 bp, Homo sapien
gctcctgtagtgactgctcgctcag

SEQ ID NO: 2550852 - DNA, 25 bp, Homo sapien
tgtgtgatgaccagatccggctttg

SEQ ID NO: 2550853 - DNA, 25 bp, Homo sapien
tcagaaggtcgagatgagttccttg

SEQ ID NO: 2550854 - DNA, 25 bp, Homo sapien
ccacagggactttgactagggtctt

SEQ ID NO: 2550855 - DNA, 25 bp, Homo sapien
actttgactagggtcttccaccctg

SEQ ID NO: 2550856 - DNA, 25 bp, Homo sapien
atgggccgttctctccacagggact

SEQ ID NO: 2550857 - DNA, 25 bp, Homo sapien
tgactagggtcttccaccctgctct

SEQ ID NO: 2550858 - DNA, 25 bp, Homo sapien
tggagctctcgctgtcattattgtg

SEQ ID NO: 2550859 - DNA, 25 bp, Homo sapien
ctgcccccaggtaggtgcttagtta

SEQ ID NO: 2550860 - DNA, 25 bp, Homo sapien
ggtgcttagttaattggagctctcg

SEQ ID NO: 2550861 - DNA, 25 bp, Homo sapien
tgaagggttattctgcccccaggta

SEQ ID NO: 2550862 - DNA, 25 bp, Homo sapien
ctccagtctatgtgggcatagttct

SEQ ID NO: 2550863 - DNA, 25 bp, Homo sapien
cagtctatgtgggcatagttctggg

SEQ ID NO: 2550864 - DNA, 25 bp, Homo sapien
tccagtctatgtgggcatagttctg

SEQ ID NO: 2550865 - DNA, 25 bp, Homo sapien
gtctatgtgggcatagttctggggg

SEQ ID NO: 2550866 - DNA, 25 bp, Homo sapien
aactccaggattcgaggactgtccg

SEQ ID NO: 2550867 - DNA, 25 bp, Homo sapien
gaaagattgtgagcaccgacctgta

SEQ ID NO: 2550868 - DNA, 25 bp, Homo sapien
aaagatctcagacactggacgcctg

SEQ ID NO: 2550869 - DNA, 25 bp, Homo sapien
cgcctggccaggtgtaatagaaacc

SEQ ID NO: 2550870 - DNA, 25 bp, Homo sapien
tcactccttcgggttttcaaatgcc

SEQ ID NO: 2550871 - DNA, 25 bp, Homo sapien
tgcccagtcgtcagttagacttcct

SEQ ID NO: 2550872 - DNA, 25 bp, Homo sapien
tggttctgcctaactttcctccgca

SEQ ID NO: 2550873 - DNA, 25 bp, Homo sapien
tcagacccccgtttcatgcaacagg

SEQ ID NO: 2550874 - DNA, 25 bp, Homo sapien
tggaactttccaagcacgcaagctc

SEQ ID NO: 2550875 - DNA, 25 bp, Homo sapien
ccaagcacgcaagctccacccgcaa

SEQ ID NO: 2550876 - DNA, 25 bp, Homo sapien
aagcacgcaagctccacccgcaaac

SEQ ID NO: 2550877 - DNA, 25 bp, Homo sapien
gaactttccaagcacgcaagctcca

SEQ ID NO: 2550878 - DNA, 25 bp, Homo sapien
gagaccaccggtgcaattcccaatt

SEQ ID NO: 2550879 - DNA, 25 bp, Homo sapien
tgttaaactgcggtccctttgcctc

SEQ ID NO: 2550880 - DNA, 25 bp, Homo sapien
tttgcctcggtcctggtgcagctgc

SEQ ID NO: 2550881 - DNA, 25 bp, Homo sapien
tacgcctttgttgagaacagaaccc

SEQ ID NO: 2550882 - DNA, 25 bp, Homo sapien
attctggaaacgaaggggacttcag

SEQ ID NO: 2550883 - DNA, 25 bp, Homo sapien
gattctggaaacgaaggggacttca

SEQ ID NO: 2550884 - DNA, 25 bp, Homo sapien
aagcgaagcgaaggcacagacccgc

SEQ ID NO: 2550885 - DNA, 25 bp, Homo sapien
cgctccgaggccagcgagactccag

SEQ ID NO: 2550886 - DNA, 25 bp, Homo sapien
tcgggtcagaaggaagcgagaggct

SEQ ID NO: 2550887 - DNA, 25 bp, Homo sapien
cgacaccgtccggagaaagaactcg

SEQ ID NO: 2550888 - DNA, 25 bp, Homo sapien
cctggaccccgagctgcgtcccggg

SEQ ID NO: 2550889 - DNA, 25 bp, Homo sapien
agcaaagctcgagcctggaccccga

SEQ ID NO: 2550890 - DNA, 25 bp, Homo sapien
gagtgagcaaagctcgagcctggac

SEQ ID NO: 2550891 - DNA, 25 bp, Homo sapien
ctgcacgaagcgccctgagtgagca

SEQ ID NO: 2550892 - DNA, 25 bp, Homo sapien
agcggccgcgtgggtcgcgtccggg

SEQ ID NO: 2550893 - DNA, 25 bp, Homo sapien
tcgccgggcgccagcgtgggaacct

SEQ ID NO: 2550894 - DNA, 25 bp, Homo sapien
ctctgctccacgccagggccgggag

SEQ ID NO: 2550895 - DNA, 25 bp, Homo sapien
cgccgggcgccagcgtgggaacctg

SEQ ID NO: 2550896 - DNA, 25 bp, Homo sapien
cctctgctccacgccagggccggga

SEQ ID NO: 2550897 - DNA, 25 bp, Homo sapien
cagccccgattttcctgaggcccct

SEQ ID NO: 2550898 - DNA, 25 bp, Homo sapien
gagaccgtctgtaatcccctgaagc

SEQ ID NO: 2550899 - DNA, 25 bp, Homo sapien
caggaaaggagctcgactctcagag

SEQ ID NO: 2550900 - DNA, 25 bp, Homo sapien
agaccccaaaggttgatctccagga

SEQ ID NO: 2550901 - DNA, 25 bp, Homo sapien
gagagtgggcagcaaacgtggtggg

SEQ ID NO: 2550902 - DNA, 25 bp, Homo sapien
cagagagtgggcagcaaacgtggtg

SEQ ID NO: 2550903 - DNA, 25 bp, Homo sapien
tggtggggtcctcgccggcgtcctc

SEQ ID NO: 2550904 - DNA, 25 bp, Homo sapien
cagcaaacgtggtggggtcctcgcc

SEQ ID NO: 2550905 - DNA, 25 bp, Homo sapien
actcgtgtgcccaggtatgcgttgg

SEQ ID NO: 2550906 - DNA, 25 bp, Homo sapien
cacgtgcagcgtgtcgtgaaacact

SEQ ID NO: 2550907 - DNA, 25 bp, Homo sapien
ttgtacacgccgctcacgtgcagcg

SEQ ID NO: 2550908 - DNA, 25 bp, Homo sapien
ccaggtatgcgttggtcacagtggc

SEQ ID NO: 2550909 - DNA, 25 bp, Homo sapien
gtgtccagggcgaaggtctcggtca

SEQ ID NO: 2550910 - DNA, 25 bp, Homo sapien
tccagggcgaaggtctcggtcagct

SEQ ID NO: 2550911 - DNA, 25 bp, Homo sapien
tgtccagggcgaaggtctcggtcag

SEQ ID NO: 2550912 - DNA, 25 bp, Homo sapien
tggtgtccagggcgaaggtctcggt

SEQ ID NO: 2550913 - DNA, 25 bp, Homo sapien
cgggcgatggacactcggaaagcca

SEQ ID NO: 2550914 - DNA, 25 bp, Homo sapien
catagatgcactgggaggcccggaa

SEQ ID NO: 2550915 - DNA, 25 bp, Homo sapien
atggacactcggaaagccagcacgt

SEQ ID NO: 2550916 - DNA, 25 bp, Homo sapien
gcagcgtgcgatgcgcatagatgca

SEQ ID NO: 2550917 - DNA, 25 bp, Homo sapien
gtgtacctcttgctgtggccccccg

SEQ ID NO: 2550918 - DNA, 25 bp, Homo sapien
tgtacctcttgctgtggccccccgg

SEQ ID NO: 2550919 - DNA, 25 bp, Homo sapien
tgctcaggggtgagggtgtggccat

SEQ ID NO: 2550920 - DNA, 25 bp, Homo sapien
gggtgagggtgtggccatacaggta

SEQ ID NO: 2550921 - DNA, 25 bp, Homo sapien
ctgggggtgctggtgtccacagcat

SEQ ID NO: 2550922 - DNA, 25 bp, Homo sapien
cccaagggtcaggtctgggggtgct

SEQ ID NO: 2550923 - DNA, 25 bp, Homo sapien
gtctgggggtgctggtgtccacagc

SEQ ID NO: 2550924 - DNA, 25 bp, Homo sapien
aagggtcaggtctgggggtgctggt

SEQ ID NO: 2550925 - DNA, 25 bp, Homo sapien
actgctgtcaggaagtcccacgtcc

SEQ ID NO: 2550926 - DNA, 25 bp, Homo sapien
gtcaggaagtcccacgtcctagcct

SEQ ID NO: 2550927 - DNA, 25 bp, Homo sapien
tgagccgtatacagagctcccctgg

SEQ ID NO: 2550928 - DNA, 25 bp, Homo sapien
tgtgcgtgagccgtatacagagctc

SEQ ID NO: 2550929 - DNA, 25 bp, Homo sapien
cacgtccaagccacattctacccag

SEQ ID NO: 2550930 - DNA, 25 bp, Homo sapien
gggccccaccacgtccaagccacat

SEQ ID NO: 2550931 - DNA, 25 bp, Homo sapien
gtccaagccacattctacccagagc

SEQ ID NO: 2550932 - DNA, 25 bp, Homo sapien
cccaccacgtccaagccacattcta

SEQ ID NO: 2550933 - DNA, 25 bp, Homo sapien
aagacgtggccccagtagcattcct

SEQ ID NO: 2550934 - DNA, 25 bp, Homo sapien
ccatggcagatgtatcctggggcct

SEQ ID NO: 2550935 - DNA, 25 bp, Homo sapien
gtagtagagggagccacgcagggcc

SEQ ID NO: 2550936 - DNA, 25 bp, Homo sapien
ttcctcacggctcccattggagagg

SEQ ID NO: 2550937 - DNA, 25 bp, Homo sapien
caaacgctggtgatctggacctgca

SEQ ID NO: 2550938 - DNA, 25 bp, Homo sapien
gggcagagaccgtggacctccatgt

SEQ ID NO: 2550939 - DNA, 25 bp, Homo sapien
tccatgtgtcgcctgctgtgtggct

SEQ ID NO: 2550940 - DNA, 25 bp, Homo sapien
gtcctgataggtccctggagctcca

SEQ ID NO: 2550941 - DNA, 25 bp, Homo sapien
agccggcgtttgtgtggcctcagag

SEQ ID NO: 2550942 - DNA, 25 bp, Homo sapien
aaagaaacggccacagcggcagcac

SEQ ID NO: 2550943 - DNA, 25 bp, Homo sapien
tcaggctggcagtgaatgactcggc

SEQ ID NO: 2550944 - DNA, 25 bp, Homo sapien
aggctccagcccgaatatgcgcatg

SEQ ID NO: 2550945 - DNA, 25 bp, Homo sapien
tagcgccggacaggccgtcactgct

SEQ ID NO: 2550946 - DNA, 25 bp, Homo sapien
gagctccatcgctggcgtcttctgg

SEQ ID NO: 2550947 - DNA, 25 bp, Homo sapien
ctagcgccggacaggccgtcactgc

SEQ ID NO: 2550948 - DNA, 25 bp, Homo sapien
tcctggccacattccgccccggcag

SEQ ID NO: 2550949 - DNA, 25 bp, Homo sapien
ccagcgtgcggatgcggtactccag

SEQ ID NO: 2550950 - DNA, 25 bp, Homo sapien
ggatactcgggaacatccagaggtc

SEQ ID NO: 2550951 - DNA, 25 bp, Homo sapien
ccccgtccagcgtgcggatgcggta

SEQ ID NO: 2550952 - DNA, 25 bp, Homo sapien
cctggcggcttctgggtggaacatc

SEQ ID NO: 2550953 - DNA, 25 bp, Homo sapien
tctgcccagttctcaccgagtgctg

SEQ ID NO: 2550954 - DNA, 25 bp, Homo sapien
aaggcccactgcacgtcctcacggg

SEQ ID NO: 2550955 - DNA, 25 bp, Homo sapien
caccgagtgctgaccctggtgcagg

SEQ ID NO: 2550956 - DNA, 25 bp, Homo sapien
accctggcgggtgctactgctagaa

SEQ ID NO: 2550957 - DNA, 25 bp, Homo sapien
tcagggcaaacctctaggccggagt

SEQ ID NO: 2550958 - DNA, 25 bp, Homo sapien
actccgtaaatgtcctcagggcaaa

SEQ ID NO: 2550959 - DNA, 25 bp, Homo sapien
cccgttgacgtggacctcctggact

SEQ ID NO: 2550960 - DNA, 25 bp, Homo sapien
tggtatggtagtacagctcgaaggc

SEQ ID NO: 2550961 - DNA, 25 bp, Homo sapien
ggctccactcaacacgactgcacca

SEQ ID NO: 2550962 - DNA, 25 bp, Homo sapien
gccaccagcctctcgaaatagctgc

SEQ ID NO: 2550963 - DNA, 25 bp, Homo sapien
tcaacacgactgcaccaaaactcgg

SEQ ID NO: 2550964 - DNA, 25 bp, Homo sapien
cagcctctcgaaatagctgcaggtc

SEQ ID NO: 2550965 - DNA, 25 bp, Homo sapien
tggcacacgtgaggtgtctgaaaat

SEQ ID NO: 2550966 - DNA, 25 bp, Homo sapien
ctgagtctgggagcatccacccttc

SEQ ID NO: 2550967 - DNA, 25 bp, Homo sapien
gtctgaaaatcatctgctgagtctg

SEQ ID NO: 2550968 - DNA, 25 bp, Homo sapien
agaggccttccctccacgccggtgg

SEQ ID NO: 2550969 - DNA, 25 bp, Homo sapien
cagagttgttgacccctgaatggta

SEQ ID NO: 2550970 - DNA, 25 bp, Homo sapien
cgttggtgtacacagagttgttgac

SEQ ID NO: 2550971 - DNA, 25 bp, Homo sapien
tgacccctgaatggtactcgtcggg

SEQ ID NO: 2550972 - DNA, 25 bp, Homo sapien
tgttctggaccaggacgttggtgta

SEQ ID NO: 2550973 - DNA, 25 bp, Homo sapien
ctagtgggggcaccggggcaggtct

SEQ ID NO: 2550974 - DNA, 25 bp, Homo sapien
gaggtgaggggatcttgtgtctgac

SEQ ID NO: 2550975 - DNA, 25 bp, Homo sapien
gcaggtctccagctggggcgggggt

SEQ ID NO: 2550976 - DNA, 25 bp, Homo sapien
ggtgaggtgaggggatcttgtgtct

SEQ ID NO: 2550977 - DNA, 25 bp, Homo sapien
gcaacccctacacttccagctgctg

SEQ ID NO: 2550978 - DNA, 25 bp, Homo sapien
aacccctacacttccagctgctgcc

SEQ ID NO: 2550979 - DNA, 25 bp, Homo sapien
tgcaacccctacacttccagctgct

SEQ ID NO: 2550980 - DNA, 25 bp, Homo sapien
ctgcaacccctacacttccagctgc

SEQ ID NO: 2550981 - DNA, 25 bp, Homo sapien
caaagggtaccttgatcttgtcagc

SEQ ID NO: 2550982 - DNA, 25 bp, Homo sapien
aagttctgctccacgtcaaagggta

SEQ ID NO: 2550983 - DNA, 25 bp, Homo sapien
cacgtcaaagggtaccttgatcttg

SEQ ID NO: 2550984 - DNA, 25 bp, Homo sapien
gtcagccaccgccagccactggctg

SEQ ID NO: 2550985 - DNA, 25 bp, Homo sapien
ctcgacggcaggggaggagcccttg

SEQ ID NO: 2550986 - DNA, 25 bp, Homo sapien
ggagcccttgaaggggtccactcac

SEQ ID NO: 2550987 - DNA, 25 bp, Homo sapien
gaggagcccttgaaggggtccactc

SEQ ID NO: 2550988 - DNA, 25 bp, Homo sapien
tcgacggcaggggaggagcccttga

SEQ ID NO: 2550989 - DNA, 25 bp, Homo sapien
aaggtgttccaggacagactcgagg

SEQ ID NO: 2550990 - DNA, 25 bp, Homo sapien
tgactggaaggtgttccaggacaga

SEQ ID NO: 2550991 - DNA, 25 bp, Homo sapien
gtgccgctgactggaaggtgttcca

SEQ ID NO: 2550992 - DNA, 25 bp, Homo sapien
ctacagggaggtgccgctgactgga

SEQ ID NO: 2550993 - DNA, 25 bp, Homo sapien
gactgggtatcccaggagcacgacg

SEQ ID NO: 2550994 - DNA, 25 bp, Homo sapien
gggactgggtatcccaggagcacga

SEQ ID NO: 2550995 - DNA, 25 bp, Homo sapien
atcccaggagcacgacgtctgcctg

SEQ ID NO: 2550996 - DNA, 25 bp, Homo sapien
tgggtatcccaggagcacgacgtct

SEQ ID NO: 2550997 - DNA, 25 bp, Homo sapien
cacagcctcgtaaatctccagattt

SEQ ID NO: 2550998 - DNA, 25 bp, Homo sapien
ggacgtcacagcctcgtaaatctcc

SEQ ID NO: 2550999 - DNA, 25 bp, Homo sapien
cgtcacagcctcgtaaatctccaga

SEQ ID NO: 2551000 - DNA, 25 bp, Homo sapien
ctggggggacgtcacagcctcgtaa

SEQ ID NO: 2551001 - DNA, 25 bp, Homo sapien
cttgaagggttcagccatgttggca

SEQ ID NO: 2551002 - DNA, 25 bp, Homo sapien
ttcagctccatccagcccacagcaa

SEQ ID NO: 2551003 - DNA, 25 bp, Homo sapien
cgggcccgcactgcgtccttcagct

SEQ ID NO: 2551004 - DNA, 25 bp, Homo sapien
catgttggcaaagctcctgtccagg

SEQ ID NO: 2551005 - DNA, 25 bp, Homo sapien
aggaagttcacagcgcctgacccgt

SEQ ID NO: 2551006 - DNA, 25 bp, Homo sapien
tcacagcgcctgacccgtctgcatt

SEQ ID NO: 2551007 - DNA, 25 bp, Homo sapien
cacagcgcctgacccgtctgcattc

SEQ ID NO: 2551008 - DNA, 25 bp, Homo sapien
aagttcacagcgcctgacccgtctg

SEQ ID NO: 2551009 - DNA, 25 bp, Homo sapien
gcacccgaagaccaccgcctgcagg

SEQ ID NO: 2551010 - DNA, 25 bp, Homo sapien
tgcacccgaagaccaccgcctgcag

SEQ ID NO: 2551011 - DNA, 25 bp, Homo sapien
acccgaagaccaccgcctgcaggaa

SEQ ID NO: 2551012 - DNA, 25 bp, Homo sapien
ctgaaccccgtgcacccgaagacca

SEQ ID NO: 2551013 - DNA, 25 bp, Homo sapien
tcaaaggtcacacccgctcgggtga

SEQ ID NO: 2551014 - DNA, 25 bp, Homo sapien
caaaggtcacacccgctcgggtgac

SEQ ID NO: 2551015 - DNA, 25 bp, Homo sapien
gtcaaaggtcacacccgctcgggtg

SEQ ID NO: 2551016 - DNA, 25 bp, Homo sapien
cagggccctgctcgagctgtgacct

SEQ ID NO: 2551017 - DNA, 25 bp, Homo sapien
tcacggagtcctcggaaaaagagaa

SEQ ID NO: 2551018 - DNA, 25 bp, Homo sapien
gctgtgacctccacggtcacggagt

SEQ ID NO: 2551019 - DNA, 25 bp, Homo sapien
aagagaagttgagcttgttcccctg

SEQ ID NO: 2551020 - DNA, 25 bp, Homo sapien
gggagagaggcagcctgggggtgag

SEQ ID NO: 2551021 - DNA, 25 bp, Homo sapien
cagggagagaggcagcctgggggtg

SEQ ID NO: 2551022 - DNA, 25 bp, Homo sapien
gaggggcagcctggggtcgcaggca

SEQ ID NO: 2551023 - DNA, 25 bp, Homo sapien
gtgaggggcagcctggggtcgcagg

SEQ ID NO: 2551024 - DNA, 25 bp, Homo sapien
atttgtatccggccagccgagcggg

SEQ ID NO: 2551025 - DNA, 25 bp, Homo sapien
gggtgacatttgtatccggccagcc

SEQ ID NO: 2551026 - DNA, 25 bp, Homo sapien
gtgacatttgtatccggccagccga

SEQ ID NO: 2551027 - DNA, 25 bp, Homo sapien
ttcgggggtgacatttgtatccggc

SEQ ID NO: 2551028 - DNA, 25 bp, Homo sapien
ctaacatctgaaaaagtcctcccag

SEQ ID NO: 2551029 - DNA, 25 bp, Homo sapien
agtcctcccagggaactcggagctg

SEQ ID NO: 2551030 - DNA, 25 bp, Homo sapien
tcctcccagggaactcggagctgga

SEQ ID NO: 2551031 - DNA, 25 bp, Homo sapien
ccagggaactcggagctggaacttc

SEQ ID NO: 2551032 - DNA, 25 bp, Homo sapien
ctggaggaacccagggtgacccaga

SEQ ID NO: 2551033 - DNA, 25 bp, Homo sapien
tggaggaacccagggtgacccagag

SEQ ID NO: 2551034 - DNA, 25 bp, Homo sapien
agggtccacagtgagtgactcggtg

SEQ ID NO: 2551035 - DNA, 25 bp, Homo sapien
gaggcagggtccacagtgagtgact

SEQ ID NO: 2551036 - DNA, 25 bp, Homo sapien
gtccacagtgagtgactcggtgggg

SEQ ID NO: 2551037 - DNA, 25 bp, Homo sapien
agaggcagggtccacagtgagtgac

SEQ ID NO: 2551038 - DNA, 25 bp, Homo sapien
gtgggtgcagacgtggccagaggga

SEQ ID NO: 2551039 - DNA, 25 bp, Homo sapien
aaggcccaagagacgtctctgaagc

SEQ ID NO: 2551040 - DNA, 25 bp, Homo sapien
gcccaagagacgtctctgaagccac

SEQ ID NO: 2551041 - DNA, 25 bp, Homo sapien
gtgcagacgtggccagagggaaggc

SEQ ID NO: 2551042 - DNA, 25 bp, Homo sapien
tcttgggaaactgctgacgaccgaa

SEQ ID NO: 2551043 - DNA, 25 bp, Homo sapien
tgcgcgatagcatcagtccacaggg

SEQ ID NO: 2551044 - DNA, 25 bp, Homo sapien
gcagaggctgcccaacctgattaaa

SEQ ID NO: 2551045 - DNA, 25 bp, Homo sapien
ggagtccaggctacaggcagaaagc

SEQ ID NO: 2551046 - DNA, 25 bp, Homo sapien
ggcacggccctcacttcagaaggaa

SEQ ID NO: 2551047 - DNA, 25 bp, Homo sapien
gcttcccgactcaagtgaaaggaga

SEQ ID NO: 2551048 - DNA, 25 bp, Homo sapien
tgggcgcgagccttaaagttgctgt

SEQ ID NO: 2551049 - DNA, 25 bp, Homo sapien
agaaggaagcacagcggctcctcag

SEQ ID NO: 2551050 - DNA, 25 bp, Homo sapien
agaaaagagacggtctgccagtccc

SEQ ID NO: 2551051 - DNA, 25 bp, Homo sapien
ggctcctgggcaggcgatgaaccct

SEQ ID NO: 2551052 - DNA, 25 bp, Homo sapien
atcaaactgtgtcgggtgcagagac

SEQ ID NO: 2551053 - DNA, 25 bp, Homo sapien
ggcacacgtgcactgaccatcacga

SEQ ID NO: 2551054 - DNA, 25 bp, Homo sapien
gaccaaggacaagggcagtgtgccc

SEQ ID NO: 2551055 - DNA, 25 bp, Homo sapien
tgtgcttgccttgggatagagacag

SEQ ID NO: 2551056 - DNA, 25 bp, Homo sapien
tgccttgggatagagacagtgtgcc

SEQ ID NO: 2551057 - DNA, 25 bp, Homo sapien
agacagacaggaccagtcccacagt

SEQ ID NO: 2551058 - DNA, 25 bp, Homo sapien
gaatcttttggtctactcggagccc

SEQ ID NO: 2551059 - DNA, 25 bp, Homo sapien
tgtgatatgcctgcagccaacggct

SEQ ID NO: 2551060 - DNA, 25 bp, Homo sapien
agggacatgcacactgcgaggctgc

SEQ ID NO: 2551061 - DNA, 25 bp, Homo sapien
tattttacctgcgttgtgtaccaca

SEQ ID NO: 2551062 - DNA, 25 bp, Homo sapien
gagtgtccaccacaggagcccacag

SEQ ID NO: 2551063 - DNA, 25 bp, Homo sapien
atgaggacgcacacgcgccgcactt

SEQ ID NO: 2551064 - DNA, 25 bp, Homo sapien
tccgcggtctgtaacaagaaccggc

SEQ ID NO: 2551065 - DNA, 25 bp, Homo sapien
gacaagccggtgacctatgaggacg

SEQ ID NO: 2551066 - DNA, 25 bp, Homo sapien
gtcgcccgccgtgagggccagaggt

SEQ ID NO: 2551067 - DNA, 25 bp, Homo sapien
tggcagaggctattgcagcaaacag

SEQ ID NO: 2551068 - DNA, 25 bp, Homo sapien
cttccttggcagaggctattgcagc

SEQ ID NO: 2551069 - DNA, 25 bp, Homo sapien
gaccttccttggcagaggctattgc

SEQ ID NO: 2551070 - DNA, 25 bp, Homo sapien
cagaggctattgcagcaaacagagc

SEQ ID NO: 2551071 - DNA, 25 bp, Homo sapien
atctgctgacatcccttgtcctttg

SEQ ID NO: 2551072 - DNA, 25 bp, Homo sapien
cagtcctgctccatgcgggtttggg

SEQ ID NO: 2551073 - DNA, 25 bp, Homo sapien
ttgtcctttgctggggttgcagtcc

SEQ ID NO: 2551074 - DNA, 25 bp, Homo sapien
gtcacaggcctcatctgctgacatc

SEQ ID NO: 2551075 - DNA, 25 bp, Homo sapien
ggtcctggagacttcccctgtgttg

SEQ ID NO: 2551076 - DNA, 25 bp, Homo sapien
gagcacaagtctcatcttgttagtg

SEQ ID NO: 2551077 - DNA, 25 bp, Homo sapien
gcacaagtctcatcttgttagtggt

SEQ ID NO: 2551078 - DNA, 25 bp, Homo sapien
caagtctcatcttgttagtggtgtg

SEQ ID NO: 2551079 - DNA, 25 bp, Homo sapien
agagaaggtttgcacaatgtggttc

SEQ ID NO: 2551080 - DNA, 25 bp, Homo sapien
tgacaggagagaaggtttgcacaat

SEQ ID NO: 2551081 - DNA, 25 bp, Homo sapien
gcacccccagcatagccacttcctg

SEQ ID NO: 2551082 - DNA, 25 bp, Homo sapien
acccccagcatagccacttcctgct

SEQ ID NO: 2551083 - DNA, 25 bp, Homo sapien
cacccccagcatagccacttcctgc

SEQ ID NO: 2551084 - DNA, 25 bp, Homo sapien
cggcaccccctggatttccgccagg

SEQ ID NO: 2551085 - DNA, 25 bp, Homo sapien
ggatttccgccagggccatacgcac

SEQ ID NO: 2551086 - DNA, 25 bp, Homo sapien
cctggatttccgccagggccatacg

SEQ ID NO: 2551087 - DNA, 25 bp, Homo sapien
cccctggatttccgccagggccata

SEQ ID NO: 2551088 - DNA, 25 bp, Homo sapien
ttactgggctatagggagaactgct

SEQ ID NO: 2551089 - DNA, 25 bp, Homo sapien
tactgggctatagggagaactgctc

SEQ ID NO: 2551090 - DNA, 25 bp, Homo sapien
gatcacacagacaaagccactgacg

SEQ ID NO: 2551091 - DNA, 25 bp, Homo sapien
gtgaagtcacctgtgagttcccttc

SEQ ID NO: 2551092 - DNA, 25 bp, Homo sapien
tgaagtcacctgtgagttcccttct

SEQ ID NO: 2551093 - DNA, 25 bp, Homo sapien
gctgagagccgcgtgctatggctcc

SEQ ID NO: 2551094 - DNA, 25 bp, Homo sapien
ccccagctgagagccgcgtgctatg

SEQ ID NO: 2551095 - DNA, 25 bp, Homo sapien
gatcccccagctgagagccgcgtgc

SEQ ID NO: 2551096 - DNA, 25 bp, Homo sapien
cagctgagagccgcgtgctatggct

SEQ ID NO: 2551097 - DNA, 25 bp, Homo sapien
gcctgggccccggtcacgtcgccaa

SEQ ID NO: 2551098 - DNA, 25 bp, Homo sapien
cataggcctgggccccggtcacgtc

SEQ ID NO: 2551099 - DNA, 25 bp, Homo sapien
gccccggtcacgtcgccaaccatct

SEQ ID NO: 2551100 - DNA, 25 bp, Homo sapien
tgggccccggtcacgtcgccaacca

SEQ ID NO: 2551101 - DNA, 25 bp, Homo sapien
cagaatggtcatgaagatgcccaaa

SEQ ID NO: 2551102 - DNA, 25 bp, Homo sapien
gcagaatggtcatgaagatgcccaa

SEQ ID NO: 2551103 - DNA, 25 bp, Homo sapien
ggtcatgaagatgcccaaaatcagg

SEQ ID NO: 2551104 - DNA, 25 bp, Homo sapien
tgaagatgcccaaaatcagggccca

SEQ ID NO: 2551105 - DNA, 25 bp, Homo sapien
ctatcgctgggcctggacgaccaac

SEQ ID NO: 2551106 - DNA, 25 bp, Homo sapien
taagtggaatacaggtcaagggcag

SEQ ID NO: 2551107 - DNA, 25 bp, Homo sapien
tagagtacgtgggatacaggtcacg

SEQ ID NO: 2551108 - DNA, 25 bp, Homo sapien
gtggagtaagtggaatacaggtcaa

SEQ ID NO: 2551109 - DNA, 25 bp, Homo sapien
tggaagatagagtacgtgggataca

SEQ ID NO: 2551110 - DNA, 25 bp, Homo sapien
tgccattgtagaaaagcgtgtgagg

SEQ ID NO: 2551111 - DNA, 25 bp, Homo sapien
aggataaagggctgatgcaggactc

SEQ ID NO: 2551112 - DNA, 25 bp, Homo sapien
agcgtgtgaggataaagggctgatg

SEQ ID NO: 2551113 - DNA, 25 bp, Homo sapien
ccattgtagaaaagcgtgtgaggat

SEQ ID NO: 2551114 - DNA, 25 bp, Homo sapien
ccaccgcggccgcccatggggcacc

SEQ ID NO: 2551115 - DNA, 25 bp, Homo sapien
gcgggggcgcgcatggccaccccag

SEQ ID NO: 2551116 - DNA, 25 bp, Homo sapien
tggagtcgcgggtggacggcggggc

SEQ ID NO: 2551117 - DNA, 25 bp, Homo sapien
gggggcgcgcatggccaccccagct

SEQ ID NO: 2551118 - DNA, 25 bp, Homo sapien
cgcttcctccgcgtccatcgccctt

SEQ ID NO: 2551119 - DNA, 25 bp, Homo sapien
ggcgcttcctccgcgtccatcgccc

SEQ ID NO: 2551120 - DNA, 25 bp, Homo sapien
cttcctccgcgtccatcgcccttgc

SEQ ID NO: 2551121 - DNA, 25 bp, Homo sapien
gcttcctccgcgtccatcgcccttg

SEQ ID NO: 2551122 - DNA, 25 bp, Homo sapien
tggggactaaacctcccagtgtctc

SEQ ID NO: 2551123 - DNA, 25 bp, Homo sapien
cagtgtctcctggtgcaggtcagag

SEQ ID NO: 2551124 - DNA, 25 bp, Homo sapien
caggctgcagtcctgctctgtgcgg

SEQ ID NO: 2551125 - DNA, 25 bp, Homo sapien
tggtggccaaagtttcctgccccaa

SEQ ID NO: 2551126 - DNA, 25 bp, Homo sapien
cagggaccaatgaggtgtggtttaa

SEQ ID NO: 2551127 - DNA, 25 bp, Homo sapien
attggtgaattagccagggaccaat

SEQ ID NO: 2551128 - DNA, 25 bp, Homo sapien
gtaaattggtgaattagccagggac

SEQ ID NO: 2551129 - DNA, 25 bp, Homo sapien
aaattggtgaattagccagggacca

SEQ ID NO: 2551130 - DNA, 25 bp, Homo sapien
atgctgggacggtgctcagtgagac

SEQ ID NO: 2551131 - DNA, 25 bp, Homo sapien
ccgctgtggtgtccggatgctggga

SEQ ID NO: 2551132 - DNA, 25 bp, Homo sapien
ggaagtgttgagtgaaggtttgaga

SEQ ID NO: 2551133 - DNA, 25 bp, Homo sapien
tttctgcgtggagcgaagggccgct

SEQ ID NO: 2551134 - DNA, 25 bp, Homo sapien
tgaagcccagacagcaccagttcaa

SEQ ID NO: 2551135 - DNA, 25 bp, Homo sapien
gctatgaagcccagacagcaccagt

SEQ ID NO: 2551136 - DNA, 25 bp, Homo sapien
tgatcacggtggaccttggaaggat

SEQ ID NO: 2551137 - DNA, 25 bp, Homo sapien
atgttgatcacggtggaccttggaa

SEQ ID NO: 2551138 - DNA, 25 bp, Homo sapien
cggcaccccctggatttccgccagg

SEQ ID NO: 2551139 - DNA, 25 bp, Homo sapien
ggatttccgccagggccatacgcac

SEQ ID NO: 2551140 - DNA, 25 bp, Homo sapien
cctggatttccgccagggccatacg

SEQ ID NO: 2551141 - DNA, 25 bp, Homo sapien
cccctggatttccgccagggccata

SEQ ID NO: 2551142 - DNA, 25 bp, Homo sapien
ggtgtaatttcttactgggctatag

SEQ ID NO: 2551143 - DNA, 25 bp, Homo sapien
gatcccccagctgagagccgcgtgc

SEQ ID NO: 2551144 - DNA, 25 bp, Homo sapien
gctgagagccgcgtgctatggctcc

SEQ ID NO: 2551145 - DNA, 25 bp, Homo sapien
tgaagtcacctgtgagttcccttct

SEQ ID NO: 2551146 - DNA, 25 bp, Homo sapien
taacaggatgaatccaatggtcatg

SEQ ID NO: 2551147 - DNA, 25 bp, Homo sapien
ggatgaatccaatggtcatgaggat

SEQ ID NO: 2551148 - DNA, 25 bp, Homo sapien
cagtaacaggatgaatccaatggtc

SEQ ID NO: 2551149 - DNA, 25 bp, Homo sapien
caggatgaatccaatggtcatgagg

SEQ ID NO: 2551150 - DNA, 25 bp, Homo sapien
taatatggtagactgtcacagagcc

SEQ ID NO: 2551151 - DNA, 25 bp, Homo sapien
aacataatatggtagactgtcacag

SEQ ID NO: 2551152 - DNA, 25 bp, Homo sapien
tgtaacataatatggtagactgtca

SEQ ID NO: 2551153 - DNA, 25 bp, Homo sapien
ggtagactgtcacagagccgaatac

SEQ ID NO: 2551154 - DNA, 25 bp, Homo sapien
aaaggttgcaggctatgggcggcta

SEQ ID NO: 2551155 - DNA, 25 bp, Homo sapien
agtgcaaaggttgcaggctatgggc

SEQ ID NO: 2551156 - DNA, 25 bp, Homo sapien
tgcacagtggagtgcaaaggttgca

SEQ ID NO: 2551157 - DNA, 25 bp, Homo sapien
ttgcacagtggagtgcaaaggttgc

SEQ ID NO: 2551158 - DNA, 25 bp, Homo sapien
attgaatgacactgtagacaggtgt

SEQ ID NO: 2551159 - DNA, 25 bp, Homo sapien
ctttattgaatgacactgtagacag

SEQ ID NO: 2551160 - DNA, 25 bp, Homo sapien
aggtgtgtgggtataaactgctgta

SEQ ID NO: 2551161 - DNA, 25 bp, Homo sapien
ctgctgtatctaggggcaggaccaa

SEQ ID NO: 2551162 - DNA, 25 bp, Homo sapien
ttaccgcaatgtcctcgcgggcagg

SEQ ID NO: 2551163 - DNA, 25 bp, Homo sapien
gcagagttctctgtcgcacaggaca

SEQ ID NO: 2551164 - DNA, 25 bp, Homo sapien
cagagttcgactcttttcgtccaca

SEQ ID NO: 2551165 - DNA, 25 bp, Homo sapien
tccagcggttgcaaagggatgcccg

SEQ ID NO: 2551166 - DNA, 25 bp, Homo sapien
gggcgatggacgcggaggaagcgcc

SEQ ID NO: 2551167 - DNA, 25 bp, Homo sapien
caagggcgatggacgcggaggaagc

SEQ ID NO: 2551168 - DNA, 25 bp, Homo sapien
aagggcgatggacgcggaggaagcg

SEQ ID NO: 2551169 - DNA, 25 bp, Homo sapien
agggcgatggacgcggaggaagcgc

SEQ ID NO: 2551170 - DNA, 25 bp, Homo sapien
gtggagggggcaccgcgctgcctgc

SEQ ID NO: 2551171 - DNA, 25 bp, Homo sapien
ctggggacctggctttagttcctcg

SEQ ID NO: 2551172 - DNA, 25 bp, Homo sapien
ctgaaggagccccgggcctcgcagc

SEQ ID NO: 2551173 - DNA, 25 bp, Homo sapien
ctgtcggcaatccaggctgtcggct

SEQ ID NO: 2551174 - DNA, 25 bp, Homo sapien
ggccctgattctgggcatcctcatg

SEQ ID NO: 2551175 - DNA, 25 bp, Homo sapien
gacctgtatcccacgtactccaact

SEQ ID NO: 2551176 - DNA, 25 bp, Homo sapien
cttccaggcctatggatagatcagg

SEQ ID NO: 2551177 - DNA, 25 bp, Homo sapien
gtcatcccagtgctgatcttccagg

SEQ ID NO: 2551178 - DNA, 25 bp, Homo sapien
caggaagatggttggcgacgtgacc

SEQ ID NO: 2551179 - DNA, 25 bp, Homo sapien
tggttggcgacgtgaccggggccca

SEQ ID NO: 2551180 - DNA, 25 bp, Homo sapien
aggaagatggttggcgacgtgaccg

SEQ ID NO: 2551181 - DNA, 25 bp, Homo sapien
aagatggttggcgacgtgaccgggg

SEQ ID NO: 2551182 - DNA, 25 bp, Homo sapien
agggttatgggataatccagctgcc

SEQ ID NO: 2551183 - DNA, 25 bp, Homo sapien
cagtgagggttatgggataatccag

SEQ ID NO: 2551184 - DNA, 25 bp, Homo sapien
gcaccacagtgagggttatgggata

SEQ ID NO: 2551185 - DNA, 25 bp, Homo sapien
gtaatgggataatccggctgcctgg

SEQ ID NO: 2551186 - DNA, 25 bp, Homo sapien
cctgagcaggcctgaacgccagctg

SEQ ID NO: 2551187 - DNA, 25 bp, Homo sapien
atgagacgcctgagcaggcctgaac

SEQ ID NO: 2551188 - DNA, 25 bp, Homo sapien
gacgcctgagcaggcctgaacgcca

SEQ ID NO: 2551189 - DNA, 25 bp, Homo sapien
tgagacgcctgagcaggcctgaacg

SEQ ID NO: 2551190 - DNA, 25 bp, Homo sapien
tatgccgcggtgactttggactcag

SEQ ID NO: 2551191 - DNA, 25 bp, Homo sapien
gaggtaccgtctctgtctgcagaaa

SEQ ID NO: 2551192 - DNA, 25 bp, Homo sapien
agatttaacagattggcccctcggg

SEQ ID NO: 2551193 - DNA, 25 bp, Homo sapien
tatcaattacttggacgactcaccg

SEQ ID NO: 2551194 - DNA, 25 bp, Homo sapien
tgtaccaagacagtgaggtcctgca

SEQ ID NO: 2551195 - DNA, 25 bp, Homo sapien
tctggcacccctacaagaggaggtt

SEQ ID NO: 2551196 - DNA, 25 bp, Homo sapien
tcacctgacgctgtcctgatgcggc

SEQ ID NO: 2551197 - DNA, 25 bp, Homo sapien
aagactccttacttagcccacagtg

SEQ ID NO: 2551198 - DNA, 25 bp, Homo sapien
gtttgagaatggaactggccacgtt

SEQ ID NO: 2551199 - DNA, 25 bp, Homo sapien
gcatgagctttgcactcacagcagt

SEQ ID NO: 2551200 - DNA, 25 bp, Homo sapien
agagtccagtctgagacggcacagg

SEQ ID NO: 2551201 - DNA, 25 bp, Homo sapien
cagaatcagaggaggcaccggagac

SEQ ID NO: 2551202 - DNA, 25 bp, Homo sapien
tttagaggtggggtctctgtcatcc

SEQ ID NO: 2551203 - DNA, 25 bp, Homo sapien
gtggcaccattacagctcacggcag

SEQ ID NO: 2551204 - DNA, 25 bp, Homo sapien
gcctcaaccacccggcctcaagcga

SEQ ID NO: 2551205 - DNA, 25 bp, Homo sapien
acggcagcctcaaccacccggcctc

SEQ ID NO: 2551206 - DNA, 25 bp, Homo sapien
cacacgtgggtgttgaaatcctgac

SEQ ID NO: 2551207 - DNA, 25 bp, Homo sapien
aaactccgggtgctggaattcccag

SEQ ID NO: 2551208 - DNA, 25 bp, Homo sapien
tcccagacaataaagcagcggtgcg

SEQ ID NO: 2551209 - DNA, 25 bp, Homo sapien
tgaagcataaacaggcaccgtggag

SEQ ID NO: 2551210 - DNA, 25 bp, Homo sapien
tgcctgagaagtcaaccgtccttgc

SEQ ID NO: 2551211 - DNA, 25 bp, Homo sapien
tttccagacggtgggagctcagacc

SEQ ID NO: 2551212 - DNA, 25 bp, Homo sapien
gctggcgaagctaggcgtttgaacc

SEQ ID NO: 2551213 - DNA, 25 bp, Homo sapien
gtttgtgcacaggaagcacccaccg

SEQ ID NO: 2551214 - DNA, 25 bp, Homo sapien
aaactttcacttgtggctcactggg

SEQ ID NO: 2551215 - DNA, 25 bp, Homo sapien
tccatcaggaacacggcgagatctg

SEQ ID NO: 2551216 - DNA, 25 bp, Homo sapien
gattcagtggatccgctgcatccag

SEQ ID NO: 2551217 - DNA, 25 bp, Homo sapien
gaatctgaggcctctagaccaacag

SEQ ID NO: 2551218 - DNA, 25 bp, Homo sapien
gagtgaagcatcttggagtcacccc

SEQ ID NO: 2551219 - DNA, 25 bp, Homo sapien
gaagttgccttcttaagacctcaac

SEQ ID NO: 2551220 - DNA, 25 bp, Homo sapien
ctcccggtccagcacacagagtgaa

SEQ ID NO: 2551221 - DNA, 25 bp, Homo sapien
gaccccacctcacaatggaagattg

SEQ ID NO: 2551222 - DNA, 25 bp, Homo sapien
tcgcccgtagcccaggcgctggcgc

SEQ ID NO: 2551223 - DNA, 25 bp, Homo sapien
cgtaggtgagccacgcggcgcagct

SEQ ID NO: 2551224 - DNA, 25 bp, Homo sapien
gcgctggcgcagcgcgcgtccctgg

SEQ ID NO: 2551225 - DNA, 25 bp, Homo sapien
cccaggtgcacgtaggtgagccacg

SEQ ID NO: 2551226 - DNA, 25 bp, Homo sapien
tgcaggtggcacatgaggcctgtct

SEQ ID NO: 2551227 - DNA, 25 bp, Homo sapien
ggtggcacatgaggcctgtctcggg

SEQ ID NO: 2551228 - DNA, 25 bp, Homo sapien
caggtggcacatgaggcctgtctcg

SEQ ID NO: 2551229 - DNA, 25 bp, Homo sapien
ggcacatgaggcctgtctcgggccc

SEQ ID NO: 2551230 - DNA, 25 bp, Homo sapien
cctctgtgtggatggcgcagcgtgg

SEQ ID NO: 2551231 - DNA, 25 bp, Homo sapien
gtgtggatggcgcagcgtggacccc

SEQ ID NO: 2551232 - DNA, 25 bp, Homo sapien
cggccgtcggtctcactggtcagct

SEQ ID NO: 2551233 - DNA, 25 bp, Homo sapien
cttgctcctcttcacggctctcact

SEQ ID NO: 2551234 - DNA, 25 bp, Homo sapien
aacagcatgtctaggtcccgacctt

SEQ ID NO: 2551235 - DNA, 25 bp, Homo sapien
cagcatgtctaggtcccgaccttcg

SEQ ID NO: 2551236 - DNA, 25 bp, Homo sapien
tcctcccgccatgggggtgtctgat

SEQ ID NO: 2551237 - DNA, 25 bp, Homo sapien
gcatgtctaggtcccgaccttcggg

SEQ ID NO: 2551238 - DNA, 25 bp, Homo sapien
ctcccagcccattacaggccgagcc

SEQ ID NO: 2551239 - DNA, 25 bp, Homo sapien
cctcccagcccattacaggccgagc

SEQ ID NO: 2551240 - DNA, 25 bp, Homo sapien
cccagcccattacaggccgagccag

SEQ ID NO: 2551241 - DNA, 25 bp, Homo sapien
tcccagcccattacaggccgagcca

SEQ ID NO: 2551242 - DNA, 25 bp, Homo sapien
ctcaaacacgtgcaggttcacctgc

SEQ ID NO: 2551243 - DNA, 25 bp, Homo sapien
tgagggaacagcgggaagtgcaggt

SEQ ID NO: 2551244 - DNA, 25 bp, Homo sapien
tcaaacacgtgcaggttcacctgcc

SEQ ID NO: 2551245 - DNA, 25 bp, Homo sapien
aacagcgggaagtgcaggttcctcc

SEQ ID NO: 2551246 - DNA, 25 bp, Homo sapien
tgttgctgtcgaagccccctgcgtg

SEQ ID NO: 2551247 - DNA, 25 bp, Homo sapien
gactgttgctgtcgaagccccctgc

SEQ ID NO: 2551248 - DNA, 25 bp, Homo sapien
ccccctgcgtgccctgcccacccgg

SEQ ID NO: 2551249 - DNA, 25 bp, Homo sapien
gttgctgtcgaagccccctgcgtgc

SEQ ID NO: 2551250 - DNA, 25 bp, Homo sapien
ggagtccatagttcttccacttggg

SEQ ID NO: 2551251 - DNA, 25 bp, Homo sapien
gtccctcgccgggtggatgaaacca

SEQ ID NO: 2551252 - DNA, 25 bp, Homo sapien
ccaacttcttcacggtggtgcgcgt

SEQ ID NO: 2551253 - DNA, 25 bp, Homo sapien
gatgaaaccaaaaatacggagtcca

SEQ ID NO: 2551254 - DNA, 25 bp, Homo sapien
gggtggagcctcacggcacccctcc

SEQ ID NO: 2551255 - DNA, 25 bp, Homo sapien
ctcaggggggtggagcctcacggca

SEQ ID NO: 2551256 - DNA, 25 bp, Homo sapien
caggggggtggagcctcacggcacc

SEQ ID NO: 2551257 - DNA, 25 bp, Homo sapien
tccacaagactaggctcaggggggt

SEQ ID NO: 2551258 - DNA, 25 bp, Homo sapien
tgaggccacagaaaactggacgtct

SEQ ID NO: 2551259 - DNA, 25 bp, Homo sapien
ctgaggccacagaaaactggacgtc

SEQ ID NO: 2551260 - DNA, 25 bp, Homo sapien
gaggccacagaaaactggacgtctc

SEQ ID NO: 2551261 - DNA, 25 bp, Homo sapien
agcagggctctcgtccagactcagc

SEQ ID NO: 2551262 - DNA, 25 bp, Homo sapien
gcagggctctcgtccagactcagcc

SEQ ID NO: 2551263 - DNA, 25 bp, Homo sapien
cagggctctcgtccagactcagcca

SEQ ID NO: 2551264 - DNA, 25 bp, Homo sapien
gtgaattctccaggcgctgtccact

SEQ ID NO: 2551265 - DNA, 25 bp, Homo sapien
tggacacctgggagctgaacttggt

SEQ ID NO: 2551266 - DNA, 25 bp, Homo sapien
attctccaggcgctgtccactcgga

SEQ ID NO: 2551267 - DNA, 25 bp, Homo sapien
tgaattctccaggcgctgtccactc

SEQ ID NO: 2551268 - DNA, 25 bp, Homo sapien
acttccacgtggtccgagccgcggt

SEQ ID NO: 2551269 - DNA, 25 bp, Homo sapien
gtgcagcaactcaaagtagtacctc

SEQ ID NO: 2551270 - DNA, 25 bp, Homo sapien
tcaaagtagtacctccgggaggcca

SEQ ID NO: 2551271 - DNA, 25 bp, Homo sapien
tccacgtggtccgagccgcggtcgt

SEQ ID NO: 2551272 - DNA, 25 bp, Homo sapien
atctgctttgtcaactttgggacgg

SEQ ID NO: 2551273 - DNA, 25 bp, Homo sapien
tctgctttgtcaactttgggacggg

SEQ ID NO: 2551274 - DNA, 25 bp, Homo sapien
catctgctttgtcaactttgggacg

SEQ ID NO: 2551275 - DNA, 25 bp, Homo sapien
tgctttgtcaactttgggacgggga

SEQ ID NO: 2551276 - DNA, 25 bp, Homo sapien
atgtgagcagagctgatgacctcga

SEQ ID NO: 2551277 - DNA, 25 bp, Homo sapien
agagctgatgacctcgaacttcagg

SEQ ID NO: 2551278 - DNA, 25 bp, Homo sapien
tcaggccgggcaggaaagctcgcca

SEQ ID NO: 2551279 - DNA, 25 bp, Homo sapien
tgagcagagctgatgacctcgaact

SEQ ID NO: 2551280 - DNA, 25 bp, Homo sapien
tgtctgcgctggtctcctcctgcgg

SEQ ID NO: 2551281 - DNA, 25 bp, Homo sapien
tgaggaaaaaggtatccctgggatc

SEQ ID NO: 2551282 - DNA, 25 bp, Homo sapien
atccctgggatctggccgcagcatg

SEQ ID NO: 2551283 - DNA, 25 bp, Homo sapien
gacgtgcgccacgtggtccatcttc

SEQ ID NO: 2551284 - DNA, 25 bp, Homo sapien
ggaggtgcggtcacagggtggctgg

SEQ ID NO: 2551285 - DNA, 25 bp, Homo sapien
aggaggtgcggtcacagggtggctg

SEQ ID NO: 2551286 - DNA, 25 bp, Homo sapien
tctccaggctcgaagattccatgcg

SEQ ID NO: 2551287 - DNA, 25 bp, Homo sapien
gtatctggcgatcgggaagtccttg

SEQ ID NO: 2551288 - DNA, 25 bp, Homo sapien
caggctcgaagattccatgcgtgga

SEQ ID NO: 2551289 - DNA, 25 bp, Homo sapien
caggccctggtatctggcgatcggg

SEQ ID NO: 2551290 - DNA, 25 bp, Homo sapien
gtagaagcacttgttgtccgtctcc

SEQ ID NO: 2551291 - DNA, 25 bp, Homo sapien
tagtcgttgggataaacgaaggaca

SEQ ID NO: 2551292 - DNA, 25 bp, Homo sapien
ttgtccgtctccatgtgggtgaggc

SEQ ID NO: 2551293 - DNA, 25 bp, Homo sapien
cgagtgtagtcgttgggataaacga

SEQ ID NO: 2551294 - DNA, 25 bp, Homo sapien
aggaaggctcggcgctgcacctcgt

SEQ ID NO: 2551295 - DNA, 25 bp, Homo sapien
aagaggaaggctcggcgctgcacct

SEQ ID NO: 2551296 - DNA, 25 bp, Homo sapien
gaaggctcggcgctgcacctcgtct

SEQ ID NO: 2551297 - DNA, 25 bp, Homo sapien
aaggctcggcgctgcacctcgtctt

SEQ ID NO: 2551298 - DNA, 25 bp, Homo sapien
ccaggctgtcgagcagctccccctc

SEQ ID NO: 2551299 - DNA, 25 bp, Homo sapien
aggctgtcgagcagctccccctcgt

SEQ ID NO: 2551300 - DNA, 25 bp, Homo sapien
ctgtcgagcagctccccctcgtcct

SEQ ID NO: 2551301 - DNA, 25 bp, Homo sapien
ggctgtcgagcagctccccctcgtc

SEQ ID NO: 2551302 - DNA, 25 bp, Homo sapien
gcggggcgagggtggctccgggctg

SEQ ID NO: 2551303 - DNA, 25 bp, Homo sapien
cagctcagggcccgggagtgcctgg

SEQ ID NO: 2551304 - DNA, 25 bp, Homo sapien
ctcggcccaagaagagcggcaaagg

SEQ ID NO: 2551305 - DNA, 25 bp, Homo sapien
agaagagcggcaaagggcgggcggc

SEQ ID NO: 2551306 - DNA, 25 bp, Homo sapien
cacgtacacctttgggggcggctgc

SEQ ID NO: 2551307 - DNA, 25 bp, Homo sapien
cgtacacctttgggggcggctgctc

SEQ ID NO: 2551308 - DNA, 25 bp, Homo sapien
ctggtcacgtacacctttgggggcg

SEQ ID NO: 2551309 - DNA, 25 bp, Homo sapien
tcacgtacacctttgggggcggctg

SEQ ID NO: 2551310 - DNA, 25 bp, Homo sapien
gggatgcccgctgtcccggccgcac

SEQ ID NO: 2551311 - DNA, 25 bp, Homo sapien
gcggcgctggggcccggggggatgc

SEQ ID NO: 2551312 - DNA, 25 bp, Homo sapien
gggggatgcccgctgtcccggccgc

SEQ ID NO: 2551313 - DNA, 25 bp, Homo sapien
ctggggcccggggggatgcccgctg

SEQ ID NO: 2551314 - DNA, 25 bp, Homo sapien
gcaggaagacgccagggaagggcgg

SEQ ID NO: 2551315 - DNA, 25 bp, Homo sapien
ggtgcaggaagacgccagggaaggg

SEQ ID NO: 2551316 - DNA, 25 bp, Homo sapien
gggtgcaggaagacgccagggaagg

SEQ ID NO: 2551317 - DNA, 25 bp, Homo sapien
tggggtgcaggaagacgccagggaa

SEQ ID NO: 2551318 - DNA, 25 bp, Homo sapien
caggtcccagcgtgcgcgcctggcc

SEQ ID NO: 2551319 - DNA, 25 bp, Homo sapien
aaggaggtcacgggccgcgcttcgg

SEQ ID NO: 2551320 - DNA, 25 bp, Homo sapien
cgcgcttcggaggacaagtttgagt

SEQ ID NO: 2551321 - DNA, 25 bp, Homo sapien
agtccactgtgggcgccgcaggtcc

SEQ ID NO: 2551322 - DNA, 25 bp, Homo sapien
ctcctcttcgccctccccgggcagc

SEQ ID NO: 2551323 - DNA, 25 bp, Homo sapien
ccccgggcagctgcggcccggacac

SEQ ID NO: 2551324 - DNA, 25 bp, Homo sapien
atcgtcctccccttcctcctcctct

SEQ ID NO: 2551325 - DNA, 25 bp, Homo sapien
tcctcctcttcgccctccccgggca

SEQ ID NO: 2551326 - DNA, 25 bp, Homo sapien
ggttccccgaaacgttgcatcgcag

SEQ ID NO: 2551327 - DNA, 25 bp, Homo sapien
tccatgtactgagcggtcacgtcca

SEQ ID NO: 2551328 - DNA, 25 bp, Homo sapien
gttccagtccgagcgcagcagctcg

SEQ ID NO: 2551329 - DNA, 25 bp, Homo sapien
tgaacgtgcgctgccagtcgatggc

SEQ ID NO: 2551330 - DNA, 25 bp, Homo sapien
tgaggagtccgccaaggccaggacc

SEQ ID NO: 2551331 - DNA, 25 bp, Homo sapien
gccctggcgcgcgttcggccgcccc

SEQ ID NO: 2551332 - DNA, 25 bp, Homo sapien
cctccaaaaccgccctggcgcgcgt

SEQ ID NO: 2551333 - DNA, 25 bp, Homo sapien
gaggagtccgccaaggccaggacct

SEQ ID NO: 2551334 - DNA, 25 bp, Homo sapien
gaggctggacaagtgcccgggcagt

SEQ ID NO: 2551335 - DNA, 25 bp, Homo sapien
acaagtgcccgggcagtcaggacgc

SEQ ID NO: 2551336 - DNA, 25 bp, Homo sapien
ggctggacaagtgcccgggcagtca

SEQ ID NO: 2551337 - DNA, 25 bp, Homo sapien
ggacaagtgcccgggcagtcaggac

SEQ ID NO: 2551338 - DNA, 25 bp, Homo sapien
tcctgacagtctgggaacgcccagg

SEQ ID NO: 2551339 - DNA, 25 bp, Homo sapien
gcaccttcctctgcagtcgggtcct

SEQ ID NO: 2551340 - DNA, 25 bp, Homo sapien
gcagtcgggtcctgacagtctggga

SEQ ID NO: 2551341 - DNA, 25 bp, Homo sapien
ttcctctgcagtcgggtcctgacag

SEQ ID NO: 2551342 - DNA, 25 bp, Homo sapien
gctctgctcgcaaccttccatcaca

SEQ ID NO: 2551343 - DNA, 25 bp, Homo sapien
tctgctcgcaaccttccatcacaca

SEQ ID NO: 2551344 - DNA, 25 bp, Homo sapien
gctctgctcgcaaccttccatcacg

SEQ ID NO: 2551345 - DNA, 25 bp, Homo sapien
tctgctcgcaaccttccatcacgca

SEQ ID NO: 2551346 - DNA, 25 bp, Homo sapien
actcagccgacttggagttggcgga

SEQ ID NO: 2551347 - DNA, 25 bp, Homo sapien
agaaaccttcaggagttagccaccg

SEQ ID NO: 2551348 - DNA, 25 bp, Homo sapien
tcccaggtgacgtttatgacatgcc

SEQ ID NO: 2551349 - DNA, 25 bp, Homo sapien
tagccaccgcccataggacaaggtt

SEQ ID NO: 2551350 - DNA, 25 bp, Homo sapien
tgcaccccgcccgcaaccctggtcc

SEQ ID NO: 2551351 - DNA, 25 bp, Homo sapien
ctgcaccccgcccgcaaccctggtc

SEQ ID NO: 2551352 - DNA, 25 bp, Homo sapien
caaggctcagcggtcagccggtact

SEQ ID NO: 2551353 - DNA, 25 bp, Homo sapien
aaggctcagcggtcagccggtactg

SEQ ID NO: 2551354 - DNA, 25 bp, Homo sapien
tgcaaggctcagcggtcagccggta

SEQ ID NO: 2551355 - DNA, 25 bp, Homo sapien
ctgcaaggctcagcggtcagccggt

SEQ ID NO: 2551356 - DNA, 25 bp, Homo sapien
aagacgtactcggacagtcgcaggc

SEQ ID NO: 2551357 - DNA, 25 bp, Homo sapien
tcacgatgcgcagaagcgcgaagcg

SEQ ID NO: 2551358 - DNA, 25 bp, Homo sapien
tgaagtgaaccatcacgtcctggcg

SEQ ID NO: 2551359 - DNA, 25 bp, Homo sapien
gggttcgggactttctccgtctgca

SEQ ID NO: 2551360 - DNA, 25 bp, Homo sapien
gtgcagcgcagccatgtccgccagg

SEQ ID NO: 2551361 - DNA, 25 bp, Homo sapien
aggacgacgctgaaacgcgagtccc

SEQ ID NO: 2551362 - DNA, 25 bp, Homo sapien
acgtccatatcctcgctctcgaaat

SEQ ID NO: 2551363 - DNA, 25 bp, Homo sapien
tcgctctcgaaatccaccaggacga

SEQ ID NO: 2551364 - DNA, 25 bp, Homo sapien
ggagggcgagtcacaggcacgatct

SEQ ID NO: 2551365 - DNA, 25 bp, Homo sapien
gggagggcgagtcacaggcacgatc

SEQ ID NO: 2551366 - DNA, 25 bp, Homo sapien
ctggggagggcgagtcacaggcacg

SEQ ID NO: 2551367 - DNA, 25 bp, Homo sapien
ggggagggcgagtcacaggcacgat

SEQ ID NO: 2551368 - DNA, 25 bp, Homo sapien
tcccggttcgtctcaggtactggta

SEQ ID NO: 2551369 - DNA, 25 bp, Homo sapien
gcgctcgaagttcccggttcgtctc

SEQ ID NO: 2551370 - DNA, 25 bp, Homo sapien
cagcccggcggagcgctcgaagttc

SEQ ID NO: 2551371 - DNA, 25 bp, Homo sapien
cggagcgctcgaagttcccggttcg

SEQ ID NO: 2551372 - DNA, 25 bp, Homo sapien
ccacgcagtgcttgcggatgccgtc

SEQ ID NO: 2551373 - DNA, 25 bp, Homo sapien
tgtgcaggtcgcagaggaacacgat

SEQ ID NO: 2551374 - DNA, 25 bp, Homo sapien
cttgcggatgccgtccaggatgttg

SEQ ID NO: 2551375 - DNA, 25 bp, Homo sapien
tcaggcgcatgaccacgggcgcgaa

SEQ ID NO: 2551376 - DNA, 25 bp, Homo sapien
aggtgccgggtcccatcaccacggg

SEQ ID NO: 2551377 - DNA, 25 bp, Homo sapien
gggtgctacccttcagaccaggtcc

SEQ ID NO: 2551378 - DNA, 25 bp, Homo sapien
cgtccggtggtactgggtcatgacc

SEQ ID NO: 2551379 - DNA, 25 bp, Homo sapien
aaagcgccgctaggagacctcggga

SEQ ID NO: 2551380 - DNA, 25 bp, Homo sapien
caaagtccgacttgtagatcccaaa

SEQ ID NO: 2551381 - DNA, 25 bp, Homo sapien
cccggtcaaagtccgacttgtagat

SEQ ID NO: 2551382 - DNA, 25 bp, Homo sapien
ctccgtgttcattcctccaacccgg

SEQ ID NO: 2551383 - DNA, 25 bp, Homo sapien
tcggaactcctccgtgttcattcct

SEQ ID NO: 2551384 - DNA, 25 bp, Homo sapien
gtgatagaaattccgcagtcggagc

SEQ ID NO: 2551385 - DNA, 25 bp, Homo sapien
atagaaattccgcagtcggagccgc

SEQ ID NO: 2551386 - DNA, 25 bp, Homo sapien
agtggtgatagaaattccgcagtcg

SEQ ID NO: 2551387 - DNA, 25 bp, Homo sapien
tagaaattccgcagtcggagccgct

SEQ ID NO: 2551388 - DNA, 25 bp, Homo sapien
agacgcccccgtgcgagagcccttc

SEQ ID NO: 2551389 - DNA, 25 bp, Homo sapien
ccccgtgcgagagcccttcctgctg

SEQ ID NO: 2551390 - DNA, 25 bp, Homo sapien
acgcccccgtgcgagagcccttcct

SEQ ID NO: 2551391 - DNA, 25 bp, Homo sapien
caagacgcccccgtgcgagagccct

SEQ ID NO: 2551392 - DNA, 25 bp, Homo sapien
ggtctctcgggaccgagctcaaagc

SEQ ID NO: 2551393 - DNA, 25 bp, Homo sapien
ctgacccgccgtgaaggctgcctct

SEQ ID NO: 2551394 - DNA, 25 bp, Homo sapien
cacgacgcccagtgggccagagagg

SEQ ID NO: 2551395 - DNA, 25 bp, Homo sapien
tgaaaacaatgtcatcgctacagca

SEQ ID NO: 2551396 - DNA, 25 bp, Homo sapien
caggcgactggatgccgctctggtc

SEQ ID NO: 2551397 - DNA, 25 bp, Homo sapien
ttcttccttcggctccaccgcccag

SEQ ID NO: 2551398 - DNA, 25 bp, Homo sapien
tggttcttccttcggctccaccgcc

SEQ ID NO: 2551399 - DNA, 25 bp, Homo sapien
accagcaggacctgtgaagcccaca

SEQ ID NO: 2551400 - DNA, 25 bp, Homo sapien
ggagtgggtcttgcccggctgtggg

SEQ ID NO: 2551401 - DNA, 25 bp, Homo sapien
cctgggagtgggtcttgcccggctg

SEQ ID NO: 2551402 - DNA, 25 bp, Homo sapien
gcctgggagtgggtcttgcccggct

SEQ ID NO: 2551403 - DNA, 25 bp, Homo sapien
tgggagtgggtcttgcccggctgtg

SEQ ID NO: 2551404 - DNA, 25 bp, Homo sapien
catctgtccgtccactacttgttcg

SEQ ID NO: 2551405 - DNA, 25 bp, Homo sapien
tccactgccggcctgttggtcagtc

SEQ ID NO: 2551406 - DNA, 25 bp, Homo sapien
cactacttgttcgttcatcagacga

SEQ ID NO: 2551407 - DNA, 25 bp, Homo sapien
acgagtcccgggctcttgctatgcc

SEQ ID NO: 2551408 - DNA, 25 bp, Homo sapien
ccagaggcaagcgtcctggcgcttc

SEQ ID NO: 2551409 - DNA, 25 bp, Homo sapien
tgttggcgcccacgcttgcaaacct

SEQ ID NO: 2551410 - DNA, 25 bp, Homo sapien
gcaaaccttctgacttgggctccag

SEQ ID NO: 2551411 - DNA, 25 bp, Homo sapien
gcgcttcctgttggcgcccacgctt

SEQ ID NO: 2551412 - DNA, 25 bp, Homo sapien
ctgggcccaggtcgtgggcagagct

SEQ ID NO: 2551413 - DNA, 25 bp, Homo sapien
agagctgccaggtgcgtgcccggag

SEQ ID NO: 2551414 - DNA, 25 bp, Homo sapien
cgtgcccggagttgtgggagggcac

SEQ ID NO: 2551415 - DNA, 25 bp, Homo sapien
gctgggcccaggtcgtgggcagagc

SEQ ID NO: 2551416 - DNA, 25 bp, Homo sapien
ctgggagacaggtttcgtgtggaaa

SEQ ID NO: 2551417 - DNA, 25 bp, Homo sapien
gagacaggtttcgtgtggaaaaatc

SEQ ID NO: 2551418 - DNA, 25 bp, Homo sapien
tgggagacaggtttcgtgtggaaaa

SEQ ID NO: 2551419 - DNA, 25 bp, Homo sapien
ccagctcatcggactggctgattcc

SEQ ID NO: 2551420 - DNA, 25 bp, Homo sapien
ggtgggaacgcccagctcatcggac

SEQ ID NO: 2551421 - DNA, 25 bp, Homo sapien
ccggctcgtggtccggatcccgcca

SEQ ID NO: 2551422 - DNA, 25 bp, Homo sapien
agaggccactgctgacggccgaggt

SEQ ID NO: 2551423 - DNA, 25 bp, Homo sapien
ggttaggaggcagcattaagggtga

SEQ ID NO: 2551424 - DNA, 25 bp, Homo sapien
ctggcgtgagggccgggtcagggtt

SEQ ID NO: 2551425 - DNA, 25 bp, Homo sapien
tggcgtgagggccgggtcagggtta

SEQ ID NO: 2551426 - DNA, 25 bp, Homo sapien
agctccgtccctggaagatttttgc

SEQ ID NO: 2551427 - DNA, 25 bp, Homo sapien
tggaagatttttgccttaatggggc

SEQ ID NO: 2551428 - DNA, 25 bp, Homo sapien
ctagctccgtccctggaagattttt

SEQ ID NO: 2551429 - DNA, 25 bp, Homo sapien
ccctggaagatttttgccttaatgg

SEQ ID NO: 2551430 - DNA, 25 bp, Homo sapien
tcagcgcatgtcaggctggggcagg

SEQ ID NO: 2551431 - DNA, 25 bp, Homo sapien
gagcgggtgtgcagggaagaaccag

SEQ ID NO: 2551432 - DNA, 25 bp, Homo sapien
gggcaggagcgggtgtgcagggaag

SEQ ID NO: 2551433 - DNA, 25 bp, Homo sapien
cagcgcatgtcaggctggggcagga

SEQ ID NO: 2551434 - DNA, 25 bp, Homo sapien
cctacagaggcctccaaaaccctct

SEQ ID NO: 2551435 - DNA, 25 bp, Homo sapien
tctggcttctgggaccctggcacca

SEQ ID NO: 2551436 - DNA, 25 bp, Homo sapien
ctctctggcttctgggaccctggca

SEQ ID NO: 2551437 - DNA, 25 bp, Homo sapien
ctacagaggcctccaaaaccctctc

SEQ ID NO: 2551438 - DNA, 25 bp, Homo sapien
agccgcctgaagacagacgcctgcc

SEQ ID NO: 2551439 - DNA, 25 bp, Homo sapien
ccagagccgcctgaagacagacgcc

SEQ ID NO: 2551440 - DNA, 25 bp, Homo sapien
agagccgcctgaagacagacgcctg

SEQ ID NO: 2551441 - DNA, 25 bp, Homo sapien
cagagccgcctgaagacagacgcct

SEQ ID NO: 2551442 - DNA, 25 bp, Homo sapien
tatcttcacgtcctgtccctcgagg

SEQ ID NO: 2551443 - DNA, 25 bp, Homo sapien
aaacccaactatcttcacgtcctgt

SEQ ID NO: 2551444 - DNA, 25 bp, Homo sapien
aactatcttcacgtcctgtccctcg

SEQ ID NO: 2551445 - DNA, 25 bp, Homo sapien
gccgcctccaaacccaactatcttc

SEQ ID NO: 2551446 - DNA, 25 bp, Homo sapien
agggccgacagcaggaagttaccgt

SEQ ID NO: 2551447 - DNA, 25 bp, Homo sapien
gggccgacagcaggaagttaccgtc

SEQ ID NO: 2551448 - DNA, 25 bp, Homo sapien
cagggccgacagcaggaagttaccg

SEQ ID NO: 2551449 - DNA, 25 bp, Homo sapien
cctcggcgccccggcggtccagctg

SEQ ID NO: 2551450 - DNA, 25 bp, Homo sapien
cagcgccagggagcacacgccggcc

SEQ ID NO: 2551451 - DNA, 25 bp, Homo sapien
cctggacgcgggctgcccgcagccg

SEQ ID NO: 2551452 - DNA, 25 bp, Homo sapien
aggcgggcgcggacctgctcctgga

SEQ ID NO: 2551453 - DNA, 25 bp, Homo sapien
ctgcagggtgtggtactgccccctg

SEQ ID NO: 2551454 - DNA, 25 bp, Homo sapien
ctgagagcgagagctgaagccagcc

SEQ ID NO: 2551455 - DNA, 25 bp, Homo sapien
aggtcttgtccccactcaggccctg

SEQ ID NO: 2551456 - DNA, 25 bp, Homo sapien
actcaggccctgagagcgagagctg

SEQ ID NO: 2551457 - DNA, 25 bp, Homo sapien
agctcagatcgtccccctcgggctg

SEQ ID NO: 2551458 - DNA, 25 bp, Homo sapien
tgcagagctcagatcgtccccctcg

SEQ ID NO: 2551459 - DNA, 25 bp, Homo sapien
agagctcagatcgtccccctcgggc

SEQ ID NO: 2551460 - DNA, 25 bp, Homo sapien
gcagagctcagatcgtccccctcgg

SEQ ID NO: 2551461 - DNA, 25 bp, Homo sapien
ggctgggctgtaggccggcttggcg

SEQ ID NO: 2551462 - DNA, 25 bp, Homo sapien
ctccgactgcagctcagatccacgg

SEQ ID NO: 2551463 - DNA, 25 bp, Homo sapien
gcgctgcccccgttgtgggctgaac

SEQ ID NO: 2551464 - DNA, 25 bp, Homo sapien
gggctgaactcagcctccgactgca

SEQ ID NO: 2551465 - DNA, 25 bp, Homo sapien
ggcatgggaggggtgggctgggcac

SEQ ID NO: 2551466 - DNA, 25 bp, Homo sapien
gtgggcatgggaggggtgggctggg

SEQ ID NO: 2551467 - DNA, 25 bp, Homo sapien
ctggtgggcatgggaggggtgggct

SEQ ID NO: 2551468 - DNA, 25 bp, Homo sapien
catgggaggggtgggctgggcaccc

SEQ ID NO: 2551469 - DNA, 25 bp, Homo sapien
ctctggaatcgctgcagggtccgca

SEQ ID NO: 2551470 - DNA, 25 bp, Homo sapien
ggctaccgtagctgttgaacccatg

SEQ ID NO: 2551471 - DNA, 25 bp, Homo sapien
tctctgcagggttcggtggctaccg

SEQ ID NO: 2551472 - DNA, 25 bp, Homo sapien
accgcgctcatggaaggacacgggc

SEQ ID NO: 2551473 - DNA, 25 bp, Homo sapien
tgcatcgctgtagcacttgtgctgg

SEQ ID NO: 2551474 - DNA, 25 bp, Homo sapien
gcttcttggcggctgcatcgctgta

SEQ ID NO: 2551475 - DNA, 25 bp, Homo sapien
ttgtgctggatgtaggccgctccca

SEQ ID NO: 2551476 - DNA, 25 bp, Homo sapien
catgaggtacttgactgctgagggc

SEQ ID NO: 2551477 - DNA, 25 bp, Homo sapien
cagggggcagcgagtgggtggtcgg

SEQ ID NO: 2551478 - DNA, 25 bp, Homo sapien
gcgagtgggtggtcggggtggtcac

SEQ ID NO: 2551479 - DNA, 25 bp, Homo sapien
gtcaccagggggcagcgagtgggtg

SEQ ID NO: 2551480 - DNA, 25 bp, Homo sapien
cagcgagtgggtggtcggggtggtc

SEQ ID NO: 2551481 - DNA, 25 bp, Homo sapien
cacttcctggttggcgtggttgaag

SEQ ID NO: 2551482 - DNA, 25 bp, Homo sapien
catttttgcgaagctcatcatcctg

SEQ ID NO: 2551483 - DNA, 25 bp, Homo sapien
cgtagatgaggttgcgcatggcacc

SEQ ID NO: 2551484 - DNA, 25 bp, Homo sapien
agcagctcgaagatcccgttctcct

SEQ ID NO: 2551485 - DNA, 25 bp, Homo sapien
aagccggtggcgttgtagaagatct

SEQ ID NO: 2551486 - DNA, 25 bp, Homo sapien
ctctgcctccgaggcgttctgctgg

SEQ ID NO: 2551487 - DNA, 25 bp, Homo sapien
tggtcgctggatgaaaggttccaca

SEQ ID NO: 2551488 - DNA, 25 bp, Homo sapien
gacagggggctcaacaccaggtctg

SEQ ID NO: 2551489 - DNA, 25 bp, Homo sapien
agggcgtccaccagcccgtggcact

SEQ ID NO: 2551490 - DNA, 25 bp, Homo sapien
cgtccagggcgtggttgatagaggt

SEQ ID NO: 2551491 - DNA, 25 bp, Homo sapien
agcccgtggcactcccgcatcttct

SEQ ID NO: 2551492 - DNA, 25 bp, Homo sapien
cttgtcctcgcatttgcccgcgtcc

SEQ ID NO: 2551493 - DNA, 25 bp, Homo sapien
gcgcgggtcagagcggcggcccggg

SEQ ID NO: 2551494 - DNA, 25 bp, Homo sapien
cgcaggacgcacaccgcgttctcca

SEQ ID NO: 2551495 - DNA, 25 bp, Homo sapien
ctctgcggcgtgaagcagcccacga

SEQ ID NO: 2551496 - DNA, 25 bp, Homo sapien
gcggacggcggcatctcgtcgtaga

SEQ ID NO: 2551497 - DNA, 25 bp, Homo sapien
atctcgtcgtagaggcggtaggaca

SEQ ID NO: 2551498 - DNA, 25 bp, Homo sapien
cctgcggtcgcctgccgtgatgttc

SEQ ID NO: 2551499 - DNA, 25 bp, Homo sapien
gtccttggacacctccgcgaaggtg

SEQ ID NO: 2551500 - DNA, 25 bp, Homo sapien
cctccgtcgtgtgccggttgagctc

SEQ ID NO: 2551501 - DNA, 25 bp, Homo sapien
agcgctgcagcagccggttgtacag

SEQ ID NO: 2551502 - DNA, 25 bp, Homo sapien
tggtcggcggtcctgacacggtcta

SEQ ID NO: 2551503 - DNA, 25 bp, Homo sapien
caggtttcggatgaggccagtcagt

SEQ ID NO: 2551504 - DNA, 25 bp, Homo sapien
gttcagaatacgctcctgctccagg

SEQ ID NO: 2551505 - DNA, 25 bp, Homo sapien
tcctagcgttccgagacaggtttcg

SEQ ID NO: 2551506 - DNA, 25 bp, Homo sapien
aaattgacatgtgggtccagcaggg

SEQ ID NO: 2551507 - DNA, 25 bp, Homo sapien
tgcacccctactcctggccacctgg

SEQ ID NO: 2551508 - DNA, 25 bp, Homo sapien
ggccgggggtcagtctgcaccccta

SEQ ID NO: 2551509 - DNA, 25 bp, Homo sapien
gccccagtggtctgaagcccacact

SEQ ID NO: 2551510 - DNA, 25 bp, Homo sapien
ttcggagtccgtcaaaatacagcag

SEQ ID NO: 2551511 - DNA, 25 bp, Homo sapien
cacagctatgatgttgaccagcacc

SEQ ID NO: 2551512 - DNA, 25 bp, Homo sapien
gcttctcgatcaggtggctcaccac

SEQ ID NO: 2551513 - DNA, 25 bp, Homo sapien
caccaggttgttgagcacagctatg

SEQ ID NO: 2551514 - DNA, 25 bp, Homo sapien
agcttgttgtactgccacaggttgg

SEQ ID NO: 2551515 - DNA, 25 bp, Homo sapien
gaagtcacggtggagcttgttgtac

SEQ ID NO: 2551516 - DNA, 25 bp, Homo sapien
tgcccgggaggacttctcactgtcg

SEQ ID NO: 2551517 - DNA, 25 bp, Homo sapien
atgctgcccgggaggacttctcact

SEQ ID NO: 2551518 - DNA, 25 bp, Homo sapien
tctgcccgctgtccctcctgcagtg

SEQ ID NO: 2551519 - DNA, 25 bp, Homo sapien
cagtgtgctgggtgtggcccggacc

SEQ ID NO: 2551520 - DNA, 25 bp, Homo sapien
caaggtcagggtgcatgtctgccca

SEQ ID NO: 2551521 - DNA, 25 bp, Homo sapien
gcttgccctgggctcgggaaacgta

SEQ ID NO: 2551522 - DNA, 25 bp, Homo sapien
aggaagtcctccttccgatagccct

SEQ ID NO: 2551523 - DNA, 25 bp, Homo sapien
tcccagtgctggctatcccaagata

SEQ ID NO: 2551524 - DNA, 25 bp, Homo sapien
tggagctgagtctgtcccttggacg

SEQ ID NO: 2551525 - DNA, 25 bp, Homo sapien
aagccaagtccccagctataagacc

SEQ ID NO: 2551526 - DNA, 25 bp, Homo sapien
tggcccaggaccctcaaagatgcac

SEQ ID NO: 2551527 - DNA, 25 bp, Homo sapien
cctgctgctgagagggtgctcagcc

SEQ ID NO: 2551528 - DNA, 25 bp, Homo sapien
gaaagcctgctgctgagagggtgct

SEQ ID NO: 2551529 - DNA, 25 bp, Homo sapien
tggcagccctccacaatgaagccct

SEQ ID NO: 2551530 - DNA, 25 bp, Homo sapien
gggccgggaggctggatggcagccc

SEQ ID NO: 2551531 - DNA, 25 bp, Homo sapien
tgcagtgtggggagaaccttcttga

SEQ ID NO: 2551532 - DNA, 25 bp, Homo sapien
gagcccaaggcccaccatcacccaa

SEQ ID NO: 2551533 - DNA, 25 bp, Homo sapien
ccaaggcccaccatcacccaaggct

SEQ ID NO: 2551534 - DNA, 25 bp, Homo sapien
tcttgaggggcttccaaggacccac

SEQ ID NO: 2551535 - DNA, 25 bp, Homo sapien
ttcatgctcaccctggacggtggac

SEQ ID NO: 2551536 - DNA, 25 bp, Homo sapien
cctgagagatggtgacgctgagacc

SEQ ID NO: 2551537 - DNA, 25 bp, Homo sapien
ggagctggcgctttctaagaacctc

SEQ ID NO: 2551538 - DNA, 25 bp, Homo sapien
attctgggcgcctcggaagagctgt

SEQ ID NO: 2551539 - DNA, 25 bp, Homo sapien
cccacgtgcaggtgcggttcgtctg

SEQ ID NO: 2551540 - DNA, 25 bp, Homo sapien
cacaaaataacccatcgtgccgttt

SEQ ID NO: 2551541 - DNA, 25 bp, Homo sapien
cccacgtgtgggtgcggttcatctg

SEQ ID NO: 2551542 - DNA, 25 bp, Homo sapien
gaaaccgaggccactcgtaacagac

SEQ ID NO: 2551543 - DNA, 25 bp, Homo sapien
cagcctctctgtggtacatcgtgta

SEQ ID NO: 2551544 - DNA, 25 bp, Homo sapien
tttgttaggttatcgtagcatgaag

SEQ ID NO: 2551545 - DNA, 25 bp, Homo sapien
gaattgactgttcatattatcggag

SEQ ID NO: 2551546 - DNA, 25 bp, Homo sapien
ataatcatggtatgttttactttgc

SEQ ID NO: 2551547 - DNA, 25 bp, Homo sapien
cacctgtctggctgtgtgtgtcggc

SEQ ID NO: 2551548 - DNA, 25 bp, Homo sapien
tgtgttggggggactccacctgtct

SEQ ID NO: 2551549 - DNA, 25 bp, Homo sapien
gctacacctggcagccctagtgctt

SEQ ID NO: 2551550 - DNA, 25 bp, Homo sapien
gcttctgccttgtccgagggagcag

SEQ ID NO: 2551551 - DNA, 25 bp, Homo sapien
cctggtcctgtaggctggtggctgt

SEQ ID NO: 2551552 - DNA, 25 bp, Homo sapien
gtggtccgtaaacactggccctgga

SEQ ID NO: 2551553 - DNA, 25 bp, Homo sapien
cggtgggtgtggctccgtaaacact

SEQ ID NO: 2551554 - DNA, 25 bp, Homo sapien
tggccctggagacggatggacagat

SEQ ID NO: 2551555 - DNA, 25 bp, Homo sapien
catctcactgtggataaaccgaaca

SEQ ID NO: 2551556 - DNA, 25 bp, Homo sapien
gcccatacatagtttcccggaggtg

SEQ ID NO: 2551557 - DNA, 25 bp, Homo sapien
ggtggggcccatggactggggacat

SEQ ID NO: 2551558 - DNA, 25 bp, Homo sapien
atctcactgtggataaaccgaacag

SEQ ID NO: 2551559 - DNA, 25 bp, Homo sapien
ctggggggatgtgcgtcgtgggacc

SEQ ID NO: 2551560 - DNA, 25 bp, Homo sapien
tggggggatgtgcgtcgtgggaccc

SEQ ID NO: 2551561 - DNA, 25 bp, Homo sapien
ctcaggaggagatgaggcccaaaca

SEQ ID NO: 2551562 - DNA, 25 bp, Homo sapien
tcaggaggagatgaggcccaaacac

SEQ ID NO: 2551563 - DNA, 25 bp, Homo sapien
gctgcacgcaggtcgctccgtcagt

SEQ ID NO: 2551564 - DNA, 25 bp, Homo sapien
gatggacgggcacacggatgggtga

SEQ ID NO: 2551565 - DNA, 25 bp, Homo sapien
acgcaggtcgctccgtcagtgtctg

SEQ ID NO: 2551566 - DNA, 25 bp, Homo sapien
acgaacgccacgcactgcctgggag

SEQ ID NO: 2551567 - DNA, 25 bp, Homo sapien
ggagctgcagagtggccggcgggct

SEQ ID NO: 2551568 - DNA, 25 bp, Homo sapien
tgctggattccgattctgggggtgg

SEQ ID NO: 2551569 - DNA, 25 bp, Homo sapien
tctgctccccaaggaccccgcccag

SEQ ID NO: 2551570 - DNA, 25 bp, Homo sapien
ggattccgattctgggggtgggcgc

SEQ ID NO: 2551571 - DNA, 25 bp, Homo sapien
ctaagggggagcgggctgtgggcac

SEQ ID NO: 2551572 - DNA, 25 bp, Homo sapien
cagacctggcagctttgccttgcag

SEQ ID NO: 2551573 - DNA, 25 bp, Homo sapien
ctgctgctgaggaccccagacctgg

SEQ ID NO: 2551574 - DNA, 25 bp, Homo sapien
aggaccccagacctggcagctttgc

SEQ ID NO: 2551575 - DNA, 25 bp, Homo sapien
ggcagctttgccttgcagctggccc

SEQ ID NO: 2551576 - DNA, 25 bp, Homo sapien
cagagtcctgaacacgagatggaga

SEQ ID NO: 2551577 - DNA, 25 bp, Homo sapien
gagtcctgaacacgagatggagagg

SEQ ID NO: 2551578 - DNA, 25 bp, Homo sapien
tcctgaacacgagatggagagggcc

SEQ ID NO: 2551579 - DNA, 25 bp, Homo sapien
gtcctgaacacgagatggagagggc

SEQ ID NO: 2551580 - DNA, 25 bp, Homo sapien
tggatgctggctccgccccgactac

SEQ ID NO: 2551581 - DNA, 25 bp, Homo sapien
tggctccgccccgactacacccagg

SEQ ID NO: 2551582 - DNA, 25 bp, Homo sapien
gcctggatgctggctccgccccgac

SEQ ID NO: 2551583 - DNA, 25 bp, Homo sapien
gctccgccccgactacacccaggcg

SEQ ID NO: 2551584 - DNA, 25 bp, Homo sapien
ctgatcgtaagggaacttccacgct

SEQ ID NO: 2551585 - DNA, 25 bp, Homo sapien
gaacttccacgctgggtgaggccag

SEQ ID NO: 2551586 - DNA, 25 bp, Homo sapien
aagctggatatgctggctttacagc

SEQ ID NO: 2551587 - DNA, 25 bp, Homo sapien
tcactgatcgtaagggaacttccac

SEQ ID NO: 2551588 - DNA, 25 bp, Homo sapien
tagctctcgctggctttgtcacccg

SEQ ID NO: 2551589 - DNA, 25 bp, Homo sapien
ggaccgctccacgggtggctgccat

SEQ ID NO: 2551590 - DNA, 25 bp, Homo sapien
ctttgtcacccggaccgctccacgg

SEQ ID NO: 2551591 - DNA, 25 bp, Homo sapien
ctgggcgctccctagctctcgctgg

SEQ ID NO: 2551592 - DNA, 25 bp, Homo sapien
tggacgagtctgctcgtccagacac

SEQ ID NO: 2551593 - DNA, 25 bp, Homo sapien
gcagtgcctggacgagtctgctcgt

SEQ ID NO: 2551594 - DNA, 25 bp, Homo sapien
tgagcagtgcctggacgagtctgct

SEQ ID NO: 2551595 - DNA, 25 bp, Homo sapien
acgagtctgctcgtccagacactgt

SEQ ID NO: 2551596 - DNA, 25 bp, Homo sapien
ggggaggcagcaaggagacagagtt

SEQ ID NO: 2551597 - DNA, 25 bp, Homo sapien
ggaggcagcaaggagacagagttgt

SEQ ID NO: 2551598 - DNA, 25 bp, Homo sapien
aggcagcaaggagacagagttgtcc

SEQ ID NO: 2551599 - DNA, 25 bp, Homo sapien
ctggaggtgttggggaggcagcaag

SEQ ID NO: 2551600 - DNA, 25 bp, Homo sapien
cagcaggactgctccccaagtcaag

SEQ ID NO: 2551601 - DNA, 25 bp, Homo sapien
ctccccaagtcaagatggttaaggc

SEQ ID NO: 2551602 - DNA, 25 bp, Homo sapien
tgtgcccgggagttttctctggctt

SEQ ID NO: 2551603 - DNA, 25 bp, Homo sapien
cttgttggagggagcgtggacagca

SEQ ID NO: 2551604 - DNA, 25 bp, Homo sapien
acgtcgcgggttggacgcagtgctt

SEQ ID NO: 2551605 - DNA, 25 bp, Homo sapien
tgggccttgtggtccgacgtcgcgg

SEQ ID NO: 2551606 - DNA, 25 bp, Homo sapien
ggatgacgcctggttgctgggaaac

SEQ ID NO: 2551607 - DNA, 25 bp, Homo sapien
ccagtaaagggtgtgcggtgcattg

SEQ ID NO: 2551608 - DNA, 25 bp, Homo sapien
gcgtttcggcccggagccactccgc

SEQ ID NO: 2551609 - DNA, 25 bp, Homo sapien
cggcgtccctgcgctcgcccctccg

SEQ ID NO: 2551610 - DNA, 25 bp, Homo sapien
tggcttggccggcagacggcccgtc

SEQ ID NO: 2551611 - DNA, 25 bp, Homo sapien
ccgtcgtcgtagacctcggactcgg

SEQ ID NO: 2551612 - DNA, 25 bp, Homo sapien
aggtgttggtgccgtcgtcgtagac

SEQ ID NO: 2551613 - DNA, 25 bp, Homo sapien
tcgtagacctcggactcggtgctgc

SEQ ID NO: 2551614 - DNA, 25 bp, Homo sapien
tcgtgcagccgcaagcactgaggag

SEQ ID NO: 2551615 - DNA, 25 bp, Homo sapien
cacaggcagaatgacgggggacaca

SEQ ID NO: 2551616 - DNA, 25 bp, Homo sapien
aagatgatttcgtgcagccgcaagc

SEQ ID NO: 2551617 - DNA, 25 bp, Homo sapien
gtttctggggtgacgctggaggcgg

SEQ ID NO: 2551618 - DNA, 25 bp, Homo sapien
gattcgacgaacaccgactacattc

SEQ ID NO: 2551619 - DNA, 25 bp, Homo sapien
gaaacagagcctggattcgacgaac

SEQ ID NO: 2551620 - DNA, 25 bp, Homo sapien
gagagaaacagagcctggattcgac

SEQ ID NO: 2551621 - DNA, 25 bp, Homo sapien
gagcctggattcgacgaacaccgac

SEQ ID NO: 2551622 - DNA, 25 bp, Homo sapien
ctagggctgagttgtgcagggagga

SEQ ID NO: 2551623 - DNA, 25 bp, Homo sapien
ccattaaaggcagagtggcggacag

SEQ ID NO: 2551624 - DNA, 25 bp, Homo sapien
ttccacccccattaaaggcagagtg

SEQ ID NO: 2551625 - DNA, 25 bp, Homo sapien
gaccccaaggtgtagctagggctga

SEQ ID NO: 2551626 - DNA, 25 bp, Homo sapien
agcatcggcaaagggccagcccagg

SEQ ID NO: 2551627 - DNA, 25 bp, Homo sapien
cacagaggagcatcggcaaagggcc

SEQ ID NO: 2551628 - DNA, 25 bp, Homo sapien
aggagcatcggcaaagggccagccc

SEQ ID NO: 2551629 - DNA, 25 bp, Homo sapien
tcacagaggagcatcggcaaagggc

SEQ ID NO: 2551630 - DNA, 25 bp, Homo sapien
tcctctcacgaagcctgctttcagg

SEQ ID NO: 2551631 - DNA, 25 bp, Homo sapien
accctcctctcacgaagcctgcttt

SEQ ID NO: 2551632 - DNA, 25 bp, Homo sapien
ctttcaggtcgacggcttgatcctt

SEQ ID NO: 2551633 - DNA, 25 bp, Homo sapien
tcaagaagagccaaaccctcctctc

SEQ ID NO: 2551634 - DNA, 25 bp, Homo sapien
tcagagactccggtggtccccagct

SEQ ID NO: 2551635 - DNA, 25 bp, Homo sapien
cagggcccggaagccagagggtcca

SEQ ID NO: 2551636 - DNA, 25 bp, Homo sapien
tctccagagcttcggctgcggtgac

SEQ ID NO: 2551637 - DNA, 25 bp, Homo sapien
ccccaaaggagagctcggatgccct

SEQ ID NO: 2551638 - DNA, 25 bp, Homo sapien
tagcccagggaaacgctgatcattg

SEQ ID NO: 2551639 - DNA, 25 bp, Homo sapien
gcacgacgtctacacatcttggaag

SEQ ID NO: 2551640 - DNA, 25 bp, Homo sapien
taaggtccgtattagtgagctccag

SEQ ID NO: 2551641 - DNA, 25 bp, Homo sapien
gacagagtgccgctcaagatagcat

SEQ ID NO: 2551642 - DNA, 25 bp, Homo sapien
catgaacaaacgaggagcagcactg

SEQ ID NO: 2551643 - DNA, 25 bp, Homo sapien
gctggcaacgacctcaacgtggata

SEQ ID NO: 2551644 - DNA, 25 bp, Homo sapien
ggtcaccgtgaaagcaaatccaagc

SEQ ID NO: 2551645 - DNA, 25 bp, Homo sapien
gaaaagtgaggcctatgctacgtct

SEQ ID NO: 2551646 - DNA, 25 bp, Homo sapien
gagacctagttcctacatccatcgg

SEQ ID NO: 2551647 - DNA, 25 bp, Homo sapien
gcatgaccatctgcaaatggaggca

SEQ ID NO: 2551648 - DNA, 25 bp, Homo sapien
taaaactttgtaggctgcacgcgtc

SEQ ID NO: 2551649 - DNA, 25 bp, Homo sapien
catccatcggagtgtgtcctcggag

SEQ ID NO: 2551650 - DNA, 25 bp, Homo sapien
aggaggaggcagggcgctccctttg

SEQ ID NO: 2551651 - DNA, 25 bp, Homo sapien
gaggcagggcgctccctttgcagtc

SEQ ID NO: 2551652 - DNA, 25 bp, Homo sapien
gaggaggcagggcgctccctttgca

SEQ ID NO: 2551653 - DNA, 25 bp, Homo sapien
ggaggcagggcgctccctttgcagt

SEQ ID NO: 2551654 - DNA, 25 bp, Homo sapien
gaccgctgctagctggagtgagcca

SEQ ID NO: 2551655 - DNA, 25 bp, Homo sapien
ttttcactgcgcaagacaagccgag

SEQ ID NO: 2551656 - DNA, 25 bp, Homo sapien
tggacacgtaaaacacgcgcttttc

SEQ ID NO: 2551657 - DNA, 25 bp, Homo sapien
gctattaagagcaactggacacgta

SEQ ID NO: 2551658 - DNA, 25 bp, Homo sapien
gaagagccccgtgttcctgggaagc

SEQ ID NO: 2551659 - DNA, 25 bp, Homo sapien
aagagccccgtgttcctgggaagct

SEQ ID NO: 2551660 - DNA, 25 bp, Homo sapien
tccaaaaacgcataagcatggtgtc

SEQ ID NO: 2551661 - DNA, 25 bp, Homo sapien
cctagctgggtaactccgagatgac

SEQ ID NO: 2551662 - DNA, 25 bp, Homo sapien
aactggctgcgagtccctagctggg

SEQ ID NO: 2551663 - DNA, 25 bp, Homo sapien
taaatactcacgtaacaggccccaa

SEQ ID NO: 2551664 - DNA, 25 bp, Homo sapien
tgaggatgaagagcacggttaaggt

SEQ ID NO: 2551665 - DNA, 25 bp, Homo sapien
gagcacggttaaggtgtgggctcgc

SEQ ID NO: 2551666 - DNA, 25 bp, Homo sapien
gtgttgtaggccgtgtcctgaggtg

SEQ ID NO: 2551667 - DNA, 25 bp, Homo sapien
catagccaagcgtacaggtgaggat

SEQ ID NO: 2551668 - DNA, 25 bp, Homo sapien
cacaggctgccggtcacgtggagat

SEQ ID NO: 2551669 - DNA, 25 bp, Homo sapien
cgagcagtaagggtgccacacccac

SEQ ID NO: 2551670 - DNA, 25 bp, Homo sapien
cgtggagatgacacagactcctggc

SEQ ID NO: 2551671 - DNA, 25 bp, Homo sapien
tgcacatcagacacactcaagggag

SEQ ID NO: 2551672 - DNA, 25 bp, Homo sapien
gcagaggacacacccaaggtctagc

SEQ ID NO: 2551673 - DNA, 25 bp, Homo sapien
ccaaggtctagcctgcctgcctgtg

SEQ ID NO: 2551674 - DNA, 25 bp, Homo sapien
ccacacgcacttctgagactggcgt

SEQ ID NO: 2551675 - DNA, 25 bp, Homo sapien
ctggcgtcagaatccatggaattca

SEQ ID NO: 2551676 - DNA, 25 bp, Homo sapien
agcaggttctaggtgccagcagcag

SEQ ID NO: 2551677 - DNA, 25 bp, Homo sapien
agagcaggttctaggtgccagcagc

SEQ ID NO: 2551678 - DNA, 25 bp, Homo sapien
ccagagcaggttctaggtgccagca

SEQ ID NO: 2551679 - DNA, 25 bp, Homo sapien
agcccagagcaggttctaggtgcca

SEQ ID NO: 2551680 - DNA, 25 bp, Homo sapien
aggacaggtgcaccacggcaatttc

SEQ ID NO: 2551681 - DNA, 25 bp, Homo sapien
tcaggacaggtgcaccacggcaatt

SEQ ID NO: 2551682 - DNA, 25 bp, Homo sapien
ggacaggtgcaccacggcaatttca

SEQ ID NO: 2551683 - DNA, 25 bp, Homo sapien
caggacaggtgcaccacggcaattt

SEQ ID NO: 2551684 - DNA, 25 bp, Homo sapien
ttggttaggttggtctcgatctctt

SEQ ID NO: 2551685 - DNA, 25 bp, Homo sapien
gttggttaggttggtctcgatctct

SEQ ID NO: 2551686 - DNA, 25 bp, Homo sapien
gaggctacacgttcgaggccaacct

SEQ ID NO: 2551687 - DNA, 25 bp, Homo sapien
gtggagcctgcagcgaaccaggatt

SEQ ID NO: 2551688 - DNA, 25 bp, Homo sapien
ttggggaggcgaggctacacgttcg

SEQ ID NO: 2551689 - DNA, 25 bp, Homo sapien
tggctcaggctgtttgttctggcgc

SEQ ID NO: 2551690 - DNA, 25 bp, Homo sapien
gtctggaaaatggcccgtctttagc

SEQ ID NO: 2551691 - DNA, 25 bp, Homo sapien
tagcttgtgtgactccaaaacataa

SEQ ID NO: 2551692 - DNA, 25 bp, Homo sapien
ctttagcttgtgtgactccaaaaca

SEQ ID NO: 2551693 - DNA, 25 bp, Homo sapien
aaatggcccgtctttagcttgtgtg

SEQ ID NO: 2551694 - DNA, 25 bp, Homo sapien
tctccaagcaaggacggccatgggt

SEQ ID NO: 2551695 - DNA, 25 bp, Homo sapien
aaaccatcatgttctgagcgggcca

SEQ ID NO: 2551696 - DNA, 25 bp, Homo sapien
tcacgccttgggataagaagaacct

SEQ ID NO: 2551697 - DNA, 25 bp, Homo sapien
gaatatgtccgtacacgaacgtgtg

SEQ ID NO: 2551698 - DNA, 25 bp, Homo sapien
aaacagctcgtagaccacactcacg

SEQ ID NO: 2551699 - DNA, 25 bp, Homo sapien
tgagaaacagctcgtagaccacact

SEQ ID NO: 2551700 - DNA, 25 bp, Homo sapien
agatgagaaacagctcgtagaccac

SEQ ID NO: 2551701 - DNA, 25 bp, Homo sapien
agaaacagctcgtagaccacactca

SEQ ID NO: 2551702 - DNA, 25 bp, Homo sapien
gaaagaggagcgcaggaagacacat

SEQ ID NO: 2551703 - DNA, 25 bp, Homo sapien
aaatagtaaaagaaagaggagcgca

SEQ ID NO: 2551704 - DNA, 25 bp, Homo sapien
aaagaggagcgcaggaagacacatg

SEQ ID NO: 2551705 - DNA, 25 bp, Homo sapien
ataaatagtaaaagaaagaggagcg

SEQ ID NO: 2551706 - DNA, 25 bp, Homo sapien
gagatctacgaaaaactcacagaaa

SEQ ID NO: 2551707 - DNA, 25 bp, Homo sapien
aatgcagtggcgtgaactgggctca

SEQ ID NO: 2551708 - DNA, 25 bp, Homo sapien
gaatgcagtggcgtgaactgggctc

SEQ ID NO: 2551709 - DNA, 25 bp, Homo sapien
caaggccagtgcccccgtcagcggg

SEQ ID NO: 2551710 - DNA, 25 bp, Homo sapien
gcaaggccagtgcccccgtcagcgg

SEQ ID NO: 2551711 - DNA, 25 bp, Homo sapien
aaggccagtgcccccgtcagcgggg

SEQ ID NO: 2551712 - DNA, 25 bp, Homo sapien
cagcttggggtcaacatactttaga

SEQ ID NO: 2551713 - DNA, 25 bp, Homo sapien
agtttcccccgtagtctctctctgg

SEQ ID NO: 2551714 - DNA, 25 bp, Homo sapien
gaggcagtttcccccgtagtctctc

SEQ ID NO: 2551715 - DNA, 25 bp, Homo sapien
actttagaaactgccggccgtcctg

SEQ ID NO: 2551716 - DNA, 25 bp, Homo sapien
cacgtccacgacagcctagagagca

SEQ ID NO: 2551717 - DNA, 25 bp, Homo sapien
atgagcaccatccagacggacaggg

SEQ ID NO: 2551718 - DNA, 25 bp, Homo sapien
tggcctgtggagaccacgtccacga

SEQ ID NO: 2551719 - DNA, 25 bp, Homo sapien
aggtgctgccgtggcctgtggagac

SEQ ID NO: 2551720 - DNA, 25 bp, Homo sapien
cttcaggtaccagccaagaaagtgc

SEQ ID NO: 2551721 - DNA, 25 bp, Homo sapien
cgcgggaacaaagccatccaacttg

SEQ ID NO: 2551722 - DNA, 25 bp, Homo sapien
agccaagaaagtgcgcgggaacaaa

SEQ ID NO: 2551723 - DNA, 25 bp, Homo sapien
aaagtgcgcgggaacaaagccatcc

SEQ ID NO: 2551724 - DNA, 25 bp, Homo sapien
atccaccagtctcggatcatcaggg

SEQ ID NO: 2551725 - DNA, 25 bp, Homo sapien
ccagcactcgctgaagttgggcagc

SEQ ID NO: 2551726 - DNA, 25 bp, Homo sapien
gaacatcacgctgatgatcatgcac

SEQ ID NO: 2551727 - DNA, 25 bp, Homo sapien
aggctgtactccaggaactcgaaca

SEQ ID NO: 2551728 - DNA, 25 bp, Homo sapien
cgttgcagacgagcacgtccatgat

SEQ ID NO: 2551729 - DNA, 25 bp, Homo sapien
taggtcggaatgttccagaggccct

SEQ ID NO: 2551730 - DNA, 25 bp, Homo sapien
gaggccctgccacttgtacgtcttc

SEQ ID NO: 2551731 - DNA, 25 bp, Homo sapien
tcaagggtcttcatgccgcagtaga

SEQ ID NO: 2551732 - DNA, 25 bp, Homo sapien
ctcctgagccgcacactggacgggc

SEQ ID NO: 2551733 - DNA, 25 bp, Homo sapien
cctcctgagccgcacactggacggg

SEQ ID NO: 2551734 - DNA, 25 bp, Homo sapien
tgctggagcacggacgctgaggctg

SEQ ID NO: 2551735 - DNA, 25 bp, Homo sapien
ctgagccgcacactggacgggcctg

SEQ ID NO: 2551736 - DNA, 25 bp, Homo sapien
ggaggtacgtgggtcagacgccatg

SEQ ID NO: 2551737 - DNA, 25 bp, Homo sapien
ttcataaccaaagcaaccaagggag

SEQ ID NO: 2551738 - DNA, 25 bp, Homo sapien
gagaagcacggaatgatcccacagc

SEQ ID NO: 2551739 - DNA, 25 bp, Homo sapien
taatgacaaagtacctgcaactatt

SEQ ID NO: 2551740 - DNA, 25 bp, Homo sapien
tgcccggctgttctccgaggtctgg

SEQ ID NO: 2551741 - DNA, 25 bp, Homo sapien
tgtgccatcgggcaacagactgttc

SEQ ID NO: 2551742 - DNA, 25 bp, Homo sapien
tgtgccatcggacgagctctgctct

SEQ ID NO: 2551743 - DNA, 25 bp, Homo sapien
gtgccatcgggccacagactctgtt

SEQ ID NO: 2551744 - DNA, 25 bp, Homo sapien
actcgaagcgaacccagctgtacgg

SEQ ID NO: 2551745 - DNA, 25 bp, Homo sapien
gcgtgaactggaaggcgatcctctt

SEQ ID NO: 2551746 - DNA, 25 bp, Homo sapien
gctggaggccggcttccactcgaag

SEQ ID NO: 2551747 - DNA, 25 bp, Homo sapien
aggatgatgccgcacacggccagcc

SEQ ID NO: 2551748 - DNA, 25 bp, Homo sapien
caggtagaacgtgttcagttctgcc

SEQ ID NO: 2551749 - DNA, 25 bp, Homo sapien
cgttcacgaagaagacgagccgcag

SEQ ID NO: 2551750 - DNA, 25 bp, Homo sapien
gcacaaacttcaggtagaacgtgtt

SEQ ID NO: 2551751 - DNA, 25 bp, Homo sapien
tgaagtcgtagatctcacgcatggc

SEQ ID NO: 2551752 - DNA, 25 bp, Homo sapien
aggaagaagcgccagacggtccagg

SEQ ID NO: 2551753 - DNA, 25 bp, Homo sapien
cgccaggacggagccgagggtccag

SEQ ID NO: 2551754 - DNA, 25 bp, Homo sapien
agctccgtggccgtgatggccgcca

SEQ ID NO: 2551755 - DNA, 25 bp, Homo sapien
tgggggtcgtacttcaccacgatga

SEQ ID NO: 2551756 - DNA, 25 bp, Homo sapien
cgttgccgacggtgctgccctggtc

SEQ ID NO: 2551757 - DNA, 25 bp, Homo sapien
cagtgggtgctggtccccgttgccg

SEQ ID NO: 2551758 - DNA, 25 bp, Homo sapien
acttctgccaccgggtctccttgta

SEQ ID NO: 2551759 - DNA, 25 bp, Homo sapien
ctccttgtacctcaatgtgatgtcc

SEQ ID NO: 2551760 - DNA, 25 bp, Homo sapien
tcagtttggagttggtgctccctcg

SEQ ID NO: 2551761 - DNA, 25 bp, Homo sapien
cagtttggagttggtgctccctcgc

SEQ ID NO: 2551762 - DNA, 25 bp, Homo sapien
agtttggagttggtgctccctcgcc

SEQ ID NO: 2551763 - DNA, 25 bp, Homo sapien
tgggaggctcacgaggcagccacgg

SEQ ID NO: 2551764 - DNA, 25 bp, Homo sapien
gggaggctcacgaggcagccacggc

SEQ ID NO: 2551765 - DNA, 25 bp, Homo sapien
ggaggctcacgaggcagccacggcc

SEQ ID NO: 2551766 - DNA, 25 bp, Homo sapien
aggctcacgaggcagccacggccca

SEQ ID NO: 2551767 - DNA, 25 bp, Homo sapien
ggcaaggccgggcacgtggctcctg

SEQ ID NO: 2551768 - DNA, 25 bp, Homo sapien
ccgggcacgtggctcctggtgggac

SEQ ID NO: 2551769 - DNA, 25 bp, Homo sapien
aggccgggcacgtggctcctggtgg

SEQ ID NO: 2551770 - DNA, 25 bp, Homo sapien
cttgagggcaaggccgggcacgtgg

SEQ ID NO: 2551771 - DNA, 25 bp, Homo sapien
cccacggagtgcagaaagggtaccg

SEQ ID NO: 2551772 - DNA, 25 bp, Homo sapien
tgccccagagcatgcccttgccacg

SEQ ID NO: 2551773 - DNA, 25 bp, Homo sapien
agaaagggtaccgagatgtccctgc

SEQ ID NO: 2551774 - DNA, 25 bp, Homo sapien
caggcggccacgcatgtgtacacac

SEQ ID NO: 2551775 - DNA, 25 bp, Homo sapien
cttggagccacggaggcagcatgac

SEQ ID NO: 2551776 - DNA, 25 bp, Homo sapien
tgcctctcagccacggagtgtttgt

SEQ ID NO: 2551777 - DNA, 25 bp, Homo sapien
gaagatgaccctcaccttggagcca

SEQ ID NO: 2551778 - DNA, 25 bp, Homo sapien
tattggttctctttgctcgtgaaga

SEQ ID NO: 2551779 - DNA, 25 bp, Homo sapien
tcttgcccacgggtggacagctgac

SEQ ID NO: 2551780 - DNA, 25 bp, Homo sapien
gggacgctcaccagctttcaaaggt

SEQ ID NO: 2551781 - DNA, 25 bp, Homo sapien
ttcattgcaaagaagctgcctggca

SEQ ID NO: 2551782 - DNA, 25 bp, Homo sapien
tcaaaggtccgatgctgagtcagca

SEQ ID NO: 2551783 - DNA, 25 bp, Homo sapien
aggcgctggcattggagacgacacc

SEQ ID NO: 2551784 - DNA, 25 bp, Homo sapien
ttggagacgacaccaccccacttgg

SEQ ID NO: 2551785 - DNA, 25 bp, Homo sapien
ccttgcgaggcgctggcattggaga

SEQ ID NO: 2551786 - DNA, 25 bp, Homo sapien
cttcctggggtccttgcgaggcgct

SEQ ID NO: 2551787 - DNA, 25 bp, Homo sapien
cccaggttggccgactgcgatgtga

SEQ ID NO: 2551788 - DNA, 25 bp, Homo sapien
agttgccgagcacaggtgtccgtcg

SEQ ID NO: 2551789 - DNA, 25 bp, Homo sapien
cacctgagggtcctgagttgccgag

SEQ ID NO: 2551790 - DNA, 25 bp, Homo sapien
tgtgcagcctgtacgacatttactg

SEQ ID NO: 2551791 - DNA, 25 bp, Homo sapien
tgcttcgggtcggttggattcagtt

SEQ ID NO: 2551792 - DNA, 25 bp, Homo sapien
gtgcttcgggtcggttggattcagt

SEQ ID NO: 2551793 - DNA, 25 bp, Homo sapien
gcttcgggtcggttggattcagttc

SEQ ID NO: 2551794 - DNA, 25 bp, Homo sapien
tattttattgtttgggcaattcctg

SEQ ID NO: 2551795 - DNA, 25 bp, Homo sapien
aattcctggaatccggcctgcttgt

SEQ ID NO: 2551796 - DNA, 25 bp, Homo sapien
aaacgggatgcggacgtcaggcttc

SEQ ID NO: 2551797 - DNA, 25 bp, Homo sapien
gaaggcggctgtacggtggaaaggc

SEQ ID NO: 2551798 - DNA, 25 bp, Homo sapien
tttgaacatgcttcccgagctcagg

SEQ ID NO: 2551799 - DNA, 25 bp, Homo sapien
gaatcgaatatgagtgaccgcggcc

SEQ ID NO: 2551800 - DNA, 25 bp, Homo sapien
ccaaagttttgaggacggccgagcg

SEQ ID NO: 2551801 - DNA, 25 bp, Homo sapien
cttgactgacagaaacggagggtgt

SEQ ID NO: 2551802 - DNA, 25 bp, Homo sapien
aacggctcccacagccgggcgttgg

SEQ ID NO: 2551803 - DNA, 25 bp, Homo sapien
tggcggagaagactcgaacggctcc

SEQ ID NO: 2551804 - DNA, 25 bp, Homo sapien
cattgcggagcttcgctccgggacc

SEQ ID NO: 2551805 - DNA, 25 bp, Homo sapien
gagggtcctccgctctccattgcgg

SEQ ID NO: 2551806 - DNA, 25 bp, Homo sapien
tggctcgagaacgaagtaggccgtc

SEQ ID NO: 2551807 - DNA, 25 bp, Homo sapien
gccagtcgtcccgaggtcagtagct

SEQ ID NO: 2551808 - DNA, 25 bp, Homo sapien
tcgggcttcttgtagacgcgggcct

SEQ ID NO: 2551809 - DNA, 25 bp, Homo sapien
gtcagtagctccagcggtgcgtcag

SEQ ID NO: 2551810 - DNA, 25 bp, Homo sapien
aacactcgggacgaggccgcggctc

SEQ ID NO: 2551811 - DNA, 25 bp, Homo sapien
aaacaaaggcggcagccagtggcca

SEQ ID NO: 2551812 - DNA, 25 bp, Homo sapien
gcaaacgagcccctctaccaaggtc

SEQ ID NO: 2551813 - DNA, 25 bp, Homo sapien
gggtcgcgagctcggcgcaaacgag

SEQ ID NO: 2551814 - DNA, 25 bp, Homo sapien
ctttcaggggctgtggccgcactgt

SEQ ID NO: 2551815 - DNA, 25 bp, Homo sapien
aggggctgtggccgcactgtccagg

SEQ ID NO: 2551816 - DNA, 25 bp, Homo sapien
ttcaggggctgtggccgcactgtcc

SEQ ID NO: 2551817 - DNA, 25 bp, Homo sapien
ggctgtggccgcactgtccaggagg

SEQ ID NO: 2551818 - DNA, 25 bp, Homo sapien
ggcttgaggaagttgggatctcttt

SEQ ID NO: 2551819 - DNA, 25 bp, Homo sapien
ctggtggaaggtcttgtttgtggct

SEQ ID NO: 2551820 - DNA, 25 bp, Homo sapien
ctgaggcttgaggaagttgggatct

SEQ ID NO: 2551821 - DNA, 25 bp, Homo sapien
aggcttgaggaagttgggatctctt

SEQ ID NO: 2551822 - DNA, 25 bp, Homo sapien
caaacggcccaatttcaggttcagc

SEQ ID NO: 2551823 - DNA, 25 bp, Homo sapien
accgcctctgtgggtgagaagcagc

SEQ ID NO: 2551824 - DNA, 25 bp, Homo sapien
tctagctgcgtcaacctcggtagtg

SEQ ID NO: 2551825 - DNA, 25 bp, Homo sapien
agccctgtgttctgcccagttccaa

SEQ ID NO: 2551826 - DNA, 25 bp, Homo sapien
ttgcacagcggacacacgggagctg

SEQ ID NO: 2551827 - DNA, 25 bp, Homo sapien
cctcgtaagcgcgccgcgtcttggg

SEQ ID NO: 2551828 - DNA, 25 bp, Homo sapien
tgccctcgcggctttcggagaagcc

SEQ ID NO: 2551829 - DNA, 25 bp, Homo sapien
cagacagcaggtttttggcggaagg

SEQ ID NO: 2551830 - DNA, 25 bp, Homo sapien
gctgagatgaataaccgacgcggtc

SEQ ID NO: 2551831 - DNA, 25 bp, Homo sapien
catcggtgagtaaatgccggtgttc

SEQ ID NO: 2551832 - DNA, 25 bp, Homo sapien
ttcaggcagcggagtagtcaacagc

SEQ ID NO: 2551833 - DNA, 25 bp, Homo sapien
ggtgcgcattgtgcagcgtttccaa

SEQ ID NO: 2551834 - DNA, 25 bp, Homo sapien
tggcaaaatcccgtccctgccaaaa

SEQ ID NO: 2551835 - DNA, 25 bp, Homo sapien
gaaccaagcggaagtatgcctgact

SEQ ID NO: 2551836 - DNA, 25 bp, Homo sapien
tacttggtgaaatgccagctagacc

SEQ ID NO: 2551837 - DNA, 25 bp, Homo sapien
gatgcctgtctcaaaacgcacaaag

SEQ ID NO: 2551838 - DNA, 25 bp, Homo sapien
gaaaatgtatacagagaatgtcaga

SEQ ID NO: 2551839 - DNA, 25 bp, Homo sapien
cacagccggcacttggcaccggtga

SEQ ID NO: 2551840 - DNA, 25 bp, Homo sapien
cactgtgtctccaactgctccgcac

SEQ ID NO: 2551841 - DNA, 25 bp, Homo sapien
gcacacagccggcacttggcaccgg

SEQ ID NO: 2551842 - DNA, 25 bp, Homo sapien
cctcggacacccactgtgtctccaa

SEQ ID NO: 2551843 - DNA, 25 bp, Homo sapien
cagtgagcgcatctgaagtctgagc

SEQ ID NO: 2551844 - DNA, 25 bp, Homo sapien
ggagctgaccccttgggattctgga

SEQ ID NO: 2551845 - DNA, 25 bp, Homo sapien
tggtctgatgccgaggatacccctg

SEQ ID NO: 2551846 - DNA, 25 bp, Homo sapien
gtctcagccagatttgtgtccaggg

SEQ ID NO: 2551847 - DNA, 25 bp, Homo sapien
ctgcctcttggtcattacggggctg

SEQ ID NO: 2551848 - DNA, 25 bp, Homo sapien
tctggacctgcctcttggtcattac

SEQ ID NO: 2551849 - DNA, 25 bp, Homo sapien
ggacctgcctcttggtcattacggg

SEQ ID NO: 2551850 - DNA, 25 bp, Homo sapien
tgcctcttggtcattacggggctgg

SEQ ID NO: 2551851 - DNA, 25 bp, Homo sapien
tttgtccagggaataccacactcgc

SEQ ID NO: 2551852 - DNA, 25 bp, Homo sapien
agccctctagggctgccgggtgcca

SEQ ID NO: 2551853 - DNA, 25 bp, Homo sapien
gaccagcttccccatcgatagactt

SEQ ID NO: 2551854 - DNA, 25 bp, Homo sapien
gctgcagggacactcccccttttgt

SEQ ID NO: 2551855 - DNA, 25 bp, Homo sapien
ccttcttggcggtgagaggcatcac

SEQ ID NO: 2551856 - DNA, 25 bp, Homo sapien
cgtgaaatgcacctgccaagaatgg

SEQ ID NO: 2551857 - DNA, 25 bp, Homo sapien
tctgtggaccttggaagtagggctc

SEQ ID NO: 2551858 - DNA, 25 bp, Homo sapien
tgtgcttctaccaactaggagggcg

SEQ ID NO: 2551859 - DNA, 25 bp, Homo sapien
tcccaaatgccaccggaaccccagc

SEQ ID NO: 2551860 - DNA, 25 bp, Homo sapien
catcccaaatgccaccggaacccca

SEQ ID NO: 2551861 - DNA, 25 bp, Homo sapien
ggctgtgcacagactgtcttgaaca

SEQ ID NO: 2551862 - DNA, 25 bp, Homo sapien
gaggctgtgcacagactgtcttgaa

SEQ ID NO: 2551863 - DNA, 25 bp, Homo sapien
aaggaggtgcagacggaaggaggag

SEQ ID NO: 2551864 - DNA, 25 bp, Homo sapien
tggaggtgccggatgcaggaaggag

SEQ ID NO: 2551865 - DNA, 25 bp, Homo sapien
ggacatggaggtgccggatgcagga

SEQ ID NO: 2551866 - DNA, 25 bp, Homo sapien
ctcaggacatggaggtgccggatgc

SEQ ID NO: 2551867 - DNA, 25 bp, Homo sapien
cccctgaggagcgatgacggaatat

SEQ ID NO: 2551868 - DNA, 25 bp, Homo sapien
ccatcactgggtcattaagagcaag

SEQ ID NO: 2551869 - DNA, 25 bp, Homo sapien
cagcaaatacttgtcggaggcacca

SEQ ID NO: 2551870 - DNA, 25 bp, Homo sapien
ccagacctgttctggaggacggtaa

SEQ ID NO: 2551871 - DNA, 25 bp, Homo sapien
gcggaagggcagccgggcaaccgga

SEQ ID NO: 2551872 - DNA, 25 bp, Homo sapien
gcgcggaagggcagccgggcaaccg

SEQ ID NO: 2551873 - DNA, 25 bp, Homo sapien
cccgggggcccccagctccgagcat

SEQ ID NO: 2551874 - DNA, 25 bp, Homo sapien
ctgcgcggaagggcagccgggcaac

SEQ ID NO: 2551875 - DNA, 25 bp, Homo sapien
ctaggatgtgcgtctatgtgcttgg

SEQ ID NO: 2551876 - DNA, 25 bp, Homo sapien
tgtggcaacttgtgggtacggttta

SEQ ID NO: 2551877 - DNA, 25 bp, Homo sapien
tgggcacttcgctcccctgtggcaa

SEQ ID NO: 2551878 - DNA, 25 bp, Homo sapien
gcagcgttggaacctcaagtttggg

SEQ ID NO: 2551879 - DNA, 25 bp, Homo sapien
tctcactcgcgttcatgcgtgtccg

SEQ ID NO: 2551880 - DNA, 25 bp, Homo sapien
ctctgactgcgaccgcgcggtggac

SEQ ID NO: 2551881 - DNA, 25 bp, Homo sapien
cagggtttgcctgactgtaaaacgc

SEQ ID NO: 2551882 - DNA, 25 bp, Homo sapien
tgaggccgacggcaaaaggaagcac

SEQ ID NO: 2551883 - DNA, 25 bp, Homo sapien
cccttagcaacggtcgctagggcgg

SEQ ID NO: 2551884 - DNA, 25 bp, Homo sapien
gcaacgggagccaggcctcatttga

SEQ ID NO: 2551885 - DNA, 25 bp, Homo sapien
cgatgcacgtgtcgcgtttcctcgc

SEQ ID NO: 2551886 - DNA, 25 bp, Homo sapien
gtgacgcgccaccaactcgagttgg

SEQ ID NO: 2551887 - DNA, 25 bp, Homo sapien
caagagccccaagcatcagactggt

SEQ ID NO: 2551888 - DNA, 25 bp, Homo sapien
tggaggctgtgggatccaaagaccc

SEQ ID NO: 2551889 - DNA, 25 bp, Homo sapien
tgctagtgccattccctggtgggta

SEQ ID NO: 2551890 - DNA, 25 bp, Homo sapien
tggaaggtgaccatgcaccaaggat

SEQ ID NO: 2551891 - DNA, 25 bp, Homo sapien
tcaggctctgggtgcctcactggcc

SEQ ID NO: 2551892 - DNA, 25 bp, Homo sapien
ctcaggctctgggtgcctcactggc

SEQ ID NO: 2551893 - DNA, 25 bp, Homo sapien
tgggagtgttggagcggggcagtgg

SEQ ID NO: 2551894 - DNA, 25 bp, Homo sapien
gcagatgcacatgtagccacttaga

SEQ ID NO: 2551895 - DNA, 25 bp, Homo sapien
ttttatctgttgaccacgtgtggac

SEQ ID NO: 2551896 - DNA, 25 bp, Homo sapien
cacttagaacgttctggccatggct

SEQ ID NO: 2551897 - DNA, 25 bp, Homo sapien
ggaatccgtgaacaggcagatgcac

SEQ ID NO: 2551898 - DNA, 25 bp, Homo sapien
gttcggttgagggcctgcctcgccc

SEQ ID NO: 2551899 - DNA, 25 bp, Homo sapien
tgttcggttgagggcctgcctcgcc

SEQ ID NO: 2551900 - DNA, 25 bp, Homo sapien
ctggtgttgccccttaaagatgcag

SEQ ID NO: 2551901 - DNA, 25 bp, Homo sapien
cttaaagatgcagacgtctggcggg

SEQ ID NO: 2551902 - DNA, 25 bp, Homo sapien
tgttgccccttaaagatgcagacgt

SEQ ID NO: 2551903 - DNA, 25 bp, Homo sapien
tgccccttaaagatgcagacgtctg

SEQ ID NO: 2551904 - DNA, 25 bp, Homo sapien
ccaagtctgtccctctgactgccag

SEQ ID NO: 2551905 - DNA, 25 bp, Homo sapien
tgctctccaagtctgtccctctgac

SEQ ID NO: 2551906 - DNA, 25 bp, Homo sapien
ctcccgcacccggacgctggaggtg

SEQ ID NO: 2551907 - DNA, 25 bp, Homo sapien
ggtgctccgccgaggcccacgggat

SEQ ID NO: 2551908 - DNA, 25 bp, Homo sapien
caaccgggggtcagcgctggtcctg

SEQ ID NO: 2551909 - DNA, 25 bp, Homo sapien
gggggtcagcgctggtcctggctct

SEQ ID NO: 2551910 - DNA, 25 bp, Homo sapien
ccaaccgggggtcagcgctggtcct

SEQ ID NO: 2551911 - DNA, 25 bp, Homo sapien
ctggctctccccactttagttccat

SEQ ID NO: 2551912 - DNA, 25 bp, Homo sapien
aggctgccctcacgagtgtccacac

SEQ ID NO: 2551913 - DNA, 25 bp, Homo sapien
acatctccagcgtcctcaccagccg

SEQ ID NO: 2551914 - DNA, 25 bp, Homo sapien
agccgaaggtcatccacccgggcca

SEQ ID NO: 2551915 - DNA, 25 bp, Homo sapien
cccaggctgccctcacgagtgtcca

SEQ ID NO: 2551916 - DNA, 25 bp, Homo sapien
ctgtacctgacacagacctcaggtc

SEQ ID NO: 2551917 - DNA, 25 bp, Homo sapien
cctgacacagacctcaggtcagagg

SEQ ID NO: 2551918 - DNA, 25 bp, Homo sapien
gacacagacctcaggtcagaggcca

SEQ ID NO: 2551919 - DNA, 25 bp, Homo sapien
cacagacctcaggtcagaggccaac

SEQ ID NO: 2551920 - DNA, 25 bp, Homo sapien
tggtgtgcggggtgctgagtgcatt

SEQ ID NO: 2551921 - DNA, 25 bp, Homo sapien
gggtgctgagtgcattgccctctgc

SEQ ID NO: 2551922 - DNA, 25 bp, Homo sapien
tgtgcggggtgctgagtgcattgcc

SEQ ID NO: 2551923 - DNA, 25 bp, Homo sapien
tgggggtactggtgtggtgtgcggg

SEQ ID NO: 2551924 - DNA, 25 bp, Homo sapien
tcctctgtgatgctggcgtgggtgt

SEQ ID NO: 2551925 - DNA, 25 bp, Homo sapien
ctctgtgatgctggcgtgggtgtgt

SEQ ID NO: 2551926 - DNA, 25 bp, Homo sapien
cctctgtgatgctggcgtgggtgtg

SEQ ID NO: 2551927 - DNA, 25 bp, Homo sapien
tccgcgcccctcgtctgtagccagc

SEQ ID NO: 2551928 - DNA, 25 bp, Homo sapien
gctccgcgcccctcgtctgtagcca

SEQ ID NO: 2551929 - DNA, 25 bp, Homo sapien
ctccgcgcccctcgtctgtagccag

SEQ ID NO: 2551930 - DNA, 25 bp, Homo sapien
ggctccgcgcccctcgtctgtagcc

SEQ ID NO: 2551931 - DNA, 25 bp, Homo sapien
caaaggggtctgctgattctatggg

SEQ ID NO: 2551932 - DNA, 25 bp, Homo sapien
tggccaccaaaggggtctgctgatt

SEQ ID NO: 2551933 - DNA, 25 bp, Homo sapien
accaaaggggtctgctgattctatg

SEQ ID NO: 2551934 - DNA, 25 bp, Homo sapien
tctgctgattctatggggcctggta

SEQ ID NO: 2551935 - DNA, 25 bp, Homo sapien
gcttcagttggtccaggttgggcag

SEQ ID NO: 2551936 - DNA, 25 bp, Homo sapien
cagcttcagttggtccaggttgggc

SEQ ID NO: 2551937 - DNA, 25 bp, Homo sapien
agcttcagttggtccaggttgggca

SEQ ID NO: 2551938 - DNA, 25 bp, Homo sapien
cttcagttggtccaggttgggcagg

SEQ ID NO: 2551939 - DNA, 25 bp, Homo sapien
aggtgcattcccggtggtccgtcct

SEQ ID NO: 2551940 - DNA, 25 bp, Homo sapien
tgcattcccggtggtccgtcctttc

SEQ ID NO: 2551941 - DNA, 25 bp, Homo sapien
ccctcaggtgcattcccggtggtcc

SEQ ID NO: 2551942 - DNA, 25 bp, Homo sapien
ctcaggtgcattcccggtggtccgt

SEQ ID NO: 2551943 - DNA, 25 bp, Homo sapien
aggtggcccagagacgtgcccaagt

SEQ ID NO: 2551944 - DNA, 25 bp, Homo sapien
gtggcccagagacgtgcccaagtcc

SEQ ID NO: 2551945 - DNA, 25 bp, Homo sapien
tgttgttgtaggaggcgtagagttc

SEQ ID NO: 2551946 - DNA, 25 bp, Homo sapien
ccaggggccggctgtaggcacacca

SEQ ID NO: 2551947 - DNA, 25 bp, Homo sapien
cacagtgggctcaggtccgagatgt

SEQ ID NO: 2551948 - DNA, 25 bp, Homo sapien
gcacagctgcaagtagcgcacctgc

SEQ ID NO: 2551949 - DNA, 25 bp, Homo sapien
tgtgcggccggcacttcgtccagga

SEQ ID NO: 2551950 - DNA, 25 bp, Homo sapien
gggaaggccgttgcccttcttgatg

SEQ ID NO: 2551951 - DNA, 25 bp, Homo sapien
atggcctccttcaccgcaagccagt

SEQ ID NO: 2551952 - DNA, 25 bp, Homo sapien
gccggcacttcgtccaggacctgca

SEQ ID NO: 2551953 - DNA, 25 bp, Homo sapien
tcagaagcagaggtcaccaaggccc

SEQ ID NO: 2551954 - DNA, 25 bp, Homo sapien
agtgcatgagatgtggctatccgtt

SEQ ID NO: 2551955 - DNA, 25 bp, Homo sapien
tggctatccgtttctgagaagcctg

SEQ ID NO: 2551956 - DNA, 25 bp, Homo sapien
gcagccttctagagaggccctcatc

SEQ ID NO: 2551957 - DNA, 25 bp, Homo sapien
cctggaggcccgggactgcgtctca

SEQ ID NO: 2551958 - DNA, 25 bp, Homo sapien
gacagctcggggtcaagtctccgga

SEQ ID NO: 2551959 - DNA, 25 bp, Homo sapien
ccgggactgcgtctcaggcagggac

SEQ ID NO: 2551960 - DNA, 25 bp, Homo sapien
cagctcggggtcaagtctccggatg

SEQ ID NO: 2551961 - DNA, 25 bp, Homo sapien
tgcagggtcagctttgaggcaagtc

SEQ ID NO: 2551962 - DNA, 25 bp, Homo sapien
ggtcagctttgaggcaagtcagtta

SEQ ID NO: 2551963 - DNA, 25 bp, Homo sapien
cagggtcagctttgaggcaagtcag

SEQ ID NO: 2551964 - DNA, 25 bp, Homo sapien
gggtcagctttgaggcaagtcagtt

SEQ ID NO: 2551965 - DNA, 25 bp, Homo sapien
cactggtgcctacgctcccgcaggc

SEQ ID NO: 2551966 - DNA, 25 bp, Homo sapien
gcactggtgcctacgctcccgcagg

SEQ ID NO: 2551967 - DNA, 25 bp, Homo sapien
actggtgcctacgctcccgcaggcc

SEQ ID NO: 2551968 - DNA, 25 bp, Homo sapien
ctggtgcctacgctcccgcaggccc

SEQ ID NO: 2551969 - DNA, 25 bp, Homo sapien
gcaaccctggacactggttctcgtg

SEQ ID NO: 2551970 - DNA, 25 bp, Homo sapien
tcagggccgcaaccctggacactgg

SEQ ID NO: 2551971 - DNA, 25 bp, Homo sapien
gacactggttctcgtggggggctgg

SEQ ID NO: 2551972 - DNA, 25 bp, Homo sapien
aaccctggacactggttctcgtggg

SEQ ID NO: 2551973 - DNA, 25 bp, Homo sapien
caaggccaggaagtcagagctgtct

SEQ ID NO: 2551974 - DNA, 25 bp, Homo sapien
ctggcggccggatctcctggcctgt

SEQ ID NO: 2551975 - DNA, 25 bp, Homo sapien
gaagtgctggcggccggatctcctg

SEQ ID NO: 2551976 - DNA, 25 bp, Homo sapien
ccaaggccaggaagtcagagctgtc

SEQ ID NO: 2551977 - DNA, 25 bp, Homo sapien
cagtggaagagctggagggacaccc

SEQ ID NO: 2551978 - DNA, 25 bp, Homo sapien
gtggaagagctggagggacacccac

SEQ ID NO: 2551979 - DNA, 25 bp, Homo sapien
agtggaagagctggagggacaccca

SEQ ID NO: 2551980 - DNA, 25 bp, Homo sapien
ccagtggaagagctggagggacacc

SEQ ID NO: 2551981 - DNA, 25 bp, Homo sapien
ctacagccccttcctgttgggactc

SEQ ID NO: 2551982 - DNA, 25 bp, Homo sapien
acagccccttcctgttgggactccg

SEQ ID NO: 2551983 - DNA, 25 bp, Homo sapien
tacagccccttcctgttgggactcc

SEQ ID NO: 2551984 - DNA, 25 bp, Homo sapien
cagccccttcctgttgggactccgg

SEQ ID NO: 2551985 - DNA, 25 bp, Homo sapien
cctggtgcacttgctcttcagggac

SEQ ID NO: 2551986 - DNA, 25 bp, Homo sapien
tggtgcacttgctcttcagggaccc

SEQ ID NO: 2551987 - DNA, 25 bp, Homo sapien
ctggtgcacttgctcttcagggacc

SEQ ID NO: 2551988 - DNA, 25 bp, Homo sapien
aggaggccacgaagcctggttctgg

SEQ ID NO: 2551989 - DNA, 25 bp, Homo sapien
caaggaggccacgaagcctggttct

SEQ ID NO: 2551990 - DNA, 25 bp, Homo sapien
ggcaaggaggccacgaagcctggtt

SEQ ID NO: 2551991 - DNA, 25 bp, Homo sapien
aaggaggccacgaagcctggttctg

SEQ ID NO: 2551992 - DNA, 25 bp, Homo sapien
ctgccagaatctcgtggccttgggt

SEQ ID NO: 2551993 - DNA, 25 bp, Homo sapien
tgggtgcttgggaggtgaagggacc

SEQ ID NO: 2551994 - DNA, 25 bp, Homo sapien
ccctggactgcaggtctgtcgacca

SEQ ID NO: 2551995 - DNA, 25 bp, Homo sapien
tgaagggaccaggtgctggctcgag

SEQ ID NO: 2551996 - DNA, 25 bp, Homo sapien
gacatccctgggctcgagggctcag

SEQ ID NO: 2551997 - DNA, 25 bp, Homo sapien
gccctgggaggtctagctgctgcat

SEQ ID NO: 2551998 - DNA, 25 bp, Homo sapien
catccctgggctcgagggctcaggc

SEQ ID NO: 2551999 - DNA, 25 bp, Homo sapien
cctgggaggtctagctgctgcatgt

SEQ ID NO: 2552000 - DNA, 25 bp, Homo sapien
catttattgaaccaacgtggcctac

SEQ ID NO: 2552001 - DNA, 25 bp, Homo sapien
taaaccgcatttctgtacacctgag

SEQ ID NO: 2552002 - DNA, 25 bp, Homo sapien
ggccatgcccaattctagcaggaga

SEQ ID NO: 2552003 - DNA, 25 bp, Homo sapien
tgtgctctgtgaccacatatgtggg

SEQ ID NO: 2552004 - DNA, 25 bp, Homo sapien
tgcccgccatcccgggtgaccccac

SEQ ID NO: 2552005 - DNA, 25 bp, Homo sapien
ctgcccgccatcccgggtgacccca

SEQ ID NO: 2552006 - DNA, 25 bp, Homo sapien
acaggcctgaagatcgtggctgtga

SEQ ID NO: 2552007 - DNA, 25 bp, Homo sapien
atcttcaacccgtcgcaggagagca

SEQ ID NO: 2552008 - DNA, 25 bp, Homo sapien
cgggagaagttcgtccgcatcttca

SEQ ID NO: 2552009 - DNA, 25 bp, Homo sapien
aggtcctcagtgagcaccggatccc

SEQ ID NO: 2552010 - DNA, 25 bp, Homo sapien
atggacccaagcgacctctctgaaa

SEQ ID NO: 2552011 - DNA, 25 bp, Homo sapien
tcaaagcacaggtgaggtcaaagag

SEQ ID NO: 2552012 - DNA, 25 bp, Homo sapien
ttgcaggtagtgacggcagagactc

SEQ ID NO: 2552013 - DNA, 25 bp, Homo sapien
cggtcccctcttgcaggtagtgacg

SEQ ID NO: 2552014 - DNA, 25 bp, Homo sapien
gcatgctacgatcccagactggcag

SEQ ID NO: 2552015 - DNA, 25 bp, Homo sapien
taaccctgcgcatgtggatgggtgc

SEQ ID NO: 2552016 - DNA, 25 bp, Homo sapien
tgacctgacattaggaacccctgcc

SEQ ID NO: 2552017 - DNA, 25 bp, Homo sapien
gaacttgcagaagtcctgcctcctg

SEQ ID NO: 2552018 - DNA, 25 bp, Homo sapien
cgctctgtgagtaagtggtgacgcc

SEQ ID NO: 2552019 - DNA, 25 bp, Homo sapien
gcctggtcagaaacacacgggtgtg

SEQ ID NO: 2552020 - DNA, 25 bp, Homo sapien
ccccacagagcaagagtcggtcagt

SEQ ID NO: 2552021 - DNA, 25 bp, Homo sapien
tatccatggcaacggtatacagccc

SEQ ID NO: 2552022 - DNA, 25 bp, Homo sapien
gtccccccgctaagctgagcagtgg

SEQ ID NO: 2552023 - DNA, 25 bp, Homo sapien
cagtgcccccctatttatcccgctg

SEQ ID NO: 2552024 - DNA, 25 bp, Homo sapien
acacacccatggctatgctgggctg

SEQ ID NO: 2552025 - DNA, 25 bp, Homo sapien
cagggtgttggtcactaagtggtcc

SEQ ID NO: 2552026 - DNA, 25 bp, Homo sapien
gaattcgaggttaacgtgcgctgtc

SEQ ID NO: 2552027 - DNA, 25 bp, Homo sapien
tgattgggttttaatgggtcaggtc

SEQ ID NO: 2552028 - DNA, 25 bp, Homo sapien
tgtggacacggctgggaaaagtgag

SEQ ID NO: 2552029 - DNA, 25 bp, Homo sapien
tgtcactgaggtcaaaggagctgtg

SEQ ID NO: 2552030 - DNA, 25 bp, Homo sapien
tcagaaggcccggactctagctgag

SEQ ID NO: 2552031 - DNA, 25 bp, Homo sapien
cccggactctagctgaggctcttct

SEQ ID NO: 2552032 - DNA, 25 bp, Homo sapien
aggtgcccgctcagaaggcccggac

SEQ ID NO: 2552033 - DNA, 25 bp, Homo sapien
aggctcttctccgacaccttcctgc

SEQ ID NO: 2552034 - DNA, 25 bp, Homo sapien
gtcaccagtcccggcgagggaggtg

SEQ ID NO: 2552035 - DNA, 25 bp, Homo sapien
gctgcagtagtctggacgcgcaggg

SEQ ID NO: 2552036 - DNA, 25 bp, Homo sapien
ccctgcggagctggcgggcgcagag

SEQ ID NO: 2552037 - DNA, 25 bp, Homo sapien
gaggtggagccctgcggagctggcg

SEQ ID NO: 2552038 - DNA, 25 bp, Homo sapien
ctccggcgccgccgcaacctgccgc

SEQ ID NO: 2552039 - DNA, 25 bp, Homo sapien
tctccccagttggagtcggcgtccg

SEQ ID NO: 2552040 - DNA, 25 bp, Homo sapien
cccagacctcgaccctgcagatgga

SEQ ID NO: 2552041 - DNA, 25 bp, Homo sapien
gggcatcgcggaaaactctccccag

SEQ ID NO: 2552042 - DNA, 25 bp, Homo sapien
agcagactccgggtctgagcagccc

SEQ ID NO: 2552043 - DNA, 25 bp, Homo sapien
cactgccccctccccgggcggcgcg

SEQ ID NO: 2552044 - DNA, 25 bp, Homo sapien
ggctcggaggacactgccccctccc

SEQ ID NO: 2552045 - DNA, 25 bp, Homo sapien
ctcggaggacactgccccctccccg

SEQ ID NO: 2552046 - DNA, 25 bp, Homo sapien
ctggctcggaggacactgccccctc

SEQ ID NO: 2552047 - DNA, 25 bp, Homo sapien
tagtgcgatgaccacttcctggcag

SEQ ID NO: 2552048 - DNA, 25 bp, Homo sapien
tattgcttgggctagtgcgatgacc

SEQ ID NO: 2552049 - DNA, 25 bp, Homo sapien
agaccacacgctggatgccatccac

SEQ ID NO: 2552050 - DNA, 25 bp, Homo sapien
gcaggtggtctgctctgagacccca

SEQ ID NO: 2552051 - DNA, 25 bp, Homo sapien
gacatcgctggcaaactgtccgcag

SEQ ID NO: 2552052 - DNA, 25 bp, Homo sapien
cctcaggacaaactggacatcgctg

SEQ ID NO: 2552053 - DNA, 25 bp, Homo sapien
gctttacagggaggctggcacgaat

SEQ ID NO: 2552054 - DNA, 25 bp, Homo sapien
tggcacgaattaggcagcgttccgg

SEQ ID NO: 2552055 - DNA, 25 bp, Homo sapien
gggacacatgagatccttaggaggc

SEQ ID NO: 2552056 - DNA, 25 bp, Homo sapien
ctggggacacatgagatccttagga

SEQ ID NO: 2552057 - DNA, 25 bp, Homo sapien
gacacatgagatccttaggaggcac

SEQ ID NO: 2552058 - DNA, 25 bp, Homo sapien
acatgagatccttaggaggcacagc

SEQ ID NO: 2552059 - DNA, 25 bp, Homo sapien
cactgacggagctctcggttcagct

SEQ ID NO: 2552060 - DNA, 25 bp, Homo sapien
agcgcagccccggtctgctggatga

SEQ ID NO: 2552061 - DNA, 25 bp, Homo sapien
gcaggttgcactgacggagctctcg

SEQ ID NO: 2552062 - DNA, 25 bp, Homo sapien
cgcagccccggtctgctggatgaac

SEQ ID NO: 2552063 - DNA, 25 bp, Homo sapien
ctcccagcctccccccagaaccact

SEQ ID NO: 2552064 - DNA, 25 bp, Homo sapien
ccagcctccccccagaaccactccg

SEQ ID NO: 2552065 - DNA, 25 bp, Homo sapien
tcccagcctccccccagaaccactc

SEQ ID NO: 2552066 - DNA, 25 bp, Homo sapien
cagcctccccccagaaccactccga

SEQ ID NO: 2552067 - DNA, 25 bp, Homo sapien
tgggaagtcagcttggagtggggct

SEQ ID NO: 2552068 - DNA, 25 bp, Homo sapien
gttgggaagtcagcttggagtgggg

SEQ ID NO: 2552069 - DNA, 25 bp, Homo sapien
tgtgggttgggaagtcagcttggag

SEQ ID NO: 2552070 - DNA, 25 bp, Homo sapien
gtgggttgggaagtcagcttggagt

SEQ ID NO: 2552071 - DNA, 25 bp, Homo sapien
ccaggagggactcctctctggctgg

SEQ ID NO: 2552072 - DNA, 25 bp, Homo sapien
caggagggactcctctctggctgga

SEQ ID NO: 2552073 - DNA, 25 bp, Homo sapien
cccaggagggactcctctctggctg

SEQ ID NO: 2552074 - DNA, 25 bp, Homo sapien
cctcggggcctaggctgggcaccag

SEQ ID NO: 2552075 - DNA, 25 bp, Homo sapien
agggggaggtggggcacagacatac

SEQ ID NO: 2552076 - DNA, 25 bp, Homo sapien
agccacaggagggcccggtgcccca

SEQ ID NO: 2552077 - DNA, 25 bp, Homo sapien
cacaggagggcccggtgccccaggg

SEQ ID NO: 2552078 - DNA, 25 bp, Homo sapien
gcagccacaggagggcccggtgccc

SEQ ID NO: 2552079 - DNA, 25 bp, Homo sapien
ctgcgggaggacacaggctgaggtg

SEQ ID NO: 2552080 - DNA, 25 bp, Homo sapien
tgcgggaggacacaggctgaggtgg

SEQ ID NO: 2552081 - DNA, 25 bp, Homo sapien
cagaggacaccactctggggcagga

SEQ ID NO: 2552082 - DNA, 25 bp, Homo sapien
ggctgccagaggacaccactctggg

SEQ ID NO: 2552083 - DNA, 25 bp, Homo sapien
tgggctgccagaggacaccactctg

SEQ ID NO: 2552084 - DNA, 25 bp, Homo sapien
tgccagaggacaccactctggggca

SEQ ID NO: 2552085 - DNA, 25 bp, Homo sapien
gagcacactgtccatgcatctcctg

SEQ ID NO: 2552086 - DNA, 25 bp, Homo sapien
agcacatgcccacagcttgagcaca

SEQ ID NO: 2552087 - DNA, 25 bp, Homo sapien
tggcaagttccgagctggctacgcc

SEQ ID NO: 2552088 - DNA, 25 bp, Homo sapien
ctccttctgtggtccgggcaggatg

SEQ ID NO: 2552089 - DNA, 25 bp, Homo sapien
cctgcccactggtacccataccctc

SEQ ID NO: 2552090 - DNA, 25 bp, Homo sapien
ccctgcccactggtacccataccct

SEQ ID NO: 2552091 - DNA, 25 bp, Homo sapien
ctgcccactggtacccataccctcc

SEQ ID NO: 2552092 - DNA, 25 bp, Homo sapien
agatttagtggacgcctggcatgga

SEQ ID NO: 2552093 - DNA, 25 bp, Homo sapien
ccagacggcgacttactgtgggcca

SEQ ID NO: 2552094 - DNA, 25 bp, Homo sapien
catggactcggactggcctttggaa

SEQ ID NO: 2552095 - DNA, 25 bp, Homo sapien
tcaccactgcgaagtgaggcttggc

SEQ ID NO: 2552096 - DNA, 25 bp, Homo sapien
agacagcgggtggatcctccagcag

SEQ ID NO: 2552097 - DNA, 25 bp, Homo sapien
aatcaggaccgggtcgtgtccgagc

SEQ ID NO: 2552098 - DNA, 25 bp, Homo sapien
gagcttgccttctcaagtctactgt

SEQ ID NO: 2552099 - DNA, 25 bp, Homo sapien
gtgtccgagcctacaggccctgtct

SEQ ID NO: 2552100 - DNA, 25 bp, Homo sapien
gaccatcctccggagggccacctct

SEQ ID NO: 2552101 - DNA, 25 bp, Homo sapien
acaggtgtggtcatatcttcagcca

SEQ ID NO: 2552102 - DNA, 25 bp, Homo sapien
tgtttctgccgcttcagtggggccg

SEQ ID NO: 2552103 - DNA, 25 bp, Homo sapien
gacttcctacgggaagagagtgaca

SEQ ID NO: 2552104 - DNA, 25 bp, Homo sapien
tttgctgccctccgcttggtggggc

SEQ ID NO: 2552105 - DNA, 25 bp, Homo sapien
ttgctgccctccgcttggtggggct

SEQ ID NO: 2552106 - DNA, 25 bp, Homo sapien
aggctgggccagataccctcttgga

SEQ ID NO: 2552107 - DNA, 25 bp, Homo sapien
gaggctgggccagataccctcttgg

SEQ ID NO: 2552108 - DNA, 25 bp, Homo sapien
gcgtgtgacagcggctgatctgtgc

SEQ ID NO: 2552109 - DNA, 25 bp, Homo sapien
gtgtgacagcggctgatctgtgcct

SEQ ID NO: 2552110 - DNA, 25 bp, Homo sapien
cgtgtgacagcggctgatctgtgcc

SEQ ID NO: 2552111 - DNA, 25 bp, Homo sapien
cgcacactgcgctgccccagaccca

SEQ ID NO: 2552112 - DNA, 25 bp, Homo sapien
cccggagtccgatacttccacgtct

SEQ ID NO: 2552113 - DNA, 25 bp, Homo sapien
ccggagtccgatacttccacgtctg

SEQ ID NO: 2552114 - DNA, 25 bp, Homo sapien
cggagtccgatacttccacgtctga

SEQ ID NO: 2552115 - DNA, 25 bp, Homo sapien
cagatgctgagaaaaggtgcctgtg

SEQ ID NO: 2552116 - DNA, 25 bp, Homo sapien
tgcagatgctgagaaaaggtgcctg

SEQ ID NO: 2552117 - DNA, 25 bp, Homo sapien
agaaaaggtgcctgtgaaattggca

SEQ ID NO: 2552118 - DNA, 25 bp, Homo sapien
aaaggtgcctgtgaaattggcagga

SEQ ID NO: 2552119 - DNA, 25 bp, Homo sapien
gggcaatgagcccagtcatcgcccc

SEQ ID NO: 2552120 - DNA, 25 bp, Homo sapien
atgagcccagtcatcgccccctgct

SEQ ID NO: 2552121 - DNA, 25 bp, Homo sapien
cccctgctgagacccatcccactcc

SEQ ID NO: 2552122 - DNA, 25 bp, Homo sapien
catcaggtccgtgtgcacatacagg

SEQ ID NO: 2552123 - DNA, 25 bp, Homo sapien
cctggtcgacactgccgtgtgctgc

SEQ ID NO: 2552124 - DNA, 25 bp, Homo sapien
tgccccttgcagacgccaagcatgg

SEQ ID NO: 2552125 - DNA, 25 bp, Homo sapien
gctccggccagattcctggtcgaca

SEQ ID NO: 2552126 - DNA, 25 bp, Homo sapien
gacgccaagcatggtgtgcatgctc

SEQ ID NO: 2552127 - DNA, 25 bp, Homo sapien
ccgtcccgtgtggatttggctccag

SEQ ID NO: 2552128 - DNA, 25 bp, Homo sapien
tctgaacaaacactgccggagccct

SEQ ID NO: 2552129 - DNA, 25 bp, Homo sapien
ttggctccaggtcgtcctgaggatg

SEQ ID NO: 2552130 - DNA, 25 bp, Homo sapien
caggacgctgctgtgccgtcccgtg

SEQ ID NO: 2552131 - DNA, 25 bp, Homo sapien
gacccggaagtgcacggcgcctctt

SEQ ID NO: 2552132 - DNA, 25 bp, Homo sapien
gccgtgcgctcttcgacccggaagt

SEQ ID NO: 2552133 - DNA, 25 bp, Homo sapien
gaccgagagtcgctcctaggcccgg

SEQ ID NO: 2552134 - DNA, 25 bp, Homo sapien
gctgcacgaccgagagtcgctccta

SEQ ID NO: 2552135 - DNA, 25 bp, Homo sapien
ctcgtcccgcacctgaatcctagag

SEQ ID NO: 2552136 - DNA, 25 bp, Homo sapien
agacgccctgctcgtcccgcacctg

SEQ ID NO: 2552137 - DNA, 25 bp, Homo sapien
cagcaactccgcagagacgccctgc

SEQ ID NO: 2552138 - DNA, 25 bp, Homo sapien
cctggtgcttggtggacccagcaac

SEQ ID NO: 2552139 - DNA, 25 bp, Homo sapien
tcatgatccccgctcaaggcagtct

SEQ ID NO: 2552140 - DNA, 25 bp, Homo sapien
tgatccccgctcaaggcagtctgca

SEQ ID NO: 2552141 - DNA, 25 bp, Homo sapien
atgatccccgctcaaggcagtctgc

SEQ ID NO: 2552142 - DNA, 25 bp, Homo sapien
gatccccgctcaaggcagtctgcac

SEQ ID NO: 2552143 - DNA, 25 bp, Homo sapien
ggcctcagtgacacgtagggtgctc

SEQ ID NO: 2552144 - DNA, 25 bp, Homo sapien
tgctgagtccccagtggtacccaga

SEQ ID NO: 2552145 - DNA, 25 bp, Homo sapien
tgacacgtagggtgctctccctgcc

SEQ ID NO: 2552146 - DNA, 25 bp, Homo sapien
tggaggctcctctgaccgcacccca

SEQ ID NO: 2552147 - DNA, 25 bp, Homo sapien
cgggtccgcagggccgacctgtggg

SEQ ID NO: 2552148 - DNA, 25 bp, Homo sapien
cgcagggccgacctgtgggtgtcca

SEQ ID NO: 2552149 - DNA, 25 bp, Homo sapien
gcagggccgacctgtgggtgtccat

SEQ ID NO: 2552150 - DNA, 25 bp, Homo sapien
ccgggtccgcagggccgacctgtgg

SEQ ID NO: 2552151 - DNA, 25 bp, Homo sapien
tctccatgctcgctgtcactgtcgt

SEQ ID NO: 2552152 - DNA, 25 bp, Homo sapien
tcagacgccccctcgtcttctccgt

SEQ ID NO: 2552153 - DNA, 25 bp, Homo sapien
tcttcctcctcagacgccccctcgt

SEQ ID NO: 2552154 - DNA, 25 bp, Homo sapien
catctccatgctcgctgtcactgtc

SEQ ID NO: 2552155 - DNA, 25 bp, Homo sapien
catcacgacaagaggaaacacagga

SEQ ID NO: 2552156 - DNA, 25 bp, Homo sapien
ggaaacacaggagccggcgtgaaca

SEQ ID NO: 2552157 - DNA, 25 bp, Homo sapien
ctgtccccatcacgacaagaggaaa

SEQ ID NO: 2552158 - DNA, 25 bp, Homo sapien
gccggcgtgaacaccagctgtctca

SEQ ID NO: 2552159 - DNA, 25 bp, Homo sapien
cgtaggtgaccgcagggacatggcc

SEQ ID NO: 2552160 - DNA, 25 bp, Homo sapien
gtaggtgaccgcagggacatggcca

SEQ ID NO: 2552161 - DNA, 25 bp, Homo sapien
tgacagcactctcacggaggatgtg

SEQ ID NO: 2552162 - DNA, 25 bp, Homo sapien
ccagctgtggtgacagcactctcac

SEQ ID NO: 2552163 - DNA, 25 bp, Homo sapien
accacagctgaatataaggcctcac

SEQ ID NO: 2552164 - DNA, 25 bp, Homo sapien
caccacagctgaatataaggcctca

SEQ ID NO: 2552165 - DNA, 25 bp, Homo sapien
tcaccacagctgaatataaggcctc

SEQ ID NO: 2552166 - DNA, 25 bp, Homo sapien
gttcaacacggcagagcccatacgt

SEQ ID NO: 2552167 - DNA, 25 bp, Homo sapien
gagcagggagatgctccgagttcaa

SEQ ID NO: 2552168 - DNA, 25 bp, Homo sapien
catacgtgcactgctatcttctttg

SEQ ID NO: 2552169 - DNA, 25 bp, Homo sapien
gatgctccgagttcaacacggcaga

SEQ ID NO: 2552170 - DNA, 25 bp, Homo sapien
ctgagcgtcctgagtgccagaccag

SEQ ID NO: 2552171 - DNA, 25 bp, Homo sapien
gggaagctgagcgtcctgagtgcca

SEQ ID NO: 2552172 - DNA, 25 bp, Homo sapien
agcgtcctgagtgccagaccagctc

SEQ ID NO: 2552173 - DNA, 25 bp, Homo sapien
gaagctgagcgtcctgagtgccaga

SEQ ID NO: 2552174 - DNA, 25 bp, Homo sapien
tcagcacatccacaaccctgggagc

SEQ ID NO: 2552175 - DNA, 25 bp, Homo sapien
gcacctaacctgaagcctcgggtgc

SEQ ID NO: 2552176 - DNA, 25 bp, Homo sapien
cctgccctgcacctaacctgaagcc

SEQ ID NO: 2552177 - DNA, 25 bp, Homo sapien
cagcacatccacaaccctgggagcc

SEQ ID NO: 2552178 - DNA, 25 bp, Homo sapien
gagtacccgctacctccagcaatgt

SEQ ID NO: 2552179 - DNA, 25 bp, Homo sapien
tccagtttcccctgagtacccgcta

SEQ ID NO: 2552180 - DNA, 25 bp, Homo sapien
caatgtctccccgtcgtcttcagaa

SEQ ID NO: 2552181 - DNA, 25 bp, Homo sapien
tcagaattgaaagagccagcggctt

SEQ ID NO: 2552182 - DNA, 25 bp, Homo sapien
tgaatgcgttgagacagattgggca

SEQ ID NO: 2552183 - DNA, 25 bp, Homo sapien
tggaccattcgacaatgcagtccag

SEQ ID NO: 2552184 - DNA, 25 bp, Homo sapien
gtctctgaatgcgttgagacagatt

SEQ ID NO: 2552185 - DNA, 25 bp, Homo sapien
tgggcacagttctccggcgtcccca

SEQ ID NO: 2552186 - DNA, 25 bp, Homo sapien
ccaccaaattgagctcgaatacaaa

SEQ ID NO: 2552187 - DNA, 25 bp, Homo sapien
aattgagctcgaatacaaatgcact

SEQ ID NO: 2552188 - DNA, 25 bp, Homo sapien
tagagttcgatcaactggacaggaa

SEQ ID NO: 2552189 - DNA, 25 bp, Homo sapien
aatgcacttaaatagagttcgatca

SEQ ID NO: 2552190 - DNA, 25 bp, Homo sapien
cagggccgggatagaagcacggctg

SEQ ID NO: 2552191 - DNA, 25 bp, Homo sapien
cacaaggggcacttgagttgatttc

SEQ ID NO: 2552192 - DNA, 25 bp, Homo sapien
ctatgaagcatttaaccaaccctca

SEQ ID NO: 2552193 - DNA, 25 bp, Homo sapien
tgaagcatttaaccaaccctcattt

SEQ ID NO: 2552194 - DNA, 25 bp, Homo sapien
tcctcgctcgctttggtgttctcca

SEQ ID NO: 2552195 - DNA, 25 bp, Homo sapien
acctcacagaaggtcgggtcctcct

SEQ ID NO: 2552196 - DNA, 25 bp, Homo sapien
aaagcctgtcctcacggtcgctcct

SEQ ID NO: 2552197 - DNA, 25 bp, Homo sapien
gcatcgcagccgtcgcagagcaaaa

SEQ ID NO: 2552198 - DNA, 25 bp, Homo sapien
gaggagacaagtgtcacaggctccc

SEQ ID NO: 2552199 - DNA, 25 bp, Homo sapien
gatgaggagacaagtgtcacaggct

SEQ ID NO: 2552200 - DNA, 25 bp, Homo sapien
ggatgaggagacaagtgtcacaggc

SEQ ID NO: 2552201 - DNA, 25 bp, Homo sapien
tgaggagacaagtgtcacaggctcc

SEQ ID NO: 2552202 - DNA, 25 bp, Homo sapien
ggatttaggctcagactcgtgagaa

SEQ ID NO: 2552203 - DNA, 25 bp, Homo sapien
tgaggaggtgaggaccgtcagggca

SEQ ID NO: 2552204 - DNA, 25 bp, Homo sapien
tgaggaccgtcagggcagagcactc

SEQ ID NO: 2552205 - DNA, 25 bp, Homo sapien
aaaacatggatttaggctcagactc

SEQ ID NO: 2552206 - DNA, 25 bp, Homo sapien
agcaaccaactcagtgcctgccggg

SEQ ID NO: 2552207 - DNA, 25 bp, Homo sapien
aactcagtgcctgccggggcaactg

SEQ ID NO: 2552208 - DNA, 25 bp, Homo sapien
caactggcagcagacgctcccagga

SEQ ID NO: 2552209 - DNA, 25 bp, Homo sapien
cggggcaactggcagcagacgctcc

SEQ ID NO: 2552210 - DNA, 25 bp, Homo sapien
tatttcatgtaatgtcagtgtatct

SEQ ID NO: 2552211 - DNA, 25 bp, Homo sapien
tgcctccctggtgaacacacacttt

SEQ ID NO: 2552212 - DNA, 25 bp, Homo sapien
aaggtgctcagatctgacctgccca

SEQ ID NO: 2552213 - DNA, 25 bp, Homo sapien
tttcatgtaatgtcagtgtatctac

SEQ ID NO: 2552214 - DNA, 25 bp, Homo sapien
ctgcaagtttaaatacgagcacggg

SEQ ID NO: 2552215 - DNA, 25 bp, Homo sapien
gagacctgcccagctacggtgcagg

SEQ ID NO: 2552216 - DNA, 25 bp, Homo sapien
tctgcgcctggcaggcgcccatcca

SEQ ID NO: 2552217 - DNA, 25 bp, Homo sapien
ctgaggcccgagcagaaggcccctc

SEQ ID NO: 2552218 - DNA, 25 bp, Homo sapien
gaattccaaagtctgaaaacgtcca

SEQ ID NO: 2552219 - DNA, 25 bp, Homo sapien
agccttggaggaggctgcggctcac

SEQ ID NO: 2552220 - DNA, 25 bp, Homo sapien
caacccactttcccaccactgagct

SEQ ID NO: 2552221 - DNA, 25 bp, Homo sapien
accactgagctccagcagccttgga

SEQ ID NO: 2552222 - DNA, 25 bp, Homo sapien
gcacattccgggcagaaccactcgt

SEQ ID NO: 2552223 - DNA, 25 bp, Homo sapien
gcaaggacaacaccaggcgcagcac

SEQ ID NO: 2552224 - DNA, 25 bp, Homo sapien
cagcggcaaggacaacaccaggcgc

SEQ ID NO: 2552225 - DNA, 25 bp, Homo sapien
gcggcaaggacaacaccaggcgcag

SEQ ID NO: 2552226 - DNA, 25 bp, Homo sapien
ggtcctacctgctcgaggccgaagc

SEQ ID NO: 2552227 - DNA, 25 bp, Homo sapien
tgtcctggctatcgcccgggtccta

SEQ ID NO: 2552228 - DNA, 25 bp, Homo sapien
tgggcaccacatcagccaagagcag

SEQ ID NO: 2552229 - DNA, 25 bp, Homo sapien
tccggttcacggttgctctcactct

SEQ ID NO: 2552230 - DNA, 25 bp, Homo sapien
agcacagaccccaaatggagcccag

SEQ ID NO: 2552231 - DNA, 25 bp, Homo sapien
agaggctgccaagcactcccacggg

SEQ ID NO: 2552232 - DNA, 25 bp, Homo sapien
acgagagggcaccagtcactgtggc

SEQ ID NO: 2552233 - DNA, 25 bp, Homo sapien
ggtggtgccgtcagatgcccttggg

SEQ ID NO: 2552234 - DNA, 25 bp, Homo sapien
gtcgccacagcctcgatggcttcat

SEQ ID NO: 2552235 - DNA, 25 bp, Homo sapien
agtgctcaggccagtcgccacagcc

SEQ ID NO: 2552236 - DNA, 25 bp, Homo sapien
tgtcttcctcttccgtcgggcggga

SEQ ID NO: 2552237 - DNA, 25 bp, Homo sapien
gggcgctgatacacggcagtgctca

SEQ ID NO: 2552238 - DNA, 25 bp, Homo sapien
gcaggagtccatgcgtctacagtga

SEQ ID NO: 2552239 - DNA, 25 bp, Homo sapien
catcaaagttaaccagcactgggac

SEQ ID NO: 2552240 - DNA, 25 bp, Homo sapien
cagtgacttaaatccccacgaggga

SEQ ID NO: 2552241 - DNA, 25 bp, Homo sapien
agcgtggtcgcagatcggcacatca

SEQ ID NO: 2552242 - DNA, 25 bp, Homo sapien
gctcttactttttgcggatggtccg

SEQ ID NO: 2552243 - DNA, 25 bp, Homo sapien
tcactcgatgttggcgtttcttaga

SEQ ID NO: 2552244 - DNA, 25 bp, Homo sapien
tagatcttgtcgctgagctcttact

SEQ ID NO: 2552245 - DNA, 25 bp, Homo sapien
ttctcttcttcactcgatgttggcg

SEQ ID NO: 2552246 - DNA, 25 bp, Homo sapien
aggcttaggccctgctccgtaacca

SEQ ID NO: 2552247 - DNA, 25 bp, Homo sapien
cagctgatggcttcaggaaggttcc

SEQ ID NO: 2552248 - DNA, 25 bp, Homo sapien
gaaaagcaaagacgatgatgatccc

SEQ ID NO: 2552249 - DNA, 25 bp, Homo sapien
ataaccgcgcgagggtgccaaggcc

SEQ ID NO: 2552250 - DNA, 25 bp, Homo sapien
tgccatcgggcccccaggctgtggt

SEQ ID NO: 2552251 - DNA, 25 bp, Homo sapien
cccccaggctgtggtcccagaacac

SEQ ID NO: 2552252 - DNA, 25 bp, Homo sapien
ccaggctgtggtcccagaacactgt

SEQ ID NO: 2552253 - DNA, 25 bp, Homo sapien
gtgccatcgggcccccaggctgtgg

SEQ ID NO: 2552254 - DNA, 25 bp, Homo sapien
gagaggcagctccaatatccgctct

SEQ ID NO: 2552255 - DNA, 25 bp, Homo sapien
ttcgagagcgagtggtggcttcact

SEQ ID NO: 2552256 - DNA, 25 bp, Homo sapien
tgtcgaagggatccagctcataagg

SEQ ID NO: 2552257 - DNA, 25 bp, Homo sapien
cttcaacactgacgggatgcagctg

SEQ ID NO: 2552258 - DNA, 25 bp, Homo sapien
agcccgtctcttggcactcagaggg

SEQ ID NO: 2552259 - DNA, 25 bp, Homo sapien
agggctgaccgggacagagcccgtc

SEQ ID NO: 2552260 - DNA, 25 bp, Homo sapien
gacagagcccgtctcttggcactca

SEQ ID NO: 2552261 - DNA, 25 bp, Homo sapien
agagcccgtctcttggcactcagag

SEQ ID NO: 2552262 - DNA, 25 bp, Homo sapien
gccctcttggcgctgagggagccgt

SEQ ID NO: 2552263 - DNA, 25 bp, Homo sapien
aggctctggcccgacaggatgctgc

SEQ ID NO: 2552264 - DNA, 25 bp, Homo sapien
tgagggagccgtcgcggtggatgat

SEQ ID NO: 2552265 - DNA, 25 bp, Homo sapien
tctggctctggcaccgcggcaggga

SEQ ID NO: 2552266 - DNA, 25 bp, Homo sapien
ccatcaggacatgttcttatgaaca

SEQ ID NO: 2552267 - DNA, 25 bp, Homo sapien
aatgcagaaaaatggctgaggaatg

SEQ ID NO: 2552268 - DNA, 25 bp, Homo sapien
ggctgggtaagaactcggagctaac

SEQ ID NO: 2552269 - DNA, 25 bp, Homo sapien
tgactgagacatgggctgagtgctt

SEQ ID NO: 2552270 - DNA, 25 bp, Homo sapien
tgagatcttagacgcggcagaggca

SEQ ID NO: 2552271 - DNA, 25 bp, Homo sapien
cccatttgacaagttccgagcctga

SEQ ID NO: 2552272 - DNA, 25 bp, Homo sapien
tgcgggacctgccttgacagctgag

SEQ ID NO: 2552273 - DNA, 25 bp, Homo sapien
tctggacagactgcctgagtttcgc

SEQ ID NO: 2552274 - DNA, 25 bp, Homo sapien
tgggtagctcagagatgtctgttct

SEQ ID NO: 2552275 - DNA, 25 bp, Homo sapien
tcttctgggcgctggcttcagggga

SEQ ID NO: 2552276 - DNA, 25 bp, Homo sapien
tctgttcttctgggcgctggcttca

SEQ ID NO: 2552277 - DNA, 25 bp, Homo sapien
gggtagctcagagatgtctgttctt

SEQ ID NO: 2552278 - DNA, 25 bp, Homo sapien
tcctcagagccaaagaaggtgctgc

SEQ ID NO: 2552279 - DNA, 25 bp, Homo sapien
caggaatattgatccggaagctctc

SEQ ID NO: 2552280 - DNA, 25 bp, Homo sapien
tccacaggccggaacgtgttacaga

SEQ ID NO: 2552281 - DNA, 25 bp, Homo sapien
tcgggctctgtaccaaagatgctct

SEQ ID NO: 2552282 - DNA, 25 bp, Homo sapien
gctggatgtggagcgggaccgggaa

SEQ ID NO: 2552283 - DNA, 25 bp, Homo sapien
ctgagctccacgactctgtgggtgg

SEQ ID NO: 2552284 - DNA, 25 bp, Homo sapien
tgcgggagctggatgtggagcggga

SEQ ID NO: 2552285 - DNA, 25 bp, Homo sapien
gggcctgagctccacgactctgtgg

SEQ ID NO: 2552286 - DNA, 25 bp, Homo sapien
ggtgacgctgacctcgagctcctgt

SEQ ID NO: 2552287 - DNA, 25 bp, Homo sapien
cctggattcagagcgcgtcccagag

SEQ ID NO: 2552288 - DNA, 25 bp, Homo sapien
tcctgtccctggattcagagcgcgt

SEQ ID NO: 2552289 - DNA, 25 bp, Homo sapien
gtgacgctgacctcgagctcctgtc

SEQ ID NO: 2552290 - DNA, 25 bp, Homo sapien
ttggccttggaccgctgcctcctgg

SEQ ID NO: 2552291 - DNA, 25 bp, Homo sapien
gaggaccgccggctcttggccttgg

SEQ ID NO: 2552292 - DNA, 25 bp, Homo sapien
tggaggaccgccggctcttggcctt

SEQ ID NO: 2552293 - DNA, 25 bp, Homo sapien
cttggccttggaccgctgcctcctg

SEQ ID NO: 2552294 - DNA, 25 bp, Homo sapien
tggctttcttcctcttagctcgctc

SEQ ID NO: 2552295 - DNA, 25 bp, Homo sapien
tttcttcctcttagctcgctctcgg

SEQ ID NO: 2552296 - DNA, 25 bp, Homo sapien
ttcctcttagctcgctctcggctgc

SEQ ID NO: 2552297 - DNA, 25 bp, Homo sapien
ctcttagctcgctctcggctgctgg

SEQ ID NO: 2552298 - DNA, 25 bp, Homo sapien
cctgtctggccgctcgtggctgcgt

SEQ ID NO: 2552299 - DNA, 25 bp, Homo sapien
tcacgggaccgaggccgcctgtgct

SEQ ID NO: 2552300 - DNA, 25 bp, Homo sapien
ttccccgaggtctggacgctgatct

SEQ ID NO: 2552301 - DNA, 25 bp, Homo sapien
ctgcgttcccgctgatgcttgtgcc

SEQ ID NO: 2552302 - DNA, 25 bp, Homo sapien
gcaggggggccttgtcggccgtagc

SEQ ID NO: 2552303 - DNA, 25 bp, Homo sapien
cggcgagacatgtgcttcccccaag

SEQ ID NO: 2552304 - DNA, 25 bp, Homo sapien
gtagccacctccggcgagacatgtg

SEQ ID NO: 2552305 - DNA, 25 bp, Homo sapien
ttgtcggccgtagccacctccggcg

SEQ ID NO: 2552306 - DNA, 25 bp, Homo sapien
agaaatcatcaaagacgtgtccggc

SEQ ID NO: 2552307 - DNA, 25 bp, Homo sapien
aaacggcgtcgcttgagaaatcatc

SEQ ID NO: 2552308 - DNA, 25 bp, Homo sapien
gaaggtggcgagctcatgtcatcga

SEQ ID NO: 2552309 - DNA, 25 bp, Homo sapien
gagtcgccataatccaggtccaggt

SEQ ID NO: 2552310 - DNA, 25 bp, Homo sapien
gccgcgtccggcctgagcaaatgtg

SEQ ID NO: 2552311 - DNA, 25 bp, Homo sapien
acatccggggaactgggtgcctcag

SEQ ID NO: 2552312 - DNA, 25 bp, Homo sapien
ggctgcgaagggtcttcatcgtgca

SEQ ID NO: 2552313 - DNA, 25 bp, Homo sapien
cctcccactcgcagaggggctgtct

SEQ ID NO: 2552314 - DNA, 25 bp, Homo sapien
caggtgacccgcttcaccagggctc

SEQ ID NO: 2552315 - DNA, 25 bp, Homo sapien
gactcctgcaggttccaggtgaccc

SEQ ID NO: 2552316 - DNA, 25 bp, Homo sapien
ccaggtgacccgcttcaccagggct

SEQ ID NO: 2552317 - DNA, 25 bp, Homo sapien
ctcctgcaggttccaggtgacccgc

SEQ ID NO: 2552318 - DNA, 25 bp, Homo sapien
cccgggttccggaagcacgtgactg

SEQ ID NO: 2552319 - DNA, 25 bp, Homo sapien
ttccggaagcacgtgactgggaaag

SEQ ID NO: 2552320 - DNA, 25 bp, Homo sapien
gcagctcggagaacgcctgcctgac

SEQ ID NO: 2552321 - DNA, 25 bp, Homo sapien
gggttccggaagcacgtgactggga

SEQ ID NO: 2552322 - DNA, 25 bp, Homo sapien
cacgggtgccaggccactgcccacg

SEQ ID NO: 2552323 - DNA, 25 bp, Homo sapien
acgggtgccaggccactgcccacgg

SEQ ID NO: 2552324 - DNA, 25 bp, Homo sapien
gagcactgggccctacagctagcag

SEQ ID NO: 2552325 - DNA, 25 bp, Homo sapien
actgggccctacagctagcagctct

SEQ ID NO: 2552326 - DNA, 25 bp, Homo sapien
ctgggccggggcaggcggcaggccg

SEQ ID NO: 2552327 - DNA, 25 bp, Homo sapien
tgggccggggcaggcggcaggccgg

SEQ ID NO: 2552328 - DNA, 25 bp, Homo sapien
ctgaaggatgaactggaccgtgggc

SEQ ID NO: 2552329 - DNA, 25 bp, Homo sapien
aaggatgaactggaccgtgggctgg

SEQ ID NO: 2552330 - DNA, 25 bp, Homo sapien
atgaactggaccgtgggctggctga

SEQ ID NO: 2552331 - DNA, 25 bp, Homo sapien
aactggaccgtgggctggctgacca

SEQ ID NO: 2552332 - DNA, 25 bp, Homo sapien
tgccccacagcccactagcggcagg

SEQ ID NO: 2552333 - DNA, 25 bp, Homo sapien
ccacagcccactagcggcaggctcc

SEQ ID NO: 2552334 - DNA, 25 bp, Homo sapien
cccacagcccactagcggcaggctc

SEQ ID NO: 2552335 - DNA, 25 bp, Homo sapien
cacagcccactagcggcaggctccc

SEQ ID NO: 2552336 - DNA, 25 bp, Homo sapien
ttctccgcagctagcctgggggccg

SEQ ID NO: 2552337 - DNA, 25 bp, Homo sapien
ttcttggttttctccgcagctagcc

SEQ ID NO: 2552338 - DNA, 25 bp, Homo sapien
tggttttctccgcagctagcctggg

SEQ ID NO: 2552339 - DNA, 25 bp, Homo sapien
tttctccgcagctagcctgggggcc

SEQ ID NO: 2552340 - DNA, 25 bp, Homo sapien
acagcacgctcctgcatgtgcagct

SEQ ID NO: 2552341 - DNA, 25 bp, Homo sapien
gaagggcttgatggccagcttcacc

SEQ ID NO: 2552342 - DNA, 25 bp, Homo sapien
ttctgcacggccttgcgcaggatgt

SEQ ID NO: 2552343 - DNA, 25 bp, Homo sapien
cttctggtagaagggcttgatggcc

SEQ ID NO: 2552344 - DNA, 25 bp, Homo sapien
ccgagccccacacacaggctcgcac

SEQ ID NO: 2552345 - DNA, 25 bp, Homo sapien
gaccccgagccccacacacaggctc

SEQ ID NO: 2552346 - DNA, 25 bp, Homo sapien
gcccgtgaccccgagccccacacac

SEQ ID NO: 2552347 - DNA, 25 bp, Homo sapien
cacacacaggctcgcacacagccca

SEQ ID NO: 2552348 - DNA, 25 bp, Homo sapien
caatcaccaaatgccctttcacatc

SEQ ID NO: 2552349 - DNA, 25 bp, Homo sapien
tgcaatcaccaaatgccctttcaca

SEQ ID NO: 2552350 - DNA, 25 bp, Homo sapien
ggtgcaatcaccaaatgccctttca

SEQ ID NO: 2552351 - DNA, 25 bp, Homo sapien
aggtgcaatcaccaaatgccctttc

SEQ ID NO: 2552352 - DNA, 25 bp, Homo sapien
tttcttgtgcctgcgcatgtgcctg

SEQ ID NO: 2552353 - DNA, 25 bp, Homo sapien
gcctgtacttgtccacgtacgcctt

SEQ ID NO: 2552354 - DNA, 25 bp, Homo sapien
cttcacggggttgatctctccactc

SEQ ID NO: 2552355 - DNA, 25 bp, Homo sapien
ccacgtacgccttcaccaggttggc

SEQ ID NO: 2552356 - DNA, 25 bp, Homo sapien
cgggcatagcccgtgattgcctggc

SEQ ID NO: 2552357 - DNA, 25 bp, Homo sapien
gggcatagcccgtgattgcctggcc

SEQ ID NO: 2552358 - DNA, 25 bp, Homo sapien
gctccccgggcatagcccgtgattg

SEQ ID NO: 2552359 - DNA, 25 bp, Homo sapien
cgacagctccccgggcatagcccgt

SEQ ID NO: 2552360 - DNA, 25 bp, Homo sapien
tagagatttatcaaggacgcgccac

SEQ ID NO: 2552361 - DNA, 25 bp, Homo sapien
caagtagtaagtcaatcaagaggtt

SEQ ID NO: 2552362 - DNA, 25 bp, Homo sapien
gatcaccaagtgctttatcttccaa

SEQ ID NO: 2552363 - DNA, 25 bp, Homo sapien
acagaccaggtgtcagcgcaggaac

SEQ ID NO: 2552364 - DNA, 25 bp, Homo sapien
cacttccggatggagggagaggttg

SEQ ID NO: 2552365 - DNA, 25 bp, Homo sapien
ggactcaatgagaccctgtccagga

SEQ ID NO: 2552366 - DNA, 25 bp, Homo sapien
catatcgaattaccaaccactcaca

SEQ ID NO: 2552367 - DNA, 25 bp, Homo sapien
acaggcgggagccttctacgcagag

SEQ ID NO: 2552368 - DNA, 25 bp, Homo sapien
taacagacggatacagtgcatgact

SEQ ID NO: 2552369 - DNA, 25 bp, Homo sapien
caagaacgcttgaaaacgggatcgg

SEQ ID NO: 2552370 - DNA, 25 bp, Homo sapien
caccggcatcgttagtacgcgacaa

SEQ ID NO: 2552371 - DNA, 25 bp, Homo sapien
tgttggcgaggacaagaaccgtgtc

SEQ ID NO: 2552372 - DNA, 25 bp, Homo sapien
gtcttatgtatagaagatcctccac

SEQ ID NO: 2552373 - DNA, 25 bp, Homo sapien
gcagatgacatggtcttatgtatag

SEQ ID NO: 2552374 - DNA, 25 bp, Homo sapien
aagaaaactatttctacttgcagat

SEQ ID NO: 2552375 - DNA, 25 bp, Homo sapien
tatagaagatcctccacaacaggcc

SEQ ID NO: 2552376 - DNA, 25 bp, Homo sapien
ggattatgtaccataacccagtggg

SEQ ID NO: 2552377 - DNA, 25 bp, Homo sapien
tgaagaaaaacccacgcgatcatcc

SEQ ID NO: 2552378 - DNA, 25 bp, Homo sapien
gaatgcaagggtgaacgaacagacg

SEQ ID NO: 2552379 - DNA, 25 bp, Homo sapien
agtgcctggccgaaaaacagcattt

SEQ ID NO: 2552380 - DNA, 25 bp, Homo sapien
tgcaaatggccacgtctggcaatgt

SEQ ID NO: 2552381 - DNA, 25 bp, Homo sapien
tcccatgtgcctgttaactgtcagc

SEQ ID NO: 2552382 - DNA, 25 bp, Homo sapien
tccattttagtgtagtaggacgtcg

SEQ ID NO: 2552383 - DNA, 25 bp, Homo sapien
aaattgggttgtctacgccaggcgc

SEQ ID NO: 2552384 - DNA, 25 bp, Homo sapien
cagcctccactaaacttctgttatc

SEQ ID NO: 2552385 - DNA, 25 bp, Homo sapien
tgtgatcacatcttactgcaatcat

SEQ ID NO: 2552386 - DNA, 25 bp, Homo sapien
tgagccatacagccagcctaaacaa

SEQ ID NO: 2552387 - DNA, 25 bp, Homo sapien
tgaggacctccactcataccttaca

SEQ ID NO: 2552388 - DNA, 25 bp, Homo sapien
tgaagcgaggtggtggccacgggca

SEQ ID NO: 2552389 - DNA, 25 bp, Homo sapien
aatgaagcgaggtggtggccacggg

SEQ ID NO: 2552390 - DNA, 25 bp, Homo sapien
gaagcgaggtggtggccacgggcag

SEQ ID NO: 2552391 - DNA, 25 bp, Homo sapien
ggaatgaagcgaggtggtggccacg

SEQ ID NO: 2552392 - DNA, 25 bp, Homo sapien
ccgggcgggcgctgagcaccgcgga

SEQ ID NO: 2552393 - DNA, 25 bp, Homo sapien
caccgcggacaacgccgggtcgcaa

SEQ ID NO: 2552394 - DNA, 25 bp, Homo sapien
gcggacaacgccgggtcgcaagccg

SEQ ID NO: 2552395 - DNA, 25 bp, Homo sapien
accgcggacaacgccgggtcgcaag

SEQ ID NO: 2552396 - DNA, 25 bp, Homo sapien
agcccgtccgcgtccgcggtgctgc

SEQ ID NO: 2552397 - DNA, 25 bp, Homo sapien
cgtccgcggtgctgcggttccccat

SEQ ID NO: 2552398 - DNA, 25 bp, Homo sapien
cagcccgtccgcgtccgcggtgctg

SEQ ID NO: 2552399 - DNA, 25 bp, Homo sapien
tccgcgtccgcggtgctgcggttcc

SEQ ID NO: 2552400 - DNA, 25 bp, Homo sapien
ctcacgcacacgagcgagttccccg

SEQ ID NO: 2552401 - DNA, 25 bp, Homo sapien
gagcaccgcgccgatgagcagcacg

SEQ ID NO: 2552402 - DNA, 25 bp, Homo sapien
acacgagcgagttccccgcgagcac

SEQ ID NO: 2552403 - DNA, 25 bp, Homo sapien
gagttccccgcgagcaccgcgccga

SEQ ID NO: 2552404 - DNA, 25 bp, Homo sapien
ggagtagacgaagagcggcagcacc

SEQ ID NO: 2552405 - DNA, 25 bp, Homo sapien
ctcggagtagacgaagagcggcagc

SEQ ID NO: 2552406 - DNA, 25 bp, Homo sapien
ccaggctcacgatgaaggagttggt

SEQ ID NO: 2552407 - DNA, 25 bp, Homo sapien
tgggcgtctgcagggcgcgctcggt

SEQ ID NO: 2552408 - DNA, 25 bp, Homo sapien
gaaaggagcacaggtcacgcgtgtc

SEQ ID NO: 2552409 - DNA, 25 bp, Homo sapien
tcctggataacagacgccaagacag

SEQ ID NO: 2552410 - DNA, 25 bp, Homo sapien
gattaggagcttaaacgtcgtcact

SEQ ID NO: 2552411 - DNA, 25 bp, Homo sapien
tccctggatagaaggacgggcatct

SEQ ID NO: 2552412 - DNA, 25 bp, Homo sapien
ccccactcttatgggtagttccagg

SEQ ID NO: 2552413 - DNA, 25 bp, Homo sapien
tcttatgggtagttccagggctgaa

SEQ ID NO: 2552414 - DNA, 25 bp, Homo sapien
tgcgcggcgacaccacaggccctga

SEQ ID NO: 2552415 - DNA, 25 bp, Homo sapien
ctgaggtttcccagccaccgcgggc

SEQ ID NO: 2552416 - DNA, 25 bp, Homo sapien
agcatgacgtccatggccatgaggg

SEQ ID NO: 2552417 - DNA, 25 bp, Homo sapien
acgtccatggccatgagggcgtcgc

SEQ ID NO: 2552418 - DNA, 25 bp, Homo sapien
acaggttgaagatggaggcggtgca

SEQ ID NO: 2552419 - DNA, 25 bp, Homo sapien
ccatggccatgagggcgtcgcacag

SEQ ID NO: 2552420 - DNA, 25 bp, Homo sapien
ccggacagcgcacaggccgcggtga

SEQ ID NO: 2552421 - DNA, 25 bp, Homo sapien
cgccggacagcgcacaggccgcggt

SEQ ID NO: 2552422 - DNA, 25 bp, Homo sapien
ggggcgccggacagcgcacaggccg

SEQ ID NO: 2552423 - DNA, 25 bp, Homo sapien
ggacagcgcacaggccgcggtgagg

SEQ ID NO: 2552424 - DNA, 25 bp, Homo sapien
tcgttgaggccgcacagtacgggcg

SEQ ID NO: 2552425 - DNA, 25 bp, Homo sapien
ggctcccaccctgccggttgtagcg

SEQ ID NO: 2552426 - DNA, 25 bp, Homo sapien
caccctgccggttgtagcgcagcgg

SEQ ID NO: 2552427 - DNA, 25 bp, Homo sapien
cacgtggcgccgatgagcagcagct

SEQ ID NO: 2552428 - DNA, 25 bp, Homo sapien
ccaggcggcacacggcggggtcgcg

SEQ ID NO: 2552429 - DNA, 25 bp, Homo sapien
acacggcggggtcgcggccgcgcac

SEQ ID NO: 2552430 - DNA, 25 bp, Homo sapien
gcacacggcggggtcgcggccgcgc

SEQ ID NO: 2552431 - DNA, 25 bp, Homo sapien
ctccaggcggcacacggcggggtcg

SEQ ID NO: 2552432 - DNA, 25 bp, Homo sapien
ccgcggaacgtggcccagtagagca

SEQ ID NO: 2552433 - DNA, 25 bp, Homo sapien
gcaggccgcggaacgtggcccagta

SEQ ID NO: 2552434 - DNA, 25 bp, Homo sapien
aaggagcacacggacgagtagacca

SEQ ID NO: 2552435 - DNA, 25 bp, Homo sapien
acacggacgagtagaccacgtagtc

SEQ ID NO: 2552436 - DNA, 25 bp, Homo sapien
gagcacagttggagccgcaggggtc

SEQ ID NO: 2552437 - DNA, 25 bp, Homo sapien
gggcgcacagtcggggccgcagggg

SEQ ID NO: 2552438 - DNA, 25 bp, Homo sapien
ccgtgcagcttggcgcgacgtgcca

SEQ ID NO: 2552439 - DNA, 25 bp, Homo sapien
ggctctgacggcgtcggggggagca

SEQ ID NO: 2552440 - DNA, 25 bp, Homo sapien
gccggtgatcttggcacgccgcctc

SEQ ID NO: 2552441 - DNA, 25 bp, Homo sapien
accctcatggccttgcgctcccggc

SEQ ID NO: 2552442 - DNA, 25 bp, Homo sapien
ttgcgctcccggccggtgatcttgg

SEQ ID NO: 2552443 - DNA, 25 bp, Homo sapien
tggccttgcgctcccggccggtgat

SEQ ID NO: 2552444 - DNA, 25 bp, Homo sapien
actcggcgttgaagacagtgtagat

SEQ ID NO: 2552445 - DNA, 25 bp, Homo sapien
aagacgttgcggaactcggcgttga

SEQ ID NO: 2552446 - DNA, 25 bp, Homo sapien
cgttgcggaactcggcgttgaagac

SEQ ID NO: 2552447 - DNA, 25 bp, Homo sapien
cagcgcctgcgtgatgtgcaccacg

SEQ ID NO: 2552448 - DNA, 25 bp, Homo sapien
cgtacaaaagcgccctccccatctc

SEQ ID NO: 2552449 - DNA, 25 bp, Homo sapien
acgtacaaaagcgccctccccatct

SEQ ID NO: 2552450 - DNA, 25 bp, Homo sapien
tgtttcatcatcctgctcaggcgtg

SEQ ID NO: 2552451 - DNA, 25 bp, Homo sapien
caccgttggtgctgccagtgagcag

SEQ ID NO: 2552452 - DNA, 25 bp, Homo sapien
gcctatttacttagtaaagtctctg

SEQ ID NO: 2552453 - DNA, 25 bp, Homo sapien
ggccaagccctcactgatgtttcat

SEQ ID NO: 2552454 - DNA, 25 bp, Homo sapien
acggcctgttcagtccacgtggaca

SEQ ID NO: 2552455 - DNA, 25 bp, Homo sapien
gctcgtgtagtccaggaggtcttcg

SEQ ID NO: 2552456 - DNA, 25 bp, Homo sapien
ttggtggcctcggtccagggatcca

SEQ ID NO: 2552457 - DNA, 25 bp, Homo sapien
ctcctgaccgagagcgctgctggag

SEQ ID NO: 2552458 - DNA, 25 bp, Homo sapien
tccctgggatcatgagcgtccggtc

SEQ ID NO: 2552459 - DNA, 25 bp, Homo sapien
tgctgcgacgcacatacatacgtgt

SEQ ID NO: 2552460 - DNA, 25 bp, Homo sapien
gcggacagattttttatccctggga

SEQ ID NO: 2552461 - DNA, 25 bp, Homo sapien
tgagcgtccggtcttgcccacaggg

SEQ ID NO: 2552462 - DNA, 25 bp, Homo sapien
ttgctggacaagtcattaacacact

SEQ ID NO: 2552463 - DNA, 25 bp, Homo sapien
ggcccctcgcactcctgtgaggctt

SEQ ID NO: 2552464 - DNA, 25 bp, Homo sapien
gaggcttttgcaggtcgaaggcccc

SEQ ID NO: 2552465 - DNA, 25 bp, Homo sapien
taacacactttaagcgaatggtgcc

SEQ ID NO: 2552466 - DNA, 25 bp, Homo sapien
ccaattcctcaaaccaagagagtgt

SEQ ID NO: 2552467 - DNA, 25 bp, Homo sapien
agcccaccagagtttgggcgcacgg

SEQ ID NO: 2552468 - DNA, 25 bp, Homo sapien
cctccaggtgaggttacagagggct

SEQ ID NO: 2552469 - DNA, 25 bp, Homo sapien
gaaggctgtattggagcagagccca

SEQ ID NO: 2552470 - DNA, 25 bp, Homo sapien
cccgaagtcattgtttttacagtct

SEQ ID NO: 2552471 - DNA, 25 bp, Homo sapien
gttttagcattatactgtaagaagc

SEQ ID NO: 2552472 - DNA, 25 bp, Homo sapien
tagctcagagtcaacactgatgtgc

SEQ ID NO: 2552473 - DNA, 25 bp, Homo sapien
gtcaacactgatgtgcgccctctct

SEQ ID NO: 2552474 - DNA, 25 bp, Homo sapien
tgtccttggccctagggagctcctg

SEQ ID NO: 2552475 - DNA, 25 bp, Homo sapien
gttttaaactctgagctagaaggca

SEQ ID NO: 2552476 - DNA, 25 bp, Homo sapien
ggcaacactactttcttgtgaagca

SEQ ID NO: 2552477 - DNA, 25 bp, Homo sapien
ttgtgaagcacaccatctgtccttg

SEQ ID NO: 2552478 - DNA, 25 bp, Homo sapien
cacagtcatggggagccctctgccc

SEQ ID NO: 2552479 - DNA, 25 bp, Homo sapien
agtcatggggagccctctgccccat

SEQ ID NO: 2552480 - DNA, 25 bp, Homo sapien
ggacacagtcatggggagccctctg

SEQ ID NO: 2552481 - DNA, 25 bp, Homo sapien
gggacacagtcatggggagccctct

SEQ ID NO: 2552482 - DNA, 25 bp, Homo sapien
gtggaagcccccggaaatgcaggct

SEQ ID NO: 2552483 - DNA, 25 bp, Homo sapien
agcagcgtggaagcccccggaaatg

SEQ ID NO: 2552484 - DNA, 25 bp, Homo sapien
gcaccccccagcagcgtggaagccc

SEQ ID NO: 2552485 - DNA, 25 bp, Homo sapien
gaagcccccggaaatgcaggcttgg

SEQ ID NO: 2552486 - DNA, 25 bp, Homo sapien
ggactggaccaacgtcctgccgtgg

SEQ ID NO: 2552487 - DNA, 25 bp, Homo sapien
cgtctttgggatactcgggagcagc

SEQ ID NO: 2552488 - DNA, 25 bp, Homo sapien
gctcagtcacctgttccgcatcaaa

SEQ ID NO: 2552489 - DNA, 25 bp, Homo sapien
atcagattccagagccggactggac

SEQ ID NO: 2552490 - DNA, 25 bp, Homo sapien
gtccccgtttctagtagctcgctct

SEQ ID NO: 2552491 - DNA, 25 bp, Homo sapien
agtaacaatgtccttgactcctagg

SEQ ID NO: 2552492 - DNA, 25 bp, Homo sapien
gactcctaggaagctcagaaatagg

SEQ ID NO: 2552493 - DNA, 25 bp, Homo sapien
tagtacagcacagaagggtatgaaa

SEQ ID NO: 2552494 - DNA, 25 bp, Homo sapien
tccagtggaagccagccgagtggct

SEQ ID NO: 2552495 - DNA, 25 bp, Homo sapien
ggctgtcaagggcacagtgtccagt

SEQ ID NO: 2552496 - DNA, 25 bp, Homo sapien
ccgagtggctgcagggtcttggact

SEQ ID NO: 2552497 - DNA, 25 bp, Homo sapien
agtggctgcagggtcttggactcac

SEQ ID NO: 2552498 - DNA, 25 bp, Homo sapien
ctgatcccacgccactgcagaatgg

SEQ ID NO: 2552499 - DNA, 25 bp, Homo sapien
tggtcgcatgttggcgtcctcctgc

SEQ ID NO: 2552500 - DNA, 25 bp, Homo sapien
ctgccctgtaggaagtactgaatgg

SEQ ID NO: 2552501 - DNA, 25 bp, Homo sapien
tggttccccacaacagtaggatgaa

SEQ ID NO: 2552502 - DNA, 25 bp, Homo sapien
cctgcagcaacagcaacgcggagca

SEQ ID NO: 2552503 - DNA, 25 bp, Homo sapien
aacagcaacgcggagcaacctccag

SEQ ID NO: 2552504 - DNA, 25 bp, Homo sapien
acgcggagcaacctccaggagcctg

SEQ ID NO: 2552505 - DNA, 25 bp, Homo sapien
caaggaggggcctcaacctgtgtcc

SEQ ID NO: 2552506 - DNA, 25 bp, Homo sapien
tctgaattagatgtggagatttctt

SEQ ID NO: 2552507 - DNA, 25 bp, Homo sapien
ggagatttctttgagatcagctcca

SEQ ID NO: 2552508 - DNA, 25 bp, Homo sapien
agatttctttgagatcagctccaca

SEQ ID NO: 2552509 - DNA, 25 bp, Homo sapien
gtggagatttctttgagatcagctc

SEQ ID NO: 2552510 - DNA, 25 bp, Homo sapien
ggaggatattcatggtgctgctgcc

SEQ ID NO: 2552511 - DNA, 25 bp, Homo sapien
cacttgcagacgtggttgtgcccag

SEQ ID NO: 2552512 - DNA, 25 bp, Homo sapien
gtgaacagtcatgggcacttgcaga

SEQ ID NO: 2552513 - DNA, 25 bp, Homo sapien
ggtcacttggaccattgtggtgcca

SEQ ID NO: 2552514 - DNA, 25 bp, Homo sapien
ctggtattcacaccagaggcagttg

SEQ ID NO: 2552515 - DNA, 25 bp, Homo sapien
ctgaggcgatttgaggaggaaaggc

SEQ ID NO: 2552516 - DNA, 25 bp, Homo sapien
tcagtccagaggcagtcgctgagga

SEQ ID NO: 2552517 - DNA, 25 bp, Homo sapien
gaaaggccaaaagcttcgtattcat

SEQ ID NO: 2552518 - DNA, 25 bp, Homo sapien
tcgtattcattccacaggcagttgc

SEQ ID NO: 2552519 - DNA, 25 bp, Homo sapien
gatattcacttcagaggcagtcgct

SEQ ID NO: 2552520 - DNA, 25 bp, Homo sapien
caaaagcctgatattcacttcagag

SEQ ID NO: 2552521 - DNA, 25 bp, Homo sapien
tggaggaagggtcaaaagcctgata

SEQ ID NO: 2552522 - DNA, 25 bp, Homo sapien
cagaggcagtcgctgaggagttgga

SEQ ID NO: 2552523 - DNA, 25 bp, Homo sapien
tcaggaagccatggtagcagacagg

SEQ ID NO: 2552524 - DNA, 25 bp, Homo sapien
cagtgctttccgtgatgtggccgtc

SEQ ID NO: 2552525 - DNA, 25 bp, Homo sapien
cggaccttcgcaagaaaaactgctg

SEQ ID NO: 2552526 - DNA, 25 bp, Homo sapien
tggccgtctcctagagtccagcaga

SEQ ID NO: 2552527 - DNA, 25 bp, Homo sapien
tcttcccctgaagagtgttgggctt

SEQ ID NO: 2552528 - DNA, 25 bp, Homo sapien
ccagactttcaggtggtgagcagca

SEQ ID NO: 2552529 - DNA, 25 bp, Homo sapien
tagtcttggatctgcgaagctgtgg

SEQ ID NO: 2552530 - DNA, 25 bp, Homo sapien
tatggatcaccctgaagaggatcag

SEQ ID NO: 2552531 - DNA, 25 bp, Homo sapien
tctctgagtatcagcgactggcagg

SEQ ID NO: 2552532 - DNA, 25 bp, Homo sapien
agtgcccatgttttctgtagcttcc

SEQ ID NO: 2552533 - DNA, 25 bp, Homo sapien
tgctgtcacaaagacctcccagctt

SEQ ID NO: 2552534 - DNA, 25 bp, Homo sapien
ggctcacagggcgtagtgcccatgt

SEQ ID NO: 2552535 - DNA, 25 bp, Homo sapien
tttaactgcacttctatttttttga

SEQ ID NO: 2552536 - DNA, 25 bp, Homo sapien
gactgagtctcgctctattgcccag

SEQ ID NO: 2552537 - DNA, 25 bp, Homo sapien
cttcacatgggagggtacagttacc

SEQ ID NO: 2552538 - DNA, 25 bp, Homo sapien
tgcctggccgcgtgaaatgtgcttc

SEQ ID NO: 2552539 - DNA, 25 bp, Homo sapien
ctgtcatatcagagagtccggccca

SEQ ID NO: 2552540 - DNA, 25 bp, Homo sapien
taaacagcgaacaattggtagtggc

SEQ ID NO: 2552541 - DNA, 25 bp, Homo sapien
cagctcggtcttgcttccctgggac

SEQ ID NO: 2552542 - DNA, 25 bp, Homo sapien
aagcacattgcgtggccagagggat

SEQ ID NO: 2552543 - DNA, 25 bp, Homo sapien
ttgcttccctgggacccggacactg

SEQ ID NO: 2552544 - DNA, 25 bp, Homo sapien
gccatcacactcctttgcagtgcgt

SEQ ID NO: 2552545 - DNA, 25 bp, Homo sapien
ctcaagtgctctgatttgacagtga

SEQ ID NO: 2552546 - DNA, 25 bp, Homo sapien
ggaaacagttgtcagctgggcgcgg

SEQ ID NO: 2552547 - DNA, 25 bp, Homo sapien
cttctactcaagtgctctgatttga

SEQ ID NO: 2552548 - DNA, 25 bp, Homo sapien
tactcaagtgctctgatttgacagt

SEQ ID NO: 2552549 - DNA, 25 bp, Homo sapien
ttcaccacgtctgtggcgaacgcgg

SEQ ID NO: 2552550 - DNA, 25 bp, Homo sapien
gaggctgttcgctttgtccattctg

SEQ ID NO: 2552551 - DNA, 25 bp, Homo sapien
ttcagcccgctgtgtgaacgtctgc

SEQ ID NO: 2552552 - DNA, 25 bp, Homo sapien
tttgtttgaagcacctgagcgaggc

SEQ ID NO: 2552553 - DNA, 25 bp, Homo sapien
tggcctgacccctgcggtggaggag

SEQ ID NO: 2552554 - DNA, 25 bp, Homo sapien
gagctcctcgtaggcatagggcaca

SEQ ID NO: 2552555 - DNA, 25 bp, Homo sapien
acaagagtgggtccaggaggtgtcc

SEQ ID NO: 2552556 - DNA, 25 bp, Homo sapien
gaggccgagagctcctcgtaggcat

SEQ ID NO: 2552557 - DNA, 25 bp, Homo sapien
tcagcaggacacgctgccgcctgag

SEQ ID NO: 2552558 - DNA, 25 bp, Homo sapien
tgagcactcactgtggccgcgcgcc

SEQ ID NO: 2552559 - DNA, 25 bp, Homo sapien
gacacgctgccgcctgaggaggctt

SEQ ID NO: 2552560 - DNA, 25 bp, Homo sapien
agcactcactgtggccgcgcgccgc

SEQ ID NO: 2552561 - DNA, 25 bp, Homo sapien
ggcatgacctgagcgctggggagcc

SEQ ID NO: 2552562 - DNA, 25 bp, Homo sapien
cctgagggccagttcaggcatgacc

SEQ ID NO: 2552563 - DNA, 25 bp, Homo sapien
caggcatgacctgagcgctggggag

SEQ ID NO: 2552564 - DNA, 25 bp, Homo sapien
gttcaggcatgacctgagcgctggg

SEQ ID NO: 2552565 - DNA, 25 bp, Homo sapien
cgcgggtcacggcagtggcggtgat

SEQ ID NO: 2552566 - DNA, 25 bp, Homo sapien
gagcccgggcacatggacatgggcg

SEQ ID NO: 2552567 - DNA, 25 bp, Homo sapien
cgcagccttcgcaggcaagtgcgcc

SEQ ID NO: 2552568 - DNA, 25 bp, Homo sapien
ctcggaggaggacgcagactcggag

SEQ ID NO: 2552569 - DNA, 25 bp, Homo sapien
ggcgccttcgggaaggctcggcgga

SEQ ID NO: 2552570 - DNA, 25 bp, Homo sapien
ggactcggcggcaaagcagctgggc

SEQ ID NO: 2552571 - DNA, 25 bp, Homo sapien
cggagtccggatggaggactcggac

SEQ ID NO: 2552572 - DNA, 25 bp, Homo sapien
cttcgggcggcctcggcccagctcg

SEQ ID NO: 2552573 - DNA, 25 bp, Homo sapien
cgagaatctgcctagagccgtccag

SEQ ID NO: 2552574 - DNA, 25 bp, Homo sapien
gaggactcggacctattcggactga

SEQ ID NO: 2552575 - DNA, 25 bp, Homo sapien
agtctctcggaagccctcgtgagga

SEQ ID NO: 2552576 - DNA, 25 bp, Homo sapien
ggactgattcggcttcccacttcgg

SEQ ID NO: 2552577 - DNA, 25 bp, Homo sapien
ccggtccgtcgcgatcccggcagcc

SEQ ID NO: 2552578 - DNA, 25 bp, Homo sapien
ccgccggtccgtcgcgatcccggca

SEQ ID NO: 2552579 - DNA, 25 bp, Homo sapien
gtccgtcgcgatcccggcagcctct

SEQ ID NO: 2552580 - DNA, 25 bp, Homo sapien
cgcccgccggtccgtcgcgatcccg

SEQ ID NO: 2552581 - DNA, 25 bp, Homo sapien
gaaaccggattgtcaccacagggaa

SEQ ID NO: 2552582 - DNA, 25 bp, Homo sapien
taattactagagaacacgcacgaag

SEQ ID NO: 2552583 - DNA, 25 bp, Homo sapien
cccgcgtatgggagttctggctgta

SEQ ID NO: 2552584 - DNA, 25 bp, Homo sapien
ggcgagagttccaaggctaccgaaa

SEQ ID NO: 2552585 - DNA, 25 bp, Homo sapien
aagacgcctctgactcaccctggat

SEQ ID NO: 2552586 - DNA, 25 bp, Homo sapien
ttttgcatctgaagacgcctctgac

SEQ ID NO: 2552587 - DNA, 25 bp, Homo sapien
aagcccgaggagtgagtggagtctc

SEQ ID NO: 2552588 - DNA, 25 bp, Homo sapien
cgaggagtgagtggagtctctttcc

SEQ ID NO: 2552589 - DNA, 25 bp, Homo sapien
ttcaatgaggctaggagtctctgcc

SEQ ID NO: 2552590 - DNA, 25 bp, Homo sapien
aagcagcaaacatataccgtgggcc

SEQ ID NO: 2552591 - DNA, 25 bp, Homo sapien
gatctcgtatttgtagaaagcagca

SEQ ID NO: 2552592 - DNA, 25 bp, Homo sapien
tgtctgtggctcaccgtctgtggct

SEQ ID NO: 2552593 - DNA, 25 bp, Homo sapien
gtgcagcagcaattcgggcctctgg

SEQ ID NO: 2552594 - DNA, 25 bp, Homo sapien
gggtgaggccgagtgctctctgtgc

SEQ ID NO: 2552595 - DNA, 25 bp, Homo sapien
tgcagcagcaattcgggcctctggg

SEQ ID NO: 2552596 - DNA, 25 bp, Homo sapien
ggccgagtgctctctgtgcagcagc

SEQ ID NO: 2552597 - DNA, 25 bp, Homo sapien
tatctagtagccatttcctgagctg

SEQ ID NO: 2552598 - DNA, 25 bp, Homo sapien
caacaatgcggtctgtgcactgcag

SEQ ID NO: 2552599 - DNA, 25 bp, Homo sapien
cagcagaactgatccgaggaagtta

SEQ ID NO: 2552600 - DNA, 25 bp, Homo sapien
gcgtgcttagccactttgtgcaggg

SEQ ID NO: 2552601 - DNA, 25 bp, Homo sapien
gctgccaatgtggtcccatgagctg

SEQ ID NO: 2552602 - DNA, 25 bp, Homo sapien
cccatgagctgacaaggcctttgtg

SEQ ID NO: 2552603 - DNA, 25 bp, Homo sapien
agctgacaaggcctttgtgggaccc

SEQ ID NO: 2552604 - DNA, 25 bp, Homo sapien
tgccaatgtggtcccatgagctgac

SEQ ID NO: 2552605 - DNA, 25 bp, Homo sapien
accaagggaccatggagtcttggca

SEQ ID NO: 2552606 - DNA, 25 bp, Homo sapien
ggttctgtcatctgtttggtggcca

SEQ ID NO: 2552607 - DNA, 25 bp, Homo sapien
ccatggagtcttggcaatggctcac

SEQ ID NO: 2552608 - DNA, 25 bp, Homo sapien
tggttctgtcatctgtttggtggcc

SEQ ID NO: 2552609 - DNA, 25 bp, Homo sapien
catcaggagcgtggcgaggaaatac

SEQ ID NO: 2552610 - DNA, 25 bp, Homo sapien
cgaggaaatacagggcgtagtacgt

SEQ ID NO: 2552611 - DNA, 25 bp, Homo sapien
gtgatcatcaggagcgtggcgagga

SEQ ID NO: 2552612 - DNA, 25 bp, Homo sapien
atcatcaggagcgtggcgaggaaat

SEQ ID NO: 2552613 - DNA, 25 bp, Homo sapien
gagcaagatcgaggaccaggtagcg

SEQ ID NO: 2552614 - DNA, 25 bp, Homo sapien
gtagcggtgaggatagctgaacacc

SEQ ID NO: 2552615 - DNA, 25 bp, Homo sapien
caagatcgaggaccaggtagcggtg

SEQ ID NO: 2552616 - DNA, 25 bp, Homo sapien
cggtgaggatagctgaacacctgac

SEQ ID NO: 2552617 - DNA, 25 bp, Homo sapien
ggttcttcacggtgttaacagtcca

SEQ ID NO: 2552618 - DNA, 25 bp, Homo sapien
tcttcacggtgttaacagtccactc

SEQ ID NO: 2552619 - DNA, 25 bp, Homo sapien
ttcacggtgttaacagtccactcac

SEQ ID NO: 2552620 - DNA, 25 bp, Homo sapien
ttcttcacggtgttaacagtccact

SEQ ID NO: 2552621 - DNA, 25 bp, Homo sapien
gaatattccggagctccagatgtgg

SEQ ID NO: 2552622 - DNA, 25 bp, Homo sapien
tgatctcagtgccattacccagtgg

SEQ ID NO: 2552623 - DNA, 25 bp, Homo sapien
taatgacactgtaaggtgagcctgc

SEQ ID NO: 2552624 - DNA, 25 bp, Homo sapien
taattactcttgaaaggctgtggaa

SEQ ID NO: 2552625 - DNA, 25 bp, Homo sapien
atgttacgaccatgagcacgcagag

SEQ ID NO: 2552626 - DNA, 25 bp, Homo sapien
tctgaggcctgataacaagaggaag

SEQ ID NO: 2552627 - DNA, 25 bp, Homo sapien
tctagaggttctgggacgtaagtgc

SEQ ID NO: 2552628 - DNA, 25 bp, Homo sapien
caaacaaatgggtcagtcactagct

SEQ ID NO: 2552629 - DNA, 25 bp, Homo sapien
aattccagggaaacagcctccatgg

SEQ ID NO: 2552630 - DNA, 25 bp, Homo sapien
gagagccagagagcatgggcaacac

SEQ ID NO: 2552631 - DNA, 25 bp, Homo sapien
tcctgggggaggtgcccctgcaaca

SEQ ID NO: 2552632 - DNA, 25 bp, Homo sapien
agctccttgccctacgttcctccgg

SEQ ID NO: 2552633 - DNA, 25 bp, Homo sapien
ccagtccgcccacaacactagggcc

SEQ ID NO: 2552634 - DNA, 25 bp, Homo sapien
ggtgaaggccgcgatggcaaccacc

SEQ ID NO: 2552635 - DNA, 25 bp, Homo sapien
tgcaggacggcctccaggccgtgaa

SEQ ID NO: 2552636 - DNA, 25 bp, Homo sapien
aacactagggcctgccaaagcagga

SEQ ID NO: 2552637 - DNA, 25 bp, Homo sapien
ttattgctttaggaacccagagtcc

SEQ ID NO: 2552638 - DNA, 25 bp, Homo sapien
cctggccacggagtaaactgggatc

SEQ ID NO: 2552639 - DNA, 25 bp, Homo sapien
aaggcagttctgtctggtccctacc

SEQ ID NO: 2552640 - DNA, 25 bp, Homo sapien
ccatctatggccagtcactaggaaa

SEQ ID NO: 2552641 - DNA, 25 bp, Homo sapien
gtttagcactccgtgcaaaaggcaa

SEQ ID NO: 2552642 - DNA, 25 bp, Homo sapien
tatttacaaaatgcggtgaagagaa

SEQ ID NO: 2552643 - DNA, 25 bp, Homo sapien
gacggaggctccgaatgtggccctc

SEQ ID NO: 2552644 - DNA, 25 bp, Homo sapien
actgatagtaaatctgggaatggga

SEQ ID NO: 2552645 - DNA, 25 bp, Homo sapien
cgagcggaaggcgcccggcagccag

SEQ ID NO: 2552646 - DNA, 25 bp, Homo sapien
cagctggcaagtggggtgtgctctc

SEQ ID NO: 2552647 - DNA, 25 bp, Homo sapien
gagcggaaggcgcccggcagccagg

SEQ ID NO: 2552648 - DNA, 25 bp, Homo sapien
ggcaagtggggtgtgctctcttgca

SEQ ID NO: 2552649 - DNA, 25 bp, Homo sapien
tcatctgcccggcttccaggatggc

SEQ ID NO: 2552650 - DNA, 25 bp, Homo sapien
cacagtgggactgtctggttccgtc

SEQ ID NO: 2552651 - DNA, 25 bp, Homo sapien
gggtagcaccggctgccacagcagt

SEQ ID NO: 2552652 - DNA, 25 bp, Homo sapien
tgctgtgaccgctcagaacagggcc

SEQ ID NO: 2552653 - DNA, 25 bp, Homo sapien
gcgctcgccggtgcgtccgtctgtt

SEQ ID NO: 2552654 - DNA, 25 bp, Homo sapien
tcgccggtgcgtccgtctgttcgcg

SEQ ID NO: 2552655 - DNA, 25 bp, Homo sapien
gtgcgtccgtctgttcgcgcctcgg

SEQ ID NO: 2552656 - DNA, 25 bp, Homo sapien
cccctcggcgctcgccggtgcgtcc

SEQ ID NO: 2552657 - DNA, 25 bp, Homo sapien
gctcacagaaccgggagaagcctcc

SEQ ID NO: 2552658 - DNA, 25 bp, Homo sapien
tcacagaaccgggagaagcctccct

SEQ ID NO: 2552659 - DNA, 25 bp, Homo sapien
ctgctcacagaaccgggagaagcct

SEQ ID NO: 2552660 - DNA, 25 bp, Homo sapien
cacagaaccgggagaagcctcccta

SEQ ID NO: 2552661 - DNA, 25 bp, Homo sapien
tgcttcccggccactggtttccttc

SEQ ID NO: 2552662 - DNA, 25 bp, Homo sapien
gagtgggtgtgcagtgctacctcca

SEQ ID NO: 2552663 - DNA, 25 bp, Homo sapien
cagctggtgcttcccggccactggt

SEQ ID NO: 2552664 - DNA, 25 bp, Homo sapien
gtgtgcagtgctacctccacggtca

SEQ ID NO: 2552665 - DNA, 25 bp, Homo sapien
tgcccctccaacgaggtagggtggc

SEQ ID NO: 2552666 - DNA, 25 bp, Homo sapien
gagccagtccagtggccccaacaca

SEQ ID NO: 2552667 - DNA, 25 bp, Homo sapien
tcactgcccctccaacgaggtaggg

SEQ ID NO: 2552668 - DNA, 25 bp, Homo sapien
gtatcactgcccctccaacgaggta

SEQ ID NO: 2552669 - DNA, 25 bp, Homo sapien
gatgcggccaggtggccagcgcaga

SEQ ID NO: 2552670 - DNA, 25 bp, Homo sapien
gccaggtggccagcgcagaacccct

SEQ ID NO: 2552671 - DNA, 25 bp, Homo sapien
caggtggccagcgcagaacccctgg

SEQ ID NO: 2552672 - DNA, 25 bp, Homo sapien
ggccagcgcagaacccctggcagca

SEQ ID NO: 2552673 - DNA, 25 bp, Homo sapien
agacctcagtgtggccccggtctga

SEQ ID NO: 2552674 - DNA, 25 bp, Homo sapien
gggtggcggccagcgggagaagggc

SEQ ID NO: 2552675 - DNA, 25 bp, Homo sapien
gcgggagaagggcagacctcagtgt

SEQ ID NO: 2552676 - DNA, 25 bp, Homo sapien
aagggcagacctcagtgtggccccg

SEQ ID NO: 2552677 - DNA, 25 bp, Homo sapien
tggcacccgggcagcagctcacggc

SEQ ID NO: 2552678 - DNA, 25 bp, Homo sapien
ttggtggcacccgggcagcagctca

SEQ ID NO: 2552679 - DNA, 25 bp, Homo sapien
cagctcacggccccggactggctca

SEQ ID NO: 2552680 - DNA, 25 bp, Homo sapien
agctcacggccccggactggctcat

SEQ ID NO: 2552681 - DNA, 25 bp, Homo sapien
ttggccacaccgtcggaccggccca

SEQ ID NO: 2552682 - DNA, 25 bp, Homo sapien
tcatcttggccacaccgtcggaccg

SEQ ID NO: 2552683 - DNA, 25 bp, Homo sapien
tggccacaccgtcggaccggcccag

SEQ ID NO: 2552684 - DNA, 25 bp, Homo sapien
catcttggccacaccgtcggaccgg

SEQ ID NO: 2552685 - DNA, 25 bp, Homo sapien
gttgattagggtccagaggcctccc

SEQ ID NO: 2552686 - DNA, 25 bp, Homo sapien
tggagcagacacctggcggcttatc

SEQ ID NO: 2552687 - DNA, 25 bp, Homo sapien
tcaggttacagcaacgagtgcagcg

SEQ ID NO: 2552688 - DNA, 25 bp, Homo sapien
taagtgaagggtgcatctagctagc

SEQ ID NO: 2552689 - DNA, 25 bp, Homo sapien
ctgaaccgggagacaccagtcactc

SEQ ID NO: 2552690 - DNA, 25 bp, Homo sapien
gagacaccagtcactcccccgacgg

SEQ ID NO: 2552691 - DNA, 25 bp, Homo sapien
gacaccagtcactcccccgacgggc

SEQ ID NO: 2552692 - DNA, 25 bp, Homo sapien
gacccacagcctcccgtccagttgg

SEQ ID NO: 2552693 - DNA, 25 bp, Homo sapien
catgatgacgttggagttggaatac

SEQ ID NO: 2552694 - DNA, 25 bp, Homo sapien
tggagttggaatacttcttcctctg

SEQ ID NO: 2552695 - DNA, 25 bp, Homo sapien
acgtggtactgcgaggtctcgtgca

SEQ ID NO: 2552696 - DNA, 25 bp, Homo sapien
tgcgaggtctcgtgcatgatgacgt

SEQ ID NO: 2552697 - DNA, 25 bp, Homo sapien
accagcttccggatggcgtcgtcca

SEQ ID NO: 2552698 - DNA, 25 bp, Homo sapien
cacagacgtgatggcttcgctcttg

SEQ ID NO: 2552699 - DNA, 25 bp, Homo sapien
aacgactggtcgttcacctgcagca

SEQ ID NO: 2552700 - DNA, 25 bp, Homo sapien
agcagccgcaacgactggtcgttca

SEQ ID NO: 2552701 - DNA, 25 bp, Homo sapien
gtacatcgcgcggacacgactcgca

SEQ ID NO: 2552702 - DNA, 25 bp, Homo sapien
ggacacgactcgcacccggggtctg

SEQ ID NO: 2552703 - DNA, 25 bp, Homo sapien
gacacgactcgcacccggggtctgg

SEQ ID NO: 2552704 - DNA, 25 bp, Homo sapien
ctgcgggtacatcgcgcggacacga

SEQ ID NO: 2552705 - DNA, 25 bp, Homo sapien
tgggcagcgggaagtcttccagctc

SEQ ID NO: 2552706 - DNA, 25 bp, Homo sapien
cacctcatcgcagtggaagaagtgg

SEQ ID NO: 2552707 - DNA, 25 bp, Homo sapien
gaagaagtggacatccggcttgctc

SEQ ID NO: 2552708 - DNA, 25 bp, Homo sapien
tagcgcagctggttgaggaccgtct

SEQ ID NO: 2552709 - DNA, 25 bp, Homo sapien
ttcagggtctgcggccgcatcttct

SEQ ID NO: 2552710 - DNA, 25 bp, Homo sapien
ttcttgcccagccggcagtcggcca

SEQ ID NO: 2552711 - DNA, 25 bp, Homo sapien
ggcagtcggccaacgcgctctcgat

SEQ ID NO: 2552712 - DNA, 25 bp, Homo sapien
aacgcgctctcgatgtcctcgtgca

SEQ ID NO: 2552713 - DNA, 25 bp, Homo sapien
ggaggcaggatggactgccgctgcc

SEQ ID NO: 2552714 - DNA, 25 bp, Homo sapien
tgccgctgccgaatcttctcctggt

SEQ ID NO: 2552715 - DNA, 25 bp, Homo sapien
aatccccgccgcggtgctggaaggg

SEQ ID NO: 2552716 - DNA, 25 bp, Homo sapien
tgcgggcccacgcgattcttggcct

SEQ ID NO: 2552717 - DNA, 25 bp, Homo sapien
tcctgcgactcccgacggcggaaac

SEQ ID NO: 2552718 - DNA, 25 bp, Homo sapien
ctcctgcgactcccgacggcggaaa

SEQ ID NO: 2552719 - DNA, 25 bp, Homo sapien
ggacagcaaggaccagtgtccactg

SEQ ID NO: 2552720 - DNA, 25 bp, Homo sapien
gagggacagcaaggaccagtgtcca

SEQ ID NO: 2552721 - DNA, 25 bp, Homo sapien
ggggactggccggagggacagcaag

SEQ ID NO: 2552722 - DNA, 25 bp, Homo sapien
gggactggccggagggacagcaagg

SEQ ID NO: 2552723 - DNA, 25 bp, Homo sapien
agccgggccacaaaccactcgatgt

SEQ ID NO: 2552724 - DNA, 25 bp, Homo sapien
tcgtccagggcgcagttgaggattt

SEQ ID NO: 2552725 - DNA, 25 bp, Homo sapien
aaaccactcgatgtcgtccagggcg

SEQ ID NO: 2552726 - DNA, 25 bp, Homo sapien
tcccctttttccgctggttcagctg

SEQ ID NO: 2552727 - DNA, 25 bp, Homo sapien
caggctggccctgatctccccggcc

SEQ ID NO: 2552728 - DNA, 25 bp, Homo sapien
cctgcgccttctgtcccacgcagcc

SEQ ID NO: 2552729 - DNA, 25 bp, Homo sapien
tggcatgggaggcaccgcgtgagcc

SEQ ID NO: 2552730 - DNA, 25 bp, Homo sapien
acctccatgagtagcccccatggat

SEQ ID NO: 2552731 - DNA, 25 bp, Homo sapien
caagttaatcgccagcttgattttc

SEQ ID NO: 2552732 - DNA, 25 bp, Homo sapien
cagcaagttaatcgccagcttgatt

SEQ ID NO: 2552733 - DNA, 25 bp, Homo sapien
tttctggaagcagtcgatgaactcg

SEQ ID NO: 2552734 - DNA, 25 bp, Homo sapien
aactcgccctcagagggaggccgtg

SEQ ID NO: 2552735 - DNA, 25 bp, Homo sapien
gtgggaacaagtgagcaggtgccgg

SEQ ID NO: 2552736 - DNA, 25 bp, Homo sapien
tgggaacaagtgagcaggtgccggg

SEQ ID NO: 2552737 - DNA, 25 bp, Homo sapien
ccgaagaggaagtgcacgagctccg

SEQ ID NO: 2552738 - DNA, 25 bp, Homo sapien
gaagtgcacgagctccgcggcgctg

SEQ ID NO: 2552739 - DNA, 25 bp, Homo sapien
gcggcgctggggttctggatgtgct

SEQ ID NO: 2552740 - DNA, 25 bp, Homo sapien
agtgcacgagctccgcggcgctggg

SEQ ID NO: 2552741 - DNA, 25 bp, Homo sapien
ccccgaccccggggagatgctgcag

SEQ ID NO: 2552742 - DNA, 25 bp, Homo sapien
accccgaccccggggagatgctgca

SEQ ID NO: 2552743 - DNA, 25 bp, Homo sapien
caaccccgaccccggggagatgctg

SEQ ID NO: 2552744 - DNA, 25 bp, Homo sapien
cccagggagagtggccacacagcgt

SEQ ID NO: 2552745 - DNA, 25 bp, Homo sapien
ccacacagcgtgaaccgggctgccc

SEQ ID NO: 2552746 - DNA, 25 bp, Homo sapien
acacagcgtgaaccgggctgcccaa

SEQ ID NO: 2552747 - DNA, 25 bp, Homo sapien
cgtgaaccgggctgcccaaggcggg

SEQ ID NO: 2552748 - DNA, 25 bp, Homo sapien
tccacggcatctcgggagagcagtg

SEQ ID NO: 2552749 - DNA, 25 bp, Homo sapien
cagtgggcaggagacggagcgtgcg

SEQ ID NO: 2552750 - DNA, 25 bp, Homo sapien
tcccacagcgacatctccttaggga

SEQ ID NO: 2552751 - DNA, 25 bp, Homo sapien
cggagcgtgcgatgtctgggccact

SEQ ID NO: 2552752 - DNA, 25 bp, Homo sapien
ggtcctgaagtcagccctgcctctc

SEQ ID NO: 2552753 - DNA, 25 bp, Homo sapien
cctgcctctccagaactggcccacc

SEQ ID NO: 2552754 - DNA, 25 bp, Homo sapien
atgaagccccggcactgctctgccc

SEQ ID NO: 2552755 - DNA, 25 bp, Homo sapien
caggacccccttgctggcccccatg

SEQ ID NO: 2552756 - DNA, 25 bp, Homo sapien
acctgtggctcccgcggccactcgg

SEQ ID NO: 2552757 - DNA, 25 bp, Homo sapien
cagccgctgtggaacttgggcacat

SEQ ID NO: 2552758 - DNA, 25 bp, Homo sapien
cttgggcacatagaggggcacctgt

SEQ ID NO: 2552759 - DNA, 25 bp, Homo sapien
gaacttgggcacatagaggggcacc

SEQ ID NO: 2552760 - DNA, 25 bp, Homo sapien
ctgggagtttcttatggactgtcgg

SEQ ID NO: 2552761 - DNA, 25 bp, Homo sapien
tttcttatggactgtcggctcactg

SEQ ID NO: 2552762 - DNA, 25 bp, Homo sapien
ggagctgactggtggtagggcatcc

SEQ ID NO: 2552763 - DNA, 25 bp, Homo sapien
agctgactggtggtagggcatcccc

SEQ ID NO: 2552764 - DNA, 25 bp, Homo sapien
tggccaggccgtccatcctggtcag

SEQ ID NO: 2552765 - DNA, 25 bp, Homo sapien
gtcatcagggcagctcccgtgtcca

SEQ ID NO: 2552766 - DNA, 25 bp, Homo sapien
tggtcatcagggcagctcccgtgtc

SEQ ID NO: 2552767 - DNA, 25 bp, Homo sapien
ggccgtccatcctggtcagtgtggc

SEQ ID NO: 2552768 - DNA, 25 bp, Homo sapien
tccagtggaggacgggtctcaagct

SEQ ID NO: 2552769 - DNA, 25 bp, Homo sapien
gaacacagcccaaatggtccagtgg

SEQ ID NO: 2552770 - DNA, 25 bp, Homo sapien
cacagcccaaatggtccagtggagg

SEQ ID NO: 2552771 - DNA, 25 bp, Homo sapien
tggtccagtggaggacgggtctcaa

SEQ ID NO: 2552772 - DNA, 25 bp, Homo sapien
gttcctgggaaacgccagggtcaca

SEQ ID NO: 2552773 - DNA, 25 bp, Homo sapien
ggaaccagagccaggggcgttcctg

SEQ ID NO: 2552774 - DNA, 25 bp, Homo sapien
agcatgtcttcagagccgtggcccc

SEQ ID NO: 2552775 - DNA, 25 bp, Homo sapien
cagagccaggggcgttcctgggaaa

SEQ ID NO: 2552776 - DNA, 25 bp, Homo sapien
ttcccaggtgcacgactggctgcct

SEQ ID NO: 2552777 - DNA, 25 bp, Homo sapien
tcatacaggatcttgacgtacttgg

SEQ ID NO: 2552778 - DNA, 25 bp, Homo sapien
gcatttcgggctgtgaagtcataca

SEQ ID NO: 2552779 - DNA, 25 bp, Homo sapien
ctcatccttgagcaccgatagctcg

SEQ ID NO: 2552780 - DNA, 25 bp, Homo sapien
cgatagctcgttggcatttcgggct

SEQ ID NO: 2552781 - DNA, 25 bp, Homo sapien
tccggtcgcgcctcgcctaggatgt

SEQ ID NO: 2552782 - DNA, 25 bp, Homo sapien
tcgcgcctcgcctaggatgttgcag

SEQ ID NO: 2552783 - DNA, 25 bp, Homo sapien
gatgttgcagggcacgtaccccgcc

SEQ ID NO: 2552784 - DNA, 25 bp, Homo sapien
gctgcgcagcttccaccactgccgg

SEQ ID NO: 2552785 - DNA, 25 bp, Homo sapien
ccgggaagcttgggggtagcttgtg

SEQ ID NO: 2552786 - DNA, 25 bp, Homo sapien
gtagcttgtgggtcgggctggcggg

SEQ ID NO: 2552787 - DNA, 25 bp, Homo sapien
ctggcggggccccagtacttctgac

SEQ ID NO: 2552788 - DNA, 25 bp, Homo sapien
tggcggggccccagtacttctgacc

SEQ ID NO: 2552789 - DNA, 25 bp, Homo sapien
gggcgcgcgactcaggcccgccgct

SEQ ID NO: 2552790 - DNA, 25 bp, Homo sapien
gagggggcgcgcgactcaggcccgc

SEQ ID NO: 2552791 - DNA, 25 bp, Homo sapien
gggggcgcgcgactcaggcccgccg

SEQ ID NO: 2552792 - DNA, 25 bp, Homo sapien
ctgagggggcgcgcgactcaggccc

SEQ ID NO: 2552793 - DNA, 25 bp, Homo sapien
ttttccggatgagctcgtcgttgac

SEQ ID NO: 2552794 - DNA, 25 bp, Homo sapien
tcgtccggacccgactcgtaggtga

SEQ ID NO: 2552795 - DNA, 25 bp, Homo sapien
gctccacgcggaagtgcctctgtgg

SEQ ID NO: 2552796 - DNA, 25 bp, Homo sapien
gtggctgcgccctgatgttgctgat

SEQ ID NO: 2552797 - DNA, 25 bp, Homo sapien
ctgggggcgggcagttgggcgtcag

SEQ ID NO: 2552798 - DNA, 25 bp, Homo sapien
tgggggcgggcagttgggcgtcagg

SEQ ID NO: 2552799 - DNA, 25 bp, Homo sapien
ggggcgggcagttgggcgtcagggc

SEQ ID NO: 2552800 - DNA, 25 bp, Homo sapien
agctgcggcccggtcaggatgccca

SEQ ID NO: 2552801 - DNA, 25 bp, Homo sapien
agctggctgtacacgcggacgccct

SEQ ID NO: 2552802 - DNA, 25 bp, Homo sapien
cctcctcgccgcacactttcttcag

SEQ ID NO: 2552803 - DNA, 25 bp, Homo sapien
ggtgagctggctgtacacgcggacg

SEQ ID NO: 2552804 - DNA, 25 bp, Homo sapien
tcttccagctccgacccactttgct

SEQ ID NO: 2552805 - DNA, 25 bp, Homo sapien
agttcttccagctccgacccacttt

SEQ ID NO: 2552806 - DNA, 25 bp, Homo sapien
gattcatggaatgaaacttgttcat

SEQ ID NO: 2552807 - DNA, 25 bp, Homo sapien
ccccctcctctgattcatggaatga

SEQ ID NO: 2552808 - DNA, 25 bp, Homo sapien
aaataatactccatgcattgtgggt

SEQ ID NO: 2552809 - DNA, 25 bp, Homo sapien
taatactccatgcattgtgggtggg

SEQ ID NO: 2552810 - DNA, 25 bp, Homo sapien
aatactccatgcattgtgggtgggc

SEQ ID NO: 2552811 - DNA, 25 bp, Homo sapien
taaaaataatactccatgcattgtg

SEQ ID NO: 2552812 - DNA, 25 bp, Homo sapien
tagtcttggtgtgggctgaggcctt

SEQ ID NO: 2552813 - DNA, 25 bp, Homo sapien
caggtttggctgagattagtcttgg

SEQ ID NO: 2552814 - DNA, 25 bp, Homo sapien
aggatgggcgttgtgcctccagaca

SEQ ID NO: 2552815 - DNA, 25 bp, Homo sapien
ctgaggccttgggtactgtttggcc

SEQ ID NO: 2552816 - DNA, 25 bp, Homo sapien
tgtggatggatgtagaagtgggtgg

SEQ ID NO: 2552817 - DNA, 25 bp, Homo sapien
gagaaggtggacaaggggctggcac

SEQ ID NO: 2552818 - DNA, 25 bp, Homo sapien
tgtggcctcaagagaaggtggacaa

SEQ ID NO: 2552819 - DNA, 25 bp, Homo sapien
ccagccccagggagttctgtggcct

SEQ ID NO: 2552820 - DNA, 25 bp, Homo sapien
cagaactctgcgtgtgtgcgaggtt

SEQ ID NO: 2552821 - DNA, 25 bp, Homo sapien
ccagagaaagctccagtcctgggcc

SEQ ID NO: 2552822 - DNA, 25 bp, Homo sapien
ggatcattggcctgaaacttggcca

SEQ ID NO: 2552823 - DNA, 25 bp, Homo sapien
gcaggtgaagtgtgtgtcgttcccc

SEQ ID NO: 2552824 - DNA, 25 bp, Homo sapien
gagactcaagtccaggcaccaagac

SEQ ID NO: 2552825 - DNA, 25 bp, Homo sapien
tgagactcaagtccaggcaccaaga

SEQ ID NO: 2552826 - DNA, 25 bp, Homo sapien
cagccacctctcatctgtagggtga

SEQ ID NO: 2552827 - DNA, 25 bp, Homo sapien
ggtttaattgcttagccctggtgcc

SEQ ID NO: 2552828 - DNA, 25 bp, Homo sapien
gcttggatgacacgctttgggcctt

SEQ ID NO: 2552829 - DNA, 25 bp, Homo sapien
gctcccactagggttgtgcccagcg

SEQ ID NO: 2552830 - DNA, 25 bp, Homo sapien
cacgctttgggccttctggtcgctg

SEQ ID NO: 2552831 - DNA, 25 bp, Homo sapien
tgcccagcgaaagccgggcttggat

SEQ ID NO: 2552832 - DNA, 25 bp, Homo sapien
caggttgcagggaggagggccggtg

SEQ ID NO: 2552833 - DNA, 25 bp, Homo sapien
ttgcagggaggagggccggtgcccc

SEQ ID NO: 2552834 - DNA, 25 bp, Homo sapien
ctgcaggttgcagggaggagggccg

SEQ ID NO: 2552835 - DNA, 25 bp, Homo sapien
gttgcagggaggagggccggtgccc

SEQ ID NO: 2552836 - DNA, 25 bp, Homo sapien
gtgcctatccccgtcctgaggtggt

SEQ ID NO: 2552837 - DNA, 25 bp, Homo sapien
tggagcagatatagccccggtgcct

SEQ ID NO: 2552838 - DNA, 25 bp, Homo sapien
cccacagaggccccttttggagcag

SEQ ID NO: 2552839 - DNA, 25 bp, Homo sapien
tatccccgtcctgaggtggtggctc

SEQ ID NO: 2552840 - DNA, 25 bp, Homo sapien
cagaccctcggcaaccctggcccca

SEQ ID NO: 2552841 - DNA, 25 bp, Homo sapien
ggccagcaccagcagaccctccttc

SEQ ID NO: 2552842 - DNA, 25 bp, Homo sapien
gcagaccctccttctttctgtggac

SEQ ID NO: 2552843 - DNA, 25 bp, Homo sapien
ggccagaccctcggcaaccctggcc

SEQ ID NO: 2552844 - DNA, 25 bp, Homo sapien
tgaggtctgatgttcaaagccccgc

SEQ ID NO: 2552845 - DNA, 25 bp, Homo sapien
gtctgatgttcaaagccccgccctc

SEQ ID NO: 2552846 - DNA, 25 bp, Homo sapien
cctgaggtctgatgttcaaagcccc

SEQ ID NO: 2552847 - DNA, 25 bp, Homo sapien
tccctcctcgcccagtgtggactct

SEQ ID NO: 2552848 - DNA, 25 bp, Homo sapien
cttgggttctgcggggcctgactgg

SEQ ID NO: 2552849 - DNA, 25 bp, Homo sapien
gttctgcggggcctgactgggcacg

SEQ ID NO: 2552850 - DNA, 25 bp, Homo sapien
cctgactgggcacgggcggacaggg

SEQ ID NO: 2552851 - DNA, 25 bp, Homo sapien
tgcggggcctgactgggcacgggcg

SEQ ID NO: 2552852 - DNA, 25 bp, Homo sapien
gtgagtgacttattttgggaacttc

SEQ ID NO: 2552853 - DNA, 25 bp, Homo sapien
tgagtgacttattttgggaacttcc

SEQ ID NO: 2552854 - DNA, 25 bp, Homo sapien
gttgtgagtgacttattttgggaac

SEQ ID NO: 2552855 - DNA, 25 bp, Homo sapien
tgtgagtgacttattttgggaactt

SEQ ID NO: 2552856 - DNA, 25 bp, Homo sapien
gtgccgactctgcggggctgaaccc

SEQ ID NO: 2552857 - DNA, 25 bp, Homo sapien
ccgaacccggcgatgcaggatccat

SEQ ID NO: 2552858 - DNA, 25 bp, Homo sapien
gactctgcggggctgaacccgccag

SEQ ID NO: 2552859 - DNA, 25 bp, Homo sapien
agggccgaacccggcgatgcaggat

SEQ ID NO: 2552860 - DNA, 25 bp, Homo sapien
cgggaaaacacctgcacgacacggg

SEQ ID NO: 2552861 - DNA, 25 bp, Homo sapien
ggctgccaatcggaaagcggcgcgg

SEQ ID NO: 2552862 - DNA, 25 bp, Homo sapien
tgcggatcctacaggctgggtctcc

SEQ ID NO: 2552863 - DNA, 25 bp, Homo sapien
ctggtccctgcgcgcctggacgaag

SEQ ID NO: 2552864 - DNA, 25 bp, Homo sapien
cggcggcggcgacgggacgggcgcg

SEQ ID NO: 2552865 - DNA, 25 bp, Homo sapien
gcgacgggacgggcgcgcggacggc

SEQ ID NO: 2552866 - DNA, 25 bp, Homo sapien
ggcggcgacgggacgggcgcgcgga

SEQ ID NO: 2552867 - DNA, 25 bp, Homo sapien
cggcgacgggacgggcgcgcggacg

SEQ ID NO: 2552868 - DNA, 25 bp, Homo sapien
cgtggaagtcgcccgtgtcggccac

SEQ ID NO: 2552869 - DNA, 25 bp, Homo sapien
tggaagtcgcccgtgtcggccacca

SEQ ID NO: 2552870 - DNA, 25 bp, Homo sapien
gtggtgaactgcttgagctggtcca

SEQ ID NO: 2552871 - DNA, 25 bp, Homo sapien
tgagctggtccagcgcggactccat

SEQ ID NO: 2552872 - DNA, 25 bp, Homo sapien
ttgaaatgagggtcttaggacccac

SEQ ID NO: 2552873 - DNA, 25 bp, Homo sapien
tccagggtatgtgatgggacccctt

SEQ ID NO: 2552874 - DNA, 25 bp, Homo sapien
tatgtgatgggaccccttttgaaat

SEQ ID NO: 2552875 - DNA, 25 bp, Homo sapien
gaaaagcaagtagacggccgggcgc

SEQ ID NO: 2552876 - DNA, 25 bp, Homo sapien
tcaaaagccaaagtaagtggagtac

SEQ ID NO: 2552877 - DNA, 25 bp, Homo sapien
tgtgaaggaaccctgtaattcccca

SEQ ID NO: 2552878 - DNA, 25 bp, Homo sapien
acgttaggggagtccagagcatttc

SEQ ID NO: 2552879 - DNA, 25 bp, Homo sapien
ttgcttccaactggaaacatgtgaa

SEQ ID NO: 2552880 - DNA, 25 bp, Homo sapien
caccagctcctggtaagcgggcatc

SEQ ID NO: 2552881 - DNA, 25 bp, Homo sapien
ctgcggccaggatcagggacgggtt

SEQ ID NO: 2552882 - DNA, 25 bp, Homo sapien
gacgggttggtggtagcatcctggg

SEQ ID NO: 2552883 - DNA, 25 bp, Homo sapien
agcttccggccataggcaatcgcct

SEQ ID NO: 2552884 - DNA, 25 bp, Homo sapien
atcaatagcatttttaatctggtcc

SEQ ID NO: 2552885 - DNA, 25 bp, Homo sapien
acaacacaaaaagtttatcaatagc

SEQ ID NO: 2552886 - DNA, 25 bp, Homo sapien
catttttaatctggtcctcttgtga

SEQ ID NO: 2552887 - DNA, 25 bp, Homo sapien
cacaaaaagtttatcaatagcattt

SEQ ID NO: 2552888 - DNA, 25 bp, Homo sapien
acttctgtggatactcggcccggaa

SEQ ID NO: 2552889 - DNA, 25 bp, Homo sapien
atactcggcccggaatcttctttag

SEQ ID NO: 2552890 - DNA, 25 bp, Homo sapien
tctgtggatactcggcccggaatct

SEQ ID NO: 2552891 - DNA, 25 bp, Homo sapien
ctcggcccggaatcttctttagtat

SEQ ID NO: 2552892 - DNA, 25 bp, Homo sapien
aagaattcggtccttgctgatccca

SEQ ID NO: 2552893 - DNA, 25 bp, Homo sapien
tgaattccttcccaggttgatgaca

SEQ ID NO: 2552894 - DNA, 25 bp, Homo sapien
ccttgtagagctcgatgagccgcct

SEQ ID NO: 2552895 - DNA, 25 bp, Homo sapien
caccatcgcatctttatcaaaggag

SEQ ID NO: 2552896 - DNA, 25 bp, Homo sapien
tggatggtacttcctgggaaatccc

SEQ ID NO: 2552897 - DNA, 25 bp, Homo sapien
cataggcttgtgttgatcaggacag

SEQ ID NO: 2552898 - DNA, 25 bp, Homo sapien
tgcaggtgctaactagtggcttttc

SEQ ID NO: 2552899 - DNA, 25 bp, Homo sapien
gagagagtcaaacttgcctgatgcc

SEQ ID NO: 2552900 - DNA, 25 bp, Homo sapien
tgcggggcggggacaggtgagggcg

SEQ ID NO: 2552901 - DNA, 25 bp, Homo sapien
ggcggggacaggtgagggcggggca

SEQ ID NO: 2552902 - DNA, 25 bp, Homo sapien
ctgcggggcggggacaggtgagggc

SEQ ID NO: 2552903 - DNA, 25 bp, Homo sapien
gcgaaggagaagagtaacgtcatgt

SEQ ID NO: 2552904 - DNA, 25 bp, Homo sapien
ggtgtttgccacatgccaatcaagg

SEQ ID NO: 2552905 - DNA, 25 bp, Homo sapien
ccaatcaaggatgcgcccaacaaat

SEQ ID NO: 2552906 - DNA, 25 bp, Homo sapien
agtggatgccgtgctgctcctcgag

SEQ ID NO: 2552907 - DNA, 25 bp, Homo sapien
tagattttagtgacactctttaccc

SEQ ID NO: 2552908 - DNA, 25 bp, Homo sapien
atggtgaggaagtcacagccggcca

SEQ ID NO: 2552909 - DNA, 25 bp, Homo sapien
gaaggaggcgcccatgacaatggtt

SEQ ID NO: 2552910 - DNA, 25 bp, Homo sapien
tgatctcgcccgtgttgcggaagga

SEQ ID NO: 2552911 - DNA, 25 bp, Homo sapien
gagccttggctgatgacttgagtga

SEQ ID NO: 2552912 - DNA, 25 bp, Homo sapien
ccagcaaggctcacgctggaagtgg

SEQ ID NO: 2552913 - DNA, 25 bp, Homo sapien
gggacaagaaccagccttccatgcc

SEQ ID NO: 2552914 - DNA, 25 bp, Homo sapien
gagtgagatgtgttaggaaagccaa

SEQ ID NO: 2552915 - DNA, 25 bp, Homo sapien
ggcaaacttgcggatcccgtcagag

SEQ ID NO: 2552916 - DNA, 25 bp, Homo sapien
ctgcatcagcggcaaacttgcggat

SEQ ID NO: 2552917 - DNA, 25 bp, Homo sapien
ccatctggtcctcgttgtgcaacca

SEQ ID NO: 2552918 - DNA, 25 bp, Homo sapien
gaaagacttctcatccaggtggatt

SEQ ID NO: 2552919 - DNA, 25 bp, Homo sapien
cattctctgcattgaacattcgttc

SEQ ID NO: 2552920 - DNA, 25 bp, Homo sapien
tttccattctctgcattgaacattc

SEQ ID NO: 2552921 - DNA, 25 bp, Homo sapien
ctactttccattctctgcattgaac

SEQ ID NO: 2552922 - DNA, 25 bp, Homo sapien
tccattctctgcattgaacattcgt

SEQ ID NO: 2552923 - DNA, 25 bp, Homo sapien
atcccagctggccggcggtgcagat

SEQ ID NO: 2552924 - DNA, 25 bp, Homo sapien
tgcagatctggagtccagcctcagg

SEQ ID NO: 2552925 - DNA, 25 bp, Homo sapien
gcagtcagatcccagctggccggcg

SEQ ID NO: 2552926 - DNA, 25 bp, Homo sapien
ccacgtgcagtcagatcccagctgg

SEQ ID NO: 2552927 - DNA, 25 bp, Homo sapien
tgtaaaaaacgcaagattcatcaga

SEQ ID NO: 2552928 - DNA, 25 bp, Homo sapien
ctgtccctgctccaatttgtaaaaa

SEQ ID NO: 2552929 - DNA, 25 bp, Homo sapien
aagtgactgctttaatgtattaggc

SEQ ID NO: 2552930 - DNA, 25 bp, Homo sapien
atcagaaatctatgatctgtccctg

SEQ ID NO: 2552931 - DNA, 25 bp, Homo sapien
tcattcctcagctgcgtgcgaggcc

SEQ ID NO: 2552932 - DNA, 25 bp, Homo sapien
ttcctcagctgcgtgcgaggcctct

SEQ ID NO: 2552933 - DNA, 25 bp, Homo sapien
agctgcgtgcgaggcctctggcttg

SEQ ID NO: 2552934 - DNA, 25 bp, Homo sapien
cagctgcgtgcgaggcctctggctt

SEQ ID NO: 2552935 - DNA, 25 bp, Homo sapien
tgacattgagcccagcattgaagat

SEQ ID NO: 2552936 - DNA, 25 bp, Homo sapien
tgtgaccggatgacctcccaaatgc

SEQ ID NO: 2552937 - DNA, 25 bp, Homo sapien
ggaagcccaagatgaaagcaccagt

SEQ ID NO: 2552938 - DNA, 25 bp, Homo sapien
tccccttgcaggtgaggacttaagc

SEQ ID NO: 2552939 - DNA, 25 bp, Homo sapien
gagccgccacgtccggctaacaagt

SEQ ID NO: 2552940 - DNA, 25 bp, Homo sapien
cgccacgtccggctaacaagtactt

SEQ ID NO: 2552941 - DNA, 25 bp, Homo sapien
cgtgagccgccacgtccggctaaca

SEQ ID NO: 2552942 - DNA, 25 bp, Homo sapien
ccgccacgtccggctaacaagtact

SEQ ID NO: 2552943 - DNA, 25 bp, Homo sapien
cgcacgcgcagacccagcgccgagc

SEQ ID NO: 2552944 - DNA, 25 bp, Homo sapien
gccgccagggcacgtgacccgcgaa

SEQ ID NO: 2552945 - DNA, 25 bp, Homo sapien
cgcgcagacccagcgccgagcccga

SEQ ID NO: 2552946 - DNA, 25 bp, Homo sapien
gtgacccgcgaactcccgggcgcgc

SEQ ID NO: 2552947 - DNA, 25 bp, Homo sapien
cggggccaaagcaggcgcgacctgc

SEQ ID NO: 2552948 - DNA, 25 bp, Homo sapien
aaagcaggcgcgacctgcgaccgcc

SEQ ID NO: 2552949 - DNA, 25 bp, Homo sapien
tgccaggctcggatgccgaacccgc

SEQ ID NO: 2552950 - DNA, 25 bp, Homo sapien
ccctgccaggctcggatgccgaacc

SEQ ID NO: 2552951 - DNA, 25 bp, Homo sapien
gtgtggccaccggaacaccacgggc

SEQ ID NO: 2552952 - DNA, 25 bp, Homo sapien
accaaagccagcacgcccgaggtgt

SEQ ID NO: 2552953 - DNA, 25 bp, Homo sapien
cgcgcgcgctcagactgcgcatgcg

SEQ ID NO: 2552954 - DNA, 25 bp, Homo sapien
accgccgcctggctctgctgatgcc

SEQ ID NO: 2552955 - DNA, 25 bp, Homo sapien
cttgaacacggtaggcagacgctgt

SEQ ID NO: 2552956 - DNA, 25 bp, Homo sapien
cgcttgaacacggtaggcagacgct

SEQ ID NO: 2552957 - DNA, 25 bp, Homo sapien
acacggtaggcagacgctgtagtga

SEQ ID NO: 2552958 - DNA, 25 bp, Homo sapien
tcccggttgctcaacaggctgaggt

SEQ ID NO: 2552959 - DNA, 25 bp, Homo sapien
ccaaccatgacggttcccctggttg

SEQ ID NO: 2552960 - DNA, 25 bp, Homo sapien
ggctgttcccaaccatgacggttcc

SEQ ID NO: 2552961 - DNA, 25 bp, Homo sapien
accatgacggttcccctggttggag

SEQ ID NO: 2552962 - DNA, 25 bp, Homo sapien
tgacggttcccctggttggagcaga

SEQ ID NO: 2552963 - DNA, 25 bp, Homo sapien
tcaggtgaggcagggtgcactgctt

SEQ ID NO: 2552964 - DNA, 25 bp, Homo sapien
tgtcaggtgaggcagggtgcactgc

SEQ ID NO: 2552965 - DNA, 25 bp, Homo sapien
gtcaggtgaggcagggtgcactgct

SEQ ID NO: 2552966 - DNA, 25 bp, Homo sapien
caggagctcccagctcccacttccc

SEQ ID NO: 2552967 - DNA, 25 bp, Homo sapien
tccaagcggctaggcccagcctgtg

SEQ ID NO: 2552968 - DNA, 25 bp, Homo sapien
gggacaagatcctgtgcagatccag

SEQ ID NO: 2552969 - DNA, 25 bp, Homo sapien
gcgaggcttcagacacctccatcca

SEQ ID NO: 2552970 - DNA, 25 bp, Homo sapien
ctaacactggacactcactcagctc

SEQ ID NO: 2552971 - DNA, 25 bp, Homo sapien
agcaggtagacctgctccaacctgc

SEQ ID NO: 2552972 - DNA, 25 bp, Homo sapien
gctgggcaagcaggtagacctgctc

SEQ ID NO: 2552973 - DNA, 25 bp, Homo sapien
ctgctcccgggtttgaggcccacag

SEQ ID NO: 2552974 - DNA, 25 bp, Homo sapien
tcccgggtttgaggcccacagtgtg

SEQ ID NO: 2552975 - DNA, 25 bp, Homo sapien
gagggggctgctgcagactcagccc

SEQ ID NO: 2552976 - DNA, 25 bp, Homo sapien
ggggctgctgcagactcagccctgc

SEQ ID NO: 2552977 - DNA, 25 bp, Homo sapien
ggctgctgcagactcagccctgcac

SEQ ID NO: 2552978 - DNA, 25 bp, Homo sapien
agggggctgctgcagactcagccct

SEQ ID NO: 2552979 - DNA, 25 bp, Homo sapien
cgcattagacttgccgccagcgtga

SEQ ID NO: 2552980 - DNA, 25 bp, Homo sapien
tagacttgccgccagcgtgagggcc

SEQ ID NO: 2552981 - DNA, 25 bp, Homo sapien
ttcctcctccatactgctgttctaa

SEQ ID NO: 2552982 - DNA, 25 bp, Homo sapien
tgcacacacacgcattagacttgcc

SEQ ID NO: 2552983 - DNA, 25 bp, Homo sapien
aggagactcgggacgcctaggaact

SEQ ID NO: 2552984 - DNA, 25 bp, Homo sapien
cccaggattggctgtgccgggaacc

SEQ ID NO: 2552985 - DNA, 25 bp, Homo sapien
cagacatgacaccttggactacggt

SEQ ID NO: 2552986 - DNA, 25 bp, Homo sapien
gactccgaatgccatgagggacatg

SEQ ID NO: 2552987 - DNA, 25 bp, Homo sapien
gggctgctgcggagtagcggagcag

SEQ ID NO: 2552988 - DNA, 25 bp, Homo sapien
atagagaggcgcggagcagaggctg

SEQ ID NO: 2552989 - DNA, 25 bp, Homo sapien
cagaggctggcctcttgcaggggag

SEQ ID NO: 2552990 - DNA, 25 bp, Homo sapien
ggagtagcggagcagcaacagacca

SEQ ID NO: 2552991 - DNA, 25 bp, Homo sapien
caggaggcatcacccggactgggct

SEQ ID NO: 2552992 - DNA, 25 bp, Homo sapien
ggtccaataggcacaaccctggaca

SEQ ID NO: 2552993 - DNA, 25 bp, Homo sapien
gggacccacatcagtgacgccgtta

SEQ ID NO: 2552994 - DNA, 25 bp, Homo sapien
tgggctgctgactgcagacctcagg

SEQ ID NO: 2552995 - DNA, 25 bp, Homo sapien
cgcgtccgaactccacggtcaaggg

SEQ ID NO: 2552996 - DNA, 25 bp, Homo sapien
ggcggtgagccccacgccaggactt

SEQ ID NO: 2552997 - DNA, 25 bp, Homo sapien
cacgccaggacttgacacgaagctg

SEQ ID NO: 2552998 - DNA, 25 bp, Homo sapien
tgtgagacgcgtccgaactccacgg

SEQ ID NO: 2552999 - DNA, 25 bp, Homo sapien
tgctgatgacatgtcctgtgaccct

SEQ ID NO: 2553000 - DNA, 25 bp, Homo sapien
ggttccagggaattgccacttgctc

SEQ ID NO: 2553001 - DNA, 25 bp, Homo sapien
tccagcacgtgcaagttctgaaggc

SEQ ID NO: 2553002 - DNA, 25 bp, Homo sapien
gagtctctcggtctccaaacaaagg

SEQ ID NO: 2553003 - DNA, 25 bp, Homo sapien
tctggtgcccatggacttcgaggga

SEQ ID NO: 2553004 - DNA, 25 bp, Homo sapien
caattccgcatggatactgaaggac

SEQ ID NO: 2553005 - DNA, 25 bp, Homo sapien
tagagtcggccctcaggatctatgg

SEQ ID NO: 2553006 - DNA, 25 bp, Homo sapien
cgtggattcaaccaagcaaggatgt

SEQ ID NO: 2553007 - DNA, 25 bp, Homo sapien
tccacctggtagtcgggctgagcta

SEQ ID NO: 2553008 - DNA, 25 bp, Homo sapien
tgccccttcccaagaaagaagccca

SEQ ID NO: 2553009 - DNA, 25 bp, Homo sapien
ccccgctgggaaagggccctgtctg

SEQ ID NO: 2553010 - DNA, 25 bp, Homo sapien
cctgtctgggccacgtcgaggactg

SEQ ID NO: 2553011 - DNA, 25 bp, Homo sapien
tgctggggtctaactatccagactc

SEQ ID NO: 2553012 - DNA, 25 bp, Homo sapien
ttctgacgcccaggtgaaggtaccc

SEQ ID NO: 2553013 - DNA, 25 bp, Homo sapien
gcggctgtcacttactgtctgcttc

SEQ ID NO: 2553014 - DNA, 25 bp, Homo sapien
agcctccctgcgtcttagcggctgt

SEQ ID NO: 2553015 - DNA, 25 bp, Homo sapien
gacgtctctggccagttcatgccag

SEQ ID NO: 2553016 - DNA, 25 bp, Homo sapien
ccaggccacagaggccggcatgtac

SEQ ID NO: 2553017 - DNA, 25 bp, Homo sapien
catgtaccacgtctgacgtctctgg

SEQ ID NO: 2553018 - DNA, 25 bp, Homo sapien
gcctgcctccttgttgcaagcccct

SEQ ID NO: 2553019 - DNA, 25 bp, Homo sapien
cacatgggaaggaaggcacaaggta

SEQ ID NO: 2553020 - DNA, 25 bp, Homo sapien
tgttagcagccagtgacacacgtgg

SEQ ID NO: 2553021 - DNA, 25 bp, Homo sapien
aaaagcaggaaagctccaacgcgca

SEQ ID NO: 2553022 - DNA, 25 bp, Homo sapien
gctgagcttgcacttgccctggagg

SEQ ID NO: 2553023 - DNA, 25 bp, Homo sapien
gtgaagtcaaatcgcttataaggaa

SEQ ID NO: 2553024 - DNA, 25 bp, Homo sapien
tgtgaagtcaaatcgcttataagga

SEQ ID NO: 2553025 - DNA, 25 bp, Homo sapien
tcacgctgtgaagtcaaatcgctta

SEQ ID NO: 2553026 - DNA, 25 bp, Homo sapien
cgctgtgaagtcaaatcgcttataa

SEQ ID NO: 2553027 - DNA, 25 bp, Homo sapien
tctaaggtctaaacaaataccagat

SEQ ID NO: 2553028 - DNA, 25 bp, Homo sapien
gatgcccagaacttatcagttcact

SEQ ID NO: 2553029 - DNA, 25 bp, Homo sapien
agggatgcccagaacttatcagttc

SEQ ID NO: 2553030 - DNA, 25 bp, Homo sapien
cccggcctcagaacacttctaaggt

SEQ ID NO: 2553031 - DNA, 25 bp, Homo sapien
ctctctttaatctcccgcaggtgct

SEQ ID NO: 2553032 - DNA, 25 bp, Homo sapien
gattctgaggcgtggcttttgcttc

SEQ ID NO: 2553033 - DNA, 25 bp, Homo sapien
cggagtctccgcctgggattctgag

SEQ ID NO: 2553034 - DNA, 25 bp, Homo sapien
ttttgcttcacagtgcccctaaacc

SEQ ID NO: 2553035 - DNA, 25 bp, Homo sapien
tagattcgtgggcagaaggatatcc

SEQ ID NO: 2553036 - DNA, 25 bp, Homo sapien
ttgcccatgagatgggacggcccca

SEQ ID NO: 2553037 - DNA, 25 bp, Homo sapien
tatcctgccacgttcgagtctcatg

SEQ ID NO: 2553038 - DNA, 25 bp, Homo sapien
gcgtaggcgtctcatccatctggca

SEQ ID NO: 2553039 - DNA, 25 bp, Homo sapien
ttgcgggaatgctcctcacttgttg

SEQ ID NO: 2553040 - DNA, 25 bp, Homo sapien
tgccgcttgcagcatccaattatct

SEQ ID NO: 2553041 - DNA, 25 bp, Homo sapien
gttttgcatcccgagccctttgccg

SEQ ID NO: 2553042 - DNA, 25 bp, Homo sapien
gcctgtgcgttttttctttgcggga

SEQ ID NO: 2553043 - DNA, 25 bp, Homo sapien
gcatcatgcgtatccattaccaccg

SEQ ID NO: 2553044 - DNA, 25 bp, Homo sapien
ggctctcccaaatctagcattgcag

SEQ ID NO: 2553045 - DNA, 25 bp, Homo sapien
tccagaatgcgtcatccctccagag

SEQ ID NO: 2553046 - DNA, 25 bp, Homo sapien
aaatggtatcgtgtaacatctgtcc

SEQ ID NO: 2553047 - DNA, 25 bp, Homo sapien
tgatcgtgttggtgacagaccctga

SEQ ID NO: 2553048 - DNA, 25 bp, Homo sapien
ccagttcacggttgctcctgggagc

SEQ ID NO: 2553049 - DNA, 25 bp, Homo sapien
ccctgatgtgctggtgctgtgtccc

SEQ ID NO: 2553050 - DNA, 25 bp, Homo sapien
ccgtcacatcagaaccttggaagct

SEQ ID NO: 2553051 - DNA, 25 bp, Homo sapien
ggtacactgcagaagccccatcctt

SEQ ID NO: 2553052 - DNA, 25 bp, Homo sapien
caggaactaacttacccagcttggt

SEQ ID NO: 2553053 - DNA, 25 bp, Homo sapien
gcctctgcataaggcccctgggtac

SEQ ID NO: 2553054 - DNA, 25 bp, Homo sapien
caggctctgttgaccccgtccagga

SEQ ID NO: 2553055 - DNA, 25 bp, Homo sapien
gaggtgacagctgcccgaacaacgt

SEQ ID NO: 2553056 - DNA, 25 bp, Homo sapien
tggaccagcggatgctccgatccgc

SEQ ID NO: 2553057 - DNA, 25 bp, Homo sapien
ggagttcaccggacatctgtggaca

SEQ ID NO: 2553058 - DNA, 25 bp, Homo sapien
tgctctggcgtgagacgccgtgctc

SEQ ID NO: 2553059 - DNA, 25 bp, Homo sapien
tcagggaccccgctacattctcggg

SEQ ID NO: 2553060 - DNA, 25 bp, Homo sapien
aacagggtcagatgcaggtatctac

SEQ ID NO: 2553061 - DNA, 25 bp, Homo sapien
tatctaccgtgttagcaggcagcgc

SEQ ID NO: 2553062 - DNA, 25 bp, Homo sapien
gctctaacagcagtgcaaaccctgg

SEQ ID NO: 2553063 - DNA, 25 bp, Homo sapien
ctgcgctggccgctttggcccggaa

SEQ ID NO: 2553064 - DNA, 25 bp, Homo sapien
ccctgcgaggagtgaggtctgagtg

SEQ ID NO: 2553065 - DNA, 25 bp, Homo sapien
tctgagtggtcagcccctgcgctgg

SEQ ID NO: 2553066 - DNA, 25 bp, Homo sapien
gcccggaactgacctcggtgtccat

SEQ ID NO: 2553067 - DNA, 25 bp, Homo sapien
cagggcatcctgtcagaggacgagc

SEQ ID NO: 2553068 - DNA, 25 bp, Homo sapien
tgagccagccgcctcggacttagcg

SEQ ID NO: 2553069 - DNA, 25 bp, Homo sapien
cgactgcggccctatctgggaggcc

SEQ ID NO: 2553070 - DNA, 25 bp, Homo sapien
acaatgacgtgaggcagcgtcgccc

SEQ ID NO: 2553071 - DNA, 25 bp, Homo sapien
tggcggtaggctcgccttgactcct

SEQ ID NO: 2553072 - DNA, 25 bp, Homo sapien
gctcgccttgactccttggtggttc

SEQ ID NO: 2553073 - DNA, 25 bp, Homo sapien
ggtaggctcgccttgactccttggt

SEQ ID NO: 2553074 - DNA, 25 bp, Homo sapien
aagctgctggcggtaggctcgcctt

SEQ ID NO: 2553075 - DNA, 25 bp, Homo sapien
cgtcaggcacttttcgcggcaaagg

SEQ ID NO: 2553076 - DNA, 25 bp, Homo sapien
gacggcatctgccttcggtacctag

SEQ ID NO: 2553077 - DNA, 25 bp, Homo sapien
taaaccgctacccagaaggctctgg

SEQ ID NO: 2553078 - DNA, 25 bp, Homo sapien
ggactcaacctttgccagcgaactg

SEQ ID NO: 2553079 - DNA, 25 bp, Homo sapien
gagaggacgcgacggcggagttacc

SEQ ID NO: 2553080 - DNA, 25 bp, Homo sapien
gtggctcggcccgtaggcctccgtc

SEQ ID NO: 2553081 - DNA, 25 bp, Homo sapien
cgggcggagaggacgcgacggcgga

SEQ ID NO: 2553082 - DNA, 25 bp, Homo sapien
cccgcatccccacggactccgcgtc

SEQ ID NO: 2553083 - DNA, 25 bp, Homo sapien
gcaggtaggaggcgacgtagcgcat

SEQ ID NO: 2553084 - DNA, 25 bp, Homo sapien
agcaggtaggaggcgacgtagcgca

SEQ ID NO: 2553085 - DNA, 25 bp, Homo sapien
gccggtcgtcgtccgcctcgatacc

SEQ ID NO: 2553086 - DNA, 25 bp, Homo sapien
tgttgagccggtcgtcgtccgcctc

SEQ ID NO: 2553087 - DNA, 25 bp, Homo sapien
cttgttgagccggtcgtcgtccgcc

SEQ ID NO: 2553088 - DNA, 25 bp, Homo sapien
tgagccggtcgtcgtccgcctcgat

SEQ ID NO: 2553089 - DNA, 25 bp, Homo sapien
agactgaaacgagcctctccccgaa

SEQ ID NO: 2553090 - DNA, 25 bp, Homo sapien
cctccagcatgtggccggatcaggc

SEQ ID NO: 2553091 - DNA, 25 bp, Homo sapien
aaccctccagcatgtggccggatca

SEQ ID NO: 2553092 - DNA, 25 bp, Homo sapien
tctatccaagaaatcgccaactaga

SEQ ID NO: 2553093 - DNA, 25 bp, Homo sapien
gtggcacgatccgtgcaacctccat

SEQ ID NO: 2553094 - DNA, 25 bp, Homo sapien
taaagcaatcttacgcagctcactg

SEQ ID NO: 2553095 - DNA, 25 bp, Homo sapien
taatcacgattttgcctcgtaccca

SEQ ID NO: 2553096 - DNA, 25 bp, Homo sapien
aaacttccaaagcttgttaatcacg

SEQ ID NO: 2553097 - DNA, 25 bp, Homo sapien
gcaggactgggttccccacatggga

SEQ ID NO: 2553098 - DNA, 25 bp, Homo sapien
aaaaataaatggacactagctttct

SEQ ID NO: 2553099 - DNA, 25 bp, Homo sapien
gaatgtacgattgtatccccggccc

SEQ ID NO: 2553100 - DNA, 25 bp, Homo sapien
agctttcttagacttaggactgaca

SEQ ID NO: 2553101 - DNA, 25 bp, Homo sapien
cctgggcaatgacgtcttcaatgtt

SEQ ID NO: 2553102 - DNA, 25 bp, Homo sapien
tgggcaatgacgtcttcaatgtttt

SEQ ID NO: 2553103 - DNA, 25 bp, Homo sapien
gggcaatgacgtcttcaatgttttt

SEQ ID NO: 2553104 - DNA, 25 bp, Homo sapien
caatgacgtcttcaatgttttttcc

SEQ ID NO: 2553105 - DNA, 25 bp, Homo sapien
acaaacgaaagcccgtccacatcaa

SEQ ID NO: 2553106 - DNA, 25 bp, Homo sapien
aaacgaaagcccgtccacatcaact

SEQ ID NO: 2553107 - DNA, 25 bp, Homo sapien
aacaaacgaaagcccgtccacatca

SEQ ID NO: 2553108 - DNA, 25 bp, Homo sapien
cgaaagcccgtccacatcaactcac

SEQ ID NO: 2553109 - DNA, 25 bp, Homo sapien
tcactcctcgggtgaggcttctagg

SEQ ID NO: 2553110 - DNA, 25 bp, Homo sapien
atgacgtgagcccactggagccctg

SEQ ID NO: 2553111 - DNA, 25 bp, Homo sapien
tctggtccacaagcgaaacctggca

SEQ ID NO: 2553112 - DNA, 25 bp, Homo sapien
gccacagatggaccggcagggatta

SEQ ID NO: 2553113 - DNA, 25 bp, Homo sapien
tggtaaggactgctgacgtgaactc

SEQ ID NO: 2553114 - DNA, 25 bp, Homo sapien
agggccacctaaacgtctgctgaga

SEQ ID NO: 2553115 - DNA, 25 bp, Homo sapien
gctgacgtgaactcagttctccaga

SEQ ID NO: 2553116 - DNA, 25 bp, Homo sapien
ttcagacaaatcctggggaatggcc

SEQ ID NO: 2553117 - DNA, 25 bp, Homo sapien
cacagggaagttagatggcaccaga

SEQ ID NO: 2553118 - DNA, 25 bp, Homo sapien
tatctggacccaccatatgccagtg

SEQ ID NO: 2553119 - DNA, 25 bp, Homo sapien
gacttgccttctaggaattaggccc

SEQ ID NO: 2553120 - DNA, 25 bp, Homo sapien
gcacatggcacccaacatatctgga

SEQ ID NO: 2553121 - DNA, 25 bp, Homo sapien
ccaccagcaggtacactggcaagct

SEQ ID NO: 2553122 - DNA, 25 bp, Homo sapien
gggcagcagagacggctacagcccc

SEQ ID NO: 2553123 - DNA, 25 bp, Homo sapien
agcaggtacactggcaagcttgcca

SEQ ID NO: 2553124 - DNA, 25 bp, Homo sapien
agagacggctacagccccaccagca

SEQ ID NO: 2553125 - DNA, 25 bp, Homo sapien
tgtggaacagaggagaggcatggtg

SEQ ID NO: 2553126 - DNA, 25 bp, Homo sapien
ctgtggaacagaggagaggcatggt

SEQ ID NO: 2553127 - DNA, 25 bp, Homo sapien
aggccaaatcccatgtcatcatctg

SEQ ID NO: 2553128 - DNA, 25 bp, Homo sapien
tcatcatctgactcttcagactcct

SEQ ID NO: 2553129 - DNA, 25 bp, Homo sapien
tccttcttctcatctttcttctcct

SEQ ID NO: 2553130 - DNA, 25 bp, Homo sapien
tcagactcctccttcttctcatctt

SEQ ID NO: 2553131 - DNA, 25 bp, Homo sapien
ggctgcctgcgtctgactggggccg

SEQ ID NO: 2553132 - DNA, 25 bp, Homo sapien
gctgcctgcgtctgactggggccgc

SEQ ID NO: 2553133 - DNA, 25 bp, Homo sapien
gtccccgctggcggaggcgaagaag

SEQ ID NO: 2553134 - DNA, 25 bp, Homo sapien
ggccgggcaggtcccgctgcggctc

SEQ ID NO: 2553135 - DNA, 25 bp, Homo sapien
ggcaggtcccgctgcggctctagct

SEQ ID NO: 2553136 - DNA, 25 bp, Homo sapien
gggtccccgctggcggaggcgaaga

SEQ ID NO: 2553137 - DNA, 25 bp, Homo sapien
ctgtgagccgcctgctcgccgctcg

SEQ ID NO: 2553138 - DNA, 25 bp, Homo sapien
ccgtagatgtgcgtggcgttggcca

SEQ ID NO: 2553139 - DNA, 25 bp, Homo sapien
cgacgtagtagacgccgaggaagcc

SEQ ID NO: 2553140 - DNA, 25 bp, Homo sapien
gagatgttccacgtcttctcgcggg

SEQ ID NO: 2553141 - DNA, 25 bp, Homo sapien
ggaagggcgcgtgctcgcggaggca

SEQ ID NO: 2553142 - DNA, 25 bp, Homo sapien
gaagcaccctcacccatgaagtgtg

SEQ ID NO: 2553143 - DNA, 25 bp, Homo sapien
tgtaaacatcactccctcatggcag

SEQ ID NO: 2553144 - DNA, 25 bp, Homo sapien
gatagcagcctgcaactgcggaagc

SEQ ID NO: 2553145 - DNA, 25 bp, Homo sapien
caccggttgtaatatccagggccac

SEQ ID NO: 2553146 - DNA, 25 bp, Homo sapien
tgtgcaagaccacccgtgagaagga

SEQ ID NO: 2553147 - DNA, 25 bp, Homo sapien
ccttggctcgggtagcagggacctt

SEQ ID NO: 2553148 - DNA, 25 bp, Homo sapien
gctcacagttgggactttggccacc

SEQ ID NO: 2553149 - DNA, 25 bp, Homo sapien
tccagggttccatggcatacagacc

SEQ ID NO: 2553150 - DNA, 25 bp, Homo sapien
gggcctctttagatacctcaatgaa

SEQ ID NO: 2553151 - DNA, 25 bp, Homo sapien
tgagctcgtccttggagttgaagtg

SEQ ID NO: 2553152 - DNA, 25 bp, Homo sapien
gaaactgcggatgatctttaccagg

SEQ ID NO: 2553153 - DNA, 25 bp, Homo sapien
attctcgccgtctgacacgcgggtc

SEQ ID NO: 2553154 - DNA, 25 bp, Homo sapien
ggatgaaaccgctgcagacattggc

SEQ ID NO: 2553155 - DNA, 25 bp, Homo sapien
gatgagcccacagtacacggggatg

SEQ ID NO: 2553156 - DNA, 25 bp, Homo sapien
tgagcccacagtacacggggatgaa

SEQ ID NO: 2553157 - DNA, 25 bp, Homo sapien
tacacggggatgaaaccgctgcaga

SEQ ID NO: 2553158 - DNA, 25 bp, Homo sapien
aagggccccattcagtggctacctc

SEQ ID NO: 2553159 - DNA, 25 bp, Homo sapien
gacacacagacaggaccgtatgtga

SEQ ID NO: 2553160 - DNA, 25 bp, Homo sapien
tttgagcgttttacccactgggcac

SEQ ID NO: 2553161 - DNA, 25 bp, Homo sapien
ggaagcgtgcgttgccacagctgtt

SEQ ID NO: 2553162 - DNA, 25 bp, Homo sapien
cactgtgatggtgttcttaagctca

SEQ ID NO: 2553163 - DNA, 25 bp, Homo sapien
acagatgtcactctcgcccgagaag

SEQ ID NO: 2553164 - DNA, 25 bp, Homo sapien
gctgtcctgcggacagatgtcactc

SEQ ID NO: 2553165 - DNA, 25 bp, Homo sapien
tggcaggttgtctgaaatgccacca

SEQ ID NO: 2553166 - DNA, 25 bp, Homo sapien
aggttggacagaaagccgggcgcag

SEQ ID NO: 2553167 - DNA, 25 bp, Homo sapien
agggatgcccgttctgcccctggaa

SEQ ID NO: 2553168 - DNA, 25 bp, Homo sapien
caaaacctatcctagatccagaaca

SEQ ID NO: 2553169 - DNA, 25 bp, Homo sapien
tccagaacaagatcaaagctgtaca

SEQ ID NO: 2553170 - DNA, 25 bp, Homo sapien
cctgcttgcacatctctcgcagcac

SEQ ID NO: 2553171 - DNA, 25 bp, Homo sapien
atcccggtatccctgcttgcacatc

SEQ ID NO: 2553172 - DNA, 25 bp, Homo sapien
tgcagaaagcgcaggccatcccggt

SEQ ID NO: 2553173 - DNA, 25 bp, Homo sapien
gaaagcgcaggccatcccggtatcc

SEQ ID NO: 2553174 - DNA, 25 bp, Homo sapien
tctcagttcatcagcgcggccgcgg

SEQ ID NO: 2553175 - DNA, 25 bp, Homo sapien
aagggattctcagttcatcagcgcg

SEQ ID NO: 2553176 - DNA, 25 bp, Homo sapien
ggattctcagttcatcagcgcggcc

SEQ ID NO: 2553177 - DNA, 25 bp, Homo sapien
gagagaagggattctcagttcatca

SEQ ID NO: 2553178 - DNA, 25 bp, Homo sapien
agtaatcctccgcttgggcgctctc

SEQ ID NO: 2553179 - DNA, 25 bp, Homo sapien
gggcagctgcgagtaatcctccgct

SEQ ID NO: 2553180 - DNA, 25 bp, Homo sapien
tcttctccgggcagctgcgagtaat

SEQ ID NO: 2553181 - DNA, 25 bp, Homo sapien
ccaggatgtgatcttctccgggcag

SEQ ID NO: 2553182 - DNA, 25 bp, Homo sapien
acccgctcggcttccctcccctgct

SEQ ID NO: 2553183 - DNA, 25 bp, Homo sapien
cagcggggcccaggacccgctcggc

SEQ ID NO: 2553184 - DNA, 25 bp, Homo sapien
gacccgctcggcttccctcccctgc

SEQ ID NO: 2553185 - DNA, 25 bp, Homo sapien
agcggggcccaggacccgctcggct

SEQ ID NO: 2553186 - DNA, 25 bp, Homo sapien
aggcagcatgttggagagggtggtc

SEQ ID NO: 2553187 - DNA, 25 bp, Homo sapien
tggccgtggccagacgcacaggcag

SEQ ID NO: 2553188 - DNA, 25 bp, Homo sapien
ggccgtggccagacgcacaggcagc

SEQ ID NO: 2553189 - DNA, 25 bp, Homo sapien
acaggcagcatgttggagagggtgg

SEQ ID NO: 2553190 - DNA, 25 bp, Homo sapien
agagcgctctccagcggcagcgtgt

SEQ ID NO: 2553191 - DNA, 25 bp, Homo sapien
tccagcggcagcgtgtagggcacca

SEQ ID NO: 2553192 - DNA, 25 bp, Homo sapien
gagcgctctccagcggcagcgtgta

SEQ ID NO: 2553193 - DNA, 25 bp, Homo sapien
ctctccagcggcagcgtgtagggca

SEQ ID NO: 2553194 - DNA, 25 bp, Homo sapien
tcctcgggaacgtcgggcagccact

SEQ ID NO: 2553195 - DNA, 25 bp, Homo sapien
atgtcctcgggaacgtcgggcagcc

SEQ ID NO: 2553196 - DNA, 25 bp, Homo sapien
caccggatgtcctcgggaacgtcgg

SEQ ID NO: 2553197 - DNA, 25 bp, Homo sapien
cttcatccaccggatgtcctcggga

SEQ ID NO: 2553198 - DNA, 25 bp, Homo sapien
tgcctctctgtaggcggcgcaggac

SEQ ID NO: 2553199 - DNA, 25 bp, Homo sapien
gcgcgtcccccagcgagaggttgtt

SEQ ID NO: 2553200 - DNA, 25 bp, Homo sapien
ttggtgcagaagaggccgagcagca

SEQ ID NO: 2553201 - DNA, 25 bp, Homo sapien
acggcagcgactggacgcggcgcag

SEQ ID NO: 2553202 - DNA, 25 bp, Homo sapien
agccgggtcggcgggtgcgcgcatg

SEQ ID NO: 2553203 - DNA, 25 bp, Homo sapien
tgcgcgcatgcgcagagcttcgggc

SEQ ID NO: 2553204 - DNA, 25 bp, Homo sapien
gctgcggggatgctgggtccgcggg

SEQ ID NO: 2553205 - DNA, 25 bp, Homo sapien
agcaggggtgctcagcaagggggca

SEQ ID NO: 2553206 - DNA, 25 bp, Homo sapien
ctcactgcgcagtggtaatggaggc

SEQ ID NO: 2553207 - DNA, 25 bp, Homo sapien
tcacacacatatttcagcaggccat

SEQ ID NO: 2553208 - DNA, 25 bp, Homo sapien
aggcgtctcaggcagggttcctcga

SEQ ID NO: 2553209 - DNA, 25 bp, Homo sapien
ttattacatgtgctttggcgaaaat

SEQ ID NO: 2553210 - DNA, 25 bp, Homo sapien
gtaagcaggcggtcacatacacaca

SEQ ID NO: 2553211 - DNA, 25 bp, Homo sapien
ccaggagtgcgacgctgggagacct

SEQ ID NO: 2553212 - DNA, 25 bp, Homo sapien
ttaccaagaatcttggtcccaaata

SEQ ID NO: 2553213 - DNA, 25 bp, Homo sapien
aatgcagtacgttcatatgtgcctg

SEQ ID NO: 2553214 - DNA, 25 bp, Homo sapien
accccactgtgtcaccgtgtgaggg

SEQ ID NO: 2553215 - DNA, 25 bp, Homo sapien
gccccaaaacagtcacacaccccac

SEQ ID NO: 2553216 - DNA, 25 bp, Homo sapien
ccaaaacagtcacacaccccactgt

SEQ ID NO: 2553217 - DNA, 25 bp, Homo sapien
acaccccactgtgtcaccgtgtgag

SEQ ID NO: 2553218 - DNA, 25 bp, Homo sapien
ctggaatcactgtcccgcccggcaa

SEQ ID NO: 2553219 - DNA, 25 bp, Homo sapien
ggctggaatcactgtcccgcccggc

SEQ ID NO: 2553220 - DNA, 25 bp, Homo sapien
agggctggaatcactgtcccgcccg

SEQ ID NO: 2553221 - DNA, 25 bp, Homo sapien
tggaatcactgtcccgcccggcaac

SEQ ID NO: 2553222 - DNA, 25 bp, Homo sapien
gcccgatccctggaggctcgagcga

SEQ ID NO: 2553223 - DNA, 25 bp, Homo sapien
cccggacgggacgtagagggcactg

SEQ ID NO: 2553224 - DNA, 25 bp, Homo sapien
ggaggagccactctgcgccgctgtc

SEQ ID NO: 2553225 - DNA, 25 bp, Homo sapien
gctcgagcgagcagtgaagcaacga

SEQ ID NO: 2553226 - DNA, 25 bp, Homo sapien
cggagttcccgaccgagacgctcag

SEQ ID NO: 2553227 - DNA, 25 bp, Homo sapien
agttcccgaccgagacgctcaggtt

SEQ ID NO: 2553228 - DNA, 25 bp, Homo sapien
acgctcaggtttggcgcgggccacg

SEQ ID NO: 2553229 - DNA, 25 bp, Homo sapien
ccctgccgccttgcgccccgagggg

SEQ ID NO: 2553230 - DNA, 25 bp, Homo sapien
ttccatgttccttagcccgggcgac

SEQ ID NO: 2553231 - DNA, 25 bp, Homo sapien
ctgatcccggatttcccaaagctgc

SEQ ID NO: 2553232 - DNA, 25 bp, Homo sapien
gcttgccggctagacctgaggtcca

SEQ ID NO: 2553233 - DNA, 25 bp, Homo sapien
caggaacactttcagattcgagacc

SEQ ID NO: 2553234 - DNA, 25 bp, Homo sapien
tggtgataaggaaggtggggtcctg

SEQ ID NO: 2553235 - DNA, 25 bp, Homo sapien
ggtgataaggaaggtggggtcctga

SEQ ID NO: 2553236 - DNA, 25 bp, Homo sapien
ctggtgataaggaaggtggggtcct

SEQ ID NO: 2553237 - DNA, 25 bp, Homo sapien
tgataaggaaggtggggtcctgaaa

SEQ ID NO: 2553238 - DNA, 25 bp, Homo sapien
tggttgatgtaggctcagggcctgt

SEQ ID NO: 2553239 - DNA, 25 bp, Homo sapien
tgcaagtgtgtctgaaggctcagcc

SEQ ID NO: 2553240 - DNA, 25 bp, Homo sapien
cctgtgggtactgccccagtgggtc

SEQ ID NO: 2553241 - DNA, 25 bp, Homo sapien
ccaagggagggtcagaagaaattca

SEQ ID NO: 2553242 - DNA, 25 bp, Homo sapien
ggggcctcagcctggccttcaggtg

SEQ ID NO: 2553243 - DNA, 25 bp, Homo sapien
cagggggcctcagcctggccttcag

SEQ ID NO: 2553244 - DNA, 25 bp, Homo sapien
gagagcagggggcctcagcctggcc

SEQ ID NO: 2553245 - DNA, 25 bp, Homo sapien
gcagggggcctcagcctggccttca

SEQ ID NO: 2553246 - DNA, 25 bp, Homo sapien
ctccagtattgcagcccgcggccct

SEQ ID NO: 2553247 - DNA, 25 bp, Homo sapien
tgctccagtattgcagcccgcggcc

SEQ ID NO: 2553248 - DNA, 25 bp, Homo sapien
gctccagtattgcagcccgcggccc

SEQ ID NO: 2553249 - DNA, 25 bp, Homo sapien
tggtgatgaagcccttagcctcctt

SEQ ID NO: 2553250 - DNA, 25 bp, Homo sapien
gtgatgaagcccttagcctccttgt

SEQ ID NO: 2553251 - DNA, 25 bp, Homo sapien
tgatgaagcccttagcctccttgtc

SEQ ID NO: 2553252 - DNA, 25 bp, Homo sapien
ggtgatgaagcccttagcctccttg

SEQ ID NO: 2553253 - DNA, 25 bp, Homo sapien
gcagaactccctggcggtgaggaag

SEQ ID NO: 2553254 - DNA, 25 bp, Homo sapien
agaactccctggcggtgaggaagcc

SEQ ID NO: 2553255 - DNA, 25 bp, Homo sapien
tgaggaagccagtgtgagcctggtc

SEQ ID NO: 2553256 - DNA, 25 bp, Homo sapien
tgctctggcgtgaggggcaggtcgc

SEQ ID NO: 2553257 - DNA, 25 bp, Homo sapien
cacactccaccgcagctaggagccc

SEQ ID NO: 2553258 - DNA, 25 bp, Homo sapien
gcgcgagtgcgtgcagacaaagcac

SEQ ID NO: 2553259 - DNA, 25 bp, Homo sapien
tgggggataggcaggccacaggctc

SEQ ID NO: 2553260 - DNA, 25 bp, Homo sapien
ggcagccctcagggcgccacaagtg

SEQ ID NO: 2553261 - DNA, 25 bp, Homo sapien
gctgtgggtcgccaccgtggctgtg

SEQ ID NO: 2553262 - DNA, 25 bp, Homo sapien
tgggtcgccaccgtggctgtgtccc

SEQ ID NO: 2553263 - DNA, 25 bp, Homo sapien
gggctgtgggtcgccaccgtggctg

SEQ ID NO: 2553264 - DNA, 25 bp, Homo sapien
ggagcgagcgattaccagggctgtg

SEQ ID NO: 2553265 - DNA, 25 bp, Homo sapien
ggttcgctccctgggctgacgccac

SEQ ID NO: 2553266 - DNA, 25 bp, Homo sapien
ggggttcgctccctgggctgacgcc

SEQ ID NO: 2553267 - DNA, 25 bp, Homo sapien
tgcaggggttcgctccctgggctga

SEQ ID NO: 2553268 - DNA, 25 bp, Homo sapien
caggggttcgctccctgggctgacg

SEQ ID NO: 2553269 - DNA, 25 bp, Homo sapien
cagcacagtgtggaatcgctcctcc

SEQ ID NO: 2553270 - DNA, 25 bp, Homo sapien
gccgtgccctgcacgtcgagcccgc

SEQ ID NO: 2553271 - DNA, 25 bp, Homo sapien
agagagcccgccgtgccctgcacgt

SEQ ID NO: 2553272 - DNA, 25 bp, Homo sapien
ccgactcaaaggtctcctcgggagt

SEQ ID NO: 2553273 - DNA, 25 bp, Homo sapien
gccagcagcaaacccttaggagact

SEQ ID NO: 2553274 - DNA, 25 bp, Homo sapien
agggaatcgcagctgacgctaggct

SEQ ID NO: 2553275 - DNA, 25 bp, Homo sapien
cagaaccagcactcgggtgacaagg

SEQ ID NO: 2553276 - DNA, 25 bp, Homo sapien
caaattctgcgggaaatcatgccgg

SEQ ID NO: 2553277 - DNA, 25 bp, Homo sapien
gcgcgtatcagaacatcctcgaaag

SEQ ID NO: 2553278 - DNA, 25 bp, Homo sapien
tccaggcaggccgacgcgcgtatca

SEQ ID NO: 2553279 - DNA, 25 bp, Homo sapien
agaacatcctcgaaagagcccagca

SEQ ID NO: 2553280 - DNA, 25 bp, Homo sapien
agcctggcccagagcgtcctcacag

SEQ ID NO: 2553281 - DNA, 25 bp, Homo sapien
tgagaacttgccagcgctacagccc

SEQ ID NO: 2553282 - DNA, 25 bp, Homo sapien
gaggccctccattggcccccatacc

SEQ ID NO: 2553283 - DNA, 25 bp, Homo sapien
gggcgaccccggatgagaacttgcc

SEQ ID NO: 2553284 - DNA, 25 bp, Homo sapien
ccgggcgaccccggatgagaacttg

SEQ ID NO: 2553285 - DNA, 25 bp, Homo sapien
gcgcacctccctctcgtgctcgctc

SEQ ID NO: 2553286 - DNA, 25 bp, Homo sapien
ctccctctcgtgctcgctctcgcgc

SEQ ID NO: 2553287 - DNA, 25 bp, Homo sapien
gtctcctcgtacagagcgcgcacct

SEQ ID NO: 2553288 - DNA, 25 bp, Homo sapien
tgctccgtctcctcgtacagagcgc

SEQ ID NO: 2553289 - DNA, 25 bp, Homo sapien
accggacgggggtgatacatgaggc

SEQ ID NO: 2553290 - DNA, 25 bp, Homo sapien
gagaagaccggacgggggtgataca

SEQ ID NO: 2553291 - DNA, 25 bp, Homo sapien
agggcagcctggacccgcggaggtg

SEQ ID NO: 2553292 - DNA, 25 bp, Homo sapien
gccgtcggggagggattaattcaga

SEQ ID NO: 2553293 - DNA, 25 bp, Homo sapien
catgcaaaagaggtacacggagggc

SEQ ID NO: 2553294 - DNA, 25 bp, Homo sapien
cggccgctcggccatgcaaaagagg

SEQ ID NO: 2553295 - DNA, 25 bp, Homo sapien
tcggccatgcaaaagaggtacacgg

SEQ ID NO: 2553296 - DNA, 25 bp, Homo sapien
tgcaaaagaggtacacggagggcca

SEQ ID NO: 2553297 - DNA, 25 bp, Homo sapien
gcgcgttccaggtcctgctcgcgga

SEQ ID NO: 2553298 - DNA, 25 bp, Homo sapien
gcaggcccgcgcgttccaggtcctg

SEQ ID NO: 2553299 - DNA, 25 bp, Homo sapien
ggcttctccgctccccgcgggcgaa

SEQ ID NO: 2553300 - DNA, 25 bp, Homo sapien
ccaggtcctgctcgcggatctgcag

SEQ ID NO: 2553301 - DNA, 25 bp, Homo sapien
acgggtgaccgtggggacagggcag

SEQ ID NO: 2553302 - DNA, 25 bp, Homo sapien
cagggggagagtgcacgggtgaccg

SEQ ID NO: 2553303 - DNA, 25 bp, Homo sapien
aggcacagggggagagtgcacgggt

SEQ ID NO: 2553304 - DNA, 25 bp, Homo sapien
gagtgcacgggtgaccgtggggaca

SEQ ID NO: 2553305 - DNA, 25 bp, Homo sapien
ggatggagaccggcgaggaacgccc

SEQ ID NO: 2553306 - DNA, 25 bp, Homo sapien
cggggtgctgcgcgtgccccaggct

SEQ ID NO: 2553307 - DNA, 25 bp, Homo sapien
ccggggtgctgcgcgtgccccaggc

SEQ ID NO: 2553308 - DNA, 25 bp, Homo sapien
gatggagaccggcgaggaacgcccc

SEQ ID NO: 2553309 - DNA, 25 bp, Homo sapien
gcctcgtgcgcccgccacagctggg

SEQ ID NO: 2553310 - DNA, 25 bp, Homo sapien
ctcgtgcttcgctctccagcctgcg

SEQ ID NO: 2553311 - DNA, 25 bp, Homo sapien
gcctgtgcctccaggtgctccgcag

SEQ ID NO: 2553312 - DNA, 25 bp, Homo sapien
cctccagctgcgttcgcagcgcctc

SEQ ID NO: 2553313 - DNA, 25 bp, Homo sapien
gcccgcccagccccgtcccacggca

SEQ ID NO: 2553314 - DNA, 25 bp, Homo sapien
cttgaaatggggatgaaagtggccc

SEQ ID NO: 2553315 - DNA, 25 bp, Homo sapien
tgtggatgggaggtggtgacccggc

SEQ ID NO: 2553316 - DNA, 25 bp, Homo sapien
ctagaagatcctccttcccacgggg

SEQ ID NO: 2553317 - DNA, 25 bp, Homo sapien
gggaggtggtgacccggctgcagga

SEQ ID NO: 2553318 - DNA, 25 bp, Homo sapien
cagctccagttgccgtagcaggctg

SEQ ID NO: 2553319 - DNA, 25 bp, Homo sapien
tgttcctggagacggcgaccacgtc

SEQ ID NO: 2553320 - DNA, 25 bp, Homo sapien
tccagttgccgtagcaggctgactt

SEQ ID NO: 2553321 - DNA, 25 bp, Homo sapien
cagttgccgtagcaggctgactttc

SEQ ID NO: 2553322 - DNA, 25 bp, Homo sapien
catcccgcagccgtgtattcagctc

SEQ ID NO: 2553323 - DNA, 25 bp, Homo sapien
atcccgcagccgtgtattcagctcc

SEQ ID NO: 2553324 - DNA, 25 bp, Homo sapien
tcatcccgcagccgtgtattcagct

SEQ ID NO: 2553325 - DNA, 25 bp, Homo sapien
aggcaggcgggctgttgtcagagcc

SEQ ID NO: 2553326 - DNA, 25 bp, Homo sapien
ggccagagccgcgtctggggggccg

SEQ ID NO: 2553327 - DNA, 25 bp, Homo sapien
caggcaggcgggctgttgtcagagc

SEQ ID NO: 2553328 - DNA, 25 bp, Homo sapien
gccgcgtctggggggccgagcccag

SEQ ID NO: 2553329 - DNA, 25 bp, Homo sapien
atgtcttcagtcaggcgagcctggg

SEQ ID NO: 2553330 - DNA, 25 bp, Homo sapien
agagggcacacacgggaccctggcc

SEQ ID NO: 2553331 - DNA, 25 bp, Homo sapien
tgcaagggcagcttctagctcatgg

SEQ ID NO: 2553332 - DNA, 25 bp, Homo sapien
attgaacggggacagagcgaagact

SEQ ID NO: 2553333 - DNA, 25 bp, Homo sapien
caggggtcggcagaaccgatgccgg

SEQ ID NO: 2553334 - DNA, 25 bp, Homo sapien
tcggcagaaccgatgccggcctggg

SEQ ID NO: 2553335 - DNA, 25 bp, Homo sapien
gggtcggcagaaccgatgccggcct

SEQ ID NO: 2553336 - DNA, 25 bp, Homo sapien
tgcaggggtcggcagaaccgatgcc

SEQ ID NO: 2553337 - DNA, 25 bp, Homo sapien
cgccaatagcccagcaagggcccat

SEQ ID NO: 2553338 - DNA, 25 bp, Homo sapien
tggcactgcggaggccgggcgagct

SEQ ID NO: 2553339 - DNA, 25 bp, Homo sapien
ctgggggtcgacctggcactgcgga

SEQ ID NO: 2553340 - DNA, 25 bp, Homo sapien
ccgcgtgggtgtaggcgctgggggt

SEQ ID NO: 2553341 - DNA, 25 bp, Homo sapien
cggcctcaagcccctcccgcggcgg

SEQ ID NO: 2553342 - DNA, 25 bp, Homo sapien
ggcctcaagcccctcccgcggcggc

SEQ ID NO: 2553343 - DNA, 25 bp, Homo sapien
ccggcctcaagcccctcccgcggcg

SEQ ID NO: 2553344 - DNA, 25 bp, Homo sapien
gcctcaagcccctcccgcggcggcg

SEQ ID NO: 2553345 - DNA, 25 bp, Homo sapien
gcgctgagaatgcgcggcccggagc

SEQ ID NO: 2553346 - DNA, 25 bp, Homo sapien
agcgctgagaatgcgcggcccggag

SEQ ID NO: 2553347 - DNA, 25 bp, Homo sapien
cgagctgtcgtggccgcgcactcac

SEQ ID NO: 2553348 - DNA, 25 bp, Homo sapien
cggccgagctgtcgtggccgcgcac

SEQ ID NO: 2553349 - DNA, 25 bp, Homo sapien
ggccgagctgtcgtggccgcgcact

SEQ ID NO: 2553350 - DNA, 25 bp, Homo sapien
gccgagctgtcgtggccgcgcactc

SEQ ID NO: 2553351 - DNA, 25 bp, Homo sapien
gggactggggcgcgcagggccttcg

SEQ ID NO: 2553352 - DNA, 25 bp, Homo sapien
gcgcgcagggccttcggccccctcg

SEQ ID NO: 2553353 - DNA, 25 bp, Homo sapien
actggggcgcgcagggccttcggcc

SEQ ID NO: 2553354 - DNA, 25 bp, Homo sapien
ggcgcgcagggccttcggccccctc

SEQ ID NO: 2553355 - DNA, 25 bp, Homo sapien
tattcaccctccatgaaggagccgg

SEQ ID NO: 2553356 - DNA, 25 bp, Homo sapien
gccggggcctaaatacacgcaggaa

SEQ ID NO: 2553357 - DNA, 25 bp, Homo sapien
tggagggggacagaccttaccactg

SEQ ID NO: 2553358 - DNA, 25 bp, Homo sapien
actgagctgagaggggatattcacc

SEQ ID NO: 2553359 - DNA, 25 bp, Homo sapien
cccccacaaacagcggcagctacag

SEQ ID NO: 2553360 - DNA, 25 bp, Homo sapien
tggcccttcccccacaaacagcggc

SEQ ID NO: 2553361 - DNA, 25 bp, Homo sapien
tgccccactcttggccttcgctcca

SEQ ID NO: 2553362 - DNA, 25 bp, Homo sapien
gtgccccactcttggccttcgctcc

SEQ ID NO: 2553363 - DNA, 25 bp, Homo sapien
ggcagatgacatttcgagacagtct

SEQ ID NO: 2553364 - DNA, 25 bp, Homo sapien
gatgacatttcgagacagtctgatc

SEQ ID NO: 2553365 - DNA, 25 bp, Homo sapien
ttcgagacagtctgatcctgggagg

SEQ ID NO: 2553366 - DNA, 25 bp, Homo sapien
catttcgagacagtctgatcctggg

SEQ ID NO: 2553367 - DNA, 25 bp, Homo sapien
caggtcacaggttacaggtctggcc

SEQ ID NO: 2553368 - DNA, 25 bp, Homo sapien
catgtcaggtcacaggttacaggtc

SEQ ID NO: 2553369 - DNA, 25 bp, Homo sapien
tcacaggttacaggtctggcccaag

SEQ ID NO: 2553370 - DNA, 25 bp, Homo sapien
aggacatgtcaggtcacaggttaca

SEQ ID NO: 2553371 - DNA, 25 bp, Homo sapien
cgggctggaaacgactcctctgcag

SEQ ID NO: 2553372 - DNA, 25 bp, Homo sapien
ctggaaacgactcctctgcaggaca

SEQ ID NO: 2553373 - DNA, 25 bp, Homo sapien
ggctggaaacgactcctctgcagga

SEQ ID NO: 2553374 - DNA, 25 bp, Homo sapien
cagccgggctggaaacgactcctct

SEQ ID NO: 2553375 - DNA, 25 bp, Homo sapien
tgggccacgtttccagacagcacag

SEQ ID NO: 2553376 - DNA, 25 bp, Homo sapien
tgcagcagtgggcaagctgtgagca

SEQ ID NO: 2553377 - DNA, 25 bp, Homo sapien
cacagccaggtctggactttcgccg

SEQ ID NO: 2553378 - DNA, 25 bp, Homo sapien
gcaagctgtgagcatggggaagcca

SEQ ID NO: 2553379 - DNA, 25 bp, Homo sapien
agccctagcgggtacctccggtgag

SEQ ID NO: 2553380 - DNA, 25 bp, Homo sapien
gggtacctccggtgagctcatgcca

SEQ ID NO: 2553381 - DNA, 25 bp, Homo sapien
tagcgggtacctccggtgagctcat

SEQ ID NO: 2553382 - DNA, 25 bp, Homo sapien
gtacctccggtgagctcatgccagc

SEQ ID NO: 2553383 - DNA, 25 bp, Homo sapien
gacgtgtcacttcctagcgactcag

SEQ ID NO: 2553384 - DNA, 25 bp, Homo sapien
gcccctgtgggaacaggacgtgtca

SEQ ID NO: 2553385 - DNA, 25 bp, Homo sapien
gaggcctgtgaatgagcccctgtgg

SEQ ID NO: 2553386 - DNA, 25 bp, Homo sapien
ttcctagcgactcaggagccctgac

SEQ ID NO: 2553387 - DNA, 25 bp, Homo sapien
gaagcagcaattgtaggtaaacagc

SEQ ID NO: 2553388 - DNA, 25 bp, Homo sapien
tgaggcaaacggtgccacatgttgt

SEQ ID NO: 2553389 - DNA, 25 bp, Homo sapien
gtcttcttctcgttgaactcaccca

SEQ ID NO: 2553390 - DNA, 25 bp, Homo sapien
taaacagcaggtacttgaggcaaac

SEQ ID NO: 2553391 - DNA, 25 bp, Homo sapien
ctccttgaaggtggcgcagcagccc

SEQ ID NO: 2553392 - DNA, 25 bp, Homo sapien
caccaccaggatgtaggctgtggcc

SEQ ID NO: 2553393 - DNA, 25 bp, Homo sapien
agcaggctgatgtagtcactcttga

SEQ ID NO: 2553394 - DNA, 25 bp, Homo sapien
cagcaggttccgacgctccttgaag

SEQ ID NO: 2553395 - DNA, 25 bp, Homo sapien
cacccttgttctgaggcctagtgcc

SEQ ID NO: 2553396 - DNA, 25 bp, Homo sapien
tttcttgcggagctggtgtcttccc

SEQ ID NO: 2553397 - DNA, 25 bp, Homo sapien
ggcaggtgtggaaggaccgtgaccc

SEQ ID NO: 2553398 - DNA, 25 bp, Homo sapien
tgagcacagcaaggcacaggttcaa

SEQ ID NO: 2553399 - DNA, 25 bp, Homo sapien
ggataccagcgatgatctccagcag

SEQ ID NO: 2553400 - DNA, 25 bp, Homo sapien
cgtaggcgaggataccagcgatgat

SEQ ID NO: 2553401 - DNA, 25 bp, Homo sapien
ccagcagaaagatgatgaggagcag

SEQ ID NO: 2553402 - DNA, 25 bp, Homo sapien
ctgctggtagtaggcgtaggcgagg

SEQ ID NO: 2553403 - DNA, 25 bp, Homo sapien
tgcagagacctagaccccatctcca

SEQ ID NO: 2553404 - DNA, 25 bp, Homo sapien
gggctagccacgcgtgtgcatgtgt

SEQ ID NO: 2553405 - DNA, 25 bp, Homo sapien
gccgagtggcacattggttagctct

SEQ ID NO: 2553406 - DNA, 25 bp, Homo sapien
tgtccgccccgcctgtgcatgtctg

SEQ ID NO: 2553407 - DNA, 25 bp, Homo sapien
gtcacagcctcatggcccggctggt

SEQ ID NO: 2553408 - DNA, 25 bp, Homo sapien
tggtagcgcttggtcatggtgtcct

SEQ ID NO: 2553409 - DNA, 25 bp, Homo sapien
cccggctggtggtagcgcttggtca

SEQ ID NO: 2553410 - DNA, 25 bp, Homo sapien
cttggtcatggtgtccttcaggttc

SEQ ID NO: 2553411 - DNA, 25 bp, Homo sapien
tgcatcaagaacaaggctggggttg

SEQ ID NO: 2553412 - DNA, 25 bp, Homo sapien
tcaagaacaaggctggggttgagac

SEQ ID NO: 2553413 - DNA, 25 bp, Homo sapien
catcaagaacaaggctggggttgag

SEQ ID NO: 2553414 - DNA, 25 bp, Homo sapien
ctgcatcaagaacaaggctggggtt

SEQ ID NO: 2553415 - DNA, 25 bp, Homo sapien
ggcctcctgtgagcggatccactca

SEQ ID NO: 2553416 - DNA, 25 bp, Homo sapien
cttgtagatgttggaggcatggtct

SEQ ID NO: 2553417 - DNA, 25 bp, Homo sapien
cagtcctgtgagttgttgctgccac

SEQ ID NO: 2553418 - DNA, 25 bp, Homo sapien
agccaccaccgtcttgcagcagctg

SEQ ID NO: 2553419 - DNA, 25 bp, Homo sapien
acactggaggcatgatcccgctgca

SEQ ID NO: 2553420 - DNA, 25 bp, Homo sapien
ctggaggcatgatcccgctgcacac

SEQ ID NO: 2553421 - DNA, 25 bp, Homo sapien
cactggaggcatgatcccgctgcac

SEQ ID NO: 2553422 - DNA, 25 bp, Homo sapien
gaggcatgatcccgctgcacaccca

SEQ ID NO: 2553423 - DNA, 25 bp, Homo sapien
aatgccgatccccacagccccaatg

SEQ ID NO: 2553424 - DNA, 25 bp, Homo sapien
ctcctggatgaaggtctccaacttg

SEQ ID NO: 2553425 - DNA, 25 bp, Homo sapien
cacagccccaatgaccctcaggtgc

SEQ ID NO: 2553426 - DNA, 25 bp, Homo sapien
aggcaatgccgatccccacagcccc

SEQ ID NO: 2553427 - DNA, 25 bp, Homo sapien
ccagcttgagactcctgtacaggca

SEQ ID NO: 2553428 - DNA, 25 bp, Homo sapien
gcttgagactcctgtacaggcagca

SEQ ID NO: 2553429 - DNA, 25 bp, Homo sapien
gagactcctgtacaggcagcacgtg

SEQ ID NO: 2553430 - DNA, 25 bp, Homo sapien
ctcctgtacaggcagcacgtgaaga

SEQ ID NO: 2553431 - DNA, 25 bp, Homo sapien
ccccagaggttatggtgatggcaca

SEQ ID NO: 2553432 - DNA, 25 bp, Homo sapien
gcacttgaagctgcctctgaggttg

SEQ ID NO: 2553433 - DNA, 25 bp, Homo sapien
gcattggtgcgcagcaaaaggcact

SEQ ID NO: 2553434 - DNA, 25 bp, Homo sapien
ggtctcagctcagtagttgggtgca

SEQ ID NO: 2553435 - DNA, 25 bp, Homo sapien
tatgtccggggagccccacaaaaca

SEQ ID NO: 2553436 - DNA, 25 bp, Homo sapien
ctgaccaccaggcagagagtatgtc

SEQ ID NO: 2553437 - DNA, 25 bp, Homo sapien
accaccaggcagagagtatgtccgg

SEQ ID NO: 2553438 - DNA, 25 bp, Homo sapien
ccaccaggcagagagtatgtccggg

SEQ ID NO: 2553439 - DNA, 25 bp, Homo sapien
tggttgtaggcatctgggtacagca

SEQ ID NO: 2553440 - DNA, 25 bp, Homo sapien
caagggtcagagctcacctggcttc

SEQ ID NO: 2553441 - DNA, 25 bp, Homo sapien
ctgctgggaacgctcggccttgcgc

SEQ ID NO: 2553442 - DNA, 25 bp, Homo sapien
tgaacagggcagtgcacagtgacca

SEQ ID NO: 2553443 - DNA, 25 bp, Homo sapien
tcccggccactcagggggctgagac

SEQ ID NO: 2553444 - DNA, 25 bp, Homo sapien
ctggaacctgggaggttgccactgc

SEQ ID NO: 2553445 - DNA, 25 bp, Homo sapien
ctgggaggttgccactgcagtgaac

SEQ ID NO: 2553446 - DNA, 25 bp, Homo sapien
caacaaaatttaataaattagctgg

SEQ ID NO: 2553447 - DNA, 25 bp, Homo sapien
gcatccgggagctggcgtaatgcct

SEQ ID NO: 2553448 - DNA, 25 bp, Homo sapien
gagaagctgctcaattatgcacccc

SEQ ID NO: 2553449 - DNA, 25 bp, Homo sapien
cacgtggacctgatcgagaagctgc

SEQ ID NO: 2553450 - DNA, 25 bp, Homo sapien
tatgcacccctggagaagtgaccac

SEQ ID NO: 2553451 - DNA, 25 bp, Homo sapien
tcaagcggacacgagaaacgcgaac

SEQ ID NO: 2553452 - DNA, 25 bp, Homo sapien
aagcggacacgagaaacgcgaaccg

SEQ ID NO: 2553453 - DNA, 25 bp, Homo sapien
gtcagtcaagcggacacgagaaacg

SEQ ID NO: 2553454 - DNA, 25 bp, Homo sapien
agctgtcagtcaagcggacacgaga

SEQ ID NO: 2553455 - DNA, 25 bp, Homo sapien
tgggctcgaactcgcgcgccccgct

SEQ ID NO: 2553456 - DNA, 25 bp, Homo sapien
tgcgtgtcggctctgggctcgaact

SEQ ID NO: 2553457 - DNA, 25 bp, Homo sapien
gctcccggtcggacacctccggcca

SEQ ID NO: 2553458 - DNA, 25 bp, Homo sapien
ttgttgctgcgtgtcggctctgggc

SEQ ID NO: 2553459 - DNA, 25 bp, Homo sapien
tgccagtgcagcctccgggagtctg

SEQ ID NO: 2553460 - DNA, 25 bp, Homo sapien
gcactccatccgagagacacgggct

SEQ ID NO: 2553461 - DNA, 25 bp, Homo sapien
cagggcaagccagagctgaggcctt

SEQ ID NO: 2553462 - DNA, 25 bp, Homo sapien
gggtcttccaggttcagctcaaaga

SEQ ID NO: 2553463 - DNA, 25 bp, Homo sapien
ttgcctctcactgccctcgcacctc

SEQ ID NO: 2553464 - DNA, 25 bp, Homo sapien
tttgcctctcactgccctcgcacct

SEQ ID NO: 2553465 - DNA, 25 bp, Homo sapien
aggccaccgttactcagggcccctg

SEQ ID NO: 2553466 - DNA, 25 bp, Homo sapien
cagagcaggatgtgcgtccactcat

SEQ ID NO: 2553467 - DNA, 25 bp, Homo sapien
tgaccccaggccaccgttactcagg

SEQ ID NO: 2553468 - DNA, 25 bp, Homo sapien
agcagcctcgcagctgaacctggct

SEQ ID NO: 2553469 - DNA, 25 bp, Homo sapien
gtagagcccagtcgggactgaggac

SEQ ID NO: 2553470 - DNA, 25 bp, Homo sapien
agagcccagtcgggactgaggacag

SEQ ID NO: 2553471 - DNA, 25 bp, Homo sapien
cccaggggcctccgcacatatgtgg

SEQ ID NO: 2553472 - DNA, 25 bp, Homo sapien
caggggcctccgcacatatgtggtg

SEQ ID NO: 2553473 - DNA, 25 bp, Homo sapien
ccttggctgtgtgcaccgctgaggt

SEQ ID NO: 2553474 - DNA, 25 bp, Homo sapien
acgtgtgctcgtggcgccgtgtgca

SEQ ID NO: 2553475 - DNA, 25 bp, Homo sapien
cacggacggcgtgggtacagtgggc

SEQ ID NO: 2553476 - DNA, 25 bp, Homo sapien
ctcccaggaccgtagagaggacacg

SEQ ID NO: 2553477 - DNA, 25 bp, Homo sapien
ccaaccaggaaagctctgaatcaat

SEQ ID NO: 2553478 - DNA, 25 bp, Homo sapien
tgggcaggggatacaccaccagact

SEQ ID NO: 2553479 - DNA, 25 bp, Homo sapien
tacaccaccagactcggagaagaag

SEQ ID NO: 2553480 - DNA, 25 bp, Homo sapien
gggatacaccaccagactcggagaa

SEQ ID NO: 2553481 - DNA, 25 bp, Homo sapien
ccaggcggtgctcagggtccctgaa

SEQ ID NO: 2553482 - DNA, 25 bp, Homo sapien
gcaggtggtgggtgcgaccaaggaa

SEQ ID NO: 2553483 - DNA, 25 bp, Homo sapien
ggtgcgaccaaggaagccccaagct

SEQ ID NO: 2553484 - DNA, 25 bp, Homo sapien
gctggccacaggaaagagaccaggc

SEQ ID NO: 2553485 - DNA, 25 bp, Homo sapien
gcagatgtgcctgcactcctgggtg

SEQ ID NO: 2553486 - DNA, 25 bp, Homo sapien
agatgtgcctgcactcctgggtgtc

SEQ ID NO: 2553487 - DNA, 25 bp, Homo sapien
gatgtgcctgcactcctgggtgtca

SEQ ID NO: 2553488 - DNA, 25 bp, Homo sapien
cagatgtgcctgcactcctgggtgt

SEQ ID NO: 2553489 - DNA, 25 bp, Homo sapien
cagcgggtgtgccggggccgccgct

SEQ ID NO: 2553490 - DNA, 25 bp, Homo sapien
ggtcgcgcggatccgctcggacccc

SEQ ID NO: 2553491 - DNA, 25 bp, Homo sapien
ccgctctggcccccgcggtggcagc

SEQ ID NO: 2553492 - DNA, 25 bp, Homo sapien
ccgccggccggcgcctgctccggcc

SEQ ID NO: 2553493 - DNA, 25 bp, Homo sapien
actcgtccgtgctggagcggcgcat

SEQ ID NO: 2553494 - DNA, 25 bp, Homo sapien
gggttcgcgtgcaggccgaagaagg

SEQ ID NO: 2553495 - DNA, 25 bp, Homo sapien
cgtataggctgctgtagcgccggaa

SEQ ID NO: 2553496 - DNA, 25 bp, Homo sapien
gctgcgccggtacgtggactcgtcc

SEQ ID NO: 2553497 - DNA, 25 bp, Homo sapien
cccttgggcgacgtgtagcgcgcct

SEQ ID NO: 2553498 - DNA, 25 bp, Homo sapien
ccacgtacttgttgcccttgggcga

SEQ ID NO: 2553499 - DNA, 25 bp, Homo sapien
caggtagaaaaccacgtacttgttg

SEQ ID NO: 2553500 - DNA, 25 bp, Homo sapien
cttgttgcccttgggcgacgtgtag

SEQ ID NO: 2553501 - DNA, 25 bp, Homo sapien
atgaggtacttgacggcctggaggc

SEQ ID NO: 2553502 - DNA, 25 bp, Homo sapien
ggtacttgacggcctggaggcaggc

SEQ ID NO: 2553503 - DNA, 25 bp, Homo sapien
gaggtacttgacggcctggaggcag

SEQ ID NO: 2553504 - DNA, 25 bp, Homo sapien
tgaggtacttgacggcctggaggca

SEQ ID NO: 2553505 - DNA, 25 bp, Homo sapien
ccagaagagcaggttgaaggcgaac

SEQ ID NO: 2553506 - DNA, 25 bp, Homo sapien
cggctcaaaccctcggaagtgagtc

SEQ ID NO: 2553507 - DNA, 25 bp, Homo sapien
cgactgggggaccttggcggcagcc

SEQ ID NO: 2553508 - DNA, 25 bp, Homo sapien
ccaggattcccttccgcagcgcctc

SEQ ID NO: 2553509 - DNA, 25 bp, Homo sapien
gaagtgagtccctgggcccgacagg

SEQ ID NO: 2553510 - DNA, 25 bp, Homo sapien
cgaaaatgctgaccagctcccggtc

SEQ ID NO: 2553511 - DNA, 25 bp, Homo sapien
tcccggtctgcagcgtgggtgccca

SEQ ID NO: 2553512 - DNA, 25 bp, Homo sapien
cccagcaaggcgtcaagggaagcag

SEQ ID NO: 2553513 - DNA, 25 bp, Homo sapien
atgagacgggagatatgttccaggc

SEQ ID NO: 2553514 - DNA, 25 bp, Homo sapien
cacgcccagccgccaggatggtctt

SEQ ID NO: 2553515 - DNA, 25 bp, Homo sapien
ccgcgcccggccaagttatgatttc

SEQ ID NO: 2553516 - DNA, 25 bp, Homo sapien
accacgcccagccgccaggatggtc

SEQ ID NO: 2553517 - DNA, 25 bp, Homo sapien
gcgcccggccaagttatgatttctt

SEQ ID NO: 2553518 - DNA, 25 bp, Homo sapien
gagcccggcccacaagcccaaagcc

SEQ ID NO: 2553519 - DNA, 25 bp, Homo sapien
gcccggcccacaagcccaaagccat

SEQ ID NO: 2553520 - DNA, 25 bp, Homo sapien
agagcccggcccacaagcccaaagc

SEQ ID NO: 2553521 - DNA, 25 bp, Homo sapien
agcccggcccacaagcccaaagcca

SEQ ID NO: 2553522 - DNA, 25 bp, Homo sapien
ccatgacaaaggcgccggtgatgat

SEQ ID NO: 2553523 - DNA, 25 bp, Homo sapien
gtggcggccagccagatgccgacac

SEQ ID NO: 2553524 - DNA, 25 bp, Homo sapien
ccacgaagccgatggccatgacaaa

SEQ ID NO: 2553525 - DNA, 25 bp, Homo sapien
cagcgtggcgaagctcccctgtgtg

SEQ ID NO: 2553526 - DNA, 25 bp, Homo sapien
gtgagcaggaggcacttgttctcct

SEQ ID NO: 2553527 - DNA, 25 bp, Homo sapien
ggaggcacttgttctccttgatggc

SEQ ID NO: 2553528 - DNA, 25 bp, Homo sapien
caggaggcacttgttctccttgatg

SEQ ID NO: 2553529 - DNA, 25 bp, Homo sapien
gagcaggaggcacttgttctccttg

SEQ ID NO: 2553530 - DNA, 25 bp, Homo sapien
cgtggtcccacccggagcatcgctt

SEQ ID NO: 2553531 - DNA, 25 bp, Homo sapien
ggtcccacccggagcatcgcttggg

SEQ ID NO: 2553532 - DNA, 25 bp, Homo sapien
tgcgtggtcccacccggagcatcgc

SEQ ID NO: 2553533 - DNA, 25 bp, Homo sapien
ccaccctgcgtggtcccacccggag

SEQ ID NO: 2553534 - DNA, 25 bp, Homo sapien
cacactgccagcctggaggtccggc

SEQ ID NO: 2553535 - DNA, 25 bp, Homo sapien
ccagtgtggcctggaagacccaaca

SEQ ID NO: 2553536 - DNA, 25 bp, Homo sapien
gaggtccggccccagaggtggtgcc

SEQ ID NO: 2553537 - DNA, 25 bp, Homo sapien
tacagcacgttctcttgagtgaccc

SEQ ID NO: 2553538 - DNA, 25 bp, Homo sapien
cccgtgaaaggctgcgcatgcgtgt

SEQ ID NO: 2553539 - DNA, 25 bp, Homo sapien
cctcggccaggcatgttaatcagta

SEQ ID NO: 2553540 - DNA, 25 bp, Homo sapien
tcaggaatgagtcacggagaccgca

SEQ ID NO: 2553541 - DNA, 25 bp, Homo sapien
gaagcctcgtgatttaggacctcag

SEQ ID NO: 2553542 - DNA, 25 bp, Homo sapien
gctcagacagggacccgaaaggccg

SEQ ID NO: 2553543 - DNA, 25 bp, Homo sapien
agacagggacccgaaaggccgcaca

SEQ ID NO: 2553544 - DNA, 25 bp, Homo sapien
agggacccgaaaggccgcacagcct

SEQ ID NO: 2553545 - DNA, 25 bp, Homo sapien
ctcagacagggacccgaaaggccgc

SEQ ID NO: 2553546 - DNA, 25 bp, Homo sapien
ctccagcaggaacaccagcagcagc

SEQ ID NO: 2553547 - DNA, 25 bp, Homo sapien
cttgtccgtgtaggcgaagaagagg

SEQ ID NO: 2553548 - DNA, 25 bp, Homo sapien
ttgtccgtgtaggcgaagaagagga

SEQ ID NO: 2553549 - DNA, 25 bp, Homo sapien
tgtccgtgtaggcgaagaagaggat

SEQ ID NO: 2553550 - DNA, 25 bp, Homo sapien
gacataggtgcctccacgtatcggg

SEQ ID NO: 2553551 - DNA, 25 bp, Homo sapien
gaagaggccgctctacagagcagaa

SEQ ID NO: 2553552 - DNA, 25 bp, Homo sapien
tcggagtgcaacctcaatagccagg

SEQ ID NO: 2553553 - DNA, 25 bp, Homo sapien
ccaaggacggacagtgtgattcaca

SEQ ID NO: 2553554 - DNA, 25 bp, Homo sapien
cagggcccccacctctgggcttcct

SEQ ID NO: 2553555 - DNA, 25 bp, Homo sapien
cctccccaggctgggggaggaccat

SEQ ID NO: 2553556 - DNA, 25 bp, Homo sapien
ccaggctgggggaggaccatgggtc

SEQ ID NO: 2553557 - DNA, 25 bp, Homo sapien
tccccaggctgggggaggaccatgg

SEQ ID NO: 2553558 - DNA, 25 bp, Homo sapien
tgtcccccgcgcctcctagcccacc

SEQ ID NO: 2553559 - DNA, 25 bp, Homo sapien
ctcatccagaccccttcgccggccc

SEQ ID NO: 2553560 - DNA, 25 bp, Homo sapien
cggcccctaagctgggcccctcctg

SEQ ID NO: 2553561 - DNA, 25 bp, Homo sapien
cgcgcctcctagcccaccaagctgc

SEQ ID NO: 2553562 - DNA, 25 bp, Homo sapien
gttggtgaggcccacgttgccctgc

SEQ ID NO: 2553563 - DNA, 25 bp, Homo sapien
tgccgtacaggtgcaagcctttctt

SEQ ID NO: 2553564 - DNA, 25 bp, Homo sapien
cgttgccctgcgtgccgtacaggtg

SEQ ID NO: 2553565 - DNA, 25 bp, Homo sapien
ggtcttgctgggcatacctgtcaat

SEQ ID NO: 2553566 - DNA, 25 bp, Homo sapien
tgaggcaggaggggagggggcaccc

SEQ ID NO: 2553567 - DNA, 25 bp, Homo sapien
ctgaggcaggaggggagggggcacc

SEQ ID NO: 2553568 - DNA, 25 bp, Homo sapien
tcaggtacccgcgtggcgttgtaca

SEQ ID NO: 2553569 - DNA, 25 bp, Homo sapien
cagtgtagttggagacgccacagca

SEQ ID NO: 2553570 - DNA, 25 bp, Homo sapien
ccagtcagtgtagttggagacgcca

SEQ ID NO: 2553571 - DNA, 25 bp, Homo sapien
gttgtacacctcgaaccagtcagtg

SEQ ID NO: 2553572 - DNA, 25 bp, Homo sapien
acaccttcaccgtctcgtagcacgg

SEQ ID NO: 2553573 - DNA, 25 bp, Homo sapien
agcgccgtgcacagcccaaagatgc

SEQ ID NO: 2553574 - DNA, 25 bp, Homo sapien
ccacagccagcaggttctcctgaag

SEQ ID NO: 2553575 - DNA, 25 bp, Homo sapien
tcctgaagccacaccttcaccgtct

SEQ ID NO: 2553576 - DNA, 25 bp, Homo sapien
cacttggcagtacatggtcatggcg

SEQ ID NO: 2553577 - DNA, 25 bp, Homo sapien
ctgccttgaccacttggcagtacat

SEQ ID NO: 2553578 - DNA, 25 bp, Homo sapien
cagtacatggtcatggcgaaggtca

SEQ ID NO: 2553579 - DNA, 25 bp, Homo sapien
gaccacttggcagtacatggtcatg

SEQ ID NO: 2553580 - DNA, 25 bp, Homo sapien
ccgtgggcgtccttttggcagagaa

SEQ ID NO: 2553581 - DNA, 25 bp, Homo sapien
cccgtgtgaacactgctttggagaa

SEQ ID NO: 2553582 - DNA, 25 bp, Homo sapien
cacgggcccactatggaatgtaggt

SEQ ID NO: 2553583 - DNA, 25 bp, Homo sapien
tgagctagggccttccagaaacagg

SEQ ID NO: 2553584 - DNA, 25 bp, Homo sapien
tgccctagaaatggactcagaggag

SEQ ID NO: 2553585 - DNA, 25 bp, Homo sapien
tggaagctctggaaccatcccggac

SEQ ID NO: 2553586 - DNA, 25 bp, Homo sapien
agccacagcacgtgtgtcacctgca

SEQ ID NO: 2553587 - DNA, 25 bp, Homo sapien
gactcgcccactcctggattcgagg

SEQ ID NO: 2553588 - DNA, 25 bp, Homo sapien
tcagttgtaagaactgctgagtgcc

SEQ ID NO: 2553589 - DNA, 25 bp, Homo sapien
taaacttttgcagattgggattcag

SEQ ID NO: 2553590 - DNA, 25 bp, Homo sapien
tctgatatcagggtcggtttcagga

SEQ ID NO: 2553591 - DNA, 25 bp, Homo sapien
ccagccaacatgttataattctcta

SEQ ID NO: 2553592 - DNA, 25 bp, Homo sapien
tcaccctgtcgtccaggctgcagtg

SEQ ID NO: 2553593 - DNA, 25 bp, Homo sapien
catcctcccacctcagcctcgcaaa

SEQ ID NO: 2553594 - DNA, 25 bp, Homo sapien
cagcctcaacctcctgggctgaagc

SEQ ID NO: 2553595 - DNA, 25 bp, Homo sapien
gcactggtgtgatcatagctcactg

SEQ ID NO: 2553596 - DNA, 25 bp, Homo sapien
aggccttgtggagtgaagccagctc

SEQ ID NO: 2553597 - DNA, 25 bp, Homo sapien
ccaggagtgcctggtgtggccaagg

SEQ ID NO: 2553598 - DNA, 25 bp, Homo sapien
caaggccttgtggagtgaagccagc

SEQ ID NO: 2553599 - DNA, 25 bp, Homo sapien
ccttgtggagtgaagccagctctgc

SEQ ID NO: 2553600 - DNA, 25 bp, Homo sapien
aaccagatcctggacacgtggcctc

SEQ ID NO: 2553601 - DNA, 25 bp, Homo sapien
tttctgtgccacattctgtagctgg

SEQ ID NO: 2553602 - DNA, 25 bp, Homo sapien
aggcatgtcacatgtcagcatgctg

SEQ ID NO: 2553603 - DNA, 25 bp, Homo sapien
tgcgtgagccccgaagggaaaatgc

SEQ ID NO: 2553604 - DNA, 25 bp, Homo sapien
gcctgcggccgtggttggtgcccag

SEQ ID NO: 2553605 - DNA, 25 bp, Homo sapien
tagcctgcggccgtggttggtgccc

SEQ ID NO: 2553606 - DNA, 25 bp, Homo sapien
ttagcctgcggccgtggttggtgcc

SEQ ID NO: 2553607 - DNA, 25 bp, Homo sapien
agcctgcggccgtggttggtgccca

SEQ ID NO: 2553608 - DNA, 25 bp, Homo sapien
ggtccacattcccgggtggtcctca

SEQ ID NO: 2553609 - DNA, 25 bp, Homo sapien
cgtgagctgcttccgcctctgaatg

SEQ ID NO: 2553610 - DNA, 25 bp, Homo sapien
tcttgcaagtaggaggaggtccaca

SEQ ID NO: 2553611 - DNA, 25 bp, Homo sapien
cagtggcccttttgcagtgtttctt

SEQ ID NO: 2553612 - DNA, 25 bp, Homo sapien
tgccacggggcacggagacagatgg

SEQ ID NO: 2553613 - DNA, 25 bp, Homo sapien
ctcattgctcagccgtggtgatccc

SEQ ID NO: 2553614 - DNA, 25 bp, Homo sapien
tgccggctctcgcatgtgtctgggt

SEQ ID NO: 2553615 - DNA, 25 bp, Homo sapien
ctgctgccggctctcgcatgtgtct

SEQ ID NO: 2553616 - DNA, 25 bp, Homo sapien
gcagaacatggtgttttcggtgtga

SEQ ID NO: 2553617 - DNA, 25 bp, Homo sapien
cggtgtgagcagtaattcctgttca

SEQ ID NO: 2553618 - DNA, 25 bp, Homo sapien
taattcctgttcatcggaagtcacg

SEQ ID NO: 2553619 - DNA, 25 bp, Homo sapien
tgttttcggtgtgagcagtaattcc

SEQ ID NO: 2553620 - DNA, 25 bp, Homo sapien
cttgcatgccgctgcctgcatgggg

SEQ ID NO: 2553621 - DNA, 25 bp, Homo sapien
ttgcatgccgctgcctgcatggggc

SEQ ID NO: 2553622 - DNA, 25 bp, Homo sapien
cctgcatggggcccacccacgacat

SEQ ID NO: 2553623 - DNA, 25 bp, Homo sapien
ccgctgcctgcatggggcccaccca

SEQ ID NO: 2553624 - DNA, 25 bp, Homo sapien
gggcactggcgttgctgtgggcccc

SEQ ID NO: 2553625 - DNA, 25 bp, Homo sapien
agcagagcgcgtccagctgtctgga

SEQ ID NO: 2553626 - DNA, 25 bp, Homo sapien
agagcagagcgcgtccagctgtctg

SEQ ID NO: 2553627 - DNA, 25 bp, Homo sapien
gggaggggcactggcgttgctgtgg

SEQ ID NO: 2553628 - DNA, 25 bp, Homo sapien
ttcgcaggtagaacgtgagagtcgt

SEQ ID NO: 2553629 - DNA, 25 bp, Homo sapien
tggagccgacgttccttttgcctgg

SEQ ID NO: 2553630 - DNA, 25 bp, Homo sapien
ttttgcctggcgtcaactacagtga

SEQ ID NO: 2553631 - DNA, 25 bp, Homo sapien
catctgccacgtgggcccagtgtca

SEQ ID NO: 2553632 - DNA, 25 bp, Homo sapien
gcagatggcggcgggaggggttgac

SEQ ID NO: 2553633 - DNA, 25 bp, Homo sapien
cccagcagatggcggcgggaggggt

SEQ ID NO: 2553634 - DNA, 25 bp, Homo sapien
cagcagatggcggcgggaggggttg

SEQ ID NO: 2553635 - DNA, 25 bp, Homo sapien
ccagcagatggcggcgggaggggtt

SEQ ID NO: 2553636 - DNA, 25 bp, Homo sapien
agccccgtggttcagggccggccat

SEQ ID NO: 2553637 - DNA, 25 bp, Homo sapien
tgctggcgccgttgccggccttgtt

SEQ ID NO: 2553638 - DNA, 25 bp, Homo sapien
gctcctgcaagccccgtggttcagg

SEQ ID NO: 2553639 - DNA, 25 bp, Homo sapien
ctgctggcgccgttgccggccttgt

SEQ ID NO: 2553640 - DNA, 25 bp, Homo sapien
agcgctgccagcacacaggctcgct

SEQ ID NO: 2553641 - DNA, 25 bp, Homo sapien
tctgtggaacaatggcccctggaga

SEQ ID NO: 2553642 - DNA, 25 bp, Homo sapien
gggcactgtctgtggaacaatggcc

SEQ ID NO: 2553643 - DNA, 25 bp, Homo sapien
cactgtctgtggaacaatggcccct

SEQ ID NO: 2553644 - DNA, 25 bp, Homo sapien
tgggatgcacgccagggctacgggc

SEQ ID NO: 2553645 - DNA, 25 bp, Homo sapien
aactccatttgcatggcgctggtgg

SEQ ID NO: 2553646 - DNA, 25 bp, Homo sapien
cagggctacgggcacggtgacgagg

SEQ ID NO: 2553647 - DNA, 25 bp, Homo sapien
gttgcagctgtagggtgggatgcac

SEQ ID NO: 2553648 - DNA, 25 bp, Homo sapien
ccctttgtgcttaggggagctgcag

SEQ ID NO: 2553649 - DNA, 25 bp, Homo sapien
gttgccctttgtgcttaggggagct

SEQ ID NO: 2553650 - DNA, 25 bp, Homo sapien
caggttgccctttgtgcttagggga

SEQ ID NO: 2553651 - DNA, 25 bp, Homo sapien
tgccctttgtgcttaggggagctgc

SEQ ID NO: 2553652 - DNA, 25 bp, Homo sapien
cccaggaattgacgggggcttggct

SEQ ID NO: 2553653 - DNA, 25 bp, Homo sapien
tggaaaatgacagtcccacttgggc

SEQ ID NO: 2553654 - DNA, 25 bp, Homo sapien
gaaaatgacagtcccacttgggcca

SEQ ID NO: 2553655 - DNA, 25 bp, Homo sapien
gcttggaaaatgacagtcccacttg

SEQ ID NO: 2553656 - DNA, 25 bp, Homo sapien
tgaggacgggctgcccaaagacact

SEQ ID NO: 2553657 - DNA, 25 bp, Homo sapien
gacactgctccccactgaggactgt

SEQ ID NO: 2553658 - DNA, 25 bp, Homo sapien
caaagacactgctccccactgagga

SEQ ID NO: 2553659 - DNA, 25 bp, Homo sapien
ctgcagaggcgtgaggacgggctgc

SEQ ID NO: 2553660 - DNA, 25 bp, Homo sapien
gtgtgacagcctctggtacccatag

SEQ ID NO: 2553661 - DNA, 25 bp, Homo sapien
cagcctctggtacccatagagttgt

SEQ ID NO: 2553662 - DNA, 25 bp, Homo sapien
taagtggcgcacagtgtgtgacagc

SEQ ID NO: 2553663 - DNA, 25 bp, Homo sapien
ccacctctaagtggcgcacagtgtg

SEQ ID NO: 2553664 - DNA, 25 bp, Homo sapien
ctgtagctgcagctcacgtcgcctc

SEQ ID NO: 2553665 - DNA, 25 bp, Homo sapien
acacctgtcctccttgaaggccagc

SEQ ID NO: 2553666 - DNA, 25 bp, Homo sapien
gggtctgtcgtgaggagcgctccgg

SEQ ID NO: 2553667 - DNA, 25 bp, Homo sapien
gctccgggcaatgctgcagcactgt

SEQ ID NO: 2553668 - DNA, 25 bp, Homo sapien
tagcgtcttcattgaccggcacacc

SEQ ID NO: 2553669 - DNA, 25 bp, Homo sapien
attgaccggcacaccacgagcatgg

SEQ ID NO: 2553670 - DNA, 25 bp, Homo sapien
acaccacgagcatggcagtgcctgt

SEQ ID NO: 2553671 - DNA, 25 bp, Homo sapien
tgtggaagttctgtcttgtagcgtc

SEQ ID NO: 2553672 - DNA, 25 bp, Homo sapien
aggagaagatgagctcaggctcctg

SEQ ID NO: 2553673 - DNA, 25 bp, Homo sapien
aggaggagaagatgagctcaggctc

SEQ ID NO: 2553674 - DNA, 25 bp, Homo sapien
gaaggaggagaagatgagctcaggc

SEQ ID NO: 2553675 - DNA, 25 bp, Homo sapien
agaagatgagctcaggctcctgagt

SEQ ID NO: 2553676 - DNA, 25 bp, Homo sapien
gaaggctgtgggaactgactgtccc

SEQ ID NO: 2553677 - DNA, 25 bp, Homo sapien
ggaaggctgtgggaactgactgtcc

SEQ ID NO: 2553678 - DNA, 25 bp, Homo sapien
gttccatgtacagttggtccctgtg

SEQ ID NO: 2553679 - DNA, 25 bp, Homo sapien
agttgcagacaatgacccttccaga

SEQ ID NO: 2553680 - DNA, 25 bp, Homo sapien
tctcatcatctctggcgtaagttgc

SEQ ID NO: 2553681 - DNA, 25 bp, Homo sapien
ccttccagaagagggtctggcagca

SEQ ID NO: 2553682 - DNA, 25 bp, Homo sapien
tgaagccacgcgttcgcgtcccggg

SEQ ID NO: 2553683 - DNA, 25 bp, Homo sapien
gtccgggcgggaacccgcgtgtgca

SEQ ID NO: 2553684 - DNA, 25 bp, Homo sapien
gggccgcgccaagctggcgatgccg

SEQ ID NO: 2553685 - DNA, 25 bp, Homo sapien
cagcgggccgcctctgtcgttgttg

SEQ ID NO: 2553686 - DNA, 25 bp, Homo sapien
tcccagcgccgctttctgggccgcc

SEQ ID NO: 2553687 - DNA, 25 bp, Homo sapien
ggtcccagcgccgctttctgggccg

SEQ ID NO: 2553688 - DNA, 25 bp, Homo sapien
cccagcgccgctttctgggccgccg

SEQ ID NO: 2553689 - DNA, 25 bp, Homo sapien
gtcccagcgccgctttctgggccgc

SEQ ID NO: 2553690 - DNA, 25 bp, Homo sapien
gggagtgcggtcgccgtcaccgccg

SEQ ID NO: 2553691 - DNA, 25 bp, Homo sapien
gccgtcaccgccgcggaggagccgc

SEQ ID NO: 2553692 - DNA, 25 bp, Homo sapien
ggagtgcggtcgccgtcaccgccgc

SEQ ID NO: 2553693 - DNA, 25 bp, Homo sapien
ttccgacgctcgggagcggcctcgg

SEQ ID NO: 2553694 - DNA, 25 bp, Homo sapien
cttccgacgctcgggagcggcctcg

SEQ ID NO: 2553695 - DNA, 25 bp, Homo sapien
agttgcggatatccgagatgaagac

SEQ ID NO: 2553696 - DNA, 25 bp, Homo sapien
gaccgccaggccccgcatcccgtcc

SEQ ID NO: 2553697 - DNA, 25 bp, Homo sapien
cggatatccgagatgaagaccgcca

SEQ ID NO: 2553698 - DNA, 25 bp, Homo sapien
atccgagatgaagaccgccaggccc

SEQ ID NO: 2553699 - DNA, 25 bp, Homo sapien
atccacgccgttttggaaaacgctg

SEQ ID NO: 2553700 - DNA, 25 bp, Homo sapien
tcacaacagtccctcaaaatacaca

SEQ ID NO: 2553701 - DNA, 25 bp, Homo sapien
gaattcaaagggaagatcacaacag

SEQ ID NO: 2553702 - DNA, 25 bp, Homo sapien
aaggagatgagaattcaaagggaag

SEQ ID NO: 2553703 - DNA, 25 bp, Homo sapien
aagatcacaacagtccctcaaaata

SEQ ID NO: 2553704 - DNA, 25 bp, Homo sapien
tgtgggagaaccactatcctcctga

SEQ ID NO: 2553705 - DNA, 25 bp, Homo sapien
ggagaaccactatcctcctgatcct

SEQ ID NO: 2553706 - DNA, 25 bp, Homo sapien
agtgtgggagaaccactatcctcct

SEQ ID NO: 2553707 - DNA, 25 bp, Homo sapien
tgggagaaccactatcctcctgatc

SEQ ID NO: 2553708 - DNA, 25 bp, Homo sapien
tcgcatgccagacgctcgccatgag

SEQ ID NO: 2553709 - DNA, 25 bp, Homo sapien
tgaattgcccaagaatcaccttcct

SEQ ID NO: 2553710 - DNA, 25 bp, Homo sapien
gatgagcaagatagggtgcgcacct

SEQ ID NO: 2553711 - DNA, 25 bp, Homo sapien
gctcgccatgaggagaacagcagga

SEQ ID NO: 2553712 - DNA, 25 bp, Homo sapien
ttaattatttgctgttcctctaata

SEQ ID NO: 2553713 - DNA, 25 bp, Homo sapien
taattatttgctgttcctctaatac

SEQ ID NO: 2553714 - DNA, 25 bp, Homo sapien
agcaggaggtctgccactcgacctg

SEQ ID NO: 2553715 - DNA, 25 bp, Homo sapien
cactcgacctggagtttcgacctgg

SEQ ID NO: 2553716 - DNA, 25 bp, Homo sapien
aggaggtctgccactcgacctggag

SEQ ID NO: 2553717 - DNA, 25 bp, Homo sapien
ggagtttcgacctggagtttcctga

SEQ ID NO: 2553718 - DNA, 25 bp, Homo sapien
atcgcttgaacccggcagaagaggt

SEQ ID NO: 2553719 - DNA, 25 bp, Homo sapien
tatttcttcacgtatcctaccacct

SEQ ID NO: 2553720 - DNA, 25 bp, Homo sapien
atatgtagctgtcttcaccgttgtt

SEQ ID NO: 2553721 - DNA, 25 bp, Homo sapien
tatcctaccacctagtgtcctttca

SEQ ID NO: 2553722 - DNA, 25 bp, Homo sapien
tcattccagcctgagacattccttt

SEQ ID NO: 2553723 - DNA, 25 bp, Homo sapien
gtgtgtcattctcacacaagggcca

SEQ ID NO: 2553724 - DNA, 25 bp, Homo sapien
cgctcgttgcccaggtttgaatgca

SEQ ID NO: 2553725 - DNA, 25 bp, Homo sapien
tcaatctatttacttattataagtc

SEQ ID NO: 2553726 - DNA, 25 bp, Homo sapien
tgcacccggccgtgacaagttttta

SEQ ID NO: 2553727 - DNA, 25 bp, Homo sapien
cactgcacccggccgtgacaagttt

SEQ ID NO: 2553728 - DNA, 25 bp, Homo sapien
ttcaactggctagcatttggttgaa

SEQ ID NO: 2553729 - DNA, 25 bp, Homo sapien
cactcccggcctgtataatcctttt

SEQ ID NO: 2553730 - DNA, 25 bp, Homo sapien
tatagaatgagttaagtatgccctc

SEQ ID NO: 2553731 - DNA, 25 bp, Homo sapien
tacgttgttgctggattcaactggc

SEQ ID NO: 2553732 - DNA, 25 bp, Homo sapien
aagagtcacgaaaacagtgtcttgg

SEQ ID NO: 2553733 - DNA, 25 bp, Homo sapien
gagtcacgaaaacagtgtcttggga

SEQ ID NO: 2553734 - DNA, 25 bp, Homo sapien
gaaagagtcacgaaaacagtgtctt

SEQ ID NO: 2553735 - DNA, 25 bp, Homo sapien
ctgaaagagtcacgaaaacagtgtc

SEQ ID NO: 2553736 - DNA, 25 bp, Homo sapien
cccaggatggcaggttttttggact

SEQ ID NO: 2553737 - DNA, 25 bp, Homo sapien
cagcggacggctccacaagaaagca

SEQ ID NO: 2553738 - DNA, 25 bp, Homo sapien
ccaggatggcaggttttttggactt

SEQ ID NO: 2553739 - DNA, 25 bp, Homo sapien
ggacggctccacaagaaagcaggac

SEQ ID NO: 2553740 - DNA, 25 bp, Homo sapien
ccctgaaagctgctcacagcagtga

SEQ ID NO: 2553741 - DNA, 25 bp, Homo sapien
tcacagcagtgacccctgggcaggc

SEQ ID NO: 2553742 - DNA, 25 bp, Homo sapien
caaacctcctgtcccagtcagtctc

SEQ ID NO: 2553743 - DNA, 25 bp, Homo sapien
ggcaggctgcccagcgtctcagcat

SEQ ID NO: 2553744 - DNA, 25 bp, Homo sapien
ccggcaggaaggggctgcagcaggg

SEQ ID NO: 2553745 - DNA, 25 bp, Homo sapien
ctgcctccaacccagagccggcagg

SEQ ID NO: 2553746 - DNA, 25 bp, Homo sapien
gcctccaacccagagccggcaggaa

SEQ ID NO: 2553747 - DNA, 25 bp, Homo sapien
gcagcagggccggggccgggactga

SEQ ID NO: 2553748 - DNA, 25 bp, Homo sapien
atttgccagttccttgtttatcctt

SEQ ID NO: 2553749 - DNA, 25 bp, Homo sapien
ttttgatctgatatttgccagttcc

SEQ ID NO: 2553750 - DNA, 25 bp, Homo sapien
ctttaaattttgatctgatatttgc

SEQ ID NO: 2553751 - DNA, 25 bp, Homo sapien
tatttgccagttccttgtttatcct

SEQ ID NO: 2553752 - DNA, 25 bp, Homo sapien
cacaatgagcacagcagacgcagat

SEQ ID NO: 2553753 - DNA, 25 bp, Homo sapien
gacgcagatcccattcagtgaaggc

SEQ ID NO: 2553754 - DNA, 25 bp, Homo sapien
caccaagagtaaggctggctttgtc

SEQ ID NO: 2553755 - DNA, 25 bp, Homo sapien
gtgaaggcccagtgacaccaagagt

SEQ ID NO: 2553756 - DNA, 25 bp, Homo sapien
ccacgcttccatctgggattatttc

SEQ ID NO: 2553757 - DNA, 25 bp, Homo sapien
cctccacgcttccatctgggattat

SEQ ID NO: 2553758 - DNA, 25 bp, Homo sapien
tccacgcttccatctgggattattt

SEQ ID NO: 2553759 - DNA, 25 bp, Homo sapien
cacgcttccatctgggattatttcc

SEQ ID NO: 2553760 - DNA, 25 bp, Homo sapien
cccctgttgcataagcaccgtgagg

SEQ ID NO: 2553761 - DNA, 25 bp, Homo sapien
agtcgccagcgcgaggagaaagcca

SEQ ID NO: 2553762 - DNA, 25 bp, Homo sapien
ggattcctggcctaacccagggcca

SEQ ID NO: 2553763 - DNA, 25 bp, Homo sapien
gctcatgtggcagcacgtggattcc

SEQ ID NO: 2553764 - DNA, 25 bp, Homo sapien
ggaacggtgcatcaccagtcggcca

SEQ ID NO: 2553765 - DNA, 25 bp, Homo sapien
atcaccagtcggccagtcagctgca

SEQ ID NO: 2553766 - DNA, 25 bp, Homo sapien
ctggggaacggtgcatcaccagtcg

SEQ ID NO: 2553767 - DNA, 25 bp, Homo sapien
ggtgcatcaccagtcggccagtcag

SEQ ID NO: 2553768 - DNA, 25 bp, Homo sapien
ctccacggacgacctcaactgtgta

SEQ ID NO: 2553769 - DNA, 25 bp, Homo sapien
cggacgacctcaactgtgtagaata

SEQ ID NO: 2553770 - DNA, 25 bp, Homo sapien
cacggacgacctcaactgtgtagaa

SEQ ID NO: 2553771 - DNA, 25 bp, Homo sapien
cgacctcaactgtgtagaatacaga

SEQ ID NO: 2553772 - DNA, 25 bp, Homo sapien
ctatagccatcaagagccttgtcac

SEQ ID NO: 2553773 - DNA, 25 bp, Homo sapien
gaaagatgaagagcaacttgcagac

SEQ ID NO: 2553774 - DNA, 25 bp, Homo sapien
ttttactatagccatcaagagcctt

SEQ ID NO: 2553775 - DNA, 25 bp, Homo sapien
gagcaacttgcagacgtactttttt

SEQ ID NO: 2553776 - DNA, 25 bp, Homo sapien
tgcagcagacccacgtggctcacgt

SEQ ID NO: 2553777 - DNA, 25 bp, Homo sapien
actgggcacgcgtctccatctgcag

SEQ ID NO: 2553778 - DNA, 25 bp, Homo sapien
agcagacccacgtggctcacgtcag

SEQ ID NO: 2553779 - DNA, 25 bp, Homo sapien
tgctaacaaggactgggcacgcgtc

SEQ ID NO: 2553780 - DNA, 25 bp, Homo sapien
tcaggaaaaccgcatgcaggaggag

SEQ ID NO: 2553781 - DNA, 25 bp, Homo sapien
aggaaaaccgcatgcaggaggagga

SEQ ID NO: 2553782 - DNA, 25 bp, Homo sapien
caggaaaaccgcatgcaggaggagg

SEQ ID NO: 2553783 - DNA, 25 bp, Homo sapien
gccatcctcgaaggtgacaccctcc

SEQ ID NO: 2553784 - DNA, 25 bp, Homo sapien
ccagccatcctcgaaggtgacaccc

SEQ ID NO: 2553785 - DNA, 25 bp, Homo sapien
atcctcgaaggtgacaccctcccca

SEQ ID NO: 2553786 - DNA, 25 bp, Homo sapien
agccatcctcgaaggtgacaccctc

SEQ ID NO: 2553787 - DNA, 25 bp, Homo sapien
agggatctccccggcgaaggcctcg

SEQ ID NO: 2553788 - DNA, 25 bp, Homo sapien
cactgtttgagttcaccaacacaga

SEQ ID NO: 2553789 - DNA, 25 bp, Homo sapien
atcaggcggatcagctcactgtttg

SEQ ID NO: 2553790 - DNA, 25 bp, Homo sapien
ccggctacgaggaccttagggatct

SEQ ID NO: 2553791 - DNA, 25 bp, Homo sapien
cgctccggcgcggtgctcggcttct

SEQ ID NO: 2553792 - DNA, 25 bp, Homo sapien
acaagggacggaacggatggccgag

SEQ ID NO: 2553793 - DNA, 25 bp, Homo sapien
ggtgctcggcttctccgcgtgaagc

SEQ ID NO: 2553794 - DNA, 25 bp, Homo sapien
acggatggccgagggcgctccggcg

SEQ ID NO: 2553795 - DNA, 25 bp, Homo sapien
catagaagagccaaccaggttccat

SEQ ID NO: 2553796 - DNA, 25 bp, Homo sapien
tgttccaggcgccagcagggctgtc

SEQ ID NO: 2553797 - DNA, 25 bp, Homo sapien
ccagcagtccttcaacatagaagag

SEQ ID NO: 2553798 - DNA, 25 bp, Homo sapien
cctgccatgcgtccatgtggatgtg

SEQ ID NO: 2553799 - DNA, 25 bp, Homo sapien
gtcattgagcaggtgcaccactcgg

SEQ ID NO: 2553800 - DNA, 25 bp, Homo sapien
agggccgcgctctgcttcacgctgt

SEQ ID NO: 2553801 - DNA, 25 bp, Homo sapien
tgcaccactcgggatgtccagtcgc

SEQ ID NO: 2553802 - DNA, 25 bp, Homo sapien
gggacgtcctgtacaggcgcagcaa

SEQ ID NO: 2553803 - DNA, 25 bp, Homo sapien
ttcacaacggccatcccaaaggtca

SEQ ID NO: 2553804 - DNA, 25 bp, Homo sapien
catggtgtcttcacaacggccatcc

SEQ ID NO: 2553805 - DNA, 25 bp, Homo sapien
tggtgtcttcacaacggccatccca

SEQ ID NO: 2553806 - DNA, 25 bp, Homo sapien
gtgtcttcacaacggccatcccaaa

SEQ ID NO: 2553807 - DNA, 25 bp, Homo sapien
agcccctgtgacagcctctcctggg

SEQ ID NO: 2553808 - DNA, 25 bp, Homo sapien
tctcctgggcatcccgagaaggcgc

SEQ ID NO: 2553809 - DNA, 25 bp, Homo sapien
tcctgggcatcccgagaaggcgcac

SEQ ID NO: 2553810 - DNA, 25 bp, Homo sapien
gccacagcagcccctgtgacagcct

SEQ ID NO: 2553811 - DNA, 25 bp, Homo sapien
caggacacggcaccgggcaccctgt

SEQ ID NO: 2553812 - DNA, 25 bp, Homo sapien
ccaggacacggcaccgggcaccctg

SEQ ID NO: 2553813 - DNA, 25 bp, Homo sapien
aggacacggcaccgggcaccctgtc

SEQ ID NO: 2553814 - DNA, 25 bp, Homo sapien
tccaggacacggcaccgggcaccct

SEQ ID NO: 2553815 - DNA, 25 bp, Homo sapien
tctgtgctaaagtggtgatcagact

SEQ ID NO: 2553816 - DNA, 25 bp, Homo sapien
tgtgctaaagtggtgatcagacttg

SEQ ID NO: 2553817 - DNA, 25 bp, Homo sapien
gggttcttctgtgctaaagtggtga

SEQ ID NO: 2553818 - DNA, 25 bp, Homo sapien
tcttctgtgctaaagtggtgatcag

SEQ ID NO: 2553819 - DNA, 25 bp, Homo sapien
ttctgctcccccacgaacagactta

SEQ ID NO: 2553820 - DNA, 25 bp, Homo sapien
acttctgctcccccacgaacagact

SEQ ID NO: 2553821 - DNA, 25 bp, Homo sapien
tctgctcccccacgaacagacttac

SEQ ID NO: 2553822 - DNA, 25 bp, Homo sapien
tgacttctgctcccccacgaacaga

SEQ ID NO: 2553823 - DNA, 25 bp, Homo sapien
gcacttccgtgacacacagacacgg

SEQ ID NO: 2553824 - DNA, 25 bp, Homo sapien
agaatcacagcacttccgtgacaca

SEQ ID NO: 2553825 - DNA, 25 bp, Homo sapien
atcacagcacttccgtgacacacag

SEQ ID NO: 2553826 - DNA, 25 bp, Homo sapien
acagcacttccgtgacacacagaca

SEQ ID NO: 2553827 - DNA, 25 bp, Homo sapien
ctgcaaggaggcaagctctaggctg

SEQ ID NO: 2553828 - DNA, 25 bp, Homo sapien
agacttgggtcacggactcctgctg

SEQ ID NO: 2553829 - DNA, 25 bp, Homo sapien
aggcaagctctaggctgtcaaagac

SEQ ID NO: 2553830 - DNA, 25 bp, Homo sapien
aactgcaagatgccagcccagactt

SEQ ID NO: 2553831 - DNA, 25 bp, Homo sapien
gccagggagccgggacaaaatagta

SEQ ID NO: 2553832 - DNA, 25 bp, Homo sapien
cagggagccgggacaaaatagtaag

SEQ ID NO: 2553833 - DNA, 25 bp, Homo sapien
agccagggagccgggacaaaatagt

SEQ ID NO: 2553834 - DNA, 25 bp, Homo sapien
ggcctcgaagagcacggcattcttc

SEQ ID NO: 2553835 - DNA, 25 bp, Homo sapien
ccttcttcgacttgggcggttcttg

SEQ ID NO: 2553836 - DNA, 25 bp, Homo sapien
gagcacggcattcttcgcgttggag

SEQ ID NO: 2553837 - DNA, 25 bp, Homo sapien
ttcgcgttggagtgctggaccttct

SEQ ID NO: 2553838 - DNA, 25 bp, Homo sapien
cccaactggttgcaggcacggacga

SEQ ID NO: 2553839 - DNA, 25 bp, Homo sapien
tggcccaactggttgcaggcacgga

SEQ ID NO: 2553840 - DNA, 25 bp, Homo sapien
cttgacagcctcatgggagaactca

SEQ ID NO: 2553841 - DNA, 25 bp, Homo sapien
gtctcgatgtgcgtcttgacagcct

SEQ ID NO: 2553842 - DNA, 25 bp, Homo sapien
ctgctcagggagtgagcagaaccca

SEQ ID NO: 2553843 - DNA, 25 bp, Homo sapien
cagggagtgagcagaacccaaggac

SEQ ID NO: 2553844 - DNA, 25 bp, Homo sapien
tgctcagggagtgagcagaacccaa

SEQ ID NO: 2553845 - DNA, 25 bp, Homo sapien
ctcagggagtgagcagaacccaagg

SEQ ID NO: 2553846 - DNA, 25 bp, Homo sapien
ccccagccttcacaggaagacccac

SEQ ID NO: 2553847 - DNA, 25 bp, Homo sapien
gagtgtccagcccttctgacaatag

SEQ ID NO: 2553848 - DNA, 25 bp, Homo sapien
tgtgcaaatgagtgtccagcccttc

SEQ ID NO: 2553849 - DNA, 25 bp, Homo sapien
gcacaccacccggaatatctgtgag

SEQ ID NO: 2553850 - DNA, 25 bp, Homo sapien
tccagcccttctgacaatagggatt

SEQ ID NO: 2553851 - DNA, 25 bp, Homo sapien
ctgcagcacgagaaagcccgagctc

SEQ ID NO: 2553852 - DNA, 25 bp, Homo sapien
gcagcacgagaaagcccgagctctg

SEQ ID NO: 2553853 - DNA, 25 bp, Homo sapien
agcacgagaaagcccgagctctgct

SEQ ID NO: 2553854 - DNA, 25 bp, Homo sapien
tgcagcacgagaaagcccgagctct

SEQ ID NO: 2553855 - DNA, 25 bp, Homo sapien
cgtgctgatgggcccccaggaggct

SEQ ID NO: 2553856 - DNA, 25 bp, Homo sapien
ccgtgctgatgggcccccaggaggc

SEQ ID NO: 2553857 - DNA, 25 bp, Homo sapien
agagcccgtgctgatgggcccccag

SEQ ID NO: 2553858 - DNA, 25 bp, Homo sapien
cccagagcccgtgctgatgggcccc

SEQ ID NO: 2553859 - DNA, 25 bp, Homo sapien
agccgacctgcactcgggccacgtg

SEQ ID NO: 2553860 - DNA, 25 bp, Homo sapien
caggtccagggagccgacctgcact

SEQ ID NO: 2553861 - DNA, 25 bp, Homo sapien
cgacctgcactcgggccacgtgtgt

SEQ ID NO: 2553862 - DNA, 25 bp, Homo sapien
agggagccgacctgcactcgggcca

SEQ ID NO: 2553863 - DNA, 25 bp, Homo sapien
cacagagtaagaggtcgcaggagca

SEQ ID NO: 2553864 - DNA, 25 bp, Homo sapien
aaggcacagagtaagaggtcgcagg

SEQ ID NO: 2553865 - DNA, 25 bp, Homo sapien
ggcacagagtaagaggtcgcaggag

SEQ ID NO: 2553866 - DNA, 25 bp, Homo sapien
acagagtaagaggtcgcaggagcaa

SEQ ID NO: 2553867 - DNA, 25 bp, Homo sapien
tagaggaggtccacggcccgctgcc

SEQ ID NO: 2553868 - DNA, 25 bp, Homo sapien
aatctcttctcggatggagtagtca

SEQ ID NO: 2553869 - DNA, 25 bp, Homo sapien
tctcggatggagtagtcagctgtct

SEQ ID NO: 2553870 - DNA, 25 bp, Homo sapien
tcagcatctcggccacgatctgtgg

SEQ ID NO: 2553871 - DNA, 25 bp, Homo sapien
gaatcgcagagcacgaaggaaatcc

SEQ ID NO: 2553872 - DNA, 25 bp, Homo sapien
gacggaatcgcagagcacgaaggaa

SEQ ID NO: 2553873 - DNA, 25 bp, Homo sapien
ctgctggacggaatcgcagagcacg

SEQ ID NO: 2553874 - DNA, 25 bp, Homo sapien
cagagcacgaaggaaatcctgccgc

SEQ ID NO: 2553875 - DNA, 25 bp, Homo sapien
tcaagaccaaacgactctaccaaaa

SEQ ID NO: 2553876 - DNA, 25 bp, Homo sapien
aaacgactctaccaaaaatgctgat

SEQ ID NO: 2553877 - DNA, 25 bp, Homo sapien
gaccaaacgactctaccaaaaatgc

SEQ ID NO: 2553878 - DNA, 25 bp, Homo sapien
ttattttcaagaccaaacgactcta

SEQ ID NO: 2553879 - DNA, 25 bp, Homo sapien
cagacctggggctacagtgccacca

SEQ ID NO: 2553880 - DNA, 25 bp, Homo sapien
actcagacctggggctacagtgcca

SEQ ID NO: 2553881 - DNA, 25 bp, Homo sapien
tcagacctggggctacagtgccacc

SEQ ID NO: 2553882 - DNA, 25 bp, Homo sapien
tcactcagacctggggctacagtgc

SEQ ID NO: 2553883 - DNA, 25 bp, Homo sapien
gcaccaggggccctcaggcctcact

SEQ ID NO: 2553884 - DNA, 25 bp, Homo sapien
tcaggcctcactggcagggtcccca

SEQ ID NO: 2553885 - DNA, 25 bp, Homo sapien
ggctgtgcaccaggggccctcaggc

SEQ ID NO: 2553886 - DNA, 25 bp, Homo sapien
ggccctcaggcctcactggcagggt

SEQ ID NO: 2553887 - DNA, 25 bp, Homo sapien
aggctgctgagggccggcacctgca

SEQ ID NO: 2553888 - DNA, 25 bp, Homo sapien
gtgggggacaggctgctgagggccg

SEQ ID NO: 2553889 - DNA, 25 bp, Homo sapien
ggggacaggctgctgagggccggca

SEQ ID NO: 2553890 - DNA, 25 bp, Homo sapien
ctgagggccggcacctgcaggccat

SEQ ID NO: 2553891 - DNA, 25 bp, Homo sapien
gatctgaatgactcggtaccacacc

SEQ ID NO: 2553892 - DNA, 25 bp, Homo sapien
taatcaccagcaattcggatcaagt

SEQ ID NO: 2553893 - DNA, 25 bp, Homo sapien
ctcgaacacagtcttggccgcgtag

SEQ ID NO: 2553894 - DNA, 25 bp, Homo sapien
cacataccaggtgtagtccaccgcg

SEQ ID NO: 2553895 - DNA, 25 bp, Homo sapien
tgcaactgccctccaccccatcctt

SEQ ID NO: 2553896 - DNA, 25 bp, Homo sapien
cttctgcaactgccctccaccccat

SEQ ID NO: 2553897 - DNA, 25 bp, Homo sapien
atccttcctgccatcctgcgggcca

SEQ ID NO: 2553898 - DNA, 25 bp, Homo sapien
ccaccccatccttcctgccatcctg

SEQ ID NO: 2553899 - DNA, 25 bp, Homo sapien
gccagaagtttgagagttagggtga

SEQ ID NO: 2553900 - DNA, 25 bp, Homo sapien
gggcaccaacagtggaggagctaga

SEQ ID NO: 2553901 - DNA, 25 bp, Homo sapien
agcaaggggcaccaacagtggagga

SEQ ID NO: 2553902 - DNA, 25 bp, Homo sapien
aagtttgagagttagggtgagaaga

SEQ ID NO: 2553903 - DNA, 25 bp, Homo sapien
cggcatgccccagcatgctctcaca

SEQ ID NO: 2553904 - DNA, 25 bp, Homo sapien
cacggcatgccccagcatgctctca

SEQ ID NO: 2553905 - DNA, 25 bp, Homo sapien
gcatgctctcacacacacagaggcc

SEQ ID NO: 2553906 - DNA, 25 bp, Homo sapien
gcatgccccagcatgctctcacaca

SEQ ID NO: 2553907 - DNA, 25 bp, Homo sapien
ttgaccaggttctcgtggcacgcgg

SEQ ID NO: 2553908 - DNA, 25 bp, Homo sapien
tctcgggtctccagctatcaagttt

SEQ ID NO: 2553909 - DNA, 25 bp, Homo sapien
aggatgtagccgcccactttgacca

SEQ ID NO: 2553910 - DNA, 25 bp, Homo sapien
ctggatctcgggtctccagctatca

SEQ ID NO: 2553911 - DNA, 25 bp, Homo sapien
aaagacgcccctttcactaagtcag

SEQ ID NO: 2553912 - DNA, 25 bp, Homo sapien
agaggccgctggtcgggaccctctt

SEQ ID NO: 2553913 - DNA, 25 bp, Homo sapien
agctccagatcccaccgcaaagacg

SEQ ID NO: 2553914 - DNA, 25 bp, Homo sapien
actaagtcagccatcaaccccacgt

SEQ ID NO: 2553915 - DNA, 25 bp, Homo sapien
tggaacttggagtgcagcaggtgga

SEQ ID NO: 2553916 - DNA, 25 bp, Homo sapien
gtggacaggagcagcgcgcgggtgg

SEQ ID NO: 2553917 - DNA, 25 bp, Homo sapien
cgggaagaggttcacgaacttgatg

SEQ ID NO: 2553918 - DNA, 25 bp, Homo sapien
cgcgggtggggacgctgcacaggtg

SEQ ID NO: 2553919 - DNA, 25 bp, Homo sapien
gcaggtactccacagcacgctgctg

SEQ ID NO: 2553920 - DNA, 25 bp, Homo sapien
gccgcaggtactccacagcacgctg

SEQ ID NO: 2553921 - DNA, 25 bp, Homo sapien
cagctccacgtctgcgttcctgagc

SEQ ID NO: 2553922 - DNA, 25 bp, Homo sapien
agctggctgtcgctgcgcagcacgt

SEQ ID NO: 2553923 - DNA, 25 bp, Homo sapien
gagctttgccaagatggaggactcc

SEQ ID NO: 2553924 - DNA, 25 bp, Homo sapien
tccacactcctgtcccgcttggtgt

SEQ ID NO: 2553925 - DNA, 25 bp, Homo sapien
tcttcttgagctttgccaagatgga

SEQ ID NO: 2553926 - DNA, 25 bp, Homo sapien
agatggaggactcccgctccgggaa

SEQ ID NO: 2553927 - DNA, 25 bp, Homo sapien
aaagccctgccgatactgggtagca

SEQ ID NO: 2553928 - DNA, 25 bp, Homo sapien
ccacaaagccctgccgatactgggt

SEQ ID NO: 2553929 - DNA, 25 bp, Homo sapien
actggttgccaccactggacctgcg

SEQ ID NO: 2553930 - DNA, 25 bp, Homo sapien
actggacctgcgtcctggagagaca

SEQ ID NO: 2553931 - DNA, 25 bp, Homo sapien
agctcacagacaaatctccacaagc

SEQ ID NO: 2553932 - DNA, 25 bp, Homo sapien
ctgccggcccagcacccacgggaag

SEQ ID NO: 2553933 - DNA, 25 bp, Homo sapien
cagacaaatctccacaagcaagttt

SEQ ID NO: 2553934 - DNA, 25 bp, Homo sapien
cctgctccggcagctcacagacaaa

SEQ ID NO: 2553935 - DNA, 25 bp, Homo sapien
gccccaggacagtagggtcctaaca

SEQ ID NO: 2553936 - DNA, 25 bp, Homo sapien
taacagcgaggccagatgcaaggcc

SEQ ID NO: 2553937 - DNA, 25 bp, Homo sapien
agtagggtcctaacacccacttcag

SEQ ID NO: 2553938 - DNA, 25 bp, Homo sapien
ctgaaacgttaccacagattgtaac

SEQ ID NO: 2553939 - DNA, 25 bp, Homo sapien
gtctgagaacacgtccacgagcagc

SEQ ID NO: 2553940 - DNA, 25 bp, Homo sapien
caggtctgccgacggagaaggcgta

SEQ ID NO: 2553941 - DNA, 25 bp, Homo sapien
aagttgtcttcggagccaggagcga

SEQ ID NO: 2553942 - DNA, 25 bp, Homo sapien
agcgagaggcgcgaccacagaggcc

SEQ ID NO: 2553943 - DNA, 25 bp, Homo sapien
gaaaacaagcagatggctgagagca

SEQ ID NO: 2553944 - DNA, 25 bp, Homo sapien
gctgagagcagccagtaagcggaat

SEQ ID NO: 2553945 - DNA, 25 bp, Homo sapien
cagtaagcggaatgcacagctgatg

SEQ ID NO: 2553946 - DNA, 25 bp, Homo sapien
gacatgaaaacaagcagatggctga

SEQ ID NO: 2553947 - DNA, 25 bp, Homo sapien
cagatcaaagccaagacggccgcat

SEQ ID NO: 2553948 - DNA, 25 bp, Homo sapien
gccgccctgtcctgtgagccgtgtg

SEQ ID NO: 2553949 - DNA, 25 bp, Homo sapien
aaggccatgagaatgcagccgccct

SEQ ID NO: 2553950 - DNA, 25 bp, Homo sapien
caaacacacgcagacacctgatgac

SEQ ID NO: 2553951 - DNA, 25 bp, Homo sapien
cactccacgcgaggggccacggagt

SEQ ID NO: 2553952 - DNA, 25 bp, Homo sapien
cgaggggccacggagtttacactca

SEQ ID NO: 2553953 - DNA, 25 bp, Homo sapien
ccgcccacagccagcgggcactcca

SEQ ID NO: 2553954 - DNA, 25 bp, Homo sapien
tttacactcagggtgtggactaagc

SEQ ID NO: 2553955 - DNA, 25 bp, Homo sapien
agtccctgcgcacacctctggaggc

SEQ ID NO: 2553956 - DNA, 25 bp, Homo sapien
gagccgctgaggcagcagtccctgc

SEQ ID NO: 2553957 - DNA, 25 bp, Homo sapien
caacagacggcaaggggcagtgaca

SEQ ID NO: 2553958 - DNA, 25 bp, Homo sapien
cagaggaagcagcaacagacggcaa

SEQ ID NO: 2553959 - DNA, 25 bp, Homo sapien
ctgtgctgacatggcggcgatcaag

SEQ ID NO: 2553960 - DNA, 25 bp, Homo sapien
catggcggcgatcaaggtcagccac

SEQ ID NO: 2553961 - DNA, 25 bp, Homo sapien
ggtctgagtgctgccaaccttctca

SEQ ID NO: 2553962 - DNA, 25 bp, Homo sapien
aggtctgagtgctgccaaccttctc

SEQ ID NO: 2553963 - DNA, 25 bp, Homo sapien
gaagcaaatgctgcacggcagcagc

SEQ ID NO: 2553964 - DNA, 25 bp, Homo sapien
agaagcaaatgctgcacggcagcag

SEQ ID NO: 2553965 - DNA, 25 bp, Homo sapien
aaaagggacagtatatgtgtcactc

SEQ ID NO: 2553966 - DNA, 25 bp, Homo sapien
gaaaagggacagtatatgtgtcact

SEQ ID NO: 2553967 - DNA, 25 bp, Homo sapien
agggacagtatatgtgtcactcaaa

SEQ ID NO: 2553968 - DNA, 25 bp, Homo sapien
aaagggacagtatatgtgtcactca

SEQ ID NO: 2553969 - DNA, 25 bp, Homo sapien
gccgaaattcagacttaagtccaat

SEQ ID NO: 2553970 - DNA, 25 bp, Homo sapien
tcagacttaagtccaatttgaagca

SEQ ID NO: 2553971 - DNA, 25 bp, Homo sapien
ctaaattctgccgaaattcagactt

SEQ ID NO: 2553972 - DNA, 25 bp, Homo sapien
gcagctggttttcaaacaacacacc

SEQ ID NO: 2553973 - DNA, 25 bp, Homo sapien
tgcctcctgtcaggggacccggctg

SEQ ID NO: 2553974 - DNA, 25 bp, Homo sapien
gctgggcacgcgtccagcacagcat

SEQ ID NO: 2553975 - DNA, 25 bp, Homo sapien
gctgcctcctgtcaggggacccggc

SEQ ID NO: 2553976 - DNA, 25 bp, Homo sapien
cccggctgggcacgcgtccagcaca

SEQ ID NO: 2553977 - DNA, 25 bp, Homo sapien
atcttcagctgaatttaagttcact

SEQ ID NO: 2553978 - DNA, 25 bp, Homo sapien
acaagagccccccacaatcttcagc

SEQ ID NO: 2553979 - DNA, 25 bp, Homo sapien
tcttcagctgaatttaagttcactg

SEQ ID NO: 2553980 - DNA, 25 bp, Homo sapien
gagccccccacaatcttcagctgaa

SEQ ID NO: 2553981 - DNA, 25 bp, Homo sapien
catttcacacttaccctgaatattt

SEQ ID NO: 2553982 - DNA, 25 bp, Homo sapien
ttcacacttaccctgaatatttacc

SEQ ID NO: 2553983 - DNA, 25 bp, Homo sapien
tttcacacttaccctgaatatttac

SEQ ID NO: 2553984 - DNA, 25 bp, Homo sapien
atttcacacttaccctgaatattta

SEQ ID NO: 2553985 - DNA, 25 bp, Homo sapien
aagtttaggaactgcgtggaggtct

SEQ ID NO: 2553986 - DNA, 25 bp, Homo sapien
cgtggaggtcttattaccataaaag

SEQ ID NO: 2553987 - DNA, 25 bp, Homo sapien
gtcgtctgaacagattagtgttggg

SEQ ID NO: 2553988 - DNA, 25 bp, Homo sapien
taggctgaaggtcgtctgaacagat

SEQ ID NO: 2553989 - DNA, 25 bp, Homo sapien
tctggaattatctcgctattttaac

SEQ ID NO: 2553990 - DNA, 25 bp, Homo sapien
ccataggcagattacgactgcctga

SEQ ID NO: 2553991 - DNA, 25 bp, Homo sapien
cacattatgctgtctgcgggcatgg

SEQ ID NO: 2553992 - DNA, 25 bp, Homo sapien
ctccaatatggaagactgcctgttt

SEQ ID NO: 2553993 - DNA, 25 bp, Homo sapien
ggaggaggcatgtacacggtatttt

SEQ ID NO: 2553994 - DNA, 25 bp, Homo sapien
ggaggcatgtacacggtatttttag

SEQ ID NO: 2553995 - DNA, 25 bp, Homo sapien
catgtacacggtatttttaggtgca

SEQ ID NO: 2553996 - DNA, 25 bp, Homo sapien
gaggcatgtacacggtatttttagg

SEQ ID NO: 2553997 - DNA, 25 bp, Homo sapien
gaacgcttctggcattacgaaggga

SEQ ID NO: 2553998 - DNA, 25 bp, Homo sapien
ggtttaaagatcacgtcacaggaga

SEQ ID NO: 2553999 - DNA, 25 bp, Homo sapien
tatttggcgggcctatccttagagg

SEQ ID NO: 2554000 - DNA, 25 bp, Homo sapien
agaagcacacacaagctcggctggg

SEQ ID NO: 2554001 - DNA, 25 bp, Homo sapien
caaggaggatgttgcttcactcagg

SEQ ID NO: 2554002 - DNA, 25 bp, Homo sapien
tgttttgaaacagcttgaacagtct

SEQ ID NO: 2554003 - DNA, 25 bp, Homo sapien
caaagtctttaatacaggtgctcct

SEQ ID NO: 2554004 - DNA, 25 bp, Homo sapien
tcgctgaccataaatccccaggtgt

SEQ ID NO: 2554005 - DNA, 25 bp, Homo sapien
ctaaagaagggcgcagtaggagtca

SEQ ID NO: 2554006 - DNA, 25 bp, Homo sapien
gaagggcgcagtaggagtcagagct

SEQ ID NO: 2554007 - DNA, 25 bp, Homo sapien
aaagaagggcgcagtaggagtcaga

SEQ ID NO: 2554008 - DNA, 25 bp, Homo sapien
taggagtcagagcttccactccaga

SEQ ID NO: 2554009 - DNA, 25 bp, Homo sapien
tcgctgccgcctcgagccaagtgga

SEQ ID NO: 2554010 - DNA, 25 bp, Homo sapien
gctcgctgccgcctcgagccaagtg

SEQ ID NO: 2554011 - DNA, 25 bp, Homo sapien
cctcgagccaagtggaccccgaggg

SEQ ID NO: 2554012 - DNA, 25 bp, Homo sapien
tctgggtcgtgtgccgccggccact

SEQ ID NO: 2554013 - DNA, 25 bp, Homo sapien
cagaaactggtgcttagtagggcag

SEQ ID NO: 2554014 - DNA, 25 bp, Homo sapien
aagaatcccaggaatagcaggctcc

SEQ ID NO: 2554015 - DNA, 25 bp, Homo sapien
tcggctctgggtcttacacacacaa

SEQ ID NO: 2554016 - DNA, 25 bp, Homo sapien
taggaccaccagctacgggtcgagg

SEQ ID NO: 2554017 - DNA, 25 bp, Homo sapien
gcctccgtgaagtcggacacgcact

SEQ ID NO: 2554018 - DNA, 25 bp, Homo sapien
tgaagtcggacacgcactctatgtt

SEQ ID NO: 2554019 - DNA, 25 bp, Homo sapien
actggcgcctccgtgaagtcggaca

SEQ ID NO: 2554020 - DNA, 25 bp, Homo sapien
ctccacggtcgggtccacgggcttg

SEQ ID NO: 2554021 - DNA, 25 bp, Homo sapien
cctggagtgagaagcgtcccgatct

SEQ ID NO: 2554022 - DNA, 25 bp, Homo sapien
ggtacgatctgagctcaactgagca

SEQ ID NO: 2554023 - DNA, 25 bp, Homo sapien
agatcctagcaaggccccatgtggg

SEQ ID NO: 2554024 - DNA, 25 bp, Homo sapien
agctgtcgtctggtaccaagccggg

SEQ ID NO: 2554025 - DNA, 25 bp, Homo sapien
ctcaactgcttccaacgttgaaaga

SEQ ID NO: 2554026 - DNA, 25 bp, Homo sapien
catttctgtcggctggaagaatttg

SEQ ID NO: 2554027 - DNA, 25 bp, Homo sapien
tgttgagagtgatgggcagctgcac

SEQ ID NO: 2554028 - DNA, 25 bp, Homo sapien
tccaacgttgaaagaaatcctgaga

SEQ ID NO: 2554029 - DNA, 25 bp, Homo sapien
tccattgggtgctttgctttgaaga

SEQ ID NO: 2554030 - DNA, 25 bp, Homo sapien
tgctttgaagatgttctgcacttcc

SEQ ID NO: 2554031 - DNA, 25 bp, Homo sapien
gctttggtgacttctgtgtccattg

SEQ ID NO: 2554032 - DNA, 25 bp, Homo sapien
cttctgtgtccattgggtgctttgc

SEQ ID NO: 2554033 - DNA, 25 bp, Homo sapien
ttgcaggttcggctccaagcgcagc

SEQ ID NO: 2554034 - DNA, 25 bp, Homo sapien
tccagctcccacgaaattcgcagga

SEQ ID NO: 2554035 - DNA, 25 bp, Homo sapien
gaagtgcagaaccaaatccaatgat

SEQ ID NO: 2554036 - DNA, 25 bp, Homo sapien
catccaatctgggtggttttcgtgt

SEQ ID NO: 2554037 - DNA, 25 bp, Homo sapien
tgactgaactgcactagggatgatg

SEQ ID NO: 2554038 - DNA, 25 bp, Homo sapien
aggatccgccatgcagaaccctgtg

SEQ ID NO: 2554039 - DNA, 25 bp, Homo sapien
tgactgaactgcactaaagagctac

SEQ ID NO: 2554040 - DNA, 25 bp, Homo sapien
acaggtgtccgtcgccagaacggga

SEQ ID NO: 2554041 - DNA, 25 bp, Homo sapien
ttgtgcgcagcgtgagccggtacat

SEQ ID NO: 2554042 - DNA, 25 bp, Homo sapien
tgagagcaattcacataatctctga

SEQ ID NO: 2554043 - DNA, 25 bp, Homo sapien
tgcgctgagagcaattcacataatc

SEQ ID NO: 2554044 - DNA, 25 bp, Homo sapien
aactgcgctgagagcaattcacata

SEQ ID NO: 2554045 - DNA, 25 bp, Homo sapien
ctaaaactgcgctgagagcaattca

SEQ ID NO: 2554046 - DNA, 25 bp, Homo sapien
acgtgtgttcccgtccagcccaaag

SEQ ID NO: 2554047 - DNA, 25 bp, Homo sapien
tggacacggtgctcatctgcaggat

SEQ ID NO: 2554048 - DNA, 25 bp, Homo sapien
gatggccacgaagacaaacggcaca

SEQ ID NO: 2554049 - DNA, 25 bp, Homo sapien
agacaacacaagacacacgagcctg

SEQ ID NO: 2554050 - DNA, 25 bp, Homo sapien
cactcccacaaacgccacgttcacg

SEQ ID NO: 2554051 - DNA, 25 bp, Homo sapien
gacactcccacaaacgccacgttca

SEQ ID NO: 2554052 - DNA, 25 bp, Homo sapien
gtgacactcccacaaacgccacgtt

SEQ ID NO: 2554053 - DNA, 25 bp, Homo sapien
ctcagtgacactcccacaaacgcca

SEQ ID NO: 2554054 - DNA, 25 bp, Homo sapien
ggagaacagttacatccggccagga

SEQ ID NO: 2554055 - DNA, 25 bp, Homo sapien
tgcttttgccagaagtcattacaaa

SEQ ID NO: 2554056 - DNA, 25 bp, Homo sapien
cacgccatgcacagtggcactgctg

SEQ ID NO: 2554057 - DNA, 25 bp, Homo sapien
tcctgcctgggaaaacagtccagct

SEQ ID NO: 2554058 - DNA, 25 bp, Homo sapien
gagcataacagacgcccttcacaaa

SEQ ID NO: 2554059 - DNA, 25 bp, Homo sapien
caggagcataacagacgcccttcac

SEQ ID NO: 2554060 - DNA, 25 bp, Homo sapien
ataacagacgcccttcacaaacagg

SEQ ID NO: 2554061 - DNA, 25 bp, Homo sapien
aacagacgcccttcacaaacaggag

SEQ ID NO: 2554062 - DNA, 25 bp, Homo sapien
gccggcaggacgctcctcccctggc

SEQ ID NO: 2554063 - DNA, 25 bp, Homo sapien
gggccggcaggacgctcctcccctg

SEQ ID NO: 2554064 - DNA, 25 bp, Homo sapien
ggccggcaggacgctcctcccctgg

SEQ ID NO: 2554065 - DNA, 25 bp, Homo sapien
ccggcaggacgctcctcccctggct

SEQ ID NO: 2554066 - DNA, 25 bp, Homo sapien
ctgacaggaaagagacgagcacacc

SEQ ID NO: 2554067 - DNA, 25 bp, Homo sapien
aggaaagagacgagcacacctctga

SEQ ID NO: 2554068 - DNA, 25 bp, Homo sapien
aagagacgagcacacctctgagtct

SEQ ID NO: 2554069 - DNA, 25 bp, Homo sapien
agtcttgcgccaccggcccacactt

SEQ ID NO: 2554070 - DNA, 25 bp, Homo sapien
atcctggggacagagcgcaaggccc

SEQ ID NO: 2554071 - DNA, 25 bp, Homo sapien
tggcacatggcatgcggccaatggc

SEQ ID NO: 2554072 - DNA, 25 bp, Homo sapien
agacacaagccgcaggtggcacatg

SEQ ID NO: 2554073 - DNA, 25 bp, Homo sapien
ctctcaggtgtcagacgtgcagcct

SEQ ID NO: 2554074 - DNA, 25 bp, Homo sapien
tgaaaaccctcaagcacatgtggcc

SEQ ID NO: 2554075 - DNA, 25 bp, Homo sapien
agggacccgcacagcaggcaactga

SEQ ID NO: 2554076 - DNA, 25 bp, Homo sapien
cacagcatgtcaggaagccagaacc

SEQ ID NO: 2554077 - DNA, 25 bp, Homo sapien
atgtcaggaagccagaacctgtgct

SEQ ID NO: 2554078 - DNA, 25 bp, Homo sapien
tgcgagaggcgcacgccactgacgt

SEQ ID NO: 2554079 - DNA, 25 bp, Homo sapien
cactgacgtggctatgctgtgatca

SEQ ID NO: 2554080 - DNA, 25 bp, Homo sapien
cgacacgccggaagaagagccgcag

SEQ ID NO: 2554081 - DNA, 25 bp, Homo sapien
tatgctgtgatcaaagcccgacacg

SEQ ID NO: 2554082 - DNA, 25 bp, Homo sapien
ctggcaccaccagacccagaatggc

SEQ ID NO: 2554083 - DNA, 25 bp, Homo sapien
gcagcacaagcccagcacggcgtgt

SEQ ID NO: 2554084 - DNA, 25 bp, Homo sapien
tgcccagcagctggaacatgagaat

SEQ ID NO: 2554085 - DNA, 25 bp, Homo sapien
gaacatgagaatgagggccacacca

SEQ ID NO: 2554086 - DNA, 25 bp, Homo sapien
acaagcccagcacggcgtgtcacgg

SEQ ID NO: 2554087 - DNA, 25 bp, Homo sapien
ggagatccacggcagcacacgcagc

SEQ ID NO: 2554088 - DNA, 25 bp, Homo sapien
caggagatccacggcagcacacgca

SEQ ID NO: 2554089 - DNA, 25 bp, Homo sapien
aggagatccacggcagcacacgcag

SEQ ID NO: 2554090 - DNA, 25 bp, Homo sapien
ccgcacagggaagcggtgcctcggg

SEQ ID NO: 2554091 - DNA, 25 bp, Homo sapien
tgcagcgccgcacagggaagcggtg

SEQ ID NO: 2554092 - DNA, 25 bp, Homo sapien
tttctttgacgaggagtgccacact

SEQ ID NO: 2554093 - DNA, 25 bp, Homo sapien
gagcagcctttcctctgatggcggg

SEQ ID NO: 2554094 - DNA, 25 bp, Homo sapien
ggactgaggcggacagtggtcacgg

SEQ ID NO: 2554095 - DNA, 25 bp, Homo sapien
cactgcgtgtgcagctctgtggcct

SEQ ID NO: 2554096 - DNA, 25 bp, Homo sapien
gctcagactaccacactcctgcaga

SEQ ID NO: 2554097 - DNA, 25 bp, Homo sapien
gagactagcagggtcgctgcctgct

SEQ ID NO: 2554098 - DNA, 25 bp, Homo sapien
tcttccacaggtcctatgactgcaa

SEQ ID NO: 2554099 - DNA, 25 bp, Homo sapien
aatgacaccgaccaccagtgggacc

SEQ ID NO: 2554100 - DNA, 25 bp, Homo sapien
tagcacggccaaaacttctacatcc

SEQ ID NO: 2554101 - DNA, 25 bp, Homo sapien
aaacacaccagtacaggcaccagaa

SEQ ID NO: 2554102 - DNA, 25 bp, Homo sapien
gactccaagtactcacacagtcatc

SEQ ID NO: 2554103 - DNA, 25 bp, Homo sapien
gattcctccaccgacaacgctcaag

SEQ ID NO: 2554104 - DNA, 25 bp, Homo sapien
acccctacccatgcacagatggcca

SEQ ID NO: 2554105 - DNA, 25 bp, Homo sapien
cacacagcgccaacaatgacgctga

SEQ ID NO: 2554106 - DNA, 25 bp, Homo sapien
gggcagctcccgggcgtgtgggcac

SEQ ID NO: 2554107 - DNA, 25 bp, Homo sapien
gctcccgggcgtgtgggcacaggtg

SEQ ID NO: 2554108 - DNA, 25 bp, Homo sapien
aggctcagctcacctgtgggatggg

SEQ ID NO: 2554109 - DNA, 25 bp, Homo sapien
tgtgtatggcacgcgtggccctggg

SEQ ID NO: 2554110 - DNA, 25 bp, Homo sapien
ccacttagacggacatagagggcgg

SEQ ID NO: 2554111 - DNA, 25 bp, Homo sapien
ctgcgggtctaggagccagcgccca

SEQ ID NO: 2554112 - DNA, 25 bp, Homo sapien
ccctaacggttcagccgggaagctg

SEQ ID NO: 2554113 - DNA, 25 bp, Homo sapien
caggcctggagtgaccgctgttcag

SEQ ID NO: 2554114 - DNA, 25 bp, Homo sapien
gctcccttgggccggcacctggtgt

SEQ ID NO: 2554115 - DNA, 25 bp, Homo sapien
cacctggtgtgagtggccgggaaac

SEQ ID NO: 2554116 - DNA, 25 bp, Homo sapien
ttgggccggcacctggtgtgagtgg

SEQ ID NO: 2554117 - DNA, 25 bp, Homo sapien
tgtgagtggccgggaaacccacctg

SEQ ID NO: 2554118 - DNA, 25 bp, Homo sapien
gccagcctgtcgacatgcatctcct

SEQ ID NO: 2554119 - DNA, 25 bp, Homo sapien
ccagcctgtcgacatgcatctcctg

SEQ ID NO: 2554120 - DNA, 25 bp, Homo sapien
gggccagcctgtcgacatgcatctc

SEQ ID NO: 2554121 - DNA, 25 bp, Homo sapien
cagggccagcctgtcgacatgcatc

SEQ ID NO: 2554122 - DNA, 25 bp, Homo sapien
cccattgatgggaggctctgggaca

SEQ ID NO: 2554123 - DNA, 25 bp, Homo sapien
aagtccggtgcccgggtggctctca

SEQ ID NO: 2554124 - DNA, 25 bp, Homo sapien
catcttggggagaacagtcagccca

SEQ ID NO: 2554125 - DNA, 25 bp, Homo sapien
gctgggcaaggcgtgtgctcagggc

SEQ ID NO: 2554126 - DNA, 25 bp, Homo sapien
tgagtctccagggtgtggtgctccc

SEQ ID NO: 2554127 - DNA, 25 bp, Homo sapien
ctccagggtgtggtgctcccagcat

SEQ ID NO: 2554128 - DNA, 25 bp, Homo sapien
gcatcctagccaggccttgtggctg

SEQ ID NO: 2554129 - DNA, 25 bp, Homo sapien
tggtgctcccagcatcctagccagg

SEQ ID NO: 2554130 - DNA, 25 bp, Homo sapien
ctgataagcgggcggtgaggacaca

SEQ ID NO: 2554131 - DNA, 25 bp, Homo sapien
tgataagcgggcggtgaggacacag

SEQ ID NO: 2554132 - DNA, 25 bp, Homo sapien
ccgacggccacccacaccaggccct

SEQ ID NO: 2554133 - DNA, 25 bp, Homo sapien
cacactaccctcgtcccgacggcca

SEQ ID NO: 2554134 - DNA, 25 bp, Homo sapien
cagtagcaccaactgccgtggccgc

SEQ ID NO: 2554135 - DNA, 25 bp, Homo sapien
ccgtggccgcccacactaccctcgt

SEQ ID NO: 2554136 - DNA, 25 bp, Homo sapien
gggcagtggcttacagggacccaca

SEQ ID NO: 2554137 - DNA, 25 bp, Homo sapien
tctgacacggacagggcttcaggct

SEQ ID NO: 2554138 - DNA, 25 bp, Homo sapien
aaccccggcagcaggtcggcttggt

SEQ ID NO: 2554139 - DNA, 25 bp, Homo sapien
gaggcaccagcgtccaagtgcccgt

SEQ ID NO: 2554140 - DNA, 25 bp, Homo sapien
tagctcactccagcatatctgtgcc

SEQ ID NO: 2554141 - DNA, 25 bp, Homo sapien
ctccagcatatctgtgccccaggag

SEQ ID NO: 2554142 - DNA, 25 bp, Homo sapien
cgctgctgatggacaattccatagc

SEQ ID NO: 2554143 - DNA, 25 bp, Homo sapien
agctggcgctcagcaaagcttgccg

SEQ ID NO: 2554144 - DNA, 25 bp, Homo sapien
ccttcccggctggcccgcctttgct

SEQ ID NO: 2554145 - DNA, 25 bp, Homo sapien
ccggctggcccgcctttgctctgca

SEQ ID NO: 2554146 - DNA, 25 bp, Homo sapien
ggctggcccgcctttgctctgcata

SEQ ID NO: 2554147 - DNA, 25 bp, Homo sapien
ttcccggctggcccgcctttgctct

SEQ ID NO: 2554148 - DNA, 25 bp, Homo sapien
gggagggttgcagtgtccacacaca

SEQ ID NO: 2554149 - DNA, 25 bp, Homo sapien
tgtccatcgcgttctgcagggagca

SEQ ID NO: 2554150 - DNA, 25 bp, Homo sapien
tcaagggcactttgtcagccatcaa

SEQ ID NO: 2554151 - DNA, 25 bp, Homo sapien
ctgggtctgacgcattcaagggcac

SEQ ID NO: 2554152 - DNA, 25 bp, Homo sapien
cctgctgtccagattgtaggactgg

SEQ ID NO: 2554153 - DNA, 25 bp, Homo sapien
catcaagagtggaatgtgacgtcgt

SEQ ID NO: 2554154 - DNA, 25 bp, Homo sapien
atgtgacgtcgtccagctccccaga

SEQ ID NO: 2554155 - DNA, 25 bp, Homo sapien
gactggggcggcatcatcaagagtg

SEQ ID NO: 2554156 - DNA, 25 bp, Homo sapien
caggagacggccaggatcagcattt

SEQ ID NO: 2554157 - DNA, 25 bp, Homo sapien
aggagacggccaggatcagcatttg

SEQ ID NO: 2554158 - DNA, 25 bp, Homo sapien
gagacggccaggatcagcatttgct

SEQ ID NO: 2554159 - DNA, 25 bp, Homo sapien
ggagacggccaggatcagcatttgc

SEQ ID NO: 2554160 - DNA, 25 bp, Homo sapien
gcagcctcgccctgactgcgtttat

SEQ ID NO: 2554161 - DNA, 25 bp, Homo sapien
tgcgtttatggccagatcctgttgt

SEQ ID NO: 2554162 - DNA, 25 bp, Homo sapien
agatcctgttgtgggcgcaagtcca

SEQ ID NO: 2554163 - DNA, 25 bp, Homo sapien
cgccctgactgcgtttatggccaga

SEQ ID NO: 2554164 - DNA, 25 bp, Homo sapien
gagagcagctgagacaatttatcac

SEQ ID NO: 2554165 - DNA, 25 bp, Homo sapien
tcaatgcctgggtagggagttcccc

SEQ ID NO: 2554166 - DNA, 25 bp, Homo sapien
tccttcaaggaacaaacaaaggctg

SEQ ID NO: 2554167 - DNA, 25 bp, Homo sapien
tatcaacttcctctgtccaagatgg

SEQ ID NO: 2554168 - DNA, 25 bp, Homo sapien
catggtcttccctgaaaggatccgg

SEQ ID NO: 2554169 - DNA, 25 bp, Homo sapien
cacaggcacgcagtgaagaagccag

SEQ ID NO: 2554170 - DNA, 25 bp, Homo sapien
gaagatcgtttagggcccatggtct

SEQ ID NO: 2554171 - DNA, 25 bp, Homo sapien
agtcgggccacgctagatcccagca

SEQ ID NO: 2554172 - DNA, 25 bp, Homo sapien
ctggggcaccccggattgaccctgg

SEQ ID NO: 2554173 - DNA, 25 bp, Homo sapien
tggcttcaggggcattcgctgatcc

SEQ ID NO: 2554174 - DNA, 25 bp, Homo sapien
aggggcattcgctgatccacctggg

SEQ ID NO: 2554175 - DNA, 25 bp, Homo sapien
atccacctggggcaccccggattga

SEQ ID NO: 2554176 - DNA, 25 bp, Homo sapien
tcccctagggtaggtgtcgctcaga

SEQ ID NO: 2554177 - DNA, 25 bp, Homo sapien
aggatgacgagagcccaccgtgcat

SEQ ID NO: 2554178 - DNA, 25 bp, Homo sapien
tggctcggacacagacaccctgggc

SEQ ID NO: 2554179 - DNA, 25 bp, Homo sapien
cagaagtcagaggacaccaagaccc

SEQ ID NO: 2554180 - DNA, 25 bp, Homo sapien
gaatggcaccatgaggggaccagat

SEQ ID NO: 2554181 - DNA, 25 bp, Homo sapien
ggctgctgagtgaccgtgggcgctg

SEQ ID NO: 2554182 - DNA, 25 bp, Homo sapien
cctgtgaccgtcatgaacataccac

SEQ ID NO: 2554183 - DNA, 25 bp, Homo sapien
ctggagtcggcagggcacttgtgct

SEQ ID NO: 2554184 - DNA, 25 bp, Homo sapien
gccggcgaggcaggcgaggacccgt

SEQ ID NO: 2554185 - DNA, 25 bp, Homo sapien
gggccggcgaggcaggcgaggaccc

SEQ ID NO: 2554186 - DNA, 25 bp, Homo sapien
ggagggccggcgaggcaggcgagga

SEQ ID NO: 2554187 - DNA, 25 bp, Homo sapien
gagggccggcgaggcaggcgaggac

SEQ ID NO: 2554188 - DNA, 25 bp, Homo sapien
acatggatggcgagcacctggtctg

SEQ ID NO: 2554189 - DNA, 25 bp, Homo sapien
ccacattcagaaaactgcgagggcc

SEQ ID NO: 2554190 - DNA, 25 bp, Homo sapien
tgtcgagtccgtggacgaagccatg

SEQ ID NO: 2554191 - DNA, 25 bp, Homo sapien
tggccggcgccataactggtcttca

SEQ ID NO: 2554192 - DNA, 25 bp, Homo sapien
caggcggctggtgcgacagggactg

SEQ ID NO: 2554193 - DNA, 25 bp, Homo sapien
gacagggactgtggccgtgactccc

SEQ ID NO: 2554194 - DNA, 25 bp, Homo sapien
tggtgcgacagggactgtggccgtg

SEQ ID NO: 2554195 - DNA, 25 bp, Homo sapien
ctagagtgaacggtggctgtgtggg

SEQ ID NO: 2554196 - DNA, 25 bp, Homo sapien
ctggggacagtcccgacgtcgaact

SEQ ID NO: 2554197 - DNA, 25 bp, Homo sapien
gggacagtcccgacgtcgaactcca

SEQ ID NO: 2554198 - DNA, 25 bp, Homo sapien
gcacctcgaccctggagggagtgct

SEQ ID NO: 2554199 - DNA, 25 bp, Homo sapien
gacgtcgaactccacacggccagca

SEQ ID NO: 2554200 - DNA, 25 bp, Homo sapien
gcccgccggacagcaagctcacatt

SEQ ID NO: 2554201 - DNA, 25 bp, Homo sapien
ggtctagtcctctctccgcagcaat

SEQ ID NO: 2554202 - DNA, 25 bp, Homo sapien
agcaatccggtgtcccctcgacgga

SEQ ID NO: 2554203 - DNA, 25 bp, Homo sapien
ccccgcccgccggacagcaagctca

SEQ ID NO: 2554204 - DNA, 25 bp, Homo sapien
gatttaagcacaatgtaaacacgtt

SEQ ID NO: 2554205 - DNA, 25 bp, Homo sapien
catgtgtgttatgctgcttgattta

SEQ ID NO: 2554206 - DNA, 25 bp, Homo sapien
gaaagaaaatcattgcgagtagaat

SEQ ID NO: 2554207 - DNA, 25 bp, Homo sapien
cagttaataacaccatattgcatcc

SEQ ID NO: 2554208 - DNA, 25 bp, Homo sapien
ctgctccgaatgctgcaagggcagc

SEQ ID NO: 2554209 - DNA, 25 bp, Homo sapien
cctgctccgaatgctgcaagggcag

SEQ ID NO: 2554210 - DNA, 25 bp, Homo sapien
cctggccacactgtgtgacccttgc

SEQ ID NO: 2554211 - DNA, 25 bp, Homo sapien
gctccgaatgctgcaagggcagcag

SEQ ID NO: 2554212 - DNA, 25 bp, Homo sapien
cctctggacaccaaggaggacccca

SEQ ID NO: 2554213 - DNA, 25 bp, Homo sapien
tggcaaggcccagacctacaccctg

SEQ ID NO: 2554214 - DNA, 25 bp, Homo sapien
ctctggacaccaaggaggaccccag

SEQ ID NO: 2554215 - DNA, 25 bp, Homo sapien
gcccagacctacaccctggcaggtg

SEQ ID NO: 2554216 - DNA, 25 bp, Homo sapien
tgttgccaacggctgcatggaattt

SEQ ID NO: 2554217 - DNA, 25 bp, Homo sapien
cactgttgccaacggctgcatggaa

SEQ ID NO: 2554218 - DNA, 25 bp, Homo sapien
ttgccaacggctgcatggaatttgc

SEQ ID NO: 2554219 - DNA, 25 bp, Homo sapien
gacactgttgccaacggctgcatgg

SEQ ID NO: 2554220 - DNA, 25 bp, Homo sapien
ccatggggttcgagggaccctggtg

SEQ ID NO: 2554221 - DNA, 25 bp, Homo sapien
tgaccactccgaggaaaatgcttgt

SEQ ID NO: 2554222 - DNA, 25 bp, Homo sapien
ggctttgaccactccgaggaaaatg

SEQ ID NO: 2554223 - DNA, 25 bp, Homo sapien
ggaaaatgcttgtcggttctgcttt

SEQ ID NO: 2554224 - DNA, 25 bp, Homo sapien
ggttactgaaatgtcggcctccagc

SEQ ID NO: 2554225 - DNA, 25 bp, Homo sapien
cccacgtcctgtgttggtccaaatg

SEQ ID NO: 2554226 - DNA, 25 bp, Homo sapien
gccagattcgcagcatctactgtgg

SEQ ID NO: 2554227 - DNA, 25 bp, Homo sapien
aaatgtggcccccattgctggttac

SEQ ID NO: 2554228 - DNA, 25 bp, Homo sapien
gccgccaggcgggctagtggcagcc

SEQ ID NO: 2554229 - DNA, 25 bp, Homo sapien
agccgccaggcgggctagtggcagc

SEQ ID NO: 2554230 - DNA, 25 bp, Homo sapien
ccgccaggcgggctagtggcagccc

SEQ ID NO: 2554231 - DNA, 25 bp, Homo sapien
ttgtggccgtggtttcgggttctgc

SEQ ID NO: 2554232 - DNA, 25 bp, Homo sapien
tgtggccgtggtttcgggttctgcc

SEQ ID NO: 2554233 - DNA, 25 bp, Homo sapien
cgtcgaaggtcttgtagtggaagtt

SEQ ID NO: 2554234 - DNA, 25 bp, Homo sapien
gcaaattccttgtaggagcctcggc

SEQ ID NO: 2554235 - DNA, 25 bp, Homo sapien
cccgttaagcacagccaggtggcgg

SEQ ID NO: 2554236 - DNA, 25 bp, Homo sapien
gaccccgcttcaggtgcacagcaaa

SEQ ID NO: 2554237 - DNA, 25 bp, Homo sapien
gtagatggtgtcatccttgatggtc

SEQ ID NO: 2554238 - DNA, 25 bp, Homo sapien
tgtaggcatcgctcttctcaatgag

SEQ ID NO: 2554239 - DNA, 25 bp, Homo sapien
atgagtgcatcctcccggttccaca

SEQ ID NO: 2554240 - DNA, 25 bp, Homo sapien
ccggcgcgggagtagactttggtgt

SEQ ID NO: 2554241 - DNA, 25 bp, Homo sapien
cctcccggttccacatgagggtgag

SEQ ID NO: 2554242 - DNA, 25 bp, Homo sapien
cacgagtccggggacccctgagcac

SEQ ID NO: 2554243 - DNA, 25 bp, Homo sapien
ccacgagtccggggacccctgagca

SEQ ID NO: 2554244 - DNA, 25 bp, Homo sapien
cccaagactcgtggcttgtttgagc

SEQ ID NO: 2554245 - DNA, 25 bp, Homo sapien
caagactcgtggcttgtttgagcca

SEQ ID NO: 2554246 - DNA, 25 bp, Homo sapien
ccccaagactcgtggcttgtttgag

SEQ ID NO: 2554247 - DNA, 25 bp, Homo sapien
acccccaagactcgtggcttgtttg

SEQ ID NO: 2554248 - DNA, 25 bp, Homo sapien
cagagaggaattctgaatagctctg

SEQ ID NO: 2554249 - DNA, 25 bp, Homo sapien
cgtcagagaggaattctgaatagct

SEQ ID NO: 2554250 - DNA, 25 bp, Homo sapien
acaggtgtggttccggaacttagtg

SEQ ID NO: 2554251 - DNA, 25 bp, Homo sapien
gtcagagaggaattctgaatagctc

SEQ ID NO: 2554252 - DNA, 25 bp, Homo sapien
cacacaccacatcgggctggttgat

SEQ ID NO: 2554253 - DNA, 25 bp, Homo sapien
ccacatcgggctggttgatcttctg

SEQ ID NO: 2554254 - DNA, 25 bp, Homo sapien
cctcctcctcgggatcctcacacac

SEQ ID NO: 2554255 - DNA, 25 bp, Homo sapien
tcctcacacaccacatcgggctggt

SEQ ID NO: 2554256 - DNA, 25 bp, Homo sapien
aaggcctcggcggtcagcagcctct

SEQ ID NO: 2554257 - DNA, 25 bp, Homo sapien
tggcaggcgcgcagatacggctcca

SEQ ID NO: 2554258 - DNA, 25 bp, Homo sapien
aggtcctgacagtccgcgaaggcct

SEQ ID NO: 2554259 - DNA, 25 bp, Homo sapien
ctggcgggagaactcggccacggtg

SEQ ID NO: 2554260 - DNA, 25 bp, Homo sapien
ggcagagcgtggcggtcctccagtt

SEQ ID NO: 2554261 - DNA, 25 bp, Homo sapien
gcagagcgtggcggtcctccagttc

SEQ ID NO: 2554262 - DNA, 25 bp, Homo sapien
tggggaaagcaccagcgtggggtct

SEQ ID NO: 2554263 - DNA, 25 bp, Homo sapien
gcttggggaaagcaccagcgtgggg

SEQ ID NO: 2554264 - DNA, 25 bp, Homo sapien
ccctgcccacaaggcgccggggctt

SEQ ID NO: 2554265 - DNA, 25 bp, Homo sapien
ctgcccacaaggcgccggggcttac

SEQ ID NO: 2554266 - DNA, 25 bp, Homo sapien
agggcgagccgctctccaggtacac

SEQ ID NO: 2554267 - DNA, 25 bp, Homo sapien
cagggcgagccgctctccaggtaca

SEQ ID NO: 2554268 - DNA, 25 bp, Homo sapien
cttctgggcagaaacagccgtccat

SEQ ID NO: 2554269 - DNA, 25 bp, Homo sapien
ccatgcggtgctcctcgcacaggct

SEQ ID NO: 2554270 - DNA, 25 bp, Homo sapien
tgatctcctggcccggtgtgtacag

SEQ ID NO: 2554271 - DNA, 25 bp, Homo sapien
tccccgatgtcgtcatatacggtgc

SEQ ID NO: 2554272 - DNA, 25 bp, Homo sapien
gccactgtccccgatgtcgtcatat

SEQ ID NO: 2554273 - DNA, 25 bp, Homo sapien
tacaggtgtccgtgcagcctgcagt

SEQ ID NO: 2554274 - DNA, 25 bp, Homo sapien
cacacccagcggccagcgttacaga

SEQ ID NO: 2554275 - DNA, 25 bp, Homo sapien
gcacacccagcggccagcgttacag

SEQ ID NO: 2554276 - DNA, 25 bp, Homo sapien
acacccagcggccagcgttacagac

SEQ ID NO: 2554277 - DNA, 25 bp, Homo sapien
cacccagcggccagcgttacagaca

SEQ ID NO: 2554278 - DNA, 25 bp, Homo sapien
tggccaggacatagtagcagtcccc

SEQ ID NO: 2554279 - DNA, 25 bp, Homo sapien
tgtacgtcttcccatcgaaggtggt

SEQ ID NO: 2554280 - DNA, 25 bp, Homo sapien
cagtccccgtggaaggtgtacgtct

SEQ ID NO: 2554281 - DNA, 25 bp, Homo sapien
cgtcttcccatcgaaggtggtgatg

SEQ ID NO: 2554282 - DNA, 25 bp, Homo sapien
gcaccaccgtcttcaggcaggtctg

SEQ ID NO: 2554283 - DNA, 25 bp, Homo sapien
gagcgtaggaatcgttgtggtcacc

SEQ ID NO: 2554284 - DNA, 25 bp, Homo sapien
ccagctcgcccaggagagcgtagga

SEQ ID NO: 2554285 - DNA, 25 bp, Homo sapien
cccaggagagcgtaggaatcgttgt

SEQ ID NO: 2554286 - DNA, 25 bp, Homo sapien
gttcacctgcagctcgttgagcagt

SEQ ID NO: 2554287 - DNA, 25 bp, Homo sapien
gtacactgccatcggacttgaagac

SEQ ID NO: 2554288 - DNA, 25 bp, Homo sapien
cgttgagcagtacactgccatcgga

SEQ ID NO: 2554289 - DNA, 25 bp, Homo sapien
cagctcgttgagcagtacactgcca

SEQ ID NO: 2554290 - DNA, 25 bp, Homo sapien
gaagacgggcggaagacagagaagc

SEQ ID NO: 2554291 - DNA, 25 bp, Homo sapien
tgtcacaaagagttgcatgactggg

SEQ ID NO: 2554292 - DNA, 25 bp, Homo sapien
tggtccagtgtcacaaagagttgca

SEQ ID NO: 2554293 - DNA, 25 bp, Homo sapien
tgcagccggacgccaatggccatgc

SEQ ID NO: 2554294 - DNA, 25 bp, Homo sapien
ttccaggccgttgaagttcccgcag

SEQ ID NO: 2554295 - DNA, 25 bp, Homo sapien
agcccgctggccgtcttgaagtcgt

SEQ ID NO: 2554296 - DNA, 25 bp, Homo sapien
tcttgaagtcgtcaccttccaggcc

SEQ ID NO: 2554297 - DNA, 25 bp, Homo sapien
tcgtcaccttccaggccgttgaagt

SEQ ID NO: 2554298 - DNA, 25 bp, Homo sapien
gggagcagggatcgtccaaccagtc

SEQ ID NO: 2554299 - DNA, 25 bp, Homo sapien
agcagggatcgtccaaccagtccag

SEQ ID NO: 2554300 - DNA, 25 bp, Homo sapien
tcagggagcagggatcgtccaacca

SEQ ID NO: 2554301 - DNA, 25 bp, Homo sapien
gttcagggagcagggatcgtccaac

SEQ ID NO: 2554302 - DNA, 25 bp, Homo sapien
cagcatcctggacatgacggggcag

SEQ ID NO: 2554303 - DNA, 25 bp, Homo sapien
catgacggggcaggtagggaccagc

SEQ ID NO: 2554304 - DNA, 25 bp, Homo sapien
ccagcatcctggacatgacggggca

SEQ ID NO: 2554305 - DNA, 25 bp, Homo sapien
agggtccacagccgagtggcacctg

SEQ ID NO: 2554306 - DNA, 25 bp, Homo sapien
gagcaccagtgctcggcgtagttgg

SEQ ID NO: 2554307 - DNA, 25 bp, Homo sapien
cagccgagtggcacctgccaaaggg

SEQ ID NO: 2554308 - DNA, 25 bp, Homo sapien
ggagggagcaccagtgctcggcgta

SEQ ID NO: 2554309 - DNA, 25 bp, Homo sapien
gcgtaggaggacagggcggcgcaca

SEQ ID NO: 2554310 - DNA, 25 bp, Homo sapien
gcacaggcagtcctcattgttctga

SEQ ID NO: 2554311 - DNA, 25 bp, Homo sapien
agcatgacgcccttggcggtgcagg

SEQ ID NO: 2554312 - DNA, 25 bp, Homo sapien
cttggcggtgcaggcgcgcgcgtag

SEQ ID NO: 2554313 - DNA, 25 bp, Homo sapien
aggcgcaaagccctcgagacagtgg

SEQ ID NO: 2554314 - DNA, 25 bp, Homo sapien
gcccttctcgtccaggaaggtgtgg

SEQ ID NO: 2554315 - DNA, 25 bp, Homo sapien
gaccgcggtggtaacaggagcactt

SEQ ID NO: 2554316 - DNA, 25 bp, Homo sapien
ccgcctccaggtagagaccgcggtg

SEQ ID NO: 2554317 - DNA, 25 bp, Homo sapien
gccgatcagccggatctgcctacag

SEQ ID NO: 2554318 - DNA, 25 bp, Homo sapien
tctggccgatcagccggatctgcct

SEQ ID NO: 2554319 - DNA, 25 bp, Homo sapien
gccggatctgcctacagtgcagccg

SEQ ID NO: 2554320 - DNA, 25 bp, Homo sapien
gatcagccggatctgcctacagtgc

SEQ ID NO: 2554321 - DNA, 25 bp, Homo sapien
gggcttcgaggtggccagtgcagtc

SEQ ID NO: 2554322 - DNA, 25 bp, Homo sapien
gctgcagtccatgtggatctttggg

SEQ ID NO: 2554323 - DNA, 25 bp, Homo sapien
ggctcggggcttcgaggtggccagt

SEQ ID NO: 2554324 - DNA, 25 bp, Homo sapien
gcagtcaggttgctgcagtccatgt

SEQ ID NO: 2554325 - DNA, 25 bp, Homo sapien
cagccactgacacactctgtgtggt

SEQ ID NO: 2554326 - DNA, 25 bp, Homo sapien
tcttggcgccggaagaatacaggtc

SEQ ID NO: 2554327 - DNA, 25 bp, Homo sapien
tacaggtcgttgttatggacgcaag

SEQ ID NO: 2554328 - DNA, 25 bp, Homo sapien
caggtattgcagtccaccttgatct

SEQ ID NO: 2554329 - DNA, 25 bp, Homo sapien
tgtagtggccactcccgtaaatgga

SEQ ID NO: 2554330 - DNA, 25 bp, Homo sapien
ctgaacagccacgtaggagcagtgt

SEQ ID NO: 2554331 - DNA, 25 bp, Homo sapien
gcagtgtccgtcaaagtcgtagtac

SEQ ID NO: 2554332 - DNA, 25 bp, Homo sapien
gtcgtagtacttcccatcaaaggtg

SEQ ID NO: 2554333 - DNA, 25 bp, Homo sapien
tgccacaggggacgttctcggtgat

SEQ ID NO: 2554334 - DNA, 25 bp, Homo sapien
caggtgacgcccgtagtgccacagg

SEQ ID NO: 2554335 - DNA, 25 bp, Homo sapien
cccgtagtgccacaggggacgttct

SEQ ID NO: 2554336 - DNA, 25 bp, Homo sapien
gccttggagcaggtgacgcccgtag

SEQ ID NO: 2554337 - DNA, 25 bp, Homo sapien
tgtcccagatgacgatgatgcccgt

SEQ ID NO: 2554338 - DNA, 25 bp, Homo sapien
tggtgaccctcatcacgctggatca

SEQ ID NO: 2554339 - DNA, 25 bp, Homo sapien
cgctggatcaccacacggtgcttgt

SEQ ID NO: 2554340 - DNA, 25 bp, Homo sapien
cagcttgatgaacacggtggtcctc

SEQ ID NO: 2554341 - DNA, 25 bp, Homo sapien
gttggagcggtggtcaaagttccca

SEQ ID NO: 2554342 - DNA, 25 bp, Homo sapien
cgcgtggtgaagtcgttgttggagc

SEQ ID NO: 2554343 - DNA, 25 bp, Homo sapien
accaccatgtggtcccgcgtggtga

SEQ ID NO: 2554344 - DNA, 25 bp, Homo sapien
aggatgctgcactgcttctcggccc

SEQ ID NO: 2554345 - DNA, 25 bp, Homo sapien
tctttggtacactcctgggcgtagg

SEQ ID NO: 2554346 - DNA, 25 bp, Homo sapien
cacaggcctcgtagaagggcttggg

SEQ ID NO: 2554347 - DNA, 25 bp, Homo sapien
acccgtgtcacaggagcacgagtcg

SEQ ID NO: 2554348 - DNA, 25 bp, Homo sapien
agcacgagtcgtgcacacaggcctc

SEQ ID NO: 2554349 - DNA, 25 bp, Homo sapien
ccccgtcccggccctgagtgcagtt

SEQ ID NO: 2554350 - DNA, 25 bp, Homo sapien
tcccggccctgagtgcagttcgggc

SEQ ID NO: 2554351 - DNA, 25 bp, Homo sapien
cgtcccggccctgagtgcagttcgg

SEQ ID NO: 2554352 - DNA, 25 bp, Homo sapien
cccggccctgagtgcagttcgggca

SEQ ID NO: 2554353 - DNA, 25 bp, Homo sapien
aaggagtgtcaccccggcccgcaat

SEQ ID NO: 2554354 - DNA, 25 bp, Homo sapien
tggatggacaaggagtgtcaccccg

SEQ ID NO: 2554355 - DNA, 25 bp, Homo sapien
tggacaaggagtgtcaccccggccc

SEQ ID NO: 2554356 - DNA, 25 bp, Homo sapien
aggagtgtcaccccggcccgcaata

SEQ ID NO: 2554357 - DNA, 25 bp, Homo sapien
cctccaggtaggacacggagatgtt

SEQ ID NO: 2554358 - DNA, 25 bp, Homo sapien
ccgttgatggtcctgcaggtctcga

SEQ ID NO: 2554359 - DNA, 25 bp, Homo sapien
cactcacactcatgcggagggttgt

SEQ ID NO: 2554360 - DNA, 25 bp, Homo sapien
agctccggttcccacatggctcata

SEQ ID NO: 2554361 - DNA, 25 bp, Homo sapien
tcctcggtgggaaccgatgctccag

SEQ ID NO: 2554362 - DNA, 25 bp, Homo sapien
cagtgacacacttcttcagatcctc

SEQ ID NO: 2554363 - DNA, 25 bp, Homo sapien
gggtgtcctcgacatagcagccaca

SEQ ID NO: 2554364 - DNA, 25 bp, Homo sapien
gatcctcctcatagatgggcctgtc

SEQ ID NO: 2554365 - DNA, 25 bp, Homo sapien
gtggctagtaccgagcccaaagccc

SEQ ID NO: 2554366 - DNA, 25 bp, Homo sapien
aagcaagcacatggctacaagtccc

SEQ ID NO: 2554367 - DNA, 25 bp, Homo sapien
catgtggctagtaccgagcccaaag

SEQ ID NO: 2554368 - DNA, 25 bp, Homo sapien
agcttccccatgtggctagtaccga

SEQ ID NO: 2554369 - DNA, 25 bp, Homo sapien
cgacttgggaggagttggtacacac

SEQ ID NO: 2554370 - DNA, 25 bp, Homo sapien
ctccggcctgcagacgacttgggag

SEQ ID NO: 2554371 - DNA, 25 bp, Homo sapien
ttcctccggcctgcagacgacttgg

SEQ ID NO: 2554372 - DNA, 25 bp, Homo sapien
acgacttgggaggagttggtacaca

SEQ ID NO: 2554373 - DNA, 25 bp, Homo sapien
atctcccagtagcagaaggcgccat

SEQ ID NO: 2554374 - DNA, 25 bp, Homo sapien
tcccgttggggccacagatctccca

SEQ ID NO: 2554375 - DNA, 25 bp, Homo sapien
tggggccacagatctcccagtagca

SEQ ID NO: 2554376 - DNA, 25 bp, Homo sapien
gttggggccacagatctcccagtag

SEQ ID NO: 2554377 - DNA, 25 bp, Homo sapien
cgtaatggaacagatgttgaagtgc

SEQ ID NO: 2554378 - DNA, 25 bp, Homo sapien
ggcgtgtcgtaatggaacagatgtt

SEQ ID NO: 2554379 - DNA, 25 bp, Homo sapien
cgtgtcgtaatggaacagatgttga

SEQ ID NO: 2554380 - DNA, 25 bp, Homo sapien
tggaacagatgttgaagtgcttctc

SEQ ID NO: 2554381 - DNA, 25 bp, Homo sapien
ggtggtgaaggtggtcagggtggac

SEQ ID NO: 2554382 - DNA, 25 bp, Homo sapien
tggtggtgaaggtggtcagggtgga

SEQ ID NO: 2554383 - DNA, 25 bp, Homo sapien
ggtggggagggtgatggtggtgaag

SEQ ID NO: 2554384 - DNA, 25 bp, Homo sapien
tgatggtggtgaaggtggtcagggt

SEQ ID NO: 2554385 - DNA, 25 bp, Homo sapien
tggtggtggtagtggtgaaggtggt

SEQ ID NO: 2554386 - DNA, 25 bp, Homo sapien
ctgtgctggaggtcggggtggtggt

SEQ ID NO: 2554387 - DNA, 25 bp, Homo sapien
tggtggtagtggtgaaggtggtggg

SEQ ID NO: 2554388 - DNA, 25 bp, Homo sapien
ggtggtggtggtagtggtgaaggtg

SEQ ID NO: 2554389 - DNA, 25 bp, Homo sapien
tcatgaatatcatcaccgtcactta

SEQ ID NO: 2554390 - DNA, 25 bp, Homo sapien
gtcatcatgaatatcatcaccgtca

SEQ ID NO: 2554391 - DNA, 25 bp, Homo sapien
catcatgaatatcatcaccgtcact

SEQ ID NO: 2554392 - DNA, 25 bp, Homo sapien
catgaatatcatcaccgtcacttac

SEQ ID NO: 2554393 - DNA, 25 bp, Homo sapien
attcagaggacccagggacctccat

SEQ ID NO: 2554394 - DNA, 25 bp, Homo sapien
ggaagccaccaggattcagaggacc

SEQ ID NO: 2554395 - DNA, 25 bp, Homo sapien
ctccatgaccatcccccagctgcaa

SEQ ID NO: 2554396 - DNA, 25 bp, Homo sapien
accaggattcagaggacccagggac

SEQ ID NO: 2554397 - DNA, 25 bp, Homo sapien
ggaagcaaaaccaagttcttgtctc

SEQ ID NO: 2554398 - DNA, 25 bp, Homo sapien
gaagcaaaaccaagttcttgtctct

SEQ ID NO: 2554399 - DNA, 25 bp, Homo sapien
ctagggaagcaaaaccaagttcttg

SEQ ID NO: 2554400 - DNA, 25 bp, Homo sapien
gcaaaaccaagttcttgtctctcac

SEQ ID NO: 2554401 - DNA, 25 bp, Homo sapien
tgtttctcggtcaccgtcgtcgctg

SEQ ID NO: 2554402 - DNA, 25 bp, Homo sapien
cccatcaaatgtttctcggtcaccg

SEQ ID NO: 2554403 - DNA, 25 bp, Homo sapien
ctcattgatccagtcagaccagagg

SEQ ID NO: 2554404 - DNA, 25 bp, Homo sapien
tgatccagtcagaccagaggcagca

SEQ ID NO: 2554405 - DNA, 25 bp, Homo sapien
gctgaggtggggatccttgaccgac

SEQ ID NO: 2554406 - DNA, 25 bp, Homo sapien
cttctggcctagctgctccaagctg

SEQ ID NO: 2554407 - DNA, 25 bp, Homo sapien
ttctggcctagctgctccaagctga

SEQ ID NO: 2554408 - DNA, 25 bp, Homo sapien
tccaagctgaggtggggatccttga

SEQ ID NO: 2554409 - DNA, 25 bp, Homo sapien
ttcttgcaaatgaacccaacagaga

SEQ ID NO: 2554410 - DNA, 25 bp, Homo sapien
tgggccagcaacaattgacacgtat

SEQ ID NO: 2554411 - DNA, 25 bp, Homo sapien
taacacagtccaaatggtccatttc

SEQ ID NO: 2554412 - DNA, 25 bp, Homo sapien
cacgtatcttgtagtcgtaacacag

SEQ ID NO: 2554413 - DNA, 25 bp, Homo sapien
gtgatgggtgtcacggttgtactct

SEQ ID NO: 2554414 - DNA, 25 bp, Homo sapien
tgatgggcgtagtcgttggagggct

SEQ ID NO: 2554415 - DNA, 25 bp, Homo sapien
tggtggtgatgagtaccgtggttgg

SEQ ID NO: 2554416 - DNA, 25 bp, Homo sapien
ttgtactctttgtgctggtgggtgt

SEQ ID NO: 2554417 - DNA, 25 bp, Homo sapien
ggcggaggattggatgtggtcaact

SEQ ID NO: 2554418 - DNA, 25 bp, Homo sapien
ctcagcaatgggtgctgtgcttgtg

SEQ ID NO: 2554419 - DNA, 25 bp, Homo sapien
gtcaactcagcaatgggtgctgtgc

SEQ ID NO: 2554420 - DNA, 25 bp, Homo sapien
ggttgaggactcaggcggaggattg

SEQ ID NO: 2554421 - DNA, 25 bp, Homo sapien
ctcagaagggtggttgactccgtga

SEQ ID NO: 2554422 - DNA, 25 bp, Homo sapien
cagtgtgtggcctccgctcgtggtc

SEQ ID NO: 2554423 - DNA, 25 bp, Homo sapien
tggagacagtgtgtggcctccgctc

SEQ ID NO: 2554424 - DNA, 25 bp, Homo sapien
gtggtcgtgggtgccgtgggtgtgg

SEQ ID NO: 2554425 - DNA, 25 bp, Homo sapien
ggcacgccgtccaccaggaaaaggc

SEQ ID NO: 2554426 - DNA, 25 bp, Homo sapien
agcaagaggcgtccagaaggcactg

SEQ ID NO: 2554427 - DNA, 25 bp, Homo sapien
actggctgtggcacgccgtccacca

SEQ ID NO: 2554428 - DNA, 25 bp, Homo sapien
ccagcaagaggcgtccagaaggcac

SEQ ID NO: 2554429 - DNA, 25 bp, Homo sapien
tgcgtagtaggtgtcgttcaggaca

SEQ ID NO: 2554430 - DNA, 25 bp, Homo sapien
ctggtgcgtagtaggtgtcgttcag

SEQ ID NO: 2554431 - DNA, 25 bp, Homo sapien
atgacccggtcgtggtaccgcgagt

SEQ ID NO: 2554432 - DNA, 25 bp, Homo sapien
gggctgaagatgacccggtcgtggt

SEQ ID NO: 2554433 - DNA, 25 bp, Homo sapien
tgtctccgtatgtgccgttgtacac

SEQ ID NO: 2554434 - DNA, 25 bp, Homo sapien
cagctcagtgagcagttgacgaaat

SEQ ID NO: 2554435 - DNA, 25 bp, Homo sapien
gttgacgaaataacaggtgtctccg

SEQ ID NO: 2554436 - DNA, 25 bp, Homo sapien
tagaactccaacgtacagctcagtg

SEQ ID NO: 2554437 - DNA, 25 bp, Homo sapien
gggttggaggccgttggagcaggtg

SEQ ID NO: 2554438 - DNA, 25 bp, Homo sapien
tcctcgacgcgcacgggttggaggc

SEQ ID NO: 2554439 - DNA, 25 bp, Homo sapien
tccaccgtgttgttgtacttgcacg

SEQ ID NO: 2554440 - DNA, 25 bp, Homo sapien
cttgcacgtggccatgaagcagtcg

SEQ ID NO: 2554441 - DNA, 25 bp, Homo sapien
gcacgtaggtgcagttgccctggta

SEQ ID NO: 2554442 - DNA, 25 bp, Homo sapien
catatgcacggtcttgatcagcacc

SEQ ID NO: 2554443 - DNA, 25 bp, Homo sapien
tagctgtagtagagtccgtcgaagg

SEQ ID NO: 2554444 - DNA, 25 bp, Homo sapien
gacaccttgtcgttgggatcgcagt

SEQ ID NO: 2554445 - DNA, 25 bp, Homo sapien
ccaccacgtagttgatgccagactg

SEQ ID NO: 2554446 - DNA, 25 bp, Homo sapien
attgtaggagacgaggacacccagc

SEQ ID NO: 2554447 - DNA, 25 bp, Homo sapien
tgccaaaccggtggtagggcagcct

SEQ ID NO: 2554448 - DNA, 25 bp, Homo sapien
gtacttcttgtagggcagtgccacc

SEQ ID NO: 2554449 - DNA, 25 bp, Homo sapien
ttggaggggtcgttcaccagccact

SEQ ID NO: 2554450 - DNA, 25 bp, Homo sapien
cgctgggcagaatgcagtcgtcgga

SEQ ID NO: 2554451 - DNA, 25 bp, Homo sapien
ttggagacgatctccccgctgggca

SEQ ID NO: 2554452 - DNA, 25 bp, Homo sapien
ccgggcgcttggtcgtggagctgct

SEQ ID NO: 2554453 - DNA, 25 bp, Homo sapien
gcatgaagcagctgtcgaacacgca

SEQ ID NO: 2554454 - DNA, 25 bp, Homo sapien
tccgccagtcgaggcagatgttctg

SEQ ID NO: 2554455 - DNA, 25 bp, Homo sapien
aggcctgcagactggcgcactccag

SEQ ID NO: 2554456 - DNA, 25 bp, Homo sapien
aggccccatgcgtgtggttccgcca

SEQ ID NO: 2554457 - DNA, 25 bp, Homo sapien
ctggatttgcacgtgggctcttctg

SEQ ID NO: 2554458 - DNA, 25 bp, Homo sapien
ggatttgcacgtgggctcttctgca

SEQ ID NO: 2554459 - DNA, 25 bp, Homo sapien
tggatttgcacgtgggctcttctgc

SEQ ID NO: 2554460 - DNA, 25 bp, Homo sapien
gatttgcacgtgggctcttctgcag

SEQ ID NO: 2554461 - DNA, 25 bp, Homo sapien
cttcacgcagacatcaaagccagga

SEQ ID NO: 2554462 - DNA, 25 bp, Homo sapien
gacagaagcagccttccaccaggac

SEQ ID NO: 2554463 - DNA, 25 bp, Homo sapien
agccaggagcgtagttcatggtgcc

SEQ ID NO: 2554464 - DNA, 25 bp, Homo sapien
acagaagcagccttccaccaggact

SEQ ID NO: 2554465 - DNA, 25 bp, Homo sapien
tctctgggcacattgtcaggtccca

SEQ ID NO: 2554466 - DNA, 25 bp, Homo sapien
ctctgggcacattgtcaggtcccac

SEQ ID NO: 2554467 - DNA, 25 bp, Homo sapien
ctctctgggcacattgtcaggtccc

SEQ ID NO: 2554468 - DNA, 25 bp, Homo sapien
ttcagaatttgtggaaggatccccc

SEQ ID NO: 2554469 - DNA, 25 bp, Homo sapien
tcagaatttgtggaaggatccccca

SEQ ID NO: 2554470 - DNA, 25 bp, Homo sapien
attcagaatttgtggaaggatcccc

SEQ ID NO: 2554471 - DNA, 25 bp, Homo sapien
tcctcaatctttgaggctccaggtt

SEQ ID NO: 2554472 - DNA, 25 bp, Homo sapien
attcctcaatctttgaggctccagg

SEQ ID NO: 2554473 - DNA, 25 bp, Homo sapien
ctcattcctcaatctttgaggctcc

SEQ ID NO: 2554474 - DNA, 25 bp, Homo sapien
tccaggttttcatgtccatccctca

SEQ ID NO: 2554475 - DNA, 25 bp, Homo sapien
agtcgaactcgaagtgctccccaaa

SEQ ID NO: 2554476 - DNA, 25 bp, Homo sapien
tccacgcagtgggtaacgggcttct

SEQ ID NO: 2554477 - DNA, 25 bp, Homo sapien
ggctgcacctcttgggttggcagat

SEQ ID NO: 2554478 - DNA, 25 bp, Homo sapien
tggcgaggtaggtgccgtcttccac

SEQ ID NO: 2554479 - DNA, 25 bp, Homo sapien
tcttcacttcgaatcccagcgggca

SEQ ID NO: 2554480 - DNA, 25 bp, Homo sapien
gctcttcacttcgaatcccagcggg

SEQ ID NO: 2554481 - DNA, 25 bp, Homo sapien
ttcacttcgaatcccagcgggcaca

SEQ ID NO: 2554482 - DNA, 25 bp, Homo sapien
cttgctcttcacttcgaatcccagc

SEQ ID NO: 2554483 - DNA, 25 bp, Homo sapien
gagaaggccgttcgttggagactgc

SEQ ID NO: 2554484 - DNA, 25 bp, Homo sapien
aggccgttcgttggagactgccccg

SEQ ID NO: 2554485 - DNA, 25 bp, Homo sapien
gaaggccgttcgttggagactgccc

SEQ ID NO: 2554486 - DNA, 25 bp, Homo sapien
cggagaaggccgttcgttggagact

SEQ ID NO: 2554487 - DNA, 25 bp, Homo sapien
cattcccgtgaacacacaccccctt

SEQ ID NO: 2554488 - DNA, 25 bp, Homo sapien
attcccgtgaacacacacccccttg

SEQ ID NO: 2554489 - DNA, 25 bp, Homo sapien
gtactcagcattcccgtgaacacac

SEQ ID NO: 2554490 - DNA, 25 bp, Homo sapien
ctggtactcagcattcccgtgaaca

SEQ ID NO: 2554491 - DNA, 25 bp, Homo sapien
caggcgatgacgttgagcagggtgt

SEQ ID NO: 2554492 - DNA, 25 bp, Homo sapien
gcaggaggtgttgcagggcacgtgg

SEQ ID NO: 2554493 - DNA, 25 bp, Homo sapien
gcacacgcagtcctggcacttggag

SEQ ID NO: 2554494 - DNA, 25 bp, Homo sapien
ttgtccaccttgtccgtgcacacgc

SEQ ID NO: 2554495 - DNA, 25 bp, Homo sapien
cttcaggatgacgtgctggttgtcg

SEQ ID NO: 2554496 - DNA, 25 bp, Homo sapien
gcgtctgttcacacttcttacagca

SEQ ID NO: 2554497 - DNA, 25 bp, Homo sapien
gttgtcgggccgtttgatgatacag

SEQ ID NO: 2554498 - DNA, 25 bp, Homo sapien
cccgggggcctccatgagttcgaag

SEQ ID NO: 2554499 - DNA, 25 bp, Homo sapien
tcttcgggtcgctcttgaagtcccc

SEQ ID NO: 2554500 - DNA, 25 bp, Homo sapien
caggtgatgttggagacggacgaga

SEQ ID NO: 2554501 - DNA, 25 bp, Homo sapien
cgagatgagctggttgtggatcttc

SEQ ID NO: 2554502 - DNA, 25 bp, Homo sapien
tcacgcagctgaagaatgtgcagtt

SEQ ID NO: 2554503 - DNA, 25 bp, Homo sapien
gcagcatccattgggcatgaatgtg

SEQ ID NO: 2554504 - DNA, 25 bp, Homo sapien
ccattgggcatgaatgtgatggagc

SEQ ID NO: 2554505 - DNA, 25 bp, Homo sapien
catccattgggcatgaatgtgatgg

SEQ ID NO: 2554506 - DNA, 25 bp, Homo sapien
gtcttgcagcatccattgggcatga

SEQ ID NO: 2554507 - DNA, 25 bp, Homo sapien
cccccaggctgtgccctgtactcac

SEQ ID NO: 2554508 - DNA, 25 bp, Homo sapien
gggagagcgggcagcggcttagggc

SEQ ID NO: 2554509 - DNA, 25 bp, Homo sapien
cagggcctccacatcttcgaggagg

SEQ ID NO: 2554510 - DNA, 25 bp, Homo sapien
gagagcgggcagcggcttagggcag

SEQ ID NO: 2554511 - DNA, 25 bp, Homo sapien
ggagagcgggcagcggcttagggca

SEQ ID NO: 2554512 - DNA, 25 bp, Homo sapien
cagccggcgtacgaaacctccgtgg

SEQ ID NO: 2554513 - DNA, 25 bp, Homo sapien
cagggcaccctggtctcattgcgag

SEQ ID NO: 2554514 - DNA, 25 bp, Homo sapien
ggacggtcttggtgcagccggcgta

SEQ ID NO: 2554515 - DNA, 25 bp, Homo sapien
gcaggacccggagcaatgattcatg

SEQ ID NO: 2554516 - DNA, 25 bp, Homo sapien
ggcacactcccagcctgggactcac

SEQ ID NO: 2554517 - DNA, 25 bp, Homo sapien
aggcacactcccagcctgggactca

SEQ ID NO: 2554518 - DNA, 25 bp, Homo sapien
caggcacactcccagcctgggactc

SEQ ID NO: 2554519 - DNA, 25 bp, Homo sapien
cgcagacggtgtcctggcactggca

SEQ ID NO: 2554520 - DNA, 25 bp, Homo sapien
taggtgtgtgtcagcgagccgccat

SEQ ID NO: 2554521 - DNA, 25 bp, Homo sapien
actggcagctctcgatgtgggtgta

SEQ ID NO: 2554522 - DNA, 25 bp, Homo sapien
tcaggaccacctcacgctggctggt

SEQ ID NO: 2554523 - DNA, 25 bp, Homo sapien
gcaaggactgaacaaagactcagac

SEQ ID NO: 2554524 - DNA, 25 bp, Homo sapien
gaggtaaagctgtcgagggcagtga

SEQ ID NO: 2554525 - DNA, 25 bp, Homo sapien
catgtccccctgagtttattattgg

SEQ ID NO: 2554526 - DNA, 25 bp, Homo sapien
tgaacaaagactcagacaataaata

SEQ ID NO: 2554527 - DNA, 25 bp, Homo sapien
gacggggccaccaggtcctggccac

SEQ ID NO: 2554528 - DNA, 25 bp, Homo sapien
ctgacggggccaccaggtcctggcc

SEQ ID NO: 2554529 - DNA, 25 bp, Homo sapien
accaggtcctggccaccttttgtca

SEQ ID NO: 2554530 - DNA, 25 bp, Homo sapien
gccaccaggtcctggccaccttttg

SEQ ID NO: 2554531 - DNA, 25 bp, Homo sapien
ctctgactggcagctccccaaagcc

SEQ ID NO: 2554532 - DNA, 25 bp, Homo sapien
aggggctcagctctccaacatgagt

SEQ ID NO: 2554533 - DNA, 25 bp, Homo sapien
ccccttgtccagctgggtccgcaga

SEQ ID NO: 2554534 - DNA, 25 bp, Homo sapien
accagaacttctgcaggtttgaagg

SEQ ID NO: 2554535 - DNA, 25 bp, Homo sapien
ggaagcccctcttcgcagctgcaag

SEQ ID NO: 2554536 - DNA, 25 bp, Homo sapien
agcttcccgggtagcctctgcttta

SEQ ID NO: 2554537 - DNA, 25 bp, Homo sapien
caggcaggggcctagccgtacccgt

SEQ ID NO: 2554538 - DNA, 25 bp, Homo sapien
gtagcctctgctttaaagggcacag

SEQ ID NO: 2554539 - DNA, 25 bp, Homo sapien
tgggcactggttcatgggcagcccc

SEQ ID NO: 2554540 - DNA, 25 bp, Homo sapien
ctgcacagcgaggtgaggccaagca

SEQ ID NO: 2554541 - DNA, 25 bp, Homo sapien
ccaggtatccgggcaccgcaaaggg

SEQ ID NO: 2554542 - DNA, 25 bp, Homo sapien
aggccactagtgctgccggccgttg

SEQ ID NO: 2554543 - DNA, 25 bp, Homo sapien
ggttaggaccacgacttcccaagca

SEQ ID NO: 2554544 - DNA, 25 bp, Homo sapien
tccagctcagtagtccgcaggctga

SEQ ID NO: 2554545 - DNA, 25 bp, Homo sapien
caccagggcatctggagacgttgcg

SEQ ID NO: 2554546 - DNA, 25 bp, Homo sapien
tgtgcatgggcctcgcacaggccct

SEQ ID NO: 2554547 - DNA, 25 bp, Homo sapien
cccatgagggcttcctccgtcgagt

SEQ ID NO: 2554548 - DNA, 25 bp, Homo sapien
tgagggcttcctccgtcgagtcaga

SEQ ID NO: 2554549 - DNA, 25 bp, Homo sapien
gcttcctccgtcgagtcagatggct

SEQ ID NO: 2554550 - DNA, 25 bp, Homo sapien
gggcttcctccgtcgagtcagatgg

SEQ ID NO: 2554551 - DNA, 25 bp, Homo sapien
cacaggacaatgtcggctcgtgaaa

SEQ ID NO: 2554552 - DNA, 25 bp, Homo sapien
cacacaggacaatgtcggctcgtga

SEQ ID NO: 2554553 - DNA, 25 bp, Homo sapien
acaggacaatgtcggctcgtgaaag

SEQ ID NO: 2554554 - DNA, 25 bp, Homo sapien
gcacacaggacaatgtcggctcgtg

SEQ ID NO: 2554555 - DNA, 25 bp, Homo sapien
aaaagcttgagctctgccccccaaa

SEQ ID NO: 2554556 - DNA, 25 bp, Homo sapien
tcagtatttcagctgacgggtggct

SEQ ID NO: 2554557 - DNA, 25 bp, Homo sapien
catggctgttccgtggggacagtga

SEQ ID NO: 2554558 - DNA, 25 bp, Homo sapien
tcgtggcatggctgttccgtgggga

SEQ ID NO: 2554559 - DNA, 25 bp, Homo sapien
aataacgtctctcgttggctccaga

SEQ ID NO: 2554560 - DNA, 25 bp, Homo sapien
tggctccagagctcacaggttcact

SEQ ID NO: 2554561 - DNA, 25 bp, Homo sapien
gccccagggcagtgcgttggccaat

SEQ ID NO: 2554562 - DNA, 25 bp, Homo sapien
tgaatgtcaggaacccgggtgtgtc

SEQ ID NO: 2554563 - DNA, 25 bp, Homo sapien
tgagagccccgctgacccctgccca

SEQ ID NO: 2554564 - DNA, 25 bp, Homo sapien
ggctggacagtggggtgcgtgtggg

SEQ ID NO: 2554565 - DNA, 25 bp, Homo sapien
tgcccacatatctggggcagtctgc

SEQ ID NO: 2554566 - DNA, 25 bp, Homo sapien
cccccagcctcagacggcctgtgtg

SEQ ID NO: 2554567 - DNA, 25 bp, Homo sapien
aagccacccgagtgttggctgccga

SEQ ID NO: 2554568 - DNA, 25 bp, Homo sapien
tgaccaaccataggcctgcgtggtg

SEQ ID NO: 2554569 - DNA, 25 bp, Homo sapien
aggagaaggccacctccgtgaccaa

SEQ ID NO: 2554570 - DNA, 25 bp, Homo sapien
aggccacagcgagcctgcgtgcaac

SEQ ID NO: 2554571 - DNA, 25 bp, Homo sapien
gggtggtgctctcggccagacagca

SEQ ID NO: 2554572 - DNA, 25 bp, Homo sapien
cgggtggtgctctcggccagacagc

SEQ ID NO: 2554573 - DNA, 25 bp, Homo sapien
ccgggtggtgctctcggccagacag

SEQ ID NO: 2554574 - DNA, 25 bp, Homo sapien
ggtggtgctctcggccagacagcag

SEQ ID NO: 2554575 - DNA, 25 bp, Homo sapien
tcaggtttcgatggcctttccctgc

SEQ ID NO: 2554576 - DNA, 25 bp, Homo sapien
aggacagctgcaccagtagatggcc

SEQ ID NO: 2554577 - DNA, 25 bp, Homo sapien
cttcccctgtgttgggtctcaggtt

SEQ ID NO: 2554578 - DNA, 25 bp, Homo sapien
acagctgcaccagtagatggcctcc

SEQ ID NO: 2554579 - DNA, 25 bp, Homo sapien
ggcatgcaccatgctaatccgctta

SEQ ID NO: 2554580 - DNA, 25 bp, Homo sapien
gataaagccagttgtgcaccctggg

SEQ ID NO: 2554581 - DNA, 25 bp, Homo sapien
ccgcttatctgctgggttggtctca

SEQ ID NO: 2554582 - DNA, 25 bp, Homo sapien
ctgagacaacatccgggccctgata

SEQ ID NO: 2554583 - DNA, 25 bp, Homo sapien
tgagtttcctccacccgatttcctg

SEQ ID NO: 2554584 - DNA, 25 bp, Homo sapien
tcctgcacggttgtcaggtgcccag

SEQ ID NO: 2554585 - DNA, 25 bp, Homo sapien
tcctggcatattttatgtcacggtc

SEQ ID NO: 2554586 - DNA, 25 bp, Homo sapien
acgtctgagtttcctccacccgatt

SEQ ID NO: 2554587 - DNA, 25 bp, Homo sapien
aggtgtcgggcagaaagccaggcca

SEQ ID NO: 2554588 - DNA, 25 bp, Homo sapien
ctggcaggtgtcgggcagaaagcca

SEQ ID NO: 2554589 - DNA, 25 bp, Homo sapien
aggccagctgtggcggatgcaggtg

SEQ ID NO: 2554590 - DNA, 25 bp, Homo sapien
caggccagctgtggcggatgcaggt

SEQ ID NO: 2554591 - DNA, 25 bp, Homo sapien
gtggggtgaggaccgacaccaggac

SEQ ID NO: 2554592 - DNA, 25 bp, Homo sapien
gtgaggaccgacaccaggacttgct

SEQ ID NO: 2554593 - DNA, 25 bp, Homo sapien
gggtgaggaccgacaccaggacttg

SEQ ID NO: 2554594 - DNA, 25 bp, Homo sapien
ggtggggtgaggaccgacaccagga

SEQ ID NO: 2554595 - DNA, 25 bp, Homo sapien
ggcaggcgtcagtgaggacatgaag

SEQ ID NO: 2554596 - DNA, 25 bp, Homo sapien
gtgcagggcaggcgtcagtgaggac

SEQ ID NO: 2554597 - DNA, 25 bp, Homo sapien
caggcgtcagtgaggacatgaaggc

SEQ ID NO: 2554598 - DNA, 25 bp, Homo sapien
cggtgcagggcaggcgtcagtgagg

SEQ ID NO: 2554599 - DNA, 25 bp, Homo sapien
tgagattgtatcttgatgggctgat

SEQ ID NO: 2554600 - DNA, 25 bp, Homo sapien
cattccagaccttctgaatgtacaa

SEQ ID NO: 2554601 - DNA, 25 bp, Homo sapien
agaccttctgaatgtacaactttgc

SEQ ID NO: 2554602 - DNA, 25 bp, Homo sapien
ttggttttgtctgccgcttttgtgg

SEQ ID NO: 2554603 - DNA, 25 bp, Homo sapien
ggaaaccccaatagcccattcagct

SEQ ID NO: 2554604 - DNA, 25 bp, Homo sapien
aacgcacaaacccattgaactgcag

SEQ ID NO: 2554605 - DNA, 25 bp, Homo sapien
aaggaaaccccaatagcccattcag

SEQ ID NO: 2554606 - DNA, 25 bp, Homo sapien
ggcaggaccgtgtgatcacaacgca

SEQ ID NO: 2554607 - DNA, 25 bp, Homo sapien
ctcagagcccccacagtgcgcccca

SEQ ID NO: 2554608 - DNA, 25 bp, Homo sapien
gagcccccacagtgcgccccaggtg

SEQ ID NO: 2554609 - DNA, 25 bp, Homo sapien
ccccacagtgcgccccaggtgcctg

SEQ ID NO: 2554610 - DNA, 25 bp, Homo sapien
ccacagtgcgccccaggtgcctgtc

SEQ ID NO: 2554611 - DNA, 25 bp, Homo sapien
gaggatgacggttgagctgtaaacc

SEQ ID NO: 2554612 - DNA, 25 bp, Homo sapien
tgaactcggcgacctggagggtcca

SEQ ID NO: 2554613 - DNA, 25 bp, Homo sapien
tggagggtccaaatgcacctggtgt

SEQ ID NO: 2554614 - DNA, 25 bp, Homo sapien
tccagtagcatggactttgcagcag

SEQ ID NO: 2554615 - DNA, 25 bp, Homo sapien
gctgatgggccgagggtcccatcgt

SEQ ID NO: 2554616 - DNA, 25 bp, Homo sapien
ggtcccatcgtgtgaccaagcggga

SEQ ID NO: 2554617 - DNA, 25 bp, Homo sapien
ggccgagggtcccatcgtgtgacca

SEQ ID NO: 2554618 - DNA, 25 bp, Homo sapien
gagggtcccatcgtgtgaccaagcg

SEQ ID NO: 2554619 - DNA, 25 bp, Homo sapien
gtccgaggtggacgtcaaggccaca

SEQ ID NO: 2554620 - DNA, 25 bp, Homo sapien
cacagctattgagacatcccggatg

SEQ ID NO: 2554621 - DNA, 25 bp, Homo sapien
agacatcccggatgcggccctggga

SEQ ID NO: 2554622 - DNA, 25 bp, Homo sapien
cctgtttgctcagcgtgtttgaaga

SEQ ID NO: 2554623 - DNA, 25 bp, Homo sapien
ttccaaagctgaaggttccgaggtc

SEQ ID NO: 2554624 - DNA, 25 bp, Homo sapien
acgtcacttccaaagctgaaggttc

SEQ ID NO: 2554625 - DNA, 25 bp, Homo sapien
cacttccaaagctgaaggttccgag

SEQ ID NO: 2554626 - DNA, 25 bp, Homo sapien
aagctgaaggttccgaggtctctgg

SEQ ID NO: 2554627 - DNA, 25 bp, Homo sapien
gtcgggtggtgtggcctcgtccggc

SEQ ID NO: 2554628 - DNA, 25 bp, Homo sapien
tccgtggcgcagacgccaggcagga

SEQ ID NO: 2554629 - DNA, 25 bp, Homo sapien
gtcaccagcgtcctgaatgctccgt

SEQ ID NO: 2554630 - DNA, 25 bp, Homo sapien
gaagcaccaggtcgggtggtgtggc

SEQ ID NO: 2554631 - DNA, 25 bp, Homo sapien
gagccaacaccagcgtccggcacgc

SEQ ID NO: 2554632 - DNA, 25 bp, Homo sapien
cagagccaacaccagcgtccggcac

SEQ ID NO: 2554633 - DNA, 25 bp, Homo sapien
caacaccagcgtccggcacgcgctc

SEQ ID NO: 2554634 - DNA, 25 bp, Homo sapien
gccaacaccagcgtccggcacgcgc

SEQ ID NO: 2554635 - DNA, 25 bp, Homo sapien
cattctcccagctcggctccacagg

SEQ ID NO: 2554636 - DNA, 25 bp, Homo sapien
cgccatccatggtgtgccctgcatt

SEQ ID NO: 2554637 - DNA, 25 bp, Homo sapien
atggtgtgccctgcattctcccagc

SEQ ID NO: 2554638 - DNA, 25 bp, Homo sapien
tgcattctcccagctcggctccaca

SEQ ID NO: 2554639 - DNA, 25 bp, Homo sapien
agacagtgacgggtggaacaaagct

SEQ ID NO: 2554640 - DNA, 25 bp, Homo sapien
gggaagacagtgacgggtggaacaa

SEQ ID NO: 2554641 - DNA, 25 bp, Homo sapien
tcacgcgccgggtgggcgaggacgt

SEQ ID NO: 2554642 - DNA, 25 bp, Homo sapien
gtggaacaaagctcacgcgccgggt

SEQ ID NO: 2554643 - DNA, 25 bp, Homo sapien
agctgcacccctagatctgggcccc

SEQ ID NO: 2554644 - DNA, 25 bp, Homo sapien
ggcagctgcacccctagatctgggc

SEQ ID NO: 2554645 - DNA, 25 bp, Homo sapien
ggtggcagctgcacccctagatctg

SEQ ID NO: 2554646 - DNA, 25 bp, Homo sapien
gtggcagctgcacccctagatctgg

SEQ ID NO: 2554647 - DNA, 25 bp, Homo sapien
gaacacgtagttgcaaaggccaggg

SEQ ID NO: 2554648 - DNA, 25 bp, Homo sapien
cgcggcagtgctcagagaacacgta

SEQ ID NO: 2554649 - DNA, 25 bp, Homo sapien
gccttgatgacaacacgggtgacca

SEQ ID NO: 2554650 - DNA, 25 bp, Homo sapien
cctcggcgtagctggacgttgaagt

SEQ ID NO: 2554651 - DNA, 25 bp, Homo sapien
caggaggccagtgcggctgtaaggc

SEQ ID NO: 2554652 - DNA, 25 bp, Homo sapien
accttgatgtagtccccgctctgct

SEQ ID NO: 2554653 - DNA, 25 bp, Homo sapien
ggccagtgcggctgtaaggcagctc

SEQ ID NO: 2554654 - DNA, 25 bp, Homo sapien
tgaccttgatgtagtccccgctctg

SEQ ID NO: 2554655 - DNA, 25 bp, Homo sapien
catagaactcgttgaaggccgggag

SEQ ID NO: 2554656 - DNA, 25 bp, Homo sapien
acaggccacaggtctggttggcgta

SEQ ID NO: 2554657 - DNA, 25 bp, Homo sapien
tgtgggcatagaactcgttgaaggc

SEQ ID NO: 2554658 - DNA, 25 bp, Homo sapien
gttggcgtatttgggatccagctcc

SEQ ID NO: 2554659 - DNA, 25 bp, Homo sapien
cgtccgtgcagttgccggccggcaa

SEQ ID NO: 2554660 - DNA, 25 bp, Homo sapien
tcccaaactggagcggggtcagcct

SEQ ID NO: 2554661 - DNA, 25 bp, Homo sapien
tccaacttctgcaggttcccaaact

SEQ ID NO: 2554662 - DNA, 25 bp, Homo sapien
tcgtccgtgcagttgccggccggca

SEQ ID NO: 2554663 - DNA, 25 bp, Homo sapien
accagtgcgtggcactccgcaaagg

SEQ ID NO: 2554664 - DNA, 25 bp, Homo sapien
aggtacgcagtgctgtccaccagtg

SEQ ID NO: 2554665 - DNA, 25 bp, Homo sapien
gcgcactggcgtgagtattccacaa

SEQ ID NO: 2554666 - DNA, 25 bp, Homo sapien
tattccacaaaggtggcacacgggc

SEQ ID NO: 2554667 - DNA, 25 bp, Homo sapien
tccacacagtggtcctcgcagagct

SEQ ID NO: 2554668 - DNA, 25 bp, Homo sapien
agccgtccacacagtggtcctcgca

SEQ ID NO: 2554669 - DNA, 25 bp, Homo sapien
gcaggtgtccgtgcagggtgagcca

SEQ ID NO: 2554670 - DNA, 25 bp, Homo sapien
aggtgtccgtgcagggtgagccaca

SEQ ID NO: 2554671 - DNA, 25 bp, Homo sapien
agccagagtgcgtgatgtcatccag

SEQ ID NO: 2554672 - DNA, 25 bp, Homo sapien
gtgttgaaggaggtgcccgggctgt

SEQ ID NO: 2554673 - DNA, 25 bp, Homo sapien
aggtgcccgggctgtaggtgcggcc

SEQ ID NO: 2554674 - DNA, 25 bp, Homo sapien
gagtgcgtgatgtcatccagcaccg

SEQ ID NO: 2554675 - DNA, 25 bp, Homo sapien
agggaggccgtgagcagaaccggca

SEQ ID NO: 2554676 - DNA, 25 bp, Homo sapien
gggaggccgtgagcagaaccggcat

SEQ ID NO: 2554677 - DNA, 25 bp, Homo sapien
cttggacagaacgtagctgcagtca

SEQ ID NO: 2554678 - DNA, 25 bp, Homo sapien
catcataggtggagatgtgggcccc

SEQ ID NO: 2554679 - DNA, 25 bp, Homo sapien
catgcaggtcgtagagtttctcatc

SEQ ID NO: 2554680 - DNA, 25 bp, Homo sapien
tctcatcataggtggagatgtgggc

SEQ ID NO: 2554681 - DNA, 25 bp, Homo sapien
cagcacggtgaagctgctgtcggca

SEQ ID NO: 2554682 - DNA, 25 bp, Homo sapien
cgtccaggctgagcgtcaccgcttt

SEQ ID NO: 2554683 - DNA, 25 bp, Homo sapien
gcagttctcgttgtccgtcaggccg

SEQ ID NO: 2554684 - DNA, 25 bp, Homo sapien
tcagccagcacggtgaagctgctgt

SEQ ID NO: 2554685 - DNA, 25 bp, Homo sapien
atggagttgaggaacacgccgccgt

SEQ ID NO: 2554686 - DNA, 25 bp, Homo sapien
agttgaggaacacgccgccgtccgc

SEQ ID NO: 2554687 - DNA, 25 bp, Homo sapien
ggcagctgcgtgtagatggagttga

SEQ ID NO: 2554688 - DNA, 25 bp, Homo sapien
cgccgtccgcttggacccggatggc

SEQ ID NO: 2554689 - DNA, 25 bp, Homo sapien
gacaaacacctgcatgagtggcacc

SEQ ID NO: 2554690 - DNA, 25 bp, Homo sapien
tgcaccacgatgaagaagctcgagg

SEQ ID NO: 2554691 - DNA, 25 bp, Homo sapien
atgaagaagctcgagggtgtgaaca

SEQ ID NO: 2554692 - DNA, 25 bp, Homo sapien
aacacctgcatgagtggcaccagct

SEQ ID NO: 2554693 - DNA, 25 bp, Homo sapien
tccacactgagggagcaggggtcct

SEQ ID NO: 2554694 - DNA, 25 bp, Homo sapien
cgtgaagtcgtcagcctggttctgg

SEQ ID NO: 2554695 - DNA, 25 bp, Homo sapien
ccttccaggtgttggcgaaggctgc

SEQ ID NO: 2554696 - DNA, 25 bp, Homo sapien
accaccccgctgagggccgtgaagt

SEQ ID NO: 2554697 - DNA, 25 bp, Homo sapien
tgggatcggtcaggcgcgagcacca

SEQ ID NO: 2554698 - DNA, 25 bp, Homo sapien
tcggtcaggcgcgagcaccagtgcc

SEQ ID NO: 2554699 - DNA, 25 bp, Homo sapien
gagcaccagtgccgggcgtagttct

SEQ ID NO: 2554700 - DNA, 25 bp, Homo sapien
gcgcgagcaccagtgccgggcgtag

SEQ ID NO: 2554701 - DNA, 25 bp, Homo sapien
gagctgtacgcccttggcggcacag

SEQ ID NO: 2554702 - DNA, 25 bp, Homo sapien
ctgtacgcccttggcggcacaggcg

SEQ ID NO: 2554703 - DNA, 25 bp, Homo sapien
cctcgctccgctcacagttgcaggt

SEQ ID NO: 2554704 - DNA, 25 bp, Homo sapien
acaggcgtgcacataggaggacagc

SEQ ID NO: 2554705 - DNA, 25 bp, Homo sapien
gcggtgtggacacatcccaccccca

SEQ ID NO: 2554706 - DNA, 25 bp, Homo sapien
ccacgtaggcgtagcgctgggactt

SEQ ID NO: 2554707 - DNA, 25 bp, Homo sapien
acaggcgcccgcgtcattgaggaag

SEQ ID NO: 2554708 - DNA, 25 bp, Homo sapien
caggcacgaaggaaacgctgcaggt

SEQ ID NO: 2554709 - DNA, 25 bp, Homo sapien
tgcaggtgacgtcggcctcactcag

SEQ ID NO: 2554710 - DNA, 25 bp, Homo sapien
agcttagcttcccacccgtacatga

SEQ ID NO: 2554711 - DNA, 25 bp, Homo sapien
ggcagcttagcttcccacccgtaca

SEQ ID NO: 2554712 - DNA, 25 bp, Homo sapien
gcagcttagcttcccacccgtacat

SEQ ID NO: 2554713 - DNA, 25 bp, Homo sapien
gcttagcttcccacccgtacatgaa

SEQ ID NO: 2554714 - DNA, 25 bp, Homo sapien
agctccggaggcactcggccccagg

SEQ ID NO: 2554715 - DNA, 25 bp, Homo sapien
gcagtccaggtacaccatgggggct

SEQ ID NO: 2554716 - DNA, 25 bp, Homo sapien
agtccaggtacaccatgggggctgc

SEQ ID NO: 2554717 - DNA, 25 bp, Homo sapien
ccagcgtgtggcagctccggaggca

SEQ ID NO: 2554718 - DNA, 25 bp, Homo sapien
taggtggcctcgttgtgcacacagg

SEQ ID NO: 2554719 - DNA, 25 bp, Homo sapien
ggcagtcctcctcggcaatgcagcc

SEQ ID NO: 2554720 - DNA, 25 bp, Homo sapien
cacagccggacacgcagtgtgtgct

SEQ ID NO: 2554721 - DNA, 25 bp, Homo sapien
ggtgttgcagtcgaccctgatggtc

SEQ ID NO: 2554722 - DNA, 25 bp, Homo sapien
ctgggccaagatgtactcgcagctg

SEQ ID NO: 2554723 - DNA, 25 bp, Homo sapien
ccttcaaagctgtagcgatcgccat

SEQ ID NO: 2554724 - DNA, 25 bp, Homo sapien
tgatgaagtggccatccccgtaggc

SEQ ID NO: 2554725 - DNA, 25 bp, Homo sapien
tgtagcgatcgccatcaaaggtgat

SEQ ID NO: 2554726 - DNA, 25 bp, Homo sapien
atgcggaaggtcccgtgggtggtgt

SEQ ID NO: 2554727 - DNA, 25 bp, Homo sapien
ggatgttctcggtgacgatgcggaa

SEQ ID NO: 2554728 - DNA, 25 bp, Homo sapien
aggggatgttctcggtgacgatgcg

SEQ ID NO: 2554729 - DNA, 25 bp, Homo sapien
tcccacaggggatgttctcggtgac

SEQ ID NO: 2554730 - DNA, 25 bp, Homo sapien
ctgggggccggctcgttggctgcag

SEQ ID NO: 2554731 - DNA, 25 bp, Homo sapien
gggccggctcgttggctgcagggtc

SEQ ID NO: 2554732 - DNA, 25 bp, Homo sapien
ccggctcgttggctgcagggtcggg

SEQ ID NO: 2554733 - DNA, 25 bp, Homo sapien
agggtcgggggtgctcacagctggg

SEQ ID NO: 2554734 - DNA, 25 bp, Homo sapien
ggaggcagacgctgccggaagccga

SEQ ID NO: 2554735 - DNA, 25 bp, Homo sapien
aggcagacgctgccggaagccgacc

SEQ ID NO: 2554736 - DNA, 25 bp, Homo sapien
gaggcagacgctgccggaagccgac

SEQ ID NO: 2554737 - DNA, 25 bp, Homo sapien
gggaggcagacgctgccggaagccg

SEQ ID NO: 2554738 - DNA, 25 bp, Homo sapien
caggacacggccatcccgtgggtct

SEQ ID NO: 2554739 - DNA, 25 bp, Homo sapien
gatccccatgtagcgtatcttgtag

SEQ ID NO: 2554740 - DNA, 25 bp, Homo sapien
gcgtatcttgtagggtgggtcccca

SEQ ID NO: 2554741 - DNA, 25 bp, Homo sapien
cggccatcccgtgggtctcgatgac

SEQ ID NO: 2554742 - DNA, 25 bp, Homo sapien
gtagtcctggtgcagtcggatgaac

SEQ ID NO: 2554743 - DNA, 25 bp, Homo sapien
accacggaccggctacgcgtggcaa

SEQ ID NO: 2554744 - DNA, 25 bp, Homo sapien
caaagtcattgatggcattgtcgtc

SEQ ID NO: 2554745 - DNA, 25 bp, Homo sapien
attgtcgtcgaagttcccgcacagg

SEQ ID NO: 2554746 - DNA, 25 bp, Homo sapien
gctgttcccaaactccagtgcgtcc

SEQ ID NO: 2554747 - DNA, 25 bp, Homo sapien
caggtgtccggagtccgccaggaca

SEQ ID NO: 2554748 - DNA, 25 bp, Homo sapien
cctcgtagtacttggtggagtcaac

SEQ ID NO: 2554749 - DNA, 25 bp, Homo sapien
acgcgtcgttcacgcaggcctcgta

SEQ ID NO: 2554750 - DNA, 25 bp, Homo sapien
agccgtgcagaaacactcgcagtcg

SEQ ID NO: 2554751 - DNA, 25 bp, Homo sapien
gggttgtagaagtcacagaacaagg

SEQ ID NO: 2554752 - DNA, 25 bp, Homo sapien
ccccatgtgggttgtagaagtcaca

SEQ ID NO: 2554753 - DNA, 25 bp, Homo sapien
actcacagcccccatgtgggttgta

SEQ ID NO: 2554754 - DNA, 25 bp, Homo sapien
cacagcccccatgtgggttgtagaa

SEQ ID NO: 2554755 - DNA, 25 bp, Homo sapien
tagtttccgtccttgtcgtagcagc

SEQ ID NO: 2554756 - DNA, 25 bp, Homo sapien
tgcaccgacgtcatagtagtttccg

SEQ ID NO: 2554757 - DNA, 25 bp, Homo sapien
tggtcctcattgaagaagggctggc

SEQ ID NO: 2554758 - DNA, 25 bp, Homo sapien
cagctctggcagttctccgctgtgg

SEQ ID NO: 2554759 - DNA, 25 bp, Homo sapien
ctcaaggctgtgagcgcactggatg

SEQ ID NO: 2554760 - DNA, 25 bp, Homo sapien
aaggctgtgagcgcactggatgcca

SEQ ID NO: 2554761 - DNA, 25 bp, Homo sapien
tcaaggctgtgagcgcactggatgc

SEQ ID NO: 2554762 - DNA, 25 bp, Homo sapien
cctcaaggctgtgagcgcactggat

SEQ ID NO: 2554763 - DNA, 25 bp, Homo sapien
gacgtcctggtagctgtaggtcctg

SEQ ID NO: 2554764 - DNA, 25 bp, Homo sapien
tcggtggtgttgtagatgacgtcct

SEQ ID NO: 2554765 - DNA, 25 bp, Homo sapien
tcctgatgatggtgccgttgcttcc

SEQ ID NO: 2554766 - DNA, 25 bp, Homo sapien
cagatggcgatcaagcaggcgccaa

SEQ ID NO: 2554767 - DNA, 25 bp, Homo sapien
tctgttggctgttggcgcacatcag

SEQ ID NO: 2554768 - DNA, 25 bp, Homo sapien
gagaacccgcagctcgtagtcgtga

SEQ ID NO: 2554769 - DNA, 25 bp, Homo sapien
ggcggtgcccattgtaccagctgga

SEQ ID NO: 2554770 - DNA, 25 bp, Homo sapien
gcacgtattcgcagcagagaacccg

SEQ ID NO: 2554771 - DNA, 25 bp, Homo sapien
tcagcggctctttggaagcggtgct

SEQ ID NO: 2554772 - DNA, 25 bp, Homo sapien
cagcggccctgatcttatcgtagga

SEQ ID NO: 2554773 - DNA, 25 bp, Homo sapien
tcacacttcggttgacagcgggtcg

SEQ ID NO: 2554774 - DNA, 25 bp, Homo sapien
gggaagtccacgtcaaaccactctg

SEQ ID NO: 2554775 - DNA, 25 bp, Homo sapien
tgaacctgcctgtctggtcttcgtt

SEQ ID NO: 2554776 - DNA, 25 bp, Homo sapien
cacgcacgttgtagttgaagcacat

SEQ ID NO: 2554777 - DNA, 25 bp, Homo sapien
tgaagcacatgttgaacctgcctgt

SEQ ID NO: 2554778 - DNA, 25 bp, Homo sapien
cacagcaaagcacacgcacgttgta

SEQ ID NO: 2554779 - DNA, 25 bp, Homo sapien
tccagtggacgcagtcgtagtggct

SEQ ID NO: 2554780 - DNA, 25 bp, Homo sapien
tggccgtggcggtaagcactgtgga

SEQ ID NO: 2554781 - DNA, 25 bp, Homo sapien
tggtctgtgataggcgggtccaggt

SEQ ID NO: 2554782 - DNA, 25 bp, Homo sapien
ttgtgaggatccaggtcgtccccgg

SEQ ID NO: 2554783 - DNA, 25 bp, Homo sapien
catagaaccagtggccacagttgtg

SEQ ID NO: 2554784 - DNA, 25 bp, Homo sapien
tcaccgtggagcctctggttgtggg

SEQ ID NO: 2554785 - DNA, 25 bp, Homo sapien
cactgtggcggtgtgggtggtcccc

SEQ ID NO: 2554786 - DNA, 25 bp, Homo sapien
tctgtgtgctagaggagggtgttgc

SEQ ID NO: 2554787 - DNA, 25 bp, Homo sapien
ccggtggccgtgatcgtagtggccg

SEQ ID NO: 2554788 - DNA, 25 bp, Homo sapien
gccgtgatcgtagtggccgtggtgg

SEQ ID NO: 2554789 - DNA, 25 bp, Homo sapien
tggccgtgatcgtagtggccgtggt

SEQ ID NO: 2554790 - DNA, 25 bp, Homo sapien
gagccggtggccgtgatcgtagtgg

SEQ ID NO: 2554791 - DNA, 25 bp, Homo sapien
agcccatggtcaccaccgtggttat

SEQ ID NO: 2554792 - DNA, 25 bp, Homo sapien
aagatgcccgaggtggccgaagtcc

SEQ ID NO: 2554793 - DNA, 25 bp, Homo sapien
tcctgcagaccaggccaaagtccag

SEQ ID NO: 2554794 - DNA, 25 bp, Homo sapien
ttggagtaggtgtcaaagtccccgc

SEQ ID NO: 2554795 - DNA, 25 bp, Homo sapien
tctgtgaggatccaggtcgtccccg

SEQ ID NO: 2554796 - DNA, 25 bp, Homo sapien
tctgtgaggatccaggtggtccctg

SEQ ID NO: 2554797 - DNA, 25 bp, Homo sapien
ccagtggactcagtcgtagtggctg

SEQ ID NO: 2554798 - DNA, 25 bp, Homo sapien
caccgtcacggtggctgtagtgctc

SEQ ID NO: 2554799 - DNA, 25 bp, Homo sapien
tcagtgctggaagggcggttgcagt

SEQ ID NO: 2554800 - DNA, 25 bp, Homo sapien
tggtctgtgataggcgggtccaggt

SEQ ID NO: 2554801 - DNA, 25 bp, Homo sapien
tttggtagtgtgagctgttcctggg

SEQ ID NO: 2554802 - DNA, 25 bp, Homo sapien
tggccgtggtggtaagcactgtgga

SEQ ID NO: 2554803 - DNA, 25 bp, Homo sapien
catagaaccagtggccacagttgtg

SEQ ID NO: 2554804 - DNA, 25 bp, Homo sapien
ggagggtgttgccatagaaccagtg

SEQ ID NO: 2554805 - DNA, 25 bp, Homo sapien
tgtgaagcccgtggttgtggtagtc

SEQ ID NO: 2554806 - DNA, 25 bp, Homo sapien
cactggtctgtgtgctagaggaggg

SEQ ID NO: 2554807 - DNA, 25 bp, Homo sapien
gccgtgatcgtagtggccgtggtgg

SEQ ID NO: 2554808 - DNA, 25 bp, Homo sapien
gagccggtggccgtgatcgtagtgg

SEQ ID NO: 2554809 - DNA, 25 bp, Homo sapien
ggataggtgttgtccctggagttga

SEQ ID NO: 2554810 - DNA, 25 bp, Homo sapien
gtggtcagcactggggggataggtg

SEQ ID NO: 2554811 - DNA, 25 bp, Homo sapien
agcccatggtcaccaccgtggttat

SEQ ID NO: 2554812 - DNA, 25 bp, Homo sapien
tcctgcagaccaggccaaagtccag

SEQ ID NO: 2554813 - DNA, 25 bp, Homo sapien
agccactctgaccaggcacactggg

SEQ ID NO: 2554814 - DNA, 25 bp, Homo sapien
ttggagtaggtgtcaaagtccccgc

SEQ ID NO: 2554815 - DNA, 25 bp, Homo sapien
gatttcatagttgaagcacatcttg

SEQ ID NO: 2554816 - DNA, 25 bp, Homo sapien
gggcagtggccgtagttgcagcaga

SEQ ID NO: 2554817 - DNA, 25 bp, Homo sapien
ggcagtggccgtagttgcagcagaa

SEQ ID NO: 2554818 - DNA, 25 bp, Homo sapien
cacggatttcatagttgaagcacat

SEQ ID NO: 2554819 - DNA, 25 bp, Homo sapien
agcactttgagggtgccagcagttg

SEQ ID NO: 2554820 - DNA, 25 bp, Homo sapien
cagtggttgcggtcgtagtggctgc

SEQ ID NO: 2554821 - DNA, 25 bp, Homo sapien
caccgtcacggtggctgtagtgctg

SEQ ID NO: 2554822 - DNA, 25 bp, Homo sapien
tgtgataggcgggtccaggcggtgc

SEQ ID NO: 2554823 - DNA, 25 bp, Homo sapien
ctttggtagtgtgagctgttcctgg

SEQ ID NO: 2554824 - DNA, 25 bp, Homo sapien
cacagagccggtggccctggttgtg

SEQ ID NO: 2554825 - DNA, 25 bp, Homo sapien
actggaggcgtgagtgccgtccctg

SEQ ID NO: 2554826 - DNA, 25 bp, Homo sapien
cccgtggttgtggtagtcggcactt

SEQ ID NO: 2554827 - DNA, 25 bp, Homo sapien
catagaaccagtggccacagttgtg

SEQ ID NO: 2554828 - DNA, 25 bp, Homo sapien
ggagggtgttgccatagaaccagtg

SEQ ID NO: 2554829 - DNA, 25 bp, Homo sapien
cactgtggcggtgtgggtggtcccc

SEQ ID NO: 2554830 - DNA, 25 bp, Homo sapien
cactggtctgtgtgctagaggaggg

SEQ ID NO: 2554831 - DNA, 25 bp, Homo sapien
gtgatcgtagtggccgtggtggtca

SEQ ID NO: 2554832 - DNA, 25 bp, Homo sapien
tggagtaggtgtcaaagtccccgcc

SEQ ID NO: 2554833 - DNA, 25 bp, Homo sapien
tcacggtggctgtagtgctcggctc

SEQ ID NO: 2554834 - DNA, 25 bp, Homo sapien
tctgtgaggatccaggtggtccctg

SEQ ID NO: 2554835 - DNA, 25 bp, Homo sapien
ttgtgaggatccaggtcgtccccgg

SEQ ID NO: 2554836 - DNA, 25 bp, Homo sapien
gtgactgtgggtgtcgtggccgtgg

SEQ ID NO: 2554837 - DNA, 25 bp, Homo sapien
gtggctttggagctggtgactgtgg

SEQ ID NO: 2554838 - DNA, 25 bp, Homo sapien
actgtgggtgtcgtggccgtggtgc

SEQ ID NO: 2554839 - DNA, 25 bp, Homo sapien
tgtgggtgtcgtggccgtggtgctc

SEQ ID NO: 2554840 - DNA, 25 bp, Homo sapien
ctggaagggcggttgcagtccctgg

SEQ ID NO: 2554841 - DNA, 25 bp, Homo sapien
tcagtgctggaagggcggttgcagt

SEQ ID NO: 2554842 - DNA, 25 bp, Homo sapien
gggatggctgtaaagctggtagctg

SEQ ID NO: 2554843 - DNA, 25 bp, Homo sapien
tggctgtaaagctggtagctgtggg

SEQ ID NO: 2554844 - DNA, 25 bp, Homo sapien
tagtcggcactttggtagtgtgagc

SEQ ID NO: 2554845 - DNA, 25 bp, Homo sapien
tgtgaagcccgtggttgtggtagtc

SEQ ID NO: 2554846 - DNA, 25 bp, Homo sapien
cacagagccggtggccctggttgtg

SEQ ID NO: 2554847 - DNA, 25 bp, Homo sapien
tggccgtggtggtaagcactgtgga

SEQ ID NO: 2554848 - DNA, 25 bp, Homo sapien
gggtgtggtggttgtgctgatccac

SEQ ID NO: 2554849 - DNA, 25 bp, Homo sapien
tgtgggtgtggtggttgtgctgatc

SEQ ID NO: 2554850 - DNA, 25 bp, Homo sapien
tggttgtgggtgtggtggttgtgct

SEQ ID NO: 2554851 - DNA, 25 bp, Homo sapien
ggttgtgggtgtggtggttgtgctg

SEQ ID NO: 2554852 - DNA, 25 bp, Homo sapien
catagaaccagtggccacagttgtg

SEQ ID NO: 2554853 - DNA, 25 bp, Homo sapien
gaggagggggtcaccgtggagccac

SEQ ID NO: 2554854 - DNA, 25 bp, Homo sapien
cactggtctgtgtgctagaggaggg

SEQ ID NO: 2554855 - DNA, 25 bp, Homo sapien
ggagggtgttgccatagaaccagtg

SEQ ID NO: 2554856 - DNA, 25 bp, Homo sapien
gagccggtggccgtgatcgtagtgg

SEQ ID NO: 2554857 - DNA, 25 bp, Homo sapien
ggataggtgttgtccctggagttga

SEQ ID NO: 2554858 - DNA, 25 bp, Homo sapien
tggccgtgatcgtagtggccgtggt

SEQ ID NO: 2554859 - DNA, 25 bp, Homo sapien
gtggtcagcactggggggataggtg

SEQ ID NO: 2554860 - DNA, 25 bp, Homo sapien
tggagtaggtgtcaaagtccccgcc

SEQ ID NO: 2554861 - DNA, 25 bp, Homo sapien
tcacggtggctgtagtgctcggctc

SEQ ID NO: 2554862 - DNA, 25 bp, Homo sapien
tcgtggtggccttcgtggtcagcac

SEQ ID NO: 2554863 - DNA, 25 bp, Homo sapien
tggatccagtggacgcagtcgtagt

SEQ ID NO: 2554864 - DNA, 25 bp, Homo sapien
tgtgggtgtcgtggccgtggtgctc

SEQ ID NO: 2554865 - DNA, 25 bp, Homo sapien
cttctcagtgctggaagggcagttg

SEQ ID NO: 2554866 - DNA, 25 bp, Homo sapien
gtgctggaagggcagttgcagtccc

SEQ ID NO: 2554867 - DNA, 25 bp, Homo sapien
tgactgtgggtgtcgtggccgtggt

SEQ ID NO: 2554868 - DNA, 25 bp, Homo sapien
aggaggggatggctgtaaagctggt

SEQ ID NO: 2554869 - DNA, 25 bp, Homo sapien
gggatggctgtaaagctggtagctg

SEQ ID NO: 2554870 - DNA, 25 bp, Homo sapien
gatggctgtaaagctggtagctgtg

SEQ ID NO: 2554871 - DNA, 25 bp, Homo sapien
tggctgtaaagctggtagctgtggg

SEQ ID NO: 2554872 - DNA, 25 bp, Homo sapien
ctttggtagtgtgagctgttcctgg

SEQ ID NO: 2554873 - DNA, 25 bp, Homo sapien
tggaggcgtgagtgccgtccctggg

SEQ ID NO: 2554874 - DNA, 25 bp, Homo sapien
cccgtggttgtggtagtcggcactt

SEQ ID NO: 2554875 - DNA, 25 bp, Homo sapien
tggccgtggcggtaagcactgtgga

SEQ ID NO: 2554876 - DNA, 25 bp, Homo sapien
catagaaccagtggccacagttgtg

SEQ ID NO: 2554877 - DNA, 25 bp, Homo sapien
gagccggtggccgtgatcgtagtgg

SEQ ID NO: 2554878 - DNA, 25 bp, Homo sapien
cactggtctgtgtgctagaggaggg

SEQ ID NO: 2554879 - DNA, 25 bp, Homo sapien
gtgtaaagctggtagctgtggattt

SEQ ID NO: 2554880 - DNA, 25 bp, Homo sapien
attggtggcccttgtcatggtggct

SEQ ID NO: 2554881 - DNA, 25 bp, Homo sapien
gccgtggaattggtggcccttgtca

SEQ ID NO: 2554882 - DNA, 25 bp, Homo sapien
acacgctgaaggttggcaggctgct

SEQ ID NO: 2554883 - DNA, 25 bp, Homo sapien
aagccagtgggtctcagggtggtga

SEQ ID NO: 2554884 - DNA, 25 bp, Homo sapien
gggcgagaaaaactgtccaaatgcc

SEQ ID NO: 2554885 - DNA, 25 bp, Homo sapien
cgggcgagaaaaactgtccaaatgc

SEQ ID NO: 2554886 - DNA, 25 bp, Homo sapien
ccctggaagcggtcaatgtcacagt

SEQ ID NO: 2554887 - DNA, 25 bp, Homo sapien
cgtagaaatggcagccggctcggtc

SEQ ID NO: 2554888 - DNA, 25 bp, Homo sapien
gtgctgattgcacactgcgtagaaa

SEQ ID NO: 2554889 - DNA, 25 bp, Homo sapien
cggctcggtcggtcttattgtagat

SEQ ID NO: 2554890 - DNA, 25 bp, Homo sapien
tcgggtccgacactttgatgggcag

SEQ ID NO: 2554891 - DNA, 25 bp, Homo sapien
tcgcactcatagtggaagtcacagg

SEQ ID NO: 2554892 - DNA, 25 bp, Homo sapien
gccacaggctttgggtccagcagga

SEQ ID NO: 2554893 - DNA, 25 bp, Homo sapien
aggtgcttgttcacgcaggtgacgt

SEQ ID NO: 2554894 - DNA, 25 bp, Homo sapien
taatcccgcggccaccgacgcactc

SEQ ID NO: 2554895 - DNA, 25 bp, Homo sapien
gtaatcccgcggccaccgacgcact

SEQ ID NO: 2554896 - DNA, 25 bp, Homo sapien
gggtaatcccgcggccaccgacgca

SEQ ID NO: 2554897 - DNA, 25 bp, Homo sapien
atcccgcggccaccgacgcactcac

SEQ ID NO: 2554898 - DNA, 25 bp, Homo sapien
tgtccaggtagaggctgagattccc

SEQ ID NO: 2554899 - DNA, 25 bp, Homo sapien
tgagattcccaaagcgtgcatggat

SEQ ID NO: 2554900 - DNA, 25 bp, Homo sapien
aggacataggtgcagttgccccgga

SEQ ID NO: 2554901 - DNA, 25 bp, Homo sapien
taagaggtgccgtcaaaggtggaat

SEQ ID NO: 2554902 - DNA, 25 bp, Homo sapien
cgctgctcaccggaatttggtcaaa

SEQ ID NO: 2554903 - DNA, 25 bp, Homo sapien
aaccgctgctcaccggaatttggtc

SEQ ID NO: 2554904 - DNA, 25 bp, Homo sapien
ctgaaaccgctgctcaccggaattt

SEQ ID NO: 2554905 - DNA, 25 bp, Homo sapien
ctgctcaccggaatttggtcaaaca

SEQ ID NO: 2554906 - DNA, 25 bp, Homo sapien
tccacacgcatggtggtggtcccca

SEQ ID NO: 2554907 - DNA, 25 bp, Homo sapien
cattgaaggtgacgctcacgcccag

SEQ ID NO: 2554908 - DNA, 25 bp, Homo sapien
ttggccattgaaggtgacgctcacg

SEQ ID NO: 2554909 - DNA, 25 bp, Homo sapien
gggcaggaatgtccacacgcatggt

SEQ ID NO: 2554910 - DNA, 25 bp, Homo sapien
tgtccttgcaactggcggcagtggt

SEQ ID NO: 2554911 - DNA, 25 bp, Homo sapien
gttccgtcccgctggagacagtcgt

SEQ ID NO: 2554912 - DNA, 25 bp, Homo sapien
ggagacagtcgtccctctggttgtt

SEQ ID NO: 2554913 - DNA, 25 bp, Homo sapien
aactggcggcagtggttccgtcccg

SEQ ID NO: 2554914 - DNA, 25 bp, Homo sapien
ggtgggtgtgctagacaccggggct

SEQ ID NO: 2554915 - DNA, 25 bp, Homo sapien
gtgtgctagacaccggggctgcggg

SEQ ID NO: 2554916 - DNA, 25 bp, Homo sapien
catcctttctgctgtcggggaccag

SEQ ID NO: 2554917 - DNA, 25 bp, Homo sapien
ggctcagcatcagatcacagagcgg

SEQ ID NO: 2554918 - DNA, 25 bp, Homo sapien
agggcacctcaaggcggcccctgca

SEQ ID NO: 2554919 - DNA, 25 bp, Homo sapien
gcgttgaagaatgggcccgggggca

SEQ ID NO: 2554920 - DNA, 25 bp, Homo sapien
tgcagtggtcgctgatgcaggcgtt

SEQ ID NO: 2554921 - DNA, 25 bp, Homo sapien
cccgggggcacaaggttgtggcact

SEQ ID NO: 2554922 - DNA, 25 bp, Homo sapien
accggttgcacctcgccagtcactg

SEQ ID NO: 2554923 - DNA, 25 bp, Homo sapien
ccgggcgcggcagagctctgcgtaa

SEQ ID NO: 2554924 - DNA, 25 bp, Homo sapien
cagagctctgcgtaagcctccaggc

SEQ ID NO: 2554925 - DNA, 25 bp, Homo sapien
agtcactgcacactccccgggcgcg

SEQ ID NO: 2554926 - DNA, 25 bp, Homo sapien
gggccgcatggcttgtacactttgg

SEQ ID NO: 2554927 - DNA, 25 bp, Homo sapien
gccgcatggcttgtacactttggtg

SEQ ID NO: 2554928 - DNA, 25 bp, Homo sapien
caggtggcaggctgtatggggccgc

SEQ ID NO: 2554929 - DNA, 25 bp, Homo sapien
tgtatggggccgcatggcttgtaca

SEQ ID NO: 2554930 - DNA, 25 bp, Homo sapien
ggcaggcctgcacgcagatgcccat

SEQ ID NO: 2554931 - DNA, 25 bp, Homo sapien
caggcctgcacgcagatgcccatgt

SEQ ID NO: 2554932 - DNA, 25 bp, Homo sapien
ccatgtgtgcgttgaagaggatctg

SEQ ID NO: 2554933 - DNA, 25 bp, Homo sapien
cgcagatgcccatgtgtgcgttgaa

SEQ ID NO: 2554934 - DNA, 25 bp, Homo sapien
taggaaacccatcgggtcccacgca

SEQ ID NO: 2554935 - DNA, 25 bp, Homo sapien
aggaaacccatcgggtcccacgcag

SEQ ID NO: 2554936 - DNA, 25 bp, Homo sapien
ctggaatggatcaagggggtccctg

SEQ ID NO: 2554937 - DNA, 25 bp, Homo sapien
tcgtcacacacgcaggactggcagt

SEQ ID NO: 2554938 - DNA, 25 bp, Homo sapien
ggctgaccctgggcgtcacagggca

SEQ ID NO: 2554939 - DNA, 25 bp, Homo sapien
tgcactgcaccgacactgaaccctc

SEQ ID NO: 2554940 - DNA, 25 bp, Homo sapien
tacgaagccgggacggttgcacggc

SEQ ID NO: 2554941 - DNA, 25 bp, Homo sapien
aggtgggacagcagtcgccctcctc

SEQ ID NO: 2554942 - DNA, 25 bp, Homo sapien
cctgggtgcagatggactcctgccc

SEQ ID NO: 2554943 - DNA, 25 bp, Homo sapien
tgggtgcagatggactcctgccctg

SEQ ID NO: 2554944 - DNA, 25 bp, Homo sapien
gtgcagatggactcctgccctggcg

SEQ ID NO: 2554945 - DNA, 25 bp, Homo sapien
cccgtagaaggtgccattgtacgaa

SEQ ID NO: 2554946 - DNA, 25 bp, Homo sapien
gccattgtacgaacacagctgaggt

SEQ ID NO: 2554947 - DNA, 25 bp, Homo sapien
tagaaggtgccattgtacgaacaca

SEQ ID NO: 2554948 - DNA, 25 bp, Homo sapien
ggtgccattgtacgaacacagctga

SEQ ID NO: 2554949 - DNA, 25 bp, Homo sapien
cctgacattgcaccgttgggtcctg

SEQ ID NO: 2554950 - DNA, 25 bp, Homo sapien
agagaggcaggtacacatgtggcag

SEQ ID NO: 2554951 - DNA, 25 bp, Homo sapien
aggcatcctcctgacattgcaccgt

SEQ ID NO: 2554952 - DNA, 25 bp, Homo sapien
gggcgcctgggaaggttgcaccaac

SEQ ID NO: 2554953 - DNA, 25 bp, Homo sapien
agtggtccaggaccccttagccctg

SEQ ID NO: 2554954 - DNA, 25 bp, Homo sapien
cctgggcctatacccgaagaagttg

SEQ ID NO: 2554955 - DNA, 25 bp, Homo sapien
ccactcagttatcccggctcagcct

SEQ ID NO: 2554956 - DNA, 25 bp, Homo sapien
ctgtctacaccccagtggtccagga

SEQ ID NO: 2554957 - DNA, 25 bp, Homo sapien
ccggccactctcttgtactcaaagc

SEQ ID NO: 2554958 - DNA, 25 bp, Homo sapien
aggcaggcggtctggacgcactccc

SEQ ID NO: 2554959 - DNA, 25 bp, Homo sapien
catcgggcgtgaggcaggcggtctg

SEQ ID NO: 2554960 - DNA, 25 bp, Homo sapien
tgcccggccactctcttgtactcaa

SEQ ID NO: 2554961 - DNA, 25 bp, Homo sapien
tcacagaggtacacggtgcagttgt

SEQ ID NO: 2554962 - DNA, 25 bp, Homo sapien
agaggtacacggtgcagttgtccac

SEQ ID NO: 2554963 - DNA, 25 bp, Homo sapien
cagcaaatggactccaccctcagcc

SEQ ID NO: 2554964 - DNA, 25 bp, Homo sapien
agcaaatggactccaccctcagcct

SEQ ID NO: 2554965 - DNA, 25 bp, Homo sapien
agtagcagcagccggttttcctgag

SEQ ID NO: 2554966 - DNA, 25 bp, Homo sapien
ggagtagcagcagccggttttcctg

SEQ ID NO: 2554967 - DNA, 25 bp, Homo sapien
gagtagcagcagccggttttcctga

SEQ ID NO: 2554968 - DNA, 25 bp, Homo sapien
aggagtagcagcagccggttttcct

SEQ ID NO: 2554969 - DNA, 25 bp, Homo sapien
tgacctcggtctcgcagccctggtg

SEQ ID NO: 2554970 - DNA, 25 bp, Homo sapien
tgccacaggatggtcgtgttgatgc

SEQ ID NO: 2554971 - DNA, 25 bp, Homo sapien
tggtcgtgttgatgcggacttgaca

SEQ ID NO: 2554972 - DNA, 25 bp, Homo sapien
ggtgatgttgacctcggtctcgcag

SEQ ID NO: 2554973 - DNA, 25 bp, Homo sapien
tggacgcagggtggccctcacatca

SEQ ID NO: 2554974 - DNA, 25 bp, Homo sapien
ttggccccgccgtttctctgcccag

SEQ ID NO: 2554975 - DNA, 25 bp, Homo sapien
ctgtggacgcagggtggccctcaca

SEQ ID NO: 2554976 - DNA, 25 bp, Homo sapien
ccgccgtttctctgcccagccatgg

SEQ ID NO: 2554977 - DNA, 25 bp, Homo sapien
ggtgcactggtgctgcatggcctgg

SEQ ID NO: 2554978 - DNA, 25 bp, Homo sapien
tggctgagccgttaggacagtgcaa

SEQ ID NO: 2554979 - DNA, 25 bp, Homo sapien
ccgttaggacagtgcaagggcaccg

SEQ ID NO: 2554980 - DNA, 25 bp, Homo sapien
caggatggctgagccgttaggacag

SEQ ID NO: 2554981 - DNA, 25 bp, Homo sapien
gcagaacgttctcagacagcagtgg

SEQ ID NO: 2554982 - DNA, 25 bp, Homo sapien
tgatcagacaatgcacatcctggct

SEQ ID NO: 2554983 - DNA, 25 bp, Homo sapien
gaggcccaaggttttcatgatcaga

SEQ ID NO: 2554984 - DNA, 25 bp, Homo sapien
gcttagtttgttccagggcgtccca

SEQ ID NO: 2554985 - DNA, 25 bp, Homo sapien
tactcaatgctcagggtttatttgc

SEQ ID NO: 2554986 - DNA, 25 bp, Homo sapien
tggccgttgcgacctcagccctgag

SEQ ID NO: 2554987 - DNA, 25 bp, Homo sapien
tttgggatgctgacccctctctgac

SEQ ID NO: 2554988 - DNA, 25 bp, Homo sapien
cagccctgagttaccctgcagcagg

SEQ ID NO: 2554989 - DNA, 25 bp, Homo sapien
ggtcctggactgccccccggatgtg

SEQ ID NO: 2554990 - DNA, 25 bp, Homo sapien
cagaggcttcctggtccttcagtgg

SEQ ID NO: 2554991 - DNA, 25 bp, Homo sapien
ttcctggtccttcagtggctgctgg

SEQ ID NO: 2554992 - DNA, 25 bp, Homo sapien
gccccccggatgtgtcctccagcct

SEQ ID NO: 2554993 - DNA, 25 bp, Homo sapien
cggtgtggggaaggccccgctctgc

SEQ ID NO: 2554994 - DNA, 25 bp, Homo sapien
acgagcattgcttttgtctccccag

SEQ ID NO: 2554995 - DNA, 25 bp, Homo sapien
ccccaggccacggtctgcctgtagc

SEQ ID NO: 2554996 - DNA, 25 bp, Homo sapien
caggccacggtctgcctgtagccac

SEQ ID NO: 2554997 - DNA, 25 bp, Homo sapien
aatttgcagcccaatgatgcagtag

SEQ ID NO: 2554998 - DNA, 25 bp, Homo sapien
gatgttgaactgcagacttttgggt

SEQ ID NO: 2554999 - DNA, 25 bp, Homo sapien
ttcagaacatttacggaaacacctg

SEQ ID NO: 2555000 - DNA, 25 bp, Homo sapien
gacatgacacctggagtcaaaagag

SEQ ID NO: 2555001 - DNA, 25 bp, Homo sapien
tagaaaaagcgttgagatttccaga

SEQ ID NO: 2555002 - DNA, 25 bp, Homo sapien
tattaaacctgatagcttgagcaca

SEQ ID NO: 2555003 - DNA, 25 bp, Homo sapien
tttgtctttctctactgatggagcg

SEQ ID NO: 2555004 - DNA, 25 bp, Homo sapien
tgatggagcgtttgctctccttcag

SEQ ID NO: 2555005 - DNA, 25 bp, Homo sapien
caagattcccgtgaaagagcacccg

SEQ ID NO: 2555006 - DNA, 25 bp, Homo sapien
gagttcactcgtcaacagactggga

SEQ ID NO: 2555007 - DNA, 25 bp, Homo sapien
catgcttagggagcaaagcgcccat

SEQ ID NO: 2555008 - DNA, 25 bp, Homo sapien
gtttgaagatgcaggccgatcgcca

SEQ ID NO: 2555009 - DNA, 25 bp, Homo sapien
cgttttccgtcattgccgaaaggct

SEQ ID NO: 2555010 - DNA, 25 bp, Homo sapien
tcggttcgttttccgtcattgccga

SEQ ID NO: 2555011 - DNA, 25 bp, Homo sapien
catggttcggttcgttttccgtcat

SEQ ID NO: 2555012 - DNA, 25 bp, Homo sapien
tcgttttccgtcattgccgaaaggc

SEQ ID NO: 2555013 - DNA, 25 bp, Homo sapien
gcttgatggacacatccgtgcttgg

SEQ ID NO: 2555014 - DNA, 25 bp, Homo sapien
ccgtgcttggtaaccaggatgggcc

SEQ ID NO: 2555015 - DNA, 25 bp, Homo sapien
gacacatccgtgcttggtaaccagg

SEQ ID NO: 2555016 - DNA, 25 bp, Homo sapien
tgatggacacatccgtgcttggtaa

SEQ ID NO: 2555017 - DNA, 25 bp, Homo sapien
catgctgcgtggtctgagatcaggg

SEQ ID NO: 2555018 - DNA, 25 bp, Homo sapien
tcagggccttctcggagcaattttt

SEQ ID NO: 2555019 - DNA, 25 bp, Homo sapien
tgagatcagggccttctcggagcaa

SEQ ID NO: 2555020 - DNA, 25 bp, Homo sapien
gcgtggtctgagatcagggccttct

SEQ ID NO: 2555021 - DNA, 25 bp, Homo sapien
tcccgtcatcctggcctgcgtctct

SEQ ID NO: 2555022 - DNA, 25 bp, Homo sapien
gcccgttgacgctgtttccatctgt

SEQ ID NO: 2555023 - DNA, 25 bp, Homo sapien
tggcctgcgtctctgtgggcacaac

SEQ ID NO: 2555024 - DNA, 25 bp, Homo sapien
tgttccctcgtgcacctccatttca

SEQ ID NO: 2555025 - DNA, 25 bp, Homo sapien
agaccgcgtggcctcatgaagcatg

SEQ ID NO: 2555026 - DNA, 25 bp, Homo sapien
tctaggcgtgaagcatctggagacc

SEQ ID NO: 2555027 - DNA, 25 bp, Homo sapien
ttcttcgtgcgtgagagaccagcgc

SEQ ID NO: 2555028 - DNA, 25 bp, Homo sapien
tcaatttcccgtgcgttcttcgtgc

SEQ ID NO: 2555029 - DNA, 25 bp, Homo sapien
ctgcgcccgttgtgagccccagatg

SEQ ID NO: 2555030 - DNA, 25 bp, Homo sapien
gccccagatggaggcgggccccgtg

SEQ ID NO: 2555031 - DNA, 25 bp, Homo sapien
gggcctgcgcccgttgtgagcccca

SEQ ID NO: 2555032 - DNA, 25 bp, Homo sapien
cgcccgttgtgagccccagatggag

SEQ ID NO: 2555033 - DNA, 25 bp, Homo sapien
cgtcactgtcgggtcggcgagccac

SEQ ID NO: 2555034 - DNA, 25 bp, Homo sapien
atggcgaccaccgtcagcactcagc

SEQ ID NO: 2555035 - DNA, 25 bp, Homo sapien
ggcggcctcgaggtgacaactgtct

SEQ ID NO: 2555036 - DNA, 25 bp, Homo sapien
gtgacaactgtctccgtcgcaggct

SEQ ID NO: 2555037 - DNA, 25 bp, Homo sapien
tgttcttaagatacccggacatcgg

SEQ ID NO: 2555038 - DNA, 25 bp, Homo sapien
tacctgggctcgtcaaaggattgcc

SEQ ID NO: 2555039 - DNA, 25 bp, Homo sapien
ccaaaagcacgaggaggaaggcgtc

SEQ ID NO: 2555040 - DNA, 25 bp, Homo sapien
tcatgactgggcatgcgcaaacggc

SEQ ID NO: 2555041 - DNA, 25 bp, Homo sapien
gaagggctatgacaggggccctcca

SEQ ID NO: 2555042 - DNA, 25 bp, Homo sapien
tcggaggtgaccaatctcagtgctg

SEQ ID NO: 2555043 - DNA, 25 bp, Homo sapien
cagactcggaggtgaccaatctcag

SEQ ID NO: 2555044 - DNA, 25 bp, Homo sapien
gtgaccaatctcagtgctggtgaga

SEQ ID NO: 2555045 - DNA, 25 bp, Homo sapien
ggacctttgcggcattgcactgacc

SEQ ID NO: 2555046 - DNA, 25 bp, Homo sapien
tacatctgctcggtaccactcaggc

SEQ ID NO: 2555047 - DNA, 25 bp, Homo sapien
gctatcaacccgtctaactccataa

SEQ ID NO: 2555048 - DNA, 25 bp, Homo sapien
gatgcttggccccacgtacatctgc

SEQ ID NO: 2555049 - DNA, 25 bp, Homo sapien
atgaaaaccaagacacagccgccac

SEQ ID NO: 2555050 - DNA, 25 bp, Homo sapien
gtcccacgtgcgtatctgctgggtg

SEQ ID NO: 2555051 - DNA, 25 bp, Homo sapien
cagatgatccgtgacgtgctgtaca

SEQ ID NO: 2555052 - DNA, 25 bp, Homo sapien
aggccaagccgggtcccacgtgcgt

SEQ ID NO: 2555053 - DNA, 25 bp, Homo sapien
gaatttgggtcagcgcctgggccat

SEQ ID NO: 2555054 - DNA, 25 bp, Homo sapien
ccccagcacaggctagcggctccag

SEQ ID NO: 2555055 - DNA, 25 bp, Homo sapien
actgaatttgggtcagcgcctgggc

SEQ ID NO: 2555056 - DNA, 25 bp, Homo sapien
cagcacaggctagcggctccaggca

SEQ ID NO: 2555057 - DNA, 25 bp, Homo sapien
cagagccaaagaggagtgtggtccc

SEQ ID NO: 2555058 - DNA, 25 bp, Homo sapien
cacggctcccgggcgccaaccttgg

SEQ ID NO: 2555059 - DNA, 25 bp, Homo sapien
gtgtggtcccagagcacggctcccg

SEQ ID NO: 2555060 - DNA, 25 bp, Homo sapien
cgtgggaggagaaattcccagagcc

SEQ ID NO: 2555061 - DNA, 25 bp, Homo sapien
ggcaccgcagtagggctgggaagac

SEQ ID NO: 2555062 - DNA, 25 bp, Homo sapien
aggcattgggcttgatgccccccag

SEQ ID NO: 2555063 - DNA, 25 bp, Homo sapien
agaggcattgggcttgatgcccccc

SEQ ID NO: 2555064 - DNA, 25 bp, Homo sapien
gaggcattgggcttgatgcccccca

SEQ ID NO: 2555065 - DNA, 25 bp, Homo sapien
cacacccggaagctcgtgtggagca

SEQ ID NO: 2555066 - DNA, 25 bp, Homo sapien
cccaccctcgcactcacgttcacgt

SEQ ID NO: 2555067 - DNA, 25 bp, Homo sapien
cggcacacccggaagctcgtgtgga

SEQ ID NO: 2555068 - DNA, 25 bp, Homo sapien
gcaggctgtgcccaccctcgcactc

SEQ ID NO: 2555069 - DNA, 25 bp, Homo sapien
atcatccaggagccctgagtgtggc

SEQ ID NO: 2555070 - DNA, 25 bp, Homo sapien
tggcatcatccaggagccctgagtg

SEQ ID NO: 2555071 - DNA, 25 bp, Homo sapien
catcatccaggagccctgagtgtgg

SEQ ID NO: 2555072 - DNA, 25 bp, Homo sapien
gccctgagtgtggcggcagcatctt

SEQ ID NO: 2555073 - DNA, 25 bp, Homo sapien
ccgtggactcttggagtgttggacc

SEQ ID NO: 2555074 - DNA, 25 bp, Homo sapien
cagagccatgactagagttgggtgc

SEQ ID NO: 2555075 - DNA, 25 bp, Homo sapien
gagtaaaactgtgcccaaagatctg

SEQ ID NO: 2555076 - DNA, 25 bp, Homo sapien
tccctgtaagcagaagtgactcttc

SEQ ID NO: 2555077 - DNA, 25 bp, Homo sapien
ccgagccgagccgtgcagctgagcc

SEQ ID NO: 2555078 - DNA, 25 bp, Homo sapien
agccgagccgtgcagctgagccgaa

SEQ ID NO: 2555079 - DNA, 25 bp, Homo sapien
gagccgtgcagctgagccgaacagc

SEQ ID NO: 2555080 - DNA, 25 bp, Homo sapien
ccgagccgtgcagctgagccgaaca

SEQ ID NO: 2555081 - DNA, 25 bp, Homo sapien
ctggcccgcggcgacgcctccgcct

SEQ ID NO: 2555082 - DNA, 25 bp, Homo sapien
actccgacgcggcagtccgaggcct

SEQ ID NO: 2555083 - DNA, 25 bp, Homo sapien
cctccgcctcgtcgagaggacaggg

SEQ ID NO: 2555084 - DNA, 25 bp, Homo sapien
ccgcgtccgccgagtgccgtccgcg

SEQ ID NO: 2555085 - DNA, 25 bp, Homo sapien
gtcttctccagccggtagggcccaa

SEQ ID NO: 2555086 - DNA, 25 bp, Homo sapien
ttctccagccggtagggcccaacat

SEQ ID NO: 2555087 - DNA, 25 bp, Homo sapien
gccggtagggcccaacatactgcgc

SEQ ID NO: 2555088 - DNA, 25 bp, Homo sapien
ggcccaacatactgcgcgtgctgcg

SEQ ID NO: 2555089 - DNA, 25 bp, Homo sapien
cgctctccgggctcagccctgcaca

SEQ ID NO: 2555090 - DNA, 25 bp, Homo sapien
ccatgcgctctccgggctcagccct

SEQ ID NO: 2555091 - DNA, 25 bp, Homo sapien
cccatctccagggacccatctccat

SEQ ID NO: 2555092 - DNA, 25 bp, Homo sapien
catctccagggacccatctccatgg

SEQ ID NO: 2555093 - DNA, 25 bp, Homo sapien
ctcacgggtgaggtgtgatgccggg

SEQ ID NO: 2555094 - DNA, 25 bp, Homo sapien
tgcatcagttgctcacgggtgaggt

SEQ ID NO: 2555095 - DNA, 25 bp, Homo sapien
tagccgtgcatcagttgctcacggg

SEQ ID NO: 2555096 - DNA, 25 bp, Homo sapien
cgagggtagccgtgcatcagttgct

SEQ ID NO: 2555097 - DNA, 25 bp, Homo sapien
cgaacagggcataaggtcctttcct

SEQ ID NO: 2555098 - DNA, 25 bp, Homo sapien
ctgtgaggacccagcgccaaggcag

SEQ ID NO: 2555099 - DNA, 25 bp, Homo sapien
agtcggcaaactccctgctgtgtcc

SEQ ID NO: 2555100 - DNA, 25 bp, Homo sapien
tccgctctggcacgacgcagcagag

SEQ ID NO: 2555101 - DNA, 25 bp, Homo sapien
ttctgcacaaaagggccgtcgaagg

SEQ ID NO: 2555102 - DNA, 25 bp, Homo sapien
tttgaagcaccgaagtctgcgggcc

SEQ ID NO: 2555103 - DNA, 25 bp, Homo sapien
tgacgacatcaaaagcggcgtctcg

SEQ ID NO: 2555104 - DNA, 25 bp, Homo sapien
catgactacgctgggtgctttcacg

SEQ ID NO: 2555105 - DNA, 25 bp, Homo sapien
aggtaatgggttcctccaagccagt

SEQ ID NO: 2555106 - DNA, 25 bp, Homo sapien
tggtggagcccgtgcaacagaaggg

SEQ ID NO: 2555107 - DNA, 25 bp, Homo sapien
gcagtgagcaggtaatgggttcctc

SEQ ID NO: 2555108 - DNA, 25 bp, Homo sapien
tctgctgggaccaagtcctctgctg

SEQ ID NO: 2555109 - DNA, 25 bp, Homo sapien
tgctaggatttagtgagtggctgca

SEQ ID NO: 2555110 - DNA, 25 bp, Homo sapien
gctgcatctataaacaaggtctaca

SEQ ID NO: 2555111 - DNA, 25 bp, Homo sapien
tagtgagtggctgcatctataaaca

SEQ ID NO: 2555112 - DNA, 25 bp, Homo sapien
accacagacctcaagtgaggccccg

SEQ ID NO: 2555113 - DNA, 25 bp, Homo sapien
actgtagcaactgcaaactcaggag

SEQ ID NO: 2555114 - DNA, 25 bp, Homo sapien
ctttgtcaaggccacccagtgggga

SEQ ID NO: 2555115 - DNA, 25 bp, Homo sapien
tgcaaactcaggaggtgcacaggcc

SEQ ID NO: 2555116 - DNA, 25 bp, Homo sapien
ggactgtcagccatgcatcctcggg

SEQ ID NO: 2555117 - DNA, 25 bp, Homo sapien
ccgtcaccccctcggtcctggcttg

SEQ ID NO: 2555118 - DNA, 25 bp, Homo sapien
gcaccatggacaggactgtcaggga

SEQ ID NO: 2555119 - DNA, 25 bp, Homo sapien
tgtggggtcgccagagctcttccag

SEQ ID NO: 2555120 - DNA, 25 bp, Homo sapien
aggaagtgtgtccagttccccacag

SEQ ID NO: 2555121 - DNA, 25 bp, Homo sapien
gccacgcagcgcaggacgatgcaga

SEQ ID NO: 2555122 - DNA, 25 bp, Homo sapien
gagtccccacgcctggcaggaacag

SEQ ID NO: 2555123 - DNA, 25 bp, Homo sapien
agacgtcaggcttcccatcacgggc

SEQ ID NO: 2555124 - DNA, 25 bp, Homo sapien
gcagcactcaggaccagggtccgag

SEQ ID NO: 2555125 - DNA, 25 bp, Homo sapien
cagaagacgctcactgctgagcaca

SEQ ID NO: 2555126 - DNA, 25 bp, Homo sapien
agaagacgctcactgctgagcacag

SEQ ID NO: 2555127 - DNA, 25 bp, Homo sapien
cagaagacgctcactgctgggcaca

SEQ ID NO: 2555128 - DNA, 25 bp, Homo sapien
cagaagacgctcactgctgagcaca

SEQ ID NO: 2555129 - DNA, 25 bp, Homo sapien
agaagacgctcactgctgagcacag

SEQ ID NO: 2555130 - DNA, 25 bp, Homo sapien
cagaagacgctcactgctgggcaca

SEQ ID NO: 2555131 - DNA, 25 bp, Homo sapien
cagaagacgctcactgctgagcaca

SEQ ID NO: 2555132 - DNA, 25 bp, Homo sapien
agaagacgctcactgctgagcacag

SEQ ID NO: 2555133 - DNA, 25 bp, Homo sapien
cagaagacgctcactgctgagcaca

SEQ ID NO: 2555134 - DNA, 25 bp, Homo sapien
agaagacgctcactgctgagcacag

SEQ ID NO: 2555135 - DNA, 25 bp, Homo sapien
cagaagacgctcactgctgggcaca

SEQ ID NO: 2555136 - DNA, 25 bp, Homo sapien
cagaagacgctcactgctgggcaca

SEQ ID NO: 2555137 - DNA, 25 bp, Homo sapien
cagaagacgctcactgctgagcaca

SEQ ID NO: 2555138 - DNA, 25 bp, Homo sapien
agaagacgctcactgctgagcacag

SEQ ID NO: 2555139 - DNA, 25 bp, Homo sapien
gagcttctcacggttgacgatcttg

SEQ ID NO: 2555140 - DNA, 25 bp, Homo sapien
aggtgacgcagtgaacccccagctt

SEQ ID NO: 2555141 - DNA, 25 bp, Homo sapien
atcagcaccgactcgctgagcttct

SEQ ID NO: 2555142 - DNA, 25 bp, Homo sapien
accgactcgctgagcttctcacggt

SEQ ID NO: 2555143 - DNA, 25 bp, Homo sapien
tggggcacgcatcgctccccacaga

SEQ ID NO: 2555144 - DNA, 25 bp, Homo sapien
gggcacgcatcgctccccacagaca

SEQ ID NO: 2555145 - DNA, 25 bp, Homo sapien
ggctggggcacgcatcgctccccac

SEQ ID NO: 2555146 - DNA, 25 bp, Homo sapien
ctggggcacgcatcgctccccacag

SEQ ID NO: 2555147 - DNA, 25 bp, Homo sapien
cataaacgtcgtgcagctttaggac

SEQ ID NO: 2555148 - DNA, 25 bp, Homo sapien
aacgtcgtgcagctttaggacgtgg

SEQ ID NO: 2555149 - DNA, 25 bp, Homo sapien
ttttgttttcataaacgtcgtgcag

SEQ ID NO: 2555150 - DNA, 25 bp, Homo sapien
acgtgggggtgctcaatgagcttca

SEQ ID NO: 2555151 - DNA, 25 bp, Homo sapien
ggagaccacgcagccgcatccaggg

SEQ ID NO: 2555152 - DNA, 25 bp, Homo sapien
gagaccacgcagccgcatccagggg

SEQ ID NO: 2555153 - DNA, 25 bp, Homo sapien
gcagggagaccacgcagccgcatcc

SEQ ID NO: 2555154 - DNA, 25 bp, Homo sapien
agggagaccacgcagccgcatccag

SEQ ID NO: 2555155 - DNA, 25 bp, Homo sapien
gatgatctgccggaagaacttccga

SEQ ID NO: 2555156 - DNA, 25 bp, Homo sapien
aacttccgagcctccttaggcgtca

SEQ ID NO: 2555157 - DNA, 25 bp, Homo sapien
gaagtccagcgcagagatgatctgc

SEQ ID NO: 2555158 - DNA, 25 bp, Homo sapien
tgacacgtgttctagcaccaggtac

SEQ ID NO: 2555159 - DNA, 25 bp, Homo sapien
gctggtctccaacaggctgtcgcca

SEQ ID NO: 2555160 - DNA, 25 bp, Homo sapien
tgcgatgcggatgttgttcttctcg

SEQ ID NO: 2555161 - DNA, 25 bp, Homo sapien
acaggctgtcgccaacctgcaggga

SEQ ID NO: 2555162 - DNA, 25 bp, Homo sapien
tgttcttctcgtccagcaggaggtt

SEQ ID NO: 2555163 - DNA, 25 bp, Homo sapien
ccggatcacctcggggcaggcgtag

SEQ ID NO: 2555164 - DNA, 25 bp, Homo sapien
ggatcacctcggggcaggcgtagtg

SEQ ID NO: 2555165 - DNA, 25 bp, Homo sapien
cacctcggggcaggcgtagtggggg

SEQ ID NO: 2555166 - DNA, 25 bp, Homo sapien
atcacctcggggcaggcgtagtggg

SEQ ID NO: 2555167 - DNA, 25 bp, Homo sapien
agctgcacgcggcggcgctgactca

SEQ ID NO: 2555168 - DNA, 25 bp, Homo sapien
agagctgcacgcggcggcgctgact

SEQ ID NO: 2555169 - DNA, 25 bp, Homo sapien
ccacagagctgcacgcggcggcgct

SEQ ID NO: 2555170 - DNA, 25 bp, Homo sapien
cagggtcaggtccccgccaccctgg

SEQ ID NO: 2555171 - DNA, 25 bp, Homo sapien
caccagcaaggcgaacaggatgacg

SEQ ID NO: 2555172 - DNA, 25 bp, Homo sapien
gccttccggccgtcatacttctccc

SEQ ID NO: 2555173 - DNA, 25 bp, Homo sapien
acacgtccgccttccggccgtcata

SEQ ID NO: 2555174 - DNA, 25 bp, Homo sapien
ggcgaacaggatgacgccgcagctc

SEQ ID NO: 2555175 - DNA, 25 bp, Homo sapien
ttctccagcagctgtcgcaagttgt

SEQ ID NO: 2555176 - DNA, 25 bp, Homo sapien
tctccagcagctgtcgcaagttgtc

SEQ ID NO: 2555177 - DNA, 25 bp, Homo sapien
cttctccagcagctgtcgcaagttg

SEQ ID NO: 2555178 - DNA, 25 bp, Homo sapien
gcggcatgtggaacacgccccgctt

SEQ ID NO: 2555179 - DNA, 25 bp, Homo sapien
agtcgggcgggataaagtgcggcat

SEQ ID NO: 2555180 - DNA, 25 bp, Homo sapien
tgccccgtagcagactctggcagtc

SEQ ID NO: 2555181 - DNA, 25 bp, Homo sapien
atgccccgtagcagactctggcagt

SEQ ID NO: 2555182 - DNA, 25 bp, Homo sapien
tgaggcggcgtgcggcgtccacctc

SEQ ID NO: 2555183 - DNA, 25 bp, Homo sapien
tataccatatgtgtttctgaatgtg

SEQ ID NO: 2555184 - DNA, 25 bp, Homo sapien
ataccatatgtgtttctgaatgtgc

SEQ ID NO: 2555185 - DNA, 25 bp, Homo sapien
atataccatatgtgtttctgaatgt

SEQ ID NO: 2555186 - DNA, 25 bp, Homo sapien
gatctgcaccttgcgaggaatgggc

SEQ ID NO: 2555187 - DNA, 25 bp, Homo sapien
agcccagtgagtgcatgctgtccag

SEQ ID NO: 2555188 - DNA, 25 bp, Homo sapien
aatgggctgctctggttcgggctca

SEQ ID NO: 2555189 - DNA, 25 bp, Homo sapien
gcagcagcttgttgcggtctcggaa

SEQ ID NO: 2555190 - DNA, 25 bp, Homo sapien
atcctcctggctcgggtacctttct

SEQ ID NO: 2555191 - DNA, 25 bp, Homo sapien
tcatcctcctggctcgggtaccttt

SEQ ID NO: 2555192 - DNA, 25 bp, Homo sapien
ggaggaggaagtaaatcatcttctc

SEQ ID NO: 2555193 - DNA, 25 bp, Homo sapien
ggaagtaaatcatcttctcctggtt

SEQ ID NO: 2555194 - DNA, 25 bp, Homo sapien
gatttgcgttctggccgccgcttgc

SEQ ID NO: 2555195 - DNA, 25 bp, Homo sapien
gggagccgccgtccgtcacgctgag

SEQ ID NO: 2555196 - DNA, 25 bp, Homo sapien
tgggccatctcaatggcccgccgcg

SEQ ID NO: 2555197 - DNA, 25 bp, Homo sapien
cttgccgtgccggttcagcatcggg

SEQ ID NO: 2555198 - DNA, 25 bp, Homo sapien
ggctgggtgcccttcctccggccac

SEQ ID NO: 2555199 - DNA, 25 bp, Homo sapien
tgagggcctcgtgcgggcagcccag

SEQ ID NO: 2555200 - DNA, 25 bp, Homo sapien
ccttcctccggccacgggtctgctc

SEQ ID NO: 2555201 - DNA, 25 bp, Homo sapien
tttgctgagggcctcgtgcgggcag

SEQ ID NO: 2555202 - DNA, 25 bp, Homo sapien
cacaccgggtaagaactccacgtgg

SEQ ID NO: 2555203 - DNA, 25 bp, Homo sapien
gttactgacggccacacgcgggcac

SEQ ID NO: 2555204 - DNA, 25 bp, Homo sapien
aacagagcgagaaaacacagttact

SEQ ID NO: 2555205 - DNA, 25 bp, Homo sapien
ctacagcagaacagagcgagaaaac

SEQ ID NO: 2555206 - DNA, 25 bp, Homo sapien
tatccaggcttttactgaacattgc

SEQ ID NO: 2555207 - DNA, 25 bp, Homo sapien
ggcctcagcgatatccaggctttta

SEQ ID NO: 2555208 - DNA, 25 bp, Homo sapien
cagcgatatccaggcttttactgaa

SEQ ID NO: 2555209 - DNA, 25 bp, Homo sapien
caggcttttactgaacattgcttta

SEQ ID NO: 2555210 - DNA, 25 bp, Homo sapien
gctgctcggcttcaactctggccgg

SEQ ID NO: 2555211 - DNA, 25 bp, Homo sapien
cgaggcccaccggacacagcacagg

SEQ ID NO: 2555212 - DNA, 25 bp, Homo sapien
tagaggcccctcttgacggcggcgc

SEQ ID NO: 2555213 - DNA, 25 bp, Homo sapien
acccgcccaggctcgcaaaactggc

SEQ ID NO: 2555214 - DNA, 25 bp, Homo sapien
tggttcctgtcgagcccgcccagag

SEQ ID NO: 2555215 - DNA, 25 bp, Homo sapien
ctgggagcgcggacagccctcatgg

SEQ ID NO: 2555216 - DNA, 25 bp, Homo sapien
gctggaactggacccagagctttca

SEQ ID NO: 2555217 - DNA, 25 bp, Homo sapien
ggccctggacctgtggttcctgtcg

SEQ ID NO: 2555218 - DNA, 25 bp, Homo sapien
cgcccacgtgcccagacagtggcag

SEQ ID NO: 2555219 - DNA, 25 bp, Homo sapien
tgcacggacgagccggcgcccacgt

SEQ ID NO: 2555220 - DNA, 25 bp, Homo sapien
cccacgtgcccagacagtggcagct

SEQ ID NO: 2555221 - DNA, 25 bp, Homo sapien
ggcgcccacgtgcccagacagtggc

SEQ ID NO: 2555222 - DNA, 25 bp, Homo sapien
gacggctgtgcgtcgttccaccaca

SEQ ID NO: 2555223 - DNA, 25 bp, Homo sapien
cctggcccggcgtgcccggctgaga

SEQ ID NO: 2555224 - DNA, 25 bp, Homo sapien
ccgtgcagggaccaggacggctgtg

SEQ ID NO: 2555225 - DNA, 25 bp, Homo sapien
tgagactccggtgtgtggccgccac

SEQ ID NO: 2555226 - DNA, 25 bp, Homo sapien
gaaaggcctgaggaggcaccgctga

SEQ ID NO: 2555227 - DNA, 25 bp, Homo sapien
aaaggcctgaggaggcaccgctgat

SEQ ID NO: 2555228 - DNA, 25 bp, Homo sapien
cctgaggaggcaccgctgatggacc

SEQ ID NO: 2555229 - DNA, 25 bp, Homo sapien
ggaggcaccgctgatggaccgagac

SEQ ID NO: 2555230 - DNA, 25 bp, Homo sapien
tcgggctccgtggaggtggccaggg

SEQ ID NO: 2555231 - DNA, 25 bp, Homo sapien
tcccacaagcttcgggctccgtgga

SEQ ID NO: 2555232 - DNA, 25 bp, Homo sapien
cttgcacggcaaggtctgggtcttg

SEQ ID NO: 2555233 - DNA, 25 bp, Homo sapien
tgggggcaggacaagcttcctaata

SEQ ID NO: 2555234 - DNA, 25 bp, Homo sapien
tggggaggggactgccccttggtga

SEQ ID NO: 2555235 - DNA, 25 bp, Homo sapien
gactgccccttggtgaggggtgagg

SEQ ID NO: 2555236 - DNA, 25 bp, Homo sapien
gggactgccccttggtgaggggtga

SEQ ID NO: 2555237 - DNA, 25 bp, Homo sapien
actgccccttggtgaggggtgaggg

SEQ ID NO: 2555238 - DNA, 25 bp, Homo sapien
ctctcctttggcgtgtggacaggtg

SEQ ID NO: 2555239 - DNA, 25 bp, Homo sapien
cttgcagtttccggcggtggaagcg

SEQ ID NO: 2555240 - DNA, 25 bp, Homo sapien
tcttgatggagttgagccgcgccct

SEQ ID NO: 2555241 - DNA, 25 bp, Homo sapien
tccagggcacccctccgacgctggg

SEQ ID NO: 2555242 - DNA, 25 bp, Homo sapien
tctggggacgactctggtgtcaggt

SEQ ID NO: 2555243 - DNA, 25 bp, Homo sapien
acgactctggtgtcaggttggacat

SEQ ID NO: 2555244 - DNA, 25 bp, Homo sapien
tggggacgactctggtgtcaggttg

SEQ ID NO: 2555245 - DNA, 25 bp, Homo sapien
gggacgactctggtgtcaggttgga

SEQ ID NO: 2555246 - DNA, 25 bp, Homo sapien
gaaggttctcgtcttactcagtcca

SEQ ID NO: 2555247 - DNA, 25 bp, Homo sapien
ctgtgaagtgactccagcctgaccg

SEQ ID NO: 2555248 - DNA, 25 bp, Homo sapien
ggcttagcactgagcagtttccaca

SEQ ID NO: 2555249 - DNA, 25 bp, Homo sapien
acctgatcggcgcagaaaggccact

SEQ ID NO: 2555250 - DNA, 25 bp, Homo sapien
gaagtgcacaaagcagcctggcagt

SEQ ID NO: 2555251 - DNA, 25 bp, Homo sapien
caggacagatggtacaaacgtgact

SEQ ID NO: 2555252 - DNA, 25 bp, Homo sapien
tctgggttcaaaactccgagggcca

SEQ ID NO: 2555253 - DNA, 25 bp, Homo sapien
aaacgtgactctctgctttgcggcc

SEQ ID NO: 2555254 - DNA, 25 bp, Homo sapien
gctctccagctcaagagcacccgaa

SEQ ID NO: 2555255 - DNA, 25 bp, Homo sapien
cagccgtgagaggaccatggccaga

SEQ ID NO: 2555256 - DNA, 25 bp, Homo sapien
agaggcgcctctagcacagcccgag

SEQ ID NO: 2555257 - DNA, 25 bp, Homo sapien
gctgttcagaggtggcacgctctgc

SEQ ID NO: 2555258 - DNA, 25 bp, Homo sapien
tggaacggcggaatcttccatcgct

SEQ ID NO: 2555259 - DNA, 25 bp, Homo sapien
gaaggctactcctgtcttgctggca

SEQ ID NO: 2555260 - DNA, 25 bp, Homo sapien
ggattgaggtgtggcaccgtccaca

SEQ ID NO: 2555261 - DNA, 25 bp, Homo sapien
gaaacggctgtctccacagtgctag

SEQ ID NO: 2555262 - DNA, 25 bp, Homo sapien
aggctgatgaagttcccaaaccagg

SEQ ID NO: 2555263 - DNA, 25 bp, Homo sapien
ccttgatggagctcagaggtttgtc

SEQ ID NO: 2555264 - DNA, 25 bp, Homo sapien
cgatgtcagccttgatggagctcag

SEQ ID NO: 2555265 - DNA, 25 bp, Homo sapien
cgacaggaaggcgtgcacgatgtca

SEQ ID NO: 2555266 - DNA, 25 bp, Homo sapien
gtttgggagatgacgctgtggctga

SEQ ID NO: 2555267 - DNA, 25 bp, Homo sapien
gaacttgaccggcttctggaacacg

SEQ ID NO: 2555268 - DNA, 25 bp, Homo sapien
gcccggaagctcgtttgggagatga

SEQ ID NO: 2555269 - DNA, 25 bp, Homo sapien
ctggaacttgaccggcttctggaac

SEQ ID NO: 2555270 - DNA, 25 bp, Homo sapien
gacggagtagatgccgttctccttc

SEQ ID NO: 2555271 - DNA, 25 bp, Homo sapien
caccctccgtgtaggtgatatcaac

SEQ ID NO: 2555272 - DNA, 25 bp, Homo sapien
agtagatgccgttctccttctgcgc

SEQ ID NO: 2555273 - DNA, 25 bp, Homo sapien
tccccaccctccgtgtaggtgatat

SEQ ID NO: 2555274 - DNA, 25 bp, Homo sapien
ccgcaggcgggtcgtgtgtgctcag

SEQ ID NO: 2555275 - DNA, 25 bp, Homo sapien
ctccaccaccctcttgaagcgacgg

SEQ ID NO: 2555276 - DNA, 25 bp, Homo sapien
ggtctccaccaccctcttgaagcga

SEQ ID NO: 2555277 - DNA, 25 bp, Homo sapien
gcaggcgggtcgtgtgtgctcagca

SEQ ID NO: 2555278 - DNA, 25 bp, Homo sapien
gccctatgtccctggcgtgcagagg

SEQ ID NO: 2555279 - DNA, 25 bp, Homo sapien
aggcgaggcgggtggtcccgccagg

SEQ ID NO: 2555280 - DNA, 25 bp, Homo sapien
gacaagaggcgcctttcagtgtggt

SEQ ID NO: 2555281 - DNA, 25 bp, Homo sapien
ctacggtggacaagaggcgcctttc

SEQ ID NO: 2555282 - DNA, 25 bp, Homo sapien
cttctggcccttaagcccagcaccc

SEQ ID NO: 2555283 - DNA, 25 bp, Homo sapien
agcccagcaccccagcttagtcctg

SEQ ID NO: 2555284 - DNA, 25 bp, Homo sapien
agcaccccagcttagtcctggcgct

SEQ ID NO: 2555285 - DNA, 25 bp, Homo sapien
ccccagcttagtcctggcgctggtg

SEQ ID NO: 2555286 - DNA, 25 bp, Homo sapien
tgggctgctgggtgcctacatctac

SEQ ID NO: 2555287 - DNA, 25 bp, Homo sapien
ccagcttggacacagtttagcagca

SEQ ID NO: 2555288 - DNA, 25 bp, Homo sapien
gcaagcagctagagtcatgtcccgg

SEQ ID NO: 2555289 - DNA, 25 bp, Homo sapien
gatgacagcgtaaagacaagggcct

SEQ ID NO: 2555290 - DNA, 25 bp, Homo sapien
ccttccctccccaccttgcagccgt

SEQ ID NO: 2555291 - DNA, 25 bp, Homo sapien
cctccccaccttgcagccgtgaggg

SEQ ID NO: 2555292 - DNA, 25 bp, Homo sapien
tccccaccttgcagccgtgagggcc

SEQ ID NO: 2555293 - DNA, 25 bp, Homo sapien
tccctccccaccttgcagccgtgag

SEQ ID NO: 2555294 - DNA, 25 bp, Homo sapien
gagctgttgcgcaggacccagtgct

SEQ ID NO: 2555295 - DNA, 25 bp, Homo sapien
caaatgaacgaagaggcctcgacga

SEQ ID NO: 2555296 - DNA, 25 bp, Homo sapien
cctcgacgagggaaagaacccagag

SEQ ID NO: 2555297 - DNA, 25 bp, Homo sapien
tgctcctttggcgaagcgaggctcg

SEQ ID NO: 2555298 - DNA, 25 bp, Homo sapien
taattacgtcaaagaagttactcaa

SEQ ID NO: 2555299 - DNA, 25 bp, Homo sapien
ttaattacgtcaaagaagttactca

SEQ ID NO: 2555300 - DNA, 25 bp, Homo sapien
ttacgtcaaagaagttactcaatgg

SEQ ID NO: 2555301 - DNA, 25 bp, Homo sapien
attacgtcaaagaagttactcaatg

SEQ ID NO: 2555302 - DNA, 25 bp, Homo sapien
ggcactccgcttggcgggcgtgctg

SEQ ID NO: 2555303 - DNA, 25 bp, Homo sapien
gccgcggagtcaccgagtgggccgt

SEQ ID NO: 2555304 - DNA, 25 bp, Homo sapien
tcttggccgtgtccttgcccgttgg

SEQ ID NO: 2555305 - DNA, 25 bp, Homo sapien
catcttggccgtgtccttgcccgtt

SEQ ID NO: 2555306 - DNA, 25 bp, Homo sapien
gcggccgcgggtccactcggggcag

SEQ ID NO: 2555307 - DNA, 25 bp, Homo sapien
acagtctggacggacgggcggcgcg

SEQ ID NO: 2555308 - DNA, 25 bp, Homo sapien
ggaaacaagcgatgctgtcagagac

SEQ ID NO: 2555309 - DNA, 25 bp, Homo sapien
tgagaacagtctggacggacgggcg

SEQ ID NO: 2555310 - DNA, 25 bp, Homo sapien
gagctgaggcgaggagctgccgcgg

SEQ ID NO: 2555311 - DNA, 25 bp, Homo sapien
tcccacgggccgtgcggagctgagg

SEQ ID NO: 2555312 - DNA, 25 bp, Homo sapien
ctgggcctcactgcccggcagcaac

SEQ ID NO: 2555313 - DNA, 25 bp, Homo sapien
ccttcggtcacagaggatggcctcg

SEQ ID NO: 2555314 - DNA, 25 bp, Homo sapien
acgggcctgcgaggaggcctccagg

SEQ ID NO: 2555315 - DNA, 25 bp, Homo sapien
cctgtggctacgttgcccaccaggg

SEQ ID NO: 2555316 - DNA, 25 bp, Homo sapien
gccaagactacacggaggcggcgca

SEQ ID NO: 2555317 - DNA, 25 bp, Homo sapien
gggcctgttcctgtggctacgttgc

SEQ ID NO: 2555318 - DNA, 25 bp, Homo sapien
agagacggaacccatgacagagcga

SEQ ID NO: 2555319 - DNA, 25 bp, Homo sapien
gagtccgcgtgtgtccgaagcacaa

SEQ ID NO: 2555320 - DNA, 25 bp, Homo sapien
gagcgagccgcaccgtctttagatg

SEQ ID NO: 2555321 - DNA, 25 bp, Homo sapien
tatgtatagaaatcccagcctgtgg

SEQ ID NO: 2555322 - DNA, 25 bp, Homo sapien
caaggaacacccatggtgcagtcct

SEQ ID NO: 2555323 - DNA, 25 bp, Homo sapien
ttaccttagttcatctgttcactcg

SEQ ID NO: 2555324 - DNA, 25 bp, Homo sapien
ggaaggctgagacccgcttacctta

SEQ ID NO: 2555325 - DNA, 25 bp, Homo sapien
agatgctgcaccagcggaaggctga

SEQ ID NO: 2555326 - DNA, 25 bp, Homo sapien
tggaccccaaagagaccgccatcat

SEQ ID NO: 2555327 - DNA, 25 bp, Homo sapien
catcatggacgacctcaccgaggtg

SEQ ID NO: 2555328 - DNA, 25 bp, Homo sapien
cctcaccgaggtgctatgcagcggg

SEQ ID NO: 2555329 - DNA, 25 bp, Homo sapien
cgggagcacagaaccacgtgaagga

SEQ ID NO: 2555330 - DNA, 25 bp, Homo sapien
aaacccagggtgtccatgtccctag

SEQ ID NO: 2555331 - DNA, 25 bp, Homo sapien
tggctggacccaacagtaagaggca

SEQ ID NO: 2555332 - DNA, 25 bp, Homo sapien
gggccacgagtctcacatgaggact

SEQ ID NO: 2555333 - DNA, 25 bp, Homo sapien
tggccaggctgttagccgcaggtac

SEQ ID NO: 2555334 - DNA, 25 bp, Homo sapien
cacaggtgaatagatgagcacgcca

SEQ ID NO: 2555335 - DNA, 25 bp, Homo sapien
tttgagacctgtcgcacacctgtgg

SEQ ID NO: 2555336 - DNA, 25 bp, Homo sapien
tatgaatgcgtgagtccacatgtgg

SEQ ID NO: 2555337 - DNA, 25 bp, Homo sapien
gaaaggcaagccgaaaccatgggca

SEQ ID NO: 2555338 - DNA, 25 bp, Homo sapien
caggcccagcgtcatggggagagcc

SEQ ID NO: 2555339 - DNA, 25 bp, Homo sapien
gccaggcccagcgtcatggggagag

SEQ ID NO: 2555340 - DNA, 25 bp, Homo sapien
ggagagccttccctgtggtggacac

SEQ ID NO: 2555341 - DNA, 25 bp, Homo sapien
tccctgtggtggacacgctgggcat

SEQ ID NO: 2555342 - DNA, 25 bp, Homo sapien
cctggagcttgccagttgacacagc

SEQ ID NO: 2555343 - DNA, 25 bp, Homo sapien
ctgcgtgaccgaccaccaggtaact

SEQ ID NO: 2555344 - DNA, 25 bp, Homo sapien
gaccaccaggtaactgccacctgga

SEQ ID NO: 2555345 - DNA, 25 bp, Homo sapien
gagtgagcgcgctgacagctgctcc

SEQ ID NO: 2555346 - DNA, 25 bp, Homo sapien
tgactaaggacgagaagagtgccat

SEQ ID NO: 2555347 - DNA, 25 bp, Homo sapien
catggaagtccctctgttggtgccc

SEQ ID NO: 2555348 - DNA, 25 bp, Homo sapien
tgtctcacagtgcactaagctccgg

SEQ ID NO: 2555349 - DNA, 25 bp, Homo sapien
gcttggaccgagcaatgggctgcct

SEQ ID NO: 2555350 - DNA, 25 bp, Homo sapien
gatcagttacgtgctgggtgccaag

SEQ ID NO: 2555351 - DNA, 25 bp, Homo sapien
gccaaggaggccgactggcacgtca

SEQ ID NO: 2555352 - DNA, 25 bp, Homo sapien
tcatgggtaccactggcgagaatgg

SEQ ID NO: 2555353 - DNA, 25 bp, Homo sapien
aaggaccaggagaagtttgctaggc

SEQ ID NO: 2555354 - DNA, 25 bp, Homo sapien
tcagggtctacaggctcgacttcca

SEQ ID NO: 2555355 - DNA, 25 bp, Homo sapien
tgataatgaagttgacactcgtggc

SEQ ID NO: 2555356 - DNA, 25 bp, Homo sapien
gacttccatagcaagcgtgctctgg

SEQ ID NO: 2555357 - DNA, 25 bp, Homo sapien
gttgtgctgtcctcgtccctcaggg

SEQ ID NO: 2555358 - DNA, 25 bp, Homo sapien
cctgtttggacgtttggtctgggat

SEQ ID NO: 2555359 - DNA, 25 bp, Homo sapien
ggcagacaattaaactcagaagaaa

SEQ ID NO: 2555360 - DNA, 25 bp, Homo sapien
cagagggcacagtaggctggtaaaa

SEQ ID NO: 2555361 - DNA, 25 bp, Homo sapien
gtctgggatgtctgcgggcgttcct

SEQ ID NO: 2555362 - DNA, 25 bp, Homo sapien
gctgctgtgggcatttctgttgggc

SEQ ID NO: 2555363 - DNA, 25 bp, Homo sapien
gagcattgccctctcaggtgtttgc

SEQ ID NO: 2555364 - DNA, 25 bp, Homo sapien
gaaagccactttgagtgcctccagc

SEQ ID NO: 2555365 - DNA, 25 bp, Homo sapien
tccaggcaccgcagaagctggtcgg

SEQ ID NO: 2555366 - DNA, 25 bp, Homo sapien
accttgtgatcctgaccttgtggga

SEQ ID NO: 2555367 - DNA, 25 bp, Homo sapien
gaccttgtgatcctgaccttgtggg

SEQ ID NO: 2555368 - DNA, 25 bp, Homo sapien
tcctgaccttgtgatcctgaccttg

SEQ ID NO: 2555369 - DNA, 25 bp, Homo sapien
ctgaccttgtgatcctgaccttgtg

SEQ ID NO: 2555370 - DNA, 25 bp, Homo sapien
tctccgcctgtgttatatgtatgtc

SEQ ID NO: 2555371 - DNA, 25 bp, Homo sapien
tgtgtcttcatctgttatgcgcgtg

SEQ ID NO: 2555372 - DNA, 25 bp, Homo sapien
tcttcggctgtgttgtatatcttcg

SEQ ID NO: 2555373 - DNA, 25 bp, Homo sapien
gcgcgtgtcttcgtctgtgttgtgc

SEQ ID NO: 2555374 - DNA, 25 bp, Homo sapien
tgttacccgcttaatatctgtagga

SEQ ID NO: 2555375 - DNA, 25 bp, Homo sapien
cagttttggtagcttgtgtttgtga

SEQ ID NO: 2555376 - DNA, 25 bp, Homo sapien
tgtagagttcatccgtaagccacct

SEQ ID NO: 2555377 - DNA, 25 bp, Homo sapien
ctgtaggatctgtaggaatgtccct

SEQ ID NO: 2555378 - DNA, 25 bp, Homo sapien
tggctccaggtggctccttctgcat

SEQ ID NO: 2555379 - DNA, 25 bp, Homo sapien
cgccgatggctccaggtggctcctt

SEQ ID NO: 2555380 - DNA, 25 bp, Homo sapien
atggctccaggtggctccttctgca

SEQ ID NO: 2555381 - DNA, 25 bp, Homo sapien
cgatggctccaggtggctccttctg

SEQ ID NO: 2555382 - DNA, 25 bp, Homo sapien
gcttctgcttgaattggagaagtgt

SEQ ID NO: 2555383 - DNA, 25 bp, Homo sapien
aggaggcaaggccggtgacacacca

SEQ ID NO: 2555384 - DNA, 25 bp, Homo sapien
tgtgcgtgtgagcagctggtttttt

SEQ ID NO: 2555385 - DNA, 25 bp, Homo sapien
gatacaggattttgcacacccacgg

SEQ ID NO: 2555386 - DNA, 25 bp, Homo sapien
tcggcgccggctggcatcagtgcct

SEQ ID NO: 2555387 - DNA, 25 bp, Homo sapien
gcgccggctggcatcagtgccttcg

SEQ ID NO: 2555388 - DNA, 25 bp, Homo sapien
ctgagtcggcgccggctggcatcag

SEQ ID NO: 2555389 - DNA, 25 bp, Homo sapien
agtcggcgccggctggcatcagtgc

SEQ ID NO: 2555390 - DNA, 25 bp, Homo sapien
cagtgggtgttttgggtactgccct

SEQ ID NO: 2555391 - DNA, 25 bp, Homo sapien
gcttctgattcatgtggccaccgct

SEQ ID NO: 2555392 - DNA, 25 bp, Homo sapien
gctgagcagtgggtgttttgggtac

SEQ ID NO: 2555393 - DNA, 25 bp, Homo sapien
caggatgccgtgcttctgattcatg

SEQ ID NO: 2555394 - DNA, 25 bp, Homo sapien
ggtataccctgagcgtgctgcctgg

SEQ ID NO: 2555395 - DNA, 25 bp, Homo sapien
tctggtataccctgagcgtgctgcc

SEQ ID NO: 2555396 - DNA, 25 bp, Homo sapien
gagctgtctggtataccctgagcgt

SEQ ID NO: 2555397 - DNA, 25 bp, Homo sapien
gggggtagcggtgacaacaggaaga

SEQ ID NO: 2555398 - DNA, 25 bp, Homo sapien
agtctgctgcgtgccggcaccgtgc

SEQ ID NO: 2555399 - DNA, 25 bp, Homo sapien
cctcaaggggagtctgctgcgtgcc

SEQ ID NO: 2555400 - DNA, 25 bp, Homo sapien
caccgtgccgctgagaactgggtgc

SEQ ID NO: 2555401 - DNA, 25 bp, Homo sapien
tgggtgcacacggccccacttggtc

SEQ ID NO: 2555402 - DNA, 25 bp, Homo sapien
tggttactctccaagcagcaggtga

SEQ ID NO: 2555403 - DNA, 25 bp, Homo sapien
gtcatcccgcgccactgagttgtag

SEQ ID NO: 2555404 - DNA, 25 bp, Homo sapien
tgcagggaaacctgctcgggaaacc

SEQ ID NO: 2555405 - DNA, 25 bp, Homo sapien
tgcagtcagtgttacccaacggaac

SEQ ID NO: 2555406 - DNA, 25 bp, Homo sapien
ctggatggttccgccagaccccgca

SEQ ID NO: 2555407 - DNA, 25 bp, Homo sapien
cactcccagactgccctccgcggcg

SEQ ID NO: 2555408 - DNA, 25 bp, Homo sapien
ccaggcactgctggcgtggagggcg

SEQ ID NO: 2555409 - DNA, 25 bp, Homo sapien
tgctccgctccgagcacgtgggcag

SEQ ID NO: 2555410 - DNA, 25 bp, Homo sapien
tccgcggcgctctccatccgcaaag

SEQ ID NO: 2555411 - DNA, 25 bp, Homo sapien
gggcctccgaccaggacagcgcagg

SEQ ID NO: 2555412 - DNA, 25 bp, Homo sapien
cagcgcagggcaggtgactacccag

SEQ ID NO: 2555413 - DNA, 25 bp, Homo sapien
actggtggcaccgttggcatcgccg

SEQ ID NO: 2555414 - DNA, 25 bp, Homo sapien
ctgactgacgcaattgccggccggt

SEQ ID NO: 2555415 - DNA, 25 bp, Homo sapien
aggcccttccggagctcagaactga

SEQ ID NO: 2555416 - DNA, 25 bp, Homo sapien
gcccttccggagctcagaactgaag

SEQ ID NO: 2555417 - DNA, 25 bp, Homo sapien
ggcccttccggagctcagaactgaa

SEQ ID NO: 2555418 - DNA, 25 bp, Homo sapien
ggcacataggtctcaggaccctggg

SEQ ID NO: 2555419 - DNA, 25 bp, Homo sapien
tgtgcgcaggagcacctgcagctcc

SEQ ID NO: 2555420 - DNA, 25 bp, Homo sapien
tcctaggatgcccatctggggcaca

SEQ ID NO: 2555421 - DNA, 25 bp, Homo sapien
ccagcaggtgggtgacggcctctcc

SEQ ID NO: 2555422 - DNA, 25 bp, Homo sapien
cgagggcagacctggctgctgcagg

SEQ ID NO: 2555423 - DNA, 25 bp, Homo sapien
acctggctgctgcaggtgccacagg

SEQ ID NO: 2555424 - DNA, 25 bp, Homo sapien
agacctggctgctgcaggtgccaca

SEQ ID NO: 2555425 - DNA, 25 bp, Homo sapien
gcagacctggctgctgcaggtgcca

SEQ ID NO: 2555426 - DNA, 25 bp, Homo sapien
gccccaggcagaacttggaattcag

SEQ ID NO: 2555427 - DNA, 25 bp, Homo sapien
tgctgctgggataggcctgcttcac

SEQ ID NO: 2555428 - DNA, 25 bp, Homo sapien
gaaaggccattcctagagggctgcg

SEQ ID NO: 2555429 - DNA, 25 bp, Homo sapien
tctggaacgtcagatgaggtgcagc

SEQ ID NO: 2555430 - DNA, 25 bp, Homo sapien
gcttcatggtgccagggtgttcaga

SEQ ID NO: 2555431 - DNA, 25 bp, Homo sapien
aaggagggcaccccgctgcccgttg

SEQ ID NO: 2555432 - DNA, 25 bp, Homo sapien
ccaaatcttggtggcaaggagggca

SEQ ID NO: 2555433 - DNA, 25 bp, Homo sapien
gggaggacaggcattgggcttcatg

SEQ ID NO: 2555434 - DNA, 25 bp, Homo sapien
ccttcagtcgcaagctgggtgccag

SEQ ID NO: 2555435 - DNA, 25 bp, Homo sapien
gtttctaagcaatacgaggccacct

SEQ ID NO: 2555436 - DNA, 25 bp, Homo sapien
gcagccaggcccgttataaatgtat

SEQ ID NO: 2555437 - DNA, 25 bp, Homo sapien
tttggcaacagtgcgggtggtcctc

SEQ ID NO: 2555438 - DNA, 25 bp, Homo sapien
cccgccaaggcgtttgtttgtgctg

SEQ ID NO: 2555439 - DNA, 25 bp, Homo sapien
gagctgcaagcgcttattaatcgcc

SEQ ID NO: 2555440 - DNA, 25 bp, Homo sapien
taatcgccaacggtgtactcagctc

SEQ ID NO: 2555441 - DNA, 25 bp, Homo sapien
ccactgagggttctgcggtcgttgc

SEQ ID NO: 2555442 - DNA, 25 bp, Homo sapien
taacccggaagctaacagaagacag

SEQ ID NO: 2555443 - DNA, 25 bp, Homo sapien
ggataatgaatacataacccggaag

SEQ ID NO: 2555444 - DNA, 25 bp, Homo sapien
cagaagacagaaattaggccaggta

SEQ ID NO: 2555445 - DNA, 25 bp, Homo sapien
ctctaaggtagccattaaaggataa

SEQ ID NO: 2555446 - DNA, 25 bp, Homo sapien
cctttgaggcatacctctgacagaa

SEQ ID NO: 2555447 - DNA, 25 bp, Homo sapien
taatcatgcggaaagctaacagaag

SEQ ID NO: 2555448 - DNA, 25 bp, Homo sapien
tctgacagaaagcacgagatacagg

SEQ ID NO: 2555449 - DNA, 25 bp, Homo sapien
ggtcctgagatacagaaccccacgg

SEQ ID NO: 2555450 - DNA, 25 bp, Homo sapien
tctaagggaggctgcgggtcatcct

SEQ ID NO: 2555451 - DNA, 25 bp, Homo sapien
ttgcgcggggtctaagggaggctgc

SEQ ID NO: 2555452 - DNA, 25 bp, Homo sapien
cggctgcggtgtgcccgtgtgttgc

SEQ ID NO: 2555453 - DNA, 25 bp, Homo sapien
gctccggctgcggtgtgcccgtgtg

SEQ ID NO: 2555454 - DNA, 25 bp, Homo sapien
cctgtggttcttgtgggggctccaa

SEQ ID NO: 2555455 - DNA, 25 bp, Homo sapien
ctgctgtgtgccagcttgttcctgc

SEQ ID NO: 2555456 - DNA, 25 bp, Homo sapien
gctgtgtgccagcttgttcctgctc

SEQ ID NO: 2555457 - DNA, 25 bp, Homo sapien
tgggtgctccaagggggcctgtggt

SEQ ID NO: 2555458 - DNA, 25 bp, Homo sapien
gatccaaggggggttgtggctcctg

SEQ ID NO: 2555459 - DNA, 25 bp, Homo sapien
atccaagggtggctgtggttccggc

SEQ ID NO: 2555460 - DNA, 25 bp, Homo sapien
tggctcttgtgggggatccaagggt

SEQ ID NO: 2555461 - DNA, 25 bp, Homo sapien
caagggtggctgtggttccggctgt

SEQ ID NO: 2555462 - DNA, 25 bp, Homo sapien
cctgggcagggatataaagggtcca

SEQ ID NO: 2555463 - DNA, 25 bp, Homo sapien
gggcctccattaagtctggacacag

SEQ ID NO: 2555464 - DNA, 25 bp, Homo sapien
gagtcaacagggagaggctagaccc

SEQ ID NO: 2555465 - DNA, 25 bp, Homo sapien
cactgagcagcccatacaccaaggg

SEQ ID NO: 2555466 - DNA, 25 bp, Homo sapien
gactgccacgatgttccctgcactt

SEQ ID NO: 2555467 - DNA, 25 bp, Homo sapien
cctcctcactccagaaacgtgtgtt

SEQ ID NO: 2555468 - DNA, 25 bp, Homo sapien
aggtgtcctcgcctggacgcaggca

SEQ ID NO: 2555469 - DNA, 25 bp, Homo sapien
tgtttccctgatgcgggaggtgtcc

SEQ ID NO: 2555470 - DNA, 25 bp, Homo sapien
aagcatttcttatggttccctgagt

SEQ ID NO: 2555471 - DNA, 25 bp, Homo sapien
tgagtcagttcgtcccacacatcct

SEQ ID NO: 2555472 - DNA, 25 bp, Homo sapien
atttcttatggttccctgagtcagt

SEQ ID NO: 2555473 - DNA, 25 bp, Homo sapien
ggttccctgagtcagttcgtcccac

SEQ ID NO: 2555474 - DNA, 25 bp, Homo sapien
caaagaatggtctaacacacccgga

SEQ ID NO: 2555475 - DNA, 25 bp, Homo sapien
gcttcgccttccaccgtgaggaaaa

SEQ ID NO: 2555476 - DNA, 25 bp, Homo sapien
cacccggaaagctgagactggcatg

SEQ ID NO: 2555477 - DNA, 25 bp, Homo sapien
gaggctgttgcccattggtcacatg

SEQ ID NO: 2555478 - DNA, 25 bp, Homo sapien
aatcagatatctgataagcatctag

SEQ ID NO: 2555479 - DNA, 25 bp, Homo sapien
tctgataagcatctagtatctagag

SEQ ID NO: 2555480 - DNA, 25 bp, Homo sapien
tatttttgcaccaaaggacgctatc

SEQ ID NO: 2555481 - DNA, 25 bp, Homo sapien
gaacagtctacataataaaggaaga

SEQ ID NO: 2555482 - DNA, 25 bp, Homo sapien
tctatcaggaaagcagctggcttct

SEQ ID NO: 2555483 - DNA, 25 bp, Homo sapien
aagttgcttgcacccgatcttggac

SEQ ID NO: 2555484 - DNA, 25 bp, Homo sapien
gcaaagagtgggaaagcggccatct

SEQ ID NO: 2555485 - DNA, 25 bp, Homo sapien
tgttgttgggccaccaaatccgtgg

SEQ ID NO: 2555486 - DNA, 25 bp, Homo sapien
aatacgttgcaagaatggaaagggc

SEQ ID NO: 2555487 - DNA, 25 bp, Homo sapien
gatcccgtgtatctgactaccagtg

SEQ ID NO: 2555488 - DNA, 25 bp, Homo sapien
cataggagggctaagtcctgcacca

SEQ ID NO: 2555489 - DNA, 25 bp, Homo sapien
gagagggttacatgcagtgctgata

SEQ ID NO: 2555490 - DNA, 25 bp, Homo sapien
taggatcacacatactggactcact

SEQ ID NO: 2555491 - DNA, 25 bp, Homo sapien
tccaagtccactggtacaggtgtaa

SEQ ID NO: 2555492 - DNA, 25 bp, Homo sapien
tgcctctcctaggaagtagatctgg

SEQ ID NO: 2555493 - DNA, 25 bp, Homo sapien
tttcacactagccagagccttgagg

SEQ ID NO: 2555494 - DNA, 25 bp, Homo sapien
taaaacgtactgagagggtagatcc

SEQ ID NO: 2555495 - DNA, 25 bp, Homo sapien
cacagagtgcaagcatgggaaccag

SEQ ID NO: 2555496 - DNA, 25 bp, Homo sapien
aaagtgaccacaggtaacaacacgg

SEQ ID NO: 2555497 - DNA, 25 bp, Homo sapien
taaataaggcttggagacccaatgc

SEQ ID NO: 2555498 - DNA, 25 bp, Homo sapien
gacaacatggtgctgtggtaaacat

SEQ ID NO: 2555499 - DNA, 25 bp, Homo sapien
actgtgcactggactgctcggctcc

SEQ ID NO: 2555500 - DNA, 25 bp, Homo sapien
tggtaggagcacctggagtcttctc

SEQ ID NO: 2555501 - DNA, 25 bp, Homo sapien
tacatattcatggtggacaacatgg

SEQ ID NO: 2555502 - DNA, 25 bp, Homo sapien
gttcccagtccagctgctgtaagcc

SEQ ID NO: 2555503 - DNA, 25 bp, Homo sapien
tgttcccagtccagctgctgtaagc

SEQ ID NO: 2555504 - DNA, 25 bp, Homo sapien
tgcaaaccctgctgttcccagtcca

SEQ ID NO: 2555505 - DNA, 25 bp, Homo sapien
aaaccctgctgttcccagtccagct

SEQ ID NO: 2555506 - DNA, 25 bp, Homo sapien
gctgtaagccctgctgttcccagtc

SEQ ID NO: 2555507 - DNA, 25 bp, Homo sapien
ctgctgtaagccctgctgttcccag

SEQ ID NO: 2555508 - DNA, 25 bp, Homo sapien
cagctgctgtaagccctgctgttcc

SEQ ID NO: 2555509 - DNA, 25 bp, Homo sapien
tccagctgctgtaagccctgctgtt

SEQ ID NO: 2555510 - DNA, 25 bp, Homo sapien
gcagcacagtatgtttctcgcgacg

SEQ ID NO: 2555511 - DNA, 25 bp, Homo sapien
gaaggacttgcagaagaagcaacaa

SEQ ID NO: 2555512 - DNA, 25 bp, Homo sapien
ttcctgggatagtaaagtgctggct

SEQ ID NO: 2555513 - DNA, 25 bp, Homo sapien
tttctcgcgacgaagacggcagaca

SEQ ID NO: 2555514 - DNA, 25 bp, Homo sapien
ggtccattgatgaccttcgggttcg

SEQ ID NO: 2555515 - DNA, 25 bp, Homo sapien
ttggatcagctccttccctcgggta

SEQ ID NO: 2555516 - DNA, 25 bp, Homo sapien
ggcctttgttcttcgtggtccattg

SEQ ID NO: 2555517 - DNA, 25 bp, Homo sapien
cttggatcagctccttccctcgggt

SEQ ID NO: 2555518 - DNA, 25 bp, Homo sapien
tgatacattcgcatccagcgcctga

SEQ ID NO: 2555519 - DNA, 25 bp, Homo sapien
cagcgcctgatacattcgcatccag

SEQ ID NO: 2555520 - DNA, 25 bp, Homo sapien
ccagcgcctgatacattcgcatcca

SEQ ID NO: 2555521 - DNA, 25 bp, Homo sapien
gatacattcgcatccagcgcctgat

SEQ ID NO: 2555522 - DNA, 25 bp, Homo sapien
tgagggtggagcaggtagaggagca

SEQ ID NO: 2555523 - DNA, 25 bp, Homo sapien
ttctggtggattgagggtggagcag

SEQ ID NO: 2555524 - DNA, 25 bp, Homo sapien
ggttctggtggattgagggtggagc

SEQ ID NO: 2555525 - DNA, 25 bp, Homo sapien
ggtagaggagcaggtgagagggagg

SEQ ID NO: 2555526 - DNA, 25 bp, Homo sapien
gcacacagcagccggagccacatcc

SEQ ID NO: 2555527 - DNA, 25 bp, Homo sapien
cacagccggagccaaggcctccaca

SEQ ID NO: 2555528 - DNA, 25 bp, Homo sapien
acagcagccggagccacatccccca

SEQ ID NO: 2555529 - DNA, 25 bp, Homo sapien
ggagccacggcctccacagccggag

SEQ ID NO: 2555530 - DNA, 25 bp, Homo sapien
acaccccacaggagacacagcctct

SEQ ID NO: 2555531 - DNA, 25 bp, Homo sapien
ccacaggagacacagcctctcttgg

SEQ ID NO: 2555532 - DNA, 25 bp, Homo sapien
gcctctcttggagcccccgcaagag

SEQ ID NO: 2555533 - DNA, 25 bp, Homo sapien
ccacagccccctttgccacagctgg

SEQ ID NO: 2555534 - DNA, 25 bp, Homo sapien
actgggagcagccataagaaccaca

SEQ ID NO: 2555535 - DNA, 25 bp, Homo sapien
gcagcagggcttacagcagctgcac

SEQ ID NO: 2555536 - DNA, 25 bp, Homo sapien
tgcactgggagcagccataagaacc

SEQ ID NO: 2555537 - DNA, 25 bp, Homo sapien
ggagcagccataagaaccacagccc

SEQ ID NO: 2555538 - DNA, 25 bp, Homo sapien
tggactggcagcaggatgacccaca

SEQ ID NO: 2555539 - DNA, 25 bp, Homo sapien
ctggactggcagcaggatgacccac

SEQ ID NO: 2555540 - DNA, 25 bp, Homo sapien
ggactggcagcaggatgacccacag

SEQ ID NO: 2555541 - DNA, 25 bp, Homo sapien
gactggcagcaggatgacccacagc

SEQ ID NO: 2555542 - DNA, 25 bp, Homo sapien
agaagcagctacagggcttacagca

SEQ ID NO: 2555543 - DNA, 25 bp, Homo sapien
tgagaagcagctacagggcttacag

SEQ ID NO: 2555544 - DNA, 25 bp, Homo sapien
gagaagcagctacagggcttacagc

SEQ ID NO: 2555545 - DNA, 25 bp, Homo sapien
tcagtgggccgctttggatcttaaa

SEQ ID NO: 2555546 - DNA, 25 bp, Homo sapien
tatttagagggtcaggattcagtct

SEQ ID NO: 2555547 - DNA, 25 bp, Homo sapien
ccagagagattgagggtcgatcaca

SEQ ID NO: 2555548 - DNA, 25 bp, Homo sapien
ggagacagtggagcaccagagaacc

SEQ ID NO: 2555549 - DNA, 25 bp, Homo sapien
tgtcaacccttcgttgccacgatgc

SEQ ID NO: 2555550 - DNA, 25 bp, Homo sapien
cacgatgcatcgttgtgcaaatctg

SEQ ID NO: 2555551 - DNA, 25 bp, Homo sapien
tatttacaatatcaggcacatttgc

SEQ ID NO: 2555552 - DNA, 25 bp, Homo sapien
atctgatgctgggtctgatttgcca

SEQ ID NO: 2555553 - DNA, 25 bp, Homo sapien
caggacggagcctgtttgagcctgg

SEQ ID NO: 2555554 - DNA, 25 bp, Homo sapien
gagcctgtttgagcctggagccctc

SEQ ID NO: 2555555 - DNA, 25 bp, Homo sapien
acgcaacgtgcatcacgtccagttc

SEQ ID NO: 2555556 - DNA, 25 bp, Homo sapien
agcaaaatgcaaaacgcaacgtgca

SEQ ID NO: 2555557 - DNA, 25 bp, Homo sapien
cagcccatggtaaatggggcagatg

SEQ ID NO: 2555558 - DNA, 25 bp, Homo sapien
cttgcagcccatggtaaatggggca

SEQ ID NO: 2555559 - DNA, 25 bp, Homo sapien
gcagatggggtcacggcgctgccga

SEQ ID NO: 2555560 - DNA, 25 bp, Homo sapien
gggtcacggcgctgccgacccccag

SEQ ID NO: 2555561 - DNA, 25 bp, Homo sapien
cgggtttggaccaggtgcccgcact

SEQ ID NO: 2555562 - DNA, 25 bp, Homo sapien
gtgcccgcactgacgatgcagacct

SEQ ID NO: 2555563 - DNA, 25 bp, Homo sapien
accaggtgcccgcactgacgatgca

SEQ ID NO: 2555564 - DNA, 25 bp, Homo sapien
tttggaccaggtgcccgcactgacg

SEQ ID NO: 2555565 - DNA, 25 bp, Homo sapien
cagaagggcctttgagagggtcgcc

SEQ ID NO: 2555566 - DNA, 25 bp, Homo sapien
aagggcctttgagagggtcgcctct

SEQ ID NO: 2555567 - DNA, 25 bp, Homo sapien
cttctgtcgctgttccggtggagga

SEQ ID NO: 2555568 - DNA, 25 bp, Homo sapien
gagggtcgcctcttctgtcgctgtt

SEQ ID NO: 2555569 - DNA, 25 bp, Homo sapien
aagcacaagggacaccgcagaaatc

SEQ ID NO: 2555570 - DNA, 25 bp, Homo sapien
gaaatctgctctttacgctccaacc

SEQ ID NO: 2555571 - DNA, 25 bp, Homo sapien
gtccagcacatccaccgtgggggtg

SEQ ID NO: 2555572 - DNA, 25 bp, Homo sapien
cacatccaccgtgggggtgagcttg

SEQ ID NO: 2555573 - DNA, 25 bp, Homo sapien
aatatctgtgacacggagtgagcca

SEQ ID NO: 2555574 - DNA, 25 bp, Homo sapien
tgtttacctgatgtcgtgggcctga

SEQ ID NO: 2555575 - DNA, 25 bp, Homo sapien
taattacgaaatgtctcggcggtca

SEQ ID NO: 2555576 - DNA, 25 bp, Homo sapien
tgtgattgtccccagacaccgagag

SEQ ID NO: 2555577 - DNA, 25 bp, Homo sapien
agttcagtggtgctatctctactca

SEQ ID NO: 2555578 - DNA, 25 bp, Homo sapien
gtgagccgccgcgcccggccagcac

SEQ ID NO: 2555579 - DNA, 25 bp, Homo sapien
actgcagcctctgcctcctgggctc

SEQ ID NO: 2555580 - DNA, 25 bp, Homo sapien
aagtgatcctcccacgtcagcctcc

SEQ ID NO: 2555581 - DNA, 25 bp, Homo sapien
ttatttatttcgagacgagtctctc

SEQ ID NO: 2555582 - DNA, 25 bp, Homo sapien
atttatttcgagacgagtctctctc

SEQ ID NO: 2555583 - DNA, 25 bp, Homo sapien
gtatttatttatttcgagacgagtc

SEQ ID NO: 2555584 - DNA, 25 bp, Homo sapien
atttatttatttcgagacgagtctc

SEQ ID NO: 2555585 - DNA, 25 bp, Homo sapien
gccccgctccggcactgggatttgg

SEQ ID NO: 2555586 - DNA, 25 bp, Homo sapien
actgagggcggtgacgtaggcagcg

SEQ ID NO: 2555587 - DNA, 25 bp, Homo sapien
gtggcagcgggtggcagagccgggc

SEQ ID NO: 2555588 - DNA, 25 bp, Homo sapien
ggtgacgtaggcagcgggtgccggt

SEQ ID NO: 2555589 - DNA, 25 bp, Homo sapien
agattagccgtggccttgtgccagc

SEQ ID NO: 2555590 - DNA, 25 bp, Homo sapien
ctgagagcagattagccgtggcctt

SEQ ID NO: 2555591 - DNA, 25 bp, Homo sapien
agcagattagccgtggccttgtgcc

SEQ ID NO: 2555592 - DNA, 25 bp, Homo sapien
tctgagagcagattagccgtggcct

SEQ ID NO: 2555593 - DNA, 25 bp, Homo sapien
cccgggagatctggtaaggacatca

SEQ ID NO: 2555594 - DNA, 25 bp, Homo sapien
tcccatccagtatcctagaggagga

SEQ ID NO: 2555595 - DNA, 25 bp, Homo sapien
gcaggtggatgttggaagccgcaga

SEQ ID NO: 2555596 - DNA, 25 bp, Homo sapien
tctggtaaggacatcagtgtctcca

SEQ ID NO: 2555597 - DNA, 25 bp, Homo sapien
atgggttcgggagccattctgtgcc

SEQ ID NO: 2555598 - DNA, 25 bp, Homo sapien
ttctccggaccggagcgatgggttc

SEQ ID NO: 2555599 - DNA, 25 bp, Homo sapien
gagccattctgtgcctgtctttgct

SEQ ID NO: 2555600 - DNA, 25 bp, Homo sapien
gggacagcgaatggagcgtggaggg

SEQ ID NO: 2555601 - DNA, 25 bp, Homo sapien
tcttgtgatacagggtgagttccca

SEQ ID NO: 2555602 - DNA, 25 bp, Homo sapien
caaaattaccctgcgaagccgccat

SEQ ID NO: 2555603 - DNA, 25 bp, Homo sapien
tccccgagccgaaggtgaggaatcc

SEQ ID NO: 2555604 - DNA, 25 bp, Homo sapien
taccacgacctggatgtagtcagtg

SEQ ID NO: 2555605 - DNA, 25 bp, Homo sapien
tctgtggctccggtgccccggaggc

SEQ ID NO: 2555606 - DNA, 25 bp, Homo sapien
cgtggtggctctgtggctccggtgc

SEQ ID NO: 2555607 - DNA, 25 bp, Homo sapien
caaaagcaaagcgtggtggctctgt

SEQ ID NO: 2555608 - DNA, 25 bp, Homo sapien
caaagcgtggtggctctgtggctcc

SEQ ID NO: 2555609 - DNA, 25 bp, Homo sapien
aacgtcacaacagctcacagtcagg

SEQ ID NO: 2555610 - DNA, 25 bp, Homo sapien
tgatgaccacacgtatgagaaatgg

SEQ ID NO: 2555611 - DNA, 25 bp, Homo sapien
cctttccgagcaaagtggcaacgtc

SEQ ID NO: 2555612 - DNA, 25 bp, Homo sapien
aatacactaaacctcacaaaatggg

SEQ ID NO: 2555613 - DNA, 25 bp, Homo sapien
agggacattcaagagccgggctctc

SEQ ID NO: 2555614 - DNA, 25 bp, Homo sapien
ccctggagagtggaagcgggtgcgt

SEQ ID NO: 2555615 - DNA, 25 bp, Homo sapien
caagagccgggctctcagaacctgg

SEQ ID NO: 2555616 - DNA, 25 bp, Homo sapien
ggctctcagaacctgggtgtctgtg

SEQ ID NO: 2555617 - DNA, 25 bp, Homo sapien
ttctcggtctcccctttagtctctc

SEQ ID NO: 2555618 - DNA, 25 bp, Homo sapien
tggattgagggtggagcaggtagag

SEQ ID NO: 2555619 - DNA, 25 bp, Homo sapien
ctggtggattgagggtggagcaggt

SEQ ID NO: 2555620 - DNA, 25 bp, Homo sapien
tgagggtggagcaggtagaggagca

SEQ ID NO: 2555621 - DNA, 25 bp, Homo sapien
gagggtggagcaggtagaggagcag

SEQ ID NO: 2555622 - DNA, 25 bp, Homo sapien
agggcttgcagcaactgcactggga

SEQ ID NO: 2555623 - DNA, 25 bp, Homo sapien
caagagccacagctggtgcaggaac

SEQ ID NO: 2555624 - DNA, 25 bp, Homo sapien
ctgaggaacagtagcagggcttgca

SEQ ID NO: 2555625 - DNA, 25 bp, Homo sapien
gcaggatgacccacagcctgaggaa

SEQ ID NO: 2555626 - DNA, 25 bp, Homo sapien
tcagattttgcactggcagcaaatg

SEQ ID NO: 2555627 - DNA, 25 bp, Homo sapien
ggacacagcagctggcctgggaaca

SEQ ID NO: 2555628 - DNA, 25 bp, Homo sapien
gggaacagcagggcttgcagcagct

SEQ ID NO: 2555629 - DNA, 25 bp, Homo sapien
cagctggcctgggaacagcagggct

SEQ ID NO: 2555630 - DNA, 25 bp, Homo sapien
aaatgcagcactggtcacttcttgg

SEQ ID NO: 2555631 - DNA, 25 bp, Homo sapien
gtcacttcttgggtggtgtggatat

SEQ ID NO: 2555632 - DNA, 25 bp, Homo sapien
agaactgaaatgcagcactggtcac

SEQ ID NO: 2555633 - DNA, 25 bp, Homo sapien
cacttcttgggtggtgtggatatgc

SEQ ID NO: 2555634 - DNA, 25 bp, Homo sapien
cctgagaagtagtgggcaggtccac

SEQ ID NO: 2555635 - DNA, 25 bp, Homo sapien
cgcccattgaaggacgcctggattt

SEQ ID NO: 2555636 - DNA, 25 bp, Homo sapien
ttccataagctgaacgagccccaac

SEQ ID NO: 2555637 - DNA, 25 bp, Homo sapien
tgtttttgacatcaccctagggaat

SEQ ID NO: 2555638 - DNA, 25 bp, Homo sapien
gaaggttatttattctccactgttg

SEQ ID NO: 2555639 - DNA, 25 bp, Homo sapien
ggcttcaagtagttctctcccacgc

SEQ ID NO: 2555640 - DNA, 25 bp, Homo sapien
tctagcaattatggagggaagattc

SEQ ID NO: 2555641 - DNA, 25 bp, Homo sapien
tctcccacgcatgtgccattcagtg

SEQ ID NO: 2555642 - DNA, 25 bp, Homo sapien
ggacagtccttgacacgaggtggag

SEQ ID NO: 2555643 - DNA, 25 bp, Homo sapien
aggcctgtggcagtacgatgacgta

SEQ ID NO: 2555644 - DNA, 25 bp, Homo sapien
cgatgacgtaggcatttgcaaagca

SEQ ID NO: 2555645 - DNA, 25 bp, Homo sapien
ggacaatgccaacaaggtcagcagg

SEQ ID NO: 2555646 - DNA, 25 bp, Homo sapien
cccggaggcctcatccaatgtttct

SEQ ID NO: 2555647 - DNA, 25 bp, Homo sapien
tgggagacccgacacccctctgatg

SEQ ID NO: 2555648 - DNA, 25 bp, Homo sapien
tctttgatagcatggcggtctccca

SEQ ID NO: 2555649 - DNA, 25 bp, Homo sapien
atgaaagacgttggcgtagggatcc

SEQ ID NO: 2555650 - DNA, 25 bp, Homo sapien
ctggttgtgggcacttcggatgctt

SEQ ID NO: 2555651 - DNA, 25 bp, Homo sapien
gcttgcaccattagacccagaggct

SEQ ID NO: 2555652 - DNA, 25 bp, Homo sapien
gctgaaagccttgccgagactgtgg

SEQ ID NO: 2555653 - DNA, 25 bp, Homo sapien
gcacggagctgtcattgagcctctt

SEQ ID NO: 2555654 - DNA, 25 bp, Homo sapien
tctgttgtcctccccttgggcggct

SEQ ID NO: 2555655 - DNA, 25 bp, Homo sapien
tgtcctccccttgggcggctgagag

SEQ ID NO: 2555656 - DNA, 25 bp, Homo sapien
tgttgtcctccccttgggcggctga

SEQ ID NO: 2555657 - DNA, 25 bp, Homo sapien
ttgtcctccccttgggcggctgaga

SEQ ID NO: 2555658 - DNA, 25 bp, Homo sapien
agtcccaggggcatgtattggcctg

SEQ ID NO: 2555659 - DNA, 25 bp, Homo sapien
ccaggggcatgtattggcctggagg

SEQ ID NO: 2555660 - DNA, 25 bp, Homo sapien
cagtcccaggggcatgtattggcct

SEQ ID NO: 2555661 - DNA, 25 bp, Homo sapien
tcccaggggcatgtattggcctgga

SEQ ID NO: 2555662 - DNA, 25 bp, Homo sapien
cctgttcagtgtcccgggcccgttg

SEQ ID NO: 2555663 - DNA, 25 bp, Homo sapien
tccctgggttcagaaatgctgcctg

SEQ ID NO: 2555664 - DNA, 25 bp, Homo sapien
tggcagccgagctcgtgtatcctgg

SEQ ID NO: 2555665 - DNA, 25 bp, Homo sapien
tctgtttcgtgcattggaagacccc

SEQ ID NO: 2555666 - DNA, 25 bp, Homo sapien
tctggaagccacctagcaagctggg

SEQ ID NO: 2555667 - DNA, 25 bp, Homo sapien
cctgtcattgcagggtcttggtcct

SEQ ID NO: 2555668 - DNA, 25 bp, Homo sapien
gagcaagcagatgcacgcatgcgca

SEQ ID NO: 2555669 - DNA, 25 bp, Homo sapien
agttcctgattgtcctagcgcgcga

SEQ ID NO: 2555670 - DNA, 25 bp, Homo sapien
tgcggatgcccagaaacagatgtgg

SEQ ID NO: 2555671 - DNA, 25 bp, Homo sapien
tcaggaccccgatctcagtctggag

SEQ ID NO: 2555672 - DNA, 25 bp, Homo sapien
gcgggtgaccacttcttaggactgt

SEQ ID NO: 2555673 - DNA, 25 bp, Homo sapien
gacaggatcccgctgcacaagttca

SEQ ID NO: 2555674 - DNA, 25 bp, Homo sapien
gagggacggtgccacgttggagaca

SEQ ID NO: 2555675 - DNA, 25 bp, Homo sapien
cacgttggagacaggcctccaggga

SEQ ID NO: 2555676 - DNA, 25 bp, Homo sapien
ccagggacggtgccacgttagagat

SEQ ID NO: 2555677 - DNA, 25 bp, Homo sapien
cagggacggtgccacgttggagatg

SEQ ID NO: 2555678 - DNA, 25 bp, Homo sapien
gctctgtgggcatgcgtcctcacag

SEQ ID NO: 2555679 - DNA, 25 bp, Homo sapien
ggtgcgtatctcagtatcctggaca

SEQ ID NO: 2555680 - DNA, 25 bp, Homo sapien
tggagtgtcggccacgctctgtggg

SEQ ID NO: 2555681 - DNA, 25 bp, Homo sapien
accaaatgcttcgtccaccactgga

SEQ ID NO: 2555682 - DNA, 25 bp, Homo sapien
actgctccaaagagagggggtgtca

SEQ ID NO: 2555683 - DNA, 25 bp, Homo sapien
gccccagacccgtttgtccagctgc

SEQ ID NO: 2555684 - DNA, 25 bp, Homo sapien
tgacattcagggagggagtgaactt

SEQ ID NO: 2555685 - DNA, 25 bp, Homo sapien
cagggagggagtgaactttccacta

SEQ ID NO: 2555686 - DNA, 25 bp, Homo sapien
ctggacttgggcttcagcggtcgct

SEQ ID NO: 2555687 - DNA, 25 bp, Homo sapien
gcggtcgctggtgcatgacattcag

SEQ ID NO: 2555688 - DNA, 25 bp, Homo sapien
ccttgtactgtctcactttgtgagg

SEQ ID NO: 2555689 - DNA, 25 bp, Homo sapien
aatgcttgcatctttcggtagccag

SEQ ID NO: 2555690 - DNA, 25 bp, Homo sapien
catctttcggtagccagcattctct

SEQ ID NO: 2555691 - DNA, 25 bp, Homo sapien
gaatccttgccgtccttgtactgtc

SEQ ID NO: 2555692 - DNA, 25 bp, Homo sapien
tattgtcttcataataaaagatggc

SEQ ID NO: 2555693 - DNA, 25 bp, Homo sapien
tgtcttcataataaaagatggcact

SEQ ID NO: 2555694 - DNA, 25 bp, Homo sapien
cataataaaagatggcacttggaac

SEQ ID NO: 2555695 - DNA, 25 bp, Homo sapien
cttcataataaaagatggcacttgg

SEQ ID NO: 2555696 - DNA, 25 bp, Homo sapien
ccactgtgggcagacgtcactgcgt

SEQ ID NO: 2555697 - DNA, 25 bp, Homo sapien
ctgtgggcagacgtcactgcgtaca

SEQ ID NO: 2555698 - DNA, 25 bp, Homo sapien
gccgtgagcaaacgccctgcgtgca

SEQ ID NO: 2555699 - DNA, 25 bp, Homo sapien
ctgccgtgagcaaacgccctgcgtg

SEQ ID NO: 2555700 - DNA, 25 bp, Homo sapien
ggctatgggatacgcaggggccgtc

SEQ ID NO: 2555701 - DNA, 25 bp, Homo sapien
gagatgagcgggcaggctatgggat

SEQ ID NO: 2555702 - DNA, 25 bp, Homo sapien
atacgcaggggccgtctgggctctc

SEQ ID NO: 2555703 - DNA, 25 bp, Homo sapien
ggcccccgtgggagagatgagcggg

SEQ ID NO: 2555704 - DNA, 25 bp, Homo sapien
agagacagtctgtgcattgtcgccc

SEQ ID NO: 2555705 - DNA, 25 bp, Homo sapien
caatgcaaaccctcatactgctggc

SEQ ID NO: 2555706 - DNA, 25 bp, Homo sapien
gcattgtcgccctgttccaagaaca

SEQ ID NO: 2555707 - DNA, 25 bp, Homo sapien
cctcatactgctggcactagcagca

SEQ ID NO: 2555708 - DNA, 25 bp, Homo sapien
gcagctctctcagcgcaggtgcagc

SEQ ID NO: 2555709 - DNA, 25 bp, Homo sapien
gagtgtgggtgatattgcacacatc

SEQ ID NO: 2555710 - DNA, 25 bp, Homo sapien
agtgtgggtgatattgcacacatct

SEQ ID NO: 2555711 - DNA, 25 bp, Homo sapien
tctgagtggtgtgtgtctggaatcc

SEQ ID NO: 2555712 - DNA, 25 bp, Homo sapien
tttccccagtatatgggcgccttca

SEQ ID NO: 2555713 - DNA, 25 bp, Homo sapien
tatgggcgccttcacagccagactg

SEQ ID NO: 2555714 - DNA, 25 bp, Homo sapien
tccccagtatatgggcgccttcaca

SEQ ID NO: 2555715 - DNA, 25 bp, Homo sapien
gctgtgtaggggctttgtactttcc

SEQ ID NO: 2555716 - DNA, 25 bp, Homo sapien
ctggctgaacctggtttgagcaggt

SEQ ID NO: 2555717 - DNA, 25 bp, Homo sapien
gatgggcccgtcaggctggccttgg

SEQ ID NO: 2555718 - DNA, 25 bp, Homo sapien
gaggtggcctggctgaacctggttt

SEQ ID NO: 2555719 - DNA, 25 bp, Homo sapien
ggcgatgggcccgtcaggctggcct

SEQ ID NO: 2555720 - DNA, 25 bp, Homo sapien
tgcctctggtgacggggaactctct

SEQ ID NO: 2555721 - DNA, 25 bp, Homo sapien
ttcctctcagacacccgaaggcggg

SEQ ID NO: 2555722 - DNA, 25 bp, Homo sapien
cgggtccagctctcggacagcactg

SEQ ID NO: 2555723 - DNA, 25 bp, Homo sapien
cgaaggcgggtccagctctcggaca

SEQ ID NO: 2555724 - DNA, 25 bp, Homo sapien
cgctccagcgggctccttaaggctc

SEQ ID NO: 2555725 - DNA, 25 bp, Homo sapien
gctccagcgggctccttaaggctct

SEQ ID NO: 2555726 - DNA, 25 bp, Homo sapien
caccgctccagcgggctccttaagg

SEQ ID NO: 2555727 - DNA, 25 bp, Homo sapien
ccgctccagcgggctccttaaggct

SEQ ID NO: 2555728 - DNA, 25 bp, Homo sapien
cagtgttcagatgagggggctgcag

SEQ ID NO: 2555729 - DNA, 25 bp, Homo sapien
ccacacgcatgttgaccctgtgagg

SEQ ID NO: 2555730 - DNA, 25 bp, Homo sapien
ccagtgttcagatgagggggctgca

SEQ ID NO: 2555731 - DNA, 25 bp, Homo sapien
acacgcatgttgaccctgtgaggtc

SEQ ID NO: 2555732 - DNA, 25 bp, Homo sapien
gctgggagcggccagaacattccac

SEQ ID NO: 2555733 - DNA, 25 bp, Homo sapien
taagcagctgttgaggccagatacc

SEQ ID NO: 2555734 - DNA, 25 bp, Homo sapien
tggctcctgtcacctacaggcaggg

SEQ ID NO: 2555735 - DNA, 25 bp, Homo sapien
ccatcccatcgggaataagcagctg

SEQ ID NO: 2555736 - DNA, 25 bp, Homo sapien
catggtttgccagccatgcaggtgg

SEQ ID NO: 2555737 - DNA, 25 bp, Homo sapien
gtttgccagccatgcaggtggagca

SEQ ID NO: 2555738 - DNA, 25 bp, Homo sapien
tttgccagccatgcaggtggagcat

SEQ ID NO: 2555739 - DNA, 25 bp, Homo sapien
tggtttgccagccatgcaggtggag

SEQ ID NO: 2555740 - DNA, 25 bp, Homo sapien
gggtctcatctctgcggtcccatca

SEQ ID NO: 2555741 - DNA, 25 bp, Homo sapien
taccccatctgactagcagcagcca

SEQ ID NO: 2555742 - DNA, 25 bp, Homo sapien
acttccttgcctctaccccagcacg

SEQ ID NO: 2555743 - DNA, 25 bp, Homo sapien
actgtaggatgcgtcctccaccagg

SEQ ID NO: 2555744 - DNA, 25 bp, Homo sapien
cggcgacaaggtctggaataagccc

SEQ ID NO: 2555745 - DNA, 25 bp, Homo sapien
tcccggcgacaaggtctggaataag

SEQ ID NO: 2555746 - DNA, 25 bp, Homo sapien
ggtcccggcgacaaggtctggaata

SEQ ID NO: 2555747 - DNA, 25 bp, Homo sapien
gcgacaaggtctggaataagcccag

SEQ ID NO: 2555748 - DNA, 25 bp, Homo sapien
cacttggctgggttatccccacacc

SEQ ID NO: 2555749 - DNA, 25 bp, Homo sapien
tggctgggttatccccacacccctc

SEQ ID NO: 2555750 - DNA, 25 bp, Homo sapien
tatccccacacccctcttgggaatc

SEQ ID NO: 2555751 - DNA, 25 bp, Homo sapien
ctgggttatccccacacccctcttg

SEQ ID NO: 2555752 - DNA, 25 bp, Homo sapien
ggcaagggcgccggcaatgagagcc

SEQ ID NO: 2555753 - DNA, 25 bp, Homo sapien
caggagacgaggaggacgcccgcgg

SEQ ID NO: 2555754 - DNA, 25 bp, Homo sapien
caagggcgccggcaatgagagccca

SEQ ID NO: 2555755 - DNA, 25 bp, Homo sapien
agacgaggaggacgcccgcggcaag

SEQ ID NO: 2555756 - DNA, 25 bp, Homo sapien
cggactccttgtccctgggcttctt

SEQ ID NO: 2555757 - DNA, 25 bp, Homo sapien
tggtggtggtgccgcgggcactgcc

SEQ ID NO: 2555758 - DNA, 25 bp, Homo sapien
cacggactccttgtccctgggcttc

SEQ ID NO: 2555759 - DNA, 25 bp, Homo sapien
cccacggactccttgtccctgggct

SEQ ID NO: 2555760 - DNA, 25 bp, Homo sapien
ctctggactgagtgagcaaggagcc

SEQ ID NO: 2555761 - DNA, 25 bp, Homo sapien
cctctctggactgagtgagcaagga

SEQ ID NO: 2555762 - DNA, 25 bp, Homo sapien
gcctggatttcaagccctctctgga

SEQ ID NO: 2555763 - DNA, 25 bp, Homo sapien
ctctggagcctggatttcaagccct

SEQ ID NO: 2555764 - DNA, 25 bp, Homo sapien
ggcttcgctctgtgagaccggccaa

SEQ ID NO: 2555765 - DNA, 25 bp, Homo sapien
aacccacccaaaacgtggcatctgg

SEQ ID NO: 2555766 - DNA, 25 bp, Homo sapien
gcatgacatgggtcaagaccccccg

SEQ ID NO: 2555767 - DNA, 25 bp, Homo sapien
acccaacaggcacaaatcgtcggct

SEQ ID NO: 2555768 - DNA, 25 bp, Homo sapien
ggcttccaaagtcgaactccaggga

SEQ ID NO: 2555769 - DNA, 25 bp, Homo sapien
tggcttccaaagtcgaactccaggg

SEQ ID NO: 2555770 - DNA, 25 bp, Homo sapien
cctggcttccaaagtcgaactccag

SEQ ID NO: 2555771 - DNA, 25 bp, Homo sapien
gcttccaaagtcgaactccagggag

SEQ ID NO: 2555772 - DNA, 25 bp, Homo sapien
gaaactcgcagaaccgctggtcctg

SEQ ID NO: 2555773 - DNA, 25 bp, Homo sapien
cagaaccgctggtcctgcgcagcgg

SEQ ID NO: 2555774 - DNA, 25 bp, Homo sapien
tcgcagaaccgctggtcctgcgcag

SEQ ID NO: 2555775 - DNA, 25 bp, Homo sapien
ctttccggaaactcgcagaaccgct

SEQ ID NO: 2555776 - DNA, 25 bp, Homo sapien
tcagccaagggcccctgccctgtca

SEQ ID NO: 2555777 - DNA, 25 bp, Homo sapien
ggcccctgccctgtcagctccccac

SEQ ID NO: 2555778 - DNA, 25 bp, Homo sapien
cagggcatggggtctgcccttcccc

SEQ ID NO: 2555779 - DNA, 25 bp, Homo sapien
ccaccacccagggcatggggtctgc

SEQ ID NO: 2555780 - DNA, 25 bp, Homo sapien
gtctcatgtctgtgtccggcctggg

SEQ ID NO: 2555781 - DNA, 25 bp, Homo sapien
tgcctcggtgcacttttgtctcatg

SEQ ID NO: 2555782 - DNA, 25 bp, Homo sapien
tggagacgctgacccgggcataggg

SEQ ID NO: 2555783 - DNA, 25 bp, Homo sapien
tcaaacacggggcagagcgtgcctc

SEQ ID NO: 2555784 - DNA, 25 bp, Homo sapien
acccagccgaccatccctgactcac

SEQ ID NO: 2555785 - DNA, 25 bp, Homo sapien
aggcccacccagccgaccatccctg

SEQ ID NO: 2555786 - DNA, 25 bp, Homo sapien
gcccacccagccgaccatccctgac

SEQ ID NO: 2555787 - DNA, 25 bp, Homo sapien
ccacccagccgaccatccctgactc

SEQ ID NO: 2555788 - DNA, 25 bp, Homo sapien
gaacatgctgcagatccacggtgcc

SEQ ID NO: 2555789 - DNA, 25 bp, Homo sapien
ggtaccagtgctccagaacatgctg

SEQ ID NO: 2555790 - DNA, 25 bp, Homo sapien
catgccccgagaagcgcttgaagtt

SEQ ID NO: 2555791 - DNA, 25 bp, Homo sapien
cagtggcagacggagctcacccagg

SEQ ID NO: 2555792 - DNA, 25 bp, Homo sapien
cgatggcccatagggcagggtccct

SEQ ID NO: 2555793 - DNA, 25 bp, Homo sapien
ggagggtgattctggccgagttggg

SEQ ID NO: 2555794 - DNA, 25 bp, Homo sapien
catcaggcctgtctttccgatggcc

SEQ ID NO: 2555795 - DNA, 25 bp, Homo sapien
ttcagcccgggagggtgattctggc

SEQ ID NO: 2555796 - DNA, 25 bp, Homo sapien
gctgggcacgtaccggagagagaag

SEQ ID NO: 2555797 - DNA, 25 bp, Homo sapien
gacgcaggcctcgagcctccagcac

SEQ ID NO: 2555798 - DNA, 25 bp, Homo sapien
ctgagctgggcacgtaccggagaga

SEQ ID NO: 2555799 - DNA, 25 bp, Homo sapien
agctgggcacgtaccggagagagaa

SEQ ID NO: 2555800 - DNA, 25 bp, Homo sapien
atgagctggaccttcacgtagggct

SEQ ID NO: 2555801 - DNA, 25 bp, Homo sapien
gcatgagctggaccttcacgtaggg

SEQ ID NO: 2555802 - DNA, 25 bp, Homo sapien
cagcatgagctggaccttcacgtag

SEQ ID NO: 2555803 - DNA, 25 bp, Homo sapien
gaaggtgaaggcctcattgaagtag

SEQ ID NO: 2555804 - DNA, 25 bp, Homo sapien
gggctcagttcggagcggcaggctg

SEQ ID NO: 2555805 - DNA, 25 bp, Homo sapien
agacagccagcaccaggtccacatt

SEQ ID NO: 2555806 - DNA, 25 bp, Homo sapien
agttcggagcggcaggctgcggtcc

SEQ ID NO: 2555807 - DNA, 25 bp, Homo sapien
aggctgcggtcccagacagccagca

SEQ ID NO: 2555808 - DNA, 25 bp, Homo sapien
cccgggcacccaggtgcaccttgcc

SEQ ID NO: 2555809 - DNA, 25 bp, Homo sapien
cgggcacccaggtgcaccttgccta

SEQ ID NO: 2555810 - DNA, 25 bp, Homo sapien
cagggggtgccgctgggcaatgggc

SEQ ID NO: 2555811 - DNA, 25 bp, Homo sapien
gccgccgggcgtgggccagcatgtc

SEQ ID NO: 2555812 - DNA, 25 bp, Homo sapien
gggcaagggcaggcgcaggcgaagg

SEQ ID NO: 2555813 - DNA, 25 bp, Homo sapien
ggagtggggcaagggcaggcgcagg

SEQ ID NO: 2555814 - DNA, 25 bp, Homo sapien
aggcgaaggcggggctgcagggcca

SEQ ID NO: 2555815 - DNA, 25 bp, Homo sapien
caggcgaaggcggggctgcagggcc

SEQ ID NO: 2555816 - DNA, 25 bp, Homo sapien
cggggagacagaggcatgtggtgca

SEQ ID NO: 2555817 - DNA, 25 bp, Homo sapien
gcggggagacagaggcatgtggtgc

SEQ ID NO: 2555818 - DNA, 25 bp, Homo sapien
ggggagacagaggcatgtggtgcat

SEQ ID NO: 2555819 - DNA, 25 bp, Homo sapien
ggcgtttattgcagtggtcctgcag

SEQ ID NO: 2555820 - DNA, 25 bp, Homo sapien
aaggcgtttattgcagtggtcctgc

SEQ ID NO: 2555821 - DNA, 25 bp, Homo sapien
gagaaggcgtttattgcagtggtcc

SEQ ID NO: 2555822 - DNA, 25 bp, Homo sapien
gcaggagaaggcgtttattgcagtg

SEQ ID NO: 2555823 - DNA, 25 bp, Homo sapien
attgggagcctctcacacccgtggg

SEQ ID NO: 2555824 - DNA, 25 bp, Homo sapien
ggcaggcctggcattgcccttttca

SEQ ID NO: 2555825 - DNA, 25 bp, Homo sapien
gcaggcctggcattgcccttttcac

SEQ ID NO: 2555826 - DNA, 25 bp, Homo sapien
tgcattgggagcctctcacacccgt

SEQ ID NO: 2555827 - DNA, 25 bp, Homo sapien
tagaatctgggcagcagggctggga

SEQ ID NO: 2555828 - DNA, 25 bp, Homo sapien
gaatctgggcagcagggctgggagc

SEQ ID NO: 2555829 - DNA, 25 bp, Homo sapien
aatctgggcagcagggctgggagcg

SEQ ID NO: 2555830 - DNA, 25 bp, Homo sapien
ctagaatctgggcagcagggctggg

SEQ ID NO: 2555831 - DNA, 25 bp, Homo sapien
tcaaggacaatgtcttggaattccc

SEQ ID NO: 2555832 - DNA, 25 bp, Homo sapien
gacaatgtcttggaattccccaggg

SEQ ID NO: 2555833 - DNA, 25 bp, Homo sapien
aaggacaatgtcttggaattcccca

SEQ ID NO: 2555834 - DNA, 25 bp, Homo sapien
ggacaatgtcttggaattccccagg

SEQ ID NO: 2555835 - DNA, 25 bp, Homo sapien
gggccgtgatggccctgttccgctt

SEQ ID NO: 2555836 - DNA, 25 bp, Homo sapien
ctgcgggccgtgatggccctgttcc

SEQ ID NO: 2555837 - DNA, 25 bp, Homo sapien
tgcctgcgggccgtgatggccctgt

SEQ ID NO: 2555838 - DNA, 25 bp, Homo sapien
gctgcctgcgggccgtgatggccct

SEQ ID NO: 2555839 - DNA, 25 bp, Homo sapien
gcggcgggcagtgctccgccaggta

SEQ ID NO: 2555840 - DNA, 25 bp, Homo sapien
tgcttctctgcctcacggcggctct

SEQ ID NO: 2555841 - DNA, 25 bp, Homo sapien
ttctccagctccgtggccgctatct

SEQ ID NO: 2555842 - DNA, 25 bp, Homo sapien
ttcagacatggagcccgggatatgc

SEQ ID NO: 2555843 - DNA, 25 bp, Homo sapien
ctcttcagccgcatcgatcttggcg

SEQ ID NO: 2555844 - DNA, 25 bp, Homo sapien
gccgcatcgatcttggcgtgcagct

SEQ ID NO: 2555845 - DNA, 25 bp, Homo sapien
cttggcgtgcagctgtttgcagagc

SEQ ID NO: 2555846 - DNA, 25 bp, Homo sapien
tcacctccatgtcgtacttctcctc

SEQ ID NO: 2555847 - DNA, 25 bp, Homo sapien
ttcaggttggccctcaggtccatgc

SEQ ID NO: 2555848 - DNA, 25 bp, Homo sapien
gaacttgccccgcagatcaaatagc

SEQ ID NO: 2555849 - DNA, 25 bp, Homo sapien
gacatgcgcaccctccgcagtgggg

SEQ ID NO: 2555850 - DNA, 25 bp, Homo sapien
ctcaggtccatgcacaccttgtgct

SEQ ID NO: 2555851 - DNA, 25 bp, Homo sapien
agtcacccacgtctcgcaggtcccg

SEQ ID NO: 2555852 - DNA, 25 bp, Homo sapien
ccagtcacccacgtctcgcaggtcc

SEQ ID NO: 2555853 - DNA, 25 bp, Homo sapien
tccagtcacccacgtctcgcaggtc

SEQ ID NO: 2555854 - DNA, 25 bp, Homo sapien
cagtcacccacgtctcgcaggtccc

SEQ ID NO: 2555855 - DNA, 25 bp, Homo sapien
aatcctttattgacggtggtggtga

SEQ ID NO: 2555856 - DNA, 25 bp, Homo sapien
gctctgggtgcatctccctagtatg

SEQ ID NO: 2555857 - DNA, 25 bp, Homo sapien
ttcaaatcctttattgacggtggtg

SEQ ID NO: 2555858 - DNA, 25 bp, Homo sapien
cctagtatgttctgctgggagccgg

SEQ ID NO: 2555859 - DNA, 25 bp, Homo sapien
gtgaggcaggcgctctcatctccat

SEQ ID NO: 2555860 - DNA, 25 bp, Homo sapien
cagtgaggcaggcgctctcatctcc

SEQ ID NO: 2555861 - DNA, 25 bp, Homo sapien
agtgaggcaggcgctctcatctcca

SEQ ID NO: 2555862 - DNA, 25 bp, Homo sapien
ccagtgaggcaggcgctctcatctc

SEQ ID NO: 2555863 - DNA, 25 bp, Homo sapien
tggtgtgatattcagcagctgggtg

SEQ ID NO: 2555864 - DNA, 25 bp, Homo sapien
cttcacggaggaggtgaccatgctg

SEQ ID NO: 2555865 - DNA, 25 bp, Homo sapien
gcttcacggaggaggtgaccatgct

SEQ ID NO: 2555866 - DNA, 25 bp, Homo sapien
gaggggcagccgcagagactggagc

SEQ ID NO: 2555867 - DNA, 25 bp, Homo sapien
cgcagagactggagcctgccaggac

SEQ ID NO: 2555868 - DNA, 25 bp, Homo sapien
tgccaggacgcaggccttcccgatg

SEQ ID NO: 2555869 - DNA, 25 bp, Homo sapien
tggagcctgccaggacgcaggcctt

SEQ ID NO: 2555870 - DNA, 25 bp, Homo sapien
gaggaagctcgtggaaaccgtgcct

SEQ ID NO: 2555871 - DNA, 25 bp, Homo sapien
tctccactatttggcggcgtcagag

SEQ ID NO: 2555872 - DNA, 25 bp, Homo sapien
ccaatgccgcgctgattctcggcgg

SEQ ID NO: 2555873 - DNA, 25 bp, Homo sapien
aagggcctcgctgtggacatgtgct

SEQ ID NO: 2555874 - DNA, 25 bp, Homo sapien
tggagtgggtgtacgtgctgtggct

SEQ ID NO: 2555875 - DNA, 25 bp, Homo sapien
agtgggtgtacgtgctgtggctttc

SEQ ID NO: 2555876 - DNA, 25 bp, Homo sapien
gagtgggtgtacgtgctgtggcttt

SEQ ID NO: 2555877 - DNA, 25 bp, Homo sapien
gtgggtgtacgtgctgtggctttca

SEQ ID NO: 2555878 - DNA, 25 bp, Homo sapien
ccgggtcactcgaagcctccgccat

SEQ ID NO: 2555879 - DNA, 25 bp, Homo sapien
gcacccgggtcactcgaagcctccg

SEQ ID NO: 2555880 - DNA, 25 bp, Homo sapien
ctcggcacccgggtcactcgaagcc

SEQ ID NO: 2555881 - DNA, 25 bp, Homo sapien
cccagcaactcttcccgctcctcgg

SEQ ID NO: 2555882 - DNA, 25 bp, Homo sapien
tcttctccttcgtcggccgttcttg

SEQ ID NO: 2555883 - DNA, 25 bp, Homo sapien
aggcctggacccttcgctggttcct

SEQ ID NO: 2555884 - DNA, 25 bp, Homo sapien
cttgtccagcccctcgtcaacctgc

SEQ ID NO: 2555885 - DNA, 25 bp, Homo sapien
ggagtgcctcatgccctctgccagg

SEQ ID NO: 2555886 - DNA, 25 bp, Homo sapien
gtctccctgactgtgggtctccctt

SEQ ID NO: 2555887 - DNA, 25 bp, Homo sapien
tcggctcctggcacgagggtctgca

SEQ ID NO: 2555888 - DNA, 25 bp, Homo sapien
tgtgggtctccctgactgtgggtct

SEQ ID NO: 2555889 - DNA, 25 bp, Homo sapien
agcctggtccctcccttcggctcct

SEQ ID NO: 2555890 - DNA, 25 bp, Homo sapien
actcctgcacttccttggcgctctg

SEQ ID NO: 2555891 - DNA, 25 bp, Homo sapien
tctcactcctgcacttccttggcgc

SEQ ID NO: 2555892 - DNA, 25 bp, Homo sapien
tcctgcacttccttggcgctctgcc

SEQ ID NO: 2555893 - DNA, 25 bp, Homo sapien
ctgcacttccttggcgctctgccct

SEQ ID NO: 2555894 - DNA, 25 bp, Homo sapien
tagagcagcatctcaaaggctcctg

SEQ ID NO: 2555895 - DNA, 25 bp, Homo sapien
gtctgctagagttcctcctcagaag

SEQ ID NO: 2555896 - DNA, 25 bp, Homo sapien
tgctcaggcggcgacctggcctgac

SEQ ID NO: 2555897 - DNA, 25 bp, Homo sapien
ctcaagaggtatccaggccctgtct

SEQ ID NO: 2555898 - DNA, 25 bp, Homo sapien
ggaggcccagtggcccggtgcatgt

SEQ ID NO: 2555899 - DNA, 25 bp, Homo sapien
gcccggtgcatgtggcagcccagca

SEQ ID NO: 2555900 - DNA, 25 bp, Homo sapien
cccggtgcatgtggcagcccagcat

SEQ ID NO: 2555901 - DNA, 25 bp, Homo sapien
gtggggaccagatcggagccatctc

SEQ ID NO: 2555902 - DNA, 25 bp, Homo sapien
ggtggggaccagatcggagccatct

SEQ ID NO: 2555903 - DNA, 25 bp, Homo sapien
tggggaccagatcggagccatctct

SEQ ID NO: 2555904 - DNA, 25 bp, Homo sapien
tgggaaaacacattcccgttgggca

SEQ ID NO: 2555905 - DNA, 25 bp, Homo sapien
ctgggatgaggtgtgcccagccagg

SEQ ID NO: 2555906 - DNA, 25 bp, Homo sapien
tcttgggcccatttgttaagtagca

SEQ ID NO: 2555907 - DNA, 25 bp, Homo sapien
cctgaactcaggtgacagccggaga

SEQ ID NO: 2555908 - DNA, 25 bp, Homo sapien
tggacggatgctcatggccgagccc

SEQ ID NO: 2555909 - DNA, 25 bp, Homo sapien
ccgctggacggatgctcatggccga

SEQ ID NO: 2555910 - DNA, 25 bp, Homo sapien
ctgggcccgctggacggatgctcat

SEQ ID NO: 2555911 - DNA, 25 bp, Homo sapien
gctgcagttggtgctgggcccgctg

SEQ ID NO: 2555912 - DNA, 25 bp, Homo sapien
ctgctggctcgcctgggcttctggg

SEQ ID NO: 2555913 - DNA, 25 bp, Homo sapien
cctttacggttccagcaggggcatc

SEQ ID NO: 2555914 - DNA, 25 bp, Homo sapien
tctgagccggatgctcagtccccgg

SEQ ID NO: 2555915 - DNA, 25 bp, Homo sapien
tcgccggctgggactgaagcctgaa

SEQ ID NO: 2555916 - DNA, 25 bp, Homo sapien
caatacctccccaacccgtcatggg

SEQ ID NO: 2555917 - DNA, 25 bp, Homo sapien
tcagctcgcaccaatacctccccaa

SEQ ID NO: 2555918 - DNA, 25 bp, Homo sapien
ccaacccgtcatgggtagcagccga

SEQ ID NO: 2555919 - DNA, 25 bp, Homo sapien
accacctcagctcgcaccaatacct

SEQ ID NO: 2555920 - DNA, 25 bp, Homo sapien
ttttggcacgttctgggacacgcaa

SEQ ID NO: 2555921 - DNA, 25 bp, Homo sapien
tacattattcagacgtggtgcccac

SEQ ID NO: 2555922 - DNA, 25 bp, Homo sapien
gctcacgaggcaggcttttggcacg

SEQ ID NO: 2555923 - DNA, 25 bp, Homo sapien
gctagccatgcccagatgtacctca

SEQ ID NO: 2555924 - DNA, 25 bp, Homo sapien
actcggtgcctgcttcccgcaggag

SEQ ID NO: 2555925 - DNA, 25 bp, Homo sapien
gtgtcactaaccacaacgctgccga

SEQ ID NO: 2555926 - DNA, 25 bp, Homo sapien
tgttctgcgtgctgtgcatatggct

SEQ ID NO: 2555927 - DNA, 25 bp, Homo sapien
tctcaccctcgcatgcgtctacatg

SEQ ID NO: 2555928 - DNA, 25 bp, Homo sapien
tctgtggtcagccctgtgccggcag

SEQ ID NO: 2555929 - DNA, 25 bp, Homo sapien
cctgtgccggcagcacccttgtccc

SEQ ID NO: 2555930 - DNA, 25 bp, Homo sapien
agcacccttgtcccgctctgcagct

SEQ ID NO: 2555931 - DNA, 25 bp, Homo sapien
ctgtggtcagccctgtgccggcagc

SEQ ID NO: 2555932 - DNA, 25 bp, Homo sapien
cagaatgggtgtccggctcggtccc

SEQ ID NO: 2555933 - DNA, 25 bp, Homo sapien
tggctcccatcatccgggcagatga

SEQ ID NO: 2555934 - DNA, 25 bp, Homo sapien
ggctcccatcatccgggcagatgag

SEQ ID NO: 2555935 - DNA, 25 bp, Homo sapien
ttcccgcttctgccggcctccgcat

SEQ ID NO: 2555936 - DNA, 25 bp, Homo sapien
cttcccgcttctgccggcctccgca

SEQ ID NO: 2555937 - DNA, 25 bp, Homo sapien
catctttaaatagaggctgcccacg

SEQ ID NO: 2555938 - DNA, 25 bp, Homo sapien
cttgtccatctttaaatagaggctg

SEQ ID NO: 2555939 - DNA, 25 bp, Homo sapien
acgtggtcatgaggtgccctctggc

SEQ ID NO: 2555940 - DNA, 25 bp, Homo sapien
gctgcccacgtggtcatgaggtgcc

SEQ ID NO: 2555941 - DNA, 25 bp, Homo sapien
tgcttcggccgctcggggacatggc

SEQ ID NO: 2555942 - DNA, 25 bp, Homo sapien
tggcattgctcgtggacggcctcct

SEQ ID NO: 2555943 - DNA, 25 bp, Homo sapien
catgctggcattgctcgtggacggc

SEQ ID NO: 2555944 - DNA, 25 bp, Homo sapien
ctctcatgctggcattgctcgtgga

SEQ ID NO: 2555945 - DNA, 25 bp, Homo sapien
tcttcgatcagtgtagggctccctg

SEQ ID NO: 2555946 - DNA, 25 bp, Homo sapien
gggcctgactatggtgaccgctgaa

SEQ ID NO: 2555947 - DNA, 25 bp, Homo sapien
tccaggactccttgaggctcagcag

SEQ ID NO: 2555948 - DNA, 25 bp, Homo sapien
cctgtggtcagaatacctgagggca

SEQ ID NO: 2555949 - DNA, 25 bp, Homo sapien
aagccctcgtcctcatccagttcag

SEQ ID NO: 2555950 - DNA, 25 bp, Homo sapien
aaagccctcgtcctcatccagttca

SEQ ID NO: 2555951 - DNA, 25 bp, Homo sapien
gccctcgtcctcatccagttcaggg

SEQ ID NO: 2555952 - DNA, 25 bp, Homo sapien
agccctcgtcctcatccagttcagg

SEQ ID NO: 2555953 - DNA, 25 bp, Homo sapien
ctgggggggctctccgctgtccaag

SEQ ID NO: 2555954 - DNA, 25 bp, Homo sapien
ctgtccaaggcgccctgcgccccct

SEQ ID NO: 2555955 - DNA, 25 bp, Homo sapien
actgggggggctctccgctgtccaa

SEQ ID NO: 2555956 - DNA, 25 bp, Homo sapien
ccgctgtccaaggcgccctgcgccc

SEQ ID NO: 2555957 - DNA, 25 bp, Homo sapien
caccatgctgtctcgccctcttcct

SEQ ID NO: 2555958 - DNA, 25 bp, Homo sapien
gagctccgcggtgccctgctctgcc

SEQ ID NO: 2555959 - DNA, 25 bp, Homo sapien
cagaatgaggtttcctcgcggcccc

SEQ ID NO: 2555960 - DNA, 25 bp, Homo sapien
ggtggctgctcaggcgcaggttgag

SEQ ID NO: 2555961 - DNA, 25 bp, Homo sapien
cctccaggtggacttcatcactgtc

SEQ ID NO: 2555962 - DNA, 25 bp, Homo sapien
cctccttttcgtaggcatgcaggcc

SEQ ID NO: 2555963 - DNA, 25 bp, Homo sapien
tgtcctccttttcgtaggcatgcag

SEQ ID NO: 2555964 - DNA, 25 bp, Homo sapien
catcactgtcctccttttcgtaggc

SEQ ID NO: 2555965 - DNA, 25 bp, Homo sapien
ggcgagctctgttcgatggtcccct

SEQ ID NO: 2555966 - DNA, 25 bp, Homo sapien
tctgttcgatggtcccctccaagac

SEQ ID NO: 2555967 - DNA, 25 bp, Homo sapien
gagctctgttcgatggtcccctcca

SEQ ID NO: 2555968 - DNA, 25 bp, Homo sapien
gaggcgagctctgttcgatggtccc

SEQ ID NO: 2555969 - DNA, 25 bp, Homo sapien
ttagggactcggtcctgtcgatgag

SEQ ID NO: 2555970 - DNA, 25 bp, Homo sapien
ctctatggagcggtttagggactcg

SEQ ID NO: 2555971 - DNA, 25 bp, Homo sapien
ctcttctctatggagcggtttaggg

SEQ ID NO: 2555972 - DNA, 25 bp, Homo sapien
tttagggactcggtcctgtcgatga

SEQ ID NO: 2555973 - DNA, 25 bp, Homo sapien
gtctcccacaaggcttctcccaacc

SEQ ID NO: 2555974 - DNA, 25 bp, Homo sapien
gatggcctgggtgtattgttccagc

SEQ ID NO: 2555975 - DNA, 25 bp, Homo sapien
cctgggtgtattgttccagccactg

SEQ ID NO: 2555976 - DNA, 25 bp, Homo sapien
tgttccagccactgatcaatcttgg

SEQ ID NO: 2555977 - DNA, 25 bp, Homo sapien
tcgatggcctgggtgtattgttcca

SEQ ID NO: 2555978 - DNA, 25 bp, Homo sapien
ctagcttgggggtccggccagcggt

SEQ ID NO: 2555979 - DNA, 25 bp, Homo sapien
gctagcttgggggtccggccagcgg

SEQ ID NO: 2555980 - DNA, 25 bp, Homo sapien
cgggctagcttgggggtccggccag

SEQ ID NO: 2555981 - DNA, 25 bp, Homo sapien
ctggcgggctagcttgggggtccgg

SEQ ID NO: 2555982 - DNA, 25 bp, Homo sapien
cagccatgctgggcagctctatgga

SEQ ID NO: 2555983 - DNA, 25 bp, Homo sapien
agccatgctgggcagctctatggag

SEQ ID NO: 2555984 - DNA, 25 bp, Homo sapien
cacagccatgctgggcagctctatg

SEQ ID NO: 2555985 - DNA, 25 bp, Homo sapien
gccacagccatgctgggcagctcta

SEQ ID NO: 2555986 - DNA, 25 bp, Homo sapien
ttggccgcagactgagcctgtacct

SEQ ID NO: 2555987 - DNA, 25 bp, Homo sapien
caggacggagtcttggccgcagact

SEQ ID NO: 2555988 - DNA, 25 bp, Homo sapien
cttgcaggacggagtcttggccgca

SEQ ID NO: 2555989 - DNA, 25 bp, Homo sapien
gagtcttggccgcagactgagcctg

SEQ ID NO: 2555990 - DNA, 25 bp, Homo sapien
ttgctcatgtctccagccacaatat

SEQ ID NO: 2555991 - DNA, 25 bp, Homo sapien
tgctcatgtctccagccacaatatc

SEQ ID NO: 2555992 - DNA, 25 bp, Homo sapien
ccccttccacaagcaccttctcata

SEQ ID NO: 2555993 - DNA, 25 bp, Homo sapien
ttctcatacttcccatgcccggtgg

SEQ ID NO: 2555994 - DNA, 25 bp, Homo sapien
tccacaagcaccttctcatacttcc

SEQ ID NO: 2555995 - DNA, 25 bp, Homo sapien
tgcccggtggccacaaacttatacc

SEQ ID NO: 2555996 - DNA, 25 bp, Homo sapien
accgcatgtcagtggcggaggccca

SEQ ID NO: 2555997 - DNA, 25 bp, Homo sapien
cctccaggatgtgggatgccgtgct

SEQ ID NO: 2555998 - DNA, 25 bp, Homo sapien
ttcaaccgcacagcgactggctgga

SEQ ID NO: 2555999 - DNA, 25 bp, Homo sapien
cagggttgtggtgcccatagccccg

SEQ ID NO: 2556000 - DNA, 25 bp, Homo sapien
agtccacgttctccatcggcctcac

SEQ ID NO: 2556001 - DNA, 25 bp, Homo sapien
caggttgtagcctcggccccagaac

SEQ ID NO: 2556002 - DNA, 25 bp, Homo sapien
ctcacccagcgcaggattctagctg

SEQ ID NO: 2556003 - DNA, 25 bp, Homo sapien
cagtggcttcgtccctgtctctggg

SEQ ID NO: 2556004 - DNA, 25 bp, Homo sapien
cacagtcatgctcatatcggctgcg

SEQ ID NO: 2556005 - DNA, 25 bp, Homo sapien
cgtgagtgaggccagccatgaccag

SEQ ID NO: 2556006 - DNA, 25 bp, Homo sapien
tgcgtttgcagaagctcctgaggaa

SEQ ID NO: 2556007 - DNA, 25 bp, Homo sapien
gctcaggaagcagaatactcaggcc

SEQ ID NO: 2556008 - DNA, 25 bp, Homo sapien
tagctgagagcagtcctaagcaggc

SEQ ID NO: 2556009 - DNA, 25 bp, Homo sapien
tctacctctgatgatgcagcctcgg

SEQ ID NO: 2556010 - DNA, 25 bp, Homo sapien
ccttgcaaacacgtggtgcccagaa

SEQ ID NO: 2556011 - DNA, 25 bp, Homo sapien
gacaggaggtctgcgggaatatccc

SEQ ID NO: 2556012 - DNA, 25 bp, Homo sapien
ccctttggccaatgatcaggagttt

SEQ ID NO: 2556013 - DNA, 25 bp, Homo sapien
gcgagggtaggtcatgctggcaaca

SEQ ID NO: 2556014 - DNA, 25 bp, Homo sapien
taacttcctagaaggcacttggcct

SEQ ID NO: 2556015 - DNA, 25 bp, Homo sapien
gaggctaaagggtccaggagcaaaa

SEQ ID NO: 2556016 - DNA, 25 bp, Homo sapien
cctgcccccttagtgagtacaagac

SEQ ID NO: 2556017 - DNA, 25 bp, Homo sapien
tgcccccttagtgagtacaagacag

SEQ ID NO: 2556018 - DNA, 25 bp, Homo sapien
ccccttagtgagtacaagacagcca

SEQ ID NO: 2556019 - DNA, 25 bp, Homo sapien
cccttagtgagtacaagacagccag

SEQ ID NO: 2556020 - DNA, 25 bp, Homo sapien
caccagagagcttatgtcctggcgt

SEQ ID NO: 2556021 - DNA, 25 bp, Homo sapien
ggccatgagacaggtcagactgcct

SEQ ID NO: 2556022 - DNA, 25 bp, Homo sapien
ggcgtcttatactgcaaaggccatg

SEQ ID NO: 2556023 - DNA, 25 bp, Homo sapien
gctctgacttaggccaccagagagc

SEQ ID NO: 2556024 - DNA, 25 bp, Homo sapien
caggatccaaatccaagaaccctct

SEQ ID NO: 2556025 - DNA, 25 bp, Homo sapien
attctttcttgcacaggatccaaat

SEQ ID NO: 2556026 - DNA, 25 bp, Homo sapien
tgcacaggatccaaatccaagaacc

SEQ ID NO: 2556027 - DNA, 25 bp, Homo sapien
ttctttcttgcacaggatccaaatc

SEQ ID NO: 2556028 - DNA, 25 bp, Homo sapien
ggctgtgtctgaggcgtgtgaacca

SEQ ID NO: 2556029 - DNA, 25 bp, Homo sapien
aggctgtgtctgaggcgtgtgaacc

SEQ ID NO: 2556030 - DNA, 25 bp, Homo sapien
agaggtcgagaaaatcaggtatgca

SEQ ID NO: 2556031 - DNA, 25 bp, Homo sapien
tcataaaagaggtcgagaaaatcag

SEQ ID NO: 2556032 - DNA, 25 bp, Homo sapien
gtggcacggtcgagggagtctggcg

SEQ ID NO: 2556033 - DNA, 25 bp, Homo sapien
tatttcataaaagaggtcgagaaaa

SEQ ID NO: 2556034 - DNA, 25 bp, Homo sapien
acacttatgatgaaacgtccctgcc

SEQ ID NO: 2556035 - DNA, 25 bp, Homo sapien
agcagaggattccaccacaaaggag

SEQ ID NO: 2556036 - DNA, 25 bp, Homo sapien
tatcacttgcacctggatatacaga

SEQ ID NO: 2556037 - DNA, 25 bp, Homo sapien
gccctcaactcagatgaagccatca

SEQ ID NO: 2556038 - DNA, 25 bp, Homo sapien
agctccctgtggacagcaccggctg

SEQ ID NO: 2556039 - DNA, 25 bp, Homo sapien
ctggagctccctgtggacagcaccg

SEQ ID NO: 2556040 - DNA, 25 bp, Homo sapien
tggagctccctgtggacagcaccgg

SEQ ID NO: 2556041 - DNA, 25 bp, Homo sapien
ctgcgggtcgagtgtgagaagggct

SEQ ID NO: 2556042 - DNA, 25 bp, Homo sapien
agccccacgagccagtgttgtccag

SEQ ID NO: 2556043 - DNA, 25 bp, Homo sapien
cccagaatctcttcctgagactctg

SEQ ID NO: 2556044 - DNA, 25 bp, Homo sapien
ggttaagcctcttgtaactgccacg

SEQ ID NO: 2556045 - DNA, 25 bp, Homo sapien
gtagctttttcctatcccagaatct

SEQ ID NO: 2556046 - DNA, 25 bp, Homo sapien
agagtgtactcaggccgcaaggaca

SEQ ID NO: 2556047 - DNA, 25 bp, Homo sapien
aacagagacagtgatcagagtgtac

SEQ ID NO: 2556048 - DNA, 25 bp, Homo sapien
tgatcagagtgtactcaggccgcaa

SEQ ID NO: 2556049 - DNA, 25 bp, Homo sapien
ggctcgcttggcaggggtgaaagat

SEQ ID NO: 2556050 - DNA, 25 bp, Homo sapien
agcacacatgcaagagaaaagccag

SEQ ID NO: 2556051 - DNA, 25 bp, Homo sapien
cttccaggtggcaaaaggcacaagc

SEQ ID NO: 2556052 - DNA, 25 bp, Homo sapien
caggtggcaaaaggcacaagcacac

SEQ ID NO: 2556053 - DNA, 25 bp, Homo sapien
tggcaaaaggcacaagcacacatgc

SEQ ID NO: 2556054 - DNA, 25 bp, Homo sapien
gcactgctggctggtcccgcttact

SEQ ID NO: 2556055 - DNA, 25 bp, Homo sapien
tcgcgtcggctagagccagggtcct

SEQ ID NO: 2556056 - DNA, 25 bp, Homo sapien
gagacaggccgcgtccttgaaggct

SEQ ID NO: 2556057 - DNA, 25 bp, Homo sapien
gcagaaacttggagcggtggcaccc

SEQ ID NO: 2556058 - DNA, 25 bp, Homo sapien
gtcctgtttctgctctaggcctgca

SEQ ID NO: 2556059 - DNA, 25 bp, Homo sapien
gagggtcctgtttctgctctaggcc

SEQ ID NO: 2556060 - DNA, 25 bp, Homo sapien
gtttctgctctaggcctgcaaaagc

SEQ ID NO: 2556061 - DNA, 25 bp, Homo sapien
aacaagagggtcctgtttctgctct

SEQ ID NO: 2556062 - DNA, 25 bp, Homo sapien
agtccactttctccccttctgggat

SEQ ID NO: 2556063 - DNA, 25 bp, Homo sapien
cttctgggatcttaggagcagtgag

SEQ ID NO: 2556064 - DNA, 25 bp, Homo sapien
cccttctgggatcttaggagcagtg

SEQ ID NO: 2556065 - DNA, 25 bp, Homo sapien
atcgaagtccactttctccccttct

SEQ ID NO: 2556066 - DNA, 25 bp, Homo sapien
ccttcttccgggcttcaaagtggct

SEQ ID NO: 2556067 - DNA, 25 bp, Homo sapien
gagctccattaggtctttgttctga

SEQ ID NO: 2556068 - DNA, 25 bp, Homo sapien
tctctctttgagagcgaccagctcc

SEQ ID NO: 2556069 - DNA, 25 bp, Homo sapien
tcaaagtggctgtcgatgagggcct

SEQ ID NO: 2556070 - DNA, 25 bp, Homo sapien
cagagaagggggtctgctcagccct

SEQ ID NO: 2556071 - DNA, 25 bp, Homo sapien
gagaagggggtctgctcagccctgt

SEQ ID NO: 2556072 - DNA, 25 bp, Homo sapien
gaagggggtctgctcagccctgtcc

SEQ ID NO: 2556073 - DNA, 25 bp, Homo sapien
gccagagaagggggtctgctcagcc

SEQ ID NO: 2556074 - DNA, 25 bp, Homo sapien
tccgctctctctgcacggcgcttct

SEQ ID NO: 2556075 - DNA, 25 bp, Homo sapien
cgaatcctctgctgctccgctctct

SEQ ID NO: 2556076 - DNA, 25 bp, Homo sapien
tctccttctctgcacgaatcctctg

SEQ ID NO: 2556077 - DNA, 25 bp, Homo sapien
cgccagtctgttctggcgctccctc

SEQ ID NO: 2556078 - DNA, 25 bp, Homo sapien
gcatcctcctcctcccttctggcct

SEQ ID NO: 2556079 - DNA, 25 bp, Homo sapien
atcctcctcctcccttctggccttt

SEQ ID NO: 2556080 - DNA, 25 bp, Homo sapien
ctcttggcatcctcctcctcccttc

SEQ ID NO: 2556081 - DNA, 25 bp, Homo sapien
cttggcatcctcctcctcccttctg

SEQ ID NO: 2556082 - DNA, 25 bp, Homo sapien
tgctgtagttggctcccatggaaga

SEQ ID NO: 2556083 - DNA, 25 bp, Homo sapien
gctgctgtagttggctcccatggaa

SEQ ID NO: 2556084 - DNA, 25 bp, Homo sapien
agctgctgtagttggctcccatgga

SEQ ID NO: 2556085 - DNA, 25 bp, Homo sapien
ctgctgtagttggctcccatggaag

SEQ ID NO: 2556086 - DNA, 25 bp, Homo sapien
tcttcttcatttcccgggctgtctg

SEQ ID NO: 2556087 - DNA, 25 bp, Homo sapien
ttcaccaaggtgatcgatgttgagc

SEQ ID NO: 2556088 - DNA, 25 bp, Homo sapien
gcggcttgcgtctctcagccagaat

SEQ ID NO: 2556089 - DNA, 25 bp, Homo sapien
tgatcgatgttgagcggcttgcgtc

SEQ ID NO: 2556090 - DNA, 25 bp, Homo sapien
ggtctcccagagctccttggccttg

SEQ ID NO: 2556091 - DNA, 25 bp, Homo sapien
ctcccagagctccttggccttgtcc

SEQ ID NO: 2556092 - DNA, 25 bp, Homo sapien
tctcccagagctccttggccttgtc

SEQ ID NO: 2556093 - DNA, 25 bp, Homo sapien
gtctcccagagctccttggccttgt

SEQ ID NO: 2556094 - DNA, 25 bp, Homo sapien
ctccccaaactcgaacttgtcaatc

SEQ ID NO: 2556095 - DNA, 25 bp, Homo sapien
atttctggcgtttcagcttctcccc

SEQ ID NO: 2556096 - DNA, 25 bp, Homo sapien
ccaaactcgaacttgtcaatctcca

SEQ ID NO: 2556097 - DNA, 25 bp, Homo sapien
gtcatatttctggcgtttcagcttc

SEQ ID NO: 2556098 - DNA, 25 bp, Homo sapien
tccgaaaatgaaccctgagtccact

SEQ ID NO: 2556099 - DNA, 25 bp, Homo sapien
cagccacagggtgcagtgtgtcacc

SEQ ID NO: 2556100 - DNA, 25 bp, Homo sapien
tgctctgccacgacagtccttttgg

SEQ ID NO: 2556101 - DNA, 25 bp, Homo sapien
tttgcctgcggtgatagtgcctgca

SEQ ID NO: 2556102 - DNA, 25 bp, Homo sapien
gggcctctggcggtgctggagggtg

SEQ ID NO: 2556103 - DNA, 25 bp, Homo sapien
atttgccccgagcacgtggatcacc

SEQ ID NO: 2556104 - DNA, 25 bp, Homo sapien
gacatcgtggccctgatggtgatgc

SEQ ID NO: 2556105 - DNA, 25 bp, Homo sapien
tgtctgcatttgccccgagcacgtg

SEQ ID NO: 2556106 - DNA, 25 bp, Homo sapien
gcactctggcccggacattcatgat

SEQ ID NO: 2556107 - DNA, 25 bp, Homo sapien
tgcactctggcccggacattcatga

SEQ ID NO: 2556108 - DNA, 25 bp, Homo sapien
ctgcactctggcccggacattcatg

SEQ ID NO: 2556109 - DNA, 25 bp, Homo sapien
tctgcactctggcccggacattcat

SEQ ID NO: 2556110 - DNA, 25 bp, Homo sapien
tcccgccctcgtgcctgtgcccagg

SEQ ID NO: 2556111 - DNA, 25 bp, Homo sapien
tggcttgaggcggagctcctgggaa

SEQ ID NO: 2556112 - DNA, 25 bp, Homo sapien
tcgcttgccaacagggcagcggcca

SEQ ID NO: 2556113 - DNA, 25 bp, Homo sapien
tcagagctccgaacggccctgctgc

SEQ ID NO: 2556114 - DNA, 25 bp, Homo sapien
gcctgcggcaggatgtggggcgggg

SEQ ID NO: 2556115 - DNA, 25 bp, Homo sapien
cttcagcctgcggcaggatgtgggg

SEQ ID NO: 2556116 - DNA, 25 bp, Homo sapien
gatgtggggcggggggtacggagca

SEQ ID NO: 2556117 - DNA, 25 bp, Homo sapien
cagcctgcggcaggatgtggggcgg

SEQ ID NO: 2556118 - DNA, 25 bp, Homo sapien
ctgggcctggtcaatgcggctcctg

SEQ ID NO: 2556119 - DNA, 25 bp, Homo sapien
ggtcaatgcggctcctgagcgtggt

SEQ ID NO: 2556120 - DNA, 25 bp, Homo sapien
caatgcggctcctgagcgtggtgat

SEQ ID NO: 2556121 - DNA, 25 bp, Homo sapien
ggcctggtcaatgcggctcctgagc

SEQ ID NO: 2556122 - DNA, 25 bp, Homo sapien
ggacaggagtgcttcggcccgcgag

SEQ ID NO: 2556123 - DNA, 25 bp, Homo sapien
cgaggccggccccattcagacgcgg

SEQ ID NO: 2556124 - DNA, 25 bp, Homo sapien
cttcggcccgcgaggccggccccat

SEQ ID NO: 2556125 - DNA, 25 bp, Homo sapien
cggccccattcagacgcggctgctc

SEQ ID NO: 2556126 - DNA, 25 bp, Homo sapien
gagctcatgcccctccagacggtgg

SEQ ID NO: 2556127 - DNA, 25 bp, Homo sapien
ttgcctgaggtaccactgcagacag

SEQ ID NO: 2556128 - DNA, 25 bp, Homo sapien
ggaagactgtcttagcagataatga

SEQ ID NO: 2556129 - DNA, 25 bp, Homo sapien
tgatataatcctagacgcttggcct

SEQ ID NO: 2556130 - DNA, 25 bp, Homo sapien
tgggcggactctcagcccgacccca

SEQ ID NO: 2556131 - DNA, 25 bp, Homo sapien
cccggcccaagcttgcggcccacac

SEQ ID NO: 2556132 - DNA, 25 bp, Homo sapien
acacccagcttcagtccgggcagtg

SEQ ID NO: 2556133 - DNA, 25 bp, Homo sapien
aagtgatccttcagggtcagggcct

SEQ ID NO: 2556134 - DNA, 25 bp, Homo sapien
ccagcgcccgccgactttgcccttg

SEQ ID NO: 2556135 - DNA, 25 bp, Homo sapien
gcccgccgactttgcccttggctgg

SEQ ID NO: 2556136 - DNA, 25 bp, Homo sapien
agcgcccgccgactttgcccttggc

SEQ ID NO: 2556137 - DNA, 25 bp, Homo sapien
ctacttccagcgcccgccgactttg

SEQ ID NO: 2556138 - DNA, 25 bp, Homo sapien
ccacgagcggccctggtgtgcaaga

SEQ ID NO: 2556139 - DNA, 25 bp, Homo sapien
tctctgcctcgaggggcctttctgg

SEQ ID NO: 2556140 - DNA, 25 bp, Homo sapien
gggcggagggtctctgcctcgaggg

SEQ ID NO: 2556141 - DNA, 25 bp, Homo sapien
gaggatgtggagtcccacgagcggc

SEQ ID NO: 2556142 - DNA, 25 bp, Homo sapien
cagcaaggacacagacgcgggggac

SEQ ID NO: 2556143 - DNA, 25 bp, Homo sapien
tcagggagcccctgacaggattgtg

SEQ ID NO: 2556144 - DNA, 25 bp, Homo sapien
gggttctgcagctttattcacaggc

SEQ ID NO: 2556145 - DNA, 25 bp, Homo sapien
cagacgcgggggacgccccgggatg

SEQ ID NO: 2556146 - DNA, 25 bp, Homo sapien
cggggtccgcgaggcggaaggagca

SEQ ID NO: 2556147 - DNA, 25 bp, Homo sapien
ggtccatgtcacacacttaggccaa

SEQ ID NO: 2556148 - DNA, 25 bp, Homo sapien
ggtagctaacactgcggatccctga

SEQ ID NO: 2556149 - DNA, 25 bp, Homo sapien
tccgagtgtccactcacaacagggt

SEQ ID NO: 2556150 - DNA, 25 bp, Homo sapien
ccactcacaacagggtgggcagaaa

SEQ ID NO: 2556151 - DNA, 25 bp, Homo sapien
gaatgaagaagttggttcggaacac

SEQ ID NO: 2556152 - DNA, 25 bp, Homo sapien
tcggaacacccgaagttgtgggcca

SEQ ID NO: 2556153 - DNA, 25 bp, Homo sapien
cagctgaatgaagaagttggttcgg

SEQ ID NO: 2556154 - DNA, 25 bp, Homo sapien
ttgtgggccacccagccggtacagg

SEQ ID NO: 2556155 - DNA, 25 bp, Homo sapien
acggtgtcctcgggctgggccacac

SEQ ID NO: 2556156 - DNA, 25 bp, Homo sapien
ggtgtcctcgggctgggccacaccg

SEQ ID NO: 2556157 - DNA, 25 bp, Homo sapien
ccatggggatccggaactgcacggt

SEQ ID NO: 2556158 - DNA, 25 bp, Homo sapien
gtgtcctcgggctgggccacaccgg

SEQ ID NO: 2556159 - DNA, 25 bp, Homo sapien
tccatcaatacttgccgggcagggc

SEQ ID NO: 2556160 - DNA, 25 bp, Homo sapien
agggccgcctgaggtgccttcccag

SEQ ID NO: 2556161 - DNA, 25 bp, Homo sapien
cagcgggaaaacttccgggctcact

SEQ ID NO: 2556162 - DNA, 25 bp, Homo sapien
aggctagcacgtgagcagagttgtt

SEQ ID NO: 2556163 - DNA, 25 bp, Homo sapien
cacgggcacgttatagatgccctcg

SEQ ID NO: 2556164 - DNA, 25 bp, Homo sapien
agcagccacgggcacgttatagatg

SEQ ID NO: 2556165 - DNA, 25 bp, Homo sapien
cacgttatagatgccctcgaggtaa

SEQ ID NO: 2556166 - DNA, 25 bp, Homo sapien
atgctgcacccgtgtccgcacagca

SEQ ID NO: 2556167 - DNA, 25 bp, Homo sapien
cgaccttgtagtccggcttcttgat

SEQ ID NO: 2556168 - DNA, 25 bp, Homo sapien
tcttgatcctcacgtttctgtgatc

SEQ ID NO: 2556169 - DNA, 25 bp, Homo sapien
tgatcctcacgtttctgtgatctct

SEQ ID NO: 2556170 - DNA, 25 bp, Homo sapien
gcttcttgatcctcacgtttctgtg

SEQ ID NO: 2556171 - DNA, 25 bp, Homo sapien
cacagcatgtggctcgggttcacga

SEQ ID NO: 2556172 - DNA, 25 bp, Homo sapien
gccacagcatgtggctcgggttcac

SEQ ID NO: 2556173 - DNA, 25 bp, Homo sapien
gctgagagttcagaatatgtccgtg

SEQ ID NO: 2556174 - DNA, 25 bp, Homo sapien
agaatatgtccgtgtcagccaagcc

SEQ ID NO: 2556175 - DNA, 25 bp, Homo sapien
gcacgtgcggcagttgataaatcag

SEQ ID NO: 2556176 - DNA, 25 bp, Homo sapien
cagttgataaatcaggaccggctct

SEQ ID NO: 2556177 - DNA, 25 bp, Homo sapien
gaagaaacatgcacgtgcggcagtt

SEQ ID NO: 2556178 - DNA, 25 bp, Homo sapien
ggctctgccaattaactggtcttac

SEQ ID NO: 2556179 - DNA, 25 bp, Homo sapien
gacacaaatcacgtctggtaccatg

SEQ ID NO: 2556180 - DNA, 25 bp, Homo sapien
ccaccattgtctctttagggcctgg

SEQ ID NO: 2556181 - DNA, 25 bp, Homo sapien
tgggtgcacccatttactagcacgg

SEQ ID NO: 2556182 - DNA, 25 bp, Homo sapien
gccggattcaactgctcagaggtac

SEQ ID NO: 2556183 - DNA, 25 bp, Homo sapien
cctcgagcatgctgtagaggtcgtc

SEQ ID NO: 2556184 - DNA, 25 bp, Homo sapien
tctcgggaaacagatctgggaacgt

SEQ ID NO: 2556185 - DNA, 25 bp, Homo sapien
ccttcagggctctcgtctttctcgg

SEQ ID NO: 2556186 - DNA, 25 bp, Homo sapien
tcgtcggcagcgctgccttcagggc

SEQ ID NO: 2556187 - DNA, 25 bp, Homo sapien
tcacagcccgaaccagctggggacg

SEQ ID NO: 2556188 - DNA, 25 bp, Homo sapien
gccccgccgcgggtcgctgctctgc

SEQ ID NO: 2556189 - DNA, 25 bp, Homo sapien
gcccgaaccagctggggacgccgcc

SEQ ID NO: 2556190 - DNA, 25 bp, Homo sapien
ccgccccgccgcgggtcgctgctct

SEQ ID NO: 2556191 - DNA, 25 bp, Homo sapien
tggggcgcgtccctgctggccgccc

SEQ ID NO: 2556192 - DNA, 25 bp, Homo sapien
ggggcgcgtccctgctggccgcccc

SEQ ID NO: 2556193 - DNA, 25 bp, Homo sapien
gggcgcgtccctgctggccgccccg

SEQ ID NO: 2556194 - DNA, 25 bp, Homo sapien
aggtgtcgggactgctctgccacag

SEQ ID NO: 2556195 - DNA, 25 bp, Homo sapien
tttatttaggtgtcgggactgctct

SEQ ID NO: 2556196 - DNA, 25 bp, Homo sapien
cctgcagcaagacttttatttaggt

SEQ ID NO: 2556197 - DNA, 25 bp, Homo sapien
cagcaagacttttatttaggtgtcg

SEQ ID NO: 2556198 - DNA, 25 bp, Homo sapien
cctggtcagggtggagcgcagatgg

SEQ ID NO: 2556199 - DNA, 25 bp, Homo sapien
ttcgtgcaagaaagccgcgccgtgg

SEQ ID NO: 2556200 - DNA, 25 bp, Homo sapien
acggcaaacccaacttcgtgcaaga

SEQ ID NO: 2556201 - DNA, 25 bp, Homo sapien
agatggctcccgacgtacacgtggg

SEQ ID NO: 2556202 - DNA, 25 bp, Homo sapien
tcatggctataaactcatcagcata

SEQ ID NO: 2556203 - DNA, 25 bp, Homo sapien
actcatcagcatagagaagtggggc

SEQ ID NO: 2556204 - DNA, 25 bp, Homo sapien
tgggccgtagagctgggcccatcat

SEQ ID NO: 2556205 - DNA, 25 bp, Homo sapien
atgggctcctgtgggccgtagagct

SEQ ID NO: 2556206 - DNA, 25 bp, Homo sapien
tgcagggccccaagacgcagagacg

SEQ ID NO: 2556207 - DNA, 25 bp, Homo sapien
agctgtgagcggtgctggagataga

SEQ ID NO: 2556208 - DNA, 25 bp, Homo sapien
gcagggccccaagacgcagagacga

SEQ ID NO: 2556209 - DNA, 25 bp, Homo sapien
cggagctgtgagcggtgctggagat

SEQ ID NO: 2556210 - DNA, 25 bp, Homo sapien
ccagggccccaagacgcaaaggcga

SEQ ID NO: 2556211 - DNA, 25 bp, Homo sapien
ggcactgcaggcatcgtgcttgctc

SEQ ID NO: 2556212 - DNA, 25 bp, Homo sapien
actgcaggcatcgtgcttgctccca

SEQ ID NO: 2556213 - DNA, 25 bp, Homo sapien
caggcatcgtgcttgctcccagggc

SEQ ID NO: 2556214 - DNA, 25 bp, Homo sapien
catcacgcagagtgctgagcaaccg

SEQ ID NO: 2556215 - DNA, 25 bp, Homo sapien
tgagcaaccgcgctgagaatacggg

SEQ ID NO: 2556216 - DNA, 25 bp, Homo sapien
tctgcgatcagtgctaaaacccacg

SEQ ID NO: 2556217 - DNA, 25 bp, Homo sapien
cagtggcgtctcgtactgacagaca

SEQ ID NO: 2556218 - DNA, 25 bp, Homo sapien
gcttcctgtgctcccggtccaggcg

SEQ ID NO: 2556219 - DNA, 25 bp, Homo sapien
gcggtggccattgtctgccagccat

SEQ ID NO: 2556220 - DNA, 25 bp, Homo sapien
tcccggtccaggcggtggccattgt

SEQ ID NO: 2556221 - DNA, 25 bp, Homo sapien
ttgtctgccagccattaggaaccag

SEQ ID NO: 2556222 - DNA, 25 bp, Homo sapien
tccagcaggacgggaaccaaccatt

SEQ ID NO: 2556223 - DNA, 25 bp, Homo sapien
cagcaggacgggaaccaaccattca

SEQ ID NO: 2556224 - DNA, 25 bp, Homo sapien
agcaggacgggaaccaaccattcac

SEQ ID NO: 2556225 - DNA, 25 bp, Homo sapien
gcaggacgggaaccaaccattcact

SEQ ID NO: 2556226 - DNA, 25 bp, Homo sapien
tgtcattagctgctcccggtgggag

SEQ ID NO: 2556227 - DNA, 25 bp, Homo sapien
acaatggagagctaaaccgggccca

SEQ ID NO: 2556228 - DNA, 25 bp, Homo sapien
gataggacaatgatggagacccgca

SEQ ID NO: 2556229 - DNA, 25 bp, Homo sapien
ttggcccttgggataagcagacctg

SEQ ID NO: 2556230 - DNA, 25 bp, Homo sapien
tagctgagtcctatggaggtgcccc

SEQ ID NO: 2556231 - DNA, 25 bp, Homo sapien
tctgccccgcaggtcttaggaaata

SEQ ID NO: 2556232 - DNA, 25 bp, Homo sapien
ccttgaggaattggcacggacatgc

SEQ ID NO: 2556233 - DNA, 25 bp, Homo sapien
tgagtgctgcaactgtccaaggagg

SEQ ID NO: 2556234 - DNA, 25 bp, Homo sapien
tggaagcagtcgctgtgggtattct

SEQ ID NO: 2556235 - DNA, 25 bp, Homo sapien
cctggaagcagtcgctgtgggtatt

SEQ ID NO: 2556236 - DNA, 25 bp, Homo sapien
ggaagcagtcgctgtgggtattctg

SEQ ID NO: 2556237 - DNA, 25 bp, Homo sapien
ctggaagcagtcgctgtgggtattc

SEQ ID NO: 2556238 - DNA, 25 bp, Homo sapien
caggagcacgttttcaggcagggat

SEQ ID NO: 2556239 - DNA, 25 bp, Homo sapien
tcagcatgaattccgtgacccagga

SEQ ID NO: 2556240 - DNA, 25 bp, Homo sapien
tgcatgctgaccagttaacccgcct

SEQ ID NO: 2556241 - DNA, 25 bp, Homo sapien
gaggcaggcacttggtataccaccg

SEQ ID NO: 2556242 - DNA, 25 bp, Homo sapien
caggaggtttacaaagcagggctca

SEQ ID NO: 2556243 - DNA, 25 bp, Homo sapien
tcctggagaacatggaagactctgc

SEQ ID NO: 2556244 - DNA, 25 bp, Homo sapien
gtatgaatgacacgcttgctctgga

SEQ ID NO: 2556245 - DNA, 25 bp, Homo sapien
gctcaggagataaaagccggcttcc

SEQ ID NO: 2556246 - DNA, 25 bp, Homo sapien
attacgccccatctcgctctgtgcc

SEQ ID NO: 2556247 - DNA, 25 bp, Homo sapien
tccgaccgacatcacggagcagcct

SEQ ID NO: 2556248 - DNA, 25 bp, Homo sapien
gcagccttcaagcattccattacgc

SEQ ID NO: 2556249 - DNA, 25 bp, Homo sapien
tccattacgccccatctcgctctgt

SEQ ID NO: 2556250 - DNA, 25 bp, Homo sapien
gagccaccttggcaagtgcctgtgc

SEQ ID NO: 2556251 - DNA, 25 bp, Homo sapien
ccaccttggcaagtgcctgtgcagg

SEQ ID NO: 2556252 - DNA, 25 bp, Homo sapien
tggttggagttgtggagacggcctt

SEQ ID NO: 2556253 - DNA, 25 bp, Homo sapien
tgagtctcagtacgagtgtgcgtga

SEQ ID NO: 2556254 - DNA, 25 bp, Homo sapien
cccttctgaatttaatttgcactaa

SEQ ID NO: 2556255 - DNA, 25 bp, Homo sapien
ccgtcccttctgaatttaatttgca

SEQ ID NO: 2556256 - DNA, 25 bp, Homo sapien
tttaatttgcactaagtcatttgca

SEQ ID NO: 2556257 - DNA, 25 bp, Homo sapien
tctgaatttaatttgcactaagtca

SEQ ID NO: 2556258 - DNA, 25 bp, Homo sapien
ctcctccagcgggatgacgccgtcc

SEQ ID NO: 2556259 - DNA, 25 bp, Homo sapien
ctgcggcggacggttgaccaccagc

SEQ ID NO: 2556260 - DNA, 25 bp, Homo sapien
gggatgacgccgtccccaccacctc

SEQ ID NO: 2556261 - DNA, 25 bp, Homo sapien
gcaccggcgactccatcttcatggc

SEQ ID NO: 2556262 - DNA, 25 bp, Homo sapien
tcgagggctggagagcgggaagaca

SEQ ID NO: 2556263 - DNA, 25 bp, Homo sapien
acgtcaccaggagggcgaagcggcc

SEQ ID NO: 2556264 - DNA, 25 bp, Homo sapien
tccggcacggctttctcaggcctat

SEQ ID NO: 2556265 - DNA, 25 bp, Homo sapien
gagttgcagcaggacgtcaccagga

SEQ ID NO: 2556266 - DNA, 25 bp, Homo sapien
gagccaggcattcatcccggtcact

SEQ ID NO: 2556267 - DNA, 25 bp, Homo sapien
agtaggcgcccaggcatcgtgcaga

SEQ ID NO: 2556268 - DNA, 25 bp, Homo sapien
ggcaacggaggtgtagctggcagca

SEQ ID NO: 2556269 - DNA, 25 bp, Homo sapien
ttttggttacaggacgtggcagctg

SEQ ID NO: 2556270 - DNA, 25 bp, Homo sapien
caagctcggtcaactggatgggaat

SEQ ID NO: 2556271 - DNA, 25 bp, Homo sapien
tccaggaacgtgaggtctgagccgt

SEQ ID NO: 2556272 - DNA, 25 bp, Homo sapien
tgcggtcttcagacaggaaagtggc

SEQ ID NO: 2556273 - DNA, 25 bp, Homo sapien
tctgtcctgcggaaaccgcggtgac

SEQ ID NO: 2556274 - DNA, 25 bp, Homo sapien
cgatggtgcagaatcggttgtagtt

SEQ ID NO: 2556275 - DNA, 25 bp, Homo sapien
cgccccgatggtgcagaatcggttg

SEQ ID NO: 2556276 - DNA, 25 bp, Homo sapien
cagaatcggttgtagttgtggaatc

SEQ ID NO: 2556277 - DNA, 25 bp, Homo sapien
ttgtggaatcggaagtggccgcgcg

SEQ ID NO: 2556278 - DNA, 25 bp, Homo sapien
cacagccaggaaaccccaggacgat

SEQ ID NO: 2556279 - DNA, 25 bp, Homo sapien
gtgagagggaggtacagctgccaca

SEQ ID NO: 2556280 - DNA, 25 bp, Homo sapien
ggaaaccccaggacgatcctgaatg

SEQ ID NO: 2556281 - DNA, 25 bp, Homo sapien
ccaggacgatcctgaatgggcccag

SEQ ID NO: 2556282 - DNA, 25 bp, Homo sapien
ccatcgctgggtgcccctatgtgct

SEQ ID NO: 2556283 - DNA, 25 bp, Homo sapien
gctcctgtctccgtgatgatggcct

SEQ ID NO: 2556284 - DNA, 25 bp, Homo sapien
cactcggggctcatgaacgctctcg

SEQ ID NO: 2556285 - DNA, 25 bp, Homo sapien
ctatgtgctgggctccgagttccgg

SEQ ID NO: 2556286 - DNA, 25 bp, Homo sapien
acaggtgaagggaacaccaaccatc

SEQ ID NO: 2556287 - DNA, 25 bp, Homo sapien
gtgaagggaacaccaaccatctgca

SEQ ID NO: 2556288 - DNA, 25 bp, Homo sapien
ggtgaagggaacaccaaccatctgc

SEQ ID NO: 2556289 - DNA, 25 bp, Homo sapien
ggcacaggtgaagggaacaccaacc

SEQ ID NO: 2556290 - DNA, 25 bp, Homo sapien
tccttccctggtactagggccatga

SEQ ID NO: 2556291 - DNA, 25 bp, Homo sapien
cctgggaacagagggacgtactctt

SEQ ID NO: 2556292 - DNA, 25 bp, Homo sapien
cagagggacgtactcttcgggtgcc

SEQ ID NO: 2556293 - DNA, 25 bp, Homo sapien
ggtgccccgggtagctccagaactg

SEQ ID NO: 2556294 - DNA, 25 bp, Homo sapien
ctctcgaggacacgcctggcggagt

SEQ ID NO: 2556295 - DNA, 25 bp, Homo sapien
gacacgcttgtctcgcctttgctgg

SEQ ID NO: 2556296 - DNA, 25 bp, Homo sapien
ggcattcacctacaagcagctctcg

SEQ ID NO: 2556297 - DNA, 25 bp, Homo sapien
gagtgcctccatccgtgtccggacg

SEQ ID NO: 2556298 - DNA, 25 bp, Homo sapien
aaggcccgtctcagctccgcaccgt

SEQ ID NO: 2556299 - DNA, 25 bp, Homo sapien
gctctgctccgaaggcccgtctcag

SEQ ID NO: 2556300 - DNA, 25 bp, Homo sapien
tccgcaccgtccagcgtggccatct

SEQ ID NO: 2556301 - DNA, 25 bp, Homo sapien
ctcccgctctgctccgaaggcccgt

SEQ ID NO: 2556302 - DNA, 25 bp, Homo sapien
ccctggccagacagccgggcagggg

SEQ ID NO: 2556303 - DNA, 25 bp, Homo sapien
cccctggccagacagccgggcaggg

SEQ ID NO: 2556304 - DNA, 25 bp, Homo sapien
tctgctttgtcgcattggcaaccca

SEQ ID NO: 2556305 - DNA, 25 bp, Homo sapien
agacactgttcctcgggagccgttt

SEQ ID NO: 2556306 - DNA, 25 bp, Homo sapien
gactcacaccccagagcaccttgga

SEQ ID NO: 2556307 - DNA, 25 bp, Homo sapien
gccgtttctggggtgcagctccgac

SEQ ID NO: 2556308 - DNA, 25 bp, Homo sapien
ctcggcgatggtccacacagaggct

SEQ ID NO: 2556309 - DNA, 25 bp, Homo sapien
ctgctcaggcctagacactcggcga

SEQ ID NO: 2556310 - DNA, 25 bp, Homo sapien
tcaggcctagacactcggcgatggt

SEQ ID NO: 2556311 - DNA, 25 bp, Homo sapien
tagacactcggcgatggtccacaca

SEQ ID NO: 2556312 - DNA, 25 bp, Homo sapien
ctgcttcccaagtttgctttccggg

SEQ ID NO: 2556313 - DNA, 25 bp, Homo sapien
gcccgctcagtgagacttggtttct

SEQ ID NO: 2556314 - DNA, 25 bp, Homo sapien
ccacggagcccgctcagtgagactt

SEQ ID NO: 2556315 - DNA, 25 bp, Homo sapien
cctgcttcccaagtttgctttccgg

SEQ ID NO: 2556316 - DNA, 25 bp, Homo sapien
gaaatgggtgaaggtcaaatcccaa

SEQ ID NO: 2556317 - DNA, 25 bp, Homo sapien
ggatctggaaatgggtgaaggtcaa

SEQ ID NO: 2556318 - DNA, 25 bp, Homo sapien
tggaaatgggtgaaggtcaaatccc

SEQ ID NO: 2556319 - DNA, 25 bp, Homo sapien
tctggaaatgggtgaaggtcaaatc

SEQ ID NO: 2556320 - DNA, 25 bp, Homo sapien
cgagtagacgatgagccatttcaca

SEQ ID NO: 2556321 - DNA, 25 bp, Homo sapien
gggcctgtgggcctcggtcaaaggc

SEQ ID NO: 2556322 - DNA, 25 bp, Homo sapien
agggcctgtgggcctcggtcaaagg

SEQ ID NO: 2556323 - DNA, 25 bp, Homo sapien
ccgagtagacgatgagccatttcac

SEQ ID NO: 2556324 - DNA, 25 bp, Homo sapien
cttgtcagcagatgggtcctccttg

SEQ ID NO: 2556325 - DNA, 25 bp, Homo sapien
gtcctccttgggacaggccaccagg

SEQ ID NO: 2556326 - DNA, 25 bp, Homo sapien
gtcagcagatgggtcctccttggga

SEQ ID NO: 2556327 - DNA, 25 bp, Homo sapien
ttgtcagcagatgggtcctccttgg

SEQ ID NO: 2556328 - DNA, 25 bp, Homo sapien
gaacagcctctgagcggagagagct

SEQ ID NO: 2556329 - DNA, 25 bp, Homo sapien
tgagcggacaggctcccatggaaca

SEQ ID NO: 2556330 - DNA, 25 bp, Homo sapien
agctgggcgttggaagccgcctccc

SEQ ID NO: 2556331 - DNA, 25 bp, Homo sapien
gaagagcagctctctgtcggcatcc

SEQ ID NO: 2556332 - DNA, 25 bp, Homo sapien
tgacacccatttggccactgaggtg

SEQ ID NO: 2556333 - DNA, 25 bp, Homo sapien
tcctgcgcccccgtgaggtcagtgg

SEQ ID NO: 2556334 - DNA, 25 bp, Homo sapien
ccttgaaccggctgaaattttgttg

SEQ ID NO: 2556335 - DNA, 25 bp, Homo sapien
cagccacaaagggaccgtcccttga

SEQ ID NO: 2556336 - DNA, 25 bp, Homo sapien
tggacaagtaaagtggccctggccc

SEQ ID NO: 2556337 - DNA, 25 bp, Homo sapien
gtcaactgaccctggccggcaggag

SEQ ID NO: 2556338 - DNA, 25 bp, Homo sapien
gggacccgttcatgtgccccttgta

SEQ ID NO: 2556339 - DNA, 25 bp, Homo sapien
ctccttggctaggtggaccatgaat

SEQ ID NO: 2556340 - DNA, 25 bp, Homo sapien
tctcgcaaaggaacgtggcatttac

SEQ ID NO: 2556341 - DNA, 25 bp, Homo sapien
gctgagcactctggcacagagaccc

SEQ ID NO: 2556342 - DNA, 25 bp, Homo sapien
ttgacgctggcatctaaagacctgg

SEQ ID NO: 2556343 - DNA, 25 bp, Homo sapien
tgtaggaccgatggacacaggctct

SEQ ID NO: 2556344 - DNA, 25 bp, Homo sapien
taaaaacaagctctggtctagccag

SEQ ID NO: 2556345 - DNA, 25 bp, Homo sapien
gacatgagtggacacaagtttcgcg

SEQ ID NO: 2556346 - DNA, 25 bp, Homo sapien
tcagaaatgcggtagaaagcaggtc

SEQ ID NO: 2556347 - DNA, 25 bp, Homo sapien
ccaggcaggagggtatagttagcaa

SEQ ID NO: 2556348 - DNA, 25 bp, Homo sapien
aagtgtgcgcatagacacggcccgc

SEQ ID NO: 2556349 - DNA, 25 bp, Homo sapien
ttggaggctgcatagccagatgagc

SEQ ID NO: 2556350 - DNA, 25 bp, Homo sapien
tgcctctgtgcgcacttgcctgtgg

SEQ ID NO: 2556351 - DNA, 25 bp, Homo sapien
gcagtggcggtggcttttcatcagt

SEQ ID NO: 2556352 - DNA, 25 bp, Homo sapien
caggctcagcagaggcgaagccagc

SEQ ID NO: 2556353 - DNA, 25 bp, Homo sapien
gccaggctcagcagaggcgaagcca

SEQ ID NO: 2556354 - DNA, 25 bp, Homo sapien
ctggttctggggtggccaggctcag

SEQ ID NO: 2556355 - DNA, 25 bp, Homo sapien
tggccaggctcagcagaggcgaagc

SEQ ID NO: 2556356 - DNA, 25 bp, Homo sapien
tctcctgtcttgaggtccacattcc

SEQ ID NO: 2556357 - DNA, 25 bp, Homo sapien
atcccggctctcctgtcttgaggtc

SEQ ID NO: 2556358 - DNA, 25 bp, Homo sapien
ggagaggacagagatcccggctctc

SEQ ID NO: 2556359 - DNA, 25 bp, Homo sapien
gagaggacagagatcccggctctcc

SEQ ID NO: 2556360 - DNA, 25 bp, Homo sapien
agctgtgctgcctgaccccgcagca

SEQ ID NO: 2556361 - DNA, 25 bp, Homo sapien
ttccttgcccgaggccacagagctc

SEQ ID NO: 2556362 - DNA, 25 bp, Homo sapien
agagctcaggcaagaagctgtgctg

SEQ ID NO: 2556363 - DNA, 25 bp, Homo sapien
tgtgctgcctgaccccgcagcagtc

SEQ ID NO: 2556364 - DNA, 25 bp, Homo sapien
acacttcacaagggaagcggcaggc

SEQ ID NO: 2556365 - DNA, 25 bp, Homo sapien
gtggaacactctggctacccttagc

SEQ ID NO: 2556366 - DNA, 25 bp, Homo sapien
tctggctacccttagcacgagaggg

SEQ ID NO: 2556367 - DNA, 25 bp, Homo sapien
gaacactctggctacccttagcacg

SEQ ID NO: 2556368 - DNA, 25 bp, Homo sapien
ggccgtggaacactctggctaccct

SEQ ID NO: 2556369 - DNA, 25 bp, Homo sapien
cagcactggaggggttcagggtcca

SEQ ID NO: 2556370 - DNA, 25 bp, Homo sapien
agaaacagtcactgtctcactgaag

SEQ ID NO: 2556371 - DNA, 25 bp, Homo sapien
tcagcactggaggggttcagggtcc

SEQ ID NO: 2556372 - DNA, 25 bp, Homo sapien
aaacagtcactgtctcactgaagag

SEQ ID NO: 2556373 - DNA, 25 bp, Homo sapien
cgccaaacactgaatgtcacctgtg

SEQ ID NO: 2556374 - DNA, 25 bp, Homo sapien
ttccggcaaaatcccatgcttgggt

SEQ ID NO: 2556375 - DNA, 25 bp, Homo sapien
tgcggcccgtgtttgactcaactca

SEQ ID NO: 2556376 - DNA, 25 bp, Homo sapien
ctttaaccttgtaacgcttgcaatc

SEQ ID NO: 2556377 - DNA, 25 bp, Homo sapien
cattcggaacattggacagaagccc

SEQ ID NO: 2556378 - DNA, 25 bp, Homo sapien
ccacgggtctggtgatgccatagca

SEQ ID NO: 2556379 - DNA, 25 bp, Homo sapien
tgagatccaaaacgcttcgaggcac

SEQ ID NO: 2556380 - DNA, 25 bp, Homo sapien
agtgttatattctgcctcgccggag

SEQ ID NO: 2556381 - DNA, 25 bp, Homo sapien
caaagtcccgctaagattctccaat

SEQ ID NO: 2556382 - DNA, 25 bp, Homo sapien
caataagcatatctaagcaactacg

SEQ ID NO: 2556383 - DNA, 25 bp, Homo sapien
tcatgcgcagcacatacatgaacac

SEQ ID NO: 2556384 - DNA, 25 bp, Homo sapien
tatggatcaggccaaagtcccgcta

SEQ ID NO: 2556385 - DNA, 25 bp, Homo sapien
taaaaatcacagagcagtcagaggg

SEQ ID NO: 2556386 - DNA, 25 bp, Homo sapien
agaaatcacaggtgggcacgtcgct

SEQ ID NO: 2556387 - DNA, 25 bp, Homo sapien
tcagggtaaactggccatccgaaaa

SEQ ID NO: 2556388 - DNA, 25 bp, Homo sapien
actttgagtcaaattggcctggact

SEQ ID NO: 2556389 - DNA, 25 bp, Homo sapien
tatccttgatacaacagctgacctc

SEQ ID NO: 2556390 - DNA, 25 bp, Homo sapien
tccgtgctgttctctcccgctgtgc

SEQ ID NO: 2556391 - DNA, 25 bp, Homo sapien
gctgacctcatttcccgataccttt

SEQ ID NO: 2556392 - DNA, 25 bp, Homo sapien
ccctttcacgttcactctgtctctc

SEQ ID NO: 2556393 - DNA, 25 bp, Homo sapien
cgtcggcccaaaccgagctgggcgc

SEQ ID NO: 2556394 - DNA, 25 bp, Homo sapien
accagcgcctccatcgggcaaggcg

SEQ ID NO: 2556395 - DNA, 25 bp, Homo sapien
gaggcccgggctcgcgacggcagag

SEQ ID NO: 2556396 - DNA, 25 bp, Homo sapien
tcgctgctgactcccgtcccgggcg

SEQ ID NO: 2556397 - DNA, 25 bp, Homo sapien
ggtaaagtgcctctagcccgcgggc

SEQ ID NO: 2556398 - DNA, 25 bp, Homo sapien
ccgccgggcggtaaagtgcctctag

SEQ ID NO: 2556399 - DNA, 25 bp, Homo sapien
gggcggtaaagtgcctctagcccgc

SEQ ID NO: 2556400 - DNA, 25 bp, Homo sapien
aaagatctcatttgtggggaaagcg

SEQ ID NO: 2556401 - DNA, 25 bp, Homo sapien
gaaatccgcgccactttcgtttgct

SEQ ID NO: 2556402 - DNA, 25 bp, Homo sapien
cggacttgcggctggcggctgcgct

SEQ ID NO: 2556403 - DNA, 25 bp, Homo sapien
agcctccagcttcgcggtgagctcc

SEQ ID NO: 2556404 - DNA, 25 bp, Homo sapien
agcgttcgatcgctcgctgcctgag

SEQ ID NO: 2556405 - DNA, 25 bp, Homo sapien
tccaggaaagcgaccgggcattgcc

SEQ ID NO: 2556406 - DNA, 25 bp, Homo sapien
gcttccccgtgtccaggaaagcgac

SEQ ID NO: 2556407 - DNA, 25 bp, Homo sapien
ggcttccccgtgtccaggaaagcga

SEQ ID NO: 2556408 - DNA, 25 bp, Homo sapien
ccgtgtccaggaaagcgaccgggca

SEQ ID NO: 2556409 - DNA, 25 bp, Homo sapien
tggtcccacggacggcggagcggtg

SEQ ID NO: 2556410 - DNA, 25 bp, Homo sapien
acggacggcggagcggtgagctcag

SEQ ID NO: 2556411 - DNA, 25 bp, Homo sapien
tgcagggggtgacggaggggcgctc

SEQ ID NO: 2556412 - DNA, 25 bp, Homo sapien
gctgggcttggtcccacggacggcg

SEQ ID NO: 2556413 - DNA, 25 bp, Homo sapien
tgacgccagcgagtgtgtccttccc

SEQ ID NO: 2556414 - DNA, 25 bp, Homo sapien
agtgagcgcaaggtcagcgcctcgt

SEQ ID NO: 2556415 - DNA, 25 bp, Homo sapien
aaggtcagcgcctcgtctgcggcgc

SEQ ID NO: 2556416 - DNA, 25 bp, Homo sapien
cggccgggctgacgccagcgagtgt

SEQ ID NO: 2556417 - DNA, 25 bp, Homo sapien
tggagggttgcagttcgggtcctta

SEQ ID NO: 2556418 - DNA, 25 bp, Homo sapien
tggtgtggagggttgcagttcgggt

SEQ ID NO: 2556419 - DNA, 25 bp, Homo sapien
gctttgggcagattgagcagccttg

SEQ ID NO: 2556420 - DNA, 25 bp, Homo sapien
ctttgggcagattgagcagccttgg

SEQ ID NO: 2556421 - DNA, 25 bp, Homo sapien
ggctgatttgcccatcccagataga

SEQ ID NO: 2556422 - DNA, 25 bp, Homo sapien
gggatccagcaggtgactcttcagg

SEQ ID NO: 2556423 - DNA, 25 bp, Homo sapien
tcagtcctttggagtgtgcaccgtc

SEQ ID NO: 2556424 - DNA, 25 bp, Homo sapien
aaaatggtaacacagtggcgccgcc

SEQ ID NO: 2556425 - DNA, 25 bp, Homo sapien
gggtcttgcaccaatggcctgacct

SEQ ID NO: 2556426 - DNA, 25 bp, Homo sapien
agaattgaggtaataaccagaggcc

SEQ ID NO: 2556427 - DNA, 25 bp, Homo sapien
cggcgtcaggatcccattgtggtca

SEQ ID NO: 2556428 - DNA, 25 bp, Homo sapien
ggcctgacctttctgtcggtctgta

SEQ ID NO: 2556429 - DNA, 25 bp, Homo sapien
gatctggagttccgtggttggctcc

SEQ ID NO: 2556430 - DNA, 25 bp, Homo sapien
agtctccacggcaccgaggtcctgg

SEQ ID NO: 2556431 - DNA, 25 bp, Homo sapien
gcagagcaggttccccgcagtctcc

SEQ ID NO: 2556432 - DNA, 25 bp, Homo sapien
tgcttccgtctaggggccagagcag

SEQ ID NO: 2556433 - DNA, 25 bp, Homo sapien
tgcccagatcctgacaaggtgacct

SEQ ID NO: 2556434 - DNA, 25 bp, Homo sapien
cgcgggagtcttcgaactgggatct

SEQ ID NO: 2556435 - DNA, 25 bp, Homo sapien
tcaagcagagctgtgtgtccagtgg

SEQ ID NO: 2556436 - DNA, 25 bp, Homo sapien
gaggaggctttcatattccgtgcca

SEQ ID NO: 2556437 - DNA, 25 bp, Homo sapien
actgcaactagacgcagcccgcagg

SEQ ID NO: 2556438 - DNA, 25 bp, Homo sapien
cattgtggaacaatgctgtaccagc

SEQ ID NO: 2556439 - DNA, 25 bp, Homo sapien
tgctccctctaccagctggagaact

SEQ ID NO: 2556440 - DNA, 25 bp, Homo sapien
gggtccctgcagaagcgtggcattg

SEQ ID NO: 2556441 - DNA, 25 bp, Homo sapien
tggaagctctctacctagtgtgcgg

SEQ ID NO: 2556442 - DNA, 25 bp, Homo sapien
tttgtgaaccaacacctgtgcggct

SEQ ID NO: 2556443 - DNA, 25 bp, Homo sapien
ccgagatacatcagagggtgggcac

SEQ ID NO: 2556444 - DNA, 25 bp, Homo sapien
gaagttctcttggtcacgtcctaaa

SEQ ID NO: 2556445 - DNA, 25 bp, Homo sapien
tggaaaaggtttctgacacgcagcg

SEQ ID NO: 2556446 - DNA, 25 bp, Homo sapien
tttctgacacgcagcgggatgatgg

SEQ ID NO: 2556447 - DNA, 25 bp, Homo sapien
ttaaaagcggattgatacagacgcc

SEQ ID NO: 2556448 - DNA, 25 bp, Homo sapien
tacagacgccatggaaaaggtttct

SEQ ID NO: 2556449 - DNA, 25 bp, Homo sapien
tgcgctgaacgctgcaccatgagct

SEQ ID NO: 2556450 - DNA, 25 bp, Homo sapien
gggcagcatgcagtaggcgcttata

SEQ ID NO: 2556451 - DNA, 25 bp, Homo sapien
gccagagtggcccagcaacaagtct

SEQ ID NO: 2556452 - DNA, 25 bp, Homo sapien
tgccggccataccacattcagagtg

SEQ ID NO: 2556453 - DNA, 25 bp, Homo sapien
gctgctcgagggtgaaaaaaggaac

SEQ ID NO: 2556454 - DNA, 25 bp, Homo sapien
ttggttgttggtcgactctgagtcc

SEQ ID NO: 2556455 - DNA, 25 bp, Homo sapien
tgggtggtccccgtcctctcttgtg

SEQ ID NO: 2556456 - DNA, 25 bp, Homo sapien
tccaggtttgttctgcagttgggtg

SEQ ID NO: 2556457 - DNA, 25 bp, Homo sapien
ccagaaaatgccgtccaggcagata

SEQ ID NO: 2556458 - DNA, 25 bp, Homo sapien
cgtccaggcagatagtcccagggag

SEQ ID NO: 2556459 - DNA, 25 bp, Homo sapien
gggccagaaaatgccgtccaggcag

SEQ ID NO: 2556460 - DNA, 25 bp, Homo sapien
aaatgccgtccaggcagatagtccc

SEQ ID NO: 2556461 - DNA, 25 bp, Homo sapien
tctccgctcccagcttgcggcttct

SEQ ID NO: 2556462 - DNA, 25 bp, Homo sapien
ttgggtgcttgccagactccgccat

SEQ ID NO: 2556463 - DNA, 25 bp, Homo sapien
cctgttgggtgcttgccagactccg

SEQ ID NO: 2556464 - DNA, 25 bp, Homo sapien
gccacctgttgggtgcttgccagac

SEQ ID NO: 2556465 - DNA, 25 bp, Homo sapien
cagcatcaaggtccggcctggcgag

SEQ ID NO: 2556466 - DNA, 25 bp, Homo sapien
ccgtgctgccgtctgtcgtctgaga

SEQ ID NO: 2556467 - DNA, 25 bp, Homo sapien
aggccgtctggagcagctccggacc

SEQ ID NO: 2556468 - DNA, 25 bp, Homo sapien
tggcctgcgtgtagccggcaactgt

SEQ ID NO: 2556469 - DNA, 25 bp, Homo sapien
tgggcaccgctgaggacgttttttg

SEQ ID NO: 2556470 - DNA, 25 bp, Homo sapien
ctgcagcagcggtgtctgtctgagc

SEQ ID NO: 2556471 - DNA, 25 bp, Homo sapien
tctgtctgagcctgccggcctgggt

SEQ ID NO: 2556472 - DNA, 25 bp, Homo sapien
gtgctgggcgttggtagtggtgtcc

SEQ ID NO: 2556473 - DNA, 25 bp, Homo sapien
ctgggtccacagggcgttggaacag

SEQ ID NO: 2556474 - DNA, 25 bp, Homo sapien
cgggcattgtgaagcttccaaggct

SEQ ID NO: 2556475 - DNA, 25 bp, Homo sapien
ccacagggcgttggaacagggggag

SEQ ID NO: 2556476 - DNA, 25 bp, Homo sapien
gggcattgtgaagcttccaaggctg

SEQ ID NO: 2556477 - DNA, 25 bp, Homo sapien
ggaccttcatggctctcagcaaaag

SEQ ID NO: 2556478 - DNA, 25 bp, Homo sapien
cacactggatcttggattgtgaatt

SEQ ID NO: 2556479 - DNA, 25 bp, Homo sapien
ccatgacctcgttaggactctcaca

SEQ ID NO: 2556480 - DNA, 25 bp, Homo sapien
tcagcaaaagctgcccgttccacag

SEQ ID NO: 2556481 - DNA, 25 bp, Homo sapien
tttcttttgtctgggtcttggtgga

SEQ ID NO: 2556482 - DNA, 25 bp, Homo sapien
ggtcttggtggatgtaagctctctg

SEQ ID NO: 2556483 - DNA, 25 bp, Homo sapien
cagctccagggtttggctgccttta

SEQ ID NO: 2556484 - DNA, 25 bp, Homo sapien
tgtgctcccatcgatgggcccgagg

SEQ ID NO: 2556485 - DNA, 25 bp, Homo sapien
atcccccaggggtgtgagaagcacc

SEQ ID NO: 2556486 - DNA, 25 bp, Homo sapien
gcagcaggcggctcttggaggctgg

SEQ ID NO: 2556487 - DNA, 25 bp, Homo sapien
atgcccctctcccgagacctcaggt

SEQ ID NO: 2556488 - DNA, 25 bp, Homo sapien
cccctctcccgagacctcaggtagc

SEQ ID NO: 2556489 - DNA, 25 bp, Homo sapien
tgcccctctcccgagacctcaggta

SEQ ID NO: 2556490 - DNA, 25 bp, Homo sapien
gcccctctcccgagacctcaggtag

SEQ ID NO: 2556491 - DNA, 25 bp, Homo sapien
gagcctgggtcctagcagtggacac

SEQ ID NO: 2556492 - DNA, 25 bp, Homo sapien
tccaaccgttgtacagtctggccgg

SEQ ID NO: 2556493 - DNA, 25 bp, Homo sapien
gacttagggtgcatccgtgtgccac

SEQ ID NO: 2556494 - DNA, 25 bp, Homo sapien
aagcaccgaggcctttgttgagcag

SEQ ID NO: 2556495 - DNA, 25 bp, Homo sapien
cagacgactcgtggcagagacatgt

SEQ ID NO: 2556496 - DNA, 25 bp, Homo sapien
tacttaccacgtgttcctttgcaga

SEQ ID NO: 2556497 - DNA, 25 bp, Homo sapien
tgtgaccgtcaaggccgaaaatact

SEQ ID NO: 2556498 - DNA, 25 bp, Homo sapien
tatactgaattccacggaaccgtgc

SEQ ID NO: 2556499 - DNA, 25 bp, Homo sapien
gtaaatctaccaaagtcctcagttg

SEQ ID NO: 2556500 - DNA, 25 bp, Homo sapien
tattaaggcattcccacacgaaatg

SEQ ID NO: 2556501 - DNA, 25 bp, Homo sapien
tagcgtttccacagtgatgtctggc

SEQ ID NO: 2556502 - DNA, 25 bp, Homo sapien
gaaatgtctgtctgcgtactctccg

SEQ ID NO: 2556503 - DNA, 25 bp, Homo sapien
ctgctgtgcactgcagtaggtctgg

SEQ ID NO: 2556504 - DNA, 25 bp, Homo sapien
ggggcccttgccgctctgctgtgca

SEQ ID NO: 2556505 - DNA, 25 bp, Homo sapien
ctgtgcactgcagtaggtctgggca

SEQ ID NO: 2556506 - DNA, 25 bp, Homo sapien
gggcccttgccgctctgctgtgcac

SEQ ID NO: 2556507 - DNA, 25 bp, Homo sapien
gcgtcacagcgagtggggcctggag

SEQ ID NO: 2556508 - DNA, 25 bp, Homo sapien
ggccacgcgggcacctgaatctggc

SEQ ID NO: 2556509 - DNA, 25 bp, Homo sapien
ctgaatctggctcatgtctgtcctt

SEQ ID NO: 2556510 - DNA, 25 bp, Homo sapien
cctggagcttgaagagacctgtggg

SEQ ID NO: 2556511 - DNA, 25 bp, Homo sapien
tctgaagaatttcggagcagggcgg

SEQ ID NO: 2556512 - DNA, 25 bp, Homo sapien
gtcatctcaaagtggcgtcgaaccc

SEQ ID NO: 2556513 - DNA, 25 bp, Homo sapien
aggtctgaagaatttcggagcaggg

SEQ ID NO: 2556514 - DNA, 25 bp, Homo sapien
cacttgtcatctcaaagtggcgtcg

SEQ ID NO: 2556515 - DNA, 25 bp, Homo sapien
gaggctttgtaaacctcgaatttgc

SEQ ID NO: 2556516 - DNA, 25 bp, Homo sapien
ctgcggccccagtacaggcagggtt

SEQ ID NO: 2556517 - DNA, 25 bp, Homo sapien
gaatttgcaattacaccgagccgtg

SEQ ID NO: 2556518 - DNA, 25 bp, Homo sapien
caccgagccgtgtaattacgtatgg

SEQ ID NO: 2556519 - DNA, 25 bp, Homo sapien
cagggcatttgctgacatctgaggc

SEQ ID NO: 2556520 - DNA, 25 bp, Homo sapien
gcccaagacaccagggcatttgctg

SEQ ID NO: 2556521 - DNA, 25 bp, Homo sapien
ggaagacatggcctcgttcttggtg

SEQ ID NO: 2556522 - DNA, 25 bp, Homo sapien
aagacatggcctcgttcttggtgtg

SEQ ID NO: 2556523 - DNA, 25 bp, Homo sapien
aggtaggctgcatccgcccctctgt

SEQ ID NO: 2556524 - DNA, 25 bp, Homo sapien
caggaggtaggctgcatccgcccct

SEQ ID NO: 2556525 - DNA, 25 bp, Homo sapien
gcccaggaggtaggctgcatccgcc

SEQ ID NO: 2556526 - DNA, 25 bp, Homo sapien
ggaggtaggctgcatccgcccctct

SEQ ID NO: 2556527 - DNA, 25 bp, Homo sapien
tggcaaccctgactcgactccaagg

SEQ ID NO: 2556528 - DNA, 25 bp, Homo sapien
ccagcatctggcatttggcaaccct

SEQ ID NO: 2556529 - DNA, 25 bp, Homo sapien
ggtgaccagcatctggcatttggca

SEQ ID NO: 2556530 - DNA, 25 bp, Homo sapien
atttggcaaccctgactcgactcca

SEQ ID NO: 2556531 - DNA, 25 bp, Homo sapien
tctgatcattgtgtctacggagtgg

SEQ ID NO: 2556532 - DNA, 25 bp, Homo sapien
ccggtgtttccgtggagtggtctca

SEQ ID NO: 2556533 - DNA, 25 bp, Homo sapien
cccacatggtagacgcatacacgca

SEQ ID NO: 2556534 - DNA, 25 bp, Homo sapien
gtggtctcaggaggccttcactgca

SEQ ID NO: 2556535 - DNA, 25 bp, Homo sapien
actcagagtgtggggcatgggactg

SEQ ID NO: 2556536 - DNA, 25 bp, Homo sapien
tggatagggcagactcagagtgtgg

SEQ ID NO: 2556537 - DNA, 25 bp, Homo sapien
ctgtggatagggcagactcagagtg

SEQ ID NO: 2556538 - DNA, 25 bp, Homo sapien
gactcagagtgtggggcatgggact

SEQ ID NO: 2556539 - DNA, 25 bp, Homo sapien
gccccgaagtaggtaagagtcacca

SEQ ID NO: 2556540 - DNA, 25 bp, Homo sapien
cacagcctggtacgggttcttctcc

SEQ ID NO: 2556541 - DNA, 25 bp, Homo sapien
tctccagggacgctcggcggatgac

SEQ ID NO: 2556542 - DNA, 25 bp, Homo sapien
tgacagcaaagtgggccccgaagta

SEQ ID NO: 2556543 - DNA, 25 bp, Homo sapien
aggtcctgaccgcacagagccactt

SEQ ID NO: 2556544 - DNA, 25 bp, Homo sapien
gagtggaacatcagccatgtggagc

SEQ ID NO: 2556545 - DNA, 25 bp, Homo sapien
ggcctggcaccattctggctgtgag

SEQ ID NO: 2556546 - DNA, 25 bp, Homo sapien
ggagccctcatggacctgctgtgcc

SEQ ID NO: 2556547 - DNA, 25 bp, Homo sapien
tggatgttggataagtcgctgctga

SEQ ID NO: 2556548 - DNA, 25 bp, Homo sapien
ctctggatgttggataagtcgctgc

SEQ ID NO: 2556549 - DNA, 25 bp, Homo sapien
ctctctggatgttggataagtcgct

SEQ ID NO: 2556550 - DNA, 25 bp, Homo sapien
tgttggataagtcgctgctgagtcc

SEQ ID NO: 2556551 - DNA, 25 bp, Homo sapien
gcccaccgggctgcagccttcctgg

SEQ ID NO: 2556552 - DNA, 25 bp, Homo sapien
agtttccctacatctgcccaccggg

SEQ ID NO: 2556553 - DNA, 25 bp, Homo sapien
ttatcagtccggacctggacctggg

SEQ ID NO: 2556554 - DNA, 25 bp, Homo sapien
gctgtaatcttatcagtccggacct

SEQ ID NO: 2556555 - DNA, 25 bp, Homo sapien
ggaggtgggactcgttcagcctggg

SEQ ID NO: 2556556 - DNA, 25 bp, Homo sapien
acaagtggccggactggagctgtaa

SEQ ID NO: 2556557 - DNA, 25 bp, Homo sapien
gcctgtggggctatcttggaagcca

SEQ ID NO: 2556558 - DNA, 25 bp, Homo sapien
ccctgccatgccctagtgacaagtg

SEQ ID NO: 2556559 - DNA, 25 bp, Homo sapien
ggctgcagcgctcagcacggctccc

SEQ ID NO: 2556560 - DNA, 25 bp, Homo sapien
ccaccaggctcaaccccgcagagaa

SEQ ID NO: 2556561 - DNA, 25 bp, Homo sapien
cagcgctcagcacggctcccagagt

SEQ ID NO: 2556562 - DNA, 25 bp, Homo sapien
ggcccaccaggctcaaccccgcaga

SEQ ID NO: 2556563 - DNA, 25 bp, Homo sapien
gggcctgggcatctgggaacacaat

SEQ ID NO: 2556564 - DNA, 25 bp, Homo sapien
gccagctcttcactcctttctaatt

SEQ ID NO: 2556565 - DNA, 25 bp, Homo sapien
tgggggtctcggctggccagcatcc

SEQ ID NO: 2556566 - DNA, 25 bp, Homo sapien
gggcctctggttctgcctggtcact

SEQ ID NO: 2556567 - DNA, 25 bp, Homo sapien
tataggaacccttgttgggcgtgta

SEQ ID NO: 2556568 - DNA, 25 bp, Homo sapien
cctcccagggactttggaaacagct

SEQ ID NO: 2556569 - DNA, 25 bp, Homo sapien
ccagggtcaggagggccgtctctct

SEQ ID NO: 2556570 - DNA, 25 bp, Homo sapien
ggcctcctccgaacaggaaatggga

SEQ ID NO: 2556571 - DNA, 25 bp, Homo sapien
ggtggatgggcccacccagacctcc

SEQ ID NO: 2556572 - DNA, 25 bp, Homo sapien
tggtggatgggcccacccagacctc

SEQ ID NO: 2556573 - DNA, 25 bp, Homo sapien
ctcccgcgcagagaggatcttgggt

SEQ ID NO: 2556574 - DNA, 25 bp, Homo sapien
cgcgcagagaggatcttgggtggtg

SEQ ID NO: 2556575 - DNA, 25 bp, Homo sapien
ttgttctctcggtcaaggcttccag

SEQ ID NO: 2556576 - DNA, 25 bp, Homo sapien
gttctctggtggaaacgtctgcgca

SEQ ID NO: 2556577 - DNA, 25 bp, Homo sapien
ccccttgcggaagctaaggaacacg

SEQ ID NO: 2556578 - DNA, 25 bp, Homo sapien
atgcccgtgcccctagtcgtggagt

SEQ ID NO: 2556579 - DNA, 25 bp, Homo sapien
cagaacgccagggagaagcacagga

SEQ ID NO: 2556580 - DNA, 25 bp, Homo sapien
acaccacctgcacctgtgcgcagaa

SEQ ID NO: 2556581 - DNA, 25 bp, Homo sapien
gctgtggagtctccagaacaccacc

SEQ ID NO: 2556582 - DNA, 25 bp, Homo sapien
gggctgtggagtctccagaacacca

SEQ ID NO: 2556583 - DNA, 25 bp, Homo sapien
ggctctgctaccgagctctcattct

SEQ ID NO: 2556584 - DNA, 25 bp, Homo sapien
tcagctaggccggaccctcctccag

SEQ ID NO: 2556585 - DNA, 25 bp, Homo sapien
tgcccacggtcagctaggccggacc

SEQ ID NO: 2556586 - DNA, 25 bp, Homo sapien
caggtcagcatccaggacggaagga

SEQ ID NO: 2556587 - DNA, 25 bp, Homo sapien
agatgatgccagaagtcaagaccca

SEQ ID NO: 2556588 - DNA, 25 bp, Homo sapien
ccaccaggcctgacacagatgatgc

SEQ ID NO: 2556589 - DNA, 25 bp, Homo sapien
caggccacctccatggccaccaggc

SEQ ID NO: 2556590 - DNA, 25 bp, Homo sapien
aggcctgacacagatgatgccagaa

SEQ ID NO: 2556591 - DNA, 25 bp, Homo sapien
acagcttggggcctttggcctttgc

SEQ ID NO: 2556592 - DNA, 25 bp, Homo sapien
tgccactgtctaggctgccagcagg

SEQ ID NO: 2556593 - DNA, 25 bp, Homo sapien
tcgacgtttccggtgccaacagctt

SEQ ID NO: 2556594 - DNA, 25 bp, Homo sapien
aaggttgaagcccattcggctctgg

SEQ ID NO: 2556595 - DNA, 25 bp, Homo sapien
tcatataccaggtcgtaggtgtcca

SEQ ID NO: 2556596 - DNA, 25 bp, Homo sapien
ccaggtcgtaggtgtccagcatggc

SEQ ID NO: 2556597 - DNA, 25 bp, Homo sapien
gcctgctcatataccaggtcgtagg

SEQ ID NO: 2556598 - DNA, 25 bp, Homo sapien
tttcatcgcctgctcatataccagg

SEQ ID NO: 2556599 - DNA, 25 bp, Homo sapien
ctcctgccgccggacgtgggacgta

SEQ ID NO: 2556600 - DNA, 25 bp, Homo sapien
agctcctgccgccggacgtgggacg

SEQ ID NO: 2556601 - DNA, 25 bp, Homo sapien
gctcctgccgccggacgtgggacgt

SEQ ID NO: 2556602 - DNA, 25 bp, Homo sapien
tcctgccgccggacgtgggacgtac

SEQ ID NO: 2556603 - DNA, 25 bp, Homo sapien
tgtgctccccagacggctgaaagga

SEQ ID NO: 2556604 - DNA, 25 bp, Homo sapien
gtgctccccagacggctgaaaggag

SEQ ID NO: 2556605 - DNA, 25 bp, Homo sapien
cgccgcctcctctccctgacacagg

SEQ ID NO: 2556606 - DNA, 25 bp, Homo sapien
ctctcgccgcctcctctccctgaca

SEQ ID NO: 2556607 - DNA, 25 bp, Homo sapien
tcgccgcctcctctccctgacacag

SEQ ID NO: 2556608 - DNA, 25 bp, Homo sapien
ctctctcgccgcctcctctccctga

SEQ ID NO: 2556609 - DNA, 25 bp, Homo sapien
tctgtggacttagctggccttggga

SEQ ID NO: 2556610 - DNA, 25 bp, Homo sapien
gggccccgctctgttgttgctgaag

SEQ ID NO: 2556611 - DNA, 25 bp, Homo sapien
tcatgggtgcactccaagaggcttc

SEQ ID NO: 2556612 - DNA, 25 bp, Homo sapien
aatgggcttggcgtaccatgaaccc

SEQ ID NO: 2556613 - DNA, 25 bp, Homo sapien
cgggtgcggcacattcctaggaagc

SEQ ID NO: 2556614 - DNA, 25 bp, Homo sapien
tgtcctgagcgtccatgttgggcca

SEQ ID NO: 2556615 - DNA, 25 bp, Homo sapien
tgtgggcactctggcactgccctgg

SEQ ID NO: 2556616 - DNA, 25 bp, Homo sapien
ggccgggccacttcgaattcactct

SEQ ID NO: 2556617 - DNA, 25 bp, Homo sapien
ggccaggccgatgctggtcaggctg

SEQ ID NO: 2556618 - DNA, 25 bp, Homo sapien
gtcctcaggaagctccggatgccct

SEQ ID NO: 2556619 - DNA, 25 bp, Homo sapien
gggccaggccgatgctggtcaggct

SEQ ID NO: 2556620 - DNA, 25 bp, Homo sapien
aggaggcaggccctgtcacaccaga

SEQ ID NO: 2556621 - DNA, 25 bp, Homo sapien
gggtcacccttccatctgagtcggg

SEQ ID NO: 2556622 - DNA, 25 bp, Homo sapien
accagagatcctgtcccgggtcacc

SEQ ID NO: 2556623 - DNA, 25 bp, Homo sapien
gactctgcagtgtaagggggcggcc

SEQ ID NO: 2556624 - DNA, 25 bp, Homo sapien
ccacagcggatggcaaaccacagga

SEQ ID NO: 2556625 - DNA, 25 bp, Homo sapien
aggagctgaagagcaaggcggacac

SEQ ID NO: 2556626 - DNA, 25 bp, Homo sapien
gccacagcggatggcaaaccacagg

SEQ ID NO: 2556627 - DNA, 25 bp, Homo sapien
cgtggggtcagggtgtatttgccct

SEQ ID NO: 2556628 - DNA, 25 bp, Homo sapien
gtcagggtgtatttgcccttgcggt

SEQ ID NO: 2556629 - DNA, 25 bp, Homo sapien
gggtcagggtgtatttgcccttgcg

SEQ ID NO: 2556630 - DNA, 25 bp, Homo sapien
cagggtgtatttgcccttgcggtcc

SEQ ID NO: 2556631 - DNA, 25 bp, Homo sapien
cctgtgaggctattgtggaatgttc

SEQ ID NO: 2556632 - DNA, 25 bp, Homo sapien
tgttctacaggggacctgtgaggct

SEQ ID NO: 2556633 - DNA, 25 bp, Homo sapien
tgtggaatgttctagaggggatcat

SEQ ID NO: 2556634 - DNA, 25 bp, Homo sapien
tggtggaatgttctacaggggacct

SEQ ID NO: 2556635 - DNA, 25 bp, Homo sapien
atgtgtgggtccaccctgggagcat

SEQ ID NO: 2556636 - DNA, 25 bp, Homo sapien
ggagtggagacaatgtgtgggtcca

SEQ ID NO: 2556637 - DNA, 25 bp, Homo sapien
ctgcttcggagtggagacaatgtgt

SEQ ID NO: 2556638 - DNA, 25 bp, Homo sapien
tgtgtgggtccaccctgggagcatc

SEQ ID NO: 2556639 - DNA, 25 bp, Homo sapien
gagcatcctcttggaccaatagcaa

SEQ ID NO: 2556640 - DNA, 25 bp, Homo sapien
tacccgagcatcctcttggaccaat

SEQ ID NO: 2556641 - DNA, 25 bp, Homo sapien
ccgagcatcctcttggaccaatagc

SEQ ID NO: 2556642 - DNA, 25 bp, Homo sapien
cccgagcatcctcttggaccaatag

SEQ ID NO: 2556643 - DNA, 25 bp, Homo sapien
gaggcgcagcatcgctctcctgcag

SEQ ID NO: 2556644 - DNA, 25 bp, Homo sapien
gggcagaggcgcagcatcgctctcc

SEQ ID NO: 2556645 - DNA, 25 bp, Homo sapien
agaggcgcagcatcgctctcctgca

SEQ ID NO: 2556646 - DNA, 25 bp, Homo sapien
gcagaggcgcagcatcgctctcctg

SEQ ID NO: 2556647 - DNA, 25 bp, Homo sapien
catctgttcccaatggagcctggct

SEQ ID NO: 2556648 - DNA, 25 bp, Homo sapien
gcatctgttcccaatggagcctggc

SEQ ID NO: 2556649 - DNA, 25 bp, Homo sapien
tacatccatgctgcttcttacgcag

SEQ ID NO: 2556650 - DNA, 25 bp, Homo sapien
catggagggatttggtgagctaccc

SEQ ID NO: 2556651 - DNA, 25 bp, Homo sapien
gagatcataaatgggcactgcttgc

SEQ ID NO: 2556652 - DNA, 25 bp, Homo sapien
gcatagaaaaccagtgcagcttgtg

SEQ ID NO: 2556653 - DNA, 25 bp, Homo sapien
tcagtctgagagaccccgctcaggg

SEQ ID NO: 2556654 - DNA, 25 bp, Homo sapien
tgagcccaccgcgacttctgccctg

SEQ ID NO: 2556655 - DNA, 25 bp, Homo sapien
cagtctgagagaccccgctcagggc

SEQ ID NO: 2556656 - DNA, 25 bp, Homo sapien
gcacccactgagcccaccgcgactt

SEQ ID NO: 2556657 - DNA, 25 bp, Homo sapien
gctcaatgcaccattgctggtttga

SEQ ID NO: 2556658 - DNA, 25 bp, Homo sapien
cagtcctacagccatgaggagttga

SEQ ID NO: 2556659 - DNA, 25 bp, Homo sapien
gccacaaaccatacacttaacaatg

SEQ ID NO: 2556660 - DNA, 25 bp, Homo sapien
aatttgctcaatgcaccattgctgg

SEQ ID NO: 2556661 - DNA, 25 bp, Homo sapien
ttagcccatgtggaccttgaccgtc

SEQ ID NO: 2556662 - DNA, 25 bp, Homo sapien
gctgatatgacctggaggtgaggaa

SEQ ID NO: 2556663 - DNA, 25 bp, Homo sapien
gggctgatatgacctggaggtgagg

SEQ ID NO: 2556664 - DNA, 25 bp, Homo sapien
tatgacctggaggtgaggaagttgt

SEQ ID NO: 2556665 - DNA, 25 bp, Homo sapien
aatgcatcaagaatttgcgtgccat

SEQ ID NO: 2556666 - DNA, 25 bp, Homo sapien
cttgcgcagggaggaccatgctaat

SEQ ID NO: 2556667 - DNA, 25 bp, Homo sapien
tggaatgcatcaagaatttgcgtgc

SEQ ID NO: 2556668 - DNA, 25 bp, Homo sapien
ttgcgcagggaggaccatgctaatc

SEQ ID NO: 2556669 - DNA, 25 bp, Homo sapien
tggcatatgggacaaaaaattaggg

SEQ ID NO: 2556670 - DNA, 25 bp, Homo sapien
gaattaagtggcatatgggacaaaa

SEQ ID NO: 2556671 - DNA, 25 bp, Homo sapien
gaaaaagtcttggtcatgtttgcca

SEQ ID NO: 2556672 - DNA, 25 bp, Homo sapien
gtttgccaagctttgaatattagac

SEQ ID NO: 2556673 - DNA, 25 bp, Homo sapien
tgtatttatcccttacgcatttggg

SEQ ID NO: 2556674 - DNA, 25 bp, Homo sapien
ctgatacccgatttgaaactttcct

SEQ ID NO: 2556675 - DNA, 25 bp, Homo sapien
catgtccaacagttacataggatag

SEQ ID NO: 2556676 - DNA, 25 bp, Homo sapien
gaactcctggatgtatggtacgaca

SEQ ID NO: 2556677 - DNA, 25 bp, Homo sapien
aggcgggaaagagtagaacgaggtg

SEQ ID NO: 2556678 - DNA, 25 bp, Homo sapien
ggaaagagtagaacgaggtgttcca

SEQ ID NO: 2556679 - DNA, 25 bp, Homo sapien
agagtagaacgaggtgttccatctg

SEQ ID NO: 2556680 - DNA, 25 bp, Homo sapien
aaagagtagaacgaggtgttccatc

SEQ ID NO: 2556681 - DNA, 25 bp, Homo sapien
gatagaaccttctgcaacgatggga

SEQ ID NO: 2556682 - DNA, 25 bp, Homo sapien
tagccagctcgtcttggcaagtgtc

SEQ ID NO: 2556683 - DNA, 25 bp, Homo sapien
tcgtccaacccagtgctagctgata

SEQ ID NO: 2556684 - DNA, 25 bp, Homo sapien
gaccaggtccggagaaccatcctct

SEQ ID NO: 2556685 - DNA, 25 bp, Homo sapien
cgctgggcgccggaggcctggcagg

SEQ ID NO: 2556686 - DNA, 25 bp, Homo sapien
gcgctgggcgccggaggcctggcag

SEQ ID NO: 2556687 - DNA, 25 bp, Homo sapien
tggccggcaagggggcctggcgggc

SEQ ID NO: 2556688 - DNA, 25 bp, Homo sapien
ggcgctgggcgccggaggcctggca

SEQ ID NO: 2556689 - DNA, 25 bp, Homo sapien
ccagaagacgaaattgaagacgaag

SEQ ID NO: 2556690 - DNA, 25 bp, Homo sapien
gatgcacttggtgcagccctccact

SEQ ID NO: 2556691 - DNA, 25 bp, Homo sapien
aaattgaagacgaagagcaggtact

SEQ ID NO: 2556692 - DNA, 25 bp, Homo sapien
aggtacttgatgcacttggtgcagc

SEQ ID NO: 2556693 - DNA, 25 bp, Homo sapien
tcaggggacggggcttcaggggctg

SEQ ID NO: 2556694 - DNA, 25 bp, Homo sapien
caggggacggggcttcaggggctgg

SEQ ID NO: 2556695 - DNA, 25 bp, Homo sapien
ctcgtcaggggacggggcttcaggg

SEQ ID NO: 2556696 - DNA, 25 bp, Homo sapien
tgaatcacgccacttccataactgg

SEQ ID NO: 2556697 - DNA, 25 bp, Homo sapien
tcacgccacttccataactgggagc

SEQ ID NO: 2556698 - DNA, 25 bp, Homo sapien
acttccataactgggagcccgaggg

SEQ ID NO: 2556699 - DNA, 25 bp, Homo sapien
ttctctgaatcacgccacttccata

SEQ ID NO: 2556700 - DNA, 25 bp, Homo sapien
cacgggtgcgcctctgggtaatcat

SEQ ID NO: 2556701 - DNA, 25 bp, Homo sapien
caaagaggcagaacagcaacgatgt

SEQ ID NO: 2556702 - DNA, 25 bp, Homo sapien
tctgagtccgcttgttgaagaaatg

SEQ ID NO: 2556703 - DNA, 25 bp, Homo sapien
caacgatgtgcaagtgccttctgag

SEQ ID NO: 2556704 - DNA, 25 bp, Homo sapien
ggaacagacgaagggcacaccacag

SEQ ID NO: 2556705 - DNA, 25 bp, Homo sapien
acctggggtccgtcgctggcttgca

SEQ ID NO: 2556706 - DNA, 25 bp, Homo sapien
cctgcccggcaataaaaggaacaga

SEQ ID NO: 2556707 - DNA, 25 bp, Homo sapien
gcacatgtgggtgcaaccctgcccg

SEQ ID NO: 2556708 - DNA, 25 bp, Homo sapien
tcactgccggtttctggatgaggaa

SEQ ID NO: 2556709 - DNA, 25 bp, Homo sapien
cagagtcaggaatgcgaaagacacc

SEQ ID NO: 2556710 - DNA, 25 bp, Homo sapien
aagagatgctccaccttgccaggga

SEQ ID NO: 2556711 - DNA, 25 bp, Homo sapien
gacctgtgccctgaacgtatgcaga

SEQ ID NO: 2556712 - DNA, 25 bp, Homo sapien
tcccagccctagcatggacaaacgg

SEQ ID NO: 2556713 - DNA, 25 bp, Homo sapien
gccaagctctccgaccttcagcagg

SEQ ID NO: 2556714 - DNA, 25 bp, Homo sapien
cttcagcagggaccttgagctggag

SEQ ID NO: 2556715 - DNA, 25 bp, Homo sapien
gacaaacggggccatgccaagctct

SEQ ID NO: 2556716 - DNA, 25 bp, Homo sapien
acacccaggatcacgcctccagcca

SEQ ID NO: 2556717 - DNA, 25 bp, Homo sapien
ctacatagaaggtgttgggcgcggg

SEQ ID NO: 2556718 - DNA, 25 bp, Homo sapien
gttgggcgcgggcttgtctcccagc

SEQ ID NO: 2556719 - DNA, 25 bp, Homo sapien
ggttggtggtctgcgggtcatggcg

SEQ ID NO: 2556720 - DNA, 25 bp, Homo sapien
tgtggggctatttcggcctcctggg

SEQ ID NO: 2556721 - DNA, 25 bp, Homo sapien
aaagaggtgggacggcgcaggtgtg

SEQ ID NO: 2556722 - DNA, 25 bp, Homo sapien
ccctggggtgactggacaaagaggt

SEQ ID NO: 2556723 - DNA, 25 bp, Homo sapien
ggccctggttcagcaaccaagccaa

SEQ ID NO: 2556724 - DNA, 25 bp, Homo sapien
cagcccgaagctaagtgacccttca

SEQ ID NO: 2556725 - DNA, 25 bp, Homo sapien
tcgccccagcccgaagctaagtgac

SEQ ID NO: 2556726 - DNA, 25 bp, Homo sapien
agccacaagccttggccgccgggtg

SEQ ID NO: 2556727 - DNA, 25 bp, Homo sapien
ccagccacaagccttggccgccggg

SEQ ID NO: 2556728 - DNA, 25 bp, Homo sapien
ctggaccagggcgtgtaggccagcc

SEQ ID NO: 2556729 - DNA, 25 bp, Homo sapien
ggaagatgtagggttgctgactgcc

SEQ ID NO: 2556730 - DNA, 25 bp, Homo sapien
tgactgccagggatgagcagcaagg

SEQ ID NO: 2556731 - DNA, 25 bp, Homo sapien
gaagatgtagggttgctgactgcca

SEQ ID NO: 2556732 - DNA, 25 bp, Homo sapien
ctgccagggatgagcagcaagggac

SEQ ID NO: 2556733 - DNA, 25 bp, Homo sapien
caccaggtgggtgcctacacactcg

SEQ ID NO: 2556734 - DNA, 25 bp, Homo sapien
gtgggtgcctacacactcgccacag

SEQ ID NO: 2556735 - DNA, 25 bp, Homo sapien
acaccaggtgggtgcctacacactc

SEQ ID NO: 2556736 - DNA, 25 bp, Homo sapien
caggtgggtgcctacacactcgcca

SEQ ID NO: 2556737 - DNA, 25 bp, Homo sapien
tggatggccccgtagcagcccagga

SEQ ID NO: 2556738 - DNA, 25 bp, Homo sapien
agcccaggaagccaacgaacatcat

SEQ ID NO: 2556739 - DNA, 25 bp, Homo sapien
caggaagccaacgaacatcatgaca

SEQ ID NO: 2556740 - DNA, 25 bp, Homo sapien
agccaacgaacatcatgacagcgcc

SEQ ID NO: 2556741 - DNA, 25 bp, Homo sapien
gggcaggctgtaggcggggcccaag

SEQ ID NO: 2556742 - DNA, 25 bp, Homo sapien
ctgtaggcggggcccaaggacacac

SEQ ID NO: 2556743 - DNA, 25 bp, Homo sapien
gggaggaaagagggcaggctgtagg

SEQ ID NO: 2556744 - DNA, 25 bp, Homo sapien
cacaggcaaacaggatgaccaggca

SEQ ID NO: 2556745 - DNA, 25 bp, Homo sapien
tgccggcggccacctcacaggcaaa

SEQ ID NO: 2556746 - DNA, 25 bp, Homo sapien
tgacaaagccccagatgccggcggc

SEQ ID NO: 2556747 - DNA, 25 bp, Homo sapien
ctggtccttgttgacaaagccccag

SEQ ID NO: 2556748 - DNA, 25 bp, Homo sapien
gccttggcgttgttggcgtcatcat

SEQ ID NO: 2556749 - DNA, 25 bp, Homo sapien
cacagccttggcgttgttggcgtca

SEQ ID NO: 2556750 - DNA, 25 bp, Homo sapien
tcaccacagccttggcgttgttggc

SEQ ID NO: 2556751 - DNA, 25 bp, Homo sapien
cagccttggcgttgttggcgtcatc

SEQ ID NO: 2556752 - DNA, 25 bp, Homo sapien
tgagcactgaggtggtcaaagcagt

SEQ ID NO: 2556753 - DNA, 25 bp, Homo sapien
gatgatgttgctgcccgagggacac

SEQ ID NO: 2556754 - DNA, 25 bp, Homo sapien
ctgaggtggtcaaagcagtcagtgt

SEQ ID NO: 2556755 - DNA, 25 bp, Homo sapien
ttgttcttgagcactgaggtggtca

SEQ ID NO: 2556756 - DNA, 25 bp, Homo sapien
tcactgatgacgacttccactgagg

SEQ ID NO: 2556757 - DNA, 25 bp, Homo sapien
tggtcaccacagaaagcgtagaggg

SEQ ID NO: 2556758 - DNA, 25 bp, Homo sapien
taacataaacgcgaaatgcctggga

SEQ ID NO: 2556759 - DNA, 25 bp, Homo sapien
gaaacttccacagggcactatatgg

SEQ ID NO: 2556760 - DNA, 25 bp, Homo sapien
acagcgaccacgatggcagcaatgc

SEQ ID NO: 2556761 - DNA, 25 bp, Homo sapien
gcagcaatgccgatgaggtacagct

SEQ ID NO: 2556762 - DNA, 25 bp, Homo sapien
agaggtcatcgatcttctggtggca

SEQ ID NO: 2556763 - DNA, 25 bp, Homo sapien
cgatgaggtacagcttcccggagaa

SEQ ID NO: 2556764 - DNA, 25 bp, Homo sapien
cagtcagcacaaggccccgcggaag

SEQ ID NO: 2556765 - DNA, 25 bp, Homo sapien
gggcgcagtcagcacaaggccccgc

SEQ ID NO: 2556766 - DNA, 25 bp, Homo sapien
tggggggcgcagtcagcacaaggcc

SEQ ID NO: 2556767 - DNA, 25 bp, Homo sapien
tggtggggggcgcagtcagcacaag

SEQ ID NO: 2556768 - DNA, 25 bp, Homo sapien
gctgttccggatgccacagcacagc

SEQ ID NO: 2556769 - DNA, 25 bp, Homo sapien
cacggagctgttccggatgccacag

SEQ ID NO: 2556770 - DNA, 25 bp, Homo sapien
tacacggagctgttccggatgccac

SEQ ID NO: 2556771 - DNA, 25 bp, Homo sapien
tcagtacacggagctgttccggatg

SEQ ID NO: 2556772 - DNA, 25 bp, Homo sapien
gaaacgttatatacacaggcggtga

SEQ ID NO: 2556773 - DNA, 25 bp, Homo sapien
gctacgtgtagcagagtaataccgg

SEQ ID NO: 2556774 - DNA, 25 bp, Homo sapien
catgtgacgtcagccctgaaaaggt

SEQ ID NO: 2556775 - DNA, 25 bp, Homo sapien
tcatacacgccacctacatgtgacg

SEQ ID NO: 2556776 - DNA, 25 bp, Homo sapien
cagagtgactcctttggtgaacacc

SEQ ID NO: 2556777 - DNA, 25 bp, Homo sapien
acaggccaccggtgctcatatttgg

SEQ ID NO: 2556778 - DNA, 25 bp, Homo sapien
tatacaattaagtagccagaccgcc

SEQ ID NO: 2556779 - DNA, 25 bp, Homo sapien
tgtaatgatcaatgtcctatgtccc

SEQ ID NO: 2556780 - DNA, 25 bp, Homo sapien
tagcctggccaccgtggcgaaacac

SEQ ID NO: 2556781 - DNA, 25 bp, Homo sapien
gagaattaactaagattctggtacc

SEQ ID NO: 2556782 - DNA, 25 bp, Homo sapien
tctgtagtaataagataccaacgtg

SEQ ID NO: 2556783 - DNA, 25 bp, Homo sapien
aagataccaacgtgacagcaggccc

SEQ ID NO: 2556784 - DNA, 25 bp, Homo sapien
gaaacaagaccggaattgaccaaga

SEQ ID NO: 2556785 - DNA, 25 bp, Homo sapien
gtgtagtcctgtgcgcatgcgctcg

SEQ ID NO: 2556786 - DNA, 25 bp, Homo sapien
gctcagccctctgggaaaccgagtg

SEQ ID NO: 2556787 - DNA, 25 bp, Homo sapien
cagccccggaaacgacggcatttgt

SEQ ID NO: 2556788 - DNA, 25 bp, Homo sapien
caggtattaaagctgcgctcggtga

SEQ ID NO: 2556789 - DNA, 25 bp, Homo sapien
cacacagtatgttgcagacgaagct

SEQ ID NO: 2556790 - DNA, 25 bp, Homo sapien
gatcgggctgcaagatagggactcc

SEQ ID NO: 2556791 - DNA, 25 bp, Homo sapien
tttctccacatgaacgcagagcccg

SEQ ID NO: 2556792 - DNA, 25 bp, Homo sapien
ggtgcctcagaacttgaatttccag

SEQ ID NO: 2556793 - DNA, 25 bp, Homo sapien
gtgtcttgtgcacccaataaggatg

SEQ ID NO: 2556794 - DNA, 25 bp, Homo sapien
gtggccttccacctgtaacactcag

SEQ ID NO: 2556795 - DNA, 25 bp, Homo sapien
ctgttaggcagaggtaaatccccgc

SEQ ID NO: 2556796 - DNA, 25 bp, Homo sapien
tatttgctggaagatccccgggagc

SEQ ID NO: 2556797 - DNA, 25 bp, Homo sapien
gaaaagatttgctcctatttgctgg

SEQ ID NO: 2556798 - DNA, 25 bp, Homo sapien
gggtgtcgaccatcaccttgagcag

SEQ ID NO: 2556799 - DNA, 25 bp, Homo sapien
tccccgggagctcccaaggaatctg

SEQ ID NO: 2556800 - DNA, 25 bp, Homo sapien
ctgagcgattttggtagtaagcagc

SEQ ID NO: 2556801 - DNA, 25 bp, Homo sapien
cacttataagctgcttgctgtgcgg

SEQ ID NO: 2556802 - DNA, 25 bp, Homo sapien
caggcttggagctactgagcgattt

SEQ ID NO: 2556803 - DNA, 25 bp, Homo sapien
agtcgtattccacaaagagcgtgca

SEQ ID NO: 2556804 - DNA, 25 bp, Homo sapien
gagaggaccaacctcagaccggagt

SEQ ID NO: 2556805 - DNA, 25 bp, Homo sapien
tgccgggcaggaccgacctgagcct

SEQ ID NO: 2556806 - DNA, 25 bp, Homo sapien
cctgggttttcggagcccctgacag

SEQ ID NO: 2556807 - DNA, 25 bp, Homo sapien
cctgacaggctaggacccagggtag

SEQ ID NO: 2556808 - DNA, 25 bp, Homo sapien
tcctcagcggcacaggcgtggtcgt

SEQ ID NO: 2556809 - DNA, 25 bp, Homo sapien
tgtgattggacagccaagcgggcca

SEQ ID NO: 2556810 - DNA, 25 bp, Homo sapien
tcaggcctcggagtgccccggcatg

SEQ ID NO: 2556811 - DNA, 25 bp, Homo sapien
acaggcgtggtcgtctcaggcctcg

SEQ ID NO: 2556812 - DNA, 25 bp, Homo sapien
acttcagcaccaccgggcaagctga

SEQ ID NO: 2556813 - DNA, 25 bp, Homo sapien
gagggcggctcatcaggacctgaat

SEQ ID NO: 2556814 - DNA, 25 bp, Homo sapien
tgaggtcagagtccgagtcactgag

SEQ ID NO: 2556815 - DNA, 25 bp, Homo sapien
actgtgtcggaaggcagcgtgtcat

SEQ ID NO: 2556816 - DNA, 25 bp, Homo sapien
gggccgcttgaagcctccgttgtca

SEQ ID NO: 2556817 - DNA, 25 bp, Homo sapien
cgttgtcactcatgctggtgtgggc

SEQ ID NO: 2556818 - DNA, 25 bp, Homo sapien
tggagctcatgcctctcagatggaa

SEQ ID NO: 2556819 - DNA, 25 bp, Homo sapien
gtcaaagatgtcacggctgcgctgg

SEQ ID NO: 2556820 - DNA, 25 bp, Homo sapien
tcgacccctcggactggtttggtga

SEQ ID NO: 2556821 - DNA, 25 bp, Homo sapien
tcttcctctcgtgtctggcttcgac

SEQ ID NO: 2556822 - DNA, 25 bp, Homo sapien
cggtggcctgattgctctgctcgct

SEQ ID NO: 2556823 - DNA, 25 bp, Homo sapien
gatcctggttgaaggaggacacgca

SEQ ID NO: 2556824 - DNA, 25 bp, Homo sapien
cactgtggacagaccctgacagtgc

SEQ ID NO: 2556825 - DNA, 25 bp, Homo sapien
agacccactgtggacagaccctgac

SEQ ID NO: 2556826 - DNA, 25 bp, Homo sapien
ctggcacagacccactgtggacaga

SEQ ID NO: 2556827 - DNA, 25 bp, Homo sapien
cacagacccactgtggacagaccct

SEQ ID NO: 2556828 - DNA, 25 bp, Homo sapien
gccaacagtttccaccggcgggaga

SEQ ID NO: 2556829 - DNA, 25 bp, Homo sapien
ttgttccggaagtggtctcgactcc

SEQ ID NO: 2556830 - DNA, 25 bp, Homo sapien
tgccatggaagccaacagtttccac

SEQ ID NO: 2556831 - DNA, 25 bp, Homo sapien
gtggtctcgactccgcttcctgctg

SEQ ID NO: 2556832 - DNA, 25 bp, Homo sapien
tattgtccctaccagggagccagtg

SEQ ID NO: 2556833 - DNA, 25 bp, Homo sapien
attgtccctaccagggagccagtgc

SEQ ID NO: 2556834 - DNA, 25 bp, Homo sapien
cggagactgctcctgacacagcatc

SEQ ID NO: 2556835 - DNA, 25 bp, Homo sapien
cagcccatctggcggaaatcacttc

SEQ ID NO: 2556836 - DNA, 25 bp, Homo sapien
catcgattcttggagttgtcggcat

SEQ ID NO: 2556837 - DNA, 25 bp, Homo sapien
gacacagcatcgattcttggagttg

SEQ ID NO: 2556838 - DNA, 25 bp, Homo sapien
tgtctcccaattcacagcttgggtg

SEQ ID NO: 2556839 - DNA, 25 bp, Homo sapien
ctgtctcccaattcacagcttgggt

SEQ ID NO: 2556840 - DNA, 25 bp, Homo sapien
cagcttgggtgtaccccacctcctc

SEQ ID NO: 2556841 - DNA, 25 bp, Homo sapien
tcacagcttgggtgtaccccacctc

SEQ ID NO: 2556842 - DNA, 25 bp, Homo sapien
tgctctgggggtatggggtcccatt

SEQ ID NO: 2556843 - DNA, 25 bp, Homo sapien
ctgctctgggggtatggggtcccat

SEQ ID NO: 2556844 - DNA, 25 bp, Homo sapien
gctgcagcgaaggcgagcgcccggg

SEQ ID NO: 2556845 - DNA, 25 bp, Homo sapien
agctgcagcgaaggcgagcgcccgg

SEQ ID NO: 2556846 - DNA, 25 bp, Homo sapien
gagctgcagcgaaggcgagcgcccg

SEQ ID NO: 2556847 - DNA, 25 bp, Homo sapien
tgcagcgaaggcgagcgcccgggcg

SEQ ID NO: 2556848 - DNA, 25 bp, Homo sapien
gccgggcgcgatgggcgcgtagagc

SEQ ID NO: 2556849 - DNA, 25 bp, Homo sapien
gcgccgggcgcgatgggcgcgtaga

SEQ ID NO: 2556850 - DNA, 25 bp, Homo sapien
ggcgccgggcgcgatgggcgcgtag

SEQ ID NO: 2556851 - DNA, 25 bp, Homo sapien
ggggcgccgggcgcgatgggcgcgt

SEQ ID NO: 2556852 - DNA, 25 bp, Homo sapien
ggccgcgggccaaggtcggaggcaa

SEQ ID NO: 2556853 - DNA, 25 bp, Homo sapien
gcgggccaaggtcggaggcaactgg

SEQ ID NO: 2556854 - DNA, 25 bp, Homo sapien
acgcgcgggtctaggctcaccggcg

SEQ ID NO: 2556855 - DNA, 25 bp, Homo sapien
ctgtagatggagacgcgcgggtcta

SEQ ID NO: 2556856 - DNA, 25 bp, Homo sapien
gtgggtgcgcgccaacaccgggcgg

SEQ ID NO: 2556857 - DNA, 25 bp, Homo sapien
tccagccggtgggacgctcgaggaa

SEQ ID NO: 2556858 - DNA, 25 bp, Homo sapien
tgggacgctcgaggaagttgtagac

SEQ ID NO: 2556859 - DNA, 25 bp, Homo sapien
tcgaggaagttgtagacgcggccct

SEQ ID NO: 2556860 - DNA, 25 bp, Homo sapien
ggtctgggccctgttgcatctccgg

SEQ ID NO: 2556861 - DNA, 25 bp, Homo sapien
cccatgggcactgcaagcaaggact

SEQ ID NO: 2556862 - DNA, 25 bp, Homo sapien
gttgcatctccggacacctctgctg

SEQ ID NO: 2556863 - DNA, 25 bp, Homo sapien
cacacctgcactggggtgcggctct

SEQ ID NO: 2556864 - DNA, 25 bp, Homo sapien
ctcccttggggcattgctgccctcc

SEQ ID NO: 2556865 - DNA, 25 bp, Homo sapien
cttggggcattgctgccctccacca

SEQ ID NO: 2556866 - DNA, 25 bp, Homo sapien
ccttggggcattgctgccctccacc

SEQ ID NO: 2556867 - DNA, 25 bp, Homo sapien
tcccttggggcattgctgccctcca

SEQ ID NO: 2556868 - DNA, 25 bp, Homo sapien
ggcttatctcctccacactcaaggt

SEQ ID NO: 2556869 - DNA, 25 bp, Homo sapien
gactacaaatctgctgcgaggcggc

SEQ ID NO: 2556870 - DNA, 25 bp, Homo sapien
cagagcttcagaggctatttcagga

SEQ ID NO: 2556871 - DNA, 25 bp, Homo sapien
tatttcaggaacgacagcaaccaga

SEQ ID NO: 2556872 - DNA, 25 bp, Homo sapien
aaattcccgagagccagaaacctgg

SEQ ID NO: 2556873 - DNA, 25 bp, Homo sapien
catgtgcaggcgcaaagacagtgcc

SEQ ID NO: 2556874 - DNA, 25 bp, Homo sapien
taaacaaaagcagccgtgatctggg

SEQ ID NO: 2556875 - DNA, 25 bp, Homo sapien
agtaaatccaggcccggcaccagtg

SEQ ID NO: 2556876 - DNA, 25 bp, Homo sapien
agcagacagctgcacccagtgggtg

SEQ ID NO: 2556877 - DNA, 25 bp, Homo sapien
cacccagtgggtgctggaagcagca

SEQ ID NO: 2556878 - DNA, 25 bp, Homo sapien
agacagcagacagctgcacccagtg

SEQ ID NO: 2556879 - DNA, 25 bp, Homo sapien
acagctgcacccagtgggtgctgga

SEQ ID NO: 2556880 - DNA, 25 bp, Homo sapien
aaacagcctctaccttgcaggccag

SEQ ID NO: 2556881 - DNA, 25 bp, Homo sapien
ctctaccttgcaggccagtgagaac

SEQ ID NO: 2556882 - DNA, 25 bp, Homo sapien
tagagggggcaaatgtatcctcagc

SEQ ID NO: 2556883 - DNA, 25 bp, Homo sapien
agcctctaccttgcaggccagtgag

SEQ ID NO: 2556884 - DNA, 25 bp, Homo sapien
tgcgcctccgtgcagctgtaccagg

SEQ ID NO: 2556885 - DNA, 25 bp, Homo sapien
accagaacattccaccacttgtcct

SEQ ID NO: 2556886 - DNA, 25 bp, Homo sapien
tgctgcgcctccgtgcagctgtacc

SEQ ID NO: 2556887 - DNA, 25 bp, Homo sapien
gaacattccaccacttgtcctgtgg

SEQ ID NO: 2556888 - DNA, 25 bp, Homo sapien
cccagtccccggaagaggcagggtg

SEQ ID NO: 2556889 - DNA, 25 bp, Homo sapien
ggtgcccagggcagcgtgactttga

SEQ ID NO: 2556890 - DNA, 25 bp, Homo sapien
gggccacgataagagggaggtggag

SEQ ID NO: 2556891 - DNA, 25 bp, Homo sapien
cctgtccaggggaccgaagccagga

SEQ ID NO: 2556892 - DNA, 25 bp, Homo sapien
cccctcgcagggcaatgtcttgtga

SEQ ID NO: 2556893 - DNA, 25 bp, Homo sapien
tacagggagcctccacgtggtagcg

SEQ ID NO: 2556894 - DNA, 25 bp, Homo sapien
agaggccgccactctgaaactcgag

SEQ ID NO: 2556895 - DNA, 25 bp, Homo sapien
gttatcaaaccagacccaactgccg

SEQ ID NO: 2556896 - DNA, 25 bp, Homo sapien
gcggcccactgcgtacagcttgtat

SEQ ID NO: 2556897 - DNA, 25 bp, Homo sapien
gggtgaccacgacgaaggcttgtta

SEQ ID NO: 2556898 - DNA, 25 bp, Homo sapien
gccagtcaggcccagtcgttctaat

SEQ ID NO: 2556899 - DNA, 25 bp, Homo sapien
gcttgttatctgctgtccgggccat

SEQ ID NO: 2556900 - DNA, 25 bp, Homo sapien
tgaaaagattaaaacccacagccca

SEQ ID NO: 2556901 - DNA, 25 bp, Homo sapien
agaaaattcagatgagcaaaaatga

SEQ ID NO: 2556902 - DNA, 25 bp, Homo sapien
tttaattagaaaattcagatgagca

SEQ ID NO: 2556903 - DNA, 25 bp, Homo sapien
attagaaaattcagatgagcaaaaa

SEQ ID NO: 2556904 - DNA, 25 bp, Homo sapien
taaaccgaagaccatgaaacatggg

SEQ ID NO: 2556905 - DNA, 25 bp, Homo sapien
gcctagcactgcgagtaaaccgaag

SEQ ID NO: 2556906 - DNA, 25 bp, Homo sapien
gaattagaaagacgtgtcggacgcc

SEQ ID NO: 2556907 - DNA, 25 bp, Homo sapien
acatccagaatagctaaatccaggg

SEQ ID NO: 2556908 - DNA, 25 bp, Homo sapien
ggaaagggacgtggcgtgacgtgct

SEQ ID NO: 2556909 - DNA, 25 bp, Homo sapien
gtgacgtgctgggagtgaaacgctg

SEQ ID NO: 2556910 - DNA, 25 bp, Homo sapien
gtgaaacgctgacacctccgtggcc

SEQ ID NO: 2556911 - DNA, 25 bp, Homo sapien
cgtggcgtgacgtgctgggagtgaa

SEQ ID NO: 2556912 - DNA, 25 bp, Homo sapien
cagtgggtctgttcccggctgtcac

SEQ ID NO: 2556913 - DNA, 25 bp, Homo sapien
tgttcccggctgtcacttgtcacct

SEQ ID NO: 2556914 - DNA, 25 bp, Homo sapien
gctgcatcacgccaccattggccgg

SEQ ID NO: 2556915 - DNA, 25 bp, Homo sapien
gatgccaggacatatctaaagagag

SEQ ID NO: 2556916 - DNA, 25 bp, Homo sapien
cacctcagtgcggagcgtggagcct

SEQ ID NO: 2556917 - DNA, 25 bp, Homo sapien
gagcctgggccctgatccctccttt

SEQ ID NO: 2556918 - DNA, 25 bp, Homo sapien
gagtgtcacgtcaaagcccttcaga

SEQ ID NO: 2556919 - DNA, 25 bp, Homo sapien
tgaacacagccgtgcttgagggccc

SEQ ID NO: 2556920 - DNA, 25 bp, Homo sapien
gaactttgcactctcgtgaccgtat

SEQ ID NO: 2556921 - DNA, 25 bp, Homo sapien
gggcgtgtaaccactggagcgtttc

SEQ ID NO: 2556922 - DNA, 25 bp, Homo sapien
ctcgtgaccgtatgcttaatttctt

SEQ ID NO: 2556923 - DNA, 25 bp, Homo sapien
cgtgtaaccactggagcgtttcaca

SEQ ID NO: 2556924 - DNA, 25 bp, Homo sapien
cctgaggccttggataagccggaag

SEQ ID NO: 2556925 - DNA, 25 bp, Homo sapien
gccagtgctgtctactgcaaagatg

SEQ ID NO: 2556926 - DNA, 25 bp, Homo sapien
tgacgtccagcagggaatcagcagc

SEQ ID NO: 2556927 - DNA, 25 bp, Homo sapien
agcgagcgtcgacttcaccctgagg

SEQ ID NO: 2556928 - DNA, 25 bp, Homo sapien
gtccccgtggccagggcggcatact

SEQ ID NO: 2556929 - DNA, 25 bp, Homo sapien
tccagaagagagtccccgtggccag

SEQ ID NO: 2556930 - DNA, 25 bp, Homo sapien
ggcatactgctcgatggtggacagc

SEQ ID NO: 2556931 - DNA, 25 bp, Homo sapien
tgaggcagaccaggacgatgaggaa

SEQ ID NO: 2556932 - DNA, 25 bp, Homo sapien
ttatggggcccagcgccagggagat

SEQ ID NO: 2556933 - DNA, 25 bp, Homo sapien
agccatgccctcagatgctacgtac

SEQ ID NO: 2556934 - DNA, 25 bp, Homo sapien
cttccaaggcagccatgacatccag

SEQ ID NO: 2556935 - DNA, 25 bp, Homo sapien
cttatggggcccagcgccagggaga

SEQ ID NO: 2556936 - DNA, 25 bp, Homo sapien
gtgatggcaacgttcactgggaaaa

SEQ ID NO: 2556937 - DNA, 25 bp, Homo sapien
ataaggtgatggcaacgttcactgg

SEQ ID NO: 2556938 - DNA, 25 bp, Homo sapien
aaaagcaaggctgcaagcgccacca

SEQ ID NO: 2556939 - DNA, 25 bp, Homo sapien
gcaaggctgcaagcgccaccaggaa

SEQ ID NO: 2556940 - DNA, 25 bp, Homo sapien
ccaccgagatgtcagtctcccccag

SEQ ID NO: 2556941 - DNA, 25 bp, Homo sapien
accgagatgtcagtctcccccagtt

SEQ ID NO: 2556942 - DNA, 25 bp, Homo sapien
agatgtcagtctcccccagtttatt

SEQ ID NO: 2556943 - DNA, 25 bp, Homo sapien
cgagatgtcagtctcccccagttta

SEQ ID NO: 2556944 - DNA, 25 bp, Homo sapien
aaacatgaggcccatgctgccaagg

SEQ ID NO: 2556945 - DNA, 25 bp, Homo sapien
ttggggaccccataaaacatgaggc

SEQ ID NO: 2556946 - DNA, 25 bp, Homo sapien
gaggcccatgctgccaagggtattg

SEQ ID NO: 2556947 - DNA, 25 bp, Homo sapien
gctgccaagggtattggacatcgcc

SEQ ID NO: 2556948 - DNA, 25 bp, Homo sapien
gtttagatgccgcatgggggccttg

SEQ ID NO: 2556949 - DNA, 25 bp, Homo sapien
ccctgcctggtttagatgccgcatg

SEQ ID NO: 2556950 - DNA, 25 bp, Homo sapien
ctgcctggtttagatgccgcatggg

SEQ ID NO: 2556951 - DNA, 25 bp, Homo sapien
ttagatgccgcatgggggccttggg

SEQ ID NO: 2556952 - DNA, 25 bp, Homo sapien
tcccaggtgaaaaacaccaggtgag

SEQ ID NO: 2556953 - DNA, 25 bp, Homo sapien
cagaaatggtgctgcgggaaaccgc

SEQ ID NO: 2556954 - DNA, 25 bp, Homo sapien
gctctgcgtcttttcccggcagcgg

SEQ ID NO: 2556955 - DNA, 25 bp, Homo sapien
caaaggtgcctttgctctgcgtctt

SEQ ID NO: 2556956 - DNA, 25 bp, Homo sapien
tctgggcctagctccaggggctcag

SEQ ID NO: 2556957 - DNA, 25 bp, Homo sapien
atctgtcaagtcctctgggcctagc

SEQ ID NO: 2556958 - DNA, 25 bp, Homo sapien
ggctccagcccgcacatacacaggg

SEQ ID NO: 2556959 - DNA, 25 bp, Homo sapien
gctccagcccgcacatacacagggc

SEQ ID NO: 2556960 - DNA, 25 bp, Homo sapien
gggggcgcacctggcggagatctgg

SEQ ID NO: 2556961 - DNA, 25 bp, Homo sapien
gacttgccaccaggcacgagccagg

SEQ ID NO: 2556962 - DNA, 25 bp, Homo sapien
gaggacttgccaccaggcacgagcc

SEQ ID NO: 2556963 - DNA, 25 bp, Homo sapien
ccaggcacgagccaggcccccatcc

SEQ ID NO: 2556964 - DNA, 25 bp, Homo sapien
ttattttgtgcccactagaactgtc

SEQ ID NO: 2556965 - DNA, 25 bp, Homo sapien
cacttattttgtgcccactagaact

SEQ ID NO: 2556966 - DNA, 25 bp, Homo sapien
cttattttgtgcccactagaactgt

SEQ ID NO: 2556967 - DNA, 25 bp, Homo sapien
acttattttgtgcccactagaactg

SEQ ID NO: 2556968 - DNA, 25 bp, Homo sapien
gccccttgtccgtagctctgggagt

SEQ ID NO: 2556969 - DNA, 25 bp, Homo sapien
tgtccgtagctctgggagtaactgc

SEQ ID NO: 2556970 - DNA, 25 bp, Homo sapien
ccgtagctctgggagtaactgcaaa

SEQ ID NO: 2556971 - DNA, 25 bp, Homo sapien
ccttgtccgtagctctgggagtaac

SEQ ID NO: 2556972 - DNA, 25 bp, Homo sapien
gtcgtcatggggatggccgttccca

SEQ ID NO: 2556973 - DNA, 25 bp, Homo sapien
gacttgctgggtcgtcatggggatg

SEQ ID NO: 2556974 - DNA, 25 bp, Homo sapien
cgttcccatccaccgggcagccggg

SEQ ID NO: 2556975 - DNA, 25 bp, Homo sapien
tggtgagcgagagaggcaagggact

SEQ ID NO: 2556976 - DNA, 25 bp, Homo sapien
gccagctgcccggacgtgtcttctt

SEQ ID NO: 2556977 - DNA, 25 bp, Homo sapien
ctgccagctgcccggacgtgtcttc

SEQ ID NO: 2556978 - DNA, 25 bp, Homo sapien
tgccagctgcccggacgtgtcttct

SEQ ID NO: 2556979 - DNA, 25 bp, Homo sapien
ccagctgcccggacgtgtcttcttc

SEQ ID NO: 2556980 - DNA, 25 bp, Homo sapien
ttgggccagagggcgtcccacgcca

SEQ ID NO: 2556981 - DNA, 25 bp, Homo sapien
agcttgggccagagggcgtcccacg

SEQ ID NO: 2556982 - DNA, 25 bp, Homo sapien
cagcttgggccagagggcgtcccac

SEQ ID NO: 2556983 - DNA, 25 bp, Homo sapien
gcttgggccagagggcgtcccacgc

SEQ ID NO: 2556984 - DNA, 25 bp, Homo sapien
ccacgtacttgctgcggcagccggc

SEQ ID NO: 2556985 - DNA, 25 bp, Homo sapien
atggaaatgggcttccgggcaaagc

SEQ ID NO: 2556986 - DNA, 25 bp, Homo sapien
cagccggcggaccagaggcggacca

SEQ ID NO: 2556987 - DNA, 25 bp, Homo sapien
tactccgtcccgaagaacaccacca

SEQ ID NO: 2556988 - DNA, 25 bp, Homo sapien
gagcccacgcagaggaccaccatgg

SEQ ID NO: 2556989 - DNA, 25 bp, Homo sapien
cttggagcccacgcagaggaccacc

SEQ ID NO: 2556990 - DNA, 25 bp, Homo sapien
gcccacgcagaggaccaccatggag

SEQ ID NO: 2556991 - DNA, 25 bp, Homo sapien
cccttggagcccacgcagaggacca

SEQ ID NO: 2556992 - DNA, 25 bp, Homo sapien
tggatgaagaccacggagcccagga

SEQ ID NO: 2556993 - DNA, 25 bp, Homo sapien
cggtggatgaagaccacggagccca

SEQ ID NO: 2556994 - DNA, 25 bp, Homo sapien
tcgacgtgtagcatcctcaggatct

SEQ ID NO: 2556995 - DNA, 25 bp, Homo sapien
gcctccctggcggtcgacgtgtagc

SEQ ID NO: 2556996 - DNA, 25 bp, Homo sapien
cagcgcatctgcgtagctgccgaac

SEQ ID NO: 2556997 - DNA, 25 bp, Homo sapien
ggcctgactcgttcaccgcgtcctt

SEQ ID NO: 2556998 - DNA, 25 bp, Homo sapien
aagtacgaggagaagatgaggccca

SEQ ID NO: 2556999 - DNA, 25 bp, Homo sapien
gccaggtacacaaagtacgaggaga

SEQ ID NO: 2557000 - DNA, 25 bp, Homo sapien
gccaccctgggccttagtggcctgt

SEQ ID NO: 2557001 - DNA, 25 bp, Homo sapien
cttagtggcctgtggacggcccacc

SEQ ID NO: 2557002 - DNA, 25 bp, Homo sapien
gggccactccccaaggtgtgatggt

SEQ ID NO: 2557003 - DNA, 25 bp, Homo sapien
agggccactccccaaggtgtgatgg

SEQ ID NO: 2557004 - DNA, 25 bp, Homo sapien
cactggggccttcggggacacaggc

SEQ ID NO: 2557005 - DNA, 25 bp, Homo sapien
acactggggccttcggggacacagg

SEQ ID NO: 2557006 - DNA, 25 bp, Homo sapien
cacactggggccttcggggacacag

SEQ ID NO: 2557007 - DNA, 25 bp, Homo sapien
cttgaacgcacagcgcaggcacacg

SEQ ID NO: 2557008 - DNA, 25 bp, Homo sapien
acgcacagcgcaggcacacggagcg

SEQ ID NO: 2557009 - DNA, 25 bp, Homo sapien
gcaggcacacggagcgcagccaggt

SEQ ID NO: 2557010 - DNA, 25 bp, Homo sapien
caggcacacggagcgcagccaggtc

SEQ ID NO: 2557011 - DNA, 25 bp, Homo sapien
aagcaggaggcgatggtcttcccga

SEQ ID NO: 2557012 - DNA, 25 bp, Homo sapien
caccttgtccccatagccgatggtg

SEQ ID NO: 2557013 - DNA, 25 bp, Homo sapien
atggtcttcccgacccacgtctggg

SEQ ID NO: 2557014 - DNA, 25 bp, Homo sapien
gcaccttgtccccatagccgatggt

SEQ ID NO: 2557015 - DNA, 25 bp, Homo sapien
ctgccgccgggatctgccggttgaa

SEQ ID NO: 2557016 - DNA, 25 bp, Homo sapien
cgggatctgccggttgaagtgcttc

SEQ ID NO: 2557017 - DNA, 25 bp, Homo sapien
gaatgagtgaggctgccgccgggat

SEQ ID NO: 2557018 - DNA, 25 bp, Homo sapien
atctgccggttgaagtgcttctgcc

SEQ ID NO: 2557019 - DNA, 25 bp, Homo sapien
ggggttctcggcagcatagcacctc

SEQ ID NO: 2557020 - DNA, 25 bp, Homo sapien
aggagtcggggttctcggcagcata

SEQ ID NO: 2557021 - DNA, 25 bp, Homo sapien
gggccttccggatgtagatcttcca

SEQ ID NO: 2557022 - DNA, 25 bp, Homo sapien
agtcggggttctcggcagcatagca

SEQ ID NO: 2557023 - DNA, 25 bp, Homo sapien
gccgtcgacagagaagtggtccagc

SEQ ID NO: 2557024 - DNA, 25 bp, Homo sapien
ctcttctggggggtcgcacgtgata

SEQ ID NO: 2557025 - DNA, 25 bp, Homo sapien
cagaactgtcatagccgtcgacaga

SEQ ID NO: 2557026 - DNA, 25 bp, Homo sapien
tctccaggagtcaccccattgtctt

SEQ ID NO: 2557027 - DNA, 25 bp, Homo sapien
ggtcaccctagccactttccaacca

SEQ ID NO: 2557028 - DNA, 25 bp, Homo sapien
gtccctgccagtaggcccagaggtc

SEQ ID NO: 2557029 - DNA, 25 bp, Homo sapien
accctagccactttccaaccagagc

SEQ ID NO: 2557030 - DNA, 25 bp, Homo sapien
tggcgtccctgccagtaggcccaga

SEQ ID NO: 2557031 - DNA, 25 bp, Homo sapien
tctcagccctgaatccggagctgtg

SEQ ID NO: 2557032 - DNA, 25 bp, Homo sapien
cattggttggcacaatcgccctttg

SEQ ID NO: 2557033 - DNA, 25 bp, Homo sapien
tgcccgttagcatgcgcagaaagcc

SEQ ID NO: 2557034 - DNA, 25 bp, Homo sapien
ctcactgagatgtggtcgggtccca

SEQ ID NO: 2557035 - DNA, 25 bp, Homo sapien
agcacagccagacaaggtcgaggcc

SEQ ID NO: 2557036 - DNA, 25 bp, Homo sapien
ccaagccagggctctccaagagcct

SEQ ID NO: 2557037 - DNA, 25 bp, Homo sapien
caaggtcgaggcctgggtttgactt

SEQ ID NO: 2557038 - DNA, 25 bp, Homo sapien
tcagtgtggctgttcgtacccgcct

SEQ ID NO: 2557039 - DNA, 25 bp, Homo sapien
caagcatacagaggatcttcaggac

SEQ ID NO: 2557040 - DNA, 25 bp, Homo sapien
aatggccaccgcatcctcgcaggtc

SEQ ID NO: 2557041 - DNA, 25 bp, Homo sapien
cagcagccgggctgtgagtgtcagg

SEQ ID NO: 2557042 - DNA, 25 bp, Homo sapien
ctgtgagtgtcaggctccccaggct

SEQ ID NO: 2557043 - DNA, 25 bp, Homo sapien
tgtaggcatatcagtggttcattcc

SEQ ID NO: 2557044 - DNA, 25 bp, Homo sapien
tacctaggaatagaatcgctgtaga

SEQ ID NO: 2557045 - DNA, 25 bp, Homo sapien
gactttgcattctcaccgggagcat

SEQ ID NO: 2557046 - DNA, 25 bp, Homo sapien
gagcatatgagagttccacctccga

SEQ ID NO: 2557047 - DNA, 25 bp, Homo sapien
tttacctatagcaatatacagatgc

SEQ ID NO: 2557048 - DNA, 25 bp, Homo sapien
taaaatgatcatatttacctatagc

SEQ ID NO: 2557049 - DNA, 25 bp, Homo sapien
tgataacagtaattgaagaggctac

SEQ ID NO: 2557050 - DNA, 25 bp, Homo sapien
aatccctatccagatatcagcaggg

SEQ ID NO: 2557051 - DNA, 25 bp, Homo sapien
cacaacatcgcggaaatgtgccagt

SEQ ID NO: 2557052 - DNA, 25 bp, Homo sapien
gagaagccttggaaaccggtgcaga

SEQ ID NO: 2557053 - DNA, 25 bp, Homo sapien
ggccctggctaccaaatccagacat

SEQ ID NO: 2557054 - DNA, 25 bp, Homo sapien
aaatgagttgcaggcctcattctca

SEQ ID NO: 2557055 - DNA, 25 bp, Homo sapien
ttaagcactatcttctccaagagtt

SEQ ID NO: 2557056 - DNA, 25 bp, Homo sapien
cttctccaagagttgagctcacagg

SEQ ID NO: 2557057 - DNA, 25 bp, Homo sapien
agcactatcttctccaagagttgag

SEQ ID NO: 2557058 - DNA, 25 bp, Homo sapien
tatcttctccaagagttgagctcac

SEQ ID NO: 2557059 - DNA, 25 bp, Homo sapien
tctccttagaataagtatagcaagc

SEQ ID NO: 2557060 - DNA, 25 bp, Homo sapien
aacggaaatgtctctgcaggcccaa

SEQ ID NO: 2557061 - DNA, 25 bp, Homo sapien
tacacaaatctcagagtgaacggaa

SEQ ID NO: 2557062 - DNA, 25 bp, Homo sapien
tatagcaagcctcagcatacacaaa

SEQ ID NO: 2557063 - DNA, 25 bp, Homo sapien
aaatgtatattcacagctggcaccc

SEQ ID NO: 2557064 - DNA, 25 bp, Homo sapien
ctcagaggcgagaagtaagggacat

SEQ ID NO: 2557065 - DNA, 25 bp, Homo sapien
ctggcacccagttccgcttaggaaa

SEQ ID NO: 2557066 - DNA, 25 bp, Homo sapien
ggaaagtgtaaaagccattcccaca

SEQ ID NO: 2557067 - DNA, 25 bp, Homo sapien
cagagaaggttgagcccatggtgta

SEQ ID NO: 2557068 - DNA, 25 bp, Homo sapien
catggtgtacttgaaagggcagttc

SEQ ID NO: 2557069 - DNA, 25 bp, Homo sapien
aggtaccggagcaatgccaggtgcc

SEQ ID NO: 2557070 - DNA, 25 bp, Homo sapien
agggcagttcatctggatatccagg

SEQ ID NO: 2557071 - DNA, 25 bp, Homo sapien
ctgtggtcgtagccaggtcaggcat

SEQ ID NO: 2557072 - DNA, 25 bp, Homo sapien
ttggttctcatgaaatggggcatgc

SEQ ID NO: 2557073 - DNA, 25 bp, Homo sapien
gaaatggggcatgctcacttccagc

SEQ ID NO: 2557074 - DNA, 25 bp, Homo sapien
gagatgtgggtgatgggtgtcagca

SEQ ID NO: 2557075 - DNA, 25 bp, Homo sapien
gtcctcggcgaagctgttggttctc

SEQ ID NO: 2557076 - DNA, 25 bp, Homo sapien
ggaaggcgtggaaaatcagccattt

SEQ ID NO: 2557077 - DNA, 25 bp, Homo sapien
aggccaactggaaggcgtggaaaat

SEQ ID NO: 2557078 - DNA, 25 bp, Homo sapien
caactggaaggcgtggaaaatcagc

SEQ ID NO: 2557079 - DNA, 25 bp, Homo sapien
gggaaggccaactggaaggcgtgga

SEQ ID NO: 2557080 - DNA, 25 bp, Homo sapien
gacaggcccactagatgctctctga

SEQ ID NO: 2557081 - DNA, 25 bp, Homo sapien
gcacctatgggttgcctagagacaa

SEQ ID NO: 2557082 - DNA, 25 bp, Homo sapien
tcaaaggcaggtgagctacacagct

SEQ ID NO: 2557083 - DNA, 25 bp, Homo sapien
tctgagggacctaccaaggatgtgg

SEQ ID NO: 2557084 - DNA, 25 bp, Homo sapien
caggcctgacagactaactgctcag

SEQ ID NO: 2557085 - DNA, 25 bp, Homo sapien
gatgtgtgcctcagatacagcccct

SEQ ID NO: 2557086 - DNA, 25 bp, Homo sapien
tatctaaagcatgaatgcctagcca

SEQ ID NO: 2557087 - DNA, 25 bp, Homo sapien
tacgttgtccctaacagggcccaca

SEQ ID NO: 2557088 - DNA, 25 bp, Homo sapien
gtcagggatggtcagcacccctgcc

SEQ ID NO: 2557089 - DNA, 25 bp, Homo sapien
ggttcatgattccttgccacctgtg

SEQ ID NO: 2557090 - DNA, 25 bp, Homo sapien
gggtctcctgctgagtaccgtgaag

SEQ ID NO: 2557091 - DNA, 25 bp, Homo sapien
gaagccaacttcactgtcccttttg

SEQ ID NO: 2557092 - DNA, 25 bp, Homo sapien
tccgaatgggctttgcaagtgccat

SEQ ID NO: 2557093 - DNA, 25 bp, Homo sapien
cagcagttggcgagagtttccagga

SEQ ID NO: 2557094 - DNA, 25 bp, Homo sapien
caaaggcatgtttcgctgtgactgt

SEQ ID NO: 2557095 - DNA, 25 bp, Homo sapien
tatttgtctaaatcctccgaatggg

SEQ ID NO: 2557096 - DNA, 25 bp, Homo sapien
tcaggacatgcccacactagcctct

SEQ ID NO: 2557097 - DNA, 25 bp, Homo sapien
ctctgcccttggcatccccgtcccc

SEQ ID NO: 2557098 - DNA, 25 bp, Homo sapien
gaagaagccggctgagtgcccgcca

SEQ ID NO: 2557099 - DNA, 25 bp, Homo sapien
ctctggcagagaagtcaggcgggaa

SEQ ID NO: 2557100 - DNA, 25 bp, Homo sapien
tggattagtaaaggagagcacagcc

SEQ ID NO: 2557101 - DNA, 25 bp, Homo sapien
cactcaaggtgtagcaggtagaaag

SEQ ID NO: 2557102 - DNA, 25 bp, Homo sapien
tacaggtggcctaactcagacatgg

SEQ ID NO: 2557103 - DNA, 25 bp, Homo sapien
caggcagctgtagtcctctggacca

SEQ ID NO: 2557104 - DNA, 25 bp, Homo sapien
tcaactggcctaacaggccctagtg

SEQ ID NO: 2557105 - DNA, 25 bp, Homo sapien
ttgtgctcctctagccctcaactgg

SEQ ID NO: 2557106 - DNA, 25 bp, Homo sapien
aaaaattaggcgtgctagttctaag

SEQ ID NO: 2557107 - DNA, 25 bp, Homo sapien
atgcatgtcctataaaattcagaag

SEQ ID NO: 2557108 - DNA, 25 bp, Homo sapien
gcatggatgatatgaccataacctg

SEQ ID NO: 2557109 - DNA, 25 bp, Homo sapien
gatgatatgaccataacctgagaag

SEQ ID NO: 2557110 - DNA, 25 bp, Homo sapien
tatgaccataacctgagaaggcagg

SEQ ID NO: 2557111 - DNA, 25 bp, Homo sapien
gatatgaccataacctgagaaggca

SEQ ID NO: 2557112 - DNA, 25 bp, Homo sapien
tgggtgctaagtggcaggccacaac

SEQ ID NO: 2557113 - DNA, 25 bp, Homo sapien
ctagtcactgtcatcgttgggtgag

SEQ ID NO: 2557114 - DNA, 25 bp, Homo sapien
ggtgctaagtggcaggccacaacca

SEQ ID NO: 2557115 - DNA, 25 bp, Homo sapien
actgtcatcgttgggtgaggcagcc

SEQ ID NO: 2557116 - DNA, 25 bp, Homo sapien
cggcgcgcccctcggcgcggttctc

SEQ ID NO: 2557117 - DNA, 25 bp, Homo sapien
ggctcctcggcgcagttctccccgg

SEQ ID NO: 2557118 - DNA, 25 bp, Homo sapien
tcatcgtggttctccccggcgcgcc

SEQ ID NO: 2557119 - DNA, 25 bp, Homo sapien
tctcgccgcggttctgttctccccg

SEQ ID NO: 2557120 - DNA, 25 bp, Homo sapien
gtcactctttagtaggagggtggac

SEQ ID NO: 2557121 - DNA, 25 bp, Homo sapien
agcctgtgttcgacatccttggaga

SEQ ID NO: 2557122 - DNA, 25 bp, Homo sapien
accaacaccctttgtcactctttag

SEQ ID NO: 2557123 - DNA, 25 bp, Homo sapien
gagggtggacaccattttaagtgaa

SEQ ID NO: 2557124 - DNA, 25 bp, Homo sapien
tcagtaactcttggaatagcccagg

SEQ ID NO: 2557125 - DNA, 25 bp, Homo sapien
ggtgcagacatgaaggcccttacag

SEQ ID NO: 2557126 - DNA, 25 bp, Homo sapien
gagtatctgtggtctatggtccctg

SEQ ID NO: 2557127 - DNA, 25 bp, Homo sapien
gagtgcctggtcaacacgtcaatca

SEQ ID NO: 2557128 - DNA, 25 bp, Homo sapien
caaggcctgaattcccgaggggtct

SEQ ID NO: 2557129 - DNA, 25 bp, Homo sapien
actgtgggacgagggcatttgggca

SEQ ID NO: 2557130 - DNA, 25 bp, Homo sapien
attcccgaggggtctggcatgccga

SEQ ID NO: 2557131 - DNA, 25 bp, Homo sapien
gtctggcatgccgactgtgggacga

SEQ ID NO: 2557132 - DNA, 25 bp, Homo sapien
ggccccttcgctcgcgcctgctgta

SEQ ID NO: 2557133 - DNA, 25 bp, Homo sapien
tggccggaaaggtcagacggccctc

SEQ ID NO: 2557134 - DNA, 25 bp, Homo sapien
ccgtcggaagcaccggtgcctcggg

SEQ ID NO: 2557135 - DNA, 25 bp, Homo sapien
gcgattgttcctgctcacgcaactg

SEQ ID NO: 2557136 - DNA, 25 bp, Homo sapien
cataccagctgcagatgcgcaggtg

SEQ ID NO: 2557137 - DNA, 25 bp, Homo sapien
tatcttgaccgagttttcaccctta

SEQ ID NO: 2557138 - DNA, 25 bp, Homo sapien
ggtccctgagccgtgggcatcttat

SEQ ID NO: 2557139 - DNA, 25 bp, Homo sapien
ggtgaaatgggaagccgccctttgc

SEQ ID NO: 2557140 - DNA, 25 bp, Homo sapien
cagcgtctgatgatagcccactctt

SEQ ID NO: 2557141 - DNA, 25 bp, Homo sapien
tcactgcacccgcaacaacagggca

SEQ ID NO: 2557142 - DNA, 25 bp, Homo sapien
gggccagcgtctgatgatagcccac

SEQ ID NO: 2557143 - DNA, 25 bp, Homo sapien
cgtctgatgatagcccactctttgg

SEQ ID NO: 2557144 - DNA, 25 bp, Homo sapien
gccgacctgccttaagacggagcat

SEQ ID NO: 2557145 - DNA, 25 bp, Homo sapien
tgccttaagacggagcatgtcagct

SEQ ID NO: 2557146 - DNA, 25 bp, Homo sapien
tcggagcagccgacctgccttaaga

SEQ ID NO: 2557147 - DNA, 25 bp, Homo sapien
cagtgccgtggataggagccatggc

SEQ ID NO: 2557148 - DNA, 25 bp, Homo sapien
agagactcttgacttcccccggagg

SEQ ID NO: 2557149 - DNA, 25 bp, Homo sapien
cagagactcttgacttcccccggag

SEQ ID NO: 2557150 - DNA, 25 bp, Homo sapien
tttgtgcgtacacgtgtgcagcccc

SEQ ID NO: 2557151 - DNA, 25 bp, Homo sapien
ggcatgcgtttgtgcgtacacgtgt

SEQ ID NO: 2557152 - DNA, 25 bp, Homo sapien
tgcgtacacgtgtgcagccccgagg

SEQ ID NO: 2557153 - DNA, 25 bp, Homo sapien
tcacactgggcatgcgtttgtgcgt

SEQ ID NO: 2557154 - DNA, 25 bp, Homo sapien
tgaagaccctcggagtcaatgaggg

SEQ ID NO: 2557155 - DNA, 25 bp, Homo sapien
gccttgaagaccctcggagtcaatg

SEQ ID NO: 2557156 - DNA, 25 bp, Homo sapien
tcggagtcaatgaggggccccgcat

SEQ ID NO: 2557157 - DNA, 25 bp, Homo sapien
ctcggagtcaatgaggggccccgca

SEQ ID NO: 2557158 - DNA, 25 bp, Homo sapien
catcgaccaccatagacaggatgga

SEQ ID NO: 2557159 - DNA, 25 bp, Homo sapien
gaccaccatagacaggatggaatgg

SEQ ID NO: 2557160 - DNA, 25 bp, Homo sapien
aaagatgacaccatcgaccaccata

SEQ ID NO: 2557161 - DNA, 25 bp, Homo sapien
acaccatcgaccaccatagacagga

SEQ ID NO: 2557162 - DNA, 25 bp, Homo sapien
caccctggaaatcatggcatcctct

SEQ ID NO: 2557163 - DNA, 25 bp, Homo sapien
gatcattcccgttgtacgaataagg

SEQ ID NO: 2557164 - DNA, 25 bp, Homo sapien
taaacacatgttaactcctcgatca

SEQ ID NO: 2557165 - DNA, 25 bp, Homo sapien
ggccaagcctcggtgcttttaaaca

SEQ ID NO: 2557166 - DNA, 25 bp, Homo sapien
cgctcctaaacgctggcgtccgttt

SEQ ID NO: 2557167 - DNA, 25 bp, Homo sapien
ctaaacgctggcgtccgtttctgct

SEQ ID NO: 2557168 - DNA, 25 bp, Homo sapien
acgctggcgtccgtttctgctgaga

SEQ ID NO: 2557169 - DNA, 25 bp, Homo sapien
tctgctgagagcgtggggctttctc

SEQ ID NO: 2557170 - DNA, 25 bp, Homo sapien
gtgaactcagatgctcatttcggag

SEQ ID NO: 2557171 - DNA, 25 bp, Homo sapien
ttggccgggatggtgcccaccagca

SEQ ID NO: 2557172 - DNA, 25 bp, Homo sapien
gagggagaacacactagtggcctgt

SEQ ID NO: 2557173 - DNA, 25 bp, Homo sapien
cagccgcctgtcagacgagggtcgc

SEQ ID NO: 2557174 - DNA, 25 bp, Homo sapien
tcatattgaattgtccaggtgggcc

SEQ ID NO: 2557175 - DNA, 25 bp, Homo sapien
aacccgggtcacagagcaaaaccat

SEQ ID NO: 2557176 - DNA, 25 bp, Homo sapien
tggccacatgtgttcctcgaccatg

SEQ ID NO: 2557177 - DNA, 25 bp, Homo sapien
ctcgaccatgaagggcagaacaagt

SEQ ID NO: 2557178 - DNA, 25 bp, Homo sapien
gtaaatggtgccttcacgtactcac

SEQ ID NO: 2557179 - DNA, 25 bp, Homo sapien
tgtgaacagcgttgcaacacacact

SEQ ID NO: 2557180 - DNA, 25 bp, Homo sapien
caatggtcagactgtggtttatgcc

SEQ ID NO: 2557181 - DNA, 25 bp, Homo sapien
taaacttgataagaatgcagtgggc

SEQ ID NO: 2557182 - DNA, 25 bp, Homo sapien
tctctcccggttgtgctaatataat

SEQ ID NO: 2557183 - DNA, 25 bp, Homo sapien
gggaaagttccataatagatcacat

SEQ ID NO: 2557184 - DNA, 25 bp, Homo sapien
tattcaaaataaacgctagacggcc

SEQ ID NO: 2557185 - DNA, 25 bp, Homo sapien
gtagaaagctcccaaggactcgtta

SEQ ID NO: 2557186 - DNA, 25 bp, Homo sapien
caagccccttgtatccaccctgcct

SEQ ID NO: 2557187 - DNA, 25 bp, Homo sapien
ctggaggatcctctaactctggaat

SEQ ID NO: 2557188 - DNA, 25 bp, Homo sapien
tggacaagctctcggccccttctgg

SEQ ID NO: 2557189 - DNA, 25 bp, Homo sapien
gccccttgtatccaccctgcctgga

SEQ ID NO: 2557190 - DNA, 25 bp, Homo sapien
tactgcatgcgtcgaatgaccttaa

SEQ ID NO: 2557191 - DNA, 25 bp, Homo sapien
gaccttaatggtggcccgatggtgt

SEQ ID NO: 2557192 - DNA, 25 bp, Homo sapien
cacaaagtactgcatgcgtcgaatg

SEQ ID NO: 2557193 - DNA, 25 bp, Homo sapien
gaatgaccttaatggtggcccgatg

SEQ ID NO: 2557194 - DNA, 25 bp, Homo sapien
gacgcttggccaggaggctacgcat

SEQ ID NO: 2557195 - DNA, 25 bp, Homo sapien
gcaactcccaggtattcaacgaatg

SEQ ID NO: 2557196 - DNA, 25 bp, Homo sapien
tcaacgaatgctccaacaacatgaa

SEQ ID NO: 2557197 - DNA, 25 bp, Homo sapien
gacggcatcataatatctgtagaaa

SEQ ID NO: 2557198 - DNA, 25 bp, Homo sapien
ccttgatgcgcaccatgaggttgag

SEQ ID NO: 2557199 - DNA, 25 bp, Homo sapien
ttgaggtggccctgcgagtactgct

SEQ ID NO: 2557200 - DNA, 25 bp, Homo sapien
gtggccctgcgagtactgctcaatg

SEQ ID NO: 2557201 - DNA, 25 bp, Homo sapien
tgctcaatgacgtcccgcacatcgt

SEQ ID NO: 2557202 - DNA, 25 bp, Homo sapien
acggagatgaacagtgagggcttcc

SEQ ID NO: 2557203 - DNA, 25 bp, Homo sapien
gaacagtgagggcttcccaatggac

SEQ ID NO: 2557204 - DNA, 25 bp, Homo sapien
tgagggcttcccaatggactggtcc

SEQ ID NO: 2557205 - DNA, 25 bp, Homo sapien
tgagacggagatgaacagtgagggc

SEQ ID NO: 2557206 - DNA, 25 bp, Homo sapien
tgacctctgagagccctagggggct

SEQ ID NO: 2557207 - DNA, 25 bp, Homo sapien
gggtggtacggtggccgggcatggc

SEQ ID NO: 2557208 - DNA, 25 bp, Homo sapien
gggcacagccattccgctgctccgt

SEQ ID NO: 2557209 - DNA, 25 bp, Homo sapien
gccagctgtgcaagcccatgccatt

SEQ ID NO: 2557210 - DNA, 25 bp, Homo sapien
aaaacacccaaatcagggccaagtg

SEQ ID NO: 2557211 - DNA, 25 bp, Homo sapien
ggataaaacacccaaatcagggcca

SEQ ID NO: 2557212 - DNA, 25 bp, Homo sapien
atgggggataaaacacccaaatcag

SEQ ID NO: 2557213 - DNA, 25 bp, Homo sapien
tatgggggataaaacacccaaatca

SEQ ID NO: 2557214 - DNA, 25 bp, Homo sapien
caggcgggcgccgatcgtgttgctg

SEQ ID NO: 2557215 - DNA, 25 bp, Homo sapien
gccgatcgtgttgctgccgcgatcc

SEQ ID NO: 2557216 - DNA, 25 bp, Homo sapien
gcgccgatcgtgttgctgccgcgat

SEQ ID NO: 2557217 - DNA, 25 bp, Homo sapien
gatcgtgttgctgccgcgatccttg

SEQ ID NO: 2557218 - DNA, 25 bp, Homo sapien
acagccaggaggctcgcagagcaca

SEQ ID NO: 2557219 - DNA, 25 bp, Homo sapien
caggaggctcgcagagcacaaagca

SEQ ID NO: 2557220 - DNA, 25 bp, Homo sapien
agccaggaggctcgcagagcacaaa

SEQ ID NO: 2557221 - DNA, 25 bp, Homo sapien
ggaggctcgcagagcacaaagcaga

SEQ ID NO: 2557222 - DNA, 25 bp, Homo sapien
ccaggccatgggcagatggtgccag

SEQ ID NO: 2557223 - DNA, 25 bp, Homo sapien
tgaacaccagccttcgctctttctg

SEQ ID NO: 2557224 - DNA, 25 bp, Homo sapien
acccaatttgctggtctcagggccc

SEQ ID NO: 2557225 - DNA, 25 bp, Homo sapien
ccaatttgctggtctcagggcccca

SEQ ID NO: 2557226 - DNA, 25 bp, Homo sapien
ggtatttacggtcccgatggctgca

SEQ ID NO: 2557227 - DNA, 25 bp, Homo sapien
gggtatttacggtcccgatggctgc

SEQ ID NO: 2557228 - DNA, 25 bp, Homo sapien
caggattgcgcttggggtatttacg

SEQ ID NO: 2557229 - DNA, 25 bp, Homo sapien
agtcagcaggattgcgcttggggta

SEQ ID NO: 2557230 - DNA, 25 bp, Homo sapien
acggccatgcccgtccaaagcagcg

SEQ ID NO: 2557231 - DNA, 25 bp, Homo sapien
atgcccgtccaaagcagcgctgtcc

SEQ ID NO: 2557232 - DNA, 25 bp, Homo sapien
cacacgcgcgcacggccatgcccgt

SEQ ID NO: 2557233 - DNA, 25 bp, Homo sapien
cgcgcacggccatgcccgtccaaag

SEQ ID NO: 2557234 - DNA, 25 bp, Homo sapien
tctttccaaagaaggtgctgggcag

SEQ ID NO: 2557235 - DNA, 25 bp, Homo sapien
gtgcattcccctggccactggtggg

SEQ ID NO: 2557236 - DNA, 25 bp, Homo sapien
agaggtgcctgctgagcctggttcc

SEQ ID NO: 2557237 - DNA, 25 bp, Homo sapien
agctgggctgcggttcagaggtgcc

SEQ ID NO: 2557238 - DNA, 25 bp, Homo sapien
cggcgcggcgaggacctgggcatcc

SEQ ID NO: 2557239 - DNA, 25 bp, Homo sapien
ggagcggcgcggcgaggacctgggc

SEQ ID NO: 2557240 - DNA, 25 bp, Homo sapien
agcggcgcggcgaggacctgggcat

SEQ ID NO: 2557241 - DNA, 25 bp, Homo sapien
gcggcgcggcgaggacctgggcatc

SEQ ID NO: 2557242 - DNA, 25 bp, Homo sapien
agggccctcaaaggagcagcccctt

SEQ ID NO: 2557243 - DNA, 25 bp, Homo sapien
cacagacaaagatctggcggccaga

SEQ ID NO: 2557244 - DNA, 25 bp, Homo sapien
cttcctattgctgcagcgtcttcca

SEQ ID NO: 2557245 - DNA, 25 bp, Homo sapien
cttccacacgtggagaggggttcag

SEQ ID NO: 2557246 - DNA, 25 bp, Homo sapien
ctcttcttgaaaggcctgggtctga

SEQ ID NO: 2557247 - DNA, 25 bp, Homo sapien
cttttcctggcagcccgcacaccct

SEQ ID NO: 2557248 - DNA, 25 bp, Homo sapien
tcttcttgaaaggcctgggtctgac

SEQ ID NO: 2557249 - DNA, 25 bp, Homo sapien
ttttcctggcagcccgcacaccctg

SEQ ID NO: 2557250 - DNA, 25 bp, Homo sapien
cgggcggcacagtcccgctctccat

SEQ ID NO: 2557251 - DNA, 25 bp, Homo sapien
gaccgcgggcggcacagtcccgctc

SEQ ID NO: 2557252 - DNA, 25 bp, Homo sapien
cagtgcagcgaccgcgggcggcaca

SEQ ID NO: 2557253 - DNA, 25 bp, Homo sapien
ctcatgacatcgcgctggccccggg

SEQ ID NO: 2557254 - DNA, 25 bp, Homo sapien
aggctccatttggattggggtagct

SEQ ID NO: 2557255 - DNA, 25 bp, Homo sapien
tccagacaggacacggcactgcgga

SEQ ID NO: 2557256 - DNA, 25 bp, Homo sapien
ggacacggcactgcggaggtgcaca

SEQ ID NO: 2557257 - DNA, 25 bp, Homo sapien
gggtagctgtacaggggtgtgacag

SEQ ID NO: 2557258 - DNA, 25 bp, Homo sapien
tgggcagaggcgtgtgaggtcttgc

SEQ ID NO: 2557259 - DNA, 25 bp, Homo sapien
ggtcttgcccctggctactgtcctc

SEQ ID NO: 2557260 - DNA, 25 bp, Homo sapien
gtccacattcatctaacggagccct

SEQ ID NO: 2557261 - DNA, 25 bp, Homo sapien
caggactgtgcgcacacttggactc

SEQ ID NO: 2557262 - DNA, 25 bp, Homo sapien
gacatcagatggagatgtctgaaat

SEQ ID NO: 2557263 - DNA, 25 bp, Homo sapien
acagacacctgtgtctgttcagggc

SEQ ID NO: 2557264 - DNA, 25 bp, Homo sapien
acaggcctgggtcatgggtcgggca

SEQ ID NO: 2557265 - DNA, 25 bp, Homo sapien
tctgcggacagggaccaaggttttg

SEQ ID NO: 2557266 - DNA, 25 bp, Homo sapien
cacagggtacatgctgctcaggatc

SEQ ID NO: 2557267 - DNA, 25 bp, Homo sapien
aacccttgaaaggagcgtgcgcaga

SEQ ID NO: 2557268 - DNA, 25 bp, Homo sapien
tgaagccgtcatctcaggtaccatg

SEQ ID NO: 2557269 - DNA, 25 bp, Homo sapien
tcaaggtagcgctcagaaactggct

SEQ ID NO: 2557270 - DNA, 25 bp, Homo sapien
caaacagcaaggtaagtcaggaggt

SEQ ID NO: 2557271 - DNA, 25 bp, Homo sapien
taaggaacccctcgcttagatgggc

SEQ ID NO: 2557272 - DNA, 25 bp, Homo sapien
catttccccagacgtaaggagagga

SEQ ID NO: 2557273 - DNA, 25 bp, Homo sapien
gaatgaatactactgctaccgaggg

SEQ ID NO: 2557274 - DNA, 25 bp, Homo sapien
gacacccgtgttgctacagcaccag

SEQ ID NO: 2557275 - DNA, 25 bp, Homo sapien
aggaaacgggactcgcacagagcac

SEQ ID NO: 2557276 - DNA, 25 bp, Homo sapien
aggcttcggtgtccgccctctgaca

SEQ ID NO: 2557277 - DNA, 25 bp, Homo sapien
aggggccaccgaacacttgacagac

SEQ ID NO: 2557278 - DNA, 25 bp, Homo sapien
gaacagtccagaattaccacgtggg

SEQ ID NO: 2557279 - DNA, 25 bp, Homo sapien
tataggaccagtacatagcagccag

SEQ ID NO: 2557280 - DNA, 25 bp, Homo sapien
catcttgcagcactggaggtcagga

SEQ ID NO: 2557281 - DNA, 25 bp, Homo sapien
caagcatagcgcaacacgtgtgtga

SEQ ID NO: 2557282 - DNA, 25 bp, Homo sapien
acaaaatcgtttccaggatggcggg

SEQ ID NO: 2557283 - DNA, 25 bp, Homo sapien
caacaaaatcgtttccaggatggcg

SEQ ID NO: 2557284 - DNA, 25 bp, Homo sapien
cagacaacaaaatcgtttccaggat

SEQ ID NO: 2557285 - DNA, 25 bp, Homo sapien
gacaacaaaatcgtttccaggatgg

SEQ ID NO: 2557286 - DNA, 25 bp, Homo sapien
tgcgcggaaccgcacggcggtttcc

SEQ ID NO: 2557287 - DNA, 25 bp, Homo sapien
gcggtttccatcagcgctgccaaga

SEQ ID NO: 2557288 - DNA, 25 bp, Homo sapien
tccgtgactgtctgcgcggaaccgc

SEQ ID NO: 2557289 - DNA, 25 bp, Homo sapien
gcctgagtttccgtgactgtctgcg

SEQ ID NO: 2557290 - DNA, 25 bp, Homo sapien
gcagctgcattgcccacatctgtct

SEQ ID NO: 2557291 - DNA, 25 bp, Homo sapien
aacagcagctgcattgcccacatct

SEQ ID NO: 2557292 - DNA, 25 bp, Homo sapien
cagcagctgcattgcccacatctgt

SEQ ID NO: 2557293 - DNA, 25 bp, Homo sapien
agcagctgcattgcccacatctgtc

SEQ ID NO: 2557294 - DNA, 25 bp, Homo sapien
gggcacttgccccagttcctgctgc

SEQ ID NO: 2557295 - DNA, 25 bp, Homo sapien
ccaggtgcaaacatgggacctggtg

SEQ ID NO: 2557296 - DNA, 25 bp, Homo sapien
cccactgttgtctcggtcccgtctc

SEQ ID NO: 2557297 - DNA, 25 bp, Homo sapien
gctgggcccagtggactgcacggtc

SEQ ID NO: 2557298 - DNA, 25 bp, Homo sapien
acgtggcacaacactccctgggtgg

SEQ ID NO: 2557299 - DNA, 25 bp, Homo sapien
tctatgtgtgccgtgtctgctgaca

SEQ ID NO: 2557300 - DNA, 25 bp, Homo sapien
ggctgacgtttgtgccagagccaga

SEQ ID NO: 2557301 - DNA, 25 bp, Homo sapien
tgctccgtgcggacattcatgtcaa

SEQ ID NO: 2557302 - DNA, 25 bp, Homo sapien
cccagagagtcgagcgtcgtggcag

SEQ ID NO: 2557303 - DNA, 25 bp, Homo sapien
ccagagcccttcacccgggcagtgt

SEQ ID NO: 2557304 - DNA, 25 bp, Homo sapien
aggctcgggactggcgcctgtggtg

SEQ ID NO: 2557305 - DNA, 25 bp, Homo sapien
agcccttcacccgggcagtgtccag

SEQ ID NO: 2557306 - DNA, 25 bp, Homo sapien
gcatccgggcaggtgccatcgggga

SEQ ID NO: 2557307 - DNA, 25 bp, Homo sapien
catgcggaggtgcatccgggcaggt

SEQ ID NO: 2557308 - DNA, 25 bp, Homo sapien
catccgggcaggtgccatcggggag

SEQ ID NO: 2557309 - DNA, 25 bp, Homo sapien
ccatgcggaggtgcatccgggcagg

SEQ ID NO: 2557310 - DNA, 25 bp, Homo sapien
cccagggcgggtccacagtctgatg

SEQ ID NO: 2557311 - DNA, 25 bp, Homo sapien
gagacatgctctcatcatcccagct

SEQ ID NO: 2557312 - DNA, 25 bp, Homo sapien
ccagctgctggtgacagaggccccg

SEQ ID NO: 2557313 - DNA, 25 bp, Homo sapien
gtccacagtctgatgcatcatgctg

SEQ ID NO: 2557314 - DNA, 25 bp, Homo sapien
agctcagggtcgacggagccgccac

SEQ ID NO: 2557315 - DNA, 25 bp, Homo sapien
tgtcggtgatgagtgccagcctctg

SEQ ID NO: 2557316 - DNA, 25 bp, Homo sapien
gagcagctggtgaagcatgtcggtg

SEQ ID NO: 2557317 - DNA, 25 bp, Homo sapien
tcagggtcgacggagccgccactgc

SEQ ID NO: 2557318 - DNA, 25 bp, Homo sapien
catcggggcccctcctgggcacggt

SEQ ID NO: 2557319 - DNA, 25 bp, Homo sapien
ctcatcggggcccctcctgggcacg

SEQ ID NO: 2557320 - DNA, 25 bp, Homo sapien
ccctcatcggggcccctcctgggca

SEQ ID NO: 2557321 - DNA, 25 bp, Homo sapien
tcaggacccctcatcggggcccctc

SEQ ID NO: 2557322 - DNA, 25 bp, Homo sapien
ttgccggcggccctgtagtcagcgt

SEQ ID NO: 2557323 - DNA, 25 bp, Homo sapien
gtgctacttcctggccatacatggg

SEQ ID NO: 2557324 - DNA, 25 bp, Homo sapien
agtcagcgtgggctggtcctgccct

SEQ ID NO: 2557325 - DNA, 25 bp, Homo sapien
tgtgccagacagcatggtccatggg

SEQ ID NO: 2557326 - DNA, 25 bp, Homo sapien
gaaggaacccctgtcctgtgtagga

SEQ ID NO: 2557327 - DNA, 25 bp, Homo sapien
taggaaccgtcacttctctgcggct

SEQ ID NO: 2557328 - DNA, 25 bp, Homo sapien
gatttctatgcgatgtaatgcccag

SEQ ID NO: 2557329 - DNA, 25 bp, Homo sapien
gctggcagtctaacccagggaagtg

SEQ ID NO: 2557330 - DNA, 25 bp, Homo sapien
ggtcctgtctgtgagagaccccatg

SEQ ID NO: 2557331 - DNA, 25 bp, Homo sapien
atgccccaggaaccaaggtgagagc

SEQ ID NO: 2557332 - DNA, 25 bp, Homo sapien
gggtcctgtctgtgagagaccccat

SEQ ID NO: 2557333 - DNA, 25 bp, Homo sapien
aaccaaggtgagagcagtgcccagc

SEQ ID NO: 2557334 - DNA, 25 bp, Homo sapien
tctgggtgctcggggggcttctgac

SEQ ID NO: 2557335 - DNA, 25 bp, Homo sapien
gtgctcggggggcttctgacaccag

SEQ ID NO: 2557336 - DNA, 25 bp, Homo sapien
tcggggggcttctgacaccagcggc

SEQ ID NO: 2557337 - DNA, 25 bp, Homo sapien
ggggggcttctgacaccagcggcat

SEQ ID NO: 2557338 - DNA, 25 bp, Homo sapien
gggcatggtagcatcaggtagtcga

SEQ ID NO: 2557339 - DNA, 25 bp, Homo sapien
atggtagcatcaggtagtcgatgag

SEQ ID NO: 2557340 - DNA, 25 bp, Homo sapien
ggcatggtagcatcaggtagtcgat

SEQ ID NO: 2557341 - DNA, 25 bp, Homo sapien
tgggggcatggtagcatcaggtagt

SEQ ID NO: 2557342 - DNA, 25 bp, Homo sapien
cgtttctcgagctccttcagtggtg

SEQ ID NO: 2557343 - DNA, 25 bp, Homo sapien
tccaagtttgaagtccagcgggtgc

SEQ ID NO: 2557344 - DNA, 25 bp, Homo sapien
cagctccaggtggtctacatcccaa

SEQ ID NO: 2557345 - DNA, 25 bp, Homo sapien
tccagatgcagatgaaaagtcccct

SEQ ID NO: 2557346 - DNA, 25 bp, Homo sapien
tgtcatctgccgctgggatttggtt

SEQ ID NO: 2557347 - DNA, 25 bp, Homo sapien
tcatctgccgctgggatttggtttc

SEQ ID NO: 2557348 - DNA, 25 bp, Homo sapien
cggctgtcatctgccgctgggattt

SEQ ID NO: 2557349 - DNA, 25 bp, Homo sapien
gctgtcatctgccgctgggatttgg

SEQ ID NO: 2557350 - DNA, 25 bp, Homo sapien
atagggggaggcgatgagggaccag

SEQ ID NO: 2557351 - DNA, 25 bp, Homo sapien
gggatagggggaggcgatgagggac

SEQ ID NO: 2557352 - DNA, 25 bp, Homo sapien
gatagggggaggcgatgagggacca

SEQ ID NO: 2557353 - DNA, 25 bp, Homo sapien
agggggaggcgatgagggaccagct

SEQ ID NO: 2557354 - DNA, 25 bp, Homo sapien
cattctcctccacgaggtgcttggg

SEQ ID NO: 2557355 - DNA, 25 bp, Homo sapien
ctccatagcctttgcccaaatgcag

SEQ ID NO: 2557356 - DNA, 25 bp, Homo sapien
tgggggatttggctgaagccagggc

SEQ ID NO: 2557357 - DNA, 25 bp, Homo sapien
agccattctcctccacgaggtgctt

SEQ ID NO: 2557358 - DNA, 25 bp, Homo sapien
ccggaggtccgaggaaggcggcgag

SEQ ID NO: 2557359 - DNA, 25 bp, Homo sapien
tcatctgcatgaagcgcacactcgc

SEQ ID NO: 2557360 - DNA, 25 bp, Homo sapien
cgcgctcatctgcatgaagcgcaca

SEQ ID NO: 2557361 - DNA, 25 bp, Homo sapien
ggcgaggccgcgctcatctgcatga

SEQ ID NO: 2557362 - DNA, 25 bp, Homo sapien
cagaaagtccggggatccttggctc

SEQ ID NO: 2557363 - DNA, 25 bp, Homo sapien
gtctgccgtcttgcccggccgcctc

SEQ ID NO: 2557364 - DNA, 25 bp, Homo sapien
ggcttctgctcctggttggtcagaa

SEQ ID NO: 2557365 - DNA, 25 bp, Homo sapien
ccacgtctgccgtcttgcccggccg

SEQ ID NO: 2557366 - DNA, 25 bp, Homo sapien
tggctccgcgcaaccatatggcaaa

SEQ ID NO: 2557367 - DNA, 25 bp, Homo sapien
gggaacaatcacgactctgttcgcg

SEQ ID NO: 2557368 - DNA, 25 bp, Homo sapien
aggcgcagaatgtcccgcaacaggg

SEQ ID NO: 2557369 - DNA, 25 bp, Homo sapien
tggcaaatccgcgtcgacacagcag

SEQ ID NO: 2557370 - DNA, 25 bp, Homo sapien
tcgggccgcccattgtctcgccggc

SEQ ID NO: 2557371 - DNA, 25 bp, Homo sapien
acgcggcggcgatttatgggccttt

SEQ ID NO: 2557372 - DNA, 25 bp, Homo sapien
atgggcctttcaggcgagcaggtgc

SEQ ID NO: 2557373 - DNA, 25 bp, Homo sapien
tcgccggcctcacaatggggctgct

SEQ ID NO: 2557374 - DNA, 25 bp, Homo sapien
gcttcaccaggatgcgccgggtttc

SEQ ID NO: 2557375 - DNA, 25 bp, Homo sapien
caggatccgacgctacaaacagcag

SEQ ID NO: 2557376 - DNA, 25 bp, Homo sapien
aacacagcgattttccaggatccga

SEQ ID NO: 2557377 - DNA, 25 bp, Homo sapien
gaatctggtccaaaggcagcctgag

SEQ ID NO: 2557378 - DNA, 25 bp, Homo sapien
tttctcagaagggcgagctggtgct

SEQ ID NO: 2557379 - DNA, 25 bp, Homo sapien
tgctgggcatgcacgcaagtgtcca

SEQ ID NO: 2557380 - DNA, 25 bp, Homo sapien
caagtgtccagaaagcgggaatcca

SEQ ID NO: 2557381 - DNA, 25 bp, Homo sapien
ctgaggagggattgctttctcagaa

SEQ ID NO: 2557382 - DNA, 25 bp, Homo sapien
gctcggcagtgggtcctgaccactt

SEQ ID NO: 2557383 - DNA, 25 bp, Homo sapien
gagtccaggcgcacccctggtggtg

SEQ ID NO: 2557384 - DNA, 25 bp, Homo sapien
tgaggctggccgtttaaagtaggac

SEQ ID NO: 2557385 - DNA, 25 bp, Homo sapien
ttgatgggctgcaccctgacgcgac

SEQ ID NO: 2557386 - DNA, 25 bp, Homo sapien
gtggcagagtgaacagggccgacca

SEQ ID NO: 2557387 - DNA, 25 bp, Homo sapien
tctctctgaggtggcagagtgaaca

SEQ ID NO: 2557388 - DNA, 25 bp, Homo sapien
tctgaggtggcagagtgaacagggc

SEQ ID NO: 2557389 - DNA, 25 bp, Homo sapien
aggtggcagagtgaacagggccgac

SEQ ID NO: 2557390 - DNA, 25 bp, Homo sapien
cttctttggggtcccatggagtcag

SEQ ID NO: 2557391 - DNA, 25 bp, Homo sapien
gcctcccgtcacacctctgctgggt

SEQ ID NO: 2557392 - DNA, 25 bp, Homo sapien
gtcaggcttcaggagaagaccccag

SEQ ID NO: 2557393 - DNA, 25 bp, Homo sapien
tggctcctgtgtgctcaaggtgctg

SEQ ID NO: 2557394 - DNA, 25 bp, Homo sapien
aagattggattttgtcagccagcag

SEQ ID NO: 2557395 - DNA, 25 bp, Homo sapien
gactggtgccaaagattggattttg

SEQ ID NO: 2557396 - DNA, 25 bp, Homo sapien
gggagtagtagaagcatctcagctg

SEQ ID NO: 2557397 - DNA, 25 bp, Homo sapien
ctgatggactggtgccaaagattgg

SEQ ID NO: 2557398 - DNA, 25 bp, Homo sapien
gggatccacaaccatcatatgagcg

SEQ ID NO: 2557399 - DNA, 25 bp, Homo sapien
aaagagcagataggagcgtgcgtcc

SEQ ID NO: 2557400 - DNA, 25 bp, Homo sapien
acactcatgggtctgccgtgtggga

SEQ ID NO: 2557401 - DNA, 25 bp, Homo sapien
tgggagtcacgctccagctccactg

SEQ ID NO: 2557402 - DNA, 25 bp, Homo sapien
tttgtggtgaccgatctgctgggtt

SEQ ID NO: 2557403 - DNA, 25 bp, Homo sapien
ttagtgggtgcacagcgtaacctga

SEQ ID NO: 2557404 - DNA, 25 bp, Homo sapien
cgtaacctgagttaactgtttgtgg

SEQ ID NO: 2557405 - DNA, 25 bp, Homo sapien
taactgtttgtggtgaccgatctgc

SEQ ID NO: 2557406 - DNA, 25 bp, Homo sapien
tatttatgtccaggcgtggaccgct

SEQ ID NO: 2557407 - DNA, 25 bp, Homo sapien
tgggaccgttcatgtagcagcaacc

SEQ ID NO: 2557408 - DNA, 25 bp, Homo sapien
ctttattttcatcgcggactctggg

SEQ ID NO: 2557409 - DNA, 25 bp, Homo sapien
tattctgcacgagaaggtacactgg

SEQ ID NO: 2557410 - DNA, 25 bp, Homo sapien
aagtcgtcgggcgatgtccccgcgc

SEQ ID NO: 2557411 - DNA, 25 bp, Homo sapien
gcgccgtgtccctctccaagcgccg

SEQ ID NO: 2557412 - DNA, 25 bp, Homo sapien
gaccccgcgcaagaggctgcggtga

SEQ ID NO: 2557413 - DNA, 25 bp, Homo sapien
gcctgagaagtcgtcgggcgatgtc

SEQ ID NO: 2557414 - DNA, 25 bp, Homo sapien
cattgcgcggcgacgtaaacaaagc

SEQ ID NO: 2557415 - DNA, 25 bp, Homo sapien
tcccgtggcattaaagggcccgcag

SEQ ID NO: 2557416 - DNA, 25 bp, Homo sapien
gtaaacaaagctgacccgccgcgga

SEQ ID NO: 2557417 - DNA, 25 bp, Homo sapien
aaatgcttacacagcacattgcgcg

SEQ ID NO: 2557418 - DNA, 25 bp, Homo sapien
tacattatgctaatcgcggccgggc

SEQ ID NO: 2557419 - DNA, 25 bp, Homo sapien
aggcgaacccgacgcagaagagtcc

SEQ ID NO: 2557420 - DNA, 25 bp, Homo sapien
acgatggagcgtcttgtcgcccgtg

SEQ ID NO: 2557421 - DNA, 25 bp, Homo sapien
ctgggcgttccacaggccaagtgcg

SEQ ID NO: 2557422 - DNA, 25 bp, Homo sapien
gatggcagctacaccctctgagtgg

SEQ ID NO: 2557423 - DNA, 25 bp, Homo sapien
tcagcttctaacgaggccaagacgg

SEQ ID NO: 2557424 - DNA, 25 bp, Homo sapien
gagcttgattgttgcacctagacag

SEQ ID NO: 2557425 - DNA, 25 bp, Homo sapien
gacatctgggcttgttgcgggaaat

SEQ ID NO: 2557426 - DNA, 25 bp, Homo sapien
aaatgtctttctgtgtgctccgagg

SEQ ID NO: 2557427 - DNA, 25 bp, Homo sapien
cccacttgtgtgcaagataactgga

SEQ ID NO: 2557428 - DNA, 25 bp, Homo sapien
gaagtggtgtacagcgttcctgaca

SEQ ID NO: 2557429 - DNA, 25 bp, Homo sapien
caacacaggcaatgcggtgtgcaga

SEQ ID NO: 2557430 - DNA, 25 bp, Homo sapien
acagctgccacacccgggaagggga

SEQ ID NO: 2557431 - DNA, 25 bp, Homo sapien
agaaagcacatgtggccaaggacat

SEQ ID NO: 2557432 - DNA, 25 bp, Homo sapien
gcactggagtggaggtcacccgcca

SEQ ID NO: 2557433 - DNA, 25 bp, Homo sapien
catgaacatgccgacaaggcagctg

SEQ ID NO: 2557434 - DNA, 25 bp, Homo sapien
gaggccagagggactctctccggtc

SEQ ID NO: 2557435 - DNA, 25 bp, Homo sapien
ctcccctcataggacccttggaggc

SEQ ID NO: 2557436 - DNA, 25 bp, Homo sapien
agagggactctctccggtccttgac

SEQ ID NO: 2557437 - DNA, 25 bp, Homo sapien
cctcataggacccttggaggccaga

SEQ ID NO: 2557438 - DNA, 25 bp, Homo sapien
cacagctgaaggagataaaggccca

SEQ ID NO: 2557439 - DNA, 25 bp, Homo sapien
gctccaacatggtgggctgtggttc

SEQ ID NO: 2557440 - DNA, 25 bp, Homo sapien
tatttgtgttcacgctggccaacag

SEQ ID NO: 2557441 - DNA, 25 bp, Homo sapien
gtggttcacgtatttgtgttcacgc

SEQ ID NO: 2557442 - DNA, 25 bp, Homo sapien
ttttttgtcatgaacaggctcagtg

SEQ ID NO: 2557443 - DNA, 25 bp, Homo sapien
tttttttgtcatgaacaggctcagt

SEQ ID NO: 2557444 - DNA, 25 bp, Homo sapien
caggtagccagggaactggttgagc

SEQ ID NO: 2557445 - DNA, 25 bp, Homo sapien
ttttgtcatgaacaggctcagtgtg

SEQ ID NO: 2557446 - DNA, 25 bp, Homo sapien
cctagacaccggtccttccgggatg

SEQ ID NO: 2557447 - DNA, 25 bp, Homo sapien
gtgagcgctccagggtgacctagac

SEQ ID NO: 2557448 - DNA, 25 bp, Homo sapien
cagggtgacctagacaccggtcctt

SEQ ID NO: 2557449 - DNA, 25 bp, Homo sapien
gacaccggtccttccgggatgagcc

SEQ ID NO: 2557450 - DNA, 25 bp, Homo sapien
gccctctccggagtgtgctcgagta

SEQ ID NO: 2557451 - DNA, 25 bp, Homo sapien
cgccctctccggagtgtgctcgagt

SEQ ID NO: 2557452 - DNA, 25 bp, Homo sapien
ccctctccggagtgtgctcgagtac

SEQ ID NO: 2557453 - DNA, 25 bp, Homo sapien
agggtccgggagctgcgcctggcgc

SEQ ID NO: 2557454 - DNA, 25 bp, Homo sapien
cacgtcaggggcacctcattgggca

SEQ ID NO: 2557455 - DNA, 25 bp, Homo sapien
gccgcagcaggcacgtcaggggcac

SEQ ID NO: 2557456 - DNA, 25 bp, Homo sapien
ctgagggtccgggagctgcgcctgg

SEQ ID NO: 2557457 - DNA, 25 bp, Homo sapien
aactggattttgcggctgcagagga

SEQ ID NO: 2557458 - DNA, 25 bp, Homo sapien
ggctgcagaggacttccccaaattt

SEQ ID NO: 2557459 - DNA, 25 bp, Homo sapien
aaattttgccacattaacagctgac

SEQ ID NO: 2557460 - DNA, 25 bp, Homo sapien
cccggcctccaactggtgggaactg

SEQ ID NO: 2557461 - DNA, 25 bp, Homo sapien
agagaggacagcactgcaggacccc

SEQ ID NO: 2557462 - DNA, 25 bp, Homo sapien
ccagtggagctctcctgctacctgg

SEQ ID NO: 2557463 - DNA, 25 bp, Homo sapien
ctggaccttagaggacacatcaggg

SEQ ID NO: 2557464 - DNA, 25 bp, Homo sapien
tctcctgctacctggaccttagagg

SEQ ID NO: 2557465 - DNA, 25 bp, Homo sapien
tggcggagcagggggcaaaagtcca

SEQ ID NO: 2557466 - DNA, 25 bp, Homo sapien
gggcaaaagtccagttgatccgggc

SEQ ID NO: 2557467 - DNA, 25 bp, Homo sapien
cagggggcaaaagtccagttgatcc

SEQ ID NO: 2557468 - DNA, 25 bp, Homo sapien
gcggagcagggggcaaaagtccagt

SEQ ID NO: 2557469 - DNA, 25 bp, Homo sapien
ggagacccaggagagatccaagcag

SEQ ID NO: 2557470 - DNA, 25 bp, Homo sapien
cctggacaggcgcagcagggagacc

SEQ ID NO: 2557471 - DNA, 25 bp, Homo sapien
tggacaggcgcagcagggagaccca

SEQ ID NO: 2557472 - DNA, 25 bp, Homo sapien
acccaggagagatccaagcaggagg

SEQ ID NO: 2557473 - DNA, 25 bp, Homo sapien
gtccctgggagcccgagctccctgc

SEQ ID NO: 2557474 - DNA, 25 bp, Homo sapien
ccctgggagcccgagctccctgcat

SEQ ID NO: 2557475 - DNA, 25 bp, Homo sapien
tccctgggagcccgagctccctgca

SEQ ID NO: 2557476 - DNA, 25 bp, Homo sapien
ggccagcacgtaggtaagcaagatg

SEQ ID NO: 2557477 - DNA, 25 bp, Homo sapien
caggtaagttctgtggcggccagca

SEQ ID NO: 2557478 - DNA, 25 bp, Homo sapien
ccgaggaccggcctagagcgctcat

SEQ ID NO: 2557479 - DNA, 25 bp, Homo sapien
atgaagaggcaggtaagttctgtgg

SEQ ID NO: 2557480 - DNA, 25 bp, Homo sapien
tggtttgcaggtagccgaaggcaat

SEQ ID NO: 2557481 - DNA, 25 bp, Homo sapien
gcagcaccccgaaggtggtttgcag

SEQ ID NO: 2557482 - DNA, 25 bp, Homo sapien
tagccgaaggcaatggaatccaggc

SEQ ID NO: 2557483 - DNA, 25 bp, Homo sapien
ctgcagcaccccgaaggtggtttgc

SEQ ID NO: 2557484 - DNA, 25 bp, Homo sapien
ggcgcgaggcgaagagcaggtagac

SEQ ID NO: 2557485 - DNA, 25 bp, Homo sapien
aggcgcgaggcgaagagcaggtaga

SEQ ID NO: 2557486 - DNA, 25 bp, Homo sapien
aagagcaggtagaccccgggcaggg

SEQ ID NO: 2557487 - DNA, 25 bp, Homo sapien
agcaggtagaccccgggcagggccg

SEQ ID NO: 2557488 - DNA, 25 bp, Homo sapien
gacaggtccgtgatgaccatctggg

SEQ ID NO: 2557489 - DNA, 25 bp, Homo sapien
ggtgccgacaggtccgtgatgacca

SEQ ID NO: 2557490 - DNA, 25 bp, Homo sapien
ggatgactccgacgccgaagcagag

SEQ ID NO: 2557491 - DNA, 25 bp, Homo sapien
gcccagcagggagccgaggatgact

SEQ ID NO: 2557492 - DNA, 25 bp, Homo sapien
ggccgacccagccgcgggcgtcctg

SEQ ID NO: 2557493 - DNA, 25 bp, Homo sapien
ccagccgcgggcgtcctgacccaca

SEQ ID NO: 2557494 - DNA, 25 bp, Homo sapien
gacccagccgcgggcgtcctgaccc

SEQ ID NO: 2557495 - DNA, 25 bp, Homo sapien
gccgcgggcgtcctgacccacagac

SEQ ID NO: 2557496 - DNA, 25 bp, Homo sapien
ctcatttctgaggtgggacccctaa

SEQ ID NO: 2557497 - DNA, 25 bp, Homo sapien
cgcggagaccgcagtgatcattaga

SEQ ID NO: 2557498 - DNA, 25 bp, Homo sapien
caggacgtcagctactcaggttttc

SEQ ID NO: 2557499 - DNA, 25 bp, Homo sapien
tacctgcatccgtttgccagagcaa

SEQ ID NO: 2557500 - DNA, 25 bp, Homo sapien
ggaaggaatcggcaggtcttgtctc

SEQ ID NO: 2557501 - DNA, 25 bp, Homo sapien
ttcctgggccactaccaaggcctgg

SEQ ID NO: 2557502 - DNA, 25 bp, Homo sapien
tgggactctggctgtaccgtcagct

SEQ ID NO: 2557503 - DNA, 25 bp, Homo sapien
acctggaaacttggcctgtgattcc

SEQ ID NO: 2557504 - DNA, 25 bp, Homo sapien
tgcctccccagcgtgggcaagggtg

SEQ ID NO: 2557505 - DNA, 25 bp, Homo sapien
tcatggggatggctatgctgcctcc

SEQ ID NO: 2557506 - DNA, 25 bp, Homo sapien
aatagcttaaatctgacctcccaca

SEQ ID NO: 2557507 - DNA, 25 bp, Homo sapien
gaccctcagagcacatttattaggt

SEQ ID NO: 2557508 - DNA, 25 bp, Homo sapien
ggacagctcccaggagggtggccag

SEQ ID NO: 2557509 - DNA, 25 bp, Homo sapien
agttttggcccctttggtgctggcg

SEQ ID NO: 2557510 - DNA, 25 bp, Homo sapien
tgcaggtgaagctgaggacagctcc

SEQ ID NO: 2557511 - DNA, 25 bp, Homo sapien
gagcctgggcgtcagttttggcccc

SEQ ID NO: 2557512 - DNA, 25 bp, Homo sapien
cccctcctaacgccttccctgtctg

SEQ ID NO: 2557513 - DNA, 25 bp, Homo sapien
gaggcgatggccttcaggtcgaaca

SEQ ID NO: 2557514 - DNA, 25 bp, Homo sapien
ccttcaccaggaagatcctcgggac

SEQ ID NO: 2557515 - DNA, 25 bp, Homo sapien
ggcgatggccttcaggtcgaacaca

SEQ ID NO: 2557516 - DNA, 25 bp, Homo sapien
atcctcgggacgtctggcagccgca

SEQ ID NO: 2557517 - DNA, 25 bp, Homo sapien
gagccctcaaagtcacgtctgcaat

SEQ ID NO: 2557518 - DNA, 25 bp, Homo sapien
aagagccctcaaagtcacgtctgca

SEQ ID NO: 2557519 - DNA, 25 bp, Homo sapien
ataagagccctcaaagtcacgtctg

SEQ ID NO: 2557520 - DNA, 25 bp, Homo sapien
ggctctctgttataagagccctcaa

SEQ ID NO: 2557521 - DNA, 25 bp, Homo sapien
tggaggagcccgaagaaggacatga

SEQ ID NO: 2557522 - DNA, 25 bp, Homo sapien
ggaggagcccgaagaaggacatgag

SEQ ID NO: 2557523 - DNA, 25 bp, Homo sapien
tctggaggagcccgaagaaggacat

SEQ ID NO: 2557524 - DNA, 25 bp, Homo sapien
ctggaggagcccgaagaaggacatg

SEQ ID NO: 2557525 - DNA, 25 bp, Homo sapien
gacatgaacctggagctaacaagct

SEQ ID NO: 2557526 - DNA, 25 bp, Homo sapien
gcttgaacttaggagccctgcaggt

SEQ ID NO: 2557527 - DNA, 25 bp, Homo sapien
agcactagtctagtcctgggcccag

SEQ ID NO: 2557528 - DNA, 25 bp, Homo sapien
gctaagcgtccttcctcgcagtgag

SEQ ID NO: 2557529 - DNA, 25 bp, Homo sapien
tcctccactaagcagggcgtgctgg

SEQ ID NO: 2557530 - DNA, 25 bp, Homo sapien
ggctctctatctggtcatctcagct

SEQ ID NO: 2557531 - DNA, 25 bp, Homo sapien
gtgctgggccaacgcgcctgggagt

SEQ ID NO: 2557532 - DNA, 25 bp, Homo sapien
caggccagggcgaggctctctatct

SEQ ID NO: 2557533 - DNA, 25 bp, Homo sapien
gacagagagggtagaagtgggtatg

SEQ ID NO: 2557534 - DNA, 25 bp, Homo sapien
cagagagggtagaagtgggtatggg

SEQ ID NO: 2557535 - DNA, 25 bp, Homo sapien
acagagagggtagaagtgggtatgg

SEQ ID NO: 2557536 - DNA, 25 bp, Homo sapien
gccaggcccaccacgatgaagacca

SEQ ID NO: 2557537 - DNA, 25 bp, Homo sapien
ggagcagcacctcctccgagaagtg

SEQ ID NO: 2557538 - DNA, 25 bp, Homo sapien
gcagcacctcctccgagaagtggct

SEQ ID NO: 2557539 - DNA, 25 bp, Homo sapien
ctcctccgagaagtggctgctcagc

SEQ ID NO: 2557540 - DNA, 25 bp, Homo sapien
cagaagtggaagacgctggacatcc

SEQ ID NO: 2557541 - DNA, 25 bp, Homo sapien
tgaccacgttgagggtgcagaggct

SEQ ID NO: 2557542 - DNA, 25 bp, Homo sapien
gaggtggagacagccttgatcagca

SEQ ID NO: 2557543 - DNA, 25 bp, Homo sapien
cttgatcagcatgctgtcggtgacc

SEQ ID NO: 2557544 - DNA, 25 bp, Homo sapien
ccaggaggacaagggtattgatagc

SEQ ID NO: 2557545 - DNA, 25 bp, Homo sapien
cagagttcggagcagtggttgtaca

SEQ ID NO: 2557546 - DNA, 25 bp, Homo sapien
ccaaagctgcggtacaggaggccgc

SEQ ID NO: 2557547 - DNA, 25 bp, Homo sapien
ttgatagcaacctgcacgtggccga

SEQ ID NO: 2557548 - DNA, 25 bp, Homo sapien
gtaggagtttattgccagtctgtgt

SEQ ID NO: 2557549 - DNA, 25 bp, Homo sapien
gatttagtaggagtttattgccagt

SEQ ID NO: 2557550 - DNA, 25 bp, Homo sapien
tagtaggagtttattgccagtctgt

SEQ ID NO: 2557551 - DNA, 25 bp, Homo sapien
tttagtaggagtttattgccagtct

SEQ ID NO: 2557552 - DNA, 25 bp, Homo sapien
ggctggcactgtctggtgcggttct

SEQ ID NO: 2557553 - DNA, 25 bp, Homo sapien
ctggcagtgtctggtacggttctgg

SEQ ID NO: 2557554 - DNA, 25 bp, Homo sapien
ggcagtgtctggtacggttctgggg

SEQ ID NO: 2557555 - DNA, 25 bp, Homo sapien
gctggcactgtctggtgcggttctg

SEQ ID NO: 2557556 - DNA, 25 bp, Homo sapien
gcacgggcgccttaagttattggac

SEQ ID NO: 2557557 - DNA, 25 bp, Homo sapien
agccctgcagcagaagaacttcccg

SEQ ID NO: 2557558 - DNA, 25 bp, Homo sapien
ttgcttttctaccatccggctgtgg

SEQ ID NO: 2557559 - DNA, 25 bp, Homo sapien
tatttcgctggttctttgtagtcac

SEQ ID NO: 2557560 - DNA, 25 bp, Homo sapien
cgcacgccatgagcccgccgcggtg

SEQ ID NO: 2557561 - DNA, 25 bp, Homo sapien
cctccgagccctcggagccctccag

SEQ ID NO: 2557562 - DNA, 25 bp, Homo sapien
agccctccaggccatccccgcagcc

SEQ ID NO: 2557563 - DNA, 25 bp, Homo sapien
atccccgcagcccaaaccccgcacg

SEQ ID NO: 2557564 - DNA, 25 bp, Homo sapien
ctgagcgtattcacactaagcattt

SEQ ID NO: 2557565 - DNA, 25 bp, Homo sapien
tattcacaccgagcatactcagcat

SEQ ID NO: 2557566 - DNA, 25 bp, Homo sapien
catattcacaccgagcatattacaa

SEQ ID NO: 2557567 - DNA, 25 bp, Homo sapien
tattacaagcgtattcacaccaagc

SEQ ID NO: 2557568 - DNA, 25 bp, Homo sapien
tgtccgccagtgagtctgaccttgg

SEQ ID NO: 2557569 - DNA, 25 bp, Homo sapien
cctgtgtccgccagtgagtctgacc

SEQ ID NO: 2557570 - DNA, 25 bp, Homo sapien
gtgcatggttcgtggatgctgccca

SEQ ID NO: 2557571 - DNA, 25 bp, Homo sapien
ttgggagtgcatggttcgtggatgc

SEQ ID NO: 2557572 - DNA, 25 bp, Homo sapien
ctgtggagagtgctcggcctaacct

SEQ ID NO: 2557573 - DNA, 25 bp, Homo sapien
ttagaacacatttgtaactgaatac

SEQ ID NO: 2557574 - DNA, 25 bp, Homo sapien
cttagaacacatttgtaactgaata

SEQ ID NO: 2557575 - DNA, 25 bp, Homo sapien
tagaacacatttgtaactgaataca

SEQ ID NO: 2557576 - DNA, 25 bp, Homo sapien
ttttcaagtgggtgacggcgctctc

SEQ ID NO: 2557577 - DNA, 25 bp, Homo sapien
cagtggagcgtatgagcgtcaagtc

SEQ ID NO: 2557578 - DNA, 25 bp, Homo sapien
gctttctcagtagccccattgcggg

SEQ ID NO: 2557579 - DNA, 25 bp, Homo sapien
gttgtgacacaccagcccaggtgag

SEQ ID NO: 2557580 - DNA, 25 bp, Homo sapien
gattgccagtttcctatgtgagccc

SEQ ID NO: 2557581 - DNA, 25 bp, Homo sapien
gaatacgcttgaagaggagaagtct

SEQ ID NO: 2557582 - DNA, 25 bp, Homo sapien
tccacctgggtgcttatctctgttg

SEQ ID NO: 2557583 - DNA, 25 bp, Homo sapien
aaattggacactttttccgtgagcg

SEQ ID NO: 2557584 - DNA, 25 bp, Homo sapien
gtcaaggtaggcagatcgtttgaga

SEQ ID NO: 2557585 - DNA, 25 bp, Homo sapien
aaggtaggcagatcgtttgagacca

SEQ ID NO: 2557586 - DNA, 25 bp, Homo sapien
gatcatttctcttgaaaaagtgtct

SEQ ID NO: 2557587 - DNA, 25 bp, Homo sapien
aacaagttgctaatattttctgatc

SEQ ID NO: 2557588 - DNA, 25 bp, Homo sapien
ctagttttctcgctttagaaactgg

SEQ ID NO: 2557589 - DNA, 25 bp, Homo sapien
ggttccatattagccatattgcagg

SEQ ID NO: 2557590 - DNA, 25 bp, Homo sapien
tagttggtgtgaatgattgaaggac

SEQ ID NO: 2557591 - DNA, 25 bp, Homo sapien
tgtgggactagaagtggttccatat

SEQ ID NO: 2557592 - DNA, 25 bp, Homo sapien
ctgccagggctattacgacaagaag

SEQ ID NO: 2557593 - DNA, 25 bp, Homo sapien
actgtacgttctggagtagatgtgc

SEQ ID NO: 2557594 - DNA, 25 bp, Homo sapien
ggactgccagggctattacgacaag

SEQ ID NO: 2557595 - DNA, 25 bp, Homo sapien
gatgtgctgagtgttcaggtttgtt

SEQ ID NO: 2557596 - DNA, 25 bp, Homo sapien
ccagaggtatcagccgctgtgtcca

SEQ ID NO: 2557597 - DNA, 25 bp, Homo sapien
tcctgggctcgagtgttgcttctgt

SEQ ID NO: 2557598 - DNA, 25 bp, Homo sapien
aagtagctgcgaccagaggtatcag

SEQ ID NO: 2557599 - DNA, 25 bp, Homo sapien
ctgactgtgtcttccaggcgggagt

SEQ ID NO: 2557600 - DNA, 25 bp, Homo sapien
gattcagactgggatgagcaattgc

SEQ ID NO: 2557601 - DNA, 25 bp, Homo sapien
cagcctgtttgcgtgtgttaactca

SEQ ID NO: 2557602 - DNA, 25 bp, Homo sapien
tatcctcctgcattaggtttacggg

SEQ ID NO: 2557603 - DNA, 25 bp, Homo sapien
gacaaagcttaaagacccaggcagt

SEQ ID NO: 2557604 - DNA, 25 bp, Homo sapien
cctctggcaggaaggtccgccattt

SEQ ID NO: 2557605 - DNA, 25 bp, Homo sapien
ccatttcattatgttctcggaggaa

SEQ ID NO: 2557606 - DNA, 25 bp, Homo sapien
tgtgctttggttcgcatcccccagt

SEQ ID NO: 2557607 - DNA, 25 bp, Homo sapien
tagaccctaacgtgtgtgtcacatc

SEQ ID NO: 2557608 - DNA, 25 bp, Homo sapien
tctgaatgctttccgttcaccccag

SEQ ID NO: 2557609 - DNA, 25 bp, Homo sapien
aaggatggcctggtcatgataagac

SEQ ID NO: 2557610 - DNA, 25 bp, Homo sapien
tcatgataagactttccaccgtcca

SEQ ID NO: 2557611 - DNA, 25 bp, Homo sapien
ttccgttcaccccagcgaaggatgg

SEQ ID NO: 2557612 - DNA, 25 bp, Homo sapien
tagggcggttgtcatcgtgagcctc

SEQ ID NO: 2557613 - DNA, 25 bp, Homo sapien
caaggtgggcagcaagtctgtttac

SEQ ID NO: 2557614 - DNA, 25 bp, Homo sapien
tggccttagactagttactcacggg

SEQ ID NO: 2557615 - DNA, 25 bp, Homo sapien
gaagaaagtccttggcgttgcttct

SEQ ID NO: 2557616 - DNA, 25 bp, Homo sapien
catcttcagtcaatggcgtcaggga

SEQ ID NO: 2557617 - DNA, 25 bp, Homo sapien
gtaagcatcacagtctccctaggag

SEQ ID NO: 2557618 - DNA, 25 bp, Homo sapien
tctcatgtgaagtgtgtggcccgct

SEQ ID NO: 2557619 - DNA, 25 bp, Homo sapien
tattgcctgtcatctgggagtccgt

SEQ ID NO: 2557620 - DNA, 25 bp, Homo sapien
gtcagagccattgggatccacagca

SEQ ID NO: 2557621 - DNA, 25 bp, Homo sapien
tgctgtgggccaaccgtctatgacg

SEQ ID NO: 2557622 - DNA, 25 bp, Homo sapien
cacagcagcgatcttaggtccacaa

SEQ ID NO: 2557623 - DNA, 25 bp, Homo sapien
catagatgagtagaaccccagggag

SEQ ID NO: 2557624 - DNA, 25 bp, Homo sapien
caccctcagtttagatcgtaccaag

SEQ ID NO: 2557625 - DNA, 25 bp, Homo sapien
gacagggctacactcttgtgccaag

SEQ ID NO: 2557626 - DNA, 25 bp, Homo sapien
ttatgacaacccgagtaatctggcg

SEQ ID NO: 2557627 - DNA, 25 bp, Homo sapien
catgcgtaatggctcctaccttgga

SEQ ID NO: 2557628 - DNA, 25 bp, Homo sapien
ctcattttggatgggtgcacgaacc

SEQ ID NO: 2557629 - DNA, 25 bp, Homo sapien
gatggagaagcctgttcacgcaaca

SEQ ID NO: 2557630 - DNA, 25 bp, Homo sapien
tgcacgaaccttgggtgggatatcc

SEQ ID NO: 2557631 - DNA, 25 bp, Homo sapien
ctttccgcagggtcattggcagggc

SEQ ID NO: 2557632 - DNA, 25 bp, Homo sapien
caagccttagccgaatgtttatctc

SEQ ID NO: 2557633 - DNA, 25 bp, Homo sapien
aaaacaagacatctggaagctcaga

SEQ ID NO: 2557634 - DNA, 25 bp, Homo sapien
tcagagaagttaaactcaccccagg

SEQ ID NO: 2557635 - DNA, 25 bp, Homo sapien
gatgtcaggaggctttcttagtgca

SEQ ID NO: 2557636 - DNA, 25 bp, Homo sapien
aatacaaattcacacatctaccatg

SEQ ID NO: 2557637 - DNA, 25 bp, Homo sapien
tcgggatttacatacccaccatgca

SEQ ID NO: 2557638 - DNA, 25 bp, Homo sapien
gaaacaatcgggatttacacaccca

SEQ ID NO: 2557639 - DNA, 25 bp, Homo sapien
ccaagcgcccacaacaattaaacat

SEQ ID NO: 2557640 - DNA, 25 bp, Homo sapien
gtgcactcgaccactcgtcagctct

SEQ ID NO: 2557641 - DNA, 25 bp, Homo sapien
gaccactcgtcagctctcagtggca

SEQ ID NO: 2557642 - DNA, 25 bp, Homo sapien
tcgaccactcgtcagctctcagtgg

SEQ ID NO: 2557643 - DNA, 25 bp, Homo sapien
actcgaccactcgtcagctctcagt

SEQ ID NO: 2557644 - DNA, 25 bp, Homo sapien
acaagcctggaattgagcccctcat

SEQ ID NO: 2557645 - DNA, 25 bp, Homo sapien
tctcacctgtctccttcatgaggct

SEQ ID NO: 2557646 - DNA, 25 bp, Homo sapien
agtttagcagcctacagccaccagc

SEQ ID NO: 2557647 - DNA, 25 bp, Homo sapien
gtagacctcaggcacgtcactgcac

SEQ ID NO: 2557648 - DNA, 25 bp, Homo sapien
cagcctgctcttgtctcagtcgagg

SEQ ID NO: 2557649 - DNA, 25 bp, Homo sapien
tcgaggtgcgatgagtttttcccac

SEQ ID NO: 2557650 - DNA, 25 bp, Homo sapien
tgggagaagtctcctagccagccag

SEQ ID NO: 2557651 - DNA, 25 bp, Homo sapien
ccaggcttaggcctcggtggtgcca

SEQ ID NO: 2557652 - DNA, 25 bp, Homo sapien
tgcagacttcgtttggcccagtcac

SEQ ID NO: 2557653 - DNA, 25 bp, Homo sapien
tctcttgtgcagacttcgtttggcc

SEQ ID NO: 2557654 - DNA, 25 bp, Homo sapien
tgcatgtgcgatcccctcccacttt

SEQ ID NO: 2557655 - DNA, 25 bp, Homo sapien
tctctcctgcatgtgcgatcccctc

SEQ ID NO: 2557656 - DNA, 25 bp, Homo sapien
agcatctcctttgcctggggttccc

SEQ ID NO: 2557657 - DNA, 25 bp, Homo sapien
ccactgggcacagttcttcagcatc

SEQ ID NO: 2557658 - DNA, 25 bp, Homo sapien
gtcccaggaggctgaaccactgggc

SEQ ID NO: 2557659 - DNA, 25 bp, Homo sapien
ccaggggatgctgtctgctggtccc

SEQ ID NO: 2557660 - DNA, 25 bp, Homo sapien
tgagacctgtcaaaccattgcggac

SEQ ID NO: 2557661 - DNA, 25 bp, Homo sapien
caggtaccagtgcttcttgagacct

SEQ ID NO: 2557662 - DNA, 25 bp, Homo sapien
gcttcttgagacctgtcaaaccatt

SEQ ID NO: 2557663 - DNA, 25 bp, Homo sapien
caaaccattgcggactcccagtgac

SEQ ID NO: 2557664 - DNA, 25 bp, Homo sapien
ctgccgccatgagaaaatggttgaa

SEQ ID NO: 2557665 - DNA, 25 bp, Homo sapien
tccagggctgggacacgagacccag

SEQ ID NO: 2557666 - DNA, 25 bp, Homo sapien
agaaaatggttgaactgagcgggtt

SEQ ID NO: 2557667 - DNA, 25 bp, Homo sapien
caggacccccggtttctcaggctct

SEQ ID NO: 2557668 - DNA, 25 bp, Homo sapien
tggtgtttctccatgcagcgtttgc

SEQ ID NO: 2557669 - DNA, 25 bp, Homo sapien
taggtaacagcagcgtgcacagctc

SEQ ID NO: 2557670 - DNA, 25 bp, Homo sapien
ttcctactgcaatccctaagcgagc

SEQ ID NO: 2557671 - DNA, 25 bp, Homo sapien
tgccgcacccctccttgaggtgaga

SEQ ID NO: 2557672 - DNA, 25 bp, Homo sapien
cttggtaaagttggtggcatctgga

SEQ ID NO: 2557673 - DNA, 25 bp, Homo sapien
gcgatgacccacactccgcttggta

SEQ ID NO: 2557674 - DNA, 25 bp, Homo sapien
ggacgtctgtcctgtcagggttctc

SEQ ID NO: 2557675 - DNA, 25 bp, Homo sapien
cttctattagtgcacaggacgtctg

SEQ ID NO: 2557676 - DNA, 25 bp, Homo sapien
gccttcagcgtggagcgctgcctct

SEQ ID NO: 2557677 - DNA, 25 bp, Homo sapien
ctgcgccctggtgtggaccccgacc

SEQ ID NO: 2557678 - DNA, 25 bp, Homo sapien
cctcttccccgcctgctaccagggc

SEQ ID NO: 2557679 - DNA, 25 bp, Homo sapien
tgcggcctgctgcgcaacagcgcgt

SEQ ID NO: 2557680 - DNA, 25 bp, Homo sapien
gctgagcctggtcctgatgcatctc

SEQ ID NO: 2557681 - DNA, 25 bp, Homo sapien
ccaggactaagaacatgacccatgt

SEQ ID NO: 2557682 - DNA, 25 bp, Homo sapien
ctaagaacatgacccatgtggatcc

SEQ ID NO: 2557683 - DNA, 25 bp, Homo sapien
tgatgcatctcccaggactaagaac

SEQ ID NO: 2557684 - DNA, 25 bp, Homo sapien
tgcggaacgcagtccgtggaaggaa

SEQ ID NO: 2557685 - DNA, 25 bp, Homo sapien
gcatctttacgaccgaatttctggc

SEQ ID NO: 2557686 - DNA, 25 bp, Homo sapien
ggaaaaactctcttatcaagaacat

SEQ ID NO: 2557687 - DNA, 25 bp, Homo sapien
gaaacgtgaagagaaacagcatctt

SEQ ID NO: 2557688 - DNA, 25 bp, Homo sapien
gcaggtgaccggagctaccaactaa

SEQ ID NO: 2557689 - DNA, 25 bp, Homo sapien
ttgaaacaggcctggacggtgacct

SEQ ID NO: 2557690 - DNA, 25 bp, Homo sapien
tgtgccgtgcgtttcaaagccatgt

SEQ ID NO: 2557691 - DNA, 25 bp, Homo sapien
tcaccttgcgcactgtggctgaggc

SEQ ID NO: 2557692 - DNA, 25 bp, Homo sapien
gaaagcgaccccagaaattaggcca

SEQ ID NO: 2557693 - DNA, 25 bp, Homo sapien
ggacgtggacacatcttctgaggcc

SEQ ID NO: 2557694 - DNA, 25 bp, Homo sapien
tttgaagtgcccaatagaaagcgac

SEQ ID NO: 2557695 - DNA, 25 bp, Homo sapien
tctgctacctgggatagaagccggg

SEQ ID NO: 2557696 - DNA, 25 bp, Homo sapien
ctctgtgctcagcgatagccccgcc

SEQ ID NO: 2557697 - DNA, 25 bp, Homo sapien
tgtgctcagcgatagccccgccccg

SEQ ID NO: 2557698 - DNA, 25 bp, Homo sapien
ccccaaacggtgagtagcgcaggtg

SEQ ID NO: 2557699 - DNA, 25 bp, Homo sapien
aggcgctcggcattttctgggctct

SEQ ID NO: 2557700 - DNA, 25 bp, Homo sapien
agtcctctgccccaaacggtgagta

SEQ ID NO: 2557701 - DNA, 25 bp, Homo sapien
cagcagatgctatcaacagggagct

SEQ ID NO: 2557702 - DNA, 25 bp, Homo sapien
gactgcgcagagtgggaaacgctcc

SEQ ID NO: 2557703 - DNA, 25 bp, Homo sapien
actcttctctacctcggagattttt

SEQ ID NO: 2557704 - DNA, 25 bp, Homo sapien
gcaaatccgtgctgtttctgcactc

SEQ ID NO: 2557705 - DNA, 25 bp, Homo sapien
gaaacgctccggagcaaatccgtgc

SEQ ID NO: 2557706 - DNA, 25 bp, Homo sapien
cctgctcggcctgttgtctaaattc

SEQ ID NO: 2557707 - DNA, 25 bp, Homo sapien
ccagaagtagaagtcgtcatcctct

SEQ ID NO: 2557708 - DNA, 25 bp, Homo sapien
tctggcctgtgttgcagtccggaag

SEQ ID NO: 2557709 - DNA, 25 bp, Homo sapien
gatgatcaagtccaataggcaaatg

SEQ ID NO: 2557710 - DNA, 25 bp, Homo sapien
actggcttcccgagtttgccttcct

SEQ ID NO: 2557711 - DNA, 25 bp, Homo sapien
ggactggcttcccgagtttgccttc

SEQ ID NO: 2557712 - DNA, 25 bp, Homo sapien
ggcgtgcggatcctcccaggccgct

SEQ ID NO: 2557713 - DNA, 25 bp, Homo sapien
ccaggccgctgttgaggagtgttgt

SEQ ID NO: 2557714 - DNA, 25 bp, Homo sapien
tctgtagggagttggcgtgactggt

SEQ ID NO: 2557715 - DNA, 25 bp, Homo sapien
tgactggtgtgattggcaaggtcca

SEQ ID NO: 2557716 - DNA, 25 bp, Homo sapien
caagccaggcagaggtgtctgtagg

SEQ ID NO: 2557717 - DNA, 25 bp, Homo sapien
caaggtccatgtgactggtgaggtc

SEQ ID NO: 2557718 - DNA, 25 bp, Homo sapien
tgggtgtgcattgacttgagcagct

SEQ ID NO: 2557719 - DNA, 25 bp, Homo sapien
cagagcagaccaacatgggtgtgca

SEQ ID NO: 2557720 - DNA, 25 bp, Homo sapien
ggtgattacgagaggccacctcctt

SEQ ID NO: 2557721 - DNA, 25 bp, Homo sapien
tccttgaagggtcggtaatgcagca

SEQ ID NO: 2557722 - DNA, 25 bp, Homo sapien
cggtcagctggatgcatgtcggaac

SEQ ID NO: 2557723 - DNA, 25 bp, Homo sapien
ttatggagatggaggtacaacaagg

SEQ ID NO: 2557724 - DNA, 25 bp, Homo sapien
ctgggtagcacagaagcggtcagct

SEQ ID NO: 2557725 - DNA, 25 bp, Homo sapien
ctagaacaactttatggagatggag

SEQ ID NO: 2557726 - DNA, 25 bp, Homo sapien
gttgcttgtgtaaatccacacctgc

SEQ ID NO: 2557727 - DNA, 25 bp, Homo sapien
tccccacgggtgtgcttttgttgct

SEQ ID NO: 2557728 - DNA, 25 bp, Homo sapien
atcttgacctgatttccccacgggt

SEQ ID NO: 2557729 - DNA, 25 bp, Homo sapien
gcttgtgtaaatccacacctgcacc

SEQ ID NO: 2557730 - DNA, 25 bp, Homo sapien
ttggtaagaggctctccactaatgg

SEQ ID NO: 2557731 - DNA, 25 bp, Homo sapien
actttaaccacagccggcttctcat

SEQ ID NO: 2557732 - DNA, 25 bp, Homo sapien
tctgtttccactttaaccacagccg

SEQ ID NO: 2557733 - DNA, 25 bp, Homo sapien
ccatttccacagattggtaagaggc

SEQ ID NO: 2557734 - DNA, 25 bp, Homo sapien
tatcgaacatactaccgaagaaact

SEQ ID NO: 2557735 - DNA, 25 bp, Homo sapien
tcctttttgattatggcctctacat

SEQ ID NO: 2557736 - DNA, 25 bp, Homo sapien
gtttagacagtaatcattaaggatc

SEQ ID NO: 2557737 - DNA, 25 bp, Homo sapien
gccaaggagattaagcataatttca

SEQ ID NO: 2557738 - DNA, 25 bp, Homo sapien
tgtcacttgcgaaaggcgtgctggt

SEQ ID NO: 2557739 - DNA, 25 bp, Homo sapien
aaagtcctaggatcagcgtcatgtc

SEQ ID NO: 2557740 - DNA, 25 bp, Homo sapien
caatgggctctggacggccgatttc

SEQ ID NO: 2557741 - DNA, 25 bp, Homo sapien
ttacatgcttccatcagcgcctcgg

SEQ ID NO: 2557742 - DNA, 25 bp, Homo sapien
gtaaattttgtaagtggaccctgca

SEQ ID NO: 2557743 - DNA, 25 bp, Homo sapien
tcaggtgcaaagaggcataactgat

SEQ ID NO: 2557744 - DNA, 25 bp, Homo sapien
taatgcctggtatcgcggcgtgcct

SEQ ID NO: 2557745 - DNA, 25 bp, Homo sapien
gatgctgaggcaactagggtttctc

SEQ ID NO: 2557746 - DNA, 25 bp, Homo sapien
ggcgtgcggatcctcccaggccgct

SEQ ID NO: 2557747 - DNA, 25 bp, Homo sapien
actggcttcccgagtttgccttcct

SEQ ID NO: 2557748 - DNA, 25 bp, Homo sapien
ggactggcttcccgagtttgccttc

SEQ ID NO: 2557749 - DNA, 25 bp, Homo sapien
ccaggccgctgttgaggagtgttgt

SEQ ID NO: 2557750 - DNA, 25 bp, Homo sapien
cagagcagaccaacatgggtgtgca

SEQ ID NO: 2557751 - DNA, 25 bp, Homo sapien
tccttgaagggtcggtaatgcagca

SEQ ID NO: 2557752 - DNA, 25 bp, Homo sapien
tgggtgtgcattgacttgagcagct

SEQ ID NO: 2557753 - DNA, 25 bp, Homo sapien
ggtgattacgagaggccacctcctt

SEQ ID NO: 2557754 - DNA, 25 bp, Homo sapien
cggtcagctggatgcatgtcggaac

SEQ ID NO: 2557755 - DNA, 25 bp, Homo sapien
ttatggagatggaggtacaacaagg

SEQ ID NO: 2557756 - DNA, 25 bp, Homo sapien
ctgggtagcacagaagcggtcagct

SEQ ID NO: 2557757 - DNA, 25 bp, Homo sapien
ctagaacaactttatggagatggag

SEQ ID NO: 2557758 - DNA, 25 bp, Homo sapien
atcttgacctgatttccccacgggt

SEQ ID NO: 2557759 - DNA, 25 bp, Homo sapien
gttgcttgtgtaaatccacacctgc

SEQ ID NO: 2557760 - DNA, 25 bp, Homo sapien
tccccacgggtgtgcttttgttgct

SEQ ID NO: 2557761 - DNA, 25 bp, Homo sapien
gcttgtgtaaatccacacctgcacc

SEQ ID NO: 2557762 - DNA, 25 bp, Homo sapien
gcacctgtgcatggagccttggcaa

SEQ ID NO: 2557763 - DNA, 25 bp, Homo sapien
tgtcctccgggatttcactgcactg

SEQ ID NO: 2557764 - DNA, 25 bp, Homo sapien
tctttccagagccactgtaagccgg

SEQ ID NO: 2557765 - DNA, 25 bp, Homo sapien
catctgatgcgcatgggctgtcgtc

SEQ ID NO: 2557766 - DNA, 25 bp, Homo sapien
ttggtaagaggctctccactaatgg

SEQ ID NO: 2557767 - DNA, 25 bp, Homo sapien
actttaaccacagccggcttctcat

SEQ ID NO: 2557768 - DNA, 25 bp, Homo sapien
tctgtttccactttaaccacagccg

SEQ ID NO: 2557769 - DNA, 25 bp, Homo sapien
ccatttccacagattggtaagaggc

SEQ ID NO: 2557770 - DNA, 25 bp, Homo sapien
tgtcctacatgtaggcttatcaggg

SEQ ID NO: 2557771 - DNA, 25 bp, Homo sapien
tgccggttccattccactcggtcgg

SEQ ID NO: 2557772 - DNA, 25 bp, Homo sapien
gggaatttgccacggcttctccctg

SEQ ID NO: 2557773 - DNA, 25 bp, Homo sapien
gcgtcgctgtttctggagggaattt

SEQ ID NO: 2557774 - DNA, 25 bp, Homo sapien
tatccaacgtgttttgtgctccgtg

SEQ ID NO: 2557775 - DNA, 25 bp, Homo sapien
tcctgagccgtgatatcttggaaga

SEQ ID NO: 2557776 - DNA, 25 bp, Homo sapien
tacaggaccgttggaagactctcct

SEQ ID NO: 2557777 - DNA, 25 bp, Homo sapien
cttacaggaccgttggaagactctc

SEQ ID NO: 2557778 - DNA, 25 bp, Homo sapien
tcatgtgtgagcaatgggctttcca

SEQ ID NO: 2557779 - DNA, 25 bp, Homo sapien
ctgctgttagcaggactcagtggaa

SEQ ID NO: 2557780 - DNA, 25 bp, Homo sapien
gaaacatgctgctttatcactgcgg

SEQ ID NO: 2557781 - DNA, 25 bp, Homo sapien
ggatcatcctgtgagaaaaccctct

SEQ ID NO: 2557782 - DNA, 25 bp, Homo sapien
tatttccaactgaattggagacatc

SEQ ID NO: 2557783 - DNA, 25 bp, Homo sapien
tacacagaacaacctatacaaatct

SEQ ID NO: 2557784 - DNA, 25 bp, Homo sapien
tgacttaacacatatctatccatct

SEQ ID NO: 2557785 - DNA, 25 bp, Homo sapien
tggagacatcaacatacttccgagg

SEQ ID NO: 2557786 - DNA, 25 bp, Homo sapien
agatgcattcccaaaaagaatactg

SEQ ID NO: 2557787 - DNA, 25 bp, Homo sapien
gatatggaaattgtggccttgataa

SEQ ID NO: 2557788 - DNA, 25 bp, Homo sapien
tctcattttacccaagaccttctgc

SEQ ID NO: 2557789 - DNA, 25 bp, Homo sapien
ttttacccaagaccttctgccagag

SEQ ID NO: 2557790 - DNA, 25 bp, Homo sapien
catatatagtaatgcagaagacttc

SEQ ID NO: 2557791 - DNA, 25 bp, Homo sapien
tatatacgaatatgcacccacgctt

SEQ ID NO: 2557792 - DNA, 25 bp, Homo sapien
cttgggaagagtgtgtctcctgctg

SEQ ID NO: 2557793 - DNA, 25 bp, Homo sapien
aacaggtggcctatcctagagaatg

SEQ ID NO: 2557794 - DNA, 25 bp, Homo sapien
gaatagcatcggtatagtaaacata

SEQ ID NO: 2557795 - DNA, 25 bp, Homo sapien
ccggcaagcactccacattgattaa

SEQ ID NO: 2557796 - DNA, 25 bp, Homo sapien
tataaggctattccttgcttctaaa

SEQ ID NO: 2557797 - DNA, 25 bp, Homo sapien
aaatgttctcagtagagtcttttca

SEQ ID NO: 2557798 - DNA, 25 bp, Homo sapien
ttcagggtcatccacgtggttgaat

SEQ ID NO: 2557799 - DNA, 25 bp, Homo sapien
cgcaaacgtttagcttgtctttata

SEQ ID NO: 2557800 - DNA, 25 bp, Homo sapien
tatccattcagcatccgcaaacgtt

SEQ ID NO: 2557801 - DNA, 25 bp, Homo sapien
cagtgaacatgagggagcagataat

SEQ ID NO: 2557802 - DNA, 25 bp, Homo sapien
tcttttttagtatgaggcttatcag

SEQ ID NO: 2557803 - DNA, 25 bp, Homo sapien
tattccctaactcccaactgtaata

SEQ ID NO: 2557804 - DNA, 25 bp, Homo sapien
tcttttttatgctggagtaatattc

SEQ ID NO: 2557805 - DNA, 25 bp, Homo sapien
tcaggactctgtcattcatatgtat

SEQ ID NO: 2557806 - DNA, 25 bp, Homo sapien
caaaggactggcatcactggtgagc

SEQ ID NO: 2557807 - DNA, 25 bp, Homo sapien
tcgctcagcagaatttgtacaggga

SEQ ID NO: 2557808 - DNA, 25 bp, Homo sapien
actggtgagcgcgttagaaattcgg

SEQ ID NO: 2557809 - DNA, 25 bp, Homo sapien
cagactctgttgacgttcagggatg

SEQ ID NO: 2557810 - DNA, 25 bp, Homo sapien
cacttctttcgtggtggcggcaaga

SEQ ID NO: 2557811 - DNA, 25 bp, Homo sapien
aaggcacttctttcgtggtggcggc

SEQ ID NO: 2557812 - DNA, 25 bp, Homo sapien
ggcacttctttcgtggtggcggcaa

SEQ ID NO: 2557813 - DNA, 25 bp, Homo sapien
aaaaggcacttctttcgtggtggcg

SEQ ID NO: 2557814 - DNA, 25 bp, Homo sapien
tagctggtttccatgcatactgatg

SEQ ID NO: 2557815 - DNA, 25 bp, Homo sapien
gacacctccaagatgtacttagctg

SEQ ID NO: 2557816 - DNA, 25 bp, Homo sapien
tattaaaaatcaacggacacctcca

SEQ ID NO: 2557817 - DNA, 25 bp, Homo sapien
tactgatgggatttgccacatagga

SEQ ID NO: 2557818 - DNA, 25 bp, Homo sapien
tattgtatatacagctctgtgcctc

SEQ ID NO: 2557819 - DNA, 25 bp, Homo sapien
ttttgtcataattagtagtgggatc

SEQ ID NO: 2557820 - DNA, 25 bp, Homo sapien
tgggatcaatttcactgttattgta

SEQ ID NO: 2557821 - DNA, 25 bp, Homo sapien
gtatatacagctctgtgcctcaaac

SEQ ID NO: 2557822 - DNA, 25 bp, Homo sapien
tcctcgggtgctcgcatggggctgc

SEQ ID NO: 2557823 - DNA, 25 bp, Homo sapien
tgccactgacgacgaactgctgcag

SEQ ID NO: 2557824 - DNA, 25 bp, Homo sapien
cactgacgacgaactgctgcagctc

SEQ ID NO: 2557825 - DNA, 25 bp, Homo sapien
ggctgccactgacgacgaactgctg

SEQ ID NO: 2557826 - DNA, 25 bp, Homo sapien
tgattatgatgtgtccacacgggcc

SEQ ID NO: 2557827 - DNA, 25 bp, Homo sapien
cacacgggcccattgattgtaagca

SEQ ID NO: 2557828 - DNA, 25 bp, Homo sapien
gcatggccacactatgagacctggg

SEQ ID NO: 2557829 - DNA, 25 bp, Homo sapien
gaggagaggccgtgattaagcacaa

SEQ ID NO: 2557830 - DNA, 25 bp, Homo sapien
cccacggtgatattagaagcgctat

SEQ ID NO: 2557831 - DNA, 25 bp, Homo sapien
cggtgatattagaagcgctatctcc

SEQ ID NO: 2557832 - DNA, 25 bp, Homo sapien
cacccacggtgatattagaagcgct

SEQ ID NO: 2557833 - DNA, 25 bp, Homo sapien
cacggtgatattagaagcgctatct

SEQ ID NO: 2557834 - DNA, 25 bp, Homo sapien
tgcgcgttccttgtagaccagagct

SEQ ID NO: 2557835 - DNA, 25 bp, Homo sapien
ctgagaaacggacgggagccttgtt

SEQ ID NO: 2557836 - DNA, 25 bp, Homo sapien
tgcaggtcaccccttcaagtgagtg

SEQ ID NO: 2557837 - DNA, 25 bp, Homo sapien
gcatggtctccacgttattagtgca

SEQ ID NO: 2557838 - DNA, 25 bp, Homo sapien
gagccctgcccttgaaagccgttta

SEQ ID NO: 2557839 - DNA, 25 bp, Homo sapien
gcacgatacactgtggaaagctgca

SEQ ID NO: 2557840 - DNA, 25 bp, Homo sapien
gggcacgatacactgtggaaagctg

SEQ ID NO: 2557841 - DNA, 25 bp, Homo sapien
ccttgaaagccgtttattgtccaag

SEQ ID NO: 2557842 - DNA, 25 bp, Homo sapien
atgatggcggtgatggttgctaaac

SEQ ID NO: 2557843 - DNA, 25 bp, Homo sapien
caagtgtctagagtagttagactcc

SEQ ID NO: 2557844 - DNA, 25 bp, Homo sapien
tagactcctagagttgcaaactaga

SEQ ID NO: 2557845 - DNA, 25 bp, Homo sapien
aaaactgttccggagatgatggcgg

SEQ ID NO: 2557846 - DNA, 25 bp, Homo sapien
cacaatatatttgctgtcaaagtat

SEQ ID NO: 2557847 - DNA, 25 bp, Homo sapien
gacggggtggctgccaggtggaggg

SEQ ID NO: 2557848 - DNA, 25 bp, Homo sapien
cccagacggggtggctgccaggtgg

SEQ ID NO: 2557849 - DNA, 25 bp, Homo sapien
gatggggtggctgccgggctgaggg

SEQ ID NO: 2557850 - DNA, 25 bp, Homo sapien
tctcagatggggtggctgccgggct

SEQ ID NO: 2557851 - DNA, 25 bp, Homo sapien
cggacggggtggctgccgggtggag

SEQ ID NO: 2557852 - DNA, 25 bp, Homo sapien
cggggtggctgccgggtggagacgc

SEQ ID NO: 2557853 - DNA, 25 bp, Homo sapien
gacggggtggctgccgggtggagac

SEQ ID NO: 2557854 - DNA, 25 bp, Homo sapien
ggtggctgccgggtggagacgctcc

SEQ ID NO: 2557855 - DNA, 25 bp, Homo sapien
aaagtctctcatgtctacttctttc

SEQ ID NO: 2557856 - DNA, 25 bp, Homo sapien
aaaagtctctcatgtctacttcttt

SEQ ID NO: 2557857 - DNA, 25 bp, Homo sapien
gggtggctggctggcgggggctgac

SEQ ID NO: 2557858 - DNA, 25 bp, Homo sapien
cccggacggggtggctggctggcgg

SEQ ID NO: 2557859 - DNA, 25 bp, Homo sapien
acacacaggtcatcaagcaggaact

SEQ ID NO: 2557860 - DNA, 25 bp, Homo sapien
tcagtgaaaagtccctggctgtcct

SEQ ID NO: 2557861 - DNA, 25 bp, Homo sapien
gatctacgttctggatgaaccttcc

SEQ ID NO: 2557862 - DNA, 25 bp, Homo sapien
gctggctcagcccttttgacttcag

SEQ ID NO: 2557863 - DNA, 25 bp, Homo sapien
tcaggatagctgggttcttggtcat

SEQ ID NO: 2557864 - DNA, 25 bp, Homo sapien
ggtccagaggtctcttgaaagaaag

SEQ ID NO: 2557865 - DNA, 25 bp, Homo sapien
caggtccagaggtctcttgaaagaa

SEQ ID NO: 2557866 - DNA, 25 bp, Homo sapien
tgcaggtccagaggtctcttgaaag

SEQ ID NO: 2557867 - DNA, 25 bp, Homo sapien
tccagaggtctcttgaaagaaagat

SEQ ID NO: 2557868 - DNA, 25 bp, Homo sapien
tggccgctcgcggaggcgcatcacc

SEQ ID NO: 2557869 - DNA, 25 bp, Homo sapien
gctggccgctcgcggaggcgcatca

SEQ ID NO: 2557870 - DNA, 25 bp, Homo sapien
gccgctcgcggaggcgcatcaccag

SEQ ID NO: 2557871 - DNA, 25 bp, Homo sapien
agggctggccgctcgcggaggcgca

SEQ ID NO: 2557872 - DNA, 25 bp, Homo sapien
taaagctgccagcagatggagaagt

SEQ ID NO: 2557873 - DNA, 25 bp, Homo sapien
ccagcagatggagaagtcttcgtcc

SEQ ID NO: 2557874 - DNA, 25 bp, Homo sapien
gctgccagcagatggagaagtcttc

SEQ ID NO: 2557875 - DNA, 25 bp, Homo sapien
ctactttctaaagctgccagcagat

SEQ ID NO: 2557876 - DNA, 25 bp, Homo sapien
agaaggaaggttgtgtccatcaaga

SEQ ID NO: 2557877 - DNA, 25 bp, Homo sapien
gaaggttgtgtccatcaagagtcag

SEQ ID NO: 2557878 - DNA, 25 bp, Homo sapien
ctgttatcacacagacgagagaagg

SEQ ID NO: 2557879 - DNA, 25 bp, Homo sapien
ttgtgtccatcaagagtcagttgtt

SEQ ID NO: 2557880 - DNA, 25 bp, Homo sapien
ggcggctgtaatactccctcggagg

SEQ ID NO: 2557881 - DNA, 25 bp, Homo sapien
gtcctcggcctccagccaaggggtg

SEQ ID NO: 2557882 - DNA, 25 bp, Homo sapien
cggcctccagccaaggggtgcagac

SEQ ID NO: 2557883 - DNA, 25 bp, Homo sapien
cctcggcctccagccaaggggtgca

SEQ ID NO: 2557884 - DNA, 25 bp, Homo sapien
caggccactgcaggacgtgtgcaga

SEQ ID NO: 2557885 - DNA, 25 bp, Homo sapien
ccactgcaggacgtgtgcagacaga

SEQ ID NO: 2557886 - DNA, 25 bp, Homo sapien
actgcaggacgtgtgcagacagaca

SEQ ID NO: 2557887 - DNA, 25 bp, Homo sapien
ggccactgcaggacgtgtgcagaca

SEQ ID NO: 2557888 - DNA, 25 bp, Homo sapien
ttgaagttcacggcacacacaggca

SEQ ID NO: 2557889 - DNA, 25 bp, Homo sapien
acttgaagttcacggcacacacagg

SEQ ID NO: 2557890 - DNA, 25 bp, Homo sapien
tgaagttcacggcacacacaggcaa

SEQ ID NO: 2557891 - DNA, 25 bp, Homo sapien
ccacttgaagttcacggcacacaca

SEQ ID NO: 2557892 - DNA, 25 bp, Homo sapien
cccagaaagattcgggttctgctcc

SEQ ID NO: 2557893 - DNA, 25 bp, Homo sapien
ggatctgtgaagctatccccagaaa

SEQ ID NO: 2557894 - DNA, 25 bp, Homo sapien
tccccagaaagattcgggttctgct

SEQ ID NO: 2557895 - DNA, 25 bp, Homo sapien
tgtttcctcctcagcggtggatctg

SEQ ID NO: 2557896 - DNA, 25 bp, Homo sapien
gaaaaccatgtaagcctgcaggcaa

SEQ ID NO: 2557897 - DNA, 25 bp, Homo sapien
aaagatgacttttctagggcaccag

SEQ ID NO: 2557898 - DNA, 25 bp, Homo sapien
caaatgcccgtctacgctgggtgca

SEQ ID NO: 2557899 - DNA, 25 bp, Homo sapien
ggtttgatcccgacattccctgagc

SEQ ID NO: 2557900 - DNA, 25 bp, Homo sapien
aagaccaggccattttcttcatgtt

SEQ ID NO: 2557901 - DNA, 25 bp, Homo sapien
cctcaaagaccaggccattttcttc

SEQ ID NO: 2557902 - DNA, 25 bp, Homo sapien
tctgagtcctcaaagaccaggccat

SEQ ID NO: 2557903 - DNA, 25 bp, Homo sapien
caaagaccaggccattttcttcatg

SEQ ID NO: 2557904 - DNA, 25 bp, Homo sapien
cctggcgtggtggcagatgtggcta

SEQ ID NO: 2557905 - DNA, 25 bp, Homo sapien
ctggcgtggtggcagatgtggctac

SEQ ID NO: 2557906 - DNA, 25 bp, Homo sapien
ttagcttgcccgcaggatcaggaaa

SEQ ID NO: 2557907 - DNA, 25 bp, Homo sapien
atcggagctgctgcgactcccgcag

SEQ ID NO: 2557908 - DNA, 25 bp, Homo sapien
tccggaactggtttagcttgcccgc

SEQ ID NO: 2557909 - DNA, 25 bp, Homo sapien
actcccgcaggttcttccggaactg

SEQ ID NO: 2557910 - DNA, 25 bp, Homo sapien
ggaagtgtttccgagcctccagaaa

SEQ ID NO: 2557911 - DNA, 25 bp, Homo sapien
ggccgctttctaagctttgtgaaga

SEQ ID NO: 2557912 - DNA, 25 bp, Homo sapien
ccgctttctaagctttgtgaagagt

SEQ ID NO: 2557913 - DNA, 25 bp, Homo sapien
cgctttctaagctttgtgaagagtg

SEQ ID NO: 2557914 - DNA, 25 bp, Homo sapien
gccgctttctaagctttgtgaagag

SEQ ID NO: 2557915 - DNA, 25 bp, Homo sapien
tgattgaaaatcatcccgtgtcaca

SEQ ID NO: 2557916 - DNA, 25 bp, Homo sapien
ttccactcgtaacaaaaaactgtga

SEQ ID NO: 2557917 - DNA, 25 bp, Homo sapien
cagccttgggaacagagtaaaactc

SEQ ID NO: 2557918 - DNA, 25 bp, Homo sapien
ttgaggccatgcattcaggacccca

SEQ ID NO: 2557919 - DNA, 25 bp, Homo sapien
gcttccagaagagttactctgggcc

SEQ ID NO: 2557920 - DNA, 25 bp, Homo sapien
gggcttccagaagagttactctggg

SEQ ID NO: 2557921 - DNA, 25 bp, Homo sapien
tccagaagagttactctgggcctcc

SEQ ID NO: 2557922 - DNA, 25 bp, Homo sapien
agaagagttactctgggcctccagg

SEQ ID NO: 2557923 - DNA, 25 bp, Homo sapien
attgctggactgactctctcgccct

SEQ ID NO: 2557924 - DNA, 25 bp, Homo sapien
gggaggctcagtcacactctccgag

SEQ ID NO: 2557925 - DNA, 25 bp, Homo sapien
agagcacagccatcatctcccatgg

SEQ ID NO: 2557926 - DNA, 25 bp, Homo sapien
cacttgccttctgattgctggactg

SEQ ID NO: 2557927 - DNA, 25 bp, Homo sapien
ttgaggcccgtgcaagctgttggca

SEQ ID NO: 2557928 - DNA, 25 bp, Homo sapien
tttcatgccacgtgacacccttgag

SEQ ID NO: 2557929 - DNA, 25 bp, Homo sapien
tgtagttgcacctacttgggcagct

SEQ ID NO: 2557930 - DNA, 25 bp, Homo sapien
aaagtggaaaaattagccacacatg

SEQ ID NO: 2557931 - DNA, 25 bp, Homo sapien
ggtttaggaagctcaccctgagtac

SEQ ID NO: 2557932 - DNA, 25 bp, Homo sapien
aatgcaggttctcatcgcgaggctc

SEQ ID NO: 2557933 - DNA, 25 bp, Homo sapien
gctcaccctgagtaccaagcttcag

SEQ ID NO: 2557934 - DNA, 25 bp, Homo sapien
tcagtgggccggcaaatctgcactg

SEQ ID NO: 2557935 - DNA, 25 bp, Homo sapien
gttttctccatctagaaaagggctg

SEQ ID NO: 2557936 - DNA, 25 bp, Homo sapien
acatgagcgagagcagtttagggaa

SEQ ID NO: 2557937 - DNA, 25 bp, Homo sapien
cgggtgccttcaggttctgttttct

SEQ ID NO: 2557938 - DNA, 25 bp, Homo sapien
gagagcagtttagggaaacgggtgc

SEQ ID NO: 2557939 - DNA, 25 bp, Homo sapien
ctcactgccacttcctcctcttggg

SEQ ID NO: 2557940 - DNA, 25 bp, Homo sapien
caagcaactctcttgcctcagcctc

SEQ ID NO: 2557941 - DNA, 25 bp, Homo sapien
cagctcactgccacttcctcctctt

SEQ ID NO: 2557942 - DNA, 25 bp, Homo sapien
cactgccacttcctcctcttgggtt

SEQ ID NO: 2557943 - DNA, 25 bp, Homo sapien
tgcagaccgacacttcccgatcgaa

SEQ ID NO: 2557944 - DNA, 25 bp, Homo sapien
acacttcccgatcgaacgcctcgga

SEQ ID NO: 2557945 - DNA, 25 bp, Homo sapien
cgacacttcccgatcgaacgcctcg

SEQ ID NO: 2557946 - DNA, 25 bp, Homo sapien
acttcccgatcgaacgcctcggaag

SEQ ID NO: 2557947 - DNA, 25 bp, Homo sapien
tggagctctgggacccacaagcctg

SEQ ID NO: 2557948 - DNA, 25 bp, Homo sapien
ctggagctctgggacccacaagcct

SEQ ID NO: 2557949 - DNA, 25 bp, Homo sapien
tctggagctctgggacccacaagcc

SEQ ID NO: 2557950 - DNA, 25 bp, Homo sapien
ctattgtcttgttagtagttgtgaa

SEQ ID NO: 2557951 - DNA, 25 bp, Homo sapien
tgaaagttttcatgtcaagacgttg

SEQ ID NO: 2557952 - DNA, 25 bp, Homo sapien
tcacaggaggttaaatttctcatca

SEQ ID NO: 2557953 - DNA, 25 bp, Homo sapien
caagacgttgatattgcccaagacg

SEQ ID NO: 2557954 - DNA, 25 bp, Homo sapien
gcagaactactactaagggtctaag

SEQ ID NO: 2557955 - DNA, 25 bp, Homo sapien
ctactactaagggtctaagaaagat

SEQ ID NO: 2557956 - DNA, 25 bp, Homo sapien
cagaactactgataaaggtccagca

SEQ ID NO: 2557957 - DNA, 25 bp, Homo sapien
actactgataaaggtccagcaaaga

SEQ ID NO: 2557958 - DNA, 25 bp, Homo sapien
gatggcagacacagctctgccctcc

SEQ ID NO: 2557959 - DNA, 25 bp, Homo sapien
atgagccttaagttgagggtgaccc

SEQ ID NO: 2557960 - DNA, 25 bp, Homo sapien
gagccttaagttgagggtgacccag

SEQ ID NO: 2557961 - DNA, 25 bp, Homo sapien
tgagccttaagttgagggtgaccca

SEQ ID NO: 2557962 - DNA, 25 bp, Homo sapien
aggaggagggcccatcattggcatc

SEQ ID NO: 2557963 - DNA, 25 bp, Homo sapien
tggcatcatgggagggcccccccat

SEQ ID NO: 2557964 - DNA, 25 bp, Homo sapien
tcattggcatcatgggagggccccc

SEQ ID NO: 2557965 - DNA, 25 bp, Homo sapien
catcattggcatcatgggagggccc

SEQ ID NO: 2557966 - DNA, 25 bp, Homo sapien
atgggcggcctcattacagaagcag

SEQ ID NO: 2557967 - DNA, 25 bp, Homo sapien
gggcggcctcattacagaagcaggt

SEQ ID NO: 2557968 - DNA, 25 bp, Homo sapien
cccatgggcggcctcattacagaag

SEQ ID NO: 2557969 - DNA, 25 bp, Homo sapien
ggcctcattacagaagcaggtccca

SEQ ID NO: 2557970 - DNA, 25 bp, Homo sapien
aaacaacactgatgtaatgaggcct

SEQ ID NO: 2557971 - DNA, 25 bp, Homo sapien
acaaaacaacactgatgtaatgagg

SEQ ID NO: 2557972 - DNA, 25 bp, Homo sapien
acaacactgatgtaatgaggcctcc

SEQ ID NO: 2557973 - DNA, 25 bp, Homo sapien
tacaacaaaacaacactgatgtaat

SEQ ID NO: 2557974 - DNA, 25 bp, Homo sapien
tctgggaagctctactttgctgttg

SEQ ID NO: 2557975 - DNA, 25 bp, Homo sapien
gctagacacatgactaaacccaaca

SEQ ID NO: 2557976 - DNA, 25 bp, Homo sapien
gaggacttggatccattaatgtacc

SEQ ID NO: 2557977 - DNA, 25 bp, Homo sapien
aatggcagagtcttggatacaggga

SEQ ID NO: 2557978 - DNA, 25 bp, Homo sapien
atgagatgattgtgtattctgctgc

SEQ ID NO: 2557979 - DNA, 25 bp, Homo sapien
gtgttgatgagatgattgtgtattc

SEQ ID NO: 2557980 - DNA, 25 bp, Homo sapien
gctgctgctggatgaaatattctga

SEQ ID NO: 2557981 - DNA, 25 bp, Homo sapien
tccatgtgttgatgagatgattgtg

SEQ ID NO: 2557982 - DNA, 25 bp, Homo sapien
cttcattgccctattcattcaatag

SEQ ID NO: 2557983 - DNA, 25 bp, Homo sapien
tcttcattgccctattcattcaata

SEQ ID NO: 2557984 - DNA, 25 bp, Homo sapien
ttcattgccctattcattcaatagc

SEQ ID NO: 2557985 - DNA, 25 bp, Homo sapien
ttcttcattgccctattcattcaat

SEQ ID NO: 2557986 - DNA, 25 bp, Homo sapien
ttgatgatgggtacgccaaaatgtc

SEQ ID NO: 2557987 - DNA, 25 bp, Homo sapien
caaattgttgtagtcactttctgtg

SEQ ID NO: 2557988 - DNA, 25 bp, Homo sapien
gtcagagatcaccactaaggaactt

SEQ ID NO: 2557989 - DNA, 25 bp, Homo sapien
tgatgggtacgccaaaatgtcagag

SEQ ID NO: 2557990 - DNA, 25 bp, Homo sapien
aagcctcattaacttctattctgca

SEQ ID NO: 2557991 - DNA, 25 bp, Homo sapien
gaagcctcattaacttctattctgc

SEQ ID NO: 2557992 - DNA, 25 bp, Homo sapien
agcctcattaacttctattctgcag

SEQ ID NO: 2557993 - DNA, 25 bp, Homo sapien
gcctcattaacttctattctgcagc

SEQ ID NO: 2557994 - DNA, 25 bp, Homo sapien
tctcttacactatctctctccccag

SEQ ID NO: 2557995 - DNA, 25 bp, Homo sapien
ttgcaatagtggagtttccggtggt

SEQ ID NO: 2557996 - DNA, 25 bp, Homo sapien
tgcgagtcgatgatgctcgattgca

SEQ ID NO: 2557997 - DNA, 25 bp, Homo sapien
acgtgtgccgttttcttggtggatg

SEQ ID NO: 2557998 - DNA, 25 bp, Homo sapien
tttcctctggagtggtcgattggtc

SEQ ID NO: 2557999 - DNA, 25 bp, Homo sapien
tctggagtggtcgattggtcatgaa

SEQ ID NO: 2558000 - DNA, 25 bp, Homo sapien
tcctctggagtggtcgattggtcat

SEQ ID NO: 2558001 - DNA, 25 bp, Homo sapien
gtgtttcctctggagtggtcgattg

SEQ ID NO: 2558002 - DNA, 25 bp, Homo sapien
catttgtgagttcccatgtgaagga

SEQ ID NO: 2558003 - DNA, 25 bp, Homo sapien
ctccaagtgtctgtaggtgccagga

SEQ ID NO: 2558004 - DNA, 25 bp, Homo sapien
cttgggctgctttagtggtacctag

SEQ ID NO: 2558005 - DNA, 25 bp, Homo sapien
ttcaagttaaactggcatcctgtct

SEQ ID NO: 2558006 - DNA, 25 bp, Homo sapien
tggaccagtggtccttgagatgaag

SEQ ID NO: 2558007 - DNA, 25 bp, Homo sapien
gaccagtggtccttgagatgaagcc

SEQ ID NO: 2558008 - DNA, 25 bp, Homo sapien
ggaccagtggtccttgagatgaagc

SEQ ID NO: 2558009 - DNA, 25 bp, Homo sapien
ctggaccagtggtccttgagatgaa

SEQ ID NO: 2558010 - DNA, 25 bp, Homo sapien
acgtctgcacactgggggctgcttg

SEQ ID NO: 2558011 - DNA, 25 bp, Homo sapien
ctgagcagctcctgtgtggcagctg

SEQ ID NO: 2558012 - DNA, 25 bp, Homo sapien
acactgggggctgcttgccttctcc

SEQ ID NO: 2558013 - DNA, 25 bp, Homo sapien
tccttcaagtatctgagcagctcct

SEQ ID NO: 2558014 - DNA, 25 bp, Homo sapien
aggtgcatctgcgttgcaggggttt

SEQ ID NO: 2558015 - DNA, 25 bp, Homo sapien
gtgcatctgcgttgcaggggttttc

SEQ ID NO: 2558016 - DNA, 25 bp, Homo sapien
tgcatctgcgttgcaggggttttcc

SEQ ID NO: 2558017 - DNA, 25 bp, Homo sapien
agaggtgcatctgcgttgcaggggt

SEQ ID NO: 2558018 - DNA, 25 bp, Homo sapien
ttgggtcacgtggacactgaactca

SEQ ID NO: 2558019 - DNA, 25 bp, Homo sapien
ctgaactcaggcgaattttctctga

SEQ ID NO: 2558020 - DNA, 25 bp, Homo sapien
atcccgggagaaggaggacagttct

SEQ ID NO: 2558021 - DNA, 25 bp, Homo sapien
gcgaattttctctgagatcccggga

SEQ ID NO: 2558022 - DNA, 25 bp, Homo sapien
ctgtcccgcatcttcctgtttttct

SEQ ID NO: 2558023 - DNA, 25 bp, Homo sapien
tcccgcatcttcctgtttttcttcc

SEQ ID NO: 2558024 - DNA, 25 bp, Homo sapien
tgtcccgcatcttcctgtttttctt

SEQ ID NO: 2558025 - DNA, 25 bp, Homo sapien
cgcatcttcctgtttttcttccctt

SEQ ID NO: 2558026 - DNA, 25 bp, Homo sapien
caggtgcaggcagaacccccggagc

SEQ ID NO: 2558027 - DNA, 25 bp, Homo sapien
gcaggcagaacccccggagccatgg

SEQ ID NO: 2558028 - DNA, 25 bp, Homo sapien
ggcagctccgaagccactggcaagc

SEQ ID NO: 2558029 - DNA, 25 bp, Homo sapien
gacgacgtccctcccgaggagaaga

SEQ ID NO: 2558030 - DNA, 25 bp, Homo sapien
ctctgcttaaaacttttggaagctg

SEQ ID NO: 2558031 - DNA, 25 bp, Homo sapien
ctgagctctgcttaaaacttttgga

SEQ ID NO: 2558032 - DNA, 25 bp, Homo sapien
tgtggttaagacctctgagctctgc

SEQ ID NO: 2558033 - DNA, 25 bp, Homo sapien
gagctctgcttaaaacttttggaag

SEQ ID NO: 2558034 - DNA, 25 bp, Homo sapien
tgtctgacgcagatgtctttcttca

SEQ ID NO: 2558035 - DNA, 25 bp, Homo sapien
ctctcatgcgggctgtctgacgcag

SEQ ID NO: 2558036 - DNA, 25 bp, Homo sapien
catgcgggctgtctgacgcagatgt

SEQ ID NO: 2558037 - DNA, 25 bp, Homo sapien
ggctgtctgacgcagatgtctttct

SEQ ID NO: 2558038 - DNA, 25 bp, Homo sapien
cgtgtacttcttcctctctaaactg

SEQ ID NO: 2558039 - DNA, 25 bp, Homo sapien
gtacttcttcctctctaaactgtgc

SEQ ID NO: 2558040 - DNA, 25 bp, Homo sapien
ctgtgctgggctgacatcggtttca

SEQ ID NO: 2558041 - DNA, 25 bp, Homo sapien
ttcttcctctctaaactgtgctggg

SEQ ID NO: 2558042 - DNA, 25 bp, Homo sapien
agccggtcctcgctttgctctccct

SEQ ID NO: 2558043 - DNA, 25 bp, Homo sapien
gatgtctgagaattcctcctcctgg

SEQ ID NO: 2558044 - DNA, 25 bp, Homo sapien
cctgggactctcagaggatccagaa

SEQ ID NO: 2558045 - DNA, 25 bp, Homo sapien
tggctgtcagctctgtctctcccct

SEQ ID NO: 2558046 - DNA, 25 bp, Homo sapien
gacattccttcgctacagtttcaca

SEQ ID NO: 2558047 - DNA, 25 bp, Homo sapien
ttcacaaagtacctgcatgtatgtt

SEQ ID NO: 2558048 - DNA, 25 bp, Homo sapien
tacctgcatgtatgtttcaccctgc

SEQ ID NO: 2558049 - DNA, 25 bp, Homo sapien
tgatgttcaatacccttctgataag

SEQ ID NO: 2558050 - DNA, 25 bp, Homo sapien
ccagactcctcagcatcagaagaac

SEQ ID NO: 2558051 - DNA, 25 bp, Homo sapien
ggaccagactcctcagcatcagaag

SEQ ID NO: 2558052 - DNA, 25 bp, Homo sapien
cagactcctcagcatcagaagaacc

SEQ ID NO: 2558053 - DNA, 25 bp, Homo sapien
ctaggaccagactcctcagcatcag

SEQ ID NO: 2558054 - DNA, 25 bp, Homo sapien
atgtgggaagaatgtcctccggctg

SEQ ID NO: 2558055 - DNA, 25 bp, Homo sapien
tgggaagaatgtcctccggctggaa

SEQ ID NO: 2558056 - DNA, 25 bp, Homo sapien
gaagaatgtcctccggctggaagga

SEQ ID NO: 2558057 - DNA, 25 bp, Homo sapien
tgtcctccggctggaaggattagct

SEQ ID NO: 2558058 - DNA, 25 bp, Homo sapien
acaggctggtcttgtgtgcttgtca

SEQ ID NO: 2558059 - DNA, 25 bp, Homo sapien
tgtgtgcttgtcagtgacttgatag

SEQ ID NO: 2558060 - DNA, 25 bp, Homo sapien
ttgtgtgcttgtcagtgacttgata

SEQ ID NO: 2558061 - DNA, 25 bp, Homo sapien
ttctgcttactcaagtcaatggcat

SEQ ID NO: 2558062 - DNA, 25 bp, Homo sapien
tgcagggaaacagagagtacttggt

SEQ ID NO: 2558063 - DNA, 25 bp, Homo sapien
ggttccacttgaaatatagatctta

SEQ ID NO: 2558064 - DNA, 25 bp, Homo sapien
cagagagtacttggttccacttgaa

SEQ ID NO: 2558065 - DNA, 25 bp, Homo sapien
gtgttaggatattcctgagctctga

SEQ ID NO: 2558066 - DNA, 25 bp, Homo sapien
gagtccctggctgcaactgtgttag

SEQ ID NO: 2558067 - DNA, 25 bp, Homo sapien
tgggctgaacgccccagagtccctg

SEQ ID NO: 2558068 - DNA, 25 bp, Homo sapien
gagctctgaaatttccttggtgtcc

SEQ ID NO: 2558069 - DNA, 25 bp, Homo sapien
ttgttctttgggcttgccacactga

SEQ ID NO: 2558070 - DNA, 25 bp, Homo sapien
tgttctttgggcttgccacactgac

SEQ ID NO: 2558071 - DNA, 25 bp, Homo sapien
ctgccctgtctggatgactggaacc

SEQ ID NO: 2558072 - DNA, 25 bp, Homo sapien
tgccctgtctggatgactggaacct

SEQ ID NO: 2558073 - DNA, 25 bp, Homo sapien
catcctgcgtgcgtcattctcagag

SEQ ID NO: 2558074 - DNA, 25 bp, Homo sapien
tcctgcgtgcgtcattctcagagtt

SEQ ID NO: 2558075 - DNA, 25 bp, Homo sapien
gcgtgcgtcattctcagagttttgc

SEQ ID NO: 2558076 - DNA, 25 bp, Homo sapien
tgcgtgcgtcattctcagagttttg

SEQ ID NO: 2558077 - DNA, 25 bp, Homo sapien
ccaagaattagagttggataaaggc

SEQ ID NO: 2558078 - DNA, 25 bp, Homo sapien
gggcactgtccactatcctggccac

SEQ ID NO: 2558079 - DNA, 25 bp, Homo sapien
actgtccactatcctggccaccact

SEQ ID NO: 2558080 - DNA, 25 bp, Homo sapien
cgggcactgtccactatcctggcca

SEQ ID NO: 2558081 - DNA, 25 bp, Homo sapien
gcactgtccactatcctggccacca

SEQ ID NO: 2558082 - DNA, 25 bp, Homo sapien
atgctggggaagaatctcaatcctg

SEQ ID NO: 2558083 - DNA, 25 bp, Homo sapien
ggtggggaggtctctccacaagtgg

SEQ ID NO: 2558084 - DNA, 25 bp, Homo sapien
ctcttgctgagaaccgcaactggca

SEQ ID NO: 2558085 - DNA, 25 bp, Homo sapien
aaccgcaactggcagatagggcacg

SEQ ID NO: 2558086 - DNA, 25 bp, Homo sapien
aactggcagatagggcacggaaccc

SEQ ID NO: 2558087 - DNA, 25 bp, Homo sapien
tatgctggcatgctcttctacttct

SEQ ID NO: 2558088 - DNA, 25 bp, Homo sapien
tcaggtgccatggtcacagaagcct

SEQ ID NO: 2558089 - DNA, 25 bp, Homo sapien
cagaagccttgacaactgggaatgg

SEQ ID NO: 2558090 - DNA, 25 bp, Homo sapien
aacagagctggccttaggagaatca

SEQ ID NO: 2558091 - DNA, 25 bp, Homo sapien
cagctgtcaagcgattcagtcccag

SEQ ID NO: 2558092 - DNA, 25 bp, Homo sapien
cacatcaccattacctgattatgcc

SEQ ID NO: 2558093 - DNA, 25 bp, Homo sapien
ggttgctggatgtcagcctcgtgct

SEQ ID NO: 2558094 - DNA, 25 bp, Homo sapien
tcaaaatccacacgcacattcccag

SEQ ID NO: 2558095 - DNA, 25 bp, Homo sapien
ctgagagctcggttcatgggttgct

SEQ ID NO: 2558096 - DNA, 25 bp, Homo sapien
cacagcttgagggaatctttgacac

SEQ ID NO: 2558097 - DNA, 25 bp, Homo sapien
gggaaccggtgttagtgccacacag

SEQ ID NO: 2558098 - DNA, 25 bp, Homo sapien
tatttgctcaaagaaggtgggaaca

SEQ ID NO: 2558099 - DNA, 25 bp, Homo sapien
tctattcaaaactctgacctgggcc

SEQ ID NO: 2558100 - DNA, 25 bp, Homo sapien
atgggagcagaatgggagaaggtag

SEQ ID NO: 2558101 - DNA, 25 bp, Homo sapien
gagcagaatgggagaaggtagggga

SEQ ID NO: 2558102 - DNA, 25 bp, Homo sapien
ggagcagaatgggagaaggtagggg

SEQ ID NO: 2558103 - DNA, 25 bp, Homo sapien
agcagaatgggagaaggtaggggag

SEQ ID NO: 2558104 - DNA, 25 bp, Homo sapien
ggcagctaggatgcccctgcagtgc

SEQ ID NO: 2558105 - DNA, 25 bp, Homo sapien
tctcccacctacatagtgatgtcag

SEQ ID NO: 2558106 - DNA, 25 bp, Homo sapien
tcttctcccacctacatagtgatgt

SEQ ID NO: 2558107 - DNA, 25 bp, Homo sapien
catctgcttggcagctaggatgccc

SEQ ID NO: 2558108 - DNA, 25 bp, Homo sapien
ccttgagcaagggtaggttaaagca

SEQ ID NO: 2558109 - DNA, 25 bp, Homo sapien
tgcacaggatctgttccgacccagc

SEQ ID NO: 2558110 - DNA, 25 bp, Homo sapien
gctacctgtgggtaccttgagcaag

SEQ ID NO: 2558111 - DNA, 25 bp, Homo sapien
ctaaccccacatacgggtgcacagg

SEQ ID NO: 2558112 - DNA, 25 bp, Homo sapien
caggttaggaaaattgacactgtac

SEQ ID NO: 2558113 - DNA, 25 bp, Homo sapien
accattttattgtgtagattctcag

SEQ ID NO: 2558114 - DNA, 25 bp, Homo sapien
tattgtgtagattctcaggttagga

SEQ ID NO: 2558115 - DNA, 25 bp, Homo sapien
tcaggttaggaaaattgacactgta

SEQ ID NO: 2558116 - DNA, 25 bp, Homo sapien
tgttcacgatctcagtccagttagg

SEQ ID NO: 2558117 - DNA, 25 bp, Homo sapien
gctgagcttcctgttcacgatctca

SEQ ID NO: 2558118 - DNA, 25 bp, Homo sapien
gcttcctgttcacgatctcagtcca

SEQ ID NO: 2558119 - DNA, 25 bp, Homo sapien
cctgttcacgatctcagtccagtta

SEQ ID NO: 2558120 - DNA, 25 bp, Homo sapien
tagcagggcctcatggatctggcgg

SEQ ID NO: 2558121 - DNA, 25 bp, Homo sapien
cagcacatcggtgagggcctcatgg

SEQ ID NO: 2558122 - DNA, 25 bp, Homo sapien
ttgacactggccaacagcacatcgg

SEQ ID NO: 2558123 - DNA, 25 bp, Homo sapien
gatctggcggaagtcaaacttgaca

SEQ ID NO: 2558124 - DNA, 25 bp, Homo sapien
agccgggccggcaggcgacgcacca

SEQ ID NO: 2558125 - DNA, 25 bp, Homo sapien
ccgggccggcaggcgacgcaccact

SEQ ID NO: 2558126 - DNA, 25 bp, Homo sapien
cgggccggcaggcgacgcaccactg

SEQ ID NO: 2558127 - DNA, 25 bp, Homo sapien
gccgggccggcaggcgacgcaccac

SEQ ID NO: 2558128 - DNA, 25 bp, Homo sapien
cgggagccatcaattgatgagtcaa

SEQ ID NO: 2558129 - DNA, 25 bp, Homo sapien
aaagacctggtgtctactttgcgac

SEQ ID NO: 2558130 - DNA, 25 bp, Homo sapien
caccaggtgcaaagcgggagccatc

SEQ ID NO: 2558131 - DNA, 25 bp, Homo sapien
gaaagacctggtgtctactttgcga

SEQ ID NO: 2558132 - DNA, 25 bp, Homo sapien
ttgatgcgggacagagagagtttca

SEQ ID NO: 2558133 - DNA, 25 bp, Homo sapien
tgagctcacggctaagctggaaggc

SEQ ID NO: 2558134 - DNA, 25 bp, Homo sapien
aatggtgtggccctgttccatgagc

SEQ ID NO: 2558135 - DNA, 25 bp, Homo sapien
aaattcaggctccttgcgtgcaagg

SEQ ID NO: 2558136 - DNA, 25 bp, Homo sapien
aggcccaaccatgctccggtggaag

SEQ ID NO: 2558137 - DNA, 25 bp, Homo sapien
gcccaaccatgctccggtggaagaa

SEQ ID NO: 2558138 - DNA, 25 bp, Homo sapien
tggaagaacagacatggggcaccag

SEQ ID NO: 2558139 - DNA, 25 bp, Homo sapien
gtggaagaacagacatggggcacca

SEQ ID NO: 2558140 - DNA, 25 bp, Homo sapien
aagcaggtccgtgtatgcctaccac

SEQ ID NO: 2558141 - DNA, 25 bp, Homo sapien
agcaggtccgtgtatgcctaccacc

SEQ ID NO: 2558142 - DNA, 25 bp, Homo sapien
tggttgtagttgacagccagtcgca

SEQ ID NO: 2558143 - DNA, 25 bp, Homo sapien
tcgggctcagtctcgctgtcctcgg

SEQ ID NO: 2558144 - DNA, 25 bp, Homo sapien
agtgacctcactctggttccagcac

SEQ ID NO: 2558145 - DNA, 25 bp, Homo sapien
cctcaccaggttggggatgccttcc

SEQ ID NO: 2558146 - DNA, 25 bp, Homo sapien
gctggcagatgaggtgtgctacgaa

SEQ ID NO: 2558147 - DNA, 25 bp, Homo sapien
tgctggcagatgaggtgtgctacga

SEQ ID NO: 2558148 - DNA, 25 bp, Homo sapien
ctggtggtgcttccccgccaaccag

SEQ ID NO: 2558149 - DNA, 25 bp, Homo sapien
ctttggtgtcagccagtagccaagg

SEQ ID NO: 2558150 - DNA, 25 bp, Homo sapien
ttggtgtcagccagtagccaaggca

SEQ ID NO: 2558151 - DNA, 25 bp, Homo sapien
ggtgtcagccagtagccaaggcaga

SEQ ID NO: 2558152 - DNA, 25 bp, Homo sapien
ccacagataggaggcagagtgcagc

SEQ ID NO: 2558153 - DNA, 25 bp, Homo sapien
cagcaggaacttcagtactgggatc

SEQ ID NO: 2558154 - DNA, 25 bp, Homo sapien
agacactctggctgcggccacggaa

SEQ ID NO: 2558155 - DNA, 25 bp, Homo sapien
caaatcatgtgtagtgaagtctccc

SEQ ID NO: 2558156 - DNA, 25 bp, Homo sapien
gggacaggacgaccatatccaggaa

SEQ ID NO: 2558157 - DNA, 25 bp, Homo sapien
cgaccatatccaggaagttccacca

SEQ ID NO: 2558158 - DNA, 25 bp, Homo sapien
tccaggaggtaactgcgcaggccct

SEQ ID NO: 2558159 - DNA, 25 bp, Homo sapien
ggccctcaatccacacttccttgca

SEQ ID NO: 2558160 - DNA, 25 bp, Homo sapien
ggcgcagtgcgaaggctgccaggta

SEQ ID NO: 2558161 - DNA, 25 bp, Homo sapien
tgcatgggggcaagcccagccagga

SEQ ID NO: 2558162 - DNA, 25 bp, Homo sapien
cagccatggtgaaatagtggcaggc

SEQ ID NO: 2558163 - DNA, 25 bp, Homo sapien
cttgggaggcgtcccggcagtgcat

SEQ ID NO: 2558164 - DNA, 25 bp, Homo sapien
ccaggcgggtgaagctgagcatgct

SEQ ID NO: 2558165 - DNA, 25 bp, Homo sapien
agaactggggatcctcggtgtgcca

SEQ ID NO: 2558166 - DNA, 25 bp, Homo sapien
aatggaaatctgcagagtgcccagc

SEQ ID NO: 2558167 - DNA, 25 bp, Homo sapien
tcgtgggccggcagaatgtaggcca

SEQ ID NO: 2558168 - DNA, 25 bp, Homo sapien
ctacagagaggagcgagctcagagc

SEQ ID NO: 2558169 - DNA, 25 bp, Homo sapien
tcctgtgttacccaagagctgggga

SEQ ID NO: 2558170 - DNA, 25 bp, Homo sapien
ctgtaggaacacaggtcaaggattc

SEQ ID NO: 2558171 - DNA, 25 bp, Homo sapien
gagtctacagagaggagcgagctca

SEQ ID NO: 2558172 - DNA, 25 bp, Homo sapien
ggggtcagaggtctttggagcgcac

SEQ ID NO: 2558173 - DNA, 25 bp, Homo sapien
tcagaggtctttggagcgcacgtct

SEQ ID NO: 2558174 - DNA, 25 bp, Homo sapien
gcctgtagtttcagggggtcagagg

SEQ ID NO: 2558175 - DNA, 25 bp, Homo sapien
ggtcagaggtctttggagcgcacgt

SEQ ID NO: 2558176 - DNA, 25 bp, Homo sapien
cttctggtagggcacatagatgttg

SEQ ID NO: 2558177 - DNA, 25 bp, Homo sapien
catagatgttgttgaggccacagag

SEQ ID NO: 2558178 - DNA, 25 bp, Homo sapien
tagggcacatagatgttgttgaggc

SEQ ID NO: 2558179 - DNA, 25 bp, Homo sapien
ggaaggcggtcaggatgatcatgag

SEQ ID NO: 2558180 - DNA, 25 bp, Homo sapien
ctcccatcctgcctctgcccctgca

SEQ ID NO: 2558181 - DNA, 25 bp, Homo sapien
tcccatcctgcctctgcccctgcat

SEQ ID NO: 2558182 - DNA, 25 bp, Homo sapien
ccatcctgcctctgcccctgcatac

SEQ ID NO: 2558183 - DNA, 25 bp, Homo sapien
cccatcctgcctctgcccctgcata

SEQ ID NO: 2558184 - DNA, 25 bp, Homo sapien
gggctccaagctgtaaggtcccagg

SEQ ID NO: 2558185 - DNA, 25 bp, Homo sapien
tagggctccaagctgtaaggtccca

SEQ ID NO: 2558186 - DNA, 25 bp, Homo sapien
agggctccaagctgtaaggtcccag

SEQ ID NO: 2558187 - DNA, 25 bp, Homo sapien
ctagggctccaagctgtaaggtccc

SEQ ID NO: 2558188 - DNA, 25 bp, Homo sapien
aacagaaactgaaacgtctcattga

SEQ ID NO: 2558189 - DNA, 25 bp, Homo sapien
ggtccagaacagaaactgaaacgtc

SEQ ID NO: 2558190 - DNA, 25 bp, Homo sapien
cagaaactgaaacgtctcattgaaa

SEQ ID NO: 2558191 - DNA, 25 bp, Homo sapien
cagaacagaaactgaaacgtctcat

SEQ ID NO: 2558192 - DNA, 25 bp, Homo sapien
atgccatagagggcccggcctgcaa

SEQ ID NO: 2558193 - DNA, 25 bp, Homo sapien
ctggaaggagttggtgatcatagca

SEQ ID NO: 2558194 - DNA, 25 bp, Homo sapien
aaactcgggcaccagaaactgaggc

SEQ ID NO: 2558195 - DNA, 25 bp, Homo sapien
acgctgtgctcttccataccgaaca

SEQ ID NO: 2558196 - DNA, 25 bp, Homo sapien
cagcttggagcgagcaaacgtccac

SEQ ID NO: 2558197 - DNA, 25 bp, Homo sapien
agatacagcttggagcgagcaaacg

SEQ ID NO: 2558198 - DNA, 25 bp, Homo sapien
gcttggagcgagcaaacgtccactc

SEQ ID NO: 2558199 - DNA, 25 bp, Homo sapien
gagcgagcaaacgtccactccacgt

SEQ ID NO: 2558200 - DNA, 25 bp, Homo sapien
gaagacagccttcgaggagggcagg

SEQ ID NO: 2558201 - DNA, 25 bp, Homo sapien
aagacagccttcgaggagggcagga

SEQ ID NO: 2558202 - DNA, 25 bp, Homo sapien
gacagccttcgaggagggcaggatg

SEQ ID NO: 2558203 - DNA, 25 bp, Homo sapien
tagaagacagccttcgaggagggca

SEQ ID NO: 2558204 - DNA, 25 bp, Homo sapien
tagggatcgggggatagtctggctt

SEQ ID NO: 2558205 - DNA, 25 bp, Homo sapien
aacagcaacagcaaatgaactggca

SEQ ID NO: 2558206 - DNA, 25 bp, Homo sapien
caacagcaaatgaactggcaaattc

SEQ ID NO: 2558207 - DNA, 25 bp, Homo sapien
ggcttcttggttttgcagcaggaac

SEQ ID NO: 2558208 - DNA, 25 bp, Homo sapien
taccagggccttgatgacgtgaagg

SEQ ID NO: 2558209 - DNA, 25 bp, Homo sapien
cgccgggcagtctctgtgtagcgct

SEQ ID NO: 2558210 - DNA, 25 bp, Homo sapien
tgaaggcggtaggatccacgctctc

SEQ ID NO: 2558211 - DNA, 25 bp, Homo sapien
gtctcctcgaattctcgccgggcag

SEQ ID NO: 2558212 - DNA, 25 bp, Homo sapien
gatatggtcttggtcagctctgtga

SEQ ID NO: 2558213 - DNA, 25 bp, Homo sapien
cagtcgagatatggtcttggtcagc

SEQ ID NO: 2558214 - DNA, 25 bp, Homo sapien
cggctacctcgctttgcagtcgaga

SEQ ID NO: 2558215 - DNA, 25 bp, Homo sapien
ctttgcagtcgagatatggtcttgg

SEQ ID NO: 2558216 - DNA, 25 bp, Homo sapien
ggttctggaagctgttgtgcacttg

SEQ ID NO: 2558217 - DNA, 25 bp, Homo sapien
agtgactgaggacgctggcaccgtc

SEQ ID NO: 2558218 - DNA, 25 bp, Homo sapien
ggaagctgttgtgcacttgagtgat

SEQ ID NO: 2558219 - DNA, 25 bp, Homo sapien
atgtagtgactgaggacgctggcac

SEQ ID NO: 2558220 - DNA, 25 bp, Homo sapien
tgctccctatgaactagcacatgag

SEQ ID NO: 2558221 - DNA, 25 bp, Homo sapien
ttcctgctccctatgaactagcaca

SEQ ID NO: 2558222 - DNA, 25 bp, Homo sapien
cctatgaactagcacatgagctggg

SEQ ID NO: 2558223 - DNA, 25 bp, Homo sapien
gggccagactctccggaagccagag

SEQ ID NO: 2558224 - DNA, 25 bp, Homo sapien
taccacgctcagcaacagaagaagg

SEQ ID NO: 2558225 - DNA, 25 bp, Homo sapien
ctttattgaagcaagaaaagcagca

SEQ ID NO: 2558226 - DNA, 25 bp, Homo sapien
cagaagaagggactcttccactgta

SEQ ID NO: 2558227 - DNA, 25 bp, Homo sapien
taggctaccacgctcagcaacagaa

SEQ ID NO: 2558228 - DNA, 25 bp, Homo sapien
agagattctcacacagcctggaggc

SEQ ID NO: 2558229 - DNA, 25 bp, Homo sapien
gaagctagaacagctagagggtcct

SEQ ID NO: 2558230 - DNA, 25 bp, Homo sapien
gaaactcaaagtaggatcccaagcc

SEQ ID NO: 2558231 - DNA, 25 bp, Homo sapien
tgcaaagccaaggaaggaagcaact

SEQ ID NO: 2558232 - DNA, 25 bp, Homo sapien
tattccatgagactagaccttctgc

SEQ ID NO: 2558233 - DNA, 25 bp, Homo sapien
tgagactagaccttctgccccgctg

SEQ ID NO: 2558234 - DNA, 25 bp, Homo sapien
gattggtttattccatgagactaga

SEQ ID NO: 2558235 - DNA, 25 bp, Homo sapien
gactagaccttctgccccgctgtgg

SEQ ID NO: 2558236 - DNA, 25 bp, Homo sapien
gtcctgggtggggaagctgctgctg

SEQ ID NO: 2558237 - DNA, 25 bp, Homo sapien
ctgggtggggaagctgctgctgatc

SEQ ID NO: 2558238 - DNA, 25 bp, Homo sapien
gctgctgctgatctccaccatggcc

SEQ ID NO: 2558239 - DNA, 25 bp, Homo sapien
ctaggccttgtcctgggtggggaag

SEQ ID NO: 2558240 - DNA, 25 bp, Homo sapien
tgaccctgggccagttgctgtctct

SEQ ID NO: 2558241 - DNA, 25 bp, Homo sapien
gctgtctctttttgggtctcagttt

SEQ ID NO: 2558242 - DNA, 25 bp, Homo sapien
ttgctgtctctttttgggtctcagt

SEQ ID NO: 2558243 - DNA, 25 bp, Homo sapien
gggccagttgctgtctctttttggg

SEQ ID NO: 2558244 - DNA, 25 bp, Homo sapien
tgaggcccacagacacaagaagcag

SEQ ID NO: 2558245 - DNA, 25 bp, Homo sapien
tgaagtgcttccatgaggcccacag

SEQ ID NO: 2558246 - DNA, 25 bp, Homo sapien
cagacacaagaagcagagacatcat

SEQ ID NO: 2558247 - DNA, 25 bp, Homo sapien
ccacagacacaagaagcagagacat

SEQ ID NO: 2558248 - DNA, 25 bp, Homo sapien
aactccgtgtggttgagatccggga

SEQ ID NO: 2558249 - DNA, 25 bp, Homo sapien
tgtctgcatacacctggttggcctg

SEQ ID NO: 2558250 - DNA, 25 bp, Homo sapien
ggtgtcctcaccaaactgctgggct

SEQ ID NO: 2558251 - DNA, 25 bp, Homo sapien
ggtccagatgccgaagaaggtgtcc

SEQ ID NO: 2558252 - DNA, 25 bp, Homo sapien
agcccatagcccttcagaaattaag

SEQ ID NO: 2558253 - DNA, 25 bp, Homo sapien
aagataggaagtaaagcccatagcc

SEQ ID NO: 2558254 - DNA, 25 bp, Homo sapien
ggaagtaaagcccatagcccttcag

SEQ ID NO: 2558255 - DNA, 25 bp, Homo sapien
tctgtcaactcatgcatgctcctga

SEQ ID NO: 2558256 - DNA, 25 bp, Homo sapien
tgaattatccagatggcaaggccca

SEQ ID NO: 2558257 - DNA, 25 bp, Homo sapien
caaggcccagacttgcacttcttgt

SEQ ID NO: 2558258 - DNA, 25 bp, Homo sapien
ctgaattatccagatggcaaggccc

SEQ ID NO: 2558259 - DNA, 25 bp, Homo sapien
tggcaaggcccagacttgcacttct

SEQ ID NO: 2558260 - DNA, 25 bp, Homo sapien
ctgaaggacaaaggagttctgaagg

SEQ ID NO: 2558261 - DNA, 25 bp, Homo sapien
gttctgaaggacaaaggagttctga

SEQ ID NO: 2558262 - DNA, 25 bp, Homo sapien
aggacaaaggagttctgaaggcttg

SEQ ID NO: 2558263 - DNA, 25 bp, Homo sapien
agagttctgaaggacaaaggagttc

SEQ ID NO: 2558264 - DNA, 25 bp, Homo sapien
ctggaaaggccctcaccacgaggaa

SEQ ID NO: 2558265 - DNA, 25 bp, Homo sapien
aggccctcaccacgaggaaccagag

SEQ ID NO: 2558266 - DNA, 25 bp, Homo sapien
agcaaagaccagactgcagagaggg

SEQ ID NO: 2558267 - DNA, 25 bp, Homo sapien
tcaaaggaggcctggaccatctgga

SEQ ID NO: 2558268 - DNA, 25 bp, Homo sapien
ccaacatcctcaggatgggcagagg

SEQ ID NO: 2558269 - DNA, 25 bp, Homo sapien
tgaaagcacacatggccaacatcct

SEQ ID NO: 2558270 - DNA, 25 bp, Homo sapien
gacaggaatcttggttacactgaaa

SEQ ID NO: 2558271 - DNA, 25 bp, Homo sapien
ctaccagagaaggtcccagagttcc

SEQ ID NO: 2558272 - DNA, 25 bp, Homo sapien
aggttcagtccccagattgtctcct

SEQ ID NO: 2558273 - DNA, 25 bp, Homo sapien
tgggtaaggttcagtccccagattg

SEQ ID NO: 2558274 - DNA, 25 bp, Homo sapien
ggtaaggttcagtccccagattgtc

SEQ ID NO: 2558275 - DNA, 25 bp, Homo sapien
taaggttcagtccccagattgtctc

SEQ ID NO: 2558276 - DNA, 25 bp, Homo sapien
gttgctgcctgtcttgaagtacctg

SEQ ID NO: 2558277 - DNA, 25 bp, Homo sapien
taacactagcaggtatgacggccaa

SEQ ID NO: 2558278 - DNA, 25 bp, Homo sapien
cgtgaggcatctgagtaacactagc

SEQ ID NO: 2558279 - DNA, 25 bp, Homo sapien
gctgaagcccttctatcgccaggtt

SEQ ID NO: 2558280 - DNA, 25 bp, Homo sapien
tacagacatttggccccaaatccct

SEQ ID NO: 2558281 - DNA, 25 bp, Homo sapien
cctcgatgccctgtgttacccatga

SEQ ID NO: 2558282 - DNA, 25 bp, Homo sapien
tcaataaagtaagcgtgtacctagc

SEQ ID NO: 2558283 - DNA, 25 bp, Homo sapien
agcgtgtacctagcacctcctcgat

SEQ ID NO: 2558284 - DNA, 25 bp, Homo sapien
cagtgacgggagcaattagagagca

SEQ ID NO: 2558285 - DNA, 25 bp, Homo sapien
gactaagtcacagggatctgctgca

SEQ ID NO: 2558286 - DNA, 25 bp, Homo sapien
tggcccgtgtgatggaccgcttctt

SEQ ID NO: 2558287 - DNA, 25 bp, Homo sapien
tagcttccgatgacccacgtgtagg

SEQ ID NO: 2558288 - DNA, 25 bp, Homo sapien
tgccgcgtggatgtagcagccttcc

SEQ ID NO: 2558289 - DNA, 25 bp, Homo sapien
ccagcctggcggacttcgtggagaa

SEQ ID NO: 2558290 - DNA, 25 bp, Homo sapien
tgggaacgtgccctcattttaagac

SEQ ID NO: 2558291 - DNA, 25 bp, Homo sapien
ccgactcaggcgagaaggtgtcgct

SEQ ID NO: 2558292 - DNA, 25 bp, Homo sapien
tatacatcctctggctacgtctgtg

SEQ ID NO: 2558293 - DNA, 25 bp, Homo sapien
cagccagcacatagctctgcatatt

SEQ ID NO: 2558294 - DNA, 25 bp, Homo sapien
agcgggtctctctaggtgcactcca

SEQ ID NO: 2558295 - DNA, 25 bp, Homo sapien
agtcactgtgtgtcccggagctacc

SEQ ID NO: 2558296 - DNA, 25 bp, Homo sapien
tgctgacagctatagggagccccag

SEQ ID NO: 2558297 - DNA, 25 bp, Homo sapien
gagggcctttgctacactgctgaca

SEQ ID NO: 2558298 - DNA, 25 bp, Homo sapien
tcacggagggattgatcttcagggc

SEQ ID NO: 2558299 - DNA, 25 bp, Homo sapien
caggaacccttggtcacatgtgaca

SEQ ID NO: 2558300 - DNA, 25 bp, Homo sapien
gacgggtaatatgccaatatcttca

SEQ ID NO: 2558301 - DNA, 25 bp, Homo sapien
ccaatatcttcacaaggttcgaggg

SEQ ID NO: 2558302 - DNA, 25 bp, Homo sapien
taatatgccaatatcttcacaaggt

SEQ ID NO: 2558303 - DNA, 25 bp, Homo sapien
tcagacgggtaatatgccaatatct

SEQ ID NO: 2558304 - DNA, 25 bp, Homo sapien
tctcagctgctgaaagctagacctt

SEQ ID NO: 2558305 - DNA, 25 bp, Homo sapien
gattagggcctacattgtttatcgc

SEQ ID NO: 2558306 - DNA, 25 bp, Homo sapien
gcctttattgactacctgatgtgca

SEQ ID NO: 2558307 - DNA, 25 bp, Homo sapien
gctagacctttggtattttccatgc

SEQ ID NO: 2558308 - DNA, 25 bp, Homo sapien
cacgaatgatatattctgtaacctg

SEQ ID NO: 2558309 - DNA, 25 bp, Homo sapien
acatttagattatccggtattcctg

SEQ ID NO: 2558310 - DNA, 25 bp, Homo sapien
tgaccagttccttgttagtggacat

SEQ ID NO: 2558311 - DNA, 25 bp, Homo sapien
ggtattcctgtactcaaaacagtgc

SEQ ID NO: 2558312 - DNA, 25 bp, Homo sapien
tctaaaatcaccaccggcaacaagg

SEQ ID NO: 2558313 - DNA, 25 bp, Homo sapien
gaggattactttcgcccaggactca

SEQ ID NO: 2558314 - DNA, 25 bp, Homo sapien
caaggtccctaagcaaaattcaaca

SEQ ID NO: 2558315 - DNA, 25 bp, Homo sapien
tgagttcttagtccaaccactctgg

SEQ ID NO: 2558316 - DNA, 25 bp, Homo sapien
taatgggttatgcttctaatcccag

SEQ ID NO: 2558317 - DNA, 25 bp, Homo sapien
gctgcagtgggttacgatagtacca

SEQ ID NO: 2558318 - DNA, 25 bp, Homo sapien
cagagactgaggtgcattagttggt

SEQ ID NO: 2558319 - DNA, 25 bp, Homo sapien
taaaaatcagtaggctgggcctaat

SEQ ID NO: 2558320 - DNA, 25 bp, Homo sapien
ccagcagttatgctttaccaggctt

SEQ ID NO: 2558321 - DNA, 25 bp, Homo sapien
cagactgctttgtgttaaactccct

SEQ ID NO: 2558322 - DNA, 25 bp, Homo sapien
ccagttgcgtttataagacattccc

SEQ ID NO: 2558323 - DNA, 25 bp, Homo sapien
gaaactgctaccatgagatctagga

SEQ ID NO: 2558324 - DNA, 25 bp, Homo sapien
gaattgatatttcaaggctgaaatg

SEQ ID NO: 2558325 - DNA, 25 bp, Homo sapien
atcatgcccagtgctttatgacttt

SEQ ID NO: 2558326 - DNA, 25 bp, Homo sapien
catgcccagtgctttatgactttta

SEQ ID NO: 2558327 - DNA, 25 bp, Homo sapien
gccatcatgcccagtgctttatgac

SEQ ID NO: 2558328 - DNA, 25 bp, Homo sapien
tgcccagtgctttatgacttttaaa

SEQ ID NO: 2558329 - DNA, 25 bp, Homo sapien
ggttttcatcgagttatccaggctg

SEQ ID NO: 2558330 - DNA, 25 bp, Homo sapien
tctgggctcgaacaatctgctctcc

SEQ ID NO: 2558331 - DNA, 25 bp, Homo sapien
taattgtgttactggcacaaggaga

SEQ ID NO: 2558332 - DNA, 25 bp, Homo sapien
ccaattgaatagaagtgagagtcca

SEQ ID NO: 2558333 - DNA, 25 bp, Homo sapien
aacttcgtttagaggattatcaggc

SEQ ID NO: 2558334 - DNA, 25 bp, Homo sapien
gagcaggtaccacaactggcttgtt

SEQ ID NO: 2558335 - DNA, 25 bp, Homo sapien
ttccagcgcaacaggactcttcagc

SEQ ID NO: 2558336 - DNA, 25 bp, Homo sapien
gcctttggaactagtaagcacttga

SEQ ID NO: 2558337 - DNA, 25 bp, Homo sapien
cctcaggaggattgtttggaaccag

SEQ ID NO: 2558338 - DNA, 25 bp, Homo sapien
taccttgtttggaactgcaagcaca

SEQ ID NO: 2558339 - DNA, 25 bp, Homo sapien
gtttggtacgtcaacaggaacagca

SEQ ID NO: 2558340 - DNA, 25 bp, Homo sapien
tgcaagcacagggaccagtctcttc

SEQ ID NO: 2558341 - DNA, 25 bp, Homo sapien
tcacagactaaaccaggtaggggct

SEQ ID NO: 2558342 - DNA, 25 bp, Homo sapien
ggaacatctgcatttggttctagca

SEQ ID NO: 2558343 - DNA, 25 bp, Homo sapien
cactactagtggaggggcatttgga

SEQ ID NO: 2558344 - DNA, 25 bp, Homo sapien
tagcaacaatactggaggcctcttt

SEQ ID NO: 2558345 - DNA, 25 bp, Homo sapien
aatggggctgtgtgccgtggctcac

SEQ ID NO: 2558346 - DNA, 25 bp, Homo sapien
gtatttgcacactcaaccttcttga

SEQ ID NO: 2558347 - DNA, 25 bp, Homo sapien
caaccttcttgataggtaaatgggg

SEQ ID NO: 2558348 - DNA, 25 bp, Homo sapien
ttcttgataggtaaatggggctgtg

SEQ ID NO: 2558349 - DNA, 25 bp, Homo sapien
gcccggctttggaggccctgggaga

SEQ ID NO: 2558350 - DNA, 25 bp, Homo sapien
cttctggcctgagagaggggcggtg

SEQ ID NO: 2558351 - DNA, 25 bp, Homo sapien
tgctgaggacccgggggcccggagc

SEQ ID NO: 2558352 - DNA, 25 bp, Homo sapien
tggcctgagagaggggcggtgctga

SEQ ID NO: 2558353 - DNA, 25 bp, Homo sapien
gccggtgcttcccaatctagccatt

SEQ ID NO: 2558354 - DNA, 25 bp, Homo sapien
gcccacttcgagaggccctgtgtga

SEQ ID NO: 2558355 - DNA, 25 bp, Homo sapien
gagtctctatgttgcgtcaccaccc

SEQ ID NO: 2558356 - DNA, 25 bp, Homo sapien
gggccgtccctctgattggcccgag

SEQ ID NO: 2558357 - DNA, 25 bp, Homo sapien
gaagtgcgggcagagagactaggaa

SEQ ID NO: 2558358 - DNA, 25 bp, Homo sapien
acgtggtctgggcgggaagtgcggg

SEQ ID NO: 2558359 - DNA, 25 bp, Homo sapien
gggccctcaggctccgcacgtggtc

SEQ ID NO: 2558360 - DNA, 25 bp, Homo sapien
ctcaggctccgcacgtggtctgggc

SEQ ID NO: 2558361 - DNA, 25 bp, Homo sapien
gctcttgatgtccaggacagggctt

SEQ ID NO: 2558362 - DNA, 25 bp, Homo sapien
ctttagaacggaagaaggaagatga

SEQ ID NO: 2558363 - DNA, 25 bp, Homo sapien
ttggctccaaaagggtttgtaagca

SEQ ID NO: 2558364 - DNA, 25 bp, Homo sapien
tccttggccagaatagtgttgagct

SEQ ID NO: 2558365 - DNA, 25 bp, Homo sapien
caatctggcgtgtcctcaaaccatg

SEQ ID NO: 2558366 - DNA, 25 bp, Homo sapien
gaacttagagaggaaactgcgccca

SEQ ID NO: 2558367 - DNA, 25 bp, Homo sapien
catgttggataagccaccttgtcgc

SEQ ID NO: 2558368 - DNA, 25 bp, Homo sapien
cactaatttcggctgcgtgagggca

SEQ ID NO: 2558369 - DNA, 25 bp, Homo sapien
cgcggccaagctcccgagtggggct

SEQ ID NO: 2558370 - DNA, 25 bp, Homo sapien
gccaagctcccgagtggggctgccc

SEQ ID NO: 2558371 - DNA, 25 bp, Homo sapien
aagctcccgagtggggctgcccggc

SEQ ID NO: 2558372 - DNA, 25 bp, Homo sapien
ggccaagctcccgagtggggctgcc

SEQ ID NO: 2558373 - DNA, 25 bp, Homo sapien
ctcccacagcgtggggcccggccct

SEQ ID NO: 2558374 - DNA, 25 bp, Homo sapien
gactcccacagcgtggggcccggcc

SEQ ID NO: 2558375 - DNA, 25 bp, Homo sapien
gggcccggccctgcagaggccagac

SEQ ID NO: 2558376 - DNA, 25 bp, Homo sapien
caggactcccacagcgtggggcccg

SEQ ID NO: 2558377 - DNA, 25 bp, Homo sapien
ggctaataaatggcacagctgccat

SEQ ID NO: 2558378 - DNA, 25 bp, Homo sapien
gcagaatcaggcctggtgctagcct

SEQ ID NO: 2558379 - DNA, 25 bp, Homo sapien
ggcctttgagcctcggcccagcctc

SEQ ID NO: 2558380 - DNA, 25 bp, Homo sapien
ccccaggcctttgagcctcggccca

SEQ ID NO: 2558381 - DNA, 25 bp, Homo sapien
caggcttcaaggcctctcatcagct

SEQ ID NO: 2558382 - DNA, 25 bp, Homo sapien
ccaggcctttgagcctcggcccagc

SEQ ID NO: 2558383 - DNA, 25 bp, Homo sapien
gacaacattccacctcaatttcaga

SEQ ID NO: 2558384 - DNA, 25 bp, Homo sapien
caggcctaggactagagaagctgct

SEQ ID NO: 2558385 - DNA, 25 bp, Homo sapien
actcctctctgcctagcttgacagg

SEQ ID NO: 2558386 - DNA, 25 bp, Homo sapien
tgctaggataaagcttgaatggact

SEQ ID NO: 2558387 - DNA, 25 bp, Homo sapien
cccacagtgtgtggccgttgtctcc

SEQ ID NO: 2558388 - DNA, 25 bp, Homo sapien
gccaccatggtgaagcggagccgta

SEQ ID NO: 2558389 - DNA, 25 bp, Homo sapien
aagaggaaggcgacaagtggacagc

SEQ ID NO: 2558390 - DNA, 25 bp, Homo sapien
gggtcccatcccgatccagtggtag

SEQ ID NO: 2558391 - DNA, 25 bp, Homo sapien
aatcagatctccatacagacaggca

SEQ ID NO: 2558392 - DNA, 25 bp, Homo sapien
caggcacagatatagtctctctcac

SEQ ID NO: 2558393 - DNA, 25 bp, Homo sapien
cacacgacccactcaaacccattat

SEQ ID NO: 2558394 - DNA, 25 bp, Homo sapien
cacacacatatactgagtcacattc

SEQ ID NO: 2558395 - DNA, 25 bp, Homo sapien
gagagttgtatccagggtcataggc

SEQ ID NO: 2558396 - DNA, 25 bp, Homo sapien
tgaaggaacactcacactcggtgct

SEQ ID NO: 2558397 - DNA, 25 bp, Homo sapien
tcggtgctgaagaatccgggtcttg

SEQ ID NO: 2558398 - DNA, 25 bp, Homo sapien
ggcttccctctggatcaagctgagg

SEQ ID NO: 2558399 - DNA, 25 bp, Homo sapien
cattcctgttccttacccaagttca

SEQ ID NO: 2558400 - DNA, 25 bp, Homo sapien
cacattcctgttccttacccaagtt

SEQ ID NO: 2558401 - DNA, 25 bp, Homo sapien
taagcagcacgagggatacaacttg

SEQ ID NO: 2558402 - DNA, 25 bp, Homo sapien
ggcacagtgatactctaggtccacc

SEQ ID NO: 2558403 - DNA, 25 bp, Homo sapien
tagccactcaggagaagggtcagag

SEQ ID NO: 2558404 - DNA, 25 bp, Homo sapien
caaaggaccgttggctcagaatggc

SEQ ID NO: 2558405 - DNA, 25 bp, Homo sapien
aagcgaagccggaacaaggtcccat

SEQ ID NO: 2558406 - DNA, 25 bp, Homo sapien
cacaggaaaagtgatggcccaccag

SEQ ID NO: 2558407 - DNA, 25 bp, Homo sapien
gaagaagaagccgaacacaggaaaa

SEQ ID NO: 2558408 - DNA, 25 bp, Homo sapien
tgtactcaaagtggaacaccaggga

SEQ ID NO: 2558409 - DNA, 25 bp, Homo sapien
tccaactcagggaggactgtgattc

SEQ ID NO: 2558410 - DNA, 25 bp, Homo sapien
tcgaactgaactcgagtgatccact

SEQ ID NO: 2558411 - DNA, 25 bp, Homo sapien
ccatgaattatctctgactctgact

SEQ ID NO: 2558412 - DNA, 25 bp, Homo sapien
tatctaattctaccctaactgccac

SEQ ID NO: 2558413 - DNA, 25 bp, Homo sapien
gcacggcacctcagatttcaccata

SEQ ID NO: 2558414 - DNA, 25 bp, Homo sapien
agacgggaggataagccctttctga

SEQ ID NO: 2558415 - DNA, 25 bp, Homo sapien
gatgccttctctagctaccgtactg

SEQ ID NO: 2558416 - DNA, 25 bp, Homo sapien
taagattcattcctttggcctcagg

SEQ ID NO: 2558417 - DNA, 25 bp, Homo sapien
caaaaacgctgtgagctacatggcc

SEQ ID NO: 2558418 - DNA, 25 bp, Homo sapien
cacagagcatgggaaggtctgctta

SEQ ID NO: 2558419 - DNA, 25 bp, Homo sapien
gcttatgggagagacgcaggaacct

SEQ ID NO: 2558420 - DNA, 25 bp, Homo sapien
ttgactgggagagcctaaaggattc

SEQ ID NO: 2558421 - DNA, 25 bp, Homo sapien
gggattacagacgcctggcctctaa

SEQ ID NO: 2558422 - DNA, 25 bp, Homo sapien
gattacagacgcctggcctctaatt

SEQ ID NO: 2558423 - DNA, 25 bp, Homo sapien
accttaagtgattcacctgccaaag

SEQ ID NO: 2558424 - DNA, 25 bp, Homo sapien
tgaccttaagtgattcacctgccaa

SEQ ID NO: 2558425 - DNA, 25 bp, Homo sapien
tagaggctcaggaactgcacaaagc

SEQ ID NO: 2558426 - DNA, 25 bp, Homo sapien
agcaatgctgcaggcggctcatagg

SEQ ID NO: 2558427 - DNA, 25 bp, Homo sapien
gcacaaagctgagtctgcatcccag

SEQ ID NO: 2558428 - DNA, 25 bp, Homo sapien
tgctctaactatggagggacagtct

SEQ ID NO: 2558429 - DNA, 25 bp, Homo sapien
tgacctctggtgatctgcctgcctc

SEQ ID NO: 2558430 - DNA, 25 bp, Homo sapien
atgttgggcaggctcgtctcagaac

SEQ ID NO: 2558431 - DNA, 25 bp, Homo sapien
ttgggcaggctcgtctcagaactcc

SEQ ID NO: 2558432 - DNA, 25 bp, Homo sapien
tggtgatctgcctgcctcggcctcc

SEQ ID NO: 2558433 - DNA, 25 bp, Homo sapien
gggtagtctaaggaaatgaccatgt

SEQ ID NO: 2558434 - DNA, 25 bp, Homo sapien
taatgcctggaactcctattgaagc

SEQ ID NO: 2558435 - DNA, 25 bp, Homo sapien
aatgaccatgttcttgtgcatctcc

SEQ ID NO: 2558436 - DNA, 25 bp, Homo sapien
ccatcttaatgcctggaactcctat

SEQ ID NO: 2558437 - DNA, 25 bp, Homo sapien
tagatgggttcagatgctctacacc

SEQ ID NO: 2558438 - DNA, 25 bp, Homo sapien
tctacacccatagctcagagctgtg

SEQ ID NO: 2558439 - DNA, 25 bp, Homo sapien
taagaccctgggtgagttccaaggc

SEQ ID NO: 2558440 - DNA, 25 bp, Homo sapien
gttccaaggcctcagattcagtcca

SEQ ID NO: 2558441 - DNA, 25 bp, Homo sapien
ttccaggtcctaggcccaaagtgct

SEQ ID NO: 2558442 - DNA, 25 bp, Homo sapien
ccttccaggtcctaggcccaaagtg

SEQ ID NO: 2558443 - DNA, 25 bp, Homo sapien
gctggattctcattccccagctatc

SEQ ID NO: 2558444 - DNA, 25 bp, Homo sapien
agcagcatggtggcaccttctccat

SEQ ID NO: 2558445 - DNA, 25 bp, Homo sapien
ccagccccgcccatgtggagaacct

SEQ ID NO: 2558446 - DNA, 25 bp, Homo sapien
ctagagagttgtgacctgtctgggc

SEQ ID NO: 2558447 - DNA, 25 bp, Homo sapien
agagagttgtgacctgtctgggcat

SEQ ID NO: 2558448 - DNA, 25 bp, Homo sapien
cccgcccatgtggagaaccttctct

SEQ ID NO: 2558449 - DNA, 25 bp, Homo sapien
ggttctccacgacattgaggccgaa

SEQ ID NO: 2558450 - DNA, 25 bp, Homo sapien
taagtgagcactagcaacgcgaggt

SEQ ID NO: 2558451 - DNA, 25 bp, Homo sapien
tgagctcaccgagggcaggtaattg

SEQ ID NO: 2558452 - DNA, 25 bp, Homo sapien
tagtggttccagtaggcgaaggcca

SEQ ID NO: 2558453 - DNA, 25 bp, Homo sapien
cacgaagtaggaaggtccgaatgtg

SEQ ID NO: 2558454 - DNA, 25 bp, Homo sapien
ggtccgaatgtggtaggggcaggcc

SEQ ID NO: 2558455 - DNA, 25 bp, Homo sapien
caggcccgtcccctcagggaacact

SEQ ID NO: 2558456 - DNA, 25 bp, Homo sapien
ccgaatgtggtaggggcaggcccgt

SEQ ID NO: 2558457 - DNA, 25 bp, Homo sapien
attgggagccacattgcagggagtg

SEQ ID NO: 2558458 - DNA, 25 bp, Homo sapien
agggaaagaggattgggagccacat

SEQ ID NO: 2558459 - DNA, 25 bp, Homo sapien
ggagccacattgcagggagtgccca

SEQ ID NO: 2558460 - DNA, 25 bp, Homo sapien
agccacattgcagggagtgcccaca

SEQ ID NO: 2558461 - DNA, 25 bp, Homo sapien
tgaggagcatgtgcccgagggatga

SEQ ID NO: 2558462 - DNA, 25 bp, Homo sapien
gtcaaccgccagagaatgcaggtga

SEQ ID NO: 2558463 - DNA, 25 bp, Homo sapien
gtgtgcttcttggtcaaccgccaga

SEQ ID NO: 2558464 - DNA, 25 bp, Homo sapien
gcccgagggatgaggcaatgaacac

SEQ ID NO: 2558465 - DNA, 25 bp, Homo sapien
gagcccccgctagggatagaccgta

SEQ ID NO: 2558466 - DNA, 25 bp, Homo sapien
tgccttggagcccccgctagggata

SEQ ID NO: 2558467 - DNA, 25 bp, Homo sapien
tcctgaggacagatgtccttgattt

SEQ ID NO: 2558468 - DNA, 25 bp, Homo sapien
ccgaatcctgaggacagatgtcctt

SEQ ID NO: 2558469 - DNA, 25 bp, Homo sapien
gccagggttcccattagaactcagt

SEQ ID NO: 2558470 - DNA, 25 bp, Homo sapien
tgacactgttcctaactcactgccg

SEQ ID NO: 2558471 - DNA, 25 bp, Homo sapien
tgccgcctagatgcgactcctcatt

SEQ ID NO: 2558472 - DNA, 25 bp, Homo sapien
tgacagaccagtcctctgacactgt

SEQ ID NO: 2558473 - DNA, 25 bp, Homo sapien
actagcggtcatggaagggagcaca

SEQ ID NO: 2558474 - DNA, 25 bp, Homo sapien
caagaatgacgactatgtgttcacg

SEQ ID NO: 2558475 - DNA, 25 bp, Homo sapien
tgaaagttacatggagtcacccacc

SEQ ID NO: 2558476 - DNA, 25 bp, Homo sapien
ggtatgagagcgtgggctcccctct

SEQ ID NO: 2558477 - DNA, 25 bp, Homo sapien
gcctcacaatacatgttgtgccgaa

SEQ ID NO: 2558478 - DNA, 25 bp, Homo sapien
tgtttccagctgtaggacttgcgat

SEQ ID NO: 2558479 - DNA, 25 bp, Homo sapien
agtagacagccagcgccgagaagaa

SEQ ID NO: 2558480 - DNA, 25 bp, Homo sapien
ttgatgatgaagagccgctgtttcc

SEQ ID NO: 2558481 - DNA, 25 bp, Homo sapien
gacatggtgaacttccagctacccg

SEQ ID NO: 2558482 - DNA, 25 bp, Homo sapien
gctacccgctcagaggcctcttgat

SEQ ID NO: 2558483 - DNA, 25 bp, Homo sapien
ccaccattggtctgccacagagaac

SEQ ID NO: 2558484 - DNA, 25 bp, Homo sapien
caaaaacatcattgctgccccgcag

SEQ ID NO: 2558485 - DNA, 25 bp, Homo sapien
tatgagcagctccttgttcccgaag

SEQ ID NO: 2558486 - DNA, 25 bp, Homo sapien
gaacgccatgttggttaagacaaca

SEQ ID NO: 2558487 - DNA, 25 bp, Homo sapien
cgaagtcccaccaggccgtcatgtg

SEQ ID NO: 2558488 - DNA, 25 bp, Homo sapien
ctcaggctgagaggttatgagcagc

SEQ ID NO: 2558489 - DNA, 25 bp, Homo sapien
caaatggtggagctctctgccagct

SEQ ID NO: 2558490 - DNA, 25 bp, Homo sapien
gaaccactgactggtagagtccttg

SEQ ID NO: 2558491 - DNA, 25 bp, Homo sapien
catggacacaccgaggctcagatgg

SEQ ID NO: 2558492 - DNA, 25 bp, Homo sapien
ttcagtaaggccaagagaggatgtg

SEQ ID NO: 2558493 - DNA, 25 bp, Homo sapien
tgcctattgtggtgccgcctcaggt

SEQ ID NO: 2558494 - DNA, 25 bp, Homo sapien
gctgtgcgctacctcgaatgctcag

SEQ ID NO: 2558495 - DNA, 25 bp, Homo sapien
tcatgagctcatccaagccaaggtt

SEQ ID NO: 2558496 - DNA, 25 bp, Homo sapien
cctgagaaggtgaatgtgccctaac

SEQ ID NO: 2558497 - DNA, 25 bp, Homo sapien
gaagcatccagttagttcagcacaa

SEQ ID NO: 2558498 - DNA, 25 bp, Homo sapien
tactacatggtgtgctcagcttagg

SEQ ID NO: 2558499 - DNA, 25 bp, Homo sapien
tcagcttagggtgctcagcaaggtc

SEQ ID NO: 2558500 - DNA, 25 bp, Homo sapien
gaaaagtacggtcaatgctgggaaa

SEQ ID NO: 2558501 - DNA, 25 bp, Homo sapien
tctgagctagatctgccagcttcac

SEQ ID NO: 2558502 - DNA, 25 bp, Homo sapien
tctgtagcctgtcgggaccactttt

SEQ ID NO: 2558503 - DNA, 25 bp, Homo sapien
ggtcctcggatattcccagtctgta

SEQ ID NO: 2558504 - DNA, 25 bp, Homo sapien
catgtctttgaccaagggtcctcgg

SEQ ID NO: 2558505 - DNA, 25 bp, Homo sapien
cagtcccacactgacctcatgtctc

SEQ ID NO: 2558506 - DNA, 25 bp, Homo sapien
acactgacctcatgtctcccccagc

SEQ ID NO: 2558507 - DNA, 25 bp, Homo sapien
agcccttggcctggtcccagtccca

SEQ ID NO: 2558508 - DNA, 25 bp, Homo sapien
gcccttggcctggtcccagtcccac

SEQ ID NO: 2558509 - DNA, 25 bp, Homo sapien
ggctctcttgggttcttccctgctg

SEQ ID NO: 2558510 - DNA, 25 bp, Homo sapien
gctctcttgggttcttccctgctga

SEQ ID NO: 2558511 - DNA, 25 bp, Homo sapien
tctcttgggttcttccctgctgatg

SEQ ID NO: 2558512 - DNA, 25 bp, Homo sapien
tgggctctcttgggttcttccctgc

SEQ ID NO: 2558513 - DNA, 25 bp, Homo sapien
caagctctcagccctttaaggtttt

SEQ ID NO: 2558514 - DNA, 25 bp, Homo sapien
tttcggtggggcctgtaaatgcttc

SEQ ID NO: 2558515 - DNA, 25 bp, Homo sapien
tggggcctgtaaatgcttcctccct

SEQ ID NO: 2558516 - DNA, 25 bp, Homo sapien
cctgtaaatgcttcctccctgcatc

SEQ ID NO: 2558517 - DNA, 25 bp, Homo sapien
gttgccgagtgaagctaagacccgc

SEQ ID NO: 2558518 - DNA, 25 bp, Homo sapien
gaggcccaggacacgacgttagcct

SEQ ID NO: 2558519 - DNA, 25 bp, Homo sapien
ttactcaggtaactcaggcctgcgg

SEQ ID NO: 2558520 - DNA, 25 bp, Homo sapien
cctgctcttttgcagagggttgccg

SEQ ID NO: 2558521 - DNA, 25 bp, Homo sapien
tggctcctcaggtccaacagtgggt

SEQ ID NO: 2558522 - DNA, 25 bp, Homo sapien
tctaggtctcagtcaacatgcgtct

SEQ ID NO: 2558523 - DNA, 25 bp, Homo sapien
catgcgtctgatgtggacacctcgg

SEQ ID NO: 2558524 - DNA, 25 bp, Homo sapien
cagattactacacccctgcggaagg

SEQ ID NO: 2558525 - DNA, 25 bp, Homo sapien
ggttcctgtcgccttctcactgtga

SEQ ID NO: 2558526 - DNA, 25 bp, Homo sapien
agttggcccccgagctggttcctgt

SEQ ID NO: 2558527 - DNA, 25 bp, Homo sapien
gggcaagacggacgcatacatccat

SEQ ID NO: 2558528 - DNA, 25 bp, Homo sapien
cactgtgactatggctgaggctctg

SEQ ID NO: 2558529 - DNA, 25 bp, Homo sapien
ctagcactcctttaacagggcagga

SEQ ID NO: 2558530 - DNA, 25 bp, Homo sapien
tagcactcctttaacagggcaggac

SEQ ID NO: 2558531 - DNA, 25 bp, Homo sapien
cagctaaaattagcatagctaccaa

SEQ ID NO: 2558532 - DNA, 25 bp, Homo sapien
gccaggccatttatagccttggagg

SEQ ID NO: 2558533 - DNA, 25 bp, Homo sapien
ccaggccatttatagccttggaggc

SEQ ID NO: 2558534 - DNA, 25 bp, Homo sapien
tagcatagctaccaagatggccagg

SEQ ID NO: 2558535 - DNA, 25 bp, Homo sapien
taaaggctccaaagtcagtggctgt

SEQ ID NO: 2558536 - DNA, 25 bp, Homo sapien
tggataggtccaaagaagcagcact

SEQ ID NO: 2558537 - DNA, 25 bp, Homo sapien
tccattagggtagacaggctccaca

SEQ ID NO: 2558538 - DNA, 25 bp, Homo sapien
cagtggctgtacaatgggctccaga

SEQ ID NO: 2558539 - DNA, 25 bp, Homo sapien
tcctgagaggcctgagataacccag

SEQ ID NO: 2558540 - DNA, 25 bp, Homo sapien
cctgagaggcctgagataacccaga

SEQ ID NO: 2558541 - DNA, 25 bp, Homo sapien
ctgtagtgacgagagttctgagagc

SEQ ID NO: 2558542 - DNA, 25 bp, Homo sapien
agtgacgagagttctgagagcttcc

SEQ ID NO: 2558543 - DNA, 25 bp, Homo sapien
aagcacagacacatttgttcgaaca

SEQ ID NO: 2558544 - DNA, 25 bp, Homo sapien
aacttggcaagcacagacacatttg

SEQ ID NO: 2558545 - DNA, 25 bp, Homo sapien
tggcaagcacagacacatttgttcg

SEQ ID NO: 2558546 - DNA, 25 bp, Homo sapien
acacctgaaggccacccatctcccc

SEQ ID NO: 2558547 - DNA, 25 bp, Homo sapien
aggaattcctctcagctgctaccca

SEQ ID NO: 2558548 - DNA, 25 bp, Homo sapien
tagcactctagctggagtaacagag

SEQ ID NO: 2558549 - DNA, 25 bp, Homo sapien
aaacatgtattgaaggccagaccca

SEQ ID NO: 2558550 - DNA, 25 bp, Homo sapien
atttctttatcttcaaccaggcagg

SEQ ID NO: 2558551 - DNA, 25 bp, Homo sapien
atatgactaccatcagttggctggg

SEQ ID NO: 2558552 - DNA, 25 bp, Homo sapien
gatgttctgccttgagtgacccttg

SEQ ID NO: 2558553 - DNA, 25 bp, Homo sapien
tcggcaatagcaacccagaacactg

SEQ ID NO: 2558554 - DNA, 25 bp, Homo sapien
gattaatgtccacgaaaccaacaga

SEQ ID NO: 2558555 - DNA, 25 bp, Homo sapien
caagggtcacaggtgctagcaggct

SEQ ID NO: 2558556 - DNA, 25 bp, Homo sapien
gcaggcttctaatgcccttcaggca

SEQ ID NO: 2558557 - DNA, 25 bp, Homo sapien
tcaagacacgagaagtaacctgcaa

SEQ ID NO: 2558558 - DNA, 25 bp, Homo sapien
tacattctctcagtggccctaaggc

SEQ ID NO: 2558559 - DNA, 25 bp, Homo sapien
gccagagatataaccatcgcacgat

SEQ ID NO: 2558560 - DNA, 25 bp, Homo sapien
tgtgtgtcaggcagtctaaagtccc

SEQ ID NO: 2558561 - DNA, 25 bp, Homo sapien
cgcacgatggtctgaatatgattta

SEQ ID NO: 2558562 - DNA, 25 bp, Homo sapien
taaagtccctagtgagaaagcaagc

SEQ ID NO: 2558563 - DNA, 25 bp, Homo sapien
tcaaactcacatcgaaaactggaat

SEQ ID NO: 2558564 - DNA, 25 bp, Homo sapien
atgctcaaactcacatcgaaaactg

SEQ ID NO: 2558565 - DNA, 25 bp, Homo sapien
gctcaaactcacatcgaaaactgga

SEQ ID NO: 2558566 - DNA, 25 bp, Homo sapien
aactcacatcgaaaactggaatggg

SEQ ID NO: 2558567 - DNA, 25 bp, Homo sapien
cagatgccctattctttcatcaaat

SEQ ID NO: 2558568 - DNA, 25 bp, Homo sapien
acagatgccctattctttcatcaaa

SEQ ID NO: 2558569 - DNA, 25 bp, Homo sapien
ctggccacagatgccctattctttc

SEQ ID NO: 2558570 - DNA, 25 bp, Homo sapien
ttgcgcctggccacagatgccctat

SEQ ID NO: 2558571 - DNA, 25 bp, Homo sapien
aaaagagcccacatcgccaagtcag

SEQ ID NO: 2558572 - DNA, 25 bp, Homo sapien
gcccacatcgccaagtcagtcctaa

SEQ ID NO: 2558573 - DNA, 25 bp, Homo sapien
agagcccacatcgccaagtcagtcc

SEQ ID NO: 2558574 - DNA, 25 bp, Homo sapien
aaagagcccacatcgccaagtcagt

SEQ ID NO: 2558575 - DNA, 25 bp, Homo sapien
aatgctaccttcagctggccagaaa

SEQ ID NO: 2558576 - DNA, 25 bp, Homo sapien
gactgtaccagtccgtgccttgtta

SEQ ID NO: 2558577 - DNA, 25 bp, Homo sapien
cacaggtggtgtcatgcctaagagc

SEQ ID NO: 2558578 - DNA, 25 bp, Homo sapien
gccagaaattaacgccttcagcagt

SEQ ID NO: 2558579 - DNA, 25 bp, Homo sapien
ttcttacagggcacaaaaagggata

SEQ ID NO: 2558580 - DNA, 25 bp, Homo sapien
cttacagggcacaaaaagggataag

SEQ ID NO: 2558581 - DNA, 25 bp, Homo sapien
tcttacagggcacaaaaagggataa

SEQ ID NO: 2558582 - DNA, 25 bp, Homo sapien
caccagctaccgagcaagctggaat

SEQ ID NO: 2558583 - DNA, 25 bp, Homo sapien
gggtgcctcaccacgtttgctttcc

SEQ ID NO: 2558584 - DNA, 25 bp, Homo sapien
tgaagcaggcagaatactaagcact

SEQ ID NO: 2558585 - DNA, 25 bp, Homo sapien
gctaccgagcaagctggaatggaaa

SEQ ID NO: 2558586 - DNA, 25 bp, Homo sapien
aggaggttttcctgcccagggactg

SEQ ID NO: 2558587 - DNA, 25 bp, Homo sapien
gaggttttcctgcccagggactgaa

SEQ ID NO: 2558588 - DNA, 25 bp, Homo sapien
ggaggttttcctgcccagggactga

SEQ ID NO: 2558589 - DNA, 25 bp, Homo sapien
cattatctcacgtctgcatagaaga

SEQ ID NO: 2558590 - DNA, 25 bp, Homo sapien
tatactcatgctccctcccttggtg

SEQ ID NO: 2558591 - DNA, 25 bp, Homo sapien
ttcaatcagcgagttaatcaggcac

SEQ ID NO: 2558592 - DNA, 25 bp, Homo sapien
ccttggctgccatgagaagccatgt

SEQ ID NO: 2558593 - DNA, 25 bp, Homo sapien
tagaagctaagcagttgccagcacc

SEQ ID NO: 2558594 - DNA, 25 bp, Homo sapien
tggtccctggcctaacagagtttca

SEQ ID NO: 2558595 - DNA, 25 bp, Homo sapien
gctgtcttcatgatagttctcacaa

SEQ ID NO: 2558596 - DNA, 25 bp, Homo sapien
aatacacctgtgctaagaactatag

SEQ ID NO: 2558597 - DNA, 25 bp, Homo sapien
tccataaggtcatacagctgagcag

SEQ ID NO: 2558598 - DNA, 25 bp, Homo sapien
gagccagaaagcctccctcgttaaa

SEQ ID NO: 2558599 - DNA, 25 bp, Homo sapien
tataggaaatgcaaaggtagcctgc

SEQ ID NO: 2558600 - DNA, 25 bp, Homo sapien
gatttactgggcaattcggtgacac

SEQ ID NO: 2558601 - DNA, 25 bp, Homo sapien
catgtggcctgttagctcctctaga

SEQ ID NO: 2558602 - DNA, 25 bp, Homo sapien
ctctagaatggaacttgagtgtctt

SEQ ID NO: 2558603 - DNA, 25 bp, Homo sapien
ttctcatgtggcctgttagctcctc

SEQ ID NO: 2558604 - DNA, 25 bp, Homo sapien
cctgttagctcctctagaatggaac

SEQ ID NO: 2558605 - DNA, 25 bp, Homo sapien
tctaaactggctcacgtagggctcc

SEQ ID NO: 2558606 - DNA, 25 bp, Homo sapien
gatgccttctttaactactccgcgc

SEQ ID NO: 2558607 - DNA, 25 bp, Homo sapien
tcagagtattgagcctacactggcc

SEQ ID NO: 2558608 - DNA, 25 bp, Homo sapien
caaagcaccagagcttgagaaaggg

SEQ ID NO: 2558609 - DNA, 25 bp, Homo sapien
tcatattagaagtgaaactcctgac

SEQ ID NO: 2558610 - DNA, 25 bp, Homo sapien
ctggctgcatagcagaatcacttaa

SEQ ID NO: 2558611 - DNA, 25 bp, Homo sapien
tcctgactactctgggcatactgct

SEQ ID NO: 2558612 - DNA, 25 bp, Homo sapien
gcctttccacatagagcagtagttc

SEQ ID NO: 2558613 - DNA, 25 bp, Homo sapien
atacccaaactcaacaagcggtagg

SEQ ID NO: 2558614 - DNA, 25 bp, Homo sapien
tagctacattcaacctattgtgatg

SEQ ID NO: 2558615 - DNA, 25 bp, Homo sapien
tgtggataccttatacgagactata

SEQ ID NO: 2558616 - DNA, 25 bp, Homo sapien
tactagtcagactattgtggatacc

SEQ ID NO: 2558617 - DNA, 25 bp, Homo sapien
tagcttctagcatctgactcctcat

SEQ ID NO: 2558618 - DNA, 25 bp, Homo sapien
taactggctacttgtacagtgacag

SEQ ID NO: 2558619 - DNA, 25 bp, Homo sapien
gactcctcatgtaggcacttaactg

SEQ ID NO: 2558620 - DNA, 25 bp, Homo sapien
tgtgtcagcatccttagcttctagc

SEQ ID NO: 2558621 - DNA, 25 bp, Homo sapien
cattggcatcatcgtccatcagttt

SEQ ID NO: 2558622 - DNA, 25 bp, Homo sapien
tggatgttacggactgcctcgaagc

SEQ ID NO: 2558623 - DNA, 25 bp, Homo sapien
ccatcagtttgtggatgttacggac

SEQ ID NO: 2558624 - DNA, 25 bp, Homo sapien
cacaggggcttgtcaattcggcaaa

SEQ ID NO: 2558625 - DNA, 25 bp, Homo sapien
aaagcctacactctgacaggctgac

SEQ ID NO: 2558626 - DNA, 25 bp, Homo sapien
ccatcttccctgatagggatgagtt

SEQ ID NO: 2558627 - DNA, 25 bp, Homo sapien
ctagccagtaggcagggggcagcca

SEQ ID NO: 2558628 - DNA, 25 bp, Homo sapien
catcttccctgatagggatgagttc

SEQ ID NO: 2558629 - DNA, 25 bp, Homo sapien
cagtgttaaaactgcttcatgtcta

SEQ ID NO: 2558630 - DNA, 25 bp, Homo sapien
gcaaagaaaactgcctacacattgg

SEQ ID NO: 2558631 - DNA, 25 bp, Homo sapien
ctgcttcatgtctaagcaaagaaaa

SEQ ID NO: 2558632 - DNA, 25 bp, Homo sapien
agggccagtgttaaaactgcttcat

SEQ ID NO: 2558633 - DNA, 25 bp, Homo sapien
aggttataaatgtttggcatagtac

SEQ ID NO: 2558634 - DNA, 25 bp, Homo sapien
ctaaaggttataaatgtttggcata

SEQ ID NO: 2558635 - DNA, 25 bp, Homo sapien
taaaggttataaatgtttggcatag

SEQ ID NO: 2558636 - DNA, 25 bp, Homo sapien
aaaggttataaatgtttggcatagt

SEQ ID NO: 2558637 - DNA, 25 bp, Homo sapien
ctaaatgtaatagtttgatcgtgat

SEQ ID NO: 2558638 - DNA, 25 bp, Homo sapien
gtttgatcgtgatgctgaataaatg

SEQ ID NO: 2558639 - DNA, 25 bp, Homo sapien
tgtaatagtttgatcgtgatgctga

SEQ ID NO: 2558640 - DNA, 25 bp, Homo sapien
taatagtttgatcgtgatgctgaat

SEQ ID NO: 2558641 - DNA, 25 bp, Homo sapien
taagtagtcccaacagctgtagaag

SEQ ID NO: 2558642 - DNA, 25 bp, Homo sapien
cgagaatggctttttctacccatgg

SEQ ID NO: 2558643 - DNA, 25 bp, Homo sapien
gagtctcagtttgccctaagtctaa

SEQ ID NO: 2558644 - DNA, 25 bp, Homo sapien
gaccagtgagggtccaatgagccat

SEQ ID NO: 2558645 - DNA, 25 bp, Homo sapien
actttgttgcccaatctggaatgca

SEQ ID NO: 2558646 - DNA, 25 bp, Homo sapien
aggcacgtgtcaccacaccagctaa

SEQ ID NO: 2558647 - DNA, 25 bp, Homo sapien
tcactttgttgcccaatctggaatg

SEQ ID NO: 2558648 - DNA, 25 bp, Homo sapien
atgcagtggtgcgatctccactcac

SEQ ID NO: 2558649 - DNA, 25 bp, Homo sapien
cactgagcttgaattacgtgtcagg

SEQ ID NO: 2558650 - DNA, 25 bp, Homo sapien
aaaaatacaactgtcagatgctagt

SEQ ID NO: 2558651 - DNA, 25 bp, Homo sapien
aactttttggcgcatagttccatga

SEQ ID NO: 2558652 - DNA, 25 bp, Homo sapien
gaaagtagcgagtattcactgagct

SEQ ID NO: 2558653 - DNA, 25 bp, Homo sapien
ttaaacaagcaaaagtaagccactc

SEQ ID NO: 2558654 - DNA, 25 bp, Homo sapien
tgaactagcagcatgagctaaagcc

SEQ ID NO: 2558655 - DNA, 25 bp, Homo sapien
tgttttgttccaggcattgcactga

SEQ ID NO: 2558656 - DNA, 25 bp, Homo sapien
gcttgatttttacaggcaaagtggg

SEQ ID NO: 2558657 - DNA, 25 bp, Homo sapien
gaaattgattcaggcccctggtata

SEQ ID NO: 2558658 - DNA, 25 bp, Homo sapien
caggcccctggtatatgggtaagag

SEQ ID NO: 2558659 - DNA, 25 bp, Homo sapien
gattcaggcccctggtatatgggta

SEQ ID NO: 2558660 - DNA, 25 bp, Homo sapien
gggtcaagaaattgattcaggcccc

SEQ ID NO: 2558661 - DNA, 25 bp, Homo sapien
ctttgggcagtggtatgggaagagg

SEQ ID NO: 2558662 - DNA, 25 bp, Homo sapien
aagagcaaggtcagctccgcggaag

SEQ ID NO: 2558663 - DNA, 25 bp, Homo sapien
tccacgccgccaggatgcctaagag

SEQ ID NO: 2558664 - DNA, 25 bp, Homo sapien
gcctaagagcaaggtcagctccgcg

SEQ ID NO: 2558665 - DNA, 25 bp, Homo sapien
acgccgccaggatgcctaagagcaa

SEQ ID NO: 2558666 - DNA, 25 bp, Homo sapien
agaccaagttctgccacattgccct

SEQ ID NO: 2558667 - DNA, 25 bp, Homo sapien
caatccacccgccacccaaagcgct

SEQ ID NO: 2558668 - DNA, 25 bp, Homo sapien
tagagaccaagttctgccacattgc

SEQ ID NO: 2558669 - DNA, 25 bp, Homo sapien
gtagagaccaagttctgccacattg

SEQ ID NO: 2558670 - DNA, 25 bp, Homo sapien
ctttctctgctgctctccaaccccc

SEQ ID NO: 2558671 - DNA, 25 bp, Homo sapien
ttctctgctgctctccaacccccat

SEQ ID NO: 2558672 - DNA, 25 bp, Homo sapien
cactttctctgctgctctccaaccc

SEQ ID NO: 2558673 - DNA, 25 bp, Homo sapien
tcccactttctctgctgctctccaa

SEQ ID NO: 2558674 - DNA, 25 bp, Homo sapien
ccaaaccaaattgtcccacctccat

SEQ ID NO: 2558675 - DNA, 25 bp, Homo sapien
ggctagaactatacagctcaatagt

SEQ ID NO: 2558676 - DNA, 25 bp, Homo sapien
gggaatgcaacattggctagaacta

SEQ ID NO: 2558677 - DNA, 25 bp, Homo sapien
tgcaacattggctagaactatacag

SEQ ID NO: 2558678 - DNA, 25 bp, Homo sapien
catggggaatgcaacattggctaga

SEQ ID NO: 2558679 - DNA, 25 bp, Homo sapien
tggagtacatgactacatggcaaca

SEQ ID NO: 2558680 - DNA, 25 bp, Homo sapien
ggaggtctcaatcccctatctctta

SEQ ID NO: 2558681 - DNA, 25 bp, Homo sapien
cattgcatatgtggcccactgttga

SEQ ID NO: 2558682 - DNA, 25 bp, Homo sapien
tccttatgtggcctatgactatata

SEQ ID NO: 2558683 - DNA, 25 bp, Homo sapien
taaccagctagcatcatattgacag

SEQ ID NO: 2558684 - DNA, 25 bp, Homo sapien
aattgtaaagaccattgatgctatg

SEQ ID NO: 2558685 - DNA, 25 bp, Homo sapien
aagaaactgcatcaattaatgggca

SEQ ID NO: 2558686 - DNA, 25 bp, Homo sapien
actgcatcaattaatgggcaaaata

SEQ ID NO: 2558687 - DNA, 25 bp, Homo sapien
agaggtgtgggagaaaggcatgcag

SEQ ID NO: 2558688 - DNA, 25 bp, Homo sapien
gaggtgtgggagaaaggcatgcaga

SEQ ID NO: 2558689 - DNA, 25 bp, Homo sapien
aagaggtgtgggagaaaggcatgca

SEQ ID NO: 2558690 - DNA, 25 bp, Homo sapien
ccagcagagctgcttgtgatccatt

SEQ ID NO: 2558691 - DNA, 25 bp, Homo sapien
agcagagctgcttgtgatccatttt

SEQ ID NO: 2558692 - DNA, 25 bp, Homo sapien
aacaagagcgagaactctggccaga

SEQ ID NO: 2558693 - DNA, 25 bp, Homo sapien
agagcgagaactctggccagatttt

SEQ ID NO: 2558694 - DNA, 25 bp, Homo sapien
gtccaatttaatgaaacctatatcc

SEQ ID NO: 2558695 - DNA, 25 bp, Homo sapien
ccaatttaatgaaacctatatcctt

SEQ ID NO: 2558696 - DNA, 25 bp, Homo sapien
atttaatgaaacctatatccttcac

SEQ ID NO: 2558697 - DNA, 25 bp, Homo sapien
caatttaatgaaacctatatccttc

SEQ ID NO: 2558698 - DNA, 25 bp, Homo sapien
tcaaggtgtcattaagaagctgact

SEQ ID NO: 2558699 - DNA, 25 bp, Homo sapien
gagtagtggtattcacaatttgtca

SEQ ID NO: 2558700 - DNA, 25 bp, Homo sapien
aataggagatgccaagagtagtggt

SEQ ID NO: 2558701 - DNA, 25 bp, Homo sapien
tgcctggccaatatgtacaactgtt

SEQ ID NO: 2558702 - DNA, 25 bp, Homo sapien
accctatgtacatgggttggaagaa

SEQ ID NO: 2558703 - DNA, 25 bp, Homo sapien
gccaataacatgatattaaatctag

SEQ ID NO: 2558704 - DNA, 25 bp, Homo sapien
ctgttagagctagtaaacaaatctg

SEQ ID NO: 2558705 - DNA, 25 bp, Homo sapien
agataccctatgtacatgggttgga

SEQ ID NO: 2558706 - DNA, 25 bp, Homo sapien
caaggatgccttcgttcaccgctat

SEQ ID NO: 2558707 - DNA, 25 bp, Homo sapien
cttctaaaatctggaacgagacaag

SEQ ID NO: 2558708 - DNA, 25 bp, Homo sapien
ttattcaacacagtaatgaaagtcc

SEQ ID NO: 2558709 - DNA, 25 bp, Homo sapien
gtcaaactgcccctgcatgcagaca

SEQ ID NO: 2558710 - DNA, 25 bp, Homo sapien
gagcttatcctcaccatggaaggtg

SEQ ID NO: 2558711 - DNA, 25 bp, Homo sapien
cacgctgatgagcttatcctcacca

SEQ ID NO: 2558712 - DNA, 25 bp, Homo sapien
ggtaattgaggtcttccctcaggaa

SEQ ID NO: 2558713 - DNA, 25 bp, Homo sapien
tgtgtttcactgttgggtcatggta

SEQ ID NO: 2558714 - DNA, 25 bp, Homo sapien
ggtctgcagccaactataggatcta

SEQ ID NO: 2558715 - DNA, 25 bp, Homo sapien
cagctagtttgagccggtgccagaa

SEQ ID NO: 2558716 - DNA, 25 bp, Homo sapien
tacatagcctgagttgctcgagagc

SEQ ID NO: 2558717 - DNA, 25 bp, Homo sapien
tcaaccacgtgactagaacattggg

SEQ ID NO: 2558718 - DNA, 25 bp, Homo sapien
ttactgcaacctccataccctgggt

SEQ ID NO: 2558719 - DNA, 25 bp, Homo sapien
gggttcaaacaattctccagcctca

SEQ ID NO: 2558720 - DNA, 25 bp, Homo sapien
gttcaaacaattctccagcctcagc

SEQ ID NO: 2558721 - DNA, 25 bp, Homo sapien
tggagtgaagttgcgatctcagctt

SEQ ID NO: 2558722 - DNA, 25 bp, Homo sapien
tcttcttaatccaatctatcgttga

SEQ ID NO: 2558723 - DNA, 25 bp, Homo sapien
cacatcttcttaatccaatctatcg

SEQ ID NO: 2558724 - DNA, 25 bp, Homo sapien
catcttcttaatccaatctatcgtt

SEQ ID NO: 2558725 - DNA, 25 bp, Homo sapien
cttcttaatccaatctatcgttgat

SEQ ID NO: 2558726 - DNA, 25 bp, Homo sapien
gcttccggaaggtctcctcatactg

SEQ ID NO: 2558727 - DNA, 25 bp, Homo sapien
actgtaccacctcatccacggtcca

SEQ ID NO: 2558728 - DNA, 25 bp, Homo sapien
gcagcttccggaaggtctcctcata

SEQ ID NO: 2558729 - DNA, 25 bp, Homo sapien
acctcatccacggtccaattgtata

SEQ ID NO: 2558730 - DNA, 25 bp, Homo sapien
accagtaagagacgcagtgaggcac

SEQ ID NO: 2558731 - DNA, 25 bp, Homo sapien
tcatttcagctctactagtgactca

SEQ ID NO: 2558732 - DNA, 25 bp, Homo sapien
gaaacacttgtgctgcagttcgtct

SEQ ID NO: 2558733 - DNA, 25 bp, Homo sapien
aaatcagatgcttcctacaagcctg

SEQ ID NO: 2558734 - DNA, 25 bp, Homo sapien
gcagcttctgccgatgactccggtc

SEQ ID NO: 2558735 - DNA, 25 bp, Homo sapien
ggcccaaagagcactgtatccagag

SEQ ID NO: 2558736 - DNA, 25 bp, Homo sapien
tcagcacagtccctgtcatggtggt

SEQ ID NO: 2558737 - DNA, 25 bp, Homo sapien
ttctgccgatgactccggtctgtca

SEQ ID NO: 2558738 - DNA, 25 bp, Homo sapien
ggttcaatagcattcttctgctggc

SEQ ID NO: 2558739 - DNA, 25 bp, Homo sapien
tggactgtttcctggttcaatagca

SEQ ID NO: 2558740 - DNA, 25 bp, Homo sapien
ttcaatagcattcttctgctggcac

SEQ ID NO: 2558741 - DNA, 25 bp, Homo sapien
ctggttcaatagcattcttctgctg

SEQ ID NO: 2558742 - DNA, 25 bp, Homo sapien
tttgccatcaggacagctgctgatt

SEQ ID NO: 2558743 - DNA, 25 bp, Homo sapien
ccagtacaggcctcctaaatgggta

SEQ ID NO: 2558744 - DNA, 25 bp, Homo sapien
ggatttttagtccatgctcagaggg

SEQ ID NO: 2558745 - DNA, 25 bp, Homo sapien
ggcatgtccctacccctttcagaag

SEQ ID NO: 2558746 - DNA, 25 bp, Homo sapien
gaattttcagggtacaagttagcac

SEQ ID NO: 2558747 - DNA, 25 bp, Homo sapien
tcacacaataccctggcagatatag

SEQ ID NO: 2558748 - DNA, 25 bp, Homo sapien
tatagatattcatccctcactgcca

SEQ ID NO: 2558749 - DNA, 25 bp, Homo sapien
gaggtcaactattaacaccatcagg

SEQ ID NO: 2558750 - DNA, 25 bp, Homo sapien
catactcttagcacagggtctgacc

SEQ ID NO: 2558751 - DNA, 25 bp, Homo sapien
gaaagggagctacaatacaaagtgc

SEQ ID NO: 2558752 - DNA, 25 bp, Homo sapien
tctcagaatctaccttgcactcagt

SEQ ID NO: 2558753 - DNA, 25 bp, Homo sapien
tcctggagacaaaaagagcatggcc

SEQ ID NO: 2558754 - DNA, 25 bp, Homo sapien
tgactctaagagttccaaggcctga

SEQ ID NO: 2558755 - DNA, 25 bp, Homo sapien
taatatggccctgatctagctcaag

SEQ ID NO: 2558756 - DNA, 25 bp, Homo sapien
gacactaacttgctagagctgggtt

SEQ ID NO: 2558757 - DNA, 25 bp, Homo sapien
gactcttggaactcttgactctaag

SEQ ID NO: 2558758 - DNA, 25 bp, Homo sapien
gagtaacggttctggatataggcaa

SEQ ID NO: 2558759 - DNA, 25 bp, Homo sapien
agccgcccacaccaataacgataga

SEQ ID NO: 2558760 - DNA, 25 bp, Homo sapien
aataacgatagacaccaccagcatg

SEQ ID NO: 2558761 - DNA, 25 bp, Homo sapien
agactctgctcagctcggtgtaacc

SEQ ID NO: 2558762 - DNA, 25 bp, Homo sapien
gaatgtagaataccctgcaagcttg

SEQ ID NO: 2558763 - DNA, 25 bp, Homo sapien
ggtatcattatcagcctgggacagg

SEQ ID NO: 2558764 - DNA, 25 bp, Homo sapien
gctcaaggcccatagaaaccacagt

SEQ ID NO: 2558765 - DNA, 25 bp, Homo sapien
tgcaagcttgacaaaaagatccagg

SEQ ID NO: 2558766 - DNA, 25 bp, Homo sapien
tggcggctccgctcattctcagtac

SEQ ID NO: 2558767 - DNA, 25 bp, Homo sapien
tccactgtgcggtgctcctcctggg

SEQ ID NO: 2558768 - DNA, 25 bp, Homo sapien
tcagcatatttttggcggctccgct

SEQ ID NO: 2558769 - DNA, 25 bp, Homo sapien
ttctcagtaccctcccgcagctcct

SEQ ID NO: 2558770 - DNA, 25 bp, Homo sapien
tactgaggtcatggatcaactagaa

SEQ ID NO: 2558771 - DNA, 25 bp, Homo sapien
tagtaacacaggtacatgcatatgc

SEQ ID NO: 2558772 - DNA, 25 bp, Homo sapien
gaaatgagggcttatgcccaccaag

SEQ ID NO: 2558773 - DNA, 25 bp, Homo sapien
gcccaccaagagacatatgcaagaa

SEQ ID NO: 2558774 - DNA, 25 bp, Homo sapien
acggcgcctgactgcatcaatcatt

SEQ ID NO: 2558775 - DNA, 25 bp, Homo sapien
ccacggcgcctgactgcatcaatca

SEQ ID NO: 2558776 - DNA, 25 bp, Homo sapien
gagccacggcgcctgactgcatcaa

SEQ ID NO: 2558777 - DNA, 25 bp, Homo sapien
tacacttcattaaaatcaagggctt

SEQ ID NO: 2558778 - DNA, 25 bp, Homo sapien
ccgaaaattgggctggacccatgta

SEQ ID NO: 2558779 - DNA, 25 bp, Homo sapien
ctgagaaactgggacaaatgaaagc

SEQ ID NO: 2558780 - DNA, 25 bp, Homo sapien
tcttcctgggagacattgatgattt

SEQ ID NO: 2558781 - DNA, 25 bp, Homo sapien
aacagcctacgaagtggcagaactg

SEQ ID NO: 2558782 - DNA, 25 bp, Homo sapien
caccgtgcccagccggagtcttgct

SEQ ID NO: 2558783 - DNA, 25 bp, Homo sapien
accgtgcccagccggagtcttgctc

SEQ ID NO: 2558784 - DNA, 25 bp, Homo sapien
ccgtgcccagccggagtcttgctct

SEQ ID NO: 2558785 - DNA, 25 bp, Homo sapien
ctgcagccacttctgaagggcctct

SEQ ID NO: 2558786 - DNA, 25 bp, Homo sapien
tgtaatattgcacctccacctcatg

SEQ ID NO: 2558787 - DNA, 25 bp, Homo sapien
tctgaagggcctctggagcatacca

SEQ ID NO: 2558788 - DNA, 25 bp, Homo sapien
ctgctttcctcaaggcctcccgaac

SEQ ID NO: 2558789 - DNA, 25 bp, Homo sapien
tgccaaagagtgtgtttctcttctt

SEQ ID NO: 2558790 - DNA, 25 bp, Homo sapien
gaattttatgatctacatcatccag

SEQ ID NO: 2558791 - DNA, 25 bp, Homo sapien
attttatgatctacatcatccaggg

SEQ ID NO: 2558792 - DNA, 25 bp, Homo sapien
cgtggaaggtgccaaagagtgtgtt

SEQ ID NO: 2558793 - DNA, 25 bp, Homo sapien
gggtctatgttgagggcagccacca

SEQ ID NO: 2558794 - DNA, 25 bp, Homo sapien
tcgatctgttgccagcggtgcaggc

SEQ ID NO: 2558795 - DNA, 25 bp, Homo sapien
tggaagccacagaggatctcgatct

SEQ ID NO: 2558796 - DNA, 25 bp, Homo sapien
ccaccagtgagtggatgccagggtt

SEQ ID NO: 2558797 - DNA, 25 bp, Homo sapien
tctgctgtttaagcacaacagaggc

SEQ ID NO: 2558798 - DNA, 25 bp, Homo sapien
aattgtgctttattgaccaaggtca

SEQ ID NO: 2558799 - DNA, 25 bp, Homo sapien
ttccttcatccccgcaaagaggtca

SEQ ID NO: 2558800 - DNA, 25 bp, Homo sapien
gagttgaactatcttcctgggtatc

SEQ ID NO: 2558801 - DNA, 25 bp, Homo sapien
agagagagcggtcactgaacctacg

SEQ ID NO: 2558802 - DNA, 25 bp, Homo sapien
ttccagagggactgatcatccgagc

SEQ ID NO: 2558803 - DNA, 25 bp, Homo sapien
tccgagccggcggatgtagagcaga

SEQ ID NO: 2558804 - DNA, 25 bp, Homo sapien
cagagggactgatcatccgagccgg

SEQ ID NO: 2558805 - DNA, 25 bp, Homo sapien
agaaggagacctatgggcaatatca

SEQ ID NO: 2558806 - DNA, 25 bp, Homo sapien
tgaagatgaagtgcccaggtcagtt

SEQ ID NO: 2558807 - DNA, 25 bp, Homo sapien
agatgaagtgcccaggtcagtttta

SEQ ID NO: 2558808 - DNA, 25 bp, Homo sapien
cagttttagtggcaattccaataga

SEQ ID NO: 2558809 - DNA, 25 bp, Homo sapien
ctctaatgccaatctggagaatggg

SEQ ID NO: 2558810 - DNA, 25 bp, Homo sapien
accctgggcctctaatgccaatctg

SEQ ID NO: 2558811 - DNA, 25 bp, Homo sapien
cccactttgggctggcaggtaagga

SEQ ID NO: 2558812 - DNA, 25 bp, Homo sapien
ggcaggtaaggaggtgcccatgaat

SEQ ID NO: 2558813 - DNA, 25 bp, Homo sapien
tcaggcgctgccgaacactgctctg

SEQ ID NO: 2558814 - DNA, 25 bp, Homo sapien
ctccgtcaggcgctgccgaacactg

SEQ ID NO: 2558815 - DNA, 25 bp, Homo sapien
gcgctgccgaacactgctctgcagg

SEQ ID NO: 2558816 - DNA, 25 bp, Homo sapien
gctgtggctccgtcaggcgctgccg

SEQ ID NO: 2558817 - DNA, 25 bp, Homo sapien
ggtgtgtcagggtagggctccatct

SEQ ID NO: 2558818 - DNA, 25 bp, Homo sapien
catcacagcggtgctgtcagaaggg

SEQ ID NO: 2558819 - DNA, 25 bp, Homo sapien
tgaatgcccaggcatcacagcggtg

SEQ ID NO: 2558820 - DNA, 25 bp, Homo sapien
cccaggcatcacagcggtgctgtca

SEQ ID NO: 2558821 - DNA, 25 bp, Homo sapien
aaaattaagtagtgaacaggccagg

SEQ ID NO: 2558822 - DNA, 25 bp, Homo sapien
gggcaatccctttgtgcaagagaaa

SEQ ID NO: 2558823 - DNA, 25 bp, Homo sapien
tgaccttactagagagcctgtttgc

SEQ ID NO: 2558824 - DNA, 25 bp, Homo sapien
gatgatcctctggtgcgtggtgcaa

SEQ ID NO: 2558825 - DNA, 25 bp, Homo sapien
aggaagcctagggagatataggagg

SEQ ID NO: 2558826 - DNA, 25 bp, Homo sapien
cctagggagatataggagggaaaag

SEQ ID NO: 2558827 - DNA, 25 bp, Homo sapien
gcctagggagatataggagggaaaa

SEQ ID NO: 2558828 - DNA, 25 bp, Homo sapien
ggaagcctagggagatataggaggg

SEQ ID NO: 2558829 - DNA, 25 bp, Homo sapien
tatgcctctctcatcagctaaaagt

SEQ ID NO: 2558830 - DNA, 25 bp, Homo sapien
tcagctaaaagttgggactgccaaa

SEQ ID NO: 2558831 - DNA, 25 bp, Homo sapien
cttctatgcctctctcatcagctaa

SEQ ID NO: 2558832 - DNA, 25 bp, Homo sapien
ctgattcctgtccttctatgcctct

SEQ ID NO: 2558833 - DNA, 25 bp, Homo sapien
tgtttaaacgtctgctagccaaagg

SEQ ID NO: 2558834 - DNA, 25 bp, Homo sapien
gagttatggagacatgccaccgcac

SEQ ID NO: 2558835 - DNA, 25 bp, Homo sapien
tagatatggaggtgctctctctgcc

SEQ ID NO: 2558836 - DNA, 25 bp, Homo sapien
caaaagcagaggagagacctaaggg

SEQ ID NO: 2558837 - DNA, 25 bp, Homo sapien
gagagagggacaacacgagaagaca

SEQ ID NO: 2558838 - DNA, 25 bp, Homo sapien
gacatatattggatgaggtgatagg

SEQ ID NO: 2558839 - DNA, 25 bp, Homo sapien
ggacaacacgagaagacaaggacag

SEQ ID NO: 2558840 - DNA, 25 bp, Homo sapien
aggaatagacagaagttgagcagcc

SEQ ID NO: 2558841 - DNA, 25 bp, Homo sapien
ctccgaatcggaatgggtcaaatcc

SEQ ID NO: 2558842 - DNA, 25 bp, Homo sapien
cactcatgtggagggaggactccga

SEQ ID NO: 2558843 - DNA, 25 bp, Homo sapien
cattggaagtcatggcattgagagc

SEQ ID NO: 2558844 - DNA, 25 bp, Homo sapien
tctgcagcacggctcatctgaggag

SEQ ID NO: 2558845 - DNA, 25 bp, Homo sapien
ctgtgagaacgggaagaatccaaat

SEQ ID NO: 2558846 - DNA, 25 bp, Homo sapien
tgagaacgggaagaatccaaatgtg

SEQ ID NO: 2558847 - DNA, 25 bp, Homo sapien
agaacgggaagaatccaaatgtgga

SEQ ID NO: 2558848 - DNA, 25 bp, Homo sapien
gaagaatccaaatgtggagagccac

SEQ ID NO: 2558849 - DNA, 25 bp, Homo sapien
tcggctgtccccaactggagatggt

SEQ ID NO: 2558850 - DNA, 25 bp, Homo sapien
aatgcgtgtgtttcggctggcttgc

SEQ ID NO: 2558851 - DNA, 25 bp, Homo sapien
gtttcctcgccaatagagccattat

SEQ ID NO: 2558852 - DNA, 25 bp, Homo sapien
gctggagtctgtttcctcgccaata

SEQ ID NO: 2558853 - DNA, 25 bp, Homo sapien
ggcacacatgtcagaagctactcgt

SEQ ID NO: 2558854 - DNA, 25 bp, Homo sapien
gaatatgcagcgtaggcacttggga

SEQ ID NO: 2558855 - DNA, 25 bp, Homo sapien
tagagacaaatcctcctgcagtgtg

SEQ ID NO: 2558856 - DNA, 25 bp, Homo sapien
caaacttcaaagattaggccctagc

SEQ ID NO: 2558857 - DNA, 25 bp, Homo sapien
gaactggaagaaaaccgcgcaaggc

SEQ ID NO: 2558858 - DNA, 25 bp, Homo sapien
ggccgatggcgtttggattttatcc

SEQ ID NO: 2558859 - DNA, 25 bp, Homo sapien
cccagggcttttagatcggccagag

SEQ ID NO: 2558860 - DNA, 25 bp, Homo sapien
gattttatcctgacgcaaatcagag

SEQ ID NO: 2558861 - DNA, 25 bp, Homo sapien
cgcagctagtggctgaggctctgaa

SEQ ID NO: 2558862 - DNA, 25 bp, Homo sapien
acccgtgacgcacaaaggggcgcga

SEQ ID NO: 2558863 - DNA, 25 bp, Homo sapien
ccggcgggatcgagaaggtgacaga

SEQ ID NO: 2558864 - DNA, 25 bp, Homo sapien
tggactgcggctctaaagcgccggc

SEQ ID NO: 2558865 - DNA, 25 bp, Homo sapien
tctcgcccacctcgtccccccctca

SEQ ID NO: 2558866 - DNA, 25 bp, Homo sapien
aaatgcgggaaaggcgggaagcagc

SEQ ID NO: 2558867 - DNA, 25 bp, Homo sapien
cgcggcgggaaatgcgggaaaggcg

SEQ ID NO: 2558868 - DNA, 25 bp, Homo sapien
gtctgggcatcagctccggcggcgg

SEQ ID NO: 2558869 - DNA, 25 bp, Homo sapien
cgggaagcagcgaaggcgggcgggc

SEQ ID NO: 2558870 - DNA, 25 bp, Homo sapien
atccttttgaaaggcggcaggatga

SEQ ID NO: 2558871 - DNA, 25 bp, Homo sapien
ctgactgaagacagaaggccgagcg

SEQ ID NO: 2558872 - DNA, 25 bp, Homo sapien
cagcctgaaggcccgaaggaggttc

SEQ ID NO: 2558873 - DNA, 25 bp, Homo sapien
gatgacaaagccgagggggcgcagc

SEQ ID NO: 2558874 - DNA, 25 bp, Homo sapien
tcttgtttttccaacccgatgaagc

SEQ ID NO: 2558875 - DNA, 25 bp, Homo sapien
gaaacaaccagtcgattaaccagta

SEQ ID NO: 2558876 - DNA, 25 bp, Homo sapien
taaactgacaagtgcctacggaggg

SEQ ID NO: 2558877 - DNA, 25 bp, Homo sapien
aaaggaactcgagggtgctgtctgt

SEQ ID NO: 2558878 - DNA, 25 bp, Homo sapien
caggaatagtgaatatatccaacca

SEQ ID NO: 2558879 - DNA, 25 bp, Homo sapien
ggaatagtgaatatatccaaccacc

SEQ ID NO: 2558880 - DNA, 25 bp, Homo sapien
aatagtgaatatatccaaccaccaa

SEQ ID NO: 2558881 - DNA, 25 bp, Homo sapien
gtgaatatatccaaccaccaaacag

SEQ ID NO: 2558882 - DNA, 25 bp, Homo sapien
ctaaagaatcaaatcatgttagcaa

SEQ ID NO: 2558883 - DNA, 25 bp, Homo sapien
tggattcgagatgtaattttgtcaa

SEQ ID NO: 2558884 - DNA, 25 bp, Homo sapien
aaagcttctggattcgagatgtaat

SEQ ID NO: 2558885 - DNA, 25 bp, Homo sapien
ccatattgagtccataacaaagctt

SEQ ID NO: 2558886 - DNA, 25 bp, Homo sapien
aatccatattgagtccataacaaag

SEQ ID NO: 2558887 - DNA, 25 bp, Homo sapien
ctgtgattatgccactgcactccag

SEQ ID NO: 2558888 - DNA, 25 bp, Homo sapien
actccagcctgggtggcagagtgag

SEQ ID NO: 2558889 - DNA, 25 bp, Homo sapien
ccagcctgggtggcagagtgagacc

SEQ ID NO: 2558890 - DNA, 25 bp, Homo sapien
tcgggaagctgaggctgcaatgagc

SEQ ID NO: 2558891 - DNA, 25 bp, Homo sapien
tcctggctgccaggatagcatagtc

SEQ ID NO: 2558892 - DNA, 25 bp, Homo sapien
tgcaagttagagacagcgatcctgg

SEQ ID NO: 2558893 - DNA, 25 bp, Homo sapien
catagtcagggtgcttagtagtcaa

SEQ ID NO: 2558894 - DNA, 25 bp, Homo sapien
tcagcagccaaagtatctagttcca

SEQ ID NO: 2558895 - DNA, 25 bp, Homo sapien
gccattatgtggatttatgtagtta

SEQ ID NO: 2558896 - DNA, 25 bp, Homo sapien
ccaccatgggagagtgtttgccatt

SEQ ID NO: 2558897 - DNA, 25 bp, Homo sapien
gaacaatatccaatgttgacttggc

SEQ ID NO: 2558898 - DNA, 25 bp, Homo sapien
gtagttatagaggtcttccatcaca

SEQ ID NO: 2558899 - DNA, 25 bp, Homo sapien
cgcccggcctaatcattatattacc

SEQ ID NO: 2558900 - DNA, 25 bp, Homo sapien
ctaatcattatattacctaaagtta

SEQ ID NO: 2558901 - DNA, 25 bp, Homo sapien
gcccggcctaatcattatattacct

SEQ ID NO: 2558902 - DNA, 25 bp, Homo sapien
cggcctaatcattatattacctaaa

SEQ ID NO: 2558903 - DNA, 25 bp, Homo sapien
taaagccgaagtaattgtaagagaa

SEQ ID NO: 2558904 - DNA, 25 bp, Homo sapien
tctcggtcatagataatagcagaat

SEQ ID NO: 2558905 - DNA, 25 bp, Homo sapien
gaagtaattgtaagagaaatctcgg

SEQ ID NO: 2558906 - DNA, 25 bp, Homo sapien
aaatctcggtcatagataatagcag

SEQ ID NO: 2558907 - DNA, 25 bp, Homo sapien
tcaacaaataagaccgctctagcgt

SEQ ID NO: 2558908 - DNA, 25 bp, Homo sapien
aacatatgttgtggtctttcagcca

SEQ ID NO: 2558909 - DNA, 25 bp, Homo sapien
tctcagaaagaagattatatgtttc

SEQ ID NO: 2558910 - DNA, 25 bp, Homo sapien
catcaacatatgttgtggtctttca

SEQ ID NO: 2558911 - DNA, 25 bp, Homo sapien
ctctcagaaagaagattatatgttt

SEQ ID NO: 2558912 - DNA, 25 bp, Homo sapien
aagttgtgggcggttggtaccagca

SEQ ID NO: 2558913 - DNA, 25 bp, Homo sapien
agtgggcgaagcatgagtaaaccac

SEQ ID NO: 2558914 - DNA, 25 bp, Homo sapien
gggcggttggtaccagcattgaaga

SEQ ID NO: 2558915 - DNA, 25 bp, Homo sapien
cattgaagagagtgggcgaagcatg

SEQ ID NO: 2558916 - DNA, 25 bp, Homo sapien
ttttggttcacagtgattggactcc

SEQ ID NO: 2558917 - DNA, 25 bp, Homo sapien
caaagtgtgaaacttgttatttgac

SEQ ID NO: 2558918 - DNA, 25 bp, Homo sapien
ttgacttcgtttttggttcacagtg

SEQ ID NO: 2558919 - DNA, 25 bp, Homo sapien
cccaaagtgtgaaacttgttatttg

SEQ ID NO: 2558920 - DNA, 25 bp, Homo sapien
agcaatgtagctgccagtagcccga

SEQ ID NO: 2558921 - DNA, 25 bp, Homo sapien
gtagcccgaatacaactcacagcaa

SEQ ID NO: 2558922 - DNA, 25 bp, Homo sapien
cagacttagaaatcaatgcacattg

SEQ ID NO: 2558923 - DNA, 25 bp, Homo sapien
gctttagagtgtcataaatgccttc

SEQ ID NO: 2558924 - DNA, 25 bp, Homo sapien
tatcgagctgtgttgttatatactc

SEQ ID NO: 2558925 - DNA, 25 bp, Homo sapien
caaggccattggaattgccattagt

SEQ ID NO: 2558926 - DNA, 25 bp, Homo sapien
tctcagcatcggtacaaggccattg

SEQ ID NO: 2558927 - DNA, 25 bp, Homo sapien
caccttgatccacatatcgagctgt

SEQ ID NO: 2558928 - DNA, 25 bp, Homo sapien
ctagtggtaaataaatcataattct

SEQ ID NO: 2558929 - DNA, 25 bp, Homo sapien
ggctccaggtaaatagcaaatgccc

SEQ ID NO: 2558930 - DNA, 25 bp, Homo sapien
ctttaaatcaaggaattcaaagatg

SEQ ID NO: 2558931 - DNA, 25 bp, Homo sapien
tttaaatcaaggaattcaaagatgt

SEQ ID NO: 2558932 - DNA, 25 bp, Homo sapien
aaagatctctggcacgctgctcttc

SEQ ID NO: 2558933 - DNA, 25 bp, Homo sapien
agatctctggcacgctgctcttcct

SEQ ID NO: 2558934 - DNA, 25 bp, Homo sapien
tcgtttcatgaagagatccggaatc

SEQ ID NO: 2558935 - DNA, 25 bp, Homo sapien
agagatccggaatccaaagagcaaa

SEQ ID NO: 2558936 - DNA, 25 bp, Homo sapien
caggacactcatttggacacatcaa

SEQ ID NO: 2558937 - DNA, 25 bp, Homo sapien
gaccaggacactcatttggacacat

SEQ ID NO: 2558938 - DNA, 25 bp, Homo sapien
ggacactcatttggacacatcaaag

SEQ ID NO: 2558939 - DNA, 25 bp, Homo sapien
ccagaccaggacactcatttggaca

SEQ ID NO: 2558940 - DNA, 25 bp, Homo sapien
ggaatctttgtagagcatatacggg

SEQ ID NO: 2558941 - DNA, 25 bp, Homo sapien
tggttcccaggttctgctggttgct

SEQ ID NO: 2558942 - DNA, 25 bp, Homo sapien
gctggttgctctttcgattacagga

SEQ ID NO: 2558943 - DNA, 25 bp, Homo sapien
gggtgcctgtttccgtctgagactc

SEQ ID NO: 2558944 - DNA, 25 bp, Homo sapien
catctttgctggtgtactccactat

SEQ ID NO: 2558945 - DNA, 25 bp, Homo sapien
tctttgctggtgtactccactattt

SEQ ID NO: 2558946 - DNA, 25 bp, Homo sapien
ctttgctggtgtactccactatttc

SEQ ID NO: 2558947 - DNA, 25 bp, Homo sapien
atctttgctggtgtactccactatt

SEQ ID NO: 2558948 - DNA, 25 bp, Homo sapien
caagtttcggacaacgactttagtg

SEQ ID NO: 2558949 - DNA, 25 bp, Homo sapien
tcagccaacttcttaaagtcgtatg

SEQ ID NO: 2558950 - DNA, 25 bp, Homo sapien
catacatattcagggccagggaagc

SEQ ID NO: 2558951 - DNA, 25 bp, Homo sapien
caacgactttagtgacttcagccaa

SEQ ID NO: 2558952 - DNA, 25 bp, Homo sapien
gattcctttcaatttggatttcaat

SEQ ID NO: 2558953 - DNA, 25 bp, Homo sapien
ttaaatgatgacttgaagatcatga

SEQ ID NO: 2558954 - DNA, 25 bp, Homo sapien
gacttgaagatcatgattgattcct

SEQ ID NO: 2558955 - DNA, 25 bp, Homo sapien
catgattgattcctttcaatttgga

SEQ ID NO: 2558956 - DNA, 25 bp, Homo sapien
atctgccagaccttgtaccccaatt

SEQ ID NO: 2558957 - DNA, 25 bp, Homo sapien
ggtatctcatcaggataaaagcatc

SEQ ID NO: 2558958 - DNA, 25 bp, Homo sapien
ggcgatggcgtttatttgataggca

SEQ ID NO: 2558959 - DNA, 25 bp, Homo sapien
tgcactctcaaaagggtatctcatc

SEQ ID NO: 2558960 - DNA, 25 bp, Homo sapien
tagtttcaaagatctgcttattcag

SEQ ID NO: 2558961 - DNA, 25 bp, Homo sapien
taggtttcgtatgggccctgctcct

SEQ ID NO: 2558962 - DNA, 25 bp, Homo sapien
tggagagccctcataggtttcgtat

SEQ ID NO: 2558963 - DNA, 25 bp, Homo sapien
caaagatctgcttattcagtaactg

SEQ ID NO: 2558964 - DNA, 25 bp, Homo sapien
taacattccacatatcatactgaag

SEQ ID NO: 2558965 - DNA, 25 bp, Homo sapien
ttgagaaccttccagtcccataggt

SEQ ID NO: 2558966 - DNA, 25 bp, Homo sapien
taggtctgtaggagtaacattccac

SEQ ID NO: 2558967 - DNA, 25 bp, Homo sapien
tccagtcccataggtctgtaggagt

SEQ ID NO: 2558968 - DNA, 25 bp, Homo sapien
tatagatgttgctggtgtaaggttc

SEQ ID NO: 2558969 - DNA, 25 bp, Homo sapien
aagactctgcgagtatagatgttgc

SEQ ID NO: 2558970 - DNA, 25 bp, Homo sapien
ggtgtaaggttcaatggactcatta

SEQ ID NO: 2558971 - DNA, 25 bp, Homo sapien
ggcatcggggcaataagtaaactgt

SEQ ID NO: 2558972 - DNA, 25 bp, Homo sapien
tcatctcttcatgccataggccccg

SEQ ID NO: 2558973 - DNA, 25 bp, Homo sapien
tagagccattgcatgcaataatctg

SEQ ID NO: 2558974 - DNA, 25 bp, Homo sapien
gccccgctcggtaagatctttcaat

SEQ ID NO: 2558975 - DNA, 25 bp, Homo sapien
tctttcaataagtgaggatttacaa

SEQ ID NO: 2558976 - DNA, 25 bp, Homo sapien
tgtggatgttcaaagattggctttg

SEQ ID NO: 2558977 - DNA, 25 bp, Homo sapien
ccagccgtagaagtgcatactagtg

SEQ ID NO: 2558978 - DNA, 25 bp, Homo sapien
gagtttgccatagttaggctcagca

SEQ ID NO: 2558979 - DNA, 25 bp, Homo sapien
gttaggctcagcaatgtggatgttc

SEQ ID NO: 2558980 - DNA, 25 bp, Homo sapien
tcaggatccacacatcagacattca

SEQ ID NO: 2558981 - DNA, 25 bp, Homo sapien
ccttatttagagtgaactggattgg

SEQ ID NO: 2558982 - DNA, 25 bp, Homo sapien
ccttaaataatacatcccagtcttc

SEQ ID NO: 2558983 - DNA, 25 bp, Homo sapien
ttggattagccgctggtcttgtcct

SEQ ID NO: 2558984 - DNA, 25 bp, Homo sapien
gaataacctataggaccatatccag

SEQ ID NO: 2558985 - DNA, 25 bp, Homo sapien
tacttaaccactccctgtatgcaag

SEQ ID NO: 2558986 - DNA, 25 bp, Homo sapien
agttttgcttctagagacccaccag

SEQ ID NO: 2558987 - DNA, 25 bp, Homo sapien
gcaaagccttaccacctcaagcaaa

SEQ ID NO: 2558988 - DNA, 25 bp, Homo sapien
taaacaacgcctaacagacctatgg

SEQ ID NO: 2558989 - DNA, 25 bp, Homo sapien
taagcccaggaagtcccaagtagga

SEQ ID NO: 2558990 - DNA, 25 bp, Homo sapien
tcagaaaactggaagataggacact

SEQ ID NO: 2558991 - DNA, 25 bp, Homo sapien
ggaacaccgtcaagtcaaccaatag

SEQ ID NO: 2558992 - DNA, 25 bp, Homo sapien
ctgtgattcacttacaggggtctgc

SEQ ID NO: 2558993 - DNA, 25 bp, Homo sapien
agcaccactggatctgatggatcag

SEQ ID NO: 2558994 - DNA, 25 bp, Homo sapien
gatggatcagatggcccaagtagca

SEQ ID NO: 2558995 - DNA, 25 bp, Homo sapien
caaagcctccaatgagcatctctat

SEQ ID NO: 2558996 - DNA, 25 bp, Homo sapien
tgccggcatcacagtccgtatccca

SEQ ID NO: 2558997 - DNA, 25 bp, Homo sapien
ccggcatcacagtccgtatcccaca

SEQ ID NO: 2558998 - DNA, 25 bp, Homo sapien
cggcatcacagtccgtatcccacat

SEQ ID NO: 2558999 - DNA, 25 bp, Homo sapien
ggcatcacagtccgtatcccacatg

SEQ ID NO: 2559000 - DNA, 25 bp, Homo sapien
gtgccggcatctgctcagcatctgg

SEQ ID NO: 2559001 - DNA, 25 bp, Homo sapien
tgccggcatctgctcagcatctggt

SEQ ID NO: 2559002 - DNA, 25 bp, Homo sapien
aagtccacaggcatggtgccggcat

SEQ ID NO: 2559003 - DNA, 25 bp, Homo sapien
tgggaagtccacaggcatggtgccg

SEQ ID NO: 2559004 - DNA, 25 bp, Homo sapien
ttgatgaccactgactttcccagcc

SEQ ID NO: 2559005 - DNA, 25 bp, Homo sapien
ctgttggcttcttgatgaccactga

SEQ ID NO: 2559006 - DNA, 25 bp, Homo sapien
gaccaaacctgcaggagtcggggac

SEQ ID NO: 2559007 - DNA, 25 bp, Homo sapien
tggcttcttgatgaccactgacttt

SEQ ID NO: 2559008 - DNA, 25 bp, Homo sapien
tgagcccgtcttcaggcatatagtt

SEQ ID NO: 2559009 - DNA, 25 bp, Homo sapien
cccctgacaggttgagagcatcgtt

SEQ ID NO: 2559010 - DNA, 25 bp, Homo sapien
tttcggccccggctgtgactaagtc

SEQ ID NO: 2559011 - DNA, 25 bp, Homo sapien
taagtcccacctagtgtcccaggat

SEQ ID NO: 2559012 - DNA, 25 bp, Homo sapien
gcctggggccctcattgaaccgagg

SEQ ID NO: 2559013 - DNA, 25 bp, Homo sapien
tgcctggggccctcattgaaccgag

SEQ ID NO: 2559014 - DNA, 25 bp, Homo sapien
cctggggccctcattgaaccgaggc

SEQ ID NO: 2559015 - DNA, 25 bp, Homo sapien
tacactgagcgcctccccgcactgc

SEQ ID NO: 2559016 - DNA, 25 bp, Homo sapien
tgccccgcggcgaagtcgccgtaga

SEQ ID NO: 2559017 - DNA, 25 bp, Homo sapien
ggaggcccccacgagctctacactg

SEQ ID NO: 2559018 - DNA, 25 bp, Homo sapien
ctgccccgctgtcagcggaggcccc

SEQ ID NO: 2559019 - DNA, 25 bp, Homo sapien
tcaacaccttggagttctactgctg

SEQ ID NO: 2559020 - DNA, 25 bp, Homo sapien
gtcatcttgagcagaagctaccaac

SEQ ID NO: 2559021 - DNA, 25 bp, Homo sapien
tctcagattaggagctcctggtggg

SEQ ID NO: 2559022 - DNA, 25 bp, Homo sapien
tctggtgcccttttcagaagaccaa

SEQ ID NO: 2559023 - DNA, 25 bp, Homo sapien
gatggactacctgaagattgcacaa

SEQ ID NO: 2559024 - DNA, 25 bp, Homo sapien
gctacctggctaatgatagactcct

SEQ ID NO: 2559025 - DNA, 25 bp, Homo sapien
tatattgtccgacagaaactgcagt

SEQ ID NO: 2559026 - DNA, 25 bp, Homo sapien
tatgctgttcaagccaagtatggag

SEQ ID NO: 2559027 - DNA, 25 bp, Homo sapien
ggatgctgagctggaaatttgccat

SEQ ID NO: 2559028 - DNA, 25 bp, Homo sapien
aaatagttggtttgcgcgaggtctg

SEQ ID NO: 2559029 - DNA, 25 bp, Homo sapien
cgtaacagtaactacaatggatgct

SEQ ID NO: 2559030 - DNA, 25 bp, Homo sapien
gacagcagaggttattctacatggc

SEQ ID NO: 2559031 - DNA, 25 bp, Homo sapien
tggagaggtcctcccagataccctg

SEQ ID NO: 2559032 - DNA, 25 bp, Homo sapien
tgaaggacccatccatggagaggtc

SEQ ID NO: 2559033 - DNA, 25 bp, Homo sapien
cctcctgaaggacccatccatggag

SEQ ID NO: 2559034 - DNA, 25 bp, Homo sapien
atgaagacctgggacaaggccctca

SEQ ID NO: 2559035 - DNA, 25 bp, Homo sapien
tctgttggcccaagtctggtagtaa

SEQ ID NO: 2559036 - DNA, 25 bp, Homo sapien
aacccacttcaggatttcactttgg

SEQ ID NO: 2559037 - DNA, 25 bp, Homo sapien
ctaaagaaagccttcgagtttcctg

SEQ ID NO: 2559038 - DNA, 25 bp, Homo sapien
agcagcagatctcttcagatgcacc

SEQ ID NO: 2559039 - DNA, 25 bp, Homo sapien
tgtcatctttctcccctcccctctg

SEQ ID NO: 2559040 - DNA, 25 bp, Homo sapien
catctttctcccctcccctctgcat

SEQ ID NO: 2559041 - DNA, 25 bp, Homo sapien
ttttcgtccaagttgtcatctttct

SEQ ID NO: 2559042 - DNA, 25 bp, Homo sapien
tttcgtccaagttgtcatctttctc

SEQ ID NO: 2559043 - DNA, 25 bp, Homo sapien
cattcccaccaattgttgttcaggt

SEQ ID NO: 2559044 - DNA, 25 bp, Homo sapien
tcacattcccaccaattgttgttca

SEQ ID NO: 2559045 - DNA, 25 bp, Homo sapien
acattcccaccaattgttgttcagg

SEQ ID NO: 2559046 - DNA, 25 bp, Homo sapien
attcccaccaattgttgttcaggtt

SEQ ID NO: 2559047 - DNA, 25 bp, Homo sapien
gtggcatcttccagggtatcttgga

SEQ ID NO: 2559048 - DNA, 25 bp, Homo sapien
ctgttgacattgctcacgcacacca

SEQ ID NO: 2559049 - DNA, 25 bp, Homo sapien
gggtggcatcttccagggtatcttg

SEQ ID NO: 2559050 - DNA, 25 bp, Homo sapien
ttgacattgctcacgcacaccacag

SEQ ID NO: 2559051 - DNA, 25 bp, Homo sapien
tgggttgtccttactcctagagtac

SEQ ID NO: 2559052 - DNA, 25 bp, Homo sapien
gagtacagcccttctagtgtttcaa

SEQ ID NO: 2559053 - DNA, 25 bp, Homo sapien
gatccatctgagaggacgcttaact

SEQ ID NO: 2559054 - DNA, 25 bp, Homo sapien
aattcaggcagataagggtactggc

SEQ ID NO: 2559055 - DNA, 25 bp, Homo sapien
ctcggagccgaggagacgaccacct

SEQ ID NO: 2559056 - DNA, 25 bp, Homo sapien
ggagccgaggagacgaccacctata

SEQ ID NO: 2559057 - DNA, 25 bp, Homo sapien
tgcagggactcggagccgaggagac

SEQ ID NO: 2559058 - DNA, 25 bp, Homo sapien
gactcggagccgaggagacgaccac

SEQ ID NO: 2559059 - DNA, 25 bp, Homo sapien
ttgacattgctcacgcacaccacag

SEQ ID NO: 2559060 - DNA, 25 bp, Homo sapien
gtggcatcttccagggtatcttgga

SEQ ID NO: 2559061 - DNA, 25 bp, Homo sapien
gggtggcatcttccagggtatcttg

SEQ ID NO: 2559062 - DNA, 25 bp, Homo sapien
ctgttgacattgctcacgcacacca

SEQ ID NO: 2559063 - DNA, 25 bp, Homo sapien
ctaaagtcccatgcctaagttctta

SEQ ID NO: 2559064 - DNA, 25 bp, Homo sapien
taaagtcccatgcctaagttcttac

SEQ ID NO: 2559065 - DNA, 25 bp, Homo sapien
cagtctgttggttgaagcgagtcgt

SEQ ID NO: 2559066 - DNA, 25 bp, Homo sapien
tggttgaagcgagtcgtaaggcaat

SEQ ID NO: 2559067 - DNA, 25 bp, Homo sapien
tctgttggttgaagcgagtcgtaag

SEQ ID NO: 2559068 - DNA, 25 bp, Homo sapien
ttggttgaagcgagtcgtaaggcaa

SEQ ID NO: 2559069 - DNA, 25 bp, Homo sapien
ttttcatccaagttgtcatctttct

SEQ ID NO: 2559070 - DNA, 25 bp, Homo sapien
tgtcatctttctcccctcccctctg

SEQ ID NO: 2559071 - DNA, 25 bp, Homo sapien
catctttctcccctcccctctgcat

SEQ ID NO: 2559072 - DNA, 25 bp, Homo sapien
tttcatccaagttgtcatctttctc

SEQ ID NO: 2559073 - DNA, 25 bp, Homo sapien
cattcccaccaattgttgttcaggt

SEQ ID NO: 2559074 - DNA, 25 bp, Homo sapien
tcacattcccaccaattgttgttca

SEQ ID NO: 2559075 - DNA, 25 bp, Homo sapien
acattcccaccaattgttgttcagg

SEQ ID NO: 2559076 - DNA, 25 bp, Homo sapien
attcccaccaattgttgttcaggtt

SEQ ID NO: 2559077 - DNA, 25 bp, Homo sapien
cctgttgacattgctcacgcacacc

SEQ ID NO: 2559078 - DNA, 25 bp, Homo sapien
tgttgacattgctcacgcacaccac

SEQ ID NO: 2559079 - DNA, 25 bp, Homo sapien
gttgacattgctcacgcacaccaca

SEQ ID NO: 2559080 - DNA, 25 bp, Homo sapien
ttgacattgctcacgcacaccacag

SEQ ID NO: 2559081 - DNA, 25 bp, Homo sapien
tgatcacgtgcacaggctgaaaggt

SEQ ID NO: 2559082 - DNA, 25 bp, Homo sapien
agcagacggtgtgaagaaagctttt

SEQ ID NO: 2559083 - DNA, 25 bp, Homo sapien
tggaacacagatcttccaccactgt

SEQ ID NO: 2559084 - DNA, 25 bp, Homo sapien
ttctctatctttcctgaggaggtca

SEQ ID NO: 2559085 - DNA, 25 bp, Homo sapien
tccactacgcattaccctctctgtg

SEQ ID NO: 2559086 - DNA, 25 bp, Homo sapien
aggtggctccactacgcattaccct

SEQ ID NO: 2559087 - DNA, 25 bp, Homo sapien
tgaggtggctccactacgcattacc

SEQ ID NO: 2559088 - DNA, 25 bp, Homo sapien
tgtgaggtggctccactacgcatta

SEQ ID NO: 2559089 - DNA, 25 bp, Homo sapien
ctaccagtggagttgtgggttgtca

SEQ ID NO: 2559090 - DNA, 25 bp, Homo sapien
taccagtggagttgtgggttgtcat

SEQ ID NO: 2559091 - DNA, 25 bp, Homo sapien
ctgctaccagtggagttgtgggttg

SEQ ID NO: 2559092 - DNA, 25 bp, Homo sapien
gctaccagtggagttgtgggttgtc

SEQ ID NO: 2559093 - DNA, 25 bp, Homo sapien
ggtcaagtgccatcgccaacagaat

SEQ ID NO: 2559094 - DNA, 25 bp, Homo sapien
gatgatgaggctgttcccaaggaaa

SEQ ID NO: 2559095 - DNA, 25 bp, Homo sapien
tagtagacaggataaggtcagccac

SEQ ID NO: 2559096 - DNA, 25 bp, Homo sapien
gccaccaagggatattgctccagca

SEQ ID NO: 2559097 - DNA, 25 bp, Homo sapien
ttgctatggcagaaaggcagccgct

SEQ ID NO: 2559098 - DNA, 25 bp, Homo sapien
tgaatatcagcacaagcaaacttgg

SEQ ID NO: 2559099 - DNA, 25 bp, Homo sapien
catctggcatgatcacacagaagct

SEQ ID NO: 2559100 - DNA, 25 bp, Homo sapien
cagtaggtatgtggcagcagattgc

SEQ ID NO: 2559101 - DNA, 25 bp, Homo sapien
atagagaaggacagacaagccatac

SEQ ID NO: 2559102 - DNA, 25 bp, Homo sapien
aggatgaagctataggacactaaga

SEQ ID NO: 2559103 - DNA, 25 bp, Homo sapien
acagtatagagaaggacagacaagc

SEQ ID NO: 2559104 - DNA, 25 bp, Homo sapien
tataggacactaagataagcaaggc

SEQ ID NO: 2559105 - DNA, 25 bp, Homo sapien
agagccttttgccgagctccttggg

SEQ ID NO: 2559106 - DNA, 25 bp, Homo sapien
ccttttgccgagctccttggggagg

SEQ ID NO: 2559107 - DNA, 25 bp, Homo sapien
cccagagccttttgccgagctcctt

SEQ ID NO: 2559108 - DNA, 25 bp, Homo sapien
agccttttgccgagctccttgggga

SEQ ID NO: 2559109 - DNA, 25 bp, Homo sapien
caggcaagtagaacatggaaatgac

SEQ ID NO: 2559110 - DNA, 25 bp, Homo sapien
tagccagcagaatgtgtgtatggag

SEQ ID NO: 2559111 - DNA, 25 bp, Homo sapien
cagaatgtgtgtatggagaggaaca

SEQ ID NO: 2559112 - DNA, 25 bp, Homo sapien
attagccagcagaatgtgtgtatgg

SEQ ID NO: 2559113 - DNA, 25 bp, Homo sapien
gccagcagaatgtgtgtatggagag

SEQ ID NO: 2559114 - DNA, 25 bp, Homo sapien
tcagcatgggaggagccaacacgca

SEQ ID NO: 2559115 - DNA, 25 bp, Homo sapien
gcatgggaggagccaacacgcagac

SEQ ID NO: 2559116 - DNA, 25 bp, Homo sapien
ggttcagcatgggaggagccaacac

SEQ ID NO: 2559117 - DNA, 25 bp, Homo sapien
ctggtgttgatcccataaatgatgg

SEQ ID NO: 2559118 - DNA, 25 bp, Homo sapien
aggacaaaagactgagcacacactc

SEQ ID NO: 2559119 - DNA, 25 bp, Homo sapien
tcatgatcagtcactttatccatag

SEQ ID NO: 2559120 - DNA, 25 bp, Homo sapien
tagtcagtggaatcttaattcgtag

SEQ ID NO: 2559121 - DNA, 25 bp, Homo sapien
cagtggaatcttaattcgtaggtct

SEQ ID NO: 2559122 - DNA, 25 bp, Homo sapien
aagtcatgatcagtcactttatcca

SEQ ID NO: 2559123 - DNA, 25 bp, Homo sapien
tgacaaagtcgaccagttccttggg

SEQ ID NO: 2559124 - DNA, 25 bp, Homo sapien
ataaatgacaaagtcgaccagttcc

SEQ ID NO: 2559125 - DNA, 25 bp, Homo sapien
aaatgacaaagtcgaccagttcctt

SEQ ID NO: 2559126 - DNA, 25 bp, Homo sapien
aatgacaaagtcgaccagttccttg

SEQ ID NO: 2559127 - DNA, 25 bp, Homo sapien
ttccagaagagtaaatgttacatcc

SEQ ID NO: 2559128 - DNA, 25 bp, Homo sapien
tccagaagagtaaatgttacatccg

SEQ ID NO: 2559129 - DNA, 25 bp, Homo sapien
ctctggaatgcacctttcttgggca

SEQ ID NO: 2559130 - DNA, 25 bp, Homo sapien
tctggaatgcacctttcttgggcaa

SEQ ID NO: 2559131 - DNA, 25 bp, Homo sapien
tggtacatcgctattaactaaagtc

SEQ ID NO: 2559132 - DNA, 25 bp, Homo sapien
catgaccttgagagtcttgaagaac

SEQ ID NO: 2559133 - DNA, 25 bp, Homo sapien
tggctaggtattttacagaagatca

SEQ ID NO: 2559134 - DNA, 25 bp, Homo sapien
catttctaggatggagaggacaatc

SEQ ID NO: 2559135 - DNA, 25 bp, Homo sapien
tctaagcaagagctttatactaaat

SEQ ID NO: 2559136 - DNA, 25 bp, Homo sapien
atcagatctaagcaagagctttata

SEQ ID NO: 2559137 - DNA, 25 bp, Homo sapien
ggatcagatctaagcaagagcttta

SEQ ID NO: 2559138 - DNA, 25 bp, Homo sapien
caggatcagatctaagcaagagctt

SEQ ID NO: 2559139 - DNA, 25 bp, Homo sapien
agagattccaggcagtagttgtcca

SEQ ID NO: 2559140 - DNA, 25 bp, Homo sapien
aggaaggtagactgaccagaagtgc

SEQ ID NO: 2559141 - DNA, 25 bp, Homo sapien
actgaccagaagtgctggtgttgca

SEQ ID NO: 2559142 - DNA, 25 bp, Homo sapien
acatagagattccaggcagtagttg

SEQ ID NO: 2559143 - DNA, 25 bp, Homo sapien
tcagaggctgccaacatggacagga

SEQ ID NO: 2559144 - DNA, 25 bp, Homo sapien
agccagaagagacgcaccatagtgg

SEQ ID NO: 2559145 - DNA, 25 bp, Homo sapien
aggatgatattattacccaggatgg

SEQ ID NO: 2559146 - DNA, 25 bp, Homo sapien
aagaggatgatattattacccagga

SEQ ID NO: 2559147 - DNA, 25 bp, Homo sapien
tgcacagagatcaaagggcagctca

SEQ ID NO: 2559148 - DNA, 25 bp, Homo sapien
gcacagagatcaaagggcagctcac

SEQ ID NO: 2559149 - DNA, 25 bp, Homo sapien
ctgcacagagatcaaagggcagctc

SEQ ID NO: 2559150 - DNA, 25 bp, Homo sapien
ccacaaggtcacagtgcaggcagta

SEQ ID NO: 2559151 - DNA, 25 bp, Homo sapien
atggcagttcccacctcggctgtga

SEQ ID NO: 2559152 - DNA, 25 bp, Homo sapien
caataaagcgatcgaaggccatggc

SEQ ID NO: 2559153 - DNA, 25 bp, Homo sapien
cagagagcgctgatcttgggaaaga

SEQ ID NO: 2559154 - DNA, 25 bp, Homo sapien
ggaaggagtcaaggcacagtgagaa

SEQ ID NO: 2559155 - DNA, 25 bp, Homo sapien
taggatcagggcatatgaaagcatg

SEQ ID NO: 2559156 - DNA, 25 bp, Homo sapien
aaagcatgatgaggaaggagtcaag

SEQ ID NO: 2559157 - DNA, 25 bp, Homo sapien
agtcaaggcacagtgagaagaggat

SEQ ID NO: 2559158 - DNA, 25 bp, Homo sapien
cagacagcccgtttgggcaaataaa

SEQ ID NO: 2559159 - DNA, 25 bp, Homo sapien
ccgtttgggcaaataaaagatgaga

SEQ ID NO: 2559160 - DNA, 25 bp, Homo sapien
tgagacacacgtgttgagtgccttg

SEQ ID NO: 2559161 - DNA, 25 bp, Homo sapien
ctcggtgcaagacagacagcccgtt

SEQ ID NO: 2559162 - DNA, 25 bp, Homo sapien
gctctgacggatctgcctagacttg

SEQ ID NO: 2559163 - DNA, 25 bp, Homo sapien
gttcatgaagggtgggaccaagaag

SEQ ID NO: 2559164 - DNA, 25 bp, Homo sapien
tgtaggttggccatgagcactgcca

SEQ ID NO: 2559165 - DNA, 25 bp, Homo sapien
tgccagagcagggtagtcatgcttc

SEQ ID NO: 2559166 - DNA, 25 bp, Homo sapien
cagtgtatatgctaagcagaaaggg

SEQ ID NO: 2559167 - DNA, 25 bp, Homo sapien
tgtatatgctaagcagaaagggatg

SEQ ID NO: 2559168 - DNA, 25 bp, Homo sapien
tatatgctaagcagaaagggatgga

SEQ ID NO: 2559169 - DNA, 25 bp, Homo sapien
gcagttggatgtgttaaggtgatat

SEQ ID NO: 2559170 - DNA, 25 bp, Homo sapien
agcagtgagcgatcactgggcctcg

SEQ ID NO: 2559171 - DNA, 25 bp, Homo sapien
tagcagtgagcgatcactgggcctc

SEQ ID NO: 2559172 - DNA, 25 bp, Homo sapien
gcagtgagcgatcactgggcctcgg

SEQ ID NO: 2559173 - DNA, 25 bp, Homo sapien
gtagcagtgagcgatcactgggcct

SEQ ID NO: 2559174 - DNA, 25 bp, Homo sapien
aaagatataagacaggataacaagg

SEQ ID NO: 2559175 - DNA, 25 bp, Homo sapien
ctagtgtccccacacgccagcctca

SEQ ID NO: 2559176 - DNA, 25 bp, Homo sapien
caataaacatggccacagcgatgcc

SEQ ID NO: 2559177 - DNA, 25 bp, Homo sapien
ataaacatggccacagcgatgccat

SEQ ID NO: 2559178 - DNA, 25 bp, Homo sapien
acggtgcatgactgaagagatgacc

SEQ ID NO: 2559179 - DNA, 25 bp, Homo sapien
tgggaagagcagatagaaattggca

SEQ ID NO: 2559180 - DNA, 25 bp, Homo sapien
gtagaaggctaagatggcacctata

SEQ ID NO: 2559181 - DNA, 25 bp, Homo sapien
gctaagatggcacctatatgagaga

SEQ ID NO: 2559182 - DNA, 25 bp, Homo sapien
tcttgggaatactcccaagatgctc

SEQ ID NO: 2559183 - DNA, 25 bp, Homo sapien
tttcttgggaatactcccaagatgc

SEQ ID NO: 2559184 - DNA, 25 bp, Homo sapien
ctttcttgggaatactcccaagatg

SEQ ID NO: 2559185 - DNA, 25 bp, Homo sapien
ttcttgggaatactcccaagatgct

SEQ ID NO: 2559186 - DNA, 25 bp, Homo sapien
tcctcagggatcacagacggctctg

SEQ ID NO: 2559187 - DNA, 25 bp, Homo sapien
gcacttgaggagaatcctcagggat

SEQ ID NO: 2559188 - DNA, 25 bp, Homo sapien
cctcagggatcacagacggctctgg

SEQ ID NO: 2559189 - DNA, 25 bp, Homo sapien
gaatcctcagggatcacagacggct

SEQ ID NO: 2559190 - DNA, 25 bp, Homo sapien
gtacatctccccttgtaaacatgca

SEQ ID NO: 2559191 - DNA, 25 bp, Homo sapien
aaacacagctattgtacatctcccc

SEQ ID NO: 2559192 - DNA, 25 bp, Homo sapien
aacatgcattttcctcaatccaagc

SEQ ID NO: 2559193 - DNA, 25 bp, Homo sapien
cacatagaaaatggatggcatctct

SEQ ID NO: 2559194 - DNA, 25 bp, Homo sapien
cttgttgatcttcataggctccttc

SEQ ID NO: 2559195 - DNA, 25 bp, Homo sapien
ccttgttgatcttcataggctcctt

SEQ ID NO: 2559196 - DNA, 25 bp, Homo sapien
tgttgatcttcataggctccttcac

SEQ ID NO: 2559197 - DNA, 25 bp, Homo sapien
ttgttgatcttcataggctccttca

SEQ ID NO: 2559198 - DNA, 25 bp, Homo sapien
cagcctggatgatgagaaggagggt

SEQ ID NO: 2559199 - DNA, 25 bp, Homo sapien
atcagcctggatgatgagaaggagg

SEQ ID NO: 2559200 - DNA, 25 bp, Homo sapien
gggacccagtcaggaccgtggtgta

SEQ ID NO: 2559201 - DNA, 25 bp, Homo sapien
caagcagggccagtgtatatgctga

SEQ ID NO: 2559202 - DNA, 25 bp, Homo sapien
gatattgttgaagctagtgttccca

SEQ ID NO: 2559203 - DNA, 25 bp, Homo sapien
catagatattgttgaagctagtgtt

SEQ ID NO: 2559204 - DNA, 25 bp, Homo sapien
tgttgaagctagtgttcccacagcc

SEQ ID NO: 2559205 - DNA, 25 bp, Homo sapien
tattgttgaagctagtgttcccaca

SEQ ID NO: 2559206 - DNA, 25 bp, Homo sapien
gataggatgataaagaatagatcca

SEQ ID NO: 2559207 - DNA, 25 bp, Homo sapien
gatgataaagaatagatccaacact

SEQ ID NO: 2559208 - DNA, 25 bp, Homo sapien
gaatagatccaacactccaataaac

SEQ ID NO: 2559209 - DNA, 25 bp, Homo sapien
taaagaatagatccaacactccaat

SEQ ID NO: 2559210 - DNA, 25 bp, Homo sapien
atgtcccaaatgctttgtagcgggc

SEQ ID NO: 2559211 - DNA, 25 bp, Homo sapien
tcccaaatgctttgtagcgggcctc

SEQ ID NO: 2559212 - DNA, 25 bp, Homo sapien
tgtcccaaatgctttgtagcgggcc

SEQ ID NO: 2559213 - DNA, 25 bp, Homo sapien
gtcccaaatgctttgtagcgggcct

SEQ ID NO: 2559214 - DNA, 25 bp, Homo sapien
tagaaggctaagatggcacctatgt

SEQ ID NO: 2559215 - DNA, 25 bp, Homo sapien
aagagcagatagaaattggcgagga

SEQ ID NO: 2559216 - DNA, 25 bp, Homo sapien
acagcgggccacacggtgcatgact

SEQ ID NO: 2559217 - DNA, 25 bp, Homo sapien
aagagatgactgaaggtgtgtagaa

SEQ ID NO: 2559218 - DNA, 25 bp, Homo sapien
gggaatactcccaagactgtcacgg

SEQ ID NO: 2559219 - DNA, 25 bp, Homo sapien
ctttctcgggaatactcccaagact

SEQ ID NO: 2559220 - DNA, 25 bp, Homo sapien
tactcccaagactgtcacggatctg

SEQ ID NO: 2559221 - DNA, 25 bp, Homo sapien
cccaagactgtcacggatctgcttg

SEQ ID NO: 2559222 - DNA, 25 bp, Homo sapien
taaacgtggagtctagcacccatct

SEQ ID NO: 2559223 - DNA, 25 bp, Homo sapien
tacagcattcactgtgccccactct

SEQ ID NO: 2559224 - DNA, 25 bp, Homo sapien
gagtctagcacccatctactctcag

SEQ ID NO: 2559225 - DNA, 25 bp, Homo sapien
aaagaactaaacgtggagtctagca

SEQ ID NO: 2559226 - DNA, 25 bp, Homo sapien
ggccggagggtcaagactctgtcaa

SEQ ID NO: 2559227 - DNA, 25 bp, Homo sapien
taggcctaaaggatgcatgtgcacc

SEQ ID NO: 2559228 - DNA, 25 bp, Homo sapien
cactggatggagtagaggtcctaac

SEQ ID NO: 2559229 - DNA, 25 bp, Homo sapien
aatccagaggctaccagagggcaaa

SEQ ID NO: 2559230 - DNA, 25 bp, Homo sapien
tgcactcgaatggttcccacaacaa

SEQ ID NO: 2559231 - DNA, 25 bp, Homo sapien
ctgcactcgaatggttcccacaaca

SEQ ID NO: 2559232 - DNA, 25 bp, Homo sapien
actcgaatggttcccacaacaatgc

SEQ ID NO: 2559233 - DNA, 25 bp, Homo sapien
gcactcgaatggttcccacaacaat

SEQ ID NO: 2559234 - DNA, 25 bp, Homo sapien
aagggtacagttgcctagcagggcc

SEQ ID NO: 2559235 - DNA, 25 bp, Homo sapien
ttgaggtgatattagagggaagcat

SEQ ID NO: 2559236 - DNA, 25 bp, Homo sapien
gatccaggcatgcaggtgttccaaa

SEQ ID NO: 2559237 - DNA, 25 bp, Homo sapien
ctggataatgaagagaagggtacag

SEQ ID NO: 2559238 - DNA, 25 bp, Homo sapien
gcagcgttgtagaagaaagaaccaa

SEQ ID NO: 2559239 - DNA, 25 bp, Homo sapien
cctcggcagtagtggaagcgtctga

SEQ ID NO: 2559240 - DNA, 25 bp, Homo sapien
attttgggcagcgttgtagaagaaa

SEQ ID NO: 2559241 - DNA, 25 bp, Homo sapien
aagaaccaagtcaatggttgccaac

SEQ ID NO: 2559242 - DNA, 25 bp, Homo sapien
acaggatggcacctatgtgagacac

SEQ ID NO: 2559243 - DNA, 25 bp, Homo sapien
ataagacaggataacaaagagcagg

SEQ ID NO: 2559244 - DNA, 25 bp, Homo sapien
catatatgataggattgaccatggg

SEQ ID NO: 2559245 - DNA, 25 bp, Homo sapien
aaatagcaaggagtatgtggacacg

SEQ ID NO: 2559246 - DNA, 25 bp, Homo sapien
ctacatgttctttctctggaataga

SEQ ID NO: 2559247 - DNA, 25 bp, Homo sapien
atgttctttctctggaatagactga

SEQ ID NO: 2559248 - DNA, 25 bp, Homo sapien
gttctttctctggaatagactgagc

SEQ ID NO: 2559249 - DNA, 25 bp, Homo sapien
tctttctctggaatagactgagcac

SEQ ID NO: 2559250 - DNA, 25 bp, Homo sapien
ggtattgttgatccactgaaatcag

SEQ ID NO: 2559251 - DNA, 25 bp, Homo sapien
cactgaaatcagtcgtaggatcctg

SEQ ID NO: 2559252 - DNA, 25 bp, Homo sapien
aatcagtcgtaggatcctggaagag

SEQ ID NO: 2559253 - DNA, 25 bp, Homo sapien
ctggattttctggtattgttgatcc

SEQ ID NO: 2559254 - DNA, 25 bp, Homo sapien
cgtcaaaatgcctctcccagggttt

SEQ ID NO: 2559255 - DNA, 25 bp, Homo sapien
gtcatatgaaatagcactgtctgta

SEQ ID NO: 2559256 - DNA, 25 bp, Homo sapien
catatgaaatagcactgtctgtatc

SEQ ID NO: 2559257 - DNA, 25 bp, Homo sapien
cagtcatatgaaatagcactgtctg

SEQ ID NO: 2559258 - DNA, 25 bp, Homo sapien
tcagtcatatgaaatagcactgtct

SEQ ID NO: 2559259 - DNA, 25 bp, Homo sapien
tccaagagggtaactaaatatccag

SEQ ID NO: 2559260 - DNA, 25 bp, Homo sapien
cttggcatccttgagtacctctggc

SEQ ID NO: 2559261 - DNA, 25 bp, Homo sapien
tgtgtgaactcaatatccctcttgg

SEQ ID NO: 2559262 - DNA, 25 bp, Homo sapien
ccccaagggaggattgtcagagacc

SEQ ID NO: 2559263 - DNA, 25 bp, Homo sapien
cagttcacgagtttcttgccccgga

SEQ ID NO: 2559264 - DNA, 25 bp, Homo sapien
ggattactctgcaaacacagggaga

SEQ ID NO: 2559265 - DNA, 25 bp, Homo sapien
tatgaggtatcagaaaccctgtccc

SEQ ID NO: 2559266 - DNA, 25 bp, Homo sapien
ttttaatcctaaccagactgagctg

SEQ ID NO: 2559267 - DNA, 25 bp, Homo sapien
tggtgaattgtggacacaagaggaa

SEQ ID NO: 2559268 - DNA, 25 bp, Homo sapien
gtgatctgaattgcttggtgaattg

SEQ ID NO: 2559269 - DNA, 25 bp, Homo sapien
tgagaccaagtgtgaactggtctca

SEQ ID NO: 2559270 - DNA, 25 bp, Homo sapien
accaagtgtgaactggtctcatctg

SEQ ID NO: 2559271 - DNA, 25 bp, Homo sapien
tgagcagacattatgaaaagtgagc

SEQ ID NO: 2559272 - DNA, 25 bp, Homo sapien
gtactgagcagacattatgaaaagt

SEQ ID NO: 2559273 - DNA, 25 bp, Homo sapien
gagcagacattatgaaaagtgagca

SEQ ID NO: 2559274 - DNA, 25 bp, Homo sapien
actgagcagacattatgaaaagtga

SEQ ID NO: 2559275 - DNA, 25 bp, Homo sapien
agccagacgtgtagggactccagcc

SEQ ID NO: 2559276 - DNA, 25 bp, Homo sapien
agagccagacgtgtagggactccag

SEQ ID NO: 2559277 - DNA, 25 bp, Homo sapien
gagagccagacgtgtagggactcca

SEQ ID NO: 2559278 - DNA, 25 bp, Homo sapien
atggagagccagacgtgtagggact

SEQ ID NO: 2559279 - DNA, 25 bp, Homo sapien
acagaggtgagaagcgcatgtcccc

SEQ ID NO: 2559280 - DNA, 25 bp, Homo sapien
ggatcaacaccagaaagccgatgct

SEQ ID NO: 2559281 - DNA, 25 bp, Homo sapien
aatgtcacaagcaccgaaccagaag

SEQ ID NO: 2559282 - DNA, 25 bp, Homo sapien
gataaggaacatttggcccaagcag

SEQ ID NO: 2559283 - DNA, 25 bp, Homo sapien
ggtatcaggtaatgcacgggcacca

SEQ ID NO: 2559284 - DNA, 25 bp, Homo sapien
taggatagaacacatagtcaggtgg

SEQ ID NO: 2559285 - DNA, 25 bp, Homo sapien
ttcccagcaccaacgagaagggtaa

SEQ ID NO: 2559286 - DNA, 25 bp, Homo sapien
caaatgtctgttttgtcccgttgca

SEQ ID NO: 2559287 - DNA, 25 bp, Homo sapien
gatcacgtacaggtcagctagcagg

SEQ ID NO: 2559288 - DNA, 25 bp, Homo sapien
tcaccatcttgggtaccaccgagga

SEQ ID NO: 2559289 - DNA, 25 bp, Homo sapien
tgagaagaatgcaatcccgtaagat

SEQ ID NO: 2559290 - DNA, 25 bp, Homo sapien
taacctggccaaagctatgtgctca

SEQ ID NO: 2559291 - DNA, 25 bp, Homo sapien
tacaggtcagctagcagcacttggg

SEQ ID NO: 2559292 - DNA, 25 bp, Homo sapien
tcaccatcttgggtaccacggagga

SEQ ID NO: 2559293 - DNA, 25 bp, Homo sapien
gtgacagctctgatggtgacggcca

SEQ ID NO: 2559294 - DNA, 25 bp, Homo sapien
gctggacccagcatcacaggtgaga

SEQ ID NO: 2559295 - DNA, 25 bp, Homo sapien
ttttttctctaagtggcaggatcag

SEQ ID NO: 2559296 - DNA, 25 bp, Homo sapien
aaatgctgcgcatacccagagctgg

SEQ ID NO: 2559297 - DNA, 25 bp, Homo sapien
tcaggacaccattagatgggctttc

SEQ ID NO: 2559298 - DNA, 25 bp, Homo sapien
cccctgaggtttgctataactaagc

SEQ ID NO: 2559299 - DNA, 25 bp, Homo sapien
tgttgtagaaaaagtccgtctgcta

SEQ ID NO: 2559300 - DNA, 25 bp, Homo sapien
tgctaaggctacatccaggaatggg

SEQ ID NO: 2559301 - DNA, 25 bp, Homo sapien
aaaaagtccgtctgctaaggctaca

SEQ ID NO: 2559302 - DNA, 25 bp, Homo sapien
agcgccatggggaaaagctgaagat

SEQ ID NO: 2559303 - DNA, 25 bp, Homo sapien
ggaatttgtccacgacagagcctca

SEQ ID NO: 2559304 - DNA, 25 bp, Homo sapien
gatggacaccatcctacagttagcc

SEQ ID NO: 2559305 - DNA, 25 bp, Homo sapien
tgacacaccactaacacagacagct

SEQ ID NO: 2559306 - DNA, 25 bp, Homo sapien
caaaactaactgagggtgtggctca

SEQ ID NO: 2559307 - DNA, 25 bp, Homo sapien
agggactttcctgttgtgcgatgtt

SEQ ID NO: 2559308 - DNA, 25 bp, Homo sapien
tctattgtgccttcgtgtctttgca

SEQ ID NO: 2559309 - DNA, 25 bp, Homo sapien
gttctattgtgccttcgtgtctttg

SEQ ID NO: 2559310 - DNA, 25 bp, Homo sapien
cctgttgtgcgatgttctattgtgc

SEQ ID NO: 2559311 - DNA, 25 bp, Homo sapien
cccaaggggatcgaagctgtgtcag

SEQ ID NO: 2559312 - DNA, 25 bp, Homo sapien
gggatcgaagctgtgtcagggactc

SEQ ID NO: 2559313 - DNA, 25 bp, Homo sapien
taactacccaaggggatcgaagctg

SEQ ID NO: 2559314 - DNA, 25 bp, Homo sapien
tacccaaggggatcgaagctgtgtc

SEQ ID NO: 2559315 - DNA, 25 bp, Homo sapien
ggaggccgcccaattatagcttctc

SEQ ID NO: 2559316 - DNA, 25 bp, Homo sapien
tggggcccctcaggagtgtgtagag

SEQ ID NO: 2559317 - DNA, 25 bp, Homo sapien
agagtgatggagagtgaacgagtcg

SEQ ID NO: 2559318 - DNA, 25 bp, Homo sapien
tgaacgagtcgggtctccctggcac

SEQ ID NO: 2559319 - DNA, 25 bp, Homo sapien
ctggatagcctatgggcctcccact

SEQ ID NO: 2559320 - DNA, 25 bp, Homo sapien
gagattcagccatataacctaccgc

SEQ ID NO: 2559321 - DNA, 25 bp, Homo sapien
acctaccgcctccttgatagttcta

SEQ ID NO: 2559322 - DNA, 25 bp, Homo sapien
cactgttctaagcctgtgtcctgag

SEQ ID NO: 2559323 - DNA, 25 bp, Homo sapien
ataacctaccgcctccttgatagtt

SEQ ID NO: 2559324 - DNA, 25 bp, Homo sapien
tacccaccaaaaggaagtatgctgc

SEQ ID NO: 2559325 - DNA, 25 bp, Homo sapien
caaaagtgtatggtaggccccaggc

SEQ ID NO: 2559326 - DNA, 25 bp, Homo sapien
gatgaggacaatggtcaggttaccc

SEQ ID NO: 2559327 - DNA, 25 bp, Homo sapien
taggtcaatagtggaaagcatggcc

SEQ ID NO: 2559328 - DNA, 25 bp, Homo sapien
aagcatggcgcaatgggtggcaaat

SEQ ID NO: 2559329 - DNA, 25 bp, Homo sapien
agaagcatggcgcaatgggtggcaa

SEQ ID NO: 2559330 - DNA, 25 bp, Homo sapien
gaagcatggcgcaatgggtggcaaa

SEQ ID NO: 2559331 - DNA, 25 bp, Homo sapien
gccaatgaagagagagtccacaccc

SEQ ID NO: 2559332 - DNA, 25 bp, Homo sapien
ccaaaacagcccacaggatgaggat

SEQ ID NO: 2559333 - DNA, 25 bp, Homo sapien
cctggtcagggcagatagtccaatc

SEQ ID NO: 2559334 - DNA, 25 bp, Homo sapien
tgtttggcagtaggacaaccacttg

SEQ ID NO: 2559335 - DNA, 25 bp, Homo sapien
tacagaggacccttgaacagatctc

SEQ ID NO: 2559336 - DNA, 25 bp, Homo sapien
aacagatctctttggtcttggctcc

SEQ ID NO: 2559337 - DNA, 25 bp, Homo sapien
gtaggtattagccataaccacatgg

SEQ ID NO: 2559338 - DNA, 25 bp, Homo sapien
ggttgactacaggtggtagcagcaa

SEQ ID NO: 2559339 - DNA, 25 bp, Homo sapien
acaccagccacgtaagaccaatgac

SEQ ID NO: 2559340 - DNA, 25 bp, Homo sapien
gtaagaccaatgacatctggtttct

SEQ ID NO: 2559341 - DNA, 25 bp, Homo sapien
gccacgtaagaccaatgacatctgg

SEQ ID NO: 2559342 - DNA, 25 bp, Homo sapien
accagccacgtaagaccaatgacat

SEQ ID NO: 2559343 - DNA, 25 bp, Homo sapien
ctcaaccgtatggaaggaatgtgtg

SEQ ID NO: 2559344 - DNA, 25 bp, Homo sapien
ttcctccagaagaggtctggcaggc

SEQ ID NO: 2559345 - DNA, 25 bp, Homo sapien
tgaaatacagcctctctgtctccgc

SEQ ID NO: 2559346 - DNA, 25 bp, Homo sapien
agaggtctggcaggctgcactgaaa

SEQ ID NO: 2559347 - DNA, 25 bp, Homo sapien
aactgtgaccagcaccaggcaggta

SEQ ID NO: 2559348 - DNA, 25 bp, Homo sapien
gaagaagctgaactgtgaccagcac

SEQ ID NO: 2559349 - DNA, 25 bp, Homo sapien
gtgaccagcaccaggcaggtagagg

SEQ ID NO: 2559350 - DNA, 25 bp, Homo sapien
tgtgaccagcaccaggcaggtagag

SEQ ID NO: 2559351 - DNA, 25 bp, Homo sapien
gattcattgccattgggatccacca

SEQ ID NO: 2559352 - DNA, 25 bp, Homo sapien
attcattgccattgggatccaccat

SEQ ID NO: 2559353 - DNA, 25 bp, Homo sapien
ctggattcattgccattgggatcca

SEQ ID NO: 2559354 - DNA, 25 bp, Homo sapien
ggattcattgccattgggatccacc

SEQ ID NO: 2559355 - DNA, 25 bp, Homo sapien
agcacaatgggaaggccaaccagaa

SEQ ID NO: 2559356 - DNA, 25 bp, Homo sapien
caataaggtagagggagcacaatgg

SEQ ID NO: 2559357 - DNA, 25 bp, Homo sapien
gaggcctattaggatgaagtatgta

SEQ ID NO: 2559358 - DNA, 25 bp, Homo sapien
cctcttctaaaccagggaggcctat

SEQ ID NO: 2559359 - DNA, 25 bp, Homo sapien
taaggccatagacgacattgacccg

SEQ ID NO: 2559360 - DNA, 25 bp, Homo sapien
caacgtaagtactgtggcatggcgc

SEQ ID NO: 2559361 - DNA, 25 bp, Homo sapien
taaagcgatgcaccatggacaatcc

SEQ ID NO: 2559362 - DNA, 25 bp, Homo sapien
ccaattttggtgacacgaggcaacg

SEQ ID NO: 2559363 - DNA, 25 bp, Homo sapien
gatgcgctgtcgaatctcctttgtc

SEQ ID NO: 2559364 - DNA, 25 bp, Homo sapien
gccacatggaaaagtcgaaggatgc

SEQ ID NO: 2559365 - DNA, 25 bp, Homo sapien
caagatgacgggcagcggagagtca

SEQ ID NO: 2559366 - DNA, 25 bp, Homo sapien
gagcacaggaggaaccagcagatag

SEQ ID NO: 2559367 - DNA, 25 bp, Homo sapien
taacccttggtaatagcccctcaga

SEQ ID NO: 2559368 - DNA, 25 bp, Homo sapien
taatacccaactcaaagaaggctgg

SEQ ID NO: 2559369 - DNA, 25 bp, Homo sapien
tccccttaagtgctagtgtccagag

SEQ ID NO: 2559370 - DNA, 25 bp, Homo sapien
aaataaccggtgtcaagcataagca

SEQ ID NO: 2559371 - DNA, 25 bp, Homo sapien
ggaataaacaaggtacagcagccac

SEQ ID NO: 2559372 - DNA, 25 bp, Homo sapien
tcagtgcgcccatggaggaataaac

SEQ ID NO: 2559373 - DNA, 25 bp, Homo sapien
taaagcagagggagtatacggagac

SEQ ID NO: 2559374 - DNA, 25 bp, Homo sapien
agagcataggccacgtgttcccctg

SEQ ID NO: 2559375 - DNA, 25 bp, Homo sapien
gaatcctgactggaatggttcacac

SEQ ID NO: 2559376 - DNA, 25 bp, Homo sapien
tagatctgtgagcattcaactgtgc

SEQ ID NO: 2559377 - DNA, 25 bp, Homo sapien
tgtagcttcactaaacaagtcttgg

SEQ ID NO: 2559378 - DNA, 25 bp, Homo sapien
gatctgaatacaatcattgggccta

SEQ ID NO: 2559379 - DNA, 25 bp, Homo sapien
ttgaaggatcatcccacacagcaga

SEQ ID NO: 2559380 - DNA, 25 bp, Homo sapien
ctgctatttgaaggatcatcccaca

SEQ ID NO: 2559381 - DNA, 25 bp, Homo sapien
cttgtgcacagaattcttgggtctg

SEQ ID NO: 2559382 - DNA, 25 bp, Homo sapien
ctgccccctgctatttgaaggatca

SEQ ID NO: 2559383 - DNA, 25 bp, Homo sapien
agaagcagatgtctttgaggaaaag

SEQ ID NO: 2559384 - DNA, 25 bp, Homo sapien
gatgagcgaagaagcagatgtcttt

SEQ ID NO: 2559385 - DNA, 25 bp, Homo sapien
tgagcgaagaagcagatgtctttga

SEQ ID NO: 2559386 - DNA, 25 bp, Homo sapien
aagcagatgtctttgaggaaaagaa

SEQ ID NO: 2559387 - DNA, 25 bp, Homo sapien
cagatctgacgggtttcaaggccag

SEQ ID NO: 2559388 - DNA, 25 bp, Homo sapien
tggtggagcacatgactacggcaga

SEQ ID NO: 2559389 - DNA, 25 bp, Homo sapien
cagagcggacgatcagaacatagga

SEQ ID NO: 2559390 - DNA, 25 bp, Homo sapien
gatcatgccattcccagagatagca

SEQ ID NO: 2559391 - DNA, 25 bp, Homo sapien
ttagaaagaaatgctttgagcacag

SEQ ID NO: 2559392 - DNA, 25 bp, Homo sapien
aatgctttgagcacagccttgcgaa

SEQ ID NO: 2559393 - DNA, 25 bp, Homo sapien
atgctttgagcacagccttgcgaat

SEQ ID NO: 2559394 - DNA, 25 bp, Homo sapien
agaaatgctttgagcacagccttgc

SEQ ID NO: 2559395 - DNA, 25 bp, Homo sapien
tggcagaatcttaagctgagtgtct

SEQ ID NO: 2559396 - DNA, 25 bp, Homo sapien
tgtctggcaatgataaactgtattt

SEQ ID NO: 2559397 - DNA, 25 bp, Homo sapien
agaatcttaagctgagtgtctggca

SEQ ID NO: 2559398 - DNA, 25 bp, Homo sapien
tgagtgtctggcaatgataaactgt

SEQ ID NO: 2559399 - DNA, 25 bp, Homo sapien
tggcaaagaggatcaggctgtttcc

SEQ ID NO: 2559400 - DNA, 25 bp, Homo sapien
ctgggctgagtaacgatggcaaaga

SEQ ID NO: 2559401 - DNA, 25 bp, Homo sapien
gaagtggaggtgatattctgcaaag

SEQ ID NO: 2559402 - DNA, 25 bp, Homo sapien
gctgtttcctgagagggcagttaca

SEQ ID NO: 2559403 - DNA, 25 bp, Homo sapien
agcagaatatacccagaatggtgac

SEQ ID NO: 2559404 - DNA, 25 bp, Homo sapien
gcagaatatacccagaatggtgacc

SEQ ID NO: 2559405 - DNA, 25 bp, Homo sapien
aagcagaatatacccagaatggtga

SEQ ID NO: 2559406 - DNA, 25 bp, Homo sapien
gaaagaacatctgggacaagcgggc

SEQ ID NO: 2559407 - DNA, 25 bp, Homo sapien
ttttaagatcagttaagacagaagc

SEQ ID NO: 2559408 - DNA, 25 bp, Homo sapien
taagacagaagcatatctaagagga

SEQ ID NO: 2559409 - DNA, 25 bp, Homo sapien
gtgctattttaagatcagttaagac

SEQ ID NO: 2559410 - DNA, 25 bp, Homo sapien
gaagcatatctaagaggattagtaa

SEQ ID NO: 2559411 - DNA, 25 bp, Homo sapien
ttgttcccctggtgataattgctac

SEQ ID NO: 2559412 - DNA, 25 bp, Homo sapien
cagtgttattgttcccctggtgata

SEQ ID NO: 2559413 - DNA, 25 bp, Homo sapien
ggagtcagtgttattgttcccctgg

SEQ ID NO: 2559414 - DNA, 25 bp, Homo sapien
ttattgttcccctggtgataattgc

SEQ ID NO: 2559415 - DNA, 25 bp, Homo sapien
acatcagggtaaaagcaataggagt

SEQ ID NO: 2559416 - DNA, 25 bp, Homo sapien
tcacatcagggtaaaagcaatagga

SEQ ID NO: 2559417 - DNA, 25 bp, Homo sapien
aaagcaataggagtggtggagcacg

SEQ ID NO: 2559418 - DNA, 25 bp, Homo sapien
gcaataggagtggtggagcacgtgg

SEQ ID NO: 2559419 - DNA, 25 bp, Homo sapien
atacagcaacagccccaatatggga

SEQ ID NO: 2559420 - DNA, 25 bp, Homo sapien
tcttccggggaagcaatgctgagaa

SEQ ID NO: 2559421 - DNA, 25 bp, Homo sapien
tctgccccagcagtggtaatcaggg

SEQ ID NO: 2559422 - DNA, 25 bp, Homo sapien
caacagccccaatatgggagataca

SEQ ID NO: 2559423 - DNA, 25 bp, Homo sapien
ggcattggcaatcaaagtatgcaca

SEQ ID NO: 2559424 - DNA, 25 bp, Homo sapien
caatcaaagtatgcacatagggtgg

SEQ ID NO: 2559425 - DNA, 25 bp, Homo sapien
gggttcattacaggagggattagta

SEQ ID NO: 2559426 - DNA, 25 bp, Homo sapien
ggattagtaggtaggcattggcaat

SEQ ID NO: 2559427 - DNA, 25 bp, Homo sapien
ctagcgtatctgtttggtcttcaca

SEQ ID NO: 2559428 - DNA, 25 bp, Homo sapien
tagcgtatctgtttggtcttcacac

SEQ ID NO: 2559429 - DNA, 25 bp, Homo sapien
aaaattgaaaggttcatctagttct

SEQ ID NO: 2559430 - DNA, 25 bp, Homo sapien
ttctttgccgtgctacaatggagta

SEQ ID NO: 2559431 - DNA, 25 bp, Homo sapien
gccgtgctacaatggagtactttta

SEQ ID NO: 2559432 - DNA, 25 bp, Homo sapien
tacaatggagtacttttagcacagc

SEQ ID NO: 2559433 - DNA, 25 bp, Homo sapien
caagcagaacatgccgtgacagctg

SEQ ID NO: 2559434 - DNA, 25 bp, Homo sapien
tgacagctgcatgggtaccaggagc

SEQ ID NO: 2559435 - DNA, 25 bp, Homo sapien
cagcgggccaagcagaacatgccgt

SEQ ID NO: 2559436 - DNA, 25 bp, Homo sapien
ccgtgacagctgcatgggtaccagg

SEQ ID NO: 2559437 - DNA, 25 bp, Homo sapien
tcaccactgacacagtcaaccagaa

SEQ ID NO: 2559438 - DNA, 25 bp, Homo sapien
atcaccactgacacagtcaaccaga

SEQ ID NO: 2559439 - DNA, 25 bp, Homo sapien
tatcagccagttagagcaccaactc

SEQ ID NO: 2559440 - DNA, 25 bp, Homo sapien
tacttgcagcgaggattattgtcaa

SEQ ID NO: 2559441 - DNA, 25 bp, Homo sapien
caaactctactcactaggccaaaga

SEQ ID NO: 2559442 - DNA, 25 bp, Homo sapien
aactccaagctccaacaacgtgcaa

SEQ ID NO: 2559443 - DNA, 25 bp, Homo sapien
tactgtactcaacccaagcaggtct

SEQ ID NO: 2559444 - DNA, 25 bp, Homo sapien
gacactgattatgcaaaagtcctta

SEQ ID NO: 2559445 - DNA, 25 bp, Homo sapien
gggtgagtgacccatgaagacactg

SEQ ID NO: 2559446 - DNA, 25 bp, Homo sapien
tgaaacaccgagtagaagcacctgg

SEQ ID NO: 2559447 - DNA, 25 bp, Homo sapien
gacttctgagttgaaagagtatcca

SEQ ID NO: 2559448 - DNA, 25 bp, Homo sapien
caaaagtgcatgctggataggacga

SEQ ID NO: 2559449 - DNA, 25 bp, Homo sapien
tatgttgacttctgagttgaaagag

SEQ ID NO: 2559450 - DNA, 25 bp, Homo sapien
tggataggacgattttgtaagaaac

SEQ ID NO: 2559451 - DNA, 25 bp, Homo sapien
gatttatgcagtcgtacaaccatca

SEQ ID NO: 2559452 - DNA, 25 bp, Homo sapien
agcccctggctggagctgtaaactc

SEQ ID NO: 2559453 - DNA, 25 bp, Homo sapien
ggcaggtttgctgagataaaattat

SEQ ID NO: 2559454 - DNA, 25 bp, Homo sapien
catgcatcaagttttattgctgagt

SEQ ID NO: 2559455 - DNA, 25 bp, Homo sapien
ggtgagctggttagttagtacctga

SEQ ID NO: 2559456 - DNA, 25 bp, Homo sapien
tgttccctaagagagcaactgtgct

SEQ ID NO: 2559457 - DNA, 25 bp, Homo sapien
taggaaagcgcaacacatggtgtac

SEQ ID NO: 2559458 - DNA, 25 bp, Homo sapien
tttcacgtgcactgaaccagaggac

SEQ ID NO: 2559459 - DNA, 25 bp, Homo sapien
tgcaactgccccaatgtgagatcca

SEQ ID NO: 2559460 - DNA, 25 bp, Homo sapien
cattagaaccacagatatcagacat

SEQ ID NO: 2559461 - DNA, 25 bp, Homo sapien
gtggtctcttatggccttttctgtg

SEQ ID NO: 2559462 - DNA, 25 bp, Homo sapien
tatttgtcattagaaccacagatat

SEQ ID NO: 2559463 - DNA, 25 bp, Homo sapien
gatatatttgtcattagaaccacag

SEQ ID NO: 2559464 - DNA, 25 bp, Homo sapien
tttgcagggtgttgaccgttcttgg

SEQ ID NO: 2559465 - DNA, 25 bp, Homo sapien
ctcaccctgccattttgcagggtgt

SEQ ID NO: 2559466 - DNA, 25 bp, Homo sapien
ctggacagtagaggtgttcatctgc

SEQ ID NO: 2559467 - DNA, 25 bp, Homo sapien
ccatctggacagtagaggtgttcat

SEQ ID NO: 2559468 - DNA, 25 bp, Homo sapien
gaccccatcggtcgtgatcaaactg

SEQ ID NO: 2559469 - DNA, 25 bp, Homo sapien
gagattcagtaccatgcctgcctca

SEQ ID NO: 2559470 - DNA, 25 bp, Homo sapien
agaattgaccacaccctgcatgagc

SEQ ID NO: 2559471 - DNA, 25 bp, Homo sapien
tgcttcatggtgtctaggatgccct

SEQ ID NO: 2559472 - DNA, 25 bp, Homo sapien
taagtctgtgtagaccgaaacgatt

SEQ ID NO: 2559473 - DNA, 25 bp, Homo sapien
cactgttaagtctgtgtagaccgaa

SEQ ID NO: 2559474 - DNA, 25 bp, Homo sapien
caattcactgttaagtctgtgtaga

SEQ ID NO: 2559475 - DNA, 25 bp, Homo sapien
tctgtgtagaccgaaacgattttta

SEQ ID NO: 2559476 - DNA, 25 bp, Homo sapien
tccagtactgggtggctttcaggcc

SEQ ID NO: 2559477 - DNA, 25 bp, Homo sapien
ttgaggaccgacatagggaagcact

SEQ ID NO: 2559478 - DNA, 25 bp, Homo sapien
cagagacggcaacaacatataggag

SEQ ID NO: 2559479 - DNA, 25 bp, Homo sapien
tatggaggctccgttcacagaggac

SEQ ID NO: 2559480 - DNA, 25 bp, Homo sapien
gccatggccagtagaaccccagact

SEQ ID NO: 2559481 - DNA, 25 bp, Homo sapien
gatttctcgggcttcaaaccagaag

SEQ ID NO: 2559482 - DNA, 25 bp, Homo sapien
tagaaagtgtacacagggacaagct

SEQ ID NO: 2559483 - DNA, 25 bp, Homo sapien
tccatgaaagtaaatccgtgtagaa

SEQ ID NO: 2559484 - DNA, 25 bp, Homo sapien
gcatgactggcaacatgacggcaac

SEQ ID NO: 2559485 - DNA, 25 bp, Homo sapien
ccatagcgatggacaagagacaaac

SEQ ID NO: 2559486 - DNA, 25 bp, Homo sapien
tagtggacaaaagcgcaaacagacc

SEQ ID NO: 2559487 - DNA, 25 bp, Homo sapien
tctcttctgaggaagcaatgctgag

SEQ ID NO: 2559488 - DNA, 25 bp, Homo sapien
tagctgatgattagatttggagtgc

SEQ ID NO: 2559489 - DNA, 25 bp, Homo sapien
ctgatgattagatttggagtgcttc

SEQ ID NO: 2559490 - DNA, 25 bp, Homo sapien
cataaatggctttatctctaatcag

SEQ ID NO: 2559491 - DNA, 25 bp, Homo sapien
tatctctaatcagaaatagctgatg

SEQ ID NO: 2559492 - DNA, 25 bp, Homo sapien
tccaatttgcaaaaccctgaagctg

SEQ ID NO: 2559493 - DNA, 25 bp, Homo sapien
caaataggatggtgcagttgcccag

SEQ ID NO: 2559494 - DNA, 25 bp, Homo sapien
gcatgctcaagtcctggtatcccaa

SEQ ID NO: 2559495 - DNA, 25 bp, Homo sapien
caagaagattctcagcatcgtgggt

SEQ ID NO: 2559496 - DNA, 25 bp, Homo sapien
gagtgcaacgaacaaaccatagtaa

SEQ ID NO: 2559497 - DNA, 25 bp, Homo sapien
cctggtgaaggcagtaggagtggga

SEQ ID NO: 2559498 - DNA, 25 bp, Homo sapien
cagtatctgagtctctttaaagtaa

SEQ ID NO: 2559499 - DNA, 25 bp, Homo sapien
gataaaaggtgtttattacagtatc

SEQ ID NO: 2559500 - DNA, 25 bp, Homo sapien
ggatgaacacatataggaaatagca

SEQ ID NO: 2559501 - DNA, 25 bp, Homo sapien
caggatgaacacatataggaaatag

SEQ ID NO: 2559502 - DNA, 25 bp, Homo sapien
cttcaggatgaacacatataggaaa

SEQ ID NO: 2559503 - DNA, 25 bp, Homo sapien
tcaggatgaacacatataggaaata

SEQ ID NO: 2559504 - DNA, 25 bp, Homo sapien
gggattcatcaagggtggtaccagc

SEQ ID NO: 2559505 - DNA, 25 bp, Homo sapien
gtgtcaagagcttcgaggcactccc

SEQ ID NO: 2559506 - DNA, 25 bp, Homo sapien
aggacctttactctaatctgccgag

SEQ ID NO: 2559507 - DNA, 25 bp, Homo sapien
tatgcttagcaaagcgacgcatggt

SEQ ID NO: 2559508 - DNA, 25 bp, Homo sapien
caagatcgtggtgctataaagaaga

SEQ ID NO: 2559509 - DNA, 25 bp, Homo sapien
ttctcagtagtttggttgagtggtg

SEQ ID NO: 2559510 - DNA, 25 bp, Homo sapien
aggccatccataagtctttctctgg

SEQ ID NO: 2559511 - DNA, 25 bp, Homo sapien
tggaatcccagtcagggtgaagaag

SEQ ID NO: 2559512 - DNA, 25 bp, Homo sapien
ctttgatgacaacaaggatggtgac

SEQ ID NO: 2559513 - DNA, 25 bp, Homo sapien
gtcagtggcagctaacatggctaga

SEQ ID NO: 2559514 - DNA, 25 bp, Homo sapien
attaaaagttattgaacgccagttg

SEQ ID NO: 2559515 - DNA, 25 bp, Homo sapien
gaacgccagttgaaccagtgaacac

SEQ ID NO: 2559516 - DNA, 25 bp, Homo sapien
gaacatctggataaggcagccatta

SEQ ID NO: 2559517 - DNA, 25 bp, Homo sapien
ccacactccgtagcaggatggctgc

SEQ ID NO: 2559518 - DNA, 25 bp, Homo sapien
catcctgatggaggcagtatgcatg

SEQ ID NO: 2559519 - DNA, 25 bp, Homo sapien
cactgtgagtgagaattgtagcata

SEQ ID NO: 2559520 - DNA, 25 bp, Homo sapien
ggctgctgcaatcttgctgatgaca

SEQ ID NO: 2559521 - DNA, 25 bp, Homo sapien
gggaagcaatgctcaatactgcctg

SEQ ID NO: 2559522 - DNA, 25 bp, Homo sapien
gagccttgagcctgtcttcctggga

SEQ ID NO: 2559523 - DNA, 25 bp, Homo sapien
cagccaacaggccatagatgctatt

SEQ ID NO: 2559524 - DNA, 25 bp, Homo sapien
tactgcctgcaggattagaatgtaa

SEQ ID NO: 2559525 - DNA, 25 bp, Homo sapien
tgagaggcacatagaaaagcagcac

SEQ ID NO: 2559526 - DNA, 25 bp, Homo sapien
caatgagaggcacatagaaaagcag

SEQ ID NO: 2559527 - DNA, 25 bp, Homo sapien
aaagcagcactgcagatatgagaga

SEQ ID NO: 2559528 - DNA, 25 bp, Homo sapien
gcagcactgcagatatgagagagac

SEQ ID NO: 2559529 - DNA, 25 bp, Homo sapien
ggtgacaaatgcttcccatagcgat

SEQ ID NO: 2559530 - DNA, 25 bp, Homo sapien
cactgtacacaatgggattgagcac

SEQ ID NO: 2559531 - DNA, 25 bp, Homo sapien
tatcagatctgcttggtcctaacac

SEQ ID NO: 2559532 - DNA, 25 bp, Homo sapien
ccatagcgatgaattagggtcatac

SEQ ID NO: 2559533 - DNA, 25 bp, Homo sapien
gagacagtggttccgtttgctgctg

SEQ ID NO: 2559534 - DNA, 25 bp, Homo sapien
aatgcaaggcggtaagaggagagga

SEQ ID NO: 2559535 - DNA, 25 bp, Homo sapien
ggagacagtggttccgtttgctgct

SEQ ID NO: 2559536 - DNA, 25 bp, Homo sapien
actggataatgcaaggcggtaagag

SEQ ID NO: 2559537 - DNA, 25 bp, Homo sapien
ctatgaggaaagaaaaataattaag

SEQ ID NO: 2559538 - DNA, 25 bp, Homo sapien
atgaggaaagaaaaataattaagat

SEQ ID NO: 2559539 - DNA, 25 bp, Homo sapien
tatgaggaaagaaaaataattaaga

SEQ ID NO: 2559540 - DNA, 25 bp, Homo sapien
tggagtctccgcttagtaatgatga

SEQ ID NO: 2559541 - DNA, 25 bp, Homo sapien
agatcatactgtttcccaagagggc

SEQ ID NO: 2559542 - DNA, 25 bp, Homo sapien
gccatggttggttgaagacactgaa

SEQ ID NO: 2559543 - DNA, 25 bp, Homo sapien
gatccagacatgagcacattccagc

SEQ ID NO: 2559544 - DNA, 25 bp, Homo sapien
cagctggaacatagcctggcggatt

SEQ ID NO: 2559545 - DNA, 25 bp, Homo sapien
cagaacagtacggaggatcaggaca

SEQ ID NO: 2559546 - DNA, 25 bp, Homo sapien
aatggatgggaaagctcgtgacccc

SEQ ID NO: 2559547 - DNA, 25 bp, Homo sapien
tacagatagccacgaagcggtcaaa

SEQ ID NO: 2559548 - DNA, 25 bp, Homo sapien
cagaaggaaaagcttgacttcggag

SEQ ID NO: 2559549 - DNA, 25 bp, Homo sapien
gatggagaaccaaatgtgggcatgt

SEQ ID NO: 2559550 - DNA, 25 bp, Homo sapien
tgggcatgttccagtcctgggatcc

SEQ ID NO: 2559551 - DNA, 25 bp, Homo sapien
tgcccatgatggcaagcaggtacat

SEQ ID NO: 2559552 - DNA, 25 bp, Homo sapien
caataaggatcacaacaagagggct

SEQ ID NO: 2559553 - DNA, 25 bp, Homo sapien
tctctgccaaagatgcaatgctgag

SEQ ID NO: 2559554 - DNA, 25 bp, Homo sapien
caaagcaggcattaggtgaaattcc

SEQ ID NO: 2559555 - DNA, 25 bp, Homo sapien
catggcattgaacaagaagaccctc

SEQ ID NO: 2559556 - DNA, 25 bp, Homo sapien
tgcctaggacctctcctagcagatt

SEQ ID NO: 2559557 - DNA, 25 bp, Homo sapien
ctttctcattatggctatagtattt

SEQ ID NO: 2559558 - DNA, 25 bp, Homo sapien
tatggctatagtatttgatctgctg

SEQ ID NO: 2559559 - DNA, 25 bp, Homo sapien
aacatctggcctgtgcctaggacct

SEQ ID NO: 2559560 - DNA, 25 bp, Homo sapien
tgtgccagcaacatccaatgactca

SEQ ID NO: 2559561 - DNA, 25 bp, Homo sapien
gccctttctttgaatctgtgagtgg

SEQ ID NO: 2559562 - DNA, 25 bp, Homo sapien
ctcatttgtcccactgcttgaattc

SEQ ID NO: 2559563 - DNA, 25 bp, Homo sapien
gaattcaggtacacaacttgggcca

SEQ ID NO: 2559564 - DNA, 25 bp, Homo sapien
taactcttaagatgacgagctgcat

SEQ ID NO: 2559565 - DNA, 25 bp, Homo sapien
gcaagaagatagtaactcttaagat

SEQ ID NO: 2559566 - DNA, 25 bp, Homo sapien
tggaacggcgaaacaccagggcaag

SEQ ID NO: 2559567 - DNA, 25 bp, Homo sapien
gaagatagtaactcttaagatgacg

SEQ ID NO: 2559568 - DNA, 25 bp, Homo sapien
caaagtcccatcctttatggtctgc

SEQ ID NO: 2559569 - DNA, 25 bp, Homo sapien
tcaacaaagtcccatcctttatggt

SEQ ID NO: 2559570 - DNA, 25 bp, Homo sapien
ccatcctttatggtctgcagcaggg

SEQ ID NO: 2559571 - DNA, 25 bp, Homo sapien
tcccatcctttatggtctgcagcag

SEQ ID NO: 2559572 - DNA, 25 bp, Homo sapien
cgagatggaggtgtcggacccatca

SEQ ID NO: 2559573 - DNA, 25 bp, Homo sapien
aagtaggtctgtcccattccgatgg

SEQ ID NO: 2559574 - DNA, 25 bp, Homo sapien
ttccgatggaattgttgcaggagct

SEQ ID NO: 2559575 - DNA, 25 bp, Homo sapien
aaggagtggcgactccttcttggtc

SEQ ID NO: 2559576 - DNA, 25 bp, Homo sapien
caaaggggtcacattgctccagatg

SEQ ID NO: 2559577 - DNA, 25 bp, Homo sapien
tatatactgtctttcactgcggatg

SEQ ID NO: 2559578 - DNA, 25 bp, Homo sapien
ccactgccagaaagaaaccttgatg

SEQ ID NO: 2559579 - DNA, 25 bp, Homo sapien
ggcttcatatcatgtgggtaattga

SEQ ID NO: 2559580 - DNA, 25 bp, Homo sapien
caaaatggacaactccaggatttcc

SEQ ID NO: 2559581 - DNA, 25 bp, Homo sapien
aagataccacctggcccatcaaagg

SEQ ID NO: 2559582 - DNA, 25 bp, Homo sapien
tcaaagggccaaccatcttcatggg

SEQ ID NO: 2559583 - DNA, 25 bp, Homo sapien
gaatttggtaaaaaggcatggccta

SEQ ID NO: 2559584 - DNA, 25 bp, Homo sapien
tttggatatcatcggcactgagctg

SEQ ID NO: 2559585 - DNA, 25 bp, Homo sapien
tctagggtcgtgataccagtaagtg

SEQ ID NO: 2559586 - DNA, 25 bp, Homo sapien
cactgagctggaaggttctagggtc

SEQ ID NO: 2559587 - DNA, 25 bp, Homo sapien
caatctcatgagttgcaaccaggaa

SEQ ID NO: 2559588 - DNA, 25 bp, Homo sapien
ttaaggtatgtcagatgaacatttt

SEQ ID NO: 2559589 - DNA, 25 bp, Homo sapien
tgtcggttcagctaacctgactagg

SEQ ID NO: 2559590 - DNA, 25 bp, Homo sapien
cagtagcgttttgagtgtcggttca

SEQ ID NO: 2559591 - DNA, 25 bp, Homo sapien
ttcatcctagcagtccccaaggctg

SEQ ID NO: 2559592 - DNA, 25 bp, Homo sapien
cctgactaggttgcattctttaggg

SEQ ID NO: 2559593 - DNA, 25 bp, Homo sapien
ctgttattccagtctcccatagtga

SEQ ID NO: 2559594 - DNA, 25 bp, Homo sapien
caggataaatatgggctccacagca

SEQ ID NO: 2559595 - DNA, 25 bp, Homo sapien
gatggagagccaagaatgaacatac

SEQ ID NO: 2559596 - DNA, 25 bp, Homo sapien
ggattctatccaaatgacagacagg

SEQ ID NO: 2559597 - DNA, 25 bp, Homo sapien
gctaccaaatatgcaagacagaaga

SEQ ID NO: 2559598 - DNA, 25 bp, Homo sapien
ggaagtgtagacagggacatcccca

SEQ ID NO: 2559599 - DNA, 25 bp, Homo sapien
gagcatccaaccataacacagcaag

SEQ ID NO: 2559600 - DNA, 25 bp, Homo sapien
cataacacagcaagcatggtgggaa

SEQ ID NO: 2559601 - DNA, 25 bp, Homo sapien
agggacatccccaggtcattcactg

SEQ ID NO: 2559602 - DNA, 25 bp, Homo sapien
caagcttcgtagcaaacaggccaaa

SEQ ID NO: 2559603 - DNA, 25 bp, Homo sapien
tagtgtctcagtagcaaaggtgtgg

SEQ ID NO: 2559604 - DNA, 25 bp, Homo sapien
gatgcttcccaaagcgatggaccat

SEQ ID NO: 2559605 - DNA, 25 bp, Homo sapien
aacatcctggtgcaaacagaaggcg

SEQ ID NO: 2559606 - DNA, 25 bp, Homo sapien
ggagactgcttgtaggttaagaaag

SEQ ID NO: 2559607 - DNA, 25 bp, Homo sapien
cctactgcacgttggcttggtttcc

SEQ ID NO: 2559608 - DNA, 25 bp, Homo sapien
tccagtctgtcaagcttggagactg

SEQ ID NO: 2559609 - DNA, 25 bp, Homo sapien
gcacgttggcttggtttccagtctg

SEQ ID NO: 2559610 - DNA, 25 bp, Homo sapien
ggtagtgttagataggcccaggtca

SEQ ID NO: 2559611 - DNA, 25 bp, Homo sapien
catttggaccagacaagcattgaag

SEQ ID NO: 2559612 - DNA, 25 bp, Homo sapien
taatgttcccggcaattgaggtggc

SEQ ID NO: 2559613 - DNA, 25 bp, Homo sapien
atctcccgggcatggaaccagaaga

SEQ ID NO: 2559614 - DNA, 25 bp, Homo sapien
gcaagggttctcagattgctataaa

SEQ ID NO: 2559615 - DNA, 25 bp, Homo sapien
ctgcatagcgcaagggttctcagat

SEQ ID NO: 2559616 - DNA, 25 bp, Homo sapien
tataaagcagtcaaaggccatagcc

SEQ ID NO: 2559617 - DNA, 25 bp, Homo sapien
tgctataaagcagtcaaaggccata

SEQ ID NO: 2559618 - DNA, 25 bp, Homo sapien
gaaagaccagagccaaggcccttcc

SEQ ID NO: 2559619 - DNA, 25 bp, Homo sapien
caaggcccttccagcaattgccaac

SEQ ID NO: 2559620 - DNA, 25 bp, Homo sapien
aggcccttccagcaattgccaaccc

SEQ ID NO: 2559621 - DNA, 25 bp, Homo sapien
ccaaggcccttccagcaattgccaa

SEQ ID NO: 2559622 - DNA, 25 bp, Homo sapien
gggtaggacagaatattgacatcat

SEQ ID NO: 2559623 - DNA, 25 bp, Homo sapien
aaggggtaggacagaatattgacat

SEQ ID NO: 2559624 - DNA, 25 bp, Homo sapien
ggacagaatattgacatcatgatat

SEQ ID NO: 2559625 - DNA, 25 bp, Homo sapien
taggacagaatattgacatcatgat

SEQ ID NO: 2559626 - DNA, 25 bp, Homo sapien
caccatgaggccatagatgctgctg

SEQ ID NO: 2559627 - DNA, 25 bp, Homo sapien
gaagcactgaatcaagtcccatgga

SEQ ID NO: 2559628 - DNA, 25 bp, Homo sapien
gaagcattctgtccatagcgatgga

SEQ ID NO: 2559629 - DNA, 25 bp, Homo sapien
tcagcacatggacaattgaggaagc

SEQ ID NO: 2559630 - DNA, 25 bp, Homo sapien
cagcacccggcatgtcaagatgttt

SEQ ID NO: 2559631 - DNA, 25 bp, Homo sapien
tagaacatgggctcccggagggtct

SEQ ID NO: 2559632 - DNA, 25 bp, Homo sapien
ttatcgggagtgtaaacagaactgg

SEQ ID NO: 2559633 - DNA, 25 bp, Homo sapien
gcccatagatagcattgacacggat

SEQ ID NO: 2559634 - DNA, 25 bp, Homo sapien
ctgggtgaaatatgctcttgttgtg

SEQ ID NO: 2559635 - DNA, 25 bp, Homo sapien
tgaaatatgctcttgttgtgataaa

SEQ ID NO: 2559636 - DNA, 25 bp, Homo sapien
ggtgaaatatgctcttgttgtgata

SEQ ID NO: 2559637 - DNA, 25 bp, Homo sapien
aaatatgctcttgttgtgataaaac

SEQ ID NO: 2559638 - DNA, 25 bp, Homo sapien
aaaggcccggagatccacatgtgga

SEQ ID NO: 2559639 - DNA, 25 bp, Homo sapien
taatgtagtggagcacagacggcca

SEQ ID NO: 2559640 - DNA, 25 bp, Homo sapien
taaaacgggacgaattacaatgcac

SEQ ID NO: 2559641 - DNA, 25 bp, Homo sapien
tatgtgagcctgacaaaagggtagg

SEQ ID NO: 2559642 - DNA, 25 bp, Homo sapien
ttggtgtccaaatcgatgagtaagg

SEQ ID NO: 2559643 - DNA, 25 bp, Homo sapien
atgactccaacatgagcgccacacg

SEQ ID NO: 2559644 - DNA, 25 bp, Homo sapien
gcccatagataccattgatacgaat

SEQ ID NO: 2559645 - DNA, 25 bp, Homo sapien
aacatacgagatgccaatgagcacc

SEQ ID NO: 2559646 - DNA, 25 bp, Homo sapien
taaaaacatagagcactcgttctcg

SEQ ID NO: 2559647 - DNA, 25 bp, Homo sapien
catagagcactcgttctcgaatctg

SEQ ID NO: 2559648 - DNA, 25 bp, Homo sapien
actcgttctcgaatctgtttggtcc

SEQ ID NO: 2559649 - DNA, 25 bp, Homo sapien
ttagtaaaaacatagagcactcgtt

SEQ ID NO: 2559650 - DNA, 25 bp, Homo sapien
actccccattgtgtatctaagctca

SEQ ID NO: 2559651 - DNA, 25 bp, Homo sapien
ctccccattgtgtatctaagctcat

SEQ ID NO: 2559652 - DNA, 25 bp, Homo sapien
cactccccattgtgtatctaagctc

SEQ ID NO: 2559653 - DNA, 25 bp, Homo sapien
tagagtggtattcattgaggctgtt

SEQ ID NO: 2559654 - DNA, 25 bp, Homo sapien
aggatggtgatattcccaaggacag

SEQ ID NO: 2559655 - DNA, 25 bp, Homo sapien
ctgaatcacaaaaaggatggtgata

SEQ ID NO: 2559656 - DNA, 25 bp, Homo sapien
gagatgcatactttccagcccagga

SEQ ID NO: 2559657 - DNA, 25 bp, Homo sapien
caccaacgtgtagcaaagagggtca

SEQ ID NO: 2559658 - DNA, 25 bp, Homo sapien
taagggtctcagaaagatggccagt

SEQ ID NO: 2559659 - DNA, 25 bp, Homo sapien
caggcccgggtcaatagatgacaga

SEQ ID NO: 2559660 - DNA, 25 bp, Homo sapien
ccatgccagtgcacaggtggatgaa

SEQ ID NO: 2559661 - DNA, 25 bp, Homo sapien
tgtcaaagaccaggatagagatggc

SEQ ID NO: 2559662 - DNA, 25 bp, Homo sapien
ccttgagtcgtgcatcatgtgaaga

SEQ ID NO: 2559663 - DNA, 25 bp, Homo sapien
tagatgatgttaaccctgatgctgg

SEQ ID NO: 2559664 - DNA, 25 bp, Homo sapien
taaagtgaggtatattccgaccaaa

SEQ ID NO: 2559665 - DNA, 25 bp, Homo sapien
tcatggccctcatcaggattgcctg

SEQ ID NO: 2559666 - DNA, 25 bp, Homo sapien
gacaaaattccgcagagcctacagc

SEQ ID NO: 2559667 - DNA, 25 bp, Homo sapien
ccggctcaaatctttgggcacctgt

SEQ ID NO: 2559668 - DNA, 25 bp, Homo sapien
agcctacagcctcattgttgccttc

SEQ ID NO: 2559669 - DNA, 25 bp, Homo sapien
gatccccagcaacaggaaggaggag

SEQ ID NO: 2559670 - DNA, 25 bp, Homo sapien
actgggtgttattgggaaggaacat

SEQ ID NO: 2559671 - DNA, 25 bp, Homo sapien
ctgggatccccagcaacaggaagga

SEQ ID NO: 2559672 - DNA, 25 bp, Homo sapien
tgaaactgggtgttattgggaagga

SEQ ID NO: 2559673 - DNA, 25 bp, Homo sapien
gagtgcaattatgtacacagcacaa

SEQ ID NO: 2559674 - DNA, 25 bp, Homo sapien
agtgcaattatgtacacagcacaaa

SEQ ID NO: 2559675 - DNA, 25 bp, Homo sapien
ggcatcacagataatctccctgagg

SEQ ID NO: 2559676 - DNA, 25 bp, Homo sapien
ggtgaggatgatgctatatcgtagc

SEQ ID NO: 2559677 - DNA, 25 bp, Homo sapien
tgactccatgccagtaaagttgtgg

SEQ ID NO: 2559678 - DNA, 25 bp, Homo sapien
atatcgtagcgggttgcagatggcc

SEQ ID NO: 2559679 - DNA, 25 bp, Homo sapien
gaagggcaaccgcaaaatgagaaaa

SEQ ID NO: 2559680 - DNA, 25 bp, Homo sapien
ttggtgtggggaatgacatgatccc

SEQ ID NO: 2559681 - DNA, 25 bp, Homo sapien
ggaatgacatgatccccacagaagg

SEQ ID NO: 2559682 - DNA, 25 bp, Homo sapien
ggaataacagacataaatgacctca

SEQ ID NO: 2559683 - DNA, 25 bp, Homo sapien
tatgatgtcgaatactaggattgaa

SEQ ID NO: 2559684 - DNA, 25 bp, Homo sapien
tcttgatactggaacaagacagatg

SEQ ID NO: 2559685 - DNA, 25 bp, Homo sapien
gcacccaagccatagattatattga

SEQ ID NO: 2559686 - DNA, 25 bp, Homo sapien
tgaaatagcacccaagccatagatt

SEQ ID NO: 2559687 - DNA, 25 bp, Homo sapien
atagaaggcaaggattacacacaca

SEQ ID NO: 2559688 - DNA, 25 bp, Homo sapien
tgtatagaaggcaaggattacacac

SEQ ID NO: 2559689 - DNA, 25 bp, Homo sapien
tggtgtatagaaggcaaggattaca

SEQ ID NO: 2559690 - DNA, 25 bp, Homo sapien
ctggtgtatagaaggcaaggattac

SEQ ID NO: 2559691 - DNA, 25 bp, Homo sapien
tctgactccatatatgacaggattg

SEQ ID NO: 2559692 - DNA, 25 bp, Homo sapien
tatatggatatagcggggcacattt

SEQ ID NO: 2559693 - DNA, 25 bp, Homo sapien
gattggctaggagtatatggatata

SEQ ID NO: 2559694 - DNA, 25 bp, Homo sapien
ggtggcaccacaacatagagattgg

SEQ ID NO: 2559695 - DNA, 25 bp, Homo sapien
ggaacatcttgccattgacgagaaa

SEQ ID NO: 2559696 - DNA, 25 bp, Homo sapien
tgccattgacgagaaaagtattagc

SEQ ID NO: 2559697 - DNA, 25 bp, Homo sapien
cgagaaaagtattagctgaccacct

SEQ ID NO: 2559698 - DNA, 25 bp, Homo sapien
gtggtggtgtggaacatcttgccat

SEQ ID NO: 2559699 - DNA, 25 bp, Homo sapien
cagtagaattgtagcattgcccagc

SEQ ID NO: 2559700 - DNA, 25 bp, Homo sapien
tggaaagcctcaagtcccgggatgc

SEQ ID NO: 2559701 - DNA, 25 bp, Homo sapien
gatacccaacatacgaggcactgag

SEQ ID NO: 2559702 - DNA, 25 bp, Homo sapien
tagggtcccgaagagtacgatcaga

SEQ ID NO: 2559703 - DNA, 25 bp, Homo sapien
tgtcagagtagaggtatagtggagt

SEQ ID NO: 2559704 - DNA, 25 bp, Homo sapien
cagagtagaggtatagtggagtgat

SEQ ID NO: 2559705 - DNA, 25 bp, Homo sapien
tcggggtgtcagagtagaggtatag

SEQ ID NO: 2559706 - DNA, 25 bp, Homo sapien
tagaggtatagtggagtgatgtaca

SEQ ID NO: 2559707 - DNA, 25 bp, Homo sapien
ttataatgctcacaccaatgcctgc

SEQ ID NO: 2559708 - DNA, 25 bp, Homo sapien
taggagattccaacaagtgcgacat

SEQ ID NO: 2559709 - DNA, 25 bp, Homo sapien
aataatccgagcctcacagaagggc

SEQ ID NO: 2559710 - DNA, 25 bp, Homo sapien
tgaatgctagcacaggccaacttag

SEQ ID NO: 2559711 - DNA, 25 bp, Homo sapien
cagcttccatttgcatgcttggggt

SEQ ID NO: 2559712 - DNA, 25 bp, Homo sapien
accagcttccatttgcatgcttggg

SEQ ID NO: 2559713 - DNA, 25 bp, Homo sapien
ttattcaatcaaaccagcttccatt

SEQ ID NO: 2559714 - DNA, 25 bp, Homo sapien
aaaccagcttccatttgcatgcttg

SEQ ID NO: 2559715 - DNA, 25 bp, Homo sapien
tcaccctctcctatattcagatatt

SEQ ID NO: 2559716 - DNA, 25 bp, Homo sapien
taataaggtctatggtatccttgga

SEQ ID NO: 2559717 - DNA, 25 bp, Homo sapien
tttattgttggtgggcttgacttca

SEQ ID NO: 2559718 - DNA, 25 bp, Homo sapien
gaacgcgtggcccttgtgaagcttg

SEQ ID NO: 2559719 - DNA, 25 bp, Homo sapien
atggctggctttaaacttccatctt

SEQ ID NO: 2559720 - DNA, 25 bp, Homo sapien
attctttagcccctggttgagttat

SEQ ID NO: 2559721 - DNA, 25 bp, Homo sapien
tgcctttgtcactgaatttaaatgc

SEQ ID NO: 2559722 - DNA, 25 bp, Homo sapien
gcacctaaggctcgttgttctgaaa

SEQ ID NO: 2559723 - DNA, 25 bp, Homo sapien
tccaggaggatttataaattatgcc

SEQ ID NO: 2559724 - DNA, 25 bp, Homo sapien
tgttgcaggcaatatcttcttgatc

SEQ ID NO: 2559725 - DNA, 25 bp, Homo sapien
ttcctgatcatgactgagcgcagtc

SEQ ID NO: 2559726 - DNA, 25 bp, Homo sapien
gatcatgactgagcgcagtctccat

SEQ ID NO: 2559727 - DNA, 25 bp, Homo sapien
ttgtggctgttgcaggcaatatctt

SEQ ID NO: 2559728 - DNA, 25 bp, Homo sapien
caatttctgttgtcccctaaattct

SEQ ID NO: 2559729 - DNA, 25 bp, Homo sapien
gtcactatcaggtagtcagatgcag

SEQ ID NO: 2559730 - DNA, 25 bp, Homo sapien
gataagtactgtcctttctttaatg

SEQ ID NO: 2559731 - DNA, 25 bp, Homo sapien
tagtcagatgcagacatcaatttct

SEQ ID NO: 2559732 - DNA, 25 bp, Homo sapien
ataataagttatcagcagagtatac

SEQ ID NO: 2559733 - DNA, 25 bp, Homo sapien
tataataagttatcagcagagtata

SEQ ID NO: 2559734 - DNA, 25 bp, Homo sapien
ttataataagttatcagcagagtat

SEQ ID NO: 2559735 - DNA, 25 bp, Homo sapien
tagattttatatgtggactccactg

SEQ ID NO: 2559736 - DNA, 25 bp, Homo sapien
tatgtggactccactgctacaaggc

SEQ ID NO: 2559737 - DNA, 25 bp, Homo sapien
tgaacagatgagactgtccgctacc

SEQ ID NO: 2559738 - DNA, 25 bp, Homo sapien
tctaagtgggggatcttctgaacag

SEQ ID NO: 2559739 - DNA, 25 bp, Homo sapien
tcttcagccatcccaagactcttga

SEQ ID NO: 2559740 - DNA, 25 bp, Homo sapien
ctcttcagccatcccaagactcttg

SEQ ID NO: 2559741 - DNA, 25 bp, Homo sapien
tcttaaccagttgtctgggcccagg

SEQ ID NO: 2559742 - DNA, 25 bp, Homo sapien
gggcccaggctccattattgatata

SEQ ID NO: 2559743 - DNA, 25 bp, Homo sapien
catccttatagcaatgggagggctc

SEQ ID NO: 2559744 - DNA, 25 bp, Homo sapien
tataggagatttcgccaggcatttg

SEQ ID NO: 2559745 - DNA, 25 bp, Homo sapien
ctggtgtggctaatgccctggccca

SEQ ID NO: 2559746 - DNA, 25 bp, Homo sapien
gattattctgagtccaagctaggcc

SEQ ID NO: 2559747 - DNA, 25 bp, Homo sapien
tgtacacatattgaccaaatcaggg

SEQ ID NO: 2559748 - DNA, 25 bp, Homo sapien
tggcccacaagtatcactaagctcg

SEQ ID NO: 2559749 - DNA, 25 bp, Homo sapien
ctggctcacctggacaacctcaagg

SEQ ID NO: 2559750 - DNA, 25 bp, Homo sapien
tgccacactgagtgagctgcactgt

SEQ ID NO: 2559751 - DNA, 25 bp, Homo sapien
tatgggcaaccctaaggtgaaggct

SEQ ID NO: 2559752 - DNA, 25 bp, Homo sapien
cactcctgatgctgttatgggcaac

SEQ ID NO: 2559753 - DNA, 25 bp, Homo sapien
gacaccatggtgcatctgactcctg

SEQ ID NO: 2559754 - DNA, 25 bp, Homo sapien
ctgaggagaagtctgccgttactgc

SEQ ID NO: 2559755 - DNA, 25 bp, Homo sapien
gggcaaggtgaacgtggatgaagtt

SEQ ID NO: 2559756 - DNA, 25 bp, Homo sapien
aagtctgccgttactgccctgtggg

SEQ ID NO: 2559757 - DNA, 25 bp, Homo sapien
cctggatgatctcaagggcaccttt

SEQ ID NO: 2559758 - DNA, 25 bp, Homo sapien
cctttgcccagctgagtgaactgca

SEQ ID NO: 2559759 - DNA, 25 bp, Homo sapien
tcctggttgtctacccatggaccca

SEQ ID NO: 2559760 - DNA, 25 bp, Homo sapien
tgtgacaagctgcatgtggatcctg

SEQ ID NO: 2559761 - DNA, 25 bp, Homo sapien
gcttctggaacgtctgaggttatca

SEQ ID NO: 2559762 - DNA, 25 bp, Homo sapien
cagaggaggacaaggctactatcac

SEQ ID NO: 2559763 - DNA, 25 bp, Homo sapien
gacgccatgggtcatttcacagagg

SEQ ID NO: 2559764 - DNA, 25 bp, Homo sapien
ggttatcaataagctcctagtccag

SEQ ID NO: 2559765 - DNA, 25 bp, Homo sapien
tgaccgttttggcaatccatttcgg

SEQ ID NO: 2559766 - DNA, 25 bp, Homo sapien
catgatgcagagctttcaaggatag

SEQ ID NO: 2559767 - DNA, 25 bp, Homo sapien
cactgcccatgatgcagagctttca

SEQ ID NO: 2559768 - DNA, 25 bp, Homo sapien
aatccatttcggcaaagaattcacc

SEQ ID NO: 2559769 - DNA, 25 bp, Homo sapien
cctggatgatctcaagggcaccttt

SEQ ID NO: 2559770 - DNA, 25 bp, Homo sapien
tcctggttgtctacccatggaccca

SEQ ID NO: 2559771 - DNA, 25 bp, Homo sapien
cctttgcccagctgagtgaactgca

SEQ ID NO: 2559772 - DNA, 25 bp, Homo sapien
tgtgacaagctgcatgtggatcctg

SEQ ID NO: 2559773 - DNA, 25 bp, Homo sapien
gacgccatgggtcatttcacagagg

SEQ ID NO: 2559774 - DNA, 25 bp, Homo sapien
cagaggaggacaaggctactatcac

SEQ ID NO: 2559775 - DNA, 25 bp, Homo sapien
gcttctggaacgtctgaggttatca

SEQ ID NO: 2559776 - DNA, 25 bp, Homo sapien
ggttatcaataagctcctagtccag

SEQ ID NO: 2559777 - DNA, 25 bp, Homo sapien
gcttcttgcaggtttacattatcca

SEQ ID NO: 2559778 - DNA, 25 bp, Homo sapien
gcaagacctcatggtgaaattgacc

SEQ ID NO: 2559779 - DNA, 25 bp, Homo sapien
aaattgaccatgatgcccactgtaa

SEQ ID NO: 2559780 - DNA, 25 bp, Homo sapien
catgtactgtttccttgccacactg

SEQ ID NO: 2559781 - DNA, 25 bp, Homo sapien
tttgctgtttatgtgtgcgtccttc

SEQ ID NO: 2559782 - DNA, 25 bp, Homo sapien
ttgctgtttatgtgtgcgtccttct

SEQ ID NO: 2559783 - DNA, 25 bp, Homo sapien
gaggcagctcatcactggatctcca

SEQ ID NO: 2559784 - DNA, 25 bp, Homo sapien
actatgtggcccaatattactgcag

SEQ ID NO: 2559785 - DNA, 25 bp, Homo sapien
cacagacctcatggtgacattgacc

SEQ ID NO: 2559786 - DNA, 25 bp, Homo sapien
gacattgaccacgatgcctactgta

SEQ ID NO: 2559787 - DNA, 25 bp, Homo sapien
tactctctgactatactggcagcca

SEQ ID NO: 2559788 - DNA, 25 bp, Homo sapien
gagatttcatccttggagttctatc

SEQ ID NO: 2559789 - DNA, 25 bp, Homo sapien
tcatgagcccgtgtactactctctg

SEQ ID NO: 2559790 - DNA, 25 bp, Homo sapien
ctggcagccatagaccttggtgtaa

SEQ ID NO: 2559791 - DNA, 25 bp, Homo sapien
ccaaattagtggaagagacagttcc

SEQ ID NO: 2559792 - DNA, 25 bp, Homo sapien
aattagtggaagagacagttccttc

SEQ ID NO: 2559793 - DNA, 25 bp, Homo sapien
tagtggaagagacagttccttcacc

SEQ ID NO: 2559794 - DNA, 25 bp, Homo sapien
tggaagagacagttccttcaccctc

SEQ ID NO: 2559795 - DNA, 25 bp, Homo sapien
tgtcacagtgattggattgtctctg

SEQ ID NO: 2559796 - DNA, 25 bp, Homo sapien
gggccaaggctctcattacctgtgt

SEQ ID NO: 2559797 - DNA, 25 bp, Homo sapien
tcaccaggatgtcattaaactcgcc

SEQ ID NO: 2559798 - DNA, 25 bp, Homo sapien
taaactcgcctgtgctgataccacc

SEQ ID NO: 2559799 - DNA, 25 bp, Homo sapien
tttactccaggtaaagcaatagtaa

SEQ ID NO: 2559800 - DNA, 25 bp, Homo sapien
gcaatagtaatcagttgtataaaag

SEQ ID NO: 2559801 - DNA, 25 bp, Homo sapien
tatttactccaggtaaagcaatagt

SEQ ID NO: 2559802 - DNA, 25 bp, Homo sapien
gttgtataaaagttgctccttgaga

SEQ ID NO: 2559803 - DNA, 25 bp, Homo sapien
tgggaagccagtaagctggaaggtg

SEQ ID NO: 2559804 - DNA, 25 bp, Homo sapien
tgaatatccagtgatgtgccttctc

SEQ ID NO: 2559805 - DNA, 25 bp, Homo sapien
gctggaaggtggaagcagacttatt

SEQ ID NO: 2559806 - DNA, 25 bp, Homo sapien
gatgtaggctgccaataatgggatg

SEQ ID NO: 2559807 - DNA, 25 bp, Homo sapien
gccatggcaagcaagacacctgact

SEQ ID NO: 2559808 - DNA, 25 bp, Homo sapien
cagtgtaggcgaacaactattggca

SEQ ID NO: 2559809 - DNA, 25 bp, Homo sapien
tacatgggatcgacagtagggaaac

SEQ ID NO: 2559810 - DNA, 25 bp, Homo sapien
tattggcataatggacagaccagcc

SEQ ID NO: 2559811 - DNA, 25 bp, Homo sapien
agatgatgagaaagtccaacaagac

SEQ ID NO: 2559812 - DNA, 25 bp, Homo sapien
aaagatgatgagaaagtccaacaag

SEQ ID NO: 2559813 - DNA, 25 bp, Homo sapien
cttgagaatcaaaatgtaggagaaa

SEQ ID NO: 2559814 - DNA, 25 bp, Homo sapien
gaaaaagatgatgagaaagtccaac

SEQ ID NO: 2559815 - DNA, 25 bp, Homo sapien
gaataaacgaagtatgccactctga

SEQ ID NO: 2559816 - DNA, 25 bp, Homo sapien
gtagctcattgtgatgtgaacgaca

SEQ ID NO: 2559817 - DNA, 25 bp, Homo sapien
taaatgtcagacaaactacagtgac

SEQ ID NO: 2559818 - DNA, 25 bp, Homo sapien
gaacgacatgaggaacatgctttcc

SEQ ID NO: 2559819 - DNA, 25 bp, Homo sapien
ttgttcagggaccatcgggagccca

SEQ ID NO: 2559820 - DNA, 25 bp, Homo sapien
tgctctgtttcacgggactccacaa

SEQ ID NO: 2559821 - DNA, 25 bp, Homo sapien
aaagatgccctcttgatgttggcca

SEQ ID NO: 2559822 - DNA, 25 bp, Homo sapien
tgaagctctgttgagcccgatggag

SEQ ID NO: 2559823 - DNA, 25 bp, Homo sapien
ctgggttgaccgggctgttgtatct

SEQ ID NO: 2559824 - DNA, 25 bp, Homo sapien
gccaaaagctctacaatcagatggg

SEQ ID NO: 2559825 - DNA, 25 bp, Homo sapien
gtcgatggccaaaagctctacaatc

SEQ ID NO: 2559826 - DNA, 25 bp, Homo sapien
gaacatgtcgatggccaaaagctct

SEQ ID NO: 2559827 - DNA, 25 bp, Homo sapien
cagctggcaaacaccagtggtattc

SEQ ID NO: 2559828 - DNA, 25 bp, Homo sapien
tctccacagcgatttctacagtatg

SEQ ID NO: 2559829 - DNA, 25 bp, Homo sapien
gccgggaccagccatgcattggttt

SEQ ID NO: 2559830 - DNA, 25 bp, Homo sapien
gttacttgttgccatgccgggacca

SEQ ID NO: 2559831 - DNA, 25 bp, Homo sapien
gaattgaggactgagcgaatattgg

SEQ ID NO: 2559832 - DNA, 25 bp, Homo sapien
ttgaggactgagcgaatattggact

SEQ ID NO: 2559833 - DNA, 25 bp, Homo sapien
tggactgacattcctcggggattga

SEQ ID NO: 2559834 - DNA, 25 bp, Homo sapien
ggactgacattcctcggggattgag

SEQ ID NO: 2559835 - DNA, 25 bp, Homo sapien
cagaagatccccatagtggtgggca

SEQ ID NO: 2559836 - DNA, 25 bp, Homo sapien
gaatgaaacaattgcctgagatggc

SEQ ID NO: 2559837 - DNA, 25 bp, Homo sapien
cttgctggccagtgataatgaccga

SEQ ID NO: 2559838 - DNA, 25 bp, Homo sapien
gaacatctggatttgacacgctcca

SEQ ID NO: 2559839 - DNA, 25 bp, Homo sapien
gcggtgcatgtctgaaaggcacggc

SEQ ID NO: 2559840 - DNA, 25 bp, Homo sapien
ggagcggtgcatgtctgaaaggcac

SEQ ID NO: 2559841 - DNA, 25 bp, Homo sapien
agaggagcggtgcatgtctgaaagg

SEQ ID NO: 2559842 - DNA, 25 bp, Homo sapien
gtgcatgtctgaaaggcacggcgct

SEQ ID NO: 2559843 - DNA, 25 bp, Homo sapien
ttgataatggcacggtggatctcct

SEQ ID NO: 2559844 - DNA, 25 bp, Homo sapien
ttgggttaagcatgggaggcacaaa

SEQ ID NO: 2559845 - DNA, 25 bp, Homo sapien
gcacaaaaaggtagacattggccat

SEQ ID NO: 2559846 - DNA, 25 bp, Homo sapien
ggtcttaatgctgtatatgattggg

SEQ ID NO: 2559847 - DNA, 25 bp, Homo sapien
ctgggatgccaaccaaaatgaaagt

SEQ ID NO: 2559848 - DNA, 25 bp, Homo sapien
gatgccaaccaaaatgaaagtcgta

SEQ ID NO: 2559849 - DNA, 25 bp, Homo sapien
gggatgccaaccaaaatgaaagtcg

SEQ ID NO: 2559850 - DNA, 25 bp, Homo sapien
tgccaaccaaaatgaaagtcgtagg

SEQ ID NO: 2559851 - DNA, 25 bp, Homo sapien
ggacggatatccagaggtgctctga

SEQ ID NO: 2559852 - DNA, 25 bp, Homo sapien
tgtagggcaatatctgttctgatga

SEQ ID NO: 2559853 - DNA, 25 bp, Homo sapien
gttctgatgacgtgaagaatgatgc

SEQ ID NO: 2559854 - DNA, 25 bp, Homo sapien
ctcggccagtgccaacatggcaagg

SEQ ID NO: 2559855 - DNA, 25 bp, Homo sapien
aaaaaggaatatgcctaacactgta

SEQ ID NO: 2559856 - DNA, 25 bp, Homo sapien
aaaaggaatatgcctaacactgtag

SEQ ID NO: 2559857 - DNA, 25 bp, Homo sapien
caaaaaggaatatgcctaacactgt

SEQ ID NO: 2559858 - DNA, 25 bp, Homo sapien
caacggagccatgagcataatgctt

SEQ ID NO: 2559859 - DNA, 25 bp, Homo sapien
cagtgtcaggatagctgtgtagctc

SEQ ID NO: 2559860 - DNA, 25 bp, Homo sapien
ccataagagaatgggcaacggagcc

SEQ ID NO: 2559861 - DNA, 25 bp, Homo sapien
gtacgataatagctcctgtgccaaa

SEQ ID NO: 2559862 - DNA, 25 bp, Homo sapien
tagcattcggacaatggcaccatgg

SEQ ID NO: 2559863 - DNA, 25 bp, Homo sapien
cgaatccagcccaaaagtagaggta

SEQ ID NO: 2559864 - DNA, 25 bp, Homo sapien
gcggtgcactatagacaagccaatc

SEQ ID NO: 2559865 - DNA, 25 bp, Homo sapien
gacacacgatgtccaaggcggtgca

SEQ ID NO: 2559866 - DNA, 25 bp, Homo sapien
gccttggaggtaccctcgtcaccat

SEQ ID NO: 2559867 - DNA, 25 bp, Homo sapien
tttctcctgccttggaggtaccctc

SEQ ID NO: 2559868 - DNA, 25 bp, Homo sapien
tggtttctcctgccttggaggtacc

SEQ ID NO: 2559869 - DNA, 25 bp, Homo sapien
tcctgccttggaggtaccctcgtca

SEQ ID NO: 2559870 - DNA, 25 bp, Homo sapien
gactgatgaatgtgtcttcagattc

SEQ ID NO: 2559871 - DNA, 25 bp, Homo sapien
atgaatgtgtcttcagattcaggat

SEQ ID NO: 2559872 - DNA, 25 bp, Homo sapien
actgatgaatgtgtcttcagattca

SEQ ID NO: 2559873 - DNA, 25 bp, Homo sapien
tgatgaatgtgtcttcagattcagg

SEQ ID NO: 2559874 - DNA, 25 bp, Homo sapien
gagtcatagatacaccaaccatggg

SEQ ID NO: 2559875 - DNA, 25 bp, Homo sapien
caaccatgggaatgtagaggaccag

SEQ ID NO: 2559876 - DNA, 25 bp, Homo sapien
tcaacggacatagccaggaggacag

SEQ ID NO: 2559877 - DNA, 25 bp, Homo sapien
tacgaacgttgaaccagagaagctg

SEQ ID NO: 2559878 - DNA, 25 bp, Homo sapien
tgaatgcatatttttgagggaaagg

SEQ ID NO: 2559879 - DNA, 25 bp, Homo sapien
gaacaaatgttgtctcatcgtgcag

SEQ ID NO: 2559880 - DNA, 25 bp, Homo sapien
gaagaatagatggaaagtttatctg

SEQ ID NO: 2559881 - DNA, 25 bp, Homo sapien
ggactaggacaaagttcctctgtgc

SEQ ID NO: 2559882 - DNA, 25 bp, Homo sapien
gttggacggtcggtatataccatct

SEQ ID NO: 2559883 - DNA, 25 bp, Homo sapien
gtaagttgtaacaacaacacacttc

SEQ ID NO: 2559884 - DNA, 25 bp, Homo sapien
aagtaagttgtaacaacaacacact

SEQ ID NO: 2559885 - DNA, 25 bp, Homo sapien
tcaaagtaagttgtaacaacaacac

SEQ ID NO: 2559886 - DNA, 25 bp, Homo sapien
caaagtaagttgtaacaacaacaca

SEQ ID NO: 2559887 - DNA, 25 bp, Homo sapien
tgagcacagttgcatagcgcaaggg

SEQ ID NO: 2559888 - DNA, 25 bp, Homo sapien
cattgaggcagaaggttcggagtac

SEQ ID NO: 2559889 - DNA, 25 bp, Homo sapien
caggcaagcctcatcatgtctgggt

SEQ ID NO: 2559890 - DNA, 25 bp, Homo sapien
ttcctcacgggaagcagtggccatg

SEQ ID NO: 2559891 - DNA, 25 bp, Homo sapien
gcacaggaggcacaaataggtacac

SEQ ID NO: 2559892 - DNA, 25 bp, Homo sapien
tgaaacatgcggaaaatggctcggc

SEQ ID NO: 2559893 - DNA, 25 bp, Homo sapien
caagtacagccaggatatgtgacac

SEQ ID NO: 2559894 - DNA, 25 bp, Homo sapien
tcccaaagcggtgcactgtggagac

SEQ ID NO: 2559895 - DNA, 25 bp, Homo sapien
tctgcatgcagacctgattcggctg

SEQ ID NO: 2559896 - DNA, 25 bp, Homo sapien
cactgatgtccgtgtggcccacaat

SEQ ID NO: 2559897 - DNA, 25 bp, Homo sapien
catgagttttgaccactatgtggcc

SEQ ID NO: 2559898 - DNA, 25 bp, Homo sapien
tatccattgtcatccgcagcttctg

SEQ ID NO: 2559899 - DNA, 25 bp, Homo sapien
tacaagatacatggcacagaaaggg

SEQ ID NO: 2559900 - DNA, 25 bp, Homo sapien
agggcagcatttccaaccagtgcta

SEQ ID NO: 2559901 - DNA, 25 bp, Homo sapien
agggatggcaatccagaagtgggca

SEQ ID NO: 2559902 - DNA, 25 bp, Homo sapien
gaagatggttatcactgaggttgga

SEQ ID NO: 2559903 - DNA, 25 bp, Homo sapien
gagtcgcctcagcaagaagatgaag

SEQ ID NO: 2559904 - DNA, 25 bp, Homo sapien
ggagacaatagccacactacggaat

SEQ ID NO: 2559905 - DNA, 25 bp, Homo sapien
gcaccagcacatagagattagccag

SEQ ID NO: 2559906 - DNA, 25 bp, Homo sapien
ttgacagtgatgttggcacaggcca

SEQ ID NO: 2559907 - DNA, 25 bp, Homo sapien
ctccatagagaataggattgagtac

SEQ ID NO: 2559908 - DNA, 25 bp, Homo sapien
agtcgactccgaatctccttggttc

SEQ ID NO: 2559909 - DNA, 25 bp, Homo sapien
gttttagaagtcgactccgaatctc

SEQ ID NO: 2559910 - DNA, 25 bp, Homo sapien
gttctagctccatagagaataggat

SEQ ID NO: 2559911 - DNA, 25 bp, Homo sapien
tgatcttggtctccaatccccatgc

SEQ ID NO: 2559912 - DNA, 25 bp, Homo sapien
aaaggatgatcttggtctccaatcc

SEQ ID NO: 2559913 - DNA, 25 bp, Homo sapien
cattgcctgaaaggatgatcttggt

SEQ ID NO: 2559914 - DNA, 25 bp, Homo sapien
ttttgccattgcctgaaaggatgat

SEQ ID NO: 2559915 - DNA, 25 bp, Homo sapien
tggagaaaacctggcgtaccagcca

SEQ ID NO: 2559916 - DNA, 25 bp, Homo sapien
tggtgccacctataacaaccgcttt

SEQ ID NO: 2559917 - DNA, 25 bp, Homo sapien
gcaacctggttgtgagtcgtctcaa

SEQ ID NO: 2559918 - DNA, 25 bp, Homo sapien
aacgctagcaccctagaagtggaga

SEQ ID NO: 2559919 - DNA, 25 bp, Homo sapien
ggtaatcctaaagagctggactctg

SEQ ID NO: 2559920 - DNA, 25 bp, Homo sapien
gagttgatctatcccagtggtttcc

SEQ ID NO: 2559921 - DNA, 25 bp, Homo sapien
tttccacaatcacagcagatctgat

SEQ ID NO: 2559922 - DNA, 25 bp, Homo sapien
gcatctcaaggcttatgtgaaggaa

SEQ ID NO: 2559923 - DNA, 25 bp, Homo sapien
caagatgcccgtcagaaggcccttt

SEQ ID NO: 2559924 - DNA, 25 bp, Homo sapien
gcctgtgctgatatctccatcaata

SEQ ID NO: 2559925 - DNA, 25 bp, Homo sapien
catgacggtgatgacagacgtgatc

SEQ ID NO: 2559926 - DNA, 25 bp, Homo sapien
gtggttcccatgtctgtgttatcct

SEQ ID NO: 2559927 - DNA, 25 bp, Homo sapien
cccaaaaccattgtcaaaattgctg

SEQ ID NO: 2559928 - DNA, 25 bp, Homo sapien
tgggaatatgtttccgaagtttctg

SEQ ID NO: 2559929 - DNA, 25 bp, Homo sapien
gatacactactattctgactcccaa

SEQ ID NO: 2559930 - DNA, 25 bp, Homo sapien
ccatgtgttttccttgtgaatcgtt

SEQ ID NO: 2559931 - DNA, 25 bp, Homo sapien
gcagtgagccccatagaggtgccta

SEQ ID NO: 2559932 - DNA, 25 bp, Homo sapien
gtctccagctaaacagcacacaggg

SEQ ID NO: 2559933 - DNA, 25 bp, Homo sapien
tatggctcctaagaaagtcccagtg

SEQ ID NO: 2559934 - DNA, 25 bp, Homo sapien
cagacacgatgagcctgagagcatt

SEQ ID NO: 2559935 - DNA, 25 bp, Homo sapien
gccaccaaaggagatgtccacatca

SEQ ID NO: 2559936 - DNA, 25 bp, Homo sapien
gccaggaacgccaatgaggacaaac

SEQ ID NO: 2559937 - DNA, 25 bp, Homo sapien
ggatggagatccacacgtgcagctc

SEQ ID NO: 2559938 - DNA, 25 bp, Homo sapien
gagaatgcctgactccgctacaaag

SEQ ID NO: 2559939 - DNA, 25 bp, Homo sapien
tcagaacaacctagctttgccagcc

SEQ ID NO: 2559940 - DNA, 25 bp, Homo sapien
caatgatgtttgtccggcagaaggg

SEQ ID NO: 2559941 - DNA, 25 bp, Homo sapien
ggcagacgcttcacaaggaagacga

SEQ ID NO: 2559942 - DNA, 25 bp, Homo sapien
cactgtggctaaggatggtgctata

SEQ ID NO: 2559943 - DNA, 25 bp, Homo sapien
tctaacgtaacactgagtagtggta

SEQ ID NO: 2559944 - DNA, 25 bp, Homo sapien
tatctaacgtaacactgagtagtgg

SEQ ID NO: 2559945 - DNA, 25 bp, Homo sapien
ctaacgtaacactgagtagtggtac

SEQ ID NO: 2559946 - DNA, 25 bp, Homo sapien
catatctaacgtaacactgagtagt

SEQ ID NO: 2559947 - DNA, 25 bp, Homo sapien
atcatggggggaacaagaacataga

SEQ ID NO: 2559948 - DNA, 25 bp, Homo sapien
aagggcaacccctttctgaatctgt

SEQ ID NO: 2559949 - DNA, 25 bp, Homo sapien
tagagattggccagcaggatgtgga

SEQ ID NO: 2559950 - DNA, 25 bp, Homo sapien
cacaagggcaacccctttctgaatc

SEQ ID NO: 2559951 - DNA, 25 bp, Homo sapien
ttagtttctgttctgcggaaagtgt

SEQ ID NO: 2559952 - DNA, 25 bp, Homo sapien
agtttctgttctgcggaaagtgtaa

SEQ ID NO: 2559953 - DNA, 25 bp, Homo sapien
ttatgggcaaaaaactcgaggactg

SEQ ID NO: 2559954 - DNA, 25 bp, Homo sapien
ttctgttctgcggaaagtgtaaagc

SEQ ID NO: 2559955 - DNA, 25 bp, Homo sapien
gaagcagcctgctatgcgagtgtca

SEQ ID NO: 2559956 - DNA, 25 bp, Homo sapien
cagatatgtagttgctccagcccag

SEQ ID NO: 2559957 - DNA, 25 bp, Homo sapien
gaggatgacacaaattaggatgcca

SEQ ID NO: 2559958 - DNA, 25 bp, Homo sapien
ccttccagggcagtgatgtacatga

SEQ ID NO: 2559959 - DNA, 25 bp, Homo sapien
gtggtagagagcaagacatcagcac

SEQ ID NO: 2559960 - DNA, 25 bp, Homo sapien
gtggtggtagagagcaagacatcag

SEQ ID NO: 2559961 - DNA, 25 bp, Homo sapien
tggtggtagagagcaagacatcagc

SEQ ID NO: 2559962 - DNA, 25 bp, Homo sapien
ggtggtagagagcaagacatcagca

SEQ ID NO: 2559963 - DNA, 25 bp, Homo sapien
taacctagccacaaattggccaggg

SEQ ID NO: 2559964 - DNA, 25 bp, Homo sapien
gcggcagtgacgatcttcccaatga

SEQ ID NO: 2559965 - DNA, 25 bp, Homo sapien
gaccttgcttgtgaggattgtgaca

SEQ ID NO: 2559966 - DNA, 25 bp, Homo sapien
taagcatgatgtctaggcctgtgga

SEQ ID NO: 2559967 - DNA, 25 bp, Homo sapien
cttggaggatgtggatgtaggaaac

SEQ ID NO: 2559968 - DNA, 25 bp, Homo sapien
gggcatcttgagaaaggaggcggaa

SEQ ID NO: 2559969 - DNA, 25 bp, Homo sapien
tagaagagtaggatgacacagatat

SEQ ID NO: 2559970 - DNA, 25 bp, Homo sapien
acacagatatgggatccacaggtac

SEQ ID NO: 2559971 - DNA, 25 bp, Homo sapien
gatatgggatccacaggtactcagg

SEQ ID NO: 2559972 - DNA, 25 bp, Homo sapien
gatcctttggcaagatttgaaaaca

SEQ ID NO: 2559973 - DNA, 25 bp, Homo sapien
ggaatgacaacgtagaggctggcca

SEQ ID NO: 2559974 - DNA, 25 bp, Homo sapien
taaataacgggattgagcataggag

SEQ ID NO: 2559975 - DNA, 25 bp, Homo sapien
cagtattggcttagtcctcactcca

SEQ ID NO: 2559976 - DNA, 25 bp, Homo sapien
ctccatagtcttgtcagcatagggc

SEQ ID NO: 2559977 - DNA, 25 bp, Homo sapien
tagtcttgtcagcatagggcttcat

SEQ ID NO: 2559978 - DNA, 25 bp, Homo sapien
aggctccatagtcttgtcagcatag

SEQ ID NO: 2559979 - DNA, 25 bp, Homo sapien
ccatagtcttgtcagcatagggctt

SEQ ID NO: 2559980 - DNA, 25 bp, Homo sapien
caaggacttgaagcagccgcgtcct

SEQ ID NO: 2559981 - DNA, 25 bp, Homo sapien
aaggacttgaagcagccgcgtcctc

SEQ ID NO: 2559982 - DNA, 25 bp, Homo sapien
agccaaggacttgaagcagccgcgt

SEQ ID NO: 2559983 - DNA, 25 bp, Homo sapien
ccaaggacttgaagcagccgcgtcc

SEQ ID NO: 2559984 - DNA, 25 bp, Homo sapien
gggtcaaactctccagacaagtggg

SEQ ID NO: 2559985 - DNA, 25 bp, Homo sapien
cgggtcaaactctccagacaagtgg

SEQ ID NO: 2559986 - DNA, 25 bp, Homo sapien
caacccgacctgcagagcgggtcaa

SEQ ID NO: 2559987 - DNA, 25 bp, Homo sapien
ccgacctgcagagcgggtcaaactc

SEQ ID NO: 2559988 - DNA, 25 bp, Homo sapien
gctccgttccgttccgagaaaggca

SEQ ID NO: 2559989 - DNA, 25 bp, Homo sapien
tatcaggtggtcaaagctcttcaga

SEQ ID NO: 2559990 - DNA, 25 bp, Homo sapien
tcttaaggaacagagcgcgctcact

SEQ ID NO: 2559991 - DNA, 25 bp, Homo sapien
tcttcagagcaatccaaggcacctt

SEQ ID NO: 2559992 - DNA, 25 bp, Homo sapien
ggagaataagggaatactgactgcc

SEQ ID NO: 2559993 - DNA, 25 bp, Homo sapien
tttctccccatattaaagcagtgat

SEQ ID NO: 2559994 - DNA, 25 bp, Homo sapien
tcctggataaagaggtcagacacct

SEQ ID NO: 2559995 - DNA, 25 bp, Homo sapien
tttatcccggctcatacaaggcacc

SEQ ID NO: 2559996 - DNA, 25 bp, Homo sapien
tgcccaaccctgatttctaagatgt

SEQ ID NO: 2559997 - DNA, 25 bp, Homo sapien
tgatttctaagatgtttcctgcctg

SEQ ID NO: 2559998 - DNA, 25 bp, Homo sapien
gcctgcccaaccctgatttctaaga

SEQ ID NO: 2559999 - DNA, 25 bp, Homo sapien
caaccctgatttctaagatgtttcc

SEQ ID NO: 2560000 - DNA, 25 bp, Homo sapien
tgtccaccagtactggtgaagtcat

SEQ ID NO: 2560001 - DNA, 25 bp, Homo sapien
ggcaggtcacctcttctcgtatgtc

SEQ ID NO: 2560002 - DNA, 25 bp, Homo sapien
tttccccttcttgaccaatcactga

SEQ ID NO: 2560003 - DNA, 25 bp, Homo sapien
tctctgagccgcctcactatgttgg

SEQ ID NO: 2560004 - DNA, 25 bp, Homo sapien
acagaagagctgcagtttttctcca

SEQ ID NO: 2560005 - DNA, 25 bp, Homo sapien
cctcctccacgaggaacgtgtggtg

SEQ ID NO: 2560006 - DNA, 25 bp, Homo sapien
ctgggcaacctcctccacgaggaac

SEQ ID NO: 2560007 - DNA, 25 bp, Homo sapien
ctcctgacagaagagctgcagtttt

SEQ ID NO: 2560008 - DNA, 25 bp, Homo sapien
ctctgataaaagctgttagcttctc

SEQ ID NO: 2560009 - DNA, 25 bp, Homo sapien
ctgataaaagctgttagcttctcag

SEQ ID NO: 2560010 - DNA, 25 bp, Homo sapien
tctgataaaagctgttagcttctca

SEQ ID NO: 2560011 - DNA, 25 bp, Homo sapien
ctgcattttcccttgcatttgtact

SEQ ID NO: 2560012 - DNA, 25 bp, Homo sapien
agaaaaagaggctgctagtcggtca

SEQ ID NO: 2560013 - DNA, 25 bp, Homo sapien
gctgctagtcggtcacactgagggt

SEQ ID NO: 2560014 - DNA, 25 bp, Homo sapien
aagaggctgctagtcggtcacactg

SEQ ID NO: 2560015 - DNA, 25 bp, Homo sapien
aaaaagaggctgctagtcggtcaca

SEQ ID NO: 2560016 - DNA, 25 bp, Homo sapien
gatccgagatgagctctcgcagcga

SEQ ID NO: 2560017 - DNA, 25 bp, Homo sapien
cactctgtctaggatatttcgcagc

SEQ ID NO: 2560018 - DNA, 25 bp, Homo sapien
gctccattgttgacccctgacatcg

SEQ ID NO: 2560019 - DNA, 25 bp, Homo sapien
tggtggaccagatcattctcagcct

SEQ ID NO: 2560020 - DNA, 25 bp, Homo sapien
taaacagtttaataggggataggca

SEQ ID NO: 2560021 - DNA, 25 bp, Homo sapien
ggataggcactatagcgccaaagga

SEQ ID NO: 2560022 - DNA, 25 bp, Homo sapien
gcaacgatggtagtctgatgtccca

SEQ ID NO: 2560023 - DNA, 25 bp, Homo sapien
tctcttgtccctgcaacgatggtag

SEQ ID NO: 2560024 - DNA, 25 bp, Homo sapien
agagtacagatttcagaagggacga

SEQ ID NO: 2560025 - DNA, 25 bp, Homo sapien
gacatgtcaccttgttggatgagac

SEQ ID NO: 2560026 - DNA, 25 bp, Homo sapien
gatagggttcccatttcgtgtgtct

SEQ ID NO: 2560027 - DNA, 25 bp, Homo sapien
gaggaaccaagtgtgcaagcagctt

SEQ ID NO: 2560028 - DNA, 25 bp, Homo sapien
tctgtgtcctagagatgttatgcag

SEQ ID NO: 2560029 - DNA, 25 bp, Homo sapien
aaaatcagaggggttgaagatgtct

SEQ ID NO: 2560030 - DNA, 25 bp, Homo sapien
tttaaaatcagaggggttgaagatg

SEQ ID NO: 2560031 - DNA, 25 bp, Homo sapien
tttgctacctctaaaaaaagatata

SEQ ID NO: 2560032 - DNA, 25 bp, Homo sapien
tctgaatacacttagcatcattctg

SEQ ID NO: 2560033 - DNA, 25 bp, Homo sapien
ctcccaagcctactgatgaattcca

SEQ ID NO: 2560034 - DNA, 25 bp, Homo sapien
gcctactgatgaattccaatcctcc

SEQ ID NO: 2560035 - DNA, 25 bp, Homo sapien
gaatacacttagcatcattctgcaa

SEQ ID NO: 2560036 - DNA, 25 bp, Homo sapien
aaggacaggacttctgagttcccac

SEQ ID NO: 2560037 - DNA, 25 bp, Homo sapien
aaaggacaggacttctgagttccca

SEQ ID NO: 2560038 - DNA, 25 bp, Homo sapien
agatctggggctcggaacatacttc

SEQ ID NO: 2560039 - DNA, 25 bp, Homo sapien
actcgcagcatccttttcagatctg

SEQ ID NO: 2560040 - DNA, 25 bp, Homo sapien
tacacactcgcagcatccttttcag

SEQ ID NO: 2560041 - DNA, 25 bp, Homo sapien
gctcggaacatacttctcagctttg

SEQ ID NO: 2560042 - DNA, 25 bp, Homo sapien
ctctctccttactacattgagggga

SEQ ID NO: 2560043 - DNA, 25 bp, Homo sapien
atgttgaataggaccaactgtctca

SEQ ID NO: 2560044 - DNA, 25 bp, Homo sapien
gttgaataggaccaactgtctcatg

SEQ ID NO: 2560045 - DNA, 25 bp, Homo sapien
cttactacattgaggggaatggtga

SEQ ID NO: 2560046 - DNA, 25 bp, Homo sapien
cagtagctttggacatctgtcagct

SEQ ID NO: 2560047 - DNA, 25 bp, Homo sapien
ccagtagctttggacatctgtcagc

SEQ ID NO: 2560048 - DNA, 25 bp, Homo sapien
cccagtagctttggacatctgtcag

SEQ ID NO: 2560049 - DNA, 25 bp, Homo sapien
ggtacaacatcagcagatgagaacg

SEQ ID NO: 2560050 - DNA, 25 bp, Homo sapien
aaggtacaacatcagcagatgagaa

SEQ ID NO: 2560051 - DNA, 25 bp, Homo sapien
aaaggtacaacatcagcagatgaga

SEQ ID NO: 2560052 - DNA, 25 bp, Homo sapien
tacaacatcagcagatgagaacggg

SEQ ID NO: 2560053 - DNA, 25 bp, Homo sapien
ggtccagatactttagctcccacaa

SEQ ID NO: 2560054 - DNA, 25 bp, Homo sapien
aatgtaggtcccagtgaattgctgc

SEQ ID NO: 2560055 - DNA, 25 bp, Homo sapien
tgggagcccaggacactacagtcat

SEQ ID NO: 2560056 - DNA, 25 bp, Homo sapien
gctgatacctggagtaagcactgtg

SEQ ID NO: 2560057 - DNA, 25 bp, Homo sapien
gggtcataggaattacacagttgca

SEQ ID NO: 2560058 - DNA, 25 bp, Homo sapien
tcaagagcttggacgacgcagggtc

SEQ ID NO: 2560059 - DNA, 25 bp, Homo sapien
tatggacaaagagtagtgggaaagt

SEQ ID NO: 2560060 - DNA, 25 bp, Homo sapien
agttgcaaggattaaaatatggaca

SEQ ID NO: 2560061 - DNA, 25 bp, Homo sapien
agaatcacatgctgataagcctcag

SEQ ID NO: 2560062 - DNA, 25 bp, Homo sapien
tgctgataagcctcagggtacttat

SEQ ID NO: 2560063 - DNA, 25 bp, Homo sapien
gcctcagggtacttatcagaagtgg

SEQ ID NO: 2560064 - DNA, 25 bp, Homo sapien
taagcctcagggtacttatcagaag

SEQ ID NO: 2560065 - DNA, 25 bp, Homo sapien
tgcattttatagaacctggcaaaga

SEQ ID NO: 2560066 - DNA, 25 bp, Homo sapien
cactgggtgcatcctagtactgagt

SEQ ID NO: 2560067 - DNA, 25 bp, Homo sapien
tatccacctcaagacctgtcatcag

SEQ ID NO: 2560068 - DNA, 25 bp, Homo sapien
gacataggtagaatacgagttttca

SEQ ID NO: 2560069 - DNA, 25 bp, Homo sapien
gaagtactcaacagacattggtggc

SEQ ID NO: 2560070 - DNA, 25 bp, Homo sapien
cagactaggcatgtatgaagtactc

SEQ ID NO: 2560071 - DNA, 25 bp, Homo sapien
ggctcctggataccatatgggacag

SEQ ID NO: 2560072 - DNA, 25 bp, Homo sapien
tgttcctgcgcataaagagagtgtg

SEQ ID NO: 2560073 - DNA, 25 bp, Homo sapien
ttgcatgagtcaggacgggcgcagt

SEQ ID NO: 2560074 - DNA, 25 bp, Homo sapien
agcagaagttgcatgagtcaggacg

SEQ ID NO: 2560075 - DNA, 25 bp, Homo sapien
aagttgcatgagtcaggacgggcgc

SEQ ID NO: 2560076 - DNA, 25 bp, Homo sapien
gaagcagaagttgcatgagtcagga

SEQ ID NO: 2560077 - DNA, 25 bp, Homo sapien
gagcaacagaaatctcggctcctgg

SEQ ID NO: 2560078 - DNA, 25 bp, Homo sapien
agaaatctcggctcctggttgaaga

SEQ ID NO: 2560079 - DNA, 25 bp, Homo sapien
caacagaaatctcggctcctggttg

SEQ ID NO: 2560080 - DNA, 25 bp, Homo sapien
cagaaatctcggctcctggttgaag

SEQ ID NO: 2560081 - DNA, 25 bp, Homo sapien
tccctggcttcttctggtcctaact

SEQ ID NO: 2560082 - DNA, 25 bp, Homo sapien
tcttctggttaaagacccctggatg

SEQ ID NO: 2560083 - DNA, 25 bp, Homo sapien
tcctctctcttctggttaaagaccc

SEQ ID NO: 2560084 - DNA, 25 bp, Homo sapien
tctggtcctaactcctgaggctctc

SEQ ID NO: 2560085 - DNA, 25 bp, Homo sapien
ctcctcttgtacgttaagcaagatt

SEQ ID NO: 2560086 - DNA, 25 bp, Homo sapien
cctcttgtacgttaagcaagatttt

SEQ ID NO: 2560087 - DNA, 25 bp, Homo sapien
tacgttaagcaagatttttgaagcc

SEQ ID NO: 2560088 - DNA, 25 bp, Homo sapien
cttgtacgttaagcaagatttttga

SEQ ID NO: 2560089 - DNA, 25 bp, Homo sapien
cacagtctagactcaagggttctgt

SEQ ID NO: 2560090 - DNA, 25 bp, Homo sapien
tagactcaagggttctgtcaacagc

SEQ ID NO: 2560091 - DNA, 25 bp, Homo sapien
ttgctcacagtgatgcaggctcggc

SEQ ID NO: 2560092 - DNA, 25 bp, Homo sapien
tgctcacagtgatgcaggctcggca

SEQ ID NO: 2560093 - DNA, 25 bp, Homo sapien
tttctctccatgatgatcacagaga

SEQ ID NO: 2560094 - DNA, 25 bp, Homo sapien
tctccatgatgatcacagagatctc

SEQ ID NO: 2560095 - DNA, 25 bp, Homo sapien
ctccatgatgatcacagagatctct

SEQ ID NO: 2560096 - DNA, 25 bp, Homo sapien
cacggtgctcctgagaccgctcaca

SEQ ID NO: 2560097 - DNA, 25 bp, Homo sapien
gtgctcctgagaccgctcacaaagc

SEQ ID NO: 2560098 - DNA, 25 bp, Homo sapien
ggtgctcctgagaccgctcacaaag

SEQ ID NO: 2560099 - DNA, 25 bp, Homo sapien
tcctgagaccgctcacaaagccagc

SEQ ID NO: 2560100 - DNA, 25 bp, Homo sapien
ttctcttctctgatgtcagcttcca

SEQ ID NO: 2560101 - DNA, 25 bp, Homo sapien
cttcagcctcttgaggactgcctgg

SEQ ID NO: 2560102 - DNA, 25 bp, Homo sapien
ttctctgatgtcagcttccagcttc

SEQ ID NO: 2560103 - DNA, 25 bp, Homo sapien
tcagcctcttgaggactgcctggag

SEQ ID NO: 2560104 - DNA, 25 bp, Homo sapien
tcagcctctgcaaacttatccagcg

SEQ ID NO: 2560105 - DNA, 25 bp, Homo sapien
tatttaggatgcttctaagctgatc

SEQ ID NO: 2560106 - DNA, 25 bp, Homo sapien
tctctgctcctcattatttaggatg

SEQ ID NO: 2560107 - DNA, 25 bp, Homo sapien
accaactgcttctgctgaactagct

SEQ ID NO: 2560108 - DNA, 25 bp, Homo sapien
ttataactcacaagcaccactcctg

SEQ ID NO: 2560109 - DNA, 25 bp, Homo sapien
gaccaccaaataactctaatagcta

SEQ ID NO: 2560110 - DNA, 25 bp, Homo sapien
ccaattgaccaccaaataactctaa

SEQ ID NO: 2560111 - DNA, 25 bp, Homo sapien
aataactctaatagctacaaacact

SEQ ID NO: 2560112 - DNA, 25 bp, Homo sapien
ttttattccaattgaccaccaaata

SEQ ID NO: 2560113 - DNA, 25 bp, Homo sapien
cactgatgcacttgaacccttctcc

SEQ ID NO: 2560114 - DNA, 25 bp, Homo sapien
cctgtgtccatccctcccacatcac

SEQ ID NO: 2560115 - DNA, 25 bp, Homo sapien
tgtgtccatccctcccacatcactg

SEQ ID NO: 2560116 - DNA, 25 bp, Homo sapien
atcactgatgcacttgaacccttct

SEQ ID NO: 2560117 - DNA, 25 bp, Homo sapien
gcagcatcctactcagatctggagc

SEQ ID NO: 2560118 - DNA, 25 bp, Homo sapien
cagcatcctactcagatctggagca

SEQ ID NO: 2560119 - DNA, 25 bp, Homo sapien
tgcagcatcctactcagatctggag

SEQ ID NO: 2560120 - DNA, 25 bp, Homo sapien
catttgcagcatcctactcagatct

SEQ ID NO: 2560121 - DNA, 25 bp, Homo sapien
gacaccacaacaatcccacatccac

SEQ ID NO: 2560122 - DNA, 25 bp, Homo sapien
ctgacaccacaacaatcccacatcc

SEQ ID NO: 2560123 - DNA, 25 bp, Homo sapien
aagggaataccatgaagctgtgagc

SEQ ID NO: 2560124 - DNA, 25 bp, Homo sapien
taagttatcccacctagacagttta

SEQ ID NO: 2560125 - DNA, 25 bp, Homo sapien
taaaccagagacctagccatttttc

SEQ ID NO: 2560126 - DNA, 25 bp, Homo sapien
gattagaaacaaaggagtaagcact

SEQ ID NO: 2560127 - DNA, 25 bp, Homo sapien
ccagtagcaccggacagctgtcagt

SEQ ID NO: 2560128 - DNA, 25 bp, Homo sapien
cagtagcaccggacagctgtcagtt

SEQ ID NO: 2560129 - DNA, 25 bp, Homo sapien
cccagtagcaccggacagctgtcag

SEQ ID NO: 2560130 - DNA, 25 bp, Homo sapien
ttgactgaattcagtgtgacatcca

SEQ ID NO: 2560131 - DNA, 25 bp, Homo sapien
gatcccaagacaccataattataac

SEQ ID NO: 2560132 - DNA, 25 bp, Homo sapien
attggcacagatatcacttgtctct

SEQ ID NO: 2560133 - DNA, 25 bp, Homo sapien
ttggcacagatatcacttgtctctg

SEQ ID NO: 2560134 - DNA, 25 bp, Homo sapien
cccaagacaccataattataacact

SEQ ID NO: 2560135 - DNA, 25 bp, Homo sapien
taaagattttgacgatttgcacatc

SEQ ID NO: 2560136 - DNA, 25 bp, Homo sapien
caacatacttcatatggcgggaata

SEQ ID NO: 2560137 - DNA, 25 bp, Homo sapien
tgtatttggtgtaaagattttgacg

SEQ ID NO: 2560138 - DNA, 25 bp, Homo sapien
tgttctacagtatacccccaggatc

SEQ ID NO: 2560139 - DNA, 25 bp, Homo sapien
ttcatagtcgaggaaaaccccaaca

SEQ ID NO: 2560140 - DNA, 25 bp, Homo sapien
agtcatgggagctggacagttccaa

SEQ ID NO: 2560141 - DNA, 25 bp, Homo sapien
tcaaaacctcgggatcagaggacaa

SEQ ID NO: 2560142 - DNA, 25 bp, Homo sapien
gcttggtgggcatagagtcatggga

SEQ ID NO: 2560143 - DNA, 25 bp, Homo sapien
tgttccagacactaaatcgatgcat

SEQ ID NO: 2560144 - DNA, 25 bp, Homo sapien
ggctttgggcctcttcatatcagtg

SEQ ID NO: 2560145 - DNA, 25 bp, Homo sapien
cagttgcaggagataagtcaagaca

SEQ ID NO: 2560146 - DNA, 25 bp, Homo sapien
gatgttatacccatactgctgtgtc

SEQ ID NO: 2560147 - DNA, 25 bp, Homo sapien
taaactctgttaatgtctcatggaa

SEQ ID NO: 2560148 - DNA, 25 bp, Homo sapien
tctcatggaacaggttgtgccttca

SEQ ID NO: 2560149 - DNA, 25 bp, Homo sapien
cagggaaactaggattggatttact

SEQ ID NO: 2560150 - DNA, 25 bp, Homo sapien
tagatctcagatactactgtcaaaa

SEQ ID NO: 2560151 - DNA, 25 bp, Homo sapien
ggttaggctcgtctagaacctctga

SEQ ID NO: 2560152 - DNA, 25 bp, Homo sapien
tggttaggctcgtctagaacctctg

SEQ ID NO: 2560153 - DNA, 25 bp, Homo sapien
ttaggctcgtctagaacctctgacc

SEQ ID NO: 2560154 - DNA, 25 bp, Homo sapien
gttaggctcgtctagaacctctgac

SEQ ID NO: 2560155 - DNA, 25 bp, Homo sapien
tgtgtcagtttaccctcgatgccct

SEQ ID NO: 2560156 - DNA, 25 bp, Homo sapien
caattgcctctgacactgactaaga

SEQ ID NO: 2560157 - DNA, 25 bp, Homo sapien
tccatataccagcagtgtaactgtg

SEQ ID NO: 2560158 - DNA, 25 bp, Homo sapien
tgaatgagtccttagccctgtgtca

SEQ ID NO: 2560159 - DNA, 25 bp, Homo sapien
gcctccagggtcaagagtttgcact

SEQ ID NO: 2560160 - DNA, 25 bp, Homo sapien
gaggagagctagatcaacaacaggg

SEQ ID NO: 2560161 - DNA, 25 bp, Homo sapien
cacattatcataagccaccctgcgg

SEQ ID NO: 2560162 - DNA, 25 bp, Homo sapien
tcttaggacggagaacgtgaccttg

SEQ ID NO: 2560163 - DNA, 25 bp, Homo sapien
ttatcttctagctccaacatctggg

SEQ ID NO: 2560164 - DNA, 25 bp, Homo sapien
ccctgagctgtggtattctatcttg

SEQ ID NO: 2560165 - DNA, 25 bp, Homo sapien
actacagctccgcactaccatgctc

SEQ ID NO: 2560166 - DNA, 25 bp, Homo sapien
ccatgctagtatgtagtggtgcgat

SEQ ID NO: 2560167 - DNA, 25 bp, Homo sapien
ggcaggagccggtgtaaaccagatt

SEQ ID NO: 2560168 - DNA, 25 bp, Homo sapien
gagctgagtgagaaacgaaagttaa

SEQ ID NO: 2560169 - DNA, 25 bp, Homo sapien
tggtctccacaaatgagtttcccca

SEQ ID NO: 2560170 - DNA, 25 bp, Homo sapien
ccagattcactcaccaagccagagg

SEQ ID NO: 2560171 - DNA, 25 bp, Homo sapien
gaagagtaagctgtgggtactcaga

SEQ ID NO: 2560172 - DNA, 25 bp, Homo sapien
agtaagctgtgggtactcagaagaa

SEQ ID NO: 2560173 - DNA, 25 bp, Homo sapien
gaagaacaagttccctgtgactgga

SEQ ID NO: 2560174 - DNA, 25 bp, Homo sapien
aagttccctgtgactggaccttcag

SEQ ID NO: 2560175 - DNA, 25 bp, Homo sapien
ctaccaatggagaaaataggtcctg

SEQ ID NO: 2560176 - DNA, 25 bp, Homo sapien
ggagaactcagaaacaccgttacca

SEQ ID NO: 2560177 - DNA, 25 bp, Homo sapien
ggatttttggctaggctttggcaca

SEQ ID NO: 2560178 - DNA, 25 bp, Homo sapien
caatgacccactaaaatgtccaggg

SEQ ID NO: 2560179 - DNA, 25 bp, Homo sapien
tgtcttgactcttgaagttcttggt

SEQ ID NO: 2560180 - DNA, 25 bp, Homo sapien
ttctgtcttgactcttgaagttctt

SEQ ID NO: 2560181 - DNA, 25 bp, Homo sapien
ccttctgtcttgactcttgaagttc

SEQ ID NO: 2560182 - DNA, 25 bp, Homo sapien
ttccttctgtcttgactcttgaagt

SEQ ID NO: 2560183 - DNA, 25 bp, Homo sapien
cttctctatgtctacctttactgag

SEQ ID NO: 2560184 - DNA, 25 bp, Homo sapien
tctctatgtctacctttactgagaa

SEQ ID NO: 2560185 - DNA, 25 bp, Homo sapien
ctctatgtctacctttactgagaaa

SEQ ID NO: 2560186 - DNA, 25 bp, Homo sapien
ccttctctatgtctacctttactga

SEQ ID NO: 2560187 - DNA, 25 bp, Homo sapien
tcccctcttgagatgatcactgact

SEQ ID NO: 2560188 - DNA, 25 bp, Homo sapien
caggctggaatctggtctgacacac

SEQ ID NO: 2560189 - DNA, 25 bp, Homo sapien
gggctcatcttgacctctttgactc

SEQ ID NO: 2560190 - DNA, 25 bp, Homo sapien
cgattaggtcggaggttcccaggct

SEQ ID NO: 2560191 - DNA, 25 bp, Homo sapien
cacctcgtttatgcggaatgtttgg

SEQ ID NO: 2560192 - DNA, 25 bp, Homo sapien
tgttcctgagacagttcacaaaccc

SEQ ID NO: 2560193 - DNA, 25 bp, Homo sapien
ttatgcggaatgtttggtgaccttg

SEQ ID NO: 2560194 - DNA, 25 bp, Homo sapien
ttgaccacctcgtttatgcggaatg

SEQ ID NO: 2560195 - DNA, 25 bp, Homo sapien
tctcttcctctatcttggagcctac

SEQ ID NO: 2560196 - DNA, 25 bp, Homo sapien
gctctctcttcctctatcttggagc

SEQ ID NO: 2560197 - DNA, 25 bp, Homo sapien
tgctctctcttcctctatcttggag

SEQ ID NO: 2560198 - DNA, 25 bp, Homo sapien
tctctcttcctctatcttggagcct

SEQ ID NO: 2560199 - DNA, 25 bp, Homo sapien
gctctccgttctatggtgacaaggg

SEQ ID NO: 2560200 - DNA, 25 bp, Homo sapien
taagcaaagagtatggaaagagatc

SEQ ID NO: 2560201 - DNA, 25 bp, Homo sapien
caaaaatactgttcttcttggaggg

SEQ ID NO: 2560202 - DNA, 25 bp, Homo sapien
gaaagagatcacagggctctccgtt

SEQ ID NO: 2560203 - DNA, 25 bp, Homo sapien
ttccaggcggttctctcttgtctga

SEQ ID NO: 2560204 - DNA, 25 bp, Homo sapien
tgttaattctagcacagcaaagagg

SEQ ID NO: 2560205 - DNA, 25 bp, Homo sapien
ggaacacaggattcacaggaagcgt

SEQ ID NO: 2560206 - DNA, 25 bp, Homo sapien
ggtctccttgtgatagagcccaggg

SEQ ID NO: 2560207 - DNA, 25 bp, Homo sapien
taattatcccttaggaggtgtctcc

SEQ ID NO: 2560208 - DNA, 25 bp, Homo sapien
tcaaaaggaataggaggcaaaagcc

SEQ ID NO: 2560209 - DNA, 25 bp, Homo sapien
gagacaaaatgtgatgcctgggtga

SEQ ID NO: 2560210 - DNA, 25 bp, Homo sapien
gcttggattgtagacacctgtcctg

SEQ ID NO: 2560211 - DNA, 25 bp, Homo sapien
cctgctttgtatgagcctgggagac

SEQ ID NO: 2560212 - DNA, 25 bp, Homo sapien
gctgctgccaggttatccagcacat

SEQ ID NO: 2560213 - DNA, 25 bp, Homo sapien
gatgactctcatttcattgaaccct

SEQ ID NO: 2560214 - DNA, 25 bp, Homo sapien
ctggagatctgagatgagcgtgctg

SEQ ID NO: 2560215 - DNA, 25 bp, Homo sapien
tctctgctcctcattgtccaagatg

SEQ ID NO: 2560216 - DNA, 25 bp, Homo sapien
gcatgccgggccaaaggaaccattt

SEQ ID NO: 2560217 - DNA, 25 bp, Homo sapien
gctcatggtacaaagaatcctctcc

SEQ ID NO: 2560218 - DNA, 25 bp, Homo sapien
tcttacgtaggtgctccatcccaag

SEQ ID NO: 2560219 - DNA, 25 bp, Homo sapien
aatgatctctgtgacccctgaaatg

SEQ ID NO: 2560220 - DNA, 25 bp, Homo sapien
tatatttgatctcccgctgtctgat

SEQ ID NO: 2560221 - DNA, 25 bp, Homo sapien
aacaaagacttgacctccagttgac

SEQ ID NO: 2560222 - DNA, 25 bp, Homo sapien
tgacttcacaccctcagaaatagtt

SEQ ID NO: 2560223 - DNA, 25 bp, Homo sapien
tatggcatcagcttgactctcctgg

SEQ ID NO: 2560224 - DNA, 25 bp, Homo sapien
acctttcaccatacttgctgacgca

SEQ ID NO: 2560225 - DNA, 25 bp, Homo sapien
gggagatgcctgacactggagtcca

SEQ ID NO: 2560226 - DNA, 25 bp, Homo sapien
agatgcctgacactggagtccagag

SEQ ID NO: 2560227 - DNA, 25 bp, Homo sapien
ttgctgacgcacttggaccctcttc

SEQ ID NO: 2560228 - DNA, 25 bp, Homo sapien
ctcggaatacactctttagtttctt

SEQ ID NO: 2560229 - DNA, 25 bp, Homo sapien
tcggaatacactctttagtttcttg

SEQ ID NO: 2560230 - DNA, 25 bp, Homo sapien
tgcagcatcccactcagatctggta

SEQ ID NO: 2560231 - DNA, 25 bp, Homo sapien
ctttaagaacttgcagcatcccact

SEQ ID NO: 2560232 - DNA, 25 bp, Homo sapien
taagaacttgcagcatcccactcag

SEQ ID NO: 2560233 - DNA, 25 bp, Homo sapien
ttgcagcatcccactcagatctggt

SEQ ID NO: 2560234 - DNA, 25 bp, Homo sapien
tagaagcaaataagtaagtactgac

SEQ ID NO: 2560235 - DNA, 25 bp, Homo sapien
ataagtaagtactgacacctgtctc

SEQ ID NO: 2560236 - DNA, 25 bp, Homo sapien
gttagaagcaaataagtaagtactg

SEQ ID NO: 2560237 - DNA, 25 bp, Homo sapien
agggggaatactgggattctttgca

SEQ ID NO: 2560238 - DNA, 25 bp, Homo sapien
ccagtagtactggacatctgtcagc

SEQ ID NO: 2560239 - DNA, 25 bp, Homo sapien
ggatatgggataggtgtgtcttaca

SEQ ID NO: 2560240 - DNA, 25 bp, Homo sapien
gtgtcttacagcattgagaagagac

SEQ ID NO: 2560241 - DNA, 25 bp, Homo sapien
aaattaccaagtcaagtgaaggata

SEQ ID NO: 2560242 - DNA, 25 bp, Homo sapien
caagtcaagtgaaggatatgggata

SEQ ID NO: 2560243 - DNA, 25 bp, Homo sapien
gaaatattggcagccgaagacacca

SEQ ID NO: 2560244 - DNA, 25 bp, Homo sapien
ttttactgtgtacgcccaggatcca

SEQ ID NO: 2560245 - DNA, 25 bp, Homo sapien
tagcaacattcgaagtggcactgcc

SEQ ID NO: 2560246 - DNA, 25 bp, Homo sapien
taaagagagtcaaaaccttgggatc

SEQ ID NO: 2560247 - DNA, 25 bp, Homo sapien
cgagaaaagcgacatccagagaact

SEQ ID NO: 2560248 - DNA, 25 bp, Homo sapien
tacggataagcaggtcgagaaaagc

SEQ ID NO: 2560249 - DNA, 25 bp, Homo sapien
taggcagttccaaggattgaaatac

SEQ ID NO: 2560250 - DNA, 25 bp, Homo sapien
cagagaacttgtagatgagtgctcc

SEQ ID NO: 2560251 - DNA, 25 bp, Homo sapien
ttcattaaggcattagcggtgggcc

SEQ ID NO: 2560252 - DNA, 25 bp, Homo sapien
caagggctactatgcagaagtgggt

SEQ ID NO: 2560253 - DNA, 25 bp, Homo sapien
ggatttccagcccacagtacggcaa

SEQ ID NO: 2560254 - DNA, 25 bp, Homo sapien
gggacaagatgccttctacaagcca

SEQ ID NO: 2560255 - DNA, 25 bp, Homo sapien
tatgtactttgctagataacgtgga

SEQ ID NO: 2560256 - DNA, 25 bp, Homo sapien
gggtgtcactggtaaaccaacacat

SEQ ID NO: 2560257 - DNA, 25 bp, Homo sapien
gaattagatatagtcttgaacacca

SEQ ID NO: 2560258 - DNA, 25 bp, Homo sapien
tgttatgagtgaaatcgtgccttcc

SEQ ID NO: 2560259 - DNA, 25 bp, Homo sapien
gtttcccaagacattgaaatggctg

SEQ ID NO: 2560260 - DNA, 25 bp, Homo sapien
ttcccaagacattgaaatggctgac

SEQ ID NO: 2560261 - DNA, 25 bp, Homo sapien
cccaagacattgaaatggctgacat

SEQ ID NO: 2560262 - DNA, 25 bp, Homo sapien
caaaaaattgtttcccaagacattg

SEQ ID NO: 2560263 - DNA, 25 bp, Homo sapien
agccagctattgttttattgaagca

SEQ ID NO: 2560264 - DNA, 25 bp, Homo sapien
ttgaagcaaaaagaaaacagaacaa

SEQ ID NO: 2560265 - DNA, 25 bp, Homo sapien
tgaagcaaaaagaaaacagaacaaa

SEQ ID NO: 2560266 - DNA, 25 bp, Homo sapien
ccagctattgttttattgaagcaaa

SEQ ID NO: 2560267 - DNA, 25 bp, Homo sapien
actaaattagtatgcattcttaaaa

SEQ ID NO: 2560268 - DNA, 25 bp, Homo sapien
actttgattctttactcagattatt

SEQ ID NO: 2560269 - DNA, 25 bp, Homo sapien
tcaaaactaaattagtatgcattct

SEQ ID NO: 2560270 - DNA, 25 bp, Homo sapien
ctgcatgggtaaaatactgtacatt

SEQ ID NO: 2560271 - DNA, 25 bp, Homo sapien
tgtaaggccttctcactaaaatagt

SEQ ID NO: 2560272 - DNA, 25 bp, Homo sapien
taagctgggtccagacttctgatcc

SEQ ID NO: 2560273 - DNA, 25 bp, Homo sapien
gagggcctaggtcctacacgagcaa

SEQ ID NO: 2560274 - DNA, 25 bp, Homo sapien
gcagtcttcaggatcagagggccta

SEQ ID NO: 2560275 - DNA, 25 bp, Homo sapien
aaatgcatggcatacaaagaggagc

SEQ ID NO: 2560276 - DNA, 25 bp, Homo sapien
gctgacaaaatgcaatatactcctt

SEQ ID NO: 2560277 - DNA, 25 bp, Homo sapien
cagaacttgaagtatgtacagcaaa

SEQ ID NO: 2560278 - DNA, 25 bp, Homo sapien
gcttatagtagaattatgcatccaa

SEQ ID NO: 2560279 - DNA, 25 bp, Homo sapien
tggcaccctgccgaagtacttgtgg

SEQ ID NO: 2560280 - DNA, 25 bp, Homo sapien
gccctgtgaggcattgcaagcagtc

SEQ ID NO: 2560281 - DNA, 25 bp, Homo sapien
agtacttgtggagaacaacaaagag

SEQ ID NO: 2560282 - DNA, 25 bp, Homo sapien
tgtgaggcattgcaagcagtcatgg

SEQ ID NO: 2560283 - DNA, 25 bp, Homo sapien
taagccaatgagtccagtgcaacta

SEQ ID NO: 2560284 - DNA, 25 bp, Homo sapien
gaaaatgcacagcaccttgggaatg

SEQ ID NO: 2560285 - DNA, 25 bp, Homo sapien
tgaaccaggcatccttcatagctga

SEQ ID NO: 2560286 - DNA, 25 bp, Homo sapien
catggtcatcaggacagctgactgc

SEQ ID NO: 2560287 - DNA, 25 bp, Homo sapien
ggatgacacgattggcatgataggg

SEQ ID NO: 2560288 - DNA, 25 bp, Homo sapien
ggggatgacacgattggcatgatag

SEQ ID NO: 2560289 - DNA, 25 bp, Homo sapien
gatgacacgattggcatgatagggc

SEQ ID NO: 2560290 - DNA, 25 bp, Homo sapien
gggatgacacgattggcatgatagg

SEQ ID NO: 2560291 - DNA, 25 bp, Homo sapien
tatcctgttgactgtagtatctaca

SEQ ID NO: 2560292 - DNA, 25 bp, Homo sapien
catatatcctgttgactgtagtatc

SEQ ID NO: 2560293 - DNA, 25 bp, Homo sapien
ctacacaaaccatcttcaccacagc

SEQ ID NO: 2560294 - DNA, 25 bp, Homo sapien
gccatatatcctgttgactgtagta

SEQ ID NO: 2560295 - DNA, 25 bp, Homo sapien
catggggtggaatgccttggccaaa

SEQ ID NO: 2560296 - DNA, 25 bp, Homo sapien
gcatgacacagatgtgtgtggtgca

SEQ ID NO: 2560297 - DNA, 25 bp, Homo sapien
tgggcttccttagaagagagatgca

SEQ ID NO: 2560298 - DNA, 25 bp, Homo sapien
ccaaagcggtgagcgagaaaagaga

SEQ ID NO: 2560299 - DNA, 25 bp, Homo sapien
accatggtcagtggttgtgggttct

SEQ ID NO: 2560300 - DNA, 25 bp, Homo sapien
tttggtcactttgtcccagaactcc

SEQ ID NO: 2560301 - DNA, 25 bp, Homo sapien
tttccagcaaccctatttggtcact

SEQ ID NO: 2560302 - DNA, 25 bp, Homo sapien
tggttgtgggttcttctttccagca

SEQ ID NO: 2560303 - DNA, 25 bp, Homo sapien
atttcctttcctggatattctccat

SEQ ID NO: 2560304 - DNA, 25 bp, Homo sapien
aatttcctttcctggatattctcca

SEQ ID NO: 2560305 - DNA, 25 bp, Homo sapien
gaaatttcctttcctggatattctc

SEQ ID NO: 2560306 - DNA, 25 bp, Homo sapien
tggacagtgatgactaatgtgcctg

SEQ ID NO: 2560307 - DNA, 25 bp, Homo sapien
ctggacagtgatgactaatgtgcct

SEQ ID NO: 2560308 - DNA, 25 bp, Homo sapien
gagtgctggacattctctgtggtca

SEQ ID NO: 2560309 - DNA, 25 bp, Homo sapien
caagaagggtcaacatcagtgtgat

SEQ ID NO: 2560310 - DNA, 25 bp, Homo sapien
agacaagaagggtcaacatcagtgt

SEQ ID NO: 2560311 - DNA, 25 bp, Homo sapien
ctggacattctctgtggtcagaaac

SEQ ID NO: 2560312 - DNA, 25 bp, Homo sapien
agtgagagccacaaatgaaattgtt

SEQ ID NO: 2560313 - DNA, 25 bp, Homo sapien
ccacacacagggagtgagagccaca

SEQ ID NO: 2560314 - DNA, 25 bp, Homo sapien
gagccacaaatgaaattgttccaga

SEQ ID NO: 2560315 - DNA, 25 bp, Homo sapien
tgagagccacaaatgaaattgttcc

SEQ ID NO: 2560316 - DNA, 25 bp, Homo sapien
ggttcagtggcaacaacaaccagaa

SEQ ID NO: 2560317 - DNA, 25 bp, Homo sapien
atattgcccacaattgtggctgtgc

SEQ ID NO: 2560318 - DNA, 25 bp, Homo sapien
caaccagaatagttatattgcccac

SEQ ID NO: 2560319 - DNA, 25 bp, Homo sapien
cagaaaaaggtacacaggcttgtgc

SEQ ID NO: 2560320 - DNA, 25 bp, Homo sapien
acagaggcagccaagtcgatggttg

SEQ ID NO: 2560321 - DNA, 25 bp, Homo sapien
ccagtagcttgggaactgtggagac

SEQ ID NO: 2560322 - DNA, 25 bp, Homo sapien
cagccaagtcgatggttgagagcat

SEQ ID NO: 2560323 - DNA, 25 bp, Homo sapien
cagtagcttgggaactgtggagaca

SEQ ID NO: 2560324 - DNA, 25 bp, Homo sapien
cagtggactccatcatgcagaaggc

SEQ ID NO: 2560325 - DNA, 25 bp, Homo sapien
ggcagatatatgtccggctccacac

SEQ ID NO: 2560326 - DNA, 25 bp, Homo sapien
ctatgtgggcaatgatggtgtcagt

SEQ ID NO: 2560327 - DNA, 25 bp, Homo sapien
tgtggcatagcggagtgggtggcag

SEQ ID NO: 2560328 - DNA, 25 bp, Homo sapien
caataaagaagggacatgggagcat

SEQ ID NO: 2560329 - DNA, 25 bp, Homo sapien
gcagaagttcaaacgcccaataaag

SEQ ID NO: 2560330 - DNA, 25 bp, Homo sapien
ctttggcagaagttcaaacgcccaa

SEQ ID NO: 2560331 - DNA, 25 bp, Homo sapien
agcagggagcctcgcactacagctg

SEQ ID NO: 2560332 - DNA, 25 bp, Homo sapien
catacacacggttaggcctggtgtc

SEQ ID NO: 2560333 - DNA, 25 bp, Homo sapien
taccacaggattaagagcaggtggc

SEQ ID NO: 2560334 - DNA, 25 bp, Homo sapien
gaatatggactggaacgtgatggcc

SEQ ID NO: 2560335 - DNA, 25 bp, Homo sapien
ccttggaccgagcttcatgggatga

SEQ ID NO: 2560336 - DNA, 25 bp, Homo sapien
tgcccatttcctgcccactttgaaa

SEQ ID NO: 2560337 - DNA, 25 bp, Homo sapien
cactcagatgccttgatgcccattt

SEQ ID NO: 2560338 - DNA, 25 bp, Homo sapien
tcagatgccttgatgcccatttcct

SEQ ID NO: 2560339 - DNA, 25 bp, Homo sapien
atgcccatttcctgcccactttgaa

SEQ ID NO: 2560340 - DNA, 25 bp, Homo sapien
aatttggagctattggagattttga

SEQ ID NO: 2560341 - DNA, 25 bp, Homo sapien
gaatttggagctattggagattttg

SEQ ID NO: 2560342 - DNA, 25 bp, Homo sapien
agctgtgaatgcccgggaatcccag

SEQ ID NO: 2560343 - DNA, 25 bp, Homo sapien
gctgtgaatgcccgggaatcccagc

SEQ ID NO: 2560344 - DNA, 25 bp, Homo sapien
agagatagccagtgttgccagctgt

SEQ ID NO: 2560345 - DNA, 25 bp, Homo sapien
gatagccagtgttgccagctgtgaa

SEQ ID NO: 2560346 - DNA, 25 bp, Homo sapien
tcttggagcaataatcacgctgtgc

SEQ ID NO: 2560347 - DNA, 25 bp, Homo sapien
tgaccccaaggttagagcacaggca

SEQ ID NO: 2560348 - DNA, 25 bp, Homo sapien
gatgatagtagtggccagacccatg

SEQ ID NO: 2560349 - DNA, 25 bp, Homo sapien
caaaagccatgcagagtaggatacc

SEQ ID NO: 2560350 - DNA, 25 bp, Homo sapien
gatcttatttcttttgtaagggcaa

SEQ ID NO: 2560351 - DNA, 25 bp, Homo sapien
ctaagatcttatttcttttgtaagg

SEQ ID NO: 2560352 - DNA, 25 bp, Homo sapien
tttcttttgtaagggcaaacagcac

SEQ ID NO: 2560353 - DNA, 25 bp, Homo sapien
tatttcttttgtaagggcaaacagc

SEQ ID NO: 2560354 - DNA, 25 bp, Homo sapien
aatatacttgtagatctgtattgaa

SEQ ID NO: 2560355 - DNA, 25 bp, Homo sapien
ggtctgttttattcagtgttagcat

SEQ ID NO: 2560356 - DNA, 25 bp, Homo sapien
tgttttattcagtgttagcatgata

SEQ ID NO: 2560357 - DNA, 25 bp, Homo sapien
tctgttttattcagtgttagcatga

SEQ ID NO: 2560358 - DNA, 25 bp, Homo sapien
ctggtattaggtctgttttattcag

SEQ ID NO: 2560359 - DNA, 25 bp, Homo sapien
gaaagcatggccaagaagtagtaca

SEQ ID NO: 2560360 - DNA, 25 bp, Homo sapien
gagtaatacccctctcaggaaggtg

SEQ ID NO: 2560361 - DNA, 25 bp, Homo sapien
gatccagggccataagcataagcac

SEQ ID NO: 2560362 - DNA, 25 bp, Homo sapien
caatgtccttgagatgaaaccagaa

SEQ ID NO: 2560363 - DNA, 25 bp, Homo sapien
cactgcccggagaatcatggtatag

SEQ ID NO: 2560364 - DNA, 25 bp, Homo sapien
gcatctgctgaggagaggctgacca

SEQ ID NO: 2560365 - DNA, 25 bp, Homo sapien
acacagtatgtcaaagccccaaatc

SEQ ID NO: 2560366 - DNA, 25 bp, Homo sapien
tagacaatagggttcatagtgggtg

SEQ ID NO: 2560367 - DNA, 25 bp, Homo sapien
ctgtaggatttggtatccttagaac

SEQ ID NO: 2560368 - DNA, 25 bp, Homo sapien
tgctgtaggatttggtatccttaga

SEQ ID NO: 2560369 - DNA, 25 bp, Homo sapien
tcacatgctgtaggatttggtatcc

SEQ ID NO: 2560370 - DNA, 25 bp, Homo sapien
catgctgtaggatttggtatcctta

SEQ ID NO: 2560371 - DNA, 25 bp, Homo sapien
gagtattctaatggccatatggcca

SEQ ID NO: 2560372 - DNA, 25 bp, Homo sapien
ttatttctacttgcgtatatttttg

SEQ ID NO: 2560373 - DNA, 25 bp, Homo sapien
atttctacttgcgtatatttttggt

SEQ ID NO: 2560374 - DNA, 25 bp, Homo sapien
ttggagtattctaatggccatatgg

SEQ ID NO: 2560375 - DNA, 25 bp, Homo sapien
tatcaatagccatgcagacaaaggt

SEQ ID NO: 2560376 - DNA, 25 bp, Homo sapien
caaggttagaacaaagacagtgctc

SEQ ID NO: 2560377 - DNA, 25 bp, Homo sapien
caaaggtacttgattccatggccac

SEQ ID NO: 2560378 - DNA, 25 bp, Homo sapien
tcccatgagtgtccaagccaaaagg

SEQ ID NO: 2560379 - DNA, 25 bp, Homo sapien
gaggtatataagtccacagttcccc

SEQ ID NO: 2560380 - DNA, 25 bp, Homo sapien
ccaggaacgccactgagaatgaaat

SEQ ID NO: 2560381 - DNA, 25 bp, Homo sapien
tagtgtagagggtagcaaatggcca

SEQ ID NO: 2560382 - DNA, 25 bp, Homo sapien
taaagtcaatttccttgaggccaaa

SEQ ID NO: 2560383 - DNA, 25 bp, Homo sapien
tttgaatgaaggtgacaagcccaac

SEQ ID NO: 2560384 - DNA, 25 bp, Homo sapien
aaagcaaatggaatcataagcaaca

SEQ ID NO: 2560385 - DNA, 25 bp, Homo sapien
aagcaaatggaatcataagcaacac

SEQ ID NO: 2560386 - DNA, 25 bp, Homo sapien
gaaagcaaatggaatcataagcaac

SEQ ID NO: 2560387 - DNA, 25 bp, Homo sapien
gtggatgaggttgcccctgcaatag

SEQ ID NO: 2560388 - DNA, 25 bp, Homo sapien
ggttgcccctgcaatagggaagaca

SEQ ID NO: 2560389 - DNA, 25 bp, Homo sapien
atgaggttgcccctgcaatagggaa

SEQ ID NO: 2560390 - DNA, 25 bp, Homo sapien
ggtggatgaggttgcccctgcaata

SEQ ID NO: 2560391 - DNA, 25 bp, Homo sapien
tgtaagacatggagatacagaacat

SEQ ID NO: 2560392 - DNA, 25 bp, Homo sapien
ccccaatcaatatggcagctatgag

SEQ ID NO: 2560393 - DNA, 25 bp, Homo sapien
cacggataatcatggtgtaagacat

SEQ ID NO: 2560394 - DNA, 25 bp, Homo sapien
gatgacaaattcactacagcacgga

SEQ ID NO: 2560395 - DNA, 25 bp, Homo sapien
aaggttggctataaaaatgtgaaca

SEQ ID NO: 2560396 - DNA, 25 bp, Homo sapien
acatgatgaggtatggtgtgtcccc

SEQ ID NO: 2560397 - DNA, 25 bp, Homo sapien
ggcagcatcaggtaaaggttggcta

SEQ ID NO: 2560398 - DNA, 25 bp, Homo sapien
aaaaggctgggacataagtgatgaa

SEQ ID NO: 2560399 - DNA, 25 bp, Homo sapien
atgtcatacttaaaatacctttctc

SEQ ID NO: 2560400 - DNA, 25 bp, Homo sapien
gtcatacttaaaatacctttctctc

SEQ ID NO: 2560401 - DNA, 25 bp, Homo sapien
ttatgtcatacttaaaatacctttc

SEQ ID NO: 2560402 - DNA, 25 bp, Homo sapien
catacttaaaatacctttctctcta

SEQ ID NO: 2560403 - DNA, 25 bp, Homo sapien
ggctggagctgttgtccccagacat

SEQ ID NO: 2560404 - DNA, 25 bp, Homo sapien
ttcaagataaagaatcctggggtca

SEQ ID NO: 2560405 - DNA, 25 bp, Homo sapien
aaagcagaatggcagggagatccag

SEQ ID NO: 2560406 - DNA, 25 bp, Homo sapien
agcccaggaacgccattcaagataa

SEQ ID NO: 2560407 - DNA, 25 bp, Homo sapien
catattaggtaccatggtggtgcac

SEQ ID NO: 2560408 - DNA, 25 bp, Homo sapien
gcagtagcagataaaggttggccac

SEQ ID NO: 2560409 - DNA, 25 bp, Homo sapien
agttccccacgacagcaatgatgta

SEQ ID NO: 2560410 - DNA, 25 bp, Homo sapien
gccaggcaggcgttaaagtcaatct

SEQ ID NO: 2560411 - DNA, 25 bp, Homo sapien
cctgaatctgcttggtcttgactcc

SEQ ID NO: 2560412 - DNA, 25 bp, Homo sapien
aatttaattacaccttcctgaatct

SEQ ID NO: 2560413 - DNA, 25 bp, Homo sapien
tgaatctgcttggtcttgactccat

SEQ ID NO: 2560414 - DNA, 25 bp, Homo sapien
ttcctgaatctgcttggtcttgact

SEQ ID NO: 2560415 - DNA, 25 bp, Homo sapien
tgtcatggagagcatcgtattggtg

SEQ ID NO: 2560416 - DNA, 25 bp, Homo sapien
cctgagcttgtctacggccaccatt

SEQ ID NO: 2560417 - DNA, 25 bp, Homo sapien
ctgagcttgtctacggccaccattc

SEQ ID NO: 2560418 - DNA, 25 bp, Homo sapien
ttcactgtcatggagagcatcgtat

SEQ ID NO: 2560419 - DNA, 25 bp, Homo sapien
agcagcccttaggtcaatcactggg

SEQ ID NO: 2560420 - DNA, 25 bp, Homo sapien
tgaacagataggagcagaatgcgct

SEQ ID NO: 2560421 - DNA, 25 bp, Homo sapien
gaatgcgctctgtggaaattaaggg

SEQ ID NO: 2560422 - DNA, 25 bp, Homo sapien
gatataggattaggcagtagaccac

SEQ ID NO: 2560423 - DNA, 25 bp, Homo sapien
cctgtacatggttgttccactggtg

SEQ ID NO: 2560424 - DNA, 25 bp, Homo sapien
gcattgctgtcctgaggagcctgta

SEQ ID NO: 2560425 - DNA, 25 bp, Homo sapien
cactgctatggagagcattgtgttg

SEQ ID NO: 2560426 - DNA, 25 bp, Homo sapien
cccttctgtgggcatcgtatcatcc

SEQ ID NO: 2560427 - DNA, 25 bp, Homo sapien
ctcttgtttgtgatccagactgagc

SEQ ID NO: 2560428 - DNA, 25 bp, Homo sapien
aaacactgctctcttgtttgtgatc

SEQ ID NO: 2560429 - DNA, 25 bp, Homo sapien
ggtgaaggtttttatcagtccagat

SEQ ID NO: 2560430 - DNA, 25 bp, Homo sapien
gaatgataagatttccaacaagagc

SEQ ID NO: 2560431 - DNA, 25 bp, Homo sapien
tggaattcctaaccaacaggaagga

SEQ ID NO: 2560432 - DNA, 25 bp, Homo sapien
gaaagcctagccagcgttgtgcagc

SEQ ID NO: 2560433 - DNA, 25 bp, Homo sapien
cttgagcaacacagcacccaaagca

SEQ ID NO: 2560434 - DNA, 25 bp, Homo sapien
gcacccaaagcacaactcctgaagg

SEQ ID NO: 2560435 - DNA, 25 bp, Homo sapien
ctcctgaaggctgaaccagaagatg

SEQ ID NO: 2560436 - DNA, 25 bp, Homo sapien
aactcctgaaggctgaaccagaaga

SEQ ID NO: 2560437 - DNA, 25 bp, Homo sapien
gacaagaagtacaatgctctccatg

SEQ ID NO: 2560438 - DNA, 25 bp, Homo sapien
tgaaggggttgcaaatagccacata

SEQ ID NO: 2560439 - DNA, 25 bp, Homo sapien
acaagaagtacaatgctctccatga

SEQ ID NO: 2560440 - DNA, 25 bp, Homo sapien
ctgaaggggttgcaaatagccacat

SEQ ID NO: 2560441 - DNA, 25 bp, Homo sapien
aaatgatgggagcaatcatacataa

SEQ ID NO: 2560442 - DNA, 25 bp, Homo sapien
cacaaccatagcaatcacaccagta

SEQ ID NO: 2560443 - DNA, 25 bp, Homo sapien
cataagcttctaagaaccacaacca

SEQ ID NO: 2560444 - DNA, 25 bp, Homo sapien
aggagaaaaatgatgggagcaatca

SEQ ID NO: 2560445 - DNA, 25 bp, Homo sapien
tatgggagctacaggtattaagagc

SEQ ID NO: 2560446 - DNA, 25 bp, Homo sapien
tattaagagccttcaggtgggcctc

SEQ ID NO: 2560447 - DNA, 25 bp, Homo sapien
cacaataggtataagggatgattct

SEQ ID NO: 2560448 - DNA, 25 bp, Homo sapien
aaaaatattcccaagaccatgagag

SEQ ID NO: 2560449 - DNA, 25 bp, Homo sapien
atatatagagattagccaggagaat

SEQ ID NO: 2560450 - DNA, 25 bp, Homo sapien
tggatttgcttggtcctaactccat

SEQ ID NO: 2560451 - DNA, 25 bp, Homo sapien
catgagtccaggttcttaaagaccg

SEQ ID NO: 2560452 - DNA, 25 bp, Homo sapien
tgagtgagagcatccctatgaccag

SEQ ID NO: 2560453 - DNA, 25 bp, Homo sapien
tatgaccaggcatgtcccagaatcc

SEQ ID NO: 2560454 - DNA, 25 bp, Homo sapien
gaatccccgagcctagtcttcggaa

SEQ ID NO: 2560455 - DNA, 25 bp, Homo sapien
ttcaggctcttccataactgtgcca

SEQ ID NO: 2560456 - DNA, 25 bp, Homo sapien
cattcaggctcttccataactgtgc

SEQ ID NO: 2560457 - DNA, 25 bp, Homo sapien
cttcattcaggctcttccataactg

SEQ ID NO: 2560458 - DNA, 25 bp, Homo sapien
tcattcaggctcttccataactgtg

SEQ ID NO: 2560459 - DNA, 25 bp, Homo sapien
tcctaagtatgaaggatctcacttt

SEQ ID NO: 2560460 - DNA, 25 bp, Homo sapien
aaggggggatagaagtgggtgtcat

SEQ ID NO: 2560461 - DNA, 25 bp, Homo sapien
gatagaagtgggtgtcattgataga

SEQ ID NO: 2560462 - DNA, 25 bp, Homo sapien
gaaggggggatagaagtgggtgtca

SEQ ID NO: 2560463 - DNA, 25 bp, Homo sapien
agtgggtgtcattgatagaaggcat

SEQ ID NO: 2560464 - DNA, 25 bp, Homo sapien
gaggtacgatgttatgcccacagaa

SEQ ID NO: 2560465 - DNA, 25 bp, Homo sapien
tgatcttaatgggtgcacaggccaa

SEQ ID NO: 2560466 - DNA, 25 bp, Homo sapien
gatcaatcatagacaacatggccag

SEQ ID NO: 2560467 - DNA, 25 bp, Homo sapien
tattgaaggcctttagtcggacatc

SEQ ID NO: 2560468 - DNA, 25 bp, Homo sapien
aatttgctctcggatctgcttggtc

SEQ ID NO: 2560469 - DNA, 25 bp, Homo sapien
gactccataaatgacagggttaagg

SEQ ID NO: 2560470 - DNA, 25 bp, Homo sapien
tattttcacaatttgctctcggatc

SEQ ID NO: 2560471 - DNA, 25 bp, Homo sapien
gttaagggcaggtgggacaaccaca

SEQ ID NO: 2560472 - DNA, 25 bp, Homo sapien
taagtttgcattatctgtcaacact

SEQ ID NO: 2560473 - DNA, 25 bp, Homo sapien
tgtccaggtacttggagagaagtag

SEQ ID NO: 2560474 - DNA, 25 bp, Homo sapien
attaatctctaacctttgtccaggt

SEQ ID NO: 2560475 - DNA, 25 bp, Homo sapien
actaaagcacttccagtcaaaagga

SEQ ID NO: 2560476 - DNA, 25 bp, Homo sapien
aacttctatctgcaatgctctctgg

SEQ ID NO: 2560477 - DNA, 25 bp, Homo sapien
ggtgacctgcaggtcaccacgggct

SEQ ID NO: 2560478 - DNA, 25 bp, Homo sapien
taaattgcaacttctatctgcaatg

SEQ ID NO: 2560479 - DNA, 25 bp, Homo sapien
tgacctgcaggtcaccacgggctct

SEQ ID NO: 2560480 - DNA, 25 bp, Homo sapien
aaggtggaagggtgaaactgtgtat

SEQ ID NO: 2560481 - DNA, 25 bp, Homo sapien
gaagccaatccatacatgcacatct

SEQ ID NO: 2560482 - DNA, 25 bp, Homo sapien
aatccatacatgcacatcttccagc

SEQ ID NO: 2560483 - DNA, 25 bp, Homo sapien
aaggggaagccaatccatacatgca

SEQ ID NO: 2560484 - DNA, 25 bp, Homo sapien
taaaacatgggttggtggaggctct

SEQ ID NO: 2560485 - DNA, 25 bp, Homo sapien
tatagcgatctatgcccgtgactgt

SEQ ID NO: 2560486 - DNA, 25 bp, Homo sapien
cacatgtgctgagtgccttaggccg

SEQ ID NO: 2560487 - DNA, 25 bp, Homo sapien
ggataatccggacaccacagaaagg

SEQ ID NO: 2560488 - DNA, 25 bp, Homo sapien
ctgctctcgtatctgttttgttttg

SEQ ID NO: 2560489 - DNA, 25 bp, Homo sapien
gctctcgtatctgttttgttttgac

SEQ ID NO: 2560490 - DNA, 25 bp, Homo sapien
tgctctcgtatctgttttgttttga

SEQ ID NO: 2560491 - DNA, 25 bp, Homo sapien
tattgtctaactgaattgttgtgga

SEQ ID NO: 2560492 - DNA, 25 bp, Homo sapien
actgaattgttgtggaagatcctct

SEQ ID NO: 2560493 - DNA, 25 bp, Homo sapien
gatcctcttggggtcaaaatgccaa

SEQ ID NO: 2560494 - DNA, 25 bp, Homo sapien
ctaactgaattgttgtggaagatcc

SEQ ID NO: 2560495 - DNA, 25 bp, Homo sapien
ggccaggattatcagtaccccagat

SEQ ID NO: 2560496 - DNA, 25 bp, Homo sapien
tctcagtggattgcgaattacgaca

SEQ ID NO: 2560497 - DNA, 25 bp, Homo sapien
gattccaggccagtgcatagataag

SEQ ID NO: 2560498 - DNA, 25 bp, Homo sapien
tatcatgacttcctaggatggctac

SEQ ID NO: 2560499 - DNA, 25 bp, Homo sapien
caacctggtggcaagtaaccgaacg

SEQ ID NO: 2560500 - DNA, 25 bp, Homo sapien
ccgtggatcaataaggccgagaggc

SEQ ID NO: 2560501 - DNA, 25 bp, Homo sapien
tcttaattgagctctccggcgaggt

SEQ ID NO: 2560502 - DNA, 25 bp, Homo sapien
gaagaagcctgatctgaccaggagg

SEQ ID NO: 2560503 - DNA, 25 bp, Homo sapien
catttgggatggagtaacagaacgg

SEQ ID NO: 2560504 - DNA, 25 bp, Homo sapien
ctggttacaccaagaggcatttggg

SEQ ID NO: 2560505 - DNA, 25 bp, Homo sapien
accagaagtagcctccgggtggtgc

SEQ ID NO: 2560506 - DNA, 25 bp, Homo sapien
actggtaagcatcctggtctggtta

SEQ ID NO: 2560507 - DNA, 25 bp, Homo sapien
ttttcccttcatggcggtgaagctg

SEQ ID NO: 2560508 - DNA, 25 bp, Homo sapien
cttgtgaaggaacacggagtgccac

SEQ ID NO: 2560509 - DNA, 25 bp, Homo sapien
tgctggaacacaaacgcgcttctca

SEQ ID NO: 2560510 - DNA, 25 bp, Homo sapien
aagctgtggacgcttctcttcagga

SEQ ID NO: 2560511 - DNA, 25 bp, Homo sapien
cttttcttctccaggggtcacaaag

SEQ ID NO: 2560512 - DNA, 25 bp, Homo sapien
taagggctgtttttcagcagtctgg

SEQ ID NO: 2560513 - DNA, 25 bp, Homo sapien
tattgtattcctggttttgactctt

SEQ ID NO: 2560514 - DNA, 25 bp, Homo sapien
tcttgcaactccgactcctgcttcc

SEQ ID NO: 2560515 - DNA, 25 bp, Homo sapien
acagctcataggctccaattccctc

SEQ ID NO: 2560516 - DNA, 25 bp, Homo sapien
agggtgtcatttcggtgtgttgtca

SEQ ID NO: 2560517 - DNA, 25 bp, Homo sapien
tcagtggagagggtgtcatttcggt

SEQ ID NO: 2560518 - DNA, 25 bp, Homo sapien
tggagagggtgtcatttcggtgtgt

SEQ ID NO: 2560519 - DNA, 25 bp, Homo sapien
agcttcagtggagagggtgtcattt

SEQ ID NO: 2560520 - DNA, 25 bp, Homo sapien
gggggatctgacaaaacaattcaag

SEQ ID NO: 2560521 - DNA, 25 bp, Homo sapien
gatctgacaaaacaattcaagagga

SEQ ID NO: 2560522 - DNA, 25 bp, Homo sapien
agctgggggatctgacaaaacaatt

SEQ ID NO: 2560523 - DNA, 25 bp, Homo sapien
gggatctgacaaaacaattcaagag

SEQ ID NO: 2560524 - DNA, 25 bp, Homo sapien
cagtgaggcagagcacgatgtccag

SEQ ID NO: 2560525 - DNA, 25 bp, Homo sapien
ggcctccagccagatggtcatcagg

SEQ ID NO: 2560526 - DNA, 25 bp, Homo sapien
gggcctgaggtcaaaccagaagatg

SEQ ID NO: 2560527 - DNA, 25 bp, Homo sapien
gcagggaagctgatgggcctgaggt

SEQ ID NO: 2560528 - DNA, 25 bp, Homo sapien
cacatgtgtgaggacaaaaaccaga

SEQ ID NO: 2560529 - DNA, 25 bp, Homo sapien
ctcagcacagctcgcagaatgaagg

SEQ ID NO: 2560530 - DNA, 25 bp, Homo sapien
attgagcaagactggcacatcaggg

SEQ ID NO: 2560531 - DNA, 25 bp, Homo sapien
tgacatcatcgcaggagagtctgga

SEQ ID NO: 2560532 - DNA, 25 bp, Homo sapien
tggaaatagtagttgtctccccagg

SEQ ID NO: 2560533 - DNA, 25 bp, Homo sapien
aatgaggtgatcagtcctccctgtg

SEQ ID NO: 2560534 - DNA, 25 bp, Homo sapien
aactgtttgctaggaccaccaatga

SEQ ID NO: 2560535 - DNA, 25 bp, Homo sapien
gtgcattcagttttccctccatgtg

SEQ ID NO: 2560536 - DNA, 25 bp, Homo sapien
gatgtccaccctggaacaacttggg

SEQ ID NO: 2560537 - DNA, 25 bp, Homo sapien
gagtgccttgccctgaataccccga

SEQ ID NO: 2560538 - DNA, 25 bp, Homo sapien
tgaaggcatggcttgggttaagtcc

SEQ ID NO: 2560539 - DNA, 25 bp, Homo sapien
tggcttgtgtgcgatgaaggcatgg

SEQ ID NO: 2560540 - DNA, 25 bp, Homo sapien
aggccttgagcacgtgtggttccca

SEQ ID NO: 2560541 - DNA, 25 bp, Homo sapien
tcagctctaccagtttgtggcaggc

SEQ ID NO: 2560542 - DNA, 25 bp, Homo sapien
ggtctttgttatagcccggaatgcc

SEQ ID NO: 2560543 - DNA, 25 bp, Homo sapien
actgaccagtttgtggctagggccg

SEQ ID NO: 2560544 - DNA, 25 bp, Homo sapien
cttccaagatccaatgaaattggat

SEQ ID NO: 2560545 - DNA, 25 bp, Homo sapien
tggagaccaagcagatctaggagcg

SEQ ID NO: 2560546 - DNA, 25 bp, Homo sapien
gtcatgcagcgctttggagcaccca

SEQ ID NO: 2560547 - DNA, 25 bp, Homo sapien
tcttcttctatggactgggctttct

SEQ ID NO: 2560548 - DNA, 25 bp, Homo sapien
gaacgtgcgaaagcaggcagcacat

SEQ ID NO: 2560549 - DNA, 25 bp, Homo sapien
gccatcagctcgcattcctgtcttt

SEQ ID NO: 2560550 - DNA, 25 bp, Homo sapien
cggacagaatgcagccttcgccagc

SEQ ID NO: 2560551 - DNA, 25 bp, Homo sapien
tctgccatggagtcaggggtgctag

SEQ ID NO: 2560552 - DNA, 25 bp, Homo sapien
caggggtgctagtggccatggccct

SEQ ID NO: 2560553 - DNA, 25 bp, Homo sapien
ggcatcccaggattgactgccaccc

SEQ ID NO: 2560554 - DNA, 25 bp, Homo sapien
cccaggattgactgccacccacatt

SEQ ID NO: 2560555 - DNA, 25 bp, Homo sapien
atcccaggattgactgccacccaca

SEQ ID NO: 2560556 - DNA, 25 bp, Homo sapien
gcatcccaggattgactgccaccca

SEQ ID NO: 2560557 - DNA, 25 bp, Homo sapien
catgataaccatggtttttttccaa

SEQ ID NO: 2560558 - DNA, 25 bp, Homo sapien
tgttcttccatgtgacatgataacc

SEQ ID NO: 2560559 - DNA, 25 bp, Homo sapien
actttgttcttccatgtgacatgat

SEQ ID NO: 2560560 - DNA, 25 bp, Homo sapien
tcttccatgtgacatgataaccatg

SEQ ID NO: 2560561 - DNA, 25 bp, Homo sapien
gaggtggtaaagcagacaaccattg

SEQ ID NO: 2560562 - DNA, 25 bp, Homo sapien
cacattattgttattaccagagctt

SEQ ID NO: 2560563 - DNA, 25 bp, Homo sapien
tccctatacaacaccaacttgaagg

SEQ ID NO: 2560564 - DNA, 25 bp, Homo sapien
tcatgatctcagtaaggtggcggta

SEQ ID NO: 2560565 - DNA, 25 bp, Homo sapien
tgttgtcattgcagtctcctcagca

SEQ ID NO: 2560566 - DNA, 25 bp, Homo sapien
tctgttgtcattgcagtctcctcag

SEQ ID NO: 2560567 - DNA, 25 bp, Homo sapien
cgtctgttgtcattgcagtctcctc

SEQ ID NO: 2560568 - DNA, 25 bp, Homo sapien
gtctgttgtcattgcagtctcctca

SEQ ID NO: 2560569 - DNA, 25 bp, Homo sapien
aggctggagtcataggtaacactgg

SEQ ID NO: 2560570 - DNA, 25 bp, Homo sapien
ggctggagtcataggtaacactggt

SEQ ID NO: 2560571 - DNA, 25 bp, Homo sapien
agccagtgctgccactcatgaatgc

SEQ ID NO: 2560572 - DNA, 25 bp, Homo sapien
gcagggagagccagtgctgccactc

SEQ ID NO: 2560573 - DNA, 25 bp, Homo sapien
ctaagaggtagagcagagtcagggg

SEQ ID NO: 2560574 - DNA, 25 bp, Homo sapien
taagaggtagagcagagtcaggggc

SEQ ID NO: 2560575 - DNA, 25 bp, Homo sapien
cagaggcagtgctcgatttcattcc

SEQ ID NO: 2560576 - DNA, 25 bp, Homo sapien
tcctgagcatgatgaaccctgtggc

SEQ ID NO: 2560577 - DNA, 25 bp, Homo sapien
cccatgctagcatcagttggtaaaa

SEQ ID NO: 2560578 - DNA, 25 bp, Homo sapien
tctctgggcagccagtataggcact

SEQ ID NO: 2560579 - DNA, 25 bp, Homo sapien
gcacagagtgaaggattacagcata

SEQ ID NO: 2560580 - DNA, 25 bp, Homo sapien
cacaatgatacctgtgtggaagagg

SEQ ID NO: 2560581 - DNA, 25 bp, Homo sapien
tgtgcagcacattaaggaacacagg

SEQ ID NO: 2560582 - DNA, 25 bp, Homo sapien
tctttttctctgcaaggtgtgtgac

SEQ ID NO: 2560583 - DNA, 25 bp, Homo sapien
ttgtgcatcctgagtgcacaggcca

SEQ ID NO: 2560584 - DNA, 25 bp, Homo sapien
gtgcatcctgagtgcacaggccagg

SEQ ID NO: 2560585 - DNA, 25 bp, Homo sapien
ccagtccaagcagtctctgaaagcc

SEQ ID NO: 2560586 - DNA, 25 bp, Homo sapien
aagcccagtctgagtttgtgcatcc

SEQ ID NO: 2560587 - DNA, 25 bp, Homo sapien
tgagctattggctatactcaggcca

SEQ ID NO: 2560588 - DNA, 25 bp, Homo sapien
cagttgaaaccctgagctattggct

SEQ ID NO: 2560589 - DNA, 25 bp, Homo sapien
ggccaatatccatatcatgagatgt

SEQ ID NO: 2560590 - DNA, 25 bp, Homo sapien
actcatgaatgcctgggaaccctat

SEQ ID NO: 2560591 - DNA, 25 bp, Homo sapien
gacaaaagcttcagtaactatggaa

SEQ ID NO: 2560592 - DNA, 25 bp, Homo sapien
gagcagaggcactgatcaatctcat

SEQ ID NO: 2560593 - DNA, 25 bp, Homo sapien
catgcacatgaaagagtggatggca

SEQ ID NO: 2560594 - DNA, 25 bp, Homo sapien
gcagtagtgtcgctgggcagccaat

SEQ ID NO: 2560595 - DNA, 25 bp, Homo sapien
caatatgcagcacattgaggagaac

SEQ ID NO: 2560596 - DNA, 25 bp, Homo sapien
tcaaagaataggaagcaaagaccag

SEQ ID NO: 2560597 - DNA, 25 bp, Homo sapien
ccaggtggtgacagatactacaata

SEQ ID NO: 2560598 - DNA, 25 bp, Homo sapien
tcctaggtcctaagggcatatacta

SEQ ID NO: 2560599 - DNA, 25 bp, Homo sapien
gagattgggttgaggttattgctca

SEQ ID NO: 2560600 - DNA, 25 bp, Homo sapien
gaggtaatagataacacttctatct

SEQ ID NO: 2560601 - DNA, 25 bp, Homo sapien
ttgagattgggttgaggttattgct

SEQ ID NO: 2560602 - DNA, 25 bp, Homo sapien
aaattaattccctgatgttgttctc

SEQ ID NO: 2560603 - DNA, 25 bp, Homo sapien
ggagtcgtggaaccactatgcccat

SEQ ID NO: 2560604 - DNA, 25 bp, Homo sapien
aggagtcgtggaaccactatgccca

SEQ ID NO: 2560605 - DNA, 25 bp, Homo sapien
gttctgaacttgatgctgaacacca

SEQ ID NO: 2560606 - DNA, 25 bp, Homo sapien
aacttgatgctgaacaccagctgga

SEQ ID NO: 2560607 - DNA, 25 bp, Homo sapien
tgaacaccagctggagagttgaagt

SEQ ID NO: 2560608 - DNA, 25 bp, Homo sapien
acaccagctggagagttgaagttgg

SEQ ID NO: 2560609 - DNA, 25 bp, Homo sapien
taagttggtggcctgtgtgttaccc

SEQ ID NO: 2560610 - DNA, 25 bp, Homo sapien
cacacagcatatggcacagatcggg

SEQ ID NO: 2560611 - DNA, 25 bp, Homo sapien
caccagcagtgggaaaggtacaaca

SEQ ID NO: 2560612 - DNA, 25 bp, Homo sapien
gagaccaggtatgtagaaggccaga

SEQ ID NO: 2560613 - DNA, 25 bp, Homo sapien
taagggctgcgctctttgggccata

SEQ ID NO: 2560614 - DNA, 25 bp, Homo sapien
ctcagtatgaacctgtagggcagta

SEQ ID NO: 2560615 - DNA, 25 bp, Homo sapien
tttttatccagagaacacgaggttc

SEQ ID NO: 2560616 - DNA, 25 bp, Homo sapien
tatggcatgagagacagaccatctg

SEQ ID NO: 2560617 - DNA, 25 bp, Homo sapien
ggtggggtatgggagggattgggca

SEQ ID NO: 2560618 - DNA, 25 bp, Homo sapien
gtggcatcagcttcatccagtgtca

SEQ ID NO: 2560619 - DNA, 25 bp, Homo sapien
ggtggcatcagcttcatccagtgtc

SEQ ID NO: 2560620 - DNA, 25 bp, Homo sapien
tgtcagcaggttgggggtacccacc

SEQ ID NO: 2560621 - DNA, 25 bp, Homo sapien
ccaggtggcatcagcttcatccagt

SEQ ID NO: 2560622 - DNA, 25 bp, Homo sapien
taggtcatagcaggctgcatctgac

SEQ ID NO: 2560623 - DNA, 25 bp, Homo sapien
ctggcaaagccaggcgggtatgggc

SEQ ID NO: 2560624 - DNA, 25 bp, Homo sapien
caggaaaggtactgctactgcattg

SEQ ID NO: 2560625 - DNA, 25 bp, Homo sapien
taccagcacacccagtaggtcatag

SEQ ID NO: 2560626 - DNA, 25 bp, Homo sapien
catttggtgagtattcccgagtgca

SEQ ID NO: 2560627 - DNA, 25 bp, Homo sapien
aacattcgcgtctcttcataggctc

SEQ ID NO: 2560628 - DNA, 25 bp, Homo sapien
gcaggtcacccatatgtaggcggat

SEQ ID NO: 2560629 - DNA, 25 bp, Homo sapien
tccaggaggcttggtagtggcccca

SEQ ID NO: 2560630 - DNA, 25 bp, Homo sapien
taatgaccgaagtagccggaggagc

SEQ ID NO: 2560631 - DNA, 25 bp, Homo sapien
gcacgcccttagactgcagtgaaaa

SEQ ID NO: 2560632 - DNA, 25 bp, Homo sapien
gcttcagttgtatcagcaggtgctg

SEQ ID NO: 2560633 - DNA, 25 bp, Homo sapien
gaagacctggtagatgacatagatg

SEQ ID NO: 2560634 - DNA, 25 bp, Homo sapien
gaggtggcgtaggtggggctgggac

SEQ ID NO: 2560635 - DNA, 25 bp, Homo sapien
ggagaatctggtgggtttgtcctct

SEQ ID NO: 2560636 - DNA, 25 bp, Homo sapien
ctggtgggtttgtcctctggccctt

SEQ ID NO: 2560637 - DNA, 25 bp, Homo sapien
gtttcggcccttgtaggagaatctg

SEQ ID NO: 2560638 - DNA, 25 bp, Homo sapien
ggattcctcacatacttaattctca

SEQ ID NO: 2560639 - DNA, 25 bp, Homo sapien
aatggattcctcacatacttaattc

SEQ ID NO: 2560640 - DNA, 25 bp, Homo sapien
tgctgagtaatggattcctcacata

SEQ ID NO: 2560641 - DNA, 25 bp, Homo sapien
gagtaatggattcctcacatactta

SEQ ID NO: 2560642 - DNA, 25 bp, Homo sapien
tctgaggatagaccctgcagcaggg

SEQ ID NO: 2560643 - DNA, 25 bp, Homo sapien
cagtcgtcactgtcgaactctgagg

SEQ ID NO: 2560644 - DNA, 25 bp, Homo sapien
cactgtcgaactctgaggatagacc

SEQ ID NO: 2560645 - DNA, 25 bp, Homo sapien
gcagggacatggagtgcccgtcggg

SEQ ID NO: 2560646 - DNA, 25 bp, Homo sapien
gcagcagctgatgtttattagagac

SEQ ID NO: 2560647 - DNA, 25 bp, Homo sapien
gatgtttattagagaccagtacccc

SEQ ID NO: 2560648 - DNA, 25 bp, Homo sapien
ttagagaccagtacccctatgccag

SEQ ID NO: 2560649 - DNA, 25 bp, Homo sapien
ttgcccccggaatcttttgcttcag

SEQ ID NO: 2560650 - DNA, 25 bp, Homo sapien
acaccaacatggtcttccagcccag

SEQ ID NO: 2560651 - DNA, 25 bp, Homo sapien
ccaacatggtcttccagcccagtgt

SEQ ID NO: 2560652 - DNA, 25 bp, Homo sapien
gctcaacaccaacatggtcttccag

SEQ ID NO: 2560653 - DNA, 25 bp, Homo sapien
tcctgctcaacaccaacatggtctt

SEQ ID NO: 2560654 - DNA, 25 bp, Homo sapien
tgacctgtccaaactagtaaagggc

SEQ ID NO: 2560655 - DNA, 25 bp, Homo sapien
tctggcttgtcagcttgaatgtgtg

SEQ ID NO: 2560656 - DNA, 25 bp, Homo sapien
gtgtgtaaagctggcatctggaatc

SEQ ID NO: 2560657 - DNA, 25 bp, Homo sapien
aggtggccacgggatatttaaacat

SEQ ID NO: 2560658 - DNA, 25 bp, Homo sapien
ctggggaactgctagagggcatctc

SEQ ID NO: 2560659 - DNA, 25 bp, Homo sapien
ggccaagaaggttcgtctggtgcca

SEQ ID NO: 2560660 - DNA, 25 bp, Homo sapien
ccaagaaggttcgtctggtgccaaa

SEQ ID NO: 2560661 - DNA, 25 bp, Homo sapien
actgctagagggcatctccgagggc

SEQ ID NO: 2560662 - DNA, 25 bp, Homo sapien
ggcctacccctgcagaggagcctgg

SEQ ID NO: 2560663 - DNA, 25 bp, Homo sapien
ctggccgacggcctacccctgcaga

SEQ ID NO: 2560664 - DNA, 25 bp, Homo sapien
gacggcctacccctgcagaggagcc

SEQ ID NO: 2560665 - DNA, 25 bp, Homo sapien
agccctggccgacggcctacccctg

SEQ ID NO: 2560666 - DNA, 25 bp, Homo sapien
tgcgaagtcgtctctgccacgtgag

SEQ ID NO: 2560667 - DNA, 25 bp, Homo sapien
taggatactcacatctgcgaagtcg

SEQ ID NO: 2560668 - DNA, 25 bp, Homo sapien
attctcagcctgtagagcaaccaga

SEQ ID NO: 2560669 - DNA, 25 bp, Homo sapien
gcatctttgagggaccacttttcta

SEQ ID NO: 2560670 - DNA, 25 bp, Homo sapien
cttaggagccttacatgttcttggg

SEQ ID NO: 2560671 - DNA, 25 bp, Homo sapien
catttggtcccctggtcttaggagc

SEQ ID NO: 2560672 - DNA, 25 bp, Homo sapien
taatttcaggatgcccgtgttaaac

SEQ ID NO: 2560673 - DNA, 25 bp, Homo sapien
gattggcctcatattgtcctgttca

SEQ ID NO: 2560674 - DNA, 25 bp, Homo sapien
actgtgggtctttgattggattgac

SEQ ID NO: 2560675 - DNA, 25 bp, Homo sapien
tgtgggtctttgattggattgacca

SEQ ID NO: 2560676 - DNA, 25 bp, Homo sapien
taactgtgggtctttgattggattg

SEQ ID NO: 2560677 - DNA, 25 bp, Homo sapien
cttaactgtgggtctttgattggat

SEQ ID NO: 2560678 - DNA, 25 bp, Homo sapien
ccaggttcggcgttccgtgagtgaa

SEQ ID NO: 2560679 - DNA, 25 bp, Homo sapien
tgagagactgggaaaagacggtgac

SEQ ID NO: 2560680 - DNA, 25 bp, Homo sapien
aacggtacgcatgggccagagggcc

SEQ ID NO: 2560681 - DNA, 25 bp, Homo sapien
cagagggcctggagagtcgtttgtg

SEQ ID NO: 2560682 - DNA, 25 bp, Homo sapien
tgcgcttgagaagcgatggcggcgg

SEQ ID NO: 2560683 - DNA, 25 bp, Homo sapien
cgggcggttgcgtgtggtgcgcggg

SEQ ID NO: 2560684 - DNA, 25 bp, Homo sapien
ccagtcgtgcgacgccgggcggttg

SEQ ID NO: 2560685 - DNA, 25 bp, Homo sapien
ggcgcggctggtgcgcttgagaagc

SEQ ID NO: 2560686 - DNA, 25 bp, Homo sapien
aggtcccgccttctgccctctggtt

SEQ ID NO: 2560687 - DNA, 25 bp, Homo sapien
tcgcctatgacacgccggagtcctt

SEQ ID NO: 2560688 - DNA, 25 bp, Homo sapien
tgtaaaaatcgcctctccttaggtc

SEQ ID NO: 2560689 - DNA, 25 bp, Homo sapien
cccagaggccttcgcctatgacacg

SEQ ID NO: 2560690 - DNA, 25 bp, Homo sapien
ctccaagcgtctcctggaatccatg

SEQ ID NO: 2560691 - DNA, 25 bp, Homo sapien
caagccccgcccttctgatctttcc

SEQ ID NO: 2560692 - DNA, 25 bp, Homo sapien
tttctcgctcgtctttcttccggct

SEQ ID NO: 2560693 - DNA, 25 bp, Homo sapien
tcctctcttttcgtgatagcctcgc

SEQ ID NO: 2560694 - DNA, 25 bp, Homo sapien
gtctttggggctcttagcaacacaa

SEQ ID NO: 2560695 - DNA, 25 bp, Homo sapien
tagtgcctgactgcctgaaggaggc

SEQ ID NO: 2560696 - DNA, 25 bp, Homo sapien
gagttgggcactagtgcctgactgc

SEQ ID NO: 2560697 - DNA, 25 bp, Homo sapien
gggtgtgagatgtccacaccctctc

SEQ ID NO: 2560698 - DNA, 25 bp, Homo sapien
ggctgggggactggactctgttgtc

SEQ ID NO: 2560699 - DNA, 25 bp, Homo sapien
tcttcactttggtgtcctggctcat

SEQ ID NO: 2560700 - DNA, 25 bp, Homo sapien
tgggggactggactctgttgtcttc

SEQ ID NO: 2560701 - DNA, 25 bp, Homo sapien
tctgttgtcttcactttggtgtcct

SEQ ID NO: 2560702 - DNA, 25 bp, Homo sapien
caggcattcaaagctgtagttgtga

SEQ ID NO: 2560703 - DNA, 25 bp, Homo sapien
gccaccagtagtagtaatccccaga

SEQ ID NO: 2560704 - DNA, 25 bp, Homo sapien
ttatacatgactgggaagaccattg

SEQ ID NO: 2560705 - DNA, 25 bp, Homo sapien
tgggtccaggacaggcagcaacttc

SEQ ID NO: 2560706 - DNA, 25 bp, Homo sapien
gaccattgtgttcagccaccagtag

SEQ ID NO: 2560707 - DNA, 25 bp, Homo sapien
ccagataaccgtgctgcaagtcggg

SEQ ID NO: 2560708 - DNA, 25 bp, Homo sapien
caccaccatgtctagtaggtatagc

SEQ ID NO: 2560709 - DNA, 25 bp, Homo sapien
taggtatagcaggtcactcgtgtag

SEQ ID NO: 2560710 - DNA, 25 bp, Homo sapien
ggtcactcgtgtagtccagcaccaa

SEQ ID NO: 2560711 - DNA, 25 bp, Homo sapien
gagccaggcataactctgctcccgg

SEQ ID NO: 2560712 - DNA, 25 bp, Homo sapien
taggaagcggacctgctgtagtcaa

SEQ ID NO: 2560713 - DNA, 25 bp, Homo sapien
agcttgggctgagcatgagctgccc

SEQ ID NO: 2560714 - DNA, 25 bp, Homo sapien
gcactgggatgctgtcaggcataga

SEQ ID NO: 2560715 - DNA, 25 bp, Homo sapien
catgatctgggtagaaagccgcatc

SEQ ID NO: 2560716 - DNA, 25 bp, Homo sapien
tgatggtggcgaaacccatgacggc

SEQ ID NO: 2560717 - DNA, 25 bp, Homo sapien
aactccaggtgcgaacgtagcgact

SEQ ID NO: 2560718 - DNA, 25 bp, Homo sapien
aaagctatagaggtactggcgccgc

SEQ ID NO: 2560719 - DNA, 25 bp, Homo sapien
caagtgctgtaagatggctacctcg

SEQ ID NO: 2560720 - DNA, 25 bp, Homo sapien
gatgatgtacatctcttggccaatg

SEQ ID NO: 2560721 - DNA, 25 bp, Homo sapien
ggccagttgaccctctcggatgatg

SEQ ID NO: 2560722 - DNA, 25 bp, Homo sapien
gttctgaaagatctgcacccggctc

SEQ ID NO: 2560723 - DNA, 25 bp, Homo sapien
tatgccaagcactgcgctggatgcc

SEQ ID NO: 2560724 - DNA, 25 bp, Homo sapien
ctgtggaaaggtaggcaaagagccc

SEQ ID NO: 2560725 - DNA, 25 bp, Homo sapien
tgtgtatacctgtgcgacgttgggc

SEQ ID NO: 2560726 - DNA, 25 bp, Homo sapien
cttggacaagggaaagggagctact

SEQ ID NO: 2560727 - DNA, 25 bp, Homo sapien
tccttgctcaggcagaataggtctg

SEQ ID NO: 2560728 - DNA, 25 bp, Homo sapien
tgttcattttcagcaggatctcacg

SEQ ID NO: 2560729 - DNA, 25 bp, Homo sapien
gcaatcttaagtgcgctggactcca

SEQ ID NO: 2560730 - DNA, 25 bp, Homo sapien
gtctgtgcttgtggatactcgctca

SEQ ID NO: 2560731 - DNA, 25 bp, Homo sapien
catatgctccggtgtgggatgcaaa

SEQ ID NO: 2560732 - DNA, 25 bp, Homo sapien
tgtgcatgggcactcttacagcagt

SEQ ID NO: 2560733 - DNA, 25 bp, Homo sapien
catcttagacctagagggctcaggg

SEQ ID NO: 2560734 - DNA, 25 bp, Homo sapien
tatacttgtgaatcgcccatatggg

SEQ ID NO: 2560735 - DNA, 25 bp, Homo sapien
gaacggtcctgttggaactattcac

SEQ ID NO: 2560736 - DNA, 25 bp, Homo sapien
acaactgtcatggtagggctgggcc

SEQ ID NO: 2560737 - DNA, 25 bp, Homo sapien
ggttcagacatgataccagactcct

SEQ ID NO: 2560738 - DNA, 25 bp, Homo sapien
taaactactacttggcacagctcag

SEQ ID NO: 2560739 - DNA, 25 bp, Homo sapien
ttggtcacatggttaagttcctcag

SEQ ID NO: 2560740 - DNA, 25 bp, Homo sapien
tctatctatcatttcaatagctttg

SEQ ID NO: 2560741 - DNA, 25 bp, Homo sapien
gataatacatgtagagcagtttgtg

SEQ ID NO: 2560742 - DNA, 25 bp, Homo sapien
tgtgaattattccacaacagtgtgt

SEQ ID NO: 2560743 - DNA, 25 bp, Homo sapien
tgttcatactgtgctgcttagaatg

SEQ ID NO: 2560744 - DNA, 25 bp, Homo sapien
gagtagatgtcttaccaaatttccc

SEQ ID NO: 2560745 - DNA, 25 bp, Homo sapien
tgaaaaaactatggcttagagagag

SEQ ID NO: 2560746 - DNA, 25 bp, Homo sapien
ctactaggtgaaagagccagaagtc

SEQ ID NO: 2560747 - DNA, 25 bp, Homo sapien
gctccttagtaaacatcctccacag

SEQ ID NO: 2560748 - DNA, 25 bp, Homo sapien
aatctttgtttgagagtctgcttcc

SEQ ID NO: 2560749 - DNA, 25 bp, Homo sapien
caaagtcctgttcattttagctact

SEQ ID NO: 2560750 - DNA, 25 bp, Homo sapien
tctgcctgcttatatgtccactgat

SEQ ID NO: 2560751 - DNA, 25 bp, Homo sapien
ttactcagctcgacccggcgggctc

SEQ ID NO: 2560752 - DNA, 25 bp, Homo sapien
cgattccggctcaggctcccgccgc

SEQ ID NO: 2560753 - DNA, 25 bp, Homo sapien
tccacctgctcacgctgcgattccg

SEQ ID NO: 2560754 - DNA, 25 bp, Homo sapien
gagcccgccgccttactcagctcga

SEQ ID NO: 2560755 - DNA, 25 bp, Homo sapien
tcgtgtcccggctccgcgaatgcga

SEQ ID NO: 2560756 - DNA, 25 bp, Homo sapien
tccggttccctgcacgctccggttc

SEQ ID NO: 2560757 - DNA, 25 bp, Homo sapien
gcacgctccggttcagctttagcag

SEQ ID NO: 2560758 - DNA, 25 bp, Homo sapien
gggctcgcagctgaggttgcccaca

SEQ ID NO: 2560759 - DNA, 25 bp, Homo sapien
tggcaagaggaggtcctcgccttct

SEQ ID NO: 2560760 - DNA, 25 bp, Homo sapien
ctgtgaactggatgtaagagggaaa

SEQ ID NO: 2560761 - DNA, 25 bp, Homo sapien
gctctaggtgtattcaggggaccag

SEQ ID NO: 2560762 - DNA, 25 bp, Homo sapien
caggatgtgaaggagttccgaccag

SEQ ID NO: 2560763 - DNA, 25 bp, Homo sapien
tgggtaacctatgcatctgcaggga

SEQ ID NO: 2560764 - DNA, 25 bp, Homo sapien
cgcgcacacacgtaacaaacctatg

SEQ ID NO: 2560765 - DNA, 25 bp, Homo sapien
taacatctgactggctgggtaacat

SEQ ID NO: 2560766 - DNA, 25 bp, Homo sapien
taacattggagtgaacctgggtaac

SEQ ID NO: 2560767 - DNA, 25 bp, Homo sapien
gccttgataagtctacccgtgagca

SEQ ID NO: 2560768 - DNA, 25 bp, Homo sapien
atcagaccaggcgactcagaagatt

SEQ ID NO: 2560769 - DNA, 25 bp, Homo sapien
tcagaagattgggacagttcagttc

SEQ ID NO: 2560770 - DNA, 25 bp, Homo sapien
gggtacatccacaagtgccttgata

SEQ ID NO: 2560771 - DNA, 25 bp, Homo sapien
gcagatgacggtgccaaagatgaat

SEQ ID NO: 2560772 - DNA, 25 bp, Homo sapien
cagtcccaggaccacgatgatgagc

SEQ ID NO: 2560773 - DNA, 25 bp, Homo sapien
tcatcaggaagatcactgcgtaaag

SEQ ID NO: 2560774 - DNA, 25 bp, Homo sapien
gcgtaaagagtgattctaatggcca

SEQ ID NO: 2560775 - DNA, 25 bp, Homo sapien
gcactacacaagcatcagtgggact

SEQ ID NO: 2560776 - DNA, 25 bp, Homo sapien
ggagtcacctaggaaacttgcacta

SEQ ID NO: 2560777 - DNA, 25 bp, Homo sapien
ttgcactacacaagcatcagtggga

SEQ ID NO: 2560778 - DNA, 25 bp, Homo sapien
aggaaggagtcacctaggaaacttg

SEQ ID NO: 2560779 - DNA, 25 bp, Homo sapien
gcgctgtaccgctccagtgcgatgg

SEQ ID NO: 2560780 - DNA, 25 bp, Homo sapien
tagggcaccatgagtagtccggaca

SEQ ID NO: 2560781 - DNA, 25 bp, Homo sapien
acgaggcttagcgtggacacactca

SEQ ID NO: 2560782 - DNA, 25 bp, Homo sapien
tggctacaatcacgcgagccgcgtg

SEQ ID NO: 2560783 - DNA, 25 bp, Homo sapien
ctgaagtaggagtaggatttggggg

SEQ ID NO: 2560784 - DNA, 25 bp, Homo sapien
cttggtttcggaccctgctttggct

SEQ ID NO: 2560785 - DNA, 25 bp, Homo sapien
gccgtcaaagcgaagccctaagtag

SEQ ID NO: 2560786 - DNA, 25 bp, Homo sapien
tcgcgagagataagcccgtaggcca

SEQ ID NO: 2560787 - DNA, 25 bp, Homo sapien
cacacccgggatgaagaacaagagc

SEQ ID NO: 2560788 - DNA, 25 bp, Homo sapien
ggtgggcggtcagagaaaaaggcga

SEQ ID NO: 2560789 - DNA, 25 bp, Homo sapien
gcaggccccgtcgccctccaaagct

SEQ ID NO: 2560790 - DNA, 25 bp, Homo sapien
agcacaaagggtgggcggtcagaga

SEQ ID NO: 2560791 - DNA, 25 bp, Homo sapien
ctgagcacaaagggtgggcggtcag

SEQ ID NO: 2560792 - DNA, 25 bp, Homo sapien
agcagcgagcgcaagtttccaggca

SEQ ID NO: 2560793 - DNA, 25 bp, Homo sapien
gaagttgcacgtagcagccatcgct

SEQ ID NO: 2560794 - DNA, 25 bp, Homo sapien
taagcctggacagcgaagcaatgga

SEQ ID NO: 2560795 - DNA, 25 bp, Homo sapien
tgaatgaaggagataggagcacccg

SEQ ID NO: 2560796 - DNA, 25 bp, Homo sapien
caggctcagtcccatatcagaggca

SEQ ID NO: 2560797 - DNA, 25 bp, Homo sapien
cagaacagcctgttggtcagaggta

SEQ ID NO: 2560798 - DNA, 25 bp, Homo sapien
tgtgaggtcaaactaggagcatccc

SEQ ID NO: 2560799 - DNA, 25 bp, Homo sapien
gcagggccacggtccttaactggaa

SEQ ID NO: 2560800 - DNA, 25 bp, Homo sapien
cagtgtgcaacagtgggagagaccc

SEQ ID NO: 2560801 - DNA, 25 bp, Homo sapien
gacccgacagaaggatactgcaaaa

SEQ ID NO: 2560802 - DNA, 25 bp, Homo sapien
tactgcaaaatcctatgcctcctca

SEQ ID NO: 2560803 - DNA, 25 bp, Homo sapien
aaagaatatgcacagccacgctgaa

SEQ ID NO: 2560804 - DNA, 25 bp, Homo sapien
tgggttccacagcaacacgatgtct

SEQ ID NO: 2560805 - DNA, 25 bp, Homo sapien
tttcccaagacaaatgtccatcttc

SEQ ID NO: 2560806 - DNA, 25 bp, Homo sapien
tgtccctgctggagtaagtgagcac

SEQ ID NO: 2560807 - DNA, 25 bp, Homo sapien
gtaagtgagcacactggttttcctc

SEQ ID NO: 2560808 - DNA, 25 bp, Homo sapien
tagaatctctgttgtatagagttgg

SEQ ID NO: 2560809 - DNA, 25 bp, Homo sapien
ctccttggaggattctattgcggaa

SEQ ID NO: 2560810 - DNA, 25 bp, Homo sapien
tataccaccttgcttatttagaatc

SEQ ID NO: 2560811 - DNA, 25 bp, Homo sapien
gattcttcagccaccaaatctcctt

SEQ ID NO: 2560812 - DNA, 25 bp, Homo sapien
tgaaaaaccagagtcaagcagccat

SEQ ID NO: 2560813 - DNA, 25 bp, Homo sapien
gaaaaaccagagtcaagcagccatc

SEQ ID NO: 2560814 - DNA, 25 bp, Homo sapien
agtgcctggtttggtgatttgttca

SEQ ID NO: 2560815 - DNA, 25 bp, Homo sapien
cctggtttggtgatttgttcagtgt

SEQ ID NO: 2560816 - DNA, 25 bp, Homo sapien
gtccatagtgcctggtttggtgatt

SEQ ID NO: 2560817 - DNA, 25 bp, Homo sapien
cagtgtaggcaggacaaagcggagg

SEQ ID NO: 2560818 - DNA, 25 bp, Homo sapien
tctgtggcaaaccagcataagaccc

SEQ ID NO: 2560819 - DNA, 25 bp, Homo sapien
tcttgattttctagtatgtggccca

SEQ ID NO: 2560820 - DNA, 25 bp, Homo sapien
cccaagttatctggtgataccttct

SEQ ID NO: 2560821 - DNA, 25 bp, Homo sapien
caagtctgattattgagtagattat

SEQ ID NO: 2560822 - DNA, 25 bp, Homo sapien
gagccagtgtcctcgttggtgcctc

SEQ ID NO: 2560823 - DNA, 25 bp, Homo sapien
tatgaccacacgatgtcagtgtcgg

SEQ ID NO: 2560824 - DNA, 25 bp, Homo sapien
tggtgcctcctctaattacccggag

SEQ ID NO: 2560825 - DNA, 25 bp, Homo sapien
ttttcgagactgtgcagtaccaggg

SEQ ID NO: 2560826 - DNA, 25 bp, Homo sapien
tgcagaaggtacagagcctccgaag

SEQ ID NO: 2560827 - DNA, 25 bp, Homo sapien
tcctttcagaatgtagcactcacgc

SEQ ID NO: 2560828 - DNA, 25 bp, Homo sapien
cctctgaaagaggtgcagtcactca

SEQ ID NO: 2560829 - DNA, 25 bp, Homo sapien
gcgaatcctacatccaccaaggcgg

SEQ ID NO: 2560830 - DNA, 25 bp, Homo sapien
tttctttgtcaccacagttacagta

SEQ ID NO: 2560831 - DNA, 25 bp, Homo sapien
ggcactggccaggtagagaacccat

SEQ ID NO: 2560832 - DNA, 25 bp, Homo sapien
tttgtcaccacagttacagtaaaga

SEQ ID NO: 2560833 - DNA, 25 bp, Homo sapien
aggtagagaacccatctgcaaaata

SEQ ID NO: 2560834 - DNA, 25 bp, Homo sapien
gggagactggtagaaccatcattgg

SEQ ID NO: 2560835 - DNA, 25 bp, Homo sapien
agactggtagaaccatcattggctt

SEQ ID NO: 2560836 - DNA, 25 bp, Homo sapien
ctttggggagactggtagaaccatc

SEQ ID NO: 2560837 - DNA, 25 bp, Homo sapien
tggggagactggtagaaccatcatt

SEQ ID NO: 2560838 - DNA, 25 bp, Homo sapien
tccgagatcttccatccatttggat

SEQ ID NO: 2560839 - DNA, 25 bp, Homo sapien
tggtcataatataccattccgagat

SEQ ID NO: 2560840 - DNA, 25 bp, Homo sapien
ggagtcagtacaaattcacttcctg

SEQ ID NO: 2560841 - DNA, 25 bp, Homo sapien
tgatgcctcaaacttatagctattg

SEQ ID NO: 2560842 - DNA, 25 bp, Homo sapien
caataataaggagtcatgattaatc

SEQ ID NO: 2560843 - DNA, 25 bp, Homo sapien
taataaggagtcatgattaatctgc

SEQ ID NO: 2560844 - DNA, 25 bp, Homo sapien
cacacaataataaggagtcatgatt

SEQ ID NO: 2560845 - DNA, 25 bp, Homo sapien
aggagtcatgattaatctgcagttc

SEQ ID NO: 2560846 - DNA, 25 bp, Homo sapien
acaatccgaacattacatttttctg

SEQ ID NO: 2560847 - DNA, 25 bp, Homo sapien
ctttgaaagtacagtacaatccgaa

SEQ ID NO: 2560848 - DNA, 25 bp, Homo sapien
gtacagtacaatccgaacattacat

SEQ ID NO: 2560849 - DNA, 25 bp, Homo sapien
gaaagtacagtacaatccgaacatt

SEQ ID NO: 2560850 - DNA, 25 bp, Homo sapien
ggcttcaccaggtagtactctaatc

SEQ ID NO: 2560851 - DNA, 25 bp, Homo sapien
ccaacaagttcaagagtagtttcca

SEQ ID NO: 2560852 - DNA, 25 bp, Homo sapien
ccaacgctcttagccgttgaatatg

SEQ ID NO: 2560853 - DNA, 25 bp, Homo sapien
gatcccattcgttcttctaaccttg

SEQ ID NO: 2560854 - DNA, 25 bp, Homo sapien
tctctggagggatgaaactgtaact

SEQ ID NO: 2560855 - DNA, 25 bp, Homo sapien
ggtcccaggcttcctctagttcaga

SEQ ID NO: 2560856 - DNA, 25 bp, Homo sapien
aaatactctgttggctctctggagg

SEQ ID NO: 2560857 - DNA, 25 bp, Homo sapien
catcagcattagtgcggtcaaggtc

SEQ ID NO: 2560858 - DNA, 25 bp, Homo sapien
cttgagcatcagtggtgggagttcc

SEQ ID NO: 2560859 - DNA, 25 bp, Homo sapien
taagacctatttatgctctggcagc

SEQ ID NO: 2560860 - DNA, 25 bp, Homo sapien
tctgcatgcttgtctgagggactgt

SEQ ID NO: 2560861 - DNA, 25 bp, Homo sapien
gggaaatattttgagccaccactca

SEQ ID NO: 2560862 - DNA, 25 bp, Homo sapien
gcaactgtttagatgattcttggcc

SEQ ID NO: 2560863 - DNA, 25 bp, Homo sapien
caaactcctattaaacaagataggc

SEQ ID NO: 2560864 - DNA, 25 bp, Homo sapien
gacctaatgggaacagactgcaact

SEQ ID NO: 2560865 - DNA, 25 bp, Homo sapien
atgcccgactaataaagctatccat

SEQ ID NO: 2560866 - DNA, 25 bp, Homo sapien
tggtcaccctattaatagaggcccg

SEQ ID NO: 2560867 - DNA, 25 bp, Homo sapien
tactcaaggtaaaccaggatagttg

SEQ ID NO: 2560868 - DNA, 25 bp, Homo sapien
tgaggcagatgaccaaccatcctgg

SEQ ID NO: 2560869 - DNA, 25 bp, Homo sapien
tagaggcccgagtttccaaagtgtc

SEQ ID NO: 2560870 - DNA, 25 bp, Homo sapien
agtttaagtactccctgtgtcctga

SEQ ID NO: 2560871 - DNA, 25 bp, Homo sapien
gtaaagtactcaaagcatcactagg

SEQ ID NO: 2560872 - DNA, 25 bp, Homo sapien
ggatgtattaatgtggaaccaggaa

SEQ ID NO: 2560873 - DNA, 25 bp, Homo sapien
tataaatcagggacctaagcatagc

SEQ ID NO: 2560874 - DNA, 25 bp, Homo sapien
tatcagagttaggatatgcacatga

SEQ ID NO: 2560875 - DNA, 25 bp, Homo sapien
tcagagttaggatatgcacatgagc

SEQ ID NO: 2560876 - DNA, 25 bp, Homo sapien
agagttaggatatgcacatgagcca

SEQ ID NO: 2560877 - DNA, 25 bp, Homo sapien
agtatcagagttaggatatgcacat

SEQ ID NO: 2560878 - DNA, 25 bp, Homo sapien
cactctctaaggtaggaaatattac

SEQ ID NO: 2560879 - DNA, 25 bp, Homo sapien
gaggctacatgatttgtctaagacc

SEQ ID NO: 2560880 - DNA, 25 bp, Homo sapien
tcataacagcactctctaaggtagg

SEQ ID NO: 2560881 - DNA, 25 bp, Homo sapien
cccctattttcggatgaggcaactg

SEQ ID NO: 2560882 - DNA, 25 bp, Homo sapien
tttcctccaggttccattggttcca

SEQ ID NO: 2560883 - DNA, 25 bp, Homo sapien
cttcttttcctccaggttccattgg

SEQ ID NO: 2560884 - DNA, 25 bp, Homo sapien
ctgcttcttttcctccaggttccat

SEQ ID NO: 2560885 - DNA, 25 bp, Homo sapien
ttcctccaggttccattggttccat

SEQ ID NO: 2560886 - DNA, 25 bp, Homo sapien
taagacgtaccctgaacattaagct

SEQ ID NO: 2560887 - DNA, 25 bp, Homo sapien
gaacaaactactgcaaatgtggccc

SEQ ID NO: 2560888 - DNA, 25 bp, Homo sapien
gacgggcttggtcaatagctctgga

SEQ ID NO: 2560889 - DNA, 25 bp, Homo sapien
taatgcagctgtccctgtcacaaga

SEQ ID NO: 2560890 - DNA, 25 bp, Homo sapien
tctctggggtgatggcccaaggcag

SEQ ID NO: 2560891 - DNA, 25 bp, Homo sapien
cttgatcaaactctctggggtgatg

SEQ ID NO: 2560892 - DNA, 25 bp, Homo sapien
ggggtgatggcccaaggcagacgcg

SEQ ID NO: 2560893 - DNA, 25 bp, Homo sapien
ctggggtgatggcccaaggcagacg

SEQ ID NO: 2560894 - DNA, 25 bp, Homo sapien
tgaagaagctcagcggagagacagg

SEQ ID NO: 2560895 - DNA, 25 bp, Homo sapien
gcactgtggccttgcctgatgagaa

SEQ ID NO: 2560896 - DNA, 25 bp, Homo sapien
tccagcagctttgggagctgcaaga

SEQ ID NO: 2560897 - DNA, 25 bp, Homo sapien
tggctcccaatagccagcagatggc

SEQ ID NO: 2560898 - DNA, 25 bp, Homo sapien
tagtaacctaggcacagagggtcct

SEQ ID NO: 2560899 - DNA, 25 bp, Homo sapien
gaatgacctgattgtgaagccaagc

SEQ ID NO: 2560900 - DNA, 25 bp, Homo sapien
cacctttgttatgagacctgggcac

SEQ ID NO: 2560901 - DNA, 25 bp, Homo sapien
ggtcaagagctataggtcctggtca

SEQ ID NO: 2560902 - DNA, 25 bp, Homo sapien
aaagtccctcttctatgctgccgtc

SEQ ID NO: 2560903 - DNA, 25 bp, Homo sapien
gactgactagtctccctgggtctac

SEQ ID NO: 2560904 - DNA, 25 bp, Homo sapien
acacttgttggctgactggctagac

SEQ ID NO: 2560905 - DNA, 25 bp, Homo sapien
ctgggacatgggcataacttttgga

SEQ ID NO: 2560906 - DNA, 25 bp, Homo sapien
cctggtacgacatgataggattccg

SEQ ID NO: 2560907 - DNA, 25 bp, Homo sapien
tgtgaccagtggacacaaaagtcat

SEQ ID NO: 2560908 - DNA, 25 bp, Homo sapien
taggattccgtacctgttgctcaga

SEQ ID NO: 2560909 - DNA, 25 bp, Homo sapien
gacactgtctctgtaagcccttgga

SEQ ID NO: 2560910 - DNA, 25 bp, Homo sapien
caagagtaaactcaacataaatacc

SEQ ID NO: 2560911 - DNA, 25 bp, Homo sapien
tcaacataaatacccttttcaggga

SEQ ID NO: 2560912 - DNA, 25 bp, Homo sapien
ggagggagaccaagagtaaactcaa

SEQ ID NO: 2560913 - DNA, 25 bp, Homo sapien
actcaacataaatacccttttcagg

SEQ ID NO: 2560914 - DNA, 25 bp, Homo sapien
ctgcggaggcggagggggcggggcg

SEQ ID NO: 2560915 - DNA, 25 bp, Homo sapien
tgcggaggcggagggggcggggcgc

SEQ ID NO: 2560916 - DNA, 25 bp, Homo sapien
tagtcggctgactgctccgcggccg

SEQ ID NO: 2560917 - DNA, 25 bp, Homo sapien
cttctctgtagtcggctgactgctc

SEQ ID NO: 2560918 - DNA, 25 bp, Homo sapien
cggccgcaaagcagctccgcccctt

SEQ ID NO: 2560919 - DNA, 25 bp, Homo sapien
ctctgtagtcggctgactgctccgc

SEQ ID NO: 2560920 - DNA, 25 bp, Homo sapien
tgtcgcgcttcctacacggggctgg

SEQ ID NO: 2560921 - DNA, 25 bp, Homo sapien
tacacggggctggttcgtctgtccc

SEQ ID NO: 2560922 - DNA, 25 bp, Homo sapien
gcgcttcctacacggggctggttcg

SEQ ID NO: 2560923 - DNA, 25 bp, Homo sapien
gcctggaccctagccagccctcagg

SEQ ID NO: 2560924 - DNA, 25 bp, Homo sapien
ggcggtcccgtcttgtccctgctcc

SEQ ID NO: 2560925 - DNA, 25 bp, Homo sapien
ctctggcggagtgacgctccgtagc

SEQ ID NO: 2560926 - DNA, 25 bp, Homo sapien
tccggcggtcccgtcttgtccctgc

SEQ ID NO: 2560927 - DNA, 25 bp, Homo sapien
gtcccgtcttgtccctgctcccggc

SEQ ID NO: 2560928 - DNA, 25 bp, Homo sapien
gagcctctgccggagcccagagaac

SEQ ID NO: 2560929 - DNA, 25 bp, Homo sapien
agaacccgagagtcagacagagcca

SEQ ID NO: 2560930 - DNA, 25 bp, Homo sapien
gagggtgagcctctgccggagccca

SEQ ID NO: 2560931 - DNA, 25 bp, Homo sapien
gagaacccgagagtcagacagagcc

SEQ ID NO: 2560932 - DNA, 25 bp, Homo sapien
gggcactatgcgatgtaacctggca

SEQ ID NO: 2560933 - DNA, 25 bp, Homo sapien
cacccaaagacatctcggagccggg

SEQ ID NO: 2560934 - DNA, 25 bp, Homo sapien
ggttgatggcggtgaatagaccttt

SEQ ID NO: 2560935 - DNA, 25 bp, Homo sapien
gaatagacctttgcagattgggcag

SEQ ID NO: 2560936 - DNA, 25 bp, Homo sapien
tacaccatatcaaaagggccggctg

SEQ ID NO: 2560937 - DNA, 25 bp, Homo sapien
gattgcacagcttgatggccacgga

SEQ ID NO: 2560938 - DNA, 25 bp, Homo sapien
cacacggcaggtggtgctatcttca

SEQ ID NO: 2560939 - DNA, 25 bp, Homo sapien
caggtagtcatgatcccagtgcagg

SEQ ID NO: 2560940 - DNA, 25 bp, Homo sapien
ccgtggagttgatcaagagccagaa

SEQ ID NO: 2560941 - DNA, 25 bp, Homo sapien
ttctcacgggaacaaaaattcatat

SEQ ID NO: 2560942 - DNA, 25 bp, Homo sapien
ggtatggggaaagagcatagaaccc

SEQ ID NO: 2560943 - DNA, 25 bp, Homo sapien
aattcatattgagagagatgaggcg

SEQ ID NO: 2560944 - DNA, 25 bp, Homo sapien
ccccagggaacacttgttgggaatg

SEQ ID NO: 2560945 - DNA, 25 bp, Homo sapien
cagaggtgctccagctcaacaggag

SEQ ID NO: 2560946 - DNA, 25 bp, Homo sapien
accgtgttcccactactggccctca

SEQ ID NO: 2560947 - DNA, 25 bp, Homo sapien
ggaacacttgttgggaatgccagga

SEQ ID NO: 2560948 - DNA, 25 bp, Homo sapien
gaattaaggatggtaatcagggcat

SEQ ID NO: 2560949 - DNA, 25 bp, Homo sapien
agaattaaggatggtaatcagggca

SEQ ID NO: 2560950 - DNA, 25 bp, Homo sapien
gagaattaaggatggtaatcagggc

SEQ ID NO: 2560951 - DNA, 25 bp, Homo sapien
tacaattcggtaataattccagctc

SEQ ID NO: 2560952 - DNA, 25 bp, Homo sapien
gctacaattcggtaataattccagc

SEQ ID NO: 2560953 - DNA, 25 bp, Homo sapien
ggctacaattcggtaataattccag

SEQ ID NO: 2560954 - DNA, 25 bp, Homo sapien
caattcggtaataattccagctcca

SEQ ID NO: 2560955 - DNA, 25 bp, Homo sapien
agaactgagcagccagggtgttctc

SEQ ID NO: 2560956 - DNA, 25 bp, Homo sapien
gccagcggccggctcagagtctctt

SEQ ID NO: 2560957 - DNA, 25 bp, Homo sapien
attaaggccgatgtaggtagttgca

SEQ ID NO: 2560958 - DNA, 25 bp, Homo sapien
gccggctcagagtctcttcatcata

SEQ ID NO: 2560959 - DNA, 25 bp, Homo sapien
ggaggggccacacatcctgcccatg

SEQ ID NO: 2560960 - DNA, 25 bp, Homo sapien
ccaccaactccaggataagggaggc

SEQ ID NO: 2560961 - DNA, 25 bp, Homo sapien
caactccaggataagggaggctccc

SEQ ID NO: 2560962 - DNA, 25 bp, Homo sapien
caggataagggaggctcccttctgc

SEQ ID NO: 2560963 - DNA, 25 bp, Homo sapien
tctggaaaagttgcatgtcgccccg

SEQ ID NO: 2560964 - DNA, 25 bp, Homo sapien
tgggcagcccataggtttctcgagc

SEQ ID NO: 2560965 - DNA, 25 bp, Homo sapien
tctcgagccctgtagagaagctgcc

SEQ ID NO: 2560966 - DNA, 25 bp, Homo sapien
tgggcacaaagagtagccagacggc

SEQ ID NO: 2560967 - DNA, 25 bp, Homo sapien
tggttgaaccacagcagcatttggg

SEQ ID NO: 2560968 - DNA, 25 bp, Homo sapien
gggactggttctttcaccggatgat

SEQ ID NO: 2560969 - DNA, 25 bp, Homo sapien
ccggatgatcttgcctggttgaacc

SEQ ID NO: 2560970 - DNA, 25 bp, Homo sapien
taggcctctactccatggctgtgaa

SEQ ID NO: 2560971 - DNA, 25 bp, Homo sapien
ccccatgagaaggtagacggagcct

SEQ ID NO: 2560972 - DNA, 25 bp, Homo sapien
tgtgtatggaaaagtcccttggccc

SEQ ID NO: 2560973 - DNA, 25 bp, Homo sapien
cagaatgtgaccagtctcctgggct

SEQ ID NO: 2560974 - DNA, 25 bp, Homo sapien
ggtcccggcttgtacctcatccatg

SEQ ID NO: 2560975 - DNA, 25 bp, Homo sapien
tgccctgggtcttctcggctccata

SEQ ID NO: 2560976 - DNA, 25 bp, Homo sapien
tcttctcggctccatatcatggcag

SEQ ID NO: 2560977 - DNA, 25 bp, Homo sapien
gggtcttctcggctccatatcatgg

SEQ ID NO: 2560978 - DNA, 25 bp, Homo sapien
tatctgccctgggtcttctcggctc

SEQ ID NO: 2560979 - DNA, 25 bp, Homo sapien
tccaccacctcatagggagagactg

SEQ ID NO: 2560980 - DNA, 25 bp, Homo sapien
tgagcagtccagtgctcctgagagg

SEQ ID NO: 2560981 - DNA, 25 bp, Homo sapien
caaatgggagcctagataattcctt

SEQ ID NO: 2560982 - DNA, 25 bp, Homo sapien
gagaattgaccatgagatttcgcaa

SEQ ID NO: 2560983 - DNA, 25 bp, Homo sapien
tgagaaagccctagcacttgagacc

SEQ ID NO: 2560984 - DNA, 25 bp, Homo sapien
taactccgtgttgcgacaccttggc

SEQ ID NO: 2560985 - DNA, 25 bp, Homo sapien
gagcttgtggatctcacgtgtccta

SEQ ID NO: 2560986 - DNA, 25 bp, Homo sapien
gatgtccgagactacttcatgccct

SEQ ID NO: 2560987 - DNA, 25 bp, Homo sapien
gataagaggttgaggcggttcccaa

SEQ ID NO: 2560988 - DNA, 25 bp, Homo sapien
gagcctaaatctgaaccttgtggag

SEQ ID NO: 2560989 - DNA, 25 bp, Homo sapien
ttagtcagggctaggtgtcatcacc

SEQ ID NO: 2560990 - DNA, 25 bp, Homo sapien
aaactgcaagcatgatccccgtctg

SEQ ID NO: 2560991 - DNA, 25 bp, Homo sapien
gcccttataatctgcgacgtggccg

SEQ ID NO: 2560992 - DNA, 25 bp, Homo sapien
tgctgctaggatcgcgacgggaact

SEQ ID NO: 2560993 - DNA, 25 bp, Homo sapien
gagaggacgtcatttccgccgagtc

SEQ ID NO: 2560994 - DNA, 25 bp, Homo sapien
gagagctagctcgagtatcgccctg

SEQ ID NO: 2560995 - DNA, 25 bp, Homo sapien
atgccgtacgccacttccgtttcag

SEQ ID NO: 2560996 - DNA, 25 bp, Homo sapien
gtttcagcttctcggtgccgccccg

SEQ ID NO: 2560997 - DNA, 25 bp, Homo sapien
ccaccggcgcatgccgtacgccact

SEQ ID NO: 2560998 - DNA, 25 bp, Homo sapien
ccgtttcagcttctcggtgccgccc

SEQ ID NO: 2560999 - DNA, 25 bp, Homo sapien
gtttcgcagttgctgttgctgctgc

SEQ ID NO: 2561000 - DNA, 25 bp, Homo sapien
cagttgctgttgctgctgctgctgc

SEQ ID NO: 2561001 - DNA, 25 bp, Homo sapien
tcgaaacgacttagttctcacttac

SEQ ID NO: 2561002 - DNA, 25 bp, Homo sapien
tggcctcgaaacgacttagttctca

SEQ ID NO: 2561003 - DNA, 25 bp, Homo sapien
tgaacgtctggcctcgaaacgactt

SEQ ID NO: 2561004 - DNA, 25 bp, Homo sapien
cgtctggcctcgaaacgacttagtt

SEQ ID NO: 2561005 - DNA, 25 bp, Homo sapien
tgtagaccaacaggaagtcacgcag

SEQ ID NO: 2561006 - DNA, 25 bp, Homo sapien
ctcggtggtgcaagctgggcacaca

SEQ ID NO: 2561007 - DNA, 25 bp, Homo sapien
acacagcgctggaagcagagttctg

SEQ ID NO: 2561008 - DNA, 25 bp, Homo sapien
gagttctgtcatccgattgtagacc

SEQ ID NO: 2561009 - DNA, 25 bp, Homo sapien
aggcatgagctgcacgtaagcggcc

SEQ ID NO: 2561010 - DNA, 25 bp, Homo sapien
ggttggaatggatcagcttcccagc

SEQ ID NO: 2561011 - DNA, 25 bp, Homo sapien
agctgcacgtaagcggccatgaggc

SEQ ID NO: 2561012 - DNA, 25 bp, Homo sapien
ggaatggatcagcttcccagcacag

SEQ ID NO: 2561013 - DNA, 25 bp, Homo sapien
tggcacagccgaggcagcctcgtag

SEQ ID NO: 2561014 - DNA, 25 bp, Homo sapien
tgttcagcagcaacgcctggcacag

SEQ ID NO: 2561015 - DNA, 25 bp, Homo sapien
cgtagtctgcgatgcggcgctgtac

SEQ ID NO: 2561016 - DNA, 25 bp, Homo sapien
aggctgttcagcagcaacgcctggc

SEQ ID NO: 2561017 - DNA, 25 bp, Homo sapien
aggtccaccgggtccttcaatctga

SEQ ID NO: 2561018 - DNA, 25 bp, Homo sapien
ccttcaatctgagggtccatccaag

SEQ ID NO: 2561019 - DNA, 25 bp, Homo sapien
atctgagggtccatccaaggccttc

SEQ ID NO: 2561020 - DNA, 25 bp, Homo sapien
aaggtccaccgggtccttcaatctg

SEQ ID NO: 2561021 - DNA, 25 bp, Homo sapien
cagacttaaggacaactagacagag

SEQ ID NO: 2561022 - DNA, 25 bp, Homo sapien
taaacgacagaacaacggattgtgc

SEQ ID NO: 2561023 - DNA, 25 bp, Homo sapien
taagtgaggctaataccgcttactc

SEQ ID NO: 2561024 - DNA, 25 bp, Homo sapien
ttaaaattgtacacacagaccctgc

SEQ ID NO: 2561025 - DNA, 25 bp, Homo sapien
tgttcaaaggttttactgctcatcc

SEQ ID NO: 2561026 - DNA, 25 bp, Homo sapien
ctgtggccactaacttcccaaggag

SEQ ID NO: 2561027 - DNA, 25 bp, Homo sapien
gatccgttgtacttcgatagctcct

SEQ ID NO: 2561028 - DNA, 25 bp, Homo sapien
gactccagacttcttacaggtttca

SEQ ID NO: 2561029 - DNA, 25 bp, Homo sapien
tctcttcctcggatttggctgcatt

SEQ ID NO: 2561030 - DNA, 25 bp, Homo sapien
ttgcccgtgaagacaaccacacaga

SEQ ID NO: 2561031 - DNA, 25 bp, Homo sapien
tatcataaccattgccatctacttc

SEQ ID NO: 2561032 - DNA, 25 bp, Homo sapien
cccttcctgattgcccgtgaagaca

SEQ ID NO: 2561033 - DNA, 25 bp, Homo sapien
caccctgtgggtaaggtcctagtca

SEQ ID NO: 2561034 - DNA, 25 bp, Homo sapien
tatttcccaaggacagagtgccacc

SEQ ID NO: 2561035 - DNA, 25 bp, Homo sapien
gtcagatctgcactttaataccggg

SEQ ID NO: 2561036 - DNA, 25 bp, Homo sapien
agaaactttgtataggccggccgtg

SEQ ID NO: 2561037 - DNA, 25 bp, Homo sapien
tagtaactaggatctcaagaatgag

SEQ ID NO: 2561038 - DNA, 25 bp, Homo sapien
aaaggccttgagatgaaacagtaca

SEQ ID NO: 2561039 - DNA, 25 bp, Homo sapien
gaagtagtcacaggctggatcatgc

SEQ ID NO: 2561040 - DNA, 25 bp, Homo sapien
tatattgaaaaaagtgcgatacacc

SEQ ID NO: 2561041 - DNA, 25 bp, Homo sapien
cctttcagctatagacttggaggag

SEQ ID NO: 2561042 - DNA, 25 bp, Homo sapien
tctactgtatgtctgggatgcaagc

SEQ ID NO: 2561043 - DNA, 25 bp, Homo sapien
gcccctctagagaagccaggtttct

SEQ ID NO: 2561044 - DNA, 25 bp, Homo sapien
tctttcagaggtagagaagaaaccc

SEQ ID NO: 2561045 - DNA, 25 bp, Homo sapien
agtaagaagttggagaccactgtca

SEQ ID NO: 2561046 - DNA, 25 bp, Homo sapien
aggtgagtaagaagttggagaccac

SEQ ID NO: 2561047 - DNA, 25 bp, Homo sapien
aagttggagaccactgtcaatttca

SEQ ID NO: 2561048 - DNA, 25 bp, Homo sapien
agttggagaccactgtcaatttcac

SEQ ID NO: 2561049 - DNA, 25 bp, Homo sapien
cagagcaactctgcagttggttaca

SEQ ID NO: 2561050 - DNA, 25 bp, Homo sapien
ggctaccagataaattttgagactg

SEQ ID NO: 2561051 - DNA, 25 bp, Homo sapien
gttacaagggttgactggctggcta

SEQ ID NO: 2561052 - DNA, 25 bp, Homo sapien
tcacactaacgtaaataatgggaca

SEQ ID NO: 2561053 - DNA, 25 bp, Homo sapien
tgctaaaatcaacaccaggtacaag

SEQ ID NO: 2561054 - DNA, 25 bp, Homo sapien
gacatcactggaccttccatctggg

SEQ ID NO: 2561055 - DNA, 25 bp, Homo sapien
gcaggagcacatcaacttgggctgt

SEQ ID NO: 2561056 - DNA, 25 bp, Homo sapien
tcaacttgggctgtaacctggattt

SEQ ID NO: 2561057 - DNA, 25 bp, Homo sapien
tgaaaccccatctctactaaaaata

SEQ ID NO: 2561058 - DNA, 25 bp, Homo sapien
ttagctaggtgtggtgatgggcacc

SEQ ID NO: 2561059 - DNA, 25 bp, Homo sapien
tgagaccagcccgaccaacaaggtg

SEQ ID NO: 2561060 - DNA, 25 bp, Homo sapien
ctgaggcggttggataacctgaggt

SEQ ID NO: 2561061 - DNA, 25 bp, Homo sapien
cgttaagtttcaagagaacacggat

SEQ ID NO: 2561062 - DNA, 25 bp, Homo sapien
tctgtatctgcagggcttaagctaa

SEQ ID NO: 2561063 - DNA, 25 bp, Homo sapien
ctaaaattggtaaaagcagtcactc

SEQ ID NO: 2561064 - DNA, 25 bp, Homo sapien
taggaagcactctgttgagcccctg

SEQ ID NO: 2561065 - DNA, 25 bp, Homo sapien
ttaccattttaaacacgataatcag

SEQ ID NO: 2561066 - DNA, 25 bp, Homo sapien
gaaaggaggacagaccttctcccta

SEQ ID NO: 2561067 - DNA, 25 bp, Homo sapien
taatcagagtaagcctgaataaaaa

SEQ ID NO: 2561068 - DNA, 25 bp, Homo sapien
gaatgtctaagggagcatgggttac

SEQ ID NO: 2561069 - DNA, 25 bp, Homo sapien
gacagaaattcctgagttatggacc

SEQ ID NO: 2561070 - DNA, 25 bp, Homo sapien
tactgttaccaattagagatgctct

SEQ ID NO: 2561071 - DNA, 25 bp, Homo sapien
cattcgagtgggagggacagataat

SEQ ID NO: 2561072 - DNA, 25 bp, Homo sapien
tttgccctgggactattctttcttg

SEQ ID NO: 2561073 - DNA, 25 bp, Homo sapien
tcaatcacatgaccaagcctagctg

SEQ ID NO: 2561074 - DNA, 25 bp, Homo sapien
gcaaggaacggtacctgagtcacaa

SEQ ID NO: 2561075 - DNA, 25 bp, Homo sapien
cattttcagtggtcatatgccaaca

SEQ ID NO: 2561076 - DNA, 25 bp, Homo sapien
taagtactctgaggctaccacggta

SEQ ID NO: 2561077 - DNA, 25 bp, Homo sapien
gatttcctggttctctagtttgtag

SEQ ID NO: 2561078 - DNA, 25 bp, Homo sapien
cactaacgcgcaagttttctggagc

SEQ ID NO: 2561079 - DNA, 25 bp, Homo sapien
taagtaaagatcatcctcaccaatg

SEQ ID NO: 2561080 - DNA, 25 bp, Homo sapien
ttttagctgagacattcatcttctg

SEQ ID NO: 2561081 - DNA, 25 bp, Homo sapien
tccttgatctcaaggagctcaacat

SEQ ID NO: 2561082 - DNA, 25 bp, Homo sapien
caaaatccttgatctcaaggagctc

SEQ ID NO: 2561083 - DNA, 25 bp, Homo sapien
aaatccttgatctcaaggagctcaa

SEQ ID NO: 2561084 - DNA, 25 bp, Homo sapien
aacaaaatccttgatctcaaggagc

SEQ ID NO: 2561085 - DNA, 25 bp, Homo sapien
tgttagaaccgttacaagattccag

SEQ ID NO: 2561086 - DNA, 25 bp, Homo sapien
ccagctgttagaaccgttacaagat

SEQ ID NO: 2561087 - DNA, 25 bp, Homo sapien
cagaaggaccgagtctttgccagga

SEQ ID NO: 2561088 - DNA, 25 bp, Homo sapien
gaaccgttacaagattccagaagga

SEQ ID NO: 2561089 - DNA, 25 bp, Homo sapien
gaggcggactctgtgggagggggtc

SEQ ID NO: 2561090 - DNA, 25 bp, Homo sapien
cggactctgtgggagggggtcctag

SEQ ID NO: 2561091 - DNA, 25 bp, Homo sapien
gcggactctgtgggagggggtccta

SEQ ID NO: 2561092 - DNA, 25 bp, Homo sapien
agtcccatgacgtcttcgcccacag

SEQ ID NO: 2561093 - DNA, 25 bp, Homo sapien
acaggtcgtcactcgaaggcagcag

SEQ ID NO: 2561094 - DNA, 25 bp, Homo sapien
cgggttaacaggtcgtcactcgaag

SEQ ID NO: 2561095 - DNA, 25 bp, Homo sapien
agccccagtcccatgacgtcttcgc

SEQ ID NO: 2561096 - DNA, 25 bp, Homo sapien
aaggaatctgcactcgagctggcga

SEQ ID NO: 2561097 - DNA, 25 bp, Homo sapien
aatctgcactcgagctggcgatcgc

SEQ ID NO: 2561098 - DNA, 25 bp, Homo sapien
tgaacctcggtcacagcaaggaatc

SEQ ID NO: 2561099 - DNA, 25 bp, Homo sapien
tcacagcaaggaatctgcactcgag

SEQ ID NO: 2561100 - DNA, 25 bp, Homo sapien
gcaagggaagagagcccgatctgct

SEQ ID NO: 2561101 - DNA, 25 bp, Homo sapien
cctgctggagcagtgaatgaactta

SEQ ID NO: 2561102 - DNA, 25 bp, Homo sapien
agagactcgcacacagacgtgcaat

SEQ ID NO: 2561103 - DNA, 25 bp, Homo sapien
tcatagccacccatacacggagaga

SEQ ID NO: 2561104 - DNA, 25 bp, Homo sapien
agccagaccagcagagagcctttcc

SEQ ID NO: 2561105 - DNA, 25 bp, Homo sapien
cagaccagcagagagcctttcctga

SEQ ID NO: 2561106 - DNA, 25 bp, Homo sapien
gtcagagtcaatggggttaggagga

SEQ ID NO: 2561107 - DNA, 25 bp, Homo sapien
tgggcaggggatggtcagagtcaat

SEQ ID NO: 2561108 - DNA, 25 bp, Homo sapien
tgctgtcgaagtgaccttgcccata

SEQ ID NO: 2561109 - DNA, 25 bp, Homo sapien
caggatgccagatgcggggcctcac

SEQ ID NO: 2561110 - DNA, 25 bp, Homo sapien
gctgtcgaagtgaccttgcccatag

SEQ ID NO: 2561111 - DNA, 25 bp, Homo sapien
gatgatgtctcatcagaagacaaac

SEQ ID NO: 2561112 - DNA, 25 bp, Homo sapien
ctttgctgtccaagacacatatgga

SEQ ID NO: 2561113 - DNA, 25 bp, Homo sapien
catatggagtgccaagacttaaggg

SEQ ID NO: 2561114 - DNA, 25 bp, Homo sapien
taagggaatcagatgatgtctcatc

SEQ ID NO: 2561115 - DNA, 25 bp, Homo sapien
aacagagttcggagctcagctagca

SEQ ID NO: 2561116 - DNA, 25 bp, Homo sapien
cactgtctaacaaagagctgtctgg

SEQ ID NO: 2561117 - DNA, 25 bp, Homo sapien
gacagcagtcagcatgggaagcact

SEQ ID NO: 2561118 - DNA, 25 bp, Homo sapien
tgaagatagcgccaagctgcagggc

SEQ ID NO: 2561119 - DNA, 25 bp, Homo sapien
ctcaggcagtgtcaatggtcgcagc

SEQ ID NO: 2561120 - DNA, 25 bp, Homo sapien
caacaatgcccaggcagcgctgtag

SEQ ID NO: 2561121 - DNA, 25 bp, Homo sapien
gtacagggatgtccgctgccagtgc

SEQ ID NO: 2561122 - DNA, 25 bp, Homo sapien
gaaggagactaagtccatccagcca

SEQ ID NO: 2561123 - DNA, 25 bp, Homo sapien
aggctccacctctgcattgtcagtg

SEQ ID NO: 2561124 - DNA, 25 bp, Homo sapien
tgcattgtcagtgtcactgctttca

SEQ ID NO: 2561125 - DNA, 25 bp, Homo sapien
cacctctgcattgtcagtgtcactg

SEQ ID NO: 2561126 - DNA, 25 bp, Homo sapien
cttccaacaggctccacctctgcat

SEQ ID NO: 2561127 - DNA, 25 bp, Homo sapien
tattcagaagatcgcaaaaccaagg

SEQ ID NO: 2561128 - DNA, 25 bp, Homo sapien
ctttcctgccaagatccaatggtgg

SEQ ID NO: 2561129 - DNA, 25 bp, Homo sapien
tagccagtcagaatataccagtatc

SEQ ID NO: 2561130 - DNA, 25 bp, Homo sapien
tactcttctgcattctggtcaacaa

SEQ ID NO: 2561131 - DNA, 25 bp, Homo sapien
gaaggaagtctcaggtgaaaagccg

SEQ ID NO: 2561132 - DNA, 25 bp, Homo sapien
agtctcaggtgaaaagccggtgctg

SEQ ID NO: 2561133 - DNA, 25 bp, Homo sapien
gaagtctcaggtgaaaagccggtgc

SEQ ID NO: 2561134 - DNA, 25 bp, Homo sapien
aggaagtctcaggtgaaaagccggt

SEQ ID NO: 2561135 - DNA, 25 bp, Homo sapien
gatcttcttcaggtatctctccatc

SEQ ID NO: 2561136 - DNA, 25 bp, Homo sapien
ctgggagccacattgagatagagga

SEQ ID NO: 2561137 - DNA, 25 bp, Homo sapien
gccacattgagatagaggaagtgga

SEQ ID NO: 2561138 - DNA, 25 bp, Homo sapien
cggctgggagccacattgagataga

SEQ ID NO: 2561139 - DNA, 25 bp, Homo sapien
aaataggcgaggatttgagccaggc

SEQ ID NO: 2561140 - DNA, 25 bp, Homo sapien
aattttagaaaactggccgagtgtg

SEQ ID NO: 2561141 - DNA, 25 bp, Homo sapien
tcagtctaaggaacaagatacctgg

SEQ ID NO: 2561142 - DNA, 25 bp, Homo sapien
catagataaactagagccaggaggt

SEQ ID NO: 2561143 - DNA, 25 bp, Homo sapien
tgtttttaaaaagatgtcgaggcca

SEQ ID NO: 2561144 - DNA, 25 bp, Homo sapien
ttaaaaagatgtcgaggccaggcgc

SEQ ID NO: 2561145 - DNA, 25 bp, Homo sapien
tcaacaaagtgaatttaataaagag

SEQ ID NO: 2561146 - DNA, 25 bp, Homo sapien
caaagtgaatttaataaagagaatg

SEQ ID NO: 2561147 - DNA, 25 bp, Homo sapien
tatacttgggtactgaaagacatgc

SEQ ID NO: 2561148 - DNA, 25 bp, Homo sapien
gccctgggaacgtggtcagacttta

SEQ ID NO: 2561149 - DNA, 25 bp, Homo sapien
ggtcttgggttctcttacttcagca

SEQ ID NO: 2561150 - DNA, 25 bp, Homo sapien
taagacactgtccaccgtaagctgc

SEQ ID NO: 2561151 - DNA, 25 bp, Homo sapien
caggtaaaggacttgcgtaagaggc

SEQ ID NO: 2561152 - DNA, 25 bp, Homo sapien
ccttccacaggatgtacatgcaaga

SEQ ID NO: 2561153 - DNA, 25 bp, Homo sapien
gaagatgtagtgctcgggattcacc

SEQ ID NO: 2561154 - DNA, 25 bp, Homo sapien
ggtacccagtgtcatcgtctcgcta

SEQ ID NO: 2561155 - DNA, 25 bp, Homo sapien
gatgcagcccctgtaatctcacatt

SEQ ID NO: 2561156 - DNA, 25 bp, Homo sapien
tgctaatatggagtagcccagctcc

SEQ ID NO: 2561157 - DNA, 25 bp, Homo sapien
agccaagagcagatgattctctagg

SEQ ID NO: 2561158 - DNA, 25 bp, Homo sapien
tctggagtcgatgcagcccctgtaa

SEQ ID NO: 2561159 - DNA, 25 bp, Homo sapien
tagccaggacacagagtgtagctcc

SEQ ID NO: 2561160 - DNA, 25 bp, Homo sapien
ggtagccaggacacagagtgtagct

SEQ ID NO: 2561161 - DNA, 25 bp, Homo sapien
aggacacagagtgtagctcctgcag

SEQ ID NO: 2561162 - DNA, 25 bp, Homo sapien
gccaggacacagagtgtagctcctg

SEQ ID NO: 2561163 - DNA, 25 bp, Homo sapien
tggagcagccgtagagccttatgct

SEQ ID NO: 2561164 - DNA, 25 bp, Homo sapien
gaggtttaggcaacgatggagcagc

SEQ ID NO: 2561165 - DNA, 25 bp, Homo sapien
tcggctagagccgtctgcaggtcca

SEQ ID NO: 2561166 - DNA, 25 bp, Homo sapien
gccttatgcttctcctcggctagag

SEQ ID NO: 2561167 - DNA, 25 bp, Homo sapien
agcaccaatactaggggtgataaca

SEQ ID NO: 2561168 - DNA, 25 bp, Homo sapien
ggtgataacagccaaattatgtgaa

SEQ ID NO: 2561169 - DNA, 25 bp, Homo sapien
tgataacagccaaattatgtgaaaa

SEQ ID NO: 2561170 - DNA, 25 bp, Homo sapien
ccaatactaggggtgataacagcca

SEQ ID NO: 2561171 - DNA, 25 bp, Homo sapien
gcatgtggtatgtgtcctcgtgaac

SEQ ID NO: 2561172 - DNA, 25 bp, Homo sapien
tgcatgtggtatgtgtcctcgtgaa

SEQ ID NO: 2561173 - DNA, 25 bp, Homo sapien
caaccaggcgggcaaactttcccag

SEQ ID NO: 2561174 - DNA, 25 bp, Homo sapien
agaaatgaggctctgacaaatcatg

SEQ ID NO: 2561175 - DNA, 25 bp, Homo sapien
caaatcatgtagtcaaccaggcggg

SEQ ID NO: 2561176 - DNA, 25 bp, Homo sapien
aaggtatatggagccttggcctgtc

SEQ ID NO: 2561177 - DNA, 25 bp, Homo sapien
taggcctccagttagagtctggatc

SEQ ID NO: 2561178 - DNA, 25 bp, Homo sapien
agaggtcttgacagactgtaggcct

SEQ ID NO: 2561179 - DNA, 25 bp, Homo sapien
catgatcatcaaagaccagctgtga

SEQ ID NO: 2561180 - DNA, 25 bp, Homo sapien
cacatgagacagttgaccatgatca

SEQ ID NO: 2561181 - DNA, 25 bp, Homo sapien
tctgattactcagaggataggaact

SEQ ID NO: 2561182 - DNA, 25 bp, Homo sapien
ggattcaaaccaggttgtgagcttc

SEQ ID NO: 2561183 - DNA, 25 bp, Homo sapien
gaggataggaactgggaattcccac

SEQ ID NO: 2561184 - DNA, 25 bp, Homo sapien
ccaggttgtgagcttctgattactc

SEQ ID NO: 2561185 - DNA, 25 bp, Homo sapien
tacagggaatccgaggaggtcttca

SEQ ID NO: 2561186 - DNA, 25 bp, Homo sapien
gaatacagggaatccgaggaggtct

SEQ ID NO: 2561187 - DNA, 25 bp, Homo sapien
gaatccgaggaggtcttcaggtctg

SEQ ID NO: 2561188 - DNA, 25 bp, Homo sapien
cttcagaatacagggaatccgagga

SEQ ID NO: 2561189 - DNA, 25 bp, Homo sapien
cacatatgtgcagtacccaggttag

SEQ ID NO: 2561190 - DNA, 25 bp, Homo sapien
agtgcctgactctatagcctggacc

SEQ ID NO: 2561191 - DNA, 25 bp, Homo sapien
gaaatgcaattatggcactggagaa

SEQ ID NO: 2561192 - DNA, 25 bp, Homo sapien
cataaccacgtgaatttgtgagcaa

SEQ ID NO: 2561193 - DNA, 25 bp, Homo sapien
taaagtcaaggatggagtcggtgtc

SEQ ID NO: 2561194 - DNA, 25 bp, Homo sapien
ttttgcaccatgacacatccccttg

SEQ ID NO: 2561195 - DNA, 25 bp, Homo sapien
gaactaaatcagtctcacggacagg

SEQ ID NO: 2561196 - DNA, 25 bp, Homo sapien
tagttataagggaacagaaagtcca

SEQ ID NO: 2561197 - DNA, 25 bp, Homo sapien
gaaattcgtcttttgagtcctcctc

SEQ ID NO: 2561198 - DNA, 25 bp, Homo sapien
aattcgtcttttgagtcctcctctt

SEQ ID NO: 2561199 - DNA, 25 bp, Homo sapien
ttcgtcttttgagtcctcctcttca

SEQ ID NO: 2561200 - DNA, 25 bp, Homo sapien
aaattcgtcttttgagtcctcctct

SEQ ID NO: 2561201 - DNA, 25 bp, Homo sapien
cacggacctccaagataccagcaat

SEQ ID NO: 2561202 - DNA, 25 bp, Homo sapien
attcagtgcctgctggatcttaggg

SEQ ID NO: 2561203 - DNA, 25 bp, Homo sapien
caattgggtgagacttccagggcca

SEQ ID NO: 2561204 - DNA, 25 bp, Homo sapien
gaagtattggccccgcagccgacat

SEQ ID NO: 2561205 - DNA, 25 bp, Homo sapien
aatgatgttccctgcagaattcctg

SEQ ID NO: 2561206 - DNA, 25 bp, Homo sapien
ttatccaatgatgttccctgcagaa

SEQ ID NO: 2561207 - DNA, 25 bp, Homo sapien
tgcagaattcctgcaccttgcacag

SEQ ID NO: 2561208 - DNA, 25 bp, Homo sapien
gatgttccctgcagaattcctgcac

SEQ ID NO: 2561209 - DNA, 25 bp, Homo sapien
agttcttgatgggaccacctctcat

SEQ ID NO: 2561210 - DNA, 25 bp, Homo sapien
tgatgggaccacctctcatgtcttc

SEQ ID NO: 2561211 - DNA, 25 bp, Homo sapien
tcttgatgggaccacctctcatgtc

SEQ ID NO: 2561212 - DNA, 25 bp, Homo sapien
gttcttgatgggaccacctctcatg

SEQ ID NO: 2561213 - DNA, 25 bp, Homo sapien
tcgataggcatactggagacacggg

SEQ ID NO: 2561214 - DNA, 25 bp, Homo sapien
ccttttgtgagcaactcgataggca

SEQ ID NO: 2561215 - DNA, 25 bp, Homo sapien
aagtagcagcaacccgccttttgtg

SEQ ID NO: 2561216 - DNA, 25 bp, Homo sapien
tacatcatggcagctaagtagcagc

SEQ ID NO: 2561217 - DNA, 25 bp, Homo sapien
cggccttccccagtacaggtggcac

SEQ ID NO: 2561218 - DNA, 25 bp, Homo sapien
cagagcaaggattcagactcaggca

SEQ ID NO: 2561219 - DNA, 25 bp, Homo sapien
ttttggaccagtagcaacaggcaga

SEQ ID NO: 2561220 - DNA, 25 bp, Homo sapien
cagatgggagctcaacagtgacacc

SEQ ID NO: 2561221 - DNA, 25 bp, Homo sapien
taacagtaactaggccattgcaatg

SEQ ID NO: 2561222 - DNA, 25 bp, Homo sapien
gaatgtccttccttatgctgttcag

SEQ ID NO: 2561223 - DNA, 25 bp, Homo sapien
agcactcattttgcacgtgtgcaag

SEQ ID NO: 2561224 - DNA, 25 bp, Homo sapien
cttctgggtgcactgtgcaatggca

SEQ ID NO: 2561225 - DNA, 25 bp, Homo sapien
gaatatctgagttgatggttcggaa

SEQ ID NO: 2561226 - DNA, 25 bp, Homo sapien
gagttcgtggagtgcccgtacgtat

SEQ ID NO: 2561227 - DNA, 25 bp, Homo sapien
gatgtccagtgcttcattctcagca

SEQ ID NO: 2561228 - DNA, 25 bp, Homo sapien
ctcgacgtactgttcattggcttca

SEQ ID NO: 2561229 - DNA, 25 bp, Homo sapien
taaagaggctaaagtggttgcggat

SEQ ID NO: 2561230 - DNA, 25 bp, Homo sapien
gggtgactccccgaattgccttctc

SEQ ID NO: 2561231 - DNA, 25 bp, Homo sapien
gagggatgggtgactccccgaattg

SEQ ID NO: 2561232 - DNA, 25 bp, Homo sapien
ggtgactccccgaattgccttctca

SEQ ID NO: 2561233 - DNA, 25 bp, Homo sapien
ggatgggtgactccccgaattgcct

SEQ ID NO: 2561234 - DNA, 25 bp, Homo sapien
gagctggtgctcagtactcctctga

SEQ ID NO: 2561235 - DNA, 25 bp, Homo sapien
ggcataatggcatgtcgcttgctga

SEQ ID NO: 2561236 - DNA, 25 bp, Homo sapien
caggaactctgaagcctggcttttc

SEQ ID NO: 2561237 - DNA, 25 bp, Homo sapien
tgacgctctagggagacgagctggt

SEQ ID NO: 2561238 - DNA, 25 bp, Homo sapien
gtgcagttcactgaggtcgctgact

SEQ ID NO: 2561239 - DNA, 25 bp, Homo sapien
cagtgaagatggcataggcgtggtg

SEQ ID NO: 2561240 - DNA, 25 bp, Homo sapien
cgtggtgcagttcactgaggtcgct

SEQ ID NO: 2561241 - DNA, 25 bp, Homo sapien
gatggcataggcgtggtgcagttca

SEQ ID NO: 2561242 - DNA, 25 bp, Homo sapien
tcacagagtgataatggagggtgca

SEQ ID NO: 2561243 - DNA, 25 bp, Homo sapien
gttgaagggtctatcacagagtgat

SEQ ID NO: 2561244 - DNA, 25 bp, Homo sapien
ttcagttgaagggtctatcacagag

SEQ ID NO: 2561245 - DNA, 25 bp, Homo sapien
tctatcacagagtgataatggaggg

SEQ ID NO: 2561246 - DNA, 25 bp, Homo sapien
cagaaccctgagttccaactcttac

SEQ ID NO: 2561247 - DNA, 25 bp, Homo sapien
gcttgcttggggtcatacaggacac

SEQ ID NO: 2561248 - DNA, 25 bp, Homo sapien
cacacatgcttttagcccctgaccc

SEQ ID NO: 2561249 - DNA, 25 bp, Homo sapien
ggacacagaaccctgagttccaact

SEQ ID NO: 2561250 - DNA, 25 bp, Homo sapien
gcttacctgcaccactgtatgaaag

SEQ ID NO: 2561251 - DNA, 25 bp, Homo sapien
cctgtgtattagtgaggccctcagt

SEQ ID NO: 2561252 - DNA, 25 bp, Homo sapien
gaacagaagggaaccagcttacctg

SEQ ID NO: 2561253 - DNA, 25 bp, Homo sapien
tctataccacactggctggaggaag

SEQ ID NO: 2561254 - DNA, 25 bp, Homo sapien
attttactgtaagcatgagtcctca

SEQ ID NO: 2561255 - DNA, 25 bp, Homo sapien
tccttccacatttatgccagtcagc

SEQ ID NO: 2561256 - DNA, 25 bp, Homo sapien
gaaactaagacctgagcacaatgtg

SEQ ID NO: 2561257 - DNA, 25 bp, Homo sapien
tccagatttagccagttggtatccc

SEQ ID NO: 2561258 - DNA, 25 bp, Homo sapien
tacctcaagcctagtgtacacagca

SEQ ID NO: 2561259 - DNA, 25 bp, Homo sapien
gacctgtcatgtttacctccggcca

SEQ ID NO: 2561260 - DNA, 25 bp, Homo sapien
gaatgagcgaatgaactgtcagccc

SEQ ID NO: 2561261 - DNA, 25 bp, Homo sapien
gaatcactaggctatcaaagctctg

SEQ ID NO: 2561262 - DNA, 25 bp, Homo sapien
taggacgtgtcccacagattggcaa

SEQ ID NO: 2561263 - DNA, 25 bp, Homo sapien
tgcacaataggacgtgtcccacaga

SEQ ID NO: 2561264 - DNA, 25 bp, Homo sapien
ctgctgcacaataggacgtgtccca

SEQ ID NO: 2561265 - DNA, 25 bp, Homo sapien
aataggacgtgtcccacagattggc

SEQ ID NO: 2561266 - DNA, 25 bp, Homo sapien
gatgttttcggagatgactcggtac

SEQ ID NO: 2561267 - DNA, 25 bp, Homo sapien
gactcggtacaggtgccatatgcgc

SEQ ID NO: 2561268 - DNA, 25 bp, Homo sapien
ttccactcgctgatgttttcggaga

SEQ ID NO: 2561269 - DNA, 25 bp, Homo sapien
tcggagatgactcggtacaggtgcc

SEQ ID NO: 2561270 - DNA, 25 bp, Homo sapien
gagctccaaggaagggtgtcagcac

SEQ ID NO: 2561271 - DNA, 25 bp, Homo sapien
gtagtcctccactcccagtcaagag

SEQ ID NO: 2561272 - DNA, 25 bp, Homo sapien
agtcaagagctccaaggaagggtgt

SEQ ID NO: 2561273 - DNA, 25 bp, Homo sapien
cactcccagtcaagagctccaagga

SEQ ID NO: 2561274 - DNA, 25 bp, Homo sapien
ggttgtgctcatccgtgctgcctct

SEQ ID NO: 2561275 - DNA, 25 bp, Homo sapien
agggttgtgctcatccgtgctgcct

SEQ ID NO: 2561276 - DNA, 25 bp, Homo sapien
tccagggttgtgctcatccgtgctg

SEQ ID NO: 2561277 - DNA, 25 bp, Homo sapien
ttgtgctcatccgtgctgcctctgt

SEQ ID NO: 2561278 - DNA, 25 bp, Homo sapien
ggttgattcgatctgcaaactccag

SEQ ID NO: 2561279 - DNA, 25 bp, Homo sapien
taagtaagcagctggcccagcgtta

SEQ ID NO: 2561280 - DNA, 25 bp, Homo sapien
tggcccagcgttaggagttctatag

SEQ ID NO: 2561281 - DNA, 25 bp, Homo sapien
aaactccagcagtggataagtaagc

SEQ ID NO: 2561282 - DNA, 25 bp, Homo sapien
ggactgggtaactgcttcggggaca

SEQ ID NO: 2561283 - DNA, 25 bp, Homo sapien
tggaacagctgggtctcaggaacca

SEQ ID NO: 2561284 - DNA, 25 bp, Homo sapien
aacagctgggtctcaggaaccagga

SEQ ID NO: 2561285 - DNA, 25 bp, Homo sapien
agctgggtctcaggaaccaggactg

SEQ ID NO: 2561286 - DNA, 25 bp, Homo sapien
gaaggtgccactatctttgtccact

SEQ ID NO: 2561287 - DNA, 25 bp, Homo sapien
gcacctgcctcttggagcgctctga

SEQ ID NO: 2561288 - DNA, 25 bp, Homo sapien
caaccgccgtatagtctcttgggca

SEQ ID NO: 2561289 - DNA, 25 bp, Homo sapien
gctcgtagggtacatgcaggatgaa

SEQ ID NO: 2561290 - DNA, 25 bp, Homo sapien
ccctcagtaaggtgctccattgtgt

SEQ ID NO: 2561291 - DNA, 25 bp, Homo sapien
caaaaagtcagtataaggcctctgc

SEQ ID NO: 2561292 - DNA, 25 bp, Homo sapien
tctcacctggcaagtttggcaaact

SEQ ID NO: 2561293 - DNA, 25 bp, Homo sapien
tatgaggaatttctgagggtaccca

SEQ ID NO: 2561294 - DNA, 25 bp, Homo sapien
actagagcctctagcccgggaagag

SEQ ID NO: 2561295 - DNA, 25 bp, Homo sapien
tgaatggctccaggaccctacgtaa

SEQ ID NO: 2561296 - DNA, 25 bp, Homo sapien
tgtaggactctccaaacatccctgg

SEQ ID NO: 2561297 - DNA, 25 bp, Homo sapien
tccctggtgggaagaaaactcatta

SEQ ID NO: 2561298 - DNA, 25 bp, Homo sapien
acacctgaagactttcctggatgga

SEQ ID NO: 2561299 - DNA, 25 bp, Homo sapien
atggccacccactccaaagctattt

SEQ ID NO: 2561300 - DNA, 25 bp, Homo sapien
gccaagatcttggacaacacctgaa

SEQ ID NO: 2561301 - DNA, 25 bp, Homo sapien
aaatctcctgacttttcgatggcca

SEQ ID NO: 2561302 - DNA, 25 bp, Homo sapien
tctcacccatcagcctggctagagg

SEQ ID NO: 2561303 - DNA, 25 bp, Homo sapien
ggtctcacccatcagcctggctaga

SEQ ID NO: 2561304 - DNA, 25 bp, Homo sapien
aggtctcacccatcagcctggctag

SEQ ID NO: 2561305 - DNA, 25 bp, Homo sapien
gtctcacccatcagcctggctagag

SEQ ID NO: 2561306 - DNA, 25 bp, Homo sapien
caggtcagcattaggaaactggatc

SEQ ID NO: 2561307 - DNA, 25 bp, Homo sapien
gaaaaatccacttctgctggaaagt

SEQ ID NO: 2561308 - DNA, 25 bp, Homo sapien
tcatctcatgcagaactttattcag

SEQ ID NO: 2561309 - DNA, 25 bp, Homo sapien
cttctgctggaaagtcagccacacc

SEQ ID NO: 2561310 - DNA, 25 bp, Homo sapien
gagaggataaaagtgagggccaata

SEQ ID NO: 2561311 - DNA, 25 bp, Homo sapien
tattcaggaacccttcttgccctct

SEQ ID NO: 2561312 - DNA, 25 bp, Homo sapien
aaagtgagggccaatatgaagtggc

SEQ ID NO: 2561313 - DNA, 25 bp, Homo sapien
cacgctgagccctgctattcaggaa

SEQ ID NO: 2561314 - DNA, 25 bp, Homo sapien
gggttcgatactggtcatccatgac

SEQ ID NO: 2561315 - DNA, 25 bp, Homo sapien
catccatgaccttgaaacgagagtt

SEQ ID NO: 2561316 - DNA, 25 bp, Homo sapien
caagtgacagaaccatggggtcagc

SEQ ID NO: 2561317 - DNA, 25 bp, Homo sapien
gggtcagctacagagatgcgcatca

SEQ ID NO: 2561318 - DNA, 25 bp, Homo sapien
ggaaagcagcgtcgtacccatagct

SEQ ID NO: 2561319 - DNA, 25 bp, Homo sapien
agcacgctctccagactcatgatga

SEQ ID NO: 2561320 - DNA, 25 bp, Homo sapien
catagctgggcttcgcatgattcca

SEQ ID NO: 2561321 - DNA, 25 bp, Homo sapien
aagtgagcacacaccccatagagca

SEQ ID NO: 2561322 - DNA, 25 bp, Homo sapien
tgtgtttgggcttgactcccagtca

SEQ ID NO: 2561323 - DNA, 25 bp, Homo sapien
tgtttgggcttgactcccagtcatc

SEQ ID NO: 2561324 - DNA, 25 bp, Homo sapien
ttgggcttgactcccagtcatctgt

SEQ ID NO: 2561325 - DNA, 25 bp, Homo sapien
tgtgtgtttgggcttgactcccagt

SEQ ID NO: 2561326 - DNA, 25 bp, Homo sapien
ctggatgcagaggaaggggaccctg

SEQ ID NO: 2561327 - DNA, 25 bp, Homo sapien
ggggaccctgcagcttcacctcctc

SEQ ID NO: 2561328 - DNA, 25 bp, Homo sapien
gaggaaggggaccctgcagcttcac

SEQ ID NO: 2561329 - DNA, 25 bp, Homo sapien
gaaggggaccctgcagcttcacctc

SEQ ID NO: 2561330 - DNA, 25 bp, Homo sapien
tgtaagtcataggttctgccagcac

SEQ ID NO: 2561331 - DNA, 25 bp, Homo sapien
gcagctgtgctatatcccggtgagt

SEQ ID NO: 2561332 - DNA, 25 bp, Homo sapien
tcacctagagatgggcctcgagcaa

SEQ ID NO: 2561333 - DNA, 25 bp, Homo sapien
tacaagtggtgcagttcacccaggc

SEQ ID NO: 2561334 - DNA, 25 bp, Homo sapien
catgttgttacactgaccggctgca

SEQ ID NO: 2561335 - DNA, 25 bp, Homo sapien
cacgaagtaccttgggaaagatgcc

SEQ ID NO: 2561336 - DNA, 25 bp, Homo sapien
tctgcctcttttggcccatgttgtt

SEQ ID NO: 2561337 - DNA, 25 bp, Homo sapien
ctggatcccgattgattcctctgtc

SEQ ID NO: 2561338 - DNA, 25 bp, Homo sapien
tcataaggaagggatgccatcaggg

SEQ ID NO: 2561339 - DNA, 25 bp, Homo sapien
caagatgcgtgccatgctggtaact

SEQ ID NO: 2561340 - DNA, 25 bp, Homo sapien
tggttgagctcagcgactgtccggt

SEQ ID NO: 2561341 - DNA, 25 bp, Homo sapien
tgctgcaggcggtactcataaggaa

SEQ ID NO: 2561342 - DNA, 25 bp, Homo sapien
gcccagatccaccaaagaacacacg

SEQ ID NO: 2561343 - DNA, 25 bp, Homo sapien
agctacccttaaggccccatctctc

SEQ ID NO: 2561344 - DNA, 25 bp, Homo sapien
cgagaggagccccagtagaaaaagg

SEQ ID NO: 2561345 - DNA, 25 bp, Homo sapien
tattacttttcactcctggcccaga

SEQ ID NO: 2561346 - DNA, 25 bp, Homo sapien
tgaagacctgaagctttgggccaca

SEQ ID NO: 2561347 - DNA, 25 bp, Homo sapien
caaagccccagatcaaggcaaaaag

SEQ ID NO: 2561348 - DNA, 25 bp, Homo sapien
gcacatcgtcactgtcaacctggga

SEQ ID NO: 2561349 - DNA, 25 bp, Homo sapien
gtgttccctgcacttatctggcaca

SEQ ID NO: 2561350 - DNA, 25 bp, Homo sapien
ttttacttccatgggccagtccatc

SEQ ID NO: 2561351 - DNA, 25 bp, Homo sapien
cttccatttatgacacactcacaca

SEQ ID NO: 2561352 - DNA, 25 bp, Homo sapien
gcgtcagacagttacaacacttcca

SEQ ID NO: 2561353 - DNA, 25 bp, Homo sapien
cacttccatttatgacacactcaca

SEQ ID NO: 2561354 - DNA, 25 bp, Homo sapien
acacaggcaaaagcgtcagacagtt

SEQ ID NO: 2561355 - DNA, 25 bp, Homo sapien
tagaatcccttatgaaggtatcaaa

SEQ ID NO: 2561356 - DNA, 25 bp, Homo sapien
aatagaatcccttatgaaggtatca

SEQ ID NO: 2561357 - DNA, 25 bp, Homo sapien
gaatcccttatgaaggtatcaaaga

SEQ ID NO: 2561358 - DNA, 25 bp, Homo sapien
ctaatagaatcccttatgaaggtat

SEQ ID NO: 2561359 - DNA, 25 bp, Homo sapien
ctgagggtggtggctcagggtagtt

SEQ ID NO: 2561360 - DNA, 25 bp, Homo sapien
agggtggtggctcagggtagttgga

SEQ ID NO: 2561361 - DNA, 25 bp, Homo sapien
tgagggtggtggctcagggtagttg

SEQ ID NO: 2561362 - DNA, 25 bp, Homo sapien
ggtggtggctcagggtagttggaga

SEQ ID NO: 2561363 - DNA, 25 bp, Homo sapien
tcttcagggcttacatgtagatcaa

SEQ ID NO: 2561364 - DNA, 25 bp, Homo sapien
gatagaagggtgaaaggtgcccaaa

SEQ ID NO: 2561365 - DNA, 25 bp, Homo sapien
tgaaaggtgcccaaagttcctttga

SEQ ID NO: 2561366 - DNA, 25 bp, Homo sapien
gatgtggctgctcaggtattggcca

SEQ ID NO: 2561367 - DNA, 25 bp, Homo sapien
ctccacaaaggctgacttccctgtt

SEQ ID NO: 2561368 - DNA, 25 bp, Homo sapien
gggctgtatatgtaagggtgatgtg

SEQ ID NO: 2561369 - DNA, 25 bp, Homo sapien
gaagcaggtccaccacatacaagag

SEQ ID NO: 2561370 - DNA, 25 bp, Homo sapien
gctggcttgtgtttggccctggatt

SEQ ID NO: 2561371 - DNA, 25 bp, Homo sapien
tagtctcaagagatgacagtagctc

SEQ ID NO: 2561372 - DNA, 25 bp, Homo sapien
gatggatatctaaccgagcctatgg

SEQ ID NO: 2561373 - DNA, 25 bp, Homo sapien
tgaaactaagaggacagacaggagc

SEQ ID NO: 2561374 - DNA, 25 bp, Homo sapien
gaaagggacagataggcaagcatac

SEQ ID NO: 2561375 - DNA, 25 bp, Homo sapien
cagaataagactgtcaacttaccaa

SEQ ID NO: 2561376 - DNA, 25 bp, Homo sapien
taagatttagcttggcattgcattg

SEQ ID NO: 2561377 - DNA, 25 bp, Homo sapien
tatttacatttcctctatctcagca

SEQ ID NO: 2561378 - DNA, 25 bp, Homo sapien
tgaagaccttaatgatactgactct

SEQ ID NO: 2561379 - DNA, 25 bp, Homo sapien
tttaaagccaatcaatccctctgcc

SEQ ID NO: 2561380 - DNA, 25 bp, Homo sapien
cggatttccatcactataggttagc

SEQ ID NO: 2561381 - DNA, 25 bp, Homo sapien
taaactggtgttctagtaccagagc

SEQ ID NO: 2561382 - DNA, 25 bp, Homo sapien
tgtgtcatcaccaccccaatgatat

SEQ ID NO: 2561383 - DNA, 25 bp, Homo sapien
tccacagaagggaaacgctcaagcc

SEQ ID NO: 2561384 - DNA, 25 bp, Homo sapien
tcataacggtcagacaagtgcctcg

SEQ ID NO: 2561385 - DNA, 25 bp, Homo sapien
tgggtcatgctttccagggccagga

SEQ ID NO: 2561386 - DNA, 25 bp, Homo sapien
ggatagtccacaaaacctcgggagc

SEQ ID NO: 2561387 - DNA, 25 bp, Homo sapien
gaagacactttgagctactactagg

SEQ ID NO: 2561388 - DNA, 25 bp, Homo sapien
tggcacagtaggagcgttccctggg

SEQ ID NO: 2561389 - DNA, 25 bp, Homo sapien
tgtgcctcatgcaaccaaagacgca

SEQ ID NO: 2561390 - DNA, 25 bp, Homo sapien
tgtccagccggtcgcaaaaggttct

SEQ ID NO: 2561391 - DNA, 25 bp, Homo sapien
ttgcccaggtgctggggccctggcc

SEQ ID NO: 2561392 - DNA, 25 bp, Homo sapien
tctcctgatggtccttgcccaggtg

SEQ ID NO: 2561393 - DNA, 25 bp, Homo sapien
ctcctgatggtccttgcccaggtgc

SEQ ID NO: 2561394 - DNA, 25 bp, Homo sapien
cccaggtgctggggccctggcccac

SEQ ID NO: 2561395 - DNA, 25 bp, Homo sapien
tcagattctacttcgggcaccctct

SEQ ID NO: 2561396 - DNA, 25 bp, Homo sapien
aactccccttcagattctacttcgg

SEQ ID NO: 2561397 - DNA, 25 bp, Homo sapien
tgggccaactccccttcagattcta

SEQ ID NO: 2561398 - DNA, 25 bp, Homo sapien
tccccttcagattctacttcgggca

SEQ ID NO: 2561399 - DNA, 25 bp, Homo sapien
tgaaggccataaggttcctcttcct

SEQ ID NO: 2561400 - DNA, 25 bp, Homo sapien
gaaggccataaggttcctcttcctc

SEQ ID NO: 2561401 - DNA, 25 bp, Homo sapien
ctgaaggccataaggttcctcttcc

SEQ ID NO: 2561402 - DNA, 25 bp, Homo sapien
ctatggatggtgttagacttggatc

SEQ ID NO: 2561403 - DNA, 25 bp, Homo sapien
gtcttgaatgatctccttacctgga

SEQ ID NO: 2561404 - DNA, 25 bp, Homo sapien
ccctgcttactggtcctatggatgg

SEQ ID NO: 2561405 - DNA, 25 bp, Homo sapien
tacctggagcctatagttggatgcc

SEQ ID NO: 2561406 - DNA, 25 bp, Homo sapien
gtaacaacaagggtgagatcaggtc

SEQ ID NO: 2561407 - DNA, 25 bp, Homo sapien
ctggtaacaacaagggtgagatcag

SEQ ID NO: 2561408 - DNA, 25 bp, Homo sapien
taacaacaagggtgagatcaggtcc

SEQ ID NO: 2561409 - DNA, 25 bp, Homo sapien
acaacaagggtgagatcaggtccat

SEQ ID NO: 2561410 - DNA, 25 bp, Homo sapien
actgggtaccaacagagccactggc

SEQ ID NO: 2561411 - DNA, 25 bp, Homo sapien
ggtctcagagttaggccccagtatc

SEQ ID NO: 2561412 - DNA, 25 bp, Homo sapien
gaaatgggcctgacaaatgctagaa

SEQ ID NO: 2561413 - DNA, 25 bp, Homo sapien
tgtttgacaccaaggttctccctgg

SEQ ID NO: 2561414 - DNA, 25 bp, Homo sapien
agagcagagcagattcgcatatggg

SEQ ID NO: 2561415 - DNA, 25 bp, Homo sapien
ccaagacagcgtaagagcagagcag

SEQ ID NO: 2561416 - DNA, 25 bp, Homo sapien
gccttttggccaagacagcgtaaga

SEQ ID NO: 2561417 - DNA, 25 bp, Homo sapien
ttacctttgcttgcccctcctggcc

SEQ ID NO: 2561418 - DNA, 25 bp, Homo sapien
agcttggtcccagggttcatagcgg

SEQ ID NO: 2561419 - DNA, 25 bp, Homo sapien
gcagtggccagttgaaggagcctca

SEQ ID NO: 2561420 - DNA, 25 bp, Homo sapien
ccagttgaaggagcctcaggaaaag

SEQ ID NO: 2561421 - DNA, 25 bp, Homo sapien
tagcggtcaatgctggcagtggcca

SEQ ID NO: 2561422 - DNA, 25 bp, Homo sapien
gccacactgggaattgaggcctgga

SEQ ID NO: 2561423 - DNA, 25 bp, Homo sapien
tggccacactgggaattgaggcctg

SEQ ID NO: 2561424 - DNA, 25 bp, Homo sapien
tttggccacactgggaattgaggcc

SEQ ID NO: 2561425 - DNA, 25 bp, Homo sapien
ccacactgggaattgaggcctggag

SEQ ID NO: 2561426 - DNA, 25 bp, Homo sapien
tccaggaagtctaggaaggtcttgg

SEQ ID NO: 2561427 - DNA, 25 bp, Homo sapien
agtggcaatgcagggcacaggtgct

SEQ ID NO: 2561428 - DNA, 25 bp, Homo sapien
caggtgctcatggtagtgggtggcc

SEQ ID NO: 2561429 - DNA, 25 bp, Homo sapien
caggattgtctgttgctgcagcatc

SEQ ID NO: 2561430 - DNA, 25 bp, Homo sapien
ggtaccgtgctccttaatcagcatt

SEQ ID NO: 2561431 - DNA, 25 bp, Homo sapien
tctcagattctccaaggcattctgg

SEQ ID NO: 2561432 - DNA, 25 bp, Homo sapien
cagattctccaaggcattctggacc

SEQ ID NO: 2561433 - DNA, 25 bp, Homo sapien
caaagatcagattggcatgggtacc

SEQ ID NO: 2561434 - DNA, 25 bp, Homo sapien
tacttctggttctatgccataatac

SEQ ID NO: 2561435 - DNA, 25 bp, Homo sapien
gtgactgagatgtaatgcctgcccc

SEQ ID NO: 2561436 - DNA, 25 bp, Homo sapien
tcctcactgtatacaacagttttgt

SEQ ID NO: 2561437 - DNA, 25 bp, Homo sapien
acccatctacatgtcctcactgtat

SEQ ID NO: 2561438 - DNA, 25 bp, Homo sapien
tgtataggagcttgctttgctctag

SEQ ID NO: 2561439 - DNA, 25 bp, Homo sapien
taggagcttgctttgctctagctgc

SEQ ID NO: 2561440 - DNA, 25 bp, Homo sapien
gcttgtataggagcttgctttgctc

SEQ ID NO: 2561441 - DNA, 25 bp, Homo sapien
tataggagcttgctttgctctagct

SEQ ID NO: 2561442 - DNA, 25 bp, Homo sapien
caggaaagcctctcgctgagcttgc

SEQ ID NO: 2561443 - DNA, 25 bp, Homo sapien
gcttgcagggcatcccgttgcctgg

SEQ ID NO: 2561444 - DNA, 25 bp, Homo sapien
ggaaagcctctcgctgagcttgcag

SEQ ID NO: 2561445 - DNA, 25 bp, Homo sapien
ccaggttctcaatgaggttctcttg

SEQ ID NO: 2561446 - DNA, 25 bp, Homo sapien
cagttacccggaccacagattctgg

SEQ ID NO: 2561447 - DNA, 25 bp, Homo sapien
tctggtggtgctcgatagctccgta

SEQ ID NO: 2561448 - DNA, 25 bp, Homo sapien
tgtttcatggtggaacaagtcacac

SEQ ID NO: 2561449 - DNA, 25 bp, Homo sapien
tagctccgtatctcctcaaagtcag

SEQ ID NO: 2561450 - DNA, 25 bp, Homo sapien
gagctgtgtagtccaggcacgcata

SEQ ID NO: 2561451 - DNA, 25 bp, Homo sapien
aatgcgccagcccatagtgcagaac

SEQ ID NO: 2561452 - DNA, 25 bp, Homo sapien
agggctgcatcgtccatacctggag

SEQ ID NO: 2561453 - DNA, 25 bp, Homo sapien
tgctcccgagtgagtgttgcctcca

SEQ ID NO: 2561454 - DNA, 25 bp, Homo sapien
gaggccaacggcaactactgtagtg

SEQ ID NO: 2561455 - DNA, 25 bp, Homo sapien
cagctgaacataggagggtatctcc

SEQ ID NO: 2561456 - DNA, 25 bp, Homo sapien
taaccactcgtccagtagctcttgg

SEQ ID NO: 2561457 - DNA, 25 bp, Homo sapien
tcagtgagggctggcgcaaaagatc

SEQ ID NO: 2561458 - DNA, 25 bp, Homo sapien
ggaagctgagtctcataggctggct

SEQ ID NO: 2561459 - DNA, 25 bp, Homo sapien
ctggctttgacccctggctctctgt

SEQ ID NO: 2561460 - DNA, 25 bp, Homo sapien
tttcatgtccgttttactctctctc

SEQ ID NO: 2561461 - DNA, 25 bp, Homo sapien
agaacactaaggtagggaagggatg

SEQ ID NO: 2561462 - DNA, 25 bp, Homo sapien
gctgagaacccagctctgggtcagc

SEQ ID NO: 2561463 - DNA, 25 bp, Homo sapien
tggagctgagaacccagctctgggt

SEQ ID NO: 2561464 - DNA, 25 bp, Homo sapien
cctggagctgagaacccagctctgg

SEQ ID NO: 2561465 - DNA, 25 bp, Homo sapien
ctcctggagctgagaacccagctct

SEQ ID NO: 2561466 - DNA, 25 bp, Homo sapien
atgggaactgaagttagactgaggt

SEQ ID NO: 2561467 - DNA, 25 bp, Homo sapien
tgtggggtcacagaatggggcaagt

SEQ ID NO: 2561468 - DNA, 25 bp, Homo sapien
tgggaactgaagttagactgaggtg

SEQ ID NO: 2561469 - DNA, 25 bp, Homo sapien
tggggtcacagaatggggcaagtca

SEQ ID NO: 2561470 - DNA, 25 bp, Homo sapien
gataggagggttcccacaagacgct

SEQ ID NO: 2561471 - DNA, 25 bp, Homo sapien
cctgtggctgataggagggttccca

SEQ ID NO: 2561472 - DNA, 25 bp, Homo sapien
gctgataggagggttcccacaagac

SEQ ID NO: 2561473 - DNA, 25 bp, Homo sapien
tggctgataggagggttcccacaag

SEQ ID NO: 2561474 - DNA, 25 bp, Homo sapien
ggaggcaaaggcaccctacccacaa

SEQ ID NO: 2561475 - DNA, 25 bp, Homo sapien
attccccaggcacgaggtctggctc

SEQ ID NO: 2561476 - DNA, 25 bp, Homo sapien
gaggcaaaggcaccctacccacaat

SEQ ID NO: 2561477 - DNA, 25 bp, Homo sapien
cccattccccaggcacgaggtctgg

SEQ ID NO: 2561478 - DNA, 25 bp, Homo sapien
gcagttcttcgcaccctagacccag

SEQ ID NO: 2561479 - DNA, 25 bp, Homo sapien
attgcagttcttcgcaccctagacc

SEQ ID NO: 2561480 - DNA, 25 bp, Homo sapien
ccattgcagttcttcgcaccctaga

SEQ ID NO: 2561481 - DNA, 25 bp, Homo sapien
gttcttcgcaccctagacccagctc

SEQ ID NO: 2561482 - DNA, 25 bp, Homo sapien
agagtagacagggagtatggctccc

SEQ ID NO: 2561483 - DNA, 25 bp, Homo sapien
gtccacacaactgtgctggcaattt

SEQ ID NO: 2561484 - DNA, 25 bp, Homo sapien
gatgcttaacctcttccccttggca

SEQ ID NO: 2561485 - DNA, 25 bp, Homo sapien
tccctgctatagacctgtgcctgct

SEQ ID NO: 2561486 - DNA, 25 bp, Homo sapien
tccacagccttgcaggtatctaggg

SEQ ID NO: 2561487 - DNA, 25 bp, Homo sapien
gccagcgggtctcgagttcaggata

SEQ ID NO: 2561488 - DNA, 25 bp, Homo sapien
tgatctttaggtcctgccagcgggt

SEQ ID NO: 2561489 - DNA, 25 bp, Homo sapien
tgttcaggcccagatccaacacatt

SEQ ID NO: 2561490 - DNA, 25 bp, Homo sapien
tacactcatttgttggatggatctg

SEQ ID NO: 2561491 - DNA, 25 bp, Homo sapien
catacactcatttgttggatggatc

SEQ ID NO: 2561492 - DNA, 25 bp, Homo sapien
ctgcatacactcatttgttggatgg

SEQ ID NO: 2561493 - DNA, 25 bp, Homo sapien
actcatttgttggatggatctggcc

SEQ ID NO: 2561494 - DNA, 25 bp, Homo sapien
aacagcagcatcgtcagcagccgct

SEQ ID NO: 2561495 - DNA, 25 bp, Homo sapien
ctggaacagcagcatcgtcagcagc

SEQ ID NO: 2561496 - DNA, 25 bp, Homo sapien
ggaacagcagcatcgtcagcagccg

SEQ ID NO: 2561497 - DNA, 25 bp, Homo sapien
acagcagcatcgtcagcagccgctc

SEQ ID NO: 2561498 - DNA, 25 bp, Homo sapien
tccagagcctgcttagtgactgcca

SEQ ID NO: 2561499 - DNA, 25 bp, Homo sapien
gggccctcactatgttccgcagaaa

SEQ ID NO: 2561500 - DNA, 25 bp, Homo sapien
tctcaattgcagtagatggctggcc

SEQ ID NO: 2561501 - DNA, 25 bp, Homo sapien
aaaccacaggtcgatagggtgccca

SEQ ID NO: 2561502 - DNA, 25 bp, Homo sapien
agaggctgctagtccaggccagagt

SEQ ID NO: 2561503 - DNA, 25 bp, Homo sapien
gagaggctgctagtccaggccagag

SEQ ID NO: 2561504 - DNA, 25 bp, Homo sapien
ttttggcccaagccaggccggtcga

SEQ ID NO: 2561505 - DNA, 25 bp, Homo sapien
gtcgagccacatctgagactggctt

SEQ ID NO: 2561506 - DNA, 25 bp, Homo sapien
tgggggcagcagctctaacatctca

SEQ ID NO: 2561507 - DNA, 25 bp, Homo sapien
aacaaatgggggcagcagctctaac

SEQ ID NO: 2561508 - DNA, 25 bp, Homo sapien
gggaggcacacaggccaacaaatgg

SEQ ID NO: 2561509 - DNA, 25 bp, Homo sapien
cacacaggccaacaaatgggggcag

SEQ ID NO: 2561510 - DNA, 25 bp, Homo sapien
gtggatgacagtgacaggtaagcct

SEQ ID NO: 2561511 - DNA, 25 bp, Homo sapien
tgacagtgacaggtaagcctgccaa

SEQ ID NO: 2561512 - DNA, 25 bp, Homo sapien
ggatgacagtgacaggtaagcctgc

SEQ ID NO: 2561513 - DNA, 25 bp, Homo sapien
agtgacaggtaagcctgccaagcac

SEQ ID NO: 2561514 - DNA, 25 bp, Homo sapien
catggtgggagcatacgtgttttca

SEQ ID NO: 2561515 - DNA, 25 bp, Homo sapien
agaacgcgccacaggatcagcttct

SEQ ID NO: 2561516 - DNA, 25 bp, Homo sapien
gagtagcctgactatgtttaaaggg

SEQ ID NO: 2561517 - DNA, 25 bp, Homo sapien
caggcggtggcaacaagatcagcat

SEQ ID NO: 2561518 - DNA, 25 bp, Homo sapien
cagtgcccctcatacatagcctggg

SEQ ID NO: 2561519 - DNA, 25 bp, Homo sapien
ccttggctctgcctaacagttccag

SEQ ID NO: 2561520 - DNA, 25 bp, Homo sapien
tgtagcagctctttcggccaatggg

SEQ ID NO: 2561521 - DNA, 25 bp, Homo sapien
gagtgctgaccacaactgagactgg

SEQ ID NO: 2561522 - DNA, 25 bp, Homo sapien
atctctgtgaacagtgcttacattc

SEQ ID NO: 2561523 - DNA, 25 bp, Homo sapien
caggttggtctaaaagctgttctga

SEQ ID NO: 2561524 - DNA, 25 bp, Homo sapien
gactctgcaggcacaataagccaaa

SEQ ID NO: 2561525 - DNA, 25 bp, Homo sapien
taagccaaagacgaaaatctctgtg

SEQ ID NO: 2561526 - DNA, 25 bp, Homo sapien
gggactggttccagaaaacaggcat

SEQ ID NO: 2561527 - DNA, 25 bp, Homo sapien
agctccagggactggttccagaaaa

SEQ ID NO: 2561528 - DNA, 25 bp, Homo sapien
ccagggactggttccagaaaacagg

SEQ ID NO: 2561529 - DNA, 25 bp, Homo sapien
tgtcaatcaaaacatggcccagctc

SEQ ID NO: 2561530 - DNA, 25 bp, Homo sapien
gttgcatgtagagtacttgctgggc

SEQ ID NO: 2561531 - DNA, 25 bp, Homo sapien
agagtacttgctgggctagctccac

SEQ ID NO: 2561532 - DNA, 25 bp, Homo sapien
ttccatagagctgccggtgtagcag

SEQ ID NO: 2561533 - DNA, 25 bp, Homo sapien
gttccatagagctgccggtgtagca

SEQ ID NO: 2561534 - DNA, 25 bp, Homo sapien
tcttgcatggcagcacggggattgc

SEQ ID NO: 2561535 - DNA, 25 bp, Homo sapien
agaacctgggttagagtcacttgac

SEQ ID NO: 2561536 - DNA, 25 bp, Homo sapien
tctgaagaacctgggttagagtcac

SEQ ID NO: 2561537 - DNA, 25 bp, Homo sapien
attgctaagacttgcccacagctgg

SEQ ID NO: 2561538 - DNA, 25 bp, Homo sapien
tcagtttccaccaccgccaaaacca

SEQ ID NO: 2561539 - DNA, 25 bp, Homo sapien
agctgtgaattgtatcccaccccca

SEQ ID NO: 2561540 - DNA, 25 bp, Homo sapien
caaaaccaaagctgtgaattgtatc

SEQ ID NO: 2561541 - DNA, 25 bp, Homo sapien
tccaccaccgccaaaaccaaagctg

SEQ ID NO: 2561542 - DNA, 25 bp, Homo sapien
atgaggttagagtctctcagttcca

SEQ ID NO: 2561543 - DNA, 25 bp, Homo sapien
gcttgtgtgaggctaatcagggcct

SEQ ID NO: 2561544 - DNA, 25 bp, Homo sapien
cagctcccactactggggctcaggc

SEQ ID NO: 2561545 - DNA, 25 bp, Homo sapien
gcaggcttgtgtgaggctaatcagg

SEQ ID NO: 2561546 - DNA, 25 bp, Homo sapien
tgtgaggctaatcagggcctccctg

SEQ ID NO: 2561547 - DNA, 25 bp, Homo sapien
gagggacaagatggactctccccac

SEQ ID NO: 2561548 - DNA, 25 bp, Homo sapien
ttcctctgagcctttactgccatca

SEQ ID NO: 2561549 - DNA, 25 bp, Homo sapien
gactcgagagagtaggccttcctct

SEQ ID NO: 2561550 - DNA, 25 bp, Homo sapien
taccccaaaacagatacctgagtga

SEQ ID NO: 2561551 - DNA, 25 bp, Homo sapien
catctgggccttgcactctgccatt

SEQ ID NO: 2561552 - DNA, 25 bp, Homo sapien
gagggcagtaggtgcatctgggcct

SEQ ID NO: 2561553 - DNA, 25 bp, Homo sapien
tctgggccttgcactctgccattgc

SEQ ID NO: 2561554 - DNA, 25 bp, Homo sapien
gggccttgcactctgccattgcatc

SEQ ID NO: 2561555 - DNA, 25 bp, Homo sapien
cagcctccggttgacttgcactagg

SEQ ID NO: 2561556 - DNA, 25 bp, Homo sapien
tcaagagagcgcgactctggcgtcg

SEQ ID NO: 2561557 - DNA, 25 bp, Homo sapien
tgggcgcctcttcgagactcaggaa

SEQ ID NO: 2561558 - DNA, 25 bp, Homo sapien
gaatcacgtgggtcagcagatcctg

SEQ ID NO: 2561559 - DNA, 25 bp, Homo sapien
tccagaggccgccgtgcatttggcc

SEQ ID NO: 2561560 - DNA, 25 bp, Homo sapien
cagttctagagcctcggtctctaag

SEQ ID NO: 2561561 - DNA, 25 bp, Homo sapien
agaggccgccgtgcatttggcccca

SEQ ID NO: 2561562 - DNA, 25 bp, Homo sapien
cggtctctaagacgccctccagagg

SEQ ID NO: 2561563 - DNA, 25 bp, Homo sapien
tgctgcaacaggcaatcaaggtcgc

SEQ ID NO: 2561564 - DNA, 25 bp, Homo sapien
tggaagacgcgctctggtacatcac

SEQ ID NO: 2561565 - DNA, 25 bp, Homo sapien
tcaaggtcgcgttgtagcgtgccca

SEQ ID NO: 2561566 - DNA, 25 bp, Homo sapien
cagggaaattcgagctgggcacatt

SEQ ID NO: 2561567 - DNA, 25 bp, Homo sapien
catctccagacgtttatactggagc

SEQ ID NO: 2561568 - DNA, 25 bp, Homo sapien
tctccagacgtttatactggagctg

SEQ ID NO: 2561569 - DNA, 25 bp, Homo sapien
gagctgactggagaccgagcctcgg

SEQ ID NO: 2561570 - DNA, 25 bp, Homo sapien
tgactggagaccgagcctcggctac

SEQ ID NO: 2561571 - DNA, 25 bp, Homo sapien
cgaggtgtaattagagacttcgagg

SEQ ID NO: 2561572 - DNA, 25 bp, Homo sapien
ggtaactgcgaggtgtaattagaga

SEQ ID NO: 2561573 - DNA, 25 bp, Homo sapien
gatcaccaagaaggggtaactgcga

SEQ ID NO: 2561574 - DNA, 25 bp, Homo sapien
tagagacttcgaggggactggaacc

SEQ ID NO: 2561575 - DNA, 25 bp, Homo sapien
gctggtcaggcaaggctaggaagct

SEQ ID NO: 2561576 - DNA, 25 bp, Homo sapien
ttagcgggtaggaggtcgtggtgaa

SEQ ID NO: 2561577 - DNA, 25 bp, Homo sapien
cgtggtgaagcgagatcggagaagc

SEQ ID NO: 2561578 - DNA, 25 bp, Homo sapien
agatcggagaagctagcagggttac

SEQ ID NO: 2561579 - DNA, 25 bp, Homo sapien
cagctattgggtcccactccgcatg

SEQ ID NO: 2561580 - DNA, 25 bp, Homo sapien
cctctctctggaaccgtgggatttg

SEQ ID NO: 2561581 - DNA, 25 bp, Homo sapien
gtaggacctgtagcccgatcagcag

SEQ ID NO: 2561582 - DNA, 25 bp, Homo sapien
gaaccgtgggatttggaccattctc

SEQ ID NO: 2561583 - DNA, 25 bp, Homo sapien
cacgagtacacagtcaggtcggctg

SEQ ID NO: 2561584 - DNA, 25 bp, Homo sapien
ctctgcagcttagcggtgccaaggg

SEQ ID NO: 2561585 - DNA, 25 bp, Homo sapien
ggtaaaggcagatgcatcacgatgt

SEQ ID NO: 2561586 - DNA, 25 bp, Homo sapien
tggaccctcctttggacacaggtgt

SEQ ID NO: 2561587 - DNA, 25 bp, Homo sapien
gaatcactacaactttattttggta

SEQ ID NO: 2561588 - DNA, 25 bp, Homo sapien
aatcactacaactttattttggtag

SEQ ID NO: 2561589 - DNA, 25 bp, Homo sapien
cactacaactttattttggtagacg

SEQ ID NO: 2561590 - DNA, 25 bp, Homo sapien
tcactacaactttattttggtagac

SEQ ID NO: 2561591 - DNA, 25 bp, Homo sapien
tatcacttaatatctgtcctccagt

SEQ ID NO: 2561592 - DNA, 25 bp, Homo sapien
gtagataccttttctatatactgat

SEQ ID NO: 2561593 - DNA, 25 bp, Homo sapien
gttctccacaatgcttgtattaatt

SEQ ID NO: 2561594 - DNA, 25 bp, Homo sapien
caataaacaggggagtgtagatacc

SEQ ID NO: 2561595 - DNA, 25 bp, Homo sapien
gcttggctcactctactggcctggg

SEQ ID NO: 2561596 - DNA, 25 bp, Homo sapien
tgtggccggtagcttctttgcccaa

SEQ ID NO: 2561597 - DNA, 25 bp, Homo sapien
cactttcggttgctgagaatgtcta

SEQ ID NO: 2561598 - DNA, 25 bp, Homo sapien
aatgagcgagaccatatgttacggg

SEQ ID NO: 2561599 - DNA, 25 bp, Homo sapien
aagctagggttctgagtacaagatc

SEQ ID NO: 2561600 - DNA, 25 bp, Homo sapien
catcagctgcaggagtattccatag

SEQ ID NO: 2561601 - DNA, 25 bp, Homo sapien
cagctttgaaaacctgcagcattcc

SEQ ID NO: 2561602 - DNA, 25 bp, Homo sapien
gcagcattcccattgaagccaagaa

SEQ ID NO: 2561603 - DNA, 25 bp, Homo sapien
gacttaattacaagtattagaagac

SEQ ID NO: 2561604 - DNA, 25 bp, Homo sapien
ttagaagactgaaagagtagaaaga

SEQ ID NO: 2561605 - DNA, 25 bp, Homo sapien
taattacaagtattagaagactgaa

SEQ ID NO: 2561606 - DNA, 25 bp, Homo sapien
tattagaagactgaaagagtagaaa

SEQ ID NO: 2561607 - DNA, 25 bp, Homo sapien
tgatgtttcaatactagaccaaggc

SEQ ID NO: 2561608 - DNA, 25 bp, Homo sapien
gaagaagtctgaatacctgagttac

SEQ ID NO: 2561609 - DNA, 25 bp, Homo sapien
gacaaacttttcaggccccgtgtga

SEQ ID NO: 2561610 - DNA, 25 bp, Homo sapien
tcactgcctcgagaacaaaagacaa

SEQ ID NO: 2561611 - DNA, 25 bp, Homo sapien
agagttcctgatagggccccagaag

SEQ ID NO: 2561612 - DNA, 25 bp, Homo sapien
agtgcatagaaatacccagtcaggg

SEQ ID NO: 2561613 - DNA, 25 bp, Homo sapien
ccagtcagggcaaaatgatttatct

SEQ ID NO: 2561614 - DNA, 25 bp, Homo sapien
aatggcagtggtaagaggttgctcc

SEQ ID NO: 2561615 - DNA, 25 bp, Homo sapien
tttatctttgtattcccggagcttg

SEQ ID NO: 2561616 - DNA, 25 bp, Homo sapien
gcttgtcatttgagatatagccagt

SEQ ID NO: 2561617 - DNA, 25 bp, Homo sapien
gagatatagccagtgtacttattca

SEQ ID NO: 2561618 - DNA, 25 bp, Homo sapien
cattgtgattcctttgtgcatttgg

SEQ ID NO: 2561619 - DNA, 25 bp, Homo sapien
gacaaagtgtgataaaacctctggc

SEQ ID NO: 2561620 - DNA, 25 bp, Homo sapien
cagacttgctctactgaaggcttct

SEQ ID NO: 2561621 - DNA, 25 bp, Homo sapien
aacctctggctcagacttgctctac

SEQ ID NO: 2561622 - DNA, 25 bp, Homo sapien
tggaccctgaggacaaagtgtgata

SEQ ID NO: 2561623 - DNA, 25 bp, Homo sapien
gcctatgtataagtgactctgagga

SEQ ID NO: 2561624 - DNA, 25 bp, Homo sapien
cacaaacaggctcttgttggcagtg

SEQ ID NO: 2561625 - DNA, 25 bp, Homo sapien
gtgcctctgctgaagtagggaagaa

SEQ ID NO: 2561626 - DNA, 25 bp, Homo sapien
cccagcctatgtataagtgactctg

SEQ ID NO: 2561627 - DNA, 25 bp, Homo sapien
gaactcccgtccggccgcgcccgca

SEQ ID NO: 2561628 - DNA, 25 bp, Homo sapien
gcaggatccttctccggggaactcc

SEQ ID NO: 2561629 - DNA, 25 bp, Homo sapien
cgggactcgggctgcaggatccttc

SEQ ID NO: 2561630 - DNA, 25 bp, Homo sapien
tcgggctgcaggatccttctccggg

SEQ ID NO: 2561631 - DNA, 25 bp, Homo sapien
gaagtgaggggtgacagggggcgcg

SEQ ID NO: 2561632 - DNA, 25 bp, Homo sapien
agaagtgaggggtgacagggggcgc

SEQ ID NO: 2561633 - DNA, 25 bp, Homo sapien
ggatgtccgagagcaggcaactaga

SEQ ID NO: 2561634 - DNA, 25 bp, Homo sapien
tagtgtctgctgaacggatgtccga

SEQ ID NO: 2561635 - DNA, 25 bp, Homo sapien
gaccctatccgcgaacagagttggg

SEQ ID NO: 2561636 - DNA, 25 bp, Homo sapien
ggttcaggctccgtatactctggga

SEQ ID NO: 2561637 - DNA, 25 bp, Homo sapien
gaaggaggatgaaccccaagcttta

SEQ ID NO: 2561638 - DNA, 25 bp, Homo sapien
aaggaggatgaaccccaagctttat

SEQ ID NO: 2561639 - DNA, 25 bp, Homo sapien
aggaggatgaaccccaagctttatc

SEQ ID NO: 2561640 - DNA, 25 bp, Homo sapien
gaggatgaaccccaagctttatcct

SEQ ID NO: 2561641 - DNA, 25 bp, Homo sapien
gccgagtcccctggattggggaagc

SEQ ID NO: 2561642 - DNA, 25 bp, Homo sapien
cgccgagtcccctggattggggaag

SEQ ID NO: 2561643 - DNA, 25 bp, Homo sapien
cggcgccgagtcccctggattgggg

SEQ ID NO: 2561644 - DNA, 25 bp, Homo sapien
gcgccgagtcccctggattggggaa

SEQ ID NO: 2561645 - DNA, 25 bp, Homo sapien
agccacaggcgaacggcgactgcgt

SEQ ID NO: 2561646 - DNA, 25 bp, Homo sapien
aggcgaacggcgactgcgttgccct

SEQ ID NO: 2561647 - DNA, 25 bp, Homo sapien
gccctcccggcactgagtgaaaatg

SEQ ID NO: 2561648 - DNA, 25 bp, Homo sapien
ccctggttgaggtcgttctccgtgt

SEQ ID NO: 2561649 - DNA, 25 bp, Homo sapien
taggcaattgcctcctttccacctg

SEQ ID NO: 2561650 - DNA, 25 bp, Homo sapien
tgctcttcacaaagcatccaagacg

SEQ ID NO: 2561651 - DNA, 25 bp, Homo sapien
tctacgatgaactaggcaattgcct

SEQ ID NO: 2561652 - DNA, 25 bp, Homo sapien
agtccaagacatcattacttctacg

SEQ ID NO: 2561653 - DNA, 25 bp, Homo sapien
aattaaggaacccaatgtagtctga

SEQ ID NO: 2561654 - DNA, 25 bp, Homo sapien
gattctggactctagcacccagcac

SEQ ID NO: 2561655 - DNA, 25 bp, Homo sapien
ggcctacttttcaatctgccacaaa

SEQ ID NO: 2561656 - DNA, 25 bp, Homo sapien
gccacaaatctgctgtatcgagagc

SEQ ID NO: 2561657 - DNA, 25 bp, Homo sapien
cagcctccggatgccttagtgttgt

SEQ ID NO: 2561658 - DNA, 25 bp, Homo sapien
aaacaattggtttggagctgggcct

SEQ ID NO: 2561659 - DNA, 25 bp, Homo sapien
tgtgtgcgactctaggcaaggcctg

SEQ ID NO: 2561660 - DNA, 25 bp, Homo sapien
atccagatgcccgtacagctgaagg

SEQ ID NO: 2561661 - DNA, 25 bp, Homo sapien
gcaactcccaaagctgtccatttca

SEQ ID NO: 2561662 - DNA, 25 bp, Homo sapien
actgataattacatactctctggga

SEQ ID NO: 2561663 - DNA, 25 bp, Homo sapien
gaaggcttacctctctaggactttg

SEQ ID NO: 2561664 - DNA, 25 bp, Homo sapien
tggtagtgctcttcccctggtttct

SEQ ID NO: 2561665 - DNA, 25 bp, Homo sapien
gggtgtcatccccacggttcattac

SEQ ID NO: 2561666 - DNA, 25 bp, Homo sapien
tatcacggtgtccatgactggctgc

SEQ ID NO: 2561667 - DNA, 25 bp, Homo sapien
caacatctcaaccacagcagagcgg

SEQ ID NO: 2561668 - DNA, 25 bp, Homo sapien
ggttcattacattgatccgtgcccc

SEQ ID NO: 2561669 - DNA, 25 bp, Homo sapien
aatgagatactggtgtcagggcatg

SEQ ID NO: 2561670 - DNA, 25 bp, Homo sapien
ccaaatgagatactggtgtcagggc

SEQ ID NO: 2561671 - DNA, 25 bp, Homo sapien
gaaagtacagtcagttccaaatgag

SEQ ID NO: 2561672 - DNA, 25 bp, Homo sapien
gaggcagaaagtacagtcagttcca

SEQ ID NO: 2561673 - DNA, 25 bp, Homo sapien
ggccccaaaaacaggcatagtgcag

SEQ ID NO: 2561674 - DNA, 25 bp, Homo sapien
atagtgcaggggcacattcccgtgt

SEQ ID NO: 2561675 - DNA, 25 bp, Homo sapien
tggccccaaaaacaggcatagtgca

SEQ ID NO: 2561676 - DNA, 25 bp, Homo sapien
attcccgtgttcattcactgcattg

SEQ ID NO: 2561677 - DNA, 25 bp, Homo sapien
acaagggccccatttgccaccaggt

SEQ ID NO: 2561678 - DNA, 25 bp, Homo sapien
tgctgacaagggccccatttgccac

SEQ ID NO: 2561679 - DNA, 25 bp, Homo sapien
tcggagaagctctctcaggggtgcc

SEQ ID NO: 2561680 - DNA, 25 bp, Homo sapien
tccatacttgttacagatgctgaca

SEQ ID NO: 2561681 - DNA, 25 bp, Homo sapien
ggtgggaagggacgagaggacacaa

SEQ ID NO: 2561682 - DNA, 25 bp, Homo sapien
agctgtggtacagagggagaagaca

SEQ ID NO: 2561683 - DNA, 25 bp, Homo sapien
gaaaaacaacctaagctgtggtaca

SEQ ID NO: 2561684 - DNA, 25 bp, Homo sapien
gaagggacgagaggacacaagctag

SEQ ID NO: 2561685 - DNA, 25 bp, Homo sapien
tgtccttgtatggaatacggttgag

SEQ ID NO: 2561686 - DNA, 25 bp, Homo sapien
ccttgtatggaatacggttgagatt

SEQ ID NO: 2561687 - DNA, 25 bp, Homo sapien
gaatgtgtccttgtatggaatacgg

SEQ ID NO: 2561688 - DNA, 25 bp, Homo sapien
tggaatacggttgagattctggccc

SEQ ID NO: 2561689 - DNA, 25 bp, Homo sapien
tgtgggcaggtcaggtacccagctt

SEQ ID NO: 2561690 - DNA, 25 bp, Homo sapien
tcaggtacccagcttcaccctaacc

SEQ ID NO: 2561691 - DNA, 25 bp, Homo sapien
tacccagcttcaccctaacccagcc

SEQ ID NO: 2561692 - DNA, 25 bp, Homo sapien
gtgtgggcaggtcaggtacccagct

SEQ ID NO: 2561693 - DNA, 25 bp, Homo sapien
gcttcgtcaggaagttaagctgttt

SEQ ID NO: 2561694 - DNA, 25 bp, Homo sapien
ccagagtgattctcgttgagcttcg

SEQ ID NO: 2561695 - DNA, 25 bp, Homo sapien
gagtgtttgttcagggttccatttc

SEQ ID NO: 2561696 - DNA, 25 bp, Homo sapien
gaagtcaatgccagagtgtttgttc

SEQ ID NO: 2561697 - DNA, 25 bp, Homo sapien
ctgcaggacaggtaggggttaggag

SEQ ID NO: 2561698 - DNA, 25 bp, Homo sapien
aggcttgaaatgttgctgccacttc

SEQ ID NO: 2561699 - DNA, 25 bp, Homo sapien
caggtacaaagcaagtaatttatgg

SEQ ID NO: 2561700 - DNA, 25 bp, Homo sapien
cacttccttgcccactaactggagg

SEQ ID NO: 2561701 - DNA, 25 bp, Homo sapien
ccttcacgacaatgtcattgccctg

SEQ ID NO: 2561702 - DNA, 25 bp, Homo sapien
tgagccggggacactcttcattgaa

SEQ ID NO: 2561703 - DNA, 25 bp, Homo sapien
gtactccagtctcgaaccttcagca

SEQ ID NO: 2561704 - DNA, 25 bp, Homo sapien
ttcagcaccttcacgacaatgtcat

SEQ ID NO: 2561705 - DNA, 25 bp, Homo sapien
gcaggcacctagcactgggagcaca

SEQ ID NO: 2561706 - DNA, 25 bp, Homo sapien
attgtagagggatccatacggcatc

SEQ ID NO: 2561707 - DNA, 25 bp, Homo sapien
catccagtgtgtgatgagagtagga

SEQ ID NO: 2561708 - DNA, 25 bp, Homo sapien
tggagactggcaggcacctagcact

SEQ ID NO: 2561709 - DNA, 25 bp, Homo sapien
attacactacggctattgagtgcat

SEQ ID NO: 2561710 - DNA, 25 bp, Homo sapien
tacggctattgagtgcatgtcgtgg

SEQ ID NO: 2561711 - DNA, 25 bp, Homo sapien
ctattgagtgcatgtcgtgggatga

SEQ ID NO: 2561712 - DNA, 25 bp, Homo sapien
ggctctagtgtgtgtaggaaggcca

SEQ ID NO: 2561713 - DNA, 25 bp, Homo sapien
caggtgcatacatgcgaccaggaca

SEQ ID NO: 2561714 - DNA, 25 bp, Homo sapien
gaaagagaacttgacatcagccatg

SEQ ID NO: 2561715 - DNA, 25 bp, Homo sapien
gccatgctaattcgggcagtcatgt

SEQ ID NO: 2561716 - DNA, 25 bp, Homo sapien
tacatgcgaccaggacattggaaag

SEQ ID NO: 2561717 - DNA, 25 bp, Homo sapien
cgtctgtttgtgtcttcaggcttct

SEQ ID NO: 2561718 - DNA, 25 bp, Homo sapien
tcagcaaagggtacctcccgtgtca

SEQ ID NO: 2561719 - DNA, 25 bp, Homo sapien
tccacatgtctgctgagcgtctgtt

SEQ ID NO: 2561720 - DNA, 25 bp, Homo sapien
tccaatctccatattggagaggtca

SEQ ID NO: 2561721 - DNA, 25 bp, Homo sapien
gtgtgtaagctcatgaagatctgca

SEQ ID NO: 2561722 - DNA, 25 bp, Homo sapien
gattgtgcctatccttgagaagatg

SEQ ID NO: 2561723 - DNA, 25 bp, Homo sapien
ggtatttcccctcatgtgtgtaagc

SEQ ID NO: 2561724 - DNA, 25 bp, Homo sapien
cctgcaaagcgacccaaatttgaca

SEQ ID NO: 2561725 - DNA, 25 bp, Homo sapien
tgaatgaagaccctgcaaagcgacc

SEQ ID NO: 2561726 - DNA, 25 bp, Homo sapien
aaatttgacatgattgtgcctatcc

SEQ ID NO: 2561727 - DNA, 25 bp, Homo sapien
caaggataggcacaatcatgtcaaa

SEQ ID NO: 2561728 - DNA, 25 bp, Homo sapien
gcttacacacatgaggggaaatacc

SEQ ID NO: 2561729 - DNA, 25 bp, Homo sapien
tgtcaaatttgggtcgctttgcagg

SEQ ID NO: 2561730 - DNA, 25 bp, Homo sapien
catcttctcaaggataggcacaatc

SEQ ID NO: 2561731 - DNA, 25 bp, Homo sapien
ggtcgctttgcagggtcttcattca

SEQ ID NO: 2561732 - DNA, 25 bp, Homo sapien
tgcagatcttcatgagcttacacac

SEQ ID NO: 2561733 - DNA, 25 bp, Homo sapien
cagagctttgtcacttgccacatgg

SEQ ID NO: 2561734 - DNA, 25 bp, Homo sapien
ccgcctgtcacaataaagtttatta

SEQ ID NO: 2561735 - DNA, 25 bp, Homo sapien
tcacttgccacatggtgtctcccaa

SEQ ID NO: 2561736 - DNA, 25 bp, Homo sapien
aactccagaggtgtcgggacatggt

SEQ ID NO: 2561737 - DNA, 25 bp, Homo sapien
gccccgcctgtcacaataaagttta

SEQ ID NO: 2561738 - DNA, 25 bp, Homo sapien
gcgggctcagagctttgtcacttgc

SEQ ID NO: 2561739 - DNA, 25 bp, Homo sapien
gcaagtgacaaagctctgagcccgc

SEQ ID NO: 2561740 - DNA, 25 bp, Homo sapien
aaccatgtcccgacacctctggagt

SEQ ID NO: 2561741 - DNA, 25 bp, Homo sapien
ttgggagacaccatgtggcaagtga

SEQ ID NO: 2561742 - DNA, 25 bp, Homo sapien
aataaactttattgtgacaggcggg

SEQ ID NO: 2561743 - DNA, 25 bp, Homo sapien
catgtggcaagtgacaaagctctga

SEQ ID NO: 2561744 - DNA, 25 bp, Homo sapien
gacaccatgtggcaagtgacaaagc

SEQ ID NO: 2561745 - DNA, 25 bp, Homo sapien
tctagcattgtaacgaccacgtagt

SEQ ID NO: 2561746 - DNA, 25 bp, Homo sapien
cattgtaacgaccacgtagtattga

SEQ ID NO: 2561747 - DNA, 25 bp, Homo sapien
tgcctacctctagcattgtaacgac

SEQ ID NO: 2561748 - DNA, 25 bp, Homo sapien
cgaccacgtagtattgaaatggcca

SEQ ID NO: 2561749 - DNA, 25 bp, Homo sapien
cacaaaccttccttgctatttgttc

SEQ ID NO: 2561750 - DNA, 25 bp, Homo sapien
gctactaccttagtttagggctata

SEQ ID NO: 2561751 - DNA, 25 bp, Homo sapien
caaggattactggatagaattcagg

SEQ ID NO: 2561752 - DNA, 25 bp, Homo sapien
aaagtgtccttacttcctgccaatc

SEQ ID NO: 2561753 - DNA, 25 bp, Homo sapien
cgggtgttggtctgtctctggaaga

SEQ ID NO: 2561754 - DNA, 25 bp, Homo sapien
ctgtctctggaagacaccagttccg

SEQ ID NO: 2561755 - DNA, 25 bp, Homo sapien
gtctctggaagacaccagttccgcc

SEQ ID NO: 2561756 - DNA, 25 bp, Homo sapien
tctggaagacaccagttccgcccta

SEQ ID NO: 2561757 - DNA, 25 bp, Homo sapien
tggctcatgctgctcagtaatgagt

SEQ ID NO: 2561758 - DNA, 25 bp, Homo sapien
gccctgccacatgtgcatactgtga

SEQ ID NO: 2561759 - DNA, 25 bp, Homo sapien
tgagctcatgaaggctgccgctcgg

SEQ ID NO: 2561760 - DNA, 25 bp, Homo sapien
tacatccagcgggtcaacactgagc

SEQ ID NO: 2561761 - DNA, 25 bp, Homo sapien
atgtggaaagactctcggagctggt

SEQ ID NO: 2561762 - DNA, 25 bp, Homo sapien
tgagacagcagaatgtggaaagact

SEQ ID NO: 2561763 - DNA, 25 bp, Homo sapien
cagaatgtggaaagactctcggagc

SEQ ID NO: 2561764 - DNA, 25 bp, Homo sapien
agcagaatgtggaaagactctcgga

SEQ ID NO: 2561765 - DNA, 25 bp, Homo sapien
atgcaagggaggagccagtaccgtc

SEQ ID NO: 2561766 - DNA, 25 bp, Homo sapien
atgacagcagatccgcggaagggca

SEQ ID NO: 2561767 - DNA, 25 bp, Homo sapien
tactcagtgcttgactggccagagg

SEQ ID NO: 2561768 - DNA, 25 bp, Homo sapien
catacagctaggaagaaccccagtc

SEQ ID NO: 2561769 - DNA, 25 bp, Homo sapien
gaagccctgttgctcactgacctgt

SEQ ID NO: 2561770 - DNA, 25 bp, Homo sapien
agccacctgatgacacggagctgca

SEQ ID NO: 2561771 - DNA, 25 bp, Homo sapien
tgggcagcctcggactatgactggc

SEQ ID NO: 2561772 - DNA, 25 bp, Homo sapien
gagctgcacatctagctgtggccca

SEQ ID NO: 2561773 - DNA, 25 bp, Homo sapien
tcagttccaaccactggccagtgtc

SEQ ID NO: 2561774 - DNA, 25 bp, Homo sapien
tccgtggcagctataactgggacta

SEQ ID NO: 2561775 - DNA, 25 bp, Homo sapien
cacagagatcgctcggctcaaggat

SEQ ID NO: 2561776 - DNA, 25 bp, Homo sapien
ggactatggcttcccagcagatggc

SEQ ID NO: 2561777 - DNA, 25 bp, Homo sapien
tatttgcagtgaaacctctgagcag

SEQ ID NO: 2561778 - DNA, 25 bp, Homo sapien
tcagagggcaaaggtcgttaacagc

SEQ ID NO: 2561779 - DNA, 25 bp, Homo sapien
cacagccacagtagagagttggagc

SEQ ID NO: 2561780 - DNA, 25 bp, Homo sapien
tctgggccacaatcagaagtccttg

SEQ ID NO: 2561781 - DNA, 25 bp, Homo sapien
gcaagagggcaactctccaggtggt

SEQ ID NO: 2561782 - DNA, 25 bp, Homo sapien
tccaggaccaatgggctatggcttc

SEQ ID NO: 2561783 - DNA, 25 bp, Homo sapien
tcatagggagcaagtgaaggactct

SEQ ID NO: 2561784 - DNA, 25 bp, Homo sapien
cagggcatagacttccaggctagct

SEQ ID NO: 2561785 - DNA, 25 bp, Homo sapien
ttcaccccttctcatacgtagatct

SEQ ID NO: 2561786 - DNA, 25 bp, Homo sapien
gagatctggatagtgtatcctgcca

SEQ ID NO: 2561787 - DNA, 25 bp, Homo sapien
tagatctcccaggtataccctcttg

SEQ ID NO: 2561788 - DNA, 25 bp, Homo sapien
acttcgagatctggatagtgtatcc

SEQ ID NO: 2561789 - DNA, 25 bp, Homo sapien
tgatttctttgtgccatttgtacac

SEQ ID NO: 2561790 - DNA, 25 bp, Homo sapien
tatgcatactcaacacaagcagtgt

SEQ ID NO: 2561791 - DNA, 25 bp, Homo sapien
aagcagtgtctttctcatcattagg

SEQ ID NO: 2561792 - DNA, 25 bp, Homo sapien
ggttttttgcatgcaccctgcctga

SEQ ID NO: 2561793 - DNA, 25 bp, Homo sapien
tcttcagtttaagcgaagggcttgg

SEQ ID NO: 2561794 - DNA, 25 bp, Homo sapien
taaagggatcactggtgtagcagac

SEQ ID NO: 2561795 - DNA, 25 bp, Homo sapien
gacatggcttcagtgacagaacgaa

SEQ ID NO: 2561796 - DNA, 25 bp, Homo sapien
aatagatggattgtggctgggctcc

SEQ ID NO: 2561797 - DNA, 25 bp, Homo sapien
gcatgaatatccaccctagctaggt

SEQ ID NO: 2561798 - DNA, 25 bp, Homo sapien
agagaaagattacttcctgacaggg

SEQ ID NO: 2561799 - DNA, 25 bp, Homo sapien
gaactcagatgttccaccagtttgg

SEQ ID NO: 2561800 - DNA, 25 bp, Homo sapien
taaacaatctagtaccctgcgaacc

SEQ ID NO: 2561801 - DNA, 25 bp, Homo sapien
ggagtgacaatctgcaagtgaaact

SEQ ID NO: 2561802 - DNA, 25 bp, Homo sapien
tgcagcccttaatcagtacccatga

SEQ ID NO: 2561803 - DNA, 25 bp, Homo sapien
caaatcggagtttggatcgggccaa

SEQ ID NO: 2561804 - DNA, 25 bp, Homo sapien
gcccctcggtacaaagatcaaactg

SEQ ID NO: 2561805 - DNA, 25 bp, Homo sapien
tgatcgagtataaagggaattgcct

SEQ ID NO: 2561806 - DNA, 25 bp, Homo sapien
tgtctgagcatactcacacaggcct

SEQ ID NO: 2561807 - DNA, 25 bp, Homo sapien
taggagcagtttagatagagtcaga

SEQ ID NO: 2561808 - DNA, 25 bp, Homo sapien
gaatcttgtagcctcagctgtatga

SEQ ID NO: 2561809 - DNA, 25 bp, Homo sapien
gctgggattctaaggcttctatgac

SEQ ID NO: 2561810 - DNA, 25 bp, Homo sapien
tccctggtatgttggcaattccctg

SEQ ID NO: 2561811 - DNA, 25 bp, Homo sapien
gcagagacttgaccaagatagggat

SEQ ID NO: 2561812 - DNA, 25 bp, Homo sapien
caattccctgcgcatgctaagaaaa

SEQ ID NO: 2561813 - DNA, 25 bp, Homo sapien
catgagtcccaagcatagcaatatt

SEQ ID NO: 2561814 - DNA, 25 bp, Homo sapien
aatcatttcaggctgcaacaaattt

SEQ ID NO: 2561815 - DNA, 25 bp, Homo sapien
caaccaatatacatgtcttgactga

SEQ ID NO: 2561816 - DNA, 25 bp, Homo sapien
ttcaggctgcaacaaatttctatag

SEQ ID NO: 2561817 - DNA, 25 bp, Homo sapien
catgtcttgactgaaagctataaac

SEQ ID NO: 2561818 - DNA, 25 bp, Homo sapien
catataaattctctgggttagctct

SEQ ID NO: 2561819 - DNA, 25 bp, Homo sapien
atataaattctctgggttagctctt

SEQ ID NO: 2561820 - DNA, 25 bp, Homo sapien
tccatataaattctctgggttagct

SEQ ID NO: 2561821 - DNA, 25 bp, Homo sapien
ccatataaattctctgggttagctc

SEQ ID NO: 2561822 - DNA, 25 bp, Homo sapien
atggtttccagtttgctcatggcca

SEQ ID NO: 2561823 - DNA, 25 bp, Homo sapien
tggtttccagtttgctcatggccat

SEQ ID NO: 2561824 - DNA, 25 bp, Homo sapien
gagttgtggacacatcacagaccct

SEQ ID NO: 2561825 - DNA, 25 bp, Homo sapien
gaatttcttgttagtatgtccatga

SEQ ID NO: 2561826 - DNA, 25 bp, Homo sapien
ctctgtgactttaggaagagttgtg

SEQ ID NO: 2561827 - DNA, 25 bp, Homo sapien
catgtaagtcttcctcactcaactt

SEQ ID NO: 2561828 - DNA, 25 bp, Homo sapien
aaagtattgccagtaatgatcaaag

SEQ ID NO: 2561829 - DNA, 25 bp, Homo sapien
attcttattatgaaagtattgccag

SEQ ID NO: 2561830 - DNA, 25 bp, Homo sapien
gtctaaacagtatctcttaatattg

SEQ ID NO: 2561831 - DNA, 25 bp, Homo sapien
tttacctgcattgtctaaacagtat

SEQ ID NO: 2561832 - DNA, 25 bp, Homo sapien
tcagttttagaaaccattacttcca

SEQ ID NO: 2561833 - DNA, 25 bp, Homo sapien
ttagaaaccattacttccataggca

SEQ ID NO: 2561834 - DNA, 25 bp, Homo sapien
tccaaagccgcactcatgtcttctc

SEQ ID NO: 2561835 - DNA, 25 bp, Homo sapien
gaaaccattacttccataggcatac

SEQ ID NO: 2561836 - DNA, 25 bp, Homo sapien
tatattagggcacttagggatgcca

SEQ ID NO: 2561837 - DNA, 25 bp, Homo sapien
taggaggccagtatagcagcaagag

SEQ ID NO: 2561838 - DNA, 25 bp, Homo sapien
gaagggatagtgcatggtatacacg

SEQ ID NO: 2561839 - DNA, 25 bp, Homo sapien
ccatgagctcatatctggaggtatc

SEQ ID NO: 2561840 - DNA, 25 bp, Homo sapien
tgctggcagcatgtattttcccagg

SEQ ID NO: 2561841 - DNA, 25 bp, Homo sapien
ctagagcgtggagtgtgctggcagc

SEQ ID NO: 2561842 - DNA, 25 bp, Homo sapien
tgtgctggcagcatgtattttccca

SEQ ID NO: 2561843 - DNA, 25 bp, Homo sapien
agagcgtggagtgtgctggcagcat

SEQ ID NO: 2561844 - DNA, 25 bp, Homo sapien
ttcagtagttcctgaaaatatggtc

SEQ ID NO: 2561845 - DNA, 25 bp, Homo sapien
tcagtagttcctgaaaatatggtca

SEQ ID NO: 2561846 - DNA, 25 bp, Homo sapien
tgggcataaatccccagctgtggtc

SEQ ID NO: 2561847 - DNA, 25 bp, Homo sapien
tatgggcataaatccccagctgtgg

SEQ ID NO: 2561848 - DNA, 25 bp, Homo sapien
gtatgggcataaatccccagctgtg

SEQ ID NO: 2561849 - DNA, 25 bp, Homo sapien
aagtatgggcataaatccccagctg

SEQ ID NO: 2561850 - DNA, 25 bp, Homo sapien
ccaaatagatagttagaaatgtcag

SEQ ID NO: 2561851 - DNA, 25 bp, Homo sapien
ctagggtaaccagaatgatgaggct

SEQ ID NO: 2561852 - DNA, 25 bp, Homo sapien
gagaagctcatgaggataaattcac

SEQ ID NO: 2561853 - DNA, 25 bp, Homo sapien
ggctgtttcccttcagagtaaccaa

SEQ ID NO: 2561854 - DNA, 25 bp, Homo sapien
tttgggcacaatgactaggttgaag

SEQ ID NO: 2561855 - DNA, 25 bp, Homo sapien
gaagccaatctccaggaaagataag

SEQ ID NO: 2561856 - DNA, 25 bp, Homo sapien
gggcacaatgactaggttgaagcca

SEQ ID NO: 2561857 - DNA, 25 bp, Homo sapien
gttgaagccaatctccaggaaagat

SEQ ID NO: 2561858 - DNA, 25 bp, Homo sapien
gatggcgtagatctcaaacagtgct

SEQ ID NO: 2561859 - DNA, 25 bp, Homo sapien
cacaacagtgtaggataatgataac

SEQ ID NO: 2561860 - DNA, 25 bp, Homo sapien
tgatgggatcttgaggatagcagca

SEQ ID NO: 2561861 - DNA, 25 bp, Homo sapien
atgataacaacttcttgctctcagg

SEQ ID NO: 2561862 - DNA, 25 bp, Homo sapien
agtttctgagggctaggaccttgtg

SEQ ID NO: 2561863 - DNA, 25 bp, Homo sapien
cagtttctgagggctaggaccttgt

SEQ ID NO: 2561864 - DNA, 25 bp, Homo sapien
tttctgagggctaggaccttgtgga

SEQ ID NO: 2561865 - DNA, 25 bp, Homo sapien
tctgagggctaggaccttgtggaag

SEQ ID NO: 2561866 - DNA, 25 bp, Homo sapien
ttcaactctggctgacatccatgct

SEQ ID NO: 2561867 - DNA, 25 bp, Homo sapien
aggaacatctgccttgttcaactct

SEQ ID NO: 2561868 - DNA, 25 bp, Homo sapien
aacatctgccttgttcaactctggc

SEQ ID NO: 2561869 - DNA, 25 bp, Homo sapien
aactctggctgacatccatgcttca

SEQ ID NO: 2561870 - DNA, 25 bp, Homo sapien
gcagaaacacttgctgggatttcca

SEQ ID NO: 2561871 - DNA, 25 bp, Homo sapien
ttaactagaagcctcatgacagatg

SEQ ID NO: 2561872 - DNA, 25 bp, Homo sapien
tgtatgtggtgctggcggagaagac

SEQ ID NO: 2561873 - DNA, 25 bp, Homo sapien
gaagaaaagctagtgccccgtctcc

SEQ ID NO: 2561874 - DNA, 25 bp, Homo sapien
gtccagtttcctgtagctataagtg

SEQ ID NO: 2561875 - DNA, 25 bp, Homo sapien
gtagctataagtgtgggcagaagtc

SEQ ID NO: 2561876 - DNA, 25 bp, Homo sapien
tgtagctataagtgtgggcagaagt

SEQ ID NO: 2561877 - DNA, 25 bp, Homo sapien
tagctataagtgtgggcagaagtcc

SEQ ID NO: 2561878 - DNA, 25 bp, Homo sapien
cagctagggtaaccagaatgatgag

SEQ ID NO: 2561879 - DNA, 25 bp, Homo sapien
gctagggtaaccagaatgatgaggc

SEQ ID NO: 2561880 - DNA, 25 bp, Homo sapien
ggtcagctagggtaaccagaatgat

SEQ ID NO: 2561881 - DNA, 25 bp, Homo sapien
tcagctagggtaaccagaatgatga

SEQ ID NO: 2561882 - DNA, 25 bp, Homo sapien
gaagccaatctccaggaaagataag

SEQ ID NO: 2561883 - DNA, 25 bp, Homo sapien
gggcacaatgactaggttgaagcca

SEQ ID NO: 2561884 - DNA, 25 bp, Homo sapien
gttgaagccaatctccaggaaagat

SEQ ID NO: 2561885 - DNA, 25 bp, Homo sapien
ttttgggcacaatgactaggttgaa

SEQ ID NO: 2561886 - DNA, 25 bp, Homo sapien
ctgcacagtagctacaggaaagcct

SEQ ID NO: 2561887 - DNA, 25 bp, Homo sapien
gtctgcacagtagctacaggaaagc

SEQ ID NO: 2561888 - DNA, 25 bp, Homo sapien
ggtctgcacagtagctacaggaaag

SEQ ID NO: 2561889 - DNA, 25 bp, Homo sapien
tctgcacagtagctacaggaaagcc

SEQ ID NO: 2561890 - DNA, 25 bp, Homo sapien
cttgttggtgccacagaatggaaaa

SEQ ID NO: 2561891 - DNA, 25 bp, Homo sapien
ttggtgccacagaatggaaaactga

SEQ ID NO: 2561892 - DNA, 25 bp, Homo sapien
ttgttggtgccacagaatggaaaac

SEQ ID NO: 2561893 - DNA, 25 bp, Homo sapien
gtgccacagaatggaaaactgaaga

SEQ ID NO: 2561894 - DNA, 25 bp, Homo sapien
gctgagggcattcttcacctcgtta

SEQ ID NO: 2561895 - DNA, 25 bp, Homo sapien
tccgacgatggcgtagatctcaaag

SEQ ID NO: 2561896 - DNA, 25 bp, Homo sapien
cttagagaccgtcctgctgagggca

SEQ ID NO: 2561897 - DNA, 25 bp, Homo sapien
ttctgagggctagggccttagagac

SEQ ID NO: 2561898 - DNA, 25 bp, Homo sapien
cacaggatatgtggcccatgatgac

SEQ ID NO: 2561899 - DNA, 25 bp, Homo sapien
cagggtcctgtggataagccgcttc

SEQ ID NO: 2561900 - DNA, 25 bp, Homo sapien
cagaccagtgcaataacaggagggc

SEQ ID NO: 2561901 - DNA, 25 bp, Homo sapien
ggagaatgcctgatgtttcccctca

SEQ ID NO: 2561902 - DNA, 25 bp, Homo sapien
ccctcctccgcataatgagtgagtt

SEQ ID NO: 2561903 - DNA, 25 bp, Homo sapien
tctgagttgacgttgcctccccact

SEQ ID NO: 2561904 - DNA, 25 bp, Homo sapien
cacttgtgttatgatgtggtctggc

SEQ ID NO: 2561905 - DNA, 25 bp, Homo sapien
tctgccttgagtggaagctttttga

SEQ ID NO: 2561906 - DNA, 25 bp, Homo sapien
gcagaatataatctcctcatgtgcc

SEQ ID NO: 2561907 - DNA, 25 bp, Homo sapien
catgtgccatttgttaagcctgttg

SEQ ID NO: 2561908 - DNA, 25 bp, Homo sapien
ggtgcagaatataatctcctcatgt

SEQ ID NO: 2561909 - DNA, 25 bp, Homo sapien
gccatttgttaagcctgttgggaaa

SEQ ID NO: 2561910 - DNA, 25 bp, Homo sapien
catccccagagtctgtcgttcccat

SEQ ID NO: 2561911 - DNA, 25 bp, Homo sapien
tatttcagaattaaggtacacatgc

SEQ ID NO: 2561912 - DNA, 25 bp, Homo sapien
tcagaattaaggtacacatgcaggt

SEQ ID NO: 2561913 - DNA, 25 bp, Homo sapien
ttggagagaggtatcagaaaaaaaa

SEQ ID NO: 2561914 - DNA, 25 bp, Homo sapien
tgtttacctgtttggcacaagaaaa

SEQ ID NO: 2561915 - DNA, 25 bp, Homo sapien
ctgtttacctgtttggcacaagaaa

SEQ ID NO: 2561916 - DNA, 25 bp, Homo sapien
cctgtttacctgtttggcacaagaa

SEQ ID NO: 2561917 - DNA, 25 bp, Homo sapien
tgtgaaagacccaggaagataaact

SEQ ID NO: 2561918 - DNA, 25 bp, Homo sapien
ctgtgaaagacccaggaagataaac

SEQ ID NO: 2561919 - DNA, 25 bp, Homo sapien
tactaaagacactagtgccccactg

SEQ ID NO: 2561920 - DNA, 25 bp, Homo sapien
gaaccaacacttgagggacaatgct

SEQ ID NO: 2561921 - DNA, 25 bp, Homo sapien
tggtttccaagcacggtcagcagat

SEQ ID NO: 2561922 - DNA, 25 bp, Homo sapien
cacccgttgtgtcatgatggtagag

SEQ ID NO: 2561923 - DNA, 25 bp, Homo sapien
caacaacaataagatgggagccaca

SEQ ID NO: 2561924 - DNA, 25 bp, Homo sapien
taagaaccaagaatcagggagacag

SEQ ID NO: 2561925 - DNA, 25 bp, Homo sapien
ggagtcaccgctgtatagaacacag

SEQ ID NO: 2561926 - DNA, 25 bp, Homo sapien
taccacgcccattgaaaagatggcc

SEQ ID NO: 2561927 - DNA, 25 bp, Homo sapien
cactgcctatgagagaagcactttc

SEQ ID NO: 2561928 - DNA, 25 bp, Homo sapien
tatgagagaagcactttctcccaac

SEQ ID NO: 2561929 - DNA, 25 bp, Homo sapien
actttctcccaactagtttcctgag

SEQ ID NO: 2561930 - DNA, 25 bp, Homo sapien
ctagtttcctgagagcccctttgac

SEQ ID NO: 2561931 - DNA, 25 bp, Homo sapien
gagccgcggaatcgctgtcttggac

SEQ ID NO: 2561932 - DNA, 25 bp, Homo sapien
gatcggtgaggtagaccaggccttt

SEQ ID NO: 2561933 - DNA, 25 bp, Homo sapien
gctccgagtttcataaattgccgcg

SEQ ID NO: 2561934 - DNA, 25 bp, Homo sapien
atcacgctgcaactaggaatccctg

SEQ ID NO: 2561935 - DNA, 25 bp, Homo sapien
tagcttaagtggcaaatgatgaaca

SEQ ID NO: 2561936 - DNA, 25 bp, Homo sapien
tgatgatagagatccaaggtgtgac

SEQ ID NO: 2561937 - DNA, 25 bp, Homo sapien
taaacagttacagagctaggacagg

SEQ ID NO: 2561938 - DNA, 25 bp, Homo sapien
cgtgactgcaagtagcttaagtggc

SEQ ID NO: 2561939 - DNA, 25 bp, Homo sapien
caaagccaatattcaggtacctgag

SEQ ID NO: 2561940 - DNA, 25 bp, Homo sapien
ttctcaggcttgagctaagcacctg

SEQ ID NO: 2561941 - DNA, 25 bp, Homo sapien
caaatccgccttactagattgcagt

SEQ ID NO: 2561942 - DNA, 25 bp, Homo sapien
taagcacctgtgtactatatgcagt

SEQ ID NO: 2561943 - DNA, 25 bp, Homo sapien
acctctctttgttcacgtagagaca

SEQ ID NO: 2561944 - DNA, 25 bp, Homo sapien
tagccatcaacttgctcagaggctg

SEQ ID NO: 2561945 - DNA, 25 bp, Homo sapien
cgaggttttgagatagccatcaact

SEQ ID NO: 2561946 - DNA, 25 bp, Homo sapien
agagacaggtttcgaggttttgaga

SEQ ID NO: 2561947 - DNA, 25 bp, Homo sapien
tgtctgaacttttgacgagatgcct

SEQ ID NO: 2561948 - DNA, 25 bp, Homo sapien
acgagatgcctcagagtcatgtgtc

SEQ ID NO: 2561949 - DNA, 25 bp, Homo sapien
tcatgtgtctccacgacggggttgg

SEQ ID NO: 2561950 - DNA, 25 bp, Homo sapien
gggcccagacactttcaaatactgg

SEQ ID NO: 2561951 - DNA, 25 bp, Homo sapien
caggattgccaggaattgttccagc

SEQ ID NO: 2561952 - DNA, 25 bp, Homo sapien
ggattgccaggaattgttccagcac

SEQ ID NO: 2561953 - DNA, 25 bp, Homo sapien
gcaggattgccaggaattgttccag

SEQ ID NO: 2561954 - DNA, 25 bp, Homo sapien
ggcaggattgccaggaattgttcca

SEQ ID NO: 2561955 - DNA, 25 bp, Homo sapien
gagggtcaccatatctttactgttg

SEQ ID NO: 2561956 - DNA, 25 bp, Homo sapien
ctttactgttgtttggatgttgtaa

SEQ ID NO: 2561957 - DNA, 25 bp, Homo sapien
caccatatctttactgttgtttgga

SEQ ID NO: 2561958 - DNA, 25 bp, Homo sapien
acatcttctatgagggtcaccatat

SEQ ID NO: 2561959 - DNA, 25 bp, Homo sapien
tacctctaatttctttatattctta

SEQ ID NO: 2561960 - DNA, 25 bp, Homo sapien
tacatgggaaaggtcaagtatttta

SEQ ID NO: 2561961 - DNA, 25 bp, Homo sapien
tgtggtttgcctgttcgtgagccag

SEQ ID NO: 2561962 - DNA, 25 bp, Homo sapien
ggtttgcctgttcgtgagccagctt

SEQ ID NO: 2561963 - DNA, 25 bp, Homo sapien
gcctgttcgtgagccagctttcatt

SEQ ID NO: 2561964 - DNA, 25 bp, Homo sapien
ctgcagggcagagtccttgcagggc

SEQ ID NO: 2561965 - DNA, 25 bp, Homo sapien
ctttacgcaatgaattcaggttcct

SEQ ID NO: 2561966 - DNA, 25 bp, Homo sapien
cgcaatgaattcaggttcctaaagt

SEQ ID NO: 2561967 - DNA, 25 bp, Homo sapien
tacgcaatgaattcaggttcctaaa

SEQ ID NO: 2561968 - DNA, 25 bp, Homo sapien
caatgaattcaggttcctaaagttt

SEQ ID NO: 2561969 - DNA, 25 bp, Homo sapien
caacttaaggctctcaaatggtttg

SEQ ID NO: 2561970 - DNA, 25 bp, Homo sapien
acttaaggctctcaaatggtttgga

SEQ ID NO: 2561971 - DNA, 25 bp, Homo sapien
tctccaacttaaggctctcaaatgg

SEQ ID NO: 2561972 - DNA, 25 bp, Homo sapien
tcttactctccaacttaaggctctc

SEQ ID NO: 2561973 - DNA, 25 bp, Homo sapien
tgaagaagggtgtccactttcggta

SEQ ID NO: 2561974 - DNA, 25 bp, Homo sapien
tgtccactttcggtaagccttgtca

SEQ ID NO: 2561975 - DNA, 25 bp, Homo sapien
gtcataatcactccatgggatgatt

SEQ ID NO: 2561976 - DNA, 25 bp, Homo sapien
ttcggtaagccttgtcataatcact

SEQ ID NO: 2561977 - DNA, 25 bp, Homo sapien
aattgagctaactgaattaatatca

SEQ ID NO: 2561978 - DNA, 25 bp, Homo sapien
tgtatagcacaaattgagctaactg

SEQ ID NO: 2561979 - DNA, 25 bp, Homo sapien
agcacaaattgagctaactgaatta

SEQ ID NO: 2561980 - DNA, 25 bp, Homo sapien
cttgtggcaaatttatgtcccattt

SEQ ID NO: 2561981 - DNA, 25 bp, Homo sapien
ttttggtgtcgaatatctgtactca

SEQ ID NO: 2561982 - DNA, 25 bp, Homo sapien
tattctgaatgttgcttacctactg

SEQ ID NO: 2561983 - DNA, 25 bp, Homo sapien
tgtcgaataagggatgaacttcggc

SEQ ID NO: 2561984 - DNA, 25 bp, Homo sapien
taagggatgaacttcggcagaaggc

SEQ ID NO: 2561985 - DNA, 25 bp, Homo sapien
tcaggacttatctcgagtatgcagt

SEQ ID NO: 2561986 - DNA, 25 bp, Homo sapien
tgtacgtcggttgaagaatctccca

SEQ ID NO: 2561987 - DNA, 25 bp, Homo sapien
tggtgtcgaataagagaggagctcc

SEQ ID NO: 2561988 - DNA, 25 bp, Homo sapien
atttattgcttgtgcaggcctttgc

SEQ ID NO: 2561989 - DNA, 25 bp, Homo sapien
tacctaaggctatggacgtctctcc

SEQ ID NO: 2561990 - DNA, 25 bp, Homo sapien
tctacttcgtcaataaatcaggtgg

SEQ ID NO: 2561991 - DNA, 25 bp, Homo sapien
tgttattccagtacagggccatggg

SEQ ID NO: 2561992 - DNA, 25 bp, Homo sapien
gtttgaaactggagcacccggagac

SEQ ID NO: 2561993 - DNA, 25 bp, Homo sapien
ggcagattaagtcatacttcttggc

SEQ ID NO: 2561994 - DNA, 25 bp, Homo sapien
gtatgaaccttcacaaaaagctacc

SEQ ID NO: 2561995 - DNA, 25 bp, Homo sapien
caagaaccagatgggatcctgaggt

SEQ ID NO: 2561996 - DNA, 25 bp, Homo sapien
cattaattgggaatgtctccagtgt

SEQ ID NO: 2561997 - DNA, 25 bp, Homo sapien
tctaaaattgagaatgacatctgtt

SEQ ID NO: 2561998 - DNA, 25 bp, Homo sapien
tggtttccctaagctttgcccacac

SEQ ID NO: 2561999 - DNA, 25 bp, Homo sapien
gcggctctacaaaatagatcctcta

SEQ ID NO: 2562000 - DNA, 25 bp, Homo sapien
aacaaagattgggaccaaagcggct

SEQ ID NO: 2562001 - DNA, 25 bp, Homo sapien
tgagcttattctagtacaccatagc

SEQ ID NO: 2562002 - DNA, 25 bp, Homo sapien
ttagctaggtctccagaaaacattt

SEQ ID NO: 2562003 - DNA, 25 bp, Homo sapien
gaaaggacaagccatggactgtgca

SEQ ID NO: 2562004 - DNA, 25 bp, Homo sapien
gcaaattgaagtgataatgaggtac

SEQ ID NO: 2562005 - DNA, 25 bp, Homo sapien
ccgagactgcatcattatactccag

SEQ ID NO: 2562006 - DNA, 25 bp, Homo sapien
cctgggcaacaagagggaaactcca

SEQ ID NO: 2562007 - DNA, 25 bp, Homo sapien
gagccgagactgcatcattatactc

SEQ ID NO: 2562008 - DNA, 25 bp, Homo sapien
tgagccgagactgcatcattatact

SEQ ID NO: 2562009 - DNA, 25 bp, Homo sapien
tatttcagtatatgcacaatatgac

SEQ ID NO: 2562010 - DNA, 25 bp, Homo sapien
ttccatattattacaaccaacgctg

SEQ ID NO: 2562011 - DNA, 25 bp, Homo sapien
caacgctgtgacaagtatcttcatg

SEQ ID NO: 2562012 - DNA, 25 bp, Homo sapien
gaaacagaatagctaaatgaggtga

SEQ ID NO: 2562013 - DNA, 25 bp, Homo sapien
ttctcctgcagtgcttagtgcccct

SEQ ID NO: 2562014 - DNA, 25 bp, Homo sapien
tgtgattgatttctttggtcaggct

SEQ ID NO: 2562015 - DNA, 25 bp, Homo sapien
caagatgtgattgatttctttggtc

SEQ ID NO: 2562016 - DNA, 25 bp, Homo sapien
tgcttagtgcccctcattctgcttc

SEQ ID NO: 2562017 - DNA, 25 bp, Homo sapien
cacaaatgagagtggcttactttac

SEQ ID NO: 2562018 - DNA, 25 bp, Homo sapien
aaggctttattatatgctgttctaa

SEQ ID NO: 2562019 - DNA, 25 bp, Homo sapien
gatcacagagcccttttctgatgtt

SEQ ID NO: 2562020 - DNA, 25 bp, Homo sapien
tctaaattaggagtttaggagataa

SEQ ID NO: 2562021 - DNA, 25 bp, Homo sapien
tgttctgcctgcctcggcctcccaa

SEQ ID NO: 2562022 - DNA, 25 bp, Homo sapien
caaattcctgaccttgtgttctgcc

SEQ ID NO: 2562023 - DNA, 25 bp, Homo sapien
aaattcctgaccttgtgttctgcct

SEQ ID NO: 2562024 - DNA, 25 bp, Homo sapien
tcctattgatggttgcggaagcagc

SEQ ID NO: 2562025 - DNA, 25 bp, Homo sapien
tgcattaaggaacaagctgggctgt

SEQ ID NO: 2562026 - DNA, 25 bp, Homo sapien
caattgtgaaatctgggctaggctg

SEQ ID NO: 2562027 - DNA, 25 bp, Homo sapien
ctgagttgctcagggatcctaagag

SEQ ID NO: 2562028 - DNA, 25 bp, Homo sapien
ggaggtaccttatagctgtaatgca

SEQ ID NO: 2562029 - DNA, 25 bp, Homo sapien
taagaagctgtacggatgtgatgaa

SEQ ID NO: 2562030 - DNA, 25 bp, Homo sapien
cctggagaaaacctctgtcaatgct

SEQ ID NO: 2562031 - DNA, 25 bp, Homo sapien
ggtaactttcatcagagctccggag

SEQ ID NO: 2562032 - DNA, 25 bp, Homo sapien
ttatttctcctaagactgagcagag

SEQ ID NO: 2562033 - DNA, 25 bp, Homo sapien
gagtcatcttgttttttcaagccta

SEQ ID NO: 2562034 - DNA, 25 bp, Homo sapien
aaatctgcttgaaaatagagataag

SEQ ID NO: 2562035 - DNA, 25 bp, Homo sapien
aaaatcagtttgttacagctcctcc

SEQ ID NO: 2562036 - DNA, 25 bp, Homo sapien
aggcgaggggcttgcctccattcgt

SEQ ID NO: 2562037 - DNA, 25 bp, Homo sapien
ttgcctccattcgtcaaggctggtg

SEQ ID NO: 2562038 - DNA, 25 bp, Homo sapien
cctccattcgtcaaggctggtgaaa

SEQ ID NO: 2562039 - DNA, 25 bp, Homo sapien
gggcttgcctccattcgtcaaggct

SEQ ID NO: 2562040 - DNA, 25 bp, Homo sapien
ccaaatacaatagcagcccaaaatc

SEQ ID NO: 2562041 - DNA, 25 bp, Homo sapien
aaatacaatagcagcccaaaatcag

SEQ ID NO: 2562042 - DNA, 25 bp, Homo sapien
ttagctcctccaaatacaatagcag

SEQ ID NO: 2562043 - DNA, 25 bp, Homo sapien
ctttaggaataacttgaatgtattt

SEQ ID NO: 2562044 - DNA, 25 bp, Homo sapien
tcattccagggtgtcaggccatgct

SEQ ID NO: 2562045 - DNA, 25 bp, Homo sapien
catcttgccaaagattttgagagac

SEQ ID NO: 2562046 - DNA, 25 bp, Homo sapien
tcttcatcaaattggccaggtcctc

SEQ ID NO: 2562047 - DNA, 25 bp, Homo sapien
caaagattttgagagacacactcca

SEQ ID NO: 2562048 - DNA, 25 bp, Homo sapien
tcatctggtcctatagtctgggccg

SEQ ID NO: 2562049 - DNA, 25 bp, Homo sapien
catcatctggtcctatagtctgggc

SEQ ID NO: 2562050 - DNA, 25 bp, Homo sapien
ggcatcatctggtcctatagtctgg

SEQ ID NO: 2562051 - DNA, 25 bp, Homo sapien
tctggtcctatagtctgggccgacc

SEQ ID NO: 2562052 - DNA, 25 bp, Homo sapien
caaagacttcttgtcccaagtgatg

SEQ ID NO: 2562053 - DNA, 25 bp, Homo sapien
tcttcaggctttccagccaaagact

SEQ ID NO: 2562054 - DNA, 25 bp, Homo sapien
tctctgcaattccatgatggaaatc

SEQ ID NO: 2562055 - DNA, 25 bp, Homo sapien
ttcttgtcccaagtgatgcaaaatt

SEQ ID NO: 2562056 - DNA, 25 bp, Homo sapien
gggtccagtcttcgcacagtgcaaa

SEQ ID NO: 2562057 - DNA, 25 bp, Homo sapien
tctgctggtagagactgccctctgc

SEQ ID NO: 2562058 - DNA, 25 bp, Homo sapien
gctgggccagtcctttgatatcaat

SEQ ID NO: 2562059 - DNA, 25 bp, Homo sapien
gctccctgaagcaccacgatctgtg

SEQ ID NO: 2562060 - DNA, 25 bp, Homo sapien
gttgggtagactaggagagcctcca

SEQ ID NO: 2562061 - DNA, 25 bp, Homo sapien
tcctttggcagcgacttggcacagt

SEQ ID NO: 2562062 - DNA, 25 bp, Homo sapien
ttgggaaacatctcattgcctggct

SEQ ID NO: 2562063 - DNA, 25 bp, Homo sapien
caaacaccggcagtgcttaaggcag

SEQ ID NO: 2562064 - DNA, 25 bp, Homo sapien
gcaagagcatccagtgcagctccac

SEQ ID NO: 2562065 - DNA, 25 bp, Homo sapien
tttggaaaggcaagagcatccagtg

SEQ ID NO: 2562066 - DNA, 25 bp, Homo sapien
tagctctcccgtttcccatccactc

SEQ ID NO: 2562067 - DNA, 25 bp, Homo sapien
cactccagaggtcttatttgtccaa

SEQ ID NO: 2562068 - DNA, 25 bp, Homo sapien
cttgccaacagtgagtaatgcgatc

SEQ ID NO: 2562069 - DNA, 25 bp, Homo sapien
caaggttgctatggtacaggtccaa

SEQ ID NO: 2562070 - DNA, 25 bp, Homo sapien
catttgtatgaagcacagaacagag

SEQ ID NO: 2562071 - DNA, 25 bp, Homo sapien
ttgggtgccttagttcatgatgcag

SEQ ID NO: 2562072 - DNA, 25 bp, Homo sapien
gagatatcctgacaaccatcaggga

SEQ ID NO: 2562073 - DNA, 25 bp, Homo sapien
tatcactcccttttaggtcaagatg

SEQ ID NO: 2562074 - DNA, 25 bp, Homo sapien
tcaaggcctcacacaatgactttac

SEQ ID NO: 2562075 - DNA, 25 bp, Homo sapien
atcagggaaagtgataaatttcaac

SEQ ID NO: 2562076 - DNA, 25 bp, Homo sapien
ttggcccttcatgcatcaagcttca

SEQ ID NO: 2562077 - DNA, 25 bp, Homo sapien
gagtcaccactcagatcaatagtgt

SEQ ID NO: 2562078 - DNA, 25 bp, Homo sapien
tgagtccagggcttataaaaacttc

SEQ ID NO: 2562079 - DNA, 25 bp, Homo sapien
tcttaaaacctgtcacacaatgtgg

SEQ ID NO: 2562080 - DNA, 25 bp, Homo sapien
ggtataggtccataagatggtacag

SEQ ID NO: 2562081 - DNA, 25 bp, Homo sapien
gatggtacagatgctgttgacttag

SEQ ID NO: 2562082 - DNA, 25 bp, Homo sapien
gatgctgttgacttagagaacccat

SEQ ID NO: 2562083 - DNA, 25 bp, Homo sapien
tccataagatggtacagatgctgtt

SEQ ID NO: 2562084 - DNA, 25 bp, Homo sapien
gagtcactcaagaattgtttctcgt

SEQ ID NO: 2562085 - DNA, 25 bp, Homo sapien
gtcactcaagaattgtttctcgtca

SEQ ID NO: 2562086 - DNA, 25 bp, Homo sapien
caagaattgtttctcgtcatcaaaa

SEQ ID NO: 2562087 - DNA, 25 bp, Homo sapien
ctcaagaattgtttctcgtcatcaa

SEQ ID NO: 2562088 - DNA, 25 bp, Homo sapien
tacagttaggttgcaagattccagc

SEQ ID NO: 2562089 - DNA, 25 bp, Homo sapien
cactttggatgtcttaaggcctcac

SEQ ID NO: 2562090 - DNA, 25 bp, Homo sapien
cagtctctctagataacactttgga

SEQ ID NO: 2562091 - DNA, 25 bp, Homo sapien
tctggcttctgatgagagcattaga

SEQ ID NO: 2562092 - DNA, 25 bp, Homo sapien
tgctgatgagagccaaagaaagata

SEQ ID NO: 2562093 - DNA, 25 bp, Homo sapien
ggcatcactcataagctttactcca

SEQ ID NO: 2562094 - DNA, 25 bp, Homo sapien
aggctcttcagagtacattgtgcat

SEQ ID NO: 2562095 - DNA, 25 bp, Homo sapien
gtacattgtgcatgttgcagggcat

SEQ ID NO: 2562096 - DNA, 25 bp, Homo sapien
ttcactccattgtcttgtagccagt

SEQ ID NO: 2562097 - DNA, 25 bp, Homo sapien
cctagatccagatgcgtcaggctct

SEQ ID NO: 2562098 - DNA, 25 bp, Homo sapien
tgccgaaagacatcacacagaagct

SEQ ID NO: 2562099 - DNA, 25 bp, Homo sapien
tgtagccagtttgatcctagatcca

SEQ ID NO: 2562100 - DNA, 25 bp, Homo sapien
tgcaaatcgttgttcccaaggtcca

SEQ ID NO: 2562101 - DNA, 25 bp, Homo sapien
cgagcctctgaatgttacagtttgg

SEQ ID NO: 2562102 - DNA, 25 bp, Homo sapien
gatccagacaacatgcattagtgag

SEQ ID NO: 2562103 - DNA, 25 bp, Homo sapien
ggctcctcaggtttgggttattcaa

SEQ ID NO: 2562104 - DNA, 25 bp, Homo sapien
gaacttgtagtttacacttaggaga

SEQ ID NO: 2562105 - DNA, 25 bp, Homo sapien
cctaaggtattctgtgtcagattca

SEQ ID NO: 2562106 - DNA, 25 bp, Homo sapien
acttcacaattccttcatatcctaa

SEQ ID NO: 2562107 - DNA, 25 bp, Homo sapien
cctagaacttgtagtttacacttag

SEQ ID NO: 2562108 - DNA, 25 bp, Homo sapien
caatctggcttaatgattaagtgtg

SEQ ID NO: 2562109 - DNA, 25 bp, Homo sapien
tcttcattatgatagttacaatctg

SEQ ID NO: 2562110 - DNA, 25 bp, Homo sapien
tgatagttacaatctggcttaatga

SEQ ID NO: 2562111 - DNA, 25 bp, Homo sapien
ttcctcatcaaatgcctctttgcac

SEQ ID NO: 2562112 - DNA, 25 bp, Homo sapien
gccaagtgcactatctctgggcata

SEQ ID NO: 2562113 - DNA, 25 bp, Homo sapien
tattttagcctctcgaccactgtgt

SEQ ID NO: 2562114 - DNA, 25 bp, Homo sapien
aagtagatgaatggtatctgacagc

SEQ ID NO: 2562115 - DNA, 25 bp, Homo sapien
tctgaagctaagcacccaagtctgg

SEQ ID NO: 2562116 - DNA, 25 bp, Homo sapien
cttgggcagcttggaaatcctgttg

SEQ ID NO: 2562117 - DNA, 25 bp, Homo sapien
tttgttggagttttccttgggcagc

SEQ ID NO: 2562118 - DNA, 25 bp, Homo sapien
ctttgttggagttttccttgggcag

SEQ ID NO: 2562119 - DNA, 25 bp, Homo sapien
tttccttgggcagcttggaaatcct

SEQ ID NO: 2562120 - DNA, 25 bp, Homo sapien
cccctgcgggcaaagaactcagaac

SEQ ID NO: 2562121 - DNA, 25 bp, Homo sapien
gaatgctagccgttgtgggctctcg

SEQ ID NO: 2562122 - DNA, 25 bp, Homo sapien
tcggcgctgtccagggtcctgcttt

SEQ ID NO: 2562123 - DNA, 25 bp, Homo sapien
ggacctcggcccagattggcgaaat

SEQ ID NO: 2562124 - DNA, 25 bp, Homo sapien
tagaattgccaaacactagaactgt

SEQ ID NO: 2562125 - DNA, 25 bp, Homo sapien
cctccactatggaagaagttatgcc

SEQ ID NO: 2562126 - DNA, 25 bp, Homo sapien
tatgctctgtacgatatccattgtt

SEQ ID NO: 2562127 - DNA, 25 bp, Homo sapien
gagaattgctacgtatttctggtga

SEQ ID NO: 2562128 - DNA, 25 bp, Homo sapien
gggaggcggtgaggcggcgccagtc

SEQ ID NO: 2562129 - DNA, 25 bp, Homo sapien
aggcggcgccagtcgcagccttcga

SEQ ID NO: 2562130 - DNA, 25 bp, Homo sapien
ttgccggtcgaacggtcggtcagtg

SEQ ID NO: 2562131 - DNA, 25 bp, Homo sapien
gaacggtcggtcagtggcggtggga

SEQ ID NO: 2562132 - DNA, 25 bp, Homo sapien
aatgaacagcttccccgggcgatcc

SEQ ID NO: 2562133 - DNA, 25 bp, Homo sapien
tccccgggcgatccgcttcaaccat

SEQ ID NO: 2562134 - DNA, 25 bp, Homo sapien
ggtctttcatcaggagcacctcgac

SEQ ID NO: 2562135 - DNA, 25 bp, Homo sapien
tcgacgatgcggccatacttgccaa

SEQ ID NO: 2562136 - DNA, 25 bp, Homo sapien
cagggacttgccgttcatgtctctg

SEQ ID NO: 2562137 - DNA, 25 bp, Homo sapien
gccttggcgtctgcggggctttcaa

SEQ ID NO: 2562138 - DNA, 25 bp, Homo sapien
gacttgccgttcatgtctctggcgg

SEQ ID NO: 2562139 - DNA, 25 bp, Homo sapien
ttgccgttcatgtctctggcggcgg

SEQ ID NO: 2562140 - DNA, 25 bp, Homo sapien
tctcgaacgccggtttggtggcctg

SEQ ID NO: 2562141 - DNA, 25 bp, Homo sapien
gctctcgaacgccggtttggtggcc

SEQ ID NO: 2562142 - DNA, 25 bp, Homo sapien
cggctgctctcgaacgccggtttgg

SEQ ID NO: 2562143 - DNA, 25 bp, Homo sapien
gctgctctcgaacgccggtttggtg

SEQ ID NO: 2562144 - DNA, 25 bp, Homo sapien
aaatccgccgtgtagccgccgtcat

SEQ ID NO: 2562145 - DNA, 25 bp, Homo sapien
atcatcgggcccgccccgggatggg

SEQ ID NO: 2562146 - DNA, 25 bp, Homo sapien
gcaggtcgaaatccgccgtgtagcc

SEQ ID NO: 2562147 - DNA, 25 bp, Homo sapien
ggccgcaggtcgaaatccgccgtgt

SEQ ID NO: 2562148 - DNA, 25 bp, Homo sapien
ggtgggccgaccctgcgcggcggcg

SEQ ID NO: 2562149 - DNA, 25 bp, Homo sapien
ccctcccgcgcattccaccgccgct

SEQ ID NO: 2562150 - DNA, 25 bp, Homo sapien
acggccagggccctcccgcgcattc

SEQ ID NO: 2562151 - DNA, 25 bp, Homo sapien
cctcccgcgcattccaccgccgctg

SEQ ID NO: 2562152 - DNA, 25 bp, Homo sapien
cccgcacggccagggccctcccgcg

SEQ ID NO: 2562153 - DNA, 25 bp, Homo sapien
ccggcgcggtgggcctgagtagccg

SEQ ID NO: 2562154 - DNA, 25 bp, Homo sapien
cggcgcggtgggcctgagtagccgt

SEQ ID NO: 2562155 - DNA, 25 bp, Homo sapien
cgtaatcgcggtgggtgtactctcc

SEQ ID NO: 2562156 - DNA, 25 bp, Homo sapien
gatgatccccgtagtcacggtcgcg

SEQ ID NO: 2562157 - DNA, 25 bp, Homo sapien
cgtagctctcaaagggctctcgatg

SEQ ID NO: 2562158 - DNA, 25 bp, Homo sapien
tctcggtcgctgtagcctctcaagg

SEQ ID NO: 2562159 - DNA, 25 bp, Homo sapien
cgccgctgtaggcatcgggtgagta

SEQ ID NO: 2562160 - DNA, 25 bp, Homo sapien
cggccgccgctgtaggcatcgggtg

SEQ ID NO: 2562161 - DNA, 25 bp, Homo sapien
taggcatcgggtgagtagccccggt

SEQ ID NO: 2562162 - DNA, 25 bp, Homo sapien
tgctgtaactgtcgcggccgccgct

SEQ ID NO: 2562163 - DNA, 25 bp, Homo sapien
ctgtaagaatcacgctggggagggc

SEQ ID NO: 2562164 - DNA, 25 bp, Homo sapien
cagcccctttccatggacagagaga

SEQ ID NO: 2562165 - DNA, 25 bp, Homo sapien
acagagagagcccacgatctggtct

SEQ ID NO: 2562166 - DNA, 25 bp, Homo sapien
gagggcagcccctttccatggacag

SEQ ID NO: 2562167 - DNA, 25 bp, Homo sapien
tctctccaagcggcctcctagacgg

SEQ ID NO: 2562168 - DNA, 25 bp, Homo sapien
cctctctccaagcggcctcctagac

SEQ ID NO: 2562169 - DNA, 25 bp, Homo sapien
ctctctccaagcggcctcctagacg

SEQ ID NO: 2562170 - DNA, 25 bp, Homo sapien
tcctctctccaagcggcctcctaga

SEQ ID NO: 2562171 - DNA, 25 bp, Homo sapien
tgtaagaagactagtactcaggttc

SEQ ID NO: 2562172 - DNA, 25 bp, Homo sapien
tagctttgtggttggttggccaaac

SEQ ID NO: 2562173 - DNA, 25 bp, Homo sapien
taacaggagcttgttgaaagaaacg

SEQ ID NO: 2562174 - DNA, 25 bp, Homo sapien
taagagtagcatacaccaatccctc

SEQ ID NO: 2562175 - DNA, 25 bp, Homo sapien
caaataaatggtgttattcgggaag

SEQ ID NO: 2562176 - DNA, 25 bp, Homo sapien
ctcttctgagccactagtgtgtcct

SEQ ID NO: 2562177 - DNA, 25 bp, Homo sapien
atgaagtcctcccaaccatgagtat

SEQ ID NO: 2562178 - DNA, 25 bp, Homo sapien
tgatgaggttgagaatagttgataa

SEQ ID NO: 2562179 - DNA, 25 bp, Homo sapien
atggtggaagttctggtcccctcaa

SEQ ID NO: 2562180 - DNA, 25 bp, Homo sapien
cccatggtggaagttctggtcccct

SEQ ID NO: 2562181 - DNA, 25 bp, Homo sapien
gctttacttctgactggttaggaat

SEQ ID NO: 2562182 - DNA, 25 bp, Homo sapien
ttacttctgactggttaggaatggg

SEQ ID NO: 2562183 - DNA, 25 bp, Homo sapien
ggagctgaggactggttaattccat

SEQ ID NO: 2562184 - DNA, 25 bp, Homo sapien
taaggagctgaggactggttaattc

SEQ ID NO: 2562185 - DNA, 25 bp, Homo sapien
tccttaaggagctgaggactggtta

SEQ ID NO: 2562186 - DNA, 25 bp, Homo sapien
atccttaaggagctgaggactggtt

SEQ ID NO: 2562187 - DNA, 25 bp, Homo sapien
tcagctgataccttgagattgatac

SEQ ID NO: 2562188 - DNA, 25 bp, Homo sapien
cagctgataccttgagattgataca

SEQ ID NO: 2562189 - DNA, 25 bp, Homo sapien
gctgataccttgagattgatacatt

SEQ ID NO: 2562190 - DNA, 25 bp, Homo sapien
ctgtcagctgataccttgagattga

SEQ ID NO: 2562191 - DNA, 25 bp, Homo sapien
tacagcaccaatacagcggtgtttc

SEQ ID NO: 2562192 - DNA, 25 bp, Homo sapien
agaactctggtgatgtagtgacatt

SEQ ID NO: 2562193 - DNA, 25 bp, Homo sapien
cagcggtgtttcttgcgataattaa

SEQ ID NO: 2562194 - DNA, 25 bp, Homo sapien
gaacaatgtacagcaccaatacagc

SEQ ID NO: 2562195 - DNA, 25 bp, Homo sapien
gaactttacatctcaggctaccggc

SEQ ID NO: 2562196 - DNA, 25 bp, Homo sapien
acatctcaggctaccggcttcaaca

SEQ ID NO: 2562197 - DNA, 25 bp, Homo sapien
tcatatcgaactttacatctcaggc

SEQ ID NO: 2562198 - DNA, 25 bp, Homo sapien
aatcatcatatcgaactttacatct

SEQ ID NO: 2562199 - DNA, 25 bp, Homo sapien
ctcctctctttctcctcaatactct

SEQ ID NO: 2562200 - DNA, 25 bp, Homo sapien
ccactcctctctttctcctcaatac

SEQ ID NO: 2562201 - DNA, 25 bp, Homo sapien
ttatctgttcccactcctctctttc

SEQ ID NO: 2562202 - DNA, 25 bp, Homo sapien
tatctgttcccactcctctctttct

SEQ ID NO: 2562203 - DNA, 25 bp, Homo sapien
attttttcactttgatgcctaatgg

SEQ ID NO: 2562204 - DNA, 25 bp, Homo sapien
cactttgatgcctaatggtgcaata

SEQ ID NO: 2562205 - DNA, 25 bp, Homo sapien
caatcattcaccactattttttcac

SEQ ID NO: 2562206 - DNA, 25 bp, Homo sapien
gcctaatggtgcaatatgtttgttt

SEQ ID NO: 2562207 - DNA, 25 bp, Homo sapien
tgaaatcaccccatgtttttggttg

SEQ ID NO: 2562208 - DNA, 25 bp, Homo sapien
gcagctttagttccagtgtccacca

SEQ ID NO: 2562209 - DNA, 25 bp, Homo sapien
tgtttttggttgcagctttagttcc

SEQ ID NO: 2562210 - DNA, 25 bp, Homo sapien
ctgaaatcaccccatgtttttggtt

SEQ ID NO: 2562211 - DNA, 25 bp, Homo sapien
cagagtgtaaggaacttgatgtcca

SEQ ID NO: 2562212 - DNA, 25 bp, Homo sapien
caaagacctgtgctcttaaagagct

SEQ ID NO: 2562213 - DNA, 25 bp, Homo sapien
caacataatcatccggcagatgctc

SEQ ID NO: 2562214 - DNA, 25 bp, Homo sapien
ttacatagtgtgcttgattggccca

SEQ ID NO: 2562215 - DNA, 25 bp, Homo sapien
cattactggcttcttcatatcattc

SEQ ID NO: 2562216 - DNA, 25 bp, Homo sapien
gcattactggcttcttcatatcatt

SEQ ID NO: 2562217 - DNA, 25 bp, Homo sapien
ctgcattactggcttcttcatatca

SEQ ID NO: 2562218 - DNA, 25 bp, Homo sapien
tgcattactggcttcttcatatcat

SEQ ID NO: 2562219 - DNA, 25 bp, Homo sapien
tttgaaagctaaatctccctccacc

SEQ ID NO: 2562220 - DNA, 25 bp, Homo sapien
ctttgaaagctaaatctccctccac

SEQ ID NO: 2562221 - DNA, 25 bp, Homo sapien
cctttgaaagctaaatctccctcca

SEQ ID NO: 2562222 - DNA, 25 bp, Homo sapien
tcaccgccagggacctgccgagaaa

SEQ ID NO: 2562223 - DNA, 25 bp, Homo sapien
agaaacggtgcgagcctgagcccga

SEQ ID NO: 2562224 - DNA, 25 bp, Homo sapien
cagccggtcggtcaggctttctctc

SEQ ID NO: 2562225 - DNA, 25 bp, Homo sapien
ctcccaccggttgcatgcagctctt

SEQ ID NO: 2562226 - DNA, 25 bp, Homo sapien
gcccccccgcatcctcggaccgcgc

SEQ ID NO: 2562227 - DNA, 25 bp, Homo sapien
cccgcatcctcggaccgcgccgggc

SEQ ID NO: 2562228 - DNA, 25 bp, Homo sapien
ccgcatcctcggaccgcgccgggca

SEQ ID NO: 2562229 - DNA, 25 bp, Homo sapien
cgcatcctcggaccgcgccgggcag

SEQ ID NO: 2562230 - DNA, 25 bp, Homo sapien
ggtctggcacggtcccgcaggtggt

SEQ ID NO: 2562231 - DNA, 25 bp, Homo sapien
gagccggggtctggcacggtcccgc

SEQ ID NO: 2562232 - DNA, 25 bp, Homo sapien
cctggtgacagagcgcgtccctggc

SEQ ID NO: 2562233 - DNA, 25 bp, Homo sapien
cggggtctggcacggtcccgcaggt

SEQ ID NO: 2562234 - DNA, 25 bp, Homo sapien
tccatgccgtgcgacccgccgggaa

SEQ ID NO: 2562235 - DNA, 25 bp, Homo sapien
gtcgctggtcgagcctagcgcccag

SEQ ID NO: 2562236 - DNA, 25 bp, Homo sapien
cgaaccccatcgtggccggcggtag

SEQ ID NO: 2562237 - DNA, 25 bp, Homo sapien
cggtagtcgctggtcgagcctagcg

SEQ ID NO: 2562238 - DNA, 25 bp, Homo sapien
agtagccagtaacggatgagacgac

SEQ ID NO: 2562239 - DNA, 25 bp, Homo sapien
cattttccagtagccagtaacggat

SEQ ID NO: 2562240 - DNA, 25 bp, Homo sapien
tttccagtagccagtaacggatgag

SEQ ID NO: 2562241 - DNA, 25 bp, Homo sapien
tcaagcaaacattggaaggaatgca

SEQ ID NO: 2562242 - DNA, 25 bp, Homo sapien
tcccccaacagggcactataactac

SEQ ID NO: 2562243 - DNA, 25 bp, Homo sapien
atctgggtgcggtactcccccaaca

SEQ ID NO: 2562244 - DNA, 25 bp, Homo sapien
ctgggtgcggtactcccccaacagg

SEQ ID NO: 2562245 - DNA, 25 bp, Homo sapien
gaaatctgggtgcggtactccccca

SEQ ID NO: 2562246 - DNA, 25 bp, Homo sapien
atattttataaaacccctcagtcat

SEQ ID NO: 2562247 - DNA, 25 bp, Homo sapien
gatattttataaaacccctcagtca

SEQ ID NO: 2562248 - DNA, 25 bp, Homo sapien
agagcagccatagagagagcagggt

SEQ ID NO: 2562249 - DNA, 25 bp, Homo sapien
aaagagcagccatagagagagcagg

SEQ ID NO: 2562250 - DNA, 25 bp, Homo sapien
gagcagccatagagagagcagggtt

SEQ ID NO: 2562251 - DNA, 25 bp, Homo sapien
aagagcagccatagagagagcaggg

SEQ ID NO: 2562252 - DNA, 25 bp, Homo sapien
ctttcaataggccaaatggccccac

SEQ ID NO: 2562253 - DNA, 25 bp, Homo sapien
ggtttcaaaagggatggcaattgtc

SEQ ID NO: 2562254 - DNA, 25 bp, Homo sapien
tttcaaaagggatggcaattgtctt

SEQ ID NO: 2562255 - DNA, 25 bp, Homo sapien
tcaataggccaaatggccccactga

SEQ ID NO: 2562256 - DNA, 25 bp, Homo sapien
gcagaatgaccctctcatccactca

SEQ ID NO: 2562257 - DNA, 25 bp, Homo sapien
gggcagaatgaccctctcatccact

SEQ ID NO: 2562258 - DNA, 25 bp, Homo sapien
ttgggagccgactgcggaaggccat

SEQ ID NO: 2562259 - DNA, 25 bp, Homo sapien
atccactcatcccttgggagccgac

SEQ ID NO: 2562260 - DNA, 25 bp, Homo sapien
aaagatcaaaggtcagtgtggtcat

SEQ ID NO: 2562261 - DNA, 25 bp, Homo sapien
tcctggatccccgtctgggtggaga

SEQ ID NO: 2562262 - DNA, 25 bp, Homo sapien
gagacacgccaaagagagcgagacc

SEQ ID NO: 2562263 - DNA, 25 bp, Homo sapien
gtgaccacaagggtcagcaggctca

SEQ ID NO: 2562264 - DNA, 25 bp, Homo sapien
tccaagatacgaagagagacacgcc

SEQ ID NO: 2562265 - DNA, 25 bp, Homo sapien
cagccaagtctaggaagtgatccac

SEQ ID NO: 2562266 - DNA, 25 bp, Homo sapien
cagaaaagtccttggcgggcaaatt

SEQ ID NO: 2562267 - DNA, 25 bp, Homo sapien
ttcaaggtcattgtagggaaccgga

SEQ ID NO: 2562268 - DNA, 25 bp, Homo sapien
cacttggccgattaagtcatgacga

SEQ ID NO: 2562269 - DNA, 25 bp, Homo sapien
cacaaaaatgaagaaatgctggact

SEQ ID NO: 2562270 - DNA, 25 bp, Homo sapien
caaaaatgaagaaatgctggactca

SEQ ID NO: 2562271 - DNA, 25 bp, Homo sapien
acaaaaatgaagaaatgctggactc

SEQ ID NO: 2562272 - DNA, 25 bp, Homo sapien
aaaaatgaagaaatgctggactcac

SEQ ID NO: 2562273 - DNA, 25 bp, Homo sapien
tcttagctgcagactacagttaata

SEQ ID NO: 2562274 - DNA, 25 bp, Homo sapien
ggttccattcagcacaaacaacctg

SEQ ID NO: 2562275 - DNA, 25 bp, Homo sapien
tgtcagagtcaggtaatggtctctt

SEQ ID NO: 2562276 - DNA, 25 bp, Homo sapien
tacagttaatagaatgccaggttcc

SEQ ID NO: 2562277 - DNA, 25 bp, Homo sapien
ctttctatttctggaatgccaacac

SEQ ID NO: 2562278 - DNA, 25 bp, Homo sapien
ctaagaatgttcaattttcctttct

SEQ ID NO: 2562279 - DNA, 25 bp, Homo sapien
ttctatttctggaatgccaacacac

SEQ ID NO: 2562280 - DNA, 25 bp, Homo sapien
ctatttctggaatgccaacacacct

SEQ ID NO: 2562281 - DNA, 25 bp, Homo sapien
gaaacggaccagtttgccacaagtg

SEQ ID NO: 2562282 - DNA, 25 bp, Homo sapien
tgctgagtcttcaaccacattggcc

SEQ ID NO: 2562283 - DNA, 25 bp, Homo sapien
tggcctttccactgagactacaacg

SEQ ID NO: 2562284 - DNA, 25 bp, Homo sapien
actgccatctgtactgaccctgaaa

SEQ ID NO: 2562285 - DNA, 25 bp, Homo sapien
ggtttcagggtcagtacagatggca

SEQ ID NO: 2562286 - DNA, 25 bp, Homo sapien
aatgctggctgttgtagtgcccggc

SEQ ID NO: 2562287 - DNA, 25 bp, Homo sapien
tggccaatgtggttgaagactcagc

SEQ ID NO: 2562288 - DNA, 25 bp, Homo sapien
cagtagcagtatcagttgaagtgcc

SEQ ID NO: 2562289 - DNA, 25 bp, Homo sapien
ccccagttgttgtggcagtggtgtc

SEQ ID NO: 2562290 - DNA, 25 bp, Homo sapien
gtggctgtaactccagtggaagtac

SEQ ID NO: 2562291 - DNA, 25 bp, Homo sapien
gtggtgtctgttgtggctgtaactc

SEQ ID NO: 2562292 - DNA, 25 bp, Homo sapien
tctgttgtggctgtaactccagtgg

SEQ ID NO: 2562293 - DNA, 25 bp, Homo sapien
cagtagactgttcagttgtagtgct

SEQ ID NO: 2562294 - DNA, 25 bp, Homo sapien
tgcagtagactgttcagttgtagtg

SEQ ID NO: 2562295 - DNA, 25 bp, Homo sapien
ggtagtggttgctgttgtagttgca

SEQ ID NO: 2562296 - DNA, 25 bp, Homo sapien
gttgtgggttccatagaggtggtag

SEQ ID NO: 2562297 - DNA, 25 bp, Homo sapien
taccctcataagtggaagccaaggc

SEQ ID NO: 2562298 - DNA, 25 bp, Homo sapien
tgtgagtcagcttcaataccctcat

SEQ ID NO: 2562299 - DNA, 25 bp, Homo sapien
cctcataagtggaagccaaggccat

SEQ ID NO: 2562300 - DNA, 25 bp, Homo sapien
gtcagcttcaataccctcataagtg

SEQ ID NO: 2562301 - DNA, 25 bp, Homo sapien
aataaaactgcatccgacagcatca

SEQ ID NO: 2562302 - DNA, 25 bp, Homo sapien
cagggctcaagtaaataaaactgca

SEQ ID NO: 2562303 - DNA, 25 bp, Homo sapien
aaaactgcatccgacagcatcaggg

SEQ ID NO: 2562304 - DNA, 25 bp, Homo sapien
gggctcaagtaaataaaactgcatc

SEQ ID NO: 2562305 - DNA, 25 bp, Homo sapien
gtcttctctgctgctatggaagcca

SEQ ID NO: 2562306 - DNA, 25 bp, Homo sapien
cttctctgctgctatggaagccaat

SEQ ID NO: 2562307 - DNA, 25 bp, Homo sapien
attgttgtcttctctgctgctatgg

SEQ ID NO: 2562308 - DNA, 25 bp, Homo sapien
tctccattgttgtcttctctgctgc

SEQ ID NO: 2562309 - DNA, 25 bp, Homo sapien
ttaagtgttgagaaacatgaagctc

SEQ ID NO: 2562310 - DNA, 25 bp, Homo sapien
taagtgttgagaaacatgaagctcc

SEQ ID NO: 2562311 - DNA, 25 bp, Homo sapien
aagtgttgagaaacatgaagctcca

SEQ ID NO: 2562312 - DNA, 25 bp, Homo sapien
ctgcagaagacaaaatgcgggtccc

SEQ ID NO: 2562313 - DNA, 25 bp, Homo sapien
ccttcagtctgcttgctgatttcag

SEQ ID NO: 2562314 - DNA, 25 bp, Homo sapien
agaagacaaaatgcgggtcccttca

SEQ ID NO: 2562315 - DNA, 25 bp, Homo sapien
tcagcatttgaacctggctgggttt

SEQ ID NO: 2562316 - DNA, 25 bp, Homo sapien
ctacaaggggcactgcttatgcaca

SEQ ID NO: 2562317 - DNA, 25 bp, Homo sapien
tacaaggggcactgcttatgcacac

SEQ ID NO: 2562318 - DNA, 25 bp, Homo sapien
tgactgagtttctctaaagtgaaga

SEQ ID NO: 2562319 - DNA, 25 bp, Homo sapien
aagttatcaatcagaacccagaagg

SEQ ID NO: 2562320 - DNA, 25 bp, Homo sapien
taaacatagctatcctcagggtcat

SEQ ID NO: 2562321 - DNA, 25 bp, Homo sapien
ccctggtgatgacagattaagcatc

SEQ ID NO: 2562322 - DNA, 25 bp, Homo sapien
taaatgtcagactatagtttcaatt

SEQ ID NO: 2562323 - DNA, 25 bp, Homo sapien
aatggtttacaatagtcatggcata

SEQ ID NO: 2562324 - DNA, 25 bp, Homo sapien
ctagactctattatatcccattaac

SEQ ID NO: 2562325 - DNA, 25 bp, Homo sapien
aaagatcacagtatgtcccttaaga

SEQ ID NO: 2562326 - DNA, 25 bp, Homo sapien
tgtttcatctacttgcctaagattc

SEQ ID NO: 2562327 - DNA, 25 bp, Homo sapien
gcctaagattcccttgcattggtcc

SEQ ID NO: 2562328 - DNA, 25 bp, Homo sapien
tctacttgcctaagattcccttgca

SEQ ID NO: 2562329 - DNA, 25 bp, Homo sapien
tcagtaaaccttgttgatgtttcat

SEQ ID NO: 2562330 - DNA, 25 bp, Homo sapien
gatgtcggctgtaccgctttgaaca

SEQ ID NO: 2562331 - DNA, 25 bp, Homo sapien
tactgtgtattgataactatttaca

SEQ ID NO: 2562332 - DNA, 25 bp, Homo sapien
cataaagtaaactatacacggtagt

SEQ ID NO: 2562333 - DNA, 25 bp, Homo sapien
gctttgaacacagtcgtacgcgatg

SEQ ID NO: 2562334 - DNA, 25 bp, Homo sapien
gtcaagtgccggctcatccagagca

SEQ ID NO: 2562335 - DNA, 25 bp, Homo sapien
tcaagtgccggctcatccagagcac

SEQ ID NO: 2562336 - DNA, 25 bp, Homo sapien
ctgtcaagtgccggctcatccagag

SEQ ID NO: 2562337 - DNA, 25 bp, Homo sapien
tgtcaagtgccggctcatccagagc

SEQ ID NO: 2562338 - DNA, 25 bp, Homo sapien
tactgggtgttcgtctgaaatcagg

SEQ ID NO: 2562339 - DNA, 25 bp, Homo sapien
tcaagaaccatattcatatggagct

SEQ ID NO: 2562340 - DNA, 25 bp, Homo sapien
ttgtgctgaatatggtcaagaacca

SEQ ID NO: 2562341 - DNA, 25 bp, Homo sapien
tgttaaatccaagcacaaaattgtg

SEQ ID NO: 2562342 - DNA, 25 bp, Homo sapien
tccattacattcggattgattctat

SEQ ID NO: 2562343 - DNA, 25 bp, Homo sapien
tacattcggattgattctattcaac

SEQ ID NO: 2562344 - DNA, 25 bp, Homo sapien
cattacattcggattgattctattc

SEQ ID NO: 2562345 - DNA, 25 bp, Homo sapien
attcggattgattctattcaactcc

SEQ ID NO: 2562346 - DNA, 25 bp, Homo sapien
aatcaacgcgagtgcaggggaatgg

SEQ ID NO: 2562347 - DNA, 25 bp, Homo sapien
aatggaatggaatcaacgcgagtgc

SEQ ID NO: 2562348 - DNA, 25 bp, Homo sapien
tggaatggaatcaacgcgagtgcag

SEQ ID NO: 2562349 - DNA, 25 bp, Homo sapien
tggaatcaacgcgagtgcaggggaa

SEQ ID NO: 2562350 - DNA, 25 bp, Homo sapien
agggaattgaatagaatcaatccga

SEQ ID NO: 2562351 - DNA, 25 bp, Homo sapien
gaattgaatagaatcaatccgaatg

SEQ ID NO: 2562352 - DNA, 25 bp, Homo sapien
ataatggagtgtaagggaattgaat

SEQ ID NO: 2562353 - DNA, 25 bp, Homo sapien
attgaatagaatcaatccgaatgta

SEQ ID NO: 2562354 - DNA, 25 bp, Homo sapien
atggaatggaaactacccgaatgga

SEQ ID NO: 2562355 - DNA, 25 bp, Homo sapien
caatggaatggagaggaatggaatg

SEQ ID NO: 2562356 - DNA, 25 bp, Homo sapien
aacccgagtgcaatggaatggagag

SEQ ID NO: 2562357 - DNA, 25 bp, Homo sapien
tggaatggaatggaaactacccgaa

SEQ ID NO: 2562358 - DNA, 25 bp, Homo sapien
gaatgtattcgagtggaatggaaag

SEQ ID NO: 2562359 - DNA, 25 bp, Homo sapien
aataggagggaatgtattcgagtgg

SEQ ID NO: 2562360 - DNA, 25 bp, Homo sapien
taggagggaatgtattcgagtggaa

SEQ ID NO: 2562361 - DNA, 25 bp, Homo sapien
gagggaatgtattcgagtggaatgg

SEQ ID NO: 2562362 - DNA, 25 bp, Homo sapien
gaatggaattaacccgaatacaatg

SEQ ID NO: 2562363 - DNA, 25 bp, Homo sapien
aatggaatcaactcgattgtaatgg

SEQ ID NO: 2562364 - DNA, 25 bp, Homo sapien
tggaatggaattaacccgaatacaa

SEQ ID NO: 2562365 - DNA, 25 bp, Homo sapien
tggaatcaactcgattgtaatggaa

SEQ ID NO: 2562366 - DNA, 25 bp, Homo sapien
atcaatcattccgagtggaatggaa

SEQ ID NO: 2562367 - DNA, 25 bp, Homo sapien
tcaatcattccgagtggaatggaag

SEQ ID NO: 2562368 - DNA, 25 bp, Homo sapien
tccattcaagttgaatccattccat

SEQ ID NO: 2562369 - DNA, 25 bp, Homo sapien
cattacattcggattgattctattc

SEQ ID NO: 2562370 - DNA, 25 bp, Homo sapien
tccattacattcggattgattctat

SEQ ID NO: 2562371 - DNA, 25 bp, Homo sapien
attcggattgattctattcaactcc

SEQ ID NO: 2562372 - DNA, 25 bp, Homo sapien
tacattcggattgattctattcaac

SEQ ID NO: 2562373 - DNA, 25 bp, Homo sapien
gttgattccattccattgcattcca

SEQ ID NO: 2562374 - DNA, 25 bp, Homo sapien
actcgggttgattccattccattgc

SEQ ID NO: 2562375 - DNA, 25 bp, Homo sapien
ctcgggttgattccattccattgca

SEQ ID NO: 2562376 - DNA, 25 bp, Homo sapien
tccctcctattccactcggaacgat

SEQ ID NO: 2562377 - DNA, 25 bp, Homo sapien
cctcctattccactcggaacgattc

SEQ ID NO: 2562378 - DNA, 25 bp, Homo sapien
ttccctcctattccactcggaacga

SEQ ID NO: 2562379 - DNA, 25 bp, Homo sapien
tcctattccactcggaacgattcca

SEQ ID NO: 2562380 - DNA, 25 bp, Homo sapien
cattccagttcgttccattccattc

SEQ ID NO: 2562381 - DNA, 25 bp, Homo sapien
ttccagttcgttccattccattcta

SEQ ID NO: 2562382 - DNA, 25 bp, Homo sapien
tccattccagttcgttccattccat

SEQ ID NO: 2562383 - DNA, 25 bp, Homo sapien
attccattccagttcgttccattcc

SEQ ID NO: 2562384 - DNA, 25 bp, Homo sapien
attccattcgggttgttccattcca

SEQ ID NO: 2562385 - DNA, 25 bp, Homo sapien
cttactctccattacattccattcc

SEQ ID NO: 2562386 - DNA, 25 bp, Homo sapien
cattccattccattcgggttgttcc

SEQ ID NO: 2562387 - DNA, 25 bp, Homo sapien
ttccattccattcgggttgttccat

SEQ ID NO: 2562388 - DNA, 25 bp, Homo sapien
tccattcaagttgaatccattccat

SEQ ID NO: 2562389 - DNA, 25 bp, Homo sapien
attccactcgggttgattccattcc

SEQ ID NO: 2562390 - DNA, 25 bp, Homo sapien
gccattccactcgggttgattccat

SEQ ID NO: 2562391 - DNA, 25 bp, Homo sapien
cattccactcgggttgattccattc

SEQ ID NO: 2562392 - DNA, 25 bp, Homo sapien
atgccattccactcgggttgattcc

SEQ ID NO: 2562393 - DNA, 25 bp, Homo sapien
ctattccattccattcccttccttt

SEQ ID NO: 2562394 - DNA, 25 bp, Homo sapien
gttgattccattctattccattcta

SEQ ID NO: 2562395 - DNA, 25 bp, Homo sapien
ttctattccattccattcccttcct

SEQ ID NO: 2562396 - DNA, 25 bp, Homo sapien
cgcgttgattccattctattccatt

SEQ ID NO: 2562397 - DNA, 25 bp, Homo sapien
ttccattccactcgggttgattcca

SEQ ID NO: 2562398 - DNA, 25 bp, Homo sapien
cattctattccgtaccattccattc

SEQ ID NO: 2562399 - DNA, 25 bp, Homo sapien
attccattctattccgtaccattcc

SEQ ID NO: 2562400 - DNA, 25 bp, Homo sapien
ttccattccattctattccgtacca

SEQ ID NO: 2562401 - DNA, 25 bp, Homo sapien
tccattccattctattccgtaccat

SEQ ID NO: 2562402 - DNA, 25 bp, Homo sapien
tccactcgaatactttccctcctat

SEQ ID NO: 2562403 - DNA, 25 bp, Homo sapien
ttccattccactcgaatactttccc

SEQ ID NO: 2562404 - DNA, 25 bp, Homo sapien
aatactttccctcctattccactcg

SEQ ID NO: 2562405 - DNA, 25 bp, Homo sapien
tactttccctcctattccactcgga

SEQ ID NO: 2562406 - DNA, 25 bp, Homo sapien
attccattccactcgggttgattcc

SEQ ID NO: 2562407 - DNA, 25 bp, Homo sapien
ccattccactcgggttgattccatt

SEQ ID NO: 2562408 - DNA, 25 bp, Homo sapien
tccattccactcgggttgattccat

SEQ ID NO: 2562409 - DNA, 25 bp, Homo sapien
ttccattccactcgggttgattcca

SEQ ID NO: 2562410 - DNA, 25 bp, Homo sapien
attccactcgggttgattccattct

SEQ ID NO: 2562411 - DNA, 25 bp, Homo sapien
ctcgggttgattccattctatttgt

SEQ ID NO: 2562412 - DNA, 25 bp, Homo sapien
gggttgattccattctatttgtttc

SEQ ID NO: 2562413 - DNA, 25 bp, Homo sapien
ccactcgggttgattccattctatt

SEQ ID NO: 2562414 - DNA, 25 bp, Homo sapien
cattcccctgcactcgcgttgattc

SEQ ID NO: 2562415 - DNA, 25 bp, Homo sapien
atggatttaccccgaatagaatgga

SEQ ID NO: 2562416 - DNA, 25 bp, Homo sapien
gaatggaatggatttaccccgaata

SEQ ID NO: 2562417 - DNA, 25 bp, Homo sapien
tggatttaccccgaatagaatggaa

SEQ ID NO: 2562418 - DNA, 25 bp, Homo sapien
tggaatggatttaccccgaatagaa

SEQ ID NO: 2562419 - DNA, 25 bp, Homo sapien
cccgtaatggaatggaaaggaatgg

SEQ ID NO: 2562420 - DNA, 25 bp, Homo sapien
gattcacccgtaatggaatggaaag

SEQ ID NO: 2562421 - DNA, 25 bp, Homo sapien
attcacccgtaatggaatggaaagg

SEQ ID NO: 2562422 - DNA, 25 bp, Homo sapien
atgcaatggaatggattcaacttga

SEQ ID NO: 2562423 - DNA, 25 bp, Homo sapien
tggaatggattcaacttgaatggaa

SEQ ID NO: 2562424 - DNA, 25 bp, Homo sapien
aacccgagtgcaatcaaatggaatc

SEQ ID NO: 2562425 - DNA, 25 bp, Homo sapien
cccgagtgcaatcaaatggaatcga

SEQ ID NO: 2562426 - DNA, 25 bp, Homo sapien
aatggaatcaactcgattgtaatgg

SEQ ID NO: 2562427 - DNA, 25 bp, Homo sapien
tggaatggaattaacccgaatacaa

SEQ ID NO: 2562428 - DNA, 25 bp, Homo sapien
atggaatcaactcgattgtaatgga

SEQ ID NO: 2562429 - DNA, 25 bp, Homo sapien
ggtacggaatagaatggaatggaac

SEQ ID NO: 2562430 - DNA, 25 bp, Homo sapien
gaatagaatggaatggaacgaaatg

SEQ ID NO: 2562431 - DNA, 25 bp, Homo sapien
tacggaatagaatggaatggaacga

SEQ ID NO: 2562432 - DNA, 25 bp, Homo sapien
tagaatggaatggaacgaaatggaa

SEQ ID NO: 2562433 - DNA, 25 bp, Homo sapien
aatgcaatggaatggaatcttccgg

SEQ ID NO: 2562434 - DNA, 25 bp, Homo sapien
caatggaatggaatcttccggaatg

SEQ ID NO: 2562435 - DNA, 25 bp, Homo sapien
tgcaatggaatggaatcttccggaa

SEQ ID NO: 2562436 - DNA, 25 bp, Homo sapien
ggaatggaatcttccggaatggaat

SEQ ID NO: 2562437 - DNA, 25 bp, Homo sapien
atggaatggaattaacccgaataga

SEQ ID NO: 2562438 - DNA, 25 bp, Homo sapien
tggaattaacccgaatagaatggaa

SEQ ID NO: 2562439 - DNA, 25 bp, Homo sapien
caactcgattgcaatcgaatggaat

SEQ ID NO: 2562440 - DNA, 25 bp, Homo sapien
actcgattgcaatcgaatggaatgg

SEQ ID NO: 2562441 - DNA, 25 bp, Homo sapien
caacggaaccgaatggagtggaatg

SEQ ID NO: 2562442 - DNA, 25 bp, Homo sapien
atgcaacggaaccgaatggagtgga

SEQ ID NO: 2562443 - DNA, 25 bp, Homo sapien
tgcaacggaaccgaatggagtggaa

SEQ ID NO: 2562444 - DNA, 25 bp, Homo sapien
gcaacggaaccgaatggagtggaat

SEQ ID NO: 2562445 - DNA, 25 bp, Homo sapien
aacccgaatagaatggaatggaatg

SEQ ID NO: 2562446 - DNA, 25 bp, Homo sapien
ttaacccgaatagaatggaatggaa

SEQ ID NO: 2562447 - DNA, 25 bp, Homo sapien
taacccgaatagaatggaatggaat

SEQ ID NO: 2562448 - DNA, 25 bp, Homo sapien
aatcatccgtaatggaatggaaagg

SEQ ID NO: 2562449 - DNA, 25 bp, Homo sapien
tggaatggaatcatccgtaatggaa

SEQ ID NO: 2562450 - DNA, 25 bp, Homo sapien
atggaatggaatcatccgtaatgga

SEQ ID NO: 2562451 - DNA, 25 bp, Homo sapien
atggaatcatccgtaatggaatgga

SEQ ID NO: 2562452 - DNA, 25 bp, Homo sapien
gcaatggaatggaatcttccggaat

SEQ ID NO: 2562453 - DNA, 25 bp, Homo sapien
ggaatggaatcttccggaatggaat

SEQ ID NO: 2562454 - DNA, 25 bp, Homo sapien
tggaatggaattaacgcgagtgcag

SEQ ID NO: 2562455 - DNA, 25 bp, Homo sapien
gcgagtgcaggggaatggaatggaa

SEQ ID NO: 2562456 - DNA, 25 bp, Homo sapien
ggaatgaagtcaactcgagtggaat

SEQ ID NO: 2562457 - DNA, 25 bp, Homo sapien
tggaatgaagtcaactcgagtggaa

SEQ ID NO: 2562458 - DNA, 25 bp, Homo sapien
gaatgaagtcaactcgagtggaatg

SEQ ID NO: 2562459 - DNA, 25 bp, Homo sapien
aattaacccgaatagaatggaatgg

SEQ ID NO: 2562460 - DNA, 25 bp, Homo sapien
gaattaacccgaatagaatggaatg

SEQ ID NO: 2562461 - DNA, 25 bp, Homo sapien
aacccgaatagaatggaatggaatg

SEQ ID NO: 2562462 - DNA, 25 bp, Homo sapien
ttaacccgaatagaatggaatggaa

SEQ ID NO: 2562463 - DNA, 25 bp, Homo sapien
catccgtaatggaatggaaaggaat

SEQ ID NO: 2562464 - DNA, 25 bp, Homo sapien
tccgtaatggaatggaaaggaatgg

SEQ ID NO: 2562465 - DNA, 25 bp, Homo sapien
atccgtaatggaatggaaaggaatg

SEQ ID NO: 2562466 - DNA, 25 bp, Homo sapien
caatggaatggaatcatccggaatg

SEQ ID NO: 2562467 - DNA, 25 bp, Homo sapien
aagcaatggaatggaatcatccgga

SEQ ID NO: 2562468 - DNA, 25 bp, Homo sapien
tggaatggaatcatccggaatggaa

SEQ ID NO: 2562469 - DNA, 25 bp, Homo sapien
ggaatggaatcatccggaatggaat

SEQ ID NO: 2562470 - DNA, 25 bp, Homo sapien
tgaatagaatcaatccgaatgtaat

SEQ ID NO: 2562471 - DNA, 25 bp, Homo sapien
atggaatgtaatggagagtaaggga

SEQ ID NO: 2562472 - DNA, 25 bp, Homo sapien
ttgaatagaatcaatccgaatgtaa

SEQ ID NO: 2562473 - DNA, 25 bp, Homo sapien
tgtaatggagagtaagggagttgaa

SEQ ID NO: 2562474 - DNA, 25 bp, Homo sapien
caatggaatggaatcatccggaatg

SEQ ID NO: 2562475 - DNA, 25 bp, Homo sapien
ggaatggaatcatccggaatggaat

SEQ ID NO: 2562476 - DNA, 25 bp, Homo sapien
atgcaatggaatggaatcatccgga

SEQ ID NO: 2562477 - DNA, 25 bp, Homo sapien
caacccgagtgcaggggaatggaat

SEQ ID NO: 2562478 - DNA, 25 bp, Homo sapien
gaatggaattaacccgaatacaatg

SEQ ID NO: 2562479 - DNA, 25 bp, Homo sapien
tggaatggaattaacccgaatacaa

SEQ ID NO: 2562480 - DNA, 25 bp, Homo sapien
tggaatcgttccgagtggaatagga

SEQ ID NO: 2562481 - DNA, 25 bp, Homo sapien
gaatgtattcgagtggaatggaaag

SEQ ID NO: 2562482 - DNA, 25 bp, Homo sapien
aataggagggaatgtattcgagtgg

SEQ ID NO: 2562483 - DNA, 25 bp, Homo sapien
ccgagtggaataggagggaatgtat

SEQ ID NO: 2562484 - DNA, 25 bp, Homo sapien
atgcaacggaaccgaatggagtgga

SEQ ID NO: 2562485 - DNA, 25 bp, Homo sapien
tgcaacggaaccgaatggagtggaa

SEQ ID NO: 2562486 - DNA, 25 bp, Homo sapien
gcaacggaaccgaatggagtggaat

SEQ ID NO: 2562487 - DNA, 25 bp, Homo sapien
caacggaaccgaatggagtggaatg

SEQ ID NO: 2562488 - DNA, 25 bp, Homo sapien
atcaatcattccgagtggaatggaa

SEQ ID NO: 2562489 - DNA, 25 bp, Homo sapien
tcaatcattccgagtggaatggaag

SEQ ID NO: 2562490 - DNA, 25 bp, Homo sapien
atggaatgtaatggagagtaaggga

SEQ ID NO: 2562491 - DNA, 25 bp, Homo sapien
tgtaatggagagtaagggagttgaa

SEQ ID NO: 2562492 - DNA, 25 bp, Homo sapien
ttgaatagaatcaatccgaatgtaa

SEQ ID NO: 2562493 - DNA, 25 bp, Homo sapien
tgaatagaatcaatccgaatgtaat

SEQ ID NO: 2562494 - DNA, 25 bp, Homo sapien
cacccgaatagaatggaatggaatg

SEQ ID NO: 2562495 - DNA, 25 bp, Homo sapien
tcacccgaatagaatggaatggaat

SEQ ID NO: 2562496 - DNA, 25 bp, Homo sapien
ggaatcatccggaatggaatggaat

SEQ ID NO: 2562497 - DNA, 25 bp, Homo sapien
tggaatggaatcatccggaatggaa

SEQ ID NO: 2562498 - DNA, 25 bp, Homo sapien
caacacgagtgcaggggaatggaat

SEQ ID NO: 2562499 - DNA, 25 bp, Homo sapien
atggaatcatccggaatggaatgga

SEQ ID NO: 2562500 - DNA, 25 bp, Homo sapien
aatcatccgtaatggaatggaaagg

SEQ ID NO: 2562501 - DNA, 25 bp, Homo sapien
tggaatggaatcatccgtaatggaa

SEQ ID NO: 2562502 - DNA, 25 bp, Homo sapien
atggaatggaatcatccgtaatgga

SEQ ID NO: 2562503 - DNA, 25 bp, Homo sapien
atggaatcatccgtaatggaatgga

SEQ ID NO: 2562504 - DNA, 25 bp, Homo sapien
aataggagggaatgtattcgagtgg

SEQ ID NO: 2562505 - DNA, 25 bp, Homo sapien
gaatgtattcgagtggaatggaaag

SEQ ID NO: 2562506 - DNA, 25 bp, Homo sapien
tggaatcgttccgagtggaatagga

SEQ ID NO: 2562507 - DNA, 25 bp, Homo sapien
ccgagtggaataggagggaatgtat

SEQ ID NO: 2562508 - DNA, 25 bp, Homo sapien
tgaatagaatcaatccgaatgtaat

SEQ ID NO: 2562509 - DNA, 25 bp, Homo sapien
atggaatgtaatggagagtaaggga

SEQ ID NO: 2562510 - DNA, 25 bp, Homo sapien
ttgaatagaatcaatccgaatgtaa

SEQ ID NO: 2562511 - DNA, 25 bp, Homo sapien
tgtaatggagagtaagggagttgaa

SEQ ID NO: 2562512 - DNA, 25 bp, Homo sapien
aatcaacccgagtgcaatggaatgg

SEQ ID NO: 2562513 - DNA, 25 bp, Homo sapien
ggaatcaacccgagtgcaatggaat

SEQ ID NO: 2562514 - DNA, 25 bp, Homo sapien
tcaacccgagtgcaatggaatggag

SEQ ID NO: 2562515 - DNA, 25 bp, Homo sapien
caacccgagtgcaatggaatggaga

SEQ ID NO: 2562516 - DNA, 25 bp, Homo sapien
ggaatggaatcttccggaatggaat

SEQ ID NO: 2562517 - DNA, 25 bp, Homo sapien
caatggaatggaatcttccggaatg

SEQ ID NO: 2562518 - DNA, 25 bp, Homo sapien
aatgcaatggaatggaatcttccgg

SEQ ID NO: 2562519 - DNA, 25 bp, Homo sapien
tgcaatggaatggaatcttccggaa

SEQ ID NO: 2562520 - DNA, 25 bp, Homo sapien
ccggcccttgtagggttggatgtgg

SEQ ID NO: 2562521 - DNA, 25 bp, Homo sapien
cggcccttgtagggttggatgtgga

SEQ ID NO: 2562522 - DNA, 25 bp, Homo sapien
ggcccttgtagggttggatgtggaa

SEQ ID NO: 2562523 - DNA, 25 bp, Homo sapien
ctggcctgctagctatgaagagatc

SEQ ID NO: 2562524 - DNA, 25 bp, Homo sapien
gactgtttttgtggctcatctaagg

SEQ ID NO: 2562525 - DNA, 25 bp, Homo sapien
tcttgccagcttccttgactgaaag

SEQ ID NO: 2562526 - DNA, 25 bp, Homo sapien
gtgatgttccgccatccacaggaaa

SEQ ID NO: 2562527 - DNA, 25 bp, Homo sapien
ccttggatgacattggcaacctcct

SEQ ID NO: 2562528 - DNA, 25 bp, Homo sapien
ccaaacaggaacagtggagagcttg

SEQ ID NO: 2562529 - DNA, 25 bp, Homo sapien
tagtcttcaaaagctcatcctcgag

SEQ ID NO: 2562530 - DNA, 25 bp, Homo sapien
gccagcgcgggtctgcttttgcaga

SEQ ID NO: 2562531 - DNA, 25 bp, Homo sapien
gctctttgagagtagggacaatttt

SEQ ID NO: 2562532 - DNA, 25 bp, Homo sapien
gttccaaatgttgcaatacctcctg

SEQ ID NO: 2562533 - DNA, 25 bp, Homo sapien
gtatgtaaccatgaaaacctacacg

SEQ ID NO: 2562534 - DNA, 25 bp, Homo sapien
tagcacccaggacagtataatttct

SEQ ID NO: 2562535 - DNA, 25 bp, Homo sapien
gggaagctcacccttaattctggga

SEQ ID NO: 2562536 - DNA, 25 bp, Homo sapien
caaatattgcactgtgagcacaggg

SEQ ID NO: 2562537 - DNA, 25 bp, Homo sapien
taatcatagcagcaaacacagtgtg

SEQ ID NO: 2562538 - DNA, 25 bp, Homo sapien
aaaaaggtggcgtttgagctggtct

SEQ ID NO: 2562539 - DNA, 25 bp, Homo sapien
gatagatcatgaagcaatgtcccag

SEQ ID NO: 2562540 - DNA, 25 bp, Homo sapien
tgggctgagcacaactgaaccatgg

SEQ ID NO: 2562541 - DNA, 25 bp, Homo sapien
aatgtcccagggttatgtgcagcac

SEQ ID NO: 2562542 - DNA, 25 bp, Homo sapien
tgtggataaaaacggactggtgcct

SEQ ID NO: 2562543 - DNA, 25 bp, Homo sapien
cacccagaaggttgaaacatctgtt

SEQ ID NO: 2562544 - DNA, 25 bp, Homo sapien
ccacccagaaggttgaaacatctgt

SEQ ID NO: 2562545 - DNA, 25 bp, Homo sapien
tggcgggttggagccagggttctga

SEQ ID NO: 2562546 - DNA, 25 bp, Homo sapien
tagaatactcttagttctgcctttg

SEQ ID NO: 2562547 - DNA, 25 bp, Homo sapien
tcctgcctgtgttaactttgatggg

SEQ ID NO: 2562548 - DNA, 25 bp, Homo sapien
cggtcagcgcaaacctggctgagga

SEQ ID NO: 2562549 - DNA, 25 bp, Homo sapien
taggctacagccacctcagatgctt

SEQ ID NO: 2562550 - DNA, 25 bp, Homo sapien
caagtgggattttctgggccagcaa

SEQ ID NO: 2562551 - DNA, 25 bp, Homo sapien
cctctgagggcaatacaggcattta

SEQ ID NO: 2562552 - DNA, 25 bp, Homo sapien
tggaaagtcctgaaaggccaatgag

SEQ ID NO: 2562553 - DNA, 25 bp, Homo sapien
ttcttttgtgagtcggcgtctcact

SEQ ID NO: 2562554 - DNA, 25 bp, Homo sapien
ttgttttcttttgtgagtcggcgtc

SEQ ID NO: 2562555 - DNA, 25 bp, Homo sapien
ttttcttttgtgagtcggcgtctca

SEQ ID NO: 2562556 - DNA, 25 bp, Homo sapien
tgttttcttttgtgagtcggcgtct

SEQ ID NO: 2562557 - DNA, 25 bp, Homo sapien
catccttgctcagggactatgctaa

SEQ ID NO: 2562558 - DNA, 25 bp, Homo sapien
tgctcagggactatgctaatcttct

SEQ ID NO: 2562559 - DNA, 25 bp, Homo sapien
gtcatccttgctcagggactatgct

SEQ ID NO: 2562560 - DNA, 25 bp, Homo sapien
ccttgctcagggactatgctaatct

SEQ ID NO: 2562561 - DNA, 25 bp, Homo sapien
ggacctgaggtcacggagtgagggc

SEQ ID NO: 2562562 - DNA, 25 bp, Homo sapien
tgagggcgaagacaggggactggtc

SEQ ID NO: 2562563 - DNA, 25 bp, Homo sapien
gaagacaggggactggtctcctgaa

SEQ ID NO: 2562564 - DNA, 25 bp, Homo sapien
atgtcacacgcatccttgtgaagag

SEQ ID NO: 2562565 - DNA, 25 bp, Homo sapien
agattgaagggtagcaagagaggaa

SEQ ID NO: 2562566 - DNA, 25 bp, Homo sapien
agattgaagggtagcaagagaggca

SEQ ID NO: 2562567 - DNA, 25 bp, Homo sapien
caagagaggcatgagaagagtgaaa

SEQ ID NO: 2562568 - DNA, 25 bp, Homo sapien
cacctggccgtctccttgtctctac

SEQ ID NO: 2562569 - DNA, 25 bp, Homo sapien
tgtaagagttatccagagcatctgt

SEQ ID NO: 2562570 - DNA, 25 bp, Homo sapien
cactgtaagagttatccagagcatc

SEQ ID NO: 2562571 - DNA, 25 bp, Homo sapien
gagttatccagagcatctgtgatgg

SEQ ID NO: 2562572 - DNA, 25 bp, Homo sapien
gtaagagttatccagagcatctgtg

SEQ ID NO: 2562573 - DNA, 25 bp, Homo sapien
gatggcatgtgtgaagaatctatcc

SEQ ID NO: 2562574 - DNA, 25 bp, Homo sapien
gaaggagagtagagccatttgcaaa

SEQ ID NO: 2562575 - DNA, 25 bp, Homo sapien
cagatgccaattgaaccagtttggg

SEQ ID NO: 2562576 - DNA, 25 bp, Homo sapien
gactactgagaacttatgtggctgg

SEQ ID NO: 2562577 - DNA, 25 bp, Homo sapien
tgttgccgtaaagtaattgcactgt

SEQ ID NO: 2562578 - DNA, 25 bp, Homo sapien
ttgccgtaaagtaattgcactgtag

SEQ ID NO: 2562579 - DNA, 25 bp, Homo sapien
ctgttgccgtaaagtaattgcactg

SEQ ID NO: 2562580 - DNA, 25 bp, Homo sapien
tgccgtaaagtaattgcactgtagt

SEQ ID NO: 2562581 - DNA, 25 bp, Homo sapien
taagaaatggtatcaagctctccag

SEQ ID NO: 2562582 - DNA, 25 bp, Homo sapien
gctgctaaaattggtaagaaatggt

SEQ ID NO: 2562583 - DNA, 25 bp, Homo sapien
taattgctaagttgctgctgctaaa

SEQ ID NO: 2562584 - DNA, 25 bp, Homo sapien
cactgttaattgctaagttgctgct

SEQ ID NO: 2562585 - DNA, 25 bp, Homo sapien
ctttcgattgatggagcgggcacac

SEQ ID NO: 2562586 - DNA, 25 bp, Homo sapien
aattggcggaggcaggtatccgtcc

SEQ ID NO: 2562587 - DNA, 25 bp, Homo sapien
ctggccagggtacgcgacaattggc

SEQ ID NO: 2562588 - DNA, 25 bp, Homo sapien
ggagaagacaggctttcgattgatg

SEQ ID NO: 2562589 - DNA, 25 bp, Homo sapien
gacccgggatcctgaattcctgtgg

SEQ ID NO: 2562590 - DNA, 25 bp, Homo sapien
cgcgcggttgtaactcggccctagt

SEQ ID NO: 2562591 - DNA, 25 bp, Homo sapien
tgtctcggtataggtgcgcagagct

SEQ ID NO: 2562592 - DNA, 25 bp, Homo sapien
aggcttcgattctgcgacccgggat

SEQ ID NO: 2562593 - DNA, 25 bp, Homo sapien
agcttgctaggtcagaatgagagac

SEQ ID NO: 2562594 - DNA, 25 bp, Homo sapien
tgaggctagaagatcctttgaacct

SEQ ID NO: 2562595 - DNA, 25 bp, Homo sapien
ggctagaagatcctttgaacctagg

SEQ ID NO: 2562596 - DNA, 25 bp, Homo sapien
tagaagatcctttgaacctaggagt

SEQ ID NO: 2562597 - DNA, 25 bp, Homo sapien
gctagaagatcctttgaacctagga

SEQ ID NO: 2562598 - DNA, 25 bp, Homo sapien
ctaaggactaagtgtcgcaccaagg

SEQ ID NO: 2562599 - DNA, 25 bp, Homo sapien
taagtgtcgcaccaaggtttgcctt

SEQ ID NO: 2562600 - DNA, 25 bp, Homo sapien
cgcaccaaggtttgccttttgtatt

SEQ ID NO: 2562601 - DNA, 25 bp, Homo sapien
tgcataaagaaaggagttggagctg

SEQ ID NO: 2562602 - DNA, 25 bp, Homo sapien
gaatgagtattaccccaggatgagg

SEQ ID NO: 2562603 - DNA, 25 bp, Homo sapien
cctttgttgctgcttccctgaatga

SEQ ID NO: 2562604 - DNA, 25 bp, Homo sapien
gaggtctgccatcagcttagttagc

SEQ ID NO: 2562605 - DNA, 25 bp, Homo sapien
tagccattgatgcaaatactaggga

SEQ ID NO: 2562606 - DNA, 25 bp, Homo sapien
caaaaggaatgctacctttaggtgg

SEQ ID NO: 2562607 - DNA, 25 bp, Homo sapien
ggaatgctacctttaggtggagtct

SEQ ID NO: 2562608 - DNA, 25 bp, Homo sapien
ctacctttaggtggagtcttgcaaa

SEQ ID NO: 2562609 - DNA, 25 bp, Homo sapien
tgctacctttaggtggagtcttgca

SEQ ID NO: 2562610 - DNA, 25 bp, Homo sapien
tggtactgcagtggtaaaaaacacc

SEQ ID NO: 2562611 - DNA, 25 bp, Homo sapien
aaaaacaccttctcaactttagatg

SEQ ID NO: 2562612 - DNA, 25 bp, Homo sapien
ctgggctactggctactggtactgc

SEQ ID NO: 2562613 - DNA, 25 bp, Homo sapien
caccttctcaactttagatgcttgc

SEQ ID NO: 2562614 - DNA, 25 bp, Homo sapien
cagtagtgcttcaatgggaatcaga

SEQ ID NO: 2562615 - DNA, 25 bp, Homo sapien
gaacactgaggccaatctgctggac

SEQ ID NO: 2562616 - DNA, 25 bp, Homo sapien
cacttaatgtttctgtctgagggtc

SEQ ID NO: 2562617 - DNA, 25 bp, Homo sapien
tgcttgtcggctttgctcacaggag

SEQ ID NO: 2562618 - DNA, 25 bp, Homo sapien
tgctagagcctgctttgcacacacg

SEQ ID NO: 2562619 - DNA, 25 bp, Homo sapien
gaggctgtatgcaaaatccagaggg

SEQ ID NO: 2562620 - DNA, 25 bp, Homo sapien
gcaaccaaccgagagaaagaaccag

SEQ ID NO: 2562621 - DNA, 25 bp, Homo sapien
aaaattcactgcgatctgcaagccc

SEQ ID NO: 2562622 - DNA, 25 bp, Homo sapien
ccaaggacaactcatgctcagcagt

SEQ ID NO: 2562623 - DNA, 25 bp, Homo sapien
caattattctggctagggtcctgga

SEQ ID NO: 2562624 - DNA, 25 bp, Homo sapien
gtcctggaatgagaaattggctgct

SEQ ID NO: 2562625 - DNA, 25 bp, Homo sapien
tgaggtcaatggtcaacagaagcca

SEQ ID NO: 2562626 - DNA, 25 bp, Homo sapien
gaagccccttgccttttactcagag

SEQ ID NO: 2562627 - DNA, 25 bp, Homo sapien
gatctaccaactatcccagaggtga

SEQ ID NO: 2562628 - DNA, 25 bp, Homo sapien
gaagttgtaaacagcaagggcccta

SEQ ID NO: 2562629 - DNA, 25 bp, Homo sapien
gaaagaaagactgcctatcctggga

SEQ ID NO: 2562630 - DNA, 25 bp, Homo sapien
tgagaaatattgttgcagttccaca

SEQ ID NO: 2562631 - DNA, 25 bp, Homo sapien
gctgattgagcggaaaaacgctgcc

SEQ ID NO: 2562632 - DNA, 25 bp, Homo sapien
gaaggtgccaggtttctacctagga

SEQ ID NO: 2562633 - DNA, 25 bp, Homo sapien
gggccacatgggacaacgaccatca

SEQ ID NO: 2562634 - DNA, 25 bp, Homo sapien
aaatgcccagtggtcgtcggcttcc

SEQ ID NO: 2562635 - DNA, 25 bp, Homo sapien
tggcacactacgaggataacaagga

SEQ ID NO: 2562636 - DNA, 25 bp, Homo sapien
caggagtaacagtgagaaatgccca

SEQ ID NO: 2562637 - DNA, 25 bp, Homo sapien
gaagccctctcttgaacaggagtaa

SEQ ID NO: 2562638 - DNA, 25 bp, Homo sapien
tccaaaacacaacgaaggatgtaga

SEQ ID NO: 2562639 - DNA, 25 bp, Homo sapien
ctccaaaacacaacgaaggatgtag

SEQ ID NO: 2562640 - DNA, 25 bp, Homo sapien
tctccaaaacacaacgaaggatgta

SEQ ID NO: 2562641 - DNA, 25 bp, Homo sapien
tcttgcctttcctggctagaagatc

SEQ ID NO: 2562642 - DNA, 25 bp, Homo sapien
cggccaatgattagtgtatgtcaaa

SEQ ID NO: 2562643 - DNA, 25 bp, Homo sapien
cctttcctggctagaagatctgagc

SEQ ID NO: 2562644 - DNA, 25 bp, Homo sapien
tgtcaccaagaccccggccaatgat

SEQ ID NO: 2562645 - DNA, 25 bp, Homo sapien
tgagcaattaagcaaacaccattat

SEQ ID NO: 2562646 - DNA, 25 bp, Homo sapien
acgttttcacatcgctcagtggaag

SEQ ID NO: 2562647 - DNA, 25 bp, Homo sapien
ctttggaagtactgaacctgtaacg

SEQ ID NO: 2562648 - DNA, 25 bp, Homo sapien
taagcaaacaccattatttcacatt

SEQ ID NO: 2562649 - DNA, 25 bp, Homo sapien
ttctgttccaactagaacgtctcag

SEQ ID NO: 2562650 - DNA, 25 bp, Homo sapien
gaggcggctttccaaaggatgctgg

SEQ ID NO: 2562651 - DNA, 25 bp, Homo sapien
aacgtctcagccaaacctggagcgc

SEQ ID NO: 2562652 - DNA, 25 bp, Homo sapien
gctttccaaaggatgctggcgatgg

SEQ ID NO: 2562653 - DNA, 25 bp, Homo sapien
gccaagccctagcttaccctggagg

SEQ ID NO: 2562654 - DNA, 25 bp, Homo sapien
cctttgatctggtgagaggtttcga

SEQ ID NO: 2562655 - DNA, 25 bp, Homo sapien
taatactatccaaatgccaaatggc

SEQ ID NO: 2562656 - DNA, 25 bp, Homo sapien
cgctttatccctaacctcctttgat

SEQ ID NO: 2562657 - DNA, 25 bp, Homo sapien
gctgccggcgtggaccgcgggaagg

SEQ ID NO: 2562658 - DNA, 25 bp, Homo sapien
ctgccggcgtggaccgcgggaaggc

SEQ ID NO: 2562659 - DNA, 25 bp, Homo sapien
aggctgccggcgtggaccgcgggaa

SEQ ID NO: 2562660 - DNA, 25 bp, Homo sapien
tgccggcgtggaccgcgggaaggcg

SEQ ID NO: 2562661 - DNA, 25 bp, Homo sapien
ccccctgcaccgacgcgccggagac

SEQ ID NO: 2562662 - DNA, 25 bp, Homo sapien
cccctgcaccgacgcgccggagaca

SEQ ID NO: 2562663 - DNA, 25 bp, Homo sapien
ccctgcaccgacgcgccggagacat

SEQ ID NO: 2562664 - DNA, 25 bp, Homo sapien
gaggcgaccgctccgggagccagca

SEQ ID NO: 2562665 - DNA, 25 bp, Homo sapien
cgaccgctccgggagccagcaggcc

SEQ ID NO: 2562666 - DNA, 25 bp, Homo sapien
cgggcggaagaggcgaccgctccgg

SEQ ID NO: 2562667 - DNA, 25 bp, Homo sapien
cggaagaggcgaccgctccgggagc

SEQ ID NO: 2562668 - DNA, 25 bp, Homo sapien
tcgctgcgacccttgaggcggtaca

SEQ ID NO: 2562669 - DNA, 25 bp, Homo sapien
aggccaggccgtacagcgtatcggt

SEQ ID NO: 2562670 - DNA, 25 bp, Homo sapien
gtacacagcgcgcagagccgccgag

SEQ ID NO: 2562671 - DNA, 25 bp, Homo sapien
ggccgaggcatacggccagaggctt

SEQ ID NO: 2562672 - DNA, 25 bp, Homo sapien
aggagcccctcaggtactctcacac

SEQ ID NO: 2562673 - DNA, 25 bp, Homo sapien
gagcccctcaggtactctcacacgg

SEQ ID NO: 2562674 - DNA, 25 bp, Homo sapien
ctcaggtactctcacacggcagtat

SEQ ID NO: 2562675 - DNA, 25 bp, Homo sapien
ccctcaggtactctcacacggcagt

SEQ ID NO: 2562676 - DNA, 25 bp, Homo sapien
cttgttgagctcctccgagcgttcc

SEQ ID NO: 2562677 - DNA, 25 bp, Homo sapien
actagtgagagcaagcggaccctca

SEQ ID NO: 2562678 - DNA, 25 bp, Homo sapien
agagcaagcggaccctcaaacatct

SEQ ID NO: 2562679 - DNA, 25 bp, Homo sapien
catgatcaggaatccgaatgcctac

SEQ ID NO: 2562680 - DNA, 25 bp, Homo sapien
aaacatctgagccaagtcttgcata

SEQ ID NO: 2562681 - DNA, 25 bp, Homo sapien
gcactcagtctttgggctatgagaa

SEQ ID NO: 2562682 - DNA, 25 bp, Homo sapien
taatggctgcgtaacctggaacaag

SEQ ID NO: 2562683 - DNA, 25 bp, Homo sapien
agttaggcctggaaatctgggacag

SEQ ID NO: 2562684 - DNA, 25 bp, Homo sapien
tctagctctagaactatgctcctgg

SEQ ID NO: 2562685 - DNA, 25 bp, Homo sapien
tttgtcccccatcaataaccaagga

SEQ ID NO: 2562686 - DNA, 25 bp, Homo sapien
gacaaatcaaccacagttgagccaa

SEQ ID NO: 2562687 - DNA, 25 bp, Homo sapien
acagttgagccaaggcgacactcgg

SEQ ID NO: 2562688 - DNA, 25 bp, Homo sapien
tcaataaccaaggacaactgaggcc

SEQ ID NO: 2562689 - DNA, 25 bp, Homo sapien
tgtgaggggagcagtccgtacttct

SEQ ID NO: 2562690 - DNA, 25 bp, Homo sapien
caggtaggacgcatgtgaggggagc

SEQ ID NO: 2562691 - DNA, 25 bp, Homo sapien
gcagtccgtacttctgttggaggat

SEQ ID NO: 2562692 - DNA, 25 bp, Homo sapien
gggagcagtccgtacttctgttgga

SEQ ID NO: 2562693 - DNA, 25 bp, Homo sapien
ccaggtgcaaggctaaaccagcagc

SEQ ID NO: 2562694 - DNA, 25 bp, Homo sapien
caagggcttggtctacagtgctcag

SEQ ID NO: 2562695 - DNA, 25 bp, Homo sapien
tgcaaatgaggccttgacagtcgtc

SEQ ID NO: 2562696 - DNA, 25 bp, Homo sapien
ttaaaagtcaggctagtgccctagc

SEQ ID NO: 2562697 - DNA, 25 bp, Homo sapien
tctagcttcaggagcctttggtcac

SEQ ID NO: 2562698 - DNA, 25 bp, Homo sapien
ccctggctataaaggatagtggagg

SEQ ID NO: 2562699 - DNA, 25 bp, Homo sapien
aaagactgctctccctgcgagcaat

SEQ ID NO: 2562700 - DNA, 25 bp, Homo sapien
caaaaggctgcggagaacactggat

SEQ ID NO: 2562701 - DNA, 25 bp, Homo sapien
gctccagagcctaatttttcccaga

SEQ ID NO: 2562702 - DNA, 25 bp, Homo sapien
cctttagctgcctgaactgactgag

SEQ ID NO: 2562703 - DNA, 25 bp, Homo sapien
tctaggtttaagctcctcccagtag

SEQ ID NO: 2562704 - DNA, 25 bp, Homo sapien
tgaggcccactcactagagccatgt

SEQ ID NO: 2562705 - DNA, 25 bp, Homo sapien
ggctcgcatgcaccctgctcccttc

SEQ ID NO: 2562706 - DNA, 25 bp, Homo sapien
tgggctcgcatgcaccctgctccct

SEQ ID NO: 2562707 - DNA, 25 bp, Homo sapien
ggtctgggctcgcatgcaccctgct

SEQ ID NO: 2562708 - DNA, 25 bp, Homo sapien
tcgcatgcaccctgctcccttctgc

SEQ ID NO: 2562709 - DNA, 25 bp, Homo sapien
tgtgtagtggccacccagtcaccac

SEQ ID NO: 2562710 - DNA, 25 bp, Homo sapien
tgactgaacttagcccagggcagct

SEQ ID NO: 2562711 - DNA, 25 bp, Homo sapien
tcactcgttcccaggtcagaggtca

SEQ ID NO: 2562712 - DNA, 25 bp, Homo sapien
gttcagctgaggttgtagccactca

SEQ ID NO: 2562713 - DNA, 25 bp, Homo sapien
acagagcccgttcctcaggcgagtg

SEQ ID NO: 2562714 - DNA, 25 bp, Homo sapien
acagtgaggcccgagatcgtttcca

SEQ ID NO: 2562715 - DNA, 25 bp, Homo sapien
gctgggcggagcacttcatcaaaga

SEQ ID NO: 2562716 - DNA, 25 bp, Homo sapien
tcaatggcaagtactatgagacggc

SEQ ID NO: 2562717 - DNA, 25 bp, Homo sapien
caatacgcgcaacagggtcaatggc

SEQ ID NO: 2562718 - DNA, 25 bp, Homo sapien
acaccagcattcggccctggaacaa

SEQ ID NO: 2562719 - DNA, 25 bp, Homo sapien
ccacgatatcctggccgccggattt

SEQ ID NO: 2562720 - DNA, 25 bp, Homo sapien
tgtacacctactttgcctccaatgg

SEQ ID NO: 2562721 - DNA, 25 bp, Homo sapien
gaagaacttttgtgatgccaacaac

SEQ ID NO: 2562722 - DNA, 25 bp, Homo sapien
ggatttgacggcatgtacacctact

SEQ ID NO: 2562723 - DNA, 25 bp, Homo sapien
caaaacttatctgagctgcttccgc

SEQ ID NO: 2562724 - DNA, 25 bp, Homo sapien
cagctgcctgacaaagcctttgggt

SEQ ID NO: 2562725 - DNA, 25 bp, Homo sapien
tgggttctcagttcaatggcagact

SEQ ID NO: 2562726 - DNA, 25 bp, Homo sapien
taaacttgaggattttcgcaggagc

SEQ ID NO: 2562727 - DNA, 25 bp, Homo sapien
cctggtaagaagctgctcaattttt

SEQ ID NO: 2562728 - DNA, 25 bp, Homo sapien
tgcacctctagatgcactggaatgc

SEQ ID NO: 2562729 - DNA, 25 bp, Homo sapien
ttcccacttcatgcacctctagatg

SEQ ID NO: 2562730 - DNA, 25 bp, Homo sapien
cacctttcaacctggcagacctggt

SEQ ID NO: 2562731 - DNA, 25 bp, Homo sapien
gctacttaaatatcccagggttcca

SEQ ID NO: 2562732 - DNA, 25 bp, Homo sapien
actgtagcctgaaagacaattcctt

SEQ ID NO: 2562733 - DNA, 25 bp, Homo sapien
gaaggttcaggaatttcactcaaga

SEQ ID NO: 2562734 - DNA, 25 bp, Homo sapien
caagaatgaagattctagtctccct

SEQ ID NO: 2562735 - DNA, 25 bp, Homo sapien
ctgatgccaggaacttatctgcatt

SEQ ID NO: 2562736 - DNA, 25 bp, Homo sapien
tttggctccactcatcatcttttcc

SEQ ID NO: 2562737 - DNA, 25 bp, Homo sapien
ttgcctggtgctttggttcccagag

SEQ ID NO: 2562738 - DNA, 25 bp, Homo sapien
tccaagcactggcagattcctttgc

SEQ ID NO: 2562739 - DNA, 25 bp, Homo sapien
gcagattcctttgcctggtgctttg

SEQ ID NO: 2562740 - DNA, 25 bp, Homo sapien
catcccagcaggatgttaaccttct

SEQ ID NO: 2562741 - DNA, 25 bp, Homo sapien
acatacagaatcctgactgggagaa

SEQ ID NO: 2562742 - DNA, 25 bp, Homo sapien
cagcaggatgttaaccttctcaact

SEQ ID NO: 2562743 - DNA, 25 bp, Homo sapien
ttacttcctaatacatccatgcaca

SEQ ID NO: 2562744 - DNA, 25 bp, Homo sapien
aatgggagacatgttccttgctgga

SEQ ID NO: 2562745 - DNA, 25 bp, Homo sapien
catggacacggcagttatttcagga

SEQ ID NO: 2562746 - DNA, 25 bp, Homo sapien
gaggaagggaatgggagacatgttc

SEQ ID NO: 2562747 - DNA, 25 bp, Homo sapien
gaaacatggacacggcagttatttc

SEQ ID NO: 2562748 - DNA, 25 bp, Homo sapien
cagaaagcatcattaccactactat

SEQ ID NO: 2562749 - DNA, 25 bp, Homo sapien
ctcagtatcagaaagcatcattacc

SEQ ID NO: 2562750 - DNA, 25 bp, Homo sapien
tatcagaaagcatcattaccactac

SEQ ID NO: 2562751 - DNA, 25 bp, Homo sapien
gcatcattaccactactatttccat

SEQ ID NO: 2562752 - DNA, 25 bp, Homo sapien
ttgatgtgtcagaaatactttacaa

SEQ ID NO: 2562753 - DNA, 25 bp, Homo sapien
ttcagtatgaattcccctctggcca

SEQ ID NO: 2562754 - DNA, 25 bp, Homo sapien
tcgaatttgttctaaggcactgggt

SEQ ID NO: 2562755 - DNA, 25 bp, Homo sapien
cgaatttgttctaaggcactgggtt

SEQ ID NO: 2562756 - DNA, 25 bp, Homo sapien
gagctaactgctgcatccgcattct

SEQ ID NO: 2562757 - DNA, 25 bp, Homo sapien
gaggctgttccgctgcttgatggca

SEQ ID NO: 2562758 - DNA, 25 bp, Homo sapien
ccgcattcttggagccgtctgataa

SEQ ID NO: 2562759 - DNA, 25 bp, Homo sapien
gccgtctgataacaaaagaggctgt

SEQ ID NO: 2562760 - DNA, 25 bp, Homo sapien
ctgtttgatttcgacaggagctggg

SEQ ID NO: 2562761 - DNA, 25 bp, Homo sapien
tgaagaagagatctgacactttctt

SEQ ID NO: 2562762 - DNA, 25 bp, Homo sapien
tcttctgtttgatttcgacaggagc

SEQ ID NO: 2562763 - DNA, 25 bp, Homo sapien
ttctgaggttcatagagtcttgaag

SEQ ID NO: 2562764 - DNA, 25 bp, Homo sapien
gcccgtacacgagtgtgcaagctcg

SEQ ID NO: 2562765 - DNA, 25 bp, Homo sapien
tgcaagctcgcaggcatccgaatag

SEQ ID NO: 2562766 - DNA, 25 bp, Homo sapien
atgtatgtgtgtgcccgtacacgag

SEQ ID NO: 2562767 - DNA, 25 bp, Homo sapien
ggcatccgaatagggaagtcatcac

SEQ ID NO: 2562768 - DNA, 25 bp, Homo sapien
tccaatcatggtgtcagaagaaggg

SEQ ID NO: 2562769 - DNA, 25 bp, Homo sapien
gaactccacgaggacaggaccaatt

SEQ ID NO: 2562770 - DNA, 25 bp, Homo sapien
gcactaggccctagttccaacactg

SEQ ID NO: 2562771 - DNA, 25 bp, Homo sapien
gagtcacggttctggacgctgtaca

SEQ ID NO: 2562772 - DNA, 25 bp, Homo sapien
ggtatgacctactttccaggctctg

SEQ ID NO: 2562773 - DNA, 25 bp, Homo sapien
tcagactctggctggtagagaaaca

SEQ ID NO: 2562774 - DNA, 25 bp, Homo sapien
cacctttgctcattccatagctgat

SEQ ID NO: 2562775 - DNA, 25 bp, Homo sapien
gaggtcccgattttgctcatgcagg

SEQ ID NO: 2562776 - DNA, 25 bp, Homo sapien
tgcaatcttgggataatcagacttc

SEQ ID NO: 2562777 - DNA, 25 bp, Homo sapien
aatactgtacaccatgctgaaaact

SEQ ID NO: 2562778 - DNA, 25 bp, Homo sapien
caaaatgagtcagagccttcacata

SEQ ID NO: 2562779 - DNA, 25 bp, Homo sapien
caccaaccttaaggaaataattcat

SEQ ID NO: 2562780 - DNA, 25 bp, Homo sapien
gggcctcttcggagtccagctccat

SEQ ID NO: 2562781 - DNA, 25 bp, Homo sapien
ctggacaacactaggcccctctgtc

SEQ ID NO: 2562782 - DNA, 25 bp, Homo sapien
ccccagccctggacaacactaggcc

SEQ ID NO: 2562783 - DNA, 25 bp, Homo sapien
gccctggacaacactaggcccctct

SEQ ID NO: 2562784 - DNA, 25 bp, Homo sapien
ccccagcgcaggtgcacctctcctc

SEQ ID NO: 2562785 - DNA, 25 bp, Homo sapien
cccccagcgcaggtgcacctctcct

SEQ ID NO: 2562786 - DNA, 25 bp, Homo sapien
accccccagcgcaggtgcacctctc

SEQ ID NO: 2562787 - DNA, 25 bp, Homo sapien
tcaccccccagcgcaggtgcacctc

SEQ ID NO: 2562788 - DNA, 25 bp, Homo sapien
ccagtgctgggacccccatcctgcc

SEQ ID NO: 2562789 - DNA, 25 bp, Homo sapien
atcctgccccacccagagaagggac

SEQ ID NO: 2562790 - DNA, 25 bp, Homo sapien
ccatcctgccccacccagagaaggg

SEQ ID NO: 2562791 - DNA, 25 bp, Homo sapien
ccccatcctgccccacccagagaag

SEQ ID NO: 2562792 - DNA, 25 bp, Homo sapien
aggagacgcaccaggggcgcgtggc

SEQ ID NO: 2562793 - DNA, 25 bp, Homo sapien
cctcgtgcagcgcggtgcgccccgc

SEQ ID NO: 2562794 - DNA, 25 bp, Homo sapien
cgcgagtgtccgtgccaggcggcct

SEQ ID NO: 2562795 - DNA, 25 bp, Homo sapien
ccgcgagtgtccgtgccaggcggcc

SEQ ID NO: 2562796 - DNA, 25 bp, Homo sapien
ggccgccagacccagcgctgtggcc

SEQ ID NO: 2562797 - DNA, 25 bp, Homo sapien
gccatcccgggcgtccacccgcgcc

SEQ ID NO: 2562798 - DNA, 25 bp, Homo sapien
agcggcagccacgagcagggcgccg

SEQ ID NO: 2562799 - DNA, 25 bp, Homo sapien
cgccgccgtccagccgcgcgcgtcc

SEQ ID NO: 2562800 - DNA, 25 bp, Homo sapien
tggccttcccgagaggcgtgatgca

SEQ ID NO: 2562801 - DNA, 25 bp, Homo sapien
agcagaagccccacggtaggcccat

SEQ ID NO: 2562802 - DNA, 25 bp, Homo sapien
tctttcggagccagccggtagcatc

SEQ ID NO: 2562803 - DNA, 25 bp, Homo sapien
ctgggtgaccagcaactggacggca

SEQ ID NO: 2562804 - DNA, 25 bp, Homo sapien
ctccaagttcaggcagcgcctgggg

SEQ ID NO: 2562805 - DNA, 25 bp, Homo sapien
ccaagttcaggcagcgcctggggca

SEQ ID NO: 2562806 - DNA, 25 bp, Homo sapien
tccaagttcaggcagcgcctggggc

SEQ ID NO: 2562807 - DNA, 25 bp, Homo sapien
ttgttgaagtatggagaaggctgga

SEQ ID NO: 2562808 - DNA, 25 bp, Homo sapien
tgttgaagtatggagaaggctggag

SEQ ID NO: 2562809 - DNA, 25 bp, Homo sapien
tgtccgcgctcactggaccactgct

SEQ ID NO: 2562810 - DNA, 25 bp, Homo sapien
gggtatattctcaaggtcacctcag

SEQ ID NO: 2562811 - DNA, 25 bp, Homo sapien
aaagccgaagtcctgtttcaccgct

SEQ ID NO: 2562812 - DNA, 25 bp, Homo sapien
cacctcagccaaggtatcatcaaag

SEQ ID NO: 2562813 - DNA, 25 bp, Homo sapien
tgcccgcggttcacgcaggtcagaa

SEQ ID NO: 2562814 - DNA, 25 bp, Homo sapien
acctgttgagcctcctccacgtgcc

SEQ ID NO: 2562815 - DNA, 25 bp, Homo sapien
tccacgtgccggtcggtccacacgt

SEQ ID NO: 2562816 - DNA, 25 bp, Homo sapien
ccttctcgccgtcccagtaggcggg

SEQ ID NO: 2562817 - DNA, 25 bp, Homo sapien
tccagcaggcggtccgcgcggtcgt

SEQ ID NO: 2562818 - DNA, 25 bp, Homo sapien
cggcgctcgcccgacgcgtagaggt

SEQ ID NO: 2562819 - DNA, 25 bp, Homo sapien
cccgacgcgtagaggtccagcaggc

SEQ ID NO: 2562820 - DNA, 25 bp, Homo sapien
gcggtccgcgcggtcgtgcgggacc

SEQ ID NO: 2562821 - DNA, 25 bp, Homo sapien
cgcgctcaaaggcatccgcgcccac

SEQ ID NO: 2562822 - DNA, 25 bp, Homo sapien
gcgctcaaaggcatccgcgcccaca

SEQ ID NO: 2562823 - DNA, 25 bp, Homo sapien
gctcaaaggcatccgcgcccacagc

SEQ ID NO: 2562824 - DNA, 25 bp, Homo sapien
cgctcaaaggcatccgcgcccacag

SEQ ID NO: 2562825 - DNA, 25 bp, Homo sapien
cagcggctcgatacgcagtgagaag

SEQ ID NO: 2562826 - DNA, 25 bp, Homo sapien
ggctcgatacgcagtgagaagtcac

SEQ ID NO: 2562827 - DNA, 25 bp, Homo sapien
cggctcgatacgcagtgagaagtca

SEQ ID NO: 2562828 - DNA, 25 bp, Homo sapien
ctccagcggctcgatacgcagtgag

SEQ ID NO: 2562829 - DNA, 25 bp, Homo sapien
cgtcaggtggaagacgcggcgttcg

SEQ ID NO: 2562830 - DNA, 25 bp, Homo sapien
ggcgttcgtgcaggccacagtaatg

SEQ ID NO: 2562831 - DNA, 25 bp, Homo sapien
aagacgcggcgttcgtgcaggccac

SEQ ID NO: 2562832 - DNA, 25 bp, Homo sapien
acgcggcgttcgtgcaggccacagt

SEQ ID NO: 2562833 - DNA, 25 bp, Homo sapien
gggcgctccgcgtggggttcggcga

SEQ ID NO: 2562834 - DNA, 25 bp, Homo sapien
ggcgctccgcgtggggttcggcgac

SEQ ID NO: 2562835 - DNA, 25 bp, Homo sapien
gggacgatgacattgatgacgttgt

SEQ ID NO: 2562836 - DNA, 25 bp, Homo sapien
ccaggaggacagtgaccagtagcag

SEQ ID NO: 2562837 - DNA, 25 bp, Homo sapien
tgctggaagaagtgggctcggctct

SEQ ID NO: 2562838 - DNA, 25 bp, Homo sapien
acattgatgacgttgtggccgcgcg

SEQ ID NO: 2562839 - DNA, 25 bp, Homo sapien
cgacttctggtccgagtattcgtag

SEQ ID NO: 2562840 - DNA, 25 bp, Homo sapien
cccgacttctggtccgagtattcgt

SEQ ID NO: 2562841 - DNA, 25 bp, Homo sapien
gacttctggtccgagtattcgtagc

SEQ ID NO: 2562842 - DNA, 25 bp, Homo sapien
ccgacttctggtccgagtattcgta

SEQ ID NO: 2562843 - DNA, 25 bp, Homo sapien
agccacagcgaactccgccaagtta

SEQ ID NO: 2562844 - DNA, 25 bp, Homo sapien
tgtaaagcatctggtcccctgcagc

SEQ ID NO: 2562845 - DNA, 25 bp, Homo sapien
tcactcctgtaaagcatctggtccc

SEQ ID NO: 2562846 - DNA, 25 bp, Homo sapien
gcgaactccgccaagttaacatcct

SEQ ID NO: 2562847 - DNA, 25 bp, Homo sapien
gtctaggtcgatgtacttggcaggc

SEQ ID NO: 2562848 - DNA, 25 bp, Homo sapien
ctttgtctaggtcgatgtacttggc

SEQ ID NO: 2562849 - DNA, 25 bp, Homo sapien
ctaggtcgatgtacttggcaggcag

SEQ ID NO: 2562850 - DNA, 25 bp, Homo sapien
ttgtctaggtcgatgtacttggcag

SEQ ID NO: 2562851 - DNA, 25 bp, Homo sapien
tccaccctcatcacagtgggagaca

SEQ ID NO: 2562852 - DNA, 25 bp, Homo sapien
tgccatcgttggtcccaggtgaggt

SEQ ID NO: 2562853 - DNA, 25 bp, Homo sapien
agccaagggcgccaacgggttggcg

SEQ ID NO: 2562854 - DNA, 25 bp, Homo sapien
ctgagatgggctgaggtcgcccccg

SEQ ID NO: 2562855 - DNA, 25 bp, Homo sapien
tatttgcagttctccttccggaacc

SEQ ID NO: 2562856 - DNA, 25 bp, Homo sapien
ctatttgcagttctccttccggaac

SEQ ID NO: 2562857 - DNA, 25 bp, Homo sapien
catcagtgggattttggttgtgcca

SEQ ID NO: 2562858 - DNA, 25 bp, Homo sapien
tgagccccggagcatcaggagatgc

SEQ ID NO: 2562859 - DNA, 25 bp, Homo sapien
gccaaattccaggaaagcgggacca

SEQ ID NO: 2562860 - DNA, 25 bp, Homo sapien
gaggcggcctctgcatacgcccagg

SEQ ID NO: 2562861 - DNA, 25 bp, Homo sapien
ctgatgggagtgtcctccaggaatg

SEQ ID NO: 2562862 - DNA, 25 bp, Homo sapien
aggcccccagcggcagagcccagaa

SEQ ID NO: 2562863 - DNA, 25 bp, Homo sapien
tccaggaatgtcttcaggcccccag

SEQ ID NO: 2562864 - DNA, 25 bp, Homo sapien
gttctgatgggagtgtcctccagga

SEQ ID NO: 2562865 - DNA, 25 bp, Homo sapien
agcccccgacgagcagagccctgga

SEQ ID NO: 2562866 - DNA, 25 bp, Homo sapien
ccagcccccgacgagcagagccctg

SEQ ID NO: 2562867 - DNA, 25 bp, Homo sapien
gcccccgacgagcagagccctggag

SEQ ID NO: 2562868 - DNA, 25 bp, Homo sapien
cagcccccgacgagcagagccctgg

SEQ ID NO: 2562869 - DNA, 25 bp, Homo sapien
gagcccagtgactatcaaggtggct

SEQ ID NO: 2562870 - DNA, 25 bp, Homo sapien
gggtgctgagagtggcaacacaggc

SEQ ID NO: 2562871 - DNA, 25 bp, Homo sapien
gggagctctcggtggcaggcagcac

SEQ ID NO: 2562872 - DNA, 25 bp, Homo sapien
gagtcccacatggtggtacaggtgg

SEQ ID NO: 2562873 - DNA, 25 bp, Homo sapien
gtggcaagccaaccaggtgctgagg

SEQ ID NO: 2562874 - DNA, 25 bp, Homo sapien
ctgtgtgtgggtggcaagccaacca

SEQ ID NO: 2562875 - DNA, 25 bp, Homo sapien
gtgtgggtggcaagccaaccaggtg

SEQ ID NO: 2562876 - DNA, 25 bp, Homo sapien
agccactgtgtgtgggtggcaagcc

SEQ ID NO: 2562877 - DNA, 25 bp, Homo sapien
gaaaccctcaacagcagtctgggca

SEQ ID NO: 2562878 - DNA, 25 bp, Homo sapien
tgagaccaaggctcctcacagaagg

SEQ ID NO: 2562879 - DNA, 25 bp, Homo sapien
gatgtgtcctcatctcaggcccgtg

SEQ ID NO: 2562880 - DNA, 25 bp, Homo sapien
catctgcgaaccagggtgaagtcac

SEQ ID NO: 2562881 - DNA, 25 bp, Homo sapien
cacacgcgaggtcttcctggaggcc

SEQ ID NO: 2562882 - DNA, 25 bp, Homo sapien
ccgtgcagatgctaggcgaggccct

SEQ ID NO: 2562883 - DNA, 25 bp, Homo sapien
ctggacctgccctagaggcgggaag

SEQ ID NO: 2562884 - DNA, 25 bp, Homo sapien
gcgtgtctacaacgtctcccagaag

SEQ ID NO: 2562885 - DNA, 25 bp, Homo sapien
ttgtctaggacttcagaacttcctg

SEQ ID NO: 2562886 - DNA, 25 bp, Homo sapien
tcttgtctaggacttcagaacttcc

SEQ ID NO: 2562887 - DNA, 25 bp, Homo sapien
tgtctaggacttcagaacttcctgt

SEQ ID NO: 2562888 - DNA, 25 bp, Homo sapien
cttgtctaggacttcagaacttcct

SEQ ID NO: 2562889 - DNA, 25 bp, Homo sapien
gtttgccactggctcgaatctgggc

SEQ ID NO: 2562890 - DNA, 25 bp, Homo sapien
actgcccttcctgttgttcccgagc

SEQ ID NO: 2562891 - DNA, 25 bp, Homo sapien
ccactggctcgaatctgggcaggaa

SEQ ID NO: 2562892 - DNA, 25 bp, Homo sapien
tgttgttcccgagccaccagccaca

SEQ ID NO: 2562893 - DNA, 25 bp, Homo sapien
aagggcgtgactctgatctcaggca

SEQ ID NO: 2562894 - DNA, 25 bp, Homo sapien
agggcgtgactctgatctcaggcat

SEQ ID NO: 2562895 - DNA, 25 bp, Homo sapien
caagggcgtgactctgatctcaggc

SEQ ID NO: 2562896 - DNA, 25 bp, Homo sapien
ccaagggcgtgactctgatctcagg

SEQ ID NO: 2562897 - DNA, 25 bp, Homo sapien
caccccacagccctcccggcggctc

SEQ ID NO: 2562898 - DNA, 25 bp, Homo sapien
cggagcccaccccacagccctcccg

SEQ ID NO: 2562899 - DNA, 25 bp, Homo sapien
agcccaccccacagccctcccggcg

SEQ ID NO: 2562900 - DNA, 25 bp, Homo sapien
cacagccctcccggcggctcccact

SEQ ID NO: 2562901 - DNA, 25 bp, Homo sapien
ctccacgagaaacgggagggagcgg

SEQ ID NO: 2562902 - DNA, 25 bp, Homo sapien
ctggctccacgagaaacgggaggga

SEQ ID NO: 2562903 - DNA, 25 bp, Homo sapien
gagcgggcgcccagcccgcccggag

SEQ ID NO: 2562904 - DNA, 25 bp, Homo sapien
tggctccacgagaaacgggagggag

SEQ ID NO: 2562905 - DNA, 25 bp, Homo sapien
gcatctgcgccagattcagggcgtc

SEQ ID NO: 2562906 - DNA, 25 bp, Homo sapien
tttgagcttggactgttgctccaac

SEQ ID NO: 2562907 - DNA, 25 bp, Homo sapien
gttgctccaactgcagcgtctgctc

SEQ ID NO: 2562908 - DNA, 25 bp, Homo sapien
tgctcctgcatctgcgccagattca

SEQ ID NO: 2562909 - DNA, 25 bp, Homo sapien
tccgtaaatcctcattgacaagttg

SEQ ID NO: 2562910 - DNA, 25 bp, Homo sapien
actttgtcccggtctgtcacaaagg

SEQ ID NO: 2562911 - DNA, 25 bp, Homo sapien
aatccttccccaaacaaggtgccag

SEQ ID NO: 2562912 - DNA, 25 bp, Homo sapien
gaatccttccccaaacaaggtgcca

SEQ ID NO: 2562913 - DNA, 25 bp, Homo sapien
cgtggctgtcactttgtcccggtct

SEQ ID NO: 2562914 - DNA, 25 bp, Homo sapien
ccagccctgttttatgagtatgttt

SEQ ID NO: 2562915 - DNA, 25 bp, Homo sapien
agcaggtccagtttgggcttgttcc

SEQ ID NO: 2562916 - DNA, 25 bp, Homo sapien
cttgttccatgctgggagagtgcca

SEQ ID NO: 2562917 - DNA, 25 bp, Homo sapien
tttgggcttgttccatgctgggaga

SEQ ID NO: 2562918 - DNA, 25 bp, Homo sapien
caggtccagtttgggcttgttccat

SEQ ID NO: 2562919 - DNA, 25 bp, Homo sapien
acagccacgcggttacaggaggcag

SEQ ID NO: 2562920 - DNA, 25 bp, Homo sapien
tgagggagaagcacagggccgtgtg

SEQ ID NO: 2562921 - DNA, 25 bp, Homo sapien
gctggccccacaggaacccgaattc

SEQ ID NO: 2562922 - DNA, 25 bp, Homo sapien
ccacagccacgcggttacaggaggc

SEQ ID NO: 2562923 - DNA, 25 bp, Homo sapien
accgtgatgcgggacgtctccctca

SEQ ID NO: 2562924 - DNA, 25 bp, Homo sapien
agcggccagtgacggctgtcgcatt

SEQ ID NO: 2562925 - DNA, 25 bp, Homo sapien
cattcttggctgagtagaccccgac

SEQ ID NO: 2562926 - DNA, 25 bp, Homo sapien
gacgtctccctcactagggacggct

SEQ ID NO: 2562927 - DNA, 25 bp, Homo sapien
acaacaccctccagcacatcctggg

SEQ ID NO: 2562928 - DNA, 25 bp, Homo sapien
actaagcacaacaccctccagcaca

SEQ ID NO: 2562929 - DNA, 25 bp, Homo sapien
cacatcctggggtcgactgaggagc

SEQ ID NO: 2562930 - DNA, 25 bp, Homo sapien
ctccagcacatcctggggtcgactg

SEQ ID NO: 2562931 - DNA, 25 bp, Homo sapien
ctaagaaatttgtcagttcaaacac

SEQ ID NO: 2562932 - DNA, 25 bp, Homo sapien
atttctctaagaaatttgtcagttc

SEQ ID NO: 2562933 - DNA, 25 bp, Homo sapien
agaaatttgtcagttcaaacacaaa

SEQ ID NO: 2562934 - DNA, 25 bp, Homo sapien
agatattaatacatcccctttcctg

SEQ ID NO: 2562935 - DNA, 25 bp, Homo sapien
taacacattgaacatcttgaggtat

SEQ ID NO: 2562936 - DNA, 25 bp, Homo sapien
ttaacacattgaacatcttgaggta

SEQ ID NO: 2562937 - DNA, 25 bp, Homo sapien
gatttctgaggatgttcaggcctga

SEQ ID NO: 2562938 - DNA, 25 bp, Homo sapien
tttctgaggatgttcaggcctgaat

SEQ ID NO: 2562939 - DNA, 25 bp, Homo sapien
ttgatttctgaggatgttcaggcct

SEQ ID NO: 2562940 - DNA, 25 bp, Homo sapien
tctgaggatgttcaggcctgaatga

SEQ ID NO: 2562941 - DNA, 25 bp, Homo sapien
ccaggtctacttcagacgtggcaag

SEQ ID NO: 2562942 - DNA, 25 bp, Homo sapien
ggtgacctggtcactaccaggcctg

SEQ ID NO: 2562943 - DNA, 25 bp, Homo sapien
gaagaggcacaggtcactggccctg

SEQ ID NO: 2562944 - DNA, 25 bp, Homo sapien
tctgtggctgtttcccactgagggc

SEQ ID NO: 2562945 - DNA, 25 bp, Homo sapien
gggcctgatggcctcatcagccttt

SEQ ID NO: 2562946 - DNA, 25 bp, Homo sapien
ttcatcctaagttgctgtgacaggc

SEQ ID NO: 2562947 - DNA, 25 bp, Homo sapien
ccttcatcctaagttgctgtgacag

SEQ ID NO: 2562948 - DNA, 25 bp, Homo sapien
tgctgggccgtgtccggctgcggag

SEQ ID NO: 2562949 - DNA, 25 bp, Homo sapien
ccccttcatcctaagttgctgtgac

SEQ ID NO: 2562950 - DNA, 25 bp, Homo sapien
gtgaccatggcgagctctgacgagt

SEQ ID NO: 2562951 - DNA, 25 bp, Homo sapien
ggcagcagatccgacttgttgttga

SEQ ID NO: 2562952 - DNA, 25 bp, Homo sapien
gtatcaaagaggtcgtagcccaggc

SEQ ID NO: 2562953 - DNA, 25 bp, Homo sapien
caggctccgagcacgtatcaaagag

SEQ ID NO: 2562954 - DNA, 25 bp, Homo sapien
ctggggcatgaggaagaagctgaag

SEQ ID NO: 2562955 - DNA, 25 bp, Homo sapien
tggggcatgaggaagaagctgaaga

SEQ ID NO: 2562956 - DNA, 25 bp, Homo sapien
ggggcatgaggaagaagctgaagaa

SEQ ID NO: 2562957 - DNA, 25 bp, Homo sapien
gggcatgaggaagaagctgaagaac

SEQ ID NO: 2562958 - DNA, 25 bp, Homo sapien
ccaagaggcatctcctgacacaggg

SEQ ID NO: 2562959 - DNA, 25 bp, Homo sapien
caagggccaagaggcatctcctgac

SEQ ID NO: 2562960 - DNA, 25 bp, Homo sapien
aagaggcatctcctgacacaggggc

SEQ ID NO: 2562961 - DNA, 25 bp, Homo sapien
gggccaagaggcatctcctgacaca

SEQ ID NO: 2562962 - DNA, 25 bp, Homo sapien
tcgctgggcacggtgcggaagaagg

SEQ ID NO: 2562963 - DNA, 25 bp, Homo sapien
cagcagctccatgctagcaccgtag

SEQ ID NO: 2562964 - DNA, 25 bp, Homo sapien
aaggtctcccgggcgctcagcagct

SEQ ID NO: 2562965 - DNA, 25 bp, Homo sapien
gtcagctgcacacggtcgctgggca

SEQ ID NO: 2562966 - DNA, 25 bp, Homo sapien
ctcgtgcgcgatgcagatgccgcgt

SEQ ID NO: 2562967 - DNA, 25 bp, Homo sapien
accaggccctcgtgcgcgatgcaga

SEQ ID NO: 2562968 - DNA, 25 bp, Homo sapien
gccctcgtgcgcgatgcagatgccg

SEQ ID NO: 2562969 - DNA, 25 bp, Homo sapien
gatgctcaggccctgccggccgtac

SEQ ID NO: 2562970 - DNA, 25 bp, Homo sapien
cttccccagccgcgagtcatcggca

SEQ ID NO: 2562971 - DNA, 25 bp, Homo sapien
ttccccagccgcgagtcatcggcac

SEQ ID NO: 2562972 - DNA, 25 bp, Homo sapien
gttgaagagggcgtgggcggcgtgc

SEQ ID NO: 2562973 - DNA, 25 bp, Homo sapien
gcagcaccacctgcacgctgctctg

SEQ ID NO: 2562974 - DNA, 25 bp, Homo sapien
gggcggcgtgcacggaggcgaacag

SEQ ID NO: 2562975 - DNA, 25 bp, Homo sapien
agcaccacctgcacgctgctctggt

SEQ ID NO: 2562976 - DNA, 25 bp, Homo sapien
tggccacccacaccttgggcgagag

SEQ ID NO: 2562977 - DNA, 25 bp, Homo sapien
ggcagagcagaaggccgggtcggtg

SEQ ID NO: 2562978 - DNA, 25 bp, Homo sapien
ccagggccaggtgcgtcttcacgta

SEQ ID NO: 2562979 - DNA, 25 bp, Homo sapien
cacgtactgggggaactcgtgcagc

SEQ ID NO: 2562980 - DNA, 25 bp, Homo sapien
cggggtcctgcgcggggcagcctga

SEQ ID NO: 2562981 - DNA, 25 bp, Homo sapien
gggcagcctgaggcgttgcactgaa

SEQ ID NO: 2562982 - DNA, 25 bp, Homo sapien
ggcgttgcactgaagagtgttgtgc

SEQ ID NO: 2562983 - DNA, 25 bp, Homo sapien
ctgaggcgttgcactgaagagtgtt

SEQ ID NO: 2562984 - DNA, 25 bp, Homo sapien
aaggtcaggttgtacatgttctcca

SEQ ID NO: 2562985 - DNA, 25 bp, Homo sapien
agacgtgtgccagcggatcttcagg

SEQ ID NO: 2562986 - DNA, 25 bp, Homo sapien
gttgaacctgcccacgtcgtggagc

SEQ ID NO: 2562987 - DNA, 25 bp, Homo sapien
agcttcaggtcgtactccatgtcca

SEQ ID NO: 2562988 - DNA, 25 bp, Homo sapien
tgcgcacaggcctggggtctggctc

SEQ ID NO: 2562989 - DNA, 25 bp, Homo sapien
aggcctggggtctggctctgctcgg

SEQ ID NO: 2562990 - DNA, 25 bp, Homo sapien
ctgcgcacaggcctggggtctggct

SEQ ID NO: 2562991 - DNA, 25 bp, Homo sapien
cacaggcctggggtctggctctgct

SEQ ID NO: 2562992 - DNA, 25 bp, Homo sapien
tgccgcgagcaccgggacacgggct

SEQ ID NO: 2562993 - DNA, 25 bp, Homo sapien
gccgcgagcaccgggacacgggctt

SEQ ID NO: 2562994 - DNA, 25 bp, Homo sapien
ctgccgcgagcaccgggacacgggc

SEQ ID NO: 2562995 - DNA, 25 bp, Homo sapien
cagcaggagtggaaccccttgaccc

SEQ ID NO: 2562996 - DNA, 25 bp, Homo sapien
tccacacagtcgtagcagcaggagt

SEQ ID NO: 2562997 - DNA, 25 bp, Homo sapien
gagtggaaccccttgacccggcgca

SEQ ID NO: 2562998 - DNA, 25 bp, Homo sapien
gtagctgcccgcctcgcagtccaca

SEQ ID NO: 2562999 - DNA, 25 bp, Homo sapien
cccgcctgccgggaaggcggctcac

SEQ ID NO: 2563000 - DNA, 25 bp, Homo sapien
ccccgcctgccgggaaggcggctca

SEQ ID NO: 2563001 - DNA, 25 bp, Homo sapien
ccacaaaaggtgcaggcgatgtcgt

SEQ ID NO: 2563002 - DNA, 25 bp, Homo sapien
cggaagcagcgtgtgcttcgctccg

SEQ ID NO: 2563003 - DNA, 25 bp, Homo sapien
atgccaggaaccgagacctgcggcg

SEQ ID NO: 2563004 - DNA, 25 bp, Homo sapien
tgggctgtcccgatggtgaacgaac

SEQ ID NO: 2563005 - DNA, 25 bp, Homo sapien
aggacgctgaggcagaccaggccca

SEQ ID NO: 2563006 - DNA, 25 bp, Homo sapien
gaggacgctgaggcagaccaggccc

SEQ ID NO: 2563007 - DNA, 25 bp, Homo sapien
gaggcagttctgactccacgaagat

SEQ ID NO: 2563008 - DNA, 25 bp, Homo sapien
ggcacaaaggagacccaggtgatga

SEQ ID NO: 2563009 - DNA, 25 bp, Homo sapien
ggtaccaggtgcacagtgcgacctc

SEQ ID NO: 2563010 - DNA, 25 bp, Homo sapien
gcctccgtgggcagcatgtgccagt

SEQ ID NO: 2563011 - DNA, 25 bp, Homo sapien
gactctgaccggagaccctgtgtgg

SEQ ID NO: 2563012 - DNA, 25 bp, Homo sapien
cttttcctgagctcacggtgtgggt

SEQ ID NO: 2563013 - DNA, 25 bp, Homo sapien
ctccgggcctctttccagaacagtg

SEQ ID NO: 2563014 - DNA, 25 bp, Homo sapien
aacctagagcgggagggtctctgta

SEQ ID NO: 2563015 - DNA, 25 bp, Homo sapien
tcaaagtcccagcgtttagatggtt

SEQ ID NO: 2563016 - DNA, 25 bp, Homo sapien
tatcaaagtcccagcgtttagatgg

SEQ ID NO: 2563017 - DNA, 25 bp, Homo sapien
atcaaagtcccagcgtttagatggt

SEQ ID NO: 2563018 - DNA, 25 bp, Homo sapien
caaagtcccagcgtttagatggtta

SEQ ID NO: 2563019 - DNA, 25 bp, Homo sapien
tcagacaggaaacctttgctttggg

SEQ ID NO: 2563020 - DNA, 25 bp, Homo sapien
tcgggggaatcacagcaacgagaca

SEQ ID NO: 2563021 - DNA, 25 bp, Homo sapien
cagcaacgagacagcacagtgccat

SEQ ID NO: 2563022 - DNA, 25 bp, Homo sapien
ctcgctgctggaggactctcagaca

SEQ ID NO: 2563023 - DNA, 25 bp, Homo sapien
aggccgggcccccgagaagaatgag

SEQ ID NO: 2563024 - DNA, 25 bp, Homo sapien
gccgggcccccgagaagaatgaggc

SEQ ID NO: 2563025 - DNA, 25 bp, Homo sapien
ccgggcccccgagaagaatgaggct

SEQ ID NO: 2563026 - DNA, 25 bp, Homo sapien
ctgagaccagaacgagtggggaagg

SEQ ID NO: 2563027 - DNA, 25 bp, Homo sapien
agaccagaacgagtggggaaggagc

SEQ ID NO: 2563028 - DNA, 25 bp, Homo sapien
tgagaccagaacgagtggggaagga

SEQ ID NO: 2563029 - DNA, 25 bp, Homo sapien
accagaacgagtggggaaggagcag

SEQ ID NO: 2563030 - DNA, 25 bp, Homo sapien
ggaaggagcagggggcccatgctgg

SEQ ID NO: 2563031 - DNA, 25 bp, Homo sapien
tgcccattggggaaggagcaggggg

SEQ ID NO: 2563032 - DNA, 25 bp, Homo sapien
gagcagggggcccatgctggcccag

SEQ ID NO: 2563033 - DNA, 25 bp, Homo sapien
aaggagcagggggcccatgctggcc

SEQ ID NO: 2563034 - DNA, 25 bp, Homo sapien
gctcttcttttggttgtgcgaggac

SEQ ID NO: 2563035 - DNA, 25 bp, Homo sapien
tggttggggcggaccagtagcccag

SEQ ID NO: 2563036 - DNA, 25 bp, Homo sapien
accagtagcccagggccatacactg

SEQ ID NO: 2563037 - DNA, 25 bp, Homo sapien
cagtgcactttgaggagtgctggca

SEQ ID NO: 2563038 - DNA, 25 bp, Homo sapien
agactcccacgtgtgaagaccgggc

SEQ ID NO: 2563039 - DNA, 25 bp, Homo sapien
cagctagcagccactgggaatcaga

SEQ ID NO: 2563040 - DNA, 25 bp, Homo sapien
tccgtgggtgataattgagagcgtc

SEQ ID NO: 2563041 - DNA, 25 bp, Homo sapien
gaaaccttccgtcgtgagggagcac

SEQ ID NO: 2563042 - DNA, 25 bp, Homo sapien
gccgcgagagcgcgctgtccgccaa

SEQ ID NO: 2563043 - DNA, 25 bp, Homo sapien
tcgggccgcgagagcgcgctgtccg

SEQ ID NO: 2563044 - DNA, 25 bp, Homo sapien
gcgagagcgcgctgtccgccaaggc

SEQ ID NO: 2563045 - DNA, 25 bp, Homo sapien
ctcgggccgcgagagcgcgctgtcc

SEQ ID NO: 2563046 - DNA, 25 bp, Homo sapien
tgaggaggccctggaagagggccat

SEQ ID NO: 2563047 - DNA, 25 bp, Homo sapien
ccagctctgagctgaggaggccctg

SEQ ID NO: 2563048 - DNA, 25 bp, Homo sapien
ctgaggaggccctggaagagggcca

SEQ ID NO: 2563049 - DNA, 25 bp, Homo sapien
ctcccagctctgagctgaggaggcc

SEQ ID NO: 2563050 - DNA, 25 bp, Homo sapien
gtggagccccatccgttctcccgcg

SEQ ID NO: 2563051 - DNA, 25 bp, Homo sapien
tgtggagccccatccgttctcccgc

SEQ ID NO: 2563052 - DNA, 25 bp, Homo sapien
cccatccgttctcccgcggcgcatc

SEQ ID NO: 2563053 - DNA, 25 bp, Homo sapien
gagccccatccgttctcccgcggcg

SEQ ID NO: 2563054 - DNA, 25 bp, Homo sapien
ccagccgaggtctgaggtctgtgga

SEQ ID NO: 2563055 - DNA, 25 bp, Homo sapien
cagccgaggtctgaggtctgtggag

SEQ ID NO: 2563056 - DNA, 25 bp, Homo sapien
ggcgacccgaacagtggtacagctt

SEQ ID NO: 2563057 - DNA, 25 bp, Homo sapien
gcgacccgaacagtggtacagcttg

SEQ ID NO: 2563058 - DNA, 25 bp, Homo sapien
tggcgacccgaacagtggtacagct

SEQ ID NO: 2563059 - DNA, 25 bp, Homo sapien
ctggcgacccgaacagtggtacagc

SEQ ID NO: 2563060 - DNA, 25 bp, Homo sapien
gccttcagcgtcatctccacggcag

SEQ ID NO: 2563061 - DNA, 25 bp, Homo sapien
cagcttccggtcagaccccaggtcc

SEQ ID NO: 2563062 - DNA, 25 bp, Homo sapien
ttcagcgtcatctccacggcagccc

SEQ ID NO: 2563063 - DNA, 25 bp, Homo sapien
agcttccggtcagaccccaggtcct

SEQ ID NO: 2563064 - DNA, 25 bp, Homo sapien
cagaagcctggattgtgcggaggag

SEQ ID NO: 2563065 - DNA, 25 bp, Homo sapien
agggagcattcccaaaggcgggtgg

SEQ ID NO: 2563066 - DNA, 25 bp, Homo sapien
ctgcagaagcctggattgtgcggag

SEQ ID NO: 2563067 - DNA, 25 bp, Homo sapien
gaggagggagcattcccaaaggcgg

SEQ ID NO: 2563068 - DNA, 25 bp, Homo sapien
tagtacatcatattgccagcagggc

SEQ ID NO: 2563069 - DNA, 25 bp, Homo sapien
ctcaggcggctgtttccaaaggtgt

SEQ ID NO: 2563070 - DNA, 25 bp, Homo sapien
cagggtcaaggctcattccgtggcc

SEQ ID NO: 2563071 - DNA, 25 bp, Homo sapien
gaagctcttggctgaggatccgcct

SEQ ID NO: 2563072 - DNA, 25 bp, Homo sapien
tcagtgacccttgagacccctggtt

SEQ ID NO: 2563073 - DNA, 25 bp, Homo sapien
gatgcttccctccagagactattcc

SEQ ID NO: 2563074 - DNA, 25 bp, Homo sapien
gctgttatcggagacaattctgagg

SEQ ID NO: 2563075 - DNA, 25 bp, Homo sapien
tccagagactattccccttttccag

SEQ ID NO: 2563076 - DNA, 25 bp, Homo sapien
gtgtaagccacaggtccacaacgtt

SEQ ID NO: 2563077 - DNA, 25 bp, Homo sapien
tgtccagtttcaccacgaattcctt

SEQ ID NO: 2563078 - DNA, 25 bp, Homo sapien
gttcatcagctctggaaatccctca

SEQ ID NO: 2563079 - DNA, 25 bp, Homo sapien
gaaatccctcaacaattgtgtccag

SEQ ID NO: 2563080 - DNA, 25 bp, Homo sapien
gcgcgtcctagctgtgccgagctca

SEQ ID NO: 2563081 - DNA, 25 bp, Homo sapien
cagcgcgtcctagctgtgccgagct

SEQ ID NO: 2563082 - DNA, 25 bp, Homo sapien
gcgtcctagctgtgccgagctcaca

SEQ ID NO: 2563083 - DNA, 25 bp, Homo sapien
agcgcgtcctagctgtgccgagctc

SEQ ID NO: 2563084 - DNA, 25 bp, Homo sapien
gtgctgatcggggacaggctgtact

SEQ ID NO: 2563085 - DNA, 25 bp, Homo sapien
agggggtgctgatcggggacaggct

SEQ ID NO: 2563086 - DNA, 25 bp, Homo sapien
tgctgatcggggacaggctgtactc

SEQ ID NO: 2563087 - DNA, 25 bp, Homo sapien
caattgcggctaggcggcgtcgcct

SEQ ID NO: 2563088 - DNA, 25 bp, Homo sapien
tggtcgcgggccgaaccaatggcac

SEQ ID NO: 2563089 - DNA, 25 bp, Homo sapien
caggttccggcgtcggcgttaggcg

SEQ ID NO: 2563090 - DNA, 25 bp, Homo sapien
gcgttaggcgcgttgctgacgggca

SEQ ID NO: 2563091 - DNA, 25 bp, Homo sapien
gacagacatgcttccgggtcggccg

SEQ ID NO: 2563092 - DNA, 25 bp, Homo sapien
gctcggggcgcacaggcaggcgctc

SEQ ID NO: 2563093 - DNA, 25 bp, Homo sapien
aggcgctctcagcacggcacccgcg

SEQ ID NO: 2563094 - DNA, 25 bp, Homo sapien
gggtctctgtgcgaacgtgggcatc

SEQ ID NO: 2563095 - DNA, 25 bp, Homo sapien
ccttgacccacaggcctttcgagac

SEQ ID NO: 2563096 - DNA, 25 bp, Homo sapien
cccaaagtctggagtcgataaggac

SEQ ID NO: 2563097 - DNA, 25 bp, Homo sapien
aatacgcatccccaaagtctggagt

SEQ ID NO: 2563098 - DNA, 25 bp, Homo sapien
ctgaagacacgacgccgacggcggc

SEQ ID NO: 2563099 - DNA, 25 bp, Homo sapien
cgataaggactgaagacacgacgcc

SEQ ID NO: 2563100 - DNA, 25 bp, Homo sapien
gacagccgcaggtgatgaaaaaccg

SEQ ID NO: 2563101 - DNA, 25 bp, Homo sapien
gagagcgtgcagctgtaactcacag

SEQ ID NO: 2563102 - DNA, 25 bp, Homo sapien
tgttacccataacaggcggtgagga

SEQ ID NO: 2563103 - DNA, 25 bp, Homo sapien
caaaggttccggtaactgcagcaac

SEQ ID NO: 2563104 - DNA, 25 bp, Homo sapien
caataacagacatgagggatggccc

SEQ ID NO: 2563105 - DNA, 25 bp, Homo sapien
tgtaggagcgcctaaactgagtgcc

SEQ ID NO: 2563106 - DNA, 25 bp, Homo sapien
gaatcctgtgggaacgtgcccttca

SEQ ID NO: 2563107 - DNA, 25 bp, Homo sapien
cacttgctagagatggcttcaggcc

SEQ ID NO: 2563108 - DNA, 25 bp, Homo sapien
tggagcgaacggatggtttatgcaa

SEQ ID NO: 2563109 - DNA, 25 bp, Homo sapien
caaagatcttcagggtaggcttagg

SEQ ID NO: 2563110 - DNA, 25 bp, Homo sapien
tggtcattatgctagtccctctgct

SEQ ID NO: 2563111 - DNA, 25 bp, Homo sapien
gagtgatttctgatgacatagcagg

SEQ ID NO: 2563112 - DNA, 25 bp, Homo sapien
caaagtgttgtgcagagccactgca

SEQ ID NO: 2563113 - DNA, 25 bp, Homo sapien
ttttgctagtttccgaggctggagt

SEQ ID NO: 2563114 - DNA, 25 bp, Homo sapien
ccaaagtgttgtgcagagccactgc

SEQ ID NO: 2563115 - DNA, 25 bp, Homo sapien
gatggagttttgctagtttccgagg

SEQ ID NO: 2563116 - DNA, 25 bp, Homo sapien
tccataaactgaaaatcctgcaggt

SEQ ID NO: 2563117 - DNA, 25 bp, Homo sapien
aataacaacagcttctccatgtctc

SEQ ID NO: 2563118 - DNA, 25 bp, Homo sapien
tgagtgtccccatcgctcaggaaat

SEQ ID NO: 2563119 - DNA, 25 bp, Homo sapien
ccatgtctccagtcagtcatgtcca

SEQ ID NO: 2563120 - DNA, 25 bp, Homo sapien
aacaccgtcaccacgatagaacctg

SEQ ID NO: 2563121 - DNA, 25 bp, Homo sapien
ggggatgaccacgtggtgcccgtcc

SEQ ID NO: 2563122 - DNA, 25 bp, Homo sapien
catggggatgaccacgtggtgcccg

SEQ ID NO: 2563123 - DNA, 25 bp, Homo sapien
gtcaccacgatagaacctgccatgg

SEQ ID NO: 2563124 - DNA, 25 bp, Homo sapien
ctggacaaagtcttgcacgcaggcg

SEQ ID NO: 2563125 - DNA, 25 bp, Homo sapien
ggacaaagtcttgcacgcaggcgtc

SEQ ID NO: 2563126 - DNA, 25 bp, Homo sapien
tggacaaagtcttgcacgcaggcgt

SEQ ID NO: 2563127 - DNA, 25 bp, Homo sapien
gacaaagtcttgcacgcaggcgtcc

SEQ ID NO: 2563128 - DNA, 25 bp, Homo sapien
tcagccaatagacacagcggtgcgg

SEQ ID NO: 2563129 - DNA, 25 bp, Homo sapien
ttggcctcgctgagattccaggcgt

SEQ ID NO: 2563130 - DNA, 25 bp, Homo sapien
catcaaggtttgcagggactagctg

SEQ ID NO: 2563131 - DNA, 25 bp, Homo sapien
gactcaggatgagggttgctcgtcc

SEQ ID NO: 2563132 - DNA, 25 bp, Homo sapien
cttcctcccggcgacggaaatgcgt

SEQ ID NO: 2563133 - DNA, 25 bp, Homo sapien
cgacggaaatgcgtaagggacacgc

SEQ ID NO: 2563134 - DNA, 25 bp, Homo sapien
ctcccggcgacggaaatgcgtaagg

SEQ ID NO: 2563135 - DNA, 25 bp, Homo sapien
aaatgcgtaagggacacgcgcgcag

SEQ ID NO: 2563136 - DNA, 25 bp, Homo sapien
cccttgttaacgccgaagagccacg

SEQ ID NO: 2563137 - DNA, 25 bp, Homo sapien
cttgttaacgccgaagagccacgac

SEQ ID NO: 2563138 - DNA, 25 bp, Homo sapien
tgttaacgccgaagagccacgacat

SEQ ID NO: 2563139 - DNA, 25 bp, Homo sapien
ggcccttgttaacgccgaagagcca

SEQ ID NO: 2563140 - DNA, 25 bp, Homo sapien
gggcgccggcggtctcccaagccgc

SEQ ID NO: 2563141 - DNA, 25 bp, Homo sapien
gccggcggtctcccaagccgcggtc

SEQ ID NO: 2563142 - DNA, 25 bp, Homo sapien
gcgccggcggtctcccaagccgcgg

SEQ ID NO: 2563143 - DNA, 25 bp, Homo sapien
cgcgcgccgccttggtcctattttt

SEQ ID NO: 2563144 - DNA, 25 bp, Homo sapien
tcccggcacgcgagacggctccggc

SEQ ID NO: 2563145 - DNA, 25 bp, Homo sapien
cgggtgacggaaagagtccgatcct

SEQ ID NO: 2563146 - DNA, 25 bp, Homo sapien
gaaagagtccgatcctcccggcacg

SEQ ID NO: 2563147 - DNA, 25 bp, Homo sapien
tgcaaacgggtgacggaaagagtcc

SEQ ID NO: 2563148 - DNA, 25 bp, Homo sapien
gcagagcggactgcgggtcaggagc

SEQ ID NO: 2563149 - DNA, 25 bp, Homo sapien
agggcagaccaaggcactggcaacg

SEQ ID NO: 2563150 - DNA, 25 bp, Homo sapien
aacaaaagcctgatggagggctccc

SEQ ID NO: 2563151 - DNA, 25 bp, Homo sapien
ggactggagcaactcagaggcacag

SEQ ID NO: 2563152 - DNA, 25 bp, Homo sapien
ctgggataatgtactgctgtgactt

SEQ ID NO: 2563153 - DNA, 25 bp, Homo sapien
acctagtgggaagcggtggttcacg

SEQ ID NO: 2563154 - DNA, 25 bp, Homo sapien
gtaggatacacggataccaaagcct

SEQ ID NO: 2563155 - DNA, 25 bp, Homo sapien
ggcgcatgtggcacggagagcaggt

SEQ ID NO: 2563156 - DNA, 25 bp, Homo sapien
ggcagaggctacagtcacccagatc

SEQ ID NO: 2563157 - DNA, 25 bp, Homo sapien
tgcatctgcgccagattcagggcct

SEQ ID NO: 2563158 - DNA, 25 bp, Homo sapien
gttgctccaactgcagcgtctgctc

SEQ ID NO: 2563159 - DNA, 25 bp, Homo sapien
tttgagcttggactgttgctccaac

SEQ ID NO: 2563160 - DNA, 25 bp, Homo sapien
actgcagcgtctgctcctgcatctg

SEQ ID NO: 2563161 - DNA, 25 bp, Homo sapien
cagcagagaagcctgcgaaggcccc

SEQ ID NO: 2563162 - DNA, 25 bp, Homo sapien
gcaggtgctcacttttggactgtga

SEQ ID NO: 2563163 - DNA, 25 bp, Homo sapien
gatcaggccctggaggaatccagac

SEQ ID NO: 2563164 - DNA, 25 bp, Homo sapien
tgagggcagagctcgtgcccattct

SEQ ID NO: 2563165 - DNA, 25 bp, Homo sapien
gtgtctgcacagctccggcacggca

SEQ ID NO: 2563166 - DNA, 25 bp, Homo sapien
gcacggcagagactccgtgcccaga

SEQ ID NO: 2563167 - DNA, 25 bp, Homo sapien
gcacagctccggcacggcagagact

SEQ ID NO: 2563168 - DNA, 25 bp, Homo sapien
cgtgcccagactagtgtgtgcagca

SEQ ID NO: 2563169 - DNA, 25 bp, Homo sapien
agcctgcgcccggatctgctcgctc

SEQ ID NO: 2563170 - DNA, 25 bp, Homo sapien
tgcgcccggatctgctcgctcttga

SEQ ID NO: 2563171 - DNA, 25 bp, Homo sapien
cccggatctgctcgctcttgagctg

SEQ ID NO: 2563172 - DNA, 25 bp, Homo sapien
tggtgctgccgggtctcctcgctca

SEQ ID NO: 2563173 - DNA, 25 bp, Homo sapien
gggacctcccgtccggctcagcagt

SEQ ID NO: 2563174 - DNA, 25 bp, Homo sapien
gctcagcagtgagggaccttacagg

SEQ ID NO: 2563175 - DNA, 25 bp, Homo sapien
tgagggaccttacaggtcttaggcg

SEQ ID NO: 2563176 - DNA, 25 bp, Homo sapien
tcagcctcacacaaacgtggggagg

SEQ ID NO: 2563177 - DNA, 25 bp, Homo sapien
cagttggtcctcgtagcgctgccgg

SEQ ID NO: 2563178 - DNA, 25 bp, Homo sapien
gctgcttcagttggtcctcgtagcg

SEQ ID NO: 2563179 - DNA, 25 bp, Homo sapien
ccagcttgtcttgatactgggccct

SEQ ID NO: 2563180 - DNA, 25 bp, Homo sapien
ccgggccagcttgtcttgatactgg

SEQ ID NO: 2563181 - DNA, 25 bp, Homo sapien
ctgcttccgtaaattctcctcattg

SEQ ID NO: 2563182 - DNA, 25 bp, Homo sapien
tcgccgcatggcttcctgcttctgc

SEQ ID NO: 2563183 - DNA, 25 bp, Homo sapien
ttccgtaaattctcctcattgagaa

SEQ ID NO: 2563184 - DNA, 25 bp, Homo sapien
catggcttcctgcttctgcacggac

SEQ ID NO: 2563185 - DNA, 25 bp, Homo sapien
gcgtccactcgcagacagaggtgtc

SEQ ID NO: 2563186 - DNA, 25 bp, Homo sapien
tcctgccctccctgaacagatcctg

SEQ ID NO: 2563187 - DNA, 25 bp, Homo sapien
ctgaacagatcctggcgtccactcg

SEQ ID NO: 2563188 - DNA, 25 bp, Homo sapien
gcaggcctcgcccactgcactggta

SEQ ID NO: 2563189 - DNA, 25 bp, Homo sapien
actccaagacggtctgacggtgctc

SEQ ID NO: 2563190 - DNA, 25 bp, Homo sapien
gatctgctcgcggatgatgtctgca

SEQ ID NO: 2563191 - DNA, 25 bp, Homo sapien
tcggacgccttcaggcggatctgct

SEQ ID NO: 2563192 - DNA, 25 bp, Homo sapien
gcagcatctcattcttgtgccgcag

SEQ ID NO: 2563193 - DNA, 25 bp, Homo sapien
actttgtcccggtctgtcacaaagg

SEQ ID NO: 2563194 - DNA, 25 bp, Homo sapien
aatccttccccaaacaaggtgccag

SEQ ID NO: 2563195 - DNA, 25 bp, Homo sapien
gaatccttccccaaacaaggtgcca

SEQ ID NO: 2563196 - DNA, 25 bp, Homo sapien
cgtggctgtcactttgtcccggtct

SEQ ID NO: 2563197 - DNA, 25 bp, Homo sapien
ccagccctgttttatgagtatgttt

SEQ ID NO: 2563198 - DNA, 25 bp, Homo sapien
agcagccgagcccagcaggtacaac

SEQ ID NO: 2563199 - DNA, 25 bp, Homo sapien
ggtacaacgtgggtttgctctgtgc

SEQ ID NO: 2563200 - DNA, 25 bp, Homo sapien
ttcgctcttcttccacaggttggag

SEQ ID NO: 2563201 - DNA, 25 bp, Homo sapien
ttctctcgccaagaatggagtgcag

SEQ ID NO: 2563202 - DNA, 25 bp, Homo sapien
ggccacaccctctggtacatccttg

SEQ ID NO: 2563203 - DNA, 25 bp, Homo sapien
agactaacccaaaatctctaacttg

SEQ ID NO: 2563204 - DNA, 25 bp, Homo sapien
aaaatcgtttaggctggccaggtct

SEQ ID NO: 2563205 - DNA, 25 bp, Homo sapien
catccttggccactaaaaatggtac

SEQ ID NO: 2563206 - DNA, 25 bp, Homo sapien
agcataaatcctagaaagcctcggt

SEQ ID NO: 2563207 - DNA, 25 bp, Homo sapien
tcctagaaagcctcggtcgctgagc

SEQ ID NO: 2563208 - DNA, 25 bp, Homo sapien
aaatcctagaaagcctcggtcgctg

SEQ ID NO: 2563209 - DNA, 25 bp, Homo sapien
tggcagcataaatcctagaaagcct

SEQ ID NO: 2563210 - DNA, 25 bp, Homo sapien
gcagagacaccgcactggcgcaccg

SEQ ID NO: 2563211 - DNA, 25 bp, Homo sapien
gagacaccgcactggcgcaccggcc

SEQ ID NO: 2563212 - DNA, 25 bp, Homo sapien
gcagcagagacaccgcactggcgca

SEQ ID NO: 2563213 - DNA, 25 bp, Homo sapien
tgcagcagagacaccgcactggcgc

SEQ ID NO: 2563214 - DNA, 25 bp, Homo sapien
cattcttggctgagtagaccccgac

SEQ ID NO: 2563215 - DNA, 25 bp, Homo sapien
agcggccagtgacggctgtcgcatt

SEQ ID NO: 2563216 - DNA, 25 bp, Homo sapien
gacgtctccctcactagggacggct

SEQ ID NO: 2563217 - DNA, 25 bp, Homo sapien
accgtgatgcgggacgtctccctca

SEQ ID NO: 2563218 - DNA, 25 bp, Homo sapien
ctccagcacgtcctggggtcgactg

SEQ ID NO: 2563219 - DNA, 25 bp, Homo sapien
gtcctggggtcgactgaggagccgc

SEQ ID NO: 2563220 - DNA, 25 bp, Homo sapien
ccagcacgtcctggggtcgactgag

SEQ ID NO: 2563221 - DNA, 25 bp, Homo sapien
ctaagcacaacaccctccagcacgt

SEQ ID NO: 2563222 - DNA, 25 bp, Homo sapien
ttggcaaacagcgtcttcccggtgc

SEQ ID NO: 2563223 - DNA, 25 bp, Homo sapien
cttggcaaacagcgtcttcccggtg

SEQ ID NO: 2563224 - DNA, 25 bp, Homo sapien
tggcaaacagcgtcttcccggtgcc

SEQ ID NO: 2563225 - DNA, 25 bp, Homo sapien
tccatgcctgagtgcagggcgagtt

SEQ ID NO: 2563226 - DNA, 25 bp, Homo sapien
cgtccccgcctgtcatgatggcgta

SEQ ID NO: 2563227 - DNA, 25 bp, Homo sapien
gcctgtcatgatggcgtagtccatg

SEQ ID NO: 2563228 - DNA, 25 bp, Homo sapien
gccggctggtattggcccagtcaaa

SEQ ID NO: 2563229 - DNA, 25 bp, Homo sapien
caccagggtccacactcaggggact

SEQ ID NO: 2563230 - DNA, 25 bp, Homo sapien
ccctgagccaagtatcccactggca

SEQ ID NO: 2563231 - DNA, 25 bp, Homo sapien
gccctgagccaagtatcccactggc

SEQ ID NO: 2563232 - DNA, 25 bp, Homo sapien
gccaagcaaggcgagagtgacgcca

SEQ ID NO: 2563233 - DNA, 25 bp, Homo sapien
gagtgacgccaggagcagcccacag

SEQ ID NO: 2563234 - DNA, 25 bp, Homo sapien
ctgtgaacgagagagaggccaagca

SEQ ID NO: 2563235 - DNA, 25 bp, Homo sapien
gatccccacggggtcaggctctgcc

SEQ ID NO: 2563236 - DNA, 25 bp, Homo sapien
cgaaggaaggcgtccgcttcatcca

SEQ ID NO: 2563237 - DNA, 25 bp, Homo sapien
cttccgaaggaaggcgtccgcttca

SEQ ID NO: 2563238 - DNA, 25 bp, Homo sapien
tcgcttccgaaggaaggcgtccgct

SEQ ID NO: 2563239 - DNA, 25 bp, Homo sapien
tggctcgcttccgaaggaaggcgtc

SEQ ID NO: 2563240 - DNA, 25 bp, Homo sapien
tgctgtgttggcccatgtggtacag

SEQ ID NO: 2563241 - DNA, 25 bp, Homo sapien
gctgtgttggcccatgtggtacagg

SEQ ID NO: 2563242 - DNA, 25 bp, Homo sapien
tgtgttggcccatgtggtacaggaa

SEQ ID NO: 2563243 - DNA, 25 bp, Homo sapien
ctgtgttggcccatgtggtacagga

SEQ ID NO: 2563244 - DNA, 25 bp, Homo sapien
agccacggccgaccagcaggacttg

SEQ ID NO: 2563245 - DNA, 25 bp, Homo sapien
gatcctccgtgtgacacgtgactgg

SEQ ID NO: 2563246 - DNA, 25 bp, Homo sapien
cacggccgaccagcaggacttgatc

SEQ ID NO: 2563247 - DNA, 25 bp, Homo sapien
agcaggacttgatcctccgtgtgac

SEQ ID NO: 2563248 - DNA, 25 bp, Homo sapien
atggcacagtcgaactgctcaggca

SEQ ID NO: 2563249 - DNA, 25 bp, Homo sapien
gcacagtcgaactgctcaggcagat

SEQ ID NO: 2563250 - DNA, 25 bp, Homo sapien
cagtcgaactgctcaggcagattgc

SEQ ID NO: 2563251 - DNA, 25 bp, Homo sapien
gatggcacagtcgaactgctcaggc

SEQ ID NO: 2563252 - DNA, 25 bp, Homo sapien
ctcctgctgcggcaggtcgaagtgg

SEQ ID NO: 2563253 - DNA, 25 bp, Homo sapien
tctgtggccggcttaagaacacagt

SEQ ID NO: 2563254 - DNA, 25 bp, Homo sapien
cacagttgtcaaaatgcagtctcac

SEQ ID NO: 2563255 - DNA, 25 bp, Homo sapien
aagaacacagttgtcaaaatgcagt

SEQ ID NO: 2563256 - DNA, 25 bp, Homo sapien
ttctgtggccggcttaagaacacag

SEQ ID NO: 2563257 - DNA, 25 bp, Homo sapien
gcacttcctcccgtagtcaaactgg

SEQ ID NO: 2563258 - DNA, 25 bp, Homo sapien
cgtagtcaaactgggccagcttcag

SEQ ID NO: 2563259 - DNA, 25 bp, Homo sapien
ttcctcccgtagtcaaactgggcca

SEQ ID NO: 2563260 - DNA, 25 bp, Homo sapien
tcccgtagtcaaactgggccagctt

SEQ ID NO: 2563261 - DNA, 25 bp, Homo sapien
caatcaatattagcagagtggagga

SEQ ID NO: 2563262 - DNA, 25 bp, Homo sapien
gagcctcactgggaaagtcctcaac

SEQ ID NO: 2563263 - DNA, 25 bp, Homo sapien
gaccctctcatctcatgcaggaaaa

SEQ ID NO: 2563264 - DNA, 25 bp, Homo sapien
ttcaactggtcggttgcagtggctc

SEQ ID NO: 2563265 - DNA, 25 bp, Homo sapien
agcagcacaccatcctcccacaaca

SEQ ID NO: 2563266 - DNA, 25 bp, Homo sapien
accatcctcccacaacactgtcacc

SEQ ID NO: 2563267 - DNA, 25 bp, Homo sapien
cacaacactgtcaccatgacagaac

SEQ ID NO: 2563268 - DNA, 25 bp, Homo sapien
cctcccacaacactgtcaccatgac

SEQ ID NO: 2563269 - DNA, 25 bp, Homo sapien
tcttctgtcggtactgctggacagc

SEQ ID NO: 2563270 - DNA, 25 bp, Homo sapien
catcttctgtcggtactgctggaca

SEQ ID NO: 2563271 - DNA, 25 bp, Homo sapien
cttctgtcggtactgctggacagca

SEQ ID NO: 2563272 - DNA, 25 bp, Homo sapien
tctgtcggtactgctggacagcatc

SEQ ID NO: 2563273 - DNA, 25 bp, Homo sapien
cgcgcccaggcccctccgccttcag

SEQ ID NO: 2563274 - DNA, 25 bp, Homo sapien
ccgcgcccaggcccctccgccttca

SEQ ID NO: 2563275 - DNA, 25 bp, Homo sapien
tcctaaatgtgcaggggccggcaag

SEQ ID NO: 2563276 - DNA, 25 bp, Homo sapien
gtccccatccaggagcatatcctaa

SEQ ID NO: 2563277 - DNA, 25 bp, Homo sapien
cgaccgccaccacaagacatcctgg

SEQ ID NO: 2563278 - DNA, 25 bp, Homo sapien
gctccatgaggtgagggtctcgcct

SEQ ID NO: 2563279 - DNA, 25 bp, Homo sapien
agggttcaggccgccccacttctgt

SEQ ID NO: 2563280 - DNA, 25 bp, Homo sapien
tcaggccgccccacttctgtctagt

SEQ ID NO: 2563281 - DNA, 25 bp, Homo sapien
gccgccccacttctgtctagtcctg

SEQ ID NO: 2563282 - DNA, 25 bp, Homo sapien
gccccacttctgtctagtcctggca

SEQ ID NO: 2563283 - DNA, 25 bp, Homo sapien
agccacaggcttggaccggccagct

SEQ ID NO: 2563284 - DNA, 25 bp, Homo sapien
cggcctcagacacccctgccgggtt

SEQ ID NO: 2563285 - DNA, 25 bp, Homo sapien
ggcggcctcagacacccctgccggg

SEQ ID NO: 2563286 - DNA, 25 bp, Homo sapien
ccacaggcttggaccggccagctga

SEQ ID NO: 2563287 - DNA, 25 bp, Homo sapien
tgggactttattagataaacacaca

SEQ ID NO: 2563288 - DNA, 25 bp, Homo sapien
gtgggactttattagataaacacac

SEQ ID NO: 2563289 - DNA, 25 bp, Homo sapien
tgcatggcatgccaggactgtggtc

SEQ ID NO: 2563290 - DNA, 25 bp, Homo sapien
gctgcagtggccgactgcgtgtctt

SEQ ID NO: 2563291 - DNA, 25 bp, Homo sapien
ttccatggacgatgcctgggcagaa

SEQ ID NO: 2563292 - DNA, 25 bp, Homo sapien
gagctgcatggcatgccaggactgt

SEQ ID NO: 2563293 - DNA, 25 bp, Homo sapien
ctcgcagcaataagcggagtttggt

SEQ ID NO: 2563294 - DNA, 25 bp, Homo sapien
taccgacgcctggataaactcgcag

SEQ ID NO: 2563295 - DNA, 25 bp, Homo sapien
gacatggacggctgaacgaacttgt

SEQ ID NO: 2563296 - DNA, 25 bp, Homo sapien
cgttttcaagccgtcgacatggacg

SEQ ID NO: 2563297 - DNA, 25 bp, Homo sapien
gggctggctagggaatggcgccgag

SEQ ID NO: 2563298 - DNA, 25 bp, Homo sapien
tggctagggaatggcgccgaggctg

SEQ ID NO: 2563299 - DNA, 25 bp, Homo sapien
gctggctagggaatggcgccgaggc

SEQ ID NO: 2563300 - DNA, 25 bp, Homo sapien
ctggctagggaatggcgccgaggct

SEQ ID NO: 2563301 - DNA, 25 bp, Homo sapien
ttcccacgtccacaaaggctcttcg

SEQ ID NO: 2563302 - DNA, 25 bp, Homo sapien
gtcccgccgtctcgggatccagcgc

SEQ ID NO: 2563303 - DNA, 25 bp, Homo sapien
gtgggactccccacgcagaaccaaa

SEQ ID NO: 2563304 - DNA, 25 bp, Homo sapien
gaaccaaacactgaaacgcttccca

SEQ ID NO: 2563305 - DNA, 25 bp, Homo sapien
ttccgtattttcaaacgcaccattc

SEQ ID NO: 2563306 - DNA, 25 bp, Homo sapien
tcgcggccgaaagtcatcgagtaac

SEQ ID NO: 2563307 - DNA, 25 bp, Homo sapien
accattcaaagccttcgcggccgaa

SEQ ID NO: 2563308 - DNA, 25 bp, Homo sapien
tattttcaaacgcaccattcaaagc

SEQ ID NO: 2563309 - DNA, 25 bp, Homo sapien
ctccatggagtgcttcacgaaggac

SEQ ID NO: 2563310 - DNA, 25 bp, Homo sapien
aaaagaaccgctggaacaacacctg

SEQ ID NO: 2563311 - DNA, 25 bp, Homo sapien
catggagtgcttcacgaaggacttg

SEQ ID NO: 2563312 - DNA, 25 bp, Homo sapien
gacttggtataaaagaaccgctgga

SEQ ID NO: 2563313 - DNA, 25 bp, Homo sapien
tggaagccaggtggacacaggccat

SEQ ID NO: 2563314 - DNA, 25 bp, Homo sapien
gggcctcttctatcttggaagccag

SEQ ID NO: 2563315 - DNA, 25 bp, Homo sapien
tgaaacacattgatgacgtcccgta

SEQ ID NO: 2563316 - DNA, 25 bp, Homo sapien
tctctcagctgtcgaaggcggtgaa

SEQ ID NO: 2563317 - DNA, 25 bp, Homo sapien
tatgtgactcacgataggaaggtac

SEQ ID NO: 2563318 - DNA, 25 bp, Homo sapien
tgatgaacaaaactgcacaccgctc

SEQ ID NO: 2563319 - DNA, 25 bp, Homo sapien
tgcacaagcatagaccgaacatagc

SEQ ID NO: 2563320 - DNA, 25 bp, Homo sapien
catagcaagttttaggatctcgtgg

SEQ ID NO: 2563321 - DNA, 25 bp, Homo sapien
cccaactctttgagaactcgtcttt

SEQ ID NO: 2563322 - DNA, 25 bp, Homo sapien
atggacgcagaaacccaactctttg

SEQ ID NO: 2563323 - DNA, 25 bp, Homo sapien
gagaactcgtctttccgcctttata

SEQ ID NO: 2563324 - DNA, 25 bp, Homo sapien
atgcttcacatggacgcagaaaccc

SEQ ID NO: 2563325 - DNA, 25 bp, Homo sapien
tacgggtcaggcagttattaccaag

SEQ ID NO: 2563326 - DNA, 25 bp, Homo sapien
cgggtcaggcagttattaccaagaa

SEQ ID NO: 2563327 - DNA, 25 bp, Homo sapien
gggtcaggcagttattaccaagaac

SEQ ID NO: 2563328 - DNA, 25 bp, Homo sapien
acgggtcaggcagttattaccaaga

SEQ ID NO: 2563329 - DNA, 25 bp, Homo sapien
accaggtgttggttacgctcacact

SEQ ID NO: 2563330 - DNA, 25 bp, Homo sapien
gctcacactctaacacctgaaggta

SEQ ID NO: 2563331 - DNA, 25 bp, Homo sapien
tgttggttacgctcacactctaaca

SEQ ID NO: 2563332 - DNA, 25 bp, Homo sapien
acacctgaaggtacataacgattat

SEQ ID NO: 2563333 - DNA, 25 bp, Homo sapien
tgcccaagtgcctcaagtcaacaca

SEQ ID NO: 2563334 - DNA, 25 bp, Homo sapien
aggagcactgggcactcggacaact

SEQ ID NO: 2563335 - DNA, 25 bp, Homo sapien
tgattggaatttatacagcaggagc

SEQ ID NO: 2563336 - DNA, 25 bp, Homo sapien
aagtcactgggctgcctacccactg

SEQ ID NO: 2563337 - DNA, 25 bp, Homo sapien
tgactgccagtgcccattttgggag

SEQ ID NO: 2563338 - DNA, 25 bp, Homo sapien
cgtgactgccagtgcccattttggg

SEQ ID NO: 2563339 - DNA, 25 bp, Homo sapien
gactgccagtgcccattttgggagt

SEQ ID NO: 2563340 - DNA, 25 bp, Homo sapien
gtgactgccagtgcccattttggga

SEQ ID NO: 2563341 - DNA, 25 bp, Homo sapien
tgcgccaagtcaacagctcccagag

SEQ ID NO: 2563342 - DNA, 25 bp, Homo sapien
gctcccagaggaagcccactgactg

SEQ ID NO: 2563343 - DNA, 25 bp, Homo sapien
gccaagtcaacagctcccagaggaa

SEQ ID NO: 2563344 - DNA, 25 bp, Homo sapien
aggaagtccaggcttgcagggaggg

SEQ ID NO: 2563345 - DNA, 25 bp, Homo sapien
cagaggagaagtcttagtcacttac

SEQ ID NO: 2563346 - DNA, 25 bp, Homo sapien
ttggacagcagaggagaagtcttag

SEQ ID NO: 2563347 - DNA, 25 bp, Homo sapien
acagcagaggagaagtcttagtcac

SEQ ID NO: 2563348 - DNA, 25 bp, Homo sapien
cttggacagcagaggagaagtctta

SEQ ID NO: 2563349 - DNA, 25 bp, Homo sapien
ccagccttcggtggagagcctgcac

SEQ ID NO: 2563350 - DNA, 25 bp, Homo sapien
cagccttcggtggagagcctgcact

SEQ ID NO: 2563351 - DNA, 25 bp, Homo sapien
tcaatacgattaccaaagcacgaca

SEQ ID NO: 2563352 - DNA, 25 bp, Homo sapien
caaagcacgacagaggattaacaag

SEQ ID NO: 2563353 - DNA, 25 bp, Homo sapien
taacaagaagcacaatcgtcagaga

SEQ ID NO: 2563354 - DNA, 25 bp, Homo sapien
acaatcgtcagagaaccacagcagg

SEQ ID NO: 2563355 - DNA, 25 bp, Homo sapien
gaagtcctacaggtgcctcttggag

SEQ ID NO: 2563356 - DNA, 25 bp, Homo sapien
tgatgcaagcgtgccagtgcacagc

SEQ ID NO: 2563357 - DNA, 25 bp, Homo sapien
tgtgagggaatctgacccatgacct

SEQ ID NO: 2563358 - DNA, 25 bp, Homo sapien
aagatgcacaccttttaccagagcg

SEQ ID NO: 2563359 - DNA, 25 bp, Homo sapien
cccttgggtgcaagttggacgcgtg

SEQ ID NO: 2563360 - DNA, 25 bp, Homo sapien
tgcggagggagactccgcacccaag

SEQ ID NO: 2563361 - DNA, 25 bp, Homo sapien
caagttggacgcgtgggagcatcgt

SEQ ID NO: 2563362 - DNA, 25 bp, Homo sapien
cgtgggagcatcgtgcggagggaga

SEQ ID NO: 2563363 - DNA, 25 bp, Homo sapien
tgtctactggagtcactaaaacgct

SEQ ID NO: 2563364 - DNA, 25 bp, Homo sapien
ggtcttccgcctgcattatctagag

SEQ ID NO: 2563365 - DNA, 25 bp, Homo sapien
gactcagagctagacagtcctgtga

SEQ ID NO: 2563366 - DNA, 25 bp, Homo sapien
tgcaaagcacgatgcctcagaaaga

SEQ ID NO: 2563367 - DNA, 25 bp, Homo sapien
ccagcgtccgggcagcaagataaat

SEQ ID NO: 2563368 - DNA, 25 bp, Homo sapien
gctggaaccgcacgaagacgtcggt

SEQ ID NO: 2563369 - DNA, 25 bp, Homo sapien
acgtcggtgcgaaggctgtcgttca

SEQ ID NO: 2563370 - DNA, 25 bp, Homo sapien
cacaggcgatgctctctggctggaa

SEQ ID NO: 2563371 - DNA, 25 bp, Homo sapien
tttttccgagcataaagctgcaaga

SEQ ID NO: 2563372 - DNA, 25 bp, Homo sapien
tctttaagcagatttcctgaatttc

SEQ ID NO: 2563373 - DNA, 25 bp, Homo sapien
caatggggacgattgggcaaaggga

SEQ ID NO: 2563374 - DNA, 25 bp, Homo sapien
aaccaatggggacgattgggcaaag

SEQ ID NO: 2563375 - DNA, 25 bp, Homo sapien
gcctcttcgatagcgtgctttcttt

SEQ ID NO: 2563376 - DNA, 25 bp, Homo sapien
tcttcgatagcgtgctttctttttt

SEQ ID NO: 2563377 - DNA, 25 bp, Homo sapien
tttgcctcttcgatagcgtgctttc

SEQ ID NO: 2563378 - DNA, 25 bp, Homo sapien
cttcgatagcgtgctttcttttttc

SEQ ID NO: 2563379 - DNA, 25 bp, Homo sapien
ggcaggagagaaccccgaggtacca

SEQ ID NO: 2563380 - DNA, 25 bp, Homo sapien
cggagcttgcagtgagaggaaattg

SEQ ID NO: 2563381 - DNA, 25 bp, Homo sapien
ggagcttgcagtgagaggaaattgc

SEQ ID NO: 2563382 - DNA, 25 bp, Homo sapien
agcttgcagtgagaggaaattgcgc

SEQ ID NO: 2563383 - DNA, 25 bp, Homo sapien
gagcttgcagtgagaggaaattgcg

SEQ ID NO: 2563384 - DNA, 25 bp, Homo sapien
tataacaccttcatcagatgacaag

SEQ ID NO: 2563385 - DNA, 25 bp, Homo sapien
cagacaggccctttgcatcacactg

SEQ ID NO: 2563386 - DNA, 25 bp, Homo sapien
gacgtgtatcatctatggccccaca

SEQ ID NO: 2563387 - DNA, 25 bp, Homo sapien
cacactgaactctaggtctgatgac

SEQ ID NO: 2563388 - DNA, 25 bp, Homo sapien
gaggttacagtgagctgagacagcg

SEQ ID NO: 2563389 - DNA, 25 bp, Homo sapien
tacagtgagctgagacagcgccatt

SEQ ID NO: 2563390 - DNA, 25 bp, Homo sapien
gttacagtgagctgagacagcgcca

SEQ ID NO: 2563391 - DNA, 25 bp, Homo sapien
ggttacagtgagctgagacagcgcc

SEQ ID NO: 2563392 - DNA, 25 bp, Homo sapien
tcaccagaatctggtaggcggagct

SEQ ID NO: 2563393 - DNA, 25 bp, Homo sapien
gaatcaccagaatctggtaggcgga

SEQ ID NO: 2563394 - DNA, 25 bp, Homo sapien
caagaatcaccagaatctggtaggc

SEQ ID NO: 2563395 - DNA, 25 bp, Homo sapien
acaagaatcaccagaatctggtagg

SEQ ID NO: 2563396 - DNA, 25 bp, Homo sapien
atatatacatagacacacactcaca

SEQ ID NO: 2563397 - DNA, 25 bp, Homo sapien
ctctatatatatatatacatagaca

SEQ ID NO: 2563398 - DNA, 25 bp, Homo sapien
tgtgagtgtgtgtctctctctctct

SEQ ID NO: 2563399 - DNA, 25 bp, Homo sapien
aaaaaccccaaaacatgtgagtgtg

SEQ ID NO: 2563400 - DNA, 25 bp, Homo sapien
caagcagactgtaacttccggctcc

SEQ ID NO: 2563401 - DNA, 25 bp, Homo sapien
taaggcccctctacaggtcaaacag

SEQ ID NO: 2563402 - DNA, 25 bp, Homo sapien
ggtcaaacagcgacgcaagcagact

SEQ ID NO: 2563403 - DNA, 25 bp, Homo sapien
gttcgtagagcgagataaggcccct

SEQ ID NO: 2563404 - DNA, 25 bp, Homo sapien
ccgttcacggggctgtccgccttgg

SEQ ID NO: 2563405 - DNA, 25 bp, Homo sapien
tcacggggctgtccgccttggcttt

SEQ ID NO: 2563406 - DNA, 25 bp, Homo sapien
gttcacggggctgtccgccttggct

SEQ ID NO: 2563407 - DNA, 25 bp, Homo sapien
ggggctgtccgccttggctttcttg

SEQ ID NO: 2563408 - DNA, 25 bp, Homo sapien
cctcttaggagacgctgatcgggat

SEQ ID NO: 2563409 - DNA, 25 bp, Homo sapien
gactccgactctctcgcccctttgg

SEQ ID NO: 2563410 - DNA, 25 bp, Homo sapien
gacctcgagtagctctgctcacggc

SEQ ID NO: 2563411 - DNA, 25 bp, Homo sapien
gatggggacctcgagtagctctgct

SEQ ID NO: 2563412 - DNA, 25 bp, Homo sapien
acagcaccaccacacgtgtgaccat

SEQ ID NO: 2563413 - DNA, 25 bp, Homo sapien
gaacagcaccaccacacgtgtgacc

SEQ ID NO: 2563414 - DNA, 25 bp, Homo sapien
aggaagaacagcaccaccacacgtg

SEQ ID NO: 2563415 - DNA, 25 bp, Homo sapien
gaagaacagcaccaccacacgtgtg

SEQ ID NO: 2563416 - DNA, 25 bp, Homo sapien
tccggctccgagacttgtgtggctt

SEQ ID NO: 2563417 - DNA, 25 bp, Homo sapien
tcagagcctttgtagggagcgctgc

SEQ ID NO: 2563418 - DNA, 25 bp, Homo sapien
catagcgacggcctgtgcgttcata

SEQ ID NO: 2563419 - DNA, 25 bp, Homo sapien
cctgcttcgagaacgggaagaactc

SEQ ID NO: 2563420 - DNA, 25 bp, Homo sapien
gaagggcttgcggccaccagtcact

SEQ ID NO: 2563421 - DNA, 25 bp, Homo sapien
gggcagccatcaggtactccccagg

SEQ ID NO: 2563422 - DNA, 25 bp, Homo sapien
cagccatcaggtactccccagggaa

SEQ ID NO: 2563423 - DNA, 25 bp, Homo sapien
gggcttgcggccaccagtcactgca

SEQ ID NO: 2563424 - DNA, 25 bp, Homo sapien
gccaacaagggcgtgtgcattcact

SEQ ID NO: 2563425 - DNA, 25 bp, Homo sapien
ttcacgtaattgagtatcagtcggg

SEQ ID NO: 2563426 - DNA, 25 bp, Homo sapien
gaatcctgttctaggaccacttgcg

SEQ ID NO: 2563427 - DNA, 25 bp, Homo sapien
aaatccaccaaggtccagtcgacag

SEQ ID NO: 2563428 - DNA, 25 bp, Homo sapien
tcatacgcgcatatagggaacctct

SEQ ID NO: 2563429 - DNA, 25 bp, Homo sapien
cacaagttttaagctgacgggattc

SEQ ID NO: 2563430 - DNA, 25 bp, Homo sapien
taaaagtcaggattccctacacaag

SEQ ID NO: 2563431 - DNA, 25 bp, Homo sapien
aacctctatttaggagctggtggcc

SEQ ID NO: 2563432 - DNA, 25 bp, Homo sapien
aaaactgtgtccacggtaagaggca

SEQ ID NO: 2563433 - DNA, 25 bp, Homo sapien
caaaacttcagtacagcagggagca

SEQ ID NO: 2563434 - DNA, 25 bp, Homo sapien
tcaggaacgagagcaccttggaatc

SEQ ID NO: 2563435 - DNA, 25 bp, Homo sapien
gggtcccaccagctatctaatgcag

SEQ ID NO: 2563436 - DNA, 25 bp, Homo sapien
ctcgacgcggctcaaattgaccgtt

SEQ ID NO: 2563437 - DNA, 25 bp, Homo sapien
aagtcggccccgatcggcagcggcc

SEQ ID NO: 2563438 - DNA, 25 bp, Homo sapien
tcaaattgaccgttctgcggccgcc

SEQ ID NO: 2563439 - DNA, 25 bp, Homo sapien
ggttcctacgcacagcgcccgctgg

SEQ ID NO: 2563440 - DNA, 25 bp, Homo sapien
gcgcccggcgccctcaggcctcccg

SEQ ID NO: 2563441 - DNA, 25 bp, Homo sapien
ctcggctggaccccgggcccgcctg

SEQ ID NO: 2563442 - DNA, 25 bp, Homo sapien
aggcctcccgctgacccttcccaag

SEQ ID NO: 2563443 - DNA, 25 bp, Homo sapien
tcaggcctcccgctgacccttccca

SEQ ID NO: 2563444 - DNA, 25 bp, Homo sapien
gaatcgcgttgcctggcgcccggac

SEQ ID NO: 2563445 - DNA, 25 bp, Homo sapien
acccccgcgcgaatcgcgttgcctg

SEQ ID NO: 2563446 - DNA, 25 bp, Homo sapien
cgcgcgaatcgcgttgcctggcgcc

SEQ ID NO: 2563447 - DNA, 25 bp, Homo sapien
gcgaatcgcgttgcctggcgcccgg

SEQ ID NO: 2563448 - DNA, 25 bp, Homo sapien
aagtgcccgttcaggtcaggcggca

SEQ ID NO: 2563449 - DNA, 25 bp, Homo sapien
ctggaacacaagtgcccgttcaggt

SEQ ID NO: 2563450 - DNA, 25 bp, Homo sapien
ggcggcagcgccttcagtagtcgcg

SEQ ID NO: 2563451 - DNA, 25 bp, Homo sapien
actttgcttccaacacagctcgcgc

SEQ ID NO: 2563452 - DNA, 25 bp, Homo sapien
ggtctgtgggcggcggccacaggtc

SEQ ID NO: 2563453 - DNA, 25 bp, Homo sapien
ctgtgggcggcggccacaggtccca

SEQ ID NO: 2563454 - DNA, 25 bp, Homo sapien
gcggcggccacaggtcccaggggag

SEQ ID NO: 2563455 - DNA, 25 bp, Homo sapien
ggcggcggccacaggtcccagggga

SEQ ID NO: 2563456 - DNA, 25 bp, Homo sapien
tgggaagtcaggcgccccaggagca

SEQ ID NO: 2563457 - DNA, 25 bp, Homo sapien
gggaagtcaggcgccccaggagcat

SEQ ID NO: 2563458 - DNA, 25 bp, Homo sapien
ctgggaagtcaggcgccccaggagc

SEQ ID NO: 2563459 - DNA, 25 bp, Homo sapien
ctgcccaaggaacggccctcaacag

SEQ ID NO: 2563460 - DNA, 25 bp, Homo sapien
gcactcctaaccaggtgtgcatcct

SEQ ID NO: 2563461 - DNA, 25 bp, Homo sapien
ctaaccaggtgtgcatcctcccatc

SEQ ID NO: 2563462 - DNA, 25 bp, Homo sapien
tgagacccgcactcctaaccaggtg

SEQ ID NO: 2563463 - DNA, 25 bp, Homo sapien
gagctgctgagacccgcactcctaa

SEQ ID NO: 2563464 - DNA, 25 bp, Homo sapien
cctgaacccctgaggttccctctgt

SEQ ID NO: 2563465 - DNA, 25 bp, Homo sapien
gcctgaacccctgaggttccctctg

SEQ ID NO: 2563466 - DNA, 25 bp, Homo sapien
tgcagaaaaccagacgccacggtca

SEQ ID NO: 2563467 - DNA, 25 bp, Homo sapien
gtcaccgctcgcgagaccacacagg

SEQ ID NO: 2563468 - DNA, 25 bp, Homo sapien
ccacacaggcccgtcgggttgagga

SEQ ID NO: 2563469 - DNA, 25 bp, Homo sapien
gttgaggagcagcaggttcgtccca

SEQ ID NO: 2563470 - DNA, 25 bp, Homo sapien
taaaggggcccgcagacccggctgc

SEQ ID NO: 2563471 - DNA, 25 bp, Homo sapien
ccggccggcgatgtgctgtaaaggg

SEQ ID NO: 2563472 - DNA, 25 bp, Homo sapien
gggccggccggcgatgtgctgtaaa

SEQ ID NO: 2563473 - DNA, 25 bp, Homo sapien
cagcactccagagacgggccaaggc

SEQ ID NO: 2563474 - DNA, 25 bp, Homo sapien
ttgcgagggagagaggccgccctac

SEQ ID NO: 2563475 - DNA, 25 bp, Homo sapien
cttgcgagggagagaggccgcccta

SEQ ID NO: 2563476 - DNA, 25 bp, Homo sapien
tggggaccagcatctcctccagctc

SEQ ID NO: 2563477 - DNA, 25 bp, Homo sapien
ggaccagcatctcctccagctccag

SEQ ID NO: 2563478 - DNA, 25 bp, Homo sapien
cttcctggggaccagcatctcctcc

SEQ ID NO: 2563479 - DNA, 25 bp, Homo sapien
ttcctggggaccagcatctcctcca

SEQ ID NO: 2563480 - DNA, 25 bp, Homo sapien
cttcccctatctggctgggcggaca

SEQ ID NO: 2563481 - DNA, 25 bp, Homo sapien
gcaggaaccgcgtcttcttcaccag

SEQ ID NO: 2563482 - DNA, 25 bp, Homo sapien
tgcggtcccggtatccagtctgggc

SEQ ID NO: 2563483 - DNA, 25 bp, Homo sapien
tttgcactgaatttgaggcgcatcc

SEQ ID NO: 2563484 - DNA, 25 bp, Homo sapien
gaaacgtgttctcagcactttgccc

SEQ ID NO: 2563485 - DNA, 25 bp, Homo sapien
ctgcaagacgcagagagagggaccg

SEQ ID NO: 2563486 - DNA, 25 bp, Homo sapien
agtaattcgtggcaaagaaacgtgt

SEQ ID NO: 2563487 - DNA, 25 bp, Homo sapien
cagagagagggaccgccaagtaatt

SEQ ID NO: 2563488 - DNA, 25 bp, Homo sapien
ttagccccgccttcagccagatgcg

SEQ ID NO: 2563489 - DNA, 25 bp, Homo sapien
agccagatgcgcctcaggtctttct

SEQ ID NO: 2563490 - DNA, 25 bp, Homo sapien
gccttcagccagatgcgcctcaggt

SEQ ID NO: 2563491 - DNA, 25 bp, Homo sapien
gcctcaggtctttctcgaacttgat

SEQ ID NO: 2563492 - DNA, 25 bp, Homo sapien
attactacggatcacagcagcaacg

SEQ ID NO: 2563493 - DNA, 25 bp, Homo sapien
tttattactacggatcacagcagca

SEQ ID NO: 2563494 - DNA, 25 bp, Homo sapien
agaatttattactacggatcacagc

SEQ ID NO: 2563495 - DNA, 25 bp, Homo sapien
aatttattactacggatcacagcag

SEQ ID NO: 2563496 - DNA, 25 bp, Homo sapien
tggtgcagcatttctcgaagctttg

SEQ ID NO: 2563497 - DNA, 25 bp, Homo sapien
ggtgcagcatttctcgaagctttgc

SEQ ID NO: 2563498 - DNA, 25 bp, Homo sapien
tttggtgcagcatttctcgaagctt

SEQ ID NO: 2563499 - DNA, 25 bp, Homo sapien
gcagcatttctcgaagctttgccat

SEQ ID NO: 2563500 - DNA, 25 bp, Homo sapien
gaagatcaagcagagctacctgttg

SEQ ID NO: 2563501 - DNA, 25 bp, Homo sapien
tttggcatcagccagttggcgctct

SEQ ID NO: 2563502 - DNA, 25 bp, Homo sapien
tgttcactctcgtgtgctgcagcct

SEQ ID NO: 2563503 - DNA, 25 bp, Homo sapien
tctttctgtcgtaccaccctctgga

SEQ ID NO: 2563504 - DNA, 25 bp, Homo sapien
ttgagatgctgatctggctgaagtc

SEQ ID NO: 2563505 - DNA, 25 bp, Homo sapien
gtcacgggcccaggataggtcattc

SEQ ID NO: 2563506 - DNA, 25 bp, Homo sapien
aagtccagggtcacgggcccaggat

SEQ ID NO: 2563507 - DNA, 25 bp, Homo sapien
atgctgatctggctgaagtccaggg

SEQ ID NO: 2563508 - DNA, 25 bp, Homo sapien
tcgtgaatcagggaatcatatttca

SEQ ID NO: 2563509 - DNA, 25 bp, Homo sapien
ctgatcgtgaatcagggaatcatat

SEQ ID NO: 2563510 - DNA, 25 bp, Homo sapien
cgtgaatcagggaatcatatttcat

SEQ ID NO: 2563511 - DNA, 25 bp, Homo sapien
gatcgtgaatcagggaatcatattt

SEQ ID NO: 2563512 - DNA, 25 bp, Homo sapien
gccgggtgataagataacaaatacc

SEQ ID NO: 2563513 - DNA, 25 bp, Homo sapien
catgccgggtgataagataacaaat

SEQ ID NO: 2563514 - DNA, 25 bp, Homo sapien
cgggtgataagataacaaatacctc

SEQ ID NO: 2563515 - DNA, 25 bp, Homo sapien
tgccgggtgataagataacaaatac

SEQ ID NO: 2563516 - DNA, 25 bp, Homo sapien
ctgagggccagtggctcaagtccag

SEQ ID NO: 2563517 - DNA, 25 bp, Homo sapien
tgatctttctcacttttatgatcct

SEQ ID NO: 2563518 - DNA, 25 bp, Homo sapien
aagtccagcttgatctttctcactt

SEQ ID NO: 2563519 - DNA, 25 bp, Homo sapien
tcaagtccagcttgatctttctcac

SEQ ID NO: 2563520 - DNA, 25 bp, Homo sapien
tgaaaatgctttttgtgacatccgt

SEQ ID NO: 2563521 - DNA, 25 bp, Homo sapien
gctttttgtgacatccgttctttct

SEQ ID NO: 2563522 - DNA, 25 bp, Homo sapien
ttcttttcattgttccagcagcatt

SEQ ID NO: 2563523 - DNA, 25 bp, Homo sapien
aaaatgctttttgtgacatccgttc

SEQ ID NO: 2563524 - DNA, 25 bp, Homo sapien
tggttctgaaatacaatcctcagcc

SEQ ID NO: 2563525 - DNA, 25 bp, Homo sapien
ggttctgaaatacaatcctcagcca

SEQ ID NO: 2563526 - DNA, 25 bp, Homo sapien
tataaatggtagaatcagcttgtaa

SEQ ID NO: 2563527 - DNA, 25 bp, Homo sapien
tattcttgatcattgacattaccat

SEQ ID NO: 2563528 - DNA, 25 bp, Homo sapien
ctggaaataggtagtgaattcattc

SEQ ID NO: 2563529 - DNA, 25 bp, Homo sapien
tcattgacattaccatataaatggt

SEQ ID NO: 2563530 - DNA, 25 bp, Homo sapien
gctgtttatcgtatcagactgcaat

SEQ ID NO: 2563531 - DNA, 25 bp, Homo sapien
ctacaagtataagacttccaagtgc

SEQ ID NO: 2563532 - DNA, 25 bp, Homo sapien
caatgtgctgtttatcgtatcagac

SEQ ID NO: 2563533 - DNA, 25 bp, Homo sapien
ttcattcctacaagtataagacttc

SEQ ID NO: 2563534 - DNA, 25 bp, Homo sapien
tctctaaaatctcctactagaaata

SEQ ID NO: 2563535 - DNA, 25 bp, Homo sapien
agtcctccaacttattgcttcttca

SEQ ID NO: 2563536 - DNA, 25 bp, Homo sapien
cagaattgtgttgatgtaatatgct

SEQ ID NO: 2563537 - DNA, 25 bp, Homo sapien
caaatacattttgaaactagctttc

SEQ ID NO: 2563538 - DNA, 25 bp, Homo sapien
gatctcccatccatcagacattgct

SEQ ID NO: 2563539 - DNA, 25 bp, Homo sapien
tctttcaatggtgctggtcagatgc

SEQ ID NO: 2563540 - DNA, 25 bp, Homo sapien
cagttttccctggagctttctgaac

SEQ ID NO: 2563541 - DNA, 25 bp, Homo sapien
tgaaggctactctcactcagaccct

SEQ ID NO: 2563542 - DNA, 25 bp, Homo sapien
gtaggctaaacgctgactgaggccc

SEQ ID NO: 2563543 - DNA, 25 bp, Homo sapien
cctggtaggctaaacgctgactgag

SEQ ID NO: 2563544 - DNA, 25 bp, Homo sapien
taggctaaacgctgactgaggccca

SEQ ID NO: 2563545 - DNA, 25 bp, Homo sapien
tggtaggctaaacgctgactgaggc

SEQ ID NO: 2563546 - DNA, 25 bp, Homo sapien
taagaggctttagagacaagggtgt

SEQ ID NO: 2563547 - DNA, 25 bp, Homo sapien
atctgcaaagtgcatttaccctctc

SEQ ID NO: 2563548 - DNA, 25 bp, Homo sapien
gtgtctcatcaccttaagaggcttt

SEQ ID NO: 2563549 - DNA, 25 bp, Homo sapien
taccacagtaggacactcacattcc

SEQ ID NO: 2563550 - DNA, 25 bp, Homo sapien
cctgagctgagtccacacactggaa

SEQ ID NO: 2563551 - DNA, 25 bp, Homo sapien
cagaggaggggcaccggctgcctca

SEQ ID NO: 2563552 - DNA, 25 bp, Homo sapien
gcaccggctgcctcaggaatgccct

SEQ ID NO: 2563553 - DNA, 25 bp, Homo sapien
ctggagaaaccacgtgggagttggg

SEQ ID NO: 2563554 - DNA, 25 bp, Homo sapien
ggctgcctcaggaatgccctttcca

SEQ ID NO: 2563555 - DNA, 25 bp, Homo sapien
gcctctagataggacgggctctcca

SEQ ID NO: 2563556 - DNA, 25 bp, Homo sapien
gctctccacccacccaattgctatg

SEQ ID NO: 2563557 - DNA, 25 bp, Homo sapien
ctgggtggcctctagataggacggg

SEQ ID NO: 2563558 - DNA, 25 bp, Homo sapien
gctatggcaacagtggagccgctga

SEQ ID NO: 2563559 - DNA, 25 bp, Homo sapien
ctggtggacggccacgtgagaagga

SEQ ID NO: 2563560 - DNA, 25 bp, Homo sapien
gacggccacgtgagaaggatacaaa

SEQ ID NO: 2563561 - DNA, 25 bp, Homo sapien
cggccacgtgagaaggatacaaaca

SEQ ID NO: 2563562 - DNA, 25 bp, Homo sapien
tggacggccacgtgagaaggataca

SEQ ID NO: 2563563 - DNA, 25 bp, Homo sapien
agttctggtgccccaaagaaagaga

SEQ ID NO: 2563564 - DNA, 25 bp, Homo sapien
ttggataagttctggtgccccaaag

SEQ ID NO: 2563565 - DNA, 25 bp, Homo sapien
ataagttctggtgccccaaagaaag

SEQ ID NO: 2563566 - DNA, 25 bp, Homo sapien
ggataagttctggtgccccaaagaa

SEQ ID NO: 2563567 - DNA, 25 bp, Homo sapien
atgcctgtgccatttacctctaacc

SEQ ID NO: 2563568 - DNA, 25 bp, Homo sapien
gagcagttggagatttcaatgcctg

SEQ ID NO: 2563569 - DNA, 25 bp, Homo sapien
tggagatttcaatgcctgtgccatt

SEQ ID NO: 2563570 - DNA, 25 bp, Homo sapien
agttggagatttcaatgcctgtgcc

SEQ ID NO: 2563571 - DNA, 25 bp, Homo sapien
tacaaaacaagctgtcaagtcatga

SEQ ID NO: 2563572 - DNA, 25 bp, Homo sapien
tacaacatactaataggggaaactg

SEQ ID NO: 2563573 - DNA, 25 bp, Homo sapien
aaacaagctgtcaagtcatgaaaag

SEQ ID NO: 2563574 - DNA, 25 bp, Homo sapien
aggaggcacgaaatggtgaagtaca

SEQ ID NO: 2563575 - DNA, 25 bp, Homo sapien
taaatgtaaggtgcaaaaccataag

SEQ ID NO: 2563576 - DNA, 25 bp, Homo sapien
gcaaaaccataagaatcctaagaga

SEQ ID NO: 2563577 - DNA, 25 bp, Homo sapien
ataaaataaatcttacacgtaaatg

SEQ ID NO: 2563578 - DNA, 25 bp, Homo sapien
aaatcttacacgtaaatgtaaggtg

SEQ ID NO: 2563579 - DNA, 25 bp, Homo sapien
cttgtcctcacagctagaaaaaagc

SEQ ID NO: 2563580 - DNA, 25 bp, Homo sapien
gctaggcagtcatcacttgtcctca

SEQ ID NO: 2563581 - DNA, 25 bp, Homo sapien
ccttctagggtggatcagagaattg

SEQ ID NO: 2563582 - DNA, 25 bp, Homo sapien
gaaaactgccaccttaaaaatgaga

SEQ ID NO: 2563583 - DNA, 25 bp, Homo sapien
tgcaatgagcacagcaaatgtgccc

SEQ ID NO: 2563584 - DNA, 25 bp, Homo sapien
gctgtccagccttgttaatacatca

SEQ ID NO: 2563585 - DNA, 25 bp, Homo sapien
ggtgcagcaacttcccaatatccca

SEQ ID NO: 2563586 - DNA, 25 bp, Homo sapien
gcttcatgacaccaggtaaagtgca

SEQ ID NO: 2563587 - DNA, 25 bp, Homo sapien
gatgggtcttggtcttcttccactt

SEQ ID NO: 2563588 - DNA, 25 bp, Homo sapien
catgatgggtcttggtcttcttcca

SEQ ID NO: 2563589 - DNA, 25 bp, Homo sapien
gggcatgatgggtcttggtcttctt

SEQ ID NO: 2563590 - DNA, 25 bp, Homo sapien
gcatgatgggtcttggtcttcttcc

SEQ ID NO: 2563591 - DNA, 25 bp, Homo sapien
cctccaatgagtaaacagcactgct

SEQ ID NO: 2563592 - DNA, 25 bp, Homo sapien
cctaagtcaggcagttcaagataac

SEQ ID NO: 2563593 - DNA, 25 bp, Homo sapien
agataacctgaaggagtcgaatacc

SEQ ID NO: 2563594 - DNA, 25 bp, Homo sapien
gtaaacagcactgctgtagggctgg

SEQ ID NO: 2563595 - DNA, 25 bp, Homo sapien
atgcaagaattttagacactgaaat

SEQ ID NO: 2563596 - DNA, 25 bp, Homo sapien
tcaaatgcccagctcgttcatggat

SEQ ID NO: 2563597 - DNA, 25 bp, Homo sapien
cccagctcgttcatggatgcaagaa

SEQ ID NO: 2563598 - DNA, 25 bp, Homo sapien
tcgttcatggatgcaagaattttag

SEQ ID NO: 2563599 - DNA, 25 bp, Homo sapien
gcatggtgggccttggtcttcttcc

SEQ ID NO: 2563600 - DNA, 25 bp, Homo sapien
gggcatggtgggccttggtcttctt

SEQ ID NO: 2563601 - DNA, 25 bp, Homo sapien
ctggggcatggtgggccttggtctt

SEQ ID NO: 2563602 - DNA, 25 bp, Homo sapien
tggggcatggtgggccttggtcttc

SEQ ID NO: 2563603 - DNA, 25 bp, Homo sapien
acagcaatgttagtaggaataattc

SEQ ID NO: 2563604 - DNA, 25 bp, Homo sapien
cagcaatgttagtaggaataattca

SEQ ID NO: 2563605 - DNA, 25 bp, Homo sapien
aataacatctatccagtgagtcctg

SEQ ID NO: 2563606 - DNA, 25 bp, Homo sapien
taacatctatccagtgagtcctgca

SEQ ID NO: 2563607 - DNA, 25 bp, Homo sapien
ataacatctatccagtgagtcctgc

SEQ ID NO: 2563608 - DNA, 25 bp, Homo sapien
tcaggctcctcagcataagaatagg

SEQ ID NO: 2563609 - DNA, 25 bp, Homo sapien
cctcaggctcctcagcataagaata

SEQ ID NO: 2563610 - DNA, 25 bp, Homo sapien
ggctcctcagcataagaataggaca

SEQ ID NO: 2563611 - DNA, 25 bp, Homo sapien
caggctcctcagcataagaatagga

SEQ ID NO: 2563612 - DNA, 25 bp, Homo sapien
taacatctatccagtgagtcctgca

SEQ ID NO: 2563613 - DNA, 25 bp, Homo sapien
aataacatctatccagtgagtcctg

SEQ ID NO: 2563614 - DNA, 25 bp, Homo sapien
ataacatctatccagtgagtcctgc

SEQ ID NO: 2563615 - DNA, 25 bp, Homo sapien
ggtttgcatctcagaaccaagggtg

SEQ ID NO: 2563616 - DNA, 25 bp, Homo sapien
tgcatctcagaaccaagggtgaaat

SEQ ID NO: 2563617 - DNA, 25 bp, Homo sapien
tttgcatctcagaaccaagggtgaa

SEQ ID NO: 2563618 - DNA, 25 bp, Homo sapien
ttggtttgcatctcagaaccaaggg

SEQ ID NO: 2563619 - DNA, 25 bp, Homo sapien
tggggcatggtgggccttggtcttc

SEQ ID NO: 2563620 - DNA, 25 bp, Homo sapien
ctggggcatggtgggccttggtctt

SEQ ID NO: 2563621 - DNA, 25 bp, Homo sapien
gcatggtgggccttggtcttcttcc

SEQ ID NO: 2563622 - DNA, 25 bp, Homo sapien
gggcatggtgggccttggtcttctt

SEQ ID NO: 2563623 - DNA, 25 bp, Homo sapien
ataacatctatccagtgagtcctgc

SEQ ID NO: 2563624 - DNA, 25 bp, Homo sapien
aataacatctatccagtgagtcctg

SEQ ID NO: 2563625 - DNA, 25 bp, Homo sapien
taacatctatccagtgagtcctgca

SEQ ID NO: 2563626 - DNA, 25 bp, Homo sapien
tcatgatagaaattcctcggttttt

SEQ ID NO: 2563627 - DNA, 25 bp, Homo sapien
gctggtcatgatagaaattcctcgg

SEQ ID NO: 2563628 - DNA, 25 bp, Homo sapien
tgatagaaattcctcggtttttctc

SEQ ID NO: 2563629 - DNA, 25 bp, Homo sapien
gctgattcccctacacacataacaa

SEQ ID NO: 2563630 - DNA, 25 bp, Homo sapien
gggcatggtgggttttgatcttctt

SEQ ID NO: 2563631 - DNA, 25 bp, Homo sapien
ctggggcatggtgggttttgatctt

SEQ ID NO: 2563632 - DNA, 25 bp, Homo sapien
tggggcatggtgggttttgatcttc

SEQ ID NO: 2563633 - DNA, 25 bp, Homo sapien
ggggcatggtgggttttgatcttct

SEQ ID NO: 2563634 - DNA, 25 bp, Homo sapien
ctaaaattgtcacatggttattaga

SEQ ID NO: 2563635 - DNA, 25 bp, Homo sapien
cacatggttattagatacagaggcc

SEQ ID NO: 2563636 - DNA, 25 bp, Homo sapien
ggttattagatacagaggccttaaa

SEQ ID NO: 2563637 - DNA, 25 bp, Homo sapien
tgtcacatggttattagatacagag

SEQ ID NO: 2563638 - DNA, 25 bp, Homo sapien
gaagctgttggctcttattctgcaa

SEQ ID NO: 2563639 - DNA, 25 bp, Homo sapien
tgctccttgtgactcagactatggt

SEQ ID NO: 2563640 - DNA, 25 bp, Homo sapien
tagctgctgcaaggcttttcgcaat

SEQ ID NO: 2563641 - DNA, 25 bp, Homo sapien
gactcagactatggtttaggtgctg

SEQ ID NO: 2563642 - DNA, 25 bp, Homo sapien
caacagctttatcatgtattcgctg

SEQ ID NO: 2563643 - DNA, 25 bp, Homo sapien
gatactgtaggagctcccgaaattc

SEQ ID NO: 2563644 - DNA, 25 bp, Homo sapien
tattcgctggcgaagtttctcaagc

SEQ ID NO: 2563645 - DNA, 25 bp, Homo sapien
ggttttgtctgagttatctcgatac

SEQ ID NO: 2563646 - DNA, 25 bp, Homo sapien
tagtgggcgaaatgatgatacatac

SEQ ID NO: 2563647 - DNA, 25 bp, Homo sapien
tcctgatcactcttattcaacaaga

SEQ ID NO: 2563648 - DNA, 25 bp, Homo sapien
gcagcaaatttaagcaaacacaaat

SEQ ID NO: 2563649 - DNA, 25 bp, Homo sapien
gtagatagaataatccatagcatag

SEQ ID NO: 2563650 - DNA, 25 bp, Homo sapien
gtcatgatctcgctctctcacagca

SEQ ID NO: 2563651 - DNA, 25 bp, Homo sapien
tctcacagcaagacgaagctggcgc

SEQ ID NO: 2563652 - DNA, 25 bp, Homo sapien
gcgcagtctctctaagtcatgatct

SEQ ID NO: 2563653 - DNA, 25 bp, Homo sapien
gaggagaggacatcgcgcagtctct

SEQ ID NO: 2563654 - DNA, 25 bp, Homo sapien
gcttcaggctcaggatacaagtggg

SEQ ID NO: 2563655 - DNA, 25 bp, Homo sapien
ttgacaatgatggaactagtaactg

SEQ ID NO: 2563656 - DNA, 25 bp, Homo sapien
caccaagtcagagataggttttgct

SEQ ID NO: 2563657 - DNA, 25 bp, Homo sapien
taattgcaccctggtaatgcttcag

SEQ ID NO: 2563658 - DNA, 25 bp, Homo sapien
cactggaggttttgacaggtagtag

SEQ ID NO: 2563659 - DNA, 25 bp, Homo sapien
catgaagagacgtctgtaactgctg

SEQ ID NO: 2563660 - DNA, 25 bp, Homo sapien
tccttctgccaacggctaaatttgg

SEQ ID NO: 2563661 - DNA, 25 bp, Homo sapien
tttgttcctatcatgaagagacgtc

SEQ ID NO: 2563662 - DNA, 25 bp, Homo sapien
actgccttaaagttaactgaagtct

SEQ ID NO: 2563663 - DNA, 25 bp, Homo sapien
caactgccttaaagttaactgaagt

SEQ ID NO: 2563664 - DNA, 25 bp, Homo sapien
gccttaaagttaactgaagtcttgc

SEQ ID NO: 2563665 - DNA, 25 bp, Homo sapien
tgccttaaagttaactgaagtcttg

SEQ ID NO: 2563666 - DNA, 25 bp, Homo sapien
gcacaggcctgctacacagaagtct

SEQ ID NO: 2563667 - DNA, 25 bp, Homo sapien
tgttttaccagatctagcacaggcc

SEQ ID NO: 2563668 - DNA, 25 bp, Homo sapien
gaaaggacactgtaagcttctggag

SEQ ID NO: 2563669 - DNA, 25 bp, Homo sapien
cctaggttgatactggatctgctac

SEQ ID NO: 2563670 - DNA, 25 bp, Homo sapien
ccctggtgctcacagactgaagcag

SEQ ID NO: 2563671 - DNA, 25 bp, Homo sapien
gctccctggtgctcacagactgaag

SEQ ID NO: 2563672 - DNA, 25 bp, Homo sapien
ttccagcacttgtttatttcgatca

SEQ ID NO: 2563673 - DNA, 25 bp, Homo sapien
tccctggtgctcacagactgaagca

SEQ ID NO: 2563674 - DNA, 25 bp, Homo sapien
cataggcaaaaaagagtctatcttc

SEQ ID NO: 2563675 - DNA, 25 bp, Homo sapien
ctaaaaactgactacggggattctg

SEQ ID NO: 2563676 - DNA, 25 bp, Homo sapien
actgactacggggattctgagctac

SEQ ID NO: 2563677 - DNA, 25 bp, Homo sapien
aagagtctatcttcctctaaaaact

SEQ ID NO: 2563678 - DNA, 25 bp, Homo sapien
gatcttctcatttggcgtcctttct

SEQ ID NO: 2563679 - DNA, 25 bp, Homo sapien
tggcgtcctttctccgaagagttaa

SEQ ID NO: 2563680 - DNA, 25 bp, Homo sapien
agcggggcaggcctctaattcaccg

SEQ ID NO: 2563681 - DNA, 25 bp, Homo sapien
tctggcttgttagatcttctcattt

SEQ ID NO: 2563682 - DNA, 25 bp, Homo sapien
ctgtggaggaccctgaccccgcacc

SEQ ID NO: 2563683 - DNA, 25 bp, Homo sapien
tcgaggccagaaatcggttgcctct

SEQ ID NO: 2563684 - DNA, 25 bp, Homo sapien
ccgccggggcttaagttccatgcgt

SEQ ID NO: 2563685 - DNA, 25 bp, Homo sapien
gcacgtcctcgtgtatcctgtggag

SEQ ID NO: 2563686 - DNA, 25 bp, Homo sapien
cgtcgcgaggcagcgtgagcttctg

SEQ ID NO: 2563687 - DNA, 25 bp, Homo sapien
tgagcgtcgcgaggcagcgtgagct

SEQ ID NO: 2563688 - DNA, 25 bp, Homo sapien
gcgtcgcgaggcagcgtgagcttct

SEQ ID NO: 2563689 - DNA, 25 bp, Homo sapien
agcgtcgcgaggcagcgtgagcttc

SEQ ID NO: 2563690 - DNA, 25 bp, Homo sapien
tgcgcctgcgccttgggctctcctg

SEQ ID NO: 2563691 - DNA, 25 bp, Homo sapien
cgcctgcgccttgggctctcctgac

SEQ ID NO: 2563692 - DNA, 25 bp, Homo sapien
gctgcgcctgcgccttgggctctcc

SEQ ID NO: 2563693 - DNA, 25 bp, Homo sapien
ccgctgcgcctgcgccttgggctct

SEQ ID NO: 2563694 - DNA, 25 bp, Homo sapien
cgaacccgctgtgccgcagaggcgg

SEQ ID NO: 2563695 - DNA, 25 bp, Homo sapien
gctgcactctgtctatccgctcggt

SEQ ID NO: 2563696 - DNA, 25 bp, Homo sapien
atccgctcggttactccttttcctg

SEQ ID NO: 2563697 - DNA, 25 bp, Homo sapien
agagagggatttcccggtctctgct

SEQ ID NO: 2563698 - DNA, 25 bp, Homo sapien
cgagtgacctaaggccacctctcgg

SEQ ID NO: 2563699 - DNA, 25 bp, Homo sapien
ggcagttcaagtggcccgggaaatc

SEQ ID NO: 2563700 - DNA, 25 bp, Homo sapien
tcagcgatttgtagggtcaagggct

SEQ ID NO: 2563701 - DNA, 25 bp, Homo sapien
tattgtttttgcgagtgacctaagg

SEQ ID NO: 2563702 - DNA, 25 bp, Homo sapien
taaggaattcgacggagacaaataa

SEQ ID NO: 2563703 - DNA, 25 bp, Homo sapien
ggaattcgacggagacaaataaatg

SEQ ID NO: 2563704 - DNA, 25 bp, Homo sapien
cttatctccgtaaggaattcgacgg

SEQ ID NO: 2563705 - DNA, 25 bp, Homo sapien
tccgtaaggaattcgacggagacaa

SEQ ID NO: 2563706 - DNA, 25 bp, Homo sapien
ttttccttctggtgacaaatctgat

SEQ ID NO: 2563707 - DNA, 25 bp, Homo sapien
tctggtgacaaatctgatctttatc

SEQ ID NO: 2563708 - DNA, 25 bp, Homo sapien
caagaccaaagaaccttctgttgag

SEQ ID NO: 2563709 - DNA, 25 bp, Homo sapien
ctccaagaccaaagaaccttctgtt

SEQ ID NO: 2563710 - DNA, 25 bp, Homo sapien
atactctttttgcccgctgactctg

SEQ ID NO: 2563711 - DNA, 25 bp, Homo sapien
tcctttctccatatacatggggcag

SEQ ID NO: 2563712 - DNA, 25 bp, Homo sapien
ctccatatacatggggcagaaattc

SEQ ID NO: 2563713 - DNA, 25 bp, Homo sapien
ctttttgcccgctgactctgatttc

SEQ ID NO: 2563714 - DNA, 25 bp, Homo sapien
agcctcctcctcaatactgtcagtg

SEQ ID NO: 2563715 - DNA, 25 bp, Homo sapien
ctcctcctcaatactgtcagtgaac

SEQ ID NO: 2563716 - DNA, 25 bp, Homo sapien
cagcctcctcctcaatactgtcagt

SEQ ID NO: 2563717 - DNA, 25 bp, Homo sapien
gcctcctcctcaatactgtcagtga

SEQ ID NO: 2563718 - DNA, 25 bp, Homo sapien
ttctcactaagtccgcaagggctgc

SEQ ID NO: 2563719 - DNA, 25 bp, Homo sapien
caaaccaaagggtggattggagaga

SEQ ID NO: 2563720 - DNA, 25 bp, Homo sapien
aaaaatggagtgaagatatgggttg

SEQ ID NO: 2563721 - DNA, 25 bp, Homo sapien
tgtaaaaagatatcttctcactaag

SEQ ID NO: 2563722 - DNA, 25 bp, Homo sapien
ggagctcatgcaagcactcaaggga

SEQ ID NO: 2563723 - DNA, 25 bp, Homo sapien
caaccatcggtaaggaggactcagg

SEQ ID NO: 2563724 - DNA, 25 bp, Homo sapien
gaaaaatggtgctcgcccaagagat

SEQ ID NO: 2563725 - DNA, 25 bp, Homo sapien
cagattctccatgctaggctacagg

SEQ ID NO: 2563726 - DNA, 25 bp, Homo sapien
cttccaaggacataacaaggagaag

SEQ ID NO: 2563727 - DNA, 25 bp, Homo sapien
ggacataacaaggagaagctcaaaa

SEQ ID NO: 2563728 - DNA, 25 bp, Homo sapien
tccaaggacataacaaggagaagct

SEQ ID NO: 2563729 - DNA, 25 bp, Homo sapien
caaggacataacaaggagaagctca

SEQ ID NO: 2563730 - DNA, 25 bp, Homo sapien
tgggatgtgtctgttaggaaaagca

SEQ ID NO: 2563731 - DNA, 25 bp, Homo sapien
gatgtgtctgttaggaaaagcatat

SEQ ID NO: 2563732 - DNA, 25 bp, Homo sapien
taggaagggaacttggtgtcaggca

SEQ ID NO: 2563733 - DNA, 25 bp, Homo sapien
cttggagtaggaagggaacttggtg

SEQ ID NO: 2563734 - DNA, 25 bp, Homo sapien
ggctgagtccaaaacataaggagca

SEQ ID NO: 2563735 - DNA, 25 bp, Homo sapien
gatcttacatctgcttgagaataga

SEQ ID NO: 2563736 - DNA, 25 bp, Homo sapien
ggaaaattactatcatggccagact

SEQ ID NO: 2563737 - DNA, 25 bp, Homo sapien
tatagatgcacactacctgggcctg

SEQ ID NO: 2563738 - DNA, 25 bp, Homo sapien
ctcctgtggggaccgcggttacaag

SEQ ID NO: 2563739 - DNA, 25 bp, Homo sapien
cttcaccgctggcacagaaatccta

SEQ ID NO: 2563740 - DNA, 25 bp, Homo sapien
gtgagaacaccttcaccgctggcac

SEQ ID NO: 2563741 - DNA, 25 bp, Homo sapien
gttacaagcagacgctgtgtgaaag

SEQ ID NO: 2563742 - DNA, 25 bp, Homo sapien
gcagaggcttctcggaacacgcgga

SEQ ID NO: 2563743 - DNA, 25 bp, Homo sapien
ccagggaacgccataggctttcccg

SEQ ID NO: 2563744 - DNA, 25 bp, Homo sapien
gcttctcggaacacgcggatctatg

SEQ ID NO: 2563745 - DNA, 25 bp, Homo sapien
gccataggctttcccgctgtgttcc

SEQ ID NO: 2563746 - DNA, 25 bp, Homo sapien
gctcagaaactcctcgatcaggaat

SEQ ID NO: 2563747 - DNA, 25 bp, Homo sapien
caggaatcccaagcatacgttagtg

SEQ ID NO: 2563748 - DNA, 25 bp, Homo sapien
tgatgacggtcccaaaacaagggac

SEQ ID NO: 2563749 - DNA, 25 bp, Homo sapien
cactggattggtgggctgctttgct

SEQ ID NO: 2563750 - DNA, 25 bp, Homo sapien
ctgaggtaagccacccagtggccca

SEQ ID NO: 2563751 - DNA, 25 bp, Homo sapien
tgaggtaagccacccagtggcccag

SEQ ID NO: 2563752 - DNA, 25 bp, Homo sapien
gaaggggcttcagtaggaacgctct

SEQ ID NO: 2563753 - DNA, 25 bp, Homo sapien
agtctccactccaaggcccgtgagg

SEQ ID NO: 2563754 - DNA, 25 bp, Homo sapien
aaggcccgtgaggacaggccacctg

SEQ ID NO: 2563755 - DNA, 25 bp, Homo sapien
catgcccagaacacccatctctgac

SEQ ID NO: 2563756 - DNA, 25 bp, Homo sapien
caggatcaccgttggttgtgaagct

SEQ ID NO: 2563757 - DNA, 25 bp, Homo sapien
caccgttggttgtgaagctgcaggt

SEQ ID NO: 2563758 - DNA, 25 bp, Homo sapien
tcaccgttggttgtgaagctgcagg

SEQ ID NO: 2563759 - DNA, 25 bp, Homo sapien
gatcaccgttggttgtgaagctgca

SEQ ID NO: 2563760 - DNA, 25 bp, Homo sapien
gaacagcagttttcttttgatcatc

SEQ ID NO: 2563761 - DNA, 25 bp, Homo sapien
tcctgctctaagcttgcaggccagg

SEQ ID NO: 2563762 - DNA, 25 bp, Homo sapien
tttgatcatcttcggttttaggaca

SEQ ID NO: 2563763 - DNA, 25 bp, Homo sapien
ctccacttgctgaacagcagttttc

SEQ ID NO: 2563764 - DNA, 25 bp, Homo sapien
agcccatgggacacagaggtaatac

SEQ ID NO: 2563765 - DNA, 25 bp, Homo sapien
agaaggacctggcaccatggcagcc

SEQ ID NO: 2563766 - DNA, 25 bp, Homo sapien
gggatcagaaggacctggcaccatg

SEQ ID NO: 2563767 - DNA, 25 bp, Homo sapien
tggcaccatggcagcccatgggaca

SEQ ID NO: 2563768 - DNA, 25 bp, Homo sapien
aaatttctgcaaaccgtagtgctat

SEQ ID NO: 2563769 - DNA, 25 bp, Homo sapien
cagagaagagcccttgaggcctccc

SEQ ID NO: 2563770 - DNA, 25 bp, Homo sapien
tgattgtgagaacaggacttgggac

SEQ ID NO: 2563771 - DNA, 25 bp, Homo sapien
taatggctgacaccaagcaagtggg

SEQ ID NO: 2563772 - DNA, 25 bp, Homo sapien
tcactgtattcagagtccaaagtgc

SEQ ID NO: 2563773 - DNA, 25 bp, Homo sapien
ggtcccagtgagacttgaactctga

SEQ ID NO: 2563774 - DNA, 25 bp, Homo sapien
actgtattcagagtccaaagtgctc

SEQ ID NO: 2563775 - DNA, 25 bp, Homo sapien
gacttgaactctgatcactgtattc

SEQ ID NO: 2563776 - DNA, 25 bp, Homo sapien
tgggtccgggactccaattgcacac

SEQ ID NO: 2563777 - DNA, 25 bp, Homo sapien
tggtcgctgggtccgggactccaat

SEQ ID NO: 2563778 - DNA, 25 bp, Homo sapien
ctggtcgctgggtccgggactccaa

SEQ ID NO: 2563779 - DNA, 25 bp, Homo sapien
gggactccaattgcacacagccagt

SEQ ID NO: 2563780 - DNA, 25 bp, Homo sapien
ctgtgacctggaggcccagggtcac

SEQ ID NO: 2563781 - DNA, 25 bp, Homo sapien
ctggagagacttgaccacagcattt

SEQ ID NO: 2563782 - DNA, 25 bp, Homo sapien
agagctcttgcctaaatttttctgc

SEQ ID NO: 2563783 - DNA, 25 bp, Homo sapien
gacttgaccacagcatttttatgag

SEQ ID NO: 2563784 - DNA, 25 bp, Homo sapien
cctaaggcaacttctccttggagca

SEQ ID NO: 2563785 - DNA, 25 bp, Homo sapien
ttcagtaaaagaacgacagcagtaa

SEQ ID NO: 2563786 - DNA, 25 bp, Homo sapien
agtaaaagaacgacagcagtaaagg

SEQ ID NO: 2563787 - DNA, 25 bp, Homo sapien
cagtaaaagaacgacagcagtaaag

SEQ ID NO: 2563788 - DNA, 25 bp, Homo sapien
tcagtaaaagaacgacagcagtaaa

SEQ ID NO: 2563789 - DNA, 25 bp, Homo sapien
tttgctgggtcaattgctacattgt

SEQ ID NO: 2563790 - DNA, 25 bp, Homo sapien
gggtcaattgctacattgttataac

SEQ ID NO: 2563791 - DNA, 25 bp, Homo sapien
tgctgggtcaattgctacattgtta

SEQ ID NO: 2563792 - DNA, 25 bp, Homo sapien
gctgggtcaattgctacattgttat

SEQ ID NO: 2563793 - DNA, 25 bp, Homo sapien
aaatgagcagtgcaggaaaagcgtg

SEQ ID NO: 2563794 - DNA, 25 bp, Homo sapien
cagcatggaattctcaggcctatga

SEQ ID NO: 2563795 - DNA, 25 bp, Homo sapien
gaattctcaggcctatgacatccta

SEQ ID NO: 2563796 - DNA, 25 bp, Homo sapien
tctcaggcctatgacatcctagggc

SEQ ID NO: 2563797 - DNA, 25 bp, Homo sapien
tatgacatcctagggcctcatccac

SEQ ID NO: 2563798 - DNA, 25 bp, Homo sapien
tagggctaaatggaatccctgaagg

SEQ ID NO: 2563799 - DNA, 25 bp, Homo sapien
cccagtatagggctaaatggaatcc

SEQ ID NO: 2563800 - DNA, 25 bp, Homo sapien
ggaatagaagttgaaactaacataa

SEQ ID NO: 2563801 - DNA, 25 bp, Homo sapien
tttaaaacatactggatgaaagatt

SEQ ID NO: 2563802 - DNA, 25 bp, Homo sapien
tgagcattgacaccaaagttccagc

SEQ ID NO: 2563803 - DNA, 25 bp, Homo sapien
caaaagcttgggtgtgcatagacac

SEQ ID NO: 2563804 - DNA, 25 bp, Homo sapien
gcatgttgtagcacactcatctctg

SEQ ID NO: 2563805 - DNA, 25 bp, Homo sapien
cttagaatatcaagcagccagatgg

SEQ ID NO: 2563806 - DNA, 25 bp, Homo sapien
gccacatacctatgaaatgtatatg

SEQ ID NO: 2563807 - DNA, 25 bp, Homo sapien
caatcttagccacatacctatgaaa

SEQ ID NO: 2563808 - DNA, 25 bp, Homo sapien
tcttagccacatacctatgaaatgt

SEQ ID NO: 2563809 - DNA, 25 bp, Homo sapien
tacaatcttagccacatacctatga

SEQ ID NO: 2563810 - DNA, 25 bp, Homo sapien
gaacactgagcaggacaactgacct

SEQ ID NO: 2563811 - DNA, 25 bp, Homo sapien
caggacaactgacctgtctccttca

SEQ ID NO: 2563812 - DNA, 25 bp, Homo sapien
tgagcaggacaactgacctgtctcc

SEQ ID NO: 2563813 - DNA, 25 bp, Homo sapien
gacaactgacctgtctccttcacat

SEQ ID NO: 2563814 - DNA, 25 bp, Homo sapien
cctggtttcaatgaacctaacctca

SEQ ID NO: 2563815 - DNA, 25 bp, Homo sapien
tggtttcaatgaacctaacctcatt

SEQ ID NO: 2563816 - DNA, 25 bp, Homo sapien
ctggtttcaatgaacctaacctcat

SEQ ID NO: 2563817 - DNA, 25 bp, Homo sapien
tttgacggtgacaagtctccacctg

SEQ ID NO: 2563818 - DNA, 25 bp, Homo sapien
atattcccacaataagcagccctta

SEQ ID NO: 2563819 - DNA, 25 bp, Homo sapien
agtcatattcccacaataagcagcc

SEQ ID NO: 2563820 - DNA, 25 bp, Homo sapien
ttgacggtgacaagtctccacctgg

SEQ ID NO: 2563821 - DNA, 25 bp, Homo sapien
gctcaaagggatttggtgacaggca

SEQ ID NO: 2563822 - DNA, 25 bp, Homo sapien
agggatttggtgacaggcatccagg

SEQ ID NO: 2563823 - DNA, 25 bp, Homo sapien
tcaaagggatttggtgacaggcatc

SEQ ID NO: 2563824 - DNA, 25 bp, Homo sapien
ctgctcaaagggatttggtgacagg

SEQ ID NO: 2563825 - DNA, 25 bp, Homo sapien
gcagacaattgttcccctgaatgct

SEQ ID NO: 2563826 - DNA, 25 bp, Homo sapien
tgttgcagctgcagtcgcagacaat

SEQ ID NO: 2563827 - DNA, 25 bp, Homo sapien
cagtcgcagacaattgttcccctga

SEQ ID NO: 2563828 - DNA, 25 bp, Homo sapien
agagctcgtacctctgccaccaggt

SEQ ID NO: 2563829 - DNA, 25 bp, Homo sapien
ggctgggaagttctggttaatggag

SEQ ID NO: 2563830 - DNA, 25 bp, Homo sapien
ctgggaagttctggttaatggagga

SEQ ID NO: 2563831 - DNA, 25 bp, Homo sapien
gcagctgcttgtttccagggtcagt

SEQ ID NO: 2563832 - DNA, 25 bp, Homo sapien
ctgcttgtttccagggtcagtgctg

SEQ ID NO: 2563833 - DNA, 25 bp, Homo sapien
cggactggaggggacacagctgaat

SEQ ID NO: 2563834 - DNA, 25 bp, Homo sapien
caacatcccggactggaggggacac

SEQ ID NO: 2563835 - DNA, 25 bp, Homo sapien
cccggactggaggggacacagctga

SEQ ID NO: 2563836 - DNA, 25 bp, Homo sapien
acatcccggactggaggggacacag

SEQ ID NO: 2563837 - DNA, 25 bp, Homo sapien
gagccaggagtagaggaagcagagc

SEQ ID NO: 2563838 - DNA, 25 bp, Homo sapien
ttgctctgttgattatgggcgtttc

SEQ ID NO: 2563839 - DNA, 25 bp, Homo sapien
tttctgagccaggagtagaggaagc

SEQ ID NO: 2563840 - DNA, 25 bp, Homo sapien
catttgctctgttgattatgggcgt

SEQ ID NO: 2563841 - DNA, 25 bp, Homo sapien
cttagggcactgtagtcatcaatgt

SEQ ID NO: 2563842 - DNA, 25 bp, Homo sapien
gagacactatctttttgaccagcag

SEQ ID NO: 2563843 - DNA, 25 bp, Homo sapien
aagagacactatctttttgaccagc

SEQ ID NO: 2563844 - DNA, 25 bp, Homo sapien
gctgtcttagggcactgtagtcatc

SEQ ID NO: 2563845 - DNA, 25 bp, Homo sapien
tgggcttcaaggccagggaagctgc

SEQ ID NO: 2563846 - DNA, 25 bp, Homo sapien
ttgggcttcaaggccagggaagctg

SEQ ID NO: 2563847 - DNA, 25 bp, Homo sapien
tgctccctttaccaggaatgccttc

SEQ ID NO: 2563848 - DNA, 25 bp, Homo sapien
tctcagaactaaggtgctgctccct

SEQ ID NO: 2563849 - DNA, 25 bp, Homo sapien
tttgcagctctcagaactaaggtgc

SEQ ID NO: 2563850 - DNA, 25 bp, Homo sapien
ctaaggtgctgctccctttaccagg

SEQ ID NO: 2563851 - DNA, 25 bp, Homo sapien
cacaggagcggagagattactttct

SEQ ID NO: 2563852 - DNA, 25 bp, Homo sapien
acaggagcggagagattactttctt

SEQ ID NO: 2563853 - DNA, 25 bp, Homo sapien
aggagcggagagattactttcttcc

SEQ ID NO: 2563854 - DNA, 25 bp, Homo sapien
caggagcggagagattactttcttc

SEQ ID NO: 2563855 - DNA, 25 bp, Homo sapien
gctgactcctctagggcatggtgca

SEQ ID NO: 2563856 - DNA, 25 bp, Homo sapien
agggccgctctccagaacatggtga

SEQ ID NO: 2563857 - DNA, 25 bp, Homo sapien
tcatgaatacctttgctgcctagca

SEQ ID NO: 2563858 - DNA, 25 bp, Homo sapien
ggtgctgctccgaagctcatgaata

SEQ ID NO: 2563859 - DNA, 25 bp, Homo sapien
caactctcttgaactggatttcctc

SEQ ID NO: 2563860 - DNA, 25 bp, Homo sapien
tacagtcttctcaactctcttgaac

SEQ ID NO: 2563861 - DNA, 25 bp, Homo sapien
caaagaaggattctacagtcttctc

SEQ ID NO: 2563862 - DNA, 25 bp, Homo sapien
tgtggctctttccaattcaaagaag

SEQ ID NO: 2563863 - DNA, 25 bp, Homo sapien
ttgtgctctgaaggagtcgctcctg

SEQ ID NO: 2563864 - DNA, 25 bp, Homo sapien
cgatgaactgttccatgctctcctt

SEQ ID NO: 2563865 - DNA, 25 bp, Homo sapien
gctcagttgtgctctgaaggagtcg

SEQ ID NO: 2563866 - DNA, 25 bp, Homo sapien
ttggcgttcttcagatgctcagttg

SEQ ID NO: 2563867 - DNA, 25 bp, Homo sapien
gtttggggacatcaaatcagtctca

SEQ ID NO: 2563868 - DNA, 25 bp, Homo sapien
cacaattgctcctggtacaggaggt

SEQ ID NO: 2563869 - DNA, 25 bp, Homo sapien
agccacaattgctcctggtacagga

SEQ ID NO: 2563870 - DNA, 25 bp, Homo sapien
tgcagccacaattgctcctggtaca

SEQ ID NO: 2563871 - DNA, 25 bp, Homo sapien
gccttctttaaaacatcatgtgttc

SEQ ID NO: 2563872 - DNA, 25 bp, Homo sapien
ctctaagttagtccttgccttcttt

SEQ ID NO: 2563873 - DNA, 25 bp, Homo sapien
tctaagttagtccttgccttcttta

SEQ ID NO: 2563874 - DNA, 25 bp, Homo sapien
tttaaaacatcatgtgttctggtta

SEQ ID NO: 2563875 - DNA, 25 bp, Homo sapien
gacctgtgatcttgcaagtggaccc

SEQ ID NO: 2563876 - DNA, 25 bp, Homo sapien
ggacctgtgatcttgcaagtggacc

SEQ ID NO: 2563877 - DNA, 25 bp, Homo sapien
taacccgggaatgtgcagtgaaatc

SEQ ID NO: 2563878 - DNA, 25 bp, Homo sapien
gaagagtagaacacataactggcct

SEQ ID NO: 2563879 - DNA, 25 bp, Homo sapien
cagaggcagactcccgaatgtctaa

SEQ ID NO: 2563880 - DNA, 25 bp, Homo sapien
aagtgctgctctaaagaggctcagg

SEQ ID NO: 2563881 - DNA, 25 bp, Homo sapien
gagtgagagctacgtggtgaccaaa

SEQ ID NO: 2563882 - DNA, 25 bp, Homo sapien
taagagcatgcgctgcagtctggag

SEQ ID NO: 2563883 - DNA, 25 bp, Homo sapien
caggagcacggtgagagccagttaa

SEQ ID NO: 2563884 - DNA, 25 bp, Homo sapien
tgtccagttgccataatgagggtgt

SEQ ID NO: 2563885 - DNA, 25 bp, Homo sapien
gctggagtacatggcagagccctta

SEQ ID NO: 2563886 - DNA, 25 bp, Homo sapien
atggcagagcccttagggatttcac

SEQ ID NO: 2563887 - DNA, 25 bp, Homo sapien
gaaggcaagggtcacaaggctggag

SEQ ID NO: 2563888 - DNA, 25 bp, Homo sapien
tggaaggcaagggtcacaaggctgg

SEQ ID NO: 2563889 - DNA, 25 bp, Homo sapien
taaggacttctggtggctgcgcttc

SEQ ID NO: 2563890 - DNA, 25 bp, Homo sapien
gacttctggtggctgcgcttcttgc

SEQ ID NO: 2563891 - DNA, 25 bp, Homo sapien
tttaaggacttctggtggctgcgct

SEQ ID NO: 2563892 - DNA, 25 bp, Homo sapien
gctgttttaaggacttctggtggct

SEQ ID NO: 2563893 - DNA, 25 bp, Homo sapien
ctgcacaaaagggggacaggcccac

SEQ ID NO: 2563894 - DNA, 25 bp, Homo sapien
ttggaggaatgaggcccagatgctc

SEQ ID NO: 2563895 - DNA, 25 bp, Homo sapien
cttctggaccctcccgtggacttgg

SEQ ID NO: 2563896 - DNA, 25 bp, Homo sapien
accaggatacatctctgactccctc

SEQ ID NO: 2563897 - DNA, 25 bp, Homo sapien
agctccaccaggatacatctctgac

SEQ ID NO: 2563898 - DNA, 25 bp, Homo sapien
cttggctaatcgtattccatagccg

SEQ ID NO: 2563899 - DNA, 25 bp, Homo sapien
cagcattgggaccacgtgccccttt

SEQ ID NO: 2563900 - DNA, 25 bp, Homo sapien
ttgggaccacgtgcccctttcatcg

SEQ ID NO: 2563901 - DNA, 25 bp, Homo sapien
ccgagataagatagggtgacaaaat

SEQ ID NO: 2563902 - DNA, 25 bp, Homo sapien
atcagtctgcaatttccccgagata

SEQ ID NO: 2563903 - DNA, 25 bp, Homo sapien
gcttgatcaattctactgagaccca

SEQ ID NO: 2563904 - DNA, 25 bp, Homo sapien
gcttgtttgcatgctcactaattct

SEQ ID NO: 2563905 - DNA, 25 bp, Homo sapien
tctccagggttggtcactgagtgcc

SEQ ID NO: 2563906 - DNA, 25 bp, Homo sapien
gaattccctgagaggttacacgtct

SEQ ID NO: 2563907 - DNA, 25 bp, Homo sapien
taggcatgcatttataccagcatgt

SEQ ID NO: 2563908 - DNA, 25 bp, Homo sapien
tataaattatgagtttctatctgtg

SEQ ID NO: 2563909 - DNA, 25 bp, Homo sapien
atctgtgtccatgaagtcttactag

SEQ ID NO: 2563910 - DNA, 25 bp, Homo sapien
tctataacctttgtaggcatgcatt

SEQ ID NO: 2563911 - DNA, 25 bp, Homo sapien
gttcccattgataggataaacttgt

SEQ ID NO: 2563912 - DNA, 25 bp, Homo sapien
agtattctgcaggtttacagtcagt

SEQ ID NO: 2563913 - DNA, 25 bp, Homo sapien
aacttgttttctcgtttcatggtct

SEQ ID NO: 2563914 - DNA, 25 bp, Homo sapien
agtggccttttcaagtagggtatca

SEQ ID NO: 2563915 - DNA, 25 bp, Homo sapien
tcagtctggaggaactagggccacc

SEQ ID NO: 2563916 - DNA, 25 bp, Homo sapien
tattaaatgaaaggtcctacctgcc

SEQ ID NO: 2563917 - DNA, 25 bp, Homo sapien
tggatggaagaaacaatgacctcac

SEQ ID NO: 2563918 - DNA, 25 bp, Homo sapien
tttgagaaccagctacaagtagggc

SEQ ID NO: 2563919 - DNA, 25 bp, Homo sapien
ccaggaaatgggtactttgtctaat

SEQ ID NO: 2563920 - DNA, 25 bp, Homo sapien
ccagcttagcctatttattttgtca

SEQ ID NO: 2563921 - DNA, 25 bp, Homo sapien
taatgcagggaactgtaaagctcag

SEQ ID NO: 2563922 - DNA, 25 bp, Homo sapien
cagggaagtgaagttacttgttcaa

SEQ ID NO: 2563923 - DNA, 25 bp, Homo sapien
tagacctggtgctctcacactgtag

SEQ ID NO: 2563924 - DNA, 25 bp, Homo sapien
actgtagacagtgttggataccacc

SEQ ID NO: 2563925 - DNA, 25 bp, Homo sapien
taccaccaagtatgctgaatccctg

SEQ ID NO: 2563926 - DNA, 25 bp, Homo sapien
aaaaagatggccacattcagtgggc

SEQ ID NO: 2563927 - DNA, 25 bp, Homo sapien
acaacaacataataaggagaagctt

SEQ ID NO: 2563928 - DNA, 25 bp, Homo sapien
ttaaaacatttagaagcggcggtgc

SEQ ID NO: 2563929 - DNA, 25 bp, Homo sapien
tcctggtctagagatagcgtttaag

SEQ ID NO: 2563930 - DNA, 25 bp, Homo sapien
gagtgctacagtatctagtctaaga

SEQ ID NO: 2563931 - DNA, 25 bp, Homo sapien
tcagtattcgtgtacccttgtgaca

SEQ ID NO: 2563932 - DNA, 25 bp, Homo sapien
ggtcaccaccaatggggatcattcc

SEQ ID NO: 2563933 - DNA, 25 bp, Homo sapien
tgaaacacaggcaccctagtctcac

SEQ ID NO: 2563934 - DNA, 25 bp, Homo sapien
gcaccctagtctcacctgagggtca

SEQ ID NO: 2563935 - DNA, 25 bp, Homo sapien
cttctcgctggaccaagggccggct

SEQ ID NO: 2563936 - DNA, 25 bp, Homo sapien
tcgctggaccaagggccggctgata

SEQ ID NO: 2563937 - DNA, 25 bp, Homo sapien
tctgccttctcgctggaccaagggc

SEQ ID NO: 2563938 - DNA, 25 bp, Homo sapien
ctgccttctcgctggaccaagggcc

SEQ ID NO: 2563939 - DNA, 25 bp, Homo sapien
ccggccagttgagttagaaaacatc

SEQ ID NO: 2563940 - DNA, 25 bp, Homo sapien
tatttcttctgtcggttggccagga

SEQ ID NO: 2563941 - DNA, 25 bp, Homo sapien
aactgggggcgcaatttctcgttga

SEQ ID NO: 2563942 - DNA, 25 bp, Homo sapien
acatctctctttgaggtttccgaac

SEQ ID NO: 2563943 - DNA, 25 bp, Homo sapien
tttcctagaagtacaggaaggatga

SEQ ID NO: 2563944 - DNA, 25 bp, Homo sapien
ctagaagtacaggaaggatgaaatt

SEQ ID NO: 2563945 - DNA, 25 bp, Homo sapien
tcctagaagtacaggaaggatgaaa

SEQ ID NO: 2563946 - DNA, 25 bp, Homo sapien
gaagtacaggaaggatgaaattatt

SEQ ID NO: 2563947 - DNA, 25 bp, Homo sapien
tgaactgtcgctcattcctcagcat

SEQ ID NO: 2563948 - DNA, 25 bp, Homo sapien
ctcattcaatgagcgggaggcatct

SEQ ID NO: 2563949 - DNA, 25 bp, Homo sapien
cgtaacttctcctttaactgcgtca

SEQ ID NO: 2563950 - DNA, 25 bp, Homo sapien
aaggtgctgtgccagtctacacccc

SEQ ID NO: 2563951 - DNA, 25 bp, Homo sapien
aactgcgtcagctctcgttcctgag

SEQ ID NO: 2563952 - DNA, 25 bp, Homo sapien
ggaggagggacacttgcaatactgt

SEQ ID NO: 2563953 - DNA, 25 bp, Homo sapien
gggaaccttcattcttagcccagag

SEQ ID NO: 2563954 - DNA, 25 bp, Homo sapien
cgtaagtgttcccatatttggatgc

SEQ ID NO: 2563955 - DNA, 25 bp, Homo sapien
gaaagataaatcactcactcaccga

SEQ ID NO: 2563956 - DNA, 25 bp, Homo sapien
ctgggggcagatgattccagtactt

SEQ ID NO: 2563957 - DNA, 25 bp, Homo sapien
gggcagatgattccagtactttctc

SEQ ID NO: 2563958 - DNA, 25 bp, Homo sapien
gatgattccagtactttctcatcct

SEQ ID NO: 2563959 - DNA, 25 bp, Homo sapien
tcctcctcaacttgaacatcttcat

SEQ ID NO: 2563960 - DNA, 25 bp, Homo sapien
atgagaggattctctgtctacaacc

SEQ ID NO: 2563961 - DNA, 25 bp, Homo sapien
gaggattctctgtctacaaccagag

SEQ ID NO: 2563962 - DNA, 25 bp, Homo sapien
gaagccggccagttgagttagaaaa

SEQ ID NO: 2563963 - DNA, 25 bp, Homo sapien
ccagttgagttagaaaacatttctc

SEQ ID NO: 2563964 - DNA, 25 bp, Homo sapien
ccggccagttgagttagaaaacatt

SEQ ID NO: 2563965 - DNA, 25 bp, Homo sapien
ctgggggcgcaatttctcattgatt

SEQ ID NO: 2563966 - DNA, 25 bp, Homo sapien
tgaactgtcgctcattcctcagcat

SEQ ID NO: 2563967 - DNA, 25 bp, Homo sapien
gtacttcagagatttacacacctgc

SEQ ID NO: 2563968 - DNA, 25 bp, Homo sapien
tggcccagcttagctcttacgtctc

SEQ ID NO: 2563969 - DNA, 25 bp, Homo sapien
acttcagagatttacacacctgccc

SEQ ID NO: 2563970 - DNA, 25 bp, Homo sapien
cagcttagctcttacgtctccccac

SEQ ID NO: 2563971 - DNA, 25 bp, Homo sapien
cagctctcgttcctgagcgtgaacc

SEQ ID NO: 2563972 - DNA, 25 bp, Homo sapien
ctcattcaatgagcgggaggcatct

SEQ ID NO: 2563973 - DNA, 25 bp, Homo sapien
aaggtgctgtgccagtctacacccc

SEQ ID NO: 2563974 - DNA, 25 bp, Homo sapien
ggacttgtccggctcatccggagtg

SEQ ID NO: 2563975 - DNA, 25 bp, Homo sapien
agccacctcaacttgaacatcttca

SEQ ID NO: 2563976 - DNA, 25 bp, Homo sapien
gggcagacgatttctgcactttctc

SEQ ID NO: 2563977 - DNA, 25 bp, Homo sapien
ctgggggcagacgatttctgcactt

SEQ ID NO: 2563978 - DNA, 25 bp, Homo sapien
atcttcatcgtcatcgttgtcattt

SEQ ID NO: 2563979 - DNA, 25 bp, Homo sapien
tggctggttggagtcataagggcca

SEQ ID NO: 2563980 - DNA, 25 bp, Homo sapien
ttcctcttcctcatcatcactttca

SEQ ID NO: 2563981 - DNA, 25 bp, Homo sapien
ctgggagacactggccctttttctt

SEQ ID NO: 2563982 - DNA, 25 bp, Homo sapien
ctcttcctcatcatcactttcattt

SEQ ID NO: 2563983 - DNA, 25 bp, Homo sapien
tcttcctcatcatcactttcatttt

SEQ ID NO: 2563984 - DNA, 25 bp, Homo sapien
tgagggagtcgaataaccttcatcc

SEQ ID NO: 2563985 - DNA, 25 bp, Homo sapien
cactgcctatgtcaacagccatgca

SEQ ID NO: 2563986 - DNA, 25 bp, Homo sapien
ctgctgtaagacttgtacgaggcca

SEQ ID NO: 2563987 - DNA, 25 bp, Homo sapien
agacttgtacgaggccaacatttca

SEQ ID NO: 2563988 - DNA, 25 bp, Homo sapien
gaaatctacattgatatataggttc

SEQ ID NO: 2563989 - DNA, 25 bp, Homo sapien
tgccttgagttcaatgtcgtgacag

SEQ ID NO: 2563990 - DNA, 25 bp, Homo sapien
gtgacagtcagtccaggttggcacg

SEQ ID NO: 2563991 - DNA, 25 bp, Homo sapien
gttcaatgtcgtgacagtcagtcca

SEQ ID NO: 2563992 - DNA, 25 bp, Homo sapien
caatgtcgtgacagtcagtccaggt

SEQ ID NO: 2563993 - DNA, 25 bp, Homo sapien
agaggtagacaagggtgacactggc

SEQ ID NO: 2563994 - DNA, 25 bp, Homo sapien
gatgagctaaaacaagcgaacttag

SEQ ID NO: 2563995 - DNA, 25 bp, Homo sapien
ctaaaacaagcgaacttagaagaca

SEQ ID NO: 2563996 - DNA, 25 bp, Homo sapien
ggacagatgagctaaaacaagcgaa

SEQ ID NO: 2563997 - DNA, 25 bp, Homo sapien
gagctaaaacaagcgaacttagaag

SEQ ID NO: 2563998 - DNA, 25 bp, Homo sapien
catcagtcttgtcagtgtgagaaca

SEQ ID NO: 2563999 - DNA, 25 bp, Homo sapien
tcagatgggccctcttacattaagc

SEQ ID NO: 2564000 - DNA, 25 bp, Homo sapien
gcaaataaattcagatgggccctct

SEQ ID NO: 2564001 - DNA, 25 bp, Homo sapien
tacattaagcagtccttccttgcac

SEQ ID NO: 2564002 - DNA, 25 bp, Homo sapien
tttttcacttgatcccaccgatgtc

SEQ ID NO: 2564003 - DNA, 25 bp, Homo sapien
acctgttgcctcttggtcctccttt

SEQ ID NO: 2564004 - DNA, 25 bp, Homo sapien
gttgcctcttggtcctcctttttca

SEQ ID NO: 2564005 - DNA, 25 bp, Homo sapien
ctgggacctgttgcctcttggtcct

SEQ ID NO: 2564006 - DNA, 25 bp, Homo sapien
tcagacttgtctgacaagacaaaat

SEQ ID NO: 2564007 - DNA, 25 bp, Homo sapien
ctctaatgagaaccaaaaagcaatg

SEQ ID NO: 2564008 - DNA, 25 bp, Homo sapien
ggtgtcaacatcaaattaactgtcc

SEQ ID NO: 2564009 - DNA, 25 bp, Homo sapien
caagtttccctgcagttaccatgag

SEQ ID NO: 2564010 - DNA, 25 bp, Homo sapien
aataacatctatccagtgagtcctg

SEQ ID NO: 2564011 - DNA, 25 bp, Homo sapien
ataacatctatccagtgagtcctgc

SEQ ID NO: 2564012 - DNA, 25 bp, Homo sapien
taacatctatccagtgagtcctgca

SEQ ID NO: 2564013 - DNA, 25 bp, Homo sapien
cataccactgatgctcacaatgatc

SEQ ID NO: 2564014 - DNA, 25 bp, Homo sapien
tccacataccactgatgctcacaat

SEQ ID NO: 2564015 - DNA, 25 bp, Homo sapien
catgatgtagcacaattgactcctc

SEQ ID NO: 2564016 - DNA, 25 bp, Homo sapien
gatgtagcacaattgactcctccac

SEQ ID NO: 2564017 - DNA, 25 bp, Homo sapien
tctgtgcaggcagagatggctgctt

SEQ ID NO: 2564018 - DNA, 25 bp, Homo sapien
tctgggggtctgtggggatggtgct

SEQ ID NO: 2564019 - DNA, 25 bp, Homo sapien
ggatggtgctgaaaaacaggtctgt

SEQ ID NO: 2564020 - DNA, 25 bp, Homo sapien
atggctgctttctgggggtctgtgg

SEQ ID NO: 2564021 - DNA, 25 bp, Homo sapien
tttgtgctcccttgccttgggggtg

SEQ ID NO: 2564022 - DNA, 25 bp, Homo sapien
cccttgccttgggggtggtattgct

SEQ ID NO: 2564023 - DNA, 25 bp, Homo sapien
agacaactggtcttgcaggcttttg

SEQ ID NO: 2564024 - DNA, 25 bp, Homo sapien
gacaactggtcttgcaggcttttgt

SEQ ID NO: 2564025 - DNA, 25 bp, Homo sapien
cccgggtactctgaagacctggcca

SEQ ID NO: 2564026 - DNA, 25 bp, Homo sapien
caccgagaaggacccgggtactctg

SEQ ID NO: 2564027 - DNA, 25 bp, Homo sapien
cttcagtgaagaacttgccactcag

SEQ ID NO: 2564028 - DNA, 25 bp, Homo sapien
attctcctggccaccgagaaggacc

SEQ ID NO: 2564029 - DNA, 25 bp, Homo sapien
ggatgaagttttgtctatgtagagc

SEQ ID NO: 2564030 - DNA, 25 bp, Homo sapien
tctatgtagagctccaaagacacag

SEQ ID NO: 2564031 - DNA, 25 bp, Homo sapien
gagaaaaatggaacctggccccaca

SEQ ID NO: 2564032 - DNA, 25 bp, Homo sapien
ccccacagtgtcaccaaggagcagg

SEQ ID NO: 2564033 - DNA, 25 bp, Homo sapien
aagtgaataaaactggagtccagga

SEQ ID NO: 2564034 - DNA, 25 bp, Homo sapien
gatgaagtgaataaaactggagtcc

SEQ ID NO: 2564035 - DNA, 25 bp, Homo sapien
ggatgaagtgaataaaactggagtc

SEQ ID NO: 2564036 - DNA, 25 bp, Homo sapien
tgaagtgaataaaactggagtccag

SEQ ID NO: 2564037 - DNA, 25 bp, Homo sapien
tttccaggctgtcatgatggtccac

SEQ ID NO: 2564038 - DNA, 25 bp, Homo sapien
gctgtcatgatggtccacaggctcc

SEQ ID NO: 2564039 - DNA, 25 bp, Homo sapien
caggctgtcatgatggtccacaggc

SEQ ID NO: 2564040 - DNA, 25 bp, Homo sapien
tcatgatggtccacaggctccacaa

SEQ ID NO: 2564041 - DNA, 25 bp, Homo sapien
ctggttcgacgaagccaagttcggg

SEQ ID NO: 2564042 - DNA, 25 bp, Homo sapien
taccagcgcttcatgcgcgacaact

SEQ ID NO: 2564043 - DNA, 25 bp, Homo sapien
cacctgcgcgttaagagtgggccgc

SEQ ID NO: 2564044 - DNA, 25 bp, Homo sapien
cagactggccgagcctggattctcg

SEQ ID NO: 2564045 - DNA, 25 bp, Homo sapien
gcccaaagtcacctgatgagccatg

SEQ ID NO: 2564046 - DNA, 25 bp, Homo sapien
gaaaggaccgatactcccatccaag

SEQ ID NO: 2564047 - DNA, 25 bp, Homo sapien
tcttaaatatgcctcgaaaggaccg

SEQ ID NO: 2564048 - DNA, 25 bp, Homo sapien
ggtggaactagaacactcttcactg

SEQ ID NO: 2564049 - DNA, 25 bp, Homo sapien
ttctgagcaggttctcaggtcccaa

SEQ ID NO: 2564050 - DNA, 25 bp, Homo sapien
gatgctcagtatgaaccaggctgta

SEQ ID NO: 2564051 - DNA, 25 bp, Homo sapien
ggctgtaggctgcagcccctaacac

SEQ ID NO: 2564052 - DNA, 25 bp, Homo sapien
ccttcccagatgctcagtatgaacc

SEQ ID NO: 2564053 - DNA, 25 bp, Homo sapien
agtctggttctccgggccaggaaca

SEQ ID NO: 2564054 - DNA, 25 bp, Homo sapien
atccttctagttcacactctgcttc

SEQ ID NO: 2564055 - DNA, 25 bp, Homo sapien
catccttctagttcacactctgctt

SEQ ID NO: 2564056 - DNA, 25 bp, Homo sapien
acaaggtcaagagcctgggcaggca

SEQ ID NO: 2564057 - DNA, 25 bp, Homo sapien
cacaaggtcaagagcctgggcaggc

SEQ ID NO: 2564058 - DNA, 25 bp, Homo sapien
tcacaaggtcaagagcctgggcagg

SEQ ID NO: 2564059 - DNA, 25 bp, Homo sapien
caaggtcaagagcctgggcaggcac

SEQ ID NO: 2564060 - DNA, 25 bp, Homo sapien
aaaaatgagattagggaggccaggc

SEQ ID NO: 2564061 - DNA, 25 bp, Homo sapien
acaatttggttggtagctggaaacg

SEQ ID NO: 2564062 - DNA, 25 bp, Homo sapien
ataaaaatgagattagggaggccag

SEQ ID NO: 2564063 - DNA, 25 bp, Homo sapien
tggctcggtaaaatggtccaaggtg

SEQ ID NO: 2564064 - DNA, 25 bp, Homo sapien
gattggagtcttaggcatctctggt

SEQ ID NO: 2564065 - DNA, 25 bp, Homo sapien
tggagtcttaggcatctctggtaca

SEQ ID NO: 2564066 - DNA, 25 bp, Homo sapien
gggattggagtcttaggcatctctg

SEQ ID NO: 2564067 - DNA, 25 bp, Homo sapien
attggagtcttaggcatctctggta

SEQ ID NO: 2564068 - DNA, 25 bp, Homo sapien
ggatgacgcaagtgcagtgcagaaa

SEQ ID NO: 2564069 - DNA, 25 bp, Homo sapien
tgaccaaattcatgtcggacagatc

SEQ ID NO: 2564070 - DNA, 25 bp, Homo sapien
ccagtgctgttctggacggcagcaa

SEQ ID NO: 2564071 - DNA, 25 bp, Homo sapien
ggcatgtagtcaactgaagcttgat

SEQ ID NO: 2564072 - DNA, 25 bp, Homo sapien
gacctggcggaagtcaaatctgaaa

SEQ ID NO: 2564073 - DNA, 25 bp, Homo sapien
cgctgcgcgagaggaacgcgctcat

SEQ ID NO: 2564074 - DNA, 25 bp, Homo sapien
aattcacattccagacgtggagccc

SEQ ID NO: 2564075 - DNA, 25 bp, Homo sapien
cgtggagcccgcagcctttctgatc

SEQ ID NO: 2564076 - DNA, 25 bp, Homo sapien
tgcaagtttggctcccgaggcctga

SEQ ID NO: 2564077 - DNA, 25 bp, Homo sapien
tcagttggttccgagggtaagttca

SEQ ID NO: 2564078 - DNA, 25 bp, Homo sapien
gaacttacaggaggatcagctcccc

SEQ ID NO: 2564079 - DNA, 25 bp, Homo sapien
ttgatagagtgtcccgtgatcccgc

SEQ ID NO: 2564080 - DNA, 25 bp, Homo sapien
ctatgactcaggctgcctctgtcta

SEQ ID NO: 2564081 - DNA, 25 bp, Homo sapien
tatgactcaggctgcctctgtctac

SEQ ID NO: 2564082 - DNA, 25 bp, Homo sapien
atccgcccaccttgctctcctaaag

SEQ ID NO: 2564083 - DNA, 25 bp, Homo sapien
tccgcccaccttgctctcctaaagt

SEQ ID NO: 2564084 - DNA, 25 bp, Homo sapien
ttaatttatacccttactgagccaa

SEQ ID NO: 2564085 - DNA, 25 bp, Homo sapien
gacagcataagaaactgatatcaaa

SEQ ID NO: 2564086 - DNA, 25 bp, Homo sapien
tacccttactgagccaatgattaaa

SEQ ID NO: 2564087 - DNA, 25 bp, Homo sapien
aaagacagcataagaaactgatatc

SEQ ID NO: 2564088 - DNA, 25 bp, Homo sapien
gatcaggtctcagccttcttccagc

SEQ ID NO: 2564089 - DNA, 25 bp, Homo sapien
ccaccagaagagtaagatcaggtct

SEQ ID NO: 2564090 - DNA, 25 bp, Homo sapien
gcagaacccagaacagtgtaaaact

SEQ ID NO: 2564091 - DNA, 25 bp, Homo sapien
tccagcagaacccagaacagtgtaa

SEQ ID NO: 2564092 - DNA, 25 bp, Homo sapien
gcgctgggcaggtgaagcatatcct

SEQ ID NO: 2564093 - DNA, 25 bp, Homo sapien
gcatatcctttaccctttggccggc

SEQ ID NO: 2564094 - DNA, 25 bp, Homo sapien
cctttggccggctaaggccaggata

SEQ ID NO: 2564095 - DNA, 25 bp, Homo sapien
ggcaggtgaagcatatcctttaccc

SEQ ID NO: 2564096 - DNA, 25 bp, Homo sapien
gctgtggatctgagatgaggataaa

SEQ ID NO: 2564097 - DNA, 25 bp, Homo sapien
cagcacagggctcgggaatggctgt

SEQ ID NO: 2564098 - DNA, 25 bp, Homo sapien
tcaactgtctgatgcgggcacaggg

SEQ ID NO: 2564099 - DNA, 25 bp, Homo sapien
tggatctgagatgaggataaaatga

SEQ ID NO: 2564100 - DNA, 25 bp, Homo sapien
cttatcccttccctccagggacaca

SEQ ID NO: 2564101 - DNA, 25 bp, Homo sapien
tccagggacacaagaagccaggtgg

SEQ ID NO: 2564102 - DNA, 25 bp, Homo sapien
cccttccctccagggacacaagaag

SEQ ID NO: 2564103 - DNA, 25 bp, Homo sapien
ttccctccagggacacaagaagcca

SEQ ID NO: 2564104 - DNA, 25 bp, Homo sapien
tgatgtaggctgcaggcgggcccca

SEQ ID NO: 2564105 - DNA, 25 bp, Homo sapien
agataggagtctgatgtaggctgca

SEQ ID NO: 2564106 - DNA, 25 bp, Homo sapien
tctccaattccagcccagataggag

SEQ ID NO: 2564107 - DNA, 25 bp, Homo sapien
tccagcccagataggagtctgatgt

SEQ ID NO: 2564108 - DNA, 25 bp, Homo sapien
ttgcttcctttttgacgtggcacat

SEQ ID NO: 2564109 - DNA, 25 bp, Homo sapien
tttgcttcctttttgacgtggcaca

SEQ ID NO: 2564110 - DNA, 25 bp, Homo sapien
ggggaacgttatcagcctgtgcttg

SEQ ID NO: 2564111 - DNA, 25 bp, Homo sapien
tttggagaggggaacgttatcagcc

SEQ ID NO: 2564112 - DNA, 25 bp, Homo sapien
ccaaatataatcttctgctaccaaa

SEQ ID NO: 2564113 - DNA, 25 bp, Homo sapien
atccaaatataatcttctgctacca

SEQ ID NO: 2564114 - DNA, 25 bp, Homo sapien
gcctggtactgtgacactcggtgat

SEQ ID NO: 2564115 - DNA, 25 bp, Homo sapien
tactgtgacactcggtgatattaga

SEQ ID NO: 2564116 - DNA, 25 bp, Homo sapien
tgtgacactcggtgatattagacat

SEQ ID NO: 2564117 - DNA, 25 bp, Homo sapien
ggtactgtgacactcggtgatatta

SEQ ID NO: 2564118 - DNA, 25 bp, Homo sapien
gactcgtacaaagcagtaaagaacc

SEQ ID NO: 2564119 - DNA, 25 bp, Homo sapien
acacacgcgggcaagtcagtcactt

SEQ ID NO: 2564120 - DNA, 25 bp, Homo sapien
tagagccctttacgcgccgtgttac

SEQ ID NO: 2564121 - DNA, 25 bp, Homo sapien
tgtgaaggcggttcagacacacgcg

SEQ ID NO: 2564122 - DNA, 25 bp, Homo sapien
caaaagttgcctccctgtgaaggcg

SEQ ID NO: 2564123 - DNA, 25 bp, Homo sapien
gacaaagcccacgaacaccgatgag

SEQ ID NO: 2564124 - DNA, 25 bp, Homo sapien
gaacaccgatgagcgagctgccggc

SEQ ID NO: 2564125 - DNA, 25 bp, Homo sapien
agagacgaggcacggaccgacaaag

SEQ ID NO: 2564126 - DNA, 25 bp, Homo sapien
tgacttcaagctcggaactaacgcg

SEQ ID NO: 2564127 - DNA, 25 bp, Homo sapien
ggaacatgtagacatcacgcagtgt

SEQ ID NO: 2564128 - DNA, 25 bp, Homo sapien
taaattgccatttccggactgtgag

SEQ ID NO: 2564129 - DNA, 25 bp, Homo sapien
tctccctagagggaacagcttaact

SEQ ID NO: 2564130 - DNA, 25 bp, Homo sapien
ttctcacaagccctaacagtctaag

SEQ ID NO: 2564131 - DNA, 25 bp, Homo sapien
tgaggccaacatctgagtctcctca

SEQ ID NO: 2564132 - DNA, 25 bp, Homo sapien
taggagctgaggccaacatctgagt

SEQ ID NO: 2564133 - DNA, 25 bp, Homo sapien
aggagctgaggccaacatctgagtc

SEQ ID NO: 2564134 - DNA, 25 bp, Homo sapien
aggccaacatctgagtctcctcagc

SEQ ID NO: 2564135 - DNA, 25 bp, Homo sapien
tcaatacagaagttttcatgggccg

SEQ ID NO: 2564136 - DNA, 25 bp, Homo sapien
agaagttttcatgggccgatctgct

SEQ ID NO: 2564137 - DNA, 25 bp, Homo sapien
gctgccaagcccaagataacaagtg

SEQ ID NO: 2564138 - DNA, 25 bp, Homo sapien
ctgacagatcccttcctttgtctca

SEQ ID NO: 2564139 - DNA, 25 bp, Homo sapien
tttcagattgcaggatctccactac

SEQ ID NO: 2564140 - DNA, 25 bp, Homo sapien
cttttcagattgcaggatctccact

SEQ ID NO: 2564141 - DNA, 25 bp, Homo sapien
ttttcagattgcaggatctccacta

SEQ ID NO: 2564142 - DNA, 25 bp, Homo sapien
gcttttcagattgcaggatctccac

SEQ ID NO: 2564143 - DNA, 25 bp, Homo sapien
gaagaacacttggtgatggcggctc

SEQ ID NO: 2564144 - DNA, 25 bp, Homo sapien
tctgtctgttaagctgttgttggtt

SEQ ID NO: 2564145 - DNA, 25 bp, Homo sapien
taaatttggcaccagcatagttctg

SEQ ID NO: 2564146 - DNA, 25 bp, Homo sapien
tgataagctagaattccaactttga

SEQ ID NO: 2564147 - DNA, 25 bp, Homo sapien
tctgaatccttgtgttagctagaag

SEQ ID NO: 2564148 - DNA, 25 bp, Homo sapien
tagctagaagcttataatccgattc

SEQ ID NO: 2564149 - DNA, 25 bp, Homo sapien
caatctactggtccatgaatgataa

SEQ ID NO: 2564150 - DNA, 25 bp, Homo sapien
gcagtgcatcaggttagcatattac

SEQ ID NO: 2564151 - DNA, 25 bp, Homo sapien
cagtccacggtcttacattcagcaa

SEQ ID NO: 2564152 - DNA, 25 bp, Homo sapien
tacactggcactttagcacaagggc

SEQ ID NO: 2564153 - DNA, 25 bp, Homo sapien
taagtggtccattgggttgcaccta

SEQ ID NO: 2564154 - DNA, 25 bp, Homo sapien
tggcaccatactcgaaactacctgt

SEQ ID NO: 2564155 - DNA, 25 bp, Homo sapien
gcttcaagtcagtgacaagtaaaac

SEQ ID NO: 2564156 - DNA, 25 bp, Homo sapien
aaagaatattaagcaatcaaaacca

SEQ ID NO: 2564157 - DNA, 25 bp, Homo sapien
caagtcagtgacaagtaaaacacat

SEQ ID NO: 2564158 - DNA, 25 bp, Homo sapien
ttcaagtcagtgacaagtaaaacac

SEQ ID NO: 2564159 - DNA, 25 bp, Homo sapien
tataactgccatcgaaaagaagaca

SEQ ID NO: 2564160 - DNA, 25 bp, Homo sapien
ggttctcgcaattgcatcgacttgg

SEQ ID NO: 2564161 - DNA, 25 bp, Homo sapien
gacttcagcagccttacatggtaag

SEQ ID NO: 2564162 - DNA, 25 bp, Homo sapien
tacctaaggttcacagtatggctga

SEQ ID NO: 2564163 - DNA, 25 bp, Homo sapien
cagttcaagcgaccaaagggtgggt

SEQ ID NO: 2564164 - DNA, 25 bp, Homo sapien
gaaagacctgggaactattgtatta

SEQ ID NO: 2564165 - DNA, 25 bp, Homo sapien
ccaaactgcagctggaatacccagt

SEQ ID NO: 2564166 - DNA, 25 bp, Homo sapien
cagtaagctgctacatccagttcaa

SEQ ID NO: 2564167 - DNA, 25 bp, Homo sapien
accacggcgtagcagaagccattcc

SEQ ID NO: 2564168 - DNA, 25 bp, Homo sapien
gcagaagccattccgacaatgatag

SEQ ID NO: 2564169 - DNA, 25 bp, Homo sapien
cacggcgtagcagaagccattccga

SEQ ID NO: 2564170 - DNA, 25 bp, Homo sapien
cgtagcagaagccattccgacaatg

SEQ ID NO: 2564171 - DNA, 25 bp, Homo sapien
gaagtcggtcttttgattacaacta

SEQ ID NO: 2564172 - DNA, 25 bp, Homo sapien
tagaagccgaagttatgaaaggagg

SEQ ID NO: 2564173 - DNA, 25 bp, Homo sapien
cagatacagacgttctagaagccga

SEQ ID NO: 2564174 - DNA, 25 bp, Homo sapien
aaaggaggagatcaagaagtcggtc

SEQ ID NO: 2564175 - DNA, 25 bp, Homo sapien
tgaaatacagtttgcccagggggat

SEQ ID NO: 2564176 - DNA, 25 bp, Homo sapien
gaaatacagtttgcccagggggatc

SEQ ID NO: 2564177 - DNA, 25 bp, Homo sapien
acagtttgcccagggggatcgaaag

SEQ ID NO: 2564178 - DNA, 25 bp, Homo sapien
aatacagtttgcccagggggatcga

SEQ ID NO: 2564179 - DNA, 25 bp, Homo sapien
atcaaggacagttgtgagaattggt

SEQ ID NO: 2564180 - DNA, 25 bp, Homo sapien
gatcaaggacagttgtgagaattgg

SEQ ID NO: 2564181 - DNA, 25 bp, Homo sapien
cagtgatcaaggacagttgtgagaa

SEQ ID NO: 2564182 - DNA, 25 bp, Homo sapien
gtgatcaaggacagttgtgagaatt

SEQ ID NO: 2564183 - DNA, 25 bp, Homo sapien
tcaaaattattctggtttggtctag

SEQ ID NO: 2564184 - DNA, 25 bp, Homo sapien
gtaaatgcactctctcttatgaagt

SEQ ID NO: 2564185 - DNA, 25 bp, Homo sapien
gaaacagctctggtggtcttgtagg

SEQ ID NO: 2564186 - DNA, 25 bp, Homo sapien
tatgaagttaaagtgtaacaggatg

SEQ ID NO: 2564187 - DNA, 25 bp, Homo sapien
gtgtaaatctgtcgctaaaattggg

SEQ ID NO: 2564188 - DNA, 25 bp, Homo sapien
taatagttacgttagcatctagaga

SEQ ID NO: 2564189 - DNA, 25 bp, Homo sapien
cagaccatatttatctactgttaag

SEQ ID NO: 2564190 - DNA, 25 bp, Homo sapien
tacgtcatcttgacacttaactatt

SEQ ID NO: 2564191 - DNA, 25 bp, Homo sapien
gaactgctgcaatacaggtccgatg

SEQ ID NO: 2564192 - DNA, 25 bp, Homo sapien
tacagtgtgaggtttggtcccaccc

SEQ ID NO: 2564193 - DNA, 25 bp, Homo sapien
caggacattaacttggaccaaccgg

SEQ ID NO: 2564194 - DNA, 25 bp, Homo sapien
taaatccttctttcgcaggtcaggg

SEQ ID NO: 2564195 - DNA, 25 bp, Homo sapien
ggccccacgtctgagcctagcatgg

SEQ ID NO: 2564196 - DNA, 25 bp, Homo sapien
tagcatggtgtattccttcttctcc

SEQ ID NO: 2564197 - DNA, 25 bp, Homo sapien
tctgagcctagcatggtgtattcct

SEQ ID NO: 2564198 - DNA, 25 bp, Homo sapien
ccacgtctgagcctagcatggtgta

SEQ ID NO: 2564199 - DNA, 25 bp, Homo sapien
ctgctgctggcggaggaaggactca

SEQ ID NO: 2564200 - DNA, 25 bp, Homo sapien
gaggaaggactcaacttccttcaca

SEQ ID NO: 2564201 - DNA, 25 bp, Homo sapien
cacagcttggactcctggtgctaca

SEQ ID NO: 2564202 - DNA, 25 bp, Homo sapien
aacttccttcacagcttggactcct

SEQ ID NO: 2564203 - DNA, 25 bp, Homo sapien
taatgaccattcatcatccttgttg

SEQ ID NO: 2564204 - DNA, 25 bp, Homo sapien
cagtggacatatgggcagtttccta

SEQ ID NO: 2564205 - DNA, 25 bp, Homo sapien
taaccatgcctctatcagtggacat

SEQ ID NO: 2564206 - DNA, 25 bp, Homo sapien
agtatttaataccatgtgctgccag

SEQ ID NO: 2564207 - DNA, 25 bp, Homo sapien
ttacagctcgtggaggagggaaaag

SEQ ID NO: 2564208 - DNA, 25 bp, Homo sapien
gaagcagcagttacagctcgtggag

SEQ ID NO: 2564209 - DNA, 25 bp, Homo sapien
gcagttacagctcgtggaggaggga

SEQ ID NO: 2564210 - DNA, 25 bp, Homo sapien
cagttacagctcgtggaggagggaa

SEQ ID NO: 2564211 - DNA, 25 bp, Homo sapien
gctgtagttaacaaggctccctgac

SEQ ID NO: 2564212 - DNA, 25 bp, Homo sapien
tgagtaatgatttataaagtggtgt

SEQ ID NO: 2564213 - DNA, 25 bp, Homo sapien
cccctgctgtttggtaatgttaatg

SEQ ID NO: 2564214 - DNA, 25 bp, Homo sapien
taatgttaatggacaggaagtgagt

SEQ ID NO: 2564215 - DNA, 25 bp, Homo sapien
ttgtggagtggagcatggagatggc

SEQ ID NO: 2564216 - DNA, 25 bp, Homo sapien
gagtggtggtagctcctcttatttt

SEQ ID NO: 2564217 - DNA, 25 bp, Homo sapien
ccaagtaggtctgtgacccagtact

SEQ ID NO: 2564218 - DNA, 25 bp, Homo sapien
cttattttgtcctgcatagttgtgg

SEQ ID NO: 2564219 - DNA, 25 bp, Homo sapien
tgttgatcttaagagccttttgaga

SEQ ID NO: 2564220 - DNA, 25 bp, Homo sapien
gtggctgcttgtaatgtaagagata

SEQ ID NO: 2564221 - DNA, 25 bp, Homo sapien
ctccttgctcatgtctcattgttga

SEQ ID NO: 2564222 - DNA, 25 bp, Homo sapien
ctgcttgtaatgtaagagataggca

SEQ ID NO: 2564223 - DNA, 25 bp, Homo sapien
taaggtcagcattgtaaagattcag

SEQ ID NO: 2564224 - DNA, 25 bp, Homo sapien
tgtaatggaaacaagactggtgtgc

SEQ ID NO: 2564225 - DNA, 25 bp, Homo sapien
tgtgctgagccattgaggtgagtct

SEQ ID NO: 2564226 - DNA, 25 bp, Homo sapien
atagccataatcaatagcttgtaaa

SEQ ID NO: 2564227 - DNA, 25 bp, Homo sapien
tagagagggcccattcgcttctcgc

SEQ ID NO: 2564228 - DNA, 25 bp, Homo sapien
agagggcccattcgcttctcgctga

SEQ ID NO: 2564229 - DNA, 25 bp, Homo sapien
ttcgcttctcgctgacctccccttt

SEQ ID NO: 2564230 - DNA, 25 bp, Homo sapien
ctagagagggcccattcgcttctcg

SEQ ID NO: 2564231 - DNA, 25 bp, Homo sapien
tgtgtgtcagtaactctataatcat

SEQ ID NO: 2564232 - DNA, 25 bp, Homo sapien
gttgtggattgtgatacatgccatt

SEQ ID NO: 2564233 - DNA, 25 bp, Homo sapien
ctatctcttgccaaagggtatgtca

SEQ ID NO: 2564234 - DNA, 25 bp, Homo sapien
cttcctaaaagttgtggattgtgat

SEQ ID NO: 2564235 - DNA, 25 bp, Homo sapien
ggacagccgtgtcactaaaatgcat

SEQ ID NO: 2564236 - DNA, 25 bp, Homo sapien
aagacactggacagccgtgtcacta

SEQ ID NO: 2564237 - DNA, 25 bp, Homo sapien
tgacaatgacgatgactggaagaca

SEQ ID NO: 2564238 - DNA, 25 bp, Homo sapien
cagtgacaatgacgatgactggaag

SEQ ID NO: 2564239 - DNA, 25 bp, Homo sapien
gtttttactgcattagtgaagtcac

SEQ ID NO: 2564240 - DNA, 25 bp, Homo sapien
ttggcctcctttgggcaaagcagca

SEQ ID NO: 2564241 - DNA, 25 bp, Homo sapien
cagcttggcctcctttgggcaaagc

SEQ ID NO: 2564242 - DNA, 25 bp, Homo sapien
gcagcaaccaggtaagcagcacttg

SEQ ID NO: 2564243 - DNA, 25 bp, Homo sapien
ttgtgagaggtgcttggtcagttac

SEQ ID NO: 2564244 - DNA, 25 bp, Homo sapien
tggtccgtgcagctcagtaagaaaa

SEQ ID NO: 2564245 - DNA, 25 bp, Homo sapien
tgggcaacattgttggaggcagctg

SEQ ID NO: 2564246 - DNA, 25 bp, Homo sapien
atggtccgtgcagctcagtaagaaa

SEQ ID NO: 2564247 - DNA, 25 bp, Homo sapien
ggtccgtgcagctcagtaagaaaat

SEQ ID NO: 2564248 - DNA, 25 bp, Homo sapien
taggaaaggagcacgaagtactctt

SEQ ID NO: 2564249 - DNA, 25 bp, Homo sapien
ctttaggaaaggagcacgaagtact

SEQ ID NO: 2564250 - DNA, 25 bp, Homo sapien
ggagcacgaagtactctttttatag

SEQ ID NO: 2564251 - DNA, 25 bp, Homo sapien
aaggagcacgaagtactctttttat

SEQ ID NO: 2564252 - DNA, 25 bp, Homo sapien
aataattaatgttttgccctgtttg

SEQ ID NO: 2564253 - DNA, 25 bp, Homo sapien
tgtttgtttccagctttaagatatc

SEQ ID NO: 2564254 - DNA, 25 bp, Homo sapien
aaaagttatactggatggagggtgc

SEQ ID NO: 2564255 - DNA, 25 bp, Homo sapien
catgcacttcggtcaactcatcttc

SEQ ID NO: 2564256 - DNA, 25 bp, Homo sapien
gggttgcaccaaaggcaacggcaca

SEQ ID NO: 2564257 - DNA, 25 bp, Homo sapien
gagggtgcaacagctggatcagcca

SEQ ID NO: 2564258 - DNA, 25 bp, Homo sapien
gattgctggtgcagcattgtctagc

SEQ ID NO: 2564259 - DNA, 25 bp, Homo sapien
gccactactcctgcagagttggaaa

SEQ ID NO: 2564260 - DNA, 25 bp, Homo sapien
gaaagtgctgtgaaatgtgggatac

SEQ ID NO: 2564261 - DNA, 25 bp, Homo sapien
cattcactctgcttattggaagaac

SEQ ID NO: 2564262 - DNA, 25 bp, Homo sapien
cattcactgagcatgtatttagtag

SEQ ID NO: 2564263 - DNA, 25 bp, Homo sapien
ttggaaccagtctaggacactctgc

SEQ ID NO: 2564264 - DNA, 25 bp, Homo sapien
ggatccaaatcctctctaaagtgtt

SEQ ID NO: 2564265 - DNA, 25 bp, Homo sapien
caaattatacgatgtgggtgaatgt

SEQ ID NO: 2564266 - DNA, 25 bp, Homo sapien
ccctgcccacagctgttttcttcat

SEQ ID NO: 2564267 - DNA, 25 bp, Homo sapien
ccagccctgcccacagctgttttct

SEQ ID NO: 2564268 - DNA, 25 bp, Homo sapien
ctcaaattcaagcccagccctgccc

SEQ ID NO: 2564269 - DNA, 25 bp, Homo sapien
agccctgcccacagctgttttcttc

SEQ ID NO: 2564270 - DNA, 25 bp, Homo sapien
tagttctgtttctcttgcgtcgtac

SEQ ID NO: 2564271 - DNA, 25 bp, Homo sapien
tactgagaagcaacaaccctgttgg

SEQ ID NO: 2564272 - DNA, 25 bp, Homo sapien
ccctgttggaactttgatgtgcgaa

SEQ ID NO: 2564273 - DNA, 25 bp, Homo sapien
taatgaatacagatacttagttctg

SEQ ID NO: 2564274 - DNA, 25 bp, Homo sapien
gtcttcttcggcatcttttctgtgg

SEQ ID NO: 2564275 - DNA, 25 bp, Homo sapien
tcttcggcatcttttctgtggagcc

SEQ ID NO: 2564276 - DNA, 25 bp, Homo sapien
ccatgaacgttttagctgtcttctt

SEQ ID NO: 2564277 - DNA, 25 bp, Homo sapien
cttcttcggcatcttttctgtggag

SEQ ID NO: 2564278 - DNA, 25 bp, Homo sapien
cagtgatctccatacttgtggccac

SEQ ID NO: 2564279 - DNA, 25 bp, Homo sapien
agtgtttatcaactgtgctgaaggc

SEQ ID NO: 2564280 - DNA, 25 bp, Homo sapien
tgaaggcatgtcttggcttggccca

SEQ ID NO: 2564281 - DNA, 25 bp, Homo sapien
cactccctagactcagcttggtttt

SEQ ID NO: 2564282 - DNA, 25 bp, Homo sapien
tatgatgaatccaaaagaatggagc

SEQ ID NO: 2564283 - DNA, 25 bp, Homo sapien
caaaagaatggagctagagtgaagg

SEQ ID NO: 2564284 - DNA, 25 bp, Homo sapien
ggagctagagtgaaggcccacagca

SEQ ID NO: 2564285 - DNA, 25 bp, Homo sapien
aatggagctagagtgaaggcccaca

SEQ ID NO: 2564286 - DNA, 25 bp, Homo sapien
ctccgagtcgttttgtgctcccctt

SEQ ID NO: 2564287 - DNA, 25 bp, Homo sapien
cagggactccgagtcgttttgtgct

SEQ ID NO: 2564288 - DNA, 25 bp, Homo sapien
gatctgtgtgctcactaggcaggga

SEQ ID NO: 2564289 - DNA, 25 bp, Homo sapien
tgtgtgctcactaggcagggactcc

SEQ ID NO: 2564290 - DNA, 25 bp, Homo sapien
agtttcactgcgttgctctgctccc

SEQ ID NO: 2564291 - DNA, 25 bp, Homo sapien
catggaggggcaagtccaactatta

SEQ ID NO: 2564292 - DNA, 25 bp, Homo sapien
gcaagtccaactattatgaattcag

SEQ ID NO: 2564293 - DNA, 25 bp, Homo sapien
aattcagacaacttaataatttcag

SEQ ID NO: 2564294 - DNA, 25 bp, Homo sapien
tgaggatccactgaataggatagtc

SEQ ID NO: 2564295 - DNA, 25 bp, Homo sapien
agcaatggaaagacactttttgaag

SEQ ID NO: 2564296 - DNA, 25 bp, Homo sapien
cactgaataggatagtctaaataag

SEQ ID NO: 2564297 - DNA, 25 bp, Homo sapien
caatggaaagacactttttgaaggt

SEQ ID NO: 2564298 - DNA, 25 bp, Homo sapien
ctgggggcatccacgccagacttgt

SEQ ID NO: 2564299 - DNA, 25 bp, Homo sapien
catccacgccagacttgtaggagca

SEQ ID NO: 2564300 - DNA, 25 bp, Homo sapien
tgggggcatccacgccagacttgta

SEQ ID NO: 2564301 - DNA, 25 bp, Homo sapien
gggcatccacgccagacttgtagga

SEQ ID NO: 2564302 - DNA, 25 bp, Homo sapien
agcttgtgcagtccaccctctcgga

SEQ ID NO: 2564303 - DNA, 25 bp, Homo sapien
cctggacaagcttgtgcagtccacc

SEQ ID NO: 2564304 - DNA, 25 bp, Homo sapien
agtccaccctctcggacctcagggt

SEQ ID NO: 2564305 - DNA, 25 bp, Homo sapien
gacaagcttgtgcagtccaccctct

SEQ ID NO: 2564306 - DNA, 25 bp, Homo sapien
agacagggtgccccacggatgtcct

SEQ ID NO: 2564307 - DNA, 25 bp, Homo sapien
tcaaagggacccaggttggtgatta

SEQ ID NO: 2564308 - DNA, 25 bp, Homo sapien
tcctggatcaaagggacccaggttg

SEQ ID NO: 2564309 - DNA, 25 bp, Homo sapien
ccaggttggtgattacttctactcc

SEQ ID NO: 2564310 - DNA, 25 bp, Homo sapien
gatgtggctctcagcctagcaaccg

SEQ ID NO: 2564311 - DNA, 25 bp, Homo sapien
gagctatacgcttttccagtgtggg

SEQ ID NO: 2564312 - DNA, 25 bp, Homo sapien
tagcaaccgccatgtgccatggagc

SEQ ID NO: 2564313 - DNA, 25 bp, Homo sapien
gccctgactcggaagctgccctggc

SEQ ID NO: 2564314 - DNA, 25 bp, Homo sapien
cattctgtcactctgatgatcatgg

SEQ ID NO: 2564315 - DNA, 25 bp, Homo sapien
tcagtagttttagtctcttggtgac

SEQ ID NO: 2564316 - DNA, 25 bp, Homo sapien
cggccgtttctaagcttttactcag

SEQ ID NO: 2564317 - DNA, 25 bp, Homo sapien
gtgactcgtcgtgattgtgatgatg

SEQ ID NO: 2564318 - DNA, 25 bp, Homo sapien
ggcaccaaggccttgttaccggcat

SEQ ID NO: 2564319 - DNA, 25 bp, Homo sapien
ggcagctatcaataaggcaggatat

SEQ ID NO: 2564320 - DNA, 25 bp, Homo sapien
ctgtcgactgccctatgccttgtga

SEQ ID NO: 2564321 - DNA, 25 bp, Homo sapien
gaggttctctctggcgcatgcagca

SEQ ID NO: 2564322 - DNA, 25 bp, Homo sapien
tgcgcttcgtccacatcgataacag

SEQ ID NO: 2564323 - DNA, 25 bp, Homo sapien
ttttggaagcggagtgtcccctgca

SEQ ID NO: 2564324 - DNA, 25 bp, Homo sapien
cacgcattttcagtgtaggcgaatc

SEQ ID NO: 2564325 - DNA, 25 bp, Homo sapien
taggcgaatcgtaaaacggagggca

SEQ ID NO: 2564326 - DNA, 25 bp, Homo sapien
gcccgccagcgtccctttgttgtga

SEQ ID NO: 2564327 - DNA, 25 bp, Homo sapien
tccgagctgtctccgcggcctcgcg

SEQ ID NO: 2564328 - DNA, 25 bp, Homo sapien
cgtccctttgttgtgaaggcgccgg

SEQ ID NO: 2564329 - DNA, 25 bp, Homo sapien
ccagtgccgagctccgagctgtctc

SEQ ID NO: 2564330 - DNA, 25 bp, Homo sapien
cgttttaccacgttggccataccag

SEQ ID NO: 2564331 - DNA, 25 bp, Homo sapien
ttaccacgttggccataccaggctg

SEQ ID NO: 2564332 - DNA, 25 bp, Homo sapien
cacctcgcccggccaaaagtaatct

SEQ ID NO: 2564333 - DNA, 25 bp, Homo sapien
ttttcttttgacagggagtctcgct

SEQ ID NO: 2564334 - DNA, 25 bp, Homo sapien
gctgatgaggacaaattgcaggggc

SEQ ID NO: 2564335 - DNA, 25 bp, Homo sapien
ctgatgaggacaaattgcaggggca

SEQ ID NO: 2564336 - DNA, 25 bp, Homo sapien
tgatgaggacaaattgcaggggcat

SEQ ID NO: 2564337 - DNA, 25 bp, Homo sapien
ctgctgatgaggacaaattgcaggg

SEQ ID NO: 2564338 - DNA, 25 bp, Homo sapien
tctgtggacttgagcgtccaaaaac

SEQ ID NO: 2564339 - DNA, 25 bp, Homo sapien
ggacttgagcgtccaaaaaccctga

SEQ ID NO: 2564340 - DNA, 25 bp, Homo sapien
agccggcctggcttgaagtccgcca

SEQ ID NO: 2564341 - DNA, 25 bp, Homo sapien
gccggcctggcttgaagtccgccat

SEQ ID NO: 2564342 - DNA, 25 bp, Homo sapien
gaccctggtgtcctggttactgctg

SEQ ID NO: 2564343 - DNA, 25 bp, Homo sapien
ccggcgcccgcgtcttccacgggca

SEQ ID NO: 2564344 - DNA, 25 bp, Homo sapien
gaggccgtggtcggaccctggtgtc

SEQ ID NO: 2564345 - DNA, 25 bp, Homo sapien
cggcgcccgcgtcttccacgggcac

SEQ ID NO: 2564346 - DNA, 25 bp, Homo sapien
cagcagctgtggagcacgtggatgc

SEQ ID NO: 2564347 - DNA, 25 bp, Homo sapien
cagctgtggagcacgtggatgctgc

SEQ ID NO: 2564348 - DNA, 25 bp, Homo sapien
gctgtggagcacgtggatgctgcct

SEQ ID NO: 2564349 - DNA, 25 bp, Homo sapien
tgtggagcacgtggatgctgcctac

SEQ ID NO: 2564350 - DNA, 25 bp, Homo sapien
gcgtgggaggcatcggtgacggtcc

SEQ ID NO: 2564351 - DNA, 25 bp, Homo sapien
catcggtgacggtccccaggaccaa

SEQ ID NO: 2564352 - DNA, 25 bp, Homo sapien
aggcatcggtgacggtccccaggac

SEQ ID NO: 2564353 - DNA, 25 bp, Homo sapien
aagaaagcgtgcgtgggaggcatcg

SEQ ID NO: 2564354 - DNA, 25 bp, Homo sapien
gccgagaggcccagcgcagcgacgt

SEQ ID NO: 2564355 - DNA, 25 bp, Homo sapien
cgagaggcccagcgcagcgacgtct

SEQ ID NO: 2564356 - DNA, 25 bp, Homo sapien
gggggaccgccgagaggcccagcgc

SEQ ID NO: 2564357 - DNA, 25 bp, Homo sapien
gggaccgccgagaggcccagcgcag

SEQ ID NO: 2564358 - DNA, 25 bp, Homo sapien
gaggttgaagtggtcccagcgcagc

SEQ ID NO: 2564359 - DNA, 25 bp, Homo sapien
gtgaggttgaagtggtcccagcgca

SEQ ID NO: 2564360 - DNA, 25 bp, Homo sapien
tgaggttgaagtggtcccagcgcag

SEQ ID NO: 2564361 - DNA, 25 bp, Homo sapien
gctcagcaggttccgcgggaaggag

SEQ ID NO: 2564362 - DNA, 25 bp, Homo sapien
acgtcgctccacatgcggaaggcgg

SEQ ID NO: 2564363 - DNA, 25 bp, Homo sapien
tcccgcgggctcagcaggttccgcg

SEQ ID NO: 2564364 - DNA, 25 bp, Homo sapien
aagctgaagggggacacgtcgctcc

SEQ ID NO: 2564365 - DNA, 25 bp, Homo sapien
tccggaggtcgctgggctgctcggg

SEQ ID NO: 2564366 - DNA, 25 bp, Homo sapien
ggtcgctgggctgctcgggggccac

SEQ ID NO: 2564367 - DNA, 25 bp, Homo sapien
ctatccggaggtcgctgggctgctc

SEQ ID NO: 2564368 - DNA, 25 bp, Homo sapien
gaggtcgctgggctgctcgggggcc

SEQ ID NO: 2564369 - DNA, 25 bp, Homo sapien
ggggggagcacggggctgagaggcc

SEQ ID NO: 2564370 - DNA, 25 bp, Homo sapien
gggctgagaggccgggcgcgcaggg

SEQ ID NO: 2564371 - DNA, 25 bp, Homo sapien
ctggggggagcacggggctgagagg

SEQ ID NO: 2564372 - DNA, 25 bp, Homo sapien
aggccgggcgcgcagggccgggccg

SEQ ID NO: 2564373 - DNA, 25 bp, Homo sapien
gcgcggagaccaggcagtccgtgtg

SEQ ID NO: 2564374 - DNA, 25 bp, Homo sapien
gggccgtcgaagcagtggtgcagcg

SEQ ID NO: 2564375 - DNA, 25 bp, Homo sapien
aagcagtggtgcagcgcggagacca

SEQ ID NO: 2564376 - DNA, 25 bp, Homo sapien
tccgtgtggttgatcgggtagaagc

SEQ ID NO: 2564377 - DNA, 25 bp, Homo sapien
ctttcttccagctgtagcgcgtggg

SEQ ID NO: 2564378 - DNA, 25 bp, Homo sapien
aaggtccctcctgccgtctgcccca

SEQ ID NO: 2564379 - DNA, 25 bp, Homo sapien
gtctgccccaaagcccgaccgcggc

SEQ ID NO: 2564380 - DNA, 25 bp, Homo sapien
tgccgtctgccccaaagcccgaccg

SEQ ID NO: 2564381 - DNA, 25 bp, Homo sapien
ccgaccgcggcagcccactgtgctg

SEQ ID NO: 2564382 - DNA, 25 bp, Homo sapien
cgggggtcagcgcctgggagccccg

SEQ ID NO: 2564383 - DNA, 25 bp, Homo sapien
gccccgggggtcagcgcctgggagc

SEQ ID NO: 2564384 - DNA, 25 bp, Homo sapien
ttccagccgcgcagcgtggcgttca

SEQ ID NO: 2564385 - DNA, 25 bp, Homo sapien
acagctcgtcctgggacaacgcctt

SEQ ID NO: 2564386 - DNA, 25 bp, Homo sapien
cgcccggccgtgttgtgagtgcatc

SEQ ID NO: 2564387 - DNA, 25 bp, Homo sapien
tggccgatctcgtgggccgccacgt

SEQ ID NO: 2564388 - DNA, 25 bp, Homo sapien
ctgtcgggagcgtggggagcacggc

SEQ ID NO: 2564389 - DNA, 25 bp, Homo sapien
gggagcgtggggagcacggcctggc

SEQ ID NO: 2564390 - DNA, 25 bp, Homo sapien
cgtggggagcacggcctggctcagg

SEQ ID NO: 2564391 - DNA, 25 bp, Homo sapien
gtggggagcacggcctggctcagga

SEQ ID NO: 2564392 - DNA, 25 bp, Homo sapien
tgagccgccggcgagcgtcgcagaa

SEQ ID NO: 2564393 - DNA, 25 bp, Homo sapien
cacacgaacagcctgtcgaggcatc

SEQ ID NO: 2564394 - DNA, 25 bp, Homo sapien
gggcagagcctcttcatgagccgcc

SEQ ID NO: 2564395 - DNA, 25 bp, Homo sapien
cgtagcagaagtcgcagctgctggg

SEQ ID NO: 2564396 - DNA, 25 bp, Homo sapien
cctcagccccgaccatggccaaggc

SEQ ID NO: 2564397 - DNA, 25 bp, Homo sapien
aaagagccccgtcagtgccccctca

SEQ ID NO: 2564398 - DNA, 25 bp, Homo sapien
ccccctcagccccgaccatggccaa

SEQ ID NO: 2564399 - DNA, 25 bp, Homo sapien
gaaagagccccgtcagtgccccctc

SEQ ID NO: 2564400 - DNA, 25 bp, Homo sapien
ctggccgcagcggaaggtcacgttc

SEQ ID NO: 2564401 - DNA, 25 bp, Homo sapien
cagcggaaggtcacgttcctgccct

SEQ ID NO: 2564402 - DNA, 25 bp, Homo sapien
tgtggaggatcttctggccgcagcg

SEQ ID NO: 2564403 - DNA, 25 bp, Homo sapien
gaaggtcacgttcctgccctcgggc

SEQ ID NO: 2564404 - DNA, 25 bp, Homo sapien
ctgccccaaggccgcccgcgggctg

SEQ ID NO: 2564405 - DNA, 25 bp, Homo sapien
tgccccaaggccgcccgcgggctgc

SEQ ID NO: 2564406 - DNA, 25 bp, Homo sapien
cctgccccaaggccgcccgcgggct

SEQ ID NO: 2564407 - DNA, 25 bp, Homo sapien
attgacggcgttggcgatgatgctc

SEQ ID NO: 2564408 - DNA, 25 bp, Homo sapien
tcattgacggcgttggcgatgatgc

SEQ ID NO: 2564409 - DNA, 25 bp, Homo sapien
tgatgctcaggtgcgcctcgcccag

SEQ ID NO: 2564410 - DNA, 25 bp, Homo sapien
cattgacggcgttggcgatgatgct

SEQ ID NO: 2564411 - DNA, 25 bp, Homo sapien
gctggcggcgcaccacgcaggtgta

SEQ ID NO: 2564412 - DNA, 25 bp, Homo sapien
aggtggtcagcacgcgctgctggcg

SEQ ID NO: 2564413 - DNA, 25 bp, Homo sapien
gtaggtggtcagcacgcgctgctgg

SEQ ID NO: 2564414 - DNA, 25 bp, Homo sapien
tgctggcggcgcaccacgcaggtgt

SEQ ID NO: 2564415 - DNA, 25 bp, Homo sapien
tcagagagaaagtgctttatcagcc

SEQ ID NO: 2564416 - DNA, 25 bp, Homo sapien
acaggccacccagagtacgtgacat

SEQ ID NO: 2564417 - DNA, 25 bp, Homo sapien
cttagtgctgctgagcgtaggcgtc

SEQ ID NO: 2564418 - DNA, 25 bp, Homo sapien
tgagcgcctctgccccttagtgctg

SEQ ID NO: 2564419 - DNA, 25 bp, Homo sapien
tgcgtgggcgggttatgtaggcacc

SEQ ID NO: 2564420 - DNA, 25 bp, Homo sapien
ggattcattgttggcgaaacctgcc

SEQ ID NO: 2564421 - DNA, 25 bp, Homo sapien
gagaagaaccatcagccaggaatca

SEQ ID NO: 2564422 - DNA, 25 bp, Homo sapien
gacggtaacttgaatcctcaggaag

SEQ ID NO: 2564423 - DNA, 25 bp, Homo sapien
gagtggcatactcaagctgctcaga

SEQ ID NO: 2564424 - DNA, 25 bp, Homo sapien
ttcacgtagtccaagcggtctttct

SEQ ID NO: 2564425 - DNA, 25 bp, Homo sapien
gctgtccagtgtgctagtggcttca

SEQ ID NO: 2564426 - DNA, 25 bp, Homo sapien
tgttcgcgagcacatctcggagcat

SEQ ID NO: 2564427 - DNA, 25 bp, Homo sapien
cggtctcaaggtgcagctgtccagt

SEQ ID NO: 2564428 - DNA, 25 bp, Homo sapien
ccagaggtcggctattatatcatca

SEQ ID NO: 2564429 - DNA, 25 bp, Homo sapien
taggcgtcaacacaggaagtgagga

SEQ ID NO: 2564430 - DNA, 25 bp, Homo sapien
tgggccagaggtcggctattatatc

SEQ ID NO: 2564431 - DNA, 25 bp, Homo sapien
tatatcatcattaggcgtcaacaca

SEQ ID NO: 2564432 - DNA, 25 bp, Homo sapien
gcgcaggcgcaaactgctccaaaag

SEQ ID NO: 2564433 - DNA, 25 bp, Homo sapien
gcattctgctcgcaagccttggcac

SEQ ID NO: 2564434 - DNA, 25 bp, Homo sapien
gtaggattccggaagccggccacgc

SEQ ID NO: 2564435 - DNA, 25 bp, Homo sapien
gcgtccatcgcgaaggcattctgct

SEQ ID NO: 2564436 - DNA, 25 bp, Homo sapien
gaacagagactatcatcagcaaata

SEQ ID NO: 2564437 - DNA, 25 bp, Homo sapien
gctcctgggtgatcactcagacggg

SEQ ID NO: 2564438 - DNA, 25 bp, Homo sapien
aaatccttgtcccaaatccggtgag

SEQ ID NO: 2564439 - DNA, 25 bp, Homo sapien
ctttcgaaggcctggaagtatttca

SEQ ID NO: 2564440 - DNA, 25 bp, Homo sapien
tagcaaataggttgatttcctgtgt

SEQ ID NO: 2564441 - DNA, 25 bp, Homo sapien
gatttcctgtgtaacgctgctctgg

SEQ ID NO: 2564442 - DNA, 25 bp, Homo sapien
atttcctgtgtaacgctgctctggg

SEQ ID NO: 2564443 - DNA, 25 bp, Homo sapien
tgatttcctgtgtaacgctgctctg

SEQ ID NO: 2564444 - DNA, 25 bp, Homo sapien
aatttccagccgcacagcatctggt

SEQ ID NO: 2564445 - DNA, 25 bp, Homo sapien
catctggtgccctcccctccaccct

SEQ ID NO: 2564446 - DNA, 25 bp, Homo sapien
cttggaatttccagccgcacagcat

SEQ ID NO: 2564447 - DNA, 25 bp, Homo sapien
tttccagccgcacagcatctggtgc

SEQ ID NO: 2564448 - DNA, 25 bp, Homo sapien
tttttgttgagctgggctctcgctt

SEQ ID NO: 2564449 - DNA, 25 bp, Homo sapien
tgttgagctgggctctcgctttgtt

SEQ ID NO: 2564450 - DNA, 25 bp, Homo sapien
ttttgttgagctgggctctcgcttt

SEQ ID NO: 2564451 - DNA, 25 bp, Homo sapien
tgagctgggctctcgctttgttgcc

SEQ ID NO: 2564452 - DNA, 25 bp, Homo sapien
ggcagaggcttctgaccatgtctga

SEQ ID NO: 2564453 - DNA, 25 bp, Homo sapien
ctgaaaaaggaaacgtccacactga

SEQ ID NO: 2564454 - DNA, 25 bp, Homo sapien
ctccccaagggacagtagtacggca

SEQ ID NO: 2564455 - DNA, 25 bp, Homo sapien
ctactggagccgtgtgttaggcaga

SEQ ID NO: 2564456 - DNA, 25 bp, Homo sapien
tcatcatctagcacctgtccggttc

SEQ ID NO: 2564457 - DNA, 25 bp, Homo sapien
tgttgatggtttgggttacgtggcg

SEQ ID NO: 2564458 - DNA, 25 bp, Homo sapien
ggttccccacgtgagccttgggcag

SEQ ID NO: 2564459 - DNA, 25 bp, Homo sapien
tgtccggttccccacgtgagccttg

SEQ ID NO: 2564460 - DNA, 25 bp, Homo sapien
caggctgttctgaggtccccgtggg

SEQ ID NO: 2564461 - DNA, 25 bp, Homo sapien
tccccgtggggtgagcctgtctgtc

SEQ ID NO: 2564462 - DNA, 25 bp, Homo sapien
ggcaggctgttctgaggtccccgtg

SEQ ID NO: 2564463 - DNA, 25 bp, Homo sapien
cctgtctgtcctccctcagagccca

SEQ ID NO: 2564464 - DNA, 25 bp, Homo sapien
tttggagccagagtctcacgctgtt

SEQ ID NO: 2564465 - DNA, 25 bp, Homo sapien
gttcaagacattttcctgcctcagt

SEQ ID NO: 2564466 - DNA, 25 bp, Homo sapien
ttttggagccagagtctcacgctgt

SEQ ID NO: 2564467 - DNA, 25 bp, Homo sapien
ccgtctgccttggcctcccaaagtg

SEQ ID NO: 2564468 - DNA, 25 bp, Homo sapien
gcaccgagtcgccttgtccatggcg

SEQ ID NO: 2564469 - DNA, 25 bp, Homo sapien
aggccctgcaccgagtcgccttgtc

SEQ ID NO: 2564470 - DNA, 25 bp, Homo sapien
ccctgcaccgagtcgccttgtccat

SEQ ID NO: 2564471 - DNA, 25 bp, Homo sapien
ctgcaccgagtcgccttgtccatgg

SEQ ID NO: 2564472 - DNA, 25 bp, Homo sapien
cctgttgcggaaatcagcggacctt

SEQ ID NO: 2564473 - DNA, 25 bp, Homo sapien
catgaagtgaaaagccgacgttggg

SEQ ID NO: 2564474 - DNA, 25 bp, Homo sapien
caagtcagtgcggtaaattctcaaa

SEQ ID NO: 2564475 - DNA, 25 bp, Homo sapien
tcatgaggaggtgtaattgtcccca

SEQ ID NO: 2564476 - DNA, 25 bp, Homo sapien
gaaaatcttgataccatttagcaaa

SEQ ID NO: 2564477 - DNA, 25 bp, Homo sapien
ctccagccatggtcgatgagatgtt

SEQ ID NO: 2564478 - DNA, 25 bp, Homo sapien
ttgataccatttagcaaaaagaagt

SEQ ID NO: 2564479 - DNA, 25 bp, Homo sapien
gatgttagaaaaccaactctcttgc

SEQ ID NO: 2564480 - DNA, 25 bp, Homo sapien
tgctgtaataatcagttccctgagc

SEQ ID NO: 2564481 - DNA, 25 bp, Homo sapien
agctgggccttgaggtccgagttca

SEQ ID NO: 2564482 - DNA, 25 bp, Homo sapien
tgggccttgaggtccgagttcatct

SEQ ID NO: 2564483 - DNA, 25 bp, Homo sapien
gctgtaataatcagttccctgagct

SEQ ID NO: 2564484 - DNA, 25 bp, Homo sapien
caccaccaacttcagtttccctcac

SEQ ID NO: 2564485 - DNA, 25 bp, Homo sapien
ctgctgcacctgcccatgataactt

SEQ ID NO: 2564486 - DNA, 25 bp, Homo sapien
gcacctgcccatgataactttctca

SEQ ID NO: 2564487 - DNA, 25 bp, Homo sapien
gctgcacctgcccatgataactttc

SEQ ID NO: 2564488 - DNA, 25 bp, Homo sapien
tgcacctgcccatgataactttctc

SEQ ID NO: 2564489 - DNA, 25 bp, Homo sapien
ctaagcaatagacgacatacttacc

SEQ ID NO: 2564490 - DNA, 25 bp, Homo sapien
cggagcgtggatcctgggacgcttt

SEQ ID NO: 2564491 - DNA, 25 bp, Homo sapien
tgtcggagcgtggatcctgggacgc

SEQ ID NO: 2564492 - DNA, 25 bp, Homo sapien
ctgtcggagcgtggatcctgggacg

SEQ ID NO: 2564493 - DNA, 25 bp, Homo sapien
tcggagcgtggatcctgggacgctt

SEQ ID NO: 2564494 - DNA, 25 bp, Homo sapien
aagaccgagtcctcgaggattgcga

SEQ ID NO: 2564495 - DNA, 25 bp, Homo sapien
tcctcgaggattgcgacgtgcgcag

SEQ ID NO: 2564496 - DNA, 25 bp, Homo sapien
gaccgagtcctcgaggattgcgacg

SEQ ID NO: 2564497 - DNA, 25 bp, Homo sapien
cgagtcctcgaggattgcgacgtgc

SEQ ID NO: 2564498 - DNA, 25 bp, Homo sapien
cttatcgataccagaaaaagtttgg

SEQ ID NO: 2564499 - DNA, 25 bp, Homo sapien
cgaatgaacccttgtgagctgctgt

SEQ ID NO: 2564500 - DNA, 25 bp, Homo sapien
tatcgataccagaaaaagtttggac

SEQ ID NO: 2564501 - DNA, 25 bp, Homo sapien
tgctgggctttgtccgaatgaaccc

SEQ ID NO: 2564502 - DNA, 25 bp, Homo sapien
tggcgaggtcacgactcactgcaac

SEQ ID NO: 2564503 - DNA, 25 bp, Homo sapien
tttgttttttcactgtgagtatacg

SEQ ID NO: 2564504 - DNA, 25 bp, Homo sapien
cagtgcagtggcgaggtcacgactc

SEQ ID NO: 2564505 - DNA, 25 bp, Homo sapien
agcctgttgggtagctgggacctca

SEQ ID NO: 2564506 - DNA, 25 bp, Homo sapien
tgcgcttcgtccacatcgataacag

SEQ ID NO: 2564507 - DNA, 25 bp, Homo sapien
taggcgaatcgtaaaacggagggca

SEQ ID NO: 2564508 - DNA, 25 bp, Homo sapien
ttttggaagcggagtgtcccctgca

SEQ ID NO: 2564509 - DNA, 25 bp, Homo sapien
cacgcattttcagtgtaggcgaatc

SEQ ID NO: 2564510 - DNA, 25 bp, Homo sapien
gcgggggcgttgtgggccgcggcgc

SEQ ID NO: 2564511 - DNA, 25 bp, Homo sapien
cgggcggaaccaacgggcagccgcg

SEQ ID NO: 2564512 - DNA, 25 bp, Homo sapien
tctcctcccgtctgcctggagtaga

SEQ ID NO: 2564513 - DNA, 25 bp, Homo sapien
acgctgagcgcgccgtgtttctcct

SEQ ID NO: 2564514 - DNA, 25 bp, Homo sapien
caggaggcgcctttgtgtcttctaa

SEQ ID NO: 2564515 - DNA, 25 bp, Homo sapien
tctaagttaagcctattcagtggat

SEQ ID NO: 2564516 - DNA, 25 bp, Homo sapien
gacgccagcctggatacgaaggccc

SEQ ID NO: 2564517 - DNA, 25 bp, Homo sapien
cctttagccgtaacttcattcctga

SEQ ID NO: 2564518 - DNA, 25 bp, Homo sapien
aaagcagcgtgagatgggaatgatc

SEQ ID NO: 2564519 - DNA, 25 bp, Homo sapien
gccttattacgcttttcagatcctt

SEQ ID NO: 2564520 - DNA, 25 bp, Homo sapien
gtcattgaaagccttattacgcttt

SEQ ID NO: 2564521 - DNA, 25 bp, Homo sapien
gaacacagaaggtgtgaactgacct

SEQ ID NO: 2564522 - DNA, 25 bp, Homo sapien
gctgccgcaatttccatgccaggat

SEQ ID NO: 2564523 - DNA, 25 bp, Homo sapien
tatttttccgcaaatcagtcggttg

SEQ ID NO: 2564524 - DNA, 25 bp, Homo sapien
aaaaaccttccttgagctgccatgc

SEQ ID NO: 2564525 - DNA, 25 bp, Homo sapien
cggaggcgccattgaaagcatggtc

SEQ ID NO: 2564526 - DNA, 25 bp, Homo sapien
gctgtcacctgaagcaaggaacaca

SEQ ID NO: 2564527 - DNA, 25 bp, Homo sapien
ggtgggtgcctagaagcgtcctccc

SEQ ID NO: 2564528 - DNA, 25 bp, Homo sapien
ttcgacctctggcgagcactcaggg

SEQ ID NO: 2564529 - DNA, 25 bp, Homo sapien
gccggtgcctgtaggacgtgcactc

SEQ ID NO: 2564530 - DNA, 25 bp, Homo sapien
tgactaacgtggtaatgggaatccc

SEQ ID NO: 2564531 - DNA, 25 bp, Homo sapien
taaagtccgttcatgcagggaggta

SEQ ID NO: 2564532 - DNA, 25 bp, Homo sapien
ggcatcaagcaaagagtggcccagc

SEQ ID NO: 2564533 - DNA, 25 bp, Homo sapien
cagaggatcctagggacagagtcac

SEQ ID NO: 2564534 - DNA, 25 bp, Homo sapien
caacttggaactagctggctggcgc

SEQ ID NO: 2564535 - DNA, 25 bp, Homo sapien
ttagtgggacggtcacactcctggg

SEQ ID NO: 2564536 - DNA, 25 bp, Homo sapien
gcagcagctttctcgattgggcaac

SEQ ID NO: 2564537 - DNA, 25 bp, Homo sapien
gctacctcgcgagccacatgtgtga

SEQ ID NO: 2564538 - DNA, 25 bp, Homo sapien
ggattcattgttggcgaaacctgcc

SEQ ID NO: 2564539 - DNA, 25 bp, Homo sapien
gagaagaaccatcagccaggaatca

SEQ ID NO: 2564540 - DNA, 25 bp, Homo sapien
gagtggcatactcaagctgctcaga

SEQ ID NO: 2564541 - DNA, 25 bp, Homo sapien
gacggtaacttgaatcctcaggaag

SEQ ID NO: 2564542 - DNA, 25 bp, Homo sapien
tgatctcgccaaagacgtgcagcag

SEQ ID NO: 2564543 - DNA, 25 bp, Homo sapien
gacctggcagaaaatagaagccgcc

SEQ ID NO: 2564544 - DNA, 25 bp, Homo sapien
gttactccgtttagagcagtgggca

SEQ ID NO: 2564545 - DNA, 25 bp, Homo sapien
tgcgaatgacgcctgaacgttcagt

SEQ ID NO: 2564546 - DNA, 25 bp, Homo sapien
tgcacttgggaagcacggaggttcc

SEQ ID NO: 2564547 - DNA, 25 bp, Homo sapien
tgctccctttactgcttccactctg

SEQ ID NO: 2564548 - DNA, 25 bp, Homo sapien
ctctgcacttgggaagcacggaggt

SEQ ID NO: 2564549 - DNA, 25 bp, Homo sapien
acttgggaagcacggaggttccact

SEQ ID NO: 2564550 - DNA, 25 bp, Homo sapien
agggcgctggttcttgttgatgccg

SEQ ID NO: 2564551 - DNA, 25 bp, Homo sapien
ctggttcttgttgatgccgaagggt

SEQ ID NO: 2564552 - DNA, 25 bp, Homo sapien
atgagagggcgctggttcttgttga

SEQ ID NO: 2564553 - DNA, 25 bp, Homo sapien
tgatgccgaagggtgtgggagacac

SEQ ID NO: 2564554 - DNA, 25 bp, Homo sapien
gaaagaacatcggtgtagccccaga

SEQ ID NO: 2564555 - DNA, 25 bp, Homo sapien
cgtgtgcagcgatgtttgccagcag

SEQ ID NO: 2564556 - DNA, 25 bp, Homo sapien
cagagtgagtccacagaaagcttgc

SEQ ID NO: 2564557 - DNA, 25 bp, Homo sapien
ccagatctgttctgtgaaccaggaa

SEQ ID NO: 2564558 - DNA, 25 bp, Homo sapien
ctgcgccgggcacaacttcttattc

SEQ ID NO: 2564559 - DNA, 25 bp, Homo sapien
tctgaatccctcaaaagtgactagg

SEQ ID NO: 2564560 - DNA, 25 bp, Homo sapien
aatgggtgatgaaaaggactcttgg

SEQ ID NO: 2564561 - DNA, 25 bp, Homo sapien
tagaacaacgcttcttcggtgaagt

SEQ ID NO: 2564562 - DNA, 25 bp, Homo sapien
acgtctgccaggctgaacctcaagt

SEQ ID NO: 2564563 - DNA, 25 bp, Homo sapien
caaacgctgtctggagccaacgtct

SEQ ID NO: 2564564 - DNA, 25 bp, Homo sapien
tcatcccgcacggaactttgggtgg

SEQ ID NO: 2564565 - DNA, 25 bp, Homo sapien
gcggacagtctcatcccgcacggaa

SEQ ID NO: 2564566 - DNA, 25 bp, Homo sapien
cctgtccttgtctcgagttctgggc

SEQ ID NO: 2564567 - DNA, 25 bp, Homo sapien
tgtttcttctggcgtcctggacctg

SEQ ID NO: 2564568 - DNA, 25 bp, Homo sapien
ggagtcccgattcctgcgtcacagc

SEQ ID NO: 2564569 - DNA, 25 bp, Homo sapien
gctccaaaagtgggcgtcgctcccc

SEQ ID NO: 2564570 - DNA, 25 bp, Homo sapien
tcaggcccagtaaatgcggatgttt

SEQ ID NO: 2564571 - DNA, 25 bp, Homo sapien
tcctgcaatgctctgaatccatggg

SEQ ID NO: 2564572 - DNA, 25 bp, Homo sapien
tcagagttaaattccgagatcggcc

SEQ ID NO: 2564573 - DNA, 25 bp, Homo sapien
gatcggcctttacaagacacacaga

SEQ ID NO: 2564574 - DNA, 25 bp, Homo sapien
caatgtatgtacgtgccctgctggg

SEQ ID NO: 2564575 - DNA, 25 bp, Homo sapien
tgataccgtgtaactaatcccgtgg

SEQ ID NO: 2564576 - DNA, 25 bp, Homo sapien
ttttgtccaaacgaagcagccgtgg

SEQ ID NO: 2564577 - DNA, 25 bp, Homo sapien
ggatcctcactcaacgaaaactcgg

SEQ ID NO: 2564578 - DNA, 25 bp, Homo sapien
aaaattaccatggtgagtcagacag

SEQ ID NO: 2564579 - DNA, 25 bp, Homo sapien
ttgcacaacccaaaatgtgtcttta

SEQ ID NO: 2564580 - DNA, 25 bp, Homo sapien
aattaccatggtgagtcagacagtc

SEQ ID NO: 2564581 - DNA, 25 bp, Homo sapien
taccatggtgagtcagacagtcatt

SEQ ID NO: 2564582 - DNA, 25 bp, Homo sapien
tgcgaagatgttttgtcacgtgact

SEQ ID NO: 2564583 - DNA, 25 bp, Homo sapien
tgtgtgctcactgcgctgcgaagat

SEQ ID NO: 2564584 - DNA, 25 bp, Homo sapien
tataggcgtgggctactacacctgc

SEQ ID NO: 2564585 - DNA, 25 bp, Homo sapien
gcttctataaaaccgctgacctgtg

SEQ ID NO: 2564586 - DNA, 25 bp, Homo sapien
ggcacaagctggaatgggcgcccca

SEQ ID NO: 2564587 - DNA, 25 bp, Homo sapien
ggggcacaagctggaatgggcgccc

SEQ ID NO: 2564588 - DNA, 25 bp, Homo sapien
acaagctggaatgggcgccccacca

SEQ ID NO: 2564589 - DNA, 25 bp, Homo sapien
gcacaagctggaatgggcgccccac

SEQ ID NO: 2564590 - DNA, 25 bp, Homo sapien
tggagagtgacggaactgccagggc

SEQ ID NO: 2564591 - DNA, 25 bp, Homo sapien
gcgttggagagtgacggaactgcca

SEQ ID NO: 2564592 - DNA, 25 bp, Homo sapien
gagtgacggaactgccagggcctga

SEQ ID NO: 2564593 - DNA, 25 bp, Homo sapien
gggaggcgttggagagtgacggaac

SEQ ID NO: 2564594 - DNA, 25 bp, Homo sapien
gaaaatcttgataccatttagcaaa

SEQ ID NO: 2564595 - DNA, 25 bp, Homo sapien
ctccagccatggtcgatgagatgtt

SEQ ID NO: 2564596 - DNA, 25 bp, Homo sapien
ttgataccatttagcaaaaagaagt

SEQ ID NO: 2564597 - DNA, 25 bp, Homo sapien
gatgttagaaaaccaactctcttgc

SEQ ID NO: 2564598 - DNA, 25 bp, Homo sapien
cctcactgctgtaatattcagctcc

SEQ ID NO: 2564599 - DNA, 25 bp, Homo sapien
aacttcagtttccctcactgctgta

SEQ ID NO: 2564600 - DNA, 25 bp, Homo sapien
caacttcagtttccctcactgctgt

SEQ ID NO: 2564601 - DNA, 25 bp, Homo sapien
agtttccctcactgctgtaatattc

SEQ ID NO: 2564602 - DNA, 25 bp, Homo sapien
cgagtcctcgaggattgcgacgtgc

SEQ ID NO: 2564603 - DNA, 25 bp, Homo sapien
aagaccgagtcctcgaggattgcga

SEQ ID NO: 2564604 - DNA, 25 bp, Homo sapien
gaccgagtcctcgaggattgcgacg

SEQ ID NO: 2564605 - DNA, 25 bp, Homo sapien
tcctcgaggattgcgacgtgcgcag

SEQ ID NO: 2564606 - DNA, 25 bp, Homo sapien
cttatcgataccagaaaaagtttgg

SEQ ID NO: 2564607 - DNA, 25 bp, Homo sapien
cgaatgaacccttgtgagctgctgt

SEQ ID NO: 2564608 - DNA, 25 bp, Homo sapien
tatcgataccagaaaaagtttggac

SEQ ID NO: 2564609 - DNA, 25 bp, Homo sapien
tgctgggctttgtccgaatgaaccc

SEQ ID NO: 2564610 - DNA, 25 bp, Homo sapien
gatgtacagagaacggcagcgtcag

SEQ ID NO: 2564611 - DNA, 25 bp, Homo sapien
tcttgatgtacagagaacggcagcg

SEQ ID NO: 2564612 - DNA, 25 bp, Homo sapien
cagagaacggcagcgtcagtgaagt

SEQ ID NO: 2564613 - DNA, 25 bp, Homo sapien
taagttcttgatgtacagagaacgg

SEQ ID NO: 2564614 - DNA, 25 bp, Homo sapien
gtgactcgtcgtgattgtgatgatg

SEQ ID NO: 2564615 - DNA, 25 bp, Homo sapien
cattctgtcactctgatgatcatgg

SEQ ID NO: 2564616 - DNA, 25 bp, Homo sapien
cggccgtttctaagcttttactcag

SEQ ID NO: 2564617 - DNA, 25 bp, Homo sapien
tcagtagttttagtctcttggtgac

SEQ ID NO: 2564618 - DNA, 25 bp, Homo sapien
gatgtggctctcagcctagcaaccg

SEQ ID NO: 2564619 - DNA, 25 bp, Homo sapien
gccctgactcggaagctgccctggc

SEQ ID NO: 2564620 - DNA, 25 bp, Homo sapien
tagcaaccgccatgtgccatggagc

SEQ ID NO: 2564621 - DNA, 25 bp, Homo sapien
gagctatacgcttttccagtgtggg

SEQ ID NO: 2564622 - DNA, 25 bp, Homo sapien
tgcagcgctctgtaccgtttagggt

SEQ ID NO: 2564623 - DNA, 25 bp, Homo sapien
ccagcggccagggtgagtgttctca

SEQ ID NO: 2564624 - DNA, 25 bp, Homo sapien
caagcgctgcagaagcatgaggtga

SEQ ID NO: 2564625 - DNA, 25 bp, Homo sapien
tggcaacggtgtgactgacagcacc

SEQ ID NO: 2564626 - DNA, 25 bp, Homo sapien
gctgcccgacgtgcacgacagcgtc

SEQ ID NO: 2564627 - DNA, 25 bp, Homo sapien
acagcgtcctctaccgcctgtgcct

SEQ ID NO: 2564628 - DNA, 25 bp, Homo sapien
agtgcgtggagttcaccgccgagcc

SEQ ID NO: 2564629 - DNA, 25 bp, Homo sapien
ccgagccggccgagtgcgtggagtt

SEQ ID NO: 2564630 - DNA, 25 bp, Homo sapien
gctgggagccgacccccgacgcgcc

SEQ ID NO: 2564631 - DNA, 25 bp, Homo sapien
cgccccgacgccgccgggctgggag

SEQ ID NO: 2564632 - DNA, 25 bp, Homo sapien
ggctgggagccgacccccgacgcgc

SEQ ID NO: 2564633 - DNA, 25 bp, Homo sapien
gacgccgccgggctgggagccgacc

SEQ ID NO: 2564634 - DNA, 25 bp, Homo sapien
cccaccccatcggtatgggcaggta

SEQ ID NO: 2564635 - DNA, 25 bp, Homo sapien
aagtccccgactggtgtggccacgg

SEQ ID NO: 2564636 - DNA, 25 bp, Homo sapien
ccccatcggtatgggcaggtaccct

SEQ ID NO: 2564637 - DNA, 25 bp, Homo sapien
tgcgcccccatcgtaaagcacgaag

SEQ ID NO: 2564638 - DNA, 25 bp, Homo sapien
atctgtcaggctttcctccgggtgg

SEQ ID NO: 2564639 - DNA, 25 bp, Homo sapien
cttgcgaagtctcatctgtcaggct

SEQ ID NO: 2564640 - DNA, 25 bp, Homo sapien
tgcgaagtctcatctgtcaggcttt

SEQ ID NO: 2564641 - DNA, 25 bp, Homo sapien
tcaggctttcctccgggtgggcgct

SEQ ID NO: 2564642 - DNA, 25 bp, Homo sapien
acagtccctggctgtagtcctggcc

SEQ ID NO: 2564643 - DNA, 25 bp, Homo sapien
acctactcagtgcaccgggtgggct

SEQ ID NO: 2564644 - DNA, 25 bp, Homo sapien
tcctttccagttagggcaggccggc

SEQ ID NO: 2564645 - DNA, 25 bp, Homo sapien
gccttaggtgcgaggcttggcctcc

SEQ ID NO: 2564646 - DNA, 25 bp, Homo sapien
ccttccttagggttggccccagctg

SEQ ID NO: 2564647 - DNA, 25 bp, Homo sapien
tacaaacagcattggagacggcgct

SEQ ID NO: 2564648 - DNA, 25 bp, Homo sapien
acttcgcaatatctgggtccccatg

SEQ ID NO: 2564649 - DNA, 25 bp, Homo sapien
caggtgctaagcagaggtcactccc

SEQ ID NO: 2564650 - DNA, 25 bp, Homo sapien
cccatgtctccactaatgctggaga

SEQ ID NO: 2564651 - DNA, 25 bp, Homo sapien
ccgcccccatgtctccactaatgct

SEQ ID NO: 2564652 - DNA, 25 bp, Homo sapien
gcccccatgtctccactaatgctgg

SEQ ID NO: 2564653 - DNA, 25 bp, Homo sapien
catgtctccactaatgctggagact

SEQ ID NO: 2564654 - DNA, 25 bp, Homo sapien
agctgcaaggttccctcaaggccat

SEQ ID NO: 2564655 - DNA, 25 bp, Homo sapien
cccgtgccagctgcaaggttccctc

SEQ ID NO: 2564656 - DNA, 25 bp, Homo sapien
tcaagtcccagcagaccccgtgcca

SEQ ID NO: 2564657 - DNA, 25 bp, Homo sapien
ctcaagtcccagcagaccccgtgcc

SEQ ID NO: 2564658 - DNA, 25 bp, Homo sapien
catttctggaagagaaagcggtcac

SEQ ID NO: 2564659 - DNA, 25 bp, Homo sapien
ggctcacaggggcacatttctggaa

SEQ ID NO: 2564660 - DNA, 25 bp, Homo sapien
ccagaagttgtgaagggctcacagg

SEQ ID NO: 2564661 - DNA, 25 bp, Homo sapien
tcacaggggcacatttctggaagag

SEQ ID NO: 2564662 - DNA, 25 bp, Homo sapien
ccggttgtcactggctccatatggg

SEQ ID NO: 2564663 - DNA, 25 bp, Homo sapien
agccagctgaccctgtgctgagcag

SEQ ID NO: 2564664 - DNA, 25 bp, Homo sapien
ctgtgctgagcagcgtggcccagtc

SEQ ID NO: 2564665 - DNA, 25 bp, Homo sapien
tcctcgtcctgccttccccacgggc

SEQ ID NO: 2564666 - DNA, 25 bp, Homo sapien
cacactgaagattagggaacaggtg

SEQ ID NO: 2564667 - DNA, 25 bp, Homo sapien
aagcacactgaagattagggaacag

SEQ ID NO: 2564668 - DNA, 25 bp, Homo sapien
cactgaagattagggaacaggtgga

SEQ ID NO: 2564669 - DNA, 25 bp, Homo sapien
gcacactgaagattagggaacaggt

SEQ ID NO: 2564670 - DNA, 25 bp, Homo sapien
ccagagttagcacgtggcaggtccc

SEQ ID NO: 2564671 - DNA, 25 bp, Homo sapien
tcaggacaggacattgccagtggca

SEQ ID NO: 2564672 - DNA, 25 bp, Homo sapien
ttcacaaagaagtcgcacacaggcc

SEQ ID NO: 2564673 - DNA, 25 bp, Homo sapien
ttcagcaaaggacaggcccaagcat

SEQ ID NO: 2564674 - DNA, 25 bp, Homo sapien
cgatgccagccacacgtgctcagga

SEQ ID NO: 2564675 - DNA, 25 bp, Homo sapien
ccagccacacgtgctcaggaaggcc

SEQ ID NO: 2564676 - DNA, 25 bp, Homo sapien
tgccagccacacgtgctcaggaagg

SEQ ID NO: 2564677 - DNA, 25 bp, Homo sapien
atgccagccacacgtgctcaggaag

SEQ ID NO: 2564678 - DNA, 25 bp, Homo sapien
cgcagttacctacttttataacata

SEQ ID NO: 2564679 - DNA, 25 bp, Homo sapien
gccgcagttacctacttttataaca

SEQ ID NO: 2564680 - DNA, 25 bp, Homo sapien
ccgcagttacctacttttataacat

SEQ ID NO: 2564681 - DNA, 25 bp, Homo sapien
cattcatctggaggtgaagacggcc

SEQ ID NO: 2564682 - DNA, 25 bp, Homo sapien
tgcacggctgagctaactgccacgt

SEQ ID NO: 2564683 - DNA, 25 bp, Homo sapien
tgcaggcagcttagcggcagtactg

SEQ ID NO: 2564684 - DNA, 25 bp, Homo sapien
gaggtctgtcactcccacaggtgca

SEQ ID NO: 2564685 - DNA, 25 bp, Homo sapien
tagctttttactaacccatggccag

SEQ ID NO: 2564686 - DNA, 25 bp, Homo sapien
ttggtacctgcaactttcacagctg

SEQ ID NO: 2564687 - DNA, 25 bp, Homo sapien
tcaggcttagctcttcatgattgag

SEQ ID NO: 2564688 - DNA, 25 bp, Homo sapien
cacagctgtcgtgatgaaatcaggc

SEQ ID NO: 2564689 - DNA, 25 bp, Homo sapien
tgcacccctcacgtggtcctgttag

SEQ ID NO: 2564690 - DNA, 25 bp, Homo sapien
cattgcgtacttccggagaaggtcc

SEQ ID NO: 2564691 - DNA, 25 bp, Homo sapien
gtcctgttagctcccaaactgtcaa

SEQ ID NO: 2564692 - DNA, 25 bp, Homo sapien
tttcttaattgtagacattgcgtac

SEQ ID NO: 2564693 - DNA, 25 bp, Homo sapien
cagtgacctaggagcgactcgggga

SEQ ID NO: 2564694 - DNA, 25 bp, Homo sapien
gacggcttcgggctcccaggccctc

SEQ ID NO: 2564695 - DNA, 25 bp, Homo sapien
aggacggcccgcatcgcgccagtga

SEQ ID NO: 2564696 - DNA, 25 bp, Homo sapien
gagagcggcggctggaaactgtggg

SEQ ID NO: 2564697 - DNA, 25 bp, Homo sapien
ctgccgaccccaacttgcccggacg

SEQ ID NO: 2564698 - DNA, 25 bp, Homo sapien
tctgtcggtctgtcccggcgttcga

SEQ ID NO: 2564699 - DNA, 25 bp, Homo sapien
ggccccgactgctcagcggcggcca

SEQ ID NO: 2564700 - DNA, 25 bp, Homo sapien
gccggccagtccgtctgtcggtctg

SEQ ID NO: 2564701 - DNA, 25 bp, Homo sapien
tcgacccgcggctcggtcgcctgtc

SEQ ID NO: 2564702 - DNA, 25 bp, Homo sapien
aggggagatgccaagatgcacagtt

SEQ ID NO: 2564703 - DNA, 25 bp, Homo sapien
agcgccgggcccgtaattgcgtgcg

SEQ ID NO: 2564704 - DNA, 25 bp, Homo sapien
gccgcctgcccggatgggctccctg

SEQ ID NO: 2564705 - DNA, 25 bp, Homo sapien
ccgccgggccgccttgaggctcctg

SEQ ID NO: 2564706 - DNA, 25 bp, Homo sapien
gatgcctggaaactttgggactggc

SEQ ID NO: 2564707 - DNA, 25 bp, Homo sapien
tgtccggccgtccagtcgcccgccg

SEQ ID NO: 2564708 - DNA, 25 bp, Homo sapien
gactggcctctagcctcgctgggct

SEQ ID NO: 2564709 - DNA, 25 bp, Homo sapien
caagtgcaaactatcaggccgcgga

SEQ ID NO: 2564710 - DNA, 25 bp, Homo sapien
ttccgaactcagagaggagacgcgg

SEQ ID NO: 2564711 - DNA, 25 bp, Homo sapien
ggagacgcgggattactcaccactc

SEQ ID NO: 2564712 - DNA, 25 bp, Homo sapien
ggagagcgccacattcagacacttg

SEQ ID NO: 2564713 - DNA, 25 bp, Homo sapien
gttacatggaactggacatgaggct

SEQ ID NO: 2564714 - DNA, 25 bp, Homo sapien
ccagctaacgcagatggacatccca

SEQ ID NO: 2564715 - DNA, 25 bp, Homo sapien
tggcacgccacaggccatggagtag

SEQ ID NO: 2564716 - DNA, 25 bp, Homo sapien
tgtgcctaatgacaccgaaatgccg

SEQ ID NO: 2564717 - DNA, 25 bp, Homo sapien
gcttgtggacaaaagggctcatccc

SEQ ID NO: 2564718 - DNA, 25 bp, Homo sapien
cctgggtcacagattcgctcggcta

SEQ ID NO: 2564719 - DNA, 25 bp, Homo sapien
gaagtgcagatgtccaaggctagcc

SEQ ID NO: 2564720 - DNA, 25 bp, Homo sapien
gaggcagcgtcccaggcatttaatt

SEQ ID NO: 2564721 - DNA, 25 bp, Homo sapien
tgggcctccgcatgagcggcttcca

SEQ ID NO: 2564722 - DNA, 25 bp, Homo sapien
tgtggcaccagtgagccccagacaa

SEQ ID NO: 2564723 - DNA, 25 bp, Homo sapien
gcggcttccacagccggcagccaga

SEQ ID NO: 2564724 - DNA, 25 bp, Homo sapien
ctgccgagatgtgcaccaaggcctg

SEQ ID NO: 2564725 - DNA, 25 bp, Homo sapien
cagaggggtccatggtgggccgggc

SEQ ID NO: 2564726 - DNA, 25 bp, Homo sapien
ctgcacgcccgcctgggggtctggg

SEQ ID NO: 2564727 - DNA, 25 bp, Homo sapien
cgcccgcctgggggtctgggtccat

SEQ ID NO: 2564728 - DNA, 25 bp, Homo sapien
gcacgcccgcctgggggtctgggtc

SEQ ID NO: 2564729 - DNA, 25 bp, Homo sapien
tgcacgcccgcctgggggtctgggt

SEQ ID NO: 2564730 - DNA, 25 bp, Homo sapien
cactgcacgaccactgtgcggtcgg

SEQ ID NO: 2564731 - DNA, 25 bp, Homo sapien
tgtcgaggggctgccgtggcggcca

SEQ ID NO: 2564732 - DNA, 25 bp, Homo sapien
tggccccacttccagtccacgccgc

SEQ ID NO: 2564733 - DNA, 25 bp, Homo sapien
tgccgtggcggccaagctccaccac

SEQ ID NO: 2564734 - DNA, 25 bp, Homo sapien
agcaggtcgtgcgccccctggtagc

SEQ ID NO: 2564735 - DNA, 25 bp, Homo sapien
cccctggtagccggcgcggtagttg

SEQ ID NO: 2564736 - DNA, 25 bp, Homo sapien
tagccggcgcggtagttggtgcgcg

SEQ ID NO: 2564737 - DNA, 25 bp, Homo sapien
gcggtagttggtgcgcgtgccctgg

SEQ ID NO: 2564738 - DNA, 25 bp, Homo sapien
tcctgcccgtccccgcctgcccttg

SEQ ID NO: 2564739 - DNA, 25 bp, Homo sapien
cccgtccccgcctgcccttggcgcg

SEQ ID NO: 2564740 - DNA, 25 bp, Homo sapien
gtccccgcctgcccttggcgcgccc

SEQ ID NO: 2564741 - DNA, 25 bp, Homo sapien
cctgcccgtccccgcctgcccttgg

SEQ ID NO: 2564742 - DNA, 25 bp, Homo sapien
tgtagcactgcgtgcagaggtcgta

SEQ ID NO: 2564743 - DNA, 25 bp, Homo sapien
agaggtcgtagtccaggcacacacg

SEQ ID NO: 2564744 - DNA, 25 bp, Homo sapien
agtgagcggtctcgtagcggtcgaa

SEQ ID NO: 2564745 - DNA, 25 bp, Homo sapien
tgggcgagctcatgcttgttgtgca

SEQ ID NO: 2564746 - DNA, 25 bp, Homo sapien
tccctggaagatgccccttagtggg

SEQ ID NO: 2564747 - DNA, 25 bp, Homo sapien
accaccttcgctccctggaagatgc

SEQ ID NO: 2564748 - DNA, 25 bp, Homo sapien
cttagtgggatcctcgggaggccct

SEQ ID NO: 2564749 - DNA, 25 bp, Homo sapien
atgccccttagtgggatcctcggga

SEQ ID NO: 2564750 - DNA, 25 bp, Homo sapien
gtaccatcagcccacgtcacgctgg

SEQ ID NO: 2564751 - DNA, 25 bp, Homo sapien
cacggtacacattggtggtaccatc

SEQ ID NO: 2564752 - DNA, 25 bp, Homo sapien
tggtccttgtagtagaagccgcccg

SEQ ID NO: 2564753 - DNA, 25 bp, Homo sapien
ccttgtggcccacacggtacacatt

SEQ ID NO: 2564754 - DNA, 25 bp, Homo sapien
agccgccgtggccttcctgcatctc

SEQ ID NO: 2564755 - DNA, 25 bp, Homo sapien
ctcccgcaggacatcagtgtccagc

SEQ ID NO: 2564756 - DNA, 25 bp, Homo sapien
gctgtcagcactcaccctgcgctgc

SEQ ID NO: 2564757 - DNA, 25 bp, Homo sapien
atctcccgcaggacatcagtgtcca

SEQ ID NO: 2564758 - DNA, 25 bp, Homo sapien
tcgggctggacgcttggggaggaag

SEQ ID NO: 2564759 - DNA, 25 bp, Homo sapien
ctgggtcgggctggacgcttgggga

SEQ ID NO: 2564760 - DNA, 25 bp, Homo sapien
tcatggagctgtggctgggtcgggc

SEQ ID NO: 2564761 - DNA, 25 bp, Homo sapien
ctgtggcgggtcatggagctgtggc

SEQ ID NO: 2564762 - DNA, 25 bp, Homo sapien
gtggttgaactgcacgcgcacgtcc

SEQ ID NO: 2564763 - DNA, 25 bp, Homo sapien
gcgcgtctcgtggttgaactgcacg

SEQ ID NO: 2564764 - DNA, 25 bp, Homo sapien
ccgtgatacgatgcacggtgcccgt

SEQ ID NO: 2564765 - DNA, 25 bp, Homo sapien
tccccgcggtccgtgatacgatgca

SEQ ID NO: 2564766 - DNA, 25 bp, Homo sapien
catacagcactaaccaggagcatct

SEQ ID NO: 2564767 - DNA, 25 bp, Homo sapien
ctcctcaaaggtgcctggtatccag

SEQ ID NO: 2564768 - DNA, 25 bp, Homo sapien
cacctgagccctcatatgcagggaa

SEQ ID NO: 2564769 - DNA, 25 bp, Homo sapien
gggaactcactctacaagcccgtct

SEQ ID NO: 2564770 - DNA, 25 bp, Homo sapien
gagggcaacctgctgagctccacga

SEQ ID NO: 2564771 - DNA, 25 bp, Homo sapien
acctgctgagctccacgagacaggc

SEQ ID NO: 2564772 - DNA, 25 bp, Homo sapien
ctctggctggacgagagccccaggt

SEQ ID NO: 2564773 - DNA, 25 bp, Homo sapien
aggctctggctggacgagagcccca

SEQ ID NO: 2564774 - DNA, 25 bp, Homo sapien
gaccacgtcgcccacccagaaggag

SEQ ID NO: 2564775 - DNA, 25 bp, Homo sapien
aggggccatgtcgtccgtccactcg

SEQ ID NO: 2564776 - DNA, 25 bp, Homo sapien
gcttcactgtgtcaaggtcgccgat

SEQ ID NO: 2564777 - DNA, 25 bp, Homo sapien
aggtcgccgatgacccggaccacgt

SEQ ID NO: 2564778 - DNA, 25 bp, Homo sapien
aggttggcatcctcctcgggccggt

SEQ ID NO: 2564779 - DNA, 25 bp, Homo sapien
tcggccacgtccaggttggcatcct

SEQ ID NO: 2564780 - DNA, 25 bp, Homo sapien
ggctgaaggtccaccgctgaccagc

SEQ ID NO: 2564781 - DNA, 25 bp, Homo sapien
gactgctacacgcaggttcccgtct

SEQ ID NO: 2564782 - DNA, 25 bp, Homo sapien
cactggccgcctgagctgtgccgca

SEQ ID NO: 2564783 - DNA, 25 bp, Homo sapien
actggccgcctgagctgtgccgcac

SEQ ID NO: 2564784 - DNA, 25 bp, Homo sapien
ctcccactggccgcctgagctgtgc

SEQ ID NO: 2564785 - DNA, 25 bp, Homo sapien
cccactggccgcctgagctgtgccg

SEQ ID NO: 2564786 - DNA, 25 bp, Homo sapien
tctgggcccgaagcttgtccagggc

SEQ ID NO: 2564787 - DNA, 25 bp, Homo sapien
ttgtccagggccacgctcagtgagc

SEQ ID NO: 2564788 - DNA, 25 bp, Homo sapien
agcccgggctgcgttacccagcgcc

SEQ ID NO: 2564789 - DNA, 25 bp, Homo sapien
gcccgggctgcgttacccagcgcca

SEQ ID NO: 2564790 - DNA, 25 bp, Homo sapien
ccgcgtagtgcagtgccgtgttgcc

SEQ ID NO: 2564791 - DNA, 25 bp, Homo sapien
acttgcagagcggtcctgccttggt

SEQ ID NO: 2564792 - DNA, 25 bp, Homo sapien
gcagtgccgtgttgccctcgtcgtc

SEQ ID NO: 2564793 - DNA, 25 bp, Homo sapien
gcttgtagcagcagccgtatcaact

SEQ ID NO: 2564794 - DNA, 25 bp, Homo sapien
ggcccgaccccaggacgcacaggct

SEQ ID NO: 2564795 - DNA, 25 bp, Homo sapien
cccggtggctggacgcacaggctca

SEQ ID NO: 2564796 - DNA, 25 bp, Homo sapien
gggcccggtggctggacgcacaggc

SEQ ID NO: 2564797 - DNA, 25 bp, Homo sapien
ccgccaggcccgaccccaggacgca

SEQ ID NO: 2564798 - DNA, 25 bp, Homo sapien
ggcaggttgacgtcacagccgcgct

SEQ ID NO: 2564799 - DNA, 25 bp, Homo sapien
ggaagcccctctgcacggccacgtg

SEQ ID NO: 2564800 - DNA, 25 bp, Homo sapien
cacggccacgtgcagtgctgtgctc

SEQ ID NO: 2564801 - DNA, 25 bp, Homo sapien
gctgttgatggcgtccgcccggcac

SEQ ID NO: 2564802 - DNA, 25 bp, Homo sapien
tcgacaatgccgctggctccagtgc

SEQ ID NO: 2564803 - DNA, 25 bp, Homo sapien
tgttggtggcggtaacatcgatgtt

SEQ ID NO: 2564804 - DNA, 25 bp, Homo sapien
acccttgagggaggcatggtgcagc

SEQ ID NO: 2564805 - DNA, 25 bp, Homo sapien
cgatgtttggcacctccgtgaggac

SEQ ID NO: 2564806 - DNA, 25 bp, Homo sapien
gcagcacagcaagaggccggctgca

SEQ ID NO: 2564807 - DNA, 25 bp, Homo sapien
ggagcagggaggttggtctgggacc

SEQ ID NO: 2564808 - DNA, 25 bp, Homo sapien
agcacagcaagaggccggctgcagc

SEQ ID NO: 2564809 - DNA, 25 bp, Homo sapien
ttggtctgggacctgggactgcccc

SEQ ID NO: 2564810 - DNA, 25 bp, Homo sapien
gcccgagccagaatctttctcacag

SEQ ID NO: 2564811 - DNA, 25 bp, Homo sapien
tcccggatgaggatctgggccacct

SEQ ID NO: 2564812 - DNA, 25 bp, Homo sapien
tgaagccgtcctccttcttggcgtc

SEQ ID NO: 2564813 - DNA, 25 bp, Homo sapien
agatgcagcgccgtgaagccgtcct

SEQ ID NO: 2564814 - DNA, 25 bp, Homo sapien
agcgccacgtgcagggctgtgtccc

SEQ ID NO: 2564815 - DNA, 25 bp, Homo sapien
tgggcctgttgcacggcgagatgca

SEQ ID NO: 2564816 - DNA, 25 bp, Homo sapien
ttccggttgcgcacgttcacgtcac

SEQ ID NO: 2564817 - DNA, 25 bp, Homo sapien
agcagctgatgacgctgcagcgcca

SEQ ID NO: 2564818 - DNA, 25 bp, Homo sapien
ttggtgtagctcacgtcggcgccct

SEQ ID NO: 2564819 - DNA, 25 bp, Homo sapien
tccgaccgcggtggttggtgtagct

SEQ ID NO: 2564820 - DNA, 25 bp, Homo sapien
tccagcgccaggaagcaggcgaccg

SEQ ID NO: 2564821 - DNA, 25 bp, Homo sapien
aagggccttgagcacgcgaccctcg

SEQ ID NO: 2564822 - DNA, 25 bp, Homo sapien
cacgtgcaggttcgtcacggtgttg

SEQ ID NO: 2564823 - DNA, 25 bp, Homo sapien
cccacgtgcaggttcgtcacggtgt

SEQ ID NO: 2564824 - DNA, 25 bp, Homo sapien
cgtgcaggttcgtcacggtgttggg

SEQ ID NO: 2564825 - DNA, 25 bp, Homo sapien
gcccacgtgcaggttcgtcacggtg

SEQ ID NO: 2564826 - DNA, 25 bp, Homo sapien
cacggtgcggtgctggcacggcgag

SEQ ID NO: 2564827 - DNA, 25 bp, Homo sapien
gcgccagctcggagcacaccaggca

SEQ ID NO: 2564828 - DNA, 25 bp, Homo sapien
gtgctggcacggcgagaacagcacc

SEQ ID NO: 2564829 - DNA, 25 bp, Homo sapien
gcagcgccagctcggagcacaccag

SEQ ID NO: 2564830 - DNA, 25 bp, Homo sapien
ctagcaagtacttccaatgtcaatt

SEQ ID NO: 2564831 - DNA, 25 bp, Homo sapien
tgtgggttgtataagtgcttgcccc

SEQ ID NO: 2564832 - DNA, 25 bp, Homo sapien
ttggtgatatagtgggattcaggac

SEQ ID NO: 2564833 - DNA, 25 bp, Homo sapien
caggacatgtgggttgtataagtgc

SEQ ID NO: 2564834 - DNA, 25 bp, Homo sapien
tgacccaggtggatgatacagggca

SEQ ID NO: 2564835 - DNA, 25 bp, Homo sapien
ctgctgacccaggtggatgatacag

SEQ ID NO: 2564836 - DNA, 25 bp, Homo sapien
tcacacagcaggtattcgaagatgc

SEQ ID NO: 2564837 - DNA, 25 bp, Homo sapien
aggtattcgaagatgctgctgaccc

SEQ ID NO: 2564838 - DNA, 25 bp, Homo sapien
tcaggtcaatttgcaagaactgaca

SEQ ID NO: 2564839 - DNA, 25 bp, Homo sapien
ccatgtccagggcagacgatcggca

SEQ ID NO: 2564840 - DNA, 25 bp, Homo sapien
gtccagggcagacgatcggcagcca

SEQ ID NO: 2564841 - DNA, 25 bp, Homo sapien
atgtccagggcagacgatcggcagc

SEQ ID NO: 2564842 - DNA, 25 bp, Homo sapien
ccagggcagacgatcggcagccaca

SEQ ID NO: 2564843 - DNA, 25 bp, Homo sapien
tcaatgcaacagactcagatgtcca

SEQ ID NO: 2564844 - DNA, 25 bp, Homo sapien
gaataactgctttgtccaactcccc

SEQ ID NO: 2564845 - DNA, 25 bp, Homo sapien
gagaggagcgttctcttcaagagca

SEQ ID NO: 2564846 - DNA, 25 bp, Homo sapien
tctttgcccgtctgcatggatctat

SEQ ID NO: 2564847 - DNA, 25 bp, Homo sapien
caggacgctccaggtttgggtggtg

SEQ ID NO: 2564848 - DNA, 25 bp, Homo sapien
cagcccttcagaaattcgcagtgag

SEQ ID NO: 2564849 - DNA, 25 bp, Homo sapien
agtgagtgtcctgcgtctcccctgg

SEQ ID NO: 2564850 - DNA, 25 bp, Homo sapien
cagaaattcgcagtgagtgtcctgc

SEQ ID NO: 2564851 - DNA, 25 bp, Homo sapien
cagagtccccgtccttatggagcat

SEQ ID NO: 2564852 - DNA, 25 bp, Homo sapien
gagcatgctttccaggcactaagta

SEQ ID NO: 2564853 - DNA, 25 bp, Homo sapien
tgtaacatcctgagagcatgcatcc

SEQ ID NO: 2564854 - DNA, 25 bp, Homo sapien
taagtagtggtatggaccttggcca

SEQ ID NO: 2564855 - DNA, 25 bp, Homo sapien
tgattaaagggcatggatcctgcgt

SEQ ID NO: 2564856 - DNA, 25 bp, Homo sapien
tgagctttcccatatgcagttctga

SEQ ID NO: 2564857 - DNA, 25 bp, Homo sapien
tcatagggatactatcaccgtcatt

SEQ ID NO: 2564858 - DNA, 25 bp, Homo sapien
tggatcctgcgtggaaagcagcatc

SEQ ID NO: 2564859 - DNA, 25 bp, Homo sapien
tagggcgctcccaccgtggcaggca

SEQ ID NO: 2564860 - DNA, 25 bp, Homo sapien
caggtgcgtagggcgctcccaccgt

SEQ ID NO: 2564861 - DNA, 25 bp, Homo sapien
tgcgtagggcgctcccaccgtggca

SEQ ID NO: 2564862 - DNA, 25 bp, Homo sapien
gggcaggtgcgtagggcgctcccac

SEQ ID NO: 2564863 - DNA, 25 bp, Homo sapien
gctgcctcactcccccgctgccatc

SEQ ID NO: 2564864 - DNA, 25 bp, Homo sapien
tggctgcctcactcccccgctgcca

SEQ ID NO: 2564865 - DNA, 25 bp, Homo sapien
ctggctgcctcactcccccgctgcc

SEQ ID NO: 2564866 - DNA, 25 bp, Homo sapien
ggctgcctcactcccccgctgccat

SEQ ID NO: 2564867 - DNA, 25 bp, Homo sapien
agctgacgttcccagggggctgcag

SEQ ID NO: 2564868 - DNA, 25 bp, Homo sapien
gggctgcagaagtatcgaggagatg

SEQ ID NO: 2564869 - DNA, 25 bp, Homo sapien
cagaagtatcgaggagatgtggagg

SEQ ID NO: 2564870 - DNA, 25 bp, Homo sapien
ctaggtgaagcggcccccacagagg

SEQ ID NO: 2564871 - DNA, 25 bp, Homo sapien
tgtcccccatctgtagtaacctgga

SEQ ID NO: 2564872 - DNA, 25 bp, Homo sapien
ctggagaggccacgagtgtccccag

SEQ ID NO: 2564873 - DNA, 25 bp, Homo sapien
catctgtagtaacctggagaggcca

SEQ ID NO: 2564874 - DNA, 25 bp, Homo sapien
cagggagccgcagtgccttcgcctc

SEQ ID NO: 2564875 - DNA, 25 bp, Homo sapien
gataatggtcacctgccatgcagcc

SEQ ID NO: 2564876 - DNA, 25 bp, Homo sapien
gaatcatggaggttgcaaccacaaa

SEQ ID NO: 2564877 - DNA, 25 bp, Homo sapien
gcagcctttcagctcaggtgggcac

SEQ ID NO: 2564878 - DNA, 25 bp, Homo sapien
aaaaacagctctagggaatcatgga

SEQ ID NO: 2564879 - DNA, 25 bp, Homo sapien
gccgcagagaggcttttctgaacat

SEQ ID NO: 2564880 - DNA, 25 bp, Homo sapien
aggaggccgcagagaggcttttctg

SEQ ID NO: 2564881 - DNA, 25 bp, Homo sapien
aaactggatataatgcatgagcaaa

SEQ ID NO: 2564882 - DNA, 25 bp, Homo sapien
gaggccgcagagaggcttttctgaa

SEQ ID NO: 2564883 - DNA, 25 bp, Homo sapien
ggtgctgttccaggctgtaagatgc

SEQ ID NO: 2564884 - DNA, 25 bp, Homo sapien
ctgttccaggctgtaagatgctccc

SEQ ID NO: 2564885 - DNA, 25 bp, Homo sapien
tgctgttccaggctgtaagatgctc

SEQ ID NO: 2564886 - DNA, 25 bp, Homo sapien
tgtggggtgctgttccaggctgtaa

SEQ ID NO: 2564887 - DNA, 25 bp, Homo sapien
gtggaaggtgccgttccaggctgta

SEQ ID NO: 2564888 - DNA, 25 bp, Homo sapien
ccgttccaggctgtaagattttcac

SEQ ID NO: 2564889 - DNA, 25 bp, Homo sapien
tcaggctggaagatgctcacctggg

SEQ ID NO: 2564890 - DNA, 25 bp, Homo sapien
tgtttcaggctggaagatgctcacc

SEQ ID NO: 2564891 - DNA, 25 bp, Homo sapien
ctgccggtgtggagttctattccag

SEQ ID NO: 2564892 - DNA, 25 bp, Homo sapien
catcagatgctcacttagaggtgga

SEQ ID NO: 2564893 - DNA, 25 bp, Homo sapien
ccatcagatgctcacttagaggtgg

SEQ ID NO: 2564894 - DNA, 25 bp, Homo sapien
atcagatgctcacttagaggtggaa

SEQ ID NO: 2564895 - DNA, 25 bp, Homo sapien
accatcagatgctcacttagaggtg

SEQ ID NO: 2564896 - DNA, 25 bp, Homo sapien
gggggtgcagggtgctgttccagtc

SEQ ID NO: 2564897 - DNA, 25 bp, Homo sapien
tgcagggtgctgttccagtctgtca

SEQ ID NO: 2564898 - DNA, 25 bp, Homo sapien
gctgttccagtctgtcagatgctca

SEQ ID NO: 2564899 - DNA, 25 bp, Homo sapien
ctgttccagtctgtcagatgctcac

SEQ ID NO: 2564900 - DNA, 25 bp, Homo sapien
ggtgcagggtgctgttccagtctgt

SEQ ID NO: 2564901 - DNA, 25 bp, Homo sapien
gtgttccaggctgtcggatgctcac

SEQ ID NO: 2564902 - DNA, 25 bp, Homo sapien
ctgttccagtctgtcagatgctcac

SEQ ID NO: 2564903 - DNA, 25 bp, Homo sapien
tgtgggttgtgttccaggctgtcgg

SEQ ID NO: 2564904 - DNA, 25 bp, Homo sapien
aggctttccaatgctcgcctggagg

SEQ ID NO: 2564905 - DNA, 25 bp, Homo sapien
caggctgtcagatgctcgtctgggg

SEQ ID NO: 2564906 - DNA, 25 bp, Homo sapien
cgtctgggggtgtggttgctgctcc

SEQ ID NO: 2564907 - DNA, 25 bp, Homo sapien
gtgtgggtgccattccaggctgtca

SEQ ID NO: 2564908 - DNA, 25 bp, Homo sapien
ctgctccaggctgtcggatgctcac

SEQ ID NO: 2564909 - DNA, 25 bp, Homo sapien
tgggtgctgttccaggccatcagat

SEQ ID NO: 2564910 - DNA, 25 bp, Homo sapien
ctgttccaggccatcagatgctcgc

SEQ ID NO: 2564911 - DNA, 25 bp, Homo sapien
ggtgctgttccaggccatcagatgc

SEQ ID NO: 2564912 - DNA, 25 bp, Homo sapien
gtgtgggtgctgttccaggccatca

SEQ ID NO: 2564913 - DNA, 25 bp, Homo sapien
gggggtgtgggtgctgttccaggct

SEQ ID NO: 2564914 - DNA, 25 bp, Homo sapien
ggtgtgggtgctgttccaggctgtc

SEQ ID NO: 2564915 - DNA, 25 bp, Homo sapien
ctgttccaggctgtcagatgctcgc

SEQ ID NO: 2564916 - DNA, 25 bp, Homo sapien
tgggtgctgttccaggctgtcagat

SEQ ID NO: 2564917 - DNA, 25 bp, Homo sapien
gctgctccagaccatcagatgctca

SEQ ID NO: 2564918 - DNA, 25 bp, Homo sapien
gggtgtgggcactgctccagactct

SEQ ID NO: 2564919 - DNA, 25 bp, Homo sapien
tgtgggcactgctccagactctccg

SEQ ID NO: 2564920 - DNA, 25 bp, Homo sapien
gggcactgctccagactctccgatg

SEQ ID NO: 2564921 - DNA, 25 bp, Homo sapien
tgggcactgctccaggctgtcagat

SEQ ID NO: 2564922 - DNA, 25 bp, Homo sapien
gctccaggctgtcggatgctcgcct

SEQ ID NO: 2564923 - DNA, 25 bp, Homo sapien
ggtggtgtgggtgctgctccaggct

SEQ ID NO: 2564924 - DNA, 25 bp, Homo sapien
ctgctccaggctgtcagatgctcac

SEQ ID NO: 2564925 - DNA, 25 bp, Homo sapien
tgggtgctgctccaggctgtcagat

SEQ ID NO: 2564926 - DNA, 25 bp, Homo sapien
ctggtggtgtgggtgctgctccagg

SEQ ID NO: 2564927 - DNA, 25 bp, Homo sapien
gggggtgtggatgctgttccaggct

SEQ ID NO: 2564928 - DNA, 25 bp, Homo sapien
ctgttccaggctgtcaggtgcgcac

SEQ ID NO: 2564929 - DNA, 25 bp, Homo sapien
tggatgctgttccaggctgtcaggt

SEQ ID NO: 2564930 - DNA, 25 bp, Homo sapien
gtgtggatgctgttccaggctgtca

SEQ ID NO: 2564931 - DNA, 25 bp, Homo sapien
ccgttccaggccgtcagatgctcgc

SEQ ID NO: 2564932 - DNA, 25 bp, Homo sapien
gtgtgggtgccgttccaggccgtca

SEQ ID NO: 2564933 - DNA, 25 bp, Homo sapien
ggtgtgggtgccgttccaggccgtc

SEQ ID NO: 2564934 - DNA, 25 bp, Homo sapien
tgggtgccgttccaggccgtcagat

SEQ ID NO: 2564935 - DNA, 25 bp, Homo sapien
ctgtttcaggatgtcggatgctcac

SEQ ID NO: 2564936 - DNA, 25 bp, Homo sapien
ggagctgtttcaggatgtcggatgc

SEQ ID NO: 2564937 - DNA, 25 bp, Homo sapien
agctgtttcaggatgtcggatgctc

SEQ ID NO: 2564938 - DNA, 25 bp, Homo sapien
gctgtttcaggatgtcggatgctca

SEQ ID NO: 2564939 - DNA, 25 bp, Homo sapien
ctgggggtgtgggtgctgctccagg

SEQ ID NO: 2564940 - DNA, 25 bp, Homo sapien
tgggggtgtgggtgctgctccaggc

SEQ ID NO: 2564941 - DNA, 25 bp, Homo sapien
ctgctccaggctgtcggatgctcac

SEQ ID NO: 2564942 - DNA, 25 bp, Homo sapien
gtgctgctccaggctgtcggatgct

SEQ ID NO: 2564943 - DNA, 25 bp, Homo sapien
tcctcactcgcgggtgcagggttct

SEQ ID NO: 2564944 - DNA, 25 bp, Homo sapien
cctcactcgcgggtgcagggttctg

SEQ ID NO: 2564945 - DNA, 25 bp, Homo sapien
gatcctcactcgcgggtgcagggtt

SEQ ID NO: 2564946 - DNA, 25 bp, Homo sapien
atcctcactcgcgggtgcagggttc

SEQ ID NO: 2564947 - DNA, 25 bp, Homo sapien
gggtgtgggtgctgttccaggctgt

SEQ ID NO: 2564948 - DNA, 25 bp, Homo sapien
ttccaggctgtcagatgctcacctg

SEQ ID NO: 2564949 - DNA, 25 bp, Homo sapien
tgttccaggctgtcagatgctcacc

SEQ ID NO: 2564950 - DNA, 25 bp, Homo sapien
tgggtgctgttccaggctgtcagat

SEQ ID NO: 2564951 - DNA, 25 bp, Homo sapien
gctgttccgggctgtcagatgctca

SEQ ID NO: 2564952 - DNA, 25 bp, Homo sapien
cagcgtgctgttccgggctgtcaga

SEQ ID NO: 2564953 - DNA, 25 bp, Homo sapien
gggtgcagcgtgctgttccgggctg

SEQ ID NO: 2564954 - DNA, 25 bp, Homo sapien
tgggggtgcagcgtgctgttccggg

SEQ ID NO: 2564955 - DNA, 25 bp, Homo sapien
gctgttccgggctgtcagatgctca

SEQ ID NO: 2564956 - DNA, 25 bp, Homo sapien
gggtgcagcgtgctgttccgggctg

SEQ ID NO: 2564957 - DNA, 25 bp, Homo sapien
cagcgtgctgttccgggctgtcaga

SEQ ID NO: 2564958 - DNA, 25 bp, Homo sapien
tgggggtgcagcgtgctgttccggg

SEQ ID NO: 2564959 - DNA, 25 bp, Homo sapien
tcagatgctcactgggggtgtgcgt

SEQ ID NO: 2564960 - DNA, 25 bp, Homo sapien
gggttgtgagagctgttgcaggctg

SEQ ID NO: 2564961 - DNA, 25 bp, Homo sapien
ctggggttgtgagagctgttgcagg

SEQ ID NO: 2564962 - DNA, 25 bp, Homo sapien
tgcaggctgtcagatgctcactggg

SEQ ID NO: 2564963 - DNA, 25 bp, Homo sapien
gctgttccaggctgtcagatgctaa

SEQ ID NO: 2564964 - DNA, 25 bp, Homo sapien
cttgggggtgcagcgtgctgttcca

SEQ ID NO: 2564965 - DNA, 25 bp, Homo sapien
tgtcagatgctcacttgggggtgca

SEQ ID NO: 2564966 - DNA, 25 bp, Homo sapien
caggctgtcagatgctcacttgggg

SEQ ID NO: 2564967 - DNA, 25 bp, Homo sapien
ggctgtcagatgctcgcgtgggggt

SEQ ID NO: 2564968 - DNA, 25 bp, Homo sapien
tgggtgtgtgggtgccgttccaggc

SEQ ID NO: 2564969 - DNA, 25 bp, Homo sapien
gcgtgggggtgtgggtgctgctcca

SEQ ID NO: 2564970 - DNA, 25 bp, Homo sapien
gctgctccaggcttttggatgctca

SEQ ID NO: 2564971 - DNA, 25 bp, Homo sapien
gctccaggctgtcggatgctcgccg

SEQ ID NO: 2564972 - DNA, 25 bp, Homo sapien
ggtgctgctccgtgcgttcagatgc

SEQ ID NO: 2564973 - DNA, 25 bp, Homo sapien
ggctgtcggatgctcgccgggaggt

SEQ ID NO: 2564974 - DNA, 25 bp, Homo sapien
ggtgtgggtgctgctccgtgcgttc

SEQ ID NO: 2564975 - DNA, 25 bp, Homo sapien
catctgatggtttgcggcaacaccg

SEQ ID NO: 2564976 - DNA, 25 bp, Homo sapien
acaccgacacccacaggtgagcatc

SEQ ID NO: 2564977 - DNA, 25 bp, Homo sapien
agagcatccggcagcctggagcgga

SEQ ID NO: 2564978 - DNA, 25 bp, Homo sapien
gcgagcatctgagagcctgggtcgg

SEQ ID NO: 2564979 - DNA, 25 bp, Homo sapien
gagcagcaccagtacccccaggcga

SEQ ID NO: 2564980 - DNA, 25 bp, Homo sapien
agcagcaccagtacccccaggcgag

SEQ ID NO: 2564981 - DNA, 25 bp, Homo sapien
gagcagtgcccaaacacccaggtga

SEQ ID NO: 2564982 - DNA, 25 bp, Homo sapien
aaccacaggtgaacatcagagagtc

SEQ ID NO: 2564983 - DNA, 25 bp, Homo sapien
atcagagagtctggagcagcgccca

SEQ ID NO: 2564984 - DNA, 25 bp, Homo sapien
acaaccccaggcgagcatctgacag

SEQ ID NO: 2564985 - DNA, 25 bp, Homo sapien
tccaggttatcggatgctggcctgg

SEQ ID NO: 2564986 - DNA, 25 bp, Homo sapien
tgctccaggttatcggatgctggcc

SEQ ID NO: 2564987 - DNA, 25 bp, Homo sapien
ggtgctgctccaggttatcggatgc

SEQ ID NO: 2564988 - DNA, 25 bp, Homo sapien
gctgctccaggttatcggatgctgg

SEQ ID NO: 2564989 - DNA, 25 bp, Homo sapien
gggcgctgctccagactctacgatg

SEQ ID NO: 2564990 - DNA, 25 bp, Homo sapien
gctgctccagactctacgatgctca

SEQ ID NO: 2564991 - DNA, 25 bp, Homo sapien
ggaggtgtggtcactgctccgggct

SEQ ID NO: 2564992 - DNA, 25 bp, Homo sapien
gctccgggctgtcagatgctcgcgt

SEQ ID NO: 2564993 - DNA, 25 bp, Homo sapien
tgggtgctgctccagatcatcagat

SEQ ID NO: 2564994 - DNA, 25 bp, Homo sapien
gctcacctgtggttgtgggtgctgc

SEQ ID NO: 2564995 - DNA, 25 bp, Homo sapien
gctccagatcatcagatgctcacct

SEQ ID NO: 2564996 - DNA, 25 bp, Homo sapien
gctgctccagatcatcagatgctca

SEQ ID NO: 2564997 - DNA, 25 bp, Homo sapien
gctccaggctgtcggatgctcgcct

SEQ ID NO: 2564998 - DNA, 25 bp, Homo sapien
gctgctccagaccatcagatgcgca

SEQ ID NO: 2564999 - DNA, 25 bp, Homo sapien
tgctgctccagaccatcagatgcgc

SEQ ID NO: 2565000 - DNA, 25 bp, Homo sapien
gtgctgctccagaccatcagatgcg

SEQ ID NO: 2565001 - DNA, 25 bp, Homo sapien
ggtggtgtgggtgctgctccaggct

SEQ ID NO: 2565002 - DNA, 25 bp, Homo sapien
caggctgtcagatgctcgcctggtg

SEQ ID NO: 2565003 - DNA, 25 bp, Homo sapien
gtgtgggtgccgttccaggctgtca

SEQ ID NO: 2565004 - DNA, 25 bp, Homo sapien
ctgctccaggctgtcggatgctcac

SEQ ID NO: 2565005 - DNA, 25 bp, Homo sapien
gctgctccaggctatcggatgctca

SEQ ID NO: 2565006 - DNA, 25 bp, Homo sapien
tccagtctgtcagatgctcacctga

SEQ ID NO: 2565007 - DNA, 25 bp, Homo sapien
gtctgtcagatgctcacctgagggt

SEQ ID NO: 2565008 - DNA, 25 bp, Homo sapien
gtgggtgtggttgctgttccagtct

SEQ ID NO: 2565009 - DNA, 25 bp, Homo sapien
gggggtgtgagtgttgctccaggct

SEQ ID NO: 2565010 - DNA, 25 bp, Homo sapien
tgagtgttgctccaggctgtcagat

SEQ ID NO: 2565011 - DNA, 25 bp, Homo sapien
gagtgttgctccaggctgtcagatg

SEQ ID NO: 2565012 - DNA, 25 bp, Homo sapien
gtgtgagtgttgctccaggctgtca

SEQ ID NO: 2565013 - DNA, 25 bp, Homo sapien
tgctgttgcaggccgtcagatgctc

SEQ ID NO: 2565014 - DNA, 25 bp, Homo sapien
ctgttgcaggccgtcagatgctcac

SEQ ID NO: 2565015 - DNA, 25 bp, Homo sapien
gtgtgtgggtgctgttgcaggccgt

SEQ ID NO: 2565016 - DNA, 25 bp, Homo sapien
gtgtgggtgctgttgcaggccgtca

SEQ ID NO: 2565017 - DNA, 25 bp, Homo sapien
tgggtgccgttccaggccatcagat

SEQ ID NO: 2565018 - DNA, 25 bp, Homo sapien
ggtgccgttccaggccatcagatgc

SEQ ID NO: 2565019 - DNA, 25 bp, Homo sapien
gtgtgggtgccgttccaggccatca

SEQ ID NO: 2565020 - DNA, 25 bp, Homo sapien
gccgttccaggccatcagatgctcg

SEQ ID NO: 2565021 - DNA, 25 bp, Homo sapien
ccaggctgtcggatgctcgcctggg

SEQ ID NO: 2565022 - DNA, 25 bp, Homo sapien
gctgctccagactctccgatgctca

SEQ ID NO: 2565023 - DNA, 25 bp, Homo sapien
gtgctgctctgtgcgtacagatact

SEQ ID NO: 2565024 - DNA, 25 bp, Homo sapien
ctgctctgtgcgtacagatactcgc

SEQ ID NO: 2565025 - DNA, 25 bp, Homo sapien
ggtgctgctctgtgcgtacagatac

SEQ ID NO: 2565026 - DNA, 25 bp, Homo sapien
gctgctctgtgcgtacagatactcg

SEQ ID NO: 2565027 - DNA, 25 bp, Homo sapien
acctgggggtgtgcgtgctgttcca

SEQ ID NO: 2565028 - DNA, 25 bp, Homo sapien
cacctgggggtgcagggtgctgttc

SEQ ID NO: 2565029 - DNA, 25 bp, Homo sapien
ttccaggctgtcagatgctcacctg

SEQ ID NO: 2565030 - DNA, 25 bp, Homo sapien
gctgttccaggctgtcagaggctca

SEQ ID NO: 2565031 - DNA, 25 bp, Homo sapien
tccaggctgtcggatgctcacttgg

SEQ ID NO: 2565032 - DNA, 25 bp, Homo sapien
tgggtgcttctccaggctgtcggat

SEQ ID NO: 2565033 - DNA, 25 bp, Homo sapien
tgcgggtgtgggtgccgttccaggc

SEQ ID NO: 2565034 - DNA, 25 bp, Homo sapien
gcttctccaggctgtcggatgctca

SEQ ID NO: 2565035 - DNA, 25 bp, Homo sapien
tgggcgctgctccagactctccgat

SEQ ID NO: 2565036 - DNA, 25 bp, Homo sapien
tgtgggcgctgctccagactctccg

SEQ ID NO: 2565037 - DNA, 25 bp, Homo sapien
tgggcactgctccaggctgtcagat

SEQ ID NO: 2565038 - DNA, 25 bp, Homo sapien
ggtgtgggcgctgctccagactctc

SEQ ID NO: 2565039 - DNA, 25 bp, Homo sapien
gctccaggctgtcggatgctcgcct

SEQ ID NO: 2565040 - DNA, 25 bp, Homo sapien
gggtgtgtgcgtgctgttccaggct

SEQ ID NO: 2565041 - DNA, 25 bp, Homo sapien
ctgttccaggctgtcagatgctccc

SEQ ID NO: 2565042 - DNA, 25 bp, Homo sapien
tgctgttccaggctgtcagatgctc

SEQ ID NO: 2565043 - DNA, 25 bp, Homo sapien
ctgggtgtgtgcgtgctgttccagg

SEQ ID NO: 2565044 - DNA, 25 bp, Homo sapien
gtgctgttccaggctgtcagatgct

SEQ ID NO: 2565045 - DNA, 25 bp, Homo sapien
gctgttccaggctgtcagatgctca

SEQ ID NO: 2565046 - DNA, 25 bp, Homo sapien
tgctgttccaggctgtcagatgctc

SEQ ID NO: 2565047 - DNA, 25 bp, Homo sapien
aggctggcggatgctcgcctggcag

SEQ ID NO: 2565048 - DNA, 25 bp, Homo sapien
caggctggcggatgctcgcctggca

SEQ ID NO: 2565049 - DNA, 25 bp, Homo sapien
gctggcggatgctcgcctggcagtg

SEQ ID NO: 2565050 - DNA, 25 bp, Homo sapien
ctggcggatgctcgcctggcagtgt

SEQ ID NO: 2565051 - DNA, 25 bp, Homo sapien
ccacgatgtcggatgttcacctggg

SEQ ID NO: 2565052 - DNA, 25 bp, Homo sapien
ggtgctactccacgatgtcggatgt

SEQ ID NO: 2565053 - DNA, 25 bp, Homo sapien
tactccacgatgtcggatgttcacc

SEQ ID NO: 2565054 - DNA, 25 bp, Homo sapien
gctactccacgatgtcggatgttca

SEQ ID NO: 2565055 - DNA, 25 bp, Homo sapien
gctccaggctgtcggatgctcgccg

SEQ ID NO: 2565056 - DNA, 25 bp, Homo sapien
ggtgctgctccgtgggttcagatgc

SEQ ID NO: 2565057 - DNA, 25 bp, Homo sapien
ctgctccgtgggttcagatgctcgc

SEQ ID NO: 2565058 - DNA, 25 bp, Homo sapien
ggctgtcggatgctcgccgggaggt

SEQ ID NO: 2565059 - DNA, 25 bp, Homo sapien
tgctgctccagaccatcagatgcgc

SEQ ID NO: 2565060 - DNA, 25 bp, Homo sapien
gctgctccagaccatcagatgcgca

SEQ ID NO: 2565061 - DNA, 25 bp, Homo sapien
gtgctgctccagaccatcagatgcg

SEQ ID NO: 2565062 - DNA, 25 bp, Homo sapien
gggtgctgctccaggctgtcggatg

SEQ ID NO: 2565063 - DNA, 25 bp, Homo sapien
ctgctccaggctgtcggatgctcac

SEQ ID NO: 2565064 - DNA, 25 bp, Homo sapien
gggggtgctgctccaggctgtcgga

SEQ ID NO: 2565065 - DNA, 25 bp, Homo sapien
gtgctgctccaggctgtcggatgct

SEQ ID NO: 2565066 - DNA, 25 bp, Homo sapien
ctgggggtgtgggtgccgttccagg

SEQ ID NO: 2565067 - DNA, 25 bp, Homo sapien
ggtgtgggtgccgttccaggctgtc

SEQ ID NO: 2565068 - DNA, 25 bp, Homo sapien
ggggtgtgggtgccgttccaggctg

SEQ ID NO: 2565069 - DNA, 25 bp, Homo sapien
gtgtgggtgccgttccaggctgtca

SEQ ID NO: 2565070 - DNA, 25 bp, Homo sapien
tgctgtcagatgctcacctgggggt

SEQ ID NO: 2565071 - DNA, 25 bp, Homo sapien
gctccatgctgtcagatgctcacct

SEQ ID NO: 2565072 - DNA, 25 bp, Homo sapien
tgctgctccatgctgtcagatgctc

SEQ ID NO: 2565073 - DNA, 25 bp, Homo sapien
gctgctccatgctgtcagatgctca

SEQ ID NO: 2565074 - DNA, 25 bp, Homo sapien
cacctgggggtgcagggtgctgttc

SEQ ID NO: 2565075 - DNA, 25 bp, Homo sapien
gctgttccaggctgtcacgtgcgca

SEQ ID NO: 2565076 - DNA, 25 bp, Homo sapien
tccaggctgtcacgtgcgcacctgg

SEQ ID NO: 2565077 - DNA, 25 bp, Homo sapien
tgttccaggctgtcacgtgcgcacc

SEQ ID NO: 2565078 - DNA, 25 bp, Homo sapien
gctgatccaggctgtcacatgctcc

SEQ ID NO: 2565079 - DNA, 25 bp, Homo sapien
ctgggagtgtgggtgctgatccagg

SEQ ID NO: 2565080 - DNA, 25 bp, Homo sapien
tgatccaggctgtcacatgctcccc

SEQ ID NO: 2565081 - DNA, 25 bp, Homo sapien
gctgctccaggctgtcggatgctcc

SEQ ID NO: 2565082 - DNA, 25 bp, Homo sapien
ggggtgtggggttctgctccaggct

SEQ ID NO: 2565083 - DNA, 25 bp, Homo sapien
ttctgctccaggctgtcagatgctc

SEQ ID NO: 2565084 - DNA, 25 bp, Homo sapien
ctgggggtgtggggttctgctccag

SEQ ID NO: 2565085 - DNA, 25 bp, Homo sapien
ctgctccaggctgtcagatgctcgc

SEQ ID NO: 2565086 - DNA, 25 bp, Homo sapien
gggcgtgtgggtgctgctccaggct

SEQ ID NO: 2565087 - DNA, 25 bp, Homo sapien
ctgggcgtgtgggtgctgctccagg

SEQ ID NO: 2565088 - DNA, 25 bp, Homo sapien
tgctgctccaggctgtccgatgctc

SEQ ID NO: 2565089 - DNA, 25 bp, Homo sapien
ctgctccaggctgtccgatgctcac

SEQ ID NO: 2565090 - DNA, 25 bp, Homo sapien
ctgctccgtgggttcaggtgctcgc

SEQ ID NO: 2565091 - DNA, 25 bp, Homo sapien
tgctccaggctgtcggatgcgcgcc

SEQ ID NO: 2565092 - DNA, 25 bp, Homo sapien
ggatgcgcgccggaaggtgtgggtg

SEQ ID NO: 2565093 - DNA, 25 bp, Homo sapien
ggtgctgctccgtgggttcaggtgc

SEQ ID NO: 2565094 - DNA, 25 bp, Homo sapien
gggtgctactccagaccatcagatg

SEQ ID NO: 2565095 - DNA, 25 bp, Homo sapien
ggttgtgggtgctactccagaccat

SEQ ID NO: 2565096 - DNA, 25 bp, Homo sapien
gctactccagaccatcagatgcgca

SEQ ID NO: 2565097 - DNA, 25 bp, Homo sapien
ctgtggttgtgggtgctactccaga

SEQ ID NO: 2565098 - DNA, 25 bp, Homo sapien
ctgggggtgtgcccgctgttccagg

SEQ ID NO: 2565099 - DNA, 25 bp, Homo sapien
gggtgtgcccgctgttccaggctgt

SEQ ID NO: 2565100 - DNA, 25 bp, Homo sapien
ctgttccaggctgtcagatgctctc

SEQ ID NO: 2565101 - DNA, 25 bp, Homo sapien
gctgttccaggctgtcagatgctct

SEQ ID NO: 2565102 - DNA, 25 bp, Homo sapien
gtctgtgggtgcgtttccaggccgt

SEQ ID NO: 2565103 - DNA, 25 bp, Homo sapien
gctgtttcaggatgtcggatgctca

SEQ ID NO: 2565104 - DNA, 25 bp, Homo sapien
ggagctgtttcaggatgtcggatgc

SEQ ID NO: 2565105 - DNA, 25 bp, Homo sapien
ctgtttcaggatgtcggatgctcac

SEQ ID NO: 2565106 - DNA, 25 bp, Homo sapien
agctgtttcaggatgtcggatgctc

SEQ ID NO: 2565107 - DNA, 25 bp, Homo sapien
gctgctccagactctccgatgctca

SEQ ID NO: 2565108 - DNA, 25 bp, Homo sapien
ccttgggctatgggttctgaaccat

SEQ ID NO: 2565109 - DNA, 25 bp, Homo sapien
caccttgggctatgggttctgaacc

SEQ ID NO: 2565110 - DNA, 25 bp, Homo sapien
accttgggctatgggttctgaacca

SEQ ID NO: 2565111 - DNA, 25 bp, Homo sapien
cttgggctatgggttctgaaccatg

SEQ ID NO: 2565112 - DNA, 25 bp, Homo sapien
gctccaggctgtcggatgctcgcct

SEQ ID NO: 2565113 - DNA, 25 bp, Homo sapien
ccgtcagatgctcgcctggcggtgt

SEQ ID NO: 2565114 - DNA, 25 bp, Homo sapien
ctgttccaggctatcacatgcgcac

SEQ ID NO: 2565115 - DNA, 25 bp, Homo sapien
ctgttccaggccgtcagatgctcgc

SEQ ID NO: 2565116 - DNA, 25 bp, Homo sapien
gtgctgttccaggctatcacatgcg

SEQ ID NO: 2565117 - DNA, 25 bp, Homo sapien
ccaggctgtcagatcctcacctggg

SEQ ID NO: 2565118 - DNA, 25 bp, Homo sapien
tgggtgtgcagggtgctgttccagg

SEQ ID NO: 2565119 - DNA, 25 bp, Homo sapien
gttccaggctgtcagatcctcacct

SEQ ID NO: 2565120 - DNA, 25 bp, Homo sapien
tgtcagatcctcacctggggtgtgg

SEQ ID NO: 2565121 - DNA, 25 bp, Homo sapien
tgctgctccaggctgtcggatgctc

SEQ ID NO: 2565122 - DNA, 25 bp, Homo sapien
ggaggtgtgggtgctgctccaggct

SEQ ID NO: 2565123 - DNA, 25 bp, Homo sapien
ctgctccaggctgtcggatgctcac

SEQ ID NO: 2565124 - DNA, 25 bp, Homo sapien
ctggaggtgtgggtgctgctccagg

SEQ ID NO: 2565125 - DNA, 25 bp, Homo sapien
gctccatgcggtcagatgctcccct

SEQ ID NO: 2565126 - DNA, 25 bp, Homo sapien
ctgctccatgcggtcagatgctccc

SEQ ID NO: 2565127 - DNA, 25 bp, Homo sapien
gtgctgctccatgcggtcagatgct

SEQ ID NO: 2565128 - DNA, 25 bp, Homo sapien
tgctgctccatgcggtcagatgctc

SEQ ID NO: 2565129 - DNA, 25 bp, Homo sapien
gctcgcatggtggtgtggttgctgt

SEQ ID NO: 2565130 - DNA, 25 bp, Homo sapien
tgggtttgtgggtgctgaccgaggc

SEQ ID NO: 2565131 - DNA, 25 bp, Homo sapien
gtttgtgggtgctgaccgaggctgt

SEQ ID NO: 2565132 - DNA, 25 bp, Homo sapien
ctgggtttgtgggtgctgaccgagg

SEQ ID NO: 2565133 - DNA, 25 bp, Homo sapien
ggtttgtgggtgctgaccgaggctg

SEQ ID NO: 2565134 - DNA, 25 bp, Homo sapien
gctccaggctgtcggatgctcgcct

SEQ ID NO: 2565135 - DNA, 25 bp, Homo sapien
ctgggggtgtcggtgctgttccagg

SEQ ID NO: 2565136 - DNA, 25 bp, Homo sapien
ctgttccaggctgtcacgtgcgcac

SEQ ID NO: 2565137 - DNA, 25 bp, Homo sapien
gtgtcggtgctgttccaggctgtca

SEQ ID NO: 2565138 - DNA, 25 bp, Homo sapien
gctgttccaggctgtcacgtgcgca

SEQ ID NO: 2565139 - DNA, 25 bp, Homo sapien
gctccaggctgtcggatgctcgcct

SEQ ID NO: 2565140 - DNA, 25 bp, Homo sapien
gtgtgtgctgttccaggccgtcaga

SEQ ID NO: 2565141 - DNA, 25 bp, Homo sapien
gttccaggccgtcagatgctcgcct

SEQ ID NO: 2565142 - DNA, 25 bp, Homo sapien
ctgctccaggctgtcggatgttcac

SEQ ID NO: 2565143 - DNA, 25 bp, Homo sapien
ttgtgggtgccgacccaggctgtca

SEQ ID NO: 2565144 - DNA, 25 bp, Homo sapien
gctccaggctgtcggatgctcgcct

SEQ ID NO: 2565145 - DNA, 25 bp, Homo sapien
ctgctccaggctgccagatgctcac

SEQ ID NO: 2565146 - DNA, 25 bp, Homo sapien
gtgctgctccaggctgccagatgct

SEQ ID NO: 2565147 - DNA, 25 bp, Homo sapien
ctgggggtgtgggtgctgctccagg

SEQ ID NO: 2565148 - DNA, 25 bp, Homo sapien
tgggggtgtgggtgctgctccaggc

SEQ ID NO: 2565149 - DNA, 25 bp, Homo sapien
ctgggggtgtgggtgctgctccagg

SEQ ID NO: 2565150 - DNA, 25 bp, Homo sapien
ctgctccaggcagtcagatgctcac

SEQ ID NO: 2565151 - DNA, 25 bp, Homo sapien
gggtgtgggtgctgctccaggcagt

SEQ ID NO: 2565152 - DNA, 25 bp, Homo sapien
gggggtgtgggtgctgctccaggca

SEQ ID NO: 2565153 - DNA, 25 bp, Homo sapien
tccaggcagtcagatgctcacatgg

SEQ ID NO: 2565154 - DNA, 25 bp, Homo sapien
tgtgggtgctgatccaagctgtcac

SEQ ID NO: 2565155 - DNA, 25 bp, Homo sapien
gctgttccaggccgtccgatgctcg

SEQ ID NO: 2565156 - DNA, 25 bp, Homo sapien
ctgatccaagctgtcacgtgcacac

SEQ ID NO: 2565157 - DNA, 25 bp, Homo sapien
tgctccaggctgtcagaagctcacc

SEQ ID NO: 2565158 - DNA, 25 bp, Homo sapien
ctgctccacgatgtcagatgctcac

SEQ ID NO: 2565159 - DNA, 25 bp, Homo sapien
gggtgctgctccacgatgtcagatg

SEQ ID NO: 2565160 - DNA, 25 bp, Homo sapien
ctgtcagaagctcacctgtgggtgt

SEQ ID NO: 2565161 - DNA, 25 bp, Homo sapien
gctgctccagactctccgatgctca

SEQ ID NO: 2565162 - DNA, 25 bp, Homo sapien
ggtgctgctctgtgcgtacagatac

SEQ ID NO: 2565163 - DNA, 25 bp, Homo sapien
ctgctctgtgcgtacagatactcgc

SEQ ID NO: 2565164 - DNA, 25 bp, Homo sapien
gctgctctgtgcgtacagatactcg

SEQ ID NO: 2565165 - DNA, 25 bp, Homo sapien
gtgctgctctgtgcgtacagatact

SEQ ID NO: 2565166 - DNA, 25 bp, Homo sapien
ccaggctgtcagaggctcacctggg

SEQ ID NO: 2565167 - DNA, 25 bp, Homo sapien
gcttctccaggctgtcggatgctca

SEQ ID NO: 2565168 - DNA, 25 bp, Homo sapien
tccaggctgtcggatgctcacttgg

SEQ ID NO: 2565169 - DNA, 25 bp, Homo sapien
gtgtgggtgccgttccaggctgtca

SEQ ID NO: 2565170 - DNA, 25 bp, Homo sapien
tgggtgcttctccaggctgtcggat

SEQ ID NO: 2565171 - DNA, 25 bp, Homo sapien
gctccaggctgtcggatgctcgcct

SEQ ID NO: 2565172 - DNA, 25 bp, Homo sapien
ggtgtgggtgctgctccagaccatc

SEQ ID NO: 2565173 - DNA, 25 bp, Homo sapien
gtgctgctccagaccatcacatgcg

SEQ ID NO: 2565174 - DNA, 25 bp, Homo sapien
tgggtgctgctccagaccatcacat

SEQ ID NO: 2565175 - DNA, 25 bp, Homo sapien
tgtgggtgctgctccagaccatcac

SEQ ID NO: 2565176 - DNA, 25 bp, Homo sapien
gggtgtgtgcgtgctgttccaggct

SEQ ID NO: 2565177 - DNA, 25 bp, Homo sapien
ctgttccaggctgtcagatgctccc

SEQ ID NO: 2565178 - DNA, 25 bp, Homo sapien
tgctgttccaggctgtcagatgctc

SEQ ID NO: 2565179 - DNA, 25 bp, Homo sapien
ctgggtgtgtgcgtgctgttccagg

SEQ ID NO: 2565180 - DNA, 25 bp, Homo sapien
gtgtgggtgccgttccaggccgtca

SEQ ID NO: 2565181 - DNA, 25 bp, Homo sapien
cgttccaggccgtcagatgctcgcc

SEQ ID NO: 2565182 - DNA, 25 bp, Homo sapien
ggtgtgggtgccgttccaggccgtc

SEQ ID NO: 2565183 - DNA, 25 bp, Homo sapien
tgggtgccgttccaggccgtcagat

SEQ ID NO: 2565184 - DNA, 25 bp, Homo sapien
ctggcggatgctcgcctggcagtgt

SEQ ID NO: 2565185 - DNA, 25 bp, Homo sapien
gctggcggatgctcgcctggcagtg

SEQ ID NO: 2565186 - DNA, 25 bp, Homo sapien
aggctggcggatgctcgcctggcag

SEQ ID NO: 2565187 - DNA, 25 bp, Homo sapien
caggctggcggatgctcgcctggca

SEQ ID NO: 2565188 - DNA, 25 bp, Homo sapien
cagggtgtccaatggtcacctggcg

SEQ ID NO: 2565189 - DNA, 25 bp, Homo sapien
ccaatggtcacctggcggtgtgtgt

SEQ ID NO: 2565190 - DNA, 25 bp, Homo sapien
gtgctgctccgtggtttcagatgct

SEQ ID NO: 2565191 - DNA, 25 bp, Homo sapien
gttccaggccgtcagatgctcgccg

SEQ ID NO: 2565192 - DNA, 25 bp, Homo sapien
tgtcagatcctcacctgggggtgca

SEQ ID NO: 2565193 - DNA, 25 bp, Homo sapien
tcagatcctcacctgggggtgcagg

SEQ ID NO: 2565194 - DNA, 25 bp, Homo sapien
gctgtcagatcctcacctgggggtg

SEQ ID NO: 2565195 - DNA, 25 bp, Homo sapien
ggctgtcagatcctcacctgggggt

SEQ ID NO: 2565196 - DNA, 25 bp, Homo sapien
tgggcgtctgggtgcagttccaggc

SEQ ID NO: 2565197 - DNA, 25 bp, Homo sapien
agctgtttcaggatgtcggatgctc

SEQ ID NO: 2565198 - DNA, 25 bp, Homo sapien
ggagctgtttcaggatgtcggatgc

SEQ ID NO: 2565199 - DNA, 25 bp, Homo sapien
gctgtttcaggatgtcggatgctca

SEQ ID NO: 2565200 - DNA, 25 bp, Homo sapien
ctgtttcaggatgtcggatgctcac

SEQ ID NO: 2565201 - DNA, 25 bp, Homo sapien
tgctactccaggctgtcggatgctc

SEQ ID NO: 2565202 - DNA, 25 bp, Homo sapien
ggtgctactccaggctgtcggatgc

SEQ ID NO: 2565203 - DNA, 25 bp, Homo sapien
gtgggtgctactccaggctgtcgga

SEQ ID NO: 2565204 - DNA, 25 bp, Homo sapien
ctactccaggctgtcggatgctcac

SEQ ID NO: 2565205 - DNA, 25 bp, Homo sapien
tccaggctgtctgatcctcaccctg

SEQ ID NO: 2565206 - DNA, 25 bp, Homo sapien
caggctgtctgatcctcaccctggg

SEQ ID NO: 2565207 - DNA, 25 bp, Homo sapien
ctgtctgatcctcaccctggggtgc

SEQ ID NO: 2565208 - DNA, 25 bp, Homo sapien
ctggagtgtgggtgctgctccaggc

SEQ ID NO: 2565209 - DNA, 25 bp, Homo sapien
cctgggggtgtagggtgctgctcca

SEQ ID NO: 2565210 - DNA, 25 bp, Homo sapien
ctgtccgatcctcgcctgggggtgt

SEQ ID NO: 2565211 - DNA, 25 bp, Homo sapien
gctgttccaggctgtcacgtgcaca

SEQ ID NO: 2565212 - DNA, 25 bp, Homo sapien
ccaggctgtcggatgctcccctggg

SEQ ID NO: 2565213 - DNA, 25 bp, Homo sapien
ccaggctgtccgatgctcacctggg

SEQ ID NO: 2565214 - DNA, 25 bp, Homo sapien
tgggtgctgatccaggctgtccgat

SEQ ID NO: 2565215 - DNA, 25 bp, Homo sapien
tgggggtgtgggtgctgatccaggc

SEQ ID NO: 2565216 - DNA, 25 bp, Homo sapien
ctgctccaggctgtcagatgctcgc

SEQ ID NO: 2565217 - DNA, 25 bp, Homo sapien
tgctgctccagaccatcagatgcgc

SEQ ID NO: 2565218 - DNA, 25 bp, Homo sapien
gctgctccagaccatcagatgcgca

SEQ ID NO: 2565219 - DNA, 25 bp, Homo sapien
gtgctgctccagaccatcagatgcg

SEQ ID NO: 2565220 - DNA, 25 bp, Homo sapien
ctgttccaggctgtcagatgctctc

SEQ ID NO: 2565221 - DNA, 25 bp, Homo sapien
gggggtgtgcgcgctgttccaggct

SEQ ID NO: 2565222 - DNA, 25 bp, Homo sapien
gggtgtgcgcgctgttccaggctgt

SEQ ID NO: 2565223 - DNA, 25 bp, Homo sapien
ctgggggtgtgcgcgctgttccagg

SEQ ID NO: 2565224 - DNA, 25 bp, Homo sapien
gctgttccacgctgtcacgtgcgca

SEQ ID NO: 2565225 - DNA, 25 bp, Homo sapien
gtgtgtgggtgctgttccacgctgt

SEQ ID NO: 2565226 - DNA, 25 bp, Homo sapien
gggtgctgttccacgctgtcacgtg

SEQ ID NO: 2565227 - DNA, 25 bp, Homo sapien
tgtgtgggtgctgttccacgctgtc

SEQ ID NO: 2565228 - DNA, 25 bp, Homo sapien
cccgggggtgcagggtgctgttcca

SEQ ID NO: 2565229 - DNA, 25 bp, Homo sapien
ctggagtgtgggtgctgctccaggc

SEQ ID NO: 2565230 - DNA, 25 bp, Homo sapien
ctgctccaggctgtcggatgctcac

SEQ ID NO: 2565231 - DNA, 25 bp, Homo sapien
ctccaggctgtctgatcctcacccg

SEQ ID NO: 2565232 - DNA, 25 bp, Homo sapien
ggtgatgttccaggcggtcagctgc

SEQ ID NO: 2565233 - DNA, 25 bp, Homo sapien
atgttccaggcggtcagctgctcac

SEQ ID NO: 2565234 - DNA, 25 bp, Homo sapien
tgatgttccaggcggtcagctgctc

SEQ ID NO: 2565235 - DNA, 25 bp, Homo sapien
gtgggtgatgttccaggcggtcagc

SEQ ID NO: 2565236 - DNA, 25 bp, Homo sapien
ccaggctgtcggatgttcacctggg

SEQ ID NO: 2565237 - DNA, 25 bp, Homo sapien
ctgagcgtgtgggtgctgttccagt

SEQ ID NO: 2565238 - DNA, 25 bp, Homo sapien
tgctccaggctgtcggatgttcacc

SEQ ID NO: 2565239 - DNA, 25 bp, Homo sapien
ctgttccagtctgtcagatgctcac

SEQ ID NO: 2565240 - DNA, 25 bp, Homo sapien
tgctgctccaggctgtccgatgctc

SEQ ID NO: 2565241 - DNA, 25 bp, Homo sapien
ctgctccaggctgtccgatgctcgc

SEQ ID NO: 2565242 - DNA, 25 bp, Homo sapien
gggtgctgctccaggctgtccgatg

SEQ ID NO: 2565243 - DNA, 25 bp, Homo sapien
gggtgtgtggggtgctgctccaggc

SEQ ID NO: 2565244 - DNA, 25 bp, Homo sapien
gtgctgctccaggctgcccgatgct

SEQ ID NO: 2565245 - DNA, 25 bp, Homo sapien
ctgctccaggctgcccgatgctcac

SEQ ID NO: 2565246 - DNA, 25 bp, Homo sapien
tgggggtgtgggtgctgctccaggc

SEQ ID NO: 2565247 - DNA, 25 bp, Homo sapien
ctgggggtgtgggtgctgctccagg

SEQ ID NO: 2565248 - DNA, 25 bp, Homo sapien
ctgttccaggctgtcagatgctcat

SEQ ID NO: 2565249 - DNA, 25 bp, Homo sapien
tgctgttccaggctgtcagatgctc

SEQ ID NO: 2565250 - DNA, 25 bp, Homo sapien
ggtgctgttccaggctgtcagatgc

SEQ ID NO: 2565251 - DNA, 25 bp, Homo sapien
ctgggagtgtgggtgctgttccagg

SEQ ID NO: 2565252 - DNA, 25 bp, Homo sapien
ctgttccaggctgtccgatgctcgt

SEQ ID NO: 2565253 - DNA, 25 bp, Homo sapien
ggtgctgctccacgatgtcggatgt

SEQ ID NO: 2565254 - DNA, 25 bp, Homo sapien
tgctccaggctgtcggatgcaagcc

SEQ ID NO: 2565255 - DNA, 25 bp, Homo sapien
ccaggctggcggatgctggcctggc

SEQ ID NO: 2565256 - DNA, 25 bp, Homo sapien
ctgctccaggatgtcagatgctcgc

SEQ ID NO: 2565257 - DNA, 25 bp, Homo sapien
gtgctgctccaggatgtcagatgct

SEQ ID NO: 2565258 - DNA, 25 bp, Homo sapien
tgggggtgtgggtgctgctccagga

SEQ ID NO: 2565259 - DNA, 25 bp, Homo sapien
ctgggggtgtgggtgctgctccagg

SEQ ID NO: 2565260 - DNA, 25 bp, Homo sapien
ggctgtcagatgctcacttgggtgt

SEQ ID NO: 2565261 - DNA, 25 bp, Homo sapien
gctgtcagatgctcacttgggtgtg

SEQ ID NO: 2565262 - DNA, 25 bp, Homo sapien
gtgtgggcgctgctccggactctcc

SEQ ID NO: 2565263 - DNA, 25 bp, Homo sapien
ggtgtgtgggcgctgctccggactc

SEQ ID NO: 2565264 - DNA, 25 bp, Homo sapien
ctgctccacactatcagatgctaac

SEQ ID NO: 2565265 - DNA, 25 bp, Homo sapien
atgtgatgctccaggatgtccgatg

SEQ ID NO: 2565266 - DNA, 25 bp, Homo sapien
agtatgtgatgctccaggatgtccg

SEQ ID NO: 2565267 - DNA, 25 bp, Homo sapien
ggagtatgtgatgctccaggatgtc

SEQ ID NO: 2565268 - DNA, 25 bp, Homo sapien
tatgtgatgctccaggatgtccgat

SEQ ID NO: 2565269 - DNA, 25 bp, Homo sapien
gctccaggctgtcggatgctcgcct

SEQ ID NO: 2565270 - DNA, 25 bp, Homo sapien
ggggtttgagaattctgttccaggc

SEQ ID NO: 2565271 - DNA, 25 bp, Homo sapien
ctgttccaggctgtcggatgctcac

SEQ ID NO: 2565272 - DNA, 25 bp, Homo sapien
agaattctgttccaggctgtcggat

SEQ ID NO: 2565273 - DNA, 25 bp, Homo sapien
ctggggtttgagaattctgttccag

SEQ ID NO: 2565274 - DNA, 25 bp, Homo sapien
ttgttccatgctgtcagatttttgc

SEQ ID NO: 2565275 - DNA, 25 bp, Homo sapien
gggagcagtggtcttgttccatgct

SEQ ID NO: 2565276 - DNA, 25 bp, Homo sapien
tcttgttccatgctgtcagattttt

SEQ ID NO: 2565277 - DNA, 25 bp, Homo sapien
ctgggagcagtggtcttgttccatg

SEQ ID NO: 2565278 - DNA, 25 bp, Homo sapien
tgggggtgtgggtgctgctccaggc

SEQ ID NO: 2565279 - DNA, 25 bp, Homo sapien
gtgctgctccaggctgccagatgct

SEQ ID NO: 2565280 - DNA, 25 bp, Homo sapien
ctgctccaggctgccagatgctcac

SEQ ID NO: 2565281 - DNA, 25 bp, Homo sapien
ctgggggtgtgggtgctgctccagg

SEQ ID NO: 2565282 - DNA, 25 bp, Homo sapien
ctgggggtgtgggtgctgctccagg

SEQ ID NO: 2565283 - DNA, 25 bp, Homo sapien
ctgctccaggcagtcagatgctcac

SEQ ID NO: 2565284 - DNA, 25 bp, Homo sapien
gggtgtgggtgctgctccaggcagt

SEQ ID NO: 2565285 - DNA, 25 bp, Homo sapien
gggggtgtgggtgctgctccaggca

SEQ ID NO: 2565286 - DNA, 25 bp, Homo sapien
ctgggggtgtgggcgctgctccacg

SEQ ID NO: 2565287 - DNA, 25 bp, Homo sapien
ggtgtgggcgctgctccacgctgtc

SEQ ID NO: 2565288 - DNA, 25 bp, Homo sapien
attgtgggcgcctgctccaggctgt

SEQ ID NO: 2565289 - DNA, 25 bp, Homo sapien
tccaggctgtcagatgcccacctgg

SEQ ID NO: 2565290 - DNA, 25 bp, Homo sapien
tgacattccatgtggtcacatgctc

SEQ ID NO: 2565291 - DNA, 25 bp, Homo sapien
acattccatgtggtcacatgctcac

SEQ ID NO: 2565292 - DNA, 25 bp, Homo sapien
tgaggatgacattccatgtggtcac

SEQ ID NO: 2565293 - DNA, 25 bp, Homo sapien
ggatgacattccatgtggtcacatg

SEQ ID NO: 2565294 - DNA, 25 bp, Homo sapien
agaattctgttccaggctgtccgat

SEQ ID NO: 2565295 - DNA, 25 bp, Homo sapien
tctgttccaggctgtccgatgctca

SEQ ID NO: 2565296 - DNA, 25 bp, Homo sapien
tggggcttgagaattctgttccagg

SEQ ID NO: 2565297 - DNA, 25 bp, Homo sapien
gcttgagaattctgttccaggctgt

SEQ ID NO: 2565298 - DNA, 25 bp, Homo sapien
aggctgtcagattctcgccagcggg

SEQ ID NO: 2565299 - DNA, 25 bp, Homo sapien
catatgctcatctgccagtaggggt

SEQ ID NO: 2565300 - DNA, 25 bp, Homo sapien
gagggtgctgttctaggttgtcaga

SEQ ID NO: 2565301 - DNA, 25 bp, Homo sapien
ctgtcagattctcgccagcgggtgt

SEQ ID NO: 2565302 - DNA, 25 bp, Homo sapien
tgggcgctgctccaggctgtaagat

SEQ ID NO: 2565303 - DNA, 25 bp, Homo sapien
ctgggggtgtgggcgctgctccagg

SEQ ID NO: 2565304 - DNA, 25 bp, Homo sapien
ctgctccaggctgtaagatgctcac

SEQ ID NO: 2565305 - DNA, 25 bp, Homo sapien
ggcgctgctccaggctgtaagatgc

SEQ ID NO: 2565306 - DNA, 25 bp, Homo sapien
gtgggtgctgctccaggctgtcaga

SEQ ID NO: 2565307 - DNA, 25 bp, Homo sapien
ctgggagtgtgggtgctgctccagg

SEQ ID NO: 2565308 - DNA, 25 bp, Homo sapien
tgggagtgtgggtgctgctccaggc

SEQ ID NO: 2565309 - DNA, 25 bp, Homo sapien
ctgctccaggctgtcagatgctcac

SEQ ID NO: 2565310 - DNA, 25 bp, Homo sapien
tgtgggtgcggttccaggctgtcag

SEQ ID NO: 2565311 - DNA, 25 bp, Homo sapien
ctgggggtgtgggtgcggttccagg

SEQ ID NO: 2565312 - DNA, 25 bp, Homo sapien
ggtgtgggtgcggttccaggctgtc

SEQ ID NO: 2565313 - DNA, 25 bp, Homo sapien
ggggtgtgggtgcggttccaggctg

SEQ ID NO: 2565314 - DNA, 25 bp, Homo sapien
gtgggtgctgctccaggctgtcaga

SEQ ID NO: 2565315 - DNA, 25 bp, Homo sapien
ctgctccaggctgtcagatgctcgc

SEQ ID NO: 2565316 - DNA, 25 bp, Homo sapien
tgggggtgtgggtgctgctccaggc

SEQ ID NO: 2565317 - DNA, 25 bp, Homo sapien
ctgggggtgtgggtgctgctccagg

SEQ ID NO: 2565318 - DNA, 25 bp, Homo sapien
cacctggaggtgaggatgccattcc

SEQ ID NO: 2565319 - DNA, 25 bp, Homo sapien
aggtgaggatgccattccatgcggt

SEQ ID NO: 2565320 - DNA, 25 bp, Homo sapien
gtgaggatgccattccatgcggtca

SEQ ID NO: 2565321 - DNA, 25 bp, Homo sapien
aggatgccattccatgcggtcagat

SEQ ID NO: 2565322 - DNA, 25 bp, Homo sapien
tttcacttgctgcaagggccagttc

SEQ ID NO: 2565323 - DNA, 25 bp, Homo sapien
ctggccccatggctctagggatgga

SEQ ID NO: 2565324 - DNA, 25 bp, Homo sapien
ggcttttcacttgctgcaagggcca

SEQ ID NO: 2565325 - DNA, 25 bp, Homo sapien
cacttgctgcaagggccagttctcc

SEQ ID NO: 2565326 - DNA, 25 bp, Homo sapien
ctttctcaagctccctttattaaca

SEQ ID NO: 2565327 - DNA, 25 bp, Homo sapien
cttggaaaataagattcatgcttgt

SEQ ID NO: 2565328 - DNA, 25 bp, Homo sapien
taaattacatagtcaagatcacata

SEQ ID NO: 2565329 - DNA, 25 bp, Homo sapien
tattaacatacaggccttagtatgt

SEQ ID NO: 2565330 - DNA, 25 bp, Homo sapien
tactttaacagaagtcacacatctg

SEQ ID NO: 2565331 - DNA, 25 bp, Homo sapien
taagccattgaatccacacagcagc

SEQ ID NO: 2565332 - DNA, 25 bp, Homo sapien
tgctggacacttacatagataagcc

SEQ ID NO: 2565333 - DNA, 25 bp, Homo sapien
taatattgatattggaagctgcagt

SEQ ID NO: 2565334 - DNA, 25 bp, Homo sapien
tccaagaacttatccctgttccagt

SEQ ID NO: 2565335 - DNA, 25 bp, Homo sapien
gtatcagtaaccctgcaatgatttt

SEQ ID NO: 2565336 - DNA, 25 bp, Homo sapien
tccagtacccctgtgcttcattcag

SEQ ID NO: 2565337 - DNA, 25 bp, Homo sapien
cagcttttataggtatgttggcacc

SEQ ID NO: 2565338 - DNA, 25 bp, Homo sapien
tctcaaggcatttcccatggggagt

SEQ ID NO: 2565339 - DNA, 25 bp, Homo sapien
gtctcaaggcatttcccatggggag

SEQ ID NO: 2565340 - DNA, 25 bp, Homo sapien
ggtctcaaggcatttcccatgggga

SEQ ID NO: 2565341 - DNA, 25 bp, Homo sapien
aggtctcaaggcatttcccatgggg

SEQ ID NO: 2565342 - DNA, 25 bp, Homo sapien
gattgaacatctttggtgtggaaag

SEQ ID NO: 2565343 - DNA, 25 bp, Homo sapien
ccaggactctgcctaggccgggatc

SEQ ID NO: 2565344 - DNA, 25 bp, Homo sapien
gcagagaagtgagccctagggcttc

SEQ ID NO: 2565345 - DNA, 25 bp, Homo sapien
taaccaataagattgaacatctttg

SEQ ID NO: 2565346 - DNA, 25 bp, Homo sapien
cagcccacgcgttctcctccaagtt

SEQ ID NO: 2565347 - DNA, 25 bp, Homo sapien
caagttgtagttttggggagtcaca

SEQ ID NO: 2565348 - DNA, 25 bp, Homo sapien
gggagtcacagtccacctcattcac

SEQ ID NO: 2565349 - DNA, 25 bp, Homo sapien
cttttccagcccacgcgttctcctc

SEQ ID NO: 2565350 - DNA, 25 bp, Homo sapien
gcatcagaggaaaacttacctcttt

SEQ ID NO: 2565351 - DNA, 25 bp, Homo sapien
ctagtggctgtgatgagataaatcc

SEQ ID NO: 2565352 - DNA, 25 bp, Homo sapien
cgaagggagcattcaaaagcggaga

SEQ ID NO: 2565353 - DNA, 25 bp, Homo sapien
gaaattcactacgatgggccattgg

SEQ ID NO: 2565354 - DNA, 25 bp, Homo sapien
caatttgggcgagaatttcctttgc

SEQ ID NO: 2565355 - DNA, 25 bp, Homo sapien
gtaaagctaaactcagtctccgact

SEQ ID NO: 2565356 - DNA, 25 bp, Homo sapien
cacgtgaagaaattcccaccggaag

SEQ ID NO: 2565357 - DNA, 25 bp, Homo sapien
caccggaagacgagttaggagagct

SEQ ID NO: 2565358 - DNA, 25 bp, Homo sapien
taggagagctttatatgagcaggcg

SEQ ID NO: 2565359 - DNA, 25 bp, Homo sapien
gtcacaggcccttttaattcttcac

SEQ ID NO: 2565360 - DNA, 25 bp, Homo sapien
caggcccttttaattcttcactgaa

SEQ ID NO: 2565361 - DNA, 25 bp, Homo sapien
ggaaaatgcattcctgcaccactga

SEQ ID NO: 2565362 - DNA, 25 bp, Homo sapien
tgcattcctgcaccactgagcacag

SEQ ID NO: 2565363 - DNA, 25 bp, Homo sapien
aataactgtacatgtattctgcagc

SEQ ID NO: 2565364 - DNA, 25 bp, Homo sapien
tgttgtctgagcaaaatccttcctc

SEQ ID NO: 2565365 - DNA, 25 bp, Homo sapien
aaacaagcacttgttgtctgagcaa

SEQ ID NO: 2565366 - DNA, 25 bp, Homo sapien
tgcttcagcagagcttcttggataa

SEQ ID NO: 2565367 - DNA, 25 bp, Homo sapien
caaatttctcagagtcggttcagca

SEQ ID NO: 2565368 - DNA, 25 bp, Homo sapien
tcggagtccacaagcgagaaaaaga

SEQ ID NO: 2565369 - DNA, 25 bp, Homo sapien
ctcagagtcggttcagcagttcttc

SEQ ID NO: 2565370 - DNA, 25 bp, Homo sapien
gaagaagggcaatatatcggagtcc

SEQ ID NO: 2565371 - DNA, 25 bp, Homo sapien
tagggtgggatagaagaacgacaca

SEQ ID NO: 2565372 - DNA, 25 bp, Homo sapien
ctagggtgggatagaagaacgacac

SEQ ID NO: 2565373 - DNA, 25 bp, Homo sapien
ggtgggatagaagaacgacacaccc

SEQ ID NO: 2565374 - DNA, 25 bp, Homo sapien
tgggatagaagaacgacacacccac

SEQ ID NO: 2565375 - DNA, 25 bp, Homo sapien
cttctccccttctgcgacccggcgg

SEQ ID NO: 2565376 - DNA, 25 bp, Homo sapien
ttcaggaaagaagagggtttctgcc

SEQ ID NO: 2565377 - DNA, 25 bp, Homo sapien
tcaggaaagaagagggtttctgccc

SEQ ID NO: 2565378 - DNA, 25 bp, Homo sapien
tgcgacccggcggtcttcagttttc

SEQ ID NO: 2565379 - DNA, 25 bp, Homo sapien
acttgaggctgcgaaatcttccaca

SEQ ID NO: 2565380 - DNA, 25 bp, Homo sapien
tcctacttcctggatgaaaatgtct

SEQ ID NO: 2565381 - DNA, 25 bp, Homo sapien
taatatcacactcagcacttgaggc

SEQ ID NO: 2565382 - DNA, 25 bp, Homo sapien
taaattccgatagcctaatacagca

SEQ ID NO: 2565383 - DNA, 25 bp, Homo sapien
gtgactacaccatagtaattaaaag

SEQ ID NO: 2565384 - DNA, 25 bp, Homo sapien
gagctgtggcttttaatgggttcct

SEQ ID NO: 2565385 - DNA, 25 bp, Homo sapien
ggttcctatgaaaccaatgggtcat

SEQ ID NO: 2565386 - DNA, 25 bp, Homo sapien
gccagtgactacaccatagtaatta

SEQ ID NO: 2565387 - DNA, 25 bp, Homo sapien
tcaaaatcgattcttcatccgttca

SEQ ID NO: 2565388 - DNA, 25 bp, Homo sapien
caagaccagtgctctaaccactgag

SEQ ID NO: 2565389 - DNA, 25 bp, Homo sapien
tgctctaaccactgagctatggagc

SEQ ID NO: 2565390 - DNA, 25 bp, Homo sapien
agcgaggatcgaactcgcgacccct

SEQ ID NO: 2565391 - DNA, 25 bp, Homo sapien
aggccccagcgaggatcgaactcgc

SEQ ID NO: 2565392 - DNA, 25 bp, Homo sapien
ccttgtagctgtagaaatgacatcc

SEQ ID NO: 2565393 - DNA, 25 bp, Homo sapien
gccatgcggctaggacctgaggtaa

SEQ ID NO: 2565394 - DNA, 25 bp, Homo sapien
cctaatcaagggagcagtgatccca

SEQ ID NO: 2565395 - DNA, 25 bp, Homo sapien
tacagactgaaatccgggtgtttgc

SEQ ID NO: 2565396 - DNA, 25 bp, Homo sapien
caggcccttttaattcttcactgaa

SEQ ID NO: 2565397 - DNA, 25 bp, Homo sapien
ggaaaatgcattcctgcaccactga

SEQ ID NO: 2565398 - DNA, 25 bp, Homo sapien
cacagtttctacgtatgtttgaagc

SEQ ID NO: 2565399 - DNA, 25 bp, Homo sapien
tgcattcctgcaccactgagcacag

SEQ ID NO: 2565400 - DNA, 25 bp, Homo sapien
ttttttagattcaaacagccagtaa

SEQ ID NO: 2565401 - DNA, 25 bp, Homo sapien
ttttagattcaaacagccagtaatc

SEQ ID NO: 2565402 - DNA, 25 bp, Homo sapien
ccagtaatctactgtccagctggga

SEQ ID NO: 2565403 - DNA, 25 bp, Homo sapien
agccagtaatctactgtccagctgg

SEQ ID NO: 2565404 - DNA, 25 bp, Homo sapien
catcgcaacctagccattgacagca

SEQ ID NO: 2565405 - DNA, 25 bp, Homo sapien
tcacatgacatgcatcgcaacctag

SEQ ID NO: 2565406 - DNA, 25 bp, Homo sapien
gacgaatgacggtcacatgacatgc

SEQ ID NO: 2565407 - DNA, 25 bp, Homo sapien
ctgaaacactgacgaatgacggtca

SEQ ID NO: 2565408 - DNA, 25 bp, Homo sapien
ataactgtgcactgtcttctaacac

SEQ ID NO: 2565409 - DNA, 25 bp, Homo sapien
tgtgcactgtcttctaacacagcca

SEQ ID NO: 2565410 - DNA, 25 bp, Homo sapien
cccgaaatccaataactgtgcactg

SEQ ID NO: 2565411 - DNA, 25 bp, Homo sapien
cgaaacccgaaatccaataactgtg

SEQ ID NO: 2565412 - DNA, 25 bp, Homo sapien
tttgaggtactctctgatgcttcac

SEQ ID NO: 2565413 - DNA, 25 bp, Homo sapien
tgaggtactctctgatgcttcactc

SEQ ID NO: 2565414 - DNA, 25 bp, Homo sapien
ttgaggtactctctgatgcttcact

SEQ ID NO: 2565415 - DNA, 25 bp, Homo sapien
cgcctccagacctccattgcgctcg

SEQ ID NO: 2565416 - DNA, 25 bp, Homo sapien
tgttccgcctccagacctccattgc

SEQ ID NO: 2565417 - DNA, 25 bp, Homo sapien
tccgcctccagacctccattgcgct

SEQ ID NO: 2565418 - DNA, 25 bp, Homo sapien
tccagacctccattgcgctcgctgt

SEQ ID NO: 2565419 - DNA, 25 bp, Homo sapien
ctgtcacagcgtggaaggaccaccg

SEQ ID NO: 2565420 - DNA, 25 bp, Homo sapien
cgtggaaggaccaccgctcagatgg

SEQ ID NO: 2565421 - DNA, 25 bp, Homo sapien
acagcgtggaaggaccaccgctcag

SEQ ID NO: 2565422 - DNA, 25 bp, Homo sapien
ggcgccactgcagtgcgcggccttt

SEQ ID NO: 2565423 - DNA, 25 bp, Homo sapien
gaaaagcaggtctctcgtgccggcc

SEQ ID NO: 2565424 - DNA, 25 bp, Homo sapien
agcaggtctctcgtgccggcccgga

SEQ ID NO: 2565425 - DNA, 25 bp, Homo sapien
gagaaaagcaggtctctcgtgccgg

SEQ ID NO: 2565426 - DNA, 25 bp, Homo sapien
aaagcaggtctctcgtgccggcccg

SEQ ID NO: 2565427 - DNA, 25 bp, Homo sapien
ggacgggagagaagagcgaataggg

SEQ ID NO: 2565428 - DNA, 25 bp, Homo sapien
ggggacgggagagaagagcgaatag

SEQ ID NO: 2565429 - DNA, 25 bp, Homo sapien
gggacgggagagaagagcgaatagg

SEQ ID NO: 2565430 - DNA, 25 bp, Homo sapien
tgtagaacagctgaacgcaagcgac

SEQ ID NO: 2565431 - DNA, 25 bp, Homo sapien
tatgaaggctgcgtagagcacagac

SEQ ID NO: 2565432 - DNA, 25 bp, Homo sapien
caattccctgcggaatggcactggg

SEQ ID NO: 2565433 - DNA, 25 bp, Homo sapien
cggactctgggattgaacttcgcct

SEQ ID NO: 2565434 - DNA, 25 bp, Homo sapien
cctgtgacagcttgggtccctcccc

SEQ ID NO: 2565435 - DNA, 25 bp, Homo sapien
tgacagcttgggtccctccccggga

SEQ ID NO: 2565436 - DNA, 25 bp, Homo sapien
tgtgacagcttgggtccctccccgg

SEQ ID NO: 2565437 - DNA, 25 bp, Homo sapien
ccgcctgtgacagcttgggtccctc

SEQ ID NO: 2565438 - DNA, 25 bp, Homo sapien
tgctttcctcggatctgacacactc

SEQ ID NO: 2565439 - DNA, 25 bp, Homo sapien
ttctcctttgcacagacaatcagtg

SEQ ID NO: 2565440 - DNA, 25 bp, Homo sapien
tgcacagacaatcagtgcacccact

SEQ ID NO: 2565441 - DNA, 25 bp, Homo sapien
aaacagcatagaaacgtcttgcttt

SEQ ID NO: 2565442 - DNA, 25 bp, Homo sapien
gagtgacgaaaccttctcaaacaca

SEQ ID NO: 2565443 - DNA, 25 bp, Homo sapien
aagagtgacgaaaccttctcaaaca

SEQ ID NO: 2565444 - DNA, 25 bp, Homo sapien
agtgctgtcacttcgtaagtactca

SEQ ID NO: 2565445 - DNA, 25 bp, Homo sapien
gctgtcacttcgtaagtactcaata

SEQ ID NO: 2565446 - DNA, 25 bp, Homo sapien
tgtgagttgaaatacagacccacct

SEQ ID NO: 2565447 - DNA, 25 bp, Homo sapien
tacaaggttagcttgaattaaaagc

SEQ ID NO: 2565448 - DNA, 25 bp, Homo sapien
ttcacttaagaatttaccaacacaa

SEQ ID NO: 2565449 - DNA, 25 bp, Homo sapien
actaacagtgtacatatgacctatc

SEQ ID NO: 2565450 - DNA, 25 bp, Homo sapien
gaatctcaatcgagtttaactctcc

SEQ ID NO: 2565451 - DNA, 25 bp, Homo sapien
cctggagaagaatctcaatcgagtt

SEQ ID NO: 2565452 - DNA, 25 bp, Homo sapien
gagccctggagaagaatctcaatcg

SEQ ID NO: 2565453 - DNA, 25 bp, Homo sapien
gagaagaatctcaatcgagtttaac

SEQ ID NO: 2565454 - DNA, 25 bp, Homo sapien
cttaaacacaacatcgtatttcctc

SEQ ID NO: 2565455 - DNA, 25 bp, Homo sapien
taaacacaacatcgtatttcctcta

SEQ ID NO: 2565456 - DNA, 25 bp, Homo sapien
aacacaacatcgtatttcctctatc

SEQ ID NO: 2565457 - DNA, 25 bp, Homo sapien
tcttaaacacaacatcgtatttcct

SEQ ID NO: 2565458 - DNA, 25 bp, Homo sapien
ctgcaattttgtaaaaggtacacat

SEQ ID NO: 2565459 - DNA, 25 bp, Homo sapien
cacgttccatcatcgcgacataatg

SEQ ID NO: 2565460 - DNA, 25 bp, Homo sapien
aatgaaaccatattgtgtaggtcgg

SEQ ID NO: 2565461 - DNA, 25 bp, Homo sapien
gacaagtgatgattagcttctctcc

SEQ ID NO: 2565462 - DNA, 25 bp, Homo sapien
gatgggcagattattccacgttcca

SEQ ID NO: 2565463 - DNA, 25 bp, Homo sapien
gaacatgctcagcaacactggcagt

SEQ ID NO: 2565464 - DNA, 25 bp, Homo sapien
aacatgctcagcaacactggcagtt

SEQ ID NO: 2565465 - DNA, 25 bp, Homo sapien
acatgctcagcaacactggcagttc

SEQ ID NO: 2565466 - DNA, 25 bp, Homo sapien
cagccagctgcttgttttgtagaca

SEQ ID NO: 2565467 - DNA, 25 bp, Homo sapien
acagccagctgcttgttttgtagac

SEQ ID NO: 2565468 - DNA, 25 bp, Homo sapien
taacagccagctgcttgttttgtag

SEQ ID NO: 2565469 - DNA, 25 bp, Homo sapien
agccagctgcttgttttgtagacac

SEQ ID NO: 2565470 - DNA, 25 bp, Homo sapien
tcgtgtcggaggactgaaacggatc

SEQ ID NO: 2565471 - DNA, 25 bp, Homo sapien
gaaacggatcagcaggtaataaagt

SEQ ID NO: 2565472 - DNA, 25 bp, Homo sapien
tcactctgatcgtgtcggaggactg

SEQ ID NO: 2565473 - DNA, 25 bp, Homo sapien
gtcggaggactgaaacggatcagca

SEQ ID NO: 2565474 - DNA, 25 bp, Homo sapien
aaacatgctcctggactaattgctg

SEQ ID NO: 2565475 - DNA, 25 bp, Homo sapien
ttgctcgagcaattgaactaaaaca

SEQ ID NO: 2565476 - DNA, 25 bp, Homo sapien
acatgctcctggactaattgctgca

SEQ ID NO: 2565477 - DNA, 25 bp, Homo sapien
gcaattgaactaaaacatgctcctg

SEQ ID NO: 2565478 - DNA, 25 bp, Homo sapien
tgtctggatttttgggcatctggtt

SEQ ID NO: 2565479 - DNA, 25 bp, Homo sapien
tttgtctggatttttgggcatctgg

SEQ ID NO: 2565480 - DNA, 25 bp, Homo sapien
tctggatttttgggcatctggtttg

SEQ ID NO: 2565481 - DNA, 25 bp, Homo sapien
ttgtctggatttttgggcatctggt

SEQ ID NO: 2565482 - DNA, 25 bp, Homo sapien
gctttctgtgccatcctttctaaca

SEQ ID NO: 2565483 - DNA, 25 bp, Homo sapien
cagtaacacaagactagggcatttc

SEQ ID NO: 2565484 - DNA, 25 bp, Homo sapien
cagagaaaatttagccctactgctt

SEQ ID NO: 2565485 - DNA, 25 bp, Homo sapien
tggctttagcatgaaagctttctgt

SEQ ID NO: 2565486 - DNA, 25 bp, Homo sapien
gtttctggatataacagaggcttca

SEQ ID NO: 2565487 - DNA, 25 bp, Homo sapien
gcagggctttcaagggaacatgctg

SEQ ID NO: 2565488 - DNA, 25 bp, Homo sapien
tgcacactcccctgaactgtccttt

SEQ ID NO: 2565489 - DNA, 25 bp, Homo sapien
gcctcctattcccaggtttctggat

SEQ ID NO: 2565490 - DNA, 25 bp, Homo sapien
tttgtctggatttttgggcatctgg

SEQ ID NO: 2565491 - DNA, 25 bp, Homo sapien
tgtctggatttttgggcatctggtt

SEQ ID NO: 2565492 - DNA, 25 bp, Homo sapien
tctggatttttgggcatctggtttg

SEQ ID NO: 2565493 - DNA, 25 bp, Homo sapien
ttgtctggatttttgggcatctggt

SEQ ID NO: 2565494 - DNA, 25 bp, Homo sapien
cagagaaaatttagccctactgctt

SEQ ID NO: 2565495 - DNA, 25 bp, Homo sapien
tggctttagcatgaaagctttctgt

SEQ ID NO: 2565496 - DNA, 25 bp, Homo sapien
gctttctgtgccatcctttctaaca

SEQ ID NO: 2565497 - DNA, 25 bp, Homo sapien
cagtaacacaagactagggcatttc

SEQ ID NO: 2565498 - DNA, 25 bp, Homo sapien
ggccaccaatttccaggtctgggta

SEQ ID NO: 2565499 - DNA, 25 bp, Homo sapien
gagttgacttagaatgggctctgga

SEQ ID NO: 2565500 - DNA, 25 bp, Homo sapien
caagatggtctttatgagttgactt

SEQ ID NO: 2565501 - DNA, 25 bp, Homo sapien
tctgggtagtgagactaaatttcaa

SEQ ID NO: 2565502 - DNA, 25 bp, Homo sapien
caccagattttgtgactttggacag

SEQ ID NO: 2565503 - DNA, 25 bp, Homo sapien
tgactttggacaggaaacacagcaa

SEQ ID NO: 2565504 - DNA, 25 bp, Homo sapien
caggaaacacagcaactcagtagtc

SEQ ID NO: 2565505 - DNA, 25 bp, Homo sapien
cttccagtgatcctaacaccagatt

SEQ ID NO: 2565506 - DNA, 25 bp, Homo sapien
ccatatcttggcatgatataacctg

SEQ ID NO: 2565507 - DNA, 25 bp, Homo sapien
agcccatatcttggcatgatataac

SEQ ID NO: 2565508 - DNA, 25 bp, Homo sapien
catatcttggcatgatataacctgg

SEQ ID NO: 2565509 - DNA, 25 bp, Homo sapien
cccatatcttggcatgatataacct

SEQ ID NO: 2565510 - DNA, 25 bp, Homo sapien
tggttctagtaaccaggctaggttc

SEQ ID NO: 2565511 - DNA, 25 bp, Homo sapien
cagcatgtgactctgtcgcctgaag

SEQ ID NO: 2565512 - DNA, 25 bp, Homo sapien
cagggccgtactacaggggcactgt

SEQ ID NO: 2565513 - DNA, 25 bp, Homo sapien
tatccagaggtggttctagtaacca

SEQ ID NO: 2565514 - DNA, 25 bp, Homo sapien
gagctcctgacacttgctaccctga

SEQ ID NO: 2565515 - DNA, 25 bp, Homo sapien
tgtttttgagtatggaggagctcct

SEQ ID NO: 2565516 - DNA, 25 bp, Homo sapien
gtttcctctccaaaatagttcactg

SEQ ID NO: 2565517 - DNA, 25 bp, Homo sapien
ctgaggctttgcatccggggattca

SEQ ID NO: 2565518 - DNA, 25 bp, Homo sapien
ctaatgattcaaaccatagtagaga

SEQ ID NO: 2565519 - DNA, 25 bp, Homo sapien
attgggctgtatggaactttgccaa

SEQ ID NO: 2565520 - DNA, 25 bp, Homo sapien
gtagagagtcattgggctgtatgga

SEQ ID NO: 2565521 - DNA, 25 bp, Homo sapien
gattcaaaccatagtagagagtcat

SEQ ID NO: 2565522 - DNA, 25 bp, Homo sapien
tcactttaacttggattagttcctg

SEQ ID NO: 2565523 - DNA, 25 bp, Homo sapien
gtgatccatgtcatcggccagctgt

SEQ ID NO: 2565524 - DNA, 25 bp, Homo sapien
taaaggagtgatccatgtcatcggc

SEQ ID NO: 2565525 - DNA, 25 bp, Homo sapien
ggagtgatccatgtcatcggccagc

SEQ ID NO: 2565526 - DNA, 25 bp, Homo sapien
atattgagcggttggtgaccattta

SEQ ID NO: 2565527 - DNA, 25 bp, Homo sapien
attgagcggttggtgaccatttaac

SEQ ID NO: 2565528 - DNA, 25 bp, Homo sapien
tgagcggttggtgaccatttaactt

SEQ ID NO: 2565529 - DNA, 25 bp, Homo sapien
tattgagcggttggtgaccatttaa

SEQ ID NO: 2565530 - DNA, 25 bp, Homo sapien
tcctgccatacagacaaaatgcttg

SEQ ID NO: 2565531 - DNA, 25 bp, Homo sapien
cacaaacttagcatgagctgctggg

SEQ ID NO: 2565532 - DNA, 25 bp, Homo sapien
cattgtctgcaaggtatttgtgttc

SEQ ID NO: 2565533 - DNA, 25 bp, Homo sapien
ctttcagtgtgtgccactctggtca

SEQ ID NO: 2565534 - DNA, 25 bp, Homo sapien
cacagcaactcatcctgcagaggtt

SEQ ID NO: 2565535 - DNA, 25 bp, Homo sapien
tgtgacattgatgtgtccactgaag

SEQ ID NO: 2565536 - DNA, 25 bp, Homo sapien
gatgtgacattgatgtgtccactga

SEQ ID NO: 2565537 - DNA, 25 bp, Homo sapien
tatgatatggtcacagatgtgacat

SEQ ID NO: 2565538 - DNA, 25 bp, Homo sapien
gatatggtcacagatgtgacattga

SEQ ID NO: 2565539 - DNA, 25 bp, Homo sapien
gcggagctgccttcaccctgacttg

SEQ ID NO: 2565540 - DNA, 25 bp, Homo sapien
gacagcacagatcagcgtaatgagg

SEQ ID NO: 2565541 - DNA, 25 bp, Homo sapien
agatcagcgtaatgagggccgtcgc

SEQ ID NO: 2565542 - DNA, 25 bp, Homo sapien
ggagctgccttcaccctgacttggc

SEQ ID NO: 2565543 - DNA, 25 bp, Homo sapien
gctggcaggtggaccactaggaaaa

SEQ ID NO: 2565544 - DNA, 25 bp, Homo sapien
actaggaaaacaccccttgctcttg

SEQ ID NO: 2565545 - DNA, 25 bp, Homo sapien
ctcttgctgggaagggtcgagtcgg

SEQ ID NO: 2565546 - DNA, 25 bp, Homo sapien
ttgctgggaagggtcgagtcgggtg

SEQ ID NO: 2565547 - DNA, 25 bp, Homo sapien
gaggatcatcaaatactcattgctt

SEQ ID NO: 2565548 - DNA, 25 bp, Homo sapien
gacctcttgaaagggcacagatggg

SEQ ID NO: 2565549 - DNA, 25 bp, Homo sapien
agtgacaggatgaccaagggccaga

SEQ ID NO: 2565550 - DNA, 25 bp, Homo sapien
aagggccagaggatcatcaaatact

SEQ ID NO: 2565551 - DNA, 25 bp, Homo sapien
gagctgtgagctctttgctgttgat

SEQ ID NO: 2565552 - DNA, 25 bp, Homo sapien
gactgagatatctgccgggccagag

SEQ ID NO: 2565553 - DNA, 25 bp, Homo sapien
gacctggtcaatgcagtctgcctgg

SEQ ID NO: 2565554 - DNA, 25 bp, Homo sapien
gatatcagtagctggtggaaaggcc

SEQ ID NO: 2565555 - DNA, 25 bp, Homo sapien
ccattgagtccaagtggtagggata

SEQ ID NO: 2565556 - DNA, 25 bp, Homo sapien
tgactggtcttgtagttgtgccatt

SEQ ID NO: 2565557 - DNA, 25 bp, Homo sapien
tctcacatgcaaagtttggataaag

SEQ ID NO: 2565558 - DNA, 25 bp, Homo sapien
aactgctgatgtctacattgggaac

SEQ ID NO: 2565559 - DNA, 25 bp, Homo sapien
tctgaatgggccgtaaatgtgtaac

SEQ ID NO: 2565560 - DNA, 25 bp, Homo sapien
ctgaatgggccgtaaatgtgtaacc

SEQ ID NO: 2565561 - DNA, 25 bp, Homo sapien
gaatgggccgtaaatgtgtaaccat

SEQ ID NO: 2565562 - DNA, 25 bp, Homo sapien
ctttctgaatgggccgtaaatgtgt

SEQ ID NO: 2565563 - DNA, 25 bp, Homo sapien
caagagggtgacaatgagaatatga

SEQ ID NO: 2565564 - DNA, 25 bp, Homo sapien
gaatgacaatgctgtcaagagggtg

SEQ ID NO: 2565565 - DNA, 25 bp, Homo sapien
tatgaagctgacagcagtaatagca

SEQ ID NO: 2565566 - DNA, 25 bp, Homo sapien
agcagtaatagcaaggggtctctct

SEQ ID NO: 2565567 - DNA, 25 bp, Homo sapien
tggctctggtctcataggagcaatt

SEQ ID NO: 2565568 - DNA, 25 bp, Homo sapien
ctcataggagcaattctgagggtac

SEQ ID NO: 2565569 - DNA, 25 bp, Homo sapien
tggtctcataggagcaattctgagg

SEQ ID NO: 2565570 - DNA, 25 bp, Homo sapien
tctggtctcataggagcaattctga

SEQ ID NO: 2565571 - DNA, 25 bp, Homo sapien
ttgggtttcaaagcaggtagagcag

SEQ ID NO: 2565572 - DNA, 25 bp, Homo sapien
tgggtttcaaagcaggtagagcagg

SEQ ID NO: 2565573 - DNA, 25 bp, Homo sapien
tttcaagaaaaatcctatcacggcc

SEQ ID NO: 2565574 - DNA, 25 bp, Homo sapien
ccaatacactttcggactcccagga

SEQ ID NO: 2565575 - DNA, 25 bp, Homo sapien
ccttggcaaagtctacagaagctgg

SEQ ID NO: 2565576 - DNA, 25 bp, Homo sapien
cagaagctggaggaataatcattgt

SEQ ID NO: 2565577 - DNA, 25 bp, Homo sapien
ctgggaggatgtgcatttccgctgc

SEQ ID NO: 2565578 - DNA, 25 bp, Homo sapien
gagaggtctgtgcaggctcatctga

SEQ ID NO: 2565579 - DNA, 25 bp, Homo sapien
ctcatctgaatgtgggctccggaac

SEQ ID NO: 2565580 - DNA, 25 bp, Homo sapien
catttccgctgccatgtagcaggcc

SEQ ID NO: 2565581 - DNA, 25 bp, Homo sapien
agaagagcacagaaccttgaggcat

SEQ ID NO: 2565582 - DNA, 25 bp, Homo sapien
gtggagagaagagcacagaaccttg

SEQ ID NO: 2565583 - DNA, 25 bp, Homo sapien
gagaagagcacagaaccttgaggca

SEQ ID NO: 2565584 - DNA, 25 bp, Homo sapien
gagagaagagcacagaaccttgagg

SEQ ID NO: 2565585 - DNA, 25 bp, Homo sapien
gagttctatgagttggtgcattcca

SEQ ID NO: 2565586 - DNA, 25 bp, Homo sapien
gagttggtgcattccacagggtgta

SEQ ID NO: 2565587 - DNA, 25 bp, Homo sapien
ctgcatagatgaaagttggagttct

SEQ ID NO: 2565588 - DNA, 25 bp, Homo sapien
aagttggagttctatgagttggtgc

SEQ ID NO: 2565589 - DNA, 25 bp, Homo sapien
gagtgccatgctgatttttatgcaa

SEQ ID NO: 2565590 - DNA, 25 bp, Homo sapien
gtgccatgctgatttttatgcaaag

SEQ ID NO: 2565591 - DNA, 25 bp, Homo sapien
agtgccatgctgatttttatgcaaa

SEQ ID NO: 2565592 - DNA, 25 bp, Homo sapien
ctgagtgccatgctgatttttatgc

SEQ ID NO: 2565593 - DNA, 25 bp, Homo sapien
ttttcagtttcagacaggctcgggg

SEQ ID NO: 2565594 - DNA, 25 bp, Homo sapien
tttcagacaggctcggggaacctct

SEQ ID NO: 2565595 - DNA, 25 bp, Homo sapien
tcagtttcagacaggctcggggaac

SEQ ID NO: 2565596 - DNA, 25 bp, Homo sapien
catctgttggtgattccaccagaat

SEQ ID NO: 2565597 - DNA, 25 bp, Homo sapien
cacacaggcctatcactgctgcaaa

SEQ ID NO: 2565598 - DNA, 25 bp, Homo sapien
tagtgccccttctcctgatgtggct

SEQ ID NO: 2565599 - DNA, 25 bp, Homo sapien
aagcccactttgtcatccctgttta

SEQ ID NO: 2565600 - DNA, 25 bp, Homo sapien
tccagccccataggcagttacagtg

SEQ ID NO: 2565601 - DNA, 25 bp, Homo sapien
ttggcaatacctcggagctggatgg

SEQ ID NO: 2565602 - DNA, 25 bp, Homo sapien
ttgtggtcccattgccgcctctcct

SEQ ID NO: 2565603 - DNA, 25 bp, Homo sapien
gggcaaccttctggtgccaaagaag

SEQ ID NO: 2565604 - DNA, 25 bp, Homo sapien
gccaaagaagctgccctggcaaaat

SEQ ID NO: 2565605 - DNA, 25 bp, Homo sapien
ccacttctcatagtggtgtttatta

SEQ ID NO: 2565606 - DNA, 25 bp, Homo sapien
ctgcctgtccatcgggaccaactga

SEQ ID NO: 2565607 - DNA, 25 bp, Homo sapien
agggcaacagagcccatcccttatc

SEQ ID NO: 2565608 - DNA, 25 bp, Homo sapien
tcagaatgggacctgcctgtccatc

SEQ ID NO: 2565609 - DNA, 25 bp, Homo sapien
gacgccaaatggataaggacttcag

SEQ ID NO: 2565610 - DNA, 25 bp, Homo sapien
cgccaaatggataaggacttcagag

SEQ ID NO: 2565611 - DNA, 25 bp, Homo sapien
caaatggataaggacttcagagaag

SEQ ID NO: 2565612 - DNA, 25 bp, Homo sapien
caagacgccaaatggataaggactt

SEQ ID NO: 2565613 - DNA, 25 bp, Homo sapien
tgtgagatcctggaccaaatagaat

SEQ ID NO: 2565614 - DNA, 25 bp, Homo sapien
tgccctgtgggaccatgccagctgc

SEQ ID NO: 2565615 - DNA, 25 bp, Homo sapien
cgctgcggggctttgtggccataac

SEQ ID NO: 2565616 - DNA, 25 bp, Homo sapien
gctttgtggccataacggtgccctg

SEQ ID NO: 2565617 - DNA, 25 bp, Homo sapien
ggattattgccctaccttgagccta

SEQ ID NO: 2565618 - DNA, 25 bp, Homo sapien
caggagatcccagctagctgtgctt

SEQ ID NO: 2565619 - DNA, 25 bp, Homo sapien
taggccctgagatggcaggagatcc

SEQ ID NO: 2565620 - DNA, 25 bp, Homo sapien
ttgggaaggaatctcatgcttagct

SEQ ID NO: 2565621 - DNA, 25 bp, Homo sapien
gcatgaagcaccgaaccatggttga

SEQ ID NO: 2565622 - DNA, 25 bp, Homo sapien
cattccatggcttttccgggttcac

SEQ ID NO: 2565623 - DNA, 25 bp, Homo sapien
gggcatagcatgctgtccaaggaca

SEQ ID NO: 2565624 - DNA, 25 bp, Homo sapien
ccgggttcacaaatgcacaaggaga

SEQ ID NO: 2565625 - DNA, 25 bp, Homo sapien
aagaactatgaatggacttctttct

SEQ ID NO: 2565626 - DNA, 25 bp, Homo sapien
gaaggtttgataacctcgtgctggg

SEQ ID NO: 2565627 - DNA, 25 bp, Homo sapien
gggcattgctgcagtctgcgaatcc

SEQ ID NO: 2565628 - DNA, 25 bp, Homo sapien
gaatccagaagatcacttgcagtct

SEQ ID NO: 2565629 - DNA, 25 bp, Homo sapien
aatatcgagaatctacgaagaactc

SEQ ID NO: 2565630 - DNA, 25 bp, Homo sapien
atatcgagaatctacgaagaactca

SEQ ID NO: 2565631 - DNA, 25 bp, Homo sapien
gttccgatgtgaggcctggcgctgt

SEQ ID NO: 2565632 - DNA, 25 bp, Homo sapien
tgtggaggttccaatggccgccatg

SEQ ID NO: 2565633 - DNA, 25 bp, Homo sapien
cccttctgaattggattttgtgagc

SEQ ID NO: 2565634 - DNA, 25 bp, Homo sapien
ttgtgagctgtgtatgtcaggttcc

SEQ ID NO: 2565635 - DNA, 25 bp, Homo sapien
aaagacttggccctgtaagactgag

SEQ ID NO: 2565636 - DNA, 25 bp, Homo sapien
tgagttgctgggaatgcgttgcacc

SEQ ID NO: 2565637 - DNA, 25 bp, Homo sapien
tagaggaatttcagtcattggaaag

SEQ ID NO: 2565638 - DNA, 25 bp, Homo sapien
tgtttttgatgaccacttgggacat

SEQ ID NO: 2565639 - DNA, 25 bp, Homo sapien
tggtgcttcttggtttgtggtggca

SEQ ID NO: 2565640 - DNA, 25 bp, Homo sapien
gcagcagtggtggcttgcaatttgt

SEQ ID NO: 2565641 - DNA, 25 bp, Homo sapien
tgcttcttggtttgtggtggcagca

SEQ ID NO: 2565642 - DNA, 25 bp, Homo sapien
gtgcttcttggtttgtggtggcagc

SEQ ID NO: 2565643 - DNA, 25 bp, Homo sapien
gagagagtgtaattactgaatggcc

SEQ ID NO: 2565644 - DNA, 25 bp, Homo sapien
ttactgaatggccattcattacaga

SEQ ID NO: 2565645 - DNA, 25 bp, Homo sapien
taagtctaagcagattcagtaatgc

SEQ ID NO: 2565646 - DNA, 25 bp, Homo sapien
attttccctagtgctatcattgtag

SEQ ID NO: 2565647 - DNA, 25 bp, Homo sapien
actattactggggagaaggatacca

SEQ ID NO: 2565648 - DNA, 25 bp, Homo sapien
gagcaggcttgtagaggagatggtg

SEQ ID NO: 2565649 - DNA, 25 bp, Homo sapien
caaggtcccaggtggaaggttgact

SEQ ID NO: 2565650 - DNA, 25 bp, Homo sapien
ccatagagtagacatagggtggaga

SEQ ID NO: 2565651 - DNA, 25 bp, Homo sapien
ccctgtgcaggggtcctcactttta

SEQ ID NO: 2565652 - DNA, 25 bp, Homo sapien
tgccctgtgcaggggtcctcacttt

SEQ ID NO: 2565653 - DNA, 25 bp, Homo sapien
caggggtcctcacttttaggcttca

SEQ ID NO: 2565654 - DNA, 25 bp, Homo sapien
tgtgcaggggtcctcacttttaggc

SEQ ID NO: 2565655 - DNA, 25 bp, Homo sapien
ctaatgactattacagaaggtctca

SEQ ID NO: 2565656 - DNA, 25 bp, Homo sapien
taatgactattacagaaggtctcac

SEQ ID NO: 2565657 - DNA, 25 bp, Homo sapien
catctgcatgaagggataaactgtg

SEQ ID NO: 2565658 - DNA, 25 bp, Homo sapien
ggtgtaggtgagctgtctgacattc

SEQ ID NO: 2565659 - DNA, 25 bp, Homo sapien
gacctagcagcaggattaagtgtgc

SEQ ID NO: 2565660 - DNA, 25 bp, Homo sapien
ctctccaggtcgacacatgtgtgct

SEQ ID NO: 2565661 - DNA, 25 bp, Homo sapien
cacagcgatgaaaatgcttcatcat

SEQ ID NO: 2565662 - DNA, 25 bp, Homo sapien
ggaacaacactgacgtgtgtcaaag

SEQ ID NO: 2565663 - DNA, 25 bp, Homo sapien
gatggggtactgaatcgacaggaac

SEQ ID NO: 2565664 - DNA, 25 bp, Homo sapien
gatgaaaatgcttcatcatgcctct

SEQ ID NO: 2565665 - DNA, 25 bp, Homo sapien
gtgggagacttaatgccaggttctg

SEQ ID NO: 2565666 - DNA, 25 bp, Homo sapien
ttggggtgggagacttaatgccagg

SEQ ID NO: 2565667 - DNA, 25 bp, Homo sapien
ggaataggggtggaagagcgatccc

SEQ ID NO: 2565668 - DNA, 25 bp, Homo sapien
aataggggtggaagagcgatccctt

SEQ ID NO: 2565669 - DNA, 25 bp, Homo sapien
cacacaaggccctgggggccagcgt

SEQ ID NO: 2565670 - DNA, 25 bp, Homo sapien
ttccatgagagcagagggtgagcac

SEQ ID NO: 2565671 - DNA, 25 bp, Homo sapien
catgagagcagagggtgagcacaca

SEQ ID NO: 2565672 - DNA, 25 bp, Homo sapien
gcagagggtgagcacacaaggccct

SEQ ID NO: 2565673 - DNA, 25 bp, Homo sapien
ctttcacacattccacttgccccat

SEQ ID NO: 2565674 - DNA, 25 bp, Homo sapien
tgctctaaccactgagctatggagc

SEQ ID NO: 2565675 - DNA, 25 bp, Homo sapien
agcgaggatcgaactcgcgacccct

SEQ ID NO: 2565676 - DNA, 25 bp, Homo sapien
caagaccagtgctctaaccactgag

SEQ ID NO: 2565677 - DNA, 25 bp, Homo sapien
aggccccagcgaggatcgaactcgc

SEQ ID NO: 2565678 - DNA, 25 bp, Homo sapien
ggagcctccaattccagtactccgg

SEQ ID NO: 2565679 - DNA, 25 bp, Homo sapien
gagcctccaattccagtactccggc

SEQ ID NO: 2565680 - DNA, 25 bp, Homo sapien
tgcaggacgttgaatacgagcccat

SEQ ID NO: 2565681 - DNA, 25 bp, Homo sapien
tgtgcaggacgttgaatacgagccc

SEQ ID NO: 2565682 - DNA, 25 bp, Homo sapien
ctgtgtgcaggacgttgaatacgag

SEQ ID NO: 2565683 - DNA, 25 bp, Homo sapien
tgtgtgcaggacgttgaatacgagc

SEQ ID NO: 2565684 - DNA, 25 bp, Homo sapien
tccagctggttttaattgaggggat

SEQ ID NO: 2565685 - DNA, 25 bp, Homo sapien
tagccagcagccgagttgacggcca

SEQ ID NO: 2565686 - DNA, 25 bp, Homo sapien
cagccgagttgacggccaaggccgc

SEQ ID NO: 2565687 - DNA, 25 bp, Homo sapien
tgttagccagcagccgagttgacgg

SEQ ID NO: 2565688 - DNA, 25 bp, Homo sapien
tagcctccggtgaggcgatggggag

SEQ ID NO: 2565689 - DNA, 25 bp, Homo sapien
ctagcctccggtgaggcgatgggga

SEQ ID NO: 2565690 - DNA, 25 bp, Homo sapien
agcctccggtgaggcgatggggagc

SEQ ID NO: 2565691 - DNA, 25 bp, Homo sapien
acggccacagagtgaccttccacat

SEQ ID NO: 2565692 - DNA, 25 bp, Homo sapien
ggccacagagtgaccttccacattc

SEQ ID NO: 2565693 - DNA, 25 bp, Homo sapien
ggaacacggccacagagtgaccttc

SEQ ID NO: 2565694 - DNA, 25 bp, Homo sapien
ggggaacacggccacagagtgacct

SEQ ID NO: 2565695 - DNA, 25 bp, Homo sapien
ctggtggacgcttatgagcaacagc

SEQ ID NO: 2565696 - DNA, 25 bp, Homo sapien
tgactggcaggttgctgggcctcat

SEQ ID NO: 2565697 - DNA, 25 bp, Homo sapien
agctgccaacttggcaggttgtttt

SEQ ID NO: 2565698 - DNA, 25 bp, Homo sapien
tggacgcttatgagcaacagctgcc

SEQ ID NO: 2565699 - DNA, 25 bp, Homo sapien
ccagggtcaacactccctgtcccac

SEQ ID NO: 2565700 - DNA, 25 bp, Homo sapien
ggccgcccagggtcaacactccctg

SEQ ID NO: 2565701 - DNA, 25 bp, Homo sapien
caaagtgtgtggggttgcgggccct

SEQ ID NO: 2565702 - DNA, 25 bp, Homo sapien
cgcccagggtcaacactccctgtcc

SEQ ID NO: 2565703 - DNA, 25 bp, Homo sapien
ctgttccttgcgcaggcactgaggg

SEQ ID NO: 2565704 - DNA, 25 bp, Homo sapien
gccgcttgctgaagatcatgaccgg

SEQ ID NO: 2565705 - DNA, 25 bp, Homo sapien
agtcctgttccttgcgcaggcactg

SEQ ID NO: 2565706 - DNA, 25 bp, Homo sapien
ttgctgaagatcatgaccggcactc

SEQ ID NO: 2565707 - DNA, 25 bp, Homo sapien
tctggctgatggtccggttatagtg

SEQ ID NO: 2565708 - DNA, 25 bp, Homo sapien
tgatggtccggttatagtggttggg

SEQ ID NO: 2565709 - DNA, 25 bp, Homo sapien
gctgatggtccggttatagtggttg

SEQ ID NO: 2565710 - DNA, 25 bp, Homo sapien
catctggctgatggtccggttatag

SEQ ID NO: 2565711 - DNA, 25 bp, Homo sapien
cccacgagcccttgttacactcctg

SEQ ID NO: 2565712 - DNA, 25 bp, Homo sapien
cagtgcctgtctctgatatgctccg

SEQ ID NO: 2565713 - DNA, 25 bp, Homo sapien
tgcctgtctctgatatgctccgctc

SEQ ID NO: 2565714 - DNA, 25 bp, Homo sapien
tgtctctgatatgctccgctcccac

SEQ ID NO: 2565715 - DNA, 25 bp, Homo sapien
tccttggtatccgagctctggagtg

SEQ ID NO: 2565716 - DNA, 25 bp, Homo sapien
tggtatccgagctctggagtgtttg

SEQ ID NO: 2565717 - DNA, 25 bp, Homo sapien
gtgcagccgttctgccccacagaag

SEQ ID NO: 2565718 - DNA, 25 bp, Homo sapien
cttggtatccgagctctggagtgtt

SEQ ID NO: 2565719 - DNA, 25 bp, Homo sapien
ggcttgggccaggctgagccaggtt

SEQ ID NO: 2565720 - DNA, 25 bp, Homo sapien
ccgctgtgggagaaggcttgggcca

SEQ ID NO: 2565721 - DNA, 25 bp, Homo sapien
ttgggccaggctgagccaggtttcc

SEQ ID NO: 2565722 - DNA, 25 bp, Homo sapien
cccgctgtgggagaaggcttgggcc

SEQ ID NO: 2565723 - DNA, 25 bp, Homo sapien
tcagttcccgtagtgcctgacggtc

SEQ ID NO: 2565724 - DNA, 25 bp, Homo sapien
ccgtagtgcctgacggtctatttcc

SEQ ID NO: 2565725 - DNA, 25 bp, Homo sapien
ttcccgtagtgcctgacggtctatt

SEQ ID NO: 2565726 - DNA, 25 bp, Homo sapien
ctgtgtcagttcccgtagtgcctga

SEQ ID NO: 2565727 - DNA, 25 bp, Homo sapien
ctcgtcactcgctatgtcctcactg

SEQ ID NO: 2565728 - DNA, 25 bp, Homo sapien
ctcctcgtcactcgctatgtcctca

SEQ ID NO: 2565729 - DNA, 25 bp, Homo sapien
gtgtgctcctcgtcactcgctatgt

SEQ ID NO: 2565730 - DNA, 25 bp, Homo sapien
atgaccgtgtgctcctcgtcactcg

SEQ ID NO: 2565731 - DNA, 25 bp, Homo sapien
aggaggacagggtgggaccatagac

SEQ ID NO: 2565732 - DNA, 25 bp, Homo sapien
aggaggaagcatccgagtatgtgta

SEQ ID NO: 2565733 - DNA, 25 bp, Homo sapien
aggaagcatccgagtatgtgtagga

SEQ ID NO: 2565734 - DNA, 25 bp, Homo sapien
aggacagggtgggaccatagacttt

SEQ ID NO: 2565735 - DNA, 25 bp, Homo sapien
ccatccccaggggtaggggtcatag

SEQ ID NO: 2565736 - DNA, 25 bp, Homo sapien
aggaaacaggtcaccttggaaggcg

SEQ ID NO: 2565737 - DNA, 25 bp, Homo sapien
gggtcatagggggcccgctctgctg

SEQ ID NO: 2565738 - DNA, 25 bp, Homo sapien
gtcaccttggaaggcgtccctgggc

SEQ ID NO: 2565739 - DNA, 25 bp, Homo sapien
ctgagcctgtcctcggcttctccac

SEQ ID NO: 2565740 - DNA, 25 bp, Homo sapien
agggccggcactggtccagggcgcg

SEQ ID NO: 2565741 - DNA, 25 bp, Homo sapien
ggcactggtccagggcgcgtgcagt

SEQ ID NO: 2565742 - DNA, 25 bp, Homo sapien
ccagggcgcgtgcagtgaagaggac

SEQ ID NO: 2565743 - DNA, 25 bp, Homo sapien
aggggaagatgtgtgcatagtgggc

SEQ ID NO: 2565744 - DNA, 25 bp, Homo sapien
tggaggggaagatgtgtgcatagtg

SEQ ID NO: 2565745 - DNA, 25 bp, Homo sapien
gaggggaagatgtgtgcatagtggg

SEQ ID NO: 2565746 - DNA, 25 bp, Homo sapien
cttggaggggaagatgtgtgcatag

SEQ ID NO: 2565747 - DNA, 25 bp, Homo sapien
ccagggcagcgtcaagagtctgagc

SEQ ID NO: 2565748 - DNA, 25 bp, Homo sapien
gccagggcagcgtcaagagtctgag

SEQ ID NO: 2565749 - DNA, 25 bp, Homo sapien
gtcctgggatcttctttggggtcgc

SEQ ID NO: 2565750 - DNA, 25 bp, Homo sapien
atcttctttggggtcgcccacctgc

SEQ ID NO: 2565751 - DNA, 25 bp, Homo sapien
tgggatcttctttggggtcgcccac

SEQ ID NO: 2565752 - DNA, 25 bp, Homo sapien
tctcaggggatactgtgagtcctgg

SEQ ID NO: 2565753 - DNA, 25 bp, Homo sapien
gaaactgcccagctttcccctggca

SEQ ID NO: 2565754 - DNA, 25 bp, Homo sapien
actgcccagctttcccctggcacag

SEQ ID NO: 2565755 - DNA, 25 bp, Homo sapien
gaactacccctagtccacaggcgct

SEQ ID NO: 2565756 - DNA, 25 bp, Homo sapien
acccctagtccacaggcgcttccct

SEQ ID NO: 2565757 - DNA, 25 bp, Homo sapien
tttaatgacggtcatggcaactttt

SEQ ID NO: 2565758 - DNA, 25 bp, Homo sapien
aacaggtttaatgacggtcatggca

SEQ ID NO: 2565759 - DNA, 25 bp, Homo sapien
aaaaatatcgcccatgatcaacgtg

SEQ ID NO: 2565760 - DNA, 25 bp, Homo sapien
acaatgaaaaatatcgcccatgatc

SEQ ID NO: 2565761 - DNA, 25 bp, Homo sapien
tcatgtcacaacatactgccgctgc

SEQ ID NO: 2565762 - DNA, 25 bp, Homo sapien
ccaaggtatgtcatgtcacaacata

SEQ ID NO: 2565763 - DNA, 25 bp, Homo sapien
atgtcatgtcacaacatactgccgc

SEQ ID NO: 2565764 - DNA, 25 bp, Homo sapien
tccaaggtatgtcatgtcacaacat

SEQ ID NO: 2565765 - DNA, 25 bp, Homo sapien
gcatcgtgacactcagtgaattttg

SEQ ID NO: 2565766 - DNA, 25 bp, Homo sapien
tcgtgacactcagtgaattttgttt

SEQ ID NO: 2565767 - DNA, 25 bp, Homo sapien
taagcatcgtgacactcagtgaatt

SEQ ID NO: 2565768 - DNA, 25 bp, Homo sapien
caggtaagcatcgtgacactcagtg

SEQ ID NO: 2565769 - DNA, 25 bp, Homo sapien
tgcccgtgagaaccaagagtaagcg

SEQ ID NO: 2565770 - DNA, 25 bp, Homo sapien
ccatggataagtaaaggctgacccc

SEQ ID NO: 2565771 - DNA, 25 bp, Homo sapien
gtgcaaatacaagccagtgcccgtg

SEQ ID NO: 2565772 - DNA, 25 bp, Homo sapien
gagtaagcggatcccgttcagacca

SEQ ID NO: 2565773 - DNA, 25 bp, Homo sapien
aggcaaaagccacaataccacttcc

SEQ ID NO: 2565774 - DNA, 25 bp, Homo sapien
tctcagaggctgaccaacctccacc

SEQ ID NO: 2565775 - DNA, 25 bp, Homo sapien
acttcccacttgagaggtggttggg

SEQ ID NO: 2565776 - DNA, 25 bp, Homo sapien
ctgcttctttgcctatctgtctcag

SEQ ID NO: 2565777 - DNA, 25 bp, Homo sapien
cggccccatcctttttacatataga

SEQ ID NO: 2565778 - DNA, 25 bp, Homo sapien
cccagtagcttgtggcacccagcta

SEQ ID NO: 2565779 - DNA, 25 bp, Homo sapien
gaatcagggtaaacaggctttacag

SEQ ID NO: 2565780 - DNA, 25 bp, Homo sapien
taagtactcctgttcaattatctgg

SEQ ID NO: 2565781 - DNA, 25 bp, Homo sapien
tgaggaacgactatctcaaccgcca

SEQ ID NO: 2565782 - DNA, 25 bp, Homo sapien
tccattctaactgtcactcagccat

SEQ ID NO: 2565783 - DNA, 25 bp, Homo sapien
tattgcttccctaatgtcctgagga

SEQ ID NO: 2565784 - DNA, 25 bp, Homo sapien
gagtctcatggaagggacggtaccc

SEQ ID NO: 2565785 - DNA, 25 bp, Homo sapien
aatgtccccattggcctacaccttg

SEQ ID NO: 2565786 - DNA, 25 bp, Homo sapien
gttagctcaagtgccaaatgtcccc

SEQ ID NO: 2565787 - DNA, 25 bp, Homo sapien
tggacttcatctgcgtttcaaacag

SEQ ID NO: 2565788 - DNA, 25 bp, Homo sapien
gcttttgccagtaaggaaattcaag

SEQ ID NO: 2565789 - DNA, 25 bp, Homo sapien
tgcgagccgagcagaaaccaatggc

SEQ ID NO: 2565790 - DNA, 25 bp, Homo sapien
tctcgggtaaagtgacattctccgc

SEQ ID NO: 2565791 - DNA, 25 bp, Homo sapien
aaaggctatgcatggatttatctca

SEQ ID NO: 2565792 - DNA, 25 bp, Homo sapien
tggcccatcgtagtgaatttctcgg

SEQ ID NO: 2565793 - DNA, 25 bp, Homo sapien
gcaagtgcctgatttaggatacaca

SEQ ID NO: 2565794 - DNA, 25 bp, Homo sapien
catgtagttagattcagcaagtgcc

SEQ ID NO: 2565795 - DNA, 25 bp, Homo sapien
gagctctttcttcacgtggccactg

SEQ ID NO: 2565796 - DNA, 25 bp, Homo sapien
tcacgtgtccgaaaccaagatgctg

SEQ ID NO: 2565797 - DNA, 25 bp, Homo sapien
catattcttgtctagtgctcacaga

SEQ ID NO: 2565798 - DNA, 25 bp, Homo sapien
gagtttgttttctaaccatggcaga

SEQ ID NO: 2565799 - DNA, 25 bp, Homo sapien
tcacgttgacattgatggacacaat

SEQ ID NO: 2565800 - DNA, 25 bp, Homo sapien
tattaaccaccttaatcacgttgac

SEQ ID NO: 2565801 - DNA, 25 bp, Homo sapien
tggacaaatctaggaaactcagtga

SEQ ID NO: 2565802 - DNA, 25 bp, Homo sapien
tacgggcttatcagtagattggaca

SEQ ID NO: 2565803 - DNA, 25 bp, Homo sapien
catagcaatatgcagtggtcttaca

SEQ ID NO: 2565804 - DNA, 25 bp, Homo sapien
gagtcataataaacgggatatcagc

SEQ ID NO: 2565805 - DNA, 25 bp, Homo sapien
cggagcacgagcagccagacgagca

SEQ ID NO: 2565806 - DNA, 25 bp, Homo sapien
tccgagaaccgccggccagtgctgg

SEQ ID NO: 2565807 - DNA, 25 bp, Homo sapien
tcgtcgtccgcgcagagtttgtgct

SEQ ID NO: 2565808 - DNA, 25 bp, Homo sapien
tgctgcattcgtcgtccgcgcagag

SEQ ID NO: 2565809 - DNA, 25 bp, Homo sapien
cttcatctgagcctgaagatctgtg

SEQ ID NO: 2565810 - DNA, 25 bp, Homo sapien
ccagactggagagcaattccgcttc

SEQ ID NO: 2565811 - DNA, 25 bp, Homo sapien
tcttcatctgagcctgaagatctgt

SEQ ID NO: 2565812 - DNA, 25 bp, Homo sapien
ttcatctgagcctgaagatctgtgc

SEQ ID NO: 2565813 - DNA, 25 bp, Homo sapien
caatccgggcctgtgaaatcttcaa

SEQ ID NO: 2565814 - DNA, 25 bp, Homo sapien
ttcacaaaacgacaatccgggcctg

SEQ ID NO: 2565815 - DNA, 25 bp, Homo sapien
tcaagagcctcaccgcggtacatta

SEQ ID NO: 2565816 - DNA, 25 bp, Homo sapien
gtaaacatatacaggatcacctttt

SEQ ID NO: 2565817 - DNA, 25 bp, Homo sapien
gaacttgtagctcttctttggtata

SEQ ID NO: 2565818 - DNA, 25 bp, Homo sapien
gaaaatatccaaaagtgcgtccaac

SEQ ID NO: 2565819 - DNA, 25 bp, Homo sapien
tttggtatattcatgaactacctgg

SEQ ID NO: 2565820 - DNA, 25 bp, Homo sapien
tcatgaactacctggattaaatctt

SEQ ID NO: 2565821 - DNA, 25 bp, Homo sapien
gattcaaatgaagcctgctctccct

SEQ ID NO: 2565822 - DNA, 25 bp, Homo sapien
aagaccatcatctacattgtcaggg

SEQ ID NO: 2565823 - DNA, 25 bp, Homo sapien
ggatatttctcaacgccagactttg

SEQ ID NO: 2565824 - DNA, 25 bp, Homo sapien
tgacaatagagaagatagtgtcccc

SEQ ID NO: 2565825 - DNA, 25 bp, Homo sapien
gaagcacggaagaccttatctagga

SEQ ID NO: 2565826 - DNA, 25 bp, Homo sapien
gagtggtgcactacccagggattcc

SEQ ID NO: 2565827 - DNA, 25 bp, Homo sapien
ttccatattatagggcaggctctcc

SEQ ID NO: 2565828 - DNA, 25 bp, Homo sapien
gatgctccactgaaagcgtgtgcag

SEQ ID NO: 2565829 - DNA, 25 bp, Homo sapien
gtccccaatcacacgttggtccaag

SEQ ID NO: 2565830 - DNA, 25 bp, Homo sapien
tccaagtgggtgggttcttcaggaa

SEQ ID NO: 2565831 - DNA, 25 bp, Homo sapien
caatcacacgttggtccaagtgggt

SEQ ID NO: 2565832 - DNA, 25 bp, Homo sapien
tgagtgtccccaatcacacgttggt

SEQ ID NO: 2565833 - DNA, 25 bp, Homo sapien
tgcatcaatagcatccataggagtg

SEQ ID NO: 2565834 - DNA, 25 bp, Homo sapien
agaaggattgcgttttccaaaggtg

SEQ ID NO: 2565835 - DNA, 25 bp, Homo sapien
ttgccggctcttcggcggctgtctc

SEQ ID NO: 2565836 - DNA, 25 bp, Homo sapien
caaaggtgtgacacttgccggctct

SEQ ID NO: 2565837 - DNA, 25 bp, Homo sapien
tacatttcaagtgactgtctttctc

SEQ ID NO: 2565838 - DNA, 25 bp, Homo sapien
ctctcctggctaaactgaaaggtcc

SEQ ID NO: 2565839 - DNA, 25 bp, Homo sapien
ttacatttcaagtgactgtctttct

SEQ ID NO: 2565840 - DNA, 25 bp, Homo sapien
tttctctcctggctaaactgaaagg

SEQ ID NO: 2565841 - DNA, 25 bp, Homo sapien
ctccctccacgatgaaccaatttat

SEQ ID NO: 2565842 - DNA, 25 bp, Homo sapien
tgaaccaatttatgccacagattgt

SEQ ID NO: 2565843 - DNA, 25 bp, Homo sapien
taccatcaggtaaatacttctcttc

SEQ ID NO: 2565844 - DNA, 25 bp, Homo sapien
tgccacagattgttctaccatcagg

SEQ ID NO: 2565845 - DNA, 25 bp, Homo sapien
caagtcggcatcttataacactgcg

SEQ ID NO: 2565846 - DNA, 25 bp, Homo sapien
tattcctagcacaatttctggtaca

SEQ ID NO: 2565847 - DNA, 25 bp, Homo sapien
aacactgcgcccttatatcttgcca

SEQ ID NO: 2565848 - DNA, 25 bp, Homo sapien
ttttgacaatccctctcaagtcggc

SEQ ID NO: 2565849 - DNA, 25 bp, Homo sapien
ggtgatggtcccacggattctctgc

SEQ ID NO: 2565850 - DNA, 25 bp, Homo sapien
taaacagctcctgtgtagggtaaga

SEQ ID NO: 2565851 - DNA, 25 bp, Homo sapien
tgaactgacacacaaaaaactatgg

SEQ ID NO: 2565852 - DNA, 25 bp, Homo sapien
ccagagttgtcacagggctgcaaga

SEQ ID NO: 2565853 - DNA, 25 bp, Homo sapien
ttcagtgcagggatagggaacccaa

SEQ ID NO: 2565854 - DNA, 25 bp, Homo sapien
gagtacaccaatcttgcagaggagg

SEQ ID NO: 2565855 - DNA, 25 bp, Homo sapien
cacacaattgtgacccctgagagaa

SEQ ID NO: 2565856 - DNA, 25 bp, Homo sapien
aaataggtgagctctacaacctccc

SEQ ID NO: 2565857 - DNA, 25 bp, Homo sapien
tgcgctcgctgtctcacattcttgc

SEQ ID NO: 2565858 - DNA, 25 bp, Homo sapien
gctgtctcacattcttgccgacact

SEQ ID NO: 2565859 - DNA, 25 bp, Homo sapien
tcgctgtctcacattcttgccgaca

SEQ ID NO: 2565860 - DNA, 25 bp, Homo sapien
gctcgctgtctcacattcttgccga

SEQ ID NO: 2565861 - DNA, 25 bp, Homo sapien
cgtggaaggaccaccgctcagatgg

SEQ ID NO: 2565862 - DNA, 25 bp, Homo sapien
ctgtcacagcgtggaaggaccaccg

SEQ ID NO: 2565863 - DNA, 25 bp, Homo sapien
ggcgccactgcagtgcgcggccttt

SEQ ID NO: 2565864 - DNA, 25 bp, Homo sapien
acagcgtggaaggaccaccgctcag

SEQ ID NO: 2565865 - DNA, 25 bp, Homo sapien
gaaaagcaggtctctcgtgccggcc

SEQ ID NO: 2565866 - DNA, 25 bp, Homo sapien
gagaaaagcaggtctctcgtgccgg

SEQ ID NO: 2565867 - DNA, 25 bp, Homo sapien
agcaggtctctcgtgccggcccgga

SEQ ID NO: 2565868 - DNA, 25 bp, Homo sapien
aaagcaggtctctcgtgccggcccg

SEQ ID NO: 2565869 - DNA, 25 bp, Homo sapien
ggacgggagagaagagcgaataggg

SEQ ID NO: 2565870 - DNA, 25 bp, Homo sapien
gggacgggagagaagagcgaatagg

SEQ ID NO: 2565871 - DNA, 25 bp, Homo sapien
ggggacgggagagaagagcgaatag

SEQ ID NO: 2565872 - DNA, 25 bp, Homo sapien
gccactgcccctggcgcacctcaag

SEQ ID NO: 2565873 - DNA, 25 bp, Homo sapien
aggcaccaaaggagccggccggcga

SEQ ID NO: 2565874 - DNA, 25 bp, Homo sapien
aaggcaccaaaggagccggccggcg

SEQ ID NO: 2565875 - DNA, 25 bp, Homo sapien
ggcaccaaaggagccggccggcgag

SEQ ID NO: 2565876 - DNA, 25 bp, Homo sapien
caattccctgcggaatggcactggg

SEQ ID NO: 2565877 - DNA, 25 bp, Homo sapien
tgtagaacagctgaacgcaagcgac

SEQ ID NO: 2565878 - DNA, 25 bp, Homo sapien
tatgaaggctgcgtagagcacagac

SEQ ID NO: 2565879 - DNA, 25 bp, Homo sapien
cggactctgggattgaacttcgcct

SEQ ID NO: 2565880 - DNA, 25 bp, Homo sapien
catccacccgcctgtgacagcttgg

SEQ ID NO: 2565881 - DNA, 25 bp, Homo sapien
ttctcctttgcacagacaatcagtg

SEQ ID NO: 2565882 - DNA, 25 bp, Homo sapien
tgctttcctcggatctgacacactc

SEQ ID NO: 2565883 - DNA, 25 bp, Homo sapien
acagcatagaaacgtcttgctttcc

SEQ ID NO: 2565884 - DNA, 25 bp, Homo sapien
agtgctgtcacttcgtaagtactca

SEQ ID NO: 2565885 - DNA, 25 bp, Homo sapien
gagtgacgaaaccttctcaaacaca

SEQ ID NO: 2565886 - DNA, 25 bp, Homo sapien
gctgtcacttcgtaagtactcaata

SEQ ID NO: 2565887 - DNA, 25 bp, Homo sapien
aagagtgacgaaaccttctcaaaca

SEQ ID NO: 2565888 - DNA, 25 bp, Homo sapien
caaggacagttctccataagaaaat

SEQ ID NO: 2565889 - DNA, 25 bp, Homo sapien
aacgaagcaattcccaagaaggcag

SEQ ID NO: 2565890 - DNA, 25 bp, Homo sapien
aagaaaatggcaaacgaagcaattc

SEQ ID NO: 2565891 - DNA, 25 bp, Homo sapien
caagaaggcagtgataaatacaggt

SEQ ID NO: 2565892 - DNA, 25 bp, Homo sapien
ccactgtgccggctgactggttatt

SEQ ID NO: 2565893 - DNA, 25 bp, Homo sapien
tttaaggcttatcatacacatcatg
